United States Patent Application Publication US 2026/0258423 A1, published September 3, 2026 (application 18/715,682).

The application's sequence listing, which the Patent Office published only in electronic form, follows.

SEQUENCE LISTING (301742 sequences)

SEQ ID NO: 1 - DNA, 20 bp, synthetic construct
  source 1..20: mol_type = other DNA
atgtcttgatcctctaggtc

SEQ ID NO: 2 - DNA, 20 bp, synthetic construct
  source 1..20: mol_type = other DNA
tatgtcttgatcctctaggt

SEQ ID NO: 3 - DNA, 20 bp, synthetic construct
  source 1..20: mol_type = other DNA
ttatgtcttgatcctctagg

SEQ ID NO: 4 - DNA, 20 bp, synthetic construct
  source 1..20: mol_type = other DNA
attatgtcttgatcctctag

SEQ ID NO: 5 - DNA, 20 bp, synthetic construct
  source 1..20: mol_type = other DNA
cattatgtcttgatcctcta

SEQ ID NO: 6 - DNA, 20 bp, synthetic construct
  source 1..20: mol_type = other DNA
ccattatgtcttgatcctct

SEQ ID NO: 7 - DNA, 20 bp, synthetic construct
  source 1..20: mol_type = other DNA
cccattatgtcttgatcctc

SEQ ID NO: 8 - DNA, 20 bp, synthetic construct
  source 1..20: mol_type = other DNA
tcccattatgtcttgatcct

SEQ ID NO: 9 - DNA, 20 bp, synthetic construct
  source 1..20: mol_type = other DNA
ctcccattatgtcttgatcc

SEQ ID NO: 10 - DNA, 20 bp, synthetic construct
  source 1..20: mol_type = other DNA
gctcccattatgtcttgatc

SEQ ID NO: 11 - DNA, 20 bp, synthetic construct
  source 1..20: mol_type = other DNA
tgctcccattatgtcttgat

SEQ ID NO: 12 - DNA, 20 bp, synthetic construct
  source 1..20: mol_type = other DNA
atgctcccattatgtcttga

SEQ ID NO: 13 - DNA, 20 bp, synthetic construct
  source 1..20: mol_type = other DNA
aatgctcccattatgtcttg

SEQ ID NO: 14 - DNA, 20 bp, synthetic construct
  source 1..20: mol_type = other DNA
aaatgctcccattatgtctt

SEQ ID NO: 15 - DNA, 20 bp, synthetic construct
  source 1..20: mol_type = other DNA
aaaatgctcccattatgtct

SEQ ID NO: 16 - DNA, 20 bp, synthetic construct
  source 1..20: mol_type = other DNA
aaaaatgctcccattatgtc

SEQ ID NO: 17 - DNA, 20 bp, synthetic construct
  source 1..20: mol_type = other DNA
taaaaatgctcccattatgt

SEQ ID NO: 18 - DNA, 20 bp, synthetic construct
  source 1..20: mol_type = other DNA
ctaaaaatgctcccattatg

SEQ ID NO: 19 - DNA, 20 bp, synthetic construct
  source 1..20: mol_type = other DNA
tctaaaaatgctcccattat

SEQ ID NO: 20 - DNA, 20 bp, synthetic construct
  source 1..20: mol_type = other DNA
gtctaaaaatgctcccatta

SEQ ID NO: 21 - DNA, 20 bp, synthetic construct
  source 1..20: mol_type = other DNA
tgtctaaaaatgctcccatt

SEQ ID NO: 22 - DNA, 20 bp, synthetic construct
  source 1..20: mol_type = other DNA
ttgtctaaaaatgctcccat

SEQ ID NO: 23 - DNA, 20 bp, synthetic construct
  source 1..20: mol_type = other DNA
cttgtctaaaaatgctccca

SEQ ID NO: 24 - DNA, 20 bp, synthetic construct
  source 1..20: mol_type = other DNA
gcttgtctaaaaatgctccc

SEQ ID NO: 25 - DNA, 20 bp, synthetic construct
  source 1..20: mol_type = other DNA
ggcttgtctaaaaatgctcc

SEQ ID NO: 26 - DNA, 20 bp, synthetic construct
  source 1..20: mol_type = other DNA
tggcttgtctaaaaatgctc

SEQ ID NO: 27 - DNA, 20 bp, synthetic construct
  source 1..20: mol_type = other DNA
ttggcttgtctaaaaatgct

SEQ ID NO: 28 - DNA, 20 bp, synthetic construct
  source 1..20: mol_type = other DNA
tttggcttgtctaaaaatgc

SEQ ID NO: 29 - DNA, 20 bp, synthetic construct
  source 1..20: mol_type = other DNA
ctttggcttgtctaaaaatg

SEQ ID NO: 30 - DNA, 20 bp, synthetic construct
  source 1..20: mol_type = other DNA
tctttggcttgtctaaaaat

SEQ ID NO: 31 - DNA, 20 bp, synthetic construct
  source 1..20: mol_type = other DNA
atctttggcttgtctaaaaa

SEQ ID NO: 32 - DNA, 20 bp, synthetic construct
  source 1..20: mol_type = other DNA
catctttggcttgtctaaaa

SEQ ID NO: 33 - DNA, 20 bp, synthetic construct
  source 1..20: mol_type = other DNA
ccatctttggcttgtctaaa

SEQ ID NO: 34 - DNA, 20 bp, synthetic construct
  source 1..20: mol_type = other DNA
tccatctttggcttgtctaa

SEQ ID NO: 35 - DNA, 20 bp, synthetic construct
  source 1..20: mol_type = other DNA
ttccatctttggcttgtcta

SEQ ID NO: 36 - DNA, 20 bp, synthetic construct
  source 1..20: mol_type = other DNA
tttccatctttggcttgtct

SEQ ID NO: 37 - DNA, 20 bp, synthetic construct
  source 1..20: mol_type = other DNA
ttttccatctttggcttgtc

SEQ ID NO: 38 - DNA, 20 bp, synthetic construct
  source 1..20: mol_type = other DNA
cttttccatctttggcttgt

SEQ ID NO: 39 - DNA, 20 bp, synthetic construct
  source 1..20: mol_type = other DNA
gcttttccatctttggcttg

SEQ ID NO: 40 - DNA, 20 bp, synthetic construct
  source 1..20: mol_type = other DNA
tgcttttccatctttggctt

SEQ ID NO: 41 - DNA, 20 bp, synthetic construct
  source 1..20: mol_type = other DNA
atgcttttccatctttggct

SEQ ID NO: 42 - DNA, 20 bp, synthetic construct
  source 1..20: mol_type = other DNA
tatgcttttccatctttggc

SEQ ID NO: 43 - DNA, 20 bp, synthetic construct
  source 1..20: mol_type = other DNA
ttatgcttttccatctttgg

SEQ ID NO: 44 - DNA, 20 bp, synthetic construct
  source 1..20: mol_type = other DNA
attatgcttttccatctttg

SEQ ID NO: 45 - DNA, 20 bp, synthetic construct
  source 1..20: mol_type = other DNA
cattatgcttttccatcttt

SEQ ID NO: 46 - DNA, 20 bp, synthetic construct
  source 1..20: mol_type = other DNA
gcattatgcttttccatctt

SEQ ID NO: 47 - DNA, 20 bp, synthetic construct
  source 1..20: mol_type = other DNA
ggcattatgcttttccatct

SEQ ID NO: 48 - DNA, 20 bp, synthetic construct
  source 1..20: mol_type = other DNA
gggcattatgcttttccatc

SEQ ID NO: 49 - DNA, 20 bp, synthetic construct
  source 1..20: mol_type = other DNA
tgggcattatgcttttccat

SEQ ID NO: 50 - DNA, 20 bp, synthetic construct
  source 1..20: mol_type = other DNA
ctgggcattatgcttttcca

SEQ ID NO: 51 - DNA, 20 bp, synthetic construct
  source 1..20: mol_type = other DNA
cctgggcattatgcttttcc

SEQ ID NO: 52 - DNA, 20 bp, synthetic construct
  source 1..20: mol_type = other DNA
ccctgggcattatgcttttc

SEQ ID NO: 53 - DNA, 20 bp, synthetic construct
  source 1..20: mol_type = other DNA
cccctgggcattatgctttt

SEQ ID NO: 54 - DNA, 20 bp, synthetic construct
  source 1..20: mol_type = other DNA
gcccctgggcattatgcttt

SEQ ID NO: 55 - DNA, 20 bp, synthetic construct
  source 1..20: mol_type = other DNA
tgcccctgggcattatgctt

SEQ ID NO: 56 - DNA, 20 bp, synthetic construct
  source 1..20: mol_type = other DNA
ctgcccctgggcattatgct

SEQ ID NO: 57 - DNA, 20 bp, synthetic construct
  source 1..20: mol_type = other DNA
cctgcccctgggcattatgc

SEQ ID NO: 58 - DNA, 20 bp, synthetic construct
  source 1..20: mol_type = other DNA
ccctgcccctgggcattatg

SEQ ID NO: 59 - DNA, 20 bp, synthetic construct
  source 1..20: mol_type = other DNA
accctgcccctgggcattat

SEQ ID NO: 60 - DNA, 20 bp, synthetic construct
  source 1..20: mol_type = other DNA
taccctgcccctgggcatta

SEQ ID NO: 61 - DNA, 20 bp, synthetic construct
  source 1..20: mol_type = other DNA
ttaccctgcccctgggcatt

SEQ ID NO: 62 - DNA, 20 bp, synthetic construct
  source 1..20: mol_type = other DNA
attaccctgcccctgggcat

SEQ ID NO: 63 - DNA, 20 bp, synthetic construct
  source 1..20: mol_type = other DNA
cattaccctgcccctgggca

SEQ ID NO: 64 - DNA, 20 bp, synthetic construct
  source 1..20: mol_type = other DNA
ccattaccctgcccctgggc

SEQ ID NO: 65 - DNA, 20 bp, synthetic construct
  source 1..20: mol_type = other DNA
cccattaccctgcccctggg

SEQ ID NO: 66 - DNA, 20 bp, synthetic construct
  source 1..20: mol_type = other DNA
acccattaccctgcccctgg

SEQ ID NO: 67 - DNA, 20 bp, synthetic construct
  source 1..20: mol_type = other DNA
aacccattaccctgcccctg

SEQ ID NO: 68 - DNA, 20 bp, synthetic construct
  source 1..20: mol_type = other DNA
caacccattaccctgcccct

SEQ ID NO: 69 - DNA, 20 bp, synthetic construct
  source 1..20: mol_type = other DNA
gcaacccattaccctgcccc

SEQ ID NO: 70 - DNA, 20 bp, synthetic construct
  source 1..20: mol_type = other DNA
cgcaacccattaccctgccc

SEQ ID NO: 71 - DNA, 20 bp, synthetic construct
  source 1..20: mol_type = other DNA
tcgcaacccattaccctgcc

SEQ ID NO: 72 - DNA, 20 bp, synthetic construct
  source 1..20: mol_type = other DNA
atcgcaacccattaccctgc

SEQ ID NO: 73 - DNA, 20 bp, synthetic construct
  source 1..20: mol_type = other DNA
tatcgcaacccattaccctg

SEQ ID NO: 74 - DNA, 20 bp, synthetic construct
  source 1..20: mol_type = other DNA
atatcgcaacccattaccct

SEQ ID NO: 75 - DNA, 20 bp, synthetic construct
  source 1..20: mol_type = other DNA
catatcgcaacccattaccc

SEQ ID NO: 76 - DNA, 20 bp, synthetic construct
  source 1..20: mol_type = other DNA
ccatatcgcaacccattacc

SEQ ID NO: 77 - DNA, 20 bp, synthetic construct
  source 1..20: mol_type = other DNA
cccatatcgcaacccattac

SEQ ID NO: 78 - DNA, 20 bp, synthetic construct
  source 1..20: mol_type = other DNA
gcccatatcgcaacccatta

SEQ ID NO: 79 - DNA, 20 bp, synthetic construct
  source 1..20: mol_type = other DNA
agcccatatcgcaacccatt

SEQ ID NO: 80 - DNA, 20 bp, synthetic construct
  source 1..20: mol_type = other DNA
tagcccatatcgcaacccat

SEQ ID NO: 81 - DNA, 20 bp, synthetic construct
  source 1..20: mol_type = other DNA
ttagcccatatcgcaaccca

SEQ ID NO: 82 - DNA, 20 bp, synthetic construct
  source 1..20: mol_type = other DNA
cttagcccatatcgcaaccc

SEQ ID NO: 83 - DNA, 20 bp, synthetic construct
  source 1..20: mol_type = other DNA
gcttagcccatatcgcaacc

SEQ ID NO: 84 - DNA, 20 bp, synthetic construct
  source 1..20: mol_type = other DNA
tgcttagcccatatcgcaac

SEQ ID NO: 85 - DNA, 20 bp, synthetic construct
  source 1..20: mol_type = other DNA
ctgcttagcccatatcgcaa

SEQ ID NO: 86 - DNA, 20 bp, synthetic construct
  source 1..20: mol_type = other DNA
gctgcttagcccatatcgca

SEQ ID NO: 87 - DNA, 20 bp, synthetic construct
  source 1..20: mol_type = other DNA
tgctgcttagcccatatcgc

SEQ ID NO: 88 - DNA, 20 bp, synthetic construct
  source 1..20: mol_type = other DNA
atgctgcttagcccatatcg

SEQ ID NO: 89 - DNA, 20 bp, synthetic construct
  source 1..20: mol_type = other DNA
catgctgcttagcccatatc

SEQ ID NO: 90 - DNA, 20 bp, synthetic construct
  source 1..20: mol_type = other DNA
gcatgctgcttagcccatat

SEQ ID NO: 91 - DNA, 20 bp, synthetic construct
  source 1..20: mol_type = other DNA
tgcatgctgcttagcccata

SEQ ID NO: 92 - DNA, 20 bp, synthetic construct
  source 1..20: mol_type = other DNA
ttgcatgctgcttagcccat

SEQ ID NO: 93 - DNA, 20 bp, synthetic construct
  source 1..20: mol_type = other DNA
cttgcatgctgcttagccca

SEQ ID NO: 94 - DNA, 20 bp, synthetic construct
  source 1..20: mol_type = other DNA
ccttgcatgctgcttagccc

SEQ ID NO: 95 - DNA, 20 bp, synthetic construct
  source 1..20: mol_type = other DNA
gccttgcatgctgcttagcc

SEQ ID NO: 96 - DNA, 20 bp, synthetic construct
  source 1..20: mol_type = other DNA
agccttgcatgctgcttagc

SEQ ID NO: 97 - DNA, 20 bp, synthetic construct
  source 1..20: mol_type = other DNA
cagccttgcatgctgcttag

SEQ ID NO: 98 - DNA, 20 bp, synthetic construct
  source 1..20: mol_type = other DNA
ccagccttgcatgctgctta

SEQ ID NO: 99 - DNA, 20 bp, synthetic construct
  source 1..20: mol_type = other DNA
gccagccttgcatgctgctt

SEQ ID NO: 100 - DNA, 20 bp, synthetic construct
  source 1..20: mol_type = other DNA
cgccagccttgcatgctgct

SEQ ID NO: 101 - DNA, 20 bp, synthetic construct
  source 1..20: mol_type = other DNA
acgccagccttgcatgctgc

SEQ ID NO: 102 - DNA, 20 bp, synthetic construct
  source 1..20: mol_type = other DNA
cacgccagccttgcatgctg

SEQ ID NO: 103 - DNA, 20 bp, synthetic construct
  source 1..20: mol_type = other DNA
acacgccagccttgcatgct

SEQ ID NO: 104 - DNA, 20 bp, synthetic construct
  source 1..20: mol_type = other DNA
aacacgccagccttgcatgc

SEQ ID NO: 105 - DNA, 20 bp, synthetic construct
  source 1..20: mol_type = other DNA
caacacgccagccttgcatg

SEQ ID NO: 106 - DNA, 20 bp, synthetic construct
  source 1..20: mol_type = other DNA
tcaacacgccagccttgcat

SEQ ID NO: 107 - DNA, 20 bp, synthetic construct
  source 1..20: mol_type = other DNA
ttcaacacgccagccttgca

SEQ ID NO: 108 - DNA, 20 bp, synthetic construct
  source 1..20: mol_type = other DNA
tttcaacacgccagccttgc

SEQ ID NO: 109 - DNA, 20 bp, synthetic construct
  source 1..20: mol_type = other DNA
atttcaacacgccagccttg

SEQ ID NO: 110 - DNA, 20 bp, synthetic construct
  source 1..20: mol_type = other DNA
catttcaacacgccagcctt

SEQ ID NO: 111 - DNA, 20 bp, synthetic construct
  source 1..20: mol_type = other DNA
ccatttcaacacgccagcct

SEQ ID NO: 112 - DNA, 20 bp, synthetic construct
  source 1..20: mol_type = other DNA
tccatttcaacacgccagcc

SEQ ID NO: 113 - DNA, 20 bp, synthetic construct
  source 1..20: mol_type = other DNA
ctccatttcaacacgccagc

SEQ ID NO: 114 - DNA, 20 bp, synthetic construct
  source 1..20: mol_type = other DNA
cctccatttcaacacgccag

SEQ ID NO: 115 - DNA, 20 bp, synthetic construct
  source 1..20: mol_type = other DNA
tcctccatttcaacacgcca

SEQ ID NO: 116 - DNA, 20 bp, synthetic construct
  source 1..20: mol_type = other DNA
atcctccatttcaacacgcc

SEQ ID NO: 117 - DNA, 20 bp, synthetic construct
  source 1..20: mol_type = other DNA
catcctccatttcaacacgc

SEQ ID NO: 118 - DNA, 20 bp, synthetic construct
  source 1..20: mol_type = other DNA
gcatcctccatttcaacacg

SEQ ID NO: 119 - DNA, 20 bp, synthetic construct
  source 1..20: mol_type = other DNA
tgcatcctccatttcaacac

SEQ ID NO: 120 - DNA, 20 bp, synthetic construct
  source 1..20: mol_type = other DNA
gtgcatcctccatttcaaca

SEQ ID NO: 121 - DNA, 20 bp, synthetic construct
  source 1..20: mol_type = other DNA
tgtgcatcctccatttcaac

SEQ ID NO: 122 - DNA, 20 bp, synthetic construct
  source 1..20: mol_type = other DNA
atgtgcatcctccatttcaa

SEQ ID NO: 123 - DNA, 20 bp, synthetic construct
  source 1..20: mol_type = other DNA
tatgtgcatcctccatttca

SEQ ID NO: 124 - DNA, 20 bp, synthetic construct
  source 1..20: mol_type = other DNA
gtatgtgcatcctccatttc

SEQ ID NO: 125 - DNA, 20 bp, synthetic construct
  source 1..20: mol_type = other DNA
cgtatgtgcatcctccattt

SEQ ID NO: 126 - DNA, 20 bp, synthetic construct
  source 1..20: mol_type = other DNA
ccgtatgtgcatcctccatt

SEQ ID NO: 127 - DNA, 20 bp, synthetic construct
  source 1..20: mol_type = other DNA
gccgtatgtgcatcctccat

SEQ ID NO: 128 - DNA, 20 bp, synthetic construct
  source 1..20: mol_type = other DNA
agccgtatgtgcatcctcca

SEQ ID NO: 129 - DNA, 20 bp, synthetic construct
  source 1..20: mol_type = other DNA
cagccgtatgtgcatcctcc

SEQ ID NO: 130 - DNA, 20 bp, synthetic construct
  source 1..20: mol_type = other DNA
acagccgtatgtgcatcctc

SEQ ID NO: 131 - DNA, 20 bp, synthetic construct
  source 1..20: mol_type = other DNA
cacagccgtatgtgcatcct

SEQ ID NO: 132 - DNA, 20 bp, synthetic construct
  source 1..20: mol_type = other DNA
tcacagccgtatgtgcatcc

SEQ ID NO: 133 - DNA, 20 bp, synthetic construct
  source 1..20: mol_type = other DNA
atcacagccgtatgtgcatc

SEQ ID NO: 134 - DNA, 20 bp, synthetic construct
  source 1..20: mol_type = other DNA
gatcacagccgtatgtgcat

SEQ ID NO: 135 - DNA, 20 bp, synthetic construct
  source 1..20: mol_type = other DNA
cgatcacagccgtatgtgca

SEQ ID NO: 136 - DNA, 20 bp, synthetic construct
  source 1..20: mol_type = other DNA
ccgatcacagccgtatgtgc

SEQ ID NO: 137 - DNA, 20 bp, synthetic construct
  source 1..20: mol_type = other DNA
accgatcacagccgtatgtg

SEQ ID NO: 138 - DNA, 20 bp, synthetic construct
  source 1..20: mol_type = other DNA
aaccgatcacagccgtatgt

SEQ ID NO: 139 - DNA, 20 bp, synthetic construct
  source 1..20: mol_type = other DNA
aaaccgatcacagccgtatg

SEQ ID NO: 140 - DNA, 20 bp, synthetic construct
  source 1..20: mol_type = other DNA
caaaccgatcacagccgtat

SEQ ID NO: 141 - DNA, 20 bp, synthetic construct
  source 1..20: mol_type = other DNA
gcaaaccgatcacagccgta

SEQ ID NO: 142 - DNA, 20 bp, synthetic construct
  source 1..20: mol_type = other DNA
ggcaaaccgatcacagccgt

SEQ ID NO: 143 - DNA, 20 bp, synthetic construct
  source 1..20: mol_type = other DNA
tggcaaaccgatcacagccg

SEQ ID NO: 144 - DNA, 20 bp, synthetic construct
  source 1..20: mol_type = other DNA
ttggcaaaccgatcacagcc

SEQ ID NO: 145 - DNA, 20 bp, synthetic construct
  source 1..20: mol_type = other DNA
cttggcaaaccgatcacagc

SEQ ID NO: 146 - DNA, 20 bp, synthetic construct
  source 1..20: mol_type = other DNA
acttggcaaaccgatcacag

SEQ ID NO: 147 - DNA, 20 bp, synthetic construct
  source 1..20: mol_type = other DNA
cacttggcaaaccgatcaca

SEQ ID NO: 148 - DNA, 20 bp, synthetic construct
  source 1..20: mol_type = other DNA
ccacttggcaaaccgatcac

SEQ ID NO: 149 - DNA, 20 bp, synthetic construct
  source 1..20: mol_type = other DNA
tccacttggcaaaccgatca

SEQ ID NO: 150 - DNA, 20 bp, synthetic construct
  source 1..20: mol_type = other DNA
gtccacttggcaaaccgatc

SEQ ID NO: 151 - DNA, 20 bp, synthetic construct
  source 1..20: mol_type = other DNA
agtccacttggcaaaccgat

SEQ ID NO: 152 - DNA, 20 bp, synthetic construct
  source 1..20: mol_type = other DNA
aagtccacttggcaaaccga

SEQ ID NO: 153 - DNA, 20 bp, synthetic construct
  source 1..20: mol_type = other DNA
caagtccacttggcaaaccg

SEQ ID NO: 154 - DNA, 20 bp, synthetic construct
  source 1..20: mol_type = other DNA
tcaagtccacttggcaaacc

SEQ ID NO: 155 - DNA, 20 bp, synthetic construct
  source 1..20: mol_type = other DNA
ttcaagtccacttggcaaac

SEQ ID NO: 156 - DNA, 20 bp, synthetic construct
  source 1..20: mol_type = other DNA
attcaagtccacttggcaaa

SEQ ID NO: 157 - DNA, 20 bp, synthetic construct
  source 1..20: mol_type = other DNA
gattcaagtccacttggcaa

SEQ ID NO: 158 - DNA, 20 bp, synthetic construct
  source 1..20: mol_type = other DNA
cgattcaagtccacttggca

SEQ ID NO: 159 - DNA, 20 bp, synthetic construct
  source 1..20: mol_type = other DNA
acgattcaagtccacttggc

SEQ ID NO: 160 - DNA, 20 bp, synthetic construct
  source 1..20: mol_type = other DNA
cacgattcaagtccacttgg

SEQ ID NO: 161 - DNA, 20 bp, synthetic construct
  source 1..20: mol_type = other DNA
ccacgattcaagtccacttg

SEQ ID NO: 162 - DNA, 20 bp, synthetic construct
  source 1..20: mol_type = other DNA
accacgattcaagtccactt

SEQ ID NO: 163 - DNA, 20 bp, synthetic construct
  source 1..20: mol_type = other DNA
gaccacgattcaagtccact

SEQ ID NO: 164 - DNA, 20 bp, synthetic construct
  source 1..20: mol_type = other DNA
tgaccacgattcaagtccac

SEQ ID NO: 165 - DNA, 20 bp, synthetic construct
  source 1..20: mol_type = other DNA
atgaccacgattcaagtcca

SEQ ID NO: 166 - DNA, 20 bp, synthetic construct
  source 1..20: mol_type = other DNA
aatgaccacgattcaagtcc

SEQ ID NO: 167 - DNA, 20 bp, synthetic construct
  source 1..20: mol_type = other DNA
gaatgaccacgattcaagtc

SEQ ID NO: 168 - DNA, 20 bp, synthetic construct
  source 1..20: mol_type = other DNA
agaatgaccacgattcaagt

SEQ ID NO: 169 - DNA, 20 bp, synthetic construct
  source 1..20: mol_type = other DNA
aagaatgaccacgattcaag

SEQ ID NO: 170 - DNA, 20 bp, synthetic construct
  source 1..20: mol_type = other DNA
aaagaatgaccacgattcaa

SEQ ID NO: 171 - DNA, 20 bp, synthetic construct
  source 1..20: mol_type = other DNA
caaagaatgaccacgattca

SEQ ID NO: 172 - DNA, 20 bp, synthetic construct
  source 1..20: mol_type = other DNA
gcaaagaatgaccacgattc

SEQ ID NO: 173 - DNA, 20 bp, synthetic construct
  source 1..20: mol_type = other DNA
agcaaagaatgaccacgatt

SEQ ID NO: 174 - DNA, 20 bp, synthetic construct
  source 1..20: mol_type = other DNA
cagcaaagaatgaccacgat

SEQ ID NO: 175 - DNA, 20 bp, synthetic construct
  source 1..20: mol_type = other DNA
acagcaaagaatgaccacga

SEQ ID NO: 176 - DNA, 20 bp, synthetic construct
  source 1..20: mol_type = other DNA
cacagcaaagaatgaccacg

SEQ ID NO: 177 - DNA, 20 bp, synthetic construct
  source 1..20: mol_type = other DNA
acacagcaaagaatgaccac

SEQ ID NO: 178 - DNA, 20 bp, synthetic construct
  source 1..20: mol_type = other DNA
tacacagcaaagaatgacca

SEQ ID NO: 179 - DNA, 20 bp, synthetic construct
  source 1..20: mol_type = other DNA
atacacagcaaagaatgacc

SEQ ID NO: 180 - DNA, 20 bp, synthetic construct
  source 1..20: mol_type = other DNA
catacacagcaaagaatgac

SEQ ID NO: 181 - DNA, 20 bp, synthetic construct
  source 1..20: mol_type = other DNA
tcatacacagcaaagaatga

SEQ ID NO: 182 - DNA, 20 bp, synthetic construct
  source 1..20: mol_type = other DNA
atcatacacagcaaagaatg

SEQ ID NO: 183 - DNA, 20 bp, synthetic construct
  source 1..20: mol_type = other DNA
catcatacacagcaaagaat

SEQ ID NO: 184 - DNA, 20 bp, synthetic construct
  source 1..20: mol_type = other DNA
ccatcatacacagcaaagaa

SEQ ID NO: 185 - DNA, 20 bp, synthetic construct
  source 1..20: mol_type = other DNA
cccatcatacacagcaaaga

SEQ ID NO: 186 - DNA, 20 bp, synthetic construct
  source 1..20: mol_type = other DNA
gcccatcatacacagcaaag

SEQ ID NO: 187 - DNA, 20 bp, synthetic construct
  source 1..20: mol_type = other DNA
tgcccatcatacacagcaaa

SEQ ID NO: 188 - DNA, 20 bp, synthetic construct
  source 1..20: mol_type = other DNA
atgcccatcatacacagcaa

SEQ ID NO: 189 - DNA, 20 bp, synthetic construct
  source 1..20: mol_type = other DNA
catgcccatcatacacagca

SEQ ID NO: 190 - DNA, 20 bp, synthetic construct
  source 1..20: mol_type = other DNA
gcatgcccatcatacacagc

SEQ ID NO: 191 - DNA, 20 bp, synthetic construct
  source 1..20: mol_type = other DNA
agcatgcccatcatacacag

SEQ ID NO: 192 - DNA, 20 bp, synthetic construct
  source 1..20: mol_type = other DNA
cagcatgcccatcatacaca

SEQ ID NO: 193 - DNA, 20 bp, synthetic construct
  source 1..20: mol_type = other DNA
ccagcatgcccatcatacac

SEQ ID NO: 194 - DNA, 20 bp, synthetic construct
  source 1..20: mol_type = other DNA
accagcatgcccatcataca

SEQ ID NO: 195 - DNA, 20 bp, synthetic construct
  source 1..20: mol_type = other DNA
aaccagcatgcccatcatac

SEQ ID NO: 196 - DNA, 20 bp, synthetic construct
  source 1..20: mol_type = other DNA
gaaccagcatgcccatcata

SEQ ID NO: 197 - DNA, 20 bp, synthetic construct
  source 1..20: mol_type = other DNA
agaaccagcatgcccatcat

SEQ ID NO: 198 - DNA, 20 bp, synthetic construct
  source 1..20: mol_type = other DNA
gagaaccagcatgcccatca

SEQ ID NO: 199 - DNA, 20 bp, synthetic construct
  source 1..20: mol_type = other DNA
tgagaaccagcatgcccatc

SEQ ID NO: 200 - DNA, 20 bp, synthetic construct
  source 1..20: mol_type = other DNA
ctgagaaccagcatgcccat

SEQ ID NO: 201 - DNA, 20 bp, synthetic construct
  source 1..20: mol_type = other DNA
cctgagaaccagcatgccca

SEQ ID NO: 202 - DNA, 20 bp, synthetic construct
  source 1..20: mol_type = other DNA
acctgagaaccagcatgccc

SEQ ID NO: 203 - DNA, 20 bp, synthetic construct
  source 1..20: mol_type = other DNA
aacctgagaaccagcatgcc

SEQ ID NO: 204 - DNA, 20 bp, synthetic construct
  source 1..20: mol_type = other DNA
caacctgagaaccagcatgc

SEQ ID NO: 205 - DNA, 20 bp, synthetic construct
  source 1..20: mol_type = other DNA
gcaacctgagaaccagcatg

SEQ ID NO: 206 - DNA, 20 bp, synthetic construct
  source 1..20: mol_type = other DNA
ggcaacctgagaaccagcat

SEQ ID NO: 207 - DNA, 20 bp, synthetic construct
  source 1..20: mol_type = other DNA
tggcaacctgagaaccagca

SEQ ID NO: 208 - DNA, 20 bp, synthetic construct
  source 1..20: mol_type = other DNA
ttggcaacctgagaaccagc

SEQ ID NO: 209 - DNA, 20 bp, synthetic construct
  source 1..20: mol_type = other DNA
tttggcaacctgagaaccag

SEQ ID NO: 210 - DNA, 20 bp, synthetic construct
  source 1..20: mol_type = other DNA
atttggcaacctgagaacca

SEQ ID NO: 211 - DNA, 20 bp, synthetic construct
  source 1..20: mol_type = other DNA
tatttggcaacctgagaacc

SEQ ID NO: 212 - DNA, 20 bp, synthetic construct
  source 1..20: mol_type = other DNA
gtatttggcaacctgagaac

SEQ ID NO: 213 - DNA, 20 bp, synthetic construct
  source 1..20: mol_type = other DNA
agtatttggcaacctgagaa

SEQ ID NO: 214 - DNA, 20 bp, synthetic construct
  source 1..20: mol_type = other DNA
cagtatttggcaacctgaga

SEQ ID NO: 215 - DNA, 20 bp, synthetic construct
  source 1..20: mol_type = other DNA
gcagtatttggcaacctgag

SEQ ID NO: 216 - DNA, 20 bp, synthetic construct
  source 1..20: mol_type = other DNA
agcagtatttggcaacctga

SEQ ID NO: 217 - DNA, 20 bp, synthetic construct
  source 1..20: mol_type = other DNA
cagcagtatttggcaacctg

SEQ ID NO: 218 - DNA, 20 bp, synthetic construct
  source 1..20: mol_type = other DNA
acagcagtatttggcaacct

SEQ ID NO: 219 - DNA, 20 bp, synthetic construct
  source 1..20: mol_type = other DNA
cacagcagtatttggcaacc

SEQ ID NO: 220 - DNA, 20 bp, synthetic construct
  source 1..20: mol_type = other DNA
tcacagcagtatttggcaac

SEQ ID NO: 221 - DNA, 20 bp, synthetic construct
  source 1..20: mol_type = other DNA
ctcacagcagtatttggcaa

SEQ ID NO: 222 - DNA, 20 bp, synthetic construct
  source 1..20: mol_type = other DNA
gctcacagcagtatttggca

SEQ ID NO: 223 - DNA, 20 bp, synthetic construct
  source 1..20: mol_type = other DNA
tgctcacagcagtatttggc

SEQ ID NO: 224 - DNA, 20 bp, synthetic construct
  source 1..20: mol_type = other DNA
atgctcacagcagtatttgg

SEQ ID NO: 225 - DNA, 20 bp, synthetic construct
  source 1..20: mol_type = other DNA
aatgctcacagcagtatttg

SEQ ID NO: 226 - DNA, 20 bp, synthetic construct
  source 1..20: mol_type = other DNA
aaatgctcacagcagtattt

SEQ ID NO: 227 - DNA, 20 bp, synthetic construct
  source 1..20: mol_type = other DNA
caaatgctcacagcagtatt

SEQ ID NO: 228 - DNA, 20 bp, synthetic construct
  source 1..20: mol_type = other DNA
acaaatgctcacagcagtat

SEQ ID NO: 229 - DNA, 20 bp, synthetic construct
  source 1..20: mol_type = other DNA
aacaaatgctcacagcagta

SEQ ID NO: 230 - DNA, 20 bp, synthetic construct
  source 1..20: mol_type = other DNA
taacaaatgctcacagcagt

SEQ ID NO: 231 - DNA, 20 bp, synthetic construct
  source 1..20: mol_type = other DNA
ctaacaaatgctcacagcag

SEQ ID NO: 232 - DNA, 20 bp, synthetic construct
  source 1..20: mol_type = other DNA
tctaacaaatgctcacagca

SEQ ID NO: 233 - DNA, 20 bp, synthetic construct
  source 1..20: mol_type = other DNA
atctaacaaatgctcacagc

SEQ ID NO: 234 - DNA, 20 bp, synthetic construct
  source 1..20: mol_type = other DNA
gatctaacaaatgctcacag

SEQ ID NO: 235 - DNA, 20 bp, synthetic construct
  source 1..20: mol_type = other DNA
tgatctaacaaatgctcaca

SEQ ID NO: 236 - DNA, 20 bp, synthetic construct
  source 1..20: mol_type = other DNA
gtgatctaacaaatgctcac

SEQ ID NO: 237 - DNA, 20 bp, synthetic construct
  source 1..20: mol_type = other DNA
tgtgatctaacaaatgctca

SEQ ID NO: 238 - DNA, 20 bp, synthetic construct
  source 1..20: mol_type = other DNA
atgtgatctaacaaatgctc

SEQ ID NO: 239 - DNA, 20 bp, synthetic construct
  source 1..20: mol_type = other DNA
gatgtgatctaacaaatgct

SEQ ID NO: 240 - DNA, 20 bp, synthetic construct
  source 1..20: mol_type = other DNA
tgatgtgatctaacaaatgc

SEQ ID NO: 241 - DNA, 20 bp, synthetic construct
  source 1..20: mol_type = other DNA
gtgatgtgatctaacaaatg

SEQ ID NO: 242 - DNA, 20 bp, synthetic construct
  source 1..20: mol_type = other DNA
ggtgatgtgatctaacaaat

SEQ ID NO: 243 - DNA, 20 bp, synthetic construct
  source 1..20: mol_type = other DNA
tggtgatgtgatctaacaaa

SEQ ID NO: 244 - DNA, 20 bp, synthetic construct
  source 1..20: mol_type = other DNA
ttggtgatgtgatctaacaa

SEQ ID NO: 245 - DNA, 20 bp, synthetic construct
  source 1..20: mol_type = other DNA
attggtgatgtgatctaaca

SEQ ID NO: 246 - DNA, 20 bp, synthetic construct
  source 1..20: mol_type = other DNA
tattggtgatgtgatctaac

SEQ ID NO: 247 - DNA, 20 bp, synthetic construct
  source 1..20: mol_type = other DNA
ttattggtgatgtgatctaa

SEQ ID NO: 248 - DNA, 20 bp, synthetic construct
  source 1..20: mol_type = other DNA
gttattggtgatgtgatcta

SEQ ID NO: 249 - DNA, 20 bp, synthetic construct
  source 1..20: mol_type = other DNA
ggttattggtgatgtgatct

SEQ ID NO: 250 - DNA, 20 bp, synthetic construct
  source 1..20: mol_type = other DNA
tggttattggtgatgtgatc

SEQ ID NO: 251 - DNA, 20 bp, synthetic construct
  source 1..20: mol_type = other DNA
ctggttattggtgatgtgat

SEQ ID NO: 252 - DNA, 20 bp, synthetic construct
  source 1..20: mol_type = other DNA
cctggttattggtgatgtga

SEQ ID NO: 253 - DNA, 20 bp, synthetic construct
  source 1..20: mol_type = other DNA
tcctggttattggtgatgtg

SEQ ID NO: 254 - DNA, 20 bp, synthetic construct
  source 1..20: mol_type = other DNA
atcctggttattggtgatgt

SEQ ID NO: 255 - DNA, 20 bp, synthetic construct
  source 1..20: mol_type = other DNA
aatcctggttattggtgatg

SEQ ID NO: 256 - DNA, 20 bp, synthetic construct
  source 1..20: mol_type = other DNA
aaatcctggttattggtgat

SEQ ID NO: 257 - DNA, 20 bp, synthetic construct
  source 1..20: mol_type = other DNA
aaaatcctggttattggtga

SEQ ID NO: 258 - DNA, 20 bp, synthetic construct
  source 1..20: mol_type = other DNA
taaaatcctggttattggtg

SEQ ID NO: 259 - DNA, 20 bp, synthetic construct
  source 1..20: mol_type = other DNA
ttaaaatcctggttattggt

SEQ ID NO: 260 - DNA, 20 bp, synthetic construct
  source 1..20: mol_type = other DNA
tttaaaatcctggttattgg

SEQ ID NO: 261 - DNA, 20 bp, synthetic construct
  source 1..20: mol_type = other DNA
ctttaaaatcctggttattg

SEQ ID NO: 262 - DNA, 20 bp, synthetic construct
  source 1..20: mol_type = other DNA
cctttaaaatcctggttatt

SEQ ID NO: 263 - DNA, 20 bp, synthetic construct
  source 1..20: mol_type = other DNA
ccctttaaaatcctggttat

SEQ ID NO: 264 - DNA, 20 bp, synthetic construct
  source 1..20: mol_type = other DNA
accctttaaaatcctggtta

SEQ ID NO: 265 - DNA, 20 bp, synthetic construct
  source 1..20: mol_type = other DNA
gaccctttaaaatcctggtt

SEQ ID NO: 266 - DNA, 20 bp, synthetic construct
  source 1..20: mol_type = other DNA
agaccctttaaaatcctggt

SEQ ID NO: 267 - DNA, 20 bp, synthetic construct
  source 1..20: mol_type = other DNA
cagaccctttaaaatcctgg

SEQ ID NO: 268 - DNA, 20 bp, synthetic construct
  source 1..20: mol_type = other DNA
gcagaccctttaaaatcctg

SEQ ID NO: 269 - DNA, 20 bp, synthetic construct
  source 1..20: mol_type = other DNA
tgcagaccctttaaaatcct

SEQ ID NO: 270 - DNA, 20 bp, synthetic construct
  source 1..20: mol_type = other DNA
ctgcagaccctttaaaatcc

SEQ ID NO: 271 - DNA, 20 bp, synthetic construct
  source 1..20: mol_type = other DNA
cctgcagaccctttaaaatc

SEQ ID NO: 272 - DNA, 20 bp, synthetic construct
  source 1..20: mol_type = other DNA
tcctgcagaccctttaaaat

SEQ ID NO: 273 - DNA, 20 bp, synthetic construct
  source 1..20: mol_type = other DNA
ctcctgcagaccctttaaaa

SEQ ID NO: 274 - DNA, 20 bp, synthetic construct
  source 1..20: mol_type = other DNA
gctcctgcagaccctttaaa

SEQ ID NO: 275 - DNA, 20 bp, synthetic construct
  source 1..20: mol_type = other DNA
tgctcctgcagaccctttaa

SEQ ID NO: 276 - DNA, 20 bp, synthetic construct
  source 1..20: mol_type = other DNA
gtgctcctgcagacccttta

SEQ ID NO: 277 - DNA, 20 bp, synthetic construct
  source 1..20: mol_type = other DNA
ggtgctcctgcagacccttt

SEQ ID NO: 278 - DNA, 20 bp, synthetic construct
  source 1..20: mol_type = other DNA
aggtgctcctgcagaccctt

SEQ ID NO: 279 - DNA, 20 bp, synthetic construct
  source 1..20: mol_type = other DNA
aaggtgctcctgcagaccct

SEQ ID NO: 280 - DNA, 20 bp, synthetic construct
  source 1..20: mol_type = other DNA
gaaggtgctcctgcagaccc

SEQ ID NO: 281 - DNA, 20 bp, synthetic construct
  source 1..20: mol_type = other DNA
agaaggtgctcctgcagacc

SEQ ID NO: 282 - DNA, 20 bp, synthetic construct
  source 1..20: mol_type = other DNA
cagaaggtgctcctgcagac

SEQ ID NO: 283 - DNA, 20 bp, synthetic construct
  source 1..20: mol_type = other DNA
acagaaggtgctcctgcaga

SEQ ID NO: 284 - DNA, 20 bp, synthetic construct
  source 1..20: mol_type = other DNA
cacagaaggtgctcctgcag

SEQ ID NO: 285 - DNA, 20 bp, synthetic construct
  source 1..20: mol_type = other DNA
ccacagaaggtgctcctgca

SEQ ID NO: 286 - DNA, 20 bp, synthetic construct
  source 1..20: mol_type = other DNA
tccacagaaggtgctcctgc

SEQ ID NO: 287 - DNA, 20 bp, synthetic construct
  source 1..20: mol_type = other DNA
ttccacagaaggtgctcctg

SEQ ID NO: 288 - DNA, 20 bp, synthetic construct
  source 1..20: mol_type = other DNA
tttccacagaaggtgctcct

SEQ ID NO: 289 - DNA, 20 bp, synthetic construct
  source 1..20: mol_type = other DNA
ttttccacagaaggtgctcc

SEQ ID NO: 290 - DNA, 20 bp, synthetic construct
  source 1..20: mol_type = other DNA
attttccacagaaggtgctc

SEQ ID NO: 291 - DNA, 20 bp, synthetic construct
  source 1..20: mol_type = other DNA
cattttccacagaaggtgct

SEQ ID NO: 292 - DNA, 20 bp, synthetic construct
  source 1..20: mol_type = other DNA
acattttccacagaaggtgc

SEQ ID NO: 293 - DNA, 20 bp, synthetic construct
  source 1..20: mol_type = other DNA
tacattttccacagaaggtg

SEQ ID NO: 294 - DNA, 20 bp, synthetic construct
  source 1..20: mol_type = other DNA
ttacattttccacagaaggt

SEQ ID NO: 295 - DNA, 20 bp, synthetic construct
  source 1..20: mol_type = other DNA
tttacattttccacagaagg

SEQ ID NO: 296 - DNA, 20 bp, synthetic construct
  source 1..20: mol_type = other DNA
ctttacattttccacagaag

SEQ ID NO: 297 - DNA, 20 bp, synthetic construct
  source 1..20: mol_type = other DNA
tctttacattttccacagaa

SEQ ID NO: 298 - DNA, 20 bp, synthetic construct
  source 1..20: mol_type = other DNA
ttctttacattttccacaga

SEQ ID NO: 299 - DNA, 20 bp, synthetic construct
  source 1..20: mol_type = other DNA
attctttacattttccacag

SEQ ID NO: 300 - DNA, 20 bp, synthetic construct
  source 1..20: mol_type = other DNA
cattctttacattttccaca

SEQ ID NO: 301 - DNA, 20 bp, synthetic construct
  source 1..20: mol_type = other DNA
ccattctttacattttccac

SEQ ID NO: 302 - DNA, 20 bp, synthetic construct
  source 1..20: mol_type = other DNA
tccattctttacattttcca

SEQ ID NO: 303 - DNA, 20 bp, synthetic construct
  source 1..20: mol_type = other DNA
ttccattctttacattttcc

SEQ ID NO: 304 - DNA, 20 bp, synthetic construct
  source 1..20: mol_type = other DNA
attccattctttacattttc

SEQ ID NO: 305 - DNA, 20 bp, synthetic construct
  source 1..20: mol_type = other DNA
gattccattctttacatttt

SEQ ID NO: 306 - DNA, 20 bp, synthetic construct
  source 1..20: mol_type = other DNA
tgattccattctttacattt

SEQ ID NO: 307 - DNA, 20 bp, synthetic construct
  source 1..20: mol_type = other DNA
ctgattccattctttacatt

SEQ ID NO: 308 - DNA, 20 bp, synthetic construct
  source 1..20: mol_type = other DNA
tctgattccattctttacat

SEQ ID NO: 309 - DNA, 20 bp, synthetic construct
  source 1..20: mol_type = other DNA
ttctgattccattctttaca

SEQ ID NO: 310 - DNA, 20 bp, synthetic construct
  source 1..20: mol_type = other DNA
gttctgattccattctttac

SEQ ID NO: 311 - DNA, 20 bp, synthetic construct
  source 1..20: mol_type = other DNA
tgttctgattccattcttta

SEQ ID NO: 312 - DNA, 20 bp, synthetic construct
  source 1..20: mol_type = other DNA
ctgttctgattccattcttt

SEQ ID NO: 313 - DNA, 20 bp, synthetic construct
  source 1..20: mol_type = other DNA
cctgttctgattccattctt

SEQ ID NO: 314 - DNA, 20 bp, synthetic construct
  source 1..20: mol_type = other DNA
acctgttctgattccattct

SEQ ID NO: 315 - DNA, 20 bp, synthetic construct
  source 1..20: mol_type = other DNA
aacctgttctgattccattc

SEQ ID NO: 316 - DNA, 20 bp, synthetic construct
  source 1..20: mol_type = other DNA
aaacctgttctgattccatt

SEQ ID NO: 317 - DNA, 20 bp, synthetic construct
  source 1..20: mol_type = other DNA
aaaacctgttctgattccat

SEQ ID NO: 318 - DNA, 20 bp, synthetic construct
  source 1..20: mol_type = other DNA
gaaaacctgttctgattcca

SEQ ID NO: 319 - DNA, 20 bp, synthetic construct
  source 1..20: mol_type = other DNA
agaaaacctgttctgattcc

SEQ ID NO: 320 - DNA, 20 bp, synthetic construct
  source 1..20: mol_type = other DNA
cagaaaacctgttctgattc

SEQ ID NO: 321 - DNA, 20 bp, synthetic construct
  source 1..20: mol_type = other DNA
ccagaaaacctgttctgatt

SEQ ID NO: 322 - DNA, 20 bp, synthetic construct
  source 1..20: mol_type = other DNA
tccagaaaacctgttctgat

SEQ ID NO: 323 - DNA, 20 bp, synthetic construct
  source 1..20: mol_type = other DNA
ctccagaaaacctgttctga

SEQ ID NO: 324 - DNA, 20 bp, synthetic construct
  source 1..20: mol_type = other DNA
tctccagaaaacctgttctg

SEQ ID NO: 325 - DNA, 20 bp, synthetic construct
  source 1..20: mol_type = other DNA
atctccagaaaacctgttct

SEQ ID NO: 326 - DNA, 20 bp, synthetic construct
  source 1..20: mol_type = other DNA
aatctccagaaaacctgttc

SEQ ID NO: 327 - DNA, 20 bp, synthetic construct
  source 1..20: mol_type = other DNA
caatctccagaaaacctgtt

SEQ ID NO: 328 - DNA, 20 bp, synthetic construct
  source 1..20: mol_type = other DNA
tcaatctccagaaaacctgt

SEQ ID NO: 329 - DNA, 20 bp, synthetic construct
  source 1..20: mol_type = other DNA
atcaatctccagaaaacctg

SEQ ID NO: 330 - DNA, 20 bp, synthetic construct
  source 1..20: mol_type = other DNA
catcaatctccagaaaacct

SEQ ID NO: 331 - DNA, 20 bp, synthetic construct
  source 1..20: mol_type = other DNA
tcatcaatctccagaaaacc

SEQ ID NO: 332 - DNA, 20 bp, synthetic construct
  source 1..20: mol_type = other DNA
ttcatcaatctccagaaaac

SEQ ID NO: 333 - DNA, 20 bp, synthetic construct
  source 1..20: mol_type = other DNA
gttcatcaatctccagaaaa

SEQ ID NO: 334 - DNA, 20 bp, synthetic construct
  source 1..20: mol_type = other DNA
tgttcatcaatctccagaaa

SEQ ID NO: 335 - DNA, 20 bp, synthetic construct
  source 1..20: mol_type = other DNA
gtgttcatcaatctccagaa

SEQ ID NO: 336 - DNA, 20 bp, synthetic construct
  source 1..20: mol_type = other DNA
tgtgttcatcaatctccaga

SEQ ID NO: 337 - DNA, 20 bp, synthetic construct
  source 1..20: mol_type = other DNA
atgtgttcatcaatctccag

SEQ ID NO: 338 - DNA, 20 bp, synthetic construct
  source 1..20: mol_type = other DNA
catgtgttcatcaatctcca

SEQ ID NO: 339 - DNA, 20 bp, synthetic construct
  source 1..20: mol_type = other DNA
tcatgtgttcatcaatctcc

SEQ ID NO: 340 - DNA, 20 bp, synthetic construct
  source 1..20: mol_type = other DNA
ctcatgtgttcatcaatctc

SEQ ID NO: 341 - DNA, 20 bp, synthetic construct
  source 1..20: mol_type = other DNA
tctcatgtgttcatcaatct

SEQ ID NO: 342 - DNA, 20 bp, synthetic construct
  source 1..20: mol_type = other DNA
ctctcatgtgttcatcaatc

SEQ ID NO: 343 - DNA, 20 bp, synthetic construct
  source 1..20: mol_type = other DNA
actctcatgtgttcatcaat

SEQ ID NO: 344 - DNA, 20 bp, synthetic construct
  source 1..20: mol_type = other DNA
aactctcatgtgttcatcaa

SEQ ID NO: 345 - DNA, 20 bp, synthetic construct
  source 1..20: mol_type = other DNA
taactctcatgtgttcatca

SEQ ID NO: 346 - DNA, 20 bp, synthetic construct
  source 1..20: mol_type = other DNA
ataactctcatgtgttcatc

SEQ ID NO: 347 - DNA, 20 bp, synthetic construct
  source 1..20: mol_type = other DNA
cataactctcatgtgttcat

SEQ ID NO: 348 - DNA, 20 bp, synthetic construct
  source 1..20: mol_type = other DNA
acataactctcatgtgttca

SEQ ID NO: 349 - DNA, 20 bp, synthetic construct
  source 1..20: mol_type = other DNA
gacataactctcatgtgttc

SEQ ID NO: 350 - DNA, 20 bp, synthetic construct
  source 1..20: mol_type = other DNA
tgacataactctcatgtgtt

SEQ ID NO: 351 - DNA, 20 bp, synthetic construct
  source 1..20: mol_type = other DNA
ctgacataactctcatgtgt

SEQ ID NO: 352 - DNA, 20 bp, synthetic construct
  source 1..20: mol_type = other DNA
tctgacataactctcatgtg

SEQ ID NO: 353 - DNA, 20 bp, synthetic construct
  source 1..20: mol_type = other DNA
ctctgacataactctcatgt

SEQ ID NO: 354 - DNA, 20 bp, synthetic construct
  source 1..20: mol_type = other DNA
tctctgacataactctcatg

SEQ ID NO: 355 - DNA, 20 bp, synthetic construct
  source 1..20: mol_type = other DNA
ttctctgacataactctcat

SEQ ID NO: 356 - DNA, 20 bp, synthetic construct
  source 1..20: mol_type = other DNA
cttctctgacataactctca

SEQ ID NO: 357 - DNA, 20 bp, synthetic construct
  source 1..20: mol_type = other DNA
tcttctctgacataactctc

SEQ ID NO: 358 - DNA, 20 bp, synthetic construct
  source 1..20: mol_type = other DNA
ttcttctctgacataactct

SEQ ID NO: 359 - DNA, 20 bp, synthetic construct
  source 1..20: mol_type = other DNA
tttcttctctgacataactc

SEQ ID NO: 360 - DNA, 20 bp, synthetic construct
  source 1..20: mol_type = other DNA
gtttcttctctgacataact

SEQ ID NO: 361 - DNA, 20 bp, synthetic construct
  source 1..20: mol_type = other DNA
tgtttcttctctgacataac

SEQ ID NO: 362 - DNA, 20 bp, synthetic construct
  source 1..20: mol_type = other DNA
atgtttcttctctgacataa

SEQ ID NO: 363 - DNA, 20 bp, synthetic construct
  source 1..20: mol_type = other DNA
catgtttcttctctgacata

SEQ ID NO: 364 - DNA, 20 bp, synthetic construct
  source 1..20: mol_type = other DNA
ccatgtttcttctctgacat

SEQ ID NO: 365 - DNA, 20 bp, synthetic construct
  source 1..20: mol_type = other DNA
accatgtttcttctctgaca

SEQ ID NO: 366 - DNA, 20 bp, synthetic construct
  source 1..20: mol_type = other DNA
caccatgtttcttctctgac

SEQ ID NO: 367 - DNA, 20 bp, synthetic construct
  source 1..20: mol_type = other DNA
gcaccatgtttcttctctga

SEQ ID NO: 368 - DNA, 20 bp, synthetic construct
  source 1..20: mol_type = other DNA
tgcaccatgtttcttctctg

SEQ ID NO: 369 - DNA, 20 bp, synthetic construct
  source 1..20: mol_type = other DNA
ctgcaccatgtttcttctct

SEQ ID NO: 370 - DNA, 20 bp, synthetic construct
  source 1..20: mol_type = other DNA
tctgcaccatgtttcttctc

SEQ ID NO: 371 - DNA, 20 bp, synthetic construct
  source 1..20: mol_type = other DNA
atctgcaccatgtttcttct

SEQ ID NO: 372 - DNA, 20 bp, synthetic construct
  source 1..20: mol_type = other DNA
tatctgcaccatgtttcttc

SEQ ID NO: 373 - DNA, 20 bp, synthetic construct
  source 1..20: mol_type = other DNA
ctatctgcaccatgtttctt

SEQ ID NO: 374 - DNA, 20 bp, synthetic construct
  source 1..20: mol_type = other DNA
tctatctgcaccatgtttct

SEQ ID NO: 375 - DNA, 20 bp, synthetic construct
  source 1..20: mol_type = other DNA
ttctatctgcaccatgtttc

SEQ ID NO: 376 - DNA, 20 bp, synthetic construct
  source 1..20: mol_type = other DNA
cttctatctgcaccatgttt

SEQ ID NO: 377 - DNA, 20 bp, synthetic construct
  source 1..20: mol_type = other DNA
acttctatctgcaccatgtt

SEQ ID NO: 378 - DNA, 20 bp, synthetic construct
  source 1..20: mol_type = other DNA
cacttctatctgcaccatgt

SEQ ID NO: 379 - DNA, 20 bp, synthetic construct
  source 1..20: mol_type = other DNA
ccacttctatctgcaccatg

SEQ ID NO: 380 - DNA, 20 bp, synthetic construct
  source 1..20: mol_type = other DNA
cccacttctatctgcaccat

SEQ ID NO: 381 - DNA, 20 bp, synthetic construct
  source 1..20: mol_type = other DNA
acccacttctatctgcacca

SEQ ID NO: 382 - DNA, 20 bp, synthetic construct
  source 1..20: mol_type = other DNA
gacccacttctatctgcacc

SEQ ID NO: 383 - DNA, 20 bp, synthetic construct
  source 1..20: mol_type = other DNA
tgacccacttctatctgcac

SEQ ID NO: 384 - DNA, 20 bp, synthetic construct
  source 1..20: mol_type = other DNA
ttgacccacttctatctgca

SEQ ID NO: 385 - DNA, 20 bp, synthetic construct
  source 1..20: mol_type = other DNA
gttgacccacttctatctgc

SEQ ID NO: 386 - DNA, 20 bp, synthetic construct
  source 1..20: mol_type = other DNA
tgttgacccacttctatctg

SEQ ID NO: 387 - DNA, 20 bp, synthetic construct
  source 1..20: mol_type = other DNA
ctgttgacccacttctatct

SEQ ID NO: 388 - DNA, 20 bp, synthetic construct
  source 1..20: mol_type = other DNA
gctgttgacccacttctatc

SEQ ID NO: 389 - DNA, 20 bp, synthetic construct
  source 1..20: mol_type = other DNA
agctgttgacccacttctat

SEQ ID NO: 390 - DNA, 20 bp, synthetic construct
  source 1..20: mol_type = other DNA
cagctgttgacccacttcta

SEQ ID NO: 391 - DNA, 20 bp, synthetic construct
  source 1..20: mol_type = other DNA
acagctgttgacccacttct

SEQ ID NO: 392 - DNA, 20 bp, synthetic construct
  source 1..20: mol_type = other DNA
tacagctgttgacccacttc

SEQ ID NO: 393 - DNA, 20 bp, synthetic construct
  source 1..20: mol_type = other DNA
ctacagctgttgacccactt

SEQ ID NO: 394 - DNA, 20 bp, synthetic construct
  source 1..20: mol_type = other DNA
cctacagctgttgacccact

SEQ ID NO: 395 - DNA, 20 bp, synthetic construct
  source 1..20: mol_type = other DNA
acctacagctgttgacccac

SEQ ID NO: 396 - DNA, 20 bp, synthetic construct
  source 1..20: mol_type = other DNA
cacctacagctgttgaccca

SEQ ID NO: 397 - DNA, 20 bp, synthetic construct
  source 1..20: mol_type = other DNA
acacctacagctgttgaccc

SEQ ID NO: 398 - DNA, 20 bp, synthetic construct
  source 1..20: mol_type = other DNA
gacacctacagctgttgacc

SEQ ID NO: 399 - DNA, 20 bp, synthetic construct
  source 1..20: mol_type = other DNA
agacacctacagctgttgac

SEQ ID NO: 400 - DNA, 20 bp, synthetic construct
  source 1..20: mol_type = other DNA
aagacacctacagctgttga

SEQ ID NO: 401 - DNA, 20 bp, synthetic construct
  source 1..20: mol_type = other DNA
taagacacctacagctgttg

SEQ ID NO: 402 - DNA, 20 bp, synthetic construct
  source 1..20: mol_type = other DNA
ttaagacacctacagctgtt

SEQ ID NO: 403 - DNA, 20 bp, synthetic construct
  source 1..20: mol_type = other DNA
attaagacacctacagctgt

SEQ ID NO: 404 - DNA, 20 bp, synthetic construct
  source 1..20: mol_type = other DNA
aattaagacacctacagctg

SEQ ID NO: 405 - DNA, 20 bp, synthetic construct
  source 1..20: mol_type = other DNA
aaattaagacacctacagct

SEQ ID NO: 406 - DNA, 20 bp, synthetic construct
  source 1..20: mol_type = other DNA
gaaattaagacacctacagc

SEQ ID NO: 407 - DNA, 20 bp, synthetic construct
  source 1..20: mol_type = other DNA
agaaattaagacacctacag

SEQ ID NO: 408 - DNA, 20 bp, synthetic construct
  source 1..20: mol_type = other DNA
gagaaattaagacacctaca

SEQ ID NO: 409 - DNA, 20 bp, synthetic construct
  source 1..20: mol_type = other DNA
ggagaaattaagacacctac

SEQ ID NO: 410 - DNA, 20 bp, synthetic construct
  source 1..20: mol_type = other DNA
gggagaaattaagacaccta

SEQ ID NO: 411 - DNA, 20 bp, synthetic construct
  source 1..20: mol_type = other DNA
ggggagaaattaagacacct

SEQ ID NO: 412 - DNA, 20 bp, synthetic construct
  source 1..20: mol_type = other DNA
tggggagaaattaagacacc

SEQ ID NO: 413 - DNA, 20 bp, synthetic construct
  source 1..20: mol_type = other DNA
ttggggagaaattaagacac

SEQ ID NO: 414 - DNA, 20 bp, synthetic construct
  source 1..20: mol_type = other DNA
gttggggagaaattaagaca

SEQ ID NO: 415 - DNA, 20 bp, synthetic construct
  source 1..20: mol_type = other DNA
tgttggggagaaattaagac

SEQ ID NO: 416 - DNA, 20 bp, synthetic construct
  source 1..20: mol_type = other DNA
atgttggggagaaattaaga

SEQ ID NO: 417 - DNA, 20 bp, synthetic construct
  source 1..20: mol_type = other DNA
tatgttggggagaaattaag

SEQ ID NO: 418 - DNA, 20 bp, synthetic construct
  source 1..20: mol_type = other DNA
gtatgttggggagaaattaa

SEQ ID NO: 419 - DNA, 20 bp, synthetic construct
  source 1..20: mol_type = other DNA
agtatgttggggagaaatta

SEQ ID NO: 420 - DNA, 20 bp, synthetic construct
  source 1..20: mol_type = other DNA
aagtatgttggggagaaatt

SEQ ID NO: 421 - DNA, 20 bp, synthetic construct
  source 1..20: mol_type = other DNA
taagtatgttggggagaaat

SEQ ID NO: 422 - DNA, 20 bp, synthetic construct
  source 1..20: mol_type = other DNA
ataagtatgttggggagaaa

SEQ ID NO: 423 - DNA, 20 bp, synthetic construct
  source 1..20: mol_type = other DNA
aataagtatgttggggagaa

SEQ ID NO: 424 - DNA, 20 bp, synthetic construct
  source 1..20: mol_type = other DNA
aaataagtatgttggggaga

SEQ ID NO: 425 - DNA, 20 bp, synthetic construct
  source 1..20: mol_type = other DNA
gaaataagtatgttggggag

SEQ ID NO: 426 - DNA, 20 bp, synthetic construct
  source 1..20: mol_type = other DNA
tgaaataagtatgttgggga

SEQ ID NO: 427 - DNA, 20 bp, synthetic construct
  source 1..20: mol_type = other DNA
atgaaataagtatgttgggg

SEQ ID NO: 428 - DNA, 20 bp, synthetic construct
  source 1..20: mol_type = other DNA
aatgaaataagtatgttggg

SEQ ID NO: 429 - DNA, 20 bp, synthetic construct
  source 1..20: mol_type = other DNA
taatgaaataagtatgttgg

SEQ ID NO: 430 - DNA, 20 bp, synthetic construct
  source 1..20: mol_type = other DNA
ttaatgaaataagtatgttg

SEQ ID NO: 431 - DNA, 20 bp, synthetic construct
  source 1..20: mol_type = other DNA
gttaatgaaataagtatgtt

SEQ ID NO: 432 - DNA, 20 bp, synthetic construct
  source 1..20: mol_type = other DNA
agttaatgaaataagtatgt

SEQ ID NO: 433 - DNA, 20 bp, synthetic construct
  source 1..20: mol_type = other DNA
cagttaatgaaataagtatg

SEQ ID NO: 434 - DNA, 20 bp, synthetic construct
  source 1..20: mol_type = other DNA
acagttaatgaaataagtat

SEQ ID NO: 435 - DNA, 20 bp, synthetic construct
  source 1..20: mol_type = other DNA
cacagttaatgaaataagta

SEQ ID NO: 436 - DNA, 20 bp, synthetic construct
  source 1..20: mol_type = other DNA
ccacagttaatgaaataagt

SEQ ID NO: 437 - DNA, 20 bp, synthetic construct
  source 1..20: mol_type = other DNA
tccacagttaatgaaataag

SEQ ID NO: 438 - DNA, 20 bp, synthetic construct
  source 1..20: mol_type = other DNA
ctccacagttaatgaaataa

SEQ ID NO: 439 - DNA, 20 bp, synthetic construct
  source 1..20: mol_type = other DNA
tctccacagttaatgaaata

SEQ ID NO: 440 - DNA, 20 bp, synthetic construct
  source 1..20: mol_type = other DNA
gtctccacagttaatgaaat

SEQ ID NO: 441 - DNA, 20 bp, synthetic construct
  source 1..20: mol_type = other DNA
agtctccacagttaatgaaa

SEQ ID NO: 442 - DNA, 20 bp, synthetic construct
  source 1..20: mol_type = other DNA
gagtctccacagttaatgaa

SEQ ID NO: 443 - DNA, 20 bp, synthetic construct
  source 1..20: mol_type = other DNA
tgagtctccacagttaatga

SEQ ID NO: 444 - DNA, 20 bp, synthetic construct
  source 1..20: mol_type = other DNA
ttgagtctccacagttaatg

SEQ ID NO: 445 - DNA, 20 bp, synthetic construct
  source 1..20: mol_type = other DNA
cttgagtctccacagttaat

SEQ ID NO: 446 - DNA, 20 bp, synthetic construct
  source 1..20: mol_type = other DNA
tcttgagtctccacagttaa

SEQ ID NO: 447 - DNA, 20 bp, synthetic construct
  source 1..20: mol_type = other DNA
ctcttgagtctccacagtta

SEQ ID NO: 448 - DNA, 20 bp, synthetic construct
  source 1..20: mol_type = other DNA
cctcttgagtctccacagtt

SEQ ID NO: 449 - DNA, 20 bp, synthetic construct
  source 1..20: mol_type = other DNA
acctcttgagtctccacagt

SEQ ID NO: 450 - DNA, 20 bp, synthetic construct
  source 1..20: mol_type = other DNA
aacctcttgagtctccacag

SEQ ID NO: 451 - DNA, 20 bp, synthetic construct
  source 1..20: mol_type = other DNA
aaacctcttgagtctccaca

SEQ ID NO: 452 - DNA, 20 bp, synthetic construct
  source 1..20: mol_type = other DNA
taaacctcttgagtctccac

SEQ ID NO: 453 - DNA, 20 bp, synthetic construct
  source 1..20: mol_type = other DNA
gtaaacctcttgagtctcca

SEQ ID NO: 454 - DNA, 20 bp, synthetic construct
  source 1..20: mol_type = other DNA
agtaaacctcttgagtctcc

SEQ ID NO: 455 - DNA, 20 bp, synthetic construct
  source 1..20: mol_type = other DNA
aagtaaacctcttgagtctc

SEQ ID NO: 456 - DNA, 20 bp, synthetic construct
  source 1..20: mol_type = other DNA
aaagtaaacctcttgagtct

SEQ ID NO: 457 - DNA, 20 bp, synthetic construct
  source 1..20: mol_type = other DNA
caaagtaaacctcttgagtc

SEQ ID NO: 458 - DNA, 20 bp, synthetic construct
  source 1..20: mol_type = other DNA
acaaagtaaacctcttgagt

SEQ ID NO: 459 - DNA, 20 bp, synthetic construct
  source 1..20: mol_type = other DNA
tacaaagtaaacctcttgag

SEQ ID NO: 460 - DNA, 20 bp, synthetic construct
  source 1..20: mol_type = other DNA
ctacaaagtaaacctcttga

SEQ ID NO: 461 - DNA, 20 bp, synthetic construct
  source 1..20: mol_type = other DNA
cctacaaagtaaacctcttg

SEQ ID NO: 462 - DNA, 20 bp, synthetic construct
  source 1..20: mol_type = other DNA
tcctacaaagtaaacctctt

SEQ ID NO: 463 - DNA, 20 bp, synthetic construct
  source 1..20: mol_type = other DNA
ttcctacaaagtaaacctct

SEQ ID NO: 464 - DNA, 20 bp, synthetic construct
  source 1..20: mol_type = other DNA
gttcctacaaagtaaacctc

SEQ ID NO: 465 - DNA, 20 bp, synthetic construct
  source 1..20: mol_type = other DNA
tgttcctacaaagtaaacct

SEQ ID NO: 466 - DNA, 20 bp, synthetic construct
  source 1..20: mol_type = other DNA
ctgttcctacaaagtaaacc

SEQ ID NO: 467 - DNA, 20 bp, synthetic construct
  source 1..20: mol_type = other DNA
cctgttcctacaaagtaaac

SEQ ID NO: 468 - DNA, 20 bp, synthetic construct
  source 1..20: mol_type = other DNA
tcctgttcctacaaagtaaa

SEQ ID NO: 469 - DNA, 20 bp, synthetic construct
  source 1..20: mol_type = other DNA
ttcctgttcctacaaagtaa

SEQ ID NO: 470 - DNA, 20 bp, synthetic construct
  source 1..20: mol_type = other DNA
tttcctgttcctacaaagta

SEQ ID NO: 471 - DNA, 20 bp, synthetic construct
  source 1..20: mol_type = other DNA
ctttcctgttcctacaaagt

SEQ ID NO: 472 - DNA, 20 bp, synthetic construct
  source 1..20: mol_type = other DNA
actttcctgttcctacaaag

SEQ ID NO: 473 - DNA, 20 bp, synthetic construct
  source 1..20: mol_type = other DNA
aactttcctgttcctacaaa

SEQ ID NO: 474 - DNA, 20 bp, synthetic construct
  source 1..20: mol_type = other DNA
gaactttcctgttcctacaa

SEQ ID NO: 475 - DNA, 20 bp, synthetic construct
  source 1..20: mol_type = other DNA
tgaactttcctgttcctaca

SEQ ID NO: 476 - DNA, 20 bp, synthetic construct
  source 1..20: mol_type = other DNA
atgaactttcctgttcctac

SEQ ID NO: 477 - DNA, 20 bp, synthetic construct
  source 1..20: mol_type = other DNA
aatgaactttcctgttccta

SEQ ID NO: 478 - DNA, 20 bp, synthetic construct
  source 1..20: mol_type = other DNA
aaatgaactttcctgttcct

SEQ ID NO: 479 - DNA, 20 bp, synthetic construct
  source 1..20: mol_type = other DNA
gaaatgaactttcctgttcc

SEQ ID NO: 480 - DNA, 20 bp, synthetic construct
  source 1..20: mol_type = other DNA
agaaatgaactttcctgttc

SEQ ID NO: 481 - DNA, 20 bp, synthetic construct
  source 1..20: mol_type = other DNA
aagaaatgaactttcctgtt

SEQ ID NO: 482 - DNA, 20 bp, synthetic construct
  source 1..20: mol_type = other DNA
gaagaaatgaactttcctgt

SEQ ID NO: 483 - DNA, 20 bp, synthetic construct
  source 1..20: mol_type = other DNA
tgaagaaatgaactttcctg

SEQ ID NO: 484 - DNA, 20 bp, synthetic construct
  source 1..20: mol_type = other DNA
gtgaagaaatgaactttcct

SEQ ID NO: 485 - DNA, 20 bp, synthetic construct
  source 1..20: mol_type = other DNA
tgtgaagaaatgaactttcc

SEQ ID NO: 486 - DNA, 20 bp, synthetic construct
  source 1..20: mol_type = other DNA
gtgtgaagaaatgaactttc

SEQ ID NO: 487 - DNA, 20 bp, synthetic construct
  source 1..20: mol_type = other DNA
tgtgtgaagaaatgaacttt

SEQ ID NO: 488 - DNA, 20 bp, synthetic construct
  source 1..20: mol_type = other DNA
ttgtgtgaagaaatgaactt

SEQ ID NO: 489 - DNA, 20 bp, synthetic construct
  source 1..20: mol_type = other DNA
cttgtgtgaagaaatgaact

SEQ ID NO: 490 - DNA, 20 bp, synthetic construct
  source 1..20: mol_type = other DNA
tcttgtgtgaagaaatgaac

SEQ ID NO: 491 - DNA, 20 bp, synthetic construct
  source 1..20: mol_type = other DNA
atcttgtgtgaagaaatgaa

SEQ ID NO: 492 - DNA, 20 bp, synthetic construct
  source 1..20: mol_type = other DNA
gatcttgtgtgaagaaatga

SEQ ID NO: 493 - DNA, 20 bp, synthetic construct
  source 1..20: mol_type = other DNA
tgatcttgtgtgaagaaatg

SEQ ID NO: 494 - DNA, 20 bp, synthetic construct
  source 1..20: mol_type = other DNA
gtgatcttgtgtgaagaaat

SEQ ID NO: 495 - DNA, 20 bp, synthetic construct
  source 1..20: mol_type = other DNA
tgtgatcttgtgtgaagaaa

SEQ ID NO: 496 - DNA, 20 bp, synthetic construct
  source 1..20: mol_type = other DNA
ttgtgatcttgtgtgaagaa

SEQ ID NO: 497 - DNA, 20 bp, synthetic construct
  source 1..20: mol_type = other DNA
tttgtgatcttgtgtgaaga

SEQ ID NO: 498 - DNA, 20 bp, synthetic construct
  source 1..20: mol_type = other DNA
gtttgtgatcttgtgtgaag

SEQ ID NO: 499 - DNA, 20 bp, synthetic construct
  source 1..20: mol_type = other DNA
ggtttgtgatcttgtgtgaa

SEQ ID NO: 500 - DNA, 20 bp, synthetic construct
  source 1..20: mol_type = other DNA
tggtttgtgatcttgtgtga

SEQ ID NO: 501 - DNA, 20 bp, synthetic construct
  source 1..20: mol_type = other DNA
ttggtttgtgatcttgtgtg

SEQ ID NO: 502 - DNA, 20 bp, synthetic construct
  source 1..20: mol_type = other DNA
cttggtttgtgatcttgtgt

SEQ ID NO: 503 - DNA, 20 bp, synthetic construct
  source 1..20: mol_type = other DNA
acttggtttgtgatcttgtg

SEQ ID NO: 504 - DNA, 20 bp, synthetic construct
  source 1..20: mol_type = other DNA
tacttggtttgtgatcttgt

SEQ ID NO: 505 - DNA, 20 bp, synthetic construct
  source 1..20: mol_type = other DNA
ttacttggtttgtgatcttg

SEQ ID NO: 506 - DNA, 20 bp, synthetic construct
  source 1..20: mol_type = other DNA
attacttggtttgtgatctt

SEQ ID NO: 507 - DNA, 20 bp, synthetic construct
  source 1..20: mol_type = other DNA
gattacttggtttgtgatct

SEQ ID NO: 508 - DNA, 20 bp, synthetic construct
  source 1..20: mol_type = other DNA
ggattacttggtttgtgatc

SEQ ID NO: 509 - DNA, 20 bp, synthetic construct
  source 1..20: mol_type = other DNA
cggattacttggtttgtgat

SEQ ID NO: 510 - DNA, 20 bp, synthetic construct
  source 1..20: mol_type = other DNA
gcggattacttggtttgtga

SEQ ID NO: 511 - DNA, 20 bp, synthetic construct
  source 1..20: mol_type = other DNA
agcggattacttggtttgtg

SEQ ID NO: 512 - DNA, 20 bp, synthetic construct
  source 1..20: mol_type = other DNA
cagcggattacttggtttgt

SEQ ID NO: 513 - DNA, 20 bp, synthetic construct
  source 1..20: mol_type = other DNA
ccagcggattacttggtttg

SEQ ID NO: 514 - DNA, 20 bp, synthetic construct
  source 1..20: mol_type = other DNA
tccagcggattacttggttt

SEQ ID NO: 515 - DNA, 20 bp, synthetic construct
  source 1..20: mol_type = other DNA
ctccagcggattacttggtt

SEQ ID NO: 516 - DNA, 20 bp, synthetic construct
  source 1..20: mol_type = other DNA
tctccagcggattacttggt

SEQ ID NO: 517 - DNA, 20 bp, synthetic construct
  source 1..20: mol_type = other DNA
ttctccagcggattacttgg

SEQ ID NO: 518 - DNA, 20 bp, synthetic construct
  source 1..20: mol_type = other DNA
tttctccagcggattacttg

SEQ ID NO: 519 - DNA, 20 bp, synthetic construct
  source 1..20: mol_type = other DNA
ctttctccagcggattactt

SEQ ID NO: 520 - DNA, 20 bp, synthetic construct
  source 1..20: mol_type = other DNA
tctttctccagcggattact

SEQ ID NO: 521 - DNA, 20 bp, synthetic construct
  source 1..20: mol_type = other DNA
ttctttctccagcggattac

SEQ ID NO: 522 - DNA, 20 bp, synthetic construct
  source 1..20: mol_type = other DNA
gttctttctccagcggatta

SEQ ID NO: 523 - DNA, 20 bp, synthetic construct
  source 1..20: mol_type = other DNA
cgttctttctccagcggatt

SEQ ID NO: 524 - DNA, 20 bp, synthetic construct
  source 1..20: mol_type = other DNA
tcgttctttctccagcggat

SEQ ID NO: 525 - DNA, 20 bp, synthetic construct
  source 1..20: mol_type = other DNA
ttcgttctttctccagcgga

SEQ ID NO: 526 - DNA, 20 bp, synthetic construct
  source 1..20: mol_type = other DNA
attcgttctttctccagcgg

SEQ ID NO: 527 - DNA, 20 bp, synthetic construct
  source 1..20: mol_type = other DNA
aattcgttctttctccagcg

SEQ ID NO: 528 - DNA, 20 bp, synthetic construct
  source 1..20: mol_type = other DNA
gaattcgttctttctccagc

SEQ ID NO: 529 - DNA, 20 bp, synthetic construct
  source 1..20: mol_type = other DNA
tgaattcgttctttctccag

SEQ ID NO: 530 - DNA, 20 bp, synthetic construct
  source 1..20: mol_type = other DNA
ctgaattcgttctttctcca

SEQ ID NO: 531 - DNA, 20 bp, synthetic construct
  source 1..20: mol_type = other DNA
tctgaattcgttctttctcc

SEQ ID NO: 532 - DNA, 20 bp, synthetic construct
  source 1..20: mol_type = other DNA
ttctgaattcgttctttctc

SEQ ID NO: 533 - DNA, 20 bp, synthetic construct
  source 1..20: mol_type = other DNA
attctgaattcgttctttct

SEQ ID NO: 534 - DNA, 20 bp, synthetic construct
  source 1..20: mol_type = other DNA
cattctgaattcgttctttc

SEQ ID NO: 535 - DNA, 20 bp, synthetic construct
  source 1..20: mol_type = other DNA
gcattctgaattcgttcttt

SEQ ID NO: 536 - DNA, 20 bp, synthetic construct
  source 1..20: mol_type = other DNA
tgcattctgaattcgttctt

SEQ ID NO: 537 - DNA, 20 bp, synthetic construct
  source 1..20: mol_type = other DNA
ctgcattctgaattcgttct

SEQ ID NO: 538 - DNA, 20 bp, synthetic construct
  source 1..20: mol_type = other DNA
cctgcattctgaattcgttc

SEQ ID NO: 539 - DNA, 20 bp, synthetic construct
  source 1..20: mol_type = other DNA
acctgcattctgaattcgtt

SEQ ID NO: 540 - DNA, 20 bp, synthetic construct
  source 1..20: mol_type = other DNA
cacctgcattctgaattcgt

SEQ ID NO: 541 - DNA, 20 bp, synthetic construct
  source 1..20: mol_type = other DNA
ccacctgcattctgaattcg

SEQ ID NO: 542 - DNA, 20 bp, synthetic construct
  source 1..20: mol_type = other DNA
gccacctgcattctgaattc

SEQ ID NO: 543 - DNA, 20 bp, synthetic construct
  source 1..20: mol_type = other DNA
agccacctgcattctgaatt

SEQ ID NO: 544 - DNA, 20 bp, synthetic construct
  source 1..20: mol_type = other DNA
gagccacctgcattctgaat

SEQ ID NO: 545 - DNA, 20 bp, synthetic construct
  source 1..20: mol_type = other DNA
agagccacctgcattctgaa

SEQ ID NO: 546 - DNA, 20 bp, synthetic construct
  source 1..20: mol_type = other DNA
cagagccacctgcattctga

SEQ ID NO: 547 - DNA, 20 bp, synthetic construct
  source 1..20: mol_type = other DNA
acagagccacctgcattctg

SEQ ID NO: 548 - DNA, 20 bp, synthetic construct
  source 1..20: mol_type = other DNA
tacagagccacctgcattct

SEQ ID NO: 549 - DNA, 20 bp, synthetic construct
  source 1..20: mol_type = other DNA
ttacagagccacctgcattc

SEQ ID NO: 550 - DNA, 20 bp, synthetic construct
  source 1..20: mol_type = other DNA
attacagagccacctgcatt

SEQ ID NO: 551 - DNA, 20 bp, synthetic construct
  source 1..20: mol_type = other DNA
cattacagagccacctgcat

SEQ ID NO: 552 - DNA, 20 bp, synthetic construct
  source 1..20: mol_type = other DNA
tcattacagagccacctgca

SEQ ID NO: 553 - DNA, 20 bp, synthetic construct
  source 1..20: mol_type = other DNA
atcattacagagccacctgc

SEQ ID NO: 554 - DNA, 20 bp, synthetic construct
  source 1..20: mol_type = other DNA
aatcattacagagccacctg

SEQ ID NO: 555 - DNA, 20 bp, synthetic construct
  source 1..20: mol_type = other DNA
gaatcattacagagccacct

SEQ ID NO: 556 - DNA, 20 bp, synthetic construct
  source 1..20: mol_type = other DNA
tgaatcattacagagccacc

SEQ ID NO: 557 - DNA, 20 bp, synthetic construct
  source 1..20: mol_type = other DNA
ctgaatcattacagagccac

SEQ ID NO: 558 - DNA, 20 bp, synthetic construct
  source 1..20: mol_type = other DNA
gctgaatcattacagagcca

SEQ ID NO: 559 - DNA, 20 bp, synthetic construct
  source 1..20: mol_type = other DNA
cgctgaatcattacagagcc

SEQ ID NO: 560 - DNA, 20 bp, synthetic construct
  source 1..20: mol_type = other DNA
acgctgaatcattacagagc

SEQ ID NO: 561 - DNA, 20 bp, synthetic construct
  source 1..20: mol_type = other DNA
cacgctgaatcattacagag

SEQ ID NO: 562 - DNA, 20 bp, synthetic construct
  source 1..20: mol_type = other DNA
acacgctgaatcattacaga

SEQ ID NO: 563 - DNA, 20 bp, synthetic construct
  source 1..20: mol_type = other DNA
cacacgctgaatcattacag

SEQ ID NO: 564 - DNA, 20 bp, synthetic construct
  source 1..20: mol_type = other DNA
tcacacgctgaatcattaca

SEQ ID NO: 565 - DNA, 20 bp, synthetic construct
  source 1..20: mol_type = other DNA
ttcacacgctgaatcattac

SEQ ID NO: 566 - DNA, 20 bp, synthetic construct
  source 1..20: mol_type = other DNA
attcacacgctgaatcatta

SEQ ID NO: 567 - DNA, 20 bp, synthetic construct
  source 1..20: mol_type = other DNA
cattcacacgctgaatcatt

SEQ ID NO: 568 - DNA, 20 bp, synthetic construct
  source 1..20: mol_type = other DNA
ccattcacacgctgaatcat

SEQ ID NO: 569 - DNA, 20 bp, synthetic construct
  source 1..20: mol_type = other DNA
gccattcacacgctgaatca

SEQ ID NO: 570 - DNA, 20 bp, synthetic construct
  source 1..20: mol_type = other DNA
agccattcacacgctgaatc

SEQ ID NO: 571 - DNA, 20 bp, synthetic construct
  source 1..20: mol_type = other DNA
gagccattcacacgctgaat

SEQ ID NO: 572 - DNA, 20 bp, synthetic construct
  source 1..20: mol_type = other DNA
agagccattcacacgctgaa

SEQ ID NO: 573 - DNA, 20 bp, synthetic construct
  source 1..20: mol_type = other DNA
gagagccattcacacgctga

SEQ ID NO: 574 - DNA, 20 bp, synthetic construct
  source 1..20: mol_type = other DNA
agagagccattcacacgctg

SEQ ID NO: 575 - DNA, 20 bp, synthetic construct
  source 1..20: mol_type = other DNA
cagagagccattcacacgct

SEQ ID NO: 576 - DNA, 20 bp, synthetic construct
  source 1..20: mol_type = other DNA
ccagagagccattcacacgc

SEQ ID NO: 577 - DNA, 20 bp, synthetic construct
  source 1..20: mol_type = other DNA
gccagagagccattcacacg

SEQ ID NO: 578 - DNA, 20 bp, synthetic construct
  source 1..20: mol_type = other DNA
agccagagagccattcacac

SEQ ID NO: 579 - DNA, 20 bp, synthetic construct
  source 1..20: mol_type = other DNA
cagccagagagccattcaca

SEQ ID NO: 580 - DNA, 20 bp, synthetic construct
  source 1..20: mol_type = other DNA
acagccagagagccattcac

SEQ ID NO: 581 - DNA, 20 bp, synthetic construct
  source 1..20: mol_type = other DNA
tacagccagagagccattca

SEQ ID NO: 582 - DNA, 20 bp, synthetic construct
  source 1..20: mol_type = other DNA
atacagccagagagccattc

SEQ ID NO: 583 - DNA, 20 bp, synthetic construct
  source 1..20: mol_type = other DNA
gatacagccagagagccatt

SEQ ID NO: 584 - DNA, 20 bp, synthetic construct
  source 1..20: mol_type = other DNA
cgatacagccagagagccat

SEQ ID NO: 585 - DNA, 20 bp, synthetic construct
  source 1..20: mol_type = other DNA
tcgatacagccagagagcca

SEQ ID NO: 586 - DNA, 20 bp, synthetic construct
  source 1..20: mol_type = other DNA
ctcgatacagccagagagcc

SEQ ID NO: 587 - DNA, 20 bp, synthetic construct
  source 1..20: mol_type = other DNA
cctcgatacagccagagagc

SEQ ID NO: 588 - DNA, 20 bp, synthetic construct
  source 1..20: mol_type = other DNA
ccctcgatacagccagagag

SEQ ID NO: 589 - DNA, 20 bp, synthetic construct
  source 1..20: mol_type = other DNA
gccctcgatacagccagaga

SEQ ID NO: 590 - DNA, 20 bp, synthetic construct
  source 1..20: mol_type = other DNA
ggccctcgatacagccagag

SEQ ID NO: 591 - DNA, 20 bp, synthetic construct
  source 1..20: mol_type = other DNA
gggccctcgatacagccaga

SEQ ID NO: 592 - DNA, 20 bp, synthetic construct
  source 1..20: mol_type = other DNA
agggccctcgatacagccag

SEQ ID NO: 593 - DNA, 20 bp, synthetic construct
  source 1..20: mol_type = other DNA
aagggccctcgatacagcca

SEQ ID NO: 594 - DNA, 20 bp, synthetic construct
  source 1..20: mol_type = other DNA
caagggccctcgatacagcc

SEQ ID NO: 595 - DNA, 20 bp, synthetic construct
  source 1..20: mol_type = other DNA
ccaagggccctcgatacagc

SEQ ID NO: 596 - DNA, 20 bp, synthetic construct
  source 1..20: mol_type = other DNA
cccaagggccctcgatacag

SEQ ID NO: 597 - DNA, 20 bp, synthetic construct
  source 1..20: mol_type = other DNA
ccccaagggccctcgataca

SEQ ID NO: 598 - DNA, 20 bp, synthetic construct
  source 1..20: mol_type = other DNA
tccccaagggccctcgatac

SEQ ID NO: 599 - DNA, 20 bp, synthetic construct
  source 1..20: mol_type = other DNA
atccccaagggccctcgata

SEQ ID NO: 600 - DNA, 20 bp, synthetic construct
  source 1..20: mol_type = other DNA
aatccccaagggccctcgat

SEQ ID NO: 601 - DNA, 20 bp, synthetic construct
  source 1..20: mol_type = other DNA
aaatccccaagggccctcga

SEQ ID NO: 602 - DNA, 20 bp, synthetic construct
  source 1..20: mol_type = other DNA
aaaatccccaagggccctcg

SEQ ID NO: 603 - DNA, 20 bp, synthetic construct
  source 1..20: mol_type = other DNA
caaaatccccaagggccctc

SEQ ID NO: 604 - DNA, 20 bp, synthetic construct
  source 1..20: mol_type = other DNA
tcaaaatccccaagggccct

SEQ ID NO: 605 - DNA, 20 bp, synthetic construct
  source 1..20: mol_type = other DNA
atcaaaatccccaagggccc

SEQ ID NO: 606 - DNA, 20 bp, synthetic construct
  source 1..20: mol_type = other DNA
aatcaaaatccccaagggcc

SEQ ID NO: 607 - DNA, 20 bp, synthetic construct
  source 1..20: mol_type = other DNA
taatcaaaatccccaagggc

SEQ ID NO: 608 - DNA, 20 bp, synthetic construct
  source 1..20: mol_type = other DNA
gtaatcaaaatccccaaggg

SEQ ID NO: 609 - DNA, 20 bp, synthetic construct
  source 1..20: mol_type = other DNA
tgtaatcaaaatccccaagg

SEQ ID NO: 610 - DNA, 20 bp, synthetic construct
  source 1..20: mol_type = other DNA
ttgtaatcaaaatccccaag

SEQ ID NO: 611 - DNA, 20 bp, synthetic construct
  source 1..20: mol_type = other DNA
tttgtaatcaaaatccccaa

SEQ ID NO: 612 - DNA, 20 bp, synthetic construct
  source 1..20: mol_type = other DNA
atttgtaatcaaaatcccca

SEQ ID NO: 613 - DNA, 20 bp, synthetic construct
  source 1..20: mol_type = other DNA
catttgtaatcaaaatcccc

SEQ ID NO: 614 - DNA, 20 bp, synthetic construct
  source 1..20: mol_type = other DNA
acatttgtaatcaaaatccc

SEQ ID NO: 615 - DNA, 20 bp, synthetic construct
  source 1..20: mol_type = other DNA
cacatttgtaatcaaaatcc

SEQ ID NO: 616 - DNA, 20 bp, synthetic construct
  source 1..20: mol_type = other DNA
acacatttgtaatcaaaatc

SEQ ID NO: 617 - DNA, 20 bp, synthetic construct
  source 1..20: mol_type = other DNA
gacacatttgtaatcaaaat

SEQ ID NO: 618 - DNA, 20 bp, synthetic construct
  source 1..20: mol_type = other DNA
ggacacatttgtaatcaaaa

SEQ ID NO: 619 - DNA, 20 bp, synthetic construct
  source 1..20: mol_type = other DNA
tggacacatttgtaatcaaa

SEQ ID NO: 620 - DNA, 20 bp, synthetic construct
  source 1..20: mol_type = other DNA
atggacacatttgtaatcaa

SEQ ID NO: 621 - DNA, 20 bp, synthetic construct
  source 1..20: mol_type = other DNA
catggacacatttgtaatca

SEQ ID NO: 622 - DNA, 20 bp, synthetic construct
  source 1..20: mol_type = other DNA
ccatggacacatttgtaatc

SEQ ID NO: 623 - DNA, 20 bp, synthetic construct
  source 1..20: mol_type = other DNA
tccatggacacatttgtaat

SEQ ID NO: 624 - DNA, 20 bp, synthetic construct
  source 1..20: mol_type = other DNA
ttccatggacacatttgtaa

SEQ ID NO: 625 - DNA, 20 bp, synthetic construct
  source 1..20: mol_type = other DNA
tttccatggacacatttgta

SEQ ID NO: 626 - DNA, 20 bp, synthetic construct
  source 1..20: mol_type = other DNA
ttttccatggacacatttgt

SEQ ID NO: 627 - DNA, 20 bp, synthetic construct
  source 1..20: mol_type = other DNA
cttttccatggacacatttg

SEQ ID NO: 628 - DNA, 20 bp, synthetic construct
  source 1..20: mol_type = other DNA
ccttttccatggacacattt

SEQ ID NO: 629 - DNA, 20 bp, synthetic construct
  source 1..20: mol_type = other DNA
accttttccatggacacatt

SEQ ID NO: 630 - DNA, 20 bp, synthetic construct
  source 1..20: mol_type = other DNA
gaccttttccatggacacat

SEQ ID NO: 631 - DNA, 20 bp, synthetic construct
  source 1..20: mol_type = other DNA
ggaccttttccatggacaca

SEQ ID NO: 632 - DNA, 20 bp, synthetic construct
  source 1..20: mol_type = other DNA
aggaccttttccatggacac

SEQ ID NO: 633 - DNA, 20 bp, synthetic construct
  source 1..20: mol_type = other DNA
taggaccttttccatggaca

SEQ ID NO: 634 - DNA, 20 bp, synthetic construct
  source 1..20: mol_type = other DNA
gtaggaccttttccatggac

SEQ ID NO: 635 - DNA, 20 bp, synthetic construct
  source 1..20: mol_type = other DNA
agtaggaccttttccatgga

SEQ ID NO: 636 - DNA, 20 bp, synthetic construct
  source 1..20: mol_type = other DNA
cagtaggaccttttccatgg

SEQ ID NO: 637 - DNA, 20 bp, synthetic construct
  source 1..20: mol_type = other DNA
tcagtaggaccttttccatg

SEQ ID NO: 638 - DNA, 20 bp, synthetic construct
  source 1..20: mol_type = other DNA
ctcagtaggaccttttccat

SEQ ID NO: 639 - DNA, 20 bp, synthetic construct
  source 1..20: mol_type = other DNA
gctcagtaggaccttttcca

SEQ ID NO: 640 - DNA, 20 bp, synthetic construct
  source 1..20: mol_type = other DNA
tgctcagtaggaccttttcc

SEQ ID NO: 641 - DNA, 20 bp, synthetic construct
  source 1..20: mol_type = other DNA
ctgctcagtaggaccttttc

SEQ ID NO: 642 - DNA, 20 bp, synthetic construct
  source 1..20: mol_type = other DNA
gctgctcagtaggacctttt

SEQ ID NO: 643 - DNA, 20 bp, synthetic construct
  source 1..20: mol_type = other DNA
agctgctcagtaggaccttt

SEQ ID NO: 644 - DNA, 20 bp, synthetic construct
  source 1..20: mol_type = other DNA
aagctgctcagtaggacctt

SEQ ID NO: 645 - DNA, 20 bp, synthetic construct
  source 1..20: mol_type = other DNA
caagctgctcagtaggacct

SEQ ID NO: 646 - DNA, 20 bp, synthetic construct
  source 1..20: mol_type = other DNA
acaagctgctcagtaggacc

SEQ ID NO: 647 - DNA, 20 bp, synthetic construct
  source 1..20: mol_type = other DNA
gacaagctgctcagtaggac

SEQ ID NO: 648 - DNA, 20 bp, synthetic construct
  source 1..20: mol_type = other DNA
agacaagctgctcagtagga

SEQ ID NO: 649 - DNA, 20 bp, synthetic construct
  source 1..20: mol_type = other DNA
gagacaagctgctcagtagg

SEQ ID NO: 650 - DNA, 20 bp, synthetic construct
  source 1..20: mol_type = other DNA
tgagacaagctgctcagtag

SEQ ID NO: 651 - DNA, 20 bp, synthetic construct
  source 1..20: mol_type = other DNA
gtgagacaagctgctcagta

SEQ ID NO: 652 - DNA, 20 bp, synthetic construct
  source 1..20: mol_type = other DNA
ggtgagacaagctgctcagt

SEQ ID NO: 653 - DNA, 20 bp, synthetic construct
  source 1..20: mol_type = other DNA
tggtgagacaagctgctcag

SEQ ID NO: 654 - DNA, 20 bp, synthetic construct
  source 1..20: mol_type = other DNA
ctggtgagacaagctgctca

SEQ ID NO: 655 - DNA, 20 bp, synthetic construct
  source 1..20: mol_type = other DNA
tctggtgagacaagctgctc

SEQ ID NO: 656 - DNA, 20 bp, synthetic construct
  source 1..20: mol_type = other DNA
ctctggtgagacaagctgct

SEQ ID NO: 657 - DNA, 20 bp, synthetic construct
  source 1..20: mol_type = other DNA
gctctggtgagacaagctgc

SEQ ID NO: 658 - DNA, 20 bp, synthetic construct
  source 1..20: mol_type = other DNA
ggctctggtgagacaagctg

SEQ ID NO: 659 - DNA, 20 bp, synthetic construct
  source 1..20: mol_type = other DNA
aggctctggtgagacaagct

SEQ ID NO: 660 - DNA, 20 bp, synthetic construct
  source 1..20: mol_type = other DNA
caggctctggtgagacaagc

SEQ ID NO: 661 - DNA, 20 bp, synthetic construct
  source 1..20: mol_type = other DNA
tcaggctctggtgagacaag

SEQ ID NO: 662 - DNA, 20 bp, synthetic construct
  source 1..20: mol_type = other DNA
ttcaggctctggtgagacaa

SEQ ID NO: 663 - DNA, 20 bp, synthetic construct
  source 1..20: mol_type = other DNA
cttcaggctctggtgagaca

SEQ ID NO: 664 - DNA, 20 bp, synthetic construct
  source 1..20: mol_type = other DNA
acttcaggctctggtgagac

SEQ ID NO: 665 - DNA, 20 bp, synthetic construct
  source 1..20: mol_type = other DNA
gacttcaggctctggtgaga

SEQ ID NO: 666 - DNA, 20 bp, synthetic construct
  source 1..20: mol_type = other DNA
ggacttcaggctctggtgag

SEQ ID NO: 667 - DNA, 20 bp, synthetic construct
  source 1..20: mol_type = other DNA
tggacttcaggctctggtga

SEQ ID NO: 668 - DNA, 20 bp, synthetic construct
  source 1..20: mol_type = other DNA
atggacttcaggctctggtg

SEQ ID NO: 669 - DNA, 20 bp, synthetic construct
  source 1..20: mol_type = other DNA
catggacttcaggctctggt

SEQ ID NO: 670 - DNA, 20 bp, synthetic construct
  source 1..20: mol_type = other DNA
tcatggacttcaggctctgg

SEQ ID NO: 671 - DNA, 20 bp, synthetic construct
  source 1..20: mol_type = other DNA
atcatggacttcaggctctg

SEQ ID NO: 672 - DNA, 20 bp, synthetic construct
  source 1..20: mol_type = other DNA
tatcatggacttcaggctct

SEQ ID NO: 673 - DNA, 20 bp, synthetic construct
  source 1..20: mol_type = other DNA
atatcatggacttcaggctc

SEQ ID NO: 674 - DNA, 20 bp, synthetic construct
  source 1..20: mol_type = other DNA
aatatcatggacttcaggct

SEQ ID NO: 675 - DNA, 20 bp, synthetic construct
  source 1..20: mol_type = other DNA
caatatcatggacttcaggc

SEQ ID NO: 676 - DNA, 20 bp, synthetic construct
  source 1..20: mol_type = other DNA
tcaatatcatggacttcagg

SEQ ID NO: 677 - DNA, 20 bp, synthetic construct
  source 1..20: mol_type = other DNA
ttcaatatcatggacttcag

SEQ ID NO: 678 - DNA, 20 bp, synthetic construct
  source 1..20: mol_type = other DNA
tttcaatatcatggacttca

SEQ ID NO: 679 - DNA, 20 bp, synthetic construct
  source 1..20: mol_type = other DNA
ctttcaatatcatggacttc

SEQ ID NO: 680 - DNA, 20 bp, synthetic construct
  source 1..20: mol_type = other DNA
tctttcaatatcatggactt

SEQ ID NO: 681 - DNA, 20 bp, synthetic construct
  source 1..20: mol_type = other DNA
atctttcaatatcatggact

SEQ ID NO: 682 - DNA, 20 bp, synthetic construct
  source 1..20: mol_type = other DNA
gatctttcaatatcatggac

SEQ ID NO: 683 - DNA, 20 bp, synthetic construct
  source 1..20: mol_type = other DNA
agatctttcaatatcatgga

SEQ ID NO: 684 - DNA, 20 bp, synthetic construct
  source 1..20: mol_type = other DNA
cagatctttcaatatcatgg

SEQ ID NO: 685 - DNA, 20 bp, synthetic construct
  source 1..20: mol_type = other DNA
tcagatctttcaatatcatg

SEQ ID NO: 686 - DNA, 20 bp, synthetic construct
  source 1..20: mol_type = other DNA
ttcagatctttcaatatcat

SEQ ID NO: 687 - DNA, 20 bp, synthetic construct
  source 1..20: mol_type = other DNA
cttcagatctttcaatatca

SEQ ID NO: 688 - DNA, 20 bp, synthetic construct
  source 1..20: mol_type = other DNA
tcttcagatctttcaatatc

SEQ ID NO: 689 - DNA, 20 bp, synthetic construct
  source 1..20: mol_type = other DNA
ttcttcagatctttcaatat

SEQ ID NO: 690 - DNA, 20 bp, synthetic construct
  source 1..20: mol_type = other DNA
cttcttcagatctttcaata

SEQ ID NO: 691 - DNA, 20 bp, synthetic construct
  source 1..20: mol_type = other DNA
tcttcttcagatctttcaat

SEQ ID NO: 692 - DNA, 20 bp, synthetic construct
  source 1..20: mol_type = other DNA
atcttcttcagatctttcaa

SEQ ID NO: 693 - DNA, 20 bp, synthetic construct
  source 1..20: mol_type = other DNA
catcttcttcagatctttca

SEQ ID NO: 694 - DNA, 20 bp, synthetic construct
  source 1..20: mol_type = other DNA
tcatcttcttcagatctttc

SEQ ID NO: 695 - DNA, 20 bp, synthetic construct
  source 1..20: mol_type = other DNA
atcatcttcttcagatcttt

SEQ ID NO: 696 - DNA, 20 bp, synthetic construct
  source 1..20: mol_type = other DNA
gatcatcttcttcagatctt

SEQ ID NO: 697 - DNA, 20 bp, synthetic construct
  source 1..20: mol_type = other DNA
tgatcatcttcttcagatct

SEQ ID NO: 698 - DNA, 20 bp, synthetic construct
  source 1..20: mol_type = other DNA
ctgatcatcttcttcagatc

SEQ ID NO: 699 - DNA, 20 bp, synthetic construct
  source 1..20: mol_type = other DNA
actgatcatcttcttcagat

SEQ ID NO: 700 - DNA, 20 bp, synthetic construct
  source 1..20: mol_type = other DNA
aactgatcatcttcttcaga

SEQ ID NO: 701 - DNA, 20 bp, synthetic construct
  source 1..20: mol_type = other DNA
gaactgatcatcttcttcag

SEQ ID NO: 702 - DNA, 20 bp, synthetic construct
  source 1..20: mol_type = other DNA
tgaactgatcatcttcttca

SEQ ID NO: 703 - DNA, 20 bp, synthetic construct
  source 1..20: mol_type = other DNA
atgaactgatcatcttcttc

SEQ ID NO: 704 - DNA, 20 bp, synthetic construct
  source 1..20: mol_type = other DNA
aatgaactgatcatcttctt

SEQ ID NO: 705 - DNA, 20 bp, synthetic construct
  source 1..20: mol_type = other DNA
taatgaactgatcatcttct

SEQ ID NO: 706 - DNA, 20 bp, synthetic construct
  source 1..20: mol_type = other DNA
ataatgaactgatcatcttc

SEQ ID NO: 707 - DNA, 20 bp, synthetic construct
  source 1..20: mol_type = other DNA
gataatgaactgatcatctt

SEQ ID NO: 708 - DNA, 20 bp, synthetic construct
  source 1..20: mol_type = other DNA
ggataatgaactgatcatct

SEQ ID NO: 709 - DNA, 20 bp, synthetic construct
  source 1..20: mol_type = other DNA
aggataatgaactgatcatc

SEQ ID NO: 710 - DNA, 20 bp, synthetic construct
  source 1..20: mol_type = other DNA
aaggataatgaactgatcat

SEQ ID NO: 711 - DNA, 20 bp, synthetic construct
  source 1..20: mol_type = other DNA
caaggataatgaactgatca

SEQ ID NO: 712 - DNA, 20 bp, synthetic construct
  source 1..20: mol_type = other DNA
gcaaggataatgaactgatc

SEQ ID NO: 713 - DNA, 20 bp, synthetic construct
  source 1..20: mol_type = other DNA
tgcaaggataatgaactgat

SEQ ID NO: 714 - DNA, 20 bp, synthetic construct
  source 1..20: mol_type = other DNA
atgcaaggataatgaactga

SEQ ID NO: 715 - DNA, 20 bp, synthetic construct
  source 1..20: mol_type = other DNA
catgcaaggataatgaactg

SEQ ID NO: 716 - DNA, 20 bp, synthetic construct
  source 1..20: mol_type = other DNA
acatgcaaggataatgaact

SEQ ID NO: 717 - DNA, 20 bp, synthetic construct
  source 1..20: mol_type = other DNA
cacatgcaaggataatgaac

SEQ ID NO: 718 - DNA, 20 bp, synthetic construct
  source 1..20: mol_type = other DNA
tcacatgcaaggataatgaa

SEQ ID NO: 719 - DNA, 20 bp, synthetic construct
  source 1..20: mol_type = other DNA
atcacatgcaaggataatga

SEQ ID NO: 720 - DNA, 20 bp, synthetic construct
  source 1..20: mol_type = other DNA
catcacatgcaaggataatg

SEQ ID NO: 721 - DNA, 20 bp, synthetic construct
  source 1..20: mol_type = other DNA
ccatcacatgcaaggataat

SEQ ID NO: 722 - DNA, 20 bp, synthetic construct
  source 1..20: mol_type = other DNA
accatcacatgcaaggataa

SEQ ID NO: 723 - DNA, 20 bp, synthetic construct
  source 1..20: mol_type = other DNA
taccatcacatgcaaggata

SEQ ID NO: 724 - DNA, 20 bp, synthetic construct
  source 1..20: mol_type = other DNA
ataccatcacatgcaaggat

SEQ ID NO: 725 - DNA, 20 bp, synthetic construct
  source 1..20: mol_type = other DNA
gataccatcacatgcaagga

SEQ ID NO: 726 - DNA, 20 bp, synthetic construct
  source 1..20: mol_type = other DNA
agataccatcacatgcaagg

SEQ ID NO: 727 - DNA, 20 bp, synthetic construct
  source 1..20: mol_type = other DNA
cagataccatcacatgcaag

SEQ ID NO: 728 - DNA, 20 bp, synthetic construct
  source 1..20: mol_type = other DNA
ccagataccatcacatgcaa

SEQ ID NO: 729 - DNA, 20 bp, synthetic construct
  source 1..20: mol_type = other DNA
cccagataccatcacatgca

SEQ ID NO: 730 - DNA, 20 bp, synthetic construct
  source 1..20: mol_type = other DNA
tcccagataccatcacatgc

SEQ ID NO: 731 - DNA, 20 bp, synthetic construct
  source 1..20: mol_type = other DNA
atcccagataccatcacatg

SEQ ID NO: 732 - DNA, 20 bp, synthetic construct
  source 1..20: mol_type = other DNA
catcccagataccatcacat

SEQ ID NO: 733 - DNA, 20 bp, synthetic construct
  source 1..20: mol_type = other DNA
acatcccagataccatcaca

SEQ ID NO: 734 - DNA, 20 bp, synthetic construct
  source 1..20: mol_type = other DNA
aacatcccagataccatcac

SEQ ID NO: 735 - DNA, 20 bp, synthetic construct
  source 1..20: mol_type = other DNA
taacatcccagataccatca

SEQ ID NO: 736 - DNA, 20 bp, synthetic construct
  source 1..20: mol_type = other DNA
ataacatcccagataccatc

SEQ ID NO: 737 - DNA, 20 bp, synthetic construct
  source 1..20: mol_type = other DNA
cataacatcccagataccat

SEQ ID NO: 738 - DNA, 20 bp, synthetic construct
  source 1..20: mol_type = other DNA
ccataacatcccagatacca

SEQ ID NO: 739 - DNA, 20 bp, synthetic construct
  source 1..20: mol_type = other DNA
cccataacatcccagatacc

SEQ ID NO: 740 - DNA, 20 bp, synthetic construct
  source 1..20: mol_type = other DNA
tcccataacatcccagatac

SEQ ID NO: 741 - DNA, 20 bp, synthetic construct
  source 1..20: mol_type = other DNA
ttcccataacatcccagata

SEQ ID NO: 742 - DNA, 20 bp, synthetic construct
  source 1..20: mol_type = other DNA
tttcccataacatcccagat

SEQ ID NO: 743 - DNA, 20 bp, synthetic construct
  source 1..20: mol_type = other DNA
atttcccataacatcccaga

SEQ ID NO: 744 - DNA, 20 bp, synthetic construct
  source 1..20: mol_type = other DNA
catttcccataacatcccag

SEQ ID NO: 745 - DNA, 20 bp, synthetic construct
  source 1..20: mol_type = other DNA
tcatttcccataacatccca

SEQ ID NO: 746 - DNA, 20 bp, synthetic construct
  source 1..20: mol_type = other DNA
ttcatttcccataacatccc

SEQ ID NO: 747 - DNA, 20 bp, synthetic construct
  source 1..20: mol_type = other DNA
cttcatttcccataacatcc

SEQ ID NO: 748 - DNA, 20 bp, synthetic construct
  source 1..20: mol_type = other DNA
tcttcatttcccataacatc

SEQ ID NO: 749 - DNA, 20 bp, synthetic construct
  source 1..20: mol_type = other DNA
ctcttcatttcccataacat

SEQ ID NO: 750 - DNA, 20 bp, synthetic construct
  source 1..20: mol_type = other DNA
gctcttcatttcccataaca

SEQ ID NO: 751 - DNA, 20 bp, synthetic construct
  source 1..20: mol_type = other DNA
agctcttcatttcccataac

SEQ ID NO: 752 - DNA, 20 bp, synthetic construct
  source 1..20: mol_type = other DNA
gagctcttcatttcccataa

SEQ ID NO: 753 - DNA, 20 bp, synthetic construct
  source 1..20: mol_type = other DNA
agagctcttcatttcccata

SEQ ID NO: 754 - DNA, 20 bp, synthetic construct
  source 1..20: mol_type = other DNA
cagagctcttcatttcccat

SEQ ID NO: 755 - DNA, 20 bp, synthetic construct
  source 1..20: mol_type = other DNA
acagagctcttcatttccca

SEQ ID NO: 756 - DNA, 20 bp, synthetic construct
  source 1..20: mol_type = other DNA
cacagagctcttcatttccc

SEQ ID NO: 757 - DNA, 20 bp, synthetic construct
  source 1..20: mol_type = other DNA
tcacagagctcttcatttcc

SEQ ID NO: 758 - DNA, 20 bp, synthetic construct
  source 1..20: mol_type = other DNA
atcacagagctcttcatttc

SEQ ID NO: 759 - DNA, 20 bp, synthetic construct
  source 1..20: mol_type = other DNA
aatcacagagctcttcattt

SEQ ID NO: 760 - DNA, 20 bp, synthetic construct
  source 1..20: mol_type = other DNA
aaatcacagagctcttcatt

SEQ ID NO: 761 - DNA, 20 bp, synthetic construct
  source 1..20: mol_type = other DNA
aaaatcacagagctcttcat

SEQ ID NO: 762 - DNA, 20 bp, synthetic construct
  source 1..20: mol_type = other DNA
caaaatcacagagctcttca

SEQ ID NO: 763 - DNA, 20 bp, synthetic construct
  source 1..20: mol_type = other DNA
acaaaatcacagagctcttc

SEQ ID NO: 764 - DNA, 20 bp, synthetic construct
  source 1..20: mol_type = other DNA
tacaaaatcacagagctctt

SEQ ID NO: 765 - DNA, 20 bp, synthetic construct
  source 1..20: mol_type = other DNA
ttacaaaatcacagagctct

SEQ ID NO: 766 - DNA, 20 bp, synthetic construct
  source 1..20: mol_type = other DNA
cttacaaaatcacagagctc

SEQ ID NO: 767 - DNA, 20 bp, synthetic construct
  source 1..20: mol_type = other DNA
tcttacaaaatcacagagct

SEQ ID NO: 768 - DNA, 20 bp, synthetic construct
  source 1..20: mol_type = other DNA
atcttacaaaatcacagagc

SEQ ID NO: 769 - DNA, 20 bp, synthetic construct
  source 1..20: mol_type = other DNA
gatcttacaaaatcacagag

SEQ ID NO: 770 - DNA, 20 bp, synthetic construct
  source 1..20: mol_type = other DNA
ggatcttacaaaatcacaga

SEQ ID NO: 771 - DNA, 20 bp, synthetic construct
  source 1..20: mol_type = other DNA
tggatcttacaaaatcacag

SEQ ID NO: 772 - DNA, 20 bp, synthetic construct
  source 1..20: mol_type = other DNA
ctggatcttacaaaatcaca

SEQ ID NO: 773 - DNA, 20 bp, synthetic construct
  source 1..20: mol_type = other DNA
tctggatcttacaaaatcac

SEQ ID NO: 774 - DNA, 20 bp, synthetic construct
  source 1..20: mol_type = other DNA
gtctggatcttacaaaatca

SEQ ID NO: 775 - DNA, 20 bp, synthetic construct
  source 1..20: mol_type = other DNA
agtctggatcttacaaaatc

SEQ ID NO: 776 - DNA, 20 bp, synthetic construct
  source 1..20: mol_type = other DNA
aagtctggatcttacaaaat

SEQ ID NO: 777 - DNA, 20 bp, synthetic construct
  source 1..20: mol_type = other DNA
caagtctggatcttacaaaa

SEQ ID NO: 778 - DNA, 20 bp, synthetic construct
  source 1..20: mol_type = other DNA
tcaagtctggatcttacaaa

SEQ ID NO: 779 - DNA, 20 bp, synthetic construct
  source 1..20: mol_type = other DNA
ttcaagtctggatcttacaa

SEQ ID NO: 780 - DNA, 20 bp, synthetic construct
  source 1..20: mol_type = other DNA
cttcaagtctggatcttaca

SEQ ID NO: 781 - DNA, 20 bp, synthetic construct
  source 1..20: mol_type = other DNA
acttcaagtctggatcttac

SEQ ID NO: 782 - DNA, 20 bp, synthetic construct
  source 1..20: mol_type = other DNA
gacttcaagtctggatctta

SEQ ID NO: 783 - DNA, 20 bp, synthetic construct
  source 1..20: mol_type = other DNA
tgacttcaagtctggatctt

SEQ ID NO: 784 - DNA, 20 bp, synthetic construct
  source 1..20: mol_type = other DNA
gtgacttcaagtctggatct

SEQ ID NO: 785 - DNA, 20 bp, synthetic construct
  source 1..20: mol_type = other DNA
agtgacttcaagtctggatc

SEQ ID NO: 786 - DNA, 20 bp, synthetic construct
  source 1..20: mol_type = other DNA
cagtgacttcaagtctggat

SEQ ID NO: 787 - DNA, 20 bp, synthetic construct
  source 1..20: mol_type = other DNA
tcagtgacttcaagtctgga

SEQ ID NO: 788 - DNA, 20 bp, synthetic construct
  source 1..20: mol_type = other DNA
atcagtgacttcaagtctgg

SEQ ID NO: 789 - DNA, 20 bp, synthetic construct
  source 1..20: mol_type = other DNA
catcagtgacttcaagtctg

SEQ ID NO: 790 - DNA, 20 bp, synthetic construct
  source 1..20: mol_type = other DNA
tcatcagtgacttcaagtct

SEQ ID NO: 791 - DNA, 20 bp, synthetic construct
  source 1..20: mol_type = other DNA
gtcatcagtgacttcaagtc

SEQ ID NO: 792 - DNA, 20 bp, synthetic construct
  source 1..20: mol_type = other DNA
ggtcatcagtgacttcaagt

SEQ ID NO: 793 - DNA, 20 bp, synthetic construct
  source 1..20: mol_type = other DNA
aggtcatcagtgacttcaag

SEQ ID NO: 794 - DNA, 20 bp, synthetic construct
  source 1..20: mol_type = other DNA
aaggtcatcagtgacttcaa

SEQ ID NO: 795 - DNA, 20 bp, synthetic construct
  source 1..20: mol_type = other DNA
caaggtcatcagtgacttca

SEQ ID NO: 796 - DNA, 20 bp, synthetic construct
  source 1..20: mol_type = other DNA
tcaaggtcatcagtgacttc

SEQ ID NO: 797 - DNA, 20 bp, synthetic construct
  source 1..20: mol_type = other DNA
ctcaaggtcatcagtgactt

SEQ ID NO: 798 - DNA, 20 bp, synthetic construct
  source 1..20: mol_type = other DNA
tctcaaggtcatcagtgact

SEQ ID NO: 799 - DNA, 20 bp, synthetic construct
  source 1..20: mol_type = other DNA
ttctcaaggtcatcagtgac

SEQ ID NO: 800 - DNA, 20 bp, synthetic construct
  source 1..20: mol_type = other DNA
tttctcaaggtcatcagtga

SEQ ID NO: 801 - DNA, 20 bp, synthetic construct
  source 1..20: mol_type = other DNA
ctttctcaaggtcatcagtg

SEQ ID NO: 802 - DNA, 20 bp, synthetic construct
  source 1..20: mol_type = other DNA
actttctcaaggtcatcagt

SEQ ID NO: 803 - DNA, 20 bp, synthetic construct
  source 1..20: mol_type = other DNA
aactttctcaaggtcatcag

SEQ ID NO: 804 - DNA, 20 bp, synthetic construct
  source 1..20: mol_type = other DNA
aaactttctcaaggtcatca

SEQ ID NO: 805 - DNA, 20 bp, synthetic construct
  source 1..20: mol_type = other DNA
caaactttctcaaggtcatc

SEQ ID NO: 806 - DNA, 20 bp, synthetic construct
  source 1..20: mol_type = other DNA
gcaaactttctcaaggtcat

SEQ ID NO: 807 - DNA, 20 bp, synthetic construct
  source 1..20: mol_type = other DNA
tgcaaactttctcaaggtca

SEQ ID NO: 808 - DNA, 20 bp, synthetic construct
  source 1..20: mol_type = other DNA
ttgcaaactttctcaaggtc

SEQ ID NO: 809 - DNA, 20 bp, synthetic construct
  source 1..20: mol_type = other DNA
attgcaaactttctcaaggt

SEQ ID NO: 810 - DNA, 20 bp, synthetic construct
  source 1..20: mol_type = other DNA
cattgcaaactttctcaagg

SEQ ID NO: 811 - DNA, 20 bp, synthetic construct
  source 1..20: mol_type = other DNA
tcattgcaaactttctcaag

SEQ ID NO: 812 - DNA, 20 bp, synthetic construct
  source 1..20: mol_type = other DNA
ttcattgcaaactttctcaa

SEQ ID NO: 813 - DNA, 20 bp, synthetic construct
  source 1..20: mol_type = other DNA
cttcattgcaaactttctca

SEQ ID NO: 814 - DNA, 20 bp, synthetic construct
  source 1..20: mol_type = other DNA
acttcattgcaaactttctc

SEQ ID NO: 815 - DNA, 20 bp, synthetic construct
  source 1..20: mol_type = other DNA
tacttcattgcaaactttct

SEQ ID NO: 816 - DNA, 20 bp, synthetic construct
  source 1..20: mol_type = other DNA
ctacttcattgcaaactttc

SEQ ID NO: 817 - DNA, 20 bp, synthetic construct
  source 1..20: mol_type = other DNA
actacttcattgcaaacttt

SEQ ID NO: 818 - DNA, 20 bp, synthetic construct
  source 1..20: mol_type = other DNA
gactacttcattgcaaactt

SEQ ID NO: 819 - DNA, 20 bp, synthetic construct
  source 1..20: mol_type = other DNA
cgactacttcattgcaaact

SEQ ID NO: 820 - DNA, 20 bp, synthetic construct
  source 1..20: mol_type = other DNA
tcgactacttcattgcaaac

SEQ ID NO: 821 - DNA, 20 bp, synthetic construct
  source 1..20: mol_type = other DNA
gtcgactacttcattgcaaa

SEQ ID NO: 822 - DNA, 20 bp, synthetic construct
  source 1..20: mol_type = other DNA
tgtcgactacttcattgcaa

SEQ ID NO: 823 - DNA, 20 bp, synthetic construct
  source 1..20: mol_type = other DNA
gtgtcgactacttcattgca

SEQ ID NO: 824 - DNA, 20 bp, synthetic construct
  source 1..20: mol_type = other DNA
ggtgtcgactacttcattgc

SEQ ID NO: 825 - DNA, 20 bp, synthetic construct
  source 1..20: mol_type = other DNA
aggtgtcgactacttcattg

SEQ ID NO: 826 - DNA, 20 bp, synthetic construct
  source 1..20: mol_type = other DNA
caggtgtcgactacttcatt

SEQ ID NO: 827 - DNA, 20 bp, synthetic construct
  source 1..20: mol_type = other DNA
acaggtgtcgactacttcat

SEQ ID NO: 828 - DNA, 20 bp, synthetic construct
  source 1..20: mol_type = other DNA
aacaggtgtcgactacttca

SEQ ID NO: 829 - DNA, 20 bp, synthetic construct
  source 1..20: mol_type = other DNA
aaacaggtgtcgactacttc

SEQ ID NO: 830 - DNA, 20 bp, synthetic construct
  source 1..20: mol_type = other DNA
caaacaggtgtcgactactt

SEQ ID NO: 831 - DNA, 20 bp, synthetic construct
  source 1..20: mol_type = other DNA
acaaacaggtgtcgactact

SEQ ID NO: 832 - DNA, 20 bp, synthetic construct
  source 1..20: mol_type = other DNA
tacaaacaggtgtcgactac

SEQ ID NO: 833 - DNA, 20 bp, synthetic construct
  source 1..20: mol_type = other DNA
atacaaacaggtgtcgacta

SEQ ID NO: 834 - DNA, 20 bp, synthetic construct
  source 1..20: mol_type = other DNA
tatacaaacaggtgtcgact

SEQ ID NO: 835 - DNA, 20 bp, synthetic construct
  source 1..20: mol_type = other DNA
ttatacaaacaggtgtcgac

SEQ ID NO: 836 - DNA, 20 bp, synthetic construct
  source 1..20: mol_type = other DNA
cttatacaaacaggtgtcga

SEQ ID NO: 837 - DNA, 20 bp, synthetic construct
  source 1..20: mol_type = other DNA
ccttatacaaacaggtgtcg

SEQ ID NO: 838 - DNA, 20 bp, synthetic construct
  source 1..20: mol_type = other DNA
cccttatacaaacaggtgtc

SEQ ID NO: 839 - DNA, 20 bp, synthetic construct
  source 1..20: mol_type = other DNA
tcccttatacaaacaggtgt

SEQ ID NO: 840 - DNA, 20 bp, synthetic construct
  source 1..20: mol_type = other DNA
ttcccttatacaaacaggtg

SEQ ID NO: 841 - DNA, 20 bp, synthetic construct
  source 1..20: mol_type = other DNA
cttcccttatacaaacaggt

SEQ ID NO: 842 - DNA, 20 bp, synthetic construct
  source 1..20: mol_type = other DNA
acttcccttatacaaacagg

SEQ ID NO: 843 - DNA, 20 bp, synthetic construct
  source 1..20: mol_type = other DNA
gacttcccttatacaaacag

SEQ ID NO: 844 - DNA, 20 bp, synthetic construct
  source 1..20: mol_type = other DNA
cgacttcccttatacaaaca

SEQ ID NO: 845 - DNA, 20 bp, synthetic construct
  source 1..20: mol_type = other DNA
tcgacttcccttatacaaac

SEQ ID NO: 846 - DNA, 20 bp, synthetic construct
  source 1..20: mol_type = other DNA
ctcgacttcccttatacaaa

SEQ ID NO: 847 - DNA, 20 bp, synthetic construct
  source 1..20: mol_type = other DNA
tctcgacttcccttatacaa

SEQ ID NO: 848 - DNA, 20 bp, synthetic construct
  source 1..20: mol_type = other DNA
gtctcgacttcccttataca

SEQ ID NO: 849 - DNA, 20 bp, synthetic construct
  source 1..20: mol_type = other DNA
tgtctcgacttcccttatac

SEQ ID NO: 850 - DNA, 20 bp, synthetic construct
  source 1..20: mol_type = other DNA
ttgtctcgacttcccttata

SEQ ID NO: 851 - DNA, 20 bp, synthetic construct
  source 1..20: mol_type = other DNA
gttgtctcgacttcccttat

SEQ ID NO: 852 - DNA, 20 bp, synthetic construct
  source 1..20: mol_type = other DNA
tgttgtctcgacttccctta

SEQ ID NO: 853 - DNA, 20 bp, synthetic construct
  source 1..20: mol_type = other DNA
atgttgtctcgacttccctt

SEQ ID NO: 854 - DNA, 20 bp, synthetic construct
  source 1..20: mol_type = other DNA
catgttgtctcgacttccct

SEQ ID NO: 855 - DNA, 20 bp, synthetic construct
  source 1..20: mol_type = other DNA
tcatgttgtctcgacttccc

SEQ ID NO: 856 - DNA, 20 bp, synthetic construct
  source 1..20: mol_type = other DNA
ctcatgttgtctcgacttcc

SEQ ID NO: 857 - DNA, 20 bp, synthetic construct
  source 1..20: mol_type = other DNA
actcatgttgtctcgacttc

SEQ ID NO: 858 - DNA, 20 bp, synthetic construct
  source 1..20: mol_type = other DNA
cactcatgttgtctcgactt

SEQ ID NO: 859 - DNA, 20 bp, synthetic construct
  source 1..20: mol_type = other DNA
acactcatgttgtctcgact

SEQ ID NO: 860 - DNA, 20 bp, synthetic construct
  source 1..20: mol_type = other DNA
cacactcatgttgtctcgac

SEQ ID NO: 861 - DNA, 20 bp, synthetic construct
  source 1..20: mol_type = other DNA
tcacactcatgttgtctcga

SEQ ID NO: 862 - DNA, 20 bp, synthetic construct
  source 1..20: mol_type = other DNA
atcacactcatgttgtctcg

SEQ ID NO: 863 - DNA, 20 bp, synthetic construct
  source 1..20: mol_type = other DNA
aatcacactcatgttgtctc

SEQ ID NO: 864 - DNA, 20 bp, synthetic construct
  source 1..20: mol_type = other DNA
aaatcacactcatgttgtct

SEQ ID NO: 865 - DNA, 20 bp, synthetic construct
  source 1..20: mol_type = other DNA
aaaatcacactcatgttgtc

SEQ ID NO: 866 - DNA, 20 bp, synthetic construct
  source 1..20: mol_type = other DNA
caaaatcacactcatgttgt

SEQ ID NO: 867 - DNA, 20 bp, synthetic construct
  source 1..20: mol_type = other DNA
tcaaaatcacactcatgttg

SEQ ID NO: 868 - DNA, 20 bp, synthetic construct
  source 1..20: mol_type = other DNA
atcaaaatcacactcatgtt

SEQ ID NO: 869 - DNA, 20 bp, synthetic construct
  source 1..20: mol_type = other DNA
gatcaaaatcacactcatgt

SEQ ID NO: 870 - DNA, 20 bp, synthetic construct
  source 1..20: mol_type = other DNA
agatcaaaatcacactcatg

SEQ ID NO: 871 - DNA, 20 bp, synthetic construct
  source 1..20: mol_type = other DNA
cagatcaaaatcacactcat

SEQ ID NO: 872 - DNA, 20 bp, synthetic construct
  source 1..20: mol_type = other DNA
acagatcaaaatcacactca

SEQ ID NO: 873 - DNA, 20 bp, synthetic construct
  source 1..20: mol_type = other DNA
aacagatcaaaatcacactc

SEQ ID NO: 874 - DNA, 20 bp, synthetic construct
  source 1..20: mol_type = other DNA
aaacagatcaaaatcacact

SEQ ID NO: 875 - DNA, 20 bp, synthetic construct
  source 1..20: mol_type = other DNA
aaaacagatcaaaatcacac

SEQ ID NO: 876 - DNA, 20 bp, synthetic construct
  source 1..20: mol_type = other DNA
gaaaacagatcaaaatcaca

SEQ ID NO: 877 - DNA, 20 bp, synthetic construct
  source 1..20: mol_type = other DNA
ggaaaacagatcaaaatcac

SEQ ID NO: 878 - DNA, 20 bp, synthetic construct
  source 1..20: mol_type = other DNA
tggaaaacagatcaaaatca

SEQ ID NO: 879 - DNA, 20 bp, synthetic construct
  source 1..20: mol_type = other DNA
ttggaaaacagatcaaaatc

SEQ ID NO: 880 - DNA, 20 bp, synthetic construct
  source 1..20: mol_type = other DNA
tttggaaaacagatcaaaat

SEQ ID NO: 881 - DNA, 20 bp, synthetic construct
  source 1..20: mol_type = other DNA
atttggaaaacagatcaaaa

SEQ ID NO: 882 - DNA, 20 bp, synthetic construct
  source 1..20: mol_type = other DNA
catttggaaaacagatcaaa

SEQ ID NO: 883 - DNA, 20 bp, synthetic construct
  source 1..20: mol_type = other DNA
gcatttggaaaacagatcaa

SEQ ID NO: 884 - DNA, 20 bp, synthetic construct
  source 1..20: mol_type = other DNA
tgcatttggaaaacagatca

SEQ ID NO: 885 - DNA, 20 bp, synthetic construct
  source 1..20: mol_type = other DNA
gtgcatttggaaaacagatc

SEQ ID NO: 886 - DNA, 20 bp, synthetic construct
  source 1..20: mol_type = other DNA
ggtgcatttggaaaacagat

SEQ ID NO: 887 - DNA, 20 bp, synthetic construct
  source 1..20: mol_type = other DNA
gggtgcatttggaaaacaga

SEQ ID NO: 888 - DNA, 20 bp, synthetic construct
  source 1..20: mol_type = other DNA
tgggtgcatttggaaaacag

SEQ ID NO: 889 - DNA, 20 bp, synthetic construct
  source 1..20: mol_type = other DNA
ttgggtgcatttggaaaaca

SEQ ID NO: 890 - DNA, 20 bp, synthetic construct
  source 1..20: mol_type = other DNA
tttgggtgcatttggaaaac

SEQ ID NO: 891 - DNA, 20 bp, synthetic construct
  source 1..20: mol_type = other DNA
ctttgggtgcatttggaaaa

SEQ ID NO: 892 - DNA, 20 bp, synthetic construct
  source 1..20: mol_type = other DNA
actttgggtgcatttggaaa

SEQ ID NO: 893 - DNA, 20 bp, synthetic construct
  source 1..20: mol_type = other DNA
tactttgggtgcatttggaa

SEQ ID NO: 894 - DNA, 20 bp, synthetic construct
  source 1..20: mol_type = other DNA
atactttgggtgcatttgga

SEQ ID NO: 895 - DNA, 20 bp, synthetic construct
  source 1..20: mol_type = other DNA
gatactttgggtgcatttgg

SEQ ID NO: 896 - DNA, 20 bp, synthetic construct
  source 1..20: mol_type = other DNA
cgatactttgggtgcatttg

SEQ ID NO: 897 - DNA, 20 bp, synthetic construct
  source 1..20: mol_type = other DNA
gcgatactttgggtgcattt

SEQ ID NO: 898 - DNA, 20 bp, synthetic construct
  source 1..20: mol_type = other DNA
ggcgatactttgggtgcatt

SEQ ID NO: 899 - DNA, 20 bp, synthetic construct
  source 1..20: mol_type = other DNA
tggcgatactttgggtgcat

SEQ ID NO: 900 - DNA, 20 bp, synthetic construct
  source 1..20: mol_type = other DNA
ctggcgatactttgggtgca

SEQ ID NO: 901 - DNA, 20 bp, synthetic construct
  source 1..20: mol_type = other DNA
tctggcgatactttgggtgc

SEQ ID NO: 902 - DNA, 20 bp, synthetic construct
  source 1..20: mol_type = other DNA
ttctggcgatactttgggtg

SEQ ID NO: 903 - DNA, 20 bp, synthetic construct
  source 1..20: mol_type = other DNA
cttctggcgatactttgggt

SEQ ID NO: 904 - DNA, 20 bp, synthetic construct
  source 1..20: mol_type = other DNA
gcttctggcgatactttggg

SEQ ID NO: 905 - DNA, 20 bp, synthetic construct
  source 1..20: mol_type = other DNA
tgcttctggcgatactttgg

SEQ ID NO: 906 - DNA, 20 bp, synthetic construct
  source 1..20: mol_type = other DNA
ctgcttctggcgatactttg

SEQ ID NO: 907 - DNA, 20 bp, synthetic construct
  source 1..20: mol_type = other DNA
actgcttctggcgatacttt

SEQ ID NO: 908 - DNA, 20 bp, synthetic construct
  source 1..20: mol_type = other DNA
cactgcttctggcgatactt

SEQ ID NO: 909 - DNA, 20 bp, synthetic construct
  source 1..20: mol_type = other DNA
tcactgcttctggcgatact

SEQ ID NO: 910 - DNA, 20 bp, synthetic construct
  source 1..20: mol_type = other DNA
ttcactgcttctggcgatac

SEQ ID NO: 911 - DNA, 20 bp, synthetic construct
  source 1..20: mol_type = other DNA
cttcactgcttctggcgata

SEQ ID NO: 912 - DNA, 20 bp, synthetic construct
  source 1..20: mol_type = other DNA
tcttcactgcttctggcgat

SEQ ID NO: 913 - DNA, 20 bp, synthetic construct
  source 1..20: mol_type = other DNA
ttcttcactgcttctggcga

SEQ ID NO: 914 - DNA, 20 bp, synthetic construct
  source 1..20: mol_type = other DNA
cttcttcactgcttctggcg

SEQ ID NO: 915 - DNA, 20 bp, synthetic construct
  source 1..20: mol_type = other DNA
ccttcttcactgcttctggc

SEQ ID NO: 916 - DNA, 20 bp, synthetic construct
  source 1..20: mol_type = other DNA
tccttcttcactgcttctgg

SEQ ID NO: 917 - DNA, 20 bp, synthetic construct
  source 1..20: mol_type = other DNA
ctccttcttcactgcttctg

SEQ ID NO: 918 - DNA, 20 bp, synthetic construct
  source 1..20: mol_type = other DNA
cctccttcttcactgcttct

SEQ ID NO: 919 - DNA, 20 bp, synthetic construct
  source 1..20: mol_type = other DNA
gcctccttcttcactgcttc

SEQ ID NO: 920 - DNA, 20 bp, synthetic construct
  source 1..20: mol_type = other DNA
tgcctccttcttcactgctt

SEQ ID NO: 921 - DNA, 20 bp, synthetic construct
  source 1..20: mol_type = other DNA
ctgcctccttcttcactgct

SEQ ID NO: 922 - DNA, 20 bp, synthetic construct
  source 1..20: mol_type = other DNA
tctgcctccttcttcactgc

SEQ ID NO: 923 - DNA, 20 bp, synthetic construct
  source 1..20: mol_type = other DNA
ctctgcctccttcttcactg

SEQ ID NO: 924 - DNA, 20 bp, synthetic construct
  source 1..20: mol_type = other DNA
actctgcctccttcttcact

SEQ ID NO: 925 - DNA, 20 bp, synthetic construct
  source 1..20: mol_type = other DNA
aactctgcctccttcttcac

SEQ ID NO: 926 - DNA, 20 bp, synthetic construct
  source 1..20: mol_type = other DNA
caactctgcctccttcttca

SEQ ID NO: 927 - DNA, 20 bp, synthetic construct
  source 1..20: mol_type = other DNA
ccaactctgcctccttcttc

SEQ ID NO: 928 - DNA, 20 bp, synthetic construct
  source 1..20: mol_type = other DNA
tccaactctgcctccttctt

SEQ ID NO: 929 - DNA, 20 bp, synthetic construct
  source 1..20: mol_type = other DNA
gtccaactctgcctccttct

SEQ ID NO: 930 - DNA, 20 bp, synthetic construct
  source 1..20: mol_type = other DNA
tgtccaactctgcctccttc

SEQ ID NO: 931 - DNA, 20 bp, synthetic construct
  source 1..20: mol_type = other DNA
ttgtccaactctgcctcctt

SEQ ID NO: 932 - DNA, 20 bp, synthetic construct
  source 1..20: mol_type = other DNA
cttgtccaactctgcctcct

SEQ ID NO: 933 - DNA, 20 bp, synthetic construct
  source 1..20: mol_type = other DNA
acttgtccaactctgcctcc

SEQ ID NO: 934 - DNA, 20 bp, synthetic construct
  source 1..20: mol_type = other DNA
tacttgtccaactctgcctc

SEQ ID NO: 935 - DNA, 20 bp, synthetic construct
  source 1..20: mol_type = other DNA
gtacttgtccaactctgcct

SEQ ID NO: 936 - DNA, 20 bp, synthetic construct
  source 1..20: mol_type = other DNA
ggtacttgtccaactctgcc

SEQ ID NO: 937 - DNA, 20 bp, synthetic construct
  source 1..20: mol_type = other DNA
aggtacttgtccaactctgc

SEQ ID NO: 938 - DNA, 20 bp, synthetic construct
  source 1..20: mol_type = other DNA
caggtacttgtccaactctg

SEQ ID NO: 939 - DNA, 20 bp, synthetic construct
  source 1..20: mol_type = other DNA
ccaggtacttgtccaactct

SEQ ID NO: 940 - DNA, 20 bp, synthetic construct
  source 1..20: mol_type = other DNA
tccaggtacttgtccaactc

SEQ ID NO: 941 - DNA, 20 bp, synthetic construct
  source 1..20: mol_type = other DNA
ttccaggtacttgtccaact

SEQ ID NO: 942 - DNA, 20 bp, synthetic construct
  source 1..20: mol_type = other DNA
attccaggtacttgtccaac

SEQ ID NO: 943 - DNA, 20 bp, synthetic construct
  source 1..20: mol_type = other DNA
cattccaggtacttgtccaa

SEQ ID NO: 944 - DNA, 20 bp, synthetic construct
  source 1..20: mol_type = other DNA
gcattccaggtacttgtcca

SEQ ID NO: 945 - DNA, 20 bp, synthetic construct
  source 1..20: mol_type = other DNA
tgcattccaggtacttgtcc

SEQ ID NO: 946 - DNA, 20 bp, synthetic construct
  source 1..20: mol_type = other DNA
ctgcattccaggtacttgtc

SEQ ID NO: 947 - DNA, 20 bp, synthetic construct
  source 1..20: mol_type = other DNA
tctgcattccaggtacttgt

SEQ ID NO: 948 - DNA, 20 bp, synthetic construct
  source 1..20: mol_type = other DNA
ctctgcattccaggtacttg

SEQ ID NO: 949 - DNA, 20 bp, synthetic construct
  source 1..20: mol_type = other DNA
actctgcattccaggtactt

SEQ ID NO: 950 - DNA, 20 bp, synthetic construct
  source 1..20: mol_type = other DNA
tactctgcattccaggtact

SEQ ID NO: 951 - DNA, 20 bp, synthetic construct
  source 1..20: mol_type = other DNA
ctactctgcattccaggtac

SEQ ID NO: 952 - DNA, 20 bp, synthetic construct
  source 1..20: mol_type = other DNA
tctactctgcattccaggta

SEQ ID NO: 953 - DNA, 20 bp, synthetic construct
  source 1..20: mol_type = other DNA
ttctactctgcattccaggt

SEQ ID NO: 954 - DNA, 20 bp, synthetic construct
  source 1..20: mol_type = other DNA
cttctactctgcattccagg

SEQ ID NO: 955 - DNA, 20 bp, Homo sapiens
  source 1..20: mol_type = genomic DNA
gacctagaggatcaagacat

SEQ ID NO: 956 - DNA, 20 bp, Homo sapiens
  source 1..20: mol_type = genomic DNA
acctagaggatcaagacata

SEQ ID NO: 957 - DNA, 20 bp, Homo sapiens
  source 1..20: mol_type = genomic DNA
cctagaggatcaagacataa

SEQ ID NO: 958 - DNA, 20 bp, Homo sapiens
  source 1..20: mol_type = genomic DNA
ctagaggatcaagacataat

SEQ ID NO: 959 - DNA, 20 bp, Homo sapiens
  source 1..20: mol_type = genomic DNA
tagaggatcaagacataatg

SEQ ID NO: 960 - DNA, 20 bp, Homo sapiens
  source 1..20: mol_type = genomic DNA
agaggatcaagacataatgg

SEQ ID NO: 961 - DNA, 20 bp, Homo sapiens
  source 1..20: mol_type = genomic DNA
gaggatcaagacataatggg

SEQ ID NO: 962 - DNA, 20 bp, Homo sapiens
  source 1..20: mol_type = genomic DNA
aggatcaagacataatggga

SEQ ID NO: 963 - DNA, 20 bp, Homo sapiens
  source 1..20: mol_type = genomic DNA
ggatcaagacataatgggag

SEQ ID NO: 964 - DNA, 20 bp, Homo sapiens
  source 1..20: mol_type = genomic DNA
gatcaagacataatgggagc

SEQ ID NO: 965 - DNA, 20 bp, Homo sapiens
  source 1..20: mol_type = genomic DNA
atcaagacataatgggagca

SEQ ID NO: 966 - DNA, 20 bp, Homo sapiens
  source 1..20: mol_type = genomic DNA
tcaagacataatgggagcat

SEQ ID NO: 967 - DNA, 20 bp, Homo sapiens
  source 1..20: mol_type = genomic DNA
caagacataatgggagcatt

SEQ ID NO: 968 - DNA, 20 bp, Homo sapiens
  source 1..20: mol_type = genomic DNA
aagacataatgggagcattt

SEQ ID NO: 969 - DNA, 20 bp, Homo sapiens
  source 1..20: mol_type = genomic DNA
agacataatgggagcatttt

SEQ ID NO: 970 - DNA, 20 bp, Homo sapiens
  source 1..20: mol_type = genomic DNA
gacataatgggagcattttt

SEQ ID NO: 971 - DNA, 20 bp, Homo sapiens
  source 1..20: mol_type = genomic DNA
acataatgggagcattttta

SEQ ID NO: 972 - DNA, 20 bp, Homo sapiens
  source 1..20: mol_type = genomic DNA
cataatgggagcatttttag

SEQ ID NO: 973 - DNA, 20 bp, Homo sapiens
  source 1..20: mol_type = genomic DNA
ataatgggagcatttttaga

SEQ ID NO: 974 - DNA, 20 bp, Homo sapiens
  source 1..20: mol_type = genomic DNA
taatgggagcatttttagac

SEQ ID NO: 975 - DNA, 20 bp, Homo sapiens
  source 1..20: mol_type = genomic DNA
aatgggagcatttttagaca

SEQ ID NO: 976 - DNA, 20 bp, Homo sapiens
  source 1..20: mol_type = genomic DNA
atgggagcatttttagacaa

SEQ ID NO: 977 - DNA, 20 bp, Homo sapiens
  source 1..20: mol_type = genomic DNA
tgggagcatttttagacaag

SEQ ID NO: 978 - DNA, 20 bp, Homo sapiens
  source 1..20: mol_type = genomic DNA
gggagcatttttagacaagc

SEQ ID NO: 979 - DNA, 20 bp, Homo sapiens
  source 1..20: mol_type = genomic DNA
ggagcatttttagacaagcc

SEQ ID NO: 980 - DNA, 20 bp, Homo sapiens
  source 1..20: mol_type = genomic DNA
gagcatttttagacaagcca

SEQ ID NO: 981 - DNA, 20 bp, Homo sapiens
  source 1..20: mol_type = genomic DNA
agcatttttagacaagccaa

SEQ ID NO: 982 - DNA, 20 bp, Homo sapiens
  source 1..20: mol_type = genomic DNA
gcatttttagacaagccaaa

SEQ ID NO: 983 - DNA, 20 bp, Homo sapiens
  source 1..20: mol_type = genomic DNA
catttttagacaagccaaag

SEQ ID NO: 984 - DNA, 20 bp, Homo sapiens
  source 1..20: mol_type = genomic DNA
atttttagacaagccaaaga

SEQ ID NO: 985 - DNA, 20 bp, Homo sapiens
  source 1..20: mol_type = genomic DNA
tttttagacaagccaaagat

SEQ ID NO: 986 - DNA, 20 bp, Homo sapiens
  source 1..20: mol_type = genomic DNA
ttttagacaagccaaagatg

SEQ ID NO: 987 - DNA, 20 bp, Homo sapiens
  source 1..20: mol_type = genomic DNA
tttagacaagccaaagatgg

SEQ ID NO: 988 - DNA, 20 bp, Homo sapiens
  source 1..20: mol_type = genomic DNA
ttagacaagccaaagatgga

SEQ ID NO: 989 - DNA, 20 bp, Homo sapiens
  source 1..20: mol_type = genomic DNA
tagacaagccaaagatggaa

SEQ ID NO: 990 - DNA, 20 bp, Homo sapiens
  source 1..20: mol_type = genomic DNA
agacaagccaaagatggaaa

SEQ ID NO: 991 - DNA, 20 bp, Homo sapiens
  source 1..20: mol_type = genomic DNA
gacaagccaaagatggaaaa

SEQ ID NO: 992 - DNA, 20 bp, Homo sapiens
  source 1..20: mol_type = genomic DNA
acaagccaaagatggaaaag

SEQ ID NO: 993 - DNA, 20 bp, Homo sapiens
  source 1..20: mol_type = genomic DNA
caagccaaagatggaaaagc

SEQ ID NO: 994 - DNA, 20 bp, Homo sapiens
  source 1..20: mol_type = genomic DNA
aagccaaagatggaaaagca

SEQ ID NO: 995 - DNA, 20 bp, Homo sapiens
  source 1..20: mol_type = genomic DNA
agccaaagatggaaaagcat

SEQ ID NO: 996 - DNA, 20 bp, Homo sapiens
  source 1..20: mol_type = genomic DNA
gccaaagatggaaaagcata

SEQ ID NO: 997 - DNA, 20 bp, Homo sapiens
  source 1..20: mol_type = genomic DNA
ccaaagatggaaaagcataa

SEQ ID NO: 998 - DNA, 20 bp, Homo sapiens
  source 1..20: mol_type = genomic DNA
caaagatggaaaagcataat

SEQ ID NO: 999 - DNA, 20 bp, Homo sapiens
  source 1..20: mol_type = genomic DNA
aaagatggaaaagcataatg

SEQ ID NO: 1000 - DNA, 20 bp, Homo sapiens
  source 1..20: mol_type = genomic DNA
aagatggaaaagcataatgc

SEQ ID NO: 1001 - DNA, 20 bp, Homo sapiens
  source 1..20: mol_type = genomic DNA
agatggaaaagcataatgcc

SEQ ID NO: 1002 - DNA, 20 bp, Homo sapiens
  source 1..20: mol_type = genomic DNA
gatggaaaagcataatgccc

SEQ ID NO: 1003 - DNA, 20 bp, Homo sapiens
  source 1..20: mol_type = genomic DNA
atggaaaagcataatgccca

SEQ ID NO: 1004 - DNA, 20 bp, Homo sapiens
  source 1..20: mol_type = genomic DNA
tggaaaagcataatgcccag

SEQ ID NO: 1005 - DNA, 20 bp, Homo sapiens
  source 1..20: mol_type = genomic DNA
ggaaaagcataatgcccagg

SEQ ID NO: 1006 - DNA, 20 bp, Homo sapiens
  source 1..20: mol_type = genomic DNA
gaaaagcataatgcccaggg

SEQ ID NO: 1007 - DNA, 20 bp, Homo sapiens
  source 1..20: mol_type = genomic DNA
aaaagcataatgcccagggg

SEQ ID NO: 1008 - DNA, 20 bp, Homo sapiens
  source 1..20: mol_type = genomic DNA
aaagcataatgcccaggggc

SEQ ID NO: 1009 - DNA, 20 bp, Homo sapiens
  source 1..20: mol_type = genomic DNA
aagcataatgcccaggggca

SEQ ID NO: 1010 - DNA, 20 bp, Homo sapiens
  source 1..20: mol_type = genomic DNA
agcataatgcccaggggcag

SEQ ID NO: 1011 - DNA, 20 bp, Homo sapiens
  source 1..20: mol_type = genomic DNA
gcataatgcccaggggcagg

SEQ ID NO: 1012 - DNA, 20 bp, Homo sapiens
  source 1..20: mol_type = genomic DNA
cataatgcccaggggcaggg

SEQ ID NO: 1013 - DNA, 20 bp, Homo sapiens
  source 1..20: mol_type = genomic DNA
ataatgcccaggggcagggt

SEQ ID NO: 1014 - DNA, 20 bp, Homo sapiens
  source 1..20: mol_type = genomic DNA
taatgcccaggggcagggta

SEQ ID NO: 1015 - DNA, 20 bp, Homo sapiens
  source 1..20: mol_type = genomic DNA
aatgcccaggggcagggtaa

SEQ ID NO: 1016 - DNA, 20 bp, Homo sapiens
  source 1..20: mol_type = genomic DNA
atgcccaggggcagggtaat

SEQ ID NO: 1017 - DNA, 20 bp, Homo sapiens
  source 1..20: mol_type = genomic DNA
tgcccaggggcagggtaatg

SEQ ID NO: 1018 - DNA, 20 bp, Homo sapiens
  source 1..20: mol_type = genomic DNA
gcccaggggcagggtaatgg

SEQ ID NO: 1019 - DNA, 20 bp, Homo sapiens
  source 1..20: mol_type = genomic DNA
cccaggggcagggtaatggg

SEQ ID NO: 1020 - DNA, 20 bp, Homo sapiens
  source 1..20: mol_type = genomic DNA
ccaggggcagggtaatgggt

SEQ ID NO: 1021 - DNA, 20 bp, Homo sapiens
  source 1..20: mol_type = genomic DNA
caggggcagggtaatgggtt

SEQ ID NO: 1022 - DNA, 20 bp, Homo sapiens
  source 1..20: mol_type = genomic DNA
aggggcagggtaatgggttg

SEQ ID NO: 1023 - DNA, 20 bp, Homo sapiens
  source 1..20: mol_type = genomic DNA
ggggcagggtaatgggttgc

SEQ ID NO: 1024 - DNA, 20 bp, Homo sapiens
  source 1..20: mol_type = genomic DNA
gggcagggtaatgggttgcg

SEQ ID NO: 1025 - DNA, 20 bp, Homo sapiens
  source 1..20: mol_type = genomic DNA
ggcagggtaatgggttgcga

SEQ ID NO: 1026 - DNA, 20 bp, Homo sapiens
  source 1..20: mol_type = genomic DNA
gcagggtaatgggttgcgat

SEQ ID NO: 1027 - DNA, 20 bp, Homo sapiens
  source 1..20: mol_type = genomic DNA
cagggtaatgggttgcgata

SEQ ID NO: 1028 - DNA, 20 bp, Homo sapiens
  source 1..20: mol_type = genomic DNA
agggtaatgggttgcgatat

SEQ ID NO: 1029 - DNA, 20 bp, Homo sapiens
  source 1..20: mol_type = genomic DNA
gggtaatgggttgcgatatg

SEQ ID NO: 1030 - DNA, 20 bp, Homo sapiens
  source 1..20: mol_type = genomic DNA
ggtaatgggttgcgatatgg

SEQ ID NO: 1031 - DNA, 20 bp, Homo sapiens
  source 1..20: mol_type = genomic DNA
gtaatgggttgcgatatggg

SEQ ID NO: 1032 - DNA, 20 bp, Homo sapiens
  source 1..20: mol_type = genomic DNA
taatgggttgcgatatgggc

SEQ ID NO: 1033 - DNA, 20 bp, Homo sapiens
  source 1..20: mol_type = genomic DNA
aatgggttgcgatatgggct

SEQ ID NO: 1034 - DNA, 20 bp, Homo sapiens
  source 1..20: mol_type = genomic DNA
atgggttgcgatatgggcta

SEQ ID NO: 1035 - DNA, 20 bp, Homo sapiens
  source 1..20: mol_type = genomic DNA
tgggttgcgatatgggctaa

SEQ ID NO: 1036 - DNA, 20 bp, Homo sapiens
  source 1..20: mol_type = genomic DNA
gggttgcgatatgggctaag

SEQ ID NO: 1037 - DNA, 20 bp, Homo sapiens
  source 1..20: mol_type = genomic DNA
ggttgcgatatgggctaagc

SEQ ID NO: 1038 - DNA, 20 bp, Homo sapiens
  source 1..20: mol_type = genomic DNA
gttgcgatatgggctaagca

SEQ ID NO: 1039 - DNA, 20 bp, Homo sapiens
  source 1..20: mol_type = genomic DNA
ttgcgatatgggctaagcag

SEQ ID NO: 1040 - DNA, 20 bp, Homo sapiens
  source 1..20: mol_type = genomic DNA
tgcgatatgggctaagcagc

SEQ ID NO: 1041 - DNA, 20 bp, Homo sapiens
  source 1..20: mol_type = genomic DNA
gcgatatgggctaagcagca

SEQ ID NO: 1042 - DNA, 20 bp, Homo sapiens
  source 1..20: mol_type = genomic DNA
cgatatgggctaagcagcat

SEQ ID NO: 1043 - DNA, 20 bp, Homo sapiens
  source 1..20: mol_type = genomic DNA
gatatgggctaagcagcatg

SEQ ID NO: 1044 - DNA, 20 bp, Homo sapiens
  source 1..20: mol_type = genomic DNA
atatgggctaagcagcatgc

SEQ ID NO: 1045 - DNA, 20 bp, Homo sapiens
  source 1..20: mol_type = genomic DNA
tatgggctaagcagcatgca

SEQ ID NO: 1046 - DNA, 20 bp, Homo sapiens
  source 1..20: mol_type = genomic DNA
atgggctaagcagcatgcaa

SEQ ID NO: 1047 - DNA, 20 bp, Homo sapiens
  source 1..20: mol_type = genomic DNA
tgggctaagcagcatgcaag

SEQ ID NO: 1048 - DNA, 20 bp, Homo sapiens
  source 1..20: mol_type = genomic DNA
gggctaagcagcatgcaagg

SEQ ID NO: 1049 - DNA, 20 bp, Homo sapiens
  source 1..20: mol_type = genomic DNA
ggctaagcagcatgcaaggc

SEQ ID NO: 1050 - DNA, 20 bp, Homo sapiens
  source 1..20: mol_type = genomic DNA
gctaagcagcatgcaaggct

SEQ ID NO: 1051 - DNA, 20 bp, Homo sapiens
  source 1..20: mol_type = genomic DNA
ctaagcagcatgcaaggctg

SEQ ID NO: 1052 - DNA, 20 bp, Homo sapiens
  source 1..20: mol_type = genomic DNA
taagcagcatgcaaggctgg

SEQ ID NO: 1053 - DNA, 20 bp, Homo sapiens
  source 1..20: mol_type = genomic DNA
aagcagcatgcaaggctggc

SEQ ID NO: 1054 - DNA, 20 bp, Homo sapiens
  source 1..20: mol_type = genomic DNA
agcagcatgcaaggctggcg

SEQ ID NO: 1055 - DNA, 20 bp, Homo sapiens
  source 1..20: mol_type = genomic DNA
gcagcatgcaaggctggcgt

SEQ ID NO: 1056 - DNA, 20 bp, Homo sapiens
  source 1..20: mol_type = genomic DNA
cagcatgcaaggctggcgtg

SEQ ID NO: 1057 - DNA, 20 bp, Homo sapiens
  source 1..20: mol_type = genomic DNA
agcatgcaaggctggcgtgt

SEQ ID NO: 1058 - DNA, 20 bp, Homo sapiens
  source 1..20: mol_type = genomic DNA
gcatgcaaggctggcgtgtt

SEQ ID NO: 1059 - DNA, 20 bp, Homo sapiens
  source 1..20: mol_type = genomic DNA
catgcaaggctggcgtgttg

SEQ ID NO: 1060 - DNA, 20 bp, Homo sapiens
  source 1..20: mol_type = genomic DNA
atgcaaggctggcgtgttga

SEQ ID NO: 1061 - DNA, 20 bp, Homo sapiens
  source 1..20: mol_type = genomic DNA
tgcaaggctggcgtgttgaa

SEQ ID NO: 1062 - DNA, 20 bp, Homo sapiens
  source 1..20: mol_type = genomic DNA
gcaaggctggcgtgttgaaa

SEQ ID NO: 1063 - DNA, 20 bp, Homo sapiens
  source 1..20: mol_type = genomic DNA
caaggctggcgtgttgaaat

SEQ ID NO: 1064 - DNA, 20 bp, Homo sapiens
  source 1..20: mol_type = genomic DNA
aaggctggcgtgttgaaatg

SEQ ID NO: 1065 - DNA, 20 bp, Homo sapiens
  source 1..20: mol_type = genomic DNA
aggctggcgtgttgaaatgg

SEQ ID NO: 1066 - DNA, 20 bp, Homo sapiens
  source 1..20: mol_type = genomic DNA
ggctggcgtgttgaaatgga

SEQ ID NO: 1067 - DNA, 20 bp, Homo sapiens
  source 1..20: mol_type = genomic DNA
gctggcgtgttgaaatggag

SEQ ID NO: 1068 - DNA, 20 bp, Homo sapiens
  source 1..20: mol_type = genomic DNA
ctggcgtgttgaaatggagg

SEQ ID NO: 1069 - DNA, 20 bp, Homo sapiens
  source 1..20: mol_type = genomic DNA
tggcgtgttgaaatggagga

SEQ ID NO: 1070 - DNA, 20 bp, Homo sapiens
  source 1..20: mol_type = genomic DNA
ggcgtgttgaaatggaggat

SEQ ID NO: 1071 - DNA, 20 bp, Homo sapiens
  source 1..20: mol_type = genomic DNA
gcgtgttgaaatggaggatg

SEQ ID NO: 1072 - DNA, 20 bp, Homo sapiens
  source 1..20: mol_type = genomic DNA
cgtgttgaaatggaggatgc

SEQ ID NO: 1073 - DNA, 20 bp, Homo sapiens
  source 1..20: mol_type = genomic DNA
gtgttgaaatggaggatgca

SEQ ID NO: 1074 - DNA, 20 bp, Homo sapiens
  source 1..20: mol_type = genomic DNA
tgttgaaatggaggatgcac

SEQ ID NO: 1075 - DNA, 20 bp, Homo sapiens
  source 1..20: mol_type = genomic DNA
gttgaaatggaggatgcaca

SEQ ID NO: 1076 - DNA, 20 bp, Homo sapiens
  source 1..20: mol_type = genomic DNA
ttgaaatggaggatgcacat

SEQ ID NO: 1077 - DNA, 20 bp, Homo sapiens
  source 1..20: mol_type = genomic DNA
tgaaatggaggatgcacata

SEQ ID NO: 1078 - DNA, 20 bp, Homo sapiens
  source 1..20: mol_type = genomic DNA
gaaatggaggatgcacatac

SEQ ID NO: 1079 - DNA, 20 bp, Homo sapiens
  source 1..20: mol_type = genomic DNA
aaatggaggatgcacatacg

SEQ ID NO: 1080 - DNA, 20 bp, Homo sapiens
  source 1..20: mol_type = genomic DNA
aatggaggatgcacatacgg

SEQ ID NO: 1081 - DNA, 20 bp, Homo sapiens
  source 1..20: mol_type = genomic DNA
atggaggatgcacatacggc

SEQ ID NO: 1082 - DNA, 20 bp, Homo sapiens
  source 1..20: mol_type = genomic DNA
tggaggatgcacatacggct

SEQ ID NO: 1083 - DNA, 20 bp, Homo sapiens
  source 1..20: mol_type = genomic DNA
ggaggatgcacatacggctg

SEQ ID NO: 1084 - DNA, 20 bp, Homo sapiens
  source 1..20: mol_type = genomic DNA
gaggatgcacatacggctgt

SEQ ID NO: 1085 - DNA, 20 bp, Homo sapiens
  source 1..20: mol_type = genomic DNA
aggatgcacatacggctgtg

SEQ ID NO: 1086 - DNA, 20 bp, Homo sapiens
  source 1..20: mol_type = genomic DNA
ggatgcacatacggctgtga

SEQ ID NO: 1087 - DNA, 20 bp, Homo sapiens
  source 1..20: mol_type = genomic DNA
gatgcacatacggctgtgat

SEQ ID NO: 1088 - DNA, 20 bp, Homo sapiens
  source 1..20: mol_type = genomic DNA
atgcacatacggctgtgatc

SEQ ID NO: 1089 - DNA, 20 bp, Homo sapiens
  source 1..20: mol_type = genomic DNA
tgcacatacggctgtgatcg

SEQ ID NO: 1090 - DNA, 20 bp, Homo sapiens
  source 1..20: mol_type = genomic DNA
gcacatacggctgtgatcgg

SEQ ID NO: 1091 - DNA, 20 bp, Homo sapiens
  source 1..20: mol_type = genomic DNA
cacatacggctgtgatcggt

SEQ ID NO: 1092 - DNA, 20 bp, Homo sapiens
  source 1..20: mol_type = genomic DNA
acatacggctgtgatcggtt

SEQ ID NO: 1093 - DNA, 20 bp, Homo sapiens
  source 1..20: mol_type = genomic DNA
catacggctgtgatcggttt

SEQ ID NO: 1094 - DNA, 20 bp, Homo sapiens
  source 1..20: mol_type = genomic DNA
atacggctgtgatcggtttg

SEQ ID NO: 1095 - DNA, 20 bp, Homo sapiens
  source 1..20: mol_type = genomic DNA
tacggctgtgatcggtttgc

SEQ ID NO: 1096 - DNA, 20 bp, Homo sapiens
  source 1..20: mol_type = genomic DNA
acggctgtgatcggtttgcc

SEQ ID NO: 1097 - DNA, 20 bp, Homo sapiens
  source 1..20: mol_type = genomic DNA
cggctgtgatcggtttgcca

SEQ ID NO: 1098 - DNA, 20 bp, Homo sapiens
  source 1..20: mol_type = genomic DNA
ggctgtgatcggtttgccaa

SEQ ID NO: 1099 - DNA, 20 bp, Homo sapiens
  source 1..20: mol_type = genomic DNA
gctgtgatcggtttgccaag

SEQ ID NO: 1100 - DNA, 20 bp, Homo sapiens
  source 1..20: mol_type = genomic DNA
ctgtgatcggtttgccaagt

SEQ ID NO: 1101 - DNA, 20 bp, Homo sapiens
  source 1..20: mol_type = genomic DNA
tgtgatcggtttgccaagtg

SEQ ID NO: 1102 - DNA, 20 bp, Homo sapiens
  source 1..20: mol_type = genomic DNA
gtgatcggtttgccaagtgg

SEQ ID NO: 1103 - DNA, 20 bp, Homo sapiens
  source 1..20: mol_type = genomic DNA
tgatcggtttgccaagtgga

SEQ ID NO: 1104 - DNA, 20 bp, Homo sapiens
  source 1..20: mol_type = genomic DNA
gatcggtttgccaagtggac

SEQ ID NO: 1105 - DNA, 20 bp, Homo sapiens
  source 1..20: mol_type = genomic DNA
atcggtttgccaagtggact

SEQ ID NO: 1106 - DNA, 20 bp, Homo sapiens
  source 1..20: mol_type = genomic DNA
tcggtttgccaagtggactt

SEQ ID NO: 1107 - DNA, 20 bp, Homo sapiens
  source 1..20: mol_type = genomic DNA
cggtttgccaagtggacttg

SEQ ID NO: 1108 - DNA, 20 bp, Homo sapiens
  source 1..20: mol_type = genomic DNA
ggtttgccaagtggacttga

SEQ ID NO: 1109 - DNA, 20 bp, Homo sapiens
  source 1..20: mol_type = genomic DNA
gtttgccaagtggacttgaa

SEQ ID NO: 1110 - DNA, 20 bp, Homo sapiens
  source 1..20: mol_type = genomic DNA
tttgccaagtggacttgaat

SEQ ID NO: 1111 - DNA, 20 bp, Homo sapiens
  source 1..20: mol_type = genomic DNA
ttgccaagtggacttgaatc

SEQ ID NO: 1112 - DNA, 20 bp, Homo sapiens
  source 1..20: mol_type = genomic DNA
tgccaagtggacttgaatcg

SEQ ID NO: 1113 - DNA, 20 bp, Homo sapiens
  source 1..20: mol_type = genomic DNA
gccaagtggacttgaatcgt

SEQ ID NO: 1114 - DNA, 20 bp, Homo sapiens
  source 1..20: mol_type = genomic DNA
ccaagtggacttgaatcgtg

SEQ ID NO: 1115 - DNA, 20 bp, Homo sapiens
  source 1..20: mol_type = genomic DNA
caagtggacttgaatcgtgg

SEQ ID NO: 1116 - DNA, 20 bp, Homo sapiens
  source 1..20: mol_type = genomic DNA
aagtggacttgaatcgtggt

SEQ ID NO: 1117 - DNA, 20 bp, Homo sapiens
  source 1..20: mol_type = genomic DNA
agtggacttgaatcgtggtc

SEQ ID NO: 1118 - DNA, 20 bp, Homo sapiens
  source 1..20: mol_type = genomic DNA
gtggacttgaatcgtggtca

SEQ ID NO: 1119 - DNA, 20 bp, Homo sapiens
  source 1..20: mol_type = genomic DNA
tggacttgaatcgtggtcat

SEQ ID NO: 1120 - DNA, 20 bp, Homo sapiens
  source 1..20: mol_type = genomic DNA
ggacttgaatcgtggtcatt

SEQ ID NO: 1121 - DNA, 20 bp, Homo sapiens
  source 1..20: mol_type = genomic DNA
gacttgaatcgtggtcattc

SEQ ID NO: 1122 - DNA, 20 bp, Homo sapiens
  source 1..20: mol_type = genomic DNA
acttgaatcgtggtcattct

SEQ ID NO: 1123 - DNA, 20 bp, Homo sapiens
  source 1..20: mol_type = genomic DNA
cttgaatcgtggtcattctt

SEQ ID NO: 1124 - DNA, 20 bp, Homo sapiens
  source 1..20: mol_type = genomic DNA
ttgaatcgtggtcattcttt

SEQ ID NO: 1125 - DNA, 20 bp, Homo sapiens
  source 1..20: mol_type = genomic DNA
tgaatcgtggtcattctttg

SEQ ID NO: 1126 - DNA, 20 bp, Homo sapiens
  source 1..20: mol_type = genomic DNA
gaatcgtggtcattctttgc

SEQ ID NO: 1127 - DNA, 20 bp, Homo sapiens
  source 1..20: mol_type = genomic DNA
aatcgtggtcattctttgct

SEQ ID NO: 1128 - DNA, 20 bp, Homo sapiens
  source 1..20: mol_type = genomic DNA
atcgtggtcattctttgctg

SEQ ID NO: 1129 - DNA, 20 bp, Homo sapiens
  source 1..20: mol_type = genomic DNA
tcgtggtcattctttgctgt

SEQ ID NO: 1130 - DNA, 20 bp, Homo sapiens
  source 1..20: mol_type = genomic DNA
cgtggtcattctttgctgtg

SEQ ID NO: 1131 - DNA, 20 bp, Homo sapiens
  source 1..20: mol_type = genomic DNA
gtggtcattctttgctgtgt

SEQ ID NO: 1132 - DNA, 20 bp, Homo sapiens
  source 1..20: mol_type = genomic DNA
tggtcattctttgctgtgta

SEQ ID NO: 1133 - DNA, 20 bp, Homo sapiens
  source 1..20: mol_type = genomic DNA
ggtcattctttgctgtgtat

SEQ ID NO: 1134 - DNA, 20 bp, Homo sapiens
  source 1..20: mol_type = genomic DNA
gtcattctttgctgtgtatg

SEQ ID NO: 1135 - DNA, 20 bp, Homo sapiens
  source 1..20: mol_type = genomic DNA
tcattctttgctgtgtatga

SEQ ID NO: 1136 - DNA, 20 bp, Homo sapiens
  source 1..20: mol_type = genomic DNA
cattctttgctgtgtatgat

SEQ ID NO: 1137 - DNA, 20 bp, Homo sapiens
  source 1..20: mol_type = genomic DNA
attctttgctgtgtatgatg

SEQ ID NO: 1138 - DNA, 20 bp, Homo sapiens
  source 1..20: mol_type = genomic DNA
ttctttgctgtgtatgatgg

SEQ ID NO: 1139 - DNA, 20 bp, Homo sapiens
  source 1..20: mol_type = genomic DNA
tctttgctgtgtatgatggg

SEQ ID NO: 1140 - DNA, 20 bp, Homo sapiens
  source 1..20: mol_type = genomic DNA
ctttgctgtgtatgatgggc

SEQ ID NO: 1141 - DNA, 20 bp, Homo sapiens
  source 1..20: mol_type = genomic DNA
tttgctgtgtatgatgggca

SEQ ID NO: 1142 - DNA, 20 bp, Homo sapiens
  source 1..20: mol_type = genomic DNA
ttgctgtgtatgatgggcat

SEQ ID NO: 1143 - DNA, 20 bp, Homo sapiens
  source 1..20: mol_type = genomic DNA
tgctgtgtatgatgggcatg

SEQ ID NO: 1144 - DNA, 20 bp, Homo sapiens
  source 1..20: mol_type = genomic DNA
gctgtgtatgatgggcatgc

SEQ ID NO: 1145 - DNA, 20 bp, Homo sapiens
  source 1..20: mol_type = genomic DNA
ctgtgtatgatgggcatgct

SEQ ID NO: 1146 - DNA, 20 bp, Homo sapiens
  source 1..20: mol_type = genomic DNA
tgtgtatgatgggcatgctg

SEQ ID NO: 1147 - DNA, 20 bp, Homo sapiens
  source 1..20: mol_type = genomic DNA
gtgtatgatgggcatgctgg

SEQ ID NO: 1148 - DNA, 20 bp, Homo sapiens
  source 1..20: mol_type = genomic DNA
tgtatgatgggcatgctggt

SEQ ID NO: 1149 - DNA, 20 bp, Homo sapiens
  source 1..20: mol_type = genomic DNA
gtatgatgggcatgctggtt

SEQ ID NO: 1150 - DNA, 20 bp, Homo sapiens
  source 1..20: mol_type = genomic DNA
tatgatgggcatgctggttc

SEQ ID NO: 1151 - DNA, 20 bp, Homo sapiens
  source 1..20: mol_type = genomic DNA
atgatgggcatgctggttct

SEQ ID NO: 1152 - DNA, 20 bp, Homo sapiens
  source 1..20: mol_type = genomic DNA
tgatgggcatgctggttctc

SEQ ID NO: 1153 - DNA, 20 bp, Homo sapiens
  source 1..20: mol_type = genomic DNA
gatgggcatgctggttctca

SEQ ID NO: 1154 - DNA, 20 bp, Homo sapiens
  source 1..20: mol_type = genomic DNA
atgggcatgctggttctcag

SEQ ID NO: 1155 - DNA, 20 bp, Homo sapiens
  source 1..20: mol_type = genomic DNA
tgggcatgctggttctcagg

SEQ ID NO: 1156 - DNA, 20 bp, Homo sapiens
  source 1..20: mol_type = genomic DNA
gggcatgctggttctcaggt

SEQ ID NO: 1157 - DNA, 20 bp, Homo sapiens
  source 1..20: mol_type = genomic DNA
ggcatgctggttctcaggtt

SEQ ID NO: 1158 - DNA, 20 bp, Homo sapiens
  source 1..20: mol_type = genomic DNA
gcatgctggttctcaggttg

SEQ ID NO: 1159 - DNA, 20 bp, Homo sapiens
  source 1..20: mol_type = genomic DNA
catgctggttctcaggttgc

SEQ ID NO: 1160 - DNA, 20 bp, Homo sapiens
  source 1..20: mol_type = genomic DNA
atgctggttctcaggttgcc

SEQ ID NO: 1161 - DNA, 20 bp, Homo sapiens
  source 1..20: mol_type = genomic DNA
tgctggttctcaggttgcca

SEQ ID NO: 1162 - DNA, 20 bp, Homo sapiens
  source 1..20: mol_type = genomic DNA
gctggttctcaggttgccaa

SEQ ID NO: 1163 - DNA, 20 bp, Homo sapiens
  source 1..20: mol_type = genomic DNA
ctggttctcaggttgccaaa

SEQ ID NO: 1164 - DNA, 20 bp, Homo sapiens
  source 1..20: mol_type = genomic DNA
tggttctcaggttgccaaat

SEQ ID NO: 1165 - DNA, 20 bp, Homo sapiens
  source 1..20: mol_type = genomic DNA
ggttctcaggttgccaaata

SEQ ID NO: 1166 - DNA, 20 bp, Homo sapiens
  source 1..20: mol_type = genomic DNA
gttctcaggttgccaaatac

SEQ ID NO: 1167 - DNA, 20 bp, Homo sapiens
  source 1..20: mol_type = genomic DNA
ttctcaggttgccaaatact

SEQ ID NO: 1168 - DNA, 20 bp, Homo sapiens
  source 1..20: mol_type = genomic DNA
tctcaggttgccaaatactg

SEQ ID NO: 1169 - DNA, 20 bp, Homo sapiens
  source 1..20: mol_type = genomic DNA
ctcaggttgccaaatactgc

SEQ ID NO: 1170 - DNA, 20 bp, Homo sapiens
  source 1..20: mol_type = genomic DNA
tcaggttgccaaatactgct

SEQ ID NO: 1171 - DNA, 20 bp, Homo sapiens
  source 1..20: mol_type = genomic DNA
caggttgccaaatactgctg

SEQ ID NO: 1172 - DNA, 20 bp, Homo sapiens
  source 1..20: mol_type = genomic DNA
aggttgccaaatactgctgt

SEQ ID NO: 1173 - DNA, 20 bp, Homo sapiens
  source 1..20: mol_type = genomic DNA
ggttgccaaatactgctgtg

SEQ ID NO: 1174 - DNA, 20 bp, Homo sapiens
  source 1..20: mol_type = genomic DNA
gttgccaaatactgctgtga

SEQ ID NO: 1175 - DNA, 20 bp, Homo sapiens
  source 1..20: mol_type = genomic DNA
ttgccaaatactgctgtgag

SEQ ID NO: 1176 - DNA, 20 bp, Homo sapiens
  source 1..20: mol_type = genomic DNA
tgccaaatactgctgtgagc

SEQ ID NO: 1177 - DNA, 20 bp, Homo sapiens
  source 1..20: mol_type = genomic DNA
gccaaatactgctgtgagca

SEQ ID NO: 1178 - DNA, 20 bp, Homo sapiens
  source 1..20: mol_type = genomic DNA
ccaaatactgctgtgagcat

SEQ ID NO: 1179 - DNA, 20 bp, Homo sapiens
  source 1..20: mol_type = genomic DNA
caaatactgctgtgagcatt

SEQ ID NO: 1180 - DNA, 20 bp, Homo sapiens
  source 1..20: mol_type = genomic DNA
aaatactgctgtgagcattt

SEQ ID NO: 1181 - DNA, 20 bp, Homo sapiens
  source 1..20: mol_type = genomic DNA
aatactgctgtgagcatttg

SEQ ID NO: 1182 - DNA, 20 bp, Homo sapiens
  source 1..20: mol_type = genomic DNA
atactgctgtgagcatttgt

SEQ ID NO: 1183 - DNA, 20 bp, Homo sapiens
  source 1..20: mol_type = genomic DNA
tactgctgtgagcatttgtt

SEQ ID NO: 1184 - DNA, 20 bp, Homo sapiens
  source 1..20: mol_type = genomic DNA
actgctgtgagcatttgtta

SEQ ID NO: 1185 - DNA, 20 bp, Homo sapiens
  source 1..20: mol_type = genomic DNA
ctgctgtgagcatttgttag

SEQ ID NO: 1186 - DNA, 20 bp, Homo sapiens
  source 1..20: mol_type = genomic DNA
tgctgtgagcatttgttaga

SEQ ID NO: 1187 - DNA, 20 bp, Homo sapiens
  source 1..20: mol_type = genomic DNA
gctgtgagcatttgttagat

SEQ ID NO: 1188 - DNA, 20 bp, Homo sapiens
  source 1..20: mol_type = genomic DNA
ctgtgagcatttgttagatc

SEQ ID NO: 1189 - DNA, 20 bp, Homo sapiens
  source 1..20: mol_type = genomic DNA
tgtgagcatttgttagatca

SEQ ID NO: 1190 - DNA, 20 bp, Homo sapiens
  source 1..20: mol_type = genomic DNA
gtgagcatttgttagatcac

SEQ ID NO: 1191 - DNA, 20 bp, Homo sapiens
  source 1..20: mol_type = genomic DNA
tgagcatttgttagatcaca

SEQ ID NO: 1192 - DNA, 20 bp, Homo sapiens
  source 1..20: mol_type = genomic DNA
gagcatttgttagatcacat

SEQ ID NO: 1193 - DNA, 20 bp, Homo sapiens
  source 1..20: mol_type = genomic DNA
agcatttgttagatcacatc

SEQ ID NO: 1194 - DNA, 20 bp, Homo sapiens
  source 1..20: mol_type = genomic DNA
gcatttgttagatcacatca

SEQ ID NO: 1195 - DNA, 20 bp, Homo sapiens
  source 1..20: mol_type = genomic DNA
catttgttagatcacatcac

SEQ ID NO: 1196 - DNA, 20 bp, Homo sapiens
  source 1..20: mol_type = genomic DNA
atttgttagatcacatcacc

SEQ ID NO: 1197 - DNA, 20 bp, Homo sapiens
  source 1..20: mol_type = genomic DNA
tttgttagatcacatcacca

SEQ ID NO: 1198 - DNA, 20 bp, Homo sapiens
  source 1..20: mol_type = genomic DNA
ttgttagatcacatcaccaa

SEQ ID NO: 1199 - DNA, 20 bp, Homo sapiens
  source 1..20: mol_type = genomic DNA
tgttagatcacatcaccaat

SEQ ID NO: 1200 - DNA, 20 bp, Homo sapiens
  source 1..20: mol_type = genomic DNA
gttagatcacatcaccaata

SEQ ID NO: 1201 - DNA, 20 bp, Homo sapiens
  source 1..20: mol_type = genomic DNA
ttagatcacatcaccaataa

SEQ ID NO: 1202 - DNA, 20 bp, Homo sapiens
  source 1..20: mol_type = genomic DNA
tagatcacatcaccaataac

SEQ ID NO: 1203 - DNA, 20 bp, Homo sapiens
  source 1..20: mol_type = genomic DNA
agatcacatcaccaataacc

SEQ ID NO: 1204 - DNA, 20 bp, Homo sapiens
  source 1..20: mol_type = genomic DNA
gatcacatcaccaataacca

SEQ ID NO: 1205 - DNA, 20 bp, Homo sapiens
  source 1..20: mol_type = genomic DNA
atcacatcaccaataaccag

SEQ ID NO: 1206 - DNA, 20 bp, Homo sapiens
  source 1..20: mol_type = genomic DNA
tcacatcaccaataaccagg

SEQ ID NO: 1207 - DNA, 20 bp, Homo sapiens
  source 1..20: mol_type = genomic DNA
cacatcaccaataaccagga

SEQ ID NO: 1208 - DNA, 20 bp, Homo sapiens
  source 1..20: mol_type = genomic DNA
acatcaccaataaccaggat

SEQ ID NO: 1209 - DNA, 20 bp, Homo sapiens
  source 1..20: mol_type = genomic DNA
catcaccaataaccaggatt

SEQ ID NO: 1210 - DNA, 20 bp, Homo sapiens
  source 1..20: mol_type = genomic DNA
atcaccaataaccaggattt

SEQ ID NO: 1211 - DNA, 20 bp, Homo sapiens
  source 1..20: mol_type = genomic DNA
tcaccaataaccaggatttt

SEQ ID NO: 1212 - DNA, 20 bp, Homo sapiens
  source 1..20: mol_type = genomic DNA
caccaataaccaggatttta

SEQ ID NO: 1213 - DNA, 20 bp, Homo sapiens
  source 1..20: mol_type = genomic DNA
accaataaccaggattttaa

SEQ ID NO: 1214 - DNA, 20 bp, Homo sapiens
  source 1..20: mol_type = genomic DNA
ccaataaccaggattttaaa

SEQ ID NO: 1215 - DNA, 20 bp, Homo sapiens
  source 1..20: mol_type = genomic DNA
caataaccaggattttaaag

SEQ ID NO: 1216 - DNA, 20 bp, Homo sapiens
  source 1..20: mol_type = genomic DNA
aataaccaggattttaaagg

SEQ ID NO: 1217 - DNA, 20 bp, Homo sapiens
  source 1..20: mol_type = genomic DNA
ataaccaggattttaaaggg

SEQ ID NO: 1218 - DNA, 20 bp, Homo sapiens
  source 1..20: mol_type = genomic DNA
taaccaggattttaaagggt

SEQ ID NO: 1219 - DNA, 20 bp, Homo sapiens
  source 1..20: mol_type = genomic DNA
aaccaggattttaaagggtc

SEQ ID NO: 1220 - DNA, 20 bp, Homo sapiens
  source 1..20: mol_type = genomic DNA
accaggattttaaagggtct

SEQ ID NO: 1221 - DNA, 20 bp, Homo sapiens
  source 1..20: mol_type = genomic DNA
ccaggattttaaagggtctg

SEQ ID NO: 1222 - DNA, 20 bp, Homo sapiens
  source 1..20: mol_type = genomic DNA
caggattttaaagggtctgc

SEQ ID NO: 1223 - DNA, 20 bp, Homo sapiens
  source 1..20: mol_type = genomic DNA
aggattttaaagggtctgca

SEQ ID NO: 1224 - DNA, 20 bp, Homo sapiens
  source 1..20: mol_type = genomic DNA
ggattttaaagggtctgcag

SEQ ID NO: 1225 - DNA, 20 bp, Homo sapiens
  source 1..20: mol_type = genomic DNA
gattttaaagggtctgcagg

SEQ ID NO: 1226 - DNA, 20 bp, Homo sapiens
  source 1..20: mol_type = genomic DNA
attttaaagggtctgcagga

SEQ ID NO: 1227 - DNA, 20 bp, Homo sapiens
  source 1..20: mol_type = genomic DNA
ttttaaagggtctgcaggag

SEQ ID NO: 1228 - DNA, 20 bp, Homo sapiens
  source 1..20: mol_type = genomic DNA
tttaaagggtctgcaggagc

SEQ ID NO: 1229 - DNA, 20 bp, Homo sapiens
  source 1..20: mol_type = genomic DNA
ttaaagggtctgcaggagca

SEQ ID NO: 1230 - DNA, 20 bp, Homo sapiens
  source 1..20: mol_type = genomic DNA
taaagggtctgcaggagcac

SEQ ID NO: 1231 - DNA, 20 bp, Homo sapiens
  source 1..20: mol_type = genomic DNA
aaagggtctgcaggagcacc

SEQ ID NO: 1232 - DNA, 20 bp, Homo sapiens
  source 1..20: mol_type = genomic DNA
aagggtctgcaggagcacct

SEQ ID NO: 1233 - DNA, 20 bp, Homo sapiens
  source 1..20: mol_type = genomic DNA
agggtctgcaggagcacctt

SEQ ID NO: 1234 - DNA, 20 bp, Homo sapiens
  source 1..20: mol_type = genomic DNA
gggtctgcaggagcaccttc

SEQ ID NO: 1235 - DNA, 20 bp, Homo sapiens
  source 1..20: mol_type = genomic DNA
ggtctgcaggagcaccttct

SEQ ID NO: 1236 - DNA, 20 bp, Homo sapiens
  source 1..20: mol_type = genomic DNA
gtctgcaggagcaccttctg

SEQ ID NO: 1237 - DNA, 20 bp, Homo sapiens
  source 1..20: mol_type = genomic DNA
tctgcaggagcaccttctgt

SEQ ID NO: 1238 - DNA, 20 bp, Homo sapiens
  source 1..20: mol_type = genomic DNA
ctgcaggagcaccttctgtg

SEQ ID NO: 1239 - DNA, 20 bp, Homo sapiens
  source 1..20: mol_type = genomic DNA
tgcaggagcaccttctgtgg

SEQ ID NO: 1240 - DNA, 20 bp, Homo sapiens
  source 1..20: mol_type = genomic DNA
gcaggagcaccttctgtgga

SEQ ID NO: 1241 - DNA, 20 bp, Homo sapiens
  source 1..20: mol_type = genomic DNA
caggagcaccttctgtggaa

SEQ ID NO: 1242 - DNA, 20 bp, Homo sapiens
  source 1..20: mol_type = genomic DNA
aggagcaccttctgtggaaa

SEQ ID NO: 1243 - DNA, 20 bp, Homo sapiens
  source 1..20: mol_type = genomic DNA
ggagcaccttctgtggaaaa

SEQ ID NO: 1244 - DNA, 20 bp, Homo sapiens
  source 1..20: mol_type = genomic DNA
gagcaccttctgtggaaaat

SEQ ID NO: 1245 - DNA, 20 bp, Homo sapiens
  source 1..20: mol_type = genomic DNA
agcaccttctgtggaaaatg

SEQ ID NO: 1246 - DNA, 20 bp, Homo sapiens
  source 1..20: mol_type = genomic DNA
gcaccttctgtggaaaatgt

SEQ ID NO: 1247 - DNA, 20 bp, Homo sapiens
  source 1..20: mol_type = genomic DNA
caccttctgtggaaaatgta

SEQ ID NO: 1248 - DNA, 20 bp, Homo sapiens
  source 1..20: mol_type = genomic DNA
accttctgtggaaaatgtaa

SEQ ID NO: 1249 - DNA, 20 bp, Homo sapiens
  source 1..20: mol_type = genomic DNA
ccttctgtggaaaatgtaaa

SEQ ID NO: 1250 - DNA, 20 bp, Homo sapiens
  source 1..20: mol_type = genomic DNA
cttctgtggaaaatgtaaag

SEQ ID NO: 1251 - DNA, 20 bp, Homo sapiens
  source 1..20: mol_type = genomic DNA
ttctgtggaaaatgtaaaga

SEQ ID NO: 1252 - DNA, 20 bp, Homo sapiens
  source 1..20: mol_type = genomic DNA
tctgtggaaaatgtaaagaa

SEQ ID NO: 1253 - DNA, 20 bp, Homo sapiens
  source 1..20: mol_type = genomic DNA
ctgtggaaaatgtaaagaat

SEQ ID NO: 1254 - DNA, 20 bp, Homo sapiens
  source 1..20: mol_type = genomic DNA
tgtggaaaatgtaaagaatg

SEQ ID NO: 1255 - DNA, 20 bp, Homo sapiens
  source 1..20: mol_type = genomic DNA
gtggaaaatgtaaagaatgg

SEQ ID NO: 1256 - DNA, 20 bp, Homo sapiens
  source 1..20: mol_type = genomic DNA
tggaaaatgtaaagaatgga

SEQ ID NO: 1257 - DNA, 20 bp, Homo sapiens
  source 1..20: mol_type = genomic DNA
ggaaaatgtaaagaatggaa

SEQ ID NO: 1258 - DNA, 20 bp, Homo sapiens
  source 1..20: mol_type = genomic DNA
gaaaatgtaaagaatggaat

SEQ ID NO: 1259 - DNA, 20 bp, Homo sapiens
  source 1..20: mol_type = genomic DNA
aaaatgtaaagaatggaatc

SEQ ID NO: 1260 - DNA, 20 bp, Homo sapiens
  source 1..20: mol_type = genomic DNA
aaatgtaaagaatggaatca

SEQ ID NO: 1261 - DNA, 20 bp, Homo sapiens
  source 1..20: mol_type = genomic DNA
aatgtaaagaatggaatcag

SEQ ID NO: 1262 - DNA, 20 bp, Homo sapiens
  source 1..20: mol_type = genomic DNA
atgtaaagaatggaatcaga

SEQ ID NO: 1263 - DNA, 20 bp, Homo sapiens
  source 1..20: mol_type = genomic DNA
tgtaaagaatggaatcagaa

SEQ ID NO: 1264 - DNA, 20 bp, Homo sapiens
  source 1..20: mol_type = genomic DNA
gtaaagaatggaatcagaac

SEQ ID NO: 1265 - DNA, 20 bp, Homo sapiens
  source 1..20: mol_type = genomic DNA
taaagaatggaatcagaaca

SEQ ID NO: 1266 - DNA, 20 bp, Homo sapiens
  source 1..20: mol_type = genomic DNA
aaagaatggaatcagaacag

SEQ ID NO: 1267 - DNA, 20 bp, Homo sapiens
  source 1..20: mol_type = genomic DNA
aagaatggaatcagaacagg

SEQ ID NO: 1268 - DNA, 20 bp, Homo sapiens
  source 1..20: mol_type = genomic DNA
agaatggaatcagaacaggt

SEQ ID NO: 1269 - DNA, 20 bp, Homo sapiens
  source 1..20: mol_type = genomic DNA
gaatggaatcagaacaggtt

SEQ ID NO: 1270 - DNA, 20 bp, Homo sapiens
  source 1..20: mol_type = genomic DNA
aatggaatcagaacaggttt

SEQ ID NO: 1271 - DNA, 20 bp, Homo sapiens
  source 1..20: mol_type = genomic DNA
atggaatcagaacaggtttt

SEQ ID NO: 1272 - DNA, 20 bp, Homo sapiens
  source 1..20: mol_type = genomic DNA
tggaatcagaacaggttttc

SEQ ID NO: 1273 - DNA, 20 bp, Homo sapiens
  source 1..20: mol_type = genomic DNA
ggaatcagaacaggttttct

SEQ ID NO: 1274 - DNA, 20 bp, Homo sapiens
  source 1..20: mol_type = genomic DNA
gaatcagaacaggttttctg

SEQ ID NO: 1275 - DNA, 20 bp, Homo sapiens
  source 1..20: mol_type = genomic DNA
aatcagaacaggttttctgg

SEQ ID NO: 1276 - DNA, 20 bp, Homo sapiens
  source 1..20: mol_type = genomic DNA
atcagaacaggttttctgga

SEQ ID NO: 1277 - DNA, 20 bp, Homo sapiens
  source 1..20: mol_type = genomic DNA
tcagaacaggttttctggag

SEQ ID NO: 1278 - DNA, 20 bp, Homo sapiens
  source 1..20: mol_type = genomic DNA
cagaacaggttttctggaga

SEQ ID NO: 1279 - DNA, 20 bp, Homo sapiens
  source 1..20: mol_type = genomic DNA
agaacaggttttctggagat

SEQ ID NO: 1280 - DNA, 20 bp, Homo sapiens
  source 1..20: mol_type = genomic DNA
gaacaggttttctggagatt

SEQ ID NO: 1281 - DNA, 20 bp, Homo sapiens
  source 1..20: mol_type = genomic DNA
aacaggttttctggagattg

SEQ ID NO: 1282 - DNA, 20 bp, Homo sapiens
  source 1..20: mol_type = genomic DNA
acaggttttctggagattga

SEQ ID NO: 1283 - DNA, 20 bp, Homo sapiens
  source 1..20: mol_type = genomic DNA
caggttttctggagattgat

SEQ ID NO: 1284 - DNA, 20 bp, Homo sapiens
  source 1..20: mol_type = genomic DNA
aggttttctggagattgatg

SEQ ID NO: 1285 - DNA, 20 bp, Homo sapiens
  source 1..20: mol_type = genomic DNA
ggttttctggagattgatga

SEQ ID NO: 1286 - DNA, 20 bp, Homo sapiens
  source 1..20: mol_type = genomic DNA
gttttctggagattgatgaa

SEQ ID NO: 1287 - DNA, 20 bp, Homo sapiens
  source 1..20: mol_type = genomic DNA
ttttctggagattgatgaac

SEQ ID NO: 1288 - DNA, 20 bp, Homo sapiens
  source 1..20: mol_type = genomic DNA
tttctggagattgatgaaca

SEQ ID NO: 1289 - DNA, 20 bp, Homo sapiens
  source 1..20: mol_type = genomic DNA
ttctggagattgatgaacac

SEQ ID NO: 1290 - DNA, 20 bp, Homo sapiens
  source 1..20: mol_type = genomic DNA
tctggagattgatgaacaca

SEQ ID NO: 1291 - DNA, 20 bp, Homo sapiens
  source 1..20: mol_type = genomic DNA
ctggagattgatgaacacat

SEQ ID NO: 1292 - DNA, 20 bp, Homo sapiens
  source 1..20: mol_type = genomic DNA
tggagattgatgaacacatg

SEQ ID NO: 1293 - DNA, 20 bp, Homo sapiens
  source 1..20: mol_type = genomic DNA
ggagattgatgaacacatga

SEQ ID NO: 1294 - DNA, 20 bp, Homo sapiens
  source 1..20: mol_type = genomic DNA
gagattgatgaacacatgag

SEQ ID NO: 1295 - DNA, 20 bp, Homo sapiens
  source 1..20: mol_type = genomic DNA
agattgatgaacacatgaga

SEQ ID NO: 1296 - DNA, 20 bp, Homo sapiens
  source 1..20: mol_type = genomic DNA
gattgatgaacacatgagag

SEQ ID NO: 1297 - DNA, 20 bp, Homo sapiens
  source 1..20: mol_type = genomic DNA
attgatgaacacatgagagt

SEQ ID NO: 1298 - DNA, 20 bp, Homo sapiens
  source 1..20: mol_type = genomic DNA
ttgatgaacacatgagagtt

SEQ ID NO: 1299 - DNA, 20 bp, Homo sapiens
  source 1..20: mol_type = genomic DNA
tgatgaacacatgagagtta

SEQ ID NO: 1300 - DNA, 20 bp, Homo sapiens
  source 1..20: mol_type = genomic DNA
gatgaacacatgagagttat

SEQ ID NO: 1301 - DNA, 20 bp, Homo sapiens
  source 1..20: mol_type = genomic DNA
atgaacacatgagagttatg

SEQ ID NO: 1302 - DNA, 20 bp, Homo sapiens
  source 1..20: mol_type = genomic DNA
tgaacacatgagagttatgt

SEQ ID NO: 1303 - DNA, 20 bp, Homo sapiens
  source 1..20: mol_type = genomic DNA
gaacacatgagagttatgtc

SEQ ID NO: 1304 - DNA, 20 bp, Homo sapiens
  source 1..20: mol_type = genomic DNA
aacacatgagagttatgtca

SEQ ID NO: 1305 - DNA, 20 bp, Homo sapiens
  source 1..20: mol_type = genomic DNA
acacatgagagttatgtcag

SEQ ID NO: 1306 - DNA, 20 bp, Homo sapiens
  source 1..20: mol_type = genomic DNA
cacatgagagttatgtcaga

SEQ ID NO: 1307 - DNA, 20 bp, Homo sapiens
  source 1..20: mol_type = genomic DNA
acatgagagttatgtcagag

SEQ ID NO: 1308 - DNA, 20 bp, Homo sapiens
  source 1..20: mol_type = genomic DNA
catgagagttatgtcagaga

SEQ ID NO: 1309 - DNA, 20 bp, Homo sapiens
  source 1..20: mol_type = genomic DNA
atgagagttatgtcagagaa

SEQ ID NO: 1310 - DNA, 20 bp, Homo sapiens
  source 1..20: mol_type = genomic DNA
tgagagttatgtcagagaag

SEQ ID NO: 1311 - DNA, 20 bp, Homo sapiens
  source 1..20: mol_type = genomic DNA
gagagttatgtcagagaaga

SEQ ID NO: 1312 - DNA, 20 bp, Homo sapiens
  source 1..20: mol_type = genomic DNA
agagttatgtcagagaagaa

SEQ ID NO: 1313 - DNA, 20 bp, Homo sapiens
  source 1..20: mol_type = genomic DNA
gagttatgtcagagaagaaa

SEQ ID NO: 1314 - DNA, 20 bp, Homo sapiens
  source 1..20: mol_type = genomic DNA
agttatgtcagagaagaaac

SEQ ID NO: 1315 - DNA, 20 bp, Homo sapiens
  source 1..20: mol_type = genomic DNA
gttatgtcagagaagaaaca

SEQ ID NO: 1316 - DNA, 20 bp, Homo sapiens
  source 1..20: mol_type = genomic DNA
ttatgtcagagaagaaacat

SEQ ID NO: 1317 - DNA, 20 bp, Homo sapiens
  source 1..20: mol_type = genomic DNA
tatgtcagagaagaaacatg

SEQ ID NO: 1318 - DNA, 20 bp, Homo sapiens
  source 1..20: mol_type = genomic DNA
atgtcagagaagaaacatgg

SEQ ID NO: 1319 - DNA, 20 bp, Homo sapiens
  source 1..20: mol_type = genomic DNA
tgtcagagaagaaacatggt

SEQ ID NO: 1320 - DNA, 20 bp, Homo sapiens
  source 1..20: mol_type = genomic DNA
gtcagagaagaaacatggtg

SEQ ID NO: 1321 - DNA, 20 bp, Homo sapiens
  source 1..20: mol_type = genomic DNA
tcagagaagaaacatggtgc

SEQ ID NO: 1322 - DNA, 20 bp, Homo sapiens
  source 1..20: mol_type = genomic DNA
cagagaagaaacatggtgca

SEQ ID NO: 1323 - DNA, 20 bp, Homo sapiens
  source 1..20: mol_type = genomic DNA
agagaagaaacatggtgcag

SEQ ID NO: 1324 - DNA, 20 bp, Homo sapiens
  source 1..20: mol_type = genomic DNA
gagaagaaacatggtgcaga

SEQ ID NO: 1325 - DNA, 20 bp, Homo sapiens
  source 1..20: mol_type = genomic DNA
agaagaaacatggtgcagat

SEQ ID NO: 1326 - DNA, 20 bp, Homo sapiens
  source 1..20: mol_type = genomic DNA
gaagaaacatggtgcagata

SEQ ID NO: 1327 - DNA, 20 bp, Homo sapiens
  source 1..20: mol_type = genomic DNA
aagaaacatggtgcagatag

SEQ ID NO: 1328 - DNA, 20 bp, Homo sapiens
  source 1..20: mol_type = genomic DNA
agaaacatggtgcagataga

SEQ ID NO: 1329 - DNA, 20 bp, Homo sapiens
  source 1..20: mol_type = genomic DNA
gaaacatggtgcagatagaa

SEQ ID NO: 1330 - DNA, 20 bp, Homo sapiens
  source 1..20: mol_type = genomic DNA
aaacatggtgcagatagaag

SEQ ID NO: 1331 - DNA, 20 bp, Homo sapiens
  source 1..20: mol_type = genomic DNA
aacatggtgcagatagaagt

SEQ ID NO: 1332 - DNA, 20 bp, Homo sapiens
  source 1..20: mol_type = genomic DNA
acatggtgcagatagaagtg

SEQ ID NO: 1333 - DNA, 20 bp, Homo sapiens
  source 1..20: mol_type = genomic DNA
catggtgcagatagaagtgg

SEQ ID NO: 1334 - DNA, 20 bp, Homo sapiens
  source 1..20: mol_type = genomic DNA
atggtgcagatagaagtggg

SEQ ID NO: 1335 - DNA, 20 bp, Homo sapiens
  source 1..20: mol_type = genomic DNA
tggtgcagatagaagtgggt

SEQ ID NO: 1336 - DNA, 20 bp, Homo sapiens
  source 1..20: mol_type = genomic DNA
ggtgcagatagaagtgggtc

SEQ ID NO: 1337 - DNA, 20 bp, Homo sapiens
  source 1..20: mol_type = genomic DNA
gtgcagatagaagtgggtca

SEQ ID NO: 1338 - DNA, 20 bp, Homo sapiens
  source 1..20: mol_type = genomic DNA
tgcagatagaagtgggtcaa

SEQ ID NO: 1339 - DNA, 20 bp, Homo sapiens
  source 1..20: mol_type = genomic DNA
gcagatagaagtgggtcaac

SEQ ID NO: 1340 - DNA, 20 bp, Homo sapiens
  source 1..20: mol_type = genomic DNA
cagatagaagtgggtcaaca

SEQ ID NO: 1341 - DNA, 20 bp, Homo sapiens
  source 1..20: mol_type = genomic DNA
agatagaagtgggtcaacag

SEQ ID NO: 1342 - DNA, 20 bp, Homo sapiens
  source 1..20: mol_type = genomic DNA
gatagaagtgggtcaacagc

SEQ ID NO: 1343 - DNA, 20 bp, Homo sapiens
  source 1..20: mol_type = genomic DNA
atagaagtgggtcaacagct

SEQ ID NO: 1344 - DNA, 20 bp, Homo sapiens
  source 1..20: mol_type = genomic DNA
tagaagtgggtcaacagctg

SEQ ID NO: 1345 - DNA, 20 bp, Homo sapiens
  source 1..20: mol_type = genomic DNA
agaagtgggtcaacagctgt

SEQ ID NO: 1346 - DNA, 20 bp, Homo sapiens
  source 1..20: mol_type = genomic DNA
gaagtgggtcaacagctgta

SEQ ID NO: 1347 - DNA, 20 bp, Homo sapiens
  source 1..20: mol_type = genomic DNA
aagtgggtcaacagctgtag

SEQ ID NO: 1348 - DNA, 20 bp, Homo sapiens
  source 1..20: mol_type = genomic DNA
agtgggtcaacagctgtagg

SEQ ID NO: 1349 - DNA, 20 bp, Homo sapiens
  source 1..20: mol_type = genomic DNA
gtgggtcaacagctgtaggt

SEQ ID NO: 1350 - DNA, 20 bp, Homo sapiens
  source 1..20: mol_type = genomic DNA
tgggtcaacagctgtaggtg

SEQ ID NO: 1351 - DNA, 20 bp, Homo sapiens
  source 1..20: mol_type = genomic DNA
gggtcaacagctgtaggtgt

SEQ ID NO: 1352 - DNA, 20 bp, Homo sapiens
  source 1..20: mol_type = genomic DNA
ggtcaacagctgtaggtgtc

SEQ ID NO: 1353 - DNA, 20 bp, Homo sapiens
  source 1..20: mol_type = genomic DNA
gtcaacagctgtaggtgtct

SEQ ID NO: 1354 - DNA, 20 bp, Homo sapiens
  source 1..20: mol_type = genomic DNA
tcaacagctgtaggtgtctt

SEQ ID NO: 1355 - DNA, 20 bp, Homo sapiens
  source 1..20: mol_type = genomic DNA
caacagctgtaggtgtctta

SEQ ID NO: 1356 - DNA, 20 bp, Homo sapiens
  source 1..20: mol_type = genomic DNA
aacagctgtaggtgtcttaa

SEQ ID NO: 1357 - DNA, 20 bp, Homo sapiens
  source 1..20: mol_type = genomic DNA
acagctgtaggtgtcttaat

SEQ ID NO: 1358 - DNA, 20 bp, Homo sapiens
  source 1..20: mol_type = genomic DNA
cagctgtaggtgtcttaatt

SEQ ID NO: 1359 - DNA, 20 bp, Homo sapiens
  source 1..20: mol_type = genomic DNA
agctgtaggtgtcttaattt

SEQ ID NO: 1360 - DNA, 20 bp, Homo sapiens
  source 1..20: mol_type = genomic DNA
gctgtaggtgtcttaatttc

SEQ ID NO: 1361 - DNA, 20 bp, Homo sapiens
  source 1..20: mol_type = genomic DNA
ctgtaggtgtcttaatttct

SEQ ID NO: 1362 - DNA, 20 bp, Homo sapiens
  source 1..20: mol_type = genomic DNA
tgtaggtgtcttaatttctc

SEQ ID NO: 1363 - DNA, 20 bp, Homo sapiens
  source 1..20: mol_type = genomic DNA
gtaggtgtcttaatttctcc

SEQ ID NO: 1364 - DNA, 20 bp, Homo sapiens
  source 1..20: mol_type = genomic DNA
taggtgtcttaatttctccc

SEQ ID NO: 1365 - DNA, 20 bp, Homo sapiens
  source 1..20: mol_type = genomic DNA
aggtgtcttaatttctcccc

SEQ ID NO: 1366 - DNA, 20 bp, Homo sapiens
  source 1..20: mol_type = genomic DNA
ggtgtcttaatttctcccca

SEQ ID NO: 1367 - DNA, 20 bp, Homo sapiens
  source 1..20: mol_type = genomic DNA
gtgtcttaatttctccccaa

SEQ ID NO: 1368 - DNA, 20 bp, Homo sapiens
  source 1..20: mol_type = genomic DNA
tgtcttaatttctccccaac

SEQ ID NO: 1369 - DNA, 20 bp, Homo sapiens
  source 1..20: mol_type = genomic DNA
gtcttaatttctccccaaca

SEQ ID NO: 1370 - DNA, 20 bp, Homo sapiens
  source 1..20: mol_type = genomic DNA
tcttaatttctccccaacat

SEQ ID NO: 1371 - DNA, 20 bp, Homo sapiens
  source 1..20: mol_type = genomic DNA
cttaatttctccccaacata

SEQ ID NO: 1372 - DNA, 20 bp, Homo sapiens
  source 1..20: mol_type = genomic DNA
ttaatttctccccaacatac

SEQ ID NO: 1373 - DNA, 20 bp, Homo sapiens
  source 1..20: mol_type = genomic DNA
taatttctccccaacatact

SEQ ID NO: 1374 - DNA, 20 bp, Homo sapiens
  source 1..20: mol_type = genomic DNA
aatttctccccaacatactt

SEQ ID NO: 1375 - DNA, 20 bp, Homo sapiens
  source 1..20: mol_type = genomic DNA
atttctccccaacatactta

SEQ ID NO: 1376 - DNA, 20 bp, Homo sapiens
  source 1..20: mol_type = genomic DNA
tttctccccaacatacttat

SEQ ID NO: 1377 - DNA, 20 bp, Homo sapiens
  source 1..20: mol_type = genomic DNA
ttctccccaacatacttatt

SEQ ID NO: 1378 - DNA, 20 bp, Homo sapiens
  source 1..20: mol_type = genomic DNA
tctccccaacatacttattt

SEQ ID NO: 1379 - DNA, 20 bp, Homo sapiens
  source 1..20: mol_type = genomic DNA
ctccccaacatacttatttc

SEQ ID NO: 1380 - DNA, 20 bp, Homo sapiens
  source 1..20: mol_type = genomic DNA
tccccaacatacttatttca

SEQ ID NO: 1381 - DNA, 20 bp, Homo sapiens
  source 1..20: mol_type = genomic DNA
ccccaacatacttatttcat

SEQ ID NO: 1382 - DNA, 20 bp, Homo sapiens
  source 1..20: mol_type = genomic DNA
cccaacatacttatttcatt

SEQ ID NO: 1383 - DNA, 20 bp, Homo sapiens
  source 1..20: mol_type = genomic DNA
ccaacatacttatttcatta

SEQ ID NO: 1384 - DNA, 20 bp, Homo sapiens
  source 1..20: mol_type = genomic DNA
caacatacttatttcattaa

SEQ ID NO: 1385 - DNA, 20 bp, Homo sapiens
  source 1..20: mol_type = genomic DNA
aacatacttatttcattaac

SEQ ID NO: 1386 - DNA, 20 bp, Homo sapiens
  source 1..20: mol_type = genomic DNA
acatacttatttcattaact

SEQ ID NO: 1387 - DNA, 20 bp, Homo sapiens
  source 1..20: mol_type = genomic DNA
catacttatttcattaactg

SEQ ID NO: 1388 - DNA, 20 bp, Homo sapiens
  source 1..20: mol_type = genomic DNA
atacttatttcattaactgt

SEQ ID NO: 1389 - DNA, 20 bp, Homo sapiens
  source 1..20: mol_type = genomic DNA
tacttatttcattaactgtg

SEQ ID NO: 1390 - DNA, 20 bp, Homo sapiens
  source 1..20: mol_type = genomic DNA
acttatttcattaactgtgg

SEQ ID NO: 1391 - DNA, 20 bp, Homo sapiens
  source 1..20: mol_type = genomic DNA
cttatttcattaactgtgga

SEQ ID NO: 1392 - DNA, 20 bp, Homo sapiens
  source 1..20: mol_type = genomic DNA
ttatttcattaactgtggag

SEQ ID NO: 1393 - DNA, 20 bp, Homo sapiens
  source 1..20: mol_type = genomic DNA
tatttcattaactgtggaga

SEQ ID NO: 1394 - DNA, 20 bp, Homo sapiens
  source 1..20: mol_type = genomic DNA
atttcattaactgtggagac

SEQ ID NO: 1395 - DNA, 20 bp, Homo sapiens
  source 1..20: mol_type = genomic DNA
tttcattaactgtggagact

SEQ ID NO: 1396 - DNA, 20 bp, Homo sapiens
  source 1..20: mol_type = genomic DNA
ttcattaactgtggagactc

SEQ ID NO: 1397 - DNA, 20 bp, Homo sapiens
  source 1..20: mol_type = genomic DNA
tcattaactgtggagactca

SEQ ID NO: 1398 - DNA, 20 bp, Homo sapiens
  source 1..20: mol_type = genomic DNA
cattaactgtggagactcaa

SEQ ID NO: 1399 - DNA, 20 bp, Homo sapiens
  source 1..20: mol_type = genomic DNA
attaactgtggagactcaag

SEQ ID NO: 1400 - DNA, 20 bp, Homo sapiens
  source 1..20: mol_type = genomic DNA
ttaactgtggagactcaaga

SEQ ID NO: 1401 - DNA, 20 bp, Homo sapiens
  source 1..20: mol_type = genomic DNA
taactgtggagactcaagag

SEQ ID NO: 1402 - DNA, 20 bp, Homo sapiens
  source 1..20: mol_type = genomic DNA
aactgtggagactcaagagg

SEQ ID NO: 1403 - DNA, 20 bp, Homo sapiens
  source 1..20: mol_type = genomic DNA
actgtggagactcaagaggt

SEQ ID NO: 1404 - DNA, 20 bp, Homo sapiens
  source 1..20: mol_type = genomic DNA
ctgtggagactcaagaggtt

SEQ ID NO: 1405 - DNA, 20 bp, Homo sapiens
  source 1..20: mol_type = genomic DNA
tgtggagactcaagaggttt

SEQ ID NO: 1406 - DNA, 20 bp, Homo sapiens
  source 1..20: mol_type = genomic DNA
gtggagactcaagaggttta

SEQ ID NO: 1407 - DNA, 20 bp, Homo sapiens
  source 1..20: mol_type = genomic DNA
tggagactcaagaggtttac

SEQ ID NO: 1408 - DNA, 20 bp, Homo sapiens
  source 1..20: mol_type = genomic DNA
ggagactcaagaggtttact

SEQ ID NO: 1409 - DNA, 20 bp, Homo sapiens
  source 1..20: mol_type = genomic DNA
gagactcaagaggtttactt

SEQ ID NO: 1410 - DNA, 20 bp, Homo sapiens
  source 1..20: mol_type = genomic DNA
agactcaagaggtttacttt

SEQ ID NO: 1411 - DNA, 20 bp, Homo sapiens
  source 1..20: mol_type = genomic DNA
gactcaagaggtttactttg

SEQ ID NO: 1412 - DNA, 20 bp, Homo sapiens
  source 1..20: mol_type = genomic DNA
actcaagaggtttactttgt

SEQ ID NO: 1413 - DNA, 20 bp, Homo sapiens
  source 1..20: mol_type = genomic DNA
ctcaagaggtttactttgta

SEQ ID NO: 1414 - DNA, 20 bp, Homo sapiens
  source 1..20: mol_type = genomic DNA
tcaagaggtttactttgtag

SEQ ID NO: 1415 - DNA, 20 bp, Homo sapiens
  source 1..20: mol_type = genomic DNA
caagaggtttactttgtagg

SEQ ID NO: 1416 - DNA, 20 bp, Homo sapiens
  source 1..20: mol_type = genomic DNA
aagaggtttactttgtagga

SEQ ID NO: 1417 - DNA, 20 bp, Homo sapiens
  source 1..20: mol_type = genomic DNA
agaggtttactttgtaggaa

SEQ ID NO: 1418 - DNA, 20 bp, Homo sapiens
  source 1..20: mol_type = genomic DNA
gaggtttactttgtaggaac

SEQ ID NO: 1419 - DNA, 20 bp, Homo sapiens
  source 1..20: mol_type = genomic DNA
aggtttactttgtaggaaca

SEQ ID NO: 1420 - DNA, 20 bp, Homo sapiens
  source 1..20: mol_type = genomic DNA
ggtttactttgtaggaacag

SEQ ID NO: 1421 - DNA, 20 bp, Homo sapiens
  source 1..20: mol_type = genomic DNA
gtttactttgtaggaacagg

SEQ ID NO: 1422 - DNA, 20 bp, Homo sapiens
  source 1..20: mol_type = genomic DNA
tttactttgtaggaacagga

SEQ ID NO: 1423 - DNA, 20 bp, Homo sapiens
  source 1..20: mol_type = genomic DNA
ttactttgtaggaacaggaa

SEQ ID NO: 1424 - DNA, 20 bp, Homo sapiens
  source 1..20: mol_type = genomic DNA
tactttgtaggaacaggaaa

SEQ ID NO: 1425 - DNA, 20 bp, Homo sapiens
  source 1..20: mol_type = genomic DNA
actttgtaggaacaggaaag

SEQ ID NO: 1426 - DNA, 20 bp, Homo sapiens
  source 1..20: mol_type = genomic DNA
ctttgtaggaacaggaaagt

SEQ ID NO: 1427 - DNA, 20 bp, Homo sapiens
  source 1..20: mol_type = genomic DNA
tttgtaggaacaggaaagtt

SEQ ID NO: 1428 - DNA, 20 bp, Homo sapiens
  source 1..20: mol_type = genomic DNA
ttgtaggaacaggaaagttc

SEQ ID NO: 1429 - DNA, 20 bp, Homo sapiens
  source 1..20: mol_type = genomic DNA
tgtaggaacaggaaagttca

SEQ ID NO: 1430 - DNA, 20 bp, Homo sapiens
  source 1..20: mol_type = genomic DNA
gtaggaacaggaaagttcat

SEQ ID NO: 1431 - DNA, 20 bp, Homo sapiens
  source 1..20: mol_type = genomic DNA
taggaacaggaaagttcatt

SEQ ID NO: 1432 - DNA, 20 bp, Homo sapiens
  source 1..20: mol_type = genomic DNA
aggaacaggaaagttcattt

SEQ ID NO: 1433 - DNA, 20 bp, Homo sapiens
  source 1..20: mol_type = genomic DNA
ggaacaggaaagttcatttc

SEQ ID NO: 1434 - DNA, 20 bp, Homo sapiens
  source 1..20: mol_type = genomic DNA
gaacaggaaagttcatttct

SEQ ID NO: 1435 - DNA, 20 bp, Homo sapiens
  source 1..20: mol_type = genomic DNA
aacaggaaagttcatttctt

SEQ ID NO: 1436 - DNA, 20 bp, Homo sapiens
  source 1..20: mol_type = genomic DNA
acaggaaagttcatttcttc

SEQ ID NO: 1437 - DNA, 20 bp, Homo sapiens
  source 1..20: mol_type = genomic DNA
caggaaagttcatttcttca

SEQ ID NO: 1438 - DNA, 20 bp, Homo sapiens
  source 1..20: mol_type = genomic DNA
aggaaagttcatttcttcac

SEQ ID NO: 1439 - DNA, 20 bp, Homo sapiens
  source 1..20: mol_type = genomic DNA
ggaaagttcatttcttcaca

SEQ ID NO: 1440 - DNA, 20 bp, Homo sapiens
  source 1..20: mol_type = genomic DNA
gaaagttcatttcttcacac

SEQ ID NO: 1441 - DNA, 20 bp, Homo sapiens
  source 1..20: mol_type = genomic DNA
aaagttcatttcttcacaca

SEQ ID NO: 1442 - DNA, 20 bp, Homo sapiens
  source 1..20: mol_type = genomic DNA
aagttcatttcttcacacaa

SEQ ID NO: 1443 - DNA, 20 bp, Homo sapiens
  source 1..20: mol_type = genomic DNA
agttcatttcttcacacaag

SEQ ID NO: 1444 - DNA, 20 bp, Homo sapiens
  source 1..20: mol_type = genomic DNA
gttcatttcttcacacaaga

SEQ ID NO: 1445 - DNA, 20 bp, Homo sapiens
  source 1..20: mol_type = genomic DNA
ttcatttcttcacacaagat

SEQ ID NO: 1446 - DNA, 20 bp, Homo sapiens
  source 1..20: mol_type = genomic DNA
tcatttcttcacacaagatc

SEQ ID NO: 1447 - DNA, 20 bp, Homo sapiens
  source 1..20: mol_type = genomic DNA
catttcttcacacaagatca

SEQ ID NO: 1448 - DNA, 20 bp, Homo sapiens
  source 1..20: mol_type = genomic DNA
atttcttcacacaagatcac

SEQ ID NO: 1449 - DNA, 20 bp, Homo sapiens
  source 1..20: mol_type = genomic DNA
tttcttcacacaagatcaca

SEQ ID NO: 1450 - DNA, 20 bp, Homo sapiens
  source 1..20: mol_type = genomic DNA
ttcttcacacaagatcacaa

SEQ ID NO: 1451 - DNA, 20 bp, Homo sapiens
  source 1..20: mol_type = genomic DNA
tcttcacacaagatcacaaa

SEQ ID NO: 1452 - DNA, 20 bp, Homo sapiens
  source 1..20: mol_type = genomic DNA
cttcacacaagatcacaaac

SEQ ID NO: 1453 - DNA, 20 bp, Homo sapiens
  source 1..20: mol_type = genomic DNA
ttcacacaagatcacaaacc

SEQ ID NO: 1454 - DNA, 20 bp, Homo sapiens
  source 1..20: mol_type = genomic DNA
tcacacaagatcacaaacca

SEQ ID NO: 1455 - DNA, 20 bp, Homo sapiens
  source 1..20: mol_type = genomic DNA
cacacaagatcacaaaccaa

SEQ ID NO: 1456 - DNA, 20 bp, Homo sapiens
  source 1..20: mol_type = genomic DNA
acacaagatcacaaaccaag

SEQ ID NO: 1457 - DNA, 20 bp, Homo sapiens
  source 1..20: mol_type = genomic DNA
cacaagatcacaaaccaagt

SEQ ID NO: 1458 - DNA, 20 bp, Homo sapiens
  source 1..20: mol_type = genomic DNA
acaagatcacaaaccaagta

SEQ ID NO: 1459 - DNA, 20 bp, Homo sapiens
  source 1..20: mol_type = genomic DNA
caagatcacaaaccaagtaa

SEQ ID NO: 1460 - DNA, 20 bp, Homo sapiens
  source 1..20: mol_type = genomic DNA
aagatcacaaaccaagtaat

SEQ ID NO: 1461 - DNA, 20 bp, Homo sapiens
  source 1..20: mol_type = genomic DNA
agatcacaaaccaagtaatc

SEQ ID NO: 1462 - DNA, 20 bp, Homo sapiens
  source 1..20: mol_type = genomic DNA
gatcacaaaccaagtaatcc

SEQ ID NO: 1463 - DNA, 20 bp, Homo sapiens
  source 1..20: mol_type = genomic DNA
atcacaaaccaagtaatccg

SEQ ID NO: 1464 - DNA, 20 bp, Homo sapiens
  source 1..20: mol_type = genomic DNA
tcacaaaccaagtaatccgc

SEQ ID NO: 1465 - DNA, 20 bp, Homo sapiens
  source 1..20: mol_type = genomic DNA
cacaaaccaagtaatccgct

SEQ ID NO: 1466 - DNA, 20 bp, Homo sapiens
  source 1..20: mol_type = genomic DNA
acaaaccaagtaatccgctg

SEQ ID NO: 1467 - DNA, 20 bp, Homo sapiens
  source 1..20: mol_type = genomic DNA
caaaccaagtaatccgctgg

SEQ ID NO: 1468 - DNA, 20 bp, Homo sapiens
  source 1..20: mol_type = genomic DNA
aaaccaagtaatccgctgga

SEQ ID NO: 1469 - DNA, 20 bp, Homo sapiens
  source 1..20: mol_type = genomic DNA
aaccaagtaatccgctggag

SEQ ID NO: 1470 - DNA, 20 bp, Homo sapiens
  source 1..20: mol_type = genomic DNA
accaagtaatccgctggaga

SEQ ID NO: 1471 - DNA, 20 bp, Homo sapiens
  source 1..20: mol_type = genomic DNA
ccaagtaatccgctggagaa

SEQ ID NO: 1472 - DNA, 20 bp, Homo sapiens
  source 1..20: mol_type = genomic DNA
caagtaatccgctggagaaa

SEQ ID NO: 1473 - DNA, 20 bp, Homo sapiens
  source 1..20: mol_type = genomic DNA
aagtaatccgctggagaaag

SEQ ID NO: 1474 - DNA, 20 bp, Homo sapiens
  source 1..20: mol_type = genomic DNA
agtaatccgctggagaaaga

SEQ ID NO: 1475 - DNA, 20 bp, Homo sapiens
  source 1..20: mol_type = genomic DNA
gtaatccgctggagaaagaa

SEQ ID NO: 1476 - DNA, 20 bp, Homo sapiens
  source 1..20: mol_type = genomic DNA
taatccgctggagaaagaac

SEQ ID NO: 1477 - DNA, 20 bp, Homo sapiens
  source 1..20: mol_type = genomic DNA
aatccgctggagaaagaacg

SEQ ID NO: 1478 - DNA, 20 bp, Homo sapiens
  source 1..20: mol_type = genomic DNA
atccgctggagaaagaacga

SEQ ID NO: 1479 - DNA, 20 bp, Homo sapiens
  source 1..20: mol_type = genomic DNA
tccgctggagaaagaacgaa

SEQ ID NO: 1480 - DNA, 20 bp, Homo sapiens
  source 1..20: mol_type = genomic DNA
ccgctggagaaagaacgaat

SEQ ID NO: 1481 - DNA, 20 bp, Homo sapiens
  source 1..20: mol_type = genomic DNA
cgctggagaaagaacgaatt

SEQ ID NO: 1482 - DNA, 20 bp, Homo sapiens
  source 1..20: mol_type = genomic DNA
gctggagaaagaacgaattc

SEQ ID NO: 1483 - DNA, 20 bp, Homo sapiens
  source 1..20: mol_type = genomic DNA
ctggagaaagaacgaattca

SEQ ID NO: 1484 - DNA, 20 bp, Homo sapiens
  source 1..20: mol_type = genomic DNA
tggagaaagaacgaattcag

SEQ ID NO: 1485 - DNA, 20 bp, Homo sapiens
  source 1..20: mol_type = genomic DNA
ggagaaagaacgaattcaga

SEQ ID NO: 1486 - DNA, 20 bp, Homo sapiens
  source 1..20: mol_type = genomic DNA
gagaaagaacgaattcagaa

SEQ ID NO: 1487 - DNA, 20 bp, Homo sapiens
  source 1..20: mol_type = genomic DNA
agaaagaacgaattcagaat

SEQ ID NO: 1488 - DNA, 20 bp, Homo sapiens
  source 1..20: mol_type = genomic DNA
gaaagaacgaattcagaatg

SEQ ID NO: 1489 - DNA, 20 bp, Homo sapiens
  source 1..20: mol_type = genomic DNA
aaagaacgaattcagaatgc

SEQ ID NO: 1490 - DNA, 20 bp, Homo sapiens
  source 1..20: mol_type = genomic DNA
aagaacgaattcagaatgca

SEQ ID NO: 1491 - DNA, 20 bp, Homo sapiens
  source 1..20: mol_type = genomic DNA
agaacgaattcagaatgcag

SEQ ID NO: 1492 - DNA, 20 bp, Homo sapiens
  source 1..20: mol_type = genomic DNA
gaacgaattcagaatgcagg

SEQ ID NO: 1493 - DNA, 20 bp, Homo sapiens
  source 1..20: mol_type = genomic DNA
aacgaattcagaatgcaggt

SEQ ID NO: 1494 - DNA, 20 bp, Homo sapiens
  source 1..20: mol_type = genomic DNA
acgaattcagaatgcaggtg

SEQ ID NO: 1495 - DNA, 20 bp, Homo sapiens
  source 1..20: mol_type = genomic DNA
cgaattcagaatgcaggtgg

SEQ ID NO: 1496 - DNA, 20 bp, Homo sapiens
  source 1..20: mol_type = genomic DNA
gaattcagaatgcaggtggc

SEQ ID NO: 1497 - DNA, 20 bp, Homo sapiens
  source 1..20: mol_type = genomic DNA
aattcagaatgcaggtggct

SEQ ID NO: 1498 - DNA, 20 bp, Homo sapiens
  source 1..20: mol_type = genomic DNA
attcagaatgcaggtggctc

SEQ ID NO: 1499 - DNA, 20 bp, Homo sapiens
  source 1..20: mol_type = genomic DNA
ttcagaatgcaggtggctct

SEQ ID NO: 1500 - DNA, 20 bp, Homo sapiens
  source 1..20: mol_type = genomic DNA
tcagaatgcaggtggctctg

SEQ ID NO: 1501 - DNA, 20 bp, Homo sapiens
  source 1..20: mol_type = genomic DNA
cagaatgcaggtggctctgt

SEQ ID NO: 1502 - DNA, 20 bp, Homo sapiens
  source 1..20: mol_type = genomic DNA
agaatgcaggtggctctgta

SEQ ID NO: 1503 - DNA, 20 bp, Homo sapiens
  source 1..20: mol_type = genomic DNA
gaatgcaggtggctctgtaa

SEQ ID NO: 1504 - DNA, 20 bp, Homo sapiens
  source 1..20: mol_type = genomic DNA
aatgcaggtggctctgtaat

SEQ ID NO: 1505 - DNA, 20 bp, Homo sapiens
  source 1..20: mol_type = genomic DNA
atgcaggtggctctgtaatg

SEQ ID NO: 1506 - DNA, 20 bp, Homo sapiens
  source 1..20: mol_type = genomic DNA
tgcaggtggctctgtaatga

SEQ ID NO: 1507 - DNA, 20 bp, Homo sapiens
  source 1..20: mol_type = genomic DNA
gcaggtggctctgtaatgat

SEQ ID NO: 1508 - DNA, 20 bp, Homo sapiens
  source 1..20: mol_type = genomic DNA
caggtggctctgtaatgatt

SEQ ID NO: 1509 - DNA, 20 bp, Homo sapiens
  source 1..20: mol_type = genomic DNA
aggtggctctgtaatgattc

SEQ ID NO: 1510 - DNA, 20 bp, Homo sapiens
  source 1..20: mol_type = genomic DNA
ggtggctctgtaatgattca

SEQ ID NO: 1511 - DNA, 20 bp, Homo sapiens
  source 1..20: mol_type = genomic DNA
gtggctctgtaatgattcag

SEQ ID NO: 1512 - DNA, 20 bp, Homo sapiens
  source 1..20: mol_type = genomic DNA
tggctctgtaatgattcagc

SEQ ID NO: 1513 - DNA, 20 bp, Homo sapiens
  source 1..20: mol_type = genomic DNA
ggctctgtaatgattcagcg

SEQ ID NO: 1514 - DNA, 20 bp, Homo sapiens
  source 1..20: mol_type = genomic DNA
gctctgtaatgattcagcgt

SEQ ID NO: 1515 - DNA, 20 bp, Homo sapiens
  source 1..20: mol_type = genomic DNA
ctctgtaatgattcagcgtg

SEQ ID NO: 1516 - DNA, 20 bp, Homo sapiens
  source 1..20: mol_type = genomic DNA
tctgtaatgattcagcgtgt

SEQ ID NO: 1517 - DNA, 20 bp, Homo sapiens
  source 1..20: mol_type = genomic DNA
ctgtaatgattcagcgtgtg

SEQ ID NO: 1518 - DNA, 20 bp, Homo sapiens
  source 1..20: mol_type = genomic DNA
tgtaatgattcagcgtgtga

SEQ ID NO: 1519 - DNA, 20 bp, Homo sapiens
  source 1..20: mol_type = genomic DNA
gtaatgattcagcgtgtgaa

SEQ ID NO: 1520 - DNA, 20 bp, Homo sapiens
  source 1..20: mol_type = genomic DNA
taatgattcagcgtgtgaat

SEQ ID NO: 1521 - DNA, 20 bp, Homo sapiens
  source 1..20: mol_type = genomic DNA
aatgattcagcgtgtgaatg

SEQ ID NO: 1522 - DNA, 20 bp, Homo sapiens
  source 1..20: mol_type = genomic DNA
atgattcagcgtgtgaatgg

SEQ ID NO: 1523 - DNA, 20 bp, Homo sapiens
  source 1..20: mol_type = genomic DNA
tgattcagcgtgtgaatggc

SEQ ID NO: 1524 - DNA, 20 bp, Homo sapiens
  source 1..20: mol_type = genomic DNA
gattcagcgtgtgaatggct

SEQ ID NO: 1525 - DNA, 20 bp, Homo sapiens
  source 1..20: mol_type = genomic DNA
attcagcgtgtgaatggctc

SEQ ID NO: 1526 - DNA, 20 bp, Homo sapiens
  source 1..20: mol_type = genomic DNA
ttcagcgtgtgaatggctct

SEQ ID NO: 1527 - DNA, 20 bp, Homo sapiens
  source 1..20: mol_type = genomic DNA
tcagcgtgtgaatggctctc

SEQ ID NO: 1528 - DNA, 20 bp, Homo sapiens
  source 1..20: mol_type = genomic DNA
cagcgtgtgaatggctctct

SEQ ID NO: 1529 - DNA, 20 bp, Homo sapiens
  source 1..20: mol_type = genomic DNA
agcgtgtgaatggctctctg

SEQ ID NO: 1530 - DNA, 20 bp, Homo sapiens
  source 1..20: mol_type = genomic DNA
gcgtgtgaatggctctctgg

SEQ ID NO: 1531 - DNA, 20 bp, Homo sapiens
  source 1..20: mol_type = genomic DNA
cgtgtgaatggctctctggc

SEQ ID NO: 1532 - DNA, 20 bp, Homo sapiens
  source 1..20: mol_type = genomic DNA
gtgtgaatggctctctggct

SEQ ID NO: 1533 - DNA, 20 bp, Homo sapiens
  source 1..20: mol_type = genomic DNA
tgtgaatggctctctggctg

SEQ ID NO: 1534 - DNA, 20 bp, Homo sapiens
  source 1..20: mol_type = genomic DNA
gtgaatggctctctggctgt

SEQ ID NO: 1535 - DNA, 20 bp, Homo sapiens
  source 1..20: mol_type = genomic DNA
tgaatggctctctggctgta

SEQ ID NO: 1536 - DNA, 20 bp, Homo sapiens
  source 1..20: mol_type = genomic DNA
gaatggctctctggctgtat

SEQ ID NO: 1537 - DNA, 20 bp, Homo sapiens
  source 1..20: mol_type = genomic DNA
aatggctctctggctgtatc

SEQ ID NO: 1538 - DNA, 20 bp, Homo sapiens
  source 1..20: mol_type = genomic DNA
atggctctctggctgtatcg

SEQ ID NO: 1539 - DNA, 20 bp, Homo sapiens
  source 1..20: mol_type = genomic DNA
tggctctctggctgtatcga

SEQ ID NO: 1540 - DNA, 20 bp, Homo sapiens
  source 1..20: mol_type = genomic DNA
ggctctctggctgtatcgag

SEQ ID NO: 1541 - DNA, 20 bp, Homo sapiens
  source 1..20: mol_type = genomic DNA
gctctctggctgtatcgagg

SEQ ID NO: 1542 - DNA, 20 bp, Homo sapiens
  source 1..20: mol_type = genomic DNA
ctctctggctgtatcgaggg

SEQ ID NO: 1543 - DNA, 20 bp, Homo sapiens
  source 1..20: mol_type = genomic DNA
tctctggctgtatcgagggc

SEQ ID NO: 1544 - DNA, 20 bp, Homo sapiens
  source 1..20: mol_type = genomic DNA
ctctggctgtatcgagggcc

SEQ ID NO: 1545 - DNA, 20 bp, Homo sapiens
  source 1..20: mol_type = genomic DNA
tctggctgtatcgagggccc

SEQ ID NO: 1546 - DNA, 20 bp, Homo sapiens
  source 1..20: mol_type = genomic DNA
ctggctgtatcgagggccct

SEQ ID NO: 1547 - DNA, 20 bp, Homo sapiens
  source 1..20: mol_type = genomic DNA
tggctgtatcgagggccctt

SEQ ID NO: 1548 - DNA, 20 bp, Homo sapiens
  source 1..20: mol_type = genomic DNA
ggctgtatcgagggcccttg

SEQ ID NO: 1549 - DNA, 20 bp, Homo sapiens
  source 1..20: mol_type = genomic DNA
gctgtatcgagggcccttgg

SEQ ID NO: 1550 - DNA, 20 bp, Homo sapiens
  source 1..20: mol_type = genomic DNA
ctgtatcgagggcccttggg

SEQ ID NO: 1551 - DNA, 20 bp, Homo sapiens
  source 1..20: mol_type = genomic DNA
tgtatcgagggcccttgggg

SEQ ID NO: 1552 - DNA, 20 bp, Homo sapiens
  source 1..20: mol_type = genomic DNA
gtatcgagggcccttgggga

SEQ ID NO: 1553 - DNA, 20 bp, Homo sapiens
  source 1..20: mol_type = genomic DNA
tatcgagggcccttggggat

SEQ ID NO: 1554 - DNA, 20 bp, Homo sapiens
  source 1..20: mol_type = genomic DNA
atcgagggcccttggggatt

SEQ ID NO: 1555 - DNA, 20 bp, Homo sapiens
  source 1..20: mol_type = genomic DNA
tcgagggcccttggggattt

SEQ ID NO: 1556 - DNA, 20 bp, Homo sapiens
  source 1..20: mol_type = genomic DNA
cgagggcccttggggatttt

SEQ ID NO: 1557 - DNA, 20 bp, Homo sapiens
  source 1..20: mol_type = genomic DNA
gagggcccttggggattttg

SEQ ID NO: 1558 - DNA, 20 bp, Homo sapiens
  source 1..20: mol_type = genomic DNA
agggcccttggggattttga

SEQ ID NO: 1559 - DNA, 20 bp, Homo sapiens
  source 1..20: mol_type = genomic DNA
gggcccttggggattttgat

SEQ ID NO: 1560 - DNA, 20 bp, Homo sapiens
  source 1..20: mol_type = genomic DNA
ggcccttggggattttgatt

SEQ ID NO: 1561 - DNA, 20 bp, Homo sapiens
  source 1..20: mol_type = genomic DNA
gcccttggggattttgatta

SEQ ID NO: 1562 - DNA, 20 bp, Homo sapiens
  source 1..20: mol_type = genomic DNA
cccttggggattttgattac

SEQ ID NO: 1563 - DNA, 20 bp, Homo sapiens
  source 1..20: mol_type = genomic DNA
ccttggggattttgattaca

SEQ ID NO: 1564 - DNA, 20 bp, Homo sapiens
  source 1..20: mol_type = genomic DNA
cttggggattttgattacaa

SEQ ID NO: 1565 - DNA, 20 bp, Homo sapiens
  source 1..20: mol_type = genomic DNA
ttggggattttgattacaaa

SEQ ID NO: 1566 - DNA, 20 bp, Homo sapiens
  source 1..20: mol_type = genomic DNA
tggggattttgattacaaat

SEQ ID NO: 1567 - DNA, 20 bp, Homo sapiens
  source 1..20: mol_type = genomic DNA
ggggattttgattacaaatg

SEQ ID NO: 1568 - DNA, 20 bp, Homo sapiens
  source 1..20: mol_type = genomic DNA
gggattttgattacaaatgt

SEQ ID NO: 1569 - DNA, 20 bp, Homo sapiens
  source 1..20: mol_type = genomic DNA
ggattttgattacaaatgtg

SEQ ID NO: 1570 - DNA, 20 bp, Homo sapiens
  source 1..20: mol_type = genomic DNA
gattttgattacaaatgtgt

SEQ ID NO: 1571 - DNA, 20 bp, Homo sapiens
  source 1..20: mol_type = genomic DNA
attttgattacaaatgtgtc

SEQ ID NO: 1572 - DNA, 20 bp, Homo sapiens
  source 1..20: mol_type = genomic DNA
ttttgattacaaatgtgtcc

SEQ ID NO: 1573 - DNA, 20 bp, Homo sapiens
  source 1..20: mol_type = genomic DNA
tttgattacaaatgtgtcca

SEQ ID NO: 1574 - DNA, 20 bp, Homo sapiens
  source 1..20: mol_type = genomic DNA
ttgattacaaatgtgtccat

SEQ ID NO: 1575 - DNA, 20 bp, Homo sapiens
  source 1..20: mol_type = genomic DNA
tgattacaaatgtgtccatg

SEQ ID NO: 1576 - DNA, 20 bp, Homo sapiens
  source 1..20: mol_type = genomic DNA
gattacaaatgtgtccatgg

SEQ ID NO: 1577 - DNA, 20 bp, Homo sapiens
  source 1..20: mol_type = genomic DNA
attacaaatgtgtccatgga

SEQ ID NO: 1578 - DNA, 20 bp, Homo sapiens
  source 1..20: mol_type = genomic DNA
ttacaaatgtgtccatggaa

SEQ ID NO: 1579 - DNA, 20 bp, Homo sapiens
  source 1..20: mol_type = genomic DNA
tacaaatgtgtccatggaaa

SEQ ID NO: 1580 - DNA, 20 bp, Homo sapiens
  source 1..20: mol_type = genomic DNA
acaaatgtgtccatggaaaa

SEQ ID NO: 1581 - DNA, 20 bp, Homo sapiens
  source 1..20: mol_type = genomic DNA
caaatgtgtccatggaaaag

SEQ ID NO: 1582 - DNA, 20 bp, Homo sapiens
  source 1..20: mol_type = genomic DNA
aaatgtgtccatggaaaagg

SEQ ID NO: 1583 - DNA, 20 bp, Homo sapiens
  source 1..20: mol_type = genomic DNA
aatgtgtccatggaaaaggt

SEQ ID NO: 1584 - DNA, 20 bp, Homo sapiens
  source 1..20: mol_type = genomic DNA
atgtgtccatggaaaaggtc

SEQ ID NO: 1585 - DNA, 20 bp, Homo sapiens
  source 1..20: mol_type = genomic DNA
tgtgtccatggaaaaggtcc

SEQ ID NO: 1586 - DNA, 20 bp, Homo sapiens
  source 1..20: mol_type = genomic DNA
gtgtccatggaaaaggtcct

SEQ ID NO: 1587 - DNA, 20 bp, Homo sapiens
  source 1..20: mol_type = genomic DNA
tgtccatggaaaaggtccta

SEQ ID NO: 1588 - DNA, 20 bp, Homo sapiens
  source 1..20: mol_type = genomic DNA
gtccatggaaaaggtcctac

SEQ ID NO: 1589 - DNA, 20 bp, Homo sapiens
  source 1..20: mol_type = genomic DNA
tccatggaaaaggtcctact

SEQ ID NO: 1590 - DNA, 20 bp, Homo sapiens
  source 1..20: mol_type = genomic DNA
ccatggaaaaggtcctactg

SEQ ID NO: 1591 - DNA, 20 bp, Homo sapiens
  source 1..20: mol_type = genomic DNA
catggaaaaggtcctactga

SEQ ID NO: 1592 - DNA, 20 bp, Homo sapiens
  source 1..20: mol_type = genomic DNA
atggaaaaggtcctactgag

SEQ ID NO: 1593 - DNA, 20 bp, Homo sapiens
  source 1..20: mol_type = genomic DNA
tggaaaaggtcctactgagc

SEQ ID NO: 1594 - DNA, 20 bp, Homo sapiens
  source 1..20: mol_type = genomic DNA
ggaaaaggtcctactgagca

SEQ ID NO: 1595 - DNA, 20 bp, Homo sapiens
  source 1..20: mol_type = genomic DNA
gaaaaggtcctactgagcag

SEQ ID NO: 1596 - DNA, 20 bp, Homo sapiens
  source 1..20: mol_type = genomic DNA
aaaaggtcctactgagcagc

SEQ ID NO: 1597 - DNA, 20 bp, Homo sapiens
  source 1..20: mol_type = genomic DNA
aaaggtcctactgagcagct

SEQ ID NO: 1598 - DNA, 20 bp, Homo sapiens
  source 1..20: mol_type = genomic DNA
aaggtcctactgagcagctt

SEQ ID NO: 1599 - DNA, 20 bp, Homo sapiens
  source 1..20: mol_type = genomic DNA
aggtcctactgagcagcttg

SEQ ID NO: 1600 - DNA, 20 bp, Homo sapiens
  source 1..20: mol_type = genomic DNA
ggtcctactgagcagcttgt

SEQ ID NO: 1601 - DNA, 20 bp, Homo sapiens
  source 1..20: mol_type = genomic DNA
gtcctactgagcagcttgtc

SEQ ID NO: 1602 - DNA, 20 bp, Homo sapiens
  source 1..20: mol_type = genomic DNA
tcctactgagcagcttgtct

SEQ ID NO: 1603 - DNA, 20 bp, Homo sapiens
  source 1..20: mol_type = genomic DNA
cctactgagcagcttgtctc

SEQ ID NO: 1604 - DNA, 20 bp, Homo sapiens
  source 1..20: mol_type = genomic DNA
ctactgagcagcttgtctca

SEQ ID NO: 1605 - DNA, 20 bp, Homo sapiens
  source 1..20: mol_type = genomic DNA
tactgagcagcttgtctcac

SEQ ID NO: 1606 - DNA, 20 bp, Homo sapiens
  source 1..20: mol_type = genomic DNA
actgagcagcttgtctcacc

SEQ ID NO: 1607 - DNA, 20 bp, Homo sapiens
  source 1..20: mol_type = genomic DNA
ctgagcagcttgtctcacca

SEQ ID NO: 1608 - DNA, 20 bp, Homo sapiens
  source 1..20: mol_type = genomic DNA
tgagcagcttgtctcaccag

SEQ ID NO: 1609 - DNA, 20 bp, Homo sapiens
  source 1..20: mol_type = genomic DNA
gagcagcttgtctcaccaga

SEQ ID NO: 1610 - DNA, 20 bp, Homo sapiens
  source 1..20: mol_type = genomic DNA
agcagcttgtctcaccagag

SEQ ID NO: 1611 - DNA, 20 bp, Homo sapiens
  source 1..20: mol_type = genomic DNA
gcagcttgtctcaccagagc

SEQ ID NO: 1612 - DNA, 20 bp, Homo sapiens
  source 1..20: mol_type = genomic DNA
cagcttgtctcaccagagcc

SEQ ID NO: 1613 - DNA, 20 bp, Homo sapiens
  source 1..20: mol_type = genomic DNA
agcttgtctcaccagagcct

SEQ ID NO: 1614 - DNA, 20 bp, Homo sapiens
  source 1..20: mol_type = genomic DNA
gcttgtctcaccagagcctg

SEQ ID NO: 1615 - DNA, 20 bp, Homo sapiens
  source 1..20: mol_type = genomic DNA
cttgtctcaccagagcctga

SEQ ID NO: 1616 - DNA, 20 bp, Homo sapiens
  source 1..20: mol_type = genomic DNA
ttgtctcaccagagcctgaa

SEQ ID NO: 1617 - DNA, 20 bp, Homo sapiens
  source 1..20: mol_type = genomic DNA
tgtctcaccagagcctgaag

SEQ ID NO: 1618 - DNA, 20 bp, Homo sapiens
  source 1..20: mol_type = genomic DNA
gtctcaccagagcctgaagt

SEQ ID NO: 1619 - DNA, 20 bp, Homo sapiens
  source 1..20: mol_type = genomic DNA
tctcaccagagcctgaagtc

SEQ ID NO: 1620 - DNA, 20 bp, Homo sapiens
  source 1..20: mol_type = genomic DNA
ctcaccagagcctgaagtcc

SEQ ID NO: 1621 - DNA, 20 bp, Homo sapiens
  source 1..20: mol_type = genomic DNA
tcaccagagcctgaagtcca

SEQ ID NO: 1622 - DNA, 20 bp, Homo sapiens
  source 1..20: mol_type = genomic DNA
caccagagcctgaagtccat

SEQ ID NO: 1623 - DNA, 20 bp, Homo sapiens
  source 1..20: mol_type = genomic DNA
accagagcctgaagtccatg

SEQ ID NO: 1624 - DNA, 20 bp, Homo sapiens
  source 1..20: mol_type = genomic DNA
ccagagcctgaagtccatga

SEQ ID NO: 1625 - DNA, 20 bp, Homo sapiens
  source 1..20: mol_type = genomic DNA
cagagcctgaagtccatgat

SEQ ID NO: 1626 - DNA, 20 bp, Homo sapiens
  source 1..20: mol_type = genomic DNA
agagcctgaagtccatgata

SEQ ID NO: 1627 - DNA, 20 bp, Homo sapiens
  source 1..20: mol_type = genomic DNA
gagcctgaagtccatgatat

SEQ ID NO: 1628 - DNA, 20 bp, Homo sapiens
  source 1..20: mol_type = genomic DNA
agcctgaagtccatgatatt

SEQ ID NO: 1629 - DNA, 20 bp, Homo sapiens
  source 1..20: mol_type = genomic DNA
gcctgaagtccatgatattg

SEQ ID NO: 1630 - DNA, 20 bp, Homo sapiens
  source 1..20: mol_type = genomic DNA
cctgaagtccatgatattga

SEQ ID NO: 1631 - DNA, 20 bp, Homo sapiens
  source 1..20: mol_type = genomic DNA
ctgaagtccatgatattgaa

SEQ ID NO: 1632 - DNA, 20 bp, Homo sapiens
  source 1..20: mol_type = genomic DNA
tgaagtccatgatattgaaa

SEQ ID NO: 1633 - DNA, 20 bp, Homo sapiens
  source 1..20: mol_type = genomic DNA
gaagtccatgatattgaaag

SEQ ID NO: 1634 - DNA, 20 bp, Homo sapiens
  source 1..20: mol_type = genomic DNA
aagtccatgatattgaaaga

SEQ ID NO: 1635 - DNA, 20 bp, Homo sapiens
  source 1..20: mol_type = genomic DNA
agtccatgatattgaaagat

SEQ ID NO: 1636 - DNA, 20 bp, Homo sapiens
  source 1..20: mol_type = genomic DNA
gtccatgatattgaaagatc

SEQ ID NO: 1637 - DNA, 20 bp, Homo sapiens
  source 1..20: mol_type = genomic DNA
tccatgatattgaaagatct

SEQ ID NO: 1638 - DNA, 20 bp, Homo sapiens
  source 1..20: mol_type = genomic DNA
ccatgatattgaaagatctg

SEQ ID NO: 1639 - DNA, 20 bp, Homo sapiens
  source 1..20: mol_type = genomic DNA
catgatattgaaagatctga

SEQ ID NO: 1640 - DNA, 20 bp, Homo sapiens
  source 1..20: mol_type = genomic DNA
atgatattgaaagatctgaa

SEQ ID NO: 1641 - DNA, 20 bp, Homo sapiens
  source 1..20: mol_type = genomic DNA
tgatattgaaagatctgaag

SEQ ID NO: 1642 - DNA, 20 bp, Homo sapiens
  source 1..20: mol_type = genomic DNA
gatattgaaagatctgaaga

SEQ ID NO: 1643 - DNA, 20 bp, Homo sapiens
  source 1..20: mol_type = genomic DNA
atattgaaagatctgaagaa

SEQ ID NO: 1644 - DNA, 20 bp, Homo sapiens
  source 1..20: mol_type = genomic DNA
tattgaaagatctgaagaag

SEQ ID NO: 1645 - DNA, 20 bp, Homo sapiens
  source 1..20: mol_type = genomic DNA
attgaaagatctgaagaaga

SEQ ID NO: 1646 - DNA, 20 bp, Homo sapiens
  source 1..20: mol_type = genomic DNA
ttgaaagatctgaagaagat

SEQ ID NO: 1647 - DNA, 20 bp, Homo sapiens
  source 1..20: mol_type = genomic DNA
tgaaagatctgaagaagatg

SEQ ID NO: 1648 - DNA, 20 bp, Homo sapiens
  source 1..20: mol_type = genomic DNA
gaaagatctgaagaagatga

SEQ ID NO: 1649 - DNA, 20 bp, Homo sapiens
  source 1..20: mol_type = genomic DNA
aaagatctgaagaagatgat

SEQ ID NO: 1650 - DNA, 20 bp, Homo sapiens
  source 1..20: mol_type = genomic DNA
aagatctgaagaagatgatc

SEQ ID NO: 1651 - DNA, 20 bp, Homo sapiens
  source 1..20: mol_type = genomic DNA
agatctgaagaagatgatca

SEQ ID NO: 1652 - DNA, 20 bp, Homo sapiens
  source 1..20: mol_type = genomic DNA
gatctgaagaagatgatcag

SEQ ID NO: 1653 - DNA, 20 bp, Homo sapiens
  source 1..20: mol_type = genomic DNA
atctgaagaagatgatcagt

SEQ ID NO: 1654 - DNA, 20 bp, Homo sapiens
  source 1..20: mol_type = genomic DNA
tctgaagaagatgatcagtt

SEQ ID NO: 1655 - DNA, 20 bp, Homo sapiens
  source 1..20: mol_type = genomic DNA
ctgaagaagatgatcagttc

SEQ ID NO: 1656 - DNA, 20 bp, Homo sapiens
  source 1..20: mol_type = genomic DNA
tgaagaagatgatcagttca

SEQ ID NO: 1657 - DNA, 20 bp, Homo sapiens
  source 1..20: mol_type = genomic DNA
gaagaagatgatcagttcat

SEQ ID NO: 1658 - DNA, 20 bp, Homo sapiens
  source 1..20: mol_type = genomic DNA
aagaagatgatcagttcatt

SEQ ID NO: 1659 - DNA, 20 bp, Homo sapiens
  source 1..20: mol_type = genomic DNA
agaagatgatcagttcatta

SEQ ID NO: 1660 - DNA, 20 bp, Homo sapiens
  source 1..20: mol_type = genomic DNA
gaagatgatcagttcattat

SEQ ID NO: 1661 - DNA, 20 bp, Homo sapiens
  source 1..20: mol_type = genomic DNA
aagatgatcagttcattatc

SEQ ID NO: 1662 - DNA, 20 bp, Homo sapiens
  source 1..20: mol_type = genomic DNA
agatgatcagttcattatcc

SEQ ID NO: 1663 - DNA, 20 bp, Homo sapiens
  source 1..20: mol_type = genomic DNA
gatgatcagttcattatcct

SEQ ID NO: 1664 - DNA, 20 bp, Homo sapiens
  source 1..20: mol_type = genomic DNA
atgatcagttcattatcctt

SEQ ID NO: 1665 - DNA, 20 bp, Homo sapiens
  source 1..20: mol_type = genomic DNA
tgatcagttcattatccttg

SEQ ID NO: 1666 - DNA, 20 bp, Homo sapiens
  source 1..20: mol_type = genomic DNA
gatcagttcattatccttgc

SEQ ID NO: 1667 - DNA, 20 bp, Homo sapiens
  source 1..20: mol_type = genomic DNA
atcagttcattatccttgca

SEQ ID NO: 1668 - DNA, 20 bp, Homo sapiens
  source 1..20: mol_type = genomic DNA
tcagttcattatccttgcat

SEQ ID NO: 1669 - DNA, 20 bp, Homo sapiens
  source 1..20: mol_type = genomic DNA
cagttcattatccttgcatg

SEQ ID NO: 1670 - DNA, 20 bp, Homo sapiens
  source 1..20: mol_type = genomic DNA
agttcattatccttgcatgt

SEQ ID NO: 1671 - DNA, 20 bp, Homo sapiens
  source 1..20: mol_type = genomic DNA
gttcattatccttgcatgtg

SEQ ID NO: 1672 - DNA, 20 bp, Homo sapiens
  source 1..20: mol_type = genomic DNA
ttcattatccttgcatgtga

SEQ ID NO: 1673 - DNA, 20 bp, Homo sapiens
  source 1..20: mol_type = genomic DNA
tcattatccttgcatgtgat

SEQ ID NO: 1674 - DNA, 20 bp, Homo sapiens
  source 1..20: mol_type = genomic DNA
cattatccttgcatgtgatg

SEQ ID NO: 1675 - DNA, 20 bp, Homo sapiens
  source 1..20: mol_type = genomic DNA
attatccttgcatgtgatgg

SEQ ID NO: 1676 - DNA, 20 bp, Homo sapiens
  source 1..20: mol_type = genomic DNA
ttatccttgcatgtgatggt

SEQ ID NO: 1677 - DNA, 20 bp, Homo sapiens
  source 1..20: mol_type = genomic DNA
tatccttgcatgtgatggta

SEQ ID NO: 1678 - DNA, 20 bp, Homo sapiens
  source 1..20: mol_type = genomic DNA
atccttgcatgtgatggtat

SEQ ID NO: 1679 - DNA, 20 bp, Homo sapiens
  source 1..20: mol_type = genomic DNA
tccttgcatgtgatggtatc

SEQ ID NO: 1680 - DNA, 20 bp, Homo sapiens
  source 1..20: mol_type = genomic DNA
ccttgcatgtgatggtatct

SEQ ID NO: 1681 - DNA, 20 bp, Homo sapiens
  source 1..20: mol_type = genomic DNA
cttgcatgtgatggtatctg

SEQ ID NO: 1682 - DNA, 20 bp, Homo sapiens
  source 1..20: mol_type = genomic DNA
ttgcatgtgatggtatctgg

SEQ ID NO: 1683 - DNA, 20 bp, Homo sapiens
  source 1..20: mol_type = genomic DNA
tgcatgtgatggtatctggg

SEQ ID NO: 1684 - DNA, 20 bp, Homo sapiens
  source 1..20: mol_type = genomic DNA
gcatgtgatggtatctggga

SEQ ID NO: 1685 - DNA, 20 bp, Homo sapiens
  source 1..20: mol_type = genomic DNA
catgtgatggtatctgggat

SEQ ID NO: 1686 - DNA, 20 bp, Homo sapiens
  source 1..20: mol_type = genomic DNA
atgtgatggtatctgggatg

SEQ ID NO: 1687 - DNA, 20 bp, Homo sapiens
  source 1..20: mol_type = genomic DNA
tgtgatggtatctgggatgt

SEQ ID NO: 1688 - DNA, 20 bp, Homo sapiens
  source 1..20: mol_type = genomic DNA
gtgatggtatctgggatgtt

SEQ ID NO: 1689 - DNA, 20 bp, Homo sapiens
  source 1..20: mol_type = genomic DNA
tgatggtatctgggatgtta

SEQ ID NO: 1690 - DNA, 20 bp, Homo sapiens
  source 1..20: mol_type = genomic DNA
gatggtatctgggatgttat

SEQ ID NO: 1691 - DNA, 20 bp, Homo sapiens
  source 1..20: mol_type = genomic DNA
atggtatctgggatgttatg

SEQ ID NO: 1692 - DNA, 20 bp, Homo sapiens
  source 1..20: mol_type = genomic DNA
tggtatctgggatgttatgg

SEQ ID NO: 1693 - DNA, 20 bp, Homo sapiens
  source 1..20: mol_type = genomic DNA
ggtatctgggatgttatggg

SEQ ID NO: 1694 - DNA, 20 bp, Homo sapiens
  source 1..20: mol_type = genomic DNA
gtatctgggatgttatggga

SEQ ID NO: 1695 - DNA, 20 bp, Homo sapiens
  source 1..20: mol_type = genomic DNA
tatctgggatgttatgggaa

SEQ ID NO: 1696 - DNA, 20 bp, Homo sapiens
  source 1..20: mol_type = genomic DNA
atctgggatgttatgggaaa

SEQ ID NO: 1697 - DNA, 20 bp, Homo sapiens
  source 1..20: mol_type = genomic DNA
tctgggatgttatgggaaat

SEQ ID NO: 1698 - DNA, 20 bp, Homo sapiens
  source 1..20: mol_type = genomic DNA
ctgggatgttatgggaaatg

SEQ ID NO: 1699 - DNA, 20 bp, Homo sapiens
  source 1..20: mol_type = genomic DNA
tgggatgttatgggaaatga

SEQ ID NO: 1700 - DNA, 20 bp, Homo sapiens
  source 1..20: mol_type = genomic DNA
gggatgttatgggaaatgaa

SEQ ID NO: 1701 - DNA, 20 bp, Homo sapiens
  source 1..20: mol_type = genomic DNA
ggatgttatgggaaatgaag

SEQ ID NO: 1702 - DNA, 20 bp, Homo sapiens
  source 1..20: mol_type = genomic DNA
gatgttatgggaaatgaaga

SEQ ID NO: 1703 - DNA, 20 bp, Homo sapiens
  source 1..20: mol_type = genomic DNA
atgttatgggaaatgaagag

SEQ ID NO: 1704 - DNA, 20 bp, Homo sapiens
  source 1..20: mol_type = genomic DNA
tgttatgggaaatgaagagc

SEQ ID NO: 1705 - DNA, 20 bp, Homo sapiens
  source 1..20: mol_type = genomic DNA
gttatgggaaatgaagagct

SEQ ID NO: 1706 - DNA, 20 bp, Homo sapiens
  source 1..20: mol_type = genomic DNA
ttatgggaaatgaagagctc

SEQ ID NO: 1707 - DNA, 20 bp, Homo sapiens
  source 1..20: mol_type = genomic DNA
tatgggaaatgaagagctct

SEQ ID NO: 1708 - DNA, 20 bp, Homo sapiens
  source 1..20: mol_type = genomic DNA
atgggaaatgaagagctctg

SEQ ID NO: 1709 - DNA, 20 bp, Homo sapiens
  source 1..20: mol_type = genomic DNA
tgggaaatgaagagctctgt

SEQ ID NO: 1710 - DNA, 20 bp, Homo sapiens
  source 1..20: mol_type = genomic DNA
gggaaatgaagagctctgtg

SEQ ID NO: 1711 - DNA, 20 bp, Homo sapiens
  source 1..20: mol_type = genomic DNA
ggaaatgaagagctctgtga

SEQ ID NO: 1712 - DNA, 20 bp, Homo sapiens
  source 1..20: mol_type = genomic DNA
gaaatgaagagctctgtgat

SEQ ID NO: 1713 - DNA, 20 bp, Homo sapiens
  source 1..20: mol_type = genomic DNA
aaatgaagagctctgtgatt

SEQ ID NO: 1714 - DNA, 20 bp, Homo sapiens
  source 1..20: mol_type = genomic DNA
aatgaagagctctgtgattt

SEQ ID NO: 1715 - DNA, 20 bp, Homo sapiens
  source 1..20: mol_type = genomic DNA
atgaagagctctgtgatttt

SEQ ID NO: 1716 - DNA, 20 bp, Homo sapiens
  source 1..20: mol_type = genomic DNA
tgaagagctctgtgattttg

SEQ ID NO: 1717 - DNA, 20 bp, Homo sapiens
  source 1..20: mol_type = genomic DNA
gaagagctctgtgattttgt

SEQ ID NO: 1718 - DNA, 20 bp, Homo sapiens
  source 1..20: mol_type = genomic DNA
aagagctctgtgattttgta

SEQ ID NO: 1719 - DNA, 20 bp, Homo sapiens
  source 1..20: mol_type = genomic DNA
agagctctgtgattttgtaa

SEQ ID NO: 1720 - DNA, 20 bp, Homo sapiens
  source 1..20: mol_type = genomic DNA
gagctctgtgattttgtaag

SEQ ID NO: 1721 - DNA, 20 bp, Homo sapiens
  source 1..20: mol_type = genomic DNA
agctctgtgattttgtaaga

SEQ ID NO: 1722 - DNA, 20 bp, Homo sapiens
  source 1..20: mol_type = genomic DNA
gctctgtgattttgtaagat

SEQ ID NO: 1723 - DNA, 20 bp, Homo sapiens
  source 1..20: mol_type = genomic DNA
ctctgtgattttgtaagatc

SEQ ID NO: 1724 - DNA, 20 bp, Homo sapiens
  source 1..20: mol_type = genomic DNA
tctgtgattttgtaagatcc

SEQ ID NO: 1725 - DNA, 20 bp, Homo sapiens
  source 1..20: mol_type = genomic DNA
ctgtgattttgtaagatcca

SEQ ID NO: 1726 - DNA, 20 bp, Homo sapiens
  source 1..20: mol_type = genomic DNA
tgtgattttgtaagatccag

SEQ ID NO: 1727 - DNA, 20 bp, Homo sapiens
  source 1..20: mol_type = genomic DNA
gtgattttgtaagatccaga

SEQ ID NO: 1728 - DNA, 20 bp, Homo sapiens
  source 1..20: mol_type = genomic DNA
tgattttgtaagatccagac

SEQ ID NO: 1729 - DNA, 20 bp, Homo sapiens
  source 1..20: mol_type = genomic DNA
gattttgtaagatccagact

SEQ ID NO: 1730 - DNA, 20 bp, Homo sapiens
  source 1..20: mol_type = genomic DNA
attttgtaagatccagactt

SEQ ID NO: 1731 - DNA, 20 bp, Homo sapiens
  source 1..20: mol_type = genomic DNA
ttttgtaagatccagacttg

SEQ ID NO: 1732 - DNA, 20 bp, Homo sapiens
  source 1..20: mol_type = genomic DNA
tttgtaagatccagacttga

SEQ ID NO: 1733 - DNA, 20 bp, Homo sapiens
  source 1..20: mol_type = genomic DNA
ttgtaagatccagacttgaa

SEQ ID NO: 1734 - DNA, 20 bp, Homo sapiens
  source 1..20: mol_type = genomic DNA
tgtaagatccagacttgaag

SEQ ID NO: 1735 - DNA, 20 bp, Homo sapiens
  source 1..20: mol_type = genomic DNA
gtaagatccagacttgaagt

SEQ ID NO: 1736 - DNA, 20 bp, Homo sapiens
  source 1..20: mol_type = genomic DNA
taagatccagacttgaagtc

SEQ ID NO: 1737 - DNA, 20 bp, Homo sapiens
  source 1..20: mol_type = genomic DNA
aagatccagacttgaagtca

SEQ ID NO: 1738 - DNA, 20 bp, Homo sapiens
  source 1..20: mol_type = genomic DNA
agatccagacttgaagtcac

SEQ ID NO: 1739 - DNA, 20 bp, Homo sapiens
  source 1..20: mol_type = genomic DNA
gatccagacttgaagtcact

SEQ ID NO: 1740 - DNA, 20 bp, Homo sapiens
  source 1..20: mol_type = genomic DNA
atccagacttgaagtcactg

SEQ ID NO: 1741 - DNA, 20 bp, Homo sapiens
  source 1..20: mol_type = genomic DNA
tccagacttgaagtcactga

SEQ ID NO: 1742 - DNA, 20 bp, Homo sapiens
  source 1..20: mol_type = genomic DNA
ccagacttgaagtcactgat

SEQ ID NO: 1743 - DNA, 20 bp, Homo sapiens
  source 1..20: mol_type = genomic DNA
cagacttgaagtcactgatg

SEQ ID NO: 1744 - DNA, 20 bp, Homo sapiens
  source 1..20: mol_type = genomic DNA
agacttgaagtcactgatga

SEQ ID NO: 1745 - DNA, 20 bp, Homo sapiens
  source 1..20: mol_type = genomic DNA
gacttgaagtcactgatgac

SEQ ID NO: 1746 - DNA, 20 bp, Homo sapiens
  source 1..20: mol_type = genomic DNA
acttgaagtcactgatgacc

SEQ ID NO: 1747 - DNA, 20 bp, Homo sapiens
  source 1..20: mol_type = genomic DNA
cttgaagtcactgatgacct

SEQ ID NO: 1748 - DNA, 20 bp, Homo sapiens
  source 1..20: mol_type = genomic DNA
ttgaagtcactgatgacctt

SEQ ID NO: 1749 - DNA, 20 bp, Homo sapiens
  source 1..20: mol_type = genomic DNA
tgaagtcactgatgaccttg

SEQ ID NO: 1750 - DNA, 20 bp, Homo sapiens
  source 1..20: mol_type = genomic DNA
gaagtcactgatgaccttga

SEQ ID NO: 1751 - DNA, 20 bp, Homo sapiens
  source 1..20: mol_type = genomic DNA
aagtcactgatgaccttgag

SEQ ID NO: 1752 - DNA, 20 bp, Homo sapiens
  source 1..20: mol_type = genomic DNA
agtcactgatgaccttgaga

SEQ ID NO: 1753 - DNA, 20 bp, Homo sapiens
  source 1..20: mol_type = genomic DNA
gtcactgatgaccttgagaa

SEQ ID NO: 1754 - DNA, 20 bp, Homo sapiens
  source 1..20: mol_type = genomic DNA
tcactgatgaccttgagaaa

SEQ ID NO: 1755 - DNA, 20 bp, Homo sapiens
  source 1..20: mol_type = genomic DNA
cactgatgaccttgagaaag

SEQ ID NO: 1756 - DNA, 20 bp, Homo sapiens
  source 1..20: mol_type = genomic DNA
actgatgaccttgagaaagt

SEQ ID NO: 1757 - DNA, 20 bp, Homo sapiens
  source 1..20: mol_type = genomic DNA
ctgatgaccttgagaaagtt

SEQ ID NO: 1758 - DNA, 20 bp, Homo sapiens
  source 1..20: mol_type = genomic DNA
tgatgaccttgagaaagttt

SEQ ID NO: 1759 - DNA, 20 bp, Homo sapiens
  source 1..20: mol_type = genomic DNA
gatgaccttgagaaagtttg

SEQ ID NO: 1760 - DNA, 20 bp, Homo sapiens
  source 1..20: mol_type = genomic DNA
atgaccttgagaaagtttgc

SEQ ID NO: 1761 - DNA, 20 bp, Homo sapiens
  source 1..20: mol_type = genomic DNA
tgaccttgagaaagtttgca

SEQ ID NO: 1762 - DNA, 20 bp, Homo sapiens
  source 1..20: mol_type = genomic DNA
gaccttgagaaagtttgcaa

SEQ ID NO: 1763 - DNA, 20 bp, Homo sapiens
  source 1..20: mol_type = genomic DNA
accttgagaaagtttgcaat

SEQ ID NO: 1764 - DNA, 20 bp, Homo sapiens
  source 1..20: mol_type = genomic DNA
ccttgagaaagtttgcaatg

SEQ ID NO: 1765 - DNA, 20 bp, Homo sapiens
  source 1..20: mol_type = genomic DNA
cttgagaaagtttgcaatga

SEQ ID NO: 1766 - DNA, 20 bp, Homo sapiens
  source 1..20: mol_type = genomic DNA
ttgagaaagtttgcaatgaa

SEQ ID NO: 1767 - DNA, 20 bp, Homo sapiens
  source 1..20: mol_type = genomic DNA
tgagaaagtttgcaatgaag

SEQ ID NO: 1768 - DNA, 20 bp, Homo sapiens
  source 1..20: mol_type = genomic DNA
gagaaagtttgcaatgaagt

SEQ ID NO: 1769 - DNA, 20 bp, Homo sapiens
  source 1..20: mol_type = genomic DNA
agaaagtttgcaatgaagta

SEQ ID NO: 1770 - DNA, 20 bp, Homo sapiens
  source 1..20: mol_type = genomic DNA
gaaagtttgcaatgaagtag

SEQ ID NO: 1771 - DNA, 20 bp, Homo sapiens
  source 1..20: mol_type = genomic DNA
aaagtttgcaatgaagtagt

SEQ ID NO: 1772 - DNA, 20 bp, Homo sapiens
  source 1..20: mol_type = genomic DNA
aagtttgcaatgaagtagtc

SEQ ID NO: 1773 - DNA, 20 bp, Homo sapiens
  source 1..20: mol_type = genomic DNA
agtttgcaatgaagtagtcg

SEQ ID NO: 1774 - DNA, 20 bp, Homo sapiens
  source 1..20: mol_type = genomic DNA
gtttgcaatgaagtagtcga

SEQ ID NO: 1775 - DNA, 20 bp, Homo sapiens
  source 1..20: mol_type = genomic DNA
tttgcaatgaagtagtcgac

SEQ ID NO: 1776 - DNA, 20 bp, Homo sapiens
  source 1..20: mol_type = genomic DNA
ttgcaatgaagtagtcgaca

SEQ ID NO: 1777 - DNA, 20 bp, Homo sapiens
  source 1..20: mol_type = genomic DNA
tgcaatgaagtagtcgacac

SEQ ID NO: 1778 - DNA, 20 bp, Homo sapiens
  source 1..20: mol_type = genomic DNA
gcaatgaagtagtcgacacc

SEQ ID NO: 1779 - DNA, 20 bp, Homo sapiens
  source 1..20: mol_type = genomic DNA
caatgaagtagtcgacacct

SEQ ID NO: 1780 - DNA, 20 bp, Homo sapiens
  source 1..20: mol_type = genomic DNA
aatgaagtagtcgacacctg

SEQ ID NO: 1781 - DNA, 20 bp, Homo sapiens
  source 1..20: mol_type = genomic DNA
atgaagtagtcgacacctgt

SEQ ID NO: 1782 - DNA, 20 bp, Homo sapiens
  source 1..20: mol_type = genomic DNA
tgaagtagtcgacacctgtt

SEQ ID NO: 1783 - DNA, 20 bp, Homo sapiens
  source 1..20: mol_type = genomic DNA
gaagtagtcgacacctgttt

SEQ ID NO: 1784 - DNA, 20 bp, Homo sapiens
  source 1..20: mol_type = genomic DNA
aagtagtcgacacctgtttg

SEQ ID NO: 1785 - DNA, 20 bp, Homo sapiens
  source 1..20: mol_type = genomic DNA
agtagtcgacacctgtttgt

SEQ ID NO: 1786 - DNA, 20 bp, Homo sapiens
  source 1..20: mol_type = genomic DNA
gtagtcgacacctgtttgta

SEQ ID NO: 1787 - DNA, 20 bp, Homo sapiens
  source 1..20: mol_type = genomic DNA
tagtcgacacctgtttgtat

SEQ ID NO: 1788 - DNA, 20 bp, Homo sapiens
  source 1..20: mol_type = genomic DNA
agtcgacacctgtttgtata

SEQ ID NO: 1789 - DNA, 20 bp, Homo sapiens
  source 1..20: mol_type = genomic DNA
gtcgacacctgtttgtataa

SEQ ID NO: 1790 - DNA, 20 bp, Homo sapiens
  source 1..20: mol_type = genomic DNA
tcgacacctgtttgtataag

SEQ ID NO: 1791 - DNA, 20 bp, Homo sapiens
  source 1..20: mol_type = genomic DNA
cgacacctgtttgtataagg

SEQ ID NO: 1792 - DNA, 20 bp, Homo sapiens
  source 1..20: mol_type = genomic DNA
gacacctgtttgtataaggg

SEQ ID NO: 1793 - DNA, 20 bp, Homo sapiens
  source 1..20: mol_type = genomic DNA
acacctgtttgtataaggga

SEQ ID NO: 1794 - DNA, 20 bp, Homo sapiens
  source 1..20: mol_type = genomic DNA
cacctgtttgtataagggaa

SEQ ID NO: 1795 - DNA, 20 bp, Homo sapiens
  source 1..20: mol_type = genomic DNA
acctgtttgtataagggaag

SEQ ID NO: 1796 - DNA, 20 bp, Homo sapiens
  source 1..20: mol_type = genomic DNA
cctgtttgtataagggaagt

SEQ ID NO: 1797 - DNA, 20 bp, Homo sapiens
  source 1..20: mol_type = genomic DNA
ctgtttgtataagggaagtc

SEQ ID NO: 1798 - DNA, 20 bp, Homo sapiens
  source 1..20: mol_type = genomic DNA
tgtttgtataagggaagtcg

SEQ ID NO: 1799 - DNA, 20 bp, Homo sapiens
  source 1..20: mol_type = genomic DNA
gtttgtataagggaagtcga

SEQ ID NO: 1800 - DNA, 20 bp, Homo sapiens
  source 1..20: mol_type = genomic DNA
tttgtataagggaagtcgag

SEQ ID NO: 1801 - DNA, 20 bp, Homo sapiens
  source 1..20: mol_type = genomic DNA
ttgtataagggaagtcgaga

SEQ ID NO: 1802 - DNA, 20 bp, Homo sapiens
  source 1..20: mol_type = genomic DNA
tgtataagggaagtcgagac

SEQ ID NO: 1803 - DNA, 20 bp, Homo sapiens
  source 1..20: mol_type = genomic DNA
gtataagggaagtcgagaca

SEQ ID NO: 1804 - DNA, 20 bp, Homo sapiens
  source 1..20: mol_type = genomic DNA
tataagggaagtcgagacaa

SEQ ID NO: 1805 - DNA, 20 bp, Homo sapiens
  source 1..20: mol_type = genomic DNA
ataagggaagtcgagacaac

SEQ ID NO: 1806 - DNA, 20 bp, Homo sapiens
  source 1..20: mol_type = genomic DNA
taagggaagtcgagacaaca

SEQ ID NO: 1807 - DNA, 20 bp, Homo sapiens
  source 1..20: mol_type = genomic DNA
aagggaagtcgagacaacat

SEQ ID NO: 1808 - DNA, 20 bp, Homo sapiens
  source 1..20: mol_type = genomic DNA
agggaagtcgagacaacatg

SEQ ID NO: 1809 - DNA, 20 bp, Homo sapiens
  source 1..20: mol_type = genomic DNA
gggaagtcgagacaacatga

SEQ ID NO: 1810 - DNA, 20 bp, Homo sapiens
  source 1..20: mol_type = genomic DNA
ggaagtcgagacaacatgag

SEQ ID NO: 1811 - DNA, 20 bp, Homo sapiens
  source 1..20: mol_type = genomic DNA
gaagtcgagacaacatgagt

SEQ ID NO: 1812 - DNA, 20 bp, Homo sapiens
  source 1..20: mol_type = genomic DNA
aagtcgagacaacatgagtg

SEQ ID NO: 1813 - DNA, 20 bp, Homo sapiens
  source 1..20: mol_type = genomic DNA
agtcgagacaacatgagtgt

SEQ ID NO: 1814 - DNA, 20 bp, Homo sapiens
  source 1..20: mol_type = genomic DNA
gtcgagacaacatgagtgtg

SEQ ID NO: 1815 - DNA, 20 bp, Homo sapiens
  source 1..20: mol_type = genomic DNA
tcgagacaacatgagtgtga

SEQ ID NO: 1816 - DNA, 20 bp, Homo sapiens
  source 1..20: mol_type = genomic DNA
cgagacaacatgagtgtgat

SEQ ID NO: 1817 - DNA, 20 bp, Homo sapiens
  source 1..20: mol_type = genomic DNA
gagacaacatgagtgtgatt

SEQ ID NO: 1818 - DNA, 20 bp, Homo sapiens
  source 1..20: mol_type = genomic DNA
agacaacatgagtgtgattt

SEQ ID NO: 1819 - DNA, 20 bp, Homo sapiens
  source 1..20: mol_type = genomic DNA
gacaacatgagtgtgatttt

SEQ ID NO: 1820 - DNA, 20 bp, Homo sapiens
  source 1..20: mol_type = genomic DNA
acaacatgagtgtgattttg

SEQ ID NO: 1821 - DNA, 20 bp, Homo sapiens
  source 1..20: mol_type = genomic DNA
caacatgagtgtgattttga

SEQ ID NO: 1822 - DNA, 20 bp, Homo sapiens
  source 1..20: mol_type = genomic DNA
aacatgagtgtgattttgat

SEQ ID NO: 1823 - DNA, 20 bp, Homo sapiens
  source 1..20: mol_type = genomic DNA
acatgagtgtgattttgatc

SEQ ID NO: 1824 - DNA, 20 bp, Homo sapiens
  source 1..20: mol_type = genomic DNA
catgagtgtgattttgatct

SEQ ID NO: 1825 - DNA, 20 bp, Homo sapiens
  source 1..20: mol_type = genomic DNA
atgagtgtgattttgatctg

SEQ ID NO: 1826 - DNA, 20 bp, Homo sapiens
  source 1..20: mol_type = genomic DNA
tgagtgtgattttgatctgt

SEQ ID NO: 1827 - DNA, 20 bp, Homo sapiens
  source 1..20: mol_type = genomic DNA
gagtgtgattttgatctgtt

SEQ ID NO: 1828 - DNA, 20 bp, Homo sapiens
  source 1..20: mol_type = genomic DNA
agtgtgattttgatctgttt

SEQ ID NO: 1829 - DNA, 20 bp, Homo sapiens
  source 1..20: mol_type = genomic DNA
gtgtgattttgatctgtttt

SEQ ID NO: 1830 - DNA, 20 bp, Homo sapiens
  source 1..20: mol_type = genomic DNA
tgtgattttgatctgttttc

SEQ ID NO: 1831 - DNA, 20 bp, Homo sapiens
  source 1..20: mol_type = genomic DNA
gtgattttgatctgttttcc

SEQ ID NO: 1832 - DNA, 20 bp, Homo sapiens
  source 1..20: mol_type = genomic DNA
tgattttgatctgttttcca

SEQ ID NO: 1833 - DNA, 20 bp, Homo sapiens
  source 1..20: mol_type = genomic DNA
gattttgatctgttttccaa

SEQ ID NO: 1834 - DNA, 20 bp, Homo sapiens
  source 1..20: mol_type = genomic DNA
attttgatctgttttccaaa

SEQ ID NO: 1835 - DNA, 20 bp, Homo sapiens
  source 1..20: mol_type = genomic DNA
ttttgatctgttttccaaat

SEQ ID NO: 1836 - DNA, 20 bp, Homo sapiens
  source 1..20: mol_type = genomic DNA
tttgatctgttttccaaatg

SEQ ID NO: 1837 - DNA, 20 bp, Homo sapiens
  source 1..20: mol_type = genomic DNA
ttgatctgttttccaaatgc

SEQ ID NO: 1838 - DNA, 20 bp, Homo sapiens
  source 1..20: mol_type = genomic DNA
tgatctgttttccaaatgca

SEQ ID NO: 1839 - DNA, 20 bp, Homo sapiens
  source 1..20: mol_type = genomic DNA
gatctgttttccaaatgcac

SEQ ID NO: 1840 - DNA, 20 bp, Homo sapiens
  source 1..20: mol_type = genomic DNA
atctgttttccaaatgcacc

SEQ ID NO: 1841 - DNA, 20 bp, Homo sapiens
  source 1..20: mol_type = genomic DNA
tctgttttccaaatgcaccc

SEQ ID NO: 1842 - DNA, 20 bp, Homo sapiens
  source 1..20: mol_type = genomic DNA
ctgttttccaaatgcaccca

SEQ ID NO: 1843 - DNA, 20 bp, Homo sapiens
  source 1..20: mol_type = genomic DNA
tgttttccaaatgcacccaa

SEQ ID NO: 1844 - DNA, 20 bp, Homo sapiens
  source 1..20: mol_type = genomic DNA
gttttccaaatgcacccaaa

SEQ ID NO: 1845 - DNA, 20 bp, Homo sapiens
  source 1..20: mol_type = genomic DNA
ttttccaaatgcacccaaag

SEQ ID NO: 1846 - DNA, 20 bp, Homo sapiens
  source 1..20: mol_type = genomic DNA
tttccaaatgcacccaaagt

SEQ ID NO: 1847 - DNA, 20 bp, Homo sapiens
  source 1..20: mol_type = genomic DNA
ttccaaatgcacccaaagta

SEQ ID NO: 1848 - DNA, 20 bp, Homo sapiens
  source 1..20: mol_type = genomic DNA
tccaaatgcacccaaagtat

SEQ ID NO: 1849 - DNA, 20 bp, Homo sapiens
  source 1..20: mol_type = genomic DNA
ccaaatgcacccaaagtatc

SEQ ID NO: 1850 - DNA, 20 bp, Homo sapiens
  source 1..20: mol_type = genomic DNA
caaatgcacccaaagtatcg

SEQ ID NO: 1851 - DNA, 20 bp, Homo sapiens
  source 1..20: mol_type = genomic DNA
aaatgcacccaaagtatcgc

SEQ ID NO: 1852 - DNA, 20 bp, Homo sapiens
  source 1..20: mol_type = genomic DNA
aatgcacccaaagtatcgcc

SEQ ID NO: 1853 - DNA, 20 bp, Homo sapiens
  source 1..20: mol_type = genomic DNA
atgcacccaaagtatcgcca

SEQ ID NO: 1854 - DNA, 20 bp, Homo sapiens
  source 1..20: mol_type = genomic DNA
tgcacccaaagtatcgccag

SEQ ID NO: 1855 - DNA, 20 bp, Homo sapiens
  source 1..20: mol_type = genomic DNA
gcacccaaagtatcgccaga

SEQ ID NO: 1856 - DNA, 20 bp, Homo sapiens
  source 1..20: mol_type = genomic DNA
cacccaaagtatcgccagaa

SEQ ID NO: 1857 - DNA, 20 bp, Homo sapiens
  source 1..20: mol_type = genomic DNA
acccaaagtatcgccagaag

SEQ ID NO: 1858 - DNA, 20 bp, Homo sapiens
  source 1..20: mol_type = genomic DNA
cccaaagtatcgccagaagc

SEQ ID NO: 1859 - DNA, 20 bp, Homo sapiens
  source 1..20: mol_type = genomic DNA
ccaaagtatcgccagaagca

SEQ ID NO: 1860 - DNA, 20 bp, Homo sapiens
  source 1..20: mol_type = genomic DNA
caaagtatcgccagaagcag

SEQ ID NO: 1861 - DNA, 20 bp, Homo sapiens
  source 1..20: mol_type = genomic DNA
aaagtatcgccagaagcagt

SEQ ID NO: 1862 - DNA, 20 bp, Homo sapiens
  source 1..20: mol_type = genomic DNA
aagtatcgccagaagcagtg

SEQ ID NO: 1863 - DNA, 20 bp, Homo sapiens
  source 1..20: mol_type = genomic DNA
agtatcgccagaagcagtga

SEQ ID NO: 1864 - DNA, 20 bp, Homo sapiens
  source 1..20: mol_type = genomic DNA
gtatcgccagaagcagtgaa

SEQ ID NO: 1865 - DNA, 20 bp, Homo sapiens
  source 1..20: mol_type = genomic DNA
tatcgccagaagcagtgaag

SEQ ID NO: 1866 - DNA, 20 bp, Homo sapiens
  source 1..20: mol_type = genomic DNA
atcgccagaagcagtgaaga

SEQ ID NO: 1867 - DNA, 20 bp, Homo sapiens
  source 1..20: mol_type = genomic DNA
tcgccagaagcagtgaagaa

SEQ ID NO: 1868 - DNA, 20 bp, Homo sapiens
  source 1..20: mol_type = genomic DNA
cgccagaagcagtgaagaag

SEQ ID NO: 1869 - DNA, 20 bp, Homo sapiens
  source 1..20: mol_type = genomic DNA
gccagaagcagtgaagaagg

SEQ ID NO: 1870 - DNA, 20 bp, Homo sapiens
  source 1..20: mol_type = genomic DNA
ccagaagcagtgaagaagga

SEQ ID NO: 1871 - DNA, 20 bp, Homo sapiens
  source 1..20: mol_type = genomic DNA
cagaagcagtgaagaaggag

SEQ ID NO: 1872 - DNA, 20 bp, Homo sapiens
  source 1..20: mol_type = genomic DNA
agaagcagtgaagaaggagg

SEQ ID NO: 1873 - DNA, 20 bp, Homo sapiens
  source 1..20: mol_type = genomic DNA
gaagcagtgaagaaggaggc

SEQ ID NO: 1874 - DNA, 20 bp, Homo sapiens
  source 1..20: mol_type = genomic DNA
aagcagtgaagaaggaggca

SEQ ID NO: 1875 - DNA, 20 bp, Homo sapiens
  source 1..20: mol_type = genomic DNA
agcagtgaagaaggaggcag

SEQ ID NO: 1876 - DNA, 20 bp, Homo sapiens
  source 1..20: mol_type = genomic DNA
gcagtgaagaaggaggcaga

SEQ ID NO: 1877 - DNA, 20 bp, Homo sapiens
  source 1..20: mol_type = genomic DNA
cagtgaagaaggaggcagag

SEQ ID NO: 1878 - DNA, 20 bp, Homo sapiens
  source 1..20: mol_type = genomic DNA
agtgaagaaggaggcagagt

SEQ ID NO: 1879 - DNA, 20 bp, Homo sapiens
  source 1..20: mol_type = genomic DNA
gtgaagaaggaggcagagtt

SEQ ID NO: 1880 - DNA, 20 bp, Homo sapiens
  source 1..20: mol_type = genomic DNA
tgaagaaggaggcagagttg

SEQ ID NO: 1881 - DNA, 20 bp, Homo sapiens
  source 1..20: mol_type = genomic DNA
gaagaaggaggcagagttgg

SEQ ID NO: 1882 - DNA, 20 bp, Homo sapiens
  source 1..20: mol_type = genomic DNA
aagaaggaggcagagttgga

SEQ ID NO: 1883 - DNA, 20 bp, Homo sapiens
  source 1..20: mol_type = genomic DNA
agaaggaggcagagttggac

SEQ ID NO: 1884 - DNA, 20 bp, Homo sapiens
  source 1..20: mol_type = genomic DNA
gaaggaggcagagttggaca

SEQ ID NO: 1885 - DNA, 20 bp, Homo sapiens
  source 1..20: mol_type = genomic DNA
aaggaggcagagttggacaa

SEQ ID NO: 1886 - DNA, 20 bp, Homo sapiens
  source 1..20: mol_type = genomic DNA
aggaggcagagttggacaag

SEQ ID NO: 1887 - DNA, 20 bp, Homo sapiens
  source 1..20: mol_type = genomic DNA
ggaggcagagttggacaagt

SEQ ID NO: 1888 - DNA, 20 bp, Homo sapiens
  source 1..20: mol_type = genomic DNA
gaggcagagttggacaagta

SEQ ID NO: 1889 - DNA, 20 bp, Homo sapiens
  source 1..20: mol_type = genomic DNA
aggcagagttggacaagtac

SEQ ID NO: 1890 - DNA, 20 bp, Homo sapiens
  source 1..20: mol_type = genomic DNA
ggcagagttggacaagtacc

SEQ ID NO: 1891 - DNA, 20 bp, Homo sapiens
  source 1..20: mol_type = genomic DNA
gcagagttggacaagtacct

SEQ ID NO: 1892 - DNA, 20 bp, Homo sapiens
  source 1..20: mol_type = genomic DNA
cagagttggacaagtacctg

SEQ ID NO: 1893 - DNA, 20 bp, Homo sapiens
  source 1..20: mol_type = genomic DNA
agagttggacaagtacctgg

SEQ ID NO: 1894 - DNA, 20 bp, Homo sapiens
  source 1..20: mol_type = genomic DNA
gagttggacaagtacctgga

SEQ ID NO: 1895 - DNA, 20 bp, Homo sapiens
  source 1..20: mol_type = genomic DNA
agttggacaagtacctggaa

SEQ ID NO: 1896 - DNA, 20 bp, Homo sapiens
  source 1..20: mol_type = genomic DNA
gttggacaagtacctggaat

SEQ ID NO: 1897 - DNA, 20 bp, Homo sapiens
  source 1..20: mol_type = genomic DNA
ttggacaagtacctggaatg

SEQ ID NO: 1898 - DNA, 20 bp, Homo sapiens
  source 1..20: mol_type = genomic DNA
tggacaagtacctggaatgc

SEQ ID NO: 1899 - DNA, 20 bp, Homo sapiens
  source 1..20: mol_type = genomic DNA
ggacaagtacctggaatgca

SEQ ID NO: 1900 - DNA, 20 bp, Homo sapiens
  source 1..20: mol_type = genomic DNA
gacaagtacctggaatgcag

SEQ ID NO: 1901 - DNA, 20 bp, Homo sapiens
  source 1..20: mol_type = genomic DNA
acaagtacctggaatgcaga

SEQ ID NO: 1902 - DNA, 20 bp, Homo sapiens
  source 1..20: mol_type = genomic DNA
caagtacctggaatgcagag

SEQ ID NO: 1903 - DNA, 20 bp, Homo sapiens
  source 1..20: mol_type = genomic DNA
aagtacctggaatgcagagt

SEQ ID NO: 1904 - DNA, 20 bp, Homo sapiens
  source 1..20: mol_type = genomic DNA
agtacctggaatgcagagta

SEQ ID NO: 1905 - DNA, 20 bp, Homo sapiens
  source 1..20: mol_type = genomic DNA
gtacctggaatgcagagtag

SEQ ID NO: 1906 - DNA, 20 bp, Homo sapiens
  source 1..20: mol_type = genomic DNA
tacctggaatgcagagtaga

SEQ ID NO: 1907 - DNA, 20 bp, Homo sapiens
  source 1..20: mol_type = genomic DNA
acctggaatgcagagtagaa

SEQ ID NO: 1908 - DNA, 20 bp, Homo sapiens
  source 1..20: mol_type = genomic DNA
cctggaatgcagagtagaag

SEQ ID NO: 1909 - DNA, 60336 bp, Homo sapiens
  source 1..60336: mol_type = genomic DNA
ttatttttctgaatgccttcaaatgtgacaagtatgctctactgatccccattgtgtcagacccagcctgatctaacatttatattaccagcctggtcccagtcaaaggagctggagttttcagattctggtgctaacctgaattctacctaccacttctttacaaagaggcctctgccgtgtttgtaccagcggcaggatgacttgaagctctccatggacatgcggtgggggtggaggtgttgatggatattgtcttggcttttgccttatgtgggatttttaagaaatgtgcaggaaaaaaaaaacaggaaagtgtattaggagaaggcaggatagaagttttcctcacgtggagagagcaggagaatggaggaagtgactgctggaagcaaaactctaagaaaaaaccaattttacttggagcttaaaaaagattttgctgtgtaatgtgcattgtaactcttctcccatctccccaaggcatctttggtaaagatgtcattgttgggctttttgttttccatggcacaatgcactgaaagggcctcaaggggaaagcaagtcatctctggaaagcttagccagaatttgcaacagaaagagtgggaattttggaatcaggtcctaggcttgcaaaagagctctttttcacagccttagcttcctcctttgtaaaatggaaaaaaaaatagtttcttttttgcaaagttgttgtgagaattaaataacactcatgaggggcattgtatggagcttggcacattctaggccctctttttatattgaactaatatgatcttctctgtaattcccatgaattaattccagttctattttgcaaaacattgattctttaacctttttcatgtaatggtgctccagtttgtctagatccttcaagaagagaaaatgcatatcaacatctttgtatctagttgctctcaagcttaaaatgatgtcatttttcaattattgcttttattatacagtaaaaacatatttagaagagactcaagataaatattaaaagttaagctagttactgaacaaatttcttaaatatttacgaaaaataagatcaacacacatttgaccatggcagcttttctaaaggcaaaggatctaatttggtgattaactaaccatattgagcactcattaggtgtcagggatgtaccagttcttctactgtatttgggtgtttttaattatgaataaccaaatacaaaaatcaaagtagtttaaacaatgaggagcatttattatcactcttaaaaataaattcccaaggtgggcaattgcacggatggctcaatggctttacaatgtgaaagatccagccacttgctatcaattcttttctctacattgccttggttctttgcaagataaccttgaaattccaggctcacatatagaaataacaacatatggctgaggaaggcattttctctcctgtgattcttcttattagggaagaaaacctctctaccccctcaagacttctcaatttcctttatccagaattgggctacctcactatgtccccaggcagtgcttctcaattttttcacaccatgacacaaatacaaagataacgtttttgtgacacagaggggtacctgggtaatgttgcttgtggccagtcataccatcccagggcttcagcagctcagcctcacttgaatgtcccaagggcttaagggatccataccttatcacatctatgacccatctgagacataccagggtatgctggcacatagattggtatgctctgctctaagctacaagggagggtgagagagcatgcatccatatacatgctctagtgagagaaggatctgccaacgaggaggctctgccaagtagtaggaagtggtggggcaaccaaccgcatcagtcatcttttcaagggtgccttcatctattctaattttcacaacacattttaggaggaagtattctgtggaggataaaaccaaggcttataatttaaatgacttgcctgaggtcacagaaccagtgagtggttcaattgacacagcagatgcagatccaggtgtgtgctgggaaatgtttaacaaccacctttccaaatgtagttccaacatggctattggttaatattttcatttaagataaaaataaaacaacaaaaatgtatgttagagcttattagtcaatgatgtgacttcattgctaaattgaatgtttttatgctattcaccatgtaacagttatagacacgacatgtcttttacatttaatctgcataaaacattttctctgtcacttaagcctagaccaagcttgtccaaccctgggcctgtgggccgcatacagcccaggatggctttgaatgcagcccaacacaaattcgtaaactttcttaaaatgtgagattttgtgtgtgtgtgtgattttgtttcgttttgttttgtattagctcatcagctatcattagtgttagcgtattttatgtgtggcccaagactatttttcttctgccaatgtggccgagggaagcaaaagattggacaaccctggtctagcccacaaccagcaaagcaataagtgaagccctcatctgtggtgtccgctgatcaagctaccaaagaaaactcactaaatgtggtattgggaagagatgtacaattacatatagggaatttccaccatgcagacacaatgcatgtaaattgcctaaagaacaaagacaatattaaaatgtattaacataatttggaagtgatgtttttatcacatactacctttgtttaaaatttatttcattggaagtttatctaacttaatttttatttctatttttatatttatttattgattgatttttgagatggagtctcaccttgtcacccaggctggagtgcaatggcgcaatctcagctcactgcaacctctgcctcctgggttcaagcaattctcctgcctcagcctcccaagtagctaggattacaggctcccgacaccacacctggctaatttttgtatttttagtagagacggggtttcaccatgttggccaggctgatctcaaactcctgatctcaggtgatccacccacctcagcctcccaaagtgctgggaatataggcatgagacactgcacccagcctatatcatttaatttttaataatgagtatttaacaaacagcaggcaaaatttctgaaaatttaataatctgctgtcatgagccagtataggccagctctccacaccacggactggaactaagttcagcactctttccactcctgctgcctttactaccagcatgtaaaagcaatgatgctcagtatcgtacgggggacaaacctgggtacccgtcattaatttctgtgaccctgggtagttactaccagatgcttagttttctcttctataaaggaggagattaagagtccttgccctgtctacctgcaagggtttttgagaggattaaactggttagtctgtatgatagtgctttgtaaactgcagagtcaggttcagataaaaggctttatgatgatgacaatttcattactgttttcaaccaggccaccattgttaaggatgcagtgtgtcgctgctttcaaaagtatggtttagtttgagatcttctgtaatgcccaggatagacagtaaacacccagaagaattgttctgaagaagcccactcaaatctgtgctagtctttacttagcacaaataggtacctatattgggatgaaaactatttatttgaagcttataattcactcttttctagctgctgctggattgtctgacgggtctttcctggagttatggaatacttctcaatttcaatagttgaataaaggtgtttttttttctgtcatgcaggctagggtgcaggggcatgatctcggcccactgcaacctccacctcctgagttccagtgattctcctgcctgcgattctcctgcctcagcttcccaagtagctgggattacaggcgtgtgccaccaggtgtggctaattttgtattttcagtagagacggggtttccccatgttggccaggctggtcttgaactcctggcctcaagtgatccactcgctttggccttccaaagtgctgggattacaggtgtgagccactgcacccagactatttttaatttcaatttttaaaaaagttgctttgctttttgcaccagaccaactcaccaagttattttctatggattatacccgtgcacataatgtagtttcctgattataaattaaatatccctaatgtccacgttgaaacactctcgaaacttaaatgaccataaactatttgccttgagtttgctgaacttgtctttgggctgtaagaaactcttttctgccaagctcttttccacatcaggccctttgcccatgctgacccctctacctggaaagttctcccctgattatgaagctgactccttctcatcctttagatcaaatgctgccttcttagagaggtctgcactgaacacctgtttcaagtcgtctcccggatctgtttccttatttattttcttcacagcatggataacagtatgcaatttcctttctatctgctgacttatttgtctatgcctcttattattatgttggctctttgtgggcagggcttgcccattgatgtcattatctacctccagtgtcccacacagtgcttggtgcacaatagctatctcatgaacagatgaacttatctgacaagatccactctagtattgtaaggctgtggccatatatggctatcttgaggtgaaagcctaccctaaagactgtccaggacttggcctctggtgctcacagttgcccaggtttctctcaggtcgcaggatgagccacagtggtagcataagactgctggctgctcccctctgcccctccctaatggggctgcccagtgatgtcacacaggacaggattctctaatccttttgattctgtaacagtcctctaagcagctaagtttctcataatgtattatgatgtaggggagggaggaaggagggccagggtagggggcacaccctctccctgaatgaaattcatttaggggcactgtctgctcgcatgttctgttctgggagaaaatgggtagcagaagctacaatttgtactaagctaatgaaaagagagaaaagaagaatggggaagagaagggcaaagaaggcaaaaagagaagagaagaaaaagggaggagagagaaggagaaatgagaaaagaggaaaccaaatgaagaggatgtgtgagagaaaaaaatatgaaacaggtagtgagggaggaaggaattgttgaacctatgttctggttggctttctaactcttgagtagtgactggcttcagtggaaaaggatggtgaggggtattctcaaatactagcctcctgagggggtcatttacattactgcatatattttgagaggcccaggcaagtctgcctcaagggtgactctcctggagagtaatttgggagcaggaatgtaaacctttttttaagtcacaattgtggtggaaagggaaagagagtattgctgatcagattaagctttagactccacactacagcccctgtcctcaccccaagcctcccaattactaggctatcaacacacactaaattcaggactttaaagccaatcttgtagataatctttttctttgttaattgaaatataaacagatttccaaagcagagcaggatagttttataatatacctataaaaattactaaaatgtcatcatcatggcaatatattcccactaaaatcttactgtgaacatcccaaatatgtgtagaggcccggcaaagtcttacagttcagaagagaactttcaatcctcttttttcaatgttattttccccttctatctgtccccccttcttagcataaggtttaataaaaggggatatgatgatattaaacatatttaatcagacaatattgatatctttttaaaatattaatcttataacccatgagtttcctagttcataccaaaatgtccctgcaagctgtattcagaaataaatagtaggaaggtgctgctttatcggcagtctgtacaatgcgtagactccttaaaaatttctttctgttcatattttctatttctctccctcttcttctacaattgacccagattctccaagtgcagaacagagagaagaaaggtgtggaagcctaaaggaaggaagcagaaagataggcaggcatttcaagttttctatggtccactaccgtcactagtgacccagcttctgcttataaataagaaaatttgtcttttaagagcactctaaatggttgccatatgagcttttgtagttcagaatgttaatgagtccaccagcatgctactcatgctgttacttgcctggagtattaaggattccaagaaggtagcgtttcaaagatctctgatctaatttctttttttggggggtcggggagatatgtggagaattaggaaatgtatcctcagatgatactgagaccaaatgcatagtgaattttatttttattttgtatatgtggaaatgatccacgatcatcttctaaggaattctggccgggaacagtggctcacgactgtaatcccagcactttgggaggccgaggagggtggatcacgaggtcaggaaaccgagaccatcctggccaacacggtgaaaccctgtctgaactaaaaatacaaaaaaattagccaggcgtggtggcaggcgcctgtagtcccagctactcgggaggctgaggcaggagaatggcatgaacccgggaggcggagcttgcagtgagccgagattgtgccactgtactagcctggatgaaagagcgagactctgtctcaaaaaaaaaaaaaaaaaaaaaaaaaaaagtgaaggaaacagaaccttccccaaagtcatgttgagaaaattagagatggctttttacaactttaaaagcagcagctaaatatttgctgaatgccagaaagaataaataggttgcttttgatctaagagttggggcaacaaaatggtttaggagatagaaagtagtagggtgcaaattgctatagtgagctcctcaagtaaaatagagaggccttcaacataaatttaccttttttactggccagaactcaatttggccagtaaaagaacctgccttctacaatgaagtctttggtttgtgtgtgcatcagaacatcttttaaaaatacggacttttcttctaacttcttttcctgcgaatgtggtgtaggtcaaattcgtgaactggttaagccgctgacaagagagggaagggcaccccagccaatgggaacccgtgctggtgatgtactgctcctaggctgcgattcattggctgcctagggtttgtcattctatccccggcgtctgcaagcagcgtgggtcgggttttccagctagctaaactggattttggccgctggcacgtgcagtttctattaactttagctcatctctacctcttaatagaagcagctgttatgtttctgattattctcctgattttgaaaaatcctgttcccttaacctacctcattggaggtcgttggaggtcccctgggacagaaccacgtgattatctaacatgtgcaaataaatacaatgtggaatcccctgaactatagagggaaaacctgccagaaactcagagcatgtgccccgtgcgtgaatcagttgcactcgcacattggtgggcggtggtagcgtgcttgtgtctctgccctttgggtcgcgaggtgtgtggccgtggcacctgcttgggcttcctggggtcactgggagaggaaggctctggaggagtgggactctggggtaggggggtctggcagctgcctgggacccaccatgggttcgaagggcagcggccagaccgcgacggcgcccaagaagggtggacagcttcgggtctgtgctcggggctgcgtgtacaccatcttcgcagggagtggggtttgtatctgcaggcaggtagaagagccagggctccgggcgcggacgccgtaggggtagcttccgagtccctacttggccaagggccggcacggaggggctgtcgatctactgggcacctaatagccgcacattctgtccagtccctggcgccggaacgtgaaggcccgggtcctggctgctatccgggatccggacgctcccttcggcttcggcctggtgctccaggccgtaaggcaaaggcggcggcagcagcagcggcagagaaagaagctgggtaaggcagtgacgtcatctgtggcggcccctcccccgcccgccagccctcaccgcagttcctgcccaacgacatccgggtctctgtagctgcgcgccgcgccgcagctgtagcggcggcggagccagcggggcggggcgagcggaggggtgggggaggggcgacgcggtcgtgagcgcgcctgcgcggggccgcgctagaggcggcggcggcggcggtggcggcgctagggacgggagcgcgcgcgggagctagagagcagtggtctcggcgctcgtccggcccgcagcttcgggtcctcaggcggctgttgctccggaacgggtggttggggaggggggggtggggggactctagacagctgaggcgcgaaagcgatgagtcctcggctcttcctcctccttctccgggacccgctctctgcctccctctccaacgcccggatgatctgagccgcgagggcgccgacagccgggggcccggacgcagcccggctcctcccctcctccgccccttccccagcctgacctggcccgccgctgcagcggtgacccctcccccggctgccgccgtcgccgccgcggtgaccccctccccggctgccgccgccgccgcctcggccgaccagggacctgcccgcctgcggctgctccgggtaagtgcggcgctcgggccgacggcgggctggcgggcggtgcgggcctgcgcggcggcggcggcgggcaggcctggggcctgtaaacaagccgggcgtctgcccgggcgctcccgggaggagacgcgacaactccaccccctggccggcctcctcccccgagccgggcggcggacggcgaggggttaacgctcggcgagggcggtggcggggaggcgggggcggggtgttagttgcggtggcgcggggagggggcgcgaccctctggccgtccgcggccgagatgggtgtttgtggcggcgaagcaggcgacggccgcaggccggcctggccggagagcggcctgcagaacttttcccgagcggggagggggcgtccccgcgcccccacccgctcgggcgcgccgccccggctgtcctgggcttcagcccctgggagggaggcggggagacttcctttgaaccgggcttagcctcgaaaaacctaattctgtagaaattgcttaaggttttacagggggcagggctgagagactccttcagaactcaagtcagtgagtgatgcctctagttcattcattattaaggcatcgaacaaatccattgaagtaaattccgatttcttatccttttaactacgtaaatcgggtaaaacttcttgatgttagagcttggttgaggtatggttctgttctgcttgtagattttaaataaacttggagccttttcttgaaagacagctggctgtggagagccttctaccaactgcagttttagatacgttttgaaaatttcatcacctgaggtatttttcttctctcctgaaacaccacatggtacaaatccacaaaagtcatgcttcagttgtccaagccatgggatctgtgtgctagccccacctccccgcaagtttcctgctcattggaataatgagctgaatgtgttttaagaagtggttggaagagtatgagagataggtatcattttctcaaaggaaatgattttgacattattgagagaaattagacattttaacaattgttttgtaaaacagtcttttcaaacttgcacgttggggttttaaacacaaccactttacatgtgttgcgctccgaaaagtggagggatttgttgaaacactactctgctgagacttagggttccagagcacttgggaatttagcatagcttggtccccaactctctttgaaacactttacttttatacttttatcttgctacatattgggccttttccaaagattgtatttctgtaactccttattttacaaatgagaaaattgaaaataaggagattctctattcttagatgctgcttttactgacttaatgctttctttaccaataaataatttgaagcacaaagtaacatttcctagtgttatagttttgttcttgttatgtgtaacttatatgtatctgattaaactttcagtcatgtaaggatgattacttttaacctggaagtttacagcagtaccacattattgaaactataatgaacttcctgcacatggcagttgcctaagacattttaatttgatatcataaaacatttttagatcggtgaagtaattatattatgggaaaggtgtattaagactgataatgtttgaagttaactacctcaattatatttgagaaataatagtcatcaaattgctttttatttggcttgtatctttttatgtattttgtgtacatattgtatctttttacatgaggggctgaggtatatgacctgttgaagggaacagtgcagtaggagacaaggattgtttagtcatggctgtgctccaaaatatctgtgtccatggacaagtcctttaaccttttgagtttcagcttccaaatcagtaaagccagttgggcagattatattatcacatgtactgtccagttactacatttaaaaatttttttttatcaatattgtgtgtctagtcaacataccgttgccaaataaatgcctgttatgtgtcaggcacttagatgtttcagtgttctaaggctggatttctttctcggttctgttttatttaacaaattctaagttggtgatggttctttagaaaagctgttcttgtgttcttgtaagctattgatttttcttttgggattgggatgtgtagggaaactcttgagaggaaggaggatggagatttcatgggagacaaagggtggttgagactacaggtttgaacaagcacaggacccttggtagtctgatgtgaaggacattataaaaacacattatgaaggttttttctgtcacttcaagctgggtcttgttaaacctttgaaaattctctaatacctcatttgtttttgaaagaaatctatagcaacatcattttgtcatgtggtaaatattgctgagcagtcactaaatacctatagtcttttagtttgttcagattacatctaggccatttgtttactctaatagctaatagaatgtacagctgattttggtttaactgtgcgtgcatatttgtaatttttaaccaagaagtggcatatgtccacaaggaacttgttatctctgaaatactcacccatgagagctggattaattttttaagatgtaaatctatgctcatgtagaaataatataacaaggtgatattttgatgatcctctcaaatgattatctaactcttgcctgggcacctgactctgagtcagtatactcttgaatactttccatccttaatcaaatcaggagaaagagatggccatgtaagaaaattggccacggcagggttttataagagttaagcaagaagataaaacaacacatggccctgtgaaatatataaaccttggagaagaggagaaggtatagtgaggcaactgggtaaaagttgtgtcttcctctaagtaattttatgtcacaatatgtcctgtcttccatctcaaataacaaattttaaaattaagttgtgtttgttattttgctattagccaagatatataaattaactgacctgggattattagccatttgtatatgaaataaacttgggttaacctatatcaaaatcaaaagattgattatattctttacccttcactctttcaaatgtcttatgttctccatattacgtaacaattttatacttcattctgagtctccagaatatattctttgatgattttgacctttgaatgtcctggctatccatgtactacctagataatctcgttaccaggcttttcttttgctgaggcaggtcagagctagagaaagtaagcaattgagagaggcaagtttctgtatacctgtatctaaaatgtaatagactttataatttttgtaaggaactgaggaaaggtacaggcttttaatgtgtatcagtaaactagactcttatacagtttttataatattagagatgttttaagcttccttgagtaaatatgtgataaaggggggatcttgagtttttataattcttaatatgtttatttggaatccattgaccaagtgtatgtagtatccatatttaagatctggattaaaagtgattagtttctgtggctgatacgatttagaattaagatcttttgagactaaactacttctagatacagaagaacgtcatgaaagccgtactttcttggccatttatttgtgttaggctttaattttttgccataaccctctaaaatatgtgatgttatcttcattttataaataaggaaatacagggtcagagaacctaaataacgtgccaggatcagatctgggtagatataaaagtatttttcaagatattactgagtggatttttcccaattagatgaacctccttattaccaggaaccaaaatttcaaaagctaaacattaacacttacgattcatagattcctagagttaagcaagtccatgttagtttatgtaaagtcttccaatgcaagactaatgttttcttctaaaacattcagaaaagatttaagaaattaagttcattttctcattcccaaagtttcagaagttaacaaagctaaacattttatgtcttcaagtaccattgtttaggttaaggaatggaatccatgttaattctcaagtggttgatatccttaatgaaggatctagggaaatgtttctgaacagatgtaatcagtagagccacattgaagggccccgtggtggacatggtgataaaactaacctttgaaagaaaggacagtttgagtccctgttctcctatttcgtagccaggtgttcctgggtaagctacttgatttcttaaacctgtttttttttatgtcaagtggaaatacttttgtcgtaaggttatcttgaagatttaatgaaataattatataaagcatttgagatcttttctaccatgaagaaagtgccaaataaatggtagctgttattattgagtatatgaaatcttgagatacttaggggtatagagacttgcttagtatgagagggttgtctttcagtatagcttttgcagtgtgcctggaagccaaactagagattgagtagagaatttagaagacattgtaaactctgtgagtttagagagcttgcatttgaatagactaaaagttatagaagaaagagaaagttgagtatgagtagctttatttggctctgcaaagctggcaagatgtcaagggtttggagttaatgattaggtgggagtagatggttaaattgcggataaagagtaacagtaataaagcaaaggtgaatgttcaggctagaatgatcagtcagtaaggaaggacaagggttggtattttgaagaggagttacagtttatggttagaaatgagcaggaagatatcattgctacaggaaaggatgcaaaagagtaaggaaactaaatcattctgattaactcagttattaccattttttaaaaatggagtctttataaaaggcgttaaggctttatatgtgagttctaggttaagtctgaaaaattgtcttggaatagtgtgggtcttactactgcagacccaaaccaagatattagcattccaactggtctctttcctgctagcatcttgtactgcatctcctccctgattctataaaccatcaaaattctttctaaactatggtttttcattatatcatttctctcagtatacttcagtgactcccatttacctctggaataaagttcagaattcttggtttggcttttgacactttccatgattggacctcaagacattagtctgttataaccaaactagtacacttgctatctctggaacacgctcttttctctccatggatctttgctcatgctagtgtgcagtctggaatttgtgtctttccttctccagctttggttttctcttttagcaaagctcatttctaatatttcttcttccacaaagtcatctctgacccccagagtgtttaatctctcctttctctgtacttaaagcaatgtctgtgtattatttctatcatatgttttttttttttttgttttgttttgtttttgagacagagtctcgctctgtcgcccaggctggagtgcagtggcgcgatctcggctcactgcaagctccgcctcccgggttcacgccattctcctgcctcagcctcccgagtagctgggactacaggcgcccgctaccacgcccggctaattttttgtatttttagtagagacggggtttcaccgtgttagccaggatggtctcgatctcctgacctcgtgatccgcccgcctcggcctcccaaagtgctgggattacaggcgtgagccaccgcgcccggcctatcatatgttttacctttagatatttgtgtctaaattataattgcattcagttaattctaaagggaaaaataaatttttactttacacaaaggctagcggctagcacagtgctttatggatagtagacattcagatatttggtaagtattaagcaaaatctacctggagtgaaagtgattgttgtaggaggaggtagtagaagtagttacaagctttatcgtagcagacgtttctgactctcttcctgaatgttattttttctgaacctggatatttaagtgtgaagattatacaaatctgaagtgtggcagtgttcttatattgatgtagaagactaggttgactgatcctggacctacaagcttcattttaacttcctacattttggctttgagggttaacaggacatttataatcacatatctcttttcagagtattttacatttgcaaatattatcatgaactttgtgtccttttaaccagagaggaattgtggaatcacaggaattagatgatgtgttaaagaagagagataactatcagctgatttaatttgaacccaacaagtatctaataatatgcatactctgtgttcaaataaacctctaagctagactttcaagcttatcaaaatgctagactattttcagtgtttagaaaataccagccaggtgtggtggcttatgcctgtaatcccagcactttgggaggctgaggcaggtgaatcacaaggtcaggagatggagaccatcctggccaacatggtgaaactttgtctctactaaaatacaaaaaattagccaggcgtggtggcacgggcatggtggccacccgcctgtagtcccagctacccaggaggctgagcaggggaattgcttgaacccgggaggcacaggttgcagtgagccaagattgcatcactgcattctagcctggcaacagagcaagacatcgtctaaaaaaaaagaagaagaaaaaagaaaatacatagtaaaatttattggctttttaaatggataatttcatatagtcagtcagtgccggcttagatccatttgttagagaacaatgctaatgagacctcttgatactttgtgttcctcttatgttttcctagccttgacgttagcaactaacaatgataactaacattattgagctcttatgtgccagggactattacaatagattttcaattattatctcattaaatcttcatagcagccctatgagctagatactgttactacctatatcttaacagatgaggaaatttgaaacagagcagttatttgccaagagtttcagagctattaacagaagcctaatacatgttcttggactttgcagaaataatttgttgatccatgcggtttcattgctactgcggaaagtaagtctcttggccattgtgatgggtcaaaatctttgtacatgaagggtatgactgttgttccattgtatccagagagtgaatcttgtgattgagttgggatttgaggtggcagtgtatactaagtttgaaaagtatattatcatatgttagctccctttagaaattttccccaagaagagctattacattttttaatattaaaaaagcataagatatggccataatacaattagttccacaagccatacacacttttttcttatggcttaaaattttattcatgtttactactttgcaacccactgatataaattatttcacagatcctttattcaaatgaaattctcagtgagtctgagaagatagtcttaaacacaagctagctgagtttacaatagagattatactataaatggtaacttcaatgtttattgaaaataaattccttaaaaacaggtcttgtttcattcatttaaagagattatcaatatatgactgttaaatttttatagtctccctgttcattttctgatgaacacatgacagaaaattgaatgtgagctggaaatacagcagactatgagaaagcatgggtcatgtataatcactttaaatttaggctggtgttttgtattcatctataatatgaccacctcagggagggatgtaagtaaacattctttttttagttatactttaggtggcttaattattttaaagaatatgttattcaagaattgtctattgtactgttttaaagaataagaatataattcattaccaactttgaatgtcttggattcttagtactacctttttctttatcatgactagtaggatcacatcataatttggtactgtgtgtataaagatgaagtgtgcttacctttattaccaaaattcagaaatgaaaatgtgaatgataaaagataagggatggctatatatttttttgtttttgtttttccaaacagaatctcataacttaccaggctttagaaaaacatctttgcagtatgccatcatacctcagaatgttaagtagataggaaataaaattttcactttttgtaaagcagtagggtattatcctttctgacagcctgtaagactgttttggttgccaaggggccaatcttagaagtggcagtttttgttttgtgaccaacccacagcttaccctttgttagtccatatctgtcatcttcattttctctttctgcgtaaatgcttcttgatacagtaagcaggtgtttcaactagtcagccatctagtgtgatcttttctggtttgctacagtcagtaaaataagtagctctataagtgtaaatagtattacttgttttatgtagtaaaactccaagattaagttagagatatttttggctagactacattgaatgcattgacaatggatttcccagctcccagaaattcgtttgtgtctgaattactttatacttggcttattgtgtagagaaaactttagaaaaagttcatccatccatgaatgttgaatgaatgagcagattaataaataaatagctcagggaaagaaaatgtgtgggcttttagtcataactatgttttttctcttttgttcccttccttatgtgccatttttcaataatgggagtgtgtatctaatgatgttgataaactttttaaagtcattgatgaacagtaatctgaaaatcaagttttgattaagccgtagatttcttttagggtccaatattttctttttagaaatccactatgatatttttgtagggataaaagacaaccatgtattctatagatggaaaatggtaggatacagtttgttggccggccaacttctctgaaaatactttttcctgcatagaagataatcagtgttgacaagggagaagccaaggtataatggctgttattcatctgtctcatgtattcgtcaagtgtcatgtgttaaatatgaacaaaaaagacataatctctttcctcctggatcttaaaatctaaagtgagagataattcaccagataaatgctgcgataagggaaatagaggattctatgagcttatgactaaggatagatctgtttcctcagatgtggaactaagaagtggcagtagttgagaagttcattttgggccatgcgatttgaggtgtggctattcaagtataggaggtaggtggttacacattttttaagctattaaatagaactttcacttgaaaaggtttttttctctctttcctcagcatctatctccctacatacacaaaaaaattgcatgtcacaattcatgaactcagtgagtgactctattttgaaaaatgttagattatatcaactgaagtctgttagaggcaaatgcttttggtcatttttttcagcagggacatttcatatgtgtaaaatatttagaatccccatgtatttatatataaatgaatcttttaccatcttaaatgtttaataagttatatttttcctttctttcaacttaagtatacaaggttatcagcaaacatttgtagatgctctatgtgaggtgttttgtttattagttttaaggaagagaaaaaaggatggattggatcaggaagtcagttattgttttctgggttagtttgagtccaaatcctcaaatatgcggcgatttataagtagcaaactaggaatttaatccacttcagttttggataacttggataagacactttctgtctatagatctgtctatagataacttggataagacaagttatccaaaactgataaatctgaattagttaacagatgaggcaaattgagattgtaaatgctaaaagattattagaaaactttataaactaaatagttctatgccatgtctttttagtattttgcttgtactataattgtagtgaaaataggtcagtatctaatttttatagtcactagagctctccaactaaatttagcttagatgtttttctagcaattatatacttacaaagtttacttttaaaaattgtgtaatacatgcctttatagaaatttaagaaaacgacttatggattatgtacttcagatcacagcacaactagaagatgttgatacattacataaaaaatcaggaaacctatgaagaacatcaaaagtggcaaggtgtgttcacttgcactttgtgagattgaaactgctgccattatctgtgcaaactatggtttgagtacttttaatttagcaaagactaattattttttaaaaattttggggtaaaaaaaatggtctttagcgtagaagagctttacccgacttactttagttggttcaattggttgattttggtttgctttttgaaattttgtattgtcttaatttggggcacattgaactcaataacagttcagttgcattataattcatttgggtaaagtttattgttggaggagggtaagtaaatatttaactgaaaaagtgaagtaaatatttatttaaggctataagttgaaatatttgtcagctgagaaattttcaggtaacttttttaacctttgaaaaaaatttactatagcatgagtattttttatactgctatgtataatccatagtcacgttttttaacctttttatataaaatactgatacagaaaaccatacaatcatagtaatcttttaaaattgctttataattcacatagcgtaacattcacccatttaaagtttacagttcagtagtctttagtatattcagacttatgcaacgattaacacaatttaattttagaacattttcatcacctccaaaagataccctgtactcattagcagtcactccccattcaccagtctcccagcccttatcaaccattaatccattttctgtctatagatttgtctagtttaggtattttatataaatggaatacaggtaactttttattagtgatttttcacttacatgtgtcttgcatgtctcatgagatagctatgaataagttagccttcttttacaacttaaataacaattcttgtctgaccgggaaaaagtattaagttattgagagactgcatcccaatttaaaccaagaaccagactccttactagtattataactcaaaagaatgtgtaccattagcccttacctctggtggtgcttttcactgtgaattgttcagcagcctctcaacttcccgaaaataccacttaagtcttaaactcagacttgcatgagtttactgagatatgtttacctttgcagctggcttgcctagagtctaccttcttactaccctactaagtccagaatgaggaagaattaaaagcaagaaaggagatacagaagaagagattgctcaggctgaggaggggcaaagtgataagagcaggattagaaagagacattaaaaattcaaggatactgagtttgttggcatcagaataaatcttggaggctgttttaagagggaataaaacctagagggaaggaataaaaggcaaagatgttataaaacataggtaaaatatttaaaatattttgtcctgaattttgaattttaggcatatgtcagtgaagcacaaaggatagcccccttttttgatgagctttagtatccttaagatattttctttctagaaccttgtgtaggaattttacagctgaccataatcatgtgttctctttggtttgttccaacatctttggattggaaccagtacagagtaggaaacccatatcaccttgggattatttttcagataaatcttccagaggattaaatggcaccatccccgtcaggtccaagtaggaggggaagaatcctattttgggtgctgtcagattcagtgggctgtttagttcactttttatccagaaaatggagctaaatgagaaattgcagcttccaaagaaaatcataccttgattttatagatcaaagcctttctgattagatcagaattgttcctgagattttaggggcattcagttaaagtgccccaagaagagtgataaatcacatataggtgtaaagtcaataaagtcctatagtaagcagactggaatttagggggaggggaatacacactgttagactgttggtacctatatttgactactaggatgattatatattttaaattctgtattcagtttcttatcagaaatactgcctacaatatcttatacttaattttttaaggaacaggtgataaagataggttatattttcttcagaataattgatattcattatttaatagataaaatgtgttatctgaatgtttatagtagtagaaaccaagtttacaaaatgtctatatataatttgtttttaataaccaaggattctttctttacaaaagatttcctctatataaatcttcctgttttatagatgatctgtattataggagaaatgagtatttgttgatttaactggctaatctacaggactgagcattattagaggagtatttaaacatagaagtctgtgaaaatatttttagtgctgagggaaattggagggactttctagaaccgcaaactaatagaaaaccaggcatagtggctcaagcctgtaatcccagcattttgggaagccgaggcgggaggattgctgaagccctggagtttgagaccagccagggcaacacagtgataccttgtctctacaaaaaaatttttaaaattagctggacgtggtggcacatctatactcccagctacttgggaggctgagacgagaggatcacctgagcccaggagctccacgctatagtttgagttgtgatcgtgccattgcactatagcctgggtgacagagcaacaccctacctcaaacaaacaaacaacaaaaaaacccttctacctctgaacatgtggggatttaaagattgctatgatttaaatataaatcatgaatatagaaaatatgagaacagaagagtatttgttaaacaagactaagctgtgctgcataaagtaaggcactatcattgtgctggtattttctgattctcttagtgcaataaatgttaaactttactactaccttagccatgttgcagggaattgacatgaatagttcctgggttttggctgggtgcggtggctcacgcctgtaatcctagcactttgggaggcttaggtgggcagatcaggagttcaagaccagcccggccaacatggcgaaaccctatctctaataaaaaacttaaaaattagccgaacgtggtggtgcacgcctgtagtcccatctactcaggaggccgaggcaggagaattgcttgaacctgggaggtggaggttgcagtaagccaagatggcaccactgctcctagcctgggtgacagagggagactccgtctcaaaaaaaaaagttcctgggcttcaagggcactctaatgtgcacatcttaaattcttagagcctacttctatggacgatttatgttactgttgatggagaatttgattttcttttttatcttcccctttcccttggcctttgtaggttttttgaagtgaacatacttttatgtatttacttatttattgagcagttcccaaatggcaactttattattttatttcttcaactcagttgtctagtttacttcatttgtatctaatctatttaactcatcctttgagtttttaatatcaacattttaaattttatttttttagcttcaaaggtgtgcatatgcttgttacatggatatagcatgtataatggtggaggttgggcttctagtgtacccatcacccaaatactgaaggttggacccaataggtagtttttcaaccctcaccctctcccacccaattgtttttatttctgaaagtaatatttctttcttggtctgcctgataatttttttatagtttcttatttttcgttagttttcaaaaaataccttgttgggcattttgtccatagatgtactatcttatgtttgctaattccaatatcggaagtccttaggaagttgtacttaaggtagtttgtttctttctgtatttggtgattttttttatgagctaatatttgattaaaccgaatatttctccatcctctgtatagttgcctacaatgtaatttctacttttttttttttagcataaaagagtttcattttcctttttatactcaataacttgtttaattagccagtatttttaccagtttctttacttattgttccttgcatcttctctgagtccacttttcttcttgctgaagtacatcctttagtaatccttttagtaagaggctggcttgtaaatgtccttagtttttgtgtgaaagtatattttatgcattactttgtttttcagctagatagggaattcttggttgataggtttcctcccatcagcaacctcagtatattatttcattgtcttgtgaaacttggcaaacttggatctctgagaagttcgatctctgcctaattgttatgcttctgtatgtaattttttttttctggtagttttttaaaagatttcttttctttattctgtcaccactacttactgtgtgaccttgggcaagttcaaaatggatataaaattgtatctgtgtcatagggttgtaatgaggattaagttttaaagcacttagaacagagccttgcatattataactgtgacatgttaatatttgttttattttgccatacttgatattctaaacacatttctatgatatgcttaagtatgttgttttatccatagctcctctttgaaatacattgttgatgggaagattcatatctttctttgtttctagaaaattccttagccttcatatctttgaatattcattttccaatattccttcttagtctctgtattatgttctaggtggttcctcagtatcattttctaatttactaattcacactttgactttgtccagctagagtttatgtggcctcagttccagtgaattttttttaaatattcaggctgtctctctaatagccacctattctggtttgatttctgcctatttttaatttttcttcctttaatgactattgtggcttccttttaacatttgaaattattttcagattgtcattttttcttctagaatgaattacagttgttgattttattggctgtccatcttagtttagttttctttgtgtgttttgagtttgcttttgcagtctcctattgactggaagtttttgttgtgttttctttttcactcttcttatccagtgtttttacatgcacctacatctctgtctaaaaccacatctttatattggaggcttgattcccttgattcttggtaacatcaggatcaggcttctctttccaagaataagacacaaactaagatctatatttcttctcactggacacataatttcatctaaaccgtagccccatgcaatggttagtagtagctttttctggctcctttcattggttggaagagcctctccaccctaggtattggtttcaagcagtgagcctgagttctatcccagccatgcatgggtacctttttagtccctgttactatccctacaggatgtggacttttggccatctctgttacttgagcccagaaggctcacagttttagcttcaaaaactgctttgtatttaaagagttcagtggcttggtcttttttaatattttgtttgtatagttaataaatatttaacatacattaaaatgtttggaacagatacatttcaaaagtgaatatacaaatccatttggttggaagttagtccattttgtgttgctatcacagaatatcacagactgggtaatttattaataatagaagtttatatagctcttggttctgagggtggtaagtctaagattgaggggctgcgtctggtgagggccttcttgccagatggaaggcaggaatgcaagagagcacaagtgcaaacaagggcaagacggggccagactcgattttaccaggaactcactcctaagataagggcattactcaattcatgagggcagagccttcatcacccagttactttttatggactcactggttattactgtcacaatgacaattcaatttcaacatgagttttggaggtgacattcaaatcatagcagaagtcaatgtttaaaatcaatgtatatcctacatacccttcagaaagatactagttgactctcctacttatgagaggtatatttttttattcctttgccaatattgggtgtaataattttttaatctttgagaaggtaatgtataaaaaacaaatttgtgtttaatagctagcaggattggtcattgctccatatatttattacccatttatattcttttatttatttaattgcctgttcacattcattgcccatttcttttcctttaaggtgttcatttttattgtcttttaaaatagctgtttgtatattgtagtaatgttaacttttgtgtatatattgcagatgcttaaaagacgtttgcttttcaggttaatgagctttattttatagtgtaggagtttcttttctctggagtcactttttcttattcctttggaatcagtcttttcttgtcatccttagaaagtcctttcctaccataagattacagaaatatttgcatacatctactggtattgttttattattaatacttcagacttcaatctttaatctcttggtatttattttaaggtgtgatgttgaagggattcagctacccaccactggagggcaggagtggaaaagatcagctttcaggcacccattattgaatctctctgttcccagagagctctttctggattctcagttctattccactgataaatttattcctgcattagtattgcctcttaaatactataatttggaatcaagtttaaatatcaggtattgcagattctcatgattttaagaatgttttggctattcacatttattcatatatattttgaaatgatttaatcaaggtctgggaacaaaaaggtccagttgtgattatattgaatttatagattaaataaagggaggataaccatcttcacaattttgaatcttcctatccaagaaaaagaagtgtgtgttattctgaagccctcttcttaaaaaggttctatttcttgttatttatttagatatacttttatttctgttttaactttctaagtgattactgttaatcattttcatatatggttttctatagtcaaataatcttattgagtatttttttccctatcatttcaggttttgagtttgccatcatgtcattaactgcaaatagttgatctccttataattttatgcctctttttgttagccttggcttatctcaataaccattatttctacacattgctgagttacagggataagagttggtgtccttgttcttttttctttcctgggaattgttctagtactgagatttcctctttggcttgaagtaagtattatattaaggaataaattttatcaaatccctttcagaatatgatgagatgatcatatggattgtttttaacttttaaaaagatgacttacattagtcagctgcctaatgttggctcattgttacgttcctaaaatgatccctatttggtgatttgtaatatatattttactgactttttggcatctgtattaataagtatgtttggactatagttttatttttttagtgctgtctttgtcaaattttatagaaggattatgataggtttgtaaaaagaattggaaatttttttcctgtaatctatagataacttaggtaatttgagagttacatgtttccttagggcttgaaggatcttgttttgaaatagtcttgcctgatgcacttttatttttaatagcttattttgagaacaatccaaatttaaaatttgcaaaaataatacagtgaacttccatatttatttaaatggccaattgttaacatttttccacattagttttacagacttttttccctgtgtatgtgcatatatgtattcatattctcttggcatgcacacacacattttgttattttttagttttgctgaaccatttaagactcagtatggacatcatgaacctttactcttaaatatttaaatgtgtgtcccctaagaacaaggactatcactttctcttacataaccatagttcaattatcaaatttaggaaatttaacattcatacaatactattatctaatatacaatccatagtcagattttatcagttgtcccagtaatgtcctttataacaatcttcccctccccattccttcaccctttgccttcatccaagccagtccataatcacatattacagtttgttgtgacctccttggtctcctttaacctggagtggttctttagtctttttgcattttgtttttcatgagctctgaagttttttgagggatagttctttaataactttctcatattgttccaggtttctggtcttcactctagcactaattgaaaaaaaaaaaatttgttttccgagaactgttactttcctccatattttcaaatttattaacagagaattgtacagagtgatttattttacaacaataaaattctatttgtgaggtgagtatagcctgtttggcttctaattttaaataatttttttagttagactatttagtggcttacctattttatttttttcacatataacatgtactataattttacgtaatatattccttcagcttttattttattttgtatgtgtgtgtggttcatttttctttttaggttgaatatttagtatactgattttctttagtatactggtttttttaactaagtgtgaatttttttttttctattttcaacacactattgctggcttaaaggtgaggtttcttaataaggtttggtcacatctcagaatttgataggagatttttctcattattgtttctaaatattctataattgtagaaatatgtaaactcaatgcaaaaaactggtgtaggagcttactttttaagcaatttccacgtttgaggttttcttctttctttacacattatcaatatctactattaatgtataattcagatgtgtcatttcattatttcattttcttttttttttttttggtctgtggggtaggatgggggagtgtgttagaaatctataagcttttctttccaacatataatccaataattatttgatttttcaattaatgttttaagtgtgtttgaacagaatatatagtcttgaaattttggaccacatcttttaccaatttaaaacatggctcttattctgtttattgctttattccttgtgatttactttgtctgaaattgaaattgcaattcttggtatcttttttgcctagtgtatttcgaccacaacaaagtacttttatactgacatctttatttttgagtttcttggttttgattagtctcttgattgcatgaatctatctttaaatagtttattttttcagaaatgaaacatggataacactactttagtgctggcatatttgatcatgtcttcttcatgtcttcttattgcgtttacatataaatgacaaccttgctggtcgtagtattcttggaataaaacctctttatcctcaacgtttataggcattacttcgttgcctatcatctgatgttgcaaagaagtctgggaccagcctgatttcttttttctttttcttttttggcatgtttattttattttttttatttgagacagtcttgctctgtcacccaggctggagtgcaatggtgcgatctaggctcactgcagcctccgcctcctgggttcaagtgattctcctacctcaacctcccgagtagctgggattacaggcgtgcgttattatgcccggctaatttttatatttttagtagagatggggttttgtcatgttggccaggctgatctcaaactcctgacctcaggtgatcctcctgccttggcctcccaaagtgctgggattataggcgtgagccatcgtgcccagccgatggcatgtttattttgtctgaattgtattcttaaaatttgtaatcttcaaattatgcttcggtattggtcagtttctactaaatgtatctagtacttgataaacgccattcaatcaccaagttcagtctttagtttatgatttatttcttctgcctttgaaatttaatttttcttccattatttggttttcttatttacaatgtgctaattgagctgttggatctgcattgtttgtatcttttctcaagtctacttgtttttgtttctttatgcttacttgcatactggatgatttttgtcctgttcgtttttaccccttgcagattgtttgctgtagtgtcttcattcctcattattgcttttcatgacatttaaaatattgcaatgatattttttctctgaaatatctttttttaaaagctctgttgatactttttatattctggtttcttttcatccctgtttcacaaattaggttttttaaaattttcttatatgtaagttgtcacctagttttctaaggtaaatcttttagactgtgacatcatgttcttgagtacttttttagttacttttttatttcagaatttttgtatgggttctataaatttttttctgcttttttacttaaagggtggcagttttctctgttgtttgcccaaaaataactagctactccttgcctgttctgtcattatactaggataccattacctctttcccccttggaatttaacaggctgaattatattaaattattttagttatcatatttcattatttttgagagaaatgatagggattttgtcctattaacctgttacaggtaagaaactttgtctttcttgatttttctcgatgcttgttgaaattactgattattttagttatcatatttcattatttttgagagaaatgatagggattttgtcctattaacctgttacaggtaagaaactttgtctttcttgatttgtctcttgatgcttgttgaaattactgcacattttcatctttacaagtttggcagattttctttcccaacagaagaacttgactattgggcattctgctaatttccatggctgctataacaaattatcacgaacttggtggcttaaaacaatacagatttattctcacagttctggaggccacaagttcaatatcattttcacggggacaaaatcacggtgtcaccaagaatgtgctcactcccgaggctttaaggaggaatctgtttcttgctttttttcaccttccagtggctgtcagcctcatcacttgcctggtagccacatcactcgaatctttaagaccagcgtcttcaaatctgtgtctgctctgtcttcacatcaccttctctgtgtgtgtcagatcttcccctgactctctattctaaggacatgtgggttcacttagaggtctctggataatccaggatcctctctccatctcaagattcttaatcacatctgcaaagacctttttttccaaataaggtaacatttataggattaggactggtatctttgggagtcattattcagcctactaggtatcattttgttttgctactttagagtgaggcagacatattagtcaaaaattggattagagtaaagcctcatagattgtgctgtttgttagaatcacagatactgtcctctttaccgaatgatgcaaactctgatgccatggtggaaaagtatatgaattgaattggatgtggtcaataaggattgctagggactcgagaatgcatgttgttctagggagaggaaatacgtgaaggtcaaattcaggttatcaggttatcagtttgtaacctagtttgtagctgcttttttcttttcatttcttacaagctggtcttgctgtagtaaaataattttgtgtgtctcttataatcttgatattgagaataagaggttttttttttaatgggaattccatccacatgattttaaagtattactttactaatgatatttacctaggtattcctagaactttagtcttctcatgtaacattttatacatttctcagaacaaggtaattgacaaataatcaaggttgcttatttattgatgaggaaagttagacattaagccaaaggacttgtccagtatcgcatattggatagacctataatttttaactttaatcttgtggtgacaggtatttccatttttttttttttttgatgtttcatatgtgctttgatgttgatgtgtcatgtgacatgaagtgtctccctattgttggataattgggcaagtctaagttctttttactttatattcctgattttgtttttctagatgtgttatttttacagattcaggttacttctttttttaaatcatgttattagagttaaactaatgaaaaatcatatagagatgaacttggttttgaaatataatgagtagatacttgcttggctggaattttttctcacaagttttttataaagatggtatgagtgtatactttgtatccaggaatgtgtgtacactagggggagtgttggggggatgagggtggaagacattttaagacacacaggaggctggtgtggtggctcatgcctgtaatttcagcactttgagaggccaaggcaggggaatcacttgaggtcaggagtttgagaccagcgtagccaacatgatgaatccccatctctactaaaaataacaaaaaattaactgggcgtggtggcacatgcctgtaatcccaggtacttgggaggctgaggcacagaatcacttgaagccgggagccaagatcatgccgccacatcccagcctgggcgacagagtgagactctgtctcaaaaaaaaaaaaaaaaaaaaaaaaagacacagaagaccctaagtgtacactcagatgctctttatatccatatccattatcagtttggtgatacgttattctagtttcatgaacctttactcttagaacttggtttattctctaatatcttttggattcagttttgcagttgagatggctaatatcaatttgatactctttccttttatgattgctcatgtttttgtctagaaccttgcattatagtatttttttttcttttccttgcatttctatagttgtgaacaactaggagtgggtttttagcaattaattcagtgagcttgttaattttgaaaaggcttcaactgaggaacactttcttctcatttctttgatgatagcttctctgtttctccttcagaaagtcttgttttttatatgcatatttactttttgggtgcactctccttgttaatgagttatttgcatctgattttgagtttattcagcaaatatttattaatgatttactgtatactctgtgcttggggagttgacctagggaactcaaaggaggctcctttgaagaattgatgcttgagctgagatctcaggaatgagtaggaattatctaagacatgagagaacagctgttaaggtagggaaagtagcatttgtttatatatttggaggaaggaagtatgatgagtactaggtactgtaagaaaacccttgtggttggagtagagaatgtaggagaagggacagtatgaagtgagatgcggctagagaaggtacgtaggggcttgacttcccagggccttcatgtgagccatattaagcagttatttatccacctcctacccccagcagtggaaagccattgagaaacttttagtacagaagtgatatggtgaaatttgtattttgaaagatttacttaggctgcagtttggagaatgaattagagggatgccaggatccacgtgaagagactaaagacgctagtattctgcagtgagaatgatggtaacttgagaccagggcattggtagaaaaaagtggacagatttgagaatgcttaggaagcatataacccatgggatttgatgatggactgatgggagatgaggtagagagaggtatcaaagatatccttagtttctgtttctttttctgagttggggtcttgctatattgcctaggctggtcttgaactcctggattcaagcaatcttaccgccccagcctccaagcagttgggactacaagtatgcaacaccgcacccagtgaatgttcttggtttgtattcaccttggtgggtgatggtgccattcactggtaaaagctgcagatatgtgagggtgctcagggaggcagcatagaatgggaaaagggcctacatgtaacccttgaggaatgccaatgtttaatggcttgggagatgaaaatgagcctgcaaaggagacgacggaaaagcttaggggtaggaagaaagctgggagtgtgtgtgtagcatcttgaaaggccaatgggaagagtgtttctggagggagtgttatagttgaatgcttctgtgagcagtcaattagaggagggctaaaaatgtcccttagattaagtgacttggaggaacttgatttagtaaaatggccagacagccttttggagcatcaacattttttttaagaagtttaactgtaaagagaagagaggcacatgggtagctcgaggggaataagtcacatgaaaagttatttttaatgggtaacatgggtgacacttgtggctttaaaagtcacactccaactgagaaatgttgataaaaaggagaaaaaggaaaatagtgtaacattcctgaaaaaactgtcatttaagactcctttgaaacatgggcaccaaagctagtctagtagaggatttattatcagtgagaggacagagtcctattacagcagaaaagtaggaggggagggttatgaaagaattcattgaaatggttcactcatttattgatcttttttttctgtagtatccaatctgccattcattgtctctattgcaattttcagttcagtaaattgcttctcatttccatgaaactattttcagagtacctcttttttaattgacagtctgcaattgttttattcattcaatgtcatttcatatcttggttagtttctaattttgagctaatgaatactgagtctccctcttttcaacttctgaattaaaaaaaaagtcatcttatttttctctgttcatttttacactttatttagcctaagtatctgaaattggctttgctagaaattacaattagttcactgttgttttctttcagtcccagacaaaaaagaaaaattttagatttctttcttttctcttcttccttttttttttttttaaggtcatttatctttggcagttttagagatttagaaaagaaaatatatagacttgtaggcagaagaagatatggcactgagggaagttttagttttgttctgtgacagtcttccttatcttgtatgttgtctttaaaaagcctacacatttagattttcattacctcatttgcaaggatacaggatagcacatgtaggagaattggagtgtaagtccagaaacctaagtcttattcttagccttactgatgaaccagctttgtaaccttgggcaagttattctgtttctctgcaccttctcatttgtaaaataggtttacacaaatcatttctgcattttggctctgattcattatgcaagttatcaaaatcaaatttgtaactataaatgagtaatattttattatttttatttttttagagacagagtcttactctattgcccaggctggagtgcagtggcaccattataggtcactgcagcttcaaattcgtgggcccaagcagtcctccttcctcagcctcctgagtagctaggactacaggcatgcaccactatgccccgctaatcatttttacagagtcacgctattttgcccaggctggtcttgaactgccctcaagtggtcctcccacctcagtctcccaaagcactgggattacaggcatgtgccaccatgtgtggctctaatcatttttaaagcaacaatcagtgggaaatttcagctccaaatgggagaaaaatttccaaagattagccttttttttttttttttttttacagatttgctacagttttgttaatgtgcttatttctcattaccatagataactttgagatggctgccttggattacaaactagaatttattactatttcacatagcttgggaaattaagtgtagtttgtgtagcctaaattatcctttatagagatgtagctgcaagggttagcatttcttctttgaaccccaggtatgcagtatattgcttaatactctattgttccataaatatgcattccagaagtcagctgaccatttgtccttatctttgaggacaaagcccgtacatatgtaagcattagtgagcaatgtagaatataaagatttggtagcagtagagagtttacgctctacatcccactgcaagtaatttgaatattgccatattatccactgtgacctgtgctgtttgttaacgttccttttccccaccttccccgaggagcttgtagtctctcactatatatttttttctctttggatttcccttcagcctttagatttcttatctctaatgcaagtctactctagatttttctcccaaatgtttaaaaccaaacctattatctcagtggtcatcaaaggtcctctagttaccagtatccacccttcttggaatgcctgtttagcaatgttcttttgttatatgagtaagaataactctggtatttgctaagagaatataattttctccacattgtatgtatctatgtcctttgtttataaagcctggggggcgttccctattaggttaagtgtccctacgtaaatagaaaaatatgtagggttttattactcaactttttaaggtttctgctcaaattgtcagttgaataactcttgttactttggggctaacatgttgcatagggattttaacaataaaatatatagagcattttaaaaattattcactataattctgagtggattaaaccaaatgaccgggttcaagactctactatgagttcacctttgcttaataaaaggcaagactgaacattaattaatgacttcttggcccagccttagaatttttcagtttagggattagtttggtttttaaaaggtacaaaatgttcatgaaattttctgattatatcaaatattaattcagtcttgttttttgtcatagtactttgttttgaaaagttcagatcaactgataatactagtgctgtgatgagactcagcttgtactcaagaacagatttatgactaggtgagaactaaaatttctctcagaaactaactaaaaactttcatggacaaattgaatccccttgggatttactatttatggatatacgccaatttaattattggactaaataaaatactctttattagtccacttatggaagatgactgtgtaaacatagtatttgcaagtaagtactttttggtattatatttatataatcagctcttgtatccatgtagcttatagttggctgcttcaccaggactctacaaattgctcagaacccaaggaggtaagatttttatattgcctgttttcagtatgtaaaagtccagccacaaaactattaatttacccttgactatatttttacagttgctgtggagctgaacctaaaattttgttagatggttacttggtttgttacatttttatatactaatttatatactataataatatactgtatatattttttaaagtctggggtttgtttttagaaagtatattctatcttcaaagaattatttggtagtttcatgtgtgtatctggaaaataactactgtacttctttataaaagtgagagtgaggtccctgctagttgaggctggaatctagacgtggctgtttatgtaggagttagtaattaaacagtgcctgtttgctgactgcctcatttttgccaggctctgtatgggtgccttgcaaggcattgcctcatttaaaccttgcagcagcattcagaggaaagtattaatatgcccactgtacagatgaggaagttgaggaatgctttattagtaggtgtgaagtgtcttaagcataatacctccctcctcaaccttgctccctcatcctagttaagggaattgagacacagagataaggcaatttgctattgaccttcagcagatgacttaacctcaccgtggcttagtttcttcatgagtaaaacagggtacctatcttttaggattggtgtgaagattaaagaagttaatacatatacaaaactttagaacagtgcttggctagtagtaatctctccataaatgttagatgttattattaagcctgtgactacctgttatctcatgtagttgttcagagataaaaatgtaggctataggaaagaataaggaggaaagccaggctcctaatctgtctaagatagaagtgaatcttagttaagttttaagataatcctatgtgcttttaaaagatttcatggtttgcggtttgcttttctttggctcccagtttctttttttttttttttgacttcttagtacaggtaacttttgaaggaattcagcttaccttagatgaaccaaaggaaagctaaaagccgagataatttagaaaaactaaagcagagattatgttcctaaattccctctttctgcttcaaagtccaggaaacaccacctgcagatacagttgtatcccattgttagaccctttcctgaagccatcctcttttctttgtcttcccagagagaaactagtcattcgacaaagattgaacttcttctgtgtgttaggctgtgctccaagtgctgggaagacaccagtgaataaaacaaaaagtccctgctctcatggagtttacagccactattctaaagtttgtctgtattctgcctgtccttgtttttatacttttagcaaatatgtgtatagaattgttttgcagccttgttcagcatattgtcttcttttgttttttaggaatatctgtttatgtaattagatctgtttttgataaattgtattctgttatttatccttcctaccttctaatgagcagttaggttatttccaacattgactattatggttctccaaaaagatcattgaatatgtcaccttggatggatggatgggagagtttcttcaagacagcatgtttcagactttttgttgtgaccacagtaagaattatgtgcacctcagcttagtaaatacaaatatacacttgggacaaaaacttcaagaaacagtatttacttacttttatcacctgggatgcactctattttgttctgttttgttttcttgagacgttgtttcgctcttgctgcccgggctagagtgcaatggcatgatcttggctcactgcaacctccacctcccaggttcaaacaattctcctgcctcagcctcctgagtagttgggattacaggcgccagccaccacacccggctaattttttgtattaatagagacagggtttcaccatgttggccagtctggtctcgaactcctgacctcaattaatccacccacctcagcctcccaaagtgctgagattacaggcgtgagccactgcgctcggcctattttatctttttcaaatgcagtttacacacaacccagctgattgggttgtgtgtaacccatactgattaaactgatttatcacccgtgttcattatttttaaaacgttgttttgagatctataattagaagtggaattgctgagtagttgcttaagtgtatcttcaacttcttcaactagctgttgccagttgcaattcagagtggttgaaccaatttaaactcctatcggcactctaggggagttcctgtttctccacattctgaccaactcttgatattgccagatggatgagaaatggcatttgttttaaatgtgccttcccctatttactaatgaagtgtttaaagtgtcttttaaaatatatcacatagaagtttaatttaatggtaatcagagctggcggcaaggaggaaatattattgtgattgactgcctcctctggcagaaaaaatggtgtaaaaattatataataatatctatattatattgagtatttataatttgctagacactatactttgtgcactgtatacattattttatttaatcgtcataagaatcttgtaaggttagtgccttcttatatacttttttttttgagacggagtctcgctctatcgcccaggctggagtgcagtgatgtgatctcagcttggctcagtgcaacctctgcctccaggttcaagccattcttctgcctcagcctcccaagtagccgggattacgggcatgcgccaccatgcctggctaatttttgtatttttagtagagacggggtttcaccatattggccaggctggtctagaactcctgacctcatgatccacccacctcggcctcctaaagtgctgggattacaggcgtgagccaccacacctggctgccttcttatatgcttatacaggaacagatggagaaagagattcggaaaggttcagtagtcacactattactaagtagtagagccagaatttaaacccacattggtctaatttcataacttattttctttagtacttcatgctattggtgaattcgtagaggaaggaagtttgtcattactattcttttctgttggtttgtctcttaaatgtgtttaattttttgagtttcactcacgtctctttttttctttccttttctcaaggtagtggagtctttcctctgtaaaacttcaccttgttgtttctagtctaggatagtggtcttgtaacctaggatagtggtcttggttactgcaattttggttgattatttcttgttggcccttaatgtgcccccatcttctgccttaggcattccatctaatcttttccagcagtttgcaaccttactgtgcctcagaatcacatatgaaaatttaaaaatcatagatacctaggttccaaccctaccctggaaattctgatttggaaatatttatttttcaaaaagtccacagataattctgttgcacagccatggtagagacccattttcttaggggttaatgatgctttagagtcacgcagacttgaatcagagccctgattcctttaaacttattagttgagtgatcttggccaagttctttaatcttggctaaggttcttcatctataaattggagataatattattatctaccttagagagttgttgaagagattaaatgaagtaatgcttgtaaaacacttaccagagggacttagaatacttcttaaacattgcctgctaataaggtgtcattattacgttatcctttatccaatcaaaatactcacctttgcagtgtgtatcaacttgatgtcagaaaaataatctgataaatatcaccataagggatggatgatagctagttttcattacttacctttcgttagttgaactgtactaggaggcagaggagtaggcagatggttttatcacgccaatcagccagtcttttctgcctatgtatcagtttggacctataaggaaaatgaaggggaaaacaaatgtttttctttccttcctaggaggattttcttcttgccctttttctcccagtttcctctctgagctgagtatcattagcatcatcaataccctagtttcagagctgcgtagtgatttacctagatacttttctccaccattattccctactacctaactcctcttcacctccattaaatctctgttcatcatgctatccttcttttggattgcctttagttcagttgtgacttacttgattacttgaacccaggtgtctacatttctaagctattgttcaagtaagggccaaggtaaattctaaccagctgtctctttgccttgtgtgggcccattctagaccagcgggtgttaacttttgagtattggaaaaggattagattagctgagccttcaggcttgtcagcagggctgtcactagaccctttgatcttctttatatacctaatggtcatagagtataataataatggtacatgttattactatatgattaatagattactagtagtaattttgttatatatgtatacagtacacttcgttatgtatatatataattgcttgcaacttgaaatttgaggctacaacatttacagtaatttaataacttaactgactttatcaaaaactgaaaaacctcatggaaaaggtagaatgtaaggtagacttaaaaggataggtatacttttttctataaataggatgaggcaagagtttccagttaaggaaactgacatgagcaaaggcttgaaggagcatgcaaatttggagcattgtgagtagattattttttagtttttcagagttcatgcagtgggaataaaactagggagtttggaatcaagcttgaaaattcctgaatgttcaaccaagatatatttgagttagtagattttttgggtatgtcatgaattcgtttggcttttcttaattgatatacatacaacttagtcctgagcttacacatgttcattgtatcattaaacatttagcctggttggtttaagttgatggccactgccaggtctcctttctgccttctcccctttatcccaatgctttagtttttttctgcctttttgtctgttgtgatctgtgcttcatcaggctttcccccagttcctccttgttaatctccagattccaagtcagcaacacaatgaatgtctgcttatcgcgagttgtgaattcccgcatatctctttcacttattaaaaagattgtttggtacatattttgtttataagacagttattgactttcctgtttctcttcctttgcagacctagaggatcaagacataatgggagcatttttagacaagccaaagatggaaaagcataatgcccaggggcagggtaatgggttgcgatatgggctaagcagcatgcaaggctggcgtgttgaaatggaggatgcacatacggctgtgatcggtttgccaagtggacttgaatcgtggtcattctttgctgtgtatgatgggcatgctggttctcaggttgccaaatactgctgtgagcatttgttagatcacatcaccaataaccaggattttaaagggtctgcaggagcaccttctgtggaaaatgtaaagaatggaatcagaacaggttttctggagattgatgaacacatgagagttatgtcagagaagaaacatggtgcagatagaagtgggtcaacagctgtaggtgtcttaatttctccccaacatacttatttcattaactgtggagactcaagaggtttactttgtaggaacaggaaagttcatttcttcacacaagatcacaaaccaagtaatccgctggagaaagaacgaattcagaatgcaggtggctctgtaatgattcagcgtgtgaatggctctctggctgtatcgagggcccttggggattttgattacaaatgtgtccatggaaaaggtcctactgagcagcttgtctcaccagagcctgaagtccatgatattgaaagatctgaagaagatgatcagttcattatccttgcatgtgatggtatctgggatgttatgggaaatgaagagctctgtgattttgtaagatccagacttgaagtcactgatgaccttgagaaagtttgcaatgaagtagtcgacacctgtttgtataaggtagctagactttttttaaaaacataaaatgattttatgccatattaatcactactctagtatttaatcatcttagaatctgtaattctgaaaccagtttttggcacaactgtaggatactgttcaccaattatgaaaatatatcataggaccactatgtagaaataaattacccaattaccatctctgcaagagttataagctgaatgtttagtcttactacttgagctttgtaataatgtggaagattatcaaaggtaaaaagattttatcagagtgcatgttttgaaagaaagagggtggggagggttaggcctcagtgtctataaatgaaaagcattttagagttttaatatttgaccatgtgatatctcagtacatttatgatatcctaatcctttgaaactaaggtttaatggtctgtagcacttgaaagaggaatgtagtgatcattagacgtgatgtaatagaaatagccttgtacatggagtcagaagaacttgctctgagactgtgtatggttttaggtaagctatttaaactctaatcagtttttttcatcataaaaaggataagacattattatcttgtctcatggcgttgtcaggaggatcaaatgggataatatacacaggtgagctagctcagcccctttattttacagatgaggaagctgaagccagagaaggttctacaaacttaagagtcagacagacctgagaccaaggcttacctctattagttttgtactctacattcctgaacgaattgttcaacctctctcagctttaaaatggagataatagtatcttataagactgttgccgggcgcggtggctcacgcctgtaatcccagcactttgggaggccgaggtgggcggatcacgaggtcaggagatcgagaccatcctggctaacacagtgaaaccccgtctctactaaaaaacacaaaaaattagccgggtgtggtggcgggcgcctgtagtcccagctacgcgggaggctgaggcaggagaatggcgtgaacccgggaggcggagcttgcagtgagccgagatcgcgccactgcactccagcctgggcgacagagcgagactccgtctcaaaaaaaaaaaaaaagactgttgaggaattaatgagcgtatgtatatatatatatatgtgtgtgtgtatatatatatatacatatatatatatataatgcctagtttagcatataatacatgctacaccctttcctacagatattataaatgacgtgtacagggttttatacattgctaacagcattaagactagaaaatcaaggcccttgacttgggttcagtgttctttctgccacactctgttctgttttgtcaataatgcttattaacttattctttgatgtttttttaaacaaatgttgactttttaaaattcttctgagggtatatatttgatactcaaatatttaattatagcatttgaatacttagatgtctttaaaaatgaatgtagttcctaaaagttgtcagtttttaaaattaatacaagttaaaagctggtttataaaccttaggtagttttacctcttatttcatatttctacttatgaagcgaatgtattagccccacaatttataatttattttaaaggtaattttatcaggtacatataactacaggtcaaatcctattgtaaacaatgccactaaaattttctgtcatgttgtatggaaggagtgtgtgtacacatgtatatttgtattaggtatcacttcaaattaagtcaccagtaaatgtttagaaatagtattgttttatagaattataaaaaattattattacagtgagattaacctgtaatgtttctctcctgtcttttggagtattggttatactgtattctctctatactgttcgggggagggggagtcattgcacacacacacgcacgcatgcgtgcacatatgtatttttttctccctgaaagtaacattttcactagaacaagtataactgtaattggcacagctgtaaaggttctcaaggctttgaagagcaaaaagaaaactaaaatattctcaaatttttttcttcccagggaagtcgagacaacatgagtgtgattttgatctgttttccaaatgcacccaaagtatcgccagaagcagtgaagaaggaggcagagttggacaagtacctggaatgcagagtagaaggtggatcatttaacaaaaaataagtagctttattaaagaaaaatcttcaacacaatcaaactttaacattttagcttttagatttttatgtgtctttgacagctagtgtctagtgtatgaaagtggaaaaggacatttctgtagtagctgttaagatgtatgcagttgtcctatcacagttatattagaaataacaactagtgtggaaagtaacccacattctgttcaggatacttttgttttaaaaggctaaaatgtttgtgtgctttaaaattcttaatgaattcactggcatgagtaattttatgccgggaaaatctgatttgtggtctatttaattacaaagagattgtgatggtgataatttgaataccatctttctatgaaaagctgtgtatattaattttaatctctagggccttttttcaataacttgaaaatcacagcctcatcattagcaactttatatacacagctttaaaaaatttgctttaaactgtttcagagcttcttccctaagccataaactgtctcacctaaacaagatagacctcaataaaagacataatatttctccacctggcagaaaagtaactgccaagtaagattaagaaataagttgagcatttctggagtatatttctcataattctgcagagacttccagtttattgcatatatgcagtaaagtgtatatattatgcagtttctctaagtggaaaaacttgacatgactttaatagtgttaaaacatgaaaatgctggtgagctgaggtagaaaaaaaacaagaaaaaaattttaaaaatagcgttaaaatgcattttaggctcctaatgtcgttaatttgcacgttaaagacctctaatcgcatgcaagcattgacctaccacacctacatcccactgtgcctgcattattgaaattactactcactttaattttttttcccctttttactgtttgataccaatcataatcagtctgatactagaatcatgattggttttgttctttagtactgtctagagctactattttgtttttattgctgtccgccacttgatagtcatacatctagtatgtgtttgtactatttagtattgcattcattggacgtactattcaacgaatttgtctccttactgttaccaagggtcttggaatttttatattttaaattaatcattcaatataagttatttataggtatagtacaattttaaaatatttagaatgctacaatcattggttcaaactattgattcatgggaaaatttaaattcataagaataatatgtatagggataagttgatatttaatgtattggcactttaacttgggcagacatgttttcttattggtttaaagaagtaataagtattttaatatttttactatgaaatgggatccaattttagaaatgaattgctacttttctctttagtgtgtacactttaagttttagatggaattatgaaatattcactttacgttattttgttacaataataagttttatatttcttattatcaagcaagagttgccacctggacagagtttacattgatactcaatatttttgatatgttaaagtgttattatacttgtaccattcaattggagattgtcataaattaaatatggtattttttactcagatttgatgagactgcaactagagaataaatattacattaaaattgctgctattttaaaacatagaatgtaactgtttgtattgtaaaagttgtgtgtcctcagtgaaaaatactgccttcagcttccaaagcaggcacctgaatgcctttttcttttctctctctcttctttctttaaatacatgccttcactagattgctgtgacctactaaacctcattttatttgcttggaacatttttggcttctctgtccacaccatagaaaaggacaaaggccttccagctctccttttctcttatttgttcccttctaaatacttgactctctgggggtgtgaaaagattcagctcataatttatactactattaattttgtggtccttctaagccaatttaaaattatacttttgtgtatatattttcaaaatctttgctactgactaccttagctttaaagttgctaatttggagatgactgatagaatccctgaaacttggtggaggggagtggaaaggagcagaatgtgtttgtgtatatgtatgtgaaacatggatcttctatatataaatattctttagaaaaagcgttcagtctttttacaattctaagtaaaacgtataggtcaacagaaattaaaggaatatttcttaaaattcatttatttttcttttttgaaagcagacagaagcaaggctagtatagtatgaatggtcaggtagtttaaatgcgttgtcccacgtggaacaggagatattaactgtttttaaagctttacattatttttttacaagaatttgttttcctgtaattttcttcacagttaaaatatcctaatttatattttaacaaaagagatgtaagatacatcaaatatagatgattcaaggtaatgttttttagacctgaaactattgattcaatttatcatcagtgtttatttctattgtatctagttatctatccaaataattgtattggcttagcggagactgtatgttaagtgtattagttttagattgtgaaattgtgcagtttaggtaaacatcaaatccctttatttttgtacagcagatttccagcattagaaccatgtagaacaaatatactagatgttaaagattacacaataaaggaacttggcaaaccaaatctgagatccttgctttttgttcagatttaagactgtttttttttttaaggcaaaaaataatagatggtaaaaatttggcctttattctaaaaggacagtttgaaccatttaaagaaatattatgggtagccatgtctttaaaaattttgaggcctgatcaaaggacgaatctttatacacattgttattttcaaaggtatttacaaattgagaagcagaatgatgatttcttgccccactaatgacaaataaaataccatttcttaccataaacattgaaaaacaaactgaacaaaacttgaccatataacttacaaatacttttgacttgaatttgcatgtggagtatgtgtgctaaaactgcaagtgaagactttttatacttagaggaatagttgtagagttctttgtaaggttctttgttcataattttttatattttgtgatgtgaataatagtatgcatctgcatgacaacactgcagatcatattgctgtgcccttttaataactggatattttaaaattattttaaatgcagttgtatggtttatcaaatggttctctttttaaacattttataaggaaatttagaccttttctattcaaggctttgttgaagtaatcagtgaaggaaatggtattatatatctatacagtatattgtttaaaggtactttagagaagaattaaactgagacagtgatgttcaagtacataatctgtgcatgctatttaagtatcattttgcaaatataaatatatacataaaaataattgagttagtatataatctataaattcccctataattaagggttgttattttcaaatcttgaaattgtttattttttaaaattccacgcagtgtattatatagggcaaagttcaggaaacatgtttccagtctaaagagaggagtgatgtaagaagaaactagttgacatcttaagaaagggtattctcacttgtgcacacatatccttgattatataatatgctgatttaacatgaaatattttttcacattttaattttgatttgaagttaatcttatatgtcattttgtgcattttttgtcataaatcttcaaaggtcaacctgattttttttttttttaaatgataccagattagaaaaatctcagatgtggtaaatgccatctttaaaaagctaggttatctttgtttcggttttcttttcaattaaatttggataacacttacaaaaaaagtacttctgattcccagaaatcataaagaagcagggggaaggcgtccccgacttagtccatgtgatgcgcacattagcgagtgagaacatccccagcctcccaccagggggtgaattggcaagcaagtaagttacattctgtacactcttatgctttatgtcagtgtatgaaaatgttaggtattcattgataaaatgtttgtttgcctaatttctgaactgatgcagttatctgtgttttaacctgtgatttcaatttttttttagtattagaatatctagagtttgtttagacataggtatcagtatcattgtaactaattgcagtgagggttgtctttattggaagcttggttggcattgatttcctcatagagcataaacgagataatatactgaaagaactttttaaactaaattacatagcactacataaaaatttacaaaattctaagtgtcgttgttagtagtagtataatttgatttggtcaatccctgagtaacttaacaccctgaaaattccccttcctcatatggaccatgtttctatgcctgattttcccagtatttttggttgttgattgctggttagttggttttaggtgtcagggaagaagatagaatatatttcttgtcttttccctttccactttagttcatagaattggactactttgtgttaaatattaagcttacacctttacataataaagtggaaaattcaagcaattccaagggttaaaacatttttacctcaaatatccatataattgacttacaaacataaaacttgcaaatacctttagcttgaatttggatatagagtaaatgtgctaaaactacaagtgaagacttcttgtacttacagtgaagatatattattgactaattttctcgattctctactgtgttttgcaagtgtgaccatgttctttgtaatcactaaatagtgattgtaaaagctcctgtttgaagcttttattttttggaaactttttttttccatatgactttctatgaaacgatctataaaattgcttcaagtcaattttggaagtagggagactataacttataaatatactacagatttttaataaagtgttactcaaaactaattcctagacttgtcatggaaatgtcttatttgacatttcagttttaatagaacttttgaaaagggcattaagaaaagtagaagcttaaatataaagtataatctgagacttcaaaactacgatgcaactcaactagcttatgttagtattatatcttaagaatggcattgccattgatgactcataaccatttaaaccaattcaaatggaagtagactatatagactttttttttaatctgtaatttttagccttctattaactgggttggtagagtgttataacacattttagagtagactcacctctgctttaacataggagcccaaatatcttaaaagtgaggctcactattgacagcaagaaatagaactaaaataatatctgagtataagattatcttagaaattttaataaacacctggctatgagttactaagcaatgttttgctttctgaagaattaattttctgcatttttttacacttaggaggaatgttattgaagccgtttacaatagactgaatccttacaaaaatgacgacactgtaagtagcattttagctccctctgctttcccttcccctccactctaaatgcatatccttcctacctgtttttgcagagctgttcactgtacccattctcttacacacacccctgattgattgctctgaactctgcttgctctgatctctgcctgcaccacagttctagtgattgaggacataatcatggtgagtggccacctctctcaaaaaagaagaaagtccttttgaattattctagattttttaagtctttacaaacaatcaacttcagaaggtttgcctccactacatggttttttttttttttttttcccgaagttgggactatctctactcagaatattgtcttattctgagttttgtaagcagctgcagcagaacttcggaatgtctgtctcaactaaatagttcttatggttggaaatacctttgtcaggaatcctgaagtatatacttcacttaaatattagagaattgtttgcataaatagacattagaatgccatactctccagttaagtgttctgttgcaattctgttgtatgatgtttatagaaaagtgataacttaaagatcatgtgggcacagctctgaaatattttatgtattgcattatgaagcttcctcacatattgagttcttaatcttttctgatgcattaaaggtttataaaagtggtattctaaaactgtattggatttcattaaaaaattctttttagtagatttattgattgagtaatacatttggacagcctcatcataaaaccgcatttcaaatattttccaaaacaaaacaaaggattaacaattctttgaacagattaaacattgctatttcatatgtacacatatatacttatatactttaaaaaacatttatattctaaaagtcatctttacagaacattatctttctccattatccagaaagtatggtgtattttggcaccgctaaattttaacgttgttccttattttgcttccttttacaaaggactctacatcaacagatgatatgtggtaaaactgctcatctagccatggagtttaccttcacctccaaaggagagtacagctcaactttgttgaaacttttaacatccatcctcaactttaaggaaggggatatgacatgggtgagaatgattacatcagagaacttcagcagtacaacagctagcccagaactgatttttttttttttttttgtaaatttgagacttatgtaagcgtgatttcaaaccataattcgtgttgtaaatcagactccagcaatttttgttgtatgattttgtttttttgtaaagtgtaattgtccttgtacaaaatgctcatatttaattatgaactgctttaaatcactatcaaagttacaagaaatgtttggcttattgtgtgatgcaacagatatatagccctttcaagtcatgttgtgtttggacttggggttggaacagggagagcagcagccatgtcagctacacgctcaaatgtgcagatgattatggaaaataacctcaaaatcttacaaagctgaacatccaaggagttattgaaaactatcttaaatgttcttggtaggggagttggcattgttgataaagccagtcccttcatttaactgtctttcaggatgttccttcgttgtttccatgagtattgcaggtaataatacagtgtattcataagaatctcaatcttggggctaaatgccttgtttctttgcacctcttttcaagtccttacatttaattactaattgataagcagcagcttcctacatatagtaggaaactgccacatttttgctatcatgattggctgggcctgctgctgttcctagtaagatattctgaattccattttatcaataaagcttgatttaacaaacaagaaacttaatcatgtatgtgtaattcctcttttaccctggccttttaaaacactgtgccgttgtaatgagacgtttctcatagggaaagatgttagtctcttttaattggacaacactgtcactcaaggcatagatgaaactttccttccattagaaagactaaaagatttaattcttggttgtaccttaatctattttttaaataggtttctttcaggctgcttatttttcattaagatgtgtatcagcttggatttgcctactgtttaattaaaatatttattgtcaaagtttgacaatctaacactctatggtaggggtgtgtgtgtgtgtgtttgtgagtgtgtgtttgcctgtgatttttaattggcccatgtctttagaatccaagtggttaagatgtatttgtgatttgaaatatagcatgttgataatatttagctgttggcctttacaaataactttcaaagcttaaggaattgtagatataaaaataacctaatttaatttaggcttaaattcctctgattaagcatgtgaaagtaagttttaaaatctgtcgcattgaaaagattactgttccgtgcccttctgtatttttgtctctttaggttgaatattgtatttatcaccatgtaatcattcagtaggcagattcccactagaaaactgttgaaatgtaagactaaaatacaacattgaatacaaaatcaaaattttgtgtataaaaaccagtatagtccattttgttatatttgttttttccctaacttggaaatatacatatttgtatatatagccttaaaattaatgtaaagttaggggagtagtggggaaagtaatgtgaaatgtctcagatttaagtagttaaataccagcaaaatcttttcattatccctcttattttgtgaggtgattaaatgtaacttaattgtatttaatttatatcttattccagcatgaatgaggaaaaactgaagtactatttatatttagaaattcatatcagttgaaattacagaaccaattccatacttacaataaatacttaatgtctaaatctgtggtagagtgcgaagtatgataatgttctaagttatggctttgcaagcatctaaatgtgcatttaatgaataccagtgcttctagtatagactaattaccagacatactggtactgaaagctaaatccctattataacaaaccagttccttaatattttaagtagactgacaactttagttccagaaattgcaaaactttgaactggactgtgtaatcttttgagatgcaaaacttaagtcacaagtagagtatgtgatggaaagctgtatttcaaaccataacagcatatttagagccttttttttttgagtctttaaacaagagaaaattaaaatattcctgtcaaaattattagtattgaaattaggcttggacacgagagagaaccgtatttgagtgatgtgagaagactaaatcttttccacatgagtcagcactgccatactaataatttttttactataaaaatacaggaaggaagtatacattataacagcagactgtgtgtgttcctgattcctggaggtaatagtggggggaaaccaaccatactttttaaaggcacttttgcacctctattgtgcacttcattcttgtaccacttaaattcttcacccccatcccctttttttgtgctaattagcatctcagggcaatgcctcaaaaatgtttgatgtgttctgttctttggagggaaaaagttcttatgtgatgataatatagtactcaaaatatacttttatcatttaaatgtcttatttgctgctatgaataggaaataacattttgtatagcaggctctgttttaccctaacattaaaaaatttcactgatctttctttcattaacagggtagaatctcctaatttccactttcttgggaatatacttttatagacaatagaagcagttctcaatattagcatatactttaaaaaatcaaagtgataacttaattcagctttggaagtatctcaaacatatttttactttatagtgcattaacttgcttctagagtacttaatgcaactgctctagccacttaattttttatactaatctcaacattaagaaatttggattaagtaataaattagttatgtaattcaagtaatctgaattacagcagtacttttagtgatcattcataggactatatattaacccagctaataactcagtttttttacaaaatgtttcgagtattattggtaaaacactgttctaggctaagcacattgggactgtaaagaaatgagtagatccttggcttcaagtttacatctggacaatttataatctagtgtatgttagtattataactggatcactcatcaaaaaatatatatatatatctattgcccacctgctatctaccaggtacttagctgatcaaggcaggcccctgccctaaagaccttgtttatacttcctttactcacctgaaaactgttctccagtttattttcttctctctaaagttaaagagtaattcagaagaaaattttgcttagcataagaataaaattggactgaagaggcttaagcccattcagtatccttgattgcatttatccaacggcctttattcttcctgctgacagcagtaactcagaggaataggtagtagatttctgaaaattatccagccatggaaatgtaggtggggtttgagtttaaggcatttaaaaatgtaaatatctctagctaaatttatcttaagtagaactctgtgtttttgtaacacactgccagtgttaatatcaaattttagccaaattattactatgtgttttaatattttaaaataatttcactgcccatctttactggacaaactcatttggagttcaacttgtgatttctgaaagaactgatgaaattgggtactgctttttttctccatttttcgttttgttttaattttgaatttcatggtatatacttttagttcaaactcagctgtttgtacagtattgtattaggatttggtattagaaaagatgtgtaaatatcttagtatataattgtttctcatttgaggtttttcttctaagggaccttaaagagttttatatacttttgctcacagaaactgctggtgagattaccattttttgagtatctagtcttctagtttttcttttaggcattaggaagccttctttagagttcaaaattttagaagcctaatttgctcttacttccttcaattatgtgccatgtgttttggtttgtatatgttttaaattgtatatttccttggaatatgcttgaaatatttaagaatacattttcaaaatgtataatactgtattgttttgttgatcagaataataagtctcagttaaatgtttgttattactgatagtcaaaatgctcaatagaaatgatgagaggcattggttccaattcattgtcaaatgaacgttttctaattttgttcacagattctttccctttcgattgttctgtatgttaagatagtggcttctgctctcactgttttcctatttatattactagcaggtaggagtgctaattagaaaaacttagatggtattgaaattacagttgacaacttatatttttatgagatggagaaaaaagattaagttgatataacaacaaagtggactttttttcttccttatcctgcacgaaatattgcccttgtttcctctactttcctcttggtgttttctctttttttcaaacagaaacaggccaattccattttcttgagcaagaaagcttagtgtgttacttcatcaaggccagctaatactgtgttaaaccgggctgaaaatgagaaaacttgggagatggaggaatggggaaatggcagtgggataggtagggaaggattactcttaattgttttaaaagccataggaaagtcttccttgtacgtggctgtaaatttataagaactattgtgtcacataaaccaacaagaatgaacctttgctgcttcagataatttgatttttccagcaaggaaattaataagttactgattcttcagcatagaaacaactgagaagaattaatgcaatgtttcttcactagaaaacccaacccttcatttcttttcattgctccaaaacccagttttcaactaatggttttctcattaaactaaatgtttagaaaagttgtttagagtttttctttttcttttacatagtcctcctgatccagtataagactatttagtaacgtgcatttgtatggtactatctaaagtaagttagattgatgtaagagatcgggtagctgcggaacaaaattagttatatcctaattaggtacagtgaatgacacaaaatcattttagcaatgcttcttaaccttttggggtcacaggcgttttgagactgatgaatcctagggacttatttacccaggaaaatgcgtatataacatacatatctccctaaagtttacaatattgtagtggttcatgggccccctggttaagagcccattctaaagtacaatagggcatcatcccttttcctgcaaagcccaaaagtatatttctagggcatgaaaataacttgagtctattttaaggaattgtttcactctagaggtagataggggacctggctagaatctgacattaaaatatactttttaaaaaatattatatttggggtggggaaagtgattaaaaggtgaaaaaaaaacatagtattcagaagttttggaggttaatgtctttctctaagatttgccactttagaaattcaacagaaaagaggtaaaacagaaatggaatgtatctggaacatttttggcctccatagtgcagatatactatattaacaagtaatacatttatttacctgtcagatctccaggttttaagattttgagctttctagtattaggattcattaaatgttcaattcatttcatattctaaggaattaggttatttacttactaattcaggatgttaaaataacatccaagtcggacaaccaccaccaatgcacacagttaatgagatttctaaaatataataagtacaatgtaacaaacgtatagaattttgcatttgttgccaaaattagatgtttaatgacagcttatttaattcccatttgtgggacttctggaacatagaaaccattatcttacctggttatcccttgactaaatagcatatctgcaggaaaatatcttgtttgtagtgatatgccccaatagtgattgatttcactcttgaaatgagttatatcacttaatttgtataaatgttatgagtggagagacatgtacatgttaaaagcatgttgcattatatattcattttttaaactctataaatgttaagaataatataattgcagaaatatttttcttaaatacaatgtgtaacaaaattctccgtagcaactcacccactttgcagtttatgtgatccacacttttaaagaaattccataaatgtatattttgtattatgtattatttcctggtccaaagaaaatatgtgaattcagttctaactttaagaatgtactgtttgttttcaagttcattgaaaaattgcattcagcctgcgaatggttgcagattgtatgttagatgaaaagtagaaataatttctagtttggaaaactggtgccactaaataaacaggcaattacataatgtgtgtgtatttatgattgtttaatattgcaagcagcatttttattccaagaaacgtggagaatttgaaattagctgttggaagaccttaaaagaattgtttttttcagctgagaaataaatctgataggatttgaactagatttgttccttcctaattttaggaagtttactgaaagccaagaagtttgagttgatggttattgtcatgaaacattccagaaataaagaagccagagtagtttctctttggtaagaacattcccatttgtctgtcttctagtagatgattactcccttgaagagttgaaattgggaattgggagtggtctgggaaaggacttcctcacctggtatctgtggtatagtgcctgcttcaaaatggcacttaaatgtgtgtgtttctaggatgcagaaaggaggtgtttatttcctctgccaattctgatcattggctatattatatcctgtgttcattcatgtctgaaagtgacttaaacaggtttaattgattctagtcatggcttccataattagagaatttttagagttgaactgttaataaaagtgaaattctgtgagccgcaagagctcattttgtttattgtaaaatgtgtaataaaacagtaatgaagcttcataaccaaaggtaaaatatcttagaactgagtaaggtaaagtaaggcaaataaggttttattttatttatatgtaagtggaacctcttcactcatcaaattgtatcatgcagttttgttcatgggtttttttgggtttgggttccccctccaccccgctttggagcttttcttttgaatgttgaagctactttaagttgttttatttcttttttcttaatttattactgagaaacttacattggagtgcccttctctttttccttttttatcaattaatagttcaaattaaatttcccatcacttaatagctcagattaaacttctcatcaagtcaaattttattctagttgaaaagtgctatattttttgataaattaccctgggaaattggtttgcatgccctctatagaactttgcttacttgccacaaaaccaacaacttaccagatgttggtaaaagattttgctctgatggctgcctgttgtttacatgagcattatatgtatttcttctgatatgctatctaaggtgattcagagtgcctaaatagtgaattagctaaacattcaacatgtttctgtgatagtttagatacaggcttgtgtcttccagaccaaagcacttctctatagctgtacaaaagtttttctggaaatcaatttgaactagcaaaatttacaatatttagatttttgatctacaaaaatggcagttttatctagcttaatttgtttctgaaattagttgttattcttgaatgatcagattgcaagtcagtatttggtatttctctcattatttatattttaagtcttttaagaactggatgagaggtttaaagaaaagctatacatatttggacaaatttccaaatgtgaggctggataatatacaaatgtatacagatgctctagcattaggtcaacatcagtatgagaaatgttattccagcagtgactgggaaaggaaaggatgccgaatttaagtgttcagggaggaatataatagagactaaagatgggggaaatgattttaaggatttattttgaattacataattgaggtgagtagagagctcctttctaatattttattgggatgttgacgtggatccaatttagtctgtgacttagagacatcagtgagtaattctctgaaaacaattgttctttaaagtgcagtctttgttaaaggtggctgagggctctaactttgttctaggtgtcaactcaaactctgacttaggctacggccatgctgcaccttttctaaatatattttttgtattttattttactatttgtgtctgccttggtaacagctaaaaattacctagtattttaaaggcaaagcatttg

SEQ ID NO: 1910 - RNA, 8231 nt, Homo sapiens
  source 1..8231: mol_type = mRNA
agaggcggcggcggcggcggtggcggcgctagggacgggagcgcgcgcgggagctagagagcagtggtctcggcgctcgtccggcccgcagcttcgggtcctcaggcggctgttgctccggaacgggtggttggggaggggggggtggggggactctagacagctgaggcgcgaaagcgatgagtcctcggctcttcctcctccttctccgggacccgctctctgcctccctctccaacgcccggatgatctgagccgcgagggcgccgacagccgggggcccggacgcagcccggctcctcccctcctccgccccttccccagcctgacctggcccgccgctgcagcggtgacccctcccccggctgccgccgtcgccgccgcggtgaccccctccccggctgccgccgccgccgcctcggccgaccagggacctgcccgcctgcggctgctccggacctagaggatcaagacataatgggagcatttttagacaagccaaagatggaaaagcataatgcccaggggcagggtaatgggttgcgatatgggctaagcagcatgcaaggctggcgtgttgaaatggaggatgcacatacggctgtgatcggtttgccaagtggacttgaatcgtggtcattctttgctgtgtatgatgggcatgctggttctcaggttgccaaatactgctgtgagcatttgttagatcacatcaccaataaccaggattttaaagggtctgcaggagcaccttctgtggaaaatgtaaagaatggaatcagaacaggttttctggagattgatgaacacatgagagttatgtcagagaagaaacatggtgcagatagaagtgggtcaacagctgtaggtgtcttaatttctccccaacatacttatttcattaactgtggagactcaagaggtttactttgtaggaacaggaaagttcatttcttcacacaagatcacaaaccaagtaatccgctggagaaagaacgaattcagaatgcaggtggctctgtaatgattcagcgtgtgaatggctctctggctgtatcgagggcccttggggattttgattacaaatgtgtccatggaaaaggtcctactgagcagcttgtctcaccagagcctgaagtccatgatattgaaagatctgaagaagatgatcagttcattatccttgcatgtgatggtatctgggatgttatgggaaatgaagagctctgtgattttgtaagatccagacttgaagtcactgatgaccttgagaaagtttgcaatgaagtagtcgacacctgtttgtataagggaagtcgagacaacatgagtgtgattttgatctgttttccaaatgcacccaaagtatcgccagaagcagtgaagaaggaggcagagttggacaagtacctggaatgcagagtagaagaaatcataaagaagcagggggaaggcgtccccgacttagtccatgtgatgcgcacattagcgagtgagaacatccccagcctcccaccagggggtgaattggcaagcaagaggaatgttattgaagccgtttacaatagactgaatccttacaaaaatgacgacactgactctacatcaacagatgatatgtggtaaaactgctcatctagccatggagtttaccttcacctccaaaggagagtacagctcaactttgttgaaacttttaacatccatcctcaactttaaggaaggggatatgacatgggtgagaatgattacatcagagaacttcagcagtacaacagctagcccagaactgatttttttttttttttttgtaaatttgagacttatgtaagcgtgatttcaaaccataattcgtgttgtaaatcagactccagcaatttttgttgtatgattttgtttttttgtaaagtgtaattgtccttgtacaaaatgctcatatttaattatgaactgctttaaatcactatcaaagttacaagaaatgtttggcttattgtgtgatgcaacagatatatagccctttcaagtcatgttgtgtttggacttggggttggaacagggagagcagcagccatgtcagctacacgctcaaatgtgcagatgattatggaaaataacctcaaaatcttacaaagctgaacatccaaggagttattgaaaactatcttaaatgttcttggtaggggagttggcattgttgataaagccagtcccttcatttaactgtctttcaggatgttccttcgttgtttccatgagtattgcaggtaataatacagtgtattcataagaatctcaatcttggggctaaatgccttgtttctttgcacctcttttcaagtccttacatttaattactaattgataagcagcagcttcctacatatagtaggaaactgccacatttttgctatcatgattggctgggcctgctgctgttcctagtaagatattctgaattccattttatcaataaagcttgatttaacaaacaagaaacttaatcatgtatgtgtaattcctcttttaccctggccttttaaaacactgtgccgttgtaatgagacgtttctcatagggaaagatgttagtctcttttaattggacaacactgtcactcaaggcatagatgaaactttccttccattagaaagactaaaagatttaattcttggttgtaccttaatctattttttaaataggtttctttcaggctgcttatttttcattaagatgtgtatcagcttggatttgcctactgtttaattaaaatatttattgtcaaagtttgacaatctaacactctatggtaggggtgtgtgtgtgtgtgtttgtgagtgtgtgtttgcctgtgatttttaattggcccatgtctttagaatccaagtggttaagatgtatttgtgatttgaaatatagcatgttgataatatttagctgttggcctttacaaataactttcaaagcttaaggaattgtagatataaaaataacctaatttaatttaggcttaaattcctctgattaagcatgtgaaagtaagttttaaaatctgtcgcattgaaaagattactgttccgtgcccttctgtatttttgtctctttaggttgaatattgtatttatcaccatgtaatcattcagtaggcagattcccactagaaaactgttgaaatgtaagactaaaatacaacattgaatacaaaatcaaaattttgtgtataaaaaccagtatagtccattttgttatatttgttttttccctaacttggaaatatacatatttgtatatatagccttaaaattaatgtaaagttaggggagtagtggggaaagtaatgtgaaatgtctcagatttaagtagttaaataccagcaaaatcttttcattatccctcttattttgtgaggtgattaaatgtaacttaattgtatttaatttatatcttattccagcatgaatgaggaaaaactgaagtactatttatatttagaaattcatatcagttgaaattacagaaccaattccatacttacaataaatacttaatgtctaaatctgtggtagagtgcgaagtatgataatgttctaagttatggctttgcaagcatctaaatgtgcatttaatgaataccagtgcttctagtatagactaattaccagacatactggtactgaaagctaaatccctattataacaaaccagttccttaatattttaagtagactgacaactttagttccagaaattgcaaaactttgaactggactgtgtaatcttttgagatgcaaaacttaagtcacaagtagagtatgtgatggaaagctgtatttcaaaccataacagcatatttagagccttttttttttgagtctttaaacaagagaaaattaaaatattcctgtcaaaattattagtattgaaattaggcttggacacgagagagaaccgtatttgagtgatgtgagaagactaaatcttttccacatgagtcagcactgccatactaataatttttttactataaaaatacaggaaggaagtatacattataacagcagactgtgtgtgttcctgattcctggaggtaatagtggggggaaaccaaccatactttttaaaggcacttttgcacctctattgtgcacttcattcttgtaccacttaaattcttcacccccatcccctttttttgtgctaattagcatctcagggcaatgcctcaaaaatgtttgatgtgttctgttctttggagggaaaaagttcttatgtgatgataatatagtactcaaaatatacttttatcatttaaatgtcttatttgctgctatgaataggaaataacattttgtatagcaggctctgttttaccctaacattaaaaaatttcactgatctttctttcattaacagggtagaatctcctaatttccactttcttgggaatatacttttatagacaatagaagcagttctcaatattagcatatactttaaaaaatcaaagtgataacttaattcagctttggaagtatctcaaacatatttttactttatagtgcattaacttgcttctagagtacttaatgcaactgctctagccacttaattttttatactaatctcaacattaagaaatttggattaagtaataaattagttatgtaattcaagtaatctgaattacagcagtacttttagtgatcattcataggactatatattaacccagctaataactcagtttttttacaaaatgtttcgagtattattggtaaaacactgttctaggctaagcacattgggactgtaaagaaatgagtagatccttggcttcaagtttacatctggacaatttataatctagtgtatgttagtattataactggatcactcatcaaaaaatatatatatatatctattgcccacctgctatctaccaggtacttagctgatcaaggcaggcccctgccctaaagaccttgtttatacttcctttactcacctgaaaactgttctccagtttattttcttctctctaaagttaaagagtaattcagaagaaaattttgcttagcataagaataaaattggactgaagaggcttaagcccattcagtatccttgattgcatttatccaacggcctttattcttcctgctgacagcagtaactcagaggaataggtagtagatttctgaaaattatccagccatggaaatgtaggtggggtttgagtttaaggcatttaaaaatgtaaatatctctagctaaatttatcttaagtagaactctgtgtttttgtaacacactgccagtgttaatatcaaattttagccaaattattactatgtgttttaatattttaaaataatttcactgcccatctttactggacaaactcatttggagttcaacttgtgatttctgaaagaactgatgaaattgggtactgctttttttctccatttttcgttttgttttaattttgaatttcatggtatatacttttagttcaaactcagctgtttgtacagtattgtattaggatttggtattagaaaagatgtgtaaatatcttagtatataattgtttctcatttgaggtttttcttctaagggaccttaaagagttttatatacttttgctcacagaaactgctggtgagattaccattttttgagtatctagtcttctagtttttcttttaggcattaggaagccttctttagagttcaaaattttagaagcctaatttgctcttacttccttcaattatgtgccatgtgttttggtttgtatatgttttaaattgtatatttccttggaatatgcttgaaatatttaagaatacattttcaaaatgtataatactgtattgttttgttgatcagaataataagtctcagttaaatgtttgttattactgatagtcaaaatgctcaatagaaatgatgagaggcattggttccaattcattgtcaaatgaacgttttctaattttgttcacagattctttccctttcgattgttctgtatgttaagatagtggcttctgctctcactgttttcctatttatattactagcaggtaggagtgctaattagaaaaacttagatggtattgaaattacagttgacaacttatatttttatgagatggagaaaaaagattaagttgatataacaacaaagtggactttttttcttccttatcctgcacgaaatattgcccttgtttcctctactttcctcttggtgttttctctttttttcaaacagaaacaggccaattccattttcttgagcaagaaagcttagtgtgttacttcatcaaggccagctaatactgtgttaaaccgggctgaaaatgagaaaacttgggagatggaggaatggggaaatggcagtgggataggtagggaaggattactcttaattgttttaaaagccataggaaagtcttccttgtacgtggctgtaaatttataagaactattgtgtcacataaaccaacaagaatgaacctttgctgcttcagataatttgatttttccagcaaggaaattaataagttactgattcttcagcatagaaacaactgagaagaattaatgcaatgtttcttcactagaaaacccaacccttcatttcttttcattgctccaaaacccagttttcaactaatggttttctcattaaactaaatgtttagaaaagttgtttagagtttttctttttcttttacatagtcctcctgatccagtataagactatttagtaacgtgcatttgtatggtactatctaaagtaagttagattgatgtaagagatcgggtagctgcggaacaaaattagttatatcctaattaggtacagtgaatgacacaaaatcattttagcaatgcttcttaaccttttggggtcacaggcgttttgagactgatgaatcctagggacttatttacccaggaaaatgcgtatataacatacatatctccctaaagtttacaatattgtagtggttcatgggccccctggttaagagcccattctaaagtacaatagggcatcatcccttttcctgcaaagcccaaaagtatatttctagggcatgaaaataacttgagtctattttaaggaattgtttcactctagaggtagataggggacctggctagaatctgacattaaaatatactttttaaaaaatattatatttggggtggggaaagtgattaaaaggtgaaaaaaaaacatagtattcagaagttttggaggttaatgtctttctctaagatttgccactttagaaattcaacagaaaagaggtaaaacagaaatggaatgtatctggaacatttttggcctccatagtgcagatatactatattaacaagtaatacatttatttacctgtcagatctccaggttttaagattttgagctttctagtattaggattcattaaatgttcaattcatttcatattctaaggaattaggttatttacttactaattcaggatgttaaaataacatccaagtcggacaaccaccaccaatgcacacagttaatgagatttctaaaatataataagtacaatgtaacaaacgtatagaattttgcatttgttgccaaaattagatgtttaatgacagcttatttaattcccatttgtgggacttctggaacatagaaaccattatcttacctggttatcccttgactaaatagcatatctgcaggaaaatatcttgtttgtagtgatatgccccaatagtgattgatttcactcttgaaatgagttatatcacttaatttgtataaatgttatgagtggagagacatgtacatgttaaaagcatgttgcattatatattcattttttaaactctataaatgttaagaataatataattgcagaaatatttttcttaaatacaatgtgtaacaaaattctccgtagcaactcacccactttgcagtttatgtgatccacacttttaaagaaattccataaatgtatattttgtattatgtattatttcctggtccaaagaaaatatgtgaattcagttctaactttaagaatgtactgtttgttttcaagttcattgaaaaattgcattcagcctgcgaatggttgcagattgtatgttagatgaaaagtagaaataatttctagtttggaaaactggtgccactaaataaacaggcaattacataa

SEQ ID NO: 1911 - RNA, 4345 nt, Homo sapiens
  source 1..4345: mol_type = mRNA
agaggcggcggcggcggcggtggcggcgctagggacgggagcgcgcgcgggagctagagagcagtggtctcggcgctcgtccggcccgcagcttcgggtcctcaggcggctgttgctccggaacgggtggttggggaggggggggtggggggactctagacagctgaggcgcgaaagcgatgagtcctcggctcttcctcctccttctccgggacccgctctctgcctccctctccaacgcccggatgatctgagccgcgagggcgccgacagccgggggcccggacgcagcccggctcctcccctcctccgccccttccccagcctgacctggcccgccgctgcagcggtgacccctcccccggctgccgccgtcgccgccgcggtgaccccctccccggctgccgccgccgccgcctcggccgaccagggacctgcccgcctgcggctgctccggattttaaataaacttggagccttttcttgaaagacagctggctgtggagagccttctaccaactgcagttttagatacgttttgaaaatttcatcacctgagacctagaggatcaagacataatgggagcatttttagacaagccaaagatggaaaagcataatgcccaggggcagggtaatgggttgcgatatgggctaagcagcatgcaaggctggcgtgttgaaatggaggatgcacatacggctgtgatcggtttgccaagtggacttgaatcgtggtcattctttgctgtgtatgatgggcatgctggttctcaggttgccaaatactgctgtgagcatttgttagatcacatcaccaataaccaggattttaaagggtctgcaggagcaccttctgtggaaaatgtaaagaatggaatcagaacaggttttctggagattgatgaacacatgagagttatgtcagagaagaaacatggtgcagatagaagtgggtcaacagctgtaggtgtcttaatttctccccaacatacttatttcattaactgtggagactcaagaggtttactttgtaggaacaggaaagttcatttcttcacacaagatcacaaaccaagtaatccgctggagaaagaacgaattcagaatgcaggtggctctgtaatgattcagcgtgtgaatggctctctggctgtatcgagggcccttggggattttgattacaaatgtgtccatggaaaaggtcctactgagcagcttgtctcaccagagcctgaagtccatgatattgaaagatctgaagaagatgatcagttcattatccttgcatgtgatggtatctgggatgttatgggaaatgaagagctctgtgattttgtaagatccagacttgaagtcactgatgaccttgagaaagtttgcaatgaagtagtcgacacctgtttgtataagggaagtcgagacaacatgagtgtgattttgatctgttttccaaatgcacccaaagtatcgccagaagcagtgaagaaggaggcagagttggacaagtacctggaatgcagagtagaaggtggatcatttaacaaaaaataagtagctttattaaagaaaaatcttcaacacaatcaaactttaacattttagcttttagatttttatgtgtctttgacagctagtgtctagtgtatgaaagtggaaaaggacatttctgtagtagctgttaagatgtatgcagttgtcctatcacagttatattagaaataacaactagtgtggaaagtaacccacattctgttcaggatacttttgttttaaaaggctaaaatgtttgtgtgctttaaaattcttaatgaattcactggcatgagtaattttatgccgggaaaatctgatttgtggtctatttaattacaaagagattgtgatggtgataatttgaataccatctttctatgaaaagctgtgtatattaattttaatctctagggccttttttcaataacttgaaaatcacagcctcatcattagcaactttatatacacagctttaaaaaatttgctttaaactgtttcagagcttcttccctaagccataaactgtctcacctaaacaagatagacctcaataaaagacataatatttctccacctggcagaaaagtaactgccaagtaagattaagaaataagttgagcatttctggagtatatttctcataattctgcagagacttccagtttattgcatatatgcagtaaagtgtatatattatgcagtttctctaagtggaaaaacttgacatgactttaatagtgttaaaacatgaaaatgctggtgagctgaggtagaaaaaaaacaagaaaaaaattttaaaaatagcgttaaaatgcattttaggctcctaatgtcgttaatttgcacgttaaagacctctaatcgcatgcaagcattgacctaccacacctacatcccactgtgcctgcattattgaaattactactcactttaattttttttcccctttttactgtttgataccaatcataatcagtctgatactagaatcatgattggttttgttctttagtactgtctagagctactattttgtttttattgctgtccgccacttgatagtcatacatctagtatgtgtttgtactatttagtattgcattcattggacgtactattcaacgaatttgtctccttactgttaccaagggtcttggaatttttatattttaaattaatcattcaatataagttatttataggtatagtacaattttaaaatatttagaatgctacaatcattggttcaaactattgattcatgggaaaatttaaattcataagaataatatgtatagggataagttgatatttaatgtattggcactttaacttgggcagacatgttttcttattggtttaaagaagtaataagtattttaatatttttactatgaaatgggatccaattttagaaatgaattgctacttttctctttagtgtgtacactttaagttttagatggaattatgaaatattcactttacgttattttgttacaataataagttttatatttcttattatcaagcaagagttgccacctggacagagtttacattgatactcaatatttttgatatgttaaagtgttattatacttgtaccattcaattggagattgtcataaattaaatatggtattttttactcagatttgatgagactgcaactagagaataaatattacattaaaattgctgctattttaaaacatagaatgtaactgtttgtattgtaaaagttgtgtgtcctcagtgaaaaatactgccttcagcttccaaagcaggcacctgaatgcctttttcttttctctctctcttctttctttaaatacatgccttcactagattgctgtgacctactaaacctcattttatttgcttggaacatttttggcttctctgtccacaccatagaaaaggacaaaggccttccagctctccttttctcttatttgttcccttctaaatacttgactctctgggggtgtgaaaagattcagctcataatttatactactattaattttgtggtccttctaagccaatttaaaattatacttttgtgtatatattttcaaaatctttgctactgactaccttagctttaaagttgctaatttggagatgactgatagaatccctgaaacttggtggaggggagtggaaaggagcagaatgtgtttgtgtatatgtatgtgaaacatggatcttctatatataaatattctttagaaaaagcgttcagtctttttacaattctaagtaaaacgtataggtcaacagaaattaaaggaatatttcttaaaattcatttatttttcttttttgaaagcagacagaagcaaggctagtatagtatgaatggtcaggtagtttaaatgcgttgtcccacgtggaacaggagatattaactgtttttaaagctttacattatttttttacaagaatttgttttcctgtaattttcttcacagttaaaatatcctaatttatattttaacaaaagagatgtaagatacatcaaatatagatgattcaaggtaatgttttttagacctgaaactattgattcaatttatcatcagtgtttatttctattgtatctagttatctatccaaataattgtattggcttagcggagactgtatgttaagtgtattagttttagattgtgaaattgtgcagtttaggtaaacatcaaatccctttatttttgtacagcagatttccagcattagaaccatgtagaacaaatatactagatgttaaagattacacaataaaggaacttggcaaaccaaa

SEQ ID NO: 1912 - RNA, 8071 nt, Homo sapiens
  source 1..8071: mol_type = mRNA
ataatgtattatgatgtaggggagggaggaaggagggccagggtagggggcacaccctctccctgaatgaaattcatttaggggcactgtctgctcgcatgttctgttctgggagaaaatgggtagcagaagctacaatttgtactaagctaatgaaaagagagaaaagaagaatggggaagagaagggcaaagaaggcaaaaagagaagagaagaaaaagggaggagagagaaggagaaatgagaaaagaggaaaccaaatgaagaggatgtgtgagagaaaaaaatatgaaacagacctagaggatcaagacataatgggagcatttttagacaagccaaagatggaaaagcataatgcccaggggcagggtaatgggttgcgatatgggctaagcagcatgcaaggctggcgtgttgaaatggaggatgcacatacggctgtgatcggtttgccaagtggacttgaatcgtggtcattctttgctgtgtatgatgggcatgctggttctcaggttgccaaatactgctgtgagcatttgttagatcacatcaccaataaccaggattttaaagggtctgcaggagcaccttctgtggaaaatgtaaagaatggaatcagaacaggttttctggagattgatgaacacatgagagttatgtcagagaagaaacatggtgcagatagaagtgggtcaacagctgtaggtgtcttaatttctccccaacatacttatttcattaactgtggagactcaagaggtttactttgtaggaacaggaaagttcatttcttcacacaagatcacaaaccaagtaatccgctggagaaagaacgaattcagaatgcaggtggctctgtaatgattcagcgtgtgaatggctctctggctgtatcgagggcccttggggattttgattacaaatgtgtccatggaaaaggtcctactgagcagcttgtctcaccagagcctgaagtccatgatattgaaagatctgaagaagatgatcagttcattatccttgcatgtgatggtatctgggatgttatgggaaatgaagagctctgtgattttgtaagatccagacttgaagtcactgatgaccttgagaaagtttgcaatgaagtagtcgacacctgtttgtataagggaagtcgagacaacatgagtgtgattttgatctgttttccaaatgcacccaaagtatcgccagaagcagtgaagaaggaggcagagttggacaagtacctggaatgcagagtagaagaaatcataaagaagcagggggaaggcgtccccgacttagtccatgtgatgcgcacattagcgagtgagaacatccccagcctcccaccagggggtgaattggcaagcaagaggaatgttattgaagccgtttacaatagactgaatccttacaaaaatgacgacactgactctacatcaacagatgatatgtggtaaaactgctcatctagccatggagtttaccttcacctccaaaggagagtacagctcaactttgttgaaacttttaacatccatcctcaactttaaggaaggggatatgacatgggtgagaatgattacatcagagaacttcagcagtacaacagctagcccagaactgatttttttttttttttttgtaaatttgagacttatgtaagcgtgatttcaaaccataattcgtgttgtaaatcagactccagcaatttttgttgtatgattttgtttttttgtaaagtgtaattgtccttgtacaaaatgctcatatttaattatgaactgctttaaatcactatcaaagttacaagaaatgtttggcttattgtgtgatgcaacagatatatagccctttcaagtcatgttgtgtttggacttggggttggaacagggagagcagcagccatgtcagctacacgctcaaatgtgcagatgattatggaaaataacctcaaaatcttacaaagctgaacatccaaggagttattgaaaactatcttaaatgttcttggtaggggagttggcattgttgataaagccagtcccttcatttaactgtctttcaggatgttccttcgttgtttccatgagtattgcaggtaataatacagtgtattcataagaatctcaatcttggggctaaatgccttgtttctttgcacctcttttcaagtccttacatttaattactaattgataagcagcagcttcctacatatagtaggaaactgccacatttttgctatcatgattggctgggcctgctgctgttcctagtaagatattctgaattccattttatcaataaagcttgatttaacaaacaagaaacttaatcatgtatgtgtaattcctcttttaccctggccttttaaaacactgtgccgttgtaatgagacgtttctcatagggaaagatgttagtctcttttaattggacaacactgtcactcaaggcatagatgaaactttccttccattagaaagactaaaagatttaattcttggttgtaccttaatctattttttaaataggtttctttcaggctgcttatttttcattaagatgtgtatcagcttggatttgcctactgtttaattaaaatatttattgtcaaagtttgacaatctaacactctatggtaggggtgtgtgtgtgtgtgtttgtgagtgtgtgtttgcctgtgatttttaattggcccatgtctttagaatccaagtggttaagatgtatttgtgatttgaaatatagcatgttgataatatttagctgttggcctttacaaataactttcaaagcttaaggaattgtagatataaaaataacctaatttaatttaggcttaaattcctctgattaagcatgtgaaagtaagttttaaaatctgtcgcattgaaaagattactgttccgtgcccttctgtatttttgtctctttaggttgaatattgtatttatcaccatgtaatcattcagtaggcagattcccactagaaaactgttgaaatgtaagactaaaatacaacattgaatacaaaatcaaaattttgtgtataaaaaccagtatagtccattttgttatatttgttttttccctaacttggaaatatacatatttgtatatatagccttaaaattaatgtaaagttaggggagtagtggggaaagtaatgtgaaatgtctcagatttaagtagttaaataccagcaaaatcttttcattatccctcttattttgtgaggtgattaaatgtaacttaattgtatttaatttatatcttattccagcatgaatgaggaaaaactgaagtactatttatatttagaaattcatatcagttgaaattacagaaccaattccatacttacaataaatacttaatgtctaaatctgtggtagagtgcgaagtatgataatgttctaagttatggctttgcaagcatctaaatgtgcatttaatgaataccagtgcttctagtatagactaattaccagacatactggtactgaaagctaaatccctattataacaaaccagttccttaatattttaagtagactgacaactttagttccagaaattgcaaaactttgaactggactgtgtaatcttttgagatgcaaaacttaagtcacaagtagagtatgtgatggaaagctgtatttcaaaccataacagcatatttagagccttttttttttgagtctttaaacaagagaaaattaaaatattcctgtcaaaattattagtattgaaattaggcttggacacgagagagaaccgtatttgagtgatgtgagaagactaaatcttttccacatgagtcagcactgccatactaataatttttttactataaaaatacaggaaggaagtatacattataacagcagactgtgtgtgttcctgattcctggaggtaatagtggggggaaaccaaccatactttttaaaggcacttttgcacctctattgtgcacttcattcttgtaccacttaaattcttcacccccatcccctttttttgtgctaattagcatctcagggcaatgcctcaaaaatgtttgatgtgttctgttctttggagggaaaaagttcttatgtgatgataatatagtactcaaaatatacttttatcatttaaatgtcttatttgctgctatgaataggaaataacattttgtatagcaggctctgttttaccctaacattaaaaaatttcactgatctttctttcattaacagggtagaatctcctaatttccactttcttgggaatatacttttatagacaatagaagcagttctcaatattagcatatactttaaaaaatcaaagtgataacttaattcagctttggaagtatctcaaacatatttttactttatagtgcattaacttgcttctagagtacttaatgcaactgctctagccacttaattttttatactaatctcaacattaagaaatttggattaagtaataaattagttatgtaattcaagtaatctgaattacagcagtacttttagtgatcattcataggactatatattaacccagctaataactcagtttttttacaaaatgtttcgagtattattggtaaaacactgttctaggctaagcacattgggactgtaaagaaatgagtagatccttggcttcaagtttacatctggacaatttataatctagtgtatgttagtattataactggatcactcatcaaaaaatatatatatatatctattgcccacctgctatctaccaggtacttagctgatcaaggcaggcccctgccctaaagaccttgtttatacttcctttactcacctgaaaactgttctccagtttattttcttctctctaaagttaaagagtaattcagaagaaaattttgcttagcataagaataaaattggactgaagaggcttaagcccattcagtatccttgattgcatttatccaacggcctttattcttcctgctgacagcagtaactcagaggaataggtagtagatttctgaaaattatccagccatggaaatgtaggtggggtttgagtttaaggcatttaaaaatgtaaatatctctagctaaatttatcttaagtagaactctgtgtttttgtaacacactgccagtgttaatatcaaattttagccaaattattactatgtgttttaatattttaaaataatttcactgcccatctttactggacaaactcatttggagttcaacttgtgatttctgaaagaactgatgaaattgggtactgctttttttctccatttttcgttttgttttaattttgaatttcatggtatatacttttagttcaaactcagctgtttgtacagtattgtattaggatttggtattagaaaagatgtgtaaatatcttagtatataattgtttctcatttgaggtttttcttctaagggaccttaaagagttttatatacttttgctcacagaaactgctggtgagattaccattttttgagtatctagtcttctagtttttcttttaggcattaggaagccttctttagagttcaaaattttagaagcctaatttgctcttacttccttcaattatgtgccatgtgttttggtttgtatatgttttaaattgtatatttccttggaatatgcttgaaatatttaagaatacattttcaaaatgtataatactgtattgttttgttgatcagaataataagtctcagttaaatgtttgttattactgatagtcaaaatgctcaatagaaatgatgagaggcattggttccaattcattgtcaaatgaacgttttctaattttgttcacagattctttccctttcgattgttctgtatgttaagatagtggcttctgctctcactgttttcctatttatattactagcaggtaggagtgctaattagaaaaacttagatggtattgaaattacagttgacaacttatatttttatgagatggagaaaaaagattaagttgatataacaacaaagtggactttttttcttccttatcctgcacgaaatattgcccttgtttcctctactttcctcttggtgttttctctttttttcaaacagaaacaggccaattccattttcttgagcaagaaagcttagtgtgttacttcatcaaggccagctaatactgtgttaaaccgggctgaaaatgagaaaacttgggagatggaggaatggggaaatggcagtgggataggtagggaaggattactcttaattgttttaaaagccataggaaagtcttccttgtacgtggctgtaaatttataagaactattgtgtcacataaaccaacaagaatgaacctttgctgcttcagataatttgatttttccagcaaggaaattaataagttactgattcttcagcatagaaacaactgagaagaattaatgcaatgtttcttcactagaaaacccaacccttcatttcttttcattgctccaaaacccagttttcaactaatggttttctcattaaactaaatgtttagaaaagttgtttagagtttttctttttcttttacatagtcctcctgatccagtataagactatttagtaacgtgcatttgtatggtactatctaaagtaagttagattgatgtaagagatcgggtagctgcggaacaaaattagttatatcctaattaggtacagtgaatgacacaaaatcattttagcaatgcttcttaaccttttggggtcacaggcgttttgagactgatgaatcctagggacttatttacccaggaaaatgcgtatataacatacatatctccctaaagtttacaatattgtagtggttcatgggccccctggttaagagcccattctaaagtacaatagggcatcatcccttttcctgcaaagcccaaaagtatatttctagggcatgaaaataacttgagtctattttaaggaattgtttcactctagaggtagataggggacctggctagaatctgacattaaaatatactttttaaaaaatattatatttggggtggggaaagtgattaaaaggtgaaaaaaaaacatagtattcagaagttttggaggttaatgtctttctctaagatttgccactttagaaattcaacagaaaagaggtaaaacagaaatggaatgtatctggaacatttttggcctccatagtgcagatatactatattaacaagtaatacatttatttacctgtcagatctccaggttttaagattttgagctttctagtattaggattcattaaatgttcaattcatttcatattctaaggaattaggttatttacttactaattcaggatgttaaaataacatccaagtcggacaaccaccaccaatgcacacagttaatgagatttctaaaatataataagtacaatgtaacaaacgtatagaattttgcatttgttgccaaaattagatgtttaatgacagcttatttaattcccatttgtgggacttctggaacatagaaaccattatcttacctggttatcccttgactaaatagcatatctgcaggaaaatatcttgtttgtagtgatatgccccaatagtgattgatttcactcttgaaatgagttatatcacttaatttgtataaatgttatgagtggagagacatgtacatgttaaaagcatgttgcattatatattcattttttaaactctataaatgttaagaataatataattgcagaaatatttttcttaaatacaatgtgtaacaaaattctccgtagcaactcacccactttgcagtttatgtgatccacacttttaaagaaattccataaatgtatattttgtattatgtattatttcctggtccaaagaaaatatgtgaattcagttctaactttaagaatgtactgtttgttttcaagttcattgaaaaattgcattcagcctgcgaatggttgcagattgtatgttagatgaaaagtagaaataatttctagtttggaaaactggtgccactaaataaacaggcaattacataa

SEQ ID NO: 1913 - RNA, 2789 nt, Mus musculus
  source 1..2789: mol_type = mRNA
gggcgaggggcagcggtgtcgagagcgcgcgtgcgcggggccgcgctagaggcggcggcggtggcggcgctaggggcgggagcgcgcgcaggagctagaacgccgtggtctccgcgccggccgggtccgcagctcgggatcgggtggctggggcggggggaggggggcccaggcaggtggggcggaaagcgatgagtcctcggcgcctcctccgcctcccgcgggccccgctctctgcctcccgctccgacgcccggatgatctgagccgcgagggctccgagagccgggggcccggacccagcccggctcctcccctcctccgcccgggcccggccgccgtcgcgggaccccgtgcccggccgccgtcgccaccgccgccccggccgaccgagggacccgcccgcccgcggctgctccggacctagaggatcaagtcataatgggagcatttttagacaagccaaagatggagaagcataatgcccaggggcaggggaatgggttacgatacggcctaagcagcatgcaaggttggcgagttgaaatggaggacgcacacacggctgtgatcggtttgccaagtggacttgagacatggtcattctttgctgtatatgatgggcatgctggttctcaggttgccaaatactgctgtgagcacttgttagatcacatcaccaataaccaggatttcagaggatctgcaggagcaccttctgtggagaacgtaaagaatggaatcagaacagggtttctggagattgatgaacacatgagagttatgtcagagaagaaacatggtgcagatagaagcgggtcaacagctgtgggcgtcttaatctctccccaacatacttatttcattaactgtggagactcgagaggtttactttgtaggaatagaaaagttcacttcttcacacaagaccataaaccaagtaacccgctggaaaaagaacgaattcagaatgcagggggctcggtgatgattcagcgtgtcaatggctctctggctgtatcgagggcccttggggatttcgattacaaatgtgtccatggaaaaggtcccacagagcagcttgtctccccagagcccgaagtccatgatattgaaaggtctgaagaagatgaccagttcatcatccttgcatgcgatggcatctgggacgtcatggggaacgaagagctctgtgactttgtgagatccagacttgaagtcactgatgaccttgagaaagtttgcaatgaagtagtcgacacctgcttgtataagggaagtcgagacaacatgagtgtgattttgatctgttttccaagtgcacccaaagtctcggcagaggcggtgaagaaggaggcggagctggacaagtacctggagagcagagtagaagaaatcataaagaagcaggtggaaggcgtccctgacttagtccacgtgatgcgcacgttagccagtgagaacatccccagcctcccaccagggggtgaattggcaagcaagcggaatgtaattgaagccgtttacaatagactgaacccttacaaaaatgacgacactgattctgcgtcaaccgatgatatgtggtaaagccgctcacccagccgtggactcaccttcgcctgcaaaggggaagccagctcatccttgccgagcctttaccatccatcaccgacttcacaggagggtctgacacgggtgaggactgcagcttcagcgatggaacagctagcccagaatggattttctttttttattgtaaatttgagacttatgtaagcgtgatttcaaaccgtaattcatgttgtaaatcagactccagcaatttttgttgtatgattttggtttttgtaaagtgtaattgtccttgtacaaagtgctcatatttaattatgaactgctttaaaatcactatcagtgaatgataaaggaaatttggcttgttgtgtgacacaacagacatagtcatgctgtgtctggactcggttgggatagggaaagcggcagccacatagctgcatgctacgtgcacacgattaggaagaattccaaaagcttacacagctgtcacccaggctcatggaaactgtctctgttccggcgaggactggctcactgatacagccatcgctctcacctgtctctaggatgtcctctcctcgtagccaagatattgcagctgatcctgtatattcatgagagtatctatcaattttgggctaacatgccttgattctcttgcacctctttatgagttcttacatttaattactaattggtaagcagcagcttcctacacagtaggagactgccacatttttttcctatcatgactggctgggcctgctgctgttcctagtaagatattccgaattccattttatcaataaagcttggtttaacaaacaagacatgtaatcatgtatgcgtgattcctcggtcaccccggcttcagaccccactcggggagagaaagatgtcatgtttccttaaactggatgatggtgttagcatccaggtgcaggtggatcggaagattgacgtctgctgtctcctaatctgttttaattgcgtttcttccaggctgcttacttctcattaagatgtgtgtcagcttgactttacctactgttaattaaagtaattgtcaaagtttgacaaccctaaccctgtgatagatgtgtgtgtgttgaatgtgtgtttgcctgtaacttttaattgacccacgtctttagaatctaagaggttaagatacatttgtgatttgaaataaaagcatgttgataata

SEQ ID NO: 1914 - DNA, 20 bp, synthetic construct
  source 1..20: mol_type = other DNA
cgctgggttgctttctcggg

SEQ ID NO: 1915 - DNA, 20 bp, synthetic construct
  source 1..20: mol_type = other DNA
gcgctgggttgctttctcgg

SEQ ID NO: 1916 - DNA, 20 bp, synthetic construct
  source 1..20: mol_type = other DNA
cgcgctgggttgctttctcg

SEQ ID NO: 1917 - DNA, 20 bp, synthetic construct
  source 1..20: mol_type = other DNA
gcgcgctgggttgctttctc

SEQ ID NO: 1918 - DNA, 20 bp, synthetic construct
  source 1..20: mol_type = other DNA
ggcgcgctgggttgctttct

SEQ ID NO: 1919 - DNA, 20 bp, synthetic construct
  source 1..20: mol_type = other DNA
cggcgcgctgggttgctttc

SEQ ID NO: 1920 - DNA, 20 bp, synthetic construct
  source 1..20: mol_type = other DNA
gcggcgcgctgggttgcttt

SEQ ID NO: 1921 - DNA, 20 bp, synthetic construct
  source 1..20: mol_type = other DNA
ggcggcgcgctgggttgctt

SEQ ID NO: 1922 - DNA, 20 bp, synthetic construct
  source 1..20: mol_type = other DNA
gggcggcgcgctgggttgct

SEQ ID NO: 1923 - DNA, 20 bp, synthetic construct
  source 1..20: mol_type = other DNA
cgggcggcgcgctgggttgc

SEQ ID NO: 1924 - DNA, 20 bp, synthetic construct
  source 1..20: mol_type = other DNA
gcgggcggcgcgctgggttg

SEQ ID NO: 1925 - DNA, 20 bp, synthetic construct
  source 1..20: mol_type = other DNA
agcgggcggcgcgctgggtt

SEQ ID NO: 1926 - DNA, 20 bp, synthetic construct
  source 1..20: mol_type = other DNA
gagcgggcggcgcgctgggt

SEQ ID NO: 1927 - DNA, 20 bp, synthetic construct
  source 1..20: mol_type = other DNA
ggagcgggcggcgcgctggg

SEQ ID NO: 1928 - DNA, 20 bp, synthetic construct
  source 1..20: mol_type = other DNA
aggagcgggcggcgcgctgg

SEQ ID NO: 1929 - DNA, 20 bp, synthetic construct
  source 1..20: mol_type = other DNA
gaggagcgggcggcgcgctg

SEQ ID NO: 1930 - DNA, 20 bp, synthetic construct
  source 1..20: mol_type = other DNA
tgaggagcgggcggcgcgct

SEQ ID NO: 1931 - DNA, 20 bp, synthetic construct
  source 1..20: mol_type = other DNA
gtgaggagcgggcggcgcgc

SEQ ID NO: 1932 - DNA, 20 bp, synthetic construct
  source 1..20: mol_type = other DNA
cgtgaggagcgggcggcgcg

SEQ ID NO: 1933 - DNA, 20 bp, synthetic construct
  source 1..20: mol_type = other DNA
acgtgaggagcgggcggcgc

SEQ ID NO: 1934 - DNA, 20 bp, synthetic construct
  source 1..20: mol_type = other DNA
cacgtgaggagcgggcggcg

SEQ ID NO: 1935 - DNA, 20 bp, synthetic construct
  source 1..20: mol_type = other DNA
acacgtgaggagcgggcggc

SEQ ID NO: 1936 - DNA, 20 bp, synthetic construct
  source 1..20: mol_type = other DNA
gacacgtgaggagcgggcgg

SEQ ID NO: 1937 - DNA, 20 bp, synthetic construct
  source 1..20: mol_type = other DNA
ggacacgtgaggagcgggcg

SEQ ID NO: 1938 - DNA, 20 bp, synthetic construct
  source 1..20: mol_type = other DNA
gggacacgtgaggagcgggc

SEQ ID NO: 1939 - DNA, 20 bp, synthetic construct
  source 1..20: mol_type = other DNA
agggacacgtgaggagcggg

SEQ ID NO: 1940 - DNA, 20 bp, synthetic construct
  source 1..20: mol_type = other DNA
gagggacacgtgaggagcgg

SEQ ID NO: 1941 - DNA, 20 bp, synthetic construct
  source 1..20: mol_type = other DNA
ggagggacacgtgaggagcg

SEQ ID NO: 1942 - DNA, 20 bp, synthetic construct
  source 1..20: mol_type = other DNA
gggagggacacgtgaggagc

SEQ ID NO: 1943 - DNA, 20 bp, synthetic construct
  source 1..20: mol_type = other DNA
cgggagggacacgtgaggag

SEQ ID NO: 1944 - DNA, 20 bp, synthetic construct
  source 1..20: mol_type = other DNA
ccgggagggacacgtgagga

SEQ ID NO: 1945 - DNA, 20 bp, synthetic construct
  source 1..20: mol_type = other DNA
gccgggagggacacgtgagg

SEQ ID NO: 1946 - DNA, 20 bp, synthetic construct
  source 1..20: mol_type = other DNA
ggccgggagggacacgtgag

SEQ ID NO: 1947 - DNA, 20 bp, synthetic construct
  source 1..20: mol_type = other DNA
gggccgggagggacacgtga

SEQ ID NO: 1948 - DNA, 20 bp, synthetic construct
  source 1..20: mol_type = other DNA
ggggccgggagggacacgtg

SEQ ID NO: 1949 - DNA, 20 bp, synthetic construct
  source 1..20: mol_type = other DNA
cggggccgggagggacacgt

SEQ ID NO: 1950 - DNA, 20 bp, synthetic construct
  source 1..20: mol_type = other DNA
ccggggccgggagggacacg

SEQ ID NO: 1951 - DNA, 20 bp, synthetic construct
  source 1..20: mol_type = other DNA
cccggggccgggagggacac

SEQ ID NO: 1952 - DNA, 20 bp, synthetic construct
  source 1..20: mol_type = other DNA
ccccggggccgggagggaca

SEQ ID NO: 1953 - DNA, 20 bp, synthetic construct
  source 1..20: mol_type = other DNA
gccccggggccgggagggac

SEQ ID NO: 1954 - DNA, 20 bp, synthetic construct
  source 1..20: mol_type = other DNA
ggccccggggccgggaggga

SEQ ID NO: 1955 - DNA, 20 bp, synthetic construct
  source 1..20: mol_type = other DNA
tggccccggggccgggaggg

SEQ ID NO: 1956 - DNA, 20 bp, synthetic construct
  source 1..20: mol_type = other DNA
gtggccccggggccgggagg

SEQ ID NO: 1957 - DNA, 20 bp, synthetic construct
  source 1..20: mol_type = other DNA
ggtggccccggggccgggag

SEQ ID NO: 1958 - DNA, 20 bp, synthetic construct
  source 1..20: mol_type = other DNA
aggtggccccggggccggga

SEQ ID NO: 1959 - DNA, 20 bp, synthetic construct
  source 1..20: mol_type = other DNA
gaggtggccccggggccggg

SEQ ID NO: 1960 - DNA, 20 bp, synthetic construct
  source 1..20: mol_type = other DNA
tgaggtggccccggggccgg

SEQ ID NO: 1961 - DNA, 20 bp, synthetic construct
  source 1..20: mol_type = other DNA
gtgaggtggccccggggccg

SEQ ID NO: 1962 - DNA, 20 bp, synthetic construct
  source 1..20: mol_type = other DNA
cgtgaggtggccccggggcc

SEQ ID NO: 1963 - DNA, 20 bp, synthetic construct
  source 1..20: mol_type = other DNA
acgtgaggtggccccggggc

SEQ ID NO: 1964 - DNA, 20 bp, synthetic construct
  source 1..20: mol_type = other DNA
aacgtgaggtggccccgggg

SEQ ID NO: 1965 - DNA, 20 bp, synthetic construct
  source 1..20: mol_type = other DNA
gaacgtgaggtggccccggg

SEQ ID NO: 1966 - DNA, 20 bp, synthetic construct
  source 1..20: mol_type = other DNA
agaacgtgaggtggccccgg

SEQ ID NO: 1967 - DNA, 20 bp, synthetic construct
  source 1..20: mol_type = other DNA
cagaacgtgaggtggccccg

SEQ ID NO: 1968 - DNA, 20 bp, synthetic construct
  source 1..20: mol_type = other DNA
gcagaacgtgaggtggcccc

SEQ ID NO: 1969 - DNA, 20 bp, synthetic construct
  source 1..20: mol_type = other DNA
agcagaacgtgaggtggccc

SEQ ID NO: 1970 - DNA, 20 bp, synthetic construct
  source 1..20: mol_type = other DNA
aagcagaacgtgaggtggcc

SEQ ID NO: 1971 - DNA, 20 bp, synthetic construct
  source 1..20: mol_type = other DNA
gaagcagaacgtgaggtggc

SEQ ID NO: 1972 - DNA, 20 bp, synthetic construct
  source 1..20: mol_type = other DNA
ggaagcagaacgtgaggtgg

SEQ ID NO: 1973 - DNA, 20 bp, synthetic construct
  source 1..20: mol_type = other DNA
cggaagcagaacgtgaggtg

SEQ ID NO: 1974 - DNA, 20 bp, synthetic construct
  source 1..20: mol_type = other DNA
acggaagcagaacgtgaggt

SEQ ID NO: 1975 - DNA, 20 bp, synthetic construct
  source 1..20: mol_type = other DNA
gacggaagcagaacgtgagg

SEQ ID NO: 1976 - DNA, 20 bp, synthetic construct
  source 1..20: mol_type = other DNA
agacggaagcagaacgtgag

SEQ ID NO: 1977 - DNA, 20 bp, synthetic construct
  source 1..20: mol_type = other DNA
cagacggaagcagaacgtga

SEQ ID NO: 1978 - DNA, 20 bp, synthetic construct
  source 1..20: mol_type = other DNA
tcagacggaagcagaacgtg

SEQ ID NO: 1979 - DNA, 20 bp, synthetic construct
  source 1..20: mol_type = other DNA
gtcagacggaagcagaacgt

SEQ ID NO: 1980 - DNA, 20 bp, synthetic construct
  source 1..20: mol_type = other DNA
ggtcagacggaagcagaacg

SEQ ID NO: 1981 - DNA, 20 bp, synthetic construct
  source 1..20: mol_type = other DNA
gggtcagacggaagcagaac

SEQ ID NO: 1982 - DNA, 20 bp, synthetic construct
  source 1..20: mol_type = other DNA
ggggtcagacggaagcagaa

SEQ ID NO: 1983 - DNA, 20 bp, synthetic construct
  source 1..20: mol_type = other DNA
aggggtcagacggaagcaga

SEQ ID NO: 1984 - DNA, 20 bp, synthetic construct
  source 1..20: mol_type = other DNA
gaggggtcagacggaagcag

SEQ ID NO: 1985 - DNA, 20 bp, synthetic construct
  source 1..20: mol_type = other DNA
ggaggggtcagacggaagca

SEQ ID NO: 1986 - DNA, 20 bp, synthetic construct
  source 1..20: mol_type = other DNA
cggaggggtcagacggaagc

SEQ ID NO: 1987 - DNA, 20 bp, synthetic construct
  source 1..20: mol_type = other DNA
tcggaggggtcagacggaag

SEQ ID NO: 1988 - DNA, 20 bp, synthetic construct
  source 1..20: mol_type = other DNA
gtcggaggggtcagacggaa

SEQ ID NO: 1989 - DNA, 20 bp, synthetic construct
  source 1..20: mol_type = other DNA
agtcggaggggtcagacgga

SEQ ID NO: 1990 - DNA, 20 bp, synthetic construct
  source 1..20: mol_type = other DNA
aagtcggaggggtcagacgg

SEQ ID NO: 1991 - DNA, 20 bp, synthetic construct
  source 1..20: mol_type = other DNA
gaagtcggaggggtcagacg

SEQ ID NO: 1992 - DNA, 20 bp, synthetic construct
  source 1..20: mol_type = other DNA
ggaagtcggaggggtcagac

SEQ ID NO: 1993 - DNA, 20 bp, synthetic construct
  source 1..20: mol_type = other DNA
cggaagtcggaggggtcaga

SEQ ID NO: 1994 - DNA, 20 bp, synthetic construct
  source 1..20: mol_type = other DNA
ccggaagtcggaggggtcag

SEQ ID NO: 1995 - DNA, 20 bp, synthetic construct
  source 1..20: mol_type = other DNA
accggaagtcggaggggtca

SEQ ID NO: 1996 - DNA, 20 bp, synthetic construct
  source 1..20: mol_type = other DNA
taccggaagtcggaggggtc

SEQ ID NO: 1997 - DNA, 20 bp, synthetic construct
  source 1..20: mol_type = other DNA
ttaccggaagtcggaggggt

SEQ ID NO: 1998 - DNA, 20 bp, synthetic construct
  source 1..20: mol_type = other DNA
tttaccggaagtcggagggg

SEQ ID NO: 1999 - DNA, 20 bp, synthetic construct
  source 1..20: mol_type = other DNA
ctttaccggaagtcggaggg

SEQ ID NO: 2000 - DNA, 20 bp, synthetic construct
  source 1..20: mol_type = other DNA
tctttaccggaagtcggagg

SEQ ID NO: 2001 - DNA, 20 bp, synthetic construct
  source 1..20: mol_type = other DNA
ctctttaccggaagtcggag

SEQ ID NO: 2002 - DNA, 20 bp, synthetic construct
  source 1..20: mol_type = other DNA
actctttaccggaagtcgga

SEQ ID NO: 2003 - DNA, 20 bp, synthetic construct
  source 1..20: mol_type = other DNA
gactctttaccggaagtcgg

SEQ ID NO: 2004 - DNA, 20 bp, synthetic construct
  source 1..20: mol_type = other DNA
ggactctttaccggaagtcg

SEQ ID NO: 2005 - DNA, 20 bp, synthetic construct
  source 1..20: mol_type = other DNA
gggactctttaccggaagtc

SEQ ID NO: 2006 - DNA, 20 bp, synthetic construct
  source 1..20: mol_type = other DNA
agggactctttaccggaagt

SEQ ID NO: 2007 - DNA, 20 bp, synthetic construct
  source 1..20: mol_type = other DNA
tagggactctttaccggaag

SEQ ID NO: 2008 - DNA, 20 bp, synthetic construct
  source 1..20: mol_type = other DNA
atagggactctttaccggaa

SEQ ID NO: 2009 - DNA, 20 bp, synthetic construct
  source 1..20: mol_type = other DNA
gatagggactctttaccgga

SEQ ID NO: 2010 - DNA, 20 bp, synthetic construct
  source 1..20: mol_type = other DNA
ggatagggactctttaccgg

SEQ ID NO: 2011 - DNA, 20 bp, synthetic construct
  source 1..20: mol_type = other DNA
cggatagggactctttaccg

SEQ ID NO: 2012 - DNA, 20 bp, synthetic construct
  source 1..20: mol_type = other DNA
gcggatagggactctttacc

SEQ ID NO: 2013 - DNA, 20 bp, synthetic construct
  source 1..20: mol_type = other DNA
tgcggatagggactctttac

SEQ ID NO: 2014 - DNA, 20 bp, synthetic construct
  source 1..20: mol_type = other DNA
gtgcggatagggactcttta

SEQ ID NO: 2015 - DNA, 20 bp, synthetic construct
  source 1..20: mol_type = other DNA
ggtgcggatagggactcttt

SEQ ID NO: 2016 - DNA, 20 bp, synthetic construct
  source 1..20: mol_type = other DNA
aggtgcggatagggactctt

SEQ ID NO: 2017 - DNA, 20 bp, synthetic construct
  source 1..20: mol_type = other DNA
gaggtgcggatagggactct

SEQ ID NO: 2018 - DNA, 20 bp, synthetic construct
  source 1..20: mol_type = other DNA
ggaggtgcggatagggactc

SEQ ID NO: 2019 - DNA, 20 bp, synthetic construct
  source 1..20: mol_type = other DNA
cggaggtgcggatagggact

SEQ ID NO: 2020 - DNA, 20 bp, synthetic construct
  source 1..20: mol_type = other DNA
gcggaggtgcggatagggac

SEQ ID NO: 2021 - DNA, 20 bp, synthetic construct
  source 1..20: mol_type = other DNA
agcggaggtgcggataggga

SEQ ID NO: 2022 - DNA, 20 bp, synthetic construct
  source 1..20: mol_type = other DNA
gagcggaggtgcggataggg

SEQ ID NO: 2023 - DNA, 20 bp, synthetic construct
  source 1..20: mol_type = other DNA
ggagcggaggtgcggatagg

SEQ ID NO: 2024 - DNA, 20 bp, synthetic construct
  source 1..20: mol_type = other DNA
gggagcggaggtgcggatag

SEQ ID NO: 2025 - DNA, 20 bp, synthetic construct
  source 1..20: mol_type = other DNA
tgggagcggaggtgcggata

SEQ ID NO: 2026 - DNA, 20 bp, synthetic construct
  source 1..20: mol_type = other DNA
gtgggagcggaggtgcggat

SEQ ID NO: 2027 - DNA, 20 bp, synthetic construct
  source 1..20: mol_type = other DNA
ggtgggagcggaggtgcgga

SEQ ID NO: 2028 - DNA, 20 bp, synthetic construct
  source 1..20: mol_type = other DNA
gggtgggagcggaggtgcgg

SEQ ID NO: 2029 - DNA, 20 bp, synthetic construct
  source 1..20: mol_type = other DNA
cgggtgggagcggaggtgcg

SEQ ID NO: 2030 - DNA, 20 bp, synthetic construct
  source 1..20: mol_type = other DNA
ccgggtgggagcggaggtgc

SEQ ID NO: 2031 - DNA, 20 bp, synthetic construct
  source 1..20: mol_type = other DNA
gccgggtgggagcggaggtg

SEQ ID NO: 2032 - DNA, 20 bp, synthetic construct
  source 1..20: mol_type = other DNA
cgccgggtgggagcggaggt

SEQ ID NO: 2033 - DNA, 20 bp, synthetic construct
  source 1..20: mol_type = other DNA
gcgccgggtgggagcggagg

SEQ ID NO: 2034 - DNA, 20 bp, synthetic construct
  source 1..20: mol_type = other DNA
ggcgccgggtgggagcggag

SEQ ID NO: 2035 - DNA, 20 bp, synthetic construct
  source 1..20: mol_type = other DNA
aggcgccgggtgggagcgga

SEQ ID NO: 2036 - DNA, 20 bp, synthetic construct
  source 1..20: mol_type = other DNA
gaggcgccgggtgggagcgg

SEQ ID NO: 2037 - DNA, 20 bp, synthetic construct
  source 1..20: mol_type = other DNA
cgaggcgccgggtgggagcg

SEQ ID NO: 2038 - DNA, 20 bp, synthetic construct
  source 1..20: mol_type = other DNA
ccgaggcgccgggtgggagc

SEQ ID NO: 2039 - DNA, 20 bp, synthetic construct
  source 1..20: mol_type = other DNA
gccgaggcgccgggtgggag

SEQ ID NO: 2040 - DNA, 20 bp, synthetic construct
  source 1..20: mol_type = other DNA
cgccgaggcgccgggtggga

SEQ ID NO: 2041 - DNA, 20 bp, synthetic construct
  source 1..20: mol_type = other DNA
gcgccgaggcgccgggtggg

SEQ ID NO: 2042 - DNA, 20 bp, synthetic construct
  source 1..20: mol_type = other DNA
cgcgccgaggcgccgggtgg

SEQ ID NO: 2043 - DNA, 20 bp, synthetic construct
  source 1..20: mol_type = other DNA
gcgcgccgaggcgccgggtg

SEQ ID NO: 2044 - DNA, 20 bp, synthetic construct
  source 1..20: mol_type = other DNA
ggcgcgccgaggcgccgggt

SEQ ID NO: 2045 - DNA, 20 bp, synthetic construct
  source 1..20: mol_type = other DNA
gggcgcgccgaggcgccggg

SEQ ID NO: 2046 - DNA, 20 bp, synthetic construct
  source 1..20: mol_type = other DNA
cgggcgcgccgaggcgccgg

SEQ ID NO: 2047 - DNA, 20 bp, synthetic construct
  source 1..20: mol_type = other DNA
gcgggcgcgccgaggcgccg

SEQ ID NO: 2048 - DNA, 20 bp, synthetic construct
  source 1..20: mol_type = other DNA
ggcgggcgcgccgaggcgcc

SEQ ID NO: 2049 - DNA, 20 bp, synthetic construct
  source 1..20: mol_type = other DNA
gggcgggcgcgccgaggcgc

SEQ ID NO: 2050 - DNA, 20 bp, synthetic construct
  source 1..20: mol_type = other DNA
agggcgggcgcgccgaggcg

SEQ ID NO: 2051 - DNA, 20 bp, synthetic construct
  source 1..20: mol_type = other DNA
gagggcgggcgcgccgaggc

SEQ ID NO: 2052 - DNA, 20 bp, synthetic construct
  source 1..20: mol_type = other DNA
ggagggcgggcgcgccgagg

SEQ ID NO: 2053 - DNA, 20 bp, synthetic construct
  source 1..20: mol_type = other DNA
cggagggcgggcgcgccgag

SEQ ID NO: 2054 - DNA, 20 bp, synthetic construct
  source 1..20: mol_type = other DNA
tcggagggcgggcgcgccga

SEQ ID NO: 2055 - DNA, 20 bp, synthetic construct
  source 1..20: mol_type = other DNA
atcggagggcgggcgcgccg

SEQ ID NO: 2056 - DNA, 20 bp, synthetic construct
  source 1..20: mol_type = other DNA
catcggagggcgggcgcgcc

SEQ ID NO: 2057 - DNA, 20 bp, synthetic construct
  source 1..20: mol_type = other DNA
gcatcggagggcgggcgcgc

SEQ ID NO: 2058 - DNA, 20 bp, synthetic construct
  source 1..20: mol_type = other DNA
cgcatcggagggcgggcgcg

SEQ ID NO: 2059 - DNA, 20 bp, synthetic construct
  source 1..20: mol_type = other DNA
gcgcatcggagggcgggcgc

SEQ ID NO: 2060 - DNA, 20 bp, synthetic construct
  source 1..20: mol_type = other DNA
agcgcatcggagggcgggcg

SEQ ID NO: 2061 - DNA, 20 bp, synthetic construct
  source 1..20: mol_type = other DNA
gagcgcatcggagggcgggc

SEQ ID NO: 2062 - DNA, 20 bp, synthetic construct
  source 1..20: mol_type = other DNA
tgagcgcatcggagggcggg

SEQ ID NO: 2063 - DNA, 20 bp, synthetic construct
  source 1..20: mol_type = other DNA
ctgagcgcatcggagggcgg

SEQ ID NO: 2064 - DNA, 20 bp, synthetic construct
  source 1..20: mol_type = other DNA
gctgagcgcatcggagggcg

SEQ ID NO: 2065 - DNA, 20 bp, synthetic construct
  source 1..20: mol_type = other DNA
cgctgagcgcatcggagggc

SEQ ID NO: 2066 - DNA, 20 bp, synthetic construct
  source 1..20: mol_type = other DNA
ccgctgagcgcatcggaggg

SEQ ID NO: 2067 - DNA, 20 bp, synthetic construct
  source 1..20: mol_type = other DNA
gccgctgagcgcatcggagg

SEQ ID NO: 2068 - DNA, 20 bp, synthetic construct
  source 1..20: mol_type = other DNA
ggccgctgagcgcatcggag

SEQ ID NO: 2069 - DNA, 20 bp, synthetic construct
  source 1..20: mol_type = other DNA
cggccgctgagcgcatcgga

SEQ ID NO: 2070 - DNA, 20 bp, synthetic construct
  source 1..20: mol_type = other DNA
gcggccgctgagcgcatcgg

SEQ ID NO: 2071 - DNA, 20 bp, synthetic construct
  source 1..20: mol_type = other DNA
tgcggccgctgagcgcatcg

SEQ ID NO: 2072 - DNA, 20 bp, synthetic construct
  source 1..20: mol_type = other DNA
ctgcggccgctgagcgcatc

SEQ ID NO: 2073 - DNA, 20 bp, synthetic construct
  source 1..20: mol_type = other DNA
gctgcggccgctgagcgcat

SEQ ID NO: 2074 - DNA, 20 bp, synthetic construct
  source 1..20: mol_type = other DNA
agctgcggccgctgagcgca

SEQ ID NO: 2075 - DNA, 20 bp, synthetic construct
  source 1..20: mol_type = other DNA
gagctgcggccgctgagcgc

SEQ ID NO: 2076 - DNA, 20 bp, synthetic construct
  source 1..20: mol_type = other DNA
ggagctgcggccgctgagcg

SEQ ID NO: 2077 - DNA, 20 bp, synthetic construct
  source 1..20: mol_type = other DNA
aggagctgcggccgctgagc

SEQ ID NO: 2078 - DNA, 20 bp, synthetic construct
  source 1..20: mol_type = other DNA
gaggagctgcggccgctgag

SEQ ID NO: 2079 - DNA, 20 bp, synthetic construct
  source 1..20: mol_type = other DNA
cgaggagctgcggccgctga

SEQ ID NO: 2080 - DNA, 20 bp, synthetic construct
  source 1..20: mol_type = other DNA
ccgaggagctgcggccgctg

SEQ ID NO: 2081 - DNA, 20 bp, synthetic construct
  source 1..20: mol_type = other DNA
tccgaggagctgcggccgct

SEQ ID NO: 2082 - DNA, 20 bp, synthetic construct
  source 1..20: mol_type = other DNA
ctccgaggagctgcggccgc

SEQ ID NO: 2083 - DNA, 20 bp, synthetic construct
  source 1..20: mol_type = other DNA
actccgaggagctgcggccg

SEQ ID NO: 2084 - DNA, 20 bp, synthetic construct
  source 1..20: mol_type = other DNA
gactccgaggagctgcggcc

SEQ ID NO: 2085 - DNA, 20 bp, synthetic construct
  source 1..20: mol_type = other DNA
ggactccgaggagctgcggc

SEQ ID NO: 2086 - DNA, 20 bp, synthetic construct
  source 1..20: mol_type = other DNA
gggactccgaggagctgcgg

SEQ ID NO: 2087 - DNA, 20 bp, synthetic construct
  source 1..20: mol_type = other DNA
cgggactccgaggagctgcg

SEQ ID NO: 2088 - DNA, 20 bp, synthetic construct
  source 1..20: mol_type = other DNA
gcgggactccgaggagctgc

SEQ ID NO: 2089 - DNA, 20 bp, synthetic construct
  source 1..20: mol_type = other DNA
cgcgggactccgaggagctg

SEQ ID NO: 2090 - DNA, 20 bp, synthetic construct
  source 1..20: mol_type = other DNA
ccgcgggactccgaggagct

SEQ ID NO: 2091 - DNA, 20 bp, synthetic construct
  source 1..20: mol_type = other DNA
accgcgggactccgaggagc

SEQ ID NO: 2092 - DNA, 20 bp, synthetic construct
  source 1..20: mol_type = other DNA
caccgcgggactccgaggag

SEQ ID NO: 2093 - DNA, 20 bp, synthetic construct
  source 1..20: mol_type = other DNA
ccaccgcgggactccgagga

SEQ ID NO: 2094 - DNA, 20 bp, synthetic construct
  source 1..20: mol_type = other DNA
gccaccgcgggactccgagg

SEQ ID NO: 2095 - DNA, 20 bp, synthetic construct
  source 1..20: mol_type = other DNA
ggccaccgcgggactccgag

SEQ ID NO: 2096 - DNA, 20 bp, synthetic construct
  source 1..20: mol_type = other DNA
tggccaccgcgggactccga

SEQ ID NO: 2097 - DNA, 20 bp, synthetic construct
  source 1..20: mol_type = other DNA
gtggccaccgcgggactccg

SEQ ID NO: 2098 - DNA, 20 bp, synthetic construct
  source 1..20: mol_type = other DNA
ggtggccaccgcgggactcc

SEQ ID NO: 2099 - DNA, 20 bp, synthetic construct
  source 1..20: mol_type = other DNA
cggtggccaccgcgggactc

SEQ ID NO: 2100 - DNA, 20 bp, synthetic construct
  source 1..20: mol_type = other DNA
tcggtggccaccgcgggact

SEQ ID NO: 2101 - DNA, 20 bp, synthetic construct
  source 1..20: mol_type = other DNA
ctcggtggccaccgcgggac

SEQ ID NO: 2102 - DNA, 20 bp, synthetic construct
  source 1..20: mol_type = other DNA
actcggtggccaccgcggga

SEQ ID NO: 2103 - DNA, 20 bp, synthetic construct
  source 1..20: mol_type = other DNA
gactcggtggccaccgcggg

SEQ ID NO: 2104 - DNA, 20 bp, synthetic construct
  source 1..20: mol_type = other DNA
agactcggtggccaccgcgg

SEQ ID NO: 2105 - DNA, 20 bp, synthetic construct
  source 1..20: mol_type = other DNA
gagactcggtggccaccgcg

SEQ ID NO: 2106 - DNA, 20 bp, synthetic construct
  source 1..20: mol_type = other DNA
cgagactcggtggccaccgc

SEQ ID NO: 2107 - DNA, 20 bp, synthetic construct
  source 1..20: mol_type = other DNA
gcgagactcggtggccaccg

SEQ ID NO: 2108 - DNA, 20 bp, synthetic construct
  source 1..20: mol_type = other DNA
ggcgagactcggtggccacc

SEQ ID NO: 2109 - DNA, 20 bp, synthetic construct
  source 1..20: mol_type = other DNA
cggcgagactcggtggccac

SEQ ID NO: 2110 - DNA, 20 bp, synthetic construct
  source 1..20: mol_type = other DNA
gcggcgagactcggtggcca

SEQ ID NO: 2111 - DNA, 20 bp, synthetic construct
  source 1..20: mol_type = other DNA
agcggcgagactcggtggcc

SEQ ID NO: 2112 - DNA, 20 bp, synthetic construct
  source 1..20: mol_type = other DNA
aagcggcgagactcggtggc

SEQ ID NO: 2113 - DNA, 20 bp, synthetic construct
  source 1..20: mol_type = other DNA
gaagcggcgagactcggtgg

SEQ ID NO: 2114 - DNA, 20 bp, synthetic construct
  source 1..20: mol_type = other DNA
cgaagcggcgagactcggtg

SEQ ID NO: 2115 - DNA, 20 bp, synthetic construct
  source 1..20: mol_type = other DNA
gcgaagcggcgagactcggt

SEQ ID NO: 2116 - DNA, 20 bp, synthetic construct
  source 1..20: mol_type = other DNA
ggcgaagcggcgagactcgg

SEQ ID NO: 2117 - DNA, 20 bp, synthetic construct
  source 1..20: mol_type = other DNA
cggcgaagcggcgagactcg

SEQ ID NO: 2118 - DNA, 20 bp, synthetic construct
  source 1..20: mol_type = other DNA
gcggcgaagcggcgagactc

SEQ ID NO: 2119 - DNA, 20 bp, synthetic construct
  source 1..20: mol_type = other DNA
tgcggcgaagcggcgagact

SEQ ID NO: 2120 - DNA, 20 bp, synthetic construct
  source 1..20: mol_type = other DNA
ctgcggcgaagcggcgagac

SEQ ID NO: 2121 - DNA, 20 bp, synthetic construct
  source 1..20: mol_type = other DNA
gctgcggcgaagcggcgaga

SEQ ID NO: 2122 - DNA, 20 bp, synthetic construct
  source 1..20: mol_type = other DNA
ggctgcggcgaagcggcgag

SEQ ID NO: 2123 - DNA, 20 bp, synthetic construct
  source 1..20: mol_type = other DNA
tggctgcggcgaagcggcga

SEQ ID NO: 2124 - DNA, 20 bp, synthetic construct
  source 1..20: mol_type = other DNA
ctggctgcggcgaagcggcg

SEQ ID NO: 2125 - DNA, 20 bp, synthetic construct
  source 1..20: mol_type = other DNA
cctggctgcggcgaagcggc

SEQ ID NO: 2126 - DNA, 20 bp, synthetic construct
  source 1..20: mol_type = other DNA
acctggctgcggcgaagcgg

SEQ ID NO: 2127 - DNA, 20 bp, synthetic construct
  source 1..20: mol_type = other DNA
cacctggctgcggcgaagcg

SEQ ID NO: 2128 - DNA, 20 bp, synthetic construct
  source 1..20: mol_type = other DNA
ccacctggctgcggcgaagc

SEQ ID NO: 2129 - DNA, 20 bp, synthetic construct
  source 1..20: mol_type = other DNA
gccacctggctgcggcgaag

SEQ ID NO: 2130 - DNA, 20 bp, synthetic construct
  source 1..20: mol_type = other DNA
ggccacctggctgcggcgaa

SEQ ID NO: 2131 - DNA, 20 bp, synthetic construct
  source 1..20: mol_type = other DNA
gggccacctggctgcggcga

SEQ ID NO: 2132 - DNA, 20 bp, synthetic construct
  source 1..20: mol_type = other DNA
cgggccacctggctgcggcg

SEQ ID NO: 2133 - DNA, 20 bp, synthetic construct
  source 1..20: mol_type = other DNA
ccgggccacctggctgcggc

SEQ ID NO: 2134 - DNA, 20 bp, synthetic construct
  source 1..20: mol_type = other DNA
cccgggccacctggctgcgg

SEQ ID NO: 2135 - DNA, 20 bp, synthetic construct
  source 1..20: mol_type = other DNA
acccgggccacctggctgcg

SEQ ID NO: 2136 - DNA, 20 bp, synthetic construct
  source 1..20: mol_type = other DNA
cacccgggccacctggctgc

SEQ ID NO: 2137 - DNA, 20 bp, synthetic construct
  source 1..20: mol_type = other DNA
ccacccgggccacctggctg

SEQ ID NO: 2138 - DNA, 20 bp, synthetic construct
  source 1..20: mol_type = other DNA
gccacccgggccacctggct

SEQ ID NO: 2139 - DNA, 20 bp, synthetic construct
  source 1..20: mol_type = other DNA
cgccacccgggccacctggc

SEQ ID NO: 2140 - DNA, 20 bp, synthetic construct
  source 1..20: mol_type = other DNA
gcgccacccgggccacctgg

SEQ ID NO: 2141 - DNA, 20 bp, synthetic construct
  source 1..20: mol_type = other DNA
agcgccacccgggccacctg

SEQ ID NO: 2142 - DNA, 20 bp, synthetic construct
  source 1..20: mol_type = other DNA
gagcgccacccgggccacct

SEQ ID NO: 2143 - DNA, 20 bp, synthetic construct
  source 1..20: mol_type = other DNA
cgagcgccacccgggccacc

SEQ ID NO: 2144 - DNA, 20 bp, synthetic construct
  source 1..20: mol_type = other DNA
gcgagcgccacccgggccac

SEQ ID NO: 2145 - DNA, 20 bp, synthetic construct
  source 1..20: mol_type = other DNA
agcgagcgccacccgggcca

SEQ ID NO: 2146 - DNA, 20 bp, synthetic construct
  source 1..20: mol_type = other DNA
gagcgagcgccacccgggcc

SEQ ID NO: 2147 - DNA, 20 bp, synthetic construct
  source 1..20: mol_type = other DNA
ggagcgagcgccacccgggc

SEQ ID NO: 2148 - DNA, 20 bp, synthetic construct
  source 1..20: mol_type = other DNA
tggagcgagcgccacccggg

SEQ ID NO: 2149 - DNA, 20 bp, synthetic construct
  source 1..20: mol_type = other DNA
ctggagcgagcgccacccgg

SEQ ID NO: 2150 - DNA, 20 bp, synthetic construct
  source 1..20: mol_type = other DNA
gctggagcgagcgccacccg

SEQ ID NO: 2151 - DNA, 20 bp, synthetic construct
  source 1..20: mol_type = other DNA
cgctggagcgagcgccaccc

SEQ ID NO: 2152 - DNA, 20 bp, synthetic construct
  source 1..20: mol_type = other DNA
ccgctggagcgagcgccacc

SEQ ID NO: 2153 - DNA, 20 bp, synthetic construct
  source 1..20: mol_type = other DNA
gccgctggagcgagcgccac

SEQ ID NO: 2154 - DNA, 20 bp, synthetic construct
  source 1..20: mol_type = other DNA
ggccgctggagcgagcgcca

SEQ ID NO: 2155 - DNA, 20 bp, synthetic construct
  source 1..20: mol_type = other DNA
cggccgctggagcgagcgcc

SEQ ID NO: 2156 - DNA, 20 bp, synthetic construct
  source 1..20: mol_type = other DNA
ccggccgctggagcgagcgc

SEQ ID NO: 2157 - DNA, 20 bp, synthetic construct
  source 1..20: mol_type = other DNA
gccggccgctggagcgagcg

SEQ ID NO: 2158 - DNA, 20 bp, synthetic construct
  source 1..20: mol_type = other DNA
cgccggccgctggagcgagc

SEQ ID NO: 2159 - DNA, 20 bp, synthetic construct
  source 1..20: mol_type = other DNA
gcgccggccgctggagcgag

SEQ ID NO: 2160 - DNA, 20 bp, synthetic construct
  source 1..20: mol_type = other DNA
cgcgccggccgctggagcga

SEQ ID NO: 2161 - DNA, 20 bp, synthetic construct
  source 1..20: mol_type = other DNA
ccgcgccggccgctggagcg

SEQ ID NO: 2162 - DNA, 20 bp, synthetic construct
  source 1..20: mol_type = other DNA
gccgcgccggccgctggagc

SEQ ID NO: 2163 - DNA, 20 bp, synthetic construct
  source 1..20: mol_type = other DNA
cgccgcgccggccgctggag

SEQ ID NO: 2164 - DNA, 20 bp, synthetic construct
  source 1..20: mol_type = other DNA
ccgccgcgccggccgctgga

SEQ ID NO: 2165 - DNA, 20 bp, synthetic construct
  source 1..20: mol_type = other DNA
tccgccgcgccggccgctgg

SEQ ID NO: 2166 - DNA, 20 bp, synthetic construct
  source 1..20: mol_type = other DNA
ctccgccgcgccggccgctg

SEQ ID NO: 2167 - DNA, 20 bp, synthetic construct
  source 1..20: mol_type = other DNA
gctccgccgcgccggccgct

SEQ ID NO: 2168 - DNA, 20 bp, synthetic construct
  source 1..20: mol_type = other DNA
cgctccgccgcgccggccgc

SEQ ID NO: 2169 - DNA, 20 bp, synthetic construct
  source 1..20: mol_type = other DNA
ccgctccgccgcgccggccg

SEQ ID NO: 2170 - DNA, 20 bp, synthetic construct
  source 1..20: mol_type = other DNA
cccgctccgccgcgccggcc

SEQ ID NO: 2171 - DNA, 20 bp, synthetic construct
  source 1..20: mol_type = other DNA
gcccgctccgccgcgccggc

SEQ ID NO: 2172 - DNA, 20 bp, synthetic construct
  source 1..20: mol_type = other DNA
cgcccgctccgccgcgccgg

SEQ ID NO: 2173 - DNA, 20 bp, synthetic construct
  source 1..20: mol_type = other DNA
ccgcccgctccgccgcgccg

SEQ ID NO: 2174 - DNA, 20 bp, synthetic construct
  source 1..20: mol_type = other DNA
cccgcccgctccgccgcgcc

SEQ ID NO: 2175 - DNA, 20 bp, synthetic construct
  source 1..20: mol_type = other DNA
ccccgcccgctccgccgcgc

SEQ ID NO: 2176 - DNA, 20 bp, synthetic construct
  source 1..20: mol_type = other DNA
gccccgcccgctccgccgcg

SEQ ID NO: 2177 - DNA, 20 bp, synthetic construct
  source 1..20: mol_type = other DNA
cgccccgcccgctccgccgc

SEQ ID NO: 2178 - DNA, 20 bp, synthetic construct
  source 1..20: mol_type = other DNA
ccgccccgcccgctccgccg

SEQ ID NO: 2179 - DNA, 20 bp, synthetic construct
  source 1..20: mol_type = other DNA
gccgccccgcccgctccgcc

SEQ ID NO: 2180 - DNA, 20 bp, synthetic construct
  source 1..20: mol_type = other DNA
cgccgccccgcccgctccgc

SEQ ID NO: 2181 - DNA, 20 bp, synthetic construct
  source 1..20: mol_type = other DNA
ccgccgccccgcccgctccg

SEQ ID NO: 2182 - DNA, 20 bp, synthetic construct
  source 1..20: mol_type = other DNA
accgccgccccgcccgctcc

SEQ ID NO: 2183 - DNA, 20 bp, synthetic construct
  source 1..20: mol_type = other DNA
caccgccgccccgcccgctc

SEQ ID NO: 2184 - DNA, 20 bp, synthetic construct
  source 1..20: mol_type = other DNA
ccaccgccgccccgcccgct

SEQ ID NO: 2185 - DNA, 20 bp, synthetic construct
  source 1..20: mol_type = other DNA
gccaccgccgccccgcccgc

SEQ ID NO: 2186 - DNA, 20 bp, synthetic construct
  source 1..20: mol_type = other DNA
cgccaccgccgccccgcccg

SEQ ID NO: 2187 - DNA, 20 bp, synthetic construct
  source 1..20: mol_type = other DNA
gcgccaccgccgccccgccc

SEQ ID NO: 2188 - DNA, 20 bp, synthetic construct
  source 1..20: mol_type = other DNA
cgcgccaccgccgccccgcc

SEQ ID NO: 2189 - DNA, 20 bp, synthetic construct
  source 1..20: mol_type = other DNA
ccgcgccaccgccgccccgc

SEQ ID NO: 2190 - DNA, 20 bp, synthetic construct
  source 1..20: mol_type = other DNA
gccgcgccaccgccgccccg

SEQ ID NO: 2191 - DNA, 20 bp, synthetic construct
  source 1..20: mol_type = other DNA
ggccgcgccaccgccgcccc

SEQ ID NO: 2192 - DNA, 20 bp, synthetic construct
  source 1..20: mol_type = other DNA
gggccgcgccaccgccgccc

SEQ ID NO: 2193 - DNA, 20 bp, synthetic construct
  source 1..20: mol_type = other DNA
ggggccgcgccaccgccgcc

SEQ ID NO: 2194 - DNA, 20 bp, synthetic construct
  source 1..20: mol_type = other DNA
cggggccgcgccaccgccgc

SEQ ID NO: 2195 - DNA, 20 bp, synthetic construct
  source 1..20: mol_type = other DNA
ccggggccgcgccaccgccg

SEQ ID NO: 2196 - DNA, 20 bp, synthetic construct
  source 1..20: mol_type = other DNA
cccggggccgcgccaccgcc

SEQ ID NO: 2197 - DNA, 20 bp, synthetic construct
  source 1..20: mol_type = other DNA
tcccggggccgcgccaccgc

SEQ ID NO: 2198 - DNA, 20 bp, synthetic construct
  source 1..20: mol_type = other DNA
gtcccggggccgcgccaccg

SEQ ID NO: 2199 - DNA, 20 bp, synthetic construct
  source 1..20: mol_type = other DNA
ggtcccggggccgcgccacc

SEQ ID NO: 2200 - DNA, 20 bp, synthetic construct
  source 1..20: mol_type = other DNA
cggtcccggggccgcgccac

SEQ ID NO: 2201 - DNA, 20 bp, synthetic construct
  source 1..20: mol_type = other DNA
acggtcccggggccgcgcca

SEQ ID NO: 2202 - DNA, 20 bp, synthetic construct
  source 1..20: mol_type = other DNA
tacggtcccggggccgcgcc

SEQ ID NO: 2203 - DNA, 20 bp, synthetic construct
  source 1..20: mol_type = other DNA
atacggtcccggggccgcgc

SEQ ID NO: 2204 - DNA, 20 bp, synthetic construct
  source 1..20: mol_type = other DNA
gatacggtcccggggccgcg

SEQ ID NO: 2205 - DNA, 20 bp, synthetic construct
  source 1..20: mol_type = other DNA
ggatacggtcccggggccgc

SEQ ID NO: 2206 - DNA, 20 bp, synthetic construct
  source 1..20: mol_type = other DNA
gggatacggtcccggggccg

SEQ ID NO: 2207 - DNA, 20 bp, synthetic construct
  source 1..20: mol_type = other DNA
agggatacggtcccggggcc

SEQ ID NO: 2208 - DNA, 20 bp, synthetic construct
  source 1..20: mol_type = other DNA
gagggatacggtcccggggc

SEQ ID NO: 2209 - DNA, 20 bp, synthetic construct
  source 1..20: mol_type = other DNA
ggagggatacggtcccgggg

SEQ ID NO: 2210 - DNA, 20 bp, synthetic construct
  source 1..20: mol_type = other DNA
cggagggatacggtcccggg

SEQ ID NO: 2211 - DNA, 20 bp, synthetic construct
  source 1..20: mol_type = other DNA
gcggagggatacggtcccgg

SEQ ID NO: 2212 - DNA, 20 bp, synthetic construct
  source 1..20: mol_type = other DNA
ggcggagggatacggtcccg

SEQ ID NO: 2213 - DNA, 20 bp, synthetic construct
  source 1..20: mol_type = other DNA
cggcggagggatacggtccc

SEQ ID NO: 2214 - DNA, 20 bp, synthetic construct
  source 1..20: mol_type = other DNA
gcggcggagggatacggtcc

SEQ ID NO: 2215 - DNA, 20 bp, synthetic construct
  source 1..20: mol_type = other DNA
ggcggcggagggatacggtc

SEQ ID NO: 2216 - DNA, 20 bp, synthetic construct
  source 1..20: mol_type = other DNA
gggcggcggagggatacggt

SEQ ID NO: 2217 - DNA, 20 bp, synthetic construct
  source 1..20: mol_type = other DNA
ggggcggcggagggatacgg

SEQ ID NO: 2218 - DNA, 20 bp, synthetic construct
  source 1..20: mol_type = other DNA
aggggcggcggagggatacg

SEQ ID NO: 2219 - DNA, 20 bp, synthetic construct
  source 1..20: mol_type = other DNA
gaggggcggcggagggatac

SEQ ID NO: 2220 - DNA, 20 bp, synthetic construct
  source 1..20: mol_type = other DNA
ggaggggcggcggagggata

SEQ ID NO: 2221 - DNA, 20 bp, synthetic construct
  source 1..20: mol_type = other DNA
gggaggggcggcggagggat

SEQ ID NO: 2222 - DNA, 20 bp, synthetic construct
  source 1..20: mol_type = other DNA
ggggaggggcggcggaggga

SEQ ID NO: 2223 - DNA, 20 bp, synthetic construct
  source 1..20: mol_type = other DNA
gggggaggggcggcggaggg

SEQ ID NO: 2224 - DNA, 20 bp, synthetic construct
  source 1..20: mol_type = other DNA
cgggggaggggcggcggagg

SEQ ID NO: 2225 - DNA, 20 bp, synthetic construct
  source 1..20: mol_type = other DNA
gcgggggaggggcggcggag

SEQ ID NO: 2226 - DNA, 20 bp, synthetic construct
  source 1..20: mol_type = other DNA
ggcgggggaggggcggcgga

SEQ ID NO: 2227 - DNA, 20 bp, synthetic construct
  source 1..20: mol_type = other DNA
gggcgggggaggggcggcgg

SEQ ID NO: 2228 - DNA, 20 bp, synthetic construct
  source 1..20: mol_type = other DNA
cgggcgggggaggggcggcg

SEQ ID NO: 2229 - DNA, 20 bp, synthetic construct
  source 1..20: mol_type = other DNA
ccgggcgggggaggggcggc

SEQ ID NO: 2230 - DNA, 20 bp, synthetic construct
  source 1..20: mol_type = other DNA
gccgggcgggggaggggcgg

SEQ ID NO: 2231 - DNA, 20 bp, synthetic construct
  source 1..20: mol_type = other DNA
ggccgggcgggggaggggcg

SEQ ID NO: 2232 - DNA, 20 bp, synthetic construct
  source 1..20: mol_type = other DNA
gggccgggcgggggaggggc

SEQ ID NO: 2233 - DNA, 20 bp, synthetic construct
  source 1..20: mol_type = other DNA
ggggccgggcgggggagggg

SEQ ID NO: 2234 - DNA, 20 bp, synthetic construct
  source 1..20: mol_type = other DNA
cggggccgggcgggggaggg

SEQ ID NO: 2235 - DNA, 20 bp, synthetic construct
  source 1..20: mol_type = other DNA
ccggggccgggcgggggagg

SEQ ID NO: 2236 - DNA, 20 bp, synthetic construct
  source 1..20: mol_type = other DNA
gccggggccgggcgggggag

SEQ ID NO: 2237 - DNA, 20 bp, synthetic construct
  source 1..20: mol_type = other DNA
ggccggggccgggcggggga

SEQ ID NO: 2238 - DNA, 20 bp, synthetic construct
  source 1..20: mol_type = other DNA
gggccggggccgggcggggg

SEQ ID NO: 2239 - DNA, 20 bp, synthetic construct
  source 1..20: mol_type = other DNA
ggggccggggccgggcgggg

SEQ ID NO: 2240 - DNA, 20 bp, synthetic construct
  source 1..20: mol_type = other DNA
gggggccggggccgggcggg

SEQ ID NO: 2241 - DNA, 20 bp, synthetic construct
  source 1..20: mol_type = other DNA
ggggggccggggccgggcgg

SEQ ID NO: 2242 - DNA, 20 bp, synthetic construct
  source 1..20: mol_type = other DNA
aggggggccggggccgggcg

SEQ ID NO: 2243 - DNA, 20 bp, synthetic construct
  source 1..20: mol_type = other DNA
gaggggggccggggccgggc

SEQ ID NO: 2244 - DNA, 20 bp, synthetic construct
  source 1..20: mol_type = other DNA
ggaggggggccggggccggg

SEQ ID NO: 2245 - DNA, 20 bp, synthetic construct
  source 1..20: mol_type = other DNA
gggaggggggccggggccgg

SEQ ID NO: 2246 - DNA, 20 bp, synthetic construct
  source 1..20: mol_type = other DNA
agggaggggggccggggccg

SEQ ID NO: 2247 - DNA, 20 bp, synthetic construct
  source 1..20: mol_type = other DNA
gagggaggggggccggggcc

SEQ ID NO: 2248 - DNA, 20 bp, synthetic construct
  source 1..20: mol_type = other DNA
ggagggaggggggccggggc

SEQ ID NO: 2249 - DNA, 20 bp, synthetic construct
  source 1..20: mol_type = other DNA
gggagggaggggggccgggg

SEQ ID NO: 2250 - DNA, 20 bp, synthetic construct
  source 1..20: mol_type = other DNA
cgggagggaggggggccggg

SEQ ID NO: 2251 - DNA, 20 bp, synthetic construct
  source 1..20: mol_type = other DNA
ccgggagggaggggggccgg

SEQ ID NO: 2252 - DNA, 20 bp, synthetic construct
  source 1..20: mol_type = other DNA
gccgggagggaggggggccg

SEQ ID NO: 2253 - DNA, 20 bp, synthetic construct
  source 1..20: mol_type = other DNA
tgccgggagggaggggggcc

SEQ ID NO: 2254 - DNA, 20 bp, synthetic construct
  source 1..20: mol_type = other DNA
ctgccgggagggaggggggc

SEQ ID NO: 2255 - DNA, 20 bp, synthetic construct
  source 1..20: mol_type = other DNA
tctgccgggagggagggggg

SEQ ID NO: 2256 - DNA, 20 bp, synthetic construct
  source 1..20: mol_type = other DNA
ctctgccgggagggaggggg

SEQ ID NO: 2257 - DNA, 20 bp, synthetic construct
  source 1..20: mol_type = other DNA
gctctgccgggagggagggg

SEQ ID NO: 2258 - DNA, 20 bp, synthetic construct
  source 1..20: mol_type = other DNA
agctctgccgggagggaggg

SEQ ID NO: 2259 - DNA, 20 bp, synthetic construct
  source 1..20: mol_type = other DNA
gagctctgccgggagggagg

SEQ ID NO: 2260 - DNA, 20 bp, synthetic construct
  source 1..20: mol_type = other DNA
cgagctctgccgggagggag

SEQ ID NO: 2261 - DNA, 20 bp, synthetic construct
  source 1..20: mol_type = other DNA
gcgagctctgccgggaggga

SEQ ID NO: 2262 - DNA, 20 bp, synthetic construct
  source 1..20: mol_type = other DNA
ggcgagctctgccgggaggg

SEQ ID NO: 2263 - DNA, 20 bp, synthetic construct
  source 1..20: mol_type = other DNA
aggcgagctctgccgggagg

SEQ ID NO: 2264 - DNA, 20 bp, synthetic construct
  source 1..20: mol_type = other DNA
gaggcgagctctgccgggag

SEQ ID NO: 2265 - DNA, 20 bp, synthetic construct
  source 1..20: mol_type = other DNA
ggaggcgagctctgccggga

SEQ ID NO: 2266 - DNA, 20 bp, synthetic construct
  source 1..20: mol_type = other DNA
gggaggcgagctctgccggg

SEQ ID NO: 2267 - DNA, 20 bp, synthetic construct
  source 1..20: mol_type = other DNA
agggaggcgagctctgccgg

SEQ ID NO: 2268 - DNA, 20 bp, synthetic construct
  source 1..20: mol_type = other DNA
gagggaggcgagctctgccg

SEQ ID NO: 2269 - DNA, 20 bp, synthetic construct
  source 1..20: mol_type = other DNA
ggagggaggcgagctctgcc

SEQ ID NO: 2270 - DNA, 20 bp, synthetic construct
  source 1..20: mol_type = other DNA
cggagggaggcgagctctgc

SEQ ID NO: 2271 - DNA, 20 bp, synthetic construct
  source 1..20: mol_type = other DNA
gcggagggaggcgagctctg

SEQ ID NO: 2272 - DNA, 20 bp, synthetic construct
  source 1..20: mol_type = other DNA
ggcggagggaggcgagctct

SEQ ID NO: 2273 - DNA, 20 bp, synthetic construct
  source 1..20: mol_type = other DNA
aggcggagggaggcgagctc

SEQ ID NO: 2274 - DNA, 20 bp, synthetic construct
  source 1..20: mol_type = other DNA
gaggcggagggaggcgagct

SEQ ID NO: 2275 - DNA, 20 bp, synthetic construct
  source 1..20: mol_type = other DNA
tgaggcggagggaggcgagc

SEQ ID NO: 2276 - DNA, 20 bp, synthetic construct
  source 1..20: mol_type = other DNA
ctgaggcggagggaggcgag

SEQ ID NO: 2277 - DNA, 20 bp, synthetic construct
  source 1..20: mol_type = other DNA
tctgaggcggagggaggcga

SEQ ID NO: 2278 - DNA, 20 bp, synthetic construct
  source 1..20: mol_type = other DNA
gtctgaggcggagggaggcg

SEQ ID NO: 2279 - DNA, 20 bp, synthetic construct
  source 1..20: mol_type = other DNA
agtctgaggcggagggaggc

SEQ ID NO: 2280 - DNA, 20 bp, synthetic construct
  source 1..20: mol_type = other DNA
cagtctgaggcggagggagg

SEQ ID NO: 2281 - DNA, 20 bp, synthetic construct
  source 1..20: mol_type = other DNA
acagtctgaggcggagggag

SEQ ID NO: 2282 - DNA, 20 bp, synthetic construct
  source 1..20: mol_type = other DNA
aacagtctgaggcggaggga

SEQ ID NO: 2283 - DNA, 20 bp, synthetic construct
  source 1..20: mol_type = other DNA
aaacagtctgaggcggaggg

SEQ ID NO: 2284 - DNA, 20 bp, synthetic construct
  source 1..20: mol_type = other DNA
aaaacagtctgaggcggagg

SEQ ID NO: 2285 - DNA, 20 bp, synthetic construct
  source 1..20: mol_type = other DNA
caaaacagtctgaggcggag

SEQ ID NO: 2286 - DNA, 20 bp, synthetic construct
  source 1..20: mol_type = other DNA
ccaaaacagtctgaggcgga

SEQ ID NO: 2287 - DNA, 20 bp, synthetic construct
  source 1..20: mol_type = other DNA
accaaaacagtctgaggcgg

SEQ ID NO: 2288 - DNA, 20 bp, synthetic construct
  source 1..20: mol_type = other DNA
taccaaaacagtctgaggcg

SEQ ID NO: 2289 - DNA, 20 bp, synthetic construct
  source 1..20: mol_type = other DNA
ctaccaaaacagtctgaggc

SEQ ID NO: 2290 - DNA, 20 bp, synthetic construct
  source 1..20: mol_type = other DNA
gctaccaaaacagtctgagg

SEQ ID NO: 2291 - DNA, 20 bp, synthetic construct
  source 1..20: mol_type = other DNA
tgctaccaaaacagtctgag

SEQ ID NO: 2292 - DNA, 20 bp, synthetic construct
  source 1..20: mol_type = other DNA
ttgctaccaaaacagtctga

SEQ ID NO: 2293 - DNA, 20 bp, synthetic construct
  source 1..20: mol_type = other DNA
gttgctaccaaaacagtctg

SEQ ID NO: 2294 - DNA, 20 bp, synthetic construct
  source 1..20: mol_type = other DNA
cgttgctaccaaaacagtct

SEQ ID NO: 2295 - DNA, 20 bp, synthetic construct
  source 1..20: mol_type = other DNA
ccgttgctaccaaaacagtc

SEQ ID NO: 2296 - DNA, 20 bp, synthetic construct
  source 1..20: mol_type = other DNA
gccgttgctaccaaaacagt

SEQ ID NO: 2297 - DNA, 20 bp, synthetic construct
  source 1..20: mol_type = other DNA
tgccgttgctaccaaaacag

SEQ ID NO: 2298 - DNA, 20 bp, synthetic construct
  source 1..20: mol_type = other DNA
ttgccgttgctaccaaaaca

SEQ ID NO: 2299 - DNA, 20 bp, synthetic construct
  source 1..20: mol_type = other DNA
gttgccgttgctaccaaaac

SEQ ID NO: 2300 - DNA, 20 bp, synthetic construct
  source 1..20: mol_type = other DNA
cgttgccgttgctaccaaaa

SEQ ID NO: 2301 - DNA, 20 bp, synthetic construct
  source 1..20: mol_type = other DNA
ccgttgccgttgctaccaaa

SEQ ID NO: 2302 - DNA, 20 bp, synthetic construct
  source 1..20: mol_type = other DNA
gccgttgccgttgctaccaa

SEQ ID NO: 2303 - DNA, 20 bp, synthetic construct
  source 1..20: mol_type = other DNA
cgccgttgccgttgctacca

SEQ ID NO: 2304 - DNA, 20 bp, synthetic construct
  source 1..20: mol_type = other DNA
ccgccgttgccgttgctacc

SEQ ID NO: 2305 - DNA, 20 bp, synthetic construct
  source 1..20: mol_type = other DNA
gccgccgttgccgttgctac

SEQ ID NO: 2306 - DNA, 20 bp, synthetic construct
  source 1..20: mol_type = other DNA
cgccgccgttgccgttgcta

SEQ ID NO: 2307 - DNA, 20 bp, synthetic construct
  source 1..20: mol_type = other DNA
ccgccgccgttgccgttgct

SEQ ID NO: 2308 - DNA, 20 bp, synthetic construct
  source 1..20: mol_type = other DNA
gccgccgccgttgccgttgc

SEQ ID NO: 2309 - DNA, 20 bp, synthetic construct
  source 1..20: mol_type = other DNA
cgccgccgccgttgccgttg

SEQ ID NO: 2310 - DNA, 20 bp, synthetic construct
  source 1..20: mol_type = other DNA
gcgccgccgccgttgccgtt

SEQ ID NO: 2311 - DNA, 20 bp, synthetic construct
  source 1..20: mol_type = other DNA
cgcgccgccgccgttgccgt

SEQ ID NO: 2312 - DNA, 20 bp, synthetic construct
  source 1..20: mol_type = other DNA
acgcgccgccgccgttgccg

SEQ ID NO: 2313 - DNA, 20 bp, synthetic construct
  source 1..20: mol_type = other DNA
aacgcgccgccgccgttgcc

SEQ ID NO: 2314 - DNA, 20 bp, synthetic construct
  source 1..20: mol_type = other DNA
aaacgcgccgccgccgttgc

SEQ ID NO: 2315 - DNA, 20 bp, synthetic construct
  source 1..20: mol_type = other DNA
gaaacgcgccgccgccgttg

SEQ ID NO: 2316 - DNA, 20 bp, synthetic construct
  source 1..20: mol_type = other DNA
cgaaacgcgccgccgccgtt

SEQ ID NO: 2317 - DNA, 20 bp, synthetic construct
  source 1..20: mol_type = other DNA
ccgaaacgcgccgccgccgt

SEQ ID NO: 2318 - DNA, 20 bp, synthetic construct
  source 1..20: mol_type = other DNA
gccgaaacgcgccgccgccg

SEQ ID NO: 2319 - DNA, 20 bp, synthetic construct
  source 1..20: mol_type = other DNA
ggccgaaacgcgccgccgcc

SEQ ID NO: 2320 - DNA, 20 bp, synthetic construct
  source 1..20: mol_type = other DNA
gggccgaaacgcgccgccgc

SEQ ID NO: 2321 - DNA, 20 bp, synthetic construct
  source 1..20: mol_type = other DNA
cgggccgaaacgcgccgccg

SEQ ID NO: 2322 - DNA, 20 bp, synthetic construct
  source 1..20: mol_type = other DNA
ccgggccgaaacgcgccgcc

SEQ ID NO: 2323 - DNA, 20 bp, synthetic construct
  source 1..20: mol_type = other DNA
gccgggccgaaacgcgccgc

SEQ ID NO: 2324 - DNA, 20 bp, synthetic construct
  source 1..20: mol_type = other DNA
agccgggccgaaacgcgccg

SEQ ID NO: 2325 - DNA, 20 bp, synthetic construct
  source 1..20: mol_type = other DNA
gagccgggccgaaacgcgcc

SEQ ID NO: 2326 - DNA, 20 bp, synthetic construct
  source 1..20: mol_type = other DNA
ggagccgggccgaaacgcgc

SEQ ID NO: 2327 - DNA, 20 bp, synthetic construct
  source 1..20: mol_type = other DNA
gggagccgggccgaaacgcg

SEQ ID NO: 2328 - DNA, 20 bp, synthetic construct
  source 1..20: mol_type = other DNA
cgggagccgggccgaaacgc

SEQ ID NO: 2329 - DNA, 20 bp, synthetic construct
  source 1..20: mol_type = other DNA
ccgggagccgggccgaaacg

SEQ ID NO: 2330 - DNA, 20 bp, synthetic construct
  source 1..20: mol_type = other DNA
gccgggagccgggccgaaac

SEQ ID NO: 2331 - DNA, 20 bp, synthetic construct
  source 1..20: mol_type = other DNA
cgccgggagccgggccgaaa

SEQ ID NO: 2332 - DNA, 20 bp, synthetic construct
  source 1..20: mol_type = other DNA
ccgccgggagccgggccgaa

SEQ ID NO: 2333 - DNA, 20 bp, synthetic construct
  source 1..20: mol_type = other DNA
gccgccgggagccgggccga

SEQ ID NO: 2334 - DNA, 20 bp, synthetic construct
  source 1..20: mol_type = other DNA
agccgccgggagccgggccg

SEQ ID NO: 2335 - DNA, 20 bp, synthetic construct
  source 1..20: mol_type = other DNA
gagccgccgggagccgggcc

SEQ ID NO: 2336 - DNA, 20 bp, synthetic construct
  source 1..20: mol_type = other DNA
ggagccgccgggagccgggc

SEQ ID NO: 2337 - DNA, 20 bp, synthetic construct
  source 1..20: mol_type = other DNA
aggagccgccgggagccggg

SEQ ID NO: 2338 - DNA, 20 bp, synthetic construct
  source 1..20: mol_type = other DNA
aaggagccgccgggagccgg

SEQ ID NO: 2339 - DNA, 20 bp, synthetic construct
  source 1..20: mol_type = other DNA
caaggagccgccgggagccg

SEQ ID NO: 2340 - DNA, 20 bp, synthetic construct
  source 1..20: mol_type = other DNA
ccaaggagccgccgggagcc

SEQ ID NO: 2341 - DNA, 20 bp, synthetic construct
  source 1..20: mol_type = other DNA
accaaggagccgccgggagc

SEQ ID NO: 2342 - DNA, 20 bp, synthetic construct
  source 1..20: mol_type = other DNA
gaccaaggagccgccgggag

SEQ ID NO: 2343 - DNA, 20 bp, synthetic construct
  source 1..20: mol_type = other DNA
agaccaaggagccgccggga

SEQ ID NO: 2344 - DNA, 20 bp, synthetic construct
  source 1..20: mol_type = other DNA
gagaccaaggagccgccggg

SEQ ID NO: 2345 - DNA, 20 bp, synthetic construct
  source 1..20: mol_type = other DNA
cgagaccaaggagccgccgg

SEQ ID NO: 2346 - DNA, 20 bp, synthetic construct
  source 1..20: mol_type = other DNA
ccgagaccaaggagccgccg

SEQ ID NO: 2347 - DNA, 20 bp, synthetic construct
  source 1..20: mol_type = other DNA
gccgagaccaaggagccgcc

SEQ ID NO: 2348 - DNA, 20 bp, synthetic construct
  source 1..20: mol_type = other DNA
cgccgagaccaaggagccgc

SEQ ID NO: 2349 - DNA, 20 bp, synthetic construct
  source 1..20: mol_type = other DNA
ccgccgagaccaaggagccg

SEQ ID NO: 2350 - DNA, 20 bp, synthetic construct
  source 1..20: mol_type = other DNA
cccgccgagaccaaggagcc

SEQ ID NO: 2351 - DNA, 20 bp, synthetic construct
  source 1..20: mol_type = other DNA
gcccgccgagaccaaggagc

SEQ ID NO: 2352 - DNA, 20 bp, synthetic construct
  source 1..20: mol_type = other DNA
ggcccgccgagaccaaggag

SEQ ID NO: 2353 - DNA, 20 bp, synthetic construct
  source 1..20: mol_type = other DNA
aggcccgccgagaccaagga

SEQ ID NO: 2354 - DNA, 20 bp, synthetic construct
  source 1..20: mol_type = other DNA
gaggcccgccgagaccaagg

SEQ ID NO: 2355 - DNA, 20 bp, synthetic construct
  source 1..20: mol_type = other DNA
ggaggcccgccgagaccaag

SEQ ID NO: 2356 - DNA, 20 bp, synthetic construct
  source 1..20: mol_type = other DNA
gggaggcccgccgagaccaa

SEQ ID NO: 2357 - DNA, 20 bp, synthetic construct
  source 1..20: mol_type = other DNA
ggggaggcccgccgagacca

SEQ ID NO: 2358 - DNA, 20 bp, synthetic construct
  source 1..20: mol_type = other DNA
cggggaggcccgccgagacc

SEQ ID NO: 2359 - DNA, 20 bp, synthetic construct
  source 1..20: mol_type = other DNA
gcggggaggcccgccgagac

SEQ ID NO: 2360 - DNA, 20 bp, synthetic construct
  source 1..20: mol_type = other DNA
ggcggggaggcccgccgaga

SEQ ID NO: 2361 - DNA, 20 bp, synthetic construct
  source 1..20: mol_type = other DNA
gggcggggaggcccgccgag

SEQ ID NO: 2362 - DNA, 20 bp, synthetic construct
  source 1..20: mol_type = other DNA
ggggcggggaggcccgccga

SEQ ID NO: 2363 - DNA, 20 bp, synthetic construct
  source 1..20: mol_type = other DNA
aggggcggggaggcccgccg

SEQ ID NO: 2364 - DNA, 20 bp, synthetic construct
  source 1..20: mol_type = other DNA
aaggggcggggaggcccgcc

SEQ ID NO: 2365 - DNA, 20 bp, synthetic construct
  source 1..20: mol_type = other DNA
gaaggggcggggaggcccgc

SEQ ID NO: 2366 - DNA, 20 bp, synthetic construct
  source 1..20: mol_type = other DNA
cgaaggggcggggaggcccg

SEQ ID NO: 2367 - DNA, 20 bp, synthetic construct
  source 1..20: mol_type = other DNA
acgaaggggcggggaggccc

SEQ ID NO: 2368 - DNA, 20 bp, synthetic construct
  source 1..20: mol_type = other DNA
gacgaaggggcggggaggcc

SEQ ID NO: 2369 - DNA, 20 bp, synthetic construct
  source 1..20: mol_type = other DNA
cgacgaaggggcggggaggc

SEQ ID NO: 2370 - DNA, 20 bp, synthetic construct
  source 1..20: mol_type = other DNA
acgacgaaggggcggggagg

SEQ ID NO: 2371 - DNA, 20 bp, synthetic construct
  source 1..20: mol_type = other DNA
gacgacgaaggggcggggag

SEQ ID NO: 2372 - DNA, 20 bp, synthetic construct
  source 1..20: mol_type = other DNA
ggacgacgaaggggcgggga

SEQ ID NO: 2373 - DNA, 20 bp, synthetic construct
  source 1..20: mol_type = other DNA
aggacgacgaaggggcgggg

SEQ ID NO: 2374 - DNA, 20 bp, synthetic construct
  source 1..20: mol_type = other DNA
gaggacgacgaaggggcggg

SEQ ID NO: 2375 - DNA, 20 bp, synthetic construct
  source 1..20: mol_type = other DNA
ggaggacgacgaaggggcgg

SEQ ID NO: 2376 - DNA, 20 bp, synthetic construct
  source 1..20: mol_type = other DNA
aggaggacgacgaaggggcg

SEQ ID NO: 2377 - DNA, 20 bp, synthetic construct
  source 1..20: mol_type = other DNA
aaggaggacgacgaaggggc

SEQ ID NO: 2378 - DNA, 20 bp, synthetic construct
  source 1..20: mol_type = other DNA
gaaggaggacgacgaagggg

SEQ ID NO: 2379 - DNA, 20 bp, synthetic construct
  source 1..20: mol_type = other DNA
agaaggaggacgacgaaggg

SEQ ID NO: 2380 - DNA, 20 bp, synthetic construct
  source 1..20: mol_type = other DNA
gagaaggaggacgacgaagg

SEQ ID NO: 2381 - DNA, 20 bp, synthetic construct
  source 1..20: mol_type = other DNA
ggagaaggaggacgacgaag

SEQ ID NO: 2382 - DNA, 20 bp, synthetic construct
  source 1..20: mol_type = other DNA
gggagaaggaggacgacgaa

SEQ ID NO: 2383 - DNA, 20 bp, synthetic construct
  source 1..20: mol_type = other DNA
ggggagaaggaggacgacga

SEQ ID NO: 2384 - DNA, 20 bp, synthetic construct
  source 1..20: mol_type = other DNA
gggggagaaggaggacgacg

SEQ ID NO: 2385 - DNA, 20 bp, synthetic construct
  source 1..20: mol_type = other DNA
agggggagaaggaggacgac

SEQ ID NO: 2386 - DNA, 20 bp, synthetic construct
  source 1..20: mol_type = other DNA
gagggggagaaggaggacga

SEQ ID NO: 2387 - DNA, 20 bp, synthetic construct
  source 1..20: mol_type = other DNA
cgagggggagaaggaggacg

SEQ ID NO: 2388 - DNA, 20 bp, synthetic construct
  source 1..20: mol_type = other DNA
gcgagggggagaaggaggac

SEQ ID NO: 2389 - DNA, 20 bp, synthetic construct
  source 1..20: mol_type = other DNA
ggcgagggggagaaggagga

SEQ ID NO: 2390 - DNA, 20 bp, synthetic construct
  source 1..20: mol_type = other DNA
tggcgagggggagaaggagg

SEQ ID NO: 2391 - DNA, 20 bp, synthetic construct
  source 1..20: mol_type = other DNA
ctggcgagggggagaaggag

SEQ ID NO: 2392 - DNA, 20 bp, synthetic construct
  source 1..20: mol_type = other DNA
gctggcgagggggagaagga

SEQ ID NO: 2393 - DNA, 20 bp, synthetic construct
  source 1..20: mol_type = other DNA
ggctggcgagggggagaagg

SEQ ID NO: 2394 - DNA, 20 bp, synthetic construct
  source 1..20: mol_type = other DNA
gggctggcgagggggagaag

SEQ ID NO: 2395 - DNA, 20 bp, synthetic construct
  source 1..20: mol_type = other DNA
cgggctggcgagggggagaa

SEQ ID NO: 2396 - DNA, 20 bp, synthetic construct
  source 1..20: mol_type = other DNA
ccgggctggcgagggggaga

SEQ ID NO: 2397 - DNA, 20 bp, synthetic construct
  source 1..20: mol_type = other DNA
cccgggctggcgagggggag

SEQ ID NO: 2398 - DNA, 20 bp, synthetic construct
  source 1..20: mol_type = other DNA
gcccgggctggcgaggggga

SEQ ID NO: 2399 - DNA, 20 bp, synthetic construct
  source 1..20: mol_type = other DNA
cgcccgggctggcgaggggg

SEQ ID NO: 2400 - DNA, 20 bp, synthetic construct
  source 1..20: mol_type = other DNA
gcgcccgggctggcgagggg

SEQ ID NO: 2401 - DNA, 20 bp, synthetic construct
  source 1..20: mol_type = other DNA
ggcgcccgggctggcgaggg

SEQ ID NO: 2402 - DNA, 20 bp, synthetic construct
  source 1..20: mol_type = other DNA
gggcgcccgggctggcgagg

SEQ ID NO: 2403 - DNA, 20 bp, synthetic construct
  source 1..20: mol_type = other DNA
ggggcgcccgggctggcgag

SEQ ID NO: 2404 - DNA, 20 bp, synthetic construct
  source 1..20: mol_type = other DNA
aggggcgcccgggctggcga

SEQ ID NO: 2405 - DNA, 20 bp, synthetic construct
  source 1..20: mol_type = other DNA
gaggggcgcccgggctggcg

SEQ ID NO: 2406 - DNA, 20 bp, synthetic construct
  source 1..20: mol_type = other DNA
ggaggggcgcccgggctggc

SEQ ID NO: 2407 - DNA, 20 bp, synthetic construct
  source 1..20: mol_type = other DNA
cggaggggcgcccgggctgg

SEQ ID NO: 2408 - DNA, 20 bp, synthetic construct
  source 1..20: mol_type = other DNA
ccggaggggcgcccgggctg

SEQ ID NO: 2409 - DNA, 20 bp, synthetic construct
  source 1..20: mol_type = other DNA
gccggaggggcgcccgggct

SEQ ID NO: 2410 - DNA, 20 bp, synthetic construct
  source 1..20: mol_type = other DNA
ggccggaggggcgcccgggc

SEQ ID NO: 2411 - DNA, 20 bp, synthetic construct
  source 1..20: mol_type = other DNA
cggccggaggggcgcccggg

SEQ ID NO: 2412 - DNA, 20 bp, synthetic construct
  source 1..20: mol_type = other DNA
gcggccggaggggcgcccgg

SEQ ID NO: 2413 - DNA, 20 bp, synthetic construct
  source 1..20: mol_type = other DNA
cgcggccggaggggcgcccg

SEQ ID NO: 2414 - DNA, 20 bp, synthetic construct
  source 1..20: mol_type = other DNA
gcgcggccggaggggcgccc

SEQ ID NO: 2415 - DNA, 20 bp, synthetic construct
  source 1..20: mol_type = other DNA
ggcgcggccggaggggcgcc

SEQ ID NO: 2416 - DNA, 20 bp, synthetic construct
  source 1..20: mol_type = other DNA
tggcgcggccggaggggcgc

SEQ ID NO: 2417 - DNA, 20 bp, synthetic construct
  source 1..20: mol_type = other DNA
ttggcgcggccggaggggcg

SEQ ID NO: 2418 - DNA, 20 bp, synthetic construct
  source 1..20: mol_type = other DNA
gttggcgcggccggaggggc

SEQ ID NO: 2419 - DNA, 20 bp, synthetic construct
  source 1..20: mol_type = other DNA
ggttggcgcggccggagggg

SEQ ID NO: 2420 - DNA, 20 bp, synthetic construct
  source 1..20: mol_type = other DNA
gggttggcgcggccggaggg

SEQ ID NO: 2421 - DNA, 20 bp, synthetic construct
  source 1..20: mol_type = other DNA
cgggttggcgcggccggagg

SEQ ID NO: 2422 - DNA, 20 bp, synthetic construct
  source 1..20: mol_type = other DNA
gcgggttggcgcggccggag

SEQ ID NO: 2423 - DNA, 20 bp, synthetic construct
  source 1..20: mol_type = other DNA
cgcgggttggcgcggccgga

SEQ ID NO: 2424 - DNA, 20 bp, synthetic construct
  source 1..20: mol_type = other DNA
gcgcgggttggcgcggccgg

SEQ ID NO: 2425 - DNA, 20 bp, synthetic construct
  source 1..20: mol_type = other DNA
ggcgcgggttggcgcggccg

SEQ ID NO: 2426 - DNA, 20 bp, synthetic construct
  source 1..20: mol_type = other DNA
aggcgcgggttggcgcggcc

SEQ ID NO: 2427 - DNA, 20 bp, synthetic construct
  source 1..20: mol_type = other DNA
gaggcgcgggttggcgcggc

SEQ ID NO: 2428 - DNA, 20 bp, synthetic construct
  source 1..20: mol_type = other DNA
ggaggcgcgggttggcgcgg

SEQ ID NO: 2429 - DNA, 20 bp, synthetic construct
  source 1..20: mol_type = other DNA
gggaggcgcgggttggcgcg

SEQ ID NO: 2430 - DNA, 20 bp, synthetic construct
  source 1..20: mol_type = other DNA
ggggaggcgcgggttggcgc

SEQ ID NO: 2431 - DNA, 20 bp, synthetic construct
  source 1..20: mol_type = other DNA
cggggaggcgcgggttggcg

SEQ ID NO: 2432 - DNA, 20 bp, synthetic construct
  source 1..20: mol_type = other DNA
gcggggaggcgcgggttggc

SEQ ID NO: 2433 - DNA, 20 bp, synthetic construct
  source 1..20: mol_type = other DNA
agcggggaggcgcgggttgg

SEQ ID NO: 2434 - DNA, 20 bp, synthetic construct
  source 1..20: mol_type = other DNA
gagcggggaggcgcgggttg

SEQ ID NO: 2435 - DNA, 20 bp, synthetic construct
  source 1..20: mol_type = other DNA
cgagcggggaggcgcgggtt

SEQ ID NO: 2436 - DNA, 20 bp, synthetic construct
  source 1..20: mol_type = other DNA
ccgagcggggaggcgcgggt

SEQ ID NO: 2437 - DNA, 20 bp, synthetic construct
  source 1..20: mol_type = other DNA
gccgagcggggaggcgcggg

SEQ ID NO: 2438 - DNA, 20 bp, synthetic construct
  source 1..20: mol_type = other DNA
cgccgagcggggaggcgcgg

SEQ ID NO: 2439 - DNA, 20 bp, synthetic construct
  source 1..20: mol_type = other DNA
gcgccgagcggggaggcgcg

SEQ ID NO: 2440 - DNA, 20 bp, synthetic construct
  source 1..20: mol_type = other DNA
ggcgccgagcggggaggcgc

SEQ ID NO: 2441 - DNA, 20 bp, synthetic construct
  source 1..20: mol_type = other DNA
gggcgccgagcggggaggcg

SEQ ID NO: 2442 - DNA, 20 bp, synthetic construct
  source 1..20: mol_type = other DNA
cgggcgccgagcggggaggc

SEQ ID NO: 2443 - DNA, 20 bp, synthetic construct
  source 1..20: mol_type = other DNA
gcgggcgccgagcggggagg

SEQ ID NO: 2444 - DNA, 20 bp, synthetic construct
  source 1..20: mol_type = other DNA
cgcgggcgccgagcggggag

SEQ ID NO: 2445 - DNA, 20 bp, synthetic construct
  source 1..20: mol_type = other DNA
gcgcgggcgccgagcgggga

SEQ ID NO: 2446 - DNA, 20 bp, synthetic construct
  source 1..20: mol_type = other DNA
cgcgcgggcgccgagcgggg

SEQ ID NO: 2447 - DNA, 20 bp, synthetic construct
  source 1..20: mol_type = other DNA
acgcgcgggcgccgagcggg

SEQ ID NO: 2448 - DNA, 20 bp, synthetic construct
  source 1..20: mol_type = other DNA
gacgcgcgggcgccgagcgg

SEQ ID NO: 2449 - DNA, 20 bp, synthetic construct
  source 1..20: mol_type = other DNA
ggacgcgcgggcgccgagcg

SEQ ID NO: 2450 - DNA, 20 bp, synthetic construct
  source 1..20: mol_type = other DNA
gggacgcgcgggcgccgagc

SEQ ID NO: 2451 - DNA, 20 bp, synthetic construct
  source 1..20: mol_type = other DNA
ggggacgcgcgggcgccgag

SEQ ID NO: 2452 - DNA, 20 bp, synthetic construct
  source 1..20: mol_type = other DNA
cggggacgcgcgggcgccga

SEQ ID NO: 2453 - DNA, 20 bp, synthetic construct
  source 1..20: mol_type = other DNA
gcggggacgcgcgggcgccg

SEQ ID NO: 2454 - DNA, 20 bp, synthetic construct
  source 1..20: mol_type = other DNA
ggcggggacgcgcgggcgcc

SEQ ID NO: 2455 - DNA, 20 bp, synthetic construct
  source 1..20: mol_type = other DNA
cggcggggacgcgcgggcgc

SEQ ID NO: 2456 - DNA, 20 bp, synthetic construct
  source 1..20: mol_type = other DNA
gcggcggggacgcgcgggcg

SEQ ID NO: 2457 - DNA, 20 bp, synthetic construct
  source 1..20: mol_type = other DNA
cgcggcggggacgcgcgggc

SEQ ID NO: 2458 - DNA, 20 bp, synthetic construct
  source 1..20: mol_type = other DNA
acgcggcggggacgcgcggg

SEQ ID NO: 2459 - DNA, 20 bp, synthetic construct
  source 1..20: mol_type = other DNA
aacgcggcggggacgcgcgg

SEQ ID NO: 2460 - DNA, 20 bp, synthetic construct
  source 1..20: mol_type = other DNA
gaacgcggcggggacgcgcg

SEQ ID NO: 2461 - DNA, 20 bp, synthetic construct
  source 1..20: mol_type = other DNA
ggaacgcggcggggacgcgc

SEQ ID NO: 2462 - DNA, 20 bp, synthetic construct
  source 1..20: mol_type = other DNA
cggaacgcggcggggacgcg

SEQ ID NO: 2463 - DNA, 20 bp, synthetic construct
  source 1..20: mol_type = other DNA
ccggaacgcggcggggacgc

SEQ ID NO: 2464 - DNA, 20 bp, synthetic construct
  source 1..20: mol_type = other DNA
gccggaacgcggcggggacg

SEQ ID NO: 2465 - DNA, 20 bp, synthetic construct
  source 1..20: mol_type = other DNA
cgccggaacgcggcggggac

SEQ ID NO: 2466 - DNA, 20 bp, synthetic construct
  source 1..20: mol_type = other DNA
acgccggaacgcggcgggga

SEQ ID NO: 2467 - DNA, 20 bp, synthetic construct
  source 1..20: mol_type = other DNA
gacgccggaacgcggcgggg

SEQ ID NO: 2468 - DNA, 20 bp, synthetic construct
  source 1..20: mol_type = other DNA
agacgccggaacgcggcggg

SEQ ID NO: 2469 - DNA, 20 bp, synthetic construct
  source 1..20: mol_type = other DNA
gagacgccggaacgcggcgg

SEQ ID NO: 2470 - DNA, 20 bp, synthetic construct
  source 1..20: mol_type = other DNA
ggagacgccggaacgcggcg

SEQ ID NO: 2471 - DNA, 20 bp, synthetic construct
  source 1..20: mol_type = other DNA
aggagacgccggaacgcggc

SEQ ID NO: 2472 - DNA, 20 bp, synthetic construct
  source 1..20: mol_type = other DNA
aaggagacgccggaacgcgg

SEQ ID NO: 2473 - DNA, 20 bp, synthetic construct
  source 1..20: mol_type = other DNA
caaggagacgccggaacgcg

SEQ ID NO: 2474 - DNA, 20 bp, synthetic construct
  source 1..20: mol_type = other DNA
ccaaggagacgccggaacgc

SEQ ID NO: 2475 - DNA, 20 bp, synthetic construct
  source 1..20: mol_type = other DNA
gccaaggagacgccggaacg

SEQ ID NO: 2476 - DNA, 20 bp, synthetic construct
  source 1..20: mol_type = other DNA
cgccaaggagacgccggaac

SEQ ID NO: 2477 - DNA, 20 bp, synthetic construct
  source 1..20: mol_type = other DNA
gcgccaaggagacgccggaa

SEQ ID NO: 2478 - DNA, 20 bp, synthetic construct
  source 1..20: mol_type = other DNA
cgcgccaaggagacgccgga

SEQ ID NO: 2479 - DNA, 20 bp, synthetic construct
  source 1..20: mol_type = other DNA
gcgcgccaaggagacgccgg

SEQ ID NO: 2480 - DNA, 20 bp, synthetic construct
  source 1..20: mol_type = other DNA
ggcgcgccaaggagacgccg

SEQ ID NO: 2481 - DNA, 20 bp, synthetic construct
  source 1..20: mol_type = other DNA
gggcgcgccaaggagacgcc

SEQ ID NO: 2482 - DNA, 20 bp, synthetic construct
  source 1..20: mol_type = other DNA
cgggcgcgccaaggagacgc

SEQ ID NO: 2483 - DNA, 20 bp, synthetic construct
  source 1..20: mol_type = other DNA
ccgggcgcgccaaggagacg

SEQ ID NO: 2484 - DNA, 20 bp, synthetic construct
  source 1..20: mol_type = other DNA
gccgggcgcgccaaggagac

SEQ ID NO: 2485 - DNA, 20 bp, synthetic construct
  source 1..20: mol_type = other DNA
agccgggcgcgccaaggaga

SEQ ID NO: 2486 - DNA, 20 bp, synthetic construct
  source 1..20: mol_type = other DNA
gagccgggcgcgccaaggag

SEQ ID NO: 2487 - DNA, 20 bp, synthetic construct
  source 1..20: mol_type = other DNA
ggagccgggcgcgccaagga

SEQ ID NO: 2488 - DNA, 20 bp, synthetic construct
  source 1..20: mol_type = other DNA
gggagccgggcgcgccaagg

SEQ ID NO: 2489 - DNA, 20 bp, synthetic construct
  source 1..20: mol_type = other DNA
cgggagccgggcgcgccaag

SEQ ID NO: 2490 - DNA, 20 bp, synthetic construct
  source 1..20: mol_type = other DNA
ccgggagccgggcgcgccaa

SEQ ID NO: 2491 - DNA, 20 bp, synthetic construct
  source 1..20: mol_type = other DNA
gccgggagccgggcgcgcca

SEQ ID NO: 2492 - DNA, 20 bp, synthetic construct
  source 1..20: mol_type = other DNA
agccgggagccgggcgcgcc

SEQ ID NO: 2493 - DNA, 20 bp, synthetic construct
  source 1..20: mol_type = other DNA
cagccgggagccgggcgcgc

SEQ ID NO: 2494 - DNA, 20 bp, synthetic construct
  source 1..20: mol_type = other DNA
acagccgggagccgggcgcg

SEQ ID NO: 2495 - DNA, 20 bp, synthetic construct
  source 1..20: mol_type = other DNA
gacagccgggagccgggcgc

SEQ ID NO: 2496 - DNA, 20 bp, synthetic construct
  source 1..20: mol_type = other DNA
ggacagccgggagccgggcg

SEQ ID NO: 2497 - DNA, 20 bp, synthetic construct
  source 1..20: mol_type = other DNA
gggacagccgggagccgggc

SEQ ID NO: 2498 - DNA, 20 bp, synthetic construct
  source 1..20: mol_type = other DNA
ggggacagccgggagccggg

SEQ ID NO: 2499 - DNA, 20 bp, synthetic construct
  source 1..20: mol_type = other DNA
cggggacagccgggagccgg

SEQ ID NO: 2500 - DNA, 20 bp, synthetic construct
  source 1..20: mol_type = other DNA
gcggggacagccgggagccg

SEQ ID NO: 2501 - DNA, 20 bp, synthetic construct
  source 1..20: mol_type = other DNA
ggcggggacagccgggagcc

SEQ ID NO: 2502 - DNA, 20 bp, synthetic construct
  source 1..20: mol_type = other DNA
gggcggggacagccgggagc

SEQ ID NO: 2503 - DNA, 20 bp, synthetic construct
  source 1..20: mol_type = other DNA
cgggcggggacagccgggag

SEQ ID NO: 2504 - DNA, 20 bp, synthetic construct
  source 1..20: mol_type = other DNA
ccgggcggggacagccggga

SEQ ID NO: 2505 - DNA, 20 bp, synthetic construct
  source 1..20: mol_type = other DNA
gccgggcggggacagccggg

SEQ ID NO: 2506 - DNA, 20 bp, synthetic construct
  source 1..20: mol_type = other DNA
cgccgggcggggacagccgg

SEQ ID NO: 2507 - DNA, 20 bp, synthetic construct
  source 1..20: mol_type = other DNA
acgccgggcggggacagccg

SEQ ID NO: 2508 - DNA, 20 bp, synthetic construct
  source 1..20: mol_type = other DNA
cacgccgggcggggacagcc

SEQ ID NO: 2509 - DNA, 20 bp, synthetic construct
  source 1..20: mol_type = other DNA
gcacgccgggcggggacagc

SEQ ID NO: 2510 - DNA, 20 bp, synthetic construct
  source 1..20: mol_type = other DNA
cgcacgccgggcggggacag

SEQ ID NO: 2511 - DNA, 20 bp, synthetic construct
  source 1..20: mol_type = other DNA
tcgcacgccgggcggggaca

SEQ ID NO: 2512 - DNA, 20 bp, synthetic construct
  source 1..20: mol_type = other DNA
ctcgcacgccgggcggggac

SEQ ID NO: 2513 - DNA, 20 bp, synthetic construct
  source 1..20: mol_type = other DNA
gctcgcacgccgggcgggga

SEQ ID NO: 2514 - DNA, 20 bp, synthetic construct
  source 1..20: mol_type = other DNA
ggctcgcacgccgggcgggg

SEQ ID NO: 2515 - DNA, 20 bp, synthetic construct
  source 1..20: mol_type = other DNA
cggctcgcacgccgggcggg

SEQ ID NO: 2516 - DNA, 20 bp, synthetic construct
  source 1..20: mol_type = other DNA
ccggctcgcacgccgggcgg

SEQ ID NO: 2517 - DNA, 20 bp, synthetic construct
  source 1..20: mol_type = other DNA
accggctcgcacgccgggcg

SEQ ID NO: 2518 - DNA, 20 bp, synthetic construct
  source 1..20: mol_type = other DNA
caccggctcgcacgccgggc

SEQ ID NO: 2519 - DNA, 20 bp, synthetic construct
  source 1..20: mol_type = other DNA
acaccggctcgcacgccggg

SEQ ID NO: 2520 - DNA, 20 bp, synthetic construct
  source 1..20: mol_type = other DNA
tacaccggctcgcacgccgg

SEQ ID NO: 2521 - DNA, 20 bp, synthetic construct
  source 1..20: mol_type = other DNA
atacaccggctcgcacgccg

SEQ ID NO: 2522 - DNA, 20 bp, synthetic construct
  source 1..20: mol_type = other DNA
catacaccggctcgcacgcc

SEQ ID NO: 2523 - DNA, 20 bp, synthetic construct
  source 1..20: mol_type = other DNA
ccatacaccggctcgcacgc

SEQ ID NO: 2524 - DNA, 20 bp, synthetic construct
  source 1..20: mol_type = other DNA
cccatacaccggctcgcacg

SEQ ID NO: 2525 - DNA, 20 bp, synthetic construct
  source 1..20: mol_type = other DNA
gcccatacaccggctcgcac

SEQ ID NO: 2526 - DNA, 20 bp, synthetic construct
  source 1..20: mol_type = other DNA
ggcccatacaccggctcgca

SEQ ID NO: 2527 - DNA, 20 bp, synthetic construct
  source 1..20: mol_type = other DNA
gggcccatacaccggctcgc

SEQ ID NO: 2528 - DNA, 20 bp, synthetic construct
  source 1..20: mol_type = other DNA
ggggcccatacaccggctcg

SEQ ID NO: 2529 - DNA, 20 bp, synthetic construct
  source 1..20: mol_type = other DNA
aggggcccatacaccggctc

SEQ ID NO: 2530 - DNA, 20 bp, synthetic construct
  source 1..20: mol_type = other DNA
gaggggcccatacaccggct

SEQ ID NO: 2531 - DNA, 20 bp, synthetic construct
  source 1..20: mol_type = other DNA
tgaggggcccatacaccggc

SEQ ID NO: 2532 - DNA, 20 bp, synthetic construct
  source 1..20: mol_type = other DNA
gtgaggggcccatacaccgg

SEQ ID NO: 2533 - DNA, 20 bp, synthetic construct
  source 1..20: mol_type = other DNA
ggtgaggggcccatacaccg

SEQ ID NO: 2534 - DNA, 20 bp, synthetic construct
  source 1..20: mol_type = other DNA
tggtgaggggcccatacacc

SEQ ID NO: 2535 - DNA, 20 bp, synthetic construct
  source 1..20: mol_type = other DNA
atggtgaggggcccatacac

SEQ ID NO: 2536 - DNA, 20 bp, synthetic construct
  source 1..20: mol_type = other DNA
catggtgaggggcccataca

SEQ ID NO: 2537 - DNA, 20 bp, synthetic construct
  source 1..20: mol_type = other DNA
acatggtgaggggcccatac

SEQ ID NO: 2538 - DNA, 20 bp, synthetic construct
  source 1..20: mol_type = other DNA
gacatggtgaggggcccata

SEQ ID NO: 2539 - DNA, 20 bp, synthetic construct
  source 1..20: mol_type = other DNA
cgacatggtgaggggcccat

SEQ ID NO: 2540 - DNA, 20 bp, synthetic construct
  source 1..20: mol_type = other DNA
gcgacatggtgaggggccca

SEQ ID NO: 2541 - DNA, 20 bp, synthetic construct
  source 1..20: mol_type = other DNA
agcgacatggtgaggggccc

SEQ ID NO: 2542 - DNA, 20 bp, synthetic construct
  source 1..20: mol_type = other DNA
cagcgacatggtgaggggcc

SEQ ID NO: 2543 - DNA, 20 bp, synthetic construct
  source 1..20: mol_type = other DNA
tcagcgacatggtgaggggc

SEQ ID NO: 2544 - DNA, 20 bp, synthetic construct
  source 1..20: mol_type = other DNA
ttcagcgacatggtgagggg

SEQ ID NO: 2545 - DNA, 20 bp, synthetic construct
  source 1..20: mol_type = other DNA
cttcagcgacatggtgaggg

SEQ ID NO: 2546 - DNA, 20 bp, synthetic construct
  source 1..20: mol_type = other DNA
gcttcagcgacatggtgagg

SEQ ID NO: 2547 - DNA, 20 bp, synthetic construct
  source 1..20: mol_type = other DNA
ggcttcagcgacatggtgag

SEQ ID NO: 2548 - DNA, 20 bp, synthetic construct
  source 1..20: mol_type = other DNA
gggcttcagcgacatggtga

SEQ ID NO: 2549 - DNA, 20 bp, synthetic construct
  source 1..20: mol_type = other DNA
ggggcttcagcgacatggtg

SEQ ID NO: 2550 - DNA, 20 bp, synthetic construct
  source 1..20: mol_type = other DNA
tggggcttcagcgacatggt

SEQ ID NO: 2551 - DNA, 20 bp, synthetic construct
  source 1..20: mol_type = other DNA
ctggggcttcagcgacatgg

SEQ ID NO: 2552 - DNA, 20 bp, synthetic construct
  source 1..20: mol_type = other DNA
gctggggcttcagcgacatg

SEQ ID NO: 2553 - DNA, 20 bp, synthetic construct
  source 1..20: mol_type = other DNA
tgctggggcttcagcgacat

SEQ ID NO: 2554 - DNA, 20 bp, synthetic construct
  source 1..20: mol_type = other DNA
ctgctggggcttcagcgaca

SEQ ID NO: 2555 - DNA, 20 bp, synthetic construct
  source 1..20: mol_type = other DNA
gctgctggggcttcagcgac

SEQ ID NO: 2556 - DNA, 20 bp, synthetic construct
  source 1..20: mol_type = other DNA
tgctgctggggcttcagcga

SEQ ID NO: 2557 - DNA, 20 bp, synthetic construct
  source 1..20: mol_type = other DNA
ctgctgctggggcttcagcg

SEQ ID NO: 2558 - DNA, 20 bp, synthetic construct
  source 1..20: mol_type = other DNA
gctgctgctggggcttcagc

SEQ ID NO: 2559 - DNA, 20 bp, synthetic construct
  source 1..20: mol_type = other DNA
tgctgctgctggggcttcag

SEQ ID NO: 2560 - DNA, 20 bp, synthetic construct
  source 1..20: mol_type = other DNA
ctgctgctgctggggcttca

SEQ ID NO: 2561 - DNA, 20 bp, synthetic construct
  source 1..20: mol_type = other DNA
gctgctgctgctggggcttc

SEQ ID NO: 2562 - DNA, 20 bp, synthetic construct
  source 1..20: mol_type = other DNA
tgctgctgctgctggggctt

SEQ ID NO: 2563 - DNA, 20 bp, synthetic construct
  source 1..20: mol_type = other DNA
ctgctgctgctgctggggct

SEQ ID NO: 2564 - DNA, 20 bp, synthetic construct
  source 1..20: mol_type = other DNA
gctgctgctgctgctggggc

SEQ ID NO: 2565 - DNA, 20 bp, synthetic construct
  source 1..20: mol_type = other DNA
tgctgctgctgctgctgggg

SEQ ID NO: 2566 - DNA, 20 bp, synthetic construct
  source 1..20: mol_type = other DNA
ctgctgctgctgctgctggg

SEQ ID NO: 2567 - DNA, 20 bp, synthetic construct
  source 1..20: mol_type = other DNA
gctgctgctgctgctgctgg

SEQ ID NO: 2568 - DNA, 20 bp, synthetic construct
  source 1..20: mol_type = other DNA
tgctgctgctgctgctgctg

SEQ ID NO: 2569 - DNA, 20 bp, synthetic construct
  source 1..20: mol_type = other DNA
ctgctgctgctgctgctgct

SEQ ID NO: 2570 - DNA, 20 bp, synthetic construct
  source 1..20: mol_type = other DNA
gctgctgctgctgctgctgc

SEQ ID NO: 2571 - DNA, 20 bp, synthetic construct
  source 1..20: mol_type = other DNA
tgctgctgctgctgctgctg

SEQ ID NO: 2572 - DNA, 20 bp, synthetic construct
  source 1..20: mol_type = other DNA
ctgctgctgctgctgctgct

SEQ ID NO: 2573 - DNA, 20 bp, synthetic construct
  source 1..20: mol_type = other DNA
gctgctgctgctgctgctgc

SEQ ID NO: 2574 - DNA, 20 bp, synthetic construct
  source 1..20: mol_type = other DNA
tgctgctgctgctgctgctg

SEQ ID NO: 2575 - DNA, 20 bp, synthetic construct
  source 1..20: mol_type = other DNA
ctgctgctgctgctgctgct

SEQ ID NO: 2576 - DNA, 20 bp, synthetic construct
  source 1..20: mol_type = other DNA
gctgctgctgctgctgctgc

SEQ ID NO: 2577 - DNA, 20 bp, synthetic construct
  source 1..20: mol_type = other DNA
tgctgctgctgctgctgctg

SEQ ID NO: 2578 - DNA, 20 bp, synthetic construct
  source 1..20: mol_type = other DNA
ctgctgctgctgctgctgct

SEQ ID NO: 2579 - DNA, 20 bp, synthetic construct
  source 1..20: mol_type = other DNA
gctgctgctgctgctgctgc

SEQ ID NO: 2580 - DNA, 20 bp, synthetic construct
  source 1..20: mol_type = other DNA
tgctgctgctgctgctgctg

SEQ ID NO: 2581 - DNA, 20 bp, synthetic construct
  source 1..20: mol_type = other DNA
ctgctgctgctgctgctgct

SEQ ID NO: 2582 - DNA, 20 bp, synthetic construct
  source 1..20: mol_type = other DNA
gctgctgctgctgctgctgc

SEQ ID NO: 2583 - DNA, 20 bp, synthetic construct
  source 1..20: mol_type = other DNA
tgctgctgctgctgctgctg

SEQ ID NO: 2584 - DNA, 20 bp, synthetic construct
  source 1..20: mol_type = other DNA
ctgctgctgctgctgctgct

SEQ ID NO: 2585 - DNA, 20 bp, synthetic construct
  source 1..20: mol_type = other DNA
gctgctgctgctgctgctgc

SEQ ID NO: 2586 - DNA, 20 bp, synthetic construct
  source 1..20: mol_type = other DNA
tgctgctgctgctgctgctg

SEQ ID NO: 2587 - DNA, 20 bp, synthetic construct
  source 1..20: mol_type = other DNA
ctgctgctgctgctgctgct

SEQ ID NO: 2588 - DNA, 20 bp, synthetic construct
  source 1..20: mol_type = other DNA
gctgctgctgctgctgctgc

SEQ ID NO: 2589 - DNA, 20 bp, synthetic construct
  source 1..20: mol_type = other DNA
tgctgctgctgctgctgctg

SEQ ID NO: 2590 - DNA, 20 bp, synthetic construct
  source 1..20: mol_type = other DNA
ttgctgctgctgctgctgct

SEQ ID NO: 2591 - DNA, 20 bp, synthetic construct
  source 1..20: mol_type = other DNA
gttgctgctgctgctgctgc

SEQ ID NO: 2592 - DNA, 20 bp, synthetic construct
  source 1..20: mol_type = other DNA
tgttgctgctgctgctgctg

SEQ ID NO: 2593 - DNA, 20 bp, synthetic construct
  source 1..20: mol_type = other DNA
ctgttgctgctgctgctgct

SEQ ID NO: 2594 - DNA, 20 bp, synthetic construct
  source 1..20: mol_type = other DNA
gctgttgctgctgctgctgc

SEQ ID NO: 2595 - DNA, 20 bp, synthetic construct
  source 1..20: mol_type = other DNA
tgctgttgctgctgctgctg

SEQ ID NO: 2596 - DNA, 20 bp, synthetic construct
  source 1..20: mol_type = other DNA
ctgctgttgctgctgctgct

SEQ ID NO: 2597 - DNA, 20 bp, synthetic construct
  source 1..20: mol_type = other DNA
gctgctgttgctgctgctgc

SEQ ID NO: 2598 - DNA, 20 bp, synthetic construct
  source 1..20: mol_type = other DNA
tgctgctgttgctgctgctg

SEQ ID NO: 2599 - DNA, 20 bp, synthetic construct
  source 1..20: mol_type = other DNA
ctgctgctgttgctgctgct

SEQ ID NO: 2600 - DNA, 20 bp, synthetic construct
  source 1..20: mol_type = other DNA
gctgctgctgttgctgctgc

SEQ ID NO: 2601 - DNA, 20 bp, synthetic construct
  source 1..20: mol_type = other DNA
tgctgctgctgttgctgctg

SEQ ID NO: 2602 - DNA, 20 bp, synthetic construct
  source 1..20: mol_type = other DNA
ctgctgctgctgttgctgct

SEQ ID NO: 2603 - DNA, 20 bp, synthetic construct
  source 1..20: mol_type = other DNA
gctgctgctgctgttgctgc

SEQ ID NO: 2604 - DNA, 20 bp, synthetic construct
  source 1..20: mol_type = other DNA
tgctgctgctgctgttgctg

SEQ ID NO: 2605 - DNA, 20 bp, synthetic construct
  source 1..20: mol_type = other DNA
ctgctgctgctgctgttgct

SEQ ID NO: 2606 - DNA, 20 bp, synthetic construct
  source 1..20: mol_type = other DNA
gctgctgctgctgctgttgc

SEQ ID NO: 2607 - DNA, 20 bp, synthetic construct
  source 1..20: mol_type = other DNA
tgctgctgctgctgctgttg

SEQ ID NO: 2608 - DNA, 20 bp, synthetic construct
  source 1..20: mol_type = other DNA
ctgctgctgctgctgctgtt

SEQ ID NO: 2609 - DNA, 20 bp, synthetic construct
  source 1..20: mol_type = other DNA
gctgctgctgctgctgctgt

SEQ ID NO: 2610 - DNA, 20 bp, synthetic construct
  source 1..20: mol_type = other DNA
tgctgctgctgctgctgctg

SEQ ID NO: 2611 - DNA, 20 bp, synthetic construct
  source 1..20: mol_type = other DNA
ctgctgctgctgctgctgct

SEQ ID NO: 2612 - DNA, 20 bp, synthetic construct
  source 1..20: mol_type = other DNA
gctgctgctgctgctgctgc

SEQ ID NO: 2613 - DNA, 20 bp, synthetic construct
  source 1..20: mol_type = other DNA
tgctgctgctgctgctgctg

SEQ ID NO: 2614 - DNA, 20 bp, synthetic construct
  source 1..20: mol_type = other DNA
ctgctgctgctgctgctgct

SEQ ID NO: 2615 - DNA, 20 bp, synthetic construct
  source 1..20: mol_type = other DNA
gctgctgctgctgctgctgc

SEQ ID NO: 2616 - DNA, 20 bp, synthetic construct
  source 1..20: mol_type = other DNA
tgctgctgctgctgctgctg

SEQ ID NO: 2617 - DNA, 20 bp, synthetic construct
  source 1..20: mol_type = other DNA
ctgctgctgctgctgctgct

SEQ ID NO: 2618 - DNA, 20 bp, synthetic construct
  source 1..20: mol_type = other DNA
gctgctgctgctgctgctgc

SEQ ID NO: 2619 - DNA, 20 bp, synthetic construct
  source 1..20: mol_type = other DNA
ggctgctgctgctgctgctg

SEQ ID NO: 2620 - DNA, 20 bp, synthetic construct
  source 1..20: mol_type = other DNA
cggctgctgctgctgctgct

SEQ ID NO: 2621 - DNA, 20 bp, synthetic construct
  source 1..20: mol_type = other DNA
gcggctgctgctgctgctgc

SEQ ID NO: 2622 - DNA, 20 bp, synthetic construct
  source 1..20: mol_type = other DNA
ggcggctgctgctgctgctg

SEQ ID NO: 2623 - DNA, 20 bp, synthetic construct
  source 1..20: mol_type = other DNA
cggcggctgctgctgctgct

SEQ ID NO: 2624 - DNA, 20 bp, synthetic construct
  source 1..20: mol_type = other DNA
gcggcggctgctgctgctgc

SEQ ID NO: 2625 - DNA, 20 bp, synthetic construct
  source 1..20: mol_type = other DNA
ggcggcggctgctgctgctg

SEQ ID NO: 2626 - DNA, 20 bp, synthetic construct
  source 1..20: mol_type = other DNA
gggcggcggctgctgctgct

SEQ ID NO: 2627 - DNA, 20 bp, synthetic construct
  source 1..20: mol_type = other DNA
cgggcggcggctgctgctgc

SEQ ID NO: 2628 - DNA, 20 bp, synthetic construct
  source 1..20: mol_type = other DNA
gcgggcggcggctgctgctg

SEQ ID NO: 2629 - DNA, 20 bp, synthetic construct
  source 1..20: mol_type = other DNA
cgcgggcggcggctgctgct

SEQ ID NO: 2630 - DNA, 20 bp, synthetic construct
  source 1..20: mol_type = other DNA
ccgcgggcggcggctgctgc

SEQ ID NO: 2631 - DNA, 20 bp, synthetic construct
  source 1..20: mol_type = other DNA
gccgcgggcggcggctgctg

SEQ ID NO: 2632 - DNA, 20 bp, synthetic construct
  source 1..20: mol_type = other DNA
agccgcgggcggcggctgct

SEQ ID NO: 2633 - DNA, 20 bp, synthetic construct
  source 1..20: mol_type = other DNA
cagccgcgggcggcggctgc

SEQ ID NO: 2634 - DNA, 20 bp, synthetic construct
  source 1..20: mol_type = other DNA
gcagccgcgggcggcggctg

SEQ ID NO: 2635 - DNA, 20 bp, synthetic construct
  source 1..20: mol_type = other DNA
ggcagccgcgggcggcggct

SEQ ID NO: 2636 - DNA, 20 bp, synthetic construct
  source 1..20: mol_type = other DNA
tggcagccgcgggcggcggc

SEQ ID NO: 2637 - DNA, 20 bp, synthetic construct
  source 1..20: mol_type = other DNA
ttggcagccgcgggcggcgg

SEQ ID NO: 2638 - DNA, 20 bp, synthetic construct
  source 1..20: mol_type = other DNA
attggcagccgcgggcggcg

SEQ ID NO: 2639 - DNA, 20 bp, synthetic construct
  source 1..20: mol_type = other DNA
cattggcagccgcgggcggc

SEQ ID NO: 2640 - DNA, 20 bp, synthetic construct
  source 1..20: mol_type = other DNA
acattggcagccgcgggcgg

SEQ ID NO: 2641 - DNA, 20 bp, synthetic construct
  source 1..20: mol_type = other DNA
gacattggcagccgcgggcg

SEQ ID NO: 2642 - DNA, 20 bp, synthetic construct
  source 1..20: mol_type = other DNA
ggacattggcagccgcgggc

SEQ ID NO: 2643 - DNA, 20 bp, synthetic construct
  source 1..20: mol_type = other DNA
cggacattggcagccgcggg

SEQ ID NO: 2644 - DNA, 20 bp, synthetic construct
  source 1..20: mol_type = other DNA
gcggacattggcagccgcgg

SEQ ID NO: 2645 - DNA, 20 bp, synthetic construct
  source 1..20: mol_type = other DNA
tgcggacattggcagccgcg

SEQ ID NO: 2646 - DNA, 20 bp, synthetic construct
  source 1..20: mol_type = other DNA
ttgcggacattggcagccgc

SEQ ID NO: 2647 - DNA, 20 bp, synthetic construct
  source 1..20: mol_type = other DNA
cttgcggacattggcagccg

SEQ ID NO: 2648 - DNA, 20 bp, synthetic construct
  source 1..20: mol_type = other DNA
gcttgcggacattggcagcc

SEQ ID NO: 2649 - DNA, 20 bp, synthetic construct
  source 1..20: mol_type = other DNA
ggcttgcggacattggcagc

SEQ ID NO: 2650 - DNA, 20 bp, synthetic construct
  source 1..20: mol_type = other DNA
gggcttgcggacattggcag

SEQ ID NO: 2651 - DNA, 20 bp, synthetic construct
  source 1..20: mol_type = other DNA
cgggcttgcggacattggca

SEQ ID NO: 2652 - DNA, 20 bp, synthetic construct
  source 1..20: mol_type = other DNA
ccgggcttgcggacattggc

SEQ ID NO: 2653 - DNA, 20 bp, synthetic construct
  source 1..20: mol_type = other DNA
gccgggcttgcggacattgg

SEQ ID NO: 2654 - DNA, 20 bp, synthetic construct
  source 1..20: mol_type = other DNA
cgccgggcttgcggacattg

SEQ ID NO: 2655 - DNA, 20 bp, synthetic construct
  source 1..20: mol_type = other DNA
ccgccgggcttgcggacatt

SEQ ID NO: 2656 - DNA, 20 bp, synthetic construct
  source 1..20: mol_type = other DNA
gccgccgggcttgcggacat

SEQ ID NO: 2657 - DNA, 20 bp, synthetic construct
  source 1..20: mol_type = other DNA
tgccgccgggcttgcggaca

SEQ ID NO: 2658 - DNA, 20 bp, synthetic construct
  source 1..20: mol_type = other DNA
ctgccgccgggcttgcggac

SEQ ID NO: 2659 - DNA, 20 bp, synthetic construct
  source 1..20: mol_type = other DNA
gctgccgccgggcttgcgga

SEQ ID NO: 2660 - DNA, 20 bp, synthetic construct
  source 1..20: mol_type = other DNA
cgctgccgccgggcttgcgg

SEQ ID NO: 2661 - DNA, 20 bp, synthetic construct
  source 1..20: mol_type = other DNA
ccgctgccgccgggcttgcg

SEQ ID NO: 2662 - DNA, 20 bp, synthetic construct
  source 1..20: mol_type = other DNA
gccgctgccgccgggcttgc

SEQ ID NO: 2663 - DNA, 20 bp, synthetic construct
  source 1..20: mol_type = other DNA
ggccgctgccgccgggcttg

SEQ ID NO: 2664 - DNA, 20 bp, synthetic construct
  source 1..20: mol_type = other DNA
aggccgctgccgccgggctt

SEQ ID NO: 2665 - DNA, 20 bp, synthetic construct
  source 1..20: mol_type = other DNA
aaggccgctgccgccgggct

SEQ ID NO: 2666 - DNA, 20 bp, synthetic construct
  source 1..20: mol_type = other DNA
gaaggccgctgccgccgggc

SEQ ID NO: 2667 - DNA, 20 bp, synthetic construct
  source 1..20: mol_type = other DNA
agaaggccgctgccgccggg

SEQ ID NO: 2668 - DNA, 20 bp, synthetic construct
  source 1..20: mol_type = other DNA
tagaaggccgctgccgccgg

SEQ ID NO: 2669 - DNA, 20 bp, synthetic construct
  source 1..20: mol_type = other DNA
ctagaaggccgctgccgccg

SEQ ID NO: 2670 - DNA, 20 bp, synthetic construct
  source 1..20: mol_type = other DNA
gctagaaggccgctgccgcc

SEQ ID NO: 2671 - DNA, 20 bp, synthetic construct
  source 1..20: mol_type = other DNA
cgctagaaggccgctgccgc

SEQ ID NO: 2672 - DNA, 20 bp, synthetic construct
  source 1..20: mol_type = other DNA
acgctagaaggccgctgccg

SEQ ID NO: 2673 - DNA, 20 bp, synthetic construct
  source 1..20: mol_type = other DNA
gacgctagaaggccgctgcc

SEQ ID NO: 2674 - DNA, 20 bp, synthetic construct
  source 1..20: mol_type = other DNA
cgacgctagaaggccgctgc

SEQ ID NO: 2675 - DNA, 20 bp, synthetic construct
  source 1..20: mol_type = other DNA
gcgacgctagaaggccgctg

SEQ ID NO: 2676 - DNA, 20 bp, synthetic construct
  source 1..20: mol_type = other DNA
ggcgacgctagaaggccgct

SEQ ID NO: 2677 - DNA, 20 bp, synthetic construct
  source 1..20: mol_type = other DNA
gggcgacgctagaaggccgc

SEQ ID NO: 2678 - DNA, 20 bp, synthetic construct
  source 1..20: mol_type = other DNA
cgggcgacgctagaaggccg

SEQ ID NO: 2679 - DNA, 20 bp, synthetic construct
  source 1..20: mol_type = other DNA
gcgggcgacgctagaaggcc

SEQ ID NO: 2680 - DNA, 20 bp, synthetic construct
  source 1..20: mol_type = other DNA
ggcgggcgacgctagaaggc

SEQ ID NO: 2681 - DNA, 20 bp, synthetic construct
  source 1..20: mol_type = other DNA
cggcgggcgacgctagaagg

SEQ ID NO: 2682 - DNA, 20 bp, synthetic construct
  source 1..20: mol_type = other DNA
gcggcgggcgacgctagaag

SEQ ID NO: 2683 - DNA, 20 bp, synthetic construct
  source 1..20: mol_type = other DNA
ggcggcgggcgacgctagaa

SEQ ID NO: 2684 - DNA, 20 bp, synthetic construct
  source 1..20: mol_type = other DNA
cggcggcgggcgacgctaga

SEQ ID NO: 2685 - DNA, 20 bp, synthetic construct
  source 1..20: mol_type = other DNA
gcggcggcgggcgacgctag

SEQ ID NO: 2686 - DNA, 20 bp, synthetic construct
  source 1..20: mol_type = other DNA
cgcggcggcgggcgacgcta

SEQ ID NO: 2687 - DNA, 20 bp, synthetic construct
  source 1..20: mol_type = other DNA
gcgcggcggcgggcgacgct

SEQ ID NO: 2688 - DNA, 20 bp, synthetic construct
  source 1..20: mol_type = other DNA
ggcgcggcggcgggcgacgc

SEQ ID NO: 2689 - DNA, 20 bp, synthetic construct
  source 1..20: mol_type = other DNA
aggcgcggcggcgggcgacg

SEQ ID NO: 2690 - DNA, 20 bp, synthetic construct
  source 1..20: mol_type = other DNA
aaggcgcggcggcgggcgac

SEQ ID NO: 2691 - DNA, 20 bp, synthetic construct
  source 1..20: mol_type = other DNA
gaaggcgcggcggcgggcga

SEQ ID NO: 2692 - DNA, 20 bp, synthetic construct
  source 1..20: mol_type = other DNA
cgaaggcgcggcggcgggcg

SEQ ID NO: 2693 - DNA, 20 bp, synthetic construct
  source 1..20: mol_type = other DNA
gcgaaggcgcggcggcgggc

SEQ ID NO: 2694 - DNA, 20 bp, synthetic construct
  source 1..20: mol_type = other DNA
ggcgaaggcgcggcggcggg

SEQ ID NO: 2695 - DNA, 20 bp, synthetic construct
  source 1..20: mol_type = other DNA
cggcgaaggcgcggcggcgg

SEQ ID NO: 2696 - DNA, 20 bp, synthetic construct
  source 1..20: mol_type = other DNA
acggcgaaggcgcggcggcg

SEQ ID NO: 2697 - DNA, 20 bp, synthetic construct
  source 1..20: mol_type = other DNA
gacggcgaaggcgcggcggc

SEQ ID NO: 2698 - DNA, 20 bp, synthetic construct
  source 1..20: mol_type = other DNA
ggacggcgaaggcgcggcgg

SEQ ID NO: 2699 - DNA, 20 bp, synthetic construct
  source 1..20: mol_type = other DNA
aggacggcgaaggcgcggcg

SEQ ID NO: 2700 - DNA, 20 bp, synthetic construct
  source 1..20: mol_type = other DNA
gaggacggcgaaggcgcggc

SEQ ID NO: 2701 - DNA, 20 bp, synthetic construct
  source 1..20: mol_type = other DNA
cgaggacggcgaaggcgcgg

SEQ ID NO: 2702 - DNA, 20 bp, synthetic construct
  source 1..20: mol_type = other DNA
acgaggacggcgaaggcgcg

SEQ ID NO: 2703 - DNA, 20 bp, synthetic construct
  source 1..20: mol_type = other DNA
gacgaggacggcgaaggcgc

SEQ ID NO: 2704 - DNA, 20 bp, synthetic construct
  source 1..20: mol_type = other DNA
ggacgaggacggcgaaggcg

SEQ ID NO: 2705 - DNA, 20 bp, synthetic construct
  source 1..20: mol_type = other DNA
aggacgaggacggcgaaggc

SEQ ID NO: 2706 - DNA, 20 bp, synthetic construct
  source 1..20: mol_type = other DNA
gaggacgaggacggcgaagg

SEQ ID NO: 2707 - DNA, 20 bp, synthetic construct
  source 1..20: mol_type = other DNA
cgaggacgaggacggcgaag

SEQ ID NO: 2708 - DNA, 20 bp, synthetic construct
  source 1..20: mol_type = other DNA
ccgaggacgaggacggcgaa

SEQ ID NO: 2709 - DNA, 20 bp, synthetic construct
  source 1..20: mol_type = other DNA
accgaggacgaggacggcga

SEQ ID NO: 2710 - DNA, 20 bp, synthetic construct
  source 1..20: mol_type = other DNA
gaccgaggacgaggacggcg

SEQ ID NO: 2711 - DNA, 20 bp, synthetic construct
  source 1..20: mol_type = other DNA
agaccgaggacgaggacggc

SEQ ID NO: 2712 - DNA, 20 bp, synthetic construct
  source 1..20: mol_type = other DNA
gagaccgaggacgaggacgg

SEQ ID NO: 2713 - DNA, 20 bp, synthetic construct
  source 1..20: mol_type = other DNA
ggagaccgaggacgaggacg

SEQ ID NO: 2714 - DNA, 20 bp, synthetic construct
  source 1..20: mol_type = other DNA
aggagaccgaggacgaggac

SEQ ID NO: 2715 - DNA, 20 bp, synthetic construct
  source 1..20: mol_type = other DNA
gaggagaccgaggacgagga

SEQ ID NO: 2716 - DNA, 20 bp, synthetic construct
  source 1..20: mol_type = other DNA
cgaggagaccgaggacgagg

SEQ ID NO: 2717 - DNA, 20 bp, synthetic construct
  source 1..20: mol_type = other DNA
acgaggagaccgaggacgag

SEQ ID NO: 2718 - DNA, 20 bp, synthetic construct
  source 1..20: mol_type = other DNA
gacgaggagaccgaggacga

SEQ ID NO: 2719 - DNA, 20 bp, synthetic construct
  source 1..20: mol_type = other DNA
ggacgaggagaccgaggacg

SEQ ID NO: 2720 - DNA, 20 bp, synthetic construct
  source 1..20: mol_type = other DNA
aggacgaggagaccgaggac

SEQ ID NO: 2721 - DNA, 20 bp, synthetic construct
  source 1..20: mol_type = other DNA
gaggacgaggagaccgagga

SEQ ID NO: 2722 - DNA, 20 bp, synthetic construct
  source 1..20: mol_type = other DNA
cgaggacgaggagaccgagg

SEQ ID NO: 2723 - DNA, 20 bp, synthetic construct
  source 1..20: mol_type = other DNA
ccgaggacgaggagaccgag

SEQ ID NO: 2724 - DNA, 20 bp, synthetic construct
  source 1..20: mol_type = other DNA
gccgaggacgaggagaccga

SEQ ID NO: 2725 - DNA, 20 bp, synthetic construct
  source 1..20: mol_type = other DNA
ggccgaggacgaggagaccg

SEQ ID NO: 2726 - DNA, 20 bp, synthetic construct
  source 1..20: mol_type = other DNA
tggccgaggacgaggagacc

SEQ ID NO: 2727 - DNA, 20 bp, synthetic construct
  source 1..20: mol_type = other DNA
gtggccgaggacgaggagac

SEQ ID NO: 2728 - DNA, 20 bp, synthetic construct
  source 1..20: mol_type = other DNA
cgtggccgaggacgaggaga

SEQ ID NO: 2729 - DNA, 20 bp, synthetic construct
  source 1..20: mol_type = other DNA
ccgtggccgaggacgaggag

SEQ ID NO: 2730 - DNA, 20 bp, synthetic construct
  source 1..20: mol_type = other DNA
gccgtggccgaggacgagga

SEQ ID NO: 2731 - DNA, 20 bp, synthetic construct
  source 1..20: mol_type = other DNA
agccgtggccgaggacgagg

SEQ ID NO: 2732 - DNA, 20 bp, synthetic construct
  source 1..20: mol_type = other DNA
gagccgtggccgaggacgag

SEQ ID NO: 2733 - DNA, 20 bp, synthetic construct
  source 1..20: mol_type = other DNA
ggagccgtggccgaggacga

SEQ ID NO: 2734 - DNA, 20 bp, synthetic construct
  source 1..20: mol_type = other DNA
gggagccgtggccgaggacg

SEQ ID NO: 2735 - DNA, 20 bp, synthetic construct
  source 1..20: mol_type = other DNA
agggagccgtggccgaggac

SEQ ID NO: 2736 - DNA, 20 bp, synthetic construct
  source 1..20: mol_type = other DNA
gagggagccgtggccgagga

SEQ ID NO: 2737 - DNA, 20 bp, synthetic construct
  source 1..20: mol_type = other DNA
ggagggagccgtggccgagg

SEQ ID NO: 2738 - DNA, 20 bp, synthetic construct
  source 1..20: mol_type = other DNA
aggagggagccgtggccgag

SEQ ID NO: 2739 - DNA, 20 bp, synthetic construct
  source 1..20: mol_type = other DNA
gaggagggagccgtggccga

SEQ ID NO: 2740 - DNA, 20 bp, synthetic construct
  source 1..20: mol_type = other DNA
cgaggagggagccgtggccg

SEQ ID NO: 2741 - DNA, 20 bp, synthetic construct
  source 1..20: mol_type = other DNA
ccgaggagggagccgtggcc

SEQ ID NO: 2742 - DNA, 20 bp, synthetic construct
  source 1..20: mol_type = other DNA
accgaggagggagccgtggc

SEQ ID NO: 2743 - DNA, 20 bp, synthetic construct
  source 1..20: mol_type = other DNA
caccgaggagggagccgtgg

SEQ ID NO: 2744 - DNA, 20 bp, synthetic construct
  source 1..20: mol_type = other DNA
ccaccgaggagggagccgtg

SEQ ID NO: 2745 - DNA, 20 bp, synthetic construct
  source 1..20: mol_type = other DNA
accaccgaggagggagccgt

SEQ ID NO: 2746 - DNA, 20 bp, synthetic construct
  source 1..20: mol_type = other DNA
gaccaccgaggagggagccg

SEQ ID NO: 2747 - DNA, 20 bp, synthetic construct
  source 1..20: mol_type = other DNA
cgaccaccgaggagggagcc

SEQ ID NO: 2748 - DNA, 20 bp, synthetic construct
  source 1..20: mol_type = other DNA
gcgaccaccgaggagggagc

SEQ ID NO: 2749 - DNA, 20 bp, synthetic construct
  source 1..20: mol_type = other DNA
cgcgaccaccgaggagggag

SEQ ID NO: 2750 - DNA, 20 bp, synthetic construct
  source 1..20: mol_type = other DNA
ccgcgaccaccgaggaggga

SEQ ID NO: 2751 - DNA, 20 bp, synthetic construct
  source 1..20: mol_type = other DNA
gccgcgaccaccgaggaggg

SEQ ID NO: 2752 - DNA, 20 bp, synthetic construct
  source 1..20: mol_type = other DNA
cgccgcgaccaccgaggagg

SEQ ID NO: 2753 - DNA, 20 bp, synthetic construct
  source 1..20: mol_type = other DNA
tcgccgcgaccaccgaggag

SEQ ID NO: 2754 - DNA, 20 bp, synthetic construct
  source 1..20: mol_type = other DNA
gtcgccgcgaccaccgagga

SEQ ID NO: 2755 - DNA, 20 bp, synthetic construct
  source 1..20: mol_type = other DNA
ggtcgccgcgaccaccgagg

SEQ ID NO: 2756 - DNA, 20 bp, synthetic construct
  source 1..20: mol_type = other DNA
aggtcgccgcgaccaccgag

SEQ ID NO: 2757 - DNA, 20 bp, synthetic construct
  source 1..20: mol_type = other DNA
gaggtcgccgcgaccaccga

SEQ ID NO: 2758 - DNA, 20 bp, synthetic construct
  source 1..20: mol_type = other DNA
ggaggtcgccgcgaccaccg

SEQ ID NO: 2759 - DNA, 20 bp, synthetic construct
  source 1..20: mol_type = other DNA
cggaggtcgccgcgaccacc

SEQ ID NO: 2760 - DNA, 20 bp, synthetic construct
  source 1..20: mol_type = other DNA
ccggaggtcgccgcgaccac

SEQ ID NO: 2761 - DNA, 20 bp, synthetic construct
  source 1..20: mol_type = other DNA
gccggaggtcgccgcgacca

SEQ ID NO: 2762 - DNA, 20 bp, synthetic construct
  source 1..20: mol_type = other DNA
cgccggaggtcgccgcgacc

SEQ ID NO: 2763 - DNA, 20 bp, synthetic construct
  source 1..20: mol_type = other DNA
ccgccggaggtcgccgcgac

SEQ ID NO: 2764 - DNA, 20 bp, synthetic construct
  source 1..20: mol_type = other DNA
gccgccggaggtcgccgcga

SEQ ID NO: 2765 - DNA, 20 bp, synthetic construct
  source 1..20: mol_type = other DNA
cgccgccggaggtcgccgcg

SEQ ID NO: 2766 - DNA, 20 bp, synthetic construct
  source 1..20: mol_type = other DNA
ccgccgccggaggtcgccgc

SEQ ID NO: 2767 - DNA, 20 bp, synthetic construct
  source 1..20: mol_type = other DNA
cccgccgccggaggtcgccg

SEQ ID NO: 2768 - DNA, 20 bp, synthetic construct
  source 1..20: mol_type = other DNA
tcccgccgccggaggtcgcc

SEQ ID NO: 2769 - DNA, 20 bp, synthetic construct
  source 1..20: mol_type = other DNA
ctcccgccgccggaggtcgc

SEQ ID NO: 2770 - DNA, 20 bp, synthetic construct
  source 1..20: mol_type = other DNA
cctcccgccgccggaggtcg

SEQ ID NO: 2771 - DNA, 20 bp, synthetic construct
  source 1..20: mol_type = other DNA
gcctcccgccgccggaggtc

SEQ ID NO: 2772 - DNA, 20 bp, synthetic construct
  source 1..20: mol_type = other DNA
ggcctcccgccgccggaggt

SEQ ID NO: 2773 - DNA, 20 bp, synthetic construct
  source 1..20: mol_type = other DNA
gggcctcccgccgccggagg

SEQ ID NO: 2774 - DNA, 20 bp, synthetic construct
  source 1..20: mol_type = other DNA
cgggcctcccgccgccggag

SEQ ID NO: 2775 - DNA, 20 bp, synthetic construct
  source 1..20: mol_type = other DNA
ccgggcctcccgccgccgga

SEQ ID NO: 2776 - DNA, 20 bp, synthetic construct
  source 1..20: mol_type = other DNA
gccgggcctcccgccgccgg

SEQ ID NO: 2777 - DNA, 20 bp, synthetic construct
  source 1..20: mol_type = other DNA
ggccgggcctcccgccgccg

SEQ ID NO: 2778 - DNA, 20 bp, synthetic construct
  source 1..20: mol_type = other DNA
aggccgggcctcccgccgcc

SEQ ID NO: 2779 - DNA, 20 bp, synthetic construct
  source 1..20: mol_type = other DNA
caggccgggcctcccgccgc

SEQ ID NO: 2780 - DNA, 20 bp, synthetic construct
  source 1..20: mol_type = other DNA
ccaggccgggcctcccgccg

SEQ ID NO: 2781 - DNA, 20 bp, synthetic construct
  source 1..20: mol_type = other DNA
cccaggccgggcctcccgcc

SEQ ID NO: 2782 - DNA, 20 bp, synthetic construct
  source 1..20: mol_type = other DNA
gcccaggccgggcctcccgc

SEQ ID NO: 2783 - DNA, 20 bp, synthetic construct
  source 1..20: mol_type = other DNA
tgcccaggccgggcctcccg

SEQ ID NO: 2784 - DNA, 20 bp, synthetic construct
  source 1..20: mol_type = other DNA
ctgcccaggccgggcctccc

SEQ ID NO: 2785 - DNA, 20 bp, synthetic construct
  source 1..20: mol_type = other DNA
cctgcccaggccgggcctcc

SEQ ID NO: 2786 - DNA, 20 bp, synthetic construct
  source 1..20: mol_type = other DNA
acctgcccaggccgggcctc

SEQ ID NO: 2787 - DNA, 20 bp, synthetic construct
  source 1..20: mol_type = other DNA
cacctgcccaggccgggcct

SEQ ID NO: 2788 - DNA, 20 bp, synthetic construct
  source 1..20: mol_type = other DNA
ccacctgcccaggccgggcc

SEQ ID NO: 2789 - DNA, 20 bp, synthetic construct
  source 1..20: mol_type = other DNA
cccacctgcccaggccgggc

SEQ ID NO: 2790 - DNA, 20 bp, synthetic construct
  source 1..20: mol_type = other DNA
acccacctgcccaggccggg

SEQ ID NO: 2791 - DNA, 20 bp, synthetic construct
  source 1..20: mol_type = other DNA
cacccacctgcccaggccgg

SEQ ID NO: 2792 - DNA, 20 bp, synthetic construct
  source 1..20: mol_type = other DNA
acacccacctgcccaggccg

SEQ ID NO: 2793 - DNA, 20 bp, synthetic construct
  source 1..20: mol_type = other DNA
gacacccacctgcccaggcc

SEQ ID NO: 2794 - DNA, 20 bp, synthetic construct
  source 1..20: mol_type = other DNA
cgacacccacctgcccaggc

SEQ ID NO: 2795 - DNA, 20 bp, synthetic construct
  source 1..20: mol_type = other DNA
ccgacacccacctgcccagg

SEQ ID NO: 2796 - DNA, 20 bp, synthetic construct
  source 1..20: mol_type = other DNA
gccgacacccacctgcccag

SEQ ID NO: 2797 - DNA, 20 bp, synthetic construct
  source 1..20: mol_type = other DNA
tgccgacacccacctgccca

SEQ ID NO: 2798 - DNA, 20 bp, synthetic construct
  source 1..20: mol_type = other DNA
gtgccgacacccacctgccc

SEQ ID NO: 2799 - DNA, 20 bp, synthetic construct
  source 1..20: mol_type = other DNA
ggtgccgacacccacctgcc

SEQ ID NO: 2800 - DNA, 20 bp, synthetic construct
  source 1..20: mol_type = other DNA
gggtgccgacacccacctgc

SEQ ID NO: 2801 - DNA, 20 bp, synthetic construct
  source 1..20: mol_type = other DNA
ggggtgccgacacccacctg

SEQ ID NO: 2802 - DNA, 20 bp, synthetic construct
  source 1..20: mol_type = other DNA
tggggtgccgacacccacct

SEQ ID NO: 2803 - DNA, 20 bp, synthetic construct
  source 1..20: mol_type = other DNA
ctggggtgccgacacccacc

SEQ ID NO: 2804 - DNA, 20 bp, synthetic construct
  source 1..20: mol_type = other DNA
gctggggtgccgacacccac

SEQ ID NO: 2805 - DNA, 20 bp, synthetic construct
  source 1..20: mol_type = other DNA
ggctggggtgccgacaccca

SEQ ID NO: 2806 - DNA, 20 bp, synthetic construct
  source 1..20: mol_type = other DNA
gggctggggtgccgacaccc

SEQ ID NO: 2807 - DNA, 20 bp, synthetic construct
  source 1..20: mol_type = other DNA
ggggctggggtgccgacacc

SEQ ID NO: 2808 - DNA, 20 bp, synthetic construct
  source 1..20: mol_type = other DNA
gggggctggggtgccgacac

SEQ ID NO: 2809 - DNA, 20 bp, synthetic construct
  source 1..20: mol_type = other DNA
agggggctggggtgccgaca

SEQ ID NO: 2810 - DNA, 20 bp, synthetic construct
  source 1..20: mol_type = other DNA
gagggggctggggtgccgac

SEQ ID NO: 2811 - DNA, 20 bp, synthetic construct
  source 1..20: mol_type = other DNA
ggagggggctggggtgccga

SEQ ID NO: 2812 - DNA, 20 bp, synthetic construct
  source 1..20: mol_type = other DNA
cggagggggctggggtgccg

SEQ ID NO: 2813 - DNA, 20 bp, synthetic construct
  source 1..20: mol_type = other DNA
gcggagggggctggggtgcc

SEQ ID NO: 2814 - DNA, 20 bp, synthetic construct
  source 1..20: mol_type = other DNA
agcggagggggctggggtgc

SEQ ID NO: 2815 - DNA, 20 bp, synthetic construct
  source 1..20: mol_type = other DNA
gagcggagggggctggggtg

SEQ ID NO: 2816 - DNA, 20 bp, synthetic construct
  source 1..20: mol_type = other DNA
ggagcggagggggctggggt

SEQ ID NO: 2817 - DNA, 20 bp, synthetic construct
  source 1..20: mol_type = other DNA
cggagcggagggggctgggg

SEQ ID NO: 2818 - DNA, 20 bp, synthetic construct
  source 1..20: mol_type = other DNA
ccggagcggagggggctggg

SEQ ID NO: 2819 - DNA, 20 bp, synthetic construct
  source 1..20: mol_type = other DNA
cccggagcggagggggctgg

SEQ ID NO: 2820 - DNA, 20 bp, synthetic construct
  source 1..20: mol_type = other DNA
gcccggagcggagggggctg

SEQ ID NO: 2821 - DNA, 20 bp, synthetic construct
  source 1..20: mol_type = other DNA
ggcccggagcggagggggct

SEQ ID NO: 2822 - DNA, 20 bp, synthetic construct
  source 1..20: mol_type = other DNA
gggcccggagcggagggggc

SEQ ID NO: 2823 - DNA, 20 bp, synthetic construct
  source 1..20: mol_type = other DNA
cgggcccggagcggaggggg

SEQ ID NO: 2824 - DNA, 20 bp, synthetic construct
  source 1..20: mol_type = other DNA
ccgggcccggagcggagggg

SEQ ID NO: 2825 - DNA, 20 bp, synthetic construct
  source 1..20: mol_type = other DNA
gccgggcccggagcggaggg

SEQ ID NO: 2826 - DNA, 20 bp, synthetic construct
  source 1..20: mol_type = other DNA
cgccgggcccggagcggagg

SEQ ID NO: 2827 - DNA, 20 bp, synthetic construct
  source 1..20: mol_type = other DNA
acgccgggcccggagcggag

SEQ ID NO: 2828 - DNA, 20 bp, synthetic construct
  source 1..20: mol_type = other DNA
gacgccgggcccggagcgga

SEQ ID NO: 2829 - DNA, 20 bp, synthetic construct
  source 1..20: mol_type = other DNA
ggacgccgggcccggagcgg

SEQ ID NO: 2830 - DNA, 20 bp, synthetic construct
  source 1..20: mol_type = other DNA
gggacgccgggcccggagcg

SEQ ID NO: 2831 - DNA, 20 bp, synthetic construct
  source 1..20: mol_type = other DNA
ggggacgccgggcccggagc

SEQ ID NO: 2832 - DNA, 20 bp, synthetic construct
  source 1..20: mol_type = other DNA
aggggacgccgggcccggag

SEQ ID NO: 2833 - DNA, 20 bp, synthetic construct
  source 1..20: mol_type = other DNA
gaggggacgccgggcccgga

SEQ ID NO: 2834 - DNA, 20 bp, synthetic construct
  source 1..20: mol_type = other DNA
ggaggggacgccgggcccgg

SEQ ID NO: 2835 - DNA, 20 bp, synthetic construct
  source 1..20: mol_type = other DNA
gggaggggacgccgggcccg

SEQ ID NO: 2836 - DNA, 20 bp, synthetic construct
  source 1..20: mol_type = other DNA
ggggaggggacgccgggccc

SEQ ID NO: 2837 - DNA, 20 bp, synthetic construct
  source 1..20: mol_type = other DNA
gggggaggggacgccgggcc

SEQ ID NO: 2838 - DNA, 20 bp, synthetic construct
  source 1..20: mol_type = other DNA
cgggggaggggacgccgggc

SEQ ID NO: 2839 - DNA, 20 bp, synthetic construct
  source 1..20: mol_type = other DNA
gcgggggaggggacgccggg

SEQ ID NO: 2840 - DNA, 20 bp, synthetic construct
  source 1..20: mol_type = other DNA
cgcgggggaggggacgccgg

SEQ ID NO: 2841 - DNA, 20 bp, synthetic construct
  source 1..20: mol_type = other DNA
ccgcgggggaggggacgccg

SEQ ID NO: 2842 - DNA, 20 bp, synthetic construct
  source 1..20: mol_type = other DNA
gccgcgggggaggggacgcc

SEQ ID NO: 2843 - DNA, 20 bp, synthetic construct
  source 1..20: mol_type = other DNA
ggccgcgggggaggggacgc

SEQ ID NO: 2844 - DNA, 20 bp, synthetic construct
  source 1..20: mol_type = other DNA
gggccgcgggggaggggacg

SEQ ID NO: 2845 - DNA, 20 bp, synthetic construct
  source 1..20: mol_type = other DNA
cgggccgcgggggaggggac

SEQ ID NO: 2846 - DNA, 20 bp, synthetic construct
  source 1..20: mol_type = other DNA
gcgggccgcgggggagggga

SEQ ID NO: 2847 - DNA, 20 bp, synthetic construct
  source 1..20: mol_type = other DNA
cgcgggccgcgggggagggg

SEQ ID NO: 2848 - DNA, 20 bp, synthetic construct
  source 1..20: mol_type = other DNA
gcgcgggccgcgggggaggg

SEQ ID NO: 2849 - DNA, 20 bp, synthetic construct
  source 1..20: mol_type = other DNA
ggcgcgggccgcgggggagg

SEQ ID NO: 2850 - DNA, 20 bp, synthetic construct
  source 1..20: mol_type = other DNA
cggcgcgggccgcgggggag

SEQ ID NO: 2851 - DNA, 20 bp, synthetic construct
  source 1..20: mol_type = other DNA
gcggcgcgggccgcggggga

SEQ ID NO: 2852 - DNA, 20 bp, synthetic construct
  source 1..20: mol_type = other DNA
ggcggcgcgggccgcggggg

SEQ ID NO: 2853 - DNA, 20 bp, synthetic construct
  source 1..20: mol_type = other DNA
cggcggcgcgggccgcgggg

SEQ ID NO: 2854 - DNA, 20 bp, synthetic construct
  source 1..20: mol_type = other DNA
acggcggcgcgggccgcggg

SEQ ID NO: 2855 - DNA, 20 bp, synthetic construct
  source 1..20: mol_type = other DNA
gacggcggcgcgggccgcgg

SEQ ID NO: 2856 - DNA, 20 bp, synthetic construct
  source 1..20: mol_type = other DNA
ggacggcggcgcgggccgcg

SEQ ID NO: 2857 - DNA, 20 bp, synthetic construct
  source 1..20: mol_type = other DNA
gggacggcggcgcgggccgc

SEQ ID NO: 2858 - DNA, 20 bp, synthetic construct
  source 1..20: mol_type = other DNA
ggggacggcggcgcgggccg

SEQ ID NO: 2859 - DNA, 20 bp, synthetic construct
  source 1..20: mol_type = other DNA
cggggacggcggcgcgggcc

SEQ ID NO: 2860 - DNA, 20 bp, synthetic construct
  source 1..20: mol_type = other DNA
gcggggacggcggcgcgggc

SEQ ID NO: 2861 - DNA, 20 bp, synthetic construct
  source 1..20: mol_type = other DNA
ggcggggacggcggcgcggg

SEQ ID NO: 2862 - DNA, 20 bp, synthetic construct
  source 1..20: mol_type = other DNA
gggcggggacggcggcgcgg

SEQ ID NO: 2863 - DNA, 20 bp, synthetic construct
  source 1..20: mol_type = other DNA
ggggcggggacggcggcgcg

SEQ ID NO: 2864 - DNA, 20 bp, synthetic construct
  source 1..20: mol_type = other DNA
cggggcggggacggcggcgc

SEQ ID NO: 2865 - DNA, 20 bp, synthetic construct
  source 1..20: mol_type = other DNA
acggggcggggacggcggcg

SEQ ID NO: 2866 - DNA, 20 bp, synthetic construct
  source 1..20: mol_type = other DNA
cacggggcggggacggcggc

SEQ ID NO: 2867 - DNA, 20 bp, synthetic construct
  source 1..20: mol_type = other DNA
tcacggggcggggacggcgg

SEQ ID NO: 2868 - DNA, 20 bp, synthetic construct
  source 1..20: mol_type = other DNA
gtcacggggcggggacggcg

SEQ ID NO: 2869 - DNA, 20 bp, synthetic construct
  source 1..20: mol_type = other DNA
ggtcacggggcggggacggc

SEQ ID NO: 2870 - DNA, 20 bp, synthetic construct
  source 1..20: mol_type = other DNA
gggtcacggggcggggacgg

SEQ ID NO: 2871 - DNA, 20 bp, synthetic construct
  source 1..20: mol_type = other DNA
cgggtcacggggcggggacg

SEQ ID NO: 2872 - DNA, 20 bp, synthetic construct
  source 1..20: mol_type = other DNA
gcgggtcacggggcggggac

SEQ ID NO: 2873 - DNA, 20 bp, synthetic construct
  source 1..20: mol_type = other DNA
ggcgggtcacggggcgggga

SEQ ID NO: 2874 - DNA, 20 bp, synthetic construct
  source 1..20: mol_type = other DNA
cggcgggtcacggggcgggg

SEQ ID NO: 2875 - DNA, 20 bp, synthetic construct
  source 1..20: mol_type = other DNA
ccggcgggtcacggggcggg

SEQ ID NO: 2876 - DNA, 20 bp, synthetic construct
  source 1..20: mol_type = other DNA
cccggcgggtcacggggcgg

SEQ ID NO: 2877 - DNA, 20 bp, synthetic construct
  source 1..20: mol_type = other DNA
gcccggcgggtcacggggcg

SEQ ID NO: 2878 - DNA, 20 bp, synthetic construct
  source 1..20: mol_type = other DNA
agcccggcgggtcacggggc

SEQ ID NO: 2879 - DNA, 20 bp, synthetic construct
  source 1..20: mol_type = other DNA
tagcccggcgggtcacgggg

SEQ ID NO: 2880 - DNA, 20 bp, synthetic construct
  source 1..20: mol_type = other DNA
gtagcccggcgggtcacggg

SEQ ID NO: 2881 - DNA, 20 bp, synthetic construct
  source 1..20: mol_type = other DNA
ggtagcccggcgggtcacgg

SEQ ID NO: 2882 - DNA, 20 bp, synthetic construct
  source 1..20: mol_type = other DNA
gggtagcccggcgggtcacg

SEQ ID NO: 2883 - DNA, 20 bp, synthetic construct
  source 1..20: mol_type = other DNA
cgggtagcccggcgggtcac

SEQ ID NO: 2884 - DNA, 20 bp, synthetic construct
  source 1..20: mol_type = other DNA
ccgggtagcccggcgggtca

SEQ ID NO: 2885 - DNA, 20 bp, synthetic construct
  source 1..20: mol_type = other DNA
cccgggtagcccggcgggtc

SEQ ID NO: 2886 - DNA, 20 bp, synthetic construct
  source 1..20: mol_type = other DNA
ccccgggtagcccggcgggt

SEQ ID NO: 2887 - DNA, 20 bp, synthetic construct
  source 1..20: mol_type = other DNA
accccgggtagcccggcggg

SEQ ID NO: 2888 - DNA, 20 bp, synthetic construct
  source 1..20: mol_type = other DNA
caccccgggtagcccggcgg

SEQ ID NO: 2889 - DNA, 20 bp, synthetic construct
  source 1..20: mol_type = other DNA
ccaccccgggtagcccggcg

SEQ ID NO: 2890 - DNA, 20 bp, synthetic construct
  source 1..20: mol_type = other DNA
cccaccccgggtagcccggc

SEQ ID NO: 2891 - DNA, 20 bp, synthetic construct
  source 1..20: mol_type = other DNA
gcccaccccgggtagcccgg

SEQ ID NO: 2892 - DNA, 20 bp, synthetic construct
  source 1..20: mol_type = other DNA
agcccaccccgggtagcccg

SEQ ID NO: 2893 - DNA, 20 bp, synthetic construct
  source 1..20: mol_type = other DNA
cagcccaccccgggtagccc

SEQ ID NO: 2894 - DNA, 20 bp, synthetic construct
  source 1..20: mol_type = other DNA
ccagcccaccccgggtagcc

SEQ ID NO: 2895 - DNA, 20 bp, synthetic construct
  source 1..20: mol_type = other DNA
cccagcccaccccgggtagc

SEQ ID NO: 2896 - DNA, 20 bp, synthetic construct
  source 1..20: mol_type = other DNA
ccccagcccaccccgggtag

SEQ ID NO: 2897 - DNA, 20 bp, synthetic construct
  source 1..20: mol_type = other DNA
cccccagcccaccccgggta

SEQ ID NO: 2898 - DNA, 20 bp, synthetic construct
  source 1..20: mol_type = other DNA
gcccccagcccaccccgggt

SEQ ID NO: 2899 - DNA, 20 bp, synthetic construct
  source 1..20: mol_type = other DNA
ggcccccagcccaccccggg

SEQ ID NO: 2900 - DNA, 20 bp, synthetic construct
  source 1..20: mol_type = other DNA
cggcccccagcccaccccgg

SEQ ID NO: 2901 - DNA, 20 bp, synthetic construct
  source 1..20: mol_type = other DNA
ccggcccccagcccaccccg

SEQ ID NO: 2902 - DNA, 20 bp, synthetic construct
  source 1..20: mol_type = other DNA
gccggcccccagcccacccc

SEQ ID NO: 2903 - DNA, 20 bp, synthetic construct
  source 1..20: mol_type = other DNA
tgccggcccccagcccaccc

SEQ ID NO: 2904 - DNA, 20 bp, synthetic construct
  source 1..20: mol_type = other DNA
ctgccggcccccagcccacc

SEQ ID NO: 2905 - DNA, 20 bp, synthetic construct
  source 1..20: mol_type = other DNA
gctgccggcccccagcccac

SEQ ID NO: 2906 - DNA, 20 bp, synthetic construct
  source 1..20: mol_type = other DNA
cgctgccggcccccagccca

SEQ ID NO: 2907 - DNA, 20 bp, synthetic construct
  source 1..20: mol_type = other DNA
gcgctgccggcccccagccc

SEQ ID NO: 2908 - DNA, 20 bp, synthetic construct
  source 1..20: mol_type = other DNA
cgcgctgccggcccccagcc

SEQ ID NO: 2909 - DNA, 20 bp, synthetic construct
  source 1..20: mol_type = other DNA
ccgcgctgccggcccccagc

SEQ ID NO: 2910 - DNA, 20 bp, synthetic construct
  source 1..20: mol_type = other DNA
cccgcgctgccggcccccag

SEQ ID NO: 2911 - DNA, 20 bp, synthetic construct
  source 1..20: mol_type = other DNA
ccccgcgctgccggccccca

SEQ ID NO: 2912 - DNA, 20 bp, synthetic construct
  source 1..20: mol_type = other DNA
cccccgcgctgccggccccc

SEQ ID NO: 2913 - DNA, 20 bp, synthetic construct
  source 1..20: mol_type = other DNA
tcccccgcgctgccggcccc

SEQ ID NO: 2914 - DNA, 20 bp, synthetic construct
  source 1..20: mol_type = other DNA
ctcccccgcgctgccggccc

SEQ ID NO: 2915 - DNA, 20 bp, synthetic construct
  source 1..20: mol_type = other DNA
tctcccccgcgctgccggcc

SEQ ID NO: 2916 - DNA, 20 bp, synthetic construct
  source 1..20: mol_type = other DNA
gtctcccccgcgctgccggc

SEQ ID NO: 2917 - DNA, 20 bp, synthetic construct
  source 1..20: mol_type = other DNA
agtctcccccgcgctgccgg

SEQ ID NO: 2918 - DNA, 20 bp, synthetic construct
  source 1..20: mol_type = other DNA
gagtctcccccgcgctgccg

SEQ ID NO: 2919 - DNA, 20 bp, synthetic construct
  source 1..20: mol_type = other DNA
cgagtctcccccgcgctgcc

SEQ ID NO: 2920 - DNA, 20 bp, synthetic construct
  source 1..20: mol_type = other DNA
gcgagtctcccccgcgctgc

SEQ ID NO: 2921 - DNA, 20 bp, synthetic construct
  source 1..20: mol_type = other DNA
agcgagtctcccccgcgctg

SEQ ID NO: 2922 - DNA, 20 bp, synthetic construct
  source 1..20: mol_type = other DNA
gagcgagtctcccccgcgct

SEQ ID NO: 2923 - DNA, 20 bp, synthetic construct
  source 1..20: mol_type = other DNA
cgagcgagtctcccccgcgc

SEQ ID NO: 2924 - DNA, 20 bp, synthetic construct
  source 1..20: mol_type = other DNA
ccgagcgagtctcccccgcg

SEQ ID NO: 2925 - DNA, 20 bp, synthetic construct
  source 1..20: mol_type = other DNA
cccgagcgagtctcccccgc

SEQ ID NO: 2926 - DNA, 20 bp, synthetic construct
  source 1..20: mol_type = other DNA
gcccgagcgagtctcccccg

SEQ ID NO: 2927 - DNA, 20 bp, synthetic construct
  source 1..20: mol_type = other DNA
ggcccgagcgagtctccccc

SEQ ID NO: 2928 - DNA, 20 bp, synthetic construct
  source 1..20: mol_type = other DNA
aggcccgagcgagtctcccc

SEQ ID NO: 2929 - DNA, 20 bp, synthetic construct
  source 1..20: mol_type = other DNA
caggcccgagcgagtctccc

SEQ ID NO: 2930 - DNA, 20 bp, synthetic construct
  source 1..20: mol_type = other DNA
tcaggcccgagcgagtctcc

SEQ ID NO: 2931 - DNA, 20 bp, synthetic construct
  source 1..20: mol_type = other DNA
ctcaggcccgagcgagtctc

SEQ ID NO: 2932 - DNA, 20 bp, synthetic construct
  source 1..20: mol_type = other DNA
gctcaggcccgagcgagtct

SEQ ID NO: 2933 - DNA, 20 bp, synthetic construct
  source 1..20: mol_type = other DNA
ggctcaggcccgagcgagtc

SEQ ID NO: 2934 - DNA, 20 bp, synthetic construct
  source 1..20: mol_type = other DNA
gggctcaggcccgagcgagt

SEQ ID NO: 2935 - DNA, 20 bp, synthetic construct
  source 1..20: mol_type = other DNA
ggggctcaggcccgagcgag

SEQ ID NO: 2936 - DNA, 20 bp, synthetic construct
  source 1..20: mol_type = other DNA
cggggctcaggcccgagcga

SEQ ID NO: 2937 - DNA, 20 bp, synthetic construct
  source 1..20: mol_type = other DNA
tcggggctcaggcccgagcg

SEQ ID NO: 2938 - DNA, 20 bp, synthetic construct
  source 1..20: mol_type = other DNA
ctcggggctcaggcccgagc

SEQ ID NO: 2939 - DNA, 20 bp, synthetic construct
  source 1..20: mol_type = other DNA
cctcggggctcaggcccgag

SEQ ID NO: 2940 - DNA, 20 bp, synthetic construct
  source 1..20: mol_type = other DNA
gcctcggggctcaggcccga

SEQ ID NO: 2941 - DNA, 20 bp, synthetic construct
  source 1..20: mol_type = other DNA
agcctcggggctcaggcccg

SEQ ID NO: 2942 - DNA, 20 bp, synthetic construct
  source 1..20: mol_type = other DNA
gagcctcggggctcaggccc

SEQ ID NO: 2943 - DNA, 20 bp, synthetic construct
  source 1..20: mol_type = other DNA
cgagcctcggggctcaggcc

SEQ ID NO: 2944 - DNA, 20 bp, synthetic construct
  source 1..20: mol_type = other DNA
ccgagcctcggggctcaggc

SEQ ID NO: 2945 - DNA, 20 bp, synthetic construct
  source 1..20: mol_type = other DNA
gccgagcctcggggctcagg

SEQ ID NO: 2946 - DNA, 20 bp, synthetic construct
  source 1..20: mol_type = other DNA
ggccgagcctcggggctcag

SEQ ID NO: 2947 - DNA, 20 bp, synthetic construct
  source 1..20: mol_type = other DNA
cggccgagcctcggggctca

SEQ ID NO: 2948 - DNA, 20 bp, synthetic construct
  source 1..20: mol_type = other DNA
ccggccgagcctcggggctc

SEQ ID NO: 2949 - DNA, 20 bp, synthetic construct
  source 1..20: mol_type = other DNA
accggccgagcctcggggct

SEQ ID NO: 2950 - DNA, 20 bp, synthetic construct
  source 1..20: mol_type = other DNA
caccggccgagcctcggggc

SEQ ID NO: 2951 - DNA, 20 bp, synthetic construct
  source 1..20: mol_type = other DNA
ccaccggccgagcctcgggg

SEQ ID NO: 2952 - DNA, 20 bp, synthetic construct
  source 1..20: mol_type = other DNA
cccaccggccgagcctcggg

SEQ ID NO: 2953 - DNA, 20 bp, synthetic construct
  source 1..20: mol_type = other DNA
gcccaccggccgagcctcgg

SEQ ID NO: 2954 - DNA, 20 bp, synthetic construct
  source 1..20: mol_type = other DNA
cgcccaccggccgagcctcg

SEQ ID NO: 2955 - DNA, 20 bp, synthetic construct
  source 1..20: mol_type = other DNA
gcgcccaccggccgagcctc

SEQ ID NO: 2956 - DNA, 20 bp, synthetic construct
  source 1..20: mol_type = other DNA
tgcgcccaccggccgagcct

SEQ ID NO: 2957 - DNA, 20 bp, synthetic construct
  source 1..20: mol_type = other DNA
ctgcgcccaccggccgagcc

SEQ ID NO: 2958 - DNA, 20 bp, synthetic construct
  source 1..20: mol_type = other DNA
gctgcgcccaccggccgagc

SEQ ID NO: 2959 - DNA, 20 bp, synthetic construct
  source 1..20: mol_type = other DNA
ggctgcgcccaccggccgag

SEQ ID NO: 2960 - DNA, 20 bp, synthetic construct
  source 1..20: mol_type = other DNA
cggctgcgcccaccggccga

SEQ ID NO: 2961 - DNA, 20 bp, synthetic construct
  source 1..20: mol_type = other DNA
ccggctgcgcccaccggccg

SEQ ID NO: 2962 - DNA, 20 bp, synthetic construct
  source 1..20: mol_type = other DNA
cccggctgcgcccaccggcc

SEQ ID NO: 2963 - DNA, 20 bp, synthetic construct
  source 1..20: mol_type = other DNA
ccccggctgcgcccaccggc

SEQ ID NO: 2964 - DNA, 20 bp, synthetic construct
  source 1..20: mol_type = other DNA
accccggctgcgcccaccgg

SEQ ID NO: 2965 - DNA, 20 bp, synthetic construct
  source 1..20: mol_type = other DNA
gaccccggctgcgcccaccg

SEQ ID NO: 2966 - DNA, 20 bp, synthetic construct
  source 1..20: mol_type = other DNA
ggaccccggctgcgcccacc

SEQ ID NO: 2967 - DNA, 20 bp, synthetic construct
  source 1..20: mol_type = other DNA
aggaccccggctgcgcccac

SEQ ID NO: 2968 - DNA, 20 bp, synthetic construct
  source 1..20: mol_type = other DNA
gaggaccccggctgcgccca

SEQ ID NO: 2969 - DNA, 20 bp, synthetic construct
  source 1..20: mol_type = other DNA
agaggaccccggctgcgccc

SEQ ID NO: 2970 - DNA, 20 bp, synthetic construct
  source 1..20: mol_type = other DNA
cagaggaccccggctgcgcc

SEQ ID NO: 2971 - DNA, 20 bp, synthetic construct
  source 1..20: mol_type = other DNA
ccagaggaccccggctgcgc

SEQ ID NO: 2972 - DNA, 20 bp, synthetic construct
  source 1..20: mol_type = other DNA
cccagaggaccccggctgcg

SEQ ID NO: 2973 - DNA, 20 bp, synthetic construct
  source 1..20: mol_type = other DNA
tcccagaggaccccggctgc

SEQ ID NO: 2974 - DNA, 20 bp, synthetic construct
  source 1..20: mol_type = other DNA
atcccagaggaccccggctg

SEQ ID NO: 2975 - DNA, 20 bp, synthetic construct
  source 1..20: mol_type = other DNA
aatcccagaggaccccggct

SEQ ID NO: 2976 - DNA, 20 bp, synthetic construct
  source 1..20: mol_type = other DNA
caatcccagaggaccccggc

SEQ ID NO: 2977 - DNA, 20 bp, synthetic construct
  source 1..20: mol_type = other DNA
acaatcccagaggaccccgg

SEQ ID NO: 2978 - DNA, 20 bp, synthetic construct
  source 1..20: mol_type = other DNA
gacaatcccagaggaccccg

SEQ ID NO: 2979 - DNA, 20 bp, synthetic construct
  source 1..20: mol_type = other DNA
tgacaatcccagaggacccc

SEQ ID NO: 2980 - DNA, 20 bp, synthetic construct
  source 1..20: mol_type = other DNA
ctgacaatcccagaggaccc

SEQ ID NO: 2981 - DNA, 20 bp, synthetic construct
  source 1..20: mol_type = other DNA
cctgacaatcccagaggacc

SEQ ID NO: 2982 - DNA, 20 bp, synthetic construct
  source 1..20: mol_type = other DNA
gcctgacaatcccagaggac

SEQ ID NO: 2983 - DNA, 20 bp, synthetic construct
  source 1..20: mol_type = other DNA
ggcctgacaatcccagagga

SEQ ID NO: 2984 - DNA, 20 bp, synthetic construct
  source 1..20: mol_type = other DNA
aggcctgacaatcccagagg

SEQ ID NO: 2985 - DNA, 20 bp, synthetic construct
  source 1..20: mol_type = other DNA
caggcctgacaatcccagag

SEQ ID NO: 2986 - DNA, 20 bp, synthetic construct
  source 1..20: mol_type = other DNA
acaggcctgacaatcccaga

SEQ ID NO: 2987 - DNA, 20 bp, synthetic construct
  source 1..20: mol_type = other DNA
gacaggcctgacaatcccag

SEQ ID NO: 2988 - DNA, 20 bp, synthetic construct
  source 1..20: mol_type = other DNA
ggacaggcctgacaatccca

SEQ ID NO: 2989 - DNA, 20 bp, synthetic construct
  source 1..20: mol_type = other DNA
tggacaggcctgacaatccc

SEQ ID NO: 2990 - DNA, 20 bp, synthetic construct
  source 1..20: mol_type = other DNA
ctggacaggcctgacaatcc

SEQ ID NO: 2991 - DNA, 20 bp, synthetic construct
  source 1..20: mol_type = other DNA
gctggacaggcctgacaatc

SEQ ID NO: 2992 - DNA, 20 bp, synthetic construct
  source 1..20: mol_type = other DNA
ggctggacaggcctgacaat

SEQ ID NO: 2993 - DNA, 20 bp, synthetic construct
  source 1..20: mol_type = other DNA
aggctggacaggcctgacaa

SEQ ID NO: 2994 - DNA, 20 bp, synthetic construct
  source 1..20: mol_type = other DNA
gaggctggacaggcctgaca

SEQ ID NO: 2995 - DNA, 20 bp, synthetic construct
  source 1..20: mol_type = other DNA
ggaggctggacaggcctgac

SEQ ID NO: 2996 - DNA, 20 bp, synthetic construct
  source 1..20: mol_type = other DNA
gggaggctggacaggcctga

SEQ ID NO: 2997 - DNA, 20 bp, synthetic construct
  source 1..20: mol_type = other DNA
cgggaggctggacaggcctg

SEQ ID NO: 2998 - DNA, 20 bp, synthetic construct
  source 1..20: mol_type = other DNA
gcgggaggctggacaggcct

SEQ ID NO: 2999 - DNA, 20 bp, synthetic construct
  source 1..20: mol_type = other DNA
tgcgggaggctggacaggcc

SEQ ID NO: 3000 - DNA, 20 bp, synthetic construct
  source 1..20: mol_type = other DNA
ctgcgggaggctggacaggc

SEQ ID NO: 3001 - DNA, 20 bp, synthetic construct
  source 1..20: mol_type = other DNA
gctgcgggaggctggacagg

SEQ ID NO: 3002 - DNA, 20 bp, synthetic construct
  source 1..20: mol_type = other DNA
tgctgcgggaggctggacag

SEQ ID NO: 3003 - DNA, 20 bp, synthetic construct
  source 1..20: mol_type = other DNA
atgctgcgggaggctggaca

SEQ ID NO: 3004 - DNA, 20 bp, synthetic construct
  source 1..20: mol_type = other DNA
gatgctgcgggaggctggac

SEQ ID NO: 3005 - DNA, 20 bp, synthetic construct
  source 1..20: mol_type = other DNA
ggatgctgcgggaggctgga

SEQ ID NO: 3006 - DNA, 20 bp, synthetic construct
  source 1..20: mol_type = other DNA
gggatgctgcgggaggctgg

SEQ ID NO: 3007 - DNA, 20 bp, synthetic construct
  source 1..20: mol_type = other DNA
ggggatgctgcgggaggctg

SEQ ID NO: 3008 - DNA, 20 bp, synthetic construct
  source 1..20: mol_type = other DNA
cggggatgctgcgggaggct

SEQ ID NO: 3009 - DNA, 20 bp, synthetic construct
  source 1..20: mol_type = other DNA
gcggggatgctgcgggaggc

SEQ ID NO: 3010 - DNA, 20 bp, synthetic construct
  source 1..20: mol_type = other DNA
ggcggggatgctgcgggagg

SEQ ID NO: 3011 - DNA, 20 bp, synthetic construct
  source 1..20: mol_type = other DNA
gggcggggatgctgcgggag

SEQ ID NO: 3012 - DNA, 20 bp, synthetic construct
  source 1..20: mol_type = other DNA
ggggcggggatgctgcggga

SEQ ID NO: 3013 - DNA, 20 bp, synthetic construct
  source 1..20: mol_type = other DNA
gggggcggggatgctgcggg

SEQ ID NO: 3014 - DNA, 20 bp, synthetic construct
  source 1..20: mol_type = other DNA
agggggcggggatgctgcgg

SEQ ID NO: 3015 - DNA, 20 bp, synthetic construct
  source 1..20: mol_type = other DNA
gagggggcggggatgctgcg

SEQ ID NO: 3016 - DNA, 20 bp, synthetic construct
  source 1..20: mol_type = other DNA
ggagggggcggggatgctgc

SEQ ID NO: 3017 - DNA, 20 bp, synthetic construct
  source 1..20: mol_type = other DNA
gggagggggcggggatgctg

SEQ ID NO: 3018 - DNA, 20 bp, synthetic construct
  source 1..20: mol_type = other DNA
ggggagggggcggggatgct

SEQ ID NO: 3019 - DNA, 20 bp, synthetic construct
  source 1..20: mol_type = other DNA
gggggagggggcggggatgc

SEQ ID NO: 3020 - DNA, 20 bp, synthetic construct
  source 1..20: mol_type = other DNA
cgggggagggggcggggatg

SEQ ID NO: 3021 - DNA, 20 bp, synthetic construct
  source 1..20: mol_type = other DNA
ccgggggagggggcggggat

SEQ ID NO: 3022 - DNA, 20 bp, synthetic construct
  source 1..20: mol_type = other DNA
gccgggggagggggcgggga

SEQ ID NO: 3023 - DNA, 20 bp, synthetic construct
  source 1..20: mol_type = other DNA
cgccgggggagggggcgggg

SEQ ID NO: 3024 - DNA, 20 bp, synthetic construct
  source 1..20: mol_type = other DNA
ccgccgggggagggggcggg

SEQ ID NO: 3025 - DNA, 20 bp, synthetic construct
  source 1..20: mol_type = other DNA
accgccgggggagggggcgg

SEQ ID NO: 3026 - DNA, 20 bp, synthetic construct
  source 1..20: mol_type = other DNA
gaccgccgggggagggggcg

SEQ ID NO: 3027 - DNA, 20 bp, synthetic construct
  source 1..20: mol_type = other DNA
tgaccgccgggggagggggc

SEQ ID NO: 3028 - DNA, 20 bp, synthetic construct
  source 1..20: mol_type = other DNA
ttgaccgccgggggaggggg

SEQ ID NO: 3029 - DNA, 20 bp, synthetic construct
  source 1..20: mol_type = other DNA
cttgaccgccgggggagggg

SEQ ID NO: 3030 - DNA, 20 bp, synthetic construct
  source 1..20: mol_type = other DNA
tcttgaccgccgggggaggg

SEQ ID NO: 3031 - DNA, 20 bp, synthetic construct
  source 1..20: mol_type = other DNA
atcttgaccgccgggggagg

SEQ ID NO: 3032 - DNA, 20 bp, synthetic construct
  source 1..20: mol_type = other DNA
catcttgaccgccgggggag

SEQ ID NO: 3033 - DNA, 20 bp, synthetic construct
  source 1..20: mol_type = other DNA
ccatcttgaccgccggggga

SEQ ID NO: 3034 - DNA, 20 bp, synthetic construct
  source 1..20: mol_type = other DNA
tccatcttgaccgccggggg

SEQ ID NO: 3035 - DNA, 20 bp, synthetic construct
  source 1..20: mol_type = other DNA
ctccatcttgaccgccgggg

SEQ ID NO: 3036 - DNA, 20 bp, synthetic construct
  source 1..20: mol_type = other DNA
cctccatcttgaccgccggg

SEQ ID NO: 3037 - DNA, 20 bp, synthetic construct
  source 1..20: mol_type = other DNA
ccctccatcttgaccgccgg

SEQ ID NO: 3038 - DNA, 20 bp, synthetic construct
  source 1..20: mol_type = other DNA
tccctccatcttgaccgccg

SEQ ID NO: 3039 - DNA, 20 bp, synthetic construct
  source 1..20: mol_type = other DNA
ctccctccatcttgaccgcc

SEQ ID NO: 3040 - DNA, 20 bp, synthetic construct
  source 1..20: mol_type = other DNA
gctccctccatcttgaccgc

SEQ ID NO: 3041 - DNA, 20 bp, synthetic construct
  source 1..20: mol_type = other DNA
cgctccctccatcttgaccg

SEQ ID NO: 3042 - DNA, 20 bp, synthetic construct
  source 1..20: mol_type = other DNA
ccgctccctccatcttgacc

SEQ ID NO: 3043 - DNA, 20 bp, synthetic construct
  source 1..20: mol_type = other DNA
cccgctccctccatcttgac

SEQ ID NO: 3044 - DNA, 20 bp, synthetic construct
  source 1..20: mol_type = other DNA
gcccgctccctccatcttga

SEQ ID NO: 3045 - DNA, 20 bp, synthetic construct
  source 1..20: mol_type = other DNA
cgcccgctccctccatcttg

SEQ ID NO: 3046 - DNA, 20 bp, synthetic construct
  source 1..20: mol_type = other DNA
ccgcccgctccctccatctt

SEQ ID NO: 3047 - DNA, 20 bp, synthetic construct
  source 1..20: mol_type = other DNA
gccgcccgctccctccatct

SEQ ID NO: 3048 - DNA, 20 bp, synthetic construct
  source 1..20: mol_type = other DNA
ggccgcccgctccctccatc

SEQ ID NO: 3049 - DNA, 20 bp, synthetic construct
  source 1..20: mol_type = other DNA
aggccgcccgctccctccat

SEQ ID NO: 3050 - DNA, 20 bp, synthetic construct
  source 1..20: mol_type = other DNA
gaggccgcccgctccctcca

SEQ ID NO: 3051 - DNA, 20 bp, synthetic construct
  source 1..20: mol_type = other DNA
ggaggccgcccgctccctcc

SEQ ID NO: 3052 - DNA, 20 bp, synthetic construct
  source 1..20: mol_type = other DNA
gggaggccgcccgctccctc

SEQ ID NO: 3053 - DNA, 20 bp, synthetic construct
  source 1..20: mol_type = other DNA
ggggaggccgcccgctccct

SEQ ID NO: 3054 - DNA, 20 bp, synthetic construct
  source 1..20: mol_type = other DNA
aggggaggccgcccgctccc

SEQ ID NO: 3055 - DNA, 20 bp, synthetic construct
  source 1..20: mol_type = other DNA
gaggggaggccgcccgctcc

SEQ ID NO: 3056 - DNA, 20 bp, synthetic construct
  source 1..20: mol_type = other DNA
ggaggggaggccgcccgctc

SEQ ID NO: 3057 - DNA, 20 bp, synthetic construct
  source 1..20: mol_type = other DNA
gggaggggaggccgcccgct

SEQ ID NO: 3058 - DNA, 20 bp, synthetic construct
  source 1..20: mol_type = other DNA
ggggaggggaggccgcccgc

SEQ ID NO: 3059 - DNA, 20 bp, synthetic construct
  source 1..20: mol_type = other DNA
tggggaggggaggccgcccg

SEQ ID NO: 3060 - DNA, 20 bp, synthetic construct
  source 1..20: mol_type = other DNA
gtggggaggggaggccgccc

SEQ ID NO: 3061 - DNA, 20 bp, synthetic construct
  source 1..20: mol_type = other DNA
cgtggggaggggaggccgcc

SEQ ID NO: 3062 - DNA, 20 bp, synthetic construct
  source 1..20: mol_type = other DNA
gcgtggggaggggaggccgc

SEQ ID NO: 3063 - DNA, 20 bp, synthetic construct
  source 1..20: mol_type = other DNA
cgcgtggggaggggaggccg

SEQ ID NO: 3064 - DNA, 20 bp, synthetic construct
  source 1..20: mol_type = other DNA
acgcgtggggaggggaggcc

SEQ ID NO: 3065 - DNA, 20 bp, synthetic construct
  source 1..20: mol_type = other DNA
cacgcgtggggaggggaggc

SEQ ID NO: 3066 - DNA, 20 bp, synthetic construct
  source 1..20: mol_type = other DNA
acacgcgtggggaggggagg

SEQ ID NO: 3067 - DNA, 20 bp, synthetic construct
  source 1..20: mol_type = other DNA
aacacgcgtggggaggggag

SEQ ID NO: 3068 - DNA, 20 bp, synthetic construct
  source 1..20: mol_type = other DNA
caacacgcgtggggagggga

SEQ ID NO: 3069 - DNA, 20 bp, synthetic construct
  source 1..20: mol_type = other DNA
ccaacacgcgtggggagggg

SEQ ID NO: 3070 - DNA, 20 bp, synthetic construct
  source 1..20: mol_type = other DNA
cccaacacgcgtggggaggg

SEQ ID NO: 3071 - DNA, 20 bp, synthetic construct
  source 1..20: mol_type = other DNA
tcccaacacgcgtggggagg

SEQ ID NO: 3072 - DNA, 20 bp, synthetic construct
  source 1..20: mol_type = other DNA
ctcccaacacgcgtggggag

SEQ ID NO: 3073 - DNA, 20 bp, synthetic construct
  source 1..20: mol_type = other DNA
cctcccaacacgcgtgggga

SEQ ID NO: 3074 - DNA, 20 bp, synthetic construct
  source 1..20: mol_type = other DNA
ccctcccaacacgcgtgggg

SEQ ID NO: 3075 - DNA, 20 bp, synthetic construct
  source 1..20: mol_type = other DNA
cccctcccaacacgcgtggg

SEQ ID NO: 3076 - DNA, 20 bp, synthetic construct
  source 1..20: mol_type = other DNA
acccctcccaacacgcgtgg

SEQ ID NO: 3077 - DNA, 20 bp, synthetic construct
  source 1..20: mol_type = other DNA
aacccctcccaacacgcgtg

SEQ ID NO: 3078 - DNA, 20 bp, synthetic construct
  source 1..20: mol_type = other DNA
gaacccctcccaacacgcgt

SEQ ID NO: 3079 - DNA, 20 bp, synthetic construct
  source 1..20: mol_type = other DNA
agaacccctcccaacacgcg

SEQ ID NO: 3080 - DNA, 20 bp, synthetic construct
  source 1..20: mol_type = other DNA
gagaacccctcccaacacgc

SEQ ID NO: 3081 - DNA, 20 bp, synthetic construct
  source 1..20: mol_type = other DNA
cgagaacccctcccaacacg

SEQ ID NO: 3082 - DNA, 20 bp, synthetic construct
  source 1..20: mol_type = other DNA
ccgagaacccctcccaacac

SEQ ID NO: 3083 - DNA, 20 bp, synthetic construct
  source 1..20: mol_type = other DNA
cccgagaacccctcccaaca

SEQ ID NO: 3084 - DNA, 20 bp, synthetic construct
  source 1..20: mol_type = other DNA
acccgagaacccctcccaac

SEQ ID NO: 3085 - DNA, 20 bp, synthetic construct
  source 1..20: mol_type = other DNA
tacccgagaacccctcccaa

SEQ ID NO: 3086 - DNA, 20 bp, synthetic construct
  source 1..20: mol_type = other DNA
ctacccgagaacccctccca

SEQ ID NO: 3087 - DNA, 20 bp, synthetic construct
  source 1..20: mol_type = other DNA
gctacccgagaacccctccc

SEQ ID NO: 3088 - DNA, 20 bp, synthetic construct
  source 1..20: mol_type = other DNA
cgctacccgagaacccctcc

SEQ ID NO: 3089 - DNA, 20 bp, synthetic construct
  source 1..20: mol_type = other DNA
ccgctacccgagaacccctc

SEQ ID NO: 3090 - DNA, 20 bp, synthetic construct
  source 1..20: mol_type = other DNA
gccgctacccgagaacccct

SEQ ID NO: 3091 - DNA, 20 bp, synthetic construct
  source 1..20: mol_type = other DNA
cgccgctacccgagaacccc

SEQ ID NO: 3092 - DNA, 20 bp, synthetic construct
  source 1..20: mol_type = other DNA
tcgccgctacccgagaaccc

SEQ ID NO: 3093 - DNA, 20 bp, synthetic construct
  source 1..20: mol_type = other DNA
atcgccgctacccgagaacc

SEQ ID NO: 3094 - DNA, 20 bp, synthetic construct
  source 1..20: mol_type = other DNA
catcgccgctacccgagaac

SEQ ID NO: 3095 - DNA, 20 bp, synthetic construct
  source 1..20: mol_type = other DNA
ccatcgccgctacccgagaa

SEQ ID NO: 3096 - DNA, 20 bp, synthetic construct
  source 1..20: mol_type = other DNA
accatcgccgctacccgaga

SEQ ID NO: 3097 - DNA, 20 bp, synthetic construct
  source 1..20: mol_type = other DNA
gaccatcgccgctacccgag

SEQ ID NO: 3098 - DNA, 20 bp, synthetic construct
  source 1..20: mol_type = other DNA
tgaccatcgccgctacccga

SEQ ID NO: 3099 - DNA, 20 bp, synthetic construct
  source 1..20: mol_type = other DNA
ctgaccatcgccgctacccg

SEQ ID NO: 3100 - DNA, 20 bp, synthetic construct
  source 1..20: mol_type = other DNA
gctgaccatcgccgctaccc

SEQ ID NO: 3101 - DNA, 20 bp, synthetic construct
  source 1..20: mol_type = other DNA
ggctgaccatcgccgctacc

SEQ ID NO: 3102 - DNA, 20 bp, synthetic construct
  source 1..20: mol_type = other DNA
gggctgaccatcgccgctac

SEQ ID NO: 3103 - DNA, 20 bp, synthetic construct
  source 1..20: mol_type = other DNA
ggggctgaccatcgccgcta

SEQ ID NO: 3104 - DNA, 20 bp, synthetic construct
  source 1..20: mol_type = other DNA
cggggctgaccatcgccgct

SEQ ID NO: 3105 - DNA, 20 bp, synthetic construct
  source 1..20: mol_type = other DNA
ccggggctgaccatcgccgc

SEQ ID NO: 3106 - DNA, 20 bp, synthetic construct
  source 1..20: mol_type = other DNA
gccggggctgaccatcgccg

SEQ ID NO: 3107 - DNA, 20 bp, synthetic construct
  source 1..20: mol_type = other DNA
agccggggctgaccatcgcc

SEQ ID NO: 3108 - DNA, 20 bp, synthetic construct
  source 1..20: mol_type = other DNA
gagccggggctgaccatcgc

SEQ ID NO: 3109 - DNA, 20 bp, synthetic construct
  source 1..20: mol_type = other DNA
ggagccggggctgaccatcg

SEQ ID NO: 3110 - DNA, 20 bp, synthetic construct
  source 1..20: mol_type = other DNA
gggagccggggctgaccatc

SEQ ID NO: 3111 - DNA, 20 bp, synthetic construct
  source 1..20: mol_type = other DNA
ggggagccggggctgaccat

SEQ ID NO: 3112 - DNA, 20 bp, synthetic construct
  source 1..20: mol_type = other DNA
gggggagccggggctgacca

SEQ ID NO: 3113 - DNA, 20 bp, synthetic construct
  source 1..20: mol_type = other DNA
agggggagccggggctgacc

SEQ ID NO: 3114 - DNA, 20 bp, synthetic construct
  source 1..20: mol_type = other DNA
aagggggagccggggctgac

SEQ ID NO: 3115 - DNA, 20 bp, synthetic construct
  source 1..20: mol_type = other DNA
gaagggggagccggggctga

SEQ ID NO: 3116 - DNA, 20 bp, synthetic construct
  source 1..20: mol_type = other DNA
ggaagggggagccggggctg

SEQ ID NO: 3117 - DNA, 20 bp, synthetic construct
  source 1..20: mol_type = other DNA
cggaagggggagccggggct

SEQ ID NO: 3118 - DNA, 20 bp, synthetic construct
  source 1..20: mol_type = other DNA
gcggaagggggagccggggc

SEQ ID NO: 3119 - DNA, 20 bp, synthetic construct
  source 1..20: mol_type = other DNA
tgcggaagggggagccgggg

SEQ ID NO: 3120 - DNA, 20 bp, synthetic construct
  source 1..20: mol_type = other DNA
gtgcggaagggggagccggg

SEQ ID NO: 3121 - DNA, 20 bp, synthetic construct
  source 1..20: mol_type = other DNA
cgtgcggaagggggagccgg

SEQ ID NO: 3122 - DNA, 20 bp, synthetic construct
  source 1..20: mol_type = other DNA
tcgtgcggaagggggagccg

SEQ ID NO: 3123 - DNA, 20 bp, synthetic construct
  source 1..20: mol_type = other DNA
atcgtgcggaagggggagcc

SEQ ID NO: 3124 - DNA, 20 bp, synthetic construct
  source 1..20: mol_type = other DNA
gatcgtgcggaagggggagc

SEQ ID NO: 3125 - DNA, 20 bp, synthetic construct
  source 1..20: mol_type = other DNA
ggatcgtgcggaagggggag

SEQ ID NO: 3126 - DNA, 20 bp, synthetic construct
  source 1..20: mol_type = other DNA
aggatcgtgcggaaggggga

SEQ ID NO: 3127 - DNA, 20 bp, synthetic construct
  source 1..20: mol_type = other DNA
gaggatcgtgcggaaggggg

SEQ ID NO: 3128 - DNA, 20 bp, synthetic construct
  source 1..20: mol_type = other DNA
ggaggatcgtgcggaagggg

SEQ ID NO: 3129 - DNA, 20 bp, synthetic construct
  source 1..20: mol_type = other DNA
cggaggatcgtgcggaaggg

SEQ ID NO: 3130 - DNA, 20 bp, synthetic construct
  source 1..20: mol_type = other DNA
gcggaggatcgtgcggaagg

SEQ ID NO: 3131 - DNA, 20 bp, synthetic construct
  source 1..20: mol_type = other DNA
ggcggaggatcgtgcggaag

SEQ ID NO: 3132 - DNA, 20 bp, synthetic construct
  source 1..20: mol_type = other DNA
gggcggaggatcgtgcggaa

SEQ ID NO: 3133 - DNA, 20 bp, synthetic construct
  source 1..20: mol_type = other DNA
cgggcggaggatcgtgcgga

SEQ ID NO: 3134 - DNA, 20 bp, synthetic construct
  source 1..20: mol_type = other DNA
gcgggcggaggatcgtgcgg

SEQ ID NO: 3135 - DNA, 20 bp, synthetic construct
  source 1..20: mol_type = other DNA
tgcgggcggaggatcgtgcg

SEQ ID NO: 3136 - DNA, 20 bp, synthetic construct
  source 1..20: mol_type = other DNA
ctgcgggcggaggatcgtgc

SEQ ID NO: 3137 - DNA, 20 bp, synthetic construct
  source 1..20: mol_type = other DNA
gctgcgggcggaggatcgtg

SEQ ID NO: 3138 - DNA, 20 bp, synthetic construct
  source 1..20: mol_type = other DNA
cgctgcgggcggaggatcgt

SEQ ID NO: 3139 - DNA, 20 bp, synthetic construct
  source 1..20: mol_type = other DNA
acgctgcgggcggaggatcg

SEQ ID NO: 3140 - DNA, 20 bp, synthetic construct
  source 1..20: mol_type = other DNA
cacgctgcgggcggaggatc

SEQ ID NO: 3141 - DNA, 20 bp, synthetic construct
  source 1..20: mol_type = other DNA
ccacgctgcgggcggaggat

SEQ ID NO: 3142 - DNA, 20 bp, synthetic construct
  source 1..20: mol_type = other DNA
cccacgctgcgggcggagga

SEQ ID NO: 3143 - DNA, 20 bp, synthetic construct
  source 1..20: mol_type = other DNA
ccccacgctgcgggcggagg

SEQ ID NO: 3144 - DNA, 20 bp, synthetic construct
  source 1..20: mol_type = other DNA
tccccacgctgcgggcggag

SEQ ID NO: 3145 - DNA, 20 bp, synthetic construct
  source 1..20: mol_type = other DNA
atccccacgctgcgggcgga

SEQ ID NO: 3146 - DNA, 20 bp, synthetic construct
  source 1..20: mol_type = other DNA
catccccacgctgcgggcgg

SEQ ID NO: 3147 - DNA, 20 bp, synthetic construct
  source 1..20: mol_type = other DNA
gcatccccacgctgcgggcg

SEQ ID NO: 3148 - DNA, 20 bp, synthetic construct
  source 1..20: mol_type = other DNA
agcatccccacgctgcgggc

SEQ ID NO: 3149 - DNA, 20 bp, synthetic construct
  source 1..20: mol_type = other DNA
gagcatccccacgctgcggg

SEQ ID NO: 3150 - DNA, 20 bp, synthetic construct
  source 1..20: mol_type = other DNA
cgagcatccccacgctgcgg

SEQ ID NO: 3151 - DNA, 20 bp, synthetic construct
  source 1..20: mol_type = other DNA
ccgagcatccccacgctgcg

SEQ ID NO: 3152 - DNA, 20 bp, synthetic construct
  source 1..20: mol_type = other DNA
cccgagcatccccacgctgc

SEQ ID NO: 3153 - DNA, 20 bp, synthetic construct
  source 1..20: mol_type = other DNA
gcccgagcatccccacgctg

SEQ ID NO: 3154 - DNA, 20 bp, synthetic construct
  source 1..20: mol_type = other DNA
tgcccgagcatccccacgct

SEQ ID NO: 3155 - DNA, 20 bp, synthetic construct
  source 1..20: mol_type = other DNA
ctgcccgagcatccccacgc

SEQ ID NO: 3156 - DNA, 20 bp, synthetic construct
  source 1..20: mol_type = other DNA
gctgcccgagcatccccacg

SEQ ID NO: 3157 - DNA, 20 bp, synthetic construct
  source 1..20: mol_type = other DNA
agctgcccgagcatccccac

SEQ ID NO: 3158 - DNA, 20 bp, synthetic construct
  source 1..20: mol_type = other DNA
gagctgcccgagcatcccca

SEQ ID NO: 3159 - DNA, 20 bp, synthetic construct
  source 1..20: mol_type = other DNA
ggagctgcccgagcatcccc

SEQ ID NO: 3160 - DNA, 20 bp, synthetic construct
  source 1..20: mol_type = other DNA
aggagctgcccgagcatccc

SEQ ID NO: 3161 - DNA, 20 bp, synthetic construct
  source 1..20: mol_type = other DNA
gaggagctgcccgagcatcc

SEQ ID NO: 3162 - DNA, 20 bp, synthetic construct
  source 1..20: mol_type = other DNA
ggaggagctgcccgagcatc

SEQ ID NO: 3163 - DNA, 20 bp, synthetic construct
  source 1..20: mol_type = other DNA
tggaggagctgcccgagcat

SEQ ID NO: 3164 - DNA, 20 bp, synthetic construct
  source 1..20: mol_type = other DNA
gtggaggagctgcccgagca

SEQ ID NO: 3165 - DNA, 20 bp, synthetic construct
  source 1..20: mol_type = other DNA
agtggaggagctgcccgagc

SEQ ID NO: 3166 - DNA, 20 bp, synthetic construct
  source 1..20: mol_type = other DNA
gagtggaggagctgcccgag

SEQ ID NO: 3167 - DNA, 20 bp, synthetic construct
  source 1..20: mol_type = other DNA
ggagtggaggagctgcccga

SEQ ID NO: 3168 - DNA, 20 bp, synthetic construct
  source 1..20: mol_type = other DNA
gggagtggaggagctgcccg

SEQ ID NO: 3169 - DNA, 20 bp, synthetic construct
  source 1..20: mol_type = other DNA
cgggagtggaggagctgccc

SEQ ID NO: 3170 - DNA, 20 bp, synthetic construct
  source 1..20: mol_type = other DNA
ccgggagtggaggagctgcc

SEQ ID NO: 3171 - DNA, 20 bp, synthetic construct
  source 1..20: mol_type = other DNA
accgggagtggaggagctgc

SEQ ID NO: 3172 - DNA, 20 bp, synthetic construct
  source 1..20: mol_type = other DNA
aaccgggagtggaggagctg

SEQ ID NO: 3173 - DNA, 20 bp, synthetic construct
  source 1..20: mol_type = other DNA
aaaccgggagtggaggagct

SEQ ID NO: 3174 - DNA, 20 bp, synthetic construct
  source 1..20: mol_type = other DNA
taaaccgggagtggaggagc

SEQ ID NO: 3175 - DNA, 20 bp, synthetic construct
  source 1..20: mol_type = other DNA
ctaaaccgggagtggaggag

SEQ ID NO: 3176 - DNA, 20 bp, synthetic construct
  source 1..20: mol_type = other DNA
cctaaaccgggagtggagga

SEQ ID NO: 3177 - DNA, 20 bp, synthetic construct
  source 1..20: mol_type = other DNA
acctaaaccgggagtggagg

SEQ ID NO: 3178 - DNA, 20 bp, synthetic construct
  source 1..20: mol_type = other DNA
cacctaaaccgggagtggag

SEQ ID NO: 3179 - DNA, 20 bp, synthetic construct
  source 1..20: mol_type = other DNA
acacctaaaccgggagtgga

SEQ ID NO: 3180 - DNA, 20 bp, synthetic construct
  source 1..20: mol_type = other DNA
cacacctaaaccgggagtgg

SEQ ID NO: 3181 - DNA, 20 bp, synthetic construct
  source 1..20: mol_type = other DNA
tcacacctaaaccgggagtg

SEQ ID NO: 3182 - DNA, 20 bp, synthetic construct
  source 1..20: mol_type = other DNA
ttcacacctaaaccgggagt

SEQ ID NO: 3183 - DNA, 20 bp, synthetic construct
  source 1..20: mol_type = other DNA
gttcacacctaaaccgggag

SEQ ID NO: 3184 - DNA, 20 bp, synthetic construct
  source 1..20: mol_type = other DNA
cgttcacacctaaaccggga

SEQ ID NO: 3185 - DNA, 20 bp, synthetic construct
  source 1..20: mol_type = other DNA
acgttcacacctaaaccggg

SEQ ID NO: 3186 - DNA, 20 bp, synthetic construct
  source 1..20: mol_type = other DNA
aacgttcacacctaaaccgg

SEQ ID NO: 3187 - DNA, 20 bp, synthetic construct
  source 1..20: mol_type = other DNA
caacgttcacacctaaaccg

SEQ ID NO: 3188 - DNA, 20 bp, synthetic construct
  source 1..20: mol_type = other DNA
ccaacgttcacacctaaacc

SEQ ID NO: 3189 - DNA, 20 bp, synthetic construct
  source 1..20: mol_type = other DNA
tccaacgttcacacctaaac

SEQ ID NO: 3190 - DNA, 20 bp, synthetic construct
  source 1..20: mol_type = other DNA
ctccaacgttcacacctaaa

SEQ ID NO: 3191 - DNA, 20 bp, synthetic construct
  source 1..20: mol_type = other DNA
cctccaacgttcacacctaa

SEQ ID NO: 3192 - DNA, 20 bp, synthetic construct
  source 1..20: mol_type = other DNA
ccctccaacgttcacaccta

SEQ ID NO: 3193 - DNA, 20 bp, synthetic construct
  source 1..20: mol_type = other DNA
cccctccaacgttcacacct

SEQ ID NO: 3194 - DNA, 20 bp, synthetic construct
  source 1..20: mol_type = other DNA
acccctccaacgttcacacc

SEQ ID NO: 3195 - DNA, 20 bp, synthetic construct
  source 1..20: mol_type = other DNA
gacccctccaacgttcacac

SEQ ID NO: 3196 - DNA, 20 bp, synthetic construct
  source 1..20: mol_type = other DNA
agacccctccaacgttcaca

SEQ ID NO: 3197 - DNA, 20 bp, synthetic construct
  source 1..20: mol_type = other DNA
cagacccctccaacgttcac

SEQ ID NO: 3198 - DNA, 20 bp, synthetic construct
  source 1..20: mol_type = other DNA
ccagacccctccaacgttca

SEQ ID NO: 3199 - DNA, 20 bp, synthetic construct
  source 1..20: mol_type = other DNA
tccagacccctccaacgttc

SEQ ID NO: 3200 - DNA, 20 bp, synthetic construct
  source 1..20: mol_type = other DNA
ctccagacccctccaacgtt

SEQ ID NO: 3201 - DNA, 20 bp, synthetic construct
  source 1..20: mol_type = other DNA
cctccagacccctccaacgt

SEQ ID NO: 3202 - DNA, 20 bp, synthetic construct
  source 1..20: mol_type = other DNA
gcctccagacccctccaacg

SEQ ID NO: 3203 - DNA, 20 bp, synthetic construct
  source 1..20: mol_type = other DNA
agcctccagacccctccaac

SEQ ID NO: 3204 - DNA, 20 bp, synthetic construct
  source 1..20: mol_type = other DNA
cagcctccagacccctccaa

SEQ ID NO: 3205 - DNA, 20 bp, synthetic construct
  source 1..20: mol_type = other DNA
acagcctccagacccctcca

SEQ ID NO: 3206 - DNA, 20 bp, synthetic construct
  source 1..20: mol_type = other DNA
cacagcctccagacccctcc

SEQ ID NO: 3207 - DNA, 20 bp, synthetic construct
  source 1..20: mol_type = other DNA
ccacagcctccagacccctc

SEQ ID NO: 3208 - DNA, 20 bp, synthetic construct
  source 1..20: mol_type = other DNA
accacagcctccagacccct

SEQ ID NO: 3209 - DNA, 20 bp, synthetic construct
  source 1..20: mol_type = other DNA
caccacagcctccagacccc

SEQ ID NO: 3210 - DNA, 20 bp, synthetic construct
  source 1..20: mol_type = other DNA
ccaccacagcctccagaccc

SEQ ID NO: 3211 - DNA, 20 bp, synthetic construct
  source 1..20: mol_type = other DNA
gccaccacagcctccagacc

SEQ ID NO: 3212 - DNA, 20 bp, synthetic construct
  source 1..20: mol_type = other DNA
cgccaccacagcctccagac

SEQ ID NO: 3213 - DNA, 20 bp, synthetic construct
  source 1..20: mol_type = other DNA
acgccaccacagcctccaga

SEQ ID NO: 3214 - DNA, 20 bp, synthetic construct
  source 1..20: mol_type = other DNA
aacgccaccacagcctccag

SEQ ID NO: 3215 - DNA, 20 bp, synthetic construct
  source 1..20: mol_type = other DNA
aaacgccaccacagcctcca

SEQ ID NO: 3216 - DNA, 20 bp, synthetic construct
  source 1..20: mol_type = other DNA
aaaacgccaccacagcctcc

SEQ ID NO: 3217 - DNA, 20 bp, synthetic construct
  source 1..20: mol_type = other DNA
gaaaacgccaccacagcctc

SEQ ID NO: 3218 - DNA, 20 bp, synthetic construct
  source 1..20: mol_type = other DNA
ggaaaacgccaccacagcct

SEQ ID NO: 3219 - DNA, 20 bp, synthetic construct
  source 1..20: mol_type = other DNA
cggaaaacgccaccacagcc

SEQ ID NO: 3220 - DNA, 20 bp, synthetic construct
  source 1..20: mol_type = other DNA
ccggaaaacgccaccacagc

SEQ ID NO: 3221 - DNA, 20 bp, synthetic construct
  source 1..20: mol_type = other DNA
tccggaaaacgccaccacag

SEQ ID NO: 3222 - DNA, 20 bp, synthetic construct
  source 1..20: mol_type = other DNA
ttccggaaaacgccaccaca

SEQ ID NO: 3223 - DNA, 20 bp, synthetic construct
  source 1..20: mol_type = other DNA
gttccggaaaacgccaccac

SEQ ID NO: 3224 - DNA, 20 bp, synthetic construct
  source 1..20: mol_type = other DNA
tgttccggaaaacgccacca

SEQ ID NO: 3225 - DNA, 20 bp, synthetic construct
  source 1..20: mol_type = other DNA
atgttccggaaaacgccacc

SEQ ID NO: 3226 - DNA, 20 bp, synthetic construct
  source 1..20: mol_type = other DNA
catgttccggaaaacgccac

SEQ ID NO: 3227 - DNA, 20 bp, synthetic construct
  source 1..20: mol_type = other DNA
acatgttccggaaaacgcca

SEQ ID NO: 3228 - DNA, 20 bp, synthetic construct
  source 1..20: mol_type = other DNA
gacatgttccggaaaacgcc

SEQ ID NO: 3229 - DNA, 20 bp, synthetic construct
  source 1..20: mol_type = other DNA
ggacatgttccggaaaacgc

SEQ ID NO: 3230 - DNA, 20 bp, synthetic construct
  source 1..20: mol_type = other DNA
gggacatgttccggaaaacg

SEQ ID NO: 3231 - DNA, 20 bp, synthetic construct
  source 1..20: mol_type = other DNA
ggggacatgttccggaaaac

SEQ ID NO: 3232 - DNA, 20 bp, synthetic construct
  source 1..20: mol_type = other DNA
gggggacatgttccggaaaa

SEQ ID NO: 3233 - DNA, 20 bp, synthetic construct
  source 1..20: mol_type = other DNA
agggggacatgttccggaaa

SEQ ID NO: 3234 - DNA, 20 bp, synthetic construct
  source 1..20: mol_type = other DNA
gagggggacatgttccggaa

SEQ ID NO: 3235 - DNA, 20 bp, synthetic construct
  source 1..20: mol_type = other DNA
ggagggggacatgttccgga

SEQ ID NO: 3236 - DNA, 20 bp, synthetic construct
  source 1..20: mol_type = other DNA
tggagggggacatgttccgg

SEQ ID NO: 3237 - DNA, 20 bp, synthetic construct
  source 1..20: mol_type = other DNA
atggagggggacatgttccg

SEQ ID NO: 3238 - DNA, 20 bp, synthetic construct
  source 1..20: mol_type = other DNA
catggagggggacatgttcc

SEQ ID NO: 3239 - DNA, 20 bp, synthetic construct
  source 1..20: mol_type = other DNA
ccatggagggggacatgttc

SEQ ID NO: 3240 - DNA, 20 bp, synthetic construct
  source 1..20: mol_type = other DNA
cccatggagggggacatgtt

SEQ ID NO: 3241 - DNA, 20 bp, synthetic construct
  source 1..20: mol_type = other DNA
ccccatggagggggacatgt

SEQ ID NO: 3242 - DNA, 20 bp, synthetic construct
  source 1..20: mol_type = other DNA
cccccatggagggggacatg

SEQ ID NO: 3243 - DNA, 20 bp, synthetic construct
  source 1..20: mol_type = other DNA
tcccccatggagggggacat

SEQ ID NO: 3244 - DNA, 20 bp, synthetic construct
  source 1..20: mol_type = other DNA
gtcccccatggagggggaca

SEQ ID NO: 3245 - DNA, 20 bp, synthetic construct
  source 1..20: mol_type = other DNA
tgtcccccatggagggggac

SEQ ID NO: 3246 - DNA, 20 bp, synthetic construct
  source 1..20: mol_type = other DNA
atgtcccccatggaggggga

SEQ ID NO: 3247 - DNA, 20 bp, synthetic construct
  source 1..20: mol_type = other DNA
gatgtcccccatggaggggg

SEQ ID NO: 3248 - DNA, 20 bp, synthetic construct
  source 1..20: mol_type = other DNA
agatgtcccccatggagggg

SEQ ID NO: 3249 - DNA, 20 bp, synthetic construct
  source 1..20: mol_type = other DNA
gagatgtcccccatggaggg

SEQ ID NO: 3250 - DNA, 20 bp, synthetic construct
  source 1..20: mol_type = other DNA
agagatgtcccccatggagg

SEQ ID NO: 3251 - DNA, 20 bp, synthetic construct
  source 1..20: mol_type = other DNA
cagagatgtcccccatggag

SEQ ID NO: 3252 - DNA, 20 bp, synthetic construct
  source 1..20: mol_type = other DNA
ccagagatgtcccccatgga

SEQ ID NO: 3253 - DNA, 20 bp, synthetic construct
  source 1..20: mol_type = other DNA
tccagagatgtcccccatgg

SEQ ID NO: 3254 - DNA, 20 bp, synthetic construct
  source 1..20: mol_type = other DNA
ctccagagatgtcccccatg

SEQ ID NO: 3255 - DNA, 20 bp, synthetic construct
  source 1..20: mol_type = other DNA
cctccagagatgtcccccat

SEQ ID NO: 3256 - DNA, 20 bp, synthetic construct
  source 1..20: mol_type = other DNA
ccctccagagatgtccccca

SEQ ID NO: 3257 - DNA, 20 bp, synthetic construct
  source 1..20: mol_type = other DNA
cccctccagagatgtccccc

SEQ ID NO: 3258 - DNA, 20 bp, synthetic construct
  source 1..20: mol_type = other DNA
tcccctccagagatgtcccc

SEQ ID NO: 3259 - DNA, 20 bp, synthetic construct
  source 1..20: mol_type = other DNA
ctcccctccagagatgtccc

SEQ ID NO: 3260 - DNA, 20 bp, synthetic construct
  source 1..20: mol_type = other DNA
tctcccctccagagatgtcc

SEQ ID NO: 3261 - DNA, 20 bp, synthetic construct
  source 1..20: mol_type = other DNA
ttctcccctccagagatgtc

SEQ ID NO: 3262 - DNA, 20 bp, synthetic construct
  source 1..20: mol_type = other DNA
cttctcccctccagagatgt

SEQ ID NO: 3263 - DNA, 20 bp, synthetic construct
  source 1..20: mol_type = other DNA
acttctcccctccagagatg

SEQ ID NO: 3264 - DNA, 20 bp, synthetic construct
  source 1..20: mol_type = other DNA
aacttctcccctccagagat

SEQ ID NO: 3265 - DNA, 20 bp, synthetic construct
  source 1..20: mol_type = other DNA
taacttctcccctccagaga

SEQ ID NO: 3266 - DNA, 20 bp, synthetic construct
  source 1..20: mol_type = other DNA
ctaacttctcccctccagag

SEQ ID NO: 3267 - DNA, 20 bp, synthetic construct
  source 1..20: mol_type = other DNA
cctaacttctcccctccaga

SEQ ID NO: 3268 - DNA, 20 bp, synthetic construct
  source 1..20: mol_type = other DNA
ccctaacttctcccctccag

SEQ ID NO: 3269 - DNA, 20 bp, synthetic construct
  source 1..20: mol_type = other DNA
gccctaacttctcccctcca

SEQ ID NO: 3270 - DNA, 20 bp, synthetic construct
  source 1..20: mol_type = other DNA
ggccctaacttctcccctcc

SEQ ID NO: 3271 - DNA, 20 bp, synthetic construct
  source 1..20: mol_type = other DNA
cggccctaacttctcccctc

SEQ ID NO: 3272 - DNA, 20 bp, synthetic construct
  source 1..20: mol_type = other DNA
gcggccctaacttctcccct

SEQ ID NO: 3273 - DNA, 20 bp, synthetic construct
  source 1..20: mol_type = other DNA
cgcggccctaacttctcccc

SEQ ID NO: 3274 - DNA, 20 bp, synthetic construct
  source 1..20: mol_type = other DNA
acgcggccctaacttctccc

SEQ ID NO: 3275 - DNA, 20 bp, synthetic construct
  source 1..20: mol_type = other DNA
gacgcggccctaacttctcc

SEQ ID NO: 3276 - DNA, 20 bp, synthetic construct
  source 1..20: mol_type = other DNA
ggacgcggccctaacttctc

SEQ ID NO: 3277 - DNA, 20 bp, synthetic construct
  source 1..20: mol_type = other DNA
gggacgcggccctaacttct

SEQ ID NO: 3278 - DNA, 20 bp, synthetic construct
  source 1..20: mol_type = other DNA
ggggacgcggccctaacttc

SEQ ID NO: 3279 - DNA, 20 bp, synthetic construct
  source 1..20: mol_type = other DNA
gggggacgcggccctaactt

SEQ ID NO: 3280 - DNA, 20 bp, synthetic construct
  source 1..20: mol_type = other DNA
cgggggacgcggccctaact

SEQ ID NO: 3281 - DNA, 20 bp, synthetic construct
  source 1..20: mol_type = other DNA
acgggggacgcggccctaac

SEQ ID NO: 3282 - DNA, 20 bp, synthetic construct
  source 1..20: mol_type = other DNA
cacgggggacgcggccctaa

SEQ ID NO: 3283 - DNA, 20 bp, synthetic construct
  source 1..20: mol_type = other DNA
gcacgggggacgcggcccta

SEQ ID NO: 3284 - DNA, 20 bp, synthetic construct
  source 1..20: mol_type = other DNA
ggcacgggggacgcggccct

SEQ ID NO: 3285 - DNA, 20 bp, synthetic construct
  source 1..20: mol_type = other DNA
cggcacgggggacgcggccc

SEQ ID NO: 3286 - DNA, 20 bp, synthetic construct
  source 1..20: mol_type = other DNA
ccggcacgggggacgcggcc

SEQ ID NO: 3287 - DNA, 20 bp, synthetic construct
  source 1..20: mol_type = other DNA
accggcacgggggacgcggc

SEQ ID NO: 3288 - DNA, 20 bp, synthetic construct
  source 1..20: mol_type = other DNA
aaccggcacgggggacgcgg

SEQ ID NO: 3289 - DNA, 20 bp, synthetic construct
  source 1..20: mol_type = other DNA
taaccggcacgggggacgcg

SEQ ID NO: 3290 - DNA, 20 bp, synthetic construct
  source 1..20: mol_type = other DNA
ttaaccggcacgggggacgc

SEQ ID NO: 3291 - DNA, 20 bp, synthetic construct
  source 1..20: mol_type = other DNA
tttaaccggcacgggggacg

SEQ ID NO: 3292 - DNA, 20 bp, synthetic construct
  source 1..20: mol_type = other DNA
ctttaaccggcacgggggac

SEQ ID NO: 3293 - DNA, 20 bp, synthetic construct
  source 1..20: mol_type = other DNA
cctttaaccggcacggggga

SEQ ID NO: 3294 - DNA, 20 bp, synthetic construct
  source 1..20: mol_type = other DNA
ccctttaaccggcacggggg

SEQ ID NO: 3295 - DNA, 20 bp, synthetic construct
  source 1..20: mol_type = other DNA
cccctttaaccggcacgggg

SEQ ID NO: 3296 - DNA, 20 bp, synthetic construct
  source 1..20: mol_type = other DNA
acccctttaaccggcacggg

SEQ ID NO: 3297 - DNA, 20 bp, synthetic construct
  source 1..20: mol_type = other DNA
tacccctttaaccggcacgg

SEQ ID NO: 3298 - DNA, 20 bp, synthetic construct
  source 1..20: mol_type = other DNA
ctacccctttaaccggcacg

SEQ ID NO: 3299 - DNA, 20 bp, synthetic construct
  source 1..20: mol_type = other DNA
cctacccctttaaccggcac

SEQ ID NO: 3300 - DNA, 20 bp, synthetic construct
  source 1..20: mol_type = other DNA
gcctacccctttaaccggca

SEQ ID NO: 3301 - DNA, 20 bp, synthetic construct
  source 1..20: mol_type = other DNA
tgcctacccctttaaccggc

SEQ ID NO: 3302 - DNA, 20 bp, synthetic construct
  source 1..20: mol_type = other DNA
gtgcctacccctttaaccgg

SEQ ID NO: 3303 - DNA, 20 bp, synthetic construct
  source 1..20: mol_type = other DNA
ggtgcctacccctttaaccg

SEQ ID NO: 3304 - DNA, 20 bp, synthetic construct
  source 1..20: mol_type = other DNA
cggtgcctacccctttaacc

SEQ ID NO: 3305 - DNA, 20 bp, synthetic construct
  source 1..20: mol_type = other DNA
ccggtgcctacccctttaac

SEQ ID NO: 3306 - DNA, 20 bp, synthetic construct
  source 1..20: mol_type = other DNA
cccggtgcctacccctttaa

SEQ ID NO: 3307 - DNA, 20 bp, synthetic construct
  source 1..20: mol_type = other DNA
gcccggtgcctaccccttta

SEQ ID NO: 3308 - DNA, 20 bp, synthetic construct
  source 1..20: mol_type = other DNA
agcccggtgcctaccccttt

SEQ ID NO: 3309 - DNA, 20 bp, synthetic construct
  source 1..20: mol_type = other DNA
gagcccggtgcctacccctt

SEQ ID NO: 3310 - DNA, 20 bp, synthetic construct
  source 1..20: mol_type = other DNA
ggagcccggtgcctacccct

SEQ ID NO: 3311 - DNA, 20 bp, synthetic construct
  source 1..20: mol_type = other DNA
aggagcccggtgcctacccc

SEQ ID NO: 3312 - DNA, 20 bp, synthetic construct
  source 1..20: mol_type = other DNA
gaggagcccggtgcctaccc

SEQ ID NO: 3313 - DNA, 20 bp, synthetic construct
  source 1..20: mol_type = other DNA
ggaggagcccggtgcctacc

SEQ ID NO: 3314 - DNA, 20 bp, synthetic construct
  source 1..20: mol_type = other DNA
cggaggagcccggtgcctac

SEQ ID NO: 3315 - DNA, 20 bp, synthetic construct
  source 1..20: mol_type = other DNA
ccggaggagcccggtgccta

SEQ ID NO: 3316 - DNA, 20 bp, synthetic construct
  source 1..20: mol_type = other DNA
tccggaggagcccggtgcct

SEQ ID NO: 3317 - DNA, 20 bp, synthetic construct
  source 1..20: mol_type = other DNA
ttccggaggagcccggtgcc

SEQ ID NO: 3318 - DNA, 20 bp, synthetic construct
  source 1..20: mol_type = other DNA
attccggaggagcccggtgc

SEQ ID NO: 3319 - DNA, 20 bp, synthetic construct
  source 1..20: mol_type = other DNA
gattccggaggagcccggtg

SEQ ID NO: 3320 - DNA, 20 bp, synthetic construct
  source 1..20: mol_type = other DNA
tgattccggaggagcccggt

SEQ ID NO: 3321 - DNA, 20 bp, synthetic construct
  source 1..20: mol_type = other DNA
atgattccggaggagcccgg

SEQ ID NO: 3322 - DNA, 20 bp, synthetic construct
  source 1..20: mol_type = other DNA
gatgattccggaggagcccg

SEQ ID NO: 3323 - DNA, 20 bp, synthetic construct
  source 1..20: mol_type = other DNA
tgatgattccggaggagccc

SEQ ID NO: 3324 - DNA, 20 bp, synthetic construct
  source 1..20: mol_type = other DNA
ctgatgattccggaggagcc

SEQ ID NO: 3325 - DNA, 20 bp, synthetic construct
  source 1..20: mol_type = other DNA
cctgatgattccggaggagc

SEQ ID NO: 3326 - DNA, 20 bp, synthetic construct
  source 1..20: mol_type = other DNA
ccctgatgattccggaggag

SEQ ID NO: 3327 - DNA, 20 bp, synthetic construct
  source 1..20: mol_type = other DNA
accctgatgattccggagga

SEQ ID NO: 3328 - DNA, 20 bp, synthetic construct
  source 1..20: mol_type = other DNA
gaccctgatgattccggagg

SEQ ID NO: 3329 - DNA, 20 bp, synthetic construct
  source 1..20: mol_type = other DNA
agaccctgatgattccggag

SEQ ID NO: 3330 - DNA, 20 bp, synthetic construct
  source 1..20: mol_type = other DNA
cagaccctgatgattccgga

SEQ ID NO: 3331 - DNA, 20 bp, synthetic construct
  source 1..20: mol_type = other DNA
acagaccctgatgattccgg

SEQ ID NO: 3332 - DNA, 20 bp, synthetic construct
  source 1..20: mol_type = other DNA
gacagaccctgatgattccg

SEQ ID NO: 3333 - DNA, 20 bp, synthetic construct
  source 1..20: mol_type = other DNA
cgacagaccctgatgattcc

SEQ ID NO: 3334 - DNA, 20 bp, synthetic construct
  source 1..20: mol_type = other DNA
ccgacagaccctgatgattc

SEQ ID NO: 3335 - DNA, 20 bp, synthetic construct
  source 1..20: mol_type = other DNA
cccgacagaccctgatgatt

SEQ ID NO: 3336 - DNA, 20 bp, synthetic construct
  source 1..20: mol_type = other DNA
ccccgacagaccctgatgat

SEQ ID NO: 3337 - DNA, 20 bp, synthetic construct
  source 1..20: mol_type = other DNA
gccccgacagaccctgatga

SEQ ID NO: 3338 - DNA, 20 bp, synthetic construct
  source 1..20: mol_type = other DNA
agccccgacagaccctgatg

SEQ ID NO: 3339 - DNA, 20 bp, synthetic construct
  source 1..20: mol_type = other DNA
gagccccgacagaccctgat

SEQ ID NO: 3340 - DNA, 20 bp, synthetic construct
  source 1..20: mol_type = other DNA
agagccccgacagaccctga

SEQ ID NO: 3341 - DNA, 20 bp, synthetic construct
  source 1..20: mol_type = other DNA
gagagccccgacagaccctg

SEQ ID NO: 3342 - DNA, 20 bp, synthetic construct
  source 1..20: mol_type = other DNA
agagagccccgacagaccct

SEQ ID NO: 3343 - DNA, 20 bp, synthetic construct
  source 1..20: mol_type = other DNA
gagagagccccgacagaccc

SEQ ID NO: 3344 - DNA, 20 bp, synthetic construct
  source 1..20: mol_type = other DNA
ggagagagccccgacagacc

SEQ ID NO: 3345 - DNA, 20 bp, synthetic construct
  source 1..20: mol_type = other DNA
gggagagagccccgacagac

SEQ ID NO: 3346 - DNA, 20 bp, synthetic construct
  source 1..20: mol_type = other DNA
ggggagagagccccgacaga

SEQ ID NO: 3347 - DNA, 20 bp, synthetic construct
  source 1..20: mol_type = other DNA
cggggagagagccccgacag

SEQ ID NO: 3348 - DNA, 20 bp, synthetic construct
  source 1..20: mol_type = other DNA
gcggggagagagccccgaca

SEQ ID NO: 3349 - DNA, 20 bp, synthetic construct
  source 1..20: mol_type = other DNA
ggcggggagagagccccgac

SEQ ID NO: 3350 - DNA, 20 bp, synthetic construct
  source 1..20: mol_type = other DNA
gggcggggagagagccccga

SEQ ID NO: 3351 - DNA, 20 bp, synthetic construct
  source 1..20: mol_type = other DNA
ggggcggggagagagccccg

SEQ ID NO: 3352 - DNA, 20 bp, synthetic construct
  source 1..20: mol_type = other DNA
gggggcggggagagagcccc

SEQ ID NO: 3353 - DNA, 20 bp, synthetic construct
  source 1..20: mol_type = other DNA
agggggcggggagagagccc

SEQ ID NO: 3354 - DNA, 20 bp, synthetic construct
  source 1..20: mol_type = other DNA
gagggggcggggagagagcc

SEQ ID NO: 3355 - DNA, 20 bp, synthetic construct
  source 1..20: mol_type = other DNA
ggagggggcggggagagagc

SEQ ID NO: 3356 - DNA, 20 bp, synthetic construct
  source 1..20: mol_type = other DNA
cggagggggcggggagagag

SEQ ID NO: 3357 - DNA, 20 bp, synthetic construct
  source 1..20: mol_type = other DNA
tcggagggggcggggagaga

SEQ ID NO: 3358 - DNA, 20 bp, synthetic construct
  source 1..20: mol_type = other DNA
ctcggagggggcggggagag

SEQ ID NO: 3359 - DNA, 20 bp, synthetic construct
  source 1..20: mol_type = other DNA
actcggagggggcggggaga

SEQ ID NO: 3360 - DNA, 20 bp, synthetic construct
  source 1..20: mol_type = other DNA
gactcggagggggcggggag

SEQ ID NO: 3361 - DNA, 20 bp, synthetic construct
  source 1..20: mol_type = other DNA
ggactcggagggggcgggga

SEQ ID NO: 3362 - DNA, 20 bp, synthetic construct
  source 1..20: mol_type = other DNA
aggactcggagggggcgggg

SEQ ID NO: 3363 - DNA, 20 bp, synthetic construct
  source 1..20: mol_type = other DNA
caggactcggagggggcggg

SEQ ID NO: 3364 - DNA, 20 bp, synthetic construct
  source 1..20: mol_type = other DNA
ccaggactcggagggggcgg

SEQ ID NO: 3365 - DNA, 20 bp, synthetic construct
  source 1..20: mol_type = other DNA
cccaggactcggagggggcg

SEQ ID NO: 3366 - DNA, 20 bp, synthetic construct
  source 1..20: mol_type = other DNA
tcccaggactcggagggggc

SEQ ID NO: 3367 - DNA, 20 bp, synthetic construct
  source 1..20: mol_type = other DNA
ttcccaggactcggaggggg

SEQ ID NO: 3368 - DNA, 20 bp, synthetic construct
  source 1..20: mol_type = other DNA
tttcccaggactcggagggg

SEQ ID NO: 3369 - DNA, 20 bp, synthetic construct
  source 1..20: mol_type = other DNA
ctttcccaggactcggaggg

SEQ ID NO: 3370 - DNA, 20 bp, synthetic construct
  source 1..20: mol_type = other DNA
tctttcccaggactcggagg

SEQ ID NO: 3371 - DNA, 20 bp, synthetic construct
  source 1..20: mol_type = other DNA
atctttcccaggactcggag

SEQ ID NO: 3372 - DNA, 20 bp, synthetic construct
  source 1..20: mol_type = other DNA
gatctttcccaggactcgga

SEQ ID NO: 3373 - DNA, 20 bp, synthetic construct
  source 1..20: mol_type = other DNA
cgatctttcccaggactcgg

SEQ ID NO: 3374 - DNA, 20 bp, synthetic construct
  source 1..20: mol_type = other DNA
ccgatctttcccaggactcg

SEQ ID NO: 3375 - DNA, 20 bp, synthetic construct
  source 1..20: mol_type = other DNA
tccgatctttcccaggactc

SEQ ID NO: 3376 - DNA, 20 bp, synthetic construct
  source 1..20: mol_type = other DNA
ctccgatctttcccaggact

SEQ ID NO: 3377 - DNA, 20 bp, synthetic construct
  source 1..20: mol_type = other DNA
cctccgatctttcccaggac

SEQ ID NO: 3378 - DNA, 20 bp, synthetic construct
  source 1..20: mol_type = other DNA
tcctccgatctttcccagga

SEQ ID NO: 3379 - DNA, 20 bp, synthetic construct
  source 1..20: mol_type = other DNA
gtcctccgatctttcccagg

SEQ ID NO: 3380 - DNA, 20 bp, synthetic construct
  source 1..20: mol_type = other DNA
cgtcctccgatctttcccag

SEQ ID NO: 3381 - DNA, 20 bp, synthetic construct
  source 1..20: mol_type = other DNA
ccgtcctccgatctttccca

SEQ ID NO: 3382 - DNA, 20 bp, synthetic construct
  source 1..20: mol_type = other DNA
cccgtcctccgatctttccc

SEQ ID NO: 3383 - DNA, 20 bp, synthetic construct
  source 1..20: mol_type = other DNA
ccccgtcctccgatctttcc

SEQ ID NO: 3384 - DNA, 20 bp, synthetic construct
  source 1..20: mol_type = other DNA
accccgtcctccgatctttc

SEQ ID NO: 3385 - DNA, 20 bp, synthetic construct
  source 1..20: mol_type = other DNA
caccccgtcctccgatcttt

SEQ ID NO: 3386 - DNA, 20 bp, synthetic construct
  source 1..20: mol_type = other DNA
ccaccccgtcctccgatctt

SEQ ID NO: 3387 - DNA, 20 bp, synthetic construct
  source 1..20: mol_type = other DNA
tccaccccgtcctccgatct

SEQ ID NO: 3388 - DNA, 20 bp, synthetic construct
  source 1..20: mol_type = other DNA
ctccaccccgtcctccgatc

SEQ ID NO: 3389 - DNA, 20 bp, synthetic construct
  source 1..20: mol_type = other DNA
tctccaccccgtcctccgat

SEQ ID NO: 3390 - DNA, 20 bp, synthetic construct
  source 1..20: mol_type = other DNA
gtctccaccccgtcctccga

SEQ ID NO: 3391 - DNA, 20 bp, synthetic construct
  source 1..20: mol_type = other DNA
tgtctccaccccgtcctccg

SEQ ID NO: 3392 - DNA, 20 bp, synthetic construct
  source 1..20: mol_type = other DNA
ttgtctccaccccgtcctcc

SEQ ID NO: 3393 - DNA, 20 bp, synthetic construct
  source 1..20: mol_type = other DNA
cttgtctccaccccgtcctc

SEQ ID NO: 3394 - DNA, 20 bp, synthetic construct
  source 1..20: mol_type = other DNA
acttgtctccaccccgtcct

SEQ ID NO: 3395 - DNA, 20 bp, synthetic construct
  source 1..20: mol_type = other DNA
cacttgtctccaccccgtcc

SEQ ID NO: 3396 - DNA, 20 bp, synthetic construct
  source 1..20: mol_type = other DNA
ccacttgtctccaccccgtc

SEQ ID NO: 3397 - DNA, 20 bp, synthetic construct
  source 1..20: mol_type = other DNA
cccacttgtctccaccccgt

SEQ ID NO: 3398 - DNA, 20 bp, synthetic construct
  source 1..20: mol_type = other DNA
gcccacttgtctccaccccg

SEQ ID NO: 3399 - DNA, 20 bp, synthetic construct
  source 1..20: mol_type = other DNA
ggcccacttgtctccacccc

SEQ ID NO: 3400 - DNA, 20 bp, synthetic construct
  source 1..20: mol_type = other DNA
aggcccacttgtctccaccc

SEQ ID NO: 3401 - DNA, 20 bp, synthetic construct
  source 1..20: mol_type = other DNA
aaggcccacttgtctccacc

SEQ ID NO: 3402 - DNA, 20 bp, synthetic construct
  source 1..20: mol_type = other DNA
caaggcccacttgtctccac

SEQ ID NO: 3403 - DNA, 20 bp, synthetic construct
  source 1..20: mol_type = other DNA
ccaaggcccacttgtctcca

SEQ ID NO: 3404 - DNA, 20 bp, synthetic construct
  source 1..20: mol_type = other DNA
gccaaggcccacttgtctcc

SEQ ID NO: 3405 - DNA, 20 bp, synthetic construct
  source 1..20: mol_type = other DNA
ggccaaggcccacttgtctc

SEQ ID NO: 3406 - DNA, 20 bp, synthetic construct
  source 1..20: mol_type = other DNA
gggccaaggcccacttgtct

SEQ ID NO: 3407 - DNA, 20 bp, synthetic construct
  source 1..20: mol_type = other DNA
ggggccaaggcccacttgtc

SEQ ID NO: 3408 - DNA, 20 bp, synthetic construct
  source 1..20: mol_type = other DNA
gggggccaaggcccacttgt

SEQ ID NO: 3409 - DNA, 20 bp, synthetic construct
  source 1..20: mol_type = other DNA
cgggggccaaggcccacttg

SEQ ID NO: 3410 - DNA, 20 bp, synthetic construct
  source 1..20: mol_type = other DNA
gcgggggccaaggcccactt

SEQ ID NO: 3411 - DNA, 20 bp, synthetic construct
  source 1..20: mol_type = other DNA
tgcgggggccaaggcccact

SEQ ID NO: 3412 - DNA, 20 bp, synthetic construct
  source 1..20: mol_type = other DNA
gtgcgggggccaaggcccac

SEQ ID NO: 3413 - DNA, 20 bp, synthetic construct
  source 1..20: mol_type = other DNA
ggtgcgggggccaaggccca

SEQ ID NO: 3414 - DNA, 20 bp, synthetic construct
  source 1..20: mol_type = other DNA
gggtgcgggggccaaggccc

SEQ ID NO: 3415 - DNA, 20 bp, synthetic construct
  source 1..20: mol_type = other DNA
ggggtgcgggggccaaggcc

SEQ ID NO: 3416 - DNA, 20 bp, synthetic construct
  source 1..20: mol_type = other DNA
aggggtgcgggggccaaggc

SEQ ID NO: 3417 - DNA, 20 bp, synthetic construct
  source 1..20: mol_type = other DNA
gaggggtgcgggggccaagg

SEQ ID NO: 3418 - DNA, 20 bp, synthetic construct
  source 1..20: mol_type = other DNA
agaggggtgcgggggccaag

SEQ ID NO: 3419 - DNA, 20 bp, synthetic construct
  source 1..20: mol_type = other DNA
cagaggggtgcgggggccaa

SEQ ID NO: 3420 - DNA, 20 bp, synthetic construct
  source 1..20: mol_type = other DNA
gcagaggggtgcgggggcca

SEQ ID NO: 3421 - DNA, 20 bp, synthetic construct
  source 1..20: mol_type = other DNA
cgcagaggggtgcgggggcc

SEQ ID NO: 3422 - DNA, 20 bp, synthetic construct
  source 1..20: mol_type = other DNA
acgcagaggggtgcgggggc

SEQ ID NO: 3423 - DNA, 20 bp, synthetic construct
  source 1..20: mol_type = other DNA
aacgcagaggggtgcggggg

SEQ ID NO: 3424 - DNA, 20 bp, synthetic construct
  source 1..20: mol_type = other DNA
gaacgcagaggggtgcgggg

SEQ ID NO: 3425 - DNA, 20 bp, synthetic construct
  source 1..20: mol_type = other DNA
cgaacgcagaggggtgcggg

SEQ ID NO: 3426 - DNA, 20 bp, synthetic construct
  source 1..20: mol_type = other DNA
acgaacgcagaggggtgcgg

SEQ ID NO: 3427 - DNA, 20 bp, synthetic construct
  source 1..20: mol_type = other DNA
cacgaacgcagaggggtgcg

SEQ ID NO: 3428 - DNA, 20 bp, synthetic construct
  source 1..20: mol_type = other DNA
acacgaacgcagaggggtgc

SEQ ID NO: 3429 - DNA, 20 bp, synthetic construct
  source 1..20: mol_type = other DNA
gacacgaacgcagaggggtg

SEQ ID NO: 3430 - DNA, 20 bp, synthetic construct
  source 1..20: mol_type = other DNA
ggacacgaacgcagaggggt

SEQ ID NO: 3431 - DNA, 20 bp, synthetic construct
  source 1..20: mol_type = other DNA
cggacacgaacgcagagggg

SEQ ID NO: 3432 - DNA, 20 bp, synthetic construct
  source 1..20: mol_type = other DNA
tcggacacgaacgcagaggg

SEQ ID NO: 3433 - DNA, 20 bp, synthetic construct
  source 1..20: mol_type = other DNA
ctcggacacgaacgcagagg

SEQ ID NO: 3434 - DNA, 20 bp, synthetic construct
  source 1..20: mol_type = other DNA
cctcggacacgaacgcagag

SEQ ID NO: 3435 - DNA, 20 bp, synthetic construct
  source 1..20: mol_type = other DNA
gcctcggacacgaacgcaga

SEQ ID NO: 3436 - DNA, 20 bp, synthetic construct
  source 1..20: mol_type = other DNA
cgcctcggacacgaacgcag

SEQ ID NO: 3437 - DNA, 20 bp, synthetic construct
  source 1..20: mol_type = other DNA
ccgcctcggacacgaacgca

SEQ ID NO: 3438 - DNA, 20 bp, synthetic construct
  source 1..20: mol_type = other DNA
gccgcctcggacacgaacgc

SEQ ID NO: 3439 - DNA, 20 bp, synthetic construct
  source 1..20: mol_type = other DNA
cgccgcctcggacacgaacg

SEQ ID NO: 3440 - DNA, 20 bp, synthetic construct
  source 1..20: mol_type = other DNA
ccgccgcctcggacacgaac

SEQ ID NO: 3441 - DNA, 20 bp, synthetic construct
  source 1..20: mol_type = other DNA
gccgccgcctcggacacgaa

SEQ ID NO: 3442 - DNA, 20 bp, synthetic construct
  source 1..20: mol_type = other DNA
cgccgccgcctcggacacga

SEQ ID NO: 3443 - DNA, 20 bp, synthetic construct
  source 1..20: mol_type = other DNA
ccgccgccgcctcggacacg

SEQ ID NO: 3444 - DNA, 20 bp, synthetic construct
  source 1..20: mol_type = other DNA
cccgccgccgcctcggacac

SEQ ID NO: 3445 - DNA, 20 bp, synthetic construct
  source 1..20: mol_type = other DNA
ccccgccgccgcctcggaca

SEQ ID NO: 3446 - DNA, 20 bp, synthetic construct
  source 1..20: mol_type = other DNA
cccccgccgccgcctcggac

SEQ ID NO: 3447 - DNA, 20 bp, synthetic construct
  source 1..20: mol_type = other DNA
gcccccgccgccgcctcgga

SEQ ID NO: 3448 - DNA, 20 bp, synthetic construct
  source 1..20: mol_type = other DNA
agcccccgccgccgcctcgg

SEQ ID NO: 3449 - DNA, 20 bp, synthetic construct
  source 1..20: mol_type = other DNA
gagcccccgccgccgcctcg

SEQ ID NO: 3450 - DNA, 20 bp, synthetic construct
  source 1..20: mol_type = other DNA
ggagcccccgccgccgcctc

SEQ ID NO: 3451 - DNA, 20 bp, synthetic construct
  source 1..20: mol_type = other DNA
gggagcccccgccgccgcct

SEQ ID NO: 3452 - DNA, 20 bp, synthetic construct
  source 1..20: mol_type = other DNA
cgggagcccccgccgccgcc

SEQ ID NO: 3453 - DNA, 20 bp, synthetic construct
  source 1..20: mol_type = other DNA
tcgggagcccccgccgccgc

SEQ ID NO: 3454 - DNA, 20 bp, synthetic construct
  source 1..20: mol_type = other DNA
ttcgggagcccccgccgccg

SEQ ID NO: 3455 - DNA, 20 bp, synthetic construct
  source 1..20: mol_type = other DNA
gttcgggagcccccgccgcc

SEQ ID NO: 3456 - DNA, 20 bp, synthetic construct
  source 1..20: mol_type = other DNA
agttcgggagcccccgccgc

SEQ ID NO: 3457 - DNA, 20 bp, synthetic construct
  source 1..20: mol_type = other DNA
gagttcgggagcccccgccg

SEQ ID NO: 3458 - DNA, 20 bp, synthetic construct
  source 1..20: mol_type = other DNA
ggagttcgggagcccccgcc

SEQ ID NO: 3459 - DNA, 20 bp, synthetic construct
  source 1..20: mol_type = other DNA
gggagttcgggagcccccgc

SEQ ID NO: 3460 - DNA, 20 bp, synthetic construct
  source 1..20: mol_type = other DNA
ggggagttcgggagcccccg

SEQ ID NO: 3461 - DNA, 20 bp, synthetic construct
  source 1..20: mol_type = other DNA
aggggagttcgggagccccc

SEQ ID NO: 3462 - DNA, 20 bp, synthetic construct
  source 1..20: mol_type = other DNA
caggggagttcgggagcccc

SEQ ID NO: 3463 - DNA, 20 bp, synthetic construct
  source 1..20: mol_type = other DNA
tcaggggagttcgggagccc

SEQ ID NO: 3464 - DNA, 20 bp, synthetic construct
  source 1..20: mol_type = other DNA
ttcaggggagttcgggagcc

SEQ ID NO: 3465 - DNA, 20 bp, synthetic construct
  source 1..20: mol_type = other DNA
tttcaggggagttcgggagc

SEQ ID NO: 3466 - DNA, 20 bp, synthetic construct
  source 1..20: mol_type = other DNA
atttcaggggagttcgggag

SEQ ID NO: 3467 - DNA, 20 bp, synthetic construct
  source 1..20: mol_type = other DNA
gatttcaggggagttcggga

SEQ ID NO: 3468 - DNA, 20 bp, synthetic construct
  source 1..20: mol_type = other DNA
cgatttcaggggagttcggg

SEQ ID NO: 3469 - DNA, 20 bp, synthetic construct
  source 1..20: mol_type = other DNA
acgatttcaggggagttcgg

SEQ ID NO: 3470 - DNA, 20 bp, synthetic construct
  source 1..20: mol_type = other DNA
cacgatttcaggggagttcg

SEQ ID NO: 3471 - DNA, 20 bp, synthetic construct
  source 1..20: mol_type = other DNA
ccacgatttcaggggagttc

SEQ ID NO: 3472 - DNA, 20 bp, synthetic construct
  source 1..20: mol_type = other DNA
cccacgatttcaggggagtt

SEQ ID NO: 3473 - DNA, 20 bp, synthetic construct
  source 1..20: mol_type = other DNA
ccccacgatttcaggggagt

SEQ ID NO: 3474 - DNA, 20 bp, synthetic construct
  source 1..20: mol_type = other DNA
gccccacgatttcaggggag

SEQ ID NO: 3475 - DNA, 20 bp, synthetic construct
  source 1..20: mol_type = other DNA
agccccacgatttcagggga

SEQ ID NO: 3476 - DNA, 20 bp, synthetic construct
  source 1..20: mol_type = other DNA
gagccccacgatttcagggg

SEQ ID NO: 3477 - DNA, 20 bp, synthetic construct
  source 1..20: mol_type = other DNA
ggagccccacgatttcaggg

SEQ ID NO: 3478 - DNA, 20 bp, synthetic construct
  source 1..20: mol_type = other DNA
tggagccccacgatttcagg

SEQ ID NO: 3479 - DNA, 20 bp, synthetic construct
  source 1..20: mol_type = other DNA
atggagccccacgatttcag

SEQ ID NO: 3480 - DNA, 20 bp, synthetic construct
  source 1..20: mol_type = other DNA
catggagccccacgatttca

SEQ ID NO: 3481 - DNA, 20 bp, synthetic construct
  source 1..20: mol_type = other DNA
acatggagccccacgatttc

SEQ ID NO: 3482 - DNA, 20 bp, synthetic construct
  source 1..20: mol_type = other DNA
cacatggagccccacgattt

SEQ ID NO: 3483 - DNA, 20 bp, synthetic construct
  source 1..20: mol_type = other DNA
ccacatggagccccacgatt

SEQ ID NO: 3484 - DNA, 20 bp, synthetic construct
  source 1..20: mol_type = other DNA
gccacatggagccccacgat

SEQ ID NO: 3485 - DNA, 20 bp, synthetic construct
  source 1..20: mol_type = other DNA
ggccacatggagccccacga

SEQ ID NO: 3486 - DNA, 20 bp, synthetic construct
  source 1..20: mol_type = other DNA
aggccacatggagccccacg

SEQ ID NO: 3487 - DNA, 20 bp, synthetic construct
  source 1..20: mol_type = other DNA
gaggccacatggagccccac

SEQ ID NO: 3488 - DNA, 20 bp, synthetic construct
  source 1..20: mol_type = other DNA
ggaggccacatggagcccca

SEQ ID NO: 3489 - DNA, 20 bp, synthetic construct
  source 1..20: mol_type = other DNA
cggaggccacatggagcccc

SEQ ID NO: 3490 - DNA, 20 bp, synthetic construct
  source 1..20: mol_type = other DNA
ccggaggccacatggagccc

SEQ ID NO: 3491 - DNA, 20 bp, synthetic construct
  source 1..20: mol_type = other DNA
gccggaggccacatggagcc

SEQ ID NO: 3492 - DNA, 20 bp, synthetic construct
  source 1..20: mol_type = other DNA
tgccggaggccacatggagc

SEQ ID NO: 3493 - DNA, 20 bp, synthetic construct
  source 1..20: mol_type = other DNA
ctgccggaggccacatggag

SEQ ID NO: 3494 - DNA, 20 bp, synthetic construct
  source 1..20: mol_type = other DNA
gctgccggaggccacatgga

SEQ ID NO: 3495 - DNA, 20 bp, synthetic construct
  source 1..20: mol_type = other DNA
cgctgccggaggccacatgg

SEQ ID NO: 3496 - DNA, 20 bp, synthetic construct
  source 1..20: mol_type = other DNA
acgctgccggaggccacatg

SEQ ID NO: 3497 - DNA, 20 bp, synthetic construct
  source 1..20: mol_type = other DNA
aacgctgccggaggccacat

SEQ ID NO: 3498 - DNA, 20 bp, synthetic construct
  source 1..20: mol_type = other DNA
gaacgctgccggaggccaca

SEQ ID NO: 3499 - DNA, 20 bp, synthetic construct
  source 1..20: mol_type = other DNA
ggaacgctgccggaggccac

SEQ ID NO: 3500 - DNA, 20 bp, synthetic construct
  source 1..20: mol_type = other DNA
tggaacgctgccggaggcca

SEQ ID NO: 3501 - DNA, 20 bp, synthetic construct
  source 1..20: mol_type = other DNA
gtggaacgctgccggaggcc

SEQ ID NO: 3502 - DNA, 20 bp, synthetic construct
  source 1..20: mol_type = other DNA
ggtggaacgctgccggaggc

SEQ ID NO: 3503 - DNA, 20 bp, synthetic construct
  source 1..20: mol_type = other DNA
gggtggaacgctgccggagg

SEQ ID NO: 3504 - DNA, 20 bp, synthetic construct
  source 1..20: mol_type = other DNA
agggtggaacgctgccggag

SEQ ID NO: 3505 - DNA, 20 bp, synthetic construct
  source 1..20: mol_type = other DNA
gagggtggaacgctgccgga

SEQ ID NO: 3506 - DNA, 20 bp, synthetic construct
  source 1..20: mol_type = other DNA
ggagggtggaacgctgccgg

SEQ ID NO: 3507 - DNA, 20 bp, synthetic construct
  source 1..20: mol_type = other DNA
gggagggtggaacgctgccg

SEQ ID NO: 3508 - DNA, 20 bp, synthetic construct
  source 1..20: mol_type = other DNA
ggggagggtggaacgctgcc

SEQ ID NO: 3509 - DNA, 20 bp, synthetic construct
  source 1..20: mol_type = other DNA
gggggagggtggaacgctgc

SEQ ID NO: 3510 - DNA, 20 bp, synthetic construct
  source 1..20: mol_type = other DNA
tgggggagggtggaacgctg

SEQ ID NO: 3511 - DNA, 20 bp, synthetic construct
  source 1..20: mol_type = other DNA
gtgggggagggtggaacgct

SEQ ID NO: 3512 - DNA, 20 bp, synthetic construct
  source 1..20: mol_type = other DNA
ggtgggggagggtggaacgc

SEQ ID NO: 3513 - DNA, 20 bp, synthetic construct
  source 1..20: mol_type = other DNA
aggtgggggagggtggaacg

SEQ ID NO: 3514 - DNA, 20 bp, synthetic construct
  source 1..20: mol_type = other DNA
caggtgggggagggtggaac

SEQ ID NO: 3515 - DNA, 20 bp, synthetic construct
  source 1..20: mol_type = other DNA
ccaggtgggggagggtggaa

SEQ ID NO: 3516 - DNA, 20 bp, synthetic construct
  source 1..20: mol_type = other DNA
cccaggtgggggagggtgga

SEQ ID NO: 3517 - DNA, 20 bp, synthetic construct
  source 1..20: mol_type = other DNA
ccccaggtgggggagggtgg

SEQ ID NO: 3518 - DNA, 20 bp, synthetic construct
  source 1..20: mol_type = other DNA
tccccaggtgggggagggtg

SEQ ID NO: 3519 - DNA, 20 bp, synthetic construct
  source 1..20: mol_type = other DNA
ttccccaggtgggggagggt

SEQ ID NO: 3520 - DNA, 20 bp, synthetic construct
  source 1..20: mol_type = other DNA
cttccccaggtgggggaggg

SEQ ID NO: 3521 - DNA, 20 bp, synthetic construct
  source 1..20: mol_type = other DNA
ccttccccaggtgggggagg

SEQ ID NO: 3522 - DNA, 20 bp, synthetic construct
  source 1..20: mol_type = other DNA
cccttccccaggtgggggag

SEQ ID NO: 3523 - DNA, 20 bp, synthetic construct
  source 1..20: mol_type = other DNA
tcccttccccaggtggggga

SEQ ID NO: 3524 - DNA, 20 bp, synthetic construct
  source 1..20: mol_type = other DNA
ttcccttccccaggtggggg

SEQ ID NO: 3525 - DNA, 20 bp, synthetic construct
  source 1..20: mol_type = other DNA
cttcccttccccaggtgggg

SEQ ID NO: 3526 - DNA, 20 bp, synthetic construct
  source 1..20: mol_type = other DNA
ccttcccttccccaggtggg

SEQ ID NO: 3527 - DNA, 20 bp, synthetic construct
  source 1..20: mol_type = other DNA
cccttcccttccccaggtgg

SEQ ID NO: 3528 - DNA, 20 bp, synthetic construct
  source 1..20: mol_type = other DNA
ccccttcccttccccaggtg

SEQ ID NO: 3529 - DNA, 20 bp, synthetic construct
  source 1..20: mol_type = other DNA
accccttcccttccccaggt

SEQ ID NO: 3530 - DNA, 20 bp, synthetic construct
  source 1..20: mol_type = other DNA
caccccttcccttccccagg

SEQ ID NO: 3531 - DNA, 20 bp, synthetic construct
  source 1..20: mol_type = other DNA
ccaccccttcccttccccag

SEQ ID NO: 3532 - DNA, 20 bp, synthetic construct
  source 1..20: mol_type = other DNA
cccaccccttcccttcccca

SEQ ID NO: 3533 - DNA, 20 bp, synthetic construct
  source 1..20: mol_type = other DNA
ccccaccccttcccttcccc

SEQ ID NO: 3534 - DNA, 20 bp, synthetic construct
  source 1..20: mol_type = other DNA
tccccaccccttcccttccc

SEQ ID NO: 3535 - DNA, 20 bp, synthetic construct
  source 1..20: mol_type = other DNA
ctccccaccccttcccttcc

SEQ ID NO: 3536 - DNA, 20 bp, synthetic construct
  source 1..20: mol_type = other DNA
actccccaccccttcccttc

SEQ ID NO: 3537 - DNA, 20 bp, synthetic construct
  source 1..20: mol_type = other DNA
cactccccaccccttccctt

SEQ ID NO: 3538 - DNA, 20 bp, synthetic construct
  source 1..20: mol_type = other DNA
gcactccccaccccttccct

SEQ ID NO: 3539 - DNA, 20 bp, synthetic construct
  source 1..20: mol_type = other DNA
ggcactccccaccccttccc

SEQ ID NO: 3540 - DNA, 20 bp, synthetic construct
  source 1..20: mol_type = other DNA
gggcactccccaccccttcc

SEQ ID NO: 3541 - DNA, 20 bp, synthetic construct
  source 1..20: mol_type = other DNA
cgggcactccccaccccttc

SEQ ID NO: 3542 - DNA, 20 bp, synthetic construct
  source 1..20: mol_type = other DNA
ccgggcactccccacccctt

SEQ ID NO: 3543 - DNA, 20 bp, synthetic construct
  source 1..20: mol_type = other DNA
gccgggcactccccacccct

SEQ ID NO: 3544 - DNA, 20 bp, synthetic construct
  source 1..20: mol_type = other DNA
ggccgggcactccccacccc

SEQ ID NO: 3545 - DNA, 20 bp, synthetic construct
  source 1..20: mol_type = other DNA
gggccgggcactccccaccc

SEQ ID NO: 3546 - DNA, 20 bp, synthetic construct
  source 1..20: mol_type = other DNA
ggggccgggcactccccacc

SEQ ID NO: 3547 - DNA, 20 bp, synthetic construct
  source 1..20: mol_type = other DNA
cggggccgggcactccccac

SEQ ID NO: 3548 - DNA, 20 bp, synthetic construct
  source 1..20: mol_type = other DNA
acggggccgggcactcccca

SEQ ID NO: 3549 - DNA, 20 bp, synthetic construct
  source 1..20: mol_type = other DNA
gacggggccgggcactcccc

SEQ ID NO: 3550 - DNA, 20 bp, synthetic construct
  source 1..20: mol_type = other DNA
ggacggggccgggcactccc

SEQ ID NO: 3551 - DNA, 20 bp, synthetic construct
  source 1..20: mol_type = other DNA
gggacggggccgggcactcc

SEQ ID NO: 3552 - DNA, 20 bp, synthetic construct
  source 1..20: mol_type = other DNA
cgggacggggccgggcactc

SEQ ID NO: 3553 - DNA, 20 bp, synthetic construct
  source 1..20: mol_type = other DNA
ccgggacggggccgggcact

SEQ ID NO: 3554 - DNA, 20 bp, synthetic construct
  source 1..20: mol_type = other DNA
gccgggacggggccgggcac

SEQ ID NO: 3555 - DNA, 20 bp, synthetic construct
  source 1..20: mol_type = other DNA
ggccgggacggggccgggca

SEQ ID NO: 3556 - DNA, 20 bp, synthetic construct
  source 1..20: mol_type = other DNA
aggccgggacggggccgggc

SEQ ID NO: 3557 - DNA, 20 bp, synthetic construct
  source 1..20: mol_type = other DNA
aaggccgggacggggccggg

SEQ ID NO: 3558 - DNA, 20 bp, synthetic construct
  source 1..20: mol_type = other DNA
gaaggccgggacggggccgg

SEQ ID NO: 3559 - DNA, 20 bp, synthetic construct
  source 1..20: mol_type = other DNA
ggaaggccgggacggggccg

SEQ ID NO: 3560 - DNA, 20 bp, synthetic construct
  source 1..20: mol_type = other DNA
aggaaggccgggacggggcc

SEQ ID NO: 3561 - DNA, 20 bp, synthetic construct
  source 1..20: mol_type = other DNA
gaggaaggccgggacggggc

SEQ ID NO: 3562 - DNA, 20 bp, synthetic construct
  source 1..20: mol_type = other DNA
ggaggaaggccgggacgggg

SEQ ID NO: 3563 - DNA, 20 bp, synthetic construct
  source 1..20: mol_type = other DNA
aggaggaaggccgggacggg

SEQ ID NO: 3564 - DNA, 20 bp, synthetic construct
  source 1..20: mol_type = other DNA
aaggaggaaggccgggacgg

SEQ ID NO: 3565 - DNA, 20 bp, synthetic construct
  source 1..20: mol_type = other DNA
gaaggaggaaggccgggacg

SEQ ID NO: 3566 - DNA, 20 bp, synthetic construct
  source 1..20: mol_type = other DNA
ggaaggaggaaggccgggac

SEQ ID NO: 3567 - DNA, 20 bp, synthetic construct
  source 1..20: mol_type = other DNA
gggaaggaggaaggccggga

SEQ ID NO: 3568 - DNA, 20 bp, synthetic construct
  source 1..20: mol_type = other DNA
ggggaaggaggaaggccggg

SEQ ID NO: 3569 - DNA, 20 bp, synthetic construct
  source 1..20: mol_type = other DNA
gggggaaggaggaaggccgg

SEQ ID NO: 3570 - DNA, 20 bp, synthetic construct
  source 1..20: mol_type = other DNA
cgggggaaggaggaaggccg

SEQ ID NO: 3571 - DNA, 20 bp, synthetic construct
  source 1..20: mol_type = other DNA
gcgggggaaggaggaaggcc

SEQ ID NO: 3572 - DNA, 20 bp, synthetic construct
  source 1..20: mol_type = other DNA
ggcgggggaaggaggaaggc

SEQ ID NO: 3573 - DNA, 20 bp, synthetic construct
  source 1..20: mol_type = other DNA
tggcgggggaaggaggaagg

SEQ ID NO: 3574 - DNA, 20 bp, synthetic construct
  source 1..20: mol_type = other DNA
ctggcgggggaaggaggaag

SEQ ID NO: 3575 - DNA, 20 bp, synthetic construct
  source 1..20: mol_type = other DNA
tctggcgggggaaggaggaa

SEQ ID NO: 3576 - DNA, 20 bp, synthetic construct
  source 1..20: mol_type = other DNA
gtctggcgggggaaggagga

SEQ ID NO: 3577 - DNA, 20 bp, synthetic construct
  source 1..20: mol_type = other DNA
ggtctggcgggggaaggagg

SEQ ID NO: 3578 - DNA, 20 bp, synthetic construct
  source 1..20: mol_type = other DNA
aggtctggcgggggaaggag

SEQ ID NO: 3579 - DNA, 20 bp, synthetic construct
  source 1..20: mol_type = other DNA
gaggtctggcgggggaagga

SEQ ID NO: 3580 - DNA, 20 bp, synthetic construct
  source 1..20: mol_type = other DNA
agaggtctggcgggggaagg

SEQ ID NO: 3581 - DNA, 20 bp, synthetic construct
  source 1..20: mol_type = other DNA
gagaggtctggcgggggaag

SEQ ID NO: 3582 - DNA, 20 bp, synthetic construct
  source 1..20: mol_type = other DNA
ggagaggtctggcgggggaa

SEQ ID NO: 3583 - DNA, 20 bp, synthetic construct
  source 1..20: mol_type = other DNA
cggagaggtctggcggggga

SEQ ID NO: 3584 - DNA, 20 bp, synthetic construct
  source 1..20: mol_type = other DNA
ccggagaggtctggcggggg

SEQ ID NO: 3585 - DNA, 20 bp, synthetic construct
  source 1..20: mol_type = other DNA
gccggagaggtctggcgggg

SEQ ID NO: 3586 - DNA, 20 bp, synthetic construct
  source 1..20: mol_type = other DNA
cgccggagaggtctggcggg

SEQ ID NO: 3587 - DNA, 20 bp, synthetic construct
  source 1..20: mol_type = other DNA
gcgccggagaggtctggcgg

SEQ ID NO: 3588 - DNA, 20 bp, synthetic construct
  source 1..20: mol_type = other DNA
cgcgccggagaggtctggcg

SEQ ID NO: 3589 - DNA, 20 bp, synthetic construct
  source 1..20: mol_type = other DNA
gcgcgccggagaggtctggc

SEQ ID NO: 3590 - DNA, 20 bp, synthetic construct
  source 1..20: mol_type = other DNA
cgcgcgccggagaggtctgg

SEQ ID NO: 3591 - DNA, 20 bp, synthetic construct
  source 1..20: mol_type = other DNA
ccgcgcgccggagaggtctg

SEQ ID NO: 3592 - DNA, 20 bp, synthetic construct
  source 1..20: mol_type = other DNA
cccgcgcgccggagaggtct

SEQ ID NO: 3593 - DNA, 20 bp, synthetic construct
  source 1..20: mol_type = other DNA
acccgcgcgccggagaggtc

SEQ ID NO: 3594 - DNA, 20 bp, synthetic construct
  source 1..20: mol_type = other DNA
cacccgcgcgccggagaggt

SEQ ID NO: 3595 - DNA, 20 bp, synthetic construct
  source 1..20: mol_type = other DNA
ccacccgcgcgccggagagg

SEQ ID NO: 3596 - DNA, 20 bp, synthetic construct
  source 1..20: mol_type = other DNA
accacccgcgcgccggagag

SEQ ID NO: 3597 - DNA, 20 bp, synthetic construct
  source 1..20: mol_type = other DNA
caccacccgcgcgccggaga

SEQ ID NO: 3598 - DNA, 20 bp, synthetic construct
  source 1..20: mol_type = other DNA
ccaccacccgcgcgccggag

SEQ ID NO: 3599 - DNA, 20 bp, synthetic construct
  source 1..20: mol_type = other DNA
gccaccacccgcgcgccgga

SEQ ID NO: 3600 - DNA, 20 bp, synthetic construct
  source 1..20: mol_type = other DNA
ggccaccacccgcgcgccgg

SEQ ID NO: 3601 - DNA, 20 bp, synthetic construct
  source 1..20: mol_type = other DNA
cggccaccacccgcgcgccg

SEQ ID NO: 3602 - DNA, 20 bp, synthetic construct
  source 1..20: mol_type = other DNA
tcggccaccacccgcgcgcc

SEQ ID NO: 3603 - DNA, 20 bp, synthetic construct
  source 1..20: mol_type = other DNA
atcggccaccacccgcgcgc

SEQ ID NO: 3604 - DNA, 20 bp, synthetic construct
  source 1..20: mol_type = other DNA
gatcggccaccacccgcgcg

SEQ ID NO: 3605 - DNA, 20 bp, synthetic construct
  source 1..20: mol_type = other DNA
ggatcggccaccacccgcgc

SEQ ID NO: 3606 - DNA, 20 bp, synthetic construct
  source 1..20: mol_type = other DNA
cggatcggccaccacccgcg

SEQ ID NO: 3607 - DNA, 20 bp, synthetic construct
  source 1..20: mol_type = other DNA
gcggatcggccaccacccgc

SEQ ID NO: 3608 - DNA, 20 bp, synthetic construct
  source 1..20: mol_type = other DNA
tgcggatcggccaccacccg

SEQ ID NO: 3609 - DNA, 20 bp, synthetic construct
  source 1..20: mol_type = other DNA
atgcggatcggccaccaccc

SEQ ID NO: 3610 - DNA, 20 bp, synthetic construct
  source 1..20: mol_type = other DNA
aatgcggatcggccaccacc

SEQ ID NO: 3611 - DNA, 20 bp, synthetic construct
  source 1..20: mol_type = other DNA
caatgcggatcggccaccac

SEQ ID NO: 3612 - DNA, 20 bp, synthetic construct
  source 1..20: mol_type = other DNA
gcaatgcggatcggccacca

SEQ ID NO: 3613 - DNA, 20 bp, synthetic construct
  source 1..20: mol_type = other DNA
agcaatgcggatcggccacc

SEQ ID NO: 3614 - DNA, 20 bp, synthetic construct
  source 1..20: mol_type = other DNA
cagcaatgcggatcggccac

SEQ ID NO: 3615 - DNA, 20 bp, synthetic construct
  source 1..20: mol_type = other DNA
acagcaatgcggatcggcca

SEQ ID NO: 3616 - DNA, 20 bp, synthetic construct
  source 1..20: mol_type = other DNA
aacagcaatgcggatcggcc

SEQ ID NO: 3617 - DNA, 20 bp, synthetic construct
  source 1..20: mol_type = other DNA
gaacagcaatgcggatcggc

SEQ ID NO: 3618 - DNA, 20 bp, synthetic construct
  source 1..20: mol_type = other DNA
cgaacagcaatgcggatcgg

SEQ ID NO: 3619 - DNA, 20 bp, synthetic construct
  source 1..20: mol_type = other DNA
tcgaacagcaatgcggatcg

SEQ ID NO: 3620 - DNA, 20 bp, synthetic construct
  source 1..20: mol_type = other DNA
ctcgaacagcaatgcggatc

SEQ ID NO: 3621 - DNA, 20 bp, synthetic construct
  source 1..20: mol_type = other DNA
cctcgaacagcaatgcggat

SEQ ID NO: 3622 - DNA, 20 bp, synthetic construct
  source 1..20: mol_type = other DNA
gcctcgaacagcaatgcgga

SEQ ID NO: 3623 - DNA, 20 bp, synthetic construct
  source 1..20: mol_type = other DNA
ggcctcgaacagcaatgcgg

SEQ ID NO: 3624 - DNA, 20 bp, synthetic construct
  source 1..20: mol_type = other DNA
cggcctcgaacagcaatgcg

SEQ ID NO: 3625 - DNA, 20 bp, synthetic construct
  source 1..20: mol_type = other DNA
gcggcctcgaacagcaatgc

SEQ ID NO: 3626 - DNA, 20 bp, synthetic construct
  source 1..20: mol_type = other DNA
tgcggcctcgaacagcaatg

SEQ ID NO: 3627 - DNA, 20 bp, synthetic construct
  source 1..20: mol_type = other DNA
ctgcggcctcgaacagcaat

SEQ ID NO: 3628 - DNA, 20 bp, synthetic construct
  source 1..20: mol_type = other DNA
actgcggcctcgaacagcaa

SEQ ID NO: 3629 - DNA, 20 bp, synthetic construct
  source 1..20: mol_type = other DNA
cactgcggcctcgaacagca

SEQ ID NO: 3630 - DNA, 20 bp, synthetic construct
  source 1..20: mol_type = other DNA
ccactgcggcctcgaacagc

SEQ ID NO: 3631 - DNA, 20 bp, synthetic construct
  source 1..20: mol_type = other DNA
tccactgcggcctcgaacag

SEQ ID NO: 3632 - DNA, 20 bp, synthetic construct
  source 1..20: mol_type = other DNA
ctccactgcggcctcgaaca

SEQ ID NO: 3633 - DNA, 20 bp, synthetic construct
  source 1..20: mol_type = other DNA
tctccactgcggcctcgaac

SEQ ID NO: 3634 - DNA, 20 bp, synthetic construct
  source 1..20: mol_type = other DNA
ttctccactgcggcctcgaa

SEQ ID NO: 3635 - DNA, 20 bp, synthetic construct
  source 1..20: mol_type = other DNA
cttctccactgcggcctcga

SEQ ID NO: 3636 - DNA, 20 bp, synthetic construct
  source 1..20: mol_type = other DNA
ccttctccactgcggcctcg

SEQ ID NO: 3637 - DNA, 20 bp, synthetic construct
  source 1..20: mol_type = other DNA
gccttctccactgcggcctc

SEQ ID NO: 3638 - DNA, 20 bp, synthetic construct
  source 1..20: mol_type = other DNA
cgccttctccactgcggcct

SEQ ID NO: 3639 - DNA, 20 bp, synthetic construct
  source 1..20: mol_type = other DNA
gcgccttctccactgcggcc

SEQ ID NO: 3640 - DNA, 20 bp, synthetic construct
  source 1..20: mol_type = other DNA
ggcgccttctccactgcggc

SEQ ID NO: 3641 - DNA, 20 bp, synthetic construct
  source 1..20: mol_type = other DNA
aggcgccttctccactgcgg

SEQ ID NO: 3642 - DNA, 20 bp, synthetic construct
  source 1..20: mol_type = other DNA
caggcgccttctccactgcg

SEQ ID NO: 3643 - DNA, 20 bp, synthetic construct
  source 1..20: mol_type = other DNA
acaggcgccttctccactgc

SEQ ID NO: 3644 - DNA, 20 bp, synthetic construct
  source 1..20: mol_type = other DNA
cacaggcgccttctccactg

SEQ ID NO: 3645 - DNA, 20 bp, synthetic construct
  source 1..20: mol_type = other DNA
ccacaggcgccttctccact

SEQ ID NO: 3646 - DNA, 20 bp, synthetic construct
  source 1..20: mol_type = other DNA
tccacaggcgccttctccac

SEQ ID NO: 3647 - DNA, 20 bp, synthetic construct
  source 1..20: mol_type = other DNA
ttccacaggcgccttctcca

SEQ ID NO: 3648 - DNA, 20 bp, synthetic construct
  source 1..20: mol_type = other DNA
gttccacaggcgccttctcc

SEQ ID NO: 3649 - DNA, 20 bp, synthetic construct
  source 1..20: mol_type = other DNA
tgttccacaggcgccttctc

SEQ ID NO: 3650 - DNA, 20 bp, synthetic construct
  source 1..20: mol_type = other DNA
atgttccacaggcgccttct

SEQ ID NO: 3651 - DNA, 20 bp, synthetic construct
  source 1..20: mol_type = other DNA
gatgttccacaggcgccttc

SEQ ID NO: 3652 - DNA, 20 bp, synthetic construct
  source 1..20: mol_type = other DNA
cgatgttccacaggcgcctt

SEQ ID NO: 3653 - DNA, 20 bp, synthetic construct
  source 1..20: mol_type = other DNA
ccgatgttccacaggcgcct

SEQ ID NO: 3654 - DNA, 20 bp, synthetic construct
  source 1..20: mol_type = other DNA
accgatgttccacaggcgcc

SEQ ID NO: 3655 - DNA, 20 bp, synthetic construct
  source 1..20: mol_type = other DNA
caccgatgttccacaggcgc

SEQ ID NO: 3656 - DNA, 20 bp, synthetic construct
  source 1..20: mol_type = other DNA
ccaccgatgttccacaggcg

SEQ ID NO: 3657 - DNA, 20 bp, synthetic construct
  source 1..20: mol_type = other DNA
cccaccgatgttccacaggc

SEQ ID NO: 3658 - DNA, 20 bp, synthetic construct
  source 1..20: mol_type = other DNA
acccaccgatgttccacagg

SEQ ID NO: 3659 - DNA, 20 bp, synthetic construct
  source 1..20: mol_type = other DNA
cacccaccgatgttccacag

SEQ ID NO: 3660 - DNA, 20 bp, synthetic construct
  source 1..20: mol_type = other DNA
tcacccaccgatgttccaca

SEQ ID NO: 3661 - DNA, 20 bp, synthetic construct
  source 1..20: mol_type = other DNA
ctcacccaccgatgttccac

SEQ ID NO: 3662 - DNA, 20 bp, synthetic construct
  source 1..20: mol_type = other DNA
cctcacccaccgatgttcca

SEQ ID NO: 3663 - DNA, 20 bp, synthetic construct
  source 1..20: mol_type = other DNA
ccctcacccaccgatgttcc

SEQ ID NO: 3664 - DNA, 20 bp, synthetic construct
  source 1..20: mol_type = other DNA
gccctcacccaccgatgttc

SEQ ID NO: 3665 - DNA, 20 bp, synthetic construct
  source 1..20: mol_type = other DNA
agccctcacccaccgatgtt

SEQ ID NO: 3666 - DNA, 20 bp, synthetic construct
  source 1..20: mol_type = other DNA
cagccctcacccaccgatgt

SEQ ID NO: 3667 - DNA, 20 bp, synthetic construct
  source 1..20: mol_type = other DNA
ccagccctcacccaccgatg

SEQ ID NO: 3668 - DNA, 20 bp, synthetic construct
  source 1..20: mol_type = other DNA
tccagccctcacccaccgat

SEQ ID NO: 3669 - DNA, 20 bp, synthetic construct
  source 1..20: mol_type = other DNA
gtccagccctcacccaccga

SEQ ID NO: 3670 - DNA, 20 bp, synthetic construct
  source 1..20: mol_type = other DNA
ggtccagccctcacccaccg

SEQ ID NO: 3671 - DNA, 20 bp, synthetic construct
  source 1..20: mol_type = other DNA
gggtccagccctcacccacc

SEQ ID NO: 3672 - DNA, 20 bp, synthetic construct
  source 1..20: mol_type = other DNA
tgggtccagccctcacccac

SEQ ID NO: 3673 - DNA, 20 bp, synthetic construct
  source 1..20: mol_type = other DNA
ctgggtccagccctcaccca

SEQ ID NO: 3674 - DNA, 20 bp, synthetic construct
  source 1..20: mol_type = other DNA
cctgggtccagccctcaccc

SEQ ID NO: 3675 - DNA, 20 bp, synthetic construct
  source 1..20: mol_type = other DNA
gcctgggtccagccctcacc

SEQ ID NO: 3676 - DNA, 20 bp, synthetic construct
  source 1..20: mol_type = other DNA
agcctgggtccagccctcac

SEQ ID NO: 3677 - DNA, 20 bp, synthetic construct
  source 1..20: mol_type = other DNA
cagcctgggtccagccctca

SEQ ID NO: 3678 - DNA, 20 bp, synthetic construct
  source 1..20: mol_type = other DNA
ccagcctgggtccagccctc

SEQ ID NO: 3679 - DNA, 20 bp, synthetic construct
  source 1..20: mol_type = other DNA
tccagcctgggtccagccct

SEQ ID NO: 3680 - DNA, 20 bp, synthetic construct
  source 1..20: mol_type = other DNA
gtccagcctgggtccagccc

SEQ ID NO: 3681 - DNA, 20 bp, synthetic construct
  source 1..20: mol_type = other DNA
ggtccagcctgggtccagcc

SEQ ID NO: 3682 - DNA, 20 bp, synthetic construct
  source 1..20: mol_type = other DNA
gggtccagcctgggtccagc

SEQ ID NO: 3683 - DNA, 20 bp, synthetic construct
  source 1..20: mol_type = other DNA
agggtccagcctgggtccag

SEQ ID NO: 3684 - DNA, 20 bp, synthetic construct
  source 1..20: mol_type = other DNA
cagggtccagcctgggtcca

SEQ ID NO: 3685 - DNA, 20 bp, synthetic construct
  source 1..20: mol_type = other DNA
ccagggtccagcctgggtcc

SEQ ID NO: 3686 - DNA, 20 bp, synthetic construct
  source 1..20: mol_type = other DNA
tccagggtccagcctgggtc

SEQ ID NO: 3687 - DNA, 20 bp, synthetic construct
  source 1..20: mol_type = other DNA
ctccagggtccagcctgggt

SEQ ID NO: 3688 - DNA, 20 bp, synthetic construct
  source 1..20: mol_type = other DNA
tctccagggtccagcctggg

SEQ ID NO: 3689 - DNA, 20 bp, synthetic construct
  source 1..20: mol_type = other DNA
atctccagggtccagcctgg

SEQ ID NO: 3690 - DNA, 20 bp, synthetic construct
  source 1..20: mol_type = other DNA
gatctccagggtccagcctg

SEQ ID NO: 3691 - DNA, 20 bp, synthetic construct
  source 1..20: mol_type = other DNA
ggatctccagggtccagcct

SEQ ID NO: 3692 - DNA, 20 bp, synthetic construct
  source 1..20: mol_type = other DNA
cggatctccagggtccagcc

SEQ ID NO: 3693 - DNA, 20 bp, synthetic construct
  source 1..20: mol_type = other DNA
ccggatctccagggtccagc

SEQ ID NO: 3694 - DNA, 20 bp, synthetic construct
  source 1..20: mol_type = other DNA
cccggatctccagggtccag

SEQ ID NO: 3695 - DNA, 20 bp, synthetic construct
  source 1..20: mol_type = other DNA
ccccggatctccagggtcca

SEQ ID NO: 3696 - DNA, 20 bp, synthetic construct
  source 1..20: mol_type = other DNA
accccggatctccagggtcc

SEQ ID NO: 3697 - DNA, 20 bp, synthetic construct
  source 1..20: mol_type = other DNA
caccccggatctccagggtc

SEQ ID NO: 3698 - DNA, 20 bp, synthetic construct
  source 1..20: mol_type = other DNA
ccaccccggatctccagggt

SEQ ID NO: 3699 - DNA, 20 bp, synthetic construct
  source 1..20: mol_type = other DNA
gccaccccggatctccaggg

SEQ ID NO: 3700 - DNA, 20 bp, synthetic construct
  source 1..20: mol_type = other DNA
cgccaccccggatctccagg

SEQ ID NO: 3701 - DNA, 20 bp, synthetic construct
  source 1..20: mol_type = other DNA
ccgccaccccggatctccag

SEQ ID NO: 3702 - DNA, 20 bp, synthetic construct
  source 1..20: mol_type = other DNA
accgccaccccggatctcca

SEQ ID NO: 3703 - DNA, 20 bp, synthetic construct
  source 1..20: mol_type = other DNA
caccgccaccccggatctcc

SEQ ID NO: 3704 - DNA, 20 bp, synthetic construct
  source 1..20: mol_type = other DNA
gcaccgccaccccggatctc

SEQ ID NO: 3705 - DNA, 20 bp, synthetic construct
  source 1..20: mol_type = other DNA
agcaccgccaccccggatct

SEQ ID NO: 3706 - DNA, 20 bp, synthetic construct
  source 1..20: mol_type = other DNA
cagcaccgccaccccggatc

SEQ ID NO: 3707 - DNA, 20 bp, synthetic construct
  source 1..20: mol_type = other DNA
ccagcaccgccaccccggat

SEQ ID NO: 3708 - DNA, 20 bp, synthetic construct
  source 1..20: mol_type = other DNA
accagcaccgccaccccgga

SEQ ID NO: 3709 - DNA, 20 bp, synthetic construct
  source 1..20: mol_type = other DNA
caccagcaccgccaccccgg

SEQ ID NO: 3710 - DNA, 20 bp, synthetic construct
  source 1..20: mol_type = other DNA
ccaccagcaccgccaccccg

SEQ ID NO: 3711 - DNA, 20 bp, synthetic construct
  source 1..20: mol_type = other DNA
gccaccagcaccgccacccc

SEQ ID NO: 3712 - DNA, 20 bp, synthetic construct
  source 1..20: mol_type = other DNA
tgccaccagcaccgccaccc

SEQ ID NO: 3713 - DNA, 20 bp, synthetic construct
  source 1..20: mol_type = other DNA
ctgccaccagcaccgccacc

SEQ ID NO: 3714 - DNA, 20 bp, synthetic construct
  source 1..20: mol_type = other DNA
cctgccaccagcaccgccac

SEQ ID NO: 3715 - DNA, 20 bp, synthetic construct
  source 1..20: mol_type = other DNA
ccctgccaccagcaccgcca

SEQ ID NO: 3716 - DNA, 20 bp, synthetic construct
  source 1..20: mol_type = other DNA
cccctgccaccagcaccgcc

SEQ ID NO: 3717 - DNA, 20 bp, synthetic construct
  source 1..20: mol_type = other DNA
ccccctgccaccagcaccgc

SEQ ID NO: 3718 - DNA, 20 bp, synthetic construct
  source 1..20: mol_type = other DNA
gccccctgccaccagcaccg

SEQ ID NO: 3719 - DNA, 20 bp, synthetic construct
  source 1..20: mol_type = other DNA
cgccccctgccaccagcacc

SEQ ID NO: 3720 - DNA, 20 bp, synthetic construct
  source 1..20: mol_type = other DNA
ccgccccctgccaccagcac

SEQ ID NO: 3721 - DNA, 20 bp, synthetic construct
  source 1..20: mol_type = other DNA
cccgccccctgccaccagca

SEQ ID NO: 3722 - DNA, 20 bp, synthetic construct
  source 1..20: mol_type = other DNA
gcccgccccctgccaccagc

SEQ ID NO: 3723 - DNA, 20 bp, synthetic construct
  source 1..20: mol_type = other DNA
tgcccgccccctgccaccag

SEQ ID NO: 3724 - DNA, 20 bp, synthetic construct
  source 1..20: mol_type = other DNA
gtgcccgccccctgccacca

SEQ ID NO: 3725 - DNA, 20 bp, synthetic construct
  source 1..20: mol_type = other DNA
ggtgcccgccccctgccacc

SEQ ID NO: 3726 - DNA, 20 bp, synthetic construct
  source 1..20: mol_type = other DNA
gggtgcccgccccctgccac

SEQ ID NO: 3727 - DNA, 20 bp, synthetic construct
  source 1..20: mol_type = other DNA
agggtgcccgccccctgcca

SEQ ID NO: 3728 - DNA, 20 bp, synthetic construct
  source 1..20: mol_type = other DNA
cagggtgcccgccccctgcc

SEQ ID NO: 3729 - DNA, 20 bp, synthetic construct
  source 1..20: mol_type = other DNA
gcagggtgcccgccccctgc

SEQ ID NO: 3730 - DNA, 20 bp, synthetic construct
  source 1..20: mol_type = other DNA
cgcagggtgcccgccccctg

SEQ ID NO: 3731 - DNA, 20 bp, synthetic construct
  source 1..20: mol_type = other DNA
gcgcagggtgcccgccccct

SEQ ID NO: 3732 - DNA, 20 bp, synthetic construct
  source 1..20: mol_type = other DNA
tgcgcagggtgcccgccccc

SEQ ID NO: 3733 - DNA, 20 bp, synthetic construct
  source 1..20: mol_type = other DNA
gtgcgcagggtgcccgcccc

SEQ ID NO: 3734 - DNA, 20 bp, synthetic construct
  source 1..20: mol_type = other DNA
agtgcgcagggtgcccgccc

SEQ ID NO: 3735 - DNA, 20 bp, synthetic construct
  source 1..20: mol_type = other DNA
aagtgcgcagggtgcccgcc

SEQ ID NO: 3736 - DNA, 20 bp, synthetic construct
  source 1..20: mol_type = other DNA
taagtgcgcagggtgcccgc

SEQ ID NO: 3737 - DNA, 20 bp, synthetic construct
  source 1..20: mol_type = other DNA
ataagtgcgcagggtgcccg

SEQ ID NO: 3738 - DNA, 20 bp, synthetic construct
  source 1..20: mol_type = other DNA
gataagtgcgcagggtgccc

SEQ ID NO: 3739 - DNA, 20 bp, synthetic construct
  source 1..20: mol_type = other DNA
ggataagtgcgcagggtgcc

SEQ ID NO: 3740 - DNA, 20 bp, synthetic construct
  source 1..20: mol_type = other DNA
gggataagtgcgcagggtgc

SEQ ID NO: 3741 - DNA, 20 bp, synthetic construct
  source 1..20: mol_type = other DNA
tgggataagtgcgcagggtg

SEQ ID NO: 3742 - DNA, 20 bp, synthetic construct
  source 1..20: mol_type = other DNA
ttgggataagtgcgcagggt

SEQ ID NO: 3743 - DNA, 20 bp, synthetic construct
  source 1..20: mol_type = other DNA
gttgggataagtgcgcaggg

SEQ ID NO: 3744 - DNA, 20 bp, synthetic construct
  source 1..20: mol_type = other DNA
ggttgggataagtgcgcagg

SEQ ID NO: 3745 - DNA, 20 bp, synthetic construct
  source 1..20: mol_type = other DNA
gggttgggataagtgcgcag

SEQ ID NO: 3746 - DNA, 20 bp, synthetic construct
  source 1..20: mol_type = other DNA
ggggttgggataagtgcgca

SEQ ID NO: 3747 - DNA, 20 bp, synthetic construct
  source 1..20: mol_type = other DNA
gggggttgggataagtgcgc

SEQ ID NO: 3748 - DNA, 20 bp, synthetic construct
  source 1..20: mol_type = other DNA
cgggggttgggataagtgcg

SEQ ID NO: 3749 - DNA, 20 bp, synthetic construct
  source 1..20: mol_type = other DNA
gcgggggttgggataagtgc

SEQ ID NO: 3750 - DNA, 20 bp, synthetic construct
  source 1..20: mol_type = other DNA
ggcgggggttgggataagtg

SEQ ID NO: 3751 - DNA, 20 bp, synthetic construct
  source 1..20: mol_type = other DNA
gggcgggggttgggataagt

SEQ ID NO: 3752 - DNA, 20 bp, synthetic construct
  source 1..20: mol_type = other DNA
ggggcgggggttgggataag

SEQ ID NO: 3753 - DNA, 20 bp, synthetic construct
  source 1..20: mol_type = other DNA
tggggcgggggttgggataa

SEQ ID NO: 3754 - DNA, 20 bp, synthetic construct
  source 1..20: mol_type = other DNA
ttggggcgggggttgggata

SEQ ID NO: 3755 - DNA, 20 bp, synthetic construct
  source 1..20: mol_type = other DNA
attggggcgggggttgggat

SEQ ID NO: 3756 - DNA, 20 bp, synthetic construct
  source 1..20: mol_type = other DNA
aattggggcgggggttggga

SEQ ID NO: 3757 - DNA, 20 bp, synthetic construct
  source 1..20: mol_type = other DNA
aaattggggcgggggttggg

SEQ ID NO: 3758 - DNA, 20 bp, synthetic construct
  source 1..20: mol_type = other DNA
gaaattggggcgggggttgg

SEQ ID NO: 3759 - DNA, 20 bp, synthetic construct
  source 1..20: mol_type = other DNA
cgaaattggggcgggggttg

SEQ ID NO: 3760 - DNA, 20 bp, synthetic construct
  source 1..20: mol_type = other DNA
ccgaaattggggcgggggtt

SEQ ID NO: 3761 - DNA, 20 bp, synthetic construct
  source 1..20: mol_type = other DNA
tccgaaattggggcgggggt

SEQ ID NO: 3762 - DNA, 20 bp, synthetic construct
  source 1..20: mol_type = other DNA
ttccgaaattggggcggggg

SEQ ID NO: 3763 - DNA, 20 bp, synthetic construct
  source 1..20: mol_type = other DNA
tttccgaaattggggcgggg

SEQ ID NO: 3764 - DNA, 20 bp, synthetic construct
  source 1..20: mol_type = other DNA
atttccgaaattggggcggg

SEQ ID NO: 3765 - DNA, 20 bp, synthetic construct
  source 1..20: mol_type = other DNA
catttccgaaattggggcgg

SEQ ID NO: 3766 - DNA, 20 bp, synthetic construct
  source 1..20: mol_type = other DNA
gcatttccgaaattggggcg

SEQ ID NO: 3767 - DNA, 20 bp, synthetic construct
  source 1..20: mol_type = other DNA
agcatttccgaaattggggc

SEQ ID NO: 3768 - DNA, 20 bp, synthetic construct
  source 1..20: mol_type = other DNA
tagcatttccgaaattgggg

SEQ ID NO: 3769 - DNA, 20 bp, synthetic construct
  source 1..20: mol_type = other DNA
ctagcatttccgaaattggg

SEQ ID NO: 3770 - DNA, 20 bp, synthetic construct
  source 1..20: mol_type = other DNA
cctagcatttccgaaattgg

SEQ ID NO: 3771 - DNA, 20 bp, synthetic construct
  source 1..20: mol_type = other DNA
tcctagcatttccgaaattg

SEQ ID NO: 3772 - DNA, 20 bp, synthetic construct
  source 1..20: mol_type = other DNA
ctcctagcatttccgaaatt

SEQ ID NO: 3773 - DNA, 20 bp, synthetic construct
  source 1..20: mol_type = other DNA
tctcctagcatttccgaaat

SEQ ID NO: 3774 - DNA, 20 bp, synthetic construct
  source 1..20: mol_type = other DNA
ctctcctagcatttccgaaa

SEQ ID NO: 3775 - DNA, 20 bp, synthetic construct
  source 1..20: mol_type = other DNA
tctctcctagcatttccgaa

SEQ ID NO: 3776 - DNA, 20 bp, synthetic construct
  source 1..20: mol_type = other DNA
ctctctcctagcatttccga

SEQ ID NO: 3777 - DNA, 20 bp, synthetic construct
  source 1..20: mol_type = other DNA
tctctctcctagcatttccg

SEQ ID NO: 3778 - DNA, 20 bp, synthetic construct
  source 1..20: mol_type = other DNA
ctctctctcctagcatttcc

SEQ ID NO: 3779 - DNA, 20 bp, synthetic construct
  source 1..20: mol_type = other DNA
tctctctctcctagcatttc

SEQ ID NO: 3780 - DNA, 20 bp, synthetic construct
  source 1..20: mol_type = other DNA
atctctctctcctagcattt

SEQ ID NO: 3781 - DNA, 20 bp, synthetic construct
  source 1..20: mol_type = other DNA
aatctctctctcctagcatt

SEQ ID NO: 3782 - DNA, 20 bp, synthetic construct
  source 1..20: mol_type = other DNA
caatctctctctcctagcat

SEQ ID NO: 3783 - DNA, 20 bp, synthetic construct
  source 1..20: mol_type = other DNA
gcaatctctctctcctagca

SEQ ID NO: 3784 - DNA, 20 bp, synthetic construct
  source 1..20: mol_type = other DNA
tgcaatctctctctcctagc

SEQ ID NO: 3785 - DNA, 20 bp, synthetic construct
  source 1..20: mol_type = other DNA
ctgcaatctctctctcctag

SEQ ID NO: 3786 - DNA, 20 bp, synthetic construct
  source 1..20: mol_type = other DNA
gctgcaatctctctctccta

SEQ ID NO: 3787 - DNA, 20 bp, synthetic construct
  source 1..20: mol_type = other DNA
tgctgcaatctctctctcct

SEQ ID NO: 3788 - DNA, 20 bp, synthetic construct
  source 1..20: mol_type = other DNA
ctgctgcaatctctctctcc

SEQ ID NO: 3789 - DNA, 20 bp, synthetic construct
  source 1..20: mol_type = other DNA
cctgctgcaatctctctctc

SEQ ID NO: 3790 - DNA, 20 bp, synthetic construct
  source 1..20: mol_type = other DNA
ccctgctgcaatctctctct

SEQ ID NO: 3791 - DNA, 20 bp, synthetic construct
  source 1..20: mol_type = other DNA
cccctgctgcaatctctctc

SEQ ID NO: 3792 - DNA, 20 bp, synthetic construct
  source 1..20: mol_type = other DNA
tcccctgctgcaatctctct

SEQ ID NO: 3793 - DNA, 20 bp, synthetic construct
  source 1..20: mol_type = other DNA
gtcccctgctgcaatctctc

SEQ ID NO: 3794 - DNA, 20 bp, synthetic construct
  source 1..20: mol_type = other DNA
cgtcccctgctgcaatctct

SEQ ID NO: 3795 - DNA, 20 bp, synthetic construct
  source 1..20: mol_type = other DNA
acgtcccctgctgcaatctc

SEQ ID NO: 3796 - DNA, 20 bp, synthetic construct
  source 1..20: mol_type = other DNA
cacgtcccctgctgcaatct

SEQ ID NO: 3797 - DNA, 20 bp, synthetic construct
  source 1..20: mol_type = other DNA
ccacgtcccctgctgcaatc

SEQ ID NO: 3798 - DNA, 20 bp, synthetic construct
  source 1..20: mol_type = other DNA
accacgtcccctgctgcaat

SEQ ID NO: 3799 - DNA, 20 bp, synthetic construct
  source 1..20: mol_type = other DNA
gaccacgtcccctgctgcaa

SEQ ID NO: 3800 - DNA, 20 bp, synthetic construct
  source 1..20: mol_type = other DNA
cgaccacgtcccctgctgca

SEQ ID NO: 3801 - DNA, 20 bp, synthetic construct
  source 1..20: mol_type = other DNA
ccgaccacgtcccctgctgc

SEQ ID NO: 3802 - DNA, 20 bp, synthetic construct
  source 1..20: mol_type = other DNA
cccgaccacgtcccctgctg

SEQ ID NO: 3803 - DNA, 20 bp, synthetic construct
  source 1..20: mol_type = other DNA
acccgaccacgtcccctgct

SEQ ID NO: 3804 - DNA, 20 bp, synthetic construct
  source 1..20: mol_type = other DNA
aacccgaccacgtcccctgc

SEQ ID NO: 3805 - DNA, 20 bp, synthetic construct
  source 1..20: mol_type = other DNA
gaacccgaccacgtcccctg

SEQ ID NO: 3806 - DNA, 20 bp, synthetic construct
  source 1..20: mol_type = other DNA
ggaacccgaccacgtcccct

SEQ ID NO: 3807 - DNA, 20 bp, synthetic construct
  source 1..20: mol_type = other DNA
aggaacccgaccacgtcccc

SEQ ID NO: 3808 - DNA, 20 bp, synthetic construct
  source 1..20: mol_type = other DNA
caggaacccgaccacgtccc

SEQ ID NO: 3809 - DNA, 20 bp, synthetic construct
  source 1..20: mol_type = other DNA
tcaggaacccgaccacgtcc

SEQ ID NO: 3810 - DNA, 20 bp, synthetic construct
  source 1..20: mol_type = other DNA
ttcaggaacccgaccacgtc

SEQ ID NO: 3811 - DNA, 20 bp, synthetic construct
  source 1..20: mol_type = other DNA
cttcaggaacccgaccacgt

SEQ ID NO: 3812 - DNA, 20 bp, synthetic construct
  source 1..20: mol_type = other DNA
ccttcaggaacccgaccacg

SEQ ID NO: 3813 - DNA, 20 bp, synthetic construct
  source 1..20: mol_type = other DNA
gccttcaggaacccgaccac

SEQ ID NO: 3814 - DNA, 20 bp, synthetic construct
  source 1..20: mol_type = other DNA
tgccttcaggaacccgacca

SEQ ID NO: 3815 - DNA, 20 bp, synthetic construct
  source 1..20: mol_type = other DNA
ctgccttcaggaacccgacc

SEQ ID NO: 3816 - DNA, 20 bp, synthetic construct
  source 1..20: mol_type = other DNA
tctgccttcaggaacccgac

SEQ ID NO: 3817 - DNA, 20 bp, synthetic construct
  source 1..20: mol_type = other DNA
ttctgccttcaggaacccga

SEQ ID NO: 3818 - DNA, 20 bp, synthetic construct
  source 1..20: mol_type = other DNA
tttctgccttcaggaacccg

SEQ ID NO: 3819 - DNA, 20 bp, synthetic construct
  source 1..20: mol_type = other DNA
ctttctgccttcaggaaccc

SEQ ID NO: 3820 - DNA, 20 bp, synthetic construct
  source 1..20: mol_type = other DNA
cctttctgccttcaggaacc

SEQ ID NO: 3821 - DNA, 20 bp, synthetic construct
  source 1..20: mol_type = other DNA
gcctttctgccttcaggaac

SEQ ID NO: 3822 - DNA, 20 bp, synthetic construct
  source 1..20: mol_type = other DNA
cgcctttctgccttcaggaa

SEQ ID NO: 3823 - DNA, 20 bp, synthetic construct
  source 1..20: mol_type = other DNA
ccgcctttctgccttcagga

SEQ ID NO: 3824 - DNA, 20 bp, synthetic construct
  source 1..20: mol_type = other DNA
cccgcctttctgccttcagg

SEQ ID NO: 3825 - DNA, 20 bp, synthetic construct
  source 1..20: mol_type = other DNA
acccgcctttctgccttcag

SEQ ID NO: 3826 - DNA, 20 bp, synthetic construct
  source 1..20: mol_type = other DNA
cacccgcctttctgccttca

SEQ ID NO: 3827 - DNA, 20 bp, synthetic construct
  source 1..20: mol_type = other DNA
acacccgcctttctgccttc

SEQ ID NO: 3828 - DNA, 20 bp, synthetic construct
  source 1..20: mol_type = other DNA
aacacccgcctttctgcctt

SEQ ID NO: 3829 - DNA, 20 bp, synthetic construct
  source 1..20: mol_type = other DNA
aaacacccgcctttctgcct

SEQ ID NO: 3830 - DNA, 20 bp, synthetic construct
  source 1..20: mol_type = other DNA
taaacacccgcctttctgcc

SEQ ID NO: 3831 - DNA, 20 bp, synthetic construct
  source 1..20: mol_type = other DNA
gtaaacacccgcctttctgc

SEQ ID NO: 3832 - DNA, 20 bp, synthetic construct
  source 1..20: mol_type = other DNA
agtaaacacccgcctttctg

SEQ ID NO: 3833 - DNA, 20 bp, synthetic construct
  source 1..20: mol_type = other DNA
tagtaaacacccgcctttct

SEQ ID NO: 3834 - DNA, 20 bp, synthetic construct
  source 1..20: mol_type = other DNA
ctagtaaacacccgcctttc

SEQ ID NO: 3835 - DNA, 20 bp, synthetic construct
  source 1..20: mol_type = other DNA
gctagtaaacacccgccttt

SEQ ID NO: 3836 - DNA, 20 bp, synthetic construct
  source 1..20: mol_type = other DNA
cgctagtaaacacccgcctt

SEQ ID NO: 3837 - DNA, 20 bp, synthetic construct
  source 1..20: mol_type = other DNA
acgctagtaaacacccgcct

SEQ ID NO: 3838 - DNA, 20 bp, synthetic construct
  source 1..20: mol_type = other DNA
gacgctagtaaacacccgcc

SEQ ID NO: 3839 - DNA, 20 bp, synthetic construct
  source 1..20: mol_type = other DNA
agacgctagtaaacacccgc

SEQ ID NO: 3840 - DNA, 20 bp, synthetic construct
  source 1..20: mol_type = other DNA
aagacgctagtaaacacccg

SEQ ID NO: 3841 - DNA, 20 bp, synthetic construct
  source 1..20: mol_type = other DNA
aaagacgctagtaaacaccc

SEQ ID NO: 3842 - DNA, 20 bp, synthetic construct
  source 1..20: mol_type = other DNA
aaaagacgctagtaaacacc

SEQ ID NO: 3843 - DNA, 20 bp, synthetic construct
  source 1..20: mol_type = other DNA
aaaaagacgctagtaaacac

SEQ ID NO: 3844 - DNA, 20 bp, synthetic construct
  source 1..20: mol_type = other DNA
gaaaaagacgctagtaaaca

SEQ ID NO: 3845 - DNA, 20 bp, synthetic construct
  source 1..20: mol_type = other DNA
ggaaaaagacgctagtaaac

SEQ ID NO: 3846 - DNA, 20 bp, synthetic construct
  source 1..20: mol_type = other DNA
gggaaaaagacgctagtaaa

SEQ ID NO: 3847 - DNA, 20 bp, synthetic construct
  source 1..20: mol_type = other DNA
agggaaaaagacgctagtaa

SEQ ID NO: 3848 - DNA, 20 bp, synthetic construct
  source 1..20: mol_type = other DNA
gagggaaaaagacgctagta

SEQ ID NO: 3849 - DNA, 20 bp, synthetic construct
  source 1..20: mol_type = other DNA
ggagggaaaaagacgctagt

SEQ ID NO: 3850 - DNA, 20 bp, synthetic construct
  source 1..20: mol_type = other DNA
aggagggaaaaagacgctag

SEQ ID NO: 3851 - DNA, 20 bp, synthetic construct
  source 1..20: mol_type = other DNA
taggagggaaaaagacgcta

SEQ ID NO: 3852 - DNA, 20 bp, synthetic construct
  source 1..20: mol_type = other DNA
ttaggagggaaaaagacgct

SEQ ID NO: 3853 - DNA, 20 bp, synthetic construct
  source 1..20: mol_type = other DNA
cttaggagggaaaaagacgc

SEQ ID NO: 3854 - DNA, 20 bp, synthetic construct
  source 1..20: mol_type = other DNA
gcttaggagggaaaaagacg

SEQ ID NO: 3855 - DNA, 20 bp, synthetic construct
  source 1..20: mol_type = other DNA
ggcttaggagggaaaaagac

SEQ ID NO: 3856 - DNA, 20 bp, synthetic construct
  source 1..20: mol_type = other DNA
cggcttaggagggaaaaaga

SEQ ID NO: 3857 - DNA, 20 bp, synthetic construct
  source 1..20: mol_type = other DNA
ccggcttaggagggaaaaag

SEQ ID NO: 3858 - DNA, 20 bp, synthetic construct
  source 1..20: mol_type = other DNA
cccggcttaggagggaaaaa

SEQ ID NO: 3859 - DNA, 20 bp, synthetic construct
  source 1..20: mol_type = other DNA
ccccggcttaggagggaaaa

SEQ ID NO: 3860 - DNA, 20 bp, synthetic construct
  source 1..20: mol_type = other DNA
accccggcttaggagggaaa

SEQ ID NO: 3861 - DNA, 20 bp, synthetic construct
  source 1..20: mol_type = other DNA
aaccccggcttaggagggaa

SEQ ID NO: 3862 - DNA, 20 bp, synthetic construct
  source 1..20: mol_type = other DNA
caaccccggcttaggaggga

SEQ ID NO: 3863 - DNA, 20 bp, synthetic construct
  source 1..20: mol_type = other DNA
acaaccccggcttaggaggg

SEQ ID NO: 3864 - DNA, 20 bp, synthetic construct
  source 1..20: mol_type = other DNA
tacaaccccggcttaggagg

SEQ ID NO: 3865 - DNA, 20 bp, synthetic construct
  source 1..20: mol_type = other DNA
ctacaaccccggcttaggag

SEQ ID NO: 3866 - DNA, 20 bp, synthetic construct
  source 1..20: mol_type = other DNA
actacaaccccggcttagga

SEQ ID NO: 3867 - DNA, 20 bp, synthetic construct
  source 1..20: mol_type = other DNA
tactacaaccccggcttagg

SEQ ID NO: 3868 - DNA, 20 bp, synthetic construct
  source 1..20: mol_type = other DNA
ctactacaaccccggcttag

SEQ ID NO: 3869 - DNA, 20 bp, synthetic construct
  source 1..20: mol_type = other DNA
cctactacaaccccggctta

SEQ ID NO: 3870 - DNA, 20 bp, synthetic construct
  source 1..20: mol_type = other DNA
ccctactacaaccccggctt

SEQ ID NO: 3871 - DNA, 20 bp, synthetic construct
  source 1..20: mol_type = other DNA
cccctactacaaccccggct

SEQ ID NO: 3872 - DNA, 20 bp, synthetic construct
  source 1..20: mol_type = other DNA
gcccctactacaaccccggc

SEQ ID NO: 3873 - DNA, 20 bp, synthetic construct
  source 1..20: mol_type = other DNA
agcccctactacaaccccgg

SEQ ID NO: 3874 - DNA, 20 bp, synthetic construct
  source 1..20: mol_type = other DNA
cagcccctactacaaccccg

SEQ ID NO: 3875 - DNA, 20 bp, synthetic construct
  source 1..20: mol_type = other DNA
ccagcccctactacaacccc

SEQ ID NO: 3876 - DNA, 20 bp, synthetic construct
  source 1..20: mol_type = other DNA
cccagcccctactacaaccc

SEQ ID NO: 3877 - DNA, 20 bp, synthetic construct
  source 1..20: mol_type = other DNA
ccccagcccctactacaacc

SEQ ID NO: 3878 - DNA, 20 bp, synthetic construct
  source 1..20: mol_type = other DNA
cccccagcccctactacaac

SEQ ID NO: 3879 - DNA, 20 bp, synthetic construct
  source 1..20: mol_type = other DNA
gcccccagcccctactacaa

SEQ ID NO: 3880 - DNA, 20 bp, synthetic construct
  source 1..20: mol_type = other DNA
agcccccagcccctactaca

SEQ ID NO: 3881 - DNA, 20 bp, synthetic construct
  source 1..20: mol_type = other DNA
gagcccccagcccctactac

SEQ ID NO: 3882 - DNA, 20 bp, synthetic construct
  source 1..20: mol_type = other DNA
tgagcccccagcccctacta

SEQ ID NO: 3883 - DNA, 20 bp, synthetic construct
  source 1..20: mol_type = other DNA
ctgagcccccagcccctact

SEQ ID NO: 3884 - DNA, 20 bp, synthetic construct
  source 1..20: mol_type = other DNA
actgagcccccagcccctac

SEQ ID NO: 3885 - DNA, 20 bp, synthetic construct
  source 1..20: mol_type = other DNA
cactgagcccccagccccta

SEQ ID NO: 3886 - DNA, 20 bp, synthetic construct
  source 1..20: mol_type = other DNA
acactgagcccccagcccct

SEQ ID NO: 3887 - DNA, 20 bp, synthetic construct
  source 1..20: mol_type = other DNA
aacactgagcccccagcccc

SEQ ID NO: 3888 - DNA, 20 bp, synthetic construct
  source 1..20: mol_type = other DNA
caacactgagcccccagccc

SEQ ID NO: 3889 - DNA, 20 bp, synthetic construct
  source 1..20: mol_type = other DNA
acaacactgagcccccagcc

SEQ ID NO: 3890 - DNA, 20 bp, synthetic construct
  source 1..20: mol_type = other DNA
gacaacactgagcccccagc

SEQ ID NO: 3891 - DNA, 20 bp, synthetic construct
  source 1..20: mol_type = other DNA
ggacaacactgagcccccag

SEQ ID NO: 3892 - DNA, 20 bp, synthetic construct
  source 1..20: mol_type = other DNA
gggacaacactgagccccca

SEQ ID NO: 3893 - DNA, 20 bp, synthetic construct
  source 1..20: mol_type = other DNA
cgggacaacactgagccccc

SEQ ID NO: 3894 - DNA, 20 bp, synthetic construct
  source 1..20: mol_type = other DNA
ccgggacaacactgagcccc

SEQ ID NO: 3895 - DNA, 20 bp, synthetic construct
  source 1..20: mol_type = other DNA
gccgggacaacactgagccc

SEQ ID NO: 3896 - DNA, 20 bp, synthetic construct
  source 1..20: mol_type = other DNA
agccgggacaacactgagcc

SEQ ID NO: 3897 - DNA, 20 bp, synthetic construct
  source 1..20: mol_type = other DNA
tagccgggacaacactgagc

SEQ ID NO: 3898 - DNA, 20 bp, synthetic construct
  source 1..20: mol_type = other DNA
ttagccgggacaacactgag

SEQ ID NO: 3899 - DNA, 20 bp, synthetic construct
  source 1..20: mol_type = other DNA
gttagccgggacaacactga

SEQ ID NO: 3900 - DNA, 20 bp, synthetic construct
  source 1..20: mol_type = other DNA
agttagccgggacaacactg

SEQ ID NO: 3901 - DNA, 20 bp, synthetic construct
  source 1..20: mol_type = other DNA
cagttagccgggacaacact

SEQ ID NO: 3902 - DNA, 20 bp, synthetic construct
  source 1..20: mol_type = other DNA
ccagttagccgggacaacac

SEQ ID NO: 3903 - DNA, 20 bp, synthetic construct
  source 1..20: mol_type = other DNA
cccagttagccgggacaaca

SEQ ID NO: 3904 - DNA, 20 bp, synthetic construct
  source 1..20: mol_type = other DNA
acccagttagccgggacaac

SEQ ID NO: 3905 - DNA, 20 bp, synthetic construct
  source 1..20: mol_type = other DNA
aacccagttagccgggacaa

SEQ ID NO: 3906 - DNA, 20 bp, synthetic construct
  source 1..20: mol_type = other DNA
aaacccagttagccgggaca

SEQ ID NO: 3907 - DNA, 20 bp, synthetic construct
  source 1..20: mol_type = other DNA
caaacccagttagccgggac

SEQ ID NO: 3908 - DNA, 20 bp, synthetic construct
  source 1..20: mol_type = other DNA
tcaaacccagttagccggga

SEQ ID NO: 3909 - DNA, 20 bp, synthetic construct
  source 1..20: mol_type = other DNA
gtcaaacccagttagccggg

SEQ ID NO: 3910 - DNA, 20 bp, synthetic construct
  source 1..20: mol_type = other DNA
agtcaaacccagttagccgg

SEQ ID NO: 3911 - DNA, 20 bp, synthetic construct
  source 1..20: mol_type = other DNA
gagtcaaacccagttagccg

SEQ ID NO: 3912 - DNA, 20 bp, synthetic construct
  source 1..20: mol_type = other DNA
cgagtcaaacccagttagcc

SEQ ID NO: 3913 - DNA, 20 bp, synthetic construct
  source 1..20: mol_type = other DNA
tcgagtcaaacccagttagc

SEQ ID NO: 3914 - DNA, 20 bp, synthetic construct
  source 1..20: mol_type = other DNA
ctcgagtcaaacccagttag

SEQ ID NO: 3915 - DNA, 20 bp, synthetic construct
  source 1..20: mol_type = other DNA
cctcgagtcaaacccagtta

SEQ ID NO: 3916 - DNA, 20 bp, synthetic construct
  source 1..20: mol_type = other DNA
ccctcgagtcaaacccagtt

SEQ ID NO: 3917 - DNA, 20 bp, synthetic construct
  source 1..20: mol_type = other DNA
accctcgagtcaaacccagt

SEQ ID NO: 3918 - DNA, 20 bp, synthetic construct
  source 1..20: mol_type = other DNA
caccctcgagtcaaacccag

SEQ ID NO: 3919 - DNA, 20 bp, synthetic construct
  source 1..20: mol_type = other DNA
acaccctcgagtcaaaccca

SEQ ID NO: 3920 - DNA, 20 bp, synthetic construct
  source 1..20: mol_type = other DNA
cacaccctcgagtcaaaccc

SEQ ID NO: 3921 - DNA, 20 bp, synthetic construct
  source 1..20: mol_type = other DNA
acacaccctcgagtcaaacc

SEQ ID NO: 3922 - DNA, 20 bp, synthetic construct
  source 1..20: mol_type = other DNA
aacacaccctcgagtcaaac

SEQ ID NO: 3923 - DNA, 20 bp, synthetic construct
  source 1..20: mol_type = other DNA
aaacacaccctcgagtcaaa

SEQ ID NO: 3924 - DNA, 20 bp, synthetic construct
  source 1..20: mol_type = other DNA
caaacacaccctcgagtcaa

SEQ ID NO: 3925 - DNA, 20 bp, synthetic construct
  source 1..20: mol_type = other DNA
acaaacacaccctcgagtca

SEQ ID NO: 3926 - DNA, 20 bp, synthetic construct
  source 1..20: mol_type = other DNA
cacaaacacaccctcgagtc

SEQ ID NO: 3927 - DNA, 20 bp, synthetic construct
  source 1..20: mol_type = other DNA
gcacaaacacaccctcgagt

SEQ ID NO: 3928 - DNA, 20 bp, synthetic construct
  source 1..20: mol_type = other DNA
tgcacaaacacaccctcgag

SEQ ID NO: 3929 - DNA, 20 bp, synthetic construct
  source 1..20: mol_type = other DNA
ctgcacaaacacaccctcga

SEQ ID NO: 3930 - DNA, 20 bp, synthetic construct
  source 1..20: mol_type = other DNA
cctgcacaaacacaccctcg

SEQ ID NO: 3931 - DNA, 20 bp, synthetic construct
  source 1..20: mol_type = other DNA
tcctgcacaaacacaccctc

SEQ ID NO: 3932 - DNA, 20 bp, synthetic construct
  source 1..20: mol_type = other DNA
ctcctgcacaaacacaccct

SEQ ID NO: 3933 - DNA, 20 bp, synthetic construct
  source 1..20: mol_type = other DNA
cctcctgcacaaacacaccc

SEQ ID NO: 3934 - DNA, 20 bp, synthetic construct
  source 1..20: mol_type = other DNA
ccctcctgcacaaacacacc

SEQ ID NO: 3935 - DNA, 20 bp, synthetic construct
  source 1..20: mol_type = other DNA
gccctcctgcacaaacacac

SEQ ID NO: 3936 - DNA, 20 bp, synthetic construct
  source 1..20: mol_type = other DNA
ggccctcctgcacaaacaca

SEQ ID NO: 3937 - DNA, 20 bp, synthetic construct
  source 1..20: mol_type = other DNA
aggccctcctgcacaaacac

SEQ ID NO: 3938 - DNA, 20 bp, synthetic construct
  source 1..20: mol_type = other DNA
caggccctcctgcacaaaca

SEQ ID NO: 3939 - DNA, 20 bp, synthetic construct
  source 1..20: mol_type = other DNA
acaggccctcctgcacaaac

SEQ ID NO: 3940 - DNA, 20 bp, synthetic construct
  source 1..20: mol_type = other DNA
aacaggccctcctgcacaaa

SEQ ID NO: 3941 - DNA, 20 bp, synthetic construct
  source 1..20: mol_type = other DNA
caacaggccctcctgcacaa

SEQ ID NO: 3942 - DNA, 20 bp, synthetic construct
  source 1..20: mol_type = other DNA
ccaacaggccctcctgcaca

SEQ ID NO: 3943 - DNA, 20 bp, synthetic construct
  source 1..20: mol_type = other DNA
cccaacaggccctcctgcac

SEQ ID NO: 3944 - DNA, 20 bp, synthetic construct
  source 1..20: mol_type = other DNA
ccccaacaggccctcctgca

SEQ ID NO: 3945 - DNA, 20 bp, synthetic construct
  source 1..20: mol_type = other DNA
cccccaacaggccctcctgc

SEQ ID NO: 3946 - DNA, 20 bp, synthetic construct
  source 1..20: mol_type = other DNA
acccccaacaggccctcctg

SEQ ID NO: 3947 - DNA, 20 bp, synthetic construct
  source 1..20: mol_type = other DNA
cacccccaacaggccctcct

SEQ ID NO: 3948 - DNA, 20 bp, synthetic construct
  source 1..20: mol_type = other DNA
ccacccccaacaggccctcc

SEQ ID NO: 3949 - DNA, 20 bp, synthetic construct
  source 1..20: mol_type = other DNA
gccacccccaacaggccctc

SEQ ID NO: 3950 - DNA, 20 bp, synthetic construct
  source 1..20: mol_type = other DNA
cgccacccccaacaggccct

SEQ ID NO: 3951 - DNA, 20 bp, synthetic construct
  source 1..20: mol_type = other DNA
ccgccacccccaacaggccc

SEQ ID NO: 3952 - DNA, 20 bp, synthetic construct
  source 1..20: mol_type = other DNA
cccgccacccccaacaggcc

SEQ ID NO: 3953 - DNA, 20 bp, synthetic construct
  source 1..20: mol_type = other DNA
gcccgccacccccaacaggc

SEQ ID NO: 3954 - DNA, 20 bp, synthetic construct
  source 1..20: mol_type = other DNA
cgcccgccacccccaacagg

SEQ ID NO: 3955 - DNA, 20 bp, synthetic construct
  source 1..20: mol_type = other DNA
ccgcccgccacccccaacag

SEQ ID NO: 3956 - DNA, 20 bp, synthetic construct
  source 1..20: mol_type = other DNA
accgcccgccacccccaaca

SEQ ID NO: 3957 - DNA, 20 bp, synthetic construct
  source 1..20: mol_type = other DNA
aaccgcccgccacccccaac

SEQ ID NO: 3958 - DNA, 20 bp, synthetic construct
  source 1..20: mol_type = other DNA
caaccgcccgccacccccaa

SEQ ID NO: 3959 - DNA, 20 bp, synthetic construct
  source 1..20: mol_type = other DNA
acaaccgcccgccaccccca

SEQ ID NO: 3960 - DNA, 20 bp, synthetic construct
  source 1..20: mol_type = other DNA
gacaaccgcccgccaccccc

SEQ ID NO: 3961 - DNA, 20 bp, synthetic construct
  source 1..20: mol_type = other DNA
tgacaaccgcccgccacccc

SEQ ID NO: 3962 - DNA, 20 bp, synthetic construct
  source 1..20: mol_type = other DNA
ctgacaaccgcccgccaccc

SEQ ID NO: 3963 - DNA, 20 bp, synthetic construct
  source 1..20: mol_type = other DNA
actgacaaccgcccgccacc

SEQ ID NO: 3964 - DNA, 20 bp, synthetic construct
  source 1..20: mol_type = other DNA
aactgacaaccgcccgccac

SEQ ID NO: 3965 - DNA, 20 bp, synthetic construct
  source 1..20: mol_type = other DNA
gaactgacaaccgcccgcca

SEQ ID NO: 3966 - DNA, 20 bp, synthetic construct
  source 1..20: mol_type = other DNA
cgaactgacaaccgcccgcc

SEQ ID NO: 3967 - DNA, 20 bp, synthetic construct
  source 1..20: mol_type = other DNA
acgaactgacaaccgcccgc

SEQ ID NO: 3968 - DNA, 20 bp, synthetic construct
  source 1..20: mol_type = other DNA
tacgaactgacaaccgcccg

SEQ ID NO: 3969 - DNA, 20 bp, synthetic construct
  source 1..20: mol_type = other DNA
atacgaactgacaaccgccc

SEQ ID NO: 3970 - DNA, 20 bp, synthetic construct
  source 1..20: mol_type = other DNA
aatacgaactgacaaccgcc

SEQ ID NO: 3971 - DNA, 20 bp, synthetic construct
  source 1..20: mol_type = other DNA
aaatacgaactgacaaccgc

SEQ ID NO: 3972 - DNA, 20 bp, synthetic construct
  source 1..20: mol_type = other DNA
gaaatacgaactgacaaccg

SEQ ID NO: 3973 - DNA, 20 bp, synthetic construct
  source 1..20: mol_type = other DNA
tgaaatacgaactgacaacc

SEQ ID NO: 3974 - DNA, 20 bp, synthetic construct
  source 1..20: mol_type = other DNA
gtgaaatacgaactgacaac

SEQ ID NO: 3975 - DNA, 20 bp, synthetic construct
  source 1..20: mol_type = other DNA
cgtgaaatacgaactgacaa

SEQ ID NO: 3976 - DNA, 20 bp, synthetic construct
  source 1..20: mol_type = other DNA
tcgtgaaatacgaactgaca

SEQ ID NO: 3977 - DNA, 20 bp, synthetic construct
  source 1..20: mol_type = other DNA
ttcgtgaaatacgaactgac

SEQ ID NO: 3978 - DNA, 20 bp, synthetic construct
  source 1..20: mol_type = other DNA
gttcgtgaaatacgaactga

SEQ ID NO: 3979 - DNA, 20 bp, synthetic construct
  source 1..20: mol_type = other DNA
agttcgtgaaatacgaactg

SEQ ID NO: 3980 - DNA, 20 bp, synthetic construct
  source 1..20: mol_type = other DNA
tagttcgtgaaatacgaact

SEQ ID NO: 3981 - DNA, 20 bp, synthetic construct
  source 1..20: mol_type = other DNA
ttagttcgtgaaatacgaac

SEQ ID NO: 3982 - DNA, 20 bp, synthetic construct
  source 1..20: mol_type = other DNA
cttagttcgtgaaatacgaa

SEQ ID NO: 3983 - DNA, 20 bp, synthetic construct
  source 1..20: mol_type = other DNA
tcttagttcgtgaaatacga

SEQ ID NO: 3984 - DNA, 20 bp, synthetic construct
  source 1..20: mol_type = other DNA
ttcttagttcgtgaaatacg

SEQ ID NO: 3985 - DNA, 20 bp, synthetic construct
  source 1..20: mol_type = other DNA
tttcttagttcgtgaaatac

SEQ ID NO: 3986 - DNA, 20 bp, synthetic construct
  source 1..20: mol_type = other DNA
ttttcttagttcgtgaaata

SEQ ID NO: 3987 - DNA, 20 bp, synthetic construct
  source 1..20: mol_type = other DNA
attttcttagttcgtgaaat

SEQ ID NO: 3988 - DNA, 20 bp, synthetic construct
  source 1..20: mol_type = other DNA
cattttcttagttcgtgaaa

SEQ ID NO: 3989 - DNA, 20 bp, synthetic construct
  source 1..20: mol_type = other DNA
gcattttcttagttcgtgaa

SEQ ID NO: 3990 - DNA, 20 bp, synthetic construct
  source 1..20: mol_type = other DNA
agcattttcttagttcgtga

SEQ ID NO: 3991 - DNA, 20 bp, synthetic construct
  source 1..20: mol_type = other DNA
aagcattttcttagttcgtg

SEQ ID NO: 3992 - DNA, 20 bp, synthetic construct
  source 1..20: mol_type = other DNA
taagcattttcttagttcgt

SEQ ID NO: 3993 - DNA, 20 bp, synthetic construct
  source 1..20: mol_type = other DNA
ctaagcattttcttagttcg

SEQ ID NO: 3994 - DNA, 20 bp, synthetic construct
  source 1..20: mol_type = other DNA
actaagcattttcttagttc

SEQ ID NO: 3995 - DNA, 20 bp, synthetic construct
  source 1..20: mol_type = other DNA
cactaagcattttcttagtt

SEQ ID NO: 3996 - DNA, 20 bp, synthetic construct
  source 1..20: mol_type = other DNA
acactaagcattttcttagt

SEQ ID NO: 3997 - DNA, 20 bp, synthetic construct
  source 1..20: mol_type = other DNA
aacactaagcattttcttag

SEQ ID NO: 3998 - DNA, 20 bp, synthetic construct
  source 1..20: mol_type = other DNA
gaacactaagcattttctta

SEQ ID NO: 3999 - DNA, 20 bp, synthetic construct
  source 1..20: mol_type = other DNA
tgaacactaagcattttctt

SEQ ID NO: 4000 - DNA, 20 bp, synthetic construct
  source 1..20: mol_type = other DNA
ttgaacactaagcattttct

SEQ ID NO: 4001 - DNA, 20 bp, synthetic construct
  source 1..20: mol_type = other DNA
tttgaacactaagcattttc

SEQ ID NO: 4002 - DNA, 20 bp, synthetic construct
  source 1..20: mol_type = other DNA
ctttgaacactaagcatttt

SEQ ID NO: 4003 - DNA, 20 bp, synthetic construct
  source 1..20: mol_type = other DNA
cctttgaacactaagcattt

SEQ ID NO: 4004 - DNA, 20 bp, synthetic construct
  source 1..20: mol_type = other DNA
ccctttgaacactaagcatt

SEQ ID NO: 4005 - DNA, 20 bp, synthetic construct
  source 1..20: mol_type = other DNA
tccctttgaacactaagcat

SEQ ID NO: 4006 - DNA, 20 bp, synthetic construct
  source 1..20: mol_type = other DNA
ctccctttgaacactaagca

SEQ ID NO: 4007 - DNA, 20 bp, synthetic construct
  source 1..20: mol_type = other DNA
tctccctttgaacactaagc

SEQ ID NO: 4008 - DNA, 20 bp, synthetic construct
  source 1..20: mol_type = other DNA
ttctccctttgaacactaag

SEQ ID NO: 4009 - DNA, 20 bp, synthetic construct
  source 1..20: mol_type = other DNA
cttctccctttgaacactaa

SEQ ID NO: 4010 - DNA, 20 bp, synthetic construct
  source 1..20: mol_type = other DNA
ccttctccctttgaacacta

SEQ ID NO: 4011 - DNA, 20 bp, synthetic construct
  source 1..20: mol_type = other DNA
tccttctccctttgaacact

SEQ ID NO: 4012 - DNA, 20 bp, synthetic construct
  source 1..20: mol_type = other DNA
ttccttctccctttgaacac

SEQ ID NO: 4013 - DNA, 20 bp, synthetic construct
  source 1..20: mol_type = other DNA
tttccttctccctttgaaca

SEQ ID NO: 4014 - DNA, 20 bp, synthetic construct
  source 1..20: mol_type = other DNA
gtttccttctccctttgaac

SEQ ID NO: 4015 - DNA, 20 bp, synthetic construct
  source 1..20: mol_type = other DNA
cgtttccttctccctttgaa

SEQ ID NO: 4016 - DNA, 20 bp, synthetic construct
  source 1..20: mol_type = other DNA
acgtttccttctccctttga

SEQ ID NO: 4017 - DNA, 20 bp, synthetic construct
  source 1..20: mol_type = other DNA
gacgtttccttctccctttg

SEQ ID NO: 4018 - DNA, 20 bp, synthetic construct
  source 1..20: mol_type = other DNA
tgacgtttccttctcccttt

SEQ ID NO: 4019 - DNA, 20 bp, synthetic construct
  source 1..20: mol_type = other DNA
ttgacgtttccttctccctt

SEQ ID NO: 4020 - DNA, 20 bp, synthetic construct
  source 1..20: mol_type = other DNA
attgacgtttccttctccct

SEQ ID NO: 4021 - DNA, 20 bp, synthetic construct
  source 1..20: mol_type = other DNA
tattgacgtttccttctccc

SEQ ID NO: 4022 - DNA, 20 bp, synthetic construct
  source 1..20: mol_type = other DNA
ctattgacgtttccttctcc

SEQ ID NO: 4023 - DNA, 20 bp, synthetic construct
  source 1..20: mol_type = other DNA
tctattgacgtttccttctc

SEQ ID NO: 4024 - DNA, 20 bp, synthetic construct
  source 1..20: mol_type = other DNA
gtctattgacgtttccttct

SEQ ID NO: 4025 - DNA, 20 bp, synthetic construct
  source 1..20: mol_type = other DNA
agtctattgacgtttccttc

SEQ ID NO: 4026 - DNA, 20 bp, synthetic construct
  source 1..20: mol_type = other DNA
gagtctattgacgtttcctt

SEQ ID NO: 4027 - DNA, 20 bp, synthetic construct
  source 1..20: mol_type = other DNA
ggagtctattgacgtttcct

SEQ ID NO: 4028 - DNA, 20 bp, synthetic construct
  source 1..20: mol_type = other DNA
tggagtctattgacgtttcc

SEQ ID NO: 4029 - DNA, 20 bp, synthetic construct
  source 1..20: mol_type = other DNA
atggagtctattgacgtttc

SEQ ID NO: 4030 - DNA, 20 bp, synthetic construct
  source 1..20: mol_type = other DNA
aatggagtctattgacgttt

SEQ ID NO: 4031 - DNA, 20 bp, synthetic construct
  source 1..20: mol_type = other DNA
gaatggagtctattgacgtt

SEQ ID NO: 4032 - DNA, 20 bp, synthetic construct
  source 1..20: mol_type = other DNA
ggaatggagtctattgacgt

SEQ ID NO: 4033 - DNA, 20 bp, synthetic construct
  source 1..20: mol_type = other DNA
tggaatggagtctattgacg

SEQ ID NO: 4034 - DNA, 20 bp, synthetic construct
  source 1..20: mol_type = other DNA
atggaatggagtctattgac

SEQ ID NO: 4035 - DNA, 20 bp, synthetic construct
  source 1..20: mol_type = other DNA
aatggaatggagtctattga

SEQ ID NO: 4036 - DNA, 20 bp, synthetic construct
  source 1..20: mol_type = other DNA
caatggaatggagtctattg

SEQ ID NO: 4037 - DNA, 20 bp, synthetic construct
  source 1..20: mol_type = other DNA
acaatggaatggagtctatt

SEQ ID NO: 4038 - DNA, 20 bp, synthetic construct
  source 1..20: mol_type = other DNA
cacaatggaatggagtctat

SEQ ID NO: 4039 - DNA, 20 bp, synthetic construct
  source 1..20: mol_type = other DNA
ccacaatggaatggagtcta

SEQ ID NO: 4040 - DNA, 20 bp, synthetic construct
  source 1..20: mol_type = other DNA
gccacaatggaatggagtct

SEQ ID NO: 4041 - DNA, 20 bp, synthetic construct
  source 1..20: mol_type = other DNA
ggccacaatggaatggagtc

SEQ ID NO: 4042 - DNA, 20 bp, synthetic construct
  source 1..20: mol_type = other DNA
cggccacaatggaatggagt

SEQ ID NO: 4043 - DNA, 20 bp, synthetic construct
  source 1..20: mol_type = other DNA
ccggccacaatggaatggag

SEQ ID NO: 4044 - DNA, 20 bp, synthetic construct
  source 1..20: mol_type = other DNA
accggccacaatggaatgga

SEQ ID NO: 4045 - DNA, 20 bp, synthetic construct
  source 1..20: mol_type = other DNA
caccggccacaatggaatgg

SEQ ID NO: 4046 - DNA, 20 bp, synthetic construct
  source 1..20: mol_type = other DNA
acaccggccacaatggaatg

SEQ ID NO: 4047 - DNA, 20 bp, synthetic construct
  source 1..20: mol_type = other DNA
gacaccggccacaatggaat

SEQ ID NO: 4048 - DNA, 20 bp, synthetic construct
  source 1..20: mol_type = other DNA
ggacaccggccacaatggaa

SEQ ID NO: 4049 - DNA, 20 bp, synthetic construct
  source 1..20: mol_type = other DNA
aggacaccggccacaatgga

SEQ ID NO: 4050 - DNA, 20 bp, synthetic construct
  source 1..20: mol_type = other DNA
aaggacaccggccacaatgg

SEQ ID NO: 4051 - DNA, 20 bp, synthetic construct
  source 1..20: mol_type = other DNA
taaggacaccggccacaatg

SEQ ID NO: 4052 - DNA, 20 bp, synthetic construct
  source 1..20: mol_type = other DNA
ttaaggacaccggccacaat

SEQ ID NO: 4053 - DNA, 20 bp, synthetic construct
  source 1..20: mol_type = other DNA
gttaaggacaccggccacaa

SEQ ID NO: 4054 - DNA, 20 bp, synthetic construct
  source 1..20: mol_type = other DNA
agttaaggacaccggccaca

SEQ ID NO: 4055 - DNA, 20 bp, synthetic construct
  source 1..20: mol_type = other DNA
aagttaaggacaccggccac

SEQ ID NO: 4056 - DNA, 20 bp, synthetic construct
  source 1..20: mol_type = other DNA
gaagttaaggacaccggcca

SEQ ID NO: 4057 - DNA, 20 bp, synthetic construct
  source 1..20: mol_type = other DNA
cgaagttaaggacaccggcc

SEQ ID NO: 4058 - DNA, 20 bp, synthetic construct
  source 1..20: mol_type = other DNA
ccgaagttaaggacaccggc

SEQ ID NO: 4059 - DNA, 20 bp, synthetic construct
  source 1..20: mol_type = other DNA
cccgaagttaaggacaccgg

SEQ ID NO: 4060 - DNA, 20 bp, synthetic construct
  source 1..20: mol_type = other DNA
tcccgaagttaaggacaccg

SEQ ID NO: 4061 - DNA, 20 bp, synthetic construct
  source 1..20: mol_type = other DNA
ctcccgaagttaaggacacc

SEQ ID NO: 4062 - DNA, 20 bp, synthetic construct
  source 1..20: mol_type = other DNA
actcccgaagttaaggacac

SEQ ID NO: 4063 - DNA, 20 bp, synthetic construct
  source 1..20: mol_type = other DNA
cactcccgaagttaaggaca

SEQ ID NO: 4064 - DNA, 20 bp, synthetic construct
  source 1..20: mol_type = other DNA
gcactcccgaagttaaggac

SEQ ID NO: 4065 - DNA, 20 bp, synthetic construct
  source 1..20: mol_type = other DNA
ggcactcccgaagttaagga

SEQ ID NO: 4066 - DNA, 20 bp, synthetic construct
  source 1..20: mol_type = other DNA
cggcactcccgaagttaagg

SEQ ID NO: 4067 - DNA, 20 bp, synthetic construct
  source 1..20: mol_type = other DNA
gcggcactcccgaagttaag

SEQ ID NO: 4068 - DNA, 20 bp, synthetic construct
  source 1..20: mol_type = other DNA
ggcggcactcccgaagttaa

SEQ ID NO: 4069 - DNA, 20 bp, synthetic construct
  source 1..20: mol_type = other DNA
tggcggcactcccgaagtta

SEQ ID NO: 4070 - DNA, 20 bp, synthetic construct
  source 1..20: mol_type = other DNA
ctggcggcactcccgaagtt

SEQ ID NO: 4071 - DNA, 20 bp, synthetic construct
  source 1..20: mol_type = other DNA
tctggcggcactcccgaagt

SEQ ID NO: 4072 - DNA, 20 bp, synthetic construct
  source 1..20: mol_type = other DNA
ctctggcggcactcccgaag

SEQ ID NO: 4073 - DNA, 20 bp, synthetic construct
  source 1..20: mol_type = other DNA
gctctggcggcactcccgaa

SEQ ID NO: 4074 - DNA, 20 bp, synthetic construct
  source 1..20: mol_type = other DNA
agctctggcggcactcccga

SEQ ID NO: 4075 - DNA, 20 bp, synthetic construct
  source 1..20: mol_type = other DNA
aagctctggcggcactcccg

SEQ ID NO: 4076 - DNA, 20 bp, synthetic construct
  source 1..20: mol_type = other DNA
taagctctggcggcactccc

SEQ ID NO: 4077 - DNA, 20 bp, synthetic construct
  source 1..20: mol_type = other DNA
gtaagctctggcggcactcc

SEQ ID NO: 4078 - DNA, 20 bp, synthetic construct
  source 1..20: mol_type = other DNA
ggtaagctctggcggcactc

SEQ ID NO: 4079 - DNA, 20 bp, synthetic construct
  source 1..20: mol_type = other DNA
tggtaagctctggcggcact

SEQ ID NO: 4080 - DNA, 20 bp, synthetic construct
  source 1..20: mol_type = other DNA
ttggtaagctctggcggcac

SEQ ID NO: 4081 - DNA, 20 bp, synthetic construct
  source 1..20: mol_type = other DNA
cttggtaagctctggcggca

SEQ ID NO: 4082 - DNA, 20 bp, synthetic construct
  source 1..20: mol_type = other DNA
ccttggtaagctctggcggc

SEQ ID NO: 4083 - DNA, 20 bp, synthetic construct
  source 1..20: mol_type = other DNA
cccttggtaagctctggcgg

SEQ ID NO: 4084 - DNA, 20 bp, synthetic construct
  source 1..20: mol_type = other DNA
gcccttggtaagctctggcg

SEQ ID NO: 4085 - DNA, 20 bp, synthetic construct
  source 1..20: mol_type = other DNA
tgcccttggtaagctctggc

SEQ ID NO: 4086 - DNA, 20 bp, synthetic construct
  source 1..20: mol_type = other DNA
gtgcccttggtaagctctgg

SEQ ID NO: 4087 - DNA, 20 bp, synthetic construct
  source 1..20: mol_type = other DNA
cgtgcccttggtaagctctg

SEQ ID NO: 4088 - DNA, 20 bp, synthetic construct
  source 1..20: mol_type = other DNA
gcgtgcccttggtaagctct

SEQ ID NO: 4089 - DNA, 20 bp, synthetic construct
  source 1..20: mol_type = other DNA
tgcgtgcccttggtaagctc

SEQ ID NO: 4090 - DNA, 20 bp, synthetic construct
  source 1..20: mol_type = other DNA
ttgcgtgcccttggtaagct

SEQ ID NO: 4091 - DNA, 20 bp, synthetic construct
  source 1..20: mol_type = other DNA
cttgcgtgcccttggtaagc

SEQ ID NO: 4092 - DNA, 20 bp, synthetic construct
  source 1..20: mol_type = other DNA
acttgcgtgcccttggtaag

SEQ ID NO: 4093 - DNA, 20 bp, synthetic construct
  source 1..20: mol_type = other DNA
gacttgcgtgcccttggtaa

SEQ ID NO: 4094 - DNA, 20 bp, synthetic construct
  source 1..20: mol_type = other DNA
ggacttgcgtgcccttggta

SEQ ID NO: 4095 - DNA, 20 bp, synthetic construct
  source 1..20: mol_type = other DNA
tggacttgcgtgcccttggt

SEQ ID NO: 4096 - DNA, 20 bp, synthetic construct
  source 1..20: mol_type = other DNA
atggacttgcgtgcccttgg

SEQ ID NO: 4097 - DNA, 20 bp, synthetic construct
  source 1..20: mol_type = other DNA
aatggacttgcgtgcccttg

SEQ ID NO: 4098 - DNA, 20 bp, synthetic construct
  source 1..20: mol_type = other DNA
aaatggacttgcgtgccctt

SEQ ID NO: 4099 - DNA, 20 bp, synthetic construct
  source 1..20: mol_type = other DNA
gaaatggacttgcgtgccct

SEQ ID NO: 4100 - DNA, 20 bp, synthetic construct
  source 1..20: mol_type = other DNA
ggaaatggacttgcgtgccc

SEQ ID NO: 4101 - DNA, 20 bp, synthetic construct
  source 1..20: mol_type = other DNA
gggaaatggacttgcgtgcc

SEQ ID NO: 4102 - DNA, 20 bp, synthetic construct
  source 1..20: mol_type = other DNA
agggaaatggacttgcgtgc

SEQ ID NO: 4103 - DNA, 20 bp, synthetic construct
  source 1..20: mol_type = other DNA
aagggaaatggacttgcgtg

SEQ ID NO: 4104 - DNA, 20 bp, synthetic construct
  source 1..20: mol_type = other DNA
caagggaaatggacttgcgt

SEQ ID NO: 4105 - DNA, 20 bp, synthetic construct
  source 1..20: mol_type = other DNA
acaagggaaatggacttgcg

SEQ ID NO: 4106 - DNA, 20 bp, synthetic construct
  source 1..20: mol_type = other DNA
cacaagggaaatggacttgc

SEQ ID NO: 4107 - DNA, 20 bp, synthetic construct
  source 1..20: mol_type = other DNA
gcacaagggaaatggacttg

SEQ ID NO: 4108 - DNA, 20 bp, synthetic construct
  source 1..20: mol_type = other DNA
ggcacaagggaaatggactt

SEQ ID NO: 4109 - DNA, 20 bp, synthetic construct
  source 1..20: mol_type = other DNA
aggcacaagggaaatggact

SEQ ID NO: 4110 - DNA, 20 bp, synthetic construct
  source 1..20: mol_type = other DNA
gaggcacaagggaaatggac

SEQ ID NO: 4111 - DNA, 20 bp, synthetic construct
  source 1..20: mol_type = other DNA
tgaggcacaagggaaatgga

SEQ ID NO: 4112 - DNA, 20 bp, synthetic construct
  source 1..20: mol_type = other DNA
ttgaggcacaagggaaatgg

SEQ ID NO: 4113 - DNA, 20 bp, synthetic construct
  source 1..20: mol_type = other DNA
cttgaggcacaagggaaatg

SEQ ID NO: 4114 - DNA, 20 bp, synthetic construct
  source 1..20: mol_type = other DNA
acttgaggcacaagggaaat

SEQ ID NO: 4115 - DNA, 20 bp, synthetic construct
  source 1..20: mol_type = other DNA
gacttgaggcacaagggaaa

SEQ ID NO: 4116 - DNA, 20 bp, synthetic construct
  source 1..20: mol_type = other DNA
ggacttgaggcacaagggaa

SEQ ID NO: 4117 - DNA, 20 bp, synthetic construct
  source 1..20: mol_type = other DNA
tggacttgaggcacaaggga

SEQ ID NO: 4118 - DNA, 20 bp, synthetic construct
  source 1..20: mol_type = other DNA
atggacttgaggcacaaggg

SEQ ID NO: 4119 - DNA, 20 bp, synthetic construct
  source 1..20: mol_type = other DNA
gatggacttgaggcacaagg

SEQ ID NO: 4120 - DNA, 20 bp, synthetic construct
  source 1..20: mol_type = other DNA
ggatggacttgaggcacaag

SEQ ID NO: 4121 - DNA, 20 bp, synthetic construct
  source 1..20: mol_type = other DNA
cggatggacttgaggcacaa

SEQ ID NO: 4122 - DNA, 20 bp, synthetic construct
  source 1..20: mol_type = other DNA
acggatggacttgaggcaca

SEQ ID NO: 4123 - DNA, 20 bp, synthetic construct
  source 1..20: mol_type = other DNA
cacggatggacttgaggcac

SEQ ID NO: 4124 - DNA, 20 bp, synthetic construct
  source 1..20: mol_type = other DNA
acacggatggacttgaggca

SEQ ID NO: 4125 - DNA, 20 bp, synthetic construct
  source 1..20: mol_type = other DNA
aacacggatggacttgaggc

SEQ ID NO: 4126 - DNA, 20 bp, synthetic construct
  source 1..20: mol_type = other DNA
caacacggatggacttgagg

SEQ ID NO: 4127 - DNA, 20 bp, synthetic construct
  source 1..20: mol_type = other DNA
acaacacggatggacttgag

SEQ ID NO: 4128 - DNA, 20 bp, synthetic construct
  source 1..20: mol_type = other DNA
tacaacacggatggacttga

SEQ ID NO: 4129 - DNA, 20 bp, synthetic construct
  source 1..20: mol_type = other DNA
ctacaacacggatggacttg

SEQ ID NO: 4130 - DNA, 20 bp, synthetic construct
  source 1..20: mol_type = other DNA
cctacaacacggatggactt

SEQ ID NO: 4131 - DNA, 20 bp, synthetic construct
  source 1..20: mol_type = other DNA
gcctacaacacggatggact

SEQ ID NO: 4132 - DNA, 20 bp, synthetic construct
  source 1..20: mol_type = other DNA
tgcctacaacacggatggac

SEQ ID NO: 4133 - DNA, 20 bp, synthetic construct
  source 1..20: mol_type = other DNA
gtgcctacaacacggatgga

SEQ ID NO: 4134 - DNA, 20 bp, synthetic construct
  source 1..20: mol_type = other DNA
agtgcctacaacacggatgg

SEQ ID NO: 4135 - DNA, 20 bp, synthetic construct
  source 1..20: mol_type = other DNA
tagtgcctacaacacggatg

SEQ ID NO: 4136 - DNA, 20 bp, synthetic construct
  source 1..20: mol_type = other DNA
gtagtgcctacaacacggat

SEQ ID NO: 4137 - DNA, 20 bp, synthetic construct
  source 1..20: mol_type = other DNA
agtagtgcctacaacacgga

SEQ ID NO: 4138 - DNA, 20 bp, synthetic construct
  source 1..20: mol_type = other DNA
cagtagtgcctacaacacgg

SEQ ID NO: 4139 - DNA, 20 bp, synthetic construct
  source 1..20: mol_type = other DNA
acagtagtgcctacaacacg

SEQ ID NO: 4140 - DNA, 20 bp, synthetic construct
  source 1..20: mol_type = other DNA
cacagtagtgcctacaacac

SEQ ID NO: 4141 - DNA, 20 bp, synthetic construct
  source 1..20: mol_type = other DNA
gcacagtagtgcctacaaca

SEQ ID NO: 4142 - DNA, 20 bp, synthetic construct
  source 1..20: mol_type = other DNA
ggcacagtagtgcctacaac

SEQ ID NO: 4143 - DNA, 20 bp, synthetic construct
  source 1..20: mol_type = other DNA
aggcacagtagtgcctacaa

SEQ ID NO: 4144 - DNA, 20 bp, synthetic construct
  source 1..20: mol_type = other DNA
aaggcacagtagtgcctaca

SEQ ID NO: 4145 - DNA, 20 bp, synthetic construct
  source 1..20: mol_type = other DNA
gaaggcacagtagtgcctac

SEQ ID NO: 4146 - DNA, 20 bp, synthetic construct
  source 1..20: mol_type = other DNA
agaaggcacagtagtgccta

SEQ ID NO: 4147 - DNA, 20 bp, synthetic construct
  source 1..20: mol_type = other DNA
aagaaggcacagtagtgcct

SEQ ID NO: 4148 - DNA, 20 bp, synthetic construct
  source 1..20: mol_type = other DNA
aaagaaggcacagtagtgcc

SEQ ID NO: 4149 - DNA, 20 bp, synthetic construct
  source 1..20: mol_type = other DNA
taaagaaggcacagtagtgc

SEQ ID NO: 4150 - DNA, 20 bp, synthetic construct
  source 1..20: mol_type = other DNA
ctaaagaaggcacagtagtg

SEQ ID NO: 4151 - DNA, 20 bp, synthetic construct
  source 1..20: mol_type = other DNA
cctaaagaaggcacagtagt

SEQ ID NO: 4152 - DNA, 20 bp, synthetic construct
  source 1..20: mol_type = other DNA
gcctaaagaaggcacagtag

SEQ ID NO: 4153 - DNA, 20 bp, synthetic construct
  source 1..20: mol_type = other DNA
ggcctaaagaaggcacagta

SEQ ID NO: 4154 - DNA, 20 bp, synthetic construct
  source 1..20: mol_type = other DNA
aggcctaaagaaggcacagt

SEQ ID NO: 4155 - DNA, 20 bp, synthetic construct
  source 1..20: mol_type = other DNA
taggcctaaagaaggcacag

SEQ ID NO: 4156 - DNA, 20 bp, synthetic construct
  source 1..20: mol_type = other DNA
ctaggcctaaagaaggcaca

SEQ ID NO: 4157 - DNA, 20 bp, synthetic construct
  source 1..20: mol_type = other DNA
cctaggcctaaagaaggcac

SEQ ID NO: 4158 - DNA, 20 bp, synthetic construct
  source 1..20: mol_type = other DNA
gcctaggcctaaagaaggca

SEQ ID NO: 4159 - DNA, 20 bp, synthetic construct
  source 1..20: mol_type = other DNA
ggcctaggcctaaagaaggc

SEQ ID NO: 4160 - DNA, 20 bp, synthetic construct
  source 1..20: mol_type = other DNA
cggcctaggcctaaagaagg

SEQ ID NO: 4161 - DNA, 20 bp, synthetic construct
  source 1..20: mol_type = other DNA
gcggcctaggcctaaagaag

SEQ ID NO: 4162 - DNA, 20 bp, synthetic construct
  source 1..20: mol_type = other DNA
ggcggcctaggcctaaagaa

SEQ ID NO: 4163 - DNA, 20 bp, synthetic construct
  source 1..20: mol_type = other DNA
cggcggcctaggcctaaaga

SEQ ID NO: 4164 - DNA, 20 bp, synthetic construct
  source 1..20: mol_type = other DNA
ccggcggcctaggcctaaag

SEQ ID NO: 4165 - DNA, 20 bp, synthetic construct
  source 1..20: mol_type = other DNA
gccggcggcctaggcctaaa

SEQ ID NO: 4166 - DNA, 20 bp, synthetic construct
  source 1..20: mol_type = other DNA
agccggcggcctaggcctaa

SEQ ID NO: 4167 - DNA, 20 bp, synthetic construct
  source 1..20: mol_type = other DNA
aagccggcggcctaggccta

SEQ ID NO: 4168 - DNA, 20 bp, synthetic construct
  source 1..20: mol_type = other DNA
caagccggcggcctaggcct

SEQ ID NO: 4169 - DNA, 20 bp, synthetic construct
  source 1..20: mol_type = other DNA
tcaagccggcggcctaggcc

SEQ ID NO: 4170 - DNA, 20 bp, synthetic construct
  source 1..20: mol_type = other DNA
gtcaagccggcggcctaggc

SEQ ID NO: 4171 - DNA, 20 bp, synthetic construct
  source 1..20: mol_type = other DNA
cgtcaagccggcggcctagg

SEQ ID NO: 4172 - DNA, 20 bp, synthetic construct
  source 1..20: mol_type = other DNA
ccgtcaagccggcggcctag

SEQ ID NO: 4173 - DNA, 20 bp, synthetic construct
  source 1..20: mol_type = other DNA
gccgtcaagccggcggccta

SEQ ID NO: 4174 - DNA, 20 bp, synthetic construct
  source 1..20: mol_type = other DNA
cgccgtcaagccggcggcct

SEQ ID NO: 4175 - DNA, 20 bp, synthetic construct
  source 1..20: mol_type = other DNA
ccgccgtcaagccggcggcc

SEQ ID NO: 4176 - DNA, 20 bp, synthetic construct
  source 1..20: mol_type = other DNA
cccgccgtcaagccggcggc

SEQ ID NO: 4177 - DNA, 20 bp, synthetic construct
  source 1..20: mol_type = other DNA
acccgccgtcaagccggcgg

SEQ ID NO: 4178 - DNA, 20 bp, synthetic construct
  source 1..20: mol_type = other DNA
cacccgccgtcaagccggcg

SEQ ID NO: 4179 - DNA, 20 bp, synthetic construct
  source 1..20: mol_type = other DNA
tcacccgccgtcaagccggc

SEQ ID NO: 4180 - DNA, 20 bp, synthetic construct
  source 1..20: mol_type = other DNA
gtcacccgccgtcaagccgg

SEQ ID NO: 4181 - DNA, 20 bp, synthetic construct
  source 1..20: mol_type = other DNA
ggtcacccgccgtcaagccg

SEQ ID NO: 4182 - DNA, 20 bp, synthetic construct
  source 1..20: mol_type = other DNA
cggtcacccgccgtcaagcc

SEQ ID NO: 4183 - DNA, 20 bp, synthetic construct
  source 1..20: mol_type = other DNA
ccggtcacccgccgtcaagc

SEQ ID NO: 4184 - DNA, 20 bp, synthetic construct
  source 1..20: mol_type = other DNA
gccggtcacccgccgtcaag

SEQ ID NO: 4185 - DNA, 20 bp, synthetic construct
  source 1..20: mol_type = other DNA
cgccggtcacccgccgtcaa

SEQ ID NO: 4186 - DNA, 20 bp, synthetic construct
  source 1..20: mol_type = other DNA
acgccggtcacccgccgtca

SEQ ID NO: 4187 - DNA, 20 bp, synthetic construct
  source 1..20: mol_type = other DNA
gacgccggtcacccgccgtc

SEQ ID NO: 4188 - DNA, 20 bp, synthetic construct
  source 1..20: mol_type = other DNA
ggacgccggtcacccgccgt

SEQ ID NO: 4189 - DNA, 20 bp, synthetic construct
  source 1..20: mol_type = other DNA
aggacgccggtcacccgccg

SEQ ID NO: 4190 - DNA, 20 bp, synthetic construct
  source 1..20: mol_type = other DNA
gaggacgccggtcacccgcc

SEQ ID NO: 4191 - DNA, 20 bp, synthetic construct
  source 1..20: mol_type = other DNA
ggaggacgccggtcacccgc

SEQ ID NO: 4192 - DNA, 20 bp, synthetic construct
  source 1..20: mol_type = other DNA
aggaggacgccggtcacccg

SEQ ID NO: 4193 - DNA, 20 bp, synthetic construct
  source 1..20: mol_type = other DNA
aaggaggacgccggtcaccc

SEQ ID NO: 4194 - DNA, 20 bp, synthetic construct
  source 1..20: mol_type = other DNA
taaggaggacgccggtcacc

SEQ ID NO: 4195 - DNA, 20 bp, synthetic construct
  source 1..20: mol_type = other DNA
ttaaggaggacgccggtcac

SEQ ID NO: 4196 - DNA, 20 bp, synthetic construct
  source 1..20: mol_type = other DNA
tttaaggaggacgccggtca

SEQ ID NO: 4197 - DNA, 20 bp, synthetic construct
  source 1..20: mol_type = other DNA
atttaaggaggacgccggtc

SEQ ID NO: 4198 - DNA, 20 bp, synthetic construct
  source 1..20: mol_type = other DNA
tatttaaggaggacgccggt

SEQ ID NO: 4199 - DNA, 20 bp, synthetic construct
  source 1..20: mol_type = other DNA
ctatttaaggaggacgccgg

SEQ ID NO: 4200 - DNA, 20 bp, synthetic construct
  source 1..20: mol_type = other DNA
cctatttaaggaggacgccg

SEQ ID NO: 4201 - DNA, 20 bp, synthetic construct
  source 1..20: mol_type = other DNA
gcctatttaaggaggacgcc

SEQ ID NO: 4202 - DNA, 20 bp, synthetic construct
  source 1..20: mol_type = other DNA
tgcctatttaaggaggacgc

SEQ ID NO: 4203 - DNA, 20 bp, synthetic construct
  source 1..20: mol_type = other DNA
atgcctatttaaggaggacg

SEQ ID NO: 4204 - DNA, 20 bp, synthetic construct
  source 1..20: mol_type = other DNA
gatgcctatttaaggaggac

SEQ ID NO: 4205 - DNA, 20 bp, synthetic construct
  source 1..20: mol_type = other DNA
agatgcctatttaaggagga

SEQ ID NO: 4206 - DNA, 20 bp, synthetic construct
  source 1..20: mol_type = other DNA
aagatgcctatttaaggagg

SEQ ID NO: 4207 - DNA, 20 bp, synthetic construct
  source 1..20: mol_type = other DNA
caagatgcctatttaaggag

SEQ ID NO: 4208 - DNA, 20 bp, synthetic construct
  source 1..20: mol_type = other DNA
ccaagatgcctatttaagga

SEQ ID NO: 4209 - DNA, 20 bp, synthetic construct
  source 1..20: mol_type = other DNA
cccaagatgcctatttaagg

SEQ ID NO: 4210 - DNA, 20 bp, synthetic construct
  source 1..20: mol_type = other DNA
gcccaagatgcctatttaag

SEQ ID NO: 4211 - DNA, 20 bp, synthetic construct
  source 1..20: mol_type = other DNA
agcccaagatgcctatttaa

SEQ ID NO: 4212 - DNA, 20 bp, synthetic construct
  source 1..20: mol_type = other DNA
aagcccaagatgcctattta

SEQ ID NO: 4213 - DNA, 20 bp, synthetic construct
  source 1..20: mol_type = other DNA
aaagcccaagatgcctattt

SEQ ID NO: 4214 - DNA, 20 bp, synthetic construct
  source 1..20: mol_type = other DNA
caaagcccaagatgcctatt

SEQ ID NO: 4215 - DNA, 20 bp, synthetic construct
  source 1..20: mol_type = other DNA
ccaaagcccaagatgcctat

SEQ ID NO: 4216 - DNA, 20 bp, synthetic construct
  source 1..20: mol_type = other DNA
tccaaagcccaagatgccta

SEQ ID NO: 4217 - DNA, 20 bp, synthetic construct
  source 1..20: mol_type = other DNA
ttccaaagcccaagatgcct

SEQ ID NO: 4218 - DNA, 20 bp, synthetic construct
  source 1..20: mol_type = other DNA
cttccaaagcccaagatgcc

SEQ ID NO: 4219 - DNA, 20 bp, synthetic construct
  source 1..20: mol_type = other DNA
ccttccaaagcccaagatgc

SEQ ID NO: 4220 - DNA, 20 bp, synthetic construct
  source 1..20: mol_type = other DNA
accttccaaagcccaagatg

SEQ ID NO: 4221 - DNA, 20 bp, synthetic construct
  source 1..20: mol_type = other DNA
caccttccaaagcccaagat

SEQ ID NO: 4222 - DNA, 20 bp, synthetic construct
  source 1..20: mol_type = other DNA
ccaccttccaaagcccaaga

SEQ ID NO: 4223 - DNA, 20 bp, synthetic construct
  source 1..20: mol_type = other DNA
tccaccttccaaagcccaag

SEQ ID NO: 4224 - DNA, 20 bp, synthetic construct
  source 1..20: mol_type = other DNA
ttccaccttccaaagcccaa

SEQ ID NO: 4225 - DNA, 20 bp, synthetic construct
  source 1..20: mol_type = other DNA
attccaccttccaaagccca

SEQ ID NO: 4226 - DNA, 20 bp, synthetic construct
  source 1..20: mol_type = other DNA
tattccaccttccaaagccc

SEQ ID NO: 4227 - DNA, 20 bp, synthetic construct
  source 1..20: mol_type = other DNA
ttattccaccttccaaagcc

SEQ ID NO: 4228 - DNA, 20 bp, synthetic construct
  source 1..20: mol_type = other DNA
cttattccaccttccaaagc

SEQ ID NO: 4229 - DNA, 20 bp, synthetic construct
  source 1..20: mol_type = other DNA
tcttattccaccttccaaag

SEQ ID NO: 4230 - DNA, 20 bp, synthetic construct
  source 1..20: mol_type = other DNA
ctcttattccaccttccaaa

SEQ ID NO: 4231 - DNA, 20 bp, synthetic construct
  source 1..20: mol_type = other DNA
cctcttattccaccttccaa

SEQ ID NO: 4232 - DNA, 20 bp, synthetic construct
  source 1..20: mol_type = other DNA
tcctcttattccaccttcca

SEQ ID NO: 4233 - DNA, 20 bp, synthetic construct
  source 1..20: mol_type = other DNA
atcctcttattccaccttcc

SEQ ID NO: 4234 - DNA, 20 bp, synthetic construct
  source 1..20: mol_type = other DNA
aatcctcttattccaccttc

SEQ ID NO: 4235 - DNA, 20 bp, synthetic construct
  source 1..20: mol_type = other DNA
aaatcctcttattccacctt

SEQ ID NO: 4236 - DNA, 20 bp, synthetic construct
  source 1..20: mol_type = other DNA
aaaatcctcttattccacct

SEQ ID NO: 4237 - DNA, 20 bp, synthetic construct
  source 1..20: mol_type = other DNA
aaaaatcctcttattccacc

SEQ ID NO: 4238 - DNA, 20 bp, synthetic construct
  source 1..20: mol_type = other DNA
gaaaaatcctcttattccac

SEQ ID NO: 4239 - DNA, 20 bp, synthetic construct
  source 1..20: mol_type = other DNA
tgaaaaatcctcttattcca

SEQ ID NO: 4240 - DNA, 20 bp, synthetic construct
  source 1..20: mol_type = other DNA
atgaaaaatcctcttattcc

SEQ ID NO: 4241 - DNA, 20 bp, synthetic construct
  source 1..20: mol_type = other DNA
aatgaaaaatcctcttattc

SEQ ID NO: 4242 - DNA, 20 bp, synthetic construct
  source 1..20: mol_type = other DNA
gaatgaaaaatcctcttatt

SEQ ID NO: 4243 - DNA, 20 bp, synthetic construct
  source 1..20: mol_type = other DNA
tgaatgaaaaatcctcttat

SEQ ID NO: 4244 - DNA, 20 bp, synthetic construct
  source 1..20: mol_type = other DNA
gtgaatgaaaaatcctctta

SEQ ID NO: 4245 - DNA, 20 bp, synthetic construct
  source 1..20: mol_type = other DNA
ggtgaatgaaaaatcctctt

SEQ ID NO: 4246 - DNA, 20 bp, synthetic construct
  source 1..20: mol_type = other DNA
gggtgaatgaaaaatcctct

SEQ ID NO: 4247 - DNA, 20 bp, synthetic construct
  source 1..20: mol_type = other DNA
cgggtgaatgaaaaatcctc

SEQ ID NO: 4248 - DNA, 20 bp, synthetic construct
  source 1..20: mol_type = other DNA
tcgggtgaatgaaaaatcct

SEQ ID NO: 4249 - DNA, 20 bp, synthetic construct
  source 1..20: mol_type = other DNA
ctcgggtgaatgaaaaatcc

SEQ ID NO: 4250 - DNA, 20 bp, synthetic construct
  source 1..20: mol_type = other DNA
actcgggtgaatgaaaaatc

SEQ ID NO: 4251 - DNA, 20 bp, synthetic construct
  source 1..20: mol_type = other DNA
aactcgggtgaatgaaaaat

SEQ ID NO: 4252 - DNA, 20 bp, synthetic construct
  source 1..20: mol_type = other DNA
aaactcgggtgaatgaaaaa

SEQ ID NO: 4253 - DNA, 20 bp, synthetic construct
  source 1..20: mol_type = other DNA
aaaactcgggtgaatgaaaa

SEQ ID NO: 4254 - DNA, 20 bp, synthetic construct
  source 1..20: mol_type = other DNA
gaaaactcgggtgaatgaaa

SEQ ID NO: 4255 - DNA, 20 bp, synthetic construct
  source 1..20: mol_type = other DNA
agaaaactcgggtgaatgaa

SEQ ID NO: 4256 - DNA, 20 bp, synthetic construct
  source 1..20: mol_type = other DNA
aagaaaactcgggtgaatga

SEQ ID NO: 4257 - DNA, 20 bp, synthetic construct
  source 1..20: mol_type = other DNA
aaagaaaactcgggtgaatg

SEQ ID NO: 4258 - DNA, 20 bp, synthetic construct
  source 1..20: mol_type = other DNA
aaaagaaaactcgggtgaat

SEQ ID NO: 4259 - DNA, 20 bp, synthetic construct
  source 1..20: mol_type = other DNA
aaaaagaaaactcgggtgaa

SEQ ID NO: 4260 - DNA, 20 bp, synthetic construct
  source 1..20: mol_type = other DNA
caaaaagaaaactcgggtga

SEQ ID NO: 4261 - DNA, 20 bp, synthetic construct
  source 1..20: mol_type = other DNA
tcaaaaagaaaactcgggtg

SEQ ID NO: 4262 - DNA, 20 bp, synthetic construct
  source 1..20: mol_type = other DNA
ttcaaaaagaaaactcgggt

SEQ ID NO: 4263 - DNA, 20 bp, synthetic construct
  source 1..20: mol_type = other DNA
tttcaaaaagaaaactcggg

SEQ ID NO: 4264 - DNA, 20 bp, synthetic construct
  source 1..20: mol_type = other DNA
ttttcaaaaagaaaactcgg

SEQ ID NO: 4265 - DNA, 20 bp, synthetic construct
  source 1..20: mol_type = other DNA
gttttcaaaaagaaaactcg

SEQ ID NO: 4266 - DNA, 20 bp, synthetic construct
  source 1..20: mol_type = other DNA
tgttttcaaaaagaaaactc

SEQ ID NO: 4267 - DNA, 20 bp, synthetic construct
  source 1..20: mol_type = other DNA
gtgttttcaaaaagaaaact

SEQ ID NO: 4268 - DNA, 20 bp, synthetic construct
  source 1..20: mol_type = other DNA
tgtgttttcaaaaagaaaac

SEQ ID NO: 4269 - DNA, 20 bp, synthetic construct
  source 1..20: mol_type = other DNA
atgtgttttcaaaaagaaaa

SEQ ID NO: 4270 - DNA, 20 bp, synthetic construct
  source 1..20: mol_type = other DNA
aatgtgttttcaaaaagaaa

SEQ ID NO: 4271 - DNA, 20 bp, synthetic construct
  source 1..20: mol_type = other DNA
aaatgtgttttcaaaaagaa

SEQ ID NO: 4272 - DNA, 20 bp, synthetic construct
  source 1..20: mol_type = other DNA
aaaatgtgttttcaaaaaga

SEQ ID NO: 4273 - DNA, 20 bp, synthetic construct
  source 1..20: mol_type = other DNA
gaaaatgtgttttcaaaaag

SEQ ID NO: 4274 - DNA, 20 bp, synthetic construct
  source 1..20: mol_type = other DNA
tgaaaatgtgttttcaaaaa

SEQ ID NO: 4275 - DNA, 20 bp, synthetic construct
  source 1..20: mol_type = other DNA
ctgaaaatgtgttttcaaaa

SEQ ID NO: 4276 - DNA, 20 bp, synthetic construct
  source 1..20: mol_type = other DNA
gctgaaaatgtgttttcaaa

SEQ ID NO: 4277 - DNA, 20 bp, synthetic construct
  source 1..20: mol_type = other DNA
tgctgaaaatgtgttttcaa

SEQ ID NO: 4278 - DNA, 20 bp, synthetic construct
  source 1..20: mol_type = other DNA
ttgctgaaaatgtgttttca

SEQ ID NO: 4279 - DNA, 20 bp, synthetic construct
  source 1..20: mol_type = other DNA
gttgctgaaaatgtgttttc

SEQ ID NO: 4280 - DNA, 20 bp, synthetic construct
  source 1..20: mol_type = other DNA
ggttgctgaaaatgtgtttt

SEQ ID NO: 4281 - DNA, 20 bp, synthetic construct
  source 1..20: mol_type = other DNA
gggttgctgaaaatgtgttt

SEQ ID NO: 4282 - DNA, 20 bp, synthetic construct
  source 1..20: mol_type = other DNA
tgggttgctgaaaatgtgtt

SEQ ID NO: 4283 - DNA, 20 bp, synthetic construct
  source 1..20: mol_type = other DNA
atgggttgctgaaaatgtgt

SEQ ID NO: 4284 - DNA, 20 bp, synthetic construct
  source 1..20: mol_type = other DNA
aatgggttgctgaaaatgtg

SEQ ID NO: 4285 - DNA, 20 bp, synthetic construct
  source 1..20: mol_type = other DNA
aaatgggttgctgaaaatgt

SEQ ID NO: 4286 - DNA, 20 bp, synthetic construct
  source 1..20: mol_type = other DNA
gaaatgggttgctgaaaatg

SEQ ID NO: 4287 - DNA, 20 bp, synthetic construct
  source 1..20: mol_type = other DNA
ggaaatgggttgctgaaaat

SEQ ID NO: 4288 - DNA, 20 bp, synthetic construct
  source 1..20: mol_type = other DNA
tggaaatgggttgctgaaaa

SEQ ID NO: 4289 - DNA, 20 bp, synthetic construct
  source 1..20: mol_type = other DNA
ttggaaatgggttgctgaaa

SEQ ID NO: 4290 - DNA, 20 bp, synthetic construct
  source 1..20: mol_type = other DNA
tttggaaatgggttgctgaa

SEQ ID NO: 4291 - DNA, 20 bp, synthetic construct
  source 1..20: mol_type = other DNA
ctttggaaatgggttgctga

SEQ ID NO: 4292 - DNA, 20 bp, synthetic construct
  source 1..20: mol_type = other DNA
tctttggaaatgggttgctg

SEQ ID NO: 4293 - DNA, 20 bp, synthetic construct
  source 1..20: mol_type = other DNA
ttctttggaaatgggttgct

SEQ ID NO: 4294 - DNA, 20 bp, synthetic construct
  source 1..20: mol_type = other DNA
attctttggaaatgggttgc

SEQ ID NO: 4295 - DNA, 20 bp, synthetic construct
  source 1..20: mol_type = other DNA
aattctttggaaatgggttg

SEQ ID NO: 4296 - DNA, 20 bp, synthetic construct
  source 1..20: mol_type = other DNA
aaattctttggaaatgggtt

SEQ ID NO: 4297 - DNA, 20 bp, synthetic construct
  source 1..20: mol_type = other DNA
aaaattctttggaaatgggt

SEQ ID NO: 4298 - DNA, 20 bp, synthetic construct
  source 1..20: mol_type = other DNA
aaaaattctttggaaatggg

SEQ ID NO: 4299 - DNA, 20 bp, synthetic construct
  source 1..20: mol_type = other DNA
taaaaattctttggaaatgg

SEQ ID NO: 4300 - DNA, 20 bp, synthetic construct
  source 1..20: mol_type = other DNA
ataaaaattctttggaaatg

SEQ ID NO: 4301 - DNA, 20 bp, synthetic construct
  source 1..20: mol_type = other DNA
aataaaaattctttggaaat

SEQ ID NO: 4302 - DNA, 20 bp, synthetic construct
  source 1..20: mol_type = other DNA
aaataaaaattctttggaaa

SEQ ID NO: 4303 - DNA, 20 bp, synthetic construct
  source 1..20: mol_type = other DNA
taaataaaaattctttggaa

SEQ ID NO: 4304 - DNA, 20 bp, synthetic construct
  source 1..20: mol_type = other DNA
gtaaataaaaattctttgga

SEQ ID NO: 4305 - DNA, 20 bp, synthetic construct
  source 1..20: mol_type = other DNA
tgtaaataaaaattctttgg

SEQ ID NO: 4306 - DNA, 20 bp, synthetic construct
  source 1..20: mol_type = other DNA
ctgtaaataaaaattctttg

SEQ ID NO: 4307 - DNA, 20 bp, synthetic construct
  source 1..20: mol_type = other DNA
gctgtaaataaaaattcttt

SEQ ID NO: 4308 - DNA, 20 bp, synthetic construct
  source 1..20: mol_type = other DNA
tgctgtaaataaaaattctt

SEQ ID NO: 4309 - DNA, 20 bp, synthetic construct
  source 1..20: mol_type = other DNA
ctgctgtaaataaaaattct

SEQ ID NO: 4310 - DNA, 20 bp, synthetic construct
  source 1..20: mol_type = other DNA
tctgctgtaaataaaaattc

SEQ ID NO: 4311 - DNA, 20 bp, synthetic construct
  source 1..20: mol_type = other DNA
ttctgctgtaaataaaaatt

SEQ ID NO: 4312 - DNA, 20 bp, synthetic construct
  source 1..20: mol_type = other DNA
tttctgctgtaaataaaaat

SEQ ID NO: 4313 - DNA, 20 bp, synthetic construct
  source 1..20: mol_type = other DNA
atttctgctgtaaataaaaa

SEQ ID NO: 4314 - DNA, 20 bp, synthetic construct
  source 1..20: mol_type = other DNA
aatttctgctgtaaataaaa

SEQ ID NO: 4315 - DNA, 20 bp, synthetic construct
  source 1..20: mol_type = other DNA
gaatttctgctgtaaataaa

SEQ ID NO: 4316 - DNA, 20 bp, synthetic construct
  source 1..20: mol_type = other DNA
ggaatttctgctgtaaataa

SEQ ID NO: 4317 - DNA, 20 bp, synthetic construct
  source 1..20: mol_type = other DNA
gggaatttctgctgtaaata

SEQ ID NO: 4318 - DNA, 20 bp, synthetic construct
  source 1..20: mol_type = other DNA
ggggaatttctgctgtaaat

SEQ ID NO: 4319 - DNA, 20 bp, synthetic construct
  source 1..20: mol_type = other DNA
tggggaatttctgctgtaaa

SEQ ID NO: 4320 - DNA, 20 bp, synthetic construct
  source 1..20: mol_type = other DNA
atggggaatttctgctgtaa

SEQ ID NO: 4321 - DNA, 20 bp, synthetic construct
  source 1..20: mol_type = other DNA
gatggggaatttctgctgta

SEQ ID NO: 4322 - DNA, 20 bp, synthetic construct
  source 1..20: mol_type = other DNA
tgatggggaatttctgctgt

SEQ ID NO: 4323 - DNA, 20 bp, synthetic construct
  source 1..20: mol_type = other DNA
ttgatggggaatttctgctg

SEQ ID NO: 4324 - DNA, 20 bp, synthetic construct
  source 1..20: mol_type = other DNA
cttgatggggaatttctgct

SEQ ID NO: 4325 - DNA, 20 bp, synthetic construct
  source 1..20: mol_type = other DNA
tcttgatggggaatttctgc

SEQ ID NO: 4326 - DNA, 20 bp, synthetic construct
  source 1..20: mol_type = other DNA
ctcttgatggggaatttctg

SEQ ID NO: 4327 - DNA, 20 bp, synthetic construct
  source 1..20: mol_type = other DNA
cctcttgatggggaatttct

SEQ ID NO: 4328 - DNA, 20 bp, synthetic construct
  source 1..20: mol_type = other DNA
tcctcttgatggggaatttc

SEQ ID NO: 4329 - DNA, 20 bp, synthetic construct
  source 1..20: mol_type = other DNA
ttcctcttgatggggaattt

SEQ ID NO: 4330 - DNA, 20 bp, synthetic construct
  source 1..20: mol_type = other DNA
attcctcttgatggggaatt

SEQ ID NO: 4331 - DNA, 20 bp, synthetic construct
  source 1..20: mol_type = other DNA
gattcctcttgatggggaat

SEQ ID NO: 4332 - DNA, 20 bp, synthetic construct
  source 1..20: mol_type = other DNA
tgattcctcttgatggggaa

SEQ ID NO: 4333 - DNA, 20 bp, synthetic construct
  source 1..20: mol_type = other DNA
ctgattcctcttgatgggga

SEQ ID NO: 4334 - DNA, 20 bp, synthetic construct
  source 1..20: mol_type = other DNA
gctgattcctcttgatgggg

SEQ ID NO: 4335 - DNA, 20 bp, synthetic construct
  source 1..20: mol_type = other DNA
agctgattcctcttgatggg

SEQ ID NO: 4336 - DNA, 20 bp, synthetic construct
  source 1..20: mol_type = other DNA
cagctgattcctcttgatgg

SEQ ID NO: 4337 - DNA, 20 bp, synthetic construct
  source 1..20: mol_type = other DNA
ccagctgattcctcttgatg

SEQ ID NO: 4338 - DNA, 20 bp, synthetic construct
  source 1..20: mol_type = other DNA
accagctgattcctcttgat

SEQ ID NO: 4339 - DNA, 20 bp, synthetic construct
  source 1..20: mol_type = other DNA
aaccagctgattcctcttga

SEQ ID NO: 4340 - DNA, 20 bp, synthetic construct
  source 1..20: mol_type = other DNA
aaaccagctgattcctcttg

SEQ ID NO: 4341 - DNA, 20 bp, synthetic construct
  source 1..20: mol_type = other DNA
aaaaccagctgattcctctt

SEQ ID NO: 4342 - DNA, 20 bp, synthetic construct
  source 1..20: mol_type = other DNA
aaaaaccagctgattcctct

SEQ ID NO: 4343 - DNA, 20 bp, synthetic construct
  source 1..20: mol_type = other DNA
taaaaaccagctgattcctc

SEQ ID NO: 4344 - DNA, 20 bp, synthetic construct
  source 1..20: mol_type = other DNA
ttaaaaaccagctgattcct

SEQ ID NO: 4345 - DNA, 20 bp, synthetic construct
  source 1..20: mol_type = other DNA
cttaaaaaccagctgattcc

SEQ ID NO: 4346 - DNA, 20 bp, synthetic construct
  source 1..20: mol_type = other DNA
ccttaaaaaccagctgattc

SEQ ID NO: 4347 - DNA, 20 bp, synthetic construct
  source 1..20: mol_type = other DNA
tccttaaaaaccagctgatt

SEQ ID NO: 4348 - DNA, 20 bp, synthetic construct
  source 1..20: mol_type = other DNA
ttccttaaaaaccagctgat

SEQ ID NO: 4349 - DNA, 20 bp, synthetic construct
  source 1..20: mol_type = other DNA
attccttaaaaaccagctga

SEQ ID NO: 4350 - DNA, 20 bp, synthetic construct
  source 1..20: mol_type = other DNA
aattccttaaaaaccagctg

SEQ ID NO: 4351 - DNA, 20 bp, synthetic construct
  source 1..20: mol_type = other DNA
gaattccttaaaaaccagct

SEQ ID NO: 4352 - DNA, 20 bp, synthetic construct
  source 1..20: mol_type = other DNA
agaattccttaaaaaccagc

SEQ ID NO: 4353 - DNA, 20 bp, synthetic construct
  source 1..20: mol_type = other DNA
cagaattccttaaaaaccag

SEQ ID NO: 4354 - DNA, 20 bp, synthetic construct
  source 1..20: mol_type = other DNA
gcagaattccttaaaaacca

SEQ ID NO: 4355 - DNA, 20 bp, synthetic construct
  source 1..20: mol_type = other DNA
agcagaattccttaaaaacc

SEQ ID NO: 4356 - DNA, 20 bp, synthetic construct
  source 1..20: mol_type = other DNA
cagcagaattccttaaaaac

SEQ ID NO: 4357 - DNA, 20 bp, synthetic construct
  source 1..20: mol_type = other DNA
gcagcagaattccttaaaaa

SEQ ID NO: 4358 - DNA, 20 bp, synthetic construct
  source 1..20: mol_type = other DNA
ggcagcagaattccttaaaa

SEQ ID NO: 4359 - DNA, 20 bp, synthetic construct
  source 1..20: mol_type = other DNA
aggcagcagaattccttaaa

SEQ ID NO: 4360 - DNA, 20 bp, synthetic construct
  source 1..20: mol_type = other DNA
aaggcagcagaattccttaa

SEQ ID NO: 4361 - DNA, 20 bp, synthetic construct
  source 1..20: mol_type = other DNA
gaaggcagcagaattcctta

SEQ ID NO: 4362 - DNA, 20 bp, synthetic construct
  source 1..20: mol_type = other DNA
tgaaggcagcagaattcctt

SEQ ID NO: 4363 - DNA, 20 bp, synthetic construct
  source 1..20: mol_type = other DNA
ttgaaggcagcagaattcct

SEQ ID NO: 4364 - DNA, 20 bp, synthetic construct
  source 1..20: mol_type = other DNA
tttgaaggcagcagaattcc

SEQ ID NO: 4365 - DNA, 20 bp, synthetic construct
  source 1..20: mol_type = other DNA
ctttgaaggcagcagaattc

SEQ ID NO: 4366 - DNA, 20 bp, synthetic construct
  source 1..20: mol_type = other DNA
cctttgaaggcagcagaatt

SEQ ID NO: 4367 - DNA, 20 bp, synthetic construct
  source 1..20: mol_type = other DNA
ccctttgaaggcagcagaat

SEQ ID NO: 4368 - DNA, 20 bp, synthetic construct
  source 1..20: mol_type = other DNA
cccctttgaaggcagcagaa

SEQ ID NO: 4369 - DNA, 20 bp, synthetic construct
  source 1..20: mol_type = other DNA
ccccctttgaaggcagcaga

SEQ ID NO: 4370 - DNA, 20 bp, synthetic construct
  source 1..20: mol_type = other DNA
gccccctttgaaggcagcag

SEQ ID NO: 4371 - DNA, 20 bp, synthetic construct
  source 1..20: mol_type = other DNA
cgccccctttgaaggcagca

SEQ ID NO: 4372 - DNA, 20 bp, synthetic construct
  source 1..20: mol_type = other DNA
ccgccccctttgaaggcagc

SEQ ID NO: 4373 - DNA, 20 bp, synthetic construct
  source 1..20: mol_type = other DNA
tccgccccctttgaaggcag

SEQ ID NO: 4374 - DNA, 20 bp, synthetic construct
  source 1..20: mol_type = other DNA
ttccgccccctttgaaggca

SEQ ID NO: 4375 - DNA, 20 bp, synthetic construct
  source 1..20: mol_type = other DNA
tttccgccccctttgaaggc

SEQ ID NO: 4376 - DNA, 20 bp, synthetic construct
  source 1..20: mol_type = other DNA
gtttccgccccctttgaagg

SEQ ID NO: 4377 - DNA, 20 bp, synthetic construct
  source 1..20: mol_type = other DNA
tgtttccgccccctttgaag

SEQ ID NO: 4378 - DNA, 20 bp, synthetic construct
  source 1..20: mol_type = other DNA
ctgtttccgccccctttgaa

SEQ ID NO: 4379 - DNA, 20 bp, synthetic construct
  source 1..20: mol_type = other DNA
actgtttccgccccctttga

SEQ ID NO: 4380 - DNA, 20 bp, synthetic construct
  source 1..20: mol_type = other DNA
gactgtttccgccccctttg

SEQ ID NO: 4381 - DNA, 20 bp, synthetic construct
  source 1..20: mol_type = other DNA
cgactgtttccgcccccttt

SEQ ID NO: 4382 - DNA, 20 bp, synthetic construct
  source 1..20: mol_type = other DNA
ccgactgtttccgccccctt

SEQ ID NO: 4383 - DNA, 20 bp, synthetic construct
  source 1..20: mol_type = other DNA
accgactgtttccgccccct

SEQ ID NO: 4384 - DNA, 20 bp, synthetic construct
  source 1..20: mol_type = other DNA
aaccgactgtttccgccccc

SEQ ID NO: 4385 - DNA, 20 bp, synthetic construct
  source 1..20: mol_type = other DNA
taaccgactgtttccgcccc

SEQ ID NO: 4386 - DNA, 20 bp, synthetic construct
  source 1..20: mol_type = other DNA
ataaccgactgtttccgccc

SEQ ID NO: 4387 - DNA, 20 bp, synthetic construct
  source 1..20: mol_type = other DNA
aataaccgactgtttccgcc

SEQ ID NO: 4388 - DNA, 20 bp, synthetic construct
  source 1..20: mol_type = other DNA
aaataaccgactgtttccgc

SEQ ID NO: 4389 - DNA, 20 bp, synthetic construct
  source 1..20: mol_type = other DNA
caaataaccgactgtttccg

SEQ ID NO: 4390 - DNA, 20 bp, synthetic construct
  source 1..20: mol_type = other DNA
tcaaataaccgactgtttcc

SEQ ID NO: 4391 - DNA, 20 bp, synthetic construct
  source 1..20: mol_type = other DNA
gtcaaataaccgactgtttc

SEQ ID NO: 4392 - DNA, 20 bp, synthetic construct
  source 1..20: mol_type = other DNA
agtcaaataaccgactgttt

SEQ ID NO: 4393 - DNA, 20 bp, synthetic construct
  source 1..20: mol_type = other DNA
aagtcaaataaccgactgtt

SEQ ID NO: 4394 - DNA, 20 bp, synthetic construct
  source 1..20: mol_type = other DNA
aaagtcaaataaccgactgt

SEQ ID NO: 4395 - DNA, 20 bp, synthetic construct
  source 1..20: mol_type = other DNA
taaagtcaaataaccgactg

SEQ ID NO: 4396 - DNA, 20 bp, synthetic construct
  source 1..20: mol_type = other DNA
gtaaagtcaaataaccgact

SEQ ID NO: 4397 - DNA, 20 bp, synthetic construct
  source 1..20: mol_type = other DNA
tgtaaagtcaaataaccgac

SEQ ID NO: 4398 - DNA, 20 bp, synthetic construct
  source 1..20: mol_type = other DNA
gtgtaaagtcaaataaccga

SEQ ID NO: 4399 - DNA, 20 bp, synthetic construct
  source 1..20: mol_type = other DNA
cgtgtaaagtcaaataaccg

SEQ ID NO: 4400 - DNA, 20 bp, synthetic construct
  source 1..20: mol_type = other DNA
gcgtgtaaagtcaaataacc

SEQ ID NO: 4401 - DNA, 20 bp, synthetic construct
  source 1..20: mol_type = other DNA
ggcgtgtaaagtcaaataac

SEQ ID NO: 4402 - DNA, 20 bp, synthetic construct
  source 1..20: mol_type = other DNA
gggcgtgtaaagtcaaataa

SEQ ID NO: 4403 - DNA, 20 bp, synthetic construct
  source 1..20: mol_type = other DNA
ggggcgtgtaaagtcaaata

SEQ ID NO: 4404 - DNA, 20 bp, synthetic construct
  source 1..20: mol_type = other DNA
cggggcgtgtaaagtcaaat

SEQ ID NO: 4405 - DNA, 20 bp, synthetic construct
  source 1..20: mol_type = other DNA
gcggggcgtgtaaagtcaaa

SEQ ID NO: 4406 - DNA, 20 bp, synthetic construct
  source 1..20: mol_type = other DNA
ggcggggcgtgtaaagtcaa

SEQ ID NO: 4407 - DNA, 20 bp, synthetic construct
  source 1..20: mol_type = other DNA
gggcggggcgtgtaaagtca

SEQ ID NO: 4408 - DNA, 20 bp, synthetic construct
  source 1..20: mol_type = other DNA
ggggcggggcgtgtaaagtc

SEQ ID NO: 4409 - DNA, 20 bp, synthetic construct
  source 1..20: mol_type = other DNA
gggggcggggcgtgtaaagt

SEQ ID NO: 4410 - DNA, 20 bp, synthetic construct
  source 1..20: mol_type = other DNA
ggggggcggggcgtgtaaag

SEQ ID NO: 4411 - DNA, 20 bp, synthetic construct
  source 1..20: mol_type = other DNA
gggggggcggggcgtgtaaa

SEQ ID NO: 4412 - DNA, 20 bp, synthetic construct
  source 1..20: mol_type = other DNA
agggggggcggggcgtgtaa

SEQ ID NO: 4413 - DNA, 20 bp, synthetic construct
  source 1..20: mol_type = other DNA
aagggggggcggggcgtgta

SEQ ID NO: 4414 - DNA, 20 bp, synthetic construct
  source 1..20: mol_type = other DNA
gaagggggggcggggcgtgt

SEQ ID NO: 4415 - DNA, 20 bp, synthetic construct
  source 1..20: mol_type = other DNA
ggaagggggggcggggcgtg

SEQ ID NO: 4416 - DNA, 20 bp, synthetic construct
  source 1..20: mol_type = other DNA
gggaagggggggcggggcgt

SEQ ID NO: 4417 - DNA, 20 bp, synthetic construct
  source 1..20: mol_type = other DNA
ggggaagggggggcggggcg

SEQ ID NO: 4418 - DNA, 20 bp, synthetic construct
  source 1..20: mol_type = other DNA
aggggaagggggggcggggc

SEQ ID NO: 4419 - DNA, 20 bp, synthetic construct
  source 1..20: mol_type = other DNA
aaggggaagggggggcgggg

SEQ ID NO: 4420 - DNA, 20 bp, synthetic construct
  source 1..20: mol_type = other DNA
gaaggggaagggggggcggg

SEQ ID NO: 4421 - DNA, 20 bp, synthetic construct
  source 1..20: mol_type = other DNA
agaaggggaagggggggcgg

SEQ ID NO: 4422 - DNA, 20 bp, synthetic construct
  source 1..20: mol_type = other DNA
gagaaggggaagggggggcg

SEQ ID NO: 4423 - DNA, 20 bp, synthetic construct
  source 1..20: mol_type = other DNA
agagaaggggaagggggggc

SEQ ID NO: 4424 - DNA, 20 bp, synthetic construct
  source 1..20: mol_type = other DNA
cagagaaggggaaggggggg

SEQ ID NO: 4425 - DNA, 20 bp, synthetic construct
  source 1..20: mol_type = other DNA
tcagagaaggggaagggggg

SEQ ID NO: 4426 - DNA, 20 bp, synthetic construct
  source 1..20: mol_type = other DNA
ctcagagaaggggaaggggg

SEQ ID NO: 4427 - DNA, 20 bp, synthetic construct
  source 1..20: mol_type = other DNA
actcagagaaggggaagggg

SEQ ID NO: 4428 - DNA, 20 bp, synthetic construct
  source 1..20: mol_type = other DNA
gactcagagaaggggaaggg

SEQ ID NO: 4429 - DNA, 20 bp, synthetic construct
  source 1..20: mol_type = other DNA
agactcagagaaggggaagg

SEQ ID NO: 4430 - DNA, 20 bp, synthetic construct
  source 1..20: mol_type = other DNA
cagactcagagaaggggaag

SEQ ID NO: 4431 - DNA, 20 bp, synthetic construct
  source 1..20: mol_type = other DNA
tcagactcagagaaggggaa

SEQ ID NO: 4432 - DNA, 20 bp, synthetic construct
  source 1..20: mol_type = other DNA
ttcagactcagagaagggga

SEQ ID NO: 4433 - DNA, 20 bp, synthetic construct
  source 1..20: mol_type = other DNA
cttcagactcagagaagggg

SEQ ID NO: 4434 - DNA, 20 bp, synthetic construct
  source 1..20: mol_type = other DNA
gcttcagactcagagaaggg

SEQ ID NO: 4435 - DNA, 20 bp, synthetic construct
  source 1..20: mol_type = other DNA
tgcttcagactcagagaagg

SEQ ID NO: 4436 - DNA, 20 bp, synthetic construct
  source 1..20: mol_type = other DNA
atgcttcagactcagagaag

SEQ ID NO: 4437 - DNA, 20 bp, synthetic construct
  source 1..20: mol_type = other DNA
gatgcttcagactcagagaa

SEQ ID NO: 4438 - DNA, 20 bp, synthetic construct
  source 1..20: mol_type = other DNA
ggatgcttcagactcagaga

SEQ ID NO: 4439 - DNA, 20 bp, synthetic construct
  source 1..20: mol_type = other DNA
gggatgcttcagactcagag

SEQ ID NO: 4440 - DNA, 20 bp, synthetic construct
  source 1..20: mol_type = other DNA
tgggatgcttcagactcaga

SEQ ID NO: 4441 - DNA, 20 bp, synthetic construct
  source 1..20: mol_type = other DNA
ttgggatgcttcagactcag

SEQ ID NO: 4442 - DNA, 20 bp, synthetic construct
  source 1..20: mol_type = other DNA
tttgggatgcttcagactca

SEQ ID NO: 4443 - DNA, 20 bp, synthetic construct
  source 1..20: mol_type = other DNA
gtttgggatgcttcagactc

SEQ ID NO: 4444 - DNA, 20 bp, synthetic construct
  source 1..20: mol_type = other DNA
tgtttgggatgcttcagact

SEQ ID NO: 4445 - DNA, 20 bp, synthetic construct
  source 1..20: mol_type = other DNA
gtgtttgggatgcttcagac

SEQ ID NO: 4446 - DNA, 20 bp, synthetic construct
  source 1..20: mol_type = other DNA
agtgtttgggatgcttcaga

SEQ ID NO: 4447 - DNA, 20 bp, synthetic construct
  source 1..20: mol_type = other DNA
tagtgtttgggatgcttcag

SEQ ID NO: 4448 - DNA, 20 bp, synthetic construct
  source 1..20: mol_type = other DNA
gtagtgtttgggatgcttca

SEQ ID NO: 4449 - DNA, 20 bp, synthetic construct
  source 1..20: mol_type = other DNA
agtagtgtttgggatgcttc

SEQ ID NO: 4450 - DNA, 20 bp, synthetic construct
  source 1..20: mol_type = other DNA
aagtagtgtttgggatgctt

SEQ ID NO: 4451 - DNA, 20 bp, synthetic construct
  source 1..20: mol_type = other DNA
taagtagtgtttgggatgct

SEQ ID NO: 4452 - DNA, 20 bp, synthetic construct
  source 1..20: mol_type = other DNA
ctaagtagtgtttgggatgc

SEQ ID NO: 4453 - DNA, 20 bp, synthetic construct
  source 1..20: mol_type = other DNA
gctaagtagtgtttgggatg

SEQ ID NO: 4454 - DNA, 20 bp, synthetic construct
  source 1..20: mol_type = other DNA
ggctaagtagtgtttgggat

SEQ ID NO: 4455 - DNA, 20 bp, synthetic construct
  source 1..20: mol_type = other DNA
tggctaagtagtgtttggga

SEQ ID NO: 4456 - DNA, 20 bp, synthetic construct
  source 1..20: mol_type = other DNA
ttggctaagtagtgtttggg

SEQ ID NO: 4457 - DNA, 20 bp, synthetic construct
  source 1..20: mol_type = other DNA
tttggctaagtagtgtttgg

SEQ ID NO: 4458 - DNA, 20 bp, synthetic construct
  source 1..20: mol_type = other DNA
gtttggctaagtagtgtttg

SEQ ID NO: 4459 - DNA, 20 bp, synthetic construct
  source 1..20: mol_type = other DNA
agtttggctaagtagtgttt

SEQ ID NO: 4460 - DNA, 20 bp, synthetic construct
  source 1..20: mol_type = other DNA
tagtttggctaagtagtgtt

SEQ ID NO: 4461 - DNA, 20 bp, synthetic construct
  source 1..20: mol_type = other DNA
ctagtttggctaagtagtgt

SEQ ID NO: 4462 - DNA, 20 bp, synthetic construct
  source 1..20: mol_type = other DNA
actagtttggctaagtagtg

SEQ ID NO: 4463 - DNA, 20 bp, synthetic construct
  source 1..20: mol_type = other DNA
aactagtttggctaagtagt

SEQ ID NO: 4464 - DNA, 20 bp, synthetic construct
  source 1..20: mol_type = other DNA
gaactagtttggctaagtag

SEQ ID NO: 4465 - DNA, 20 bp, synthetic construct
  source 1..20: mol_type = other DNA
tgaactagtttggctaagta

SEQ ID NO: 4466 - DNA, 20 bp, synthetic construct
  source 1..20: mol_type = other DNA
ctgaactagtttggctaagt

SEQ ID NO: 4467 - DNA, 20 bp, synthetic construct
  source 1..20: mol_type = other DNA
tctgaactagtttggctaag

SEQ ID NO: 4468 - DNA, 20 bp, synthetic construct
  source 1..20: mol_type = other DNA
atctgaactagtttggctaa

SEQ ID NO: 4469 - DNA, 20 bp, synthetic construct
  source 1..20: mol_type = other DNA
catctgaactagtttggcta

SEQ ID NO: 4470 - DNA, 20 bp, synthetic construct
  source 1..20: mol_type = other DNA
tcatctgaactagtttggct

SEQ ID NO: 4471 - DNA, 20 bp, synthetic construct
  source 1..20: mol_type = other DNA
ttcatctgaactagtttggc

SEQ ID NO: 4472 - DNA, 20 bp, synthetic construct
  source 1..20: mol_type = other DNA
cttcatctgaactagtttgg

SEQ ID NO: 4473 - DNA, 20 bp, synthetic construct
  source 1..20: mol_type = other DNA
acttcatctgaactagtttg

SEQ ID NO: 4474 - DNA, 20 bp, synthetic construct
  source 1..20: mol_type = other DNA
cacttcatctgaactagttt

SEQ ID NO: 4475 - DNA, 20 bp, synthetic construct
  source 1..20: mol_type = other DNA
tcacttcatctgaactagtt

SEQ ID NO: 4476 - DNA, 20 bp, synthetic construct
  source 1..20: mol_type = other DNA
atcacttcatctgaactagt

SEQ ID NO: 4477 - DNA, 20 bp, synthetic construct
  source 1..20: mol_type = other DNA
gatcacttcatctgaactag

SEQ ID NO: 4478 - DNA, 20 bp, synthetic construct
  source 1..20: mol_type = other DNA
cgatcacttcatctgaacta

SEQ ID NO: 4479 - DNA, 20 bp, synthetic construct
  source 1..20: mol_type = other DNA
acgatcacttcatctgaact

SEQ ID NO: 4480 - DNA, 20 bp, synthetic construct
  source 1..20: mol_type = other DNA
aacgatcacttcatctgaac

SEQ ID NO: 4481 - DNA, 20 bp, synthetic construct
  source 1..20: mol_type = other DNA
aaacgatcacttcatctgaa

SEQ ID NO: 4482 - DNA, 20 bp, synthetic construct
  source 1..20: mol_type = other DNA
gaaacgatcacttcatctga

SEQ ID NO: 4483 - DNA, 20 bp, synthetic construct
  source 1..20: mol_type = other DNA
ggaaacgatcacttcatctg

SEQ ID NO: 4484 - DNA, 20 bp, synthetic construct
  source 1..20: mol_type = other DNA
gggaaacgatcacttcatct

SEQ ID NO: 4485 - DNA, 20 bp, synthetic construct
  source 1..20: mol_type = other DNA
ggggaaacgatcacttcatc

SEQ ID NO: 4486 - DNA, 20 bp, synthetic construct
  source 1..20: mol_type = other DNA
tggggaaacgatcacttcat

SEQ ID NO: 4487 - DNA, 20 bp, synthetic construct
  source 1..20: mol_type = other DNA
ttggggaaacgatcacttca

SEQ ID NO: 4488 - DNA, 20 bp, synthetic construct
  source 1..20: mol_type = other DNA
cttggggaaacgatcacttc

SEQ ID NO: 4489 - DNA, 20 bp, synthetic construct
  source 1..20: mol_type = other DNA
acttggggaaacgatcactt

SEQ ID NO: 4490 - DNA, 20 bp, synthetic construct
  source 1..20: mol_type = other DNA
tacttggggaaacgatcact

SEQ ID NO: 4491 - DNA, 20 bp, synthetic construct
  source 1..20: mol_type = other DNA
ctacttggggaaacgatcac

SEQ ID NO: 4492 - DNA, 20 bp, synthetic construct
  source 1..20: mol_type = other DNA
cctacttggggaaacgatca

SEQ ID NO: 4493 - DNA, 20 bp, synthetic construct
  source 1..20: mol_type = other DNA
ccctacttggggaaacgatc

SEQ ID NO: 4494 - DNA, 20 bp, synthetic construct
  source 1..20: mol_type = other DNA
accctacttggggaaacgat

SEQ ID NO: 4495 - DNA, 20 bp, synthetic construct
  source 1..20: mol_type = other DNA
taccctacttggggaaacga

SEQ ID NO: 4496 - DNA, 20 bp, synthetic construct
  source 1..20: mol_type = other DNA
ttaccctacttggggaaacg

SEQ ID NO: 4497 - DNA, 20 bp, synthetic construct
  source 1..20: mol_type = other DNA
gttaccctacttggggaaac

SEQ ID NO: 4498 - DNA, 20 bp, synthetic construct
  source 1..20: mol_type = other DNA
agttaccctacttggggaaa

SEQ ID NO: 4499 - DNA, 20 bp, synthetic construct
  source 1..20: mol_type = other DNA
aagttaccctacttggggaa

SEQ ID NO: 4500 - DNA, 20 bp, synthetic construct
  source 1..20: mol_type = other DNA
gaagttaccctacttgggga

SEQ ID NO: 4501 - DNA, 20 bp, synthetic construct
  source 1..20: mol_type = other DNA
tgaagttaccctacttgggg

SEQ ID NO: 4502 - DNA, 20 bp, synthetic construct
  source 1..20: mol_type = other DNA
ctgaagttaccctacttggg

SEQ ID NO: 4503 - DNA, 20 bp, synthetic construct
  source 1..20: mol_type = other DNA
actgaagttaccctacttgg

SEQ ID NO: 4504 - DNA, 20 bp, synthetic construct
  source 1..20: mol_type = other DNA
aactgaagttaccctacttg

SEQ ID NO: 4505 - DNA, 20 bp, synthetic construct
  source 1..20: mol_type = other DNA
aaactgaagttaccctactt

SEQ ID NO: 4506 - DNA, 20 bp, synthetic construct
  source 1..20: mol_type = other DNA
gaaactgaagttaccctact

SEQ ID NO: 4507 - DNA, 20 bp, synthetic construct
  source 1..20: mol_type = other DNA
ggaaactgaagttaccctac

SEQ ID NO: 4508 - DNA, 20 bp, synthetic construct
  source 1..20: mol_type = other DNA
gggaaactgaagttacccta

SEQ ID NO: 4509 - DNA, 20 bp, synthetic construct
  source 1..20: mol_type = other DNA
agggaaactgaagttaccct

SEQ ID NO: 4510 - DNA, 20 bp, synthetic construct
  source 1..20: mol_type = other DNA
aagggaaactgaagttaccc

SEQ ID NO: 4511 - DNA, 20 bp, synthetic construct
  source 1..20: mol_type = other DNA
aaagggaaactgaagttacc

SEQ ID NO: 4512 - DNA, 20 bp, synthetic construct
  source 1..20: mol_type = other DNA
aaaagggaaactgaagttac

SEQ ID NO: 4513 - DNA, 20 bp, synthetic construct
  source 1..20: mol_type = other DNA
aaaaagggaaactgaagtta

SEQ ID NO: 4514 - DNA, 20 bp, synthetic construct
  source 1..20: mol_type = other DNA
gaaaaagggaaactgaagtt

SEQ ID NO: 4515 - DNA, 20 bp, synthetic construct
  source 1..20: mol_type = other DNA
cgaaaaagggaaactgaagt

SEQ ID NO: 4516 - DNA, 20 bp, synthetic construct
  source 1..20: mol_type = other DNA
acgaaaaagggaaactgaag

SEQ ID NO: 4517 - DNA, 20 bp, synthetic construct
  source 1..20: mol_type = other DNA
aacgaaaaagggaaactgaa

SEQ ID NO: 4518 - DNA, 20 bp, synthetic construct
  source 1..20: mol_type = other DNA
caacgaaaaagggaaactga

SEQ ID NO: 4519 - DNA, 20 bp, synthetic construct
  source 1..20: mol_type = other DNA
ccaacgaaaaagggaaactg

SEQ ID NO: 4520 - DNA, 20 bp, synthetic construct
  source 1..20: mol_type = other DNA
gccaacgaaaaagggaaact

SEQ ID NO: 4521 - DNA, 20 bp, synthetic construct
  source 1..20: mol_type = other DNA
tgccaacgaaaaagggaaac

SEQ ID NO: 4522 - DNA, 20 bp, synthetic construct
  source 1..20: mol_type = other DNA
atgccaacgaaaaagggaaa

SEQ ID NO: 4523 - DNA, 20 bp, synthetic construct
  source 1..20: mol_type = other DNA
gatgccaacgaaaaagggaa

SEQ ID NO: 4524 - DNA, 20 bp, synthetic construct
  source 1..20: mol_type = other DNA
agatgccaacgaaaaaggga

SEQ ID NO: 4525 - DNA, 20 bp, synthetic construct
  source 1..20: mol_type = other DNA
tagatgccaacgaaaaaggg

SEQ ID NO: 4526 - DNA, 20 bp, synthetic construct
  source 1..20: mol_type = other DNA
ctagatgccaacgaaaaagg

SEQ ID NO: 4527 - DNA, 20 bp, synthetic construct
  source 1..20: mol_type = other DNA
gctagatgccaacgaaaaag

SEQ ID NO: 4528 - DNA, 20 bp, synthetic construct
  source 1..20: mol_type = other DNA
cgctagatgccaacgaaaaa

SEQ ID NO: 4529 - DNA, 20 bp, synthetic construct
  source 1..20: mol_type = other DNA
tcgctagatgccaacgaaaa

SEQ ID NO: 4530 - DNA, 20 bp, synthetic construct
  source 1..20: mol_type = other DNA
ttcgctagatgccaacgaaa

SEQ ID NO: 4531 - DNA, 20 bp, synthetic construct
  source 1..20: mol_type = other DNA
tttcgctagatgccaacgaa

SEQ ID NO: 4532 - DNA, 20 bp, synthetic construct
  source 1..20: mol_type = other DNA
ttttcgctagatgccaacga

SEQ ID NO: 4533 - DNA, 20 bp, synthetic construct
  source 1..20: mol_type = other DNA
tttttcgctagatgccaacg

SEQ ID NO: 4534 - DNA, 20 bp, synthetic construct
  source 1..20: mol_type = other DNA
atttttcgctagatgccaac

SEQ ID NO: 4535 - DNA, 20 bp, synthetic construct
  source 1..20: mol_type = other DNA
catttttcgctagatgccaa

SEQ ID NO: 4536 - DNA, 20 bp, synthetic construct
  source 1..20: mol_type = other DNA
tcatttttcgctagatgcca

SEQ ID NO: 4537 - DNA, 20 bp, synthetic construct
  source 1..20: mol_type = other DNA
ttcatttttcgctagatgcc

SEQ ID NO: 4538 - DNA, 20 bp, synthetic construct
  source 1..20: mol_type = other DNA
tttcatttttcgctagatgc

SEQ ID NO: 4539 - DNA, 20 bp, synthetic construct
  source 1..20: mol_type = other DNA
ttttcatttttcgctagatg

SEQ ID NO: 4540 - DNA, 20 bp, synthetic construct
  source 1..20: mol_type = other DNA
tttttcatttttcgctagat

SEQ ID NO: 4541 - DNA, 20 bp, synthetic construct
  source 1..20: mol_type = other DNA
ttttttcatttttcgctaga

SEQ ID NO: 4542 - DNA, 20 bp, synthetic construct
  source 1..20: mol_type = other DNA
attttttcatttttcgctag

SEQ ID NO: 4543 - DNA, 20 bp, synthetic construct
  source 1..20: mol_type = other DNA
aattttttcatttttcgcta

SEQ ID NO: 4544 - DNA, 20 bp, synthetic construct
  source 1..20: mol_type = other DNA
aaattttttcatttttcgct

SEQ ID NO: 4545 - DNA, 20 bp, synthetic construct
  source 1..20: mol_type = other DNA
taaattttttcatttttcgc

SEQ ID NO: 4546 - DNA, 20 bp, synthetic construct
  source 1..20: mol_type = other DNA
ttaaattttttcatttttcg

SEQ ID NO: 4547 - DNA, 20 bp, synthetic construct
  source 1..20: mol_type = other DNA
tttaaattttttcatttttc

SEQ ID NO: 4548 - DNA, 20 bp, synthetic construct
  source 1..20: mol_type = other DNA
ttttaaattttttcattttt

SEQ ID NO: 4549 - DNA, 20 bp, synthetic construct
  source 1..20: mol_type = other DNA
attttaaattttttcatttt

SEQ ID NO: 4550 - DNA, 20 bp, synthetic construct
  source 1..20: mol_type = other DNA
tattttaaattttttcattt

SEQ ID NO: 4551 - DNA, 20 bp, synthetic construct
  source 1..20: mol_type = other DNA
gtattttaaattttttcatt

SEQ ID NO: 4552 - DNA, 20 bp, synthetic construct
  source 1..20: mol_type = other DNA
tgtattttaaattttttcat

SEQ ID NO: 4553 - DNA, 20 bp, synthetic construct
  source 1..20: mol_type = other DNA
ttgtattttaaattttttca

SEQ ID NO: 4554 - DNA, 20 bp, synthetic construct
  source 1..20: mol_type = other DNA
gttgtattttaaattttttc

SEQ ID NO: 4555 - DNA, 20 bp, synthetic construct
  source 1..20: mol_type = other DNA
agttgtattttaaatttttt

SEQ ID NO: 4556 - DNA, 20 bp, synthetic construct
  source 1..20: mol_type = other DNA
aagttgtattttaaattttt

SEQ ID NO: 4557 - DNA, 20 bp, synthetic construct
  source 1..20: mol_type = other DNA
aaagttgtattttaaatttt

SEQ ID NO: 4558 - DNA, 20 bp, synthetic construct
  source 1..20: mol_type = other DNA
aaaagttgtattttaaattt

SEQ ID NO: 4559 - DNA, 20 bp, synthetic construct
  source 1..20: mol_type = other DNA
taaaagttgtattttaaatt

SEQ ID NO: 4560 - DNA, 20 bp, synthetic construct
  source 1..20: mol_type = other DNA
ataaaagttgtattttaaat

SEQ ID NO: 4561 - DNA, 20 bp, synthetic construct
  source 1..20: mol_type = other DNA
tataaaagttgtattttaaa

SEQ ID NO: 4562 - DNA, 20 bp, synthetic construct
  source 1..20: mol_type = other DNA
ctataaaagttgtattttaa

SEQ ID NO: 4563 - DNA, 20 bp, synthetic construct
  source 1..20: mol_type = other DNA
tctataaaagttgtatttta

SEQ ID NO: 4564 - DNA, 20 bp, synthetic construct
  source 1..20: mol_type = other DNA
ttctataaaagttgtatttt

SEQ ID NO: 4565 - DNA, 20 bp, synthetic construct
  source 1..20: mol_type = other DNA
tttctataaaagttgtattt

SEQ ID NO: 4566 - DNA, 20 bp, synthetic construct
  source 1..20: mol_type = other DNA
ttttctataaaagttgtatt

SEQ ID NO: 4567 - DNA, 20 bp, synthetic construct
  source 1..20: mol_type = other DNA
cttttctataaaagttgtat

SEQ ID NO: 4568 - DNA, 20 bp, synthetic construct
  source 1..20: mol_type = other DNA
ccttttctataaaagttgta

SEQ ID NO: 4569 - DNA, 20 bp, synthetic construct
  source 1..20: mol_type = other DNA
tccttttctataaaagttgt

SEQ ID NO: 4570 - DNA, 20 bp, synthetic construct
  source 1..20: mol_type = other DNA
atccttttctataaaagttg

SEQ ID NO: 4571 - DNA, 20 bp, synthetic construct
  source 1..20: mol_type = other DNA
catccttttctataaaagtt

SEQ ID NO: 4572 - DNA, 20 bp, synthetic construct
  source 1..20: mol_type = other DNA
acatccttttctataaaagt

SEQ ID NO: 4573 - DNA, 20 bp, synthetic construct
  source 1..20: mol_type = other DNA
tacatccttttctataaaag

SEQ ID NO: 4574 - DNA, 20 bp, synthetic construct
  source 1..20: mol_type = other DNA
atacatccttttctataaaa

SEQ ID NO: 4575 - DNA, 20 bp, synthetic construct
  source 1..20: mol_type = other DNA
aatacatccttttctataaa

SEQ ID NO: 4576 - DNA, 20 bp, synthetic construct
  source 1..20: mol_type = other DNA
gaatacatccttttctataa

SEQ ID NO: 4577 - DNA, 20 bp, synthetic construct
  source 1..20: mol_type = other DNA
agaatacatccttttctata

SEQ ID NO: 4578 - DNA, 20 bp, synthetic construct
  source 1..20: mol_type = other DNA
cagaatacatccttttctat

SEQ ID NO: 4579 - DNA, 20 bp, synthetic construct
  source 1..20: mol_type = other DNA
acagaatacatccttttcta

SEQ ID NO: 4580 - DNA, 20 bp, synthetic construct
  source 1..20: mol_type = other DNA
aacagaatacatccttttct

SEQ ID NO: 4581 - DNA, 20 bp, synthetic construct
  source 1..20: mol_type = other DNA
aaacagaatacatccttttc

SEQ ID NO: 4582 - DNA, 20 bp, synthetic construct
  source 1..20: mol_type = other DNA
aaaacagaatacatcctttt

SEQ ID NO: 4583 - DNA, 20 bp, synthetic construct
  source 1..20: mol_type = other DNA
aaaaacagaatacatccttt

SEQ ID NO: 4584 - DNA, 20 bp, synthetic construct
  source 1..20: mol_type = other DNA
taaaaacagaatacatcctt

SEQ ID NO: 4585 - DNA, 20 bp, synthetic construct
  source 1..20: mol_type = other DNA
gtaaaaacagaatacatcct

SEQ ID NO: 4586 - DNA, 20 bp, synthetic construct
  source 1..20: mol_type = other DNA
agtaaaaacagaatacatcc

SEQ ID NO: 4587 - DNA, 20 bp, synthetic construct
  source 1..20: mol_type = other DNA
aagtaaaaacagaatacatc

SEQ ID NO: 4588 - DNA, 20 bp, synthetic construct
  source 1..20: mol_type = other DNA
aaagtaaaaacagaatacat

SEQ ID NO: 4589 - DNA, 20 bp, synthetic construct
  source 1..20: mol_type = other DNA
gaaagtaaaaacagaataca

SEQ ID NO: 4590 - DNA, 20 bp, synthetic construct
  source 1..20: mol_type = other DNA
agaaagtaaaaacagaatac

SEQ ID NO: 4591 - DNA, 20 bp, synthetic construct
  source 1..20: mol_type = other DNA
aagaaagtaaaaacagaata

SEQ ID NO: 4592 - DNA, 20 bp, synthetic construct
  source 1..20: mol_type = other DNA
taagaaagtaaaaacagaat

SEQ ID NO: 4593 - DNA, 20 bp, synthetic construct
  source 1..20: mol_type = other DNA
ctaagaaagtaaaaacagaa

SEQ ID NO: 4594 - DNA, 20 bp, synthetic construct
  source 1..20: mol_type = other DNA
cctaagaaagtaaaaacaga

SEQ ID NO: 4595 - DNA, 20 bp, synthetic construct
  source 1..20: mol_type = other DNA
acctaagaaagtaaaaacag

SEQ ID NO: 4596 - DNA, 20 bp, synthetic construct
  source 1..20: mol_type = other DNA
tacctaagaaagtaaaaaca

SEQ ID NO: 4597 - DNA, 20 bp, synthetic construct
  source 1..20: mol_type = other DNA
atacctaagaaagtaaaaac

SEQ ID NO: 4598 - DNA, 20 bp, synthetic construct
  source 1..20: mol_type = other DNA
aatacctaagaaagtaaaaa

SEQ ID NO: 4599 - DNA, 20 bp, synthetic construct
  source 1..20: mol_type = other DNA
taatacctaagaaagtaaaa

SEQ ID NO: 4600 - DNA, 20 bp, synthetic construct
  source 1..20: mol_type = other DNA
ctaatacctaagaaagtaaa

SEQ ID NO: 4601 - DNA, 20 bp, synthetic construct
  source 1..20: mol_type = other DNA
cctaatacctaagaaagtaa

SEQ ID NO: 4602 - DNA, 20 bp, synthetic construct
  source 1..20: mol_type = other DNA
tcctaatacctaagaaagta

SEQ ID NO: 4603 - DNA, 20 bp, synthetic construct
  source 1..20: mol_type = other DNA
ttcctaatacctaagaaagt

SEQ ID NO: 4604 - DNA, 20 bp, synthetic construct
  source 1..20: mol_type = other DNA
cttcctaatacctaagaaag

SEQ ID NO: 4605 - DNA, 20 bp, synthetic construct
  source 1..20: mol_type = other DNA
tcttcctaatacctaagaaa

SEQ ID NO: 4606 - DNA, 20 bp, synthetic construct
  source 1..20: mol_type = other DNA
ctcttcctaatacctaagaa

SEQ ID NO: 4607 - DNA, 20 bp, synthetic construct
  source 1..20: mol_type = other DNA
tctcttcctaatacctaaga

SEQ ID NO: 4608 - DNA, 20 bp, synthetic construct
  source 1..20: mol_type = other DNA
atctcttcctaatacctaag

SEQ ID NO: 4609 - DNA, 20 bp, synthetic construct
  source 1..20: mol_type = other DNA
aatctcttcctaatacctaa

SEQ ID NO: 4610 - DNA, 20 bp, synthetic construct
  source 1..20: mol_type = other DNA
aaatctcttcctaataccta

SEQ ID NO: 4611 - DNA, 20 bp, synthetic construct
  source 1..20: mol_type = other DNA
caaatctcttcctaatacct

SEQ ID NO: 4612 - DNA, 20 bp, synthetic construct
  source 1..20: mol_type = other DNA
ccaaatctcttcctaatacc

SEQ ID NO: 4613 - DNA, 20 bp, synthetic construct
  source 1..20: mol_type = other DNA
gccaaatctcttcctaatac

SEQ ID NO: 4614 - DNA, 20 bp, synthetic construct
  source 1..20: mol_type = other DNA
tgccaaatctcttcctaata

SEQ ID NO: 4615 - DNA, 20 bp, synthetic construct
  source 1..20: mol_type = other DNA
ctgccaaatctcttcctaat

SEQ ID NO: 4616 - DNA, 20 bp, synthetic construct
  source 1..20: mol_type = other DNA
tctgccaaatctcttcctaa

SEQ ID NO: 4617 - DNA, 20 bp, synthetic construct
  source 1..20: mol_type = other DNA
atctgccaaatctcttccta

SEQ ID NO: 4618 - DNA, 20 bp, synthetic construct
  source 1..20: mol_type = other DNA
tatctgccaaatctcttcct

SEQ ID NO: 4619 - DNA, 20 bp, synthetic construct
  source 1..20: mol_type = other DNA
ttatctgccaaatctcttcc

SEQ ID NO: 4620 - DNA, 20 bp, synthetic construct
  source 1..20: mol_type = other DNA
attatctgccaaatctcttc

SEQ ID NO: 4621 - DNA, 20 bp, synthetic construct
  source 1..20: mol_type = other DNA
aattatctgccaaatctctt

SEQ ID NO: 4622 - DNA, 20 bp, synthetic construct
  source 1..20: mol_type = other DNA
gaattatctgccaaatctct

SEQ ID NO: 4623 - DNA, 20 bp, synthetic construct
  source 1..20: mol_type = other DNA
tgaattatctgccaaatctc

SEQ ID NO: 4624 - DNA, 20 bp, synthetic construct
  source 1..20: mol_type = other DNA
ttgaattatctgccaaatct

SEQ ID NO: 4625 - DNA, 20 bp, synthetic construct
  source 1..20: mol_type = other DNA
gttgaattatctgccaaatc

SEQ ID NO: 4626 - DNA, 20 bp, synthetic construct
  source 1..20: mol_type = other DNA
tgttgaattatctgccaaat

SEQ ID NO: 4627 - DNA, 20 bp, synthetic construct
  source 1..20: mol_type = other DNA
atgttgaattatctgccaaa

SEQ ID NO: 4628 - DNA, 20 bp, synthetic construct
  source 1..20: mol_type = other DNA
catgttgaattatctgccaa

SEQ ID NO: 4629 - DNA, 20 bp, synthetic construct
  source 1..20: mol_type = other DNA
acatgttgaattatctgcca

SEQ ID NO: 4630 - DNA, 20 bp, synthetic construct
  source 1..20: mol_type = other DNA
aacatgttgaattatctgcc

SEQ ID NO: 4631 - DNA, 20 bp, synthetic construct
  source 1..20: mol_type = other DNA
gaacatgttgaattatctgc

SEQ ID NO: 4632 - DNA, 20 bp, synthetic construct
  source 1..20: mol_type = other DNA
tgaacatgttgaattatctg

SEQ ID NO: 4633 - DNA, 20 bp, synthetic construct
  source 1..20: mol_type = other DNA
ttgaacatgttgaattatct

SEQ ID NO: 4634 - DNA, 20 bp, synthetic construct
  source 1..20: mol_type = other DNA
tttgaacatgttgaattatc

SEQ ID NO: 4635 - DNA, 20 bp, synthetic construct
  source 1..20: mol_type = other DNA
atttgaacatgttgaattat

SEQ ID NO: 4636 - DNA, 20 bp, synthetic construct
  source 1..20: mol_type = other DNA
tatttgaacatgttgaatta

SEQ ID NO: 4637 - DNA, 20 bp, synthetic construct
  source 1..20: mol_type = other DNA
atatttgaacatgttgaatt

SEQ ID NO: 4638 - DNA, 20 bp, synthetic construct
  source 1..20: mol_type = other DNA
tatatttgaacatgttgaat

SEQ ID NO: 4639 - DNA, 20 bp, synthetic construct
  source 1..20: mol_type = other DNA
atatatttgaacatgttgaa

SEQ ID NO: 4640 - DNA, 20 bp, synthetic construct
  source 1..20: mol_type = other DNA
tatatatttgaacatgttga

SEQ ID NO: 4641 - DNA, 20 bp, synthetic construct
  source 1..20: mol_type = other DNA
ttatatatttgaacatgttg

SEQ ID NO: 4642 - DNA, 20 bp, synthetic construct
  source 1..20: mol_type = other DNA
tttatatatttgaacatgtt

SEQ ID NO: 4643 - DNA, 20 bp, synthetic construct
  source 1..20: mol_type = other DNA
gtttatatatttgaacatgt

SEQ ID NO: 4644 - DNA, 20 bp, synthetic construct
  source 1..20: mol_type = other DNA
tgtttatatatttgaacatg

SEQ ID NO: 4645 - DNA, 20 bp, synthetic construct
  source 1..20: mol_type = other DNA
atgtttatatatttgaacat

SEQ ID NO: 4646 - DNA, 20 bp, synthetic construct
  source 1..20: mol_type = other DNA
aatgtttatatatttgaaca

SEQ ID NO: 4647 - DNA, 20 bp, synthetic construct
  source 1..20: mol_type = other DNA
taatgtttatatatttgaac

SEQ ID NO: 4648 - DNA, 20 bp, synthetic construct
  source 1..20: mol_type = other DNA
ttaatgtttatatatttgaa

SEQ ID NO: 4649 - DNA, 20 bp, synthetic construct
  source 1..20: mol_type = other DNA
tttaatgtttatatatttga

SEQ ID NO: 4650 - DNA, 20 bp, synthetic construct
  source 1..20: mol_type = other DNA
ttttaatgtttatatatttg

SEQ ID NO: 4651 - DNA, 20 bp, synthetic construct
  source 1..20: mol_type = other DNA
gttttaatgtttatatattt

SEQ ID NO: 4652 - DNA, 20 bp, synthetic construct
  source 1..20: mol_type = other DNA
agttttaatgtttatatatt

SEQ ID NO: 4653 - DNA, 20 bp, synthetic construct
  source 1..20: mol_type = other DNA
tagttttaatgtttatatat

SEQ ID NO: 4654 - DNA, 20 bp, synthetic construct
  source 1..20: mol_type = other DNA
ttagttttaatgtttatata

SEQ ID NO: 4655 - DNA, 20 bp, synthetic construct
  source 1..20: mol_type = other DNA
cttagttttaatgtttatat

SEQ ID NO: 4656 - DNA, 20 bp, synthetic construct
  source 1..20: mol_type = other DNA
ccttagttttaatgtttata

SEQ ID NO: 4657 - DNA, 20 bp, synthetic construct
  source 1..20: mol_type = other DNA
accttagttttaatgtttat

SEQ ID NO: 4658 - DNA, 20 bp, synthetic construct
  source 1..20: mol_type = other DNA
aaccttagttttaatgttta

SEQ ID NO: 4659 - DNA, 20 bp, synthetic construct
  source 1..20: mol_type = other DNA
taaccttagttttaatgttt

SEQ ID NO: 4660 - DNA, 20 bp, synthetic construct
  source 1..20: mol_type = other DNA
ataaccttagttttaatgtt

SEQ ID NO: 4661 - DNA, 20 bp, synthetic construct
  source 1..20: mol_type = other DNA
aataaccttagttttaatgt

SEQ ID NO: 4662 - DNA, 20 bp, synthetic construct
  source 1..20: mol_type = other DNA
taataaccttagttttaatg

SEQ ID NO: 4663 - DNA, 20 bp, synthetic construct
  source 1..20: mol_type = other DNA
ttaataaccttagttttaat

SEQ ID NO: 4664 - DNA, 20 bp, synthetic construct
  source 1..20: mol_type = other DNA
cttaataaccttagttttaa

SEQ ID NO: 4665 - DNA, 20 bp, synthetic construct
  source 1..20: mol_type = other DNA
acttaataaccttagtttta

SEQ ID NO: 4666 - DNA, 20 bp, synthetic construct
  source 1..20: mol_type = other DNA
aacttaataaccttagtttt

SEQ ID NO: 4667 - DNA, 20 bp, synthetic construct
  source 1..20: mol_type = other DNA
caacttaataaccttagttt

SEQ ID NO: 4668 - DNA, 20 bp, synthetic construct
  source 1..20: mol_type = other DNA
gcaacttaataaccttagtt

SEQ ID NO: 4669 - DNA, 20 bp, synthetic construct
  source 1..20: mol_type = other DNA
tgcaacttaataaccttagt

SEQ ID NO: 4670 - DNA, 20 bp, synthetic construct
  source 1..20: mol_type = other DNA
atgcaacttaataaccttag

SEQ ID NO: 4671 - DNA, 20 bp, synthetic construct
  source 1..20: mol_type = other DNA
aatgcaacttaataacctta

SEQ ID NO: 4672 - DNA, 20 bp, synthetic construct
  source 1..20: mol_type = other DNA
caatgcaacttaataacctt

SEQ ID NO: 4673 - DNA, 20 bp, synthetic construct
  source 1..20: mol_type = other DNA
tcaatgcaacttaataacct

SEQ ID NO: 4674 - DNA, 20 bp, synthetic construct
  source 1..20: mol_type = other DNA
gtcaatgcaacttaataacc

SEQ ID NO: 4675 - DNA, 20 bp, synthetic construct
  source 1..20: mol_type = other DNA
agtcaatgcaacttaataac

SEQ ID NO: 4676 - DNA, 20 bp, synthetic construct
  source 1..20: mol_type = other DNA
tagtcaatgcaacttaataa

SEQ ID NO: 4677 - DNA, 20 bp, synthetic construct
  source 1..20: mol_type = other DNA
gtagtcaatgcaacttaata

SEQ ID NO: 4678 - DNA, 20 bp, synthetic construct
  source 1..20: mol_type = other DNA
agtagtcaatgcaacttaat

SEQ ID NO: 4679 - DNA, 20 bp, synthetic construct
  source 1..20: mol_type = other DNA
tagtagtcaatgcaacttaa

SEQ ID NO: 4680 - DNA, 20 bp, synthetic construct
  source 1..20: mol_type = other DNA
ctagtagtcaatgcaactta

SEQ ID NO: 4681 - DNA, 20 bp, synthetic construct
  source 1..20: mol_type = other DNA
cctagtagtcaatgcaactt

SEQ ID NO: 4682 - DNA, 20 bp, synthetic construct
  source 1..20: mol_type = other DNA
gcctagtagtcaatgcaact

SEQ ID NO: 4683 - DNA, 20 bp, synthetic construct
  source 1..20: mol_type = other DNA
agcctagtagtcaatgcaac

SEQ ID NO: 4684 - DNA, 20 bp, synthetic construct
  source 1..20: mol_type = other DNA
aagcctagtagtcaatgcaa

SEQ ID NO: 4685 - DNA, 20 bp, synthetic construct
  source 1..20: mol_type = other DNA
taagcctagtagtcaatgca

SEQ ID NO: 4686 - DNA, 20 bp, synthetic construct
  source 1..20: mol_type = other DNA
ttaagcctagtagtcaatgc

SEQ ID NO: 4687 - DNA, 20 bp, synthetic construct
  source 1..20: mol_type = other DNA
tttaagcctagtagtcaatg

SEQ ID NO: 4688 - DNA, 20 bp, synthetic construct
  source 1..20: mol_type = other DNA
ttttaagcctagtagtcaat

SEQ ID NO: 4689 - DNA, 20 bp, synthetic construct
  source 1..20: mol_type = other DNA
tttttaagcctagtagtcaa

SEQ ID NO: 4690 - DNA, 20 bp, synthetic construct
  source 1..20: mol_type = other DNA
atttttaagcctagtagtca

SEQ ID NO: 4691 - DNA, 20 bp, synthetic construct
  source 1..20: mol_type = other DNA
aatttttaagcctagtagtc

SEQ ID NO: 4692 - DNA, 20 bp, synthetic construct
  source 1..20: mol_type = other DNA
taatttttaagcctagtagt

SEQ ID NO: 4693 - DNA, 20 bp, synthetic construct
  source 1..20: mol_type = other DNA
ctaatttttaagcctagtag

SEQ ID NO: 4694 - DNA, 20 bp, synthetic construct
  source 1..20: mol_type = other DNA
tctaatttttaagcctagta

SEQ ID NO: 4695 - DNA, 20 bp, synthetic construct
  source 1..20: mol_type = other DNA
atctaatttttaagcctagt

SEQ ID NO: 4696 - DNA, 20 bp, synthetic construct
  source 1..20: mol_type = other DNA
aatctaatttttaagcctag

SEQ ID NO: 4697 - DNA, 20 bp, synthetic construct
  source 1..20: mol_type = other DNA
taatctaatttttaagccta

SEQ ID NO: 4698 - DNA, 20 bp, synthetic construct
  source 1..20: mol_type = other DNA
ataatctaatttttaagcct

SEQ ID NO: 4699 - DNA, 20 bp, synthetic construct
  source 1..20: mol_type = other DNA
tataatctaatttttaagcc

SEQ ID NO: 4700 - DNA, 20 bp, synthetic construct
  source 1..20: mol_type = other DNA
ttataatctaatttttaagc

SEQ ID NO: 4701 - DNA, 20 bp, synthetic construct
  source 1..20: mol_type = other DNA
cttataatctaatttttaag

SEQ ID NO: 4702 - DNA, 20 bp, synthetic construct
  source 1..20: mol_type = other DNA
tcttataatctaatttttaa

SEQ ID NO: 4703 - DNA, 20 bp, synthetic construct
  source 1..20: mol_type = other DNA
ctcttataatctaattttta

SEQ ID NO: 4704 - DNA, 20 bp, synthetic construct
  source 1..20: mol_type = other DNA
tctcttataatctaattttt

SEQ ID NO: 4705 - DNA, 20 bp, synthetic construct
  source 1..20: mol_type = other DNA
ttctcttataatctaatttt

SEQ ID NO: 4706 - DNA, 20 bp, synthetic construct
  source 1..20: mol_type = other DNA
attctcttataatctaattt

SEQ ID NO: 4707 - DNA, 20 bp, synthetic construct
  source 1..20: mol_type = other DNA
aattctcttataatctaatt

SEQ ID NO: 4708 - DNA, 20 bp, synthetic construct
  source 1..20: mol_type = other DNA
aaattctcttataatctaat

SEQ ID NO: 4709 - DNA, 20 bp, synthetic construct
  source 1..20: mol_type = other DNA
caaattctcttataatctaa

SEQ ID NO: 4710 - DNA, 20 bp, synthetic construct
  source 1..20: mol_type = other DNA
gcaaattctcttataatcta

SEQ ID NO: 4711 - DNA, 20 bp, synthetic construct
  source 1..20: mol_type = other DNA
agcaaattctcttataatct

SEQ ID NO: 4712 - DNA, 20 bp, synthetic construct
  source 1..20: mol_type = other DNA
gagcaaattctcttataatc

SEQ ID NO: 4713 - DNA, 20 bp, synthetic construct
  source 1..20: mol_type = other DNA
ggagcaaattctcttataat

SEQ ID NO: 4714 - DNA, 20 bp, synthetic construct
  source 1..20: mol_type = other DNA
aggagcaaattctcttataa

SEQ ID NO: 4715 - DNA, 20 bp, synthetic construct
  source 1..20: mol_type = other DNA
caggagcaaattctcttata

SEQ ID NO: 4716 - DNA, 20 bp, synthetic construct
  source 1..20: mol_type = other DNA
tcaggagcaaattctcttat

SEQ ID NO: 4717 - DNA, 20 bp, synthetic construct
  source 1..20: mol_type = other DNA
ctcaggagcaaattctctta

SEQ ID NO: 4718 - DNA, 20 bp, synthetic construct
  source 1..20: mol_type = other DNA
actcaggagcaaattctctt

SEQ ID NO: 4719 - DNA, 20 bp, synthetic construct
  source 1..20: mol_type = other DNA
tactcaggagcaaattctct

SEQ ID NO: 4720 - DNA, 20 bp, synthetic construct
  source 1..20: mol_type = other DNA
ctactcaggagcaaattctc

SEQ ID NO: 4721 - DNA, 20 bp, synthetic construct
  source 1..20: mol_type = other DNA
actactcaggagcaaattct

SEQ ID NO: 4722 - DNA, 20 bp, synthetic construct
  source 1..20: mol_type = other DNA
aactactcaggagcaaattc

SEQ ID NO: 4723 - DNA, 20 bp, synthetic construct
  source 1..20: mol_type = other DNA
aaactactcaggagcaaatt

SEQ ID NO: 4724 - DNA, 20 bp, synthetic construct
  source 1..20: mol_type = other DNA
caaactactcaggagcaaat

SEQ ID NO: 4725 - DNA, 20 bp, synthetic construct
  source 1..20: mol_type = other DNA
tcaaactactcaggagcaaa

SEQ ID NO: 4726 - DNA, 20 bp, synthetic construct
  source 1..20: mol_type = other DNA
ctcaaactactcaggagcaa

SEQ ID NO: 4727 - DNA, 20 bp, synthetic construct
  source 1..20: mol_type = other DNA
actcaaactactcaggagca

SEQ ID NO: 4728 - DNA, 20 bp, synthetic construct
  source 1..20: mol_type = other DNA
cactcaaactactcaggagc

SEQ ID NO: 4729 - DNA, 20 bp, synthetic construct
  source 1..20: mol_type = other DNA
tcactcaaactactcaggag

SEQ ID NO: 4730 - DNA, 20 bp, synthetic construct
  source 1..20: mol_type = other DNA
atcactcaaactactcagga

SEQ ID NO: 4731 - DNA, 20 bp, synthetic construct
  source 1..20: mol_type = other DNA
gatcactcaaactactcagg

SEQ ID NO: 4732 - DNA, 20 bp, synthetic construct
  source 1..20: mol_type = other DNA
tgatcactcaaactactcag

SEQ ID NO: 4733 - DNA, 20 bp, synthetic construct
  source 1..20: mol_type = other DNA
ttgatcactcaaactactca

SEQ ID NO: 4734 - DNA, 20 bp, synthetic construct
  source 1..20: mol_type = other DNA
tttgatcactcaaactactc

SEQ ID NO: 4735 - DNA, 20 bp, synthetic construct
  source 1..20: mol_type = other DNA
ctttgatcactcaaactact

SEQ ID NO: 4736 - DNA, 20 bp, synthetic construct
  source 1..20: mol_type = other DNA
tctttgatcactcaaactac

SEQ ID NO: 4737 - DNA, 20 bp, synthetic construct
  source 1..20: mol_type = other DNA
atctttgatcactcaaacta

SEQ ID NO: 4738 - DNA, 20 bp, synthetic construct
  source 1..20: mol_type = other DNA
tatctttgatcactcaaact

SEQ ID NO: 4739 - DNA, 20 bp, synthetic construct
  source 1..20: mol_type = other DNA
atatctttgatcactcaaac

SEQ ID NO: 4740 - DNA, 20 bp, synthetic construct
  source 1..20: mol_type = other DNA
aatatctttgatcactcaaa

SEQ ID NO: 4741 - DNA, 20 bp, synthetic construct
  source 1..20: mol_type = other DNA
aaatatctttgatcactcaa

SEQ ID NO: 4742 - DNA, 20 bp, synthetic construct
  source 1..20: mol_type = other DNA
caaatatctttgatcactca

SEQ ID NO: 4743 - DNA, 20 bp, synthetic construct
  source 1..20: mol_type = other DNA
ccaaatatctttgatcactc

SEQ ID NO: 4744 - DNA, 20 bp, synthetic construct
  source 1..20: mol_type = other DNA
tccaaatatctttgatcact

SEQ ID NO: 4745 - DNA, 20 bp, synthetic construct
  source 1..20: mol_type = other DNA
ttccaaatatctttgatcac

SEQ ID NO: 4746 - DNA, 20 bp, synthetic construct
  source 1..20: mol_type = other DNA
attccaaatatctttgatca

SEQ ID NO: 4747 - DNA, 20 bp, synthetic construct
  source 1..20: mol_type = other DNA
cattccaaatatctttgatc

SEQ ID NO: 4748 - DNA, 20 bp, synthetic construct
  source 1..20: mol_type = other DNA
acattccaaatatctttgat

SEQ ID NO: 4749 - DNA, 20 bp, synthetic construct
  source 1..20: mol_type = other DNA
aacattccaaatatctttga

SEQ ID NO: 4750 - DNA, 20 bp, synthetic construct
  source 1..20: mol_type = other DNA
aaacattccaaatatctttg

SEQ ID NO: 4751 - DNA, 20 bp, synthetic construct
  source 1..20: mol_type = other DNA
aaaacattccaaatatcttt

SEQ ID NO: 4752 - DNA, 20 bp, synthetic construct
  source 1..20: mol_type = other DNA
taaaacattccaaatatctt

SEQ ID NO: 4753 - DNA, 20 bp, synthetic construct
  source 1..20: mol_type = other DNA
ctaaaacattccaaatatct

SEQ ID NO: 4754 - DNA, 20 bp, synthetic construct
  source 1..20: mol_type = other DNA
actaaaacattccaaatatc

SEQ ID NO: 4755 - DNA, 20 bp, synthetic construct
  source 1..20: mol_type = other DNA
tactaaaacattccaaatat

SEQ ID NO: 4756 - DNA, 20 bp, synthetic construct
  source 1..20: mol_type = other DNA
gtactaaaacattccaaata

SEQ ID NO: 4757 - DNA, 20 bp, synthetic construct
  source 1..20: mol_type = other DNA
ggtactaaaacattccaaat

SEQ ID NO: 4758 - DNA, 20 bp, synthetic construct
  source 1..20: mol_type = other DNA
tggtactaaaacattccaaa

SEQ ID NO: 4759 - DNA, 20 bp, synthetic construct
  source 1..20: mol_type = other DNA
gtggtactaaaacattccaa

SEQ ID NO: 4760 - DNA, 20 bp, synthetic construct
  source 1..20: mol_type = other DNA
tgtggtactaaaacattcca

SEQ ID NO: 4761 - DNA, 20 bp, synthetic construct
  source 1..20: mol_type = other DNA
ttgtggtactaaaacattcc

SEQ ID NO: 4762 - DNA, 20 bp, synthetic construct
  source 1..20: mol_type = other DNA
cttgtggtactaaaacattc

SEQ ID NO: 4763 - DNA, 20 bp, synthetic construct
  source 1..20: mol_type = other DNA
ccttgtggtactaaaacatt

SEQ ID NO: 4764 - DNA, 20 bp, synthetic construct
  source 1..20: mol_type = other DNA
accttgtggtactaaaacat

SEQ ID NO: 4765 - DNA, 20 bp, synthetic construct
  source 1..20: mol_type = other DNA
gaccttgtggtactaaaaca

SEQ ID NO: 4766 - DNA, 20 bp, synthetic construct
  source 1..20: mol_type = other DNA
agaccttgtggtactaaaac

SEQ ID NO: 4767 - DNA, 20 bp, synthetic construct
  source 1..20: mol_type = other DNA
aagaccttgtggtactaaaa

SEQ ID NO: 4768 - DNA, 20 bp, synthetic construct
  source 1..20: mol_type = other DNA
aaagaccttgtggtactaaa

SEQ ID NO: 4769 - DNA, 20 bp, synthetic construct
  source 1..20: mol_type = other DNA
aaaagaccttgtggtactaa

SEQ ID NO: 4770 - DNA, 20 bp, synthetic construct
  source 1..20: mol_type = other DNA
aaaaagaccttgtggtacta

SEQ ID NO: 4771 - DNA, 20 bp, synthetic construct
  source 1..20: mol_type = other DNA
aaaaaagaccttgtggtact

SEQ ID NO: 4772 - DNA, 20 bp, synthetic construct
  source 1..20: mol_type = other DNA
gaaaaaagaccttgtggtac

SEQ ID NO: 4773 - DNA, 20 bp, synthetic construct
  source 1..20: mol_type = other DNA
agaaaaaagaccttgtggta

SEQ ID NO: 4774 - DNA, 20 bp, synthetic construct
  source 1..20: mol_type = other DNA
cagaaaaaagaccttgtggt

SEQ ID NO: 4775 - DNA, 20 bp, synthetic construct
  source 1..20: mol_type = other DNA
acagaaaaaagaccttgtgg

SEQ ID NO: 4776 - DNA, 20 bp, synthetic construct
  source 1..20: mol_type = other DNA
aacagaaaaaagaccttgtg

SEQ ID NO: 4777 - DNA, 20 bp, synthetic construct
  source 1..20: mol_type = other DNA
gaacagaaaaaagaccttgt

SEQ ID NO: 4778 - DNA, 20 bp, synthetic construct
  source 1..20: mol_type = other DNA
ggaacagaaaaaagaccttg

SEQ ID NO: 4779 - DNA, 20 bp, synthetic construct
  source 1..20: mol_type = other DNA
aggaacagaaaaaagacctt

SEQ ID NO: 4780 - DNA, 20 bp, synthetic construct
  source 1..20: mol_type = other DNA
aaggaacagaaaaaagacct

SEQ ID NO: 4781 - DNA, 20 bp, synthetic construct
  source 1..20: mol_type = other DNA
caaggaacagaaaaaagacc

SEQ ID NO: 4782 - DNA, 20 bp, synthetic construct
  source 1..20: mol_type = other DNA
tcaaggaacagaaaaaagac

SEQ ID NO: 4783 - DNA, 20 bp, synthetic construct
  source 1..20: mol_type = other DNA
ctcaaggaacagaaaaaaga

SEQ ID NO: 4784 - DNA, 20 bp, synthetic construct
  source 1..20: mol_type = other DNA
cctcaaggaacagaaaaaag

SEQ ID NO: 4785 - DNA, 20 bp, synthetic construct
  source 1..20: mol_type = other DNA
gcctcaaggaacagaaaaaa

SEQ ID NO: 4786 - DNA, 20 bp, synthetic construct
  source 1..20: mol_type = other DNA
agcctcaaggaacagaaaaa

SEQ ID NO: 4787 - DNA, 20 bp, synthetic construct
  source 1..20: mol_type = other DNA
aagcctcaaggaacagaaaa

SEQ ID NO: 4788 - DNA, 20 bp, synthetic construct
  source 1..20: mol_type = other DNA
aaagcctcaaggaacagaaa

SEQ ID NO: 4789 - DNA, 20 bp, synthetic construct
  source 1..20: mol_type = other DNA
taaagcctcaaggaacagaa

SEQ ID NO: 4790 - DNA, 20 bp, synthetic construct
  source 1..20: mol_type = other DNA
gtaaagcctcaaggaacaga

SEQ ID NO: 4791 - DNA, 20 bp, synthetic construct
  source 1..20: mol_type = other DNA
tgtaaagcctcaaggaacag

SEQ ID NO: 4792 - DNA, 20 bp, synthetic construct
  source 1..20: mol_type = other DNA
ttgtaaagcctcaaggaaca

SEQ ID NO: 4793 - DNA, 20 bp, synthetic construct
  source 1..20: mol_type = other DNA
gttgtaaagcctcaaggaac

SEQ ID NO: 4794 - DNA, 20 bp, synthetic construct
  source 1..20: mol_type = other DNA
tgttgtaaagcctcaaggaa

SEQ ID NO: 4795 - DNA, 20 bp, synthetic construct
  source 1..20: mol_type = other DNA
ttgttgtaaagcctcaagga

SEQ ID NO: 4796 - DNA, 20 bp, synthetic construct
  source 1..20: mol_type = other DNA
attgttgtaaagcctcaagg

SEQ ID NO: 4797 - DNA, 20 bp, synthetic construct
  source 1..20: mol_type = other DNA
aattgttgtaaagcctcaag

SEQ ID NO: 4798 - DNA, 20 bp, synthetic construct
  source 1..20: mol_type = other DNA
aaattgttgtaaagcctcaa

SEQ ID NO: 4799 - DNA, 20 bp, synthetic construct
  source 1..20: mol_type = other DNA
taaattgttgtaaagcctca

SEQ ID NO: 4800 - DNA, 20 bp, synthetic construct
  source 1..20: mol_type = other DNA
ttaaattgttgtaaagcctc

SEQ ID NO: 4801 - DNA, 20 bp, synthetic construct
  source 1..20: mol_type = other DNA
cttaaattgttgtaaagcct

SEQ ID NO: 4802 - DNA, 20 bp, synthetic construct
  source 1..20: mol_type = other DNA
ccttaaattgttgtaaagcc

SEQ ID NO: 4803 - DNA, 20 bp, synthetic construct
  source 1..20: mol_type = other DNA
accttaaattgttgtaaagc

SEQ ID NO: 4804 - DNA, 20 bp, synthetic construct
  source 1..20: mol_type = other DNA
aaccttaaattgttgtaaag

SEQ ID NO: 4805 - DNA, 20 bp, synthetic construct
  source 1..20: mol_type = other DNA
taaccttaaattgttgtaaa

SEQ ID NO: 4806 - DNA, 20 bp, synthetic construct
  source 1..20: mol_type = other DNA
ttaaccttaaattgttgtaa

SEQ ID NO: 4807 - DNA, 20 bp, synthetic construct
  source 1..20: mol_type = other DNA
attaaccttaaattgttgta

SEQ ID NO: 4808 - DNA, 20 bp, synthetic construct
  source 1..20: mol_type = other DNA
aattaaccttaaattgttgt

SEQ ID NO: 4809 - DNA, 20 bp, synthetic construct
  source 1..20: mol_type = other DNA
aaattaaccttaaattgttg

SEQ ID NO: 4810 - DNA, 20 bp, synthetic construct
  source 1..20: mol_type = other DNA
taaattaaccttaaattgtt

SEQ ID NO: 4811 - DNA, 20 bp, synthetic construct
  source 1..20: mol_type = other DNA
ctaaattaaccttaaattgt

SEQ ID NO: 4812 - DNA, 20 bp, synthetic construct
  source 1..20: mol_type = other DNA
tctaaattaaccttaaattg

SEQ ID NO: 4813 - DNA, 20 bp, synthetic construct
  source 1..20: mol_type = other DNA
atctaaattaaccttaaatt

SEQ ID NO: 4814 - DNA, 20 bp, synthetic construct
  source 1..20: mol_type = other DNA
aatctaaattaaccttaaat

SEQ ID NO: 4815 - DNA, 20 bp, synthetic construct
  source 1..20: mol_type = other DNA
aaatctaaattaaccttaaa

SEQ ID NO: 4816 - DNA, 20 bp, synthetic construct
  source 1..20: mol_type = other DNA
aaaatctaaattaaccttaa

SEQ ID NO: 4817 - DNA, 20 bp, synthetic construct
  source 1..20: mol_type = other DNA
aaaaatctaaattaacctta

SEQ ID NO: 4818 - DNA, 20 bp, synthetic construct
  source 1..20: mol_type = other DNA
gaaaaatctaaattaacctt

SEQ ID NO: 4819 - DNA, 20 bp, synthetic construct
  source 1..20: mol_type = other DNA
ggaaaaatctaaattaacct

SEQ ID NO: 4820 - DNA, 20 bp, synthetic construct
  source 1..20: mol_type = other DNA
aggaaaaatctaaattaacc

SEQ ID NO: 4821 - DNA, 20 bp, synthetic construct
  source 1..20: mol_type = other DNA
aaggaaaaatctaaattaac

SEQ ID NO: 4822 - DNA, 20 bp, synthetic construct
  source 1..20: mol_type = other DNA
caaggaaaaatctaaattaa

SEQ ID NO: 4823 - DNA, 20 bp, synthetic construct
  source 1..20: mol_type = other DNA
gcaaggaaaaatctaaatta

SEQ ID NO: 4824 - DNA, 20 bp, synthetic construct
  source 1..20: mol_type = other DNA
agcaaggaaaaatctaaatt

SEQ ID NO: 4825 - DNA, 20 bp, synthetic construct
  source 1..20: mol_type = other DNA
aagcaaggaaaaatctaaat

SEQ ID NO: 4826 - DNA, 20 bp, synthetic construct
  source 1..20: mol_type = other DNA
aaagcaaggaaaaatctaaa

SEQ ID NO: 4827 - DNA, 20 bp, synthetic construct
  source 1..20: mol_type = other DNA
taaagcaaggaaaaatctaa

SEQ ID NO: 4828 - DNA, 20 bp, synthetic construct
  source 1..20: mol_type = other DNA
ttaaagcaaggaaaaatcta

SEQ ID NO: 4829 - DNA, 20 bp, synthetic construct
  source 1..20: mol_type = other DNA
cttaaagcaaggaaaaatct

SEQ ID NO: 4830 - DNA, 20 bp, synthetic construct
  source 1..20: mol_type = other DNA
acttaaagcaaggaaaaatc

SEQ ID NO: 4831 - DNA, 20 bp, synthetic construct
  source 1..20: mol_type = other DNA
aacttaaagcaaggaaaaat

SEQ ID NO: 4832 - DNA, 20 bp, synthetic construct
  source 1..20: mol_type = other DNA
gaacttaaagcaaggaaaaa

SEQ ID NO: 4833 - DNA, 20 bp, synthetic construct
  source 1..20: mol_type = other DNA
agaacttaaagcaaggaaaa

SEQ ID NO: 4834 - DNA, 20 bp, synthetic construct
  source 1..20: mol_type = other DNA
aagaacttaaagcaaggaaa

SEQ ID NO: 4835 - DNA, 20 bp, synthetic construct
  source 1..20: mol_type = other DNA
aaagaacttaaagcaaggaa

SEQ ID NO: 4836 - DNA, 20 bp, synthetic construct
  source 1..20: mol_type = other DNA
aaaagaacttaaagcaagga

SEQ ID NO: 4837 - DNA, 20 bp, synthetic construct
  source 1..20: mol_type = other DNA
taaaagaacttaaagcaagg

SEQ ID NO: 4838 - DNA, 20 bp, synthetic construct
  source 1..20: mol_type = other DNA
gtaaaagaacttaaagcaag

SEQ ID NO: 4839 - DNA, 20 bp, synthetic construct
  source 1..20: mol_type = other DNA
agtaaaagaacttaaagcaa

SEQ ID NO: 4840 - DNA, 20 bp, synthetic construct
  source 1..20: mol_type = other DNA
aagtaaaagaacttaaagca

SEQ ID NO: 4841 - DNA, 20 bp, synthetic construct
  source 1..20: mol_type = other DNA
caagtaaaagaacttaaagc

SEQ ID NO: 4842 - DNA, 20 bp, synthetic construct
  source 1..20: mol_type = other DNA
tcaagtaaaagaacttaaag

SEQ ID NO: 4843 - DNA, 20 bp, synthetic construct
  source 1..20: mol_type = other DNA
ctcaagtaaaagaacttaaa

SEQ ID NO: 4844 - DNA, 20 bp, synthetic construct
  source 1..20: mol_type = other DNA
tctcaagtaaaagaacttaa

SEQ ID NO: 4845 - DNA, 20 bp, synthetic construct
  source 1..20: mol_type = other DNA
gtctcaagtaaaagaactta

SEQ ID NO: 4846 - DNA, 20 bp, synthetic construct
  source 1..20: mol_type = other DNA
ggtctcaagtaaaagaactt

SEQ ID NO: 4847 - DNA, 20 bp, synthetic construct
  source 1..20: mol_type = other DNA
aggtctcaagtaaaagaact

SEQ ID NO: 4848 - DNA, 20 bp, synthetic construct
  source 1..20: mol_type = other DNA
taggtctcaagtaaaagaac

SEQ ID NO: 4849 - DNA, 20 bp, synthetic construct
  source 1..20: mol_type = other DNA
ttaggtctcaagtaaaagaa

SEQ ID NO: 4850 - DNA, 20 bp, synthetic construct
  source 1..20: mol_type = other DNA
tttaggtctcaagtaaaaga

SEQ ID NO: 4851 - DNA, 20 bp, synthetic construct
  source 1..20: mol_type = other DNA
atttaggtctcaagtaaaag

SEQ ID NO: 4852 - DNA, 20 bp, synthetic construct
  source 1..20: mol_type = other DNA
catttaggtctcaagtaaaa

SEQ ID NO: 4853 - DNA, 20 bp, synthetic construct
  source 1..20: mol_type = other DNA
ccatttaggtctcaagtaaa

SEQ ID NO: 4854 - DNA, 20 bp, synthetic construct
  source 1..20: mol_type = other DNA
gccatttaggtctcaagtaa

SEQ ID NO: 4855 - DNA, 20 bp, synthetic construct
  source 1..20: mol_type = other DNA
tgccatttaggtctcaagta

SEQ ID NO: 4856 - DNA, 20 bp, synthetic construct
  source 1..20: mol_type = other DNA
ctgccatttaggtctcaagt

SEQ ID NO: 4857 - DNA, 20 bp, synthetic construct
  source 1..20: mol_type = other DNA
gctgccatttaggtctcaag

SEQ ID NO: 4858 - DNA, 20 bp, synthetic construct
  source 1..20: mol_type = other DNA
ggctgccatttaggtctcaa

SEQ ID NO: 4859 - DNA, 20 bp, synthetic construct
  source 1..20: mol_type = other DNA
gggctgccatttaggtctca

SEQ ID NO: 4860 - DNA, 20 bp, synthetic construct
  source 1..20: mol_type = other DNA
agggctgccatttaggtctc

SEQ ID NO: 4861 - DNA, 20 bp, synthetic construct
  source 1..20: mol_type = other DNA
aagggctgccatttaggtct

SEQ ID NO: 4862 - DNA, 20 bp, synthetic construct
  source 1..20: mol_type = other DNA
taagggctgccatttaggtc

SEQ ID NO: 4863 - DNA, 20 bp, synthetic construct
  source 1..20: mol_type = other DNA
ataagggctgccatttaggt

SEQ ID NO: 4864 - DNA, 20 bp, synthetic construct
  source 1..20: mol_type = other DNA
aataagggctgccatttagg

SEQ ID NO: 4865 - DNA, 20 bp, synthetic construct
  source 1..20: mol_type = other DNA
gaataagggctgccatttag

SEQ ID NO: 4866 - DNA, 20 bp, synthetic construct
  source 1..20: mol_type = other DNA
agaataagggctgccattta

SEQ ID NO: 4867 - DNA, 20 bp, synthetic construct
  source 1..20: mol_type = other DNA
aagaataagggctgccattt

SEQ ID NO: 4868 - DNA, 20 bp, synthetic construct
  source 1..20: mol_type = other DNA
aaagaataagggctgccatt

SEQ ID NO: 4869 - DNA, 20 bp, synthetic construct
  source 1..20: mol_type = other DNA
gaaagaataagggctgccat

SEQ ID NO: 4870 - DNA, 20 bp, synthetic construct
  source 1..20: mol_type = other DNA
agaaagaataagggctgcca

SEQ ID NO: 4871 - DNA, 20 bp, synthetic construct
  source 1..20: mol_type = other DNA
cagaaagaataagggctgcc

SEQ ID NO: 4872 - DNA, 20 bp, synthetic construct
  source 1..20: mol_type = other DNA
tcagaaagaataagggctgc

SEQ ID NO: 4873 - DNA, 20 bp, synthetic construct
  source 1..20: mol_type = other DNA
atcagaaagaataagggctg

SEQ ID NO: 4874 - DNA, 20 bp, synthetic construct
  source 1..20: mol_type = other DNA
catcagaaagaataagggct

SEQ ID NO: 4875 - DNA, 20 bp, synthetic construct
  source 1..20: mol_type = other DNA
tcatcagaaagaataagggc

SEQ ID NO: 4876 - DNA, 20 bp, synthetic construct
  source 1..20: mol_type = other DNA
ttcatcagaaagaataaggg

SEQ ID NO: 4877 - DNA, 20 bp, synthetic construct
  source 1..20: mol_type = other DNA
attcatcagaaagaataagg

SEQ ID NO: 4878 - DNA, 20 bp, synthetic construct
  source 1..20: mol_type = other DNA
tattcatcagaaagaataag

SEQ ID NO: 4879 - DNA, 20 bp, synthetic construct
  source 1..20: mol_type = other DNA
ctattcatcagaaagaataa

SEQ ID NO: 4880 - DNA, 20 bp, synthetic construct
  source 1..20: mol_type = other DNA
cctattcatcagaaagaata

SEQ ID NO: 4881 - DNA, 20 bp, synthetic construct
  source 1..20: mol_type = other DNA
acctattcatcagaaagaat

SEQ ID NO: 4882 - DNA, 20 bp, synthetic construct
  source 1..20: mol_type = other DNA
cacctattcatcagaaagaa

SEQ ID NO: 4883 - DNA, 20 bp, synthetic construct
  source 1..20: mol_type = other DNA
tcacctattcatcagaaaga

SEQ ID NO: 4884 - DNA, 20 bp, synthetic construct
  source 1..20: mol_type = other DNA
ttcacctattcatcagaaag

SEQ ID NO: 4885 - DNA, 20 bp, synthetic construct
  source 1..20: mol_type = other DNA
tttcacctattcatcagaaa

SEQ ID NO: 4886 - DNA, 20 bp, synthetic construct
  source 1..20: mol_type = other DNA
atttcacctattcatcagaa

SEQ ID NO: 4887 - DNA, 20 bp, synthetic construct
  source 1..20: mol_type = other DNA
aatttcacctattcatcaga

SEQ ID NO: 4888 - DNA, 20 bp, synthetic construct
  source 1..20: mol_type = other DNA
aaatttcacctattcatcag

SEQ ID NO: 4889 - DNA, 20 bp, synthetic construct
  source 1..20: mol_type = other DNA
aaaatttcacctattcatca

SEQ ID NO: 4890 - DNA, 20 bp, synthetic construct
  source 1..20: mol_type = other DNA
caaaatttcacctattcatc

SEQ ID NO: 4891 - DNA, 20 bp, synthetic construct
  source 1..20: mol_type = other DNA
acaaaatttcacctattcat

SEQ ID NO: 4892 - DNA, 20 bp, synthetic construct
  source 1..20: mol_type = other DNA
aacaaaatttcacctattca

SEQ ID NO: 4893 - DNA, 20 bp, synthetic construct
  source 1..20: mol_type = other DNA
aaacaaaatttcacctattc

SEQ ID NO: 4894 - DNA, 20 bp, synthetic construct
  source 1..20: mol_type = other DNA
taaacaaaatttcacctatt

SEQ ID NO: 4895 - DNA, 20 bp, synthetic construct
  source 1..20: mol_type = other DNA
gtaaacaaaatttcacctat

SEQ ID NO: 4896 - DNA, 20 bp, synthetic construct
  source 1..20: mol_type = other DNA
agtaaacaaaatttcaccta

SEQ ID NO: 4897 - DNA, 20 bp, synthetic construct
  source 1..20: mol_type = other DNA
cagtaaacaaaatttcacct

SEQ ID NO: 4898 - DNA, 20 bp, synthetic construct
  source 1..20: mol_type = other DNA
acagtaaacaaaatttcacc

SEQ ID NO: 4899 - DNA, 20 bp, synthetic construct
  source 1..20: mol_type = other DNA
cacagtaaacaaaatttcac

SEQ ID NO: 4900 - DNA, 20 bp, synthetic construct
  source 1..20: mol_type = other DNA
acacagtaaacaaaatttca

SEQ ID NO: 4901 - DNA, 20 bp, synthetic construct
  source 1..20: mol_type = other DNA
aacacagtaaacaaaatttc

SEQ ID NO: 4902 - DNA, 20 bp, synthetic construct
  source 1..20: mol_type = other DNA
caacacagtaaacaaaattt

SEQ ID NO: 4903 - DNA, 20 bp, synthetic construct
  source 1..20: mol_type = other DNA
ccaacacagtaaacaaaatt

SEQ ID NO: 4904 - DNA, 20 bp, synthetic construct
  source 1..20: mol_type = other DNA
tccaacacagtaaacaaaat

SEQ ID NO: 4905 - DNA, 20 bp, synthetic construct
  source 1..20: mol_type = other DNA
atccaacacagtaaacaaaa

SEQ ID NO: 4906 - DNA, 20 bp, synthetic construct
  source 1..20: mol_type = other DNA
aatccaacacagtaaacaaa

SEQ ID NO: 4907 - DNA, 20 bp, synthetic construct
  source 1..20: mol_type = other DNA
aaatccaacacagtaaacaa

SEQ ID NO: 4908 - DNA, 20 bp, synthetic construct
  source 1..20: mol_type = other DNA
caaatccaacacagtaaaca

SEQ ID NO: 4909 - DNA, 20 bp, synthetic construct
  source 1..20: mol_type = other DNA
acaaatccaacacagtaaac

SEQ ID NO: 4910 - DNA, 20 bp, synthetic construct
  source 1..20: mol_type = other DNA
cacaaatccaacacagtaaa

SEQ ID NO: 4911 - DNA, 20 bp, synthetic construct
  source 1..20: mol_type = other DNA
acacaaatccaacacagtaa

SEQ ID NO: 4912 - DNA, 20 bp, synthetic construct
  source 1..20: mol_type = other DNA
tacacaaatccaacacagta

SEQ ID NO: 4913 - DNA, 20 bp, synthetic construct
  source 1..20: mol_type = other DNA
ttacacaaatccaacacagt

SEQ ID NO: 4914 - DNA, 20 bp, synthetic construct
  source 1..20: mol_type = other DNA
attacacaaatccaacacag

SEQ ID NO: 4915 - DNA, 20 bp, synthetic construct
  source 1..20: mol_type = other DNA
cattacacaaatccaacaca

SEQ ID NO: 4916 - DNA, 20 bp, synthetic construct
  source 1..20: mol_type = other DNA
acattacacaaatccaacac

SEQ ID NO: 4917 - DNA, 20 bp, synthetic construct
  source 1..20: mol_type = other DNA
cacattacacaaatccaaca

SEQ ID NO: 4918 - DNA, 20 bp, synthetic construct
  source 1..20: mol_type = other DNA
tcacattacacaaatccaac

SEQ ID NO: 4919 - DNA, 20 bp, synthetic construct
  source 1..20: mol_type = other DNA
ttcacattacacaaatccaa

SEQ ID NO: 4920 - DNA, 20 bp, synthetic construct
  source 1..20: mol_type = other DNA
cttcacattacacaaatcca

SEQ ID NO: 4921 - DNA, 20 bp, synthetic construct
  source 1..20: mol_type = other DNA
acttcacattacacaaatcc

SEQ ID NO: 4922 - DNA, 20 bp, synthetic construct
  source 1..20: mol_type = other DNA
aacttcacattacacaaatc

SEQ ID NO: 4923 - DNA, 20 bp, synthetic construct
  source 1..20: mol_type = other DNA
aaacttcacattacacaaat

SEQ ID NO: 4924 - DNA, 20 bp, synthetic construct
  source 1..20: mol_type = other DNA
aaaacttcacattacacaaa

SEQ ID NO: 4925 - DNA, 20 bp, synthetic construct
  source 1..20: mol_type = other DNA
taaaacttcacattacacaa

SEQ ID NO: 4926 - DNA, 20 bp, synthetic construct
  source 1..20: mol_type = other DNA
ataaaacttcacattacaca

SEQ ID NO: 4927 - DNA, 20 bp, synthetic construct
  source 1..20: mol_type = other DNA
aataaaacttcacattacac

SEQ ID NO: 4928 - DNA, 20 bp, synthetic construct
  source 1..20: mol_type = other DNA
gaataaaacttcacattaca

SEQ ID NO: 4929 - DNA, 20 bp, synthetic construct
  source 1..20: mol_type = other DNA
agaataaaacttcacattac

SEQ ID NO: 4930 - DNA, 20 bp, synthetic construct
  source 1..20: mol_type = other DNA
aagaataaaacttcacatta

SEQ ID NO: 4931 - DNA, 20 bp, synthetic construct
  source 1..20: mol_type = other DNA
caagaataaaacttcacatt

SEQ ID NO: 4932 - DNA, 20 bp, synthetic construct
  source 1..20: mol_type = other DNA
tcaagaataaaacttcacat

SEQ ID NO: 4933 - DNA, 20 bp, synthetic construct
  source 1..20: mol_type = other DNA
ttcaagaataaaacttcaca

SEQ ID NO: 4934 - DNA, 20 bp, synthetic construct
  source 1..20: mol_type = other DNA
gttcaagaataaaacttcac

SEQ ID NO: 4935 - DNA, 20 bp, synthetic construct
  source 1..20: mol_type = other DNA
tgttcaagaataaaacttca

SEQ ID NO: 4936 - DNA, 20 bp, synthetic construct
  source 1..20: mol_type = other DNA
ctgttcaagaataaaacttc

SEQ ID NO: 4937 - DNA, 20 bp, synthetic construct
  source 1..20: mol_type = other DNA
tctgttcaagaataaaactt

SEQ ID NO: 4938 - DNA, 20 bp, synthetic construct
  source 1..20: mol_type = other DNA
atctgttcaagaataaaact

SEQ ID NO: 4939 - DNA, 20 bp, synthetic construct
  source 1..20: mol_type = other DNA
gatctgttcaagaataaaac

SEQ ID NO: 4940 - DNA, 20 bp, synthetic construct
  source 1..20: mol_type = other DNA
cgatctgttcaagaataaaa

SEQ ID NO: 4941 - DNA, 20 bp, synthetic construct
  source 1..20: mol_type = other DNA
acgatctgttcaagaataaa

SEQ ID NO: 4942 - DNA, 20 bp, synthetic construct
  source 1..20: mol_type = other DNA
aacgatctgttcaagaataa

SEQ ID NO: 4943 - DNA, 20 bp, synthetic construct
  source 1..20: mol_type = other DNA
taacgatctgttcaagaata

SEQ ID NO: 4944 - DNA, 20 bp, synthetic construct
  source 1..20: mol_type = other DNA
ttaacgatctgttcaagaat

SEQ ID NO: 4945 - DNA, 20 bp, synthetic construct
  source 1..20: mol_type = other DNA
attaacgatctgttcaagaa

SEQ ID NO: 4946 - DNA, 20 bp, synthetic construct
  source 1..20: mol_type = other DNA
cattaacgatctgttcaaga

SEQ ID NO: 4947 - DNA, 20 bp, synthetic construct
  source 1..20: mol_type = other DNA
acattaacgatctgttcaag

SEQ ID NO: 4948 - DNA, 20 bp, synthetic construct
  source 1..20: mol_type = other DNA
tacattaacgatctgttcaa

SEQ ID NO: 4949 - DNA, 20 bp, synthetic construct
  source 1..20: mol_type = other DNA
gtacattaacgatctgttca

SEQ ID NO: 4950 - DNA, 20 bp, synthetic construct
  source 1..20: mol_type = other DNA
agtacattaacgatctgttc

SEQ ID NO: 4951 - DNA, 20 bp, synthetic construct
  source 1..20: mol_type = other DNA
aagtacattaacgatctgtt

SEQ ID NO: 4952 - DNA, 20 bp, synthetic construct
  source 1..20: mol_type = other DNA
caagtacattaacgatctgt

SEQ ID NO: 4953 - DNA, 20 bp, synthetic construct
  source 1..20: mol_type = other DNA
acaagtacattaacgatctg

SEQ ID NO: 4954 - DNA, 20 bp, synthetic construct
  source 1..20: mol_type = other DNA
tacaagtacattaacgatct

SEQ ID NO: 4955 - DNA, 20 bp, synthetic construct
  source 1..20: mol_type = other DNA
ctacaagtacattaacgatc

SEQ ID NO: 4956 - DNA, 20 bp, synthetic construct
  source 1..20: mol_type = other DNA
tctacaagtacattaacgat

SEQ ID NO: 4957 - DNA, 20 bp, synthetic construct
  source 1..20: mol_type = other DNA
ttctacaagtacattaacga

SEQ ID NO: 4958 - DNA, 20 bp, synthetic construct
  source 1..20: mol_type = other DNA
attctacaagtacattaacg

SEQ ID NO: 4959 - DNA, 20 bp, synthetic construct
  source 1..20: mol_type = other DNA
aattctacaagtacattaac

SEQ ID NO: 4960 - DNA, 20 bp, synthetic construct
  source 1..20: mol_type = other DNA
taattctacaagtacattaa

SEQ ID NO: 4961 - DNA, 20 bp, synthetic construct
  source 1..20: mol_type = other DNA
gtaattctacaagtacatta

SEQ ID NO: 4962 - DNA, 20 bp, synthetic construct
  source 1..20: mol_type = other DNA
agtaattctacaagtacatt

SEQ ID NO: 4963 - DNA, 20 bp, synthetic construct
  source 1..20: mol_type = other DNA
aagtaattctacaagtacat

SEQ ID NO: 4964 - DNA, 20 bp, synthetic construct
  source 1..20: mol_type = other DNA
aaagtaattctacaagtaca

SEQ ID NO: 4965 - DNA, 20 bp, synthetic construct
  source 1..20: mol_type = other DNA
caaagtaattctacaagtac

SEQ ID NO: 4966 - DNA, 20 bp, synthetic construct
  source 1..20: mol_type = other DNA
tcaaagtaattctacaagta

SEQ ID NO: 4967 - DNA, 20 bp, synthetic construct
  source 1..20: mol_type = other DNA
ttcaaagtaattctacaagt

SEQ ID NO: 4968 - DNA, 20 bp, synthetic construct
  source 1..20: mol_type = other DNA
attcaaagtaattctacaag

SEQ ID NO: 4969 - DNA, 20 bp, synthetic construct
  source 1..20: mol_type = other DNA
aattcaaagtaattctacaa

SEQ ID NO: 4970 - DNA, 20 bp, synthetic construct
  source 1..20: mol_type = other DNA
aaattcaaagtaattctaca

SEQ ID NO: 4971 - DNA, 20 bp, synthetic construct
  source 1..20: mol_type = other DNA
caaattcaaagtaattctac

SEQ ID NO: 4972 - DNA, 20 bp, synthetic construct
  source 1..20: mol_type = other DNA
tcaaattcaaagtaattcta

SEQ ID NO: 4973 - DNA, 20 bp, synthetic construct
  source 1..20: mol_type = other DNA
ttcaaattcaaagtaattct

SEQ ID NO: 4974 - DNA, 20 bp, synthetic construct
  source 1..20: mol_type = other DNA
attcaaattcaaagtaattc

SEQ ID NO: 4975 - DNA, 20 bp, synthetic construct
  source 1..20: mol_type = other DNA
gattcaaattcaaagtaatt

SEQ ID NO: 4976 - DNA, 20 bp, synthetic construct
  source 1..20: mol_type = other DNA
tgattcaaattcaaagtaat

SEQ ID NO: 4977 - DNA, 20 bp, synthetic construct
  source 1..20: mol_type = other DNA
gtgattcaaattcaaagtaa

SEQ ID NO: 4978 - DNA, 20 bp, synthetic construct
  source 1..20: mol_type = other DNA
agtgattcaaattcaaagta

SEQ ID NO: 4979 - DNA, 20 bp, synthetic construct
  source 1..20: mol_type = other DNA
aagtgattcaaattcaaagt

SEQ ID NO: 4980 - DNA, 20 bp, synthetic construct
  source 1..20: mol_type = other DNA
aaagtgattcaaattcaaag

SEQ ID NO: 4981 - DNA, 20 bp, synthetic construct
  source 1..20: mol_type = other DNA
gaaagtgattcaaattcaaa

SEQ ID NO: 4982 - DNA, 20 bp, synthetic construct
  source 1..20: mol_type = other DNA
ggaaagtgattcaaattcaa

SEQ ID NO: 4983 - DNA, 20 bp, synthetic construct
  source 1..20: mol_type = other DNA
aggaaagtgattcaaattca

SEQ ID NO: 4984 - DNA, 20 bp, synthetic construct
  source 1..20: mol_type = other DNA
caggaaagtgattcaaattc

SEQ ID NO: 4985 - DNA, 20 bp, synthetic construct
  source 1..20: mol_type = other DNA
gcaggaaagtgattcaaatt

SEQ ID NO: 4986 - DNA, 20 bp, synthetic construct
  source 1..20: mol_type = other DNA
tgcaggaaagtgattcaaat

SEQ ID NO: 4987 - DNA, 20 bp, synthetic construct
  source 1..20: mol_type = other DNA
atgcaggaaagtgattcaaa

SEQ ID NO: 4988 - DNA, 20 bp, synthetic construct
  source 1..20: mol_type = other DNA
aatgcaggaaagtgattcaa

SEQ ID NO: 4989 - DNA, 20 bp, synthetic construct
  source 1..20: mol_type = other DNA
gaatgcaggaaagtgattca

SEQ ID NO: 4990 - DNA, 20 bp, synthetic construct
  source 1..20: mol_type = other DNA
ggaatgcaggaaagtgattc

SEQ ID NO: 4991 - DNA, 20 bp, synthetic construct
  source 1..20: mol_type = other DNA
aggaatgcaggaaagtgatt

SEQ ID NO: 4992 - DNA, 20 bp, synthetic construct
  source 1..20: mol_type = other DNA
aaggaatgcaggaaagtgat

SEQ ID NO: 4993 - DNA, 20 bp, synthetic construct
  source 1..20: mol_type = other DNA
caaggaatgcaggaaagtga

SEQ ID NO: 4994 - DNA, 20 bp, synthetic construct
  source 1..20: mol_type = other DNA
acaaggaatgcaggaaagtg

SEQ ID NO: 4995 - DNA, 20 bp, synthetic construct
  source 1..20: mol_type = other DNA
tacaaggaatgcaggaaagt

SEQ ID NO: 4996 - DNA, 20 bp, synthetic construct
  source 1..20: mol_type = other DNA
ttacaaggaatgcaggaaag

SEQ ID NO: 4997 - DNA, 20 bp, synthetic construct
  source 1..20: mol_type = other DNA
tttacaaggaatgcaggaaa

SEQ ID NO: 4998 - DNA, 20 bp, synthetic construct
  source 1..20: mol_type = other DNA
atttacaaggaatgcaggaa

SEQ ID NO: 4999 - DNA, 20 bp, synthetic construct
  source 1..20: mol_type = other DNA
tatttacaaggaatgcagga

SEQ ID NO: 5000 - DNA, 20 bp, synthetic construct
  source 1..20: mol_type = other DNA
ttatttacaaggaatgcagg

SEQ ID NO: 5001 - DNA, 20 bp, synthetic construct
  source 1..20: mol_type = other DNA
cttatttacaaggaatgcag

SEQ ID NO: 5002 - DNA, 20 bp, synthetic construct
  source 1..20: mol_type = other DNA
acttatttacaaggaatgca

SEQ ID NO: 5003 - DNA, 20 bp, synthetic construct
  source 1..20: mol_type = other DNA
aacttatttacaaggaatgc

SEQ ID NO: 5004 - DNA, 20 bp, synthetic construct
  source 1..20: mol_type = other DNA
aaacttatttacaaggaatg

SEQ ID NO: 5005 - DNA, 20 bp, synthetic construct
  source 1..20: mol_type = other DNA
gaaacttatttacaaggaat

SEQ ID NO: 5006 - DNA, 20 bp, synthetic construct
  source 1..20: mol_type = other DNA
tgaaacttatttacaaggaa

SEQ ID NO: 5007 - DNA, 20 bp, synthetic construct
  source 1..20: mol_type = other DNA
ctgaaacttatttacaagga

SEQ ID NO: 5008 - DNA, 20 bp, synthetic construct
  source 1..20: mol_type = other DNA
gctgaaacttatttacaagg

SEQ ID NO: 5009 - DNA, 20 bp, synthetic construct
  source 1..20: mol_type = other DNA
agctgaaacttatttacaag

SEQ ID NO: 5010 - DNA, 20 bp, synthetic construct
  source 1..20: mol_type = other DNA
aagctgaaacttatttacaa

SEQ ID NO: 5011 - DNA, 20 bp, synthetic construct
  source 1..20: mol_type = other DNA
gaagctgaaacttatttaca

SEQ ID NO: 5012 - DNA, 20 bp, synthetic construct
  source 1..20: mol_type = other DNA
agaagctgaaacttatttac

SEQ ID NO: 5013 - DNA, 20 bp, synthetic construct
  source 1..20: mol_type = other DNA
tagaagctgaaacttattta

SEQ ID NO: 5014 - DNA, 20 bp, synthetic construct
  source 1..20: mol_type = other DNA
ctagaagctgaaacttattt

SEQ ID NO: 5015 - DNA, 20 bp, synthetic construct
  source 1..20: mol_type = other DNA
tctagaagctgaaacttatt

SEQ ID NO: 5016 - DNA, 20 bp, synthetic construct
  source 1..20: mol_type = other DNA
ttctagaagctgaaacttat

SEQ ID NO: 5017 - DNA, 20 bp, synthetic construct
  source 1..20: mol_type = other DNA
attctagaagctgaaactta

SEQ ID NO: 5018 - DNA, 20 bp, synthetic construct
  source 1..20: mol_type = other DNA
gattctagaagctgaaactt

SEQ ID NO: 5019 - DNA, 20 bp, synthetic construct
  source 1..20: mol_type = other DNA
agattctagaagctgaaact

SEQ ID NO: 5020 - DNA, 20 bp, synthetic construct
  source 1..20: mol_type = other DNA
gagattctagaagctgaaac

SEQ ID NO: 5021 - DNA, 20 bp, synthetic construct
  source 1..20: mol_type = other DNA
ggagattctagaagctgaaa

SEQ ID NO: 5022 - DNA, 20 bp, synthetic construct
  source 1..20: mol_type = other DNA
aggagattctagaagctgaa

SEQ ID NO: 5023 - DNA, 20 bp, synthetic construct
  source 1..20: mol_type = other DNA
gaggagattctagaagctga

SEQ ID NO: 5024 - DNA, 20 bp, synthetic construct
  source 1..20: mol_type = other DNA
tgaggagattctagaagctg

SEQ ID NO: 5025 - DNA, 20 bp, synthetic construct
  source 1..20: mol_type = other DNA
gtgaggagattctagaagct

SEQ ID NO: 5026 - DNA, 20 bp, synthetic construct
  source 1..20: mol_type = other DNA
agtgaggagattctagaagc

SEQ ID NO: 5027 - DNA, 20 bp, synthetic construct
  source 1..20: mol_type = other DNA
aagtgaggagattctagaag

SEQ ID NO: 5028 - DNA, 20 bp, synthetic construct
  source 1..20: mol_type = other DNA
taagtgaggagattctagaa

SEQ ID NO: 5029 - DNA, 20 bp, synthetic construct
  source 1..20: mol_type = other DNA
ctaagtgaggagattctaga

SEQ ID NO: 5030 - DNA, 20 bp, synthetic construct
  source 1..20: mol_type = other DNA
cctaagtgaggagattctag

SEQ ID NO: 5031 - DNA, 20 bp, synthetic construct
  source 1..20: mol_type = other DNA
acctaagtgaggagattcta

SEQ ID NO: 5032 - DNA, 20 bp, synthetic construct
  source 1..20: mol_type = other DNA
aacctaagtgaggagattct

SEQ ID NO: 5033 - DNA, 20 bp, synthetic construct
  source 1..20: mol_type = other DNA
aaacctaagtgaggagattc

SEQ ID NO: 5034 - DNA, 20 bp, synthetic construct
  source 1..20: mol_type = other DNA
caaacctaagtgaggagatt

SEQ ID NO: 5035 - DNA, 20 bp, synthetic construct
  source 1..20: mol_type = other DNA
acaaacctaagtgaggagat

SEQ ID NO: 5036 - DNA, 20 bp, synthetic construct
  source 1..20: mol_type = other DNA
cacaaacctaagtgaggaga

SEQ ID NO: 5037 - DNA, 20 bp, synthetic construct
  source 1..20: mol_type = other DNA
gcacaaacctaagtgaggag

SEQ ID NO: 5038 - DNA, 20 bp, synthetic construct
  source 1..20: mol_type = other DNA
cgcacaaacctaagtgagga

SEQ ID NO: 5039 - DNA, 20 bp, synthetic construct
  source 1..20: mol_type = other DNA
acgcacaaacctaagtgagg

SEQ ID NO: 5040 - DNA, 20 bp, synthetic construct
  source 1..20: mol_type = other DNA
tacgcacaaacctaagtgag

SEQ ID NO: 5041 - DNA, 20 bp, synthetic construct
  source 1..20: mol_type = other DNA
atacgcacaaacctaagtga

SEQ ID NO: 5042 - DNA, 20 bp, synthetic construct
  source 1..20: mol_type = other DNA
gatacgcacaaacctaagtg

SEQ ID NO: 5043 - DNA, 20 bp, synthetic construct
  source 1..20: mol_type = other DNA
tgatacgcacaaacctaagt

SEQ ID NO: 5044 - DNA, 20 bp, synthetic construct
  source 1..20: mol_type = other DNA
ttgatacgcacaaacctaag

SEQ ID NO: 5045 - DNA, 20 bp, synthetic construct
  source 1..20: mol_type = other DNA
gttgatacgcacaaacctaa

SEQ ID NO: 5046 - DNA, 20 bp, synthetic construct
  source 1..20: mol_type = other DNA
tgttgatacgcacaaaccta

SEQ ID NO: 5047 - DNA, 20 bp, synthetic construct
  source 1..20: mol_type = other DNA
ctgttgatacgcacaaacct

SEQ ID NO: 5048 - DNA, 20 bp, synthetic construct
  source 1..20: mol_type = other DNA
actgttgatacgcacaaacc

SEQ ID NO: 5049 - DNA, 20 bp, synthetic construct
  source 1..20: mol_type = other DNA
cactgttgatacgcacaaac

SEQ ID NO: 5050 - DNA, 20 bp, synthetic construct
  source 1..20: mol_type = other DNA
tcactgttgatacgcacaaa

SEQ ID NO: 5051 - DNA, 20 bp, synthetic construct
  source 1..20: mol_type = other DNA
ttcactgttgatacgcacaa

SEQ ID NO: 5052 - DNA, 20 bp, synthetic construct
  source 1..20: mol_type = other DNA
tttcactgttgatacgcaca

SEQ ID NO: 5053 - DNA, 20 bp, synthetic construct
  source 1..20: mol_type = other DNA
ttttcactgttgatacgcac

SEQ ID NO: 5054 - DNA, 20 bp, synthetic construct
  source 1..20: mol_type = other DNA
attttcactgttgatacgca

SEQ ID NO: 5055 - DNA, 20 bp, synthetic construct
  source 1..20: mol_type = other DNA
tattttcactgttgatacgc

SEQ ID NO: 5056 - DNA, 20 bp, synthetic construct
  source 1..20: mol_type = other DNA
ttattttcactgttgatacg

SEQ ID NO: 5057 - DNA, 20 bp, synthetic construct
  source 1..20: mol_type = other DNA
cttattttcactgttgatac

SEQ ID NO: 5058 - DNA, 20 bp, synthetic construct
  source 1..20: mol_type = other DNA
acttattttcactgttgata

SEQ ID NO: 5059 - DNA, 20 bp, synthetic construct
  source 1..20: mol_type = other DNA
gacttattttcactgttgat

SEQ ID NO: 5060 - DNA, 20 bp, synthetic construct
  source 1..20: mol_type = other DNA
agacttattttcactgttga

SEQ ID NO: 5061 - DNA, 20 bp, synthetic construct
  source 1..20: mol_type = other DNA
gagacttattttcactgttg

SEQ ID NO: 5062 - DNA, 20 bp, synthetic construct
  source 1..20: mol_type = other DNA
agagacttattttcactgtt

SEQ ID NO: 5063 - DNA, 20 bp, synthetic construct
  source 1..20: mol_type = other DNA
cagagacttattttcactgt

SEQ ID NO: 5064 - DNA, 20 bp, synthetic construct
  source 1..20: mol_type = other DNA
tcagagacttattttcactg

SEQ ID NO: 5065 - DNA, 20 bp, synthetic construct
  source 1..20: mol_type = other DNA
ctcagagacttattttcact

SEQ ID NO: 5066 - DNA, 20 bp, synthetic construct
  source 1..20: mol_type = other DNA
tctcagagacttattttcac

SEQ ID NO: 5067 - DNA, 20 bp, synthetic construct
  source 1..20: mol_type = other DNA
ctctcagagacttattttca

SEQ ID NO: 5068 - DNA, 20 bp, synthetic construct
  source 1..20: mol_type = other DNA
gctctcagagacttattttc

SEQ ID NO: 5069 - DNA, 20 bp, synthetic construct
  source 1..20: mol_type = other DNA
tgctctcagagacttatttt

SEQ ID NO: 5070 - DNA, 20 bp, synthetic construct
  source 1..20: mol_type = other DNA
ttgctctcagagacttattt

SEQ ID NO: 5071 - DNA, 20 bp, synthetic construct
  source 1..20: mol_type = other DNA
cttgctctcagagacttatt

SEQ ID NO: 5072 - DNA, 20 bp, synthetic construct
  source 1..20: mol_type = other DNA
ccttgctctcagagacttat

SEQ ID NO: 5073 - DNA, 20 bp, synthetic construct
  source 1..20: mol_type = other DNA
cccttgctctcagagactta

SEQ ID NO: 5074 - DNA, 20 bp, synthetic construct
  source 1..20: mol_type = other DNA
acccttgctctcagagactt

SEQ ID NO: 5075 - DNA, 20 bp, synthetic construct
  source 1..20: mol_type = other DNA
cacccttgctctcagagact

SEQ ID NO: 5076 - DNA, 20 bp, synthetic construct
  source 1..20: mol_type = other DNA
tcacccttgctctcagagac

SEQ ID NO: 5077 - DNA, 20 bp, synthetic construct
  source 1..20: mol_type = other DNA
ttcacccttgctctcagaga

SEQ ID NO: 5078 - DNA, 20 bp, synthetic construct
  source 1..20: mol_type = other DNA
tttcacccttgctctcagag

SEQ ID NO: 5079 - DNA, 20 bp, synthetic construct
  source 1..20: mol_type = other DNA
ttttcacccttgctctcaga

SEQ ID NO: 5080 - DNA, 20 bp, synthetic construct
  source 1..20: mol_type = other DNA
tttttcacccttgctctcag

SEQ ID NO: 5081 - DNA, 20 bp, synthetic construct
  source 1..20: mol_type = other DNA
ttttttcacccttgctctca

SEQ ID NO: 5082 - DNA, 20 bp, synthetic construct
  source 1..20: mol_type = other DNA
tttttttcacccttgctctc

SEQ ID NO: 5083 - DNA, 20 bp, synthetic construct
  source 1..20: mol_type = other DNA
ttttttttcacccttgctct

SEQ ID NO: 5084 - DNA, 20 bp, synthetic construct
  source 1..20: mol_type = other DNA
attttttttcacccttgctc

SEQ ID NO: 5085 - DNA, 20 bp, synthetic construct
  source 1..20: mol_type = other DNA
cattttttttcacccttgct

SEQ ID NO: 5086 - DNA, 20 bp, synthetic construct
  source 1..20: mol_type = other DNA
gcattttttttcacccttgc

SEQ ID NO: 5087 - DNA, 20 bp, synthetic construct
  source 1..20: mol_type = other DNA
tgcattttttttcacccttg

SEQ ID NO: 5088 - DNA, 20 bp, synthetic construct
  source 1..20: mol_type = other DNA
ctgcattttttttcaccctt

SEQ ID NO: 5089 - DNA, 20 bp, synthetic construct
  source 1..20: mol_type = other DNA
gctgcattttttttcaccct

SEQ ID NO: 5090 - DNA, 20 bp, synthetic construct
  source 1..20: mol_type = other DNA
tgctgcattttttttcaccc

SEQ ID NO: 5091 - DNA, 20 bp, synthetic construct
  source 1..20: mol_type = other DNA
atgctgcattttttttcacc

SEQ ID NO: 5092 - DNA, 20 bp, synthetic construct
  source 1..20: mol_type = other DNA
aatgctgcattttttttcac

SEQ ID NO: 5093 - DNA, 20 bp, synthetic construct
  source 1..20: mol_type = other DNA
gaatgctgcattttttttca

SEQ ID NO: 5094 - DNA, 20 bp, synthetic construct
  source 1..20: mol_type = other DNA
cgaatgctgcattttttttc

SEQ ID NO: 5095 - DNA, 20 bp, synthetic construct
  source 1..20: mol_type = other DNA
ccgaatgctgcatttttttt

SEQ ID NO: 5096 - DNA, 20 bp, synthetic construct
  source 1..20: mol_type = other DNA
accgaatgctgcattttttt

SEQ ID NO: 5097 - DNA, 20 bp, synthetic construct
  source 1..20: mol_type = other DNA
aaccgaatgctgcatttttt

SEQ ID NO: 5098 - DNA, 20 bp, synthetic construct
  source 1..20: mol_type = other DNA
aaaccgaatgctgcattttt

SEQ ID NO: 5099 - DNA, 20 bp, synthetic construct
  source 1..20: mol_type = other DNA
caaaccgaatgctgcatttt

SEQ ID NO: 5100 - DNA, 20 bp, synthetic construct
  source 1..20: mol_type = other DNA
tcaaaccgaatgctgcattt

SEQ ID NO: 5101 - DNA, 20 bp, synthetic construct
  source 1..20: mol_type = other DNA
gtcaaaccgaatgctgcatt

SEQ ID NO: 5102 - DNA, 20 bp, synthetic construct
  source 1..20: mol_type = other DNA
tgtcaaaccgaatgctgcat

SEQ ID NO: 5103 - DNA, 20 bp, synthetic construct
  source 1..20: mol_type = other DNA
ttgtcaaaccgaatgctgca

SEQ ID NO: 5104 - DNA, 20 bp, synthetic construct
  source 1..20: mol_type = other DNA
cttgtcaaaccgaatgctgc

SEQ ID NO: 5105 - DNA, 20 bp, synthetic construct
  source 1..20: mol_type = other DNA
acttgtcaaaccgaatgctg

SEQ ID NO: 5106 - DNA, 20 bp, synthetic construct
  source 1..20: mol_type = other DNA
aacttgtcaaaccgaatgct

SEQ ID NO: 5107 - DNA, 20 bp, synthetic construct
  source 1..20: mol_type = other DNA
aaacttgtcaaaccgaatgc

SEQ ID NO: 5108 - DNA, 20 bp, synthetic construct
  source 1..20: mol_type = other DNA
gaaacttgtcaaaccgaatg

SEQ ID NO: 5109 - DNA, 20 bp, synthetic construct
  source 1..20: mol_type = other DNA
cgaaacttgtcaaaccgaat

SEQ ID NO: 5110 - DNA, 20 bp, synthetic construct
  source 1..20: mol_type = other DNA
tcgaaacttgtcaaaccgaa

SEQ ID NO: 5111 - DNA, 20 bp, synthetic construct
  source 1..20: mol_type = other DNA
ctcgaaacttgtcaaaccga

SEQ ID NO: 5112 - DNA, 20 bp, synthetic construct
  source 1..20: mol_type = other DNA
tctcgaaacttgtcaaaccg

SEQ ID NO: 5113 - DNA, 20 bp, synthetic construct
  source 1..20: mol_type = other DNA
atctcgaaacttgtcaaacc

SEQ ID NO: 5114 - DNA, 20 bp, synthetic construct
  source 1..20: mol_type = other DNA
tatctcgaaacttgtcaaac

SEQ ID NO: 5115 - DNA, 20 bp, synthetic construct
  source 1..20: mol_type = other DNA
ctatctcgaaacttgtcaaa

SEQ ID NO: 5116 - DNA, 20 bp, synthetic construct
  source 1..20: mol_type = other DNA
gctatctcgaaacttgtcaa

SEQ ID NO: 5117 - DNA, 20 bp, synthetic construct
  source 1..20: mol_type = other DNA
tgctatctcgaaacttgtca

SEQ ID NO: 5118 - DNA, 20 bp, synthetic construct
  source 1..20: mol_type = other DNA
ttgctatctcgaaacttgtc

SEQ ID NO: 5119 - DNA, 20 bp, synthetic construct
  source 1..20: mol_type = other DNA
tttgctatctcgaaacttgt

SEQ ID NO: 5120 - DNA, 20 bp, synthetic construct
  source 1..20: mol_type = other DNA
ttttgctatctcgaaacttg

SEQ ID NO: 5121 - DNA, 20 bp, synthetic construct
  source 1..20: mol_type = other DNA
attttgctatctcgaaactt

SEQ ID NO: 5122 - DNA, 20 bp, synthetic construct
  source 1..20: mol_type = other DNA
tattttgctatctcgaaact

SEQ ID NO: 5123 - DNA, 20 bp, synthetic construct
  source 1..20: mol_type = other DNA
atattttgctatctcgaaac

SEQ ID NO: 5124 - DNA, 20 bp, synthetic construct
  source 1..20: mol_type = other DNA
catattttgctatctcgaaa

SEQ ID NO: 5125 - DNA, 20 bp, synthetic construct
  source 1..20: mol_type = other DNA
gcatattttgctatctcgaa

SEQ ID NO: 5126 - DNA, 20 bp, synthetic construct
  source 1..20: mol_type = other DNA
agcatattttgctatctcga

SEQ ID NO: 5127 - DNA, 20 bp, synthetic construct
  source 1..20: mol_type = other DNA
aagcatattttgctatctcg

SEQ ID NO: 5128 - DNA, 20 bp, synthetic construct
  source 1..20: mol_type = other DNA
caagcatattttgctatctc

SEQ ID NO: 5129 - DNA, 20 bp, synthetic construct
  source 1..20: mol_type = other DNA
tcaagcatattttgctatct

SEQ ID NO: 5130 - DNA, 20 bp, synthetic construct
  source 1..20: mol_type = other DNA
ttcaagcatattttgctatc

SEQ ID NO: 5131 - DNA, 20 bp, synthetic construct
  source 1..20: mol_type = other DNA
tttcaagcatattttgctat

SEQ ID NO: 5132 - DNA, 20 bp, synthetic construct
  source 1..20: mol_type = other DNA
ctttcaagcatattttgcta

SEQ ID NO: 5133 - DNA, 20 bp, synthetic construct
  source 1..20: mol_type = other DNA
actttcaagcatattttgct

SEQ ID NO: 5134 - DNA, 20 bp, synthetic construct
  source 1..20: mol_type = other DNA
gactttcaagcatattttgc

SEQ ID NO: 5135 - DNA, 20 bp, synthetic construct
  source 1..20: mol_type = other DNA
agactttcaagcatattttg

SEQ ID NO: 5136 - DNA, 20 bp, synthetic construct
  source 1..20: mol_type = other DNA
cagactttcaagcatatttt

SEQ ID NO: 5137 - DNA, 20 bp, synthetic construct
  source 1..20: mol_type = other DNA
ccagactttcaagcatattt

SEQ ID NO: 5138 - DNA, 20 bp, synthetic construct
  source 1..20: mol_type = other DNA
tccagactttcaagcatatt

SEQ ID NO: 5139 - DNA, 20 bp, synthetic construct
  source 1..20: mol_type = other DNA
ttccagactttcaagcatat

SEQ ID NO: 5140 - DNA, 20 bp, synthetic construct
  source 1..20: mol_type = other DNA
tttccagactttcaagcata

SEQ ID NO: 5141 - DNA, 20 bp, synthetic construct
  source 1..20: mol_type = other DNA
atttccagactttcaagcat

SEQ ID NO: 5142 - DNA, 20 bp, synthetic construct
  source 1..20: mol_type = other DNA
aatttccagactttcaagca

SEQ ID NO: 5143 - DNA, 20 bp, synthetic construct
  source 1..20: mol_type = other DNA
gaatttccagactttcaagc

SEQ ID NO: 5144 - DNA, 20 bp, synthetic construct
  source 1..20: mol_type = other DNA
tgaatttccagactttcaag

SEQ ID NO: 5145 - DNA, 20 bp, synthetic construct
  source 1..20: mol_type = other DNA
gtgaatttccagactttcaa

SEQ ID NO: 5146 - DNA, 20 bp, synthetic construct
  source 1..20: mol_type = other DNA
tgtgaatttccagactttca

SEQ ID NO: 5147 - DNA, 20 bp, synthetic construct
  source 1..20: mol_type = other DNA
atgtgaatttccagactttc

SEQ ID NO: 5148 - DNA, 20 bp, synthetic construct
  source 1..20: mol_type = other DNA
gatgtgaatttccagacttt

SEQ ID NO: 5149 - DNA, 20 bp, synthetic construct
  source 1..20: mol_type = other DNA
agatgtgaatttccagactt

SEQ ID NO: 5150 - DNA, 20 bp, synthetic construct
  source 1..20: mol_type = other DNA
cagatgtgaatttccagact

SEQ ID NO: 5151 - DNA, 20 bp, synthetic construct
  source 1..20: mol_type = other DNA
gcagatgtgaatttccagac

SEQ ID NO: 5152 - DNA, 20 bp, synthetic construct
  source 1..20: mol_type = other DNA
agcagatgtgaatttccaga

SEQ ID NO: 5153 - DNA, 20 bp, synthetic construct
  source 1..20: mol_type = other DNA
aagcagatgtgaatttccag

SEQ ID NO: 5154 - DNA, 20 bp, synthetic construct
  source 1..20: mol_type = other DNA
aaagcagatgtgaatttcca

SEQ ID NO: 5155 - DNA, 20 bp, synthetic construct
  source 1..20: mol_type = other DNA
taaagcagatgtgaatttcc

SEQ ID NO: 5156 - DNA, 20 bp, synthetic construct
  source 1..20: mol_type = other DNA
ttaaagcagatgtgaatttc

SEQ ID NO: 5157 - DNA, 20 bp, synthetic construct
  source 1..20: mol_type = other DNA
cttaaagcagatgtgaattt

SEQ ID NO: 5158 - DNA, 20 bp, synthetic construct
  source 1..20: mol_type = other DNA
tcttaaagcagatgtgaatt

SEQ ID NO: 5159 - DNA, 20 bp, synthetic construct
  source 1..20: mol_type = other DNA
ttcttaaagcagatgtgaat

SEQ ID NO: 5160 - DNA, 20 bp, synthetic construct
  source 1..20: mol_type = other DNA
tttcttaaagcagatgtgaa

SEQ ID NO: 5161 - DNA, 20 bp, synthetic construct
  source 1..20: mol_type = other DNA
gtttcttaaagcagatgtga

SEQ ID NO: 5162 - DNA, 20 bp, synthetic construct
  source 1..20: mol_type = other DNA
tgtttcttaaagcagatgtg

SEQ ID NO: 5163 - DNA, 20 bp, synthetic construct
  source 1..20: mol_type = other DNA
atgtttcttaaagcagatgt

SEQ ID NO: 5164 - DNA, 20 bp, synthetic construct
  source 1..20: mol_type = other DNA
aatgtttcttaaagcagatg

SEQ ID NO: 5165 - DNA, 20 bp, synthetic construct
  source 1..20: mol_type = other DNA
aaatgtttcttaaagcagat

SEQ ID NO: 5166 - DNA, 20 bp, synthetic construct
  source 1..20: mol_type = other DNA
gaaatgtttcttaaagcaga

SEQ ID NO: 5167 - DNA, 20 bp, synthetic construct
  source 1..20: mol_type = other DNA
tgaaatgtttcttaaagcag

SEQ ID NO: 5168 - DNA, 20 bp, synthetic construct
  source 1..20: mol_type = other DNA
atgaaatgtttcttaaagca

SEQ ID NO: 5169 - DNA, 20 bp, synthetic construct
  source 1..20: mol_type = other DNA
tatgaaatgtttcttaaagc

SEQ ID NO: 5170 - DNA, 20 bp, synthetic construct
  source 1..20: mol_type = other DNA
ttatgaaatgtttcttaaag

SEQ ID NO: 5171 - DNA, 20 bp, synthetic construct
  source 1..20: mol_type = other DNA
attatgaaatgtttcttaaa

SEQ ID NO: 5172 - DNA, 20 bp, synthetic construct
  source 1..20: mol_type = other DNA
aattatgaaatgtttcttaa

SEQ ID NO: 5173 - DNA, 20 bp, synthetic construct
  source 1..20: mol_type = other DNA
aaattatgaaatgtttctta

SEQ ID NO: 5174 - DNA, 20 bp, synthetic construct
  source 1..20: mol_type = other DNA
caaattatgaaatgtttctt

SEQ ID NO: 5175 - DNA, 20 bp, synthetic construct
  source 1..20: mol_type = other DNA
tcaaattatgaaatgtttct

SEQ ID NO: 5176 - DNA, 20 bp, synthetic construct
  source 1..20: mol_type = other DNA
gtcaaattatgaaatgtttc

SEQ ID NO: 5177 - DNA, 20 bp, synthetic construct
  source 1..20: mol_type = other DNA
agtcaaattatgaaatgttt

SEQ ID NO: 5178 - DNA, 20 bp, synthetic construct
  source 1..20: mol_type = other DNA
aagtcaaattatgaaatgtt

SEQ ID NO: 5179 - DNA, 20 bp, synthetic construct
  source 1..20: mol_type = other DNA
aaagtcaaattatgaaatgt

SEQ ID NO: 5180 - DNA, 20 bp, synthetic construct
  source 1..20: mol_type = other DNA
caaagtcaaattatgaaatg

SEQ ID NO: 5181 - DNA, 20 bp, synthetic construct
  source 1..20: mol_type = other DNA
acaaagtcaaattatgaaat

SEQ ID NO: 5182 - DNA, 20 bp, synthetic construct
  source 1..20: mol_type = other DNA
cacaaagtcaaattatgaaa

SEQ ID NO: 5183 - DNA, 20 bp, synthetic construct
  source 1..20: mol_type = other DNA
acacaaagtcaaattatgaa

SEQ ID NO: 5184 - DNA, 20 bp, synthetic construct
  source 1..20: mol_type = other DNA
cacacaaagtcaaattatga

SEQ ID NO: 5185 - DNA, 20 bp, synthetic construct
  source 1..20: mol_type = other DNA
acacacaaagtcaaattatg

SEQ ID NO: 5186 - DNA, 20 bp, synthetic construct
  source 1..20: mol_type = other DNA
cacacacaaagtcaaattat

SEQ ID NO: 5187 - DNA, 20 bp, synthetic construct
  source 1..20: mol_type = other DNA
acacacacaaagtcaaatta

SEQ ID NO: 5188 - DNA, 20 bp, synthetic construct
  source 1..20: mol_type = other DNA
cacacacacaaagtcaaatt

SEQ ID NO: 5189 - DNA, 20 bp, synthetic construct
  source 1..20: mol_type = other DNA
acacacacacaaagtcaaat

SEQ ID NO: 5190 - DNA, 20 bp, synthetic construct
  source 1..20: mol_type = other DNA
cacacacacacaaagtcaaa

SEQ ID NO: 5191 - DNA, 20 bp, synthetic construct
  source 1..20: mol_type = other DNA
acacacacacacaaagtcaa

SEQ ID NO: 5192 - DNA, 20 bp, synthetic construct
  source 1..20: mol_type = other DNA
cacacacacacacaaagtca

SEQ ID NO: 5193 - DNA, 20 bp, synthetic construct
  source 1..20: mol_type = other DNA
acacacacacacacaaagtc

SEQ ID NO: 5194 - DNA, 20 bp, synthetic construct
  source 1..20: mol_type = other DNA
cacacacacacacacaaagt

SEQ ID NO: 5195 - DNA, 20 bp, synthetic construct
  source 1..20: mol_type = other DNA
tcacacacacacacacaaag

SEQ ID NO: 5196 - DNA, 20 bp, synthetic construct
  source 1..20: mol_type = other DNA
ttcacacacacacacacaaa

SEQ ID NO: 5197 - DNA, 20 bp, synthetic construct
  source 1..20: mol_type = other DNA
attcacacacacacacacaa

SEQ ID NO: 5198 - DNA, 20 bp, synthetic construct
  source 1..20: mol_type = other DNA
tattcacacacacacacaca

SEQ ID NO: 5199 - DNA, 20 bp, synthetic construct
  source 1..20: mol_type = other DNA
ctattcacacacacacacac

SEQ ID NO: 5200 - DNA, 20 bp, synthetic construct
  source 1..20: mol_type = other DNA
actattcacacacacacaca

SEQ ID NO: 5201 - DNA, 20 bp, synthetic construct
  source 1..20: mol_type = other DNA
aactattcacacacacacac

SEQ ID NO: 5202 - DNA, 20 bp, synthetic construct
  source 1..20: mol_type = other DNA
aaactattcacacacacaca

SEQ ID NO: 5203 - DNA, 20 bp, synthetic construct
  source 1..20: mol_type = other DNA
aaaactattcacacacacac

SEQ ID NO: 5204 - DNA, 20 bp, synthetic construct
  source 1..20: mol_type = other DNA
aaaaactattcacacacaca

SEQ ID NO: 5205 - DNA, 20 bp, synthetic construct
  source 1..20: mol_type = other DNA
gaaaaactattcacacacac

SEQ ID NO: 5206 - DNA, 20 bp, synthetic construct
  source 1..20: mol_type = other DNA
tgaaaaactattcacacaca

SEQ ID NO: 5207 - DNA, 20 bp, synthetic construct
  source 1..20: mol_type = other DNA
atgaaaaactattcacacac

SEQ ID NO: 5208 - DNA, 20 bp, synthetic construct
  source 1..20: mol_type = other DNA
catgaaaaactattcacaca

SEQ ID NO: 5209 - DNA, 20 bp, synthetic construct
  source 1..20: mol_type = other DNA
tcatgaaaaactattcacac

SEQ ID NO: 5210 - DNA, 20 bp, synthetic construct
  source 1..20: mol_type = other DNA
gtcatgaaaaactattcaca

SEQ ID NO: 5211 - DNA, 20 bp, synthetic construct
  source 1..20: mol_type = other DNA
agtcatgaaaaactattcac

SEQ ID NO: 5212 - DNA, 20 bp, synthetic construct
  source 1..20: mol_type = other DNA
aagtcatgaaaaactattca

SEQ ID NO: 5213 - DNA, 20 bp, synthetic construct
  source 1..20: mol_type = other DNA
aaagtcatgaaaaactattc

SEQ ID NO: 5214 - DNA, 20 bp, synthetic construct
  source 1..20: mol_type = other DNA
gaaagtcatgaaaaactatt

SEQ ID NO: 5215 - DNA, 20 bp, synthetic construct
  source 1..20: mol_type = other DNA
tgaaagtcatgaaaaactat

SEQ ID NO: 5216 - DNA, 20 bp, synthetic construct
  source 1..20: mol_type = other DNA
ctgaaagtcatgaaaaacta

SEQ ID NO: 5217 - DNA, 20 bp, synthetic construct
  source 1..20: mol_type = other DNA
tctgaaagtcatgaaaaact

SEQ ID NO: 5218 - DNA, 20 bp, synthetic construct
  source 1..20: mol_type = other DNA
ttctgaaagtcatgaaaaac

SEQ ID NO: 5219 - DNA, 20 bp, synthetic construct
  source 1..20: mol_type = other DNA
cttctgaaagtcatgaaaaa

SEQ ID NO: 5220 - DNA, 20 bp, synthetic construct
  source 1..20: mol_type = other DNA
acttctgaaagtcatgaaaa

SEQ ID NO: 5221 - DNA, 20 bp, synthetic construct
  source 1..20: mol_type = other DNA
cacttctgaaagtcatgaaa

SEQ ID NO: 5222 - DNA, 20 bp, synthetic construct
  source 1..20: mol_type = other DNA
tcacttctgaaagtcatgaa

SEQ ID NO: 5223 - DNA, 20 bp, synthetic construct
  source 1..20: mol_type = other DNA
atcacttctgaaagtcatga

SEQ ID NO: 5224 - DNA, 20 bp, synthetic construct
  source 1..20: mol_type = other DNA
aatcacttctgaaagtcatg

SEQ ID NO: 5225 - DNA, 20 bp, synthetic construct
  source 1..20: mol_type = other DNA
aaatcacttctgaaagtcat

SEQ ID NO: 5226 - DNA, 20 bp, synthetic construct
  source 1..20: mol_type = other DNA
taaatcacttctgaaagtca

SEQ ID NO: 5227 - DNA, 20 bp, synthetic construct
  source 1..20: mol_type = other DNA
ataaatcacttctgaaagtc

SEQ ID NO: 5228 - DNA, 20 bp, synthetic construct
  source 1..20: mol_type = other DNA
aataaatcacttctgaaagt

SEQ ID NO: 5229 - DNA, 20 bp, synthetic construct
  source 1..20: mol_type = other DNA
aaataaatcacttctgaaag

SEQ ID NO: 5230 - DNA, 20 bp, synthetic construct
  source 1..20: mol_type = other DNA
aaaataaatcacttctgaaa

SEQ ID NO: 5231 - DNA, 20 bp, synthetic construct
  source 1..20: mol_type = other DNA
caaaataaatcacttctgaa

SEQ ID NO: 5232 - DNA, 20 bp, synthetic construct
  source 1..20: mol_type = other DNA
acaaaataaatcacttctga

SEQ ID NO: 5233 - DNA, 20 bp, synthetic construct
  source 1..20: mol_type = other DNA
aacaaaataaatcacttctg

SEQ ID NO: 5234 - DNA, 20 bp, synthetic construct
  source 1..20: mol_type = other DNA
gaacaaaataaatcacttct

SEQ ID NO: 5235 - DNA, 20 bp, synthetic construct
  source 1..20: mol_type = other DNA
agaacaaaataaatcacttc

SEQ ID NO: 5236 - DNA, 20 bp, synthetic construct
  source 1..20: mol_type = other DNA
aagaacaaaataaatcactt

SEQ ID NO: 5237 - DNA, 20 bp, synthetic construct
  source 1..20: mol_type = other DNA
aaagaacaaaataaatcact

SEQ ID NO: 5238 - DNA, 20 bp, synthetic construct
  source 1..20: mol_type = other DNA
caaagaacaaaataaatcac

SEQ ID NO: 5239 - DNA, 20 bp, synthetic construct
  source 1..20: mol_type = other DNA
acaaagaacaaaataaatca

SEQ ID NO: 5240 - DNA, 20 bp, synthetic construct
  source 1..20: mol_type = other DNA
aacaaagaacaaaataaatc

SEQ ID NO: 5241 - DNA, 20 bp, synthetic construct
  source 1..20: mol_type = other DNA
taacaaagaacaaaataaat

SEQ ID NO: 5242 - DNA, 20 bp, synthetic construct
  source 1..20: mol_type = other DNA
ataacaaagaacaaaataaa

SEQ ID NO: 5243 - DNA, 20 bp, synthetic construct
  source 1..20: mol_type = other DNA
tataacaaagaacaaaataa

SEQ ID NO: 5244 - DNA, 20 bp, synthetic construct
  source 1..20: mol_type = other DNA
atataacaaagaacaaaata

SEQ ID NO: 5245 - DNA, 20 bp, synthetic construct
  source 1..20: mol_type = other DNA
tatataacaaagaacaaaat

SEQ ID NO: 5246 - DNA, 20 bp, synthetic construct
  source 1..20: mol_type = other DNA
atatataacaaagaacaaaa

SEQ ID NO: 5247 - DNA, 20 bp, synthetic construct
  source 1..20: mol_type = other DNA
tatatataacaaagaacaaa

SEQ ID NO: 5248 - DNA, 20 bp, synthetic construct
  source 1..20: mol_type = other DNA
atatatataacaaagaacaa

SEQ ID NO: 5249 - DNA, 20 bp, synthetic construct
  source 1..20: mol_type = other DNA
aatatatataacaaagaaca

SEQ ID NO: 5250 - DNA, 20 bp, synthetic construct
  source 1..20: mol_type = other DNA
aaatatatataacaaagaac

SEQ ID NO: 5251 - DNA, 20 bp, synthetic construct
  source 1..20: mol_type = other DNA
aaaatatatataacaaagaa

SEQ ID NO: 5252 - DNA, 20 bp, synthetic construct
  source 1..20: mol_type = other DNA
aaaaatatatataacaaaga

SEQ ID NO: 5253 - DNA, 20 bp, synthetic construct
  source 1..20: mol_type = other DNA
caaaaatatatataacaaag

SEQ ID NO: 5254 - DNA, 20 bp, synthetic construct
  source 1..20: mol_type = other DNA
tcaaaaatatatataacaaa

SEQ ID NO: 5255 - DNA, 20 bp, synthetic construct
  source 1..20: mol_type = other DNA
ttcaaaaatatatataacaa

SEQ ID NO: 5256 - DNA, 20 bp, synthetic construct
  source 1..20: mol_type = other DNA
cttcaaaaatatatataaca

SEQ ID NO: 5257 - DNA, 20 bp, synthetic construct
  source 1..20: mol_type = other DNA
ccttcaaaaatatatataac

SEQ ID NO: 5258 - DNA, 20 bp, synthetic construct
  source 1..20: mol_type = other DNA
accttcaaaaatatatataa

SEQ ID NO: 5259 - DNA, 20 bp, synthetic construct
  source 1..20: mol_type = other DNA
caccttcaaaaatatatata

SEQ ID NO: 5260 - DNA, 20 bp, synthetic construct
  source 1..20: mol_type = other DNA
ccaccttcaaaaatatatat

SEQ ID NO: 5261 - DNA, 20 bp, synthetic construct
  source 1..20: mol_type = other DNA
gccaccttcaaaaatatata

SEQ ID NO: 5262 - DNA, 20 bp, synthetic construct
  source 1..20: mol_type = other DNA
agccaccttcaaaaatatat

SEQ ID NO: 5263 - DNA, 20 bp, synthetic construct
  source 1..20: mol_type = other DNA
cagccaccttcaaaaatata

SEQ ID NO: 5264 - DNA, 20 bp, synthetic construct
  source 1..20: mol_type = other DNA
acagccaccttcaaaaatat

SEQ ID NO: 5265 - DNA, 20 bp, synthetic construct
  source 1..20: mol_type = other DNA
aacagccaccttcaaaaata

SEQ ID NO: 5266 - DNA, 20 bp, synthetic construct
  source 1..20: mol_type = other DNA
aaacagccaccttcaaaaat

SEQ ID NO: 5267 - DNA, 20 bp, synthetic construct
  source 1..20: mol_type = other DNA
aaaacagccaccttcaaaaa

SEQ ID NO: 5268 - DNA, 20 bp, synthetic construct
  source 1..20: mol_type = other DNA
taaaacagccaccttcaaaa

SEQ ID NO: 5269 - DNA, 20 bp, synthetic construct
  source 1..20: mol_type = other DNA
ctaaaacagccaccttcaaa

SEQ ID NO: 5270 - DNA, 20 bp, synthetic construct
  source 1..20: mol_type = other DNA
cctaaaacagccaccttcaa

SEQ ID NO: 5271 - DNA, 20 bp, synthetic construct
  source 1..20: mol_type = other DNA
tcctaaaacagccaccttca

SEQ ID NO: 5272 - DNA, 20 bp, synthetic construct
  source 1..20: mol_type = other DNA
ttcctaaaacagccaccttc

SEQ ID NO: 5273 - DNA, 20 bp, synthetic construct
  source 1..20: mol_type = other DNA
tttcctaaaacagccacctt

SEQ ID NO: 5274 - DNA, 20 bp, synthetic construct
  source 1..20: mol_type = other DNA
ctttcctaaaacagccacct

SEQ ID NO: 5275 - DNA, 20 bp, synthetic construct
  source 1..20: mol_type = other DNA
tctttcctaaaacagccacc

SEQ ID NO: 5276 - DNA, 20 bp, synthetic construct
  source 1..20: mol_type = other DNA
atctttcctaaaacagccac

SEQ ID NO: 5277 - DNA, 20 bp, synthetic construct
  source 1..20: mol_type = other DNA
tatctttcctaaaacagcca

SEQ ID NO: 5278 - DNA, 20 bp, synthetic construct
  source 1..20: mol_type = other DNA
ttatctttcctaaaacagcc

SEQ ID NO: 5279 - DNA, 20 bp, synthetic construct
  source 1..20: mol_type = other DNA
attatctttcctaaaacagc

SEQ ID NO: 5280 - DNA, 20 bp, synthetic construct
  source 1..20: mol_type = other DNA
cattatctttcctaaaacag

SEQ ID NO: 5281 - DNA, 20 bp, synthetic construct
  source 1..20: mol_type = other DNA
acattatctttcctaaaaca

SEQ ID NO: 5282 - DNA, 20 bp, synthetic construct
  source 1..20: mol_type = other DNA
tacattatctttcctaaaac

SEQ ID NO: 5283 - DNA, 20 bp, synthetic construct
  source 1..20: mol_type = other DNA
ttacattatctttcctaaaa

SEQ ID NO: 5284 - DNA, 20 bp, synthetic construct
  source 1..20: mol_type = other DNA
attacattatctttcctaaa

SEQ ID NO: 5285 - DNA, 20 bp, synthetic construct
  source 1..20: mol_type = other DNA
gattacattatctttcctaa

SEQ ID NO: 5286 - DNA, 20 bp, synthetic construct
  source 1..20: mol_type = other DNA
tgattacattatctttccta

SEQ ID NO: 5287 - DNA, 20 bp, synthetic construct
  source 1..20: mol_type = other DNA
gtgattacattatctttcct

SEQ ID NO: 5288 - DNA, 20 bp, synthetic construct
  source 1..20: mol_type = other DNA
tgtgattacattatctttcc

SEQ ID NO: 5289 - DNA, 20 bp, synthetic construct
  source 1..20: mol_type = other DNA
ttgtgattacattatctttc

SEQ ID NO: 5290 - DNA, 20 bp, synthetic construct
  source 1..20: mol_type = other DNA
attgtgattacattatcttt

SEQ ID NO: 5291 - DNA, 20 bp, synthetic construct
  source 1..20: mol_type = other DNA
tattgtgattacattatctt

SEQ ID NO: 5292 - DNA, 20 bp, synthetic construct
  source 1..20: mol_type = other DNA
atattgtgattacattatct

SEQ ID NO: 5293 - DNA, 20 bp, synthetic construct
  source 1..20: mol_type = other DNA
aatattgtgattacattatc

SEQ ID NO: 5294 - DNA, 20 bp, synthetic construct
  source 1..20: mol_type = other DNA
taatattgtgattacattat

SEQ ID NO: 5295 - DNA, 20 bp, synthetic construct
  source 1..20: mol_type = other DNA
ctaatattgtgattacatta

SEQ ID NO: 5296 - DNA, 20 bp, synthetic construct
  source 1..20: mol_type = other DNA
tctaatattgtgattacatt

SEQ ID NO: 5297 - DNA, 20 bp, synthetic construct
  source 1..20: mol_type = other DNA
ttctaatattgtgattacat

SEQ ID NO: 5298 - DNA, 20 bp, synthetic construct
  source 1..20: mol_type = other DNA
gttctaatattgtgattaca

SEQ ID NO: 5299 - DNA, 20 bp, synthetic construct
  source 1..20: mol_type = other DNA
tgttctaatattgtgattac

SEQ ID NO: 5300 - DNA, 20 bp, synthetic construct
  source 1..20: mol_type = other DNA
atgttctaatattgtgatta

SEQ ID NO: 5301 - DNA, 20 bp, synthetic construct
  source 1..20: mol_type = other DNA
tatgttctaatattgtgatt

SEQ ID NO: 5302 - DNA, 20 bp, synthetic construct
  source 1..20: mol_type = other DNA
ttatgttctaatattgtgat

SEQ ID NO: 5303 - DNA, 20 bp, synthetic construct
  source 1..20: mol_type = other DNA
attatgttctaatattgtga

SEQ ID NO: 5304 - DNA, 20 bp, synthetic construct
  source 1..20: mol_type = other DNA
aattatgttctaatattgtg

SEQ ID NO: 5305 - DNA, 20 bp, synthetic construct
  source 1..20: mol_type = other DNA
aaattatgttctaatattgt

SEQ ID NO: 5306 - DNA, 20 bp, synthetic construct
  source 1..20: mol_type = other DNA
aaaattatgttctaatattg

SEQ ID NO: 5307 - DNA, 20 bp, synthetic construct
  source 1..20: mol_type = other DNA
taaaattatgttctaatatt

SEQ ID NO: 5308 - DNA, 20 bp, synthetic construct
  source 1..20: mol_type = other DNA
gtaaaattatgttctaatat

SEQ ID NO: 5309 - DNA, 20 bp, synthetic construct
  source 1..20: mol_type = other DNA
agtaaaattatgttctaata

SEQ ID NO: 5310 - DNA, 20 bp, synthetic construct
  source 1..20: mol_type = other DNA
cagtaaaattatgttctaat

SEQ ID NO: 5311 - DNA, 20 bp, synthetic construct
  source 1..20: mol_type = other DNA
acagtaaaattatgttctaa

SEQ ID NO: 5312 - DNA, 20 bp, synthetic construct
  source 1..20: mol_type = other DNA
tacagtaaaattatgttcta

SEQ ID NO: 5313 - DNA, 20 bp, synthetic construct
  source 1..20: mol_type = other DNA
ttacagtaaaattatgttct

SEQ ID NO: 5314 - DNA, 20 bp, synthetic construct
  source 1..20: mol_type = other DNA
attacagtaaaattatgttc

SEQ ID NO: 5315 - DNA, 20 bp, synthetic construct
  source 1..20: mol_type = other DNA
gattacagtaaaattatgtt

SEQ ID NO: 5316 - DNA, 20 bp, synthetic construct
  source 1..20: mol_type = other DNA
agattacagtaaaattatgt

SEQ ID NO: 5317 - DNA, 20 bp, synthetic construct
  source 1..20: mol_type = other DNA
tagattacagtaaaattatg

SEQ ID NO: 5318 - DNA, 20 bp, synthetic construct
  source 1..20: mol_type = other DNA
ttagattacagtaaaattat

SEQ ID NO: 5319 - DNA, 20 bp, synthetic construct
  source 1..20: mol_type = other DNA
attagattacagtaaaatta

SEQ ID NO: 5320 - DNA, 20 bp, synthetic construct
  source 1..20: mol_type = other DNA
aattagattacagtaaaatt

SEQ ID NO: 5321 - DNA, 20 bp, synthetic construct
  source 1..20: mol_type = other DNA
aaattagattacagtaaaat

SEQ ID NO: 5322 - DNA, 20 bp, synthetic construct
  source 1..20: mol_type = other DNA
aaaattagattacagtaaaa

SEQ ID NO: 5323 - DNA, 20 bp, synthetic construct
  source 1..20: mol_type = other DNA
caaaattagattacagtaaa

SEQ ID NO: 5324 - DNA, 20 bp, synthetic construct
  source 1..20: mol_type = other DNA
acaaaattagattacagtaa

SEQ ID NO: 5325 - DNA, 20 bp, synthetic construct
  source 1..20: mol_type = other DNA
cacaaaattagattacagta

SEQ ID NO: 5326 - DNA, 20 bp, synthetic construct
  source 1..20: mol_type = other DNA
acacaaaattagattacagt

SEQ ID NO: 5327 - DNA, 20 bp, synthetic construct
  source 1..20: mol_type = other DNA
cacacaaaattagattacag

SEQ ID NO: 5328 - DNA, 20 bp, synthetic construct
  source 1..20: mol_type = other DNA
acacacaaaattagattaca

SEQ ID NO: 5329 - DNA, 20 bp, synthetic construct
  source 1..20: mol_type = other DNA
cacacacaaaattagattac

SEQ ID NO: 5330 - DNA, 20 bp, synthetic construct
  source 1..20: mol_type = other DNA
acacacacaaaattagatta

SEQ ID NO: 5331 - DNA, 20 bp, synthetic construct
  source 1..20: mol_type = other DNA
cacacacacaaaattagatt

SEQ ID NO: 5332 - DNA, 20 bp, synthetic construct
  source 1..20: mol_type = other DNA
acacacacacaaaattagat

SEQ ID NO: 5333 - DNA, 20 bp, synthetic construct
  source 1..20: mol_type = other DNA
cacacacacacaaaattaga

SEQ ID NO: 5334 - DNA, 20 bp, synthetic construct
  source 1..20: mol_type = other DNA
acacacacacacaaaattag

SEQ ID NO: 5335 - DNA, 20 bp, synthetic construct
  source 1..20: mol_type = other DNA
cacacacacacacaaaatta

SEQ ID NO: 5336 - DNA, 20 bp, synthetic construct
  source 1..20: mol_type = other DNA
acacacacacacacaaaatt

SEQ ID NO: 5337 - DNA, 20 bp, synthetic construct
  source 1..20: mol_type = other DNA
cacacacacacacacaaaat

SEQ ID NO: 5338 - DNA, 20 bp, synthetic construct
  source 1..20: mol_type = other DNA
acacacacacacacacaaaa

SEQ ID NO: 5339 - DNA, 20 bp, synthetic construct
  source 1..20: mol_type = other DNA
cacacacacacacacacaaa

SEQ ID NO: 5340 - DNA, 20 bp, synthetic construct
  source 1..20: mol_type = other DNA
acacacacacacacacacaa

SEQ ID NO: 5341 - DNA, 20 bp, synthetic construct
  source 1..20: mol_type = other DNA
cacacacacacacacacaca

SEQ ID NO: 5342 - DNA, 20 bp, synthetic construct
  source 1..20: mol_type = other DNA
acacacacacacacacacac

SEQ ID NO: 5343 - DNA, 20 bp, synthetic construct
  source 1..20: mol_type = other DNA
cacacacacacacacacaca

SEQ ID NO: 5344 - DNA, 20 bp, synthetic construct
  source 1..20: mol_type = other DNA
acacacacacacacacacac

SEQ ID NO: 5345 - DNA, 20 bp, synthetic construct
  source 1..20: mol_type = other DNA
cacacacacacacacacaca

SEQ ID NO: 5346 - DNA, 20 bp, synthetic construct
  source 1..20: mol_type = other DNA
acacacacacacacacacac

SEQ ID NO: 5347 - DNA, 20 bp, synthetic construct
  source 1..20: mol_type = other DNA
cacacacacacacacacaca

SEQ ID NO: 5348 - DNA, 20 bp, synthetic construct
  source 1..20: mol_type = other DNA
acacacacacacacacacac

SEQ ID NO: 5349 - DNA, 20 bp, synthetic construct
  source 1..20: mol_type = other DNA
cacacacacacacacacaca

SEQ ID NO: 5350 - DNA, 20 bp, synthetic construct
  source 1..20: mol_type = other DNA
acacacacacacacacacac

SEQ ID NO: 5351 - DNA, 20 bp, synthetic construct
  source 1..20: mol_type = other DNA
cacacacacacacacacaca

SEQ ID NO: 5352 - DNA, 20 bp, synthetic construct
  source 1..20: mol_type = other DNA
acacacacacacacacacac

SEQ ID NO: 5353 - DNA, 20 bp, synthetic construct
  source 1..20: mol_type = other DNA
cacacacacacacacacaca

SEQ ID NO: 5354 - DNA, 20 bp, synthetic construct
  source 1..20: mol_type = other DNA
acacacacacacacacacac

SEQ ID NO: 5355 - DNA, 20 bp, synthetic construct
  source 1..20: mol_type = other DNA
cacacacacacacacacaca

SEQ ID NO: 5356 - DNA, 20 bp, synthetic construct
  source 1..20: mol_type = other DNA
acacacacacacacacacac

SEQ ID NO: 5357 - DNA, 20 bp, synthetic construct
  source 1..20: mol_type = other DNA
cacacacacacacacacaca

SEQ ID NO: 5358 - DNA, 20 bp, synthetic construct
  source 1..20: mol_type = other DNA
acacacacacacacacacac

SEQ ID NO: 5359 - DNA, 20 bp, synthetic construct
  source 1..20: mol_type = other DNA
cacacacacacacacacaca

SEQ ID NO: 5360 - DNA, 20 bp, synthetic construct
  source 1..20: mol_type = other DNA
acacacacacacacacacac

SEQ ID NO: 5361 - DNA, 20 bp, synthetic construct
  source 1..20: mol_type = other DNA
cacacacacacacacacaca

SEQ ID NO: 5362 - DNA, 20 bp, synthetic construct
  source 1..20: mol_type = other DNA
acacacacacacacacacac

SEQ ID NO: 5363 - DNA, 20 bp, synthetic construct
  source 1..20: mol_type = other DNA
aacacacacacacacacaca

SEQ ID NO: 5364 - DNA, 20 bp, synthetic construct
  source 1..20: mol_type = other DNA
aaacacacacacacacacac

SEQ ID NO: 5365 - DNA, 20 bp, synthetic construct
  source 1..20: mol_type = other DNA
aaaacacacacacacacaca

SEQ ID NO: 5366 - DNA, 20 bp, synthetic construct
  source 1..20: mol_type = other DNA
caaaacacacacacacacac

SEQ ID NO: 5367 - DNA, 20 bp, synthetic construct
  source 1..20: mol_type = other DNA
ccaaaacacacacacacaca

SEQ ID NO: 5368 - DNA, 20 bp, synthetic construct
  source 1..20: mol_type = other DNA
tccaaaacacacacacacac

SEQ ID NO: 5369 - DNA, 20 bp, synthetic construct
  source 1..20: mol_type = other DNA
atccaaaacacacacacaca

SEQ ID NO: 5370 - DNA, 20 bp, synthetic construct
  source 1..20: mol_type = other DNA
catccaaaacacacacacac

SEQ ID NO: 5371 - DNA, 20 bp, synthetic construct
  source 1..20: mol_type = other DNA
ccatccaaaacacacacaca

SEQ ID NO: 5372 - DNA, 20 bp, synthetic construct
  source 1..20: mol_type = other DNA
tccatccaaaacacacacac

SEQ ID NO: 5373 - DNA, 20 bp, synthetic construct
  source 1..20: mol_type = other DNA
ttccatccaaaacacacaca

SEQ ID NO: 5374 - DNA, 20 bp, synthetic construct
  source 1..20: mol_type = other DNA
attccatccaaaacacacac

SEQ ID NO: 5375 - DNA, 20 bp, synthetic construct
  source 1..20: mol_type = other DNA
gattccatccaaaacacaca

SEQ ID NO: 5376 - DNA, 20 bp, synthetic construct
  source 1..20: mol_type = other DNA
agattccatccaaaacacac

SEQ ID NO: 5377 - DNA, 20 bp, synthetic construct
  source 1..20: mol_type = other DNA
gagattccatccaaaacaca

SEQ ID NO: 5378 - DNA, 20 bp, synthetic construct
  source 1..20: mol_type = other DNA
tgagattccatccaaaacac

SEQ ID NO: 5379 - DNA, 20 bp, synthetic construct
  source 1..20: mol_type = other DNA
gtgagattccatccaaaaca

SEQ ID NO: 5380 - DNA, 20 bp, synthetic construct
  source 1..20: mol_type = other DNA
agtgagattccatccaaaac

SEQ ID NO: 5381 - DNA, 20 bp, synthetic construct
  source 1..20: mol_type = other DNA
gagtgagattccatccaaaa

SEQ ID NO: 5382 - DNA, 20 bp, synthetic construct
  source 1..20: mol_type = other DNA
agagtgagattccatccaaa

SEQ ID NO: 5383 - DNA, 20 bp, synthetic construct
  source 1..20: mol_type = other DNA
cagagtgagattccatccaa

SEQ ID NO: 5384 - DNA, 20 bp, synthetic construct
  source 1..20: mol_type = other DNA
acagagtgagattccatcca

SEQ ID NO: 5385 - DNA, 20 bp, synthetic construct
  source 1..20: mol_type = other DNA
gacagagtgagattccatcc

SEQ ID NO: 5386 - DNA, 20 bp, synthetic construct
  source 1..20: mol_type = other DNA
cgacagagtgagattccatc

SEQ ID NO: 5387 - DNA, 20 bp, synthetic construct
  source 1..20: mol_type = other DNA
gcgacagagtgagattccat

SEQ ID NO: 5388 - DNA, 20 bp, synthetic construct
  source 1..20: mol_type = other DNA
ggcgacagagtgagattcca

SEQ ID NO: 5389 - DNA, 20 bp, synthetic construct
  source 1..20: mol_type = other DNA
gggcgacagagtgagattcc

SEQ ID NO: 5390 - DNA, 20 bp, synthetic construct
  source 1..20: mol_type = other DNA
tgggcgacagagtgagattc

SEQ ID NO: 5391 - DNA, 20 bp, synthetic construct
  source 1..20: mol_type = other DNA
ctgggcgacagagtgagatt

SEQ ID NO: 5392 - DNA, 20 bp, synthetic construct
  source 1..20: mol_type = other DNA
cctgggcgacagagtgagat

SEQ ID NO: 5393 - DNA, 20 bp, synthetic construct
  source 1..20: mol_type = other DNA
gcctgggcgacagagtgaga

SEQ ID NO: 5394 - DNA, 20 bp, synthetic construct
  source 1..20: mol_type = other DNA
agcctgggcgacagagtgag

SEQ ID NO: 5395 - DNA, 20 bp, synthetic construct
  source 1..20: mol_type = other DNA
cagcctgggcgacagagtga

SEQ ID NO: 5396 - DNA, 20 bp, synthetic construct
  source 1..20: mol_type = other DNA
ccagcctgggcgacagagtg

SEQ ID NO: 5397 - DNA, 20 bp, synthetic construct
  source 1..20: mol_type = other DNA
tccagcctgggcgacagagt

SEQ ID NO: 5398 - DNA, 20 bp, synthetic construct
  source 1..20: mol_type = other DNA
ctccagcctgggcgacagag

SEQ ID NO: 5399 - DNA, 20 bp, synthetic construct
  source 1..20: mol_type = other DNA
actccagcctgggcgacaga

SEQ ID NO: 5400 - DNA, 20 bp, synthetic construct
  source 1..20: mol_type = other DNA
cactccagcctgggcgacag

SEQ ID NO: 5401 - DNA, 20 bp, synthetic construct
  source 1..20: mol_type = other DNA
gcactccagcctgggcgaca

SEQ ID NO: 5402 - DNA, 20 bp, synthetic construct
  source 1..20: mol_type = other DNA
tgcactccagcctgggcgac

SEQ ID NO: 5403 - DNA, 20 bp, synthetic construct
  source 1..20: mol_type = other DNA
ctgcactccagcctgggcga

SEQ ID NO: 5404 - DNA, 20 bp, synthetic construct
  source 1..20: mol_type = other DNA
actgcactccagcctgggcg

SEQ ID NO: 5405 - DNA, 20 bp, synthetic construct
  source 1..20: mol_type = other DNA
cactgcactccagcctgggc

SEQ ID NO: 5406 - DNA, 20 bp, synthetic construct
  source 1..20: mol_type = other DNA
ccactgcactccagcctggg

SEQ ID NO: 5407 - DNA, 20 bp, synthetic construct
  source 1..20: mol_type = other DNA
gccactgcactccagcctgg

SEQ ID NO: 5408 - DNA, 20 bp, synthetic construct
  source 1..20: mol_type = other DNA
ggccactgcactccagcctg

SEQ ID NO: 5409 - DNA, 20 bp, synthetic construct
  source 1..20: mol_type = other DNA
aggccactgcactccagcct

SEQ ID NO: 5410 - DNA, 20 bp, synthetic construct
  source 1..20: mol_type = other DNA
caggccactgcactccagcc

SEQ ID NO: 5411 - DNA, 20 bp, synthetic construct
  source 1..20: mol_type = other DNA
tcaggccactgcactccagc

SEQ ID NO: 5412 - DNA, 20 bp, synthetic construct
  source 1..20: mol_type = other DNA
atcaggccactgcactccag

SEQ ID NO: 5413 - DNA, 20 bp, synthetic construct
  source 1..20: mol_type = other DNA
gatcaggccactgcactcca

SEQ ID NO: 5414 - DNA, 20 bp, synthetic construct
  source 1..20: mol_type = other DNA
agatcaggccactgcactcc

SEQ ID NO: 5415 - DNA, 20 bp, synthetic construct
  source 1..20: mol_type = other DNA
gagatcaggccactgcactc

SEQ ID NO: 5416 - DNA, 20 bp, synthetic construct
  source 1..20: mol_type = other DNA
tgagatcaggccactgcact

SEQ ID NO: 5417 - DNA, 20 bp, synthetic construct
  source 1..20: mol_type = other DNA
ctgagatcaggccactgcac

SEQ ID NO: 5418 - DNA, 20 bp, synthetic construct
  source 1..20: mol_type = other DNA
gctgagatcaggccactgca

SEQ ID NO: 5419 - DNA, 20 bp, synthetic construct
  source 1..20: mol_type = other DNA
agctgagatcaggccactgc

SEQ ID NO: 5420 - DNA, 20 bp, synthetic construct
  source 1..20: mol_type = other DNA
aagctgagatcaggccactg

SEQ ID NO: 5421 - DNA, 20 bp, synthetic construct
  source 1..20: mol_type = other DNA
taagctgagatcaggccact

SEQ ID NO: 5422 - DNA, 20 bp, synthetic construct
  source 1..20: mol_type = other DNA
gtaagctgagatcaggccac

SEQ ID NO: 5423 - DNA, 20 bp, synthetic construct
  source 1..20: mol_type = other DNA
agtaagctgagatcaggcca

SEQ ID NO: 5424 - DNA, 20 bp, synthetic construct
  source 1..20: mol_type = other DNA
cagtaagctgagatcaggcc

SEQ ID NO: 5425 - DNA, 20 bp, synthetic construct
  source 1..20: mol_type = other DNA
gcagtaagctgagatcaggc

SEQ ID NO: 5426 - DNA, 20 bp, synthetic construct
  source 1..20: mol_type = other DNA
tgcagtaagctgagatcagg

SEQ ID NO: 5427 - DNA, 20 bp, synthetic construct
  source 1..20: mol_type = other DNA
ctgcagtaagctgagatcag

SEQ ID NO: 5428 - DNA, 20 bp, synthetic construct
  source 1..20: mol_type = other DNA
actgcagtaagctgagatca

SEQ ID NO: 5429 - DNA, 20 bp, synthetic construct
  source 1..20: mol_type = other DNA
gactgcagtaagctgagatc

SEQ ID NO: 5430 - DNA, 20 bp, synthetic construct
  source 1..20: mol_type = other DNA
agactgcagtaagctgagat

SEQ ID NO: 5431 - DNA, 20 bp, synthetic construct
  source 1..20: mol_type = other DNA
gagactgcagtaagctgaga

SEQ ID NO: 5432 - DNA, 20 bp, synthetic construct
  source 1..20: mol_type = other DNA
agagactgcagtaagctgag

SEQ ID NO: 5433 - DNA, 20 bp, synthetic construct
  source 1..20: mol_type = other DNA
cagagactgcagtaagctga

SEQ ID NO: 5434 - DNA, 20 bp, synthetic construct
  source 1..20: mol_type = other DNA
acagagactgcagtaagctg

SEQ ID NO: 5435 - DNA, 20 bp, synthetic construct
  source 1..20: mol_type = other DNA
gacagagactgcagtaagct

SEQ ID NO: 5436 - DNA, 20 bp, synthetic construct
  source 1..20: mol_type = other DNA
agacagagactgcagtaagc

SEQ ID NO: 5437 - DNA, 20 bp, synthetic construct
  source 1..20: mol_type = other DNA
gagacagagactgcagtaag

SEQ ID NO: 5438 - DNA, 20 bp, synthetic construct
  source 1..20: mol_type = other DNA
ggagacagagactgcagtaa

SEQ ID NO: 5439 - DNA, 20 bp, synthetic construct
  source 1..20: mol_type = other DNA
aggagacagagactgcagta

SEQ ID NO: 5440 - DNA, 20 bp, synthetic construct
  source 1..20: mol_type = other DNA
caggagacagagactgcagt

SEQ ID NO: 5441 - DNA, 20 bp, synthetic construct
  source 1..20: mol_type = other DNA
ccaggagacagagactgcag

SEQ ID NO: 5442 - DNA, 20 bp, synthetic construct
  source 1..20: mol_type = other DNA
cccaggagacagagactgca

SEQ ID NO: 5443 - DNA, 20 bp, synthetic construct
  source 1..20: mol_type = other DNA
acccaggagacagagactgc

SEQ ID NO: 5444 - DNA, 20 bp, synthetic construct
  source 1..20: mol_type = other DNA
aacccaggagacagagactg

SEQ ID NO: 5445 - DNA, 20 bp, synthetic construct
  source 1..20: mol_type = other DNA
gaacccaggagacagagact

SEQ ID NO: 5446 - DNA, 20 bp, synthetic construct
  source 1..20: mol_type = other DNA
tgaacccaggagacagagac

SEQ ID NO: 5447 - DNA, 20 bp, synthetic construct
  source 1..20: mol_type = other DNA
atgaacccaggagacagaga

SEQ ID NO: 5448 - DNA, 20 bp, synthetic construct
  source 1..20: mol_type = other DNA
aatgaacccaggagacagag

SEQ ID NO: 5449 - DNA, 20 bp, synthetic construct
  source 1..20: mol_type = other DNA
aaatgaacccaggagacaga

SEQ ID NO: 5450 - DNA, 20 bp, synthetic construct
  source 1..20: mol_type = other DNA
taaatgaacccaggagacag

SEQ ID NO: 5451 - DNA, 20 bp, synthetic construct
  source 1..20: mol_type = other DNA
ttaaatgaacccaggagaca

SEQ ID NO: 5452 - DNA, 20 bp, synthetic construct
  source 1..20: mol_type = other DNA
cttaaatgaacccaggagac

SEQ ID NO: 5453 - DNA, 20 bp, synthetic construct
  source 1..20: mol_type = other DNA
acttaaatgaacccaggaga

SEQ ID NO: 5454 - DNA, 20 bp, synthetic construct
  source 1..20: mol_type = other DNA
cacttaaatgaacccaggag

SEQ ID NO: 5455 - DNA, 20 bp, synthetic construct
  source 1..20: mol_type = other DNA
tcacttaaatgaacccagga

SEQ ID NO: 5456 - DNA, 20 bp, synthetic construct
  source 1..20: mol_type = other DNA
atcacttaaatgaacccagg

SEQ ID NO: 5457 - DNA, 20 bp, synthetic construct
  source 1..20: mol_type = other DNA
aatcacttaaatgaacccag

SEQ ID NO: 5458 - DNA, 20 bp, synthetic construct
  source 1..20: mol_type = other DNA
gaatcacttaaatgaaccca

SEQ ID NO: 5459 - DNA, 20 bp, synthetic construct
  source 1..20: mol_type = other DNA
agaatcacttaaatgaaccc

SEQ ID NO: 5460 - DNA, 20 bp, synthetic construct
  source 1..20: mol_type = other DNA
gagaatcacttaaatgaacc

SEQ ID NO: 5461 - DNA, 20 bp, synthetic construct
  source 1..20: mol_type = other DNA
ggagaatcacttaaatgaac

SEQ ID NO: 5462 - DNA, 20 bp, synthetic construct
  source 1..20: mol_type = other DNA
tggagaatcacttaaatgaa

SEQ ID NO: 5463 - DNA, 20 bp, synthetic construct
  source 1..20: mol_type = other DNA
ctggagaatcacttaaatga

SEQ ID NO: 5464 - DNA, 20 bp, synthetic construct
  source 1..20: mol_type = other DNA
gctggagaatcacttaaatg

SEQ ID NO: 5465 - DNA, 20 bp, synthetic construct
  source 1..20: mol_type = other DNA
ggctggagaatcacttaaat

SEQ ID NO: 5466 - DNA, 20 bp, synthetic construct
  source 1..20: mol_type = other DNA
aggctggagaatcacttaaa

SEQ ID NO: 5467 - DNA, 20 bp, synthetic construct
  source 1..20: mol_type = other DNA
gaggctggagaatcacttaa

SEQ ID NO: 5468 - DNA, 20 bp, synthetic construct
  source 1..20: mol_type = other DNA
tgaggctggagaatcactta

SEQ ID NO: 5469 - DNA, 20 bp, synthetic construct
  source 1..20: mol_type = other DNA
ctgaggctggagaatcactt

SEQ ID NO: 5470 - DNA, 20 bp, synthetic construct
  source 1..20: mol_type = other DNA
gctgaggctggagaatcact

SEQ ID NO: 5471 - DNA, 20 bp, synthetic construct
  source 1..20: mol_type = other DNA
ggctgaggctggagaatcac

SEQ ID NO: 5472 - DNA, 20 bp, synthetic construct
  source 1..20: mol_type = other DNA
aggctgaggctggagaatca

SEQ ID NO: 5473 - DNA, 20 bp, synthetic construct
  source 1..20: mol_type = other DNA
gaggctgaggctggagaatc

SEQ ID NO: 5474 - DNA, 20 bp, synthetic construct
  source 1..20: mol_type = other DNA
ggaggctgaggctggagaat

SEQ ID NO: 5475 - DNA, 20 bp, synthetic construct
  source 1..20: mol_type = other DNA
gggaggctgaggctggagaa

SEQ ID NO: 5476 - DNA, 20 bp, synthetic construct
  source 1..20: mol_type = other DNA
ggggaggctgaggctggaga

SEQ ID NO: 5477 - DNA, 20 bp, synthetic construct
  source 1..20: mol_type = other DNA
tggggaggctgaggctggag

SEQ ID NO: 5478 - DNA, 20 bp, synthetic construct
  source 1..20: mol_type = other DNA
ctggggaggctgaggctgga

SEQ ID NO: 5479 - DNA, 20 bp, synthetic construct
  source 1..20: mol_type = other DNA
actggggaggctgaggctgg

SEQ ID NO: 5480 - DNA, 20 bp, synthetic construct
  source 1..20: mol_type = other DNA
tactggggaggctgaggctg

SEQ ID NO: 5481 - DNA, 20 bp, synthetic construct
  source 1..20: mol_type = other DNA
ctactggggaggctgaggct

SEQ ID NO: 5482 - DNA, 20 bp, synthetic construct
  source 1..20: mol_type = other DNA
gctactggggaggctgaggc

SEQ ID NO: 5483 - DNA, 20 bp, synthetic construct
  source 1..20: mol_type = other DNA
agctactggggaggctgagg

SEQ ID NO: 5484 - DNA, 20 bp, synthetic construct
  source 1..20: mol_type = other DNA
cagctactggggaggctgag

SEQ ID NO: 5485 - DNA, 20 bp, synthetic construct
  source 1..20: mol_type = other DNA
ccagctactggggaggctga

SEQ ID NO: 5486 - DNA, 20 bp, synthetic construct
  source 1..20: mol_type = other DNA
cccagctactggggaggctg

SEQ ID NO: 5487 - DNA, 20 bp, synthetic construct
  source 1..20: mol_type = other DNA
tcccagctactggggaggct

SEQ ID NO: 5488 - DNA, 20 bp, synthetic construct
  source 1..20: mol_type = other DNA
atcccagctactggggaggc

SEQ ID NO: 5489 - DNA, 20 bp, synthetic construct
  source 1..20: mol_type = other DNA
aatcccagctactggggagg

SEQ ID NO: 5490 - DNA, 20 bp, synthetic construct
  source 1..20: mol_type = other DNA
taatcccagctactggggag

SEQ ID NO: 5491 - DNA, 20 bp, synthetic construct
  source 1..20: mol_type = other DNA
gtaatcccagctactgggga

SEQ ID NO: 5492 - DNA, 20 bp, synthetic construct
  source 1..20: mol_type = other DNA
tgtaatcccagctactgggg

SEQ ID NO: 5493 - DNA, 20 bp, synthetic construct
  source 1..20: mol_type = other DNA
ctgtaatcccagctactggg

SEQ ID NO: 5494 - DNA, 20 bp, synthetic construct
  source 1..20: mol_type = other DNA
cctgtaatcccagctactgg

SEQ ID NO: 5495 - DNA, 20 bp, synthetic construct
  source 1..20: mol_type = other DNA
acctgtaatcccagctactg

SEQ ID NO: 5496 - DNA, 20 bp, synthetic construct
  source 1..20: mol_type = other DNA
aacctgtaatcccagctact

SEQ ID NO: 5497 - DNA, 20 bp, synthetic construct
  source 1..20: mol_type = other DNA
gaacctgtaatcccagctac

SEQ ID NO: 5498 - DNA, 20 bp, synthetic construct
  source 1..20: mol_type = other DNA
cgaacctgtaatcccagcta

SEQ ID NO: 5499 - DNA, 20 bp, synthetic construct
  source 1..20: mol_type = other DNA
acgaacctgtaatcccagct

SEQ ID NO: 5500 - DNA, 20 bp, synthetic construct
  source 1..20: mol_type = other DNA
cacgaacctgtaatcccagc

SEQ ID NO: 5501 - DNA, 20 bp, synthetic construct
  source 1..20: mol_type = other DNA
gcacgaacctgtaatcccag

SEQ ID NO: 5502 - DNA, 20 bp, synthetic construct
  source 1..20: mol_type = other DNA
agcacgaacctgtaatccca

SEQ ID NO: 5503 - DNA, 20 bp, synthetic construct
  source 1..20: mol_type = other DNA
tagcacgaacctgtaatccc

SEQ ID NO: 5504 - DNA, 20 bp, synthetic construct
  source 1..20: mol_type = other DNA
gtagcacgaacctgtaatcc

SEQ ID NO: 5505 - DNA, 20 bp, synthetic construct
  source 1..20: mol_type = other DNA
ggtagcacgaacctgtaatc

SEQ ID NO: 5506 - DNA, 20 bp, synthetic construct
  source 1..20: mol_type = other DNA
tggtagcacgaacctgtaat

SEQ ID NO: 5507 - DNA, 20 bp, synthetic construct
  source 1..20: mol_type = other DNA
gtggtagcacgaacctgtaa

SEQ ID NO: 5508 - DNA, 20 bp, synthetic construct
  source 1..20: mol_type = other DNA
tgtggtagcacgaacctgta

SEQ ID NO: 5509 - DNA, 20 bp, synthetic construct
  source 1..20: mol_type = other DNA
gtgtggtagcacgaacctgt

SEQ ID NO: 5510 - DNA, 20 bp, synthetic construct
  source 1..20: mol_type = other DNA
ggtgtggtagcacgaacctg

SEQ ID NO: 5511 - DNA, 20 bp, synthetic construct
  source 1..20: mol_type = other DNA
aggtgtggtagcacgaacct

SEQ ID NO: 5512 - DNA, 20 bp, synthetic construct
  source 1..20: mol_type = other DNA
caggtgtggtagcacgaacc

SEQ ID NO: 5513 - DNA, 20 bp, synthetic construct
  source 1..20: mol_type = other DNA
ccaggtgtggtagcacgaac

SEQ ID NO: 5514 - DNA, 20 bp, synthetic construct
  source 1..20: mol_type = other DNA
gccaggtgtggtagcacgaa

SEQ ID NO: 5515 - DNA, 20 bp, synthetic construct
  source 1..20: mol_type = other DNA
agccaggtgtggtagcacga

SEQ ID NO: 5516 - DNA, 20 bp, synthetic construct
  source 1..20: mol_type = other DNA
tagccaggtgtggtagcacg

SEQ ID NO: 5517 - DNA, 20 bp, synthetic construct
  source 1..20: mol_type = other DNA
ttagccaggtgtggtagcac

SEQ ID NO: 5518 - DNA, 20 bp, synthetic construct
  source 1..20: mol_type = other DNA
attagccaggtgtggtagca

SEQ ID NO: 5519 - DNA, 20 bp, synthetic construct
  source 1..20: mol_type = other DNA
aattagccaggtgtggtagc

SEQ ID NO: 5520 - DNA, 20 bp, synthetic construct
  source 1..20: mol_type = other DNA
aaattagccaggtgtggtag

SEQ ID NO: 5521 - DNA, 20 bp, synthetic construct
  source 1..20: mol_type = other DNA
aaaattagccaggtgtggta

SEQ ID NO: 5522 - DNA, 20 bp, synthetic construct
  source 1..20: mol_type = other DNA
aaaaattagccaggtgtggt

SEQ ID NO: 5523 - DNA, 20 bp, synthetic construct
  source 1..20: mol_type = other DNA
aaaaaattagccaggtgtgg

SEQ ID NO: 5524 - DNA, 20 bp, synthetic construct
  source 1..20: mol_type = other DNA
aaaaaaattagccaggtgtg

SEQ ID NO: 5525 - DNA, 20 bp, synthetic construct
  source 1..20: mol_type = other DNA
caaaaaaattagccaggtgt

SEQ ID NO: 5526 - DNA, 20 bp, synthetic construct
  source 1..20: mol_type = other DNA
acaaaaaaattagccaggtg

SEQ ID NO: 5527 - DNA, 20 bp, synthetic construct
  source 1..20: mol_type = other DNA
tacaaaaaaattagccaggt

SEQ ID NO: 5528 - DNA, 20 bp, synthetic construct
  source 1..20: mol_type = other DNA
atacaaaaaaattagccagg

SEQ ID NO: 5529 - DNA, 20 bp, synthetic construct
  source 1..20: mol_type = other DNA
aatacaaaaaaattagccag

SEQ ID NO: 5530 - DNA, 20 bp, synthetic construct
  source 1..20: mol_type = other DNA
aaatacaaaaaaattagcca

SEQ ID NO: 5531 - DNA, 20 bp, synthetic construct
  source 1..20: mol_type = other DNA
aaaatacaaaaaaattagcc

SEQ ID NO: 5532 - DNA, 20 bp, synthetic construct
  source 1..20: mol_type = other DNA
aaaaatacaaaaaaattagc

SEQ ID NO: 5533 - DNA, 20 bp, synthetic construct
  source 1..20: mol_type = other DNA
taaaaatacaaaaaaattag

SEQ ID NO: 5534 - DNA, 20 bp, synthetic construct
  source 1..20: mol_type = other DNA
ctaaaaatacaaaaaaatta

SEQ ID NO: 5535 - DNA, 20 bp, synthetic construct
  source 1..20: mol_type = other DNA
actaaaaatacaaaaaaatt

SEQ ID NO: 5536 - DNA, 20 bp, synthetic construct
  source 1..20: mol_type = other DNA
cactaaaaatacaaaaaaat

SEQ ID NO: 5537 - DNA, 20 bp, synthetic construct
  source 1..20: mol_type = other DNA
tcactaaaaatacaaaaaaa

SEQ ID NO: 5538 - DNA, 20 bp, synthetic construct
  source 1..20: mol_type = other DNA
ctcactaaaaatacaaaaaa

SEQ ID NO: 5539 - DNA, 20 bp, synthetic construct
  source 1..20: mol_type = other DNA
cctcactaaaaatacaaaaa

SEQ ID NO: 5540 - DNA, 20 bp, synthetic construct
  source 1..20: mol_type = other DNA
tcctcactaaaaatacaaaa

SEQ ID NO: 5541 - DNA, 20 bp, synthetic construct
  source 1..20: mol_type = other DNA
gtcctcactaaaaatacaaa

SEQ ID NO: 5542 - DNA, 20 bp, synthetic construct
  source 1..20: mol_type = other DNA
cgtcctcactaaaaatacaa

SEQ ID NO: 5543 - DNA, 20 bp, synthetic construct
  source 1..20: mol_type = other DNA
ccgtcctcactaaaaataca

SEQ ID NO: 5544 - DNA, 20 bp, synthetic construct
  source 1..20: mol_type = other DNA
cccgtcctcactaaaaatac

SEQ ID NO: 5545 - DNA, 20 bp, synthetic construct
  source 1..20: mol_type = other DNA
tcccgtcctcactaaaaata

SEQ ID NO: 5546 - DNA, 20 bp, synthetic construct
  source 1..20: mol_type = other DNA
atcccgtcctcactaaaaat

SEQ ID NO: 5547 - DNA, 20 bp, synthetic construct
  source 1..20: mol_type = other DNA
aatcccgtcctcactaaaaa

SEQ ID NO: 5548 - DNA, 20 bp, synthetic construct
  source 1..20: mol_type = other DNA
aaatcccgtcctcactaaaa

SEQ ID NO: 5549 - DNA, 20 bp, synthetic construct
  source 1..20: mol_type = other DNA
aaaatcccgtcctcactaaa

SEQ ID NO: 5550 - DNA, 20 bp, synthetic construct
  source 1..20: mol_type = other DNA
caaaatcccgtcctcactaa

SEQ ID NO: 5551 - DNA, 20 bp, synthetic construct
  source 1..20: mol_type = other DNA
gcaaaatcccgtcctcacta

SEQ ID NO: 5552 - DNA, 20 bp, synthetic construct
  source 1..20: mol_type = other DNA
ggcaaaatcccgtcctcact

SEQ ID NO: 5553 - DNA, 20 bp, synthetic construct
  source 1..20: mol_type = other DNA
tggcaaaatcccgtcctcac

SEQ ID NO: 5554 - DNA, 20 bp, synthetic construct
  source 1..20: mol_type = other DNA
atggcaaaatcccgtcctca

SEQ ID NO: 5555 - DNA, 20 bp, synthetic construct
  source 1..20: mol_type = other DNA
catggcaaaatcccgtcctc

SEQ ID NO: 5556 - DNA, 20 bp, synthetic construct
  source 1..20: mol_type = other DNA
acatggcaaaatcccgtcct

SEQ ID NO: 5557 - DNA, 20 bp, synthetic construct
  source 1..20: mol_type = other DNA
aacatggcaaaatcccgtcc

SEQ ID NO: 5558 - DNA, 20 bp, synthetic construct
  source 1..20: mol_type = other DNA
caacatggcaaaatcccgtc

SEQ ID NO: 5559 - DNA, 20 bp, synthetic construct
  source 1..20: mol_type = other DNA
ccaacatggcaaaatcccgt

SEQ ID NO: 5560 - DNA, 20 bp, synthetic construct
  source 1..20: mol_type = other DNA
gccaacatggcaaaatcccg

SEQ ID NO: 5561 - DNA, 20 bp, synthetic construct
  source 1..20: mol_type = other DNA
ggccaacatggcaaaatccc

SEQ ID NO: 5562 - DNA, 20 bp, synthetic construct
  source 1..20: mol_type = other DNA
tggccaacatggcaaaatcc

SEQ ID NO: 5563 - DNA, 20 bp, synthetic construct
  source 1..20: mol_type = other DNA
ctggccaacatggcaaaatc

SEQ ID NO: 5564 - DNA, 20 bp, synthetic construct
  source 1..20: mol_type = other DNA
cctggccaacatggcaaaat

SEQ ID NO: 5565 - DNA, 20 bp, synthetic construct
  source 1..20: mol_type = other DNA
gcctggccaacatggcaaaa

SEQ ID NO: 5566 - DNA, 20 bp, synthetic construct
  source 1..20: mol_type = other DNA
agcctggccaacatggcaaa

SEQ ID NO: 5567 - DNA, 20 bp, synthetic construct
  source 1..20: mol_type = other DNA
cagcctggccaacatggcaa

SEQ ID NO: 5568 - DNA, 20 bp, synthetic construct
  source 1..20: mol_type = other DNA
ccagcctggccaacatggca

SEQ ID NO: 5569 - DNA, 20 bp, synthetic construct
  source 1..20: mol_type = other DNA
accagcctggccaacatggc

SEQ ID NO: 5570 - DNA, 20 bp, synthetic construct
  source 1..20: mol_type = other DNA
gaccagcctggccaacatgg

SEQ ID NO: 5571 - DNA, 20 bp, synthetic construct
  source 1..20: mol_type = other DNA
agaccagcctggccaacatg

SEQ ID NO: 5572 - DNA, 20 bp, synthetic construct
  source 1..20: mol_type = other DNA
gagaccagcctggccaacat

SEQ ID NO: 5573 - DNA, 20 bp, synthetic construct
  source 1..20: mol_type = other DNA
cgagaccagcctggccaaca

SEQ ID NO: 5574 - DNA, 20 bp, synthetic construct
  source 1..20: mol_type = other DNA
tcgagaccagcctggccaac

SEQ ID NO: 5575 - DNA, 20 bp, synthetic construct
  source 1..20: mol_type = other DNA
ttcgagaccagcctggccaa

SEQ ID NO: 5576 - DNA, 20 bp, synthetic construct
  source 1..20: mol_type = other DNA
gttcgagaccagcctggcca

SEQ ID NO: 5577 - DNA, 20 bp, synthetic construct
  source 1..20: mol_type = other DNA
agttcgagaccagcctggcc

SEQ ID NO: 5578 - DNA, 20 bp, synthetic construct
  source 1..20: mol_type = other DNA
gagttcgagaccagcctggc

SEQ ID NO: 5579 - DNA, 20 bp, synthetic construct
  source 1..20: mol_type = other DNA
ggagttcgagaccagcctgg

SEQ ID NO: 5580 - DNA, 20 bp, synthetic construct
  source 1..20: mol_type = other DNA
aggagttcgagaccagcctg

SEQ ID NO: 5581 - DNA, 20 bp, synthetic construct
  source 1..20: mol_type = other DNA
caggagttcgagaccagcct

SEQ ID NO: 5582 - DNA, 20 bp, synthetic construct
  source 1..20: mol_type = other DNA
tcaggagttcgagaccagcc

SEQ ID NO: 5583 - DNA, 20 bp, synthetic construct
  source 1..20: mol_type = other DNA
gtcaggagttcgagaccagc

SEQ ID NO: 5584 - DNA, 20 bp, synthetic construct
  source 1..20: mol_type = other DNA
ggtcaggagttcgagaccag

SEQ ID NO: 5585 - DNA, 20 bp, synthetic construct
  source 1..20: mol_type = other DNA
aggtcaggagttcgagacca

SEQ ID NO: 5586 - DNA, 20 bp, synthetic construct
  source 1..20: mol_type = other DNA
gaggtcaggagttcgagacc

SEQ ID NO: 5587 - DNA, 20 bp, synthetic construct
  source 1..20: mol_type = other DNA
tgaggtcaggagttcgagac

SEQ ID NO: 5588 - DNA, 20 bp, synthetic construct
  source 1..20: mol_type = other DNA
ttgaggtcaggagttcgaga

SEQ ID NO: 5589 - DNA, 20 bp, synthetic construct
  source 1..20: mol_type = other DNA
cttgaggtcaggagttcgag

SEQ ID NO: 5590 - DNA, 20 bp, synthetic construct
  source 1..20: mol_type = other DNA
acttgaggtcaggagttcga

SEQ ID NO: 5591 - DNA, 20 bp, synthetic construct
  source 1..20: mol_type = other DNA
cacttgaggtcaggagttcg

SEQ ID NO: 5592 - DNA, 20 bp, synthetic construct
  source 1..20: mol_type = other DNA
tcacttgaggtcaggagttc

SEQ ID NO: 5593 - DNA, 20 bp, synthetic construct
  source 1..20: mol_type = other DNA
atcacttgaggtcaggagtt

SEQ ID NO: 5594 - DNA, 20 bp, synthetic construct
  source 1..20: mol_type = other DNA
gatcacttgaggtcaggagt

SEQ ID NO: 5595 - DNA, 20 bp, synthetic construct
  source 1..20: mol_type = other DNA
ggatcacttgaggtcaggag

SEQ ID NO: 5596 - DNA, 20 bp, synthetic construct
  source 1..20: mol_type = other DNA
cggatcacttgaggtcagga

SEQ ID NO: 5597 - DNA, 20 bp, synthetic construct
  source 1..20: mol_type = other DNA
gcggatcacttgaggtcagg

SEQ ID NO: 5598 - DNA, 20 bp, synthetic construct
  source 1..20: mol_type = other DNA
ggcggatcacttgaggtcag

SEQ ID NO: 5599 - DNA, 20 bp, synthetic construct
  source 1..20: mol_type = other DNA
aggcggatcacttgaggtca

SEQ ID NO: 5600 - DNA, 20 bp, synthetic construct
  source 1..20: mol_type = other DNA
caggcggatcacttgaggtc

SEQ ID NO: 5601 - DNA, 20 bp, synthetic construct
  source 1..20: mol_type = other DNA
gcaggcggatcacttgaggt

SEQ ID NO: 5602 - DNA, 20 bp, synthetic construct
  source 1..20: mol_type = other DNA
ggcaggcggatcacttgagg

SEQ ID NO: 5603 - DNA, 20 bp, synthetic construct
  source 1..20: mol_type = other DNA
aggcaggcggatcacttgag

SEQ ID NO: 5604 - DNA, 20 bp, synthetic construct
  source 1..20: mol_type = other DNA
aaggcaggcggatcacttga

SEQ ID NO: 5605 - DNA, 20 bp, synthetic construct
  source 1..20: mol_type = other DNA
caaggcaggcggatcacttg

SEQ ID NO: 5606 - DNA, 20 bp, synthetic construct
  source 1..20: mol_type = other DNA
ccaaggcaggcggatcactt

SEQ ID NO: 5607 - DNA, 20 bp, synthetic construct
  source 1..20: mol_type = other DNA
gccaaggcaggcggatcact

SEQ ID NO: 5608 - DNA, 20 bp, synthetic construct
  source 1..20: mol_type = other DNA
ggccaaggcaggcggatcac

SEQ ID NO: 5609 - DNA, 20 bp, synthetic construct
  source 1..20: mol_type = other DNA
aggccaaggcaggcggatca

SEQ ID NO: 5610 - DNA, 20 bp, synthetic construct
  source 1..20: mol_type = other DNA
gaggccaaggcaggcggatc

SEQ ID NO: 5611 - DNA, 20 bp, synthetic construct
  source 1..20: mol_type = other DNA
ggaggccaaggcaggcggat

SEQ ID NO: 5612 - DNA, 20 bp, synthetic construct
  source 1..20: mol_type = other DNA
gggaggccaaggcaggcgga

SEQ ID NO: 5613 - DNA, 20 bp, synthetic construct
  source 1..20: mol_type = other DNA
tgggaggccaaggcaggcgg

SEQ ID NO: 5614 - DNA, 20 bp, synthetic construct
  source 1..20: mol_type = other DNA
ttgggaggccaaggcaggcg

SEQ ID NO: 5615 - DNA, 20 bp, synthetic construct
  source 1..20: mol_type = other DNA
tttgggaggccaaggcaggc

SEQ ID NO: 5616 - DNA, 20 bp, synthetic construct
  source 1..20: mol_type = other DNA
ctttgggaggccaaggcagg

SEQ ID NO: 5617 - DNA, 20 bp, synthetic construct
  source 1..20: mol_type = other DNA
actttgggaggccaaggcag

SEQ ID NO: 5618 - DNA, 20 bp, synthetic construct
  source 1..20: mol_type = other DNA
cactttgggaggccaaggca

SEQ ID NO: 5619 - DNA, 20 bp, synthetic construct
  source 1..20: mol_type = other DNA
gcactttgggaggccaaggc

SEQ ID NO: 5620 - DNA, 20 bp, synthetic construct
  source 1..20: mol_type = other DNA
agcactttgggaggccaagg

SEQ ID NO: 5621 - DNA, 20 bp, synthetic construct
  source 1..20: mol_type = other DNA
cagcactttgggaggccaag

SEQ ID NO: 5622 - DNA, 20 bp, synthetic construct
  source 1..20: mol_type = other DNA
ccagcactttgggaggccaa

SEQ ID NO: 5623 - DNA, 20 bp, synthetic construct
  source 1..20: mol_type = other DNA
cccagcactttgggaggcca

SEQ ID NO: 5624 - DNA, 20 bp, synthetic construct
  source 1..20: mol_type = other DNA
tcccagcactttgggaggcc

SEQ ID NO: 5625 - DNA, 20 bp, synthetic construct
  source 1..20: mol_type = other DNA
atcccagcactttgggaggc

SEQ ID NO: 5626 - DNA, 20 bp, synthetic construct
  source 1..20: mol_type = other DNA
aatcccagcactttgggagg

SEQ ID NO: 5627 - DNA, 20 bp, synthetic construct
  source 1..20: mol_type = other DNA
taatcccagcactttgggag

SEQ ID NO: 5628 - DNA, 20 bp, synthetic construct
  source 1..20: mol_type = other DNA
gtaatcccagcactttggga

SEQ ID NO: 5629 - DNA, 20 bp, synthetic construct
  source 1..20: mol_type = other DNA
tgtaatcccagcactttggg

SEQ ID NO: 5630 - DNA, 20 bp, synthetic construct
  source 1..20: mol_type = other DNA
ctgtaatcccagcactttgg

SEQ ID NO: 5631 - DNA, 20 bp, synthetic construct
  source 1..20: mol_type = other DNA
cctgtaatcccagcactttg

SEQ ID NO: 5632 - DNA, 20 bp, synthetic construct
  source 1..20: mol_type = other DNA
gcctgtaatcccagcacttt

SEQ ID NO: 5633 - DNA, 20 bp, synthetic construct
  source 1..20: mol_type = other DNA
cgcctgtaatcccagcactt

SEQ ID NO: 5634 - DNA, 20 bp, synthetic construct
  source 1..20: mol_type = other DNA
acgcctgtaatcccagcact

SEQ ID NO: 5635 - DNA, 20 bp, synthetic construct
  source 1..20: mol_type = other DNA
cacgcctgtaatcccagcac

SEQ ID NO: 5636 - DNA, 20 bp, synthetic construct
  source 1..20: mol_type = other DNA
tcacgcctgtaatcccagca

SEQ ID NO: 5637 - DNA, 20 bp, synthetic construct
  source 1..20: mol_type = other DNA
ctcacgcctgtaatcccagc

SEQ ID NO: 5638 - DNA, 20 bp, synthetic construct
  source 1..20: mol_type = other DNA
gctcacgcctgtaatcccag

SEQ ID NO: 5639 - DNA, 20 bp, synthetic construct
  source 1..20: mol_type = other DNA
agctcacgcctgtaatccca

SEQ ID NO: 5640 - DNA, 20 bp, synthetic construct
  source 1..20: mol_type = other DNA
tagctcacgcctgtaatccc

SEQ ID NO: 5641 - DNA, 20 bp, synthetic construct
  source 1..20: mol_type = other DNA
gtagctcacgcctgtaatcc

SEQ ID NO: 5642 - DNA, 20 bp, synthetic construct
  source 1..20: mol_type = other DNA
agtagctcacgcctgtaatc

SEQ ID NO: 5643 - DNA, 20 bp, synthetic construct
  source 1..20: mol_type = other DNA
cagtagctcacgcctgtaat

SEQ ID NO: 5644 - DNA, 20 bp, synthetic construct
  source 1..20: mol_type = other DNA
gcagtagctcacgcctgtaa

SEQ ID NO: 5645 - DNA, 20 bp, synthetic construct
  source 1..20: mol_type = other DNA
ggcagtagctcacgcctgta

SEQ ID NO: 5646 - DNA, 20 bp, synthetic construct
  source 1..20: mol_type = other DNA
gggcagtagctcacgcctgt

SEQ ID NO: 5647 - DNA, 20 bp, synthetic construct
  source 1..20: mol_type = other DNA
ggggcagtagctcacgcctg

SEQ ID NO: 5648 - DNA, 20 bp, synthetic construct
  source 1..20: mol_type = other DNA
aggggcagtagctcacgcct

SEQ ID NO: 5649 - DNA, 20 bp, synthetic construct
  source 1..20: mol_type = other DNA
caggggcagtagctcacgcc

SEQ ID NO: 5650 - DNA, 20 bp, synthetic construct
  source 1..20: mol_type = other DNA
ccaggggcagtagctcacgc

SEQ ID NO: 5651 - DNA, 20 bp, synthetic construct
  source 1..20: mol_type = other DNA
gccaggggcagtagctcacg

SEQ ID NO: 5652 - DNA, 20 bp, synthetic construct
  source 1..20: mol_type = other DNA
ggccaggggcagtagctcac

SEQ ID NO: 5653 - DNA, 20 bp, synthetic construct
  source 1..20: mol_type = other DNA
tggccaggggcagtagctca

SEQ ID NO: 5654 - DNA, 20 bp, synthetic construct
  source 1..20: mol_type = other DNA
ttggccaggggcagtagctc

SEQ ID NO: 5655 - DNA, 20 bp, synthetic construct
  source 1..20: mol_type = other DNA
attggccaggggcagtagct

SEQ ID NO: 5656 - DNA, 20 bp, synthetic construct
  source 1..20: mol_type = other DNA
aattggccaggggcagtagc

SEQ ID NO: 5657 - DNA, 20 bp, synthetic construct
  source 1..20: mol_type = other DNA
aaattggccaggggcagtag

SEQ ID NO: 5658 - DNA, 20 bp, synthetic construct
  source 1..20: mol_type = other DNA
aaaattggccaggggcagta

SEQ ID NO: 5659 - DNA, 20 bp, synthetic construct
  source 1..20: mol_type = other DNA
aaaaattggccaggggcagt

SEQ ID NO: 5660 - DNA, 20 bp, synthetic construct
  source 1..20: mol_type = other DNA
caaaaattggccaggggcag

SEQ ID NO: 5661 - DNA, 20 bp, synthetic construct
  source 1..20: mol_type = other DNA
acaaaaattggccaggggca

SEQ ID NO: 5662 - DNA, 20 bp, synthetic construct
  source 1..20: mol_type = other DNA
tacaaaaattggccaggggc

SEQ ID NO: 5663 - DNA, 20 bp, synthetic construct
  source 1..20: mol_type = other DNA
atacaaaaattggccagggg

SEQ ID NO: 5664 - DNA, 20 bp, synthetic construct
  source 1..20: mol_type = other DNA
aatacaaaaattggccaggg

SEQ ID NO: 5665 - DNA, 20 bp, synthetic construct
  source 1..20: mol_type = other DNA
aaatacaaaaattggccagg

SEQ ID NO: 5666 - DNA, 20 bp, synthetic construct
  source 1..20: mol_type = other DNA
aaaatacaaaaattggccag

SEQ ID NO: 5667 - DNA, 20 bp, synthetic construct
  source 1..20: mol_type = other DNA
aaaaatacaaaaattggcca

SEQ ID NO: 5668 - DNA, 20 bp, synthetic construct
  source 1..20: mol_type = other DNA
taaaaatacaaaaattggcc

SEQ ID NO: 5669 - DNA, 20 bp, synthetic construct
  source 1..20: mol_type = other DNA
ctaaaaatacaaaaattggc

SEQ ID NO: 5670 - DNA, 20 bp, synthetic construct
  source 1..20: mol_type = other DNA
actaaaaatacaaaaattgg

SEQ ID NO: 5671 - DNA, 20 bp, synthetic construct
  source 1..20: mol_type = other DNA
tactaaaaatacaaaaattg

SEQ ID NO: 5672 - DNA, 20 bp, synthetic construct
  source 1..20: mol_type = other DNA
ctactaaaaatacaaaaatt

SEQ ID NO: 5673 - DNA, 20 bp, synthetic construct
  source 1..20: mol_type = other DNA
tctactaaaaatacaaaaat

SEQ ID NO: 5674 - DNA, 20 bp, synthetic construct
  source 1..20: mol_type = other DNA
ctctactaaaaatacaaaaa

SEQ ID NO: 5675 - DNA, 20 bp, synthetic construct
  source 1..20: mol_type = other DNA
tctctactaaaaatacaaaa

SEQ ID NO: 5676 - DNA, 20 bp, synthetic construct
  source 1..20: mol_type = other DNA
atctctactaaaaatacaaa

SEQ ID NO: 5677 - DNA, 20 bp, synthetic construct
  source 1..20: mol_type = other DNA
catctctactaaaaatacaa

SEQ ID NO: 5678 - DNA, 20 bp, synthetic construct
  source 1..20: mol_type = other DNA
ccatctctactaaaaataca

SEQ ID NO: 5679 - DNA, 20 bp, synthetic construct
  source 1..20: mol_type = other DNA
cccatctctactaaaaatac

SEQ ID NO: 5680 - DNA, 20 bp, synthetic construct
  source 1..20: mol_type = other DNA
ccccatctctactaaaaata

SEQ ID NO: 5681 - DNA, 20 bp, synthetic construct
  source 1..20: mol_type = other DNA
accccatctctactaaaaat

SEQ ID NO: 5682 - DNA, 20 bp, synthetic construct
  source 1..20: mol_type = other DNA
aaccccatctctactaaaaa

SEQ ID NO: 5683 - DNA, 20 bp, synthetic construct
  source 1..20: mol_type = other DNA
aaaccccatctctactaaaa

SEQ ID NO: 5684 - DNA, 20 bp, synthetic construct
  source 1..20: mol_type = other DNA
gaaaccccatctctactaaa

SEQ ID NO: 5685 - DNA, 20 bp, synthetic construct
  source 1..20: mol_type = other DNA
tgaaaccccatctctactaa

SEQ ID NO: 5686 - DNA, 20 bp, synthetic construct
  source 1..20: mol_type = other DNA
gtgaaaccccatctctacta

SEQ ID NO: 5687 - DNA, 20 bp, synthetic construct
  source 1..20: mol_type = other DNA
ggtgaaaccccatctctact

SEQ ID NO: 5688 - DNA, 20 bp, synthetic construct
  source 1..20: mol_type = other DNA
tggtgaaaccccatctctac

SEQ ID NO: 5689 - DNA, 20 bp, synthetic construct
  source 1..20: mol_type = other DNA
atggtgaaaccccatctcta

SEQ ID NO: 5690 - DNA, 20 bp, synthetic construct
  source 1..20: mol_type = other DNA
catggtgaaaccccatctct

SEQ ID NO: 5691 - DNA, 20 bp, synthetic construct
  source 1..20: mol_type = other DNA
acatggtgaaaccccatctc

SEQ ID NO: 5692 - DNA, 20 bp, synthetic construct
  source 1..20: mol_type = other DNA
aacatggtgaaaccccatct

SEQ ID NO: 5693 - DNA, 20 bp, synthetic construct
  source 1..20: mol_type = other DNA
caacatggtgaaaccccatc

SEQ ID NO: 5694 - DNA, 20 bp, synthetic construct
  source 1..20: mol_type = other DNA
ccaacatggtgaaaccccat

SEQ ID NO: 5695 - DNA, 20 bp, synthetic construct
  source 1..20: mol_type = other DNA
gccaacatggtgaaacccca

SEQ ID NO: 5696 - DNA, 20 bp, synthetic construct
  source 1..20: mol_type = other DNA
ggccaacatggtgaaacccc

SEQ ID NO: 5697 - DNA, 20 bp, synthetic construct
  source 1..20: mol_type = other DNA
tggccaacatggtgaaaccc

SEQ ID NO: 5698 - DNA, 20 bp, synthetic construct
  source 1..20: mol_type = other DNA
ctggccaacatggtgaaacc

SEQ ID NO: 5699 - DNA, 20 bp, synthetic construct
  source 1..20: mol_type = other DNA
cctggccaacatggtgaaac

SEQ ID NO: 5700 - DNA, 20 bp, synthetic construct
  source 1..20: mol_type = other DNA
gcctggccaacatggtgaaa

SEQ ID NO: 5701 - DNA, 20 bp, synthetic construct
  source 1..20: mol_type = other DNA
agcctggccaacatggtgaa

SEQ ID NO: 5702 - DNA, 20 bp, synthetic construct
  source 1..20: mol_type = other DNA
cagcctggccaacatggtga

SEQ ID NO: 5703 - DNA, 20 bp, synthetic construct
  source 1..20: mol_type = other DNA
ccagcctggccaacatggtg

SEQ ID NO: 5704 - DNA, 20 bp, synthetic construct
  source 1..20: mol_type = other DNA
accagcctggccaacatggt

SEQ ID NO: 5705 - DNA, 20 bp, synthetic construct
  source 1..20: mol_type = other DNA
gaccagcctggccaacatgg

SEQ ID NO: 5706 - DNA, 20 bp, synthetic construct
  source 1..20: mol_type = other DNA
agaccagcctggccaacatg

SEQ ID NO: 5707 - DNA, 20 bp, synthetic construct
  source 1..20: mol_type = other DNA
gagaccagcctggccaacat

SEQ ID NO: 5708 - DNA, 20 bp, synthetic construct
  source 1..20: mol_type = other DNA
cgagaccagcctggccaaca

SEQ ID NO: 5709 - DNA, 20 bp, synthetic construct
  source 1..20: mol_type = other DNA
tcgagaccagcctggccaac

SEQ ID NO: 5710 - DNA, 20 bp, synthetic construct
  source 1..20: mol_type = other DNA
ttcgagaccagcctggccaa

SEQ ID NO: 5711 - DNA, 20 bp, synthetic construct
  source 1..20: mol_type = other DNA
gttcgagaccagcctggcca

SEQ ID NO: 5712 - DNA, 20 bp, synthetic construct
  source 1..20: mol_type = other DNA
agttcgagaccagcctggcc

SEQ ID NO: 5713 - DNA, 20 bp, synthetic construct
  source 1..20: mol_type = other DNA
gagttcgagaccagcctggc

SEQ ID NO: 5714 - DNA, 20 bp, synthetic construct
  source 1..20: mol_type = other DNA
ggagttcgagaccagcctgg

SEQ ID NO: 5715 - DNA, 20 bp, synthetic construct
  source 1..20: mol_type = other DNA
aggagttcgagaccagcctg

SEQ ID NO: 5716 - DNA, 20 bp, synthetic construct
  source 1..20: mol_type = other DNA
gaggagttcgagaccagcct

SEQ ID NO: 5717 - DNA, 20 bp, synthetic construct
  source 1..20: mol_type = other DNA
ggaggagttcgagaccagcc

SEQ ID NO: 5718 - DNA, 20 bp, synthetic construct
  source 1..20: mol_type = other DNA
aggaggagttcgagaccagc

SEQ ID NO: 5719 - DNA, 20 bp, synthetic construct
  source 1..20: mol_type = other DNA
caggaggagttcgagaccag

SEQ ID NO: 5720 - DNA, 20 bp, synthetic construct
  source 1..20: mol_type = other DNA
tcaggaggagttcgagacca

SEQ ID NO: 5721 - DNA, 20 bp, synthetic construct
  source 1..20: mol_type = other DNA
gtcaggaggagttcgagacc

SEQ ID NO: 5722 - DNA, 20 bp, synthetic construct
  source 1..20: mol_type = other DNA
ggtcaggaggagttcgagac

SEQ ID NO: 5723 - DNA, 20 bp, synthetic construct
  source 1..20: mol_type = other DNA
aggtcaggaggagttcgaga

SEQ ID NO: 5724 - DNA, 20 bp, synthetic construct
  source 1..20: mol_type = other DNA
gaggtcaggaggagttcgag

SEQ ID NO: 5725 - DNA, 20 bp, synthetic construct
  source 1..20: mol_type = other DNA
tgaggtcaggaggagttcga

SEQ ID NO: 5726 - DNA, 20 bp, synthetic construct
  source 1..20: mol_type = other DNA
ttgaggtcaggaggagttcg

SEQ ID NO: 5727 - DNA, 20 bp, synthetic construct
  source 1..20: mol_type = other DNA
cttgaggtcaggaggagttc

SEQ ID NO: 5728 - DNA, 20 bp, synthetic construct
  source 1..20: mol_type = other DNA
acttgaggtcaggaggagtt

SEQ ID NO: 5729 - DNA, 20 bp, synthetic construct
  source 1..20: mol_type = other DNA
cacttgaggtcaggaggagt

SEQ ID NO: 5730 - DNA, 20 bp, synthetic construct
  source 1..20: mol_type = other DNA
tcacttgaggtcaggaggag

SEQ ID NO: 5731 - DNA, 20 bp, synthetic construct
  source 1..20: mol_type = other DNA
atcacttgaggtcaggagga

SEQ ID NO: 5732 - DNA, 20 bp, synthetic construct
  source 1..20: mol_type = other DNA
aatcacttgaggtcaggagg

SEQ ID NO: 5733 - DNA, 20 bp, synthetic construct
  source 1..20: mol_type = other DNA
gaatcacttgaggtcaggag

SEQ ID NO: 5734 - DNA, 20 bp, synthetic construct
  source 1..20: mol_type = other DNA
cgaatcacttgaggtcagga

SEQ ID NO: 5735 - DNA, 20 bp, synthetic construct
  source 1..20: mol_type = other DNA
gcgaatcacttgaggtcagg

SEQ ID NO: 5736 - DNA, 20 bp, synthetic construct
  source 1..20: mol_type = other DNA
ggcgaatcacttgaggtcag

SEQ ID NO: 5737 - DNA, 20 bp, synthetic construct
  source 1..20: mol_type = other DNA
tggcgaatcacttgaggtca

SEQ ID NO: 5738 - DNA, 20 bp, synthetic construct
  source 1..20: mol_type = other DNA
ctggcgaatcacttgaggtc

SEQ ID NO: 5739 - DNA, 20 bp, synthetic construct
  source 1..20: mol_type = other DNA
gctggcgaatcacttgaggt

SEQ ID NO: 5740 - DNA, 20 bp, synthetic construct
  source 1..20: mol_type = other DNA
ggctggcgaatcacttgagg

SEQ ID NO: 5741 - DNA, 20 bp, synthetic construct
  source 1..20: mol_type = other DNA
aggctggcgaatcacttgag

SEQ ID NO: 5742 - DNA, 20 bp, synthetic construct
  source 1..20: mol_type = other DNA
gaggctggcgaatcacttga

SEQ ID NO: 5743 - DNA, 20 bp, synthetic construct
  source 1..20: mol_type = other DNA
cgaggctggcgaatcacttg

SEQ ID NO: 5744 - DNA, 20 bp, synthetic construct
  source 1..20: mol_type = other DNA
ccgaggctggcgaatcactt

SEQ ID NO: 5745 - DNA, 20 bp, synthetic construct
  source 1..20: mol_type = other DNA
gccgaggctggcgaatcact

SEQ ID NO: 5746 - DNA, 20 bp, synthetic construct
  source 1..20: mol_type = other DNA
ggccgaggctggcgaatcac

SEQ ID NO: 5747 - DNA, 20 bp, synthetic construct
  source 1..20: mol_type = other DNA
aggccgaggctggcgaatca

SEQ ID NO: 5748 - DNA, 20 bp, synthetic construct
  source 1..20: mol_type = other DNA
gaggccgaggctggcgaatc

SEQ ID NO: 5749 - DNA, 20 bp, synthetic construct
  source 1..20: mol_type = other DNA
ggaggccgaggctggcgaat

SEQ ID NO: 5750 - DNA, 20 bp, synthetic construct
  source 1..20: mol_type = other DNA
gggaggccgaggctggcgaa

SEQ ID NO: 5751 - DNA, 20 bp, synthetic construct
  source 1..20: mol_type = other DNA
tgggaggccgaggctggcga

SEQ ID NO: 5752 - DNA, 20 bp, synthetic construct
  source 1..20: mol_type = other DNA
ttgggaggccgaggctggcg

SEQ ID NO: 5753 - DNA, 20 bp, synthetic construct
  source 1..20: mol_type = other DNA
tttgggaggccgaggctggc

SEQ ID NO: 5754 - DNA, 20 bp, synthetic construct
  source 1..20: mol_type = other DNA
ctttgggaggccgaggctgg

SEQ ID NO: 5755 - DNA, 20 bp, synthetic construct
  source 1..20: mol_type = other DNA
actttgggaggccgaggctg

SEQ ID NO: 5756 - DNA, 20 bp, synthetic construct
  source 1..20: mol_type = other DNA
cactttgggaggccgaggct

SEQ ID NO: 5757 - DNA, 20 bp, synthetic construct
  source 1..20: mol_type = other DNA
gcactttgggaggccgaggc

SEQ ID NO: 5758 - DNA, 20 bp, synthetic construct
  source 1..20: mol_type = other DNA
ggcactttgggaggccgagg

SEQ ID NO: 5759 - DNA, 20 bp, synthetic construct
  source 1..20: mol_type = other DNA
tggcactttgggaggccgag

SEQ ID NO: 5760 - DNA, 20 bp, synthetic construct
  source 1..20: mol_type = other DNA
ctggcactttgggaggccga

SEQ ID NO: 5761 - DNA, 20 bp, synthetic construct
  source 1..20: mol_type = other DNA
cctggcactttgggaggccg

SEQ ID NO: 5762 - DNA, 20 bp, synthetic construct
  source 1..20: mol_type = other DNA
tcctggcactttgggaggcc

SEQ ID NO: 5763 - DNA, 20 bp, synthetic construct
  source 1..20: mol_type = other DNA
atcctggcactttgggaggc

SEQ ID NO: 5764 - DNA, 20 bp, synthetic construct
  source 1..20: mol_type = other DNA
aatcctggcactttgggagg

SEQ ID NO: 5765 - DNA, 20 bp, synthetic construct
  source 1..20: mol_type = other DNA
taatcctggcactttgggag

SEQ ID NO: 5766 - DNA, 20 bp, synthetic construct
  source 1..20: mol_type = other DNA
gtaatcctggcactttggga

SEQ ID NO: 5767 - DNA, 20 bp, synthetic construct
  source 1..20: mol_type = other DNA
tgtaatcctggcactttggg

SEQ ID NO: 5768 - DNA, 20 bp, synthetic construct
  source 1..20: mol_type = other DNA
ctgtaatcctggcactttgg

SEQ ID NO: 5769 - DNA, 20 bp, synthetic construct
  source 1..20: mol_type = other DNA
cctgtaatcctggcactttg

SEQ ID NO: 5770 - DNA, 20 bp, synthetic construct
  source 1..20: mol_type = other DNA
gcctgtaatcctggcacttt

SEQ ID NO: 5771 - DNA, 20 bp, synthetic construct
  source 1..20: mol_type = other DNA
tgcctgtaatcctggcactt

SEQ ID NO: 5772 - DNA, 20 bp, synthetic construct
  source 1..20: mol_type = other DNA
ctgcctgtaatcctggcact

SEQ ID NO: 5773 - DNA, 20 bp, synthetic construct
  source 1..20: mol_type = other DNA
cctgcctgtaatcctggcac

SEQ ID NO: 5774 - DNA, 20 bp, synthetic construct
  source 1..20: mol_type = other DNA
tcctgcctgtaatcctggca

SEQ ID NO: 5775 - DNA, 20 bp, synthetic construct
  source 1..20: mol_type = other DNA
ttcctgcctgtaatcctggc

SEQ ID NO: 5776 - DNA, 20 bp, synthetic construct
  source 1..20: mol_type = other DNA
attcctgcctgtaatcctgg

SEQ ID NO: 5777 - DNA, 20 bp, synthetic construct
  source 1..20: mol_type = other DNA
cattcctgcctgtaatcctg

SEQ ID NO: 5778 - DNA, 20 bp, synthetic construct
  source 1..20: mol_type = other DNA
tcattcctgcctgtaatcct

SEQ ID NO: 5779 - DNA, 20 bp, synthetic construct
  source 1..20: mol_type = other DNA
ctcattcctgcctgtaatcc

SEQ ID NO: 5780 - DNA, 20 bp, synthetic construct
  source 1..20: mol_type = other DNA
gctcattcctgcctgtaatc

SEQ ID NO: 5781 - DNA, 20 bp, synthetic construct
  source 1..20: mol_type = other DNA
ggctcattcctgcctgtaat

SEQ ID NO: 5782 - DNA, 20 bp, synthetic construct
  source 1..20: mol_type = other DNA
tggctcattcctgcctgtaa

SEQ ID NO: 5783 - DNA, 20 bp, synthetic construct
  source 1..20: mol_type = other DNA
gtggctcattcctgcctgta

SEQ ID NO: 5784 - DNA, 20 bp, synthetic construct
  source 1..20: mol_type = other DNA
agtggctcattcctgcctgt

SEQ ID NO: 5785 - DNA, 20 bp, synthetic construct
  source 1..20: mol_type = other DNA
cagtggctcattcctgcctg

SEQ ID NO: 5786 - DNA, 20 bp, synthetic construct
  source 1..20: mol_type = other DNA
gcagtggctcattcctgcct

SEQ ID NO: 5787 - DNA, 20 bp, synthetic construct
  source 1..20: mol_type = other DNA
ggcagtggctcattcctgcc

SEQ ID NO: 5788 - DNA, 20 bp, synthetic construct
  source 1..20: mol_type = other DNA
gggcagtggctcattcctgc

SEQ ID NO: 5789 - DNA, 20 bp, synthetic construct
  source 1..20: mol_type = other DNA
ggggcagtggctcattcctg

SEQ ID NO: 5790 - DNA, 20 bp, synthetic construct
  source 1..20: mol_type = other DNA
gggggcagtggctcattcct

SEQ ID NO: 5791 - DNA, 20 bp, synthetic construct
  source 1..20: mol_type = other DNA
tgggggcagtggctcattcc

SEQ ID NO: 5792 - DNA, 20 bp, synthetic construct
  source 1..20: mol_type = other DNA
ttgggggcagtggctcattc

SEQ ID NO: 5793 - DNA, 20 bp, synthetic construct
  source 1..20: mol_type = other DNA
gttgggggcagtggctcatt

SEQ ID NO: 5794 - DNA, 20 bp, synthetic construct
  source 1..20: mol_type = other DNA
ggttgggggcagtggctcat

SEQ ID NO: 5795 - DNA, 20 bp, synthetic construct
  source 1..20: mol_type = other DNA
tggttgggggcagtggctca

SEQ ID NO: 5796 - DNA, 20 bp, synthetic construct
  source 1..20: mol_type = other DNA
atggttgggggcagtggctc

SEQ ID NO: 5797 - DNA, 20 bp, synthetic construct
  source 1..20: mol_type = other DNA
gatggttgggggcagtggct

SEQ ID NO: 5798 - DNA, 20 bp, synthetic construct
  source 1..20: mol_type = other DNA
tgatggttgggggcagtggc

SEQ ID NO: 5799 - DNA, 20 bp, synthetic construct
  source 1..20: mol_type = other DNA
ctgatggttgggggcagtgg

SEQ ID NO: 5800 - DNA, 20 bp, synthetic construct
  source 1..20: mol_type = other DNA
actgatggttgggggcagtg

SEQ ID NO: 5801 - DNA, 20 bp, synthetic construct
  source 1..20: mol_type = other DNA
gactgatggttgggggcagt

SEQ ID NO: 5802 - DNA, 20 bp, synthetic construct
  source 1..20: mol_type = other DNA
agactgatggttgggggcag

SEQ ID NO: 5803 - DNA, 20 bp, synthetic construct
  source 1..20: mol_type = other DNA
tagactgatggttgggggca

SEQ ID NO: 5804 - DNA, 20 bp, synthetic construct
  source 1..20: mol_type = other DNA
ttagactgatggttgggggc

SEQ ID NO: 5805 - DNA, 20 bp, synthetic construct
  source 1..20: mol_type = other DNA
attagactgatggttggggg

SEQ ID NO: 5806 - DNA, 20 bp, synthetic construct
  source 1..20: mol_type = other DNA
aattagactgatggttgggg

SEQ ID NO: 5807 - DNA, 20 bp, synthetic construct
  source 1..20: mol_type = other DNA
gaattagactgatggttggg

SEQ ID NO: 5808 - DNA, 20 bp, synthetic construct
  source 1..20: mol_type = other DNA
agaattagactgatggttgg

SEQ ID NO: 5809 - DNA, 20 bp, synthetic construct
  source 1..20: mol_type = other DNA
aagaattagactgatggttg

SEQ ID NO: 5810 - DNA, 20 bp, synthetic construct
  source 1..20: mol_type = other DNA
taagaattagactgatggtt

SEQ ID NO: 5811 - DNA, 20 bp, synthetic construct
  source 1..20: mol_type = other DNA
ataagaattagactgatggt

SEQ ID NO: 5812 - DNA, 20 bp, synthetic construct
  source 1..20: mol_type = other DNA
aataagaattagactgatgg

SEQ ID NO: 5813 - DNA, 20 bp, synthetic construct
  source 1..20: mol_type = other DNA
aaataagaattagactgatg

SEQ ID NO: 5814 - DNA, 20 bp, synthetic construct
  source 1..20: mol_type = other DNA
aaaataagaattagactgat

SEQ ID NO: 5815 - DNA, 20 bp, synthetic construct
  source 1..20: mol_type = other DNA
aaaaataagaattagactga

SEQ ID NO: 5816 - DNA, 20 bp, synthetic construct
  source 1..20: mol_type = other DNA
caaaaataagaattagactg

SEQ ID NO: 5817 - DNA, 20 bp, synthetic construct
  source 1..20: mol_type = other DNA
gcaaaaataagaattagact

SEQ ID NO: 5818 - DNA, 20 bp, synthetic construct
  source 1..20: mol_type = other DNA
agcaaaaataagaattagac

SEQ ID NO: 5819 - DNA, 20 bp, synthetic construct
  source 1..20: mol_type = other DNA
aagcaaaaataagaattaga

SEQ ID NO: 5820 - DNA, 20 bp, synthetic construct
  source 1..20: mol_type = other DNA
aaagcaaaaataagaattag

SEQ ID NO: 5821 - DNA, 20 bp, synthetic construct
  source 1..20: mol_type = other DNA
aaaagcaaaaataagaatta

SEQ ID NO: 5822 - DNA, 20 bp, synthetic construct
  source 1..20: mol_type = other DNA
aaaaagcaaaaataagaatt

SEQ ID NO: 5823 - DNA, 20 bp, synthetic construct
  source 1..20: mol_type = other DNA
taaaaagcaaaaataagaat

SEQ ID NO: 5824 - DNA, 20 bp, synthetic construct
  source 1..20: mol_type = other DNA
gtaaaaagcaaaaataagaa

SEQ ID NO: 5825 - DNA, 20 bp, synthetic construct
  source 1..20: mol_type = other DNA
ggtaaaaagcaaaaataaga

SEQ ID NO: 5826 - DNA, 20 bp, synthetic construct
  source 1..20: mol_type = other DNA
aggtaaaaagcaaaaataag

SEQ ID NO: 5827 - DNA, 20 bp, synthetic construct
  source 1..20: mol_type = other DNA
aaggtaaaaagcaaaaataa

SEQ ID NO: 5828 - DNA, 20 bp, synthetic construct
  source 1..20: mol_type = other DNA
aaaggtaaaaagcaaaaata

SEQ ID NO: 5829 - DNA, 20 bp, synthetic construct
  source 1..20: mol_type = other DNA
aaaaggtaaaaagcaaaaat

SEQ ID NO: 5830 - DNA, 20 bp, synthetic construct
  source 1..20: mol_type = other DNA
gaaaaggtaaaaagcaaaaa

SEQ ID NO: 5831 - DNA, 20 bp, synthetic construct
  source 1..20: mol_type = other DNA
tgaaaaggtaaaaagcaaaa

SEQ ID NO: 5832 - DNA, 20 bp, synthetic construct
  source 1..20: mol_type = other DNA
atgaaaaggtaaaaagcaaa

SEQ ID NO: 5833 - DNA, 20 bp, synthetic construct
  source 1..20: mol_type = other DNA
aatgaaaaggtaaaaagcaa

SEQ ID NO: 5834 - DNA, 20 bp, synthetic construct
  source 1..20: mol_type = other DNA
aaatgaaaaggtaaaaagca

SEQ ID NO: 5835 - DNA, 20 bp, synthetic construct
  source 1..20: mol_type = other DNA
aaaatgaaaaggtaaaaagc

SEQ ID NO: 5836 - DNA, 20 bp, synthetic construct
  source 1..20: mol_type = other DNA
aaaaatgaaaaggtaaaaag

SEQ ID NO: 5837 - DNA, 20 bp, synthetic construct
  source 1..20: mol_type = other DNA
taaaaatgaaaaggtaaaaa

SEQ ID NO: 5838 - DNA, 20 bp, synthetic construct
  source 1..20: mol_type = other DNA
ataaaaatgaaaaggtaaaa

SEQ ID NO: 5839 - DNA, 20 bp, synthetic construct
  source 1..20: mol_type = other DNA
cataaaaatgaaaaggtaaa

SEQ ID NO: 5840 - DNA, 20 bp, synthetic construct
  source 1..20: mol_type = other DNA
acataaaaatgaaaaggtaa

SEQ ID NO: 5841 - DNA, 20 bp, synthetic construct
  source 1..20: mol_type = other DNA
tacataaaaatgaaaaggta

SEQ ID NO: 5842 - DNA, 20 bp, synthetic construct
  source 1..20: mol_type = other DNA
ctacataaaaatgaaaaggt

SEQ ID NO: 5843 - DNA, 20 bp, synthetic construct
  source 1..20: mol_type = other DNA
actacataaaaatgaaaagg

SEQ ID NO: 5844 - DNA, 20 bp, synthetic construct
  source 1..20: mol_type = other DNA
tactacataaaaatgaaaag

SEQ ID NO: 5845 - DNA, 20 bp, synthetic construct
  source 1..20: mol_type = other DNA
ctactacataaaaatgaaaa

SEQ ID NO: 5846 - DNA, 20 bp, synthetic construct
  source 1..20: mol_type = other DNA
tctactacataaaaatgaaa

SEQ ID NO: 5847 - DNA, 20 bp, synthetic construct
  source 1..20: mol_type = other DNA
ctctactacataaaaatgaa

SEQ ID NO: 5848 - DNA, 20 bp, synthetic construct
  source 1..20: mol_type = other DNA
cctctactacataaaaatga

SEQ ID NO: 5849 - DNA, 20 bp, synthetic construct
  source 1..20: mol_type = other DNA
acctctactacataaaaatg

SEQ ID NO: 5850 - DNA, 20 bp, synthetic construct
  source 1..20: mol_type = other DNA
cacctctactacataaaaat

SEQ ID NO: 5851 - DNA, 20 bp, synthetic construct
  source 1..20: mol_type = other DNA
tcacctctactacataaaaa

SEQ ID NO: 5852 - DNA, 20 bp, synthetic construct
  source 1..20: mol_type = other DNA
atcacctctactacataaaa

SEQ ID NO: 5853 - DNA, 20 bp, synthetic construct
  source 1..20: mol_type = other DNA
aatcacctctactacataaa

SEQ ID NO: 5854 - DNA, 20 bp, synthetic construct
  source 1..20: mol_type = other DNA
caatcacctctactacataa

SEQ ID NO: 5855 - DNA, 20 bp, synthetic construct
  source 1..20: mol_type = other DNA
acaatcacctctactacata

SEQ ID NO: 5856 - DNA, 20 bp, synthetic construct
  source 1..20: mol_type = other DNA
cacaatcacctctactacat

SEQ ID NO: 5857 - DNA, 20 bp, synthetic construct
  source 1..20: mol_type = other DNA
acacaatcacctctactaca

SEQ ID NO: 5858 - DNA, 20 bp, synthetic construct
  source 1..20: mol_type = other DNA
tacacaatcacctctactac

SEQ ID NO: 5859 - DNA, 20 bp, synthetic construct
  source 1..20: mol_type = other DNA
atacacaatcacctctacta

SEQ ID NO: 5860 - DNA, 20 bp, synthetic construct
  source 1..20: mol_type = other DNA
catacacaatcacctctact

SEQ ID NO: 5861 - DNA, 20 bp, synthetic construct
  source 1..20: mol_type = other DNA
acatacacaatcacctctac

SEQ ID NO: 5862 - DNA, 20 bp, synthetic construct
  source 1..20: mol_type = other DNA
aacatacacaatcacctcta

SEQ ID NO: 5863 - DNA, 20 bp, synthetic construct
  source 1..20: mol_type = other DNA
taacatacacaatcacctct

SEQ ID NO: 5864 - DNA, 20 bp, synthetic construct
  source 1..20: mol_type = other DNA
ataacatacacaatcacctc

SEQ ID NO: 5865 - DNA, 20 bp, synthetic construct
  source 1..20: mol_type = other DNA
aataacatacacaatcacct

SEQ ID NO: 5866 - DNA, 20 bp, synthetic construct
  source 1..20: mol_type = other DNA
aaataacatacacaatcacc

SEQ ID NO: 5867 - DNA, 20 bp, synthetic construct
  source 1..20: mol_type = other DNA
aaaataacatacacaatcac

SEQ ID NO: 5868 - DNA, 20 bp, synthetic construct
  source 1..20: mol_type = other DNA
caaaataacatacacaatca

SEQ ID NO: 5869 - DNA, 20 bp, synthetic construct
  source 1..20: mol_type = other DNA
acaaaataacatacacaatc

SEQ ID NO: 5870 - DNA, 20 bp, synthetic construct
  source 1..20: mol_type = other DNA
tacaaaataacatacacaat

SEQ ID NO: 5871 - DNA, 20 bp, synthetic construct
  source 1..20: mol_type = other DNA
ctacaaaataacatacacaa

SEQ ID NO: 5872 - DNA, 20 bp, synthetic construct
  source 1..20: mol_type = other DNA
actacaaaataacatacaca

SEQ ID NO: 5873 - DNA, 20 bp, synthetic construct
  source 1..20: mol_type = other DNA
aactacaaaataacatacac

SEQ ID NO: 5874 - DNA, 20 bp, synthetic construct
  source 1..20: mol_type = other DNA
taactacaaaataacataca

SEQ ID NO: 5875 - DNA, 20 bp, synthetic construct
  source 1..20: mol_type = other DNA
ctaactacaaaataacatac

SEQ ID NO: 5876 - DNA, 20 bp, synthetic construct
  source 1..20: mol_type = other DNA
gctaactacaaaataacata

SEQ ID NO: 5877 - DNA, 20 bp, synthetic construct
  source 1..20: mol_type = other DNA
agctaactacaaaataacat

SEQ ID NO: 5878 - DNA, 20 bp, synthetic construct
  source 1..20: mol_type = other DNA
aagctaactacaaaataaca

SEQ ID NO: 5879 - DNA, 20 bp, synthetic construct
  source 1..20: mol_type = other DNA
aaagctaactacaaaataac

SEQ ID NO: 5880 - DNA, 20 bp, synthetic construct
  source 1..20: mol_type = other DNA
aaaagctaactacaaaataa

SEQ ID NO: 5881 - DNA, 20 bp, synthetic construct
  source 1..20: mol_type = other DNA
aaaaagctaactacaaaata

SEQ ID NO: 5882 - DNA, 20 bp, synthetic construct
  source 1..20: mol_type = other DNA
aaaaaagctaactacaaaat

SEQ ID NO: 5883 - DNA, 20 bp, synthetic construct
  source 1..20: mol_type = other DNA
gaaaaaagctaactacaaaa

SEQ ID NO: 5884 - DNA, 20 bp, synthetic construct
  source 1..20: mol_type = other DNA
ggaaaaaagctaactacaaa

SEQ ID NO: 5885 - DNA, 20 bp, synthetic construct
  source 1..20: mol_type = other DNA
gggaaaaaagctaactacaa

SEQ ID NO: 5886 - DNA, 20 bp, synthetic construct
  source 1..20: mol_type = other DNA
ggggaaaaaagctaactaca

SEQ ID NO: 5887 - DNA, 20 bp, synthetic construct
  source 1..20: mol_type = other DNA
aggggaaaaaagctaactac

SEQ ID NO: 5888 - DNA, 20 bp, synthetic construct
  source 1..20: mol_type = other DNA
caggggaaaaaagctaacta

SEQ ID NO: 5889 - DNA, 20 bp, synthetic construct
  source 1..20: mol_type = other DNA
tcaggggaaaaaagctaact

SEQ ID NO: 5890 - DNA, 20 bp, synthetic construct
  source 1..20: mol_type = other DNA
ttcaggggaaaaaagctaac

SEQ ID NO: 5891 - DNA, 20 bp, synthetic construct
  source 1..20: mol_type = other DNA
gttcaggggaaaaaagctaa

SEQ ID NO: 5892 - DNA, 20 bp, synthetic construct
  source 1..20: mol_type = other DNA
cgttcaggggaaaaaagcta

SEQ ID NO: 5893 - DNA, 20 bp, synthetic construct
  source 1..20: mol_type = other DNA
acgttcaggggaaaaaagct

SEQ ID NO: 5894 - DNA, 20 bp, synthetic construct
  source 1..20: mol_type = other DNA
aacgttcaggggaaaaaagc

SEQ ID NO: 5895 - DNA, 20 bp, synthetic construct
  source 1..20: mol_type = other DNA
caacgttcaggggaaaaaag

SEQ ID NO: 5896 - DNA, 20 bp, synthetic construct
  source 1..20: mol_type = other DNA
acaacgttcaggggaaaaaa

SEQ ID NO: 5897 - DNA, 20 bp, synthetic construct
  source 1..20: mol_type = other DNA
tacaacgttcaggggaaaaa

SEQ ID NO: 5898 - DNA, 20 bp, synthetic construct
  source 1..20: mol_type = other DNA
atacaacgttcaggggaaaa

SEQ ID NO: 5899 - DNA, 20 bp, synthetic construct
  source 1..20: mol_type = other DNA
aatacaacgttcaggggaaa

SEQ ID NO: 5900 - DNA, 20 bp, synthetic construct
  source 1..20: mol_type = other DNA
caatacaacgttcaggggaa

SEQ ID NO: 5901 - DNA, 20 bp, synthetic construct
  source 1..20: mol_type = other DNA
acaatacaacgttcagggga

SEQ ID NO: 5902 - DNA, 20 bp, synthetic construct
  source 1..20: mol_type = other DNA
tacaatacaacgttcagggg

SEQ ID NO: 5903 - DNA, 20 bp, synthetic construct
  source 1..20: mol_type = other DNA
ttacaatacaacgttcaggg

SEQ ID NO: 5904 - DNA, 20 bp, synthetic construct
  source 1..20: mol_type = other DNA
tttacaatacaacgttcagg

SEQ ID NO: 5905 - DNA, 20 bp, synthetic construct
  source 1..20: mol_type = other DNA
atttacaatacaacgttcag

SEQ ID NO: 5906 - DNA, 20 bp, synthetic construct
  source 1..20: mol_type = other DNA
catttacaatacaacgttca

SEQ ID NO: 5907 - DNA, 20 bp, synthetic construct
  source 1..20: mol_type = other DNA
acatttacaatacaacgttc

SEQ ID NO: 5908 - DNA, 20 bp, synthetic construct
  source 1..20: mol_type = other DNA
tacatttacaatacaacgtt

SEQ ID NO: 5909 - DNA, 20 bp, synthetic construct
  source 1..20: mol_type = other DNA
ttacatttacaatacaacgt

SEQ ID NO: 5910 - DNA, 20 bp, synthetic construct
  source 1..20: mol_type = other DNA
tttacatttacaatacaacg

SEQ ID NO: 5911 - DNA, 20 bp, synthetic construct
  source 1..20: mol_type = other DNA
atttacatttacaatacaac

SEQ ID NO: 5912 - DNA, 20 bp, synthetic construct
  source 1..20: mol_type = other DNA
aatttacatttacaatacaa

SEQ ID NO: 5913 - DNA, 20 bp, synthetic construct
  source 1..20: mol_type = other DNA
aaatttacatttacaataca

SEQ ID NO: 5914 - DNA, 20 bp, synthetic construct
  source 1..20: mol_type = other DNA
aaaatttacatttacaatac

SEQ ID NO: 5915 - DNA, 20 bp, synthetic construct
  source 1..20: mol_type = other DNA
aaaaatttacatttacaata

SEQ ID NO: 5916 - DNA, 20 bp, synthetic construct
  source 1..20: mol_type = other DNA
aaaaaatttacatttacaat

SEQ ID NO: 5917 - DNA, 20 bp, synthetic construct
  source 1..20: mol_type = other DNA
aaaaaaatttacatttacaa

SEQ ID NO: 5918 - DNA, 20 bp, synthetic construct
  source 1..20: mol_type = other DNA
aaaaaaaatttacatttaca

SEQ ID NO: 5919 - DNA, 20 bp, synthetic construct
  source 1..20: mol_type = other DNA
aaaaaaaaatttacatttac

SEQ ID NO: 5920 - DNA, 20 bp, synthetic construct
  source 1..20: mol_type = other DNA
aaaaaaaaaatttacattta

SEQ ID NO: 5921 - DNA, 20 bp, synthetic construct
  source 1..20: mol_type = other DNA
aaaaaaaaaaatttacattt

SEQ ID NO: 5922 - DNA, 20 bp, synthetic construct
  source 1..20: mol_type = other DNA
aaaaaaaaaaaatttacatt

SEQ ID NO: 5923 - DNA, 20 bp, synthetic construct
  source 1..20: mol_type = other DNA
aaaaaaaaaaaaatttacat

SEQ ID NO: 5924 - DNA, 20 bp, synthetic construct
  source 1..20: mol_type = other DNA
aaaaaaaaaaaaaatttaca

SEQ ID NO: 5925 - DNA, 20 bp, synthetic construct
  source 1..20: mol_type = other DNA
aaaaaaaaaaaaaaatttac

SEQ ID NO: 5926 - DNA, 20 bp, synthetic construct
  source 1..20: mol_type = other DNA
aaaaaaaaaaaaaaaattta

SEQ ID NO: 5927 - DNA, 20 bp, synthetic construct
  source 1..20: mol_type = other DNA
aaaaaaaaaaaaaaaaattt

SEQ ID NO: 5928 - DNA, 20 bp, synthetic construct
  source 1..20: mol_type = other DNA
caaaaaaaaaaaaaaaaatt

SEQ ID NO: 5929 - DNA, 20 bp, synthetic construct
  source 1..20: mol_type = other DNA
tcaaaaaaaaaaaaaaaaat

SEQ ID NO: 5930 - DNA, 20 bp, synthetic construct
  source 1..20: mol_type = other DNA
ctcaaaaaaaaaaaaaaaaa

SEQ ID NO: 5931 - DNA, 20 bp, synthetic construct
  source 1..20: mol_type = other DNA
tctcaaaaaaaaaaaaaaaa

SEQ ID NO: 5932 - DNA, 20 bp, synthetic construct
  source 1..20: mol_type = other DNA
gtctcaaaaaaaaaaaaaaa

SEQ ID NO: 5933 - DNA, 20 bp, synthetic construct
  source 1..20: mol_type = other DNA
tgtctcaaaaaaaaaaaaaa

SEQ ID NO: 5934 - DNA, 20 bp, synthetic construct
  source 1..20: mol_type = other DNA
ctgtctcaaaaaaaaaaaaa

SEQ ID NO: 5935 - DNA, 20 bp, synthetic construct
  source 1..20: mol_type = other DNA
tctgtctcaaaaaaaaaaaa

SEQ ID NO: 5936 - DNA, 20 bp, synthetic construct
  source 1..20: mol_type = other DNA
ctctgtctcaaaaaaaaaaa

SEQ ID NO: 5937 - DNA, 20 bp, synthetic construct
  source 1..20: mol_type = other DNA
actctgtctcaaaaaaaaaa

SEQ ID NO: 5938 - DNA, 20 bp, synthetic construct
  source 1..20: mol_type = other DNA
gactctgtctcaaaaaaaaa

SEQ ID NO: 5939 - DNA, 20 bp, synthetic construct
  source 1..20: mol_type = other DNA
agactctgtctcaaaaaaaa

SEQ ID NO: 5940 - DNA, 20 bp, synthetic construct
  source 1..20: mol_type = other DNA
gagactctgtctcaaaaaaa

SEQ ID NO: 5941 - DNA, 20 bp, synthetic construct
  source 1..20: mol_type = other DNA
cgagactctgtctcaaaaaa

SEQ ID NO: 5942 - DNA, 20 bp, synthetic construct
  source 1..20: mol_type = other DNA
ccgagactctgtctcaaaaa

SEQ ID NO: 5943 - DNA, 20 bp, synthetic construct
  source 1..20: mol_type = other DNA
accgagactctgtctcaaaa

SEQ ID NO: 5944 - DNA, 20 bp, synthetic construct
  source 1..20: mol_type = other DNA
caccgagactctgtctcaaa

SEQ ID NO: 5945 - DNA, 20 bp, synthetic construct
  source 1..20: mol_type = other DNA
acaccgagactctgtctcaa

SEQ ID NO: 5946 - DNA, 20 bp, synthetic construct
  source 1..20: mol_type = other DNA
aacaccgagactctgtctca

SEQ ID NO: 5947 - DNA, 20 bp, synthetic construct
  source 1..20: mol_type = other DNA
aaacaccgagactctgtctc

SEQ ID NO: 5948 - DNA, 20 bp, synthetic construct
  source 1..20: mol_type = other DNA
caaacaccgagactctgtct

SEQ ID NO: 5949 - DNA, 20 bp, synthetic construct
  source 1..20: mol_type = other DNA
gcaaacaccgagactctgtc

SEQ ID NO: 5950 - DNA, 20 bp, synthetic construct
  source 1..20: mol_type = other DNA
ggcaaacaccgagactctgt

SEQ ID NO: 5951 - DNA, 20 bp, synthetic construct
  source 1..20: mol_type = other DNA
gggcaaacaccgagactctg

SEQ ID NO: 5952 - DNA, 20 bp, synthetic construct
  source 1..20: mol_type = other DNA
tgggcaaacaccgagactct

SEQ ID NO: 5953 - DNA, 20 bp, synthetic construct
  source 1..20: mol_type = other DNA
ctgggcaaacaccgagactc

SEQ ID NO: 5954 - DNA, 20 bp, synthetic construct
  source 1..20: mol_type = other DNA
actgggcaaacaccgagact

SEQ ID NO: 5955 - DNA, 20 bp, synthetic construct
  source 1..20: mol_type = other DNA
gactgggcaaacaccgagac

SEQ ID NO: 5956 - DNA, 20 bp, synthetic construct
  source 1..20: mol_type = other DNA
agactgggcaaacaccgaga

SEQ ID NO: 5957 - DNA, 20 bp, synthetic construct
  source 1..20: mol_type = other DNA
cagactgggcaaacaccgag

SEQ ID NO: 5958 - DNA, 20 bp, synthetic construct
  source 1..20: mol_type = other DNA
tcagactgggcaaacaccga

SEQ ID NO: 5959 - DNA, 20 bp, synthetic construct
  source 1..20: mol_type = other DNA
ttcagactgggcaaacaccg

SEQ ID NO: 5960 - DNA, 20 bp, synthetic construct
  source 1..20: mol_type = other DNA
cttcagactgggcaaacacc

SEQ ID NO: 5961 - DNA, 20 bp, synthetic construct
  source 1..20: mol_type = other DNA
acttcagactgggcaaacac

SEQ ID NO: 5962 - DNA, 20 bp, synthetic construct
  source 1..20: mol_type = other DNA
cacttcagactgggcaaaca

SEQ ID NO: 5963 - DNA, 20 bp, synthetic construct
  source 1..20: mol_type = other DNA
gcacttcagactgggcaaac

SEQ ID NO: 5964 - DNA, 20 bp, synthetic construct
  source 1..20: mol_type = other DNA
tgcacttcagactgggcaaa

SEQ ID NO: 5965 - DNA, 20 bp, synthetic construct
  source 1..20: mol_type = other DNA
ctgcacttcagactgggcaa

SEQ ID NO: 5966 - DNA, 20 bp, synthetic construct
  source 1..20: mol_type = other DNA
actgcacttcagactgggca

SEQ ID NO: 5967 - DNA, 20 bp, synthetic construct
  source 1..20: mol_type = other DNA
cactgcacttcagactgggc

SEQ ID NO: 5968 - DNA, 20 bp, synthetic construct
  source 1..20: mol_type = other DNA
ccactgcacttcagactggg

SEQ ID NO: 5969 - DNA, 20 bp, synthetic construct
  source 1..20: mol_type = other DNA
accactgcacttcagactgg

SEQ ID NO: 5970 - DNA, 20 bp, synthetic construct
  source 1..20: mol_type = other DNA
taccactgcacttcagactg

SEQ ID NO: 5971 - DNA, 20 bp, synthetic construct
  source 1..20: mol_type = other DNA
gtaccactgcacttcagact

SEQ ID NO: 5972 - DNA, 20 bp, synthetic construct
  source 1..20: mol_type = other DNA
cgtaccactgcacttcagac

SEQ ID NO: 5973 - DNA, 20 bp, synthetic construct
  source 1..20: mol_type = other DNA
tcgtaccactgcacttcaga

SEQ ID NO: 5974 - DNA, 20 bp, synthetic construct
  source 1..20: mol_type = other DNA
atcgtaccactgcacttcag

SEQ ID NO: 5975 - DNA, 20 bp, synthetic construct
  source 1..20: mol_type = other DNA
gatcgtaccactgcacttca

SEQ ID NO: 5976 - DNA, 20 bp, synthetic construct
  source 1..20: mol_type = other DNA
agatcgtaccactgcacttc

SEQ ID NO: 5977 - DNA, 20 bp, synthetic construct
  source 1..20: mol_type = other DNA
gagatcgtaccactgcactt

SEQ ID NO: 5978 - DNA, 20 bp, synthetic construct
  source 1..20: mol_type = other DNA
tgagatcgtaccactgcact

SEQ ID NO: 5979 - DNA, 20 bp, synthetic construct
  source 1..20: mol_type = other DNA
ctgagatcgtaccactgcac

SEQ ID NO: 5980 - DNA, 20 bp, synthetic construct
  source 1..20: mol_type = other DNA
gctgagatcgtaccactgca

SEQ ID NO: 5981 - DNA, 20 bp, synthetic construct
  source 1..20: mol_type = other DNA
agctgagatcgtaccactgc

SEQ ID NO: 5982 - DNA, 20 bp, synthetic construct
  source 1..20: mol_type = other DNA
gagctgagatcgtaccactg

SEQ ID NO: 5983 - DNA, 20 bp, synthetic construct
  source 1..20: mol_type = other DNA
tgagctgagatcgtaccact

SEQ ID NO: 5984 - DNA, 20 bp, synthetic construct
  source 1..20: mol_type = other DNA
gtgagctgagatcgtaccac

SEQ ID NO: 5985 - DNA, 20 bp, synthetic construct
  source 1..20: mol_type = other DNA
agtgagctgagatcgtacca

SEQ ID NO: 5986 - DNA, 20 bp, synthetic construct
  source 1..20: mol_type = other DNA
cagtgagctgagatcgtacc

SEQ ID NO: 5987 - DNA, 20 bp, synthetic construct
  source 1..20: mol_type = other DNA
gcagtgagctgagatcgtac

SEQ ID NO: 5988 - DNA, 20 bp, synthetic construct
  source 1..20: mol_type = other DNA
tgcagtgagctgagatcgta

SEQ ID NO: 5989 - DNA, 20 bp, synthetic construct
  source 1..20: mol_type = other DNA
ctgcagtgagctgagatcgt

SEQ ID NO: 5990 - DNA, 20 bp, synthetic construct
  source 1..20: mol_type = other DNA
gctgcagtgagctgagatcg

SEQ ID NO: 5991 - DNA, 20 bp, synthetic construct
  source 1..20: mol_type = other DNA
ggctgcagtgagctgagatc

SEQ ID NO: 5992 - DNA, 20 bp, synthetic construct
  source 1..20: mol_type = other DNA
aggctgcagtgagctgagat

SEQ ID NO: 5993 - DNA, 20 bp, synthetic construct
  source 1..20: mol_type = other DNA
gaggctgcagtgagctgaga

SEQ ID NO: 5994 - DNA, 20 bp, synthetic construct
  source 1..20: mol_type = other DNA
agaggctgcagtgagctgag

SEQ ID NO: 5995 - DNA, 20 bp, synthetic construct
  source 1..20: mol_type = other DNA
cagaggctgcagtgagctga

SEQ ID NO: 5996 - DNA, 20 bp, synthetic construct
  source 1..20: mol_type = other DNA
tcagaggctgcagtgagctg

SEQ ID NO: 5997 - DNA, 20 bp, synthetic construct
  source 1..20: mol_type = other DNA
gtcagaggctgcagtgagct

SEQ ID NO: 5998 - DNA, 20 bp, synthetic construct
  source 1..20: mol_type = other DNA
agtcagaggctgcagtgagc

SEQ ID NO: 5999 - DNA, 20 bp, synthetic construct
  source 1..20: mol_type = other DNA
gagtcagaggctgcagtgag

SEQ ID NO: 6000 - DNA, 20 bp, synthetic construct
  source 1..20: mol_type = other DNA
ggagtcagaggctgcagtga

SEQ ID NO: 6001 - DNA, 20 bp, synthetic construct
  source 1..20: mol_type = other DNA
aggagtcagaggctgcagtg

SEQ ID NO: 6002 - DNA, 20 bp, synthetic construct
  source 1..20: mol_type = other DNA
caggagtcagaggctgcagt

SEQ ID NO: 6003 - DNA, 20 bp, synthetic construct
  source 1..20: mol_type = other DNA
ccaggagtcagaggctgcag

SEQ ID NO: 6004 - DNA, 20 bp, synthetic construct
  source 1..20: mol_type = other DNA
cccaggagtcagaggctgca

SEQ ID NO: 6005 - DNA, 20 bp, synthetic construct
  source 1..20: mol_type = other DNA
acccaggagtcagaggctgc

SEQ ID NO: 6006 - DNA, 20 bp, synthetic construct
  source 1..20: mol_type = other DNA
aacccaggagtcagaggctg

SEQ ID NO: 6007 - DNA, 20 bp, synthetic construct
  source 1..20: mol_type = other DNA
gaacccaggagtcagaggct

SEQ ID NO: 6008 - DNA, 20 bp, synthetic construct
  source 1..20: mol_type = other DNA
tgaacccaggagtcagaggc

SEQ ID NO: 6009 - DNA, 20 bp, synthetic construct
  source 1..20: mol_type = other DNA
ttgaacccaggagtcagagg

SEQ ID NO: 6010 - DNA, 20 bp, synthetic construct
  source 1..20: mol_type = other DNA
cttgaacccaggagtcagag

SEQ ID NO: 6011 - DNA, 20 bp, synthetic construct
  source 1..20: mol_type = other DNA
gcttgaacccaggagtcaga

SEQ ID NO: 6012 - DNA, 20 bp, synthetic construct
  source 1..20: mol_type = other DNA
cgcttgaacccaggagtcag

SEQ ID NO: 6013 - DNA, 20 bp, synthetic construct
  source 1..20: mol_type = other DNA
tcgcttgaacccaggagtca

SEQ ID NO: 6014 - DNA, 20 bp, synthetic construct
  source 1..20: mol_type = other DNA
atcgcttgaacccaggagtc

SEQ ID NO: 6015 - DNA, 20 bp, synthetic construct
  source 1..20: mol_type = other DNA
aatcgcttgaacccaggagt

SEQ ID NO: 6016 - DNA, 20 bp, synthetic construct
  source 1..20: mol_type = other DNA
gaatcgcttgaacccaggag

SEQ ID NO: 6017 - DNA, 20 bp, synthetic construct
  source 1..20: mol_type = other DNA
agaatcgcttgaacccagga

SEQ ID NO: 6018 - DNA, 20 bp, synthetic construct
  source 1..20: mol_type = other DNA
gagaatcgcttgaacccagg

SEQ ID NO: 6019 - DNA, 20 bp, synthetic construct
  source 1..20: mol_type = other DNA
ggagaatcgcttgaacccag

SEQ ID NO: 6020 - DNA, 20 bp, synthetic construct
  source 1..20: mol_type = other DNA
gggagaatcgcttgaaccca

SEQ ID NO: 6021 - DNA, 20 bp, synthetic construct
  source 1..20: mol_type = other DNA
tgggagaatcgcttgaaccc

SEQ ID NO: 6022 - DNA, 20 bp, synthetic construct
  source 1..20: mol_type = other DNA
gtgggagaatcgcttgaacc

SEQ ID NO: 6023 - DNA, 20 bp, synthetic construct
  source 1..20: mol_type = other DNA
ggtgggagaatcgcttgaac

SEQ ID NO: 6024 - DNA, 20 bp, synthetic construct
  source 1..20: mol_type = other DNA
aggtgggagaatcgcttgaa

SEQ ID NO: 6025 - DNA, 20 bp, synthetic construct
  source 1..20: mol_type = other DNA
gaggtgggagaatcgcttga

SEQ ID NO: 6026 - DNA, 20 bp, synthetic construct
  source 1..20: mol_type = other DNA
tgaggtgggagaatcgcttg

SEQ ID NO: 6027 - DNA, 20 bp, synthetic construct
  source 1..20: mol_type = other DNA
ctgaggtgggagaatcgctt

SEQ ID NO: 6028 - DNA, 20 bp, synthetic construct
  source 1..20: mol_type = other DNA
gctgaggtgggagaatcgct

SEQ ID NO: 6029 - DNA, 20 bp, synthetic construct
  source 1..20: mol_type = other DNA
ggctgaggtgggagaatcgc

SEQ ID NO: 6030 - DNA, 20 bp, synthetic construct
  source 1..20: mol_type = other DNA
aggctgaggtgggagaatcg

SEQ ID NO: 6031 - DNA, 20 bp, synthetic construct
  source 1..20: mol_type = other DNA
gaggctgaggtgggagaatc

SEQ ID NO: 6032 - DNA, 20 bp, synthetic construct
  source 1..20: mol_type = other DNA
agaggctgaggtgggagaat

SEQ ID NO: 6033 - DNA, 20 bp, synthetic construct
  source 1..20: mol_type = other DNA
aagaggctgaggtgggagaa

SEQ ID NO: 6034 - DNA, 20 bp, synthetic construct
  source 1..20: mol_type = other DNA
caagaggctgaggtgggaga

SEQ ID NO: 6035 - DNA, 20 bp, synthetic construct
  source 1..20: mol_type = other DNA
tcaagaggctgaggtgggag

SEQ ID NO: 6036 - DNA, 20 bp, synthetic construct
  source 1..20: mol_type = other DNA
ctcaagaggctgaggtggga

SEQ ID NO: 6037 - DNA, 20 bp, synthetic construct
  source 1..20: mol_type = other DNA
actcaagaggctgaggtggg

SEQ ID NO: 6038 - DNA, 20 bp, synthetic construct
  source 1..20: mol_type = other DNA
tactcaagaggctgaggtgg

SEQ ID NO: 6039 - DNA, 20 bp, synthetic construct
  source 1..20: mol_type = other DNA
ctactcaagaggctgaggtg

SEQ ID NO: 6040 - DNA, 20 bp, synthetic construct
  source 1..20: mol_type = other DNA
gctactcaagaggctgaggt

SEQ ID NO: 6041 - DNA, 20 bp, synthetic construct
  source 1..20: mol_type = other DNA
agctactcaagaggctgagg

SEQ ID NO: 6042 - DNA, 20 bp, synthetic construct
  source 1..20: mol_type = other DNA
cagctactcaagaggctgag

SEQ ID NO: 6043 - DNA, 20 bp, synthetic construct
  source 1..20: mol_type = other DNA
ccagctactcaagaggctga

SEQ ID NO: 6044 - DNA, 20 bp, synthetic construct
  source 1..20: mol_type = other DNA
cccagctactcaagaggctg

SEQ ID NO: 6045 - DNA, 20 bp, synthetic construct
  source 1..20: mol_type = other DNA
ccccagctactcaagaggct

SEQ ID NO: 6046 - DNA, 20 bp, synthetic construct
  source 1..20: mol_type = other DNA
gccccagctactcaagaggc

SEQ ID NO: 6047 - DNA, 20 bp, synthetic construct
  source 1..20: mol_type = other DNA
agccccagctactcaagagg

SEQ ID NO: 6048 - DNA, 20 bp, synthetic construct
  source 1..20: mol_type = other DNA
tagccccagctactcaagag

SEQ ID NO: 6049 - DNA, 20 bp, synthetic construct
  source 1..20: mol_type = other DNA
gtagccccagctactcaaga

SEQ ID NO: 6050 - DNA, 20 bp, synthetic construct
  source 1..20: mol_type = other DNA
tgtagccccagctactcaag

SEQ ID NO: 6051 - DNA, 20 bp, synthetic construct
  source 1..20: mol_type = other DNA
ctgtagccccagctactcaa

SEQ ID NO: 6052 - DNA, 20 bp, synthetic construct
  source 1..20: mol_type = other DNA
cctgtagccccagctactca

SEQ ID NO: 6053 - DNA, 20 bp, synthetic construct
  source 1..20: mol_type = other DNA
tcctgtagccccagctactc

SEQ ID NO: 6054 - DNA, 20 bp, synthetic construct
  source 1..20: mol_type = other DNA
ttcctgtagccccagctact

SEQ ID NO: 6055 - DNA, 20 bp, synthetic construct
  source 1..20: mol_type = other DNA
attcctgtagccccagctac

SEQ ID NO: 6056 - DNA, 20 bp, synthetic construct
  source 1..20: mol_type = other DNA
cattcctgtagccccagcta

SEQ ID NO: 6057 - DNA, 20 bp, synthetic construct
  source 1..20: mol_type = other DNA
acattcctgtagccccagct

SEQ ID NO: 6058 - DNA, 20 bp, synthetic construct
  source 1..20: mol_type = other DNA
aacattcctgtagccccagc

SEQ ID NO: 6059 - DNA, 20 bp, synthetic construct
  source 1..20: mol_type = other DNA
gaacattcctgtagccccag

SEQ ID NO: 6060 - DNA, 20 bp, synthetic construct
  source 1..20: mol_type = other DNA
ggaacattcctgtagcccca

SEQ ID NO: 6061 - DNA, 20 bp, synthetic construct
  source 1..20: mol_type = other DNA
tggaacattcctgtagcccc

SEQ ID NO: 6062 - DNA, 20 bp, synthetic construct
  source 1..20: mol_type = other DNA
gtggaacattcctgtagccc

SEQ ID NO: 6063 - DNA, 20 bp, synthetic construct
  source 1..20: mol_type = other DNA
ggtggaacattcctgtagcc

SEQ ID NO: 6064 - DNA, 20 bp, synthetic construct
  source 1..20: mol_type = other DNA
tggtggaacattcctgtagc

SEQ ID NO: 6065 - DNA, 20 bp, synthetic construct
  source 1..20: mol_type = other DNA
gtggtggaacattcctgtag

SEQ ID NO: 6066 - DNA, 20 bp, synthetic construct
  source 1..20: mol_type = other DNA
cgtggtggaacattcctgta

SEQ ID NO: 6067 - DNA, 20 bp, synthetic construct
  source 1..20: mol_type = other DNA
gcgtggtggaacattcctgt

SEQ ID NO: 6068 - DNA, 20 bp, synthetic construct
  source 1..20: mol_type = other DNA
agcgtggtggaacattcctg

SEQ ID NO: 6069 - DNA, 20 bp, synthetic construct
  source 1..20: mol_type = other DNA
aagcgtggtggaacattcct

SEQ ID NO: 6070 - DNA, 20 bp, synthetic construct
  source 1..20: mol_type = other DNA
caagcgtggtggaacattcc

SEQ ID NO: 6071 - DNA, 20 bp, synthetic construct
  source 1..20: mol_type = other DNA
ccaagcgtggtggaacattc

SEQ ID NO: 6072 - DNA, 20 bp, synthetic construct
  source 1..20: mol_type = other DNA
gccaagcgtggtggaacatt

SEQ ID NO: 6073 - DNA, 20 bp, synthetic construct
  source 1..20: mol_type = other DNA
agccaagcgtggtggaacat

SEQ ID NO: 6074 - DNA, 20 bp, synthetic construct
  source 1..20: mol_type = other DNA
tagccaagcgtggtggaaca

SEQ ID NO: 6075 - DNA, 20 bp, synthetic construct
  source 1..20: mol_type = other DNA
ttagccaagcgtggtggaac

SEQ ID NO: 6076 - DNA, 20 bp, synthetic construct
  source 1..20: mol_type = other DNA
attagccaagcgtggtggaa

SEQ ID NO: 6077 - DNA, 20 bp, synthetic construct
  source 1..20: mol_type = other DNA
aattagccaagcgtggtgga

SEQ ID NO: 6078 - DNA, 20 bp, synthetic construct
  source 1..20: mol_type = other DNA
aaattagccaagcgtggtgg

SEQ ID NO: 6079 - DNA, 20 bp, synthetic construct
  source 1..20: mol_type = other DNA
aaaattagccaagcgtggtg

SEQ ID NO: 6080 - DNA, 20 bp, synthetic construct
  source 1..20: mol_type = other DNA
aaaaattagccaagcgtggt

SEQ ID NO: 6081 - DNA, 20 bp, synthetic construct
  source 1..20: mol_type = other DNA
caaaaattagccaagcgtgg

SEQ ID NO: 6082 - DNA, 20 bp, synthetic construct
  source 1..20: mol_type = other DNA
acaaaaattagccaagcgtg

SEQ ID NO: 6083 - DNA, 20 bp, synthetic construct
  source 1..20: mol_type = other DNA
tacaaaaattagccaagcgt

SEQ ID NO: 6084 - DNA, 20 bp, synthetic construct
  source 1..20: mol_type = other DNA
atacaaaaattagccaagcg

SEQ ID NO: 6085 - DNA, 20 bp, synthetic construct
  source 1..20: mol_type = other DNA
aatacaaaaattagccaagc

SEQ ID NO: 6086 - DNA, 20 bp, synthetic construct
  source 1..20: mol_type = other DNA
aaatacaaaaattagccaag

SEQ ID NO: 6087 - DNA, 20 bp, synthetic construct
  source 1..20: mol_type = other DNA
aaaatacaaaaattagccaa

SEQ ID NO: 6088 - DNA, 20 bp, synthetic construct
  source 1..20: mol_type = other DNA
aaaaatacaaaaattagcca

SEQ ID NO: 6089 - DNA, 20 bp, synthetic construct
  source 1..20: mol_type = other DNA
caaaaatacaaaaattagcc

SEQ ID NO: 6090 - DNA, 20 bp, synthetic construct
  source 1..20: mol_type = other DNA
ccaaaaatacaaaaattagc

SEQ ID NO: 6091 - DNA, 20 bp, synthetic construct
  source 1..20: mol_type = other DNA
accaaaaatacaaaaattag

SEQ ID NO: 6092 - DNA, 20 bp, synthetic construct
  source 1..20: mol_type = other DNA
taccaaaaatacaaaaatta

SEQ ID NO: 6093 - DNA, 20 bp, synthetic construct
  source 1..20: mol_type = other DNA
ctaccaaaaatacaaaaatt

SEQ ID NO: 6094 - DNA, 20 bp, synthetic construct
  source 1..20: mol_type = other DNA
tctaccaaaaatacaaaaat

SEQ ID NO: 6095 - DNA, 20 bp, synthetic construct
  source 1..20: mol_type = other DNA
ctctaccaaaaatacaaaaa

SEQ ID NO: 6096 - DNA, 20 bp, synthetic construct
  source 1..20: mol_type = other DNA
tctctaccaaaaatacaaaa

SEQ ID NO: 6097 - DNA, 20 bp, synthetic construct
  source 1..20: mol_type = other DNA
gtctctaccaaaaatacaaa

SEQ ID NO: 6098 - DNA, 20 bp, synthetic construct
  source 1..20: mol_type = other DNA
tgtctctaccaaaaatacaa

SEQ ID NO: 6099 - DNA, 20 bp, synthetic construct
  source 1..20: mol_type = other DNA
ttgtctctaccaaaaataca

SEQ ID NO: 6100 - DNA, 20 bp, synthetic construct
  source 1..20: mol_type = other DNA
cttgtctctaccaaaaatac

SEQ ID NO: 6101 - DNA, 20 bp, synthetic construct
  source 1..20: mol_type = other DNA
ccttgtctctaccaaaaata

SEQ ID NO: 6102 - DNA, 20 bp, synthetic construct
  source 1..20: mol_type = other DNA
accttgtctctaccaaaaat

SEQ ID NO: 6103 - DNA, 20 bp, synthetic construct
  source 1..20: mol_type = other DNA
aaccttgtctctaccaaaaa

SEQ ID NO: 6104 - DNA, 20 bp, synthetic construct
  source 1..20: mol_type = other DNA
aaaccttgtctctaccaaaa

SEQ ID NO: 6105 - DNA, 20 bp, synthetic construct
  source 1..20: mol_type = other DNA
gaaaccttgtctctaccaaa

SEQ ID NO: 6106 - DNA, 20 bp, synthetic construct
  source 1..20: mol_type = other DNA
tgaaaccttgtctctaccaa

SEQ ID NO: 6107 - DNA, 20 bp, synthetic construct
  source 1..20: mol_type = other DNA
gtgaaaccttgtctctacca

SEQ ID NO: 6108 - DNA, 20 bp, synthetic construct
  source 1..20: mol_type = other DNA
ggtgaaaccttgtctctacc

SEQ ID NO: 6109 - DNA, 20 bp, synthetic construct
  source 1..20: mol_type = other DNA
tggtgaaaccttgtctctac

SEQ ID NO: 6110 - DNA, 20 bp, synthetic construct
  source 1..20: mol_type = other DNA
atggtgaaaccttgtctcta

SEQ ID NO: 6111 - DNA, 20 bp, synthetic construct
  source 1..20: mol_type = other DNA
catggtgaaaccttgtctct

SEQ ID NO: 6112 - DNA, 20 bp, synthetic construct
  source 1..20: mol_type = other DNA
acatggtgaaaccttgtctc

SEQ ID NO: 6113 - DNA, 20 bp, synthetic construct
  source 1..20: mol_type = other DNA
aacatggtgaaaccttgtct

SEQ ID NO: 6114 - DNA, 20 bp, synthetic construct
  source 1..20: mol_type = other DNA
caacatggtgaaaccttgtc

SEQ ID NO: 6115 - DNA, 20 bp, synthetic construct
  source 1..20: mol_type = other DNA
ccaacatggtgaaaccttgt

SEQ ID NO: 6116 - DNA, 20 bp, synthetic construct
  source 1..20: mol_type = other DNA
gccaacatggtgaaaccttg

SEQ ID NO: 6117 - DNA, 20 bp, synthetic construct
  source 1..20: mol_type = other DNA
ggccaacatggtgaaacctt

SEQ ID NO: 6118 - DNA, 20 bp, synthetic construct
  source 1..20: mol_type = other DNA
tggccaacatggtgaaacct

SEQ ID NO: 6119 - DNA, 20 bp, synthetic construct
  source 1..20: mol_type = other DNA
ctggccaacatggtgaaacc

SEQ ID NO: 6120 - DNA, 20 bp, synthetic construct
  source 1..20: mol_type = other DNA
actggccaacatggtgaaac

SEQ ID NO: 6121 - DNA, 20 bp, synthetic construct
  source 1..20: mol_type = other DNA
aactggccaacatggtgaaa

SEQ ID NO: 6122 - DNA, 20 bp, synthetic construct
  source 1..20: mol_type = other DNA
aaactggccaacatggtgaa

SEQ ID NO: 6123 - DNA, 20 bp, synthetic construct
  source 1..20: mol_type = other DNA
caaactggccaacatggtga

SEQ ID NO: 6124 - DNA, 20 bp, synthetic construct
  source 1..20: mol_type = other DNA
ccaaactggccaacatggtg

SEQ ID NO: 6125 - DNA, 20 bp, synthetic construct
  source 1..20: mol_type = other DNA
accaaactggccaacatggt

SEQ ID NO: 6126 - DNA, 20 bp, synthetic construct
  source 1..20: mol_type = other DNA
gaccaaactggccaacatgg

SEQ ID NO: 6127 - DNA, 20 bp, synthetic construct
  source 1..20: mol_type = other DNA
agaccaaactggccaacatg

SEQ ID NO: 6128 - DNA, 20 bp, synthetic construct
  source 1..20: mol_type = other DNA
gagaccaaactggccaacat

SEQ ID NO: 6129 - DNA, 20 bp, synthetic construct
  source 1..20: mol_type = other DNA
cgagaccaaactggccaaca

SEQ ID NO: 6130 - DNA, 20 bp, synthetic construct
  source 1..20: mol_type = other DNA
acgagaccaaactggccaac

SEQ ID NO: 6131 - DNA, 20 bp, synthetic construct
  source 1..20: mol_type = other DNA
tacgagaccaaactggccaa

SEQ ID NO: 6132 - DNA, 20 bp, synthetic construct
  source 1..20: mol_type = other DNA
gtacgagaccaaactggcca

SEQ ID NO: 6133 - DNA, 20 bp, synthetic construct
  source 1..20: mol_type = other DNA
agtacgagaccaaactggcc

SEQ ID NO: 6134 - DNA, 20 bp, synthetic construct
  source 1..20: mol_type = other DNA
tagtacgagaccaaactggc

SEQ ID NO: 6135 - DNA, 20 bp, synthetic construct
  source 1..20: mol_type = other DNA
gtagtacgagaccaaactgg

SEQ ID NO: 6136 - DNA, 20 bp, synthetic construct
  source 1..20: mol_type = other DNA
ggtagtacgagaccaaactg

SEQ ID NO: 6137 - DNA, 20 bp, synthetic construct
  source 1..20: mol_type = other DNA
cggtagtacgagaccaaact

SEQ ID NO: 6138 - DNA, 20 bp, synthetic construct
  source 1..20: mol_type = other DNA
tcggtagtacgagaccaaac

SEQ ID NO: 6139 - DNA, 20 bp, synthetic construct
  source 1..20: mol_type = other DNA
gtcggtagtacgagaccaaa

SEQ ID NO: 6140 - DNA, 20 bp, synthetic construct
  source 1..20: mol_type = other DNA
ggtcggtagtacgagaccaa

SEQ ID NO: 6141 - DNA, 20 bp, synthetic construct
  source 1..20: mol_type = other DNA
aggtcggtagtacgagacca

SEQ ID NO: 6142 - DNA, 20 bp, synthetic construct
  source 1..20: mol_type = other DNA
gaggtcggtagtacgagacc

SEQ ID NO: 6143 - DNA, 20 bp, synthetic construct
  source 1..20: mol_type = other DNA
tgaggtcggtagtacgagac

SEQ ID NO: 6144 - DNA, 20 bp, synthetic construct
  source 1..20: mol_type = other DNA
ctgaggtcggtagtacgaga

SEQ ID NO: 6145 - DNA, 20 bp, synthetic construct
  source 1..20: mol_type = other DNA
cctgaggtcggtagtacgag

SEQ ID NO: 6146 - DNA, 20 bp, synthetic construct
  source 1..20: mol_type = other DNA
acctgaggtcggtagtacga

SEQ ID NO: 6147 - DNA, 20 bp, synthetic construct
  source 1..20: mol_type = other DNA
cacctgaggtcggtagtacg

SEQ ID NO: 6148 - DNA, 20 bp, synthetic construct
  source 1..20: mol_type = other DNA
tcacctgaggtcggtagtac

SEQ ID NO: 6149 - DNA, 20 bp, synthetic construct
  source 1..20: mol_type = other DNA
atcacctgaggtcggtagta

SEQ ID NO: 6150 - DNA, 20 bp, synthetic construct
  source 1..20: mol_type = other DNA
catcacctgaggtcggtagt

SEQ ID NO: 6151 - DNA, 20 bp, synthetic construct
  source 1..20: mol_type = other DNA
gcatcacctgaggtcggtag

SEQ ID NO: 6152 - DNA, 20 bp, synthetic construct
  source 1..20: mol_type = other DNA
cgcatcacctgaggtcggta

SEQ ID NO: 6153 - DNA, 20 bp, synthetic construct
  source 1..20: mol_type = other DNA
gcgcatcacctgaggtcggt

SEQ ID NO: 6154 - DNA, 20 bp, synthetic construct
  source 1..20: mol_type = other DNA
ggcgcatcacctgaggtcgg

SEQ ID NO: 6155 - DNA, 20 bp, synthetic construct
  source 1..20: mol_type = other DNA
gggcgcatcacctgaggtcg

SEQ ID NO: 6156 - DNA, 20 bp, synthetic construct
  source 1..20: mol_type = other DNA
cgggcgcatcacctgaggtc

SEQ ID NO: 6157 - DNA, 20 bp, synthetic construct
  source 1..20: mol_type = other DNA
gcgggcgcatcacctgaggt

SEQ ID NO: 6158 - DNA, 20 bp, synthetic construct
  source 1..20: mol_type = other DNA
ggcgggcgcatcacctgagg

SEQ ID NO: 6159 - DNA, 20 bp, synthetic construct
  source 1..20: mol_type = other DNA
aggcgggcgcatcacctgag

SEQ ID NO: 6160 - DNA, 20 bp, synthetic construct
  source 1..20: mol_type = other DNA
gaggcgggcgcatcacctga

SEQ ID NO: 6161 - DNA, 20 bp, synthetic construct
  source 1..20: mol_type = other DNA
cgaggcgggcgcatcacctg

SEQ ID NO: 6162 - DNA, 20 bp, synthetic construct
  source 1..20: mol_type = other DNA
ccgaggcgggcgcatcacct

SEQ ID NO: 6163 - DNA, 20 bp, synthetic construct
  source 1..20: mol_type = other DNA
gccgaggcgggcgcatcacc

SEQ ID NO: 6164 - DNA, 20 bp, synthetic construct
  source 1..20: mol_type = other DNA
ggccgaggcgggcgcatcac

SEQ ID NO: 6165 - DNA, 20 bp, synthetic construct
  source 1..20: mol_type = other DNA
aggccgaggcgggcgcatca

SEQ ID NO: 6166 - DNA, 20 bp, synthetic construct
  source 1..20: mol_type = other DNA
gaggccgaggcgggcgcatc

SEQ ID NO: 6167 - DNA, 20 bp, synthetic construct
  source 1..20: mol_type = other DNA
ggaggccgaggcgggcgcat

SEQ ID NO: 6168 - DNA, 20 bp, synthetic construct
  source 1..20: mol_type = other DNA
gggaggccgaggcgggcgca

SEQ ID NO: 6169 - DNA, 20 bp, synthetic construct
  source 1..20: mol_type = other DNA
tgggaggccgaggcgggcgc

SEQ ID NO: 6170 - DNA, 20 bp, synthetic construct
  source 1..20: mol_type = other DNA
ttgggaggccgaggcgggcg

SEQ ID NO: 6171 - DNA, 20 bp, synthetic construct
  source 1..20: mol_type = other DNA
tttgggaggccgaggcgggc

SEQ ID NO: 6172 - DNA, 20 bp, synthetic construct
  source 1..20: mol_type = other DNA
ctttgggaggccgaggcggg

SEQ ID NO: 6173 - DNA, 20 bp, synthetic construct
  source 1..20: mol_type = other DNA
actttgggaggccgaggcgg

SEQ ID NO: 6174 - DNA, 20 bp, synthetic construct
  source 1..20: mol_type = other DNA
cactttgggaggccgaggcg

SEQ ID NO: 6175 - DNA, 20 bp, synthetic construct
  source 1..20: mol_type = other DNA
gcactttgggaggccgaggc

SEQ ID NO: 6176 - DNA, 20 bp, synthetic construct
  source 1..20: mol_type = other DNA
agcactttgggaggccgagg

SEQ ID NO: 6177 - DNA, 20 bp, synthetic construct
  source 1..20: mol_type = other DNA
cagcactttgggaggccgag

SEQ ID NO: 6178 - DNA, 20 bp, synthetic construct
  source 1..20: mol_type = other DNA
ccagcactttgggaggccga

SEQ ID NO: 6179 - DNA, 20 bp, synthetic construct
  source 1..20: mol_type = other DNA
cccagcactttgggaggccg

SEQ ID NO: 6180 - DNA, 20 bp, synthetic construct
  source 1..20: mol_type = other DNA
tcccagcactttgggaggcc

SEQ ID NO: 6181 - DNA, 20 bp, synthetic construct
  source 1..20: mol_type = other DNA
atcccagcactttgggaggc

SEQ ID NO: 6182 - DNA, 20 bp, synthetic construct
  source 1..20: mol_type = other DNA
aatcccagcactttgggagg

SEQ ID NO: 6183 - DNA, 20 bp, synthetic construct
  source 1..20: mol_type = other DNA
caatcccagcactttgggag

SEQ ID NO: 6184 - DNA, 20 bp, synthetic construct
  source 1..20: mol_type = other DNA
gcaatcccagcactttggga

SEQ ID NO: 6185 - DNA, 20 bp, synthetic construct
  source 1..20: mol_type = other DNA
tgcaatcccagcactttggg

SEQ ID NO: 6186 - DNA, 20 bp, synthetic construct
  source 1..20: mol_type = other DNA
ctgcaatcccagcactttgg

SEQ ID NO: 6187 - DNA, 20 bp, synthetic construct
  source 1..20: mol_type = other DNA
cctgcaatcccagcactttg

SEQ ID NO: 6188 - DNA, 20 bp, synthetic construct
  source 1..20: mol_type = other DNA
gcctgcaatcccagcacttt

SEQ ID NO: 6189 - DNA, 20 bp, synthetic construct
  source 1..20: mol_type = other DNA
cgcctgcaatcccagcactt

SEQ ID NO: 6190 - DNA, 20 bp, synthetic construct
  source 1..20: mol_type = other DNA
acgcctgcaatcccagcact

SEQ ID NO: 6191 - DNA, 20 bp, synthetic construct
  source 1..20: mol_type = other DNA
cacgcctgcaatcccagcac

SEQ ID NO: 6192 - DNA, 20 bp, synthetic construct
  source 1..20: mol_type = other DNA
tcacgcctgcaatcccagca

SEQ ID NO: 6193 - DNA, 20 bp, synthetic construct
  source 1..20: mol_type = other DNA
ctcacgcctgcaatcccagc

SEQ ID NO: 6194 - DNA, 20 bp, synthetic construct
  source 1..20: mol_type = other DNA
gctcacgcctgcaatcccag

SEQ ID NO: 6195 - DNA, 20 bp, synthetic construct
  source 1..20: mol_type = other DNA
ggctcacgcctgcaatccca

SEQ ID NO: 6196 - DNA, 20 bp, synthetic construct
  source 1..20: mol_type = other DNA
tggctcacgcctgcaatccc

SEQ ID NO: 6197 - DNA, 20 bp, synthetic construct
  source 1..20: mol_type = other DNA
gtggctcacgcctgcaatcc

SEQ ID NO: 6198 - DNA, 20 bp, synthetic construct
  source 1..20: mol_type = other DNA
agtggctcacgcctgcaatc

SEQ ID NO: 6199 - DNA, 20 bp, synthetic construct
  source 1..20: mol_type = other DNA
cagtggctcacgcctgcaat

SEQ ID NO: 6200 - DNA, 20 bp, synthetic construct
  source 1..20: mol_type = other DNA
gcagtggctcacgcctgcaa

SEQ ID NO: 6201 - DNA, 20 bp, synthetic construct
  source 1..20: mol_type = other DNA
cgcagtggctcacgcctgca

SEQ ID NO: 6202 - DNA, 20 bp, synthetic construct
  source 1..20: mol_type = other DNA
gcgcagtggctcacgcctgc

SEQ ID NO: 6203 - DNA, 20 bp, synthetic construct
  source 1..20: mol_type = other DNA
ggcgcagtggctcacgcctg

SEQ ID NO: 6204 - DNA, 20 bp, synthetic construct
  source 1..20: mol_type = other DNA
gggcgcagtggctcacgcct

SEQ ID NO: 6205 - DNA, 20 bp, synthetic construct
  source 1..20: mol_type = other DNA
cgggcgcagtggctcacgcc

SEQ ID NO: 6206 - DNA, 20 bp, synthetic construct
  source 1..20: mol_type = other DNA
ccgggcgcagtggctcacgc

SEQ ID NO: 6207 - DNA, 20 bp, synthetic construct
  source 1..20: mol_type = other DNA
gccgggcgcagtggctcacg

SEQ ID NO: 6208 - DNA, 20 bp, synthetic construct
  source 1..20: mol_type = other DNA
agccgggcgcagtggctcac

SEQ ID NO: 6209 - DNA, 20 bp, synthetic construct
  source 1..20: mol_type = other DNA
cagccgggcgcagtggctca

SEQ ID NO: 6210 - DNA, 20 bp, synthetic construct
  source 1..20: mol_type = other DNA
acagccgggcgcagtggctc

SEQ ID NO: 6211 - DNA, 20 bp, synthetic construct
  source 1..20: mol_type = other DNA
tacagccgggcgcagtggct

SEQ ID NO: 6212 - DNA, 20 bp, synthetic construct
  source 1..20: mol_type = other DNA
ttacagccgggcgcagtggc

SEQ ID NO: 6213 - DNA, 20 bp, synthetic construct
  source 1..20: mol_type = other DNA
cttacagccgggcgcagtgg

SEQ ID NO: 6214 - DNA, 20 bp, synthetic construct
  source 1..20: mol_type = other DNA
ccttacagccgggcgcagtg

SEQ ID NO: 6215 - DNA, 20 bp, synthetic construct
  source 1..20: mol_type = other DNA
accttacagccgggcgcagt

SEQ ID NO: 6216 - DNA, 20 bp, synthetic construct
  source 1..20: mol_type = other DNA
aaccttacagccgggcgcag

SEQ ID NO: 6217 - DNA, 20 bp, synthetic construct
  source 1..20: mol_type = other DNA
aaaccttacagccgggcgca

SEQ ID NO: 6218 - DNA, 20 bp, synthetic construct
  source 1..20: mol_type = other DNA
aaaaccttacagccgggcgc

SEQ ID NO: 6219 - DNA, 20 bp, synthetic construct
  source 1..20: mol_type = other DNA
aaaaaccttacagccgggcg

SEQ ID NO: 6220 - DNA, 20 bp, synthetic construct
  source 1..20: mol_type = other DNA
taaaaaccttacagccgggc

SEQ ID NO: 6221 - DNA, 20 bp, synthetic construct
  source 1..20: mol_type = other DNA
gtaaaaaccttacagccggg

SEQ ID NO: 6222 - DNA, 20 bp, synthetic construct
  source 1..20: mol_type = other DNA
agtaaaaaccttacagccgg

SEQ ID NO: 6223 - DNA, 20 bp, synthetic construct
  source 1..20: mol_type = other DNA
aagtaaaaaccttacagccg

SEQ ID NO: 6224 - DNA, 20 bp, synthetic construct
  source 1..20: mol_type = other DNA
taagtaaaaaccttacagcc

SEQ ID NO: 6225 - DNA, 20 bp, synthetic construct
  source 1..20: mol_type = other DNA
ttaagtaaaaaccttacagc

SEQ ID NO: 6226 - DNA, 20 bp, synthetic construct
  source 1..20: mol_type = other DNA
gttaagtaaaaaccttacag

SEQ ID NO: 6227 - DNA, 20 bp, synthetic construct
  source 1..20: mol_type = other DNA
ggttaagtaaaaaccttaca

SEQ ID NO: 6228 - DNA, 20 bp, synthetic construct
  source 1..20: mol_type = other DNA
tggttaagtaaaaaccttac

SEQ ID NO: 6229 - DNA, 20 bp, synthetic construct
  source 1..20: mol_type = other DNA
atggttaagtaaaaacctta

SEQ ID NO: 6230 - DNA, 20 bp, synthetic construct
  source 1..20: mol_type = other DNA
aatggttaagtaaaaacctt

SEQ ID NO: 6231 - DNA, 20 bp, synthetic construct
  source 1..20: mol_type = other DNA
gaatggttaagtaaaaacct

SEQ ID NO: 6232 - DNA, 20 bp, synthetic construct
  source 1..20: mol_type = other DNA
agaatggttaagtaaaaacc

SEQ ID NO: 6233 - DNA, 20 bp, synthetic construct
  source 1..20: mol_type = other DNA
tagaatggttaagtaaaaac

SEQ ID NO: 6234 - DNA, 20 bp, synthetic construct
  source 1..20: mol_type = other DNA
atagaatggttaagtaaaaa

SEQ ID NO: 6235 - DNA, 20 bp, synthetic construct
  source 1..20: mol_type = other DNA
aatagaatggttaagtaaaa

SEQ ID NO: 6236 - DNA, 20 bp, synthetic construct
  source 1..20: mol_type = other DNA
caatagaatggttaagtaaa

SEQ ID NO: 6237 - DNA, 20 bp, synthetic construct
  source 1..20: mol_type = other DNA
acaatagaatggttaagtaa

SEQ ID NO: 6238 - DNA, 20 bp, synthetic construct
  source 1..20: mol_type = other DNA
aacaatagaatggttaagta

SEQ ID NO: 6239 - DNA, 20 bp, synthetic construct
  source 1..20: mol_type = other DNA
caacaatagaatggttaagt

SEQ ID NO: 6240 - DNA, 20 bp, synthetic construct
  source 1..20: mol_type = other DNA
ccaacaatagaatggttaag

SEQ ID NO: 6241 - DNA, 20 bp, synthetic construct
  source 1..20: mol_type = other DNA
cccaacaatagaatggttaa

SEQ ID NO: 6242 - DNA, 20 bp, synthetic construct
  source 1..20: mol_type = other DNA
tcccaacaatagaatggtta

SEQ ID NO: 6243 - DNA, 20 bp, synthetic construct
  source 1..20: mol_type = other DNA
ttcccaacaatagaatggtt

SEQ ID NO: 6244 - DNA, 20 bp, synthetic construct
  source 1..20: mol_type = other DNA
attcccaacaatagaatggt

SEQ ID NO: 6245 - DNA, 20 bp, synthetic construct
  source 1..20: mol_type = other DNA
aattcccaacaatagaatgg

SEQ ID NO: 6246 - DNA, 20 bp, synthetic construct
  source 1..20: mol_type = other DNA
caattcccaacaatagaatg

SEQ ID NO: 6247 - DNA, 20 bp, synthetic construct
  source 1..20: mol_type = other DNA
ccaattcccaacaatagaat

SEQ ID NO: 6248 - DNA, 20 bp, synthetic construct
  source 1..20: mol_type = other DNA
cccaattcccaacaatagaa

SEQ ID NO: 6249 - DNA, 20 bp, synthetic construct
  source 1..20: mol_type = other DNA
acccaattcccaacaataga

SEQ ID NO: 6250 - DNA, 20 bp, synthetic construct
  source 1..20: mol_type = other DNA
aacccaattcccaacaatag

SEQ ID NO: 6251 - DNA, 20 bp, synthetic construct
  source 1..20: mol_type = other DNA
aaacccaattcccaacaata

SEQ ID NO: 6252 - DNA, 20 bp, synthetic construct
  source 1..20: mol_type = other DNA
gaaacccaattcccaacaat

SEQ ID NO: 6253 - DNA, 20 bp, synthetic construct
  source 1..20: mol_type = other DNA
ggaaacccaattcccaacaa

SEQ ID NO: 6254 - DNA, 20 bp, synthetic construct
  source 1..20: mol_type = other DNA
tggaaacccaattcccaaca

SEQ ID NO: 6255 - DNA, 20 bp, synthetic construct
  source 1..20: mol_type = other DNA
gtggaaacccaattcccaac

SEQ ID NO: 6256 - DNA, 20 bp, synthetic construct
  source 1..20: mol_type = other DNA
agtggaaacccaattcccaa

SEQ ID NO: 6257 - DNA, 20 bp, synthetic construct
  source 1..20: mol_type = other DNA
aagtggaaacccaattccca

SEQ ID NO: 6258 - DNA, 20 bp, synthetic construct
  source 1..20: mol_type = other DNA
aaagtggaaacccaattccc

SEQ ID NO: 6259 - DNA, 20 bp, synthetic construct
  source 1..20: mol_type = other DNA
aaaagtggaaacccaattcc

SEQ ID NO: 6260 - DNA, 20 bp, synthetic construct
  source 1..20: mol_type = other DNA
aaaaagtggaaacccaattc

SEQ ID NO: 6261 - DNA, 20 bp, synthetic construct
  source 1..20: mol_type = other DNA
aaaaaagtggaaacccaatt

SEQ ID NO: 6262 - DNA, 20 bp, synthetic construct
  source 1..20: mol_type = other DNA
caaaaaagtggaaacccaat

SEQ ID NO: 6263 - DNA, 20 bp, synthetic construct
  source 1..20: mol_type = other DNA
acaaaaaagtggaaacccaa

SEQ ID NO: 6264 - DNA, 20 bp, synthetic construct
  source 1..20: mol_type = other DNA
aacaaaaaagtggaaaccca

SEQ ID NO: 6265 - DNA, 20 bp, synthetic construct
  source 1..20: mol_type = other DNA
taacaaaaaagtggaaaccc

SEQ ID NO: 6266 - DNA, 20 bp, synthetic construct
  source 1..20: mol_type = other DNA
ataacaaaaaagtggaaacc

SEQ ID NO: 6267 - DNA, 20 bp, synthetic construct
  source 1..20: mol_type = other DNA
tataacaaaaaagtggaaac

SEQ ID NO: 6268 - DNA, 20 bp, synthetic construct
  source 1..20: mol_type = other DNA
ctataacaaaaaagtggaaa

SEQ ID NO: 6269 - DNA, 20 bp, synthetic construct
  source 1..20: mol_type = other DNA
tctataacaaaaaagtggaa

SEQ ID NO: 6270 - DNA, 20 bp, synthetic construct
  source 1..20: mol_type = other DNA
atctataacaaaaaagtgga

SEQ ID NO: 6271 - DNA, 20 bp, synthetic construct
  source 1..20: mol_type = other DNA
tatctataacaaaaaagtgg

SEQ ID NO: 6272 - DNA, 20 bp, synthetic construct
  source 1..20: mol_type = other DNA
ctatctataacaaaaaagtg

SEQ ID NO: 6273 - DNA, 20 bp, synthetic construct
  source 1..20: mol_type = other DNA
actatctataacaaaaaagt

SEQ ID NO: 6274 - DNA, 20 bp, synthetic construct
  source 1..20: mol_type = other DNA
cactatctataacaaaaaag

SEQ ID NO: 6275 - DNA, 20 bp, synthetic construct
  source 1..20: mol_type = other DNA
ccactatctataacaaaaaa

SEQ ID NO: 6276 - DNA, 20 bp, synthetic construct
  source 1..20: mol_type = other DNA
accactatctataacaaaaa

SEQ ID NO: 6277 - DNA, 20 bp, synthetic construct
  source 1..20: mol_type = other DNA
caccactatctataacaaaa

SEQ ID NO: 6278 - DNA, 20 bp, synthetic construct
  source 1..20: mol_type = other DNA
gcaccactatctataacaaa

SEQ ID NO: 6279 - DNA, 20 bp, synthetic construct
  source 1..20: mol_type = other DNA
tgcaccactatctataacaa

SEQ ID NO: 6280 - DNA, 20 bp, synthetic construct
  source 1..20: mol_type = other DNA
ctgcaccactatctataaca

SEQ ID NO: 6281 - DNA, 20 bp, synthetic construct
  source 1..20: mol_type = other DNA
actgcaccactatctataac

SEQ ID NO: 6282 - DNA, 20 bp, synthetic construct
  source 1..20: mol_type = other DNA
cactgcaccactatctataa

SEQ ID NO: 6283 - DNA, 20 bp, synthetic construct
  source 1..20: mol_type = other DNA
tcactgcaccactatctata

SEQ ID NO: 6284 - DNA, 20 bp, synthetic construct
  source 1..20: mol_type = other DNA
ttcactgcaccactatctat

SEQ ID NO: 6285 - DNA, 20 bp, synthetic construct
  source 1..20: mol_type = other DNA
gttcactgcaccactatcta

SEQ ID NO: 6286 - DNA, 20 bp, synthetic construct
  source 1..20: mol_type = other DNA
tgttcactgcaccactatct

SEQ ID NO: 6287 - DNA, 20 bp, synthetic construct
  source 1..20: mol_type = other DNA
atgttcactgcaccactatc

SEQ ID NO: 6288 - DNA, 20 bp, synthetic construct
  source 1..20: mol_type = other DNA
aatgttcactgcaccactat

SEQ ID NO: 6289 - DNA, 20 bp, synthetic construct
  source 1..20: mol_type = other DNA
aaatgttcactgcaccacta

SEQ ID NO: 6290 - DNA, 20 bp, synthetic construct
  source 1..20: mol_type = other DNA
aaaatgttcactgcaccact

SEQ ID NO: 6291 - DNA, 20 bp, synthetic construct
  source 1..20: mol_type = other DNA
aaaaatgttcactgcaccac

SEQ ID NO: 6292 - DNA, 20 bp, synthetic construct
  source 1..20: mol_type = other DNA
taaaaatgttcactgcacca

SEQ ID NO: 6293 - DNA, 20 bp, synthetic construct
  source 1..20: mol_type = other DNA
ttaaaaatgttcactgcacc

SEQ ID NO: 6294 - DNA, 20 bp, synthetic construct
  source 1..20: mol_type = other DNA
tttaaaaatgttcactgcac

SEQ ID NO: 6295 - DNA, 20 bp, synthetic construct
  source 1..20: mol_type = other DNA
atttaaaaatgttcactgca

SEQ ID NO: 6296 - DNA, 20 bp, synthetic construct
  source 1..20: mol_type = other DNA
tatttaaaaatgttcactgc

SEQ ID NO: 6297 - DNA, 20 bp, synthetic construct
  source 1..20: mol_type = other DNA
ctatttaaaaatgttcactg

SEQ ID NO: 6298 - DNA, 20 bp, synthetic construct
  source 1..20: mol_type = other DNA
gctatttaaaaatgttcact

SEQ ID NO: 6299 - DNA, 20 bp, synthetic construct
  source 1..20: mol_type = other DNA
agctatttaaaaatgttcac

SEQ ID NO: 6300 - DNA, 20 bp, synthetic construct
  source 1..20: mol_type = other DNA
aagctatttaaaaatgttca

SEQ ID NO: 6301 - DNA, 20 bp, synthetic construct
  source 1..20: mol_type = other DNA
aaagctatttaaaaatgttc

SEQ ID NO: 6302 - DNA, 20 bp, synthetic construct
  source 1..20: mol_type = other DNA
aaaagctatttaaaaatgtt

SEQ ID NO: 6303 - DNA, 20 bp, synthetic construct
  source 1..20: mol_type = other DNA
aaaaagctatttaaaaatgt

SEQ ID NO: 6304 - DNA, 20 bp, synthetic construct
  source 1..20: mol_type = other DNA
caaaaagctatttaaaaatg

SEQ ID NO: 6305 - DNA, 20 bp, synthetic construct
  source 1..20: mol_type = other DNA
gcaaaaagctatttaaaaat

SEQ ID NO: 6306 - DNA, 20 bp, synthetic construct
  source 1..20: mol_type = other DNA
agcaaaaagctatttaaaaa

SEQ ID NO: 6307 - DNA, 20 bp, synthetic construct
  source 1..20: mol_type = other DNA
aagcaaaaagctatttaaaa

SEQ ID NO: 6308 - DNA, 20 bp, synthetic construct
  source 1..20: mol_type = other DNA
gaagcaaaaagctatttaaa

SEQ ID NO: 6309 - DNA, 20 bp, synthetic construct
  source 1..20: mol_type = other DNA
tgaagcaaaaagctatttaa

SEQ ID NO: 6310 - DNA, 20 bp, synthetic construct
  source 1..20: mol_type = other DNA
ctgaagcaaaaagctattta

SEQ ID NO: 6311 - DNA, 20 bp, synthetic construct
  source 1..20: mol_type = other DNA
actgaagcaaaaagctattt

SEQ ID NO: 6312 - DNA, 20 bp, synthetic construct
  source 1..20: mol_type = other DNA
cactgaagcaaaaagctatt

SEQ ID NO: 6313 - DNA, 20 bp, synthetic construct
  source 1..20: mol_type = other DNA
acactgaagcaaaaagctat

SEQ ID NO: 6314 - DNA, 20 bp, synthetic construct
  source 1..20: mol_type = other DNA
tacactgaagcaaaaagcta

SEQ ID NO: 6315 - DNA, 20 bp, synthetic construct
  source 1..20: mol_type = other DNA
ttacactgaagcaaaaagct

SEQ ID NO: 6316 - DNA, 20 bp, synthetic construct
  source 1..20: mol_type = other DNA
attacactgaagcaaaaagc

SEQ ID NO: 6317 - DNA, 20 bp, synthetic construct
  source 1..20: mol_type = other DNA
aattacactgaagcaaaaag

SEQ ID NO: 6318 - DNA, 20 bp, synthetic construct
  source 1..20: mol_type = other DNA
taattacactgaagcaaaaa

SEQ ID NO: 6319 - DNA, 20 bp, synthetic construct
  source 1..20: mol_type = other DNA
ataattacactgaagcaaaa

SEQ ID NO: 6320 - DNA, 20 bp, synthetic construct
  source 1..20: mol_type = other DNA
aataattacactgaagcaaa

SEQ ID NO: 6321 - DNA, 20 bp, synthetic construct
  source 1..20: mol_type = other DNA
aaataattacactgaagcaa

SEQ ID NO: 6322 - DNA, 20 bp, synthetic construct
  source 1..20: mol_type = other DNA
gaaataattacactgaagca

SEQ ID NO: 6323 - DNA, 20 bp, synthetic construct
  source 1..20: mol_type = other DNA
ggaaataattacactgaagc

SEQ ID NO: 6324 - DNA, 20 bp, synthetic construct
  source 1..20: mol_type = other DNA
aggaaataattacactgaag

SEQ ID NO: 6325 - DNA, 20 bp, synthetic construct
  source 1..20: mol_type = other DNA
aaggaaataattacactgaa

SEQ ID NO: 6326 - DNA, 20 bp, synthetic construct
  source 1..20: mol_type = other DNA
taaggaaataattacactga

SEQ ID NO: 6327 - DNA, 20 bp, synthetic construct
  source 1..20: mol_type = other DNA
ctaaggaaataattacactg

SEQ ID NO: 6328 - DNA, 20 bp, synthetic construct
  source 1..20: mol_type = other DNA
tctaaggaaataattacact

SEQ ID NO: 6329 - DNA, 20 bp, synthetic construct
  source 1..20: mol_type = other DNA
ctctaaggaaataattacac

SEQ ID NO: 6330 - DNA, 20 bp, synthetic construct
  source 1..20: mol_type = other DNA
tctctaaggaaataattaca

SEQ ID NO: 6331 - DNA, 20 bp, synthetic construct
  source 1..20: mol_type = other DNA
ttctctaaggaaataattac

SEQ ID NO: 6332 - DNA, 20 bp, synthetic construct
  source 1..20: mol_type = other DNA
tttctctaaggaaataatta

SEQ ID NO: 6333 - DNA, 20 bp, synthetic construct
  source 1..20: mol_type = other DNA
ctttctctaaggaaataatt

SEQ ID NO: 6334 - DNA, 20 bp, synthetic construct
  source 1..20: mol_type = other DNA
actttctctaaggaaataat

SEQ ID NO: 6335 - DNA, 20 bp, synthetic construct
  source 1..20: mol_type = other DNA
aactttctctaaggaaataa

SEQ ID NO: 6336 - DNA, 20 bp, synthetic construct
  source 1..20: mol_type = other DNA
taactttctctaaggaaata

SEQ ID NO: 6337 - DNA, 20 bp, synthetic construct
  source 1..20: mol_type = other DNA
gtaactttctctaaggaaat

SEQ ID NO: 6338 - DNA, 20 bp, synthetic construct
  source 1..20: mol_type = other DNA
ggtaactttctctaaggaaa

SEQ ID NO: 6339 - DNA, 20 bp, synthetic construct
  source 1..20: mol_type = other DNA
tggtaactttctctaaggaa

SEQ ID NO: 6340 - DNA, 20 bp, synthetic construct
  source 1..20: mol_type = other DNA
ttggtaactttctctaagga

SEQ ID NO: 6341 - DNA, 20 bp, synthetic construct
  source 1..20: mol_type = other DNA
cttggtaactttctctaagg

SEQ ID NO: 6342 - DNA, 20 bp, synthetic construct
  source 1..20: mol_type = other DNA
tcttggtaactttctctaag

SEQ ID NO: 6343 - DNA, 20 bp, synthetic construct
  source 1..20: mol_type = other DNA
ctcttggtaactttctctaa

SEQ ID NO: 6344 - DNA, 20 bp, synthetic construct
  source 1..20: mol_type = other DNA
actcttggtaactttctcta

SEQ ID NO: 6345 - DNA, 20 bp, synthetic construct
  source 1..20: mol_type = other DNA
cactcttggtaactttctct

SEQ ID NO: 6346 - DNA, 20 bp, synthetic construct
  source 1..20: mol_type = other DNA
ccactcttggtaactttctc

SEQ ID NO: 6347 - DNA, 20 bp, synthetic construct
  source 1..20: mol_type = other DNA
accactcttggtaactttct

SEQ ID NO: 6348 - DNA, 20 bp, synthetic construct
  source 1..20: mol_type = other DNA
aaccactcttggtaactttc

SEQ ID NO: 6349 - DNA, 20 bp, synthetic construct
  source 1..20: mol_type = other DNA
aaaccactcttggtaacttt

SEQ ID NO: 6350 - DNA, 20 bp, synthetic construct
  source 1..20: mol_type = other DNA
aaaaccactcttggtaactt

SEQ ID NO: 6351 - DNA, 20 bp, synthetic construct
  source 1..20: mol_type = other DNA
taaaaccactcttggtaact

SEQ ID NO: 6352 - DNA, 20 bp, synthetic construct
  source 1..20: mol_type = other DNA
gtaaaaccactcttggtaac

SEQ ID NO: 6353 - DNA, 20 bp, synthetic construct
  source 1..20: mol_type = other DNA
agtaaaaccactcttggtaa

SEQ ID NO: 6354 - DNA, 20 bp, synthetic construct
  source 1..20: mol_type = other DNA
tagtaaaaccactcttggta

SEQ ID NO: 6355 - DNA, 20 bp, synthetic construct
  source 1..20: mol_type = other DNA
ctagtaaaaccactcttggt

SEQ ID NO: 6356 - DNA, 20 bp, synthetic construct
  source 1..20: mol_type = other DNA
actagtaaaaccactcttgg

SEQ ID NO: 6357 - DNA, 20 bp, synthetic construct
  source 1..20: mol_type = other DNA
aactagtaaaaccactcttg

SEQ ID NO: 6358 - DNA, 20 bp, synthetic construct
  source 1..20: mol_type = other DNA
gaactagtaaaaccactctt

SEQ ID NO: 6359 - DNA, 20 bp, synthetic construct
  source 1..20: mol_type = other DNA
tgaactagtaaaaccactct

SEQ ID NO: 6360 - DNA, 20 bp, synthetic construct
  source 1..20: mol_type = other DNA
ctgaactagtaaaaccactc

SEQ ID NO: 6361 - DNA, 20 bp, synthetic construct
  source 1..20: mol_type = other DNA
tctgaactagtaaaaccact

SEQ ID NO: 6362 - DNA, 20 bp, synthetic construct
  source 1..20: mol_type = other DNA
ctctgaactagtaaaaccac

SEQ ID NO: 6363 - DNA, 20 bp, synthetic construct
  source 1..20: mol_type = other DNA
cctctgaactagtaaaacca

SEQ ID NO: 6364 - DNA, 20 bp, synthetic construct
  source 1..20: mol_type = other DNA
ccctctgaactagtaaaacc

SEQ ID NO: 6365 - DNA, 20 bp, synthetic construct
  source 1..20: mol_type = other DNA
gccctctgaactagtaaaac

SEQ ID NO: 6366 - DNA, 20 bp, synthetic construct
  source 1..20: mol_type = other DNA
agccctctgaactagtaaaa

SEQ ID NO: 6367 - DNA, 20 bp, synthetic construct
  source 1..20: mol_type = other DNA
aagccctctgaactagtaaa

SEQ ID NO: 6368 - DNA, 20 bp, synthetic construct
  source 1..20: mol_type = other DNA
gaagccctctgaactagtaa

SEQ ID NO: 6369 - DNA, 20 bp, synthetic construct
  source 1..20: mol_type = other DNA
tgaagccctctgaactagta

SEQ ID NO: 6370 - DNA, 20 bp, synthetic construct
  source 1..20: mol_type = other DNA
ctgaagccctctgaactagt

SEQ ID NO: 6371 - DNA, 20 bp, synthetic construct
  source 1..20: mol_type = other DNA
cctgaagccctctgaactag

SEQ ID NO: 6372 - DNA, 20 bp, synthetic construct
  source 1..20: mol_type = other DNA
tcctgaagccctctgaacta

SEQ ID NO: 6373 - DNA, 20 bp, synthetic construct
  source 1..20: mol_type = other DNA
atcctgaagccctctgaact

SEQ ID NO: 6374 - DNA, 20 bp, synthetic construct
  source 1..20: mol_type = other DNA
aatcctgaagccctctgaac

SEQ ID NO: 6375 - DNA, 20 bp, synthetic construct
  source 1..20: mol_type = other DNA
aaatcctgaagccctctgaa

SEQ ID NO: 6376 - DNA, 20 bp, synthetic construct
  source 1..20: mol_type = other DNA
aaaatcctgaagccctctga

SEQ ID NO: 6377 - DNA, 20 bp, synthetic construct
  source 1..20: mol_type = other DNA
aaaaatcctgaagccctctg

SEQ ID NO: 6378 - DNA, 20 bp, synthetic construct
  source 1..20: mol_type = other DNA
taaaaatcctgaagccctct

SEQ ID NO: 6379 - DNA, 20 bp, synthetic construct
  source 1..20: mol_type = other DNA
ataaaaatcctgaagccctc

SEQ ID NO: 6380 - DNA, 20 bp, synthetic construct
  source 1..20: mol_type = other DNA
cataaaaatcctgaagccct

SEQ ID NO: 6381 - DNA, 20 bp, synthetic construct
  source 1..20: mol_type = other DNA
ccataaaaatcctgaagccc

SEQ ID NO: 6382 - DNA, 20 bp, synthetic construct
  source 1..20: mol_type = other DNA
gccataaaaatcctgaagcc

SEQ ID NO: 6383 - DNA, 20 bp, synthetic construct
  source 1..20: mol_type = other DNA
agccataaaaatcctgaagc

SEQ ID NO: 6384 - DNA, 20 bp, synthetic construct
  source 1..20: mol_type = other DNA
gagccataaaaatcctgaag

SEQ ID NO: 6385 - DNA, 20 bp, synthetic construct
  source 1..20: mol_type = other DNA
agagccataaaaatcctgaa

SEQ ID NO: 6386 - DNA, 20 bp, synthetic construct
  source 1..20: mol_type = other DNA
aagagccataaaaatcctga

SEQ ID NO: 6387 - DNA, 20 bp, synthetic construct
  source 1..20: mol_type = other DNA
caagagccataaaaatcctg

SEQ ID NO: 6388 - DNA, 20 bp, synthetic construct
  source 1..20: mol_type = other DNA
gcaagagccataaaaatcct

SEQ ID NO: 6389 - DNA, 20 bp, synthetic construct
  source 1..20: mol_type = other DNA
agcaagagccataaaaatcc

SEQ ID NO: 6390 - DNA, 20 bp, synthetic construct
  source 1..20: mol_type = other DNA
tagcaagagccataaaaatc

SEQ ID NO: 6391 - DNA, 20 bp, synthetic construct
  source 1..20: mol_type = other DNA
ctagcaagagccataaaaat

SEQ ID NO: 6392 - DNA, 20 bp, synthetic construct
  source 1..20: mol_type = other DNA
gctagcaagagccataaaaa

SEQ ID NO: 6393 - DNA, 20 bp, synthetic construct
  source 1..20: mol_type = other DNA
cgctagcaagagccataaaa

SEQ ID NO: 6394 - DNA, 20 bp, synthetic construct
  source 1..20: mol_type = other DNA
ccgctagcaagagccataaa

SEQ ID NO: 6395 - DNA, 20 bp, synthetic construct
  source 1..20: mol_type = other DNA
accgctagcaagagccataa

SEQ ID NO: 6396 - DNA, 20 bp, synthetic construct
  source 1..20: mol_type = other DNA
caccgctagcaagagccata

SEQ ID NO: 6397 - DNA, 20 bp, synthetic construct
  source 1..20: mol_type = other DNA
gcaccgctagcaagagccat

SEQ ID NO: 6398 - DNA, 20 bp, synthetic construct
  source 1..20: mol_type = other DNA
agcaccgctagcaagagcca

SEQ ID NO: 6399 - DNA, 20 bp, synthetic construct
  source 1..20: mol_type = other DNA
gagcaccgctagcaagagcc

SEQ ID NO: 6400 - DNA, 20 bp, synthetic construct
  source 1..20: mol_type = other DNA
agagcaccgctagcaagagc

SEQ ID NO: 6401 - DNA, 20 bp, synthetic construct
  source 1..20: mol_type = other DNA
tagagcaccgctagcaagag

SEQ ID NO: 6402 - DNA, 20 bp, synthetic construct
  source 1..20: mol_type = other DNA
atagagcaccgctagcaaga

SEQ ID NO: 6403 - DNA, 20 bp, synthetic construct
  source 1..20: mol_type = other DNA
aatagagcaccgctagcaag

SEQ ID NO: 6404 - DNA, 20 bp, synthetic construct
  source 1..20: mol_type = other DNA
taatagagcaccgctagcaa

SEQ ID NO: 6405 - DNA, 20 bp, synthetic construct
  source 1..20: mol_type = other DNA
ataatagagcaccgctagca

SEQ ID NO: 6406 - DNA, 20 bp, synthetic construct
  source 1..20: mol_type = other DNA
aataatagagcaccgctagc

SEQ ID NO: 6407 - DNA, 20 bp, synthetic construct
  source 1..20: mol_type = other DNA
gaataatagagcaccgctag

SEQ ID NO: 6408 - DNA, 20 bp, synthetic construct
  source 1..20: mol_type = other DNA
agaataatagagcaccgcta

SEQ ID NO: 6409 - DNA, 20 bp, synthetic construct
  source 1..20: mol_type = other DNA
aagaataatagagcaccgct

SEQ ID NO: 6410 - DNA, 20 bp, synthetic construct
  source 1..20: mol_type = other DNA
aaagaataatagagcaccgc

SEQ ID NO: 6411 - DNA, 20 bp, synthetic construct
  source 1..20: mol_type = other DNA
taaagaataatagagcaccg

SEQ ID NO: 6412 - DNA, 20 bp, synthetic construct
  source 1..20: mol_type = other DNA
ctaaagaataatagagcacc

SEQ ID NO: 6413 - DNA, 20 bp, synthetic construct
  source 1..20: mol_type = other DNA
tctaaagaataatagagcac

SEQ ID NO: 6414 - DNA, 20 bp, synthetic construct
  source 1..20: mol_type = other DNA
ttctaaagaataatagagca

SEQ ID NO: 6415 - DNA, 20 bp, synthetic construct
  source 1..20: mol_type = other DNA
cttctaaagaataatagagc

SEQ ID NO: 6416 - DNA, 20 bp, synthetic construct
  source 1..20: mol_type = other DNA
tcttctaaagaataatagag

SEQ ID NO: 6417 - DNA, 20 bp, synthetic construct
  source 1..20: mol_type = other DNA
gtcttctaaagaataataga

SEQ ID NO: 6418 - DNA, 20 bp, synthetic construct
  source 1..20: mol_type = other DNA
agtcttctaaagaataatag

SEQ ID NO: 6419 - DNA, 20 bp, synthetic construct
  source 1..20: mol_type = other DNA
aagtcttctaaagaataata

SEQ ID NO: 6420 - DNA, 20 bp, synthetic construct
  source 1..20: mol_type = other DNA
caagtcttctaaagaataat

SEQ ID NO: 6421 - DNA, 20 bp, synthetic construct
  source 1..20: mol_type = other DNA
acaagtcttctaaagaataa

SEQ ID NO: 6422 - DNA, 20 bp, synthetic construct
  source 1..20: mol_type = other DNA
tacaagtcttctaaagaata

SEQ ID NO: 6423 - DNA, 20 bp, synthetic construct
  source 1..20: mol_type = other DNA
atacaagtcttctaaagaat

SEQ ID NO: 6424 - DNA, 20 bp, synthetic construct
  source 1..20: mol_type = other DNA
aatacaagtcttctaaagaa

SEQ ID NO: 6425 - DNA, 20 bp, synthetic construct
  source 1..20: mol_type = other DNA
taatacaagtcttctaaaga

SEQ ID NO: 6426 - DNA, 20 bp, synthetic construct
  source 1..20: mol_type = other DNA
gtaatacaagtcttctaaag

SEQ ID NO: 6427 - DNA, 20 bp, synthetic construct
  source 1..20: mol_type = other DNA
agtaatacaagtcttctaaa

SEQ ID NO: 6428 - DNA, 20 bp, synthetic construct
  source 1..20: mol_type = other DNA
aagtaatacaagtcttctaa

SEQ ID NO: 6429 - DNA, 20 bp, synthetic construct
  source 1..20: mol_type = other DNA
gaagtaatacaagtcttcta

SEQ ID NO: 6430 - DNA, 20 bp, synthetic construct
  source 1..20: mol_type = other DNA
ggaagtaatacaagtcttct

SEQ ID NO: 6431 - DNA, 20 bp, synthetic construct
  source 1..20: mol_type = other DNA
tggaagtaatacaagtcttc

SEQ ID NO: 6432 - DNA, 20 bp, synthetic construct
  source 1..20: mol_type = other DNA
ctggaagtaatacaagtctt

SEQ ID NO: 6433 - DNA, 20 bp, synthetic construct
  source 1..20: mol_type = other DNA
actggaagtaatacaagtct

SEQ ID NO: 6434 - DNA, 20 bp, synthetic construct
  source 1..20: mol_type = other DNA
cactggaagtaatacaagtc

SEQ ID NO: 6435 - DNA, 20 bp, synthetic construct
  source 1..20: mol_type = other DNA
acactggaagtaatacaagt

SEQ ID NO: 6436 - DNA, 20 bp, synthetic construct
  source 1..20: mol_type = other DNA
gacactggaagtaatacaag

SEQ ID NO: 6437 - DNA, 20 bp, synthetic construct
  source 1..20: mol_type = other DNA
tgacactggaagtaatacaa

SEQ ID NO: 6438 - DNA, 20 bp, synthetic construct
  source 1..20: mol_type = other DNA
ttgacactggaagtaataca

SEQ ID NO: 6439 - DNA, 20 bp, synthetic construct
  source 1..20: mol_type = other DNA
cttgacactggaagtaatac

SEQ ID NO: 6440 - DNA, 20 bp, synthetic construct
  source 1..20: mol_type = other DNA
tcttgacactggaagtaata

SEQ ID NO: 6441 - DNA, 20 bp, synthetic construct
  source 1..20: mol_type = other DNA
ttcttgacactggaagtaat

SEQ ID NO: 6442 - DNA, 20 bp, synthetic construct
  source 1..20: mol_type = other DNA
cttcttgacactggaagtaa

SEQ ID NO: 6443 - DNA, 20 bp, synthetic construct
  source 1..20: mol_type = other DNA
ccttcttgacactggaagta

SEQ ID NO: 6444 - DNA, 20 bp, synthetic construct
  source 1..20: mol_type = other DNA
accttcttgacactggaagt

SEQ ID NO: 6445 - DNA, 20 bp, synthetic construct
  source 1..20: mol_type = other DNA
aaccttcttgacactggaag

SEQ ID NO: 6446 - DNA, 20 bp, synthetic construct
  source 1..20: mol_type = other DNA
caaccttcttgacactggaa

SEQ ID NO: 6447 - DNA, 20 bp, synthetic construct
  source 1..20: mol_type = other DNA
gcaaccttcttgacactgga

SEQ ID NO: 6448 - DNA, 20 bp, synthetic construct
  source 1..20: mol_type = other DNA
agcaaccttcttgacactgg

SEQ ID NO: 6449 - DNA, 20 bp, synthetic construct
  source 1..20: mol_type = other DNA
gagcaaccttcttgacactg

SEQ ID NO: 6450 - DNA, 20 bp, synthetic construct
  source 1..20: mol_type = other DNA
agagcaaccttcttgacact

SEQ ID NO: 6451 - DNA, 20 bp, synthetic construct
  source 1..20: mol_type = other DNA
aagagcaaccttcttgacac

SEQ ID NO: 6452 - DNA, 20 bp, synthetic construct
  source 1..20: mol_type = other DNA
gaagagcaaccttcttgaca

SEQ ID NO: 6453 - DNA, 20 bp, synthetic construct
  source 1..20: mol_type = other DNA
ggaagagcaaccttcttgac

SEQ ID NO: 6454 - DNA, 20 bp, synthetic construct
  source 1..20: mol_type = other DNA
tggaagagcaaccttcttga

SEQ ID NO: 6455 - DNA, 20 bp, synthetic construct
  source 1..20: mol_type = other DNA
atggaagagcaaccttcttg

SEQ ID NO: 6456 - DNA, 20 bp, synthetic construct
  source 1..20: mol_type = other DNA
catggaagagcaaccttctt

SEQ ID NO: 6457 - DNA, 20 bp, synthetic construct
  source 1..20: mol_type = other DNA
ccatggaagagcaaccttct

SEQ ID NO: 6458 - DNA, 20 bp, synthetic construct
  source 1..20: mol_type = other DNA
tccatggaagagcaaccttc

SEQ ID NO: 6459 - DNA, 20 bp, synthetic construct
  source 1..20: mol_type = other DNA
ttccatggaagagcaacctt

SEQ ID NO: 6460 - DNA, 20 bp, synthetic construct
  source 1..20: mol_type = other DNA
attccatggaagagcaacct

SEQ ID NO: 6461 - DNA, 20 bp, synthetic construct
  source 1..20: mol_type = other DNA
cattccatggaagagcaacc

SEQ ID NO: 6462 - DNA, 20 bp, synthetic construct
  source 1..20: mol_type = other DNA
ccattccatggaagagcaac

SEQ ID NO: 6463 - DNA, 20 bp, synthetic construct
  source 1..20: mol_type = other DNA
accattccatggaagagcaa

SEQ ID NO: 6464 - DNA, 20 bp, synthetic construct
  source 1..20: mol_type = other DNA
aaccattccatggaagagca

SEQ ID NO: 6465 - DNA, 20 bp, synthetic construct
  source 1..20: mol_type = other DNA
aaaccattccatggaagagc

SEQ ID NO: 6466 - DNA, 20 bp, synthetic construct
  source 1..20: mol_type = other DNA
gaaaccattccatggaagag

SEQ ID NO: 6467 - DNA, 20 bp, synthetic construct
  source 1..20: mol_type = other DNA
agaaaccattccatggaaga

SEQ ID NO: 6468 - DNA, 20 bp, synthetic construct
  source 1..20: mol_type = other DNA
aagaaaccattccatggaag

SEQ ID NO: 6469 - DNA, 20 bp, synthetic construct
  source 1..20: mol_type = other DNA
aaagaaaccattccatggaa

SEQ ID NO: 6470 - DNA, 20 bp, synthetic construct
  source 1..20: mol_type = other DNA
caaagaaaccattccatgga

SEQ ID NO: 6471 - DNA, 20 bp, synthetic construct
  source 1..20: mol_type = other DNA
acaaagaaaccattccatgg

SEQ ID NO: 6472 - DNA, 20 bp, synthetic construct
  source 1..20: mol_type = other DNA
tacaaagaaaccattccatg

SEQ ID NO: 6473 - DNA, 20 bp, synthetic construct
  source 1..20: mol_type = other DNA
ctacaaagaaaccattccat

SEQ ID NO: 6474 - DNA, 20 bp, synthetic construct
  source 1..20: mol_type = other DNA
actacaaagaaaccattcca

SEQ ID NO: 6475 - DNA, 20 bp, synthetic construct
  source 1..20: mol_type = other DNA
aactacaaagaaaccattcc

SEQ ID NO: 6476 - DNA, 20 bp, synthetic construct
  source 1..20: mol_type = other DNA
aaactacaaagaaaccattc

SEQ ID NO: 6477 - DNA, 20 bp, synthetic construct
  source 1..20: mol_type = other DNA
caaactacaaagaaaccatt

SEQ ID NO: 6478 - DNA, 20 bp, synthetic construct
  source 1..20: mol_type = other DNA
acaaactacaaagaaaccat

SEQ ID NO: 6479 - DNA, 20 bp, synthetic construct
  source 1..20: mol_type = other DNA
gacaaactacaaagaaacca

SEQ ID NO: 6480 - DNA, 20 bp, synthetic construct
  source 1..20: mol_type = other DNA
tgacaaactacaaagaaacc

SEQ ID NO: 6481 - DNA, 20 bp, synthetic construct
  source 1..20: mol_type = other DNA
ttgacaaactacaaagaaac

SEQ ID NO: 6482 - DNA, 20 bp, synthetic construct
  source 1..20: mol_type = other DNA
tttgacaaactacaaagaaa

SEQ ID NO: 6483 - DNA, 20 bp, synthetic construct
  source 1..20: mol_type = other DNA
atttgacaaactacaaagaa

SEQ ID NO: 6484 - DNA, 20 bp, synthetic construct
  source 1..20: mol_type = other DNA
tatttgacaaactacaaaga

SEQ ID NO: 6485 - DNA, 20 bp, synthetic construct
  source 1..20: mol_type = other DNA
atatttgacaaactacaaag

SEQ ID NO: 6486 - DNA, 20 bp, synthetic construct
  source 1..20: mol_type = other DNA
aatatttgacaaactacaaa

SEQ ID NO: 6487 - DNA, 20 bp, synthetic construct
  source 1..20: mol_type = other DNA
caatatttgacaaactacaa

SEQ ID NO: 6488 - DNA, 20 bp, synthetic construct
  source 1..20: mol_type = other DNA
acaatatttgacaaactaca

SEQ ID NO: 6489 - DNA, 20 bp, synthetic construct
  source 1..20: mol_type = other DNA
cacaatatttgacaaactac

SEQ ID NO: 6490 - DNA, 20 bp, synthetic construct
  source 1..20: mol_type = other DNA
ccacaatatttgacaaacta

SEQ ID NO: 6491 - DNA, 20 bp, synthetic construct
  source 1..20: mol_type = other DNA
cccacaatatttgacaaact

SEQ ID NO: 6492 - DNA, 20 bp, synthetic construct
  source 1..20: mol_type = other DNA
ccccacaatatttgacaaac

SEQ ID NO: 6493 - DNA, 20 bp, synthetic construct
  source 1..20: mol_type = other DNA
tccccacaatatttgacaaa

SEQ ID NO: 6494 - DNA, 20 bp, synthetic construct
  source 1..20: mol_type = other DNA
ttccccacaatatttgacaa

SEQ ID NO: 6495 - DNA, 20 bp, synthetic construct
  source 1..20: mol_type = other DNA
attccccacaatatttgaca

SEQ ID NO: 6496 - DNA, 20 bp, synthetic construct
  source 1..20: mol_type = other DNA
aattccccacaatatttgac

SEQ ID NO: 6497 - DNA, 20 bp, synthetic construct
  source 1..20: mol_type = other DNA
aaattccccacaatatttga

SEQ ID NO: 6498 - DNA, 20 bp, synthetic construct
  source 1..20: mol_type = other DNA
aaaattccccacaatatttg

SEQ ID NO: 6499 - DNA, 20 bp, synthetic construct
  source 1..20: mol_type = other DNA
aaaaattccccacaatattt

SEQ ID NO: 6500 - DNA, 20 bp, synthetic construct
  source 1..20: mol_type = other DNA
taaaaattccccacaatatt

SEQ ID NO: 6501 - DNA, 20 bp, synthetic construct
  source 1..20: mol_type = other DNA
ttaaaaattccccacaatat

SEQ ID NO: 6502 - DNA, 20 bp, synthetic construct
  source 1..20: mol_type = other DNA
tttaaaaattccccacaata

SEQ ID NO: 6503 - DNA, 20 bp, synthetic construct
  source 1..20: mol_type = other DNA
ctttaaaaattccccacaat

SEQ ID NO: 6504 - DNA, 20 bp, synthetic construct
  source 1..20: mol_type = other DNA
cctttaaaaattccccacaa

SEQ ID NO: 6505 - DNA, 20 bp, synthetic construct
  source 1..20: mol_type = other DNA
tcctttaaaaattccccaca

SEQ ID NO: 6506 - DNA, 20 bp, synthetic construct
  source 1..20: mol_type = other DNA
ttcctttaaaaattccccac

SEQ ID NO: 6507 - DNA, 20 bp, synthetic construct
  source 1..20: mol_type = other DNA
tttcctttaaaaattcccca

SEQ ID NO: 6508 - DNA, 20 bp, synthetic construct
  source 1..20: mol_type = other DNA
ttttcctttaaaaattcccc

SEQ ID NO: 6509 - DNA, 20 bp, synthetic construct
  source 1..20: mol_type = other DNA
tttttcctttaaaaattccc

SEQ ID NO: 6510 - DNA, 20 bp, synthetic construct
  source 1..20: mol_type = other DNA
atttttcctttaaaaattcc

SEQ ID NO: 6511 - DNA, 20 bp, synthetic construct
  source 1..20: mol_type = other DNA
aatttttcctttaaaaattc

SEQ ID NO: 6512 - DNA, 20 bp, synthetic construct
  source 1..20: mol_type = other DNA
caatttttcctttaaaaatt

SEQ ID NO: 6513 - DNA, 20 bp, synthetic construct
  source 1..20: mol_type = other DNA
gcaatttttcctttaaaaat

SEQ ID NO: 6514 - DNA, 20 bp, synthetic construct
  source 1..20: mol_type = other DNA
tgcaatttttcctttaaaaa

SEQ ID NO: 6515 - DNA, 20 bp, synthetic construct
  source 1..20: mol_type = other DNA
atgcaatttttcctttaaaa

SEQ ID NO: 6516 - DNA, 20 bp, synthetic construct
  source 1..20: mol_type = other DNA
aatgcaatttttcctttaaa

SEQ ID NO: 6517 - DNA, 20 bp, synthetic construct
  source 1..20: mol_type = other DNA
aaatgcaatttttcctttaa

SEQ ID NO: 6518 - DNA, 20 bp, synthetic construct
  source 1..20: mol_type = other DNA
aaaatgcaatttttccttta

SEQ ID NO: 6519 - DNA, 20 bp, synthetic construct
  source 1..20: mol_type = other DNA
aaaaatgcaatttttccttt

SEQ ID NO: 6520 - DNA, 20 bp, synthetic construct
  source 1..20: mol_type = other DNA
taaaaatgcaatttttcctt

SEQ ID NO: 6521 - DNA, 20 bp, synthetic construct
  source 1..20: mol_type = other DNA
gtaaaaatgcaatttttcct

SEQ ID NO: 6522 - DNA, 20 bp, synthetic construct
  source 1..20: mol_type = other DNA
agtaaaaatgcaatttttcc

SEQ ID NO: 6523 - DNA, 20 bp, synthetic construct
  source 1..20: mol_type = other DNA
cagtaaaaatgcaatttttc

SEQ ID NO: 6524 - DNA, 20 bp, synthetic construct
  source 1..20: mol_type = other DNA
acagtaaaaatgcaattttt

SEQ ID NO: 6525 - DNA, 20 bp, synthetic construct
  source 1..20: mol_type = other DNA
gacagtaaaaatgcaatttt

SEQ ID NO: 6526 - DNA, 20 bp, synthetic construct
  source 1..20: mol_type = other DNA
tgacagtaaaaatgcaattt

SEQ ID NO: 6527 - DNA, 20 bp, synthetic construct
  source 1..20: mol_type = other DNA
ttgacagtaaaaatgcaatt

SEQ ID NO: 6528 - DNA, 20 bp, synthetic construct
  source 1..20: mol_type = other DNA
cttgacagtaaaaatgcaat

SEQ ID NO: 6529 - DNA, 20 bp, synthetic construct
  source 1..20: mol_type = other DNA
acttgacagtaaaaatgcaa

SEQ ID NO: 6530 - DNA, 20 bp, synthetic construct
  source 1..20: mol_type = other DNA
cacttgacagtaaaaatgca

SEQ ID NO: 6531 - DNA, 20 bp, synthetic construct
  source 1..20: mol_type = other DNA
gcacttgacagtaaaaatgc

SEQ ID NO: 6532 - DNA, 20 bp, synthetic construct
  source 1..20: mol_type = other DNA
tgcacttgacagtaaaaatg

SEQ ID NO: 6533 - DNA, 20 bp, synthetic construct
  source 1..20: mol_type = other DNA
atgcacttgacagtaaaaat

SEQ ID NO: 6534 - DNA, 20 bp, synthetic construct
  source 1..20: mol_type = other DNA
tatgcacttgacagtaaaaa

SEQ ID NO: 6535 - DNA, 20 bp, synthetic construct
  source 1..20: mol_type = other DNA
atatgcacttgacagtaaaa

SEQ ID NO: 6536 - DNA, 20 bp, synthetic construct
  source 1..20: mol_type = other DNA
tatatgcacttgacagtaaa

SEQ ID NO: 6537 - DNA, 20 bp, synthetic construct
  source 1..20: mol_type = other DNA
atatatgcacttgacagtaa

SEQ ID NO: 6538 - DNA, 20 bp, synthetic construct
  source 1..20: mol_type = other DNA
aatatatgcacttgacagta

SEQ ID NO: 6539 - DNA, 20 bp, synthetic construct
  source 1..20: mol_type = other DNA
taatatatgcacttgacagt

SEQ ID NO: 6540 - DNA, 20 bp, synthetic construct
  source 1..20: mol_type = other DNA
ataatatatgcacttgacag

SEQ ID NO: 6541 - DNA, 20 bp, synthetic construct
  source 1..20: mol_type = other DNA
aataatatatgcacttgaca

SEQ ID NO: 6542 - DNA, 20 bp, synthetic construct
  source 1..20: mol_type = other DNA
taataatatatgcacttgac

SEQ ID NO: 6543 - DNA, 20 bp, synthetic construct
  source 1..20: mol_type = other DNA
ttaataatatatgcacttga

SEQ ID NO: 6544 - DNA, 20 bp, synthetic construct
  source 1..20: mol_type = other DNA
cttaataatatatgcacttg

SEQ ID NO: 6545 - DNA, 20 bp, synthetic construct
  source 1..20: mol_type = other DNA
acttaataatatatgcactt

SEQ ID NO: 6546 - DNA, 20 bp, synthetic construct
  source 1..20: mol_type = other DNA
cacttaataatatatgcact

SEQ ID NO: 6547 - DNA, 20 bp, synthetic construct
  source 1..20: mol_type = other DNA
gcacttaataatatatgcac

SEQ ID NO: 6548 - DNA, 20 bp, synthetic construct
  source 1..20: mol_type = other DNA
agcacttaataatatatgca

SEQ ID NO: 6549 - DNA, 20 bp, synthetic construct
  source 1..20: mol_type = other DNA
aagcacttaataatatatgc

SEQ ID NO: 6550 - DNA, 20 bp, synthetic construct
  source 1..20: mol_type = other DNA
aaagcacttaataatatatg

SEQ ID NO: 6551 - DNA, 20 bp, synthetic construct
  source 1..20: mol_type = other DNA
aaaagcacttaataatatat

SEQ ID NO: 6552 - DNA, 20 bp, synthetic construct
  source 1..20: mol_type = other DNA
caaaagcacttaataatata

SEQ ID NO: 6553 - DNA, 20 bp, synthetic construct
  source 1..20: mol_type = other DNA
acaaaagcacttaataatat

SEQ ID NO: 6554 - DNA, 20 bp, synthetic construct
  source 1..20: mol_type = other DNA
aacaaaagcacttaataata

SEQ ID NO: 6555 - DNA, 20 bp, synthetic construct
  source 1..20: mol_type = other DNA
taacaaaagcacttaataat

SEQ ID NO: 6556 - DNA, 20 bp, synthetic construct
  source 1..20: mol_type = other DNA
ctaacaaaagcacttaataa

SEQ ID NO: 6557 - DNA, 20 bp, synthetic construct
  source 1..20: mol_type = other DNA
actaacaaaagcacttaata

SEQ ID NO: 6558 - DNA, 20 bp, synthetic construct
  source 1..20: mol_type = other DNA
aactaacaaaagcacttaat

SEQ ID NO: 6559 - DNA, 20 bp, synthetic construct
  source 1..20: mol_type = other DNA
taactaacaaaagcacttaa

SEQ ID NO: 6560 - DNA, 20 bp, synthetic construct
  source 1..20: mol_type = other DNA
gtaactaacaaaagcactta

SEQ ID NO: 6561 - DNA, 20 bp, synthetic construct
  source 1..20: mol_type = other DNA
agtaactaacaaaagcactt

SEQ ID NO: 6562 - DNA, 20 bp, synthetic construct
  source 1..20: mol_type = other DNA
cagtaactaacaaaagcact

SEQ ID NO: 6563 - DNA, 20 bp, synthetic construct
  source 1..20: mol_type = other DNA
ccagtaactaacaaaagcac

SEQ ID NO: 6564 - DNA, 20 bp, synthetic construct
  source 1..20: mol_type = other DNA
tccagtaactaacaaaagca

SEQ ID NO: 6565 - DNA, 20 bp, synthetic construct
  source 1..20: mol_type = other DNA
atccagtaactaacaaaagc

SEQ ID NO: 6566 - DNA, 20 bp, synthetic construct
  source 1..20: mol_type = other DNA
aatccagtaactaacaaaag

SEQ ID NO: 6567 - DNA, 20 bp, synthetic construct
  source 1..20: mol_type = other DNA
taatccagtaactaacaaaa

SEQ ID NO: 6568 - DNA, 20 bp, synthetic construct
  source 1..20: mol_type = other DNA
ataatccagtaactaacaaa

SEQ ID NO: 6569 - DNA, 20 bp, synthetic construct
  source 1..20: mol_type = other DNA
aataatccagtaactaacaa

SEQ ID NO: 6570 - DNA, 20 bp, synthetic construct
  source 1..20: mol_type = other DNA
caataatccagtaactaaca

SEQ ID NO: 6571 - DNA, 20 bp, synthetic construct
  source 1..20: mol_type = other DNA
tcaataatccagtaactaac

SEQ ID NO: 6572 - DNA, 20 bp, synthetic construct
  source 1..20: mol_type = other DNA
atcaataatccagtaactaa

SEQ ID NO: 6573 - DNA, 20 bp, synthetic construct
  source 1..20: mol_type = other DNA
tatcaataatccagtaacta

SEQ ID NO: 6574 - DNA, 20 bp, synthetic construct
  source 1..20: mol_type = other DNA
atatcaataatccagtaact

SEQ ID NO: 6575 - DNA, 20 bp, synthetic construct
  source 1..20: mol_type = other DNA
aatatcaataatccagtaac

SEQ ID NO: 6576 - DNA, 20 bp, synthetic construct
  source 1..20: mol_type = other DNA
aaatatcaataatccagtaa

SEQ ID NO: 6577 - DNA, 20 bp, synthetic construct
  source 1..20: mol_type = other DNA
caaatatcaataatccagta

SEQ ID NO: 6578 - DNA, 20 bp, synthetic construct
  source 1..20: mol_type = other DNA
tcaaatatcaataatccagt

SEQ ID NO: 6579 - DNA, 20 bp, synthetic construct
  source 1..20: mol_type = other DNA
ctcaaatatcaataatccag

SEQ ID NO: 6580 - DNA, 20 bp, synthetic construct
  source 1..20: mol_type = other DNA
actcaaatatcaataatcca

SEQ ID NO: 6581 - DNA, 20 bp, synthetic construct
  source 1..20: mol_type = other DNA
aactcaaatatcaataatcc

SEQ ID NO: 6582 - DNA, 20 bp, synthetic construct
  source 1..20: mol_type = other DNA
aaactcaaatatcaataatc

SEQ ID NO: 6583 - DNA, 20 bp, synthetic construct
  source 1..20: mol_type = other DNA
taaactcaaatatcaataat

SEQ ID NO: 6584 - DNA, 20 bp, synthetic construct
  source 1..20: mol_type = other DNA
ttaaactcaaatatcaataa

SEQ ID NO: 6585 - DNA, 20 bp, synthetic construct
  source 1..20: mol_type = other DNA
attaaactcaaatatcaata

SEQ ID NO: 6586 - DNA, 20 bp, synthetic construct
  source 1..20: mol_type = other DNA
aattaaactcaaatatcaat

SEQ ID NO: 6587 - DNA, 20 bp, synthetic construct
  source 1..20: mol_type = other DNA
aaattaaactcaaatatcaa

SEQ ID NO: 6588 - DNA, 20 bp, synthetic construct
  source 1..20: mol_type = other DNA
caaattaaactcaaatatca

SEQ ID NO: 6589 - DNA, 20 bp, synthetic construct
  source 1..20: mol_type = other DNA
ccaaattaaactcaaatatc

SEQ ID NO: 6590 - DNA, 20 bp, synthetic construct
  source 1..20: mol_type = other DNA
accaaattaaactcaaatat

SEQ ID NO: 6591 - DNA, 20 bp, synthetic construct
  source 1..20: mol_type = other DNA
aaccaaattaaactcaaata

SEQ ID NO: 6592 - DNA, 20 bp, synthetic construct
  source 1..20: mol_type = other DNA
gaaccaaattaaactcaaat

SEQ ID NO: 6593 - DNA, 20 bp, synthetic construct
  source 1..20: mol_type = other DNA
ggaaccaaattaaactcaaa

SEQ ID NO: 6594 - DNA, 20 bp, synthetic construct
  source 1..20: mol_type = other DNA
aggaaccaaattaaactcaa

SEQ ID NO: 6595 - DNA, 20 bp, synthetic construct
  source 1..20: mol_type = other DNA
gaggaaccaaattaaactca

SEQ ID NO: 6596 - DNA, 20 bp, synthetic construct
  source 1..20: mol_type = other DNA
agaggaaccaaattaaactc

SEQ ID NO: 6597 - DNA, 20 bp, synthetic construct
  source 1..20: mol_type = other DNA
cagaggaaccaaattaaact

SEQ ID NO: 6598 - DNA, 20 bp, synthetic construct
  source 1..20: mol_type = other DNA
tcagaggaaccaaattaaac

SEQ ID NO: 6599 - DNA, 20 bp, synthetic construct
  source 1..20: mol_type = other DNA
ctcagaggaaccaaattaaa

SEQ ID NO: 6600 - DNA, 20 bp, synthetic construct
  source 1..20: mol_type = other DNA
cctcagaggaaccaaattaa

SEQ ID NO: 6601 - DNA, 20 bp, synthetic construct
  source 1..20: mol_type = other DNA
tcctcagaggaaccaaatta

SEQ ID NO: 6602 - DNA, 20 bp, synthetic construct
  source 1..20: mol_type = other DNA
atcctcagaggaaccaaatt

SEQ ID NO: 6603 - DNA, 20 bp, synthetic construct
  source 1..20: mol_type = other DNA
aatcctcagaggaaccaaat

SEQ ID NO: 6604 - DNA, 20 bp, synthetic construct
  source 1..20: mol_type = other DNA
aaatcctcagaggaaccaaa

SEQ ID NO: 6605 - DNA, 20 bp, synthetic construct
  source 1..20: mol_type = other DNA
taaatcctcagaggaaccaa

SEQ ID NO: 6606 - DNA, 20 bp, synthetic construct
  source 1..20: mol_type = other DNA
ttaaatcctcagaggaacca

SEQ ID NO: 6607 - DNA, 20 bp, synthetic construct
  source 1..20: mol_type = other DNA
attaaatcctcagaggaacc

SEQ ID NO: 6608 - DNA, 20 bp, synthetic construct
  source 1..20: mol_type = other DNA
tattaaatcctcagaggaac

SEQ ID NO: 6609 - DNA, 20 bp, synthetic construct
  source 1..20: mol_type = other DNA
ttattaaatcctcagaggaa

SEQ ID NO: 6610 - DNA, 20 bp, synthetic construct
  source 1..20: mol_type = other DNA
cttattaaatcctcagagga

SEQ ID NO: 6611 - DNA, 20 bp, synthetic construct
  source 1..20: mol_type = other DNA
ccttattaaatcctcagagg

SEQ ID NO: 6612 - DNA, 20 bp, synthetic construct
  source 1..20: mol_type = other DNA
accttattaaatcctcagag

SEQ ID NO: 6613 - DNA, 20 bp, synthetic construct
  source 1..20: mol_type = other DNA
taccttattaaatcctcaga

SEQ ID NO: 6614 - DNA, 20 bp, synthetic construct
  source 1..20: mol_type = other DNA
ttaccttattaaatcctcag

SEQ ID NO: 6615 - DNA, 20 bp, synthetic construct
  source 1..20: mol_type = other DNA
attaccttattaaatcctca

SEQ ID NO: 6616 - DNA, 20 bp, synthetic construct
  source 1..20: mol_type = other DNA
tattaccttattaaatcctc

SEQ ID NO: 6617 - DNA, 20 bp, synthetic construct
  source 1..20: mol_type = other DNA
atattaccttattaaatcct

SEQ ID NO: 6618 - DNA, 20 bp, synthetic construct
  source 1..20: mol_type = other DNA
tatattaccttattaaatcc

SEQ ID NO: 6619 - DNA, 20 bp, synthetic construct
  source 1..20: mol_type = other DNA
atatattaccttattaaatc

SEQ ID NO: 6620 - DNA, 20 bp, synthetic construct
  source 1..20: mol_type = other DNA
catatattaccttattaaat

SEQ ID NO: 6621 - DNA, 20 bp, synthetic construct
  source 1..20: mol_type = other DNA
acatatattaccttattaaa

SEQ ID NO: 6622 - DNA, 20 bp, synthetic construct
  source 1..20: mol_type = other DNA
cacatatattaccttattaa

SEQ ID NO: 6623 - DNA, 20 bp, synthetic construct
  source 1..20: mol_type = other DNA
tcacatatattaccttatta

SEQ ID NO: 6624 - DNA, 20 bp, synthetic construct
  source 1..20: mol_type = other DNA
ttcacatatattaccttatt

SEQ ID NO: 6625 - DNA, 20 bp, synthetic construct
  source 1..20: mol_type = other DNA
cttcacatatattaccttat

SEQ ID NO: 6626 - DNA, 20 bp, synthetic construct
  source 1..20: mol_type = other DNA
tcttcacatatattacctta

SEQ ID NO: 6627 - DNA, 20 bp, synthetic construct
  source 1..20: mol_type = other DNA
atcttcacatatattacctt

SEQ ID NO: 6628 - DNA, 20 bp, synthetic construct
  source 1..20: mol_type = other DNA
catcttcacatatattacct

SEQ ID NO: 6629 - DNA, 20 bp, synthetic construct
  source 1..20: mol_type = other DNA
acatcttcacatatattacc

SEQ ID NO: 6630 - DNA, 20 bp, synthetic construct
  source 1..20: mol_type = other DNA
aacatcttcacatatattac

SEQ ID NO: 6631 - DNA, 20 bp, synthetic construct
  source 1..20: mol_type = other DNA
aaacatcttcacatatatta

SEQ ID NO: 6632 - DNA, 20 bp, synthetic construct
  source 1..20: mol_type = other DNA
aaaacatcttcacatatatt

SEQ ID NO: 6633 - DNA, 20 bp, synthetic construct
  source 1..20: mol_type = other DNA
caaaacatcttcacatatat

SEQ ID NO: 6634 - DNA, 20 bp, synthetic construct
  source 1..20: mol_type = other DNA
tcaaaacatcttcacatata

SEQ ID NO: 6635 - DNA, 20 bp, synthetic construct
  source 1..20: mol_type = other DNA
ttcaaaacatcttcacatat

SEQ ID NO: 6636 - DNA, 20 bp, synthetic construct
  source 1..20: mol_type = other DNA
tttcaaaacatcttcacata

SEQ ID NO: 6637 - DNA, 20 bp, synthetic construct
  source 1..20: mol_type = other DNA
gtttcaaaacatcttcacat

SEQ ID NO: 6638 - DNA, 20 bp, synthetic construct
  source 1..20: mol_type = other DNA
ggtttcaaaacatcttcaca

SEQ ID NO: 6639 - DNA, 20 bp, synthetic construct
  source 1..20: mol_type = other DNA
aggtttcaaaacatcttcac

SEQ ID NO: 6640 - DNA, 20 bp, synthetic construct
  source 1..20: mol_type = other DNA
caggtttcaaaacatcttca

SEQ ID NO: 6641 - DNA, 20 bp, synthetic construct
  source 1..20: mol_type = other DNA
acaggtttcaaaacatcttc

SEQ ID NO: 6642 - DNA, 20 bp, synthetic construct
  source 1..20: mol_type = other DNA
tacaggtttcaaaacatctt

SEQ ID NO: 6643 - DNA, 20 bp, synthetic construct
  source 1..20: mol_type = other DNA
ttacaggtttcaaaacatct

SEQ ID NO: 6644 - DNA, 20 bp, synthetic construct
  source 1..20: mol_type = other DNA
gttacaggtttcaaaacatc

SEQ ID NO: 6645 - DNA, 20 bp, synthetic construct
  source 1..20: mol_type = other DNA
ggttacaggtttcaaaacat

SEQ ID NO: 6646 - DNA, 20 bp, synthetic construct
  source 1..20: mol_type = other DNA
tggttacaggtttcaaaaca

SEQ ID NO: 6647 - DNA, 20 bp, synthetic construct
  source 1..20: mol_type = other DNA
atggttacaggtttcaaaac

SEQ ID NO: 6648 - DNA, 20 bp, synthetic construct
  source 1..20: mol_type = other DNA
aatggttacaggtttcaaaa

SEQ ID NO: 6649 - DNA, 20 bp, synthetic construct
  source 1..20: mol_type = other DNA
taatggttacaggtttcaaa

SEQ ID NO: 6650 - DNA, 20 bp, synthetic construct
  source 1..20: mol_type = other DNA
ataatggttacaggtttcaa

SEQ ID NO: 6651 - DNA, 20 bp, synthetic construct
  source 1..20: mol_type = other DNA
aataatggttacaggtttca

SEQ ID NO: 6652 - DNA, 20 bp, synthetic construct
  source 1..20: mol_type = other DNA
taataatggttacaggtttc

SEQ ID NO: 6653 - DNA, 20 bp, synthetic construct
  source 1..20: mol_type = other DNA
ataataatggttacaggttt

SEQ ID NO: 6654 - DNA, 20 bp, synthetic construct
  source 1..20: mol_type = other DNA
aataataatggttacaggtt

SEQ ID NO: 6655 - DNA, 20 bp, synthetic construct
  source 1..20: mol_type = other DNA
taataataatggttacaggt

SEQ ID NO: 6656 - DNA, 20 bp, synthetic construct
  source 1..20: mol_type = other DNA
ttaataataatggttacagg

SEQ ID NO: 6657 - DNA, 20 bp, synthetic construct
  source 1..20: mol_type = other DNA
attaataataatggttacag

SEQ ID NO: 6658 - DNA, 20 bp, synthetic construct
  source 1..20: mol_type = other DNA
cattaataataatggttaca

SEQ ID NO: 6659 - DNA, 20 bp, synthetic construct
  source 1..20: mol_type = other DNA
tcattaataataatggttac

SEQ ID NO: 6660 - DNA, 20 bp, synthetic construct
  source 1..20: mol_type = other DNA
ctcattaataataatggtta

SEQ ID NO: 6661 - DNA, 20 bp, synthetic construct
  source 1..20: mol_type = other DNA
cctcattaataataatggtt

SEQ ID NO: 6662 - DNA, 20 bp, synthetic construct
  source 1..20: mol_type = other DNA
ccctcattaataataatggt

SEQ ID NO: 6663 - DNA, 20 bp, synthetic construct
  source 1..20: mol_type = other DNA
accctcattaataataatgg

SEQ ID NO: 6664 - DNA, 20 bp, synthetic construct
  source 1..20: mol_type = other DNA
taccctcattaataataatg

SEQ ID NO: 6665 - DNA, 20 bp, synthetic construct
  source 1..20: mol_type = other DNA
gtaccctcattaataataat

SEQ ID NO: 6666 - DNA, 20 bp, synthetic construct
  source 1..20: mol_type = other DNA
agtaccctcattaataataa

SEQ ID NO: 6667 - DNA, 20 bp, synthetic construct
  source 1..20: mol_type = other DNA
aagtaccctcattaataata

SEQ ID NO: 6668 - DNA, 20 bp, synthetic construct
  source 1..20: mol_type = other DNA
caagtaccctcattaataat

SEQ ID NO: 6669 - DNA, 20 bp, synthetic construct
  source 1..20: mol_type = other DNA
ccaagtaccctcattaataa

SEQ ID NO: 6670 - DNA, 20 bp, synthetic construct
  source 1..20: mol_type = other DNA
accaagtaccctcattaata

SEQ ID NO: 6671 - DNA, 20 bp, synthetic construct
  source 1..20: mol_type = other DNA
aaccaagtaccctcattaat

SEQ ID NO: 6672 - DNA, 20 bp, synthetic construct
  source 1..20: mol_type = other DNA
aaaccaagtaccctcattaa

SEQ ID NO: 6673 - DNA, 20 bp, synthetic construct
  source 1..20: mol_type = other DNA
taaaccaagtaccctcatta

SEQ ID NO: 6674 - DNA, 20 bp, synthetic construct
  source 1..20: mol_type = other DNA
ataaaccaagtaccctcatt

SEQ ID NO: 6675 - DNA, 20 bp, synthetic construct
  source 1..20: mol_type = other DNA
gataaaccaagtaccctcat

SEQ ID NO: 6676 - DNA, 20 bp, synthetic construct
  source 1..20: mol_type = other DNA
agataaaccaagtaccctca

SEQ ID NO: 6677 - DNA, 20 bp, synthetic construct
  source 1..20: mol_type = other DNA
cagataaaccaagtaccctc

SEQ ID NO: 6678 - DNA, 20 bp, synthetic construct
  source 1..20: mol_type = other DNA
acagataaaccaagtaccct

SEQ ID NO: 6679 - DNA, 20 bp, synthetic construct
  source 1..20: mol_type = other DNA
gacagataaaccaagtaccc

SEQ ID NO: 6680 - DNA, 20 bp, synthetic construct
  source 1..20: mol_type = other DNA
cgacagataaaccaagtacc

SEQ ID NO: 6681 - DNA, 20 bp, synthetic construct
  source 1..20: mol_type = other DNA
acgacagataaaccaagtac

SEQ ID NO: 6682 - DNA, 20 bp, synthetic construct
  source 1..20: mol_type = other DNA
cacgacagataaaccaagta

SEQ ID NO: 6683 - DNA, 20 bp, synthetic construct
  source 1..20: mol_type = other DNA
gcacgacagataaaccaagt

SEQ ID NO: 6684 - DNA, 20 bp, synthetic construct
  source 1..20: mol_type = other DNA
agcacgacagataaaccaag

SEQ ID NO: 6685 - DNA, 20 bp, synthetic construct
  source 1..20: mol_type = other DNA
cagcacgacagataaaccaa

SEQ ID NO: 6686 - DNA, 20 bp, synthetic construct
  source 1..20: mol_type = other DNA
tcagcacgacagataaacca

SEQ ID NO: 6687 - DNA, 20 bp, synthetic construct
  source 1..20: mol_type = other DNA
atcagcacgacagataaacc

SEQ ID NO: 6688 - DNA, 20 bp, synthetic construct
  source 1..20: mol_type = other DNA
tatcagcacgacagataaac

SEQ ID NO: 6689 - DNA, 20 bp, synthetic construct
  source 1..20: mol_type = other DNA
ctatcagcacgacagataaa

SEQ ID NO: 6690 - DNA, 20 bp, synthetic construct
  source 1..20: mol_type = other DNA
actatcagcacgacagataa

SEQ ID NO: 6691 - DNA, 20 bp, synthetic construct
  source 1..20: mol_type = other DNA
tactatcagcacgacagata

SEQ ID NO: 6692 - DNA, 20 bp, synthetic construct
  source 1..20: mol_type = other DNA
gtactatcagcacgacagat

SEQ ID NO: 6693 - DNA, 20 bp, synthetic construct
  source 1..20: mol_type = other DNA
agtactatcagcacgacaga

SEQ ID NO: 6694 - DNA, 20 bp, synthetic construct
  source 1..20: mol_type = other DNA
cagtactatcagcacgacag

SEQ ID NO: 6695 - DNA, 20 bp, synthetic construct
  source 1..20: mol_type = other DNA
tcagtactatcagcacgaca

SEQ ID NO: 6696 - DNA, 20 bp, synthetic construct
  source 1..20: mol_type = other DNA
ctcagtactatcagcacgac

SEQ ID NO: 6697 - DNA, 20 bp, synthetic construct
  source 1..20: mol_type = other DNA
actcagtactatcagcacga

SEQ ID NO: 6698 - DNA, 20 bp, synthetic construct
  source 1..20: mol_type = other DNA
tactcagtactatcagcacg

SEQ ID NO: 6699 - DNA, 20 bp, synthetic construct
  source 1..20: mol_type = other DNA
ttactcagtactatcagcac

SEQ ID NO: 6700 - DNA, 20 bp, synthetic construct
  source 1..20: mol_type = other DNA
tttactcagtactatcagca

SEQ ID NO: 6701 - DNA, 20 bp, synthetic construct
  source 1..20: mol_type = other DNA
ctttactcagtactatcagc

SEQ ID NO: 6702 - DNA, 20 bp, synthetic construct
  source 1..20: mol_type = other DNA
actttactcagtactatcag

SEQ ID NO: 6703 - DNA, 20 bp, synthetic construct
  source 1..20: mol_type = other DNA
cactttactcagtactatca

SEQ ID NO: 6704 - DNA, 20 bp, synthetic construct
  source 1..20: mol_type = other DNA
gcactttactcagtactatc

SEQ ID NO: 6705 - DNA, 20 bp, synthetic construct
  source 1..20: mol_type = other DNA
tgcactttactcagtactat

SEQ ID NO: 6706 - DNA, 20 bp, synthetic construct
  source 1..20: mol_type = other DNA
ctgcactttactcagtacta

SEQ ID NO: 6707 - DNA, 20 bp, synthetic construct
  source 1..20: mol_type = other DNA
cctgcactttactcagtact

SEQ ID NO: 6708 - DNA, 20 bp, synthetic construct
  source 1..20: mol_type = other DNA
tcctgcactttactcagtac

SEQ ID NO: 6709 - DNA, 20 bp, synthetic construct
  source 1..20: mol_type = other DNA
ttcctgcactttactcagta

SEQ ID NO: 6710 - DNA, 20 bp, synthetic construct
  source 1..20: mol_type = other DNA
attcctgcactttactcagt

SEQ ID NO: 6711 - DNA, 20 bp, synthetic construct
  source 1..20: mol_type = other DNA
cattcctgcactttactcag

SEQ ID NO: 6712 - DNA, 20 bp, synthetic construct
  source 1..20: mol_type = other DNA
tcattcctgcactttactca

SEQ ID NO: 6713 - DNA, 20 bp, synthetic construct
  source 1..20: mol_type = other DNA
ttcattcctgcactttactc

SEQ ID NO: 6714 - DNA, 20 bp, synthetic construct
  source 1..20: mol_type = other DNA
tttcattcctgcactttact

SEQ ID NO: 6715 - DNA, 20 bp, synthetic construct
  source 1..20: mol_type = other DNA
atttcattcctgcactttac

SEQ ID NO: 6716 - DNA, 20 bp, synthetic construct
  source 1..20: mol_type = other DNA
aatttcattcctgcacttta

SEQ ID NO: 6717 - DNA, 20 bp, synthetic construct
  source 1..20: mol_type = other DNA
gaatttcattcctgcacttt

SEQ ID NO: 6718 - DNA, 20 bp, synthetic construct
  source 1..20: mol_type = other DNA
ggaatttcattcctgcactt

SEQ ID NO: 6719 - DNA, 20 bp, synthetic construct
  source 1..20: mol_type = other DNA
aggaatttcattcctgcact

SEQ ID NO: 6720 - DNA, 20 bp, synthetic construct
  source 1..20: mol_type = other DNA
caggaatttcattcctgcac

SEQ ID NO: 6721 - DNA, 20 bp, synthetic construct
  source 1..20: mol_type = other DNA
tcaggaatttcattcctgca

SEQ ID NO: 6722 - DNA, 20 bp, synthetic construct
  source 1..20: mol_type = other DNA
ctcaggaatttcattcctgc

SEQ ID NO: 6723 - DNA, 20 bp, synthetic construct
  source 1..20: mol_type = other DNA
cctcaggaatttcattcctg

SEQ ID NO: 6724 - DNA, 20 bp, synthetic construct
  source 1..20: mol_type = other DNA
tcctcaggaatttcattcct

SEQ ID NO: 6725 - DNA, 20 bp, synthetic construct
  source 1..20: mol_type = other DNA
ttcctcaggaatttcattcc

SEQ ID NO: 6726 - DNA, 20 bp, synthetic construct
  source 1..20: mol_type = other DNA
gttcctcaggaatttcattc

SEQ ID NO: 6727 - DNA, 20 bp, synthetic construct
  source 1..20: mol_type = other DNA
agttcctcaggaatttcatt

SEQ ID NO: 6728 - DNA, 20 bp, synthetic construct
  source 1..20: mol_type = other DNA
cagttcctcaggaatttcat

SEQ ID NO: 6729 - DNA, 20 bp, synthetic construct
  source 1..20: mol_type = other DNA
acagttcctcaggaatttca

SEQ ID NO: 6730 - DNA, 20 bp, synthetic construct
  source 1..20: mol_type = other DNA
aacagttcctcaggaatttc

SEQ ID NO: 6731 - DNA, 20 bp, synthetic construct
  source 1..20: mol_type = other DNA
gaacagttcctcaggaattt

SEQ ID NO: 6732 - DNA, 20 bp, synthetic construct
  source 1..20: mol_type = other DNA
agaacagttcctcaggaatt

SEQ ID NO: 6733 - DNA, 20 bp, synthetic construct
  source 1..20: mol_type = other DNA
tagaacagttcctcaggaat

SEQ ID NO: 6734 - DNA, 20 bp, synthetic construct
  source 1..20: mol_type = other DNA
ttagaacagttcctcaggaa

SEQ ID NO: 6735 - DNA, 20 bp, synthetic construct
  source 1..20: mol_type = other DNA
tttagaacagttcctcagga

SEQ ID NO: 6736 - DNA, 20 bp, synthetic construct
  source 1..20: mol_type = other DNA
ctttagaacagttcctcagg

SEQ ID NO: 6737 - DNA, 20 bp, synthetic construct
  source 1..20: mol_type = other DNA
gctttagaacagttcctcag

SEQ ID NO: 6738 - DNA, 20 bp, synthetic construct
  source 1..20: mol_type = other DNA
agctttagaacagttcctca

SEQ ID NO: 6739 - DNA, 20 bp, synthetic construct
  source 1..20: mol_type = other DNA
aagctttagaacagttcctc

SEQ ID NO: 6740 - DNA, 20 bp, synthetic construct
  source 1..20: mol_type = other DNA
aaagctttagaacagttcct

SEQ ID NO: 6741 - DNA, 20 bp, synthetic construct
  source 1..20: mol_type = other DNA
caaagctttagaacagttcc

SEQ ID NO: 6742 - DNA, 20 bp, synthetic construct
  source 1..20: mol_type = other DNA
acaaagctttagaacagttc

SEQ ID NO: 6743 - DNA, 20 bp, synthetic construct
  source 1..20: mol_type = other DNA
aacaaagctttagaacagtt

SEQ ID NO: 6744 - DNA, 20 bp, synthetic construct
  source 1..20: mol_type = other DNA
caacaaagctttagaacagt

SEQ ID NO: 6745 - DNA, 20 bp, synthetic construct
  source 1..20: mol_type = other DNA
acaacaaagctttagaacag

SEQ ID NO: 6746 - DNA, 20 bp, synthetic construct
  source 1..20: mol_type = other DNA
aacaacaaagctttagaaca

SEQ ID NO: 6747 - DNA, 20 bp, synthetic construct
  source 1..20: mol_type = other DNA
caacaacaaagctttagaac

SEQ ID NO: 6748 - DNA, 20 bp, synthetic construct
  source 1..20: mol_type = other DNA
acaacaacaaagctttagaa

SEQ ID NO: 6749 - DNA, 20 bp, synthetic construct
  source 1..20: mol_type = other DNA
aacaacaacaaagctttaga

SEQ ID NO: 6750 - DNA, 20 bp, synthetic construct
  source 1..20: mol_type = other DNA
caacaacaacaaagctttag

SEQ ID NO: 6751 - DNA, 20 bp, synthetic construct
  source 1..20: mol_type = other DNA
acaacaacaacaaagcttta

SEQ ID NO: 6752 - DNA, 20 bp, synthetic construct
  source 1..20: mol_type = other DNA
aacaacaacaacaaagcttt

SEQ ID NO: 6753 - DNA, 20 bp, synthetic construct
  source 1..20: mol_type = other DNA
taacaacaacaacaaagctt

SEQ ID NO: 6754 - DNA, 20 bp, synthetic construct
  source 1..20: mol_type = other DNA
ttaacaacaacaacaaagct

SEQ ID NO: 6755 - DNA, 20 bp, synthetic construct
  source 1..20: mol_type = other DNA
gttaacaacaacaacaaagc

SEQ ID NO: 6756 - DNA, 20 bp, synthetic construct
  source 1..20: mol_type = other DNA
ggttaacaacaacaacaaag

SEQ ID NO: 6757 - DNA, 20 bp, synthetic construct
  source 1..20: mol_type = other DNA
aggttaacaacaacaacaaa

SEQ ID NO: 6758 - DNA, 20 bp, synthetic construct
  source 1..20: mol_type = other DNA
aaggttaacaacaacaacaa

SEQ ID NO: 6759 - DNA, 20 bp, synthetic construct
  source 1..20: mol_type = other DNA
aaaggttaacaacaacaaca

SEQ ID NO: 6760 - DNA, 20 bp, synthetic construct
  source 1..20: mol_type = other DNA
gaaaggttaacaacaacaac

SEQ ID NO: 6761 - DNA, 20 bp, synthetic construct
  source 1..20: mol_type = other DNA
agaaaggttaacaacaacaa

SEQ ID NO: 6762 - DNA, 20 bp, synthetic construct
  source 1..20: mol_type = other DNA
aagaaaggttaacaacaaca

SEQ ID NO: 6763 - DNA, 20 bp, synthetic construct
  source 1..20: mol_type = other DNA
aaagaaaggttaacaacaac

SEQ ID NO: 6764 - DNA, 20 bp, synthetic construct
  source 1..20: mol_type = other DNA
aaaagaaaggttaacaacaa

SEQ ID NO: 6765 - DNA, 20 bp, synthetic construct
  source 1..20: mol_type = other DNA
aaaaagaaaggttaacaaca

SEQ ID NO: 6766 - DNA, 20 bp, synthetic construct
  source 1..20: mol_type = other DNA
gaaaaagaaaggttaacaac

SEQ ID NO: 6767 - DNA, 20 bp, synthetic construct
  source 1..20: mol_type = other DNA
tgaaaaagaaaggttaacaa

SEQ ID NO: 6768 - DNA, 20 bp, synthetic construct
  source 1..20: mol_type = other DNA
atgaaaaagaaaggttaaca

SEQ ID NO: 6769 - DNA, 20 bp, synthetic construct
  source 1..20: mol_type = other DNA
gatgaaaaagaaaggttaac

SEQ ID NO: 6770 - DNA, 20 bp, synthetic construct
  source 1..20: mol_type = other DNA
agatgaaaaagaaaggttaa

SEQ ID NO: 6771 - DNA, 20 bp, synthetic construct
  source 1..20: mol_type = other DNA
cagatgaaaaagaaaggtta

SEQ ID NO: 6772 - DNA, 20 bp, synthetic construct
  source 1..20: mol_type = other DNA
tcagatgaaaaagaaaggtt

SEQ ID NO: 6773 - DNA, 20 bp, synthetic construct
  source 1..20: mol_type = other DNA
ttcagatgaaaaagaaaggt

SEQ ID NO: 6774 - DNA, 20 bp, synthetic construct
  source 1..20: mol_type = other DNA
tttcagatgaaaaagaaagg

SEQ ID NO: 6775 - DNA, 20 bp, synthetic construct
  source 1..20: mol_type = other DNA
ctttcagatgaaaaagaaag

SEQ ID NO: 6776 - DNA, 20 bp, synthetic construct
  source 1..20: mol_type = other DNA
actttcagatgaaaaagaaa

SEQ ID NO: 6777 - DNA, 20 bp, synthetic construct
  source 1..20: mol_type = other DNA
cactttcagatgaaaaagaa

SEQ ID NO: 6778 - DNA, 20 bp, synthetic construct
  source 1..20: mol_type = other DNA
acactttcagatgaaaaaga

SEQ ID NO: 6779 - DNA, 20 bp, synthetic construct
  source 1..20: mol_type = other DNA
aacactttcagatgaaaaag

SEQ ID NO: 6780 - DNA, 20 bp, synthetic construct
  source 1..20: mol_type = other DNA
aaacactttcagatgaaaaa

SEQ ID NO: 6781 - DNA, 20 bp, synthetic construct
  source 1..20: mol_type = other DNA
aaaacactttcagatgaaaa

SEQ ID NO: 6782 - DNA, 20 bp, synthetic construct
  source 1..20: mol_type = other DNA
aaaaacactttcagatgaaa

SEQ ID NO: 6783 - DNA, 20 bp, synthetic construct
  source 1..20: mol_type = other DNA
aaaaaacactttcagatgaa

SEQ ID NO: 6784 - DNA, 20 bp, synthetic construct
  source 1..20: mol_type = other DNA
taaaaaacactttcagatga

SEQ ID NO: 6785 - DNA, 20 bp, synthetic construct
  source 1..20: mol_type = other DNA
ataaaaaacactttcagatg

SEQ ID NO: 6786 - DNA, 20 bp, synthetic construct
  source 1..20: mol_type = other DNA
aataaaaaacactttcagat

SEQ ID NO: 6787 - DNA, 20 bp, synthetic construct
  source 1..20: mol_type = other DNA
taataaaaaacactttcaga

SEQ ID NO: 6788 - DNA, 20 bp, synthetic construct
  source 1..20: mol_type = other DNA
ctaataaaaaacactttcag

SEQ ID NO: 6789 - DNA, 20 bp, synthetic construct
  source 1..20: mol_type = other DNA
gctaataaaaaacactttca

SEQ ID NO: 6790 - DNA, 20 bp, synthetic construct
  source 1..20: mol_type = other DNA
agctaataaaaaacactttc

SEQ ID NO: 6791 - DNA, 20 bp, synthetic construct
  source 1..20: mol_type = other DNA
cagctaataaaaaacacttt

SEQ ID NO: 6792 - DNA, 20 bp, synthetic construct
  source 1..20: mol_type = other DNA
gcagctaataaaaaacactt

SEQ ID NO: 6793 - DNA, 20 bp, synthetic construct
  source 1..20: mol_type = other DNA
agcagctaataaaaaacact

SEQ ID NO: 6794 - DNA, 20 bp, synthetic construct
  source 1..20: mol_type = other DNA
tagcagctaataaaaaacac

SEQ ID NO: 6795 - DNA, 20 bp, synthetic construct
  source 1..20: mol_type = other DNA
ctagcagctaataaaaaaca

SEQ ID NO: 6796 - DNA, 20 bp, synthetic construct
  source 1..20: mol_type = other DNA
gctagcagctaataaaaaac

SEQ ID NO: 6797 - DNA, 20 bp, synthetic construct
  source 1..20: mol_type = other DNA
ggctagcagctaataaaaaa

SEQ ID NO: 6798 - DNA, 20 bp, synthetic construct
  source 1..20: mol_type = other DNA
aggctagcagctaataaaaa

SEQ ID NO: 6799 - DNA, 20 bp, synthetic construct
  source 1..20: mol_type = other DNA
taggctagcagctaataaaa

SEQ ID NO: 6800 - DNA, 20 bp, synthetic construct
  source 1..20: mol_type = other DNA
ataggctagcagctaataaa

SEQ ID NO: 6801 - DNA, 20 bp, synthetic construct
  source 1..20: mol_type = other DNA
cataggctagcagctaataa

SEQ ID NO: 6802 - DNA, 20 bp, synthetic construct
  source 1..20: mol_type = other DNA
tcataggctagcagctaata

SEQ ID NO: 6803 - DNA, 20 bp, synthetic construct
  source 1..20: mol_type = other DNA
gtcataggctagcagctaat

SEQ ID NO: 6804 - DNA, 20 bp, synthetic construct
  source 1..20: mol_type = other DNA
ggtcataggctagcagctaa

SEQ ID NO: 6805 - DNA, 20 bp, synthetic construct
  source 1..20: mol_type = other DNA
tggtcataggctagcagcta

SEQ ID NO: 6806 - DNA, 20 bp, synthetic construct
  source 1..20: mol_type = other DNA
ttggtcataggctagcagct

SEQ ID NO: 6807 - DNA, 20 bp, synthetic construct
  source 1..20: mol_type = other DNA
cttggtcataggctagcagc

SEQ ID NO: 6808 - DNA, 20 bp, synthetic construct
  source 1..20: mol_type = other DNA
acttggtcataggctagcag

SEQ ID NO: 6809 - DNA, 20 bp, synthetic construct
  source 1..20: mol_type = other DNA
aacttggtcataggctagca

SEQ ID NO: 6810 - DNA, 20 bp, synthetic construct
  source 1..20: mol_type = other DNA
taacttggtcataggctagc

SEQ ID NO: 6811 - DNA, 20 bp, synthetic construct
  source 1..20: mol_type = other DNA
ataacttggtcataggctag

SEQ ID NO: 6812 - DNA, 20 bp, synthetic construct
  source 1..20: mol_type = other DNA
aataacttggtcataggcta

SEQ ID NO: 6813 - DNA, 20 bp, synthetic construct
  source 1..20: mol_type = other DNA
aaataacttggtcataggct

SEQ ID NO: 6814 - DNA, 20 bp, synthetic construct
  source 1..20: mol_type = other DNA
aaaataacttggtcataggc

SEQ ID NO: 6815 - DNA, 20 bp, synthetic construct
  source 1..20: mol_type = other DNA
aaaaataacttggtcatagg

SEQ ID NO: 6816 - DNA, 20 bp, synthetic construct
  source 1..20: mol_type = other DNA
caaaaataacttggtcatag

SEQ ID NO: 6817 - DNA, 20 bp, synthetic construct
  source 1..20: mol_type = other DNA
ccaaaaataacttggtcata

SEQ ID NO: 6818 - DNA, 20 bp, synthetic construct
  source 1..20: mol_type = other DNA
accaaaaataacttggtcat

SEQ ID NO: 6819 - DNA, 20 bp, synthetic construct
  source 1..20: mol_type = other DNA
taccaaaaataacttggtca

SEQ ID NO: 6820 - DNA, 20 bp, synthetic construct
  source 1..20: mol_type = other DNA
ttaccaaaaataacttggtc

SEQ ID NO: 6821 - DNA, 20 bp, synthetic construct
  source 1..20: mol_type = other DNA
gttaccaaaaataacttggt

SEQ ID NO: 6822 - DNA, 20 bp, synthetic construct
  source 1..20: mol_type = other DNA
agttaccaaaaataacttgg

SEQ ID NO: 6823 - DNA, 20 bp, synthetic construct
  source 1..20: mol_type = other DNA
aagttaccaaaaataacttg

SEQ ID NO: 6824 - DNA, 20 bp, synthetic construct
  source 1..20: mol_type = other DNA
aaagttaccaaaaataactt

SEQ ID NO: 6825 - DNA, 20 bp, synthetic construct
  source 1..20: mol_type = other DNA
aaaagttaccaaaaataact

SEQ ID NO: 6826 - DNA, 20 bp, synthetic construct
  source 1..20: mol_type = other DNA
aaaaagttaccaaaaataac

SEQ ID NO: 6827 - DNA, 20 bp, synthetic construct
  source 1..20: mol_type = other DNA
aaaaaagttaccaaaaataa

SEQ ID NO: 6828 - DNA, 20 bp, synthetic construct
  source 1..20: mol_type = other DNA
caaaaaagttaccaaaaata

SEQ ID NO: 6829 - DNA, 20 bp, synthetic construct
  source 1..20: mol_type = other DNA
acaaaaaagttaccaaaaat

SEQ ID NO: 6830 - DNA, 20 bp, synthetic construct
  source 1..20: mol_type = other DNA
tacaaaaaagttaccaaaaa

SEQ ID NO: 6831 - DNA, 20 bp, synthetic construct
  source 1..20: mol_type = other DNA
ttacaaaaaagttaccaaaa

SEQ ID NO: 6832 - DNA, 20 bp, synthetic construct
  source 1..20: mol_type = other DNA
attacaaaaaagttaccaaa

SEQ ID NO: 6833 - DNA, 20 bp, synthetic construct
  source 1..20: mol_type = other DNA
aattacaaaaaagttaccaa

SEQ ID NO: 6834 - DNA, 20 bp, synthetic construct
  source 1..20: mol_type = other DNA
aaattacaaaaaagttacca

SEQ ID NO: 6835 - DNA, 20 bp, synthetic construct
  source 1..20: mol_type = other DNA
gaaattacaaaaaagttacc

SEQ ID NO: 6836 - DNA, 20 bp, synthetic construct
  source 1..20: mol_type = other DNA
tgaaattacaaaaaagttac

SEQ ID NO: 6837 - DNA, 20 bp, synthetic construct
  source 1..20: mol_type = other DNA
atgaaattacaaaaaagtta

SEQ ID NO: 6838 - DNA, 20 bp, synthetic construct
  source 1..20: mol_type = other DNA
catgaaattacaaaaaagtt

SEQ ID NO: 6839 - DNA, 20 bp, synthetic construct
  source 1..20: mol_type = other DNA
ccatgaaattacaaaaaagt

SEQ ID NO: 6840 - DNA, 20 bp, synthetic construct
  source 1..20: mol_type = other DNA
gccatgaaattacaaaaaag

SEQ ID NO: 6841 - DNA, 20 bp, synthetic construct
  source 1..20: mol_type = other DNA
tgccatgaaattacaaaaaa

SEQ ID NO: 6842 - DNA, 20 bp, synthetic construct
  source 1..20: mol_type = other DNA
gtgccatgaaattacaaaaa

SEQ ID NO: 6843 - DNA, 20 bp, synthetic construct
  source 1..20: mol_type = other DNA
agtgccatgaaattacaaaa

SEQ ID NO: 6844 - DNA, 20 bp, synthetic construct
  source 1..20: mol_type = other DNA
tagtgccatgaaattacaaa

SEQ ID NO: 6845 - DNA, 20 bp, synthetic construct
  source 1..20: mol_type = other DNA
atagtgccatgaaattacaa

SEQ ID NO: 6846 - DNA, 20 bp, synthetic construct
  source 1..20: mol_type = other DNA
aatagtgccatgaaattaca

SEQ ID NO: 6847 - DNA, 20 bp, synthetic construct
  source 1..20: mol_type = other DNA
caatagtgccatgaaattac

SEQ ID NO: 6848 - DNA, 20 bp, synthetic construct
  source 1..20: mol_type = other DNA
ccaatagtgccatgaaatta

SEQ ID NO: 6849 - DNA, 20 bp, synthetic construct
  source 1..20: mol_type = other DNA
cccaatagtgccatgaaatt

SEQ ID NO: 6850 - DNA, 20 bp, synthetic construct
  source 1..20: mol_type = other DNA
tcccaatagtgccatgaaat

SEQ ID NO: 6851 - DNA, 20 bp, synthetic construct
  source 1..20: mol_type = other DNA
ttcccaatagtgccatgaaa

SEQ ID NO: 6852 - DNA, 20 bp, synthetic construct
  source 1..20: mol_type = other DNA
attcccaatagtgccatgaa

SEQ ID NO: 6853 - DNA, 20 bp, synthetic construct
  source 1..20: mol_type = other DNA
aattcccaatagtgccatga

SEQ ID NO: 6854 - DNA, 20 bp, synthetic construct
  source 1..20: mol_type = other DNA
aaattcccaatagtgccatg

SEQ ID NO: 6855 - DNA, 20 bp, synthetic construct
  source 1..20: mol_type = other DNA
aaaattcccaatagtgccat

SEQ ID NO: 6856 - DNA, 20 bp, synthetic construct
  source 1..20: mol_type = other DNA
gaaaattcccaatagtgcca

SEQ ID NO: 6857 - DNA, 20 bp, synthetic construct
  source 1..20: mol_type = other DNA
cgaaaattcccaatagtgcc

SEQ ID NO: 6858 - DNA, 20 bp, synthetic construct
  source 1..20: mol_type = other DNA
gcgaaaattcccaatagtgc

SEQ ID NO: 6859 - DNA, 20 bp, synthetic construct
  source 1..20: mol_type = other DNA
agcgaaaattcccaatagtg

SEQ ID NO: 6860 - DNA, 20 bp, synthetic construct
  source 1..20: mol_type = other DNA
cagcgaaaattcccaatagt

SEQ ID NO: 6861 - DNA, 20 bp, synthetic construct
  source 1..20: mol_type = other DNA
ccagcgaaaattcccaatag

SEQ ID NO: 6862 - DNA, 20 bp, synthetic construct
  source 1..20: mol_type = other DNA
accagcgaaaattcccaata

SEQ ID NO: 6863 - DNA, 20 bp, synthetic construct
  source 1..20: mol_type = other DNA
aaccagcgaaaattcccaat

SEQ ID NO: 6864 - DNA, 20 bp, synthetic construct
  source 1..20: mol_type = other DNA
caaccagcgaaaattcccaa

SEQ ID NO: 6865 - DNA, 20 bp, synthetic construct
  source 1..20: mol_type = other DNA
tcaaccagcgaaaattccca

SEQ ID NO: 6866 - DNA, 20 bp, synthetic construct
  source 1..20: mol_type = other DNA
gtcaaccagcgaaaattccc

SEQ ID NO: 6867 - DNA, 20 bp, synthetic construct
  source 1..20: mol_type = other DNA
agtcaaccagcgaaaattcc

SEQ ID NO: 6868 - DNA, 20 bp, synthetic construct
  source 1..20: mol_type = other DNA
gagtcaaccagcgaaaattc

SEQ ID NO: 6869 - DNA, 20 bp, synthetic construct
  source 1..20: mol_type = other DNA
agagtcaaccagcgaaaatt

SEQ ID NO: 6870 - DNA, 20 bp, synthetic construct
  source 1..20: mol_type = other DNA
aagagtcaaccagcgaaaat

SEQ ID NO: 6871 - DNA, 20 bp, synthetic construct
  source 1..20: mol_type = other DNA
gaagagtcaaccagcgaaaa

SEQ ID NO: 6872 - DNA, 20 bp, synthetic construct
  source 1..20: mol_type = other DNA
agaagagtcaaccagcgaaa

SEQ ID NO: 6873 - DNA, 20 bp, synthetic construct
  source 1..20: mol_type = other DNA
aagaagagtcaaccagcgaa

SEQ ID NO: 6874 - DNA, 20 bp, synthetic construct
  source 1..20: mol_type = other DNA
gaagaagagtcaaccagcga

SEQ ID NO: 6875 - DNA, 20 bp, synthetic construct
  source 1..20: mol_type = other DNA
agaagaagagtcaaccagcg

SEQ ID NO: 6876 - DNA, 20 bp, synthetic construct
  source 1..20: mol_type = other DNA
aagaagaagagtcaaccagc

SEQ ID NO: 6877 - DNA, 20 bp, synthetic construct
  source 1..20: mol_type = other DNA
gaagaagaagagtcaaccag

SEQ ID NO: 6878 - DNA, 20 bp, synthetic construct
  source 1..20: mol_type = other DNA
agaagaagaagagtcaacca

SEQ ID NO: 6879 - DNA, 20 bp, synthetic construct
  source 1..20: mol_type = other DNA
tagaagaagaagagtcaacc

SEQ ID NO: 6880 - DNA, 20 bp, synthetic construct
  source 1..20: mol_type = other DNA
gtagaagaagaagagtcaac

SEQ ID NO: 6881 - DNA, 20 bp, synthetic construct
  source 1..20: mol_type = other DNA
tgtagaagaagaagagtcaa

SEQ ID NO: 6882 - DNA, 20 bp, synthetic construct
  source 1..20: mol_type = other DNA
atgtagaagaagaagagtca

SEQ ID NO: 6883 - DNA, 20 bp, synthetic construct
  source 1..20: mol_type = other DNA
aatgtagaagaagaagagtc

SEQ ID NO: 6884 - DNA, 20 bp, synthetic construct
  source 1..20: mol_type = other DNA
gaatgtagaagaagaagagt

SEQ ID NO: 6885 - DNA, 20 bp, synthetic construct
  source 1..20: mol_type = other DNA
ggaatgtagaagaagaagag

SEQ ID NO: 6886 - DNA, 20 bp, synthetic construct
  source 1..20: mol_type = other DNA
gggaatgtagaagaagaaga

SEQ ID NO: 6887 - DNA, 20 bp, synthetic construct
  source 1..20: mol_type = other DNA
agggaatgtagaagaagaag

SEQ ID NO: 6888 - DNA, 20 bp, synthetic construct
  source 1..20: mol_type = other DNA
aagggaatgtagaagaagaa

SEQ ID NO: 6889 - DNA, 20 bp, synthetic construct
  source 1..20: mol_type = other DNA
gaagggaatgtagaagaaga

SEQ ID NO: 6890 - DNA, 20 bp, synthetic construct
  source 1..20: mol_type = other DNA
ggaagggaatgtagaagaag

SEQ ID NO: 6891 - DNA, 20 bp, synthetic construct
  source 1..20: mol_type = other DNA
gggaagggaatgtagaagaa

SEQ ID NO: 6892 - DNA, 20 bp, synthetic construct
  source 1..20: mol_type = other DNA
ggggaagggaatgtagaaga

SEQ ID NO: 6893 - DNA, 20 bp, synthetic construct
  source 1..20: mol_type = other DNA
tggggaagggaatgtagaag

SEQ ID NO: 6894 - DNA, 20 bp, synthetic construct
  source 1..20: mol_type = other DNA
atggggaagggaatgtagaa

SEQ ID NO: 6895 - DNA, 20 bp, synthetic construct
  source 1..20: mol_type = other DNA
aatggggaagggaatgtaga

SEQ ID NO: 6896 - DNA, 20 bp, synthetic construct
  source 1..20: mol_type = other DNA
taatggggaagggaatgtag

SEQ ID NO: 6897 - DNA, 20 bp, synthetic construct
  source 1..20: mol_type = other DNA
ttaatggggaagggaatgta

SEQ ID NO: 6898 - DNA, 20 bp, synthetic construct
  source 1..20: mol_type = other DNA
tttaatggggaagggaatgt

SEQ ID NO: 6899 - DNA, 20 bp, synthetic construct
  source 1..20: mol_type = other DNA
ttttaatggggaagggaatg

SEQ ID NO: 6900 - DNA, 20 bp, synthetic construct
  source 1..20: mol_type = other DNA
tttttaatggggaagggaat

SEQ ID NO: 6901 - DNA, 20 bp, synthetic construct
  source 1..20: mol_type = other DNA
atttttaatggggaagggaa

SEQ ID NO: 6902 - DNA, 20 bp, synthetic construct
  source 1..20: mol_type = other DNA
tatttttaatggggaaggga

SEQ ID NO: 6903 - DNA, 20 bp, synthetic construct
  source 1..20: mol_type = other DNA
ttatttttaatggggaaggg

SEQ ID NO: 6904 - DNA, 20 bp, synthetic construct
  source 1..20: mol_type = other DNA
tttatttttaatggggaagg

SEQ ID NO: 6905 - DNA, 20 bp, synthetic construct
  source 1..20: mol_type = other DNA
ttttatttttaatggggaag

SEQ ID NO: 6906 - DNA, 20 bp, synthetic construct
  source 1..20: mol_type = other DNA
tttttatttttaatggggaa

SEQ ID NO: 6907 - DNA, 20 bp, synthetic construct
  source 1..20: mol_type = other DNA
atttttatttttaatgggga

SEQ ID NO: 6908 - DNA, 20 bp, synthetic construct
  source 1..20: mol_type = other DNA
tatttttatttttaatgggg

SEQ ID NO: 6909 - DNA, 20 bp, synthetic construct
  source 1..20: mol_type = other DNA
atatttttatttttaatggg

SEQ ID NO: 6910 - DNA, 20 bp, synthetic construct
  source 1..20: mol_type = other DNA
catatttttatttttaatgg

SEQ ID NO: 6911 - DNA, 20 bp, synthetic construct
  source 1..20: mol_type = other DNA
ccatatttttatttttaatg

SEQ ID NO: 6912 - DNA, 20 bp, synthetic construct
  source 1..20: mol_type = other DNA
tccatatttttatttttaat

SEQ ID NO: 6913 - DNA, 20 bp, synthetic construct
  source 1..20: mol_type = other DNA
atccatatttttatttttaa

SEQ ID NO: 6914 - DNA, 20 bp, synthetic construct
  source 1..20: mol_type = other DNA
aatccatatttttattttta

SEQ ID NO: 6915 - DNA, 20 bp, synthetic construct
  source 1..20: mol_type = other DNA
aaatccatatttttattttt

SEQ ID NO: 6916 - DNA, 20 bp, synthetic construct
  source 1..20: mol_type = other DNA
taaatccatatttttatttt

SEQ ID NO: 6917 - DNA, 20 bp, synthetic construct
  source 1..20: mol_type = other DNA
gtaaatccatatttttattt

SEQ ID NO: 6918 - DNA, 20 bp, synthetic construct
  source 1..20: mol_type = other DNA
tgtaaatccatatttttatt

SEQ ID NO: 6919 - DNA, 20 bp, synthetic construct
  source 1..20: mol_type = other DNA
ttgtaaatccatatttttat

SEQ ID NO: 6920 - DNA, 20 bp, synthetic construct
  source 1..20: mol_type = other DNA
attgtaaatccatattttta

SEQ ID NO: 6921 - DNA, 20 bp, synthetic construct
  source 1..20: mol_type = other DNA
aattgtaaatccatattttt

SEQ ID NO: 6922 - DNA, 20 bp, synthetic construct
  source 1..20: mol_type = other DNA
caattgtaaatccatatttt

SEQ ID NO: 6923 - DNA, 20 bp, synthetic construct
  source 1..20: mol_type = other DNA
acaattgtaaatccatattt

SEQ ID NO: 6924 - DNA, 20 bp, synthetic construct
  source 1..20: mol_type = other DNA
aacaattgtaaatccatatt

SEQ ID NO: 6925 - DNA, 20 bp, synthetic construct
  source 1..20: mol_type = other DNA
taacaattgtaaatccatat

SEQ ID NO: 6926 - DNA, 20 bp, synthetic construct
  source 1..20: mol_type = other DNA
gtaacaattgtaaatccata

SEQ ID NO: 6927 - DNA, 20 bp, synthetic construct
  source 1..20: mol_type = other DNA
agtaacaattgtaaatccat

SEQ ID NO: 6928 - DNA, 20 bp, synthetic construct
  source 1..20: mol_type = other DNA
gagtaacaattgtaaatcca

SEQ ID NO: 6929 - DNA, 20 bp, synthetic construct
  source 1..20: mol_type = other DNA
agagtaacaattgtaaatcc

SEQ ID NO: 6930 - DNA, 20 bp, synthetic construct
  source 1..20: mol_type = other DNA
tagagtaacaattgtaaatc

SEQ ID NO: 6931 - DNA, 20 bp, synthetic construct
  source 1..20: mol_type = other DNA
atagagtaacaattgtaaat

SEQ ID NO: 6932 - DNA, 20 bp, synthetic construct
  source 1..20: mol_type = other DNA
aatagagtaacaattgtaaa

SEQ ID NO: 6933 - DNA, 20 bp, synthetic construct
  source 1..20: mol_type = other DNA
gaatagagtaacaattgtaa

SEQ ID NO: 6934 - DNA, 20 bp, synthetic construct
  source 1..20: mol_type = other DNA
ggaatagagtaacaattgta

SEQ ID NO: 6935 - DNA, 20 bp, synthetic construct
  source 1..20: mol_type = other DNA
aggaatagagtaacaattgt

SEQ ID NO: 6936 - DNA, 20 bp, synthetic construct
  source 1..20: mol_type = other DNA
taggaatagagtaacaattg

SEQ ID NO: 6937 - DNA, 20 bp, synthetic construct
  source 1..20: mol_type = other DNA
ttaggaatagagtaacaatt

SEQ ID NO: 6938 - DNA, 20 bp, synthetic construct
  source 1..20: mol_type = other DNA
tttaggaatagagtaacaat

SEQ ID NO: 6939 - DNA, 20 bp, synthetic construct
  source 1..20: mol_type = other DNA
gtttaggaatagagtaacaa

SEQ ID NO: 6940 - DNA, 20 bp, synthetic construct
  source 1..20: mol_type = other DNA
ggtttaggaatagagtaaca

SEQ ID NO: 6941 - DNA, 20 bp, synthetic construct
  source 1..20: mol_type = other DNA
aggtttaggaatagagtaac

SEQ ID NO: 6942 - DNA, 20 bp, synthetic construct
  source 1..20: mol_type = other DNA
taggtttaggaatagagtaa

SEQ ID NO: 6943 - DNA, 20 bp, synthetic construct
  source 1..20: mol_type = other DNA
ttaggtttaggaatagagta

SEQ ID NO: 6944 - DNA, 20 bp, synthetic construct
  source 1..20: mol_type = other DNA
tttaggtttaggaatagagt

SEQ ID NO: 6945 - DNA, 20 bp, synthetic construct
  source 1..20: mol_type = other DNA
atttaggtttaggaatagag

SEQ ID NO: 6946 - DNA, 20 bp, synthetic construct
  source 1..20: mol_type = other DNA
tatttaggtttaggaataga

SEQ ID NO: 6947 - DNA, 20 bp, synthetic construct
  source 1..20: mol_type = other DNA
ttatttaggtttaggaatag

SEQ ID NO: 6948 - DNA, 20 bp, synthetic construct
  source 1..20: mol_type = other DNA
attatttaggtttaggaata

SEQ ID NO: 6949 - DNA, 20 bp, synthetic construct
  source 1..20: mol_type = other DNA
tattatttaggtttaggaat

SEQ ID NO: 6950 - DNA, 20 bp, synthetic construct
  source 1..20: mol_type = other DNA
atattatttaggtttaggaa

SEQ ID NO: 6951 - DNA, 20 bp, synthetic construct
  source 1..20: mol_type = other DNA
catattatttaggtttagga

SEQ ID NO: 6952 - DNA, 20 bp, synthetic construct
  source 1..20: mol_type = other DNA
tcatattatttaggtttagg

SEQ ID NO: 6953 - DNA, 20 bp, synthetic construct
  source 1..20: mol_type = other DNA
gtcatattatttaggtttag

SEQ ID NO: 6954 - DNA, 20 bp, synthetic construct
  source 1..20: mol_type = other DNA
tgtcatattatttaggttta

SEQ ID NO: 6955 - DNA, 20 bp, synthetic construct
  source 1..20: mol_type = other DNA
atgtcatattatttaggttt

SEQ ID NO: 6956 - DNA, 20 bp, synthetic construct
  source 1..20: mol_type = other DNA
aatgtcatattatttaggtt

SEQ ID NO: 6957 - DNA, 20 bp, synthetic construct
  source 1..20: mol_type = other DNA
taatgtcatattatttaggt

SEQ ID NO: 6958 - DNA, 20 bp, synthetic construct
  source 1..20: mol_type = other DNA
ctaatgtcatattatttagg

SEQ ID NO: 6959 - DNA, 20 bp, synthetic construct
  source 1..20: mol_type = other DNA
tctaatgtcatattatttag

SEQ ID NO: 6960 - DNA, 20 bp, synthetic construct
  source 1..20: mol_type = other DNA
ttctaatgtcatattattta

SEQ ID NO: 6961 - DNA, 20 bp, synthetic construct
  source 1..20: mol_type = other DNA
attctaatgtcatattattt

SEQ ID NO: 6962 - DNA, 20 bp, synthetic construct
  source 1..20: mol_type = other DNA
aattctaatgtcatattatt

SEQ ID NO: 6963 - DNA, 20 bp, synthetic construct
  source 1..20: mol_type = other DNA
caattctaatgtcatattat

SEQ ID NO: 6964 - DNA, 20 bp, synthetic construct
  source 1..20: mol_type = other DNA
gcaattctaatgtcatatta

SEQ ID NO: 6965 - DNA, 20 bp, synthetic construct
  source 1..20: mol_type = other DNA
agcaattctaatgtcatatt

SEQ ID NO: 6966 - DNA, 20 bp, synthetic construct
  source 1..20: mol_type = other DNA
aagcaattctaatgtcatat

SEQ ID NO: 6967 - DNA, 20 bp, synthetic construct
  source 1..20: mol_type = other DNA
caagcaattctaatgtcata

SEQ ID NO: 6968 - DNA, 20 bp, synthetic construct
  source 1..20: mol_type = other DNA
ccaagcaattctaatgtcat

SEQ ID NO: 6969 - DNA, 20 bp, synthetic construct
  source 1..20: mol_type = other DNA
cccaagcaattctaatgtca

SEQ ID NO: 6970 - DNA, 20 bp, synthetic construct
  source 1..20: mol_type = other DNA
tcccaagcaattctaatgtc

SEQ ID NO: 6971 - DNA, 20 bp, synthetic construct
  source 1..20: mol_type = other DNA
atcccaagcaattctaatgt

SEQ ID NO: 6972 - DNA, 20 bp, synthetic construct
  source 1..20: mol_type = other DNA
tatcccaagcaattctaatg

SEQ ID NO: 6973 - DNA, 20 bp, synthetic construct
  source 1..20: mol_type = other DNA
gtatcccaagcaattctaat

SEQ ID NO: 6974 - DNA, 20 bp, synthetic construct
  source 1..20: mol_type = other DNA
tgtatcccaagcaattctaa

SEQ ID NO: 6975 - DNA, 20 bp, synthetic construct
  source 1..20: mol_type = other DNA
ctgtatcccaagcaattcta

SEQ ID NO: 6976 - DNA, 20 bp, synthetic construct
  source 1..20: mol_type = other DNA
cctgtatcccaagcaattct

SEQ ID NO: 6977 - DNA, 20 bp, synthetic construct
  source 1..20: mol_type = other DNA
tcctgtatcccaagcaattc

SEQ ID NO: 6978 - DNA, 20 bp, synthetic construct
  source 1..20: mol_type = other DNA
atcctgtatcccaagcaatt

SEQ ID NO: 6979 - DNA, 20 bp, synthetic construct
  source 1..20: mol_type = other DNA
aatcctgtatcccaagcaat

SEQ ID NO: 6980 - DNA, 20 bp, synthetic construct
  source 1..20: mol_type = other DNA
gaatcctgtatcccaagcaa

SEQ ID NO: 6981 - DNA, 20 bp, synthetic construct
  source 1..20: mol_type = other DNA
tgaatcctgtatcccaagca

SEQ ID NO: 6982 - DNA, 20 bp, synthetic construct
  source 1..20: mol_type = other DNA
ctgaatcctgtatcccaagc

SEQ ID NO: 6983 - DNA, 20 bp, synthetic construct
  source 1..20: mol_type = other DNA
actgaatcctgtatcccaag

SEQ ID NO: 6984 - DNA, 20 bp, synthetic construct
  source 1..20: mol_type = other DNA
gactgaatcctgtatcccaa

SEQ ID NO: 6985 - DNA, 20 bp, synthetic construct
  source 1..20: mol_type = other DNA
agactgaatcctgtatccca

SEQ ID NO: 6986 - DNA, 20 bp, synthetic construct
  source 1..20: mol_type = other DNA
cagactgaatcctgtatccc

SEQ ID NO: 6987 - DNA, 20 bp, synthetic construct
  source 1..20: mol_type = other DNA
tcagactgaatcctgtatcc

SEQ ID NO: 6988 - DNA, 20 bp, synthetic construct
  source 1..20: mol_type = other DNA
ttcagactgaatcctgtatc

SEQ ID NO: 6989 - DNA, 20 bp, synthetic construct
  source 1..20: mol_type = other DNA
attcagactgaatcctgtat

SEQ ID NO: 6990 - DNA, 20 bp, synthetic construct
  source 1..20: mol_type = other DNA
tattcagactgaatcctgta

SEQ ID NO: 6991 - DNA, 20 bp, synthetic construct
  source 1..20: mol_type = other DNA
ttattcagactgaatcctgt

SEQ ID NO: 6992 - DNA, 20 bp, synthetic construct
  source 1..20: mol_type = other DNA
tttattcagactgaatcctg

SEQ ID NO: 6993 - DNA, 20 bp, synthetic construct
  source 1..20: mol_type = other DNA
ttttattcagactgaatcct

SEQ ID NO: 6994 - DNA, 20 bp, synthetic construct
  source 1..20: mol_type = other DNA
attttattcagactgaatcc

SEQ ID NO: 6995 - DNA, 20 bp, synthetic construct
  source 1..20: mol_type = other DNA
tattttattcagactgaatc

SEQ ID NO: 6996 - DNA, 20 bp, synthetic construct
  source 1..20: mol_type = other DNA
atattttattcagactgaat

SEQ ID NO: 6997 - DNA, 20 bp, synthetic construct
  source 1..20: mol_type = other DNA
aatattttattcagactgaa

SEQ ID NO: 6998 - DNA, 20 bp, synthetic construct
  source 1..20: mol_type = other DNA
aaatattttattcagactga

SEQ ID NO: 6999 - DNA, 20 bp, synthetic construct
  source 1..20: mol_type = other DNA
aaaatattttattcagactg

SEQ ID NO: 7000 - DNA, 20 bp, synthetic construct
  source 1..20: mol_type = other DNA
aaaaatattttattcagact

SEQ ID NO: 7001 - DNA, 20 bp, synthetic construct
  source 1..20: mol_type = other DNA
gaaaaatattttattcagac

SEQ ID NO: 7002 - DNA, 20 bp, synthetic construct
  source 1..20: mol_type = other DNA
agaaaaatattttattcaga

SEQ ID NO: 7003 - DNA, 20 bp, synthetic construct
  source 1..20: mol_type = other DNA
aagaaaaatattttattcag

SEQ ID NO: 7004 - DNA, 20 bp, synthetic construct
  source 1..20: mol_type = other DNA
aaagaaaaatattttattca

SEQ ID NO: 7005 - DNA, 20 bp, synthetic construct
  source 1..20: mol_type = other DNA
aaaagaaaaatattttattc

SEQ ID NO: 7006 - DNA, 20 bp, synthetic construct
  source 1..20: mol_type = other DNA
taaaagaaaaatattttatt

SEQ ID NO: 7007 - DNA, 20 bp, synthetic construct
  source 1..20: mol_type = other DNA
ctaaaagaaaaatattttat

SEQ ID NO: 7008 - DNA, 20 bp, synthetic construct
  source 1..20: mol_type = other DNA
actaaaagaaaaatatttta

SEQ ID NO: 7009 - DNA, 20 bp, synthetic construct
  source 1..20: mol_type = other DNA
cactaaaagaaaaatatttt

SEQ ID NO: 7010 - DNA, 20 bp, synthetic construct
  source 1..20: mol_type = other DNA
tcactaaaagaaaaatattt

SEQ ID NO: 7011 - DNA, 20 bp, synthetic construct
  source 1..20: mol_type = other DNA
atcactaaaagaaaaatatt

SEQ ID NO: 7012 - DNA, 20 bp, synthetic construct
  source 1..20: mol_type = other DNA
aatcactaaaagaaaaatat

SEQ ID NO: 7013 - DNA, 20 bp, synthetic construct
  source 1..20: mol_type = other DNA
aaatcactaaaagaaaaata

SEQ ID NO: 7014 - DNA, 20 bp, synthetic construct
  source 1..20: mol_type = other DNA
aaaatcactaaaagaaaaat

SEQ ID NO: 7015 - DNA, 20 bp, synthetic construct
  source 1..20: mol_type = other DNA
gaaaatcactaaaagaaaaa

SEQ ID NO: 7016 - DNA, 20 bp, synthetic construct
  source 1..20: mol_type = other DNA
tgaaaatcactaaaagaaaa

SEQ ID NO: 7017 - DNA, 20 bp, synthetic construct
  source 1..20: mol_type = other DNA
ctgaaaatcactaaaagaaa

SEQ ID NO: 7018 - DNA, 20 bp, synthetic construct
  source 1..20: mol_type = other DNA
gctgaaaatcactaaaagaa

SEQ ID NO: 7019 - DNA, 20 bp, synthetic construct
  source 1..20: mol_type = other DNA
agctgaaaatcactaaaaga

SEQ ID NO: 7020 - DNA, 20 bp, synthetic construct
  source 1..20: mol_type = other DNA
aagctgaaaatcactaaaag

SEQ ID NO: 7021 - DNA, 20 bp, synthetic construct
  source 1..20: mol_type = other DNA
taagctgaaaatcactaaaa

SEQ ID NO: 7022 - DNA, 20 bp, synthetic construct
  source 1..20: mol_type = other DNA
ctaagctgaaaatcactaaa

SEQ ID NO: 7023 - DNA, 20 bp, synthetic construct
  source 1..20: mol_type = other DNA
actaagctgaaaatcactaa

SEQ ID NO: 7024 - DNA, 20 bp, synthetic construct
  source 1..20: mol_type = other DNA
tactaagctgaaaatcacta

SEQ ID NO: 7025 - DNA, 20 bp, synthetic construct
  source 1..20: mol_type = other DNA
atactaagctgaaaatcact

SEQ ID NO: 7026 - DNA, 20 bp, synthetic construct
  source 1..20: mol_type = other DNA
aatactaagctgaaaatcac

SEQ ID NO: 7027 - DNA, 20 bp, synthetic construct
  source 1..20: mol_type = other DNA
aaatactaagctgaaaatca

SEQ ID NO: 7028 - DNA, 20 bp, synthetic construct
  source 1..20: mol_type = other DNA
aaaatactaagctgaaaatc

SEQ ID NO: 7029 - DNA, 20 bp, synthetic construct
  source 1..20: mol_type = other DNA
aaaaatactaagctgaaaat

SEQ ID NO: 7030 - DNA, 20 bp, synthetic construct
  source 1..20: mol_type = other DNA
taaaaatactaagctgaaaa

SEQ ID NO: 7031 - DNA, 20 bp, synthetic construct
  source 1..20: mol_type = other DNA
gtaaaaatactaagctgaaa

SEQ ID NO: 7032 - DNA, 20 bp, synthetic construct
  source 1..20: mol_type = other DNA
agtaaaaatactaagctgaa

SEQ ID NO: 7033 - DNA, 20 bp, synthetic construct
  source 1..20: mol_type = other DNA
cagtaaaaatactaagctga

SEQ ID NO: 7034 - DNA, 20 bp, synthetic construct
  source 1..20: mol_type = other DNA
gcagtaaaaatactaagctg

SEQ ID NO: 7035 - DNA, 20 bp, synthetic construct
  source 1..20: mol_type = other DNA
agcagtaaaaatactaagct

SEQ ID NO: 7036 - DNA, 20 bp, synthetic construct
  source 1..20: mol_type = other DNA
aagcagtaaaaatactaagc

SEQ ID NO: 7037 - DNA, 20 bp, synthetic construct
  source 1..20: mol_type = other DNA
gaagcagtaaaaatactaag

SEQ ID NO: 7038 - DNA, 20 bp, synthetic construct
  source 1..20: mol_type = other DNA
agaagcagtaaaaatactaa

SEQ ID NO: 7039 - DNA, 20 bp, synthetic construct
  source 1..20: mol_type = other DNA
aagaagcagtaaaaatacta

SEQ ID NO: 7040 - DNA, 20 bp, synthetic construct
  source 1..20: mol_type = other DNA
aaagaagcagtaaaaatact

SEQ ID NO: 7041 - DNA, 20 bp, synthetic construct
  source 1..20: mol_type = other DNA
gaaagaagcagtaaaaatac

SEQ ID NO: 7042 - DNA, 20 bp, synthetic construct
  source 1..20: mol_type = other DNA
agaaagaagcagtaaaaata

SEQ ID NO: 7043 - DNA, 20 bp, synthetic construct
  source 1..20: mol_type = other DNA
gagaaagaagcagtaaaaat

SEQ ID NO: 7044 - DNA, 20 bp, synthetic construct
  source 1..20: mol_type = other DNA
agagaaagaagcagtaaaaa

SEQ ID NO: 7045 - DNA, 20 bp, synthetic construct
  source 1..20: mol_type = other DNA
aagagaaagaagcagtaaaa

SEQ ID NO: 7046 - DNA, 20 bp, synthetic construct
  source 1..20: mol_type = other DNA
caagagaaagaagcagtaaa

SEQ ID NO: 7047 - DNA, 20 bp, synthetic construct
  source 1..20: mol_type = other DNA
tcaagagaaagaagcagtaa

SEQ ID NO: 7048 - DNA, 20 bp, synthetic construct
  source 1..20: mol_type = other DNA
ctcaagagaaagaagcagta

SEQ ID NO: 7049 - DNA, 20 bp, synthetic construct
  source 1..20: mol_type = other DNA
cctcaagagaaagaagcagt

SEQ ID NO: 7050 - DNA, 20 bp, synthetic construct
  source 1..20: mol_type = other DNA
gcctcaagagaaagaagcag

SEQ ID NO: 7051 - DNA, 20 bp, synthetic construct
  source 1..20: mol_type = other DNA
tgcctcaagagaaagaagca

SEQ ID NO: 7052 - DNA, 20 bp, synthetic construct
  source 1..20: mol_type = other DNA
atgcctcaagagaaagaagc

SEQ ID NO: 7053 - DNA, 20 bp, synthetic construct
  source 1..20: mol_type = other DNA
aatgcctcaagagaaagaag

SEQ ID NO: 7054 - DNA, 20 bp, synthetic construct
  source 1..20: mol_type = other DNA
caatgcctcaagagaaagaa

SEQ ID NO: 7055 - DNA, 20 bp, synthetic construct
  source 1..20: mol_type = other DNA
gcaatgcctcaagagaaaga

SEQ ID NO: 7056 - DNA, 20 bp, synthetic construct
  source 1..20: mol_type = other DNA
tgcaatgcctcaagagaaag

SEQ ID NO: 7057 - DNA, 20 bp, synthetic construct
  source 1..20: mol_type = other DNA
ttgcaatgcctcaagagaaa

SEQ ID NO: 7058 - DNA, 20 bp, synthetic construct
  source 1..20: mol_type = other DNA
gttgcaatgcctcaagagaa

SEQ ID NO: 7059 - DNA, 20 bp, synthetic construct
  source 1..20: mol_type = other DNA
agttgcaatgcctcaagaga

SEQ ID NO: 7060 - DNA, 20 bp, synthetic construct
  source 1..20: mol_type = other DNA
aagttgcaatgcctcaagag

SEQ ID NO: 7061 - DNA, 20 bp, synthetic construct
  source 1..20: mol_type = other DNA
taagttgcaatgcctcaaga

SEQ ID NO: 7062 - DNA, 20 bp, synthetic construct
  source 1..20: mol_type = other DNA
ttaagttgcaatgcctcaag

SEQ ID NO: 7063 - DNA, 20 bp, synthetic construct
  source 1..20: mol_type = other DNA
tttaagttgcaatgcctcaa

SEQ ID NO: 7064 - DNA, 20 bp, synthetic construct
  source 1..20: mol_type = other DNA
ttttaagttgcaatgcctca

SEQ ID NO: 7065 - DNA, 20 bp, synthetic construct
  source 1..20: mol_type = other DNA
tttttaagttgcaatgcctc

SEQ ID NO: 7066 - DNA, 20 bp, synthetic construct
  source 1..20: mol_type = other DNA
atttttaagttgcaatgcct

SEQ ID NO: 7067 - DNA, 20 bp, synthetic construct
  source 1..20: mol_type = other DNA
aatttttaagttgcaatgcc

SEQ ID NO: 7068 - DNA, 20 bp, synthetic construct
  source 1..20: mol_type = other DNA
caatttttaagttgcaatgc

SEQ ID NO: 7069 - DNA, 20 bp, synthetic construct
  source 1..20: mol_type = other DNA
acaatttttaagttgcaatg

SEQ ID NO: 7070 - DNA, 20 bp, synthetic construct
  source 1..20: mol_type = other DNA
cacaatttttaagttgcaat

SEQ ID NO: 7071 - DNA, 20 bp, synthetic construct
  source 1..20: mol_type = other DNA
gcacaatttttaagttgcaa

SEQ ID NO: 7072 - DNA, 20 bp, synthetic construct
  source 1..20: mol_type = other DNA
agcacaatttttaagttgca

SEQ ID NO: 7073 - DNA, 20 bp, synthetic construct
  source 1..20: mol_type = other DNA
cagcacaatttttaagttgc

SEQ ID NO: 7074 - DNA, 20 bp, synthetic construct
  source 1..20: mol_type = other DNA
acagcacaatttttaagttg

SEQ ID NO: 7075 - DNA, 20 bp, synthetic construct
  source 1..20: mol_type = other DNA
aacagcacaatttttaagtt

SEQ ID NO: 7076 - DNA, 20 bp, synthetic construct
  source 1..20: mol_type = other DNA
aaacagcacaatttttaagt

SEQ ID NO: 7077 - DNA, 20 bp, synthetic construct
  source 1..20: mol_type = other DNA
taaacagcacaatttttaag

SEQ ID NO: 7078 - DNA, 20 bp, synthetic construct
  source 1..20: mol_type = other DNA
ctaaacagcacaatttttaa

SEQ ID NO: 7079 - DNA, 20 bp, synthetic construct
  source 1..20: mol_type = other DNA
gctaaacagcacaattttta

SEQ ID NO: 7080 - DNA, 20 bp, synthetic construct
  source 1..20: mol_type = other DNA
ggctaaacagcacaattttt

SEQ ID NO: 7081 - DNA, 20 bp, synthetic construct
  source 1..20: mol_type = other DNA
tggctaaacagcacaatttt

SEQ ID NO: 7082 - DNA, 20 bp, synthetic construct
  source 1..20: mol_type = other DNA
ctggctaaacagcacaattt

SEQ ID NO: 7083 - DNA, 20 bp, synthetic construct
  source 1..20: mol_type = other DNA
cctggctaaacagcacaatt

SEQ ID NO: 7084 - DNA, 20 bp, synthetic construct
  source 1..20: mol_type = other DNA
gcctggctaaacagcacaat

SEQ ID NO: 7085 - DNA, 20 bp, synthetic construct
  source 1..20: mol_type = other DNA
cgcctggctaaacagcacaa

SEQ ID NO: 7086 - DNA, 20 bp, synthetic construct
  source 1..20: mol_type = other DNA
gcgcctggctaaacagcaca

SEQ ID NO: 7087 - DNA, 20 bp, synthetic construct
  source 1..20: mol_type = other DNA
ggcgcctggctaaacagcac

SEQ ID NO: 7088 - DNA, 20 bp, synthetic construct
  source 1..20: mol_type = other DNA
aggcgcctggctaaacagca

SEQ ID NO: 7089 - DNA, 20 bp, synthetic construct
  source 1..20: mol_type = other DNA
caggcgcctggctaaacagc

SEQ ID NO: 7090 - DNA, 20 bp, synthetic construct
  source 1..20: mol_type = other DNA
acaggcgcctggctaaacag

SEQ ID NO: 7091 - DNA, 20 bp, synthetic construct
  source 1..20: mol_type = other DNA
tacaggcgcctggctaaaca

SEQ ID NO: 7092 - DNA, 20 bp, synthetic construct
  source 1..20: mol_type = other DNA
ttacaggcgcctggctaaac

SEQ ID NO: 7093 - DNA, 20 bp, synthetic construct
  source 1..20: mol_type = other DNA
attacaggcgcctggctaaa

SEQ ID NO: 7094 - DNA, 20 bp, synthetic construct
  source 1..20: mol_type = other DNA
gattacaggcgcctggctaa

SEQ ID NO: 7095 - DNA, 20 bp, synthetic construct
  source 1..20: mol_type = other DNA
ggattacaggcgcctggcta

SEQ ID NO: 7096 - DNA, 20 bp, synthetic construct
  source 1..20: mol_type = other DNA
gggattacaggcgcctggct

SEQ ID NO: 7097 - DNA, 20 bp, synthetic construct
  source 1..20: mol_type = other DNA
tgggattacaggcgcctggc

SEQ ID NO: 7098 - DNA, 20 bp, synthetic construct
  source 1..20: mol_type = other DNA
ctgggattacaggcgcctgg

SEQ ID NO: 7099 - DNA, 20 bp, synthetic construct
  source 1..20: mol_type = other DNA
gctgggattacaggcgcctg

SEQ ID NO: 7100 - DNA, 20 bp, synthetic construct
  source 1..20: mol_type = other DNA
agctgggattacaggcgcct

SEQ ID NO: 7101 - DNA, 20 bp, synthetic construct
  source 1..20: mol_type = other DNA
tagctgggattacaggcgcc

SEQ ID NO: 7102 - DNA, 20 bp, synthetic construct
  source 1..20: mol_type = other DNA
gtagctgggattacaggcgc

SEQ ID NO: 7103 - DNA, 20 bp, synthetic construct
  source 1..20: mol_type = other DNA
agtagctgggattacaggcg

SEQ ID NO: 7104 - DNA, 20 bp, synthetic construct
  source 1..20: mol_type = other DNA
aagtagctgggattacaggc

SEQ ID NO: 7105 - DNA, 20 bp, synthetic construct
  source 1..20: mol_type = other DNA
caagtagctgggattacagg

SEQ ID NO: 7106 - DNA, 20 bp, synthetic construct
  source 1..20: mol_type = other DNA
ccaagtagctgggattacag

SEQ ID NO: 7107 - DNA, 20 bp, synthetic construct
  source 1..20: mol_type = other DNA
cccaagtagctgggattaca

SEQ ID NO: 7108 - DNA, 20 bp, synthetic construct
  source 1..20: mol_type = other DNA
tcccaagtagctgggattac

SEQ ID NO: 7109 - DNA, 20 bp, synthetic construct
  source 1..20: mol_type = other DNA
ctcccaagtagctgggatta

SEQ ID NO: 7110 - DNA, 20 bp, synthetic construct
  source 1..20: mol_type = other DNA
cctcccaagtagctgggatt

SEQ ID NO: 7111 - DNA, 20 bp, synthetic construct
  source 1..20: mol_type = other DNA
gcctcccaagtagctgggat

SEQ ID NO: 7112 - DNA, 20 bp, synthetic construct
  source 1..20: mol_type = other DNA
agcctcccaagtagctggga

SEQ ID NO: 7113 - DNA, 20 bp, synthetic construct
  source 1..20: mol_type = other DNA
cagcctcccaagtagctggg

SEQ ID NO: 7114 - DNA, 20 bp, synthetic construct
  source 1..20: mol_type = other DNA
tcagcctcccaagtagctgg

SEQ ID NO: 7115 - DNA, 20 bp, synthetic construct
  source 1..20: mol_type = other DNA
ctcagcctcccaagtagctg

SEQ ID NO: 7116 - DNA, 20 bp, synthetic construct
  source 1..20: mol_type = other DNA
cctcagcctcccaagtagct

SEQ ID NO: 7117 - DNA, 20 bp, synthetic construct
  source 1..20: mol_type = other DNA
gcctcagcctcccaagtagc

SEQ ID NO: 7118 - DNA, 20 bp, synthetic construct
  source 1..20: mol_type = other DNA
tgcctcagcctcccaagtag

SEQ ID NO: 7119 - DNA, 20 bp, synthetic construct
  source 1..20: mol_type = other DNA
ctgcctcagcctcccaagta

SEQ ID NO: 7120 - DNA, 20 bp, synthetic construct
  source 1..20: mol_type = other DNA
cctgcctcagcctcccaagt

SEQ ID NO: 7121 - DNA, 20 bp, synthetic construct
  source 1..20: mol_type = other DNA
tcctgcctcagcctcccaag

SEQ ID NO: 7122 - DNA, 20 bp, synthetic construct
  source 1..20: mol_type = other DNA
ctcctgcctcagcctcccaa

SEQ ID NO: 7123 - DNA, 20 bp, synthetic construct
  source 1..20: mol_type = other DNA
gctcctgcctcagcctccca

SEQ ID NO: 7124 - DNA, 20 bp, synthetic construct
  source 1..20: mol_type = other DNA
tgctcctgcctcagcctccc

SEQ ID NO: 7125 - DNA, 20 bp, synthetic construct
  source 1..20: mol_type = other DNA
atgctcctgcctcagcctcc

SEQ ID NO: 7126 - DNA, 20 bp, synthetic construct
  source 1..20: mol_type = other DNA
gatgctcctgcctcagcctc

SEQ ID NO: 7127 - DNA, 20 bp, synthetic construct
  source 1..20: mol_type = other DNA
tgatgctcctgcctcagcct

SEQ ID NO: 7128 - DNA, 20 bp, synthetic construct
  source 1..20: mol_type = other DNA
gtgatgctcctgcctcagcc

SEQ ID NO: 7129 - DNA, 20 bp, synthetic construct
  source 1..20: mol_type = other DNA
agtgatgctcctgcctcagc

SEQ ID NO: 7130 - DNA, 20 bp, synthetic construct
  source 1..20: mol_type = other DNA
aagtgatgctcctgcctcag

SEQ ID NO: 7131 - DNA, 20 bp, synthetic construct
  source 1..20: mol_type = other DNA
caagtgatgctcctgcctca

SEQ ID NO: 7132 - DNA, 20 bp, synthetic construct
  source 1..20: mol_type = other DNA
tcaagtgatgctcctgcctc

SEQ ID NO: 7133 - DNA, 20 bp, synthetic construct
  source 1..20: mol_type = other DNA
ctcaagtgatgctcctgcct

SEQ ID NO: 7134 - DNA, 20 bp, synthetic construct
  source 1..20: mol_type = other DNA
gctcaagtgatgctcctgcc

SEQ ID NO: 7135 - DNA, 20 bp, synthetic construct
  source 1..20: mol_type = other DNA
ggctcaagtgatgctcctgc

SEQ ID NO: 7136 - DNA, 20 bp, synthetic construct
  source 1..20: mol_type = other DNA
gggctcaagtgatgctcctg

SEQ ID NO: 7137 - DNA, 20 bp, synthetic construct
  source 1..20: mol_type = other DNA
tgggctcaagtgatgctcct

SEQ ID NO: 7138 - DNA, 20 bp, synthetic construct
  source 1..20: mol_type = other DNA
ctgggctcaagtgatgctcc

SEQ ID NO: 7139 - DNA, 20 bp, synthetic construct
  source 1..20: mol_type = other DNA
cctgggctcaagtgatgctc

SEQ ID NO: 7140 - DNA, 20 bp, synthetic construct
  source 1..20: mol_type = other DNA
tcctgggctcaagtgatgct

SEQ ID NO: 7141 - DNA, 20 bp, synthetic construct
  source 1..20: mol_type = other DNA
ctcctgggctcaagtgatgc

SEQ ID NO: 7142 - DNA, 20 bp, synthetic construct
  source 1..20: mol_type = other DNA
cctcctgggctcaagtgatg

SEQ ID NO: 7143 - DNA, 20 bp, synthetic construct
  source 1..20: mol_type = other DNA
gcctcctgggctcaagtgat

SEQ ID NO: 7144 - DNA, 20 bp, synthetic construct
  source 1..20: mol_type = other DNA
cgcctcctgggctcaagtga

SEQ ID NO: 7145 - DNA, 20 bp, synthetic construct
  source 1..20: mol_type = other DNA
ccgcctcctgggctcaagtg

SEQ ID NO: 7146 - DNA, 20 bp, synthetic construct
  source 1..20: mol_type = other DNA
tccgcctcctgggctcaagt

SEQ ID NO: 7147 - DNA, 20 bp, synthetic construct
  source 1..20: mol_type = other DNA
ctccgcctcctgggctcaag

SEQ ID NO: 7148 - DNA, 20 bp, synthetic construct
  source 1..20: mol_type = other DNA
cctccgcctcctgggctcaa

SEQ ID NO: 7149 - DNA, 20 bp, synthetic construct
  source 1..20: mol_type = other DNA
acctccgcctcctgggctca

SEQ ID NO: 7150 - DNA, 20 bp, synthetic construct
  source 1..20: mol_type = other DNA
aacctccgcctcctgggctc

SEQ ID NO: 7151 - DNA, 20 bp, synthetic construct
  source 1..20: mol_type = other DNA
caacctccgcctcctgggct

SEQ ID NO: 7152 - DNA, 20 bp, synthetic construct
  source 1..20: mol_type = other DNA
gcaacctccgcctcctgggc

SEQ ID NO: 7153 - DNA, 20 bp, synthetic construct
  source 1..20: mol_type = other DNA
tgcaacctccgcctcctggg

SEQ ID NO: 7154 - DNA, 20 bp, synthetic construct
  source 1..20: mol_type = other DNA
ctgcaacctccgcctcctgg

SEQ ID NO: 7155 - DNA, 20 bp, synthetic construct
  source 1..20: mol_type = other DNA
actgcaacctccgcctcctg

SEQ ID NO: 7156 - DNA, 20 bp, synthetic construct
  source 1..20: mol_type = other DNA
gactgcaacctccgcctcct

SEQ ID NO: 7157 - DNA, 20 bp, synthetic construct
  source 1..20: mol_type = other DNA
tgactgcaacctccgcctcc

SEQ ID NO: 7158 - DNA, 20 bp, synthetic construct
  source 1..20: mol_type = other DNA
ctgactgcaacctccgcctc

SEQ ID NO: 7159 - DNA, 20 bp, synthetic construct
  source 1..20: mol_type = other DNA
gctgactgcaacctccgcct

SEQ ID NO: 7160 - DNA, 20 bp, synthetic construct
  source 1..20: mol_type = other DNA
agctgactgcaacctccgcc

SEQ ID NO: 7161 - DNA, 20 bp, synthetic construct
  source 1..20: mol_type = other DNA
cagctgactgcaacctccgc

SEQ ID NO: 7162 - DNA, 20 bp, synthetic construct
  source 1..20: mol_type = other DNA
tcagctgactgcaacctccg

SEQ ID NO: 7163 - DNA, 20 bp, synthetic construct
  source 1..20: mol_type = other DNA
ctcagctgactgcaacctcc

SEQ ID NO: 7164 - DNA, 20 bp, synthetic construct
  source 1..20: mol_type = other DNA
tctcagctgactgcaacctc

SEQ ID NO: 7165 - DNA, 20 bp, synthetic construct
  source 1..20: mol_type = other DNA
atctcagctgactgcaacct

SEQ ID NO: 7166 - DNA, 20 bp, synthetic construct
  source 1..20: mol_type = other DNA
aatctcagctgactgcaacc

SEQ ID NO: 7167 - DNA, 20 bp, synthetic construct
  source 1..20: mol_type = other DNA
caatctcagctgactgcaac

SEQ ID NO: 7168 - DNA, 20 bp, synthetic construct
  source 1..20: mol_type = other DNA
acaatctcagctgactgcaa

SEQ ID NO: 7169 - DNA, 20 bp, synthetic construct
  source 1..20: mol_type = other DNA
cacaatctcagctgactgca

SEQ ID NO: 7170 - DNA, 20 bp, synthetic construct
  source 1..20: mol_type = other DNA
gcacaatctcagctgactgc

SEQ ID NO: 7171 - DNA, 20 bp, synthetic construct
  source 1..20: mol_type = other DNA
ggcacaatctcagctgactg

SEQ ID NO: 7172 - DNA, 20 bp, synthetic construct
  source 1..20: mol_type = other DNA
tggcacaatctcagctgact

SEQ ID NO: 7173 - DNA, 20 bp, synthetic construct
  source 1..20: mol_type = other DNA
gtggcacaatctcagctgac

SEQ ID NO: 7174 - DNA, 20 bp, synthetic construct
  source 1..20: mol_type = other DNA
agtggcacaatctcagctga

SEQ ID NO: 7175 - DNA, 20 bp, synthetic construct
  source 1..20: mol_type = other DNA
cagtggcacaatctcagctg

SEQ ID NO: 7176 - DNA, 20 bp, synthetic construct
  source 1..20: mol_type = other DNA
gcagtggcacaatctcagct

SEQ ID NO: 7177 - DNA, 20 bp, synthetic construct
  source 1..20: mol_type = other DNA
tgcagtggcacaatctcagc

SEQ ID NO: 7178 - DNA, 20 bp, synthetic construct
  source 1..20: mol_type = other DNA
gtgcagtggcacaatctcag

SEQ ID NO: 7179 - DNA, 20 bp, synthetic construct
  source 1..20: mol_type = other DNA
agtgcagtggcacaatctca

SEQ ID NO: 7180 - DNA, 20 bp, synthetic construct
  source 1..20: mol_type = other DNA
gagtgcagtggcacaatctc

SEQ ID NO: 7181 - DNA, 20 bp, synthetic construct
  source 1..20: mol_type = other DNA
ggagtgcagtggcacaatct

SEQ ID NO: 7182 - DNA, 20 bp, synthetic construct
  source 1..20: mol_type = other DNA
tggagtgcagtggcacaatc

SEQ ID NO: 7183 - DNA, 20 bp, synthetic construct
  source 1..20: mol_type = other DNA
ctggagtgcagtggcacaat

SEQ ID NO: 7184 - DNA, 20 bp, synthetic construct
  source 1..20: mol_type = other DNA
gctggagtgcagtggcacaa

SEQ ID NO: 7185 - DNA, 20 bp, synthetic construct
  source 1..20: mol_type = other DNA
ggctggagtgcagtggcaca

SEQ ID NO: 7186 - DNA, 20 bp, synthetic construct
  source 1..20: mol_type = other DNA
aggctggagtgcagtggcac

SEQ ID NO: 7187 - DNA, 20 bp, synthetic construct
  source 1..20: mol_type = other DNA
caggctggagtgcagtggca

SEQ ID NO: 7188 - DNA, 20 bp, synthetic construct
  source 1..20: mol_type = other DNA
ccaggctggagtgcagtggc

SEQ ID NO: 7189 - DNA, 20 bp, synthetic construct
  source 1..20: mol_type = other DNA
cccaggctggagtgcagtgg

SEQ ID NO: 7190 - DNA, 20 bp, synthetic construct
  source 1..20: mol_type = other DNA
tcccaggctggagtgcagtg

SEQ ID NO: 7191 - DNA, 20 bp, synthetic construct
  source 1..20: mol_type = other DNA
ctcccaggctggagtgcagt

SEQ ID NO: 7192 - DNA, 20 bp, synthetic construct
  source 1..20: mol_type = other DNA
tctcccaggctggagtgcag

SEQ ID NO: 7193 - DNA, 20 bp, synthetic construct
  source 1..20: mol_type = other DNA
gtctcccaggctggagtgca

SEQ ID NO: 7194 - DNA, 20 bp, synthetic construct
  source 1..20: mol_type = other DNA
tgtctcccaggctggagtgc

SEQ ID NO: 7195 - DNA, 20 bp, synthetic construct
  source 1..20: mol_type = other DNA
ctgtctcccaggctggagtg

SEQ ID NO: 7196 - DNA, 20 bp, synthetic construct
  source 1..20: mol_type = other DNA
tctgtctcccaggctggagt

SEQ ID NO: 7197 - DNA, 20 bp, synthetic construct
  source 1..20: mol_type = other DNA
ctctgtctcccaggctggag

SEQ ID NO: 7198 - DNA, 20 bp, synthetic construct
  source 1..20: mol_type = other DNA
actctgtctcccaggctgga

SEQ ID NO: 7199 - DNA, 20 bp, synthetic construct
  source 1..20: mol_type = other DNA
cactctgtctcccaggctgg

SEQ ID NO: 7200 - DNA, 20 bp, synthetic construct
  source 1..20: mol_type = other DNA
tcactctgtctcccaggctg

SEQ ID NO: 7201 - DNA, 20 bp, synthetic construct
  source 1..20: mol_type = other DNA
ctcactctgtctcccaggct

SEQ ID NO: 7202 - DNA, 20 bp, synthetic construct
  source 1..20: mol_type = other DNA
tctcactctgtctcccaggc

SEQ ID NO: 7203 - DNA, 20 bp, synthetic construct
  source 1..20: mol_type = other DNA
gtctcactctgtctcccagg

SEQ ID NO: 7204 - DNA, 20 bp, synthetic construct
  source 1..20: mol_type = other DNA
agtctcactctgtctcccag

SEQ ID NO: 7205 - DNA, 20 bp, synthetic construct
  source 1..20: mol_type = other DNA
gagtctcactctgtctccca

SEQ ID NO: 7206 - DNA, 20 bp, synthetic construct
  source 1..20: mol_type = other DNA
agagtctcactctgtctccc

SEQ ID NO: 7207 - DNA, 20 bp, synthetic construct
  source 1..20: mol_type = other DNA
tagagtctcactctgtctcc

SEQ ID NO: 7208 - DNA, 20 bp, synthetic construct
  source 1..20: mol_type = other DNA
atagagtctcactctgtctc

SEQ ID NO: 7209 - DNA, 20 bp, synthetic construct
  source 1..20: mol_type = other DNA
gatagagtctcactctgtct

SEQ ID NO: 7210 - DNA, 20 bp, synthetic construct
  source 1..20: mol_type = other DNA
agatagagtctcactctgtc

SEQ ID NO: 7211 - DNA, 20 bp, synthetic construct
  source 1..20: mol_type = other DNA
gagatagagtctcactctgt

SEQ ID NO: 7212 - DNA, 20 bp, synthetic construct
  source 1..20: mol_type = other DNA
tgagatagagtctcactctg

SEQ ID NO: 7213 - DNA, 20 bp, synthetic construct
  source 1..20: mol_type = other DNA
ttgagatagagtctcactct

SEQ ID NO: 7214 - DNA, 20 bp, synthetic construct
  source 1..20: mol_type = other DNA
tttgagatagagtctcactc

SEQ ID NO: 7215 - DNA, 20 bp, synthetic construct
  source 1..20: mol_type = other DNA
ttttgagatagagtctcact

SEQ ID NO: 7216 - DNA, 20 bp, synthetic construct
  source 1..20: mol_type = other DNA
tttttgagatagagtctcac

SEQ ID NO: 7217 - DNA, 20 bp, synthetic construct
  source 1..20: mol_type = other DNA
ttttttgagatagagtctca

SEQ ID NO: 7218 - DNA, 20 bp, synthetic construct
  source 1..20: mol_type = other DNA
tttttttgagatagagtctc

SEQ ID NO: 7219 - DNA, 20 bp, synthetic construct
  source 1..20: mol_type = other DNA
ttttttttgagatagagtct

SEQ ID NO: 7220 - DNA, 20 bp, synthetic construct
  source 1..20: mol_type = other DNA
tttttttttgagatagagtc

SEQ ID NO: 7221 - DNA, 20 bp, synthetic construct
  source 1..20: mol_type = other DNA
ttttttttttgagatagagt

SEQ ID NO: 7222 - DNA, 20 bp, synthetic construct
  source 1..20: mol_type = other DNA
tttttttttttgagatagag

SEQ ID NO: 7223 - DNA, 20 bp, synthetic construct
  source 1..20: mol_type = other DNA
ttttttttttttgagataga

SEQ ID NO: 7224 - DNA, 20 bp, synthetic construct
  source 1..20: mol_type = other DNA
tttttttttttttgagatag

SEQ ID NO: 7225 - DNA, 20 bp, synthetic construct
  source 1..20: mol_type = other DNA
ttttttttttttttgagata

SEQ ID NO: 7226 - DNA, 20 bp, synthetic construct
  source 1..20: mol_type = other DNA
attttttttttttttgagat

SEQ ID NO: 7227 - DNA, 20 bp, synthetic construct
  source 1..20: mol_type = other DNA
cattttttttttttttgaga

SEQ ID NO: 7228 - DNA, 20 bp, synthetic construct
  source 1..20: mol_type = other DNA
acattttttttttttttgag

SEQ ID NO: 7229 - DNA, 20 bp, synthetic construct
  source 1..20: mol_type = other DNA
cacattttttttttttttga

SEQ ID NO: 7230 - DNA, 20 bp, synthetic construct
  source 1..20: mol_type = other DNA
gcacattttttttttttttg

SEQ ID NO: 7231 - DNA, 20 bp, synthetic construct
  source 1..20: mol_type = other DNA
agcacatttttttttttttt

SEQ ID NO: 7232 - DNA, 20 bp, synthetic construct
  source 1..20: mol_type = other DNA
cagcacattttttttttttt

SEQ ID NO: 7233 - DNA, 20 bp, synthetic construct
  source 1..20: mol_type = other DNA
acagcacatttttttttttt

SEQ ID NO: 7234 - DNA, 20 bp, synthetic construct
  source 1..20: mol_type = other DNA
cacagcacattttttttttt

SEQ ID NO: 7235 - DNA, 20 bp, synthetic construct
  source 1..20: mol_type = other DNA
tcacagcacatttttttttt

SEQ ID NO: 7236 - DNA, 20 bp, synthetic construct
  source 1..20: mol_type = other DNA
atcacagcacattttttttt

SEQ ID NO: 7237 - DNA, 20 bp, synthetic construct
  source 1..20: mol_type = other DNA
aatcacagcacatttttttt

SEQ ID NO: 7238 - DNA, 20 bp, synthetic construct
  source 1..20: mol_type = other DNA
aaatcacagcacattttttt

SEQ ID NO: 7239 - DNA, 20 bp, synthetic construct
  source 1..20: mol_type = other DNA
taaatcacagcacatttttt

SEQ ID NO: 7240 - DNA, 20 bp, synthetic construct
  source 1..20: mol_type = other DNA
ttaaatcacagcacattttt

SEQ ID NO: 7241 - DNA, 20 bp, synthetic construct
  source 1..20: mol_type = other DNA
attaaatcacagcacatttt

SEQ ID NO: 7242 - DNA, 20 bp, synthetic construct
  source 1..20: mol_type = other DNA
cattaaatcacagcacattt

SEQ ID NO: 7243 - DNA, 20 bp, synthetic construct
  source 1..20: mol_type = other DNA
acattaaatcacagcacatt

SEQ ID NO: 7244 - DNA, 20 bp, synthetic construct
  source 1..20: mol_type = other DNA
tacattaaatcacagcacat

SEQ ID NO: 7245 - DNA, 20 bp, synthetic construct
  source 1..20: mol_type = other DNA
ctacattaaatcacagcaca

SEQ ID NO: 7246 - DNA, 20 bp, synthetic construct
  source 1..20: mol_type = other DNA
actacattaaatcacagcac

SEQ ID NO: 7247 - DNA, 20 bp, synthetic construct
  source 1..20: mol_type = other DNA
aactacattaaatcacagca

SEQ ID NO: 7248 - DNA, 20 bp, synthetic construct
  source 1..20: mol_type = other DNA
caactacattaaatcacagc

SEQ ID NO: 7249 - DNA, 20 bp, synthetic construct
  source 1..20: mol_type = other DNA
acaactacattaaatcacag

SEQ ID NO: 7250 - DNA, 20 bp, synthetic construct
  source 1..20: mol_type = other DNA
aacaactacattaaatcaca

SEQ ID NO: 7251 - DNA, 20 bp, synthetic construct
  source 1..20: mol_type = other DNA
gaacaactacattaaatcac

SEQ ID NO: 7252 - DNA, 20 bp, synthetic construct
  source 1..20: mol_type = other DNA
tgaacaactacattaaatca

SEQ ID NO: 7253 - DNA, 20 bp, synthetic construct
  source 1..20: mol_type = other DNA
atgaacaactacattaaatc

SEQ ID NO: 7254 - DNA, 20 bp, synthetic construct
  source 1..20: mol_type = other DNA
gatgaacaactacattaaat

SEQ ID NO: 7255 - DNA, 20 bp, synthetic construct
  source 1..20: mol_type = other DNA
tgatgaacaactacattaaa

SEQ ID NO: 7256 - DNA, 20 bp, synthetic construct
  source 1..20: mol_type = other DNA
atgatgaacaactacattaa

SEQ ID NO: 7257 - DNA, 20 bp, synthetic construct
  source 1..20: mol_type = other DNA
catgatgaacaactacatta

SEQ ID NO: 7258 - DNA, 20 bp, synthetic construct
  source 1..20: mol_type = other DNA
gcatgatgaacaactacatt

SEQ ID NO: 7259 - DNA, 20 bp, synthetic construct
  source 1..20: mol_type = other DNA
agcatgatgaacaactacat

SEQ ID NO: 7260 - DNA, 20 bp, synthetic construct
  source 1..20: mol_type = other DNA
aagcatgatgaacaactaca

SEQ ID NO: 7261 - DNA, 20 bp, synthetic construct
  source 1..20: mol_type = other DNA
gaagcatgatgaacaactac

SEQ ID NO: 7262 - DNA, 20 bp, synthetic construct
  source 1..20: mol_type = other DNA
ggaagcatgatgaacaacta

SEQ ID NO: 7263 - DNA, 20 bp, synthetic construct
  source 1..20: mol_type = other DNA
tggaagcatgatgaacaact

SEQ ID NO: 7264 - DNA, 20 bp, synthetic construct
  source 1..20: mol_type = other DNA
atggaagcatgatgaacaac

SEQ ID NO: 7265 - DNA, 20 bp, synthetic construct
  source 1..20: mol_type = other DNA
aatggaagcatgatgaacaa

SEQ ID NO: 7266 - DNA, 20 bp, synthetic construct
  source 1..20: mol_type = other DNA
aaatggaagcatgatgaaca

SEQ ID NO: 7267 - DNA, 20 bp, synthetic construct
  source 1..20: mol_type = other DNA
taaatggaagcatgatgaac

SEQ ID NO: 7268 - DNA, 20 bp, synthetic construct
  source 1..20: mol_type = other DNA
ttaaatggaagcatgatgaa

SEQ ID NO: 7269 - DNA, 20 bp, synthetic construct
  source 1..20: mol_type = other DNA
tttaaatggaagcatgatga

SEQ ID NO: 7270 - DNA, 20 bp, synthetic construct
  source 1..20: mol_type = other DNA
atttaaatggaagcatgatg

SEQ ID NO: 7271 - DNA, 20 bp, synthetic construct
  source 1..20: mol_type = other DNA
aatttaaatggaagcatgat

SEQ ID NO: 7272 - DNA, 20 bp, synthetic construct
  source 1..20: mol_type = other DNA
aaatttaaatggaagcatga

SEQ ID NO: 7273 - DNA, 20 bp, synthetic construct
  source 1..20: mol_type = other DNA
gaaatttaaatggaagcatg

SEQ ID NO: 7274 - DNA, 20 bp, synthetic construct
  source 1..20: mol_type = other DNA
tgaaatttaaatggaagcat

SEQ ID NO: 7275 - DNA, 20 bp, synthetic construct
  source 1..20: mol_type = other DNA
ctgaaatttaaatggaagca

SEQ ID NO: 7276 - DNA, 20 bp, synthetic construct
  source 1..20: mol_type = other DNA
actgaaatttaaatggaagc

SEQ ID NO: 7277 - DNA, 20 bp, synthetic construct
  source 1..20: mol_type = other DNA
cactgaaatttaaatggaag

SEQ ID NO: 7278 - DNA, 20 bp, synthetic construct
  source 1..20: mol_type = other DNA
tcactgaaatttaaatggaa

SEQ ID NO: 7279 - DNA, 20 bp, synthetic construct
  source 1..20: mol_type = other DNA
ctcactgaaatttaaatgga

SEQ ID NO: 7280 - DNA, 20 bp, synthetic construct
  source 1..20: mol_type = other DNA
tctcactgaaatttaaatgg

SEQ ID NO: 7281 - DNA, 20 bp, synthetic construct
  source 1..20: mol_type = other DNA
gtctcactgaaatttaaatg

SEQ ID NO: 7282 - DNA, 20 bp, synthetic construct
  source 1..20: mol_type = other DNA
agtctcactgaaatttaaat

SEQ ID NO: 7283 - DNA, 20 bp, synthetic construct
  source 1..20: mol_type = other DNA
cagtctcactgaaatttaaa

SEQ ID NO: 7284 - DNA, 20 bp, synthetic construct
  source 1..20: mol_type = other DNA
acagtctcactgaaatttaa

SEQ ID NO: 7285 - DNA, 20 bp, synthetic construct
  source 1..20: mol_type = other DNA
aacagtctcactgaaattta

SEQ ID NO: 7286 - DNA, 20 bp, synthetic construct
  source 1..20: mol_type = other DNA
gaacagtctcactgaaattt

SEQ ID NO: 7287 - DNA, 20 bp, synthetic construct
  source 1..20: mol_type = other DNA
tgaacagtctcactgaaatt

SEQ ID NO: 7288 - DNA, 20 bp, synthetic construct
  source 1..20: mol_type = other DNA
atgaacagtctcactgaaat

SEQ ID NO: 7289 - DNA, 20 bp, synthetic construct
  source 1..20: mol_type = other DNA
gatgaacagtctcactgaaa

SEQ ID NO: 7290 - DNA, 20 bp, synthetic construct
  source 1..20: mol_type = other DNA
agatgaacagtctcactgaa

SEQ ID NO: 7291 - DNA, 20 bp, synthetic construct
  source 1..20: mol_type = other DNA
aagatgaacagtctcactga

SEQ ID NO: 7292 - DNA, 20 bp, synthetic construct
  source 1..20: mol_type = other DNA
aaagatgaacagtctcactg

SEQ ID NO: 7293 - DNA, 20 bp, synthetic construct
  source 1..20: mol_type = other DNA
aaaagatgaacagtctcact

SEQ ID NO: 7294 - DNA, 20 bp, synthetic construct
  source 1..20: mol_type = other DNA
caaaagatgaacagtctcac

SEQ ID NO: 7295 - DNA, 20 bp, synthetic construct
  source 1..20: mol_type = other DNA
gcaaaagatgaacagtctca

SEQ ID NO: 7296 - DNA, 20 bp, synthetic construct
  source 1..20: mol_type = other DNA
tgcaaaagatgaacagtctc

SEQ ID NO: 7297 - DNA, 20 bp, synthetic construct
  source 1..20: mol_type = other DNA
ctgcaaaagatgaacagtct

SEQ ID NO: 7298 - DNA, 20 bp, synthetic construct
  source 1..20: mol_type = other DNA
actgcaaaagatgaacagtc

SEQ ID NO: 7299 - DNA, 20 bp, synthetic construct
  source 1..20: mol_type = other DNA
aactgcaaaagatgaacagt

SEQ ID NO: 7300 - DNA, 20 bp, synthetic construct
  source 1..20: mol_type = other DNA
taactgcaaaagatgaacag

SEQ ID NO: 7301 - DNA, 20 bp, synthetic construct
  source 1..20: mol_type = other DNA
ttaactgcaaaagatgaaca

SEQ ID NO: 7302 - DNA, 20 bp, synthetic construct
  source 1..20: mol_type = other DNA
tttaactgcaaaagatgaac

SEQ ID NO: 7303 - DNA, 20 bp, synthetic construct
  source 1..20: mol_type = other DNA
atttaactgcaaaagatgaa

SEQ ID NO: 7304 - DNA, 20 bp, synthetic construct
  source 1..20: mol_type = other DNA
tatttaactgcaaaagatga

SEQ ID NO: 7305 - DNA, 20 bp, synthetic construct
  source 1..20: mol_type = other DNA
atatttaactgcaaaagatg

SEQ ID NO: 7306 - DNA, 20 bp, synthetic construct
  source 1..20: mol_type = other DNA
gatatttaactgcaaaagat

SEQ ID NO: 7307 - DNA, 20 bp, synthetic construct
  source 1..20: mol_type = other DNA
agatatttaactgcaaaaga

SEQ ID NO: 7308 - DNA, 20 bp, synthetic construct
  source 1..20: mol_type = other DNA
aagatatttaactgcaaaag

SEQ ID NO: 7309 - DNA, 20 bp, synthetic construct
  source 1..20: mol_type = other DNA
caagatatttaactgcaaaa

SEQ ID NO: 7310 - DNA, 20 bp, synthetic construct
  source 1..20: mol_type = other DNA
acaagatatttaactgcaaa

SEQ ID NO: 7311 - DNA, 20 bp, synthetic construct
  source 1..20: mol_type = other DNA
tacaagatatttaactgcaa

SEQ ID NO: 7312 - DNA, 20 bp, synthetic construct
  source 1..20: mol_type = other DNA
ctacaagatatttaactgca

SEQ ID NO: 7313 - DNA, 20 bp, synthetic construct
  source 1..20: mol_type = other DNA
tctacaagatatttaactgc

SEQ ID NO: 7314 - DNA, 20 bp, synthetic construct
  source 1..20: mol_type = other DNA
ttctacaagatatttaactg

SEQ ID NO: 7315 - DNA, 20 bp, synthetic construct
  source 1..20: mol_type = other DNA
cttctacaagatatttaact

SEQ ID NO: 7316 - DNA, 20 bp, synthetic construct
  source 1..20: mol_type = other DNA
ccttctacaagatatttaac

SEQ ID NO: 7317 - DNA, 20 bp, synthetic construct
  source 1..20: mol_type = other DNA
cccttctacaagatatttaa

SEQ ID NO: 7318 - DNA, 20 bp, synthetic construct
  source 1..20: mol_type = other DNA
gcccttctacaagatattta

SEQ ID NO: 7319 - DNA, 20 bp, synthetic construct
  source 1..20: mol_type = other DNA
ggcccttctacaagatattt

SEQ ID NO: 7320 - DNA, 20 bp, synthetic construct
  source 1..20: mol_type = other DNA
aggcccttctacaagatatt

SEQ ID NO: 7321 - DNA, 20 bp, synthetic construct
  source 1..20: mol_type = other DNA
taggcccttctacaagatat

SEQ ID NO: 7322 - DNA, 20 bp, synthetic construct
  source 1..20: mol_type = other DNA
ttaggcccttctacaagata

SEQ ID NO: 7323 - DNA, 20 bp, synthetic construct
  source 1..20: mol_type = other DNA
tttaggcccttctacaagat

SEQ ID NO: 7324 - DNA, 20 bp, synthetic construct
  source 1..20: mol_type = other DNA
ttttaggcccttctacaaga

SEQ ID NO: 7325 - DNA, 20 bp, synthetic construct
  source 1..20: mol_type = other DNA
attttaggcccttctacaag

SEQ ID NO: 7326 - DNA, 20 bp, synthetic construct
  source 1..20: mol_type = other DNA
tattttaggcccttctacaa

SEQ ID NO: 7327 - DNA, 20 bp, synthetic construct
  source 1..20: mol_type = other DNA
atattttaggcccttctaca

SEQ ID NO: 7328 - DNA, 20 bp, synthetic construct
  source 1..20: mol_type = other DNA
gatattttaggcccttctac

SEQ ID NO: 7329 - DNA, 20 bp, synthetic construct
  source 1..20: mol_type = other DNA
agatattttaggcccttcta

SEQ ID NO: 7330 - DNA, 20 bp, synthetic construct
  source 1..20: mol_type = other DNA
tagatattttaggcccttct

SEQ ID NO: 7331 - DNA, 20 bp, synthetic construct
  source 1..20: mol_type = other DNA
gtagatattttaggcccttc

SEQ ID NO: 7332 - DNA, 20 bp, synthetic construct
  source 1..20: mol_type = other DNA
cgtagatattttaggccctt

SEQ ID NO: 7333 - DNA, 20 bp, synthetic construct
  source 1..20: mol_type = other DNA
acgtagatattttaggccct

SEQ ID NO: 7334 - DNA, 20 bp, synthetic construct
  source 1..20: mol_type = other DNA
aacgtagatattttaggccc

SEQ ID NO: 7335 - DNA, 20 bp, synthetic construct
  source 1..20: mol_type = other DNA
caacgtagatattttaggcc

SEQ ID NO: 7336 - DNA, 20 bp, synthetic construct
  source 1..20: mol_type = other DNA
tcaacgtagatattttaggc

SEQ ID NO: 7337 - DNA, 20 bp, synthetic construct
  source 1..20: mol_type = other DNA
ttcaacgtagatattttagg

SEQ ID NO: 7338 - DNA, 20 bp, synthetic construct
  source 1..20: mol_type = other DNA
attcaacgtagatattttag

SEQ ID NO: 7339 - DNA, 20 bp, synthetic construct
  source 1..20: mol_type = other DNA
tattcaacgtagatatttta

SEQ ID NO: 7340 - DNA, 20 bp, synthetic construct
  source 1..20: mol_type = other DNA
gtattcaacgtagatatttt

SEQ ID NO: 7341 - DNA, 20 bp, synthetic construct
  source 1..20: mol_type = other DNA
tgtattcaacgtagatattt

SEQ ID NO: 7342 - DNA, 20 bp, synthetic construct
  source 1..20: mol_type = other DNA
ctgtattcaacgtagatatt

SEQ ID NO: 7343 - DNA, 20 bp, synthetic construct
  source 1..20: mol_type = other DNA
gctgtattcaacgtagatat

SEQ ID NO: 7344 - DNA, 20 bp, synthetic construct
  source 1..20: mol_type = other DNA
agctgtattcaacgtagata

SEQ ID NO: 7345 - DNA, 20 bp, synthetic construct
  source 1..20: mol_type = other DNA
aagctgtattcaacgtagat

SEQ ID NO: 7346 - DNA, 20 bp, synthetic construct
  source 1..20: mol_type = other DNA
aaagctgtattcaacgtaga

SEQ ID NO: 7347 - DNA, 20 bp, synthetic construct
  source 1..20: mol_type = other DNA
taaagctgtattcaacgtag

SEQ ID NO: 7348 - DNA, 20 bp, synthetic construct
  source 1..20: mol_type = other DNA
ataaagctgtattcaacgta

SEQ ID NO: 7349 - DNA, 20 bp, synthetic construct
  source 1..20: mol_type = other DNA
aataaagctgtattcaacgt

SEQ ID NO: 7350 - DNA, 20 bp, synthetic construct
  source 1..20: mol_type = other DNA
caataaagctgtattcaacg

SEQ ID NO: 7351 - DNA, 20 bp, synthetic construct
  source 1..20: mol_type = other DNA
tcaataaagctgtattcaac

SEQ ID NO: 7352 - DNA, 20 bp, synthetic construct
  source 1..20: mol_type = other DNA
ttcaataaagctgtattcaa

SEQ ID NO: 7353 - DNA, 20 bp, synthetic construct
  source 1..20: mol_type = other DNA
cttcaataaagctgtattca

SEQ ID NO: 7354 - DNA, 20 bp, synthetic construct
  source 1..20: mol_type = other DNA
gcttcaataaagctgtattc

SEQ ID NO: 7355 - DNA, 20 bp, synthetic construct
  source 1..20: mol_type = other DNA
tgcttcaataaagctgtatt

SEQ ID NO: 7356 - DNA, 20 bp, synthetic construct
  source 1..20: mol_type = other DNA
atgcttcaataaagctgtat

SEQ ID NO: 7357 - DNA, 20 bp, synthetic construct
  source 1..20: mol_type = other DNA
gatgcttcaataaagctgta

SEQ ID NO: 7358 - DNA, 20 bp, synthetic construct
  source 1..20: mol_type = other DNA
agatgcttcaataaagctgt

SEQ ID NO: 7359 - DNA, 20 bp, synthetic construct
  source 1..20: mol_type = other DNA
tagatgcttcaataaagctg

SEQ ID NO: 7360 - DNA, 20 bp, synthetic construct
  source 1..20: mol_type = other DNA
atagatgcttcaataaagct

SEQ ID NO: 7361 - DNA, 20 bp, synthetic construct
  source 1..20: mol_type = other DNA
catagatgcttcaataaagc

SEQ ID NO: 7362 - DNA, 20 bp, synthetic construct
  source 1..20: mol_type = other DNA
acatagatgcttcaataaag

SEQ ID NO: 7363 - DNA, 20 bp, synthetic construct
  source 1..20: mol_type = other DNA
tacatagatgcttcaataaa

SEQ ID NO: 7364 - DNA, 20 bp, synthetic construct
  source 1..20: mol_type = other DNA
gtacatagatgcttcaataa

SEQ ID NO: 7365 - DNA, 20 bp, synthetic construct
  source 1..20: mol_type = other DNA
tgtacatagatgcttcaata

SEQ ID NO: 7366 - DNA, 20 bp, synthetic construct
  source 1..20: mol_type = other DNA
atgtacatagatgcttcaat

SEQ ID NO: 7367 - DNA, 20 bp, synthetic construct
  source 1..20: mol_type = other DNA
catgtacatagatgcttcaa

SEQ ID NO: 7368 - DNA, 20 bp, synthetic construct
  source 1..20: mol_type = other DNA
ccatgtacatagatgcttca

SEQ ID NO: 7369 - DNA, 20 bp, synthetic construct
  source 1..20: mol_type = other DNA
cccatgtacatagatgcttc

SEQ ID NO: 7370 - DNA, 20 bp, synthetic construct
  source 1..20: mol_type = other DNA
ccccatgtacatagatgctt

SEQ ID NO: 7371 - DNA, 20 bp, synthetic construct
  source 1..20: mol_type = other DNA
accccatgtacatagatgct

SEQ ID NO: 7372 - DNA, 20 bp, synthetic construct
  source 1..20: mol_type = other DNA
aaccccatgtacatagatgc

SEQ ID NO: 7373 - DNA, 20 bp, synthetic construct
  source 1..20: mol_type = other DNA
aaaccccatgtacatagatg

SEQ ID NO: 7374 - DNA, 20 bp, synthetic construct
  source 1..20: mol_type = other DNA
aaaaccccatgtacatagat

SEQ ID NO: 7375 - DNA, 20 bp, synthetic construct
  source 1..20: mol_type = other DNA
aaaaaccccatgtacataga

SEQ ID NO: 7376 - DNA, 20 bp, synthetic construct
  source 1..20: mol_type = other DNA
caaaaaccccatgtacatag

SEQ ID NO: 7377 - DNA, 20 bp, synthetic construct
  source 1..20: mol_type = other DNA
ccaaaaaccccatgtacata

SEQ ID NO: 7378 - DNA, 20 bp, synthetic construct
  source 1..20: mol_type = other DNA
cccaaaaaccccatgtacat

SEQ ID NO: 7379 - DNA, 20 bp, synthetic construct
  source 1..20: mol_type = other DNA
tcccaaaaaccccatgtaca

SEQ ID NO: 7380 - DNA, 20 bp, synthetic construct
  source 1..20: mol_type = other DNA
atcccaaaaaccccatgtac

SEQ ID NO: 7381 - DNA, 20 bp, synthetic construct
  source 1..20: mol_type = other DNA
catcccaaaaaccccatgta

SEQ ID NO: 7382 - DNA, 20 bp, synthetic construct
  source 1..20: mol_type = other DNA
tcatcccaaaaaccccatgt

SEQ ID NO: 7383 - DNA, 20 bp, synthetic construct
  source 1..20: mol_type = other DNA
ttcatcccaaaaaccccatg

SEQ ID NO: 7384 - DNA, 20 bp, synthetic construct
  source 1..20: mol_type = other DNA
attcatcccaaaaaccccat

SEQ ID NO: 7385 - DNA, 20 bp, synthetic construct
  source 1..20: mol_type = other DNA
gattcatcccaaaaacccca

SEQ ID NO: 7386 - DNA, 20 bp, synthetic construct
  source 1..20: mol_type = other DNA
tgattcatcccaaaaacccc

SEQ ID NO: 7387 - DNA, 20 bp, synthetic construct
  source 1..20: mol_type = other DNA
ctgattcatcccaaaaaccc

SEQ ID NO: 7388 - DNA, 20 bp, synthetic construct
  source 1..20: mol_type = other DNA
actgattcatcccaaaaacc

SEQ ID NO: 7389 - DNA, 20 bp, synthetic construct
  source 1..20: mol_type = other DNA
cactgattcatcccaaaaac

SEQ ID NO: 7390 - DNA, 20 bp, synthetic construct
  source 1..20: mol_type = other DNA
tcactgattcatcccaaaaa

SEQ ID NO: 7391 - DNA, 20 bp, synthetic construct
  source 1..20: mol_type = other DNA
ttcactgattcatcccaaaa

SEQ ID NO: 7392 - DNA, 20 bp, synthetic construct
  source 1..20: mol_type = other DNA
attcactgattcatcccaaa

SEQ ID NO: 7393 - DNA, 20 bp, synthetic construct
  source 1..20: mol_type = other DNA
tattcactgattcatcccaa

SEQ ID NO: 7394 - DNA, 20 bp, synthetic construct
  source 1..20: mol_type = other DNA
ttattcactgattcatccca

SEQ ID NO: 7395 - DNA, 20 bp, synthetic construct
  source 1..20: mol_type = other DNA
tttattcactgattcatccc

SEQ ID NO: 7396 - DNA, 20 bp, synthetic construct
  source 1..20: mol_type = other DNA
ctttattcactgattcatcc

SEQ ID NO: 7397 - DNA, 20 bp, synthetic construct
  source 1..20: mol_type = other DNA
gctttattcactgattcatc

SEQ ID NO: 7398 - DNA, 20 bp, synthetic construct
  source 1..20: mol_type = other DNA
tgctttattcactgattcat

SEQ ID NO: 7399 - DNA, 20 bp, synthetic construct
  source 1..20: mol_type = other DNA
ttgctttattcactgattca

SEQ ID NO: 7400 - DNA, 20 bp, synthetic construct
  source 1..20: mol_type = other DNA
tttgctttattcactgattc

SEQ ID NO: 7401 - DNA, 20 bp, synthetic construct
  source 1..20: mol_type = other DNA
gtttgctttattcactgatt

SEQ ID NO: 7402 - DNA, 20 bp, synthetic construct
  source 1..20: mol_type = other DNA
tgtttgctttattcactgat

SEQ ID NO: 7403 - DNA, 20 bp, synthetic construct
  source 1..20: mol_type = other DNA
atgtttgctttattcactga

SEQ ID NO: 7404 - DNA, 20 bp, synthetic construct
  source 1..20: mol_type = other DNA
tatgtttgctttattcactg

SEQ ID NO: 7405 - DNA, 20 bp, synthetic construct
  source 1..20: mol_type = other DNA
atatgtttgctttattcact

SEQ ID NO: 7406 - DNA, 20 bp, synthetic construct
  source 1..20: mol_type = other DNA
aatatgtttgctttattcac

SEQ ID NO: 7407 - DNA, 20 bp, synthetic construct
  source 1..20: mol_type = other DNA
caatatgtttgctttattca

SEQ ID NO: 7408 - DNA, 20 bp, synthetic construct
  source 1..20: mol_type = other DNA
acaatatgtttgctttattc

SEQ ID NO: 7409 - DNA, 20 bp, synthetic construct
  source 1..20: mol_type = other DNA
gacaatatgtttgctttatt

SEQ ID NO: 7410 - DNA, 20 bp, synthetic construct
  source 1..20: mol_type = other DNA
ggacaatatgtttgctttat

SEQ ID NO: 7411 - DNA, 20 bp, synthetic construct
  source 1..20: mol_type = other DNA
aggacaatatgtttgcttta

SEQ ID NO: 7412 - DNA, 20 bp, synthetic construct
  source 1..20: mol_type = other DNA
aaggacaatatgtttgcttt

SEQ ID NO: 7413 - DNA, 20 bp, synthetic construct
  source 1..20: mol_type = other DNA
aaaggacaatatgtttgctt

SEQ ID NO: 7414 - DNA, 20 bp, synthetic construct
  source 1..20: mol_type = other DNA
aaaaggacaatatgtttgct

SEQ ID NO: 7415 - DNA, 20 bp, synthetic construct
  source 1..20: mol_type = other DNA
caaaaggacaatatgtttgc

SEQ ID NO: 7416 - DNA, 20 bp, synthetic construct
  source 1..20: mol_type = other DNA
ccaaaaggacaatatgtttg

SEQ ID NO: 7417 - DNA, 20 bp, synthetic construct
  source 1..20: mol_type = other DNA
tccaaaaggacaatatgttt

SEQ ID NO: 7418 - DNA, 20 bp, synthetic construct
  source 1..20: mol_type = other DNA
ctccaaaaggacaatatgtt

SEQ ID NO: 7419 - DNA, 20 bp, synthetic construct
  source 1..20: mol_type = other DNA
actccaaaaggacaatatgt

SEQ ID NO: 7420 - DNA, 20 bp, synthetic construct
  source 1..20: mol_type = other DNA
aactccaaaaggacaatatg

SEQ ID NO: 7421 - DNA, 20 bp, synthetic construct
  source 1..20: mol_type = other DNA
aaactccaaaaggacaatat

SEQ ID NO: 7422 - DNA, 20 bp, synthetic construct
  source 1..20: mol_type = other DNA
taaactccaaaaggacaata

SEQ ID NO: 7423 - DNA, 20 bp, synthetic construct
  source 1..20: mol_type = other DNA
gtaaactccaaaaggacaat

SEQ ID NO: 7424 - DNA, 20 bp, synthetic construct
  source 1..20: mol_type = other DNA
tgtaaactccaaaaggacaa

SEQ ID NO: 7425 - DNA, 20 bp, synthetic construct
  source 1..20: mol_type = other DNA
atgtaaactccaaaaggaca

SEQ ID NO: 7426 - DNA, 20 bp, synthetic construct
  source 1..20: mol_type = other DNA
aatgtaaactccaaaaggac

SEQ ID NO: 7427 - DNA, 20 bp, synthetic construct
  source 1..20: mol_type = other DNA
gaatgtaaactccaaaagga

SEQ ID NO: 7428 - DNA, 20 bp, synthetic construct
  source 1..20: mol_type = other DNA
agaatgtaaactccaaaagg

SEQ ID NO: 7429 - DNA, 20 bp, synthetic construct
  source 1..20: mol_type = other DNA
tagaatgtaaactccaaaag

SEQ ID NO: 7430 - DNA, 20 bp, synthetic construct
  source 1..20: mol_type = other DNA
ttagaatgtaaactccaaaa

SEQ ID NO: 7431 - DNA, 20 bp, synthetic construct
  source 1..20: mol_type = other DNA
attagaatgtaaactccaaa

SEQ ID NO: 7432 - DNA, 20 bp, synthetic construct
  source 1..20: mol_type = other DNA
cattagaatgtaaactccaa

SEQ ID NO: 7433 - DNA, 20 bp, synthetic construct
  source 1..20: mol_type = other DNA
acattagaatgtaaactcca

SEQ ID NO: 7434 - DNA, 20 bp, synthetic construct
  source 1..20: mol_type = other DNA
cacattagaatgtaaactcc

SEQ ID NO: 7435 - DNA, 20 bp, synthetic construct
  source 1..20: mol_type = other DNA
tcacattagaatgtaaactc

SEQ ID NO: 7436 - DNA, 20 bp, synthetic construct
  source 1..20: mol_type = other DNA
gtcacattagaatgtaaact

SEQ ID NO: 7437 - DNA, 20 bp, synthetic construct
  source 1..20: mol_type = other DNA
agtcacattagaatgtaaac

SEQ ID NO: 7438 - DNA, 20 bp, synthetic construct
  source 1..20: mol_type = other DNA
tagtcacattagaatgtaaa

SEQ ID NO: 7439 - DNA, 20 bp, synthetic construct
  source 1..20: mol_type = other DNA
ctagtcacattagaatgtaa

SEQ ID NO: 7440 - DNA, 20 bp, synthetic construct
  source 1..20: mol_type = other DNA
cctagtcacattagaatgta

SEQ ID NO: 7441 - DNA, 20 bp, synthetic construct
  source 1..20: mol_type = other DNA
gcctagtcacattagaatgt

SEQ ID NO: 7442 - DNA, 20 bp, synthetic construct
  source 1..20: mol_type = other DNA
tgcctagtcacattagaatg

SEQ ID NO: 7443 - DNA, 20 bp, synthetic construct
  source 1..20: mol_type = other DNA
ctgcctagtcacattagaat

SEQ ID NO: 7444 - DNA, 20 bp, synthetic construct
  source 1..20: mol_type = other DNA
tctgcctagtcacattagaa

SEQ ID NO: 7445 - DNA, 20 bp, synthetic construct
  source 1..20: mol_type = other DNA
gtctgcctagtcacattaga

SEQ ID NO: 7446 - DNA, 20 bp, synthetic construct
  source 1..20: mol_type = other DNA
tgtctgcctagtcacattag

SEQ ID NO: 7447 - DNA, 20 bp, synthetic construct
  source 1..20: mol_type = other DNA
ttgtctgcctagtcacatta

SEQ ID NO: 7448 - DNA, 20 bp, synthetic construct
  source 1..20: mol_type = other DNA
attgtctgcctagtcacatt

SEQ ID NO: 7449 - DNA, 20 bp, synthetic construct
  source 1..20: mol_type = other DNA
cattgtctgcctagtcacat

SEQ ID NO: 7450 - DNA, 20 bp, synthetic construct
  source 1..20: mol_type = other DNA
tcattgtctgcctagtcaca

SEQ ID NO: 7451 - DNA, 20 bp, synthetic construct
  source 1..20: mol_type = other DNA
ctcattgtctgcctagtcac

SEQ ID NO: 7452 - DNA, 20 bp, synthetic construct
  source 1..20: mol_type = other DNA
tctcattgtctgcctagtca

SEQ ID NO: 7453 - DNA, 20 bp, synthetic construct
  source 1..20: mol_type = other DNA
gtctcattgtctgcctagtc

SEQ ID NO: 7454 - DNA, 20 bp, synthetic construct
  source 1..20: mol_type = other DNA
tgtctcattgtctgcctagt

SEQ ID NO: 7455 - DNA, 20 bp, synthetic construct
  source 1..20: mol_type = other DNA
atgtctcattgtctgcctag

SEQ ID NO: 7456 - DNA, 20 bp, synthetic construct
  source 1..20: mol_type = other DNA
aatgtctcattgtctgccta

SEQ ID NO: 7457 - DNA, 20 bp, synthetic construct
  source 1..20: mol_type = other DNA
taatgtctcattgtctgcct

SEQ ID NO: 7458 - DNA, 20 bp, synthetic construct
  source 1..20: mol_type = other DNA
ttaatgtctcattgtctgcc

SEQ ID NO: 7459 - DNA, 20 bp, synthetic construct
  source 1..20: mol_type = other DNA
tttaatgtctcattgtctgc

SEQ ID NO: 7460 - DNA, 20 bp, synthetic construct
  source 1..20: mol_type = other DNA
atttaatgtctcattgtctg

SEQ ID NO: 7461 - DNA, 20 bp, synthetic construct
  source 1..20: mol_type = other DNA
aatttaatgtctcattgtct

SEQ ID NO: 7462 - DNA, 20 bp, synthetic construct
  source 1..20: mol_type = other DNA
taatttaatgtctcattgtc

SEQ ID NO: 7463 - DNA, 20 bp, synthetic construct
  source 1..20: mol_type = other DNA
gtaatttaatgtctcattgt

SEQ ID NO: 7464 - DNA, 20 bp, synthetic construct
  source 1..20: mol_type = other DNA
ggtaatttaatgtctcattg

SEQ ID NO: 7465 - DNA, 20 bp, synthetic construct
  source 1..20: mol_type = other DNA
tggtaatttaatgtctcatt

SEQ ID NO: 7466 - DNA, 20 bp, synthetic construct
  source 1..20: mol_type = other DNA
ctggtaatttaatgtctcat

SEQ ID NO: 7467 - DNA, 20 bp, synthetic construct
  source 1..20: mol_type = other DNA
gctggtaatttaatgtctca

SEQ ID NO: 7468 - DNA, 20 bp, synthetic construct
  source 1..20: mol_type = other DNA
ggctggtaatttaatgtctc

SEQ ID NO: 7469 - DNA, 20 bp, synthetic construct
  source 1..20: mol_type = other DNA
aggctggtaatttaatgtct

SEQ ID NO: 7470 - DNA, 20 bp, synthetic construct
  source 1..20: mol_type = other DNA
taggctggtaatttaatgtc

SEQ ID NO: 7471 - DNA, 20 bp, synthetic construct
  source 1..20: mol_type = other DNA
ataggctggtaatttaatgt

SEQ ID NO: 7472 - DNA, 20 bp, synthetic construct
  source 1..20: mol_type = other DNA
cataggctggtaatttaatg

SEQ ID NO: 7473 - DNA, 20 bp, synthetic construct
  source 1..20: mol_type = other DNA
acataggctggtaatttaat

SEQ ID NO: 7474 - DNA, 20 bp, synthetic construct
  source 1..20: mol_type = other DNA
tacataggctggtaatttaa

SEQ ID NO: 7475 - DNA, 20 bp, synthetic construct
  source 1..20: mol_type = other DNA
atacataggctggtaattta

SEQ ID NO: 7476 - DNA, 20 bp, synthetic construct
  source 1..20: mol_type = other DNA
tatacataggctggtaattt

SEQ ID NO: 7477 - DNA, 20 bp, synthetic construct
  source 1..20: mol_type = other DNA
ttatacataggctggtaatt

SEQ ID NO: 7478 - DNA, 20 bp, synthetic construct
  source 1..20: mol_type = other DNA
attatacataggctggtaat

SEQ ID NO: 7479 - DNA, 20 bp, synthetic construct
  source 1..20: mol_type = other DNA
tattatacataggctggtaa

SEQ ID NO: 7480 - DNA, 20 bp, synthetic construct
  source 1..20: mol_type = other DNA
ctattatacataggctggta

SEQ ID NO: 7481 - DNA, 20 bp, synthetic construct
  source 1..20: mol_type = other DNA
actattatacataggctggt

SEQ ID NO: 7482 - DNA, 20 bp, synthetic construct
  source 1..20: mol_type = other DNA
cactattatacataggctgg

SEQ ID NO: 7483 - DNA, 20 bp, synthetic construct
  source 1..20: mol_type = other DNA
acactattatacataggctg

SEQ ID NO: 7484 - DNA, 20 bp, synthetic construct
  source 1..20: mol_type = other DNA
tacactattatacataggct

SEQ ID NO: 7485 - DNA, 20 bp, synthetic construct
  source 1..20: mol_type = other DNA
atacactattatacataggc

SEQ ID NO: 7486 - DNA, 20 bp, synthetic construct
  source 1..20: mol_type = other DNA
tatacactattatacatagg

SEQ ID NO: 7487 - DNA, 20 bp, synthetic construct
  source 1..20: mol_type = other DNA
ttatacactattatacatag

SEQ ID NO: 7488 - DNA, 20 bp, synthetic construct
  source 1..20: mol_type = other DNA
cttatacactattatacata

SEQ ID NO: 7489 - DNA, 20 bp, synthetic construct
  source 1..20: mol_type = other DNA
tcttatacactattatacat

SEQ ID NO: 7490 - DNA, 20 bp, synthetic construct
  source 1..20: mol_type = other DNA
ctcttatacactattataca

SEQ ID NO: 7491 - DNA, 20 bp, synthetic construct
  source 1..20: mol_type = other DNA
gctcttatacactattatac

SEQ ID NO: 7492 - DNA, 20 bp, synthetic construct
  source 1..20: mol_type = other DNA
agctcttatacactattata

SEQ ID NO: 7493 - DNA, 20 bp, synthetic construct
  source 1..20: mol_type = other DNA
tagctcttatacactattat

SEQ ID NO: 7494 - DNA, 20 bp, synthetic construct
  source 1..20: mol_type = other DNA
atagctcttatacactatta

SEQ ID NO: 7495 - DNA, 20 bp, synthetic construct
  source 1..20: mol_type = other DNA
catagctcttatacactatt

SEQ ID NO: 7496 - DNA, 20 bp, synthetic construct
  source 1..20: mol_type = other DNA
ccatagctcttatacactat

SEQ ID NO: 7497 - DNA, 20 bp, synthetic construct
  source 1..20: mol_type = other DNA
tccatagctcttatacacta

SEQ ID NO: 7498 - DNA, 20 bp, synthetic construct
  source 1..20: mol_type = other DNA
ttccatagctcttatacact

SEQ ID NO: 7499 - DNA, 20 bp, synthetic construct
  source 1..20: mol_type = other DNA
attccatagctcttatacac

SEQ ID NO: 7500 - DNA, 20 bp, synthetic construct
  source 1..20: mol_type = other DNA
aattccatagctcttataca

SEQ ID NO: 7501 - DNA, 20 bp, synthetic construct
  source 1..20: mol_type = other DNA
taattccatagctcttatac

SEQ ID NO: 7502 - DNA, 20 bp, synthetic construct
  source 1..20: mol_type = other DNA
ctaattccatagctcttata

SEQ ID NO: 7503 - DNA, 20 bp, synthetic construct
  source 1..20: mol_type = other DNA
tctaattccatagctcttat

SEQ ID NO: 7504 - DNA, 20 bp, synthetic construct
  source 1..20: mol_type = other DNA
ttctaattccatagctctta

SEQ ID NO: 7505 - DNA, 20 bp, synthetic construct
  source 1..20: mol_type = other DNA
cttctaattccatagctctt

SEQ ID NO: 7506 - DNA, 20 bp, synthetic construct
  source 1..20: mol_type = other DNA
tcttctaattccatagctct

SEQ ID NO: 7507 - DNA, 20 bp, synthetic construct
  source 1..20: mol_type = other DNA
ttcttctaattccatagctc

SEQ ID NO: 7508 - DNA, 20 bp, synthetic construct
  source 1..20: mol_type = other DNA
tttcttctaattccatagct

SEQ ID NO: 7509 - DNA, 20 bp, synthetic construct
  source 1..20: mol_type = other DNA
ctttcttctaattccatagc

SEQ ID NO: 7510 - DNA, 20 bp, synthetic construct
  source 1..20: mol_type = other DNA
gctttcttctaattccatag

SEQ ID NO: 7511 - DNA, 20 bp, synthetic construct
  source 1..20: mol_type = other DNA
tgctttcttctaattccata

SEQ ID NO: 7512 - DNA, 20 bp, synthetic construct
  source 1..20: mol_type = other DNA
ctgctttcttctaattccat

SEQ ID NO: 7513 - DNA, 20 bp, synthetic construct
  source 1..20: mol_type = other DNA
tctgctttcttctaattcca

SEQ ID NO: 7514 - DNA, 20 bp, synthetic construct
  source 1..20: mol_type = other DNA
atctgctttcttctaattcc

SEQ ID NO: 7515 - DNA, 20 bp, synthetic construct
  source 1..20: mol_type = other DNA
aatctgctttcttctaattc

SEQ ID NO: 7516 - DNA, 20 bp, synthetic construct
  source 1..20: mol_type = other DNA
taatctgctttcttctaatt

SEQ ID NO: 7517 - DNA, 20 bp, synthetic construct
  source 1..20: mol_type = other DNA
ttaatctgctttcttctaat

SEQ ID NO: 7518 - DNA, 20 bp, synthetic construct
  source 1..20: mol_type = other DNA
tttaatctgctttcttctaa

SEQ ID NO: 7519 - DNA, 20 bp, synthetic construct
  source 1..20: mol_type = other DNA
ctttaatctgctttcttcta

SEQ ID NO: 7520 - DNA, 20 bp, synthetic construct
  source 1..20: mol_type = other DNA
cctttaatctgctttcttct

SEQ ID NO: 7521 - DNA, 20 bp, synthetic construct
  source 1..20: mol_type = other DNA
acctttaatctgctttcttc

SEQ ID NO: 7522 - DNA, 20 bp, synthetic construct
  source 1..20: mol_type = other DNA
tacctttaatctgctttctt

SEQ ID NO: 7523 - DNA, 20 bp, synthetic construct
  source 1..20: mol_type = other DNA
atacctttaatctgctttct

SEQ ID NO: 7524 - DNA, 20 bp, synthetic construct
  source 1..20: mol_type = other DNA
tatacctttaatctgctttc

SEQ ID NO: 7525 - DNA, 20 bp, synthetic construct
  source 1..20: mol_type = other DNA
ctatacctttaatctgcttt

SEQ ID NO: 7526 - DNA, 20 bp, synthetic construct
  source 1..20: mol_type = other DNA
cctatacctttaatctgctt

SEQ ID NO: 7527 - DNA, 20 bp, synthetic construct
  source 1..20: mol_type = other DNA
ccctatacctttaatctgct

SEQ ID NO: 7528 - DNA, 20 bp, synthetic construct
  source 1..20: mol_type = other DNA
tccctatacctttaatctgc

SEQ ID NO: 7529 - DNA, 20 bp, synthetic construct
  source 1..20: mol_type = other DNA
ctccctatacctttaatctg

SEQ ID NO: 7530 - DNA, 20 bp, synthetic construct
  source 1..20: mol_type = other DNA
actccctatacctttaatct

SEQ ID NO: 7531 - DNA, 20 bp, synthetic construct
  source 1..20: mol_type = other DNA
cactccctatacctttaatc

SEQ ID NO: 7532 - DNA, 20 bp, synthetic construct
  source 1..20: mol_type = other DNA
acactccctatacctttaat

SEQ ID NO: 7533 - DNA, 20 bp, synthetic construct
  source 1..20: mol_type = other DNA
cacactccctatacctttaa

SEQ ID NO: 7534 - DNA, 20 bp, synthetic construct
  source 1..20: mol_type = other DNA
ccacactccctataccttta

SEQ ID NO: 7535 - DNA, 20 bp, synthetic construct
  source 1..20: mol_type = other DNA
cccacactccctataccttt

SEQ ID NO: 7536 - DNA, 20 bp, synthetic construct
  source 1..20: mol_type = other DNA
ccccacactccctatacctt

SEQ ID NO: 7537 - DNA, 20 bp, synthetic construct
  source 1..20: mol_type = other DNA
tccccacactccctatacct

SEQ ID NO: 7538 - DNA, 20 bp, synthetic construct
  source 1..20: mol_type = other DNA
ctccccacactccctatacc

SEQ ID NO: 7539 - DNA, 20 bp, synthetic construct
  source 1..20: mol_type = other DNA
cctccccacactccctatac

SEQ ID NO: 7540 - DNA, 20 bp, synthetic construct
  source 1..20: mol_type = other DNA
ccctccccacactccctata

SEQ ID NO: 7541 - DNA, 20 bp, synthetic construct
  source 1..20: mol_type = other DNA
cccctccccacactccctat

SEQ ID NO: 7542 - DNA, 20 bp, synthetic construct
  source 1..20: mol_type = other DNA
tcccctccccacactcccta

SEQ ID NO: 7543 - DNA, 20 bp, synthetic construct
  source 1..20: mol_type = other DNA
ttcccctccccacactccct

SEQ ID NO: 7544 - DNA, 20 bp, synthetic construct
  source 1..20: mol_type = other DNA
attcccctccccacactccc

SEQ ID NO: 7545 - DNA, 20 bp, synthetic construct
  source 1..20: mol_type = other DNA
cattcccctccccacactcc

SEQ ID NO: 7546 - DNA, 20 bp, synthetic construct
  source 1..20: mol_type = other DNA
tcattcccctccccacactc

SEQ ID NO: 7547 - DNA, 20 bp, synthetic construct
  source 1..20: mol_type = other DNA
ctcattcccctccccacact

SEQ ID NO: 7548 - DNA, 20 bp, synthetic construct
  source 1..20: mol_type = other DNA
actcattcccctccccacac

SEQ ID NO: 7549 - DNA, 20 bp, synthetic construct
  source 1..20: mol_type = other DNA
aactcattcccctccccaca

SEQ ID NO: 7550 - DNA, 20 bp, synthetic construct
  source 1..20: mol_type = other DNA
taactcattcccctccccac

SEQ ID NO: 7551 - DNA, 20 bp, synthetic construct
  source 1..20: mol_type = other DNA
gtaactcattcccctcccca

SEQ ID NO: 7552 - DNA, 20 bp, synthetic construct
  source 1..20: mol_type = other DNA
tgtaactcattcccctcccc

SEQ ID NO: 7553 - DNA, 20 bp, synthetic construct
  source 1..20: mol_type = other DNA
ttgtaactcattcccctccc

SEQ ID NO: 7554 - DNA, 20 bp, synthetic construct
  source 1..20: mol_type = other DNA
attgtaactcattcccctcc

SEQ ID NO: 7555 - DNA, 20 bp, synthetic construct
  source 1..20: mol_type = other DNA
aattgtaactcattcccctc

SEQ ID NO: 7556 - DNA, 20 bp, synthetic construct
  source 1..20: mol_type = other DNA
aaattgtaactcattcccct

SEQ ID NO: 7557 - DNA, 20 bp, synthetic construct
  source 1..20: mol_type = other DNA
aaaattgtaactcattcccc

SEQ ID NO: 7558 - DNA, 20 bp, synthetic construct
  source 1..20: mol_type = other DNA
taaaattgtaactcattccc

SEQ ID NO: 7559 - DNA, 20 bp, synthetic construct
  source 1..20: mol_type = other DNA
ttaaaattgtaactcattcc

SEQ ID NO: 7560 - DNA, 20 bp, synthetic construct
  source 1..20: mol_type = other DNA
tttaaaattgtaactcattc

SEQ ID NO: 7561 - DNA, 20 bp, synthetic construct
  source 1..20: mol_type = other DNA
atttaaaattgtaactcatt

SEQ ID NO: 7562 - DNA, 20 bp, synthetic construct
  source 1..20: mol_type = other DNA
catttaaaattgtaactcat

SEQ ID NO: 7563 - DNA, 20 bp, synthetic construct
  source 1..20: mol_type = other DNA
ccatttaaaattgtaactca

SEQ ID NO: 7564 - DNA, 20 bp, synthetic construct
  source 1..20: mol_type = other DNA
tccatttaaaattgtaactc

SEQ ID NO: 7565 - DNA, 20 bp, synthetic construct
  source 1..20: mol_type = other DNA
atccatttaaaattgtaact

SEQ ID NO: 7566 - DNA, 20 bp, synthetic construct
  source 1..20: mol_type = other DNA
aatccatttaaaattgtaac

SEQ ID NO: 7567 - DNA, 20 bp, synthetic construct
  source 1..20: mol_type = other DNA
caatccatttaaaattgtaa

SEQ ID NO: 7568 - DNA, 20 bp, synthetic construct
  source 1..20: mol_type = other DNA
ccaatccatttaaaattgta

SEQ ID NO: 7569 - DNA, 20 bp, synthetic construct
  source 1..20: mol_type = other DNA
cccaatccatttaaaattgt

SEQ ID NO: 7570 - DNA, 20 bp, synthetic construct
  source 1..20: mol_type = other DNA
ccccaatccatttaaaattg

SEQ ID NO: 7571 - DNA, 20 bp, synthetic construct
  source 1..20: mol_type = other DNA
cccccaatccatttaaaatt

SEQ ID NO: 7572 - DNA, 20 bp, synthetic construct
  source 1..20: mol_type = other DNA
tcccccaatccatttaaaat

SEQ ID NO: 7573 - DNA, 20 bp, synthetic construct
  source 1..20: mol_type = other DNA
ttcccccaatccatttaaaa

SEQ ID NO: 7574 - DNA, 20 bp, synthetic construct
  source 1..20: mol_type = other DNA
gttcccccaatccatttaaa

SEQ ID NO: 7575 - DNA, 20 bp, synthetic construct
  source 1..20: mol_type = other DNA
agttcccccaatccatttaa

SEQ ID NO: 7576 - DNA, 20 bp, synthetic construct
  source 1..20: mol_type = other DNA
aagttcccccaatccattta

SEQ ID NO: 7577 - DNA, 20 bp, synthetic construct
  source 1..20: mol_type = other DNA
taagttcccccaatccattt

SEQ ID NO: 7578 - DNA, 20 bp, synthetic construct
  source 1..20: mol_type = other DNA
ttaagttcccccaatccatt

SEQ ID NO: 7579 - DNA, 20 bp, synthetic construct
  source 1..20: mol_type = other DNA
attaagttcccccaatccat

SEQ ID NO: 7580 - DNA, 20 bp, synthetic construct
  source 1..20: mol_type = other DNA
aattaagttcccccaatcca

SEQ ID NO: 7581 - DNA, 20 bp, synthetic construct
  source 1..20: mol_type = other DNA
caattaagttcccccaatcc

SEQ ID NO: 7582 - DNA, 20 bp, synthetic construct
  source 1..20: mol_type = other DNA
tcaattaagttcccccaatc

SEQ ID NO: 7583 - DNA, 20 bp, synthetic construct
  source 1..20: mol_type = other DNA
ctcaattaagttcccccaat

SEQ ID NO: 7584 - DNA, 20 bp, synthetic construct
  source 1..20: mol_type = other DNA
cctcaattaagttcccccaa

SEQ ID NO: 7585 - DNA, 20 bp, synthetic construct
  source 1..20: mol_type = other DNA
tcctcaattaagttccccca

SEQ ID NO: 7586 - DNA, 20 bp, synthetic construct
  source 1..20: mol_type = other DNA
ctcctcaattaagttccccc

SEQ ID NO: 7587 - DNA, 20 bp, synthetic construct
  source 1..20: mol_type = other DNA
gctcctcaattaagttcccc

SEQ ID NO: 7588 - DNA, 20 bp, synthetic construct
  source 1..20: mol_type = other DNA
agctcctcaattaagttccc

SEQ ID NO: 7589 - DNA, 20 bp, synthetic construct
  source 1..20: mol_type = other DNA
tagctcctcaattaagttcc

SEQ ID NO: 7590 - DNA, 20 bp, synthetic construct
  source 1..20: mol_type = other DNA
ttagctcctcaattaagttc

SEQ ID NO: 7591 - DNA, 20 bp, synthetic construct
  source 1..20: mol_type = other DNA
gttagctcctcaattaagtt

SEQ ID NO: 7592 - DNA, 20 bp, synthetic construct
  source 1..20: mol_type = other DNA
tgttagctcctcaattaagt

SEQ ID NO: 7593 - DNA, 20 bp, synthetic construct
  source 1..20: mol_type = other DNA
atgttagctcctcaattaag

SEQ ID NO: 7594 - DNA, 20 bp, synthetic construct
  source 1..20: mol_type = other DNA
aatgttagctcctcaattaa

SEQ ID NO: 7595 - DNA, 20 bp, synthetic construct
  source 1..20: mol_type = other DNA
aaatgttagctcctcaatta

SEQ ID NO: 7596 - DNA, 20 bp, synthetic construct
  source 1..20: mol_type = other DNA
caaatgttagctcctcaatt

SEQ ID NO: 7597 - DNA, 20 bp, synthetic construct
  source 1..20: mol_type = other DNA
tcaaatgttagctcctcaat

SEQ ID NO: 7598 - DNA, 20 bp, synthetic construct
  source 1..20: mol_type = other DNA
ctcaaatgttagctcctcaa

SEQ ID NO: 7599 - DNA, 20 bp, synthetic construct
  source 1..20: mol_type = other DNA
gctcaaatgttagctcctca

SEQ ID NO: 7600 - DNA, 20 bp, synthetic construct
  source 1..20: mol_type = other DNA
tgctcaaatgttagctcctc

SEQ ID NO: 7601 - DNA, 20 bp, synthetic construct
  source 1..20: mol_type = other DNA
ttgctcaaatgttagctcct

SEQ ID NO: 7602 - DNA, 20 bp, synthetic construct
  source 1..20: mol_type = other DNA
tttgctcaaatgttagctcc

SEQ ID NO: 7603 - DNA, 20 bp, synthetic construct
  source 1..20: mol_type = other DNA
ctttgctcaaatgttagctc

SEQ ID NO: 7604 - DNA, 20 bp, synthetic construct
  source 1..20: mol_type = other DNA
tctttgctcaaatgttagct

SEQ ID NO: 7605 - DNA, 20 bp, synthetic construct
  source 1..20: mol_type = other DNA
atctttgctcaaatgttagc

SEQ ID NO: 7606 - DNA, 20 bp, synthetic construct
  source 1..20: mol_type = other DNA
aatctttgctcaaatgttag

SEQ ID NO: 7607 - DNA, 20 bp, synthetic construct
  source 1..20: mol_type = other DNA
aaatctttgctcaaatgtta

SEQ ID NO: 7608 - DNA, 20 bp, synthetic construct
  source 1..20: mol_type = other DNA
caaatctttgctcaaatgtt

SEQ ID NO: 7609 - DNA, 20 bp, synthetic construct
  source 1..20: mol_type = other DNA
tcaaatctttgctcaaatgt

SEQ ID NO: 7610 - DNA, 20 bp, synthetic construct
  source 1..20: mol_type = other DNA
ttcaaatctttgctcaaatg

SEQ ID NO: 7611 - DNA, 20 bp, synthetic construct
  source 1..20: mol_type = other DNA
cttcaaatctttgctcaaat

SEQ ID NO: 7612 - DNA, 20 bp, synthetic construct
  source 1..20: mol_type = other DNA
ccttcaaatctttgctcaaa

SEQ ID NO: 7613 - DNA, 20 bp, synthetic construct
  source 1..20: mol_type = other DNA
accttcaaatctttgctcaa

SEQ ID NO: 7614 - DNA, 20 bp, synthetic construct
  source 1..20: mol_type = other DNA
aaccttcaaatctttgctca

SEQ ID NO: 7615 - DNA, 20 bp, synthetic construct
  source 1..20: mol_type = other DNA
caaccttcaaatctttgctc

SEQ ID NO: 7616 - DNA, 20 bp, synthetic construct
  source 1..20: mol_type = other DNA
ccaaccttcaaatctttgct

SEQ ID NO: 7617 - DNA, 20 bp, synthetic construct
  source 1..20: mol_type = other DNA
cccaaccttcaaatctttgc

SEQ ID NO: 7618 - DNA, 20 bp, synthetic construct
  source 1..20: mol_type = other DNA
acccaaccttcaaatctttg

SEQ ID NO: 7619 - DNA, 20 bp, synthetic construct
  source 1..20: mol_type = other DNA
tacccaaccttcaaatcttt

SEQ ID NO: 7620 - DNA, 20 bp, synthetic construct
  source 1..20: mol_type = other DNA
atacccaaccttcaaatctt

SEQ ID NO: 7621 - DNA, 20 bp, synthetic construct
  source 1..20: mol_type = other DNA
aatacccaaccttcaaatct

SEQ ID NO: 7622 - DNA, 20 bp, synthetic construct
  source 1..20: mol_type = other DNA
aaatacccaaccttcaaatc

SEQ ID NO: 7623 - DNA, 20 bp, synthetic construct
  source 1..20: mol_type = other DNA
taaatacccaaccttcaaat

SEQ ID NO: 7624 - DNA, 20 bp, synthetic construct
  source 1..20: mol_type = other DNA
ctaaatacccaaccttcaaa

SEQ ID NO: 7625 - DNA, 20 bp, synthetic construct
  source 1..20: mol_type = other DNA
gctaaatacccaaccttcaa

SEQ ID NO: 7626 - DNA, 20 bp, synthetic construct
  source 1..20: mol_type = other DNA
ggctaaatacccaaccttca

SEQ ID NO: 7627 - DNA, 20 bp, synthetic construct
  source 1..20: mol_type = other DNA
cggctaaatacccaaccttc

SEQ ID NO: 7628 - DNA, 20 bp, synthetic construct
  source 1..20: mol_type = other DNA
acggctaaatacccaacctt

SEQ ID NO: 7629 - DNA, 20 bp, synthetic construct
  source 1..20: mol_type = other DNA
aacggctaaatacccaacct

SEQ ID NO: 7630 - DNA, 20 bp, synthetic construct
  source 1..20: mol_type = other DNA
aaacggctaaatacccaacc

SEQ ID NO: 7631 - DNA, 20 bp, synthetic construct
  source 1..20: mol_type = other DNA
caaacggctaaatacccaac

SEQ ID NO: 7632 - DNA, 20 bp, synthetic construct
  source 1..20: mol_type = other DNA
gcaaacggctaaatacccaa

SEQ ID NO: 7633 - DNA, 20 bp, synthetic construct
  source 1..20: mol_type = other DNA
agcaaacggctaaataccca

SEQ ID NO: 7634 - DNA, 20 bp, synthetic construct
  source 1..20: mol_type = other DNA
aagcaaacggctaaataccc

SEQ ID NO: 7635 - DNA, 20 bp, synthetic construct
  source 1..20: mol_type = other DNA
aaagcaaacggctaaatacc

SEQ ID NO: 7636 - DNA, 20 bp, synthetic construct
  source 1..20: mol_type = other DNA
aaaagcaaacggctaaatac

SEQ ID NO: 7637 - DNA, 20 bp, synthetic construct
  source 1..20: mol_type = other DNA
aaaaagcaaacggctaaata

SEQ ID NO: 7638 - DNA, 20 bp, synthetic construct
  source 1..20: mol_type = other DNA
taaaaagcaaacggctaaat

SEQ ID NO: 7639 - DNA, 20 bp, synthetic construct
  source 1..20: mol_type = other DNA
ataaaaagcaaacggctaaa

SEQ ID NO: 7640 - DNA, 20 bp, synthetic construct
  source 1..20: mol_type = other DNA
gataaaaagcaaacggctaa

SEQ ID NO: 7641 - DNA, 20 bp, synthetic construct
  source 1..20: mol_type = other DNA
agataaaaagcaaacggcta

SEQ ID NO: 7642 - DNA, 20 bp, synthetic construct
  source 1..20: mol_type = other DNA
tagataaaaagcaaacggct

SEQ ID NO: 7643 - DNA, 20 bp, synthetic construct
  source 1..20: mol_type = other DNA
ctagataaaaagcaaacggc

SEQ ID NO: 7644 - DNA, 20 bp, synthetic construct
  source 1..20: mol_type = other DNA
cctagataaaaagcaaacgg

SEQ ID NO: 7645 - DNA, 20 bp, synthetic construct
  source 1..20: mol_type = other DNA
acctagataaaaagcaaacg

SEQ ID NO: 7646 - DNA, 20 bp, synthetic construct
  source 1..20: mol_type = other DNA
aacctagataaaaagcaaac

SEQ ID NO: 7647 - DNA, 20 bp, synthetic construct
  source 1..20: mol_type = other DNA
taacctagataaaaagcaaa

SEQ ID NO: 7648 - DNA, 20 bp, synthetic construct
  source 1..20: mol_type = other DNA
ttaacctagataaaaagcaa

SEQ ID NO: 7649 - DNA, 20 bp, synthetic construct
  source 1..20: mol_type = other DNA
attaacctagataaaaagca

SEQ ID NO: 7650 - DNA, 20 bp, synthetic construct
  source 1..20: mol_type = other DNA
aattaacctagataaaaagc

SEQ ID NO: 7651 - DNA, 20 bp, synthetic construct
  source 1..20: mol_type = other DNA
taattaacctagataaaaag

SEQ ID NO: 7652 - DNA, 20 bp, synthetic construct
  source 1..20: mol_type = other DNA
ctaattaacctagataaaaa

SEQ ID NO: 7653 - DNA, 20 bp, synthetic construct
  source 1..20: mol_type = other DNA
actaattaacctagataaaa

SEQ ID NO: 7654 - DNA, 20 bp, synthetic construct
  source 1..20: mol_type = other DNA
gactaattaacctagataaa

SEQ ID NO: 7655 - DNA, 20 bp, synthetic construct
  source 1..20: mol_type = other DNA
tgactaattaacctagataa

SEQ ID NO: 7656 - DNA, 20 bp, synthetic construct
  source 1..20: mol_type = other DNA
atgactaattaacctagata

SEQ ID NO: 7657 - DNA, 20 bp, synthetic construct
  source 1..20: mol_type = other DNA
catgactaattaacctagat

SEQ ID NO: 7658 - DNA, 20 bp, synthetic construct
  source 1..20: mol_type = other DNA
acatgactaattaacctaga

SEQ ID NO: 7659 - DNA, 20 bp, synthetic construct
  source 1..20: mol_type = other DNA
cacatgactaattaacctag

SEQ ID NO: 7660 - DNA, 20 bp, synthetic construct
  source 1..20: mol_type = other DNA
ccacatgactaattaaccta

SEQ ID NO: 7661 - DNA, 20 bp, synthetic construct
  source 1..20: mol_type = other DNA
gccacatgactaattaacct

SEQ ID NO: 7662 - DNA, 20 bp, synthetic construct
  source 1..20: mol_type = other DNA
agccacatgactaattaacc

SEQ ID NO: 7663 - DNA, 20 bp, synthetic construct
  source 1..20: mol_type = other DNA
aagccacatgactaattaac

SEQ ID NO: 7664 - DNA, 20 bp, synthetic construct
  source 1..20: mol_type = other DNA
gaagccacatgactaattaa

SEQ ID NO: 7665 - DNA, 20 bp, synthetic construct
  source 1..20: mol_type = other DNA
tgaagccacatgactaatta

SEQ ID NO: 7666 - DNA, 20 bp, synthetic construct
  source 1..20: mol_type = other DNA
atgaagccacatgactaatt

SEQ ID NO: 7667 - DNA, 20 bp, synthetic construct
  source 1..20: mol_type = other DNA
aatgaagccacatgactaat

SEQ ID NO: 7668 - DNA, 20 bp, synthetic construct
  source 1..20: mol_type = other DNA
taatgaagccacatgactaa

SEQ ID NO: 7669 - DNA, 20 bp, synthetic construct
  source 1..20: mol_type = other DNA
ctaatgaagccacatgacta

SEQ ID NO: 7670 - DNA, 20 bp, synthetic construct
  source 1..20: mol_type = other DNA
actaatgaagccacatgact

SEQ ID NO: 7671 - DNA, 20 bp, synthetic construct
  source 1..20: mol_type = other DNA
tactaatgaagccacatgac

SEQ ID NO: 7672 - DNA, 20 bp, synthetic construct
  source 1..20: mol_type = other DNA
ttactaatgaagccacatga

SEQ ID NO: 7673 - DNA, 20 bp, synthetic construct
  source 1..20: mol_type = other DNA
attactaatgaagccacatg

SEQ ID NO: 7674 - DNA, 20 bp, synthetic construct
  source 1..20: mol_type = other DNA
aattactaatgaagccacat

SEQ ID NO: 7675 - DNA, 20 bp, synthetic construct
  source 1..20: mol_type = other DNA
aaattactaatgaagccaca

SEQ ID NO: 7676 - DNA, 20 bp, synthetic construct
  source 1..20: mol_type = other DNA
taaattactaatgaagccac

SEQ ID NO: 7677 - DNA, 20 bp, synthetic construct
  source 1..20: mol_type = other DNA
ataaattactaatgaagcca

SEQ ID NO: 7678 - DNA, 20 bp, synthetic construct
  source 1..20: mol_type = other DNA
tataaattactaatgaagcc

SEQ ID NO: 7679 - DNA, 20 bp, synthetic construct
  source 1..20: mol_type = other DNA
ttataaattactaatgaagc

SEQ ID NO: 7680 - DNA, 20 bp, synthetic construct
  source 1..20: mol_type = other DNA
cttataaattactaatgaag

SEQ ID NO: 7681 - DNA, 20 bp, synthetic construct
  source 1..20: mol_type = other DNA
ccttataaattactaatgaa

SEQ ID NO: 7682 - DNA, 20 bp, synthetic construct
  source 1..20: mol_type = other DNA
accttataaattactaatga

SEQ ID NO: 7683 - DNA, 20 bp, synthetic construct
  source 1..20: mol_type = other DNA
aaccttataaattactaatg

SEQ ID NO: 7684 - DNA, 20 bp, synthetic construct
  source 1..20: mol_type = other DNA
aaaccttataaattactaat

SEQ ID NO: 7685 - DNA, 20 bp, synthetic construct
  source 1..20: mol_type = other DNA
taaaccttataaattactaa

SEQ ID NO: 7686 - DNA, 20 bp, synthetic construct
  source 1..20: mol_type = other DNA
ttaaaccttataaattacta

SEQ ID NO: 7687 - DNA, 20 bp, synthetic construct
  source 1..20: mol_type = other DNA
tttaaaccttataaattact

SEQ ID NO: 7688 - DNA, 20 bp, synthetic construct
  source 1..20: mol_type = other DNA
atttaaaccttataaattac

SEQ ID NO: 7689 - DNA, 20 bp, synthetic construct
  source 1..20: mol_type = other DNA
catttaaaccttataaatta

SEQ ID NO: 7690 - DNA, 20 bp, synthetic construct
  source 1..20: mol_type = other DNA
ccatttaaaccttataaatt

SEQ ID NO: 7691 - DNA, 20 bp, synthetic construct
  source 1..20: mol_type = other DNA
gccatttaaaccttataaat

SEQ ID NO: 7692 - DNA, 20 bp, synthetic construct
  source 1..20: mol_type = other DNA
tgccatttaaaccttataaa

SEQ ID NO: 7693 - DNA, 20 bp, synthetic construct
  source 1..20: mol_type = other DNA
atgccatttaaaccttataa

SEQ ID NO: 7694 - DNA, 20 bp, synthetic construct
  source 1..20: mol_type = other DNA
gatgccatttaaaccttata

SEQ ID NO: 7695 - DNA, 20 bp, synthetic construct
  source 1..20: mol_type = other DNA
tgatgccatttaaaccttat

SEQ ID NO: 7696 - DNA, 20 bp, synthetic construct
  source 1..20: mol_type = other DNA
atgatgccatttaaacctta

SEQ ID NO: 7697 - DNA, 20 bp, synthetic construct
  source 1..20: mol_type = other DNA
gatgatgccatttaaacctt

SEQ ID NO: 7698 - DNA, 20 bp, synthetic construct
  source 1..20: mol_type = other DNA
ggatgatgccatttaaacct

SEQ ID NO: 7699 - DNA, 20 bp, synthetic construct
  source 1..20: mol_type = other DNA
aggatgatgccatttaaacc

SEQ ID NO: 7700 - DNA, 20 bp, synthetic construct
  source 1..20: mol_type = other DNA
aaggatgatgccatttaaac

SEQ ID NO: 7701 - DNA, 20 bp, synthetic construct
  source 1..20: mol_type = other DNA
aaaggatgatgccatttaaa

SEQ ID NO: 7702 - DNA, 20 bp, synthetic construct
  source 1..20: mol_type = other DNA
caaaggatgatgccatttaa

SEQ ID NO: 7703 - DNA, 20 bp, synthetic construct
  source 1..20: mol_type = other DNA
acaaaggatgatgccattta

SEQ ID NO: 7704 - DNA, 20 bp, synthetic construct
  source 1..20: mol_type = other DNA
aacaaaggatgatgccattt

SEQ ID NO: 7705 - DNA, 20 bp, synthetic construct
  source 1..20: mol_type = other DNA
taacaaaggatgatgccatt

SEQ ID NO: 7706 - DNA, 20 bp, synthetic construct
  source 1..20: mol_type = other DNA
ataacaaaggatgatgccat

SEQ ID NO: 7707 - DNA, 20 bp, synthetic construct
  source 1..20: mol_type = other DNA
aataacaaaggatgatgcca

SEQ ID NO: 7708 - DNA, 20 bp, synthetic construct
  source 1..20: mol_type = other DNA
gaataacaaaggatgatgcc

SEQ ID NO: 7709 - DNA, 20 bp, synthetic construct
  source 1..20: mol_type = other DNA
agaataacaaaggatgatgc

SEQ ID NO: 7710 - DNA, 20 bp, synthetic construct
  source 1..20: mol_type = other DNA
aagaataacaaaggatgatg

SEQ ID NO: 7711 - DNA, 20 bp, synthetic construct
  source 1..20: mol_type = other DNA
aaagaataacaaaggatgat

SEQ ID NO: 7712 - DNA, 20 bp, synthetic construct
  source 1..20: mol_type = other DNA
aaaagaataacaaaggatga

SEQ ID NO: 7713 - DNA, 20 bp, synthetic construct
  source 1..20: mol_type = other DNA
taaaagaataacaaaggatg

SEQ ID NO: 7714 - DNA, 20 bp, synthetic construct
  source 1..20: mol_type = other DNA
ataaaagaataacaaaggat

SEQ ID NO: 7715 - DNA, 20 bp, synthetic construct
  source 1..20: mol_type = other DNA
cataaaagaataacaaagga

SEQ ID NO: 7716 - DNA, 20 bp, synthetic construct
  source 1..20: mol_type = other DNA
acataaaagaataacaaagg

SEQ ID NO: 7717 - DNA, 20 bp, synthetic construct
  source 1..20: mol_type = other DNA
cacataaaagaataacaaag

SEQ ID NO: 7718 - DNA, 20 bp, synthetic construct
  source 1..20: mol_type = other DNA
gcacataaaagaataacaaa

SEQ ID NO: 7719 - DNA, 20 bp, synthetic construct
  source 1..20: mol_type = other DNA
tgcacataaaagaataacaa

SEQ ID NO: 7720 - DNA, 20 bp, synthetic construct
  source 1..20: mol_type = other DNA
gtgcacataaaagaataaca

SEQ ID NO: 7721 - DNA, 20 bp, synthetic construct
  source 1..20: mol_type = other DNA
tgtgcacataaaagaataac

SEQ ID NO: 7722 - DNA, 20 bp, synthetic construct
  source 1..20: mol_type = other DNA
atgtgcacataaaagaataa

SEQ ID NO: 7723 - DNA, 20 bp, synthetic construct
  source 1..20: mol_type = other DNA
aatgtgcacataaaagaata

SEQ ID NO: 7724 - DNA, 20 bp, synthetic construct
  source 1..20: mol_type = other DNA
caatgtgcacataaaagaat

SEQ ID NO: 7725 - DNA, 20 bp, synthetic construct
  source 1..20: mol_type = other DNA
tcaatgtgcacataaaagaa

SEQ ID NO: 7726 - DNA, 20 bp, synthetic construct
  source 1..20: mol_type = other DNA
atcaatgtgcacataaaaga

SEQ ID NO: 7727 - DNA, 20 bp, synthetic construct
  source 1..20: mol_type = other DNA
tatcaatgtgcacataaaag

SEQ ID NO: 7728 - DNA, 20 bp, synthetic construct
  source 1..20: mol_type = other DNA
gtatcaatgtgcacataaaa

SEQ ID NO: 7729 - DNA, 20 bp, synthetic construct
  source 1..20: mol_type = other DNA
agtatcaatgtgcacataaa

SEQ ID NO: 7730 - DNA, 20 bp, synthetic construct
  source 1..20: mol_type = other DNA
tagtatcaatgtgcacataa

SEQ ID NO: 7731 - DNA, 20 bp, synthetic construct
  source 1..20: mol_type = other DNA
ttagtatcaatgtgcacata

SEQ ID NO: 7732 - DNA, 20 bp, synthetic construct
  source 1..20: mol_type = other DNA
gttagtatcaatgtgcacat

SEQ ID NO: 7733 - DNA, 20 bp, synthetic construct
  source 1..20: mol_type = other DNA
ggttagtatcaatgtgcaca

SEQ ID NO: 7734 - DNA, 20 bp, synthetic construct
  source 1..20: mol_type = other DNA
tggttagtatcaatgtgcac

SEQ ID NO: 7735 - DNA, 20 bp, synthetic construct
  source 1..20: mol_type = other DNA
atggttagtatcaatgtgca

SEQ ID NO: 7736 - DNA, 20 bp, synthetic construct
  source 1..20: mol_type = other DNA
gatggttagtatcaatgtgc

SEQ ID NO: 7737 - DNA, 20 bp, synthetic construct
  source 1..20: mol_type = other DNA
agatggttagtatcaatgtg

SEQ ID NO: 7738 - DNA, 20 bp, synthetic construct
  source 1..20: mol_type = other DNA
gagatggttagtatcaatgt

SEQ ID NO: 7739 - DNA, 20 bp, synthetic construct
  source 1..20: mol_type = other DNA
agagatggttagtatcaatg

SEQ ID NO: 7740 - DNA, 20 bp, synthetic construct
  source 1..20: mol_type = other DNA
cagagatggttagtatcaat

SEQ ID NO: 7741 - DNA, 20 bp, synthetic construct
  source 1..20: mol_type = other DNA
tcagagatggttagtatcaa

SEQ ID NO: 7742 - DNA, 20 bp, synthetic construct
  source 1..20: mol_type = other DNA
ttcagagatggttagtatca

SEQ ID NO: 7743 - DNA, 20 bp, synthetic construct
  source 1..20: mol_type = other DNA
cttcagagatggttagtatc

SEQ ID NO: 7744 - DNA, 20 bp, synthetic construct
  source 1..20: mol_type = other DNA
acttcagagatggttagtat

SEQ ID NO: 7745 - DNA, 20 bp, synthetic construct
  source 1..20: mol_type = other DNA
aacttcagagatggttagta

SEQ ID NO: 7746 - DNA, 20 bp, synthetic construct
  source 1..20: mol_type = other DNA
taacttcagagatggttagt

SEQ ID NO: 7747 - DNA, 20 bp, synthetic construct
  source 1..20: mol_type = other DNA
ctaacttcagagatggttag

SEQ ID NO: 7748 - DNA, 20 bp, synthetic construct
  source 1..20: mol_type = other DNA
tctaacttcagagatggtta

SEQ ID NO: 7749 - DNA, 20 bp, synthetic construct
  source 1..20: mol_type = other DNA
gtctaacttcagagatggtt

SEQ ID NO: 7750 - DNA, 20 bp, synthetic construct
  source 1..20: mol_type = other DNA
ggtctaacttcagagatggt

SEQ ID NO: 7751 - DNA, 20 bp, synthetic construct
  source 1..20: mol_type = other DNA
tggtctaacttcagagatgg

SEQ ID NO: 7752 - DNA, 20 bp, synthetic construct
  source 1..20: mol_type = other DNA
ttggtctaacttcagagatg

SEQ ID NO: 7753 - DNA, 20 bp, synthetic construct
  source 1..20: mol_type = other DNA
tttggtctaacttcagagat

SEQ ID NO: 7754 - DNA, 20 bp, synthetic construct
  source 1..20: mol_type = other DNA
ttttggtctaacttcagaga

SEQ ID NO: 7755 - DNA, 20 bp, synthetic construct
  source 1..20: mol_type = other DNA
tttttggtctaacttcagag

SEQ ID NO: 7756 - DNA, 20 bp, synthetic construct
  source 1..20: mol_type = other DNA
ttttttggtctaacttcaga

SEQ ID NO: 7757 - DNA, 20 bp, synthetic construct
  source 1..20: mol_type = other DNA
cttttttggtctaacttcag

SEQ ID NO: 7758 - DNA, 20 bp, synthetic construct
  source 1..20: mol_type = other DNA
acttttttggtctaacttca

SEQ ID NO: 7759 - DNA, 20 bp, synthetic construct
  source 1..20: mol_type = other DNA
aacttttttggtctaacttc

SEQ ID NO: 7760 - DNA, 20 bp, synthetic construct
  source 1..20: mol_type = other DNA
taacttttttggtctaactt

SEQ ID NO: 7761 - DNA, 20 bp, synthetic construct
  source 1..20: mol_type = other DNA
ttaacttttttggtctaact

SEQ ID NO: 7762 - DNA, 20 bp, synthetic construct
  source 1..20: mol_type = other DNA
attaacttttttggtctaac

SEQ ID NO: 7763 - DNA, 20 bp, synthetic construct
  source 1..20: mol_type = other DNA
aattaacttttttggtctaa

SEQ ID NO: 7764 - DNA, 20 bp, synthetic construct
  source 1..20: mol_type = other DNA
caattaacttttttggtcta

SEQ ID NO: 7765 - DNA, 20 bp, synthetic construct
  source 1..20: mol_type = other DNA
tcaattaacttttttggtct

SEQ ID NO: 7766 - DNA, 20 bp, synthetic construct
  source 1..20: mol_type = other DNA
gtcaattaacttttttggtc

SEQ ID NO: 7767 - DNA, 20 bp, synthetic construct
  source 1..20: mol_type = other DNA
tgtcaattaacttttttggt

SEQ ID NO: 7768 - DNA, 20 bp, synthetic construct
  source 1..20: mol_type = other DNA
atgtcaattaacttttttgg

SEQ ID NO: 7769 - DNA, 20 bp, synthetic construct
  source 1..20: mol_type = other DNA
aatgtcaattaacttttttg

SEQ ID NO: 7770 - DNA, 20 bp, synthetic construct
  source 1..20: mol_type = other DNA
caatgtcaattaactttttt

SEQ ID NO: 7771 - DNA, 20 bp, synthetic construct
  source 1..20: mol_type = other DNA
tcaatgtcaattaacttttt

SEQ ID NO: 7772 - DNA, 20 bp, synthetic construct
  source 1..20: mol_type = other DNA
ctcaatgtcaattaactttt

SEQ ID NO: 7773 - DNA, 20 bp, synthetic construct
  source 1..20: mol_type = other DNA
cctcaatgtcaattaacttt

SEQ ID NO: 7774 - DNA, 20 bp, synthetic construct
  source 1..20: mol_type = other DNA
ccctcaatgtcaattaactt

SEQ ID NO: 7775 - DNA, 20 bp, synthetic construct
  source 1..20: mol_type = other DNA
accctcaatgtcaattaact

SEQ ID NO: 7776 - DNA, 20 bp, synthetic construct
  source 1..20: mol_type = other DNA
gaccctcaatgtcaattaac

SEQ ID NO: 7777 - DNA, 20 bp, synthetic construct
  source 1..20: mol_type = other DNA
tgaccctcaatgtcaattaa

SEQ ID NO: 7778 - DNA, 20 bp, synthetic construct
  source 1..20: mol_type = other DNA
atgaccctcaatgtcaatta

SEQ ID NO: 7779 - DNA, 20 bp, synthetic construct
  source 1..20: mol_type = other DNA
aatgaccctcaatgtcaatt

SEQ ID NO: 7780 - DNA, 20 bp, synthetic construct
  source 1..20: mol_type = other DNA
taatgaccctcaatgtcaat

SEQ ID NO: 7781 - DNA, 20 bp, synthetic construct
  source 1..20: mol_type = other DNA
ctaatgaccctcaatgtcaa

SEQ ID NO: 7782 - DNA, 20 bp, synthetic construct
  source 1..20: mol_type = other DNA
tctaatgaccctcaatgtca

SEQ ID NO: 7783 - DNA, 20 bp, synthetic construct
  source 1..20: mol_type = other DNA
ctctaatgaccctcaatgtc

SEQ ID NO: 7784 - DNA, 20 bp, synthetic construct
  source 1..20: mol_type = other DNA
cctctaatgaccctcaatgt

SEQ ID NO: 7785 - DNA, 20 bp, synthetic construct
  source 1..20: mol_type = other DNA
acctctaatgaccctcaatg

SEQ ID NO: 7786 - DNA, 20 bp, synthetic construct
  source 1..20: mol_type = other DNA
tacctctaatgaccctcaat

SEQ ID NO: 7787 - DNA, 20 bp, synthetic construct
  source 1..20: mol_type = other DNA
ttacctctaatgaccctcaa

SEQ ID NO: 7788 - DNA, 20 bp, synthetic construct
  source 1..20: mol_type = other DNA
tttacctctaatgaccctca

SEQ ID NO: 7789 - DNA, 20 bp, synthetic construct
  source 1..20: mol_type = other DNA
atttacctctaatgaccctc

SEQ ID NO: 7790 - DNA, 20 bp, synthetic construct
  source 1..20: mol_type = other DNA
aatttacctctaatgaccct

SEQ ID NO: 7791 - DNA, 20 bp, synthetic construct
  source 1..20: mol_type = other DNA
caatttacctctaatgaccc

SEQ ID NO: 7792 - DNA, 20 bp, synthetic construct
  source 1..20: mol_type = other DNA
acaatttacctctaatgacc

SEQ ID NO: 7793 - DNA, 20 bp, synthetic construct
  source 1..20: mol_type = other DNA
tacaatttacctctaatgac

SEQ ID NO: 7794 - DNA, 20 bp, synthetic construct
  source 1..20: mol_type = other DNA
ctacaatttacctctaatga

SEQ ID NO: 7795 - DNA, 20 bp, synthetic construct
  source 1..20: mol_type = other DNA
tctacaatttacctctaatg

SEQ ID NO: 7796 - DNA, 20 bp, synthetic construct
  source 1..20: mol_type = other DNA
atctacaatttacctctaat

SEQ ID NO: 7797 - DNA, 20 bp, synthetic construct
  source 1..20: mol_type = other DNA
catctacaatttacctctaa

SEQ ID NO: 7798 - DNA, 20 bp, synthetic construct
  source 1..20: mol_type = other DNA
ccatctacaatttacctcta

SEQ ID NO: 7799 - DNA, 20 bp, synthetic construct
  source 1..20: mol_type = other DNA
gccatctacaatttacctct

SEQ ID NO: 7800 - DNA, 20 bp, synthetic construct
  source 1..20: mol_type = other DNA
agccatctacaatttacctc

SEQ ID NO: 7801 - DNA, 20 bp, synthetic construct
  source 1..20: mol_type = other DNA
tagccatctacaatttacct

SEQ ID NO: 7802 - DNA, 20 bp, synthetic construct
  source 1..20: mol_type = other DNA
atagccatctacaatttacc

SEQ ID NO: 7803 - DNA, 20 bp, synthetic construct
  source 1..20: mol_type = other DNA
aatagccatctacaatttac

SEQ ID NO: 7804 - DNA, 20 bp, synthetic construct
  source 1..20: mol_type = other DNA
taatagccatctacaattta

SEQ ID NO: 7805 - DNA, 20 bp, synthetic construct
  source 1..20: mol_type = other DNA
gtaatagccatctacaattt

SEQ ID NO: 7806 - DNA, 20 bp, synthetic construct
  source 1..20: mol_type = other DNA
agtaatagccatctacaatt

SEQ ID NO: 7807 - DNA, 20 bp, synthetic construct
  source 1..20: mol_type = other DNA
tagtaatagccatctacaat

SEQ ID NO: 7808 - DNA, 20 bp, synthetic construct
  source 1..20: mol_type = other DNA
ttagtaatagccatctacaa

SEQ ID NO: 7809 - DNA, 20 bp, synthetic construct
  source 1..20: mol_type = other DNA
gttagtaatagccatctaca

SEQ ID NO: 7810 - DNA, 20 bp, synthetic construct
  source 1..20: mol_type = other DNA
ggttagtaatagccatctac

SEQ ID NO: 7811 - DNA, 20 bp, synthetic construct
  source 1..20: mol_type = other DNA
tggttagtaatagccatcta

SEQ ID NO: 7812 - DNA, 20 bp, synthetic construct
  source 1..20: mol_type = other DNA
ttggttagtaatagccatct

SEQ ID NO: 7813 - DNA, 20 bp, synthetic construct
  source 1..20: mol_type = other DNA
tttggttagtaatagccatc

SEQ ID NO: 7814 - DNA, 20 bp, synthetic construct
  source 1..20: mol_type = other DNA
ctttggttagtaatagccat

SEQ ID NO: 7815 - DNA, 20 bp, synthetic construct
  source 1..20: mol_type = other DNA
tctttggttagtaatagcca

SEQ ID NO: 7816 - DNA, 20 bp, synthetic construct
  source 1..20: mol_type = other DNA
ctctttggttagtaatagcc

SEQ ID NO: 7817 - DNA, 20 bp, synthetic construct
  source 1..20: mol_type = other DNA
tctctttggttagtaatagc

SEQ ID NO: 7818 - DNA, 20 bp, synthetic construct
  source 1..20: mol_type = other DNA
gtctctttggttagtaatag

SEQ ID NO: 7819 - DNA, 20 bp, synthetic construct
  source 1..20: mol_type = other DNA
tgtctctttggttagtaata

SEQ ID NO: 7820 - DNA, 20 bp, synthetic construct
  source 1..20: mol_type = other DNA
atgtctctttggttagtaat

SEQ ID NO: 7821 - DNA, 20 bp, synthetic construct
  source 1..20: mol_type = other DNA
catgtctctttggttagtaa

SEQ ID NO: 7822 - DNA, 20 bp, synthetic construct
  source 1..20: mol_type = other DNA
acatgtctctttggttagta

SEQ ID NO: 7823 - DNA, 20 bp, synthetic construct
  source 1..20: mol_type = other DNA
aacatgtctctttggttagt

SEQ ID NO: 7824 - DNA, 20 bp, synthetic construct
  source 1..20: mol_type = other DNA
aaacatgtctctttggttag

SEQ ID NO: 7825 - DNA, 20 bp, synthetic construct
  source 1..20: mol_type = other DNA
aaaacatgtctctttggtta

SEQ ID NO: 7826 - DNA, 20 bp, synthetic construct
  source 1..20: mol_type = other DNA
caaaacatgtctctttggtt

SEQ ID NO: 7827 - DNA, 20 bp, synthetic construct
  source 1..20: mol_type = other DNA
acaaaacatgtctctttggt

SEQ ID NO: 7828 - DNA, 20 bp, synthetic construct
  source 1..20: mol_type = other DNA
aacaaaacatgtctctttgg

SEQ ID NO: 7829 - DNA, 20 bp, synthetic construct
  source 1..20: mol_type = other DNA
aaacaaaacatgtctctttg

SEQ ID NO: 7830 - DNA, 20 bp, synthetic construct
  source 1..20: mol_type = other DNA
aaaacaaaacatgtctcttt

SEQ ID NO: 7831 - DNA, 20 bp, synthetic construct
  source 1..20: mol_type = other DNA
aaaaacaaaacatgtctctt

SEQ ID NO: 7832 - DNA, 20 bp, synthetic construct
  source 1..20: mol_type = other DNA
gaaaaacaaaacatgtctct

SEQ ID NO: 7833 - DNA, 20 bp, synthetic construct
  source 1..20: mol_type = other DNA
agaaaaacaaaacatgtctc

SEQ ID NO: 7834 - DNA, 20 bp, synthetic construct
  source 1..20: mol_type = other DNA
aagaaaaacaaaacatgtct

SEQ ID NO: 7835 - DNA, 20 bp, synthetic construct
  source 1..20: mol_type = other DNA
aaagaaaaacaaaacatgtc

SEQ ID NO: 7836 - DNA, 20 bp, synthetic construct
  source 1..20: mol_type = other DNA
aaaagaaaaacaaaacatgt

SEQ ID NO: 7837 - DNA, 20 bp, synthetic construct
  source 1..20: mol_type = other DNA
caaaagaaaaacaaaacatg

SEQ ID NO: 7838 - DNA, 20 bp, synthetic construct
  source 1..20: mol_type = other DNA
ccaaaagaaaaacaaaacat

SEQ ID NO: 7839 - DNA, 20 bp, synthetic construct
  source 1..20: mol_type = other DNA
cccaaaagaaaaacaaaaca

SEQ ID NO: 7840 - DNA, 20 bp, synthetic construct
  source 1..20: mol_type = other DNA
gcccaaaagaaaaacaaaac

SEQ ID NO: 7841 - DNA, 20 bp, synthetic construct
  source 1..20: mol_type = other DNA
agcccaaaagaaaaacaaaa

SEQ ID NO: 7842 - DNA, 20 bp, synthetic construct
  source 1..20: mol_type = other DNA
aagcccaaaagaaaaacaaa

SEQ ID NO: 7843 - DNA, 20 bp, synthetic construct
  source 1..20: mol_type = other DNA
taagcccaaaagaaaaacaa

SEQ ID NO: 7844 - DNA, 20 bp, synthetic construct
  source 1..20: mol_type = other DNA
gtaagcccaaaagaaaaaca

SEQ ID NO: 7845 - DNA, 20 bp, synthetic construct
  source 1..20: mol_type = other DNA
cgtaagcccaaaagaaaaac

SEQ ID NO: 7846 - DNA, 20 bp, synthetic construct
  source 1..20: mol_type = other DNA
acgtaagcccaaaagaaaaa

SEQ ID NO: 7847 - DNA, 20 bp, synthetic construct
  source 1..20: mol_type = other DNA
tacgtaagcccaaaagaaaa

SEQ ID NO: 7848 - DNA, 20 bp, synthetic construct
  source 1..20: mol_type = other DNA
atacgtaagcccaaaagaaa

SEQ ID NO: 7849 - DNA, 20 bp, synthetic construct
  source 1..20: mol_type = other DNA
aatacgtaagcccaaaagaa

SEQ ID NO: 7850 - DNA, 20 bp, synthetic construct
  source 1..20: mol_type = other DNA
aaatacgtaagcccaaaaga

SEQ ID NO: 7851 - DNA, 20 bp, synthetic construct
  source 1..20: mol_type = other DNA
aaaatacgtaagcccaaaag

SEQ ID NO: 7852 - DNA, 20 bp, synthetic construct
  source 1..20: mol_type = other DNA
taaaatacgtaagcccaaaa

SEQ ID NO: 7853 - DNA, 20 bp, synthetic construct
  source 1..20: mol_type = other DNA
gtaaaatacgtaagcccaaa

SEQ ID NO: 7854 - DNA, 20 bp, synthetic construct
  source 1..20: mol_type = other DNA
ggtaaaatacgtaagcccaa

SEQ ID NO: 7855 - DNA, 20 bp, synthetic construct
  source 1..20: mol_type = other DNA
aggtaaaatacgtaagccca

SEQ ID NO: 7856 - DNA, 20 bp, synthetic construct
  source 1..20: mol_type = other DNA
taggtaaaatacgtaagccc

SEQ ID NO: 7857 - DNA, 20 bp, synthetic construct
  source 1..20: mol_type = other DNA
ttaggtaaaatacgtaagcc

SEQ ID NO: 7858 - DNA, 20 bp, synthetic construct
  source 1..20: mol_type = other DNA
attaggtaaaatacgtaagc

SEQ ID NO: 7859 - DNA, 20 bp, synthetic construct
  source 1..20: mol_type = other DNA
aattaggtaaaatacgtaag

SEQ ID NO: 7860 - DNA, 20 bp, synthetic construct
  source 1..20: mol_type = other DNA
taattaggtaaaatacgtaa

SEQ ID NO: 7861 - DNA, 20 bp, synthetic construct
  source 1..20: mol_type = other DNA
ctaattaggtaaaatacgta

SEQ ID NO: 7862 - DNA, 20 bp, synthetic construct
  source 1..20: mol_type = other DNA
actaattaggtaaaatacgt

SEQ ID NO: 7863 - DNA, 20 bp, synthetic construct
  source 1..20: mol_type = other DNA
aactaattaggtaaaatacg

SEQ ID NO: 7864 - DNA, 20 bp, synthetic construct
  source 1..20: mol_type = other DNA
aaactaattaggtaaaatac

SEQ ID NO: 7865 - DNA, 20 bp, synthetic construct
  source 1..20: mol_type = other DNA
taaactaattaggtaaaata

SEQ ID NO: 7866 - DNA, 20 bp, synthetic construct
  source 1..20: mol_type = other DNA
ctaaactaattaggtaaaat

SEQ ID NO: 7867 - DNA, 20 bp, synthetic construct
  source 1..20: mol_type = other DNA
actaaactaattaggtaaaa

SEQ ID NO: 7868 - DNA, 20 bp, synthetic construct
  source 1..20: mol_type = other DNA
aactaaactaattaggtaaa

SEQ ID NO: 7869 - DNA, 20 bp, synthetic construct
  source 1..20: mol_type = other DNA
aaactaaactaattaggtaa

SEQ ID NO: 7870 - DNA, 20 bp, synthetic construct
  source 1..20: mol_type = other DNA
aaaactaaactaattaggta

SEQ ID NO: 7871 - DNA, 20 bp, synthetic construct
  source 1..20: mol_type = other DNA
aaaaactaaactaattaggt

SEQ ID NO: 7872 - DNA, 20 bp, synthetic construct
  source 1..20: mol_type = other DNA
caaaaactaaactaattagg

SEQ ID NO: 7873 - DNA, 20 bp, synthetic construct
  source 1..20: mol_type = other DNA
acaaaaactaaactaattag

SEQ ID NO: 7874 - DNA, 20 bp, synthetic construct
  source 1..20: mol_type = other DNA
aacaaaaactaaactaatta

SEQ ID NO: 7875 - DNA, 20 bp, synthetic construct
  source 1..20: mol_type = other DNA
aaacaaaaactaaactaatt

SEQ ID NO: 7876 - DNA, 20 bp, synthetic construct
  source 1..20: mol_type = other DNA
gaaacaaaaactaaactaat

SEQ ID NO: 7877 - DNA, 20 bp, synthetic construct
  source 1..20: mol_type = other DNA
tgaaacaaaaactaaactaa

SEQ ID NO: 7878 - DNA, 20 bp, synthetic construct
  source 1..20: mol_type = other DNA
ttgaaacaaaaactaaacta

SEQ ID NO: 7879 - DNA, 20 bp, synthetic construct
  source 1..20: mol_type = other DNA
cttgaaacaaaaactaaact

SEQ ID NO: 7880 - DNA, 20 bp, synthetic construct
  source 1..20: mol_type = other DNA
acttgaaacaaaaactaaac

SEQ ID NO: 7881 - DNA, 20 bp, synthetic construct
  source 1..20: mol_type = other DNA
tacttgaaacaaaaactaaa

SEQ ID NO: 7882 - DNA, 20 bp, synthetic construct
  source 1..20: mol_type = other DNA
atacttgaaacaaaaactaa

SEQ ID NO: 7883 - DNA, 20 bp, synthetic construct
  source 1..20: mol_type = other DNA
catacttgaaacaaaaacta

SEQ ID NO: 7884 - DNA, 20 bp, synthetic construct
  source 1..20: mol_type = other DNA
acatacttgaaacaaaaact

SEQ ID NO: 7885 - DNA, 20 bp, synthetic construct
  source 1..20: mol_type = other DNA
cacatacttgaaacaaaaac

SEQ ID NO: 7886 - DNA, 20 bp, synthetic construct
  source 1..20: mol_type = other DNA
ccacatacttgaaacaaaaa

SEQ ID NO: 7887 - DNA, 20 bp, synthetic construct
  source 1..20: mol_type = other DNA
tccacatacttgaaacaaaa

SEQ ID NO: 7888 - DNA, 20 bp, synthetic construct
  source 1..20: mol_type = other DNA
ctccacatacttgaaacaaa

SEQ ID NO: 7889 - DNA, 20 bp, synthetic construct
  source 1..20: mol_type = other DNA
tctccacatacttgaaacaa

SEQ ID NO: 7890 - DNA, 20 bp, synthetic construct
  source 1..20: mol_type = other DNA
ttctccacatacttgaaaca

SEQ ID NO: 7891 - DNA, 20 bp, synthetic construct
  source 1..20: mol_type = other DNA
tttctccacatacttgaaac

SEQ ID NO: 7892 - DNA, 20 bp, synthetic construct
  source 1..20: mol_type = other DNA
ttttctccacatacttgaaa

SEQ ID NO: 7893 - DNA, 20 bp, synthetic construct
  source 1..20: mol_type = other DNA
attttctccacatacttgaa

SEQ ID NO: 7894 - DNA, 20 bp, synthetic construct
  source 1..20: mol_type = other DNA
tattttctccacatacttga

SEQ ID NO: 7895 - DNA, 20 bp, synthetic construct
  source 1..20: mol_type = other DNA
ttattttctccacatacttg

SEQ ID NO: 7896 - DNA, 20 bp, synthetic construct
  source 1..20: mol_type = other DNA
tttattttctccacatactt

SEQ ID NO: 7897 - DNA, 20 bp, synthetic construct
  source 1..20: mol_type = other DNA
gtttattttctccacatact

SEQ ID NO: 7898 - DNA, 20 bp, synthetic construct
  source 1..20: mol_type = other DNA
agtttattttctccacatac

SEQ ID NO: 7899 - DNA, 20 bp, synthetic construct
  source 1..20: mol_type = other DNA
aagtttattttctccacata

SEQ ID NO: 7900 - DNA, 20 bp, synthetic construct
  source 1..20: mol_type = other DNA
aaagtttattttctccacat

SEQ ID NO: 7901 - DNA, 20 bp, synthetic construct
  source 1..20: mol_type = other DNA
aaaagtttattttctccaca

SEQ ID NO: 7902 - DNA, 20 bp, synthetic construct
  source 1..20: mol_type = other DNA
aaaaagtttattttctccac

SEQ ID NO: 7903 - DNA, 20 bp, synthetic construct
  source 1..20: mol_type = other DNA
taaaaagtttattttctcca

SEQ ID NO: 7904 - DNA, 20 bp, synthetic construct
  source 1..20: mol_type = other DNA
ttaaaaagtttattttctcc

SEQ ID NO: 7905 - DNA, 20 bp, synthetic construct
  source 1..20: mol_type = other DNA
cttaaaaagtttattttctc

SEQ ID NO: 7906 - DNA, 20 bp, synthetic construct
  source 1..20: mol_type = other DNA
acttaaaaagtttattttct

SEQ ID NO: 7907 - DNA, 20 bp, synthetic construct
  source 1..20: mol_type = other DNA
aacttaaaaagtttattttc

SEQ ID NO: 7908 - DNA, 20 bp, synthetic construct
  source 1..20: mol_type = other DNA
aaacttaaaaagtttatttt

SEQ ID NO: 7909 - DNA, 20 bp, synthetic construct
  source 1..20: mol_type = other DNA
caaacttaaaaagtttattt

SEQ ID NO: 7910 - DNA, 20 bp, synthetic construct
  source 1..20: mol_type = other DNA
ccaaacttaaaaagtttatt

SEQ ID NO: 7911 - DNA, 20 bp, synthetic construct
  source 1..20: mol_type = other DNA
cccaaacttaaaaagtttat

SEQ ID NO: 7912 - DNA, 20 bp, synthetic construct
  source 1..20: mol_type = other DNA
gcccaaacttaaaaagttta

SEQ ID NO: 7913 - DNA, 20 bp, synthetic construct
  source 1..20: mol_type = other DNA
ggcccaaacttaaaaagttt

SEQ ID NO: 7914 - DNA, 20 bp, synthetic construct
  source 1..20: mol_type = other DNA
tggcccaaacttaaaaagtt

SEQ ID NO: 7915 - DNA, 20 bp, synthetic construct
  source 1..20: mol_type = other DNA
ttggcccaaacttaaaaagt

SEQ ID NO: 7916 - DNA, 20 bp, synthetic construct
  source 1..20: mol_type = other DNA
tttggcccaaacttaaaaag

SEQ ID NO: 7917 - DNA, 20 bp, synthetic construct
  source 1..20: mol_type = other DNA
ttttggcccaaacttaaaaa

SEQ ID NO: 7918 - DNA, 20 bp, synthetic construct
  source 1..20: mol_type = other DNA
gttttggcccaaacttaaaa

SEQ ID NO: 7919 - DNA, 20 bp, synthetic construct
  source 1..20: mol_type = other DNA
agttttggcccaaacttaaa

SEQ ID NO: 7920 - DNA, 20 bp, synthetic construct
  source 1..20: mol_type = other DNA
aagttttggcccaaacttaa

SEQ ID NO: 7921 - DNA, 20 bp, synthetic construct
  source 1..20: mol_type = other DNA
caagttttggcccaaactta

SEQ ID NO: 7922 - DNA, 20 bp, synthetic construct
  source 1..20: mol_type = other DNA
gcaagttttggcccaaactt

SEQ ID NO: 7923 - DNA, 20 bp, synthetic construct
  source 1..20: mol_type = other DNA
agcaagttttggcccaaact

SEQ ID NO: 7924 - DNA, 20 bp, synthetic construct
  source 1..20: mol_type = other DNA
aagcaagttttggcccaaac

SEQ ID NO: 7925 - DNA, 20 bp, synthetic construct
  source 1..20: mol_type = other DNA
aaagcaagttttggcccaaa

SEQ ID NO: 7926 - DNA, 20 bp, synthetic construct
  source 1..20: mol_type = other DNA
caaagcaagttttggcccaa

SEQ ID NO: 7927 - DNA, 20 bp, synthetic construct
  source 1..20: mol_type = other DNA
ccaaagcaagttttggccca

SEQ ID NO: 7928 - DNA, 20 bp, synthetic construct
  source 1..20: mol_type = other DNA
accaaagcaagttttggccc

SEQ ID NO: 7929 - DNA, 20 bp, synthetic construct
  source 1..20: mol_type = other DNA
aaccaaagcaagttttggcc

SEQ ID NO: 7930 - DNA, 20 bp, synthetic construct
  source 1..20: mol_type = other DNA
aaaccaaagcaagttttggc

SEQ ID NO: 7931 - DNA, 20 bp, synthetic construct
  source 1..20: mol_type = other DNA
aaaaccaaagcaagttttgg

SEQ ID NO: 7932 - DNA, 20 bp, synthetic construct
  source 1..20: mol_type = other DNA
gaaaaccaaagcaagttttg

SEQ ID NO: 7933 - DNA, 20 bp, synthetic construct
  source 1..20: mol_type = other DNA
agaaaaccaaagcaagtttt

SEQ ID NO: 7934 - DNA, 20 bp, synthetic construct
  source 1..20: mol_type = other DNA
aagaaaaccaaagcaagttt

SEQ ID NO: 7935 - DNA, 20 bp, synthetic construct
  source 1..20: mol_type = other DNA
aaagaaaaccaaagcaagtt

SEQ ID NO: 7936 - DNA, 20 bp, synthetic construct
  source 1..20: mol_type = other DNA
aaaagaaaaccaaagcaagt

SEQ ID NO: 7937 - DNA, 20 bp, synthetic construct
  source 1..20: mol_type = other DNA
aaaaagaaaaccaaagcaag

SEQ ID NO: 7938 - DNA, 20 bp, synthetic construct
  source 1..20: mol_type = other DNA
gaaaaagaaaaccaaagcaa

SEQ ID NO: 7939 - DNA, 20 bp, synthetic construct
  source 1..20: mol_type = other DNA
agaaaaagaaaaccaaagca

SEQ ID NO: 7940 - DNA, 20 bp, synthetic construct
  source 1..20: mol_type = other DNA
aagaaaaagaaaaccaaagc

SEQ ID NO: 7941 - DNA, 20 bp, synthetic construct
  source 1..20: mol_type = other DNA
aaagaaaaagaaaaccaaag

SEQ ID NO: 7942 - DNA, 20 bp, synthetic construct
  source 1..20: mol_type = other DNA
aaaagaaaaagaaaaccaaa

SEQ ID NO: 7943 - DNA, 20 bp, synthetic construct
  source 1..20: mol_type = other DNA
aaaaagaaaaagaaaaccaa

SEQ ID NO: 7944 - DNA, 20 bp, synthetic construct
  source 1..20: mol_type = other DNA
gaaaaagaaaaagaaaacca

SEQ ID NO: 7945 - DNA, 20 bp, synthetic construct
  source 1..20: mol_type = other DNA
agaaaaagaaaaagaaaacc

SEQ ID NO: 7946 - DNA, 20 bp, synthetic construct
  source 1..20: mol_type = other DNA
aagaaaaagaaaaagaaaac

SEQ ID NO: 7947 - DNA, 20 bp, synthetic construct
  source 1..20: mol_type = other DNA
aaagaaaaagaaaaagaaaa

SEQ ID NO: 7948 - DNA, 20 bp, synthetic construct
  source 1..20: mol_type = other DNA
aaaagaaaaagaaaaagaaa

SEQ ID NO: 7949 - DNA, 20 bp, synthetic construct
  source 1..20: mol_type = other DNA
aaaaagaaaaagaaaaagaa

SEQ ID NO: 7950 - DNA, 20 bp, synthetic construct
  source 1..20: mol_type = other DNA
aaaaaagaaaaagaaaaaga

SEQ ID NO: 7951 - DNA, 20 bp, synthetic construct
  source 1..20: mol_type = other DNA
aaaaaaagaaaaagaaaaag

SEQ ID NO: 7952 - DNA, 20 bp, synthetic construct
  source 1..20: mol_type = other DNA
aaaaaaaagaaaaagaaaaa

SEQ ID NO: 7953 - DNA, 20 bp, synthetic construct
  source 1..20: mol_type = other DNA
aaaaaaaaagaaaaagaaaa

SEQ ID NO: 7954 - DNA, 20 bp, synthetic construct
  source 1..20: mol_type = other DNA
aaaaaaaaaagaaaaagaaa

SEQ ID NO: 7955 - DNA, 20 bp, synthetic construct
  source 1..20: mol_type = other DNA
aaaaaaaaaaagaaaaagaa

SEQ ID NO: 7956 - DNA, 20 bp, synthetic construct
  source 1..20: mol_type = other DNA
aaaaaaaaaaaagaaaaaga

SEQ ID NO: 7957 - DNA, 20 bp, synthetic construct
  source 1..20: mol_type = other DNA
aaaaaaaaaaaaagaaaaag

SEQ ID NO: 7958 - DNA, 20 bp, synthetic construct
  source 1..20: mol_type = other DNA
taaaaaaaaaaaaagaaaaa

SEQ ID NO: 7959 - DNA, 20 bp, synthetic construct
  source 1..20: mol_type = other DNA
ttaaaaaaaaaaaaagaaaa

SEQ ID NO: 7960 - DNA, 20 bp, synthetic construct
  source 1..20: mol_type = other DNA
cttaaaaaaaaaaaaagaaa

SEQ ID NO: 7961 - DNA, 20 bp, synthetic construct
  source 1..20: mol_type = other DNA
tcttaaaaaaaaaaaaagaa

SEQ ID NO: 7962 - DNA, 20 bp, synthetic construct
  source 1..20: mol_type = other DNA
ctcttaaaaaaaaaaaaaga

SEQ ID NO: 7963 - DNA, 20 bp, synthetic construct
  source 1..20: mol_type = other DNA
tctcttaaaaaaaaaaaaag

SEQ ID NO: 7964 - DNA, 20 bp, synthetic construct
  source 1..20: mol_type = other DNA
ttctcttaaaaaaaaaaaaa

SEQ ID NO: 7965 - DNA, 20 bp, synthetic construct
  source 1..20: mol_type = other DNA
tttctcttaaaaaaaaaaaa

SEQ ID NO: 7966 - DNA, 20 bp, synthetic construct
  source 1..20: mol_type = other DNA
ttttctcttaaaaaaaaaaa

SEQ ID NO: 7967 - DNA, 20 bp, synthetic construct
  source 1..20: mol_type = other DNA
tttttctcttaaaaaaaaaa

SEQ ID NO: 7968 - DNA, 20 bp, synthetic construct
  source 1..20: mol_type = other DNA
atttttctcttaaaaaaaaa

SEQ ID NO: 7969 - DNA, 20 bp, synthetic construct
  source 1..20: mol_type = other DNA
catttttctcttaaaaaaaa

SEQ ID NO: 7970 - DNA, 20 bp, synthetic construct
  source 1..20: mol_type = other DNA
acatttttctcttaaaaaaa

SEQ ID NO: 7971 - DNA, 20 bp, synthetic construct
  source 1..20: mol_type = other DNA
tacatttttctcttaaaaaa

SEQ ID NO: 7972 - DNA, 20 bp, synthetic construct
  source 1..20: mol_type = other DNA
ttacatttttctcttaaaaa

SEQ ID NO: 7973 - DNA, 20 bp, synthetic construct
  source 1..20: mol_type = other DNA
cttacatttttctcttaaaa

SEQ ID NO: 7974 - DNA, 20 bp, synthetic construct
  source 1..20: mol_type = other DNA
gcttacatttttctcttaaa

SEQ ID NO: 7975 - DNA, 20 bp, synthetic construct
  source 1..20: mol_type = other DNA
ggcttacatttttctcttaa

SEQ ID NO: 7976 - DNA, 20 bp, synthetic construct
  source 1..20: mol_type = other DNA
aggcttacatttttctctta

SEQ ID NO: 7977 - DNA, 20 bp, synthetic construct
  source 1..20: mol_type = other DNA
caggcttacatttttctctt

SEQ ID NO: 7978 - DNA, 20 bp, synthetic construct
  source 1..20: mol_type = other DNA
acaggcttacatttttctct

SEQ ID NO: 7979 - DNA, 20 bp, synthetic construct
  source 1..20: mol_type = other DNA
tacaggcttacatttttctc

SEQ ID NO: 7980 - DNA, 20 bp, synthetic construct
  source 1..20: mol_type = other DNA
ctacaggcttacatttttct

SEQ ID NO: 7981 - DNA, 20 bp, synthetic construct
  source 1..20: mol_type = other DNA
actacaggcttacatttttc

SEQ ID NO: 7982 - DNA, 20 bp, synthetic construct
  source 1..20: mol_type = other DNA
aactacaggcttacattttt

SEQ ID NO: 7983 - DNA, 20 bp, synthetic construct
  source 1..20: mol_type = other DNA
caactacaggcttacatttt

SEQ ID NO: 7984 - DNA, 20 bp, synthetic construct
  source 1..20: mol_type = other DNA
gcaactacaggcttacattt

SEQ ID NO: 7985 - DNA, 20 bp, synthetic construct
  source 1..20: mol_type = other DNA
agcaactacaggcttacatt

SEQ ID NO: 7986 - DNA, 20 bp, synthetic construct
  source 1..20: mol_type = other DNA
aagcaactacaggcttacat

SEQ ID NO: 7987 - DNA, 20 bp, synthetic construct
  source 1..20: mol_type = other DNA
taagcaactacaggcttaca

SEQ ID NO: 7988 - DNA, 20 bp, synthetic construct
  source 1..20: mol_type = other DNA
ttaagcaactacaggcttac

SEQ ID NO: 7989 - DNA, 20 bp, synthetic construct
  source 1..20: mol_type = other DNA
tttaagcaactacaggctta

SEQ ID NO: 7990 - DNA, 20 bp, synthetic construct
  source 1..20: mol_type = other DNA
ctttaagcaactacaggctt

SEQ ID NO: 7991 - DNA, 20 bp, synthetic construct
  source 1..20: mol_type = other DNA
tctttaagcaactacaggct

SEQ ID NO: 7992 - DNA, 20 bp, synthetic construct
  source 1..20: mol_type = other DNA
atctttaagcaactacaggc

SEQ ID NO: 7993 - DNA, 20 bp, synthetic construct
  source 1..20: mol_type = other DNA
aatctttaagcaactacagg

SEQ ID NO: 7994 - DNA, 20 bp, synthetic construct
  source 1..20: mol_type = other DNA
gaatctttaagcaactacag

SEQ ID NO: 7995 - DNA, 20 bp, synthetic construct
  source 1..20: mol_type = other DNA
ggaatctttaagcaactaca

SEQ ID NO: 7996 - DNA, 20 bp, synthetic construct
  source 1..20: mol_type = other DNA
tggaatctttaagcaactac

SEQ ID NO: 7997 - DNA, 20 bp, synthetic construct
  source 1..20: mol_type = other DNA
gtggaatctttaagcaacta

SEQ ID NO: 7998 - DNA, 20 bp, synthetic construct
  source 1..20: mol_type = other DNA
tgtggaatctttaagcaact

SEQ ID NO: 7999 - DNA, 20 bp, synthetic construct
  source 1..20: mol_type = other DNA
atgtggaatctttaagcaac

SEQ ID NO: 8000 - DNA, 20 bp, synthetic construct
  source 1..20: mol_type = other DNA
aatgtggaatctttaagcaa

SEQ ID NO: 8001 - DNA, 20 bp, synthetic construct
  source 1..20: mol_type = other DNA
gaatgtggaatctttaagca

SEQ ID NO: 8002 - DNA, 20 bp, synthetic construct
  source 1..20: mol_type = other DNA
agaatgtggaatctttaagc

SEQ ID NO: 8003 - DNA, 20 bp, synthetic construct
  source 1..20: mol_type = other DNA
cagaatgtggaatctttaag

SEQ ID NO: 8004 - DNA, 20 bp, synthetic construct
  source 1..20: mol_type = other DNA
tcagaatgtggaatctttaa

SEQ ID NO: 8005 - DNA, 20 bp, synthetic construct
  source 1..20: mol_type = other DNA
ttcagaatgtggaatcttta

SEQ ID NO: 8006 - DNA, 20 bp, synthetic construct
  source 1..20: mol_type = other DNA
tttcagaatgtggaatcttt

SEQ ID NO: 8007 - DNA, 20 bp, synthetic construct
  source 1..20: mol_type = other DNA
gtttcagaatgtggaatctt

SEQ ID NO: 8008 - DNA, 20 bp, synthetic construct
  source 1..20: mol_type = other DNA
tgtttcagaatgtggaatct

SEQ ID NO: 8009 - DNA, 20 bp, synthetic construct
  source 1..20: mol_type = other DNA
ctgtttcagaatgtggaatc

SEQ ID NO: 8010 - DNA, 20 bp, synthetic construct
  source 1..20: mol_type = other DNA
actgtttcagaatgtggaat

SEQ ID NO: 8011 - DNA, 20 bp, synthetic construct
  source 1..20: mol_type = other DNA
cactgtttcagaatgtggaa

SEQ ID NO: 8012 - DNA, 20 bp, synthetic construct
  source 1..20: mol_type = other DNA
tcactgtttcagaatgtgga

SEQ ID NO: 8013 - DNA, 20 bp, synthetic construct
  source 1..20: mol_type = other DNA
ttcactgtttcagaatgtgg

SEQ ID NO: 8014 - DNA, 20 bp, synthetic construct
  source 1..20: mol_type = other DNA
tttcactgtttcagaatgtg

SEQ ID NO: 8015 - DNA, 20 bp, synthetic construct
  source 1..20: mol_type = other DNA
ttttcactgtttcagaatgt

SEQ ID NO: 8016 - DNA, 20 bp, synthetic construct
  source 1..20: mol_type = other DNA
gttttcactgtttcagaatg

SEQ ID NO: 8017 - DNA, 20 bp, synthetic construct
  source 1..20: mol_type = other DNA
tgttttcactgtttcagaat

SEQ ID NO: 8018 - DNA, 20 bp, synthetic construct
  source 1..20: mol_type = other DNA
atgttttcactgtttcagaa

SEQ ID NO: 8019 - DNA, 20 bp, synthetic construct
  source 1..20: mol_type = other DNA
catgttttcactgtttcaga

SEQ ID NO: 8020 - DNA, 20 bp, synthetic construct
  source 1..20: mol_type = other DNA
ccatgttttcactgtttcag

SEQ ID NO: 8021 - DNA, 20 bp, synthetic construct
  source 1..20: mol_type = other DNA
cccatgttttcactgtttca

SEQ ID NO: 8022 - DNA, 20 bp, synthetic construct
  source 1..20: mol_type = other DNA
tcccatgttttcactgtttc

SEQ ID NO: 8023 - DNA, 20 bp, synthetic construct
  source 1..20: mol_type = other DNA
atcccatgttttcactgttt

SEQ ID NO: 8024 - DNA, 20 bp, synthetic construct
  source 1..20: mol_type = other DNA
gatcccatgttttcactgtt

SEQ ID NO: 8025 - DNA, 20 bp, synthetic construct
  source 1..20: mol_type = other DNA
tgatcccatgttttcactgt

SEQ ID NO: 8026 - DNA, 20 bp, synthetic construct
  source 1..20: mol_type = other DNA
ctgatcccatgttttcactg

SEQ ID NO: 8027 - DNA, 20 bp, synthetic construct
  source 1..20: mol_type = other DNA
actgatcccatgttttcact

SEQ ID NO: 8028 - DNA, 20 bp, synthetic construct
  source 1..20: mol_type = other DNA
gactgatcccatgttttcac

SEQ ID NO: 8029 - DNA, 20 bp, synthetic construct
  source 1..20: mol_type = other DNA
tgactgatcccatgttttca

SEQ ID NO: 8030 - DNA, 20 bp, synthetic construct
  source 1..20: mol_type = other DNA
atgactgatcccatgttttc

SEQ ID NO: 8031 - DNA, 20 bp, synthetic construct
  source 1..20: mol_type = other DNA
catgactgatcccatgtttt

SEQ ID NO: 8032 - DNA, 20 bp, synthetic construct
  source 1..20: mol_type = other DNA
ccatgactgatcccatgttt

SEQ ID NO: 8033 - DNA, 20 bp, synthetic construct
  source 1..20: mol_type = other DNA
accatgactgatcccatgtt

SEQ ID NO: 8034 - DNA, 20 bp, synthetic construct
  source 1..20: mol_type = other DNA
caccatgactgatcccatgt

SEQ ID NO: 8035 - DNA, 20 bp, synthetic construct
  source 1..20: mol_type = other DNA
acaccatgactgatcccatg

SEQ ID NO: 8036 - DNA, 20 bp, synthetic construct
  source 1..20: mol_type = other DNA
aacaccatgactgatcccat

SEQ ID NO: 8037 - DNA, 20 bp, synthetic construct
  source 1..20: mol_type = other DNA
gaacaccatgactgatccca

SEQ ID NO: 8038 - DNA, 20 bp, synthetic construct
  source 1..20: mol_type = other DNA
ggaacaccatgactgatccc

SEQ ID NO: 8039 - DNA, 20 bp, synthetic construct
  source 1..20: mol_type = other DNA
aggaacaccatgactgatcc

SEQ ID NO: 8040 - DNA, 20 bp, synthetic construct
  source 1..20: mol_type = other DNA
aaggaacaccatgactgatc

SEQ ID NO: 8041 - DNA, 20 bp, synthetic construct
  source 1..20: mol_type = other DNA
aaaggaacaccatgactgat

SEQ ID NO: 8042 - DNA, 20 bp, synthetic construct
  source 1..20: mol_type = other DNA
aaaaggaacaccatgactga

SEQ ID NO: 8043 - DNA, 20 bp, synthetic construct
  source 1..20: mol_type = other DNA
aaaaaggaacaccatgactg

SEQ ID NO: 8044 - DNA, 20 bp, synthetic construct
  source 1..20: mol_type = other DNA
aaaaaaggaacaccatgact

SEQ ID NO: 8045 - DNA, 20 bp, synthetic construct
  source 1..20: mol_type = other DNA
aaaaaaaggaacaccatgac

SEQ ID NO: 8046 - DNA, 20 bp, synthetic construct
  source 1..20: mol_type = other DNA
caaaaaaaggaacaccatga

SEQ ID NO: 8047 - DNA, 20 bp, synthetic construct
  source 1..20: mol_type = other DNA
ccaaaaaaaggaacaccatg

SEQ ID NO: 8048 - DNA, 20 bp, synthetic construct
  source 1..20: mol_type = other DNA
accaaaaaaaggaacaccat

SEQ ID NO: 8049 - DNA, 20 bp, synthetic construct
  source 1..20: mol_type = other DNA
aaccaaaaaaaggaacacca

SEQ ID NO: 8050 - DNA, 20 bp, synthetic construct
  source 1..20: mol_type = other DNA
taaccaaaaaaaggaacacc

SEQ ID NO: 8051 - DNA, 20 bp, synthetic construct
  source 1..20: mol_type = other DNA
ttaaccaaaaaaaggaacac

SEQ ID NO: 8052 - DNA, 20 bp, synthetic construct
  source 1..20: mol_type = other DNA
tttaaccaaaaaaaggaaca

SEQ ID NO: 8053 - DNA, 20 bp, synthetic construct
  source 1..20: mol_type = other DNA
atttaaccaaaaaaaggaac

SEQ ID NO: 8054 - DNA, 20 bp, synthetic construct
  source 1..20: mol_type = other DNA
catttaaccaaaaaaaggaa

SEQ ID NO: 8055 - DNA, 20 bp, synthetic construct
  source 1..20: mol_type = other DNA
acatttaaccaaaaaaagga

SEQ ID NO: 8056 - DNA, 20 bp, synthetic construct
  source 1..20: mol_type = other DNA
tacatttaaccaaaaaaagg

SEQ ID NO: 8057 - DNA, 20 bp, synthetic construct
  source 1..20: mol_type = other DNA
ttacatttaaccaaaaaaag

SEQ ID NO: 8058 - DNA, 20 bp, synthetic construct
  source 1..20: mol_type = other DNA
tttacatttaaccaaaaaaa

SEQ ID NO: 8059 - DNA, 20 bp, synthetic construct
  source 1..20: mol_type = other DNA
gtttacatttaaccaaaaaa

SEQ ID NO: 8060 - DNA, 20 bp, synthetic construct
  source 1..20: mol_type = other DNA
agtttacatttaaccaaaaa

SEQ ID NO: 8061 - DNA, 20 bp, synthetic construct
  source 1..20: mol_type = other DNA
aagtttacatttaaccaaaa

SEQ ID NO: 8062 - DNA, 20 bp, synthetic construct
  source 1..20: mol_type = other DNA
caagtttacatttaaccaaa

SEQ ID NO: 8063 - DNA, 20 bp, synthetic construct
  source 1..20: mol_type = other DNA
acaagtttacatttaaccaa

SEQ ID NO: 8064 - DNA, 20 bp, synthetic construct
  source 1..20: mol_type = other DNA
tacaagtttacatttaacca

SEQ ID NO: 8065 - DNA, 20 bp, synthetic construct
  source 1..20: mol_type = other DNA
atacaagtttacatttaacc

SEQ ID NO: 8066 - DNA, 20 bp, synthetic construct
  source 1..20: mol_type = other DNA
aatacaagtttacatttaac

SEQ ID NO: 8067 - DNA, 20 bp, synthetic construct
  source 1..20: mol_type = other DNA
aaatacaagtttacatttaa

SEQ ID NO: 8068 - DNA, 20 bp, synthetic construct
  source 1..20: mol_type = other DNA
aaaatacaagtttacattta

SEQ ID NO: 8069 - DNA, 20 bp, synthetic construct
  source 1..20: mol_type = other DNA
gaaaatacaagtttacattt

SEQ ID NO: 8070 - DNA, 20 bp, synthetic construct
  source 1..20: mol_type = other DNA
tgaaaatacaagtttacatt

SEQ ID NO: 8071 - DNA, 20 bp, synthetic construct
  source 1..20: mol_type = other DNA
ctgaaaatacaagtttacat

SEQ ID NO: 8072 - DNA, 20 bp, synthetic construct
  source 1..20: mol_type = other DNA
actgaaaatacaagtttaca

SEQ ID NO: 8073 - DNA, 20 bp, synthetic construct
  source 1..20: mol_type = other DNA
cactgaaaatacaagtttac

SEQ ID NO: 8074 - DNA, 20 bp, synthetic construct
  source 1..20: mol_type = other DNA
acactgaaaatacaagttta

SEQ ID NO: 8075 - DNA, 20 bp, synthetic construct
  source 1..20: mol_type = other DNA
aacactgaaaatacaagttt

SEQ ID NO: 8076 - DNA, 20 bp, synthetic construct
  source 1..20: mol_type = other DNA
taacactgaaaatacaagtt

SEQ ID NO: 8077 - DNA, 20 bp, synthetic construct
  source 1..20: mol_type = other DNA
gtaacactgaaaatacaagt

SEQ ID NO: 8078 - DNA, 20 bp, synthetic construct
  source 1..20: mol_type = other DNA
agtaacactgaaaatacaag

SEQ ID NO: 8079 - DNA, 20 bp, synthetic construct
  source 1..20: mol_type = other DNA
gagtaacactgaaaatacaa

SEQ ID NO: 8080 - DNA, 20 bp, synthetic construct
  source 1..20: mol_type = other DNA
agagtaacactgaaaataca

SEQ ID NO: 8081 - DNA, 20 bp, synthetic construct
  source 1..20: mol_type = other DNA
tagagtaacactgaaaatac

SEQ ID NO: 8082 - DNA, 20 bp, synthetic construct
  source 1..20: mol_type = other DNA
ttagagtaacactgaaaata

SEQ ID NO: 8083 - DNA, 20 bp, synthetic construct
  source 1..20: mol_type = other DNA
attagagtaacactgaaaat

SEQ ID NO: 8084 - DNA, 20 bp, synthetic construct
  source 1..20: mol_type = other DNA
aattagagtaacactgaaaa

SEQ ID NO: 8085 - DNA, 20 bp, synthetic construct
  source 1..20: mol_type = other DNA
taattagagtaacactgaaa

SEQ ID NO: 8086 - DNA, 20 bp, synthetic construct
  source 1..20: mol_type = other DNA
ctaattagagtaacactgaa

SEQ ID NO: 8087 - DNA, 20 bp, synthetic construct
  source 1..20: mol_type = other DNA
gctaattagagtaacactga

SEQ ID NO: 8088 - DNA, 20 bp, synthetic construct
  source 1..20: mol_type = other DNA
tgctaattagagtaacactg

SEQ ID NO: 8089 - DNA, 20 bp, synthetic construct
  source 1..20: mol_type = other DNA
ttgctaattagagtaacact

SEQ ID NO: 8090 - DNA, 20 bp, synthetic construct
  source 1..20: mol_type = other DNA
attgctaattagagtaacac

SEQ ID NO: 8091 - DNA, 20 bp, synthetic construct
  source 1..20: mol_type = other DNA
cattgctaattagagtaaca

SEQ ID NO: 8092 - DNA, 20 bp, synthetic construct
  source 1..20: mol_type = other DNA
ccattgctaattagagtaac

SEQ ID NO: 8093 - DNA, 20 bp, synthetic construct
  source 1..20: mol_type = other DNA
accattgctaattagagtaa

SEQ ID NO: 8094 - DNA, 20 bp, synthetic construct
  source 1..20: mol_type = other DNA
aaccattgctaattagagta

SEQ ID NO: 8095 - DNA, 20 bp, synthetic construct
  source 1..20: mol_type = other DNA
aaaccattgctaattagagt

SEQ ID NO: 8096 - DNA, 20 bp, synthetic construct
  source 1..20: mol_type = other DNA
taaaccattgctaattagag

SEQ ID NO: 8097 - DNA, 20 bp, synthetic construct
  source 1..20: mol_type = other DNA
ataaaccattgctaattaga

SEQ ID NO: 8098 - DNA, 20 bp, synthetic construct
  source 1..20: mol_type = other DNA
tataaaccattgctaattag

SEQ ID NO: 8099 - DNA, 20 bp, synthetic construct
  source 1..20: mol_type = other DNA
gtataaaccattgctaatta

SEQ ID NO: 8100 - DNA, 20 bp, synthetic construct
  source 1..20: mol_type = other DNA
agtataaaccattgctaatt

SEQ ID NO: 8101 - DNA, 20 bp, synthetic construct
  source 1..20: mol_type = other DNA
aagtataaaccattgctaat

SEQ ID NO: 8102 - DNA, 20 bp, synthetic construct
  source 1..20: mol_type = other DNA
gaagtataaaccattgctaa

SEQ ID NO: 8103 - DNA, 20 bp, synthetic construct
  source 1..20: mol_type = other DNA
agaagtataaaccattgcta

SEQ ID NO: 8104 - DNA, 20 bp, synthetic construct
  source 1..20: mol_type = other DNA
tagaagtataaaccattgct

SEQ ID NO: 8105 - DNA, 20 bp, synthetic construct
  source 1..20: mol_type = other DNA
gtagaagtataaaccattgc

SEQ ID NO: 8106 - DNA, 20 bp, synthetic construct
  source 1..20: mol_type = other DNA
tgtagaagtataaaccattg

SEQ ID NO: 8107 - DNA, 20 bp, synthetic construct
  source 1..20: mol_type = other DNA
atgtagaagtataaaccatt

SEQ ID NO: 8108 - DNA, 20 bp, synthetic construct
  source 1..20: mol_type = other DNA
tatgtagaagtataaaccat

SEQ ID NO: 8109 - DNA, 20 bp, synthetic construct
  source 1..20: mol_type = other DNA
ttatgtagaagtataaacca

SEQ ID NO: 8110 - DNA, 20 bp, synthetic construct
  source 1..20: mol_type = other DNA
cttatgtagaagtataaacc

SEQ ID NO: 8111 - DNA, 20 bp, synthetic construct
  source 1..20: mol_type = other DNA
ccttatgtagaagtataaac

SEQ ID NO: 8112 - DNA, 20 bp, synthetic construct
  source 1..20: mol_type = other DNA
cccttatgtagaagtataaa

SEQ ID NO: 8113 - DNA, 20 bp, synthetic construct
  source 1..20: mol_type = other DNA
tcccttatgtagaagtataa

SEQ ID NO: 8114 - DNA, 20 bp, synthetic construct
  source 1..20: mol_type = other DNA
atcccttatgtagaagtata

SEQ ID NO: 8115 - DNA, 20 bp, synthetic construct
  source 1..20: mol_type = other DNA
catcccttatgtagaagtat

SEQ ID NO: 8116 - DNA, 20 bp, synthetic construct
  source 1..20: mol_type = other DNA
acatcccttatgtagaagta

SEQ ID NO: 8117 - DNA, 20 bp, synthetic construct
  source 1..20: mol_type = other DNA
aacatcccttatgtagaagt

SEQ ID NO: 8118 - DNA, 20 bp, synthetic construct
  source 1..20: mol_type = other DNA
taacatcccttatgtagaag

SEQ ID NO: 8119 - DNA, 20 bp, synthetic construct
  source 1..20: mol_type = other DNA
ttaacatcccttatgtagaa

SEQ ID NO: 8120 - DNA, 20 bp, synthetic construct
  source 1..20: mol_type = other DNA
gttaacatcccttatgtaga

SEQ ID NO: 8121 - DNA, 20 bp, synthetic construct
  source 1..20: mol_type = other DNA
agttaacatcccttatgtag

SEQ ID NO: 8122 - DNA, 20 bp, synthetic construct
  source 1..20: mol_type = other DNA
gagttaacatcccttatgta

SEQ ID NO: 8123 - DNA, 20 bp, synthetic construct
  source 1..20: mol_type = other DNA
tgagttaacatcccttatgt

SEQ ID NO: 8124 - DNA, 20 bp, synthetic construct
  source 1..20: mol_type = other DNA
atgagttaacatcccttatg

SEQ ID NO: 8125 - DNA, 20 bp, synthetic construct
  source 1..20: mol_type = other DNA
tatgagttaacatcccttat

SEQ ID NO: 8126 - DNA, 20 bp, synthetic construct
  source 1..20: mol_type = other DNA
atatgagttaacatccctta

SEQ ID NO: 8127 - DNA, 20 bp, synthetic construct
  source 1..20: mol_type = other DNA
aatatgagttaacatccctt

SEQ ID NO: 8128 - DNA, 20 bp, synthetic construct
  source 1..20: mol_type = other DNA
caatatgagttaacatccct

SEQ ID NO: 8129 - DNA, 20 bp, synthetic construct
  source 1..20: mol_type = other DNA
acaatatgagttaacatccc

SEQ ID NO: 8130 - DNA, 20 bp, synthetic construct
  source 1..20: mol_type = other DNA
tacaatatgagttaacatcc

SEQ ID NO: 8131 - DNA, 20 bp, synthetic construct
  source 1..20: mol_type = other DNA
ctacaatatgagttaacatc

SEQ ID NO: 8132 - DNA, 20 bp, synthetic construct
  source 1..20: mol_type = other DNA
gctacaatatgagttaacat

SEQ ID NO: 8133 - DNA, 20 bp, synthetic construct
  source 1..20: mol_type = other DNA
agctacaatatgagttaaca

SEQ ID NO: 8134 - DNA, 20 bp, synthetic construct
  source 1..20: mol_type = other DNA
tagctacaatatgagttaac

SEQ ID NO: 8135 - DNA, 20 bp, synthetic construct
  source 1..20: mol_type = other DNA
atagctacaatatgagttaa

SEQ ID NO: 8136 - DNA, 20 bp, synthetic construct
  source 1..20: mol_type = other DNA
aatagctacaatatgagtta

SEQ ID NO: 8137 - DNA, 20 bp, synthetic construct
  source 1..20: mol_type = other DNA
aaatagctacaatatgagtt

SEQ ID NO: 8138 - DNA, 20 bp, synthetic construct
  source 1..20: mol_type = other DNA
taaatagctacaatatgagt

SEQ ID NO: 8139 - DNA, 20 bp, synthetic construct
  source 1..20: mol_type = other DNA
ttaaatagctacaatatgag

SEQ ID NO: 8140 - DNA, 20 bp, synthetic construct
  source 1..20: mol_type = other DNA
attaaatagctacaatatga

SEQ ID NO: 8141 - DNA, 20 bp, synthetic construct
  source 1..20: mol_type = other DNA
tattaaatagctacaatatg

SEQ ID NO: 8142 - DNA, 20 bp, synthetic construct
  source 1..20: mol_type = other DNA
ctattaaatagctacaatat

SEQ ID NO: 8143 - DNA, 20 bp, synthetic construct
  source 1..20: mol_type = other DNA
gctattaaatagctacaata

SEQ ID NO: 8144 - DNA, 20 bp, synthetic construct
  source 1..20: mol_type = other DNA
ggctattaaatagctacaat

SEQ ID NO: 8145 - DNA, 20 bp, synthetic construct
  source 1..20: mol_type = other DNA
tggctattaaatagctacaa

SEQ ID NO: 8146 - DNA, 20 bp, synthetic construct
  source 1..20: mol_type = other DNA
atggctattaaatagctaca

SEQ ID NO: 8147 - DNA, 20 bp, synthetic construct
  source 1..20: mol_type = other DNA
tatggctattaaatagctac

SEQ ID NO: 8148 - DNA, 20 bp, synthetic construct
  source 1..20: mol_type = other DNA
atatggctattaaatagcta

SEQ ID NO: 8149 - DNA, 20 bp, synthetic construct
  source 1..20: mol_type = other DNA
tatatggctattaaatagct

SEQ ID NO: 8150 - DNA, 20 bp, synthetic construct
  source 1..20: mol_type = other DNA
atatatggctattaaatagc

SEQ ID NO: 8151 - DNA, 20 bp, synthetic construct
  source 1..20: mol_type = other DNA
aatatatggctattaaatag

SEQ ID NO: 8152 - DNA, 20 bp, synthetic construct
  source 1..20: mol_type = other DNA
aaatatatggctattaaata

SEQ ID NO: 8153 - DNA, 20 bp, synthetic construct
  source 1..20: mol_type = other DNA
aaaatatatggctattaaat

SEQ ID NO: 8154 - DNA, 20 bp, synthetic construct
  source 1..20: mol_type = other DNA
caaaatatatggctattaaa

SEQ ID NO: 8155 - DNA, 20 bp, synthetic construct
  source 1..20: mol_type = other DNA
tcaaaatatatggctattaa

SEQ ID NO: 8156 - DNA, 20 bp, synthetic construct
  source 1..20: mol_type = other DNA
gtcaaaatatatggctatta

SEQ ID NO: 8157 - DNA, 20 bp, synthetic construct
  source 1..20: mol_type = other DNA
agtcaaaatatatggctatt

SEQ ID NO: 8158 - DNA, 20 bp, synthetic construct
  source 1..20: mol_type = other DNA
aagtcaaaatatatggctat

SEQ ID NO: 8159 - DNA, 20 bp, synthetic construct
  source 1..20: mol_type = other DNA
taagtcaaaatatatggcta

SEQ ID NO: 8160 - DNA, 20 bp, synthetic construct
  source 1..20: mol_type = other DNA
ttaagtcaaaatatatggct

SEQ ID NO: 8161 - DNA, 20 bp, synthetic construct
  source 1..20: mol_type = other DNA
tttaagtcaaaatatatggc

SEQ ID NO: 8162 - DNA, 20 bp, synthetic construct
  source 1..20: mol_type = other DNA
ctttaagtcaaaatatatgg

SEQ ID NO: 8163 - DNA, 20 bp, synthetic construct
  source 1..20: mol_type = other DNA
cctttaagtcaaaatatatg

SEQ ID NO: 8164 - DNA, 20 bp, synthetic construct
  source 1..20: mol_type = other DNA
tcctttaagtcaaaatatat

SEQ ID NO: 8165 - DNA, 20 bp, synthetic construct
  source 1..20: mol_type = other DNA
ctcctttaagtcaaaatata

SEQ ID NO: 8166 - DNA, 20 bp, synthetic construct
  source 1..20: mol_type = other DNA
cctcctttaagtcaaaatat

SEQ ID NO: 8167 - DNA, 20 bp, synthetic construct
  source 1..20: mol_type = other DNA
tcctcctttaagtcaaaata

SEQ ID NO: 8168 - DNA, 20 bp, synthetic construct
  source 1..20: mol_type = other DNA
atcctcctttaagtcaaaat

SEQ ID NO: 8169 - DNA, 20 bp, synthetic construct
  source 1..20: mol_type = other DNA
gatcctcctttaagtcaaaa

SEQ ID NO: 8170 - DNA, 20 bp, synthetic construct
  source 1..20: mol_type = other DNA
agatcctcctttaagtcaaa

SEQ ID NO: 8171 - DNA, 20 bp, synthetic construct
  source 1..20: mol_type = other DNA
gagatcctcctttaagtcaa

SEQ ID NO: 8172 - DNA, 20 bp, synthetic construct
  source 1..20: mol_type = other DNA
tgagatcctcctttaagtca

SEQ ID NO: 8173 - DNA, 20 bp, synthetic construct
  source 1..20: mol_type = other DNA
ttgagatcctcctttaagtc

SEQ ID NO: 8174 - DNA, 20 bp, synthetic construct
  source 1..20: mol_type = other DNA
cttgagatcctcctttaagt

SEQ ID NO: 8175 - DNA, 20 bp, synthetic construct
  source 1..20: mol_type = other DNA
ccttgagatcctcctttaag

SEQ ID NO: 8176 - DNA, 20 bp, synthetic construct
  source 1..20: mol_type = other DNA
gccttgagatcctcctttaa

SEQ ID NO: 8177 - DNA, 20 bp, synthetic construct
  source 1..20: mol_type = other DNA
ggccttgagatcctccttta

SEQ ID NO: 8178 - DNA, 20 bp, synthetic construct
  source 1..20: mol_type = other DNA
tggccttgagatcctccttt

SEQ ID NO: 8179 - DNA, 20 bp, synthetic construct
  source 1..20: mol_type = other DNA
ctggccttgagatcctcctt

SEQ ID NO: 8180 - DNA, 20 bp, synthetic construct
  source 1..20: mol_type = other DNA
cctggccttgagatcctcct

SEQ ID NO: 8181 - DNA, 20 bp, synthetic construct
  source 1..20: mol_type = other DNA
gcctggccttgagatcctcc

SEQ ID NO: 8182 - DNA, 20 bp, synthetic construct
  source 1..20: mol_type = other DNA
cgcctggccttgagatcctc

SEQ ID NO: 8183 - DNA, 20 bp, synthetic construct
  source 1..20: mol_type = other DNA
gcgcctggccttgagatcct

SEQ ID NO: 8184 - DNA, 20 bp, synthetic construct
  source 1..20: mol_type = other DNA
cgcgcctggccttgagatcc

SEQ ID NO: 8185 - DNA, 20 bp, synthetic construct
  source 1..20: mol_type = other DNA
ccgcgcctggccttgagatc

SEQ ID NO: 8186 - DNA, 20 bp, synthetic construct
  source 1..20: mol_type = other DNA
accgcgcctggccttgagat

SEQ ID NO: 8187 - DNA, 20 bp, synthetic construct
  source 1..20: mol_type = other DNA
caccgcgcctggccttgaga

SEQ ID NO: 8188 - DNA, 20 bp, synthetic construct
  source 1..20: mol_type = other DNA
ccaccgcgcctggccttgag

SEQ ID NO: 8189 - DNA, 20 bp, synthetic construct
  source 1..20: mol_type = other DNA
gccaccgcgcctggccttga

SEQ ID NO: 8190 - DNA, 20 bp, synthetic construct
  source 1..20: mol_type = other DNA
agccaccgcgcctggccttg

SEQ ID NO: 8191 - DNA, 20 bp, synthetic construct
  source 1..20: mol_type = other DNA
gagccaccgcgcctggcctt

SEQ ID NO: 8192 - DNA, 20 bp, synthetic construct
  source 1..20: mol_type = other DNA
tgagccaccgcgcctggcct

SEQ ID NO: 8193 - DNA, 20 bp, synthetic construct
  source 1..20: mol_type = other DNA
atgagccaccgcgcctggcc

SEQ ID NO: 8194 - DNA, 20 bp, synthetic construct
  source 1..20: mol_type = other DNA
tatgagccaccgcgcctggc

SEQ ID NO: 8195 - DNA, 20 bp, synthetic construct
  source 1..20: mol_type = other DNA
gtatgagccaccgcgcctgg

SEQ ID NO: 8196 - DNA, 20 bp, synthetic construct
  source 1..20: mol_type = other DNA
ggtatgagccaccgcgcctg

SEQ ID NO: 8197 - DNA, 20 bp, synthetic construct
  source 1..20: mol_type = other DNA
aggtatgagccaccgcgcct

SEQ ID NO: 8198 - DNA, 20 bp, synthetic construct
  source 1..20: mol_type = other DNA
caggtatgagccaccgcgcc

SEQ ID NO: 8199 - DNA, 20 bp, synthetic construct
  source 1..20: mol_type = other DNA
acaggtatgagccaccgcgc

SEQ ID NO: 8200 - DNA, 20 bp, synthetic construct
  source 1..20: mol_type = other DNA
tacaggtatgagccaccgcg

SEQ ID NO: 8201 - DNA, 20 bp, synthetic construct
  source 1..20: mol_type = other DNA
ttacaggtatgagccaccgc

SEQ ID NO: 8202 - DNA, 20 bp, synthetic construct
  source 1..20: mol_type = other DNA
attacaggtatgagccaccg

SEQ ID NO: 8203 - DNA, 20 bp, synthetic construct
  source 1..20: mol_type = other DNA
gattacaggtatgagccacc

SEQ ID NO: 8204 - DNA, 20 bp, synthetic construct
  source 1..20: mol_type = other DNA
ggattacaggtatgagccac

SEQ ID NO: 8205 - DNA, 20 bp, synthetic construct
  source 1..20: mol_type = other DNA
gggattacaggtatgagcca

SEQ ID NO: 8206 - DNA, 20 bp, synthetic construct
  source 1..20: mol_type = other DNA
tgggattacaggtatgagcc

SEQ ID NO: 8207 - DNA, 20 bp, synthetic construct
  source 1..20: mol_type = other DNA
ctgggattacaggtatgagc

SEQ ID NO: 8208 - DNA, 20 bp, synthetic construct
  source 1..20: mol_type = other DNA
gctgggattacaggtatgag

SEQ ID NO: 8209 - DNA, 20 bp, synthetic construct
  source 1..20: mol_type = other DNA
tgctgggattacaggtatga

SEQ ID NO: 8210 - DNA, 20 bp, synthetic construct
  source 1..20: mol_type = other DNA
gtgctgggattacaggtatg

SEQ ID NO: 8211 - DNA, 20 bp, synthetic construct
  source 1..20: mol_type = other DNA
agtgctgggattacaggtat

SEQ ID NO: 8212 - DNA, 20 bp, synthetic construct
  source 1..20: mol_type = other DNA
aagtgctgggattacaggta

SEQ ID NO: 8213 - DNA, 20 bp, synthetic construct
  source 1..20: mol_type = other DNA
aaagtgctgggattacaggt

SEQ ID NO: 8214 - DNA, 20 bp, synthetic construct
  source 1..20: mol_type = other DNA
taaagtgctgggattacagg

SEQ ID NO: 8215 - DNA, 20 bp, synthetic construct
  source 1..20: mol_type = other DNA
ctaaagtgctgggattacag

SEQ ID NO: 8216 - DNA, 20 bp, synthetic construct
  source 1..20: mol_type = other DNA
cctaaagtgctgggattaca

SEQ ID NO: 8217 - DNA, 20 bp, synthetic construct
  source 1..20: mol_type = other DNA
tcctaaagtgctgggattac

SEQ ID NO: 8218 - DNA, 20 bp, synthetic construct
  source 1..20: mol_type = other DNA
ctcctaaagtgctgggatta

SEQ ID NO: 8219 - DNA, 20 bp, synthetic construct
  source 1..20: mol_type = other DNA
cctcctaaagtgctgggatt

SEQ ID NO: 8220 - DNA, 20 bp, synthetic construct
  source 1..20: mol_type = other DNA
gcctcctaaagtgctgggat

SEQ ID NO: 8221 - DNA, 20 bp, synthetic construct
  source 1..20: mol_type = other DNA
agcctcctaaagtgctggga

SEQ ID NO: 8222 - DNA, 20 bp, synthetic construct
  source 1..20: mol_type = other DNA
cagcctcctaaagtgctggg

SEQ ID NO: 8223 - DNA, 20 bp, synthetic construct
  source 1..20: mol_type = other DNA
tcagcctcctaaagtgctgg

SEQ ID NO: 8224 - DNA, 20 bp, synthetic construct
  source 1..20: mol_type = other DNA
ctcagcctcctaaagtgctg

SEQ ID NO: 8225 - DNA, 20 bp, synthetic construct
  source 1..20: mol_type = other DNA
cctcagcctcctaaagtgct

SEQ ID NO: 8226 - DNA, 20 bp, synthetic construct
  source 1..20: mol_type = other DNA
gcctcagcctcctaaagtgc

SEQ ID NO: 8227 - DNA, 20 bp, synthetic construct
  source 1..20: mol_type = other DNA
cgcctcagcctcctaaagtg

SEQ ID NO: 8228 - DNA, 20 bp, synthetic construct
  source 1..20: mol_type = other DNA
ccgcctcagcctcctaaagt

SEQ ID NO: 8229 - DNA, 20 bp, synthetic construct
  source 1..20: mol_type = other DNA
cccgcctcagcctcctaaag

SEQ ID NO: 8230 - DNA, 20 bp, synthetic construct
  source 1..20: mol_type = other DNA
acccgcctcagcctcctaaa

SEQ ID NO: 8231 - DNA, 20 bp, synthetic construct
  source 1..20: mol_type = other DNA
cacccgcctcagcctcctaa

SEQ ID NO: 8232 - DNA, 20 bp, synthetic construct
  source 1..20: mol_type = other DNA
ccacccgcctcagcctccta

SEQ ID NO: 8233 - DNA, 20 bp, synthetic construct
  source 1..20: mol_type = other DNA
tccacccgcctcagcctcct

SEQ ID NO: 8234 - DNA, 20 bp, synthetic construct
  source 1..20: mol_type = other DNA
atccacccgcctcagcctcc

SEQ ID NO: 8235 - DNA, 20 bp, synthetic construct
  source 1..20: mol_type = other DNA
gatccacccgcctcagcctc

SEQ ID NO: 8236 - DNA, 20 bp, synthetic construct
  source 1..20: mol_type = other DNA
tgatccacccgcctcagcct

SEQ ID NO: 8237 - DNA, 20 bp, synthetic construct
  source 1..20: mol_type = other DNA
gtgatccacccgcctcagcc

SEQ ID NO: 8238 - DNA, 20 bp, synthetic construct
  source 1..20: mol_type = other DNA
ggtgatccacccgcctcagc

SEQ ID NO: 8239 - DNA, 20 bp, synthetic construct
  source 1..20: mol_type = other DNA
aggtgatccacccgcctcag

SEQ ID NO: 8240 - DNA, 20 bp, synthetic construct
  source 1..20: mol_type = other DNA
caggtgatccacccgcctca

SEQ ID NO: 8241 - DNA, 20 bp, synthetic construct
  source 1..20: mol_type = other DNA
ccaggtgatccacccgcctc

SEQ ID NO: 8242 - DNA, 20 bp, synthetic construct
  source 1..20: mol_type = other DNA
cccaggtgatccacccgcct

SEQ ID NO: 8243 - DNA, 20 bp, synthetic construct
  source 1..20: mol_type = other DNA
ccccaggtgatccacccgcc

SEQ ID NO: 8244 - DNA, 20 bp, synthetic construct
  source 1..20: mol_type = other DNA
accccaggtgatccacccgc

SEQ ID NO: 8245 - DNA, 20 bp, synthetic construct
  source 1..20: mol_type = other DNA
gaccccaggtgatccacccg

SEQ ID NO: 8246 - DNA, 20 bp, synthetic construct
  source 1..20: mol_type = other DNA
tgaccccaggtgatccaccc

SEQ ID NO: 8247 - DNA, 20 bp, synthetic construct
  source 1..20: mol_type = other DNA
ctgaccccaggtgatccacc

SEQ ID NO: 8248 - DNA, 20 bp, synthetic construct
  source 1..20: mol_type = other DNA
cctgaccccaggtgatccac

SEQ ID NO: 8249 - DNA, 20 bp, synthetic construct
  source 1..20: mol_type = other DNA
tcctgaccccaggtgatcca

SEQ ID NO: 8250 - DNA, 20 bp, synthetic construct
  source 1..20: mol_type = other DNA
ctcctgaccccaggtgatcc

SEQ ID NO: 8251 - DNA, 20 bp, synthetic construct
  source 1..20: mol_type = other DNA
actcctgaccccaggtgatc

SEQ ID NO: 8252 - DNA, 20 bp, synthetic construct
  source 1..20: mol_type = other DNA
aactcctgaccccaggtgat

SEQ ID NO: 8253 - DNA, 20 bp, synthetic construct
  source 1..20: mol_type = other DNA
aaactcctgaccccaggtga

SEQ ID NO: 8254 - DNA, 20 bp, synthetic construct
  source 1..20: mol_type = other DNA
caaactcctgaccccaggtg

SEQ ID NO: 8255 - DNA, 20 bp, synthetic construct
  source 1..20: mol_type = other DNA
tcaaactcctgaccccaggt

SEQ ID NO: 8256 - DNA, 20 bp, synthetic construct
  source 1..20: mol_type = other DNA
ctcaaactcctgaccccagg

SEQ ID NO: 8257 - DNA, 20 bp, synthetic construct
  source 1..20: mol_type = other DNA
tctcaaactcctgaccccag

SEQ ID NO: 8258 - DNA, 20 bp, synthetic construct
  source 1..20: mol_type = other DNA
gtctcaaactcctgacccca

SEQ ID NO: 8259 - DNA, 20 bp, synthetic construct
  source 1..20: mol_type = other DNA
agtctcaaactcctgacccc

SEQ ID NO: 8260 - DNA, 20 bp, synthetic construct
  source 1..20: mol_type = other DNA
tagtctcaaactcctgaccc

SEQ ID NO: 8261 - DNA, 20 bp, synthetic construct
  source 1..20: mol_type = other DNA
ctagtctcaaactcctgacc

SEQ ID NO: 8262 - DNA, 20 bp, synthetic construct
  source 1..20: mol_type = other DNA
actagtctcaaactcctgac

SEQ ID NO: 8263 - DNA, 20 bp, synthetic construct
  source 1..20: mol_type = other DNA
gactagtctcaaactcctga

SEQ ID NO: 8264 - DNA, 20 bp, synthetic construct
  source 1..20: mol_type = other DNA
agactagtctcaaactcctg

SEQ ID NO: 8265 - DNA, 20 bp, synthetic construct
  source 1..20: mol_type = other DNA
cagactagtctcaaactcct

SEQ ID NO: 8266 - DNA, 20 bp, synthetic construct
  source 1..20: mol_type = other DNA
ccagactagtctcaaactcc

SEQ ID NO: 8267 - DNA, 20 bp, synthetic construct
  source 1..20: mol_type = other DNA
gccagactagtctcaaactc

SEQ ID NO: 8268 - DNA, 20 bp, synthetic construct
  source 1..20: mol_type = other DNA
ggccagactagtctcaaact

SEQ ID NO: 8269 - DNA, 20 bp, synthetic construct
  source 1..20: mol_type = other DNA
tggccagactagtctcaaac

SEQ ID NO: 8270 - DNA, 20 bp, synthetic construct
  source 1..20: mol_type = other DNA
ttggccagactagtctcaaa

SEQ ID NO: 8271 - DNA, 20 bp, synthetic construct
  source 1..20: mol_type = other DNA
gttggccagactagtctcaa

SEQ ID NO: 8272 - DNA, 20 bp, synthetic construct
  source 1..20: mol_type = other DNA
tgttggccagactagtctca

SEQ ID NO: 8273 - DNA, 20 bp, synthetic construct
  source 1..20: mol_type = other DNA
atgttggccagactagtctc

SEQ ID NO: 8274 - DNA, 20 bp, synthetic construct
  source 1..20: mol_type = other DNA
catgttggccagactagtct

SEQ ID NO: 8275 - DNA, 20 bp, synthetic construct
  source 1..20: mol_type = other DNA
ccatgttggccagactagtc

SEQ ID NO: 8276 - DNA, 20 bp, synthetic construct
  source 1..20: mol_type = other DNA
accatgttggccagactagt

SEQ ID NO: 8277 - DNA, 20 bp, synthetic construct
  source 1..20: mol_type = other DNA
caccatgttggccagactag

SEQ ID NO: 8278 - DNA, 20 bp, synthetic construct
  source 1..20: mol_type = other DNA
tcaccatgttggccagacta

SEQ ID NO: 8279 - DNA, 20 bp, synthetic construct
  source 1..20: mol_type = other DNA
ttcaccatgttggccagact

SEQ ID NO: 8280 - DNA, 20 bp, synthetic construct
  source 1..20: mol_type = other DNA
tttcaccatgttggccagac

SEQ ID NO: 8281 - DNA, 20 bp, synthetic construct
  source 1..20: mol_type = other DNA
gtttcaccatgttggccaga

SEQ ID NO: 8282 - DNA, 20 bp, synthetic construct
  source 1..20: mol_type = other DNA
ggtttcaccatgttggccag

SEQ ID NO: 8283 - DNA, 20 bp, synthetic construct
  source 1..20: mol_type = other DNA
gggtttcaccatgttggcca

SEQ ID NO: 8284 - DNA, 20 bp, synthetic construct
  source 1..20: mol_type = other DNA
ggggtttcaccatgttggcc

SEQ ID NO: 8285 - DNA, 20 bp, synthetic construct
  source 1..20: mol_type = other DNA
gggggtttcaccatgttggc

SEQ ID NO: 8286 - DNA, 20 bp, synthetic construct
  source 1..20: mol_type = other DNA
tgggggtttcaccatgttgg

SEQ ID NO: 8287 - DNA, 20 bp, synthetic construct
  source 1..20: mol_type = other DNA
atgggggtttcaccatgttg

SEQ ID NO: 8288 - DNA, 20 bp, synthetic construct
  source 1..20: mol_type = other DNA
gatgggggtttcaccatgtt

SEQ ID NO: 8289 - DNA, 20 bp, synthetic construct
  source 1..20: mol_type = other DNA
agatgggggtttcaccatgt

SEQ ID NO: 8290 - DNA, 20 bp, synthetic construct
  source 1..20: mol_type = other DNA
gagatgggggtttcaccatg

SEQ ID NO: 8291 - DNA, 20 bp, synthetic construct
  source 1..20: mol_type = other DNA
agagatgggggtttcaccat

SEQ ID NO: 8292 - DNA, 20 bp, synthetic construct
  source 1..20: mol_type = other DNA
tagagatgggggtttcacca

SEQ ID NO: 8293 - DNA, 20 bp, synthetic construct
  source 1..20: mol_type = other DNA
gtagagatgggggtttcacc

SEQ ID NO: 8294 - DNA, 20 bp, synthetic construct
  source 1..20: mol_type = other DNA
agtagagatgggggtttcac

SEQ ID NO: 8295 - DNA, 20 bp, synthetic construct
  source 1..20: mol_type = other DNA
tagtagagatgggggtttca

SEQ ID NO: 8296 - DNA, 20 bp, synthetic construct
  source 1..20: mol_type = other DNA
ttagtagagatgggggtttc

SEQ ID NO: 8297 - DNA, 20 bp, synthetic construct
  source 1..20: mol_type = other DNA
tttagtagagatgggggttt

SEQ ID NO: 8298 - DNA, 20 bp, synthetic construct
  source 1..20: mol_type = other DNA
ttttagtagagatgggggtt

SEQ ID NO: 8299 - DNA, 20 bp, synthetic construct
  source 1..20: mol_type = other DNA
tttttagtagagatgggggt

SEQ ID NO: 8300 - DNA, 20 bp, synthetic construct
  source 1..20: mol_type = other DNA
atttttagtagagatggggg

SEQ ID NO: 8301 - DNA, 20 bp, synthetic construct
  source 1..20: mol_type = other DNA
tatttttagtagagatgggg

SEQ ID NO: 8302 - DNA, 20 bp, synthetic construct
  source 1..20: mol_type = other DNA
gtatttttagtagagatggg

SEQ ID NO: 8303 - DNA, 20 bp, synthetic construct
  source 1..20: mol_type = other DNA
tgtatttttagtagagatgg

SEQ ID NO: 8304 - DNA, 20 bp, synthetic construct
  source 1..20: mol_type = other DNA
ttgtatttttagtagagatg

SEQ ID NO: 8305 - DNA, 20 bp, synthetic construct
  source 1..20: mol_type = other DNA
tttgtatttttagtagagat

SEQ ID NO: 8306 - DNA, 20 bp, synthetic construct
  source 1..20: mol_type = other DNA
ttttgtatttttagtagaga

SEQ ID NO: 8307 - DNA, 20 bp, synthetic construct
  source 1..20: mol_type = other DNA
tttttgtatttttagtagag

SEQ ID NO: 8308 - DNA, 20 bp, synthetic construct
  source 1..20: mol_type = other DNA
atttttgtatttttagtaga

SEQ ID NO: 8309 - DNA, 20 bp, synthetic construct
  source 1..20: mol_type = other DNA
aatttttgtatttttagtag

SEQ ID NO: 8310 - DNA, 20 bp, synthetic construct
  source 1..20: mol_type = other DNA
taatttttgtatttttagta

SEQ ID NO: 8311 - DNA, 20 bp, synthetic construct
  source 1..20: mol_type = other DNA
ctaatttttgtatttttagt

SEQ ID NO: 8312 - DNA, 20 bp, synthetic construct
  source 1..20: mol_type = other DNA
gctaatttttgtatttttag

SEQ ID NO: 8313 - DNA, 20 bp, synthetic construct
  source 1..20: mol_type = other DNA
ggctaatttttgtattttta

SEQ ID NO: 8314 - DNA, 20 bp, synthetic construct
  source 1..20: mol_type = other DNA
cggctaatttttgtattttt

SEQ ID NO: 8315 - DNA, 20 bp, synthetic construct
  source 1..20: mol_type = other DNA
ccggctaatttttgtatttt

SEQ ID NO: 8316 - DNA, 20 bp, synthetic construct
  source 1..20: mol_type = other DNA
cccggctaatttttgtattt

SEQ ID NO: 8317 - DNA, 20 bp, synthetic construct
  source 1..20: mol_type = other DNA
gcccggctaatttttgtatt

SEQ ID NO: 8318 - DNA, 20 bp, synthetic construct
  source 1..20: mol_type = other DNA
tgcccggctaatttttgtat

SEQ ID NO: 8319 - DNA, 20 bp, synthetic construct
  source 1..20: mol_type = other DNA
atgcccggctaatttttgta

SEQ ID NO: 8320 - DNA, 20 bp, synthetic construct
  source 1..20: mol_type = other DNA
catgcccggctaatttttgt

SEQ ID NO: 8321 - DNA, 20 bp, synthetic construct
  source 1..20: mol_type = other DNA
ccatgcccggctaatttttg

SEQ ID NO: 8322 - DNA, 20 bp, synthetic construct
  source 1..20: mol_type = other DNA
accatgcccggctaattttt

SEQ ID NO: 8323 - DNA, 20 bp, synthetic construct
  source 1..20: mol_type = other DNA
caccatgcccggctaatttt

SEQ ID NO: 8324 - DNA, 20 bp, synthetic construct
  source 1..20: mol_type = other DNA
ccaccatgcccggctaattt

SEQ ID NO: 8325 - DNA, 20 bp, synthetic construct
  source 1..20: mol_type = other DNA
accaccatgcccggctaatt

SEQ ID NO: 8326 - DNA, 20 bp, synthetic construct
  source 1..20: mol_type = other DNA
caccaccatgcccggctaat

SEQ ID NO: 8327 - DNA, 20 bp, synthetic construct
  source 1..20: mol_type = other DNA
ccaccaccatgcccggctaa

SEQ ID NO: 8328 - DNA, 20 bp, synthetic construct
  source 1..20: mol_type = other DNA
cccaccaccatgcccggcta

SEQ ID NO: 8329 - DNA, 20 bp, synthetic construct
  source 1..20: mol_type = other DNA
gcccaccaccatgcccggct

SEQ ID NO: 8330 - DNA, 20 bp, synthetic construct
  source 1..20: mol_type = other DNA
cgcccaccaccatgcccggc

SEQ ID NO: 8331 - DNA, 20 bp, synthetic construct
  source 1..20: mol_type = other DNA
gcgcccaccaccatgcccgg

SEQ ID NO: 8332 - DNA, 20 bp, synthetic construct
  source 1..20: mol_type = other DNA
ggcgcccaccaccatgcccg

SEQ ID NO: 8333 - DNA, 20 bp, synthetic construct
  source 1..20: mol_type = other DNA
aggcgcccaccaccatgccc

SEQ ID NO: 8334 - DNA, 20 bp, synthetic construct
  source 1..20: mol_type = other DNA
caggcgcccaccaccatgcc

SEQ ID NO: 8335 - DNA, 20 bp, synthetic construct
  source 1..20: mol_type = other DNA
acaggcgcccaccaccatgc

SEQ ID NO: 8336 - DNA, 20 bp, synthetic construct
  source 1..20: mol_type = other DNA
tacaggcgcccaccaccatg

SEQ ID NO: 8337 - DNA, 20 bp, synthetic construct
  source 1..20: mol_type = other DNA
ttacaggcgcccaccaccat

SEQ ID NO: 8338 - DNA, 20 bp, synthetic construct
  source 1..20: mol_type = other DNA
attacaggcgcccaccacca

SEQ ID NO: 8339 - DNA, 20 bp, synthetic construct
  source 1..20: mol_type = other DNA
gattacaggcgcccaccacc

SEQ ID NO: 8340 - DNA, 20 bp, synthetic construct
  source 1..20: mol_type = other DNA
ggattacaggcgcccaccac

SEQ ID NO: 8341 - DNA, 20 bp, synthetic construct
  source 1..20: mol_type = other DNA
gggattacaggcgcccacca

SEQ ID NO: 8342 - DNA, 20 bp, synthetic construct
  source 1..20: mol_type = other DNA
tgggattacaggcgcccacc

SEQ ID NO: 8343 - DNA, 20 bp, synthetic construct
  source 1..20: mol_type = other DNA
ctgggattacaggcgcccac

SEQ ID NO: 8344 - DNA, 20 bp, synthetic construct
  source 1..20: mol_type = other DNA
gctgggattacaggcgccca

SEQ ID NO: 8345 - DNA, 20 bp, synthetic construct
  source 1..20: mol_type = other DNA
agctgggattacaggcgccc

SEQ ID NO: 8346 - DNA, 20 bp, synthetic construct
  source 1..20: mol_type = other DNA
aagctgggattacaggcgcc

SEQ ID NO: 8347 - DNA, 20 bp, synthetic construct
  source 1..20: mol_type = other DNA
gaagctgggattacaggcgc

SEQ ID NO: 8348 - DNA, 20 bp, synthetic construct
  source 1..20: mol_type = other DNA
agaagctgggattacaggcg

SEQ ID NO: 8349 - DNA, 20 bp, synthetic construct
  source 1..20: mol_type = other DNA
aagaagctgggattacaggc

SEQ ID NO: 8350 - DNA, 20 bp, synthetic construct
  source 1..20: mol_type = other DNA
caagaagctgggattacagg

SEQ ID NO: 8351 - DNA, 20 bp, synthetic construct
  source 1..20: mol_type = other DNA
ccaagaagctgggattacag

SEQ ID NO: 8352 - DNA, 20 bp, synthetic construct
  source 1..20: mol_type = other DNA
cccaagaagctgggattaca

SEQ ID NO: 8353 - DNA, 20 bp, synthetic construct
  source 1..20: mol_type = other DNA
tcccaagaagctgggattac

SEQ ID NO: 8354 - DNA, 20 bp, synthetic construct
  source 1..20: mol_type = other DNA
ctcccaagaagctgggatta

SEQ ID NO: 8355 - DNA, 20 bp, synthetic construct
  source 1..20: mol_type = other DNA
cctcccaagaagctgggatt

SEQ ID NO: 8356 - DNA, 20 bp, synthetic construct
  source 1..20: mol_type = other DNA
gcctcccaagaagctgggat

SEQ ID NO: 8357 - DNA, 20 bp, synthetic construct
  source 1..20: mol_type = other DNA
agcctcccaagaagctggga

SEQ ID NO: 8358 - DNA, 20 bp, synthetic construct
  source 1..20: mol_type = other DNA
cagcctcccaagaagctggg

SEQ ID NO: 8359 - DNA, 20 bp, synthetic construct
  source 1..20: mol_type = other DNA
tcagcctcccaagaagctgg

SEQ ID NO: 8360 - DNA, 20 bp, synthetic construct
  source 1..20: mol_type = other DNA
ctcagcctcccaagaagctg

SEQ ID NO: 8361 - DNA, 20 bp, synthetic construct
  source 1..20: mol_type = other DNA
cctcagcctcccaagaagct

SEQ ID NO: 8362 - DNA, 20 bp, synthetic construct
  source 1..20: mol_type = other DNA
ccctcagcctcccaagaagc

SEQ ID NO: 8363 - DNA, 20 bp, synthetic construct
  source 1..20: mol_type = other DNA
tccctcagcctcccaagaag

SEQ ID NO: 8364 - DNA, 20 bp, synthetic construct
  source 1..20: mol_type = other DNA
ttccctcagcctcccaagaa

SEQ ID NO: 8365 - DNA, 20 bp, synthetic construct
  source 1..20: mol_type = other DNA
cttccctcagcctcccaaga

SEQ ID NO: 8366 - DNA, 20 bp, synthetic construct
  source 1..20: mol_type = other DNA
tcttccctcagcctcccaag

SEQ ID NO: 8367 - DNA, 20 bp, synthetic construct
  source 1..20: mol_type = other DNA
ctcttccctcagcctcccaa

SEQ ID NO: 8368 - DNA, 20 bp, synthetic construct
  source 1..20: mol_type = other DNA
tctcttccctcagcctccca

SEQ ID NO: 8369 - DNA, 20 bp, synthetic construct
  source 1..20: mol_type = other DNA
ttctcttccctcagcctccc

SEQ ID NO: 8370 - DNA, 20 bp, synthetic construct
  source 1..20: mol_type = other DNA
attctcttccctcagcctcc

SEQ ID NO: 8371 - DNA, 20 bp, synthetic construct
  source 1..20: mol_type = other DNA
aattctcttccctcagcctc

SEQ ID NO: 8372 - DNA, 20 bp, synthetic construct
  source 1..20: mol_type = other DNA
caattctcttccctcagcct

SEQ ID NO: 8373 - DNA, 20 bp, synthetic construct
  source 1..20: mol_type = other DNA
gcaattctcttccctcagcc

SEQ ID NO: 8374 - DNA, 20 bp, synthetic construct
  source 1..20: mol_type = other DNA
agcaattctcttccctcagc

SEQ ID NO: 8375 - DNA, 20 bp, synthetic construct
  source 1..20: mol_type = other DNA
aagcaattctcttccctcag

SEQ ID NO: 8376 - DNA, 20 bp, synthetic construct
  source 1..20: mol_type = other DNA
caagcaattctcttccctca

SEQ ID NO: 8377 - DNA, 20 bp, synthetic construct
  source 1..20: mol_type = other DNA
tcaagcaattctcttccctc

SEQ ID NO: 8378 - DNA, 20 bp, synthetic construct
  source 1..20: mol_type = other DNA
atcaagcaattctcttccct

SEQ ID NO: 8379 - DNA, 20 bp, synthetic construct
  source 1..20: mol_type = other DNA
gatcaagcaattctcttccc

SEQ ID NO: 8380 - DNA, 20 bp, synthetic construct
  source 1..20: mol_type = other DNA
ggatcaagcaattctcttcc

SEQ ID NO: 8381 - DNA, 20 bp, synthetic construct
  source 1..20: mol_type = other DNA
gggatcaagcaattctcttc

SEQ ID NO: 8382 - DNA, 20 bp, synthetic construct
  source 1..20: mol_type = other DNA
cgggatcaagcaattctctt

SEQ ID NO: 8383 - DNA, 20 bp, synthetic construct
  source 1..20: mol_type = other DNA
ccgggatcaagcaattctct

SEQ ID NO: 8384 - DNA, 20 bp, synthetic construct
  source 1..20: mol_type = other DNA
tccgggatcaagcaattctc

SEQ ID NO: 8385 - DNA, 20 bp, synthetic construct
  source 1..20: mol_type = other DNA
ctccgggatcaagcaattct

SEQ ID NO: 8386 - DNA, 20 bp, synthetic construct
  source 1..20: mol_type = other DNA
cctccgggatcaagcaattc

SEQ ID NO: 8387 - DNA, 20 bp, synthetic construct
  source 1..20: mol_type = other DNA
acctccgggatcaagcaatt

SEQ ID NO: 8388 - DNA, 20 bp, synthetic construct
  source 1..20: mol_type = other DNA
aacctccgggatcaagcaat

SEQ ID NO: 8389 - DNA, 20 bp, synthetic construct
  source 1..20: mol_type = other DNA
caacctccgggatcaagcaa

SEQ ID NO: 8390 - DNA, 20 bp, synthetic construct
  source 1..20: mol_type = other DNA
gcaacctccgggatcaagca

SEQ ID NO: 8391 - DNA, 20 bp, synthetic construct
  source 1..20: mol_type = other DNA
tgcaacctccgggatcaagc

SEQ ID NO: 8392 - DNA, 20 bp, synthetic construct
  source 1..20: mol_type = other DNA
ttgcaacctccgggatcaag

SEQ ID NO: 8393 - DNA, 20 bp, synthetic construct
  source 1..20: mol_type = other DNA
attgcaacctccgggatcaa

SEQ ID NO: 8394 - DNA, 20 bp, synthetic construct
  source 1..20: mol_type = other DNA
cattgcaacctccgggatca

SEQ ID NO: 8395 - DNA, 20 bp, synthetic construct
  source 1..20: mol_type = other DNA
tcattgcaacctccgggatc

SEQ ID NO: 8396 - DNA, 20 bp, synthetic construct
  source 1..20: mol_type = other DNA
ctcattgcaacctccgggat

SEQ ID NO: 8397 - DNA, 20 bp, synthetic construct
  source 1..20: mol_type = other DNA
actcattgcaacctccggga

SEQ ID NO: 8398 - DNA, 20 bp, synthetic construct
  source 1..20: mol_type = other DNA
cactcattgcaacctccggg

SEQ ID NO: 8399 - DNA, 20 bp, synthetic construct
  source 1..20: mol_type = other DNA
gcactcattgcaacctccgg

SEQ ID NO: 8400 - DNA, 20 bp, synthetic construct
  source 1..20: mol_type = other DNA
cgcactcattgcaacctccg

SEQ ID NO: 8401 - DNA, 20 bp, synthetic construct
  source 1..20: mol_type = other DNA
ccgcactcattgcaacctcc

SEQ ID NO: 8402 - DNA, 20 bp, synthetic construct
  source 1..20: mol_type = other DNA
tccgcactcattgcaacctc

SEQ ID NO: 8403 - DNA, 20 bp, synthetic construct
  source 1..20: mol_type = other DNA
ctccgcactcattgcaacct

SEQ ID NO: 8404 - DNA, 20 bp, synthetic construct
  source 1..20: mol_type = other DNA
cctccgcactcattgcaacc

SEQ ID NO: 8405 - DNA, 20 bp, synthetic construct
  source 1..20: mol_type = other DNA
acctccgcactcattgcaac

SEQ ID NO: 8406 - DNA, 20 bp, synthetic construct
  source 1..20: mol_type = other DNA
aacctccgcactcattgcaa

SEQ ID NO: 8407 - DNA, 20 bp, synthetic construct
  source 1..20: mol_type = other DNA
caacctccgcactcattgca

SEQ ID NO: 8408 - DNA, 20 bp, synthetic construct
  source 1..20: mol_type = other DNA
gcaacctccgcactcattgc

SEQ ID NO: 8409 - DNA, 20 bp, synthetic construct
  source 1..20: mol_type = other DNA
tgcaacctccgcactcattg

SEQ ID NO: 8410 - DNA, 20 bp, synthetic construct
  source 1..20: mol_type = other DNA
ctgcaacctccgcactcatt

SEQ ID NO: 8411 - DNA, 20 bp, synthetic construct
  source 1..20: mol_type = other DNA
actgcaacctccgcactcat

SEQ ID NO: 8412 - DNA, 20 bp, synthetic construct
  source 1..20: mol_type = other DNA
cactgcaacctccgcactca

SEQ ID NO: 8413 - DNA, 20 bp, synthetic construct
  source 1..20: mol_type = other DNA
tcactgcaacctccgcactc

SEQ ID NO: 8414 - DNA, 20 bp, synthetic construct
  source 1..20: mol_type = other DNA
ctcactgcaacctccgcact

SEQ ID NO: 8415 - DNA, 20 bp, synthetic construct
  source 1..20: mol_type = other DNA
gctcactgcaacctccgcac

SEQ ID NO: 8416 - DNA, 20 bp, synthetic construct
  source 1..20: mol_type = other DNA
agctcactgcaacctccgca

SEQ ID NO: 8417 - DNA, 20 bp, synthetic construct
  source 1..20: mol_type = other DNA
cagctcactgcaacctccgc

SEQ ID NO: 8418 - DNA, 20 bp, synthetic construct
  source 1..20: mol_type = other DNA
tcagctcactgcaacctccg

SEQ ID NO: 8419 - DNA, 20 bp, synthetic construct
  source 1..20: mol_type = other DNA
ctcagctcactgcaacctcc

SEQ ID NO: 8420 - DNA, 20 bp, synthetic construct
  source 1..20: mol_type = other DNA
tctcagctcactgcaacctc

SEQ ID NO: 8421 - DNA, 20 bp, synthetic construct
  source 1..20: mol_type = other DNA
atctcagctcactgcaacct

SEQ ID NO: 8422 - DNA, 20 bp, synthetic construct
  source 1..20: mol_type = other DNA
gatctcagctcactgcaacc

SEQ ID NO: 8423 - DNA, 20 bp, synthetic construct
  source 1..20: mol_type = other DNA
tgatctcagctcactgcaac

SEQ ID NO: 8424 - DNA, 20 bp, synthetic construct
  source 1..20: mol_type = other DNA
atgatctcagctcactgcaa

SEQ ID NO: 8425 - DNA, 20 bp, synthetic construct
  source 1..20: mol_type = other DNA
catgatctcagctcactgca

SEQ ID NO: 8426 - DNA, 20 bp, synthetic construct
  source 1..20: mol_type = other DNA
gcatgatctcagctcactgc

SEQ ID NO: 8427 - DNA, 20 bp, synthetic construct
  source 1..20: mol_type = other DNA
ggcatgatctcagctcactg

SEQ ID NO: 8428 - DNA, 20 bp, synthetic construct
  source 1..20: mol_type = other DNA
tggcatgatctcagctcact

SEQ ID NO: 8429 - DNA, 20 bp, synthetic construct
  source 1..20: mol_type = other DNA
atggcatgatctcagctcac

SEQ ID NO: 8430 - DNA, 20 bp, synthetic construct
  source 1..20: mol_type = other DNA
aatggcatgatctcagctca

SEQ ID NO: 8431 - DNA, 20 bp, synthetic construct
  source 1..20: mol_type = other DNA
taatggcatgatctcagctc

SEQ ID NO: 8432 - DNA, 20 bp, synthetic construct
  source 1..20: mol_type = other DNA
gtaatggcatgatctcagct

SEQ ID NO: 8433 - DNA, 20 bp, synthetic construct
  source 1..20: mol_type = other DNA
tgtaatggcatgatctcagc

SEQ ID NO: 8434 - DNA, 20 bp, synthetic construct
  source 1..20: mol_type = other DNA
gtgtaatggcatgatctcag

SEQ ID NO: 8435 - DNA, 20 bp, synthetic construct
  source 1..20: mol_type = other DNA
agtgtaatggcatgatctca

SEQ ID NO: 8436 - DNA, 20 bp, synthetic construct
  source 1..20: mol_type = other DNA
gagtgtaatggcatgatctc

SEQ ID NO: 8437 - DNA, 20 bp, synthetic construct
  source 1..20: mol_type = other DNA
ggagtgtaatggcatgatct

SEQ ID NO: 8438 - DNA, 20 bp, synthetic construct
  source 1..20: mol_type = other DNA
tggagtgtaatggcatgatc

SEQ ID NO: 8439 - DNA, 20 bp, synthetic construct
  source 1..20: mol_type = other DNA
ctggagtgtaatggcatgat

SEQ ID NO: 8440 - DNA, 20 bp, synthetic construct
  source 1..20: mol_type = other DNA
gctggagtgtaatggcatga

SEQ ID NO: 8441 - DNA, 20 bp, synthetic construct
  source 1..20: mol_type = other DNA
ggctggagtgtaatggcatg

SEQ ID NO: 8442 - DNA, 20 bp, synthetic construct
  source 1..20: mol_type = other DNA
aggctggagtgtaatggcat

SEQ ID NO: 8443 - DNA, 20 bp, synthetic construct
  source 1..20: mol_type = other DNA
caggctggagtgtaatggca

SEQ ID NO: 8444 - DNA, 20 bp, synthetic construct
  source 1..20: mol_type = other DNA
ccaggctggagtgtaatggc

SEQ ID NO: 8445 - DNA, 20 bp, synthetic construct
  source 1..20: mol_type = other DNA
cccaggctggagtgtaatgg

SEQ ID NO: 8446 - DNA, 20 bp, synthetic construct
  source 1..20: mol_type = other DNA
gcccaggctggagtgtaatg

SEQ ID NO: 8447 - DNA, 20 bp, synthetic construct
  source 1..20: mol_type = other DNA
tgcccaggctggagtgtaat

SEQ ID NO: 8448 - DNA, 20 bp, synthetic construct
  source 1..20: mol_type = other DNA
ttgcccaggctggagtgtaa

SEQ ID NO: 8449 - DNA, 20 bp, synthetic construct
  source 1..20: mol_type = other DNA
gttgcccaggctggagtgta

SEQ ID NO: 8450 - DNA, 20 bp, synthetic construct
  source 1..20: mol_type = other DNA
tgttgcccaggctggagtgt

SEQ ID NO: 8451 - DNA, 20 bp, synthetic construct
  source 1..20: mol_type = other DNA
ctgttgcccaggctggagtg

SEQ ID NO: 8452 - DNA, 20 bp, synthetic construct
  source 1..20: mol_type = other DNA
tctgttgcccaggctggagt

SEQ ID NO: 8453 - DNA, 20 bp, synthetic construct
  source 1..20: mol_type = other DNA
ctctgttgcccaggctggag

SEQ ID NO: 8454 - DNA, 20 bp, synthetic construct
  source 1..20: mol_type = other DNA
gctctgttgcccaggctgga

SEQ ID NO: 8455 - DNA, 20 bp, synthetic construct
  source 1..20: mol_type = other DNA
cgctctgttgcccaggctgg

SEQ ID NO: 8456 - DNA, 20 bp, synthetic construct
  source 1..20: mol_type = other DNA
tcgctctgttgcccaggctg

SEQ ID NO: 8457 - DNA, 20 bp, synthetic construct
  source 1..20: mol_type = other DNA
ctcgctctgttgcccaggct

SEQ ID NO: 8458 - DNA, 20 bp, synthetic construct
  source 1..20: mol_type = other DNA
tctcgctctgttgcccaggc

SEQ ID NO: 8459 - DNA, 20 bp, synthetic construct
  source 1..20: mol_type = other DNA
gtctcgctctgttgcccagg

SEQ ID NO: 8460 - DNA, 20 bp, synthetic construct
  source 1..20: mol_type = other DNA
agtctcgctctgttgcccag

SEQ ID NO: 8461 - DNA, 20 bp, synthetic construct
  source 1..20: mol_type = other DNA
gagtctcgctctgttgccca

SEQ ID NO: 8462 - DNA, 20 bp, synthetic construct
  source 1..20: mol_type = other DNA
agagtctcgctctgttgccc

SEQ ID NO: 8463 - DNA, 20 bp, synthetic construct
  source 1..20: mol_type = other DNA
cagagtctcgctctgttgcc

SEQ ID NO: 8464 - DNA, 20 bp, synthetic construct
  source 1..20: mol_type = other DNA
acagagtctcgctctgttgc

SEQ ID NO: 8465 - DNA, 20 bp, synthetic construct
  source 1..20: mol_type = other DNA
gacagagtctcgctctgttg

SEQ ID NO: 8466 - DNA, 20 bp, synthetic construct
  source 1..20: mol_type = other DNA
agacagagtctcgctctgtt

SEQ ID NO: 8467 - DNA, 20 bp, synthetic construct
  source 1..20: mol_type = other DNA
gagacagagtctcgctctgt

SEQ ID NO: 8468 - DNA, 20 bp, synthetic construct
  source 1..20: mol_type = other DNA
tgagacagagtctcgctctg

SEQ ID NO: 8469 - DNA, 20 bp, synthetic construct
  source 1..20: mol_type = other DNA
ttgagacagagtctcgctct

SEQ ID NO: 8470 - DNA, 20 bp, synthetic construct
  source 1..20: mol_type = other DNA
tttgagacagagtctcgctc

SEQ ID NO: 8471 - DNA, 20 bp, synthetic construct
  source 1..20: mol_type = other DNA
ttttgagacagagtctcgct

SEQ ID NO: 8472 - DNA, 20 bp, synthetic construct
  source 1..20: mol_type = other DNA
gttttgagacagagtctcgc

SEQ ID NO: 8473 - DNA, 20 bp, synthetic construct
  source 1..20: mol_type = other DNA
tgttttgagacagagtctcg

SEQ ID NO: 8474 - DNA, 20 bp, synthetic construct
  source 1..20: mol_type = other DNA
ttgttttgagacagagtctc

SEQ ID NO: 8475 - DNA, 20 bp, synthetic construct
  source 1..20: mol_type = other DNA
tttgttttgagacagagtct

SEQ ID NO: 8476 - DNA, 20 bp, synthetic construct
  source 1..20: mol_type = other DNA
gtttgttttgagacagagtc

SEQ ID NO: 8477 - DNA, 20 bp, synthetic construct
  source 1..20: mol_type = other DNA
tgtttgttttgagacagagt

SEQ ID NO: 8478 - DNA, 20 bp, synthetic construct
  source 1..20: mol_type = other DNA
ttgtttgttttgagacagag

SEQ ID NO: 8479 - DNA, 20 bp, synthetic construct
  source 1..20: mol_type = other DNA
tttgtttgttttgagacaga

SEQ ID NO: 8480 - DNA, 20 bp, synthetic construct
  source 1..20: mol_type = other DNA
gtttgtttgttttgagacag

SEQ ID NO: 8481 - DNA, 20 bp, synthetic construct
  source 1..20: mol_type = other DNA
tgtttgtttgttttgagaca

SEQ ID NO: 8482 - DNA, 20 bp, synthetic construct
  source 1..20: mol_type = other DNA
ttgtttgtttgttttgagac

SEQ ID NO: 8483 - DNA, 20 bp, synthetic construct
  source 1..20: mol_type = other DNA
tttgtttgtttgttttgaga

SEQ ID NO: 8484 - DNA, 20 bp, synthetic construct
  source 1..20: mol_type = other DNA
gtttgtttgtttgttttgag

SEQ ID NO: 8485 - DNA, 20 bp, synthetic construct
  source 1..20: mol_type = other DNA
tgtttgtttgtttgttttga

SEQ ID NO: 8486 - DNA, 20 bp, synthetic construct
  source 1..20: mol_type = other DNA
ttgtttgtttgtttgttttg

SEQ ID NO: 8487 - DNA, 20 bp, synthetic construct
  source 1..20: mol_type = other DNA
tttgtttgtttgtttgtttt

SEQ ID NO: 8488 - DNA, 20 bp, synthetic construct
  source 1..20: mol_type = other DNA
ttttgtttgtttgtttgttt

SEQ ID NO: 8489 - DNA, 20 bp, synthetic construct
  source 1..20: mol_type = other DNA
tttttgtttgtttgtttgtt

SEQ ID NO: 8490 - DNA, 20 bp, synthetic construct
  source 1..20: mol_type = other DNA
ttttttgtttgtttgtttgt

SEQ ID NO: 8491 - DNA, 20 bp, synthetic construct
  source 1..20: mol_type = other DNA
tttttttgtttgtttgtttg

SEQ ID NO: 8492 - DNA, 20 bp, synthetic construct
  source 1..20: mol_type = other DNA
ctttttttgtttgtttgttt

SEQ ID NO: 8493 - DNA, 20 bp, synthetic construct
  source 1..20: mol_type = other DNA
cctttttttgtttgtttgtt

SEQ ID NO: 8494 - DNA, 20 bp, synthetic construct
  source 1..20: mol_type = other DNA
tcctttttttgtttgtttgt

SEQ ID NO: 8495 - DNA, 20 bp, synthetic construct
  source 1..20: mol_type = other DNA
ctcctttttttgtttgtttg

SEQ ID NO: 8496 - DNA, 20 bp, synthetic construct
  source 1..20: mol_type = other DNA
cctcctttttttgtttgttt

SEQ ID NO: 8497 - DNA, 20 bp, synthetic construct
  source 1..20: mol_type = other DNA
tcctcctttttttgtttgtt

SEQ ID NO: 8498 - DNA, 20 bp, synthetic construct
  source 1..20: mol_type = other DNA
atcctcctttttttgtttgt

SEQ ID NO: 8499 - DNA, 20 bp, synthetic construct
  source 1..20: mol_type = other DNA
gatcctcctttttttgtttg

SEQ ID NO: 8500 - DNA, 20 bp, synthetic construct
  source 1..20: mol_type = other DNA
agatcctcctttttttgttt

SEQ ID NO: 8501 - DNA, 20 bp, synthetic construct
  source 1..20: mol_type = other DNA
gagatcctcctttttttgtt

SEQ ID NO: 8502 - DNA, 20 bp, synthetic construct
  source 1..20: mol_type = other DNA
tgagatcctcctttttttgt

SEQ ID NO: 8503 - DNA, 20 bp, synthetic construct
  source 1..20: mol_type = other DNA
atgagatcctcctttttttg

SEQ ID NO: 8504 - DNA, 20 bp, synthetic construct
  source 1..20: mol_type = other DNA
aatgagatcctccttttttt

SEQ ID NO: 8505 - DNA, 20 bp, synthetic construct
  source 1..20: mol_type = other DNA
aaatgagatcctcctttttt

SEQ ID NO: 8506 - DNA, 20 bp, synthetic construct
  source 1..20: mol_type = other DNA
aaaatgagatcctccttttt

SEQ ID NO: 8507 - DNA, 20 bp, synthetic construct
  source 1..20: mol_type = other DNA
aaaaatgagatcctcctttt

SEQ ID NO: 8508 - DNA, 20 bp, synthetic construct
  source 1..20: mol_type = other DNA
aaaaaatgagatcctccttt

SEQ ID NO: 8509 - DNA, 20 bp, synthetic construct
  source 1..20: mol_type = other DNA
aaaaaaatgagatcctcctt

SEQ ID NO: 8510 - DNA, 20 bp, synthetic construct
  source 1..20: mol_type = other DNA
caaaaaaatgagatcctcct

SEQ ID NO: 8511 - DNA, 20 bp, synthetic construct
  source 1..20: mol_type = other DNA
acaaaaaaatgagatcctcc

SEQ ID NO: 8512 - DNA, 20 bp, synthetic construct
  source 1..20: mol_type = other DNA
gacaaaaaaatgagatcctc

SEQ ID NO: 8513 - DNA, 20 bp, synthetic construct
  source 1..20: mol_type = other DNA
ggacaaaaaaatgagatcct

SEQ ID NO: 8514 - DNA, 20 bp, synthetic construct
  source 1..20: mol_type = other DNA
aggacaaaaaaatgagatcc

SEQ ID NO: 8515 - DNA, 20 bp, synthetic construct
  source 1..20: mol_type = other DNA
taggacaaaaaaatgagatc

SEQ ID NO: 8516 - DNA, 20 bp, synthetic construct
  source 1..20: mol_type = other DNA
ttaggacaaaaaaatgagat

SEQ ID NO: 8517 - DNA, 20 bp, synthetic construct
  source 1..20: mol_type = other DNA
tttaggacaaaaaaatgaga

SEQ ID NO: 8518 - DNA, 20 bp, synthetic construct
  source 1..20: mol_type = other DNA
atttaggacaaaaaaatgag

SEQ ID NO: 8519 - DNA, 20 bp, synthetic construct
  source 1..20: mol_type = other DNA
tatttaggacaaaaaaatga

SEQ ID NO: 8520 - DNA, 20 bp, synthetic construct
  source 1..20: mol_type = other DNA
ctatttaggacaaaaaaatg

SEQ ID NO: 8521 - DNA, 20 bp, synthetic construct
  source 1..20: mol_type = other DNA
gctatttaggacaaaaaaat

SEQ ID NO: 8522 - DNA, 20 bp, synthetic construct
  source 1..20: mol_type = other DNA
agctatttaggacaaaaaaa

SEQ ID NO: 8523 - DNA, 20 bp, synthetic construct
  source 1..20: mol_type = other DNA
tagctatttaggacaaaaaa

SEQ ID NO: 8524 - DNA, 20 bp, synthetic construct
  source 1..20: mol_type = other DNA
gtagctatttaggacaaaaa

SEQ ID NO: 8525 - DNA, 20 bp, synthetic construct
  source 1..20: mol_type = other DNA
tgtagctatttaggacaaaa

SEQ ID NO: 8526 - DNA, 20 bp, synthetic construct
  source 1..20: mol_type = other DNA
ctgtagctatttaggacaaa

SEQ ID NO: 8527 - DNA, 20 bp, synthetic construct
  source 1..20: mol_type = other DNA
gctgtagctatttaggacaa

SEQ ID NO: 8528 - DNA, 20 bp, synthetic construct
  source 1..20: mol_type = other DNA
ggctgtagctatttaggaca

SEQ ID NO: 8529 - DNA, 20 bp, synthetic construct
  source 1..20: mol_type = other DNA
cggctgtagctatttaggac

SEQ ID NO: 8530 - DNA, 20 bp, synthetic construct
  source 1..20: mol_type = other DNA
acggctgtagctatttagga

SEQ ID NO: 8531 - DNA, 20 bp, synthetic construct
  source 1..20: mol_type = other DNA
cacggctgtagctatttagg

SEQ ID NO: 8532 - DNA, 20 bp, synthetic construct
  source 1..20: mol_type = other DNA
acacggctgtagctatttag

SEQ ID NO: 8533 - DNA, 20 bp, synthetic construct
  source 1..20: mol_type = other DNA
aacacggctgtagctattta

SEQ ID NO: 8534 - DNA, 20 bp, synthetic construct
  source 1..20: mol_type = other DNA
taacacggctgtagctattt

SEQ ID NO: 8535 - DNA, 20 bp, synthetic construct
  source 1..20: mol_type = other DNA
ctaacacggctgtagctatt

SEQ ID NO: 8536 - DNA, 20 bp, synthetic construct
  source 1..20: mol_type = other DNA
tctaacacggctgtagctat

SEQ ID NO: 8537 - DNA, 20 bp, synthetic construct
  source 1..20: mol_type = other DNA
ttctaacacggctgtagcta

SEQ ID NO: 8538 - DNA, 20 bp, synthetic construct
  source 1..20: mol_type = other DNA
gttctaacacggctgtagct

SEQ ID NO: 8539 - DNA, 20 bp, synthetic construct
  source 1..20: mol_type = other DNA
agttctaacacggctgtagc

SEQ ID NO: 8540 - DNA, 20 bp, synthetic construct
  source 1..20: mol_type = other DNA
cagttctaacacggctgtag

SEQ ID NO: 8541 - DNA, 20 bp, synthetic construct
  source 1..20: mol_type = other DNA
acagttctaacacggctgta

SEQ ID NO: 8542 - DNA, 20 bp, synthetic construct
  source 1..20: mol_type = other DNA
gacagttctaacacggctgt

SEQ ID NO: 8543 - DNA, 20 bp, synthetic construct
  source 1..20: mol_type = other DNA
tgacagttctaacacggctg

SEQ ID NO: 8544 - DNA, 20 bp, synthetic construct
  source 1..20: mol_type = other DNA
gtgacagttctaacacggct

SEQ ID NO: 8545 - DNA, 20 bp, synthetic construct
  source 1..20: mol_type = other DNA
ggtgacagttctaacacggc

SEQ ID NO: 8546 - DNA, 20 bp, synthetic construct
  source 1..20: mol_type = other DNA
aggtgacagttctaacacgg

SEQ ID NO: 8547 - DNA, 20 bp, synthetic construct
  source 1..20: mol_type = other DNA
aaggtgacagttctaacacg

SEQ ID NO: 8548 - DNA, 20 bp, synthetic construct
  source 1..20: mol_type = other DNA
taaggtgacagttctaacac

SEQ ID NO: 8549 - DNA, 20 bp, synthetic construct
  source 1..20: mol_type = other DNA
ctaaggtgacagttctaaca

SEQ ID NO: 8550 - DNA, 20 bp, synthetic construct
  source 1..20: mol_type = other DNA
gctaaggtgacagttctaac

SEQ ID NO: 8551 - DNA, 20 bp, synthetic construct
  source 1..20: mol_type = other DNA
tgctaaggtgacagttctaa

SEQ ID NO: 8552 - DNA, 20 bp, synthetic construct
  source 1..20: mol_type = other DNA
ttgctaaggtgacagttcta

SEQ ID NO: 8553 - DNA, 20 bp, synthetic construct
  source 1..20: mol_type = other DNA
tttgctaaggtgacagttct

SEQ ID NO: 8554 - DNA, 20 bp, synthetic construct
  source 1..20: mol_type = other DNA
ctttgctaaggtgacagttc

SEQ ID NO: 8555 - DNA, 20 bp, synthetic construct
  source 1..20: mol_type = other DNA
actttgctaaggtgacagtt

SEQ ID NO: 8556 - DNA, 20 bp, synthetic construct
  source 1..20: mol_type = other DNA
tactttgctaaggtgacagt

SEQ ID NO: 8557 - DNA, 20 bp, synthetic construct
  source 1..20: mol_type = other DNA
atactttgctaaggtgacag

SEQ ID NO: 8558 - DNA, 20 bp, synthetic construct
  source 1..20: mol_type = other DNA
aatactttgctaaggtgaca

SEQ ID NO: 8559 - DNA, 20 bp, synthetic construct
  source 1..20: mol_type = other DNA
caatactttgctaaggtgac

SEQ ID NO: 8560 - DNA, 20 bp, synthetic construct
  source 1..20: mol_type = other DNA
acaatactttgctaaggtga

SEQ ID NO: 8561 - DNA, 20 bp, synthetic construct
  source 1..20: mol_type = other DNA
aacaatactttgctaaggtg

SEQ ID NO: 8562 - DNA, 20 bp, synthetic construct
  source 1..20: mol_type = other DNA
aaacaatactttgctaaggt

SEQ ID NO: 8563 - DNA, 20 bp, synthetic construct
  source 1..20: mol_type = other DNA
aaaacaatactttgctaagg

SEQ ID NO: 8564 - DNA, 20 bp, synthetic construct
  source 1..20: mol_type = other DNA
aaaaacaatactttgctaag

SEQ ID NO: 8565 - DNA, 20 bp, synthetic construct
  source 1..20: mol_type = other DNA
aaaaaacaatactttgctaa

SEQ ID NO: 8566 - DNA, 20 bp, synthetic construct
  source 1..20: mol_type = other DNA
aaaaaaacaatactttgcta

SEQ ID NO: 8567 - DNA, 20 bp, synthetic construct
  source 1..20: mol_type = other DNA
taaaaaaacaatactttgct

SEQ ID NO: 8568 - DNA, 20 bp, synthetic construct
  source 1..20: mol_type = other DNA
gtaaaaaaacaatactttgc

SEQ ID NO: 8569 - DNA, 20 bp, synthetic construct
  source 1..20: mol_type = other DNA
agtaaaaaaacaatactttg

SEQ ID NO: 8570 - DNA, 20 bp, synthetic construct
  source 1..20: mol_type = other DNA
aagtaaaaaaacaatacttt

SEQ ID NO: 8571 - DNA, 20 bp, synthetic construct
  source 1..20: mol_type = other DNA
aaagtaaaaaaacaatactt

SEQ ID NO: 8572 - DNA, 20 bp, synthetic construct
  source 1..20: mol_type = other DNA
caaagtaaaaaaacaatact

SEQ ID NO: 8573 - DNA, 20 bp, synthetic construct
  source 1..20: mol_type = other DNA
tcaaagtaaaaaaacaatac

SEQ ID NO: 8574 - DNA, 20 bp, synthetic construct
  source 1..20: mol_type = other DNA
ttcaaagtaaaaaaacaata

SEQ ID NO: 8575 - DNA, 20 bp, synthetic construct
  source 1..20: mol_type = other DNA
tttcaaagtaaaaaaacaat

SEQ ID NO: 8576 - DNA, 20 bp, synthetic construct
  source 1..20: mol_type = other DNA
gtttcaaagtaaaaaaacaa

SEQ ID NO: 8577 - DNA, 20 bp, synthetic construct
  source 1..20: mol_type = other DNA
cgtttcaaagtaaaaaaaca

SEQ ID NO: 8578 - DNA, 20 bp, synthetic construct
  source 1..20: mol_type = other DNA
tcgtttcaaagtaaaaaaac

SEQ ID NO: 8579 - DNA, 20 bp, synthetic construct
  source 1..20: mol_type = other DNA
ttcgtttcaaagtaaaaaaa

SEQ ID NO: 8580 - DNA, 20 bp, synthetic construct
  source 1..20: mol_type = other DNA
attcgtttcaaagtaaaaaa

SEQ ID NO: 8581 - DNA, 20 bp, synthetic construct
  source 1..20: mol_type = other DNA
aattcgtttcaaagtaaaaa

SEQ ID NO: 8582 - DNA, 20 bp, synthetic construct
  source 1..20: mol_type = other DNA
aaattcgtttcaaagtaaaa

SEQ ID NO: 8583 - DNA, 20 bp, synthetic construct
  source 1..20: mol_type = other DNA
aaaattcgtttcaaagtaaa

SEQ ID NO: 8584 - DNA, 20 bp, synthetic construct
  source 1..20: mol_type = other DNA
taaaattcgtttcaaagtaa

SEQ ID NO: 8585 - DNA, 20 bp, synthetic construct
  source 1..20: mol_type = other DNA
ttaaaattcgtttcaaagta

SEQ ID NO: 8586 - DNA, 20 bp, synthetic construct
  source 1..20: mol_type = other DNA
cttaaaattcgtttcaaagt

SEQ ID NO: 8587 - DNA, 20 bp, synthetic construct
  source 1..20: mol_type = other DNA
ccttaaaattcgtttcaaag

SEQ ID NO: 8588 - DNA, 20 bp, synthetic construct
  source 1..20: mol_type = other DNA
accttaaaattcgtttcaaa

SEQ ID NO: 8589 - DNA, 20 bp, synthetic construct
  source 1..20: mol_type = other DNA
aaccttaaaattcgtttcaa

SEQ ID NO: 8590 - DNA, 20 bp, synthetic construct
  source 1..20: mol_type = other DNA
aaaccttaaaattcgtttca

SEQ ID NO: 8591 - DNA, 20 bp, synthetic construct
  source 1..20: mol_type = other DNA
aaaaccttaaaattcgtttc

SEQ ID NO: 8592 - DNA, 20 bp, synthetic construct
  source 1..20: mol_type = other DNA
taaaaccttaaaattcgttt

SEQ ID NO: 8593 - DNA, 20 bp, synthetic construct
  source 1..20: mol_type = other DNA
ctaaaaccttaaaattcgtt

SEQ ID NO: 8594 - DNA, 20 bp, synthetic construct
  source 1..20: mol_type = other DNA
tctaaaaccttaaaattcgt

SEQ ID NO: 8595 - DNA, 20 bp, synthetic construct
  source 1..20: mol_type = other DNA
ttctaaaaccttaaaattcg

SEQ ID NO: 8596 - DNA, 20 bp, synthetic construct
  source 1..20: mol_type = other DNA
cttctaaaaccttaaaattc

SEQ ID NO: 8597 - DNA, 20 bp, synthetic construct
  source 1..20: mol_type = other DNA
tcttctaaaaccttaaaatt

SEQ ID NO: 8598 - DNA, 20 bp, synthetic construct
  source 1..20: mol_type = other DNA
atcttctaaaaccttaaaat

SEQ ID NO: 8599 - DNA, 20 bp, synthetic construct
  source 1..20: mol_type = other DNA
aatcttctaaaaccttaaaa

SEQ ID NO: 8600 - DNA, 20 bp, synthetic construct
  source 1..20: mol_type = other DNA
caatcttctaaaaccttaaa

SEQ ID NO: 8601 - DNA, 20 bp, synthetic construct
  source 1..20: mol_type = other DNA
acaatcttctaaaaccttaa

SEQ ID NO: 8602 - DNA, 20 bp, synthetic construct
  source 1..20: mol_type = other DNA
aacaatcttctaaaacctta

SEQ ID NO: 8603 - DNA, 20 bp, synthetic construct
  source 1..20: mol_type = other DNA
gaacaatcttctaaaacctt

SEQ ID NO: 8604 - DNA, 20 bp, synthetic construct
  source 1..20: mol_type = other DNA
agaacaatcttctaaaacct

SEQ ID NO: 8605 - DNA, 20 bp, synthetic construct
  source 1..20: mol_type = other DNA
gagaacaatcttctaaaacc

SEQ ID NO: 8606 - DNA, 20 bp, synthetic construct
  source 1..20: mol_type = other DNA
agagaacaatcttctaaaac

SEQ ID NO: 8607 - DNA, 20 bp, synthetic construct
  source 1..20: mol_type = other DNA
tagagaacaatcttctaaaa

SEQ ID NO: 8608 - DNA, 20 bp, synthetic construct
  source 1..20: mol_type = other DNA
ctagagaacaatcttctaaa

SEQ ID NO: 8609 - DNA, 20 bp, synthetic construct
  source 1..20: mol_type = other DNA
tctagagaacaatcttctaa

SEQ ID NO: 8610 - DNA, 20 bp, synthetic construct
  source 1..20: mol_type = other DNA
ttctagagaacaatcttcta

SEQ ID NO: 8611 - DNA, 20 bp, synthetic construct
  source 1..20: mol_type = other DNA
attctagagaacaatcttct

SEQ ID NO: 8612 - DNA, 20 bp, synthetic construct
  source 1..20: mol_type = other DNA
aattctagagaacaatcttc

SEQ ID NO: 8613 - DNA, 20 bp, synthetic construct
  source 1..20: mol_type = other DNA
taattctagagaacaatctt

SEQ ID NO: 8614 - DNA, 20 bp, synthetic construct
  source 1..20: mol_type = other DNA
gtaattctagagaacaatct

SEQ ID NO: 8615 - DNA, 20 bp, synthetic construct
  source 1..20: mol_type = other DNA
tgtaattctagagaacaatc

SEQ ID NO: 8616 - DNA, 20 bp, synthetic construct
  source 1..20: mol_type = other DNA
ttgtaattctagagaacaat

SEQ ID NO: 8617 - DNA, 20 bp, synthetic construct
  source 1..20: mol_type = other DNA
attgtaattctagagaacaa

SEQ ID NO: 8618 - DNA, 20 bp, synthetic construct
  source 1..20: mol_type = other DNA
aattgtaattctagagaaca

SEQ ID NO: 8619 - DNA, 20 bp, synthetic construct
  source 1..20: mol_type = other DNA
aaattgtaattctagagaac

SEQ ID NO: 8620 - DNA, 20 bp, synthetic construct
  source 1..20: mol_type = other DNA
aaaattgtaattctagagaa

SEQ ID NO: 8621 - DNA, 20 bp, synthetic construct
  source 1..20: mol_type = other DNA
gaaaattgtaattctagaga

SEQ ID NO: 8622 - DNA, 20 bp, synthetic construct
  source 1..20: mol_type = other DNA
agaaaattgtaattctagag

SEQ ID NO: 8623 - DNA, 20 bp, synthetic construct
  source 1..20: mol_type = other DNA
cagaaaattgtaattctaga

SEQ ID NO: 8624 - DNA, 20 bp, synthetic construct
  source 1..20: mol_type = other DNA
acagaaaattgtaattctag

SEQ ID NO: 8625 - DNA, 20 bp, synthetic construct
  source 1..20: mol_type = other DNA
aacagaaaattgtaattcta

SEQ ID NO: 8626 - DNA, 20 bp, synthetic construct
  source 1..20: mol_type = other DNA
aaacagaaaattgtaattct

SEQ ID NO: 8627 - DNA, 20 bp, synthetic construct
  source 1..20: mol_type = other DNA
aaaacagaaaattgtaattc

SEQ ID NO: 8628 - DNA, 20 bp, synthetic construct
  source 1..20: mol_type = other DNA
caaaacagaaaattgtaatt

SEQ ID NO: 8629 - DNA, 20 bp, synthetic construct
  source 1..20: mol_type = other DNA
tcaaaacagaaaattgtaat

SEQ ID NO: 8630 - DNA, 20 bp, synthetic construct
  source 1..20: mol_type = other DNA
gtcaaaacagaaaattgtaa

SEQ ID NO: 8631 - DNA, 20 bp, synthetic construct
  source 1..20: mol_type = other DNA
agtcaaaacagaaaattgta

SEQ ID NO: 8632 - DNA, 20 bp, synthetic construct
  source 1..20: mol_type = other DNA
tagtcaaaacagaaaattgt

SEQ ID NO: 8633 - DNA, 20 bp, synthetic construct
  source 1..20: mol_type = other DNA
ctagtcaaaacagaaaattg

SEQ ID NO: 8634 - DNA, 20 bp, synthetic construct
  source 1..20: mol_type = other DNA
actagtcaaaacagaaaatt

SEQ ID NO: 8635 - DNA, 20 bp, synthetic construct
  source 1..20: mol_type = other DNA
cactagtcaaaacagaaaat

SEQ ID NO: 8636 - DNA, 20 bp, synthetic construct
  source 1..20: mol_type = other DNA
tcactagtcaaaacagaaaa

SEQ ID NO: 8637 - DNA, 20 bp, synthetic construct
  source 1..20: mol_type = other DNA
atcactagtcaaaacagaaa

SEQ ID NO: 8638 - DNA, 20 bp, synthetic construct
  source 1..20: mol_type = other DNA
tatcactagtcaaaacagaa

SEQ ID NO: 8639 - DNA, 20 bp, synthetic construct
  source 1..20: mol_type = other DNA
ctatcactagtcaaaacaga

SEQ ID NO: 8640 - DNA, 20 bp, synthetic construct
  source 1..20: mol_type = other DNA
actatcactagtcaaaacag

SEQ ID NO: 8641 - DNA, 20 bp, synthetic construct
  source 1..20: mol_type = other DNA
tactatcactagtcaaaaca

SEQ ID NO: 8642 - DNA, 20 bp, synthetic construct
  source 1..20: mol_type = other DNA
atactatcactagtcaaaac

SEQ ID NO: 8643 - DNA, 20 bp, synthetic construct
  source 1..20: mol_type = other DNA
aatactatcactagtcaaaa

SEQ ID NO: 8644 - DNA, 20 bp, synthetic construct
  source 1..20: mol_type = other DNA
aaatactatcactagtcaaa

SEQ ID NO: 8645 - DNA, 20 bp, synthetic construct
  source 1..20: mol_type = other DNA
aaaatactatcactagtcaa

SEQ ID NO: 8646 - DNA, 20 bp, synthetic construct
  source 1..20: mol_type = other DNA
caaaatactatcactagtca

SEQ ID NO: 8647 - DNA, 20 bp, synthetic construct
  source 1..20: mol_type = other DNA
tcaaaatactatcactagtc

SEQ ID NO: 8648 - DNA, 20 bp, synthetic construct
  source 1..20: mol_type = other DNA
atcaaaatactatcactagt

SEQ ID NO: 8649 - DNA, 20 bp, synthetic construct
  source 1..20: mol_type = other DNA
catcaaaatactatcactag

SEQ ID NO: 8650 - DNA, 20 bp, synthetic construct
  source 1..20: mol_type = other DNA
acatcaaaatactatcacta

SEQ ID NO: 8651 - DNA, 20 bp, synthetic construct
  source 1..20: mol_type = other DNA
aacatcaaaatactatcact

SEQ ID NO: 8652 - DNA, 20 bp, synthetic construct
  source 1..20: mol_type = other DNA
caacatcaaaatactatcac

SEQ ID NO: 8653 - DNA, 20 bp, synthetic construct
  source 1..20: mol_type = other DNA
acaacatcaaaatactatca

SEQ ID NO: 8654 - DNA, 20 bp, synthetic construct
  source 1..20: mol_type = other DNA
cacaacatcaaaatactatc

SEQ ID NO: 8655 - DNA, 20 bp, synthetic construct
  source 1..20: mol_type = other DNA
acacaacatcaaaatactat

SEQ ID NO: 8656 - DNA, 20 bp, synthetic construct
  source 1..20: mol_type = other DNA
tacacaacatcaaaatacta

SEQ ID NO: 8657 - DNA, 20 bp, synthetic construct
  source 1..20: mol_type = other DNA
ttacacaacatcaaaatact

SEQ ID NO: 8658 - DNA, 20 bp, synthetic construct
  source 1..20: mol_type = other DNA
tttacacaacatcaaaatac

SEQ ID NO: 8659 - DNA, 20 bp, synthetic construct
  source 1..20: mol_type = other DNA
atttacacaacatcaaaata

SEQ ID NO: 8660 - DNA, 20 bp, synthetic construct
  source 1..20: mol_type = other DNA
tatttacacaacatcaaaat

SEQ ID NO: 8661 - DNA, 20 bp, synthetic construct
  source 1..20: mol_type = other DNA
ctatttacacaacatcaaaa

SEQ ID NO: 8662 - DNA, 20 bp, synthetic construct
  source 1..20: mol_type = other DNA
actatttacacaacatcaaa

SEQ ID NO: 8663 - DNA, 20 bp, synthetic construct
  source 1..20: mol_type = other DNA
aactatttacacaacatcaa

SEQ ID NO: 8664 - DNA, 20 bp, synthetic construct
  source 1..20: mol_type = other DNA
caactatttacacaacatca

SEQ ID NO: 8665 - DNA, 20 bp, synthetic construct
  source 1..20: mol_type = other DNA
tcaactatttacacaacatc

SEQ ID NO: 8666 - DNA, 20 bp, synthetic construct
  source 1..20: mol_type = other DNA
ctcaactatttacacaacat

SEQ ID NO: 8667 - DNA, 20 bp, synthetic construct
  source 1..20: mol_type = other DNA
gctcaactatttacacaaca

SEQ ID NO: 8668 - DNA, 20 bp, synthetic construct
  source 1..20: mol_type = other DNA
tgctcaactatttacacaac

SEQ ID NO: 8669 - DNA, 20 bp, synthetic construct
  source 1..20: mol_type = other DNA
atgctcaactatttacacaa

SEQ ID NO: 8670 - DNA, 20 bp, synthetic construct
  source 1..20: mol_type = other DNA
catgctcaactatttacaca

SEQ ID NO: 8671 - DNA, 20 bp, synthetic construct
  source 1..20: mol_type = other DNA
tcatgctcaactatttacac

SEQ ID NO: 8672 - DNA, 20 bp, synthetic construct
  source 1..20: mol_type = other DNA
ttcatgctcaactatttaca

SEQ ID NO: 8673 - DNA, 20 bp, synthetic construct
  source 1..20: mol_type = other DNA
gttcatgctcaactatttac

SEQ ID NO: 8674 - DNA, 20 bp, synthetic construct
  source 1..20: mol_type = other DNA
tgttcatgctcaactattta

SEQ ID NO: 8675 - DNA, 20 bp, synthetic construct
  source 1..20: mol_type = other DNA
ttgttcatgctcaactattt

SEQ ID NO: 8676 - DNA, 20 bp, synthetic construct
  source 1..20: mol_type = other DNA
tttgttcatgctcaactatt

SEQ ID NO: 8677 - DNA, 20 bp, synthetic construct
  source 1..20: mol_type = other DNA
ttttgttcatgctcaactat

SEQ ID NO: 8678 - DNA, 20 bp, synthetic construct
  source 1..20: mol_type = other DNA
gttttgttcatgctcaacta

SEQ ID NO: 8679 - DNA, 20 bp, synthetic construct
  source 1..20: mol_type = other DNA
ggttttgttcatgctcaact

SEQ ID NO: 8680 - DNA, 20 bp, synthetic construct
  source 1..20: mol_type = other DNA
gggttttgttcatgctcaac

SEQ ID NO: 8681 - DNA, 20 bp, synthetic construct
  source 1..20: mol_type = other DNA
agggttttgttcatgctcaa

SEQ ID NO: 8682 - DNA, 20 bp, synthetic construct
  source 1..20: mol_type = other DNA
tagggttttgttcatgctca

SEQ ID NO: 8683 - DNA, 20 bp, synthetic construct
  source 1..20: mol_type = other DNA
atagggttttgttcatgctc

SEQ ID NO: 8684 - DNA, 20 bp, synthetic construct
  source 1..20: mol_type = other DNA
aatagggttttgttcatgct

SEQ ID NO: 8685 - DNA, 20 bp, synthetic construct
  source 1..20: mol_type = other DNA
aaatagggttttgttcatgc

SEQ ID NO: 8686 - DNA, 20 bp, synthetic construct
  source 1..20: mol_type = other DNA
aaaatagggttttgttcatg

SEQ ID NO: 8687 - DNA, 20 bp, synthetic construct
  source 1..20: mol_type = other DNA
aaaaatagggttttgttcat

SEQ ID NO: 8688 - DNA, 20 bp, synthetic construct
  source 1..20: mol_type = other DNA
aaaaaatagggttttgttca

SEQ ID NO: 8689 - DNA, 20 bp, synthetic construct
  source 1..20: mol_type = other DNA
aaaaaaatagggttttgttc

SEQ ID NO: 8690 - DNA, 20 bp, synthetic construct
  source 1..20: mol_type = other DNA
aaaaaaaatagggttttgtt

SEQ ID NO: 8691 - DNA, 20 bp, synthetic construct
  source 1..20: mol_type = other DNA
aaaaaaaaatagggttttgt

SEQ ID NO: 8692 - DNA, 20 bp, synthetic construct
  source 1..20: mol_type = other DNA
aaaaaaaaaatagggttttg

SEQ ID NO: 8693 - DNA, 20 bp, synthetic construct
  source 1..20: mol_type = other DNA
aaaaaaaaaaatagggtttt

SEQ ID NO: 8694 - DNA, 20 bp, synthetic construct
  source 1..20: mol_type = other DNA
taaaaaaaaaaatagggttt

SEQ ID NO: 8695 - DNA, 20 bp, synthetic construct
  source 1..20: mol_type = other DNA
ctaaaaaaaaaaatagggtt

SEQ ID NO: 8696 - DNA, 20 bp, synthetic construct
  source 1..20: mol_type = other DNA
gctaaaaaaaaaaatagggt

SEQ ID NO: 8697 - DNA, 20 bp, synthetic construct
  source 1..20: mol_type = other DNA
agctaaaaaaaaaaataggg

SEQ ID NO: 8698 - DNA, 20 bp, synthetic construct
  source 1..20: mol_type = other DNA
tagctaaaaaaaaaaatagg

SEQ ID NO: 8699 - DNA, 20 bp, synthetic construct
  source 1..20: mol_type = other DNA
atagctaaaaaaaaaaatag

SEQ ID NO: 8700 - DNA, 20 bp, synthetic construct
  source 1..20: mol_type = other DNA
aatagctaaaaaaaaaaata

SEQ ID NO: 8701 - DNA, 20 bp, synthetic construct
  source 1..20: mol_type = other DNA
aaatagctaaaaaaaaaaat

SEQ ID NO: 8702 - DNA, 20 bp, synthetic construct
  source 1..20: mol_type = other DNA
gaaatagctaaaaaaaaaaa

SEQ ID NO: 8703 - DNA, 20 bp, synthetic construct
  source 1..20: mol_type = other DNA
tgaaatagctaaaaaaaaaa

SEQ ID NO: 8704 - DNA, 20 bp, synthetic construct
  source 1..20: mol_type = other DNA
ttgaaatagctaaaaaaaaa

SEQ ID NO: 8705 - DNA, 20 bp, synthetic construct
  source 1..20: mol_type = other DNA
cttgaaatagctaaaaaaaa

SEQ ID NO: 8706 - DNA, 20 bp, synthetic construct
  source 1..20: mol_type = other DNA
acttgaaatagctaaaaaaa

SEQ ID NO: 8707 - DNA, 20 bp, synthetic construct
  source 1..20: mol_type = other DNA
cacttgaaatagctaaaaaa

SEQ ID NO: 8708 - DNA, 20 bp, synthetic construct
  source 1..20: mol_type = other DNA
tcacttgaaatagctaaaaa

SEQ ID NO: 8709 - DNA, 20 bp, synthetic construct
  source 1..20: mol_type = other DNA
atcacttgaaatagctaaaa

SEQ ID NO: 8710 - DNA, 20 bp, synthetic construct
  source 1..20: mol_type = other DNA
aatcacttgaaatagctaaa

SEQ ID NO: 8711 - DNA, 20 bp, synthetic construct
  source 1..20: mol_type = other DNA
caatcacttgaaatagctaa

SEQ ID NO: 8712 - DNA, 20 bp, synthetic construct
  source 1..20: mol_type = other DNA
acaatcacttgaaatagcta

SEQ ID NO: 8713 - DNA, 20 bp, synthetic construct
  source 1..20: mol_type = other DNA
cacaatcacttgaaatagct

SEQ ID NO: 8714 - DNA, 20 bp, synthetic construct
  source 1..20: mol_type = other DNA
tcacaatcacttgaaatagc

SEQ ID NO: 8715 - DNA, 20 bp, synthetic construct
  source 1..20: mol_type = other DNA
gtcacaatcacttgaaatag

SEQ ID NO: 8716 - DNA, 20 bp, synthetic construct
  source 1..20: mol_type = other DNA
tgtcacaatcacttgaaata

SEQ ID NO: 8717 - DNA, 20 bp, synthetic construct
  source 1..20: mol_type = other DNA
ttgtcacaatcacttgaaat

SEQ ID NO: 8718 - DNA, 20 bp, synthetic construct
  source 1..20: mol_type = other DNA
gttgtcacaatcacttgaaa

SEQ ID NO: 8719 - DNA, 20 bp, synthetic construct
  source 1..20: mol_type = other DNA
agttgtcacaatcacttgaa

SEQ ID NO: 8720 - DNA, 20 bp, synthetic construct
  source 1..20: mol_type = other DNA
aagttgtcacaatcacttga

SEQ ID NO: 8721 - DNA, 20 bp, synthetic construct
  source 1..20: mol_type = other DNA
gaagttgtcacaatcacttg

SEQ ID NO: 8722 - DNA, 20 bp, synthetic construct
  source 1..20: mol_type = other DNA
tgaagttgtcacaatcactt

SEQ ID NO: 8723 - DNA, 20 bp, synthetic construct
  source 1..20: mol_type = other DNA
ttgaagttgtcacaatcact

SEQ ID NO: 8724 - DNA, 20 bp, synthetic construct
  source 1..20: mol_type = other DNA
gttgaagttgtcacaatcac

SEQ ID NO: 8725 - DNA, 20 bp, synthetic construct
  source 1..20: mol_type = other DNA
cgttgaagttgtcacaatca

SEQ ID NO: 8726 - DNA, 20 bp, synthetic construct
  source 1..20: mol_type = other DNA
ccgttgaagttgtcacaatc

SEQ ID NO: 8727 - DNA, 20 bp, synthetic construct
  source 1..20: mol_type = other DNA
tccgttgaagttgtcacaat

SEQ ID NO: 8728 - DNA, 20 bp, synthetic construct
  source 1..20: mol_type = other DNA
ctccgttgaagttgtcacaa

SEQ ID NO: 8729 - DNA, 20 bp, synthetic construct
  source 1..20: mol_type = other DNA
tctccgttgaagttgtcaca

SEQ ID NO: 8730 - DNA, 20 bp, synthetic construct
  source 1..20: mol_type = other DNA
atctccgttgaagttgtcac

SEQ ID NO: 8731 - DNA, 20 bp, synthetic construct
  source 1..20: mol_type = other DNA
catctccgttgaagttgtca

SEQ ID NO: 8732 - DNA, 20 bp, synthetic construct
  source 1..20: mol_type = other DNA
acatctccgttgaagttgtc

SEQ ID NO: 8733 - DNA, 20 bp, synthetic construct
  source 1..20: mol_type = other DNA
tacatctccgttgaagttgt

SEQ ID NO: 8734 - DNA, 20 bp, synthetic construct
  source 1..20: mol_type = other DNA
ttacatctccgttgaagttg

SEQ ID NO: 8735 - DNA, 20 bp, synthetic construct
  source 1..20: mol_type = other DNA
tttacatctccgttgaagtt

SEQ ID NO: 8736 - DNA, 20 bp, synthetic construct
  source 1..20: mol_type = other DNA
gtttacatctccgttgaagt

SEQ ID NO: 8737 - DNA, 20 bp, synthetic construct
  source 1..20: mol_type = other DNA
tgtttacatctccgttgaag

SEQ ID NO: 8738 - DNA, 20 bp, synthetic construct
  source 1..20: mol_type = other DNA
ctgtttacatctccgttgaa

SEQ ID NO: 8739 - DNA, 20 bp, synthetic construct
  source 1..20: mol_type = other DNA
actgtttacatctccgttga

SEQ ID NO: 8740 - DNA, 20 bp, synthetic construct
  source 1..20: mol_type = other DNA
aactgtttacatctccgttg

SEQ ID NO: 8741 - DNA, 20 bp, synthetic construct
  source 1..20: mol_type = other DNA
aaactgtttacatctccgtt

SEQ ID NO: 8742 - DNA, 20 bp, synthetic construct
  source 1..20: mol_type = other DNA
taaactgtttacatctccgt

SEQ ID NO: 8743 - DNA, 20 bp, synthetic construct
  source 1..20: mol_type = other DNA
ataaactgtttacatctccg

SEQ ID NO: 8744 - DNA, 20 bp, synthetic construct
  source 1..20: mol_type = other DNA
aataaactgtttacatctcc

SEQ ID NO: 8745 - DNA, 20 bp, synthetic construct
  source 1..20: mol_type = other DNA
taataaactgtttacatctc

SEQ ID NO: 8746 - DNA, 20 bp, synthetic construct
  source 1..20: mol_type = other DNA
ttaataaactgtttacatct

SEQ ID NO: 8747 - DNA, 20 bp, synthetic construct
  source 1..20: mol_type = other DNA
gttaataaactgtttacatc

SEQ ID NO: 8748 - DNA, 20 bp, synthetic construct
  source 1..20: mol_type = other DNA
tgttaataaactgtttacat

SEQ ID NO: 8749 - DNA, 20 bp, synthetic construct
  source 1..20: mol_type = other DNA
ctgttaataaactgtttaca

SEQ ID NO: 8750 - DNA, 20 bp, synthetic construct
  source 1..20: mol_type = other DNA
actgttaataaactgtttac

SEQ ID NO: 8751 - DNA, 20 bp, synthetic construct
  source 1..20: mol_type = other DNA
gactgttaataaactgttta

SEQ ID NO: 8752 - DNA, 20 bp, synthetic construct
  source 1..20: mol_type = other DNA
tgactgttaataaactgttt

SEQ ID NO: 8753 - DNA, 20 bp, synthetic construct
  source 1..20: mol_type = other DNA
gtgactgttaataaactgtt

SEQ ID NO: 8754 - DNA, 20 bp, synthetic construct
  source 1..20: mol_type = other DNA
tgtgactgttaataaactgt

SEQ ID NO: 8755 - DNA, 20 bp, synthetic construct
  source 1..20: mol_type = other DNA
gtgtgactgttaataaactg

SEQ ID NO: 8756 - DNA, 20 bp, synthetic construct
  source 1..20: mol_type = other DNA
ggtgtgactgttaataaact

SEQ ID NO: 8757 - DNA, 20 bp, synthetic construct
  source 1..20: mol_type = other DNA
aggtgtgactgttaataaac

SEQ ID NO: 8758 - DNA, 20 bp, synthetic construct
  source 1..20: mol_type = other DNA
taggtgtgactgttaataaa

SEQ ID NO: 8759 - DNA, 20 bp, synthetic construct
  source 1..20: mol_type = other DNA
ataggtgtgactgttaataa

SEQ ID NO: 8760 - DNA, 20 bp, synthetic construct
  source 1..20: mol_type = other DNA
aataggtgtgactgttaata

SEQ ID NO: 8761 - DNA, 20 bp, synthetic construct
  source 1..20: mol_type = other DNA
taataggtgtgactgttaat

SEQ ID NO: 8762 - DNA, 20 bp, synthetic construct
  source 1..20: mol_type = other DNA
ataataggtgtgactgttaa

SEQ ID NO: 8763 - DNA, 20 bp, synthetic construct
  source 1..20: mol_type = other DNA
gataataggtgtgactgtta

SEQ ID NO: 8764 - DNA, 20 bp, synthetic construct
  source 1..20: mol_type = other DNA
agataataggtgtgactgtt

SEQ ID NO: 8765 - DNA, 20 bp, synthetic construct
  source 1..20: mol_type = other DNA
aagataataggtgtgactgt

SEQ ID NO: 8766 - DNA, 20 bp, synthetic construct
  source 1..20: mol_type = other DNA
aaagataataggtgtgactg

SEQ ID NO: 8767 - DNA, 20 bp, synthetic construct
  source 1..20: mol_type = other DNA
aaaagataataggtgtgact

SEQ ID NO: 8768 - DNA, 20 bp, synthetic construct
  source 1..20: mol_type = other DNA
aaaaagataataggtgtgac

SEQ ID NO: 8769 - DNA, 20 bp, synthetic construct
  source 1..20: mol_type = other DNA
aaaaaagataataggtgtga

SEQ ID NO: 8770 - DNA, 20 bp, synthetic construct
  source 1..20: mol_type = other DNA
aaaaaaagataataggtgtg

SEQ ID NO: 8771 - DNA, 20 bp, synthetic construct
  source 1..20: mol_type = other DNA
aaaaaaaagataataggtgt

SEQ ID NO: 8772 - DNA, 20 bp, synthetic construct
  source 1..20: mol_type = other DNA
aaaaaaaaagataataggtg

SEQ ID NO: 8773 - DNA, 20 bp, synthetic construct
  source 1..20: mol_type = other DNA
aaaaaaaaaagataataggt

SEQ ID NO: 8774 - DNA, 20 bp, synthetic construct
  source 1..20: mol_type = other DNA
aaaaaaaaaaagataatagg

SEQ ID NO: 8775 - DNA, 20 bp, synthetic construct
  source 1..20: mol_type = other DNA
aaaaaaaaaaaagataatag

SEQ ID NO: 8776 - DNA, 20 bp, synthetic construct
  source 1..20: mol_type = other DNA
aaaaaaaaaaaaagataata

SEQ ID NO: 8777 - DNA, 20 bp, synthetic construct
  source 1..20: mol_type = other DNA
aaaaaaaaaaaaaagataat

SEQ ID NO: 8778 - DNA, 20 bp, synthetic construct
  source 1..20: mol_type = other DNA
aaaaaaaaaaaaaaagataa

SEQ ID NO: 8779 - DNA, 20 bp, synthetic construct
  source 1..20: mol_type = other DNA
aaaaaaaaaaaaaaaagata

SEQ ID NO: 8780 - DNA, 20 bp, synthetic construct
  source 1..20: mol_type = other DNA
aaaaaaaaaaaaaaaaagat

SEQ ID NO: 8781 - DNA, 20 bp, synthetic construct
  source 1..20: mol_type = other DNA
aaaaaaaaaaaaaaaaaaga

SEQ ID NO: 8782 - DNA, 20 bp, synthetic construct
  source 1..20: mol_type = other DNA
aaaaaaaaaaaaaaaaaaag

SEQ ID NO: 8783 - DNA, 20 bp, synthetic construct
  source 1..20: mol_type = other DNA
aaaaaaaaaaaaaaaaaaaa

SEQ ID NO: 8784 - DNA, 20 bp, synthetic construct
  source 1..20: mol_type = other DNA
aaaaaaaaaaaaaaaaaaaa

SEQ ID NO: 8785 - DNA, 20 bp, synthetic construct
  source 1..20: mol_type = other DNA
aaaaaaaaaaaaaaaaaaaa

SEQ ID NO: 8786 - DNA, 20 bp, synthetic construct
  source 1..20: mol_type = other DNA
caaaaaaaaaaaaaaaaaaa

SEQ ID NO: 8787 - DNA, 20 bp, synthetic construct
  source 1..20: mol_type = other DNA
tcaaaaaaaaaaaaaaaaaa

SEQ ID NO: 8788 - DNA, 20 bp, synthetic construct
  source 1..20: mol_type = other DNA
ctcaaaaaaaaaaaaaaaaa

SEQ ID NO: 8789 - DNA, 20 bp, synthetic construct
  source 1..20: mol_type = other DNA
tctcaaaaaaaaaaaaaaaa

SEQ ID NO: 8790 - DNA, 20 bp, synthetic construct
  source 1..20: mol_type = other DNA
gtctcaaaaaaaaaaaaaaa

SEQ ID NO: 8791 - DNA, 20 bp, synthetic construct
  source 1..20: mol_type = other DNA
cgtctcaaaaaaaaaaaaaa

SEQ ID NO: 8792 - DNA, 20 bp, synthetic construct
  source 1..20: mol_type = other DNA
ccgtctcaaaaaaaaaaaaa

SEQ ID NO: 8793 - DNA, 20 bp, synthetic construct
  source 1..20: mol_type = other DNA
tccgtctcaaaaaaaaaaaa

SEQ ID NO: 8794 - DNA, 20 bp, synthetic construct
  source 1..20: mol_type = other DNA
ctccgtctcaaaaaaaaaaa

SEQ ID NO: 8795 - DNA, 20 bp, synthetic construct
  source 1..20: mol_type = other DNA
actccgtctcaaaaaaaaaa

SEQ ID NO: 8796 - DNA, 20 bp, synthetic construct
  source 1..20: mol_type = other DNA
gactccgtctcaaaaaaaaa

SEQ ID NO: 8797 - DNA, 20 bp, synthetic construct
  source 1..20: mol_type = other DNA
agactccgtctcaaaaaaaa

SEQ ID NO: 8798 - DNA, 20 bp, synthetic construct
  source 1..20: mol_type = other DNA
aagactccgtctcaaaaaaa

SEQ ID NO: 8799 - DNA, 20 bp, synthetic construct
  source 1..20: mol_type = other DNA
caagactccgtctcaaaaaa

SEQ ID NO: 8800 - DNA, 20 bp, synthetic construct
  source 1..20: mol_type = other DNA
gcaagactccgtctcaaaaa

SEQ ID NO: 8801 - DNA, 20 bp, synthetic construct
  source 1..20: mol_type = other DNA
agcaagactccgtctcaaaa

SEQ ID NO: 8802 - DNA, 20 bp, synthetic construct
  source 1..20: mol_type = other DNA
gagcaagactccgtctcaaa

SEQ ID NO: 8803 - DNA, 20 bp, synthetic construct
  source 1..20: mol_type = other DNA
agagcaagactccgtctcaa

SEQ ID NO: 8804 - DNA, 20 bp, synthetic construct
  source 1..20: mol_type = other DNA
cagagcaagactccgtctca

SEQ ID NO: 8805 - DNA, 20 bp, synthetic construct
  source 1..20: mol_type = other DNA
acagagcaagactccgtctc

SEQ ID NO: 8806 - DNA, 20 bp, synthetic construct
  source 1..20: mol_type = other DNA
gacagagcaagactccgtct

SEQ ID NO: 8807 - DNA, 20 bp, synthetic construct
  source 1..20: mol_type = other DNA
cgacagagcaagactccgtc

SEQ ID NO: 8808 - DNA, 20 bp, synthetic construct
  source 1..20: mol_type = other DNA
gcgacagagcaagactccgt

SEQ ID NO: 8809 - DNA, 20 bp, synthetic construct
  source 1..20: mol_type = other DNA
ggcgacagagcaagactccg

SEQ ID NO: 8810 - DNA, 20 bp, synthetic construct
  source 1..20: mol_type = other DNA
gggcgacagagcaagactcc

SEQ ID NO: 8811 - DNA, 20 bp, synthetic construct
  source 1..20: mol_type = other DNA
tgggcgacagagcaagactc

SEQ ID NO: 8812 - DNA, 20 bp, synthetic construct
  source 1..20: mol_type = other DNA
ctgggcgacagagcaagact

SEQ ID NO: 8813 - DNA, 20 bp, synthetic construct
  source 1..20: mol_type = other DNA
cctgggcgacagagcaagac

SEQ ID NO: 8814 - DNA, 20 bp, synthetic construct
  source 1..20: mol_type = other DNA
gcctgggcgacagagcaaga

SEQ ID NO: 8815 - DNA, 20 bp, synthetic construct
  source 1..20: mol_type = other DNA
agcctgggcgacagagcaag

SEQ ID NO: 8816 - DNA, 20 bp, synthetic construct
  source 1..20: mol_type = other DNA
cagcctgggcgacagagcaa

SEQ ID NO: 8817 - DNA, 20 bp, synthetic construct
  source 1..20: mol_type = other DNA
ccagcctgggcgacagagca

SEQ ID NO: 8818 - DNA, 20 bp, synthetic construct
  source 1..20: mol_type = other DNA
tccagcctgggcgacagagc

SEQ ID NO: 8819 - DNA, 20 bp, synthetic construct
  source 1..20: mol_type = other DNA
ctccagcctgggcgacagag

SEQ ID NO: 8820 - DNA, 20 bp, synthetic construct
  source 1..20: mol_type = other DNA
actccagcctgggcgacaga

SEQ ID NO: 8821 - DNA, 20 bp, synthetic construct
  source 1..20: mol_type = other DNA
cactccagcctgggcgacag

SEQ ID NO: 8822 - DNA, 20 bp, synthetic construct
  source 1..20: mol_type = other DNA
gcactccagcctgggcgaca

SEQ ID NO: 8823 - DNA, 20 bp, synthetic construct
  source 1..20: mol_type = other DNA
tgcactccagcctgggcgac

SEQ ID NO: 8824 - DNA, 20 bp, synthetic construct
  source 1..20: mol_type = other DNA
ctgcactccagcctgggcga

SEQ ID NO: 8825 - DNA, 20 bp, synthetic construct
  source 1..20: mol_type = other DNA
actgcactccagcctgggcg

SEQ ID NO: 8826 - DNA, 20 bp, synthetic construct
  source 1..20: mol_type = other DNA
cactgcactccagcctgggc

SEQ ID NO: 8827 - DNA, 20 bp, synthetic construct
  source 1..20: mol_type = other DNA
ccactgcactccagcctggg

SEQ ID NO: 8828 - DNA, 20 bp, synthetic construct
  source 1..20: mol_type = other DNA
gccactgcactccagcctgg

SEQ ID NO: 8829 - DNA, 20 bp, synthetic construct
  source 1..20: mol_type = other DNA
tgccactgcactccagcctg

SEQ ID NO: 8830 - DNA, 20 bp, synthetic construct
  source 1..20: mol_type = other DNA
gtgccactgcactccagcct

SEQ ID NO: 8831 - DNA, 20 bp, synthetic construct
  source 1..20: mol_type = other DNA
cgtgccactgcactccagcc

SEQ ID NO: 8832 - DNA, 20 bp, synthetic construct
  source 1..20: mol_type = other DNA
tcgtgccactgcactccagc

SEQ ID NO: 8833 - DNA, 20 bp, synthetic construct
  source 1..20: mol_type = other DNA
atcgtgccactgcactccag

SEQ ID NO: 8834 - DNA, 20 bp, synthetic construct
  source 1..20: mol_type = other DNA
gatcgtgccactgcactcca

SEQ ID NO: 8835 - DNA, 20 bp, synthetic construct
  source 1..20: mol_type = other DNA
agatcgtgccactgcactcc

SEQ ID NO: 8836 - DNA, 20 bp, synthetic construct
  source 1..20: mol_type = other DNA
gagatcgtgccactgcactc

SEQ ID NO: 8837 - DNA, 20 bp, synthetic construct
  source 1..20: mol_type = other DNA
agagatcgtgccactgcact

SEQ ID NO: 8838 - DNA, 20 bp, synthetic construct
  source 1..20: mol_type = other DNA
cagagatcgtgccactgcac

SEQ ID NO: 8839 - DNA, 20 bp, synthetic construct
  source 1..20: mol_type = other DNA
gcagagatcgtgccactgca

SEQ ID NO: 8840 - DNA, 20 bp, synthetic construct
  source 1..20: mol_type = other DNA
agcagagatcgtgccactgc

SEQ ID NO: 8841 - DNA, 20 bp, synthetic construct
  source 1..20: mol_type = other DNA
aagcagagatcgtgccactg

SEQ ID NO: 8842 - DNA, 20 bp, synthetic construct
  source 1..20: mol_type = other DNA
taagcagagatcgtgccact

SEQ ID NO: 8843 - DNA, 20 bp, synthetic construct
  source 1..20: mol_type = other DNA
gtaagcagagatcgtgccac

SEQ ID NO: 8844 - DNA, 20 bp, synthetic construct
  source 1..20: mol_type = other DNA
agtaagcagagatcgtgcca

SEQ ID NO: 8845 - DNA, 20 bp, synthetic construct
  source 1..20: mol_type = other DNA
cagtaagcagagatcgtgcc

SEQ ID NO: 8846 - DNA, 20 bp, synthetic construct
  source 1..20: mol_type = other DNA
gcagtaagcagagatcgtgc

SEQ ID NO: 8847 - DNA, 20 bp, synthetic construct
  source 1..20: mol_type = other DNA
tgcagtaagcagagatcgtg

SEQ ID NO: 8848 - DNA, 20 bp, synthetic construct
  source 1..20: mol_type = other DNA
ttgcagtaagcagagatcgt

SEQ ID NO: 8849 - DNA, 20 bp, synthetic construct
  source 1..20: mol_type = other DNA
gttgcagtaagcagagatcg

SEQ ID NO: 8850 - DNA, 20 bp, synthetic construct
  source 1..20: mol_type = other DNA
ggttgcagtaagcagagatc

SEQ ID NO: 8851 - DNA, 20 bp, synthetic construct
  source 1..20: mol_type = other DNA
aggttgcagtaagcagagat

SEQ ID NO: 8852 - DNA, 20 bp, synthetic construct
  source 1..20: mol_type = other DNA
aaggttgcagtaagcagaga

SEQ ID NO: 8853 - DNA, 20 bp, synthetic construct
  source 1..20: mol_type = other DNA
aaaggttgcagtaagcagag

SEQ ID NO: 8854 - DNA, 20 bp, synthetic construct
  source 1..20: mol_type = other DNA
caaaggttgcagtaagcaga

SEQ ID NO: 8855 - DNA, 20 bp, synthetic construct
  source 1..20: mol_type = other DNA
gcaaaggttgcagtaagcag

SEQ ID NO: 8856 - DNA, 20 bp, synthetic construct
  source 1..20: mol_type = other DNA
ggcaaaggttgcagtaagca

SEQ ID NO: 8857 - DNA, 20 bp, synthetic construct
  source 1..20: mol_type = other DNA
aggcaaaggttgcagtaagc

SEQ ID NO: 8858 - DNA, 20 bp, synthetic construct
  source 1..20: mol_type = other DNA
gaggcaaaggttgcagtaag

SEQ ID NO: 8859 - DNA, 20 bp, synthetic construct
  source 1..20: mol_type = other DNA
ggaggcaaaggttgcagtaa

SEQ ID NO: 8860 - DNA, 20 bp, synthetic construct
  source 1..20: mol_type = other DNA
gggaggcaaaggttgcagta

SEQ ID NO: 8861 - DNA, 20 bp, synthetic construct
  source 1..20: mol_type = other DNA
cgggaggcaaaggttgcagt

SEQ ID NO: 8862 - DNA, 20 bp, synthetic construct
  source 1..20: mol_type = other DNA
ccgggaggcaaaggttgcag

SEQ ID NO: 8863 - DNA, 20 bp, synthetic construct
  source 1..20: mol_type = other DNA
cccgggaggcaaaggttgca

SEQ ID NO: 8864 - DNA, 20 bp, synthetic construct
  source 1..20: mol_type = other DNA
acccgggaggcaaaggttgc

SEQ ID NO: 8865 - DNA, 20 bp, synthetic construct
  source 1..20: mol_type = other DNA
aacccgggaggcaaaggttg

SEQ ID NO: 8866 - DNA, 20 bp, synthetic construct
  source 1..20: mol_type = other DNA
gaacccgggaggcaaaggtt

SEQ ID NO: 8867 - DNA, 20 bp, synthetic construct
  source 1..20: mol_type = other DNA
tgaacccgggaggcaaaggt

SEQ ID NO: 8868 - DNA, 20 bp, synthetic construct
  source 1..20: mol_type = other DNA
ttgaacccgggaggcaaagg

SEQ ID NO: 8869 - DNA, 20 bp, synthetic construct
  source 1..20: mol_type = other DNA
cttgaacccgggaggcaaag

SEQ ID NO: 8870 - DNA, 20 bp, synthetic construct
  source 1..20: mol_type = other DNA
acttgaacccgggaggcaaa

SEQ ID NO: 8871 - DNA, 20 bp, synthetic construct
  source 1..20: mol_type = other DNA
cacttgaacccgggaggcaa

SEQ ID NO: 8872 - DNA, 20 bp, synthetic construct
  source 1..20: mol_type = other DNA
tcacttgaacccgggaggca

SEQ ID NO: 8873 - DNA, 20 bp, synthetic construct
  source 1..20: mol_type = other DNA
atcacttgaacccgggaggc

SEQ ID NO: 8874 - DNA, 20 bp, synthetic construct
  source 1..20: mol_type = other DNA
aatcacttgaacccgggagg

SEQ ID NO: 8875 - DNA, 20 bp, synthetic construct
  source 1..20: mol_type = other DNA
gaatcacttgaacccgggag

SEQ ID NO: 8876 - DNA, 20 bp, synthetic construct
  source 1..20: mol_type = other DNA
agaatcacttgaacccggga

SEQ ID NO: 8877 - DNA, 20 bp, synthetic construct
  source 1..20: mol_type = other DNA
gagaatcacttgaacccggg

SEQ ID NO: 8878 - DNA, 20 bp, synthetic construct
  source 1..20: mol_type = other DNA
ggagaatcacttgaacccgg

SEQ ID NO: 8879 - DNA, 20 bp, synthetic construct
  source 1..20: mol_type = other DNA
aggagaatcacttgaacccg

SEQ ID NO: 8880 - DNA, 20 bp, synthetic construct
  source 1..20: mol_type = other DNA
caggagaatcacttgaaccc

SEQ ID NO: 8881 - DNA, 20 bp, synthetic construct
  source 1..20: mol_type = other DNA
gcaggagaatcacttgaacc

SEQ ID NO: 8882 - DNA, 20 bp, synthetic construct
  source 1..20: mol_type = other DNA
ggcaggagaatcacttgaac

SEQ ID NO: 8883 - DNA, 20 bp, synthetic construct
  source 1..20: mol_type = other DNA
aggcaggagaatcacttgaa

SEQ ID NO: 8884 - DNA, 20 bp, synthetic construct
  source 1..20: mol_type = other DNA
gaggcaggagaatcacttga

SEQ ID NO: 8885 - DNA, 20 bp, synthetic construct
  source 1..20: mol_type = other DNA
tgaggcaggagaatcacttg

SEQ ID NO: 8886 - DNA, 20 bp, synthetic construct
  source 1..20: mol_type = other DNA
ctgaggcaggagaatcactt

SEQ ID NO: 8887 - DNA, 20 bp, synthetic construct
  source 1..20: mol_type = other DNA
gctgaggcaggagaatcact

SEQ ID NO: 8888 - DNA, 20 bp, synthetic construct
  source 1..20: mol_type = other DNA
ggctgaggcaggagaatcac

SEQ ID NO: 8889 - DNA, 20 bp, synthetic construct
  source 1..20: mol_type = other DNA
aggctgaggcaggagaatca

SEQ ID NO: 8890 - DNA, 20 bp, synthetic construct
  source 1..20: mol_type = other DNA
gaggctgaggcaggagaatc

SEQ ID NO: 8891 - DNA, 20 bp, synthetic construct
  source 1..20: mol_type = other DNA
ggaggctgaggcaggagaat

SEQ ID NO: 8892 - DNA, 20 bp, synthetic construct
  source 1..20: mol_type = other DNA
aggaggctgaggcaggagaa

SEQ ID NO: 8893 - DNA, 20 bp, synthetic construct
  source 1..20: mol_type = other DNA
caggaggctgaggcaggaga

SEQ ID NO: 8894 - DNA, 20 bp, synthetic construct
  source 1..20: mol_type = other DNA
tcaggaggctgaggcaggag

SEQ ID NO: 8895 - DNA, 20 bp, synthetic construct
  source 1..20: mol_type = other DNA
ctcaggaggctgaggcagga

SEQ ID NO: 8896 - DNA, 20 bp, synthetic construct
  source 1..20: mol_type = other DNA
actcaggaggctgaggcagg

SEQ ID NO: 8897 - DNA, 20 bp, synthetic construct
  source 1..20: mol_type = other DNA
tactcaggaggctgaggcag

SEQ ID NO: 8898 - DNA, 20 bp, synthetic construct
  source 1..20: mol_type = other DNA
ctactcaggaggctgaggca

SEQ ID NO: 8899 - DNA, 20 bp, synthetic construct
  source 1..20: mol_type = other DNA
gctactcaggaggctgaggc

SEQ ID NO: 8900 - DNA, 20 bp, synthetic construct
  source 1..20: mol_type = other DNA
agctactcaggaggctgagg

SEQ ID NO: 8901 - DNA, 20 bp, synthetic construct
  source 1..20: mol_type = other DNA
cagctactcaggaggctgag

SEQ ID NO: 8902 - DNA, 20 bp, synthetic construct
  source 1..20: mol_type = other DNA
ccagctactcaggaggctga

SEQ ID NO: 8903 - DNA, 20 bp, synthetic construct
  source 1..20: mol_type = other DNA
cccagctactcaggaggctg

SEQ ID NO: 8904 - DNA, 20 bp, synthetic construct
  source 1..20: mol_type = other DNA
acccagctactcaggaggct

SEQ ID NO: 8905 - DNA, 20 bp, synthetic construct
  source 1..20: mol_type = other DNA
gacccagctactcaggaggc

SEQ ID NO: 8906 - DNA, 20 bp, synthetic construct
  source 1..20: mol_type = other DNA
agacccagctactcaggagg

SEQ ID NO: 8907 - DNA, 20 bp, synthetic construct
  source 1..20: mol_type = other DNA
tagacccagctactcaggag

SEQ ID NO: 8908 - DNA, 20 bp, synthetic construct
  source 1..20: mol_type = other DNA
gtagacccagctactcagga

SEQ ID NO: 8909 - DNA, 20 bp, synthetic construct
  source 1..20: mol_type = other DNA
tgtagacccagctactcagg

SEQ ID NO: 8910 - DNA, 20 bp, synthetic construct
  source 1..20: mol_type = other DNA
atgtagacccagctactcag

SEQ ID NO: 8911 - DNA, 20 bp, synthetic construct
  source 1..20: mol_type = other DNA
catgtagacccagctactca

SEQ ID NO: 8912 - DNA, 20 bp, synthetic construct
  source 1..20: mol_type = other DNA
gcatgtagacccagctactc

SEQ ID NO: 8913 - DNA, 20 bp, synthetic construct
  source 1..20: mol_type = other DNA
cgcatgtagacccagctact

SEQ ID NO: 8914 - DNA, 20 bp, synthetic construct
  source 1..20: mol_type = other DNA
gcgcatgtagacccagctac

SEQ ID NO: 8915 - DNA, 20 bp, synthetic construct
  source 1..20: mol_type = other DNA
tgcgcatgtagacccagcta

SEQ ID NO: 8916 - DNA, 20 bp, synthetic construct
  source 1..20: mol_type = other DNA
gtgcgcatgtagacccagct

SEQ ID NO: 8917 - DNA, 20 bp, synthetic construct
  source 1..20: mol_type = other DNA
tgtgcgcatgtagacccagc

SEQ ID NO: 8918 - DNA, 20 bp, synthetic construct
  source 1..20: mol_type = other DNA
gtgtgcgcatgtagacccag

SEQ ID NO: 8919 - DNA, 20 bp, synthetic construct
  source 1..20: mol_type = other DNA
ggtgtgcgcatgtagaccca

SEQ ID NO: 8920 - DNA, 20 bp, synthetic construct
  source 1..20: mol_type = other DNA
tggtgtgcgcatgtagaccc

SEQ ID NO: 8921 - DNA, 20 bp, synthetic construct
  source 1..20: mol_type = other DNA
gtggtgtgcgcatgtagacc

SEQ ID NO: 8922 - DNA, 20 bp, synthetic construct
  source 1..20: mol_type = other DNA
ggtggtgtgcgcatgtagac

SEQ ID NO: 8923 - DNA, 20 bp, synthetic construct
  source 1..20: mol_type = other DNA
tggtggtgtgcgcatgtaga

SEQ ID NO: 8924 - DNA, 20 bp, synthetic construct
  source 1..20: mol_type = other DNA
gtggtggtgtgcgcatgtag

SEQ ID NO: 8925 - DNA, 20 bp, synthetic construct
  source 1..20: mol_type = other DNA
cgtggtggtgtgcgcatgta

SEQ ID NO: 8926 - DNA, 20 bp, synthetic construct
  source 1..20: mol_type = other DNA
gcgtggtggtgtgcgcatgt

SEQ ID NO: 8927 - DNA, 20 bp, synthetic construct
  source 1..20: mol_type = other DNA
ggcgtggtggtgtgcgcatg

SEQ ID NO: 8928 - DNA, 20 bp, synthetic construct
  source 1..20: mol_type = other DNA
aggcgtggtggtgtgcgcat

SEQ ID NO: 8929 - DNA, 20 bp, synthetic construct
  source 1..20: mol_type = other DNA
caggcgtggtggtgtgcgca

SEQ ID NO: 8930 - DNA, 20 bp, synthetic construct
  source 1..20: mol_type = other DNA
ccaggcgtggtggtgtgcgc

SEQ ID NO: 8931 - DNA, 20 bp, synthetic construct
  source 1..20: mol_type = other DNA
gccaggcgtggtggtgtgcg

SEQ ID NO: 8932 - DNA, 20 bp, synthetic construct
  source 1..20: mol_type = other DNA
agccaggcgtggtggtgtgc

SEQ ID NO: 8933 - DNA, 20 bp, synthetic construct
  source 1..20: mol_type = other DNA
tagccaggcgtggtggtgtg

SEQ ID NO: 8934 - DNA, 20 bp, synthetic construct
  source 1..20: mol_type = other DNA
ttagccaggcgtggtggtgt

SEQ ID NO: 8935 - DNA, 20 bp, synthetic construct
  source 1..20: mol_type = other DNA
attagccaggcgtggtggtg

SEQ ID NO: 8936 - DNA, 20 bp, synthetic construct
  source 1..20: mol_type = other DNA
aattagccaggcgtggtggt

SEQ ID NO: 8937 - DNA, 20 bp, synthetic construct
  source 1..20: mol_type = other DNA
aaattagccaggcgtggtgg

SEQ ID NO: 8938 - DNA, 20 bp, synthetic construct
  source 1..20: mol_type = other DNA
aaaattagccaggcgtggtg

SEQ ID NO: 8939 - DNA, 20 bp, synthetic construct
  source 1..20: mol_type = other DNA
aaaaattagccaggcgtggt

SEQ ID NO: 8940 - DNA, 20 bp, synthetic construct
  source 1..20: mol_type = other DNA
caaaaattagccaggcgtgg

SEQ ID NO: 8941 - DNA, 20 bp, synthetic construct
  source 1..20: mol_type = other DNA
acaaaaattagccaggcgtg

SEQ ID NO: 8942 - DNA, 20 bp, synthetic construct
  source 1..20: mol_type = other DNA
tacaaaaattagccaggcgt

SEQ ID NO: 8943 - DNA, 20 bp, synthetic construct
  source 1..20: mol_type = other DNA
atacaaaaattagccaggcg

SEQ ID NO: 8944 - DNA, 20 bp, synthetic construct
  source 1..20: mol_type = other DNA
aatacaaaaattagccaggc

SEQ ID NO: 8945 - DNA, 20 bp, synthetic construct
  source 1..20: mol_type = other DNA
aaatacaaaaattagccagg

SEQ ID NO: 8946 - DNA, 20 bp, synthetic construct
  source 1..20: mol_type = other DNA
aaaatacaaaaattagccag

SEQ ID NO: 8947 - DNA, 20 bp, synthetic construct
  source 1..20: mol_type = other DNA
aaaaatacaaaaattagcca

SEQ ID NO: 8948 - DNA, 20 bp, synthetic construct
  source 1..20: mol_type = other DNA
taaaaatacaaaaattagcc

SEQ ID NO: 8949 - DNA, 20 bp, synthetic construct
  source 1..20: mol_type = other DNA
ctaaaaatacaaaaattagc

SEQ ID NO: 8950 - DNA, 20 bp, synthetic construct
  source 1..20: mol_type = other DNA
actaaaaatacaaaaattag

SEQ ID NO: 8951 - DNA, 20 bp, synthetic construct
  source 1..20: mol_type = other DNA
tactaaaaatacaaaaatta

SEQ ID NO: 8952 - DNA, 20 bp, synthetic construct
  source 1..20: mol_type = other DNA
ctactaaaaatacaaaaatt

SEQ ID NO: 8953 - DNA, 20 bp, synthetic construct
  source 1..20: mol_type = other DNA
tctactaaaaatacaaaaat

SEQ ID NO: 8954 - DNA, 20 bp, synthetic construct
  source 1..20: mol_type = other DNA
ctctactaaaaatacaaaaa

SEQ ID NO: 8955 - DNA, 20 bp, synthetic construct
  source 1..20: mol_type = other DNA
tctctactaaaaatacaaaa

SEQ ID NO: 8956 - DNA, 20 bp, synthetic construct
  source 1..20: mol_type = other DNA
gtctctactaaaaatacaaa

SEQ ID NO: 8957 - DNA, 20 bp, synthetic construct
  source 1..20: mol_type = other DNA
tgtctctactaaaaatacaa

SEQ ID NO: 8958 - DNA, 20 bp, synthetic construct
  source 1..20: mol_type = other DNA
ctgtctctactaaaaataca

SEQ ID NO: 8959 - DNA, 20 bp, synthetic construct
  source 1..20: mol_type = other DNA
cctgtctctactaaaaatac

SEQ ID NO: 8960 - DNA, 20 bp, synthetic construct
  source 1..20: mol_type = other DNA
ccctgtctctactaaaaata

SEQ ID NO: 8961 - DNA, 20 bp, synthetic construct
  source 1..20: mol_type = other DNA
accctgtctctactaaaaat

SEQ ID NO: 8962 - DNA, 20 bp, synthetic construct
  source 1..20: mol_type = other DNA
aaccctgtctctactaaaaa

SEQ ID NO: 8963 - DNA, 20 bp, synthetic construct
  source 1..20: mol_type = other DNA
aaaccctgtctctactaaaa

SEQ ID NO: 8964 - DNA, 20 bp, synthetic construct
  source 1..20: mol_type = other DNA
gaaaccctgtctctactaaa

SEQ ID NO: 8965 - DNA, 20 bp, synthetic construct
  source 1..20: mol_type = other DNA
tgaaaccctgtctctactaa

SEQ ID NO: 8966 - DNA, 20 bp, synthetic construct
  source 1..20: mol_type = other DNA
gtgaaaccctgtctctacta

SEQ ID NO: 8967 - DNA, 20 bp, synthetic construct
  source 1..20: mol_type = other DNA
ggtgaaaccctgtctctact

SEQ ID NO: 8968 - DNA, 20 bp, synthetic construct
  source 1..20: mol_type = other DNA
tggtgaaaccctgtctctac

SEQ ID NO: 8969 - DNA, 20 bp, synthetic construct
  source 1..20: mol_type = other DNA
atggtgaaaccctgtctcta

SEQ ID NO: 8970 - DNA, 20 bp, synthetic construct
  source 1..20: mol_type = other DNA
catggtgaaaccctgtctct

SEQ ID NO: 8971 - DNA, 20 bp, synthetic construct
  source 1..20: mol_type = other DNA
acatggtgaaaccctgtctc

SEQ ID NO: 8972 - DNA, 20 bp, synthetic construct
  source 1..20: mol_type = other DNA
aacatggtgaaaccctgtct

SEQ ID NO: 8973 - DNA, 20 bp, synthetic construct
  source 1..20: mol_type = other DNA
caacatggtgaaaccctgtc

SEQ ID NO: 8974 - DNA, 20 bp, synthetic construct
  source 1..20: mol_type = other DNA
ccaacatggtgaaaccctgt

SEQ ID NO: 8975 - DNA, 20 bp, synthetic construct
  source 1..20: mol_type = other DNA
gccaacatggtgaaaccctg

SEQ ID NO: 8976 - DNA, 20 bp, synthetic construct
  source 1..20: mol_type = other DNA
agccaacatggtgaaaccct

SEQ ID NO: 8977 - DNA, 20 bp, synthetic construct
  source 1..20: mol_type = other DNA
tagccaacatggtgaaaccc

SEQ ID NO: 8978 - DNA, 20 bp, synthetic construct
  source 1..20: mol_type = other DNA
ctagccaacatggtgaaacc

SEQ ID NO: 8979 - DNA, 20 bp, synthetic construct
  source 1..20: mol_type = other DNA
tctagccaacatggtgaaac

SEQ ID NO: 8980 - DNA, 20 bp, synthetic construct
  source 1..20: mol_type = other DNA
ttctagccaacatggtgaaa

SEQ ID NO: 8981 - DNA, 20 bp, synthetic construct
  source 1..20: mol_type = other DNA
attctagccaacatggtgaa

SEQ ID NO: 8982 - DNA, 20 bp, synthetic construct
  source 1..20: mol_type = other DNA
cattctagccaacatggtga

SEQ ID NO: 8983 - DNA, 20 bp, synthetic construct
  source 1..20: mol_type = other DNA
ccattctagccaacatggtg

SEQ ID NO: 8984 - DNA, 20 bp, synthetic construct
  source 1..20: mol_type = other DNA
accattctagccaacatggt

SEQ ID NO: 8985 - DNA, 20 bp, synthetic construct
  source 1..20: mol_type = other DNA
gaccattctagccaacatgg

SEQ ID NO: 8986 - DNA, 20 bp, synthetic construct
  source 1..20: mol_type = other DNA
agaccattctagccaacatg

SEQ ID NO: 8987 - DNA, 20 bp, synthetic construct
  source 1..20: mol_type = other DNA
gagaccattctagccaacat

SEQ ID NO: 8988 - DNA, 20 bp, synthetic construct
  source 1..20: mol_type = other DNA
tgagaccattctagccaaca

SEQ ID NO: 8989 - DNA, 20 bp, synthetic construct
  source 1..20: mol_type = other DNA
ttgagaccattctagccaac

SEQ ID NO: 8990 - DNA, 20 bp, synthetic construct
  source 1..20: mol_type = other DNA
tttgagaccattctagccaa

SEQ ID NO: 8991 - DNA, 20 bp, synthetic construct
  source 1..20: mol_type = other DNA
gtttgagaccattctagcca

SEQ ID NO: 8992 - DNA, 20 bp, synthetic construct
  source 1..20: mol_type = other DNA
agtttgagaccattctagcc

SEQ ID NO: 8993 - DNA, 20 bp, synthetic construct
  source 1..20: mol_type = other DNA
gagtttgagaccattctagc

SEQ ID NO: 8994 - DNA, 20 bp, synthetic construct
  source 1..20: mol_type = other DNA
ggagtttgagaccattctag

SEQ ID NO: 8995 - DNA, 20 bp, synthetic construct
  source 1..20: mol_type = other DNA
aggagtttgagaccattcta

SEQ ID NO: 8996 - DNA, 20 bp, synthetic construct
  source 1..20: mol_type = other DNA
caggagtttgagaccattct

SEQ ID NO: 8997 - DNA, 20 bp, synthetic construct
  source 1..20: mol_type = other DNA
tcaggagtttgagaccattc

SEQ ID NO: 8998 - DNA, 20 bp, synthetic construct
  source 1..20: mol_type = other DNA
gtcaggagtttgagaccatt

SEQ ID NO: 8999 - DNA, 20 bp, synthetic construct
  source 1..20: mol_type = other DNA
ggtcaggagtttgagaccat

SEQ ID NO: 9000 - DNA, 20 bp, synthetic construct
  source 1..20: mol_type = other DNA
aggtcaggagtttgagacca

SEQ ID NO: 9001 - DNA, 20 bp, synthetic construct
  source 1..20: mol_type = other DNA
gaggtcaggagtttgagacc

SEQ ID NO: 9002 - DNA, 20 bp, synthetic construct
  source 1..20: mol_type = other DNA
tgaggtcaggagtttgagac

SEQ ID NO: 9003 - DNA, 20 bp, synthetic construct
  source 1..20: mol_type = other DNA
ctgaggtcaggagtttgaga

SEQ ID NO: 9004 - DNA, 20 bp, synthetic construct
  source 1..20: mol_type = other DNA
cctgaggtcaggagtttgag

SEQ ID NO: 9005 - DNA, 20 bp, synthetic construct
  source 1..20: mol_type = other DNA
acctgaggtcaggagtttga

SEQ ID NO: 9006 - DNA, 20 bp, synthetic construct
  source 1..20: mol_type = other DNA
cacctgaggtcaggagtttg

SEQ ID NO: 9007 - DNA, 20 bp, synthetic construct
  source 1..20: mol_type = other DNA
tcacctgaggtcaggagttt

SEQ ID NO: 9008 - DNA, 20 bp, synthetic construct
  source 1..20: mol_type = other DNA
atcacctgaggtcaggagtt

SEQ ID NO: 9009 - DNA, 20 bp, synthetic construct
  source 1..20: mol_type = other DNA
gatcacctgaggtcaggagt

SEQ ID NO: 9010 - DNA, 20 bp, synthetic construct
  source 1..20: mol_type = other DNA
ggatcacctgaggtcaggag

SEQ ID NO: 9011 - DNA, 20 bp, synthetic construct
  source 1..20: mol_type = other DNA
tggatcacctgaggtcagga

SEQ ID NO: 9012 - DNA, 20 bp, synthetic construct
  source 1..20: mol_type = other DNA
gtggatcacctgaggtcagg

SEQ ID NO: 9013 - DNA, 20 bp, synthetic construct
  source 1..20: mol_type = other DNA
ggtggatcacctgaggtcag

SEQ ID NO: 9014 - DNA, 20 bp, synthetic construct
  source 1..20: mol_type = other DNA
aggtggatcacctgaggtca

SEQ ID NO: 9015 - DNA, 20 bp, synthetic construct
  source 1..20: mol_type = other DNA
caggtggatcacctgaggtc

SEQ ID NO: 9016 - DNA, 20 bp, synthetic construct
  source 1..20: mol_type = other DNA
gcaggtggatcacctgaggt

SEQ ID NO: 9017 - DNA, 20 bp, synthetic construct
  source 1..20: mol_type = other DNA
ggcaggtggatcacctgagg

SEQ ID NO: 9018 - DNA, 20 bp, synthetic construct
  source 1..20: mol_type = other DNA
aggcaggtggatcacctgag

SEQ ID NO: 9019 - DNA, 20 bp, synthetic construct
  source 1..20: mol_type = other DNA
gaggcaggtggatcacctga

SEQ ID NO: 9020 - DNA, 20 bp, synthetic construct
  source 1..20: mol_type = other DNA
tgaggcaggtggatcacctg

SEQ ID NO: 9021 - DNA, 20 bp, synthetic construct
  source 1..20: mol_type = other DNA
ctgaggcaggtggatcacct

SEQ ID NO: 9022 - DNA, 20 bp, synthetic construct
  source 1..20: mol_type = other DNA
gctgaggcaggtggatcacc

SEQ ID NO: 9023 - DNA, 20 bp, synthetic construct
  source 1..20: mol_type = other DNA
ggctgaggcaggtggatcac

SEQ ID NO: 9024 - DNA, 20 bp, synthetic construct
  source 1..20: mol_type = other DNA
aggctgaggcaggtggatca

SEQ ID NO: 9025 - DNA, 20 bp, synthetic construct
  source 1..20: mol_type = other DNA
gaggctgaggcaggtggatc

SEQ ID NO: 9026 - DNA, 20 bp, synthetic construct
  source 1..20: mol_type = other DNA
ggaggctgaggcaggtggat

SEQ ID NO: 9027 - DNA, 20 bp, synthetic construct
  source 1..20: mol_type = other DNA
gggaggctgaggcaggtgga

SEQ ID NO: 9028 - DNA, 20 bp, synthetic construct
  source 1..20: mol_type = other DNA
tgggaggctgaggcaggtgg

SEQ ID NO: 9029 - DNA, 20 bp, synthetic construct
  source 1..20: mol_type = other DNA
ttgggaggctgaggcaggtg

SEQ ID NO: 9030 - DNA, 20 bp, synthetic construct
  source 1..20: mol_type = other DNA
tttgggaggctgaggcaggt

SEQ ID NO: 9031 - DNA, 20 bp, synthetic construct
  source 1..20: mol_type = other DNA
ctttgggaggctgaggcagg

SEQ ID NO: 9032 - DNA, 20 bp, synthetic construct
  source 1..20: mol_type = other DNA
actttgggaggctgaggcag

SEQ ID NO: 9033 - DNA, 20 bp, synthetic construct
  source 1..20: mol_type = other DNA
aactttgggaggctgaggca

SEQ ID NO: 9034 - DNA, 20 bp, synthetic construct
  source 1..20: mol_type = other DNA
gaactttgggaggctgaggc

SEQ ID NO: 9035 - DNA, 20 bp, synthetic construct
  source 1..20: mol_type = other DNA
agaactttgggaggctgagg

SEQ ID NO: 9036 - DNA, 20 bp, synthetic construct
  source 1..20: mol_type = other DNA
cagaactttgggaggctgag

SEQ ID NO: 9037 - DNA, 20 bp, synthetic construct
  source 1..20: mol_type = other DNA
ccagaactttgggaggctga

SEQ ID NO: 9038 - DNA, 20 bp, synthetic construct
  source 1..20: mol_type = other DNA
cccagaactttgggaggctg

SEQ ID NO: 9039 - DNA, 20 bp, synthetic construct
  source 1..20: mol_type = other DNA
tcccagaactttgggaggct

SEQ ID NO: 9040 - DNA, 20 bp, synthetic construct
  source 1..20: mol_type = other DNA
atcccagaactttgggaggc

SEQ ID NO: 9041 - DNA, 20 bp, synthetic construct
  source 1..20: mol_type = other DNA
aatcccagaactttgggagg

SEQ ID NO: 9042 - DNA, 20 bp, synthetic construct
  source 1..20: mol_type = other DNA
taatcccagaactttgggag

SEQ ID NO: 9043 - DNA, 20 bp, synthetic construct
  source 1..20: mol_type = other DNA
gtaatcccagaactttggga

SEQ ID NO: 9044 - DNA, 20 bp, synthetic construct
  source 1..20: mol_type = other DNA
tgtaatcccagaactttggg

SEQ ID NO: 9045 - DNA, 20 bp, synthetic construct
  source 1..20: mol_type = other DNA
ctgtaatcccagaactttgg

SEQ ID NO: 9046 - DNA, 20 bp, synthetic construct
  source 1..20: mol_type = other DNA
cctgtaatcccagaactttg

SEQ ID NO: 9047 - DNA, 20 bp, synthetic construct
  source 1..20: mol_type = other DNA
gcctgtaatcccagaacttt

SEQ ID NO: 9048 - DNA, 20 bp, synthetic construct
  source 1..20: mol_type = other DNA
tgcctgtaatcccagaactt

SEQ ID NO: 9049 - DNA, 20 bp, synthetic construct
  source 1..20: mol_type = other DNA
atgcctgtaatcccagaact

SEQ ID NO: 9050 - DNA, 20 bp, synthetic construct
  source 1..20: mol_type = other DNA
catgcctgtaatcccagaac

SEQ ID NO: 9051 - DNA, 20 bp, synthetic construct
  source 1..20: mol_type = other DNA
tcatgcctgtaatcccagaa

SEQ ID NO: 9052 - DNA, 20 bp, synthetic construct
  source 1..20: mol_type = other DNA
ctcatgcctgtaatcccaga

SEQ ID NO: 9053 - DNA, 20 bp, synthetic construct
  source 1..20: mol_type = other DNA
gctcatgcctgtaatcccag

SEQ ID NO: 9054 - DNA, 20 bp, synthetic construct
  source 1..20: mol_type = other DNA
ggctcatgcctgtaatccca

SEQ ID NO: 9055 - DNA, 20 bp, synthetic construct
  source 1..20: mol_type = other DNA
tggctcatgcctgtaatccc

SEQ ID NO: 9056 - DNA, 20 bp, synthetic construct
  source 1..20: mol_type = other DNA
gtggctcatgcctgtaatcc

SEQ ID NO: 9057 - DNA, 20 bp, synthetic construct
  source 1..20: mol_type = other DNA
ggtggctcatgcctgtaatc

SEQ ID NO: 9058 - DNA, 20 bp, synthetic construct
  source 1..20: mol_type = other DNA
cggtggctcatgcctgtaat

SEQ ID NO: 9059 - DNA, 20 bp, synthetic construct
  source 1..20: mol_type = other DNA
acggtggctcatgcctgtaa

SEQ ID NO: 9060 - DNA, 20 bp, synthetic construct
  source 1..20: mol_type = other DNA
cacggtggctcatgcctgta

SEQ ID NO: 9061 - DNA, 20 bp, synthetic construct
  source 1..20: mol_type = other DNA
gcacggtggctcatgcctgt

SEQ ID NO: 9062 - DNA, 20 bp, synthetic construct
  source 1..20: mol_type = other DNA
agcacggtggctcatgcctg

SEQ ID NO: 9063 - DNA, 20 bp, synthetic construct
  source 1..20: mol_type = other DNA
aagcacggtggctcatgcct

SEQ ID NO: 9064 - DNA, 20 bp, synthetic construct
  source 1..20: mol_type = other DNA
caagcacggtggctcatgcc

SEQ ID NO: 9065 - DNA, 20 bp, synthetic construct
  source 1..20: mol_type = other DNA
ccaagcacggtggctcatgc

SEQ ID NO: 9066 - DNA, 20 bp, synthetic construct
  source 1..20: mol_type = other DNA
gccaagcacggtggctcatg

SEQ ID NO: 9067 - DNA, 20 bp, synthetic construct
  source 1..20: mol_type = other DNA
ggccaagcacggtggctcat

SEQ ID NO: 9068 - DNA, 20 bp, synthetic construct
  source 1..20: mol_type = other DNA
cggccaagcacggtggctca

SEQ ID NO: 9069 - DNA, 20 bp, synthetic construct
  source 1..20: mol_type = other DNA
gcggccaagcacggtggctc

SEQ ID NO: 9070 - DNA, 20 bp, synthetic construct
  source 1..20: mol_type = other DNA
agcggccaagcacggtggct

SEQ ID NO: 9071 - DNA, 20 bp, synthetic construct
  source 1..20: mol_type = other DNA
cagcggccaagcacggtggc

SEQ ID NO: 9072 - DNA, 20 bp, synthetic construct
  source 1..20: mol_type = other DNA
gcagcggccaagcacggtgg

SEQ ID NO: 9073 - DNA, 20 bp, synthetic construct
  source 1..20: mol_type = other DNA
ggcagcggccaagcacggtg

SEQ ID NO: 9074 - DNA, 20 bp, synthetic construct
  source 1..20: mol_type = other DNA
cggcagcggccaagcacggt

SEQ ID NO: 9075 - DNA, 20 bp, synthetic construct
  source 1..20: mol_type = other DNA
acggcagcggccaagcacgg

SEQ ID NO: 9076 - DNA, 20 bp, synthetic construct
  source 1..20: mol_type = other DNA
tacggcagcggccaagcacg

SEQ ID NO: 9077 - DNA, 20 bp, synthetic construct
  source 1..20: mol_type = other DNA
atacggcagcggccaagcac

SEQ ID NO: 9078 - DNA, 20 bp, synthetic construct
  source 1..20: mol_type = other DNA
gatacggcagcggccaagca

SEQ ID NO: 9079 - DNA, 20 bp, synthetic construct
  source 1..20: mol_type = other DNA
agatacggcagcggccaagc

SEQ ID NO: 9080 - DNA, 20 bp, synthetic construct
  source 1..20: mol_type = other DNA
aagatacggcagcggccaag

SEQ ID NO: 9081 - DNA, 20 bp, synthetic construct
  source 1..20: mol_type = other DNA
aaagatacggcagcggccaa

SEQ ID NO: 9082 - DNA, 20 bp, synthetic construct
  source 1..20: mol_type = other DNA
aaaagatacggcagcggcca

SEQ ID NO: 9083 - DNA, 20 bp, synthetic construct
  source 1..20: mol_type = other DNA
aaaaagatacggcagcggcc

SEQ ID NO: 9084 - DNA, 20 bp, synthetic construct
  source 1..20: mol_type = other DNA
taaaaagatacggcagcggc

SEQ ID NO: 9085 - DNA, 20 bp, synthetic construct
  source 1..20: mol_type = other DNA
ttaaaaagatacggcagcgg

SEQ ID NO: 9086 - DNA, 20 bp, synthetic construct
  source 1..20: mol_type = other DNA
tttaaaaagatacggcagcg

SEQ ID NO: 9087 - DNA, 20 bp, synthetic construct
  source 1..20: mol_type = other DNA
atttaaaaagatacggcagc

SEQ ID NO: 9088 - DNA, 20 bp, synthetic construct
  source 1..20: mol_type = other DNA
catttaaaaagatacggcag

SEQ ID NO: 9089 - DNA, 20 bp, synthetic construct
  source 1..20: mol_type = other DNA
tcatttaaaaagatacggca

SEQ ID NO: 9090 - DNA, 20 bp, synthetic construct
  source 1..20: mol_type = other DNA
ttcatttaaaaagatacggc

SEQ ID NO: 9091 - DNA, 20 bp, synthetic construct
  source 1..20: mol_type = other DNA
tttcatttaaaaagatacgg

SEQ ID NO: 9092 - DNA, 20 bp, synthetic construct
  source 1..20: mol_type = other DNA
ctttcatttaaaaagatacg

SEQ ID NO: 9093 - DNA, 20 bp, synthetic construct
  source 1..20: mol_type = other DNA
actttcatttaaaaagatac

SEQ ID NO: 9094 - DNA, 20 bp, synthetic construct
  source 1..20: mol_type = other DNA
tactttcatttaaaaagata

SEQ ID NO: 9095 - DNA, 20 bp, synthetic construct
  source 1..20: mol_type = other DNA
gtactttcatttaaaaagat

SEQ ID NO: 9096 - DNA, 20 bp, synthetic construct
  source 1..20: mol_type = other DNA
agtactttcatttaaaaaga

SEQ ID NO: 9097 - DNA, 20 bp, synthetic construct
  source 1..20: mol_type = other DNA
aagtactttcatttaaaaag

SEQ ID NO: 9098 - DNA, 20 bp, synthetic construct
  source 1..20: mol_type = other DNA
caagtactttcatttaaaaa

SEQ ID NO: 9099 - DNA, 20 bp, synthetic construct
  source 1..20: mol_type = other DNA
acaagtactttcatttaaaa

SEQ ID NO: 9100 - DNA, 20 bp, synthetic construct
  source 1..20: mol_type = other DNA
cacaagtactttcatttaaa

SEQ ID NO: 9101 - DNA, 20 bp, synthetic construct
  source 1..20: mol_type = other DNA
acacaagtactttcatttaa

SEQ ID NO: 9102 - DNA, 20 bp, synthetic construct
  source 1..20: mol_type = other DNA
aacacaagtactttcattta

SEQ ID NO: 9103 - DNA, 20 bp, synthetic construct
  source 1..20: mol_type = other DNA
aaacacaagtactttcattt

SEQ ID NO: 9104 - DNA, 20 bp, synthetic construct
  source 1..20: mol_type = other DNA
aaaacacaagtactttcatt

SEQ ID NO: 9105 - DNA, 20 bp, synthetic construct
  source 1..20: mol_type = other DNA
aaaaacacaagtactttcat

SEQ ID NO: 9106 - DNA, 20 bp, synthetic construct
  source 1..20: mol_type = other DNA
aaaaaacacaagtactttca

SEQ ID NO: 9107 - DNA, 20 bp, synthetic construct
  source 1..20: mol_type = other DNA
aaaaaaacacaagtactttc

SEQ ID NO: 9108 - DNA, 20 bp, synthetic construct
  source 1..20: mol_type = other DNA
aaaaaaaacacaagtacttt

SEQ ID NO: 9109 - DNA, 20 bp, synthetic construct
  source 1..20: mol_type = other DNA
caaaaaaaacacaagtactt

SEQ ID NO: 9110 - DNA, 20 bp, synthetic construct
  source 1..20: mol_type = other DNA
acaaaaaaaacacaagtact

SEQ ID NO: 9111 - DNA, 20 bp, synthetic construct
  source 1..20: mol_type = other DNA
aacaaaaaaaacacaagtac

SEQ ID NO: 9112 - DNA, 20 bp, synthetic construct
  source 1..20: mol_type = other DNA
aaacaaaaaaaacacaagta

SEQ ID NO: 9113 - DNA, 20 bp, synthetic construct
  source 1..20: mol_type = other DNA
aaaacaaaaaaaacacaagt

SEQ ID NO: 9114 - DNA, 20 bp, synthetic construct
  source 1..20: mol_type = other DNA
aaaaacaaaaaaaacacaag

SEQ ID NO: 9115 - DNA, 20 bp, synthetic construct
  source 1..20: mol_type = other DNA
aaaaaacaaaaaaaacacaa

SEQ ID NO: 9116 - DNA, 20 bp, synthetic construct
  source 1..20: mol_type = other DNA
aaaaaaacaaaaaaaacaca

SEQ ID NO: 9117 - DNA, 20 bp, synthetic construct
  source 1..20: mol_type = other DNA
gaaaaaaacaaaaaaaacac

SEQ ID NO: 9118 - DNA, 20 bp, synthetic construct
  source 1..20: mol_type = other DNA
ggaaaaaaacaaaaaaaaca

SEQ ID NO: 9119 - DNA, 20 bp, synthetic construct
  source 1..20: mol_type = other DNA
tggaaaaaaacaaaaaaaac

SEQ ID NO: 9120 - DNA, 20 bp, synthetic construct
  source 1..20: mol_type = other DNA
ttggaaaaaaacaaaaaaaa

SEQ ID NO: 9121 - DNA, 20 bp, synthetic construct
  source 1..20: mol_type = other DNA
tttggaaaaaaacaaaaaaa

SEQ ID NO: 9122 - DNA, 20 bp, synthetic construct
  source 1..20: mol_type = other DNA
ctttggaaaaaaacaaaaaa

SEQ ID NO: 9123 - DNA, 20 bp, synthetic construct
  source 1..20: mol_type = other DNA
cctttggaaaaaaacaaaaa

SEQ ID NO: 9124 - DNA, 20 bp, synthetic construct
  source 1..20: mol_type = other DNA
tcctttggaaaaaaacaaaa

SEQ ID NO: 9125 - DNA, 20 bp, synthetic construct
  source 1..20: mol_type = other DNA
atcctttggaaaaaaacaaa

SEQ ID NO: 9126 - DNA, 20 bp, synthetic construct
  source 1..20: mol_type = other DNA
tatcctttggaaaaaaacaa

SEQ ID NO: 9127 - DNA, 20 bp, synthetic construct
  source 1..20: mol_type = other DNA
atatcctttggaaaaaaaca

SEQ ID NO: 9128 - DNA, 20 bp, synthetic construct
  source 1..20: mol_type = other DNA
gatatcctttggaaaaaaac

SEQ ID NO: 9129 - DNA, 20 bp, synthetic construct
  source 1..20: mol_type = other DNA
agatatcctttggaaaaaaa

SEQ ID NO: 9130 - DNA, 20 bp, synthetic construct
  source 1..20: mol_type = other DNA
cagatatcctttggaaaaaa

SEQ ID NO: 9131 - DNA, 20 bp, synthetic construct
  source 1..20: mol_type = other DNA
ccagatatcctttggaaaaa

SEQ ID NO: 9132 - DNA, 20 bp, synthetic construct
  source 1..20: mol_type = other DNA
cccagatatcctttggaaaa

SEQ ID NO: 9133 - DNA, 20 bp, synthetic construct
  source 1..20: mol_type = other DNA
acccagatatcctttggaaa

SEQ ID NO: 9134 - DNA, 20 bp, synthetic construct
  source 1..20: mol_type = other DNA
gacccagatatcctttggaa

SEQ ID NO: 9135 - DNA, 20 bp, synthetic construct
  source 1..20: mol_type = other DNA
tgacccagatatcctttgga

SEQ ID NO: 9136 - DNA, 20 bp, synthetic construct
  source 1..20: mol_type = other DNA
atgacccagatatcctttgg

SEQ ID NO: 9137 - DNA, 20 bp, synthetic construct
  source 1..20: mol_type = other DNA
gatgacccagatatcctttg

SEQ ID NO: 9138 - DNA, 20 bp, synthetic construct
  source 1..20: mol_type = other DNA
agatgacccagatatccttt

SEQ ID NO: 9139 - DNA, 20 bp, synthetic construct
  source 1..20: mol_type = other DNA
tagatgacccagatatcctt

SEQ ID NO: 9140 - DNA, 20 bp, synthetic construct
  source 1..20: mol_type = other DNA
atagatgacccagatatcct

SEQ ID NO: 9141 - DNA, 20 bp, synthetic construct
  source 1..20: mol_type = other DNA
catagatgacccagatatcc

SEQ ID NO: 9142 - DNA, 20 bp, synthetic construct
  source 1..20: mol_type = other DNA
tcatagatgacccagatatc

SEQ ID NO: 9143 - DNA, 20 bp, synthetic construct
  source 1..20: mol_type = other DNA
atcatagatgacccagatat

SEQ ID NO: 9144 - DNA, 20 bp, synthetic construct
  source 1..20: mol_type = other DNA
catcatagatgacccagata

SEQ ID NO: 9145 - DNA, 20 bp, synthetic construct
  source 1..20: mol_type = other DNA
acatcatagatgacccagat

SEQ ID NO: 9146 - DNA, 20 bp, synthetic construct
  source 1..20: mol_type = other DNA
aacatcatagatgacccaga

SEQ ID NO: 9147 - DNA, 20 bp, synthetic construct
  source 1..20: mol_type = other DNA
taacatcatagatgacccag

SEQ ID NO: 9148 - DNA, 20 bp, synthetic construct
  source 1..20: mol_type = other DNA
gtaacatcatagatgaccca

SEQ ID NO: 9149 - DNA, 20 bp, synthetic construct
  source 1..20: mol_type = other DNA
agtaacatcatagatgaccc

SEQ ID NO: 9150 - DNA, 20 bp, synthetic construct
  source 1..20: mol_type = other DNA
cagtaacatcatagatgacc

SEQ ID NO: 9151 - DNA, 20 bp, synthetic construct
  source 1..20: mol_type = other DNA
acagtaacatcatagatgac

SEQ ID NO: 9152 - DNA, 20 bp, synthetic construct
  source 1..20: mol_type = other DNA
aacagtaacatcatagatga

SEQ ID NO: 9153 - DNA, 20 bp, synthetic construct
  source 1..20: mol_type = other DNA
taacagtaacatcatagatg

SEQ ID NO: 9154 - DNA, 20 bp, synthetic construct
  source 1..20: mol_type = other DNA
gtaacagtaacatcatagat

SEQ ID NO: 9155 - DNA, 20 bp, synthetic construct
  source 1..20: mol_type = other DNA
ggtaacagtaacatcataga

SEQ ID NO: 9156 - DNA, 20 bp, synthetic construct
  source 1..20: mol_type = other DNA
tggtaacagtaacatcatag

SEQ ID NO: 9157 - DNA, 20 bp, synthetic construct
  source 1..20: mol_type = other DNA
atggtaacagtaacatcata

SEQ ID NO: 9158 - DNA, 20 bp, synthetic construct
  source 1..20: mol_type = other DNA
gatggtaacagtaacatcat

SEQ ID NO: 9159 - DNA, 20 bp, synthetic construct
  source 1..20: mol_type = other DNA
agatggtaacagtaacatca

SEQ ID NO: 9160 - DNA, 20 bp, synthetic construct
  source 1..20: mol_type = other DNA
tagatggtaacagtaacatc

SEQ ID NO: 9161 - DNA, 20 bp, synthetic construct
  source 1..20: mol_type = other DNA
ttagatggtaacagtaacat

SEQ ID NO: 9162 - DNA, 20 bp, synthetic construct
  source 1..20: mol_type = other DNA
cttagatggtaacagtaaca

SEQ ID NO: 9163 - DNA, 20 bp, synthetic construct
  source 1..20: mol_type = other DNA
ccttagatggtaacagtaac

SEQ ID NO: 9164 - DNA, 20 bp, synthetic construct
  source 1..20: mol_type = other DNA
cccttagatggtaacagtaa

SEQ ID NO: 9165 - DNA, 20 bp, synthetic construct
  source 1..20: mol_type = other DNA
acccttagatggtaacagta

SEQ ID NO: 9166 - DNA, 20 bp, synthetic construct
  source 1..20: mol_type = other DNA
aacccttagatggtaacagt

SEQ ID NO: 9167 - DNA, 20 bp, synthetic construct
  source 1..20: mol_type = other DNA
aaacccttagatggtaacag

SEQ ID NO: 9168 - DNA, 20 bp, synthetic construct
  source 1..20: mol_type = other DNA
aaaacccttagatggtaaca

SEQ ID NO: 9169 - DNA, 20 bp, synthetic construct
  source 1..20: mol_type = other DNA
aaaaacccttagatggtaac

SEQ ID NO: 9170 - DNA, 20 bp, synthetic construct
  source 1..20: mol_type = other DNA
aaaaaacccttagatggtaa

SEQ ID NO: 9171 - DNA, 20 bp, synthetic construct
  source 1..20: mol_type = other DNA
aaaaaaacccttagatggta

SEQ ID NO: 9172 - DNA, 20 bp, synthetic construct
  source 1..20: mol_type = other DNA
caaaaaaacccttagatggt

SEQ ID NO: 9173 - DNA, 20 bp, synthetic construct
  source 1..20: mol_type = other DNA
acaaaaaaacccttagatgg

SEQ ID NO: 9174 - DNA, 20 bp, synthetic construct
  source 1..20: mol_type = other DNA
aacaaaaaaacccttagatg

SEQ ID NO: 9175 - DNA, 20 bp, synthetic construct
  source 1..20: mol_type = other DNA
aaacaaaaaaacccttagat

SEQ ID NO: 9176 - DNA, 20 bp, synthetic construct
  source 1..20: mol_type = other DNA
caaacaaaaaaacccttaga

SEQ ID NO: 9177 - DNA, 20 bp, synthetic construct
  source 1..20: mol_type = other DNA
acaaacaaaaaaacccttag

SEQ ID NO: 9178 - DNA, 20 bp, synthetic construct
  source 1..20: mol_type = other DNA
aacaaacaaaaaaaccctta

SEQ ID NO: 9179 - DNA, 20 bp, synthetic construct
  source 1..20: mol_type = other DNA
aaacaaacaaaaaaaccctt

SEQ ID NO: 9180 - DNA, 20 bp, synthetic construct
  source 1..20: mol_type = other DNA
aaaacaaacaaaaaaaccct

SEQ ID NO: 9181 - DNA, 20 bp, synthetic construct
  source 1..20: mol_type = other DNA
aaaaacaaacaaaaaaaccc

SEQ ID NO: 9182 - DNA, 20 bp, synthetic construct
  source 1..20: mol_type = other DNA
caaaaacaaacaaaaaaacc

SEQ ID NO: 9183 - DNA, 20 bp, synthetic construct
  source 1..20: mol_type = other DNA
tcaaaaacaaacaaaaaaac

SEQ ID NO: 9184 - DNA, 20 bp, synthetic construct
  source 1..20: mol_type = other DNA
ctcaaaaacaaacaaaaaaa

SEQ ID NO: 9185 - DNA, 20 bp, synthetic construct
  source 1..20: mol_type = other DNA
tctcaaaaacaaacaaaaaa

SEQ ID NO: 9186 - DNA, 20 bp, synthetic construct
  source 1..20: mol_type = other DNA
gtctcaaaaacaaacaaaaa

SEQ ID NO: 9187 - DNA, 20 bp, synthetic construct
  source 1..20: mol_type = other DNA
tgtctcaaaaacaaacaaaa

SEQ ID NO: 9188 - DNA, 20 bp, synthetic construct
  source 1..20: mol_type = other DNA
ctgtctcaaaaacaaacaaa

SEQ ID NO: 9189 - DNA, 20 bp, synthetic construct
  source 1..20: mol_type = other DNA
tctgtctcaaaaacaaacaa

SEQ ID NO: 9190 - DNA, 20 bp, synthetic construct
  source 1..20: mol_type = other DNA
ctctgtctcaaaaacaaaca

SEQ ID NO: 9191 - DNA, 20 bp, synthetic construct
  source 1..20: mol_type = other DNA
actctgtctcaaaaacaaac

SEQ ID NO: 9192 - DNA, 20 bp, synthetic construct
  source 1..20: mol_type = other DNA
gactctgtctcaaaaacaaa

SEQ ID NO: 9193 - DNA, 20 bp, synthetic construct
  source 1..20: mol_type = other DNA
agactctgtctcaaaaacaa

SEQ ID NO: 9194 - DNA, 20 bp, synthetic construct
  source 1..20: mol_type = other DNA
gagactctgtctcaaaaaca

SEQ ID NO: 9195 - DNA, 20 bp, synthetic construct
  source 1..20: mol_type = other DNA
agagactctgtctcaaaaac

SEQ ID NO: 9196 - DNA, 20 bp, synthetic construct
  source 1..20: mol_type = other DNA
cagagactctgtctcaaaaa

SEQ ID NO: 9197 - DNA, 20 bp, synthetic construct
  source 1..20: mol_type = other DNA
acagagactctgtctcaaaa

SEQ ID NO: 9198 - DNA, 20 bp, synthetic construct
  source 1..20: mol_type = other DNA
gacagagactctgtctcaaa

SEQ ID NO: 9199 - DNA, 20 bp, synthetic construct
  source 1..20: mol_type = other DNA
cgacagagactctgtctcaa

SEQ ID NO: 9200 - DNA, 20 bp, synthetic construct
  source 1..20: mol_type = other DNA
gcgacagagactctgtctca

SEQ ID NO: 9201 - DNA, 20 bp, synthetic construct
  source 1..20: mol_type = other DNA
ggcgacagagactctgtctc

SEQ ID NO: 9202 - DNA, 20 bp, synthetic construct
  source 1..20: mol_type = other DNA
gggcgacagagactctgtct

SEQ ID NO: 9203 - DNA, 20 bp, synthetic construct
  source 1..20: mol_type = other DNA
tgggcgacagagactctgtc

SEQ ID NO: 9204 - DNA, 20 bp, synthetic construct
  source 1..20: mol_type = other DNA
ctgggcgacagagactctgt

SEQ ID NO: 9205 - DNA, 20 bp, synthetic construct
  source 1..20: mol_type = other DNA
cctgggcgacagagactctg

SEQ ID NO: 9206 - DNA, 20 bp, synthetic construct
  source 1..20: mol_type = other DNA
gcctgggcgacagagactct

SEQ ID NO: 9207 - DNA, 20 bp, synthetic construct
  source 1..20: mol_type = other DNA
agcctgggcgacagagactc

SEQ ID NO: 9208 - DNA, 20 bp, synthetic construct
  source 1..20: mol_type = other DNA
cagcctgggcgacagagact

SEQ ID NO: 9209 - DNA, 20 bp, synthetic construct
  source 1..20: mol_type = other DNA
ccagcctgggcgacagagac

SEQ ID NO: 9210 - DNA, 20 bp, synthetic construct
  source 1..20: mol_type = other DNA
tccagcctgggcgacagaga

SEQ ID NO: 9211 - DNA, 20 bp, synthetic construct
  source 1..20: mol_type = other DNA
ctccagcctgggcgacagag

SEQ ID NO: 9212 - DNA, 20 bp, synthetic construct
  source 1..20: mol_type = other DNA
actccagcctgggcgacaga

SEQ ID NO: 9213 - DNA, 20 bp, synthetic construct
  source 1..20: mol_type = other DNA
cactccagcctgggcgacag

SEQ ID NO: 9214 - DNA, 20 bp, synthetic construct
  source 1..20: mol_type = other DNA
gcactccagcctgggcgaca

SEQ ID NO: 9215 - DNA, 20 bp, synthetic construct
  source 1..20: mol_type = other DNA
tgcactccagcctgggcgac

SEQ ID NO: 9216 - DNA, 20 bp, synthetic construct
  source 1..20: mol_type = other DNA
ctgcactccagcctgggcga

SEQ ID NO: 9217 - DNA, 20 bp, synthetic construct
  source 1..20: mol_type = other DNA
actgcactccagcctgggcg

SEQ ID NO: 9218 - DNA, 20 bp, synthetic construct
  source 1..20: mol_type = other DNA
cactgcactccagcctgggc

SEQ ID NO: 9219 - DNA, 20 bp, synthetic construct
  source 1..20: mol_type = other DNA
ccactgcactccagcctggg

SEQ ID NO: 9220 - DNA, 20 bp, synthetic construct
  source 1..20: mol_type = other DNA
gccactgcactccagcctgg

SEQ ID NO: 9221 - DNA, 20 bp, synthetic construct
  source 1..20: mol_type = other DNA
cgccactgcactccagcctg

SEQ ID NO: 9222 - DNA, 20 bp, synthetic construct
  source 1..20: mol_type = other DNA
acgccactgcactccagcct

SEQ ID NO: 9223 - DNA, 20 bp, synthetic construct
  source 1..20: mol_type = other DNA
cacgccactgcactccagcc

SEQ ID NO: 9224 - DNA, 20 bp, synthetic construct
  source 1..20: mol_type = other DNA
tcacgccactgcactccagc

SEQ ID NO: 9225 - DNA, 20 bp, synthetic construct
  source 1..20: mol_type = other DNA
atcacgccactgcactccag

SEQ ID NO: 9226 - DNA, 20 bp, synthetic construct
  source 1..20: mol_type = other DNA
gatcacgccactgcactcca

SEQ ID NO: 9227 - DNA, 20 bp, synthetic construct
  source 1..20: mol_type = other DNA
agatcacgccactgcactcc

SEQ ID NO: 9228 - DNA, 20 bp, synthetic construct
  source 1..20: mol_type = other DNA
aagatcacgccactgcactc

SEQ ID NO: 9229 - DNA, 20 bp, synthetic construct
  source 1..20: mol_type = other DNA
caagatcacgccactgcact

SEQ ID NO: 9230 - DNA, 20 bp, synthetic construct
  source 1..20: mol_type = other DNA
ccaagatcacgccactgcac

SEQ ID NO: 9231 - DNA, 20 bp, synthetic construct
  source 1..20: mol_type = other DNA
gccaagatcacgccactgca

SEQ ID NO: 9232 - DNA, 20 bp, synthetic construct
  source 1..20: mol_type = other DNA
agccaagatcacgccactgc

SEQ ID NO: 9233 - DNA, 20 bp, synthetic construct
  source 1..20: mol_type = other DNA
gagccaagatcacgccactg

SEQ ID NO: 9234 - DNA, 20 bp, synthetic construct
  source 1..20: mol_type = other DNA
tgagccaagatcacgccact

SEQ ID NO: 9235 - DNA, 20 bp, synthetic construct
  source 1..20: mol_type = other DNA
gtgagccaagatcacgccac

SEQ ID NO: 9236 - DNA, 20 bp, synthetic construct
  source 1..20: mol_type = other DNA
agtgagccaagatcacgcca

SEQ ID NO: 9237 - DNA, 20 bp, synthetic construct
  source 1..20: mol_type = other DNA
cagtgagccaagatcacgcc

SEQ ID NO: 9238 - DNA, 20 bp, synthetic construct
  source 1..20: mol_type = other DNA
gcagtgagccaagatcacgc

SEQ ID NO: 9239 - DNA, 20 bp, synthetic construct
  source 1..20: mol_type = other DNA
tgcagtgagccaagatcacg

SEQ ID NO: 9240 - DNA, 20 bp, synthetic construct
  source 1..20: mol_type = other DNA
ttgcagtgagccaagatcac

SEQ ID NO: 9241 - DNA, 20 bp, synthetic construct
  source 1..20: mol_type = other DNA
gttgcagtgagccaagatca

SEQ ID NO: 9242 - DNA, 20 bp, synthetic construct
  source 1..20: mol_type = other DNA
ggttgcagtgagccaagatc

SEQ ID NO: 9243 - DNA, 20 bp, synthetic construct
  source 1..20: mol_type = other DNA
aggttgcagtgagccaagat

SEQ ID NO: 9244 - DNA, 20 bp, synthetic construct
  source 1..20: mol_type = other DNA
gaggttgcagtgagccaaga

SEQ ID NO: 9245 - DNA, 20 bp, synthetic construct
  source 1..20: mol_type = other DNA
ggaggttgcagtgagccaag

SEQ ID NO: 9246 - DNA, 20 bp, synthetic construct
  source 1..20: mol_type = other DNA
cggaggttgcagtgagccaa

SEQ ID NO: 9247 - DNA, 20 bp, synthetic construct
  source 1..20: mol_type = other DNA
gcggaggttgcagtgagcca

SEQ ID NO: 9248 - DNA, 20 bp, synthetic construct
  source 1..20: mol_type = other DNA
ggcggaggttgcagtgagcc

SEQ ID NO: 9249 - DNA, 20 bp, synthetic construct
  source 1..20: mol_type = other DNA
aggcggaggttgcagtgagc

SEQ ID NO: 9250 - DNA, 20 bp, synthetic construct
  source 1..20: mol_type = other DNA
gaggcggaggttgcagtgag

SEQ ID NO: 9251 - DNA, 20 bp, synthetic construct
  source 1..20: mol_type = other DNA
ggaggcggaggttgcagtga

SEQ ID NO: 9252 - DNA, 20 bp, synthetic construct
  source 1..20: mol_type = other DNA
gggaggcggaggttgcagtg

SEQ ID NO: 9253 - DNA, 20 bp, synthetic construct
  source 1..20: mol_type = other DNA
tgggaggcggaggttgcagt

SEQ ID NO: 9254 - DNA, 20 bp, synthetic construct
  source 1..20: mol_type = other DNA
ctgggaggcggaggttgcag

SEQ ID NO: 9255 - DNA, 20 bp, synthetic construct
  source 1..20: mol_type = other DNA
cctgggaggcggaggttgca

SEQ ID NO: 9256 - DNA, 20 bp, synthetic construct
  source 1..20: mol_type = other DNA
acctgggaggcggaggttgc

SEQ ID NO: 9257 - DNA, 20 bp, synthetic construct
  source 1..20: mol_type = other DNA
aacctgggaggcggaggttg

SEQ ID NO: 9258 - DNA, 20 bp, synthetic construct
  source 1..20: mol_type = other DNA
gaacctgggaggcggaggtt

SEQ ID NO: 9259 - DNA, 20 bp, synthetic construct
  source 1..20: mol_type = other DNA
tgaacctgggaggcggaggt

SEQ ID NO: 9260 - DNA, 20 bp, synthetic construct
  source 1..20: mol_type = other DNA
ttgaacctgggaggcggagg

SEQ ID NO: 9261 - DNA, 20 bp, synthetic construct
  source 1..20: mol_type = other DNA
cttgaacctgggaggcggag

SEQ ID NO: 9262 - DNA, 20 bp, synthetic construct
  source 1..20: mol_type = other DNA
gcttgaacctgggaggcgga

SEQ ID NO: 9263 - DNA, 20 bp, synthetic construct
  source 1..20: mol_type = other DNA
tgcttgaacctgggaggcgg

SEQ ID NO: 9264 - DNA, 20 bp, synthetic construct
  source 1..20: mol_type = other DNA
ttgcttgaacctgggaggcg

SEQ ID NO: 9265 - DNA, 20 bp, synthetic construct
  source 1..20: mol_type = other DNA
attgcttgaacctgggaggc

SEQ ID NO: 9266 - DNA, 20 bp, synthetic construct
  source 1..20: mol_type = other DNA
aattgcttgaacctgggagg

SEQ ID NO: 9267 - DNA, 20 bp, synthetic construct
  source 1..20: mol_type = other DNA
gaattgcttgaacctgggag

SEQ ID NO: 9268 - DNA, 20 bp, synthetic construct
  source 1..20: mol_type = other DNA
agaattgcttgaacctggga

SEQ ID NO: 9269 - DNA, 20 bp, synthetic construct
  source 1..20: mol_type = other DNA
gagaattgcttgaacctggg

SEQ ID NO: 9270 - DNA, 20 bp, synthetic construct
  source 1..20: mol_type = other DNA
ggagaattgcttgaacctgg

SEQ ID NO: 9271 - DNA, 20 bp, synthetic construct
  source 1..20: mol_type = other DNA
aggagaattgcttgaacctg

SEQ ID NO: 9272 - DNA, 20 bp, synthetic construct
  source 1..20: mol_type = other DNA
caggagaattgcttgaacct

SEQ ID NO: 9273 - DNA, 20 bp, synthetic construct
  source 1..20: mol_type = other DNA
gcaggagaattgcttgaacc

SEQ ID NO: 9274 - DNA, 20 bp, synthetic construct
  source 1..20: mol_type = other DNA
ggcaggagaattgcttgaac

SEQ ID NO: 9275 - DNA, 20 bp, synthetic construct
  source 1..20: mol_type = other DNA
aggcaggagaattgcttgaa

SEQ ID NO: 9276 - DNA, 20 bp, synthetic construct
  source 1..20: mol_type = other DNA
aaggcaggagaattgcttga

SEQ ID NO: 9277 - DNA, 20 bp, synthetic construct
  source 1..20: mol_type = other DNA
taaggcaggagaattgcttg

SEQ ID NO: 9278 - DNA, 20 bp, synthetic construct
  source 1..20: mol_type = other DNA
ctaaggcaggagaattgctt

SEQ ID NO: 9279 - DNA, 20 bp, synthetic construct
  source 1..20: mol_type = other DNA
gctaaggcaggagaattgct

SEQ ID NO: 9280 - DNA, 20 bp, synthetic construct
  source 1..20: mol_type = other DNA
ggctaaggcaggagaattgc

SEQ ID NO: 9281 - DNA, 20 bp, synthetic construct
  source 1..20: mol_type = other DNA
gggctaaggcaggagaattg

SEQ ID NO: 9282 - DNA, 20 bp, synthetic construct
  source 1..20: mol_type = other DNA
agggctaaggcaggagaatt

SEQ ID NO: 9283 - DNA, 20 bp, synthetic construct
  source 1..20: mol_type = other DNA
gagggctaaggcaggagaat

SEQ ID NO: 9284 - DNA, 20 bp, synthetic construct
  source 1..20: mol_type = other DNA
ggagggctaaggcaggagaa

SEQ ID NO: 9285 - DNA, 20 bp, synthetic construct
  source 1..20: mol_type = other DNA
gggagggctaaggcaggaga

SEQ ID NO: 9286 - DNA, 20 bp, synthetic construct
  source 1..20: mol_type = other DNA
cgggagggctaaggcaggag

SEQ ID NO: 9287 - DNA, 20 bp, synthetic construct
  source 1..20: mol_type = other DNA
tcgggagggctaaggcagga

SEQ ID NO: 9288 - DNA, 20 bp, synthetic construct
  source 1..20: mol_type = other DNA
ttcgggagggctaaggcagg

SEQ ID NO: 9289 - DNA, 20 bp, synthetic construct
  source 1..20: mol_type = other DNA
attcgggagggctaaggcag

SEQ ID NO: 9290 - DNA, 20 bp, synthetic construct
  source 1..20: mol_type = other DNA
tattcgggagggctaaggca

SEQ ID NO: 9291 - DNA, 20 bp, synthetic construct
  source 1..20: mol_type = other DNA
ctattcgggagggctaaggc

SEQ ID NO: 9292 - DNA, 20 bp, synthetic construct
  source 1..20: mol_type = other DNA
gctattcgggagggctaagg

SEQ ID NO: 9293 - DNA, 20 bp, synthetic construct
  source 1..20: mol_type = other DNA
agctattcgggagggctaag

SEQ ID NO: 9294 - DNA, 20 bp, synthetic construct
  source 1..20: mol_type = other DNA
cagctattcgggagggctaa

SEQ ID NO: 9295 - DNA, 20 bp, synthetic construct
  source 1..20: mol_type = other DNA
ccagctattcgggagggcta

SEQ ID NO: 9296 - DNA, 20 bp, synthetic construct
  source 1..20: mol_type = other DNA
cccagctattcgggagggct

SEQ ID NO: 9297 - DNA, 20 bp, synthetic construct
  source 1..20: mol_type = other DNA
tcccagctattcgggagggc

SEQ ID NO: 9298 - DNA, 20 bp, synthetic construct
  source 1..20: mol_type = other DNA
atcccagctattcgggaggg

SEQ ID NO: 9299 - DNA, 20 bp, synthetic construct
  source 1..20: mol_type = other DNA
aatcccagctattcgggagg

SEQ ID NO: 9300 - DNA, 20 bp, synthetic construct
  source 1..20: mol_type = other DNA
taatcccagctattcgggag

SEQ ID NO: 9301 - DNA, 20 bp, synthetic construct
  source 1..20: mol_type = other DNA
gtaatcccagctattcggga

SEQ ID NO: 9302 - DNA, 20 bp, synthetic construct
  source 1..20: mol_type = other DNA
tgtaatcccagctattcggg

SEQ ID NO: 9303 - DNA, 20 bp, synthetic construct
  source 1..20: mol_type = other DNA
ctgtaatcccagctattcgg

SEQ ID NO: 9304 - DNA, 20 bp, synthetic construct
  source 1..20: mol_type = other DNA
cctgtaatcccagctattcg

SEQ ID NO: 9305 - DNA, 20 bp, synthetic construct
  source 1..20: mol_type = other DNA
gcctgtaatcccagctattc

SEQ ID NO: 9306 - DNA, 20 bp, synthetic construct
  source 1..20: mol_type = other DNA
tgcctgtaatcccagctatt

SEQ ID NO: 9307 - DNA, 20 bp, synthetic construct
  source 1..20: mol_type = other DNA
gtgcctgtaatcccagctat

SEQ ID NO: 9308 - DNA, 20 bp, synthetic construct
  source 1..20: mol_type = other DNA
ggtgcctgtaatcccagcta

SEQ ID NO: 9309 - DNA, 20 bp, synthetic construct
  source 1..20: mol_type = other DNA
gggtgcctgtaatcccagct

SEQ ID NO: 9310 - DNA, 20 bp, synthetic construct
  source 1..20: mol_type = other DNA
cgggtgcctgtaatcccagc

SEQ ID NO: 9311 - DNA, 20 bp, synthetic construct
  source 1..20: mol_type = other DNA
gcgggtgcctgtaatcccag

SEQ ID NO: 9312 - DNA, 20 bp, synthetic construct
  source 1..20: mol_type = other DNA
ggcgggtgcctgtaatccca

SEQ ID NO: 9313 - DNA, 20 bp, synthetic construct
  source 1..20: mol_type = other DNA
tggcgggtgcctgtaatccc

SEQ ID NO: 9314 - DNA, 20 bp, synthetic construct
  source 1..20: mol_type = other DNA
gtggcgggtgcctgtaatcc

SEQ ID NO: 9315 - DNA, 20 bp, synthetic construct
  source 1..20: mol_type = other DNA
ggtggcgggtgcctgtaatc

SEQ ID NO: 9316 - DNA, 20 bp, synthetic construct
  source 1..20: mol_type = other DNA
tggtggcgggtgcctgtaat

SEQ ID NO: 9317 - DNA, 20 bp, synthetic construct
  source 1..20: mol_type = other DNA
atggtggcgggtgcctgtaa

SEQ ID NO: 9318 - DNA, 20 bp, synthetic construct
  source 1..20: mol_type = other DNA
catggtggcgggtgcctgta

SEQ ID NO: 9319 - DNA, 20 bp, synthetic construct
  source 1..20: mol_type = other DNA
gcatggtggcgggtgcctgt

SEQ ID NO: 9320 - DNA, 20 bp, synthetic construct
  source 1..20: mol_type = other DNA
ggcatggtggcgggtgcctg

SEQ ID NO: 9321 - DNA, 20 bp, synthetic construct
  source 1..20: mol_type = other DNA
aggcatggtggcgggtgcct

SEQ ID NO: 9322 - DNA, 20 bp, synthetic construct
  source 1..20: mol_type = other DNA
caggcatggtggcgggtgcc

SEQ ID NO: 9323 - DNA, 20 bp, synthetic construct
  source 1..20: mol_type = other DNA
ccaggcatggtggcgggtgc

SEQ ID NO: 9324 - DNA, 20 bp, synthetic construct
  source 1..20: mol_type = other DNA
gccaggcatggtggcgggtg

SEQ ID NO: 9325 - DNA, 20 bp, synthetic construct
  source 1..20: mol_type = other DNA
agccaggcatggtggcgggt

SEQ ID NO: 9326 - DNA, 20 bp, synthetic construct
  source 1..20: mol_type = other DNA
tagccaggcatggtggcggg

SEQ ID NO: 9327 - DNA, 20 bp, synthetic construct
  source 1..20: mol_type = other DNA
ttagccaggcatggtggcgg

SEQ ID NO: 9328 - DNA, 20 bp, synthetic construct
  source 1..20: mol_type = other DNA
cttagccaggcatggtggcg

SEQ ID NO: 9329 - DNA, 20 bp, synthetic construct
  source 1..20: mol_type = other DNA
acttagccaggcatggtggc

SEQ ID NO: 9330 - DNA, 20 bp, synthetic construct
  source 1..20: mol_type = other DNA
aacttagccaggcatggtgg

SEQ ID NO: 9331 - DNA, 20 bp, synthetic construct
  source 1..20: mol_type = other DNA
aaacttagccaggcatggtg

SEQ ID NO: 9332 - DNA, 20 bp, synthetic construct
  source 1..20: mol_type = other DNA
aaaacttagccaggcatggt

SEQ ID NO: 9333 - DNA, 20 bp, synthetic construct
  source 1..20: mol_type = other DNA
caaaacttagccaggcatgg

SEQ ID NO: 9334 - DNA, 20 bp, synthetic construct
  source 1..20: mol_type = other DNA
gcaaaacttagccaggcatg

SEQ ID NO: 9335 - DNA, 20 bp, synthetic construct
  source 1..20: mol_type = other DNA
tgcaaaacttagccaggcat

SEQ ID NO: 9336 - DNA, 20 bp, synthetic construct
  source 1..20: mol_type = other DNA
atgcaaaacttagccaggca

SEQ ID NO: 9337 - DNA, 20 bp, synthetic construct
  source 1..20: mol_type = other DNA
aatgcaaaacttagccaggc

SEQ ID NO: 9338 - DNA, 20 bp, synthetic construct
  source 1..20: mol_type = other DNA
aaatgcaaaacttagccagg

SEQ ID NO: 9339 - DNA, 20 bp, synthetic construct
  source 1..20: mol_type = other DNA
aaaatgcaaaacttagccag

SEQ ID NO: 9340 - DNA, 20 bp, synthetic construct
  source 1..20: mol_type = other DNA
aaaaatgcaaaacttagcca

SEQ ID NO: 9341 - DNA, 20 bp, synthetic construct
  source 1..20: mol_type = other DNA
taaaaatgcaaaacttagcc

SEQ ID NO: 9342 - DNA, 20 bp, synthetic construct
  source 1..20: mol_type = other DNA
ctaaaaatgcaaaacttagc

SEQ ID NO: 9343 - DNA, 20 bp, synthetic construct
  source 1..20: mol_type = other DNA
actaaaaatgcaaaacttag

SEQ ID NO: 9344 - DNA, 20 bp, synthetic construct
  source 1..20: mol_type = other DNA
tactaaaaatgcaaaactta

SEQ ID NO: 9345 - DNA, 20 bp, synthetic construct
  source 1..20: mol_type = other DNA
ctactaaaaatgcaaaactt

SEQ ID NO: 9346 - DNA, 20 bp, synthetic construct
  source 1..20: mol_type = other DNA
tctactaaaaatgcaaaact

SEQ ID NO: 9347 - DNA, 20 bp, synthetic construct
  source 1..20: mol_type = other DNA
atctactaaaaatgcaaaac

SEQ ID NO: 9348 - DNA, 20 bp, synthetic construct
  source 1..20: mol_type = other DNA
tatctactaaaaatgcaaaa

SEQ ID NO: 9349 - DNA, 20 bp, synthetic construct
  source 1..20: mol_type = other DNA
atatctactaaaaatgcaaa

SEQ ID NO: 9350 - DNA, 20 bp, synthetic construct
  source 1..20: mol_type = other DNA
catatctactaaaaatgcaa

SEQ ID NO: 9351 - DNA, 20 bp, synthetic construct
  source 1..20: mol_type = other DNA
ccatatctactaaaaatgca

SEQ ID NO: 9352 - DNA, 20 bp, synthetic construct
  source 1..20: mol_type = other DNA
tccatatctactaaaaatgc

SEQ ID NO: 9353 - DNA, 20 bp, synthetic construct
  source 1..20: mol_type = other DNA
ctccatatctactaaaaatg

SEQ ID NO: 9354 - DNA, 20 bp, synthetic construct
  source 1..20: mol_type = other DNA
actccatatctactaaaaat

SEQ ID NO: 9355 - DNA, 20 bp, synthetic construct
  source 1..20: mol_type = other DNA
aactccatatctactaaaaa

SEQ ID NO: 9356 - DNA, 20 bp, synthetic construct
  source 1..20: mol_type = other DNA
aaactccatatctactaaaa

SEQ ID NO: 9357 - DNA, 20 bp, synthetic construct
  source 1..20: mol_type = other DNA
gaaactccatatctactaaa

SEQ ID NO: 9358 - DNA, 20 bp, synthetic construct
  source 1..20: mol_type = other DNA
tgaaactccatatctactaa

SEQ ID NO: 9359 - DNA, 20 bp, synthetic construct
  source 1..20: mol_type = other DNA
gtgaaactccatatctacta

SEQ ID NO: 9360 - DNA, 20 bp, synthetic construct
  source 1..20: mol_type = other DNA
ggtgaaactccatatctact

SEQ ID NO: 9361 - DNA, 20 bp, synthetic construct
  source 1..20: mol_type = other DNA
tggtgaaactccatatctac

SEQ ID NO: 9362 - DNA, 20 bp, synthetic construct
  source 1..20: mol_type = other DNA
atggtgaaactccatatcta

SEQ ID NO: 9363 - DNA, 20 bp, synthetic construct
  source 1..20: mol_type = other DNA
catggtgaaactccatatct

SEQ ID NO: 9364 - DNA, 20 bp, synthetic construct
  source 1..20: mol_type = other DNA
acatggtgaaactccatatc

SEQ ID NO: 9365 - DNA, 20 bp, synthetic construct
  source 1..20: mol_type = other DNA
aacatggtgaaactccatat

SEQ ID NO: 9366 - DNA, 20 bp, synthetic construct
  source 1..20: mol_type = other DNA
caacatggtgaaactccata

SEQ ID NO: 9367 - DNA, 20 bp, synthetic construct
  source 1..20: mol_type = other DNA
ccaacatggtgaaactccat

SEQ ID NO: 9368 - DNA, 20 bp, synthetic construct
  source 1..20: mol_type = other DNA
gccaacatggtgaaactcca

SEQ ID NO: 9369 - DNA, 20 bp, synthetic construct
  source 1..20: mol_type = other DNA
ggccaacatggtgaaactcc

SEQ ID NO: 9370 - DNA, 20 bp, synthetic construct
  source 1..20: mol_type = other DNA
tggccaacatggtgaaactc

SEQ ID NO: 9371 - DNA, 20 bp, synthetic construct
  source 1..20: mol_type = other DNA
ctggccaacatggtgaaact

SEQ ID NO: 9372 - DNA, 20 bp, synthetic construct
  source 1..20: mol_type = other DNA
cctggccaacatggtgaaac

SEQ ID NO: 9373 - DNA, 20 bp, synthetic construct
  source 1..20: mol_type = other DNA
gcctggccaacatggtgaaa

SEQ ID NO: 9374 - DNA, 20 bp, synthetic construct
  source 1..20: mol_type = other DNA
agcctggccaacatggtgaa

SEQ ID NO: 9375 - DNA, 20 bp, synthetic construct
  source 1..20: mol_type = other DNA
cagcctggccaacatggtga

SEQ ID NO: 9376 - DNA, 20 bp, synthetic construct
  source 1..20: mol_type = other DNA
gcagcctggccaacatggtg

SEQ ID NO: 9377 - DNA, 20 bp, synthetic construct
  source 1..20: mol_type = other DNA
agcagcctggccaacatggt

SEQ ID NO: 9378 - DNA, 20 bp, synthetic construct
  source 1..20: mol_type = other DNA
gagcagcctggccaacatgg

SEQ ID NO: 9379 - DNA, 20 bp, synthetic construct
  source 1..20: mol_type = other DNA
agagcagcctggccaacatg

SEQ ID NO: 9380 - DNA, 20 bp, synthetic construct
  source 1..20: mol_type = other DNA
aagagcagcctggccaacat

SEQ ID NO: 9381 - DNA, 20 bp, synthetic construct
  source 1..20: mol_type = other DNA
caagagcagcctggccaaca

SEQ ID NO: 9382 - DNA, 20 bp, synthetic construct
  source 1..20: mol_type = other DNA
tcaagagcagcctggccaac

SEQ ID NO: 9383 - DNA, 20 bp, synthetic construct
  source 1..20: mol_type = other DNA
ttcaagagcagcctggccaa

SEQ ID NO: 9384 - DNA, 20 bp, synthetic construct
  source 1..20: mol_type = other DNA
gttcaagagcagcctggcca

SEQ ID NO: 9385 - DNA, 20 bp, synthetic construct
  source 1..20: mol_type = other DNA
agttcaagagcagcctggcc

SEQ ID NO: 9386 - DNA, 20 bp, synthetic construct
  source 1..20: mol_type = other DNA
gagttcaagagcagcctggc

SEQ ID NO: 9387 - DNA, 20 bp, synthetic construct
  source 1..20: mol_type = other DNA
ggagttcaagagcagcctgg

SEQ ID NO: 9388 - DNA, 20 bp, synthetic construct
  source 1..20: mol_type = other DNA
aggagttcaagagcagcctg

SEQ ID NO: 9389 - DNA, 20 bp, synthetic construct
  source 1..20: mol_type = other DNA
caggagttcaagagcagcct

SEQ ID NO: 9390 - DNA, 20 bp, synthetic construct
  source 1..20: mol_type = other DNA
tcaggagttcaagagcagcc

SEQ ID NO: 9391 - DNA, 20 bp, synthetic construct
  source 1..20: mol_type = other DNA
gtcaggagttcaagagcagc

SEQ ID NO: 9392 - DNA, 20 bp, synthetic construct
  source 1..20: mol_type = other DNA
ggtcaggagttcaagagcag

SEQ ID NO: 9393 - DNA, 20 bp, synthetic construct
  source 1..20: mol_type = other DNA
aggtcaggagttcaagagca

SEQ ID NO: 9394 - DNA, 20 bp, synthetic construct
  source 1..20: mol_type = other DNA
gaggtcaggagttcaagagc

SEQ ID NO: 9395 - DNA, 20 bp, synthetic construct
  source 1..20: mol_type = other DNA
tgaggtcaggagttcaagag

SEQ ID NO: 9396 - DNA, 20 bp, synthetic construct
  source 1..20: mol_type = other DNA
ctgaggtcaggagttcaaga

SEQ ID NO: 9397 - DNA, 20 bp, synthetic construct
  source 1..20: mol_type = other DNA
cctgaggtcaggagttcaag

SEQ ID NO: 9398 - DNA, 20 bp, synthetic construct
  source 1..20: mol_type = other DNA
acctgaggtcaggagttcaa

SEQ ID NO: 9399 - DNA, 20 bp, synthetic construct
  source 1..20: mol_type = other DNA
cacctgaggtcaggagttca

SEQ ID NO: 9400 - DNA, 20 bp, synthetic construct
  source 1..20: mol_type = other DNA
tcacctgaggtcaggagttc

SEQ ID NO: 9401 - DNA, 20 bp, synthetic construct
  source 1..20: mol_type = other DNA
atcacctgaggtcaggagtt

SEQ ID NO: 9402 - DNA, 20 bp, synthetic construct
  source 1..20: mol_type = other DNA
aatcacctgaggtcaggagt

SEQ ID NO: 9403 - DNA, 20 bp, synthetic construct
  source 1..20: mol_type = other DNA
gaatcacctgaggtcaggag

SEQ ID NO: 9404 - DNA, 20 bp, synthetic construct
  source 1..20: mol_type = other DNA
cgaatcacctgaggtcagga

SEQ ID NO: 9405 - DNA, 20 bp, synthetic construct
  source 1..20: mol_type = other DNA
gcgaatcacctgaggtcagg

SEQ ID NO: 9406 - DNA, 20 bp, synthetic construct
  source 1..20: mol_type = other DNA
agcgaatcacctgaggtcag

SEQ ID NO: 9407 - DNA, 20 bp, synthetic construct
  source 1..20: mol_type = other DNA
aagcgaatcacctgaggtca

SEQ ID NO: 9408 - DNA, 20 bp, synthetic construct
  source 1..20: mol_type = other DNA
caagcgaatcacctgaggtc

SEQ ID NO: 9409 - DNA, 20 bp, synthetic construct
  source 1..20: mol_type = other DNA
gcaagcgaatcacctgaggt

SEQ ID NO: 9410 - DNA, 20 bp, synthetic construct
  source 1..20: mol_type = other DNA
ggcaagcgaatcacctgagg

SEQ ID NO: 9411 - DNA, 20 bp, synthetic construct
  source 1..20: mol_type = other DNA
aggcaagcgaatcacctgag

SEQ ID NO: 9412 - DNA, 20 bp, synthetic construct
  source 1..20: mol_type = other DNA
gaggcaagcgaatcacctga

SEQ ID NO: 9413 - DNA, 20 bp, synthetic construct
  source 1..20: mol_type = other DNA
cgaggcaagcgaatcacctg

SEQ ID NO: 9414 - DNA, 20 bp, synthetic construct
  source 1..20: mol_type = other DNA
ccgaggcaagcgaatcacct

SEQ ID NO: 9415 - DNA, 20 bp, synthetic construct
  source 1..20: mol_type = other DNA
gccgaggcaagcgaatcacc

SEQ ID NO: 9416 - DNA, 20 bp, synthetic construct
  source 1..20: mol_type = other DNA
ggccgaggcaagcgaatcac

SEQ ID NO: 9417 - DNA, 20 bp, synthetic construct
  source 1..20: mol_type = other DNA
aggccgaggcaagcgaatca

SEQ ID NO: 9418 - DNA, 20 bp, synthetic construct
  source 1..20: mol_type = other DNA
gaggccgaggcaagcgaatc

SEQ ID NO: 9419 - DNA, 20 bp, synthetic construct
  source 1..20: mol_type = other DNA
ggaggccgaggcaagcgaat

SEQ ID NO: 9420 - DNA, 20 bp, synthetic construct
  source 1..20: mol_type = other DNA
gggaggccgaggcaagcgaa

SEQ ID NO: 9421 - DNA, 20 bp, synthetic construct
  source 1..20: mol_type = other DNA
tgggaggccgaggcaagcga

SEQ ID NO: 9422 - DNA, 20 bp, synthetic construct
  source 1..20: mol_type = other DNA
ttgggaggccgaggcaagcg

SEQ ID NO: 9423 - DNA, 20 bp, synthetic construct
  source 1..20: mol_type = other DNA
tttgggaggccgaggcaagc

SEQ ID NO: 9424 - DNA, 20 bp, synthetic construct
  source 1..20: mol_type = other DNA
ctttgggaggccgaggcaag

SEQ ID NO: 9425 - DNA, 20 bp, synthetic construct
  source 1..20: mol_type = other DNA
actttgggaggccgaggcaa

SEQ ID NO: 9426 - DNA, 20 bp, synthetic construct
  source 1..20: mol_type = other DNA
cactttgggaggccgaggca

SEQ ID NO: 9427 - DNA, 20 bp, synthetic construct
  source 1..20: mol_type = other DNA
gcactttgggaggccgaggc

SEQ ID NO: 9428 - DNA, 20 bp, synthetic construct
  source 1..20: mol_type = other DNA
agcactttgggaggccgagg

SEQ ID NO: 9429 - DNA, 20 bp, synthetic construct
  source 1..20: mol_type = other DNA
cagcactttgggaggccgag

SEQ ID NO: 9430 - DNA, 20 bp, synthetic construct
  source 1..20: mol_type = other DNA
ccagcactttgggaggccga

SEQ ID NO: 9431 - DNA, 20 bp, synthetic construct
  source 1..20: mol_type = other DNA
cccagcactttgggaggccg

SEQ ID NO: 9432 - DNA, 20 bp, synthetic construct
  source 1..20: mol_type = other DNA
tcccagcactttgggaggcc

SEQ ID NO: 9433 - DNA, 20 bp, synthetic construct
  source 1..20: mol_type = other DNA
atcccagcactttgggaggc

SEQ ID NO: 9434 - DNA, 20 bp, synthetic construct
  source 1..20: mol_type = other DNA
aatcccagcactttgggagg

SEQ ID NO: 9435 - DNA, 20 bp, synthetic construct
  source 1..20: mol_type = other DNA
taatcccagcactttgggag

SEQ ID NO: 9436 - DNA, 20 bp, synthetic construct
  source 1..20: mol_type = other DNA
gtaatcccagcactttggga

SEQ ID NO: 9437 - DNA, 20 bp, synthetic construct
  source 1..20: mol_type = other DNA
tgtaatcccagcactttggg

SEQ ID NO: 9438 - DNA, 20 bp, synthetic construct
  source 1..20: mol_type = other DNA
ctgtaatcccagcactttgg

SEQ ID NO: 9439 - DNA, 20 bp, synthetic construct
  source 1..20: mol_type = other DNA
cctgtaatcccagcactttg

SEQ ID NO: 9440 - DNA, 20 bp, synthetic construct
  source 1..20: mol_type = other DNA
gcctgtaatcccagcacttt

SEQ ID NO: 9441 - DNA, 20 bp, synthetic construct
  source 1..20: mol_type = other DNA
cgcctgtaatcccagcactt

SEQ ID NO: 9442 - DNA, 20 bp, synthetic construct
  source 1..20: mol_type = other DNA
acgcctgtaatcccagcact

SEQ ID NO: 9443 - DNA, 20 bp, synthetic construct
  source 1..20: mol_type = other DNA
cacgcctgtaatcccagcac

SEQ ID NO: 9444 - DNA, 20 bp, synthetic construct
  source 1..20: mol_type = other DNA
tcacgcctgtaatcccagca

SEQ ID NO: 9445 - DNA, 20 bp, synthetic construct
  source 1..20: mol_type = other DNA
ctcacgcctgtaatcccagc

SEQ ID NO: 9446 - DNA, 20 bp, synthetic construct
  source 1..20: mol_type = other DNA
gctcacgcctgtaatcccag

SEQ ID NO: 9447 - DNA, 20 bp, synthetic construct
  source 1..20: mol_type = other DNA
ggctcacgcctgtaatccca

SEQ ID NO: 9448 - DNA, 20 bp, synthetic construct
  source 1..20: mol_type = other DNA
tggctcacgcctgtaatccc

SEQ ID NO: 9449 - DNA, 20 bp, synthetic construct
  source 1..20: mol_type = other DNA
gtggctcacgcctgtaatcc

SEQ ID NO: 9450 - DNA, 20 bp, synthetic construct
  source 1..20: mol_type = other DNA
ggtggctcacgcctgtaatc

SEQ ID NO: 9451 - DNA, 20 bp, synthetic construct
  source 1..20: mol_type = other DNA
gggtggctcacgcctgtaat

SEQ ID NO: 9452 - DNA, 20 bp, synthetic construct
  source 1..20: mol_type = other DNA
ggggtggctcacgcctgtaa

SEQ ID NO: 9453 - DNA, 20 bp, synthetic construct
  source 1..20: mol_type = other DNA
gggggtggctcacgcctgta

SEQ ID NO: 9454 - DNA, 20 bp, synthetic construct
  source 1..20: mol_type = other DNA
cgggggtggctcacgcctgt

SEQ ID NO: 9455 - DNA, 20 bp, synthetic construct
  source 1..20: mol_type = other DNA
gcgggggtggctcacgcctg

SEQ ID NO: 9456 - DNA, 20 bp, synthetic construct
  source 1..20: mol_type = other DNA
ggcgggggtggctcacgcct

SEQ ID NO: 9457 - DNA, 20 bp, synthetic construct
  source 1..20: mol_type = other DNA
gggcgggggtggctcacgcc

SEQ ID NO: 9458 - DNA, 20 bp, synthetic construct
  source 1..20: mol_type = other DNA
tgggcgggggtggctcacgc

SEQ ID NO: 9459 - DNA, 20 bp, synthetic construct
  source 1..20: mol_type = other DNA
ctgggcgggggtggctcacg

SEQ ID NO: 9460 - DNA, 20 bp, synthetic construct
  source 1..20: mol_type = other DNA
gctgggcgggggtggctcac

SEQ ID NO: 9461 - DNA, 20 bp, synthetic construct
  source 1..20: mol_type = other DNA
ggctgggcgggggtggctca

SEQ ID NO: 9462 - DNA, 20 bp, synthetic construct
  source 1..20: mol_type = other DNA
aggctgggcgggggtggctc

SEQ ID NO: 9463 - DNA, 20 bp, synthetic construct
  source 1..20: mol_type = other DNA
gaggctgggcgggggtggct

SEQ ID NO: 9464 - DNA, 20 bp, synthetic construct
  source 1..20: mol_type = other DNA
tgaggctgggcgggggtggc

SEQ ID NO: 9465 - DNA, 20 bp, synthetic construct
  source 1..20: mol_type = other DNA
atgaggctgggcgggggtgg

SEQ ID NO: 9466 - DNA, 20 bp, synthetic construct
  source 1..20: mol_type = other DNA
catgaggctgggcgggggtg

SEQ ID NO: 9467 - DNA, 20 bp, synthetic construct
  source 1..20: mol_type = other DNA
tcatgaggctgggcgggggt

SEQ ID NO: 9468 - DNA, 20 bp, synthetic construct
  source 1..20: mol_type = other DNA
ctcatgaggctgggcggggg

SEQ ID NO: 9469 - DNA, 20 bp, synthetic construct
  source 1..20: mol_type = other DNA
gctcatgaggctgggcgggg

SEQ ID NO: 9470 - DNA, 20 bp, synthetic construct
  source 1..20: mol_type = other DNA
agctcatgaggctgggcggg

SEQ ID NO: 9471 - DNA, 20 bp, synthetic construct
  source 1..20: mol_type = other DNA
tagctcatgaggctgggcgg

SEQ ID NO: 9472 - DNA, 20 bp, synthetic construct
  source 1..20: mol_type = other DNA
ttagctcatgaggctgggcg

SEQ ID NO: 9473 - DNA, 20 bp, synthetic construct
  source 1..20: mol_type = other DNA
cttagctcatgaggctgggc

SEQ ID NO: 9474 - DNA, 20 bp, synthetic construct
  source 1..20: mol_type = other DNA
ccttagctcatgaggctggg

SEQ ID NO: 9475 - DNA, 20 bp, synthetic construct
  source 1..20: mol_type = other DNA
accttagctcatgaggctgg

SEQ ID NO: 9476 - DNA, 20 bp, synthetic construct
  source 1..20: mol_type = other DNA
caccttagctcatgaggctg

SEQ ID NO: 9477 - DNA, 20 bp, synthetic construct
  source 1..20: mol_type = other DNA
acaccttagctcatgaggct

SEQ ID NO: 9478 - DNA, 20 bp, synthetic construct
  source 1..20: mol_type = other DNA
aacaccttagctcatgaggc

SEQ ID NO: 9479 - DNA, 20 bp, synthetic construct
  source 1..20: mol_type = other DNA
aaacaccttagctcatgagg

SEQ ID NO: 9480 - DNA, 20 bp, synthetic construct
  source 1..20: mol_type = other DNA
aaaacaccttagctcatgag

SEQ ID NO: 9481 - DNA, 20 bp, synthetic construct
  source 1..20: mol_type = other DNA
aaaaacaccttagctcatga

SEQ ID NO: 9482 - DNA, 20 bp, synthetic construct
  source 1..20: mol_type = other DNA
aaaaaacaccttagctcatg

SEQ ID NO: 9483 - DNA, 20 bp, synthetic construct
  source 1..20: mol_type = other DNA
aaaaaaacaccttagctcat

SEQ ID NO: 9484 - DNA, 20 bp, synthetic construct
  source 1..20: mol_type = other DNA
aaaaaaaacaccttagctca

SEQ ID NO: 9485 - DNA, 20 bp, synthetic construct
  source 1..20: mol_type = other DNA
aaaaaaaaacaccttagctc

SEQ ID NO: 9486 - DNA, 20 bp, synthetic construct
  source 1..20: mol_type = other DNA
aaaaaaaaaacaccttagct

SEQ ID NO: 9487 - DNA, 20 bp, synthetic construct
  source 1..20: mol_type = other DNA
aaaaaaaaaaacaccttagc

SEQ ID NO: 9488 - DNA, 20 bp, synthetic construct
  source 1..20: mol_type = other DNA
aaaaaaaaaaaacaccttag

SEQ ID NO: 9489 - DNA, 20 bp, synthetic construct
  source 1..20: mol_type = other DNA
aaaaaaaaaaaaacacctta

SEQ ID NO: 9490 - DNA, 20 bp, synthetic construct
  source 1..20: mol_type = other DNA
aaaaaaaaaaaaaacacctt

SEQ ID NO: 9491 - DNA, 20 bp, synthetic construct
  source 1..20: mol_type = other DNA
caaaaaaaaaaaaaacacct

SEQ ID NO: 9492 - DNA, 20 bp, synthetic construct
  source 1..20: mol_type = other DNA
tcaaaaaaaaaaaaaacacc

SEQ ID NO: 9493 - DNA, 20 bp, synthetic construct
  source 1..20: mol_type = other DNA
ctcaaaaaaaaaaaaaacac

SEQ ID NO: 9494 - DNA, 20 bp, synthetic construct
  source 1..20: mol_type = other DNA
tctcaaaaaaaaaaaaaaca

SEQ ID NO: 9495 - DNA, 20 bp, synthetic construct
  source 1..20: mol_type = other DNA
gtctcaaaaaaaaaaaaaac

SEQ ID NO: 9496 - DNA, 20 bp, synthetic construct
  source 1..20: mol_type = other DNA
tgtctcaaaaaaaaaaaaaa

SEQ ID NO: 9497 - DNA, 20 bp, synthetic construct
  source 1..20: mol_type = other DNA
ctgtctcaaaaaaaaaaaaa

SEQ ID NO: 9498 - DNA, 20 bp, synthetic construct
  source 1..20: mol_type = other DNA
actgtctcaaaaaaaaaaaa

SEQ ID NO: 9499 - DNA, 20 bp, synthetic construct
  source 1..20: mol_type = other DNA
aactgtctcaaaaaaaaaaa

SEQ ID NO: 9500 - DNA, 20 bp, synthetic construct
  source 1..20: mol_type = other DNA
aaactgtctcaaaaaaaaaa

SEQ ID NO: 9501 - DNA, 20 bp, synthetic construct
  source 1..20: mol_type = other DNA
aaaactgtctcaaaaaaaaa

SEQ ID NO: 9502 - DNA, 20 bp, synthetic construct
  source 1..20: mol_type = other DNA
caaaactgtctcaaaaaaaa

SEQ ID NO: 9503 - DNA, 20 bp, synthetic construct
  source 1..20: mol_type = other DNA
gcaaaactgtctcaaaaaaa

SEQ ID NO: 9504 - DNA, 20 bp, synthetic construct
  source 1..20: mol_type = other DNA
agcaaaactgtctcaaaaaa

SEQ ID NO: 9505 - DNA, 20 bp, synthetic construct
  source 1..20: mol_type = other DNA
gagcaaaactgtctcaaaaa

SEQ ID NO: 9506 - DNA, 20 bp, synthetic construct
  source 1..20: mol_type = other DNA
agagcaaaactgtctcaaaa

SEQ ID NO: 9507 - DNA, 20 bp, synthetic construct
  source 1..20: mol_type = other DNA
aagagcaaaactgtctcaaa

SEQ ID NO: 9508 - DNA, 20 bp, synthetic construct
  source 1..20: mol_type = other DNA
aaagagcaaaactgtctcaa

SEQ ID NO: 9509 - DNA, 20 bp, synthetic construct
  source 1..20: mol_type = other DNA
gaaagagcaaaactgtctca

SEQ ID NO: 9510 - DNA, 20 bp, synthetic construct
  source 1..20: mol_type = other DNA
ggaaagagcaaaactgtctc

SEQ ID NO: 9511 - DNA, 20 bp, synthetic construct
  source 1..20: mol_type = other DNA
gggaaagagcaaaactgtct

SEQ ID NO: 9512 - DNA, 20 bp, synthetic construct
  source 1..20: mol_type = other DNA
tgggaaagagcaaaactgtc

SEQ ID NO: 9513 - DNA, 20 bp, synthetic construct
  source 1..20: mol_type = other DNA
ctgggaaagagcaaaactgt

SEQ ID NO: 9514 - DNA, 20 bp, synthetic construct
  source 1..20: mol_type = other DNA
cctgggaaagagcaaaactg

SEQ ID NO: 9515 - DNA, 20 bp, synthetic construct
  source 1..20: mol_type = other DNA
gcctgggaaagagcaaaact

SEQ ID NO: 9516 - DNA, 20 bp, synthetic construct
  source 1..20: mol_type = other DNA
agcctgggaaagagcaaaac

SEQ ID NO: 9517 - DNA, 20 bp, synthetic construct
  source 1..20: mol_type = other DNA
cagcctgggaaagagcaaaa

SEQ ID NO: 9518 - DNA, 20 bp, synthetic construct
  source 1..20: mol_type = other DNA
ccagcctgggaaagagcaaa

SEQ ID NO: 9519 - DNA, 20 bp, synthetic construct
  source 1..20: mol_type = other DNA
tccagcctgggaaagagcaa

SEQ ID NO: 9520 - DNA, 20 bp, synthetic construct
  source 1..20: mol_type = other DNA
ctccagcctgggaaagagca

SEQ ID NO: 9521 - DNA, 20 bp, synthetic construct
  source 1..20: mol_type = other DNA
actccagcctgggaaagagc

SEQ ID NO: 9522 - DNA, 20 bp, synthetic construct
  source 1..20: mol_type = other DNA
cactccagcctgggaaagag

SEQ ID NO: 9523 - DNA, 20 bp, synthetic construct
  source 1..20: mol_type = other DNA
gcactccagcctgggaaaga

SEQ ID NO: 9524 - DNA, 20 bp, synthetic construct
  source 1..20: mol_type = other DNA
tgcactccagcctgggaaag

SEQ ID NO: 9525 - DNA, 20 bp, synthetic construct
  source 1..20: mol_type = other DNA
ctgcactccagcctgggaaa

SEQ ID NO: 9526 - DNA, 20 bp, synthetic construct
  source 1..20: mol_type = other DNA
actgcactccagcctgggaa

SEQ ID NO: 9527 - DNA, 20 bp, synthetic construct
  source 1..20: mol_type = other DNA
cactgcactccagcctggga

SEQ ID NO: 9528 - DNA, 20 bp, synthetic construct
  source 1..20: mol_type = other DNA
ccactgcactccagcctggg

SEQ ID NO: 9529 - DNA, 20 bp, synthetic construct
  source 1..20: mol_type = other DNA
accactgcactccagcctgg

SEQ ID NO: 9530 - DNA, 20 bp, synthetic construct
  source 1..20: mol_type = other DNA
caccactgcactccagcctg

SEQ ID NO: 9531 - DNA, 20 bp, synthetic construct
  source 1..20: mol_type = other DNA
gcaccactgcactccagcct

SEQ ID NO: 9532 - DNA, 20 bp, synthetic construct
  source 1..20: mol_type = other DNA
tgcaccactgcactccagcc

SEQ ID NO: 9533 - DNA, 20 bp, synthetic construct
  source 1..20: mol_type = other DNA
ttgcaccactgcactccagc

SEQ ID NO: 9534 - DNA, 20 bp, synthetic construct
  source 1..20: mol_type = other DNA
attgcaccactgcactccag

SEQ ID NO: 9535 - DNA, 20 bp, synthetic construct
  source 1..20: mol_type = other DNA
gattgcaccactgcactcca

SEQ ID NO: 9536 - DNA, 20 bp, synthetic construct
  source 1..20: mol_type = other DNA
agattgcaccactgcactcc

SEQ ID NO: 9537 - DNA, 20 bp, synthetic construct
  source 1..20: mol_type = other DNA
gagattgcaccactgcactc

SEQ ID NO: 9538 - DNA, 20 bp, synthetic construct
  source 1..20: mol_type = other DNA
tgagattgcaccactgcact

SEQ ID NO: 9539 - DNA, 20 bp, synthetic construct
  source 1..20: mol_type = other DNA
ctgagattgcaccactgcac

SEQ ID NO: 9540 - DNA, 20 bp, synthetic construct
  source 1..20: mol_type = other DNA
gctgagattgcaccactgca

SEQ ID NO: 9541 - DNA, 20 bp, synthetic construct
  source 1..20: mol_type = other DNA
agctgagattgcaccactgc

SEQ ID NO: 9542 - DNA, 20 bp, synthetic construct
  source 1..20: mol_type = other DNA
gagctgagattgcaccactg

SEQ ID NO: 9543 - DNA, 20 bp, synthetic construct
  source 1..20: mol_type = other DNA
tgagctgagattgcaccact

SEQ ID NO: 9544 - DNA, 20 bp, synthetic construct
  source 1..20: mol_type = other DNA
gtgagctgagattgcaccac

SEQ ID NO: 9545 - DNA, 20 bp, synthetic construct
  source 1..20: mol_type = other DNA
agtgagctgagattgcacca

SEQ ID NO: 9546 - DNA, 20 bp, synthetic construct
  source 1..20: mol_type = other DNA
cagtgagctgagattgcacc

SEQ ID NO: 9547 - DNA, 20 bp, synthetic construct
  source 1..20: mol_type = other DNA
gcagtgagctgagattgcac

SEQ ID NO: 9548 - DNA, 20 bp, synthetic construct
  source 1..20: mol_type = other DNA
tgcagtgagctgagattgca

SEQ ID NO: 9549 - DNA, 20 bp, synthetic construct
  source 1..20: mol_type = other DNA
ttgcagtgagctgagattgc

SEQ ID NO: 9550 - DNA, 20 bp, synthetic construct
  source 1..20: mol_type = other DNA
gttgcagtgagctgagattg

SEQ ID NO: 9551 - DNA, 20 bp, synthetic construct
  source 1..20: mol_type = other DNA
ggttgcagtgagctgagatt

SEQ ID NO: 9552 - DNA, 20 bp, synthetic construct
  source 1..20: mol_type = other DNA
aggttgcagtgagctgagat

SEQ ID NO: 9553 - DNA, 20 bp, synthetic construct
  source 1..20: mol_type = other DNA
gaggttgcagtgagctgaga

SEQ ID NO: 9554 - DNA, 20 bp, synthetic construct
  source 1..20: mol_type = other DNA
agaggttgcagtgagctgag

SEQ ID NO: 9555 - DNA, 20 bp, synthetic construct
  source 1..20: mol_type = other DNA
cagaggttgcagtgagctga

SEQ ID NO: 9556 - DNA, 20 bp, synthetic construct
  source 1..20: mol_type = other DNA
acagaggttgcagtgagctg

SEQ ID NO: 9557 - DNA, 20 bp, synthetic construct
  source 1..20: mol_type = other DNA
aacagaggttgcagtgagct

SEQ ID NO: 9558 - DNA, 20 bp, synthetic construct
  source 1..20: mol_type = other DNA
aaacagaggttgcagtgagc

SEQ ID NO: 9559 - DNA, 20 bp, synthetic construct
  source 1..20: mol_type = other DNA
gaaacagaggttgcagtgag

SEQ ID NO: 9560 - DNA, 20 bp, synthetic construct
  source 1..20: mol_type = other DNA
ggaaacagaggttgcagtga

SEQ ID NO: 9561 - DNA, 20 bp, synthetic construct
  source 1..20: mol_type = other DNA
gggaaacagaggttgcagtg

SEQ ID NO: 9562 - DNA, 20 bp, synthetic construct
  source 1..20: mol_type = other DNA
cgggaaacagaggttgcagt

SEQ ID NO: 9563 - DNA, 20 bp, synthetic construct
  source 1..20: mol_type = other DNA
ccgggaaacagaggttgcag

SEQ ID NO: 9564 - DNA, 20 bp, synthetic construct
  source 1..20: mol_type = other DNA
cccgggaaacagaggttgca

SEQ ID NO: 9565 - DNA, 20 bp, synthetic construct
  source 1..20: mol_type = other DNA
acccgggaaacagaggttgc

SEQ ID NO: 9566 - DNA, 20 bp, synthetic construct
  source 1..20: mol_type = other DNA
aacccgggaaacagaggttg

SEQ ID NO: 9567 - DNA, 20 bp, synthetic construct
  source 1..20: mol_type = other DNA
gaacccgggaaacagaggtt

SEQ ID NO: 9568 - DNA, 20 bp, synthetic construct
  source 1..20: mol_type = other DNA
tgaacccgggaaacagaggt

SEQ ID NO: 9569 - DNA, 20 bp, synthetic construct
  source 1..20: mol_type = other DNA
ttgaacccgggaaacagagg

SEQ ID NO: 9570 - DNA, 20 bp, synthetic construct
  source 1..20: mol_type = other DNA
cttgaacccgggaaacagag

SEQ ID NO: 9571 - DNA, 20 bp, synthetic construct
  source 1..20: mol_type = other DNA
gcttgaacccgggaaacaga

SEQ ID NO: 9572 - DNA, 20 bp, synthetic construct
  source 1..20: mol_type = other DNA
cgcttgaacccgggaaacag

SEQ ID NO: 9573 - DNA, 20 bp, synthetic construct
  source 1..20: mol_type = other DNA
tcgcttgaacccgggaaaca

SEQ ID NO: 9574 - DNA, 20 bp, synthetic construct
  source 1..20: mol_type = other DNA
atcgcttgaacccgggaaac

SEQ ID NO: 9575 - DNA, 20 bp, synthetic construct
  source 1..20: mol_type = other DNA
aatcgcttgaacccgggaaa

SEQ ID NO: 9576 - DNA, 20 bp, synthetic construct
  source 1..20: mol_type = other DNA
gaatcgcttgaacccgggaa

SEQ ID NO: 9577 - DNA, 20 bp, synthetic construct
  source 1..20: mol_type = other DNA
agaatcgcttgaacccggga

SEQ ID NO: 9578 - DNA, 20 bp, synthetic construct
  source 1..20: mol_type = other DNA
gagaatcgcttgaacccggg

SEQ ID NO: 9579 - DNA, 20 bp, synthetic construct
  source 1..20: mol_type = other DNA
ggagaatcgcttgaacccgg

SEQ ID NO: 9580 - DNA, 20 bp, synthetic construct
  source 1..20: mol_type = other DNA
aggagaatcgcttgaacccg

SEQ ID NO: 9581 - DNA, 20 bp, synthetic construct
  source 1..20: mol_type = other DNA
caggagaatcgcttgaaccc

SEQ ID NO: 9582 - DNA, 20 bp, synthetic construct
  source 1..20: mol_type = other DNA
gcaggagaatcgcttgaacc

SEQ ID NO: 9583 - DNA, 20 bp, synthetic construct
  source 1..20: mol_type = other DNA
ggcaggagaatcgcttgaac

SEQ ID NO: 9584 - DNA, 20 bp, synthetic construct
  source 1..20: mol_type = other DNA
aggcaggagaatcgcttgaa

SEQ ID NO: 9585 - DNA, 20 bp, synthetic construct
  source 1..20: mol_type = other DNA
gaggcaggagaatcgcttga

SEQ ID NO: 9586 - DNA, 20 bp, synthetic construct
  source 1..20: mol_type = other DNA
tgaggcaggagaatcgcttg

SEQ ID NO: 9587 - DNA, 20 bp, synthetic construct
  source 1..20: mol_type = other DNA
ctgaggcaggagaatcgctt

SEQ ID NO: 9588 - DNA, 20 bp, synthetic construct
  source 1..20: mol_type = other DNA
gctgaggcaggagaatcgct

SEQ ID NO: 9589 - DNA, 20 bp, synthetic construct
  source 1..20: mol_type = other DNA
ggctgaggcaggagaatcgc

SEQ ID NO: 9590 - DNA, 20 bp, synthetic construct
  source 1..20: mol_type = other DNA
aggctgaggcaggagaatcg

SEQ ID NO: 9591 - DNA, 20 bp, synthetic construct
  source 1..20: mol_type = other DNA
aaggctgaggcaggagaatc

SEQ ID NO: 9592 - DNA, 20 bp, synthetic construct
  source 1..20: mol_type = other DNA
gaaggctgaggcaggagaat

SEQ ID NO: 9593 - DNA, 20 bp, synthetic construct
  source 1..20: mol_type = other DNA
agaaggctgaggcaggagaa

SEQ ID NO: 9594 - DNA, 20 bp, synthetic construct
  source 1..20: mol_type = other DNA
cagaaggctgaggcaggaga

SEQ ID NO: 9595 - DNA, 20 bp, synthetic construct
  source 1..20: mol_type = other DNA
tcagaaggctgaggcaggag

SEQ ID NO: 9596 - DNA, 20 bp, synthetic construct
  source 1..20: mol_type = other DNA
ctcagaaggctgaggcagga

SEQ ID NO: 9597 - DNA, 20 bp, synthetic construct
  source 1..20: mol_type = other DNA
actcagaaggctgaggcagg

SEQ ID NO: 9598 - DNA, 20 bp, synthetic construct
  source 1..20: mol_type = other DNA
tactcagaaggctgaggcag

SEQ ID NO: 9599 - DNA, 20 bp, synthetic construct
  source 1..20: mol_type = other DNA
ctactcagaaggctgaggca

SEQ ID NO: 9600 - DNA, 20 bp, synthetic construct
  source 1..20: mol_type = other DNA
gctactcagaaggctgaggc

SEQ ID NO: 9601 - DNA, 20 bp, synthetic construct
  source 1..20: mol_type = other DNA
agctactcagaaggctgagg

SEQ ID NO: 9602 - DNA, 20 bp, synthetic construct
  source 1..20: mol_type = other DNA
cagctactcagaaggctgag

SEQ ID NO: 9603 - DNA, 20 bp, synthetic construct
  source 1..20: mol_type = other DNA
tcagctactcagaaggctga

SEQ ID NO: 9604 - DNA, 20 bp, synthetic construct
  source 1..20: mol_type = other DNA
ctcagctactcagaaggctg

SEQ ID NO: 9605 - DNA, 20 bp, synthetic construct
  source 1..20: mol_type = other DNA
tctcagctactcagaaggct

SEQ ID NO: 9606 - DNA, 20 bp, synthetic construct
  source 1..20: mol_type = other DNA
atctcagctactcagaaggc

SEQ ID NO: 9607 - DNA, 20 bp, synthetic construct
  source 1..20: mol_type = other DNA
aatctcagctactcagaagg

SEQ ID NO: 9608 - DNA, 20 bp, synthetic construct
  source 1..20: mol_type = other DNA
taatctcagctactcagaag

SEQ ID NO: 9609 - DNA, 20 bp, synthetic construct
  source 1..20: mol_type = other DNA
gtaatctcagctactcagaa

SEQ ID NO: 9610 - DNA, 20 bp, synthetic construct
  source 1..20: mol_type = other DNA
tgtaatctcagctactcaga

SEQ ID NO: 9611 - DNA, 20 bp, synthetic construct
  source 1..20: mol_type = other DNA
ctgtaatctcagctactcag

SEQ ID NO: 9612 - DNA, 20 bp, synthetic construct
  source 1..20: mol_type = other DNA
cctgtaatctcagctactca

SEQ ID NO: 9613 - DNA, 20 bp, synthetic construct
  source 1..20: mol_type = other DNA
acctgtaatctcagctactc

SEQ ID NO: 9614 - DNA, 20 bp, synthetic construct
  source 1..20: mol_type = other DNA
cacctgtaatctcagctact

SEQ ID NO: 9615 - DNA, 20 bp, synthetic construct
  source 1..20: mol_type = other DNA
gcacctgtaatctcagctac

SEQ ID NO: 9616 - DNA, 20 bp, synthetic construct
  source 1..20: mol_type = other DNA
ggcacctgtaatctcagcta

SEQ ID NO: 9617 - DNA, 20 bp, synthetic construct
  source 1..20: mol_type = other DNA
aggcacctgtaatctcagct

SEQ ID NO: 9618 - DNA, 20 bp, synthetic construct
  source 1..20: mol_type = other DNA
caggcacctgtaatctcagc

SEQ ID NO: 9619 - DNA, 20 bp, synthetic construct
  source 1..20: mol_type = other DNA
gcaggcacctgtaatctcag

SEQ ID NO: 9620 - DNA, 20 bp, synthetic construct
  source 1..20: mol_type = other DNA
agcaggcacctgtaatctca

SEQ ID NO: 9621 - DNA, 20 bp, synthetic construct
  source 1..20: mol_type = other DNA
tagcaggcacctgtaatctc

SEQ ID NO: 9622 - DNA, 20 bp, synthetic construct
  source 1..20: mol_type = other DNA
gtagcaggcacctgtaatct

SEQ ID NO: 9623 - DNA, 20 bp, synthetic construct
  source 1..20: mol_type = other DNA
ggtagcaggcacctgtaatc

SEQ ID NO: 9624 - DNA, 20 bp, synthetic construct
  source 1..20: mol_type = other DNA
gggtagcaggcacctgtaat

SEQ ID NO: 9625 - DNA, 20 bp, synthetic construct
  source 1..20: mol_type = other DNA
ggggtagcaggcacctgtaa

SEQ ID NO: 9626 - DNA, 20 bp, synthetic construct
  source 1..20: mol_type = other DNA
tggggtagcaggcacctgta

SEQ ID NO: 9627 - DNA, 20 bp, synthetic construct
  source 1..20: mol_type = other DNA
gtggggtagcaggcacctgt

SEQ ID NO: 9628 - DNA, 20 bp, synthetic construct
  source 1..20: mol_type = other DNA
agtggggtagcaggcacctg

SEQ ID NO: 9629 - DNA, 20 bp, synthetic construct
  source 1..20: mol_type = other DNA
gagtggggtagcaggcacct

SEQ ID NO: 9630 - DNA, 20 bp, synthetic construct
  source 1..20: mol_type = other DNA
tgagtggggtagcaggcacc

SEQ ID NO: 9631 - DNA, 20 bp, synthetic construct
  source 1..20: mol_type = other DNA
ctgagtggggtagcaggcac

SEQ ID NO: 9632 - DNA, 20 bp, synthetic construct
  source 1..20: mol_type = other DNA
gctgagtggggtagcaggca

SEQ ID NO: 9633 - DNA, 20 bp, synthetic construct
  source 1..20: mol_type = other DNA
agctgagtggggtagcaggc

SEQ ID NO: 9634 - DNA, 20 bp, synthetic construct
  source 1..20: mol_type = other DNA
tagctgagtggggtagcagg

SEQ ID NO: 9635 - DNA, 20 bp, synthetic construct
  source 1..20: mol_type = other DNA
ttagctgagtggggtagcag

SEQ ID NO: 9636 - DNA, 20 bp, synthetic construct
  source 1..20: mol_type = other DNA
attagctgagtggggtagca

SEQ ID NO: 9637 - DNA, 20 bp, synthetic construct
  source 1..20: mol_type = other DNA
aattagctgagtggggtagc

SEQ ID NO: 9638 - DNA, 20 bp, synthetic construct
  source 1..20: mol_type = other DNA
aaattagctgagtggggtag

SEQ ID NO: 9639 - DNA, 20 bp, synthetic construct
  source 1..20: mol_type = other DNA
aaaattagctgagtggggta

SEQ ID NO: 9640 - DNA, 20 bp, synthetic construct
  source 1..20: mol_type = other DNA
aaaaattagctgagtggggt

SEQ ID NO: 9641 - DNA, 20 bp, synthetic construct
  source 1..20: mol_type = other DNA
caaaaattagctgagtgggg

SEQ ID NO: 9642 - DNA, 20 bp, synthetic construct
  source 1..20: mol_type = other DNA
acaaaaattagctgagtggg

SEQ ID NO: 9643 - DNA, 20 bp, synthetic construct
  source 1..20: mol_type = other DNA
tacaaaaattagctgagtgg

SEQ ID NO: 9644 - DNA, 20 bp, synthetic construct
  source 1..20: mol_type = other DNA
atacaaaaattagctgagtg

SEQ ID NO: 9645 - DNA, 20 bp, synthetic construct
  source 1..20: mol_type = other DNA
aatacaaaaattagctgagt

SEQ ID NO: 9646 - DNA, 20 bp, synthetic construct
  source 1..20: mol_type = other DNA
aaatacaaaaattagctgag

SEQ ID NO: 9647 - DNA, 20 bp, synthetic construct
  source 1..20: mol_type = other DNA
aaaatacaaaaattagctga

SEQ ID NO: 9648 - DNA, 20 bp, synthetic construct
  source 1..20: mol_type = other DNA
aaaaatacaaaaattagctg

SEQ ID NO: 9649 - DNA, 20 bp, synthetic construct
  source 1..20: mol_type = other DNA
taaaaatacaaaaattagct

SEQ ID NO: 9650 - DNA, 20 bp, synthetic construct
  source 1..20: mol_type = other DNA
ctaaaaatacaaaaattagc

SEQ ID NO: 9651 - DNA, 20 bp, synthetic construct
  source 1..20: mol_type = other DNA
gctaaaaatacaaaaattag

SEQ ID NO: 9652 - DNA, 20 bp, synthetic construct
  source 1..20: mol_type = other DNA
tgctaaaaatacaaaaatta

SEQ ID NO: 9653 - DNA, 20 bp, synthetic construct
  source 1..20: mol_type = other DNA
ctgctaaaaatacaaaaatt

SEQ ID NO: 9654 - DNA, 20 bp, synthetic construct
  source 1..20: mol_type = other DNA
tctgctaaaaatacaaaaat

SEQ ID NO: 9655 - DNA, 20 bp, synthetic construct
  source 1..20: mol_type = other DNA
ctctgctaaaaatacaaaaa

SEQ ID NO: 9656 - DNA, 20 bp, synthetic construct
  source 1..20: mol_type = other DNA
tctctgctaaaaatacaaaa

SEQ ID NO: 9657 - DNA, 20 bp, synthetic construct
  source 1..20: mol_type = other DNA
gtctctgctaaaaatacaaa

SEQ ID NO: 9658 - DNA, 20 bp, synthetic construct
  source 1..20: mol_type = other DNA
tgtctctgctaaaaatacaa

SEQ ID NO: 9659 - DNA, 20 bp, synthetic construct
  source 1..20: mol_type = other DNA
ctgtctctgctaaaaataca

SEQ ID NO: 9660 - DNA, 20 bp, synthetic construct
  source 1..20: mol_type = other DNA
cctgtctctgctaaaaatac

SEQ ID NO: 9661 - DNA, 20 bp, synthetic construct
  source 1..20: mol_type = other DNA
ccctgtctctgctaaaaata

SEQ ID NO: 9662 - DNA, 20 bp, synthetic construct
  source 1..20: mol_type = other DNA
accctgtctctgctaaaaat

SEQ ID NO: 9663 - DNA, 20 bp, synthetic construct
  source 1..20: mol_type = other DNA
aaccctgtctctgctaaaaa

SEQ ID NO: 9664 - DNA, 20 bp, synthetic construct
  source 1..20: mol_type = other DNA
aaaccctgtctctgctaaaa

SEQ ID NO: 9665 - DNA, 20 bp, synthetic construct
  source 1..20: mol_type = other DNA
gaaaccctgtctctgctaaa

SEQ ID NO: 9666 - DNA, 20 bp, synthetic construct
  source 1..20: mol_type = other DNA
tgaaaccctgtctctgctaa

SEQ ID NO: 9667 - DNA, 20 bp, synthetic construct
  source 1..20: mol_type = other DNA
gtgaaaccctgtctctgcta

SEQ ID NO: 9668 - DNA, 20 bp, synthetic construct
  source 1..20: mol_type = other DNA
ggtgaaaccctgtctctgct

SEQ ID NO: 9669 - DNA, 20 bp, synthetic construct
  source 1..20: mol_type = other DNA
tggtgaaaccctgtctctgc

SEQ ID NO: 9670 - DNA, 20 bp, synthetic construct
  source 1..20: mol_type = other DNA
atggtgaaaccctgtctctg

SEQ ID NO: 9671 - DNA, 20 bp, synthetic construct
  source 1..20: mol_type = other DNA
catggtgaaaccctgtctct

SEQ ID NO: 9672 - DNA, 20 bp, synthetic construct
  source 1..20: mol_type = other DNA
acatggtgaaaccctgtctc

SEQ ID NO: 9673 - DNA, 20 bp, synthetic construct
  source 1..20: mol_type = other DNA
aacatggtgaaaccctgtct

SEQ ID NO: 9674 - DNA, 20 bp, synthetic construct
  source 1..20: mol_type = other DNA
caacatggtgaaaccctgtc

SEQ ID NO: 9675 - DNA, 20 bp, synthetic construct
  source 1..20: mol_type = other DNA
ccaacatggtgaaaccctgt

SEQ ID NO: 9676 - DNA, 20 bp, synthetic construct
  source 1..20: mol_type = other DNA
accaacatggtgaaaccctg

SEQ ID NO: 9677 - DNA, 20 bp, synthetic construct
  source 1..20: mol_type = other DNA
aaccaacatggtgaaaccct

SEQ ID NO: 9678 - DNA, 20 bp, synthetic construct
  source 1..20: mol_type = other DNA
taaccaacatggtgaaaccc

SEQ ID NO: 9679 - DNA, 20 bp, synthetic construct
  source 1..20: mol_type = other DNA
ctaaccaacatggtgaaacc

SEQ ID NO: 9680 - DNA, 20 bp, synthetic construct
  source 1..20: mol_type = other DNA
cctaaccaacatggtgaaac

SEQ ID NO: 9681 - DNA, 20 bp, synthetic construct
  source 1..20: mol_type = other DNA
gcctaaccaacatggtgaaa

SEQ ID NO: 9682 - DNA, 20 bp, synthetic construct
  source 1..20: mol_type = other DNA
agcctaaccaacatggtgaa

SEQ ID NO: 9683 - DNA, 20 bp, synthetic construct
  source 1..20: mol_type = other DNA
gagcctaaccaacatggtga

SEQ ID NO: 9684 - DNA, 20 bp, synthetic construct
  source 1..20: mol_type = other DNA
tgagcctaaccaacatggtg

SEQ ID NO: 9685 - DNA, 20 bp, synthetic construct
  source 1..20: mol_type = other DNA
atgagcctaaccaacatggt

SEQ ID NO: 9686 - DNA, 20 bp, synthetic construct
  source 1..20: mol_type = other DNA
gatgagcctaaccaacatgg

SEQ ID NO: 9687 - DNA, 20 bp, synthetic construct
  source 1..20: mol_type = other DNA
agatgagcctaaccaacatg

SEQ ID NO: 9688 - DNA, 20 bp, synthetic construct
  source 1..20: mol_type = other DNA
gagatgagcctaaccaacat

SEQ ID NO: 9689 - DNA, 20 bp, synthetic construct
  source 1..20: mol_type = other DNA
cgagatgagcctaaccaaca

SEQ ID NO: 9690 - DNA, 20 bp, synthetic construct
  source 1..20: mol_type = other DNA
tcgagatgagcctaaccaac

SEQ ID NO: 9691 - DNA, 20 bp, synthetic construct
  source 1..20: mol_type = other DNA
ttcgagatgagcctaaccaa

SEQ ID NO: 9692 - DNA, 20 bp, synthetic construct
  source 1..20: mol_type = other DNA
gttcgagatgagcctaacca

SEQ ID NO: 9693 - DNA, 20 bp, synthetic construct
  source 1..20: mol_type = other DNA
agttcgagatgagcctaacc

SEQ ID NO: 9694 - DNA, 20 bp, synthetic construct
  source 1..20: mol_type = other DNA
gagttcgagatgagcctaac

SEQ ID NO: 9695 - DNA, 20 bp, synthetic construct
  source 1..20: mol_type = other DNA
ggagttcgagatgagcctaa

SEQ ID NO: 9696 - DNA, 20 bp, synthetic construct
  source 1..20: mol_type = other DNA
aggagttcgagatgagccta

SEQ ID NO: 9697 - DNA, 20 bp, synthetic construct
  source 1..20: mol_type = other DNA
caggagttcgagatgagcct

SEQ ID NO: 9698 - DNA, 20 bp, synthetic construct
  source 1..20: mol_type = other DNA
tcaggagttcgagatgagcc

SEQ ID NO: 9699 - DNA, 20 bp, synthetic construct
  source 1..20: mol_type = other DNA
gtcaggagttcgagatgagc

SEQ ID NO: 9700 - DNA, 20 bp, synthetic construct
  source 1..20: mol_type = other DNA
ggtcaggagttcgagatgag

SEQ ID NO: 9701 - DNA, 20 bp, synthetic construct
  source 1..20: mol_type = other DNA
aggtcaggagttcgagatga

SEQ ID NO: 9702 - DNA, 20 bp, synthetic construct
  source 1..20: mol_type = other DNA
aaggtcaggagttcgagatg

SEQ ID NO: 9703 - DNA, 20 bp, synthetic construct
  source 1..20: mol_type = other DNA
taaggtcaggagttcgagat

SEQ ID NO: 9704 - DNA, 20 bp, synthetic construct
  source 1..20: mol_type = other DNA
ttaaggtcaggagttcgaga

SEQ ID NO: 9705 - DNA, 20 bp, synthetic construct
  source 1..20: mol_type = other DNA
cttaaggtcaggagttcgag

SEQ ID NO: 9706 - DNA, 20 bp, synthetic construct
  source 1..20: mol_type = other DNA
gcttaaggtcaggagttcga

SEQ ID NO: 9707 - DNA, 20 bp, synthetic construct
  source 1..20: mol_type = other DNA
cgcttaaggtcaggagttcg

SEQ ID NO: 9708 - DNA, 20 bp, synthetic construct
  source 1..20: mol_type = other DNA
tcgcttaaggtcaggagttc

SEQ ID NO: 9709 - DNA, 20 bp, synthetic construct
  source 1..20: mol_type = other DNA
atcgcttaaggtcaggagtt

SEQ ID NO: 9710 - DNA, 20 bp, synthetic construct
  source 1..20: mol_type = other DNA
gatcgcttaaggtcaggagt

SEQ ID NO: 9711 - DNA, 20 bp, synthetic construct
  source 1..20: mol_type = other DNA
ggatcgcttaaggtcaggag

SEQ ID NO: 9712 - DNA, 20 bp, synthetic construct
  source 1..20: mol_type = other DNA
tggatcgcttaaggtcagga

SEQ ID NO: 9713 - DNA, 20 bp, synthetic construct
  source 1..20: mol_type = other DNA
gtggatcgcttaaggtcagg

SEQ ID NO: 9714 - DNA, 20 bp, synthetic construct
  source 1..20: mol_type = other DNA
ggtggatcgcttaaggtcag

SEQ ID NO: 9715 - DNA, 20 bp, synthetic construct
  source 1..20: mol_type = other DNA
aggtggatcgcttaaggtca

SEQ ID NO: 9716 - DNA, 20 bp, synthetic construct
  source 1..20: mol_type = other DNA
caggtggatcgcttaaggtc

SEQ ID NO: 9717 - DNA, 20 bp, synthetic construct
  source 1..20: mol_type = other DNA
gcaggtggatcgcttaaggt

SEQ ID NO: 9718 - DNA, 20 bp, synthetic construct
  source 1..20: mol_type = other DNA
ggcaggtggatcgcttaagg

SEQ ID NO: 9719 - DNA, 20 bp, synthetic construct
  source 1..20: mol_type = other DNA
aggcaggtggatcgcttaag

SEQ ID NO: 9720 - DNA, 20 bp, synthetic construct
  source 1..20: mol_type = other DNA
aaggcaggtggatcgcttaa

SEQ ID NO: 9721 - DNA, 20 bp, synthetic construct
  source 1..20: mol_type = other DNA
caaggcaggtggatcgctta

SEQ ID NO: 9722 - DNA, 20 bp, synthetic construct
  source 1..20: mol_type = other DNA
ccaaggcaggtggatcgctt

SEQ ID NO: 9723 - DNA, 20 bp, synthetic construct
  source 1..20: mol_type = other DNA
gccaaggcaggtggatcgct

SEQ ID NO: 9724 - DNA, 20 bp, synthetic construct
  source 1..20: mol_type = other DNA
ggccaaggcaggtggatcgc

SEQ ID NO: 9725 - DNA, 20 bp, synthetic construct
  source 1..20: mol_type = other DNA
aggccaaggcaggtggatcg

SEQ ID NO: 9726 - DNA, 20 bp, synthetic construct
  source 1..20: mol_type = other DNA
gaggccaaggcaggtggatc

SEQ ID NO: 9727 - DNA, 20 bp, synthetic construct
  source 1..20: mol_type = other DNA
ggaggccaaggcaggtggat

SEQ ID NO: 9728 - DNA, 20 bp, synthetic construct
  source 1..20: mol_type = other DNA
gggaggccaaggcaggtgga

SEQ ID NO: 9729 - DNA, 20 bp, synthetic construct
  source 1..20: mol_type = other DNA
tgggaggccaaggcaggtgg

SEQ ID NO: 9730 - DNA, 20 bp, synthetic construct
  source 1..20: mol_type = other DNA
ttgggaggccaaggcaggtg

SEQ ID NO: 9731 - DNA, 20 bp, synthetic construct
  source 1..20: mol_type = other DNA
tttgggaggccaaggcaggt

SEQ ID NO: 9732 - DNA, 20 bp, synthetic construct
  source 1..20: mol_type = other DNA
ctttgggaggccaaggcagg

SEQ ID NO: 9733 - DNA, 20 bp, synthetic construct
  source 1..20: mol_type = other DNA
actttgggaggccaaggcag

SEQ ID NO: 9734 - DNA, 20 bp, synthetic construct
  source 1..20: mol_type = other DNA
cactttgggaggccaaggca

SEQ ID NO: 9735 - DNA, 20 bp, synthetic construct
  source 1..20: mol_type = other DNA
gcactttgggaggccaaggc

SEQ ID NO: 9736 - DNA, 20 bp, synthetic construct
  source 1..20: mol_type = other DNA
agcactttgggaggccaagg

SEQ ID NO: 9737 - DNA, 20 bp, synthetic construct
  source 1..20: mol_type = other DNA
cagcactttgggaggccaag

SEQ ID NO: 9738 - DNA, 20 bp, synthetic construct
  source 1..20: mol_type = other DNA
ccagcactttgggaggccaa

SEQ ID NO: 9739 - DNA, 20 bp, synthetic construct
  source 1..20: mol_type = other DNA
cccagcactttgggaggcca

SEQ ID NO: 9740 - DNA, 20 bp, synthetic construct
  source 1..20: mol_type = other DNA
tcccagcactttgggaggcc

SEQ ID NO: 9741 - DNA, 20 bp, synthetic construct
  source 1..20: mol_type = other DNA
atcccagcactttgggaggc

SEQ ID NO: 9742 - DNA, 20 bp, synthetic construct
  source 1..20: mol_type = other DNA
aatcccagcactttgggagg

SEQ ID NO: 9743 - DNA, 20 bp, synthetic construct
  source 1..20: mol_type = other DNA
taatcccagcactttgggag

SEQ ID NO: 9744 - DNA, 20 bp, synthetic construct
  source 1..20: mol_type = other DNA
ataatcccagcactttggga

SEQ ID NO: 9745 - DNA, 20 bp, synthetic construct
  source 1..20: mol_type = other DNA
tataatcccagcactttggg

SEQ ID NO: 9746 - DNA, 20 bp, synthetic construct
  source 1..20: mol_type = other DNA
ctataatcccagcactttgg

SEQ ID NO: 9747 - DNA, 20 bp, synthetic construct
  source 1..20: mol_type = other DNA
cctataatcccagcactttg

SEQ ID NO: 9748 - DNA, 20 bp, synthetic construct
  source 1..20: mol_type = other DNA
gcctataatcccagcacttt

SEQ ID NO: 9749 - DNA, 20 bp, synthetic construct
  source 1..20: mol_type = other DNA
tgcctataatcccagcactt

SEQ ID NO: 9750 - DNA, 20 bp, synthetic construct
  source 1..20: mol_type = other DNA
atgcctataatcccagcact

SEQ ID NO: 9751 - DNA, 20 bp, synthetic construct
  source 1..20: mol_type = other DNA
catgcctataatcccagcac

SEQ ID NO: 9752 - DNA, 20 bp, synthetic construct
  source 1..20: mol_type = other DNA
tcatgcctataatcccagca

SEQ ID NO: 9753 - DNA, 20 bp, synthetic construct
  source 1..20: mol_type = other DNA
ctcatgcctataatcccagc

SEQ ID NO: 9754 - DNA, 20 bp, synthetic construct
  source 1..20: mol_type = other DNA
gctcatgcctataatcccag

SEQ ID NO: 9755 - DNA, 20 bp, synthetic construct
  source 1..20: mol_type = other DNA
ggctcatgcctataatccca

SEQ ID NO: 9756 - DNA, 20 bp, synthetic construct
  source 1..20: mol_type = other DNA
tggctcatgcctataatccc

SEQ ID NO: 9757 - DNA, 20 bp, synthetic construct
  source 1..20: mol_type = other DNA
gtggctcatgcctataatcc

SEQ ID NO: 9758 - DNA, 20 bp, synthetic construct
  source 1..20: mol_type = other DNA
ggtggctcatgcctataatc

SEQ ID NO: 9759 - DNA, 20 bp, synthetic construct
  source 1..20: mol_type = other DNA
cggtggctcatgcctataat

SEQ ID NO: 9760 - DNA, 20 bp, synthetic construct
  source 1..20: mol_type = other DNA
acggtggctcatgcctataa

SEQ ID NO: 9761 - DNA, 20 bp, synthetic construct
  source 1..20: mol_type = other DNA
cacggtggctcatgcctata

SEQ ID NO: 9762 - DNA, 20 bp, synthetic construct
  source 1..20: mol_type = other DNA
gcacggtggctcatgcctat

SEQ ID NO: 9763 - DNA, 20 bp, synthetic construct
  source 1..20: mol_type = other DNA
cgcacggtggctcatgccta

SEQ ID NO: 9764 - DNA, 20 bp, synthetic construct
  source 1..20: mol_type = other DNA
gcgcacggtggctcatgcct

SEQ ID NO: 9765 - DNA, 20 bp, synthetic construct
  source 1..20: mol_type = other DNA
tgcgcacggtggctcatgcc

SEQ ID NO: 9766 - DNA, 20 bp, synthetic construct
  source 1..20: mol_type = other DNA
ctgcgcacggtggctcatgc

SEQ ID NO: 9767 - DNA, 20 bp, synthetic construct
  source 1..20: mol_type = other DNA
gctgcgcacggtggctcatg

SEQ ID NO: 9768 - DNA, 20 bp, synthetic construct
  source 1..20: mol_type = other DNA
ggctgcgcacggtggctcat

SEQ ID NO: 9769 - DNA, 20 bp, synthetic construct
  source 1..20: mol_type = other DNA
aggctgcgcacggtggctca

SEQ ID NO: 9770 - DNA, 20 bp, synthetic construct
  source 1..20: mol_type = other DNA
taggctgcgcacggtggctc

SEQ ID NO: 9771 - DNA, 20 bp, synthetic construct
  source 1..20: mol_type = other DNA
gtaggctgcgcacggtggct

SEQ ID NO: 9772 - DNA, 20 bp, synthetic construct
  source 1..20: mol_type = other DNA
ggtaggctgcgcacggtggc

SEQ ID NO: 9773 - DNA, 20 bp, synthetic construct
  source 1..20: mol_type = other DNA
gggtaggctgcgcacggtgg

SEQ ID NO: 9774 - DNA, 20 bp, synthetic construct
  source 1..20: mol_type = other DNA
agggtaggctgcgcacggtg

SEQ ID NO: 9775 - DNA, 20 bp, synthetic construct
  source 1..20: mol_type = other DNA
cagggtaggctgcgcacggt

SEQ ID NO: 9776 - DNA, 20 bp, synthetic construct
  source 1..20: mol_type = other DNA
acagggtaggctgcgcacgg

SEQ ID NO: 9777 - DNA, 20 bp, synthetic construct
  source 1..20: mol_type = other DNA
gacagggtaggctgcgcacg

SEQ ID NO: 9778 - DNA, 20 bp, synthetic construct
  source 1..20: mol_type = other DNA
agacagggtaggctgcgcac

SEQ ID NO: 9779 - DNA, 20 bp, synthetic construct
  source 1..20: mol_type = other DNA
gagacagggtaggctgcgca

SEQ ID NO: 9780 - DNA, 20 bp, synthetic construct
  source 1..20: mol_type = other DNA
agagacagggtaggctgcgc

SEQ ID NO: 9781 - DNA, 20 bp, synthetic construct
  source 1..20: mol_type = other DNA
aagagacagggtaggctgcg

SEQ ID NO: 9782 - DNA, 20 bp, synthetic construct
  source 1..20: mol_type = other DNA
taagagacagggtaggctgc

SEQ ID NO: 9783 - DNA, 20 bp, synthetic construct
  source 1..20: mol_type = other DNA
ttaagagacagggtaggctg

SEQ ID NO: 9784 - DNA, 20 bp, synthetic construct
  source 1..20: mol_type = other DNA
tttaagagacagggtaggct

SEQ ID NO: 9785 - DNA, 20 bp, synthetic construct
  source 1..20: mol_type = other DNA
ttttaagagacagggtaggc

SEQ ID NO: 9786 - DNA, 20 bp, synthetic construct
  source 1..20: mol_type = other DNA
tttttaagagacagggtagg

SEQ ID NO: 9787 - DNA, 20 bp, synthetic construct
  source 1..20: mol_type = other DNA
ttttttaagagacagggtag

SEQ ID NO: 9788 - DNA, 20 bp, synthetic construct
  source 1..20: mol_type = other DNA
gttttttaagagacagggta

SEQ ID NO: 9789 - DNA, 20 bp, synthetic construct
  source 1..20: mol_type = other DNA
tgttttttaagagacagggt

SEQ ID NO: 9790 - DNA, 20 bp, synthetic construct
  source 1..20: mol_type = other DNA
ctgttttttaagagacaggg

SEQ ID NO: 9791 - DNA, 20 bp, synthetic construct
  source 1..20: mol_type = other DNA
actgttttttaagagacagg

SEQ ID NO: 9792 - DNA, 20 bp, synthetic construct
  source 1..20: mol_type = other DNA
tactgttttttaagagacag

SEQ ID NO: 9793 - DNA, 20 bp, synthetic construct
  source 1..20: mol_type = other DNA
ttactgttttttaagagaca

SEQ ID NO: 9794 - DNA, 20 bp, synthetic construct
  source 1..20: mol_type = other DNA
gttactgttttttaagagac

SEQ ID NO: 9795 - DNA, 20 bp, synthetic construct
  source 1..20: mol_type = other DNA
tgttactgttttttaagaga

SEQ ID NO: 9796 - DNA, 20 bp, synthetic construct
  source 1..20: mol_type = other DNA
ttgttactgttttttaagag

SEQ ID NO: 9797 - DNA, 20 bp, synthetic construct
  source 1..20: mol_type = other DNA
gttgttactgttttttaaga

SEQ ID NO: 9798 - DNA, 20 bp, synthetic construct
  source 1..20: mol_type = other DNA
tgttgttactgttttttaag

SEQ ID NO: 9799 - DNA, 20 bp, synthetic construct
  source 1..20: mol_type = other DNA
ttgttgttactgttttttaa

SEQ ID NO: 9800 - DNA, 20 bp, synthetic construct
  source 1..20: mol_type = other DNA
gttgttgttactgtttttta

SEQ ID NO: 9801 - DNA, 20 bp, synthetic construct
  source 1..20: mol_type = other DNA
tgttgttgttactgtttttt

SEQ ID NO: 9802 - DNA, 20 bp, synthetic construct
  source 1..20: mol_type = other DNA
ttgttgttgttactgttttt

SEQ ID NO: 9803 - DNA, 20 bp, synthetic construct
  source 1..20: mol_type = other DNA
gttgttgttgttactgtttt

SEQ ID NO: 9804 - DNA, 20 bp, synthetic construct
  source 1..20: mol_type = other DNA
tgttgttgttgttactgttt

SEQ ID NO: 9805 - DNA, 20 bp, synthetic construct
  source 1..20: mol_type = other DNA
ttgttgttgttgttactgtt

SEQ ID NO: 9806 - DNA, 20 bp, synthetic construct
  source 1..20: mol_type = other DNA
gttgttgttgttgttactgt

SEQ ID NO: 9807 - DNA, 20 bp, synthetic construct
  source 1..20: mol_type = other DNA
tgttgttgttgttgttactg

SEQ ID NO: 9808 - DNA, 20 bp, synthetic construct
  source 1..20: mol_type = other DNA
ttgttgttgttgttgttact

SEQ ID NO: 9809 - DNA, 20 bp, synthetic construct
  source 1..20: mol_type = other DNA
gttgttgttgttgttgttac

SEQ ID NO: 9810 - DNA, 20 bp, synthetic construct
  source 1..20: mol_type = other DNA
tgttgttgttgttgttgtta

SEQ ID NO: 9811 - DNA, 20 bp, synthetic construct
  source 1..20: mol_type = other DNA
ttgttgttgttgttgttgtt

SEQ ID NO: 9812 - DNA, 20 bp, synthetic construct
  source 1..20: mol_type = other DNA
tttgttgttgttgttgttgt

SEQ ID NO: 9813 - DNA, 20 bp, synthetic construct
  source 1..20: mol_type = other DNA
ttttgttgttgttgttgttg

SEQ ID NO: 9814 - DNA, 20 bp, synthetic construct
  source 1..20: mol_type = other DNA
tttttgttgttgttgttgtt

SEQ ID NO: 9815 - DNA, 20 bp, synthetic construct
  source 1..20: mol_type = other DNA
ttttttgttgttgttgttgt

SEQ ID NO: 9816 - DNA, 20 bp, synthetic construct
  source 1..20: mol_type = other DNA
attttttgttgttgttgttg

SEQ ID NO: 9817 - DNA, 20 bp, synthetic construct
  source 1..20: mol_type = other DNA
gattttttgttgttgttgtt

SEQ ID NO: 9818 - DNA, 20 bp, synthetic construct
  source 1..20: mol_type = other DNA
ggattttttgttgttgttgt

SEQ ID NO: 9819 - DNA, 20 bp, synthetic construct
  source 1..20: mol_type = other DNA
aggattttttgttgttgttg

SEQ ID NO: 9820 - DNA, 20 bp, synthetic construct
  source 1..20: mol_type = other DNA
taggattttttgttgttgtt

SEQ ID NO: 9821 - DNA, 20 bp, synthetic construct
  source 1..20: mol_type = other DNA
ttaggattttttgttgttgt

SEQ ID NO: 9822 - DNA, 20 bp, synthetic construct
  source 1..20: mol_type = other DNA
tttaggattttttgttgttg

SEQ ID NO: 9823 - DNA, 20 bp, synthetic construct
  source 1..20: mol_type = other DNA
atttaggattttttgttgtt

SEQ ID NO: 9824 - DNA, 20 bp, synthetic construct
  source 1..20: mol_type = other DNA
gatttaggattttttgttgt

SEQ ID NO: 9825 - DNA, 20 bp, synthetic construct
  source 1..20: mol_type = other DNA
agatttaggattttttgttg

SEQ ID NO: 9826 - DNA, 20 bp, synthetic construct
  source 1..20: mol_type = other DNA
aagatttaggattttttgtt

SEQ ID NO: 9827 - DNA, 20 bp, synthetic construct
  source 1..20: mol_type = other DNA
taagatttaggattttttgt

SEQ ID NO: 9828 - DNA, 20 bp, synthetic construct
  source 1..20: mol_type = other DNA
ttaagatttaggattttttg

SEQ ID NO: 9829 - DNA, 20 bp, synthetic construct
  source 1..20: mol_type = other DNA
tttaagatttaggatttttt

SEQ ID NO: 9830 - DNA, 20 bp, synthetic construct
  source 1..20: mol_type = other DNA
ttttaagatttaggattttt

SEQ ID NO: 9831 - DNA, 20 bp, synthetic construct
  source 1..20: mol_type = other DNA
tttttaagatttaggatttt

SEQ ID NO: 9832 - DNA, 20 bp, synthetic construct
  source 1..20: mol_type = other DNA
atttttaagatttaggattt

SEQ ID NO: 9833 - DNA, 20 bp, synthetic construct
  source 1..20: mol_type = other DNA
catttttaagatttaggatt

SEQ ID NO: 9834 - DNA, 20 bp, synthetic construct
  source 1..20: mol_type = other DNA
ccatttttaagatttaggat

SEQ ID NO: 9835 - DNA, 20 bp, synthetic construct
  source 1..20: mol_type = other DNA
tccatttttaagatttagga

SEQ ID NO: 9836 - DNA, 20 bp, synthetic construct
  source 1..20: mol_type = other DNA
ttccatttttaagatttagg

SEQ ID NO: 9837 - DNA, 20 bp, synthetic construct
  source 1..20: mol_type = other DNA
cttccatttttaagatttag

SEQ ID NO: 9838 - DNA, 20 bp, synthetic construct
  source 1..20: mol_type = other DNA
ccttccatttttaagattta

SEQ ID NO: 9839 - DNA, 20 bp, synthetic construct
  source 1..20: mol_type = other DNA
gccttccatttttaagattt

SEQ ID NO: 9840 - DNA, 20 bp, synthetic construct
  source 1..20: mol_type = other DNA
tgccttccatttttaagatt

SEQ ID NO: 9841 - DNA, 20 bp, synthetic construct
  source 1..20: mol_type = other DNA
ttgccttccatttttaagat

SEQ ID NO: 9842 - DNA, 20 bp, synthetic construct
  source 1..20: mol_type = other DNA
tttgccttccatttttaaga

SEQ ID NO: 9843 - DNA, 20 bp, synthetic construct
  source 1..20: mol_type = other DNA
ttttgccttccatttttaag

SEQ ID NO: 9844 - DNA, 20 bp, synthetic construct
  source 1..20: mol_type = other DNA
tttttgccttccatttttaa

SEQ ID NO: 9845 - DNA, 20 bp, synthetic construct
  source 1..20: mol_type = other DNA
gtttttgccttccattttta

SEQ ID NO: 9846 - DNA, 20 bp, synthetic construct
  source 1..20: mol_type = other DNA
agtttttgccttccattttt

SEQ ID NO: 9847 - DNA, 20 bp, synthetic construct
  source 1..20: mol_type = other DNA
gagtttttgccttccatttt

SEQ ID NO: 9848 - DNA, 20 bp, synthetic construct
  source 1..20: mol_type = other DNA
agagtttttgccttccattt

SEQ ID NO: 9849 - DNA, 20 bp, synthetic construct
  source 1..20: mol_type = other DNA
tagagtttttgccttccatt

SEQ ID NO: 9850 - DNA, 20 bp, synthetic construct
  source 1..20: mol_type = other DNA
ttagagtttttgccttccat

SEQ ID NO: 9851 - DNA, 20 bp, synthetic construct
  source 1..20: mol_type = other DNA
cttagagtttttgccttcca

SEQ ID NO: 9852 - DNA, 20 bp, synthetic construct
  source 1..20: mol_type = other DNA
gcttagagtttttgccttcc

SEQ ID NO: 9853 - DNA, 20 bp, synthetic construct
  source 1..20: mol_type = other DNA
agcttagagtttttgccttc

SEQ ID NO: 9854 - DNA, 20 bp, synthetic construct
  source 1..20: mol_type = other DNA
aagcttagagtttttgcctt

SEQ ID NO: 9855 - DNA, 20 bp, synthetic construct
  source 1..20: mol_type = other DNA
aaagcttagagtttttgcct

SEQ ID NO: 9856 - DNA, 20 bp, synthetic construct
  source 1..20: mol_type = other DNA
caaagcttagagtttttgcc

SEQ ID NO: 9857 - DNA, 20 bp, synthetic construct
  source 1..20: mol_type = other DNA
tcaaagcttagagtttttgc

SEQ ID NO: 9858 - DNA, 20 bp, synthetic construct
  source 1..20: mol_type = other DNA
ctcaaagcttagagtttttg

SEQ ID NO: 9859 - DNA, 20 bp, synthetic construct
  source 1..20: mol_type = other DNA
tctcaaagcttagagttttt

SEQ ID NO: 9860 - DNA, 20 bp, synthetic construct
  source 1..20: mol_type = other DNA
ctctcaaagcttagagtttt

SEQ ID NO: 9861 - DNA, 20 bp, synthetic construct
  source 1..20: mol_type = other DNA
tctctcaaagcttagagttt

SEQ ID NO: 9862 - DNA, 20 bp, synthetic construct
  source 1..20: mol_type = other DNA
atctctcaaagcttagagtt

SEQ ID NO: 9863 - DNA, 20 bp, synthetic construct
  source 1..20: mol_type = other DNA
aatctctcaaagcttagagt

SEQ ID NO: 9864 - DNA, 20 bp, synthetic construct
  source 1..20: mol_type = other DNA
taatctctcaaagcttagag

SEQ ID NO: 9865 - DNA, 20 bp, synthetic construct
  source 1..20: mol_type = other DNA
ctaatctctcaaagcttaga

SEQ ID NO: 9866 - DNA, 20 bp, synthetic construct
  source 1..20: mol_type = other DNA
cctaatctctcaaagcttag

SEQ ID NO: 9867 - DNA, 20 bp, synthetic construct
  source 1..20: mol_type = other DNA
ccctaatctctcaaagctta

SEQ ID NO: 9868 - DNA, 20 bp, synthetic construct
  source 1..20: mol_type = other DNA
cccctaatctctcaaagctt

SEQ ID NO: 9869 - DNA, 20 bp, synthetic construct
  source 1..20: mol_type = other DNA
tcccctaatctctcaaagct

SEQ ID NO: 9870 - DNA, 20 bp, synthetic construct
  source 1..20: mol_type = other DNA
gtcccctaatctctcaaagc

SEQ ID NO: 9871 - DNA, 20 bp, synthetic construct
  source 1..20: mol_type = other DNA
agtcccctaatctctcaaag

SEQ ID NO: 9872 - DNA, 20 bp, synthetic construct
  source 1..20: mol_type = other DNA
aagtcccctaatctctcaaa

SEQ ID NO: 9873 - DNA, 20 bp, synthetic construct
  source 1..20: mol_type = other DNA
caagtcccctaatctctcaa

SEQ ID NO: 9874 - DNA, 20 bp, synthetic construct
  source 1..20: mol_type = other DNA
gcaagtcccctaatctctca

SEQ ID NO: 9875 - DNA, 20 bp, synthetic construct
  source 1..20: mol_type = other DNA
ggcaagtcccctaatctctc

SEQ ID NO: 9876 - DNA, 20 bp, synthetic construct
  source 1..20: mol_type = other DNA
gggcaagtcccctaatctct

SEQ ID NO: 9877 - DNA, 20 bp, synthetic construct
  source 1..20: mol_type = other DNA
tgggcaagtcccctaatctc

SEQ ID NO: 9878 - DNA, 20 bp, synthetic construct
  source 1..20: mol_type = other DNA
ttgggcaagtcccctaatct

SEQ ID NO: 9879 - DNA, 20 bp, synthetic construct
  source 1..20: mol_type = other DNA
tttgggcaagtcccctaatc

SEQ ID NO: 9880 - DNA, 20 bp, synthetic construct
  source 1..20: mol_type = other DNA
ctttgggcaagtcccctaat

SEQ ID NO: 9881 - DNA, 20 bp, synthetic construct
  source 1..20: mol_type = other DNA
gctttgggcaagtcccctaa

SEQ ID NO: 9882 - DNA, 20 bp, synthetic construct
  source 1..20: mol_type = other DNA
tgctttgggcaagtccccta

SEQ ID NO: 9883 - DNA, 20 bp, synthetic construct
  source 1..20: mol_type = other DNA
ttgctttgggcaagtcccct

SEQ ID NO: 9884 - DNA, 20 bp, synthetic construct
  source 1..20: mol_type = other DNA
attgctttgggcaagtcccc

SEQ ID NO: 9885 - DNA, 20 bp, synthetic construct
  source 1..20: mol_type = other DNA
tattgctttgggcaagtccc

SEQ ID NO: 9886 - DNA, 20 bp, synthetic construct
  source 1..20: mol_type = other DNA
atattgctttgggcaagtcc

SEQ ID NO: 9887 - DNA, 20 bp, synthetic construct
  source 1..20: mol_type = other DNA
aatattgctttgggcaagtc

SEQ ID NO: 9888 - DNA, 20 bp, synthetic construct
  source 1..20: mol_type = other DNA
aaatattgctttgggcaagt

SEQ ID NO: 9889 - DNA, 20 bp, synthetic construct
  source 1..20: mol_type = other DNA
caaatattgctttgggcaag

SEQ ID NO: 9890 - DNA, 20 bp, synthetic construct
  source 1..20: mol_type = other DNA
acaaatattgctttgggcaa

SEQ ID NO: 9891 - DNA, 20 bp, synthetic construct
  source 1..20: mol_type = other DNA
tacaaatattgctttgggca

SEQ ID NO: 9892 - DNA, 20 bp, synthetic construct
  source 1..20: mol_type = other DNA
ctacaaatattgctttgggc

SEQ ID NO: 9893 - DNA, 20 bp, synthetic construct
  source 1..20: mol_type = other DNA
cctacaaatattgctttggg

SEQ ID NO: 9894 - DNA, 20 bp, synthetic construct
  source 1..20: mol_type = other DNA
tcctacaaatattgctttgg

SEQ ID NO: 9895 - DNA, 20 bp, synthetic construct
  source 1..20: mol_type = other DNA
atcctacaaatattgctttg

SEQ ID NO: 9896 - DNA, 20 bp, synthetic construct
  source 1..20: mol_type = other DNA
aatcctacaaatattgcttt

SEQ ID NO: 9897 - DNA, 20 bp, synthetic construct
  source 1..20: mol_type = other DNA
aaatcctacaaatattgctt

SEQ ID NO: 9898 - DNA, 20 bp, synthetic construct
  source 1..20: mol_type = other DNA
aaaatcctacaaatattgct

SEQ ID NO: 9899 - DNA, 20 bp, synthetic construct
  source 1..20: mol_type = other DNA
taaaatcctacaaatattgc

SEQ ID NO: 9900 - DNA, 20 bp, synthetic construct
  source 1..20: mol_type = other DNA
ataaaatcctacaaatattg

SEQ ID NO: 9901 - DNA, 20 bp, synthetic construct
  source 1..20: mol_type = other DNA
aataaaatcctacaaatatt

SEQ ID NO: 9902 - DNA, 20 bp, synthetic construct
  source 1..20: mol_type = other DNA
taataaaatcctacaaatat

SEQ ID NO: 9903 - DNA, 20 bp, synthetic construct
  source 1..20: mol_type = other DNA
gtaataaaatcctacaaata

SEQ ID NO: 9904 - DNA, 20 bp, synthetic construct
  source 1..20: mol_type = other DNA
tgtaataaaatcctacaaat

SEQ ID NO: 9905 - DNA, 20 bp, synthetic construct
  source 1..20: mol_type = other DNA
gtgtaataaaatcctacaaa

SEQ ID NO: 9906 - DNA, 20 bp, synthetic construct
  source 1..20: mol_type = other DNA
ggtgtaataaaatcctacaa

SEQ ID NO: 9907 - DNA, 20 bp, synthetic construct
  source 1..20: mol_type = other DNA
aggtgtaataaaatcctaca

SEQ ID NO: 9908 - DNA, 20 bp, synthetic construct
  source 1..20: mol_type = other DNA
gaggtgtaataaaatcctac

SEQ ID NO: 9909 - DNA, 20 bp, synthetic construct
  source 1..20: mol_type = other DNA
agaggtgtaataaaatccta

SEQ ID NO: 9910 - DNA, 20 bp, synthetic construct
  source 1..20: mol_type = other DNA
gagaggtgtaataaaatcct

SEQ ID NO: 9911 - DNA, 20 bp, synthetic construct
  source 1..20: mol_type = other DNA
ggagaggtgtaataaaatcc

SEQ ID NO: 9912 - DNA, 20 bp, synthetic construct
  source 1..20: mol_type = other DNA
gggagaggtgtaataaaatc

SEQ ID NO: 9913 - DNA, 20 bp, synthetic construct
  source 1..20: mol_type = other DNA
agggagaggtgtaataaaat

SEQ ID NO: 9914 - DNA, 20 bp, synthetic construct
  source 1..20: mol_type = other DNA
aagggagaggtgtaataaaa

SEQ ID NO: 9915 - DNA, 20 bp, synthetic construct
  source 1..20: mol_type = other DNA
aaagggagaggtgtaataaa

SEQ ID NO: 9916 - DNA, 20 bp, synthetic construct
  source 1..20: mol_type = other DNA
taaagggagaggtgtaataa

SEQ ID NO: 9917 - DNA, 20 bp, synthetic construct
  source 1..20: mol_type = other DNA
ataaagggagaggtgtaata

SEQ ID NO: 9918 - DNA, 20 bp, synthetic construct
  source 1..20: mol_type = other DNA
aataaagggagaggtgtaat

SEQ ID NO: 9919 - DNA, 20 bp, synthetic construct
  source 1..20: mol_type = other DNA
aaataaagggagaggtgtaa

SEQ ID NO: 9920 - DNA, 20 bp, synthetic construct
  source 1..20: mol_type = other DNA
taaataaagggagaggtgta

SEQ ID NO: 9921 - DNA, 20 bp, synthetic construct
  source 1..20: mol_type = other DNA
ataaataaagggagaggtgt

SEQ ID NO: 9922 - DNA, 20 bp, synthetic construct
  source 1..20: mol_type = other DNA
aataaataaagggagaggtg

SEQ ID NO: 9923 - DNA, 20 bp, synthetic construct
  source 1..20: mol_type = other DNA
aaataaataaagggagaggt

SEQ ID NO: 9924 - DNA, 20 bp, synthetic construct
  source 1..20: mol_type = other DNA
aaaataaataaagggagagg

SEQ ID NO: 9925 - DNA, 20 bp, synthetic construct
  source 1..20: mol_type = other DNA
aaaaataaataaagggagag

SEQ ID NO: 9926 - DNA, 20 bp, synthetic construct
  source 1..20: mol_type = other DNA
aaaaaataaataaagggaga

SEQ ID NO: 9927 - DNA, 20 bp, synthetic construct
  source 1..20: mol_type = other DNA
aaaaaaataaataaagggag

SEQ ID NO: 9928 - DNA, 20 bp, synthetic construct
  source 1..20: mol_type = other DNA
taaaaaaataaataaaggga

SEQ ID NO: 9929 - DNA, 20 bp, synthetic construct
  source 1..20: mol_type = other DNA
ctaaaaaaataaataaaggg

SEQ ID NO: 9930 - DNA, 20 bp, synthetic construct
  source 1..20: mol_type = other DNA
tctaaaaaaataaataaagg

SEQ ID NO: 9931 - DNA, 20 bp, synthetic construct
  source 1..20: mol_type = other DNA
ctctaaaaaaataaataaag

SEQ ID NO: 9932 - DNA, 20 bp, synthetic construct
  source 1..20: mol_type = other DNA
actctaaaaaaataaataaa

SEQ ID NO: 9933 - DNA, 20 bp, synthetic construct
  source 1..20: mol_type = other DNA
gactctaaaaaaataaataa

SEQ ID NO: 9934 - DNA, 20 bp, synthetic construct
  source 1..20: mol_type = other DNA
tgactctaaaaaaataaata

SEQ ID NO: 9935 - DNA, 20 bp, synthetic construct
  source 1..20: mol_type = other DNA
ttgactctaaaaaaataaat

SEQ ID NO: 9936 - DNA, 20 bp, synthetic construct
  source 1..20: mol_type = other DNA
cttgactctaaaaaaataaa

SEQ ID NO: 9937 - DNA, 20 bp, synthetic construct
  source 1..20: mol_type = other DNA
ccttgactctaaaaaaataa

SEQ ID NO: 9938 - DNA, 20 bp, synthetic construct
  source 1..20: mol_type = other DNA
accttgactctaaaaaaata

SEQ ID NO: 9939 - DNA, 20 bp, synthetic construct
  source 1..20: mol_type = other DNA
gaccttgactctaaaaaaat

SEQ ID NO: 9940 - DNA, 20 bp, synthetic construct
  source 1..20: mol_type = other DNA
agaccttgactctaaaaaaa

SEQ ID NO: 9941 - DNA, 20 bp, synthetic construct
  source 1..20: mol_type = other DNA
gagaccttgactctaaaaaa

SEQ ID NO: 9942 - DNA, 20 bp, synthetic construct
  source 1..20: mol_type = other DNA
ggagaccttgactctaaaaa

SEQ ID NO: 9943 - DNA, 20 bp, synthetic construct
  source 1..20: mol_type = other DNA
gggagaccttgactctaaaa

SEQ ID NO: 9944 - DNA, 20 bp, synthetic construct
  source 1..20: mol_type = other DNA
agggagaccttgactctaaa

SEQ ID NO: 9945 - DNA, 20 bp, synthetic construct
  source 1..20: mol_type = other DNA
gagggagaccttgactctaa

SEQ ID NO: 9946 - DNA, 20 bp, synthetic construct
  source 1..20: mol_type = other DNA
agagggagaccttgactcta

SEQ ID NO: 9947 - DNA, 20 bp, synthetic construct
  source 1..20: mol_type = other DNA
cagagggagaccttgactct

SEQ ID NO: 9948 - DNA, 20 bp, synthetic construct
  source 1..20: mol_type = other DNA
acagagggagaccttgactc

SEQ ID NO: 9949 - DNA, 20 bp, synthetic construct
  source 1..20: mol_type = other DNA
gacagagggagaccttgact

SEQ ID NO: 9950 - DNA, 20 bp, synthetic construct
  source 1..20: mol_type = other DNA
tgacagagggagaccttgac

SEQ ID NO: 9951 - DNA, 20 bp, synthetic construct
  source 1..20: mol_type = other DNA
gtgacagagggagaccttga

SEQ ID NO: 9952 - DNA, 20 bp, synthetic construct
  source 1..20: mol_type = other DNA
ggtgacagagggagaccttg

SEQ ID NO: 9953 - DNA, 20 bp, synthetic construct
  source 1..20: mol_type = other DNA
gggtgacagagggagacctt

SEQ ID NO: 9954 - DNA, 20 bp, synthetic construct
  source 1..20: mol_type = other DNA
tgggtgacagagggagacct

SEQ ID NO: 9955 - DNA, 20 bp, synthetic construct
  source 1..20: mol_type = other DNA
ctgggtgacagagggagacc

SEQ ID NO: 9956 - DNA, 20 bp, synthetic construct
  source 1..20: mol_type = other DNA
cctgggtgacagagggagac

SEQ ID NO: 9957 - DNA, 20 bp, synthetic construct
  source 1..20: mol_type = other DNA
gcctgggtgacagagggaga

SEQ ID NO: 9958 - DNA, 20 bp, synthetic construct
  source 1..20: mol_type = other DNA
agcctgggtgacagagggag

SEQ ID NO: 9959 - DNA, 20 bp, synthetic construct
  source 1..20: mol_type = other DNA
cagcctgggtgacagaggga

SEQ ID NO: 9960 - DNA, 20 bp, synthetic construct
  source 1..20: mol_type = other DNA
ccagcctgggtgacagaggg

SEQ ID NO: 9961 - DNA, 20 bp, synthetic construct
  source 1..20: mol_type = other DNA
tccagcctgggtgacagagg

SEQ ID NO: 9962 - DNA, 20 bp, synthetic construct
  source 1..20: mol_type = other DNA
ctccagcctgggtgacagag

SEQ ID NO: 9963 - DNA, 20 bp, synthetic construct
  source 1..20: mol_type = other DNA
actccagcctgggtgacaga

SEQ ID NO: 9964 - DNA, 20 bp, synthetic construct
  source 1..20: mol_type = other DNA
cactccagcctgggtgacag

SEQ ID NO: 9965 - DNA, 20 bp, synthetic construct
  source 1..20: mol_type = other DNA
gcactccagcctgggtgaca

SEQ ID NO: 9966 - DNA, 20 bp, synthetic construct
  source 1..20: mol_type = other DNA
tgcactccagcctgggtgac

SEQ ID NO: 9967 - DNA, 20 bp, synthetic construct
  source 1..20: mol_type = other DNA
ctgcactccagcctgggtga

SEQ ID NO: 9968 - DNA, 20 bp, synthetic construct
  source 1..20: mol_type = other DNA
gctgcactccagcctgggtg

SEQ ID NO: 9969 - DNA, 20 bp, synthetic construct
  source 1..20: mol_type = other DNA
ggctgcactccagcctgggt

SEQ ID NO: 9970 - DNA, 20 bp, synthetic construct
  source 1..20: mol_type = other DNA
aggctgcactccagcctggg

SEQ ID NO: 9971 - DNA, 20 bp, synthetic construct
  source 1..20: mol_type = other DNA
gaggctgcactccagcctgg

SEQ ID NO: 9972 - DNA, 20 bp, synthetic construct
  source 1..20: mol_type = other DNA
tgaggctgcactccagcctg

SEQ ID NO: 9973 - DNA, 20 bp, synthetic construct
  source 1..20: mol_type = other DNA
ttgaggctgcactccagcct

SEQ ID NO: 9974 - DNA, 20 bp, synthetic construct
  source 1..20: mol_type = other DNA
attgaggctgcactccagcc

SEQ ID NO: 9975 - DNA, 20 bp, synthetic construct
  source 1..20: mol_type = other DNA
gattgaggctgcactccagc

SEQ ID NO: 9976 - DNA, 20 bp, synthetic construct
  source 1..20: mol_type = other DNA
agattgaggctgcactccag

SEQ ID NO: 9977 - DNA, 20 bp, synthetic construct
  source 1..20: mol_type = other DNA
tagattgaggctgcactcca

SEQ ID NO: 9978 - DNA, 20 bp, synthetic construct
  source 1..20: mol_type = other DNA
atagattgaggctgcactcc

SEQ ID NO: 9979 - DNA, 20 bp, synthetic construct
  source 1..20: mol_type = other DNA
catagattgaggctgcactc

SEQ ID NO: 9980 - DNA, 20 bp, synthetic construct
  source 1..20: mol_type = other DNA
ccatagattgaggctgcact

SEQ ID NO: 9981 - DNA, 20 bp, synthetic construct
  source 1..20: mol_type = other DNA
cccatagattgaggctgcac

SEQ ID NO: 9982 - DNA, 20 bp, synthetic construct
  source 1..20: mol_type = other DNA
ccccatagattgaggctgca

SEQ ID NO: 9983 - DNA, 20 bp, synthetic construct
  source 1..20: mol_type = other DNA
gccccatagattgaggctgc

SEQ ID NO: 9984 - DNA, 20 bp, synthetic construct
  source 1..20: mol_type = other DNA
ggccccatagattgaggctg

SEQ ID NO: 9985 - DNA, 20 bp, synthetic construct
  source 1..20: mol_type = other DNA
tggccccatagattgaggct

SEQ ID NO: 9986 - DNA, 20 bp, synthetic construct
  source 1..20: mol_type = other DNA
ttggccccatagattgaggc

SEQ ID NO: 9987 - DNA, 20 bp, synthetic construct
  source 1..20: mol_type = other DNA
cttggccccatagattgagg

SEQ ID NO: 9988 - DNA, 20 bp, synthetic construct
  source 1..20: mol_type = other DNA
gcttggccccatagattgag

SEQ ID NO: 9989 - DNA, 20 bp, synthetic construct
  source 1..20: mol_type = other DNA
tgcttggccccatagattga

SEQ ID NO: 9990 - DNA, 20 bp, synthetic construct
  source 1..20: mol_type = other DNA
atgcttggccccatagattg

SEQ ID NO: 9991 - DNA, 20 bp, synthetic construct
  source 1..20: mol_type = other DNA
aatgcttggccccatagatt

SEQ ID NO: 9992 - DNA, 20 bp, synthetic construct
  source 1..20: mol_type = other DNA
aaatgcttggccccatagat

SEQ ID NO: 9993 - DNA, 20 bp, synthetic construct
  source 1..20: mol_type = other DNA
gaaatgcttggccccataga

SEQ ID NO: 9994 - DNA, 20 bp, synthetic construct
  source 1..20: mol_type = other DNA
agaaatgcttggccccatag

SEQ ID NO: 9995 - DNA, 20 bp, synthetic construct
  source 1..20: mol_type = other DNA
gagaaatgcttggccccata

SEQ ID NO: 9996 - DNA, 20 bp, synthetic construct
  source 1..20: mol_type = other DNA
ggagaaatgcttggccccat

SEQ ID NO: 9997 - DNA, 20 bp, synthetic construct
  source 1..20: mol_type = other DNA
aggagaaatgcttggcccca

SEQ ID NO: 9998 - DNA, 20 bp, synthetic construct
  source 1..20: mol_type = other DNA
caggagaaatgcttggcccc

SEQ ID NO: 9999 - DNA, 20 bp, synthetic construct
  source 1..20: mol_type = other DNA
acaggagaaatgcttggccc

SEQ ID NO: 10000 - DNA, 20 bp, synthetic construct
  source 1..20: mol_type = other DNA
gacaggagaaatgcttggcc

SEQ ID NO: 10001 - DNA, 20 bp, synthetic construct
  source 1..20: mol_type = other DNA
agacaggagaaatgcttggc

SEQ ID NO: 10002 - DNA, 20 bp, synthetic construct
  source 1..20: mol_type = other DNA
aagacaggagaaatgcttgg

SEQ ID NO: 10003 - DNA, 20 bp, synthetic construct
  source 1..20: mol_type = other DNA
taagacaggagaaatgcttg

SEQ ID NO: 10004 - DNA, 20 bp, synthetic construct
  source 1..20: mol_type = other DNA
ctaagacaggagaaatgctt

SEQ ID NO: 10005 - DNA, 20 bp, synthetic construct
  source 1..20: mol_type = other DNA
gctaagacaggagaaatgct

SEQ ID NO: 10006 - DNA, 20 bp, synthetic construct
  source 1..20: mol_type = other DNA
ggctaagacaggagaaatgc

SEQ ID NO: 10007 - DNA, 20 bp, synthetic construct
  source 1..20: mol_type = other DNA
aggctaagacaggagaaatg

SEQ ID NO: 10008 - DNA, 20 bp, synthetic construct
  source 1..20: mol_type = other DNA
gaggctaagacaggagaaat

SEQ ID NO: 10009 - DNA, 20 bp, synthetic construct
  source 1..20: mol_type = other DNA
ggaggctaagacaggagaaa

SEQ ID NO: 10010 - DNA, 20 bp, synthetic construct
  source 1..20: mol_type = other DNA
aggaggctaagacaggagaa

SEQ ID NO: 10011 - DNA, 20 bp, synthetic construct
  source 1..20: mol_type = other DNA
caggaggctaagacaggaga

SEQ ID NO: 10012 - DNA, 20 bp, synthetic construct
  source 1..20: mol_type = other DNA
tcaggaggctaagacaggag

SEQ ID NO: 10013 - DNA, 20 bp, synthetic construct
  source 1..20: mol_type = other DNA
ctcaggaggctaagacagga

SEQ ID NO: 10014 - DNA, 20 bp, synthetic construct
  source 1..20: mol_type = other DNA
actcaggaggctaagacagg

SEQ ID NO: 10015 - DNA, 20 bp, synthetic construct
  source 1..20: mol_type = other DNA
tactcaggaggctaagacag

SEQ ID NO: 10016 - DNA, 20 bp, synthetic construct
  source 1..20: mol_type = other DNA
ctactcaggaggctaagaca

SEQ ID NO: 10017 - DNA, 20 bp, synthetic construct
  source 1..20: mol_type = other DNA
gctactcaggaggctaagac

SEQ ID NO: 10018 - DNA, 20 bp, synthetic construct
  source 1..20: mol_type = other DNA
agctactcaggaggctaaga

SEQ ID NO: 10019 - DNA, 20 bp, synthetic construct
  source 1..20: mol_type = other DNA
cagctactcaggaggctaag

SEQ ID NO: 10020 - DNA, 20 bp, synthetic construct
  source 1..20: mol_type = other DNA
ccagctactcaggaggctaa

SEQ ID NO: 10021 - DNA, 20 bp, synthetic construct
  source 1..20: mol_type = other DNA
tccagctactcaggaggcta

SEQ ID NO: 10022 - DNA, 20 bp, synthetic construct
  source 1..20: mol_type = other DNA
ttccagctactcaggaggct

SEQ ID NO: 10023 - DNA, 20 bp, synthetic construct
  source 1..20: mol_type = other DNA
gttccagctactcaggaggc

SEQ ID NO: 10024 - DNA, 20 bp, synthetic construct
  source 1..20: mol_type = other DNA
agttccagctactcaggagg

SEQ ID NO: 10025 - DNA, 20 bp, synthetic construct
  source 1..20: mol_type = other DNA
tagttccagctactcaggag

SEQ ID NO: 10026 - DNA, 20 bp, synthetic construct
  source 1..20: mol_type = other DNA
gtagttccagctactcagga

SEQ ID NO: 10027 - DNA, 20 bp, synthetic construct
  source 1..20: mol_type = other DNA
tgtagttccagctactcagg

SEQ ID NO: 10028 - DNA, 20 bp, synthetic construct
  source 1..20: mol_type = other DNA
ctgtagttccagctactcag

SEQ ID NO: 10029 - DNA, 20 bp, synthetic construct
  source 1..20: mol_type = other DNA
cctgtagttccagctactca

SEQ ID NO: 10030 - DNA, 20 bp, synthetic construct
  source 1..20: mol_type = other DNA
acctgtagttccagctactc

SEQ ID NO: 10031 - DNA, 20 bp, synthetic construct
  source 1..20: mol_type = other DNA
cacctgtagttccagctact

SEQ ID NO: 10032 - DNA, 20 bp, synthetic construct
  source 1..20: mol_type = other DNA
acacctgtagttccagctac

SEQ ID NO: 10033 - DNA, 20 bp, synthetic construct
  source 1..20: mol_type = other DNA
tacacctgtagttccagcta

SEQ ID NO: 10034 - DNA, 20 bp, synthetic construct
  source 1..20: mol_type = other DNA
gtacacctgtagttccagct

SEQ ID NO: 10035 - DNA, 20 bp, synthetic construct
  source 1..20: mol_type = other DNA
tgtacacctgtagttccagc

SEQ ID NO: 10036 - DNA, 20 bp, synthetic construct
  source 1..20: mol_type = other DNA
gtgtacacctgtagttccag

SEQ ID NO: 10037 - DNA, 20 bp, synthetic construct
  source 1..20: mol_type = other DNA
ggtgtacacctgtagttcca

SEQ ID NO: 10038 - DNA, 20 bp, synthetic construct
  source 1..20: mol_type = other DNA
tggtgtacacctgtagttcc

SEQ ID NO: 10039 - DNA, 20 bp, synthetic construct
  source 1..20: mol_type = other DNA
ctggtgtacacctgtagttc

SEQ ID NO: 10040 - DNA, 20 bp, synthetic construct
  source 1..20: mol_type = other DNA
gctggtgtacacctgtagtt

SEQ ID NO: 10041 - DNA, 20 bp, synthetic construct
  source 1..20: mol_type = other DNA
agctggtgtacacctgtagt

SEQ ID NO: 10042 - DNA, 20 bp, synthetic construct
  source 1..20: mol_type = other DNA
cagctggtgtacacctgtag

SEQ ID NO: 10043 - DNA, 20 bp, synthetic construct
  source 1..20: mol_type = other DNA
ccagctggtgtacacctgta

SEQ ID NO: 10044 - DNA, 20 bp, synthetic construct
  source 1..20: mol_type = other DNA
gccagctggtgtacacctgt

SEQ ID NO: 10045 - DNA, 20 bp, synthetic construct
  source 1..20: mol_type = other DNA
agccagctggtgtacacctg

SEQ ID NO: 10046 - DNA, 20 bp, synthetic construct
  source 1..20: mol_type = other DNA
tagccagctggtgtacacct

SEQ ID NO: 10047 - DNA, 20 bp, synthetic construct
  source 1..20: mol_type = other DNA
ttagccagctggtgtacacc

SEQ ID NO: 10048 - DNA, 20 bp, synthetic construct
  source 1..20: mol_type = other DNA
gttagccagctggtgtacac

SEQ ID NO: 10049 - DNA, 20 bp, synthetic construct
  source 1..20: mol_type = other DNA
tgttagccagctggtgtaca

SEQ ID NO: 10050 - DNA, 20 bp, synthetic construct
  source 1..20: mol_type = other DNA
atgttagccagctggtgtac

SEQ ID NO: 10051 - DNA, 20 bp, synthetic construct
  source 1..20: mol_type = other DNA
aatgttagccagctggtgta

SEQ ID NO: 10052 - DNA, 20 bp, synthetic construct
  source 1..20: mol_type = other DNA
aaatgttagccagctggtgt

SEQ ID NO: 10053 - DNA, 20 bp, synthetic construct
  source 1..20: mol_type = other DNA
taaatgttagccagctggtg

SEQ ID NO: 10054 - DNA, 20 bp, synthetic construct
  source 1..20: mol_type = other DNA
ttaaatgttagccagctggt

SEQ ID NO: 10055 - DNA, 20 bp, synthetic construct
  source 1..20: mol_type = other DNA
tttaaatgttagccagctgg

SEQ ID NO: 10056 - DNA, 20 bp, synthetic construct
  source 1..20: mol_type = other DNA
atttaaatgttagccagctg

SEQ ID NO: 10057 - DNA, 20 bp, synthetic construct
  source 1..20: mol_type = other DNA
aatttaaatgttagccagct

SEQ ID NO: 10058 - DNA, 20 bp, synthetic construct
  source 1..20: mol_type = other DNA
aaatttaaatgttagccagc

SEQ ID NO: 10059 - DNA, 20 bp, synthetic construct
  source 1..20: mol_type = other DNA
aaaatttaaatgttagccag

SEQ ID NO: 10060 - DNA, 20 bp, synthetic construct
  source 1..20: mol_type = other DNA
aaaaatttaaatgttagcca

SEQ ID NO: 10061 - DNA, 20 bp, synthetic construct
  source 1..20: mol_type = other DNA
aaaaaatttaaatgttagcc

SEQ ID NO: 10062 - DNA, 20 bp, synthetic construct
  source 1..20: mol_type = other DNA
caaaaaatttaaatgttagc

SEQ ID NO: 10063 - DNA, 20 bp, synthetic construct
  source 1..20: mol_type = other DNA
acaaaaaatttaaatgttag

SEQ ID NO: 10064 - DNA, 20 bp, synthetic construct
  source 1..20: mol_type = other DNA
tacaaaaaatttaaatgtta

SEQ ID NO: 10065 - DNA, 20 bp, synthetic construct
  source 1..20: mol_type = other DNA
ctacaaaaaatttaaatgtt

SEQ ID NO: 10066 - DNA, 20 bp, synthetic construct
  source 1..20: mol_type = other DNA
tctacaaaaaatttaaatgt

SEQ ID NO: 10067 - DNA, 20 bp, synthetic construct
  source 1..20: mol_type = other DNA
ctctacaaaaaatttaaatg

SEQ ID NO: 10068 - DNA, 20 bp, synthetic construct
  source 1..20: mol_type = other DNA
tctctacaaaaaatttaaat

SEQ ID NO: 10069 - DNA, 20 bp, synthetic construct
  source 1..20: mol_type = other DNA
gtctctacaaaaaatttaaa

SEQ ID NO: 10070 - DNA, 20 bp, synthetic construct
  source 1..20: mol_type = other DNA
tgtctctacaaaaaatttaa

SEQ ID NO: 10071 - DNA, 20 bp, synthetic construct
  source 1..20: mol_type = other DNA
ctgtctctacaaaaaattta

SEQ ID NO: 10072 - DNA, 20 bp, synthetic construct
  source 1..20: mol_type = other DNA
cctgtctctacaaaaaattt

SEQ ID NO: 10073 - DNA, 20 bp, synthetic construct
  source 1..20: mol_type = other DNA
ccctgtctctacaaaaaatt

SEQ ID NO: 10074 - DNA, 20 bp, synthetic construct
  source 1..20: mol_type = other DNA
accctgtctctacaaaaaat

SEQ ID NO: 10075 - DNA, 20 bp, synthetic construct
  source 1..20: mol_type = other DNA
gaccctgtctctacaaaaaa

SEQ ID NO: 10076 - DNA, 20 bp, synthetic construct
  source 1..20: mol_type = other DNA
ggaccctgtctctacaaaaa

SEQ ID NO: 10077 - DNA, 20 bp, synthetic construct
  source 1..20: mol_type = other DNA
aggaccctgtctctacaaaa

SEQ ID NO: 10078 - DNA, 20 bp, synthetic construct
  source 1..20: mol_type = other DNA
caggaccctgtctctacaaa

SEQ ID NO: 10079 - DNA, 20 bp, synthetic construct
  source 1..20: mol_type = other DNA
gcaggaccctgtctctacaa

SEQ ID NO: 10080 - DNA, 20 bp, synthetic construct
  source 1..20: mol_type = other DNA
ggcaggaccctgtctctaca

SEQ ID NO: 10081 - DNA, 20 bp, synthetic construct
  source 1..20: mol_type = other DNA
tggcaggaccctgtctctac

SEQ ID NO: 10082 - DNA, 20 bp, synthetic construct
  source 1..20: mol_type = other DNA
atggcaggaccctgtctcta

SEQ ID NO: 10083 - DNA, 20 bp, synthetic construct
  source 1..20: mol_type = other DNA
catggcaggaccctgtctct

SEQ ID NO: 10084 - DNA, 20 bp, synthetic construct
  source 1..20: mol_type = other DNA
acatggcaggaccctgtctc

SEQ ID NO: 10085 - DNA, 20 bp, synthetic construct
  source 1..20: mol_type = other DNA
aacatggcaggaccctgtct

SEQ ID NO: 10086 - DNA, 20 bp, synthetic construct
  source 1..20: mol_type = other DNA
caacatggcaggaccctgtc

SEQ ID NO: 10087 - DNA, 20 bp, synthetic construct
  source 1..20: mol_type = other DNA
gcaacatggcaggaccctgt

SEQ ID NO: 10088 - DNA, 20 bp, synthetic construct
  source 1..20: mol_type = other DNA
ggcaacatggcaggaccctg

SEQ ID NO: 10089 - DNA, 20 bp, synthetic construct
  source 1..20: mol_type = other DNA
gggcaacatggcaggaccct

SEQ ID NO: 10090 - DNA, 20 bp, synthetic construct
  source 1..20: mol_type = other DNA
tgggcaacatggcaggaccc

SEQ ID NO: 10091 - DNA, 20 bp, synthetic construct
  source 1..20: mol_type = other DNA
ctgggcaacatggcaggacc

SEQ ID NO: 10092 - DNA, 20 bp, synthetic construct
  source 1..20: mol_type = other DNA
tctgggcaacatggcaggac

SEQ ID NO: 10093 - DNA, 20 bp, synthetic construct
  source 1..20: mol_type = other DNA
atctgggcaacatggcagga

SEQ ID NO: 10094 - DNA, 20 bp, synthetic construct
  source 1..20: mol_type = other DNA
aatctgggcaacatggcagg

SEQ ID NO: 10095 - DNA, 20 bp, synthetic construct
  source 1..20: mol_type = other DNA
caatctgggcaacatggcag

SEQ ID NO: 10096 - DNA, 20 bp, synthetic construct
  source 1..20: mol_type = other DNA
ccaatctgggcaacatggca

SEQ ID NO: 10097 - DNA, 20 bp, synthetic construct
  source 1..20: mol_type = other DNA
accaatctgggcaacatggc

SEQ ID NO: 10098 - DNA, 20 bp, synthetic construct
  source 1..20: mol_type = other DNA
gaccaatctgggcaacatgg

SEQ ID NO: 10099 - DNA, 20 bp, synthetic construct
  source 1..20: mol_type = other DNA
agaccaatctgggcaacatg

SEQ ID NO: 10100 - DNA, 20 bp, synthetic construct
  source 1..20: mol_type = other DNA
gagaccaatctgggcaacat

SEQ ID NO: 10101 - DNA, 20 bp, synthetic construct
  source 1..20: mol_type = other DNA
tgagaccaatctgggcaaca

SEQ ID NO: 10102 - DNA, 20 bp, synthetic construct
  source 1..20: mol_type = other DNA
ttgagaccaatctgggcaac

SEQ ID NO: 10103 - DNA, 20 bp, synthetic construct
  source 1..20: mol_type = other DNA
tttgagaccaatctgggcaa

SEQ ID NO: 10104 - DNA, 20 bp, synthetic construct
  source 1..20: mol_type = other DNA
gtttgagaccaatctgggca

SEQ ID NO: 10105 - DNA, 20 bp, synthetic construct
  source 1..20: mol_type = other DNA
agtttgagaccaatctgggc

SEQ ID NO: 10106 - DNA, 20 bp, synthetic construct
  source 1..20: mol_type = other DNA
gagtttgagaccaatctggg

SEQ ID NO: 10107 - DNA, 20 bp, synthetic construct
  source 1..20: mol_type = other DNA
ggagtttgagaccaatctgg

SEQ ID NO: 10108 - DNA, 20 bp, synthetic construct
  source 1..20: mol_type = other DNA
aggagtttgagaccaatctg

SEQ ID NO: 10109 - DNA, 20 bp, synthetic construct
  source 1..20: mol_type = other DNA
caggagtttgagaccaatct

SEQ ID NO: 10110 - DNA, 20 bp, synthetic construct
  source 1..20: mol_type = other DNA
ccaggagtttgagaccaatc

SEQ ID NO: 10111 - DNA, 20 bp, synthetic construct
  source 1..20: mol_type = other DNA
cccaggagtttgagaccaat

SEQ ID NO: 10112 - DNA, 20 bp, synthetic construct
  source 1..20: mol_type = other DNA
gcccaggagtttgagaccaa

SEQ ID NO: 10113 - DNA, 20 bp, synthetic construct
  source 1..20: mol_type = other DNA
agcccaggagtttgagacca

SEQ ID NO: 10114 - DNA, 20 bp, synthetic construct
  source 1..20: mol_type = other DNA
gagcccaggagtttgagacc

SEQ ID NO: 10115 - DNA, 20 bp, synthetic construct
  source 1..20: mol_type = other DNA
tgagcccaggagtttgagac

SEQ ID NO: 10116 - DNA, 20 bp, synthetic construct
  source 1..20: mol_type = other DNA
ttgagcccaggagtttgaga

SEQ ID NO: 10117 - DNA, 20 bp, synthetic construct
  source 1..20: mol_type = other DNA
cttgagcccaggagtttgag

SEQ ID NO: 10118 - DNA, 20 bp, synthetic construct
  source 1..20: mol_type = other DNA
acttgagcccaggagtttga

SEQ ID NO: 10119 - DNA, 20 bp, synthetic construct
  source 1..20: mol_type = other DNA
cacttgagcccaggagtttg

SEQ ID NO: 10120 - DNA, 20 bp, synthetic construct
  source 1..20: mol_type = other DNA
tcacttgagcccaggagttt

SEQ ID NO: 10121 - DNA, 20 bp, synthetic construct
  source 1..20: mol_type = other DNA
atcacttgagcccaggagtt

SEQ ID NO: 10122 - DNA, 20 bp, synthetic construct
  source 1..20: mol_type = other DNA
gatcacttgagcccaggagt

SEQ ID NO: 10123 - DNA, 20 bp, synthetic construct
  source 1..20: mol_type = other DNA
ggatcacttgagcccaggag

SEQ ID NO: 10124 - DNA, 20 bp, synthetic construct
  source 1..20: mol_type = other DNA
aggatcacttgagcccagga

SEQ ID NO: 10125 - DNA, 20 bp, synthetic construct
  source 1..20: mol_type = other DNA
gaggatcacttgagcccagg

SEQ ID NO: 10126 - DNA, 20 bp, synthetic construct
  source 1..20: mol_type = other DNA
ggaggatcacttgagcccag

SEQ ID NO: 10127 - DNA, 20 bp, synthetic construct
  source 1..20: mol_type = other DNA
aggaggatcacttgagccca

SEQ ID NO: 10128 - DNA, 20 bp, synthetic construct
  source 1..20: mol_type = other DNA
caggaggatcacttgagccc

SEQ ID NO: 10129 - DNA, 20 bp, synthetic construct
  source 1..20: mol_type = other DNA
gcaggaggatcacttgagcc

SEQ ID NO: 10130 - DNA, 20 bp, synthetic construct
  source 1..20: mol_type = other DNA
ggcaggaggatcacttgagc

SEQ ID NO: 10131 - DNA, 20 bp, synthetic construct
  source 1..20: mol_type = other DNA
aggcaggaggatcacttgag

SEQ ID NO: 10132 - DNA, 20 bp, synthetic construct
  source 1..20: mol_type = other DNA
gaggcaggaggatcacttga

SEQ ID NO: 10133 - DNA, 20 bp, synthetic construct
  source 1..20: mol_type = other DNA
tgaggcaggaggatcacttg

SEQ ID NO: 10134 - DNA, 20 bp, synthetic construct
  source 1..20: mol_type = other DNA
ctgaggcaggaggatcactt

SEQ ID NO: 10135 - DNA, 20 bp, synthetic construct
  source 1..20: mol_type = other DNA
gctgaggcaggaggatcact

SEQ ID NO: 10136 - DNA, 20 bp, synthetic construct
  source 1..20: mol_type = other DNA
agctgaggcaggaggatcac

SEQ ID NO: 10137 - DNA, 20 bp, synthetic construct
  source 1..20: mol_type = other DNA
aagctgaggcaggaggatca

SEQ ID NO: 10138 - DNA, 20 bp, synthetic construct
  source 1..20: mol_type = other DNA
gaagctgaggcaggaggatc

SEQ ID NO: 10139 - DNA, 20 bp, synthetic construct
  source 1..20: mol_type = other DNA
ggaagctgaggcaggaggat

SEQ ID NO: 10140 - DNA, 20 bp, synthetic construct
  source 1..20: mol_type = other DNA
gggaagctgaggcaggagga

SEQ ID NO: 10141 - DNA, 20 bp, synthetic construct
  source 1..20: mol_type = other DNA
tgggaagctgaggcaggagg

SEQ ID NO: 10142 - DNA, 20 bp, synthetic construct
  source 1..20: mol_type = other DNA
ttgggaagctgaggcaggag

SEQ ID NO: 10143 - DNA, 20 bp, synthetic construct
  source 1..20: mol_type = other DNA
tttgggaagctgaggcagga

SEQ ID NO: 10144 - DNA, 20 bp, synthetic construct
  source 1..20: mol_type = other DNA
ctttgggaagctgaggcagg

SEQ ID NO: 10145 - DNA, 20 bp, synthetic construct
  source 1..20: mol_type = other DNA
actttgggaagctgaggcag

SEQ ID NO: 10146 - DNA, 20 bp, synthetic construct
  source 1..20: mol_type = other DNA
cactttgggaagctgaggca

SEQ ID NO: 10147 - DNA, 20 bp, synthetic construct
  source 1..20: mol_type = other DNA
gcactttgggaagctgaggc

SEQ ID NO: 10148 - DNA, 20 bp, synthetic construct
  source 1..20: mol_type = other DNA
agcactttgggaagctgagg

SEQ ID NO: 10149 - DNA, 20 bp, synthetic construct
  source 1..20: mol_type = other DNA
cagcactttgggaagctgag

SEQ ID NO: 10150 - DNA, 20 bp, synthetic construct
  source 1..20: mol_type = other DNA
tcagcactttgggaagctga

SEQ ID NO: 10151 - DNA, 20 bp, synthetic construct
  source 1..20: mol_type = other DNA
ctcagcactttgggaagctg

SEQ ID NO: 10152 - DNA, 20 bp, synthetic construct
  source 1..20: mol_type = other DNA
tctcagcactttgggaagct

SEQ ID NO: 10153 - DNA, 20 bp, synthetic construct
  source 1..20: mol_type = other DNA
atctcagcactttgggaagc

SEQ ID NO: 10154 - DNA, 20 bp, synthetic construct
  source 1..20: mol_type = other DNA
aatctcagcactttgggaag

SEQ ID NO: 10155 - DNA, 20 bp, synthetic construct
  source 1..20: mol_type = other DNA
taatctcagcactttgggaa

SEQ ID NO: 10156 - DNA, 20 bp, synthetic construct
  source 1..20: mol_type = other DNA
gtaatctcagcactttggga

SEQ ID NO: 10157 - DNA, 20 bp, synthetic construct
  source 1..20: mol_type = other DNA
tgtaatctcagcactttggg

SEQ ID NO: 10158 - DNA, 20 bp, synthetic construct
  source 1..20: mol_type = other DNA
ctgtaatctcagcactttgg

SEQ ID NO: 10159 - DNA, 20 bp, synthetic construct
  source 1..20: mol_type = other DNA
cctgtaatctcagcactttg

SEQ ID NO: 10160 - DNA, 20 bp, synthetic construct
  source 1..20: mol_type = other DNA
acctgtaatctcagcacttt

SEQ ID NO: 10161 - DNA, 20 bp, synthetic construct
  source 1..20: mol_type = other DNA
cacctgtaatctcagcactt

SEQ ID NO: 10162 - DNA, 20 bp, synthetic construct
  source 1..20: mol_type = other DNA
acacctgtaatctcagcact

SEQ ID NO: 10163 - DNA, 20 bp, synthetic construct
  source 1..20: mol_type = other DNA
cacacctgtaatctcagcac

SEQ ID NO: 10164 - DNA, 20 bp, synthetic construct
  source 1..20: mol_type = other DNA
tcacacctgtaatctcagca

SEQ ID NO: 10165 - DNA, 20 bp, synthetic construct
  source 1..20: mol_type = other DNA
ctcacacctgtaatctcagc

SEQ ID NO: 10166 - DNA, 20 bp, synthetic construct
  source 1..20: mol_type = other DNA
gctcacacctgtaatctcag

SEQ ID NO: 10167 - DNA, 20 bp, synthetic construct
  source 1..20: mol_type = other DNA
ggctcacacctgtaatctca

SEQ ID NO: 10168 - DNA, 20 bp, synthetic construct
  source 1..20: mol_type = other DNA
tggctcacacctgtaatctc

SEQ ID NO: 10169 - DNA, 20 bp, synthetic construct
  source 1..20: mol_type = other DNA
gtggctcacacctgtaatct

SEQ ID NO: 10170 - DNA, 20 bp, synthetic construct
  source 1..20: mol_type = other DNA
agtggctcacacctgtaatc

SEQ ID NO: 10171 - DNA, 20 bp, synthetic construct
  source 1..20: mol_type = other DNA
cagtggctcacacctgtaat

SEQ ID NO: 10172 - DNA, 20 bp, synthetic construct
  source 1..20: mol_type = other DNA
gcagtggctcacacctgtaa

SEQ ID NO: 10173 - DNA, 20 bp, synthetic construct
  source 1..20: mol_type = other DNA
tgcagtggctcacacctgta

SEQ ID NO: 10174 - DNA, 20 bp, synthetic construct
  source 1..20: mol_type = other DNA
gtgcagtggctcacacctgt

SEQ ID NO: 10175 - DNA, 20 bp, synthetic construct
  source 1..20: mol_type = other DNA
ggtgcagtggctcacacctg

SEQ ID NO: 10176 - DNA, 20 bp, synthetic construct
  source 1..20: mol_type = other DNA
cggtgcagtggctcacacct

SEQ ID NO: 10177 - DNA, 20 bp, synthetic construct
  source 1..20: mol_type = other DNA
tcggtgcagtggctcacacc

SEQ ID NO: 10178 - DNA, 20 bp, synthetic construct
  source 1..20: mol_type = other DNA
ctcggtgcagtggctcacac

SEQ ID NO: 10179 - DNA, 20 bp, synthetic construct
  source 1..20: mol_type = other DNA
gctcggtgcagtggctcaca

SEQ ID NO: 10180 - DNA, 20 bp, synthetic construct
  source 1..20: mol_type = other DNA
ggctcggtgcagtggctcac

SEQ ID NO: 10181 - DNA, 20 bp, synthetic construct
  source 1..20: mol_type = other DNA
gggctcggtgcagtggctca

SEQ ID NO: 10182 - DNA, 20 bp, synthetic construct
  source 1..20: mol_type = other DNA
ggggctcggtgcagtggctc

SEQ ID NO: 10183 - DNA, 20 bp, synthetic construct
  source 1..20: mol_type = other DNA
gggggctcggtgcagtggct

SEQ ID NO: 10184 - DNA, 20 bp, synthetic construct
  source 1..20: mol_type = other DNA
agggggctcggtgcagtggc

SEQ ID NO: 10185 - DNA, 20 bp, synthetic construct
  source 1..20: mol_type = other DNA
gagggggctcggtgcagtgg

SEQ ID NO: 10186 - DNA, 20 bp, synthetic construct
  source 1..20: mol_type = other DNA
ggagggggctcggtgcagtg

SEQ ID NO: 10187 - DNA, 20 bp, synthetic construct
  source 1..20: mol_type = other DNA
gggagggggctcggtgcagt

SEQ ID NO: 10188 - DNA, 20 bp, synthetic construct
  source 1..20: mol_type = other DNA
agggagggggctcggtgcag

SEQ ID NO: 10189 - DNA, 20 bp, synthetic construct
  source 1..20: mol_type = other DNA
aagggagggggctcggtgca

SEQ ID NO: 10190 - DNA, 20 bp, synthetic construct
  source 1..20: mol_type = other DNA
aaagggagggggctcggtgc

SEQ ID NO: 10191 - DNA, 20 bp, synthetic construct
  source 1..20: mol_type = other DNA
taaagggagggggctcggtg

SEQ ID NO: 10192 - DNA, 20 bp, synthetic construct
  source 1..20: mol_type = other DNA
ataaagggagggggctcggt

SEQ ID NO: 10193 - DNA, 20 bp, synthetic construct
  source 1..20: mol_type = other DNA
aataaagggagggggctcgg

SEQ ID NO: 10194 - DNA, 20 bp, synthetic construct
  source 1..20: mol_type = other DNA
aaataaagggagggggctcg

SEQ ID NO: 10195 - DNA, 20 bp, synthetic construct
  source 1..20: mol_type = other DNA
aaaataaagggagggggctc

SEQ ID NO: 10196 - DNA, 20 bp, synthetic construct
  source 1..20: mol_type = other DNA
aaaaataaagggagggggct

SEQ ID NO: 10197 - DNA, 20 bp, synthetic construct
  source 1..20: mol_type = other DNA
taaaaataaagggagggggc

SEQ ID NO: 10198 - DNA, 20 bp, synthetic construct
  source 1..20: mol_type = other DNA
ataaaaataaagggaggggg

SEQ ID NO: 10199 - DNA, 20 bp, synthetic construct
  source 1..20: mol_type = other DNA
aataaaaataaagggagggg

SEQ ID NO: 10200 - DNA, 20 bp, synthetic construct
  source 1..20: mol_type = other DNA
aaataaaaataaagggaggg

SEQ ID NO: 10201 - DNA, 20 bp, synthetic construct
  source 1..20: mol_type = other DNA
aaaataaaaataaagggagg

SEQ ID NO: 10202 - DNA, 20 bp, synthetic construct
  source 1..20: mol_type = other DNA
aaaaataaaaataaagggag

SEQ ID NO: 10203 - DNA, 20 bp, synthetic construct
  source 1..20: mol_type = other DNA
taaaaataaaaataaaggga

SEQ ID NO: 10204 - DNA, 20 bp, synthetic construct
  source 1..20: mol_type = other DNA
ttaaaaataaaaataaaggg

SEQ ID NO: 10205 - DNA, 20 bp, synthetic construct
  source 1..20: mol_type = other DNA
tttaaaaataaaaataaagg

SEQ ID NO: 10206 - DNA, 20 bp, synthetic construct
  source 1..20: mol_type = other DNA
atttaaaaataaaaataaag

SEQ ID NO: 10207 - DNA, 20 bp, synthetic construct
  source 1..20: mol_type = other DNA
aatttaaaaataaaaataaa

SEQ ID NO: 10208 - DNA, 20 bp, synthetic construct
  source 1..20: mol_type = other DNA
aaatttaaaaataaaaataa

SEQ ID NO: 10209 - DNA, 20 bp, synthetic construct
  source 1..20: mol_type = other DNA
aaaatttaaaaataaaaata

SEQ ID NO: 10210 - DNA, 20 bp, synthetic construct
  source 1..20: mol_type = other DNA
taaaatttaaaaataaaaat

SEQ ID NO: 10211 - DNA, 20 bp, synthetic construct
  source 1..20: mol_type = other DNA
ttaaaatttaaaaataaaaa

SEQ ID NO: 10212 - DNA, 20 bp, synthetic construct
  source 1..20: mol_type = other DNA
cttaaaatttaaaaataaaa

SEQ ID NO: 10213 - DNA, 20 bp, synthetic construct
  source 1..20: mol_type = other DNA
acttaaaatttaaaaataaa

SEQ ID NO: 10214 - DNA, 20 bp, synthetic construct
  source 1..20: mol_type = other DNA
aacttaaaatttaaaaataa

SEQ ID NO: 10215 - DNA, 20 bp, synthetic construct
  source 1..20: mol_type = other DNA
gaacttaaaatttaaaaata

SEQ ID NO: 10216 - DNA, 20 bp, synthetic construct
  source 1..20: mol_type = other DNA
agaacttaaaatttaaaaat

SEQ ID NO: 10217 - DNA, 20 bp, synthetic construct
  source 1..20: mol_type = other DNA
cagaacttaaaatttaaaaa

SEQ ID NO: 10218 - DNA, 20 bp, synthetic construct
  source 1..20: mol_type = other DNA
ccagaacttaaaatttaaaa

SEQ ID NO: 10219 - DNA, 20 bp, synthetic construct
  source 1..20: mol_type = other DNA
cccagaacttaaaatttaaa

SEQ ID NO: 10220 - DNA, 20 bp, synthetic construct
  source 1..20: mol_type = other DNA
ccccagaacttaaaatttaa

SEQ ID NO: 10221 - DNA, 20 bp, synthetic construct
  source 1..20: mol_type = other DNA
gccccagaacttaaaattta

SEQ ID NO: 10222 - DNA, 20 bp, synthetic construct
  source 1..20: mol_type = other DNA
ggccccagaacttaaaattt

SEQ ID NO: 10223 - DNA, 20 bp, synthetic construct
  source 1..20: mol_type = other DNA
gggccccagaacttaaaatt

SEQ ID NO: 10224 - DNA, 20 bp, synthetic construct
  source 1..20: mol_type = other DNA
ggggccccagaacttaaaat

SEQ ID NO: 10225 - DNA, 20 bp, synthetic construct
  source 1..20: mol_type = other DNA
aggggccccagaacttaaaa

SEQ ID NO: 10226 - DNA, 20 bp, synthetic construct
  source 1..20: mol_type = other DNA
gaggggccccagaacttaaa

SEQ ID NO: 10227 - DNA, 20 bp, synthetic construct
  source 1..20: mol_type = other DNA
ggaggggccccagaacttaa

SEQ ID NO: 10228 - DNA, 20 bp, synthetic construct
  source 1..20: mol_type = other DNA
gggaggggccccagaactta

SEQ ID NO: 10229 - DNA, 20 bp, synthetic construct
  source 1..20: mol_type = other DNA
agggaggggccccagaactt

SEQ ID NO: 10230 - DNA, 20 bp, synthetic construct
  source 1..20: mol_type = other DNA
aagggaggggccccagaact

SEQ ID NO: 10231 - DNA, 20 bp, synthetic construct
  source 1..20: mol_type = other DNA
caagggaggggccccagaac

SEQ ID NO: 10232 - DNA, 20 bp, synthetic construct
  source 1..20: mol_type = other DNA
tcaagggaggggccccagaa

SEQ ID NO: 10233 - DNA, 20 bp, synthetic construct
  source 1..20: mol_type = other DNA
ttcaagggaggggccccaga

SEQ ID NO: 10234 - DNA, 20 bp, synthetic construct
  source 1..20: mol_type = other DNA
tttcaagggaggggccccag

SEQ ID NO: 10235 - DNA, 20 bp, synthetic construct
  source 1..20: mol_type = other DNA
atttcaagggaggggcccca

SEQ ID NO: 10236 - DNA, 20 bp, synthetic construct
  source 1..20: mol_type = other DNA
tatttcaagggaggggcccc

SEQ ID NO: 10237 - DNA, 20 bp, synthetic construct
  source 1..20: mol_type = other DNA
ttatttcaagggaggggccc

SEQ ID NO: 10238 - DNA, 20 bp, synthetic construct
  source 1..20: mol_type = other DNA
tttatttcaagggaggggcc

SEQ ID NO: 10239 - DNA, 20 bp, synthetic construct
  source 1..20: mol_type = other DNA
atttatttcaagggaggggc

SEQ ID NO: 10240 - DNA, 20 bp, synthetic construct
  source 1..20: mol_type = other DNA
tatttatttcaagggagggg

SEQ ID NO: 10241 - DNA, 20 bp, synthetic construct
  source 1..20: mol_type = other DNA
ctatttatttcaagggaggg

SEQ ID NO: 10242 - DNA, 20 bp, synthetic construct
  source 1..20: mol_type = other DNA
tctatttatttcaagggagg

SEQ ID NO: 10243 - DNA, 20 bp, synthetic construct
  source 1..20: mol_type = other DNA
ttctatttatttcaagggag

SEQ ID NO: 10244 - DNA, 20 bp, synthetic construct
  source 1..20: mol_type = other DNA
tttctatttatttcaaggga

SEQ ID NO: 10245 - DNA, 20 bp, synthetic construct
  source 1..20: mol_type = other DNA
gtttctatttatttcaaggg

SEQ ID NO: 10246 - DNA, 20 bp, synthetic construct
  source 1..20: mol_type = other DNA
cgtttctatttatttcaagg

SEQ ID NO: 10247 - DNA, 20 bp, synthetic construct
  source 1..20: mol_type = other DNA
acgtttctatttatttcaag

SEQ ID NO: 10248 - DNA, 20 bp, synthetic construct
  source 1..20: mol_type = other DNA
tacgtttctatttatttcaa

SEQ ID NO: 10249 - DNA, 20 bp, synthetic construct
  source 1..20: mol_type = other DNA
ttacgtttctatttatttca

SEQ ID NO: 10250 - DNA, 20 bp, synthetic construct
  source 1..20: mol_type = other DNA
attacgtttctatttatttc

SEQ ID NO: 10251 - DNA, 20 bp, synthetic construct
  source 1..20: mol_type = other DNA
tattacgtttctatttattt

SEQ ID NO: 10252 - DNA, 20 bp, synthetic construct
  source 1..20: mol_type = other DNA
atattacgtttctatttatt

SEQ ID NO: 10253 - DNA, 20 bp, synthetic construct
  source 1..20: mol_type = other DNA
tatattacgtttctatttat

SEQ ID NO: 10254 - DNA, 20 bp, synthetic construct
  source 1..20: mol_type = other DNA
atatattacgtttctattta

SEQ ID NO: 10255 - DNA, 20 bp, synthetic construct
  source 1..20: mol_type = other DNA
tatatattacgtttctattt

SEQ ID NO: 10256 - DNA, 20 bp, synthetic construct
  source 1..20: mol_type = other DNA
gtatatattacgtttctatt

SEQ ID NO: 10257 - DNA, 20 bp, synthetic construct
  source 1..20: mol_type = other DNA
tgtatatattacgtttctat

SEQ ID NO: 10258 - DNA, 20 bp, synthetic construct
  source 1..20: mol_type = other DNA
gtgtatatattacgtttcta

SEQ ID NO: 10259 - DNA, 20 bp, synthetic construct
  source 1..20: mol_type = other DNA
tgtgtatatattacgtttct

SEQ ID NO: 10260 - DNA, 20 bp, synthetic construct
  source 1..20: mol_type = other DNA
ttgtgtatatattacgtttc

SEQ ID NO: 10261 - DNA, 20 bp, synthetic construct
  source 1..20: mol_type = other DNA
cttgtgtatatattacgttt

SEQ ID NO: 10262 - DNA, 20 bp, synthetic construct
  source 1..20: mol_type = other DNA
tcttgtgtatatattacgtt

SEQ ID NO: 10263 - DNA, 20 bp, synthetic construct
  source 1..20: mol_type = other DNA
atcttgtgtatatattacgt

SEQ ID NO: 10264 - DNA, 20 bp, synthetic construct
  source 1..20: mol_type = other DNA
gatcttgtgtatatattacg

SEQ ID NO: 10265 - DNA, 20 bp, synthetic construct
  source 1..20: mol_type = other DNA
tgatcttgtgtatatattac

SEQ ID NO: 10266 - DNA, 20 bp, synthetic construct
  source 1..20: mol_type = other DNA
atgatcttgtgtatatatta

SEQ ID NO: 10267 - DNA, 20 bp, synthetic construct
  source 1..20: mol_type = other DNA
catgatcttgtgtatatatt

SEQ ID NO: 10268 - DNA, 20 bp, synthetic construct
  source 1..20: mol_type = other DNA
gcatgatcttgtgtatatat

SEQ ID NO: 10269 - DNA, 20 bp, synthetic construct
  source 1..20: mol_type = other DNA
agcatgatcttgtgtatata

SEQ ID NO: 10270 - DNA, 20 bp, synthetic construct
  source 1..20: mol_type = other DNA
cagcatgatcttgtgtatat

SEQ ID NO: 10271 - DNA, 20 bp, synthetic construct
  source 1..20: mol_type = other DNA
acagcatgatcttgtgtata

SEQ ID NO: 10272 - DNA, 20 bp, synthetic construct
  source 1..20: mol_type = other DNA
cacagcatgatcttgtgtat

SEQ ID NO: 10273 - DNA, 20 bp, synthetic construct
  source 1..20: mol_type = other DNA
acacagcatgatcttgtgta

SEQ ID NO: 10274 - DNA, 20 bp, synthetic construct
  source 1..20: mol_type = other DNA
tacacagcatgatcttgtgt

SEQ ID NO: 10275 - DNA, 20 bp, synthetic construct
  source 1..20: mol_type = other DNA
atacacagcatgatcttgtg

SEQ ID NO: 10276 - DNA, 20 bp, synthetic construct
  source 1..20: mol_type = other DNA
aatacacagcatgatcttgt

SEQ ID NO: 10277 - DNA, 20 bp, synthetic construct
  source 1..20: mol_type = other DNA
aaatacacagcatgatcttg

SEQ ID NO: 10278 - DNA, 20 bp, synthetic construct
  source 1..20: mol_type = other DNA
aaaatacacagcatgatctt

SEQ ID NO: 10279 - DNA, 20 bp, synthetic construct
  source 1..20: mol_type = other DNA
taaaatacacagcatgatct

SEQ ID NO: 10280 - DNA, 20 bp, synthetic construct
  source 1..20: mol_type = other DNA
ttaaaatacacagcatgatc

SEQ ID NO: 10281 - DNA, 20 bp, synthetic construct
  source 1..20: mol_type = other DNA
cttaaaatacacagcatgat

SEQ ID NO: 10282 - DNA, 20 bp, synthetic construct
  source 1..20: mol_type = other DNA
ccttaaaatacacagcatga

SEQ ID NO: 10283 - DNA, 20 bp, synthetic construct
  source 1..20: mol_type = other DNA
gccttaaaatacacagcatg

SEQ ID NO: 10284 - DNA, 20 bp, synthetic construct
  source 1..20: mol_type = other DNA
tgccttaaaatacacagcat

SEQ ID NO: 10285 - DNA, 20 bp, synthetic construct
  source 1..20: mol_type = other DNA
ttgccttaaaatacacagca

SEQ ID NO: 10286 - DNA, 20 bp, synthetic construct
  source 1..20: mol_type = other DNA
attgccttaaaatacacagc

SEQ ID NO: 10287 - DNA, 20 bp, synthetic construct
  source 1..20: mol_type = other DNA
cattgccttaaaatacacag

SEQ ID NO: 10288 - DNA, 20 bp, synthetic construct
  source 1..20: mol_type = other DNA
ccattgccttaaaatacaca

SEQ ID NO: 10289 - DNA, 20 bp, synthetic construct
  source 1..20: mol_type = other DNA
accattgccttaaaatacac

SEQ ID NO: 10290 - DNA, 20 bp, synthetic construct
  source 1..20: mol_type = other DNA
gaccattgccttaaaataca

SEQ ID NO: 10291 - DNA, 20 bp, synthetic construct
  source 1..20: mol_type = other DNA
ggaccattgccttaaaatac

SEQ ID NO: 10292 - DNA, 20 bp, synthetic construct
  source 1..20: mol_type = other DNA
aggaccattgccttaaaata

SEQ ID NO: 10293 - DNA, 20 bp, synthetic construct
  source 1..20: mol_type = other DNA
gaggaccattgccttaaaat

SEQ ID NO: 10294 - DNA, 20 bp, synthetic construct
  source 1..20: mol_type = other DNA
tgaggaccattgccttaaaa

SEQ ID NO: 10295 - DNA, 20 bp, synthetic construct
  source 1..20: mol_type = other DNA
ttgaggaccattgccttaaa

SEQ ID NO: 10296 - DNA, 20 bp, synthetic construct
  source 1..20: mol_type = other DNA
gttgaggaccattgccttaa

SEQ ID NO: 10297 - DNA, 20 bp, synthetic construct
  source 1..20: mol_type = other DNA
ggttgaggaccattgcctta

SEQ ID NO: 10298 - DNA, 20 bp, synthetic construct
  source 1..20: mol_type = other DNA
aggttgaggaccattgcctt

SEQ ID NO: 10299 - DNA, 20 bp, synthetic construct
  source 1..20: mol_type = other DNA
aaggttgaggaccattgcct

SEQ ID NO: 10300 - DNA, 20 bp, synthetic construct
  source 1..20: mol_type = other DNA
aaaggttgaggaccattgcc

SEQ ID NO: 10301 - DNA, 20 bp, synthetic construct
  source 1..20: mol_type = other DNA
aaaaggttgaggaccattgc

SEQ ID NO: 10302 - DNA, 20 bp, synthetic construct
  source 1..20: mol_type = other DNA
aaaaaggttgaggaccattg

SEQ ID NO: 10303 - DNA, 20 bp, synthetic construct
  source 1..20: mol_type = other DNA
taaaaaggttgaggaccatt

SEQ ID NO: 10304 - DNA, 20 bp, synthetic construct
  source 1..20: mol_type = other DNA
ttaaaaaggttgaggaccat

SEQ ID NO: 10305 - DNA, 20 bp, synthetic construct
  source 1..20: mol_type = other DNA
gttaaaaaggttgaggacca

SEQ ID NO: 10306 - DNA, 20 bp, synthetic construct
  source 1..20: mol_type = other DNA
tgttaaaaaggttgaggacc

SEQ ID NO: 10307 - DNA, 20 bp, synthetic construct
  source 1..20: mol_type = other DNA
gtgttaaaaaggttgaggac

SEQ ID NO: 10308 - DNA, 20 bp, synthetic construct
  source 1..20: mol_type = other DNA
agtgttaaaaaggttgagga

SEQ ID NO: 10309 - DNA, 20 bp, synthetic construct
  source 1..20: mol_type = other DNA
tagtgttaaaaaggttgagg

SEQ ID NO: 10310 - DNA, 20 bp, synthetic construct
  source 1..20: mol_type = other DNA
ctagtgttaaaaaggttgag

SEQ ID NO: 10311 - DNA, 20 bp, synthetic construct
  source 1..20: mol_type = other DNA
cctagtgttaaaaaggttga

SEQ ID NO: 10312 - DNA, 20 bp, synthetic construct
  source 1..20: mol_type = other DNA
ccctagtgttaaaaaggttg

SEQ ID NO: 10313 - DNA, 20 bp, synthetic construct
  source 1..20: mol_type = other DNA
tccctagtgttaaaaaggtt

SEQ ID NO: 10314 - DNA, 20 bp, synthetic construct
  source 1..20: mol_type = other DNA
gtccctagtgttaaaaaggt

SEQ ID NO: 10315 - DNA, 20 bp, synthetic construct
  source 1..20: mol_type = other DNA
ggtccctagtgttaaaaagg

SEQ ID NO: 10316 - DNA, 20 bp, synthetic construct
  source 1..20: mol_type = other DNA
cggtccctagtgttaaaaag

SEQ ID NO: 10317 - DNA, 20 bp, synthetic construct
  source 1..20: mol_type = other DNA
ccggtccctagtgttaaaaa

SEQ ID NO: 10318 - DNA, 20 bp, synthetic construct
  source 1..20: mol_type = other DNA
accggtccctagtgttaaaa

SEQ ID NO: 10319 - DNA, 20 bp, synthetic construct
  source 1..20: mol_type = other DNA
aaccggtccctagtgttaaa

SEQ ID NO: 10320 - DNA, 20 bp, synthetic construct
  source 1..20: mol_type = other DNA
aaaccggtccctagtgttaa

SEQ ID NO: 10321 - DNA, 20 bp, synthetic construct
  source 1..20: mol_type = other DNA
aaaaccggtccctagtgtta

SEQ ID NO: 10322 - DNA, 20 bp, synthetic construct
  source 1..20: mol_type = other DNA
caaaaccggtccctagtgtt

SEQ ID NO: 10323 - DNA, 20 bp, synthetic construct
  source 1..20: mol_type = other DNA
acaaaaccggtccctagtgt

SEQ ID NO: 10324 - DNA, 20 bp, synthetic construct
  source 1..20: mol_type = other DNA
cacaaaaccggtccctagtg

SEQ ID NO: 10325 - DNA, 20 bp, synthetic construct
  source 1..20: mol_type = other DNA
ccacaaaaccggtccctagt

SEQ ID NO: 10326 - DNA, 20 bp, synthetic construct
  source 1..20: mol_type = other DNA
tccacaaaaccggtccctag

SEQ ID NO: 10327 - DNA, 20 bp, synthetic construct
  source 1..20: mol_type = other DNA
ttccacaaaaccggtcccta

SEQ ID NO: 10328 - DNA, 20 bp, synthetic construct
  source 1..20: mol_type = other DNA
cttccacaaaaccggtccct

SEQ ID NO: 10329 - DNA, 20 bp, synthetic construct
  source 1..20: mol_type = other DNA
tcttccacaaaaccggtccc

SEQ ID NO: 10330 - DNA, 20 bp, synthetic construct
  source 1..20: mol_type = other DNA
atcttccacaaaaccggtcc

SEQ ID NO: 10331 - DNA, 20 bp, synthetic construct
  source 1..20: mol_type = other DNA
catcttccacaaaaccggtc

SEQ ID NO: 10332 - DNA, 20 bp, synthetic construct
  source 1..20: mol_type = other DNA
ccatcttccacaaaaccggt

SEQ ID NO: 10333 - DNA, 20 bp, synthetic construct
  source 1..20: mol_type = other DNA
accatcttccacaaaaccgg

SEQ ID NO: 10334 - DNA, 20 bp, synthetic construct
  source 1..20: mol_type = other DNA
aaccatcttccacaaaaccg

SEQ ID NO: 10335 - DNA, 20 bp, synthetic construct
  source 1..20: mol_type = other DNA
aaaccatcttccacaaaacc

SEQ ID NO: 10336 - DNA, 20 bp, synthetic construct
  source 1..20: mol_type = other DNA
aaaaccatcttccacaaaac

SEQ ID NO: 10337 - DNA, 20 bp, synthetic construct
  source 1..20: mol_type = other DNA
aaaaaccatcttccacaaaa

SEQ ID NO: 10338 - DNA, 20 bp, synthetic construct
  source 1..20: mol_type = other DNA
gaaaaaccatcttccacaaa

SEQ ID NO: 10339 - DNA, 20 bp, synthetic construct
  source 1..20: mol_type = other DNA
ggaaaaaccatcttccacaa

SEQ ID NO: 10340 - DNA, 20 bp, synthetic construct
  source 1..20: mol_type = other DNA
tggaaaaaccatcttccaca

SEQ ID NO: 10341 - DNA, 20 bp, synthetic construct
  source 1..20: mol_type = other DNA
atggaaaaaccatcttccac

SEQ ID NO: 10342 - DNA, 20 bp, synthetic construct
  source 1..20: mol_type = other DNA
tatggaaaaaccatcttcca

SEQ ID NO: 10343 - DNA, 20 bp, synthetic construct
  source 1..20: mol_type = other DNA
ctatggaaaaaccatcttcc

SEQ ID NO: 10344 - DNA, 20 bp, synthetic construct
  source 1..20: mol_type = other DNA
cctatggaaaaaccatcttc

SEQ ID NO: 10345 - DNA, 20 bp, synthetic construct
  source 1..20: mol_type = other DNA
ccctatggaaaaaccatctt

SEQ ID NO: 10346 - DNA, 20 bp, synthetic construct
  source 1..20: mol_type = other DNA
cccctatggaaaaaccatct

SEQ ID NO: 10347 - DNA, 20 bp, synthetic construct
  source 1..20: mol_type = other DNA
gcccctatggaaaaaccatc

SEQ ID NO: 10348 - DNA, 20 bp, synthetic construct
  source 1..20: mol_type = other DNA
tgcccctatggaaaaaccat

SEQ ID NO: 10349 - DNA, 20 bp, synthetic construct
  source 1..20: mol_type = other DNA
ctgcccctatggaaaaacca

SEQ ID NO: 10350 - DNA, 20 bp, synthetic construct
  source 1..20: mol_type = other DNA
cctgcccctatggaaaaacc

SEQ ID NO: 10351 - DNA, 20 bp, synthetic construct
  source 1..20: mol_type = other DNA
ccctgcccctatggaaaaac

SEQ ID NO: 10352 - DNA, 20 bp, synthetic construct
  source 1..20: mol_type = other DNA
cccctgcccctatggaaaaa

SEQ ID NO: 10353 - DNA, 20 bp, synthetic construct
  source 1..20: mol_type = other DNA
tcccctgcccctatggaaaa

SEQ ID NO: 10354 - DNA, 20 bp, synthetic construct
  source 1..20: mol_type = other DNA
atcccctgcccctatggaaa

SEQ ID NO: 10355 - DNA, 20 bp, synthetic construct
  source 1..20: mol_type = other DNA
catcccctgcccctatggaa

SEQ ID NO: 10356 - DNA, 20 bp, synthetic construct
  source 1..20: mol_type = other DNA
tcatcccctgcccctatgga

SEQ ID NO: 10357 - DNA, 20 bp, synthetic construct
  source 1..20: mol_type = other DNA
atcatcccctgcccctatgg

SEQ ID NO: 10358 - DNA, 20 bp, synthetic construct
  source 1..20: mol_type = other DNA
aatcatcccctgcccctatg

SEQ ID NO: 10359 - DNA, 20 bp, synthetic construct
  source 1..20: mol_type = other DNA
aaatcatcccctgcccctat

SEQ ID NO: 10360 - DNA, 20 bp, synthetic construct
  source 1..20: mol_type = other DNA
aaaatcatcccctgccccta

SEQ ID NO: 10361 - DNA, 20 bp, synthetic construct
  source 1..20: mol_type = other DNA
caaaatcatcccctgcccct

SEQ ID NO: 10362 - DNA, 20 bp, synthetic construct
  source 1..20: mol_type = other DNA
tcaaaatcatcccctgcccc

SEQ ID NO: 10363 - DNA, 20 bp, synthetic construct
  source 1..20: mol_type = other DNA
ctcaaaatcatcccctgccc

SEQ ID NO: 10364 - DNA, 20 bp, synthetic construct
  source 1..20: mol_type = other DNA
tctcaaaatcatcccctgcc

SEQ ID NO: 10365 - DNA, 20 bp, synthetic construct
  source 1..20: mol_type = other DNA
atctcaaaatcatcccctgc

SEQ ID NO: 10366 - DNA, 20 bp, synthetic construct
  source 1..20: mol_type = other DNA
catctcaaaatcatcccctg

SEQ ID NO: 10367 - DNA, 20 bp, synthetic construct
  source 1..20: mol_type = other DNA
tcatctcaaaatcatcccct

SEQ ID NO: 10368 - DNA, 20 bp, synthetic construct
  source 1..20: mol_type = other DNA
ttcatctcaaaatcatcccc

SEQ ID NO: 10369 - DNA, 20 bp, synthetic construct
  source 1..20: mol_type = other DNA
tttcatctcaaaatcatccc

SEQ ID NO: 10370 - DNA, 20 bp, synthetic construct
  source 1..20: mol_type = other DNA
gtttcatctcaaaatcatcc

SEQ ID NO: 10371 - DNA, 20 bp, synthetic construct
  source 1..20: mol_type = other DNA
agtttcatctcaaaatcatc

SEQ ID NO: 10372 - DNA, 20 bp, synthetic construct
  source 1..20: mol_type = other DNA
cagtttcatctcaaaatcat

SEQ ID NO: 10373 - DNA, 20 bp, synthetic construct
  source 1..20: mol_type = other DNA
acagtttcatctcaaaatca

SEQ ID NO: 10374 - DNA, 20 bp, synthetic construct
  source 1..20: mol_type = other DNA
aacagtttcatctcaaaatc

SEQ ID NO: 10375 - DNA, 20 bp, synthetic construct
  source 1..20: mol_type = other DNA
gaacagtttcatctcaaaat

SEQ ID NO: 10376 - DNA, 20 bp, synthetic construct
  source 1..20: mol_type = other DNA
ggaacagtttcatctcaaaa

SEQ ID NO: 10377 - DNA, 20 bp, synthetic construct
  source 1..20: mol_type = other DNA
tggaacagtttcatctcaaa

SEQ ID NO: 10378 - DNA, 20 bp, synthetic construct
  source 1..20: mol_type = other DNA
gtggaacagtttcatctcaa

SEQ ID NO: 10379 - DNA, 20 bp, synthetic construct
  source 1..20: mol_type = other DNA
ggtggaacagtttcatctca

SEQ ID NO: 10380 - DNA, 20 bp, synthetic construct
  source 1..20: mol_type = other DNA
cggtggaacagtttcatctc

SEQ ID NO: 10381 - DNA, 20 bp, synthetic construct
  source 1..20: mol_type = other DNA
ccggtggaacagtttcatct

SEQ ID NO: 10382 - DNA, 20 bp, synthetic construct
  source 1..20: mol_type = other DNA
gccggtggaacagtttcatc

SEQ ID NO: 10383 - DNA, 20 bp, synthetic construct
  source 1..20: mol_type = other DNA
ggccggtggaacagtttcat

SEQ ID NO: 10384 - DNA, 20 bp, synthetic construct
  source 1..20: mol_type = other DNA
cggccggtggaacagtttca

SEQ ID NO: 10385 - DNA, 20 bp, synthetic construct
  source 1..20: mol_type = other DNA
ccggccggtggaacagtttc

SEQ ID NO: 10386 - DNA, 20 bp, synthetic construct
  source 1..20: mol_type = other DNA
cccggccggtggaacagttt

SEQ ID NO: 10387 - DNA, 20 bp, synthetic construct
  source 1..20: mol_type = other DNA
gcccggccggtggaacagtt

SEQ ID NO: 10388 - DNA, 20 bp, synthetic construct
  source 1..20: mol_type = other DNA
tgcccggccggtggaacagt

SEQ ID NO: 10389 - DNA, 20 bp, synthetic construct
  source 1..20: mol_type = other DNA
gtgcccggccggtggaacag

SEQ ID NO: 10390 - DNA, 20 bp, synthetic construct
  source 1..20: mol_type = other DNA
cgtgcccggccggtggaaca

SEQ ID NO: 10391 - DNA, 20 bp, synthetic construct
  source 1..20: mol_type = other DNA
ccgtgcccggccggtggaac

SEQ ID NO: 10392 - DNA, 20 bp, synthetic construct
  source 1..20: mol_type = other DNA
accgtgcccggccggtggaa

SEQ ID NO: 10393 - DNA, 20 bp, synthetic construct
  source 1..20: mol_type = other DNA
caccgtgcccggccggtgga

SEQ ID NO: 10394 - DNA, 20 bp, synthetic construct
  source 1..20: mol_type = other DNA
ccaccgtgcccggccggtgg

SEQ ID NO: 10395 - DNA, 20 bp, synthetic construct
  source 1..20: mol_type = other DNA
gccaccgtgcccggccggtg

SEQ ID NO: 10396 - DNA, 20 bp, synthetic construct
  source 1..20: mol_type = other DNA
agccaccgtgcccggccggt

SEQ ID NO: 10397 - DNA, 20 bp, synthetic construct
  source 1..20: mol_type = other DNA
gagccaccgtgcccggccgg

SEQ ID NO: 10398 - DNA, 20 bp, synthetic construct
  source 1..20: mol_type = other DNA
tgagccaccgtgcccggccg

SEQ ID NO: 10399 - DNA, 20 bp, synthetic construct
  source 1..20: mol_type = other DNA
gtgagccaccgtgcccggcc

SEQ ID NO: 10400 - DNA, 20 bp, synthetic construct
  source 1..20: mol_type = other DNA
cgtgagccaccgtgcccggc

SEQ ID NO: 10401 - DNA, 20 bp, synthetic construct
  source 1..20: mol_type = other DNA
gcgtgagccaccgtgcccgg

SEQ ID NO: 10402 - DNA, 20 bp, synthetic construct
  source 1..20: mol_type = other DNA
ggcgtgagccaccgtgcccg

SEQ ID NO: 10403 - DNA, 20 bp, synthetic construct
  source 1..20: mol_type = other DNA
aggcgtgagccaccgtgccc

SEQ ID NO: 10404 - DNA, 20 bp, synthetic construct
  source 1..20: mol_type = other DNA
caggcgtgagccaccgtgcc

SEQ ID NO: 10405 - DNA, 20 bp, synthetic construct
  source 1..20: mol_type = other DNA
acaggcgtgagccaccgtgc

SEQ ID NO: 10406 - DNA, 20 bp, synthetic construct
  source 1..20: mol_type = other DNA
tacaggcgtgagccaccgtg

SEQ ID NO: 10407 - DNA, 20 bp, synthetic construct
  source 1..20: mol_type = other DNA
ttacaggcgtgagccaccgt

SEQ ID NO: 10408 - DNA, 20 bp, synthetic construct
  source 1..20: mol_type = other DNA
attacaggcgtgagccaccg

SEQ ID NO: 10409 - DNA, 20 bp, synthetic construct
  source 1..20: mol_type = other DNA
gattacaggcgtgagccacc

SEQ ID NO: 10410 - DNA, 20 bp, synthetic construct
  source 1..20: mol_type = other DNA
ggattacaggcgtgagccac

SEQ ID NO: 10411 - DNA, 20 bp, synthetic construct
  source 1..20: mol_type = other DNA
gggattacaggcgtgagcca

SEQ ID NO: 10412 - DNA, 20 bp, synthetic construct
  source 1..20: mol_type = other DNA
tgggattacaggcgtgagcc

SEQ ID NO: 10413 - DNA, 20 bp, synthetic construct
  source 1..20: mol_type = other DNA
ctgggattacaggcgtgagc

SEQ ID NO: 10414 - DNA, 20 bp, synthetic construct
  source 1..20: mol_type = other DNA
gctgggattacaggcgtgag

SEQ ID NO: 10415 - DNA, 20 bp, synthetic construct
  source 1..20: mol_type = other DNA
tgctgggattacaggcgtga

SEQ ID NO: 10416 - DNA, 20 bp, synthetic construct
  source 1..20: mol_type = other DNA
gtgctgggattacaggcgtg

SEQ ID NO: 10417 - DNA, 20 bp, synthetic construct
  source 1..20: mol_type = other DNA
agtgctgggattacaggcgt

SEQ ID NO: 10418 - DNA, 20 bp, synthetic construct
  source 1..20: mol_type = other DNA
aagtgctgggattacaggcg

SEQ ID NO: 10419 - DNA, 20 bp, synthetic construct
  source 1..20: mol_type = other DNA
aaagtgctgggattacaggc

SEQ ID NO: 10420 - DNA, 20 bp, synthetic construct
  source 1..20: mol_type = other DNA
caaagtgctgggattacagg

SEQ ID NO: 10421 - DNA, 20 bp, synthetic construct
  source 1..20: mol_type = other DNA
ccaaagtgctgggattacag

SEQ ID NO: 10422 - DNA, 20 bp, synthetic construct
  source 1..20: mol_type = other DNA
cccaaagtgctgggattaca

SEQ ID NO: 10423 - DNA, 20 bp, synthetic construct
  source 1..20: mol_type = other DNA
tcccaaagtgctgggattac

SEQ ID NO: 10424 - DNA, 20 bp, synthetic construct
  source 1..20: mol_type = other DNA
ctcccaaagtgctgggatta

SEQ ID NO: 10425 - DNA, 20 bp, synthetic construct
  source 1..20: mol_type = other DNA
cctcccaaagtgctgggatt

SEQ ID NO: 10426 - DNA, 20 bp, synthetic construct
  source 1..20: mol_type = other DNA
gcctcccaaagtgctgggat

SEQ ID NO: 10427 - DNA, 20 bp, synthetic construct
  source 1..20: mol_type = other DNA
ggcctcccaaagtgctggga

SEQ ID NO: 10428 - DNA, 20 bp, synthetic construct
  source 1..20: mol_type = other DNA
cggcctcccaaagtgctggg

SEQ ID NO: 10429 - DNA, 20 bp, synthetic construct
  source 1..20: mol_type = other DNA
tcggcctcccaaagtgctgg

SEQ ID NO: 10430 - DNA, 20 bp, synthetic construct
  source 1..20: mol_type = other DNA
ctcggcctcccaaagtgctg

SEQ ID NO: 10431 - DNA, 20 bp, synthetic construct
  source 1..20: mol_type = other DNA
cctcggcctcccaaagtgct

SEQ ID NO: 10432 - DNA, 20 bp, synthetic construct
  source 1..20: mol_type = other DNA
gcctcggcctcccaaagtgc

SEQ ID NO: 10433 - DNA, 20 bp, synthetic construct
  source 1..20: mol_type = other DNA
cgcctcggcctcccaaagtg

SEQ ID NO: 10434 - DNA, 20 bp, synthetic construct
  source 1..20: mol_type = other DNA
ccgcctcggcctcccaaagt

SEQ ID NO: 10435 - DNA, 20 bp, synthetic construct
  source 1..20: mol_type = other DNA
cccgcctcggcctcccaaag

SEQ ID NO: 10436 - DNA, 20 bp, synthetic construct
  source 1..20: mol_type = other DNA
gcccgcctcggcctcccaaa

SEQ ID NO: 10437 - DNA, 20 bp, synthetic construct
  source 1..20: mol_type = other DNA
tgcccgcctcggcctcccaa

SEQ ID NO: 10438 - DNA, 20 bp, synthetic construct
  source 1..20: mol_type = other DNA
ctgcccgcctcggcctccca

SEQ ID NO: 10439 - DNA, 20 bp, synthetic construct
  source 1..20: mol_type = other DNA
tctgcccgcctcggcctccc

SEQ ID NO: 10440 - DNA, 20 bp, synthetic construct
  source 1..20: mol_type = other DNA
atctgcccgcctcggcctcc

SEQ ID NO: 10441 - DNA, 20 bp, synthetic construct
  source 1..20: mol_type = other DNA
gatctgcccgcctcggcctc

SEQ ID NO: 10442 - DNA, 20 bp, synthetic construct
  source 1..20: mol_type = other DNA
tgatctgcccgcctcggcct

SEQ ID NO: 10443 - DNA, 20 bp, synthetic construct
  source 1..20: mol_type = other DNA
gtgatctgcccgcctcggcc

SEQ ID NO: 10444 - DNA, 20 bp, synthetic construct
  source 1..20: mol_type = other DNA
cgtgatctgcccgcctcggc

SEQ ID NO: 10445 - DNA, 20 bp, synthetic construct
  source 1..20: mol_type = other DNA
tcgtgatctgcccgcctcgg

SEQ ID NO: 10446 - DNA, 20 bp, synthetic construct
  source 1..20: mol_type = other DNA
ctcgtgatctgcccgcctcg

SEQ ID NO: 10447 - DNA, 20 bp, synthetic construct
  source 1..20: mol_type = other DNA
cctcgtgatctgcccgcctc

SEQ ID NO: 10448 - DNA, 20 bp, synthetic construct
  source 1..20: mol_type = other DNA
acctcgtgatctgcccgcct

SEQ ID NO: 10449 - DNA, 20 bp, synthetic construct
  source 1..20: mol_type = other DNA
gacctcgtgatctgcccgcc

SEQ ID NO: 10450 - DNA, 20 bp, synthetic construct
  source 1..20: mol_type = other DNA
tgacctcgtgatctgcccgc

SEQ ID NO: 10451 - DNA, 20 bp, synthetic construct
  source 1..20: mol_type = other DNA
ctgacctcgtgatctgcccg

SEQ ID NO: 10452 - DNA, 20 bp, synthetic construct
  source 1..20: mol_type = other DNA
cctgacctcgtgatctgccc

SEQ ID NO: 10453 - DNA, 20 bp, synthetic construct
  source 1..20: mol_type = other DNA
tcctgacctcgtgatctgcc

SEQ ID NO: 10454 - DNA, 20 bp, synthetic construct
  source 1..20: mol_type = other DNA
ctcctgacctcgtgatctgc

SEQ ID NO: 10455 - DNA, 20 bp, synthetic construct
  source 1..20: mol_type = other DNA
tctcctgacctcgtgatctg

SEQ ID NO: 10456 - DNA, 20 bp, synthetic construct
  source 1..20: mol_type = other DNA
atctcctgacctcgtgatct

SEQ ID NO: 10457 - DNA, 20 bp, synthetic construct
  source 1..20: mol_type = other DNA
gatctcctgacctcgtgatc

SEQ ID NO: 10458 - DNA, 20 bp, synthetic construct
  source 1..20: mol_type = other DNA
cgatctcctgacctcgtgat

SEQ ID NO: 10459 - DNA, 20 bp, synthetic construct
  source 1..20: mol_type = other DNA
tcgatctcctgacctcgtga

SEQ ID NO: 10460 - DNA, 20 bp, synthetic construct
  source 1..20: mol_type = other DNA
ctcgatctcctgacctcgtg

SEQ ID NO: 10461 - DNA, 20 bp, synthetic construct
  source 1..20: mol_type = other DNA
tctcgatctcctgacctcgt

SEQ ID NO: 10462 - DNA, 20 bp, synthetic construct
  source 1..20: mol_type = other DNA
gtctcgatctcctgacctcg

SEQ ID NO: 10463 - DNA, 20 bp, synthetic construct
  source 1..20: mol_type = other DNA
ggtctcgatctcctgacctc

SEQ ID NO: 10464 - DNA, 20 bp, synthetic construct
  source 1..20: mol_type = other DNA
tggtctcgatctcctgacct

SEQ ID NO: 10465 - DNA, 20 bp, synthetic construct
  source 1..20: mol_type = other DNA
atggtctcgatctcctgacc

SEQ ID NO: 10466 - DNA, 20 bp, synthetic construct
  source 1..20: mol_type = other DNA
gatggtctcgatctcctgac

SEQ ID NO: 10467 - DNA, 20 bp, synthetic construct
  source 1..20: mol_type = other DNA
ggatggtctcgatctcctga

SEQ ID NO: 10468 - DNA, 20 bp, synthetic construct
  source 1..20: mol_type = other DNA
aggatggtctcgatctcctg

SEQ ID NO: 10469 - DNA, 20 bp, synthetic construct
  source 1..20: mol_type = other DNA
caggatggtctcgatctcct

SEQ ID NO: 10470 - DNA, 20 bp, synthetic construct
  source 1..20: mol_type = other DNA
ccaggatggtctcgatctcc

SEQ ID NO: 10471 - DNA, 20 bp, synthetic construct
  source 1..20: mol_type = other DNA
gccaggatggtctcgatctc

SEQ ID NO: 10472 - DNA, 20 bp, synthetic construct
  source 1..20: mol_type = other DNA
agccaggatggtctcgatct

SEQ ID NO: 10473 - DNA, 20 bp, synthetic construct
  source 1..20: mol_type = other DNA
tagccaggatggtctcgatc

SEQ ID NO: 10474 - DNA, 20 bp, synthetic construct
  source 1..20: mol_type = other DNA
ttagccaggatggtctcgat

SEQ ID NO: 10475 - DNA, 20 bp, synthetic construct
  source 1..20: mol_type = other DNA
gttagccaggatggtctcga

SEQ ID NO: 10476 - DNA, 20 bp, synthetic construct
  source 1..20: mol_type = other DNA
tgttagccaggatggtctcg

SEQ ID NO: 10477 - DNA, 20 bp, synthetic construct
  source 1..20: mol_type = other DNA
atgttagccaggatggtctc

SEQ ID NO: 10478 - DNA, 20 bp, synthetic construct
  source 1..20: mol_type = other DNA
catgttagccaggatggtct

SEQ ID NO: 10479 - DNA, 20 bp, synthetic construct
  source 1..20: mol_type = other DNA
ccatgttagccaggatggtc

SEQ ID NO: 10480 - DNA, 20 bp, synthetic construct
  source 1..20: mol_type = other DNA
accatgttagccaggatggt

SEQ ID NO: 10481 - DNA, 20 bp, synthetic construct
  source 1..20: mol_type = other DNA
caccatgttagccaggatgg

SEQ ID NO: 10482 - DNA, 20 bp, synthetic construct
  source 1..20: mol_type = other DNA
tcaccatgttagccaggatg

SEQ ID NO: 10483 - DNA, 20 bp, synthetic construct
  source 1..20: mol_type = other DNA
ttcaccatgttagccaggat

SEQ ID NO: 10484 - DNA, 20 bp, synthetic construct
  source 1..20: mol_type = other DNA
tttcaccatgttagccagga

SEQ ID NO: 10485 - DNA, 20 bp, synthetic construct
  source 1..20: mol_type = other DNA
gtttcaccatgttagccagg

SEQ ID NO: 10486 - DNA, 20 bp, synthetic construct
  source 1..20: mol_type = other DNA
ggtttcaccatgttagccag

SEQ ID NO: 10487 - DNA, 20 bp, synthetic construct
  source 1..20: mol_type = other DNA
gggtttcaccatgttagcca

SEQ ID NO: 10488 - DNA, 20 bp, synthetic construct
  source 1..20: mol_type = other DNA
ggggtttcaccatgttagcc

SEQ ID NO: 10489 - DNA, 20 bp, synthetic construct
  source 1..20: mol_type = other DNA
gggggtttcaccatgttagc

SEQ ID NO: 10490 - DNA, 20 bp, synthetic construct
  source 1..20: mol_type = other DNA
ggggggtttcaccatgttag

SEQ ID NO: 10491 - DNA, 20 bp, synthetic construct
  source 1..20: mol_type = other DNA
aggggggtttcaccatgtta

SEQ ID NO: 10492 - DNA, 20 bp, synthetic construct
  source 1..20: mol_type = other DNA
gaggggggtttcaccatgtt

SEQ ID NO: 10493 - DNA, 20 bp, synthetic construct
  source 1..20: mol_type = other DNA
agaggggggtttcaccatgt

SEQ ID NO: 10494 - DNA, 20 bp, synthetic construct
  source 1..20: mol_type = other DNA
tagaggggggtttcaccatg

SEQ ID NO: 10495 - DNA, 20 bp, synthetic construct
  source 1..20: mol_type = other DNA
gtagaggggggtttcaccat

SEQ ID NO: 10496 - DNA, 20 bp, synthetic construct
  source 1..20: mol_type = other DNA
agtagaggggggtttcacca

SEQ ID NO: 10497 - DNA, 20 bp, synthetic construct
  source 1..20: mol_type = other DNA
tagtagaggggggtttcacc

SEQ ID NO: 10498 - DNA, 20 bp, synthetic construct
  source 1..20: mol_type = other DNA
ttagtagaggggggtttcac

SEQ ID NO: 10499 - DNA, 20 bp, synthetic construct
  source 1..20: mol_type = other DNA
tttagtagaggggggtttca

SEQ ID NO: 10500 - DNA, 20 bp, synthetic construct
  source 1..20: mol_type = other DNA
ttttagtagaggggggtttc

SEQ ID NO: 10501 - DNA, 20 bp, synthetic construct
  source 1..20: mol_type = other DNA
tttttagtagaggggggttt

SEQ ID NO: 10502 - DNA, 20 bp, synthetic construct
  source 1..20: mol_type = other DNA
atttttagtagaggggggtt

SEQ ID NO: 10503 - DNA, 20 bp, synthetic construct
  source 1..20: mol_type = other DNA
tatttttagtagaggggggt

SEQ ID NO: 10504 - DNA, 20 bp, synthetic construct
  source 1..20: mol_type = other DNA
gtatttttagtagagggggg

SEQ ID NO: 10505 - DNA, 20 bp, synthetic construct
  source 1..20: mol_type = other DNA
tgtatttttagtagaggggg

SEQ ID NO: 10506 - DNA, 20 bp, synthetic construct
  source 1..20: mol_type = other DNA
ttgtatttttagtagagggg

SEQ ID NO: 10507 - DNA, 20 bp, synthetic construct
  source 1..20: mol_type = other DNA
tttgtatttttagtagaggg

SEQ ID NO: 10508 - DNA, 20 bp, synthetic construct
  source 1..20: mol_type = other DNA
ttttgtatttttagtagagg

SEQ ID NO: 10509 - DNA, 20 bp, synthetic construct
  source 1..20: mol_type = other DNA
tttttgtatttttagtagag

SEQ ID NO: 10510 - DNA, 20 bp, synthetic construct
  source 1..20: mol_type = other DNA
ttttttgtatttttagtaga

SEQ ID NO: 10511 - DNA, 20 bp, synthetic construct
  source 1..20: mol_type = other DNA
tttttttgtatttttagtag

SEQ ID NO: 10512 - DNA, 20 bp, synthetic construct
  source 1..20: mol_type = other DNA
atttttttgtatttttagta

SEQ ID NO: 10513 - DNA, 20 bp, synthetic construct
  source 1..20: mol_type = other DNA
aatttttttgtatttttagt

SEQ ID NO: 10514 - DNA, 20 bp, synthetic construct
  source 1..20: mol_type = other DNA
taatttttttgtatttttag

SEQ ID NO: 10515 - DNA, 20 bp, synthetic construct
  source 1..20: mol_type = other DNA
ctaatttttttgtattttta

SEQ ID NO: 10516 - DNA, 20 bp, synthetic construct
  source 1..20: mol_type = other DNA
gctaatttttttgtattttt

SEQ ID NO: 10517 - DNA, 20 bp, synthetic construct
  source 1..20: mol_type = other DNA
agctaatttttttgtatttt

SEQ ID NO: 10518 - DNA, 20 bp, synthetic construct
  source 1..20: mol_type = other DNA
cagctaatttttttgtattt

SEQ ID NO: 10519 - DNA, 20 bp, synthetic construct
  source 1..20: mol_type = other DNA
ccagctaatttttttgtatt

SEQ ID NO: 10520 - DNA, 20 bp, synthetic construct
  source 1..20: mol_type = other DNA
cccagctaatttttttgtat

SEQ ID NO: 10521 - DNA, 20 bp, synthetic construct
  source 1..20: mol_type = other DNA
gcccagctaatttttttgta

SEQ ID NO: 10522 - DNA, 20 bp, synthetic construct
  source 1..20: mol_type = other DNA
cgcccagctaatttttttgt

SEQ ID NO: 10523 - DNA, 20 bp, synthetic construct
  source 1..20: mol_type = other DNA
gcgcccagctaatttttttg

SEQ ID NO: 10524 - DNA, 20 bp, synthetic construct
  source 1..20: mol_type = other DNA
cgcgcccagctaattttttt

SEQ ID NO: 10525 - DNA, 20 bp, synthetic construct
  source 1..20: mol_type = other DNA
ccgcgcccagctaatttttt

SEQ ID NO: 10526 - DNA, 20 bp, synthetic construct
  source 1..20: mol_type = other DNA
accgcgcccagctaattttt

SEQ ID NO: 10527 - DNA, 20 bp, synthetic construct
  source 1..20: mol_type = other DNA
caccgcgcccagctaatttt

SEQ ID NO: 10528 - DNA, 20 bp, synthetic construct
  source 1..20: mol_type = other DNA
ccaccgcgcccagctaattt

SEQ ID NO: 10529 - DNA, 20 bp, synthetic construct
  source 1..20: mol_type = other DNA
tccaccgcgcccagctaatt

SEQ ID NO: 10530 - DNA, 20 bp, synthetic construct
  source 1..20: mol_type = other DNA
ctccaccgcgcccagctaat

SEQ ID NO: 10531 - DNA, 20 bp, synthetic construct
  source 1..20: mol_type = other DNA
cctccaccgcgcccagctaa

SEQ ID NO: 10532 - DNA, 20 bp, synthetic construct
  source 1..20: mol_type = other DNA
ccctccaccgcgcccagcta

SEQ ID NO: 10533 - DNA, 20 bp, synthetic construct
  source 1..20: mol_type = other DNA
gccctccaccgcgcccagct

SEQ ID NO: 10534 - DNA, 20 bp, synthetic construct
  source 1..20: mol_type = other DNA
cgccctccaccgcgcccagc

SEQ ID NO: 10535 - DNA, 20 bp, synthetic construct
  source 1..20: mol_type = other DNA
gcgccctccaccgcgcccag

SEQ ID NO: 10536 - DNA, 20 bp, synthetic construct
  source 1..20: mol_type = other DNA
ggcgccctccaccgcgccca

SEQ ID NO: 10537 - DNA, 20 bp, synthetic construct
  source 1..20: mol_type = other DNA
aggcgccctccaccgcgccc

SEQ ID NO: 10538 - DNA, 20 bp, synthetic construct
  source 1..20: mol_type = other DNA
caggcgccctccaccgcgcc

SEQ ID NO: 10539 - DNA, 20 bp, synthetic construct
  source 1..20: mol_type = other DNA
acaggcgccctccaccgcgc

SEQ ID NO: 10540 - DNA, 20 bp, synthetic construct
  source 1..20: mol_type = other DNA
tacaggcgccctccaccgcg

SEQ ID NO: 10541 - DNA, 20 bp, synthetic construct
  source 1..20: mol_type = other DNA
ctacaggcgccctccaccgc

SEQ ID NO: 10542 - DNA, 20 bp, synthetic construct
  source 1..20: mol_type = other DNA
actacaggcgccctccaccg

SEQ ID NO: 10543 - DNA, 20 bp, synthetic construct
  source 1..20: mol_type = other DNA
gactacaggcgccctccacc

SEQ ID NO: 10544 - DNA, 20 bp, synthetic construct
  source 1..20: mol_type = other DNA
tgactacaggcgccctccac

SEQ ID NO: 10545 - DNA, 20 bp, synthetic construct
  source 1..20: mol_type = other DNA
gtgactacaggcgccctcca

SEQ ID NO: 10546 - DNA, 20 bp, synthetic construct
  source 1..20: mol_type = other DNA
tgtgactacaggcgccctcc

SEQ ID NO: 10547 - DNA, 20 bp, synthetic construct
  source 1..20: mol_type = other DNA
ctgtgactacaggcgccctc

SEQ ID NO: 10548 - DNA, 20 bp, synthetic construct
  source 1..20: mol_type = other DNA
gctgtgactacaggcgccct

SEQ ID NO: 10549 - DNA, 20 bp, synthetic construct
  source 1..20: mol_type = other DNA
agctgtgactacaggcgccc

SEQ ID NO: 10550 - DNA, 20 bp, synthetic construct
  source 1..20: mol_type = other DNA
tagctgtgactacaggcgcc

SEQ ID NO: 10551 - DNA, 20 bp, synthetic construct
  source 1..20: mol_type = other DNA
gtagctgtgactacaggcgc

SEQ ID NO: 10552 - DNA, 20 bp, synthetic construct
  source 1..20: mol_type = other DNA
agtagctgtgactacaggcg

SEQ ID NO: 10553 - DNA, 20 bp, synthetic construct
  source 1..20: mol_type = other DNA
gagtagctgtgactacaggc

SEQ ID NO: 10554 - DNA, 20 bp, synthetic construct
  source 1..20: mol_type = other DNA
ggagtagctgtgactacagg

SEQ ID NO: 10555 - DNA, 20 bp, synthetic construct
  source 1..20: mol_type = other DNA
cggagtagctgtgactacag

SEQ ID NO: 10556 - DNA, 20 bp, synthetic construct
  source 1..20: mol_type = other DNA
ccggagtagctgtgactaca

SEQ ID NO: 10557 - DNA, 20 bp, synthetic construct
  source 1..20: mol_type = other DNA
tccggagtagctgtgactac

SEQ ID NO: 10558 - DNA, 20 bp, synthetic construct
  source 1..20: mol_type = other DNA
ctccggagtagctgtgacta

SEQ ID NO: 10559 - DNA, 20 bp, synthetic construct
  source 1..20: mol_type = other DNA
cctccggagtagctgtgact

SEQ ID NO: 10560 - DNA, 20 bp, synthetic construct
  source 1..20: mol_type = other DNA
gcctccggagtagctgtgac

SEQ ID NO: 10561 - DNA, 20 bp, synthetic construct
  source 1..20: mol_type = other DNA
ggcctccggagtagctgtga

SEQ ID NO: 10562 - DNA, 20 bp, synthetic construct
  source 1..20: mol_type = other DNA
cggcctccggagtagctgtg

SEQ ID NO: 10563 - DNA, 20 bp, synthetic construct
  source 1..20: mol_type = other DNA
tcggcctccggagtagctgt

SEQ ID NO: 10564 - DNA, 20 bp, synthetic construct
  source 1..20: mol_type = other DNA
ctcggcctccggagtagctg

SEQ ID NO: 10565 - DNA, 20 bp, synthetic construct
  source 1..20: mol_type = other DNA
cctcggcctccggagtagct

SEQ ID NO: 10566 - DNA, 20 bp, synthetic construct
  source 1..20: mol_type = other DNA
gcctcggcctccggagtagc

SEQ ID NO: 10567 - DNA, 20 bp, synthetic construct
  source 1..20: mol_type = other DNA
tgcctcggcctccggagtag

SEQ ID NO: 10568 - DNA, 20 bp, synthetic construct
  source 1..20: mol_type = other DNA
ttgcctcggcctccggagta

SEQ ID NO: 10569 - DNA, 20 bp, synthetic construct
  source 1..20: mol_type = other DNA
cttgcctcggcctccggagt

SEQ ID NO: 10570 - DNA, 20 bp, synthetic construct
  source 1..20: mol_type = other DNA
tcttgcctcggcctccggag

SEQ ID NO: 10571 - DNA, 20 bp, synthetic construct
  source 1..20: mol_type = other DNA
ctcttgcctcggcctccgga

SEQ ID NO: 10572 - DNA, 20 bp, synthetic construct
  source 1..20: mol_type = other DNA
tctcttgcctcggcctccgg

SEQ ID NO: 10573 - DNA, 20 bp, synthetic construct
  source 1..20: mol_type = other DNA
ttctcttgcctcggcctccg

SEQ ID NO: 10574 - DNA, 20 bp, synthetic construct
  source 1..20: mol_type = other DNA
attctcttgcctcggcctcc

SEQ ID NO: 10575 - DNA, 20 bp, synthetic construct
  source 1..20: mol_type = other DNA
cattctcttgcctcggcctc

SEQ ID NO: 10576 - DNA, 20 bp, synthetic construct
  source 1..20: mol_type = other DNA
ccattctcttgcctcggcct

SEQ ID NO: 10577 - DNA, 20 bp, synthetic construct
  source 1..20: mol_type = other DNA
gccattctcttgcctcggcc

SEQ ID NO: 10578 - DNA, 20 bp, synthetic construct
  source 1..20: mol_type = other DNA
tgccattctcttgcctcggc

SEQ ID NO: 10579 - DNA, 20 bp, synthetic construct
  source 1..20: mol_type = other DNA
atgccattctcttgcctcgg

SEQ ID NO: 10580 - DNA, 20 bp, synthetic construct
  source 1..20: mol_type = other DNA
catgccattctcttgcctcg

SEQ ID NO: 10581 - DNA, 20 bp, synthetic construct
  source 1..20: mol_type = other DNA
tcatgccattctcttgcctc

SEQ ID NO: 10582 - DNA, 20 bp, synthetic construct
  source 1..20: mol_type = other DNA
ttcatgccattctcttgcct

SEQ ID NO: 10583 - DNA, 20 bp, synthetic construct
  source 1..20: mol_type = other DNA
tttcatgccattctcttgcc

SEQ ID NO: 10584 - DNA, 20 bp, synthetic construct
  source 1..20: mol_type = other DNA
gtttcatgccattctcttgc

SEQ ID NO: 10585 - DNA, 20 bp, synthetic construct
  source 1..20: mol_type = other DNA
ggtttcatgccattctcttg

SEQ ID NO: 10586 - DNA, 20 bp, synthetic construct
  source 1..20: mol_type = other DNA
gggtttcatgccattctctt

SEQ ID NO: 10587 - DNA, 20 bp, synthetic construct
  source 1..20: mol_type = other DNA
cgggtttcatgccattctct

SEQ ID NO: 10588 - DNA, 20 bp, synthetic construct
  source 1..20: mol_type = other DNA
ccgggtttcatgccattctc

SEQ ID NO: 10589 - DNA, 20 bp, synthetic construct
  source 1..20: mol_type = other DNA
cccgggtttcatgccattct

SEQ ID NO: 10590 - DNA, 20 bp, synthetic construct
  source 1..20: mol_type = other DNA
tcccgggtttcatgccattc

SEQ ID NO: 10591 - DNA, 20 bp, synthetic construct
  source 1..20: mol_type = other DNA
ctcccgggtttcatgccatt

SEQ ID NO: 10592 - DNA, 20 bp, synthetic construct
  source 1..20: mol_type = other DNA
cctcccgggtttcatgccat

SEQ ID NO: 10593 - DNA, 20 bp, synthetic construct
  source 1..20: mol_type = other DNA
gcctcccgggtttcatgcca

SEQ ID NO: 10594 - DNA, 20 bp, synthetic construct
  source 1..20: mol_type = other DNA
tgcctcccgggtttcatgcc

SEQ ID NO: 10595 - DNA, 20 bp, synthetic construct
  source 1..20: mol_type = other DNA
ctgcctcccgggtttcatgc

SEQ ID NO: 10596 - DNA, 20 bp, synthetic construct
  source 1..20: mol_type = other DNA
tctgcctcccgggtttcatg

SEQ ID NO: 10597 - DNA, 20 bp, synthetic construct
  source 1..20: mol_type = other DNA
ctctgcctcccgggtttcat

SEQ ID NO: 10598 - DNA, 20 bp, synthetic construct
  source 1..20: mol_type = other DNA
gctctgcctcccgggtttca

SEQ ID NO: 10599 - DNA, 20 bp, synthetic construct
  source 1..20: mol_type = other DNA
agctctgcctcccgggtttc

SEQ ID NO: 10600 - DNA, 20 bp, synthetic construct
  source 1..20: mol_type = other DNA
aagctctgcctcccgggttt

SEQ ID NO: 10601 - DNA, 20 bp, synthetic construct
  source 1..20: mol_type = other DNA
caagctctgcctcccgggtt

SEQ ID NO: 10602 - DNA, 20 bp, synthetic construct
  source 1..20: mol_type = other DNA
gcaagctctgcctcccgggt

SEQ ID NO: 10603 - DNA, 20 bp, synthetic construct
  source 1..20: mol_type = other DNA
tgcaagctctgcctcccggg

SEQ ID NO: 10604 - DNA, 20 bp, synthetic construct
  source 1..20: mol_type = other DNA
ctgcaagctctgcctcccgg

SEQ ID NO: 10605 - DNA, 20 bp, synthetic construct
  source 1..20: mol_type = other DNA
actgcaagctctgcctcccg

SEQ ID NO: 10606 - DNA, 20 bp, synthetic construct
  source 1..20: mol_type = other DNA
cactgcaagctctgcctccc

SEQ ID NO: 10607 - DNA, 20 bp, synthetic construct
  source 1..20: mol_type = other DNA
tcactgcaagctctgcctcc

SEQ ID NO: 10608 - DNA, 20 bp, synthetic construct
  source 1..20: mol_type = other DNA
ctcactgcaagctctgcctc

SEQ ID NO: 10609 - DNA, 20 bp, synthetic construct
  source 1..20: mol_type = other DNA
gctcactgcaagctctgcct

SEQ ID NO: 10610 - DNA, 20 bp, synthetic construct
  source 1..20: mol_type = other DNA
agctcactgcaagctctgcc

SEQ ID NO: 10611 - DNA, 20 bp, synthetic construct
  source 1..20: mol_type = other DNA
cagctcactgcaagctctgc

SEQ ID NO: 10612 - DNA, 20 bp, synthetic construct
  source 1..20: mol_type = other DNA
tcagctcactgcaagctctg

SEQ ID NO: 10613 - DNA, 20 bp, synthetic construct
  source 1..20: mol_type = other DNA
ctcagctcactgcaagctct

SEQ ID NO: 10614 - DNA, 20 bp, synthetic construct
  source 1..20: mol_type = other DNA
tctcagctcactgcaagctc

SEQ ID NO: 10615 - DNA, 20 bp, synthetic construct
  source 1..20: mol_type = other DNA
atctcagctcactgcaagct

SEQ ID NO: 10616 - DNA, 20 bp, synthetic construct
  source 1..20: mol_type = other DNA
tatctcagctcactgcaagc

SEQ ID NO: 10617 - DNA, 20 bp, synthetic construct
  source 1..20: mol_type = other DNA
ctatctcagctcactgcaag

SEQ ID NO: 10618 - DNA, 20 bp, synthetic construct
  source 1..20: mol_type = other DNA
gctatctcagctcactgcaa

SEQ ID NO: 10619 - DNA, 20 bp, synthetic construct
  source 1..20: mol_type = other DNA
tgctatctcagctcactgca

SEQ ID NO: 10620 - DNA, 20 bp, synthetic construct
  source 1..20: mol_type = other DNA
gtgctatctcagctcactgc

SEQ ID NO: 10621 - DNA, 20 bp, synthetic construct
  source 1..20: mol_type = other DNA
ggtgctatctcagctcactg

SEQ ID NO: 10622 - DNA, 20 bp, synthetic construct
  source 1..20: mol_type = other DNA
tggtgctatctcagctcact

SEQ ID NO: 10623 - DNA, 20 bp, synthetic construct
  source 1..20: mol_type = other DNA
gtggtgctatctcagctcac

SEQ ID NO: 10624 - DNA, 20 bp, synthetic construct
  source 1..20: mol_type = other DNA
agtggtgctatctcagctca

SEQ ID NO: 10625 - DNA, 20 bp, synthetic construct
  source 1..20: mol_type = other DNA
cagtggtgctatctcagctc

SEQ ID NO: 10626 - DNA, 20 bp, synthetic construct
  source 1..20: mol_type = other DNA
acagtggtgctatctcagct

SEQ ID NO: 10627 - DNA, 20 bp, synthetic construct
  source 1..20: mol_type = other DNA
tacagtggtgctatctcagc

SEQ ID NO: 10628 - DNA, 20 bp, synthetic construct
  source 1..20: mol_type = other DNA
gtacagtggtgctatctcag

SEQ ID NO: 10629 - DNA, 20 bp, synthetic construct
  source 1..20: mol_type = other DNA
agtacagtggtgctatctca

SEQ ID NO: 10630 - DNA, 20 bp, synthetic construct
  source 1..20: mol_type = other DNA
aagtacagtggtgctatctc

SEQ ID NO: 10631 - DNA, 20 bp, synthetic construct
  source 1..20: mol_type = other DNA
gaagtacagtggtgctatct

SEQ ID NO: 10632 - DNA, 20 bp, synthetic construct
  source 1..20: mol_type = other DNA
tgaagtacagtggtgctatc

SEQ ID NO: 10633 - DNA, 20 bp, synthetic construct
  source 1..20: mol_type = other DNA
ctgaagtacagtggtgctat

SEQ ID NO: 10634 - DNA, 20 bp, synthetic construct
  source 1..20: mol_type = other DNA
gctgaagtacagtggtgcta

SEQ ID NO: 10635 - DNA, 20 bp, synthetic construct
  source 1..20: mol_type = other DNA
ggctgaagtacagtggtgct

SEQ ID NO: 10636 - DNA, 20 bp, synthetic construct
  source 1..20: mol_type = other DNA
aggctgaagtacagtggtgc

SEQ ID NO: 10637 - DNA, 20 bp, synthetic construct
  source 1..20: mol_type = other DNA
caggctgaagtacagtggtg

SEQ ID NO: 10638 - DNA, 20 bp, synthetic construct
  source 1..20: mol_type = other DNA
ccaggctgaagtacagtggt

SEQ ID NO: 10639 - DNA, 20 bp, synthetic construct
  source 1..20: mol_type = other DNA
cccaggctgaagtacagtgg

SEQ ID NO: 10640 - DNA, 20 bp, synthetic construct
  source 1..20: mol_type = other DNA
ccccaggctgaagtacagtg

SEQ ID NO: 10641 - DNA, 20 bp, synthetic construct
  source 1..20: mol_type = other DNA
cccccaggctgaagtacagt

SEQ ID NO: 10642 - DNA, 20 bp, synthetic construct
  source 1..20: mol_type = other DNA
tcccccaggctgaagtacag

SEQ ID NO: 10643 - DNA, 20 bp, synthetic construct
  source 1..20: mol_type = other DNA
gtcccccaggctgaagtaca

SEQ ID NO: 10644 - DNA, 20 bp, synthetic construct
  source 1..20: mol_type = other DNA
tgtcccccaggctgaagtac

SEQ ID NO: 10645 - DNA, 20 bp, synthetic construct
  source 1..20: mol_type = other DNA
ttgtcccccaggctgaagta

SEQ ID NO: 10646 - DNA, 20 bp, synthetic construct
  source 1..20: mol_type = other DNA
tttgtcccccaggctgaagt

SEQ ID NO: 10647 - DNA, 20 bp, synthetic construct
  source 1..20: mol_type = other DNA
ctttgtcccccaggctgaag

SEQ ID NO: 10648 - DNA, 20 bp, synthetic construct
  source 1..20: mol_type = other DNA
actttgtcccccaggctgaa

SEQ ID NO: 10649 - DNA, 20 bp, synthetic construct
  source 1..20: mol_type = other DNA
cactttgtcccccaggctga

SEQ ID NO: 10650 - DNA, 20 bp, synthetic construct
  source 1..20: mol_type = other DNA
tcactttgtcccccaggctg

SEQ ID NO: 10651 - DNA, 20 bp, synthetic construct
  source 1..20: mol_type = other DNA
ctcactttgtcccccaggct

SEQ ID NO: 10652 - DNA, 20 bp, synthetic construct
  source 1..20: mol_type = other DNA
tctcactttgtcccccaggc

SEQ ID NO: 10653 - DNA, 20 bp, synthetic construct
  source 1..20: mol_type = other DNA
gtctcactttgtcccccagg

SEQ ID NO: 10654 - DNA, 20 bp, synthetic construct
  source 1..20: mol_type = other DNA
agtctcactttgtcccccag

SEQ ID NO: 10655 - DNA, 20 bp, synthetic construct
  source 1..20: mol_type = other DNA
gagtctcactttgtccccca

SEQ ID NO: 10656 - DNA, 20 bp, synthetic construct
  source 1..20: mol_type = other DNA
ggagtctcactttgtccccc

SEQ ID NO: 10657 - DNA, 20 bp, synthetic construct
  source 1..20: mol_type = other DNA
cggagtctcactttgtcccc

SEQ ID NO: 10658 - DNA, 20 bp, synthetic construct
  source 1..20: mol_type = other DNA
acggagtctcactttgtccc

SEQ ID NO: 10659 - DNA, 20 bp, synthetic construct
  source 1..20: mol_type = other DNA
gacggagtctcactttgtcc

SEQ ID NO: 10660 - DNA, 20 bp, synthetic construct
  source 1..20: mol_type = other DNA
agacggagtctcactttgtc

SEQ ID NO: 10661 - DNA, 20 bp, synthetic construct
  source 1..20: mol_type = other DNA
tagacggagtctcactttgt

SEQ ID NO: 10662 - DNA, 20 bp, synthetic construct
  source 1..20: mol_type = other DNA
ttagacggagtctcactttg

SEQ ID NO: 10663 - DNA, 20 bp, synthetic construct
  source 1..20: mol_type = other DNA
tttagacggagtctcacttt

SEQ ID NO: 10664 - DNA, 20 bp, synthetic construct
  source 1..20: mol_type = other DNA
ttttagacggagtctcactt

SEQ ID NO: 10665 - DNA, 20 bp, synthetic construct
  source 1..20: mol_type = other DNA
tttttagacggagtctcact

SEQ ID NO: 10666 - DNA, 20 bp, synthetic construct
  source 1..20: mol_type = other DNA
ttttttagacggagtctcac

SEQ ID NO: 10667 - DNA, 20 bp, synthetic construct
  source 1..20: mol_type = other DNA
tttttttagacggagtctca

SEQ ID NO: 10668 - DNA, 20 bp, synthetic construct
  source 1..20: mol_type = other DNA
ttttttttagacggagtctc

SEQ ID NO: 10669 - DNA, 20 bp, synthetic construct
  source 1..20: mol_type = other DNA
tttttttttagacggagtct

SEQ ID NO: 10670 - DNA, 20 bp, synthetic construct
  source 1..20: mol_type = other DNA
ttttttttttagacggagtc

SEQ ID NO: 10671 - DNA, 20 bp, synthetic construct
  source 1..20: mol_type = other DNA
tttttttttttagacggagt

SEQ ID NO: 10672 - DNA, 20 bp, synthetic construct
  source 1..20: mol_type = other DNA
ttttttttttttagacggag

SEQ ID NO: 10673 - DNA, 20 bp, synthetic construct
  source 1..20: mol_type = other DNA
tttttttttttttagacgga

SEQ ID NO: 10674 - DNA, 20 bp, synthetic construct
  source 1..20: mol_type = other DNA
atttttttttttttagacgg

SEQ ID NO: 10675 - DNA, 20 bp, synthetic construct
  source 1..20: mol_type = other DNA
aatttttttttttttagacg

SEQ ID NO: 10676 - DNA, 20 bp, synthetic construct
  source 1..20: mol_type = other DNA
caatttttttttttttagac

SEQ ID NO: 10677 - DNA, 20 bp, synthetic construct
  source 1..20: mol_type = other DNA
acaatttttttttttttaga

SEQ ID NO: 10678 - DNA, 20 bp, synthetic construct
  source 1..20: mol_type = other DNA
aacaatttttttttttttag

SEQ ID NO: 10679 - DNA, 20 bp, synthetic construct
  source 1..20: mol_type = other DNA
gaacaattttttttttttta

SEQ ID NO: 10680 - DNA, 20 bp, synthetic construct
  source 1..20: mol_type = other DNA
ggaacaattttttttttttt

SEQ ID NO: 10681 - DNA, 20 bp, synthetic construct
  source 1..20: mol_type = other DNA
tggaacaatttttttttttt

SEQ ID NO: 10682 - DNA, 20 bp, synthetic construct
  source 1..20: mol_type = other DNA
gtggaacaattttttttttt

SEQ ID NO: 10683 - DNA, 20 bp, synthetic construct
  source 1..20: mol_type = other DNA
ggtggaacaatttttttttt

SEQ ID NO: 10684 - DNA, 20 bp, synthetic construct
  source 1..20: mol_type = other DNA
aggtggaacaattttttttt

SEQ ID NO: 10685 - DNA, 20 bp, synthetic construct
  source 1..20: mol_type = other DNA
gaggtggaacaatttttttt

SEQ ID NO: 10686 - DNA, 20 bp, synthetic construct
  source 1..20: mol_type = other DNA
tgaggtggaacaattttttt

SEQ ID NO: 10687 - DNA, 20 bp, synthetic construct
  source 1..20: mol_type = other DNA
ctgaggtggaacaatttttt

SEQ ID NO: 10688 - DNA, 20 bp, synthetic construct
  source 1..20: mol_type = other DNA
tctgaggtggaacaattttt

SEQ ID NO: 10689 - DNA, 20 bp, synthetic construct
  source 1..20: mol_type = other DNA
atctgaggtggaacaatttt

SEQ ID NO: 10690 - DNA, 20 bp, synthetic construct
  source 1..20: mol_type = other DNA
gatctgaggtggaacaattt

SEQ ID NO: 10691 - DNA, 20 bp, synthetic construct
  source 1..20: mol_type = other DNA
tgatctgaggtggaacaatt

SEQ ID NO: 10692 - DNA, 20 bp, synthetic construct
  source 1..20: mol_type = other DNA
atgatctgaggtggaacaat

SEQ ID NO: 10693 - DNA, 20 bp, synthetic construct
  source 1..20: mol_type = other DNA
aatgatctgaggtggaacaa

SEQ ID NO: 10694 - DNA, 20 bp, synthetic construct
  source 1..20: mol_type = other DNA
taatgatctgaggtggaaca

SEQ ID NO: 10695 - DNA, 20 bp, synthetic construct
  source 1..20: mol_type = other DNA
ataatgatctgaggtggaac

SEQ ID NO: 10696 - DNA, 20 bp, synthetic construct
  source 1..20: mol_type = other DNA
cataatgatctgaggtggaa

SEQ ID NO: 10697 - DNA, 20 bp, synthetic construct
  source 1..20: mol_type = other DNA
gcataatgatctgaggtgga

SEQ ID NO: 10698 - DNA, 20 bp, synthetic construct
  source 1..20: mol_type = other DNA
tgcataatgatctgaggtgg

SEQ ID NO: 10699 - DNA, 20 bp, synthetic construct
  source 1..20: mol_type = other DNA
atgcataatgatctgaggtg

SEQ ID NO: 10700 - DNA, 20 bp, synthetic construct
  source 1..20: mol_type = other DNA
aatgcataatgatctgaggt

SEQ ID NO: 10701 - DNA, 20 bp, synthetic construct
  source 1..20: mol_type = other DNA
aaatgcataatgatctgagg

SEQ ID NO: 10702 - DNA, 20 bp, synthetic construct
  source 1..20: mol_type = other DNA
caaatgcataatgatctgag

SEQ ID NO: 10703 - DNA, 20 bp, synthetic construct
  source 1..20: mol_type = other DNA
acaaatgcataatgatctga

SEQ ID NO: 10704 - DNA, 20 bp, synthetic construct
  source 1..20: mol_type = other DNA
aacaaatgcataatgatctg

SEQ ID NO: 10705 - DNA, 20 bp, synthetic construct
  source 1..20: mol_type = other DNA
taacaaatgcataatgatct

SEQ ID NO: 10706 - DNA, 20 bp, synthetic construct
  source 1..20: mol_type = other DNA
ctaacaaatgcataatgatc

SEQ ID NO: 10707 - DNA, 20 bp, synthetic construct
  source 1..20: mol_type = other DNA
tctaacaaatgcataatgat

SEQ ID NO: 10708 - DNA, 20 bp, synthetic construct
  source 1..20: mol_type = other DNA
atctaacaaatgcataatga

SEQ ID NO: 10709 - DNA, 20 bp, synthetic construct
  source 1..20: mol_type = other DNA
aatctaacaaatgcataatg

SEQ ID NO: 10710 - DNA, 20 bp, synthetic construct
  source 1..20: mol_type = other DNA
gaatctaacaaatgcataat

SEQ ID NO: 10711 - DNA, 20 bp, synthetic construct
  source 1..20: mol_type = other DNA
agaatctaacaaatgcataa

SEQ ID NO: 10712 - DNA, 20 bp, synthetic construct
  source 1..20: mol_type = other DNA
gagaatctaacaaatgcata

SEQ ID NO: 10713 - DNA, 20 bp, synthetic construct
  source 1..20: mol_type = other DNA
tgagaatctaacaaatgcat

SEQ ID NO: 10714 - DNA, 20 bp, synthetic construct
  source 1..20: mol_type = other DNA
atgagaatctaacaaatgca

SEQ ID NO: 10715 - DNA, 20 bp, synthetic construct
  source 1..20: mol_type = other DNA
tatgagaatctaacaaatgc

SEQ ID NO: 10716 - DNA, 20 bp, synthetic construct
  source 1..20: mol_type = other DNA
ttatgagaatctaacaaatg

SEQ ID NO: 10717 - DNA, 20 bp, synthetic construct
  source 1..20: mol_type = other DNA
tttatgagaatctaacaaat

SEQ ID NO: 10718 - DNA, 20 bp, synthetic construct
  source 1..20: mol_type = other DNA
ctttatgagaatctaacaaa

SEQ ID NO: 10719 - DNA, 20 bp, synthetic construct
  source 1..20: mol_type = other DNA
tctttatgagaatctaacaa

SEQ ID NO: 10720 - DNA, 20 bp, synthetic construct
  source 1..20: mol_type = other DNA
ctctttatgagaatctaaca

SEQ ID NO: 10721 - DNA, 20 bp, synthetic construct
  source 1..20: mol_type = other DNA
gctctttatgagaatctaac

SEQ ID NO: 10722 - DNA, 20 bp, synthetic construct
  source 1..20: mol_type = other DNA
tgctctttatgagaatctaa

SEQ ID NO: 10723 - DNA, 20 bp, synthetic construct
  source 1..20: mol_type = other DNA
atgctctttatgagaatcta

SEQ ID NO: 10724 - DNA, 20 bp, synthetic construct
  source 1..20: mol_type = other DNA
tatgctctttatgagaatct

SEQ ID NO: 10725 - DNA, 20 bp, synthetic construct
  source 1..20: mol_type = other DNA
gtatgctctttatgagaatc

SEQ ID NO: 10726 - DNA, 20 bp, synthetic construct
  source 1..20: mol_type = other DNA
tgtatgctctttatgagaat

SEQ ID NO: 10727 - DNA, 20 bp, synthetic construct
  source 1..20: mol_type = other DNA
ttgtatgctctttatgagaa

SEQ ID NO: 10728 - DNA, 20 bp, synthetic construct
  source 1..20: mol_type = other DNA
gttgtatgctctttatgaga

SEQ ID NO: 10729 - DNA, 20 bp, synthetic construct
  source 1..20: mol_type = other DNA
ggttgtatgctctttatgag

SEQ ID NO: 10730 - DNA, 20 bp, synthetic construct
  source 1..20: mol_type = other DNA
aggttgtatgctctttatga

SEQ ID NO: 10731 - DNA, 20 bp, synthetic construct
  source 1..20: mol_type = other DNA
taggttgtatgctctttatg

SEQ ID NO: 10732 - DNA, 20 bp, synthetic construct
  source 1..20: mol_type = other DNA
gtaggttgtatgctctttat

SEQ ID NO: 10733 - DNA, 20 bp, synthetic construct
  source 1..20: mol_type = other DNA
tgtaggttgtatgctcttta

SEQ ID NO: 10734 - DNA, 20 bp, synthetic construct
  source 1..20: mol_type = other DNA
atgtaggttgtatgctcttt

SEQ ID NO: 10735 - DNA, 20 bp, synthetic construct
  source 1..20: mol_type = other DNA
gatgtaggttgtatgctctt

SEQ ID NO: 10736 - DNA, 20 bp, synthetic construct
  source 1..20: mol_type = other DNA
agatgtaggttgtatgctct

SEQ ID NO: 10737 - DNA, 20 bp, synthetic construct
  source 1..20: mol_type = other DNA
gagatgtaggttgtatgctc

SEQ ID NO: 10738 - DNA, 20 bp, synthetic construct
  source 1..20: mol_type = other DNA
agagatgtaggttgtatgct

SEQ ID NO: 10739 - DNA, 20 bp, synthetic construct
  source 1..20: mol_type = other DNA
aagagatgtaggttgtatgc

SEQ ID NO: 10740 - DNA, 20 bp, synthetic construct
  source 1..20: mol_type = other DNA
caagagatgtaggttgtatg

SEQ ID NO: 10741 - DNA, 20 bp, synthetic construct
  source 1..20: mol_type = other DNA
gcaagagatgtaggttgtat

SEQ ID NO: 10742 - DNA, 20 bp, synthetic construct
  source 1..20: mol_type = other DNA
agcaagagatgtaggttgta

SEQ ID NO: 10743 - DNA, 20 bp, synthetic construct
  source 1..20: mol_type = other DNA
tagcaagagatgtaggttgt

SEQ ID NO: 10744 - DNA, 20 bp, synthetic construct
  source 1..20: mol_type = other DNA
atagcaagagatgtaggttg

SEQ ID NO: 10745 - DNA, 20 bp, synthetic construct
  source 1..20: mol_type = other DNA
tatagcaagagatgtaggtt

SEQ ID NO: 10746 - DNA, 20 bp, synthetic construct
  source 1..20: mol_type = other DNA
atatagcaagagatgtaggt

SEQ ID NO: 10747 - DNA, 20 bp, synthetic construct
  source 1..20: mol_type = other DNA
catatagcaagagatgtagg

SEQ ID NO: 10748 - DNA, 20 bp, synthetic construct
  source 1..20: mol_type = other DNA
gcatatagcaagagatgtag

SEQ ID NO: 10749 - DNA, 20 bp, synthetic construct
  source 1..20: mol_type = other DNA
tgcatatagcaagagatgta

SEQ ID NO: 10750 - DNA, 20 bp, synthetic construct
  source 1..20: mol_type = other DNA
ctgcatatagcaagagatgt

SEQ ID NO: 10751 - DNA, 20 bp, synthetic construct
  source 1..20: mol_type = other DNA
actgcatatagcaagagatg

SEQ ID NO: 10752 - DNA, 20 bp, synthetic construct
  source 1..20: mol_type = other DNA
aactgcatatagcaagagat

SEQ ID NO: 10753 - DNA, 20 bp, synthetic construct
  source 1..20: mol_type = other DNA
gaactgcatatagcaagaga

SEQ ID NO: 10754 - DNA, 20 bp, synthetic construct
  source 1..20: mol_type = other DNA
ggaactgcatatagcaagag

SEQ ID NO: 10755 - DNA, 20 bp, synthetic construct
  source 1..20: mol_type = other DNA
gggaactgcatatagcaaga

SEQ ID NO: 10756 - DNA, 20 bp, synthetic construct
  source 1..20: mol_type = other DNA
tgggaactgcatatagcaag

SEQ ID NO: 10757 - DNA, 20 bp, synthetic construct
  source 1..20: mol_type = other DNA
ctgggaactgcatatagcaa

SEQ ID NO: 10758 - DNA, 20 bp, synthetic construct
  source 1..20: mol_type = other DNA
actgggaactgcatatagca

SEQ ID NO: 10759 - DNA, 20 bp, synthetic construct
  source 1..20: mol_type = other DNA
tactgggaactgcatatagc

SEQ ID NO: 10760 - DNA, 20 bp, synthetic construct
  source 1..20: mol_type = other DNA
ctactgggaactgcatatag

SEQ ID NO: 10761 - DNA, 20 bp, synthetic construct
  source 1..20: mol_type = other DNA
cctactgggaactgcatata

SEQ ID NO: 10762 - DNA, 20 bp, synthetic construct
  source 1..20: mol_type = other DNA
ccctactgggaactgcatat

SEQ ID NO: 10763 - DNA, 20 bp, synthetic construct
  source 1..20: mol_type = other DNA
accctactgggaactgcata

SEQ ID NO: 10764 - DNA, 20 bp, synthetic construct
  source 1..20: mol_type = other DNA
aaccctactgggaactgcat

SEQ ID NO: 10765 - DNA, 20 bp, synthetic construct
  source 1..20: mol_type = other DNA
aaaccctactgggaactgca

SEQ ID NO: 10766 - DNA, 20 bp, synthetic construct
  source 1..20: mol_type = other DNA
caaaccctactgggaactgc

SEQ ID NO: 10767 - DNA, 20 bp, synthetic construct
  source 1..20: mol_type = other DNA
acaaaccctactgggaactg

SEQ ID NO: 10768 - DNA, 20 bp, synthetic construct
  source 1..20: mol_type = other DNA
cacaaaccctactgggaact

SEQ ID NO: 10769 - DNA, 20 bp, synthetic construct
  source 1..20: mol_type = other DNA
gcacaaaccctactgggaac

SEQ ID NO: 10770 - DNA, 20 bp, synthetic construct
  source 1..20: mol_type = other DNA
agcacaaaccctactgggaa

SEQ ID NO: 10771 - DNA, 20 bp, synthetic construct
  source 1..20: mol_type = other DNA
aagcacaaaccctactggga

SEQ ID NO: 10772 - DNA, 20 bp, synthetic construct
  source 1..20: mol_type = other DNA
gaagcacaaaccctactggg

SEQ ID NO: 10773 - DNA, 20 bp, synthetic construct
  source 1..20: mol_type = other DNA
agaagcacaaaccctactgg

SEQ ID NO: 10774 - DNA, 20 bp, synthetic construct
  source 1..20: mol_type = other DNA
tagaagcacaaaccctactg

SEQ ID NO: 10775 - DNA, 20 bp, synthetic construct
  source 1..20: mol_type = other DNA
atagaagcacaaaccctact

SEQ ID NO: 10776 - DNA, 20 bp, synthetic construct
  source 1..20: mol_type = other DNA
tatagaagcacaaaccctac

SEQ ID NO: 10777 - DNA, 20 bp, synthetic construct
  source 1..20: mol_type = other DNA
ttatagaagcacaaacccta

SEQ ID NO: 10778 - DNA, 20 bp, synthetic construct
  source 1..20: mol_type = other DNA
cttatagaagcacaaaccct

SEQ ID NO: 10779 - DNA, 20 bp, synthetic construct
  source 1..20: mol_type = other DNA
tcttatagaagcacaaaccc

SEQ ID NO: 10780 - DNA, 20 bp, synthetic construct
  source 1..20: mol_type = other DNA
ttcttatagaagcacaaacc

SEQ ID NO: 10781 - DNA, 20 bp, synthetic construct
  source 1..20: mol_type = other DNA
gttcttatagaagcacaaac

SEQ ID NO: 10782 - DNA, 20 bp, synthetic construct
  source 1..20: mol_type = other DNA
ggttcttatagaagcacaaa

SEQ ID NO: 10783 - DNA, 20 bp, synthetic construct
  source 1..20: mol_type = other DNA
aggttcttatagaagcacaa

SEQ ID NO: 10784 - DNA, 20 bp, synthetic construct
  source 1..20: mol_type = other DNA
taggttcttatagaagcaca

SEQ ID NO: 10785 - DNA, 20 bp, synthetic construct
  source 1..20: mol_type = other DNA
ttaggttcttatagaagcac

SEQ ID NO: 10786 - DNA, 20 bp, synthetic construct
  source 1..20: mol_type = other DNA
attaggttcttatagaagca

SEQ ID NO: 10787 - DNA, 20 bp, synthetic construct
  source 1..20: mol_type = other DNA
cattaggttcttatagaagc

SEQ ID NO: 10788 - DNA, 20 bp, synthetic construct
  source 1..20: mol_type = other DNA
gcattaggttcttatagaag

SEQ ID NO: 10789 - DNA, 20 bp, synthetic construct
  source 1..20: mol_type = other DNA
agcattaggttcttatagaa

SEQ ID NO: 10790 - DNA, 20 bp, synthetic construct
  source 1..20: mol_type = other DNA
cagcattaggttcttataga

SEQ ID NO: 10791 - DNA, 20 bp, synthetic construct
  source 1..20: mol_type = other DNA
gcagcattaggttcttatag

SEQ ID NO: 10792 - DNA, 20 bp, synthetic construct
  source 1..20: mol_type = other DNA
tgcagcattaggttcttata

SEQ ID NO: 10793 - DNA, 20 bp, synthetic construct
  source 1..20: mol_type = other DNA
gtgcagcattaggttcttat

SEQ ID NO: 10794 - DNA, 20 bp, synthetic construct
  source 1..20: mol_type = other DNA
ggtgcagcattaggttctta

SEQ ID NO: 10795 - DNA, 20 bp, synthetic construct
  source 1..20: mol_type = other DNA
aggtgcagcattaggttctt

SEQ ID NO: 10796 - DNA, 20 bp, synthetic construct
  source 1..20: mol_type = other DNA
caggtgcagcattaggttct

SEQ ID NO: 10797 - DNA, 20 bp, synthetic construct
  source 1..20: mol_type = other DNA
tcaggtgcagcattaggttc

SEQ ID NO: 10798 - DNA, 20 bp, synthetic construct
  source 1..20: mol_type = other DNA
atcaggtgcagcattaggtt

SEQ ID NO: 10799 - DNA, 20 bp, synthetic construct
  source 1..20: mol_type = other DNA
gatcaggtgcagcattaggt

SEQ ID NO: 10800 - DNA, 20 bp, synthetic construct
  source 1..20: mol_type = other DNA
agatcaggtgcagcattagg

SEQ ID NO: 10801 - DNA, 20 bp, synthetic construct
  source 1..20: mol_type = other DNA
tagatcaggtgcagcattag

SEQ ID NO: 10802 - DNA, 20 bp, synthetic construct
  source 1..20: mol_type = other DNA
ttagatcaggtgcagcatta

SEQ ID NO: 10803 - DNA, 20 bp, synthetic construct
  source 1..20: mol_type = other DNA
gttagatcaggtgcagcatt

SEQ ID NO: 10804 - DNA, 20 bp, synthetic construct
  source 1..20: mol_type = other DNA
tgttagatcaggtgcagcat

SEQ ID NO: 10805 - DNA, 20 bp, synthetic construct
  source 1..20: mol_type = other DNA
ctgttagatcaggtgcagca

SEQ ID NO: 10806 - DNA, 20 bp, synthetic construct
  source 1..20: mol_type = other DNA
cctgttagatcaggtgcagc

SEQ ID NO: 10807 - DNA, 20 bp, synthetic construct
  source 1..20: mol_type = other DNA
acctgttagatcaggtgcag

SEQ ID NO: 10808 - DNA, 20 bp, synthetic construct
  source 1..20: mol_type = other DNA
cacctgttagatcaggtgca

SEQ ID NO: 10809 - DNA, 20 bp, synthetic construct
  source 1..20: mol_type = other DNA
ccacctgttagatcaggtgc

SEQ ID NO: 10810 - DNA, 20 bp, synthetic construct
  source 1..20: mol_type = other DNA
cccacctgttagatcaggtg

SEQ ID NO: 10811 - DNA, 20 bp, synthetic construct
  source 1..20: mol_type = other DNA
ccccacctgttagatcaggt

SEQ ID NO: 10812 - DNA, 20 bp, synthetic construct
  source 1..20: mol_type = other DNA
gccccacctgttagatcagg

SEQ ID NO: 10813 - DNA, 20 bp, synthetic construct
  source 1..20: mol_type = other DNA
agccccacctgttagatcag

SEQ ID NO: 10814 - DNA, 20 bp, synthetic construct
  source 1..20: mol_type = other DNA
gagccccacctgttagatca

SEQ ID NO: 10815 - DNA, 20 bp, synthetic construct
  source 1..20: mol_type = other DNA
tgagccccacctgttagatc

SEQ ID NO: 10816 - DNA, 20 bp, synthetic construct
  source 1..20: mol_type = other DNA
ctgagccccacctgttagat

SEQ ID NO: 10817 - DNA, 20 bp, synthetic construct
  source 1..20: mol_type = other DNA
cctgagccccacctgttaga

SEQ ID NO: 10818 - DNA, 20 bp, synthetic construct
  source 1..20: mol_type = other DNA
acctgagccccacctgttag

SEQ ID NO: 10819 - DNA, 20 bp, synthetic construct
  source 1..20: mol_type = other DNA
cacctgagccccacctgtta

SEQ ID NO: 10820 - DNA, 20 bp, synthetic construct
  source 1..20: mol_type = other DNA
gcacctgagccccacctgtt

SEQ ID NO: 10821 - DNA, 20 bp, synthetic construct
  source 1..20: mol_type = other DNA
agcacctgagccccacctgt

SEQ ID NO: 10822 - DNA, 20 bp, synthetic construct
  source 1..20: mol_type = other DNA
tagcacctgagccccacctg

SEQ ID NO: 10823 - DNA, 20 bp, synthetic construct
  source 1..20: mol_type = other DNA
ttagcacctgagccccacct

SEQ ID NO: 10824 - DNA, 20 bp, synthetic construct
  source 1..20: mol_type = other DNA
attagcacctgagccccacc

SEQ ID NO: 10825 - DNA, 20 bp, synthetic construct
  source 1..20: mol_type = other DNA
cattagcacctgagccccac

SEQ ID NO: 10826 - DNA, 20 bp, synthetic construct
  source 1..20: mol_type = other DNA
gcattagcacctgagcccca

SEQ ID NO: 10827 - DNA, 20 bp, synthetic construct
  source 1..20: mol_type = other DNA
agcattagcacctgagcccc

SEQ ID NO: 10828 - DNA, 20 bp, synthetic construct
  source 1..20: mol_type = other DNA
gagcattagcacctgagccc

SEQ ID NO: 10829 - DNA, 20 bp, synthetic construct
  source 1..20: mol_type = other DNA
tgagcattagcacctgagcc

SEQ ID NO: 10830 - DNA, 20 bp, synthetic construct
  source 1..20: mol_type = other DNA
gtgagcattagcacctgagc

SEQ ID NO: 10831 - DNA, 20 bp, synthetic construct
  source 1..20: mol_type = other DNA
tgtgagcattagcacctgag

SEQ ID NO: 10832 - DNA, 20 bp, synthetic construct
  source 1..20: mol_type = other DNA
gtgtgagcattagcacctga

SEQ ID NO: 10833 - DNA, 20 bp, synthetic construct
  source 1..20: mol_type = other DNA
tgtgtgagcattagcacctg

SEQ ID NO: 10834 - DNA, 20 bp, synthetic construct
  source 1..20: mol_type = other DNA
ctgtgtgagcattagcacct

SEQ ID NO: 10835 - DNA, 20 bp, synthetic construct
  source 1..20: mol_type = other DNA
gctgtgtgagcattagcacc

SEQ ID NO: 10836 - DNA, 20 bp, synthetic construct
  source 1..20: mol_type = other DNA
agctgtgtgagcattagcac

SEQ ID NO: 10837 - DNA, 20 bp, synthetic construct
  source 1..20: mol_type = other DNA
gagctgtgtgagcattagca

SEQ ID NO: 10838 - DNA, 20 bp, synthetic construct
  source 1..20: mol_type = other DNA
ggagctgtgtgagcattagc

SEQ ID NO: 10839 - DNA, 20 bp, synthetic construct
  source 1..20: mol_type = other DNA
aggagctgtgtgagcattag

SEQ ID NO: 10840 - DNA, 20 bp, synthetic construct
  source 1..20: mol_type = other DNA
caggagctgtgtgagcatta

SEQ ID NO: 10841 - DNA, 20 bp, synthetic construct
  source 1..20: mol_type = other DNA
acaggagctgtgtgagcatt

SEQ ID NO: 10842 - DNA, 20 bp, synthetic construct
  source 1..20: mol_type = other DNA
aacaggagctgtgtgagcat

SEQ ID NO: 10843 - DNA, 20 bp, synthetic construct
  source 1..20: mol_type = other DNA
caacaggagctgtgtgagca

SEQ ID NO: 10844 - DNA, 20 bp, synthetic construct
  source 1..20: mol_type = other DNA
acaacaggagctgtgtgagc

SEQ ID NO: 10845 - DNA, 20 bp, synthetic construct
  source 1..20: mol_type = other DNA
cacaacaggagctgtgtgag

SEQ ID NO: 10846 - DNA, 20 bp, synthetic construct
  source 1..20: mol_type = other DNA
gcacaacaggagctgtgtga

SEQ ID NO: 10847 - DNA, 20 bp, synthetic construct
  source 1..20: mol_type = other DNA
tgcacaacaggagctgtgtg

SEQ ID NO: 10848 - DNA, 20 bp, synthetic construct
  source 1..20: mol_type = other DNA
ctgcacaacaggagctgtgt

SEQ ID NO: 10849 - DNA, 20 bp, synthetic construct
  source 1..20: mol_type = other DNA
actgcacaacaggagctgtg

SEQ ID NO: 10850 - DNA, 20 bp, synthetic construct
  source 1..20: mol_type = other DNA
gactgcacaacaggagctgt

SEQ ID NO: 10851 - DNA, 20 bp, synthetic construct
  source 1..20: mol_type = other DNA
agactgcacaacaggagctg

SEQ ID NO: 10852 - DNA, 20 bp, synthetic construct
  source 1..20: mol_type = other DNA
cagactgcacaacaggagct

SEQ ID NO: 10853 - DNA, 20 bp, synthetic construct
  source 1..20: mol_type = other DNA
ccagactgcacaacaggagc

SEQ ID NO: 10854 - DNA, 20 bp, synthetic construct
  source 1..20: mol_type = other DNA
accagactgcacaacaggag

SEQ ID NO: 10855 - DNA, 20 bp, synthetic construct
  source 1..20: mol_type = other DNA
aaccagactgcacaacagga

SEQ ID NO: 10856 - DNA, 20 bp, synthetic construct
  source 1..20: mol_type = other DNA
gaaccagactgcacaacagg

SEQ ID NO: 10857 - DNA, 20 bp, synthetic construct
  source 1..20: mol_type = other DNA
ggaaccagactgcacaacag

SEQ ID NO: 10858 - DNA, 20 bp, synthetic construct
  source 1..20: mol_type = other DNA
aggaaccagactgcacaaca

SEQ ID NO: 10859 - DNA, 20 bp, synthetic construct
  source 1..20: mol_type = other DNA
taggaaccagactgcacaac

SEQ ID NO: 10860 - DNA, 20 bp, synthetic construct
  source 1..20: mol_type = other DNA
ttaggaaccagactgcacaa

SEQ ID NO: 10861 - DNA, 20 bp, synthetic construct
  source 1..20: mol_type = other DNA
gttaggaaccagactgcaca

SEQ ID NO: 10862 - DNA, 20 bp, synthetic construct
  source 1..20: mol_type = other DNA
tgttaggaaccagactgcac

SEQ ID NO: 10863 - DNA, 20 bp, synthetic construct
  source 1..20: mol_type = other DNA
ctgttaggaaccagactgca

SEQ ID NO: 10864 - DNA, 20 bp, synthetic construct
  source 1..20: mol_type = other DNA
cctgttaggaaccagactgc

SEQ ID NO: 10865 - DNA, 20 bp, synthetic construct
  source 1..20: mol_type = other DNA
gcctgttaggaaccagactg

SEQ ID NO: 10866 - DNA, 20 bp, synthetic construct
  source 1..20: mol_type = other DNA
ggcctgttaggaaccagact

SEQ ID NO: 10867 - DNA, 20 bp, synthetic construct
  source 1..20: mol_type = other DNA
aggcctgttaggaaccagac

SEQ ID NO: 10868 - DNA, 20 bp, synthetic construct
  source 1..20: mol_type = other DNA
caggcctgttaggaaccaga

SEQ ID NO: 10869 - DNA, 20 bp, synthetic construct
  source 1..20: mol_type = other DNA
acaggcctgttaggaaccag

SEQ ID NO: 10870 - DNA, 20 bp, synthetic construct
  source 1..20: mol_type = other DNA
aacaggcctgttaggaacca

SEQ ID NO: 10871 - DNA, 20 bp, synthetic construct
  source 1..20: mol_type = other DNA
aaacaggcctgttaggaacc

SEQ ID NO: 10872 - DNA, 20 bp, synthetic construct
  source 1..20: mol_type = other DNA
aaaacaggcctgttaggaac

SEQ ID NO: 10873 - DNA, 20 bp, synthetic construct
  source 1..20: mol_type = other DNA
aaaaacaggcctgttaggaa

SEQ ID NO: 10874 - DNA, 20 bp, synthetic construct
  source 1..20: mol_type = other DNA
aaaaaacaggcctgttagga

SEQ ID NO: 10875 - DNA, 20 bp, synthetic construct
  source 1..20: mol_type = other DNA
aaaaaaacaggcctgttagg

SEQ ID NO: 10876 - DNA, 20 bp, synthetic construct
  source 1..20: mol_type = other DNA
aaaaaaaacaggcctgttag

SEQ ID NO: 10877 - DNA, 20 bp, synthetic construct
  source 1..20: mol_type = other DNA
aaaaaaaaacaggcctgtta

SEQ ID NO: 10878 - DNA, 20 bp, synthetic construct
  source 1..20: mol_type = other DNA
aaaaaaaaaacaggcctgtt

SEQ ID NO: 10879 - DNA, 20 bp, synthetic construct
  source 1..20: mol_type = other DNA
aaaaaaaaaaacaggcctgt

SEQ ID NO: 10880 - DNA, 20 bp, synthetic construct
  source 1..20: mol_type = other DNA
aaaaaaaaaaaacaggcctg

SEQ ID NO: 10881 - DNA, 20 bp, synthetic construct
  source 1..20: mol_type = other DNA
aaaaaaaaaaaaacaggcct

SEQ ID NO: 10882 - DNA, 20 bp, synthetic construct
  source 1..20: mol_type = other DNA
taaaaaaaaaaaaacaggcc

SEQ ID NO: 10883 - DNA, 20 bp, synthetic construct
  source 1..20: mol_type = other DNA
ttaaaaaaaaaaaaacaggc

SEQ ID NO: 10884 - DNA, 20 bp, synthetic construct
  source 1..20: mol_type = other DNA
attaaaaaaaaaaaaacagg

SEQ ID NO: 10885 - DNA, 20 bp, synthetic construct
  source 1..20: mol_type = other DNA
aattaaaaaaaaaaaaacag

SEQ ID NO: 10886 - DNA, 20 bp, synthetic construct
  source 1..20: mol_type = other DNA
taattaaaaaaaaaaaaaca

SEQ ID NO: 10887 - DNA, 20 bp, synthetic construct
  source 1..20: mol_type = other DNA
ctaattaaaaaaaaaaaaac

SEQ ID NO: 10888 - DNA, 20 bp, synthetic construct
  source 1..20: mol_type = other DNA
tctaattaaaaaaaaaaaaa

SEQ ID NO: 10889 - DNA, 20 bp, synthetic construct
  source 1..20: mol_type = other DNA
atctaattaaaaaaaaaaaa

SEQ ID NO: 10890 - DNA, 20 bp, synthetic construct
  source 1..20: mol_type = other DNA
catctaattaaaaaaaaaaa

SEQ ID NO: 10891 - DNA, 20 bp, synthetic construct
  source 1..20: mol_type = other DNA
ccatctaattaaaaaaaaaa

SEQ ID NO: 10892 - DNA, 20 bp, synthetic construct
  source 1..20: mol_type = other DNA
tccatctaattaaaaaaaaa

SEQ ID NO: 10893 - DNA, 20 bp, synthetic construct
  source 1..20: mol_type = other DNA
ctccatctaattaaaaaaaa

SEQ ID NO: 10894 - DNA, 20 bp, synthetic construct
  source 1..20: mol_type = other DNA
actccatctaattaaaaaaa

SEQ ID NO: 10895 - DNA, 20 bp, synthetic construct
  source 1..20: mol_type = other DNA
gactccatctaattaaaaaa

SEQ ID NO: 10896 - DNA, 20 bp, synthetic construct
  source 1..20: mol_type = other DNA
agactccatctaattaaaaa

SEQ ID NO: 10897 - DNA, 20 bp, synthetic construct
  source 1..20: mol_type = other DNA
gagactccatctaattaaaa

SEQ ID NO: 10898 - DNA, 20 bp, synthetic construct
  source 1..20: mol_type = other DNA
cgagactccatctaattaaa

SEQ ID NO: 10899 - DNA, 20 bp, synthetic construct
  source 1..20: mol_type = other DNA
gcgagactccatctaattaa

SEQ ID NO: 10900 - DNA, 20 bp, synthetic construct
  source 1..20: mol_type = other DNA
agcgagactccatctaatta

SEQ ID NO: 10901 - DNA, 20 bp, synthetic construct
  source 1..20: mol_type = other DNA
gagcgagactccatctaatt

SEQ ID NO: 10902 - DNA, 20 bp, synthetic construct
  source 1..20: mol_type = other DNA
agagcgagactccatctaat

SEQ ID NO: 10903 - DNA, 20 bp, synthetic construct
  source 1..20: mol_type = other DNA
cagagcgagactccatctaa

SEQ ID NO: 10904 - DNA, 20 bp, synthetic construct
  source 1..20: mol_type = other DNA
acagagcgagactccatcta

SEQ ID NO: 10905 - DNA, 20 bp, synthetic construct
  source 1..20: mol_type = other DNA
gacagagcgagactccatct

SEQ ID NO: 10906 - DNA, 20 bp, synthetic construct
  source 1..20: mol_type = other DNA
tgacagagcgagactccatc

SEQ ID NO: 10907 - DNA, 20 bp, synthetic construct
  source 1..20: mol_type = other DNA
gtgacagagcgagactccat

SEQ ID NO: 10908 - DNA, 20 bp, synthetic construct
  source 1..20: mol_type = other DNA
ggtgacagagcgagactcca

SEQ ID NO: 10909 - DNA, 20 bp, synthetic construct
  source 1..20: mol_type = other DNA
tggtgacagagcgagactcc

SEQ ID NO: 10910 - DNA, 20 bp, synthetic construct
  source 1..20: mol_type = other DNA
ctggtgacagagcgagactc

SEQ ID NO: 10911 - DNA, 20 bp, synthetic construct
  source 1..20: mol_type = other DNA
cctggtgacagagcgagact

SEQ ID NO: 10912 - DNA, 20 bp, synthetic construct
  source 1..20: mol_type = other DNA
gcctggtgacagagcgagac

SEQ ID NO: 10913 - DNA, 20 bp, synthetic construct
  source 1..20: mol_type = other DNA
agcctggtgacagagcgaga

SEQ ID NO: 10914 - DNA, 20 bp, synthetic construct
  source 1..20: mol_type = other DNA
cagcctggtgacagagcgag

SEQ ID NO: 10915 - DNA, 20 bp, synthetic construct
  source 1..20: mol_type = other DNA
ccagcctggtgacagagcga

SEQ ID NO: 10916 - DNA, 20 bp, synthetic construct
  source 1..20: mol_type = other DNA
tccagcctggtgacagagcg

SEQ ID NO: 10917 - DNA, 20 bp, synthetic construct
  source 1..20: mol_type = other DNA
ctccagcctggtgacagagc

SEQ ID NO: 10918 - DNA, 20 bp, synthetic construct
  source 1..20: mol_type = other DNA
actccagcctggtgacagag

SEQ ID NO: 10919 - DNA, 20 bp, synthetic construct
  source 1..20: mol_type = other DNA
cactccagcctggtgacaga

SEQ ID NO: 10920 - DNA, 20 bp, synthetic construct
  source 1..20: mol_type = other DNA
gcactccagcctggtgacag

SEQ ID NO: 10921 - DNA, 20 bp, synthetic construct
  source 1..20: mol_type = other DNA
tgcactccagcctggtgaca

SEQ ID NO: 10922 - DNA, 20 bp, synthetic construct
  source 1..20: mol_type = other DNA
ctgcactccagcctggtgac

SEQ ID NO: 10923 - DNA, 20 bp, synthetic construct
  source 1..20: mol_type = other DNA
actgcactccagcctggtga

SEQ ID NO: 10924 - DNA, 20 bp, synthetic construct
  source 1..20: mol_type = other DNA
cactgcactccagcctggtg

SEQ ID NO: 10925 - DNA, 20 bp, synthetic construct
  source 1..20: mol_type = other DNA
ccactgcactccagcctggt

SEQ ID NO: 10926 - DNA, 20 bp, synthetic construct
  source 1..20: mol_type = other DNA
gccactgcactccagcctgg

SEQ ID NO: 10927 - DNA, 20 bp, synthetic construct
  source 1..20: mol_type = other DNA
tgccactgcactccagcctg

SEQ ID NO: 10928 - DNA, 20 bp, synthetic construct
  source 1..20: mol_type = other DNA
gtgccactgcactccagcct

SEQ ID NO: 10929 - DNA, 20 bp, synthetic construct
  source 1..20: mol_type = other DNA
cgtgccactgcactccagcc

SEQ ID NO: 10930 - DNA, 20 bp, synthetic construct
  source 1..20: mol_type = other DNA
tcgtgccactgcactccagc

SEQ ID NO: 10931 - DNA, 20 bp, synthetic construct
  source 1..20: mol_type = other DNA
atcgtgccactgcactccag

SEQ ID NO: 10932 - DNA, 20 bp, synthetic construct
  source 1..20: mol_type = other DNA
gatcgtgccactgcactcca

SEQ ID NO: 10933 - DNA, 20 bp, synthetic construct
  source 1..20: mol_type = other DNA
agatcgtgccactgcactcc

SEQ ID NO: 10934 - DNA, 20 bp, synthetic construct
  source 1..20: mol_type = other DNA
gagatcgtgccactgcactc

SEQ ID NO: 10935 - DNA, 20 bp, synthetic construct
  source 1..20: mol_type = other DNA
tgagatcgtgccactgcact

SEQ ID NO: 10936 - DNA, 20 bp, synthetic construct
  source 1..20: mol_type = other DNA
ctgagatcgtgccactgcac

SEQ ID NO: 10937 - DNA, 20 bp, synthetic construct
  source 1..20: mol_type = other DNA
gctgagatcgtgccactgca

SEQ ID NO: 10938 - DNA, 20 bp, synthetic construct
  source 1..20: mol_type = other DNA
agctgagatcgtgccactgc

SEQ ID NO: 10939 - DNA, 20 bp, synthetic construct
  source 1..20: mol_type = other DNA
gagctgagatcgtgccactg

SEQ ID NO: 10940 - DNA, 20 bp, synthetic construct
  source 1..20: mol_type = other DNA
tgagctgagatcgtgccact

SEQ ID NO: 10941 - DNA, 20 bp, synthetic construct
  source 1..20: mol_type = other DNA
gtgagctgagatcgtgccac

SEQ ID NO: 10942 - DNA, 20 bp, synthetic construct
  source 1..20: mol_type = other DNA
agtgagctgagatcgtgcca

SEQ ID NO: 10943 - DNA, 20 bp, synthetic construct
  source 1..20: mol_type = other DNA
cagtgagctgagatcgtgcc

SEQ ID NO: 10944 - DNA, 20 bp, synthetic construct
  source 1..20: mol_type = other DNA
gcagtgagctgagatcgtgc

SEQ ID NO: 10945 - DNA, 20 bp, synthetic construct
  source 1..20: mol_type = other DNA
tgcagtgagctgagatcgtg

SEQ ID NO: 10946 - DNA, 20 bp, synthetic construct
  source 1..20: mol_type = other DNA
ttgcagtgagctgagatcgt

SEQ ID NO: 10947 - DNA, 20 bp, synthetic construct
  source 1..20: mol_type = other DNA
gttgcagtgagctgagatcg

SEQ ID NO: 10948 - DNA, 20 bp, synthetic construct
  source 1..20: mol_type = other DNA
ggttgcagtgagctgagatc

SEQ ID NO: 10949 - DNA, 20 bp, synthetic construct
  source 1..20: mol_type = other DNA
aggttgcagtgagctgagat

SEQ ID NO: 10950 - DNA, 20 bp, synthetic construct
  source 1..20: mol_type = other DNA
gaggttgcagtgagctgaga

SEQ ID NO: 10951 - DNA, 20 bp, synthetic construct
  source 1..20: mol_type = other DNA
agaggttgcagtgagctgag

SEQ ID NO: 10952 - DNA, 20 bp, synthetic construct
  source 1..20: mol_type = other DNA
cagaggttgcagtgagctga

SEQ ID NO: 10953 - DNA, 20 bp, synthetic construct
  source 1..20: mol_type = other DNA
gcagaggttgcagtgagctg

SEQ ID NO: 10954 - DNA, 20 bp, synthetic construct
  source 1..20: mol_type = other DNA
ggcagaggttgcagtgagct

SEQ ID NO: 10955 - DNA, 20 bp, synthetic construct
  source 1..20: mol_type = other DNA
aggcagaggttgcagtgagc

SEQ ID NO: 10956 - DNA, 20 bp, synthetic construct
  source 1..20: mol_type = other DNA
gaggcagaggttgcagtgag

SEQ ID NO: 10957 - DNA, 20 bp, synthetic construct
  source 1..20: mol_type = other DNA
ggaggcagaggttgcagtga

SEQ ID NO: 10958 - DNA, 20 bp, synthetic construct
  source 1..20: mol_type = other DNA
gggaggcagaggttgcagtg

SEQ ID NO: 10959 - DNA, 20 bp, synthetic construct
  source 1..20: mol_type = other DNA
cgggaggcagaggttgcagt

SEQ ID NO: 10960 - DNA, 20 bp, synthetic construct
  source 1..20: mol_type = other DNA
ccgggaggcagaggttgcag

SEQ ID NO: 10961 - DNA, 20 bp, synthetic construct
  source 1..20: mol_type = other DNA
cccgggaggcagaggttgca

SEQ ID NO: 10962 - DNA, 20 bp, synthetic construct
  source 1..20: mol_type = other DNA
acccgggaggcagaggttgc

SEQ ID NO: 10963 - DNA, 20 bp, synthetic construct
  source 1..20: mol_type = other DNA
aacccgggaggcagaggttg

SEQ ID NO: 10964 - DNA, 20 bp, synthetic construct
  source 1..20: mol_type = other DNA
gaacccgggaggcagaggtt

SEQ ID NO: 10965 - DNA, 20 bp, synthetic construct
  source 1..20: mol_type = other DNA
tgaacccgggaggcagaggt

SEQ ID NO: 10966 - DNA, 20 bp, synthetic construct
  source 1..20: mol_type = other DNA
ttgaacccgggaggcagagg

SEQ ID NO: 10967 - DNA, 20 bp, synthetic construct
  source 1..20: mol_type = other DNA
cttgaacccgggaggcagag

SEQ ID NO: 10968 - DNA, 20 bp, synthetic construct
  source 1..20: mol_type = other DNA
gcttgaacccgggaggcaga

SEQ ID NO: 10969 - DNA, 20 bp, synthetic construct
  source 1..20: mol_type = other DNA
cgcttgaacccgggaggcag

SEQ ID NO: 10970 - DNA, 20 bp, synthetic construct
  source 1..20: mol_type = other DNA
tcgcttgaacccgggaggca

SEQ ID NO: 10971 - DNA, 20 bp, synthetic construct
  source 1..20: mol_type = other DNA
atcgcttgaacccgggaggc

SEQ ID NO: 10972 - DNA, 20 bp, synthetic construct
  source 1..20: mol_type = other DNA
aatcgcttgaacccgggagg

SEQ ID NO: 10973 - DNA, 20 bp, synthetic construct
  source 1..20: mol_type = other DNA
gaatcgcttgaacccgggag

SEQ ID NO: 10974 - DNA, 20 bp, synthetic construct
  source 1..20: mol_type = other DNA
agaatcgcttgaacccggga

SEQ ID NO: 10975 - DNA, 20 bp, synthetic construct
  source 1..20: mol_type = other DNA
gagaatcgcttgaacccggg

SEQ ID NO: 10976 - DNA, 20 bp, synthetic construct
  source 1..20: mol_type = other DNA
ggagaatcgcttgaacccgg

SEQ ID NO: 10977 - DNA, 20 bp, synthetic construct
  source 1..20: mol_type = other DNA
aggagaatcgcttgaacccg

SEQ ID NO: 10978 - DNA, 20 bp, synthetic construct
  source 1..20: mol_type = other DNA
caggagaatcgcttgaaccc

SEQ ID NO: 10979 - DNA, 20 bp, synthetic construct
  source 1..20: mol_type = other DNA
gcaggagaatcgcttgaacc

SEQ ID NO: 10980 - DNA, 20 bp, synthetic construct
  source 1..20: mol_type = other DNA
ggcaggagaatcgcttgaac

SEQ ID NO: 10981 - DNA, 20 bp, synthetic construct
  source 1..20: mol_type = other DNA
aggcaggagaatcgcttgaa

SEQ ID NO: 10982 - DNA, 20 bp, synthetic construct
  source 1..20: mol_type = other DNA
aaggcaggagaatcgcttga

SEQ ID NO: 10983 - DNA, 20 bp, synthetic construct
  source 1..20: mol_type = other DNA
taaggcaggagaatcgcttg

SEQ ID NO: 10984 - DNA, 20 bp, synthetic construct
  source 1..20: mol_type = other DNA
ctaaggcaggagaatcgctt

SEQ ID NO: 10985 - DNA, 20 bp, synthetic construct
  source 1..20: mol_type = other DNA
gctaaggcaggagaatcgct

SEQ ID NO: 10986 - DNA, 20 bp, synthetic construct
  source 1..20: mol_type = other DNA
ggctaaggcaggagaatcgc

SEQ ID NO: 10987 - DNA, 20 bp, synthetic construct
  source 1..20: mol_type = other DNA
aggctaaggcaggagaatcg

SEQ ID NO: 10988 - DNA, 20 bp, synthetic construct
  source 1..20: mol_type = other DNA
gaggctaaggcaggagaatc

SEQ ID NO: 10989 - DNA, 20 bp, synthetic construct
  source 1..20: mol_type = other DNA
ggaggctaaggcaggagaat

SEQ ID NO: 10990 - DNA, 20 bp, synthetic construct
  source 1..20: mol_type = other DNA
gggaggctaaggcaggagaa

SEQ ID NO: 10991 - DNA, 20 bp, synthetic construct
  source 1..20: mol_type = other DNA
tgggaggctaaggcaggaga

SEQ ID NO: 10992 - DNA, 20 bp, synthetic construct
  source 1..20: mol_type = other DNA
atgggaggctaaggcaggag

SEQ ID NO: 10993 - DNA, 20 bp, synthetic construct
  source 1..20: mol_type = other DNA
catgggaggctaaggcagga

SEQ ID NO: 10994 - DNA, 20 bp, synthetic construct
  source 1..20: mol_type = other DNA
acatgggaggctaaggcagg

SEQ ID NO: 10995 - DNA, 20 bp, synthetic construct
  source 1..20: mol_type = other DNA
tacatgggaggctaaggcag

SEQ ID NO: 10996 - DNA, 20 bp, synthetic construct
  source 1..20: mol_type = other DNA
ctacatgggaggctaaggca

SEQ ID NO: 10997 - DNA, 20 bp, synthetic construct
  source 1..20: mol_type = other DNA
actacatgggaggctaaggc

SEQ ID NO: 10998 - DNA, 20 bp, synthetic construct
  source 1..20: mol_type = other DNA
aactacatgggaggctaagg

SEQ ID NO: 10999 - DNA, 20 bp, synthetic construct
  source 1..20: mol_type = other DNA
caactacatgggaggctaag

SEQ ID NO: 11000 - DNA, 20 bp, synthetic construct
  source 1..20: mol_type = other DNA
ccaactacatgggaggctaa

SEQ ID NO: 11001 - DNA, 20 bp, synthetic construct
  source 1..20: mol_type = other DNA
accaactacatgggaggcta

SEQ ID NO: 11002 - DNA, 20 bp, synthetic construct
  source 1..20: mol_type = other DNA
taccaactacatgggaggct

SEQ ID NO: 11003 - DNA, 20 bp, synthetic construct
  source 1..20: mol_type = other DNA
gtaccaactacatgggaggc

SEQ ID NO: 11004 - DNA, 20 bp, synthetic construct
  source 1..20: mol_type = other DNA
agtaccaactacatgggagg

SEQ ID NO: 11005 - DNA, 20 bp, synthetic construct
  source 1..20: mol_type = other DNA
tagtaccaactacatgggag

SEQ ID NO: 11006 - DNA, 20 bp, synthetic construct
  source 1..20: mol_type = other DNA
gtagtaccaactacatggga

SEQ ID NO: 11007 - DNA, 20 bp, synthetic construct
  source 1..20: mol_type = other DNA
tgtagtaccaactacatggg

SEQ ID NO: 11008 - DNA, 20 bp, synthetic construct
  source 1..20: mol_type = other DNA
ctgtagtaccaactacatgg

SEQ ID NO: 11009 - DNA, 20 bp, synthetic construct
  source 1..20: mol_type = other DNA
cctgtagtaccaactacatg

SEQ ID NO: 11010 - DNA, 20 bp, synthetic construct
  source 1..20: mol_type = other DNA
gcctgtagtaccaactacat

SEQ ID NO: 11011 - DNA, 20 bp, synthetic construct
  source 1..20: mol_type = other DNA
cgcctgtagtaccaactaca

SEQ ID NO: 11012 - DNA, 20 bp, synthetic construct
  source 1..20: mol_type = other DNA
gcgcctgtagtaccaactac

SEQ ID NO: 11013 - DNA, 20 bp, synthetic construct
  source 1..20: mol_type = other DNA
tgcgcctgtagtaccaacta

SEQ ID NO: 11014 - DNA, 20 bp, synthetic construct
  source 1..20: mol_type = other DNA
gtgcgcctgtagtaccaact

SEQ ID NO: 11015 - DNA, 20 bp, synthetic construct
  source 1..20: mol_type = other DNA
tgtgcgcctgtagtaccaac

SEQ ID NO: 11016 - DNA, 20 bp, synthetic construct
  source 1..20: mol_type = other DNA
gtgtgcgcctgtagtaccaa

SEQ ID NO: 11017 - DNA, 20 bp, synthetic construct
  source 1..20: mol_type = other DNA
agtgtgcgcctgtagtacca

SEQ ID NO: 11018 - DNA, 20 bp, synthetic construct
  source 1..20: mol_type = other DNA
cagtgtgcgcctgtagtacc

SEQ ID NO: 11019 - DNA, 20 bp, synthetic construct
  source 1..20: mol_type = other DNA
acagtgtgcgcctgtagtac

SEQ ID NO: 11020 - DNA, 20 bp, synthetic construct
  source 1..20: mol_type = other DNA
cacagtgtgcgcctgtagta

SEQ ID NO: 11021 - DNA, 20 bp, synthetic construct
  source 1..20: mol_type = other DNA
tcacagtgtgcgcctgtagt

SEQ ID NO: 11022 - DNA, 20 bp, synthetic construct
  source 1..20: mol_type = other DNA
atcacagtgtgcgcctgtag

SEQ ID NO: 11023 - DNA, 20 bp, synthetic construct
  source 1..20: mol_type = other DNA
catcacagtgtgcgcctgta

SEQ ID NO: 11024 - DNA, 20 bp, synthetic construct
  source 1..20: mol_type = other DNA
gcatcacagtgtgcgcctgt

SEQ ID NO: 11025 - DNA, 20 bp, synthetic construct
  source 1..20: mol_type = other DNA
ggcatcacagtgtgcgcctg

SEQ ID NO: 11026 - DNA, 20 bp, synthetic construct
  source 1..20: mol_type = other DNA
gggcatcacagtgtgcgcct

SEQ ID NO: 11027 - DNA, 20 bp, synthetic construct
  source 1..20: mol_type = other DNA
tgggcatcacagtgtgcgcc

SEQ ID NO: 11028 - DNA, 20 bp, synthetic construct
  source 1..20: mol_type = other DNA
ctgggcatcacagtgtgcgc

SEQ ID NO: 11029 - DNA, 20 bp, synthetic construct
  source 1..20: mol_type = other DNA
gctgggcatcacagtgtgcg

SEQ ID NO: 11030 - DNA, 20 bp, synthetic construct
  source 1..20: mol_type = other DNA
agctgggcatcacagtgtgc

SEQ ID NO: 11031 - DNA, 20 bp, synthetic construct
  source 1..20: mol_type = other DNA
tagctgggcatcacagtgtg

SEQ ID NO: 11032 - DNA, 20 bp, synthetic construct
  source 1..20: mol_type = other DNA
ttagctgggcatcacagtgt

SEQ ID NO: 11033 - DNA, 20 bp, synthetic construct
  source 1..20: mol_type = other DNA
attagctgggcatcacagtg

SEQ ID NO: 11034 - DNA, 20 bp, synthetic construct
  source 1..20: mol_type = other DNA
aattagctgggcatcacagt

SEQ ID NO: 11035 - DNA, 20 bp, synthetic construct
  source 1..20: mol_type = other DNA
aaattagctgggcatcacag

SEQ ID NO: 11036 - DNA, 20 bp, synthetic construct
  source 1..20: mol_type = other DNA
aaaattagctgggcatcaca

SEQ ID NO: 11037 - DNA, 20 bp, synthetic construct
  source 1..20: mol_type = other DNA
aaaaattagctgggcatcac

SEQ ID NO: 11038 - DNA, 20 bp, synthetic construct
  source 1..20: mol_type = other DNA
caaaaattagctgggcatca

SEQ ID NO: 11039 - DNA, 20 bp, synthetic construct
  source 1..20: mol_type = other DNA
acaaaaattagctgggcatc

SEQ ID NO: 11040 - DNA, 20 bp, synthetic construct
  source 1..20: mol_type = other DNA
tacaaaaattagctgggcat

SEQ ID NO: 11041 - DNA, 20 bp, synthetic construct
  source 1..20: mol_type = other DNA
atacaaaaattagctgggca

SEQ ID NO: 11042 - DNA, 20 bp, synthetic construct
  source 1..20: mol_type = other DNA
aatacaaaaattagctgggc

SEQ ID NO: 11043 - DNA, 20 bp, synthetic construct
  source 1..20: mol_type = other DNA
aaatacaaaaattagctggg

SEQ ID NO: 11044 - DNA, 20 bp, synthetic construct
  source 1..20: mol_type = other DNA
aaaatacaaaaattagctgg

SEQ ID NO: 11045 - DNA, 20 bp, synthetic construct
  source 1..20: mol_type = other DNA
aaaaatacaaaaattagctg

SEQ ID NO: 11046 - DNA, 20 bp, synthetic construct
  source 1..20: mol_type = other DNA
taaaaatacaaaaattagct

SEQ ID NO: 11047 - DNA, 20 bp, synthetic construct
  source 1..20: mol_type = other DNA
ctaaaaatacaaaaattagc

SEQ ID NO: 11048 - DNA, 20 bp, synthetic construct
  source 1..20: mol_type = other DNA
actaaaaatacaaaaattag

SEQ ID NO: 11049 - DNA, 20 bp, synthetic construct
  source 1..20: mol_type = other DNA
tactaaaaatacaaaaatta

SEQ ID NO: 11050 - DNA, 20 bp, synthetic construct
  source 1..20: mol_type = other DNA
ctactaaaaatacaaaaatt

SEQ ID NO: 11051 - DNA, 20 bp, synthetic construct
  source 1..20: mol_type = other DNA
tctactaaaaatacaaaaat

SEQ ID NO: 11052 - DNA, 20 bp, synthetic construct
  source 1..20: mol_type = other DNA
ctctactaaaaatacaaaaa

SEQ ID NO: 11053 - DNA, 20 bp, synthetic construct
  source 1..20: mol_type = other DNA
tctctactaaaaatacaaaa

SEQ ID NO: 11054 - DNA, 20 bp, synthetic construct
  source 1..20: mol_type = other DNA
gtctctactaaaaatacaaa

SEQ ID NO: 11055 - DNA, 20 bp, synthetic construct
  source 1..20: mol_type = other DNA
cgtctctactaaaaatacaa

SEQ ID NO: 11056 - DNA, 20 bp, synthetic construct
  source 1..20: mol_type = other DNA
ccgtctctactaaaaataca

SEQ ID NO: 11057 - DNA, 20 bp, synthetic construct
  source 1..20: mol_type = other DNA
cccgtctctactaaaaatac

SEQ ID NO: 11058 - DNA, 20 bp, synthetic construct
  source 1..20: mol_type = other DNA
ccccgtctctactaaaaata

SEQ ID NO: 11059 - DNA, 20 bp, synthetic construct
  source 1..20: mol_type = other DNA
accccgtctctactaaaaat

SEQ ID NO: 11060 - DNA, 20 bp, synthetic construct
  source 1..20: mol_type = other DNA
aaccccgtctctactaaaaa

SEQ ID NO: 11061 - DNA, 20 bp, synthetic construct
  source 1..20: mol_type = other DNA
aaaccccgtctctactaaaa

SEQ ID NO: 11062 - DNA, 20 bp, synthetic construct
  source 1..20: mol_type = other DNA
gaaaccccgtctctactaaa

SEQ ID NO: 11063 - DNA, 20 bp, synthetic construct
  source 1..20: mol_type = other DNA
tgaaaccccgtctctactaa

SEQ ID NO: 11064 - DNA, 20 bp, synthetic construct
  source 1..20: mol_type = other DNA
gtgaaaccccgtctctacta

SEQ ID NO: 11065 - DNA, 20 bp, synthetic construct
  source 1..20: mol_type = other DNA
ggtgaaaccccgtctctact

SEQ ID NO: 11066 - DNA, 20 bp, synthetic construct
  source 1..20: mol_type = other DNA
tggtgaaaccccgtctctac

SEQ ID NO: 11067 - DNA, 20 bp, synthetic construct
  source 1..20: mol_type = other DNA
atggtgaaaccccgtctcta

SEQ ID NO: 11068 - DNA, 20 bp, synthetic construct
  source 1..20: mol_type = other DNA
catggtgaaaccccgtctct

SEQ ID NO: 11069 - DNA, 20 bp, synthetic construct
  source 1..20: mol_type = other DNA
acatggtgaaaccccgtctc

SEQ ID NO: 11070 - DNA, 20 bp, synthetic construct
  source 1..20: mol_type = other DNA
aacatggtgaaaccccgtct

SEQ ID NO: 11071 - DNA, 20 bp, synthetic construct
  source 1..20: mol_type = other DNA
caacatggtgaaaccccgtc

SEQ ID NO: 11072 - DNA, 20 bp, synthetic construct
  source 1..20: mol_type = other DNA
ccaacatggtgaaaccccgt

SEQ ID NO: 11073 - DNA, 20 bp, synthetic construct
  source 1..20: mol_type = other DNA
gccaacatggtgaaaccccg

SEQ ID NO: 11074 - DNA, 20 bp, synthetic construct
  source 1..20: mol_type = other DNA
ggccaacatggtgaaacccc

SEQ ID NO: 11075 - DNA, 20 bp, synthetic construct
  source 1..20: mol_type = other DNA
tggccaacatggtgaaaccc

SEQ ID NO: 11076 - DNA, 20 bp, synthetic construct
  source 1..20: mol_type = other DNA
ctggccaacatggtgaaacc

SEQ ID NO: 11077 - DNA, 20 bp, synthetic construct
  source 1..20: mol_type = other DNA
cctggccaacatggtgaaac

SEQ ID NO: 11078 - DNA, 20 bp, synthetic construct
  source 1..20: mol_type = other DNA
tcctggccaacatggtgaaa

SEQ ID NO: 11079 - DNA, 20 bp, synthetic construct
  source 1..20: mol_type = other DNA
atcctggccaacatggtgaa

SEQ ID NO: 11080 - DNA, 20 bp, synthetic construct
  source 1..20: mol_type = other DNA
catcctggccaacatggtga

SEQ ID NO: 11081 - DNA, 20 bp, synthetic construct
  source 1..20: mol_type = other DNA
ccatcctggccaacatggtg

SEQ ID NO: 11082 - DNA, 20 bp, synthetic construct
  source 1..20: mol_type = other DNA
accatcctggccaacatggt

SEQ ID NO: 11083 - DNA, 20 bp, synthetic construct
  source 1..20: mol_type = other DNA
caccatcctggccaacatgg

SEQ ID NO: 11084 - DNA, 20 bp, synthetic construct
  source 1..20: mol_type = other DNA
acaccatcctggccaacatg

SEQ ID NO: 11085 - DNA, 20 bp, synthetic construct
  source 1..20: mol_type = other DNA
gacaccatcctggccaacat

SEQ ID NO: 11086 - DNA, 20 bp, synthetic construct
  source 1..20: mol_type = other DNA
cgacaccatcctggccaaca

SEQ ID NO: 11087 - DNA, 20 bp, synthetic construct
  source 1..20: mol_type = other DNA
tcgacaccatcctggccaac

SEQ ID NO: 11088 - DNA, 20 bp, synthetic construct
  source 1..20: mol_type = other DNA
atcgacaccatcctggccaa

SEQ ID NO: 11089 - DNA, 20 bp, synthetic construct
  source 1..20: mol_type = other DNA
gatcgacaccatcctggcca

SEQ ID NO: 11090 - DNA, 20 bp, synthetic construct
  source 1..20: mol_type = other DNA
agatcgacaccatcctggcc

SEQ ID NO: 11091 - DNA, 20 bp, synthetic construct
  source 1..20: mol_type = other DNA
gagatcgacaccatcctggc

SEQ ID NO: 11092 - DNA, 20 bp, synthetic construct
  source 1..20: mol_type = other DNA
ggagatcgacaccatcctgg

SEQ ID NO: 11093 - DNA, 20 bp, synthetic construct
  source 1..20: mol_type = other DNA
aggagatcgacaccatcctg

SEQ ID NO: 11094 - DNA, 20 bp, synthetic construct
  source 1..20: mol_type = other DNA
caggagatcgacaccatcct

SEQ ID NO: 11095 - DNA, 20 bp, synthetic construct
  source 1..20: mol_type = other DNA
tcaggagatcgacaccatcc

SEQ ID NO: 11096 - DNA, 20 bp, synthetic construct
  source 1..20: mol_type = other DNA
gtcaggagatcgacaccatc

SEQ ID NO: 11097 - DNA, 20 bp, synthetic construct
  source 1..20: mol_type = other DNA
ggtcaggagatcgacaccat

SEQ ID NO: 11098 - DNA, 20 bp, synthetic construct
  source 1..20: mol_type = other DNA
aggtcaggagatcgacacca

SEQ ID NO: 11099 - DNA, 20 bp, synthetic construct
  source 1..20: mol_type = other DNA
aaggtcaggagatcgacacc

SEQ ID NO: 11100 - DNA, 20 bp, synthetic construct
  source 1..20: mol_type = other DNA
caaggtcaggagatcgacac

SEQ ID NO: 11101 - DNA, 20 bp, synthetic construct
  source 1..20: mol_type = other DNA
acaaggtcaggagatcgaca

SEQ ID NO: 11102 - DNA, 20 bp, synthetic construct
  source 1..20: mol_type = other DNA
cacaaggtcaggagatcgac

SEQ ID NO: 11103 - DNA, 20 bp, synthetic construct
  source 1..20: mol_type = other DNA
tcacaaggtcaggagatcga

SEQ ID NO: 11104 - DNA, 20 bp, synthetic construct
  source 1..20: mol_type = other DNA
atcacaaggtcaggagatcg

SEQ ID NO: 11105 - DNA, 20 bp, synthetic construct
  source 1..20: mol_type = other DNA
gatcacaaggtcaggagatc

SEQ ID NO: 11106 - DNA, 20 bp, synthetic construct
  source 1..20: mol_type = other DNA
ggatcacaaggtcaggagat

SEQ ID NO: 11107 - DNA, 20 bp, synthetic construct
  source 1..20: mol_type = other DNA
cggatcacaaggtcaggaga

SEQ ID NO: 11108 - DNA, 20 bp, synthetic construct
  source 1..20: mol_type = other DNA
gcggatcacaaggtcaggag

SEQ ID NO: 11109 - DNA, 20 bp, synthetic construct
  source 1..20: mol_type = other DNA
ggcggatcacaaggtcagga

SEQ ID NO: 11110 - DNA, 20 bp, synthetic construct
  source 1..20: mol_type = other DNA
gggcggatcacaaggtcagg

SEQ ID NO: 11111 - DNA, 20 bp, synthetic construct
  source 1..20: mol_type = other DNA
tgggcggatcacaaggtcag

SEQ ID NO: 11112 - DNA, 20 bp, synthetic construct
  source 1..20: mol_type = other DNA
ttgggcggatcacaaggtca

SEQ ID NO: 11113 - DNA, 20 bp, synthetic construct
  source 1..20: mol_type = other DNA
gttgggcggatcacaaggtc

SEQ ID NO: 11114 - DNA, 20 bp, synthetic construct
  source 1..20: mol_type = other DNA
tgttgggcggatcacaaggt

SEQ ID NO: 11115 - DNA, 20 bp, synthetic construct
  source 1..20: mol_type = other DNA
ctgttgggcggatcacaagg

SEQ ID NO: 11116 - DNA, 20 bp, synthetic construct
  source 1..20: mol_type = other DNA
gctgttgggcggatcacaag

SEQ ID NO: 11117 - DNA, 20 bp, synthetic construct
  source 1..20: mol_type = other DNA
ggctgttgggcggatcacaa

SEQ ID NO: 11118 - DNA, 20 bp, synthetic construct
  source 1..20: mol_type = other DNA
aggctgttgggcggatcaca

SEQ ID NO: 11119 - DNA, 20 bp, synthetic construct
  source 1..20: mol_type = other DNA
gaggctgttgggcggatcac

SEQ ID NO: 11120 - DNA, 20 bp, synthetic construct
  source 1..20: mol_type = other DNA
ggaggctgttgggcggatca

SEQ ID NO: 11121 - DNA, 20 bp, synthetic construct
  source 1..20: mol_type = other DNA
gggaggctgttgggcggatc

SEQ ID NO: 11122 - DNA, 20 bp, synthetic construct
  source 1..20: mol_type = other DNA
tgggaggctgttgggcggat

SEQ ID NO: 11123 - DNA, 20 bp, synthetic construct
  source 1..20: mol_type = other DNA
ttgggaggctgttgggcgga

SEQ ID NO: 11124 - DNA, 20 bp, synthetic construct
  source 1..20: mol_type = other DNA
tttgggaggctgttgggcgg

SEQ ID NO: 11125 - DNA, 20 bp, synthetic construct
  source 1..20: mol_type = other DNA
ctttgggaggctgttgggcg

SEQ ID NO: 11126 - DNA, 20 bp, synthetic construct
  source 1..20: mol_type = other DNA
actttgggaggctgttgggc

SEQ ID NO: 11127 - DNA, 20 bp, synthetic construct
  source 1..20: mol_type = other DNA
cactttgggaggctgttggg

SEQ ID NO: 11128 - DNA, 20 bp, synthetic construct
  source 1..20: mol_type = other DNA
gcactttgggaggctgttgg

SEQ ID NO: 11129 - DNA, 20 bp, synthetic construct
  source 1..20: mol_type = other DNA
agcactttgggaggctgttg

SEQ ID NO: 11130 - DNA, 20 bp, synthetic construct
  source 1..20: mol_type = other DNA
cagcactttgggaggctgtt

SEQ ID NO: 11131 - DNA, 20 bp, synthetic construct
  source 1..20: mol_type = other DNA
ccagcactttgggaggctgt

SEQ ID NO: 11132 - DNA, 20 bp, synthetic construct
  source 1..20: mol_type = other DNA
tccagcactttgggaggctg

SEQ ID NO: 11133 - DNA, 20 bp, synthetic construct
  source 1..20: mol_type = other DNA
ttccagcactttgggaggct

SEQ ID NO: 11134 - DNA, 20 bp, synthetic construct
  source 1..20: mol_type = other DNA
attccagcactttgggaggc

SEQ ID NO: 11135 - DNA, 20 bp, synthetic construct
  source 1..20: mol_type = other DNA
aattccagcactttgggagg

SEQ ID NO: 11136 - DNA, 20 bp, synthetic construct
  source 1..20: mol_type = other DNA
taattccagcactttgggag

SEQ ID NO: 11137 - DNA, 20 bp, synthetic construct
  source 1..20: mol_type = other DNA
gtaattccagcactttggga

SEQ ID NO: 11138 - DNA, 20 bp, synthetic construct
  source 1..20: mol_type = other DNA
tgtaattccagcactttggg

SEQ ID NO: 11139 - DNA, 20 bp, synthetic construct
  source 1..20: mol_type = other DNA
ctgtaattccagcactttgg

SEQ ID NO: 11140 - DNA, 20 bp, synthetic construct
  source 1..20: mol_type = other DNA
cctgtaattccagcactttg

SEQ ID NO: 11141 - DNA, 20 bp, synthetic construct
  source 1..20: mol_type = other DNA
gcctgtaattccagcacttt

SEQ ID NO: 11142 - DNA, 20 bp, synthetic construct
  source 1..20: mol_type = other DNA
cgcctgtaattccagcactt

SEQ ID NO: 11143 - DNA, 20 bp, synthetic construct
  source 1..20: mol_type = other DNA
acgcctgtaattccagcact

SEQ ID NO: 11144 - DNA, 20 bp, synthetic construct
  source 1..20: mol_type = other DNA
cacgcctgtaattccagcac

SEQ ID NO: 11145 - DNA, 20 bp, synthetic construct
  source 1..20: mol_type = other DNA
tcacgcctgtaattccagca

SEQ ID NO: 11146 - DNA, 20 bp, synthetic construct
  source 1..20: mol_type = other DNA
ctcacgcctgtaattccagc

SEQ ID NO: 11147 - DNA, 20 bp, synthetic construct
  source 1..20: mol_type = other DNA
gctcacgcctgtaattccag

SEQ ID NO: 11148 - DNA, 20 bp, synthetic construct
  source 1..20: mol_type = other DNA
agctcacgcctgtaattcca

SEQ ID NO: 11149 - DNA, 20 bp, synthetic construct
  source 1..20: mol_type = other DNA
cagctcacgcctgtaattcc

SEQ ID NO: 11150 - DNA, 20 bp, synthetic construct
  source 1..20: mol_type = other DNA
gcagctcacgcctgtaattc

SEQ ID NO: 11151 - DNA, 20 bp, synthetic construct
  source 1..20: mol_type = other DNA
agcagctcacgcctgtaatt

SEQ ID NO: 11152 - DNA, 20 bp, synthetic construct
  source 1..20: mol_type = other DNA
cagcagctcacgcctgtaat

SEQ ID NO: 11153 - DNA, 20 bp, synthetic construct
  source 1..20: mol_type = other DNA
gcagcagctcacgcctgtaa

SEQ ID NO: 11154 - DNA, 20 bp, synthetic construct
  source 1..20: mol_type = other DNA
cgcagcagctcacgcctgta

SEQ ID NO: 11155 - DNA, 20 bp, synthetic construct
  source 1..20: mol_type = other DNA
acgcagcagctcacgcctgt

SEQ ID NO: 11156 - DNA, 20 bp, synthetic construct
  source 1..20: mol_type = other DNA
gacgcagcagctcacgcctg

SEQ ID NO: 11157 - DNA, 20 bp, synthetic construct
  source 1..20: mol_type = other DNA
ggacgcagcagctcacgcct

SEQ ID NO: 11158 - DNA, 20 bp, synthetic construct
  source 1..20: mol_type = other DNA
cggacgcagcagctcacgcc

SEQ ID NO: 11159 - DNA, 20 bp, synthetic construct
  source 1..20: mol_type = other DNA
ccggacgcagcagctcacgc

SEQ ID NO: 11160 - DNA, 20 bp, synthetic construct
  source 1..20: mol_type = other DNA
gccggacgcagcagctcacg

SEQ ID NO: 11161 - DNA, 20 bp, synthetic construct
  source 1..20: mol_type = other DNA
ggccggacgcagcagctcac

SEQ ID NO: 11162 - DNA, 20 bp, synthetic construct
  source 1..20: mol_type = other DNA
gggccggacgcagcagctca

SEQ ID NO: 11163 - DNA, 20 bp, synthetic construct
  source 1..20: mol_type = other DNA
ggggccggacgcagcagctc

SEQ ID NO: 11164 - DNA, 20 bp, synthetic construct
  source 1..20: mol_type = other DNA
gggggccggacgcagcagct

SEQ ID NO: 11165 - DNA, 20 bp, synthetic construct
  source 1..20: mol_type = other DNA
agggggccggacgcagcagc

SEQ ID NO: 11166 - DNA, 20 bp, synthetic construct
  source 1..20: mol_type = other DNA
tagggggccggacgcagcag

SEQ ID NO: 11167 - DNA, 20 bp, synthetic construct
  source 1..20: mol_type = other DNA
ttagggggccggacgcagca

SEQ ID NO: 11168 - DNA, 20 bp, synthetic construct
  source 1..20: mol_type = other DNA
gttagggggccggacgcagc

SEQ ID NO: 11169 - DNA, 20 bp, synthetic construct
  source 1..20: mol_type = other DNA
tgttagggggccggacgcag

SEQ ID NO: 11170 - DNA, 20 bp, synthetic construct
  source 1..20: mol_type = other DNA
ctgttagggggccggacgca

SEQ ID NO: 11171 - DNA, 20 bp, synthetic construct
  source 1..20: mol_type = other DNA
cctgttagggggccggacgc

SEQ ID NO: 11172 - DNA, 20 bp, synthetic construct
  source 1..20: mol_type = other DNA
gcctgttagggggccggacg

SEQ ID NO: 11173 - DNA, 20 bp, synthetic construct
  source 1..20: mol_type = other DNA
agcctgttagggggccggac

SEQ ID NO: 11174 - DNA, 20 bp, synthetic construct
  source 1..20: mol_type = other DNA
aagcctgttagggggccgga

SEQ ID NO: 11175 - DNA, 20 bp, synthetic construct
  source 1..20: mol_type = other DNA
caagcctgttagggggccgg

SEQ ID NO: 11176 - DNA, 20 bp, synthetic construct
  source 1..20: mol_type = other DNA
acaagcctgttagggggccg

SEQ ID NO: 11177 - DNA, 20 bp, synthetic construct
  source 1..20: mol_type = other DNA
aacaagcctgttagggggcc

SEQ ID NO: 11178 - DNA, 20 bp, synthetic construct
  source 1..20: mol_type = other DNA
aaacaagcctgttagggggc

SEQ ID NO: 11179 - DNA, 20 bp, synthetic construct
  source 1..20: mol_type = other DNA
aaaacaagcctgttaggggg

SEQ ID NO: 11180 - DNA, 20 bp, synthetic construct
  source 1..20: mol_type = other DNA
taaaacaagcctgttagggg

SEQ ID NO: 11181 - DNA, 20 bp, synthetic construct
  source 1..20: mol_type = other DNA
ataaaacaagcctgttaggg

SEQ ID NO: 11182 - DNA, 20 bp, synthetic construct
  source 1..20: mol_type = other DNA
cataaaacaagcctgttagg

SEQ ID NO: 11183 - DNA, 20 bp, synthetic construct
  source 1..20: mol_type = other DNA
ccataaaacaagcctgttag

SEQ ID NO: 11184 - DNA, 20 bp, synthetic construct
  source 1..20: mol_type = other DNA
tccataaaacaagcctgtta

SEQ ID NO: 11185 - DNA, 20 bp, synthetic construct
  source 1..20: mol_type = other DNA
ttccataaaacaagcctgtt

SEQ ID NO: 11186 - DNA, 20 bp, synthetic construct
  source 1..20: mol_type = other DNA
attccataaaacaagcctgt

SEQ ID NO: 11187 - DNA, 20 bp, synthetic construct
  source 1..20: mol_type = other DNA
tattccataaaacaagcctg

SEQ ID NO: 11188 - DNA, 20 bp, synthetic construct
  source 1..20: mol_type = other DNA
gtattccataaaacaagcct

SEQ ID NO: 11189 - DNA, 20 bp, synthetic construct
  source 1..20: mol_type = other DNA
tgtattccataaaacaagcc

SEQ ID NO: 11190 - DNA, 20 bp, synthetic construct
  source 1..20: mol_type = other DNA
ctgtattccataaaacaagc

SEQ ID NO: 11191 - DNA, 20 bp, synthetic construct
  source 1..20: mol_type = other DNA
actgtattccataaaacaag

SEQ ID NO: 11192 - DNA, 20 bp, synthetic construct
  source 1..20: mol_type = other DNA
gactgtattccataaaacaa

SEQ ID NO: 11193 - DNA, 20 bp, synthetic construct
  source 1..20: mol_type = other DNA
tgactgtattccataaaaca

SEQ ID NO: 11194 - DNA, 20 bp, synthetic construct
  source 1..20: mol_type = other DNA
gtgactgtattccataaaac

SEQ ID NO: 11195 - DNA, 20 bp, synthetic construct
  source 1..20: mol_type = other DNA
cgtgactgtattccataaaa

SEQ ID NO: 11196 - DNA, 20 bp, synthetic construct
  source 1..20: mol_type = other DNA
ccgtgactgtattccataaa

SEQ ID NO: 11197 - DNA, 20 bp, synthetic construct
  source 1..20: mol_type = other DNA
tccgtgactgtattccataa

SEQ ID NO: 11198 - DNA, 20 bp, synthetic construct
  source 1..20: mol_type = other DNA
gtccgtgactgtattccata

SEQ ID NO: 11199 - DNA, 20 bp, synthetic construct
  source 1..20: mol_type = other DNA
tgtccgtgactgtattccat

SEQ ID NO: 11200 - DNA, 20 bp, synthetic construct
  source 1..20: mol_type = other DNA
ctgtccgtgactgtattcca

SEQ ID NO: 11201 - DNA, 20 bp, synthetic construct
  source 1..20: mol_type = other DNA
actgtccgtgactgtattcc

SEQ ID NO: 11202 - DNA, 20 bp, synthetic construct
  source 1..20: mol_type = other DNA
tactgtccgtgactgtattc

SEQ ID NO: 11203 - DNA, 20 bp, synthetic construct
  source 1..20: mol_type = other DNA
gtactgtccgtgactgtatt

SEQ ID NO: 11204 - DNA, 20 bp, synthetic construct
  source 1..20: mol_type = other DNA
agtactgtccgtgactgtat

SEQ ID NO: 11205 - DNA, 20 bp, synthetic construct
  source 1..20: mol_type = other DNA
aagtactgtccgtgactgta

SEQ ID NO: 11206 - DNA, 20 bp, synthetic construct
  source 1..20: mol_type = other DNA
caagtactgtccgtgactgt

SEQ ID NO: 11207 - DNA, 20 bp, synthetic construct
  source 1..20: mol_type = other DNA
gcaagtactgtccgtgactg

SEQ ID NO: 11208 - DNA, 20 bp, synthetic construct
  source 1..20: mol_type = other DNA
ggcaagtactgtccgtgact

SEQ ID NO: 11209 - DNA, 20 bp, synthetic construct
  source 1..20: mol_type = other DNA
gggcaagtactgtccgtgac

SEQ ID NO: 11210 - DNA, 20 bp, synthetic construct
  source 1..20: mol_type = other DNA
agggcaagtactgtccgtga

SEQ ID NO: 11211 - DNA, 20 bp, synthetic construct
  source 1..20: mol_type = other DNA
aagggcaagtactgtccgtg

SEQ ID NO: 11212 - DNA, 20 bp, synthetic construct
  source 1..20: mol_type = other DNA
gaagggcaagtactgtccgt

SEQ ID NO: 11213 - DNA, 20 bp, synthetic construct
  source 1..20: mol_type = other DNA
tgaagggcaagtactgtccg

SEQ ID NO: 11214 - DNA, 20 bp, synthetic construct
  source 1..20: mol_type = other DNA
ctgaagggcaagtactgtcc

SEQ ID NO: 11215 - DNA, 20 bp, synthetic construct
  source 1..20: mol_type = other DNA
cctgaagggcaagtactgtc

SEQ ID NO: 11216 - DNA, 20 bp, synthetic construct
  source 1..20: mol_type = other DNA
tcctgaagggcaagtactgt

SEQ ID NO: 11217 - DNA, 20 bp, synthetic construct
  source 1..20: mol_type = other DNA
atcctgaagggcaagtactg

SEQ ID NO: 11218 - DNA, 20 bp, synthetic construct
  source 1..20: mol_type = other DNA
tatcctgaagggcaagtact

SEQ ID NO: 11219 - DNA, 20 bp, synthetic construct
  source 1..20: mol_type = other DNA
atatcctgaagggcaagtac

SEQ ID NO: 11220 - DNA, 20 bp, synthetic construct
  source 1..20: mol_type = other DNA
gatatcctgaagggcaagta

SEQ ID NO: 11221 - DNA, 20 bp, synthetic construct
  source 1..20: mol_type = other DNA
agatatcctgaagggcaagt

SEQ ID NO: 11222 - DNA, 20 bp, synthetic construct
  source 1..20: mol_type = other DNA
aagatatcctgaagggcaag

SEQ ID NO: 11223 - DNA, 20 bp, synthetic construct
  source 1..20: mol_type = other DNA
aaagatatcctgaagggcaa

SEQ ID NO: 11224 - DNA, 20 bp, synthetic construct
  source 1..20: mol_type = other DNA
aaaagatatcctgaagggca

SEQ ID NO: 11225 - DNA, 20 bp, synthetic construct
  source 1..20: mol_type = other DNA
aaaaagatatcctgaagggc

SEQ ID NO: 11226 - DNA, 20 bp, synthetic construct
  source 1..20: mol_type = other DNA
caaaaagatatcctgaaggg

SEQ ID NO: 11227 - DNA, 20 bp, synthetic construct
  source 1..20: mol_type = other DNA
acaaaaagatatcctgaagg

SEQ ID NO: 11228 - DNA, 20 bp, synthetic construct
  source 1..20: mol_type = other DNA
tacaaaaagatatcctgaag

SEQ ID NO: 11229 - DNA, 20 bp, synthetic construct
  source 1..20: mol_type = other DNA
ttacaaaaagatatcctgaa

SEQ ID NO: 11230 - DNA, 20 bp, synthetic construct
  source 1..20: mol_type = other DNA
gttacaaaaagatatcctga

SEQ ID NO: 11231 - DNA, 20 bp, synthetic construct
  source 1..20: mol_type = other DNA
ggttacaaaaagatatcctg

SEQ ID NO: 11232 - DNA, 20 bp, synthetic construct
  source 1..20: mol_type = other DNA
aggttacaaaaagatatcct

SEQ ID NO: 11233 - DNA, 20 bp, synthetic construct
  source 1..20: mol_type = other DNA
aaggttacaaaaagatatcc

SEQ ID NO: 11234 - DNA, 20 bp, synthetic construct
  source 1..20: mol_type = other DNA
caaggttacaaaaagatatc

SEQ ID NO: 11235 - DNA, 20 bp, synthetic construct
  source 1..20: mol_type = other DNA
tcaaggttacaaaaagatat

SEQ ID NO: 11236 - DNA, 20 bp, synthetic construct
  source 1..20: mol_type = other DNA
atcaaggttacaaaaagata

SEQ ID NO: 11237 - DNA, 20 bp, synthetic construct
  source 1..20: mol_type = other DNA
aatcaaggttacaaaaagat

SEQ ID NO: 11238 - DNA, 20 bp, synthetic construct
  source 1..20: mol_type = other DNA
aaatcaaggttacaaaaaga

SEQ ID NO: 11239 - DNA, 20 bp, synthetic construct
  source 1..20: mol_type = other DNA
aaaatcaaggttacaaaaag

SEQ ID NO: 11240 - DNA, 20 bp, synthetic construct
  source 1..20: mol_type = other DNA
caaaatcaaggttacaaaaa

SEQ ID NO: 11241 - DNA, 20 bp, synthetic construct
  source 1..20: mol_type = other DNA
ccaaaatcaaggttacaaaa

SEQ ID NO: 11242 - DNA, 20 bp, synthetic construct
  source 1..20: mol_type = other DNA
gccaaaatcaaggttacaaa

SEQ ID NO: 11243 - DNA, 20 bp, synthetic construct
  source 1..20: mol_type = other DNA
agccaaaatcaaggttacaa

SEQ ID NO: 11244 - DNA, 20 bp, synthetic construct
  source 1..20: mol_type = other DNA
aagccaaaatcaaggttaca

SEQ ID NO: 11245 - DNA, 20 bp, synthetic construct
  source 1..20: mol_type = other DNA
caagccaaaatcaaggttac

SEQ ID NO: 11246 - DNA, 20 bp, synthetic construct
  source 1..20: mol_type = other DNA
gcaagccaaaatcaaggtta

SEQ ID NO: 11247 - DNA, 20 bp, synthetic construct
  source 1..20: mol_type = other DNA
agcaagccaaaatcaaggtt

SEQ ID NO: 11248 - DNA, 20 bp, synthetic construct
  source 1..20: mol_type = other DNA
tagcaagccaaaatcaaggt

SEQ ID NO: 11249 - DNA, 20 bp, synthetic construct
  source 1..20: mol_type = other DNA
ttagcaagccaaaatcaagg

SEQ ID NO: 11250 - DNA, 20 bp, synthetic construct
  source 1..20: mol_type = other DNA
tttagcaagccaaaatcaag

SEQ ID NO: 11251 - DNA, 20 bp, synthetic construct
  source 1..20: mol_type = other DNA
ttttagcaagccaaaatcaa

SEQ ID NO: 11252 - DNA, 20 bp, synthetic construct
  source 1..20: mol_type = other DNA
attttagcaagccaaaatca

SEQ ID NO: 11253 - DNA, 20 bp, synthetic construct
  source 1..20: mol_type = other DNA
tattttagcaagccaaaatc

SEQ ID NO: 11254 - DNA, 20 bp, synthetic construct
  source 1..20: mol_type = other DNA
ctattttagcaagccaaaat

SEQ ID NO: 11255 - DNA, 20 bp, synthetic construct
  source 1..20: mol_type = other DNA
cctattttagcaagccaaaa

SEQ ID NO: 11256 - DNA, 20 bp, synthetic construct
  source 1..20: mol_type = other DNA
tcctattttagcaagccaaa

SEQ ID NO: 11257 - DNA, 20 bp, synthetic construct
  source 1..20: mol_type = other DNA
ctcctattttagcaagccaa

SEQ ID NO: 11258 - DNA, 20 bp, synthetic construct
  source 1..20: mol_type = other DNA
cctcctattttagcaagcca

SEQ ID NO: 11259 - DNA, 20 bp, synthetic construct
  source 1..20: mol_type = other DNA
acctcctattttagcaagcc

SEQ ID NO: 11260 - DNA, 20 bp, synthetic construct
  source 1..20: mol_type = other DNA
gacctcctattttagcaagc

SEQ ID NO: 11261 - DNA, 20 bp, synthetic construct
  source 1..20: mol_type = other DNA
agacctcctattttagcaag

SEQ ID NO: 11262 - DNA, 20 bp, synthetic construct
  source 1..20: mol_type = other DNA
tagacctcctattttagcaa

SEQ ID NO: 11263 - DNA, 20 bp, synthetic construct
  source 1..20: mol_type = other DNA
atagacctcctattttagca

SEQ ID NO: 11264 - DNA, 20 bp, synthetic construct
  source 1..20: mol_type = other DNA
aatagacctcctattttagc

SEQ ID NO: 11265 - DNA, 20 bp, synthetic construct
  source 1..20: mol_type = other DNA
aaatagacctcctattttag

SEQ ID NO: 11266 - DNA, 20 bp, synthetic construct
  source 1..20: mol_type = other DNA
aaaatagacctcctatttta

SEQ ID NO: 11267 - DNA, 20 bp, synthetic construct
  source 1..20: mol_type = other DNA
gaaaatagacctcctatttt

SEQ ID NO: 11268 - DNA, 20 bp, synthetic construct
  source 1..20: mol_type = other DNA
agaaaatagacctcctattt

SEQ ID NO: 11269 - DNA, 20 bp, synthetic construct
  source 1..20: mol_type = other DNA
aagaaaatagacctcctatt

SEQ ID NO: 11270 - DNA, 20 bp, synthetic construct
  source 1..20: mol_type = other DNA
aaagaaaatagacctcctat

SEQ ID NO: 11271 - DNA, 20 bp, synthetic construct
  source 1..20: mol_type = other DNA
aaaagaaaatagacctccta

SEQ ID NO: 11272 - DNA, 20 bp, synthetic construct
  source 1..20: mol_type = other DNA
gaaaagaaaatagacctcct

SEQ ID NO: 11273 - DNA, 20 bp, synthetic construct
  source 1..20: mol_type = other DNA
agaaaagaaaatagacctcc

SEQ ID NO: 11274 - DNA, 20 bp, synthetic construct
  source 1..20: mol_type = other DNA
aagaaaagaaaatagacctc

SEQ ID NO: 11275 - DNA, 20 bp, synthetic construct
  source 1..20: mol_type = other DNA
aaagaaaagaaaatagacct

SEQ ID NO: 11276 - DNA, 20 bp, synthetic construct
  source 1..20: mol_type = other DNA
caaagaaaagaaaatagacc

SEQ ID NO: 11277 - DNA, 20 bp, synthetic construct
  source 1..20: mol_type = other DNA
acaaagaaaagaaaatagac

SEQ ID NO: 11278 - DNA, 20 bp, synthetic construct
  source 1..20: mol_type = other DNA
aacaaagaaaagaaaataga

SEQ ID NO: 11279 - DNA, 20 bp, synthetic construct
  source 1..20: mol_type = other DNA
aaacaaagaaaagaaaatag

SEQ ID NO: 11280 - DNA, 20 bp, synthetic construct
  source 1..20: mol_type = other DNA
aaaacaaagaaaagaaaata

SEQ ID NO: 11281 - DNA, 20 bp, synthetic construct
  source 1..20: mol_type = other DNA
aaaaacaaagaaaagaaaat

SEQ ID NO: 11282 - DNA, 20 bp, synthetic construct
  source 1..20: mol_type = other DNA
taaaaacaaagaaaagaaaa

SEQ ID NO: 11283 - DNA, 20 bp, synthetic construct
  source 1..20: mol_type = other DNA
ttaaaaacaaagaaaagaaa

SEQ ID NO: 11284 - DNA, 20 bp, synthetic construct
  source 1..20: mol_type = other DNA
attaaaaacaaagaaaagaa

SEQ ID NO: 11285 - DNA, 20 bp, synthetic construct
  source 1..20: mol_type = other DNA
cattaaaaacaaagaaaaga

SEQ ID NO: 11286 - DNA, 20 bp, synthetic construct
  source 1..20: mol_type = other DNA
acattaaaaacaaagaaaag

SEQ ID NO: 11287 - DNA, 20 bp, synthetic construct
  source 1..20: mol_type = other DNA
tacattaaaaacaaagaaaa

SEQ ID NO: 11288 - DNA, 20 bp, synthetic construct
  source 1..20: mol_type = other DNA
atacattaaaaacaaagaaa

SEQ ID NO: 11289 - DNA, 20 bp, synthetic construct
  source 1..20: mol_type = other DNA
catacattaaaaacaaagaa

SEQ ID NO: 11290 - DNA, 20 bp, synthetic construct
  source 1..20: mol_type = other DNA
acatacattaaaaacaaaga

SEQ ID NO: 11291 - DNA, 20 bp, synthetic construct
  source 1..20: mol_type = other DNA
cacatacattaaaaacaaag

SEQ ID NO: 11292 - DNA, 20 bp, synthetic construct
  source 1..20: mol_type = other DNA
ccacatacattaaaaacaaa

SEQ ID NO: 11293 - DNA, 20 bp, synthetic construct
  source 1..20: mol_type = other DNA
accacatacattaaaaacaa

SEQ ID NO: 11294 - DNA, 20 bp, synthetic construct
  source 1..20: mol_type = other DNA
aaccacatacattaaaaaca

SEQ ID NO: 11295 - DNA, 20 bp, synthetic construct
  source 1..20: mol_type = other DNA
gaaccacatacattaaaaac

SEQ ID NO: 11296 - DNA, 20 bp, synthetic construct
  source 1..20: mol_type = other DNA
agaaccacatacattaaaaa

SEQ ID NO: 11297 - DNA, 20 bp, synthetic construct
  source 1..20: mol_type = other DNA
cagaaccacatacattaaaa

SEQ ID NO: 11298 - DNA, 20 bp, synthetic construct
  source 1..20: mol_type = other DNA
acagaaccacatacattaaa

SEQ ID NO: 11299 - DNA, 20 bp, synthetic construct
  source 1..20: mol_type = other DNA
tacagaaccacatacattaa

SEQ ID NO: 11300 - DNA, 20 bp, synthetic construct
  source 1..20: mol_type = other DNA
gtacagaaccacatacatta

SEQ ID NO: 11301 - DNA, 20 bp, synthetic construct
  source 1..20: mol_type = other DNA
agtacagaaccacatacatt

SEQ ID NO: 11302 - DNA, 20 bp, synthetic construct
  source 1..20: mol_type = other DNA
aagtacagaaccacatacat

SEQ ID NO: 11303 - DNA, 20 bp, synthetic construct
  source 1..20: mol_type = other DNA
taagtacagaaccacataca

SEQ ID NO: 11304 - DNA, 20 bp, synthetic construct
  source 1..20: mol_type = other DNA
gtaagtacagaaccacatac

SEQ ID NO: 11305 - DNA, 20 bp, synthetic construct
  source 1..20: mol_type = other DNA
cgtaagtacagaaccacata

SEQ ID NO: 11306 - DNA, 20 bp, synthetic construct
  source 1..20: mol_type = other DNA
acgtaagtacagaaccacat

SEQ ID NO: 11307 - DNA, 20 bp, synthetic construct
  source 1..20: mol_type = other DNA
cacgtaagtacagaaccaca

SEQ ID NO: 11308 - DNA, 20 bp, synthetic construct
  source 1..20: mol_type = other DNA
ccacgtaagtacagaaccac

SEQ ID NO: 11309 - DNA, 20 bp, synthetic construct
  source 1..20: mol_type = other DNA
accacgtaagtacagaacca

SEQ ID NO: 11310 - DNA, 20 bp, synthetic construct
  source 1..20: mol_type = other DNA
caccacgtaagtacagaacc

SEQ ID NO: 11311 - DNA, 20 bp, synthetic construct
  source 1..20: mol_type = other DNA
acaccacgtaagtacagaac

SEQ ID NO: 11312 - DNA, 20 bp, synthetic construct
  source 1..20: mol_type = other DNA
cacaccacgtaagtacagaa

SEQ ID NO: 11313 - DNA, 20 bp, synthetic construct
  source 1..20: mol_type = other DNA
tcacaccacgtaagtacaga

SEQ ID NO: 11314 - DNA, 20 bp, synthetic construct
  source 1..20: mol_type = other DNA
ttcacaccacgtaagtacag

SEQ ID NO: 11315 - DNA, 20 bp, synthetic construct
  source 1..20: mol_type = other DNA
tttcacaccacgtaagtaca

SEQ ID NO: 11316 - DNA, 20 bp, synthetic construct
  source 1..20: mol_type = other DNA
atttcacaccacgtaagtac

SEQ ID NO: 11317 - DNA, 20 bp, synthetic construct
  source 1..20: mol_type = other DNA
gatttcacaccacgtaagta

SEQ ID NO: 11318 - DNA, 20 bp, synthetic construct
  source 1..20: mol_type = other DNA
agatttcacaccacgtaagt

SEQ ID NO: 11319 - DNA, 20 bp, synthetic construct
  source 1..20: mol_type = other DNA
tagatttcacaccacgtaag

SEQ ID NO: 11320 - DNA, 20 bp, synthetic construct
  source 1..20: mol_type = other DNA
gtagatttcacaccacgtaa

SEQ ID NO: 11321 - DNA, 20 bp, synthetic construct
  source 1..20: mol_type = other DNA
tgtagatttcacaccacgta

SEQ ID NO: 11322 - DNA, 20 bp, synthetic construct
  source 1..20: mol_type = other DNA
atgtagatttcacaccacgt

SEQ ID NO: 11323 - DNA, 20 bp, synthetic construct
  source 1..20: mol_type = other DNA
tatgtagatttcacaccacg

SEQ ID NO: 11324 - DNA, 20 bp, synthetic construct
  source 1..20: mol_type = other DNA
ttatgtagatttcacaccac

SEQ ID NO: 11325 - DNA, 20 bp, synthetic construct
  source 1..20: mol_type = other DNA
tttatgtagatttcacacca

SEQ ID NO: 11326 - DNA, 20 bp, synthetic construct
  source 1..20: mol_type = other DNA
atttatgtagatttcacacc

SEQ ID NO: 11327 - DNA, 20 bp, synthetic construct
  source 1..20: mol_type = other DNA
catttatgtagatttcacac

SEQ ID NO: 11328 - DNA, 20 bp, synthetic construct
  source 1..20: mol_type = other DNA
acatttatgtagatttcaca

SEQ ID NO: 11329 - DNA, 20 bp, synthetic construct
  source 1..20: mol_type = other DNA
aacatttatgtagatttcac

SEQ ID NO: 11330 - DNA, 20 bp, synthetic construct
  source 1..20: mol_type = other DNA
taacatttatgtagatttca

SEQ ID NO: 11331 - DNA, 20 bp, synthetic construct
  source 1..20: mol_type = other DNA
ttaacatttatgtagatttc

SEQ ID NO: 11332 - DNA, 20 bp, synthetic construct
  source 1..20: mol_type = other DNA
tttaacatttatgtagattt

SEQ ID NO: 11333 - DNA, 20 bp, synthetic construct
  source 1..20: mol_type = other DNA
atttaacatttatgtagatt

SEQ ID NO: 11334 - DNA, 20 bp, synthetic construct
  source 1..20: mol_type = other DNA
gatttaacatttatgtagat

SEQ ID NO: 11335 - DNA, 20 bp, synthetic construct
  source 1..20: mol_type = other DNA
ggatttaacatttatgtaga

SEQ ID NO: 11336 - DNA, 20 bp, synthetic construct
  source 1..20: mol_type = other DNA
aggatttaacatttatgtag

SEQ ID NO: 11337 - DNA, 20 bp, synthetic construct
  source 1..20: mol_type = other DNA
aaggatttaacatttatgta

SEQ ID NO: 11338 - DNA, 20 bp, synthetic construct
  source 1..20: mol_type = other DNA
caaggatttaacatttatgt

SEQ ID NO: 11339 - DNA, 20 bp, synthetic construct
  source 1..20: mol_type = other DNA
ccaaggatttaacatttatg

SEQ ID NO: 11340 - DNA, 20 bp, synthetic construct
  source 1..20: mol_type = other DNA
accaaggatttaacatttat

SEQ ID NO: 11341 - DNA, 20 bp, synthetic construct
  source 1..20: mol_type = other DNA
aaccaaggatttaacattta

SEQ ID NO: 11342 - DNA, 20 bp, synthetic construct
  source 1..20: mol_type = other DNA
taaccaaggatttaacattt

SEQ ID NO: 11343 - DNA, 20 bp, synthetic construct
  source 1..20: mol_type = other DNA
ataaccaaggatttaacatt

SEQ ID NO: 11344 - DNA, 20 bp, synthetic construct
  source 1..20: mol_type = other DNA
aataaccaaggatttaacat

SEQ ID NO: 11345 - DNA, 20 bp, synthetic construct
  source 1..20: mol_type = other DNA
aaataaccaaggatttaaca

SEQ ID NO: 11346 - DNA, 20 bp, synthetic construct
  source 1..20: mol_type = other DNA
taaataaccaaggatttaac

SEQ ID NO: 11347 - DNA, 20 bp, synthetic construct
  source 1..20: mol_type = other DNA
ataaataaccaaggatttaa

SEQ ID NO: 11348 - DNA, 20 bp, synthetic construct
  source 1..20: mol_type = other DNA
aataaataaccaaggattta

SEQ ID NO: 11349 - DNA, 20 bp, synthetic construct
  source 1..20: mol_type = other DNA
aaataaataaccaaggattt

SEQ ID NO: 11350 - DNA, 20 bp, synthetic construct
  source 1..20: mol_type = other DNA
taaataaataaccaaggatt

SEQ ID NO: 11351 - DNA, 20 bp, synthetic construct
  source 1..20: mol_type = other DNA
ataaataaataaccaaggat

SEQ ID NO: 11352 - DNA, 20 bp, synthetic construct
  source 1..20: mol_type = other DNA
aataaataaataaccaagga

SEQ ID NO: 11353 - DNA, 20 bp, synthetic construct
  source 1..20: mol_type = other DNA
aaataaataaataaccaagg

SEQ ID NO: 11354 - DNA, 20 bp, synthetic construct
  source 1..20: mol_type = other DNA
aaaataaataaataaccaag

SEQ ID NO: 11355 - DNA, 20 bp, synthetic construct
  source 1..20: mol_type = other DNA
caaaataaataaataaccaa

SEQ ID NO: 11356 - DNA, 20 bp, synthetic construct
  source 1..20: mol_type = other DNA
tcaaaataaataaataacca

SEQ ID NO: 11357 - DNA, 20 bp, synthetic construct
  source 1..20: mol_type = other DNA
ctcaaaataaataaataacc

SEQ ID NO: 11358 - DNA, 20 bp, synthetic construct
  source 1..20: mol_type = other DNA
tctcaaaataaataaataac

SEQ ID NO: 11359 - DNA, 20 bp, synthetic construct
  source 1..20: mol_type = other DNA
gtctcaaaataaataaataa

SEQ ID NO: 11360 - DNA, 20 bp, synthetic construct
  source 1..20: mol_type = other DNA
tgtctcaaaataaataaata

SEQ ID NO: 11361 - DNA, 20 bp, synthetic construct
  source 1..20: mol_type = other DNA
ctgtctcaaaataaataaat

SEQ ID NO: 11362 - DNA, 20 bp, synthetic construct
  source 1..20: mol_type = other DNA
tctgtctcaaaataaataaa

SEQ ID NO: 11363 - DNA, 20 bp, synthetic construct
  source 1..20: mol_type = other DNA
ctctgtctcaaaataaataa

SEQ ID NO: 11364 - DNA, 20 bp, synthetic construct
  source 1..20: mol_type = other DNA
actctgtctcaaaataaata

SEQ ID NO: 11365 - DNA, 20 bp, synthetic construct
  source 1..20: mol_type = other DNA
gactctgtctcaaaataaat

SEQ ID NO: 11366 - DNA, 20 bp, synthetic construct
  source 1..20: mol_type = other DNA
agactctgtctcaaaataaa

SEQ ID NO: 11367 - DNA, 20 bp, synthetic construct
  source 1..20: mol_type = other DNA
gagactctgtctcaaaataa

SEQ ID NO: 11368 - DNA, 20 bp, synthetic construct
  source 1..20: mol_type = other DNA
tgagactctgtctcaaaata

SEQ ID NO: 11369 - DNA, 20 bp, synthetic construct
  source 1..20: mol_type = other DNA
gtgagactctgtctcaaaat

SEQ ID NO: 11370 - DNA, 20 bp, synthetic construct
  source 1..20: mol_type = other DNA
agtgagactctgtctcaaaa

SEQ ID NO: 11371 - DNA, 20 bp, synthetic construct
  source 1..20: mol_type = other DNA
gagtgagactctgtctcaaa

SEQ ID NO: 11372 - DNA, 20 bp, synthetic construct
  source 1..20: mol_type = other DNA
agagtgagactctgtctcaa

SEQ ID NO: 11373 - DNA, 20 bp, synthetic construct
  source 1..20: mol_type = other DNA
cagagtgagactctgtctca

SEQ ID NO: 11374 - DNA, 20 bp, synthetic construct
  source 1..20: mol_type = other DNA
acagagtgagactctgtctc

SEQ ID NO: 11375 - DNA, 20 bp, synthetic construct
  source 1..20: mol_type = other DNA
gacagagtgagactctgtct

SEQ ID NO: 11376 - DNA, 20 bp, synthetic construct
  source 1..20: mol_type = other DNA
tgacagagtgagactctgtc

SEQ ID NO: 11377 - DNA, 20 bp, synthetic construct
  source 1..20: mol_type = other DNA
gtgacagagtgagactctgt

SEQ ID NO: 11378 - DNA, 20 bp, synthetic construct
  source 1..20: mol_type = other DNA
ggtgacagagtgagactctg

SEQ ID NO: 11379 - DNA, 20 bp, synthetic construct
  source 1..20: mol_type = other DNA
gggtgacagagtgagactct

SEQ ID NO: 11380 - DNA, 20 bp, synthetic construct
  source 1..20: mol_type = other DNA
tgggtgacagagtgagactc

SEQ ID NO: 11381 - DNA, 20 bp, synthetic construct
  source 1..20: mol_type = other DNA
ctgggtgacagagtgagact

SEQ ID NO: 11382 - DNA, 20 bp, synthetic construct
  source 1..20: mol_type = other DNA
actgggtgacagagtgagac

SEQ ID NO: 11383 - DNA, 20 bp, synthetic construct
  source 1..20: mol_type = other DNA
gactgggtgacagagtgaga

SEQ ID NO: 11384 - DNA, 20 bp, synthetic construct
  source 1..20: mol_type = other DNA
agactgggtgacagagtgag

SEQ ID NO: 11385 - DNA, 20 bp, synthetic construct
  source 1..20: mol_type = other DNA
cagactgggtgacagagtga

SEQ ID NO: 11386 - DNA, 20 bp, synthetic construct
  source 1..20: mol_type = other DNA
ccagactgggtgacagagtg

SEQ ID NO: 11387 - DNA, 20 bp, synthetic construct
  source 1..20: mol_type = other DNA
tccagactgggtgacagagt

SEQ ID NO: 11388 - DNA, 20 bp, synthetic construct
  source 1..20: mol_type = other DNA
ttccagactgggtgacagag

SEQ ID NO: 11389 - DNA, 20 bp, synthetic construct
  source 1..20: mol_type = other DNA
tttccagactgggtgacaga

SEQ ID NO: 11390 - DNA, 20 bp, synthetic construct
  source 1..20: mol_type = other DNA
ctttccagactgggtgacag

SEQ ID NO: 11391 - DNA, 20 bp, synthetic construct
  source 1..20: mol_type = other DNA
gctttccagactgggtgaca

SEQ ID NO: 11392 - DNA, 20 bp, synthetic construct
  source 1..20: mol_type = other DNA
tgctttccagactgggtgac

SEQ ID NO: 11393 - DNA, 20 bp, synthetic construct
  source 1..20: mol_type = other DNA
ctgctttccagactgggtga

SEQ ID NO: 11394 - DNA, 20 bp, synthetic construct
  source 1..20: mol_type = other DNA
actgctttccagactgggtg

SEQ ID NO: 11395 - DNA, 20 bp, synthetic construct
  source 1..20: mol_type = other DNA
cactgctttccagactgggt

SEQ ID NO: 11396 - DNA, 20 bp, synthetic construct
  source 1..20: mol_type = other DNA
ccactgctttccagactggg

SEQ ID NO: 11397 - DNA, 20 bp, synthetic construct
  source 1..20: mol_type = other DNA
gccactgctttccagactgg

SEQ ID NO: 11398 - DNA, 20 bp, synthetic construct
  source 1..20: mol_type = other DNA
tgccactgctttccagactg

SEQ ID NO: 11399 - DNA, 20 bp, synthetic construct
  source 1..20: mol_type = other DNA
atgccactgctttccagact

SEQ ID NO: 11400 - DNA, 20 bp, synthetic construct
  source 1..20: mol_type = other DNA
tatgccactgctttccagac

SEQ ID NO: 11401 - DNA, 20 bp, synthetic construct
  source 1..20: mol_type = other DNA
ttatgccactgctttccaga

SEQ ID NO: 11402 - DNA, 20 bp, synthetic construct
  source 1..20: mol_type = other DNA
attatgccactgctttccag

SEQ ID NO: 11403 - DNA, 20 bp, synthetic construct
  source 1..20: mol_type = other DNA
gattatgccactgctttcca

SEQ ID NO: 11404 - DNA, 20 bp, synthetic construct
  source 1..20: mol_type = other DNA
agattatgccactgctttcc

SEQ ID NO: 11405 - DNA, 20 bp, synthetic construct
  source 1..20: mol_type = other DNA
gagattatgccactgctttc

SEQ ID NO: 11406 - DNA, 20 bp, synthetic construct
  source 1..20: mol_type = other DNA
cgagattatgccactgcttt

SEQ ID NO: 11407 - DNA, 20 bp, synthetic construct
  source 1..20: mol_type = other DNA
ccgagattatgccactgctt

SEQ ID NO: 11408 - DNA, 20 bp, synthetic construct
  source 1..20: mol_type = other DNA
gccgagattatgccactgct

SEQ ID NO: 11409 - DNA, 20 bp, synthetic construct
  source 1..20: mol_type = other DNA
agccgagattatgccactgc

SEQ ID NO: 11410 - DNA, 20 bp, synthetic construct
  source 1..20: mol_type = other DNA
gagccgagattatgccactg

SEQ ID NO: 11411 - DNA, 20 bp, synthetic construct
  source 1..20: mol_type = other DNA
tgagccgagattatgccact

SEQ ID NO: 11412 - DNA, 20 bp, synthetic construct
  source 1..20: mol_type = other DNA
gtgagccgagattatgccac

SEQ ID NO: 11413 - DNA, 20 bp, synthetic construct
  source 1..20: mol_type = other DNA
agtgagccgagattatgcca

SEQ ID NO: 11414 - DNA, 20 bp, synthetic construct
  source 1..20: mol_type = other DNA
cagtgagccgagattatgcc

SEQ ID NO: 11415 - DNA, 20 bp, synthetic construct
  source 1..20: mol_type = other DNA
acagtgagccgagattatgc

SEQ ID NO: 11416 - DNA, 20 bp, synthetic construct
  source 1..20: mol_type = other DNA
tacagtgagccgagattatg

SEQ ID NO: 11417 - DNA, 20 bp, synthetic construct
  source 1..20: mol_type = other DNA
ttacagtgagccgagattat

SEQ ID NO: 11418 - DNA, 20 bp, synthetic construct
  source 1..20: mol_type = other DNA
gttacagtgagccgagatta

SEQ ID NO: 11419 - DNA, 20 bp, synthetic construct
  source 1..20: mol_type = other DNA
ggttacagtgagccgagatt

SEQ ID NO: 11420 - DNA, 20 bp, synthetic construct
  source 1..20: mol_type = other DNA
aggttacagtgagccgagat

SEQ ID NO: 11421 - DNA, 20 bp, synthetic construct
  source 1..20: mol_type = other DNA
gaggttacagtgagccgaga

SEQ ID NO: 11422 - DNA, 20 bp, synthetic construct
  source 1..20: mol_type = other DNA
ggaggttacagtgagccgag

SEQ ID NO: 11423 - DNA, 20 bp, synthetic construct
  source 1..20: mol_type = other DNA
tggaggttacagtgagccga

SEQ ID NO: 11424 - DNA, 20 bp, synthetic construct
  source 1..20: mol_type = other DNA
gtggaggttacagtgagccg

SEQ ID NO: 11425 - DNA, 20 bp, synthetic construct
  source 1..20: mol_type = other DNA
agtggaggttacagtgagcc

SEQ ID NO: 11426 - DNA, 20 bp, synthetic construct
  source 1..20: mol_type = other DNA
aagtggaggttacagtgagc

SEQ ID NO: 11427 - DNA, 20 bp, synthetic construct
  source 1..20: mol_type = other DNA
gaagtggaggttacagtgag

SEQ ID NO: 11428 - DNA, 20 bp, synthetic construct
  source 1..20: mol_type = other DNA
ggaagtggaggttacagtga

SEQ ID NO: 11429 - DNA, 20 bp, synthetic construct
  source 1..20: mol_type = other DNA
gggaagtggaggttacagtg

SEQ ID NO: 11430 - DNA, 20 bp, synthetic construct
  source 1..20: mol_type = other DNA
tgggaagtggaggttacagt

SEQ ID NO: 11431 - DNA, 20 bp, synthetic construct
  source 1..20: mol_type = other DNA
ctgggaagtggaggttacag

SEQ ID NO: 11432 - DNA, 20 bp, synthetic construct
  source 1..20: mol_type = other DNA
cctgggaagtggaggttaca

SEQ ID NO: 11433 - DNA, 20 bp, synthetic construct
  source 1..20: mol_type = other DNA
acctgggaagtggaggttac

SEQ ID NO: 11434 - DNA, 20 bp, synthetic construct
  source 1..20: mol_type = other DNA
aacctgggaagtggaggtta

SEQ ID NO: 11435 - DNA, 20 bp, synthetic construct
  source 1..20: mol_type = other DNA
gaacctgggaagtggaggtt

SEQ ID NO: 11436 - DNA, 20 bp, synthetic construct
  source 1..20: mol_type = other DNA
ggaacctgggaagtggaggt

SEQ ID NO: 11437 - DNA, 20 bp, synthetic construct
  source 1..20: mol_type = other DNA
tggaacctgggaagtggagg

SEQ ID NO: 11438 - DNA, 20 bp, synthetic construct
  source 1..20: mol_type = other DNA
ctggaacctgggaagtggag

SEQ ID NO: 11439 - DNA, 20 bp, synthetic construct
  source 1..20: mol_type = other DNA
actggaacctgggaagtgga

SEQ ID NO: 11440 - DNA, 20 bp, synthetic construct
  source 1..20: mol_type = other DNA
cactggaacctgggaagtgg

SEQ ID NO: 11441 - DNA, 20 bp, synthetic construct
  source 1..20: mol_type = other DNA
tcactggaacctgggaagtg

SEQ ID NO: 11442 - DNA, 20 bp, synthetic construct
  source 1..20: mol_type = other DNA
atcactggaacctgggaagt

SEQ ID NO: 11443 - DNA, 20 bp, synthetic construct
  source 1..20: mol_type = other DNA
aatcactggaacctgggaag

SEQ ID NO: 11444 - DNA, 20 bp, synthetic construct
  source 1..20: mol_type = other DNA
gaatcactggaacctgggaa

SEQ ID NO: 11445 - DNA, 20 bp, synthetic construct
  source 1..20: mol_type = other DNA
agaatcactggaacctggga

SEQ ID NO: 11446 - DNA, 20 bp, synthetic construct
  source 1..20: mol_type = other DNA
gagaatcactggaacctggg

SEQ ID NO: 11447 - DNA, 20 bp, synthetic construct
  source 1..20: mol_type = other DNA
ggagaatcactggaacctgg

SEQ ID NO: 11448 - DNA, 20 bp, synthetic construct
  source 1..20: mol_type = other DNA
aggagaatcactggaacctg

SEQ ID NO: 11449 - DNA, 20 bp, synthetic construct
  source 1..20: mol_type = other DNA
caggagaatcactggaacct

SEQ ID NO: 11450 - DNA, 20 bp, synthetic construct
  source 1..20: mol_type = other DNA
gcaggagaatcactggaacc

SEQ ID NO: 11451 - DNA, 20 bp, synthetic construct
  source 1..20: mol_type = other DNA
ggcaggagaatcactggaac

SEQ ID NO: 11452 - DNA, 20 bp, synthetic construct
  source 1..20: mol_type = other DNA
aggcaggagaatcactggaa

SEQ ID NO: 11453 - DNA, 20 bp, synthetic construct
  source 1..20: mol_type = other DNA
gaggcaggagaatcactgga

SEQ ID NO: 11454 - DNA, 20 bp, synthetic construct
  source 1..20: mol_type = other DNA
tgaggcaggagaatcactgg

SEQ ID NO: 11455 - DNA, 20 bp, synthetic construct
  source 1..20: mol_type = other DNA
ctgaggcaggagaatcactg

SEQ ID NO: 11456 - DNA, 20 bp, synthetic construct
  source 1..20: mol_type = other DNA
gctgaggcaggagaatcact

SEQ ID NO: 11457 - DNA, 20 bp, synthetic construct
  source 1..20: mol_type = other DNA
ggctgaggcaggagaatcac

SEQ ID NO: 11458 - DNA, 20 bp, synthetic construct
  source 1..20: mol_type = other DNA
aggctgaggcaggagaatca

SEQ ID NO: 11459 - DNA, 20 bp, synthetic construct
  source 1..20: mol_type = other DNA
gaggctgaggcaggagaatc

SEQ ID NO: 11460 - DNA, 20 bp, synthetic construct
  source 1..20: mol_type = other DNA
ggaggctgaggcaggagaat

SEQ ID NO: 11461 - DNA, 20 bp, synthetic construct
  source 1..20: mol_type = other DNA
aggaggctgaggcaggagaa

SEQ ID NO: 11462 - DNA, 20 bp, synthetic construct
  source 1..20: mol_type = other DNA
caggaggctgaggcaggaga

SEQ ID NO: 11463 - DNA, 20 bp, synthetic construct
  source 1..20: mol_type = other DNA
tcaggaggctgaggcaggag

SEQ ID NO: 11464 - DNA, 20 bp, synthetic construct
  source 1..20: mol_type = other DNA
ctcaggaggctgaggcagga

SEQ ID NO: 11465 - DNA, 20 bp, synthetic construct
  source 1..20: mol_type = other DNA
actcaggaggctgaggcagg

SEQ ID NO: 11466 - DNA, 20 bp, synthetic construct
  source 1..20: mol_type = other DNA
tactcaggaggctgaggcag

SEQ ID NO: 11467 - DNA, 20 bp, synthetic construct
  source 1..20: mol_type = other DNA
ctactcaggaggctgaggca

SEQ ID NO: 11468 - DNA, 20 bp, synthetic construct
  source 1..20: mol_type = other DNA
gctactcaggaggctgaggc

SEQ ID NO: 11469 - DNA, 20 bp, synthetic construct
  source 1..20: mol_type = other DNA
agctactcaggaggctgagg

SEQ ID NO: 11470 - DNA, 20 bp, synthetic construct
  source 1..20: mol_type = other DNA
cagctactcaggaggctgag

SEQ ID NO: 11471 - DNA, 20 bp, synthetic construct
  source 1..20: mol_type = other DNA
ccagctactcaggaggctga

SEQ ID NO: 11472 - DNA, 20 bp, synthetic construct
  source 1..20: mol_type = other DNA
cccagctactcaggaggctg

SEQ ID NO: 11473 - DNA, 20 bp, synthetic construct
  source 1..20: mol_type = other DNA
tcccagctactcaggaggct

SEQ ID NO: 11474 - DNA, 20 bp, synthetic construct
  source 1..20: mol_type = other DNA
atcccagctactcaggaggc

SEQ ID NO: 11475 - DNA, 20 bp, synthetic construct
  source 1..20: mol_type = other DNA
aatcccagctactcaggagg

SEQ ID NO: 11476 - DNA, 20 bp, synthetic construct
  source 1..20: mol_type = other DNA
taatcccagctactcaggag

SEQ ID NO: 11477 - DNA, 20 bp, synthetic construct
  source 1..20: mol_type = other DNA
gtaatcccagctactcagga

SEQ ID NO: 11478 - DNA, 20 bp, synthetic construct
  source 1..20: mol_type = other DNA
tgtaatcccagctactcagg

SEQ ID NO: 11479 - DNA, 20 bp, synthetic construct
  source 1..20: mol_type = other DNA
ctgtaatcccagctactcag

SEQ ID NO: 11480 - DNA, 20 bp, synthetic construct
  source 1..20: mol_type = other DNA
cctgtaatcccagctactca

SEQ ID NO: 11481 - DNA, 20 bp, synthetic construct
  source 1..20: mol_type = other DNA
gcctgtaatcccagctactc

SEQ ID NO: 11482 - DNA, 20 bp, synthetic construct
  source 1..20: mol_type = other DNA
tgcctgtaatcccagctact

SEQ ID NO: 11483 - DNA, 20 bp, synthetic construct
  source 1..20: mol_type = other DNA
atgcctgtaatcccagctac

SEQ ID NO: 11484 - DNA, 20 bp, synthetic construct
  source 1..20: mol_type = other DNA
catgcctgtaatcccagcta

SEQ ID NO: 11485 - DNA, 20 bp, synthetic construct
  source 1..20: mol_type = other DNA
gcatgcctgtaatcccagct

SEQ ID NO: 11486 - DNA, 20 bp, synthetic construct
  source 1..20: mol_type = other DNA
tgcatgcctgtaatcccagc

SEQ ID NO: 11487 - DNA, 20 bp, synthetic construct
  source 1..20: mol_type = other DNA
gtgcatgcctgtaatcccag

SEQ ID NO: 11488 - DNA, 20 bp, synthetic construct
  source 1..20: mol_type = other DNA
ggtgcatgcctgtaatccca

SEQ ID NO: 11489 - DNA, 20 bp, synthetic construct
  source 1..20: mol_type = other DNA
tggtgcatgcctgtaatccc

SEQ ID NO: 11490 - DNA, 20 bp, synthetic construct
  source 1..20: mol_type = other DNA
gtggtgcatgcctgtaatcc

SEQ ID NO: 11491 - DNA, 20 bp, synthetic construct
  source 1..20: mol_type = other DNA
agtggtgcatgcctgtaatc

SEQ ID NO: 11492 - DNA, 20 bp, synthetic construct
  source 1..20: mol_type = other DNA
tagtggtgcatgcctgtaat

SEQ ID NO: 11493 - DNA, 20 bp, synthetic construct
  source 1..20: mol_type = other DNA
gtagtggtgcatgcctgtaa

SEQ ID NO: 11494 - DNA, 20 bp, synthetic construct
  source 1..20: mol_type = other DNA
tgtagtggtgcatgcctgta

SEQ ID NO: 11495 - DNA, 20 bp, synthetic construct
  source 1..20: mol_type = other DNA
gtgtagtggtgcatgcctgt

SEQ ID NO: 11496 - DNA, 20 bp, synthetic construct
  source 1..20: mol_type = other DNA
ggtgtagtggtgcatgcctg

SEQ ID NO: 11497 - DNA, 20 bp, synthetic construct
  source 1..20: mol_type = other DNA
aggtgtagtggtgcatgcct

SEQ ID NO: 11498 - DNA, 20 bp, synthetic construct
  source 1..20: mol_type = other DNA
caggtgtagtggtgcatgcc

SEQ ID NO: 11499 - DNA, 20 bp, synthetic construct
  source 1..20: mol_type = other DNA
ccaggtgtagtggtgcatgc

SEQ ID NO: 11500 - DNA, 20 bp, synthetic construct
  source 1..20: mol_type = other DNA
gccaggtgtagtggtgcatg

SEQ ID NO: 11501 - DNA, 20 bp, synthetic construct
  source 1..20: mol_type = other DNA
tgccaggtgtagtggtgcat

SEQ ID NO: 11502 - DNA, 20 bp, synthetic construct
  source 1..20: mol_type = other DNA
ttgccaggtgtagtggtgca

SEQ ID NO: 11503 - DNA, 20 bp, synthetic construct
  source 1..20: mol_type = other DNA
tttgccaggtgtagtggtgc

SEQ ID NO: 11504 - DNA, 20 bp, synthetic construct
  source 1..20: mol_type = other DNA
atttgccaggtgtagtggtg

SEQ ID NO: 11505 - DNA, 20 bp, synthetic construct
  source 1..20: mol_type = other DNA
aatttgccaggtgtagtggt

SEQ ID NO: 11506 - DNA, 20 bp, synthetic construct
  source 1..20: mol_type = other DNA
aaatttgccaggtgtagtgg

SEQ ID NO: 11507 - DNA, 20 bp, synthetic construct
  source 1..20: mol_type = other DNA
aaaatttgccaggtgtagtg

SEQ ID NO: 11508 - DNA, 20 bp, synthetic construct
  source 1..20: mol_type = other DNA
aaaaatttgccaggtgtagt

SEQ ID NO: 11509 - DNA, 20 bp, synthetic construct
  source 1..20: mol_type = other DNA
caaaaatttgccaggtgtag

SEQ ID NO: 11510 - DNA, 20 bp, synthetic construct
  source 1..20: mol_type = other DNA
acaaaaatttgccaggtgta

SEQ ID NO: 11511 - DNA, 20 bp, synthetic construct
  source 1..20: mol_type = other DNA
tacaaaaatttgccaggtgt

SEQ ID NO: 11512 - DNA, 20 bp, synthetic construct
  source 1..20: mol_type = other DNA
atacaaaaatttgccaggtg

SEQ ID NO: 11513 - DNA, 20 bp, synthetic construct
  source 1..20: mol_type = other DNA
aatacaaaaatttgccaggt

SEQ ID NO: 11514 - DNA, 20 bp, synthetic construct
  source 1..20: mol_type = other DNA
aaatacaaaaatttgccagg

SEQ ID NO: 11515 - DNA, 20 bp, synthetic construct
  source 1..20: mol_type = other DNA
aaaatacaaaaatttgccag

SEQ ID NO: 11516 - DNA, 20 bp, synthetic construct
  source 1..20: mol_type = other DNA
aaaaatacaaaaatttgcca

SEQ ID NO: 11517 - DNA, 20 bp, synthetic construct
  source 1..20: mol_type = other DNA
aaaaaatacaaaaatttgcc

SEQ ID NO: 11518 - DNA, 20 bp, synthetic construct
  source 1..20: mol_type = other DNA
aaaaaaatacaaaaatttgc

SEQ ID NO: 11519 - DNA, 20 bp, synthetic construct
  source 1..20: mol_type = other DNA
aaaaaaaatacaaaaatttg

SEQ ID NO: 11520 - DNA, 20 bp, synthetic construct
  source 1..20: mol_type = other DNA
aaaaaaaaatacaaaaattt

SEQ ID NO: 11521 - DNA, 20 bp, synthetic construct
  source 1..20: mol_type = other DNA
taaaaaaaaatacaaaaatt

SEQ ID NO: 11522 - DNA, 20 bp, synthetic construct
  source 1..20: mol_type = other DNA
ctaaaaaaaaatacaaaaat

SEQ ID NO: 11523 - DNA, 20 bp, synthetic construct
  source 1..20: mol_type = other DNA
actaaaaaaaaatacaaaaa

SEQ ID NO: 11524 - DNA, 20 bp, synthetic construct
  source 1..20: mol_type = other DNA
tactaaaaaaaaatacaaaa

SEQ ID NO: 11525 - DNA, 20 bp, synthetic construct
  source 1..20: mol_type = other DNA
ctactaaaaaaaaatacaaa

SEQ ID NO: 11526 - DNA, 20 bp, synthetic construct
  source 1..20: mol_type = other DNA
tctactaaaaaaaaatacaa

SEQ ID NO: 11527 - DNA, 20 bp, synthetic construct
  source 1..20: mol_type = other DNA
ctctactaaaaaaaaataca

SEQ ID NO: 11528 - DNA, 20 bp, synthetic construct
  source 1..20: mol_type = other DNA
tctctactaaaaaaaaatac

SEQ ID NO: 11529 - DNA, 20 bp, synthetic construct
  source 1..20: mol_type = other DNA
atctctactaaaaaaaaata

SEQ ID NO: 11530 - DNA, 20 bp, synthetic construct
  source 1..20: mol_type = other DNA
catctctactaaaaaaaaat

SEQ ID NO: 11531 - DNA, 20 bp, synthetic construct
  source 1..20: mol_type = other DNA
ccatctctactaaaaaaaaa

SEQ ID NO: 11532 - DNA, 20 bp, synthetic construct
  source 1..20: mol_type = other DNA
cccatctctactaaaaaaaa

SEQ ID NO: 11533 - DNA, 20 bp, synthetic construct
  source 1..20: mol_type = other DNA
ccccatctctactaaaaaaa

SEQ ID NO: 11534 - DNA, 20 bp, synthetic construct
  source 1..20: mol_type = other DNA
accccatctctactaaaaaa

SEQ ID NO: 11535 - DNA, 20 bp, synthetic construct
  source 1..20: mol_type = other DNA
aaccccatctctactaaaaa

SEQ ID NO: 11536 - DNA, 20 bp, synthetic construct
  source 1..20: mol_type = other DNA
aaaccccatctctactaaaa

SEQ ID NO: 11537 - DNA, 20 bp, synthetic construct
  source 1..20: mol_type = other DNA
gaaaccccatctctactaaa

SEQ ID NO: 11538 - DNA, 20 bp, synthetic construct
  source 1..20: mol_type = other DNA
tgaaaccccatctctactaa

SEQ ID NO: 11539 - DNA, 20 bp, synthetic construct
  source 1..20: mol_type = other DNA
gtgaaaccccatctctacta

SEQ ID NO: 11540 - DNA, 20 bp, synthetic construct
  source 1..20: mol_type = other DNA
ggtgaaaccccatctctact

SEQ ID NO: 11541 - DNA, 20 bp, synthetic construct
  source 1..20: mol_type = other DNA
tggtgaaaccccatctctac

SEQ ID NO: 11542 - DNA, 20 bp, synthetic construct
  source 1..20: mol_type = other DNA
atggtgaaaccccatctcta

SEQ ID NO: 11543 - DNA, 20 bp, synthetic construct
  source 1..20: mol_type = other DNA
catggtgaaaccccatctct

SEQ ID NO: 11544 - DNA, 20 bp, synthetic construct
  source 1..20: mol_type = other DNA
acatggtgaaaccccatctc

SEQ ID NO: 11545 - DNA, 20 bp, synthetic construct
  source 1..20: mol_type = other DNA
aacatggtgaaaccccatct

SEQ ID NO: 11546 - DNA, 20 bp, synthetic construct
  source 1..20: mol_type = other DNA
caacatggtgaaaccccatc

SEQ ID NO: 11547 - DNA, 20 bp, synthetic construct
  source 1..20: mol_type = other DNA
ccaacatggtgaaaccccat

SEQ ID NO: 11548 - DNA, 20 bp, synthetic construct
  source 1..20: mol_type = other DNA
gccaacatggtgaaacccca

SEQ ID NO: 11549 - DNA, 20 bp, synthetic construct
  source 1..20: mol_type = other DNA
ggccaacatggtgaaacccc

SEQ ID NO: 11550 - DNA, 20 bp, synthetic construct
  source 1..20: mol_type = other DNA
tggccaacatggtgaaaccc

SEQ ID NO: 11551 - DNA, 20 bp, synthetic construct
  source 1..20: mol_type = other DNA
ctggccaacatggtgaaacc

SEQ ID NO: 11552 - DNA, 20 bp, synthetic construct
  source 1..20: mol_type = other DNA
cctggccaacatggtgaaac

SEQ ID NO: 11553 - DNA, 20 bp, synthetic construct
  source 1..20: mol_type = other DNA
gcctggccaacatggtgaaa

SEQ ID NO: 11554 - DNA, 20 bp, synthetic construct
  source 1..20: mol_type = other DNA
agcctggccaacatggtgaa

SEQ ID NO: 11555 - DNA, 20 bp, synthetic construct
  source 1..20: mol_type = other DNA
gagcctggccaacatggtga

SEQ ID NO: 11556 - DNA, 20 bp, synthetic construct
  source 1..20: mol_type = other DNA
cgagcctggccaacatggtg

SEQ ID NO: 11557 - DNA, 20 bp, synthetic construct
  source 1..20: mol_type = other DNA
acgagcctggccaacatggt

SEQ ID NO: 11558 - DNA, 20 bp, synthetic construct
  source 1..20: mol_type = other DNA
gacgagcctggccaacatgg

SEQ ID NO: 11559 - DNA, 20 bp, synthetic construct
  source 1..20: mol_type = other DNA
agacgagcctggccaacatg

SEQ ID NO: 11560 - DNA, 20 bp, synthetic construct
  source 1..20: mol_type = other DNA
aagacgagcctggccaacat

SEQ ID NO: 11561 - DNA, 20 bp, synthetic construct
  source 1..20: mol_type = other DNA
caagacgagcctggccaaca

SEQ ID NO: 11562 - DNA, 20 bp, synthetic construct
  source 1..20: mol_type = other DNA
tcaagacgagcctggccaac

SEQ ID NO: 11563 - DNA, 20 bp, synthetic construct
  source 1..20: mol_type = other DNA
ttcaagacgagcctggccaa

SEQ ID NO: 11564 - DNA, 20 bp, synthetic construct
  source 1..20: mol_type = other DNA
gttcaagacgagcctggcca

SEQ ID NO: 11565 - DNA, 20 bp, synthetic construct
  source 1..20: mol_type = other DNA
agttcaagacgagcctggcc

SEQ ID NO: 11566 - DNA, 20 bp, synthetic construct
  source 1..20: mol_type = other DNA
gagttcaagacgagcctggc

SEQ ID NO: 11567 - DNA, 20 bp, synthetic construct
  source 1..20: mol_type = other DNA
ggagttcaagacgagcctgg

SEQ ID NO: 11568 - DNA, 20 bp, synthetic construct
  source 1..20: mol_type = other DNA
aggagttcaagacgagcctg

SEQ ID NO: 11569 - DNA, 20 bp, synthetic construct
  source 1..20: mol_type = other DNA
caggagttcaagacgagcct

SEQ ID NO: 11570 - DNA, 20 bp, synthetic construct
  source 1..20: mol_type = other DNA
tcaggagttcaagacgagcc

SEQ ID NO: 11571 - DNA, 20 bp, synthetic construct
  source 1..20: mol_type = other DNA
gtcaggagttcaagacgagc

SEQ ID NO: 11572 - DNA, 20 bp, synthetic construct
  source 1..20: mol_type = other DNA
ggtcaggagttcaagacgag

SEQ ID NO: 11573 - DNA, 20 bp, synthetic construct
  source 1..20: mol_type = other DNA
aggtcaggagttcaagacga

SEQ ID NO: 11574 - DNA, 20 bp, synthetic construct
  source 1..20: mol_type = other DNA
aaggtcaggagttcaagacg

SEQ ID NO: 11575 - DNA, 20 bp, synthetic construct
  source 1..20: mol_type = other DNA
taaggtcaggagttcaagac

SEQ ID NO: 11576 - DNA, 20 bp, synthetic construct
  source 1..20: mol_type = other DNA
ctaaggtcaggagttcaaga

SEQ ID NO: 11577 - DNA, 20 bp, synthetic construct
  source 1..20: mol_type = other DNA
cctaaggtcaggagttcaag

SEQ ID NO: 11578 - DNA, 20 bp, synthetic construct
  source 1..20: mol_type = other DNA
acctaaggtcaggagttcaa

SEQ ID NO: 11579 - DNA, 20 bp, synthetic construct
  source 1..20: mol_type = other DNA
cacctaaggtcaggagttca

SEQ ID NO: 11580 - DNA, 20 bp, synthetic construct
  source 1..20: mol_type = other DNA
tcacctaaggtcaggagttc

SEQ ID NO: 11581 - DNA, 20 bp, synthetic construct
  source 1..20: mol_type = other DNA
atcacctaaggtcaggagtt

SEQ ID NO: 11582 - DNA, 20 bp, synthetic construct
  source 1..20: mol_type = other DNA
gatcacctaaggtcaggagt

SEQ ID NO: 11583 - DNA, 20 bp, synthetic construct
  source 1..20: mol_type = other DNA
agatcacctaaggtcaggag

SEQ ID NO: 11584 - DNA, 20 bp, synthetic construct
  source 1..20: mol_type = other DNA
cagatcacctaaggtcagga

SEQ ID NO: 11585 - DNA, 20 bp, synthetic construct
  source 1..20: mol_type = other DNA
gcagatcacctaaggtcagg

SEQ ID NO: 11586 - DNA, 20 bp, synthetic construct
  source 1..20: mol_type = other DNA
ggcagatcacctaaggtcag

SEQ ID NO: 11587 - DNA, 20 bp, synthetic construct
  source 1..20: mol_type = other DNA
aggcagatcacctaaggtca

SEQ ID NO: 11588 - DNA, 20 bp, synthetic construct
  source 1..20: mol_type = other DNA
caggcagatcacctaaggtc

SEQ ID NO: 11589 - DNA, 20 bp, synthetic construct
  source 1..20: mol_type = other DNA
acaggcagatcacctaaggt

SEQ ID NO: 11590 - DNA, 20 bp, synthetic construct
  source 1..20: mol_type = other DNA
gacaggcagatcacctaagg

SEQ ID NO: 11591 - DNA, 20 bp, synthetic construct
  source 1..20: mol_type = other DNA
agacaggcagatcacctaag

SEQ ID NO: 11592 - DNA, 20 bp, synthetic construct
  source 1..20: mol_type = other DNA
aagacaggcagatcacctaa

SEQ ID NO: 11593 - DNA, 20 bp, synthetic construct
  source 1..20: mol_type = other DNA
caagacaggcagatcaccta

SEQ ID NO: 11594 - DNA, 20 bp, synthetic construct
  source 1..20: mol_type = other DNA
ccaagacaggcagatcacct

SEQ ID NO: 11595 - DNA, 20 bp, synthetic construct
  source 1..20: mol_type = other DNA
gccaagacaggcagatcacc

SEQ ID NO: 11596 - DNA, 20 bp, synthetic construct
  source 1..20: mol_type = other DNA
ggccaagacaggcagatcac

SEQ ID NO: 11597 - DNA, 20 bp, synthetic construct
  source 1..20: mol_type = other DNA
aggccaagacaggcagatca

SEQ ID NO: 11598 - DNA, 20 bp, synthetic construct
  source 1..20: mol_type = other DNA
gaggccaagacaggcagatc

SEQ ID NO: 11599 - DNA, 20 bp, synthetic construct
  source 1..20: mol_type = other DNA
ggaggccaagacaggcagat

SEQ ID NO: 11600 - DNA, 20 bp, synthetic construct
  source 1..20: mol_type = other DNA
gggaggccaagacaggcaga

SEQ ID NO: 11601 - DNA, 20 bp, synthetic construct
  source 1..20: mol_type = other DNA
tgggaggccaagacaggcag

SEQ ID NO: 11602 - DNA, 20 bp, synthetic construct
  source 1..20: mol_type = other DNA
ttgggaggccaagacaggca

SEQ ID NO: 11603 - DNA, 20 bp, synthetic construct
  source 1..20: mol_type = other DNA
tttgggaggccaagacaggc

SEQ ID NO: 11604 - DNA, 20 bp, synthetic construct
  source 1..20: mol_type = other DNA
ctttgggaggccaagacagg

SEQ ID NO: 11605 - DNA, 20 bp, synthetic construct
  source 1..20: mol_type = other DNA
actttgggaggccaagacag

SEQ ID NO: 11606 - DNA, 20 bp, synthetic construct
  source 1..20: mol_type = other DNA
aactttgggaggccaagaca

SEQ ID NO: 11607 - DNA, 20 bp, synthetic construct
  source 1..20: mol_type = other DNA
aaactttgggaggccaagac

SEQ ID NO: 11608 - DNA, 20 bp, synthetic construct
  source 1..20: mol_type = other DNA
aaaactttgggaggccaaga

SEQ ID NO: 11609 - DNA, 20 bp, synthetic construct
  source 1..20: mol_type = other DNA
caaaactttgggaggccaag

SEQ ID NO: 11610 - DNA, 20 bp, synthetic construct
  source 1..20: mol_type = other DNA
ccaaaactttgggaggccaa

SEQ ID NO: 11611 - DNA, 20 bp, synthetic construct
  source 1..20: mol_type = other DNA
cccaaaactttgggaggcca

SEQ ID NO: 11612 - DNA, 20 bp, synthetic construct
  source 1..20: mol_type = other DNA
tcccaaaactttgggaggcc

SEQ ID NO: 11613 - DNA, 20 bp, synthetic construct
  source 1..20: mol_type = other DNA
atcccaaaactttgggaggc

SEQ ID NO: 11614 - DNA, 20 bp, synthetic construct
  source 1..20: mol_type = other DNA
aatcccaaaactttgggagg

SEQ ID NO: 11615 - DNA, 20 bp, synthetic construct
  source 1..20: mol_type = other DNA
taatcccaaaactttgggag

SEQ ID NO: 11616 - DNA, 20 bp, synthetic construct
  source 1..20: mol_type = other DNA
gtaatcccaaaactttggga

SEQ ID NO: 11617 - DNA, 20 bp, synthetic construct
  source 1..20: mol_type = other DNA
tgtaatcccaaaactttggg

SEQ ID NO: 11618 - DNA, 20 bp, synthetic construct
  source 1..20: mol_type = other DNA
ctgtaatcccaaaactttgg

SEQ ID NO: 11619 - DNA, 20 bp, synthetic construct
  source 1..20: mol_type = other DNA
gctgtaatcccaaaactttg

SEQ ID NO: 11620 - DNA, 20 bp, synthetic construct
  source 1..20: mol_type = other DNA
tgctgtaatcccaaaacttt

SEQ ID NO: 11621 - DNA, 20 bp, synthetic construct
  source 1..20: mol_type = other DNA
atgctgtaatcccaaaactt

SEQ ID NO: 11622 - DNA, 20 bp, synthetic construct
  source 1..20: mol_type = other DNA
catgctgtaatcccaaaact

SEQ ID NO: 11623 - DNA, 20 bp, synthetic construct
  source 1..20: mol_type = other DNA
tcatgctgtaatcccaaaac

SEQ ID NO: 11624 - DNA, 20 bp, synthetic construct
  source 1..20: mol_type = other DNA
ctcatgctgtaatcccaaaa

SEQ ID NO: 11625 - DNA, 20 bp, synthetic construct
  source 1..20: mol_type = other DNA
gctcatgctgtaatcccaaa

SEQ ID NO: 11626 - DNA, 20 bp, synthetic construct
  source 1..20: mol_type = other DNA
ggctcatgctgtaatcccaa

SEQ ID NO: 11627 - DNA, 20 bp, synthetic construct
  source 1..20: mol_type = other DNA
tggctcatgctgtaatccca

SEQ ID NO: 11628 - DNA, 20 bp, synthetic construct
  source 1..20: mol_type = other DNA
gtggctcatgctgtaatccc

SEQ ID NO: 11629 - DNA, 20 bp, synthetic construct
  source 1..20: mol_type = other DNA
agtggctcatgctgtaatcc

SEQ ID NO: 11630 - DNA, 20 bp, synthetic construct
  source 1..20: mol_type = other DNA
cagtggctcatgctgtaatc

SEQ ID NO: 11631 - DNA, 20 bp, synthetic construct
  source 1..20: mol_type = other DNA
gcagtggctcatgctgtaat

SEQ ID NO: 11632 - DNA, 20 bp, synthetic construct
  source 1..20: mol_type = other DNA
cgcagtggctcatgctgtaa

SEQ ID NO: 11633 - DNA, 20 bp, synthetic construct
  source 1..20: mol_type = other DNA
gcgcagtggctcatgctgta

SEQ ID NO: 11634 - DNA, 20 bp, synthetic construct
  source 1..20: mol_type = other DNA
ggcgcagtggctcatgctgt

SEQ ID NO: 11635 - DNA, 20 bp, synthetic construct
  source 1..20: mol_type = other DNA
aggcgcagtggctcatgctg

SEQ ID NO: 11636 - DNA, 20 bp, synthetic construct
  source 1..20: mol_type = other DNA
gaggcgcagtggctcatgct

SEQ ID NO: 11637 - DNA, 20 bp, synthetic construct
  source 1..20: mol_type = other DNA
cgaggcgcagtggctcatgc

SEQ ID NO: 11638 - DNA, 20 bp, synthetic construct
  source 1..20: mol_type = other DNA
gcgaggcgcagtggctcatg

SEQ ID NO: 11639 - DNA, 20 bp, synthetic construct
  source 1..20: mol_type = other DNA
ggcgaggcgcagtggctcat

SEQ ID NO: 11640 - DNA, 20 bp, synthetic construct
  source 1..20: mol_type = other DNA
aggcgaggcgcagtggctca

SEQ ID NO: 11641 - DNA, 20 bp, synthetic construct
  source 1..20: mol_type = other DNA
aaggcgaggcgcagtggctc

SEQ ID NO: 11642 - DNA, 20 bp, synthetic construct
  source 1..20: mol_type = other DNA
taaggcgaggcgcagtggct

SEQ ID NO: 11643 - DNA, 20 bp, synthetic construct
  source 1..20: mol_type = other DNA
ataaggcgaggcgcagtggc

SEQ ID NO: 11644 - DNA, 20 bp, synthetic construct
  source 1..20: mol_type = other DNA
aataaggcgaggcgcagtgg

SEQ ID NO: 11645 - DNA, 20 bp, synthetic construct
  source 1..20: mol_type = other DNA
aaataaggcgaggcgcagtg

SEQ ID NO: 11646 - DNA, 20 bp, synthetic construct
  source 1..20: mol_type = other DNA
aaaataaggcgaggcgcagt

SEQ ID NO: 11647 - DNA, 20 bp, synthetic construct
  source 1..20: mol_type = other DNA
aaaaataaggcgaggcgcag

SEQ ID NO: 11648 - DNA, 20 bp, synthetic construct
  source 1..20: mol_type = other DNA
aaaaaataaggcgaggcgca

SEQ ID NO: 11649 - DNA, 20 bp, synthetic construct
  source 1..20: mol_type = other DNA
aaaaaaataaggcgaggcgc

SEQ ID NO: 11650 - DNA, 20 bp, synthetic construct
  source 1..20: mol_type = other DNA
caaaaaaataaggcgaggcg

SEQ ID NO: 11651 - DNA, 20 bp, synthetic construct
  source 1..20: mol_type = other DNA
tcaaaaaaataaggcgaggc

SEQ ID NO: 11652 - DNA, 20 bp, synthetic construct
  source 1..20: mol_type = other DNA
ctcaaaaaaataaggcgagg

SEQ ID NO: 11653 - DNA, 20 bp, synthetic construct
  source 1..20: mol_type = other DNA
tctcaaaaaaataaggcgag

SEQ ID NO: 11654 - DNA, 20 bp, synthetic construct
  source 1..20: mol_type = other DNA
gtctcaaaaaaataaggcga

SEQ ID NO: 11655 - DNA, 20 bp, synthetic construct
  source 1..20: mol_type = other DNA
tgtctcaaaaaaataaggcg

SEQ ID NO: 11656 - DNA, 20 bp, synthetic construct
  source 1..20: mol_type = other DNA
ctgtctcaaaaaaataaggc

SEQ ID NO: 11657 - DNA, 20 bp, synthetic construct
  source 1..20: mol_type = other DNA
cctgtctcaaaaaaataagg

SEQ ID NO: 11658 - DNA, 20 bp, synthetic construct
  source 1..20: mol_type = other DNA
acctgtctcaaaaaaataag

SEQ ID NO: 11659 - DNA, 20 bp, synthetic construct
  source 1..20: mol_type = other DNA
aacctgtctcaaaaaaataa

SEQ ID NO: 11660 - DNA, 20 bp, synthetic construct
  source 1..20: mol_type = other DNA
gaacctgtctcaaaaaaata

SEQ ID NO: 11661 - DNA, 20 bp, synthetic construct
  source 1..20: mol_type = other DNA
agaacctgtctcaaaaaaat

SEQ ID NO: 11662 - DNA, 20 bp, synthetic construct
  source 1..20: mol_type = other DNA
tagaacctgtctcaaaaaaa

SEQ ID NO: 11663 - DNA, 20 bp, synthetic construct
  source 1..20: mol_type = other DNA
ctagaacctgtctcaaaaaa

SEQ ID NO: 11664 - DNA, 20 bp, synthetic construct
  source 1..20: mol_type = other DNA
gctagaacctgtctcaaaaa

SEQ ID NO: 11665 - DNA, 20 bp, synthetic construct
  source 1..20: mol_type = other DNA
agctagaacctgtctcaaaa

SEQ ID NO: 11666 - DNA, 20 bp, synthetic construct
  source 1..20: mol_type = other DNA
gagctagaacctgtctcaaa

SEQ ID NO: 11667 - DNA, 20 bp, synthetic construct
  source 1..20: mol_type = other DNA
agagctagaacctgtctcaa

SEQ ID NO: 11668 - DNA, 20 bp, synthetic construct
  source 1..20: mol_type = other DNA
cagagctagaacctgtctca

SEQ ID NO: 11669 - DNA, 20 bp, synthetic construct
  source 1..20: mol_type = other DNA
acagagctagaacctgtctc

SEQ ID NO: 11670 - DNA, 20 bp, synthetic construct
  source 1..20: mol_type = other DNA
gacagagctagaacctgtct

SEQ ID NO: 11671 - DNA, 20 bp, synthetic construct
  source 1..20: mol_type = other DNA
tgacagagctagaacctgtc

SEQ ID NO: 11672 - DNA, 20 bp, synthetic construct
  source 1..20: mol_type = other DNA
gtgacagagctagaacctgt

SEQ ID NO: 11673 - DNA, 20 bp, synthetic construct
  source 1..20: mol_type = other DNA
ggtgacagagctagaacctg

SEQ ID NO: 11674 - DNA, 20 bp, synthetic construct
  source 1..20: mol_type = other DNA
gggtgacagagctagaacct

SEQ ID NO: 11675 - DNA, 20 bp, synthetic construct
  source 1..20: mol_type = other DNA
tgggtgacagagctagaacc

SEQ ID NO: 11676 - DNA, 20 bp, synthetic construct
  source 1..20: mol_type = other DNA
ctgggtgacagagctagaac

SEQ ID NO: 11677 - DNA, 20 bp, synthetic construct
  source 1..20: mol_type = other DNA
cctgggtgacagagctagaa

SEQ ID NO: 11678 - DNA, 20 bp, synthetic construct
  source 1..20: mol_type = other DNA
gcctgggtgacagagctaga

SEQ ID NO: 11679 - DNA, 20 bp, synthetic construct
  source 1..20: mol_type = other DNA
cgcctgggtgacagagctag

SEQ ID NO: 11680 - DNA, 20 bp, synthetic construct
  source 1..20: mol_type = other DNA
ccgcctgggtgacagagcta

SEQ ID NO: 11681 - DNA, 20 bp, synthetic construct
  source 1..20: mol_type = other DNA
cccgcctgggtgacagagct

SEQ ID NO: 11682 - DNA, 20 bp, synthetic construct
  source 1..20: mol_type = other DNA
tcccgcctgggtgacagagc

SEQ ID NO: 11683 - DNA, 20 bp, synthetic construct
  source 1..20: mol_type = other DNA
ctcccgcctgggtgacagag

SEQ ID NO: 11684 - DNA, 20 bp, synthetic construct
  source 1..20: mol_type = other DNA
actcccgcctgggtgacaga

SEQ ID NO: 11685 - DNA, 20 bp, synthetic construct
  source 1..20: mol_type = other DNA
cactcccgcctgggtgacag

SEQ ID NO: 11686 - DNA, 20 bp, synthetic construct
  source 1..20: mol_type = other DNA
gcactcccgcctgggtgaca

SEQ ID NO: 11687 - DNA, 20 bp, synthetic construct
  source 1..20: mol_type = other DNA
tgcactcccgcctgggtgac

SEQ ID NO: 11688 - DNA, 20 bp, synthetic construct
  source 1..20: mol_type = other DNA
ctgcactcccgcctgggtga

SEQ ID NO: 11689 - DNA, 20 bp, synthetic construct
  source 1..20: mol_type = other DNA
actgcactcccgcctgggtg

SEQ ID NO: 11690 - DNA, 20 bp, synthetic construct
  source 1..20: mol_type = other DNA
cactgcactcccgcctgggt

SEQ ID NO: 11691 - DNA, 20 bp, synthetic construct
  source 1..20: mol_type = other DNA
ccactgcactcccgcctggg

SEQ ID NO: 11692 - DNA, 20 bp, synthetic construct
  source 1..20: mol_type = other DNA
accactgcactcccgcctgg

SEQ ID NO: 11693 - DNA, 20 bp, synthetic construct
  source 1..20: mol_type = other DNA
caccactgcactcccgcctg

SEQ ID NO: 11694 - DNA, 20 bp, synthetic construct
  source 1..20: mol_type = other DNA
gcaccactgcactcccgcct

SEQ ID NO: 11695 - DNA, 20 bp, synthetic construct
  source 1..20: mol_type = other DNA
ggcaccactgcactcccgcc

SEQ ID NO: 11696 - DNA, 20 bp, synthetic construct
  source 1..20: mol_type = other DNA
tggcaccactgcactcccgc

SEQ ID NO: 11697 - DNA, 20 bp, synthetic construct
  source 1..20: mol_type = other DNA
atggcaccactgcactcccg

SEQ ID NO: 11698 - DNA, 20 bp, synthetic construct
  source 1..20: mol_type = other DNA
gatggcaccactgcactccc

SEQ ID NO: 11699 - DNA, 20 bp, synthetic construct
  source 1..20: mol_type = other DNA
tgatggcaccactgcactcc

SEQ ID NO: 11700 - DNA, 20 bp, synthetic construct
  source 1..20: mol_type = other DNA
atgatggcaccactgcactc

SEQ ID NO: 11701 - DNA, 20 bp, synthetic construct
  source 1..20: mol_type = other DNA
catgatggcaccactgcact

SEQ ID NO: 11702 - DNA, 20 bp, synthetic construct
  source 1..20: mol_type = other DNA
ccatgatggcaccactgcac

SEQ ID NO: 11703 - DNA, 20 bp, synthetic construct
  source 1..20: mol_type = other DNA
gccatgatggcaccactgca

SEQ ID NO: 11704 - DNA, 20 bp, synthetic construct
  source 1..20: mol_type = other DNA
agccatgatggcaccactgc

SEQ ID NO: 11705 - DNA, 20 bp, synthetic construct
  source 1..20: mol_type = other DNA
gagccatgatggcaccactg

SEQ ID NO: 11706 - DNA, 20 bp, synthetic construct
  source 1..20: mol_type = other DNA
tgagccatgatggcaccact

SEQ ID NO: 11707 - DNA, 20 bp, synthetic construct
  source 1..20: mol_type = other DNA
atgagccatgatggcaccac

SEQ ID NO: 11708 - DNA, 20 bp, synthetic construct
  source 1..20: mol_type = other DNA
aatgagccatgatggcacca

SEQ ID NO: 11709 - DNA, 20 bp, synthetic construct
  source 1..20: mol_type = other DNA
caatgagccatgatggcacc

SEQ ID NO: 11710 - DNA, 20 bp, synthetic construct
  source 1..20: mol_type = other DNA
gcaatgagccatgatggcac

SEQ ID NO: 11711 - DNA, 20 bp, synthetic construct
  source 1..20: mol_type = other DNA
tgcaatgagccatgatggca

SEQ ID NO: 11712 - DNA, 20 bp, synthetic construct
  source 1..20: mol_type = other DNA
ttgcaatgagccatgatggc

SEQ ID NO: 11713 - DNA, 20 bp, synthetic construct
  source 1..20: mol_type = other DNA
gttgcaatgagccatgatgg

SEQ ID NO: 11714 - DNA, 20 bp, synthetic construct
  source 1..20: mol_type = other DNA
ggttgcaatgagccatgatg

SEQ ID NO: 11715 - DNA, 20 bp, synthetic construct
  source 1..20: mol_type = other DNA
aggttgcaatgagccatgat

SEQ ID NO: 11716 - DNA, 20 bp, synthetic construct
  source 1..20: mol_type = other DNA
gaggttgcaatgagccatga

SEQ ID NO: 11717 - DNA, 20 bp, synthetic construct
  source 1..20: mol_type = other DNA
cgaggttgcaatgagccatg

SEQ ID NO: 11718 - DNA, 20 bp, synthetic construct
  source 1..20: mol_type = other DNA
tcgaggttgcaatgagccat

SEQ ID NO: 11719 - DNA, 20 bp, synthetic construct
  source 1..20: mol_type = other DNA
ctcgaggttgcaatgagcca

SEQ ID NO: 11720 - DNA, 20 bp, synthetic construct
  source 1..20: mol_type = other DNA
actcgaggttgcaatgagcc

SEQ ID NO: 11721 - DNA, 20 bp, synthetic construct
  source 1..20: mol_type = other DNA
aactcgaggttgcaatgagc

SEQ ID NO: 11722 - DNA, 20 bp, synthetic construct
  source 1..20: mol_type = other DNA
gaactcgaggttgcaatgag

SEQ ID NO: 11723 - DNA, 20 bp, synthetic construct
  source 1..20: mol_type = other DNA
agaactcgaggttgcaatga

SEQ ID NO: 11724 - DNA, 20 bp, synthetic construct
  source 1..20: mol_type = other DNA
gagaactcgaggttgcaatg

SEQ ID NO: 11725 - DNA, 20 bp, synthetic construct
  source 1..20: mol_type = other DNA
tgagaactcgaggttgcaat

SEQ ID NO: 11726 - DNA, 20 bp, synthetic construct
  source 1..20: mol_type = other DNA
ctgagaactcgaggttgcaa

SEQ ID NO: 11727 - DNA, 20 bp, synthetic construct
  source 1..20: mol_type = other DNA
cctgagaactcgaggttgca

SEQ ID NO: 11728 - DNA, 20 bp, synthetic construct
  source 1..20: mol_type = other DNA
gcctgagaactcgaggttgc

SEQ ID NO: 11729 - DNA, 20 bp, synthetic construct
  source 1..20: mol_type = other DNA
ggcctgagaactcgaggttg

SEQ ID NO: 11730 - DNA, 20 bp, synthetic construct
  source 1..20: mol_type = other DNA
gggcctgagaactcgaggtt

SEQ ID NO: 11731 - DNA, 20 bp, synthetic construct
  source 1..20: mol_type = other DNA
tgggcctgagaactcgaggt

SEQ ID NO: 11732 - DNA, 20 bp, synthetic construct
  source 1..20: mol_type = other DNA
ttgggcctgagaactcgagg

SEQ ID NO: 11733 - DNA, 20 bp, synthetic construct
  source 1..20: mol_type = other DNA
cttgggcctgagaactcgag

SEQ ID NO: 11734 - DNA, 20 bp, synthetic construct
  source 1..20: mol_type = other DNA
acttgggcctgagaactcga

SEQ ID NO: 11735 - DNA, 20 bp, synthetic construct
  source 1..20: mol_type = other DNA
cacttgggcctgagaactcg

SEQ ID NO: 11736 - DNA, 20 bp, synthetic construct
  source 1..20: mol_type = other DNA
tcacttgggcctgagaactc

SEQ ID NO: 11737 - DNA, 20 bp, synthetic construct
  source 1..20: mol_type = other DNA
atcacttgggcctgagaact

SEQ ID NO: 11738 - DNA, 20 bp, synthetic construct
  source 1..20: mol_type = other DNA
gatcacttgggcctgagaac

SEQ ID NO: 11739 - DNA, 20 bp, synthetic construct
  source 1..20: mol_type = other DNA
ggatcacttgggcctgagaa

SEQ ID NO: 11740 - DNA, 20 bp, synthetic construct
  source 1..20: mol_type = other DNA
aggatcacttgggcctgaga

SEQ ID NO: 11741 - DNA, 20 bp, synthetic construct
  source 1..20: mol_type = other DNA
gaggatcacttgggcctgag

SEQ ID NO: 11742 - DNA, 20 bp, synthetic construct
  source 1..20: mol_type = other DNA
ggaggatcacttgggcctga

SEQ ID NO: 11743 - DNA, 20 bp, synthetic construct
  source 1..20: mol_type = other DNA
aggaggatcacttgggcctg

SEQ ID NO: 11744 - DNA, 20 bp, synthetic construct
  source 1..20: mol_type = other DNA
taggaggatcacttgggcct

SEQ ID NO: 11745 - DNA, 20 bp, synthetic construct
  source 1..20: mol_type = other DNA
ataggaggatcacttgggcc

SEQ ID NO: 11746 - DNA, 20 bp, synthetic construct
  source 1..20: mol_type = other DNA
gataggaggatcacttgggc

SEQ ID NO: 11747 - DNA, 20 bp, synthetic construct
  source 1..20: mol_type = other DNA
agataggaggatcacttggg

SEQ ID NO: 11748 - DNA, 20 bp, synthetic construct
  source 1..20: mol_type = other DNA
gagataggaggatcacttgg

SEQ ID NO: 11749 - DNA, 20 bp, synthetic construct
  source 1..20: mol_type = other DNA
tgagataggaggatcacttg

SEQ ID NO: 11750 - DNA, 20 bp, synthetic construct
  source 1..20: mol_type = other DNA
ctgagataggaggatcactt

SEQ ID NO: 11751 - DNA, 20 bp, synthetic construct
  source 1..20: mol_type = other DNA
gctgagataggaggatcact

SEQ ID NO: 11752 - DNA, 20 bp, synthetic construct
  source 1..20: mol_type = other DNA
ggctgagataggaggatcac

SEQ ID NO: 11753 - DNA, 20 bp, synthetic construct
  source 1..20: mol_type = other DNA
aggctgagataggaggatca

SEQ ID NO: 11754 - DNA, 20 bp, synthetic construct
  source 1..20: mol_type = other DNA
gaggctgagataggaggatc

SEQ ID NO: 11755 - DNA, 20 bp, synthetic construct
  source 1..20: mol_type = other DNA
ggaggctgagataggaggat

SEQ ID NO: 11756 - DNA, 20 bp, synthetic construct
  source 1..20: mol_type = other DNA
aggaggctgagataggagga

SEQ ID NO: 11757 - DNA, 20 bp, synthetic construct
  source 1..20: mol_type = other DNA
caggaggctgagataggagg

SEQ ID NO: 11758 - DNA, 20 bp, synthetic construct
  source 1..20: mol_type = other DNA
tcaggaggctgagataggag

SEQ ID NO: 11759 - DNA, 20 bp, synthetic construct
  source 1..20: mol_type = other DNA
ctcaggaggctgagatagga

SEQ ID NO: 11760 - DNA, 20 bp, synthetic construct
  source 1..20: mol_type = other DNA
actcaggaggctgagatagg

SEQ ID NO: 11761 - DNA, 20 bp, synthetic construct
  source 1..20: mol_type = other DNA
tactcaggaggctgagatag

SEQ ID NO: 11762 - DNA, 20 bp, synthetic construct
  source 1..20: mol_type = other DNA
ctactcaggaggctgagata

SEQ ID NO: 11763 - DNA, 20 bp, synthetic construct
  source 1..20: mol_type = other DNA
gctactcaggaggctgagat

SEQ ID NO: 11764 - DNA, 20 bp, synthetic construct
  source 1..20: mol_type = other DNA
agctactcaggaggctgaga

SEQ ID NO: 11765 - DNA, 20 bp, synthetic construct
  source 1..20: mol_type = other DNA
cagctactcaggaggctgag

SEQ ID NO: 11766 - DNA, 20 bp, synthetic construct
  source 1..20: mol_type = other DNA
ccagctactcaggaggctga

SEQ ID NO: 11767 - DNA, 20 bp, synthetic construct
  source 1..20: mol_type = other DNA
cccagctactcaggaggctg

SEQ ID NO: 11768 - DNA, 20 bp, synthetic construct
  source 1..20: mol_type = other DNA
tcccagctactcaggaggct

SEQ ID NO: 11769 - DNA, 20 bp, synthetic construct
  source 1..20: mol_type = other DNA
gtcccagctactcaggaggc

SEQ ID NO: 11770 - DNA, 20 bp, synthetic construct
  source 1..20: mol_type = other DNA
ggtcccagctactcaggagg

SEQ ID NO: 11771 - DNA, 20 bp, synthetic construct
  source 1..20: mol_type = other DNA
tggtcccagctactcaggag

SEQ ID NO: 11772 - DNA, 20 bp, synthetic construct
  source 1..20: mol_type = other DNA
gtggtcccagctactcagga

SEQ ID NO: 11773 - DNA, 20 bp, synthetic construct
  source 1..20: mol_type = other DNA
tgtggtcccagctactcagg

SEQ ID NO: 11774 - DNA, 20 bp, synthetic construct
  source 1..20: mol_type = other DNA
ctgtggtcccagctactcag

SEQ ID NO: 11775 - DNA, 20 bp, synthetic construct
  source 1..20: mol_type = other DNA
cctgtggtcccagctactca

SEQ ID NO: 11776 - DNA, 20 bp, synthetic construct
  source 1..20: mol_type = other DNA
gcctgtggtcccagctactc

SEQ ID NO: 11777 - DNA, 20 bp, synthetic construct
  source 1..20: mol_type = other DNA
tgcctgtggtcccagctact

SEQ ID NO: 11778 - DNA, 20 bp, synthetic construct
  source 1..20: mol_type = other DNA
atgcctgtggtcccagctac

SEQ ID NO: 11779 - DNA, 20 bp, synthetic construct
  source 1..20: mol_type = other DNA
catgcctgtggtcccagcta

SEQ ID NO: 11780 - DNA, 20 bp, synthetic construct
  source 1..20: mol_type = other DNA
gcatgcctgtggtcccagct

SEQ ID NO: 11781 - DNA, 20 bp, synthetic construct
  source 1..20: mol_type = other DNA
cgcatgcctgtggtcccagc

SEQ ID NO: 11782 - DNA, 20 bp, synthetic construct
  source 1..20: mol_type = other DNA
gcgcatgcctgtggtcccag

SEQ ID NO: 11783 - DNA, 20 bp, synthetic construct
  source 1..20: mol_type = other DNA
ggcgcatgcctgtggtccca

SEQ ID NO: 11784 - DNA, 20 bp, synthetic construct
  source 1..20: mol_type = other DNA
tggcgcatgcctgtggtccc

SEQ ID NO: 11785 - DNA, 20 bp, synthetic construct
  source 1..20: mol_type = other DNA
gtggcgcatgcctgtggtcc

SEQ ID NO: 11786 - DNA, 20 bp, synthetic construct
  source 1..20: mol_type = other DNA
agtggcgcatgcctgtggtc

SEQ ID NO: 11787 - DNA, 20 bp, synthetic construct
  source 1..20: mol_type = other DNA
tagtggcgcatgcctgtggt

SEQ ID NO: 11788 - DNA, 20 bp, synthetic construct
  source 1..20: mol_type = other DNA
atagtggcgcatgcctgtgg

SEQ ID NO: 11789 - DNA, 20 bp, synthetic construct
  source 1..20: mol_type = other DNA
catagtggcgcatgcctgtg

SEQ ID NO: 11790 - DNA, 20 bp, synthetic construct
  source 1..20: mol_type = other DNA
gcatagtggcgcatgcctgt

SEQ ID NO: 11791 - DNA, 20 bp, synthetic construct
  source 1..20: mol_type = other DNA
ggcatagtggcgcatgcctg

SEQ ID NO: 11792 - DNA, 20 bp, synthetic construct
  source 1..20: mol_type = other DNA
gggcatagtggcgcatgcct

SEQ ID NO: 11793 - DNA, 20 bp, synthetic construct
  source 1..20: mol_type = other DNA
tgggcatagtggcgcatgcc

SEQ ID NO: 11794 - DNA, 20 bp, synthetic construct
  source 1..20: mol_type = other DNA
ctgggcatagtggcgcatgc

SEQ ID NO: 11795 - DNA, 20 bp, synthetic construct
  source 1..20: mol_type = other DNA
gctgggcatagtggcgcatg

SEQ ID NO: 11796 - DNA, 20 bp, synthetic construct
  source 1..20: mol_type = other DNA
tgctgggcatagtggcgcat

SEQ ID NO: 11797 - DNA, 20 bp, synthetic construct
  source 1..20: mol_type = other DNA
ttgctgggcatagtggcgca

SEQ ID NO: 11798 - DNA, 20 bp, synthetic construct
  source 1..20: mol_type = other DNA
tttgctgggcatagtggcgc

SEQ ID NO: 11799 - DNA, 20 bp, synthetic construct
  source 1..20: mol_type = other DNA
ttttgctgggcatagtggcg

SEQ ID NO: 11800 - DNA, 20 bp, synthetic construct
  source 1..20: mol_type = other DNA
attttgctgggcatagtggc

SEQ ID NO: 11801 - DNA, 20 bp, synthetic construct
  source 1..20: mol_type = other DNA
aattttgctgggcatagtgg

SEQ ID NO: 11802 - DNA, 20 bp, synthetic construct
  source 1..20: mol_type = other DNA
aaattttgctgggcatagtg

SEQ ID NO: 11803 - DNA, 20 bp, synthetic construct
  source 1..20: mol_type = other DNA
aaaattttgctgggcatagt

SEQ ID NO: 11804 - DNA, 20 bp, synthetic construct
  source 1..20: mol_type = other DNA
aaaaattttgctgggcatag

SEQ ID NO: 11805 - DNA, 20 bp, synthetic construct
  source 1..20: mol_type = other DNA
caaaaattttgctgggcata

SEQ ID NO: 11806 - DNA, 20 bp, synthetic construct
  source 1..20: mol_type = other DNA
acaaaaattttgctgggcat

SEQ ID NO: 11807 - DNA, 20 bp, synthetic construct
  source 1..20: mol_type = other DNA
aacaaaaattttgctgggca

SEQ ID NO: 11808 - DNA, 20 bp, synthetic construct
  source 1..20: mol_type = other DNA
aaacaaaaattttgctgggc

SEQ ID NO: 11809 - DNA, 20 bp, synthetic construct
  source 1..20: mol_type = other DNA
gaaacaaaaattttgctggg

SEQ ID NO: 11810 - DNA, 20 bp, synthetic construct
  source 1..20: mol_type = other DNA
tgaaacaaaaattttgctgg

SEQ ID NO: 11811 - DNA, 20 bp, synthetic construct
  source 1..20: mol_type = other DNA
gtgaaacaaaaattttgctg

SEQ ID NO: 11812 - DNA, 20 bp, synthetic construct
  source 1..20: mol_type = other DNA
agtgaaacaaaaattttgct

SEQ ID NO: 11813 - DNA, 20 bp, synthetic construct
  source 1..20: mol_type = other DNA
gagtgaaacaaaaattttgc

SEQ ID NO: 11814 - DNA, 20 bp, synthetic construct
  source 1..20: mol_type = other DNA
agagtgaaacaaaaattttg

SEQ ID NO: 11815 - DNA, 20 bp, synthetic construct
  source 1..20: mol_type = other DNA
cagagtgaaacaaaaatttt

SEQ ID NO: 11816 - DNA, 20 bp, synthetic construct
  source 1..20: mol_type = other DNA
acagagtgaaacaaaaattt

SEQ ID NO: 11817 - DNA, 20 bp, synthetic construct
  source 1..20: mol_type = other DNA
aacagagtgaaacaaaaatt

SEQ ID NO: 11818 - DNA, 20 bp, synthetic construct
  source 1..20: mol_type = other DNA
caacagagtgaaacaaaaat

SEQ ID NO: 11819 - DNA, 20 bp, synthetic construct
  source 1..20: mol_type = other DNA
gcaacagagtgaaacaaaaa

SEQ ID NO: 11820 - DNA, 20 bp, synthetic construct
  source 1..20: mol_type = other DNA
ggcaacagagtgaaacaaaa

SEQ ID NO: 11821 - DNA, 20 bp, synthetic construct
  source 1..20: mol_type = other DNA
aggcaacagagtgaaacaaa

SEQ ID NO: 11822 - DNA, 20 bp, synthetic construct
  source 1..20: mol_type = other DNA
taggcaacagagtgaaacaa

SEQ ID NO: 11823 - DNA, 20 bp, synthetic construct
  source 1..20: mol_type = other DNA
ctaggcaacagagtgaaaca

SEQ ID NO: 11824 - DNA, 20 bp, synthetic construct
  source 1..20: mol_type = other DNA
cctaggcaacagagtgaaac

SEQ ID NO: 11825 - DNA, 20 bp, synthetic construct
  source 1..20: mol_type = other DNA
ccctaggcaacagagtgaaa

SEQ ID NO: 11826 - DNA, 20 bp, synthetic construct
  source 1..20: mol_type = other DNA
accctaggcaacagagtgaa

SEQ ID NO: 11827 - DNA, 20 bp, synthetic construct
  source 1..20: mol_type = other DNA
caccctaggcaacagagtga

SEQ ID NO: 11828 - DNA, 20 bp, synthetic construct
  source 1..20: mol_type = other DNA
ccaccctaggcaacagagtg

SEQ ID NO: 11829 - DNA, 20 bp, synthetic construct
  source 1..20: mol_type = other DNA
cccaccctaggcaacagagt

SEQ ID NO: 11830 - DNA, 20 bp, synthetic construct
  source 1..20: mol_type = other DNA
ccccaccctaggcaacagag

SEQ ID NO: 11831 - DNA, 20 bp, synthetic construct
  source 1..20: mol_type = other DNA
accccaccctaggcaacaga

SEQ ID NO: 11832 - DNA, 20 bp, synthetic construct
  source 1..20: mol_type = other DNA
caccccaccctaggcaacag

SEQ ID NO: 11833 - DNA, 20 bp, synthetic construct
  source 1..20: mol_type = other DNA
gcaccccaccctaggcaaca

SEQ ID NO: 11834 - DNA, 20 bp, synthetic construct
  source 1..20: mol_type = other DNA
tgcaccccaccctaggcaac

SEQ ID NO: 11835 - DNA, 20 bp, synthetic construct
  source 1..20: mol_type = other DNA
ctgcaccccaccctaggcaa

SEQ ID NO: 11836 - DNA, 20 bp, synthetic construct
  source 1..20: mol_type = other DNA
actgcaccccaccctaggca

SEQ ID NO: 11837 - DNA, 20 bp, synthetic construct
  source 1..20: mol_type = other DNA
cactgcaccccaccctaggc

SEQ ID NO: 11838 - DNA, 20 bp, synthetic construct
  source 1..20: mol_type = other DNA
ccactgcaccccaccctagg

SEQ ID NO: 11839 - DNA, 20 bp, synthetic construct
  source 1..20: mol_type = other DNA
gccactgcaccccaccctag

SEQ ID NO: 11840 - DNA, 20 bp, synthetic construct
  source 1..20: mol_type = other DNA
tgccactgcaccccacccta

SEQ ID NO: 11841 - DNA, 20 bp, synthetic construct
  source 1..20: mol_type = other DNA
ctgccactgcaccccaccct

SEQ ID NO: 11842 - DNA, 20 bp, synthetic construct
  source 1..20: mol_type = other DNA
cctgccactgcaccccaccc

SEQ ID NO: 11843 - DNA, 20 bp, synthetic construct
  source 1..20: mol_type = other DNA
tcctgccactgcaccccacc

SEQ ID NO: 11844 - DNA, 20 bp, synthetic construct
  source 1..20: mol_type = other DNA
atcctgccactgcaccccac

SEQ ID NO: 11845 - DNA, 20 bp, synthetic construct
  source 1..20: mol_type = other DNA
tatcctgccactgcacccca

SEQ ID NO: 11846 - DNA, 20 bp, synthetic construct
  source 1..20: mol_type = other DNA
atatcctgccactgcacccc

SEQ ID NO: 11847 - DNA, 20 bp, synthetic construct
  source 1..20: mol_type = other DNA
gatatcctgccactgcaccc

SEQ ID NO: 11848 - DNA, 20 bp, synthetic construct
  source 1..20: mol_type = other DNA
cgatatcctgccactgcacc

SEQ ID NO: 11849 - DNA, 20 bp, synthetic construct
  source 1..20: mol_type = other DNA
ccgatatcctgccactgcac

SEQ ID NO: 11850 - DNA, 20 bp, synthetic construct
  source 1..20: mol_type = other DNA
gccgatatcctgccactgca

SEQ ID NO: 11851 - DNA, 20 bp, synthetic construct
  source 1..20: mol_type = other DNA
agccgatatcctgccactgc

SEQ ID NO: 11852 - DNA, 20 bp, synthetic construct
  source 1..20: mol_type = other DNA
gagccgatatcctgccactg

SEQ ID NO: 11853 - DNA, 20 bp, synthetic construct
  source 1..20: mol_type = other DNA
tgagccgatatcctgccact

SEQ ID NO: 11854 - DNA, 20 bp, synthetic construct
  source 1..20: mol_type = other DNA
ctgagccgatatcctgccac

SEQ ID NO: 11855 - DNA, 20 bp, synthetic construct
  source 1..20: mol_type = other DNA
actgagccgatatcctgcca

SEQ ID NO: 11856 - DNA, 20 bp, synthetic construct
  source 1..20: mol_type = other DNA
cactgagccgatatcctgcc

SEQ ID NO: 11857 - DNA, 20 bp, synthetic construct
  source 1..20: mol_type = other DNA
gcactgagccgatatcctgc

SEQ ID NO: 11858 - DNA, 20 bp, synthetic construct
  source 1..20: mol_type = other DNA
tgcactgagccgatatcctg

SEQ ID NO: 11859 - DNA, 20 bp, synthetic construct
  source 1..20: mol_type = other DNA
ttgcactgagccgatatcct

SEQ ID NO: 11860 - DNA, 20 bp, synthetic construct
  source 1..20: mol_type = other DNA
gttgcactgagccgatatcc

SEQ ID NO: 11861 - DNA, 20 bp, synthetic construct
  source 1..20: mol_type = other DNA
ggttgcactgagccgatatc

SEQ ID NO: 11862 - DNA, 20 bp, synthetic construct
  source 1..20: mol_type = other DNA
aggttgcactgagccgatat

SEQ ID NO: 11863 - DNA, 20 bp, synthetic construct
  source 1..20: mol_type = other DNA
gaggttgcactgagccgata

SEQ ID NO: 11864 - DNA, 20 bp, synthetic construct
  source 1..20: mol_type = other DNA
agaggttgcactgagccgat

SEQ ID NO: 11865 - DNA, 20 bp, synthetic construct
  source 1..20: mol_type = other DNA
cagaggttgcactgagccga

SEQ ID NO: 11866 - DNA, 20 bp, synthetic construct
  source 1..20: mol_type = other DNA
gcagaggttgcactgagccg

SEQ ID NO: 11867 - DNA, 20 bp, synthetic construct
  source 1..20: mol_type = other DNA
ggcagaggttgcactgagcc

SEQ ID NO: 11868 - DNA, 20 bp, synthetic construct
  source 1..20: mol_type = other DNA
aggcagaggttgcactgagc

SEQ ID NO: 11869 - DNA, 20 bp, synthetic construct
  source 1..20: mol_type = other DNA
gaggcagaggttgcactgag

SEQ ID NO: 11870 - DNA, 20 bp, synthetic construct
  source 1..20: mol_type = other DNA
agaggcagaggttgcactga

SEQ ID NO: 11871 - DNA, 20 bp, synthetic construct
  source 1..20: mol_type = other DNA
aagaggcagaggttgcactg

SEQ ID NO: 11872 - DNA, 20 bp, synthetic construct
  source 1..20: mol_type = other DNA
caagaggcagaggttgcact

SEQ ID NO: 11873 - DNA, 20 bp, synthetic construct
  source 1..20: mol_type = other DNA
gcaagaggcagaggttgcac

SEQ ID NO: 11874 - DNA, 20 bp, synthetic construct
  source 1..20: mol_type = other DNA
cgcaagaggcagaggttgca

SEQ ID NO: 11875 - DNA, 20 bp, synthetic construct
  source 1..20: mol_type = other DNA
acgcaagaggcagaggttgc

SEQ ID NO: 11876 - DNA, 20 bp, synthetic construct
  source 1..20: mol_type = other DNA
aacgcaagaggcagaggttg

SEQ ID NO: 11877 - DNA, 20 bp, synthetic construct
  source 1..20: mol_type = other DNA
gaacgcaagaggcagaggtt

SEQ ID NO: 11878 - DNA, 20 bp, synthetic construct
  source 1..20: mol_type = other DNA
tgaacgcaagaggcagaggt

SEQ ID NO: 11879 - DNA, 20 bp, synthetic construct
  source 1..20: mol_type = other DNA
ttgaacgcaagaggcagagg

SEQ ID NO: 11880 - DNA, 20 bp, synthetic construct
  source 1..20: mol_type = other DNA
tttgaacgcaagaggcagag

SEQ ID NO: 11881 - DNA, 20 bp, synthetic construct
  source 1..20: mol_type = other DNA
atttgaacgcaagaggcaga

SEQ ID NO: 11882 - DNA, 20 bp, synthetic construct
  source 1..20: mol_type = other DNA
catttgaacgcaagaggcag

SEQ ID NO: 11883 - DNA, 20 bp, synthetic construct
  source 1..20: mol_type = other DNA
tcatttgaacgcaagaggca

SEQ ID NO: 11884 - DNA, 20 bp, synthetic construct
  source 1..20: mol_type = other DNA
atcatttgaacgcaagaggc

SEQ ID NO: 11885 - DNA, 20 bp, synthetic construct
  source 1..20: mol_type = other DNA
aatcatttgaacgcaagagg

SEQ ID NO: 11886 - DNA, 20 bp, synthetic construct
  source 1..20: mol_type = other DNA
gaatcatttgaacgcaagag

SEQ ID NO: 11887 - DNA, 20 bp, synthetic construct
  source 1..20: mol_type = other DNA
agaatcatttgaacgcaaga

SEQ ID NO: 11888 - DNA, 20 bp, synthetic construct
  source 1..20: mol_type = other DNA
gagaatcatttgaacgcaag

SEQ ID NO: 11889 - DNA, 20 bp, synthetic construct
  source 1..20: mol_type = other DNA
tgagaatcatttgaacgcaa

SEQ ID NO: 11890 - DNA, 20 bp, synthetic construct
  source 1..20: mol_type = other DNA
atgagaatcatttgaacgca

SEQ ID NO: 11891 - DNA, 20 bp, synthetic construct
  source 1..20: mol_type = other DNA
catgagaatcatttgaacgc

SEQ ID NO: 11892 - DNA, 20 bp, synthetic construct
  source 1..20: mol_type = other DNA
gcatgagaatcatttgaacg

SEQ ID NO: 11893 - DNA, 20 bp, synthetic construct
  source 1..20: mol_type = other DNA
ggcatgagaatcatttgaac

SEQ ID NO: 11894 - DNA, 20 bp, synthetic construct
  source 1..20: mol_type = other DNA
aggcatgagaatcatttgaa

SEQ ID NO: 11895 - DNA, 20 bp, synthetic construct
  source 1..20: mol_type = other DNA
gaggcatgagaatcatttga

SEQ ID NO: 11896 - DNA, 20 bp, synthetic construct
  source 1..20: mol_type = other DNA
tgaggcatgagaatcatttg

SEQ ID NO: 11897 - DNA, 20 bp, synthetic construct
  source 1..20: mol_type = other DNA
ctgaggcatgagaatcattt

SEQ ID NO: 11898 - DNA, 20 bp, synthetic construct
  source 1..20: mol_type = other DNA
gctgaggcatgagaatcatt

SEQ ID NO: 11899 - DNA, 20 bp, synthetic construct
  source 1..20: mol_type = other DNA
ggctgaggcatgagaatcat

SEQ ID NO: 11900 - DNA, 20 bp, synthetic construct
  source 1..20: mol_type = other DNA
aggctgaggcatgagaatca

SEQ ID NO: 11901 - DNA, 20 bp, synthetic construct
  source 1..20: mol_type = other DNA
gaggctgaggcatgagaatc

SEQ ID NO: 11902 - DNA, 20 bp, synthetic construct
  source 1..20: mol_type = other DNA
ggaggctgaggcatgagaat

SEQ ID NO: 11903 - DNA, 20 bp, synthetic construct
  source 1..20: mol_type = other DNA
gggaggctgaggcatgagaa

SEQ ID NO: 11904 - DNA, 20 bp, synthetic construct
  source 1..20: mol_type = other DNA
cgggaggctgaggcatgaga

SEQ ID NO: 11905 - DNA, 20 bp, synthetic construct
  source 1..20: mol_type = other DNA
tcgggaggctgaggcatgag

SEQ ID NO: 11906 - DNA, 20 bp, synthetic construct
  source 1..20: mol_type = other DNA
ctcgggaggctgaggcatga

SEQ ID NO: 11907 - DNA, 20 bp, synthetic construct
  source 1..20: mol_type = other DNA
actcgggaggctgaggcatg

SEQ ID NO: 11908 - DNA, 20 bp, synthetic construct
  source 1..20: mol_type = other DNA
tactcgggaggctgaggcat

SEQ ID NO: 11909 - DNA, 20 bp, synthetic construct
  source 1..20: mol_type = other DNA
ctactcgggaggctgaggca

SEQ ID NO: 11910 - DNA, 20 bp, synthetic construct
  source 1..20: mol_type = other DNA
gctactcgggaggctgaggc

SEQ ID NO: 11911 - DNA, 20 bp, synthetic construct
  source 1..20: mol_type = other DNA
agctactcgggaggctgagg

SEQ ID NO: 11912 - DNA, 20 bp, synthetic construct
  source 1..20: mol_type = other DNA
cagctactcgggaggctgag

SEQ ID NO: 11913 - DNA, 20 bp, synthetic construct
  source 1..20: mol_type = other DNA
ccagctactcgggaggctga

SEQ ID NO: 11914 - DNA, 20 bp, synthetic construct
  source 1..20: mol_type = other DNA
cccagctactcgggaggctg

SEQ ID NO: 11915 - DNA, 20 bp, synthetic construct
  source 1..20: mol_type = other DNA
tcccagctactcgggaggct

SEQ ID NO: 11916 - DNA, 20 bp, synthetic construct
  source 1..20: mol_type = other DNA
atcccagctactcgggaggc

SEQ ID NO: 11917 - DNA, 20 bp, synthetic construct
  source 1..20: mol_type = other DNA
aatcccagctactcgggagg

SEQ ID NO: 11918 - DNA, 20 bp, synthetic construct
  source 1..20: mol_type = other DNA
taatcccagctactcgggag

SEQ ID NO: 11919 - DNA, 20 bp, synthetic construct
  source 1..20: mol_type = other DNA
ataatcccagctactcggga

SEQ ID NO: 11920 - DNA, 20 bp, synthetic construct
  source 1..20: mol_type = other DNA
tataatcccagctactcggg

SEQ ID NO: 11921 - DNA, 20 bp, synthetic construct
  source 1..20: mol_type = other DNA
ctataatcccagctactcgg

SEQ ID NO: 11922 - DNA, 20 bp, synthetic construct
  source 1..20: mol_type = other DNA
cctataatcccagctactcg

SEQ ID NO: 11923 - DNA, 20 bp, synthetic construct
  source 1..20: mol_type = other DNA
gcctataatcccagctactc

SEQ ID NO: 11924 - DNA, 20 bp, synthetic construct
  source 1..20: mol_type = other DNA
tgcctataatcccagctact

SEQ ID NO: 11925 - DNA, 20 bp, synthetic construct
  source 1..20: mol_type = other DNA
atgcctataatcccagctac

SEQ ID NO: 11926 - DNA, 20 bp, synthetic construct
  source 1..20: mol_type = other DNA
catgcctataatcccagcta

SEQ ID NO: 11927 - DNA, 20 bp, synthetic construct
  source 1..20: mol_type = other DNA
gcatgcctataatcccagct

SEQ ID NO: 11928 - DNA, 20 bp, synthetic construct
  source 1..20: mol_type = other DNA
cgcatgcctataatcccagc

SEQ ID NO: 11929 - DNA, 20 bp, synthetic construct
  source 1..20: mol_type = other DNA
gcgcatgcctataatcccag

SEQ ID NO: 11930 - DNA, 20 bp, synthetic construct
  source 1..20: mol_type = other DNA
ggcgcatgcctataatccca

SEQ ID NO: 11931 - DNA, 20 bp, synthetic construct
  source 1..20: mol_type = other DNA
tggcgcatgcctataatccc

SEQ ID NO: 11932 - DNA, 20 bp, synthetic construct
  source 1..20: mol_type = other DNA
gtggcgcatgcctataatcc

SEQ ID NO: 11933 - DNA, 20 bp, synthetic construct
  source 1..20: mol_type = other DNA
agtggcgcatgcctataatc

SEQ ID NO: 11934 - DNA, 20 bp, synthetic construct
  source 1..20: mol_type = other DNA
tagtggcgcatgcctataat

SEQ ID NO: 11935 - DNA, 20 bp, synthetic construct
  source 1..20: mol_type = other DNA
gtagtggcgcatgcctataa

SEQ ID NO: 11936 - DNA, 20 bp, synthetic construct
  source 1..20: mol_type = other DNA
tgtagtggcgcatgcctata

SEQ ID NO: 11937 - DNA, 20 bp, synthetic construct
  source 1..20: mol_type = other DNA
gtgtagtggcgcatgcctat

SEQ ID NO: 11938 - DNA, 20 bp, synthetic construct
  source 1..20: mol_type = other DNA
ggtgtagtggcgcatgccta

SEQ ID NO: 11939 - DNA, 20 bp, synthetic construct
  source 1..20: mol_type = other DNA
aggtgtagtggcgcatgcct

SEQ ID NO: 11940 - DNA, 20 bp, synthetic construct
  source 1..20: mol_type = other DNA
caggtgtagtggcgcatgcc

SEQ ID NO: 11941 - DNA, 20 bp, synthetic construct
  source 1..20: mol_type = other DNA
ccaggtgtagtggcgcatgc

SEQ ID NO: 11942 - DNA, 20 bp, synthetic construct
  source 1..20: mol_type = other DNA
gccaggtgtagtggcgcatg

SEQ ID NO: 11943 - DNA, 20 bp, synthetic construct
  source 1..20: mol_type = other DNA
agccaggtgtagtggcgcat

SEQ ID NO: 11944 - DNA, 20 bp, synthetic construct
  source 1..20: mol_type = other DNA
tagccaggtgtagtggcgca

SEQ ID NO: 11945 - DNA, 20 bp, synthetic construct
  source 1..20: mol_type = other DNA
ttagccaggtgtagtggcgc

SEQ ID NO: 11946 - DNA, 20 bp, synthetic construct
  source 1..20: mol_type = other DNA
attagccaggtgtagtggcg

SEQ ID NO: 11947 - DNA, 20 bp, synthetic construct
  source 1..20: mol_type = other DNA
aattagccaggtgtagtggc

SEQ ID NO: 11948 - DNA, 20 bp, synthetic construct
  source 1..20: mol_type = other DNA
aaattagccaggtgtagtgg

SEQ ID NO: 11949 - DNA, 20 bp, synthetic construct
  source 1..20: mol_type = other DNA
aaaattagccaggtgtagtg

SEQ ID NO: 11950 - DNA, 20 bp, synthetic construct
  source 1..20: mol_type = other DNA
aaaaattagccaggtgtagt

SEQ ID NO: 11951 - DNA, 20 bp, synthetic construct
  source 1..20: mol_type = other DNA
caaaaattagccaggtgtag

SEQ ID NO: 11952 - DNA, 20 bp, synthetic construct
  source 1..20: mol_type = other DNA
acaaaaattagccaggtgta

SEQ ID NO: 11953 - DNA, 20 bp, synthetic construct
  source 1..20: mol_type = other DNA
tacaaaaattagccaggtgt

SEQ ID NO: 11954 - DNA, 20 bp, synthetic construct
  source 1..20: mol_type = other DNA
atacaaaaattagccaggtg

SEQ ID NO: 11955 - DNA, 20 bp, synthetic construct
  source 1..20: mol_type = other DNA
aatacaaaaattagccaggt

SEQ ID NO: 11956 - DNA, 20 bp, synthetic construct
  source 1..20: mol_type = other DNA
taatacaaaaattagccagg

SEQ ID NO: 11957 - DNA, 20 bp, synthetic construct
  source 1..20: mol_type = other DNA
ataatacaaaaattagccag

SEQ ID NO: 11958 - DNA, 20 bp, synthetic construct
  source 1..20: mol_type = other DNA
aataatacaaaaattagcca

SEQ ID NO: 11959 - DNA, 20 bp, synthetic construct
  source 1..20: mol_type = other DNA
caataatacaaaaattagcc

SEQ ID NO: 11960 - DNA, 20 bp, synthetic construct
  source 1..20: mol_type = other DNA
ccaataatacaaaaattagc

SEQ ID NO: 11961 - DNA, 20 bp, synthetic construct
  source 1..20: mol_type = other DNA
accaataatacaaaaattag

SEQ ID NO: 11962 - DNA, 20 bp, synthetic construct
  source 1..20: mol_type = other DNA
taccaataatacaaaaatta

SEQ ID NO: 11963 - DNA, 20 bp, synthetic construct
  source 1..20: mol_type = other DNA
ctaccaataatacaaaaatt

SEQ ID NO: 11964 - DNA, 20 bp, synthetic construct
  source 1..20: mol_type = other DNA
tctaccaataatacaaaaat

SEQ ID NO: 11965 - DNA, 20 bp, synthetic construct
  source 1..20: mol_type = other DNA
ctctaccaataatacaaaaa

SEQ ID NO: 11966 - DNA, 20 bp, synthetic construct
  source 1..20: mol_type = other DNA
tctctaccaataatacaaaa

SEQ ID NO: 11967 - DNA, 20 bp, synthetic construct
  source 1..20: mol_type = other DNA
atctctaccaataatacaaa

SEQ ID NO: 11968 - DNA, 20 bp, synthetic construct
  source 1..20: mol_type = other DNA
catctctaccaataatacaa

SEQ ID NO: 11969 - DNA, 20 bp, synthetic construct
  source 1..20: mol_type = other DNA
ccatctctaccaataataca

SEQ ID NO: 11970 - DNA, 20 bp, synthetic construct
  source 1..20: mol_type = other DNA
cccatctctaccaataatac

SEQ ID NO: 11971 - DNA, 20 bp, synthetic construct
  source 1..20: mol_type = other DNA
ccccatctctaccaataata

SEQ ID NO: 11972 - DNA, 20 bp, synthetic construct
  source 1..20: mol_type = other DNA
accccatctctaccaataat

SEQ ID NO: 11973 - DNA, 20 bp, synthetic construct
  source 1..20: mol_type = other DNA
aaccccatctctaccaataa

SEQ ID NO: 11974 - DNA, 20 bp, synthetic construct
  source 1..20: mol_type = other DNA
aaaccccatctctaccaata

SEQ ID NO: 11975 - DNA, 20 bp, synthetic construct
  source 1..20: mol_type = other DNA
aaaaccccatctctaccaat

SEQ ID NO: 11976 - DNA, 20 bp, synthetic construct
  source 1..20: mol_type = other DNA
taaaaccccatctctaccaa

SEQ ID NO: 11977 - DNA, 20 bp, synthetic construct
  source 1..20: mol_type = other DNA
ataaaaccccatctctacca

SEQ ID NO: 11978 - DNA, 20 bp, synthetic construct
  source 1..20: mol_type = other DNA
gataaaaccccatctctacc

SEQ ID NO: 11979 - DNA, 20 bp, synthetic construct
  source 1..20: mol_type = other DNA
tgataaaaccccatctctac

SEQ ID NO: 11980 - DNA, 20 bp, synthetic construct
  source 1..20: mol_type = other DNA
atgataaaaccccatctcta

SEQ ID NO: 11981 - DNA, 20 bp, synthetic construct
  source 1..20: mol_type = other DNA
catgataaaaccccatctct

SEQ ID NO: 11982 - DNA, 20 bp, synthetic construct
  source 1..20: mol_type = other DNA
acatgataaaaccccatctc

SEQ ID NO: 11983 - DNA, 20 bp, synthetic construct
  source 1..20: mol_type = other DNA
aacatgataaaaccccatct

SEQ ID NO: 11984 - DNA, 20 bp, synthetic construct
  source 1..20: mol_type = other DNA
caacatgataaaaccccatc

SEQ ID NO: 11985 - DNA, 20 bp, synthetic construct
  source 1..20: mol_type = other DNA
ccaacatgataaaaccccat

SEQ ID NO: 11986 - DNA, 20 bp, synthetic construct
  source 1..20: mol_type = other DNA
gccaacatgataaaacccca

SEQ ID NO: 11987 - DNA, 20 bp, synthetic construct
  source 1..20: mol_type = other DNA
ggccaacatgataaaacccc

SEQ ID NO: 11988 - DNA, 20 bp, synthetic construct
  source 1..20: mol_type = other DNA
tggccaacatgataaaaccc

SEQ ID NO: 11989 - DNA, 20 bp, synthetic construct
  source 1..20: mol_type = other DNA
ctggccaacatgataaaacc

SEQ ID NO: 11990 - DNA, 20 bp, synthetic construct
  source 1..20: mol_type = other DNA
cctggccaacatgataaaac

SEQ ID NO: 11991 - DNA, 20 bp, synthetic construct
  source 1..20: mol_type = other DNA
gcctggccaacatgataaaa

SEQ ID NO: 11992 - DNA, 20 bp, synthetic construct
  source 1..20: mol_type = other DNA
agcctggccaacatgataaa

SEQ ID NO: 11993 - DNA, 20 bp, synthetic construct
  source 1..20: mol_type = other DNA
cagcctggccaacatgataa

SEQ ID NO: 11994 - DNA, 20 bp, synthetic construct
  source 1..20: mol_type = other DNA
ccagcctggccaacatgata

SEQ ID NO: 11995 - DNA, 20 bp, synthetic construct
  source 1..20: mol_type = other DNA
accagcctggccaacatgat

SEQ ID NO: 11996 - DNA, 20 bp, synthetic construct
  source 1..20: mol_type = other DNA
gaccagcctggccaacatga

SEQ ID NO: 11997 - DNA, 20 bp, synthetic construct
  source 1..20: mol_type = other DNA
agaccagcctggccaacatg

SEQ ID NO: 11998 - DNA, 20 bp, synthetic construct
  source 1..20: mol_type = other DNA
gagaccagcctggccaacat

SEQ ID NO: 11999 - DNA, 20 bp, synthetic construct
  source 1..20: mol_type = other DNA
cgagaccagcctggccaaca

SEQ ID NO: 12000 - DNA, 20 bp, synthetic construct
  source 1..20: mol_type = other DNA
tcgagaccagcctggccaac

SEQ ID NO: 12001 - DNA, 20 bp, synthetic construct
  source 1..20: mol_type = other DNA
ttcgagaccagcctggccaa

SEQ ID NO: 12002 - DNA, 20 bp, synthetic construct
  source 1..20: mol_type = other DNA
gttcgagaccagcctggcca

SEQ ID NO: 12003 - DNA, 20 bp, synthetic construct
  source 1..20: mol_type = other DNA
agttcgagaccagcctggcc

SEQ ID NO: 12004 - DNA, 20 bp, synthetic construct
  source 1..20: mol_type = other DNA
gagttcgagaccagcctggc

SEQ ID NO: 12005 - DNA, 20 bp, synthetic construct
  source 1..20: mol_type = other DNA
ggagttcgagaccagcctgg

SEQ ID NO: 12006 - DNA, 20 bp, synthetic construct
  source 1..20: mol_type = other DNA
gggagttcgagaccagcctg

SEQ ID NO: 12007 - DNA, 20 bp, synthetic construct
  source 1..20: mol_type = other DNA
cgggagttcgagaccagcct

SEQ ID NO: 12008 - DNA, 20 bp, synthetic construct
  source 1..20: mol_type = other DNA
tcgggagttcgagaccagcc

SEQ ID NO: 12009 - DNA, 20 bp, synthetic construct
  source 1..20: mol_type = other DNA
gtcgggagttcgagaccagc

SEQ ID NO: 12010 - DNA, 20 bp, synthetic construct
  source 1..20: mol_type = other DNA
ggtcgggagttcgagaccag

SEQ ID NO: 12011 - DNA, 20 bp, synthetic construct
  source 1..20: mol_type = other DNA
aggtcgggagttcgagacca

SEQ ID NO: 12012 - DNA, 20 bp, synthetic construct
  source 1..20: mol_type = other DNA
gaggtcgggagttcgagacc

SEQ ID NO: 12013 - DNA, 20 bp, synthetic construct
  source 1..20: mol_type = other DNA
tgaggtcgggagttcgagac

SEQ ID NO: 12014 - DNA, 20 bp, synthetic construct
  source 1..20: mol_type = other DNA
ctgaggtcgggagttcgaga

SEQ ID NO: 12015 - DNA, 20 bp, synthetic construct
  source 1..20: mol_type = other DNA
cctgaggtcgggagttcgag

SEQ ID NO: 12016 - DNA, 20 bp, synthetic construct
  source 1..20: mol_type = other DNA
acctgaggtcgggagttcga

SEQ ID NO: 12017 - DNA, 20 bp, synthetic construct
  source 1..20: mol_type = other DNA
cacctgaggtcgggagttcg

SEQ ID NO: 12018 - DNA, 20 bp, synthetic construct
  source 1..20: mol_type = other DNA
tcacctgaggtcgggagttc

SEQ ID NO: 12019 - DNA, 20 bp, synthetic construct
  source 1..20: mol_type = other DNA
atcacctgaggtcgggagtt

SEQ ID NO: 12020 - DNA, 20 bp, synthetic construct
  source 1..20: mol_type = other DNA
gatcacctgaggtcgggagt

SEQ ID NO: 12021 - DNA, 20 bp, synthetic construct
  source 1..20: mol_type = other DNA
ggatcacctgaggtcgggag

SEQ ID NO: 12022 - DNA, 20 bp, synthetic construct
  source 1..20: mol_type = other DNA
tggatcacctgaggtcggga

SEQ ID NO: 12023 - DNA, 20 bp, synthetic construct
  source 1..20: mol_type = other DNA
atggatcacctgaggtcggg

SEQ ID NO: 12024 - DNA, 20 bp, synthetic construct
  source 1..20: mol_type = other DNA
tatggatcacctgaggtcgg

SEQ ID NO: 12025 - DNA, 20 bp, synthetic construct
  source 1..20: mol_type = other DNA
atatggatcacctgaggtcg

SEQ ID NO: 12026 - DNA, 20 bp, synthetic construct
  source 1..20: mol_type = other DNA
tatatggatcacctgaggtc

SEQ ID NO: 12027 - DNA, 20 bp, synthetic construct
  source 1..20: mol_type = other DNA
gtatatggatcacctgaggt

SEQ ID NO: 12028 - DNA, 20 bp, synthetic construct
  source 1..20: mol_type = other DNA
ggtatatggatcacctgagg

SEQ ID NO: 12029 - DNA, 20 bp, synthetic construct
  source 1..20: mol_type = other DNA
aggtatatggatcacctgag

SEQ ID NO: 12030 - DNA, 20 bp, synthetic construct
  source 1..20: mol_type = other DNA
aaggtatatggatcacctga

SEQ ID NO: 12031 - DNA, 20 bp, synthetic construct
  source 1..20: mol_type = other DNA
caaggtatatggatcacctg

SEQ ID NO: 12032 - DNA, 20 bp, synthetic construct
  source 1..20: mol_type = other DNA
ccaaggtatatggatcacct

SEQ ID NO: 12033 - DNA, 20 bp, synthetic construct
  source 1..20: mol_type = other DNA
gccaaggtatatggatcacc

SEQ ID NO: 12034 - DNA, 20 bp, synthetic construct
  source 1..20: mol_type = other DNA
ggccaaggtatatggatcac

SEQ ID NO: 12035 - DNA, 20 bp, synthetic construct
  source 1..20: mol_type = other DNA
aggccaaggtatatggatca

SEQ ID NO: 12036 - DNA, 20 bp, synthetic construct
  source 1..20: mol_type = other DNA
gaggccaaggtatatggatc

SEQ ID NO: 12037 - DNA, 20 bp, synthetic construct
  source 1..20: mol_type = other DNA
ggaggccaaggtatatggat

SEQ ID NO: 12038 - DNA, 20 bp, synthetic construct
  source 1..20: mol_type = other DNA
aggaggccaaggtatatgga

SEQ ID NO: 12039 - DNA, 20 bp, synthetic construct
  source 1..20: mol_type = other DNA
caggaggccaaggtatatgg

SEQ ID NO: 12040 - DNA, 20 bp, synthetic construct
  source 1..20: mol_type = other DNA
tcaggaggccaaggtatatg

SEQ ID NO: 12041 - DNA, 20 bp, synthetic construct
  source 1..20: mol_type = other DNA
ttcaggaggccaaggtatat

SEQ ID NO: 12042 - DNA, 20 bp, synthetic construct
  source 1..20: mol_type = other DNA
cttcaggaggccaaggtata

SEQ ID NO: 12043 - DNA, 20 bp, synthetic construct
  source 1..20: mol_type = other DNA
acttcaggaggccaaggtat

SEQ ID NO: 12044 - DNA, 20 bp, synthetic construct
  source 1..20: mol_type = other DNA
cacttcaggaggccaaggta

SEQ ID NO: 12045 - DNA, 20 bp, synthetic construct
  source 1..20: mol_type = other DNA
gcacttcaggaggccaaggt

SEQ ID NO: 12046 - DNA, 20 bp, synthetic construct
  source 1..20: mol_type = other DNA
agcacttcaggaggccaagg

SEQ ID NO: 12047 - DNA, 20 bp, synthetic construct
  source 1..20: mol_type = other DNA
cagcacttcaggaggccaag

SEQ ID NO: 12048 - DNA, 20 bp, synthetic construct
  source 1..20: mol_type = other DNA
ccagcacttcaggaggccaa

SEQ ID NO: 12049 - DNA, 20 bp, synthetic construct
  source 1..20: mol_type = other DNA
tccagcacttcaggaggcca

SEQ ID NO: 12050 - DNA, 20 bp, synthetic construct
  source 1..20: mol_type = other DNA
ttccagcacttcaggaggcc

SEQ ID NO: 12051 - DNA, 20 bp, synthetic construct
  source 1..20: mol_type = other DNA
attccagcacttcaggaggc

SEQ ID NO: 12052 - DNA, 20 bp, synthetic construct
  source 1..20: mol_type = other DNA
aattccagcacttcaggagg

SEQ ID NO: 12053 - DNA, 20 bp, synthetic construct
  source 1..20: mol_type = other DNA
taattccagcacttcaggag

SEQ ID NO: 12054 - DNA, 20 bp, synthetic construct
  source 1..20: mol_type = other DNA
gtaattccagcacttcagga

SEQ ID NO: 12055 - DNA, 20 bp, synthetic construct
  source 1..20: mol_type = other DNA
tgtaattccagcacttcagg

SEQ ID NO: 12056 - DNA, 20 bp, synthetic construct
  source 1..20: mol_type = other DNA
ctgtaattccagcacttcag

SEQ ID NO: 12057 - DNA, 20 bp, synthetic construct
  source 1..20: mol_type = other DNA
cctgtaattccagcacttca

SEQ ID NO: 12058 - DNA, 20 bp, synthetic construct
  source 1..20: mol_type = other DNA
gcctgtaattccagcacttc

SEQ ID NO: 12059 - DNA, 20 bp, synthetic construct
  source 1..20: mol_type = other DNA
tgcctgtaattccagcactt

SEQ ID NO: 12060 - DNA, 20 bp, synthetic construct
  source 1..20: mol_type = other DNA
atgcctgtaattccagcact

SEQ ID NO: 12061 - DNA, 20 bp, synthetic construct
  source 1..20: mol_type = other DNA
tatgcctgtaattccagcac

SEQ ID NO: 12062 - DNA, 20 bp, synthetic construct
  source 1..20: mol_type = other DNA
ttatgcctgtaattccagca

SEQ ID NO: 12063 - DNA, 20 bp, synthetic construct
  source 1..20: mol_type = other DNA
cttatgcctgtaattccagc

SEQ ID NO: 12064 - DNA, 20 bp, synthetic construct
  source 1..20: mol_type = other DNA
gcttatgcctgtaattccag

SEQ ID NO: 12065 - DNA, 20 bp, synthetic construct
  source 1..20: mol_type = other DNA
ggcttatgcctgtaattcca

SEQ ID NO: 12066 - DNA, 20 bp, synthetic construct
  source 1..20: mol_type = other DNA
tggcttatgcctgtaattcc

SEQ ID NO: 12067 - DNA, 20 bp, synthetic construct
  source 1..20: mol_type = other DNA
gtggcttatgcctgtaattc

SEQ ID NO: 12068 - DNA, 20 bp, synthetic construct
  source 1..20: mol_type = other DNA
agtggcttatgcctgtaatt

SEQ ID NO: 12069 - DNA, 20 bp, synthetic construct
  source 1..20: mol_type = other DNA
cagtggcttatgcctgtaat

SEQ ID NO: 12070 - DNA, 20 bp, synthetic construct
  source 1..20: mol_type = other DNA
gcagtggcttatgcctgtaa

SEQ ID NO: 12071 - DNA, 20 bp, synthetic construct
  source 1..20: mol_type = other DNA
cgcagtggcttatgcctgta

SEQ ID NO: 12072 - DNA, 20 bp, synthetic construct
  source 1..20: mol_type = other DNA
gcgcagtggcttatgcctgt

SEQ ID NO: 12073 - DNA, 20 bp, synthetic construct
  source 1..20: mol_type = other DNA
ggcgcagtggcttatgcctg

SEQ ID NO: 12074 - DNA, 20 bp, synthetic construct
  source 1..20: mol_type = other DNA
aggcgcagtggcttatgcct

SEQ ID NO: 12075 - DNA, 20 bp, synthetic construct
  source 1..20: mol_type = other DNA
taggcgcagtggcttatgcc

SEQ ID NO: 12076 - DNA, 20 bp, synthetic construct
  source 1..20: mol_type = other DNA
ctaggcgcagtggcttatgc

SEQ ID NO: 12077 - DNA, 20 bp, synthetic construct
  source 1..20: mol_type = other DNA
gctaggcgcagtggcttatg

SEQ ID NO: 12078 - DNA, 20 bp, synthetic construct
  source 1..20: mol_type = other DNA
agctaggcgcagtggcttat

SEQ ID NO: 12079 - DNA, 20 bp, synthetic construct
  source 1..20: mol_type = other DNA
aagctaggcgcagtggctta

SEQ ID NO: 12080 - DNA, 20 bp, synthetic construct
  source 1..20: mol_type = other DNA
aaagctaggcgcagtggctt

SEQ ID NO: 12081 - DNA, 20 bp, synthetic construct
  source 1..20: mol_type = other DNA
aaaagctaggcgcagtggct

SEQ ID NO: 12082 - DNA, 20 bp, synthetic construct
  source 1..20: mol_type = other DNA
aaaaagctaggcgcagtggc

SEQ ID NO: 12083 - DNA, 20 bp, synthetic construct
  source 1..20: mol_type = other DNA
aaaaaagctaggcgcagtgg

SEQ ID NO: 12084 - DNA, 20 bp, synthetic construct
  source 1..20: mol_type = other DNA
caaaaaagctaggcgcagtg

SEQ ID NO: 12085 - DNA, 20 bp, synthetic construct
  source 1..20: mol_type = other DNA
acaaaaaagctaggcgcagt

SEQ ID NO: 12086 - DNA, 20 bp, synthetic construct
  source 1..20: mol_type = other DNA
aacaaaaaagctaggcgcag

SEQ ID NO: 12087 - DNA, 20 bp, synthetic construct
  source 1..20: mol_type = other DNA
aaacaaaaaagctaggcgca

SEQ ID NO: 12088 - DNA, 20 bp, synthetic construct
  source 1..20: mol_type = other DNA
caaacaaaaaagctaggcgc

SEQ ID NO: 12089 - DNA, 20 bp, synthetic construct
  source 1..20: mol_type = other DNA
acaaacaaaaaagctaggcg

SEQ ID NO: 12090 - DNA, 20 bp, synthetic construct
  source 1..20: mol_type = other DNA
aacaaacaaaaaagctaggc

SEQ ID NO: 12091 - DNA, 20 bp, synthetic construct
  source 1..20: mol_type = other DNA
aaacaaacaaaaaagctagg

SEQ ID NO: 12092 - DNA, 20 bp, synthetic construct
  source 1..20: mol_type = other DNA
aaaacaaacaaaaaagctag

SEQ ID NO: 12093 - DNA, 20 bp, synthetic construct
  source 1..20: mol_type = other DNA
aaaaacaaacaaaaaagcta

SEQ ID NO: 12094 - DNA, 20 bp, synthetic construct
  source 1..20: mol_type = other DNA
taaaaacaaacaaaaaagct

SEQ ID NO: 12095 - DNA, 20 bp, synthetic construct
  source 1..20: mol_type = other DNA
ataaaaacaaacaaaaaagc

SEQ ID NO: 12096 - DNA, 20 bp, synthetic construct
  source 1..20: mol_type = other DNA
aataaaaacaaacaaaaaag

SEQ ID NO: 12097 - DNA, 20 bp, synthetic construct
  source 1..20: mol_type = other DNA
aaataaaaacaaacaaaaaa

SEQ ID NO: 12098 - DNA, 20 bp, synthetic construct
  source 1..20: mol_type = other DNA
aaaataaaaacaaacaaaaa

SEQ ID NO: 12099 - DNA, 20 bp, synthetic construct
  source 1..20: mol_type = other DNA
caaaataaaaacaaacaaaa

SEQ ID NO: 12100 - DNA, 20 bp, synthetic construct
  source 1..20: mol_type = other DNA
acaaaataaaaacaaacaaa

SEQ ID NO: 12101 - DNA, 20 bp, synthetic construct
  source 1..20: mol_type = other DNA
tacaaaataaaaacaaacaa

SEQ ID NO: 12102 - DNA, 20 bp, synthetic construct
  source 1..20: mol_type = other DNA
ctacaaaataaaaacaaaca

SEQ ID NO: 12103 - DNA, 20 bp, synthetic construct
  source 1..20: mol_type = other DNA
cctacaaaataaaaacaaac

SEQ ID NO: 12104 - DNA, 20 bp, synthetic construct
  source 1..20: mol_type = other DNA
ccctacaaaataaaaacaaa

SEQ ID NO: 12105 - DNA, 20 bp, synthetic construct
  source 1..20: mol_type = other DNA
tccctacaaaataaaaacaa

SEQ ID NO: 12106 - DNA, 20 bp, synthetic construct
  source 1..20: mol_type = other DNA
gtccctacaaaataaaaaca

SEQ ID NO: 12107 - DNA, 20 bp, synthetic construct
  source 1..20: mol_type = other DNA
tgtccctacaaaataaaaac

SEQ ID NO: 12108 - DNA, 20 bp, synthetic construct
  source 1..20: mol_type = other DNA
ctgtccctacaaaataaaaa

SEQ ID NO: 12109 - DNA, 20 bp, synthetic construct
  source 1..20: mol_type = other DNA
tctgtccctacaaaataaaa

SEQ ID NO: 12110 - DNA, 20 bp, synthetic construct
  source 1..20: mol_type = other DNA
ctctgtccctacaaaataaa

SEQ ID NO: 12111 - DNA, 20 bp, synthetic construct
  source 1..20: mol_type = other DNA
tctctgtccctacaaaataa

SEQ ID NO: 12112 - DNA, 20 bp, synthetic construct
  source 1..20: mol_type = other DNA
atctctgtccctacaaaata

SEQ ID NO: 12113 - DNA, 20 bp, synthetic construct
  source 1..20: mol_type = other DNA
aatctctgtccctacaaaat

SEQ ID NO: 12114 - DNA, 20 bp, synthetic construct
  source 1..20: mol_type = other DNA
aaatctctgtccctacaaaa

SEQ ID NO: 12115 - DNA, 20 bp, synthetic construct
  source 1..20: mol_type = other DNA
aaaatctctgtccctacaaa

SEQ ID NO: 12116 - DNA, 20 bp, synthetic construct
  source 1..20: mol_type = other DNA
taaaatctctgtccctacaa

SEQ ID NO: 12117 - DNA, 20 bp, synthetic construct
  source 1..20: mol_type = other DNA
gtaaaatctctgtccctaca

SEQ ID NO: 12118 - DNA, 20 bp, synthetic construct
  source 1..20: mol_type = other DNA
ggtaaaatctctgtccctac

SEQ ID NO: 12119 - DNA, 20 bp, synthetic construct
  source 1..20: mol_type = other DNA
aggtaaaatctctgtcccta

SEQ ID NO: 12120 - DNA, 20 bp, synthetic construct
  source 1..20: mol_type = other DNA
caggtaaaatctctgtccct

SEQ ID NO: 12121 - DNA, 20 bp, synthetic construct
  source 1..20: mol_type = other DNA
acaggtaaaatctctgtccc

SEQ ID NO: 12122 - DNA, 20 bp, synthetic construct
  source 1..20: mol_type = other DNA
aacaggtaaaatctctgtcc

SEQ ID NO: 12123 - DNA, 20 bp, synthetic construct
  source 1..20: mol_type = other DNA
caacaggtaaaatctctgtc

SEQ ID NO: 12124 - DNA, 20 bp, synthetic construct
  source 1..20: mol_type = other DNA
gcaacaggtaaaatctctgt

SEQ ID NO: 12125 - DNA, 20 bp, synthetic construct
  source 1..20: mol_type = other DNA
ggcaacaggtaaaatctctg

SEQ ID NO: 12126 - DNA, 20 bp, synthetic construct
  source 1..20: mol_type = other DNA
gggcaacaggtaaaatctct

SEQ ID NO: 12127 - DNA, 20 bp, synthetic construct
  source 1..20: mol_type = other DNA
tgggcaacaggtaaaatctc

SEQ ID NO: 12128 - DNA, 20 bp, synthetic construct
  source 1..20: mol_type = other DNA
ctgggcaacaggtaaaatct

SEQ ID NO: 12129 - DNA, 20 bp, synthetic construct
  source 1..20: mol_type = other DNA
cctgggcaacaggtaaaatc

SEQ ID NO: 12130 - DNA, 20 bp, synthetic construct
  source 1..20: mol_type = other DNA
tcctgggcaacaggtaaaat

SEQ ID NO: 12131 - DNA, 20 bp, synthetic construct
  source 1..20: mol_type = other DNA
atcctgggcaacaggtaaaa

SEQ ID NO: 12132 - DNA, 20 bp, synthetic construct
  source 1..20: mol_type = other DNA
catcctgggcaacaggtaaa

SEQ ID NO: 12133 - DNA, 20 bp, synthetic construct
  source 1..20: mol_type = other DNA
ccatcctgggcaacaggtaa

SEQ ID NO: 12134 - DNA, 20 bp, synthetic construct
  source 1..20: mol_type = other DNA
gccatcctgggcaacaggta

SEQ ID NO: 12135 - DNA, 20 bp, synthetic construct
  source 1..20: mol_type = other DNA
ggccatcctgggcaacaggt

SEQ ID NO: 12136 - DNA, 20 bp, synthetic construct
  source 1..20: mol_type = other DNA
aggccatcctgggcaacagg

SEQ ID NO: 12137 - DNA, 20 bp, synthetic construct
  source 1..20: mol_type = other DNA
aaggccatcctgggcaacag

SEQ ID NO: 12138 - DNA, 20 bp, synthetic construct
  source 1..20: mol_type = other DNA
caaggccatcctgggcaaca

SEQ ID NO: 12139 - DNA, 20 bp, synthetic construct
  source 1..20: mol_type = other DNA
tcaaggccatcctgggcaac

SEQ ID NO: 12140 - DNA, 20 bp, synthetic construct
  source 1..20: mol_type = other DNA
ttcaaggccatcctgggcaa

SEQ ID NO: 12141 - DNA, 20 bp, synthetic construct
  source 1..20: mol_type = other DNA
attcaaggccatcctgggca

SEQ ID NO: 12142 - DNA, 20 bp, synthetic construct
  source 1..20: mol_type = other DNA
aattcaaggccatcctgggc

SEQ ID NO: 12143 - DNA, 20 bp, synthetic construct
  source 1..20: mol_type = other DNA
gaattcaaggccatcctggg

SEQ ID NO: 12144 - DNA, 20 bp, synthetic construct
  source 1..20: mol_type = other DNA
ggaattcaaggccatcctgg

SEQ ID NO: 12145 - DNA, 20 bp, synthetic construct
  source 1..20: mol_type = other DNA
aggaattcaaggccatcctg

SEQ ID NO: 12146 - DNA, 20 bp, synthetic construct
  source 1..20: mol_type = other DNA
caggaattcaaggccatcct

SEQ ID NO: 12147 - DNA, 20 bp, synthetic construct
  source 1..20: mol_type = other DNA
tcaggaattcaaggccatcc

SEQ ID NO: 12148 - DNA, 20 bp, synthetic construct
  source 1..20: mol_type = other DNA
gtcaggaattcaaggccatc

SEQ ID NO: 12149 - DNA, 20 bp, synthetic construct
  source 1..20: mol_type = other DNA
ggtcaggaattcaaggccat

SEQ ID NO: 12150 - DNA, 20 bp, synthetic construct
  source 1..20: mol_type = other DNA
aggtcaggaattcaaggcca

SEQ ID NO: 12151 - DNA, 20 bp, synthetic construct
  source 1..20: mol_type = other DNA
gaggtcaggaattcaaggcc

SEQ ID NO: 12152 - DNA, 20 bp, synthetic construct
  source 1..20: mol_type = other DNA
tgaggtcaggaattcaaggc

SEQ ID NO: 12153 - DNA, 20 bp, synthetic construct
  source 1..20: mol_type = other DNA
ttgaggtcaggaattcaagg

SEQ ID NO: 12154 - DNA, 20 bp, synthetic construct
  source 1..20: mol_type = other DNA
tttgaggtcaggaattcaag

SEQ ID NO: 12155 - DNA, 20 bp, synthetic construct
  source 1..20: mol_type = other DNA
gtttgaggtcaggaattcaa

SEQ ID NO: 12156 - DNA, 20 bp, synthetic construct
  source 1..20: mol_type = other DNA
tgtttgaggtcaggaattca

SEQ ID NO: 12157 - DNA, 20 bp, synthetic construct
  source 1..20: mol_type = other DNA
ttgtttgaggtcaggaattc

SEQ ID NO: 12158 - DNA, 20 bp, synthetic construct
  source 1..20: mol_type = other DNA
attgtttgaggtcaggaatt

SEQ ID NO: 12159 - DNA, 20 bp, synthetic construct
  source 1..20: mol_type = other DNA
aattgtttgaggtcaggaat

SEQ ID NO: 12160 - DNA, 20 bp, synthetic construct
  source 1..20: mol_type = other DNA
aaattgtttgaggtcaggaa

SEQ ID NO: 12161 - DNA, 20 bp, synthetic construct
  source 1..20: mol_type = other DNA
caaattgtttgaggtcagga

SEQ ID NO: 12162 - DNA, 20 bp, synthetic construct
  source 1..20: mol_type = other DNA
gcaaattgtttgaggtcagg

SEQ ID NO: 12163 - DNA, 20 bp, synthetic construct
  source 1..20: mol_type = other DNA
ggcaaattgtttgaggtcag

SEQ ID NO: 12164 - DNA, 20 bp, synthetic construct
  source 1..20: mol_type = other DNA
gggcaaattgtttgaggtca

SEQ ID NO: 12165 - DNA, 20 bp, synthetic construct
  source 1..20: mol_type = other DNA
agggcaaattgtttgaggtc

SEQ ID NO: 12166 - DNA, 20 bp, synthetic construct
  source 1..20: mol_type = other DNA
gagggcaaattgtttgaggt

SEQ ID NO: 12167 - DNA, 20 bp, synthetic construct
  source 1..20: mol_type = other DNA
ggagggcaaattgtttgagg

SEQ ID NO: 12168 - DNA, 20 bp, synthetic construct
  source 1..20: mol_type = other DNA
aggagggcaaattgtttgag

SEQ ID NO: 12169 - DNA, 20 bp, synthetic construct
  source 1..20: mol_type = other DNA
aaggagggcaaattgtttga

SEQ ID NO: 12170 - DNA, 20 bp, synthetic construct
  source 1..20: mol_type = other DNA
caaggagggcaaattgtttg

SEQ ID NO: 12171 - DNA, 20 bp, synthetic construct
  source 1..20: mol_type = other DNA
ccaaggagggcaaattgttt

SEQ ID NO: 12172 - DNA, 20 bp, synthetic construct
  source 1..20: mol_type = other DNA
gccaaggagggcaaattgtt

SEQ ID NO: 12173 - DNA, 20 bp, synthetic construct
  source 1..20: mol_type = other DNA
ggccaaggagggcaaattgt

SEQ ID NO: 12174 - DNA, 20 bp, synthetic construct
  source 1..20: mol_type = other DNA
aggccaaggagggcaaattg

SEQ ID NO: 12175 - DNA, 20 bp, synthetic construct
  source 1..20: mol_type = other DNA
gaggccaaggagggcaaatt

SEQ ID NO: 12176 - DNA, 20 bp, synthetic construct
  source 1..20: mol_type = other DNA
ggaggccaaggagggcaaat

SEQ ID NO: 12177 - DNA, 20 bp, synthetic construct
  source 1..20: mol_type = other DNA
gggaggccaaggagggcaaa

SEQ ID NO: 12178 - DNA, 20 bp, synthetic construct
  source 1..20: mol_type = other DNA
tgggaggccaaggagggcaa

SEQ ID NO: 12179 - DNA, 20 bp, synthetic construct
  source 1..20: mol_type = other DNA
ttgggaggccaaggagggca

SEQ ID NO: 12180 - DNA, 20 bp, synthetic construct
  source 1..20: mol_type = other DNA
cttgggaggccaaggagggc

SEQ ID NO: 12181 - DNA, 20 bp, synthetic construct
  source 1..20: mol_type = other DNA
ccttgggaggccaaggaggg

SEQ ID NO: 12182 - DNA, 20 bp, synthetic construct
  source 1..20: mol_type = other DNA
accttgggaggccaaggagg

SEQ ID NO: 12183 - DNA, 20 bp, synthetic construct
  source 1..20: mol_type = other DNA
caccttgggaggccaaggag

SEQ ID NO: 12184 - DNA, 20 bp, synthetic construct
  source 1..20: mol_type = other DNA
gcaccttgggaggccaagga

SEQ ID NO: 12185 - DNA, 20 bp, synthetic construct
  source 1..20: mol_type = other DNA
agcaccttgggaggccaagg

SEQ ID NO: 12186 - DNA, 20 bp, synthetic construct
  source 1..20: mol_type = other DNA
cagcaccttgggaggccaag

SEQ ID NO: 12187 - DNA, 20 bp, synthetic construct
  source 1..20: mol_type = other DNA
ccagcaccttgggaggccaa

SEQ ID NO: 12188 - DNA, 20 bp, synthetic construct
  source 1..20: mol_type = other DNA
cccagcaccttgggaggcca

SEQ ID NO: 12189 - DNA, 20 bp, synthetic construct
  source 1..20: mol_type = other DNA
tcccagcaccttgggaggcc

SEQ ID NO: 12190 - DNA, 20 bp, synthetic construct
  source 1..20: mol_type = other DNA
atcccagcaccttgggaggc

SEQ ID NO: 12191 - DNA, 20 bp, synthetic construct
  source 1..20: mol_type = other DNA
aatcccagcaccttgggagg

SEQ ID NO: 12192 - DNA, 20 bp, synthetic construct
  source 1..20: mol_type = other DNA
taatcccagcaccttgggag

SEQ ID NO: 12193 - DNA, 20 bp, synthetic construct
  source 1..20: mol_type = other DNA
gtaatcccagcaccttggga

SEQ ID NO: 12194 - DNA, 20 bp, synthetic construct
  source 1..20: mol_type = other DNA
tgtaatcccagcaccttggg

SEQ ID NO: 12195 - DNA, 20 bp, synthetic construct
  source 1..20: mol_type = other DNA
ctgtaatcccagcaccttgg

SEQ ID NO: 12196 - DNA, 20 bp, synthetic construct
  source 1..20: mol_type = other DNA
cctgtaatcccagcaccttg

SEQ ID NO: 12197 - DNA, 20 bp, synthetic construct
  source 1..20: mol_type = other DNA
acctgtaatcccagcacctt

SEQ ID NO: 12198 - DNA, 20 bp, synthetic construct
  source 1..20: mol_type = other DNA
cacctgtaatcccagcacct

SEQ ID NO: 12199 - DNA, 20 bp, synthetic construct
  source 1..20: mol_type = other DNA
acacctgtaatcccagcacc

SEQ ID NO: 12200 - DNA, 20 bp, synthetic construct
  source 1..20: mol_type = other DNA
cacacctgtaatcccagcac

SEQ ID NO: 12201 - DNA, 20 bp, synthetic construct
  source 1..20: mol_type = other DNA
tcacacctgtaatcccagca

SEQ ID NO: 12202 - DNA, 20 bp, synthetic construct
  source 1..20: mol_type = other DNA
ctcacacctgtaatcccagc

SEQ ID NO: 12203 - DNA, 20 bp, synthetic construct
  source 1..20: mol_type = other DNA
gctcacacctgtaatcccag

SEQ ID NO: 12204 - DNA, 20 bp, synthetic construct
  source 1..20: mol_type = other DNA
ggctcacacctgtaatccca

SEQ ID NO: 12205 - DNA, 20 bp, synthetic construct
  source 1..20: mol_type = other DNA
tggctcacacctgtaatccc

SEQ ID NO: 12206 - DNA, 20 bp, synthetic construct
  source 1..20: mol_type = other DNA
gtggctcacacctgtaatcc

SEQ ID NO: 12207 - DNA, 20 bp, synthetic construct
  source 1..20: mol_type = other DNA
agtggctcacacctgtaatc

SEQ ID NO: 12208 - DNA, 20 bp, synthetic construct
  source 1..20: mol_type = other DNA
tagtggctcacacctgtaat

SEQ ID NO: 12209 - DNA, 20 bp, synthetic construct
  source 1..20: mol_type = other DNA
atagtggctcacacctgtaa

SEQ ID NO: 12210 - DNA, 20 bp, synthetic construct
  source 1..20: mol_type = other DNA
catagtggctcacacctgta

SEQ ID NO: 12211 - DNA, 20 bp, synthetic construct
  source 1..20: mol_type = other DNA
gcatagtggctcacacctgt

SEQ ID NO: 12212 - DNA, 20 bp, synthetic construct
  source 1..20: mol_type = other DNA
ggcatagtggctcacacctg

SEQ ID NO: 12213 - DNA, 20 bp, synthetic construct
  source 1..20: mol_type = other DNA
aggcatagtggctcacacct

SEQ ID NO: 12214 - DNA, 20 bp, synthetic construct
  source 1..20: mol_type = other DNA
caggcatagtggctcacacc

SEQ ID NO: 12215 - DNA, 20 bp, synthetic construct
  source 1..20: mol_type = other DNA
ccaggcatagtggctcacac

SEQ ID NO: 12216 - DNA, 20 bp, synthetic construct
  source 1..20: mol_type = other DNA
gccaggcatagtggctcaca

SEQ ID NO: 12217 - DNA, 20 bp, synthetic construct
  source 1..20: mol_type = other DNA
agccaggcatagtggctcac

SEQ ID NO: 12218 - DNA, 20 bp, synthetic construct
  source 1..20: mol_type = other DNA
cagccaggcatagtggctca

SEQ ID NO: 12219 - DNA, 20 bp, synthetic construct
  source 1..20: mol_type = other DNA
ccagccaggcatagtggctc

SEQ ID NO: 12220 - DNA, 20 bp, synthetic construct
  source 1..20: mol_type = other DNA
accagccaggcatagtggct

SEQ ID NO: 12221 - DNA, 20 bp, synthetic construct
  source 1..20: mol_type = other DNA
aaccagccaggcatagtggc

SEQ ID NO: 12222 - DNA, 20 bp, synthetic construct
  source 1..20: mol_type = other DNA
aaaccagccaggcatagtgg

SEQ ID NO: 12223 - DNA, 20 bp, synthetic construct
  source 1..20: mol_type = other DNA
aaaaccagccaggcatagtg

SEQ ID NO: 12224 - DNA, 20 bp, synthetic construct
  source 1..20: mol_type = other DNA
aaaaaccagccaggcatagt

SEQ ID NO: 12225 - DNA, 20 bp, synthetic construct
  source 1..20: mol_type = other DNA
aaaaaaccagccaggcatag

SEQ ID NO: 12226 - DNA, 20 bp, synthetic construct
  source 1..20: mol_type = other DNA
taaaaaaccagccaggcata

SEQ ID NO: 12227 - DNA, 20 bp, synthetic construct
  source 1..20: mol_type = other DNA
ttaaaaaaccagccaggcat

SEQ ID NO: 12228 - DNA, 20 bp, synthetic construct
  source 1..20: mol_type = other DNA
tttaaaaaaccagccaggca

SEQ ID NO: 12229 - DNA, 20 bp, synthetic construct
  source 1..20: mol_type = other DNA
atttaaaaaaccagccaggc

SEQ ID NO: 12230 - DNA, 20 bp, synthetic construct
  source 1..20: mol_type = other DNA
aatttaaaaaaccagccagg

SEQ ID NO: 12231 - DNA, 20 bp, synthetic construct
  source 1..20: mol_type = other DNA
taatttaaaaaaccagccag

SEQ ID NO: 12232 - DNA, 20 bp, synthetic construct
  source 1..20: mol_type = other DNA
ataatttaaaaaaccagcca

SEQ ID NO: 12233 - DNA, 20 bp, synthetic construct
  source 1..20: mol_type = other DNA
aataatttaaaaaaccagcc

SEQ ID NO: 12234 - DNA, 20 bp, synthetic construct
  source 1..20: mol_type = other DNA
taataatttaaaaaaccagc

SEQ ID NO: 12235 - DNA, 20 bp, synthetic construct
  source 1..20: mol_type = other DNA
ataataatttaaaaaaccag

SEQ ID NO: 12236 - DNA, 20 bp, synthetic construct
  source 1..20: mol_type = other DNA
aataataatttaaaaaacca

SEQ ID NO: 12237 - DNA, 20 bp, synthetic construct
  source 1..20: mol_type = other DNA
taataataatttaaaaaacc

SEQ ID NO: 12238 - DNA, 20 bp, synthetic construct
  source 1..20: mol_type = other DNA
ataataataatttaaaaaac

SEQ ID NO: 12239 - DNA, 20 bp, synthetic construct
  source 1..20: mol_type = other DNA
aataataataatttaaaaaa

SEQ ID NO: 12240 - DNA, 20 bp, synthetic construct
  source 1..20: mol_type = other DNA
caataataataatttaaaaa

SEQ ID NO: 12241 - DNA, 20 bp, synthetic construct
  source 1..20: mol_type = other DNA
acaataataataatttaaaa

SEQ ID NO: 12242 - DNA, 20 bp, synthetic construct
  source 1..20: mol_type = other DNA
aacaataataataatttaaa

SEQ ID NO: 12243 - DNA, 20 bp, synthetic construct
  source 1..20: mol_type = other DNA
aaacaataataataatttaa

SEQ ID NO: 12244 - DNA, 20 bp, synthetic construct
  source 1..20: mol_type = other DNA
caaacaataataataattta

SEQ ID NO: 12245 - DNA, 20 bp, synthetic construct
  source 1..20: mol_type = other DNA
acaaacaataataataattt

SEQ ID NO: 12246 - DNA, 20 bp, synthetic construct
  source 1..20: mol_type = other DNA
cacaaacaataataataatt

SEQ ID NO: 12247 - DNA, 20 bp, synthetic construct
  source 1..20: mol_type = other DNA
acacaaacaataataataat

SEQ ID NO: 12248 - DNA, 20 bp, synthetic construct
  source 1..20: mol_type = other DNA
cacacaaacaataataataa

SEQ ID NO: 12249 - DNA, 20 bp, synthetic construct
  source 1..20: mol_type = other DNA
acacacaaacaataataata

SEQ ID NO: 12250 - DNA, 20 bp, synthetic construct
  source 1..20: mol_type = other DNA
cacacacaaacaataataat

SEQ ID NO: 12251 - DNA, 20 bp, synthetic construct
  source 1..20: mol_type = other DNA
acacacacaaacaataataa

SEQ ID NO: 12252 - DNA, 20 bp, synthetic construct
  source 1..20: mol_type = other DNA
cacacacacaaacaataata

SEQ ID NO: 12253 - DNA, 20 bp, synthetic construct
  source 1..20: mol_type = other DNA
acacacacacaaacaataat

SEQ ID NO: 12254 - DNA, 20 bp, synthetic construct
  source 1..20: mol_type = other DNA
cacacacacacaaacaataa

SEQ ID NO: 12255 - DNA, 20 bp, synthetic construct
  source 1..20: mol_type = other DNA
acacacacacacaaacaata

SEQ ID NO: 12256 - DNA, 20 bp, synthetic construct
  source 1..20: mol_type = other DNA
aacacacacacacaaacaat

SEQ ID NO: 12257 - DNA, 20 bp, synthetic construct
  source 1..20: mol_type = other DNA
caacacacacacacaaacaa

SEQ ID NO: 12258 - DNA, 20 bp, synthetic construct
  source 1..20: mol_type = other DNA
gcaacacacacacacaaaca

SEQ ID NO: 12259 - DNA, 20 bp, synthetic construct
  source 1..20: mol_type = other DNA
tgcaacacacacacacaaac

SEQ ID NO: 12260 - DNA, 20 bp, synthetic construct
  source 1..20: mol_type = other DNA
ctgcaacacacacacacaaa

SEQ ID NO: 12261 - DNA, 20 bp, synthetic construct
  source 1..20: mol_type = other DNA
cctgcaacacacacacacaa

SEQ ID NO: 12262 - DNA, 20 bp, synthetic construct
  source 1..20: mol_type = other DNA
tcctgcaacacacacacaca

SEQ ID NO: 12263 - DNA, 20 bp, synthetic construct
  source 1..20: mol_type = other DNA
atcctgcaacacacacacac

SEQ ID NO: 12264 - DNA, 20 bp, synthetic construct
  source 1..20: mol_type = other DNA
gatcctgcaacacacacaca

SEQ ID NO: 12265 - DNA, 20 bp, synthetic construct
  source 1..20: mol_type = other DNA
agatcctgcaacacacacac

SEQ ID NO: 12266 - DNA, 20 bp, synthetic construct
  source 1..20: mol_type = other DNA
aagatcctgcaacacacaca

SEQ ID NO: 12267 - DNA, 20 bp, synthetic construct
  source 1..20: mol_type = other DNA
taagatcctgcaacacacac

SEQ ID NO: 12268 - DNA, 20 bp, synthetic construct
  source 1..20: mol_type = other DNA
gtaagatcctgcaacacaca

SEQ ID NO: 12269 - DNA, 20 bp, synthetic construct
  source 1..20: mol_type = other DNA
ggtaagatcctgcaacacac

SEQ ID NO: 12270 - DNA, 20 bp, synthetic construct
  source 1..20: mol_type = other DNA
gggtaagatcctgcaacaca

SEQ ID NO: 12271 - DNA, 20 bp, synthetic construct
  source 1..20: mol_type = other DNA
agggtaagatcctgcaacac

SEQ ID NO: 12272 - DNA, 20 bp, synthetic construct
  source 1..20: mol_type = other DNA
cagggtaagatcctgcaaca

SEQ ID NO: 12273 - DNA, 20 bp, synthetic construct
  source 1..20: mol_type = other DNA
acagggtaagatcctgcaac

SEQ ID NO: 12274 - DNA, 20 bp, synthetic construct
  source 1..20: mol_type = other DNA
gacagggtaagatcctgcaa

SEQ ID NO: 12275 - DNA, 20 bp, synthetic construct
  source 1..20: mol_type = other DNA
tgacagggtaagatcctgca

SEQ ID NO: 12276 - DNA, 20 bp, synthetic construct
  source 1..20: mol_type = other DNA
gtgacagggtaagatcctgc

SEQ ID NO: 12277 - DNA, 20 bp, synthetic construct
  source 1..20: mol_type = other DNA
ggtgacagggtaagatcctg

SEQ ID NO: 12278 - DNA, 20 bp, synthetic construct
  source 1..20: mol_type = other DNA
gggtgacagggtaagatcct

SEQ ID NO: 12279 - DNA, 20 bp, synthetic construct
  source 1..20: mol_type = other DNA
tgggtgacagggtaagatcc

SEQ ID NO: 12280 - DNA, 20 bp, synthetic construct
  source 1..20: mol_type = other DNA
ctgggtgacagggtaagatc

SEQ ID NO: 12281 - DNA, 20 bp, synthetic construct
  source 1..20: mol_type = other DNA
cctgggtgacagggtaagat

SEQ ID NO: 12282 - DNA, 20 bp, synthetic construct
  source 1..20: mol_type = other DNA
gcctgggtgacagggtaaga

SEQ ID NO: 12283 - DNA, 20 bp, synthetic construct
  source 1..20: mol_type = other DNA
agcctgggtgacagggtaag

SEQ ID NO: 12284 - DNA, 20 bp, synthetic construct
  source 1..20: mol_type = other DNA
cagcctgggtgacagggtaa

SEQ ID NO: 12285 - DNA, 20 bp, synthetic construct
  source 1..20: mol_type = other DNA
ccagcctgggtgacagggta

SEQ ID NO: 12286 - DNA, 20 bp, synthetic construct
  source 1..20: mol_type = other DNA
tccagcctgggtgacagggt

SEQ ID NO: 12287 - DNA, 20 bp, synthetic construct
  source 1..20: mol_type = other DNA
ttccagcctgggtgacaggg

SEQ ID NO: 12288 - DNA, 20 bp, synthetic construct
  source 1..20: mol_type = other DNA
attccagcctgggtgacagg

SEQ ID NO: 12289 - DNA, 20 bp, synthetic construct
  source 1..20: mol_type = other DNA
cattccagcctgggtgacag

SEQ ID NO: 12290 - DNA, 20 bp, synthetic construct
  source 1..20: mol_type = other DNA
gcattccagcctgggtgaca

SEQ ID NO: 12291 - DNA, 20 bp, synthetic construct
  source 1..20: mol_type = other DNA
tgcattccagcctgggtgac

SEQ ID NO: 12292 - DNA, 20 bp, synthetic construct
  source 1..20: mol_type = other DNA
ctgcattccagcctgggtga

SEQ ID NO: 12293 - DNA, 20 bp, synthetic construct
  source 1..20: mol_type = other DNA
actgcattccagcctgggtg

SEQ ID NO: 12294 - DNA, 20 bp, synthetic construct
  source 1..20: mol_type = other DNA
cactgcattccagcctgggt

SEQ ID NO: 12295 - DNA, 20 bp, synthetic construct
  source 1..20: mol_type = other DNA
tcactgcattccagcctggg

SEQ ID NO: 12296 - DNA, 20 bp, synthetic construct
  source 1..20: mol_type = other DNA
atcactgcattccagcctgg

SEQ ID NO: 12297 - DNA, 20 bp, synthetic construct
  source 1..20: mol_type = other DNA
catcactgcattccagcctg

SEQ ID NO: 12298 - DNA, 20 bp, synthetic construct
  source 1..20: mol_type = other DNA
acatcactgcattccagcct

SEQ ID NO: 12299 - DNA, 20 bp, synthetic construct
  source 1..20: mol_type = other DNA
cacatcactgcattccagcc

SEQ ID NO: 12300 - DNA, 20 bp, synthetic construct
  source 1..20: mol_type = other DNA
tcacatcactgcattccagc

SEQ ID NO: 12301 - DNA, 20 bp, synthetic construct
  source 1..20: mol_type = other DNA
atcacatcactgcattccag

SEQ ID NO: 12302 - DNA, 20 bp, synthetic construct
  source 1..20: mol_type = other DNA
gatcacatcactgcattcca

SEQ ID NO: 12303 - DNA, 20 bp, synthetic construct
  source 1..20: mol_type = other DNA
agatcacatcactgcattcc

SEQ ID NO: 12304 - DNA, 20 bp, synthetic construct
  source 1..20: mol_type = other DNA
gagatcacatcactgcattc

SEQ ID NO: 12305 - DNA, 20 bp, synthetic construct
  source 1..20: mol_type = other DNA
cgagatcacatcactgcatt

SEQ ID NO: 12306 - DNA, 20 bp, synthetic construct
  source 1..20: mol_type = other DNA
ccgagatcacatcactgcat

SEQ ID NO: 12307 - DNA, 20 bp, synthetic construct
  source 1..20: mol_type = other DNA
gccgagatcacatcactgca

SEQ ID NO: 12308 - DNA, 20 bp, synthetic construct
  source 1..20: mol_type = other DNA
agccgagatcacatcactgc

SEQ ID NO: 12309 - DNA, 20 bp, synthetic construct
  source 1..20: mol_type = other DNA
aagccgagatcacatcactg

SEQ ID NO: 12310 - DNA, 20 bp, synthetic construct
  source 1..20: mol_type = other DNA
taagccgagatcacatcact

SEQ ID NO: 12311 - DNA, 20 bp, synthetic construct
  source 1..20: mol_type = other DNA
gtaagccgagatcacatcac

SEQ ID NO: 12312 - DNA, 20 bp, synthetic construct
  source 1..20: mol_type = other DNA
agtaagccgagatcacatca

SEQ ID NO: 12313 - DNA, 20 bp, synthetic construct
  source 1..20: mol_type = other DNA
cagtaagccgagatcacatc

SEQ ID NO: 12314 - DNA, 20 bp, synthetic construct
  source 1..20: mol_type = other DNA
gcagtaagccgagatcacat

SEQ ID NO: 12315 - DNA, 20 bp, synthetic construct
  source 1..20: mol_type = other DNA
tgcagtaagccgagatcaca

SEQ ID NO: 12316 - DNA, 20 bp, synthetic construct
  source 1..20: mol_type = other DNA
ttgcagtaagccgagatcac

SEQ ID NO: 12317 - DNA, 20 bp, synthetic construct
  source 1..20: mol_type = other DNA
gttgcagtaagccgagatca

SEQ ID NO: 12318 - DNA, 20 bp, synthetic construct
  source 1..20: mol_type = other DNA
ggttgcagtaagccgagatc

SEQ ID NO: 12319 - DNA, 20 bp, synthetic construct
  source 1..20: mol_type = other DNA
aggttgcagtaagccgagat

SEQ ID NO: 12320 - DNA, 20 bp, synthetic construct
  source 1..20: mol_type = other DNA
gaggttgcagtaagccgaga

SEQ ID NO: 12321 - DNA, 20 bp, synthetic construct
  source 1..20: mol_type = other DNA
ggaggttgcagtaagccgag

SEQ ID NO: 12322 - DNA, 20 bp, synthetic construct
  source 1..20: mol_type = other DNA
cggaggttgcagtaagccga

SEQ ID NO: 12323 - DNA, 20 bp, synthetic construct
  source 1..20: mol_type = other DNA
gcggaggttgcagtaagccg

SEQ ID NO: 12324 - DNA, 20 bp, synthetic construct
  source 1..20: mol_type = other DNA
ggcggaggttgcagtaagcc

SEQ ID NO: 12325 - DNA, 20 bp, synthetic construct
  source 1..20: mol_type = other DNA
aggcggaggttgcagtaagc

SEQ ID NO: 12326 - DNA, 20 bp, synthetic construct
  source 1..20: mol_type = other DNA
gaggcggaggttgcagtaag

SEQ ID NO: 12327 - DNA, 20 bp, synthetic construct
  source 1..20: mol_type = other DNA
ggaggcggaggttgcagtaa

SEQ ID NO: 12328 - DNA, 20 bp, synthetic construct
  source 1..20: mol_type = other DNA
aggaggcggaggttgcagta

SEQ ID NO: 12329 - DNA, 20 bp, synthetic construct
  source 1..20: mol_type = other DNA
taggaggcggaggttgcagt

SEQ ID NO: 12330 - DNA, 20 bp, synthetic construct
  source 1..20: mol_type = other DNA
ctaggaggcggaggttgcag

SEQ ID NO: 12331 - DNA, 20 bp, synthetic construct
  source 1..20: mol_type = other DNA
cctaggaggcggaggttgca

SEQ ID NO: 12332 - DNA, 20 bp, synthetic construct
  source 1..20: mol_type = other DNA
acctaggaggcggaggttgc

SEQ ID NO: 12333 - DNA, 20 bp, synthetic construct
  source 1..20: mol_type = other DNA
aacctaggaggcggaggttg

SEQ ID NO: 12334 - DNA, 20 bp, synthetic construct
  source 1..20: mol_type = other DNA
gaacctaggaggcggaggtt

SEQ ID NO: 12335 - DNA, 20 bp, synthetic construct
  source 1..20: mol_type = other DNA
tgaacctaggaggcggaggt

SEQ ID NO: 12336 - DNA, 20 bp, synthetic construct
  source 1..20: mol_type = other DNA
ttgaacctaggaggcggagg

SEQ ID NO: 12337 - DNA, 20 bp, synthetic construct
  source 1..20: mol_type = other DNA
cttgaacctaggaggcggag

SEQ ID NO: 12338 - DNA, 20 bp, synthetic construct
  source 1..20: mol_type = other DNA
acttgaacctaggaggcgga

SEQ ID NO: 12339 - DNA, 20 bp, synthetic construct
  source 1..20: mol_type = other DNA
cacttgaacctaggaggcgg

SEQ ID NO: 12340 - DNA, 20 bp, synthetic construct
  source 1..20: mol_type = other DNA
tcacttgaacctaggaggcg

SEQ ID NO: 12341 - DNA, 20 bp, synthetic construct
  source 1..20: mol_type = other DNA
atcacttgaacctaggaggc

SEQ ID NO: 12342 - DNA, 20 bp, synthetic construct
  source 1..20: mol_type = other DNA
aatcacttgaacctaggagg

SEQ ID NO: 12343 - DNA, 20 bp, synthetic construct
  source 1..20: mol_type = other DNA
caatcacttgaacctaggag

SEQ ID NO: 12344 - DNA, 20 bp, synthetic construct
  source 1..20: mol_type = other DNA
acaatcacttgaacctagga

SEQ ID NO: 12345 - DNA, 20 bp, synthetic construct
  source 1..20: mol_type = other DNA
gacaatcacttgaacctagg

SEQ ID NO: 12346 - DNA, 20 bp, synthetic construct
  source 1..20: mol_type = other DNA
ggacaatcacttgaacctag

SEQ ID NO: 12347 - DNA, 20 bp, synthetic construct
  source 1..20: mol_type = other DNA
aggacaatcacttgaaccta

SEQ ID NO: 12348 - DNA, 20 bp, synthetic construct
  source 1..20: mol_type = other DNA
caggacaatcacttgaacct

SEQ ID NO: 12349 - DNA, 20 bp, synthetic construct
  source 1..20: mol_type = other DNA
gcaggacaatcacttgaacc

SEQ ID NO: 12350 - DNA, 20 bp, synthetic construct
  source 1..20: mol_type = other DNA
ggcaggacaatcacttgaac

SEQ ID NO: 12351 - DNA, 20 bp, synthetic construct
  source 1..20: mol_type = other DNA
aggcaggacaatcacttgaa

SEQ ID NO: 12352 - DNA, 20 bp, synthetic construct
  source 1..20: mol_type = other DNA
gaggcaggacaatcacttga

SEQ ID NO: 12353 - DNA, 20 bp, synthetic construct
  source 1..20: mol_type = other DNA
tgaggcaggacaatcacttg

SEQ ID NO: 12354 - DNA, 20 bp, synthetic construct
  source 1..20: mol_type = other DNA
ctgaggcaggacaatcactt

SEQ ID NO: 12355 - DNA, 20 bp, synthetic construct
  source 1..20: mol_type = other DNA
gctgaggcaggacaatcact

SEQ ID NO: 12356 - DNA, 20 bp, synthetic construct
  source 1..20: mol_type = other DNA
ggctgaggcaggacaatcac

SEQ ID NO: 12357 - DNA, 20 bp, synthetic construct
  source 1..20: mol_type = other DNA
aggctgaggcaggacaatca

SEQ ID NO: 12358 - DNA, 20 bp, synthetic construct
  source 1..20: mol_type = other DNA
gaggctgaggcaggacaatc

SEQ ID NO: 12359 - DNA, 20 bp, synthetic construct
  source 1..20: mol_type = other DNA
ggaggctgaggcaggacaat

SEQ ID NO: 12360 - DNA, 20 bp, synthetic construct
  source 1..20: mol_type = other DNA
aggaggctgaggcaggacaa

SEQ ID NO: 12361 - DNA, 20 bp, synthetic construct
  source 1..20: mol_type = other DNA
caggaggctgaggcaggaca

SEQ ID NO: 12362 - DNA, 20 bp, synthetic construct
  source 1..20: mol_type = other DNA
tcaggaggctgaggcaggac

SEQ ID NO: 12363 - DNA, 20 bp, synthetic construct
  source 1..20: mol_type = other DNA
ctcaggaggctgaggcagga

SEQ ID NO: 12364 - DNA, 20 bp, synthetic construct
  source 1..20: mol_type = other DNA
actcaggaggctgaggcagg

SEQ ID NO: 12365 - DNA, 20 bp, synthetic construct
  source 1..20: mol_type = other DNA
tactcaggaggctgaggcag

SEQ ID NO: 12366 - DNA, 20 bp, synthetic construct
  source 1..20: mol_type = other DNA
ctactcaggaggctgaggca

SEQ ID NO: 12367 - DNA, 20 bp, synthetic construct
  source 1..20: mol_type = other DNA
gctactcaggaggctgaggc

SEQ ID NO: 12368 - DNA, 20 bp, synthetic construct
  source 1..20: mol_type = other DNA
agctactcaggaggctgagg

SEQ ID NO: 12369 - DNA, 20 bp, synthetic construct
  source 1..20: mol_type = other DNA
cagctactcaggaggctgag

SEQ ID NO: 12370 - DNA, 20 bp, synthetic construct
  source 1..20: mol_type = other DNA
ccagctactcaggaggctga

SEQ ID NO: 12371 - DNA, 20 bp, synthetic construct
  source 1..20: mol_type = other DNA
cccagctactcaggaggctg

SEQ ID NO: 12372 - DNA, 20 bp, synthetic construct
  source 1..20: mol_type = other DNA
tcccagctactcaggaggct

SEQ ID NO: 12373 - DNA, 20 bp, synthetic construct
  source 1..20: mol_type = other DNA
atcccagctactcaggaggc

SEQ ID NO: 12374 - DNA, 20 bp, synthetic construct
  source 1..20: mol_type = other DNA
tatcccagctactcaggagg

SEQ ID NO: 12375 - DNA, 20 bp, synthetic construct
  source 1..20: mol_type = other DNA
ttatcccagctactcaggag

SEQ ID NO: 12376 - DNA, 20 bp, synthetic construct
  source 1..20: mol_type = other DNA
gttatcccagctactcagga

SEQ ID NO: 12377 - DNA, 20 bp, synthetic construct
  source 1..20: mol_type = other DNA
tgttatcccagctactcagg

SEQ ID NO: 12378 - DNA, 20 bp, synthetic construct
  source 1..20: mol_type = other DNA
ctgttatcccagctactcag

SEQ ID NO: 12379 - DNA, 20 bp, synthetic construct
  source 1..20: mol_type = other DNA
gctgttatcccagctactca

SEQ ID NO: 12380 - DNA, 20 bp, synthetic construct
  source 1..20: mol_type = other DNA
agctgttatcccagctactc

SEQ ID NO: 12381 - DNA, 20 bp, synthetic construct
  source 1..20: mol_type = other DNA
cagctgttatcccagctact

SEQ ID NO: 12382 - DNA, 20 bp, synthetic construct
  source 1..20: mol_type = other DNA
acagctgttatcccagctac

SEQ ID NO: 12383 - DNA, 20 bp, synthetic construct
  source 1..20: mol_type = other DNA
cacagctgttatcccagcta

SEQ ID NO: 12384 - DNA, 20 bp, synthetic construct
  source 1..20: mol_type = other DNA
acacagctgttatcccagct

SEQ ID NO: 12385 - DNA, 20 bp, synthetic construct
  source 1..20: mol_type = other DNA
cacacagctgttatcccagc

SEQ ID NO: 12386 - DNA, 20 bp, synthetic construct
  source 1..20: mol_type = other DNA
gcacacagctgttatcccag

SEQ ID NO: 12387 - DNA, 20 bp, synthetic construct
  source 1..20: mol_type = other DNA
ggcacacagctgttatccca

SEQ ID NO: 12388 - DNA, 20 bp, synthetic construct
  source 1..20: mol_type = other DNA
tggcacacagctgttatccc

SEQ ID NO: 12389 - DNA, 20 bp, synthetic construct
  source 1..20: mol_type = other DNA
gtggcacacagctgttatcc

SEQ ID NO: 12390 - DNA, 20 bp, synthetic construct
  source 1..20: mol_type = other DNA
ggtggcacacagctgttatc

SEQ ID NO: 12391 - DNA, 20 bp, synthetic construct
  source 1..20: mol_type = other DNA
tggtggcacacagctgttat

SEQ ID NO: 12392 - DNA, 20 bp, synthetic construct
  source 1..20: mol_type = other DNA
atggtggcacacagctgtta

SEQ ID NO: 12393 - DNA, 20 bp, synthetic construct
  source 1..20: mol_type = other DNA
catggtggcacacagctgtt

SEQ ID NO: 12394 - DNA, 20 bp, synthetic construct
  source 1..20: mol_type = other DNA
gcatggtggcacacagctgt

SEQ ID NO: 12395 - DNA, 20 bp, synthetic construct
  source 1..20: mol_type = other DNA
ggcatggtggcacacagctg

SEQ ID NO: 12396 - DNA, 20 bp, synthetic construct
  source 1..20: mol_type = other DNA
aggcatggtggcacacagct

SEQ ID NO: 12397 - DNA, 20 bp, synthetic construct
  source 1..20: mol_type = other DNA
caggcatggtggcacacagc

SEQ ID NO: 12398 - DNA, 20 bp, synthetic construct
  source 1..20: mol_type = other DNA
ccaggcatggtggcacacag

SEQ ID NO: 12399 - DNA, 20 bp, synthetic construct
  source 1..20: mol_type = other DNA
gccaggcatggtggcacaca

SEQ ID NO: 12400 - DNA, 20 bp, synthetic construct
  source 1..20: mol_type = other DNA
agccaggcatggtggcacac

SEQ ID NO: 12401 - DNA, 20 bp, synthetic construct
  source 1..20: mol_type = other DNA
tagccaggcatggtggcaca

SEQ ID NO: 12402 - DNA, 20 bp, synthetic construct
  source 1..20: mol_type = other DNA
ttagccaggcatggtggcac

SEQ ID NO: 12403 - DNA, 20 bp, synthetic construct
  source 1..20: mol_type = other DNA
attagccaggcatggtggca

SEQ ID NO: 12404 - DNA, 20 bp, synthetic construct
  source 1..20: mol_type = other DNA
aattagccaggcatggtggc

SEQ ID NO: 12405 - DNA, 20 bp, synthetic construct
  source 1..20: mol_type = other DNA
aaattagccaggcatggtgg

SEQ ID NO: 12406 - DNA, 20 bp, synthetic construct
  source 1..20: mol_type = other DNA
aaaattagccaggcatggtg

SEQ ID NO: 12407 - DNA, 20 bp, synthetic construct
  source 1..20: mol_type = other DNA
aaaaattagccaggcatggt

SEQ ID NO: 12408 - DNA, 20 bp, synthetic construct
  source 1..20: mol_type = other DNA
caaaaattagccaggcatgg

SEQ ID NO: 12409 - DNA, 20 bp, synthetic construct
  source 1..20: mol_type = other DNA
acaaaaattagccaggcatg

SEQ ID NO: 12410 - DNA, 20 bp, synthetic construct
  source 1..20: mol_type = other DNA
tacaaaaattagccaggcat

SEQ ID NO: 12411 - DNA, 20 bp, synthetic construct
  source 1..20: mol_type = other DNA
atacaaaaattagccaggca

SEQ ID NO: 12412 - DNA, 20 bp, synthetic construct
  source 1..20: mol_type = other DNA
aatacaaaaattagccaggc

SEQ ID NO: 12413 - DNA, 20 bp, synthetic construct
  source 1..20: mol_type = other DNA
aaatacaaaaattagccagg

SEQ ID NO: 12414 - DNA, 20 bp, synthetic construct
  source 1..20: mol_type = other DNA
aaaatacaaaaattagccag

SEQ ID NO: 12415 - DNA, 20 bp, synthetic construct
  source 1..20: mol_type = other DNA
aaaaatacaaaaattagcca

SEQ ID NO: 12416 - DNA, 20 bp, synthetic construct
  source 1..20: mol_type = other DNA
taaaaatacaaaaattagcc

SEQ ID NO: 12417 - DNA, 20 bp, synthetic construct
  source 1..20: mol_type = other DNA
ctaaaaatacaaaaattagc

SEQ ID NO: 12418 - DNA, 20 bp, synthetic construct
  source 1..20: mol_type = other DNA
actaaaaatacaaaaattag

SEQ ID NO: 12419 - DNA, 20 bp, synthetic construct
  source 1..20: mol_type = other DNA
tactaaaaatacaaaaatta

SEQ ID NO: 12420 - DNA, 20 bp, synthetic construct
  source 1..20: mol_type = other DNA
ctactaaaaatacaaaaatt

SEQ ID NO: 12421 - DNA, 20 bp, synthetic construct
  source 1..20: mol_type = other DNA
tctactaaaaatacaaaaat

SEQ ID NO: 12422 - DNA, 20 bp, synthetic construct
  source 1..20: mol_type = other DNA
ctctactaaaaatacaaaaa

SEQ ID NO: 12423 - DNA, 20 bp, synthetic construct
  source 1..20: mol_type = other DNA
tctctactaaaaatacaaaa

SEQ ID NO: 12424 - DNA, 20 bp, synthetic construct
  source 1..20: mol_type = other DNA
atctctactaaaaatacaaa

SEQ ID NO: 12425 - DNA, 20 bp, synthetic construct
  source 1..20: mol_type = other DNA
catctctactaaaaatacaa

SEQ ID NO: 12426 - DNA, 20 bp, synthetic construct
  source 1..20: mol_type = other DNA
ccatctctactaaaaataca

SEQ ID NO: 12427 - DNA, 20 bp, synthetic construct
  source 1..20: mol_type = other DNA
cccatctctactaaaaatac

SEQ ID NO: 12428 - DNA, 20 bp, synthetic construct
  source 1..20: mol_type = other DNA
ccccatctctactaaaaata

SEQ ID NO: 12429 - DNA, 20 bp, synthetic construct
  source 1..20: mol_type = other DNA
accccatctctactaaaaat

SEQ ID NO: 12430 - DNA, 20 bp, synthetic construct
  source 1..20: mol_type = other DNA
aaccccatctctactaaaaa

SEQ ID NO: 12431 - DNA, 20 bp, synthetic construct
  source 1..20: mol_type = other DNA
aaaccccatctctactaaaa

SEQ ID NO: 12432 - DNA, 20 bp, synthetic construct
  source 1..20: mol_type = other DNA
gaaaccccatctctactaaa

SEQ ID NO: 12433 - DNA, 20 bp, synthetic construct
  source 1..20: mol_type = other DNA
tgaaaccccatctctactaa

SEQ ID NO: 12434 - DNA, 20 bp, synthetic construct
  source 1..20: mol_type = other DNA
atgaaaccccatctctacta

SEQ ID NO: 12435 - DNA, 20 bp, synthetic construct
  source 1..20: mol_type = other DNA
gatgaaaccccatctctact

SEQ ID NO: 12436 - DNA, 20 bp, synthetic construct
  source 1..20: mol_type = other DNA
tgatgaaaccccatctctac

SEQ ID NO: 12437 - DNA, 20 bp, synthetic construct
  source 1..20: mol_type = other DNA
atgatgaaaccccatctcta

SEQ ID NO: 12438 - DNA, 20 bp, synthetic construct
  source 1..20: mol_type = other DNA
catgatgaaaccccatctct

SEQ ID NO: 12439 - DNA, 20 bp, synthetic construct
  source 1..20: mol_type = other DNA
acatgatgaaaccccatctc

SEQ ID NO: 12440 - DNA, 20 bp, synthetic construct
  source 1..20: mol_type = other DNA
aacatgatgaaaccccatct

SEQ ID NO: 12441 - DNA, 20 bp, synthetic construct
  source 1..20: mol_type = other DNA
caacatgatgaaaccccatc

SEQ ID NO: 12442 - DNA, 20 bp, synthetic construct
  source 1..20: mol_type = other DNA
ccaacatgatgaaaccccat

SEQ ID NO: 12443 - DNA, 20 bp, synthetic construct
  source 1..20: mol_type = other DNA
gccaacatgatgaaacccca

SEQ ID NO: 12444 - DNA, 20 bp, synthetic construct
  source 1..20: mol_type = other DNA
ggccaacatgatgaaacccc

SEQ ID NO: 12445 - DNA, 20 bp, synthetic construct
  source 1..20: mol_type = other DNA
tggccaacatgatgaaaccc

SEQ ID NO: 12446 - DNA, 20 bp, synthetic construct
  source 1..20: mol_type = other DNA
ctggccaacatgatgaaacc

SEQ ID NO: 12447 - DNA, 20 bp, synthetic construct
  source 1..20: mol_type = other DNA
cctggccaacatgatgaaac

SEQ ID NO: 12448 - DNA, 20 bp, synthetic construct
  source 1..20: mol_type = other DNA
gcctggccaacatgatgaaa

SEQ ID NO: 12449 - DNA, 20 bp, synthetic construct
  source 1..20: mol_type = other DNA
agcctggccaacatgatgaa

SEQ ID NO: 12450 - DNA, 20 bp, synthetic construct
  source 1..20: mol_type = other DNA
cagcctggccaacatgatga

SEQ ID NO: 12451 - DNA, 20 bp, synthetic construct
  source 1..20: mol_type = other DNA
ccagcctggccaacatgatg

SEQ ID NO: 12452 - DNA, 20 bp, synthetic construct
  source 1..20: mol_type = other DNA
accagcctggccaacatgat

SEQ ID NO: 12453 - DNA, 20 bp, synthetic construct
  source 1..20: mol_type = other DNA
gaccagcctggccaacatga

SEQ ID NO: 12454 - DNA, 20 bp, synthetic construct
  source 1..20: mol_type = other DNA
agaccagcctggccaacatg

SEQ ID NO: 12455 - DNA, 20 bp, synthetic construct
  source 1..20: mol_type = other DNA
gagaccagcctggccaacat

SEQ ID NO: 12456 - DNA, 20 bp, synthetic construct
  source 1..20: mol_type = other DNA
cgagaccagcctggccaaca

SEQ ID NO: 12457 - DNA, 20 bp, synthetic construct
  source 1..20: mol_type = other DNA
tcgagaccagcctggccaac

SEQ ID NO: 12458 - DNA, 20 bp, synthetic construct
  source 1..20: mol_type = other DNA
ttcgagaccagcctggccaa

SEQ ID NO: 12459 - DNA, 20 bp, synthetic construct
  source 1..20: mol_type = other DNA
gttcgagaccagcctggcca

SEQ ID NO: 12460 - DNA, 20 bp, synthetic construct
  source 1..20: mol_type = other DNA
agttcgagaccagcctggcc

SEQ ID NO: 12461 - DNA, 20 bp, synthetic construct
  source 1..20: mol_type = other DNA
gagttcgagaccagcctggc

SEQ ID NO: 12462 - DNA, 20 bp, synthetic construct
  source 1..20: mol_type = other DNA
ggagttcgagaccagcctgg

SEQ ID NO: 12463 - DNA, 20 bp, synthetic construct
  source 1..20: mol_type = other DNA
aggagttcgagaccagcctg

SEQ ID NO: 12464 - DNA, 20 bp, synthetic construct
  source 1..20: mol_type = other DNA
caggagttcgagaccagcct

SEQ ID NO: 12465 - DNA, 20 bp, synthetic construct
  source 1..20: mol_type = other DNA
tcaggagttcgagaccagcc

SEQ ID NO: 12466 - DNA, 20 bp, synthetic construct
  source 1..20: mol_type = other DNA
gtcaggagttcgagaccagc

SEQ ID NO: 12467 - DNA, 20 bp, synthetic construct
  source 1..20: mol_type = other DNA
ggtcaggagttcgagaccag

SEQ ID NO: 12468 - DNA, 20 bp, synthetic construct
  source 1..20: mol_type = other DNA
aggtcaggagttcgagacca

SEQ ID NO: 12469 - DNA, 20 bp, synthetic construct
  source 1..20: mol_type = other DNA
aaggtcaggagttcgagacc

SEQ ID NO: 12470 - DNA, 20 bp, synthetic construct
  source 1..20: mol_type = other DNA
taaggtcaggagttcgagac

SEQ ID NO: 12471 - DNA, 20 bp, synthetic construct
  source 1..20: mol_type = other DNA
ctaaggtcaggagttcgaga

SEQ ID NO: 12472 - DNA, 20 bp, synthetic construct
  source 1..20: mol_type = other DNA
tctaaggtcaggagttcgag

SEQ ID NO: 12473 - DNA, 20 bp, synthetic construct
  source 1..20: mol_type = other DNA
atctaaggtcaggagttcga

SEQ ID NO: 12474 - DNA, 20 bp, synthetic construct
  source 1..20: mol_type = other DNA
catctaaggtcaggagttcg

SEQ ID NO: 12475 - DNA, 20 bp, synthetic construct
  source 1..20: mol_type = other DNA
tcatctaaggtcaggagttc

SEQ ID NO: 12476 - DNA, 20 bp, synthetic construct
  source 1..20: mol_type = other DNA
atcatctaaggtcaggagtt

SEQ ID NO: 12477 - DNA, 20 bp, synthetic construct
  source 1..20: mol_type = other DNA
gatcatctaaggtcaggagt

SEQ ID NO: 12478 - DNA, 20 bp, synthetic construct
  source 1..20: mol_type = other DNA
ggatcatctaaggtcaggag

SEQ ID NO: 12479 - DNA, 20 bp, synthetic construct
  source 1..20: mol_type = other DNA
tggatcatctaaggtcagga

SEQ ID NO: 12480 - DNA, 20 bp, synthetic construct
  source 1..20: mol_type = other DNA
gtggatcatctaaggtcagg

SEQ ID NO: 12481 - DNA, 20 bp, synthetic construct
  source 1..20: mol_type = other DNA
ggtggatcatctaaggtcag

SEQ ID NO: 12482 - DNA, 20 bp, synthetic construct
  source 1..20: mol_type = other DNA
gggtggatcatctaaggtca

SEQ ID NO: 12483 - DNA, 20 bp, synthetic construct
  source 1..20: mol_type = other DNA
cgggtggatcatctaaggtc

SEQ ID NO: 12484 - DNA, 20 bp, synthetic construct
  source 1..20: mol_type = other DNA
gcgggtggatcatctaaggt

SEQ ID NO: 12485 - DNA, 20 bp, synthetic construct
  source 1..20: mol_type = other DNA
ggcgggtggatcatctaagg

SEQ ID NO: 12486 - DNA, 20 bp, synthetic construct
  source 1..20: mol_type = other DNA
aggcgggtggatcatctaag

SEQ ID NO: 12487 - DNA, 20 bp, synthetic construct
  source 1..20: mol_type = other DNA
gaggcgggtggatcatctaa

SEQ ID NO: 12488 - DNA, 20 bp, synthetic construct
  source 1..20: mol_type = other DNA
cgaggcgggtggatcatcta

SEQ ID NO: 12489 - DNA, 20 bp, synthetic construct
  source 1..20: mol_type = other DNA
acgaggcgggtggatcatct

SEQ ID NO: 12490 - DNA, 20 bp, synthetic construct
  source 1..20: mol_type = other DNA
gacgaggcgggtggatcatc

SEQ ID NO: 12491 - DNA, 20 bp, synthetic construct
  source 1..20: mol_type = other DNA
ggacgaggcgggtggatcat

SEQ ID NO: 12492 - DNA, 20 bp, synthetic construct
  source 1..20: mol_type = other DNA
aggacgaggcgggtggatca

SEQ ID NO: 12493 - DNA, 20 bp, synthetic construct
  source 1..20: mol_type = other DNA
gaggacgaggcgggtggatc

SEQ ID NO: 12494 - DNA, 20 bp, synthetic construct
  source 1..20: mol_type = other DNA
ggaggacgaggcgggtggat

SEQ ID NO: 12495 - DNA, 20 bp, synthetic construct
  source 1..20: mol_type = other DNA
gggaggacgaggcgggtgga

SEQ ID NO: 12496 - DNA, 20 bp, synthetic construct
  source 1..20: mol_type = other DNA
tgggaggacgaggcgggtgg

SEQ ID NO: 12497 - DNA, 20 bp, synthetic construct
  source 1..20: mol_type = other DNA
ttgggaggacgaggcgggtg

SEQ ID NO: 12498 - DNA, 20 bp, synthetic construct
  source 1..20: mol_type = other DNA
tttgggaggacgaggcgggt

SEQ ID NO: 12499 - DNA, 20 bp, synthetic construct
  source 1..20: mol_type = other DNA
ctttgggaggacgaggcggg

SEQ ID NO: 12500 - DNA, 20 bp, synthetic construct
  source 1..20: mol_type = other DNA
actttgggaggacgaggcgg

SEQ ID NO: 12501 - DNA, 20 bp, synthetic construct
  source 1..20: mol_type = other DNA
cactttgggaggacgaggcg

SEQ ID NO: 12502 - DNA, 20 bp, synthetic construct
  source 1..20: mol_type = other DNA
gcactttgggaggacgaggc

SEQ ID NO: 12503 - DNA, 20 bp, synthetic construct
  source 1..20: mol_type = other DNA
agcactttgggaggacgagg

SEQ ID NO: 12504 - DNA, 20 bp, synthetic construct
  source 1..20: mol_type = other DNA
cagcactttgggaggacgag

SEQ ID NO: 12505 - DNA, 20 bp, synthetic construct
  source 1..20: mol_type = other DNA
ccagcactttgggaggacga

SEQ ID NO: 12506 - DNA, 20 bp, synthetic construct
  source 1..20: mol_type = other DNA
cccagcactttgggaggacg

SEQ ID NO: 12507 - DNA, 20 bp, synthetic construct
  source 1..20: mol_type = other DNA
tcccagcactttgggaggac

SEQ ID NO: 12508 - DNA, 20 bp, synthetic construct
  source 1..20: mol_type = other DNA
atcccagcactttgggagga

SEQ ID NO: 12509 - DNA, 20 bp, synthetic construct
  source 1..20: mol_type = other DNA
aatcccagcactttgggagg

SEQ ID NO: 12510 - DNA, 20 bp, synthetic construct
  source 1..20: mol_type = other DNA
taatcccagcactttgggag

SEQ ID NO: 12511 - DNA, 20 bp, synthetic construct
  source 1..20: mol_type = other DNA
gtaatcccagcactttggga

SEQ ID NO: 12512 - DNA, 20 bp, synthetic construct
  source 1..20: mol_type = other DNA
tgtaatcccagcactttggg

SEQ ID NO: 12513 - DNA, 20 bp, synthetic construct
  source 1..20: mol_type = other DNA
ctgtaatcccagcactttgg

SEQ ID NO: 12514 - DNA, 20 bp, synthetic construct
  source 1..20: mol_type = other DNA
cctgtaatcccagcactttg

SEQ ID NO: 12515 - DNA, 20 bp, synthetic construct
  source 1..20: mol_type = other DNA
acctgtaatcccagcacttt

SEQ ID NO: 12516 - DNA, 20 bp, synthetic construct
  source 1..20: mol_type = other DNA
cacctgtaatcccagcactt

SEQ ID NO: 12517 - DNA, 20 bp, synthetic construct
  source 1..20: mol_type = other DNA
acacctgtaatcccagcact

SEQ ID NO: 12518 - DNA, 20 bp, synthetic construct
  source 1..20: mol_type = other DNA
cacacctgtaatcccagcac

SEQ ID NO: 12519 - DNA, 20 bp, synthetic construct
  source 1..20: mol_type = other DNA
tcacacctgtaatcccagca

SEQ ID NO: 12520 - DNA, 20 bp, synthetic construct
  source 1..20: mol_type = other DNA
ctcacacctgtaatcccagc

SEQ ID NO: 12521 - DNA, 20 bp, synthetic construct
  source 1..20: mol_type = other DNA
gctcacacctgtaatcccag

SEQ ID NO: 12522 - DNA, 20 bp, synthetic construct
  source 1..20: mol_type = other DNA
ggctcacacctgtaatccca

SEQ ID NO: 12523 - DNA, 20 bp, synthetic construct
  source 1..20: mol_type = other DNA
tggctcacacctgtaatccc

SEQ ID NO: 12524 - DNA, 20 bp, synthetic construct
  source 1..20: mol_type = other DNA
gtggctcacacctgtaatcc

SEQ ID NO: 12525 - DNA, 20 bp, synthetic construct
  source 1..20: mol_type = other DNA
ggtggctcacacctgtaatc

SEQ ID NO: 12526 - DNA, 20 bp, synthetic construct
  source 1..20: mol_type = other DNA
cggtggctcacacctgtaat

SEQ ID NO: 12527 - DNA, 20 bp, synthetic construct
  source 1..20: mol_type = other DNA
acggtggctcacacctgtaa

SEQ ID NO: 12528 - DNA, 20 bp, synthetic construct
  source 1..20: mol_type = other DNA
cacggtggctcacacctgta

SEQ ID NO: 12529 - DNA, 20 bp, synthetic construct
  source 1..20: mol_type = other DNA
tcacggtggctcacacctgt

SEQ ID NO: 12530 - DNA, 20 bp, synthetic construct
  source 1..20: mol_type = other DNA
gtcacggtggctcacacctg

SEQ ID NO: 12531 - DNA, 20 bp, synthetic construct
  source 1..20: mol_type = other DNA
ggtcacggtggctcacacct

SEQ ID NO: 12532 - DNA, 20 bp, synthetic construct
  source 1..20: mol_type = other DNA
tggtcacggtggctcacacc

SEQ ID NO: 12533 - DNA, 20 bp, synthetic construct
  source 1..20: mol_type = other DNA
ctggtcacggtggctcacac

SEQ ID NO: 12534 - DNA, 20 bp, synthetic construct
  source 1..20: mol_type = other DNA
actggtcacggtggctcaca

SEQ ID NO: 12535 - DNA, 20 bp, synthetic construct
  source 1..20: mol_type = other DNA
aactggtcacggtggctcac

SEQ ID NO: 12536 - DNA, 20 bp, synthetic construct
  source 1..20: mol_type = other DNA
aaactggtcacggtggctca

SEQ ID NO: 12537 - DNA, 20 bp, synthetic construct
  source 1..20: mol_type = other DNA
caaactggtcacggtggctc

SEQ ID NO: 12538 - DNA, 20 bp, synthetic construct
  source 1..20: mol_type = other DNA
ccaaactggtcacggtggct

SEQ ID NO: 12539 - DNA, 20 bp, synthetic construct
  source 1..20: mol_type = other DNA
accaaactggtcacggtggc

SEQ ID NO: 12540 - DNA, 20 bp, synthetic construct
  source 1..20: mol_type = other DNA
aaccaaactggtcacggtgg

SEQ ID NO: 12541 - DNA, 20 bp, synthetic construct
  source 1..20: mol_type = other DNA
aaaccaaactggtcacggtg

SEQ ID NO: 12542 - DNA, 20 bp, synthetic construct
  source 1..20: mol_type = other DNA
taaaccaaactggtcacggt

SEQ ID NO: 12543 - DNA, 20 bp, synthetic construct
  source 1..20: mol_type = other DNA
ctaaaccaaactggtcacgg

SEQ ID NO: 12544 - DNA, 20 bp, synthetic construct
  source 1..20: mol_type = other DNA
actaaaccaaactggtcacg

SEQ ID NO: 12545 - DNA, 20 bp, synthetic construct
  source 1..20: mol_type = other DNA
aactaaaccaaactggtcac

SEQ ID NO: 12546 - DNA, 20 bp, synthetic construct
  source 1..20: mol_type = other DNA
aaactaaaccaaactggtca

SEQ ID NO: 12547 - DNA, 20 bp, synthetic construct
  source 1..20: mol_type = other DNA
aaaactaaaccaaactggtc

SEQ ID NO: 12548 - DNA, 20 bp, synthetic construct
  source 1..20: mol_type = other DNA
aaaaactaaaccaaactggt

SEQ ID NO: 12549 - DNA, 20 bp, synthetic construct
  source 1..20: mol_type = other DNA
aaaaaactaaaccaaactgg

SEQ ID NO: 12550 - DNA, 20 bp, synthetic construct
  source 1..20: mol_type = other DNA
aaaaaaactaaaccaaactg

SEQ ID NO: 12551 - DNA, 20 bp, synthetic construct
  source 1..20: mol_type = other DNA
aaaaaaaactaaaccaaact

SEQ ID NO: 12552 - DNA, 20 bp, synthetic construct
  source 1..20: mol_type = other DNA
aaaaaaaaactaaaccaaac

SEQ ID NO: 12553 - DNA, 20 bp, synthetic construct
  source 1..20: mol_type = other DNA
aaaaaaaaaactaaaccaaa

SEQ ID NO: 12554 - DNA, 20 bp, synthetic construct
  source 1..20: mol_type = other DNA
aaaaaaaaaaactaaaccaa

SEQ ID NO: 12555 - DNA, 20 bp, synthetic construct
  source 1..20: mol_type = other DNA
aaaaaaaaaaaactaaacca

SEQ ID NO: 12556 - DNA, 20 bp, synthetic construct
  source 1..20: mol_type = other DNA
aaaaaaaaaaaaactaaacc

SEQ ID NO: 12557 - DNA, 20 bp, synthetic construct
  source 1..20: mol_type = other DNA
aaaaaaaaaaaaaactaaac

SEQ ID NO: 12558 - DNA, 20 bp, synthetic construct
  source 1..20: mol_type = other DNA
aaaaaaaaaaaaaaactaaa

SEQ ID NO: 12559 - DNA, 20 bp, synthetic construct
  source 1..20: mol_type = other DNA
aaaaaaaaaaaaaaaactaa

SEQ ID NO: 12560 - DNA, 20 bp, synthetic construct
  source 1..20: mol_type = other DNA
aaaaaaaaaaaaaaaaacta

SEQ ID NO: 12561 - DNA, 20 bp, synthetic construct
  source 1..20: mol_type = other DNA
aaaaaaaaaaaaaaaaaact

SEQ ID NO: 12562 - DNA, 20 bp, synthetic construct
  source 1..20: mol_type = other DNA
aaaaaaaaaaaaaaaaaaac

SEQ ID NO: 12563 - DNA, 20 bp, synthetic construct
  source 1..20: mol_type = other DNA
aaaaaaaaaaaaaaaaaaaa

SEQ ID NO: 12564 - DNA, 20 bp, synthetic construct
  source 1..20: mol_type = other DNA
aaaaaaaaaaaaaaaaaaaa

SEQ ID NO: 12565 - DNA, 20 bp, synthetic construct
  source 1..20: mol_type = other DNA
aaaaaaaaaaaaaaaaaaaa

SEQ ID NO: 12566 - DNA, 20 bp, synthetic construct
  source 1..20: mol_type = other DNA
aaaaaaaaaaaaaaaaaaaa

SEQ ID NO: 12567 - DNA, 20 bp, synthetic construct
  source 1..20: mol_type = other DNA
aaaaaaaaaaaaaaaaaaaa

SEQ ID NO: 12568 - DNA, 20 bp, synthetic construct
  source 1..20: mol_type = other DNA
aaaaaaaaaaaaaaaaaaaa

SEQ ID NO: 12569 - DNA, 20 bp, synthetic construct
  source 1..20: mol_type = other DNA
aaaaaaaaaaaaaaaaaaaa

SEQ ID NO: 12570 - DNA, 20 bp, synthetic construct
  source 1..20: mol_type = other DNA
aaaaaaaaaaaaaaaaaaaa

SEQ ID NO: 12571 - DNA, 20 bp, synthetic construct
  source 1..20: mol_type = other DNA
aaaaaaaaaaaaaaaaaaaa

SEQ ID NO: 12572 - DNA, 20 bp, synthetic construct
  source 1..20: mol_type = other DNA
aaaaaaaaaaaaaaaaaaaa

SEQ ID NO: 12573 - DNA, 20 bp, synthetic construct
  source 1..20: mol_type = other DNA
aaaaaaaaaaaaaaaaaaaa

SEQ ID NO: 12574 - DNA, 20 bp, synthetic construct
  source 1..20: mol_type = other DNA
aaaaaaaaaaaaaaaaaaaa

SEQ ID NO: 12575 - DNA, 20 bp, synthetic construct
  source 1..20: mol_type = other DNA
aaaaaaaaaaaaaaaaaaaa

SEQ ID NO: 12576 - DNA, 20 bp, synthetic construct
  source 1..20: mol_type = other DNA
aaaaaaaaaaaaaaaaaaaa

SEQ ID NO: 12577 - DNA, 20 bp, synthetic construct
  source 1..20: mol_type = other DNA
caaaaaaaaaaaaaaaaaaa

SEQ ID NO: 12578 - DNA, 20 bp, synthetic construct
  source 1..20: mol_type = other DNA
tcaaaaaaaaaaaaaaaaaa

SEQ ID NO: 12579 - DNA, 20 bp, synthetic construct
  source 1..20: mol_type = other DNA
ctcaaaaaaaaaaaaaaaaa

SEQ ID NO: 12580 - DNA, 20 bp, synthetic construct
  source 1..20: mol_type = other DNA
tctcaaaaaaaaaaaaaaaa

SEQ ID NO: 12581 - DNA, 20 bp, synthetic construct
  source 1..20: mol_type = other DNA
ttctcaaaaaaaaaaaaaaa

SEQ ID NO: 12582 - DNA, 20 bp, synthetic construct
  source 1..20: mol_type = other DNA
tttctcaaaaaaaaaaaaaa

SEQ ID NO: 12583 - DNA, 20 bp, synthetic construct
  source 1..20: mol_type = other DNA
atttctcaaaaaaaaaaaaa

SEQ ID NO: 12584 - DNA, 20 bp, synthetic construct
  source 1..20: mol_type = other DNA
gatttctcaaaaaaaaaaaa

SEQ ID NO: 12585 - DNA, 20 bp, synthetic construct
  source 1..20: mol_type = other DNA
agatttctcaaaaaaaaaaa

SEQ ID NO: 12586 - DNA, 20 bp, synthetic construct
  source 1..20: mol_type = other DNA
gagatttctcaaaaaaaaaa

SEQ ID NO: 12587 - DNA, 20 bp, synthetic construct
  source 1..20: mol_type = other DNA
cgagatttctcaaaaaaaaa

SEQ ID NO: 12588 - DNA, 20 bp, synthetic construct
  source 1..20: mol_type = other DNA
gcgagatttctcaaaaaaaa

SEQ ID NO: 12589 - DNA, 20 bp, synthetic construct
  source 1..20: mol_type = other DNA
agcgagatttctcaaaaaaa

SEQ ID NO: 12590 - DNA, 20 bp, synthetic construct
  source 1..20: mol_type = other DNA
gagcgagatttctcaaaaaa

SEQ ID NO: 12591 - DNA, 20 bp, synthetic construct
  source 1..20: mol_type = other DNA
agagcgagatttctcaaaaa

SEQ ID NO: 12592 - DNA, 20 bp, synthetic construct
  source 1..20: mol_type = other DNA
cagagcgagatttctcaaaa

SEQ ID NO: 12593 - DNA, 20 bp, synthetic construct
  source 1..20: mol_type = other DNA
acagagcgagatttctcaaa

SEQ ID NO: 12594 - DNA, 20 bp, synthetic construct
  source 1..20: mol_type = other DNA
gacagagcgagatttctcaa

SEQ ID NO: 12595 - DNA, 20 bp, synthetic construct
  source 1..20: mol_type = other DNA
cgacagagcgagatttctca

SEQ ID NO: 12596 - DNA, 20 bp, synthetic construct
  source 1..20: mol_type = other DNA
gcgacagagcgagatttctc

SEQ ID NO: 12597 - DNA, 20 bp, synthetic construct
  source 1..20: mol_type = other DNA
ggcgacagagcgagatttct

SEQ ID NO: 12598 - DNA, 20 bp, synthetic construct
  source 1..20: mol_type = other DNA
gggcgacagagcgagatttc

SEQ ID NO: 12599 - DNA, 20 bp, synthetic construct
  source 1..20: mol_type = other DNA
tgggcgacagagcgagattt

SEQ ID NO: 12600 - DNA, 20 bp, synthetic construct
  source 1..20: mol_type = other DNA
ctgggcgacagagcgagatt

SEQ ID NO: 12601 - DNA, 20 bp, synthetic construct
  source 1..20: mol_type = other DNA
cctgggcgacagagcgagat

SEQ ID NO: 12602 - DNA, 20 bp, synthetic construct
  source 1..20: mol_type = other DNA
gcctgggcgacagagcgaga

SEQ ID NO: 12603 - DNA, 20 bp, synthetic construct
  source 1..20: mol_type = other DNA
agcctgggcgacagagcgag

SEQ ID NO: 12604 - DNA, 20 bp, synthetic construct
  source 1..20: mol_type = other DNA
tagcctgggcgacagagcga

SEQ ID NO: 12605 - DNA, 20 bp, synthetic construct
  source 1..20: mol_type = other DNA
ctagcctgggcgacagagcg

SEQ ID NO: 12606 - DNA, 20 bp, synthetic construct
  source 1..20: mol_type = other DNA
tctagcctgggcgacagagc

SEQ ID NO: 12607 - DNA, 20 bp, synthetic construct
  source 1..20: mol_type = other DNA
ctctagcctgggcgacagag

SEQ ID NO: 12608 - DNA, 20 bp, synthetic construct
  source 1..20: mol_type = other DNA
actctagcctgggcgacaga

SEQ ID NO: 12609 - DNA, 20 bp, synthetic construct
  source 1..20: mol_type = other DNA
cactctagcctgggcgacag

SEQ ID NO: 12610 - DNA, 20 bp, synthetic construct
  source 1..20: mol_type = other DNA
gcactctagcctgggcgaca

SEQ ID NO: 12611 - DNA, 20 bp, synthetic construct
  source 1..20: mol_type = other DNA
cgcactctagcctgggcgac

SEQ ID NO: 12612 - DNA, 20 bp, synthetic construct
  source 1..20: mol_type = other DNA
ccgcactctagcctgggcga

SEQ ID NO: 12613 - DNA, 20 bp, synthetic construct
  source 1..20: mol_type = other DNA
accgcactctagcctgggcg

SEQ ID NO: 12614 - DNA, 20 bp, synthetic construct
  source 1..20: mol_type = other DNA
caccgcactctagcctgggc

SEQ ID NO: 12615 - DNA, 20 bp, synthetic construct
  source 1..20: mol_type = other DNA
tcaccgcactctagcctggg

SEQ ID NO: 12616 - DNA, 20 bp, synthetic construct
  source 1..20: mol_type = other DNA
gtcaccgcactctagcctgg

SEQ ID NO: 12617 - DNA, 20 bp, synthetic construct
  source 1..20: mol_type = other DNA
tgtcaccgcactctagcctg

SEQ ID NO: 12618 - DNA, 20 bp, synthetic construct
  source 1..20: mol_type = other DNA
gtgtcaccgcactctagcct

SEQ ID NO: 12619 - DNA, 20 bp, synthetic construct
  source 1..20: mol_type = other DNA
tgtgtcaccgcactctagcc

SEQ ID NO: 12620 - DNA, 20 bp, synthetic construct
  source 1..20: mol_type = other DNA
ttgtgtcaccgcactctagc

SEQ ID NO: 12621 - DNA, 20 bp, synthetic construct
  source 1..20: mol_type = other DNA
attgtgtcaccgcactctag

SEQ ID NO: 12622 - DNA, 20 bp, synthetic construct
  source 1..20: mol_type = other DNA
gattgtgtcaccgcactcta

SEQ ID NO: 12623 - DNA, 20 bp, synthetic construct
  source 1..20: mol_type = other DNA
agattgtgtcaccgcactct

SEQ ID NO: 12624 - DNA, 20 bp, synthetic construct
  source 1..20: mol_type = other DNA
gagattgtgtcaccgcactc

SEQ ID NO: 12625 - DNA, 20 bp, synthetic construct
  source 1..20: mol_type = other DNA
tgagattgtgtcaccgcact

SEQ ID NO: 12626 - DNA, 20 bp, synthetic construct
  source 1..20: mol_type = other DNA
ctgagattgtgtcaccgcac

SEQ ID NO: 12627 - DNA, 20 bp, synthetic construct
  source 1..20: mol_type = other DNA
gctgagattgtgtcaccgca

SEQ ID NO: 12628 - DNA, 20 bp, synthetic construct
  source 1..20: mol_type = other DNA
agctgagattgtgtcaccgc

SEQ ID NO: 12629 - DNA, 20 bp, synthetic construct
  source 1..20: mol_type = other DNA
gagctgagattgtgtcaccg

SEQ ID NO: 12630 - DNA, 20 bp, synthetic construct
  source 1..20: mol_type = other DNA
tgagctgagattgtgtcacc

SEQ ID NO: 12631 - DNA, 20 bp, synthetic construct
  source 1..20: mol_type = other DNA
gtgagctgagattgtgtcac

SEQ ID NO: 12632 - DNA, 20 bp, synthetic construct
  source 1..20: mol_type = other DNA
agtgagctgagattgtgtca

SEQ ID NO: 12633 - DNA, 20 bp, synthetic construct
  source 1..20: mol_type = other DNA
cagtgagctgagattgtgtc

SEQ ID NO: 12634 - DNA, 20 bp, synthetic construct
  source 1..20: mol_type = other DNA
gcagtgagctgagattgtgt

SEQ ID NO: 12635 - DNA, 20 bp, synthetic construct
  source 1..20: mol_type = other DNA
tgcagtgagctgagattgtg

SEQ ID NO: 12636 - DNA, 20 bp, synthetic construct
  source 1..20: mol_type = other DNA
ttgcagtgagctgagattgt

SEQ ID NO: 12637 - DNA, 20 bp, synthetic construct
  source 1..20: mol_type = other DNA
cttgcagtgagctgagattg

SEQ ID NO: 12638 - DNA, 20 bp, synthetic construct
  source 1..20: mol_type = other DNA
gcttgcagtgagctgagatt

SEQ ID NO: 12639 - DNA, 20 bp, synthetic construct
  source 1..20: mol_type = other DNA
agcttgcagtgagctgagat

SEQ ID NO: 12640 - DNA, 20 bp, synthetic construct
  source 1..20: mol_type = other DNA
gagcttgcagtgagctgaga

SEQ ID NO: 12641 - DNA, 20 bp, synthetic construct
  source 1..20: mol_type = other DNA
ggagcttgcagtgagctgag

SEQ ID NO: 12642 - DNA, 20 bp, synthetic construct
  source 1..20: mol_type = other DNA
tggagcttgcagtgagctga

SEQ ID NO: 12643 - DNA, 20 bp, synthetic construct
  source 1..20: mol_type = other DNA
gtggagcttgcagtgagctg

SEQ ID NO: 12644 - DNA, 20 bp, synthetic construct
  source 1..20: mol_type = other DNA
ggtggagcttgcagtgagct

SEQ ID NO: 12645 - DNA, 20 bp, synthetic construct
  source 1..20: mol_type = other DNA
aggtggagcttgcagtgagc

SEQ ID NO: 12646 - DNA, 20 bp, synthetic construct
  source 1..20: mol_type = other DNA
gaggtggagcttgcagtgag

SEQ ID NO: 12647 - DNA, 20 bp, synthetic construct
  source 1..20: mol_type = other DNA
ggaggtggagcttgcagtga

SEQ ID NO: 12648 - DNA, 20 bp, synthetic construct
  source 1..20: mol_type = other DNA
gggaggtggagcttgcagtg

SEQ ID NO: 12649 - DNA, 20 bp, synthetic construct
  source 1..20: mol_type = other DNA
tgggaggtggagcttgcagt

SEQ ID NO: 12650 - DNA, 20 bp, synthetic construct
  source 1..20: mol_type = other DNA
ctgggaggtggagcttgcag

SEQ ID NO: 12651 - DNA, 20 bp, synthetic construct
  source 1..20: mol_type = other DNA
cctgggaggtggagcttgca

SEQ ID NO: 12652 - DNA, 20 bp, synthetic construct
  source 1..20: mol_type = other DNA
acctgggaggtggagcttgc

SEQ ID NO: 12653 - DNA, 20 bp, synthetic construct
  source 1..20: mol_type = other DNA
aacctgggaggtggagcttg

SEQ ID NO: 12654 - DNA, 20 bp, synthetic construct
  source 1..20: mol_type = other DNA
gaacctgggaggtggagctt

SEQ ID NO: 12655 - DNA, 20 bp, synthetic construct
  source 1..20: mol_type = other DNA
tgaacctgggaggtggagct

SEQ ID NO: 12656 - DNA, 20 bp, synthetic construct
  source 1..20: mol_type = other DNA
atgaacctgggaggtggagc

SEQ ID NO: 12657 - DNA, 20 bp, synthetic construct
  source 1..20: mol_type = other DNA
catgaacctgggaggtggag

SEQ ID NO: 12658 - DNA, 20 bp, synthetic construct
  source 1..20: mol_type = other DNA
gcatgaacctgggaggtgga

SEQ ID NO: 12659 - DNA, 20 bp, synthetic construct
  source 1..20: mol_type = other DNA
ggcatgaacctgggaggtgg

SEQ ID NO: 12660 - DNA, 20 bp, synthetic construct
  source 1..20: mol_type = other DNA
tggcatgaacctgggaggtg

SEQ ID NO: 12661 - DNA, 20 bp, synthetic construct
  source 1..20: mol_type = other DNA
atggcatgaacctgggaggt

SEQ ID NO: 12662 - DNA, 20 bp, synthetic construct
  source 1..20: mol_type = other DNA
aatggcatgaacctgggagg

SEQ ID NO: 12663 - DNA, 20 bp, synthetic construct
  source 1..20: mol_type = other DNA
gaatggcatgaacctgggag

SEQ ID NO: 12664 - DNA, 20 bp, synthetic construct
  source 1..20: mol_type = other DNA
agaatggcatgaacctggga

SEQ ID NO: 12665 - DNA, 20 bp, synthetic construct
  source 1..20: mol_type = other DNA
gagaatggcatgaacctggg

SEQ ID NO: 12666 - DNA, 20 bp, synthetic construct
  source 1..20: mol_type = other DNA
ggagaatggcatgaacctgg

SEQ ID NO: 12667 - DNA, 20 bp, synthetic construct
  source 1..20: mol_type = other DNA
aggagaatggcatgaacctg

SEQ ID NO: 12668 - DNA, 20 bp, synthetic construct
  source 1..20: mol_type = other DNA
caggagaatggcatgaacct

SEQ ID NO: 12669 - DNA, 20 bp, synthetic construct
  source 1..20: mol_type = other DNA
gcaggagaatggcatgaacc

SEQ ID NO: 12670 - DNA, 20 bp, synthetic construct
  source 1..20: mol_type = other DNA
ggcaggagaatggcatgaac

SEQ ID NO: 12671 - DNA, 20 bp, synthetic construct
  source 1..20: mol_type = other DNA
aggcaggagaatggcatgaa

SEQ ID NO: 12672 - DNA, 20 bp, synthetic construct
  source 1..20: mol_type = other DNA
gaggcaggagaatggcatga

SEQ ID NO: 12673 - DNA, 20 bp, synthetic construct
  source 1..20: mol_type = other DNA
tgaggcaggagaatggcatg

SEQ ID NO: 12674 - DNA, 20 bp, synthetic construct
  source 1..20: mol_type = other DNA
ctgaggcaggagaatggcat

SEQ ID NO: 12675 - DNA, 20 bp, synthetic construct
  source 1..20: mol_type = other DNA
gctgaggcaggagaatggca

SEQ ID NO: 12676 - DNA, 20 bp, synthetic construct
  source 1..20: mol_type = other DNA
ggctgaggcaggagaatggc

SEQ ID NO: 12677 - DNA, 20 bp, synthetic construct
  source 1..20: mol_type = other DNA
aggctgaggcaggagaatgg

SEQ ID NO: 12678 - DNA, 20 bp, synthetic construct
  source 1..20: mol_type = other DNA
gaggctgaggcaggagaatg

SEQ ID NO: 12679 - DNA, 20 bp, synthetic construct
  source 1..20: mol_type = other DNA
ggaggctgaggcaggagaat

SEQ ID NO: 12680 - DNA, 20 bp, synthetic construct
  source 1..20: mol_type = other DNA
gggaggctgaggcaggagaa

SEQ ID NO: 12681 - DNA, 20 bp, synthetic construct
  source 1..20: mol_type = other DNA
cgggaggctgaggcaggaga

SEQ ID NO: 12682 - DNA, 20 bp, synthetic construct
  source 1..20: mol_type = other DNA
tcgggaggctgaggcaggag

SEQ ID NO: 12683 - DNA, 20 bp, synthetic construct
  source 1..20: mol_type = other DNA
ctcgggaggctgaggcagga

SEQ ID NO: 12684 - DNA, 20 bp, synthetic construct
  source 1..20: mol_type = other DNA
actcgggaggctgaggcagg

SEQ ID NO: 12685 - DNA, 20 bp, synthetic construct
  source 1..20: mol_type = other DNA
tactcgggaggctgaggcag

SEQ ID NO: 12686 - DNA, 20 bp, synthetic construct
  source 1..20: mol_type = other DNA
ctactcgggaggctgaggca

SEQ ID NO: 12687 - DNA, 20 bp, synthetic construct
  source 1..20: mol_type = other DNA
gctactcgggaggctgaggc

SEQ ID NO: 12688 - DNA, 20 bp, synthetic construct
  source 1..20: mol_type = other DNA
agctactcgggaggctgagg

SEQ ID NO: 12689 - DNA, 20 bp, synthetic construct
  source 1..20: mol_type = other DNA
cagctactcgggaggctgag

SEQ ID NO: 12690 - DNA, 20 bp, synthetic construct
  source 1..20: mol_type = other DNA
ccagctactcgggaggctga

SEQ ID NO: 12691 - DNA, 20 bp, synthetic construct
  source 1..20: mol_type = other DNA
cccagctactcgggaggctg

SEQ ID NO: 12692 - DNA, 20 bp, synthetic construct
  source 1..20: mol_type = other DNA
tcccagctactcgggaggct

SEQ ID NO: 12693 - DNA, 20 bp, synthetic construct
  source 1..20: mol_type = other DNA
gtcccagctactcgggaggc

SEQ ID NO: 12694 - DNA, 20 bp, synthetic construct
  source 1..20: mol_type = other DNA
agtcccagctactcgggagg

SEQ ID NO: 12695 - DNA, 20 bp, synthetic construct
  source 1..20: mol_type = other DNA
tagtcccagctactcgggag

SEQ ID NO: 12696 - DNA, 20 bp, synthetic construct
  source 1..20: mol_type = other DNA
gtagtcccagctactcggga

SEQ ID NO: 12697 - DNA, 20 bp, synthetic construct
  source 1..20: mol_type = other DNA
tgtagtcccagctactcggg

SEQ ID NO: 12698 - DNA, 20 bp, synthetic construct
  source 1..20: mol_type = other DNA
atgtagtcccagctactcgg

SEQ ID NO: 12699 - DNA, 20 bp, synthetic construct
  source 1..20: mol_type = other DNA
catgtagtcccagctactcg

SEQ ID NO: 12700 - DNA, 20 bp, synthetic construct
  source 1..20: mol_type = other DNA
gcatgtagtcccagctactc

SEQ ID NO: 12701 - DNA, 20 bp, synthetic construct
  source 1..20: mol_type = other DNA
cgcatgtagtcccagctact

SEQ ID NO: 12702 - DNA, 20 bp, synthetic construct
  source 1..20: mol_type = other DNA
gcgcatgtagtcccagctac

SEQ ID NO: 12703 - DNA, 20 bp, synthetic construct
  source 1..20: mol_type = other DNA
ggcgcatgtagtcccagcta

SEQ ID NO: 12704 - DNA, 20 bp, synthetic construct
  source 1..20: mol_type = other DNA
gggcgcatgtagtcccagct

SEQ ID NO: 12705 - DNA, 20 bp, synthetic construct
  source 1..20: mol_type = other DNA
cgggcgcatgtagtcccagc

SEQ ID NO: 12706 - DNA, 20 bp, synthetic construct
  source 1..20: mol_type = other DNA
gcgggcgcatgtagtcccag

SEQ ID NO: 12707 - DNA, 20 bp, synthetic construct
  source 1..20: mol_type = other DNA
ggcgggcgcatgtagtccca

SEQ ID NO: 12708 - DNA, 20 bp, synthetic construct
  source 1..20: mol_type = other DNA
tggcgggcgcatgtagtccc

SEQ ID NO: 12709 - DNA, 20 bp, synthetic construct
  source 1..20: mol_type = other DNA
gtggcgggcgcatgtagtcc

SEQ ID NO: 12710 - DNA, 20 bp, synthetic construct
  source 1..20: mol_type = other DNA
ggtggcgggcgcatgtagtc

SEQ ID NO: 12711 - DNA, 20 bp, synthetic construct
  source 1..20: mol_type = other DNA
tggtggcgggcgcatgtagt

SEQ ID NO: 12712 - DNA, 20 bp, synthetic construct
  source 1..20: mol_type = other DNA
atggtggcgggcgcatgtag

SEQ ID NO: 12713 - DNA, 20 bp, synthetic construct
  source 1..20: mol_type = other DNA
catggtggcgggcgcatgta

SEQ ID NO: 12714 - DNA, 20 bp, synthetic construct
  source 1..20: mol_type = other DNA
gcatggtggcgggcgcatgt

SEQ ID NO: 12715 - DNA, 20 bp, synthetic construct
  source 1..20: mol_type = other DNA
ggcatggtggcgggcgcatg

SEQ ID NO: 12716 - DNA, 20 bp, synthetic construct
  source 1..20: mol_type = other DNA
gggcatggtggcgggcgcat

SEQ ID NO: 12717 - DNA, 20 bp, synthetic construct
  source 1..20: mol_type = other DNA
cgggcatggtggcgggcgca

SEQ ID NO: 12718 - DNA, 20 bp, synthetic construct
  source 1..20: mol_type = other DNA
ccgggcatggtggcgggcgc

SEQ ID NO: 12719 - DNA, 20 bp, synthetic construct
  source 1..20: mol_type = other DNA
gccgggcatggtggcgggcg

SEQ ID NO: 12720 - DNA, 20 bp, synthetic construct
  source 1..20: mol_type = other DNA
agccgggcatggtggcgggc

SEQ ID NO: 12721 - DNA, 20 bp, synthetic construct
  source 1..20: mol_type = other DNA
tagccgggcatggtggcggg

SEQ ID NO: 12722 - DNA, 20 bp, synthetic construct
  source 1..20: mol_type = other DNA
ttagccgggcatggtggcgg

SEQ ID NO: 12723 - DNA, 20 bp, synthetic construct
  source 1..20: mol_type = other DNA
attagccgggcatggtggcg

SEQ ID NO: 12724 - DNA, 20 bp, synthetic construct
  source 1..20: mol_type = other DNA
aattagccgggcatggtggc

SEQ ID NO: 12725 - DNA, 20 bp, synthetic construct
  source 1..20: mol_type = other DNA
aaattagccgggcatggtgg

SEQ ID NO: 12726 - DNA, 20 bp, synthetic construct
  source 1..20: mol_type = other DNA
aaaattagccgggcatggtg

SEQ ID NO: 12727 - DNA, 20 bp, synthetic construct
  source 1..20: mol_type = other DNA
aaaaattagccgggcatggt

SEQ ID NO: 12728 - DNA, 20 bp, synthetic construct
  source 1..20: mol_type = other DNA
aaaaaattagccgggcatgg

SEQ ID NO: 12729 - DNA, 20 bp, synthetic construct
  source 1..20: mol_type = other DNA
aaaaaaattagccgggcatg

SEQ ID NO: 12730 - DNA, 20 bp, synthetic construct
  source 1..20: mol_type = other DNA
aaaaaaaattagccgggcat

SEQ ID NO: 12731 - DNA, 20 bp, synthetic construct
  source 1..20: mol_type = other DNA
taaaaaaaattagccgggca

SEQ ID NO: 12732 - DNA, 20 bp, synthetic construct
  source 1..20: mol_type = other DNA
ataaaaaaaattagccgggc

SEQ ID NO: 12733 - DNA, 20 bp, synthetic construct
  source 1..20: mol_type = other DNA
cataaaaaaaattagccggg

SEQ ID NO: 12734 - DNA, 20 bp, synthetic construct
  source 1..20: mol_type = other DNA
gcataaaaaaaattagccgg

SEQ ID NO: 12735 - DNA, 20 bp, synthetic construct
  source 1..20: mol_type = other DNA
tgcataaaaaaaattagccg

SEQ ID NO: 12736 - DNA, 20 bp, synthetic construct
  source 1..20: mol_type = other DNA
atgcataaaaaaaattagcc

SEQ ID NO: 12737 - DNA, 20 bp, synthetic construct
  source 1..20: mol_type = other DNA
aatgcataaaaaaaattagc

SEQ ID NO: 12738 - DNA, 20 bp, synthetic construct
  source 1..20: mol_type = other DNA
aaatgcataaaaaaaattag

SEQ ID NO: 12739 - DNA, 20 bp, synthetic construct
  source 1..20: mol_type = other DNA
aaaatgcataaaaaaaatta

SEQ ID NO: 12740 - DNA, 20 bp, synthetic construct
  source 1..20: mol_type = other DNA
taaaatgcataaaaaaaatt

SEQ ID NO: 12741 - DNA, 20 bp, synthetic construct
  source 1..20: mol_type = other DNA
ttaaaatgcataaaaaaaat

SEQ ID NO: 12742 - DNA, 20 bp, synthetic construct
  source 1..20: mol_type = other DNA
cttaaaatgcataaaaaaaa

SEQ ID NO: 12743 - DNA, 20 bp, synthetic construct
  source 1..20: mol_type = other DNA
acttaaaatgcataaaaaaa

SEQ ID NO: 12744 - DNA, 20 bp, synthetic construct
  source 1..20: mol_type = other DNA
tacttaaaatgcataaaaaa

SEQ ID NO: 12745 - DNA, 20 bp, synthetic construct
  source 1..20: mol_type = other DNA
ctacttaaaatgcataaaaa

SEQ ID NO: 12746 - DNA, 20 bp, synthetic construct
  source 1..20: mol_type = other DNA
tctacttaaaatgcataaaa

SEQ ID NO: 12747 - DNA, 20 bp, synthetic construct
  source 1..20: mol_type = other DNA
ctctacttaaaatgcataaa

SEQ ID NO: 12748 - DNA, 20 bp, synthetic construct
  source 1..20: mol_type = other DNA
tctctacttaaaatgcataa

SEQ ID NO: 12749 - DNA, 20 bp, synthetic construct
  source 1..20: mol_type = other DNA
atctctacttaaaatgcata

SEQ ID NO: 12750 - DNA, 20 bp, synthetic construct
  source 1..20: mol_type = other DNA
catctctacttaaaatgcat

SEQ ID NO: 12751 - DNA, 20 bp, synthetic construct
  source 1..20: mol_type = other DNA
ccatctctacttaaaatgca

SEQ ID NO: 12752 - DNA, 20 bp, synthetic construct
  source 1..20: mol_type = other DNA
cccatctctacttaaaatgc

SEQ ID NO: 12753 - DNA, 20 bp, synthetic construct
  source 1..20: mol_type = other DNA
ccccatctctacttaaaatg

SEQ ID NO: 12754 - DNA, 20 bp, synthetic construct
  source 1..20: mol_type = other DNA
accccatctctacttaaaat

SEQ ID NO: 12755 - DNA, 20 bp, synthetic construct
  source 1..20: mol_type = other DNA
aaccccatctctacttaaaa

SEQ ID NO: 12756 - DNA, 20 bp, synthetic construct
  source 1..20: mol_type = other DNA
aaaccccatctctacttaaa

SEQ ID NO: 12757 - DNA, 20 bp, synthetic construct
  source 1..20: mol_type = other DNA
gaaaccccatctctacttaa

SEQ ID NO: 12758 - DNA, 20 bp, synthetic construct
  source 1..20: mol_type = other DNA
tgaaaccccatctctactta

SEQ ID NO: 12759 - DNA, 20 bp, synthetic construct
  source 1..20: mol_type = other DNA
gtgaaaccccatctctactt

SEQ ID NO: 12760 - DNA, 20 bp, synthetic construct
  source 1..20: mol_type = other DNA
agtgaaaccccatctctact

SEQ ID NO: 12761 - DNA, 20 bp, synthetic construct
  source 1..20: mol_type = other DNA
cagtgaaaccccatctctac

SEQ ID NO: 12762 - DNA, 20 bp, synthetic construct
  source 1..20: mol_type = other DNA
acagtgaaaccccatctcta

SEQ ID NO: 12763 - DNA, 20 bp, synthetic construct
  source 1..20: mol_type = other DNA
cacagtgaaaccccatctct

SEQ ID NO: 12764 - DNA, 20 bp, synthetic construct
  source 1..20: mol_type = other DNA
acacagtgaaaccccatctc

SEQ ID NO: 12765 - DNA, 20 bp, synthetic construct
  source 1..20: mol_type = other DNA
aacacagtgaaaccccatct

SEQ ID NO: 12766 - DNA, 20 bp, synthetic construct
  source 1..20: mol_type = other DNA
taacacagtgaaaccccatc

SEQ ID NO: 12767 - DNA, 20 bp, synthetic construct
  source 1..20: mol_type = other DNA
ctaacacagtgaaaccccat

SEQ ID NO: 12768 - DNA, 20 bp, synthetic construct
  source 1..20: mol_type = other DNA
gctaacacagtgaaacccca

SEQ ID NO: 12769 - DNA, 20 bp, synthetic construct
  source 1..20: mol_type = other DNA
ggctaacacagtgaaacccc

SEQ ID NO: 12770 - DNA, 20 bp, synthetic construct
  source 1..20: mol_type = other DNA
tggctaacacagtgaaaccc

SEQ ID NO: 12771 - DNA, 20 bp, synthetic construct
  source 1..20: mol_type = other DNA
ctggctaacacagtgaaacc

SEQ ID NO: 12772 - DNA, 20 bp, synthetic construct
  source 1..20: mol_type = other DNA
cctggctaacacagtgaaac

SEQ ID NO: 12773 - DNA, 20 bp, synthetic construct
  source 1..20: mol_type = other DNA
tcctggctaacacagtgaaa

SEQ ID NO: 12774 - DNA, 20 bp, synthetic construct
  source 1..20: mol_type = other DNA
atcctggctaacacagtgaa

SEQ ID NO: 12775 - DNA, 20 bp, synthetic construct
  source 1..20: mol_type = other DNA
aatcctggctaacacagtga

SEQ ID NO: 12776 - DNA, 20 bp, synthetic construct
  source 1..20: mol_type = other DNA
caatcctggctaacacagtg

SEQ ID NO: 12777 - DNA, 20 bp, synthetic construct
  source 1..20: mol_type = other DNA
acaatcctggctaacacagt

SEQ ID NO: 12778 - DNA, 20 bp, synthetic construct
  source 1..20: mol_type = other DNA
gacaatcctggctaacacag

SEQ ID NO: 12779 - DNA, 20 bp, synthetic construct
  source 1..20: mol_type = other DNA
agacaatcctggctaacaca

SEQ ID NO: 12780 - DNA, 20 bp, synthetic construct
  source 1..20: mol_type = other DNA
gagacaatcctggctaacac

SEQ ID NO: 12781 - DNA, 20 bp, synthetic construct
  source 1..20: mol_type = other DNA
tgagacaatcctggctaaca

SEQ ID NO: 12782 - DNA, 20 bp, synthetic construct
  source 1..20: mol_type = other DNA
ttgagacaatcctggctaac

SEQ ID NO: 12783 - DNA, 20 bp, synthetic construct
  source 1..20: mol_type = other DNA
attgagacaatcctggctaa

SEQ ID NO: 12784 - DNA, 20 bp, synthetic construct
  source 1..20: mol_type = other DNA
gattgagacaatcctggcta

SEQ ID NO: 12785 - DNA, 20 bp, synthetic construct
  source 1..20: mol_type = other DNA
agattgagacaatcctggct

SEQ ID NO: 12786 - DNA, 20 bp, synthetic construct
  source 1..20: mol_type = other DNA
gagattgagacaatcctggc

SEQ ID NO: 12787 - DNA, 20 bp, synthetic construct
  source 1..20: mol_type = other DNA
ggagattgagacaatcctgg

SEQ ID NO: 12788 - DNA, 20 bp, synthetic construct
  source 1..20: mol_type = other DNA
gggagattgagacaatcctg

SEQ ID NO: 12789 - DNA, 20 bp, synthetic construct
  source 1..20: mol_type = other DNA
cgggagattgagacaatcct

SEQ ID NO: 12790 - DNA, 20 bp, synthetic construct
  source 1..20: mol_type = other DNA
tcgggagattgagacaatcc

SEQ ID NO: 12791 - DNA, 20 bp, synthetic construct
  source 1..20: mol_type = other DNA
gtcgggagattgagacaatc

SEQ ID NO: 12792 - DNA, 20 bp, synthetic construct
  source 1..20: mol_type = other DNA
ggtcgggagattgagacaat

SEQ ID NO: 12793 - DNA, 20 bp, synthetic construct
  source 1..20: mol_type = other DNA
aggtcgggagattgagacaa

SEQ ID NO: 12794 - DNA, 20 bp, synthetic construct
  source 1..20: mol_type = other DNA
gaggtcgggagattgagaca

SEQ ID NO: 12795 - DNA, 20 bp, synthetic construct
  source 1..20: mol_type = other DNA
agaggtcgggagattgagac

SEQ ID NO: 12796 - DNA, 20 bp, synthetic construct
  source 1..20: mol_type = other DNA
aagaggtcgggagattgaga

SEQ ID NO: 12797 - DNA, 20 bp, synthetic construct
  source 1..20: mol_type = other DNA
caagaggtcgggagattgag

SEQ ID NO: 12798 - DNA, 20 bp, synthetic construct
  source 1..20: mol_type = other DNA
tcaagaggtcgggagattga

SEQ ID NO: 12799 - DNA, 20 bp, synthetic construct
  source 1..20: mol_type = other DNA
atcaagaggtcgggagattg

SEQ ID NO: 12800 - DNA, 20 bp, synthetic construct
  source 1..20: mol_type = other DNA
gatcaagaggtcgggagatt

SEQ ID NO: 12801 - DNA, 20 bp, synthetic construct
  source 1..20: mol_type = other DNA
agatcaagaggtcgggagat

SEQ ID NO: 12802 - DNA, 20 bp, synthetic construct
  source 1..20: mol_type = other DNA
cagatcaagaggtcgggaga

SEQ ID NO: 12803 - DNA, 20 bp, synthetic construct
  source 1..20: mol_type = other DNA
gcagatcaagaggtcgggag

SEQ ID NO: 12804 - DNA, 20 bp, synthetic construct
  source 1..20: mol_type = other DNA
ggcagatcaagaggtcggga

SEQ ID NO: 12805 - DNA, 20 bp, synthetic construct
  source 1..20: mol_type = other DNA
gggcagatcaagaggtcggg

SEQ ID NO: 12806 - DNA, 20 bp, synthetic construct
  source 1..20: mol_type = other DNA
cgggcagatcaagaggtcgg

SEQ ID NO: 12807 - DNA, 20 bp, synthetic construct
  source 1..20: mol_type = other DNA
gcgggcagatcaagaggtcg

SEQ ID NO: 12808 - DNA, 20 bp, synthetic construct
  source 1..20: mol_type = other DNA
ggcgggcagatcaagaggtc

SEQ ID NO: 12809 - DNA, 20 bp, synthetic construct
  source 1..20: mol_type = other DNA
aggcgggcagatcaagaggt

SEQ ID NO: 12810 - DNA, 20 bp, synthetic construct
  source 1..20: mol_type = other DNA
gaggcgggcagatcaagagg

SEQ ID NO: 12811 - DNA, 20 bp, synthetic construct
  source 1..20: mol_type = other DNA
cgaggcgggcagatcaagag

SEQ ID NO: 12812 - DNA, 20 bp, synthetic construct
  source 1..20: mol_type = other DNA
ccgaggcgggcagatcaaga

SEQ ID NO: 12813 - DNA, 20 bp, synthetic construct
  source 1..20: mol_type = other DNA
gccgaggcgggcagatcaag

SEQ ID NO: 12814 - DNA, 20 bp, synthetic construct
  source 1..20: mol_type = other DNA
agccgaggcgggcagatcaa

SEQ ID NO: 12815 - DNA, 20 bp, synthetic construct
  source 1..20: mol_type = other DNA
aagccgaggcgggcagatca

SEQ ID NO: 12816 - DNA, 20 bp, synthetic construct
  source 1..20: mol_type = other DNA
gaagccgaggcgggcagatc

SEQ ID NO: 12817 - DNA, 20 bp, synthetic construct
  source 1..20: mol_type = other DNA
ggaagccgaggcgggcagat

SEQ ID NO: 12818 - DNA, 20 bp, synthetic construct
  source 1..20: mol_type = other DNA
gggaagccgaggcgggcaga

SEQ ID NO: 12819 - DNA, 20 bp, synthetic construct
  source 1..20: mol_type = other DNA
tgggaagccgaggcgggcag

SEQ ID NO: 12820 - DNA, 20 bp, synthetic construct
  source 1..20: mol_type = other DNA
ttgggaagccgaggcgggca

SEQ ID NO: 12821 - DNA, 20 bp, synthetic construct
  source 1..20: mol_type = other DNA
tttgggaagccgaggcgggc

SEQ ID NO: 12822 - DNA, 20 bp, synthetic construct
  source 1..20: mol_type = other DNA
ctttgggaagccgaggcggg

SEQ ID NO: 12823 - DNA, 20 bp, synthetic construct
  source 1..20: mol_type = other DNA
actttgggaagccgaggcgg

SEQ ID NO: 12824 - DNA, 20 bp, synthetic construct
  source 1..20: mol_type = other DNA
cactttgggaagccgaggcg

SEQ ID NO: 12825 - DNA, 20 bp, synthetic construct
  source 1..20: mol_type = other DNA
gcactttgggaagccgaggc

SEQ ID NO: 12826 - DNA, 20 bp, synthetic construct
  source 1..20: mol_type = other DNA
agcactttgggaagccgagg

SEQ ID NO: 12827 - DNA, 20 bp, synthetic construct
  source 1..20: mol_type = other DNA
cagcactttgggaagccgag

SEQ ID NO: 12828 - DNA, 20 bp, synthetic construct
  source 1..20: mol_type = other DNA
ccagcactttgggaagccga

SEQ ID NO: 12829 - DNA, 20 bp, synthetic construct
  source 1..20: mol_type = other DNA
cccagcactttgggaagccg

SEQ ID NO: 12830 - DNA, 20 bp, synthetic construct
  source 1..20: mol_type = other DNA
tcccagcactttgggaagcc

SEQ ID NO: 12831 - DNA, 20 bp, synthetic construct
  source 1..20: mol_type = other DNA
atcccagcactttgggaagc

SEQ ID NO: 12832 - DNA, 20 bp, synthetic construct
  source 1..20: mol_type = other DNA
aatcccagcactttgggaag

SEQ ID NO: 12833 - DNA, 20 bp, synthetic construct
  source 1..20: mol_type = other DNA
taatcccagcactttgggaa

SEQ ID NO: 12834 - DNA, 20 bp, synthetic construct
  source 1..20: mol_type = other DNA
ataatcccagcactttggga

SEQ ID NO: 12835 - DNA, 20 bp, synthetic construct
  source 1..20: mol_type = other DNA
tataatcccagcactttggg

SEQ ID NO: 12836 - DNA, 20 bp, synthetic construct
  source 1..20: mol_type = other DNA
ctataatcccagcactttgg

SEQ ID NO: 12837 - DNA, 20 bp, synthetic construct
  source 1..20: mol_type = other DNA
cctataatcccagcactttg

SEQ ID NO: 12838 - DNA, 20 bp, synthetic construct
  source 1..20: mol_type = other DNA
gcctataatcccagcacttt

SEQ ID NO: 12839 - DNA, 20 bp, synthetic construct
  source 1..20: mol_type = other DNA
tgcctataatcccagcactt

SEQ ID NO: 12840 - DNA, 20 bp, synthetic construct
  source 1..20: mol_type = other DNA
atgcctataatcccagcact

SEQ ID NO: 12841 - DNA, 20 bp, synthetic construct
  source 1..20: mol_type = other DNA
catgcctataatcccagcac

SEQ ID NO: 12842 - DNA, 20 bp, synthetic construct
  source 1..20: mol_type = other DNA
tcatgcctataatcccagca

SEQ ID NO: 12843 - DNA, 20 bp, synthetic construct
  source 1..20: mol_type = other DNA
ctcatgcctataatcccagc

SEQ ID NO: 12844 - DNA, 20 bp, synthetic construct
  source 1..20: mol_type = other DNA
gctcatgcctataatcccag

SEQ ID NO: 12845 - DNA, 20 bp, synthetic construct
  source 1..20: mol_type = other DNA
ggctcatgcctataatccca

SEQ ID NO: 12846 - DNA, 20 bp, synthetic construct
  source 1..20: mol_type = other DNA
tggctcatgcctataatccc

SEQ ID NO: 12847 - DNA, 20 bp, synthetic construct
  source 1..20: mol_type = other DNA
gtggctcatgcctataatcc

SEQ ID NO: 12848 - DNA, 20 bp, synthetic construct
  source 1..20: mol_type = other DNA
ggtggctcatgcctataatc

SEQ ID NO: 12849 - DNA, 20 bp, synthetic construct
  source 1..20: mol_type = other DNA
cggtggctcatgcctataat

SEQ ID NO: 12850 - DNA, 20 bp, synthetic construct
  source 1..20: mol_type = other DNA
gcggtggctcatgcctataa

SEQ ID NO: 12851 - DNA, 20 bp, synthetic construct
  source 1..20: mol_type = other DNA
cgcggtggctcatgcctata

SEQ ID NO: 12852 - DNA, 20 bp, synthetic construct
  source 1..20: mol_type = other DNA
acgcggtggctcatgcctat

SEQ ID NO: 12853 - DNA, 20 bp, synthetic construct
  source 1..20: mol_type = other DNA
gacgcggtggctcatgccta

SEQ ID NO: 12854 - DNA, 20 bp, synthetic construct
  source 1..20: mol_type = other DNA
ggacgcggtggctcatgcct

SEQ ID NO: 12855 - DNA, 20 bp, synthetic construct
  source 1..20: mol_type = other DNA
cggacgcggtggctcatgcc

SEQ ID NO: 12856 - DNA, 20 bp, synthetic construct
  source 1..20: mol_type = other DNA
ccggacgcggtggctcatgc

SEQ ID NO: 12857 - DNA, 20 bp, synthetic construct
  source 1..20: mol_type = other DNA
gccggacgcggtggctcatg

SEQ ID NO: 12858 - DNA, 20 bp, synthetic construct
  source 1..20: mol_type = other DNA
ggccggacgcggtggctcat

SEQ ID NO: 12859 - DNA, 20 bp, synthetic construct
  source 1..20: mol_type = other DNA
aggccggacgcggtggctca

SEQ ID NO: 12860 - DNA, 20 bp, synthetic construct
  source 1..20: mol_type = other DNA
caggccggacgcggtggctc

SEQ ID NO: 12861 - DNA, 20 bp, synthetic construct
  source 1..20: mol_type = other DNA
ccaggccggacgcggtggct

SEQ ID NO: 12862 - DNA, 20 bp, synthetic construct
  source 1..20: mol_type = other DNA
accaggccggacgcggtggc

SEQ ID NO: 12863 - DNA, 20 bp, synthetic construct
  source 1..20: mol_type = other DNA
aaccaggccggacgcggtgg

SEQ ID NO: 12864 - DNA, 20 bp, synthetic construct
  source 1..20: mol_type = other DNA
aaaccaggccggacgcggtg

SEQ ID NO: 12865 - DNA, 20 bp, synthetic construct
  source 1..20: mol_type = other DNA
caaaccaggccggacgcggt

SEQ ID NO: 12866 - DNA, 20 bp, synthetic construct
  source 1..20: mol_type = other DNA
ccaaaccaggccggacgcgg

SEQ ID NO: 12867 - DNA, 20 bp, synthetic construct
  source 1..20: mol_type = other DNA
accaaaccaggccggacgcg

SEQ ID NO: 12868 - DNA, 20 bp, synthetic construct
  source 1..20: mol_type = other DNA
taccaaaccaggccggacgc

SEQ ID NO: 12869 - DNA, 20 bp, synthetic construct
  source 1..20: mol_type = other DNA
ataccaaaccaggccggacg

SEQ ID NO: 12870 - DNA, 20 bp, synthetic construct
  source 1..20: mol_type = other DNA
aataccaaaccaggccggac

SEQ ID NO: 12871 - DNA, 20 bp, synthetic construct
  source 1..20: mol_type = other DNA
aaataccaaaccaggccgga

SEQ ID NO: 12872 - DNA, 20 bp, synthetic construct
  source 1..20: mol_type = other DNA
aaaataccaaaccaggccgg

SEQ ID NO: 12873 - DNA, 20 bp, synthetic construct
  source 1..20: mol_type = other DNA
aaaaataccaaaccaggccg

SEQ ID NO: 12874 - DNA, 20 bp, synthetic construct
  source 1..20: mol_type = other DNA
aaaaaataccaaaccaggcc

SEQ ID NO: 12875 - DNA, 20 bp, synthetic construct
  source 1..20: mol_type = other DNA
aaaaaaataccaaaccaggc

SEQ ID NO: 12876 - DNA, 20 bp, synthetic construct
  source 1..20: mol_type = other DNA
aaaaaaaataccaaaccagg

SEQ ID NO: 12877 - DNA, 20 bp, synthetic construct
  source 1..20: mol_type = other DNA
taaaaaaaataccaaaccag

SEQ ID NO: 12878 - DNA, 20 bp, synthetic construct
  source 1..20: mol_type = other DNA
ataaaaaaaataccaaacca

SEQ ID NO: 12879 - DNA, 20 bp, synthetic construct
  source 1..20: mol_type = other DNA
cataaaaaaaataccaaacc

SEQ ID NO: 12880 - DNA, 20 bp, synthetic construct
  source 1..20: mol_type = other DNA
tcataaaaaaaataccaaac

SEQ ID NO: 12881 - DNA, 20 bp, synthetic construct
  source 1..20: mol_type = other DNA
ctcataaaaaaaataccaaa

SEQ ID NO: 12882 - DNA, 20 bp, synthetic construct
  source 1..20: mol_type = other DNA
actcataaaaaaaataccaa

SEQ ID NO: 12883 - DNA, 20 bp, synthetic construct
  source 1..20: mol_type = other DNA
gactcataaaaaaaatacca

SEQ ID NO: 12884 - DNA, 20 bp, synthetic construct
  source 1..20: mol_type = other DNA
agactcataaaaaaaatacc

SEQ ID NO: 12885 - DNA, 20 bp, synthetic construct
  source 1..20: mol_type = other DNA
cagactcataaaaaaaatac

SEQ ID NO: 12886 - DNA, 20 bp, synthetic construct
  source 1..20: mol_type = other DNA
ccagactcataaaaaaaata

SEQ ID NO: 12887 - DNA, 20 bp, synthetic construct
  source 1..20: mol_type = other DNA
cccagactcataaaaaaaat

SEQ ID NO: 12888 - DNA, 20 bp, synthetic construct
  source 1..20: mol_type = other DNA
acccagactcataaaaaaaa

SEQ ID NO: 12889 - DNA, 20 bp, synthetic construct
  source 1..20: mol_type = other DNA
aacccagactcataaaaaaa

SEQ ID NO: 12890 - DNA, 20 bp, synthetic construct
  source 1..20: mol_type = other DNA
caacccagactcataaaaaa

SEQ ID NO: 12891 - DNA, 20 bp, synthetic construct
  source 1..20: mol_type = other DNA
acaacccagactcataaaaa

SEQ ID NO: 12892 - DNA, 20 bp, synthetic construct
  source 1..20: mol_type = other DNA
aacaacccagactcataaaa

SEQ ID NO: 12893 - DNA, 20 bp, synthetic construct
  source 1..20: mol_type = other DNA
aaacaacccagactcataaa

SEQ ID NO: 12894 - DNA, 20 bp, synthetic construct
  source 1..20: mol_type = other DNA
taaacaacccagactcataa

SEQ ID NO: 12895 - DNA, 20 bp, synthetic construct
  source 1..20: mol_type = other DNA
ataaacaacccagactcata

SEQ ID NO: 12896 - DNA, 20 bp, synthetic construct
  source 1..20: mol_type = other DNA
cataaacaacccagactcat

SEQ ID NO: 12897 - DNA, 20 bp, synthetic construct
  source 1..20: mol_type = other DNA
tcataaacaacccagactca

SEQ ID NO: 12898 - DNA, 20 bp, synthetic construct
  source 1..20: mol_type = other DNA
ttcataaacaacccagactc

SEQ ID NO: 12899 - DNA, 20 bp, synthetic construct
  source 1..20: mol_type = other DNA
tttcataaacaacccagact

SEQ ID NO: 12900 - DNA, 20 bp, synthetic construct
  source 1..20: mol_type = other DNA
ttttcataaacaacccagac

SEQ ID NO: 12901 - DNA, 20 bp, synthetic construct
  source 1..20: mol_type = other DNA
gttttcataaacaacccaga

SEQ ID NO: 12902 - DNA, 20 bp, synthetic construct
  source 1..20: mol_type = other DNA
agttttcataaacaacccag

SEQ ID NO: 12903 - DNA, 20 bp, synthetic construct
  source 1..20: mol_type = other DNA
aagttttcataaacaaccca

SEQ ID NO: 12904 - DNA, 20 bp, synthetic construct
  source 1..20: mol_type = other DNA
caagttttcataaacaaccc

SEQ ID NO: 12905 - DNA, 20 bp, synthetic construct
  source 1..20: mol_type = other DNA
acaagttttcataaacaacc

SEQ ID NO: 12906 - DNA, 20 bp, synthetic construct
  source 1..20: mol_type = other DNA
gacaagttttcataaacaac

SEQ ID NO: 12907 - DNA, 20 bp, synthetic construct
  source 1..20: mol_type = other DNA
tgacaagttttcataaacaa

SEQ ID NO: 12908 - DNA, 20 bp, synthetic construct
  source 1..20: mol_type = other DNA
gtgacaagttttcataaaca

SEQ ID NO: 12909 - DNA, 20 bp, synthetic construct
  source 1..20: mol_type = other DNA
tgtgacaagttttcataaac

SEQ ID NO: 12910 - DNA, 20 bp, synthetic construct
  source 1..20: mol_type = other DNA
ctgtgacaagttttcataaa

SEQ ID NO: 12911 - DNA, 20 bp, synthetic construct
  source 1..20: mol_type = other DNA
gctgtgacaagttttcataa

SEQ ID NO: 12912 - DNA, 20 bp, synthetic construct
  source 1..20: mol_type = other DNA
agctgtgacaagttttcata

SEQ ID NO: 12913 - DNA, 20 bp, synthetic construct
  source 1..20: mol_type = other DNA
cagctgtgacaagttttcat

SEQ ID NO: 12914 - DNA, 20 bp, synthetic construct
  source 1..20: mol_type = other DNA
acagctgtgacaagttttca

SEQ ID NO: 12915 - DNA, 20 bp, synthetic construct
  source 1..20: mol_type = other DNA
aacagctgtgacaagttttc

SEQ ID NO: 12916 - DNA, 20 bp, synthetic construct
  source 1..20: mol_type = other DNA
taacagctgtgacaagtttt

SEQ ID NO: 12917 - DNA, 20 bp, synthetic construct
  source 1..20: mol_type = other DNA
ttaacagctgtgacaagttt

SEQ ID NO: 12918 - DNA, 20 bp, synthetic construct
  source 1..20: mol_type = other DNA
gttaacagctgtgacaagtt

SEQ ID NO: 12919 - DNA, 20 bp, synthetic construct
  source 1..20: mol_type = other DNA
ggttaacagctgtgacaagt

SEQ ID NO: 12920 - DNA, 20 bp, synthetic construct
  source 1..20: mol_type = other DNA
aggttaacagctgtgacaag

SEQ ID NO: 12921 - DNA, 20 bp, synthetic construct
  source 1..20: mol_type = other DNA
aaggttaacagctgtgacaa

SEQ ID NO: 12922 - DNA, 20 bp, synthetic construct
  source 1..20: mol_type = other DNA
taaggttaacagctgtgaca

SEQ ID NO: 12923 - DNA, 20 bp, synthetic construct
  source 1..20: mol_type = other DNA
ttaaggttaacagctgtgac

SEQ ID NO: 12924 - DNA, 20 bp, synthetic construct
  source 1..20: mol_type = other DNA
gttaaggttaacagctgtga

SEQ ID NO: 12925 - DNA, 20 bp, synthetic construct
  source 1..20: mol_type = other DNA
agttaaggttaacagctgtg

SEQ ID NO: 12926 - DNA, 20 bp, synthetic construct
  source 1..20: mol_type = other DNA
aagttaaggttaacagctgt

SEQ ID NO: 12927 - DNA, 20 bp, synthetic construct
  source 1..20: mol_type = other DNA
aaagttaaggttaacagctg

SEQ ID NO: 12928 - DNA, 20 bp, synthetic construct
  source 1..20: mol_type = other DNA
aaaagttaaggttaacagct

SEQ ID NO: 12929 - DNA, 20 bp, synthetic construct
  source 1..20: mol_type = other DNA
aaaaagttaaggttaacagc

SEQ ID NO: 12930 - DNA, 20 bp, synthetic construct
  source 1..20: mol_type = other DNA
aaaaaagttaaggttaacag

SEQ ID NO: 12931 - DNA, 20 bp, synthetic construct
  source 1..20: mol_type = other DNA
aaaaaaagttaaggttaaca

SEQ ID NO: 12932 - DNA, 20 bp, synthetic construct
  source 1..20: mol_type = other DNA
aaaaaaaagttaaggttaac

SEQ ID NO: 12933 - DNA, 20 bp, synthetic construct
  source 1..20: mol_type = other DNA
aaaaaaaaagttaaggttaa

SEQ ID NO: 12934 - DNA, 20 bp, synthetic construct
  source 1..20: mol_type = other DNA
aaaaaaaaaagttaaggtta

SEQ ID NO: 12935 - DNA, 20 bp, synthetic construct
  source 1..20: mol_type = other DNA
aaaaaaaaaaagttaaggtt

SEQ ID NO: 12936 - DNA, 20 bp, synthetic construct
  source 1..20: mol_type = other DNA
gaaaaaaaaaaagttaaggt

SEQ ID NO: 12937 - DNA, 20 bp, synthetic construct
  source 1..20: mol_type = other DNA
agaaaaaaaaaaagttaagg

SEQ ID NO: 12938 - DNA, 20 bp, synthetic construct
  source 1..20: mol_type = other DNA
aagaaaaaaaaaaagttaag

SEQ ID NO: 12939 - DNA, 20 bp, synthetic construct
  source 1..20: mol_type = other DNA
aaagaaaaaaaaaaagttaa

SEQ ID NO: 12940 - DNA, 20 bp, synthetic construct
  source 1..20: mol_type = other DNA
aaaagaaaaaaaaaaagtta

SEQ ID NO: 12941 - DNA, 20 bp, synthetic construct
  source 1..20: mol_type = other DNA
aaaaagaaaaaaaaaaagtt

SEQ ID NO: 12942 - DNA, 20 bp, synthetic construct
  source 1..20: mol_type = other DNA
aaaaaagaaaaaaaaaaagt

SEQ ID NO: 12943 - DNA, 20 bp, synthetic construct
  source 1..20: mol_type = other DNA
aaaaaaagaaaaaaaaaaag

SEQ ID NO: 12944 - DNA, 20 bp, synthetic construct
  source 1..20: mol_type = other DNA
aaaaaaaagaaaaaaaaaaa

SEQ ID NO: 12945 - DNA, 20 bp, synthetic construct
  source 1..20: mol_type = other DNA
gaaaaaaaagaaaaaaaaaa

SEQ ID NO: 12946 - DNA, 20 bp, synthetic construct
  source 1..20: mol_type = other DNA
ggaaaaaaaagaaaaaaaaa

SEQ ID NO: 12947 - DNA, 20 bp, synthetic construct
  source 1..20: mol_type = other DNA
cggaaaaaaaagaaaaaaaa

SEQ ID NO: 12948 - DNA, 20 bp, synthetic construct
  source 1..20: mol_type = other DNA
tcggaaaaaaaagaaaaaaa

SEQ ID NO: 12949 - DNA, 20 bp, synthetic construct
  source 1..20: mol_type = other DNA
ctcggaaaaaaaagaaaaaa

SEQ ID NO: 12950 - DNA, 20 bp, synthetic construct
  source 1..20: mol_type = other DNA
tctcggaaaaaaaagaaaaa

SEQ ID NO: 12951 - DNA, 20 bp, synthetic construct
  source 1..20: mol_type = other DNA
gtctcggaaaaaaaagaaaa

SEQ ID NO: 12952 - DNA, 20 bp, synthetic construct
  source 1..20: mol_type = other DNA
cgtctcggaaaaaaaagaaa

SEQ ID NO: 12953 - DNA, 20 bp, synthetic construct
  source 1..20: mol_type = other DNA
ccgtctcggaaaaaaaagaa

SEQ ID NO: 12954 - DNA, 20 bp, synthetic construct
  source 1..20: mol_type = other DNA
tccgtctcggaaaaaaaaga

SEQ ID NO: 12955 - DNA, 20 bp, synthetic construct
  source 1..20: mol_type = other DNA
ctccgtctcggaaaaaaaag

SEQ ID NO: 12956 - DNA, 20 bp, synthetic construct
  source 1..20: mol_type = other DNA
actccgtctcggaaaaaaaa

SEQ ID NO: 12957 - DNA, 20 bp, synthetic construct
  source 1..20: mol_type = other DNA
gactccgtctcggaaaaaaa

SEQ ID NO: 12958 - DNA, 20 bp, synthetic construct
  source 1..20: mol_type = other DNA
agactccgtctcggaaaaaa

SEQ ID NO: 12959 - DNA, 20 bp, synthetic construct
  source 1..20: mol_type = other DNA
gagactccgtctcggaaaaa

SEQ ID NO: 12960 - DNA, 20 bp, synthetic construct
  source 1..20: mol_type = other DNA
cgagactccgtctcggaaaa

SEQ ID NO: 12961 - DNA, 20 bp, synthetic construct
  source 1..20: mol_type = other DNA
gcgagactccgtctcggaaa

SEQ ID NO: 12962 - DNA, 20 bp, synthetic construct
  source 1..20: mol_type = other DNA
agcgagactccgtctcggaa

SEQ ID NO: 12963 - DNA, 20 bp, synthetic construct
  source 1..20: mol_type = other DNA
gagcgagactccgtctcgga

SEQ ID NO: 12964 - DNA, 20 bp, synthetic construct
  source 1..20: mol_type = other DNA
agagcgagactccgtctcgg

SEQ ID NO: 12965 - DNA, 20 bp, synthetic construct
  source 1..20: mol_type = other DNA
cagagcgagactccgtctcg

SEQ ID NO: 12966 - DNA, 20 bp, synthetic construct
  source 1..20: mol_type = other DNA
acagagcgagactccgtctc

SEQ ID NO: 12967 - DNA, 20 bp, synthetic construct
  source 1..20: mol_type = other DNA
gacagagcgagactccgtct

SEQ ID NO: 12968 - DNA, 20 bp, synthetic construct
  source 1..20: mol_type = other DNA
tgacagagcgagactccgtc

SEQ ID NO: 12969 - DNA, 20 bp, synthetic construct
  source 1..20: mol_type = other DNA
gtgacagagcgagactccgt

SEQ ID NO: 12970 - DNA, 20 bp, synthetic construct
  source 1..20: mol_type = other DNA
ggtgacagagcgagactccg

SEQ ID NO: 12971 - DNA, 20 bp, synthetic construct
  source 1..20: mol_type = other DNA
aggtgacagagcgagactcc

SEQ ID NO: 12972 - DNA, 20 bp, synthetic construct
  source 1..20: mol_type = other DNA
taggtgacagagcgagactc

SEQ ID NO: 12973 - DNA, 20 bp, synthetic construct
  source 1..20: mol_type = other DNA
ctaggtgacagagcgagact

SEQ ID NO: 12974 - DNA, 20 bp, synthetic construct
  source 1..20: mol_type = other DNA
cctaggtgacagagcgagac

SEQ ID NO: 12975 - DNA, 20 bp, synthetic construct
  source 1..20: mol_type = other DNA
gcctaggtgacagagcgaga

SEQ ID NO: 12976 - DNA, 20 bp, synthetic construct
  source 1..20: mol_type = other DNA
agcctaggtgacagagcgag

SEQ ID NO: 12977 - DNA, 20 bp, synthetic construct
  source 1..20: mol_type = other DNA
cagcctaggtgacagagcga

SEQ ID NO: 12978 - DNA, 20 bp, synthetic construct
  source 1..20: mol_type = other DNA
ccagcctaggtgacagagcg

SEQ ID NO: 12979 - DNA, 20 bp, synthetic construct
  source 1..20: mol_type = other DNA
tccagcctaggtgacagagc

SEQ ID NO: 12980 - DNA, 20 bp, synthetic construct
  source 1..20: mol_type = other DNA
ctccagcctaggtgacagag

SEQ ID NO: 12981 - DNA, 20 bp, synthetic construct
  source 1..20: mol_type = other DNA
actccagcctaggtgacaga

SEQ ID NO: 12982 - DNA, 20 bp, synthetic construct
  source 1..20: mol_type = other DNA
cactccagcctaggtgacag

SEQ ID NO: 12983 - DNA, 20 bp, synthetic construct
  source 1..20: mol_type = other DNA
gcactccagcctaggtgaca

SEQ ID NO: 12984 - DNA, 20 bp, synthetic construct
  source 1..20: mol_type = other DNA
tgcactccagcctaggtgac

SEQ ID NO: 12985 - DNA, 20 bp, synthetic construct
  source 1..20: mol_type = other DNA
ctgcactccagcctaggtga

SEQ ID NO: 12986 - DNA, 20 bp, synthetic construct
  source 1..20: mol_type = other DNA
actgcactccagcctaggtg

SEQ ID NO: 12987 - DNA, 20 bp, synthetic construct
  source 1..20: mol_type = other DNA
cactgcactccagcctaggt

SEQ ID NO: 12988 - DNA, 20 bp, synthetic construct
  source 1..20: mol_type = other DNA
ccactgcactccagcctagg

SEQ ID NO: 12989 - DNA, 20 bp, synthetic construct
  source 1..20: mol_type = other DNA
accactgcactccagcctag

SEQ ID NO: 12990 - DNA, 20 bp, synthetic construct
  source 1..20: mol_type = other DNA
caccactgcactccagccta

SEQ ID NO: 12991 - DNA, 20 bp, synthetic construct
  source 1..20: mol_type = other DNA
gcaccactgcactccagcct

SEQ ID NO: 12992 - DNA, 20 bp, synthetic construct
  source 1..20: mol_type = other DNA
cgcaccactgcactccagcc

SEQ ID NO: 12993 - DNA, 20 bp, synthetic construct
  source 1..20: mol_type = other DNA
tcgcaccactgcactccagc

SEQ ID NO: 12994 - DNA, 20 bp, synthetic construct
  source 1..20: mol_type = other DNA
atcgcaccactgcactccag

SEQ ID NO: 12995 - DNA, 20 bp, synthetic construct
  source 1..20: mol_type = other DNA
gatcgcaccactgcactcca

SEQ ID NO: 12996 - DNA, 20 bp, synthetic construct
  source 1..20: mol_type = other DNA
agatcgcaccactgcactcc

SEQ ID NO: 12997 - DNA, 20 bp, synthetic construct
  source 1..20: mol_type = other DNA
gagatcgcaccactgcactc

SEQ ID NO: 12998 - DNA, 20 bp, synthetic construct
  source 1..20: mol_type = other DNA
cgagatcgcaccactgcact

SEQ ID NO: 12999 - DNA, 20 bp, synthetic construct
  source 1..20: mol_type = other DNA
ccgagatcgcaccactgcac

SEQ ID NO: 13000 - DNA, 20 bp, synthetic construct
  source 1..20: mol_type = other DNA
gccgagatcgcaccactgca

SEQ ID NO: 13001 - DNA, 20 bp, synthetic construct
  source 1..20: mol_type = other DNA
agccgagatcgcaccactgc

SEQ ID NO: 13002 - DNA, 20 bp, synthetic construct
  source 1..20: mol_type = other DNA
gagccgagatcgcaccactg

SEQ ID NO: 13003 - DNA, 20 bp, synthetic construct
  source 1..20: mol_type = other DNA
tgagccgagatcgcaccact

SEQ ID NO: 13004 - DNA, 20 bp, synthetic construct
  source 1..20: mol_type = other DNA
atgagccgagatcgcaccac

SEQ ID NO: 13005 - DNA, 20 bp, synthetic construct
  source 1..20: mol_type = other DNA
aatgagccgagatcgcacca

SEQ ID NO: 13006 - DNA, 20 bp, synthetic construct
  source 1..20: mol_type = other DNA
caatgagccgagatcgcacc

SEQ ID NO: 13007 - DNA, 20 bp, synthetic construct
  source 1..20: mol_type = other DNA
gcaatgagccgagatcgcac

SEQ ID NO: 13008 - DNA, 20 bp, synthetic construct
  source 1..20: mol_type = other DNA
tgcaatgagccgagatcgca

SEQ ID NO: 13009 - DNA, 20 bp, synthetic construct
  source 1..20: mol_type = other DNA
ttgcaatgagccgagatcgc

SEQ ID NO: 13010 - DNA, 20 bp, synthetic construct
  source 1..20: mol_type = other DNA
gttgcaatgagccgagatcg

SEQ ID NO: 13011 - DNA, 20 bp, synthetic construct
  source 1..20: mol_type = other DNA
ggttgcaatgagccgagatc

SEQ ID NO: 13012 - DNA, 20 bp, synthetic construct
  source 1..20: mol_type = other DNA
aggttgcaatgagccgagat

SEQ ID NO: 13013 - DNA, 20 bp, synthetic construct
  source 1..20: mol_type = other DNA
gaggttgcaatgagccgaga

SEQ ID NO: 13014 - DNA, 20 bp, synthetic construct
  source 1..20: mol_type = other DNA
agaggttgcaatgagccgag

SEQ ID NO: 13015 - DNA, 20 bp, synthetic construct
  source 1..20: mol_type = other DNA
cagaggttgcaatgagccga

SEQ ID NO: 13016 - DNA, 20 bp, synthetic construct
  source 1..20: mol_type = other DNA
gcagaggttgcaatgagccg

SEQ ID NO: 13017 - DNA, 20 bp, synthetic construct
  source 1..20: mol_type = other DNA
ggcagaggttgcaatgagcc

SEQ ID NO: 13018 - DNA, 20 bp, synthetic construct
  source 1..20: mol_type = other DNA
aggcagaggttgcaatgagc

SEQ ID NO: 13019 - DNA, 20 bp, synthetic construct
  source 1..20: mol_type = other DNA
gaggcagaggttgcaatgag

SEQ ID NO: 13020 - DNA, 20 bp, synthetic construct
  source 1..20: mol_type = other DNA
ggaggcagaggttgcaatga

SEQ ID NO: 13021 - DNA, 20 bp, synthetic construct
  source 1..20: mol_type = other DNA
gggaggcagaggttgcaatg

SEQ ID NO: 13022 - DNA, 20 bp, synthetic construct
  source 1..20: mol_type = other DNA
tgggaggcagaggttgcaat

SEQ ID NO: 13023 - DNA, 20 bp, synthetic construct
  source 1..20: mol_type = other DNA
ctgggaggcagaggttgcaa

SEQ ID NO: 13024 - DNA, 20 bp, synthetic construct
  source 1..20: mol_type = other DNA
cctgggaggcagaggttgca

SEQ ID NO: 13025 - DNA, 20 bp, synthetic construct
  source 1..20: mol_type = other DNA
acctgggaggcagaggttgc

SEQ ID NO: 13026 - DNA, 20 bp, synthetic construct
  source 1..20: mol_type = other DNA
aacctgggaggcagaggttg

SEQ ID NO: 13027 - DNA, 20 bp, synthetic construct
  source 1..20: mol_type = other DNA
taacctgggaggcagaggtt

SEQ ID NO: 13028 - DNA, 20 bp, synthetic construct
  source 1..20: mol_type = other DNA
ttaacctgggaggcagaggt

SEQ ID NO: 13029 - DNA, 20 bp, synthetic construct
  source 1..20: mol_type = other DNA
tttaacctgggaggcagagg

SEQ ID NO: 13030 - DNA, 20 bp, synthetic construct
  source 1..20: mol_type = other DNA
ctttaacctgggaggcagag

SEQ ID NO: 13031 - DNA, 20 bp, synthetic construct
  source 1..20: mol_type = other DNA
gctttaacctgggaggcaga

SEQ ID NO: 13032 - DNA, 20 bp, synthetic construct
  source 1..20: mol_type = other DNA
cgctttaacctgggaggcag

SEQ ID NO: 13033 - DNA, 20 bp, synthetic construct
  source 1..20: mol_type = other DNA
tcgctttaacctgggaggca

SEQ ID NO: 13034 - DNA, 20 bp, synthetic construct
  source 1..20: mol_type = other DNA
atcgctttaacctgggaggc

SEQ ID NO: 13035 - DNA, 20 bp, synthetic construct
  source 1..20: mol_type = other DNA
aatcgctttaacctgggagg

SEQ ID NO: 13036 - DNA, 20 bp, synthetic construct
  source 1..20: mol_type = other DNA
aaatcgctttaacctgggag

SEQ ID NO: 13037 - DNA, 20 bp, synthetic construct
  source 1..20: mol_type = other DNA
aaaatcgctttaacctggga

SEQ ID NO: 13038 - DNA, 20 bp, synthetic construct
  source 1..20: mol_type = other DNA
aaaaatcgctttaacctggg

SEQ ID NO: 13039 - DNA, 20 bp, synthetic construct
  source 1..20: mol_type = other DNA
gaaaaatcgctttaacctgg

SEQ ID NO: 13040 - DNA, 20 bp, synthetic construct
  source 1..20: mol_type = other DNA
agaaaaatcgctttaacctg

SEQ ID NO: 13041 - DNA, 20 bp, synthetic construct
  source 1..20: mol_type = other DNA
cagaaaaatcgctttaacct

SEQ ID NO: 13042 - DNA, 20 bp, synthetic construct
  source 1..20: mol_type = other DNA
gcagaaaaatcgctttaacc

SEQ ID NO: 13043 - DNA, 20 bp, synthetic construct
  source 1..20: mol_type = other DNA
ggcagaaaaatcgctttaac

SEQ ID NO: 13044 - DNA, 20 bp, synthetic construct
  source 1..20: mol_type = other DNA
aggcagaaaaatcgctttaa

SEQ ID NO: 13045 - DNA, 20 bp, synthetic construct
  source 1..20: mol_type = other DNA
gaggcagaaaaatcgcttta

SEQ ID NO: 13046 - DNA, 20 bp, synthetic construct
  source 1..20: mol_type = other DNA
tgaggcagaaaaatcgcttt

SEQ ID NO: 13047 - DNA, 20 bp, synthetic construct
  source 1..20: mol_type = other DNA
ctgaggcagaaaaatcgctt

SEQ ID NO: 13048 - DNA, 20 bp, synthetic construct
  source 1..20: mol_type = other DNA
gctgaggcagaaaaatcgct

SEQ ID NO: 13049 - DNA, 20 bp, synthetic construct
  source 1..20: mol_type = other DNA
ggctgaggcagaaaaatcgc

SEQ ID NO: 13050 - DNA, 20 bp, synthetic construct
  source 1..20: mol_type = other DNA
aggctgaggcagaaaaatcg

SEQ ID NO: 13051 - DNA, 20 bp, synthetic construct
  source 1..20: mol_type = other DNA
gaggctgaggcagaaaaatc

SEQ ID NO: 13052 - DNA, 20 bp, synthetic construct
  source 1..20: mol_type = other DNA
ggaggctgaggcagaaaaat

SEQ ID NO: 13053 - DNA, 20 bp, synthetic construct
  source 1..20: mol_type = other DNA
aggaggctgaggcagaaaaa

SEQ ID NO: 13054 - DNA, 20 bp, synthetic construct
  source 1..20: mol_type = other DNA
caggaggctgaggcagaaaa

SEQ ID NO: 13055 - DNA, 20 bp, synthetic construct
  source 1..20: mol_type = other DNA
tcaggaggctgaggcagaaa

SEQ ID NO: 13056 - DNA, 20 bp, synthetic construct
  source 1..20: mol_type = other DNA
ctcaggaggctgaggcagaa

SEQ ID NO: 13057 - DNA, 20 bp, synthetic construct
  source 1..20: mol_type = other DNA
actcaggaggctgaggcaga

SEQ ID NO: 13058 - DNA, 20 bp, synthetic construct
  source 1..20: mol_type = other DNA
tactcaggaggctgaggcag

SEQ ID NO: 13059 - DNA, 20 bp, synthetic construct
  source 1..20: mol_type = other DNA
ctactcaggaggctgaggca

SEQ ID NO: 13060 - DNA, 20 bp, synthetic construct
  source 1..20: mol_type = other DNA
gctactcaggaggctgaggc

SEQ ID NO: 13061 - DNA, 20 bp, synthetic construct
  source 1..20: mol_type = other DNA
agctactcaggaggctgagg

SEQ ID NO: 13062 - DNA, 20 bp, synthetic construct
  source 1..20: mol_type = other DNA
cagctactcaggaggctgag

SEQ ID NO: 13063 - DNA, 20 bp, synthetic construct
  source 1..20: mol_type = other DNA
ccagctactcaggaggctga

SEQ ID NO: 13064 - DNA, 20 bp, synthetic construct
  source 1..20: mol_type = other DNA
cccagctactcaggaggctg

SEQ ID NO: 13065 - DNA, 20 bp, synthetic construct
  source 1..20: mol_type = other DNA
tcccagctactcaggaggct

SEQ ID NO: 13066 - DNA, 20 bp, synthetic construct
  source 1..20: mol_type = other DNA
gtcccagctactcaggaggc

SEQ ID NO: 13067 - DNA, 20 bp, synthetic construct
  source 1..20: mol_type = other DNA
agtcccagctactcaggagg

SEQ ID NO: 13068 - DNA, 20 bp, synthetic construct
  source 1..20: mol_type = other DNA
cagtcccagctactcaggag

SEQ ID NO: 13069 - DNA, 20 bp, synthetic construct
  source 1..20: mol_type = other DNA
gcagtcccagctactcagga

SEQ ID NO: 13070 - DNA, 20 bp, synthetic construct
  source 1..20: mol_type = other DNA
tgcagtcccagctactcagg

SEQ ID NO: 13071 - DNA, 20 bp, synthetic construct
  source 1..20: mol_type = other DNA
ctgcagtcccagctactcag

SEQ ID NO: 13072 - DNA, 20 bp, synthetic construct
  source 1..20: mol_type = other DNA
cctgcagtcccagctactca

SEQ ID NO: 13073 - DNA, 20 bp, synthetic construct
  source 1..20: mol_type = other DNA
gcctgcagtcccagctactc

SEQ ID NO: 13074 - DNA, 20 bp, synthetic construct
  source 1..20: mol_type = other DNA
tgcctgcagtcccagctact

SEQ ID NO: 13075 - DNA, 20 bp, synthetic construct
  source 1..20: mol_type = other DNA
gtgcctgcagtcccagctac

SEQ ID NO: 13076 - DNA, 20 bp, synthetic construct
  source 1..20: mol_type = other DNA
cgtgcctgcagtcccagcta

SEQ ID NO: 13077 - DNA, 20 bp, synthetic construct
  source 1..20: mol_type = other DNA
gcgtgcctgcagtcccagct

SEQ ID NO: 13078 - DNA, 20 bp, synthetic construct
  source 1..20: mol_type = other DNA
tgcgtgcctgcagtcccagc

SEQ ID NO: 13079 - DNA, 20 bp, synthetic construct
  source 1..20: mol_type = other DNA
gtgcgtgcctgcagtcccag

SEQ ID NO: 13080 - DNA, 20 bp, synthetic construct
  source 1..20: mol_type = other DNA
ggtgcgtgcctgcagtccca

SEQ ID NO: 13081 - DNA, 20 bp, synthetic construct
  source 1..20: mol_type = other DNA
tggtgcgtgcctgcagtccc

SEQ ID NO: 13082 - DNA, 20 bp, synthetic construct
  source 1..20: mol_type = other DNA
atggtgcgtgcctgcagtcc

SEQ ID NO: 13083 - DNA, 20 bp, synthetic construct
  source 1..20: mol_type = other DNA
gatggtgcgtgcctgcagtc

SEQ ID NO: 13084 - DNA, 20 bp, synthetic construct
  source 1..20: mol_type = other DNA
agatggtgcgtgcctgcagt

SEQ ID NO: 13085 - DNA, 20 bp, synthetic construct
  source 1..20: mol_type = other DNA
gagatggtgcgtgcctgcag

SEQ ID NO: 13086 - DNA, 20 bp, synthetic construct
  source 1..20: mol_type = other DNA
cgagatggtgcgtgcctgca

SEQ ID NO: 13087 - DNA, 20 bp, synthetic construct
  source 1..20: mol_type = other DNA
gcgagatggtgcgtgcctgc

SEQ ID NO: 13088 - DNA, 20 bp, synthetic construct
  source 1..20: mol_type = other DNA
ggcgagatggtgcgtgcctg

SEQ ID NO: 13089 - DNA, 20 bp, synthetic construct
  source 1..20: mol_type = other DNA
aggcgagatggtgcgtgcct

SEQ ID NO: 13090 - DNA, 20 bp, synthetic construct
  source 1..20: mol_type = other DNA
caggcgagatggtgcgtgcc

SEQ ID NO: 13091 - DNA, 20 bp, synthetic construct
  source 1..20: mol_type = other DNA
ccaggcgagatggtgcgtgc

SEQ ID NO: 13092 - DNA, 20 bp, synthetic construct
  source 1..20: mol_type = other DNA
gccaggcgagatggtgcgtg

SEQ ID NO: 13093 - DNA, 20 bp, synthetic construct
  source 1..20: mol_type = other DNA
agccaggcgagatggtgcgt

SEQ ID NO: 13094 - DNA, 20 bp, synthetic construct
  source 1..20: mol_type = other DNA
tagccaggcgagatggtgcg

SEQ ID NO: 13095 - DNA, 20 bp, synthetic construct
  source 1..20: mol_type = other DNA
ttagccaggcgagatggtgc

SEQ ID NO: 13096 - DNA, 20 bp, synthetic construct
  source 1..20: mol_type = other DNA
attagccaggcgagatggtg

SEQ ID NO: 13097 - DNA, 20 bp, synthetic construct
  source 1..20: mol_type = other DNA
aattagccaggcgagatggt

SEQ ID NO: 13098 - DNA, 20 bp, synthetic construct
  source 1..20: mol_type = other DNA
aaattagccaggcgagatgg

SEQ ID NO: 13099 - DNA, 20 bp, synthetic construct
  source 1..20: mol_type = other DNA
aaaattagccaggcgagatg

SEQ ID NO: 13100 - DNA, 20 bp, synthetic construct
  source 1..20: mol_type = other DNA
aaaaattagccaggcgagat

SEQ ID NO: 13101 - DNA, 20 bp, synthetic construct
  source 1..20: mol_type = other DNA
caaaaattagccaggcgaga

SEQ ID NO: 13102 - DNA, 20 bp, synthetic construct
  source 1..20: mol_type = other DNA
acaaaaattagccaggcgag

SEQ ID NO: 13103 - DNA, 20 bp, synthetic construct
  source 1..20: mol_type = other DNA
tacaaaaattagccaggcga

SEQ ID NO: 13104 - DNA, 20 bp, synthetic construct
  source 1..20: mol_type = other DNA
atacaaaaattagccaggcg

SEQ ID NO: 13105 - DNA, 20 bp, synthetic construct
  source 1..20: mol_type = other DNA
aatacaaaaattagccaggc

SEQ ID NO: 13106 - DNA, 20 bp, synthetic construct
  source 1..20: mol_type = other DNA
aaatacaaaaattagccagg

SEQ ID NO: 13107 - DNA, 20 bp, synthetic construct
  source 1..20: mol_type = other DNA
aaaatacaaaaattagccag

SEQ ID NO: 13108 - DNA, 20 bp, synthetic construct
  source 1..20: mol_type = other DNA
taaaatacaaaaattagcca

SEQ ID NO: 13109 - DNA, 20 bp, synthetic construct
  source 1..20: mol_type = other DNA
ctaaaatacaaaaattagcc

SEQ ID NO: 13110 - DNA, 20 bp, synthetic construct
  source 1..20: mol_type = other DNA
actaaaatacaaaaattagc

SEQ ID NO: 13111 - DNA, 20 bp, synthetic construct
  source 1..20: mol_type = other DNA
tactaaaatacaaaaattag

SEQ ID NO: 13112 - DNA, 20 bp, synthetic construct
  source 1..20: mol_type = other DNA
ctactaaaatacaaaaatta

SEQ ID NO: 13113 - DNA, 20 bp, synthetic construct
  source 1..20: mol_type = other DNA
tctactaaaatacaaaaatt

SEQ ID NO: 13114 - DNA, 20 bp, synthetic construct
  source 1..20: mol_type = other DNA
ctctactaaaatacaaaaat

SEQ ID NO: 13115 - DNA, 20 bp, synthetic construct
  source 1..20: mol_type = other DNA
tctctactaaaatacaaaaa

SEQ ID NO: 13116 - DNA, 20 bp, synthetic construct
  source 1..20: mol_type = other DNA
atctctactaaaatacaaaa

SEQ ID NO: 13117 - DNA, 20 bp, synthetic construct
  source 1..20: mol_type = other DNA
catctctactaaaatacaaa

SEQ ID NO: 13118 - DNA, 20 bp, synthetic construct
  source 1..20: mol_type = other DNA
ccatctctactaaaatacaa

SEQ ID NO: 13119 - DNA, 20 bp, synthetic construct
  source 1..20: mol_type = other DNA
cccatctctactaaaataca

SEQ ID NO: 13120 - DNA, 20 bp, synthetic construct
  source 1..20: mol_type = other DNA
ccccatctctactaaaatac

SEQ ID NO: 13121 - DNA, 20 bp, synthetic construct
  source 1..20: mol_type = other DNA
accccatctctactaaaata

SEQ ID NO: 13122 - DNA, 20 bp, synthetic construct
  source 1..20: mol_type = other DNA
aaccccatctctactaaaat

SEQ ID NO: 13123 - DNA, 20 bp, synthetic construct
  source 1..20: mol_type = other DNA
aaaccccatctctactaaaa

SEQ ID NO: 13124 - DNA, 20 bp, synthetic construct
  source 1..20: mol_type = other DNA
gaaaccccatctctactaaa

SEQ ID NO: 13125 - DNA, 20 bp, synthetic construct
  source 1..20: mol_type = other DNA
tgaaaccccatctctactaa

SEQ ID NO: 13126 - DNA, 20 bp, synthetic construct
  source 1..20: mol_type = other DNA
gtgaaaccccatctctacta

SEQ ID NO: 13127 - DNA, 20 bp, synthetic construct
  source 1..20: mol_type = other DNA
ggtgaaaccccatctctact

SEQ ID NO: 13128 - DNA, 20 bp, synthetic construct
  source 1..20: mol_type = other DNA
tggtgaaaccccatctctac

SEQ ID NO: 13129 - DNA, 20 bp, synthetic construct
  source 1..20: mol_type = other DNA
atggtgaaaccccatctcta

SEQ ID NO: 13130 - DNA, 20 bp, synthetic construct
  source 1..20: mol_type = other DNA
tatggtgaaaccccatctct

SEQ ID NO: 13131 - DNA, 20 bp, synthetic construct
  source 1..20: mol_type = other DNA
atatggtgaaaccccatctc

SEQ ID NO: 13132 - DNA, 20 bp, synthetic construct
  source 1..20: mol_type = other DNA
aatatggtgaaaccccatct

SEQ ID NO: 13133 - DNA, 20 bp, synthetic construct
  source 1..20: mol_type = other DNA
caatatggtgaaaccccatc

SEQ ID NO: 13134 - DNA, 20 bp, synthetic construct
  source 1..20: mol_type = other DNA
ccaatatggtgaaaccccat

SEQ ID NO: 13135 - DNA, 20 bp, synthetic construct
  source 1..20: mol_type = other DNA
gccaatatggtgaaacccca

SEQ ID NO: 13136 - DNA, 20 bp, synthetic construct
  source 1..20: mol_type = other DNA
ggccaatatggtgaaacccc

SEQ ID NO: 13137 - DNA, 20 bp, synthetic construct
  source 1..20: mol_type = other DNA
tggccaatatggtgaaaccc

SEQ ID NO: 13138 - DNA, 20 bp, synthetic construct
  source 1..20: mol_type = other DNA
ctggccaatatggtgaaacc

SEQ ID NO: 13139 - DNA, 20 bp, synthetic construct
  source 1..20: mol_type = other DNA
cctggccaatatggtgaaac

SEQ ID NO: 13140 - DNA, 20 bp, synthetic construct
  source 1..20: mol_type = other DNA
gcctggccaatatggtgaaa

SEQ ID NO: 13141 - DNA, 20 bp, synthetic construct
  source 1..20: mol_type = other DNA
agcctggccaatatggtgaa

SEQ ID NO: 13142 - DNA, 20 bp, synthetic construct
  source 1..20: mol_type = other DNA
cagcctggccaatatggtga

SEQ ID NO: 13143 - DNA, 20 bp, synthetic construct
  source 1..20: mol_type = other DNA
ccagcctggccaatatggtg

SEQ ID NO: 13144 - DNA, 20 bp, synthetic construct
  source 1..20: mol_type = other DNA
accagcctggccaatatggt

SEQ ID NO: 13145 - DNA, 20 bp, synthetic construct
  source 1..20: mol_type = other DNA
gaccagcctggccaatatgg

SEQ ID NO: 13146 - DNA, 20 bp, synthetic construct
  source 1..20: mol_type = other DNA
agaccagcctggccaatatg

SEQ ID NO: 13147 - DNA, 20 bp, synthetic construct
  source 1..20: mol_type = other DNA
cagaccagcctggccaatat

SEQ ID NO: 13148 - DNA, 20 bp, synthetic construct
  source 1..20: mol_type = other DNA
ccagaccagcctggccaata

SEQ ID NO: 13149 - DNA, 20 bp, synthetic construct
  source 1..20: mol_type = other DNA
tccagaccagcctggccaat

SEQ ID NO: 13150 - DNA, 20 bp, synthetic construct
  source 1..20: mol_type = other DNA
ttccagaccagcctggccaa

SEQ ID NO: 13151 - DNA, 20 bp, synthetic construct
  source 1..20: mol_type = other DNA
gttccagaccagcctggcca

SEQ ID NO: 13152 - DNA, 20 bp, synthetic construct
  source 1..20: mol_type = other DNA
agttccagaccagcctggcc

SEQ ID NO: 13153 - DNA, 20 bp, synthetic construct
  source 1..20: mol_type = other DNA
aagttccagaccagcctggc

SEQ ID NO: 13154 - DNA, 20 bp, synthetic construct
  source 1..20: mol_type = other DNA
gaagttccagaccagcctgg

SEQ ID NO: 13155 - DNA, 20 bp, synthetic construct
  source 1..20: mol_type = other DNA
agaagttccagaccagcctg

SEQ ID NO: 13156 - DNA, 20 bp, synthetic construct
  source 1..20: mol_type = other DNA
cagaagttccagaccagcct

SEQ ID NO: 13157 - DNA, 20 bp, synthetic construct
  source 1..20: mol_type = other DNA
ccagaagttccagaccagcc

SEQ ID NO: 13158 - DNA, 20 bp, synthetic construct
  source 1..20: mol_type = other DNA
gccagaagttccagaccagc

SEQ ID NO: 13159 - DNA, 20 bp, synthetic construct
  source 1..20: mol_type = other DNA
ggccagaagttccagaccag

SEQ ID NO: 13160 - DNA, 20 bp, synthetic construct
  source 1..20: mol_type = other DNA
aggccagaagttccagacca

SEQ ID NO: 13161 - DNA, 20 bp, synthetic construct
  source 1..20: mol_type = other DNA
gaggccagaagttccagacc

SEQ ID NO: 13162 - DNA, 20 bp, synthetic construct
  source 1..20: mol_type = other DNA
tgaggccagaagttccagac

SEQ ID NO: 13163 - DNA, 20 bp, synthetic construct
  source 1..20: mol_type = other DNA
ttgaggccagaagttccaga

SEQ ID NO: 13164 - DNA, 20 bp, synthetic construct
  source 1..20: mol_type = other DNA
cttgaggccagaagttccag

SEQ ID NO: 13165 - DNA, 20 bp, synthetic construct
  source 1..20: mol_type = other DNA
acttgaggccagaagttcca

SEQ ID NO: 13166 - DNA, 20 bp, synthetic construct
  source 1..20: mol_type = other DNA
cacttgaggccagaagttcc

SEQ ID NO: 13167 - DNA, 20 bp, synthetic construct
  source 1..20: mol_type = other DNA
tcacttgaggccagaagttc

SEQ ID NO: 13168 - DNA, 20 bp, synthetic construct
  source 1..20: mol_type = other DNA
atcacttgaggccagaagtt

SEQ ID NO: 13169 - DNA, 20 bp, synthetic construct
  source 1..20: mol_type = other DNA
gatcacttgaggccagaagt

SEQ ID NO: 13170 - DNA, 20 bp, synthetic construct
  source 1..20: mol_type = other DNA
ggatcacttgaggccagaag

SEQ ID NO: 13171 - DNA, 20 bp, synthetic construct
  source 1..20: mol_type = other DNA
tggatcacttgaggccagaa

SEQ ID NO: 13172 - DNA, 20 bp, synthetic construct
  source 1..20: mol_type = other DNA
gtggatcacttgaggccaga

SEQ ID NO: 13173 - DNA, 20 bp, synthetic construct
  source 1..20: mol_type = other DNA
ggtggatcacttgaggccag

SEQ ID NO: 13174 - DNA, 20 bp, synthetic construct
  source 1..20: mol_type = other DNA
aggtggatcacttgaggcca

SEQ ID NO: 13175 - DNA, 20 bp, synthetic construct
  source 1..20: mol_type = other DNA
caggtggatcacttgaggcc

SEQ ID NO: 13176 - DNA, 20 bp, synthetic construct
  source 1..20: mol_type = other DNA
gcaggtggatcacttgaggc

SEQ ID NO: 13177 - DNA, 20 bp, synthetic construct
  source 1..20: mol_type = other DNA
ggcaggtggatcacttgagg

SEQ ID NO: 13178 - DNA, 20 bp, synthetic construct
  source 1..20: mol_type = other DNA
aggcaggtggatcacttgag

SEQ ID NO: 13179 - DNA, 20 bp, synthetic construct
  source 1..20: mol_type = other DNA
aaggcaggtggatcacttga

SEQ ID NO: 13180 - DNA, 20 bp, synthetic construct
  source 1..20: mol_type = other DNA
caaggcaggtggatcacttg

SEQ ID NO: 13181 - DNA, 20 bp, synthetic construct
  source 1..20: mol_type = other DNA
ccaaggcaggtggatcactt

SEQ ID NO: 13182 - DNA, 20 bp, synthetic construct
  source 1..20: mol_type = other DNA
gccaaggcaggtggatcact

SEQ ID NO: 13183 - DNA, 20 bp, synthetic construct
  source 1..20: mol_type = other DNA
ggccaaggcaggtggatcac

SEQ ID NO: 13184 - DNA, 20 bp, synthetic construct
  source 1..20: mol_type = other DNA
aggccaaggcaggtggatca

SEQ ID NO: 13185 - DNA, 20 bp, synthetic construct
  source 1..20: mol_type = other DNA
gaggccaaggcaggtggatc

SEQ ID NO: 13186 - DNA, 20 bp, synthetic construct
  source 1..20: mol_type = other DNA
ggaggccaaggcaggtggat

SEQ ID NO: 13187 - DNA, 20 bp, synthetic construct
  source 1..20: mol_type = other DNA
gggaggccaaggcaggtgga

SEQ ID NO: 13188 - DNA, 20 bp, synthetic construct
  source 1..20: mol_type = other DNA
tgggaggccaaggcaggtgg

SEQ ID NO: 13189 - DNA, 20 bp, synthetic construct
  source 1..20: mol_type = other DNA
atgggaggccaaggcaggtg

SEQ ID NO: 13190 - DNA, 20 bp, synthetic construct
  source 1..20: mol_type = other DNA
catgggaggccaaggcaggt

SEQ ID NO: 13191 - DNA, 20 bp, synthetic construct
  source 1..20: mol_type = other DNA
gcatgggaggccaaggcagg

SEQ ID NO: 13192 - DNA, 20 bp, synthetic construct
  source 1..20: mol_type = other DNA
ggcatgggaggccaaggcag

SEQ ID NO: 13193 - DNA, 20 bp, synthetic construct
  source 1..20: mol_type = other DNA
aggcatgggaggccaaggca

SEQ ID NO: 13194 - DNA, 20 bp, synthetic construct
  source 1..20: mol_type = other DNA
caggcatgggaggccaaggc

SEQ ID NO: 13195 - DNA, 20 bp, synthetic construct
  source 1..20: mol_type = other DNA
ccaggcatgggaggccaagg

SEQ ID NO: 13196 - DNA, 20 bp, synthetic construct
  source 1..20: mol_type = other DNA
gccaggcatgggaggccaag

SEQ ID NO: 13197 - DNA, 20 bp, synthetic construct
  source 1..20: mol_type = other DNA
tgccaggcatgggaggccaa

SEQ ID NO: 13198 - DNA, 20 bp, synthetic construct
  source 1..20: mol_type = other DNA
ttgccaggcatgggaggcca

SEQ ID NO: 13199 - DNA, 20 bp, synthetic construct
  source 1..20: mol_type = other DNA
gttgccaggcatgggaggcc

SEQ ID NO: 13200 - DNA, 20 bp, synthetic construct
  source 1..20: mol_type = other DNA
ggttgccaggcatgggaggc

SEQ ID NO: 13201 - DNA, 20 bp, synthetic construct
  source 1..20: mol_type = other DNA
aggttgccaggcatgggagg

SEQ ID NO: 13202 - DNA, 20 bp, synthetic construct
  source 1..20: mol_type = other DNA
aaggttgccaggcatgggag

SEQ ID NO: 13203 - DNA, 20 bp, synthetic construct
  source 1..20: mol_type = other DNA
taaggttgccaggcatggga

SEQ ID NO: 13204 - DNA, 20 bp, synthetic construct
  source 1..20: mol_type = other DNA
ttaaggttgccaggcatggg

SEQ ID NO: 13205 - DNA, 20 bp, synthetic construct
  source 1..20: mol_type = other DNA
gttaaggttgccaggcatgg

SEQ ID NO: 13206 - DNA, 20 bp, synthetic construct
  source 1..20: mol_type = other DNA
agttaaggttgccaggcatg

SEQ ID NO: 13207 - DNA, 20 bp, synthetic construct
  source 1..20: mol_type = other DNA
aagttaaggttgccaggcat

SEQ ID NO: 13208 - DNA, 20 bp, synthetic construct
  source 1..20: mol_type = other DNA
aaagttaaggttgccaggca

SEQ ID NO: 13209 - DNA, 20 bp, synthetic construct
  source 1..20: mol_type = other DNA
aaaagttaaggttgccaggc

SEQ ID NO: 13210 - DNA, 20 bp, synthetic construct
  source 1..20: mol_type = other DNA
aaaaagttaaggttgccagg

SEQ ID NO: 13211 - DNA, 20 bp, synthetic construct
  source 1..20: mol_type = other DNA
taaaaagttaaggttgccag

SEQ ID NO: 13212 - DNA, 20 bp, synthetic construct
  source 1..20: mol_type = other DNA
ataaaaagttaaggttgcca

SEQ ID NO: 13213 - DNA, 20 bp, synthetic construct
  source 1..20: mol_type = other DNA
aataaaaagttaaggttgcc

SEQ ID NO: 13214 - DNA, 20 bp, synthetic construct
  source 1..20: mol_type = other DNA
aaataaaaagttaaggttgc

SEQ ID NO: 13215 - DNA, 20 bp, synthetic construct
  source 1..20: mol_type = other DNA
caaataaaaagttaaggttg

SEQ ID NO: 13216 - DNA, 20 bp, synthetic construct
  source 1..20: mol_type = other DNA
gcaaataaaaagttaaggtt

SEQ ID NO: 13217 - DNA, 20 bp, synthetic construct
  source 1..20: mol_type = other DNA
agcaaataaaaagttaaggt

SEQ ID NO: 13218 - DNA, 20 bp, synthetic construct
  source 1..20: mol_type = other DNA
cagcaaataaaaagttaagg

SEQ ID NO: 13219 - DNA, 20 bp, synthetic construct
  source 1..20: mol_type = other DNA
ccagcaaataaaaagttaag

SEQ ID NO: 13220 - DNA, 20 bp, synthetic construct
  source 1..20: mol_type = other DNA
accagcaaataaaaagttaa

SEQ ID NO: 13221 - DNA, 20 bp, synthetic construct
  source 1..20: mol_type = other DNA
taccagcaaataaaaagtta

SEQ ID NO: 13222 - DNA, 20 bp, synthetic construct
  source 1..20: mol_type = other DNA
ttaccagcaaataaaaagtt

SEQ ID NO: 13223 - DNA, 20 bp, synthetic construct
  source 1..20: mol_type = other DNA
attaccagcaaataaaaagt

SEQ ID NO: 13224 - DNA, 20 bp, synthetic construct
  source 1..20: mol_type = other DNA
aattaccagcaaataaaaag

SEQ ID NO: 13225 - DNA, 20 bp, synthetic construct
  source 1..20: mol_type = other DNA
taattaccagcaaataaaaa

SEQ ID NO: 13226 - DNA, 20 bp, synthetic construct
  source 1..20: mol_type = other DNA
ataattaccagcaaataaaa

SEQ ID NO: 13227 - DNA, 20 bp, synthetic construct
  source 1..20: mol_type = other DNA
aataattaccagcaaataaa

SEQ ID NO: 13228 - DNA, 20 bp, synthetic construct
  source 1..20: mol_type = other DNA
aaataattaccagcaaataa

SEQ ID NO: 13229 - DNA, 20 bp, synthetic construct
  source 1..20: mol_type = other DNA
caaataattaccagcaaata

SEQ ID NO: 13230 - DNA, 20 bp, synthetic construct
  source 1..20: mol_type = other DNA
acaaataattaccagcaaat

SEQ ID NO: 13231 - DNA, 20 bp, synthetic construct
  source 1..20: mol_type = other DNA
cacaaataattaccagcaaa

SEQ ID NO: 13232 - DNA, 20 bp, synthetic construct
  source 1..20: mol_type = other DNA
acacaaataattaccagcaa

SEQ ID NO: 13233 - DNA, 20 bp, synthetic construct
  source 1..20: mol_type = other DNA
aacacaaataattaccagca

SEQ ID NO: 13234 - DNA, 20 bp, synthetic construct
  source 1..20: mol_type = other DNA
aaacacaaataattaccagc

SEQ ID NO: 13235 - DNA, 20 bp, synthetic construct
  source 1..20: mol_type = other DNA
caaacacaaataattaccag

SEQ ID NO: 13236 - DNA, 20 bp, synthetic construct
  source 1..20: mol_type = other DNA
gcaaacacaaataattacca

SEQ ID NO: 13237 - DNA, 20 bp, synthetic construct
  source 1..20: mol_type = other DNA
tgcaaacacaaataattacc

SEQ ID NO: 13238 - DNA, 20 bp, synthetic construct
  source 1..20: mol_type = other DNA
atgcaaacacaaataattac

SEQ ID NO: 13239 - DNA, 20 bp, synthetic construct
  source 1..20: mol_type = other DNA
aatgcaaacacaaataatta

SEQ ID NO: 13240 - DNA, 20 bp, synthetic construct
  source 1..20: mol_type = other DNA
gaatgcaaacacaaataatt

SEQ ID NO: 13241 - DNA, 20 bp, synthetic construct
  source 1..20: mol_type = other DNA
tgaatgcaaacacaaataat

SEQ ID NO: 13242 - DNA, 20 bp, synthetic construct
  source 1..20: mol_type = other DNA
atgaatgcaaacacaaataa

SEQ ID NO: 13243 - DNA, 20 bp, synthetic construct
  source 1..20: mol_type = other DNA
catgaatgcaaacacaaata

SEQ ID NO: 13244 - DNA, 20 bp, synthetic construct
  source 1..20: mol_type = other DNA
acatgaatgcaaacacaaat

SEQ ID NO: 13245 - DNA, 20 bp, synthetic construct
  source 1..20: mol_type = other DNA
cacatgaatgcaaacacaaa

SEQ ID NO: 13246 - DNA, 20 bp, synthetic construct
  source 1..20: mol_type = other DNA
tcacatgaatgcaaacacaa

SEQ ID NO: 13247 - DNA, 20 bp, synthetic construct
  source 1..20: mol_type = other DNA
ttcacatgaatgcaaacaca

SEQ ID NO: 13248 - DNA, 20 bp, synthetic construct
  source 1..20: mol_type = other DNA
tttcacatgaatgcaaacac

SEQ ID NO: 13249 - DNA, 20 bp, synthetic construct
  source 1..20: mol_type = other DNA
ttttcacatgaatgcaaaca

SEQ ID NO: 13250 - DNA, 20 bp, synthetic construct
  source 1..20: mol_type = other DNA
attttcacatgaatgcaaac

SEQ ID NO: 13251 - DNA, 20 bp, synthetic construct
  source 1..20: mol_type = other DNA
aattttcacatgaatgcaaa

SEQ ID NO: 13252 - DNA, 20 bp, synthetic construct
  source 1..20: mol_type = other DNA
aaattttcacatgaatgcaa

SEQ ID NO: 13253 - DNA, 20 bp, synthetic construct
  source 1..20: mol_type = other DNA
caaattttcacatgaatgca

SEQ ID NO: 13254 - DNA, 20 bp, synthetic construct
  source 1..20: mol_type = other DNA
tcaaattttcacatgaatgc

SEQ ID NO: 13255 - DNA, 20 bp, synthetic construct
  source 1..20: mol_type = other DNA
ttcaaattttcacatgaatg

SEQ ID NO: 13256 - DNA, 20 bp, synthetic construct
  source 1..20: mol_type = other DNA
tttcaaattttcacatgaat

SEQ ID NO: 13257 - DNA, 20 bp, synthetic construct
  source 1..20: mol_type = other DNA
atttcaaattttcacatgaa

SEQ ID NO: 13258 - DNA, 20 bp, synthetic construct
  source 1..20: mol_type = other DNA
aatttcaaattttcacatga

SEQ ID NO: 13259 - DNA, 20 bp, synthetic construct
  source 1..20: mol_type = other DNA
gaatttcaaattttcacatg

SEQ ID NO: 13260 - DNA, 20 bp, synthetic construct
  source 1..20: mol_type = other DNA
agaatttcaaattttcacat

SEQ ID NO: 13261 - DNA, 20 bp, synthetic construct
  source 1..20: mol_type = other DNA
gagaatttcaaattttcaca

SEQ ID NO: 13262 - DNA, 20 bp, synthetic construct
  source 1..20: mol_type = other DNA
tgagaatttcaaattttcac

SEQ ID NO: 13263 - DNA, 20 bp, synthetic construct
  source 1..20: mol_type = other DNA
atgagaatttcaaattttca

SEQ ID NO: 13264 - DNA, 20 bp, synthetic construct
  source 1..20: mol_type = other DNA
aatgagaatttcaaattttc

SEQ ID NO: 13265 - DNA, 20 bp, synthetic construct
  source 1..20: mol_type = other DNA
taatgagaatttcaaatttt

SEQ ID NO: 13266 - DNA, 20 bp, synthetic construct
  source 1..20: mol_type = other DNA
ttaatgagaatttcaaattt

SEQ ID NO: 13267 - DNA, 20 bp, synthetic construct
  source 1..20: mol_type = other DNA
gttaatgagaatttcaaatt

SEQ ID NO: 13268 - DNA, 20 bp, synthetic construct
  source 1..20: mol_type = other DNA
tgttaatgagaatttcaaat

SEQ ID NO: 13269 - DNA, 20 bp, synthetic construct
  source 1..20: mol_type = other DNA
atgttaatgagaatttcaaa

SEQ ID NO: 13270 - DNA, 20 bp, synthetic construct
  source 1..20: mol_type = other DNA
aatgttaatgagaatttcaa

SEQ ID NO: 13271 - DNA, 20 bp, synthetic construct
  source 1..20: mol_type = other DNA
aaatgttaatgagaatttca

SEQ ID NO: 13272 - DNA, 20 bp, synthetic construct
  source 1..20: mol_type = other DNA
taaatgttaatgagaatttc

SEQ ID NO: 13273 - DNA, 20 bp, synthetic construct
  source 1..20: mol_type = other DNA
ttaaatgttaatgagaattt

SEQ ID NO: 13274 - DNA, 20 bp, synthetic construct
  source 1..20: mol_type = other DNA
tttaaatgttaatgagaatt

SEQ ID NO: 13275 - DNA, 20 bp, synthetic construct
  source 1..20: mol_type = other DNA
ctttaaatgttaatgagaat

SEQ ID NO: 13276 - DNA, 20 bp, synthetic construct
  source 1..20: mol_type = other DNA
tctttaaatgttaatgagaa

SEQ ID NO: 13277 - DNA, 20 bp, synthetic construct
  source 1..20: mol_type = other DNA
atctttaaatgttaatgaga

SEQ ID NO: 13278 - DNA, 20 bp, synthetic construct
  source 1..20: mol_type = other DNA
aatctttaaatgttaatgag

SEQ ID NO: 13279 - DNA, 20 bp, synthetic construct
  source 1..20: mol_type = other DNA
gaatctttaaatgttaatga

SEQ ID NO: 13280 - DNA, 20 bp, synthetic construct
  source 1..20: mol_type = other DNA
agaatctttaaatgttaatg

SEQ ID NO: 13281 - DNA, 20 bp, synthetic construct
  source 1..20: mol_type = other DNA
aagaatctttaaatgttaat

SEQ ID NO: 13282 - DNA, 20 bp, synthetic construct
  source 1..20: mol_type = other DNA
taagaatctttaaatgttaa

SEQ ID NO: 13283 - DNA, 20 bp, synthetic construct
  source 1..20: mol_type = other DNA
gtaagaatctttaaatgtta

SEQ ID NO: 13284 - DNA, 20 bp, synthetic construct
  source 1..20: mol_type = other DNA
tgtaagaatctttaaatgtt

SEQ ID NO: 13285 - DNA, 20 bp, synthetic construct
  source 1..20: mol_type = other DNA
atgtaagaatctttaaatgt

SEQ ID NO: 13286 - DNA, 20 bp, synthetic construct
  source 1..20: mol_type = other DNA
tatgtaagaatctttaaatg

SEQ ID NO: 13287 - DNA, 20 bp, synthetic construct
  source 1..20: mol_type = other DNA
ctatgtaagaatctttaaat

SEQ ID NO: 13288 - DNA, 20 bp, synthetic construct
  source 1..20: mol_type = other DNA
tctatgtaagaatctttaaa

SEQ ID NO: 13289 - DNA, 20 bp, synthetic construct
  source 1..20: mol_type = other DNA
atctatgtaagaatctttaa

SEQ ID NO: 13290 - DNA, 20 bp, synthetic construct
  source 1..20: mol_type = other DNA
aatctatgtaagaatcttta

SEQ ID NO: 13291 - DNA, 20 bp, synthetic construct
  source 1..20: mol_type = other DNA
caatctatgtaagaatcttt

SEQ ID NO: 13292 - DNA, 20 bp, synthetic construct
  source 1..20: mol_type = other DNA
gcaatctatgtaagaatctt

SEQ ID NO: 13293 - DNA, 20 bp, synthetic construct
  source 1..20: mol_type = other DNA
agcaatctatgtaagaatct

SEQ ID NO: 13294 - DNA, 20 bp, synthetic construct
  source 1..20: mol_type = other DNA
aagcaatctatgtaagaatc

SEQ ID NO: 13295 - DNA, 20 bp, synthetic construct
  source 1..20: mol_type = other DNA
caagcaatctatgtaagaat

SEQ ID NO: 13296 - DNA, 20 bp, synthetic construct
  source 1..20: mol_type = other DNA
acaagcaatctatgtaagaa

SEQ ID NO: 13297 - DNA, 20 bp, synthetic construct
  source 1..20: mol_type = other DNA
tacaagcaatctatgtaaga

SEQ ID NO: 13298 - DNA, 20 bp, synthetic construct
  source 1..20: mol_type = other DNA
ttacaagcaatctatgtaag

SEQ ID NO: 13299 - DNA, 20 bp, synthetic construct
  source 1..20: mol_type = other DNA
attacaagcaatctatgtaa

SEQ ID NO: 13300 - DNA, 20 bp, synthetic construct
  source 1..20: mol_type = other DNA
aattacaagcaatctatgta

SEQ ID NO: 13301 - DNA, 20 bp, synthetic construct
  source 1..20: mol_type = other DNA
aaattacaagcaatctatgt

SEQ ID NO: 13302 - DNA, 20 bp, synthetic construct
  source 1..20: mol_type = other DNA
aaaattacaagcaatctatg

SEQ ID NO: 13303 - DNA, 20 bp, synthetic construct
  source 1..20: mol_type = other DNA
taaaattacaagcaatctat

SEQ ID NO: 13304 - DNA, 20 bp, synthetic construct
  source 1..20: mol_type = other DNA
ttaaaattacaagcaatcta

SEQ ID NO: 13305 - DNA, 20 bp, synthetic construct
  source 1..20: mol_type = other DNA
gttaaaattacaagcaatct

SEQ ID NO: 13306 - DNA, 20 bp, synthetic construct
  source 1..20: mol_type = other DNA
ggttaaaattacaagcaatc

SEQ ID NO: 13307 - DNA, 20 bp, synthetic construct
  source 1..20: mol_type = other DNA
gggttaaaattacaagcaat

SEQ ID NO: 13308 - DNA, 20 bp, synthetic construct
  source 1..20: mol_type = other DNA
agggttaaaattacaagcaa

SEQ ID NO: 13309 - DNA, 20 bp, synthetic construct
  source 1..20: mol_type = other DNA
cagggttaaaattacaagca

SEQ ID NO: 13310 - DNA, 20 bp, synthetic construct
  source 1..20: mol_type = other DNA
tcagggttaaaattacaagc

SEQ ID NO: 13311 - DNA, 20 bp, synthetic construct
  source 1..20: mol_type = other DNA
ttcagggttaaaattacaag

SEQ ID NO: 13312 - DNA, 20 bp, synthetic construct
  source 1..20: mol_type = other DNA
cttcagggttaaaattacaa

SEQ ID NO: 13313 - DNA, 20 bp, synthetic construct
  source 1..20: mol_type = other DNA
acttcagggttaaaattaca

SEQ ID NO: 13314 - DNA, 20 bp, synthetic construct
  source 1..20: mol_type = other DNA
aacttcagggttaaaattac

SEQ ID NO: 13315 - DNA, 20 bp, synthetic construct
  source 1..20: mol_type = other DNA
caacttcagggttaaaatta

SEQ ID NO: 13316 - DNA, 20 bp, synthetic construct
  source 1..20: mol_type = other DNA
acaacttcagggttaaaatt

SEQ ID NO: 13317 - DNA, 20 bp, synthetic construct
  source 1..20: mol_type = other DNA
cacaacttcagggttaaaat

SEQ ID NO: 13318 - DNA, 20 bp, synthetic construct
  source 1..20: mol_type = other DNA
acacaacttcagggttaaaa

SEQ ID NO: 13319 - DNA, 20 bp, synthetic construct
  source 1..20: mol_type = other DNA
gacacaacttcagggttaaa

SEQ ID NO: 13320 - DNA, 20 bp, synthetic construct
  source 1..20: mol_type = other DNA
tgacacaacttcagggttaa

SEQ ID NO: 13321 - DNA, 20 bp, synthetic construct
  source 1..20: mol_type = other DNA
ttgacacaacttcagggtta

SEQ ID NO: 13322 - DNA, 20 bp, synthetic construct
  source 1..20: mol_type = other DNA
cttgacacaacttcagggtt

SEQ ID NO: 13323 - DNA, 20 bp, synthetic construct
  source 1..20: mol_type = other DNA
acttgacacaacttcagggt

SEQ ID NO: 13324 - DNA, 20 bp, synthetic construct
  source 1..20: mol_type = other DNA
cacttgacacaacttcaggg

SEQ ID NO: 13325 - DNA, 20 bp, synthetic construct
  source 1..20: mol_type = other DNA
tcacttgacacaacttcagg

SEQ ID NO: 13326 - DNA, 20 bp, synthetic construct
  source 1..20: mol_type = other DNA
gtcacttgacacaacttcag

SEQ ID NO: 13327 - DNA, 20 bp, synthetic construct
  source 1..20: mol_type = other DNA
agtcacttgacacaacttca

SEQ ID NO: 13328 - DNA, 20 bp, synthetic construct
  source 1..20: mol_type = other DNA
aagtcacttgacacaacttc

SEQ ID NO: 13329 - DNA, 20 bp, synthetic construct
  source 1..20: mol_type = other DNA
aaagtcacttgacacaactt

SEQ ID NO: 13330 - DNA, 20 bp, synthetic construct
  source 1..20: mol_type = other DNA
taaagtcacttgacacaact

SEQ ID NO: 13331 - DNA, 20 bp, synthetic construct
  source 1..20: mol_type = other DNA
gtaaagtcacttgacacaac

SEQ ID NO: 13332 - DNA, 20 bp, synthetic construct
  source 1..20: mol_type = other DNA
tgtaaagtcacttgacacaa

SEQ ID NO: 13333 - DNA, 20 bp, synthetic construct
  source 1..20: mol_type = other DNA
ttgtaaagtcacttgacaca

SEQ ID NO: 13334 - DNA, 20 bp, synthetic construct
  source 1..20: mol_type = other DNA
attgtaaagtcacttgacac

SEQ ID NO: 13335 - DNA, 20 bp, synthetic construct
  source 1..20: mol_type = other DNA
cattgtaaagtcacttgaca

SEQ ID NO: 13336 - DNA, 20 bp, synthetic construct
  source 1..20: mol_type = other DNA
acattgtaaagtcacttgac

SEQ ID NO: 13337 - DNA, 20 bp, synthetic construct
  source 1..20: mol_type = other DNA
gacattgtaaagtcacttga

SEQ ID NO: 13338 - DNA, 20 bp, synthetic construct
  source 1..20: mol_type = other DNA
tgacattgtaaagtcacttg

SEQ ID NO: 13339 - DNA, 20 bp, synthetic construct
  source 1..20: mol_type = other DNA
ttgacattgtaaagtcactt

SEQ ID NO: 13340 - DNA, 20 bp, synthetic construct
  source 1..20: mol_type = other DNA
attgacattgtaaagtcact

SEQ ID NO: 13341 - DNA, 20 bp, synthetic construct
  source 1..20: mol_type = other DNA
aattgacattgtaaagtcac

SEQ ID NO: 13342 - DNA, 20 bp, synthetic construct
  source 1..20: mol_type = other DNA
aaattgacattgtaaagtca

SEQ ID NO: 13343 - DNA, 20 bp, synthetic construct
  source 1..20: mol_type = other DNA
caaattgacattgtaaagtc

SEQ ID NO: 13344 - DNA, 20 bp, synthetic construct
  source 1..20: mol_type = other DNA
acaaattgacattgtaaagt

SEQ ID NO: 13345 - DNA, 20 bp, synthetic construct
  source 1..20: mol_type = other DNA
aacaaattgacattgtaaag

SEQ ID NO: 13346 - DNA, 20 bp, synthetic construct
  source 1..20: mol_type = other DNA
aaacaaattgacattgtaaa

SEQ ID NO: 13347 - DNA, 20 bp, synthetic construct
  source 1..20: mol_type = other DNA
aaaacaaattgacattgtaa

SEQ ID NO: 13348 - DNA, 20 bp, synthetic construct
  source 1..20: mol_type = other DNA
taaaacaaattgacattgta

SEQ ID NO: 13349 - DNA, 20 bp, synthetic construct
  source 1..20: mol_type = other DNA
ataaaacaaattgacattgt

SEQ ID NO: 13350 - DNA, 20 bp, synthetic construct
  source 1..20: mol_type = other DNA
aataaaacaaattgacattg

SEQ ID NO: 13351 - DNA, 20 bp, synthetic construct
  source 1..20: mol_type = other DNA
aaataaaacaaattgacatt

SEQ ID NO: 13352 - DNA, 20 bp, synthetic construct
  source 1..20: mol_type = other DNA
taaataaaacaaattgacat

SEQ ID NO: 13353 - DNA, 20 bp, synthetic construct
  source 1..20: mol_type = other DNA
ataaataaaacaaattgaca

SEQ ID NO: 13354 - DNA, 20 bp, synthetic construct
  source 1..20: mol_type = other DNA
aataaataaaacaaattgac

SEQ ID NO: 13355 - DNA, 20 bp, synthetic construct
  source 1..20: mol_type = other DNA
aaataaataaaacaaattga

SEQ ID NO: 13356 - DNA, 20 bp, synthetic construct
  source 1..20: mol_type = other DNA
taaataaataaaacaaattg

SEQ ID NO: 13357 - DNA, 20 bp, synthetic construct
  source 1..20: mol_type = other DNA
ataaataaataaaacaaatt

SEQ ID NO: 13358 - DNA, 20 bp, synthetic construct
  source 1..20: mol_type = other DNA
aataaataaataaaacaaat

SEQ ID NO: 13359 - DNA, 20 bp, synthetic construct
  source 1..20: mol_type = other DNA
aaataaataaataaaacaaa

SEQ ID NO: 13360 - DNA, 20 bp, synthetic construct
  source 1..20: mol_type = other DNA
taaataaataaataaaacaa

SEQ ID NO: 13361 - DNA, 20 bp, synthetic construct
  source 1..20: mol_type = other DNA
ataaataaataaataaaaca

SEQ ID NO: 13362 - DNA, 20 bp, synthetic construct
  source 1..20: mol_type = other DNA
aataaataaataaataaaac

SEQ ID NO: 13363 - DNA, 20 bp, synthetic construct
  source 1..20: mol_type = other DNA
aaataaataaataaataaaa

SEQ ID NO: 13364 - DNA, 20 bp, synthetic construct
  source 1..20: mol_type = other DNA
taaataaataaataaataaa

SEQ ID NO: 13365 - DNA, 20 bp, synthetic construct
  source 1..20: mol_type = other DNA
ataaataaataaataaataa

SEQ ID NO: 13366 - DNA, 20 bp, synthetic construct
  source 1..20: mol_type = other DNA
aataaataaataaataaata

SEQ ID NO: 13367 - DNA, 20 bp, synthetic construct
  source 1..20: mol_type = other DNA
aaataaataaataaataaat

SEQ ID NO: 13368 - DNA, 20 bp, synthetic construct
  source 1..20: mol_type = other DNA
taaataaataaataaataaa

SEQ ID NO: 13369 - DNA, 20 bp, synthetic construct
  source 1..20: mol_type = other DNA
ataaataaataaataaataa

SEQ ID NO: 13370 - DNA, 20 bp, synthetic construct
  source 1..20: mol_type = other DNA
aataaataaataaataaata

SEQ ID NO: 13371 - DNA, 20 bp, synthetic construct
  source 1..20: mol_type = other DNA
aaataaataaataaataaat

SEQ ID NO: 13372 - DNA, 20 bp, synthetic construct
  source 1..20: mol_type = other DNA
taaataaataaataaataaa

SEQ ID NO: 13373 - DNA, 20 bp, synthetic construct
  source 1..20: mol_type = other DNA
ataaataaataaataaataa

SEQ ID NO: 13374 - DNA, 20 bp, synthetic construct
  source 1..20: mol_type = other DNA
aataaataaataaataaata

SEQ ID NO: 13375 - DNA, 20 bp, synthetic construct
  source 1..20: mol_type = other DNA
aaataaataaataaataaat

SEQ ID NO: 13376 - DNA, 20 bp, synthetic construct
  source 1..20: mol_type = other DNA
taaataaataaataaataaa

SEQ ID NO: 13377 - DNA, 20 bp, synthetic construct
  source 1..20: mol_type = other DNA
ataaataaataaataaataa

SEQ ID NO: 13378 - DNA, 20 bp, synthetic construct
  source 1..20: mol_type = other DNA
aataaataaataaataaata

SEQ ID NO: 13379 - DNA, 20 bp, synthetic construct
  source 1..20: mol_type = other DNA
aaataaataaataaataaat

SEQ ID NO: 13380 - DNA, 20 bp, synthetic construct
  source 1..20: mol_type = other DNA
aaaataaataaataaataaa

SEQ ID NO: 13381 - DNA, 20 bp, synthetic construct
  source 1..20: mol_type = other DNA
aaaaataaataaataaataa

SEQ ID NO: 13382 - DNA, 20 bp, synthetic construct
  source 1..20: mol_type = other DNA
caaaaataaataaataaata

SEQ ID NO: 13383 - DNA, 20 bp, synthetic construct
  source 1..20: mol_type = other DNA
acaaaaataaataaataaat

SEQ ID NO: 13384 - DNA, 20 bp, synthetic construct
  source 1..20: mol_type = other DNA
cacaaaaataaataaataaa

SEQ ID NO: 13385 - DNA, 20 bp, synthetic construct
  source 1..20: mol_type = other DNA
tcacaaaaataaataaataa

SEQ ID NO: 13386 - DNA, 20 bp, synthetic construct
  source 1..20: mol_type = other DNA
atcacaaaaataaataaata

SEQ ID NO: 13387 - DNA, 20 bp, synthetic construct
  source 1..20: mol_type = other DNA
tatcacaaaaataaataaat

SEQ ID NO: 13388 - DNA, 20 bp, synthetic construct
  source 1..20: mol_type = other DNA
ctatcacaaaaataaataaa

SEQ ID NO: 13389 - DNA, 20 bp, synthetic construct
  source 1..20: mol_type = other DNA
cctatcacaaaaataaataa

SEQ ID NO: 13390 - DNA, 20 bp, synthetic construct
  source 1..20: mol_type = other DNA
tcctatcacaaaaataaata

SEQ ID NO: 13391 - DNA, 20 bp, synthetic construct
  source 1..20: mol_type = other DNA
atcctatcacaaaaataaat

SEQ ID NO: 13392 - DNA, 20 bp, synthetic construct
  source 1..20: mol_type = other DNA
gatcctatcacaaaaataaa

SEQ ID NO: 13393 - DNA, 20 bp, synthetic construct
  source 1..20: mol_type = other DNA
agatcctatcacaaaaataa

SEQ ID NO: 13394 - DNA, 20 bp, synthetic construct
  source 1..20: mol_type = other DNA
cagatcctatcacaaaaata

SEQ ID NO: 13395 - DNA, 20 bp, synthetic construct
  source 1..20: mol_type = other DNA
ccagatcctatcacaaaaat

SEQ ID NO: 13396 - DNA, 20 bp, synthetic construct
  source 1..20: mol_type = other DNA
gccagatcctatcacaaaaa

SEQ ID NO: 13397 - DNA, 20 bp, synthetic construct
  source 1..20: mol_type = other DNA
agccagatcctatcacaaaa

SEQ ID NO: 13398 - DNA, 20 bp, synthetic construct
  source 1..20: mol_type = other DNA
gagccagatcctatcacaaa

SEQ ID NO: 13399 - DNA, 20 bp, synthetic construct
  source 1..20: mol_type = other DNA
agagccagatcctatcacaa

SEQ ID NO: 13400 - DNA, 20 bp, synthetic construct
  source 1..20: mol_type = other DNA
cagagccagatcctatcaca

SEQ ID NO: 13401 - DNA, 20 bp, synthetic construct
  source 1..20: mol_type = other DNA
acagagccagatcctatcac

SEQ ID NO: 13402 - DNA, 20 bp, synthetic construct
  source 1..20: mol_type = other DNA
aacagagccagatcctatca

SEQ ID NO: 13403 - DNA, 20 bp, synthetic construct
  source 1..20: mol_type = other DNA
caacagagccagatcctatc

SEQ ID NO: 13404 - DNA, 20 bp, synthetic construct
  source 1..20: mol_type = other DNA
gcaacagagccagatcctat

SEQ ID NO: 13405 - DNA, 20 bp, synthetic construct
  source 1..20: mol_type = other DNA
agcaacagagccagatccta

SEQ ID NO: 13406 - DNA, 20 bp, synthetic construct
  source 1..20: mol_type = other DNA
tagcaacagagccagatcct

SEQ ID NO: 13407 - DNA, 20 bp, synthetic construct
  source 1..20: mol_type = other DNA
ttagcaacagagccagatcc

SEQ ID NO: 13408 - DNA, 20 bp, synthetic construct
  source 1..20: mol_type = other DNA
cttagcaacagagccagatc

SEQ ID NO: 13409 - DNA, 20 bp, synthetic construct
  source 1..20: mol_type = other DNA
ccttagcaacagagccagat

SEQ ID NO: 13410 - DNA, 20 bp, synthetic construct
  source 1..20: mol_type = other DNA
gccttagcaacagagccaga

SEQ ID NO: 13411 - DNA, 20 bp, synthetic construct
  source 1..20: mol_type = other DNA
agccttagcaacagagccag

SEQ ID NO: 13412 - DNA, 20 bp, synthetic construct
  source 1..20: mol_type = other DNA
cagccttagcaacagagcca

SEQ ID NO: 13413 - DNA, 20 bp, synthetic construct
  source 1..20: mol_type = other DNA
ccagccttagcaacagagcc

SEQ ID NO: 13414 - DNA, 20 bp, synthetic construct
  source 1..20: mol_type = other DNA
tccagccttagcaacagagc

SEQ ID NO: 13415 - DNA, 20 bp, synthetic construct
  source 1..20: mol_type = other DNA
ctccagccttagcaacagag

SEQ ID NO: 13416 - DNA, 20 bp, synthetic construct
  source 1..20: mol_type = other DNA
actccagccttagcaacaga

SEQ ID NO: 13417 - DNA, 20 bp, synthetic construct
  source 1..20: mol_type = other DNA
cactccagccttagcaacag

SEQ ID NO: 13418 - DNA, 20 bp, synthetic construct
  source 1..20: mol_type = other DNA
gcactccagccttagcaaca

SEQ ID NO: 13419 - DNA, 20 bp, synthetic construct
  source 1..20: mol_type = other DNA
tgcactccagccttagcaac

SEQ ID NO: 13420 - DNA, 20 bp, synthetic construct
  source 1..20: mol_type = other DNA
ctgcactccagccttagcaa

SEQ ID NO: 13421 - DNA, 20 bp, synthetic construct
  source 1..20: mol_type = other DNA
actgcactccagccttagca

SEQ ID NO: 13422 - DNA, 20 bp, synthetic construct
  source 1..20: mol_type = other DNA
cactgcactccagccttagc

SEQ ID NO: 13423 - DNA, 20 bp, synthetic construct
  source 1..20: mol_type = other DNA
acactgcactccagccttag

SEQ ID NO: 13424 - DNA, 20 bp, synthetic construct
  source 1..20: mol_type = other DNA
aacactgcactccagcctta

SEQ ID NO: 13425 - DNA, 20 bp, synthetic construct
  source 1..20: mol_type = other DNA
caacactgcactccagcctt

SEQ ID NO: 13426 - DNA, 20 bp, synthetic construct
  source 1..20: mol_type = other DNA
gcaacactgcactccagcct

SEQ ID NO: 13427 - DNA, 20 bp, synthetic construct
  source 1..20: mol_type = other DNA
tgcaacactgcactccagcc

SEQ ID NO: 13428 - DNA, 20 bp, synthetic construct
  source 1..20: mol_type = other DNA
ttgcaacactgcactccagc

SEQ ID NO: 13429 - DNA, 20 bp, synthetic construct
  source 1..20: mol_type = other DNA
tttgcaacactgcactccag

SEQ ID NO: 13430 - DNA, 20 bp, synthetic construct
  source 1..20: mol_type = other DNA
atttgcaacactgcactcca

SEQ ID NO: 13431 - DNA, 20 bp, synthetic construct
  source 1..20: mol_type = other DNA
tatttgcaacactgcactcc

SEQ ID NO: 13432 - DNA, 20 bp, synthetic construct
  source 1..20: mol_type = other DNA
gtatttgcaacactgcactc

SEQ ID NO: 13433 - DNA, 20 bp, synthetic construct
  source 1..20: mol_type = other DNA
cgtatttgcaacactgcact

SEQ ID NO: 13434 - DNA, 20 bp, synthetic construct
  source 1..20: mol_type = other DNA
ccgtatttgcaacactgcac

SEQ ID NO: 13435 - DNA, 20 bp, synthetic construct
  source 1..20: mol_type = other DNA
gccgtatttgcaacactgca

SEQ ID NO: 13436 - DNA, 20 bp, synthetic construct
  source 1..20: mol_type = other DNA
agccgtatttgcaacactgc

SEQ ID NO: 13437 - DNA, 20 bp, synthetic construct
  source 1..20: mol_type = other DNA
gagccgtatttgcaacactg

SEQ ID NO: 13438 - DNA, 20 bp, synthetic construct
  source 1..20: mol_type = other DNA
tgagccgtatttgcaacact

SEQ ID NO: 13439 - DNA, 20 bp, synthetic construct
  source 1..20: mol_type = other DNA
gtgagccgtatttgcaacac

SEQ ID NO: 13440 - DNA, 20 bp, synthetic construct
  source 1..20: mol_type = other DNA
agtgagccgtatttgcaaca

SEQ ID NO: 13441 - DNA, 20 bp, synthetic construct
  source 1..20: mol_type = other DNA
cagtgagccgtatttgcaac

SEQ ID NO: 13442 - DNA, 20 bp, synthetic construct
  source 1..20: mol_type = other DNA
gcagtgagccgtatttgcaa

SEQ ID NO: 13443 - DNA, 20 bp, synthetic construct
  source 1..20: mol_type = other DNA
tgcagtgagccgtatttgca

SEQ ID NO: 13444 - DNA, 20 bp, synthetic construct
  source 1..20: mol_type = other DNA
ttgcagtgagccgtatttgc

SEQ ID NO: 13445 - DNA, 20 bp, synthetic construct
  source 1..20: mol_type = other DNA
gttgcagtgagccgtatttg

SEQ ID NO: 13446 - DNA, 20 bp, synthetic construct
  source 1..20: mol_type = other DNA
ggttgcagtgagccgtattt

SEQ ID NO: 13447 - DNA, 20 bp, synthetic construct
  source 1..20: mol_type = other DNA
aggttgcagtgagccgtatt

SEQ ID NO: 13448 - DNA, 20 bp, synthetic construct
  source 1..20: mol_type = other DNA
gaggttgcagtgagccgtat

SEQ ID NO: 13449 - DNA, 20 bp, synthetic construct
  source 1..20: mol_type = other DNA
agaggttgcagtgagccgta

SEQ ID NO: 13450 - DNA, 20 bp, synthetic construct
  source 1..20: mol_type = other DNA
cagaggttgcagtgagccgt

SEQ ID NO: 13451 - DNA, 20 bp, synthetic construct
  source 1..20: mol_type = other DNA
acagaggttgcagtgagccg

SEQ ID NO: 13452 - DNA, 20 bp, synthetic construct
  source 1..20: mol_type = other DNA
gacagaggttgcagtgagcc

SEQ ID NO: 13453 - DNA, 20 bp, synthetic construct
  source 1..20: mol_type = other DNA
agacagaggttgcagtgagc

SEQ ID NO: 13454 - DNA, 20 bp, synthetic construct
  source 1..20: mol_type = other DNA
gagacagaggttgcagtgag

SEQ ID NO: 13455 - DNA, 20 bp, synthetic construct
  source 1..20: mol_type = other DNA
ggagacagaggttgcagtga

SEQ ID NO: 13456 - DNA, 20 bp, synthetic construct
  source 1..20: mol_type = other DNA
gggagacagaggttgcagtg

SEQ ID NO: 13457 - DNA, 20 bp, synthetic construct
  source 1..20: mol_type = other DNA
cgggagacagaggttgcagt

SEQ ID NO: 13458 - DNA, 20 bp, synthetic construct
  source 1..20: mol_type = other DNA
ccgggagacagaggttgcag

SEQ ID NO: 13459 - DNA, 20 bp, synthetic construct
  source 1..20: mol_type = other DNA
cccgggagacagaggttgca

SEQ ID NO: 13460 - DNA, 20 bp, synthetic construct
  source 1..20: mol_type = other DNA
acccgggagacagaggttgc

SEQ ID NO: 13461 - DNA, 20 bp, synthetic construct
  source 1..20: mol_type = other DNA
aacccgggagacagaggttg

SEQ ID NO: 13462 - DNA, 20 bp, synthetic construct
  source 1..20: mol_type = other DNA
gaacccgggagacagaggtt

SEQ ID NO: 13463 - DNA, 20 bp, synthetic construct
  source 1..20: mol_type = other DNA
tgaacccgggagacagaggt

SEQ ID NO: 13464 - DNA, 20 bp, synthetic construct
  source 1..20: mol_type = other DNA
ttgaacccgggagacagagg

SEQ ID NO: 13465 - DNA, 20 bp, synthetic construct
  source 1..20: mol_type = other DNA
cttgaacccgggagacagag

SEQ ID NO: 13466 - DNA, 20 bp, synthetic construct
  source 1..20: mol_type = other DNA
gcttgaacccgggagacaga

SEQ ID NO: 13467 - DNA, 20 bp, synthetic construct
  source 1..20: mol_type = other DNA
ggcttgaacccgggagacag

SEQ ID NO: 13468 - DNA, 20 bp, synthetic construct
  source 1..20: mol_type = other DNA
tggcttgaacccgggagaca

SEQ ID NO: 13469 - DNA, 20 bp, synthetic construct
  source 1..20: mol_type = other DNA
atggcttgaacccgggagac

SEQ ID NO: 13470 - DNA, 20 bp, synthetic construct
  source 1..20: mol_type = other DNA
gatggcttgaacccgggaga

SEQ ID NO: 13471 - DNA, 20 bp, synthetic construct
  source 1..20: mol_type = other DNA
ggatggcttgaacccgggag

SEQ ID NO: 13472 - DNA, 20 bp, synthetic construct
  source 1..20: mol_type = other DNA
aggatggcttgaacccggga

SEQ ID NO: 13473 - DNA, 20 bp, synthetic construct
  source 1..20: mol_type = other DNA
gaggatggcttgaacccggg

SEQ ID NO: 13474 - DNA, 20 bp, synthetic construct
  source 1..20: mol_type = other DNA
ggaggatggcttgaacccgg

SEQ ID NO: 13475 - DNA, 20 bp, synthetic construct
  source 1..20: mol_type = other DNA
gggaggatggcttgaacccg

SEQ ID NO: 13476 - DNA, 20 bp, synthetic construct
  source 1..20: mol_type = other DNA
tgggaggatggcttgaaccc

SEQ ID NO: 13477 - DNA, 20 bp, synthetic construct
  source 1..20: mol_type = other DNA
gtgggaggatggcttgaacc

SEQ ID NO: 13478 - DNA, 20 bp, synthetic construct
  source 1..20: mol_type = other DNA
ggtgggaggatggcttgaac

SEQ ID NO: 13479 - DNA, 20 bp, synthetic construct
  source 1..20: mol_type = other DNA
aggtgggaggatggcttgaa

SEQ ID NO: 13480 - DNA, 20 bp, synthetic construct
  source 1..20: mol_type = other DNA
gaggtgggaggatggcttga

SEQ ID NO: 13481 - DNA, 20 bp, synthetic construct
  source 1..20: mol_type = other DNA
tgaggtgggaggatggcttg

SEQ ID NO: 13482 - DNA, 20 bp, synthetic construct
  source 1..20: mol_type = other DNA
ctgaggtgggaggatggctt

SEQ ID NO: 13483 - DNA, 20 bp, synthetic construct
  source 1..20: mol_type = other DNA
gctgaggtgggaggatggct

SEQ ID NO: 13484 - DNA, 20 bp, synthetic construct
  source 1..20: mol_type = other DNA
ggctgaggtgggaggatggc

SEQ ID NO: 13485 - DNA, 20 bp, synthetic construct
  source 1..20: mol_type = other DNA
aggctgaggtgggaggatgg

SEQ ID NO: 13486 - DNA, 20 bp, synthetic construct
  source 1..20: mol_type = other DNA
gaggctgaggtgggaggatg

SEQ ID NO: 13487 - DNA, 20 bp, synthetic construct
  source 1..20: mol_type = other DNA
ggaggctgaggtgggaggat

SEQ ID NO: 13488 - DNA, 20 bp, synthetic construct
  source 1..20: mol_type = other DNA
gggaggctgaggtgggagga

SEQ ID NO: 13489 - DNA, 20 bp, synthetic construct
  source 1..20: mol_type = other DNA
tgggaggctgaggtgggagg

SEQ ID NO: 13490 - DNA, 20 bp, synthetic construct
  source 1..20: mol_type = other DNA
ttgggaggctgaggtgggag

SEQ ID NO: 13491 - DNA, 20 bp, synthetic construct
  source 1..20: mol_type = other DNA
cttgggaggctgaggtggga

SEQ ID NO: 13492 - DNA, 20 bp, synthetic construct
  source 1..20: mol_type = other DNA
acttgggaggctgaggtggg

SEQ ID NO: 13493 - DNA, 20 bp, synthetic construct
  source 1..20: mol_type = other DNA
tacttgggaggctgaggtgg

SEQ ID NO: 13494 - DNA, 20 bp, synthetic construct
  source 1..20: mol_type = other DNA
ctacttgggaggctgaggtg

SEQ ID NO: 13495 - DNA, 20 bp, synthetic construct
  source 1..20: mol_type = other DNA
actacttgggaggctgaggt

SEQ ID NO: 13496 - DNA, 20 bp, synthetic construct
  source 1..20: mol_type = other DNA
aactacttgggaggctgagg

SEQ ID NO: 13497 - DNA, 20 bp, synthetic construct
  source 1..20: mol_type = other DNA
caactacttgggaggctgag

SEQ ID NO: 13498 - DNA, 20 bp, synthetic construct
  source 1..20: mol_type = other DNA
ccaactacttgggaggctga

SEQ ID NO: 13499 - DNA, 20 bp, synthetic construct
  source 1..20: mol_type = other DNA
tccaactacttgggaggctg

SEQ ID NO: 13500 - DNA, 20 bp, synthetic construct
  source 1..20: mol_type = other DNA
ttccaactacttgggaggct

SEQ ID NO: 13501 - DNA, 20 bp, synthetic construct
  source 1..20: mol_type = other DNA
gttccaactacttgggaggc

SEQ ID NO: 13502 - DNA, 20 bp, synthetic construct
  source 1..20: mol_type = other DNA
agttccaactacttgggagg

SEQ ID NO: 13503 - DNA, 20 bp, synthetic construct
  source 1..20: mol_type = other DNA
tagttccaactacttgggag

SEQ ID NO: 13504 - DNA, 20 bp, synthetic construct
  source 1..20: mol_type = other DNA
gtagttccaactacttggga

SEQ ID NO: 13505 - DNA, 20 bp, synthetic construct
  source 1..20: mol_type = other DNA
agtagttccaactacttggg

SEQ ID NO: 13506 - DNA, 20 bp, synthetic construct
  source 1..20: mol_type = other DNA
cagtagttccaactacttgg

SEQ ID NO: 13507 - DNA, 20 bp, synthetic construct
  source 1..20: mol_type = other DNA
ccagtagttccaactacttg

SEQ ID NO: 13508 - DNA, 20 bp, synthetic construct
  source 1..20: mol_type = other DNA
accagtagttccaactactt

SEQ ID NO: 13509 - DNA, 20 bp, synthetic construct
  source 1..20: mol_type = other DNA
caccagtagttccaactact

SEQ ID NO: 13510 - DNA, 20 bp, synthetic construct
  source 1..20: mol_type = other DNA
gcaccagtagttccaactac

SEQ ID NO: 13511 - DNA, 20 bp, synthetic construct
  source 1..20: mol_type = other DNA
cgcaccagtagttccaacta

SEQ ID NO: 13512 - DNA, 20 bp, synthetic construct
  source 1..20: mol_type = other DNA
gcgcaccagtagttccaact

SEQ ID NO: 13513 - DNA, 20 bp, synthetic construct
  source 1..20: mol_type = other DNA
ggcgcaccagtagttccaac

SEQ ID NO: 13514 - DNA, 20 bp, synthetic construct
  source 1..20: mol_type = other DNA
gggcgcaccagtagttccaa

SEQ ID NO: 13515 - DNA, 20 bp, synthetic construct
  source 1..20: mol_type = other DNA
ggggcgcaccagtagttcca

SEQ ID NO: 13516 - DNA, 20 bp, synthetic construct
  source 1..20: mol_type = other DNA
tggggcgcaccagtagttcc

SEQ ID NO: 13517 - DNA, 20 bp, synthetic construct
  source 1..20: mol_type = other DNA
gtggggcgcaccagtagttc

SEQ ID NO: 13518 - DNA, 20 bp, synthetic construct
  source 1..20: mol_type = other DNA
tgtggggcgcaccagtagtt

SEQ ID NO: 13519 - DNA, 20 bp, synthetic construct
  source 1..20: mol_type = other DNA
ctgtggggcgcaccagtagt

SEQ ID NO: 13520 - DNA, 20 bp, synthetic construct
  source 1..20: mol_type = other DNA
actgtggggcgcaccagtag

SEQ ID NO: 13521 - DNA, 20 bp, synthetic construct
  source 1..20: mol_type = other DNA
cactgtggggcgcaccagta

SEQ ID NO: 13522 - DNA, 20 bp, synthetic construct
  source 1..20: mol_type = other DNA
gcactgtggggcgcaccagt

SEQ ID NO: 13523 - DNA, 20 bp, synthetic construct
  source 1..20: mol_type = other DNA
ggcactgtggggcgcaccag

SEQ ID NO: 13524 - DNA, 20 bp, synthetic construct
  source 1..20: mol_type = other DNA
aggcactgtggggcgcacca

SEQ ID NO: 13525 - DNA, 20 bp, synthetic construct
  source 1..20: mol_type = other DNA
caggcactgtggggcgcacc

SEQ ID NO: 13526 - DNA, 20 bp, synthetic construct
  source 1..20: mol_type = other DNA
gcaggcactgtggggcgcac

SEQ ID NO: 13527 - DNA, 20 bp, synthetic construct
  source 1..20: mol_type = other DNA
ggcaggcactgtggggcgca

SEQ ID NO: 13528 - DNA, 20 bp, synthetic construct
  source 1..20: mol_type = other DNA
aggcaggcactgtggggcgc

SEQ ID NO: 13529 - DNA, 20 bp, synthetic construct
  source 1..20: mol_type = other DNA
taggcaggcactgtggggcg

SEQ ID NO: 13530 - DNA, 20 bp, synthetic construct
  source 1..20: mol_type = other DNA
ctaggcaggcactgtggggc

SEQ ID NO: 13531 - DNA, 20 bp, synthetic construct
  source 1..20: mol_type = other DNA
actaggcaggcactgtgggg

SEQ ID NO: 13532 - DNA, 20 bp, synthetic construct
  source 1..20: mol_type = other DNA
aactaggcaggcactgtggg

SEQ ID NO: 13533 - DNA, 20 bp, synthetic construct
  source 1..20: mol_type = other DNA
aaactaggcaggcactgtgg

SEQ ID NO: 13534 - DNA, 20 bp, synthetic construct
  source 1..20: mol_type = other DNA
aaaactaggcaggcactgtg

SEQ ID NO: 13535 - DNA, 20 bp, synthetic construct
  source 1..20: mol_type = other DNA
aaaaactaggcaggcactgt

SEQ ID NO: 13536 - DNA, 20 bp, synthetic construct
  source 1..20: mol_type = other DNA
aaaaaactaggcaggcactg

SEQ ID NO: 13537 - DNA, 20 bp, synthetic construct
  source 1..20: mol_type = other DNA
aaaaaaactaggcaggcact

SEQ ID NO: 13538 - DNA, 20 bp, synthetic construct
  source 1..20: mol_type = other DNA
caaaaaaactaggcaggcac

SEQ ID NO: 13539 - DNA, 20 bp, synthetic construct
  source 1..20: mol_type = other DNA
acaaaaaaactaggcaggca

SEQ ID NO: 13540 - DNA, 20 bp, synthetic construct
  source 1..20: mol_type = other DNA
tacaaaaaaactaggcaggc

SEQ ID NO: 13541 - DNA, 20 bp, synthetic construct
  source 1..20: mol_type = other DNA
atacaaaaaaactaggcagg

SEQ ID NO: 13542 - DNA, 20 bp, synthetic construct
  source 1..20: mol_type = other DNA
aatacaaaaaaactaggcag

SEQ ID NO: 13543 - DNA, 20 bp, synthetic construct
  source 1..20: mol_type = other DNA
aaatacaaaaaaactaggca

SEQ ID NO: 13544 - DNA, 20 bp, synthetic construct
  source 1..20: mol_type = other DNA
aaaatacaaaaaaactaggc

SEQ ID NO: 13545 - DNA, 20 bp, synthetic construct
  source 1..20: mol_type = other DNA
gaaaatacaaaaaaactagg

SEQ ID NO: 13546 - DNA, 20 bp, synthetic construct
  source 1..20: mol_type = other DNA
tgaaaatacaaaaaaactag

SEQ ID NO: 13547 - DNA, 20 bp, synthetic construct
  source 1..20: mol_type = other DNA
ctgaaaatacaaaaaaacta

SEQ ID NO: 13548 - DNA, 20 bp, synthetic construct
  source 1..20: mol_type = other DNA
actgaaaatacaaaaaaact

SEQ ID NO: 13549 - DNA, 20 bp, synthetic construct
  source 1..20: mol_type = other DNA
tactgaaaatacaaaaaaac

SEQ ID NO: 13550 - DNA, 20 bp, synthetic construct
  source 1..20: mol_type = other DNA
ctactgaaaatacaaaaaaa

SEQ ID NO: 13551 - DNA, 20 bp, synthetic construct
  source 1..20: mol_type = other DNA
tctactgaaaatacaaaaaa

SEQ ID NO: 13552 - DNA, 20 bp, synthetic construct
  source 1..20: mol_type = other DNA
atctactgaaaatacaaaaa

SEQ ID NO: 13553 - DNA, 20 bp, synthetic construct
  source 1..20: mol_type = other DNA
catctactgaaaatacaaaa

SEQ ID NO: 13554 - DNA, 20 bp, synthetic construct
  source 1..20: mol_type = other DNA
acatctactgaaaatacaaa

SEQ ID NO: 13555 - DNA, 20 bp, synthetic construct
  source 1..20: mol_type = other DNA
cacatctactgaaaatacaa

SEQ ID NO: 13556 - DNA, 20 bp, synthetic construct
  source 1..20: mol_type = other DNA
ccacatctactgaaaataca

SEQ ID NO: 13557 - DNA, 20 bp, synthetic construct
  source 1..20: mol_type = other DNA
tccacatctactgaaaatac

SEQ ID NO: 13558 - DNA, 20 bp, synthetic construct
  source 1..20: mol_type = other DNA
ctccacatctactgaaaata

SEQ ID NO: 13559 - DNA, 20 bp, synthetic construct
  source 1..20: mol_type = other DNA
actccacatctactgaaaat

SEQ ID NO: 13560 - DNA, 20 bp, synthetic construct
  source 1..20: mol_type = other DNA
aactccacatctactgaaaa

SEQ ID NO: 13561 - DNA, 20 bp, synthetic construct
  source 1..20: mol_type = other DNA
aaactccacatctactgaaa

SEQ ID NO: 13562 - DNA, 20 bp, synthetic construct
  source 1..20: mol_type = other DNA
aaaactccacatctactgaa

SEQ ID NO: 13563 - DNA, 20 bp, synthetic construct
  source 1..20: mol_type = other DNA
caaaactccacatctactga

SEQ ID NO: 13564 - DNA, 20 bp, synthetic construct
  source 1..20: mol_type = other DNA
gcaaaactccacatctactg

SEQ ID NO: 13565 - DNA, 20 bp, synthetic construct
  source 1..20: mol_type = other DNA
ggcaaaactccacatctact

SEQ ID NO: 13566 - DNA, 20 bp, synthetic construct
  source 1..20: mol_type = other DNA
tggcaaaactccacatctac

SEQ ID NO: 13567 - DNA, 20 bp, synthetic construct
  source 1..20: mol_type = other DNA
atggcaaaactccacatcta

SEQ ID NO: 13568 - DNA, 20 bp, synthetic construct
  source 1..20: mol_type = other DNA
catggcaaaactccacatct

SEQ ID NO: 13569 - DNA, 20 bp, synthetic construct
  source 1..20: mol_type = other DNA
acatggcaaaactccacatc

SEQ ID NO: 13570 - DNA, 20 bp, synthetic construct
  source 1..20: mol_type = other DNA
aacatggcaaaactccacat

SEQ ID NO: 13571 - DNA, 20 bp, synthetic construct
  source 1..20: mol_type = other DNA
caacatggcaaaactccaca

SEQ ID NO: 13572 - DNA, 20 bp, synthetic construct
  source 1..20: mol_type = other DNA
tcaacatggcaaaactccac

SEQ ID NO: 13573 - DNA, 20 bp, synthetic construct
  source 1..20: mol_type = other DNA
atcaacatggcaaaactcca

SEQ ID NO: 13574 - DNA, 20 bp, synthetic construct
  source 1..20: mol_type = other DNA
gatcaacatggcaaaactcc

SEQ ID NO: 13575 - DNA, 20 bp, synthetic construct
  source 1..20: mol_type = other DNA
agatcaacatggcaaaactc

SEQ ID NO: 13576 - DNA, 20 bp, synthetic construct
  source 1..20: mol_type = other DNA
aagatcaacatggcaaaact

SEQ ID NO: 13577 - DNA, 20 bp, synthetic construct
  source 1..20: mol_type = other DNA
caagatcaacatggcaaaac

SEQ ID NO: 13578 - DNA, 20 bp, synthetic construct
  source 1..20: mol_type = other DNA
tcaagatcaacatggcaaaa

SEQ ID NO: 13579 - DNA, 20 bp, synthetic construct
  source 1..20: mol_type = other DNA
ttcaagatcaacatggcaaa

SEQ ID NO: 13580 - DNA, 20 bp, synthetic construct
  source 1..20: mol_type = other DNA
gttcaagatcaacatggcaa

SEQ ID NO: 13581 - DNA, 20 bp, synthetic construct
  source 1..20: mol_type = other DNA
agttcaagatcaacatggca

SEQ ID NO: 13582 - DNA, 20 bp, synthetic construct
  source 1..20: mol_type = other DNA
gagttcaagatcaacatggc

SEQ ID NO: 13583 - DNA, 20 bp, synthetic construct
  source 1..20: mol_type = other DNA
tgagttcaagatcaacatgg

SEQ ID NO: 13584 - DNA, 20 bp, synthetic construct
  source 1..20: mol_type = other DNA
atgagttcaagatcaacatg

SEQ ID NO: 13585 - DNA, 20 bp, synthetic construct
  source 1..20: mol_type = other DNA
catgagttcaagatcaacat

SEQ ID NO: 13586 - DNA, 20 bp, synthetic construct
  source 1..20: mol_type = other DNA
ccatgagttcaagatcaaca

SEQ ID NO: 13587 - DNA, 20 bp, synthetic construct
  source 1..20: mol_type = other DNA
gccatgagttcaagatcaac

SEQ ID NO: 13588 - DNA, 20 bp, synthetic construct
  source 1..20: mol_type = other DNA
ggccatgagttcaagatcaa

SEQ ID NO: 13589 - DNA, 20 bp, synthetic construct
  source 1..20: mol_type = other DNA
aggccatgagttcaagatca

SEQ ID NO: 13590 - DNA, 20 bp, synthetic construct
  source 1..20: mol_type = other DNA
gaggccatgagttcaagatc

SEQ ID NO: 13591 - DNA, 20 bp, synthetic construct
  source 1..20: mol_type = other DNA
cgaggccatgagttcaagat

SEQ ID NO: 13592 - DNA, 20 bp, synthetic construct
  source 1..20: mol_type = other DNA
tcgaggccatgagttcaaga

SEQ ID NO: 13593 - DNA, 20 bp, synthetic construct
  source 1..20: mol_type = other DNA
ctcgaggccatgagttcaag

SEQ ID NO: 13594 - DNA, 20 bp, synthetic construct
  source 1..20: mol_type = other DNA
actcgaggccatgagttcaa

SEQ ID NO: 13595 - DNA, 20 bp, synthetic construct
  source 1..20: mol_type = other DNA
cactcgaggccatgagttca

SEQ ID NO: 13596 - DNA, 20 bp, synthetic construct
  source 1..20: mol_type = other DNA
tcactcgaggccatgagttc

SEQ ID NO: 13597 - DNA, 20 bp, synthetic construct
  source 1..20: mol_type = other DNA
atcactcgaggccatgagtt

SEQ ID NO: 13598 - DNA, 20 bp, synthetic construct
  source 1..20: mol_type = other DNA
gatcactcgaggccatgagt

SEQ ID NO: 13599 - DNA, 20 bp, synthetic construct
  source 1..20: mol_type = other DNA
ggatcactcgaggccatgag

SEQ ID NO: 13600 - DNA, 20 bp, synthetic construct
  source 1..20: mol_type = other DNA
tggatcactcgaggccatga

SEQ ID NO: 13601 - DNA, 20 bp, synthetic construct
  source 1..20: mol_type = other DNA
gtggatcactcgaggccatg

SEQ ID NO: 13602 - DNA, 20 bp, synthetic construct
  source 1..20: mol_type = other DNA
ggtggatcactcgaggccat

SEQ ID NO: 13603 - DNA, 20 bp, synthetic construct
  source 1..20: mol_type = other DNA
gggtggatcactcgaggcca

SEQ ID NO: 13604 - DNA, 20 bp, synthetic construct
  source 1..20: mol_type = other DNA
ggggtggatcactcgaggcc

SEQ ID NO: 13605 - DNA, 20 bp, synthetic construct
  source 1..20: mol_type = other DNA
tggggtggatcactcgaggc

SEQ ID NO: 13606 - DNA, 20 bp, synthetic construct
  source 1..20: mol_type = other DNA
gtggggtggatcactcgagg

SEQ ID NO: 13607 - DNA, 20 bp, synthetic construct
  source 1..20: mol_type = other DNA
agtggggtggatcactcgag

SEQ ID NO: 13608 - DNA, 20 bp, synthetic construct
  source 1..20: mol_type = other DNA
aagtggggtggatcactcga

SEQ ID NO: 13609 - DNA, 20 bp, synthetic construct
  source 1..20: mol_type = other DNA
taagtggggtggatcactcg

SEQ ID NO: 13610 - DNA, 20 bp, synthetic construct
  source 1..20: mol_type = other DNA
ctaagtggggtggatcactc

SEQ ID NO: 13611 - DNA, 20 bp, synthetic construct
  source 1..20: mol_type = other DNA
cctaagtggggtggatcact

SEQ ID NO: 13612 - DNA, 20 bp, synthetic construct
  source 1..20: mol_type = other DNA
gcctaagtggggtggatcac

SEQ ID NO: 13613 - DNA, 20 bp, synthetic construct
  source 1..20: mol_type = other DNA
ggcctaagtggggtggatca

SEQ ID NO: 13614 - DNA, 20 bp, synthetic construct
  source 1..20: mol_type = other DNA
aggcctaagtggggtggatc

SEQ ID NO: 13615 - DNA, 20 bp, synthetic construct
  source 1..20: mol_type = other DNA
gaggcctaagtggggtggat

SEQ ID NO: 13616 - DNA, 20 bp, synthetic construct
  source 1..20: mol_type = other DNA
ggaggcctaagtggggtgga

SEQ ID NO: 13617 - DNA, 20 bp, synthetic construct
  source 1..20: mol_type = other DNA
aggaggcctaagtggggtgg

SEQ ID NO: 13618 - DNA, 20 bp, synthetic construct
  source 1..20: mol_type = other DNA
taggaggcctaagtggggtg

SEQ ID NO: 13619 - DNA, 20 bp, synthetic construct
  source 1..20: mol_type = other DNA
ttaggaggcctaagtggggt

SEQ ID NO: 13620 - DNA, 20 bp, synthetic construct
  source 1..20: mol_type = other DNA
gttaggaggcctaagtgggg

SEQ ID NO: 13621 - DNA, 20 bp, synthetic construct
  source 1..20: mol_type = other DNA
tgttaggaggcctaagtggg

SEQ ID NO: 13622 - DNA, 20 bp, synthetic construct
  source 1..20: mol_type = other DNA
atgttaggaggcctaagtgg

SEQ ID NO: 13623 - DNA, 20 bp, synthetic construct
  source 1..20: mol_type = other DNA
catgttaggaggcctaagtg

SEQ ID NO: 13624 - DNA, 20 bp, synthetic construct
  source 1..20: mol_type = other DNA
gcatgttaggaggcctaagt

SEQ ID NO: 13625 - DNA, 20 bp, synthetic construct
  source 1..20: mol_type = other DNA
agcatgttaggaggcctaag

SEQ ID NO: 13626 - DNA, 20 bp, synthetic construct
  source 1..20: mol_type = other DNA
cagcatgttaggaggcctaa

SEQ ID NO: 13627 - DNA, 20 bp, synthetic construct
  source 1..20: mol_type = other DNA
ccagcatgttaggaggccta

SEQ ID NO: 13628 - DNA, 20 bp, synthetic construct
  source 1..20: mol_type = other DNA
accagcatgttaggaggcct

SEQ ID NO: 13629 - DNA, 20 bp, synthetic construct
  source 1..20: mol_type = other DNA
caccagcatgttaggaggcc

SEQ ID NO: 13630 - DNA, 20 bp, synthetic construct
  source 1..20: mol_type = other DNA
acaccagcatgttaggaggc

SEQ ID NO: 13631 - DNA, 20 bp, synthetic construct
  source 1..20: mol_type = other DNA
aacaccagcatgttaggagg

SEQ ID NO: 13632 - DNA, 20 bp, synthetic construct
  source 1..20: mol_type = other DNA
taacaccagcatgttaggag

SEQ ID NO: 13633 - DNA, 20 bp, synthetic construct
  source 1..20: mol_type = other DNA
gtaacaccagcatgttagga

SEQ ID NO: 13634 - DNA, 20 bp, synthetic construct
  source 1..20: mol_type = other DNA
tgtaacaccagcatgttagg

SEQ ID NO: 13635 - DNA, 20 bp, synthetic construct
  source 1..20: mol_type = other DNA
ctgtaacaccagcatgttag

SEQ ID NO: 13636 - DNA, 20 bp, synthetic construct
  source 1..20: mol_type = other DNA
cctgtaacaccagcatgtta

SEQ ID NO: 13637 - DNA, 20 bp, synthetic construct
  source 1..20: mol_type = other DNA
acctgtaacaccagcatgtt

SEQ ID NO: 13638 - DNA, 20 bp, synthetic construct
  source 1..20: mol_type = other DNA
cacctgtaacaccagcatgt

SEQ ID NO: 13639 - DNA, 20 bp, synthetic construct
  source 1..20: mol_type = other DNA
acacctgtaacaccagcatg

SEQ ID NO: 13640 - DNA, 20 bp, synthetic construct
  source 1..20: mol_type = other DNA
cacacctgtaacaccagcat

SEQ ID NO: 13641 - DNA, 20 bp, synthetic construct
  source 1..20: mol_type = other DNA
tcacacctgtaacaccagca

SEQ ID NO: 13642 - DNA, 20 bp, synthetic construct
  source 1..20: mol_type = other DNA
ctcacacctgtaacaccagc

SEQ ID NO: 13643 - DNA, 20 bp, synthetic construct
  source 1..20: mol_type = other DNA
gctcacacctgtaacaccag

SEQ ID NO: 13644 - DNA, 20 bp, synthetic construct
  source 1..20: mol_type = other DNA
ggctcacacctgtaacacca

SEQ ID NO: 13645 - DNA, 20 bp, synthetic construct
  source 1..20: mol_type = other DNA
tggctcacacctgtaacacc

SEQ ID NO: 13646 - DNA, 20 bp, synthetic construct
  source 1..20: mol_type = other DNA
gtggctcacacctgtaacac

SEQ ID NO: 13647 - DNA, 20 bp, synthetic construct
  source 1..20: mol_type = other DNA
agtggctcacacctgtaaca

SEQ ID NO: 13648 - DNA, 20 bp, synthetic construct
  source 1..20: mol_type = other DNA
cagtggctcacacctgtaac

SEQ ID NO: 13649 - DNA, 20 bp, synthetic construct
  source 1..20: mol_type = other DNA
acagtggctcacacctgtaa

SEQ ID NO: 13650 - DNA, 20 bp, synthetic construct
  source 1..20: mol_type = other DNA
cacagtggctcacacctgta

SEQ ID NO: 13651 - DNA, 20 bp, synthetic construct
  source 1..20: mol_type = other DNA
acacagtggctcacacctgt

SEQ ID NO: 13652 - DNA, 20 bp, synthetic construct
  source 1..20: mol_type = other DNA
gacacagtggctcacacctg

SEQ ID NO: 13653 - DNA, 20 bp, synthetic construct
  source 1..20: mol_type = other DNA
ggacacagtggctcacacct

SEQ ID NO: 13654 - DNA, 20 bp, synthetic construct
  source 1..20: mol_type = other DNA
tggacacagtggctcacacc

SEQ ID NO: 13655 - DNA, 20 bp, synthetic construct
  source 1..20: mol_type = other DNA
ctggacacagtggctcacac

SEQ ID NO: 13656 - DNA, 20 bp, synthetic construct
  source 1..20: mol_type = other DNA
gctggacacagtggctcaca

SEQ ID NO: 13657 - DNA, 20 bp, synthetic construct
  source 1..20: mol_type = other DNA
ggctggacacagtggctcac

SEQ ID NO: 13658 - DNA, 20 bp, synthetic construct
  source 1..20: mol_type = other DNA
gggctggacacagtggctca

SEQ ID NO: 13659 - DNA, 20 bp, synthetic construct
  source 1..20: mol_type = other DNA
cgggctggacacagtggctc

SEQ ID NO: 13660 - DNA, 20 bp, synthetic construct
  source 1..20: mol_type = other DNA
tcgggctggacacagtggct

SEQ ID NO: 13661 - DNA, 20 bp, synthetic construct
  source 1..20: mol_type = other DNA
ttcgggctggacacagtggc

SEQ ID NO: 13662 - DNA, 20 bp, synthetic construct
  source 1..20: mol_type = other DNA
tttcgggctggacacagtgg

SEQ ID NO: 13663 - DNA, 20 bp, synthetic construct
  source 1..20: mol_type = other DNA
ttttcgggctggacacagtg

SEQ ID NO: 13664 - DNA, 20 bp, synthetic construct
  source 1..20: mol_type = other DNA
attttcgggctggacacagt

SEQ ID NO: 13665 - DNA, 20 bp, synthetic construct
  source 1..20: mol_type = other DNA
cattttcgggctggacacag

SEQ ID NO: 13666 - DNA, 20 bp, synthetic construct
  source 1..20: mol_type = other DNA
acattttcgggctggacaca

SEQ ID NO: 13667 - DNA, 20 bp, synthetic construct
  source 1..20: mol_type = other DNA
gacattttcgggctggacac

SEQ ID NO: 13668 - DNA, 20 bp, synthetic construct
  source 1..20: mol_type = other DNA
tgacattttcgggctggaca

SEQ ID NO: 13669 - DNA, 20 bp, synthetic construct
  source 1..20: mol_type = other DNA
ctgacattttcgggctggac

SEQ ID NO: 13670 - DNA, 20 bp, synthetic construct
  source 1..20: mol_type = other DNA
actgacattttcgggctgga

SEQ ID NO: 13671 - DNA, 20 bp, synthetic construct
  source 1..20: mol_type = other DNA
aactgacattttcgggctgg

SEQ ID NO: 13672 - DNA, 20 bp, synthetic construct
  source 1..20: mol_type = other DNA
aaactgacattttcgggctg

SEQ ID NO: 13673 - DNA, 20 bp, synthetic construct
  source 1..20: mol_type = other DNA
gaaactgacattttcgggct

SEQ ID NO: 13674 - DNA, 20 bp, synthetic construct
  source 1..20: mol_type = other DNA
cgaaactgacattttcgggc

SEQ ID NO: 13675 - DNA, 20 bp, synthetic construct
  source 1..20: mol_type = other DNA
acgaaactgacattttcggg

SEQ ID NO: 13676 - DNA, 20 bp, synthetic construct
  source 1..20: mol_type = other DNA
cacgaaactgacattttcgg

SEQ ID NO: 13677 - DNA, 20 bp, synthetic construct
  source 1..20: mol_type = other DNA
gcacgaaactgacattttcg

SEQ ID NO: 13678 - DNA, 20 bp, synthetic construct
  source 1..20: mol_type = other DNA
ggcacgaaactgacattttc

SEQ ID NO: 13679 - DNA, 20 bp, synthetic construct
  source 1..20: mol_type = other DNA
tggcacgaaactgacatttt

SEQ ID NO: 13680 - DNA, 20 bp, synthetic construct
  source 1..20: mol_type = other DNA
atggcacgaaactgacattt

SEQ ID NO: 13681 - DNA, 20 bp, synthetic construct
  source 1..20: mol_type = other DNA
catggcacgaaactgacatt

SEQ ID NO: 13682 - DNA, 20 bp, synthetic construct
  source 1..20: mol_type = other DNA
tcatggcacgaaactgacat

SEQ ID NO: 13683 - DNA, 20 bp, synthetic construct
  source 1..20: mol_type = other DNA
atcatggcacgaaactgaca

SEQ ID NO: 13684 - DNA, 20 bp, synthetic construct
  source 1..20: mol_type = other DNA
aatcatggcacgaaactgac

SEQ ID NO: 13685 - DNA, 20 bp, synthetic construct
  source 1..20: mol_type = other DNA
taatcatggcacgaaactga

SEQ ID NO: 13686 - DNA, 20 bp, synthetic construct
  source 1..20: mol_type = other DNA
ttaatcatggcacgaaactg

SEQ ID NO: 13687 - DNA, 20 bp, synthetic construct
  source 1..20: mol_type = other DNA
attaatcatggcacgaaact

SEQ ID NO: 13688 - DNA, 20 bp, synthetic construct
  source 1..20: mol_type = other DNA
tattaatcatggcacgaaac

SEQ ID NO: 13689 - DNA, 20 bp, synthetic construct
  source 1..20: mol_type = other DNA
ctattaatcatggcacgaaa

SEQ ID NO: 13690 - DNA, 20 bp, synthetic construct
  source 1..20: mol_type = other DNA
gctattaatcatggcacgaa

SEQ ID NO: 13691 - DNA, 20 bp, synthetic construct
  source 1..20: mol_type = other DNA
agctattaatcatggcacga

SEQ ID NO: 13692 - DNA, 20 bp, synthetic construct
  source 1..20: mol_type = other DNA
tagctattaatcatggcacg

SEQ ID NO: 13693 - DNA, 20 bp, synthetic construct
  source 1..20: mol_type = other DNA
ttagctattaatcatggcac

SEQ ID NO: 13694 - DNA, 20 bp, synthetic construct
  source 1..20: mol_type = other DNA
gttagctattaatcatggca

SEQ ID NO: 13695 - DNA, 20 bp, synthetic construct
  source 1..20: mol_type = other DNA
agttagctattaatcatggc

SEQ ID NO: 13696 - DNA, 20 bp, synthetic construct
  source 1..20: mol_type = other DNA
tagttagctattaatcatgg

SEQ ID NO: 13697 - DNA, 20 bp, synthetic construct
  source 1..20: mol_type = other DNA
gtagttagctattaatcatg

SEQ ID NO: 13698 - DNA, 20 bp, synthetic construct
  source 1..20: mol_type = other DNA
tgtagttagctattaatcat

SEQ ID NO: 13699 - DNA, 20 bp, synthetic construct
  source 1..20: mol_type = other DNA
atgtagttagctattaatca

SEQ ID NO: 13700 - DNA, 20 bp, synthetic construct
  source 1..20: mol_type = other DNA
aatgtagttagctattaatc

SEQ ID NO: 13701 - DNA, 20 bp, synthetic construct
  source 1..20: mol_type = other DNA
aaatgtagttagctattaat

SEQ ID NO: 13702 - DNA, 20 bp, synthetic construct
  source 1..20: mol_type = other DNA
aaaatgtagttagctattaa

SEQ ID NO: 13703 - DNA, 20 bp, synthetic construct
  source 1..20: mol_type = other DNA
caaaatgtagttagctatta

SEQ ID NO: 13704 - DNA, 20 bp, synthetic construct
  source 1..20: mol_type = other DNA
ccaaaatgtagttagctatt

SEQ ID NO: 13705 - DNA, 20 bp, synthetic construct
  source 1..20: mol_type = other DNA
cccaaaatgtagttagctat

SEQ ID NO: 13706 - DNA, 20 bp, synthetic construct
  source 1..20: mol_type = other DNA
tcccaaaatgtagttagcta

SEQ ID NO: 13707 - DNA, 20 bp, synthetic construct
  source 1..20: mol_type = other DNA
ttcccaaaatgtagttagct

SEQ ID NO: 13708 - DNA, 20 bp, synthetic construct
  source 1..20: mol_type = other DNA
attcccaaaatgtagttagc

SEQ ID NO: 13709 - DNA, 20 bp, synthetic construct
  source 1..20: mol_type = other DNA
cattcccaaaatgtagttag

SEQ ID NO: 13710 - DNA, 20 bp, synthetic construct
  source 1..20: mol_type = other DNA
acattcccaaaatgtagtta

SEQ ID NO: 13711 - DNA, 20 bp, synthetic construct
  source 1..20: mol_type = other DNA
tacattcccaaaatgtagtt

SEQ ID NO: 13712 - DNA, 20 bp, synthetic construct
  source 1..20: mol_type = other DNA
ttacattcccaaaatgtagt

SEQ ID NO: 13713 - DNA, 20 bp, synthetic construct
  source 1..20: mol_type = other DNA
attacattcccaaaatgtag

SEQ ID NO: 13714 - DNA, 20 bp, synthetic construct
  source 1..20: mol_type = other DNA
tattacattcccaaaatgta

SEQ ID NO: 13715 - DNA, 20 bp, synthetic construct
  source 1..20: mol_type = other DNA
ttattacattcccaaaatgt

SEQ ID NO: 13716 - DNA, 20 bp, synthetic construct
  source 1..20: mol_type = other DNA
tttattacattcccaaaatg

SEQ ID NO: 13717 - DNA, 20 bp, synthetic construct
  source 1..20: mol_type = other DNA
ttttattacattcccaaaat

SEQ ID NO: 13718 - DNA, 20 bp, synthetic construct
  source 1..20: mol_type = other DNA
attttattacattcccaaaa

SEQ ID NO: 13719 - DNA, 20 bp, synthetic construct
  source 1..20: mol_type = other DNA
aattttattacattcccaaa

SEQ ID NO: 13720 - DNA, 20 bp, synthetic construct
  source 1..20: mol_type = other DNA
aaattttattacattcccaa

SEQ ID NO: 13721 - DNA, 20 bp, synthetic construct
  source 1..20: mol_type = other DNA
gaaattttattacattccca

SEQ ID NO: 13722 - DNA, 20 bp, synthetic construct
  source 1..20: mol_type = other DNA
tgaaattttattacattccc

SEQ ID NO: 13723 - DNA, 20 bp, synthetic construct
  source 1..20: mol_type = other DNA
atgaaattttattacattcc

SEQ ID NO: 13724 - DNA, 20 bp, synthetic construct
  source 1..20: mol_type = other DNA
aatgaaattttattacattc

SEQ ID NO: 13725 - DNA, 20 bp, synthetic construct
  source 1..20: mol_type = other DNA
gaatgaaattttattacatt

SEQ ID NO: 13726 - DNA, 20 bp, synthetic construct
  source 1..20: mol_type = other DNA
agaatgaaattttattacat

SEQ ID NO: 13727 - DNA, 20 bp, synthetic construct
  source 1..20: mol_type = other DNA
tagaatgaaattttattaca

SEQ ID NO: 13728 - DNA, 20 bp, synthetic construct
  source 1..20: mol_type = other DNA
atagaatgaaattttattac

SEQ ID NO: 13729 - DNA, 20 bp, synthetic construct
  source 1..20: mol_type = other DNA
tatagaatgaaattttatta

SEQ ID NO: 13730 - DNA, 20 bp, synthetic construct
  source 1..20: mol_type = other DNA
ttatagaatgaaattttatt

SEQ ID NO: 13731 - DNA, 20 bp, synthetic construct
  source 1..20: mol_type = other DNA
attatagaatgaaattttat

SEQ ID NO: 13732 - DNA, 20 bp, synthetic construct
  source 1..20: mol_type = other DNA
cattatagaatgaaatttta

SEQ ID NO: 13733 - DNA, 20 bp, synthetic construct
  source 1..20: mol_type = other DNA
tcattatagaatgaaatttt

SEQ ID NO: 13734 - DNA, 20 bp, synthetic construct
  source 1..20: mol_type = other DNA
ttcattatagaatgaaattt

SEQ ID NO: 13735 - DNA, 20 bp, synthetic construct
  source 1..20: mol_type = other DNA
cttcattatagaatgaaatt

SEQ ID NO: 13736 - DNA, 20 bp, synthetic construct
  source 1..20: mol_type = other DNA
acttcattatagaatgaaat

SEQ ID NO: 13737 - DNA, 20 bp, synthetic construct
  source 1..20: mol_type = other DNA
gacttcattatagaatgaaa

SEQ ID NO: 13738 - DNA, 20 bp, synthetic construct
  source 1..20: mol_type = other DNA
agacttcattatagaatgaa

SEQ ID NO: 13739 - DNA, 20 bp, synthetic construct
  source 1..20: mol_type = other DNA
aagacttcattatagaatga

SEQ ID NO: 13740 - DNA, 20 bp, synthetic construct
  source 1..20: mol_type = other DNA
aaagacttcattatagaatg

SEQ ID NO: 13741 - DNA, 20 bp, synthetic construct
  source 1..20: mol_type = other DNA
caaagacttcattatagaat

SEQ ID NO: 13742 - DNA, 20 bp, synthetic construct
  source 1..20: mol_type = other DNA
acaaagacttcattatagaa

SEQ ID NO: 13743 - DNA, 20 bp, synthetic construct
  source 1..20: mol_type = other DNA
tacaaagacttcattataga

SEQ ID NO: 13744 - DNA, 20 bp, synthetic construct
  source 1..20: mol_type = other DNA
ttacaaagacttcattatag

SEQ ID NO: 13745 - DNA, 20 bp, synthetic construct
  source 1..20: mol_type = other DNA
tttacaaagacttcattata

SEQ ID NO: 13746 - DNA, 20 bp, synthetic construct
  source 1..20: mol_type = other DNA
ttttacaaagacttcattat

SEQ ID NO: 13747 - DNA, 20 bp, synthetic construct
  source 1..20: mol_type = other DNA
gttttacaaagacttcatta

SEQ ID NO: 13748 - DNA, 20 bp, synthetic construct
  source 1..20: mol_type = other DNA
agttttacaaagacttcatt

SEQ ID NO: 13749 - DNA, 20 bp, synthetic construct
  source 1..20: mol_type = other DNA
gagttttacaaagacttcat

SEQ ID NO: 13750 - DNA, 20 bp, synthetic construct
  source 1..20: mol_type = other DNA
tgagttttacaaagacttca

SEQ ID NO: 13751 - DNA, 20 bp, synthetic construct
  source 1..20: mol_type = other DNA
atgagttttacaaagacttc

SEQ ID NO: 13752 - DNA, 20 bp, synthetic construct
  source 1..20: mol_type = other DNA
aatgagttttacaaagactt

SEQ ID NO: 13753 - DNA, 20 bp, synthetic construct
  source 1..20: mol_type = other DNA
taatgagttttacaaagact

SEQ ID NO: 13754 - DNA, 20 bp, synthetic construct
  source 1..20: mol_type = other DNA
ctaatgagttttacaaagac

SEQ ID NO: 13755 - DNA, 20 bp, synthetic construct
  source 1..20: mol_type = other DNA
actaatgagttttacaaaga

SEQ ID NO: 13756 - DNA, 20 bp, synthetic construct
  source 1..20: mol_type = other DNA
aactaatgagttttacaaag

SEQ ID NO: 13757 - DNA, 20 bp, synthetic construct
  source 1..20: mol_type = other DNA
caactaatgagttttacaaa

SEQ ID NO: 13758 - DNA, 20 bp, synthetic construct
  source 1..20: mol_type = other DNA
acaactaatgagttttacaa

SEQ ID NO: 13759 - DNA, 20 bp, synthetic construct
  source 1..20: mol_type = other DNA
cacaactaatgagttttaca

SEQ ID NO: 13760 - DNA, 20 bp, synthetic construct
  source 1..20: mol_type = other DNA
ccacaactaatgagttttac

SEQ ID NO: 13761 - DNA, 20 bp, synthetic construct
  source 1..20: mol_type = other DNA
accacaactaatgagtttta

SEQ ID NO: 13762 - DNA, 20 bp, synthetic construct
  source 1..20: mol_type = other DNA
taccacaactaatgagtttt

SEQ ID NO: 13763 - DNA, 20 bp, synthetic construct
  source 1..20: mol_type = other DNA
ataccacaactaatgagttt

SEQ ID NO: 13764 - DNA, 20 bp, synthetic construct
  source 1..20: mol_type = other DNA
cataccacaactaatgagtt

SEQ ID NO: 13765 - DNA, 20 bp, synthetic construct
  source 1..20: mol_type = other DNA
tcataccacaactaatgagt

SEQ ID NO: 13766 - DNA, 20 bp, synthetic construct
  source 1..20: mol_type = other DNA
ctcataccacaactaatgag

SEQ ID NO: 13767 - DNA, 20 bp, synthetic construct
  source 1..20: mol_type = other DNA
cctcataccacaactaatga

SEQ ID NO: 13768 - DNA, 20 bp, synthetic construct
  source 1..20: mol_type = other DNA
gcctcataccacaactaatg

SEQ ID NO: 13769 - DNA, 20 bp, synthetic construct
  source 1..20: mol_type = other DNA
agcctcataccacaactaat

SEQ ID NO: 13770 - DNA, 20 bp, synthetic construct
  source 1..20: mol_type = other DNA
aagcctcataccacaactaa

SEQ ID NO: 13771 - DNA, 20 bp, synthetic construct
  source 1..20: mol_type = other DNA
caagcctcataccacaacta

SEQ ID NO: 13772 - DNA, 20 bp, synthetic construct
  source 1..20: mol_type = other DNA
acaagcctcataccacaact

SEQ ID NO: 13773 - DNA, 20 bp, synthetic construct
  source 1..20: mol_type = other DNA
gacaagcctcataccacaac

SEQ ID NO: 13774 - DNA, 20 bp, synthetic construct
  source 1..20: mol_type = other DNA
cgacaagcctcataccacaa

SEQ ID NO: 13775 - DNA, 20 bp, synthetic construct
  source 1..20: mol_type = other DNA
ccgacaagcctcataccaca

SEQ ID NO: 13776 - DNA, 20 bp, synthetic construct
  source 1..20: mol_type = other DNA
gccgacaagcctcataccac

SEQ ID NO: 13777 - DNA, 20 bp, synthetic construct
  source 1..20: mol_type = other DNA
tgccgacaagcctcatacca

SEQ ID NO: 13778 - DNA, 20 bp, synthetic construct
  source 1..20: mol_type = other DNA
ttgccgacaagcctcatacc

SEQ ID NO: 13779 - DNA, 20 bp, synthetic construct
  source 1..20: mol_type = other DNA
attgccgacaagcctcatac

SEQ ID NO: 13780 - DNA, 20 bp, synthetic construct
  source 1..20: mol_type = other DNA
tattgccgacaagcctcata

SEQ ID NO: 13781 - DNA, 20 bp, synthetic construct
  source 1..20: mol_type = other DNA
atattgccgacaagcctcat

SEQ ID NO: 13782 - DNA, 20 bp, synthetic construct
  source 1..20: mol_type = other DNA
tatattgccgacaagcctca

SEQ ID NO: 13783 - DNA, 20 bp, synthetic construct
  source 1..20: mol_type = other DNA
ttatattgccgacaagcctc

SEQ ID NO: 13784 - DNA, 20 bp, synthetic construct
  source 1..20: mol_type = other DNA
cttatattgccgacaagcct

SEQ ID NO: 13785 - DNA, 20 bp, synthetic construct
  source 1..20: mol_type = other DNA
acttatattgccgacaagcc

SEQ ID NO: 13786 - DNA, 20 bp, synthetic construct
  source 1..20: mol_type = other DNA
cacttatattgccgacaagc

SEQ ID NO: 13787 - DNA, 20 bp, synthetic construct
  source 1..20: mol_type = other DNA
tcacttatattgccgacaag

SEQ ID NO: 13788 - DNA, 20 bp, synthetic construct
  source 1..20: mol_type = other DNA
ttcacttatattgccgacaa

SEQ ID NO: 13789 - DNA, 20 bp, synthetic construct
  source 1..20: mol_type = other DNA
gttcacttatattgccgaca

SEQ ID NO: 13790 - DNA, 20 bp, synthetic construct
  source 1..20: mol_type = other DNA
cgttcacttatattgccgac

SEQ ID NO: 13791 - DNA, 20 bp, synthetic construct
  source 1..20: mol_type = other DNA
acgttcacttatattgccga

SEQ ID NO: 13792 - DNA, 20 bp, synthetic construct
  source 1..20: mol_type = other DNA
cacgttcacttatattgccg

SEQ ID NO: 13793 - DNA, 20 bp, synthetic construct
  source 1..20: mol_type = other DNA
ccacgttcacttatattgcc

SEQ ID NO: 13794 - DNA, 20 bp, synthetic construct
  source 1..20: mol_type = other DNA
accacgttcacttatattgc

SEQ ID NO: 13795 - DNA, 20 bp, synthetic construct
  source 1..20: mol_type = other DNA
aaccacgttcacttatattg

SEQ ID NO: 13796 - DNA, 20 bp, synthetic construct
  source 1..20: mol_type = other DNA
aaaccacgttcacttatatt

SEQ ID NO: 13797 - DNA, 20 bp, synthetic construct
  source 1..20: mol_type = other DNA
taaaccacgttcacttatat

SEQ ID NO: 13798 - DNA, 20 bp, synthetic construct
  source 1..20: mol_type = other DNA
ataaaccacgttcacttata

SEQ ID NO: 13799 - DNA, 20 bp, synthetic construct
  source 1..20: mol_type = other DNA
aataaaccacgttcacttat

SEQ ID NO: 13800 - DNA, 20 bp, synthetic construct
  source 1..20: mol_type = other DNA
aaataaaccacgttcactta

SEQ ID NO: 13801 - DNA, 20 bp, synthetic construct
  source 1..20: mol_type = other DNA
aaaataaaccacgttcactt

SEQ ID NO: 13802 - DNA, 20 bp, synthetic construct
  source 1..20: mol_type = other DNA
aaaaataaaccacgttcact

SEQ ID NO: 13803 - DNA, 20 bp, synthetic construct
  source 1..20: mol_type = other DNA
taaaaataaaccacgttcac

SEQ ID NO: 13804 - DNA, 20 bp, synthetic construct
  source 1..20: mol_type = other DNA
ataaaaataaaccacgttca

SEQ ID NO: 13805 - DNA, 20 bp, synthetic construct
  source 1..20: mol_type = other DNA
aataaaaataaaccacgttc

SEQ ID NO: 13806 - DNA, 20 bp, synthetic construct
  source 1..20: mol_type = other DNA
taataaaaataaaccacgtt

SEQ ID NO: 13807 - DNA, 20 bp, synthetic construct
  source 1..20: mol_type = other DNA
ttaataaaaataaaccacgt

SEQ ID NO: 13808 - DNA, 20 bp, synthetic construct
  source 1..20: mol_type = other DNA
gttaataaaaataaaccacg

SEQ ID NO: 13809 - DNA, 20 bp, synthetic construct
  source 1..20: mol_type = other DNA
agttaataaaaataaaccac

SEQ ID NO: 13810 - DNA, 20 bp, synthetic construct
  source 1..20: mol_type = other DNA
cagttaataaaaataaacca

SEQ ID NO: 13811 - DNA, 20 bp, synthetic construct
  source 1..20: mol_type = other DNA
acagttaataaaaataaacc

SEQ ID NO: 13812 - DNA, 20 bp, synthetic construct
  source 1..20: mol_type = other DNA
tacagttaataaaaataaac

SEQ ID NO: 13813 - DNA, 20 bp, synthetic construct
  source 1..20: mol_type = other DNA
atacagttaataaaaataaa

SEQ ID NO: 13814 - DNA, 20 bp, synthetic construct
  source 1..20: mol_type = other DNA
gatacagttaataaaaataa

SEQ ID NO: 13815 - DNA, 20 bp, synthetic construct
  source 1..20: mol_type = other DNA
tgatacagttaataaaaata

SEQ ID NO: 13816 - DNA, 20 bp, synthetic construct
  source 1..20: mol_type = other DNA
ctgatacagttaataaaaat

SEQ ID NO: 13817 - DNA, 20 bp, synthetic construct
  source 1..20: mol_type = other DNA
tctgatacagttaataaaaa

SEQ ID NO: 13818 - DNA, 20 bp, synthetic construct
  source 1..20: mol_type = other DNA
ttctgatacagttaataaaa

SEQ ID NO: 13819 - DNA, 20 bp, synthetic construct
  source 1..20: mol_type = other DNA
gttctgatacagttaataaa

SEQ ID NO: 13820 - DNA, 20 bp, synthetic construct
  source 1..20: mol_type = other DNA
agttctgatacagttaataa

SEQ ID NO: 13821 - DNA, 20 bp, synthetic construct
  source 1..20: mol_type = other DNA
aagttctgatacagttaata

SEQ ID NO: 13822 - DNA, 20 bp, synthetic construct
  source 1..20: mol_type = other DNA
aaagttctgatacagttaat

SEQ ID NO: 13823 - DNA, 20 bp, synthetic construct
  source 1..20: mol_type = other DNA
taaagttctgatacagttaa

SEQ ID NO: 13824 - DNA, 20 bp, synthetic construct
  source 1..20: mol_type = other DNA
ctaaagttctgatacagtta

SEQ ID NO: 13825 - DNA, 20 bp, synthetic construct
  source 1..20: mol_type = other DNA
tctaaagttctgatacagtt

SEQ ID NO: 13826 - DNA, 20 bp, synthetic construct
  source 1..20: mol_type = other DNA
ttctaaagttctgatacagt

SEQ ID NO: 13827 - DNA, 20 bp, synthetic construct
  source 1..20: mol_type = other DNA
attctaaagttctgatacag

SEQ ID NO: 13828 - DNA, 20 bp, synthetic construct
  source 1..20: mol_type = other DNA
cattctaaagttctgataca

SEQ ID NO: 13829 - DNA, 20 bp, synthetic construct
  source 1..20: mol_type = other DNA
acattctaaagttctgatac

SEQ ID NO: 13830 - DNA, 20 bp, synthetic construct
  source 1..20: mol_type = other DNA
aacattctaaagttctgata

SEQ ID NO: 13831 - DNA, 20 bp, synthetic construct
  source 1..20: mol_type = other DNA
caacattctaaagttctgat

SEQ ID NO: 13832 - DNA, 20 bp, synthetic construct
  source 1..20: mol_type = other DNA
ccaacattctaaagttctga

SEQ ID NO: 13833 - DNA, 20 bp, synthetic construct
  source 1..20: mol_type = other DNA
accaacattctaaagttctg

SEQ ID NO: 13834 - DNA, 20 bp, synthetic construct
  source 1..20: mol_type = other DNA
gaccaacattctaaagttct

SEQ ID NO: 13835 - DNA, 20 bp, synthetic construct
  source 1..20: mol_type = other DNA
agaccaacattctaaagttc

SEQ ID NO: 13836 - DNA, 20 bp, synthetic construct
  source 1..20: mol_type = other DNA
gagaccaacattctaaagtt

SEQ ID NO: 13837 - DNA, 20 bp, synthetic construct
  source 1..20: mol_type = other DNA
ggagaccaacattctaaagt

SEQ ID NO: 13838 - DNA, 20 bp, synthetic construct
  source 1..20: mol_type = other DNA
aggagaccaacattctaaag

SEQ ID NO: 13839 - DNA, 20 bp, synthetic construct
  source 1..20: mol_type = other DNA
caggagaccaacattctaaa

SEQ ID NO: 13840 - DNA, 20 bp, synthetic construct
  source 1..20: mol_type = other DNA
tcaggagaccaacattctaa

SEQ ID NO: 13841 - DNA, 20 bp, synthetic construct
  source 1..20: mol_type = other DNA
ttcaggagaccaacattcta

SEQ ID NO: 13842 - DNA, 20 bp, synthetic construct
  source 1..20: mol_type = other DNA
tttcaggagaccaacattct

SEQ ID NO: 13843 - DNA, 20 bp, synthetic construct
  source 1..20: mol_type = other DNA
gtttcaggagaccaacattc

SEQ ID NO: 13844 - DNA, 20 bp, synthetic construct
  source 1..20: mol_type = other DNA
ggtttcaggagaccaacatt

SEQ ID NO: 13845 - DNA, 20 bp, synthetic construct
  source 1..20: mol_type = other DNA
tggtttcaggagaccaacat

SEQ ID NO: 13846 - DNA, 20 bp, synthetic construct
  source 1..20: mol_type = other DNA
atggtttcaggagaccaaca

SEQ ID NO: 13847 - DNA, 20 bp, synthetic construct
  source 1..20: mol_type = other DNA
aatggtttcaggagaccaac

SEQ ID NO: 13848 - DNA, 20 bp, synthetic construct
  source 1..20: mol_type = other DNA
caatggtttcaggagaccaa

SEQ ID NO: 13849 - DNA, 20 bp, synthetic construct
  source 1..20: mol_type = other DNA
gcaatggtttcaggagacca

SEQ ID NO: 13850 - DNA, 20 bp, synthetic construct
  source 1..20: mol_type = other DNA
ggcaatggtttcaggagacc

SEQ ID NO: 13851 - DNA, 20 bp, synthetic construct
  source 1..20: mol_type = other DNA
aggcaatggtttcaggagac

SEQ ID NO: 13852 - DNA, 20 bp, synthetic construct
  source 1..20: mol_type = other DNA
aaggcaatggtttcaggaga

SEQ ID NO: 13853 - DNA, 20 bp, synthetic construct
  source 1..20: mol_type = other DNA
caaggcaatggtttcaggag

SEQ ID NO: 13854 - DNA, 20 bp, synthetic construct
  source 1..20: mol_type = other DNA
tcaaggcaatggtttcagga

SEQ ID NO: 13855 - DNA, 20 bp, synthetic construct
  source 1..20: mol_type = other DNA
ctcaaggcaatggtttcagg

SEQ ID NO: 13856 - DNA, 20 bp, synthetic construct
  source 1..20: mol_type = other DNA
tctcaaggcaatggtttcag

SEQ ID NO: 13857 - DNA, 20 bp, synthetic construct
  source 1..20: mol_type = other DNA
ctctcaaggcaatggtttca

SEQ ID NO: 13858 - DNA, 20 bp, synthetic construct
  source 1..20: mol_type = other DNA
cctctcaaggcaatggtttc

SEQ ID NO: 13859 - DNA, 20 bp, synthetic construct
  source 1..20: mol_type = other DNA
gcctctcaaggcaatggttt

SEQ ID NO: 13860 - DNA, 20 bp, synthetic construct
  source 1..20: mol_type = other DNA
agcctctcaaggcaatggtt

SEQ ID NO: 13861 - DNA, 20 bp, synthetic construct
  source 1..20: mol_type = other DNA
aagcctctcaaggcaatggt

SEQ ID NO: 13862 - DNA, 20 bp, synthetic construct
  source 1..20: mol_type = other DNA
aaagcctctcaaggcaatgg

SEQ ID NO: 13863 - DNA, 20 bp, synthetic construct
  source 1..20: mol_type = other DNA
taaagcctctcaaggcaatg

SEQ ID NO: 13864 - DNA, 20 bp, synthetic construct
  source 1..20: mol_type = other DNA
ataaagcctctcaaggcaat

SEQ ID NO: 13865 - DNA, 20 bp, synthetic construct
  source 1..20: mol_type = other DNA
aataaagcctctcaaggcaa

SEQ ID NO: 13866 - DNA, 20 bp, synthetic construct
  source 1..20: mol_type = other DNA
caataaagcctctcaaggca

SEQ ID NO: 13867 - DNA, 20 bp, synthetic construct
  source 1..20: mol_type = other DNA
tcaataaagcctctcaaggc

SEQ ID NO: 13868 - DNA, 20 bp, synthetic construct
  source 1..20: mol_type = other DNA
ttcaataaagcctctcaagg

SEQ ID NO: 13869 - DNA, 20 bp, synthetic construct
  source 1..20: mol_type = other DNA
gttcaataaagcctctcaag

SEQ ID NO: 13870 - DNA, 20 bp, synthetic construct
  source 1..20: mol_type = other DNA
tgttcaataaagcctctcaa

SEQ ID NO: 13871 - DNA, 20 bp, synthetic construct
  source 1..20: mol_type = other DNA
ctgttcaataaagcctctca

SEQ ID NO: 13872 - DNA, 20 bp, synthetic construct
  source 1..20: mol_type = other DNA
actgttcaataaagcctctc

SEQ ID NO: 13873 - DNA, 20 bp, synthetic construct
  source 1..20: mol_type = other DNA
cactgttcaataaagcctct

SEQ ID NO: 13874 - DNA, 20 bp, synthetic construct
  source 1..20: mol_type = other DNA
acactgttcaataaagcctc

SEQ ID NO: 13875 - DNA, 20 bp, synthetic construct
  source 1..20: mol_type = other DNA
aacactgttcaataaagcct

SEQ ID NO: 13876 - DNA, 20 bp, synthetic construct
  source 1..20: mol_type = other DNA
caacactgttcaataaagcc

SEQ ID NO: 13877 - DNA, 20 bp, synthetic construct
  source 1..20: mol_type = other DNA
gcaacactgttcaataaagc

SEQ ID NO: 13878 - DNA, 20 bp, synthetic construct
  source 1..20: mol_type = other DNA
ggcaacactgttcaataaag

SEQ ID NO: 13879 - DNA, 20 bp, synthetic construct
  source 1..20: mol_type = other DNA
tggcaacactgttcaataaa

SEQ ID NO: 13880 - DNA, 20 bp, synthetic construct
  source 1..20: mol_type = other DNA
ttggcaacactgttcaataa

SEQ ID NO: 13881 - DNA, 20 bp, synthetic construct
  source 1..20: mol_type = other DNA
attggcaacactgttcaata

SEQ ID NO: 13882 - DNA, 20 bp, synthetic construct
  source 1..20: mol_type = other DNA
cattggcaacactgttcaat

SEQ ID NO: 13883 - DNA, 20 bp, synthetic construct
  source 1..20: mol_type = other DNA
tcattggcaacactgttcaa

SEQ ID NO: 13884 - DNA, 20 bp, synthetic construct
  source 1..20: mol_type = other DNA
atcattggcaacactgttca

SEQ ID NO: 13885 - DNA, 20 bp, synthetic construct
  source 1..20: mol_type = other DNA
gatcattggcaacactgttc

SEQ ID NO: 13886 - DNA, 20 bp, synthetic construct
  source 1..20: mol_type = other DNA
tgatcattggcaacactgtt

SEQ ID NO: 13887 - DNA, 20 bp, synthetic construct
  source 1..20: mol_type = other DNA
ctgatcattggcaacactgt

SEQ ID NO: 13888 - DNA, 20 bp, synthetic construct
  source 1..20: mol_type = other DNA
actgatcattggcaacactg

SEQ ID NO: 13889 - DNA, 20 bp, synthetic construct
  source 1..20: mol_type = other DNA
aactgatcattggcaacact

SEQ ID NO: 13890 - DNA, 20 bp, synthetic construct
  source 1..20: mol_type = other DNA
aaactgatcattggcaacac

SEQ ID NO: 13891 - DNA, 20 bp, synthetic construct
  source 1..20: mol_type = other DNA
aaaactgatcattggcaaca

SEQ ID NO: 13892 - DNA, 20 bp, synthetic construct
  source 1..20: mol_type = other DNA
aaaaactgatcattggcaac

SEQ ID NO: 13893 - DNA, 20 bp, synthetic construct
  source 1..20: mol_type = other DNA
aaaaaactgatcattggcaa

SEQ ID NO: 13894 - DNA, 20 bp, synthetic construct
  source 1..20: mol_type = other DNA
aaaaaaactgatcattggca

SEQ ID NO: 13895 - DNA, 20 bp, synthetic construct
  source 1..20: mol_type = other DNA
aaaaaaaactgatcattggc

SEQ ID NO: 13896 - DNA, 20 bp, synthetic construct
  source 1..20: mol_type = other DNA
aaaaaaaaactgatcattgg

SEQ ID NO: 13897 - DNA, 20 bp, synthetic construct
  source 1..20: mol_type = other DNA
taaaaaaaaactgatcattg

SEQ ID NO: 13898 - DNA, 20 bp, synthetic construct
  source 1..20: mol_type = other DNA
ttaaaaaaaaactgatcatt

SEQ ID NO: 13899 - DNA, 20 bp, synthetic construct
  source 1..20: mol_type = other DNA
tttaaaaaaaaactgatcat

SEQ ID NO: 13900 - DNA, 20 bp, synthetic construct
  source 1..20: mol_type = other DNA
atttaaaaaaaaactgatca

SEQ ID NO: 13901 - DNA, 20 bp, synthetic construct
  source 1..20: mol_type = other DNA
aatttaaaaaaaaactgatc

SEQ ID NO: 13902 - DNA, 20 bp, synthetic construct
  source 1..20: mol_type = other DNA
aaatttaaaaaaaaactgat

SEQ ID NO: 13903 - DNA, 20 bp, synthetic construct
  source 1..20: mol_type = other DNA
gaaatttaaaaaaaaactga

SEQ ID NO: 13904 - DNA, 20 bp, synthetic construct
  source 1..20: mol_type = other DNA
ggaaatttaaaaaaaaactg

SEQ ID NO: 13905 - DNA, 20 bp, synthetic construct
  source 1..20: mol_type = other DNA
aggaaatttaaaaaaaaact

SEQ ID NO: 13906 - DNA, 20 bp, synthetic construct
  source 1..20: mol_type = other DNA
aaggaaatttaaaaaaaaac

SEQ ID NO: 13907 - DNA, 20 bp, synthetic construct
  source 1..20: mol_type = other DNA
aaaggaaatttaaaaaaaaa

SEQ ID NO: 13908 - DNA, 20 bp, synthetic construct
  source 1..20: mol_type = other DNA
aaaaggaaatttaaaaaaaa

SEQ ID NO: 13909 - DNA, 20 bp, synthetic construct
  source 1..20: mol_type = other DNA
aaaaaggaaatttaaaaaaa

SEQ ID NO: 13910 - DNA, 20 bp, synthetic construct
  source 1..20: mol_type = other DNA
aaaaaaggaaatttaaaaaa

SEQ ID NO: 13911 - DNA, 20 bp, synthetic construct
  source 1..20: mol_type = other DNA
aaaaaaaggaaatttaaaaa

SEQ ID NO: 13912 - DNA, 20 bp, synthetic construct
  source 1..20: mol_type = other DNA
aaaaaaaaggaaatttaaaa

SEQ ID NO: 13913 - DNA, 20 bp, synthetic construct
  source 1..20: mol_type = other DNA
caaaaaaaaggaaatttaaa

SEQ ID NO: 13914 - DNA, 20 bp, synthetic construct
  source 1..20: mol_type = other DNA
tcaaaaaaaaggaaatttaa

SEQ ID NO: 13915 - DNA, 20 bp, synthetic construct
  source 1..20: mol_type = other DNA
ctcaaaaaaaaggaaattta

SEQ ID NO: 13916 - DNA, 20 bp, synthetic construct
  source 1..20: mol_type = other DNA
tctcaaaaaaaaggaaattt

SEQ ID NO: 13917 - DNA, 20 bp, synthetic construct
  source 1..20: mol_type = other DNA
gtctcaaaaaaaaggaaatt

SEQ ID NO: 13918 - DNA, 20 bp, synthetic construct
  source 1..20: mol_type = other DNA
agtctcaaaaaaaaggaaat

SEQ ID NO: 13919 - DNA, 20 bp, synthetic construct
  source 1..20: mol_type = other DNA
cagtctcaaaaaaaaggaaa

SEQ ID NO: 13920 - DNA, 20 bp, synthetic construct
  source 1..20: mol_type = other DNA
tcagtctcaaaaaaaaggaa

SEQ ID NO: 13921 - DNA, 20 bp, synthetic construct
  source 1..20: mol_type = other DNA
ctcagtctcaaaaaaaagga

SEQ ID NO: 13922 - DNA, 20 bp, synthetic construct
  source 1..20: mol_type = other DNA
actcagtctcaaaaaaaagg

SEQ ID NO: 13923 - DNA, 20 bp, synthetic construct
  source 1..20: mol_type = other DNA
gactcagtctcaaaaaaaag

SEQ ID NO: 13924 - DNA, 20 bp, synthetic construct
  source 1..20: mol_type = other DNA
agactcagtctcaaaaaaaa

SEQ ID NO: 13925 - DNA, 20 bp, synthetic construct
  source 1..20: mol_type = other DNA
aagactcagtctcaaaaaaa

SEQ ID NO: 13926 - DNA, 20 bp, synthetic construct
  source 1..20: mol_type = other DNA
taagactcagtctcaaaaaa

SEQ ID NO: 13927 - DNA, 20 bp, synthetic construct
  source 1..20: mol_type = other DNA
gtaagactcagtctcaaaaa

SEQ ID NO: 13928 - DNA, 20 bp, synthetic construct
  source 1..20: mol_type = other DNA
ggtaagactcagtctcaaaa

SEQ ID NO: 13929 - DNA, 20 bp, synthetic construct
  source 1..20: mol_type = other DNA
gggtaagactcagtctcaaa

SEQ ID NO: 13930 - DNA, 20 bp, synthetic construct
  source 1..20: mol_type = other DNA
agggtaagactcagtctcaa

SEQ ID NO: 13931 - DNA, 20 bp, synthetic construct
  source 1..20: mol_type = other DNA
cagggtaagactcagtctca

SEQ ID NO: 13932 - DNA, 20 bp, synthetic construct
  source 1..20: mol_type = other DNA
acagggtaagactcagtctc

SEQ ID NO: 13933 - DNA, 20 bp, synthetic construct
  source 1..20: mol_type = other DNA
aacagggtaagactcagtct

SEQ ID NO: 13934 - DNA, 20 bp, synthetic construct
  source 1..20: mol_type = other DNA
caacagggtaagactcagtc

SEQ ID NO: 13935 - DNA, 20 bp, synthetic construct
  source 1..20: mol_type = other DNA
ccaacagggtaagactcagt

SEQ ID NO: 13936 - DNA, 20 bp, synthetic construct
  source 1..20: mol_type = other DNA
gccaacagggtaagactcag

SEQ ID NO: 13937 - DNA, 20 bp, synthetic construct
  source 1..20: mol_type = other DNA
ggccaacagggtaagactca

SEQ ID NO: 13938 - DNA, 20 bp, synthetic construct
  source 1..20: mol_type = other DNA
tggccaacagggtaagactc

SEQ ID NO: 13939 - DNA, 20 bp, synthetic construct
  source 1..20: mol_type = other DNA
ctggccaacagggtaagact

SEQ ID NO: 13940 - DNA, 20 bp, synthetic construct
  source 1..20: mol_type = other DNA
cctggccaacagggtaagac

SEQ ID NO: 13941 - DNA, 20 bp, synthetic construct
  source 1..20: mol_type = other DNA
acctggccaacagggtaaga

SEQ ID NO: 13942 - DNA, 20 bp, synthetic construct
  source 1..20: mol_type = other DNA
aacctggccaacagggtaag

SEQ ID NO: 13943 - DNA, 20 bp, synthetic construct
  source 1..20: mol_type = other DNA
caacctggccaacagggtaa

SEQ ID NO: 13944 - DNA, 20 bp, synthetic construct
  source 1..20: mol_type = other DNA
ccaacctggccaacagggta

SEQ ID NO: 13945 - DNA, 20 bp, synthetic construct
  source 1..20: mol_type = other DNA
tccaacctggccaacagggt

SEQ ID NO: 13946 - DNA, 20 bp, synthetic construct
  source 1..20: mol_type = other DNA
ctccaacctggccaacaggg

SEQ ID NO: 13947 - DNA, 20 bp, synthetic construct
  source 1..20: mol_type = other DNA
actccaacctggccaacagg

SEQ ID NO: 13948 - DNA, 20 bp, synthetic construct
  source 1..20: mol_type = other DNA
tactccaacctggccaacag

SEQ ID NO: 13949 - DNA, 20 bp, synthetic construct
  source 1..20: mol_type = other DNA
atactccaacctggccaaca

SEQ ID NO: 13950 - DNA, 20 bp, synthetic construct
  source 1..20: mol_type = other DNA
tatactccaacctggccaac

SEQ ID NO: 13951 - DNA, 20 bp, synthetic construct
  source 1..20: mol_type = other DNA
ctatactccaacctggccaa

SEQ ID NO: 13952 - DNA, 20 bp, synthetic construct
  source 1..20: mol_type = other DNA
actatactccaacctggcca

SEQ ID NO: 13953 - DNA, 20 bp, synthetic construct
  source 1..20: mol_type = other DNA
cactatactccaacctggcc

SEQ ID NO: 13954 - DNA, 20 bp, synthetic construct
  source 1..20: mol_type = other DNA
ccactatactccaacctggc

SEQ ID NO: 13955 - DNA, 20 bp, synthetic construct
  source 1..20: mol_type = other DNA
accactatactccaacctgg

SEQ ID NO: 13956 - DNA, 20 bp, synthetic construct
  source 1..20: mol_type = other DNA
taccactatactccaacctg

SEQ ID NO: 13957 - DNA, 20 bp, synthetic construct
  source 1..20: mol_type = other DNA
ataccactatactccaacct

SEQ ID NO: 13958 - DNA, 20 bp, synthetic construct
  source 1..20: mol_type = other DNA
cataccactatactccaacc

SEQ ID NO: 13959 - DNA, 20 bp, synthetic construct
  source 1..20: mol_type = other DNA
ccataccactatactccaac

SEQ ID NO: 13960 - DNA, 20 bp, synthetic construct
  source 1..20: mol_type = other DNA
accataccactatactccaa

SEQ ID NO: 13961 - DNA, 20 bp, synthetic construct
  source 1..20: mol_type = other DNA
gaccataccactatactcca

SEQ ID NO: 13962 - DNA, 20 bp, synthetic construct
  source 1..20: mol_type = other DNA
tgaccataccactatactcc

SEQ ID NO: 13963 - DNA, 20 bp, synthetic construct
  source 1..20: mol_type = other DNA
atgaccataccactatactc

SEQ ID NO: 13964 - DNA, 20 bp, synthetic construct
  source 1..20: mol_type = other DNA
catgaccataccactatact

SEQ ID NO: 13965 - DNA, 20 bp, synthetic construct
  source 1..20: mol_type = other DNA
ccatgaccataccactatac

SEQ ID NO: 13966 - DNA, 20 bp, synthetic construct
  source 1..20: mol_type = other DNA
gccatgaccataccactata

SEQ ID NO: 13967 - DNA, 20 bp, synthetic construct
  source 1..20: mol_type = other DNA
agccatgaccataccactat

SEQ ID NO: 13968 - DNA, 20 bp, synthetic construct
  source 1..20: mol_type = other DNA
gagccatgaccataccacta

SEQ ID NO: 13969 - DNA, 20 bp, synthetic construct
  source 1..20: mol_type = other DNA
tgagccatgaccataccact

SEQ ID NO: 13970 - DNA, 20 bp, synthetic construct
  source 1..20: mol_type = other DNA
gtgagccatgaccataccac

SEQ ID NO: 13971 - DNA, 20 bp, synthetic construct
  source 1..20: mol_type = other DNA
agtgagccatgaccatacca

SEQ ID NO: 13972 - DNA, 20 bp, synthetic construct
  source 1..20: mol_type = other DNA
cagtgagccatgaccatacc

SEQ ID NO: 13973 - DNA, 20 bp, synthetic construct
  source 1..20: mol_type = other DNA
gcagtgagccatgaccatac

SEQ ID NO: 13974 - DNA, 20 bp, synthetic construct
  source 1..20: mol_type = other DNA
tgcagtgagccatgaccata

SEQ ID NO: 13975 - DNA, 20 bp, synthetic construct
  source 1..20: mol_type = other DNA
ctgcagtgagccatgaccat

SEQ ID NO: 13976 - DNA, 20 bp, synthetic construct
  source 1..20: mol_type = other DNA
gctgcagtgagccatgacca

SEQ ID NO: 13977 - DNA, 20 bp, synthetic construct
  source 1..20: mol_type = other DNA
ggctgcagtgagccatgacc

SEQ ID NO: 13978 - DNA, 20 bp, synthetic construct
  source 1..20: mol_type = other DNA
aggctgcagtgagccatgac

SEQ ID NO: 13979 - DNA, 20 bp, synthetic construct
  source 1..20: mol_type = other DNA
gaggctgcagtgagccatga

SEQ ID NO: 13980 - DNA, 20 bp, synthetic construct
  source 1..20: mol_type = other DNA
tgaggctgcagtgagccatg

SEQ ID NO: 13981 - DNA, 20 bp, synthetic construct
  source 1..20: mol_type = other DNA
ttgaggctgcagtgagccat

SEQ ID NO: 13982 - DNA, 20 bp, synthetic construct
  source 1..20: mol_type = other DNA
gttgaggctgcagtgagcca

SEQ ID NO: 13983 - DNA, 20 bp, synthetic construct
  source 1..20: mol_type = other DNA
tgttgaggctgcagtgagcc

SEQ ID NO: 13984 - DNA, 20 bp, synthetic construct
  source 1..20: mol_type = other DNA
atgttgaggctgcagtgagc

SEQ ID NO: 13985 - DNA, 20 bp, synthetic construct
  source 1..20: mol_type = other DNA
gatgttgaggctgcagtgag

SEQ ID NO: 13986 - DNA, 20 bp, synthetic construct
  source 1..20: mol_type = other DNA
ggatgttgaggctgcagtga

SEQ ID NO: 13987 - DNA, 20 bp, synthetic construct
  source 1..20: mol_type = other DNA
aggatgttgaggctgcagtg

SEQ ID NO: 13988 - DNA, 20 bp, synthetic construct
  source 1..20: mol_type = other DNA
caggatgttgaggctgcagt

SEQ ID NO: 13989 - DNA, 20 bp, synthetic construct
  source 1..20: mol_type = other DNA
ccaggatgttgaggctgcag

SEQ ID NO: 13990 - DNA, 20 bp, synthetic construct
  source 1..20: mol_type = other DNA
cccaggatgttgaggctgca

SEQ ID NO: 13991 - DNA, 20 bp, synthetic construct
  source 1..20: mol_type = other DNA
gcccaggatgttgaggctgc

SEQ ID NO: 13992 - DNA, 20 bp, synthetic construct
  source 1..20: mol_type = other DNA
agcccaggatgttgaggctg

SEQ ID NO: 13993 - DNA, 20 bp, synthetic construct
  source 1..20: mol_type = other DNA
gagcccaggatgttgaggct

SEQ ID NO: 13994 - DNA, 20 bp, synthetic construct
  source 1..20: mol_type = other DNA
tgagcccaggatgttgaggc

SEQ ID NO: 13995 - DNA, 20 bp, synthetic construct
  source 1..20: mol_type = other DNA
ttgagcccaggatgttgagg

SEQ ID NO: 13996 - DNA, 20 bp, synthetic construct
  source 1..20: mol_type = other DNA
cttgagcccaggatgttgag

SEQ ID NO: 13997 - DNA, 20 bp, synthetic construct
  source 1..20: mol_type = other DNA
gcttgagcccaggatgttga

SEQ ID NO: 13998 - DNA, 20 bp, synthetic construct
  source 1..20: mol_type = other DNA
tgcttgagcccaggatgttg

SEQ ID NO: 13999 - DNA, 20 bp, synthetic construct
  source 1..20: mol_type = other DNA
ctgcttgagcccaggatgtt

SEQ ID NO: 14000 - DNA, 20 bp, synthetic construct
  source 1..20: mol_type = other DNA
actgcttgagcccaggatgt

SEQ ID NO: 14001 - DNA, 20 bp, synthetic construct
  source 1..20: mol_type = other DNA
gactgcttgagcccaggatg

SEQ ID NO: 14002 - DNA, 20 bp, synthetic construct
  source 1..20: mol_type = other DNA
ggactgcttgagcccaggat

SEQ ID NO: 14003 - DNA, 20 bp, synthetic construct
  source 1..20: mol_type = other DNA
aggactgcttgagcccagga

SEQ ID NO: 14004 - DNA, 20 bp, synthetic construct
  source 1..20: mol_type = other DNA
gaggactgcttgagcccagg

SEQ ID NO: 14005 - DNA, 20 bp, synthetic construct
  source 1..20: mol_type = other DNA
ggaggactgcttgagcccag

SEQ ID NO: 14006 - DNA, 20 bp, synthetic construct
  source 1..20: mol_type = other DNA
aggaggactgcttgagccca

SEQ ID NO: 14007 - DNA, 20 bp, synthetic construct
  source 1..20: mol_type = other DNA
taggaggactgcttgagccc

SEQ ID NO: 14008 - DNA, 20 bp, synthetic construct
  source 1..20: mol_type = other DNA
gtaggaggactgcttgagcc

SEQ ID NO: 14009 - DNA, 20 bp, synthetic construct
  source 1..20: mol_type = other DNA
ggtaggaggactgcttgagc

SEQ ID NO: 14010 - DNA, 20 bp, synthetic construct
  source 1..20: mol_type = other DNA
aggtaggaggactgcttgag

SEQ ID NO: 14011 - DNA, 20 bp, synthetic construct
  source 1..20: mol_type = other DNA
gaggtaggaggactgcttga

SEQ ID NO: 14012 - DNA, 20 bp, synthetic construct
  source 1..20: mol_type = other DNA
tgaggtaggaggactgcttg

SEQ ID NO: 14013 - DNA, 20 bp, synthetic construct
  source 1..20: mol_type = other DNA
ctgaggtaggaggactgctt

SEQ ID NO: 14014 - DNA, 20 bp, synthetic construct
  source 1..20: mol_type = other DNA
actgaggtaggaggactgct

SEQ ID NO: 14015 - DNA, 20 bp, synthetic construct
  source 1..20: mol_type = other DNA
gactgaggtaggaggactgc

SEQ ID NO: 14016 - DNA, 20 bp, synthetic construct
  source 1..20: mol_type = other DNA
agactgaggtaggaggactg

SEQ ID NO: 14017 - DNA, 20 bp, synthetic construct
  source 1..20: mol_type = other DNA
gagactgaggtaggaggact

SEQ ID NO: 14018 - DNA, 20 bp, synthetic construct
  source 1..20: mol_type = other DNA
ggagactgaggtaggaggac

SEQ ID NO: 14019 - DNA, 20 bp, synthetic construct
  source 1..20: mol_type = other DNA
gggagactgaggtaggagga

SEQ ID NO: 14020 - DNA, 20 bp, synthetic construct
  source 1..20: mol_type = other DNA
cgggagactgaggtaggagg

SEQ ID NO: 14021 - DNA, 20 bp, synthetic construct
  source 1..20: mol_type = other DNA
tcgggagactgaggtaggag

SEQ ID NO: 14022 - DNA, 20 bp, synthetic construct
  source 1..20: mol_type = other DNA
ctcgggagactgaggtagga

SEQ ID NO: 14023 - DNA, 20 bp, synthetic construct
  source 1..20: mol_type = other DNA
actcgggagactgaggtagg

SEQ ID NO: 14024 - DNA, 20 bp, synthetic construct
  source 1..20: mol_type = other DNA
tactcgggagactgaggtag

SEQ ID NO: 14025 - DNA, 20 bp, synthetic construct
  source 1..20: mol_type = other DNA
ctactcgggagactgaggta

SEQ ID NO: 14026 - DNA, 20 bp, synthetic construct
  source 1..20: mol_type = other DNA
gctactcgggagactgaggt

SEQ ID NO: 14027 - DNA, 20 bp, synthetic construct
  source 1..20: mol_type = other DNA
agctactcgggagactgagg

SEQ ID NO: 14028 - DNA, 20 bp, synthetic construct
  source 1..20: mol_type = other DNA
cagctactcgggagactgag

SEQ ID NO: 14029 - DNA, 20 bp, synthetic construct
  source 1..20: mol_type = other DNA
ccagctactcgggagactga

SEQ ID NO: 14030 - DNA, 20 bp, synthetic construct
  source 1..20: mol_type = other DNA
tccagctactcgggagactg

SEQ ID NO: 14031 - DNA, 20 bp, synthetic construct
  source 1..20: mol_type = other DNA
ttccagctactcgggagact

SEQ ID NO: 14032 - DNA, 20 bp, synthetic construct
  source 1..20: mol_type = other DNA
gttccagctactcgggagac

SEQ ID NO: 14033 - DNA, 20 bp, synthetic construct
  source 1..20: mol_type = other DNA
agttccagctactcgggaga

SEQ ID NO: 14034 - DNA, 20 bp, synthetic construct
  source 1..20: mol_type = other DNA
tagttccagctactcgggag

SEQ ID NO: 14035 - DNA, 20 bp, synthetic construct
  source 1..20: mol_type = other DNA
gtagttccagctactcggga

SEQ ID NO: 14036 - DNA, 20 bp, synthetic construct
  source 1..20: mol_type = other DNA
tgtagttccagctactcggg

SEQ ID NO: 14037 - DNA, 20 bp, synthetic construct
  source 1..20: mol_type = other DNA
ctgtagttccagctactcgg

SEQ ID NO: 14038 - DNA, 20 bp, synthetic construct
  source 1..20: mol_type = other DNA
cctgtagttccagctactcg

SEQ ID NO: 14039 - DNA, 20 bp, synthetic construct
  source 1..20: mol_type = other DNA
acctgtagttccagctactc

SEQ ID NO: 14040 - DNA, 20 bp, synthetic construct
  source 1..20: mol_type = other DNA
cacctgtagttccagctact

SEQ ID NO: 14041 - DNA, 20 bp, synthetic construct
  source 1..20: mol_type = other DNA
acacctgtagttccagctac

SEQ ID NO: 14042 - DNA, 20 bp, synthetic construct
  source 1..20: mol_type = other DNA
tacacctgtagttccagcta

SEQ ID NO: 14043 - DNA, 20 bp, synthetic construct
  source 1..20: mol_type = other DNA
atacacctgtagttccagct

SEQ ID NO: 14044 - DNA, 20 bp, synthetic construct
  source 1..20: mol_type = other DNA
catacacctgtagttccagc

SEQ ID NO: 14045 - DNA, 20 bp, synthetic construct
  source 1..20: mol_type = other DNA
gcatacacctgtagttccag

SEQ ID NO: 14046 - DNA, 20 bp, synthetic construct
  source 1..20: mol_type = other DNA
ggcatacacctgtagttcca

SEQ ID NO: 14047 - DNA, 20 bp, synthetic construct
  source 1..20: mol_type = other DNA
tggcatacacctgtagttcc

SEQ ID NO: 14048 - DNA, 20 bp, synthetic construct
  source 1..20: mol_type = other DNA
gtggcatacacctgtagttc

SEQ ID NO: 14049 - DNA, 20 bp, synthetic construct
  source 1..20: mol_type = other DNA
ggtggcatacacctgtagtt

SEQ ID NO: 14050 - DNA, 20 bp, synthetic construct
  source 1..20: mol_type = other DNA
tggtggcatacacctgtagt

SEQ ID NO: 14051 - DNA, 20 bp, synthetic construct
  source 1..20: mol_type = other DNA
atggtggcatacacctgtag

SEQ ID NO: 14052 - DNA, 20 bp, synthetic construct
  source 1..20: mol_type = other DNA
catggtggcatacacctgta

SEQ ID NO: 14053 - DNA, 20 bp, synthetic construct
  source 1..20: mol_type = other DNA
gcatggtggcatacacctgt

SEQ ID NO: 14054 - DNA, 20 bp, synthetic construct
  source 1..20: mol_type = other DNA
ggcatggtggcatacacctg

SEQ ID NO: 14055 - DNA, 20 bp, synthetic construct
  source 1..20: mol_type = other DNA
aggcatggtggcatacacct

SEQ ID NO: 14056 - DNA, 20 bp, synthetic construct
  source 1..20: mol_type = other DNA
caggcatggtggcatacacc

SEQ ID NO: 14057 - DNA, 20 bp, synthetic construct
  source 1..20: mol_type = other DNA
ccaggcatggtggcatacac

SEQ ID NO: 14058 - DNA, 20 bp, synthetic construct
  source 1..20: mol_type = other DNA
gccaggcatggtggcataca

SEQ ID NO: 14059 - DNA, 20 bp, synthetic construct
  source 1..20: mol_type = other DNA
agccaggcatggtggcatac

SEQ ID NO: 14060 - DNA, 20 bp, synthetic construct
  source 1..20: mol_type = other DNA
aagccaggcatggtggcata

SEQ ID NO: 14061 - DNA, 20 bp, synthetic construct
  source 1..20: mol_type = other DNA
aaagccaggcatggtggcat

SEQ ID NO: 14062 - DNA, 20 bp, synthetic construct
  source 1..20: mol_type = other DNA
aaaagccaggcatggtggca

SEQ ID NO: 14063 - DNA, 20 bp, synthetic construct
  source 1..20: mol_type = other DNA
caaaagccaggcatggtggc

SEQ ID NO: 14064 - DNA, 20 bp, synthetic construct
  source 1..20: mol_type = other DNA
acaaaagccaggcatggtgg

SEQ ID NO: 14065 - DNA, 20 bp, synthetic construct
  source 1..20: mol_type = other DNA
tacaaaagccaggcatggtg

SEQ ID NO: 14066 - DNA, 20 bp, synthetic construct
  source 1..20: mol_type = other DNA
atacaaaagccaggcatggt

SEQ ID NO: 14067 - DNA, 20 bp, synthetic construct
  source 1..20: mol_type = other DNA
tatacaaaagccaggcatgg

SEQ ID NO: 14068 - DNA, 20 bp, synthetic construct
  source 1..20: mol_type = other DNA
atatacaaaagccaggcatg

SEQ ID NO: 14069 - DNA, 20 bp, synthetic construct
  source 1..20: mol_type = other DNA
aatatacaaaagccaggcat

SEQ ID NO: 14070 - DNA, 20 bp, synthetic construct
  source 1..20: mol_type = other DNA
aaatatacaaaagccaggca

SEQ ID NO: 14071 - DNA, 20 bp, synthetic construct
  source 1..20: mol_type = other DNA
aaaatatacaaaagccaggc

SEQ ID NO: 14072 - DNA, 20 bp, synthetic construct
  source 1..20: mol_type = other DNA
caaaatatacaaaagccagg

SEQ ID NO: 14073 - DNA, 20 bp, synthetic construct
  source 1..20: mol_type = other DNA
acaaaatatacaaaagccag

SEQ ID NO: 14074 - DNA, 20 bp, synthetic construct
  source 1..20: mol_type = other DNA
tacaaaatatacaaaagcca

SEQ ID NO: 14075 - DNA, 20 bp, synthetic construct
  source 1..20: mol_type = other DNA
ctacaaaatatacaaaagcc

SEQ ID NO: 14076 - DNA, 20 bp, synthetic construct
  source 1..20: mol_type = other DNA
tctacaaaatatacaaaagc

SEQ ID NO: 14077 - DNA, 20 bp, synthetic construct
  source 1..20: mol_type = other DNA
ctctacaaaatatacaaaag

SEQ ID NO: 14078 - DNA, 20 bp, synthetic construct
  source 1..20: mol_type = other DNA
tctctacaaaatatacaaaa

SEQ ID NO: 14079 - DNA, 20 bp, synthetic construct
  source 1..20: mol_type = other DNA
gtctctacaaaatatacaaa

SEQ ID NO: 14080 - DNA, 20 bp, synthetic construct
  source 1..20: mol_type = other DNA
tgtctctacaaaatatacaa

SEQ ID NO: 14081 - DNA, 20 bp, synthetic construct
  source 1..20: mol_type = other DNA
ctgtctctacaaaatataca

SEQ ID NO: 14082 - DNA, 20 bp, synthetic construct
  source 1..20: mol_type = other DNA
cctgtctctacaaaatatac

SEQ ID NO: 14083 - DNA, 20 bp, synthetic construct
  source 1..20: mol_type = other DNA
ccctgtctctacaaaatata

SEQ ID NO: 14084 - DNA, 20 bp, synthetic construct
  source 1..20: mol_type = other DNA
accctgtctctacaaaatat

SEQ ID NO: 14085 - DNA, 20 bp, synthetic construct
  source 1..20: mol_type = other DNA
aaccctgtctctacaaaata

SEQ ID NO: 14086 - DNA, 20 bp, synthetic construct
  source 1..20: mol_type = other DNA
aaaccctgtctctacaaaat

SEQ ID NO: 14087 - DNA, 20 bp, synthetic construct
  source 1..20: mol_type = other DNA
taaaccctgtctctacaaaa

SEQ ID NO: 14088 - DNA, 20 bp, synthetic construct
  source 1..20: mol_type = other DNA
ctaaaccctgtctctacaaa

SEQ ID NO: 14089 - DNA, 20 bp, synthetic construct
  source 1..20: mol_type = other DNA
gctaaaccctgtctctacaa

SEQ ID NO: 14090 - DNA, 20 bp, synthetic construct
  source 1..20: mol_type = other DNA
ggctaaaccctgtctctaca

SEQ ID NO: 14091 - DNA, 20 bp, synthetic construct
  source 1..20: mol_type = other DNA
tggctaaaccctgtctctac

SEQ ID NO: 14092 - DNA, 20 bp, synthetic construct
  source 1..20: mol_type = other DNA
atggctaaaccctgtctcta

SEQ ID NO: 14093 - DNA, 20 bp, synthetic construct
  source 1..20: mol_type = other DNA
catggctaaaccctgtctct

SEQ ID NO: 14094 - DNA, 20 bp, synthetic construct
  source 1..20: mol_type = other DNA
acatggctaaaccctgtctc

SEQ ID NO: 14095 - DNA, 20 bp, synthetic construct
  source 1..20: mol_type = other DNA
aacatggctaaaccctgtct

SEQ ID NO: 14096 - DNA, 20 bp, synthetic construct
  source 1..20: mol_type = other DNA
caacatggctaaaccctgtc

SEQ ID NO: 14097 - DNA, 20 bp, synthetic construct
  source 1..20: mol_type = other DNA
gcaacatggctaaaccctgt

SEQ ID NO: 14098 - DNA, 20 bp, synthetic construct
  source 1..20: mol_type = other DNA
ggcaacatggctaaaccctg

SEQ ID NO: 14099 - DNA, 20 bp, synthetic construct
  source 1..20: mol_type = other DNA
gggcaacatggctaaaccct

SEQ ID NO: 14100 - DNA, 20 bp, synthetic construct
  source 1..20: mol_type = other DNA
tgggcaacatggctaaaccc

SEQ ID NO: 14101 - DNA, 20 bp, synthetic construct
  source 1..20: mol_type = other DNA
ctgggcaacatggctaaacc

SEQ ID NO: 14102 - DNA, 20 bp, synthetic construct
  source 1..20: mol_type = other DNA
cctgggcaacatggctaaac

SEQ ID NO: 14103 - DNA, 20 bp, synthetic construct
  source 1..20: mol_type = other DNA
gcctgggcaacatggctaaa

SEQ ID NO: 14104 - DNA, 20 bp, synthetic construct
  source 1..20: mol_type = other DNA
agcctgggcaacatggctaa

SEQ ID NO: 14105 - DNA, 20 bp, synthetic construct
  source 1..20: mol_type = other DNA
cagcctgggcaacatggcta

SEQ ID NO: 14106 - DNA, 20 bp, synthetic construct
  source 1..20: mol_type = other DNA
ccagcctgggcaacatggct

SEQ ID NO: 14107 - DNA, 20 bp, synthetic construct
  source 1..20: mol_type = other DNA
accagcctgggcaacatggc

SEQ ID NO: 14108 - DNA, 20 bp, synthetic construct
  source 1..20: mol_type = other DNA
gaccagcctgggcaacatgg

SEQ ID NO: 14109 - DNA, 20 bp, synthetic construct
  source 1..20: mol_type = other DNA
agaccagcctgggcaacatg

SEQ ID NO: 14110 - DNA, 20 bp, synthetic construct
  source 1..20: mol_type = other DNA
gagaccagcctgggcaacat

SEQ ID NO: 14111 - DNA, 20 bp, synthetic construct
  source 1..20: mol_type = other DNA
tgagaccagcctgggcaaca

SEQ ID NO: 14112 - DNA, 20 bp, synthetic construct
  source 1..20: mol_type = other DNA
ttgagaccagcctgggcaac

SEQ ID NO: 14113 - DNA, 20 bp, synthetic construct
  source 1..20: mol_type = other DNA
tttgagaccagcctgggcaa

SEQ ID NO: 14114 - DNA, 20 bp, synthetic construct
  source 1..20: mol_type = other DNA
gtttgagaccagcctgggca

SEQ ID NO: 14115 - DNA, 20 bp, synthetic construct
  source 1..20: mol_type = other DNA
agtttgagaccagcctgggc

SEQ ID NO: 14116 - DNA, 20 bp, synthetic construct
  source 1..20: mol_type = other DNA
gagtttgagaccagcctggg

SEQ ID NO: 14117 - DNA, 20 bp, synthetic construct
  source 1..20: mol_type = other DNA
agagtttgagaccagcctgg

SEQ ID NO: 14118 - DNA, 20 bp, synthetic construct
  source 1..20: mol_type = other DNA
aagagtttgagaccagcctg

SEQ ID NO: 14119 - DNA, 20 bp, synthetic construct
  source 1..20: mol_type = other DNA
taagagtttgagaccagcct

SEQ ID NO: 14120 - DNA, 20 bp, synthetic construct
  source 1..20: mol_type = other DNA
ttaagagtttgagaccagcc

SEQ ID NO: 14121 - DNA, 20 bp, synthetic construct
  source 1..20: mol_type = other DNA
tttaagagtttgagaccagc

SEQ ID NO: 14122 - DNA, 20 bp, synthetic construct
  source 1..20: mol_type = other DNA
atttaagagtttgagaccag

SEQ ID NO: 14123 - DNA, 20 bp, synthetic construct
  source 1..20: mol_type = other DNA
aatttaagagtttgagacca

SEQ ID NO: 14124 - DNA, 20 bp, synthetic construct
  source 1..20: mol_type = other DNA
gaatttaagagtttgagacc

SEQ ID NO: 14125 - DNA, 20 bp, synthetic construct
  source 1..20: mol_type = other DNA
tgaatttaagagtttgagac

SEQ ID NO: 14126 - DNA, 20 bp, synthetic construct
  source 1..20: mol_type = other DNA
ttgaatttaagagtttgaga

SEQ ID NO: 14127 - DNA, 20 bp, synthetic construct
  source 1..20: mol_type = other DNA
tttgaatttaagagtttgag

SEQ ID NO: 14128 - DNA, 20 bp, synthetic construct
  source 1..20: mol_type = other DNA
atttgaatttaagagtttga

SEQ ID NO: 14129 - DNA, 20 bp, synthetic construct
  source 1..20: mol_type = other DNA
catttgaatttaagagtttg

SEQ ID NO: 14130 - DNA, 20 bp, synthetic construct
  source 1..20: mol_type = other DNA
tcatttgaatttaagagttt

SEQ ID NO: 14131 - DNA, 20 bp, synthetic construct
  source 1..20: mol_type = other DNA
atcatttgaatttaagagtt

SEQ ID NO: 14132 - DNA, 20 bp, synthetic construct
  source 1..20: mol_type = other DNA
gatcatttgaatttaagagt

SEQ ID NO: 14133 - DNA, 20 bp, synthetic construct
  source 1..20: mol_type = other DNA
ggatcatttgaatttaagag

SEQ ID NO: 14134 - DNA, 20 bp, synthetic construct
  source 1..20: mol_type = other DNA
tggatcatttgaatttaaga

SEQ ID NO: 14135 - DNA, 20 bp, synthetic construct
  source 1..20: mol_type = other DNA
gtggatcatttgaatttaag

SEQ ID NO: 14136 - DNA, 20 bp, synthetic construct
  source 1..20: mol_type = other DNA
ggtggatcatttgaatttaa

SEQ ID NO: 14137 - DNA, 20 bp, synthetic construct
  source 1..20: mol_type = other DNA
gggtggatcatttgaattta

SEQ ID NO: 14138 - DNA, 20 bp, synthetic construct
  source 1..20: mol_type = other DNA
tgggtggatcatttgaattt

SEQ ID NO: 14139 - DNA, 20 bp, synthetic construct
  source 1..20: mol_type = other DNA
gtgggtggatcatttgaatt

SEQ ID NO: 14140 - DNA, 20 bp, synthetic construct
  source 1..20: mol_type = other DNA
ggtgggtggatcatttgaat

SEQ ID NO: 14141 - DNA, 20 bp, synthetic construct
  source 1..20: mol_type = other DNA
aggtgggtggatcatttgaa

SEQ ID NO: 14142 - DNA, 20 bp, synthetic construct
  source 1..20: mol_type = other DNA
taggtgggtggatcatttga

SEQ ID NO: 14143 - DNA, 20 bp, synthetic construct
  source 1..20: mol_type = other DNA
ctaggtgggtggatcatttg

SEQ ID NO: 14144 - DNA, 20 bp, synthetic construct
  source 1..20: mol_type = other DNA
actaggtgggtggatcattt

SEQ ID NO: 14145 - DNA, 20 bp, synthetic construct
  source 1..20: mol_type = other DNA
aactaggtgggtggatcatt

SEQ ID NO: 14146 - DNA, 20 bp, synthetic construct
  source 1..20: mol_type = other DNA
aaactaggtgggtggatcat

SEQ ID NO: 14147 - DNA, 20 bp, synthetic construct
  source 1..20: mol_type = other DNA
aaaactaggtgggtggatca

SEQ ID NO: 14148 - DNA, 20 bp, synthetic construct
  source 1..20: mol_type = other DNA
gaaaactaggtgggtggatc

SEQ ID NO: 14149 - DNA, 20 bp, synthetic construct
  source 1..20: mol_type = other DNA
ggaaaactaggtgggtggat

SEQ ID NO: 14150 - DNA, 20 bp, synthetic construct
  source 1..20: mol_type = other DNA
gggaaaactaggtgggtgga

SEQ ID NO: 14151 - DNA, 20 bp, synthetic construct
  source 1..20: mol_type = other DNA
tgggaaaactaggtgggtgg

SEQ ID NO: 14152 - DNA, 20 bp, synthetic construct
  source 1..20: mol_type = other DNA
ttgggaaaactaggtgggtg

SEQ ID NO: 14153 - DNA, 20 bp, synthetic construct
  source 1..20: mol_type = other DNA
tttgggaaaactaggtgggt

SEQ ID NO: 14154 - DNA, 20 bp, synthetic construct
  source 1..20: mol_type = other DNA
ctttgggaaaactaggtggg

SEQ ID NO: 14155 - DNA, 20 bp, synthetic construct
  source 1..20: mol_type = other DNA
actttgggaaaactaggtgg

SEQ ID NO: 14156 - DNA, 20 bp, synthetic construct
  source 1..20: mol_type = other DNA
cactttgggaaaactaggtg

SEQ ID NO: 14157 - DNA, 20 bp, synthetic construct
  source 1..20: mol_type = other DNA
gcactttgggaaaactaggt

SEQ ID NO: 14158 - DNA, 20 bp, synthetic construct
  source 1..20: mol_type = other DNA
agcactttgggaaaactagg

SEQ ID NO: 14159 - DNA, 20 bp, synthetic construct
  source 1..20: mol_type = other DNA
aagcactttgggaaaactag

SEQ ID NO: 14160 - DNA, 20 bp, synthetic construct
  source 1..20: mol_type = other DNA
aaagcactttgggaaaacta

SEQ ID NO: 14161 - DNA, 20 bp, synthetic construct
  source 1..20: mol_type = other DNA
taaagcactttgggaaaact

SEQ ID NO: 14162 - DNA, 20 bp, synthetic construct
  source 1..20: mol_type = other DNA
ttaaagcactttgggaaaac

SEQ ID NO: 14163 - DNA, 20 bp, synthetic construct
  source 1..20: mol_type = other DNA
attaaagcactttgggaaaa

SEQ ID NO: 14164 - DNA, 20 bp, synthetic construct
  source 1..20: mol_type = other DNA
aattaaagcactttgggaaa

SEQ ID NO: 14165 - DNA, 20 bp, synthetic construct
  source 1..20: mol_type = other DNA
taattaaagcactttgggaa

SEQ ID NO: 14166 - DNA, 20 bp, synthetic construct
  source 1..20: mol_type = other DNA
gtaattaaagcactttggga

SEQ ID NO: 14167 - DNA, 20 bp, synthetic construct
  source 1..20: mol_type = other DNA
tgtaattaaagcactttggg

SEQ ID NO: 14168 - DNA, 20 bp, synthetic construct
  source 1..20: mol_type = other DNA
atgtaattaaagcactttgg

SEQ ID NO: 14169 - DNA, 20 bp, synthetic construct
  source 1..20: mol_type = other DNA
catgtaattaaagcactttg

SEQ ID NO: 14170 - DNA, 20 bp, synthetic construct
  source 1..20: mol_type = other DNA
acatgtaattaaagcacttt

SEQ ID NO: 14171 - DNA, 20 bp, synthetic construct
  source 1..20: mol_type = other DNA
cacatgtaattaaagcactt

SEQ ID NO: 14172 - DNA, 20 bp, synthetic construct
  source 1..20: mol_type = other DNA
acacatgtaattaaagcact

SEQ ID NO: 14173 - DNA, 20 bp, synthetic construct
  source 1..20: mol_type = other DNA
cacacatgtaattaaagcac

SEQ ID NO: 14174 - DNA, 20 bp, synthetic construct
  source 1..20: mol_type = other DNA
tcacacatgtaattaaagca

SEQ ID NO: 14175 - DNA, 20 bp, synthetic construct
  source 1..20: mol_type = other DNA
ctcacacatgtaattaaagc

SEQ ID NO: 14176 - DNA, 20 bp, synthetic construct
  source 1..20: mol_type = other DNA
cctcacacatgtaattaaag

SEQ ID NO: 14177 - DNA, 20 bp, synthetic construct
  source 1..20: mol_type = other DNA
gcctcacacatgtaattaaa

SEQ ID NO: 14178 - DNA, 20 bp, synthetic construct
  source 1..20: mol_type = other DNA
tgcctcacacatgtaattaa

SEQ ID NO: 14179 - DNA, 20 bp, synthetic construct
  source 1..20: mol_type = other DNA
gtgcctcacacatgtaatta

SEQ ID NO: 14180 - DNA, 20 bp, synthetic construct
  source 1..20: mol_type = other DNA
ggtgcctcacacatgtaatt

SEQ ID NO: 14181 - DNA, 20 bp, synthetic construct
  source 1..20: mol_type = other DNA
cggtgcctcacacatgtaat

SEQ ID NO: 14182 - DNA, 20 bp, synthetic construct
  source 1..20: mol_type = other DNA
acggtgcctcacacatgtaa

SEQ ID NO: 14183 - DNA, 20 bp, synthetic construct
  source 1..20: mol_type = other DNA
cacggtgcctcacacatgta

SEQ ID NO: 14184 - DNA, 20 bp, synthetic construct
  source 1..20: mol_type = other DNA
ccacggtgcctcacacatgt

SEQ ID NO: 14185 - DNA, 20 bp, synthetic construct
  source 1..20: mol_type = other DNA
gccacggtgcctcacacatg

SEQ ID NO: 14186 - DNA, 20 bp, synthetic construct
  source 1..20: mol_type = other DNA
agccacggtgcctcacacat

SEQ ID NO: 14187 - DNA, 20 bp, synthetic construct
  source 1..20: mol_type = other DNA
cagccacggtgcctcacaca

SEQ ID NO: 14188 - DNA, 20 bp, synthetic construct
  source 1..20: mol_type = other DNA
ccagccacggtgcctcacac

SEQ ID NO: 14189 - DNA, 20 bp, synthetic construct
  source 1..20: mol_type = other DNA
gccagccacggtgcctcaca

SEQ ID NO: 14190 - DNA, 20 bp, synthetic construct
  source 1..20: mol_type = other DNA
ggccagccacggtgcctcac

SEQ ID NO: 14191 - DNA, 20 bp, synthetic construct
  source 1..20: mol_type = other DNA
tggccagccacggtgcctca

SEQ ID NO: 14192 - DNA, 20 bp, synthetic construct
  source 1..20: mol_type = other DNA
ctggccagccacggtgcctc

SEQ ID NO: 14193 - DNA, 20 bp, synthetic construct
  source 1..20: mol_type = other DNA
cctggccagccacggtgcct

SEQ ID NO: 14194 - DNA, 20 bp, synthetic construct
  source 1..20: mol_type = other DNA
acctggccagccacggtgcc

SEQ ID NO: 14195 - DNA, 20 bp, synthetic construct
  source 1..20: mol_type = other DNA
gacctggccagccacggtgc

SEQ ID NO: 14196 - DNA, 20 bp, synthetic construct
  source 1..20: mol_type = other DNA
tgacctggccagccacggtg

SEQ ID NO: 14197 - DNA, 20 bp, synthetic construct
  source 1..20: mol_type = other DNA
ttgacctggccagccacggt

SEQ ID NO: 14198 - DNA, 20 bp, synthetic construct
  source 1..20: mol_type = other DNA
tttgacctggccagccacgg

SEQ ID NO: 14199 - DNA, 20 bp, synthetic construct
  source 1..20: mol_type = other DNA
atttgacctggccagccacg

SEQ ID NO: 14200 - DNA, 20 bp, synthetic construct
  source 1..20: mol_type = other DNA
tatttgacctggccagccac

SEQ ID NO: 14201 - DNA, 20 bp, synthetic construct
  source 1..20: mol_type = other DNA
atatttgacctggccagcca

SEQ ID NO: 14202 - DNA, 20 bp, synthetic construct
  source 1..20: mol_type = other DNA
aatatttgacctggccagcc

SEQ ID NO: 14203 - DNA, 20 bp, synthetic construct
  source 1..20: mol_type = other DNA
aaatatttgacctggccagc

SEQ ID NO: 14204 - DNA, 20 bp, synthetic construct
  source 1..20: mol_type = other DNA
aaaatatttgacctggccag

SEQ ID NO: 14205 - DNA, 20 bp, synthetic construct
  source 1..20: mol_type = other DNA
aaaaatatttgacctggcca

SEQ ID NO: 14206 - DNA, 20 bp, synthetic construct
  source 1..20: mol_type = other DNA
gaaaaatatttgacctggcc

SEQ ID NO: 14207 - DNA, 20 bp, synthetic construct
  source 1..20: mol_type = other DNA
tgaaaaatatttgacctggc

SEQ ID NO: 14208 - DNA, 20 bp, synthetic construct
  source 1..20: mol_type = other DNA
atgaaaaatatttgacctgg

SEQ ID NO: 14209 - DNA, 20 bp, synthetic construct
  source 1..20: mol_type = other DNA
aatgaaaaatatttgacctg

SEQ ID NO: 14210 - DNA, 20 bp, synthetic construct
  source 1..20: mol_type = other DNA
caatgaaaaatatttgacct

SEQ ID NO: 14211 - DNA, 20 bp, synthetic construct
  source 1..20: mol_type = other DNA
tcaatgaaaaatatttgacc

SEQ ID NO: 14212 - DNA, 20 bp, synthetic construct
  source 1..20: mol_type = other DNA
gtcaatgaaaaatatttgac

SEQ ID NO: 14213 - DNA, 20 bp, synthetic construct
  source 1..20: mol_type = other DNA
cgtcaatgaaaaatatttga

SEQ ID NO: 14214 - DNA, 20 bp, synthetic construct
  source 1..20: mol_type = other DNA
acgtcaatgaaaaatatttg

SEQ ID NO: 14215 - DNA, 20 bp, synthetic construct
  source 1..20: mol_type = other DNA
aacgtcaatgaaaaatattt

SEQ ID NO: 14216 - DNA, 20 bp, synthetic construct
  source 1..20: mol_type = other DNA
aaacgtcaatgaaaaatatt

SEQ ID NO: 14217 - DNA, 20 bp, synthetic construct
  source 1..20: mol_type = other DNA
aaaacgtcaatgaaaaatat

SEQ ID NO: 14218 - DNA, 20 bp, synthetic construct
  source 1..20: mol_type = other DNA
aaaaacgtcaatgaaaaata

SEQ ID NO: 14219 - DNA, 20 bp, synthetic construct
  source 1..20: mol_type = other DNA
gaaaaacgtcaatgaaaaat

SEQ ID NO: 14220 - DNA, 20 bp, synthetic construct
  source 1..20: mol_type = other DNA
tgaaaaacgtcaatgaaaaa

SEQ ID NO: 14221 - DNA, 20 bp, synthetic construct
  source 1..20: mol_type = other DNA
atgaaaaacgtcaatgaaaa

SEQ ID NO: 14222 - DNA, 20 bp, synthetic construct
  source 1..20: mol_type = other DNA
tatgaaaaacgtcaatgaaa

SEQ ID NO: 14223 - DNA, 20 bp, synthetic construct
  source 1..20: mol_type = other DNA
atatgaaaaacgtcaatgaa

SEQ ID NO: 14224 - DNA, 20 bp, synthetic construct
  source 1..20: mol_type = other DNA
aatatgaaaaacgtcaatga

SEQ ID NO: 14225 - DNA, 20 bp, synthetic construct
  source 1..20: mol_type = other DNA
caatatgaaaaacgtcaatg

SEQ ID NO: 14226 - DNA, 20 bp, synthetic construct
  source 1..20: mol_type = other DNA
gcaatatgaaaaacgtcaat

SEQ ID NO: 14227 - DNA, 20 bp, synthetic construct
  source 1..20: mol_type = other DNA
agcaatatgaaaaacgtcaa

SEQ ID NO: 14228 - DNA, 20 bp, synthetic construct
  source 1..20: mol_type = other DNA
aagcaatatgaaaaacgtca

SEQ ID NO: 14229 - DNA, 20 bp, synthetic construct
  source 1..20: mol_type = other DNA
aaagcaatatgaaaaacgtc

SEQ ID NO: 14230 - DNA, 20 bp, synthetic construct
  source 1..20: mol_type = other DNA
aaaagcaatatgaaaaacgt

SEQ ID NO: 14231 - DNA, 20 bp, synthetic construct
  source 1..20: mol_type = other DNA
aaaaagcaatatgaaaaacg

SEQ ID NO: 14232 - DNA, 20 bp, synthetic construct
  source 1..20: mol_type = other DNA
taaaaagcaatatgaaaaac

SEQ ID NO: 14233 - DNA, 20 bp, synthetic construct
  source 1..20: mol_type = other DNA
ttaaaaagcaatatgaaaaa

SEQ ID NO: 14234 - DNA, 20 bp, synthetic construct
  source 1..20: mol_type = other DNA
tttaaaaagcaatatgaaaa

SEQ ID NO: 14235 - DNA, 20 bp, synthetic construct
  source 1..20: mol_type = other DNA
ctttaaaaagcaatatgaaa

SEQ ID NO: 14236 - DNA, 20 bp, synthetic construct
  source 1..20: mol_type = other DNA
actttaaaaagcaatatgaa

SEQ ID NO: 14237 - DNA, 20 bp, synthetic construct
  source 1..20: mol_type = other DNA
gactttaaaaagcaatatga

SEQ ID NO: 14238 - DNA, 20 bp, synthetic construct
  source 1..20: mol_type = other DNA
tgactttaaaaagcaatatg

SEQ ID NO: 14239 - DNA, 20 bp, synthetic construct
  source 1..20: mol_type = other DNA
atgactttaaaaagcaatat

SEQ ID NO: 14240 - DNA, 20 bp, synthetic construct
  source 1..20: mol_type = other DNA
catgactttaaaaagcaata

SEQ ID NO: 14241 - DNA, 20 bp, synthetic construct
  source 1..20: mol_type = other DNA
acatgactttaaaaagcaat

SEQ ID NO: 14242 - DNA, 20 bp, synthetic construct
  source 1..20: mol_type = other DNA
aacatgactttaaaaagcaa

SEQ ID NO: 14243 - DNA, 20 bp, synthetic construct
  source 1..20: mol_type = other DNA
taacatgactttaaaaagca

SEQ ID NO: 14244 - DNA, 20 bp, synthetic construct
  source 1..20: mol_type = other DNA
ttaacatgactttaaaaagc

SEQ ID NO: 14245 - DNA, 20 bp, synthetic construct
  source 1..20: mol_type = other DNA
tttaacatgactttaaaaag

SEQ ID NO: 14246 - DNA, 20 bp, synthetic construct
  source 1..20: mol_type = other DNA
ttttaacatgactttaaaaa

SEQ ID NO: 14247 - DNA, 20 bp, synthetic construct
  source 1..20: mol_type = other DNA
attttaacatgactttaaaa

SEQ ID NO: 14248 - DNA, 20 bp, synthetic construct
  source 1..20: mol_type = other DNA
tattttaacatgactttaaa

SEQ ID NO: 14249 - DNA, 20 bp, synthetic construct
  source 1..20: mol_type = other DNA
atattttaacatgactttaa

SEQ ID NO: 14250 - DNA, 20 bp, synthetic construct
  source 1..20: mol_type = other DNA
aatattttaacatgacttta

SEQ ID NO: 14251 - DNA, 20 bp, synthetic construct
  source 1..20: mol_type = other DNA
gaatattttaacatgacttt

SEQ ID NO: 14252 - DNA, 20 bp, synthetic construct
  source 1..20: mol_type = other DNA
agaatattttaacatgactt

SEQ ID NO: 14253 - DNA, 20 bp, synthetic construct
  source 1..20: mol_type = other DNA
aagaatattttaacatgact

SEQ ID NO: 14254 - DNA, 20 bp, synthetic construct
  source 1..20: mol_type = other DNA
taagaatattttaacatgac

SEQ ID NO: 14255 - DNA, 20 bp, synthetic construct
  source 1..20: mol_type = other DNA
ttaagaatattttaacatga

SEQ ID NO: 14256 - DNA, 20 bp, synthetic construct
  source 1..20: mol_type = other DNA
attaagaatattttaacatg

SEQ ID NO: 14257 - DNA, 20 bp, synthetic construct
  source 1..20: mol_type = other DNA
tattaagaatattttaacat

SEQ ID NO: 14258 - DNA, 20 bp, synthetic construct
  source 1..20: mol_type = other DNA
ttattaagaatattttaaca

SEQ ID NO: 14259 - DNA, 20 bp, synthetic construct
  source 1..20: mol_type = other DNA
attattaagaatattttaac

SEQ ID NO: 14260 - DNA, 20 bp, synthetic construct
  source 1..20: mol_type = other DNA
aattattaagaatattttaa

SEQ ID NO: 14261 - DNA, 20 bp, synthetic construct
  source 1..20: mol_type = other DNA
aaattattaagaatatttta

SEQ ID NO: 14262 - DNA, 20 bp, synthetic construct
  source 1..20: mol_type = other DNA
aaaattattaagaatatttt

SEQ ID NO: 14263 - DNA, 20 bp, synthetic construct
  source 1..20: mol_type = other DNA
aaaaattattaagaatattt

SEQ ID NO: 14264 - DNA, 20 bp, synthetic construct
  source 1..20: mol_type = other DNA
gaaaaattattaagaatatt

SEQ ID NO: 14265 - DNA, 20 bp, synthetic construct
  source 1..20: mol_type = other DNA
agaaaaattattaagaatat

SEQ ID NO: 14266 - DNA, 20 bp, synthetic construct
  source 1..20: mol_type = other DNA
tagaaaaattattaagaata

SEQ ID NO: 14267 - DNA, 20 bp, synthetic construct
  source 1..20: mol_type = other DNA
ttagaaaaattattaagaat

SEQ ID NO: 14268 - DNA, 20 bp, synthetic construct
  source 1..20: mol_type = other DNA
cttagaaaaattattaagaa

SEQ ID NO: 14269 - DNA, 20 bp, synthetic construct
  source 1..20: mol_type = other DNA
acttagaaaaattattaaga

SEQ ID NO: 14270 - DNA, 20 bp, synthetic construct
  source 1..20: mol_type = other DNA
cacttagaaaaattattaag

SEQ ID NO: 14271 - DNA, 20 bp, synthetic construct
  source 1..20: mol_type = other DNA
ccacttagaaaaattattaa

SEQ ID NO: 14272 - DNA, 20 bp, synthetic construct
  source 1..20: mol_type = other DNA
tccacttagaaaaattatta

SEQ ID NO: 14273 - DNA, 20 bp, synthetic construct
  source 1..20: mol_type = other DNA
ttccacttagaaaaattatt

SEQ ID NO: 14274 - DNA, 20 bp, synthetic construct
  source 1..20: mol_type = other DNA
attccacttagaaaaattat

SEQ ID NO: 14275 - DNA, 20 bp, synthetic construct
  source 1..20: mol_type = other DNA
aattccacttagaaaaatta

SEQ ID NO: 14276 - DNA, 20 bp, synthetic construct
  source 1..20: mol_type = other DNA
taattccacttagaaaaatt

SEQ ID NO: 14277 - DNA, 20 bp, synthetic construct
  source 1..20: mol_type = other DNA
ttaattccacttagaaaaat

SEQ ID NO: 14278 - DNA, 20 bp, synthetic construct
  source 1..20: mol_type = other DNA
attaattccacttagaaaaa

SEQ ID NO: 14279 - DNA, 20 bp, synthetic construct
  source 1..20: mol_type = other DNA
gattaattccacttagaaaa

SEQ ID NO: 14280 - DNA, 20 bp, synthetic construct
  source 1..20: mol_type = other DNA
agattaattccacttagaaa

SEQ ID NO: 14281 - DNA, 20 bp, synthetic construct
  source 1..20: mol_type = other DNA
aagattaattccacttagaa

SEQ ID NO: 14282 - DNA, 20 bp, synthetic construct
  source 1..20: mol_type = other DNA
caagattaattccacttaga

SEQ ID NO: 14283 - DNA, 20 bp, synthetic construct
  source 1..20: mol_type = other DNA
tcaagattaattccacttag

SEQ ID NO: 14284 - DNA, 20 bp, synthetic construct
  source 1..20: mol_type = other DNA
atcaagattaattccactta

SEQ ID NO: 14285 - DNA, 20 bp, synthetic construct
  source 1..20: mol_type = other DNA
aatcaagattaattccactt

SEQ ID NO: 14286 - DNA, 20 bp, synthetic construct
  source 1..20: mol_type = other DNA
taatcaagattaattccact

SEQ ID NO: 14287 - DNA, 20 bp, synthetic construct
  source 1..20: mol_type = other DNA
ataatcaagattaattccac

SEQ ID NO: 14288 - DNA, 20 bp, synthetic construct
  source 1..20: mol_type = other DNA
tataatcaagattaattcca

SEQ ID NO: 14289 - DNA, 20 bp, synthetic construct
  source 1..20: mol_type = other DNA
ttataatcaagattaattcc

SEQ ID NO: 14290 - DNA, 20 bp, synthetic construct
  source 1..20: mol_type = other DNA
attataatcaagattaattc

SEQ ID NO: 14291 - DNA, 20 bp, synthetic construct
  source 1..20: mol_type = other DNA
aattataatcaagattaatt

SEQ ID NO: 14292 - DNA, 20 bp, synthetic construct
  source 1..20: mol_type = other DNA
aaattataatcaagattaat

SEQ ID NO: 14293 - DNA, 20 bp, synthetic construct
  source 1..20: mol_type = other DNA
aaaattataatcaagattaa

SEQ ID NO: 14294 - DNA, 20 bp, synthetic construct
  source 1..20: mol_type = other DNA
taaaattataatcaagatta

SEQ ID NO: 14295 - DNA, 20 bp, synthetic construct
  source 1..20: mol_type = other DNA
ctaaaattataatcaagatt

SEQ ID NO: 14296 - DNA, 20 bp, synthetic construct
  source 1..20: mol_type = other DNA
actaaaattataatcaagat

SEQ ID NO: 14297 - DNA, 20 bp, synthetic construct
  source 1..20: mol_type = other DNA
aactaaaattataatcaaga

SEQ ID NO: 14298 - DNA, 20 bp, synthetic construct
  source 1..20: mol_type = other DNA
aaactaaaattataatcaag

SEQ ID NO: 14299 - DNA, 20 bp, synthetic construct
  source 1..20: mol_type = other DNA
aaaactaaaattataatcaa

SEQ ID NO: 14300 - DNA, 20 bp, synthetic construct
  source 1..20: mol_type = other DNA
aaaaactaaaattataatca

SEQ ID NO: 14301 - DNA, 20 bp, synthetic construct
  source 1..20: mol_type = other DNA
aaaaaactaaaattataatc

SEQ ID NO: 14302 - DNA, 20 bp, synthetic construct
  source 1..20: mol_type = other DNA
taaaaaactaaaattataat

SEQ ID NO: 14303 - DNA, 20 bp, synthetic construct
  source 1..20: mol_type = other DNA
ataaaaaactaaaattataa

SEQ ID NO: 14304 - DNA, 20 bp, synthetic construct
  source 1..20: mol_type = other DNA
tataaaaaactaaaattata

SEQ ID NO: 14305 - DNA, 20 bp, synthetic construct
  source 1..20: mol_type = other DNA
ttataaaaaactaaaattat

SEQ ID NO: 14306 - DNA, 20 bp, synthetic construct
  source 1..20: mol_type = other DNA
tttataaaaaactaaaatta

SEQ ID NO: 14307 - DNA, 20 bp, synthetic construct
  source 1..20: mol_type = other DNA
ctttataaaaaactaaaatt

SEQ ID NO: 14308 - DNA, 20 bp, synthetic construct
  source 1..20: mol_type = other DNA
cctttataaaaaactaaaat

SEQ ID NO: 14309 - DNA, 20 bp, synthetic construct
  source 1..20: mol_type = other DNA
ccctttataaaaaactaaaa

SEQ ID NO: 14310 - DNA, 20 bp, synthetic construct
  source 1..20: mol_type = other DNA
gccctttataaaaaactaaa

SEQ ID NO: 14311 - DNA, 20 bp, synthetic construct
  source 1..20: mol_type = other DNA
cgccctttataaaaaactaa

SEQ ID NO: 14312 - DNA, 20 bp, synthetic construct
  source 1..20: mol_type = other DNA
ccgccctttataaaaaacta

SEQ ID NO: 14313 - DNA, 20 bp, synthetic construct
  source 1..20: mol_type = other DNA
cccgccctttataaaaaact

SEQ ID NO: 14314 - DNA, 20 bp, synthetic construct
  source 1..20: mol_type = other DNA
acccgccctttataaaaaac

SEQ ID NO: 14315 - DNA, 20 bp, synthetic construct
  source 1..20: mol_type = other DNA
aacccgccctttataaaaaa

SEQ ID NO: 14316 - DNA, 20 bp, synthetic construct
  source 1..20: mol_type = other DNA
aaacccgccctttataaaaa

SEQ ID NO: 14317 - DNA, 20 bp, synthetic construct
  source 1..20: mol_type = other DNA
aaaacccgccctttataaaa

SEQ ID NO: 14318 - DNA, 20 bp, synthetic construct
  source 1..20: mol_type = other DNA
caaaacccgccctttataaa

SEQ ID NO: 14319 - DNA, 20 bp, synthetic construct
  source 1..20: mol_type = other DNA
tcaaaacccgccctttataa

SEQ ID NO: 14320 - DNA, 20 bp, synthetic construct
  source 1..20: mol_type = other DNA
ttcaaaacccgccctttata

SEQ ID NO: 14321 - DNA, 20 bp, synthetic construct
  source 1..20: mol_type = other DNA
tttcaaaacccgccctttat

SEQ ID NO: 14322 - DNA, 20 bp, synthetic construct
  source 1..20: mol_type = other DNA
gtttcaaaacccgcccttta

SEQ ID NO: 14323 - DNA, 20 bp, synthetic construct
  source 1..20: mol_type = other DNA
tgtttcaaaacccgcccttt

SEQ ID NO: 14324 - DNA, 20 bp, synthetic construct
  source 1..20: mol_type = other DNA
ttgtttcaaaacccgccctt

SEQ ID NO: 14325 - DNA, 20 bp, synthetic construct
  source 1..20: mol_type = other DNA
cttgtttcaaaacccgccct

SEQ ID NO: 14326 - DNA, 20 bp, synthetic construct
  source 1..20: mol_type = other DNA
acttgtttcaaaacccgccc

SEQ ID NO: 14327 - DNA, 20 bp, synthetic construct
  source 1..20: mol_type = other DNA
tacttgtttcaaaacccgcc

SEQ ID NO: 14328 - DNA, 20 bp, synthetic construct
  source 1..20: mol_type = other DNA
gtacttgtttcaaaacccgc

SEQ ID NO: 14329 - DNA, 20 bp, synthetic construct
  source 1..20: mol_type = other DNA
agtacttgtttcaaaacccg

SEQ ID NO: 14330 - DNA, 20 bp, synthetic construct
  source 1..20: mol_type = other DNA
cagtacttgtttcaaaaccc

SEQ ID NO: 14331 - DNA, 20 bp, synthetic construct
  source 1..20: mol_type = other DNA
gcagtacttgtttcaaaacc

SEQ ID NO: 14332 - DNA, 20 bp, synthetic construct
  source 1..20: mol_type = other DNA
tgcagtacttgtttcaaaac

SEQ ID NO: 14333 - DNA, 20 bp, synthetic construct
  source 1..20: mol_type = other DNA
atgcagtacttgtttcaaaa

SEQ ID NO: 14334 - DNA, 20 bp, synthetic construct
  source 1..20: mol_type = other DNA
aatgcagtacttgtttcaaa

SEQ ID NO: 14335 - DNA, 20 bp, synthetic construct
  source 1..20: mol_type = other DNA
aaatgcagtacttgtttcaa

SEQ ID NO: 14336 - DNA, 20 bp, synthetic construct
  source 1..20: mol_type = other DNA
aaaatgcagtacttgtttca

SEQ ID NO: 14337 - DNA, 20 bp, synthetic construct
  source 1..20: mol_type = other DNA
aaaaatgcagtacttgtttc

SEQ ID NO: 14338 - DNA, 20 bp, synthetic construct
  source 1..20: mol_type = other DNA
gaaaaatgcagtacttgttt

SEQ ID NO: 14339 - DNA, 20 bp, synthetic construct
  source 1..20: mol_type = other DNA
agaaaaatgcagtacttgtt

SEQ ID NO: 14340 - DNA, 20 bp, synthetic construct
  source 1..20: mol_type = other DNA
aagaaaaatgcagtacttgt

SEQ ID NO: 14341 - DNA, 20 bp, synthetic construct
  source 1..20: mol_type = other DNA
aaagaaaaatgcagtacttg

SEQ ID NO: 14342 - DNA, 20 bp, synthetic construct
  source 1..20: mol_type = other DNA
aaaagaaaaatgcagtactt

SEQ ID NO: 14343 - DNA, 20 bp, synthetic construct
  source 1..20: mol_type = other DNA
gaaaagaaaaatgcagtact

SEQ ID NO: 14344 - DNA, 20 bp, synthetic construct
  source 1..20: mol_type = other DNA
cgaaaagaaaaatgcagtac

SEQ ID NO: 14345 - DNA, 20 bp, synthetic construct
  source 1..20: mol_type = other DNA
ccgaaaagaaaaatgcagta

SEQ ID NO: 14346 - DNA, 20 bp, synthetic construct
  source 1..20: mol_type = other DNA
cccgaaaagaaaaatgcagt

SEQ ID NO: 14347 - DNA, 20 bp, synthetic construct
  source 1..20: mol_type = other DNA
acccgaaaagaaaaatgcag

SEQ ID NO: 14348 - DNA, 20 bp, synthetic construct
  source 1..20: mol_type = other DNA
aacccgaaaagaaaaatgca

SEQ ID NO: 14349 - DNA, 20 bp, synthetic construct
  source 1..20: mol_type = other DNA
aaacccgaaaagaaaaatgc

SEQ ID NO: 14350 - DNA, 20 bp, synthetic construct
  source 1..20: mol_type = other DNA
taaacccgaaaagaaaaatg

SEQ ID NO: 14351 - DNA, 20 bp, synthetic construct
  source 1..20: mol_type = other DNA
ataaacccgaaaagaaaaat

SEQ ID NO: 14352 - DNA, 20 bp, synthetic construct
  source 1..20: mol_type = other DNA
tataaacccgaaaagaaaaa

SEQ ID NO: 14353 - DNA, 20 bp, synthetic construct
  source 1..20: mol_type = other DNA
ttataaacccgaaaagaaaa

SEQ ID NO: 14354 - DNA, 20 bp, synthetic construct
  source 1..20: mol_type = other DNA
tttataaacccgaaaagaaa

SEQ ID NO: 14355 - DNA, 20 bp, synthetic construct
  source 1..20: mol_type = other DNA
gtttataaacccgaaaagaa

SEQ ID NO: 14356 - DNA, 20 bp, synthetic construct
  source 1..20: mol_type = other DNA
tgtttataaacccgaaaaga

SEQ ID NO: 14357 - DNA, 20 bp, synthetic construct
  source 1..20: mol_type = other DNA
atgtttataaacccgaaaag

SEQ ID NO: 14358 - DNA, 20 bp, synthetic construct
  source 1..20: mol_type = other DNA
aatgtttataaacccgaaaa

SEQ ID NO: 14359 - DNA, 20 bp, synthetic construct
  source 1..20: mol_type = other DNA
aaatgtttataaacccgaaa

SEQ ID NO: 14360 - DNA, 20 bp, synthetic construct
  source 1..20: mol_type = other DNA
caaatgtttataaacccgaa

SEQ ID NO: 14361 - DNA, 20 bp, synthetic construct
  source 1..20: mol_type = other DNA
gcaaatgtttataaacccga

SEQ ID NO: 14362 - DNA, 20 bp, synthetic construct
  source 1..20: mol_type = other DNA
agcaaatgtttataaacccg

SEQ ID NO: 14363 - DNA, 20 bp, synthetic construct
  source 1..20: mol_type = other DNA
cagcaaatgtttataaaccc

SEQ ID NO: 14364 - DNA, 20 bp, synthetic construct
  source 1..20: mol_type = other DNA
acagcaaatgtttataaacc

SEQ ID NO: 14365 - DNA, 20 bp, synthetic construct
  source 1..20: mol_type = other DNA
cacagcaaatgtttataaac

SEQ ID NO: 14366 - DNA, 20 bp, synthetic construct
  source 1..20: mol_type = other DNA
ccacagcaaatgtttataaa

SEQ ID NO: 14367 - DNA, 20 bp, synthetic construct
  source 1..20: mol_type = other DNA
tccacagcaaatgtttataa

SEQ ID NO: 14368 - DNA, 20 bp, synthetic construct
  source 1..20: mol_type = other DNA
gtccacagcaaatgtttata

SEQ ID NO: 14369 - DNA, 20 bp, synthetic construct
  source 1..20: mol_type = other DNA
agtccacagcaaatgtttat

SEQ ID NO: 14370 - DNA, 20 bp, synthetic construct
  source 1..20: mol_type = other DNA
aagtccacagcaaatgttta

SEQ ID NO: 14371 - DNA, 20 bp, synthetic construct
  source 1..20: mol_type = other DNA
aaagtccacagcaaatgttt

SEQ ID NO: 14372 - DNA, 20 bp, synthetic construct
  source 1..20: mol_type = other DNA
caaagtccacagcaaatgtt

SEQ ID NO: 14373 - DNA, 20 bp, synthetic construct
  source 1..20: mol_type = other DNA
acaaagtccacagcaaatgt

SEQ ID NO: 14374 - DNA, 20 bp, synthetic construct
  source 1..20: mol_type = other DNA
cacaaagtccacagcaaatg

SEQ ID NO: 14375 - DNA, 20 bp, synthetic construct
  source 1..20: mol_type = other DNA
gcacaaagtccacagcaaat

SEQ ID NO: 14376 - DNA, 20 bp, synthetic construct
  source 1..20: mol_type = other DNA
tgcacaaagtccacagcaaa

SEQ ID NO: 14377 - DNA, 20 bp, synthetic construct
  source 1..20: mol_type = other DNA
ctgcacaaagtccacagcaa

SEQ ID NO: 14378 - DNA, 20 bp, synthetic construct
  source 1..20: mol_type = other DNA
actgcacaaagtccacagca

SEQ ID NO: 14379 - DNA, 20 bp, synthetic construct
  source 1..20: mol_type = other DNA
aactgcacaaagtccacagc

SEQ ID NO: 14380 - DNA, 20 bp, synthetic construct
  source 1..20: mol_type = other DNA
taactgcacaaagtccacag

SEQ ID NO: 14381 - DNA, 20 bp, synthetic construct
  source 1..20: mol_type = other DNA
ttaactgcacaaagtccaca

SEQ ID NO: 14382 - DNA, 20 bp, synthetic construct
  source 1..20: mol_type = other DNA
gttaactgcacaaagtccac

SEQ ID NO: 14383 - DNA, 20 bp, synthetic construct
  source 1..20: mol_type = other DNA
agttaactgcacaaagtcca

SEQ ID NO: 14384 - DNA, 20 bp, synthetic construct
  source 1..20: mol_type = other DNA
tagttaactgcacaaagtcc

SEQ ID NO: 14385 - DNA, 20 bp, synthetic construct
  source 1..20: mol_type = other DNA
atagttaactgcacaaagtc

SEQ ID NO: 14386 - DNA, 20 bp, synthetic construct
  source 1..20: mol_type = other DNA
aatagttaactgcacaaagt

SEQ ID NO: 14387 - DNA, 20 bp, synthetic construct
  source 1..20: mol_type = other DNA
aaatagttaactgcacaaag

SEQ ID NO: 14388 - DNA, 20 bp, synthetic construct
  source 1..20: mol_type = other DNA
aaaatagttaactgcacaaa

SEQ ID NO: 14389 - DNA, 20 bp, synthetic construct
  source 1..20: mol_type = other DNA
gaaaatagttaactgcacaa

SEQ ID NO: 14390 - DNA, 20 bp, synthetic construct
  source 1..20: mol_type = other DNA
tgaaaatagttaactgcaca

SEQ ID NO: 14391 - DNA, 20 bp, synthetic construct
  source 1..20: mol_type = other DNA
atgaaaatagttaactgcac

SEQ ID NO: 14392 - DNA, 20 bp, synthetic construct
  source 1..20: mol_type = other DNA
aatgaaaatagttaactgca

SEQ ID NO: 14393 - DNA, 20 bp, synthetic construct
  source 1..20: mol_type = other DNA
gaatgaaaatagttaactgc

SEQ ID NO: 14394 - DNA, 20 bp, synthetic construct
  source 1..20: mol_type = other DNA
ggaatgaaaatagttaactg

SEQ ID NO: 14395 - DNA, 20 bp, synthetic construct
  source 1..20: mol_type = other DNA
aggaatgaaaatagttaact

SEQ ID NO: 14396 - DNA, 20 bp, synthetic construct
  source 1..20: mol_type = other DNA
caggaatgaaaatagttaac

SEQ ID NO: 14397 - DNA, 20 bp, synthetic construct
  source 1..20: mol_type = other DNA
tcaggaatgaaaatagttaa

SEQ ID NO: 14398 - DNA, 20 bp, synthetic construct
  source 1..20: mol_type = other DNA
ttcaggaatgaaaatagtta

SEQ ID NO: 14399 - DNA, 20 bp, synthetic construct
  source 1..20: mol_type = other DNA
tttcaggaatgaaaatagtt

SEQ ID NO: 14400 - DNA, 20 bp, synthetic construct
  source 1..20: mol_type = other DNA
gtttcaggaatgaaaatagt

SEQ ID NO: 14401 - DNA, 20 bp, synthetic construct
  source 1..20: mol_type = other DNA
tgtttcaggaatgaaaatag

SEQ ID NO: 14402 - DNA, 20 bp, synthetic construct
  source 1..20: mol_type = other DNA
gtgtttcaggaatgaaaata

SEQ ID NO: 14403 - DNA, 20 bp, synthetic construct
  source 1..20: mol_type = other DNA
tgtgtttcaggaatgaaaat

SEQ ID NO: 14404 - DNA, 20 bp, synthetic construct
  source 1..20: mol_type = other DNA
atgtgtttcaggaatgaaaa

SEQ ID NO: 14405 - DNA, 20 bp, synthetic construct
  source 1..20: mol_type = other DNA
aatgtgtttcaggaatgaaa

SEQ ID NO: 14406 - DNA, 20 bp, synthetic construct
  source 1..20: mol_type = other DNA
aaatgtgtttcaggaatgaa

SEQ ID NO: 14407 - DNA, 20 bp, synthetic construct
  source 1..20: mol_type = other DNA
gaaatgtgtttcaggaatga

SEQ ID NO: 14408 - DNA, 20 bp, synthetic construct
  source 1..20: mol_type = other DNA
cgaaatgtgtttcaggaatg

SEQ ID NO: 14409 - DNA, 20 bp, synthetic construct
  source 1..20: mol_type = other DNA
tcgaaatgtgtttcaggaat

SEQ ID NO: 14410 - DNA, 20 bp, synthetic construct
  source 1..20: mol_type = other DNA
ttcgaaatgtgtttcaggaa

SEQ ID NO: 14411 - DNA, 20 bp, synthetic construct
  source 1..20: mol_type = other DNA
tttcgaaatgtgtttcagga

SEQ ID NO: 14412 - DNA, 20 bp, synthetic construct
  source 1..20: mol_type = other DNA
atttcgaaatgtgtttcagg

SEQ ID NO: 14413 - DNA, 20 bp, synthetic construct
  source 1..20: mol_type = other DNA
gatttcgaaatgtgtttcag

SEQ ID NO: 14414 - DNA, 20 bp, synthetic construct
  source 1..20: mol_type = other DNA
tgatttcgaaatgtgtttca

SEQ ID NO: 14415 - DNA, 20 bp, synthetic construct
  source 1..20: mol_type = other DNA
ctgatttcgaaatgtgtttc

SEQ ID NO: 14416 - DNA, 20 bp, synthetic construct
  source 1..20: mol_type = other DNA
cctgatttcgaaatgtgttt

SEQ ID NO: 14417 - DNA, 20 bp, synthetic construct
  source 1..20: mol_type = other DNA
tcctgatttcgaaatgtgtt

SEQ ID NO: 14418 - DNA, 20 bp, synthetic construct
  source 1..20: mol_type = other DNA
ttcctgatttcgaaatgtgt

SEQ ID NO: 14419 - DNA, 20 bp, synthetic construct
  source 1..20: mol_type = other DNA
attcctgatttcgaaatgtg

SEQ ID NO: 14420 - DNA, 20 bp, synthetic construct
  source 1..20: mol_type = other DNA
aattcctgatttcgaaatgt

SEQ ID NO: 14421 - DNA, 20 bp, synthetic construct
  source 1..20: mol_type = other DNA
caattcctgatttcgaaatg

SEQ ID NO: 14422 - DNA, 20 bp, synthetic construct
  source 1..20: mol_type = other DNA
tcaattcctgatttcgaaat

SEQ ID NO: 14423 - DNA, 20 bp, synthetic construct
  source 1..20: mol_type = other DNA
ttcaattcctgatttcgaaa

SEQ ID NO: 14424 - DNA, 20 bp, synthetic construct
  source 1..20: mol_type = other DNA
cttcaattcctgatttcgaa

SEQ ID NO: 14425 - DNA, 20 bp, synthetic construct
  source 1..20: mol_type = other DNA
tcttcaattcctgatttcga

SEQ ID NO: 14426 - DNA, 20 bp, synthetic construct
  source 1..20: mol_type = other DNA
gtcttcaattcctgatttcg

SEQ ID NO: 14427 - DNA, 20 bp, synthetic construct
  source 1..20: mol_type = other DNA
agtcttcaattcctgatttc

SEQ ID NO: 14428 - DNA, 20 bp, synthetic construct
  source 1..20: mol_type = other DNA
tagtcttcaattcctgattt

SEQ ID NO: 14429 - DNA, 20 bp, synthetic construct
  source 1..20: mol_type = other DNA
ttagtcttcaattcctgatt

SEQ ID NO: 14430 - DNA, 20 bp, synthetic construct
  source 1..20: mol_type = other DNA
tttagtcttcaattcctgat

SEQ ID NO: 14431 - DNA, 20 bp, synthetic construct
  source 1..20: mol_type = other DNA
atttagtcttcaattcctga

SEQ ID NO: 14432 - DNA, 20 bp, synthetic construct
  source 1..20: mol_type = other DNA
catttagtcttcaattcctg

SEQ ID NO: 14433 - DNA, 20 bp, synthetic construct
  source 1..20: mol_type = other DNA
acatttagtcttcaattcct

SEQ ID NO: 14434 - DNA, 20 bp, synthetic construct
  source 1..20: mol_type = other DNA
gacatttagtcttcaattcc

SEQ ID NO: 14435 - DNA, 20 bp, synthetic construct
  source 1..20: mol_type = other DNA
agacatttagtcttcaattc

SEQ ID NO: 14436 - DNA, 20 bp, synthetic construct
  source 1..20: mol_type = other DNA
aagacatttagtcttcaatt

SEQ ID NO: 14437 - DNA, 20 bp, synthetic construct
  source 1..20: mol_type = other DNA
aaagacatttagtcttcaat

SEQ ID NO: 14438 - DNA, 20 bp, synthetic construct
  source 1..20: mol_type = other DNA
aaaagacatttagtcttcaa

SEQ ID NO: 14439 - DNA, 20 bp, synthetic construct
  source 1..20: mol_type = other DNA
gaaaagacatttagtcttca

SEQ ID NO: 14440 - DNA, 20 bp, synthetic construct
  source 1..20: mol_type = other DNA
tgaaaagacatttagtcttc

SEQ ID NO: 14441 - DNA, 20 bp, synthetic construct
  source 1..20: mol_type = other DNA
gtgaaaagacatttagtctt

SEQ ID NO: 14442 - DNA, 20 bp, synthetic construct
  source 1..20: mol_type = other DNA
agtgaaaagacatttagtct

SEQ ID NO: 14443 - DNA, 20 bp, synthetic construct
  source 1..20: mol_type = other DNA
cagtgaaaagacatttagtc

SEQ ID NO: 14444 - DNA, 20 bp, synthetic construct
  source 1..20: mol_type = other DNA
tcagtgaaaagacatttagt

SEQ ID NO: 14445 - DNA, 20 bp, synthetic construct
  source 1..20: mol_type = other DNA
ttcagtgaaaagacatttag

SEQ ID NO: 14446 - DNA, 20 bp, synthetic construct
  source 1..20: mol_type = other DNA
cttcagtgaaaagacattta

SEQ ID NO: 14447 - DNA, 20 bp, synthetic construct
  source 1..20: mol_type = other DNA
gcttcagtgaaaagacattt

SEQ ID NO: 14448 - DNA, 20 bp, synthetic construct
  source 1..20: mol_type = other DNA
agcttcagtgaaaagacatt

SEQ ID NO: 14449 - DNA, 20 bp, synthetic construct
  source 1..20: mol_type = other DNA
aagcttcagtgaaaagacat

SEQ ID NO: 14450 - DNA, 20 bp, synthetic construct
  source 1..20: mol_type = other DNA
caagcttcagtgaaaagaca

SEQ ID NO: 14451 - DNA, 20 bp, synthetic construct
  source 1..20: mol_type = other DNA
tcaagcttcagtgaaaagac

SEQ ID NO: 14452 - DNA, 20 bp, synthetic construct
  source 1..20: mol_type = other DNA
ctcaagcttcagtgaaaaga

SEQ ID NO: 14453 - DNA, 20 bp, synthetic construct
  source 1..20: mol_type = other DNA
gctcaagcttcagtgaaaag

SEQ ID NO: 14454 - DNA, 20 bp, synthetic construct
  source 1..20: mol_type = other DNA
tgctcaagcttcagtgaaaa

SEQ ID NO: 14455 - DNA, 20 bp, synthetic construct
  source 1..20: mol_type = other DNA
ctgctcaagcttcagtgaaa

SEQ ID NO: 14456 - DNA, 20 bp, synthetic construct
  source 1..20: mol_type = other DNA
tctgctcaagcttcagtgaa

SEQ ID NO: 14457 - DNA, 20 bp, synthetic construct
  source 1..20: mol_type = other DNA
atctgctcaagcttcagtga

SEQ ID NO: 14458 - DNA, 20 bp, synthetic construct
  source 1..20: mol_type = other DNA
aatctgctcaagcttcagtg

SEQ ID NO: 14459 - DNA, 20 bp, synthetic construct
  source 1..20: mol_type = other DNA
aaatctgctcaagcttcagt

SEQ ID NO: 14460 - DNA, 20 bp, synthetic construct
  source 1..20: mol_type = other DNA
aaaatctgctcaagcttcag

SEQ ID NO: 14461 - DNA, 20 bp, synthetic construct
  source 1..20: mol_type = other DNA
taaaatctgctcaagcttca

SEQ ID NO: 14462 - DNA, 20 bp, synthetic construct
  source 1..20: mol_type = other DNA
ctaaaatctgctcaagcttc

SEQ ID NO: 14463 - DNA, 20 bp, synthetic construct
  source 1..20: mol_type = other DNA
tctaaaatctgctcaagctt

SEQ ID NO: 14464 - DNA, 20 bp, synthetic construct
  source 1..20: mol_type = other DNA
ttctaaaatctgctcaagct

SEQ ID NO: 14465 - DNA, 20 bp, synthetic construct
  source 1..20: mol_type = other DNA
tttctaaaatctgctcaagc

SEQ ID NO: 14466 - DNA, 20 bp, synthetic construct
  source 1..20: mol_type = other DNA
ctttctaaaatctgctcaag

SEQ ID NO: 14467 - DNA, 20 bp, synthetic construct
  source 1..20: mol_type = other DNA
cctttctaaaatctgctcaa

SEQ ID NO: 14468 - DNA, 20 bp, synthetic construct
  source 1..20: mol_type = other DNA
ccctttctaaaatctgctca

SEQ ID NO: 14469 - DNA, 20 bp, synthetic construct
  source 1..20: mol_type = other DNA
cccctttctaaaatctgctc

SEQ ID NO: 14470 - DNA, 20 bp, synthetic construct
  source 1..20: mol_type = other DNA
tcccctttctaaaatctgct

SEQ ID NO: 14471 - DNA, 20 bp, synthetic construct
  source 1..20: mol_type = other DNA
ctcccctttctaaaatctgc

SEQ ID NO: 14472 - DNA, 20 bp, synthetic construct
  source 1..20: mol_type = other DNA
actcccctttctaaaatctg

SEQ ID NO: 14473 - DNA, 20 bp, synthetic construct
  source 1..20: mol_type = other DNA
aactcccctttctaaaatct

SEQ ID NO: 14474 - DNA, 20 bp, synthetic construct
  source 1..20: mol_type = other DNA
gaactcccctttctaaaatc

SEQ ID NO: 14475 - DNA, 20 bp, synthetic construct
  source 1..20: mol_type = other DNA
agaactcccctttctaaaat

SEQ ID NO: 14476 - DNA, 20 bp, synthetic construct
  source 1..20: mol_type = other DNA
aagaactcccctttctaaaa

SEQ ID NO: 14477 - DNA, 20 bp, synthetic construct
  source 1..20: mol_type = other DNA
aaagaactcccctttctaaa

SEQ ID NO: 14478 - DNA, 20 bp, synthetic construct
  source 1..20: mol_type = other DNA
aaaagaactcccctttctaa

SEQ ID NO: 14479 - DNA, 20 bp, synthetic construct
  source 1..20: mol_type = other DNA
aaaaagaactcccctttcta

SEQ ID NO: 14480 - DNA, 20 bp, synthetic construct
  source 1..20: mol_type = other DNA
aaaaaagaactcccctttct

SEQ ID NO: 14481 - DNA, 20 bp, synthetic construct
  source 1..20: mol_type = other DNA
aaaaaaagaactcccctttc

SEQ ID NO: 14482 - DNA, 20 bp, synthetic construct
  source 1..20: mol_type = other DNA
aaaaaaaagaactccccttt

SEQ ID NO: 14483 - DNA, 20 bp, synthetic construct
  source 1..20: mol_type = other DNA
aaaaaaaaagaactcccctt

SEQ ID NO: 14484 - DNA, 20 bp, synthetic construct
  source 1..20: mol_type = other DNA
aaaaaaaaaagaactcccct

SEQ ID NO: 14485 - DNA, 20 bp, synthetic construct
  source 1..20: mol_type = other DNA
aaaaaaaaaaagaactcccc

SEQ ID NO: 14486 - DNA, 20 bp, synthetic construct
  source 1..20: mol_type = other DNA
aaaaaaaaaaaagaactccc

SEQ ID NO: 14487 - DNA, 20 bp, synthetic construct
  source 1..20: mol_type = other DNA
aaaaaaaaaaaaagaactcc

SEQ ID NO: 14488 - DNA, 20 bp, synthetic construct
  source 1..20: mol_type = other DNA
aaaaaaaaaaaaaagaactc

SEQ ID NO: 14489 - DNA, 20 bp, synthetic construct
  source 1..20: mol_type = other DNA
aaaaaaaaaaaaaaagaact

SEQ ID NO: 14490 - DNA, 20 bp, synthetic construct
  source 1..20: mol_type = other DNA
aaaaaaaaaaaaaaaagaac

SEQ ID NO: 14491 - DNA, 20 bp, synthetic construct
  source 1..20: mol_type = other DNA
aaaaaaaaaaaaaaaaagaa

SEQ ID NO: 14492 - DNA, 20 bp, synthetic construct
  source 1..20: mol_type = other DNA
aaaaaaaaaaaaaaaaaaga

SEQ ID NO: 14493 - DNA, 20 bp, synthetic construct
  source 1..20: mol_type = other DNA
aaaaaaaaaaaaaaaaaaag

SEQ ID NO: 14494 - DNA, 20 bp, synthetic construct
  source 1..20: mol_type = other DNA
aaaaaaaaaaaaaaaaaaaa

SEQ ID NO: 14495 - DNA, 20 bp, synthetic construct
  source 1..20: mol_type = other DNA
caaaaaaaaaaaaaaaaaaa

SEQ ID NO: 14496 - DNA, 20 bp, synthetic construct
  source 1..20: mol_type = other DNA
ccaaaaaaaaaaaaaaaaaa

SEQ ID NO: 14497 - DNA, 20 bp, synthetic construct
  source 1..20: mol_type = other DNA
accaaaaaaaaaaaaaaaaa

SEQ ID NO: 14498 - DNA, 20 bp, synthetic construct
  source 1..20: mol_type = other DNA
taccaaaaaaaaaaaaaaaa

SEQ ID NO: 14499 - DNA, 20 bp, synthetic construct
  source 1..20: mol_type = other DNA
ctaccaaaaaaaaaaaaaaa

SEQ ID NO: 14500 - DNA, 20 bp, synthetic construct
  source 1..20: mol_type = other DNA
tctaccaaaaaaaaaaaaaa

SEQ ID NO: 14501 - DNA, 20 bp, synthetic construct
  source 1..20: mol_type = other DNA
ttctaccaaaaaaaaaaaaa

SEQ ID NO: 14502 - DNA, 20 bp, synthetic construct
  source 1..20: mol_type = other DNA
tttctaccaaaaaaaaaaaa

SEQ ID NO: 14503 - DNA, 20 bp, synthetic construct
  source 1..20: mol_type = other DNA
atttctaccaaaaaaaaaaa

SEQ ID NO: 14504 - DNA, 20 bp, synthetic construct
  source 1..20: mol_type = other DNA
catttctaccaaaaaaaaaa

SEQ ID NO: 14505 - DNA, 20 bp, synthetic construct
  source 1..20: mol_type = other DNA
ccatttctaccaaaaaaaaa

SEQ ID NO: 14506 - DNA, 20 bp, synthetic construct
  source 1..20: mol_type = other DNA
cccatttctaccaaaaaaaa

SEQ ID NO: 14507 - DNA, 20 bp, synthetic construct
  source 1..20: mol_type = other DNA
ccccatttctaccaaaaaaa

SEQ ID NO: 14508 - DNA, 20 bp, synthetic construct
  source 1..20: mol_type = other DNA
cccccatttctaccaaaaaa

SEQ ID NO: 14509 - DNA, 20 bp, synthetic construct
  source 1..20: mol_type = other DNA
acccccatttctaccaaaaa

SEQ ID NO: 14510 - DNA, 20 bp, synthetic construct
  source 1..20: mol_type = other DNA
gacccccatttctaccaaaa

SEQ ID NO: 14511 - DNA, 20 bp, synthetic construct
  source 1..20: mol_type = other DNA
agacccccatttctaccaaa

SEQ ID NO: 14512 - DNA, 20 bp, synthetic construct
  source 1..20: mol_type = other DNA
aagacccccatttctaccaa

SEQ ID NO: 14513 - DNA, 20 bp, synthetic construct
  source 1..20: mol_type = other DNA
caagacccccatttctacca

SEQ ID NO: 14514 - DNA, 20 bp, synthetic construct
  source 1..20: mol_type = other DNA
acaagacccccatttctacc

SEQ ID NO: 14515 - DNA, 20 bp, synthetic construct
  source 1..20: mol_type = other DNA
aacaagacccccatttctac

SEQ ID NO: 14516 - DNA, 20 bp, synthetic construct
  source 1..20: mol_type = other DNA
taacaagacccccatttcta

SEQ ID NO: 14517 - DNA, 20 bp, synthetic construct
  source 1..20: mol_type = other DNA
ataacaagacccccatttct

SEQ ID NO: 14518 - DNA, 20 bp, synthetic construct
  source 1..20: mol_type = other DNA
cataacaagacccccatttc

SEQ ID NO: 14519 - DNA, 20 bp, synthetic construct
  source 1..20: mol_type = other DNA
acataacaagacccccattt

SEQ ID NO: 14520 - DNA, 20 bp, synthetic construct
  source 1..20: mol_type = other DNA
aacataacaagacccccatt

SEQ ID NO: 14521 - DNA, 20 bp, synthetic construct
  source 1..20: mol_type = other DNA
caacataacaagacccccat

SEQ ID NO: 14522 - DNA, 20 bp, synthetic construct
  source 1..20: mol_type = other DNA
gcaacataacaagaccccca

SEQ ID NO: 14523 - DNA, 20 bp, synthetic construct
  source 1..20: mol_type = other DNA
ggcaacataacaagaccccc

SEQ ID NO: 14524 - DNA, 20 bp, synthetic construct
  source 1..20: mol_type = other DNA
gggcaacataacaagacccc

SEQ ID NO: 14525 - DNA, 20 bp, synthetic construct
  source 1..20: mol_type = other DNA
tgggcaacataacaagaccc

SEQ ID NO: 14526 - DNA, 20 bp, synthetic construct
  source 1..20: mol_type = other DNA
ctgggcaacataacaagacc

SEQ ID NO: 14527 - DNA, 20 bp, synthetic construct
  source 1..20: mol_type = other DNA
cctgggcaacataacaagac

SEQ ID NO: 14528 - DNA, 20 bp, synthetic construct
  source 1..20: mol_type = other DNA
gcctgggcaacataacaaga

SEQ ID NO: 14529 - DNA, 20 bp, synthetic construct
  source 1..20: mol_type = other DNA
agcctgggcaacataacaag

SEQ ID NO: 14530 - DNA, 20 bp, synthetic construct
  source 1..20: mol_type = other DNA
cagcctgggcaacataacaa

SEQ ID NO: 14531 - DNA, 20 bp, synthetic construct
  source 1..20: mol_type = other DNA
ccagcctgggcaacataaca

SEQ ID NO: 14532 - DNA, 20 bp, synthetic construct
  source 1..20: mol_type = other DNA
gccagcctgggcaacataac

SEQ ID NO: 14533 - DNA, 20 bp, synthetic construct
  source 1..20: mol_type = other DNA
ggccagcctgggcaacataa

SEQ ID NO: 14534 - DNA, 20 bp, synthetic construct
  source 1..20: mol_type = other DNA
aggccagcctgggcaacata

SEQ ID NO: 14535 - DNA, 20 bp, synthetic construct
  source 1..20: mol_type = other DNA
gaggccagcctgggcaacat

SEQ ID NO: 14536 - DNA, 20 bp, synthetic construct
  source 1..20: mol_type = other DNA
ggaggccagcctgggcaaca

SEQ ID NO: 14537 - DNA, 20 bp, synthetic construct
  source 1..20: mol_type = other DNA
tggaggccagcctgggcaac

SEQ ID NO: 14538 - DNA, 20 bp, synthetic construct
  source 1..20: mol_type = other DNA
ttggaggccagcctgggcaa

SEQ ID NO: 14539 - DNA, 20 bp, synthetic construct
  source 1..20: mol_type = other DNA
gttggaggccagcctgggca

SEQ ID NO: 14540 - DNA, 20 bp, synthetic construct
  source 1..20: mol_type = other DNA
agttggaggccagcctgggc

SEQ ID NO: 14541 - DNA, 20 bp, synthetic construct
  source 1..20: mol_type = other DNA
aagttggaggccagcctggg

SEQ ID NO: 14542 - DNA, 20 bp, synthetic construct
  source 1..20: mol_type = other DNA
gaagttggaggccagcctgg

SEQ ID NO: 14543 - DNA, 20 bp, synthetic construct
  source 1..20: mol_type = other DNA
agaagttggaggccagcctg

SEQ ID NO: 14544 - DNA, 20 bp, synthetic construct
  source 1..20: mol_type = other DNA
cagaagttggaggccagcct

SEQ ID NO: 14545 - DNA, 20 bp, synthetic construct
  source 1..20: mol_type = other DNA
ccagaagttggaggccagcc

SEQ ID NO: 14546 - DNA, 20 bp, synthetic construct
  source 1..20: mol_type = other DNA
cccagaagttggaggccagc

SEQ ID NO: 14547 - DNA, 20 bp, synthetic construct
  source 1..20: mol_type = other DNA
gcccagaagttggaggccag

SEQ ID NO: 14548 - DNA, 20 bp, synthetic construct
  source 1..20: mol_type = other DNA
agcccagaagttggaggcca

SEQ ID NO: 14549 - DNA, 20 bp, synthetic construct
  source 1..20: mol_type = other DNA
aagcccagaagttggaggcc

SEQ ID NO: 14550 - DNA, 20 bp, synthetic construct
  source 1..20: mol_type = other DNA
taagcccagaagttggaggc

SEQ ID NO: 14551 - DNA, 20 bp, synthetic construct
  source 1..20: mol_type = other DNA
ttaagcccagaagttggagg

SEQ ID NO: 14552 - DNA, 20 bp, synthetic construct
  source 1..20: mol_type = other DNA
tttaagcccagaagttggag

SEQ ID NO: 14553 - DNA, 20 bp, synthetic construct
  source 1..20: mol_type = other DNA
gtttaagcccagaagttgga

SEQ ID NO: 14554 - DNA, 20 bp, synthetic construct
  source 1..20: mol_type = other DNA
agtttaagcccagaagttgg

SEQ ID NO: 14555 - DNA, 20 bp, synthetic construct
  source 1..20: mol_type = other DNA
cagtttaagcccagaagttg

SEQ ID NO: 14556 - DNA, 20 bp, synthetic construct
  source 1..20: mol_type = other DNA
acagtttaagcccagaagtt

SEQ ID NO: 14557 - DNA, 20 bp, synthetic construct
  source 1..20: mol_type = other DNA
gacagtttaagcccagaagt

SEQ ID NO: 14558 - DNA, 20 bp, synthetic construct
  source 1..20: mol_type = other DNA
ggacagtttaagcccagaag

SEQ ID NO: 14559 - DNA, 20 bp, synthetic construct
  source 1..20: mol_type = other DNA
aggacagtttaagcccagaa

SEQ ID NO: 14560 - DNA, 20 bp, synthetic construct
  source 1..20: mol_type = other DNA
gaggacagtttaagcccaga

SEQ ID NO: 14561 - DNA, 20 bp, synthetic construct
  source 1..20: mol_type = other DNA
ggaggacagtttaagcccag

SEQ ID NO: 14562 - DNA, 20 bp, synthetic construct
  source 1..20: mol_type = other DNA
aggaggacagtttaagccca

SEQ ID NO: 14563 - DNA, 20 bp, synthetic construct
  source 1..20: mol_type = other DNA
caggaggacagtttaagccc

SEQ ID NO: 14564 - DNA, 20 bp, synthetic construct
  source 1..20: mol_type = other DNA
gcaggaggacagtttaagcc

SEQ ID NO: 14565 - DNA, 20 bp, synthetic construct
  source 1..20: mol_type = other DNA
agcaggaggacagtttaagc

SEQ ID NO: 14566 - DNA, 20 bp, synthetic construct
  source 1..20: mol_type = other DNA
aagcaggaggacagtttaag

SEQ ID NO: 14567 - DNA, 20 bp, synthetic construct
  source 1..20: mol_type = other DNA
aaagcaggaggacagtttaa

SEQ ID NO: 14568 - DNA, 20 bp, synthetic construct
  source 1..20: mol_type = other DNA
taaagcaggaggacagttta

SEQ ID NO: 14569 - DNA, 20 bp, synthetic construct
  source 1..20: mol_type = other DNA
ctaaagcaggaggacagttt

SEQ ID NO: 14570 - DNA, 20 bp, synthetic construct
  source 1..20: mol_type = other DNA
gctaaagcaggaggacagtt

SEQ ID NO: 14571 - DNA, 20 bp, synthetic construct
  source 1..20: mol_type = other DNA
ggctaaagcaggaggacagt

SEQ ID NO: 14572 - DNA, 20 bp, synthetic construct
  source 1..20: mol_type = other DNA
aggctaaagcaggaggacag

SEQ ID NO: 14573 - DNA, 20 bp, synthetic construct
  source 1..20: mol_type = other DNA
gaggctaaagcaggaggaca

SEQ ID NO: 14574 - DNA, 20 bp, synthetic construct
  source 1..20: mol_type = other DNA
agaggctaaagcaggaggac

SEQ ID NO: 14575 - DNA, 20 bp, synthetic construct
  source 1..20: mol_type = other DNA
cagaggctaaagcaggagga

SEQ ID NO: 14576 - DNA, 20 bp, synthetic construct
  source 1..20: mol_type = other DNA
ccagaggctaaagcaggagg

SEQ ID NO: 14577 - DNA, 20 bp, synthetic construct
  source 1..20: mol_type = other DNA
accagaggctaaagcaggag

SEQ ID NO: 14578 - DNA, 20 bp, synthetic construct
  source 1..20: mol_type = other DNA
gaccagaggctaaagcagga

SEQ ID NO: 14579 - DNA, 20 bp, synthetic construct
  source 1..20: mol_type = other DNA
agaccagaggctaaagcagg

SEQ ID NO: 14580 - DNA, 20 bp, synthetic construct
  source 1..20: mol_type = other DNA
cagaccagaggctaaagcag

SEQ ID NO: 14581 - DNA, 20 bp, synthetic construct
  source 1..20: mol_type = other DNA
ccagaccagaggctaaagca

SEQ ID NO: 14582 - DNA, 20 bp, synthetic construct
  source 1..20: mol_type = other DNA
tccagaccagaggctaaagc

SEQ ID NO: 14583 - DNA, 20 bp, synthetic construct
  source 1..20: mol_type = other DNA
ctccagaccagaggctaaag

SEQ ID NO: 14584 - DNA, 20 bp, synthetic construct
  source 1..20: mol_type = other DNA
tctccagaccagaggctaaa

SEQ ID NO: 14585 - DNA, 20 bp, synthetic construct
  source 1..20: mol_type = other DNA
ctctccagaccagaggctaa

SEQ ID NO: 14586 - DNA, 20 bp, synthetic construct
  source 1..20: mol_type = other DNA
actctccagaccagaggcta

SEQ ID NO: 14587 - DNA, 20 bp, synthetic construct
  source 1..20: mol_type = other DNA
aactctccagaccagaggct

SEQ ID NO: 14588 - DNA, 20 bp, synthetic construct
  source 1..20: mol_type = other DNA
gaactctccagaccagaggc

SEQ ID NO: 14589 - DNA, 20 bp, synthetic construct
  source 1..20: mol_type = other DNA
agaactctccagaccagagg

SEQ ID NO: 14590 - DNA, 20 bp, synthetic construct
  source 1..20: mol_type = other DNA
aagaactctccagaccagag

SEQ ID NO: 14591 - DNA, 20 bp, synthetic construct
  source 1..20: mol_type = other DNA
aaagaactctccagaccaga

SEQ ID NO: 14592 - DNA, 20 bp, synthetic construct
  source 1..20: mol_type = other DNA
taaagaactctccagaccag

SEQ ID NO: 14593 - DNA, 20 bp, synthetic construct
  source 1..20: mol_type = other DNA
ataaagaactctccagacca

SEQ ID NO: 14594 - DNA, 20 bp, synthetic construct
  source 1..20: mol_type = other DNA
cataaagaactctccagacc

SEQ ID NO: 14595 - DNA, 20 bp, synthetic construct
  source 1..20: mol_type = other DNA
ccataaagaactctccagac

SEQ ID NO: 14596 - DNA, 20 bp, synthetic construct
  source 1..20: mol_type = other DNA
gccataaagaactctccaga

SEQ ID NO: 14597 - DNA, 20 bp, synthetic construct
  source 1..20: mol_type = other DNA
ggccataaagaactctccag

SEQ ID NO: 14598 - DNA, 20 bp, synthetic construct
  source 1..20: mol_type = other DNA
aggccataaagaactctcca

SEQ ID NO: 14599 - DNA, 20 bp, synthetic construct
  source 1..20: mol_type = other DNA
gaggccataaagaactctcc

SEQ ID NO: 14600 - DNA, 20 bp, synthetic construct
  source 1..20: mol_type = other DNA
agaggccataaagaactctc

SEQ ID NO: 14601 - DNA, 20 bp, synthetic construct
  source 1..20: mol_type = other DNA
aagaggccataaagaactct

SEQ ID NO: 14602 - DNA, 20 bp, synthetic construct
  source 1..20: mol_type = other DNA
aaagaggccataaagaactc

SEQ ID NO: 14603 - DNA, 20 bp, synthetic construct
  source 1..20: mol_type = other DNA
caaagaggccataaagaact

SEQ ID NO: 14604 - DNA, 20 bp, synthetic construct
  source 1..20: mol_type = other DNA
tcaaagaggccataaagaac

SEQ ID NO: 14605 - DNA, 20 bp, synthetic construct
  source 1..20: mol_type = other DNA
ctcaaagaggccataaagaa

SEQ ID NO: 14606 - DNA, 20 bp, synthetic construct
  source 1..20: mol_type = other DNA
tctcaaagaggccataaaga

SEQ ID NO: 14607 - DNA, 20 bp, synthetic construct
  source 1..20: mol_type = other DNA
ttctcaaagaggccataaag

SEQ ID NO: 14608 - DNA, 20 bp, synthetic construct
  source 1..20: mol_type = other DNA
gttctcaaagaggccataaa

SEQ ID NO: 14609 - DNA, 20 bp, synthetic construct
  source 1..20: mol_type = other DNA
agttctcaaagaggccataa

SEQ ID NO: 14610 - DNA, 20 bp, synthetic construct
  source 1..20: mol_type = other DNA
aagttctcaaagaggccata

SEQ ID NO: 14611 - DNA, 20 bp, synthetic construct
  source 1..20: mol_type = other DNA
aaagttctcaaagaggccat

SEQ ID NO: 14612 - DNA, 20 bp, synthetic construct
  source 1..20: mol_type = other DNA
aaaagttctcaaagaggcca

SEQ ID NO: 14613 - DNA, 20 bp, synthetic construct
  source 1..20: mol_type = other DNA
taaaagttctcaaagaggcc

SEQ ID NO: 14614 - DNA, 20 bp, synthetic construct
  source 1..20: mol_type = other DNA
gtaaaagttctcaaagaggc

SEQ ID NO: 14615 - DNA, 20 bp, synthetic construct
  source 1..20: mol_type = other DNA
agtaaaagttctcaaagagg

SEQ ID NO: 14616 - DNA, 20 bp, synthetic construct
  source 1..20: mol_type = other DNA
aagtaaaagttctcaaagag

SEQ ID NO: 14617 - DNA, 20 bp, synthetic construct
  source 1..20: mol_type = other DNA
aaagtaaaagttctcaaaga

SEQ ID NO: 14618 - DNA, 20 bp, synthetic construct
  source 1..20: mol_type = other DNA
taaagtaaaagttctcaaag

SEQ ID NO: 14619 - DNA, 20 bp, synthetic construct
  source 1..20: mol_type = other DNA
gtaaagtaaaagttctcaaa

SEQ ID NO: 14620 - DNA, 20 bp, synthetic construct
  source 1..20: mol_type = other DNA
tgtaaagtaaaagttctcaa

SEQ ID NO: 14621 - DNA, 20 bp, synthetic construct
  source 1..20: mol_type = other DNA
gtgtaaagtaaaagttctca

SEQ ID NO: 14622 - DNA, 20 bp, synthetic construct
  source 1..20: mol_type = other DNA
tgtgtaaagtaaaagttctc

SEQ ID NO: 14623 - DNA, 20 bp, synthetic construct
  source 1..20: mol_type = other DNA
atgtgtaaagtaaaagttct

SEQ ID NO: 14624 - DNA, 20 bp, synthetic construct
  source 1..20: mol_type = other DNA
catgtgtaaagtaaaagttc

SEQ ID NO: 14625 - DNA, 20 bp, synthetic construct
  source 1..20: mol_type = other DNA
tcatgtgtaaagtaaaagtt

SEQ ID NO: 14626 - DNA, 20 bp, synthetic construct
  source 1..20: mol_type = other DNA
atcatgtgtaaagtaaaagt

SEQ ID NO: 14627 - DNA, 20 bp, synthetic construct
  source 1..20: mol_type = other DNA
aatcatgtgtaaagtaaaag

SEQ ID NO: 14628 - DNA, 20 bp, synthetic construct
  source 1..20: mol_type = other DNA
gaatcatgtgtaaagtaaaa

SEQ ID NO: 14629 - DNA, 20 bp, synthetic construct
  source 1..20: mol_type = other DNA
agaatcatgtgtaaagtaaa

SEQ ID NO: 14630 - DNA, 20 bp, synthetic construct
  source 1..20: mol_type = other DNA
tagaatcatgtgtaaagtaa

SEQ ID NO: 14631 - DNA, 20 bp, synthetic construct
  source 1..20: mol_type = other DNA
atagaatcatgtgtaaagta

SEQ ID NO: 14632 - DNA, 20 bp, synthetic construct
  source 1..20: mol_type = other DNA
gatagaatcatgtgtaaagt

SEQ ID NO: 14633 - DNA, 20 bp, synthetic construct
  source 1..20: mol_type = other DNA
agatagaatcatgtgtaaag

SEQ ID NO: 14634 - DNA, 20 bp, synthetic construct
  source 1..20: mol_type = other DNA
tagatagaatcatgtgtaaa

SEQ ID NO: 14635 - DNA, 20 bp, synthetic construct
  source 1..20: mol_type = other DNA
ctagatagaatcatgtgtaa

SEQ ID NO: 14636 - DNA, 20 bp, synthetic construct
  source 1..20: mol_type = other DNA
gctagatagaatcatgtgta

SEQ ID NO: 14637 - DNA, 20 bp, synthetic construct
  source 1..20: mol_type = other DNA
agctagatagaatcatgtgt

SEQ ID NO: 14638 - DNA, 20 bp, synthetic construct
  source 1..20: mol_type = other DNA
aagctagatagaatcatgtg

SEQ ID NO: 14639 - DNA, 20 bp, synthetic construct
  source 1..20: mol_type = other DNA
aaagctagatagaatcatgt

SEQ ID NO: 14640 - DNA, 20 bp, synthetic construct
  source 1..20: mol_type = other DNA
gaaagctagatagaatcatg

SEQ ID NO: 14641 - DNA, 20 bp, synthetic construct
  source 1..20: mol_type = other DNA
agaaagctagatagaatcat

SEQ ID NO: 14642 - DNA, 20 bp, synthetic construct
  source 1..20: mol_type = other DNA
aagaaagctagatagaatca

SEQ ID NO: 14643 - DNA, 20 bp, synthetic construct
  source 1..20: mol_type = other DNA
aaagaaagctagatagaatc

SEQ ID NO: 14644 - DNA, 20 bp, synthetic construct
  source 1..20: mol_type = other DNA
aaaagaaagctagatagaat

SEQ ID NO: 14645 - DNA, 20 bp, synthetic construct
  source 1..20: mol_type = other DNA
gaaaagaaagctagatagaa

SEQ ID NO: 14646 - DNA, 20 bp, synthetic construct
  source 1..20: mol_type = other DNA
agaaaagaaagctagataga

SEQ ID NO: 14647 - DNA, 20 bp, synthetic construct
  source 1..20: mol_type = other DNA
cagaaaagaaagctagatag

SEQ ID NO: 14648 - DNA, 20 bp, synthetic construct
  source 1..20: mol_type = other DNA
tcagaaaagaaagctagata

SEQ ID NO: 14649 - DNA, 20 bp, synthetic construct
  source 1..20: mol_type = other DNA
atcagaaaagaaagctagat

SEQ ID NO: 14650 - DNA, 20 bp, synthetic construct
  source 1..20: mol_type = other DNA
catcagaaaagaaagctaga

SEQ ID NO: 14651 - DNA, 20 bp, synthetic construct
  source 1..20: mol_type = other DNA
acatcagaaaagaaagctag

SEQ ID NO: 14652 - DNA, 20 bp, synthetic construct
  source 1..20: mol_type = other DNA
tacatcagaaaagaaagcta

SEQ ID NO: 14653 - DNA, 20 bp, synthetic construct
  source 1..20: mol_type = other DNA
gtacatcagaaaagaaagct

SEQ ID NO: 14654 - DNA, 20 bp, synthetic construct
  source 1..20: mol_type = other DNA
tgtacatcagaaaagaaagc

SEQ ID NO: 14655 - DNA, 20 bp, synthetic construct
  source 1..20: mol_type = other DNA
atgtacatcagaaaagaaag

SEQ ID NO: 14656 - DNA, 20 bp, synthetic construct
  source 1..20: mol_type = other DNA
tatgtacatcagaaaagaaa

SEQ ID NO: 14657 - DNA, 20 bp, synthetic construct
  source 1..20: mol_type = other DNA
atatgtacatcagaaaagaa

SEQ ID NO: 14658 - DNA, 20 bp, synthetic construct
  source 1..20: mol_type = other DNA
aatatgtacatcagaaaaga

SEQ ID NO: 14659 - DNA, 20 bp, synthetic construct
  source 1..20: mol_type = other DNA
caatatgtacatcagaaaag

SEQ ID NO: 14660 - DNA, 20 bp, synthetic construct
  source 1..20: mol_type = other DNA
ccaatatgtacatcagaaaa

SEQ ID NO: 14661 - DNA, 20 bp, synthetic construct
  source 1..20: mol_type = other DNA
gccaatatgtacatcagaaa

SEQ ID NO: 14662 - DNA, 20 bp, synthetic construct
  source 1..20: mol_type = other DNA
tgccaatatgtacatcagaa

SEQ ID NO: 14663 - DNA, 20 bp, synthetic construct
  source 1..20: mol_type = other DNA
ctgccaatatgtacatcaga

SEQ ID NO: 14664 - DNA, 20 bp, synthetic construct
  source 1..20: mol_type = other DNA
gctgccaatatgtacatcag

SEQ ID NO: 14665 - DNA, 20 bp, synthetic construct
  source 1..20: mol_type = other DNA
tgctgccaatatgtacatca

SEQ ID NO: 14666 - DNA, 20 bp, synthetic construct
  source 1..20: mol_type = other DNA
ttgctgccaatatgtacatc

SEQ ID NO: 14667 - DNA, 20 bp, synthetic construct
  source 1..20: mol_type = other DNA
cttgctgccaatatgtacat

SEQ ID NO: 14668 - DNA, 20 bp, synthetic construct
  source 1..20: mol_type = other DNA
acttgctgccaatatgtaca

SEQ ID NO: 14669 - DNA, 20 bp, synthetic construct
  source 1..20: mol_type = other DNA
tacttgctgccaatatgtac

SEQ ID NO: 14670 - DNA, 20 bp, synthetic construct
  source 1..20: mol_type = other DNA
ctacttgctgccaatatgta

SEQ ID NO: 14671 - DNA, 20 bp, synthetic construct
  source 1..20: mol_type = other DNA
tctacttgctgccaatatgt

SEQ ID NO: 14672 - DNA, 20 bp, synthetic construct
  source 1..20: mol_type = other DNA
ttctacttgctgccaatatg

SEQ ID NO: 14673 - DNA, 20 bp, synthetic construct
  source 1..20: mol_type = other DNA
tttctacttgctgccaatat

SEQ ID NO: 14674 - DNA, 20 bp, synthetic construct
  source 1..20: mol_type = other DNA
ttttctacttgctgccaata

SEQ ID NO: 14675 - DNA, 20 bp, synthetic construct
  source 1..20: mol_type = other DNA
cttttctacttgctgccaat

SEQ ID NO: 14676 - DNA, 20 bp, synthetic construct
  source 1..20: mol_type = other DNA
gcttttctacttgctgccaa

SEQ ID NO: 14677 - DNA, 20 bp, synthetic construct
  source 1..20: mol_type = other DNA
tgcttttctacttgctgcca

SEQ ID NO: 14678 - DNA, 20 bp, synthetic construct
  source 1..20: mol_type = other DNA
ttgcttttctacttgctgcc

SEQ ID NO: 14679 - DNA, 20 bp, synthetic construct
  source 1..20: mol_type = other DNA
attgcttttctacttgctgc

SEQ ID NO: 14680 - DNA, 20 bp, synthetic construct
  source 1..20: mol_type = other DNA
cattgcttttctacttgctg

SEQ ID NO: 14681 - DNA, 20 bp, synthetic construct
  source 1..20: mol_type = other DNA
acattgcttttctacttgct

SEQ ID NO: 14682 - DNA, 20 bp, synthetic construct
  source 1..20: mol_type = other DNA
aacattgcttttctacttgc

SEQ ID NO: 14683 - DNA, 20 bp, synthetic construct
  source 1..20: mol_type = other DNA
aaacattgcttttctacttg

SEQ ID NO: 14684 - DNA, 20 bp, synthetic construct
  source 1..20: mol_type = other DNA
aaaacattgcttttctactt

SEQ ID NO: 14685 - DNA, 20 bp, synthetic construct
  source 1..20: mol_type = other DNA
gaaaacattgcttttctact

SEQ ID NO: 14686 - DNA, 20 bp, synthetic construct
  source 1..20: mol_type = other DNA
tgaaaacattgcttttctac

SEQ ID NO: 14687 - DNA, 20 bp, synthetic construct
  source 1..20: mol_type = other DNA
ctgaaaacattgcttttcta

SEQ ID NO: 14688 - DNA, 20 bp, synthetic construct
  source 1..20: mol_type = other DNA
tctgaaaacattgcttttct

SEQ ID NO: 14689 - DNA, 20 bp, synthetic construct
  source 1..20: mol_type = other DNA
ctctgaaaacattgcttttc

SEQ ID NO: 14690 - DNA, 20 bp, synthetic construct
  source 1..20: mol_type = other DNA
cctctgaaaacattgctttt

SEQ ID NO: 14691 - DNA, 20 bp, synthetic construct
  source 1..20: mol_type = other DNA
gcctctgaaaacattgcttt

SEQ ID NO: 14692 - DNA, 20 bp, synthetic construct
  source 1..20: mol_type = other DNA
tgcctctgaaaacattgctt

SEQ ID NO: 14693 - DNA, 20 bp, synthetic construct
  source 1..20: mol_type = other DNA
ctgcctctgaaaacattgct

SEQ ID NO: 14694 - DNA, 20 bp, synthetic construct
  source 1..20: mol_type = other DNA
tctgcctctgaaaacattgc

SEQ ID NO: 14695 - DNA, 20 bp, synthetic construct
  source 1..20: mol_type = other DNA
atctgcctctgaaaacattg

SEQ ID NO: 14696 - DNA, 20 bp, synthetic construct
  source 1..20: mol_type = other DNA
tatctgcctctgaaaacatt

SEQ ID NO: 14697 - DNA, 20 bp, synthetic construct
  source 1..20: mol_type = other DNA
atatctgcctctgaaaacat

SEQ ID NO: 14698 - DNA, 20 bp, synthetic construct
  source 1..20: mol_type = other DNA
tatatctgcctctgaaaaca

SEQ ID NO: 14699 - DNA, 20 bp, synthetic construct
  source 1..20: mol_type = other DNA
atatatctgcctctgaaaac

SEQ ID NO: 14700 - DNA, 20 bp, synthetic construct
  source 1..20: mol_type = other DNA
aatatatctgcctctgaaaa

SEQ ID NO: 14701 - DNA, 20 bp, synthetic construct
  source 1..20: mol_type = other DNA
taatatatctgcctctgaaa

SEQ ID NO: 14702 - DNA, 20 bp, synthetic construct
  source 1..20: mol_type = other DNA
ttaatatatctgcctctgaa

SEQ ID NO: 14703 - DNA, 20 bp, synthetic construct
  source 1..20: mol_type = other DNA
gttaatatatctgcctctga

SEQ ID NO: 14704 - DNA, 20 bp, synthetic construct
  source 1..20: mol_type = other DNA
tgttaatatatctgcctctg

SEQ ID NO: 14705 - DNA, 20 bp, synthetic construct
  source 1..20: mol_type = other DNA
ctgttaatatatctgcctct

SEQ ID NO: 14706 - DNA, 20 bp, synthetic construct
  source 1..20: mol_type = other DNA
gctgttaatatatctgcctc

SEQ ID NO: 14707 - DNA, 20 bp, synthetic construct
  source 1..20: mol_type = other DNA
tgctgttaatatatctgcct

SEQ ID NO: 14708 - DNA, 20 bp, synthetic construct
  source 1..20: mol_type = other DNA
ttgctgttaatatatctgcc

SEQ ID NO: 14709 - DNA, 20 bp, synthetic construct
  source 1..20: mol_type = other DNA
attgctgttaatatatctgc

SEQ ID NO: 14710 - DNA, 20 bp, synthetic construct
  source 1..20: mol_type = other DNA
cattgctgttaatatatctg

SEQ ID NO: 14711 - DNA, 20 bp, synthetic construct
  source 1..20: mol_type = other DNA
tcattgctgttaatatatct

SEQ ID NO: 14712 - DNA, 20 bp, synthetic construct
  source 1..20: mol_type = other DNA
ctcattgctgttaatatatc

SEQ ID NO: 14713 - DNA, 20 bp, synthetic construct
  source 1..20: mol_type = other DNA
tctcattgctgttaatatat

SEQ ID NO: 14714 - DNA, 20 bp, synthetic construct
  source 1..20: mol_type = other DNA
ttctcattgctgttaatata

SEQ ID NO: 14715 - DNA, 20 bp, synthetic construct
  source 1..20: mol_type = other DNA
tttctcattgctgttaatat

SEQ ID NO: 14716 - DNA, 20 bp, synthetic construct
  source 1..20: mol_type = other DNA
atttctcattgctgttaata

SEQ ID NO: 14717 - DNA, 20 bp, synthetic construct
  source 1..20: mol_type = other DNA
tatttctcattgctgttaat

SEQ ID NO: 14718 - DNA, 20 bp, synthetic construct
  source 1..20: mol_type = other DNA
ttatttctcattgctgttaa

SEQ ID NO: 14719 - DNA, 20 bp, synthetic construct
  source 1..20: mol_type = other DNA
gttatttctcattgctgtta

SEQ ID NO: 14720 - DNA, 20 bp, synthetic construct
  source 1..20: mol_type = other DNA
tgttatttctcattgctgtt

SEQ ID NO: 14721 - DNA, 20 bp, synthetic construct
  source 1..20: mol_type = other DNA
ctgttatttctcattgctgt

SEQ ID NO: 14722 - DNA, 20 bp, synthetic construct
  source 1..20: mol_type = other DNA
actgttatttctcattgctg

SEQ ID NO: 14723 - DNA, 20 bp, synthetic construct
  source 1..20: mol_type = other DNA
tactgttatttctcattgct

SEQ ID NO: 14724 - DNA, 20 bp, synthetic construct
  source 1..20: mol_type = other DNA
ctactgttatttctcattgc

SEQ ID NO: 14725 - DNA, 20 bp, synthetic construct
  source 1..20: mol_type = other DNA
gctactgttatttctcattg

SEQ ID NO: 14726 - DNA, 20 bp, synthetic construct
  source 1..20: mol_type = other DNA
cgctactgttatttctcatt

SEQ ID NO: 14727 - DNA, 20 bp, synthetic construct
  source 1..20: mol_type = other DNA
acgctactgttatttctcat

SEQ ID NO: 14728 - DNA, 20 bp, synthetic construct
  source 1..20: mol_type = other DNA
cacgctactgttatttctca

SEQ ID NO: 14729 - DNA, 20 bp, synthetic construct
  source 1..20: mol_type = other DNA
tcacgctactgttatttctc

SEQ ID NO: 14730 - DNA, 20 bp, synthetic construct
  source 1..20: mol_type = other DNA
atcacgctactgttatttct

SEQ ID NO: 14731 - DNA, 20 bp, synthetic construct
  source 1..20: mol_type = other DNA
tatcacgctactgttatttc

SEQ ID NO: 14732 - DNA, 20 bp, synthetic construct
  source 1..20: mol_type = other DNA
ctatcacgctactgttattt

SEQ ID NO: 14733 - DNA, 20 bp, synthetic construct
  source 1..20: mol_type = other DNA
tctatcacgctactgttatt

SEQ ID NO: 14734 - DNA, 20 bp, synthetic construct
  source 1..20: mol_type = other DNA
ttctatcacgctactgttat

SEQ ID NO: 14735 - DNA, 20 bp, synthetic construct
  source 1..20: mol_type = other DNA
tttctatcacgctactgtta

SEQ ID NO: 14736 - DNA, 20 bp, synthetic construct
  source 1..20: mol_type = other DNA
ctttctatcacgctactgtt

SEQ ID NO: 14737 - DNA, 20 bp, synthetic construct
  source 1..20: mol_type = other DNA
actttctatcacgctactgt

SEQ ID NO: 14738 - DNA, 20 bp, synthetic construct
  source 1..20: mol_type = other DNA
aactttctatcacgctactg

SEQ ID NO: 14739 - DNA, 20 bp, synthetic construct
  source 1..20: mol_type = other DNA
caactttctatcacgctact

SEQ ID NO: 14740 - DNA, 20 bp, synthetic construct
  source 1..20: mol_type = other DNA
tcaactttctatcacgctac

SEQ ID NO: 14741 - DNA, 20 bp, synthetic construct
  source 1..20: mol_type = other DNA
ttcaactttctatcacgcta

SEQ ID NO: 14742 - DNA, 20 bp, synthetic construct
  source 1..20: mol_type = other DNA
tttcaactttctatcacgct

SEQ ID NO: 14743 - DNA, 20 bp, synthetic construct
  source 1..20: mol_type = other DNA
ctttcaactttctatcacgc

SEQ ID NO: 14744 - DNA, 20 bp, synthetic construct
  source 1..20: mol_type = other DNA
tctttcaactttctatcacg

SEQ ID NO: 14745 - DNA, 20 bp, synthetic construct
  source 1..20: mol_type = other DNA
gtctttcaactttctatcac

SEQ ID NO: 14746 - DNA, 20 bp, synthetic construct
  source 1..20: mol_type = other DNA
agtctttcaactttctatca

SEQ ID NO: 14747 - DNA, 20 bp, synthetic construct
  source 1..20: mol_type = other DNA
aagtctttcaactttctatc

SEQ ID NO: 14748 - DNA, 20 bp, synthetic construct
  source 1..20: mol_type = other DNA
taagtctttcaactttctat

SEQ ID NO: 14749 - DNA, 20 bp, synthetic construct
  source 1..20: mol_type = other DNA
ctaagtctttcaactttcta

SEQ ID NO: 14750 - DNA, 20 bp, synthetic construct
  source 1..20: mol_type = other DNA
gctaagtctttcaactttct

SEQ ID NO: 14751 - DNA, 20 bp, synthetic construct
  source 1..20: mol_type = other DNA
agctaagtctttcaactttc

SEQ ID NO: 14752 - DNA, 20 bp, synthetic construct
  source 1..20: mol_type = other DNA
cagctaagtctttcaacttt

SEQ ID NO: 14753 - DNA, 20 bp, synthetic construct
  source 1..20: mol_type = other DNA
ccagctaagtctttcaactt

SEQ ID NO: 14754 - DNA, 20 bp, synthetic construct
  source 1..20: mol_type = other DNA
cccagctaagtctttcaact

SEQ ID NO: 14755 - DNA, 20 bp, synthetic construct
  source 1..20: mol_type = other DNA
acccagctaagtctttcaac

SEQ ID NO: 14756 - DNA, 20 bp, synthetic construct
  source 1..20: mol_type = other DNA
cacccagctaagtctttcaa

SEQ ID NO: 14757 - DNA, 20 bp, synthetic construct
  source 1..20: mol_type = other DNA
gcacccagctaagtctttca

SEQ ID NO: 14758 - DNA, 20 bp, synthetic construct
  source 1..20: mol_type = other DNA
cgcacccagctaagtctttc

SEQ ID NO: 14759 - DNA, 20 bp, synthetic construct
  source 1..20: mol_type = other DNA
ccgcacccagctaagtcttt

SEQ ID NO: 14760 - DNA, 20 bp, synthetic construct
  source 1..20: mol_type = other DNA
accgcacccagctaagtctt

SEQ ID NO: 14761 - DNA, 20 bp, synthetic construct
  source 1..20: mol_type = other DNA
caccgcacccagctaagtct

SEQ ID NO: 14762 - DNA, 20 bp, synthetic construct
  source 1..20: mol_type = other DNA
ccaccgcacccagctaagtc

SEQ ID NO: 14763 - DNA, 20 bp, synthetic construct
  source 1..20: mol_type = other DNA
gccaccgcacccagctaagt

SEQ ID NO: 14764 - DNA, 20 bp, synthetic construct
  source 1..20: mol_type = other DNA
agccaccgcacccagctaag

SEQ ID NO: 14765 - DNA, 20 bp, synthetic construct
  source 1..20: mol_type = other DNA
gagccaccgcacccagctaa

SEQ ID NO: 14766 - DNA, 20 bp, synthetic construct
  source 1..20: mol_type = other DNA
tgagccaccgcacccagcta

SEQ ID NO: 14767 - DNA, 20 bp, synthetic construct
  source 1..20: mol_type = other DNA
gtgagccaccgcacccagct

SEQ ID NO: 14768 - DNA, 20 bp, synthetic construct
  source 1..20: mol_type = other DNA
cgtgagccaccgcacccagc

SEQ ID NO: 14769 - DNA, 20 bp, synthetic construct
  source 1..20: mol_type = other DNA
gcgtgagccaccgcacccag

SEQ ID NO: 14770 - DNA, 20 bp, synthetic construct
  source 1..20: mol_type = other DNA
agcgtgagccaccgcaccca

SEQ ID NO: 14771 - DNA, 20 bp, synthetic construct
  source 1..20: mol_type = other DNA
aagcgtgagccaccgcaccc

SEQ ID NO: 14772 - DNA, 20 bp, synthetic construct
  source 1..20: mol_type = other DNA
caagcgtgagccaccgcacc

SEQ ID NO: 14773 - DNA, 20 bp, synthetic construct
  source 1..20: mol_type = other DNA
acaagcgtgagccaccgcac

SEQ ID NO: 14774 - DNA, 20 bp, synthetic construct
  source 1..20: mol_type = other DNA
tacaagcgtgagccaccgca

SEQ ID NO: 14775 - DNA, 20 bp, synthetic construct
  source 1..20: mol_type = other DNA
ttacaagcgtgagccaccgc

SEQ ID NO: 14776 - DNA, 20 bp, synthetic construct
  source 1..20: mol_type = other DNA
attacaagcgtgagccaccg

SEQ ID NO: 14777 - DNA, 20 bp, synthetic construct
  source 1..20: mol_type = other DNA
gattacaagcgtgagccacc

SEQ ID NO: 14778 - DNA, 20 bp, synthetic construct
  source 1..20: mol_type = other DNA
ggattacaagcgtgagccac

SEQ ID NO: 14779 - DNA, 20 bp, synthetic construct
  source 1..20: mol_type = other DNA
gggattacaagcgtgagcca

SEQ ID NO: 14780 - DNA, 20 bp, synthetic construct
  source 1..20: mol_type = other DNA
tgggattacaagcgtgagcc

SEQ ID NO: 14781 - DNA, 20 bp, synthetic construct
  source 1..20: mol_type = other DNA
ctgggattacaagcgtgagc

SEQ ID NO: 14782 - DNA, 20 bp, synthetic construct
  source 1..20: mol_type = other DNA
gctgggattacaagcgtgag

SEQ ID NO: 14783 - DNA, 20 bp, synthetic construct
  source 1..20: mol_type = other DNA
tgctgggattacaagcgtga

SEQ ID NO: 14784 - DNA, 20 bp, synthetic construct
  source 1..20: mol_type = other DNA
gtgctgggattacaagcgtg

SEQ ID NO: 14785 - DNA, 20 bp, synthetic construct
  source 1..20: mol_type = other DNA
agtgctgggattacaagcgt

SEQ ID NO: 14786 - DNA, 20 bp, synthetic construct
  source 1..20: mol_type = other DNA
aagtgctgggattacaagcg

SEQ ID NO: 14787 - DNA, 20 bp, synthetic construct
  source 1..20: mol_type = other DNA
aaagtgctgggattacaagc

SEQ ID NO: 14788 - DNA, 20 bp, synthetic construct
  source 1..20: mol_type = other DNA
caaagtgctgggattacaag

SEQ ID NO: 14789 - DNA, 20 bp, synthetic construct
  source 1..20: mol_type = other DNA
ccaaagtgctgggattacaa

SEQ ID NO: 14790 - DNA, 20 bp, synthetic construct
  source 1..20: mol_type = other DNA
cccaaagtgctgggattaca

SEQ ID NO: 14791 - DNA, 20 bp, synthetic construct
  source 1..20: mol_type = other DNA
tcccaaagtgctgggattac

SEQ ID NO: 14792 - DNA, 20 bp, synthetic construct
  source 1..20: mol_type = other DNA
ctcccaaagtgctgggatta

SEQ ID NO: 14793 - DNA, 20 bp, synthetic construct
  source 1..20: mol_type = other DNA
cctcccaaagtgctgggatt

SEQ ID NO: 14794 - DNA, 20 bp, synthetic construct
  source 1..20: mol_type = other DNA
gcctcccaaagtgctgggat

SEQ ID NO: 14795 - DNA, 20 bp, synthetic construct
  source 1..20: mol_type = other DNA
ggcctcccaaagtgctggga

SEQ ID NO: 14796 - DNA, 20 bp, synthetic construct
  source 1..20: mol_type = other DNA
tggcctcccaaagtgctggg

SEQ ID NO: 14797 - DNA, 20 bp, synthetic construct
  source 1..20: mol_type = other DNA
ttggcctcccaaagtgctgg

SEQ ID NO: 14798 - DNA, 20 bp, synthetic construct
  source 1..20: mol_type = other DNA
cttggcctcccaaagtgctg

SEQ ID NO: 14799 - DNA, 20 bp, synthetic construct
  source 1..20: mol_type = other DNA
ccttggcctcccaaagtgct

SEQ ID NO: 14800 - DNA, 20 bp, synthetic construct
  source 1..20: mol_type = other DNA
tccttggcctcccaaagtgc

SEQ ID NO: 14801 - DNA, 20 bp, synthetic construct
  source 1..20: mol_type = other DNA
ctccttggcctcccaaagtg

SEQ ID NO: 14802 - DNA, 20 bp, synthetic construct
  source 1..20: mol_type = other DNA
cctccttggcctcccaaagt

SEQ ID NO: 14803 - DNA, 20 bp, synthetic construct
  source 1..20: mol_type = other DNA
ccctccttggcctcccaaag

SEQ ID NO: 14804 - DNA, 20 bp, synthetic construct
  source 1..20: mol_type = other DNA
accctccttggcctcccaaa

SEQ ID NO: 14805 - DNA, 20 bp, synthetic construct
  source 1..20: mol_type = other DNA
caccctccttggcctcccaa

SEQ ID NO: 14806 - DNA, 20 bp, synthetic construct
  source 1..20: mol_type = other DNA
ccaccctccttggcctccca

SEQ ID NO: 14807 - DNA, 20 bp, synthetic construct
  source 1..20: mol_type = other DNA
tccaccctccttggcctccc

SEQ ID NO: 14808 - DNA, 20 bp, synthetic construct
  source 1..20: mol_type = other DNA
atccaccctccttggcctcc

SEQ ID NO: 14809 - DNA, 20 bp, synthetic construct
  source 1..20: mol_type = other DNA
gatccaccctccttggcctc

SEQ ID NO: 14810 - DNA, 20 bp, synthetic construct
  source 1..20: mol_type = other DNA
tgatccaccctccttggcct

SEQ ID NO: 14811 - DNA, 20 bp, synthetic construct
  source 1..20: mol_type = other DNA
gtgatccaccctccttggcc

SEQ ID NO: 14812 - DNA, 20 bp, synthetic construct
  source 1..20: mol_type = other DNA
agtgatccaccctccttggc

SEQ ID NO: 14813 - DNA, 20 bp, synthetic construct
  source 1..20: mol_type = other DNA
aagtgatccaccctccttgg

SEQ ID NO: 14814 - DNA, 20 bp, synthetic construct
  source 1..20: mol_type = other DNA
caagtgatccaccctccttg

SEQ ID NO: 14815 - DNA, 20 bp, synthetic construct
  source 1..20: mol_type = other DNA
tcaagtgatccaccctcctt

SEQ ID NO: 14816 - DNA, 20 bp, synthetic construct
  source 1..20: mol_type = other DNA
ctcaagtgatccaccctcct

SEQ ID NO: 14817 - DNA, 20 bp, synthetic construct
  source 1..20: mol_type = other DNA
cctcaagtgatccaccctcc

SEQ ID NO: 14818 - DNA, 20 bp, synthetic construct
  source 1..20: mol_type = other DNA
acctcaagtgatccaccctc

SEQ ID NO: 14819 - DNA, 20 bp, synthetic construct
  source 1..20: mol_type = other DNA
gacctcaagtgatccaccct

SEQ ID NO: 14820 - DNA, 20 bp, synthetic construct
  source 1..20: mol_type = other DNA
tgacctcaagtgatccaccc

SEQ ID NO: 14821 - DNA, 20 bp, synthetic construct
  source 1..20: mol_type = other DNA
ctgacctcaagtgatccacc

SEQ ID NO: 14822 - DNA, 20 bp, synthetic construct
  source 1..20: mol_type = other DNA
cctgacctcaagtgatccac

SEQ ID NO: 14823 - DNA, 20 bp, synthetic construct
  source 1..20: mol_type = other DNA
tcctgacctcaagtgatcca

SEQ ID NO: 14824 - DNA, 20 bp, synthetic construct
  source 1..20: mol_type = other DNA
ctcctgacctcaagtgatcc

SEQ ID NO: 14825 - DNA, 20 bp, synthetic construct
  source 1..20: mol_type = other DNA
actcctgacctcaagtgatc

SEQ ID NO: 14826 - DNA, 20 bp, synthetic construct
  source 1..20: mol_type = other DNA
aactcctgacctcaagtgat

SEQ ID NO: 14827 - DNA, 20 bp, synthetic construct
  source 1..20: mol_type = other DNA
gaactcctgacctcaagtga

SEQ ID NO: 14828 - DNA, 20 bp, synthetic construct
  source 1..20: mol_type = other DNA
cgaactcctgacctcaagtg

SEQ ID NO: 14829 - DNA, 20 bp, synthetic construct
  source 1..20: mol_type = other DNA
tcgaactcctgacctcaagt

SEQ ID NO: 14830 - DNA, 20 bp, synthetic construct
  source 1..20: mol_type = other DNA
ctcgaactcctgacctcaag

SEQ ID NO: 14831 - DNA, 20 bp, synthetic construct
  source 1..20: mol_type = other DNA
tctcgaactcctgacctcaa

SEQ ID NO: 14832 - DNA, 20 bp, synthetic construct
  source 1..20: mol_type = other DNA
gtctcgaactcctgacctca

SEQ ID NO: 14833 - DNA, 20 bp, synthetic construct
  source 1..20: mol_type = other DNA
ggtctcgaactcctgacctc

SEQ ID NO: 14834 - DNA, 20 bp, synthetic construct
  source 1..20: mol_type = other DNA
tggtctcgaactcctgacct

SEQ ID NO: 14835 - DNA, 20 bp, synthetic construct
  source 1..20: mol_type = other DNA
ctggtctcgaactcctgacc

SEQ ID NO: 14836 - DNA, 20 bp, synthetic construct
  source 1..20: mol_type = other DNA
actggtctcgaactcctgac

SEQ ID NO: 14837 - DNA, 20 bp, synthetic construct
  source 1..20: mol_type = other DNA
gactggtctcgaactcctga

SEQ ID NO: 14838 - DNA, 20 bp, synthetic construct
  source 1..20: mol_type = other DNA
agactggtctcgaactcctg

SEQ ID NO: 14839 - DNA, 20 bp, synthetic construct
  source 1..20: mol_type = other DNA
cagactggtctcgaactcct

SEQ ID NO: 14840 - DNA, 20 bp, synthetic construct
  source 1..20: mol_type = other DNA
ccagactggtctcgaactcc

SEQ ID NO: 14841 - DNA, 20 bp, synthetic construct
  source 1..20: mol_type = other DNA
gccagactggtctcgaactc

SEQ ID NO: 14842 - DNA, 20 bp, synthetic construct
  source 1..20: mol_type = other DNA
ggccagactggtctcgaact

SEQ ID NO: 14843 - DNA, 20 bp, synthetic construct
  source 1..20: mol_type = other DNA
tggccagactggtctcgaac

SEQ ID NO: 14844 - DNA, 20 bp, synthetic construct
  source 1..20: mol_type = other DNA
ttggccagactggtctcgaa

SEQ ID NO: 14845 - DNA, 20 bp, synthetic construct
  source 1..20: mol_type = other DNA
gttggccagactggtctcga

SEQ ID NO: 14846 - DNA, 20 bp, synthetic construct
  source 1..20: mol_type = other DNA
tgttggccagactggtctcg

SEQ ID NO: 14847 - DNA, 20 bp, synthetic construct
  source 1..20: mol_type = other DNA
atgttggccagactggtctc

SEQ ID NO: 14848 - DNA, 20 bp, synthetic construct
  source 1..20: mol_type = other DNA
catgttggccagactggtct

SEQ ID NO: 14849 - DNA, 20 bp, synthetic construct
  source 1..20: mol_type = other DNA
ccatgttggccagactggtc

SEQ ID NO: 14850 - DNA, 20 bp, synthetic construct
  source 1..20: mol_type = other DNA
accatgttggccagactggt

SEQ ID NO: 14851 - DNA, 20 bp, synthetic construct
  source 1..20: mol_type = other DNA
caccatgttggccagactgg

SEQ ID NO: 14852 - DNA, 20 bp, synthetic construct
  source 1..20: mol_type = other DNA
tcaccatgttggccagactg

SEQ ID NO: 14853 - DNA, 20 bp, synthetic construct
  source 1..20: mol_type = other DNA
ttcaccatgttggccagact

SEQ ID NO: 14854 - DNA, 20 bp, synthetic construct
  source 1..20: mol_type = other DNA
tttcaccatgttggccagac

SEQ ID NO: 14855 - DNA, 20 bp, synthetic construct
  source 1..20: mol_type = other DNA
gtttcaccatgttggccaga

SEQ ID NO: 14856 - DNA, 20 bp, synthetic construct
  source 1..20: mol_type = other DNA
ggtttcaccatgttggccag

SEQ ID NO: 14857 - DNA, 20 bp, synthetic construct
  source 1..20: mol_type = other DNA
gggtttcaccatgttggcca

SEQ ID NO: 14858 - DNA, 20 bp, synthetic construct
  source 1..20: mol_type = other DNA
agggtttcaccatgttggcc

SEQ ID NO: 14859 - DNA, 20 bp, synthetic construct
  source 1..20: mol_type = other DNA
cagggtttcaccatgttggc

SEQ ID NO: 14860 - DNA, 20 bp, synthetic construct
  source 1..20: mol_type = other DNA
acagggtttcaccatgttgg

SEQ ID NO: 14861 - DNA, 20 bp, synthetic construct
  source 1..20: mol_type = other DNA
gacagggtttcaccatgttg

SEQ ID NO: 14862 - DNA, 20 bp, synthetic construct
  source 1..20: mol_type = other DNA
agacagggtttcaccatgtt

SEQ ID NO: 14863 - DNA, 20 bp, synthetic construct
  source 1..20: mol_type = other DNA
gagacagggtttcaccatgt

SEQ ID NO: 14864 - DNA, 20 bp, synthetic construct
  source 1..20: mol_type = other DNA
agagacagggtttcaccatg

SEQ ID NO: 14865 - DNA, 20 bp, synthetic construct
  source 1..20: mol_type = other DNA
tagagacagggtttcaccat

SEQ ID NO: 14866 - DNA, 20 bp, synthetic construct
  source 1..20: mol_type = other DNA
gtagagacagggtttcacca

SEQ ID NO: 14867 - DNA, 20 bp, synthetic construct
  source 1..20: mol_type = other DNA
agtagagacagggtttcacc

SEQ ID NO: 14868 - DNA, 20 bp, synthetic construct
  source 1..20: mol_type = other DNA
cagtagagacagggtttcac

SEQ ID NO: 14869 - DNA, 20 bp, synthetic construct
  source 1..20: mol_type = other DNA
tcagtagagacagggtttca

SEQ ID NO: 14870 - DNA, 20 bp, synthetic construct
  source 1..20: mol_type = other DNA
ttcagtagagacagggtttc

SEQ ID NO: 14871 - DNA, 20 bp, synthetic construct
  source 1..20: mol_type = other DNA
tttcagtagagacagggttt

SEQ ID NO: 14872 - DNA, 20 bp, synthetic construct
  source 1..20: mol_type = other DNA
ttttcagtagagacagggtt

SEQ ID NO: 14873 - DNA, 20 bp, synthetic construct
  source 1..20: mol_type = other DNA
tttttcagtagagacagggt

SEQ ID NO: 14874 - DNA, 20 bp, synthetic construct
  source 1..20: mol_type = other DNA
gtttttcagtagagacaggg

SEQ ID NO: 14875 - DNA, 20 bp, synthetic construct
  source 1..20: mol_type = other DNA
tgtttttcagtagagacagg

SEQ ID NO: 14876 - DNA, 20 bp, synthetic construct
  source 1..20: mol_type = other DNA
ctgtttttcagtagagacag

SEQ ID NO: 14877 - DNA, 20 bp, synthetic construct
  source 1..20: mol_type = other DNA
tctgtttttcagtagagaca

SEQ ID NO: 14878 - DNA, 20 bp, synthetic construct
  source 1..20: mol_type = other DNA
ttctgtttttcagtagagac

SEQ ID NO: 14879 - DNA, 20 bp, synthetic construct
  source 1..20: mol_type = other DNA
tttctgtttttcagtagaga

SEQ ID NO: 14880 - DNA, 20 bp, synthetic construct
  source 1..20: mol_type = other DNA
ttttctgtttttcagtagag

SEQ ID NO: 14881 - DNA, 20 bp, synthetic construct
  source 1..20: mol_type = other DNA
tttttctgtttttcagtaga

SEQ ID NO: 14882 - DNA, 20 bp, synthetic construct
  source 1..20: mol_type = other DNA
ctttttctgtttttcagtag

SEQ ID NO: 14883 - DNA, 20 bp, synthetic construct
  source 1..20: mol_type = other DNA
cctttttctgtttttcagta

SEQ ID NO: 14884 - DNA, 20 bp, synthetic construct
  source 1..20: mol_type = other DNA
ccctttttctgtttttcagt

SEQ ID NO: 14885 - DNA, 20 bp, synthetic construct
  source 1..20: mol_type = other DNA
gccctttttctgtttttcag

SEQ ID NO: 14886 - DNA, 20 bp, synthetic construct
  source 1..20: mol_type = other DNA
ggccctttttctgtttttca

SEQ ID NO: 14887 - DNA, 20 bp, synthetic construct
  source 1..20: mol_type = other DNA
cggccctttttctgtttttc

SEQ ID NO: 14888 - DNA, 20 bp, synthetic construct
  source 1..20: mol_type = other DNA
ccggccctttttctgttttt

SEQ ID NO: 14889 - DNA, 20 bp, synthetic construct
  source 1..20: mol_type = other DNA
cccggccctttttctgtttt

SEQ ID NO: 14890 - DNA, 20 bp, synthetic construct
  source 1..20: mol_type = other DNA
gcccggccctttttctgttt

SEQ ID NO: 14891 - DNA, 20 bp, synthetic construct
  source 1..20: mol_type = other DNA
cgcccggccctttttctgtt

SEQ ID NO: 14892 - DNA, 20 bp, synthetic construct
  source 1..20: mol_type = other DNA
acgcccggccctttttctgt

SEQ ID NO: 14893 - DNA, 20 bp, synthetic construct
  source 1..20: mol_type = other DNA
cacgcccggccctttttctg

SEQ ID NO: 14894 - DNA, 20 bp, synthetic construct
  source 1..20: mol_type = other DNA
ccacgcccggccctttttct

SEQ ID NO: 14895 - DNA, 20 bp, synthetic construct
  source 1..20: mol_type = other DNA
accacgcccggccctttttc

SEQ ID NO: 14896 - DNA, 20 bp, synthetic construct
  source 1..20: mol_type = other DNA
caccacgcccggcccttttt

SEQ ID NO: 14897 - DNA, 20 bp, synthetic construct
  source 1..20: mol_type = other DNA
ccaccacgcccggccctttt

SEQ ID NO: 14898 - DNA, 20 bp, synthetic construct
  source 1..20: mol_type = other DNA
gccaccacgcccggcccttt

SEQ ID NO: 14899 - DNA, 20 bp, synthetic construct
  source 1..20: mol_type = other DNA
agccaccacgcccggccctt

SEQ ID NO: 14900 - DNA, 20 bp, synthetic construct
  source 1..20: mol_type = other DNA
gagccaccacgcccggccct

SEQ ID NO: 14901 - DNA, 20 bp, synthetic construct
  source 1..20: mol_type = other DNA
tgagccaccacgcccggccc

SEQ ID NO: 14902 - DNA, 20 bp, synthetic construct
  source 1..20: mol_type = other DNA
gtgagccaccacgcccggcc

SEQ ID NO: 14903 - DNA, 20 bp, synthetic construct
  source 1..20: mol_type = other DNA
ggtgagccaccacgcccggc

SEQ ID NO: 14904 - DNA, 20 bp, synthetic construct
  source 1..20: mol_type = other DNA
gggtgagccaccacgcccgg

SEQ ID NO: 14905 - DNA, 20 bp, synthetic construct
  source 1..20: mol_type = other DNA
ggggtgagccaccacgcccg

SEQ ID NO: 14906 - DNA, 20 bp, synthetic construct
  source 1..20: mol_type = other DNA
aggggtgagccaccacgccc

SEQ ID NO: 14907 - DNA, 20 bp, synthetic construct
  source 1..20: mol_type = other DNA
caggggtgagccaccacgcc

SEQ ID NO: 14908 - DNA, 20 bp, synthetic construct
  source 1..20: mol_type = other DNA
acaggggtgagccaccacgc

SEQ ID NO: 14909 - DNA, 20 bp, synthetic construct
  source 1..20: mol_type = other DNA
tacaggggtgagccaccacg

SEQ ID NO: 14910 - DNA, 20 bp, synthetic construct
  source 1..20: mol_type = other DNA
ttacaggggtgagccaccac

SEQ ID NO: 14911 - DNA, 20 bp, synthetic construct
  source 1..20: mol_type = other DNA
attacaggggtgagccacca

SEQ ID NO: 14912 - DNA, 20 bp, synthetic construct
  source 1..20: mol_type = other DNA
gattacaggggtgagccacc

SEQ ID NO: 14913 - DNA, 20 bp, synthetic construct
  source 1..20: mol_type = other DNA
ggattacaggggtgagccac

SEQ ID NO: 14914 - DNA, 20 bp, synthetic construct
  source 1..20: mol_type = other DNA
gggattacaggggtgagcca

SEQ ID NO: 14915 - DNA, 20 bp, synthetic construct
  source 1..20: mol_type = other DNA
tgggattacaggggtgagcc

SEQ ID NO: 14916 - DNA, 20 bp, synthetic construct
  source 1..20: mol_type = other DNA
ctgggattacaggggtgagc

SEQ ID NO: 14917 - DNA, 20 bp, synthetic construct
  source 1..20: mol_type = other DNA
gctgggattacaggggtgag

SEQ ID NO: 14918 - DNA, 20 bp, synthetic construct
  source 1..20: mol_type = other DNA
tgctgggattacaggggtga

SEQ ID NO: 14919 - DNA, 20 bp, synthetic construct
  source 1..20: mol_type = other DNA
gtgctgggattacaggggtg

SEQ ID NO: 14920 - DNA, 20 bp, synthetic construct
  source 1..20: mol_type = other DNA
agtgctgggattacaggggt

SEQ ID NO: 14921 - DNA, 20 bp, synthetic construct
  source 1..20: mol_type = other DNA
aagtgctgggattacagggg

SEQ ID NO: 14922 - DNA, 20 bp, synthetic construct
  source 1..20: mol_type = other DNA
aaagtgctgggattacaggg

SEQ ID NO: 14923 - DNA, 20 bp, synthetic construct
  source 1..20: mol_type = other DNA
caaagtgctgggattacagg

SEQ ID NO: 14924 - DNA, 20 bp, synthetic construct
  source 1..20: mol_type = other DNA
ccaaagtgctgggattacag

SEQ ID NO: 14925 - DNA, 20 bp, synthetic construct
  source 1..20: mol_type = other DNA
cccaaagtgctgggattaca

SEQ ID NO: 14926 - DNA, 20 bp, synthetic construct
  source 1..20: mol_type = other DNA
tcccaaagtgctgggattac

SEQ ID NO: 14927 - DNA, 20 bp, synthetic construct
  source 1..20: mol_type = other DNA
ctcccaaagtgctgggatta

SEQ ID NO: 14928 - DNA, 20 bp, synthetic construct
  source 1..20: mol_type = other DNA
cctcccaaagtgctgggatt

SEQ ID NO: 14929 - DNA, 20 bp, synthetic construct
  source 1..20: mol_type = other DNA
acctcccaaagtgctgggat

SEQ ID NO: 14930 - DNA, 20 bp, synthetic construct
  source 1..20: mol_type = other DNA
aacctcccaaagtgctggga

SEQ ID NO: 14931 - DNA, 20 bp, synthetic construct
  source 1..20: mol_type = other DNA
caacctcccaaagtgctggg

SEQ ID NO: 14932 - DNA, 20 bp, synthetic construct
  source 1..20: mol_type = other DNA
tcaacctcccaaagtgctgg

SEQ ID NO: 14933 - DNA, 20 bp, synthetic construct
  source 1..20: mol_type = other DNA
ctcaacctcccaaagtgctg

SEQ ID NO: 14934 - DNA, 20 bp, synthetic construct
  source 1..20: mol_type = other DNA
cctcaacctcccaaagtgct

SEQ ID NO: 14935 - DNA, 20 bp, synthetic construct
  source 1..20: mol_type = other DNA
tcctcaacctcccaaagtgc

SEQ ID NO: 14936 - DNA, 20 bp, synthetic construct
  source 1..20: mol_type = other DNA
ctcctcaacctcccaaagtg

SEQ ID NO: 14937 - DNA, 20 bp, synthetic construct
  source 1..20: mol_type = other DNA
cctcctcaacctcccaaagt

SEQ ID NO: 14938 - DNA, 20 bp, synthetic construct
  source 1..20: mol_type = other DNA
ccctcctcaacctcccaaag

SEQ ID NO: 14939 - DNA, 20 bp, synthetic construct
  source 1..20: mol_type = other DNA
gccctcctcaacctcccaaa

SEQ ID NO: 14940 - DNA, 20 bp, synthetic construct
  source 1..20: mol_type = other DNA
cgccctcctcaacctcccaa

SEQ ID NO: 14941 - DNA, 20 bp, synthetic construct
  source 1..20: mol_type = other DNA
ccgccctcctcaacctccca

SEQ ID NO: 14942 - DNA, 20 bp, synthetic construct
  source 1..20: mol_type = other DNA
tccgccctcctcaacctccc

SEQ ID NO: 14943 - DNA, 20 bp, synthetic construct
  source 1..20: mol_type = other DNA
atccgccctcctcaacctcc

SEQ ID NO: 14944 - DNA, 20 bp, synthetic construct
  source 1..20: mol_type = other DNA
aatccgccctcctcaacctc

SEQ ID NO: 14945 - DNA, 20 bp, synthetic construct
  source 1..20: mol_type = other DNA
taatccgccctcctcaacct

SEQ ID NO: 14946 - DNA, 20 bp, synthetic construct
  source 1..20: mol_type = other DNA
gtaatccgccctcctcaacc

SEQ ID NO: 14947 - DNA, 20 bp, synthetic construct
  source 1..20: mol_type = other DNA
tgtaatccgccctcctcaac

SEQ ID NO: 14948 - DNA, 20 bp, synthetic construct
  source 1..20: mol_type = other DNA
ttgtaatccgccctcctcaa

SEQ ID NO: 14949 - DNA, 20 bp, synthetic construct
  source 1..20: mol_type = other DNA
cttgtaatccgccctcctca

SEQ ID NO: 14950 - DNA, 20 bp, synthetic construct
  source 1..20: mol_type = other DNA
ccttgtaatccgccctcctc

SEQ ID NO: 14951 - DNA, 20 bp, synthetic construct
  source 1..20: mol_type = other DNA
accttgtaatccgccctcct

SEQ ID NO: 14952 - DNA, 20 bp, synthetic construct
  source 1..20: mol_type = other DNA
gaccttgtaatccgccctcc

SEQ ID NO: 14953 - DNA, 20 bp, synthetic construct
  source 1..20: mol_type = other DNA
tgaccttgtaatccgccctc

SEQ ID NO: 14954 - DNA, 20 bp, synthetic construct
  source 1..20: mol_type = other DNA
ttgaccttgtaatccgccct

SEQ ID NO: 14955 - DNA, 20 bp, synthetic construct
  source 1..20: mol_type = other DNA
cttgaccttgtaatccgccc

SEQ ID NO: 14956 - DNA, 20 bp, synthetic construct
  source 1..20: mol_type = other DNA
tcttgaccttgtaatccgcc

SEQ ID NO: 14957 - DNA, 20 bp, synthetic construct
  source 1..20: mol_type = other DNA
ctcttgaccttgtaatccgc

SEQ ID NO: 14958 - DNA, 20 bp, synthetic construct
  source 1..20: mol_type = other DNA
tctcttgaccttgtaatccg

SEQ ID NO: 14959 - DNA, 20 bp, synthetic construct
  source 1..20: mol_type = other DNA
atctcttgaccttgtaatcc

SEQ ID NO: 14960 - DNA, 20 bp, synthetic construct
  source 1..20: mol_type = other DNA
aatctcttgaccttgtaatc

SEQ ID NO: 14961 - DNA, 20 bp, synthetic construct
  source 1..20: mol_type = other DNA
caatctcttgaccttgtaat

SEQ ID NO: 14962 - DNA, 20 bp, synthetic construct
  source 1..20: mol_type = other DNA
tcaatctcttgaccttgtaa

SEQ ID NO: 14963 - DNA, 20 bp, synthetic construct
  source 1..20: mol_type = other DNA
ctcaatctcttgaccttgta

SEQ ID NO: 14964 - DNA, 20 bp, synthetic construct
  source 1..20: mol_type = other DNA
tctcaatctcttgaccttgt

SEQ ID NO: 14965 - DNA, 20 bp, synthetic construct
  source 1..20: mol_type = other DNA
gtctcaatctcttgaccttg

SEQ ID NO: 14966 - DNA, 20 bp, synthetic construct
  source 1..20: mol_type = other DNA
ggtctcaatctcttgacctt

SEQ ID NO: 14967 - DNA, 20 bp, synthetic construct
  source 1..20: mol_type = other DNA
tggtctcaatctcttgacct

SEQ ID NO: 14968 - DNA, 20 bp, synthetic construct
  source 1..20: mol_type = other DNA
atggtctcaatctcttgacc

SEQ ID NO: 14969 - DNA, 20 bp, synthetic construct
  source 1..20: mol_type = other DNA
aatggtctcaatctcttgac

SEQ ID NO: 14970 - DNA, 20 bp, synthetic construct
  source 1..20: mol_type = other DNA
gaatggtctcaatctcttga

SEQ ID NO: 14971 - DNA, 20 bp, synthetic construct
  source 1..20: mol_type = other DNA
agaatggtctcaatctcttg

SEQ ID NO: 14972 - DNA, 20 bp, synthetic construct
  source 1..20: mol_type = other DNA
cagaatggtctcaatctctt

SEQ ID NO: 14973 - DNA, 20 bp, synthetic construct
  source 1..20: mol_type = other DNA
ccagaatggtctcaatctct

SEQ ID NO: 14974 - DNA, 20 bp, synthetic construct
  source 1..20: mol_type = other DNA
gccagaatggtctcaatctc

SEQ ID NO: 14975 - DNA, 20 bp, synthetic construct
  source 1..20: mol_type = other DNA
ggccagaatggtctcaatct

SEQ ID NO: 14976 - DNA, 20 bp, synthetic construct
  source 1..20: mol_type = other DNA
tggccagaatggtctcaatc

SEQ ID NO: 14977 - DNA, 20 bp, synthetic construct
  source 1..20: mol_type = other DNA
ttggccagaatggtctcaat

SEQ ID NO: 14978 - DNA, 20 bp, synthetic construct
  source 1..20: mol_type = other DNA
gttggccagaatggtctcaa

SEQ ID NO: 14979 - DNA, 20 bp, synthetic construct
  source 1..20: mol_type = other DNA
tgttggccagaatggtctca

SEQ ID NO: 14980 - DNA, 20 bp, synthetic construct
  source 1..20: mol_type = other DNA
ctgttggccagaatggtctc

SEQ ID NO: 14981 - DNA, 20 bp, synthetic construct
  source 1..20: mol_type = other DNA
cctgttggccagaatggtct

SEQ ID NO: 14982 - DNA, 20 bp, synthetic construct
  source 1..20: mol_type = other DNA
ccctgttggccagaatggtc

SEQ ID NO: 14983 - DNA, 20 bp, synthetic construct
  source 1..20: mol_type = other DNA
accctgttggccagaatggt

SEQ ID NO: 14984 - DNA, 20 bp, synthetic construct
  source 1..20: mol_type = other DNA
caccctgttggccagaatgg

SEQ ID NO: 14985 - DNA, 20 bp, synthetic construct
  source 1..20: mol_type = other DNA
tcaccctgttggccagaatg

SEQ ID NO: 14986 - DNA, 20 bp, synthetic construct
  source 1..20: mol_type = other DNA
ttcaccctgttggccagaat

SEQ ID NO: 14987 - DNA, 20 bp, synthetic construct
  source 1..20: mol_type = other DNA
tttcaccctgttggccagaa

SEQ ID NO: 14988 - DNA, 20 bp, synthetic construct
  source 1..20: mol_type = other DNA
gtttcaccctgttggccaga

SEQ ID NO: 14989 - DNA, 20 bp, synthetic construct
  source 1..20: mol_type = other DNA
ggtttcaccctgttggccag

SEQ ID NO: 14990 - DNA, 20 bp, synthetic construct
  source 1..20: mol_type = other DNA
gggtttcaccctgttggcca

SEQ ID NO: 14991 - DNA, 20 bp, synthetic construct
  source 1..20: mol_type = other DNA
ggggtttcaccctgttggcc

SEQ ID NO: 14992 - DNA, 20 bp, synthetic construct
  source 1..20: mol_type = other DNA
tggggtttcaccctgttggc

SEQ ID NO: 14993 - DNA, 20 bp, synthetic construct
  source 1..20: mol_type = other DNA
atggggtttcaccctgttgg

SEQ ID NO: 14994 - DNA, 20 bp, synthetic construct
  source 1..20: mol_type = other DNA
gatggggtttcaccctgttg

SEQ ID NO: 14995 - DNA, 20 bp, synthetic construct
  source 1..20: mol_type = other DNA
agatggggtttcaccctgtt

SEQ ID NO: 14996 - DNA, 20 bp, synthetic construct
  source 1..20: mol_type = other DNA
gagatggggtttcaccctgt

SEQ ID NO: 14997 - DNA, 20 bp, synthetic construct
  source 1..20: mol_type = other DNA
agagatggggtttcaccctg

SEQ ID NO: 14998 - DNA, 20 bp, synthetic construct
  source 1..20: mol_type = other DNA
tagagatggggtttcaccct

SEQ ID NO: 14999 - DNA, 20 bp, synthetic construct
  source 1..20: mol_type = other DNA
gtagagatggggtttcaccc

SEQ ID NO: 15000 - DNA, 20 bp, synthetic construct
  source 1..20: mol_type = other DNA
agtagagatggggtttcacc

SEQ ID NO: 15001 - DNA, 20 bp, synthetic construct
  source 1..20: mol_type = other DNA
tagtagagatggggtttcac

SEQ ID NO: 15002 - DNA, 20 bp, synthetic construct
  source 1..20: mol_type = other DNA
ttagtagagatggggtttca

SEQ ID NO: 15003 - DNA, 20 bp, synthetic construct
  source 1..20: mol_type = other DNA
tttagtagagatggggtttc

SEQ ID NO: 15004 - DNA, 20 bp, synthetic construct
  source 1..20: mol_type = other DNA
ttttagtagagatggggttt

SEQ ID NO: 15005 - DNA, 20 bp, synthetic construct
  source 1..20: mol_type = other DNA
tttttagtagagatggggtt

SEQ ID NO: 15006 - DNA, 20 bp, synthetic construct
  source 1..20: mol_type = other DNA
atttttagtagagatggggt

SEQ ID NO: 15007 - DNA, 20 bp, synthetic construct
  source 1..20: mol_type = other DNA
tatttttagtagagatgggg

SEQ ID NO: 15008 - DNA, 20 bp, synthetic construct
  source 1..20: mol_type = other DNA
gtatttttagtagagatggg

SEQ ID NO: 15009 - DNA, 20 bp, synthetic construct
  source 1..20: mol_type = other DNA
tgtatttttagtagagatgg

SEQ ID NO: 15010 - DNA, 20 bp, synthetic construct
  source 1..20: mol_type = other DNA
ttgtatttttagtagagatg

SEQ ID NO: 15011 - DNA, 20 bp, synthetic construct
  source 1..20: mol_type = other DNA
tttgtatttttagtagagat

SEQ ID NO: 15012 - DNA, 20 bp, synthetic construct
  source 1..20: mol_type = other DNA
ttttgtatttttagtagaga

SEQ ID NO: 15013 - DNA, 20 bp, synthetic construct
  source 1..20: mol_type = other DNA
tttttgtatttttagtagag

SEQ ID NO: 15014 - DNA, 20 bp, synthetic construct
  source 1..20: mol_type = other DNA
ttttttgtatttttagtaga

SEQ ID NO: 15015 - DNA, 20 bp, synthetic construct
  source 1..20: mol_type = other DNA
tttttttgtatttttagtag

SEQ ID NO: 15016 - DNA, 20 bp, synthetic construct
  source 1..20: mol_type = other DNA
atttttttgtatttttagta

SEQ ID NO: 15017 - DNA, 20 bp, synthetic construct
  source 1..20: mol_type = other DNA
aatttttttgtatttttagt

SEQ ID NO: 15018 - DNA, 20 bp, synthetic construct
  source 1..20: mol_type = other DNA
taatttttttgtatttttag

SEQ ID NO: 15019 - DNA, 20 bp, synthetic construct
  source 1..20: mol_type = other DNA
ttaatttttttgtattttta

SEQ ID NO: 15020 - DNA, 20 bp, synthetic construct
  source 1..20: mol_type = other DNA
tttaatttttttgtattttt

SEQ ID NO: 15021 - DNA, 20 bp, synthetic construct
  source 1..20: mol_type = other DNA
atttaatttttttgtatttt

SEQ ID NO: 15022 - DNA, 20 bp, synthetic construct
  source 1..20: mol_type = other DNA
catttaatttttttgtattt

SEQ ID NO: 15023 - DNA, 20 bp, synthetic construct
  source 1..20: mol_type = other DNA
ccatttaatttttttgtatt

SEQ ID NO: 15024 - DNA, 20 bp, synthetic construct
  source 1..20: mol_type = other DNA
cccatttaatttttttgtat

SEQ ID NO: 15025 - DNA, 20 bp, synthetic construct
  source 1..20: mol_type = other DNA
gcccatttaatttttttgta

SEQ ID NO: 15026 - DNA, 20 bp, synthetic construct
  source 1..20: mol_type = other DNA
cgcccatttaatttttttgt

SEQ ID NO: 15027 - DNA, 20 bp, synthetic construct
  source 1..20: mol_type = other DNA
acgcccatttaatttttttg

SEQ ID NO: 15028 - DNA, 20 bp, synthetic construct
  source 1..20: mol_type = other DNA
cacgcccatttaattttttt

SEQ ID NO: 15029 - DNA, 20 bp, synthetic construct
  source 1..20: mol_type = other DNA
ccacgcccatttaatttttt

SEQ ID NO: 15030 - DNA, 20 bp, synthetic construct
  source 1..20: mol_type = other DNA
accacgcccatttaattttt

SEQ ID NO: 15031 - DNA, 20 bp, synthetic construct
  source 1..20: mol_type = other DNA
caccacgcccatttaatttt

SEQ ID NO: 15032 - DNA, 20 bp, synthetic construct
  source 1..20: mol_type = other DNA
tcaccacgcccatttaattt

SEQ ID NO: 15033 - DNA, 20 bp, synthetic construct
  source 1..20: mol_type = other DNA
atcaccacgcccatttaatt

SEQ ID NO: 15034 - DNA, 20 bp, synthetic construct
  source 1..20: mol_type = other DNA
catcaccacgcccatttaat

SEQ ID NO: 15035 - DNA, 20 bp, synthetic construct
  source 1..20: mol_type = other DNA
acatcaccacgcccatttaa

SEQ ID NO: 15036 - DNA, 20 bp, synthetic construct
  source 1..20: mol_type = other DNA
cacatcaccacgcccattta

SEQ ID NO: 15037 - DNA, 20 bp, synthetic construct
  source 1..20: mol_type = other DNA
acacatcaccacgcccattt

SEQ ID NO: 15038 - DNA, 20 bp, synthetic construct
  source 1..20: mol_type = other DNA
cacacatcaccacgcccatt

SEQ ID NO: 15039 - DNA, 20 bp, synthetic construct
  source 1..20: mol_type = other DNA
gcacacatcaccacgcccat

SEQ ID NO: 15040 - DNA, 20 bp, synthetic construct
  source 1..20: mol_type = other DNA
ggcacacatcaccacgccca

SEQ ID NO: 15041 - DNA, 20 bp, synthetic construct
  source 1..20: mol_type = other DNA
aggcacacatcaccacgccc

SEQ ID NO: 15042 - DNA, 20 bp, synthetic construct
  source 1..20: mol_type = other DNA
caggcacacatcaccacgcc

SEQ ID NO: 15043 - DNA, 20 bp, synthetic construct
  source 1..20: mol_type = other DNA
acaggcacacatcaccacgc

SEQ ID NO: 15044 - DNA, 20 bp, synthetic construct
  source 1..20: mol_type = other DNA
tacaggcacacatcaccacg

SEQ ID NO: 15045 - DNA, 20 bp, synthetic construct
  source 1..20: mol_type = other DNA
ctacaggcacacatcaccac

SEQ ID NO: 15046 - DNA, 20 bp, synthetic construct
  source 1..20: mol_type = other DNA
actacaggcacacatcacca

SEQ ID NO: 15047 - DNA, 20 bp, synthetic construct
  source 1..20: mol_type = other DNA
gactacaggcacacatcacc

SEQ ID NO: 15048 - DNA, 20 bp, synthetic construct
  source 1..20: mol_type = other DNA
ggactacaggcacacatcac

SEQ ID NO: 15049 - DNA, 20 bp, synthetic construct
  source 1..20: mol_type = other DNA
gggactacaggcacacatca

SEQ ID NO: 15050 - DNA, 20 bp, synthetic construct
  source 1..20: mol_type = other DNA
tgggactacaggcacacatc

SEQ ID NO: 15051 - DNA, 20 bp, synthetic construct
  source 1..20: mol_type = other DNA
ctgggactacaggcacacat

SEQ ID NO: 15052 - DNA, 20 bp, synthetic construct
  source 1..20: mol_type = other DNA
gctgggactacaggcacaca

SEQ ID NO: 15053 - DNA, 20 bp, synthetic construct
  source 1..20: mol_type = other DNA
agctgggactacaggcacac

SEQ ID NO: 15054 - DNA, 20 bp, synthetic construct
  source 1..20: mol_type = other DNA
tagctgggactacaggcaca

SEQ ID NO: 15055 - DNA, 20 bp, synthetic construct
  source 1..20: mol_type = other DNA
gtagctgggactacaggcac

SEQ ID NO: 15056 - DNA, 20 bp, synthetic construct
  source 1..20: mol_type = other DNA
agtagctgggactacaggca

SEQ ID NO: 15057 - DNA, 20 bp, synthetic construct
  source 1..20: mol_type = other DNA
gagtagctgggactacaggc

SEQ ID NO: 15058 - DNA, 20 bp, synthetic construct
  source 1..20: mol_type = other DNA
cgagtagctgggactacagg

SEQ ID NO: 15059 - DNA, 20 bp, synthetic construct
  source 1..20: mol_type = other DNA
ccgagtagctgggactacag

SEQ ID NO: 15060 - DNA, 20 bp, synthetic construct
  source 1..20: mol_type = other DNA
cccgagtagctgggactaca

SEQ ID NO: 15061 - DNA, 20 bp, synthetic construct
  source 1..20: mol_type = other DNA
tcccgagtagctgggactac

SEQ ID NO: 15062 - DNA, 20 bp, synthetic construct
  source 1..20: mol_type = other DNA
ctcccgagtagctgggacta

SEQ ID NO: 15063 - DNA, 20 bp, synthetic construct
  source 1..20: mol_type = other DNA
cctcccgagtagctgggact

SEQ ID NO: 15064 - DNA, 20 bp, synthetic construct
  source 1..20: mol_type = other DNA
gcctcccgagtagctgggac

SEQ ID NO: 15065 - DNA, 20 bp, synthetic construct
  source 1..20: mol_type = other DNA
agcctcccgagtagctggga

SEQ ID NO: 15066 - DNA, 20 bp, synthetic construct
  source 1..20: mol_type = other DNA
cagcctcccgagtagctggg

SEQ ID NO: 15067 - DNA, 20 bp, synthetic construct
  source 1..20: mol_type = other DNA
tcagcctcccgagtagctgg

SEQ ID NO: 15068 - DNA, 20 bp, synthetic construct
  source 1..20: mol_type = other DNA
ctcagcctcccgagtagctg

SEQ ID NO: 15069 - DNA, 20 bp, synthetic construct
  source 1..20: mol_type = other DNA
cctcagcctcccgagtagct

SEQ ID NO: 15070 - DNA, 20 bp, synthetic construct
  source 1..20: mol_type = other DNA
gcctcagcctcccgagtagc

SEQ ID NO: 15071 - DNA, 20 bp, synthetic construct
  source 1..20: mol_type = other DNA
tgcctcagcctcccgagtag

SEQ ID NO: 15072 - DNA, 20 bp, synthetic construct
  source 1..20: mol_type = other DNA
ctgcctcagcctcccgagta

SEQ ID NO: 15073 - DNA, 20 bp, synthetic construct
  source 1..20: mol_type = other DNA
cctgcctcagcctcccgagt

SEQ ID NO: 15074 - DNA, 20 bp, synthetic construct
  source 1..20: mol_type = other DNA
tcctgcctcagcctcccgag

SEQ ID NO: 15075 - DNA, 20 bp, synthetic construct
  source 1..20: mol_type = other DNA
ctcctgcctcagcctcccga

SEQ ID NO: 15076 - DNA, 20 bp, synthetic construct
  source 1..20: mol_type = other DNA
tctcctgcctcagcctcccg

SEQ ID NO: 15077 - DNA, 20 bp, synthetic construct
  source 1..20: mol_type = other DNA
ttctcctgcctcagcctccc

SEQ ID NO: 15078 - DNA, 20 bp, synthetic construct
  source 1..20: mol_type = other DNA
attctcctgcctcagcctcc

SEQ ID NO: 15079 - DNA, 20 bp, synthetic construct
  source 1..20: mol_type = other DNA
aattctcctgcctcagcctc

SEQ ID NO: 15080 - DNA, 20 bp, synthetic construct
  source 1..20: mol_type = other DNA
caattctcctgcctcagcct

SEQ ID NO: 15081 - DNA, 20 bp, synthetic construct
  source 1..20: mol_type = other DNA
gcaattctcctgcctcagcc

SEQ ID NO: 15082 - DNA, 20 bp, synthetic construct
  source 1..20: mol_type = other DNA
agcaattctcctgcctcagc

SEQ ID NO: 15083 - DNA, 20 bp, synthetic construct
  source 1..20: mol_type = other DNA
aagcaattctcctgcctcag

SEQ ID NO: 15084 - DNA, 20 bp, synthetic construct
  source 1..20: mol_type = other DNA
caagcaattctcctgcctca

SEQ ID NO: 15085 - DNA, 20 bp, synthetic construct
  source 1..20: mol_type = other DNA
tcaagcaattctcctgcctc

SEQ ID NO: 15086 - DNA, 20 bp, synthetic construct
  source 1..20: mol_type = other DNA
ttcaagcaattctcctgcct

SEQ ID NO: 15087 - DNA, 20 bp, synthetic construct
  source 1..20: mol_type = other DNA
gttcaagcaattctcctgcc

SEQ ID NO: 15088 - DNA, 20 bp, synthetic construct
  source 1..20: mol_type = other DNA
ggttcaagcaattctcctgc

SEQ ID NO: 15089 - DNA, 20 bp, synthetic construct
  source 1..20: mol_type = other DNA
gggttcaagcaattctcctg

SEQ ID NO: 15090 - DNA, 20 bp, synthetic construct
  source 1..20: mol_type = other DNA
cgggttcaagcaattctcct

SEQ ID NO: 15091 - DNA, 20 bp, synthetic construct
  source 1..20: mol_type = other DNA
ccgggttcaagcaattctcc

SEQ ID NO: 15092 - DNA, 20 bp, synthetic construct
  source 1..20: mol_type = other DNA
cccgggttcaagcaattctc

SEQ ID NO: 15093 - DNA, 20 bp, synthetic construct
  source 1..20: mol_type = other DNA
tcccgggttcaagcaattct

SEQ ID NO: 15094 - DNA, 20 bp, synthetic construct
  source 1..20: mol_type = other DNA
ctcccgggttcaagcaattc

SEQ ID NO: 15095 - DNA, 20 bp, synthetic construct
  source 1..20: mol_type = other DNA
cctcccgggttcaagcaatt

SEQ ID NO: 15096 - DNA, 20 bp, synthetic construct
  source 1..20: mol_type = other DNA
gcctcccgggttcaagcaat

SEQ ID NO: 15097 - DNA, 20 bp, synthetic construct
  source 1..20: mol_type = other DNA
tgcctcccgggttcaagcaa

SEQ ID NO: 15098 - DNA, 20 bp, synthetic construct
  source 1..20: mol_type = other DNA
ctgcctcccgggttcaagca

SEQ ID NO: 15099 - DNA, 20 bp, synthetic construct
  source 1..20: mol_type = other DNA
tctgcctcccgggttcaagc

SEQ ID NO: 15100 - DNA, 20 bp, synthetic construct
  source 1..20: mol_type = other DNA
ctctgcctcccgggttcaag

SEQ ID NO: 15101 - DNA, 20 bp, synthetic construct
  source 1..20: mol_type = other DNA
cctctgcctcccgggttcaa

SEQ ID NO: 15102 - DNA, 20 bp, synthetic construct
  source 1..20: mol_type = other DNA
acctctgcctcccgggttca

SEQ ID NO: 15103 - DNA, 20 bp, synthetic construct
  source 1..20: mol_type = other DNA
aacctctgcctcccgggttc

SEQ ID NO: 15104 - DNA, 20 bp, synthetic construct
  source 1..20: mol_type = other DNA
caacctctgcctcccgggtt

SEQ ID NO: 15105 - DNA, 20 bp, synthetic construct
  source 1..20: mol_type = other DNA
gcaacctctgcctcccgggt

SEQ ID NO: 15106 - DNA, 20 bp, synthetic construct
  source 1..20: mol_type = other DNA
tgcaacctctgcctcccggg

SEQ ID NO: 15107 - DNA, 20 bp, synthetic construct
  source 1..20: mol_type = other DNA
ctgcaacctctgcctcccgg

SEQ ID NO: 15108 - DNA, 20 bp, synthetic construct
  source 1..20: mol_type = other DNA
actgcaacctctgcctcccg

SEQ ID NO: 15109 - DNA, 20 bp, synthetic construct
  source 1..20: mol_type = other DNA
cactgcaacctctgcctccc

SEQ ID NO: 15110 - DNA, 20 bp, synthetic construct
  source 1..20: mol_type = other DNA
tcactgcaacctctgcctcc

SEQ ID NO: 15111 - DNA, 20 bp, synthetic construct
  source 1..20: mol_type = other DNA
ctcactgcaacctctgcctc

SEQ ID NO: 15112 - DNA, 20 bp, synthetic construct
  source 1..20: mol_type = other DNA
gctcactgcaacctctgcct

SEQ ID NO: 15113 - DNA, 20 bp, synthetic construct
  source 1..20: mol_type = other DNA
ggctcactgcaacctctgcc

SEQ ID NO: 15114 - DNA, 20 bp, synthetic construct
  source 1..20: mol_type = other DNA
cggctcactgcaacctctgc

SEQ ID NO: 15115 - DNA, 20 bp, synthetic construct
  source 1..20: mol_type = other DNA
tcggctcactgcaacctctg

SEQ ID NO: 15116 - DNA, 20 bp, synthetic construct
  source 1..20: mol_type = other DNA
ctcggctcactgcaacctct

SEQ ID NO: 15117 - DNA, 20 bp, synthetic construct
  source 1..20: mol_type = other DNA
tctcggctcactgcaacctc

SEQ ID NO: 15118 - DNA, 20 bp, synthetic construct
  source 1..20: mol_type = other DNA
atctcggctcactgcaacct

SEQ ID NO: 15119 - DNA, 20 bp, synthetic construct
  source 1..20: mol_type = other DNA
gatctcggctcactgcaacc

SEQ ID NO: 15120 - DNA, 20 bp, synthetic construct
  source 1..20: mol_type = other DNA
cgatctcggctcactgcaac

SEQ ID NO: 15121 - DNA, 20 bp, synthetic construct
  source 1..20: mol_type = other DNA
ccgatctcggctcactgcaa

SEQ ID NO: 15122 - DNA, 20 bp, synthetic construct
  source 1..20: mol_type = other DNA
cccgatctcggctcactgca

SEQ ID NO: 15123 - DNA, 20 bp, synthetic construct
  source 1..20: mol_type = other DNA
gcccgatctcggctcactgc

SEQ ID NO: 15124 - DNA, 20 bp, synthetic construct
  source 1..20: mol_type = other DNA
ggcccgatctcggctcactg

SEQ ID NO: 15125 - DNA, 20 bp, synthetic construct
  source 1..20: mol_type = other DNA
tggcccgatctcggctcact

SEQ ID NO: 15126 - DNA, 20 bp, synthetic construct
  source 1..20: mol_type = other DNA
gtggcccgatctcggctcac

SEQ ID NO: 15127 - DNA, 20 bp, synthetic construct
  source 1..20: mol_type = other DNA
agtggcccgatctcggctca

SEQ ID NO: 15128 - DNA, 20 bp, synthetic construct
  source 1..20: mol_type = other DNA
cagtggcccgatctcggctc

SEQ ID NO: 15129 - DNA, 20 bp, synthetic construct
  source 1..20: mol_type = other DNA
gcagtggcccgatctcggct

SEQ ID NO: 15130 - DNA, 20 bp, synthetic construct
  source 1..20: mol_type = other DNA
tgcagtggcccgatctcggc

SEQ ID NO: 15131 - DNA, 20 bp, synthetic construct
  source 1..20: mol_type = other DNA
gtgcagtggcccgatctcgg

SEQ ID NO: 15132 - DNA, 20 bp, synthetic construct
  source 1..20: mol_type = other DNA
agtgcagtggcccgatctcg

SEQ ID NO: 15133 - DNA, 20 bp, synthetic construct
  source 1..20: mol_type = other DNA
cagtgcagtggcccgatctc

SEQ ID NO: 15134 - DNA, 20 bp, synthetic construct
  source 1..20: mol_type = other DNA
tcagtgcagtggcccgatct

SEQ ID NO: 15135 - DNA, 20 bp, synthetic construct
  source 1..20: mol_type = other DNA
gtcagtgcagtggcccgatc

SEQ ID NO: 15136 - DNA, 20 bp, synthetic construct
  source 1..20: mol_type = other DNA
cgtcagtgcagtggcccgat

SEQ ID NO: 15137 - DNA, 20 bp, synthetic construct
  source 1..20: mol_type = other DNA
tcgtcagtgcagtggcccga

SEQ ID NO: 15138 - DNA, 20 bp, synthetic construct
  source 1..20: mol_type = other DNA
gtcgtcagtgcagtggcccg

SEQ ID NO: 15139 - DNA, 20 bp, synthetic construct
  source 1..20: mol_type = other DNA
tgtcgtcagtgcagtggccc

SEQ ID NO: 15140 - DNA, 20 bp, synthetic construct
  source 1..20: mol_type = other DNA
ctgtcgtcagtgcagtggcc

SEQ ID NO: 15141 - DNA, 20 bp, synthetic construct
  source 1..20: mol_type = other DNA
tctgtcgtcagtgcagtggc

SEQ ID NO: 15142 - DNA, 20 bp, synthetic construct
  source 1..20: mol_type = other DNA
ctctgtcgtcagtgcagtgg

SEQ ID NO: 15143 - DNA, 20 bp, synthetic construct
  source 1..20: mol_type = other DNA
cctctgtcgtcagtgcagtg

SEQ ID NO: 15144 - DNA, 20 bp, synthetic construct
  source 1..20: mol_type = other DNA
ccctctgtcgtcagtgcagt

SEQ ID NO: 15145 - DNA, 20 bp, synthetic construct
  source 1..20: mol_type = other DNA
tccctctgtcgtcagtgcag

SEQ ID NO: 15146 - DNA, 20 bp, synthetic construct
  source 1..20: mol_type = other DNA
ctccctctgtcgtcagtgca

SEQ ID NO: 15147 - DNA, 20 bp, synthetic construct
  source 1..20: mol_type = other DNA
tctccctctgtcgtcagtgc

SEQ ID NO: 15148 - DNA, 20 bp, synthetic construct
  source 1..20: mol_type = other DNA
gtctccctctgtcgtcagtg

SEQ ID NO: 15149 - DNA, 20 bp, synthetic construct
  source 1..20: mol_type = other DNA
agtctccctctgtcgtcagt

SEQ ID NO: 15150 - DNA, 20 bp, synthetic construct
  source 1..20: mol_type = other DNA
gagtctccctctgtcgtcag

SEQ ID NO: 15151 - DNA, 20 bp, synthetic construct
  source 1..20: mol_type = other DNA
ggagtctccctctgtcgtca

SEQ ID NO: 15152 - DNA, 20 bp, synthetic construct
  source 1..20: mol_type = other DNA
cggagtctccctctgtcgtc

SEQ ID NO: 15153 - DNA, 20 bp, synthetic construct
  source 1..20: mol_type = other DNA
acggagtctccctctgtcgt

SEQ ID NO: 15154 - DNA, 20 bp, synthetic construct
  source 1..20: mol_type = other DNA
gacggagtctccctctgtcg

SEQ ID NO: 15155 - DNA, 20 bp, synthetic construct
  source 1..20: mol_type = other DNA
agacggagtctccctctgtc

SEQ ID NO: 15156 - DNA, 20 bp, synthetic construct
  source 1..20: mol_type = other DNA
tagacggagtctccctctgt

SEQ ID NO: 15157 - DNA, 20 bp, synthetic construct
  source 1..20: mol_type = other DNA
ttagacggagtctccctctg

SEQ ID NO: 15158 - DNA, 20 bp, synthetic construct
  source 1..20: mol_type = other DNA
tttagacggagtctccctct

SEQ ID NO: 15159 - DNA, 20 bp, synthetic construct
  source 1..20: mol_type = other DNA
ttttagacggagtctccctc

SEQ ID NO: 15160 - DNA, 20 bp, synthetic construct
  source 1..20: mol_type = other DNA
tttttagacggagtctccct

SEQ ID NO: 15161 - DNA, 20 bp, synthetic construct
  source 1..20: mol_type = other DNA
ttttttagacggagtctccc

SEQ ID NO: 15162 - DNA, 20 bp, synthetic construct
  source 1..20: mol_type = other DNA
tttttttagacggagtctcc

SEQ ID NO: 15163 - DNA, 20 bp, synthetic construct
  source 1..20: mol_type = other DNA
ttttttttagacggagtctc

SEQ ID NO: 15164 - DNA, 20 bp, synthetic construct
  source 1..20: mol_type = other DNA
tttttttttagacggagtct

SEQ ID NO: 15165 - DNA, 20 bp, synthetic construct
  source 1..20: mol_type = other DNA
ttttttttttagacggagtc

SEQ ID NO: 15166 - DNA, 20 bp, synthetic construct
  source 1..20: mol_type = other DNA
tttttttttttagacggagt

SEQ ID NO: 15167 - DNA, 20 bp, synthetic construct
  source 1..20: mol_type = other DNA
ttttttttttttagacggag

SEQ ID NO: 15168 - DNA, 20 bp, synthetic construct
  source 1..20: mol_type = other DNA
tttttttttttttagacgga

SEQ ID NO: 15169 - DNA, 20 bp, synthetic construct
  source 1..20: mol_type = other DNA
ttttttttttttttagacgg

SEQ ID NO: 15170 - DNA, 20 bp, synthetic construct
  source 1..20: mol_type = other DNA
tttttttttttttttagacg

SEQ ID NO: 15171 - DNA, 20 bp, synthetic construct
  source 1..20: mol_type = other DNA
ttttttttttttttttagac

SEQ ID NO: 15172 - DNA, 20 bp, synthetic construct
  source 1..20: mol_type = other DNA
tttttttttttttttttaga

SEQ ID NO: 15173 - DNA, 20 bp, synthetic construct
  source 1..20: mol_type = other DNA
ttttttttttttttttttag

SEQ ID NO: 15174 - DNA, 20 bp, synthetic construct
  source 1..20: mol_type = other DNA
ttttttttttttttttttta

SEQ ID NO: 15175 - DNA, 20 bp, synthetic construct
  source 1..20: mol_type = other DNA
tttttttttttttttttttt

SEQ ID NO: 15176 - DNA, 20 bp, synthetic construct
  source 1..20: mol_type = other DNA
tttttttttttttttttttt

SEQ ID NO: 15177 - DNA, 20 bp, synthetic construct
  source 1..20: mol_type = other DNA
tttttttttttttttttttt

SEQ ID NO: 15178 - DNA, 20 bp, synthetic construct
  source 1..20: mol_type = other DNA
tttttttttttttttttttt

SEQ ID NO: 15179 - DNA, 20 bp, synthetic construct
  source 1..20: mol_type = other DNA
tttttttttttttttttttt

SEQ ID NO: 15180 - DNA, 20 bp, synthetic construct
  source 1..20: mol_type = other DNA
gttttttttttttttttttt

SEQ ID NO: 15181 - DNA, 20 bp, synthetic construct
  source 1..20: mol_type = other DNA
ggtttttttttttttttttt

SEQ ID NO: 15182 - DNA, 20 bp, synthetic construct
  source 1..20: mol_type = other DNA
tggttttttttttttttttt

SEQ ID NO: 15183 - DNA, 20 bp, synthetic construct
  source 1..20: mol_type = other DNA
ctggtttttttttttttttt

SEQ ID NO: 15184 - DNA, 20 bp, synthetic construct
  source 1..20: mol_type = other DNA
tctggttttttttttttttt

SEQ ID NO: 15185 - DNA, 20 bp, synthetic construct
  source 1..20: mol_type = other DNA
gtctggtttttttttttttt

SEQ ID NO: 15186 - DNA, 20 bp, synthetic construct
  source 1..20: mol_type = other DNA
agtctggttttttttttttt

SEQ ID NO: 15187 - DNA, 20 bp, synthetic construct
  source 1..20: mol_type = other DNA
aagtctggtttttttttttt

SEQ ID NO: 15188 - DNA, 20 bp, synthetic construct
  source 1..20: mol_type = other DNA
caagtctggttttttttttt

SEQ ID NO: 15189 - DNA, 20 bp, synthetic construct
  source 1..20: mol_type = other DNA
ccaagtctggtttttttttt

SEQ ID NO: 15190 - DNA, 20 bp, synthetic construct
  source 1..20: mol_type = other DNA
cccaagtctggttttttttt

SEQ ID NO: 15191 - DNA, 20 bp, synthetic construct
  source 1..20: mol_type = other DNA
ccccaagtctggtttttttt

SEQ ID NO: 15192 - DNA, 20 bp, synthetic construct
  source 1..20: mol_type = other DNA
gccccaagtctggttttttt

SEQ ID NO: 15193 - DNA, 20 bp, synthetic construct
  source 1..20: mol_type = other DNA
agccccaagtctggtttttt

SEQ ID NO: 15194 - DNA, 20 bp, synthetic construct
  source 1..20: mol_type = other DNA
cagccccaagtctggttttt

SEQ ID NO: 15195 - DNA, 20 bp, synthetic construct
  source 1..20: mol_type = other DNA
ccagccccaagtctggtttt

SEQ ID NO: 15196 - DNA, 20 bp, synthetic construct
  source 1..20: mol_type = other DNA
cccagccccaagtctggttt

SEQ ID NO: 15197 - DNA, 20 bp, synthetic construct
  source 1..20: mol_type = other DNA
gcccagccccaagtctggtt

SEQ ID NO: 15198 - DNA, 20 bp, synthetic construct
  source 1..20: mol_type = other DNA
cgcccagccccaagtctggt

SEQ ID NO: 15199 - DNA, 20 bp, synthetic construct
  source 1..20: mol_type = other DNA
ccgcccagccccaagtctgg

SEQ ID NO: 15200 - DNA, 20 bp, synthetic construct
  source 1..20: mol_type = other DNA
cccgcccagccccaagtctg

SEQ ID NO: 15201 - DNA, 20 bp, synthetic construct
  source 1..20: mol_type = other DNA
gcccgcccagccccaagtct

SEQ ID NO: 15202 - DNA, 20 bp, synthetic construct
  source 1..20: mol_type = other DNA
cgcccgcccagccccaagtc

SEQ ID NO: 15203 - DNA, 20 bp, synthetic construct
  source 1..20: mol_type = other DNA
gcgcccgcccagccccaagt

SEQ ID NO: 15204 - DNA, 20 bp, synthetic construct
  source 1..20: mol_type = other DNA
ggcgcccgcccagccccaag

SEQ ID NO: 15205 - DNA, 20 bp, synthetic construct
  source 1..20: mol_type = other DNA
aggcgcccgcccagccccaa

SEQ ID NO: 15206 - DNA, 20 bp, synthetic construct
  source 1..20: mol_type = other DNA
caggcgcccgcccagcccca

SEQ ID NO: 15207 - DNA, 20 bp, synthetic construct
  source 1..20: mol_type = other DNA
acaggcgcccgcccagcccc

SEQ ID NO: 15208 - DNA, 20 bp, synthetic construct
  source 1..20: mol_type = other DNA
tacaggcgcccgcccagccc

SEQ ID NO: 15209 - DNA, 20 bp, synthetic construct
  source 1..20: mol_type = other DNA
ttacaggcgcccgcccagcc

SEQ ID NO: 15210 - DNA, 20 bp, synthetic construct
  source 1..20: mol_type = other DNA
attacaggcgcccgcccagc

SEQ ID NO: 15211 - DNA, 20 bp, synthetic construct
  source 1..20: mol_type = other DNA
gattacaggcgcccgcccag

SEQ ID NO: 15212 - DNA, 20 bp, synthetic construct
  source 1..20: mol_type = other DNA
ggattacaggcgcccgccca

SEQ ID NO: 15213 - DNA, 20 bp, synthetic construct
  source 1..20: mol_type = other DNA
gggattacaggcgcccgccc

SEQ ID NO: 15214 - DNA, 20 bp, synthetic construct
  source 1..20: mol_type = other DNA
tgggattacaggcgcccgcc

SEQ ID NO: 15215 - DNA, 20 bp, synthetic construct
  source 1..20: mol_type = other DNA
ctgggattacaggcgcccgc

SEQ ID NO: 15216 - DNA, 20 bp, synthetic construct
  source 1..20: mol_type = other DNA
gctgggattacaggcgcccg

SEQ ID NO: 15217 - DNA, 20 bp, synthetic construct
  source 1..20: mol_type = other DNA
agctgggattacaggcgccc

SEQ ID NO: 15218 - DNA, 20 bp, synthetic construct
  source 1..20: mol_type = other DNA
tagctgggattacaggcgcc

SEQ ID NO: 15219 - DNA, 20 bp, synthetic construct
  source 1..20: mol_type = other DNA
gtagctgggattacaggcgc

SEQ ID NO: 15220 - DNA, 20 bp, synthetic construct
  source 1..20: mol_type = other DNA
agtagctgggattacaggcg

SEQ ID NO: 15221 - DNA, 20 bp, synthetic construct
  source 1..20: mol_type = other DNA
aagtagctgggattacaggc

SEQ ID NO: 15222 - DNA, 20 bp, synthetic construct
  source 1..20: mol_type = other DNA
caagtagctgggattacagg

SEQ ID NO: 15223 - DNA, 20 bp, synthetic construct
  source 1..20: mol_type = other DNA
ccaagtagctgggattacag

SEQ ID NO: 15224 - DNA, 20 bp, synthetic construct
  source 1..20: mol_type = other DNA
cccaagtagctgggattaca

SEQ ID NO: 15225 - DNA, 20 bp, synthetic construct
  source 1..20: mol_type = other DNA
tcccaagtagctgggattac

SEQ ID NO: 15226 - DNA, 20 bp, synthetic construct
  source 1..20: mol_type = other DNA
ctcccaagtagctgggatta

SEQ ID NO: 15227 - DNA, 20 bp, synthetic construct
  source 1..20: mol_type = other DNA
cctcccaagtagctgggatt

SEQ ID NO: 15228 - DNA, 20 bp, synthetic construct
  source 1..20: mol_type = other DNA
gcctcccaagtagctgggat

SEQ ID NO: 15229 - DNA, 20 bp, synthetic construct
  source 1..20: mol_type = other DNA
agcctcccaagtagctggga

SEQ ID NO: 15230 - DNA, 20 bp, synthetic construct
  source 1..20: mol_type = other DNA
cagcctcccaagtagctggg

SEQ ID NO: 15231 - DNA, 20 bp, synthetic construct
  source 1..20: mol_type = other DNA
tcagcctcccaagtagctgg

SEQ ID NO: 15232 - DNA, 20 bp, synthetic construct
  source 1..20: mol_type = other DNA
ctcagcctcccaagtagctg

SEQ ID NO: 15233 - DNA, 20 bp, synthetic construct
  source 1..20: mol_type = other DNA
cctcagcctcccaagtagct

SEQ ID NO: 15234 - DNA, 20 bp, synthetic construct
  source 1..20: mol_type = other DNA
gcctcagcctcccaagtagc

SEQ ID NO: 15235 - DNA, 20 bp, synthetic construct
  source 1..20: mol_type = other DNA
tgcctcagcctcccaagtag

SEQ ID NO: 15236 - DNA, 20 bp, synthetic construct
  source 1..20: mol_type = other DNA
ctgcctcagcctcccaagta

SEQ ID NO: 15237 - DNA, 20 bp, synthetic construct
  source 1..20: mol_type = other DNA
cctgcctcagcctcccaagt

SEQ ID NO: 15238 - DNA, 20 bp, synthetic construct
  source 1..20: mol_type = other DNA
tcctgcctcagcctcccaag

SEQ ID NO: 15239 - DNA, 20 bp, synthetic construct
  source 1..20: mol_type = other DNA
ctcctgcctcagcctcccaa

SEQ ID NO: 15240 - DNA, 20 bp, synthetic construct
  source 1..20: mol_type = other DNA
tctcctgcctcagcctccca

SEQ ID NO: 15241 - DNA, 20 bp, synthetic construct
  source 1..20: mol_type = other DNA
ttctcctgcctcagcctccc

SEQ ID NO: 15242 - DNA, 20 bp, synthetic construct
  source 1..20: mol_type = other DNA
attctcctgcctcagcctcc

SEQ ID NO: 15243 - DNA, 20 bp, synthetic construct
  source 1..20: mol_type = other DNA
gattctcctgcctcagcctc

SEQ ID NO: 15244 - DNA, 20 bp, synthetic construct
  source 1..20: mol_type = other DNA
cgattctcctgcctcagcct

SEQ ID NO: 15245 - DNA, 20 bp, synthetic construct
  source 1..20: mol_type = other DNA
gcgattctcctgcctcagcc

SEQ ID NO: 15246 - DNA, 20 bp, synthetic construct
  source 1..20: mol_type = other DNA
agcgattctcctgcctcagc

SEQ ID NO: 15247 - DNA, 20 bp, synthetic construct
  source 1..20: mol_type = other DNA
aagcgattctcctgcctcag

SEQ ID NO: 15248 - DNA, 20 bp, synthetic construct
  source 1..20: mol_type = other DNA
caagcgattctcctgcctca

SEQ ID NO: 15249 - DNA, 20 bp, synthetic construct
  source 1..20: mol_type = other DNA
tcaagcgattctcctgcctc

SEQ ID NO: 15250 - DNA, 20 bp, synthetic construct
  source 1..20: mol_type = other DNA
ttcaagcgattctcctgcct

SEQ ID NO: 15251 - DNA, 20 bp, synthetic construct
  source 1..20: mol_type = other DNA
gttcaagcgattctcctgcc

SEQ ID NO: 15252 - DNA, 20 bp, synthetic construct
  source 1..20: mol_type = other DNA
ggttcaagcgattctcctgc

SEQ ID NO: 15253 - DNA, 20 bp, synthetic construct
  source 1..20: mol_type = other DNA
gggttcaagcgattctcctg

SEQ ID NO: 15254 - DNA, 20 bp, synthetic construct
  source 1..20: mol_type = other DNA
cgggttcaagcgattctcct

SEQ ID NO: 15255 - DNA, 20 bp, synthetic construct
  source 1..20: mol_type = other DNA
ccgggttcaagcgattctcc

SEQ ID NO: 15256 - DNA, 20 bp, synthetic construct
  source 1..20: mol_type = other DNA
cccgggttcaagcgattctc

SEQ ID NO: 15257 - DNA, 20 bp, synthetic construct
  source 1..20: mol_type = other DNA
tcccgggttcaagcgattct

SEQ ID NO: 15258 - DNA, 20 bp, synthetic construct
  source 1..20: mol_type = other DNA
ctcccgggttcaagcgattc

SEQ ID NO: 15259 - DNA, 20 bp, synthetic construct
  source 1..20: mol_type = other DNA
cctcccgggttcaagcgatt

SEQ ID NO: 15260 - DNA, 20 bp, synthetic construct
  source 1..20: mol_type = other DNA
acctcccgggttcaagcgat

SEQ ID NO: 15261 - DNA, 20 bp, synthetic construct
  source 1..20: mol_type = other DNA
cacctcccgggttcaagcga

SEQ ID NO: 15262 - DNA, 20 bp, synthetic construct
  source 1..20: mol_type = other DNA
tcacctcccgggttcaagcg

SEQ ID NO: 15263 - DNA, 20 bp, synthetic construct
  source 1..20: mol_type = other DNA
ttcacctcccgggttcaagc

SEQ ID NO: 15264 - DNA, 20 bp, synthetic construct
  source 1..20: mol_type = other DNA
cttcacctcccgggttcaag

SEQ ID NO: 15265 - DNA, 20 bp, synthetic construct
  source 1..20: mol_type = other DNA
ccttcacctcccgggttcaa

SEQ ID NO: 15266 - DNA, 20 bp, synthetic construct
  source 1..20: mol_type = other DNA
accttcacctcccgggttca

SEQ ID NO: 15267 - DNA, 20 bp, synthetic construct
  source 1..20: mol_type = other DNA
aaccttcacctcccgggttc

SEQ ID NO: 15268 - DNA, 20 bp, synthetic construct
  source 1..20: mol_type = other DNA
caaccttcacctcccgggtt

SEQ ID NO: 15269 - DNA, 20 bp, synthetic construct
  source 1..20: mol_type = other DNA
gcaaccttcacctcccgggt

SEQ ID NO: 15270 - DNA, 20 bp, synthetic construct
  source 1..20: mol_type = other DNA
tgcaaccttcacctcccggg

SEQ ID NO: 15271 - DNA, 20 bp, synthetic construct
  source 1..20: mol_type = other DNA
ctgcaaccttcacctcccgg

SEQ ID NO: 15272 - DNA, 20 bp, synthetic construct
  source 1..20: mol_type = other DNA
actgcaaccttcacctcccg

SEQ ID NO: 15273 - DNA, 20 bp, synthetic construct
  source 1..20: mol_type = other DNA
cactgcaaccttcacctccc

SEQ ID NO: 15274 - DNA, 20 bp, synthetic construct
  source 1..20: mol_type = other DNA
tcactgcaaccttcacctcc

SEQ ID NO: 15275 - DNA, 20 bp, synthetic construct
  source 1..20: mol_type = other DNA
ctcactgcaaccttcacctc

SEQ ID NO: 15276 - DNA, 20 bp, synthetic construct
  source 1..20: mol_type = other DNA
gctcactgcaaccttcacct

SEQ ID NO: 15277 - DNA, 20 bp, synthetic construct
  source 1..20: mol_type = other DNA
agctcactgcaaccttcacc

SEQ ID NO: 15278 - DNA, 20 bp, synthetic construct
  source 1..20: mol_type = other DNA
gagctcactgcaaccttcac

SEQ ID NO: 15279 - DNA, 20 bp, synthetic construct
  source 1..20: mol_type = other DNA
tgagctcactgcaaccttca

SEQ ID NO: 15280 - DNA, 20 bp, synthetic construct
  source 1..20: mol_type = other DNA
ctgagctcactgcaaccttc

SEQ ID NO: 15281 - DNA, 20 bp, synthetic construct
  source 1..20: mol_type = other DNA
tctgagctcactgcaacctt

SEQ ID NO: 15282 - DNA, 20 bp, synthetic construct
  source 1..20: mol_type = other DNA
atctgagctcactgcaacct

SEQ ID NO: 15283 - DNA, 20 bp, synthetic construct
  source 1..20: mol_type = other DNA
aatctgagctcactgcaacc

SEQ ID NO: 15284 - DNA, 20 bp, synthetic construct
  source 1..20: mol_type = other DNA
caatctgagctcactgcaac

SEQ ID NO: 15285 - DNA, 20 bp, synthetic construct
  source 1..20: mol_type = other DNA
acaatctgagctcactgcaa

SEQ ID NO: 15286 - DNA, 20 bp, synthetic construct
  source 1..20: mol_type = other DNA
cacaatctgagctcactgca

SEQ ID NO: 15287 - DNA, 20 bp, synthetic construct
  source 1..20: mol_type = other DNA
gcacaatctgagctcactgc

SEQ ID NO: 15288 - DNA, 20 bp, synthetic construct
  source 1..20: mol_type = other DNA
ggcacaatctgagctcactg

SEQ ID NO: 15289 - DNA, 20 bp, synthetic construct
  source 1..20: mol_type = other DNA
tggcacaatctgagctcact

SEQ ID NO: 15290 - DNA, 20 bp, synthetic construct
  source 1..20: mol_type = other DNA
gtggcacaatctgagctcac

SEQ ID NO: 15291 - DNA, 20 bp, synthetic construct
  source 1..20: mol_type = other DNA
agtggcacaatctgagctca

SEQ ID NO: 15292 - DNA, 20 bp, synthetic construct
  source 1..20: mol_type = other DNA
cagtggcacaatctgagctc

SEQ ID NO: 15293 - DNA, 20 bp, synthetic construct
  source 1..20: mol_type = other DNA
acagtggcacaatctgagct

SEQ ID NO: 15294 - DNA, 20 bp, synthetic construct
  source 1..20: mol_type = other DNA
cacagtggcacaatctgagc

SEQ ID NO: 15295 - DNA, 20 bp, synthetic construct
  source 1..20: mol_type = other DNA
gcacagtggcacaatctgag

SEQ ID NO: 15296 - DNA, 20 bp, synthetic construct
  source 1..20: mol_type = other DNA
ggcacagtggcacaatctga

SEQ ID NO: 15297 - DNA, 20 bp, synthetic construct
  source 1..20: mol_type = other DNA
gggcacagtggcacaatctg

SEQ ID NO: 15298 - DNA, 20 bp, synthetic construct
  source 1..20: mol_type = other DNA
ggggcacagtggcacaatct

SEQ ID NO: 15299 - DNA, 20 bp, synthetic construct
  source 1..20: mol_type = other DNA
tggggcacagtggcacaatc

SEQ ID NO: 15300 - DNA, 20 bp, synthetic construct
  source 1..20: mol_type = other DNA
ctggggcacagtggcacaat

SEQ ID NO: 15301 - DNA, 20 bp, synthetic construct
  source 1..20: mol_type = other DNA
gctggggcacagtggcacaa

SEQ ID NO: 15302 - DNA, 20 bp, synthetic construct
  source 1..20: mol_type = other DNA
ggctggggcacagtggcaca

SEQ ID NO: 15303 - DNA, 20 bp, synthetic construct
  source 1..20: mol_type = other DNA
aggctggggcacagtggcac

SEQ ID NO: 15304 - DNA, 20 bp, synthetic construct
  source 1..20: mol_type = other DNA
caggctggggcacagtggca

SEQ ID NO: 15305 - DNA, 20 bp, synthetic construct
  source 1..20: mol_type = other DNA
ccaggctggggcacagtggc

SEQ ID NO: 15306 - DNA, 20 bp, synthetic construct
  source 1..20: mol_type = other DNA
cccaggctggggcacagtgg

SEQ ID NO: 15307 - DNA, 20 bp, synthetic construct
  source 1..20: mol_type = other DNA
gcccaggctggggcacagtg

SEQ ID NO: 15308 - DNA, 20 bp, synthetic construct
  source 1..20: mol_type = other DNA
ggcccaggctggggcacagt

SEQ ID NO: 15309 - DNA, 20 bp, synthetic construct
  source 1..20: mol_type = other DNA
tggcccaggctggggcacag

SEQ ID NO: 15310 - DNA, 20 bp, synthetic construct
  source 1..20: mol_type = other DNA
gtggcccaggctggggcaca

SEQ ID NO: 15311 - DNA, 20 bp, synthetic construct
  source 1..20: mol_type = other DNA
tgtggcccaggctggggcac

SEQ ID NO: 15312 - DNA, 20 bp, synthetic construct
  source 1..20: mol_type = other DNA
ctgtggcccaggctggggca

SEQ ID NO: 15313 - DNA, 20 bp, synthetic construct
  source 1..20: mol_type = other DNA
tctgtggcccaggctggggc

SEQ ID NO: 15314 - DNA, 20 bp, synthetic construct
  source 1..20: mol_type = other DNA
ctctgtggcccaggctgggg

SEQ ID NO: 15315 - DNA, 20 bp, synthetic construct
  source 1..20: mol_type = other DNA
gctctgtggcccaggctggg

SEQ ID NO: 15316 - DNA, 20 bp, synthetic construct
  source 1..20: mol_type = other DNA
tgctctgtggcccaggctgg

SEQ ID NO: 15317 - DNA, 20 bp, synthetic construct
  source 1..20: mol_type = other DNA
ctgctctgtggcccaggctg

SEQ ID NO: 15318 - DNA, 20 bp, synthetic construct
  source 1..20: mol_type = other DNA
tctgctctgtggcccaggct

SEQ ID NO: 15319 - DNA, 20 bp, synthetic construct
  source 1..20: mol_type = other DNA
ctctgctctgtggcccaggc

SEQ ID NO: 15320 - DNA, 20 bp, synthetic construct
  source 1..20: mol_type = other DNA
actctgctctgtggcccagg

SEQ ID NO: 15321 - DNA, 20 bp, synthetic construct
  source 1..20: mol_type = other DNA
cactctgctctgtggcccag

SEQ ID NO: 15322 - DNA, 20 bp, synthetic construct
  source 1..20: mol_type = other DNA
tcactctgctctgtggccca

SEQ ID NO: 15323 - DNA, 20 bp, synthetic construct
  source 1..20: mol_type = other DNA
ctcactctgctctgtggccc

SEQ ID NO: 15324 - DNA, 20 bp, synthetic construct
  source 1..20: mol_type = other DNA
tctcactctgctctgtggcc

SEQ ID NO: 15325 - DNA, 20 bp, synthetic construct
  source 1..20: mol_type = other DNA
gtctcactctgctctgtggc

SEQ ID NO: 15326 - DNA, 20 bp, synthetic construct
  source 1..20: mol_type = other DNA
agtctcactctgctctgtgg

SEQ ID NO: 15327 - DNA, 20 bp, synthetic construct
  source 1..20: mol_type = other DNA
gagtctcactctgctctgtg

SEQ ID NO: 15328 - DNA, 20 bp, synthetic construct
  source 1..20: mol_type = other DNA
agagtctcactctgctctgt

SEQ ID NO: 15329 - DNA, 20 bp, synthetic construct
  source 1..20: mol_type = other DNA
cagagtctcactctgctctg

SEQ ID NO: 15330 - DNA, 20 bp, synthetic construct
  source 1..20: mol_type = other DNA
acagagtctcactctgctct

SEQ ID NO: 15331 - DNA, 20 bp, synthetic construct
  source 1..20: mol_type = other DNA
gacagagtctcactctgctc

SEQ ID NO: 15332 - DNA, 20 bp, synthetic construct
  source 1..20: mol_type = other DNA
agacagagtctcactctgct

SEQ ID NO: 15333 - DNA, 20 bp, synthetic construct
  source 1..20: mol_type = other DNA
gagacagagtctcactctgc

SEQ ID NO: 15334 - DNA, 20 bp, synthetic construct
  source 1..20: mol_type = other DNA
tgagacagagtctcactctg

SEQ ID NO: 15335 - DNA, 20 bp, synthetic construct
  source 1..20: mol_type = other DNA
ttgagacagagtctcactct

SEQ ID NO: 15336 - DNA, 20 bp, synthetic construct
  source 1..20: mol_type = other DNA
tttgagacagagtctcactc

SEQ ID NO: 15337 - DNA, 20 bp, synthetic construct
  source 1..20: mol_type = other DNA
ttttgagacagagtctcact

SEQ ID NO: 15338 - DNA, 20 bp, synthetic construct
  source 1..20: mol_type = other DNA
tttttgagacagagtctcac

SEQ ID NO: 15339 - DNA, 20 bp, synthetic construct
  source 1..20: mol_type = other DNA
ttttttgagacagagtctca

SEQ ID NO: 15340 - DNA, 20 bp, synthetic construct
  source 1..20: mol_type = other DNA
tttttttgagacagagtctc

SEQ ID NO: 15341 - DNA, 20 bp, synthetic construct
  source 1..20: mol_type = other DNA
ttttttttgagacagagtct

SEQ ID NO: 15342 - DNA, 20 bp, synthetic construct
  source 1..20: mol_type = other DNA
tttttttttgagacagagtc

SEQ ID NO: 15343 - DNA, 20 bp, synthetic construct
  source 1..20: mol_type = other DNA
ttttttttttgagacagagt

SEQ ID NO: 15344 - DNA, 20 bp, synthetic construct
  source 1..20: mol_type = other DNA
tttttttttttgagacagag

SEQ ID NO: 15345 - DNA, 20 bp, synthetic construct
  source 1..20: mol_type = other DNA
ttttttttttttgagacaga

SEQ ID NO: 15346 - DNA, 20 bp, synthetic construct
  source 1..20: mol_type = other DNA
tttttttttttttgagacag

SEQ ID NO: 15347 - DNA, 20 bp, synthetic construct
  source 1..20: mol_type = other DNA
ttttttttttttttgagaca

SEQ ID NO: 15348 - DNA, 20 bp, synthetic construct
  source 1..20: mol_type = other DNA
tttttttttttttttgagac

SEQ ID NO: 15349 - DNA, 20 bp, synthetic construct
  source 1..20: mol_type = other DNA
ctttttttttttttttgaga

SEQ ID NO: 15350 - DNA, 20 bp, synthetic construct
  source 1..20: mol_type = other DNA
actttttttttttttttgag

SEQ ID NO: 15351 - DNA, 20 bp, synthetic construct
  source 1..20: mol_type = other DNA
aactttttttttttttttga

SEQ ID NO: 15352 - DNA, 20 bp, synthetic construct
  source 1..20: mol_type = other DNA
aaactttttttttttttttg

SEQ ID NO: 15353 - DNA, 20 bp, synthetic construct
  source 1..20: mol_type = other DNA
caaacttttttttttttttt

SEQ ID NO: 15354 - DNA, 20 bp, synthetic construct
  source 1..20: mol_type = other DNA
ccaaactttttttttttttt

SEQ ID NO: 15355 - DNA, 20 bp, synthetic construct
  source 1..20: mol_type = other DNA
tccaaacttttttttttttt

SEQ ID NO: 15356 - DNA, 20 bp, synthetic construct
  source 1..20: mol_type = other DNA
ttccaaactttttttttttt

SEQ ID NO: 15357 - DNA, 20 bp, synthetic construct
  source 1..20: mol_type = other DNA
cttccaaacttttttttttt

SEQ ID NO: 15358 - DNA, 20 bp, synthetic construct
  source 1..20: mol_type = other DNA
tcttccaaactttttttttt

SEQ ID NO: 15359 - DNA, 20 bp, synthetic construct
  source 1..20: mol_type = other DNA
gtcttccaaacttttttttt

SEQ ID NO: 15360 - DNA, 20 bp, synthetic construct
  source 1..20: mol_type = other DNA
agtcttccaaactttttttt

SEQ ID NO: 15361 - DNA, 20 bp, synthetic construct
  source 1..20: mol_type = other DNA
cagtcttccaaacttttttt

SEQ ID NO: 15362 - DNA, 20 bp, synthetic construct
  source 1..20: mol_type = other DNA
ccagtcttccaaactttttt

SEQ ID NO: 15363 - DNA, 20 bp, synthetic construct
  source 1..20: mol_type = other DNA
accagtcttccaaacttttt

SEQ ID NO: 15364 - DNA, 20 bp, synthetic construct
  source 1..20: mol_type = other DNA
caccagtcttccaaactttt

SEQ ID NO: 15365 - DNA, 20 bp, synthetic construct
  source 1..20: mol_type = other DNA
ccaccagtcttccaaacttt

SEQ ID NO: 15366 - DNA, 20 bp, synthetic construct
  source 1..20: mol_type = other DNA
gccaccagtcttccaaactt

SEQ ID NO: 15367 - DNA, 20 bp, synthetic construct
  source 1..20: mol_type = other DNA
agccaccagtcttccaaact

SEQ ID NO: 15368 - DNA, 20 bp, synthetic construct
  source 1..20: mol_type = other DNA
cagccaccagtcttccaaac

SEQ ID NO: 15369 - DNA, 20 bp, synthetic construct
  source 1..20: mol_type = other DNA
ccagccaccagtcttccaaa

SEQ ID NO: 15370 - DNA, 20 bp, synthetic construct
  source 1..20: mol_type = other DNA
cccagccaccagtcttccaa

SEQ ID NO: 15371 - DNA, 20 bp, synthetic construct
  source 1..20: mol_type = other DNA
gcccagccaccagtcttcca

SEQ ID NO: 15372 - DNA, 20 bp, synthetic construct
  source 1..20: mol_type = other DNA
tgcccagccaccagtcttcc

SEQ ID NO: 15373 - DNA, 20 bp, synthetic construct
  source 1..20: mol_type = other DNA
atgcccagccaccagtcttc

SEQ ID NO: 15374 - DNA, 20 bp, synthetic construct
  source 1..20: mol_type = other DNA
catgcccagccaccagtctt

SEQ ID NO: 15375 - DNA, 20 bp, synthetic construct
  source 1..20: mol_type = other DNA
ccatgcccagccaccagtct

SEQ ID NO: 15376 - DNA, 20 bp, synthetic construct
  source 1..20: mol_type = other DNA
accatgcccagccaccagtc

SEQ ID NO: 15377 - DNA, 20 bp, synthetic construct
  source 1..20: mol_type = other DNA
caccatgcccagccaccagt

SEQ ID NO: 15378 - DNA, 20 bp, synthetic construct
  source 1..20: mol_type = other DNA
ccaccatgcccagccaccag

SEQ ID NO: 15379 - DNA, 20 bp, synthetic construct
  source 1..20: mol_type = other DNA
gccaccatgcccagccacca

SEQ ID NO: 15380 - DNA, 20 bp, synthetic construct
  source 1..20: mol_type = other DNA
agccaccatgcccagccacc

SEQ ID NO: 15381 - DNA, 20 bp, synthetic construct
  source 1..20: mol_type = other DNA
gagccaccatgcccagccac

SEQ ID NO: 15382 - DNA, 20 bp, synthetic construct
  source 1..20: mol_type = other DNA
tgagccaccatgcccagcca

SEQ ID NO: 15383 - DNA, 20 bp, synthetic construct
  source 1..20: mol_type = other DNA
gtgagccaccatgcccagcc

SEQ ID NO: 15384 - DNA, 20 bp, synthetic construct
  source 1..20: mol_type = other DNA
tgtgagccaccatgcccagc

SEQ ID NO: 15385 - DNA, 20 bp, synthetic construct
  source 1..20: mol_type = other DNA
gtgtgagccaccatgcccag

SEQ ID NO: 15386 - DNA, 20 bp, synthetic construct
  source 1..20: mol_type = other DNA
ggtgtgagccaccatgccca

SEQ ID NO: 15387 - DNA, 20 bp, synthetic construct
  source 1..20: mol_type = other DNA
aggtgtgagccaccatgccc

SEQ ID NO: 15388 - DNA, 20 bp, synthetic construct
  source 1..20: mol_type = other DNA
caggtgtgagccaccatgcc

SEQ ID NO: 15389 - DNA, 20 bp, synthetic construct
  source 1..20: mol_type = other DNA
acaggtgtgagccaccatgc

SEQ ID NO: 15390 - DNA, 20 bp, synthetic construct
  source 1..20: mol_type = other DNA
tacaggtgtgagccaccatg

SEQ ID NO: 15391 - DNA, 20 bp, synthetic construct
  source 1..20: mol_type = other DNA
ttacaggtgtgagccaccat

SEQ ID NO: 15392 - DNA, 20 bp, synthetic construct
  source 1..20: mol_type = other DNA
attacaggtgtgagccacca

SEQ ID NO: 15393 - DNA, 20 bp, synthetic construct
  source 1..20: mol_type = other DNA
gattacaggtgtgagccacc

SEQ ID NO: 15394 - DNA, 20 bp, synthetic construct
  source 1..20: mol_type = other DNA
ggattacaggtgtgagccac

SEQ ID NO: 15395 - DNA, 20 bp, synthetic construct
  source 1..20: mol_type = other DNA
gggattacaggtgtgagcca

SEQ ID NO: 15396 - DNA, 20 bp, synthetic construct
  source 1..20: mol_type = other DNA
tgggattacaggtgtgagcc

SEQ ID NO: 15397 - DNA, 20 bp, synthetic construct
  source 1..20: mol_type = other DNA
ttgggattacaggtgtgagc

SEQ ID NO: 15398 - DNA, 20 bp, synthetic construct
  source 1..20: mol_type = other DNA
gttgggattacaggtgtgag

SEQ ID NO: 15399 - DNA, 20 bp, synthetic construct
  source 1..20: mol_type = other DNA
tgttgggattacaggtgtga

SEQ ID NO: 15400 - DNA, 20 bp, synthetic construct
  source 1..20: mol_type = other DNA
gtgttgggattacaggtgtg

SEQ ID NO: 15401 - DNA, 20 bp, synthetic construct
  source 1..20: mol_type = other DNA
agtgttgggattacaggtgt

SEQ ID NO: 15402 - DNA, 20 bp, synthetic construct
  source 1..20: mol_type = other DNA
aagtgttgggattacaggtg

SEQ ID NO: 15403 - DNA, 20 bp, synthetic construct
  source 1..20: mol_type = other DNA
aaagtgttgggattacaggt

SEQ ID NO: 15404 - DNA, 20 bp, synthetic construct
  source 1..20: mol_type = other DNA
caaagtgttgggattacagg

SEQ ID NO: 15405 - DNA, 20 bp, synthetic construct
  source 1..20: mol_type = other DNA
ccaaagtgttgggattacag

SEQ ID NO: 15406 - DNA, 20 bp, synthetic construct
  source 1..20: mol_type = other DNA
cccaaagtgttgggattaca

SEQ ID NO: 15407 - DNA, 20 bp, synthetic construct
  source 1..20: mol_type = other DNA
tcccaaagtgttgggattac

SEQ ID NO: 15408 - DNA, 20 bp, synthetic construct
  source 1..20: mol_type = other DNA
ctcccaaagtgttgggatta

SEQ ID NO: 15409 - DNA, 20 bp, synthetic construct
  source 1..20: mol_type = other DNA
cctcccaaagtgttgggatt

SEQ ID NO: 15410 - DNA, 20 bp, synthetic construct
  source 1..20: mol_type = other DNA
gcctcccaaagtgttgggat

SEQ ID NO: 15411 - DNA, 20 bp, synthetic construct
  source 1..20: mol_type = other DNA
agcctcccaaagtgttggga

SEQ ID NO: 15412 - DNA, 20 bp, synthetic construct
  source 1..20: mol_type = other DNA
cagcctcccaaagtgttggg

SEQ ID NO: 15413 - DNA, 20 bp, synthetic construct
  source 1..20: mol_type = other DNA
tcagcctcccaaagtgttgg

SEQ ID NO: 15414 - DNA, 20 bp, synthetic construct
  source 1..20: mol_type = other DNA
ttcagcctcccaaagtgttg

SEQ ID NO: 15415 - DNA, 20 bp, synthetic construct
  source 1..20: mol_type = other DNA
cttcagcctcccaaagtgtt

SEQ ID NO: 15416 - DNA, 20 bp, synthetic construct
  source 1..20: mol_type = other DNA
gcttcagcctcccaaagtgt

SEQ ID NO: 15417 - DNA, 20 bp, synthetic construct
  source 1..20: mol_type = other DNA
tgcttcagcctcccaaagtg

SEQ ID NO: 15418 - DNA, 20 bp, synthetic construct
  source 1..20: mol_type = other DNA
ctgcttcagcctcccaaagt

SEQ ID NO: 15419 - DNA, 20 bp, synthetic construct
  source 1..20: mol_type = other DNA
cctgcttcagcctcccaaag

SEQ ID NO: 15420 - DNA, 20 bp, synthetic construct
  source 1..20: mol_type = other DNA
gcctgcttcagcctcccaaa

SEQ ID NO: 15421 - DNA, 20 bp, synthetic construct
  source 1..20: mol_type = other DNA
tgcctgcttcagcctcccaa

SEQ ID NO: 15422 - DNA, 20 bp, synthetic construct
  source 1..20: mol_type = other DNA
ctgcctgcttcagcctccca

SEQ ID NO: 15423 - DNA, 20 bp, synthetic construct
  source 1..20: mol_type = other DNA
tctgcctgcttcagcctccc

SEQ ID NO: 15424 - DNA, 20 bp, synthetic construct
  source 1..20: mol_type = other DNA
atctgcctgcttcagcctcc

SEQ ID NO: 15425 - DNA, 20 bp, synthetic construct
  source 1..20: mol_type = other DNA
aatctgcctgcttcagcctc

SEQ ID NO: 15426 - DNA, 20 bp, synthetic construct
  source 1..20: mol_type = other DNA
taatctgcctgcttcagcct

SEQ ID NO: 15427 - DNA, 20 bp, synthetic construct
  source 1..20: mol_type = other DNA
gtaatctgcctgcttcagcc

SEQ ID NO: 15428 - DNA, 20 bp, synthetic construct
  source 1..20: mol_type = other DNA
ggtaatctgcctgcttcagc

SEQ ID NO: 15429 - DNA, 20 bp, synthetic construct
  source 1..20: mol_type = other DNA
aggtaatctgcctgcttcag

SEQ ID NO: 15430 - DNA, 20 bp, synthetic construct
  source 1..20: mol_type = other DNA
caggtaatctgcctgcttca

SEQ ID NO: 15431 - DNA, 20 bp, synthetic construct
  source 1..20: mol_type = other DNA
tcaggtaatctgcctgcttc

SEQ ID NO: 15432 - DNA, 20 bp, synthetic construct
  source 1..20: mol_type = other DNA
ctcaggtaatctgcctgctt

SEQ ID NO: 15433 - DNA, 20 bp, synthetic construct
  source 1..20: mol_type = other DNA
gctcaggtaatctgcctgct

SEQ ID NO: 15434 - DNA, 20 bp, synthetic construct
  source 1..20: mol_type = other DNA
ggctcaggtaatctgcctgc

SEQ ID NO: 15435 - DNA, 20 bp, synthetic construct
  source 1..20: mol_type = other DNA
gggctcaggtaatctgcctg

SEQ ID NO: 15436 - DNA, 20 bp, synthetic construct
  source 1..20: mol_type = other DNA
tgggctcaggtaatctgcct

SEQ ID NO: 15437 - DNA, 20 bp, synthetic construct
  source 1..20: mol_type = other DNA
ctgggctcaggtaatctgcc

SEQ ID NO: 15438 - DNA, 20 bp, synthetic construct
  source 1..20: mol_type = other DNA
cctgggctcaggtaatctgc

SEQ ID NO: 15439 - DNA, 20 bp, synthetic construct
  source 1..20: mol_type = other DNA
tcctgggctcaggtaatctg

SEQ ID NO: 15440 - DNA, 20 bp, synthetic construct
  source 1..20: mol_type = other DNA
ctcctgggctcaggtaatct

SEQ ID NO: 15441 - DNA, 20 bp, synthetic construct
  source 1..20: mol_type = other DNA
actcctgggctcaggtaatc

SEQ ID NO: 15442 - DNA, 20 bp, synthetic construct
  source 1..20: mol_type = other DNA
aactcctgggctcaggtaat

SEQ ID NO: 15443 - DNA, 20 bp, synthetic construct
  source 1..20: mol_type = other DNA
gaactcctgggctcaggtaa

SEQ ID NO: 15444 - DNA, 20 bp, synthetic construct
  source 1..20: mol_type = other DNA
tgaactcctgggctcaggta

SEQ ID NO: 15445 - DNA, 20 bp, synthetic construct
  source 1..20: mol_type = other DNA
ttgaactcctgggctcaggt

SEQ ID NO: 15446 - DNA, 20 bp, synthetic construct
  source 1..20: mol_type = other DNA
cttgaactcctgggctcagg

SEQ ID NO: 15447 - DNA, 20 bp, synthetic construct
  source 1..20: mol_type = other DNA
acttgaactcctgggctcag

SEQ ID NO: 15448 - DNA, 20 bp, synthetic construct
  source 1..20: mol_type = other DNA
gacttgaactcctgggctca

SEQ ID NO: 15449 - DNA, 20 bp, synthetic construct
  source 1..20: mol_type = other DNA
ggacttgaactcctgggctc

SEQ ID NO: 15450 - DNA, 20 bp, synthetic construct
  source 1..20: mol_type = other DNA
tggacttgaactcctgggct

SEQ ID NO: 15451 - DNA, 20 bp, synthetic construct
  source 1..20: mol_type = other DNA
ctggacttgaactcctgggc

SEQ ID NO: 15452 - DNA, 20 bp, synthetic construct
  source 1..20: mol_type = other DNA
gctggacttgaactcctggg

SEQ ID NO: 15453 - DNA, 20 bp, synthetic construct
  source 1..20: mol_type = other DNA
ggctggacttgaactcctgg

SEQ ID NO: 15454 - DNA, 20 bp, synthetic construct
  source 1..20: mol_type = other DNA
aggctggacttgaactcctg

SEQ ID NO: 15455 - DNA, 20 bp, synthetic construct
  source 1..20: mol_type = other DNA
caggctggacttgaactcct

SEQ ID NO: 15456 - DNA, 20 bp, synthetic construct
  source 1..20: mol_type = other DNA
ccaggctggacttgaactcc

SEQ ID NO: 15457 - DNA, 20 bp, synthetic construct
  source 1..20: mol_type = other DNA
cccaggctggacttgaactc

SEQ ID NO: 15458 - DNA, 20 bp, synthetic construct
  source 1..20: mol_type = other DNA
gcccaggctggacttgaact

SEQ ID NO: 15459 - DNA, 20 bp, synthetic construct
  source 1..20: mol_type = other DNA
tgcccaggctggacttgaac

SEQ ID NO: 15460 - DNA, 20 bp, synthetic construct
  source 1..20: mol_type = other DNA
ttgcccaggctggacttgaa

SEQ ID NO: 15461 - DNA, 20 bp, synthetic construct
  source 1..20: mol_type = other DNA
gttgcccaggctggacttga

SEQ ID NO: 15462 - DNA, 20 bp, synthetic construct
  source 1..20: mol_type = other DNA
tgttgcccaggctggacttg

SEQ ID NO: 15463 - DNA, 20 bp, synthetic construct
  source 1..20: mol_type = other DNA
gtgttgcccaggctggactt

SEQ ID NO: 15464 - DNA, 20 bp, synthetic construct
  source 1..20: mol_type = other DNA
tgtgttgcccaggctggact

SEQ ID NO: 15465 - DNA, 20 bp, synthetic construct
  source 1..20: mol_type = other DNA
ctgtgttgcccaggctggac

SEQ ID NO: 15466 - DNA, 20 bp, synthetic construct
  source 1..20: mol_type = other DNA
cctgtgttgcccaggctgga

SEQ ID NO: 15467 - DNA, 20 bp, synthetic construct
  source 1..20: mol_type = other DNA
ccctgtgttgcccaggctgg

SEQ ID NO: 15468 - DNA, 20 bp, synthetic construct
  source 1..20: mol_type = other DNA
tccctgtgttgcccaggctg

SEQ ID NO: 15469 - DNA, 20 bp, synthetic construct
  source 1..20: mol_type = other DNA
ttccctgtgttgcccaggct

SEQ ID NO: 15470 - DNA, 20 bp, synthetic construct
  source 1..20: mol_type = other DNA
tttccctgtgttgcccaggc

SEQ ID NO: 15471 - DNA, 20 bp, synthetic construct
  source 1..20: mol_type = other DNA
gtttccctgtgttgcccagg

SEQ ID NO: 15472 - DNA, 20 bp, synthetic construct
  source 1..20: mol_type = other DNA
ggtttccctgtgttgcccag

SEQ ID NO: 15473 - DNA, 20 bp, synthetic construct
  source 1..20: mol_type = other DNA
gggtttccctgtgttgccca

SEQ ID NO: 15474 - DNA, 20 bp, synthetic construct
  source 1..20: mol_type = other DNA
ggggtttccctgtgttgccc

SEQ ID NO: 15475 - DNA, 20 bp, synthetic construct
  source 1..20: mol_type = other DNA
tggggtttccctgtgttgcc

SEQ ID NO: 15476 - DNA, 20 bp, synthetic construct
  source 1..20: mol_type = other DNA
atggggtttccctgtgttgc

SEQ ID NO: 15477 - DNA, 20 bp, synthetic construct
  source 1..20: mol_type = other DNA
gatggggtttccctgtgttg

SEQ ID NO: 15478 - DNA, 20 bp, synthetic construct
  source 1..20: mol_type = other DNA
agatggggtttccctgtgtt

SEQ ID NO: 15479 - DNA, 20 bp, synthetic construct
  source 1..20: mol_type = other DNA
gagatggggtttccctgtgt

SEQ ID NO: 15480 - DNA, 20 bp, synthetic construct
  source 1..20: mol_type = other DNA
tgagatggggtttccctgtg

SEQ ID NO: 15481 - DNA, 20 bp, synthetic construct
  source 1..20: mol_type = other DNA
ttgagatggggtttccctgt

SEQ ID NO: 15482 - DNA, 20 bp, synthetic construct
  source 1..20: mol_type = other DNA
gttgagatggggtttccctg

SEQ ID NO: 15483 - DNA, 20 bp, synthetic construct
  source 1..20: mol_type = other DNA
tgttgagatggggtttccct

SEQ ID NO: 15484 - DNA, 20 bp, synthetic construct
  source 1..20: mol_type = other DNA
ttgttgagatggggtttccc

SEQ ID NO: 15485 - DNA, 20 bp, synthetic construct
  source 1..20: mol_type = other DNA
tttgttgagatggggtttcc

SEQ ID NO: 15486 - DNA, 20 bp, synthetic construct
  source 1..20: mol_type = other DNA
ttttgttgagatggggtttc

SEQ ID NO: 15487 - DNA, 20 bp, synthetic construct
  source 1..20: mol_type = other DNA
tttttgttgagatggggttt

SEQ ID NO: 15488 - DNA, 20 bp, synthetic construct
  source 1..20: mol_type = other DNA
ttttttgttgagatggggtt

SEQ ID NO: 15489 - DNA, 20 bp, synthetic construct
  source 1..20: mol_type = other DNA
attttttgttgagatggggt

SEQ ID NO: 15490 - DNA, 20 bp, synthetic construct
  source 1..20: mol_type = other DNA
tattttttgttgagatgggg

SEQ ID NO: 15491 - DNA, 20 bp, synthetic construct
  source 1..20: mol_type = other DNA
atattttttgttgagatggg

SEQ ID NO: 15492 - DNA, 20 bp, synthetic construct
  source 1..20: mol_type = other DNA
aatattttttgttgagatgg

SEQ ID NO: 15493 - DNA, 20 bp, synthetic construct
  source 1..20: mol_type = other DNA
taatattttttgttgagatg

SEQ ID NO: 15494 - DNA, 20 bp, synthetic construct
  source 1..20: mol_type = other DNA
ttaatattttttgttgagat

SEQ ID NO: 15495 - DNA, 20 bp, synthetic construct
  source 1..20: mol_type = other DNA
attaatattttttgttgaga

SEQ ID NO: 15496 - DNA, 20 bp, synthetic construct
  source 1..20: mol_type = other DNA
tattaatattttttgttgag

SEQ ID NO: 15497 - DNA, 20 bp, synthetic construct
  source 1..20: mol_type = other DNA
gtattaatattttttgttga

SEQ ID NO: 15498 - DNA, 20 bp, synthetic construct
  source 1..20: mol_type = other DNA
tgtattaatattttttgttg

SEQ ID NO: 15499 - DNA, 20 bp, synthetic construct
  source 1..20: mol_type = other DNA
ttgtattaatattttttgtt

SEQ ID NO: 15500 - DNA, 20 bp, synthetic construct
  source 1..20: mol_type = other DNA
tttgtattaatattttttgt

SEQ ID NO: 15501 - DNA, 20 bp, synthetic construct
  source 1..20: mol_type = other DNA
ttttgtattaatattttttg

SEQ ID NO: 15502 - DNA, 20 bp, synthetic construct
  source 1..20: mol_type = other DNA
tttttgtattaatatttttt

SEQ ID NO: 15503 - DNA, 20 bp, synthetic construct
  source 1..20: mol_type = other DNA
ttttttgtattaatattttt

SEQ ID NO: 15504 - DNA, 20 bp, synthetic construct
  source 1..20: mol_type = other DNA
attttttgtattaatatttt

SEQ ID NO: 15505 - DNA, 20 bp, synthetic construct
  source 1..20: mol_type = other DNA
aattttttgtattaatattt

SEQ ID NO: 15506 - DNA, 20 bp, synthetic construct
  source 1..20: mol_type = other DNA
aaattttttgtattaatatt

SEQ ID NO: 15507 - DNA, 20 bp, synthetic construct
  source 1..20: mol_type = other DNA
taaattttttgtattaatat

SEQ ID NO: 15508 - DNA, 20 bp, synthetic construct
  source 1..20: mol_type = other DNA
ctaaattttttgtattaata

SEQ ID NO: 15509 - DNA, 20 bp, synthetic construct
  source 1..20: mol_type = other DNA
gctaaattttttgtattaat

SEQ ID NO: 15510 - DNA, 20 bp, synthetic construct
  source 1..20: mol_type = other DNA
ggctaaattttttgtattaa

SEQ ID NO: 15511 - DNA, 20 bp, synthetic construct
  source 1..20: mol_type = other DNA
tggctaaattttttgtatta

SEQ ID NO: 15512 - DNA, 20 bp, synthetic construct
  source 1..20: mol_type = other DNA
ctggctaaattttttgtatt

SEQ ID NO: 15513 - DNA, 20 bp, synthetic construct
  source 1..20: mol_type = other DNA
actggctaaattttttgtat

SEQ ID NO: 15514 - DNA, 20 bp, synthetic construct
  source 1..20: mol_type = other DNA
gactggctaaattttttgta

SEQ ID NO: 15515 - DNA, 20 bp, synthetic construct
  source 1..20: mol_type = other DNA
tgactggctaaattttttgt

SEQ ID NO: 15516 - DNA, 20 bp, synthetic construct
  source 1..20: mol_type = other DNA
atgactggctaaattttttg

SEQ ID NO: 15517 - DNA, 20 bp, synthetic construct
  source 1..20: mol_type = other DNA
catgactggctaaatttttt

SEQ ID NO: 15518 - DNA, 20 bp, synthetic construct
  source 1..20: mol_type = other DNA
ccatgactggctaaattttt

SEQ ID NO: 15519 - DNA, 20 bp, synthetic construct
  source 1..20: mol_type = other DNA
accatgactggctaaatttt

SEQ ID NO: 15520 - DNA, 20 bp, synthetic construct
  source 1..20: mol_type = other DNA
gaccatgactggctaaattt

SEQ ID NO: 15521 - DNA, 20 bp, synthetic construct
  source 1..20: mol_type = other DNA
cgaccatgactggctaaatt

SEQ ID NO: 15522 - DNA, 20 bp, synthetic construct
  source 1..20: mol_type = other DNA
acgaccatgactggctaaat

SEQ ID NO: 15523 - DNA, 20 bp, synthetic construct
  source 1..20: mol_type = other DNA
cacgaccatgactggctaaa

SEQ ID NO: 15524 - DNA, 20 bp, synthetic construct
  source 1..20: mol_type = other DNA
gcacgaccatgactggctaa

SEQ ID NO: 15525 - DNA, 20 bp, synthetic construct
  source 1..20: mol_type = other DNA
tgcacgaccatgactggcta

SEQ ID NO: 15526 - DNA, 20 bp, synthetic construct
  source 1..20: mol_type = other DNA
gtgcacgaccatgactggct

SEQ ID NO: 15527 - DNA, 20 bp, synthetic construct
  source 1..20: mol_type = other DNA
agtgcacgaccatgactggc

SEQ ID NO: 15528 - DNA, 20 bp, synthetic construct
  source 1..20: mol_type = other DNA
aagtgcacgaccatgactgg

SEQ ID NO: 15529 - DNA, 20 bp, synthetic construct
  source 1..20: mol_type = other DNA
gaagtgcacgaccatgactg

SEQ ID NO: 15530 - DNA, 20 bp, synthetic construct
  source 1..20: mol_type = other DNA
agaagtgcacgaccatgact

SEQ ID NO: 15531 - DNA, 20 bp, synthetic construct
  source 1..20: mol_type = other DNA
cagaagtgcacgaccatgac

SEQ ID NO: 15532 - DNA, 20 bp, synthetic construct
  source 1..20: mol_type = other DNA
acagaagtgcacgaccatga

SEQ ID NO: 15533 - DNA, 20 bp, synthetic construct
  source 1..20: mol_type = other DNA
tacagaagtgcacgaccatg

SEQ ID NO: 15534 - DNA, 20 bp, synthetic construct
  source 1..20: mol_type = other DNA
ctacagaagtgcacgaccat

SEQ ID NO: 15535 - DNA, 20 bp, synthetic construct
  source 1..20: mol_type = other DNA
actacagaagtgcacgacca

SEQ ID NO: 15536 - DNA, 20 bp, synthetic construct
  source 1..20: mol_type = other DNA
gactacagaagtgcacgacc

SEQ ID NO: 15537 - DNA, 20 bp, synthetic construct
  source 1..20: mol_type = other DNA
agactacagaagtgcacgac

SEQ ID NO: 15538 - DNA, 20 bp, synthetic construct
  source 1..20: mol_type = other DNA
gagactacagaagtgcacga

SEQ ID NO: 15539 - DNA, 20 bp, synthetic construct
  source 1..20: mol_type = other DNA
tgagactacagaagtgcacg

SEQ ID NO: 15540 - DNA, 20 bp, synthetic construct
  source 1..20: mol_type = other DNA
ctgagactacagaagtgcac

SEQ ID NO: 15541 - DNA, 20 bp, synthetic construct
  source 1..20: mol_type = other DNA
gctgagactacagaagtgca

SEQ ID NO: 15542 - DNA, 20 bp, synthetic construct
  source 1..20: mol_type = other DNA
agctgagactacagaagtgc

SEQ ID NO: 15543 - DNA, 20 bp, synthetic construct
  source 1..20: mol_type = other DNA
tagctgagactacagaagtg

SEQ ID NO: 15544 - DNA, 20 bp, synthetic construct
  source 1..20: mol_type = other DNA
gtagctgagactacagaagt

SEQ ID NO: 15545 - DNA, 20 bp, synthetic construct
  source 1..20: mol_type = other DNA
agtagctgagactacagaag

SEQ ID NO: 15546 - DNA, 20 bp, synthetic construct
  source 1..20: mol_type = other DNA
aagtagctgagactacagaa

SEQ ID NO: 15547 - DNA, 20 bp, synthetic construct
  source 1..20: mol_type = other DNA
caagtagctgagactacaga

SEQ ID NO: 15548 - DNA, 20 bp, synthetic construct
  source 1..20: mol_type = other DNA
ccaagtagctgagactacag

SEQ ID NO: 15549 - DNA, 20 bp, synthetic construct
  source 1..20: mol_type = other DNA
cccaagtagctgagactaca

SEQ ID NO: 15550 - DNA, 20 bp, synthetic construct
  source 1..20: mol_type = other DNA
tcccaagtagctgagactac

SEQ ID NO: 15551 - DNA, 20 bp, synthetic construct
  source 1..20: mol_type = other DNA
ctcccaagtagctgagacta

SEQ ID NO: 15552 - DNA, 20 bp, synthetic construct
  source 1..20: mol_type = other DNA
cctcccaagtagctgagact

SEQ ID NO: 15553 - DNA, 20 bp, synthetic construct
  source 1..20: mol_type = other DNA
gcctcccaagtagctgagac

SEQ ID NO: 15554 - DNA, 20 bp, synthetic construct
  source 1..20: mol_type = other DNA
agcctcccaagtagctgaga

SEQ ID NO: 15555 - DNA, 20 bp, synthetic construct
  source 1..20: mol_type = other DNA
cagcctcccaagtagctgag

SEQ ID NO: 15556 - DNA, 20 bp, synthetic construct
  source 1..20: mol_type = other DNA
tcagcctcccaagtagctga

SEQ ID NO: 15557 - DNA, 20 bp, synthetic construct
  source 1..20: mol_type = other DNA
ctcagcctcccaagtagctg

SEQ ID NO: 15558 - DNA, 20 bp, synthetic construct
  source 1..20: mol_type = other DNA
cctcagcctcccaagtagct

SEQ ID NO: 15559 - DNA, 20 bp, synthetic construct
  source 1..20: mol_type = other DNA
gcctcagcctcccaagtagc

SEQ ID NO: 15560 - DNA, 20 bp, synthetic construct
  source 1..20: mol_type = other DNA
tgcctcagcctcccaagtag

SEQ ID NO: 15561 - DNA, 20 bp, synthetic construct
  source 1..20: mol_type = other DNA
ctgcctcagcctcccaagta

SEQ ID NO: 15562 - DNA, 20 bp, synthetic construct
  source 1..20: mol_type = other DNA
cctgcctcagcctcccaagt

SEQ ID NO: 15563 - DNA, 20 bp, synthetic construct
  source 1..20: mol_type = other DNA
acctgcctcagcctcccaag

SEQ ID NO: 15564 - DNA, 20 bp, synthetic construct
  source 1..20: mol_type = other DNA
cacctgcctcagcctcccaa

SEQ ID NO: 15565 - DNA, 20 bp, synthetic construct
  source 1..20: mol_type = other DNA
ccacctgcctcagcctccca

SEQ ID NO: 15566 - DNA, 20 bp, synthetic construct
  source 1..20: mol_type = other DNA
accacctgcctcagcctccc

SEQ ID NO: 15567 - DNA, 20 bp, synthetic construct
  source 1..20: mol_type = other DNA
aaccacctgcctcagcctcc

SEQ ID NO: 15568 - DNA, 20 bp, synthetic construct
  source 1..20: mol_type = other DNA
gaaccacctgcctcagcctc

SEQ ID NO: 15569 - DNA, 20 bp, synthetic construct
  source 1..20: mol_type = other DNA
tgaaccacctgcctcagcct

SEQ ID NO: 15570 - DNA, 20 bp, synthetic construct
  source 1..20: mol_type = other DNA
gtgaaccacctgcctcagcc

SEQ ID NO: 15571 - DNA, 20 bp, synthetic construct
  source 1..20: mol_type = other DNA
agtgaaccacctgcctcagc

SEQ ID NO: 15572 - DNA, 20 bp, synthetic construct
  source 1..20: mol_type = other DNA
aagtgaaccacctgcctcag

SEQ ID NO: 15573 - DNA, 20 bp, synthetic construct
  source 1..20: mol_type = other DNA
taagtgaaccacctgcctca

SEQ ID NO: 15574 - DNA, 20 bp, synthetic construct
  source 1..20: mol_type = other DNA
ttaagtgaaccacctgcctc

SEQ ID NO: 15575 - DNA, 20 bp, synthetic construct
  source 1..20: mol_type = other DNA
cttaagtgaaccacctgcct

SEQ ID NO: 15576 - DNA, 20 bp, synthetic construct
  source 1..20: mol_type = other DNA
acttaagtgaaccacctgcc

SEQ ID NO: 15577 - DNA, 20 bp, synthetic construct
  source 1..20: mol_type = other DNA
gacttaagtgaaccacctgc

SEQ ID NO: 15578 - DNA, 20 bp, synthetic construct
  source 1..20: mol_type = other DNA
agacttaagtgaaccacctg

SEQ ID NO: 15579 - DNA, 20 bp, synthetic construct
  source 1..20: mol_type = other DNA
cagacttaagtgaaccacct

SEQ ID NO: 15580 - DNA, 20 bp, synthetic construct
  source 1..20: mol_type = other DNA
ccagacttaagtgaaccacc

SEQ ID NO: 15581 - DNA, 20 bp, synthetic construct
  source 1..20: mol_type = other DNA
tccagacttaagtgaaccac

SEQ ID NO: 15582 - DNA, 20 bp, synthetic construct
  source 1..20: mol_type = other DNA
atccagacttaagtgaacca

SEQ ID NO: 15583 - DNA, 20 bp, synthetic construct
  source 1..20: mol_type = other DNA
catccagacttaagtgaacc

SEQ ID NO: 15584 - DNA, 20 bp, synthetic construct
  source 1..20: mol_type = other DNA
acatccagacttaagtgaac

SEQ ID NO: 15585 - DNA, 20 bp, synthetic construct
  source 1..20: mol_type = other DNA
gacatccagacttaagtgaa

SEQ ID NO: 15586 - DNA, 20 bp, synthetic construct
  source 1..20: mol_type = other DNA
cgacatccagacttaagtga

SEQ ID NO: 15587 - DNA, 20 bp, synthetic construct
  source 1..20: mol_type = other DNA
tcgacatccagacttaagtg

SEQ ID NO: 15588 - DNA, 20 bp, synthetic construct
  source 1..20: mol_type = other DNA
ctcgacatccagacttaagt

SEQ ID NO: 15589 - DNA, 20 bp, synthetic construct
  source 1..20: mol_type = other DNA
cctcgacatccagacttaag

SEQ ID NO: 15590 - DNA, 20 bp, synthetic construct
  source 1..20: mol_type = other DNA
acctcgacatccagacttaa

SEQ ID NO: 15591 - DNA, 20 bp, synthetic construct
  source 1..20: mol_type = other DNA
cacctcgacatccagactta

SEQ ID NO: 15592 - DNA, 20 bp, synthetic construct
  source 1..20: mol_type = other DNA
tcacctcgacatccagactt

SEQ ID NO: 15593 - DNA, 20 bp, synthetic construct
  source 1..20: mol_type = other DNA
ctcacctcgacatccagact

SEQ ID NO: 15594 - DNA, 20 bp, synthetic construct
  source 1..20: mol_type = other DNA
gctcacctcgacatccagac

SEQ ID NO: 15595 - DNA, 20 bp, synthetic construct
  source 1..20: mol_type = other DNA
ggctcacctcgacatccaga

SEQ ID NO: 15596 - DNA, 20 bp, synthetic construct
  source 1..20: mol_type = other DNA
tggctcacctcgacatccag

SEQ ID NO: 15597 - DNA, 20 bp, synthetic construct
  source 1..20: mol_type = other DNA
atggctcacctcgacatcca

SEQ ID NO: 15598 - DNA, 20 bp, synthetic construct
  source 1..20: mol_type = other DNA
catggctcacctcgacatcc

SEQ ID NO: 15599 - DNA, 20 bp, synthetic construct
  source 1..20: mol_type = other DNA
tcatggctcacctcgacatc

SEQ ID NO: 15600 - DNA, 20 bp, synthetic construct
  source 1..20: mol_type = other DNA
atcatggctcacctcgacat

SEQ ID NO: 15601 - DNA, 20 bp, synthetic construct
  source 1..20: mol_type = other DNA
aatcatggctcacctcgaca

SEQ ID NO: 15602 - DNA, 20 bp, synthetic construct
  source 1..20: mol_type = other DNA
caatcatggctcacctcgac

SEQ ID NO: 15603 - DNA, 20 bp, synthetic construct
  source 1..20: mol_type = other DNA
gcaatcatggctcacctcga

SEQ ID NO: 15604 - DNA, 20 bp, synthetic construct
  source 1..20: mol_type = other DNA
tgcaatcatggctcacctcg

SEQ ID NO: 15605 - DNA, 20 bp, synthetic construct
  source 1..20: mol_type = other DNA
gtgcaatcatggctcacctc

SEQ ID NO: 15606 - DNA, 20 bp, synthetic construct
  source 1..20: mol_type = other DNA
ggtgcaatcatggctcacct

SEQ ID NO: 15607 - DNA, 20 bp, synthetic construct
  source 1..20: mol_type = other DNA
tggtgcaatcatggctcacc

SEQ ID NO: 15608 - DNA, 20 bp, synthetic construct
  source 1..20: mol_type = other DNA
gtggtgcaatcatggctcac

SEQ ID NO: 15609 - DNA, 20 bp, synthetic construct
  source 1..20: mol_type = other DNA
agtggtgcaatcatggctca

SEQ ID NO: 15610 - DNA, 20 bp, synthetic construct
  source 1..20: mol_type = other DNA
cagtggtgcaatcatggctc

SEQ ID NO: 15611 - DNA, 20 bp, synthetic construct
  source 1..20: mol_type = other DNA
gcagtggtgcaatcatggct

SEQ ID NO: 15612 - DNA, 20 bp, synthetic construct
  source 1..20: mol_type = other DNA
tgcagtggtgcaatcatggc

SEQ ID NO: 15613 - DNA, 20 bp, synthetic construct
  source 1..20: mol_type = other DNA
gtgcagtggtgcaatcatgg

SEQ ID NO: 15614 - DNA, 20 bp, synthetic construct
  source 1..20: mol_type = other DNA
agtgcagtggtgcaatcatg

SEQ ID NO: 15615 - DNA, 20 bp, synthetic construct
  source 1..20: mol_type = other DNA
gagtgcagtggtgcaatcat

SEQ ID NO: 15616 - DNA, 20 bp, synthetic construct
  source 1..20: mol_type = other DNA
ggagtgcagtggtgcaatca

SEQ ID NO: 15617 - DNA, 20 bp, synthetic construct
  source 1..20: mol_type = other DNA
tggagtgcagtggtgcaatc

SEQ ID NO: 15618 - DNA, 20 bp, synthetic construct
  source 1..20: mol_type = other DNA
ctggagtgcagtggtgcaat

SEQ ID NO: 15619 - DNA, 20 bp, synthetic construct
  source 1..20: mol_type = other DNA
gctggagtgcagtggtgcaa

SEQ ID NO: 15620 - DNA, 20 bp, synthetic construct
  source 1..20: mol_type = other DNA
ggctggagtgcagtggtgca

SEQ ID NO: 15621 - DNA, 20 bp, synthetic construct
  source 1..20: mol_type = other DNA
aggctggagtgcagtggtgc

SEQ ID NO: 15622 - DNA, 20 bp, synthetic construct
  source 1..20: mol_type = other DNA
caggctggagtgcagtggtg

SEQ ID NO: 15623 - DNA, 20 bp, synthetic construct
  source 1..20: mol_type = other DNA
ccaggctggagtgcagtggt

SEQ ID NO: 15624 - DNA, 20 bp, synthetic construct
  source 1..20: mol_type = other DNA
cccaggctggagtgcagtgg

SEQ ID NO: 15625 - DNA, 20 bp, synthetic construct
  source 1..20: mol_type = other DNA
gcccaggctggagtgcagtg

SEQ ID NO: 15626 - DNA, 20 bp, synthetic construct
  source 1..20: mol_type = other DNA
cgcccaggctggagtgcagt

SEQ ID NO: 15627 - DNA, 20 bp, synthetic construct
  source 1..20: mol_type = other DNA
acgcccaggctggagtgcag

SEQ ID NO: 15628 - DNA, 20 bp, synthetic construct
  source 1..20: mol_type = other DNA
aacgcccaggctggagtgca

SEQ ID NO: 15629 - DNA, 20 bp, synthetic construct
  source 1..20: mol_type = other DNA
taacgcccaggctggagtgc

SEQ ID NO: 15630 - DNA, 20 bp, synthetic construct
  source 1..20: mol_type = other DNA
ttaacgcccaggctggagtg

SEQ ID NO: 15631 - DNA, 20 bp, synthetic construct
  source 1..20: mol_type = other DNA
tttaacgcccaggctggagt

SEQ ID NO: 15632 - DNA, 20 bp, synthetic construct
  source 1..20: mol_type = other DNA
ttttaacgcccaggctggag

SEQ ID NO: 15633 - DNA, 20 bp, synthetic construct
  source 1..20: mol_type = other DNA
attttaacgcccaggctgga

SEQ ID NO: 15634 - DNA, 20 bp, synthetic construct
  source 1..20: mol_type = other DNA
cattttaacgcccaggctgg

SEQ ID NO: 15635 - DNA, 20 bp, synthetic construct
  source 1..20: mol_type = other DNA
tcattttaacgcccaggctg

SEQ ID NO: 15636 - DNA, 20 bp, synthetic construct
  source 1..20: mol_type = other DNA
ctcattttaacgcccaggct

SEQ ID NO: 15637 - DNA, 20 bp, synthetic construct
  source 1..20: mol_type = other DNA
tctcattttaacgcccaggc

SEQ ID NO: 15638 - DNA, 20 bp, synthetic construct
  source 1..20: mol_type = other DNA
gtctcattttaacgcccagg

SEQ ID NO: 15639 - DNA, 20 bp, synthetic construct
  source 1..20: mol_type = other DNA
ggtctcattttaacgcccag

SEQ ID NO: 15640 - DNA, 20 bp, synthetic construct
  source 1..20: mol_type = other DNA
aggtctcattttaacgccca

SEQ ID NO: 15641 - DNA, 20 bp, synthetic construct
  source 1..20: mol_type = other DNA
aaggtctcattttaacgccc

SEQ ID NO: 15642 - DNA, 20 bp, synthetic construct
  source 1..20: mol_type = other DNA
taaggtctcattttaacgcc

SEQ ID NO: 15643 - DNA, 20 bp, synthetic construct
  source 1..20: mol_type = other DNA
ataaggtctcattttaacgc

SEQ ID NO: 15644 - DNA, 20 bp, synthetic construct
  source 1..20: mol_type = other DNA
gataaggtctcattttaacg

SEQ ID NO: 15645 - DNA, 20 bp, synthetic construct
  source 1..20: mol_type = other DNA
agataaggtctcattttaac

SEQ ID NO: 15646 - DNA, 20 bp, synthetic construct
  source 1..20: mol_type = other DNA
gagataaggtctcattttaa

SEQ ID NO: 15647 - DNA, 20 bp, synthetic construct
  source 1..20: mol_type = other DNA
tgagataaggtctcatttta

SEQ ID NO: 15648 - DNA, 20 bp, synthetic construct
  source 1..20: mol_type = other DNA
ttgagataaggtctcatttt

SEQ ID NO: 15649 - DNA, 20 bp, synthetic construct
  source 1..20: mol_type = other DNA
tttgagataaggtctcattt

SEQ ID NO: 15650 - DNA, 20 bp, synthetic construct
  source 1..20: mol_type = other DNA
ttttgagataaggtctcatt

SEQ ID NO: 15651 - DNA, 20 bp, synthetic construct
  source 1..20: mol_type = other DNA
tttttgagataaggtctcat

SEQ ID NO: 15652 - DNA, 20 bp, synthetic construct
  source 1..20: mol_type = other DNA
ttttttgagataaggtctca

SEQ ID NO: 15653 - DNA, 20 bp, synthetic construct
  source 1..20: mol_type = other DNA
tttttttgagataaggtctc

SEQ ID NO: 15654 - DNA, 20 bp, synthetic construct
  source 1..20: mol_type = other DNA
gtttttttgagataaggtct

SEQ ID NO: 15655 - DNA, 20 bp, synthetic construct
  source 1..20: mol_type = other DNA
tgtttttttgagataaggtc

SEQ ID NO: 15656 - DNA, 20 bp, synthetic construct
  source 1..20: mol_type = other DNA
ttgtttttttgagataaggt

SEQ ID NO: 15657 - DNA, 20 bp, synthetic construct
  source 1..20: mol_type = other DNA
tttgtttttttgagataagg

SEQ ID NO: 15658 - DNA, 20 bp, synthetic construct
  source 1..20: mol_type = other DNA
ctttgtttttttgagataag

SEQ ID NO: 15659 - DNA, 20 bp, synthetic construct
  source 1..20: mol_type = other DNA
gctttgtttttttgagataa

SEQ ID NO: 15660 - DNA, 20 bp, synthetic construct
  source 1..20: mol_type = other DNA
tgctttgtttttttgagata

SEQ ID NO: 15661 - DNA, 20 bp, synthetic construct
  source 1..20: mol_type = other DNA
ttgctttgtttttttgagat

SEQ ID NO: 15662 - DNA, 20 bp, synthetic construct
  source 1..20: mol_type = other DNA
tttgctttgtttttttgaga

SEQ ID NO: 15663 - DNA, 20 bp, synthetic construct
  source 1..20: mol_type = other DNA
ctttgctttgtttttttgag

SEQ ID NO: 15664 - DNA, 20 bp, synthetic construct
  source 1..20: mol_type = other DNA
tctttgctttgtttttttga

SEQ ID NO: 15665 - DNA, 20 bp, synthetic construct
  source 1..20: mol_type = other DNA
ctctttgctttgtttttttg

SEQ ID NO: 15666 - DNA, 20 bp, synthetic construct
  source 1..20: mol_type = other DNA
gctctttgctttgttttttt

SEQ ID NO: 15667 - DNA, 20 bp, synthetic construct
  source 1..20: mol_type = other DNA
ggctctttgctttgtttttt

SEQ ID NO: 15668 - DNA, 20 bp, synthetic construct
  source 1..20: mol_type = other DNA
aggctctttgctttgttttt

SEQ ID NO: 15669 - DNA, 20 bp, synthetic construct
  source 1..20: mol_type = other DNA
caggctctttgctttgtttt

SEQ ID NO: 15670 - DNA, 20 bp, synthetic construct
  source 1..20: mol_type = other DNA
ccaggctctttgctttgttt

SEQ ID NO: 15671 - DNA, 20 bp, synthetic construct
  source 1..20: mol_type = other DNA
cccaggctctttgctttgtt

SEQ ID NO: 15672 - DNA, 20 bp, synthetic construct
  source 1..20: mol_type = other DNA
tcccaggctctttgctttgt

SEQ ID NO: 15673 - DNA, 20 bp, synthetic construct
  source 1..20: mol_type = other DNA
ttcccaggctctttgctttg

SEQ ID NO: 15674 - DNA, 20 bp, synthetic construct
  source 1..20: mol_type = other DNA
gttcccaggctctttgcttt

SEQ ID NO: 15675 - DNA, 20 bp, synthetic construct
  source 1..20: mol_type = other DNA
agttcccaggctctttgctt

SEQ ID NO: 15676 - DNA, 20 bp, synthetic construct
  source 1..20: mol_type = other DNA
tagttcccaggctctttgct

SEQ ID NO: 15677 - DNA, 20 bp, synthetic construct
  source 1..20: mol_type = other DNA
gtagttcccaggctctttgc

SEQ ID NO: 15678 - DNA, 20 bp, synthetic construct
  source 1..20: mol_type = other DNA
agtagttcccaggctctttg

SEQ ID NO: 15679 - DNA, 20 bp, synthetic construct
  source 1..20: mol_type = other DNA
tagtagttcccaggctcttt

SEQ ID NO: 15680 - DNA, 20 bp, synthetic construct
  source 1..20: mol_type = other DNA
ttagtagttcccaggctctt

SEQ ID NO: 15681 - DNA, 20 bp, synthetic construct
  source 1..20: mol_type = other DNA
tttagtagttcccaggctct

SEQ ID NO: 15682 - DNA, 20 bp, synthetic construct
  source 1..20: mol_type = other DNA
ttttagtagttcccaggctc

SEQ ID NO: 15683 - DNA, 20 bp, synthetic construct
  source 1..20: mol_type = other DNA
attttagtagttcccaggct

SEQ ID NO: 15684 - DNA, 20 bp, synthetic construct
  source 1..20: mol_type = other DNA
cattttagtagttcccaggc

SEQ ID NO: 15685 - DNA, 20 bp, synthetic construct
  source 1..20: mol_type = other DNA
ccattttagtagttcccagg

SEQ ID NO: 15686 - DNA, 20 bp, synthetic construct
  source 1..20: mol_type = other DNA
cccattttagtagttcccag

SEQ ID NO: 15687 - DNA, 20 bp, synthetic construct
  source 1..20: mol_type = other DNA
tcccattttagtagttccca

SEQ ID NO: 15688 - DNA, 20 bp, synthetic construct
  source 1..20: mol_type = other DNA
ttcccattttagtagttccc

SEQ ID NO: 15689 - DNA, 20 bp, synthetic construct
  source 1..20: mol_type = other DNA
gttcccattttagtagttcc

SEQ ID NO: 15690 - DNA, 20 bp, synthetic construct
  source 1..20: mol_type = other DNA
agttcccattttagtagttc

SEQ ID NO: 15691 - DNA, 20 bp, synthetic construct
  source 1..20: mol_type = other DNA
tagttcccattttagtagtt

SEQ ID NO: 15692 - DNA, 20 bp, synthetic construct
  source 1..20: mol_type = other DNA
gtagttcccattttagtagt

SEQ ID NO: 15693 - DNA, 20 bp, synthetic construct
  source 1..20: mol_type = other DNA
agtagttcccattttagtag

SEQ ID NO: 15694 - DNA, 20 bp, synthetic construct
  source 1..20: mol_type = other DNA
tagtagttcccattttagta

SEQ ID NO: 15695 - DNA, 20 bp, synthetic construct
  source 1..20: mol_type = other DNA
ttagtagttcccattttagt

SEQ ID NO: 15696 - DNA, 20 bp, synthetic construct
  source 1..20: mol_type = other DNA
tttagtagttcccattttag

SEQ ID NO: 15697 - DNA, 20 bp, synthetic construct
  source 1..20: mol_type = other DNA
ttttagtagttcccatttta

SEQ ID NO: 15698 - DNA, 20 bp, synthetic construct
  source 1..20: mol_type = other DNA
tttttagtagttcccatttt

SEQ ID NO: 15699 - DNA, 20 bp, synthetic construct
  source 1..20: mol_type = other DNA
ttttttagtagttcccattt

SEQ ID NO: 15700 - DNA, 20 bp, synthetic construct
  source 1..20: mol_type = other DNA
gttttttagtagttcccatt

SEQ ID NO: 15701 - DNA, 20 bp, synthetic construct
  source 1..20: mol_type = other DNA
tgttttttagtagttcccat

SEQ ID NO: 15702 - DNA, 20 bp, synthetic construct
  source 1..20: mol_type = other DNA
ctgttttttagtagttccca

SEQ ID NO: 15703 - DNA, 20 bp, synthetic construct
  source 1..20: mol_type = other DNA
tctgttttttagtagttccc

SEQ ID NO: 15704 - DNA, 20 bp, synthetic construct
  source 1..20: mol_type = other DNA
gtctgttttttagtagttcc

SEQ ID NO: 15705 - DNA, 20 bp, synthetic construct
  source 1..20: mol_type = other DNA
tgtctgttttttagtagttc

SEQ ID NO: 15706 - DNA, 20 bp, synthetic construct
  source 1..20: mol_type = other DNA
gtgtctgttttttagtagtt

SEQ ID NO: 15707 - DNA, 20 bp, synthetic construct
  source 1..20: mol_type = other DNA
tgtgtctgttttttagtagt

SEQ ID NO: 15708 - DNA, 20 bp, synthetic construct
  source 1..20: mol_type = other DNA
ttgtgtctgttttttagtag

SEQ ID NO: 15709 - DNA, 20 bp, synthetic construct
  source 1..20: mol_type = other DNA
cttgtgtctgttttttagta

SEQ ID NO: 15710 - DNA, 20 bp, synthetic construct
  source 1..20: mol_type = other DNA
tcttgtgtctgttttttagt

SEQ ID NO: 15711 - DNA, 20 bp, synthetic construct
  source 1..20: mol_type = other DNA
ctcttgtgtctgttttttag

SEQ ID NO: 15712 - DNA, 20 bp, synthetic construct
  source 1..20: mol_type = other DNA
gctcttgtgtctgtttttta

SEQ ID NO: 15713 - DNA, 20 bp, synthetic construct
  source 1..20: mol_type = other DNA
agctcttgtgtctgtttttt

SEQ ID NO: 15714 - DNA, 20 bp, synthetic construct
  source 1..20: mol_type = other DNA
gagctcttgtgtctgttttt

SEQ ID NO: 15715 - DNA, 20 bp, synthetic construct
  source 1..20: mol_type = other DNA
tgagctcttgtgtctgtttt

SEQ ID NO: 15716 - DNA, 20 bp, synthetic construct
  source 1..20: mol_type = other DNA
ttgagctcttgtgtctgttt

SEQ ID NO: 15717 - DNA, 20 bp, synthetic construct
  source 1..20: mol_type = other DNA
gttgagctcttgtgtctgtt

SEQ ID NO: 15718 - DNA, 20 bp, synthetic construct
  source 1..20: mol_type = other DNA
tgttgagctcttgtgtctgt

SEQ ID NO: 15719 - DNA, 20 bp, synthetic construct
  source 1..20: mol_type = other DNA
ttgttgagctcttgtgtctg

SEQ ID NO: 15720 - DNA, 20 bp, synthetic construct
  source 1..20: mol_type = other DNA
cttgttgagctcttgtgtct

SEQ ID NO: 15721 - DNA, 20 bp, synthetic construct
  source 1..20: mol_type = other DNA
acttgttgagctcttgtgtc

SEQ ID NO: 15722 - DNA, 20 bp, synthetic construct
  source 1..20: mol_type = other DNA
tacttgttgagctcttgtgt

SEQ ID NO: 15723 - DNA, 20 bp, synthetic construct
  source 1..20: mol_type = other DNA
atacttgttgagctcttgtg

SEQ ID NO: 15724 - DNA, 20 bp, synthetic construct
  source 1..20: mol_type = other DNA
tatacttgttgagctcttgt

SEQ ID NO: 15725 - DNA, 20 bp, synthetic construct
  source 1..20: mol_type = other DNA
gtatacttgttgagctcttg

SEQ ID NO: 15726 - DNA, 20 bp, synthetic construct
  source 1..20: mol_type = other DNA
ggtatacttgttgagctctt

SEQ ID NO: 15727 - DNA, 20 bp, synthetic construct
  source 1..20: mol_type = other DNA
tggtatacttgttgagctct

SEQ ID NO: 15728 - DNA, 20 bp, synthetic construct
  source 1..20: mol_type = other DNA
atggtatacttgttgagctc

SEQ ID NO: 15729 - DNA, 20 bp, synthetic construct
  source 1..20: mol_type = other DNA
aatggtatacttgttgagct

SEQ ID NO: 15730 - DNA, 20 bp, synthetic construct
  source 1..20: mol_type = other DNA
gaatggtatacttgttgagc

SEQ ID NO: 15731 - DNA, 20 bp, synthetic construct
  source 1..20: mol_type = other DNA
agaatggtatacttgttgag

SEQ ID NO: 15732 - DNA, 20 bp, synthetic construct
  source 1..20: mol_type = other DNA
cagaatggtatacttgttga

SEQ ID NO: 15733 - DNA, 20 bp, synthetic construct
  source 1..20: mol_type = other DNA
ccagaatggtatacttgttg

SEQ ID NO: 15734 - DNA, 20 bp, synthetic construct
  source 1..20: mol_type = other DNA
cccagaatggtatacttgtt

SEQ ID NO: 15735 - DNA, 20 bp, synthetic construct
  source 1..20: mol_type = other DNA
tcccagaatggtatacttgt

SEQ ID NO: 15736 - DNA, 20 bp, synthetic construct
  source 1..20: mol_type = other DNA
ctcccagaatggtatacttg

SEQ ID NO: 15737 - DNA, 20 bp, synthetic construct
  source 1..20: mol_type = other DNA
cctcccagaatggtatactt

SEQ ID NO: 15738 - DNA, 20 bp, synthetic construct
  source 1..20: mol_type = other DNA
acctcccagaatggtatact

SEQ ID NO: 15739 - DNA, 20 bp, synthetic construct
  source 1..20: mol_type = other DNA
aacctcccagaatggtatac

SEQ ID NO: 15740 - DNA, 20 bp, synthetic construct
  source 1..20: mol_type = other DNA
aaacctcccagaatggtata

SEQ ID NO: 15741 - DNA, 20 bp, synthetic construct
  source 1..20: mol_type = other DNA
aaaacctcccagaatggtat

SEQ ID NO: 15742 - DNA, 20 bp, synthetic construct
  source 1..20: mol_type = other DNA
aaaaacctcccagaatggta

SEQ ID NO: 15743 - DNA, 20 bp, synthetic construct
  source 1..20: mol_type = other DNA
aaaaaacctcccagaatggt

SEQ ID NO: 15744 - DNA, 20 bp, synthetic construct
  source 1..20: mol_type = other DNA
aaaaaaacctcccagaatgg

SEQ ID NO: 15745 - DNA, 20 bp, synthetic construct
  source 1..20: mol_type = other DNA
aaaaaaaacctcccagaatg

SEQ ID NO: 15746 - DNA, 20 bp, synthetic construct
  source 1..20: mol_type = other DNA
aaaaaaaaacctcccagaat

SEQ ID NO: 15747 - DNA, 20 bp, synthetic construct
  source 1..20: mol_type = other DNA
aaaaaaaaaacctcccagaa

SEQ ID NO: 15748 - DNA, 20 bp, synthetic construct
  source 1..20: mol_type = other DNA
aaaaaaaaaaacctcccaga

SEQ ID NO: 15749 - DNA, 20 bp, synthetic construct
  source 1..20: mol_type = other DNA
aaaaaaaaaaaacctcccag

SEQ ID NO: 15750 - DNA, 20 bp, synthetic construct
  source 1..20: mol_type = other DNA
aaaaaaaaaaaaacctccca

SEQ ID NO: 15751 - DNA, 20 bp, synthetic construct
  source 1..20: mol_type = other DNA
aaaaaaaaaaaaaacctccc

SEQ ID NO: 15752 - DNA, 20 bp, synthetic construct
  source 1..20: mol_type = other DNA
aaaaaaaaaaaaaaacctcc

SEQ ID NO: 15753 - DNA, 20 bp, synthetic construct
  source 1..20: mol_type = other DNA
aaaaaaaaaaaaaaaacctc

SEQ ID NO: 15754 - DNA, 20 bp, synthetic construct
  source 1..20: mol_type = other DNA
aaaaaaaaaaaaaaaaacct

SEQ ID NO: 15755 - DNA, 20 bp, synthetic construct
  source 1..20: mol_type = other DNA
aaaaaaaaaaaaaaaaaacc

SEQ ID NO: 15756 - DNA, 20 bp, synthetic construct
  source 1..20: mol_type = other DNA
aaaaaaaaaaaaaaaaaaac

SEQ ID NO: 15757 - DNA, 20 bp, synthetic construct
  source 1..20: mol_type = other DNA
aaaaaaaaaaaaaaaaaaaa

SEQ ID NO: 15758 - DNA, 20 bp, synthetic construct
  source 1..20: mol_type = other DNA
aaaaaaaaaaaaaaaaaaaa

SEQ ID NO: 15759 - DNA, 20 bp, synthetic construct
  source 1..20: mol_type = other DNA
aaaaaaaaaaaaaaaaaaaa

SEQ ID NO: 15760 - DNA, 20 bp, synthetic construct
  source 1..20: mol_type = other DNA
aaaaaaaaaaaaaaaaaaaa

SEQ ID NO: 15761 - DNA, 20 bp, synthetic construct
  source 1..20: mol_type = other DNA
aaaaaaaaaaaaaaaaaaaa

SEQ ID NO: 15762 - DNA, 20 bp, synthetic construct
  source 1..20: mol_type = other DNA
aaaaaaaaaaaaaaaaaaaa

SEQ ID NO: 15763 - DNA, 20 bp, synthetic construct
  source 1..20: mol_type = other DNA
aaaaaaaaaaaaaaaaaaaa

SEQ ID NO: 15764 - DNA, 20 bp, synthetic construct
  source 1..20: mol_type = other DNA
aaaaaaaaaaaaaaaaaaaa

SEQ ID NO: 15765 - DNA, 20 bp, synthetic construct
  source 1..20: mol_type = other DNA
aaaaaaaaaaaaaaaaaaaa

SEQ ID NO: 15766 - DNA, 20 bp, synthetic construct
  source 1..20: mol_type = other DNA
aaaaaaaaaaaaaaaaaaaa

SEQ ID NO: 15767 - DNA, 20 bp, synthetic construct
  source 1..20: mol_type = other DNA
caaaaaaaaaaaaaaaaaaa

SEQ ID NO: 15768 - DNA, 20 bp, synthetic construct
  source 1..20: mol_type = other DNA
tcaaaaaaaaaaaaaaaaaa

SEQ ID NO: 15769 - DNA, 20 bp, synthetic construct
  source 1..20: mol_type = other DNA
ctcaaaaaaaaaaaaaaaaa

SEQ ID NO: 15770 - DNA, 20 bp, synthetic construct
  source 1..20: mol_type = other DNA
tctcaaaaaaaaaaaaaaaa

SEQ ID NO: 15771 - DNA, 20 bp, synthetic construct
  source 1..20: mol_type = other DNA
atctcaaaaaaaaaaaaaaa

SEQ ID NO: 15772 - DNA, 20 bp, synthetic construct
  source 1..20: mol_type = other DNA
catctcaaaaaaaaaaaaaa

SEQ ID NO: 15773 - DNA, 20 bp, synthetic construct
  source 1..20: mol_type = other DNA
ccatctcaaaaaaaaaaaaa

SEQ ID NO: 15774 - DNA, 20 bp, synthetic construct
  source 1..20: mol_type = other DNA
tccatctcaaaaaaaaaaaa

SEQ ID NO: 15775 - DNA, 20 bp, synthetic construct
  source 1..20: mol_type = other DNA
ctccatctcaaaaaaaaaaa

SEQ ID NO: 15776 - DNA, 20 bp, synthetic construct
  source 1..20: mol_type = other DNA
actccatctcaaaaaaaaaa

SEQ ID NO: 15777 - DNA, 20 bp, synthetic construct
  source 1..20: mol_type = other DNA
aactccatctcaaaaaaaaa

SEQ ID NO: 15778 - DNA, 20 bp, synthetic construct
  source 1..20: mol_type = other DNA
aaactccatctcaaaaaaaa

SEQ ID NO: 15779 - DNA, 20 bp, synthetic construct
  source 1..20: mol_type = other DNA
aaaactccatctcaaaaaaa

SEQ ID NO: 15780 - DNA, 20 bp, synthetic construct
  source 1..20: mol_type = other DNA
caaaactccatctcaaaaaa

SEQ ID NO: 15781 - DNA, 20 bp, synthetic construct
  source 1..20: mol_type = other DNA
gcaaaactccatctcaaaaa

SEQ ID NO: 15782 - DNA, 20 bp, synthetic construct
  source 1..20: mol_type = other DNA
agcaaaactccatctcaaaa

SEQ ID NO: 15783 - DNA, 20 bp, synthetic construct
  source 1..20: mol_type = other DNA
gagcaaaactccatctcaaa

SEQ ID NO: 15784 - DNA, 20 bp, synthetic construct
  source 1..20: mol_type = other DNA
agagcaaaactccatctcaa

SEQ ID NO: 15785 - DNA, 20 bp, synthetic construct
  source 1..20: mol_type = other DNA
aagagcaaaactccatctca

SEQ ID NO: 15786 - DNA, 20 bp, synthetic construct
  source 1..20: mol_type = other DNA
caagagcaaaactccatctc

SEQ ID NO: 15787 - DNA, 20 bp, synthetic construct
  source 1..20: mol_type = other DNA
acaagagcaaaactccatct

SEQ ID NO: 15788 - DNA, 20 bp, synthetic construct
  source 1..20: mol_type = other DNA
gacaagagcaaaactccatc

SEQ ID NO: 15789 - DNA, 20 bp, synthetic construct
  source 1..20: mol_type = other DNA
tgacaagagcaaaactccat

SEQ ID NO: 15790 - DNA, 20 bp, synthetic construct
  source 1..20: mol_type = other DNA
gtgacaagagcaaaactcca

SEQ ID NO: 15791 - DNA, 20 bp, synthetic construct
  source 1..20: mol_type = other DNA
ggtgacaagagcaaaactcc

SEQ ID NO: 15792 - DNA, 20 bp, synthetic construct
  source 1..20: mol_type = other DNA
gggtgacaagagcaaaactc

SEQ ID NO: 15793 - DNA, 20 bp, synthetic construct
  source 1..20: mol_type = other DNA
tgggtgacaagagcaaaact

SEQ ID NO: 15794 - DNA, 20 bp, synthetic construct
  source 1..20: mol_type = other DNA
ctgggtgacaagagcaaaac

SEQ ID NO: 15795 - DNA, 20 bp, synthetic construct
  source 1..20: mol_type = other DNA
cctgggtgacaagagcaaaa

SEQ ID NO: 15796 - DNA, 20 bp, synthetic construct
  source 1..20: mol_type = other DNA
gcctgggtgacaagagcaaa

SEQ ID NO: 15797 - DNA, 20 bp, synthetic construct
  source 1..20: mol_type = other DNA
agcctgggtgacaagagcaa

SEQ ID NO: 15798 - DNA, 20 bp, synthetic construct
  source 1..20: mol_type = other DNA
cagcctgggtgacaagagca

SEQ ID NO: 15799 - DNA, 20 bp, synthetic construct
  source 1..20: mol_type = other DNA
ccagcctgggtgacaagagc

SEQ ID NO: 15800 - DNA, 20 bp, synthetic construct
  source 1..20: mol_type = other DNA
tccagcctgggtgacaagag

SEQ ID NO: 15801 - DNA, 20 bp, synthetic construct
  source 1..20: mol_type = other DNA
ctccagcctgggtgacaaga

SEQ ID NO: 15802 - DNA, 20 bp, synthetic construct
  source 1..20: mol_type = other DNA
actccagcctgggtgacaag

SEQ ID NO: 15803 - DNA, 20 bp, synthetic construct
  source 1..20: mol_type = other DNA
cactccagcctgggtgacaa

SEQ ID NO: 15804 - DNA, 20 bp, synthetic construct
  source 1..20: mol_type = other DNA
gcactccagcctgggtgaca

SEQ ID NO: 15805 - DNA, 20 bp, synthetic construct
  source 1..20: mol_type = other DNA
tgcactccagcctgggtgac

SEQ ID NO: 15806 - DNA, 20 bp, synthetic construct
  source 1..20: mol_type = other DNA
ttgcactccagcctgggtga

SEQ ID NO: 15807 - DNA, 20 bp, synthetic construct
  source 1..20: mol_type = other DNA
attgcactccagcctgggtg

SEQ ID NO: 15808 - DNA, 20 bp, synthetic construct
  source 1..20: mol_type = other DNA
cattgcactccagcctgggt

SEQ ID NO: 15809 - DNA, 20 bp, synthetic construct
  source 1..20: mol_type = other DNA
ccattgcactccagcctggg

SEQ ID NO: 15810 - DNA, 20 bp, synthetic construct
  source 1..20: mol_type = other DNA
gccattgcactccagcctgg

SEQ ID NO: 15811 - DNA, 20 bp, synthetic construct
  source 1..20: mol_type = other DNA
cgccattgcactccagcctg

SEQ ID NO: 15812 - DNA, 20 bp, synthetic construct
  source 1..20: mol_type = other DNA
gcgccattgcactccagcct

SEQ ID NO: 15813 - DNA, 20 bp, synthetic construct
  source 1..20: mol_type = other DNA
ggcgccattgcactccagcc

SEQ ID NO: 15814 - DNA, 20 bp, synthetic construct
  source 1..20: mol_type = other DNA
tggcgccattgcactccagc

SEQ ID NO: 15815 - DNA, 20 bp, synthetic construct
  source 1..20: mol_type = other DNA
atggcgccattgcactccag

SEQ ID NO: 15816 - DNA, 20 bp, synthetic construct
  source 1..20: mol_type = other DNA
gatggcgccattgcactcca

SEQ ID NO: 15817 - DNA, 20 bp, synthetic construct
  source 1..20: mol_type = other DNA
agatggcgccattgcactcc

SEQ ID NO: 15818 - DNA, 20 bp, synthetic construct
  source 1..20: mol_type = other DNA
gagatggcgccattgcactc

SEQ ID NO: 15819 - DNA, 20 bp, synthetic construct
  source 1..20: mol_type = other DNA
agagatggcgccattgcact

SEQ ID NO: 15820 - DNA, 20 bp, synthetic construct
  source 1..20: mol_type = other DNA
cagagatggcgccattgcac

SEQ ID NO: 15821 - DNA, 20 bp, synthetic construct
  source 1..20: mol_type = other DNA
gcagagatggcgccattgca

SEQ ID NO: 15822 - DNA, 20 bp, synthetic construct
  source 1..20: mol_type = other DNA
agcagagatggcgccattgc

SEQ ID NO: 15823 - DNA, 20 bp, synthetic construct
  source 1..20: mol_type = other DNA
gagcagagatggcgccattg

SEQ ID NO: 15824 - DNA, 20 bp, synthetic construct
  source 1..20: mol_type = other DNA
tgagcagagatggcgccatt

SEQ ID NO: 15825 - DNA, 20 bp, synthetic construct
  source 1..20: mol_type = other DNA
gtgagcagagatggcgccat

SEQ ID NO: 15826 - DNA, 20 bp, synthetic construct
  source 1..20: mol_type = other DNA
agtgagcagagatggcgcca

SEQ ID NO: 15827 - DNA, 20 bp, synthetic construct
  source 1..20: mol_type = other DNA
cagtgagcagagatggcgcc

SEQ ID NO: 15828 - DNA, 20 bp, synthetic construct
  source 1..20: mol_type = other DNA
acagtgagcagagatggcgc

SEQ ID NO: 15829 - DNA, 20 bp, synthetic construct
  source 1..20: mol_type = other DNA
tacagtgagcagagatggcg

SEQ ID NO: 15830 - DNA, 20 bp, synthetic construct
  source 1..20: mol_type = other DNA
ctacagtgagcagagatggc

SEQ ID NO: 15831 - DNA, 20 bp, synthetic construct
  source 1..20: mol_type = other DNA
actacagtgagcagagatgg

SEQ ID NO: 15832 - DNA, 20 bp, synthetic construct
  source 1..20: mol_type = other DNA
aactacagtgagcagagatg

SEQ ID NO: 15833 - DNA, 20 bp, synthetic construct
  source 1..20: mol_type = other DNA
gaactacagtgagcagagat

SEQ ID NO: 15834 - DNA, 20 bp, synthetic construct
  source 1..20: mol_type = other DNA
ggaactacagtgagcagaga

SEQ ID NO: 15835 - DNA, 20 bp, synthetic construct
  source 1..20: mol_type = other DNA
cggaactacagtgagcagag

SEQ ID NO: 15836 - DNA, 20 bp, synthetic construct
  source 1..20: mol_type = other DNA
gcggaactacagtgagcaga

SEQ ID NO: 15837 - DNA, 20 bp, synthetic construct
  source 1..20: mol_type = other DNA
ggcggaactacagtgagcag

SEQ ID NO: 15838 - DNA, 20 bp, synthetic construct
  source 1..20: mol_type = other DNA
aggcggaactacagtgagca

SEQ ID NO: 15839 - DNA, 20 bp, synthetic construct
  source 1..20: mol_type = other DNA
gaggcggaactacagtgagc

SEQ ID NO: 15840 - DNA, 20 bp, synthetic construct
  source 1..20: mol_type = other DNA
ggaggcggaactacagtgag

SEQ ID NO: 15841 - DNA, 20 bp, synthetic construct
  source 1..20: mol_type = other DNA
gggaggcggaactacagtga

SEQ ID NO: 15842 - DNA, 20 bp, synthetic construct
  source 1..20: mol_type = other DNA
tgggaggcggaactacagtg

SEQ ID NO: 15843 - DNA, 20 bp, synthetic construct
  source 1..20: mol_type = other DNA
ctgggaggcggaactacagt

SEQ ID NO: 15844 - DNA, 20 bp, synthetic construct
  source 1..20: mol_type = other DNA
cctgggaggcggaactacag

SEQ ID NO: 15845 - DNA, 20 bp, synthetic construct
  source 1..20: mol_type = other DNA
acctgggaggcggaactaca

SEQ ID NO: 15846 - DNA, 20 bp, synthetic construct
  source 1..20: mol_type = other DNA
aacctgggaggcggaactac

SEQ ID NO: 15847 - DNA, 20 bp, synthetic construct
  source 1..20: mol_type = other DNA
gaacctgggaggcggaacta

SEQ ID NO: 15848 - DNA, 20 bp, synthetic construct
  source 1..20: mol_type = other DNA
tgaacctgggaggcggaact

SEQ ID NO: 15849 - DNA, 20 bp, synthetic construct
  source 1..20: mol_type = other DNA
ttgaacctgggaggcggaac

SEQ ID NO: 15850 - DNA, 20 bp, synthetic construct
  source 1..20: mol_type = other DNA
cttgaacctgggaggcggaa

SEQ ID NO: 15851 - DNA, 20 bp, synthetic construct
  source 1..20: mol_type = other DNA
gcttgaacctgggaggcgga

SEQ ID NO: 15852 - DNA, 20 bp, synthetic construct
  source 1..20: mol_type = other DNA
tgcttgaacctgggaggcgg

SEQ ID NO: 15853 - DNA, 20 bp, synthetic construct
  source 1..20: mol_type = other DNA
ctgcttgaacctgggaggcg

SEQ ID NO: 15854 - DNA, 20 bp, synthetic construct
  source 1..20: mol_type = other DNA
actgcttgaacctgggaggc

SEQ ID NO: 15855 - DNA, 20 bp, synthetic construct
  source 1..20: mol_type = other DNA
aactgcttgaacctgggagg

SEQ ID NO: 15856 - DNA, 20 bp, synthetic construct
  source 1..20: mol_type = other DNA
gaactgcttgaacctgggag

SEQ ID NO: 15857 - DNA, 20 bp, synthetic construct
  source 1..20: mol_type = other DNA
agaactgcttgaacctggga

SEQ ID NO: 15858 - DNA, 20 bp, synthetic construct
  source 1..20: mol_type = other DNA
gagaactgcttgaacctggg

SEQ ID NO: 15859 - DNA, 20 bp, synthetic construct
  source 1..20: mol_type = other DNA
ggagaactgcttgaacctgg

SEQ ID NO: 15860 - DNA, 20 bp, synthetic construct
  source 1..20: mol_type = other DNA
aggagaactgcttgaacctg

SEQ ID NO: 15861 - DNA, 20 bp, synthetic construct
  source 1..20: mol_type = other DNA
caggagaactgcttgaacct

SEQ ID NO: 15862 - DNA, 20 bp, synthetic construct
  source 1..20: mol_type = other DNA
gcaggagaactgcttgaacc

SEQ ID NO: 15863 - DNA, 20 bp, synthetic construct
  source 1..20: mol_type = other DNA
ggcaggagaactgcttgaac

SEQ ID NO: 15864 - DNA, 20 bp, synthetic construct
  source 1..20: mol_type = other DNA
aggcaggagaactgcttgaa

SEQ ID NO: 15865 - DNA, 20 bp, synthetic construct
  source 1..20: mol_type = other DNA
caggcaggagaactgcttga

SEQ ID NO: 15866 - DNA, 20 bp, synthetic construct
  source 1..20: mol_type = other DNA
tcaggcaggagaactgcttg

SEQ ID NO: 15867 - DNA, 20 bp, synthetic construct
  source 1..20: mol_type = other DNA
gtcaggcaggagaactgctt

SEQ ID NO: 15868 - DNA, 20 bp, synthetic construct
  source 1..20: mol_type = other DNA
agtcaggcaggagaactgct

SEQ ID NO: 15869 - DNA, 20 bp, synthetic construct
  source 1..20: mol_type = other DNA
gagtcaggcaggagaactgc

SEQ ID NO: 15870 - DNA, 20 bp, synthetic construct
  source 1..20: mol_type = other DNA
ggagtcaggcaggagaactg

SEQ ID NO: 15871 - DNA, 20 bp, synthetic construct
  source 1..20: mol_type = other DNA
aggagtcaggcaggagaact

SEQ ID NO: 15872 - DNA, 20 bp, synthetic construct
  source 1..20: mol_type = other DNA
caggagtcaggcaggagaac

SEQ ID NO: 15873 - DNA, 20 bp, synthetic construct
  source 1..20: mol_type = other DNA
tcaggagtcaggcaggagaa

SEQ ID NO: 15874 - DNA, 20 bp, synthetic construct
  source 1..20: mol_type = other DNA
ctcaggagtcaggcaggaga

SEQ ID NO: 15875 - DNA, 20 bp, synthetic construct
  source 1..20: mol_type = other DNA
actcaggagtcaggcaggag

SEQ ID NO: 15876 - DNA, 20 bp, synthetic construct
  source 1..20: mol_type = other DNA
tactcaggagtcaggcagga

SEQ ID NO: 15877 - DNA, 20 bp, synthetic construct
  source 1..20: mol_type = other DNA
ctactcaggagtcaggcagg

SEQ ID NO: 15878 - DNA, 20 bp, synthetic construct
  source 1..20: mol_type = other DNA
gctactcaggagtcaggcag

SEQ ID NO: 15879 - DNA, 20 bp, synthetic construct
  source 1..20: mol_type = other DNA
agctactcaggagtcaggca

SEQ ID NO: 15880 - DNA, 20 bp, synthetic construct
  source 1..20: mol_type = other DNA
cagctactcaggagtcaggc

SEQ ID NO: 15881 - DNA, 20 bp, synthetic construct
  source 1..20: mol_type = other DNA
ccagctactcaggagtcagg

SEQ ID NO: 15882 - DNA, 20 bp, synthetic construct
  source 1..20: mol_type = other DNA
cccagctactcaggagtcag

SEQ ID NO: 15883 - DNA, 20 bp, synthetic construct
  source 1..20: mol_type = other DNA
tcccagctactcaggagtca

SEQ ID NO: 15884 - DNA, 20 bp, synthetic construct
  source 1..20: mol_type = other DNA
ctcccagctactcaggagtc

SEQ ID NO: 15885 - DNA, 20 bp, synthetic construct
  source 1..20: mol_type = other DNA
actcccagctactcaggagt

SEQ ID NO: 15886 - DNA, 20 bp, synthetic construct
  source 1..20: mol_type = other DNA
tactcccagctactcaggag

SEQ ID NO: 15887 - DNA, 20 bp, synthetic construct
  source 1..20: mol_type = other DNA
gtactcccagctactcagga

SEQ ID NO: 15888 - DNA, 20 bp, synthetic construct
  source 1..20: mol_type = other DNA
tgtactcccagctactcagg

SEQ ID NO: 15889 - DNA, 20 bp, synthetic construct
  source 1..20: mol_type = other DNA
ctgtactcccagctactcag

SEQ ID NO: 15890 - DNA, 20 bp, synthetic construct
  source 1..20: mol_type = other DNA
tctgtactcccagctactca

SEQ ID NO: 15891 - DNA, 20 bp, synthetic construct
  source 1..20: mol_type = other DNA
atctgtactcccagctactc

SEQ ID NO: 15892 - DNA, 20 bp, synthetic construct
  source 1..20: mol_type = other DNA
tatctgtactcccagctact

SEQ ID NO: 15893 - DNA, 20 bp, synthetic construct
  source 1..20: mol_type = other DNA
atatctgtactcccagctac

SEQ ID NO: 15894 - DNA, 20 bp, synthetic construct
  source 1..20: mol_type = other DNA
aatatctgtactcccagcta

SEQ ID NO: 15895 - DNA, 20 bp, synthetic construct
  source 1..20: mol_type = other DNA
caatatctgtactcccagct

SEQ ID NO: 15896 - DNA, 20 bp, synthetic construct
  source 1..20: mol_type = other DNA
ccaatatctgtactcccagc

SEQ ID NO: 15897 - DNA, 20 bp, synthetic construct
  source 1..20: mol_type = other DNA
accaatatctgtactcccag

SEQ ID NO: 15898 - DNA, 20 bp, synthetic construct
  source 1..20: mol_type = other DNA
gaccaatatctgtactccca

SEQ ID NO: 15899 - DNA, 20 bp, synthetic construct
  source 1..20: mol_type = other DNA
tgaccaatatctgtactccc

SEQ ID NO: 15900 - DNA, 20 bp, synthetic construct
  source 1..20: mol_type = other DNA
gtgaccaatatctgtactcc

SEQ ID NO: 15901 - DNA, 20 bp, synthetic construct
  source 1..20: mol_type = other DNA
tgtgaccaatatctgtactc

SEQ ID NO: 15902 - DNA, 20 bp, synthetic construct
  source 1..20: mol_type = other DNA
gtgtgaccaatatctgtact

SEQ ID NO: 15903 - DNA, 20 bp, synthetic construct
  source 1..20: mol_type = other DNA
tgtgtgaccaatatctgtac

SEQ ID NO: 15904 - DNA, 20 bp, synthetic construct
  source 1..20: mol_type = other DNA
gtgtgtgaccaatatctgta

SEQ ID NO: 15905 - DNA, 20 bp, synthetic construct
  source 1..20: mol_type = other DNA
ggtgtgtgaccaatatctgt

SEQ ID NO: 15906 - DNA, 20 bp, synthetic construct
  source 1..20: mol_type = other DNA
cggtgtgtgaccaatatctg

SEQ ID NO: 15907 - DNA, 20 bp, synthetic construct
  source 1..20: mol_type = other DNA
ccggtgtgtgaccaatatct

SEQ ID NO: 15908 - DNA, 20 bp, synthetic construct
  source 1..20: mol_type = other DNA
cccggtgtgtgaccaatatc

SEQ ID NO: 15909 - DNA, 20 bp, synthetic construct
  source 1..20: mol_type = other DNA
acccggtgtgtgaccaatat

SEQ ID NO: 15910 - DNA, 20 bp, synthetic construct
  source 1..20: mol_type = other DNA
aacccggtgtgtgaccaata

SEQ ID NO: 15911 - DNA, 20 bp, synthetic construct
  source 1..20: mol_type = other DNA
taacccggtgtgtgaccaat

SEQ ID NO: 15912 - DNA, 20 bp, synthetic construct
  source 1..20: mol_type = other DNA
ttaacccggtgtgtgaccaa

SEQ ID NO: 15913 - DNA, 20 bp, synthetic construct
  source 1..20: mol_type = other DNA
attaacccggtgtgtgacca

SEQ ID NO: 15914 - DNA, 20 bp, synthetic construct
  source 1..20: mol_type = other DNA
aattaacccggtgtgtgacc

SEQ ID NO: 15915 - DNA, 20 bp, synthetic construct
  source 1..20: mol_type = other DNA
aaattaacccggtgtgtgac

SEQ ID NO: 15916 - DNA, 20 bp, synthetic construct
  source 1..20: mol_type = other DNA
aaaattaacccggtgtgtga

SEQ ID NO: 15917 - DNA, 20 bp, synthetic construct
  source 1..20: mol_type = other DNA
aaaaattaacccggtgtgtg

SEQ ID NO: 15918 - DNA, 20 bp, synthetic construct
  source 1..20: mol_type = other DNA
caaaaattaacccggtgtgt

SEQ ID NO: 15919 - DNA, 20 bp, synthetic construct
  source 1..20: mol_type = other DNA
acaaaaattaacccggtgtg

SEQ ID NO: 15920 - DNA, 20 bp, synthetic construct
  source 1..20: mol_type = other DNA
tacaaaaattaacccggtgt

SEQ ID NO: 15921 - DNA, 20 bp, synthetic construct
  source 1..20: mol_type = other DNA
atacaaaaattaacccggtg

SEQ ID NO: 15922 - DNA, 20 bp, synthetic construct
  source 1..20: mol_type = other DNA
aatacaaaaattaacccggt

SEQ ID NO: 15923 - DNA, 20 bp, synthetic construct
  source 1..20: mol_type = other DNA
aaatacaaaaattaacccgg

SEQ ID NO: 15924 - DNA, 20 bp, synthetic construct
  source 1..20: mol_type = other DNA
aaaatacaaaaattaacccg

SEQ ID NO: 15925 - DNA, 20 bp, synthetic construct
  source 1..20: mol_type = other DNA
aaaaatacaaaaattaaccc

SEQ ID NO: 15926 - DNA, 20 bp, synthetic construct
  source 1..20: mol_type = other DNA
taaaaatacaaaaattaacc

SEQ ID NO: 15927 - DNA, 20 bp, synthetic construct
  source 1..20: mol_type = other DNA
ctaaaaatacaaaaattaac

SEQ ID NO: 15928 - DNA, 20 bp, synthetic construct
  source 1..20: mol_type = other DNA
actaaaaatacaaaaattaa

SEQ ID NO: 15929 - DNA, 20 bp, synthetic construct
  source 1..20: mol_type = other DNA
tactaaaaatacaaaaatta

SEQ ID NO: 15930 - DNA, 20 bp, synthetic construct
  source 1..20: mol_type = other DNA
ctactaaaaatacaaaaatt

SEQ ID NO: 15931 - DNA, 20 bp, synthetic construct
  source 1..20: mol_type = other DNA
tctactaaaaatacaaaaat

SEQ ID NO: 15932 - DNA, 20 bp, synthetic construct
  source 1..20: mol_type = other DNA
ctctactaaaaatacaaaaa

SEQ ID NO: 15933 - DNA, 20 bp, synthetic construct
  source 1..20: mol_type = other DNA
tctctactaaaaatacaaaa

SEQ ID NO: 15934 - DNA, 20 bp, synthetic construct
  source 1..20: mol_type = other DNA
gtctctactaaaaatacaaa

SEQ ID NO: 15935 - DNA, 20 bp, synthetic construct
  source 1..20: mol_type = other DNA
cgtctctactaaaaatacaa

SEQ ID NO: 15936 - DNA, 20 bp, synthetic construct
  source 1..20: mol_type = other DNA
ccgtctctactaaaaataca

SEQ ID NO: 15937 - DNA, 20 bp, synthetic construct
  source 1..20: mol_type = other DNA
cccgtctctactaaaaatac

SEQ ID NO: 15938 - DNA, 20 bp, synthetic construct
  source 1..20: mol_type = other DNA
ccccgtctctactaaaaata

SEQ ID NO: 15939 - DNA, 20 bp, synthetic construct
  source 1..20: mol_type = other DNA
accccgtctctactaaaaat

SEQ ID NO: 15940 - DNA, 20 bp, synthetic construct
  source 1..20: mol_type = other DNA
aaccccgtctctactaaaaa

SEQ ID NO: 15941 - DNA, 20 bp, synthetic construct
  source 1..20: mol_type = other DNA
aaaccccgtctctactaaaa

SEQ ID NO: 15942 - DNA, 20 bp, synthetic construct
  source 1..20: mol_type = other DNA
gaaaccccgtctctactaaa

SEQ ID NO: 15943 - DNA, 20 bp, synthetic construct
  source 1..20: mol_type = other DNA
ggaaaccccgtctctactaa

SEQ ID NO: 15944 - DNA, 20 bp, synthetic construct
  source 1..20: mol_type = other DNA
gggaaaccccgtctctacta

SEQ ID NO: 15945 - DNA, 20 bp, synthetic construct
  source 1..20: mol_type = other DNA
ggggaaaccccgtctctact

SEQ ID NO: 15946 - DNA, 20 bp, synthetic construct
  source 1..20: mol_type = other DNA
tggggaaaccccgtctctac

SEQ ID NO: 15947 - DNA, 20 bp, synthetic construct
  source 1..20: mol_type = other DNA
atggggaaaccccgtctcta

SEQ ID NO: 15948 - DNA, 20 bp, synthetic construct
  source 1..20: mol_type = other DNA
aatggggaaaccccgtctct

SEQ ID NO: 15949 - DNA, 20 bp, synthetic construct
  source 1..20: mol_type = other DNA
aaatggggaaaccccgtctc

SEQ ID NO: 15950 - DNA, 20 bp, synthetic construct
  source 1..20: mol_type = other DNA
aaaatggggaaaccccgtct

SEQ ID NO: 15951 - DNA, 20 bp, synthetic construct
  source 1..20: mol_type = other DNA
caaaatggggaaaccccgtc

SEQ ID NO: 15952 - DNA, 20 bp, synthetic construct
  source 1..20: mol_type = other DNA
ccaaaatggggaaaccccgt

SEQ ID NO: 15953 - DNA, 20 bp, synthetic construct
  source 1..20: mol_type = other DNA
gccaaaatggggaaaccccg

SEQ ID NO: 15954 - DNA, 20 bp, synthetic construct
  source 1..20: mol_type = other DNA
ggccaaaatggggaaacccc

SEQ ID NO: 15955 - DNA, 20 bp, synthetic construct
  source 1..20: mol_type = other DNA
tggccaaaatggggaaaccc

SEQ ID NO: 15956 - DNA, 20 bp, synthetic construct
  source 1..20: mol_type = other DNA
ctggccaaaatggggaaacc

SEQ ID NO: 15957 - DNA, 20 bp, synthetic construct
  source 1..20: mol_type = other DNA
cctggccaaaatggggaaac

SEQ ID NO: 15958 - DNA, 20 bp, synthetic construct
  source 1..20: mol_type = other DNA
gcctggccaaaatggggaaa

SEQ ID NO: 15959 - DNA, 20 bp, synthetic construct
  source 1..20: mol_type = other DNA
agcctggccaaaatggggaa

SEQ ID NO: 15960 - DNA, 20 bp, synthetic construct
  source 1..20: mol_type = other DNA
cagcctggccaaaatgggga

SEQ ID NO: 15961 - DNA, 20 bp, synthetic construct
  source 1..20: mol_type = other DNA
ccagcctggccaaaatgggg

SEQ ID NO: 15962 - DNA, 20 bp, synthetic construct
  source 1..20: mol_type = other DNA
accagcctggccaaaatggg

SEQ ID NO: 15963 - DNA, 20 bp, synthetic construct
  source 1..20: mol_type = other DNA
gaccagcctggccaaaatgg

SEQ ID NO: 15964 - DNA, 20 bp, synthetic construct
  source 1..20: mol_type = other DNA
agaccagcctggccaaaatg

SEQ ID NO: 15965 - DNA, 20 bp, synthetic construct
  source 1..20: mol_type = other DNA
gagaccagcctggccaaaat

SEQ ID NO: 15966 - DNA, 20 bp, synthetic construct
  source 1..20: mol_type = other DNA
cgagaccagcctggccaaaa

SEQ ID NO: 15967 - DNA, 20 bp, synthetic construct
  source 1..20: mol_type = other DNA
tcgagaccagcctggccaaa

SEQ ID NO: 15968 - DNA, 20 bp, synthetic construct
  source 1..20: mol_type = other DNA
ttcgagaccagcctggccaa

SEQ ID NO: 15969 - DNA, 20 bp, synthetic construct
  source 1..20: mol_type = other DNA
gttcgagaccagcctggcca

SEQ ID NO: 15970 - DNA, 20 bp, synthetic construct
  source 1..20: mol_type = other DNA
agttcgagaccagcctggcc

SEQ ID NO: 15971 - DNA, 20 bp, synthetic construct
  source 1..20: mol_type = other DNA
gagttcgagaccagcctggc

SEQ ID NO: 15972 - DNA, 20 bp, synthetic construct
  source 1..20: mol_type = other DNA
ggagttcgagaccagcctgg

SEQ ID NO: 15973 - DNA, 20 bp, synthetic construct
  source 1..20: mol_type = other DNA
aggagttcgagaccagcctg

SEQ ID NO: 15974 - DNA, 20 bp, synthetic construct
  source 1..20: mol_type = other DNA
caggagttcgagaccagcct

SEQ ID NO: 15975 - DNA, 20 bp, synthetic construct
  source 1..20: mol_type = other DNA
tcaggagttcgagaccagcc

SEQ ID NO: 15976 - DNA, 20 bp, synthetic construct
  source 1..20: mol_type = other DNA
gtcaggagttcgagaccagc

SEQ ID NO: 15977 - DNA, 20 bp, synthetic construct
  source 1..20: mol_type = other DNA
ggtcaggagttcgagaccag

SEQ ID NO: 15978 - DNA, 20 bp, synthetic construct
  source 1..20: mol_type = other DNA
aggtcaggagttcgagacca

SEQ ID NO: 15979 - DNA, 20 bp, synthetic construct
  source 1..20: mol_type = other DNA
gaggtcaggagttcgagacc

SEQ ID NO: 15980 - DNA, 20 bp, synthetic construct
  source 1..20: mol_type = other DNA
tgaggtcaggagttcgagac

SEQ ID NO: 15981 - DNA, 20 bp, synthetic construct
  source 1..20: mol_type = other DNA
ctgaggtcaggagttcgaga

SEQ ID NO: 15982 - DNA, 20 bp, synthetic construct
  source 1..20: mol_type = other DNA
cctgaggtcaggagttcgag

SEQ ID NO: 15983 - DNA, 20 bp, synthetic construct
  source 1..20: mol_type = other DNA
acctgaggtcaggagttcga

SEQ ID NO: 15984 - DNA, 20 bp, synthetic construct
  source 1..20: mol_type = other DNA
cacctgaggtcaggagttcg

SEQ ID NO: 15985 - DNA, 20 bp, synthetic construct
  source 1..20: mol_type = other DNA
tcacctgaggtcaggagttc

SEQ ID NO: 15986 - DNA, 20 bp, synthetic construct
  source 1..20: mol_type = other DNA
atcacctgaggtcaggagtt

SEQ ID NO: 15987 - DNA, 20 bp, synthetic construct
  source 1..20: mol_type = other DNA
gatcacctgaggtcaggagt

SEQ ID NO: 15988 - DNA, 20 bp, synthetic construct
  source 1..20: mol_type = other DNA
ggatcacctgaggtcaggag

SEQ ID NO: 15989 - DNA, 20 bp, synthetic construct
  source 1..20: mol_type = other DNA
cggatcacctgaggtcagga

SEQ ID NO: 15990 - DNA, 20 bp, synthetic construct
  source 1..20: mol_type = other DNA
gcggatcacctgaggtcagg

SEQ ID NO: 15991 - DNA, 20 bp, synthetic construct
  source 1..20: mol_type = other DNA
ggcggatcacctgaggtcag

SEQ ID NO: 15992 - DNA, 20 bp, synthetic construct
  source 1..20: mol_type = other DNA
aggcggatcacctgaggtca

SEQ ID NO: 15993 - DNA, 20 bp, synthetic construct
  source 1..20: mol_type = other DNA
caggcggatcacctgaggtc

SEQ ID NO: 15994 - DNA, 20 bp, synthetic construct
  source 1..20: mol_type = other DNA
gcaggcggatcacctgaggt

SEQ ID NO: 15995 - DNA, 20 bp, synthetic construct
  source 1..20: mol_type = other DNA
agcaggcggatcacctgagg

SEQ ID NO: 15996 - DNA, 20 bp, synthetic construct
  source 1..20: mol_type = other DNA
aagcaggcggatcacctgag

SEQ ID NO: 15997 - DNA, 20 bp, synthetic construct
  source 1..20: mol_type = other DNA
gaagcaggcggatcacctga

SEQ ID NO: 15998 - DNA, 20 bp, synthetic construct
  source 1..20: mol_type = other DNA
tgaagcaggcggatcacctg

SEQ ID NO: 15999 - DNA, 20 bp, synthetic construct
  source 1..20: mol_type = other DNA
ctgaagcaggcggatcacct

SEQ ID NO: 16000 - DNA, 20 bp, synthetic construct
  source 1..20: mol_type = other DNA
gctgaagcaggcggatcacc

SEQ ID NO: 16001 - DNA, 20 bp, synthetic construct
  source 1..20: mol_type = other DNA
ggctgaagcaggcggatcac

SEQ ID NO: 16002 - DNA, 20 bp, synthetic construct
  source 1..20: mol_type = other DNA
aggctgaagcaggcggatca

SEQ ID NO: 16003 - DNA, 20 bp, synthetic construct
  source 1..20: mol_type = other DNA
gaggctgaagcaggcggatc

SEQ ID NO: 16004 - DNA, 20 bp, synthetic construct
  source 1..20: mol_type = other DNA
ggaggctgaagcaggcggat

SEQ ID NO: 16005 - DNA, 20 bp, synthetic construct
  source 1..20: mol_type = other DNA
gggaggctgaagcaggcgga

SEQ ID NO: 16006 - DNA, 20 bp, synthetic construct
  source 1..20: mol_type = other DNA
tgggaggctgaagcaggcgg

SEQ ID NO: 16007 - DNA, 20 bp, synthetic construct
  source 1..20: mol_type = other DNA
ttgggaggctgaagcaggcg

SEQ ID NO: 16008 - DNA, 20 bp, synthetic construct
  source 1..20: mol_type = other DNA
tttgggaggctgaagcaggc

SEQ ID NO: 16009 - DNA, 20 bp, synthetic construct
  source 1..20: mol_type = other DNA
ctttgggaggctgaagcagg

SEQ ID NO: 16010 - DNA, 20 bp, synthetic construct
  source 1..20: mol_type = other DNA
actttgggaggctgaagcag

SEQ ID NO: 16011 - DNA, 20 bp, synthetic construct
  source 1..20: mol_type = other DNA
cactttgggaggctgaagca

SEQ ID NO: 16012 - DNA, 20 bp, synthetic construct
  source 1..20: mol_type = other DNA
gcactttgggaggctgaagc

SEQ ID NO: 16013 - DNA, 20 bp, synthetic construct
  source 1..20: mol_type = other DNA
ggcactttgggaggctgaag

SEQ ID NO: 16014 - DNA, 20 bp, synthetic construct
  source 1..20: mol_type = other DNA
cggcactttgggaggctgaa

SEQ ID NO: 16015 - DNA, 20 bp, synthetic construct
  source 1..20: mol_type = other DNA
ccggcactttgggaggctga

SEQ ID NO: 16016 - DNA, 20 bp, synthetic construct
  source 1..20: mol_type = other DNA
cccggcactttgggaggctg

SEQ ID NO: 16017 - DNA, 20 bp, synthetic construct
  source 1..20: mol_type = other DNA
tcccggcactttgggaggct

SEQ ID NO: 16018 - DNA, 20 bp, synthetic construct
  source 1..20: mol_type = other DNA
gtcccggcactttgggaggc

SEQ ID NO: 16019 - DNA, 20 bp, synthetic construct
  source 1..20: mol_type = other DNA
ggtcccggcactttgggagg

SEQ ID NO: 16020 - DNA, 20 bp, synthetic construct
  source 1..20: mol_type = other DNA
tggtcccggcactttgggag

SEQ ID NO: 16021 - DNA, 20 bp, synthetic construct
  source 1..20: mol_type = other DNA
gtggtcccggcactttggga

SEQ ID NO: 16022 - DNA, 20 bp, synthetic construct
  source 1..20: mol_type = other DNA
tgtggtcccggcactttggg

SEQ ID NO: 16023 - DNA, 20 bp, synthetic construct
  source 1..20: mol_type = other DNA
ctgtggtcccggcactttgg

SEQ ID NO: 16024 - DNA, 20 bp, synthetic construct
  source 1..20: mol_type = other DNA
cctgtggtcccggcactttg

SEQ ID NO: 16025 - DNA, 20 bp, synthetic construct
  source 1..20: mol_type = other DNA
gcctgtggtcccggcacttt

SEQ ID NO: 16026 - DNA, 20 bp, synthetic construct
  source 1..20: mol_type = other DNA
cgcctgtggtcccggcactt

SEQ ID NO: 16027 - DNA, 20 bp, synthetic construct
  source 1..20: mol_type = other DNA
acgcctgtggtcccggcact

SEQ ID NO: 16028 - DNA, 20 bp, synthetic construct
  source 1..20: mol_type = other DNA
cacgcctgtggtcccggcac

SEQ ID NO: 16029 - DNA, 20 bp, synthetic construct
  source 1..20: mol_type = other DNA
tcacgcctgtggtcccggca

SEQ ID NO: 16030 - DNA, 20 bp, synthetic construct
  source 1..20: mol_type = other DNA
ctcacgcctgtggtcccggc

SEQ ID NO: 16031 - DNA, 20 bp, synthetic construct
  source 1..20: mol_type = other DNA
gctcacgcctgtggtcccgg

SEQ ID NO: 16032 - DNA, 20 bp, synthetic construct
  source 1..20: mol_type = other DNA
ggctcacgcctgtggtcccg

SEQ ID NO: 16033 - DNA, 20 bp, synthetic construct
  source 1..20: mol_type = other DNA
tggctcacgcctgtggtccc

SEQ ID NO: 16034 - DNA, 20 bp, synthetic construct
  source 1..20: mol_type = other DNA
gtggctcacgcctgtggtcc

SEQ ID NO: 16035 - DNA, 20 bp, synthetic construct
  source 1..20: mol_type = other DNA
ggtggctcacgcctgtggtc

SEQ ID NO: 16036 - DNA, 20 bp, synthetic construct
  source 1..20: mol_type = other DNA
cggtggctcacgcctgtggt

SEQ ID NO: 16037 - DNA, 20 bp, synthetic construct
  source 1..20: mol_type = other DNA
gcggtggctcacgcctgtgg

SEQ ID NO: 16038 - DNA, 20 bp, synthetic construct
  source 1..20: mol_type = other DNA
tgcggtggctcacgcctgtg

SEQ ID NO: 16039 - DNA, 20 bp, synthetic construct
  source 1..20: mol_type = other DNA
gtgcggtggctcacgcctgt

SEQ ID NO: 16040 - DNA, 20 bp, synthetic construct
  source 1..20: mol_type = other DNA
ggtgcggtggctcacgcctg

SEQ ID NO: 16041 - DNA, 20 bp, synthetic construct
  source 1..20: mol_type = other DNA
aggtgcggtggctcacgcct

SEQ ID NO: 16042 - DNA, 20 bp, synthetic construct
  source 1..20: mol_type = other DNA
caggtgcggtggctcacgcc

SEQ ID NO: 16043 - DNA, 20 bp, synthetic construct
  source 1..20: mol_type = other DNA
ccaggtgcggtggctcacgc

SEQ ID NO: 16044 - DNA, 20 bp, synthetic construct
  source 1..20: mol_type = other DNA
gccaggtgcggtggctcacg

SEQ ID NO: 16045 - DNA, 20 bp, synthetic construct
  source 1..20: mol_type = other DNA
agccaggtgcggtggctcac

SEQ ID NO: 16046 - DNA, 20 bp, synthetic construct
  source 1..20: mol_type = other DNA
aagccaggtgcggtggctca

SEQ ID NO: 16047 - DNA, 20 bp, synthetic construct
  source 1..20: mol_type = other DNA
aaagccaggtgcggtggctc

SEQ ID NO: 16048 - DNA, 20 bp, synthetic construct
  source 1..20: mol_type = other DNA
aaaagccaggtgcggtggct

SEQ ID NO: 16049 - DNA, 20 bp, synthetic construct
  source 1..20: mol_type = other DNA
aaaaagccaggtgcggtggc

SEQ ID NO: 16050 - DNA, 20 bp, synthetic construct
  source 1..20: mol_type = other DNA
aaaaaagccaggtgcggtgg

SEQ ID NO: 16051 - DNA, 20 bp, synthetic construct
  source 1..20: mol_type = other DNA
aaaaaaagccaggtgcggtg

SEQ ID NO: 16052 - DNA, 20 bp, synthetic construct
  source 1..20: mol_type = other DNA
aaaaaaaagccaggtgcggt

SEQ ID NO: 16053 - DNA, 20 bp, synthetic construct
  source 1..20: mol_type = other DNA
aaaaaaaaagccaggtgcgg

SEQ ID NO: 16054 - DNA, 20 bp, synthetic construct
  source 1..20: mol_type = other DNA
aaaaaaaaaagccaggtgcg

SEQ ID NO: 16055 - DNA, 20 bp, synthetic construct
  source 1..20: mol_type = other DNA
aaaaaaaaaaagccaggtgc

SEQ ID NO: 16056 - DNA, 20 bp, synthetic construct
  source 1..20: mol_type = other DNA
caaaaaaaaaaagccaggtg

SEQ ID NO: 16057 - DNA, 20 bp, synthetic construct
  source 1..20: mol_type = other DNA
tcaaaaaaaaaaagccaggt

SEQ ID NO: 16058 - DNA, 20 bp, synthetic construct
  source 1..20: mol_type = other DNA
gtcaaaaaaaaaaagccagg

SEQ ID NO: 16059 - DNA, 20 bp, synthetic construct
  source 1..20: mol_type = other DNA
tgtcaaaaaaaaaaagccag

SEQ ID NO: 16060 - DNA, 20 bp, synthetic construct
  source 1..20: mol_type = other DNA
atgtcaaaaaaaaaaagcca

SEQ ID NO: 16061 - DNA, 20 bp, synthetic construct
  source 1..20: mol_type = other DNA
tatgtcaaaaaaaaaaagcc

SEQ ID NO: 16062 - DNA, 20 bp, synthetic construct
  source 1..20: mol_type = other DNA
ctatgtcaaaaaaaaaaagc

SEQ ID NO: 16063 - DNA, 20 bp, synthetic construct
  source 1..20: mol_type = other DNA
tctatgtcaaaaaaaaaaag

SEQ ID NO: 16064 - DNA, 20 bp, synthetic construct
  source 1..20: mol_type = other DNA
ttctatgtcaaaaaaaaaaa

SEQ ID NO: 16065 - DNA, 20 bp, synthetic construct
  source 1..20: mol_type = other DNA
attctatgtcaaaaaaaaaa

SEQ ID NO: 16066 - DNA, 20 bp, synthetic construct
  source 1..20: mol_type = other DNA
gattctatgtcaaaaaaaaa

SEQ ID NO: 16067 - DNA, 20 bp, synthetic construct
  source 1..20: mol_type = other DNA
agattctatgtcaaaaaaaa

SEQ ID NO: 16068 - DNA, 20 bp, synthetic construct
  source 1..20: mol_type = other DNA
aagattctatgtcaaaaaaa

SEQ ID NO: 16069 - DNA, 20 bp, synthetic construct
  source 1..20: mol_type = other DNA
caagattctatgtcaaaaaa

SEQ ID NO: 16070 - DNA, 20 bp, synthetic construct
  source 1..20: mol_type = other DNA
acaagattctatgtcaaaaa

SEQ ID NO: 16071 - DNA, 20 bp, synthetic construct
  source 1..20: mol_type = other DNA
aacaagattctatgtcaaaa

SEQ ID NO: 16072 - DNA, 20 bp, synthetic construct
  source 1..20: mol_type = other DNA
gaacaagattctatgtcaaa

SEQ ID NO: 16073 - DNA, 20 bp, synthetic construct
  source 1..20: mol_type = other DNA
agaacaagattctatgtcaa

SEQ ID NO: 16074 - DNA, 20 bp, synthetic construct
  source 1..20: mol_type = other DNA
cagaacaagattctatgtca

SEQ ID NO: 16075 - DNA, 20 bp, synthetic construct
  source 1..20: mol_type = other DNA
acagaacaagattctatgtc

SEQ ID NO: 16076 - DNA, 20 bp, synthetic construct
  source 1..20: mol_type = other DNA
aacagaacaagattctatgt

SEQ ID NO: 16077 - DNA, 20 bp, synthetic construct
  source 1..20: mol_type = other DNA
caacagaacaagattctatg

SEQ ID NO: 16078 - DNA, 20 bp, synthetic construct
  source 1..20: mol_type = other DNA
gcaacagaacaagattctat

SEQ ID NO: 16079 - DNA, 20 bp, synthetic construct
  source 1..20: mol_type = other DNA
ggcaacagaacaagattcta

SEQ ID NO: 16080 - DNA, 20 bp, synthetic construct
  source 1..20: mol_type = other DNA
gggcaacagaacaagattct

SEQ ID NO: 16081 - DNA, 20 bp, synthetic construct
  source 1..20: mol_type = other DNA
tgggcaacagaacaagattc

SEQ ID NO: 16082 - DNA, 20 bp, synthetic construct
  source 1..20: mol_type = other DNA
ctgggcaacagaacaagatt

SEQ ID NO: 16083 - DNA, 20 bp, synthetic construct
  source 1..20: mol_type = other DNA
cctgggcaacagaacaagat

SEQ ID NO: 16084 - DNA, 20 bp, synthetic construct
  source 1..20: mol_type = other DNA
gcctgggcaacagaacaaga

SEQ ID NO: 16085 - DNA, 20 bp, synthetic construct
  source 1..20: mol_type = other DNA
agcctgggcaacagaacaag

SEQ ID NO: 16086 - DNA, 20 bp, synthetic construct
  source 1..20: mol_type = other DNA
cagcctgggcaacagaacaa

SEQ ID NO: 16087 - DNA, 20 bp, synthetic construct
  source 1..20: mol_type = other DNA
ccagcctgggcaacagaaca

SEQ ID NO: 16088 - DNA, 20 bp, synthetic construct
  source 1..20: mol_type = other DNA
tccagcctgggcaacagaac

SEQ ID NO: 16089 - DNA, 20 bp, synthetic construct
  source 1..20: mol_type = other DNA
ctccagcctgggcaacagaa

SEQ ID NO: 16090 - DNA, 20 bp, synthetic construct
  source 1..20: mol_type = other DNA
actccagcctgggcaacaga

SEQ ID NO: 16091 - DNA, 20 bp, synthetic construct
  source 1..20: mol_type = other DNA
cactccagcctgggcaacag

SEQ ID NO: 16092 - DNA, 20 bp, synthetic construct
  source 1..20: mol_type = other DNA
gcactccagcctgggcaaca

SEQ ID NO: 16093 - DNA, 20 bp, synthetic construct
  source 1..20: mol_type = other DNA
tgcactccagcctgggcaac

SEQ ID NO: 16094 - DNA, 20 bp, synthetic construct
  source 1..20: mol_type = other DNA
ttgcactccagcctgggcaa

SEQ ID NO: 16095 - DNA, 20 bp, synthetic construct
  source 1..20: mol_type = other DNA
attgcactccagcctgggca

SEQ ID NO: 16096 - DNA, 20 bp, synthetic construct
  source 1..20: mol_type = other DNA
cattgcactccagcctgggc

SEQ ID NO: 16097 - DNA, 20 bp, synthetic construct
  source 1..20: mol_type = other DNA
ccattgcactccagcctggg

SEQ ID NO: 16098 - DNA, 20 bp, synthetic construct
  source 1..20: mol_type = other DNA
accattgcactccagcctgg

SEQ ID NO: 16099 - DNA, 20 bp, synthetic construct
  source 1..20: mol_type = other DNA
taccattgcactccagcctg

SEQ ID NO: 16100 - DNA, 20 bp, synthetic construct
  source 1..20: mol_type = other DNA
gtaccattgcactccagcct

SEQ ID NO: 16101 - DNA, 20 bp, synthetic construct
  source 1..20: mol_type = other DNA
tgtaccattgcactccagcc

SEQ ID NO: 16102 - DNA, 20 bp, synthetic construct
  source 1..20: mol_type = other DNA
ttgtaccattgcactccagc

SEQ ID NO: 16103 - DNA, 20 bp, synthetic construct
  source 1..20: mol_type = other DNA
attgtaccattgcactccag

SEQ ID NO: 16104 - DNA, 20 bp, synthetic construct
  source 1..20: mol_type = other DNA
gattgtaccattgcactcca

SEQ ID NO: 16105 - DNA, 20 bp, synthetic construct
  source 1..20: mol_type = other DNA
agattgtaccattgcactcc

SEQ ID NO: 16106 - DNA, 20 bp, synthetic construct
  source 1..20: mol_type = other DNA
aagattgtaccattgcactc

SEQ ID NO: 16107 - DNA, 20 bp, synthetic construct
  source 1..20: mol_type = other DNA
caagattgtaccattgcact

SEQ ID NO: 16108 - DNA, 20 bp, synthetic construct
  source 1..20: mol_type = other DNA
ccaagattgtaccattgcac

SEQ ID NO: 16109 - DNA, 20 bp, synthetic construct
  source 1..20: mol_type = other DNA
gccaagattgtaccattgca

SEQ ID NO: 16110 - DNA, 20 bp, synthetic construct
  source 1..20: mol_type = other DNA
ggccaagattgtaccattgc

SEQ ID NO: 16111 - DNA, 20 bp, synthetic construct
  source 1..20: mol_type = other DNA
gggccaagattgtaccattg

SEQ ID NO: 16112 - DNA, 20 bp, synthetic construct
  source 1..20: mol_type = other DNA
tgggccaagattgtaccatt

SEQ ID NO: 16113 - DNA, 20 bp, synthetic construct
  source 1..20: mol_type = other DNA
gtgggccaagattgtaccat

SEQ ID NO: 16114 - DNA, 20 bp, synthetic construct
  source 1..20: mol_type = other DNA
agtgggccaagattgtacca

SEQ ID NO: 16115 - DNA, 20 bp, synthetic construct
  source 1..20: mol_type = other DNA
cagtgggccaagattgtacc

SEQ ID NO: 16116 - DNA, 20 bp, synthetic construct
  source 1..20: mol_type = other DNA
gcagtgggccaagattgtac

SEQ ID NO: 16117 - DNA, 20 bp, synthetic construct
  source 1..20: mol_type = other DNA
tgcagtgggccaagattgta

SEQ ID NO: 16118 - DNA, 20 bp, synthetic construct
  source 1..20: mol_type = other DNA
ttgcagtgggccaagattgt

SEQ ID NO: 16119 - DNA, 20 bp, synthetic construct
  source 1..20: mol_type = other DNA
gttgcagtgggccaagattg

SEQ ID NO: 16120 - DNA, 20 bp, synthetic construct
  source 1..20: mol_type = other DNA
ggttgcagtgggccaagatt

SEQ ID NO: 16121 - DNA, 20 bp, synthetic construct
  source 1..20: mol_type = other DNA
aggttgcagtgggccaagat

SEQ ID NO: 16122 - DNA, 20 bp, synthetic construct
  source 1..20: mol_type = other DNA
gaggttgcagtgggccaaga

SEQ ID NO: 16123 - DNA, 20 bp, synthetic construct
  source 1..20: mol_type = other DNA
agaggttgcagtgggccaag

SEQ ID NO: 16124 - DNA, 20 bp, synthetic construct
  source 1..20: mol_type = other DNA
cagaggttgcagtgggccaa

SEQ ID NO: 16125 - DNA, 20 bp, synthetic construct
  source 1..20: mol_type = other DNA
gcagaggttgcagtgggcca

SEQ ID NO: 16126 - DNA, 20 bp, synthetic construct
  source 1..20: mol_type = other DNA
ggcagaggttgcagtgggcc

SEQ ID NO: 16127 - DNA, 20 bp, synthetic construct
  source 1..20: mol_type = other DNA
aggcagaggttgcagtgggc

SEQ ID NO: 16128 - DNA, 20 bp, synthetic construct
  source 1..20: mol_type = other DNA
gaggcagaggttgcagtggg

SEQ ID NO: 16129 - DNA, 20 bp, synthetic construct
  source 1..20: mol_type = other DNA
ggaggcagaggttgcagtgg

SEQ ID NO: 16130 - DNA, 20 bp, synthetic construct
  source 1..20: mol_type = other DNA
gggaggcagaggttgcagtg

SEQ ID NO: 16131 - DNA, 20 bp, synthetic construct
  source 1..20: mol_type = other DNA
tgggaggcagaggttgcagt

SEQ ID NO: 16132 - DNA, 20 bp, synthetic construct
  source 1..20: mol_type = other DNA
ctgggaggcagaggttgcag

SEQ ID NO: 16133 - DNA, 20 bp, synthetic construct
  source 1..20: mol_type = other DNA
gctgggaggcagaggttgca

SEQ ID NO: 16134 - DNA, 20 bp, synthetic construct
  source 1..20: mol_type = other DNA
agctgggaggcagaggttgc

SEQ ID NO: 16135 - DNA, 20 bp, synthetic construct
  source 1..20: mol_type = other DNA
aagctgggaggcagaggttg

SEQ ID NO: 16136 - DNA, 20 bp, synthetic construct
  source 1..20: mol_type = other DNA
gaagctgggaggcagaggtt

SEQ ID NO: 16137 - DNA, 20 bp, synthetic construct
  source 1..20: mol_type = other DNA
agaagctgggaggcagaggt

SEQ ID NO: 16138 - DNA, 20 bp, synthetic construct
  source 1..20: mol_type = other DNA
tagaagctgggaggcagagg

SEQ ID NO: 16139 - DNA, 20 bp, synthetic construct
  source 1..20: mol_type = other DNA
ctagaagctgggaggcagag

SEQ ID NO: 16140 - DNA, 20 bp, synthetic construct
  source 1..20: mol_type = other DNA
gctagaagctgggaggcaga

SEQ ID NO: 16141 - DNA, 20 bp, synthetic construct
  source 1..20: mol_type = other DNA
cgctagaagctgggaggcag

SEQ ID NO: 16142 - DNA, 20 bp, synthetic construct
  source 1..20: mol_type = other DNA
tcgctagaagctgggaggca

SEQ ID NO: 16143 - DNA, 20 bp, synthetic construct
  source 1..20: mol_type = other DNA
atcgctagaagctgggaggc

SEQ ID NO: 16144 - DNA, 20 bp, synthetic construct
  source 1..20: mol_type = other DNA
aatcgctagaagctgggagg

SEQ ID NO: 16145 - DNA, 20 bp, synthetic construct
  source 1..20: mol_type = other DNA
aaatcgctagaagctgggag

SEQ ID NO: 16146 - DNA, 20 bp, synthetic construct
  source 1..20: mol_type = other DNA
aaaatcgctagaagctggga

SEQ ID NO: 16147 - DNA, 20 bp, synthetic construct
  source 1..20: mol_type = other DNA
gaaaatcgctagaagctggg

SEQ ID NO: 16148 - DNA, 20 bp, synthetic construct
  source 1..20: mol_type = other DNA
ggaaaatcgctagaagctgg

SEQ ID NO: 16149 - DNA, 20 bp, synthetic construct
  source 1..20: mol_type = other DNA
aggaaaatcgctagaagctg

SEQ ID NO: 16150 - DNA, 20 bp, synthetic construct
  source 1..20: mol_type = other DNA
caggaaaatcgctagaagct

SEQ ID NO: 16151 - DNA, 20 bp, synthetic construct
  source 1..20: mol_type = other DNA
gcaggaaaatcgctagaagc

SEQ ID NO: 16152 - DNA, 20 bp, synthetic construct
  source 1..20: mol_type = other DNA
ggcaggaaaatcgctagaag

SEQ ID NO: 16153 - DNA, 20 bp, synthetic construct
  source 1..20: mol_type = other DNA
aggcaggaaaatcgctagaa

SEQ ID NO: 16154 - DNA, 20 bp, synthetic construct
  source 1..20: mol_type = other DNA
gaggcaggaaaatcgctaga

SEQ ID NO: 16155 - DNA, 20 bp, synthetic construct
  source 1..20: mol_type = other DNA
agaggcaggaaaatcgctag

SEQ ID NO: 16156 - DNA, 20 bp, synthetic construct
  source 1..20: mol_type = other DNA
cagaggcaggaaaatcgcta

SEQ ID NO: 16157 - DNA, 20 bp, synthetic construct
  source 1..20: mol_type = other DNA
tcagaggcaggaaaatcgct

SEQ ID NO: 16158 - DNA, 20 bp, synthetic construct
  source 1..20: mol_type = other DNA
gtcagaggcaggaaaatcgc

SEQ ID NO: 16159 - DNA, 20 bp, synthetic construct
  source 1..20: mol_type = other DNA
agtcagaggcaggaaaatcg

SEQ ID NO: 16160 - DNA, 20 bp, synthetic construct
  source 1..20: mol_type = other DNA
gagtcagaggcaggaaaatc

SEQ ID NO: 16161 - DNA, 20 bp, synthetic construct
  source 1..20: mol_type = other DNA
ggagtcagaggcaggaaaat

SEQ ID NO: 16162 - DNA, 20 bp, synthetic construct
  source 1..20: mol_type = other DNA
aggagtcagaggcaggaaaa

SEQ ID NO: 16163 - DNA, 20 bp, synthetic construct
  source 1..20: mol_type = other DNA
caggagtcagaggcaggaaa

SEQ ID NO: 16164 - DNA, 20 bp, synthetic construct
  source 1..20: mol_type = other DNA
tcaggagtcagaggcaggaa

SEQ ID NO: 16165 - DNA, 20 bp, synthetic construct
  source 1..20: mol_type = other DNA
ctcaggagtcagaggcagga

SEQ ID NO: 16166 - DNA, 20 bp, synthetic construct
  source 1..20: mol_type = other DNA
actcaggagtcagaggcagg

SEQ ID NO: 16167 - DNA, 20 bp, synthetic construct
  source 1..20: mol_type = other DNA
tactcaggagtcagaggcag

SEQ ID NO: 16168 - DNA, 20 bp, synthetic construct
  source 1..20: mol_type = other DNA
ctactcaggagtcagaggca

SEQ ID NO: 16169 - DNA, 20 bp, synthetic construct
  source 1..20: mol_type = other DNA
gctactcaggagtcagaggc

SEQ ID NO: 16170 - DNA, 20 bp, synthetic construct
  source 1..20: mol_type = other DNA
agctactcaggagtcagagg

SEQ ID NO: 16171 - DNA, 20 bp, synthetic construct
  source 1..20: mol_type = other DNA
cagctactcaggagtcagag

SEQ ID NO: 16172 - DNA, 20 bp, synthetic construct
  source 1..20: mol_type = other DNA
ccagctactcaggagtcaga

SEQ ID NO: 16173 - DNA, 20 bp, synthetic construct
  source 1..20: mol_type = other DNA
cccagctactcaggagtcag

SEQ ID NO: 16174 - DNA, 20 bp, synthetic construct
  source 1..20: mol_type = other DNA
tcccagctactcaggagtca

SEQ ID NO: 16175 - DNA, 20 bp, synthetic construct
  source 1..20: mol_type = other DNA
atcccagctactcaggagtc

SEQ ID NO: 16176 - DNA, 20 bp, synthetic construct
  source 1..20: mol_type = other DNA
aatcccagctactcaggagt

SEQ ID NO: 16177 - DNA, 20 bp, synthetic construct
  source 1..20: mol_type = other DNA
taatcccagctactcaggag

SEQ ID NO: 16178 - DNA, 20 bp, synthetic construct
  source 1..20: mol_type = other DNA
gtaatcccagctactcagga

SEQ ID NO: 16179 - DNA, 20 bp, synthetic construct
  source 1..20: mol_type = other DNA
cgtaatcccagctactcagg

SEQ ID NO: 16180 - DNA, 20 bp, synthetic construct
  source 1..20: mol_type = other DNA
ccgtaatcccagctactcag

SEQ ID NO: 16181 - DNA, 20 bp, synthetic construct
  source 1..20: mol_type = other DNA
cccgtaatcccagctactca

SEQ ID NO: 16182 - DNA, 20 bp, synthetic construct
  source 1..20: mol_type = other DNA
acccgtaatcccagctactc

SEQ ID NO: 16183 - DNA, 20 bp, synthetic construct
  source 1..20: mol_type = other DNA
cacccgtaatcccagctact

SEQ ID NO: 16184 - DNA, 20 bp, synthetic construct
  source 1..20: mol_type = other DNA
gcacccgtaatcccagctac

SEQ ID NO: 16185 - DNA, 20 bp, synthetic construct
  source 1..20: mol_type = other DNA
ggcacccgtaatcccagcta

SEQ ID NO: 16186 - DNA, 20 bp, synthetic construct
  source 1..20: mol_type = other DNA
gggcacccgtaatcccagct

SEQ ID NO: 16187 - DNA, 20 bp, synthetic construct
  source 1..20: mol_type = other DNA
cgggcacccgtaatcccagc

SEQ ID NO: 16188 - DNA, 20 bp, synthetic construct
  source 1..20: mol_type = other DNA
gcgggcacccgtaatcccag

SEQ ID NO: 16189 - DNA, 20 bp, synthetic construct
  source 1..20: mol_type = other DNA
ggcgggcacccgtaatccca

SEQ ID NO: 16190 - DNA, 20 bp, synthetic construct
  source 1..20: mol_type = other DNA
tggcgggcacccgtaatccc

SEQ ID NO: 16191 - DNA, 20 bp, synthetic construct
  source 1..20: mol_type = other DNA
gtggcgggcacccgtaatcc

SEQ ID NO: 16192 - DNA, 20 bp, synthetic construct
  source 1..20: mol_type = other DNA
ggtggcgggcacccgtaatc

SEQ ID NO: 16193 - DNA, 20 bp, synthetic construct
  source 1..20: mol_type = other DNA
tggtggcgggcacccgtaat

SEQ ID NO: 16194 - DNA, 20 bp, synthetic construct
  source 1..20: mol_type = other DNA
gtggtggcgggcacccgtaa

SEQ ID NO: 16195 - DNA, 20 bp, synthetic construct
  source 1..20: mol_type = other DNA
tgtggtggcgggcacccgta

SEQ ID NO: 16196 - DNA, 20 bp, synthetic construct
  source 1..20: mol_type = other DNA
gtgtggtggcgggcacccgt

SEQ ID NO: 16197 - DNA, 20 bp, synthetic construct
  source 1..20: mol_type = other DNA
ggtgtggtggcgggcacccg

SEQ ID NO: 16198 - DNA, 20 bp, synthetic construct
  source 1..20: mol_type = other DNA
gggtgtggtggcgggcaccc

SEQ ID NO: 16199 - DNA, 20 bp, synthetic construct
  source 1..20: mol_type = other DNA
cgggtgtggtggcgggcacc

SEQ ID NO: 16200 - DNA, 20 bp, synthetic construct
  source 1..20: mol_type = other DNA
ccgggtgtggtggcgggcac

SEQ ID NO: 16201 - DNA, 20 bp, synthetic construct
  source 1..20: mol_type = other DNA
tccgggtgtggtggcgggca

SEQ ID NO: 16202 - DNA, 20 bp, synthetic construct
  source 1..20: mol_type = other DNA
atccgggtgtggtggcgggc

SEQ ID NO: 16203 - DNA, 20 bp, synthetic construct
  source 1..20: mol_type = other DNA
tatccgggtgtggtggcggg

SEQ ID NO: 16204 - DNA, 20 bp, synthetic construct
  source 1..20: mol_type = other DNA
ttatccgggtgtggtggcgg

SEQ ID NO: 16205 - DNA, 20 bp, synthetic construct
  source 1..20: mol_type = other DNA
attatccgggtgtggtggcg

SEQ ID NO: 16206 - DNA, 20 bp, synthetic construct
  source 1..20: mol_type = other DNA
aattatccgggtgtggtggc

SEQ ID NO: 16207 - DNA, 20 bp, synthetic construct
  source 1..20: mol_type = other DNA
aaattatccgggtgtggtgg

SEQ ID NO: 16208 - DNA, 20 bp, synthetic construct
  source 1..20: mol_type = other DNA
aaaattatccgggtgtggtg

SEQ ID NO: 16209 - DNA, 20 bp, synthetic construct
  source 1..20: mol_type = other DNA
aaaaattatccgggtgtggt

SEQ ID NO: 16210 - DNA, 20 bp, synthetic construct
  source 1..20: mol_type = other DNA
caaaaattatccgggtgtgg

SEQ ID NO: 16211 - DNA, 20 bp, synthetic construct
  source 1..20: mol_type = other DNA
acaaaaattatccgggtgtg

SEQ ID NO: 16212 - DNA, 20 bp, synthetic construct
  source 1..20: mol_type = other DNA
tacaaaaattatccgggtgt

SEQ ID NO: 16213 - DNA, 20 bp, synthetic construct
  source 1..20: mol_type = other DNA
atacaaaaattatccgggtg

SEQ ID NO: 16214 - DNA, 20 bp, synthetic construct
  source 1..20: mol_type = other DNA
aatacaaaaattatccgggt

SEQ ID NO: 16215 - DNA, 20 bp, synthetic construct
  source 1..20: mol_type = other DNA
aaatacaaaaattatccggg

SEQ ID NO: 16216 - DNA, 20 bp, synthetic construct
  source 1..20: mol_type = other DNA
aaaatacaaaaattatccgg

SEQ ID NO: 16217 - DNA, 20 bp, synthetic construct
  source 1..20: mol_type = other DNA
aaaaatacaaaaattatccg

SEQ ID NO: 16218 - DNA, 20 bp, synthetic construct
  source 1..20: mol_type = other DNA
taaaaatacaaaaattatcc

SEQ ID NO: 16219 - DNA, 20 bp, synthetic construct
  source 1..20: mol_type = other DNA
ctaaaaatacaaaaattatc

SEQ ID NO: 16220 - DNA, 20 bp, synthetic construct
  source 1..20: mol_type = other DNA
actaaaaatacaaaaattat

SEQ ID NO: 16221 - DNA, 20 bp, synthetic construct
  source 1..20: mol_type = other DNA
tactaaaaatacaaaaatta

SEQ ID NO: 16222 - DNA, 20 bp, synthetic construct
  source 1..20: mol_type = other DNA
ctactaaaaatacaaaaatt

SEQ ID NO: 16223 - DNA, 20 bp, synthetic construct
  source 1..20: mol_type = other DNA
tctactaaaaatacaaaaat

SEQ ID NO: 16224 - DNA, 20 bp, synthetic construct
  source 1..20: mol_type = other DNA
ctctactaaaaatacaaaaa

SEQ ID NO: 16225 - DNA, 20 bp, synthetic construct
  source 1..20: mol_type = other DNA
tctctactaaaaatacaaaa

SEQ ID NO: 16226 - DNA, 20 bp, synthetic construct
  source 1..20: mol_type = other DNA
atctctactaaaaatacaaa

SEQ ID NO: 16227 - DNA, 20 bp, synthetic construct
  source 1..20: mol_type = other DNA
catctctactaaaaatacaa

SEQ ID NO: 16228 - DNA, 20 bp, synthetic construct
  source 1..20: mol_type = other DNA
ccatctctactaaaaataca

SEQ ID NO: 16229 - DNA, 20 bp, synthetic construct
  source 1..20: mol_type = other DNA
cccatctctactaaaaatac

SEQ ID NO: 16230 - DNA, 20 bp, synthetic construct
  source 1..20: mol_type = other DNA
ccccatctctactaaaaata

SEQ ID NO: 16231 - DNA, 20 bp, synthetic construct
  source 1..20: mol_type = other DNA
accccatctctactaaaaat

SEQ ID NO: 16232 - DNA, 20 bp, synthetic construct
  source 1..20: mol_type = other DNA
aaccccatctctactaaaaa

SEQ ID NO: 16233 - DNA, 20 bp, synthetic construct
  source 1..20: mol_type = other DNA
aaaccccatctctactaaaa

SEQ ID NO: 16234 - DNA, 20 bp, synthetic construct
  source 1..20: mol_type = other DNA
aaaaccccatctctactaaa

SEQ ID NO: 16235 - DNA, 20 bp, synthetic construct
  source 1..20: mol_type = other DNA
caaaaccccatctctactaa

SEQ ID NO: 16236 - DNA, 20 bp, synthetic construct
  source 1..20: mol_type = other DNA
gcaaaaccccatctctacta

SEQ ID NO: 16237 - DNA, 20 bp, synthetic construct
  source 1..20: mol_type = other DNA
ggcaaaaccccatctctact

SEQ ID NO: 16238 - DNA, 20 bp, synthetic construct
  source 1..20: mol_type = other DNA
tggcaaaaccccatctctac

SEQ ID NO: 16239 - DNA, 20 bp, synthetic construct
  source 1..20: mol_type = other DNA
atggcaaaaccccatctcta

SEQ ID NO: 16240 - DNA, 20 bp, synthetic construct
  source 1..20: mol_type = other DNA
tatggcaaaaccccatctct

SEQ ID NO: 16241 - DNA, 20 bp, synthetic construct
  source 1..20: mol_type = other DNA
atatggcaaaaccccatctc

SEQ ID NO: 16242 - DNA, 20 bp, synthetic construct
  source 1..20: mol_type = other DNA
aatatggcaaaaccccatct

SEQ ID NO: 16243 - DNA, 20 bp, synthetic construct
  source 1..20: mol_type = other DNA
caatatggcaaaaccccatc

SEQ ID NO: 16244 - DNA, 20 bp, synthetic construct
  source 1..20: mol_type = other DNA
ccaatatggcaaaaccccat

SEQ ID NO: 16245 - DNA, 20 bp, synthetic construct
  source 1..20: mol_type = other DNA
gccaatatggcaaaacccca

SEQ ID NO: 16246 - DNA, 20 bp, synthetic construct
  source 1..20: mol_type = other DNA
ggccaatatggcaaaacccc

SEQ ID NO: 16247 - DNA, 20 bp, synthetic construct
  source 1..20: mol_type = other DNA
tggccaatatggcaaaaccc

SEQ ID NO: 16248 - DNA, 20 bp, synthetic construct
  source 1..20: mol_type = other DNA
ctggccaatatggcaaaacc

SEQ ID NO: 16249 - DNA, 20 bp, synthetic construct
  source 1..20: mol_type = other DNA
cctggccaatatggcaaaac

SEQ ID NO: 16250 - DNA, 20 bp, synthetic construct
  source 1..20: mol_type = other DNA
gcctggccaatatggcaaaa

SEQ ID NO: 16251 - DNA, 20 bp, synthetic construct
  source 1..20: mol_type = other DNA
ggcctggccaatatggcaaa

SEQ ID NO: 16252 - DNA, 20 bp, synthetic construct
  source 1..20: mol_type = other DNA
cggcctggccaatatggcaa

SEQ ID NO: 16253 - DNA, 20 bp, synthetic construct
  source 1..20: mol_type = other DNA
ccggcctggccaatatggca

SEQ ID NO: 16254 - DNA, 20 bp, synthetic construct
  source 1..20: mol_type = other DNA
accggcctggccaatatggc

SEQ ID NO: 16255 - DNA, 20 bp, synthetic construct
  source 1..20: mol_type = other DNA
gaccggcctggccaatatgg

SEQ ID NO: 16256 - DNA, 20 bp, synthetic construct
  source 1..20: mol_type = other DNA
agaccggcctggccaatatg

SEQ ID NO: 16257 - DNA, 20 bp, synthetic construct
  source 1..20: mol_type = other DNA
aagaccggcctggccaatat

SEQ ID NO: 16258 - DNA, 20 bp, synthetic construct
  source 1..20: mol_type = other DNA
caagaccggcctggccaata

SEQ ID NO: 16259 - DNA, 20 bp, synthetic construct
  source 1..20: mol_type = other DNA
tcaagaccggcctggccaat

SEQ ID NO: 16260 - DNA, 20 bp, synthetic construct
  source 1..20: mol_type = other DNA
ttcaagaccggcctggccaa

SEQ ID NO: 16261 - DNA, 20 bp, synthetic construct
  source 1..20: mol_type = other DNA
gttcaagaccggcctggcca

SEQ ID NO: 16262 - DNA, 20 bp, synthetic construct
  source 1..20: mol_type = other DNA
agttcaagaccggcctggcc

SEQ ID NO: 16263 - DNA, 20 bp, synthetic construct
  source 1..20: mol_type = other DNA
gagttcaagaccggcctggc

SEQ ID NO: 16264 - DNA, 20 bp, synthetic construct
  source 1..20: mol_type = other DNA
ggagttcaagaccggcctgg

SEQ ID NO: 16265 - DNA, 20 bp, synthetic construct
  source 1..20: mol_type = other DNA
aggagttcaagaccggcctg

SEQ ID NO: 16266 - DNA, 20 bp, synthetic construct
  source 1..20: mol_type = other DNA
caggagttcaagaccggcct

SEQ ID NO: 16267 - DNA, 20 bp, synthetic construct
  source 1..20: mol_type = other DNA
tcaggagttcaagaccggcc

SEQ ID NO: 16268 - DNA, 20 bp, synthetic construct
  source 1..20: mol_type = other DNA
gtcaggagttcaagaccggc

SEQ ID NO: 16269 - DNA, 20 bp, synthetic construct
  source 1..20: mol_type = other DNA
ggtcaggagttcaagaccgg

SEQ ID NO: 16270 - DNA, 20 bp, synthetic construct
  source 1..20: mol_type = other DNA
aggtcaggagttcaagaccg

SEQ ID NO: 16271 - DNA, 20 bp, synthetic construct
  source 1..20: mol_type = other DNA
gaggtcaggagttcaagacc

SEQ ID NO: 16272 - DNA, 20 bp, synthetic construct
  source 1..20: mol_type = other DNA
tgaggtcaggagttcaagac

SEQ ID NO: 16273 - DNA, 20 bp, synthetic construct
  source 1..20: mol_type = other DNA
ctgaggtcaggagttcaaga

SEQ ID NO: 16274 - DNA, 20 bp, synthetic construct
  source 1..20: mol_type = other DNA
tctgaggtcaggagttcaag

SEQ ID NO: 16275 - DNA, 20 bp, synthetic construct
  source 1..20: mol_type = other DNA
atctgaggtcaggagttcaa

SEQ ID NO: 16276 - DNA, 20 bp, synthetic construct
  source 1..20: mol_type = other DNA
catctgaggtcaggagttca

SEQ ID NO: 16277 - DNA, 20 bp, synthetic construct
  source 1..20: mol_type = other DNA
tcatctgaggtcaggagttc

SEQ ID NO: 16278 - DNA, 20 bp, synthetic construct
  source 1..20: mol_type = other DNA
atcatctgaggtcaggagtt

SEQ ID NO: 16279 - DNA, 20 bp, synthetic construct
  source 1..20: mol_type = other DNA
gatcatctgaggtcaggagt

SEQ ID NO: 16280 - DNA, 20 bp, synthetic construct
  source 1..20: mol_type = other DNA
ggatcatctgaggtcaggag

SEQ ID NO: 16281 - DNA, 20 bp, synthetic construct
  source 1..20: mol_type = other DNA
tggatcatctgaggtcagga

SEQ ID NO: 16282 - DNA, 20 bp, synthetic construct
  source 1..20: mol_type = other DNA
gtggatcatctgaggtcagg

SEQ ID NO: 16283 - DNA, 20 bp, synthetic construct
  source 1..20: mol_type = other DNA
ggtggatcatctgaggtcag

SEQ ID NO: 16284 - DNA, 20 bp, synthetic construct
  source 1..20: mol_type = other DNA
aggtggatcatctgaggtca

SEQ ID NO: 16285 - DNA, 20 bp, synthetic construct
  source 1..20: mol_type = other DNA
caggtggatcatctgaggtc

SEQ ID NO: 16286 - DNA, 20 bp, synthetic construct
  source 1..20: mol_type = other DNA
gcaggtggatcatctgaggt

SEQ ID NO: 16287 - DNA, 20 bp, synthetic construct
  source 1..20: mol_type = other DNA
ggcaggtggatcatctgagg

SEQ ID NO: 16288 - DNA, 20 bp, synthetic construct
  source 1..20: mol_type = other DNA
aggcaggtggatcatctgag

SEQ ID NO: 16289 - DNA, 20 bp, synthetic construct
  source 1..20: mol_type = other DNA
taggcaggtggatcatctga

SEQ ID NO: 16290 - DNA, 20 bp, synthetic construct
  source 1..20: mol_type = other DNA
ctaggcaggtggatcatctg

SEQ ID NO: 16291 - DNA, 20 bp, synthetic construct
  source 1..20: mol_type = other DNA
cctaggcaggtggatcatct

SEQ ID NO: 16292 - DNA, 20 bp, synthetic construct
  source 1..20: mol_type = other DNA
gcctaggcaggtggatcatc

SEQ ID NO: 16293 - DNA, 20 bp, synthetic construct
  source 1..20: mol_type = other DNA
ggcctaggcaggtggatcat

SEQ ID NO: 16294 - DNA, 20 bp, synthetic construct
  source 1..20: mol_type = other DNA
aggcctaggcaggtggatca

SEQ ID NO: 16295 - DNA, 20 bp, synthetic construct
  source 1..20: mol_type = other DNA
gaggcctaggcaggtggatc

SEQ ID NO: 16296 - DNA, 20 bp, synthetic construct
  source 1..20: mol_type = other DNA
ggaggcctaggcaggtggat

SEQ ID NO: 16297 - DNA, 20 bp, synthetic construct
  source 1..20: mol_type = other DNA
gggaggcctaggcaggtgga

SEQ ID NO: 16298 - DNA, 20 bp, synthetic construct
  source 1..20: mol_type = other DNA
tgggaggcctaggcaggtgg

SEQ ID NO: 16299 - DNA, 20 bp, synthetic construct
  source 1..20: mol_type = other DNA
ttgggaggcctaggcaggtg

SEQ ID NO: 16300 - DNA, 20 bp, synthetic construct
  source 1..20: mol_type = other DNA
tttgggaggcctaggcaggt

SEQ ID NO: 16301 - DNA, 20 bp, synthetic construct
  source 1..20: mol_type = other DNA
ctttgggaggcctaggcagg

SEQ ID NO: 16302 - DNA, 20 bp, synthetic construct
  source 1..20: mol_type = other DNA
actttgggaggcctaggcag

SEQ ID NO: 16303 - DNA, 20 bp, synthetic construct
  source 1..20: mol_type = other DNA
cactttgggaggcctaggca

SEQ ID NO: 16304 - DNA, 20 bp, synthetic construct
  source 1..20: mol_type = other DNA
gcactttgggaggcctaggc

SEQ ID NO: 16305 - DNA, 20 bp, synthetic construct
  source 1..20: mol_type = other DNA
ggcactttgggaggcctagg

SEQ ID NO: 16306 - DNA, 20 bp, synthetic construct
  source 1..20: mol_type = other DNA
cggcactttgggaggcctag

SEQ ID NO: 16307 - DNA, 20 bp, synthetic construct
  source 1..20: mol_type = other DNA
ccggcactttgggaggccta

SEQ ID NO: 16308 - DNA, 20 bp, synthetic construct
  source 1..20: mol_type = other DNA
cccggcactttgggaggcct

SEQ ID NO: 16309 - DNA, 20 bp, synthetic construct
  source 1..20: mol_type = other DNA
tcccggcactttgggaggcc

SEQ ID NO: 16310 - DNA, 20 bp, synthetic construct
  source 1..20: mol_type = other DNA
atcccggcactttgggaggc

SEQ ID NO: 16311 - DNA, 20 bp, synthetic construct
  source 1..20: mol_type = other DNA
aatcccggcactttgggagg

SEQ ID NO: 16312 - DNA, 20 bp, synthetic construct
  source 1..20: mol_type = other DNA
taatcccggcactttgggag

SEQ ID NO: 16313 - DNA, 20 bp, synthetic construct
  source 1..20: mol_type = other DNA
gtaatcccggcactttggga

SEQ ID NO: 16314 - DNA, 20 bp, synthetic construct
  source 1..20: mol_type = other DNA
tgtaatcccggcactttggg

SEQ ID NO: 16315 - DNA, 20 bp, synthetic construct
  source 1..20: mol_type = other DNA
ctgtaatcccggcactttgg

SEQ ID NO: 16316 - DNA, 20 bp, synthetic construct
  source 1..20: mol_type = other DNA
cctgtaatcccggcactttg

SEQ ID NO: 16317 - DNA, 20 bp, synthetic construct
  source 1..20: mol_type = other DNA
gcctgtaatcccggcacttt

SEQ ID NO: 16318 - DNA, 20 bp, synthetic construct
  source 1..20: mol_type = other DNA
cgcctgtaatcccggcactt

SEQ ID NO: 16319 - DNA, 20 bp, synthetic construct
  source 1..20: mol_type = other DNA
acgcctgtaatcccggcact

SEQ ID NO: 16320 - DNA, 20 bp, synthetic construct
  source 1..20: mol_type = other DNA
cacgcctgtaatcccggcac

SEQ ID NO: 16321 - DNA, 20 bp, synthetic construct
  source 1..20: mol_type = other DNA
tcacgcctgtaatcccggca

SEQ ID NO: 16322 - DNA, 20 bp, synthetic construct
  source 1..20: mol_type = other DNA
ctcacgcctgtaatcccggc

SEQ ID NO: 16323 - DNA, 20 bp, synthetic construct
  source 1..20: mol_type = other DNA
gctcacgcctgtaatcccgg

SEQ ID NO: 16324 - DNA, 20 bp, synthetic construct
  source 1..20: mol_type = other DNA
ggctcacgcctgtaatcccg

SEQ ID NO: 16325 - DNA, 20 bp, synthetic construct
  source 1..20: mol_type = other DNA
tggctcacgcctgtaatccc

SEQ ID NO: 16326 - DNA, 20 bp, synthetic construct
  source 1..20: mol_type = other DNA
gtggctcacgcctgtaatcc

SEQ ID NO: 16327 - DNA, 20 bp, synthetic construct
  source 1..20: mol_type = other DNA
ggtggctcacgcctgtaatc

SEQ ID NO: 16328 - DNA, 20 bp, synthetic construct
  source 1..20: mol_type = other DNA
tggtggctcacgcctgtaat

SEQ ID NO: 16329 - DNA, 20 bp, synthetic construct
  source 1..20: mol_type = other DNA
gtggtggctcacgcctgtaa

SEQ ID NO: 16330 - DNA, 20 bp, synthetic construct
  source 1..20: mol_type = other DNA
agtggtggctcacgcctgta

SEQ ID NO: 16331 - DNA, 20 bp, synthetic construct
  source 1..20: mol_type = other DNA
gagtggtggctcacgcctgt

SEQ ID NO: 16332 - DNA, 20 bp, synthetic construct
  source 1..20: mol_type = other DNA
ggagtggtggctcacgcctg

SEQ ID NO: 16333 - DNA, 20 bp, synthetic construct
  source 1..20: mol_type = other DNA
gggagtggtggctcacgcct

SEQ ID NO: 16334 - DNA, 20 bp, synthetic construct
  source 1..20: mol_type = other DNA
cgggagtggtggctcacgcc

SEQ ID NO: 16335 - DNA, 20 bp, synthetic construct
  source 1..20: mol_type = other DNA
ccgggagtggtggctcacgc

SEQ ID NO: 16336 - DNA, 20 bp, synthetic construct
  source 1..20: mol_type = other DNA
gccgggagtggtggctcacg

SEQ ID NO: 16337 - DNA, 20 bp, synthetic construct
  source 1..20: mol_type = other DNA
ggccgggagtggtggctcac

SEQ ID NO: 16338 - DNA, 20 bp, synthetic construct
  source 1..20: mol_type = other DNA
aggccgggagtggtggctca

SEQ ID NO: 16339 - DNA, 20 bp, synthetic construct
  source 1..20: mol_type = other DNA
caggccgggagtggtggctc

SEQ ID NO: 16340 - DNA, 20 bp, synthetic construct
  source 1..20: mol_type = other DNA
ccaggccgggagtggtggct

SEQ ID NO: 16341 - DNA, 20 bp, synthetic construct
  source 1..20: mol_type = other DNA
cccaggccgggagtggtggc

SEQ ID NO: 16342 - DNA, 20 bp, synthetic construct
  source 1..20: mol_type = other DNA
tcccaggccgggagtggtgg

SEQ ID NO: 16343 - DNA, 20 bp, synthetic construct
  source 1..20: mol_type = other DNA
ctcccaggccgggagtggtg

SEQ ID NO: 16344 - DNA, 20 bp, synthetic construct
  source 1..20: mol_type = other DNA
actcccaggccgggagtggt

SEQ ID NO: 16345 - DNA, 20 bp, synthetic construct
  source 1..20: mol_type = other DNA
aactcccaggccgggagtgg

SEQ ID NO: 16346 - DNA, 20 bp, synthetic construct
  source 1..20: mol_type = other DNA
aaactcccaggccgggagtg

SEQ ID NO: 16347 - DNA, 20 bp, synthetic construct
  source 1..20: mol_type = other DNA
aaaactcccaggccgggagt

SEQ ID NO: 16348 - DNA, 20 bp, synthetic construct
  source 1..20: mol_type = other DNA
caaaactcccaggccgggag

SEQ ID NO: 16349 - DNA, 20 bp, synthetic construct
  source 1..20: mol_type = other DNA
tcaaaactcccaggccggga

SEQ ID NO: 16350 - DNA, 20 bp, synthetic construct
  source 1..20: mol_type = other DNA
gtcaaaactcccaggccggg

SEQ ID NO: 16351 - DNA, 20 bp, synthetic construct
  source 1..20: mol_type = other DNA
agtcaaaactcccaggccgg

SEQ ID NO: 16352 - DNA, 20 bp, synthetic construct
  source 1..20: mol_type = other DNA
cagtcaaaactcccaggccg

SEQ ID NO: 16353 - DNA, 20 bp, synthetic construct
  source 1..20: mol_type = other DNA
acagtcaaaactcccaggcc

SEQ ID NO: 16354 - DNA, 20 bp, synthetic construct
  source 1..20: mol_type = other DNA
tacagtcaaaactcccaggc

SEQ ID NO: 16355 - DNA, 20 bp, synthetic construct
  source 1..20: mol_type = other DNA
ttacagtcaaaactcccagg

SEQ ID NO: 16356 - DNA, 20 bp, synthetic construct
  source 1..20: mol_type = other DNA
cttacagtcaaaactcccag

SEQ ID NO: 16357 - DNA, 20 bp, synthetic construct
  source 1..20: mol_type = other DNA
acttacagtcaaaactccca

SEQ ID NO: 16358 - DNA, 20 bp, synthetic construct
  source 1..20: mol_type = other DNA
aacttacagtcaaaactccc

SEQ ID NO: 16359 - DNA, 20 bp, synthetic construct
  source 1..20: mol_type = other DNA
aaacttacagtcaaaactcc

SEQ ID NO: 16360 - DNA, 20 bp, synthetic construct
  source 1..20: mol_type = other DNA
taaacttacagtcaaaactc

SEQ ID NO: 16361 - DNA, 20 bp, synthetic construct
  source 1..20: mol_type = other DNA
ataaacttacagtcaaaact

SEQ ID NO: 16362 - DNA, 20 bp, synthetic construct
  source 1..20: mol_type = other DNA
tataaacttacagtcaaaac

SEQ ID NO: 16363 - DNA, 20 bp, synthetic construct
  source 1..20: mol_type = other DNA
ctataaacttacagtcaaaa

SEQ ID NO: 16364 - DNA, 20 bp, synthetic construct
  source 1..20: mol_type = other DNA
gctataaacttacagtcaaa

SEQ ID NO: 16365 - DNA, 20 bp, synthetic construct
  source 1..20: mol_type = other DNA
agctataaacttacagtcaa

SEQ ID NO: 16366 - DNA, 20 bp, synthetic construct
  source 1..20: mol_type = other DNA
cagctataaacttacagtca

SEQ ID NO: 16367 - DNA, 20 bp, synthetic construct
  source 1..20: mol_type = other DNA
acagctataaacttacagtc

SEQ ID NO: 16368 - DNA, 20 bp, synthetic construct
  source 1..20: mol_type = other DNA
tacagctataaacttacagt

SEQ ID NO: 16369 - DNA, 20 bp, synthetic construct
  source 1..20: mol_type = other DNA
atacagctataaacttacag

SEQ ID NO: 16370 - DNA, 20 bp, synthetic construct
  source 1..20: mol_type = other DNA
tatacagctataaacttaca

SEQ ID NO: 16371 - DNA, 20 bp, synthetic construct
  source 1..20: mol_type = other DNA
atatacagctataaacttac

SEQ ID NO: 16372 - DNA, 20 bp, synthetic construct
  source 1..20: mol_type = other DNA
gatatacagctataaactta

SEQ ID NO: 16373 - DNA, 20 bp, synthetic construct
  source 1..20: mol_type = other DNA
agatatacagctataaactt

SEQ ID NO: 16374 - DNA, 20 bp, synthetic construct
  source 1..20: mol_type = other DNA
aagatatacagctataaact

SEQ ID NO: 16375 - DNA, 20 bp, synthetic construct
  source 1..20: mol_type = other DNA
taagatatacagctataaac

SEQ ID NO: 16376 - DNA, 20 bp, synthetic construct
  source 1..20: mol_type = other DNA
ctaagatatacagctataaa

SEQ ID NO: 16377 - DNA, 20 bp, synthetic construct
  source 1..20: mol_type = other DNA
cctaagatatacagctataa

SEQ ID NO: 16378 - DNA, 20 bp, synthetic construct
  source 1..20: mol_type = other DNA
gcctaagatatacagctata

SEQ ID NO: 16379 - DNA, 20 bp, synthetic construct
  source 1..20: mol_type = other DNA
ggcctaagatatacagctat

SEQ ID NO: 16380 - DNA, 20 bp, synthetic construct
  source 1..20: mol_type = other DNA
gggcctaagatatacagcta

SEQ ID NO: 16381 - DNA, 20 bp, synthetic construct
  source 1..20: mol_type = other DNA
agggcctaagatatacagct

SEQ ID NO: 16382 - DNA, 20 bp, synthetic construct
  source 1..20: mol_type = other DNA
tagggcctaagatatacagc

SEQ ID NO: 16383 - DNA, 20 bp, synthetic construct
  source 1..20: mol_type = other DNA
ttagggcctaagatatacag

SEQ ID NO: 16384 - DNA, 20 bp, synthetic construct
  source 1..20: mol_type = other DNA
cttagggcctaagatataca

SEQ ID NO: 16385 - DNA, 20 bp, synthetic construct
  source 1..20: mol_type = other DNA
ccttagggcctaagatatac

SEQ ID NO: 16386 - DNA, 20 bp, synthetic construct
  source 1..20: mol_type = other DNA
cccttagggcctaagatata

SEQ ID NO: 16387 - DNA, 20 bp, synthetic construct
  source 1..20: mol_type = other DNA
gcccttagggcctaagatat

SEQ ID NO: 16388 - DNA, 20 bp, synthetic construct
  source 1..20: mol_type = other DNA
tgcccttagggcctaagata

SEQ ID NO: 16389 - DNA, 20 bp, synthetic construct
  source 1..20: mol_type = other DNA
atgcccttagggcctaagat

SEQ ID NO: 16390 - DNA, 20 bp, synthetic construct
  source 1..20: mol_type = other DNA
aatgcccttagggcctaaga

SEQ ID NO: 16391 - DNA, 20 bp, synthetic construct
  source 1..20: mol_type = other DNA
taatgcccttagggcctaag

SEQ ID NO: 16392 - DNA, 20 bp, synthetic construct
  source 1..20: mol_type = other DNA
gtaatgcccttagggcctaa

SEQ ID NO: 16393 - DNA, 20 bp, synthetic construct
  source 1..20: mol_type = other DNA
agtaatgcccttagggccta

SEQ ID NO: 16394 - DNA, 20 bp, synthetic construct
  source 1..20: mol_type = other DNA
cagtaatgcccttagggcct

SEQ ID NO: 16395 - DNA, 20 bp, synthetic construct
  source 1..20: mol_type = other DNA
acagtaatgcccttagggcc

SEQ ID NO: 16396 - DNA, 20 bp, synthetic construct
  source 1..20: mol_type = other DNA
aacagtaatgcccttagggc

SEQ ID NO: 16397 - DNA, 20 bp, synthetic construct
  source 1..20: mol_type = other DNA
aaacagtaatgcccttaggg

SEQ ID NO: 16398 - DNA, 20 bp, synthetic construct
  source 1..20: mol_type = other DNA
aaaacagtaatgcccttagg

SEQ ID NO: 16399 - DNA, 20 bp, synthetic construct
  source 1..20: mol_type = other DNA
taaaacagtaatgcccttag

SEQ ID NO: 16400 - DNA, 20 bp, synthetic construct
  source 1..20: mol_type = other DNA
ataaaacagtaatgccctta

SEQ ID NO: 16401 - DNA, 20 bp, synthetic construct
  source 1..20: mol_type = other DNA
tataaaacagtaatgccctt

SEQ ID NO: 16402 - DNA, 20 bp, synthetic construct
  source 1..20: mol_type = other DNA
ctataaaacagtaatgccct

SEQ ID NO: 16403 - DNA, 20 bp, synthetic construct
  source 1..20: mol_type = other DNA
gctataaaacagtaatgccc

SEQ ID NO: 16404 - DNA, 20 bp, synthetic construct
  source 1..20: mol_type = other DNA
tgctataaaacagtaatgcc

SEQ ID NO: 16405 - DNA, 20 bp, synthetic construct
  source 1..20: mol_type = other DNA
gtgctataaaacagtaatgc

SEQ ID NO: 16406 - DNA, 20 bp, synthetic construct
  source 1..20: mol_type = other DNA
tgtgctataaaacagtaatg

SEQ ID NO: 16407 - DNA, 20 bp, synthetic construct
  source 1..20: mol_type = other DNA
ctgtgctataaaacagtaat

SEQ ID NO: 16408 - DNA, 20 bp, synthetic construct
  source 1..20: mol_type = other DNA
actgtgctataaaacagtaa

SEQ ID NO: 16409 - DNA, 20 bp, synthetic construct
  source 1..20: mol_type = other DNA
cactgtgctataaaacagta

SEQ ID NO: 16410 - DNA, 20 bp, synthetic construct
  source 1..20: mol_type = other DNA
acactgtgctataaaacagt

SEQ ID NO: 16411 - DNA, 20 bp, synthetic construct
  source 1..20: mol_type = other DNA
tacactgtgctataaaacag

SEQ ID NO: 16412 - DNA, 20 bp, synthetic construct
  source 1..20: mol_type = other DNA
ctacactgtgctataaaaca

SEQ ID NO: 16413 - DNA, 20 bp, synthetic construct
  source 1..20: mol_type = other DNA
actacactgtgctataaaac

SEQ ID NO: 16414 - DNA, 20 bp, synthetic construct
  source 1..20: mol_type = other DNA
aactacactgtgctataaaa

SEQ ID NO: 16415 - DNA, 20 bp, synthetic construct
  source 1..20: mol_type = other DNA
taactacactgtgctataaa

SEQ ID NO: 16416 - DNA, 20 bp, synthetic construct
  source 1..20: mol_type = other DNA
ctaactacactgtgctataa

SEQ ID NO: 16417 - DNA, 20 bp, synthetic construct
  source 1..20: mol_type = other DNA
actaactacactgtgctata

SEQ ID NO: 16418 - DNA, 20 bp, synthetic construct
  source 1..20: mol_type = other DNA
aactaactacactgtgctat

SEQ ID NO: 16419 - DNA, 20 bp, synthetic construct
  source 1..20: mol_type = other DNA
taactaactacactgtgcta

SEQ ID NO: 16420 - DNA, 20 bp, synthetic construct
  source 1..20: mol_type = other DNA
ttaactaactacactgtgct

SEQ ID NO: 16421 - DNA, 20 bp, synthetic construct
  source 1..20: mol_type = other DNA
attaactaactacactgtgc

SEQ ID NO: 16422 - DNA, 20 bp, synthetic construct
  source 1..20: mol_type = other DNA
cattaactaactacactgtg

SEQ ID NO: 16423 - DNA, 20 bp, synthetic construct
  source 1..20: mol_type = other DNA
acattaactaactacactgt

SEQ ID NO: 16424 - DNA, 20 bp, synthetic construct
  source 1..20: mol_type = other DNA
cacattaactaactacactg

SEQ ID NO: 16425 - DNA, 20 bp, synthetic construct
  source 1..20: mol_type = other DNA
gcacattaactaactacact

SEQ ID NO: 16426 - DNA, 20 bp, synthetic construct
  source 1..20: mol_type = other DNA
agcacattaactaactacac

SEQ ID NO: 16427 - DNA, 20 bp, synthetic construct
  source 1..20: mol_type = other DNA
gagcacattaactaactaca

SEQ ID NO: 16428 - DNA, 20 bp, synthetic construct
  source 1..20: mol_type = other DNA
tgagcacattaactaactac

SEQ ID NO: 16429 - DNA, 20 bp, synthetic construct
  source 1..20: mol_type = other DNA
atgagcacattaactaacta

SEQ ID NO: 16430 - DNA, 20 bp, synthetic construct
  source 1..20: mol_type = other DNA
tatgagcacattaactaact

SEQ ID NO: 16431 - DNA, 20 bp, synthetic construct
  source 1..20: mol_type = other DNA
ttatgagcacattaactaac

SEQ ID NO: 16432 - DNA, 20 bp, synthetic construct
  source 1..20: mol_type = other DNA
attatgagcacattaactaa

SEQ ID NO: 16433 - DNA, 20 bp, synthetic construct
  source 1..20: mol_type = other DNA
cattatgagcacattaacta

SEQ ID NO: 16434 - DNA, 20 bp, synthetic construct
  source 1..20: mol_type = other DNA
ccattatgagcacattaact

SEQ ID NO: 16435 - DNA, 20 bp, synthetic construct
  source 1..20: mol_type = other DNA
accattatgagcacattaac

SEQ ID NO: 16436 - DNA, 20 bp, synthetic construct
  source 1..20: mol_type = other DNA
caccattatgagcacattaa

SEQ ID NO: 16437 - DNA, 20 bp, synthetic construct
  source 1..20: mol_type = other DNA
tcaccattatgagcacatta

SEQ ID NO: 16438 - DNA, 20 bp, synthetic construct
  source 1..20: mol_type = other DNA
gtcaccattatgagcacatt

SEQ ID NO: 16439 - DNA, 20 bp, synthetic construct
  source 1..20: mol_type = other DNA
agtcaccattatgagcacat

SEQ ID NO: 16440 - DNA, 20 bp, synthetic construct
  source 1..20: mol_type = other DNA
gagtcaccattatgagcaca

SEQ ID NO: 16441 - DNA, 20 bp, synthetic construct
  source 1..20: mol_type = other DNA
tgagtcaccattatgagcac

SEQ ID NO: 16442 - DNA, 20 bp, synthetic construct
  source 1..20: mol_type = other DNA
atgagtcaccattatgagca

SEQ ID NO: 16443 - DNA, 20 bp, synthetic construct
  source 1..20: mol_type = other DNA
tatgagtcaccattatgagc

SEQ ID NO: 16444 - DNA, 20 bp, synthetic construct
  source 1..20: mol_type = other DNA
ttatgagtcaccattatgag

SEQ ID NO: 16445 - DNA, 20 bp, synthetic construct
  source 1..20: mol_type = other DNA
gttatgagtcaccattatga

SEQ ID NO: 16446 - DNA, 20 bp, synthetic construct
  source 1..20: mol_type = other DNA
tgttatgagtcaccattatg

SEQ ID NO: 16447 - DNA, 20 bp, synthetic construct
  source 1..20: mol_type = other DNA
gtgttatgagtcaccattat

SEQ ID NO: 16448 - DNA, 20 bp, synthetic construct
  source 1..20: mol_type = other DNA
ggtgttatgagtcaccatta

SEQ ID NO: 16449 - DNA, 20 bp, synthetic construct
  source 1..20: mol_type = other DNA
tggtgttatgagtcaccatt

SEQ ID NO: 16450 - DNA, 20 bp, synthetic construct
  source 1..20: mol_type = other DNA
ctggtgttatgagtcaccat

SEQ ID NO: 16451 - DNA, 20 bp, synthetic construct
  source 1..20: mol_type = other DNA
cctggtgttatgagtcacca

SEQ ID NO: 16452 - DNA, 20 bp, synthetic construct
  source 1..20: mol_type = other DNA
acctggtgttatgagtcacc

SEQ ID NO: 16453 - DNA, 20 bp, synthetic construct
  source 1..20: mol_type = other DNA
aacctggtgttatgagtcac

SEQ ID NO: 16454 - DNA, 20 bp, synthetic construct
  source 1..20: mol_type = other DNA
taacctggtgttatgagtca

SEQ ID NO: 16455 - DNA, 20 bp, synthetic construct
  source 1..20: mol_type = other DNA
ttaacctggtgttatgagtc

SEQ ID NO: 16456 - DNA, 20 bp, synthetic construct
  source 1..20: mol_type = other DNA
tttaacctggtgttatgagt

SEQ ID NO: 16457 - DNA, 20 bp, synthetic construct
  source 1..20: mol_type = other DNA
atttaacctggtgttatgag

SEQ ID NO: 16458 - DNA, 20 bp, synthetic construct
  source 1..20: mol_type = other DNA
catttaacctggtgttatga

SEQ ID NO: 16459 - DNA, 20 bp, synthetic construct
  source 1..20: mol_type = other DNA
tcatttaacctggtgttatg

SEQ ID NO: 16460 - DNA, 20 bp, synthetic construct
  source 1..20: mol_type = other DNA
atcatttaacctggtgttat

SEQ ID NO: 16461 - DNA, 20 bp, synthetic construct
  source 1..20: mol_type = other DNA
aatcatttaacctggtgtta

SEQ ID NO: 16462 - DNA, 20 bp, synthetic construct
  source 1..20: mol_type = other DNA
aaatcatttaacctggtgtt

SEQ ID NO: 16463 - DNA, 20 bp, synthetic construct
  source 1..20: mol_type = other DNA
aaaatcatttaacctggtgt

SEQ ID NO: 16464 - DNA, 20 bp, synthetic construct
  source 1..20: mol_type = other DNA
aaaaatcatttaacctggtg

SEQ ID NO: 16465 - DNA, 20 bp, synthetic construct
  source 1..20: mol_type = other DNA
aaaaaatcatttaacctggt

SEQ ID NO: 16466 - DNA, 20 bp, synthetic construct
  source 1..20: mol_type = other DNA
taaaaaatcatttaacctgg

SEQ ID NO: 16467 - DNA, 20 bp, synthetic construct
  source 1..20: mol_type = other DNA
ataaaaaatcatttaacctg

SEQ ID NO: 16468 - DNA, 20 bp, synthetic construct
  source 1..20: mol_type = other DNA
tataaaaaatcatttaacct

SEQ ID NO: 16469 - DNA, 20 bp, synthetic construct
  source 1..20: mol_type = other DNA
atataaaaaatcatttaacc

SEQ ID NO: 16470 - DNA, 20 bp, synthetic construct
  source 1..20: mol_type = other DNA
gatataaaaaatcatttaac

SEQ ID NO: 16471 - DNA, 20 bp, synthetic construct
  source 1..20: mol_type = other DNA
agatataaaaaatcatttaa

SEQ ID NO: 16472 - DNA, 20 bp, synthetic construct
  source 1..20: mol_type = other DNA
gagatataaaaaatcattta

SEQ ID NO: 16473 - DNA, 20 bp, synthetic construct
  source 1..20: mol_type = other DNA
ggagatataaaaaatcattt

SEQ ID NO: 16474 - DNA, 20 bp, synthetic construct
  source 1..20: mol_type = other DNA
gggagatataaaaaatcatt

SEQ ID NO: 16475 - DNA, 20 bp, synthetic construct
  source 1..20: mol_type = other DNA
tgggagatataaaaaatcat

SEQ ID NO: 16476 - DNA, 20 bp, synthetic construct
  source 1..20: mol_type = other DNA
ttgggagatataaaaaatca

SEQ ID NO: 16477 - DNA, 20 bp, synthetic construct
  source 1..20: mol_type = other DNA
tttgggagatataaaaaatc

SEQ ID NO: 16478 - DNA, 20 bp, synthetic construct
  source 1..20: mol_type = other DNA
ctttgggagatataaaaaat

SEQ ID NO: 16479 - DNA, 20 bp, synthetic construct
  source 1..20: mol_type = other DNA
tctttgggagatataaaaaa

SEQ ID NO: 16480 - DNA, 20 bp, synthetic construct
  source 1..20: mol_type = other DNA
ttctttgggagatataaaaa

SEQ ID NO: 16481 - DNA, 20 bp, synthetic construct
  source 1..20: mol_type = other DNA
cttctttgggagatataaaa

SEQ ID NO: 16482 - DNA, 20 bp, synthetic construct
  source 1..20: mol_type = other DNA
acttctttgggagatataaa

SEQ ID NO: 16483 - DNA, 20 bp, synthetic construct
  source 1..20: mol_type = other DNA
tacttctttgggagatataa

SEQ ID NO: 16484 - DNA, 20 bp, synthetic construct
  source 1..20: mol_type = other DNA
atacttctttgggagatata

SEQ ID NO: 16485 - DNA, 20 bp, synthetic construct
  source 1..20: mol_type = other DNA
aatacttctttgggagatat

SEQ ID NO: 16486 - DNA, 20 bp, synthetic construct
  source 1..20: mol_type = other DNA
aaatacttctttgggagata

SEQ ID NO: 16487 - DNA, 20 bp, synthetic construct
  source 1..20: mol_type = other DNA
aaaatacttctttgggagat

SEQ ID NO: 16488 - DNA, 20 bp, synthetic construct
  source 1..20: mol_type = other DNA
aaaaatacttctttgggaga

SEQ ID NO: 16489 - DNA, 20 bp, synthetic construct
  source 1..20: mol_type = other DNA
gaaaaatacttctttgggag

SEQ ID NO: 16490 - DNA, 20 bp, synthetic construct
  source 1..20: mol_type = other DNA
tgaaaaatacttctttggga

SEQ ID NO: 16491 - DNA, 20 bp, synthetic construct
  source 1..20: mol_type = other DNA
ttgaaaaatacttctttggg

SEQ ID NO: 16492 - DNA, 20 bp, synthetic construct
  source 1..20: mol_type = other DNA
attgaaaaatacttctttgg

SEQ ID NO: 16493 - DNA, 20 bp, synthetic construct
  source 1..20: mol_type = other DNA
gattgaaaaatacttctttg

SEQ ID NO: 16494 - DNA, 20 bp, synthetic construct
  source 1..20: mol_type = other DNA
agattgaaaaatacttcttt

SEQ ID NO: 16495 - DNA, 20 bp, synthetic construct
  source 1..20: mol_type = other DNA
cagattgaaaaatacttctt

SEQ ID NO: 16496 - DNA, 20 bp, synthetic construct
  source 1..20: mol_type = other DNA
gcagattgaaaaatacttct

SEQ ID NO: 16497 - DNA, 20 bp, synthetic construct
  source 1..20: mol_type = other DNA
tgcagattgaaaaatacttc

SEQ ID NO: 16498 - DNA, 20 bp, synthetic construct
  source 1..20: mol_type = other DNA
ctgcagattgaaaaatactt

SEQ ID NO: 16499 - DNA, 20 bp, synthetic construct
  source 1..20: mol_type = other DNA
tctgcagattgaaaaatact

SEQ ID NO: 16500 - DNA, 20 bp, synthetic construct
  source 1..20: mol_type = other DNA
atctgcagattgaaaaatac

SEQ ID NO: 16501 - DNA, 20 bp, synthetic construct
  source 1..20: mol_type = other DNA
gatctgcagattgaaaaata

SEQ ID NO: 16502 - DNA, 20 bp, synthetic construct
  source 1..20: mol_type = other DNA
tgatctgcagattgaaaaat

SEQ ID NO: 16503 - DNA, 20 bp, synthetic construct
  source 1..20: mol_type = other DNA
atgatctgcagattgaaaaa

SEQ ID NO: 16504 - DNA, 20 bp, synthetic construct
  source 1..20: mol_type = other DNA
catgatctgcagattgaaaa

SEQ ID NO: 16505 - DNA, 20 bp, synthetic construct
  source 1..20: mol_type = other DNA
tcatgatctgcagattgaaa

SEQ ID NO: 16506 - DNA, 20 bp, synthetic construct
  source 1..20: mol_type = other DNA
gtcatgatctgcagattgaa

SEQ ID NO: 16507 - DNA, 20 bp, synthetic construct
  source 1..20: mol_type = other DNA
ggtcatgatctgcagattga

SEQ ID NO: 16508 - DNA, 20 bp, synthetic construct
  source 1..20: mol_type = other DNA
gggtcatgatctgcagattg

SEQ ID NO: 16509 - DNA, 20 bp, synthetic construct
  source 1..20: mol_type = other DNA
ggggtcatgatctgcagatt

SEQ ID NO: 16510 - DNA, 20 bp, synthetic construct
  source 1..20: mol_type = other DNA
aggggtcatgatctgcagat

SEQ ID NO: 16511 - DNA, 20 bp, synthetic construct
  source 1..20: mol_type = other DNA
aaggggtcatgatctgcaga

SEQ ID NO: 16512 - DNA, 20 bp, synthetic construct
  source 1..20: mol_type = other DNA
taaggggtcatgatctgcag

SEQ ID NO: 16513 - DNA, 20 bp, synthetic construct
  source 1..20: mol_type = other DNA
ctaaggggtcatgatctgca

SEQ ID NO: 16514 - DNA, 20 bp, synthetic construct
  source 1..20: mol_type = other DNA
actaaggggtcatgatctgc

SEQ ID NO: 16515 - DNA, 20 bp, synthetic construct
  source 1..20: mol_type = other DNA
tactaaggggtcatgatctg

SEQ ID NO: 16516 - DNA, 20 bp, synthetic construct
  source 1..20: mol_type = other DNA
ctactaaggggtcatgatct

SEQ ID NO: 16517 - DNA, 20 bp, synthetic construct
  source 1..20: mol_type = other DNA
tctactaaggggtcatgatc

SEQ ID NO: 16518 - DNA, 20 bp, synthetic construct
  source 1..20: mol_type = other DNA
atctactaaggggtcatgat

SEQ ID NO: 16519 - DNA, 20 bp, synthetic construct
  source 1..20: mol_type = other DNA
aatctactaaggggtcatga

SEQ ID NO: 16520 - DNA, 20 bp, synthetic construct
  source 1..20: mol_type = other DNA
caatctactaaggggtcatg

SEQ ID NO: 16521 - DNA, 20 bp, synthetic construct
  source 1..20: mol_type = other DNA
acaatctactaaggggtcat

SEQ ID NO: 16522 - DNA, 20 bp, synthetic construct
  source 1..20: mol_type = other DNA
cacaatctactaaggggtca

SEQ ID NO: 16523 - DNA, 20 bp, synthetic construct
  source 1..20: mol_type = other DNA
tcacaatctactaaggggtc

SEQ ID NO: 16524 - DNA, 20 bp, synthetic construct
  source 1..20: mol_type = other DNA
ttcacaatctactaaggggt

SEQ ID NO: 16525 - DNA, 20 bp, synthetic construct
  source 1..20: mol_type = other DNA
tttcacaatctactaagggg

SEQ ID NO: 16526 - DNA, 20 bp, synthetic construct
  source 1..20: mol_type = other DNA
gtttcacaatctactaaggg

SEQ ID NO: 16527 - DNA, 20 bp, synthetic construct
  source 1..20: mol_type = other DNA
tgtttcacaatctactaagg

SEQ ID NO: 16528 - DNA, 20 bp, synthetic construct
  source 1..20: mol_type = other DNA
gtgtttcacaatctactaag

SEQ ID NO: 16529 - DNA, 20 bp, synthetic construct
  source 1..20: mol_type = other DNA
tgtgtttcacaatctactaa

SEQ ID NO: 16530 - DNA, 20 bp, synthetic construct
  source 1..20: mol_type = other DNA
atgtgtttcacaatctacta

SEQ ID NO: 16531 - DNA, 20 bp, synthetic construct
  source 1..20: mol_type = other DNA
aatgtgtttcacaatctact

SEQ ID NO: 16532 - DNA, 20 bp, synthetic construct
  source 1..20: mol_type = other DNA
taatgtgtttcacaatctac

SEQ ID NO: 16533 - DNA, 20 bp, synthetic construct
  source 1..20: mol_type = other DNA
ctaatgtgtttcacaatcta

SEQ ID NO: 16534 - DNA, 20 bp, synthetic construct
  source 1..20: mol_type = other DNA
actaatgtgtttcacaatct

SEQ ID NO: 16535 - DNA, 20 bp, synthetic construct
  source 1..20: mol_type = other DNA
cactaatgtgtttcacaatc

SEQ ID NO: 16536 - DNA, 20 bp, synthetic construct
  source 1..20: mol_type = other DNA
ccactaatgtgtttcacaat

SEQ ID NO: 16537 - DNA, 20 bp, synthetic construct
  source 1..20: mol_type = other DNA
tccactaatgtgtttcacaa

SEQ ID NO: 16538 - DNA, 20 bp, synthetic construct
  source 1..20: mol_type = other DNA
atccactaatgtgtttcaca

SEQ ID NO: 16539 - DNA, 20 bp, synthetic construct
  source 1..20: mol_type = other DNA
aatccactaatgtgtttcac

SEQ ID NO: 16540 - DNA, 20 bp, synthetic construct
  source 1..20: mol_type = other DNA
taatccactaatgtgtttca

SEQ ID NO: 16541 - DNA, 20 bp, synthetic construct
  source 1..20: mol_type = other DNA
ataatccactaatgtgtttc

SEQ ID NO: 16542 - DNA, 20 bp, synthetic construct
  source 1..20: mol_type = other DNA
cataatccactaatgtgttt

SEQ ID NO: 16543 - DNA, 20 bp, synthetic construct
  source 1..20: mol_type = other DNA
tcataatccactaatgtgtt

SEQ ID NO: 16544 - DNA, 20 bp, synthetic construct
  source 1..20: mol_type = other DNA
gtcataatccactaatgtgt

SEQ ID NO: 16545 - DNA, 20 bp, synthetic construct
  source 1..20: mol_type = other DNA
tgtcataatccactaatgtg

SEQ ID NO: 16546 - DNA, 20 bp, synthetic construct
  source 1..20: mol_type = other DNA
ttgtcataatccactaatgt

SEQ ID NO: 16547 - DNA, 20 bp, synthetic construct
  source 1..20: mol_type = other DNA
cttgtcataatccactaatg

SEQ ID NO: 16548 - DNA, 20 bp, synthetic construct
  source 1..20: mol_type = other DNA
gcttgtcataatccactaat

SEQ ID NO: 16549 - DNA, 20 bp, synthetic construct
  source 1..20: mol_type = other DNA
tgcttgtcataatccactaa

SEQ ID NO: 16550 - DNA, 20 bp, synthetic construct
  source 1..20: mol_type = other DNA
atgcttgtcataatccacta

SEQ ID NO: 16551 - DNA, 20 bp, synthetic construct
  source 1..20: mol_type = other DNA
aatgcttgtcataatccact

SEQ ID NO: 16552 - DNA, 20 bp, synthetic construct
  source 1..20: mol_type = other DNA
aaatgcttgtcataatccac

SEQ ID NO: 16553 - DNA, 20 bp, synthetic construct
  source 1..20: mol_type = other DNA
aaaatgcttgtcataatcca

SEQ ID NO: 16554 - DNA, 20 bp, synthetic construct
  source 1..20: mol_type = other DNA
aaaaatgcttgtcataatcc

SEQ ID NO: 16555 - DNA, 20 bp, synthetic construct
  source 1..20: mol_type = other DNA
taaaaatgcttgtcataatc

SEQ ID NO: 16556 - DNA, 20 bp, synthetic construct
  source 1..20: mol_type = other DNA
ctaaaaatgcttgtcataat

SEQ ID NO: 16557 - DNA, 20 bp, synthetic construct
  source 1..20: mol_type = other DNA
tctaaaaatgcttgtcataa

SEQ ID NO: 16558 - DNA, 20 bp, synthetic construct
  source 1..20: mol_type = other DNA
ttctaaaaatgcttgtcata

SEQ ID NO: 16559 - DNA, 20 bp, synthetic construct
  source 1..20: mol_type = other DNA
tttctaaaaatgcttgtcat

SEQ ID NO: 16560 - DNA, 20 bp, synthetic construct
  source 1..20: mol_type = other DNA
ttttctaaaaatgcttgtca

SEQ ID NO: 16561 - DNA, 20 bp, synthetic construct
  source 1..20: mol_type = other DNA
tttttctaaaaatgcttgtc

SEQ ID NO: 16562 - DNA, 20 bp, synthetic construct
  source 1..20: mol_type = other DNA
atttttctaaaaatgcttgt

SEQ ID NO: 16563 - DNA, 20 bp, synthetic construct
  source 1..20: mol_type = other DNA
catttttctaaaaatgcttg

SEQ ID NO: 16564 - DNA, 20 bp, synthetic construct
  source 1..20: mol_type = other DNA
tcatttttctaaaaatgctt

SEQ ID NO: 16565 - DNA, 20 bp, synthetic construct
  source 1..20: mol_type = other DNA
ttcatttttctaaaaatgct

SEQ ID NO: 16566 - DNA, 20 bp, synthetic construct
  source 1..20: mol_type = other DNA
tttcatttttctaaaaatgc

SEQ ID NO: 16567 - DNA, 20 bp, synthetic construct
  source 1..20: mol_type = other DNA
ttttcatttttctaaaaatg

SEQ ID NO: 16568 - DNA, 20 bp, synthetic construct
  source 1..20: mol_type = other DNA
tttttcatttttctaaaaat

SEQ ID NO: 16569 - DNA, 20 bp, synthetic construct
  source 1..20: mol_type = other DNA
ctttttcatttttctaaaaa

SEQ ID NO: 16570 - DNA, 20 bp, synthetic construct
  source 1..20: mol_type = other DNA
tctttttcatttttctaaaa

SEQ ID NO: 16571 - DNA, 20 bp, synthetic construct
  source 1..20: mol_type = other DNA
ttctttttcatttttctaaa

SEQ ID NO: 16572 - DNA, 20 bp, synthetic construct
  source 1..20: mol_type = other DNA
attctttttcatttttctaa

SEQ ID NO: 16573 - DNA, 20 bp, synthetic construct
  source 1..20: mol_type = other DNA
tattctttttcatttttcta

SEQ ID NO: 16574 - DNA, 20 bp, synthetic construct
  source 1..20: mol_type = other DNA
ttattctttttcatttttct

SEQ ID NO: 16575 - DNA, 20 bp, synthetic construct
  source 1..20: mol_type = other DNA
cttattctttttcatttttc

SEQ ID NO: 16576 - DNA, 20 bp, synthetic construct
  source 1..20: mol_type = other DNA
tcttattctttttcattttt

SEQ ID NO: 16577 - DNA, 20 bp, synthetic construct
  source 1..20: mol_type = other DNA
ttcttattctttttcatttt

SEQ ID NO: 16578 - DNA, 20 bp, synthetic construct
  source 1..20: mol_type = other DNA
cttcttattctttttcattt

SEQ ID NO: 16579 - DNA, 20 bp, synthetic construct
  source 1..20: mol_type = other DNA
acttcttattctttttcatt

SEQ ID NO: 16580 - DNA, 20 bp, synthetic construct
  source 1..20: mol_type = other DNA
cacttcttattctttttcat

SEQ ID NO: 16581 - DNA, 20 bp, synthetic construct
  source 1..20: mol_type = other DNA
acacttcttattctttttca

SEQ ID NO: 16582 - DNA, 20 bp, synthetic construct
  source 1..20: mol_type = other DNA
aacacttcttattctttttc

SEQ ID NO: 16583 - DNA, 20 bp, synthetic construct
  source 1..20: mol_type = other DNA
taacacttcttattcttttt

SEQ ID NO: 16584 - DNA, 20 bp, synthetic construct
  source 1..20: mol_type = other DNA
ctaacacttcttattctttt

SEQ ID NO: 16585 - DNA, 20 bp, synthetic construct
  source 1..20: mol_type = other DNA
cctaacacttcttattcttt

SEQ ID NO: 16586 - DNA, 20 bp, synthetic construct
  source 1..20: mol_type = other DNA
tcctaacacttcttattctt

SEQ ID NO: 16587 - DNA, 20 bp, synthetic construct
  source 1..20: mol_type = other DNA
atcctaacacttcttattct

SEQ ID NO: 16588 - DNA, 20 bp, synthetic construct
  source 1..20: mol_type = other DNA
catcctaacacttcttattc

SEQ ID NO: 16589 - DNA, 20 bp, synthetic construct
  source 1..20: mol_type = other DNA
gcatcctaacacttcttatt

SEQ ID NO: 16590 - DNA, 20 bp, synthetic construct
  source 1..20: mol_type = other DNA
tgcatcctaacacttcttat

SEQ ID NO: 16591 - DNA, 20 bp, synthetic construct
  source 1..20: mol_type = other DNA
atgcatcctaacacttctta

SEQ ID NO: 16592 - DNA, 20 bp, synthetic construct
  source 1..20: mol_type = other DNA
aatgcatcctaacacttctt

SEQ ID NO: 16593 - DNA, 20 bp, synthetic construct
  source 1..20: mol_type = other DNA
caatgcatcctaacacttct

SEQ ID NO: 16594 - DNA, 20 bp, synthetic construct
  source 1..20: mol_type = other DNA
gcaatgcatcctaacacttc

SEQ ID NO: 16595 - DNA, 20 bp, synthetic construct
  source 1..20: mol_type = other DNA
tgcaatgcatcctaacactt

SEQ ID NO: 16596 - DNA, 20 bp, synthetic construct
  source 1..20: mol_type = other DNA
atgcaatgcatcctaacact

SEQ ID NO: 16597 - DNA, 20 bp, synthetic construct
  source 1..20: mol_type = other DNA
aatgcaatgcatcctaacac

SEQ ID NO: 16598 - DNA, 20 bp, synthetic construct
  source 1..20: mol_type = other DNA
taatgcaatgcatcctaaca

SEQ ID NO: 16599 - DNA, 20 bp, synthetic construct
  source 1..20: mol_type = other DNA
ataatgcaatgcatcctaac

SEQ ID NO: 16600 - DNA, 20 bp, synthetic construct
  source 1..20: mol_type = other DNA
aataatgcaatgcatcctaa

SEQ ID NO: 16601 - DNA, 20 bp, synthetic construct
  source 1..20: mol_type = other DNA
caataatgcaatgcatccta

SEQ ID NO: 16602 - DNA, 20 bp, synthetic construct
  source 1..20: mol_type = other DNA
tcaataatgcaatgcatcct

SEQ ID NO: 16603 - DNA, 20 bp, synthetic construct
  source 1..20: mol_type = other DNA
ttcaataatgcaatgcatcc

SEQ ID NO: 16604 - DNA, 20 bp, synthetic construct
  source 1..20: mol_type = other DNA
tttcaataatgcaatgcatc

SEQ ID NO: 16605 - DNA, 20 bp, synthetic construct
  source 1..20: mol_type = other DNA
atttcaataatgcaatgcat

SEQ ID NO: 16606 - DNA, 20 bp, synthetic construct
  source 1..20: mol_type = other DNA
tatttcaataatgcaatgca

SEQ ID NO: 16607 - DNA, 20 bp, synthetic construct
  source 1..20: mol_type = other DNA
ttatttcaataatgcaatgc

SEQ ID NO: 16608 - DNA, 20 bp, synthetic construct
  source 1..20: mol_type = other DNA
attatttcaataatgcaatg

SEQ ID NO: 16609 - DNA, 20 bp, synthetic construct
  source 1..20: mol_type = other DNA
aattatttcaataatgcaat

SEQ ID NO: 16610 - DNA, 20 bp, synthetic construct
  source 1..20: mol_type = other DNA
caattatttcaataatgcaa

SEQ ID NO: 16611 - DNA, 20 bp, synthetic construct
  source 1..20: mol_type = other DNA
acaattatttcaataatgca

SEQ ID NO: 16612 - DNA, 20 bp, synthetic construct
  source 1..20: mol_type = other DNA
aacaattatttcaataatgc

SEQ ID NO: 16613 - DNA, 20 bp, synthetic construct
  source 1..20: mol_type = other DNA
aaacaattatttcaataatg

SEQ ID NO: 16614 - DNA, 20 bp, synthetic construct
  source 1..20: mol_type = other DNA
aaaacaattatttcaataat

SEQ ID NO: 16615 - DNA, 20 bp, synthetic construct
  source 1..20: mol_type = other DNA
aaaaacaattatttcaataa

SEQ ID NO: 16616 - DNA, 20 bp, synthetic construct
  source 1..20: mol_type = other DNA
caaaaacaattatttcaata

SEQ ID NO: 16617 - DNA, 20 bp, synthetic construct
  source 1..20: mol_type = other DNA
tcaaaaacaattatttcaat

SEQ ID NO: 16618 - DNA, 20 bp, synthetic construct
  source 1..20: mol_type = other DNA
ctcaaaaacaattatttcaa

SEQ ID NO: 16619 - DNA, 20 bp, synthetic construct
  source 1..20: mol_type = other DNA
tctcaaaaacaattatttca

SEQ ID NO: 16620 - DNA, 20 bp, synthetic construct
  source 1..20: mol_type = other DNA
atctcaaaaacaattatttc

SEQ ID NO: 16621 - DNA, 20 bp, synthetic construct
  source 1..20: mol_type = other DNA
catctcaaaaacaattattt

SEQ ID NO: 16622 - DNA, 20 bp, synthetic construct
  source 1..20: mol_type = other DNA
ccatctcaaaaacaattatt

SEQ ID NO: 16623 - DNA, 20 bp, synthetic construct
  source 1..20: mol_type = other DNA
tccatctcaaaaacaattat

SEQ ID NO: 16624 - DNA, 20 bp, synthetic construct
  source 1..20: mol_type = other DNA
ctccatctcaaaaacaatta

SEQ ID NO: 16625 - DNA, 20 bp, synthetic construct
  source 1..20: mol_type = other DNA
actccatctcaaaaacaatt

SEQ ID NO: 16626 - DNA, 20 bp, synthetic construct
  source 1..20: mol_type = other DNA
aactccatctcaaaaacaat

SEQ ID NO: 16627 - DNA, 20 bp, synthetic construct
  source 1..20: mol_type = other DNA
aaactccatctcaaaaacaa

SEQ ID NO: 16628 - DNA, 20 bp, synthetic construct
  source 1..20: mol_type = other DNA
gaaactccatctcaaaaaca

SEQ ID NO: 16629 - DNA, 20 bp, synthetic construct
  source 1..20: mol_type = other DNA
cgaaactccatctcaaaaac

SEQ ID NO: 16630 - DNA, 20 bp, synthetic construct
  source 1..20: mol_type = other DNA
gcgaaactccatctcaaaaa

SEQ ID NO: 16631 - DNA, 20 bp, synthetic construct
  source 1..20: mol_type = other DNA
agcgaaactccatctcaaaa

SEQ ID NO: 16632 - DNA, 20 bp, synthetic construct
  source 1..20: mol_type = other DNA
gagcgaaactccatctcaaa

SEQ ID NO: 16633 - DNA, 20 bp, synthetic construct
  source 1..20: mol_type = other DNA
agagcgaaactccatctcaa

SEQ ID NO: 16634 - DNA, 20 bp, synthetic construct
  source 1..20: mol_type = other DNA
aagagcgaaactccatctca

SEQ ID NO: 16635 - DNA, 20 bp, synthetic construct
  source 1..20: mol_type = other DNA
taagagcgaaactccatctc

SEQ ID NO: 16636 - DNA, 20 bp, synthetic construct
  source 1..20: mol_type = other DNA
ctaagagcgaaactccatct

SEQ ID NO: 16637 - DNA, 20 bp, synthetic construct
  source 1..20: mol_type = other DNA
actaagagcgaaactccatc

SEQ ID NO: 16638 - DNA, 20 bp, synthetic construct
  source 1..20: mol_type = other DNA
aactaagagcgaaactccat

SEQ ID NO: 16639 - DNA, 20 bp, synthetic construct
  source 1..20: mol_type = other DNA
caactaagagcgaaactcca

SEQ ID NO: 16640 - DNA, 20 bp, synthetic construct
  source 1..20: mol_type = other DNA
gcaactaagagcgaaactcc

SEQ ID NO: 16641 - DNA, 20 bp, synthetic construct
  source 1..20: mol_type = other DNA
ggcaactaagagcgaaactc

SEQ ID NO: 16642 - DNA, 20 bp, synthetic construct
  source 1..20: mol_type = other DNA
cggcaactaagagcgaaact

SEQ ID NO: 16643 - DNA, 20 bp, synthetic construct
  source 1..20: mol_type = other DNA
tcggcaactaagagcgaaac

SEQ ID NO: 16644 - DNA, 20 bp, synthetic construct
  source 1..20: mol_type = other DNA
ctcggcaactaagagcgaaa

SEQ ID NO: 16645 - DNA, 20 bp, synthetic construct
  source 1..20: mol_type = other DNA
cctcggcaactaagagcgaa

SEQ ID NO: 16646 - DNA, 20 bp, synthetic construct
  source 1..20: mol_type = other DNA
gcctcggcaactaagagcga

SEQ ID NO: 16647 - DNA, 20 bp, synthetic construct
  source 1..20: mol_type = other DNA
agcctcggcaactaagagcg

SEQ ID NO: 16648 - DNA, 20 bp, synthetic construct
  source 1..20: mol_type = other DNA
cagcctcggcaactaagagc

SEQ ID NO: 16649 - DNA, 20 bp, synthetic construct
  source 1..20: mol_type = other DNA
ccagcctcggcaactaagag

SEQ ID NO: 16650 - DNA, 20 bp, synthetic construct
  source 1..20: mol_type = other DNA
tccagcctcggcaactaaga

SEQ ID NO: 16651 - DNA, 20 bp, synthetic construct
  source 1..20: mol_type = other DNA
ctccagcctcggcaactaag

SEQ ID NO: 16652 - DNA, 20 bp, synthetic construct
  source 1..20: mol_type = other DNA
actccagcctcggcaactaa

SEQ ID NO: 16653 - DNA, 20 bp, synthetic construct
  source 1..20: mol_type = other DNA
cactccagcctcggcaacta

SEQ ID NO: 16654 - DNA, 20 bp, synthetic construct
  source 1..20: mol_type = other DNA
gcactccagcctcggcaact

SEQ ID NO: 16655 - DNA, 20 bp, synthetic construct
  source 1..20: mol_type = other DNA
tgcactccagcctcggcaac

SEQ ID NO: 16656 - DNA, 20 bp, synthetic construct
  source 1..20: mol_type = other DNA
ttgcactccagcctcggcaa

SEQ ID NO: 16657 - DNA, 20 bp, synthetic construct
  source 1..20: mol_type = other DNA
attgcactccagcctcggca

SEQ ID NO: 16658 - DNA, 20 bp, synthetic construct
  source 1..20: mol_type = other DNA
cattgcactccagcctcggc

SEQ ID NO: 16659 - DNA, 20 bp, synthetic construct
  source 1..20: mol_type = other DNA
ccattgcactccagcctcgg

SEQ ID NO: 16660 - DNA, 20 bp, synthetic construct
  source 1..20: mol_type = other DNA
gccattgcactccagcctcg

SEQ ID NO: 16661 - DNA, 20 bp, synthetic construct
  source 1..20: mol_type = other DNA
ggccattgcactccagcctc

SEQ ID NO: 16662 - DNA, 20 bp, synthetic construct
  source 1..20: mol_type = other DNA
gggccattgcactccagcct

SEQ ID NO: 16663 - DNA, 20 bp, synthetic construct
  source 1..20: mol_type = other DNA
cgggccattgcactccagcc

SEQ ID NO: 16664 - DNA, 20 bp, synthetic construct
  source 1..20: mol_type = other DNA
tcgggccattgcactccagc

SEQ ID NO: 16665 - DNA, 20 bp, synthetic construct
  source 1..20: mol_type = other DNA
atcgggccattgcactccag

SEQ ID NO: 16666 - DNA, 20 bp, synthetic construct
  source 1..20: mol_type = other DNA
gatcgggccattgcactcca

SEQ ID NO: 16667 - DNA, 20 bp, synthetic construct
  source 1..20: mol_type = other DNA
agatcgggccattgcactcc

SEQ ID NO: 16668 - DNA, 20 bp, synthetic construct
  source 1..20: mol_type = other DNA
cagatcgggccattgcactc

SEQ ID NO: 16669 - DNA, 20 bp, synthetic construct
  source 1..20: mol_type = other DNA
gcagatcgggccattgcact

SEQ ID NO: 16670 - DNA, 20 bp, synthetic construct
  source 1..20: mol_type = other DNA
ggcagatcgggccattgcac

SEQ ID NO: 16671 - DNA, 20 bp, synthetic construct
  source 1..20: mol_type = other DNA
aggcagatcgggccattgca

SEQ ID NO: 16672 - DNA, 20 bp, synthetic construct
  source 1..20: mol_type = other DNA
gaggcagatcgggccattgc

SEQ ID NO: 16673 - DNA, 20 bp, synthetic construct
  source 1..20: mol_type = other DNA
ggaggcagatcgggccattg

SEQ ID NO: 16674 - DNA, 20 bp, synthetic construct
  source 1..20: mol_type = other DNA
gggaggcagatcgggccatt

SEQ ID NO: 16675 - DNA, 20 bp, synthetic construct
  source 1..20: mol_type = other DNA
cgggaggcagatcgggccat

SEQ ID NO: 16676 - DNA, 20 bp, synthetic construct
  source 1..20: mol_type = other DNA
ccgggaggcagatcgggcca

SEQ ID NO: 16677 - DNA, 20 bp, synthetic construct
  source 1..20: mol_type = other DNA
cccgggaggcagatcgggcc

SEQ ID NO: 16678 - DNA, 20 bp, synthetic construct
  source 1..20: mol_type = other DNA
acccgggaggcagatcgggc

SEQ ID NO: 16679 - DNA, 20 bp, synthetic construct
  source 1..20: mol_type = other DNA
aacccgggaggcagatcggg

SEQ ID NO: 16680 - DNA, 20 bp, synthetic construct
  source 1..20: mol_type = other DNA
gaacccgggaggcagatcgg

SEQ ID NO: 16681 - DNA, 20 bp, synthetic construct
  source 1..20: mol_type = other DNA
tgaacccgggaggcagatcg

SEQ ID NO: 16682 - DNA, 20 bp, synthetic construct
  source 1..20: mol_type = other DNA
ttgaacccgggaggcagatc

SEQ ID NO: 16683 - DNA, 20 bp, synthetic construct
  source 1..20: mol_type = other DNA
cttgaacccgggaggcagat

SEQ ID NO: 16684 - DNA, 20 bp, synthetic construct
  source 1..20: mol_type = other DNA
acttgaacccgggaggcaga

SEQ ID NO: 16685 - DNA, 20 bp, synthetic construct
  source 1..20: mol_type = other DNA
cacttgaacccgggaggcag

SEQ ID NO: 16686 - DNA, 20 bp, synthetic construct
  source 1..20: mol_type = other DNA
tcacttgaacccgggaggca

SEQ ID NO: 16687 - DNA, 20 bp, synthetic construct
  source 1..20: mol_type = other DNA
atcacttgaacccgggaggc

SEQ ID NO: 16688 - DNA, 20 bp, synthetic construct
  source 1..20: mol_type = other DNA
aatcacttgaacccgggagg

SEQ ID NO: 16689 - DNA, 20 bp, synthetic construct
  source 1..20: mol_type = other DNA
gaatcacttgaacccgggag

SEQ ID NO: 16690 - DNA, 20 bp, synthetic construct
  source 1..20: mol_type = other DNA
agaatcacttgaacccggga

SEQ ID NO: 16691 - DNA, 20 bp, synthetic construct
  source 1..20: mol_type = other DNA
gagaatcacttgaacccggg

SEQ ID NO: 16692 - DNA, 20 bp, synthetic construct
  source 1..20: mol_type = other DNA
ggagaatcacttgaacccgg

SEQ ID NO: 16693 - DNA, 20 bp, synthetic construct
  source 1..20: mol_type = other DNA
aggagaatcacttgaacccg

SEQ ID NO: 16694 - DNA, 20 bp, synthetic construct
  source 1..20: mol_type = other DNA
taggagaatcacttgaaccc

SEQ ID NO: 16695 - DNA, 20 bp, synthetic construct
  source 1..20: mol_type = other DNA
gtaggagaatcacttgaacc

SEQ ID NO: 16696 - DNA, 20 bp, synthetic construct
  source 1..20: mol_type = other DNA
ggtaggagaatcacttgaac

SEQ ID NO: 16697 - DNA, 20 bp, synthetic construct
  source 1..20: mol_type = other DNA
aggtaggagaatcacttgaa

SEQ ID NO: 16698 - DNA, 20 bp, synthetic construct
  source 1..20: mol_type = other DNA
gaggtaggagaatcacttga

SEQ ID NO: 16699 - DNA, 20 bp, synthetic construct
  source 1..20: mol_type = other DNA
tgaggtaggagaatcacttg

SEQ ID NO: 16700 - DNA, 20 bp, synthetic construct
  source 1..20: mol_type = other DNA
ctgaggtaggagaatcactt

SEQ ID NO: 16701 - DNA, 20 bp, synthetic construct
  source 1..20: mol_type = other DNA
gctgaggtaggagaatcact

SEQ ID NO: 16702 - DNA, 20 bp, synthetic construct
  source 1..20: mol_type = other DNA
ggctgaggtaggagaatcac

SEQ ID NO: 16703 - DNA, 20 bp, synthetic construct
  source 1..20: mol_type = other DNA
aggctgaggtaggagaatca

SEQ ID NO: 16704 - DNA, 20 bp, synthetic construct
  source 1..20: mol_type = other DNA
gaggctgaggtaggagaatc

SEQ ID NO: 16705 - DNA, 20 bp, synthetic construct
  source 1..20: mol_type = other DNA
ggaggctgaggtaggagaat

SEQ ID NO: 16706 - DNA, 20 bp, synthetic construct
  source 1..20: mol_type = other DNA
aggaggctgaggtaggagaa

SEQ ID NO: 16707 - DNA, 20 bp, synthetic construct
  source 1..20: mol_type = other DNA
caggaggctgaggtaggaga

SEQ ID NO: 16708 - DNA, 20 bp, synthetic construct
  source 1..20: mol_type = other DNA
tcaggaggctgaggtaggag

SEQ ID NO: 16709 - DNA, 20 bp, synthetic construct
  source 1..20: mol_type = other DNA
ctcaggaggctgaggtagga

SEQ ID NO: 16710 - DNA, 20 bp, synthetic construct
  source 1..20: mol_type = other DNA
actcaggaggctgaggtagg

SEQ ID NO: 16711 - DNA, 20 bp, synthetic construct
  source 1..20: mol_type = other DNA
tactcaggaggctgaggtag

SEQ ID NO: 16712 - DNA, 20 bp, synthetic construct
  source 1..20: mol_type = other DNA
ctactcaggaggctgaggta

SEQ ID NO: 16713 - DNA, 20 bp, synthetic construct
  source 1..20: mol_type = other DNA
gctactcaggaggctgaggt

SEQ ID NO: 16714 - DNA, 20 bp, synthetic construct
  source 1..20: mol_type = other DNA
agctactcaggaggctgagg

SEQ ID NO: 16715 - DNA, 20 bp, synthetic construct
  source 1..20: mol_type = other DNA
cagctactcaggaggctgag

SEQ ID NO: 16716 - DNA, 20 bp, synthetic construct
  source 1..20: mol_type = other DNA
ccagctactcaggaggctga

SEQ ID NO: 16717 - DNA, 20 bp, synthetic construct
  source 1..20: mol_type = other DNA
cccagctactcaggaggctg

SEQ ID NO: 16718 - DNA, 20 bp, synthetic construct
  source 1..20: mol_type = other DNA
tcccagctactcaggaggct

SEQ ID NO: 16719 - DNA, 20 bp, synthetic construct
  source 1..20: mol_type = other DNA
atcccagctactcaggaggc

SEQ ID NO: 16720 - DNA, 20 bp, synthetic construct
  source 1..20: mol_type = other DNA
aatcccagctactcaggagg

SEQ ID NO: 16721 - DNA, 20 bp, synthetic construct
  source 1..20: mol_type = other DNA
taatcccagctactcaggag

SEQ ID NO: 16722 - DNA, 20 bp, synthetic construct
  source 1..20: mol_type = other DNA
gtaatcccagctactcagga

SEQ ID NO: 16723 - DNA, 20 bp, synthetic construct
  source 1..20: mol_type = other DNA
tgtaatcccagctactcagg

SEQ ID NO: 16724 - DNA, 20 bp, synthetic construct
  source 1..20: mol_type = other DNA
ctgtaatcccagctactcag

SEQ ID NO: 16725 - DNA, 20 bp, synthetic construct
  source 1..20: mol_type = other DNA
tctgtaatcccagctactca

SEQ ID NO: 16726 - DNA, 20 bp, synthetic construct
  source 1..20: mol_type = other DNA
gtctgtaatcccagctactc

SEQ ID NO: 16727 - DNA, 20 bp, synthetic construct
  source 1..20: mol_type = other DNA
tgtctgtaatcccagctact

SEQ ID NO: 16728 - DNA, 20 bp, synthetic construct
  source 1..20: mol_type = other DNA
atgtctgtaatcccagctac

SEQ ID NO: 16729 - DNA, 20 bp, synthetic construct
  source 1..20: mol_type = other DNA
catgtctgtaatcccagcta

SEQ ID NO: 16730 - DNA, 20 bp, synthetic construct
  source 1..20: mol_type = other DNA
gcatgtctgtaatcccagct

SEQ ID NO: 16731 - DNA, 20 bp, synthetic construct
  source 1..20: mol_type = other DNA
agcatgtctgtaatcccagc

SEQ ID NO: 16732 - DNA, 20 bp, synthetic construct
  source 1..20: mol_type = other DNA
gagcatgtctgtaatcccag

SEQ ID NO: 16733 - DNA, 20 bp, synthetic construct
  source 1..20: mol_type = other DNA
ggagcatgtctgtaatccca

SEQ ID NO: 16734 - DNA, 20 bp, synthetic construct
  source 1..20: mol_type = other DNA
tggagcatgtctgtaatccc

SEQ ID NO: 16735 - DNA, 20 bp, synthetic construct
  source 1..20: mol_type = other DNA
gtggagcatgtctgtaatcc

SEQ ID NO: 16736 - DNA, 20 bp, synthetic construct
  source 1..20: mol_type = other DNA
ggtggagcatgtctgtaatc

SEQ ID NO: 16737 - DNA, 20 bp, synthetic construct
  source 1..20: mol_type = other DNA
tggtggagcatgtctgtaat

SEQ ID NO: 16738 - DNA, 20 bp, synthetic construct
  source 1..20: mol_type = other DNA
atggtggagcatgtctgtaa

SEQ ID NO: 16739 - DNA, 20 bp, synthetic construct
  source 1..20: mol_type = other DNA
catggtggagcatgtctgta

SEQ ID NO: 16740 - DNA, 20 bp, synthetic construct
  source 1..20: mol_type = other DNA
gcatggtggagcatgtctgt

SEQ ID NO: 16741 - DNA, 20 bp, synthetic construct
  source 1..20: mol_type = other DNA
ggcatggtggagcatgtctg

SEQ ID NO: 16742 - DNA, 20 bp, synthetic construct
  source 1..20: mol_type = other DNA
aggcatggtggagcatgtct

SEQ ID NO: 16743 - DNA, 20 bp, synthetic construct
  source 1..20: mol_type = other DNA
caggcatggtggagcatgtc

SEQ ID NO: 16744 - DNA, 20 bp, synthetic construct
  source 1..20: mol_type = other DNA
ccaggcatggtggagcatgt

SEQ ID NO: 16745 - DNA, 20 bp, synthetic construct
  source 1..20: mol_type = other DNA
gccaggcatggtggagcatg

SEQ ID NO: 16746 - DNA, 20 bp, synthetic construct
  source 1..20: mol_type = other DNA
agccaggcatggtggagcat

SEQ ID NO: 16747 - DNA, 20 bp, synthetic construct
  source 1..20: mol_type = other DNA
tagccaggcatggtggagca

SEQ ID NO: 16748 - DNA, 20 bp, synthetic construct
  source 1..20: mol_type = other DNA
ttagccaggcatggtggagc

SEQ ID NO: 16749 - DNA, 20 bp, synthetic construct
  source 1..20: mol_type = other DNA
attagccaggcatggtggag

SEQ ID NO: 16750 - DNA, 20 bp, synthetic construct
  source 1..20: mol_type = other DNA
aattagccaggcatggtgga

SEQ ID NO: 16751 - DNA, 20 bp, synthetic construct
  source 1..20: mol_type = other DNA
aaattagccaggcatggtgg

SEQ ID NO: 16752 - DNA, 20 bp, synthetic construct
  source 1..20: mol_type = other DNA
aaaattagccaggcatggtg

SEQ ID NO: 16753 - DNA, 20 bp, synthetic construct
  source 1..20: mol_type = other DNA
caaaattagccaggcatggt

SEQ ID NO: 16754 - DNA, 20 bp, synthetic construct
  source 1..20: mol_type = other DNA
acaaaattagccaggcatgg

SEQ ID NO: 16755 - DNA, 20 bp, synthetic construct
  source 1..20: mol_type = other DNA
tacaaaattagccaggcatg

SEQ ID NO: 16756 - DNA, 20 bp, synthetic construct
  source 1..20: mol_type = other DNA
atacaaaattagccaggcat

SEQ ID NO: 16757 - DNA, 20 bp, synthetic construct
  source 1..20: mol_type = other DNA
aatacaaaattagccaggca

SEQ ID NO: 16758 - DNA, 20 bp, synthetic construct
  source 1..20: mol_type = other DNA
aaatacaaaattagccaggc

SEQ ID NO: 16759 - DNA, 20 bp, synthetic construct
  source 1..20: mol_type = other DNA
taaatacaaaattagccagg

SEQ ID NO: 16760 - DNA, 20 bp, synthetic construct
  source 1..20: mol_type = other DNA
ctaaatacaaaattagccag

SEQ ID NO: 16761 - DNA, 20 bp, synthetic construct
  source 1..20: mol_type = other DNA
actaaatacaaaattagcca

SEQ ID NO: 16762 - DNA, 20 bp, synthetic construct
  source 1..20: mol_type = other DNA
aactaaatacaaaattagcc

SEQ ID NO: 16763 - DNA, 20 bp, synthetic construct
  source 1..20: mol_type = other DNA
aaactaaatacaaaattagc

SEQ ID NO: 16764 - DNA, 20 bp, synthetic construct
  source 1..20: mol_type = other DNA
aaaactaaatacaaaattag

SEQ ID NO: 16765 - DNA, 20 bp, synthetic construct
  source 1..20: mol_type = other DNA
taaaactaaatacaaaatta

SEQ ID NO: 16766 - DNA, 20 bp, synthetic construct
  source 1..20: mol_type = other DNA
ctaaaactaaatacaaaatt

SEQ ID NO: 16767 - DNA, 20 bp, synthetic construct
  source 1..20: mol_type = other DNA
actaaaactaaatacaaaat

SEQ ID NO: 16768 - DNA, 20 bp, synthetic construct
  source 1..20: mol_type = other DNA
tactaaaactaaatacaaaa

SEQ ID NO: 16769 - DNA, 20 bp, synthetic construct
  source 1..20: mol_type = other DNA
ctactaaaactaaatacaaa

SEQ ID NO: 16770 - DNA, 20 bp, synthetic construct
  source 1..20: mol_type = other DNA
tctactaaaactaaatacaa

SEQ ID NO: 16771 - DNA, 20 bp, synthetic construct
  source 1..20: mol_type = other DNA
ctctactaaaactaaataca

SEQ ID NO: 16772 - DNA, 20 bp, synthetic construct
  source 1..20: mol_type = other DNA
tctctactaaaactaaatac

SEQ ID NO: 16773 - DNA, 20 bp, synthetic construct
  source 1..20: mol_type = other DNA
atctctactaaaactaaata

SEQ ID NO: 16774 - DNA, 20 bp, synthetic construct
  source 1..20: mol_type = other DNA
catctctactaaaactaaat

SEQ ID NO: 16775 - DNA, 20 bp, synthetic construct
  source 1..20: mol_type = other DNA
ccatctctactaaaactaaa

SEQ ID NO: 16776 - DNA, 20 bp, synthetic construct
  source 1..20: mol_type = other DNA
cccatctctactaaaactaa

SEQ ID NO: 16777 - DNA, 20 bp, synthetic construct
  source 1..20: mol_type = other DNA
ccccatctctactaaaacta

SEQ ID NO: 16778 - DNA, 20 bp, synthetic construct
  source 1..20: mol_type = other DNA
accccatctctactaaaact

SEQ ID NO: 16779 - DNA, 20 bp, synthetic construct
  source 1..20: mol_type = other DNA
aaccccatctctactaaaac

SEQ ID NO: 16780 - DNA, 20 bp, synthetic construct
  source 1..20: mol_type = other DNA
aaaccccatctctactaaaa

SEQ ID NO: 16781 - DNA, 20 bp, synthetic construct
  source 1..20: mol_type = other DNA
gaaaccccatctctactaaa

SEQ ID NO: 16782 - DNA, 20 bp, synthetic construct
  source 1..20: mol_type = other DNA
agaaaccccatctctactaa

SEQ ID NO: 16783 - DNA, 20 bp, synthetic construct
  source 1..20: mol_type = other DNA
gagaaaccccatctctacta

SEQ ID NO: 16784 - DNA, 20 bp, synthetic construct
  source 1..20: mol_type = other DNA
ggagaaaccccatctctact

SEQ ID NO: 16785 - DNA, 20 bp, synthetic construct
  source 1..20: mol_type = other DNA
tggagaaaccccatctctac

SEQ ID NO: 16786 - DNA, 20 bp, synthetic construct
  source 1..20: mol_type = other DNA
atggagaaaccccatctcta

SEQ ID NO: 16787 - DNA, 20 bp, synthetic construct
  source 1..20: mol_type = other DNA
catggagaaaccccatctct

SEQ ID NO: 16788 - DNA, 20 bp, synthetic construct
  source 1..20: mol_type = other DNA
acatggagaaaccccatctc

SEQ ID NO: 16789 - DNA, 20 bp, synthetic construct
  source 1..20: mol_type = other DNA
aacatggagaaaccccatct

SEQ ID NO: 16790 - DNA, 20 bp, synthetic construct
  source 1..20: mol_type = other DNA
caacatggagaaaccccatc

SEQ ID NO: 16791 - DNA, 20 bp, synthetic construct
  source 1..20: mol_type = other DNA
ccaacatggagaaaccccat

SEQ ID NO: 16792 - DNA, 20 bp, synthetic construct
  source 1..20: mol_type = other DNA
accaacatggagaaacccca

SEQ ID NO: 16793 - DNA, 20 bp, synthetic construct
  source 1..20: mol_type = other DNA
gaccaacatggagaaacccc

SEQ ID NO: 16794 - DNA, 20 bp, synthetic construct
  source 1..20: mol_type = other DNA
tgaccaacatggagaaaccc

SEQ ID NO: 16795 - DNA, 20 bp, synthetic construct
  source 1..20: mol_type = other DNA
ctgaccaacatggagaaacc

SEQ ID NO: 16796 - DNA, 20 bp, synthetic construct
  source 1..20: mol_type = other DNA
cctgaccaacatggagaaac

SEQ ID NO: 16797 - DNA, 20 bp, synthetic construct
  source 1..20: mol_type = other DNA
gcctgaccaacatggagaaa

SEQ ID NO: 16798 - DNA, 20 bp, synthetic construct
  source 1..20: mol_type = other DNA
agcctgaccaacatggagaa

SEQ ID NO: 16799 - DNA, 20 bp, synthetic construct
  source 1..20: mol_type = other DNA
cagcctgaccaacatggaga

SEQ ID NO: 16800 - DNA, 20 bp, synthetic construct
  source 1..20: mol_type = other DNA
ccagcctgaccaacatggag

SEQ ID NO: 16801 - DNA, 20 bp, synthetic construct
  source 1..20: mol_type = other DNA
accagcctgaccaacatgga

SEQ ID NO: 16802 - DNA, 20 bp, synthetic construct
  source 1..20: mol_type = other DNA
gaccagcctgaccaacatgg

SEQ ID NO: 16803 - DNA, 20 bp, synthetic construct
  source 1..20: mol_type = other DNA
agaccagcctgaccaacatg

SEQ ID NO: 16804 - DNA, 20 bp, synthetic construct
  source 1..20: mol_type = other DNA
aagaccagcctgaccaacat

SEQ ID NO: 16805 - DNA, 20 bp, synthetic construct
  source 1..20: mol_type = other DNA
caagaccagcctgaccaaca

SEQ ID NO: 16806 - DNA, 20 bp, synthetic construct
  source 1..20: mol_type = other DNA
tcaagaccagcctgaccaac

SEQ ID NO: 16807 - DNA, 20 bp, synthetic construct
  source 1..20: mol_type = other DNA
ttcaagaccagcctgaccaa

SEQ ID NO: 16808 - DNA, 20 bp, synthetic construct
  source 1..20: mol_type = other DNA
gttcaagaccagcctgacca

SEQ ID NO: 16809 - DNA, 20 bp, synthetic construct
  source 1..20: mol_type = other DNA
agttcaagaccagcctgacc

SEQ ID NO: 16810 - DNA, 20 bp, synthetic construct
  source 1..20: mol_type = other DNA
gagttcaagaccagcctgac

SEQ ID NO: 16811 - DNA, 20 bp, synthetic construct
  source 1..20: mol_type = other DNA
ggagttcaagaccagcctga

SEQ ID NO: 16812 - DNA, 20 bp, synthetic construct
  source 1..20: mol_type = other DNA
aggagttcaagaccagcctg

SEQ ID NO: 16813 - DNA, 20 bp, synthetic construct
  source 1..20: mol_type = other DNA
caggagttcaagaccagcct

SEQ ID NO: 16814 - DNA, 20 bp, synthetic construct
  source 1..20: mol_type = other DNA
tcaggagttcaagaccagcc

SEQ ID NO: 16815 - DNA, 20 bp, synthetic construct
  source 1..20: mol_type = other DNA
gtcaggagttcaagaccagc

SEQ ID NO: 16816 - DNA, 20 bp, synthetic construct
  source 1..20: mol_type = other DNA
ggtcaggagttcaagaccag

SEQ ID NO: 16817 - DNA, 20 bp, synthetic construct
  source 1..20: mol_type = other DNA
aggtcaggagttcaagacca

SEQ ID NO: 16818 - DNA, 20 bp, synthetic construct
  source 1..20: mol_type = other DNA
gaggtcaggagttcaagacc

SEQ ID NO: 16819 - DNA, 20 bp, synthetic construct
  source 1..20: mol_type = other DNA
tgaggtcaggagttcaagac

SEQ ID NO: 16820 - DNA, 20 bp, synthetic construct
  source 1..20: mol_type = other DNA
ctgaggtcaggagttcaaga

SEQ ID NO: 16821 - DNA, 20 bp, synthetic construct
  source 1..20: mol_type = other DNA
cctgaggtcaggagttcaag

SEQ ID NO: 16822 - DNA, 20 bp, synthetic construct
  source 1..20: mol_type = other DNA
acctgaggtcaggagttcaa

SEQ ID NO: 16823 - DNA, 20 bp, synthetic construct
  source 1..20: mol_type = other DNA
cacctgaggtcaggagttca

SEQ ID NO: 16824 - DNA, 20 bp, synthetic construct
  source 1..20: mol_type = other DNA
tcacctgaggtcaggagttc

SEQ ID NO: 16825 - DNA, 20 bp, synthetic construct
  source 1..20: mol_type = other DNA
atcacctgaggtcaggagtt

SEQ ID NO: 16826 - DNA, 20 bp, synthetic construct
  source 1..20: mol_type = other DNA
gatcacctgaggtcaggagt

SEQ ID NO: 16827 - DNA, 20 bp, synthetic construct
  source 1..20: mol_type = other DNA
ggatcacctgaggtcaggag

SEQ ID NO: 16828 - DNA, 20 bp, synthetic construct
  source 1..20: mol_type = other DNA
tggatcacctgaggtcagga

SEQ ID NO: 16829 - DNA, 20 bp, synthetic construct
  source 1..20: mol_type = other DNA
gtggatcacctgaggtcagg

SEQ ID NO: 16830 - DNA, 20 bp, synthetic construct
  source 1..20: mol_type = other DNA
agtggatcacctgaggtcag

SEQ ID NO: 16831 - DNA, 20 bp, synthetic construct
  source 1..20: mol_type = other DNA
aagtggatcacctgaggtca

SEQ ID NO: 16832 - DNA, 20 bp, synthetic construct
  source 1..20: mol_type = other DNA
caagtggatcacctgaggtc

SEQ ID NO: 16833 - DNA, 20 bp, synthetic construct
  source 1..20: mol_type = other DNA
gcaagtggatcacctgaggt

SEQ ID NO: 16834 - DNA, 20 bp, synthetic construct
  source 1..20: mol_type = other DNA
ggcaagtggatcacctgagg

SEQ ID NO: 16835 - DNA, 20 bp, synthetic construct
  source 1..20: mol_type = other DNA
aggcaagtggatcacctgag

SEQ ID NO: 16836 - DNA, 20 bp, synthetic construct
  source 1..20: mol_type = other DNA
gaggcaagtggatcacctga

SEQ ID NO: 16837 - DNA, 20 bp, synthetic construct
  source 1..20: mol_type = other DNA
cgaggcaagtggatcacctg

SEQ ID NO: 16838 - DNA, 20 bp, synthetic construct
  source 1..20: mol_type = other DNA
ccgaggcaagtggatcacct

SEQ ID NO: 16839 - DNA, 20 bp, synthetic construct
  source 1..20: mol_type = other DNA
gccgaggcaagtggatcacc

SEQ ID NO: 16840 - DNA, 20 bp, synthetic construct
  source 1..20: mol_type = other DNA
ggccgaggcaagtggatcac

SEQ ID NO: 16841 - DNA, 20 bp, synthetic construct
  source 1..20: mol_type = other DNA
aggccgaggcaagtggatca

SEQ ID NO: 16842 - DNA, 20 bp, synthetic construct
  source 1..20: mol_type = other DNA
gaggccgaggcaagtggatc

SEQ ID NO: 16843 - DNA, 20 bp, synthetic construct
  source 1..20: mol_type = other DNA
ggaggccgaggcaagtggat

SEQ ID NO: 16844 - DNA, 20 bp, synthetic construct
  source 1..20: mol_type = other DNA
gggaggccgaggcaagtgga

SEQ ID NO: 16845 - DNA, 20 bp, synthetic construct
  source 1..20: mol_type = other DNA
tgggaggccgaggcaagtgg

SEQ ID NO: 16846 - DNA, 20 bp, synthetic construct
  source 1..20: mol_type = other DNA
ttgggaggccgaggcaagtg

SEQ ID NO: 16847 - DNA, 20 bp, synthetic construct
  source 1..20: mol_type = other DNA
tttgggaggccgaggcaagt

SEQ ID NO: 16848 - DNA, 20 bp, synthetic construct
  source 1..20: mol_type = other DNA
ctttgggaggccgaggcaag

SEQ ID NO: 16849 - DNA, 20 bp, synthetic construct
  source 1..20: mol_type = other DNA
actttgggaggccgaggcaa

SEQ ID NO: 16850 - DNA, 20 bp, synthetic construct
  source 1..20: mol_type = other DNA
cactttgggaggccgaggca

SEQ ID NO: 16851 - DNA, 20 bp, synthetic construct
  source 1..20: mol_type = other DNA
gcactttgggaggccgaggc

SEQ ID NO: 16852 - DNA, 20 bp, synthetic construct
  source 1..20: mol_type = other DNA
agcactttgggaggccgagg

SEQ ID NO: 16853 - DNA, 20 bp, synthetic construct
  source 1..20: mol_type = other DNA
cagcactttgggaggccgag

SEQ ID NO: 16854 - DNA, 20 bp, synthetic construct
  source 1..20: mol_type = other DNA
ccagcactttgggaggccga

SEQ ID NO: 16855 - DNA, 20 bp, synthetic construct
  source 1..20: mol_type = other DNA
cccagcactttgggaggccg

SEQ ID NO: 16856 - DNA, 20 bp, synthetic construct
  source 1..20: mol_type = other DNA
ccccagcactttgggaggcc

SEQ ID NO: 16857 - DNA, 20 bp, synthetic construct
  source 1..20: mol_type = other DNA
tccccagcactttgggaggc

SEQ ID NO: 16858 - DNA, 20 bp, synthetic construct
  source 1..20: mol_type = other DNA
atccccagcactttgggagg

SEQ ID NO: 16859 - DNA, 20 bp, synthetic construct
  source 1..20: mol_type = other DNA
tatccccagcactttgggag

SEQ ID NO: 16860 - DNA, 20 bp, synthetic construct
  source 1..20: mol_type = other DNA
gtatccccagcactttggga

SEQ ID NO: 16861 - DNA, 20 bp, synthetic construct
  source 1..20: mol_type = other DNA
tgtatccccagcactttggg

SEQ ID NO: 16862 - DNA, 20 bp, synthetic construct
  source 1..20: mol_type = other DNA
ctgtatccccagcactttgg

SEQ ID NO: 16863 - DNA, 20 bp, synthetic construct
  source 1..20: mol_type = other DNA
cctgtatccccagcactttg

SEQ ID NO: 16864 - DNA, 20 bp, synthetic construct
  source 1..20: mol_type = other DNA
gcctgtatccccagcacttt

SEQ ID NO: 16865 - DNA, 20 bp, synthetic construct
  source 1..20: mol_type = other DNA
tgcctgtatccccagcactt

SEQ ID NO: 16866 - DNA, 20 bp, synthetic construct
  source 1..20: mol_type = other DNA
atgcctgtatccccagcact

SEQ ID NO: 16867 - DNA, 20 bp, synthetic construct
  source 1..20: mol_type = other DNA
catgcctgtatccccagcac

SEQ ID NO: 16868 - DNA, 20 bp, synthetic construct
  source 1..20: mol_type = other DNA
tcatgcctgtatccccagca

SEQ ID NO: 16869 - DNA, 20 bp, synthetic construct
  source 1..20: mol_type = other DNA
ttcatgcctgtatccccagc

SEQ ID NO: 16870 - DNA, 20 bp, synthetic construct
  source 1..20: mol_type = other DNA
gttcatgcctgtatccccag

SEQ ID NO: 16871 - DNA, 20 bp, synthetic construct
  source 1..20: mol_type = other DNA
ggttcatgcctgtatcccca

SEQ ID NO: 16872 - DNA, 20 bp, synthetic construct
  source 1..20: mol_type = other DNA
gggttcatgcctgtatcccc

SEQ ID NO: 16873 - DNA, 20 bp, synthetic construct
  source 1..20: mol_type = other DNA
ggggttcatgcctgtatccc

SEQ ID NO: 16874 - DNA, 20 bp, synthetic construct
  source 1..20: mol_type = other DNA
aggggttcatgcctgtatcc

SEQ ID NO: 16875 - DNA, 20 bp, synthetic construct
  source 1..20: mol_type = other DNA
caggggttcatgcctgtatc

SEQ ID NO: 16876 - DNA, 20 bp, synthetic construct
  source 1..20: mol_type = other DNA
acaggggttcatgcctgtat

SEQ ID NO: 16877 - DNA, 20 bp, synthetic construct
  source 1..20: mol_type = other DNA
cacaggggttcatgcctgta

SEQ ID NO: 16878 - DNA, 20 bp, synthetic construct
  source 1..20: mol_type = other DNA
gcacaggggttcatgcctgt

SEQ ID NO: 16879 - DNA, 20 bp, synthetic construct
  source 1..20: mol_type = other DNA
ggcacaggggttcatgcctg

SEQ ID NO: 16880 - DNA, 20 bp, synthetic construct
  source 1..20: mol_type = other DNA
gggcacaggggttcatgcct

SEQ ID NO: 16881 - DNA, 20 bp, synthetic construct
  source 1..20: mol_type = other DNA
cgggcacaggggttcatgcc

SEQ ID NO: 16882 - DNA, 20 bp, synthetic construct
  source 1..20: mol_type = other DNA
ccgggcacaggggttcatgc

SEQ ID NO: 16883 - DNA, 20 bp, synthetic construct
  source 1..20: mol_type = other DNA
gccgggcacaggggttcatg

SEQ ID NO: 16884 - DNA, 20 bp, synthetic construct
  source 1..20: mol_type = other DNA
ggccgggcacaggggttcat

SEQ ID NO: 16885 - DNA, 20 bp, synthetic construct
  source 1..20: mol_type = other DNA
aggccgggcacaggggttca

SEQ ID NO: 16886 - DNA, 20 bp, synthetic construct
  source 1..20: mol_type = other DNA
taggccgggcacaggggttc

SEQ ID NO: 16887 - DNA, 20 bp, synthetic construct
  source 1..20: mol_type = other DNA
ttaggccgggcacaggggtt

SEQ ID NO: 16888 - DNA, 20 bp, synthetic construct
  source 1..20: mol_type = other DNA
attaggccgggcacaggggt

SEQ ID NO: 16889 - DNA, 20 bp, synthetic construct
  source 1..20: mol_type = other DNA
aattaggccgggcacagggg

SEQ ID NO: 16890 - DNA, 20 bp, synthetic construct
  source 1..20: mol_type = other DNA
aaattaggccgggcacaggg

SEQ ID NO: 16891 - DNA, 20 bp, synthetic construct
  source 1..20: mol_type = other DNA
aaaattaggccgggcacagg

SEQ ID NO: 16892 - DNA, 20 bp, synthetic construct
  source 1..20: mol_type = other DNA
aaaaattaggccgggcacag

SEQ ID NO: 16893 - DNA, 20 bp, synthetic construct
  source 1..20: mol_type = other DNA
caaaaattaggccgggcaca

SEQ ID NO: 16894 - DNA, 20 bp, synthetic construct
  source 1..20: mol_type = other DNA
acaaaaattaggccgggcac

SEQ ID NO: 16895 - DNA, 20 bp, synthetic construct
  source 1..20: mol_type = other DNA
tacaaaaattaggccgggca

SEQ ID NO: 16896 - DNA, 20 bp, synthetic construct
  source 1..20: mol_type = other DNA
atacaaaaattaggccgggc

SEQ ID NO: 16897 - DNA, 20 bp, synthetic construct
  source 1..20: mol_type = other DNA
aatacaaaaattaggccggg

SEQ ID NO: 16898 - DNA, 20 bp, synthetic construct
  source 1..20: mol_type = other DNA
aaatacaaaaattaggccgg

SEQ ID NO: 16899 - DNA, 20 bp, synthetic construct
  source 1..20: mol_type = other DNA
aaaatacaaaaattaggccg

SEQ ID NO: 16900 - DNA, 20 bp, synthetic construct
  source 1..20: mol_type = other DNA
aaaaatacaaaaattaggcc

SEQ ID NO: 16901 - DNA, 20 bp, synthetic construct
  source 1..20: mol_type = other DNA
taaaaatacaaaaattaggc

SEQ ID NO: 16902 - DNA, 20 bp, synthetic construct
  source 1..20: mol_type = other DNA
ctaaaaatacaaaaattagg

SEQ ID NO: 16903 - DNA, 20 bp, synthetic construct
  source 1..20: mol_type = other DNA
actaaaaatacaaaaattag

SEQ ID NO: 16904 - DNA, 20 bp, synthetic construct
  source 1..20: mol_type = other DNA
tactaaaaatacaaaaatta

SEQ ID NO: 16905 - DNA, 20 bp, synthetic construct
  source 1..20: mol_type = other DNA
ctactaaaaatacaaaaatt

SEQ ID NO: 16906 - DNA, 20 bp, synthetic construct
  source 1..20: mol_type = other DNA
tctactaaaaatacaaaaat

SEQ ID NO: 16907 - DNA, 20 bp, synthetic construct
  source 1..20: mol_type = other DNA
ctctactaaaaatacaaaaa

SEQ ID NO: 16908 - DNA, 20 bp, synthetic construct
  source 1..20: mol_type = other DNA
tctctactaaaaatacaaaa

SEQ ID NO: 16909 - DNA, 20 bp, synthetic construct
  source 1..20: mol_type = other DNA
atctctactaaaaatacaaa

SEQ ID NO: 16910 - DNA, 20 bp, synthetic construct
  source 1..20: mol_type = other DNA
catctctactaaaaatacaa

SEQ ID NO: 16911 - DNA, 20 bp, synthetic construct
  source 1..20: mol_type = other DNA
ccatctctactaaaaataca

SEQ ID NO: 16912 - DNA, 20 bp, synthetic construct
  source 1..20: mol_type = other DNA
cccatctctactaaaaatac

SEQ ID NO: 16913 - DNA, 20 bp, synthetic construct
  source 1..20: mol_type = other DNA
ccccatctctactaaaaata

SEQ ID NO: 16914 - DNA, 20 bp, synthetic construct
  source 1..20: mol_type = other DNA
accccatctctactaaaaat

SEQ ID NO: 16915 - DNA, 20 bp, synthetic construct
  source 1..20: mol_type = other DNA
aaccccatctctactaaaaa

SEQ ID NO: 16916 - DNA, 20 bp, synthetic construct
  source 1..20: mol_type = other DNA
aaaccccatctctactaaaa

SEQ ID NO: 16917 - DNA, 20 bp, synthetic construct
  source 1..20: mol_type = other DNA
gaaaccccatctctactaaa

SEQ ID NO: 16918 - DNA, 20 bp, synthetic construct
  source 1..20: mol_type = other DNA
tgaaaccccatctctactaa

SEQ ID NO: 16919 - DNA, 20 bp, synthetic construct
  source 1..20: mol_type = other DNA
gtgaaaccccatctctacta

SEQ ID NO: 16920 - DNA, 20 bp, synthetic construct
  source 1..20: mol_type = other DNA
ggtgaaaccccatctctact

SEQ ID NO: 16921 - DNA, 20 bp, synthetic construct
  source 1..20: mol_type = other DNA
tggtgaaaccccatctctac

SEQ ID NO: 16922 - DNA, 20 bp, synthetic construct
  source 1..20: mol_type = other DNA
atggtgaaaccccatctcta

SEQ ID NO: 16923 - DNA, 20 bp, synthetic construct
  source 1..20: mol_type = other DNA
catggtgaaaccccatctct

SEQ ID NO: 16924 - DNA, 20 bp, synthetic construct
  source 1..20: mol_type = other DNA
acatggtgaaaccccatctc

SEQ ID NO: 16925 - DNA, 20 bp, synthetic construct
  source 1..20: mol_type = other DNA
aacatggtgaaaccccatct

SEQ ID NO: 16926 - DNA, 20 bp, synthetic construct
  source 1..20: mol_type = other DNA
caacatggtgaaaccccatc

SEQ ID NO: 16927 - DNA, 20 bp, synthetic construct
  source 1..20: mol_type = other DNA
ccaacatggtgaaaccccat

SEQ ID NO: 16928 - DNA, 20 bp, synthetic construct
  source 1..20: mol_type = other DNA
gccaacatggtgaaacccca

SEQ ID NO: 16929 - DNA, 20 bp, synthetic construct
  source 1..20: mol_type = other DNA
ggccaacatggtgaaacccc

SEQ ID NO: 16930 - DNA, 20 bp, synthetic construct
  source 1..20: mol_type = other DNA
tggccaacatggtgaaaccc

SEQ ID NO: 16931 - DNA, 20 bp, synthetic construct
  source 1..20: mol_type = other DNA
ctggccaacatggtgaaacc

SEQ ID NO: 16932 - DNA, 20 bp, synthetic construct
  source 1..20: mol_type = other DNA
cctggccaacatggtgaaac

SEQ ID NO: 16933 - DNA, 20 bp, synthetic construct
  source 1..20: mol_type = other DNA
tcctggccaacatggtgaaa

SEQ ID NO: 16934 - DNA, 20 bp, synthetic construct
  source 1..20: mol_type = other DNA
atcctggccaacatggtgaa

SEQ ID NO: 16935 - DNA, 20 bp, synthetic construct
  source 1..20: mol_type = other DNA
tatcctggccaacatggtga

SEQ ID NO: 16936 - DNA, 20 bp, synthetic construct
  source 1..20: mol_type = other DNA
ctatcctggccaacatggtg

SEQ ID NO: 16937 - DNA, 20 bp, synthetic construct
  source 1..20: mol_type = other DNA
actatcctggccaacatggt

SEQ ID NO: 16938 - DNA, 20 bp, synthetic construct
  source 1..20: mol_type = other DNA
gactatcctggccaacatgg

SEQ ID NO: 16939 - DNA, 20 bp, synthetic construct
  source 1..20: mol_type = other DNA
agactatcctggccaacatg

SEQ ID NO: 16940 - DNA, 20 bp, synthetic construct
  source 1..20: mol_type = other DNA
aagactatcctggccaacat

SEQ ID NO: 16941 - DNA, 20 bp, synthetic construct
  source 1..20: mol_type = other DNA
caagactatcctggccaaca

SEQ ID NO: 16942 - DNA, 20 bp, synthetic construct
  source 1..20: mol_type = other DNA
tcaagactatcctggccaac

SEQ ID NO: 16943 - DNA, 20 bp, synthetic construct
  source 1..20: mol_type = other DNA
atcaagactatcctggccaa

SEQ ID NO: 16944 - DNA, 20 bp, synthetic construct
  source 1..20: mol_type = other DNA
gatcaagactatcctggcca

SEQ ID NO: 16945 - DNA, 20 bp, synthetic construct
  source 1..20: mol_type = other DNA
agatcaagactatcctggcc

SEQ ID NO: 16946 - DNA, 20 bp, synthetic construct
  source 1..20: mol_type = other DNA
gagatcaagactatcctggc

SEQ ID NO: 16947 - DNA, 20 bp, synthetic construct
  source 1..20: mol_type = other DNA
agagatcaagactatcctgg

SEQ ID NO: 16948 - DNA, 20 bp, synthetic construct
  source 1..20: mol_type = other DNA
aagagatcaagactatcctg

SEQ ID NO: 16949 - DNA, 20 bp, synthetic construct
  source 1..20: mol_type = other DNA
caagagatcaagactatcct

SEQ ID NO: 16950 - DNA, 20 bp, synthetic construct
  source 1..20: mol_type = other DNA
tcaagagatcaagactatcc

SEQ ID NO: 16951 - DNA, 20 bp, synthetic construct
  source 1..20: mol_type = other DNA
gtcaagagatcaagactatc

SEQ ID NO: 16952 - DNA, 20 bp, synthetic construct
  source 1..20: mol_type = other DNA
ggtcaagagatcaagactat

SEQ ID NO: 16953 - DNA, 20 bp, synthetic construct
  source 1..20: mol_type = other DNA
aggtcaagagatcaagacta

SEQ ID NO: 16954 - DNA, 20 bp, synthetic construct
  source 1..20: mol_type = other DNA
gaggtcaagagatcaagact

SEQ ID NO: 16955 - DNA, 20 bp, synthetic construct
  source 1..20: mol_type = other DNA
cgaggtcaagagatcaagac

SEQ ID NO: 16956 - DNA, 20 bp, synthetic construct
  source 1..20: mol_type = other DNA
acgaggtcaagagatcaaga

SEQ ID NO: 16957 - DNA, 20 bp, synthetic construct
  source 1..20: mol_type = other DNA
tacgaggtcaagagatcaag

SEQ ID NO: 16958 - DNA, 20 bp, synthetic construct
  source 1..20: mol_type = other DNA
ttacgaggtcaagagatcaa

SEQ ID NO: 16959 - DNA, 20 bp, synthetic construct
  source 1..20: mol_type = other DNA
attacgaggtcaagagatca

SEQ ID NO: 16960 - DNA, 20 bp, synthetic construct
  source 1..20: mol_type = other DNA
gattacgaggtcaagagatc

SEQ ID NO: 16961 - DNA, 20 bp, synthetic construct
  source 1..20: mol_type = other DNA
agattacgaggtcaagagat

SEQ ID NO: 16962 - DNA, 20 bp, synthetic construct
  source 1..20: mol_type = other DNA
cagattacgaggtcaagaga

SEQ ID NO: 16963 - DNA, 20 bp, synthetic construct
  source 1..20: mol_type = other DNA
gcagattacgaggtcaagag

SEQ ID NO: 16964 - DNA, 20 bp, synthetic construct
  source 1..20: mol_type = other DNA
ggcagattacgaggtcaaga

SEQ ID NO: 16965 - DNA, 20 bp, synthetic construct
  source 1..20: mol_type = other DNA
gggcagattacgaggtcaag

SEQ ID NO: 16966 - DNA, 20 bp, synthetic construct
  source 1..20: mol_type = other DNA
tgggcagattacgaggtcaa

SEQ ID NO: 16967 - DNA, 20 bp, synthetic construct
  source 1..20: mol_type = other DNA
gtgggcagattacgaggtca

SEQ ID NO: 16968 - DNA, 20 bp, synthetic construct
  source 1..20: mol_type = other DNA
ggtgggcagattacgaggtc

SEQ ID NO: 16969 - DNA, 20 bp, synthetic construct
  source 1..20: mol_type = other DNA
aggtgggcagattacgaggt

SEQ ID NO: 16970 - DNA, 20 bp, synthetic construct
  source 1..20: mol_type = other DNA
gaggtgggcagattacgagg

SEQ ID NO: 16971 - DNA, 20 bp, synthetic construct
  source 1..20: mol_type = other DNA
cgaggtgggcagattacgag

SEQ ID NO: 16972 - DNA, 20 bp, synthetic construct
  source 1..20: mol_type = other DNA
tcgaggtgggcagattacga

SEQ ID NO: 16973 - DNA, 20 bp, synthetic construct
  source 1..20: mol_type = other DNA
gtcgaggtgggcagattacg

SEQ ID NO: 16974 - DNA, 20 bp, synthetic construct
  source 1..20: mol_type = other DNA
agtcgaggtgggcagattac

SEQ ID NO: 16975 - DNA, 20 bp, synthetic construct
  source 1..20: mol_type = other DNA
gagtcgaggtgggcagatta

SEQ ID NO: 16976 - DNA, 20 bp, synthetic construct
  source 1..20: mol_type = other DNA
ggagtcgaggtgggcagatt

SEQ ID NO: 16977 - DNA, 20 bp, synthetic construct
  source 1..20: mol_type = other DNA
gggagtcgaggtgggcagat

SEQ ID NO: 16978 - DNA, 20 bp, synthetic construct
  source 1..20: mol_type = other DNA
tgggagtcgaggtgggcaga

SEQ ID NO: 16979 - DNA, 20 bp, synthetic construct
  source 1..20: mol_type = other DNA
ttgggagtcgaggtgggcag

SEQ ID NO: 16980 - DNA, 20 bp, synthetic construct
  source 1..20: mol_type = other DNA
tttgggagtcgaggtgggca

SEQ ID NO: 16981 - DNA, 20 bp, synthetic construct
  source 1..20: mol_type = other DNA
ctttgggagtcgaggtgggc

SEQ ID NO: 16982 - DNA, 20 bp, synthetic construct
  source 1..20: mol_type = other DNA
actttgggagtcgaggtggg

SEQ ID NO: 16983 - DNA, 20 bp, synthetic construct
  source 1..20: mol_type = other DNA
cactttgggagtcgaggtgg

SEQ ID NO: 16984 - DNA, 20 bp, synthetic construct
  source 1..20: mol_type = other DNA
gcactttgggagtcgaggtg

SEQ ID NO: 16985 - DNA, 20 bp, synthetic construct
  source 1..20: mol_type = other DNA
agcactttgggagtcgaggt

SEQ ID NO: 16986 - DNA, 20 bp, synthetic construct
  source 1..20: mol_type = other DNA
cagcactttgggagtcgagg

SEQ ID NO: 16987 - DNA, 20 bp, synthetic construct
  source 1..20: mol_type = other DNA
ccagcactttgggagtcgag

SEQ ID NO: 16988 - DNA, 20 bp, synthetic construct
  source 1..20: mol_type = other DNA
cccagcactttgggagtcga

SEQ ID NO: 16989 - DNA, 20 bp, synthetic construct
  source 1..20: mol_type = other DNA
tcccagcactttgggagtcg

SEQ ID NO: 16990 - DNA, 20 bp, synthetic construct
  source 1..20: mol_type = other DNA
atcccagcactttgggagtc

SEQ ID NO: 16991 - DNA, 20 bp, synthetic construct
  source 1..20: mol_type = other DNA
aatcccagcactttgggagt

SEQ ID NO: 16992 - DNA, 20 bp, synthetic construct
  source 1..20: mol_type = other DNA
taatcccagcactttgggag

SEQ ID NO: 16993 - DNA, 20 bp, synthetic construct
  source 1..20: mol_type = other DNA
gtaatcccagcactttggga

SEQ ID NO: 16994 - DNA, 20 bp, synthetic construct
  source 1..20: mol_type = other DNA
tgtaatcccagcactttggg

SEQ ID NO: 16995 - DNA, 20 bp, synthetic construct
  source 1..20: mol_type = other DNA
ctgtaatcccagcactttgg

SEQ ID NO: 16996 - DNA, 20 bp, synthetic construct
  source 1..20: mol_type = other DNA
cctgtaatcccagcactttg

SEQ ID NO: 16997 - DNA, 20 bp, synthetic construct
  source 1..20: mol_type = other DNA
acctgtaatcccagcacttt

SEQ ID NO: 16998 - DNA, 20 bp, synthetic construct
  source 1..20: mol_type = other DNA
cacctgtaatcccagcactt

SEQ ID NO: 16999 - DNA, 20 bp, synthetic construct
  source 1..20: mol_type = other DNA
acacctgtaatcccagcact

SEQ ID NO: 17000 - DNA, 20 bp, synthetic construct
  source 1..20: mol_type = other DNA
cacacctgtaatcccagcac

SEQ ID NO: 17001 - DNA, 20 bp, synthetic construct
  source 1..20: mol_type = other DNA
tcacacctgtaatcccagca

SEQ ID NO: 17002 - DNA, 20 bp, synthetic construct
  source 1..20: mol_type = other DNA
ctcacacctgtaatcccagc

SEQ ID NO: 17003 - DNA, 20 bp, synthetic construct
  source 1..20: mol_type = other DNA
gctcacacctgtaatcccag

SEQ ID NO: 17004 - DNA, 20 bp, synthetic construct
  source 1..20: mol_type = other DNA
ggctcacacctgtaatccca

SEQ ID NO: 17005 - DNA, 20 bp, synthetic construct
  source 1..20: mol_type = other DNA
tggctcacacctgtaatccc

SEQ ID NO: 17006 - DNA, 20 bp, synthetic construct
  source 1..20: mol_type = other DNA
gtggctcacacctgtaatcc

SEQ ID NO: 17007 - DNA, 20 bp, synthetic construct
  source 1..20: mol_type = other DNA
agtggctcacacctgtaatc

SEQ ID NO: 17008 - DNA, 20 bp, synthetic construct
  source 1..20: mol_type = other DNA
cagtggctcacacctgtaat

SEQ ID NO: 17009 - DNA, 20 bp, synthetic construct
  source 1..20: mol_type = other DNA
gcagtggctcacacctgtaa

SEQ ID NO: 17010 - DNA, 20 bp, synthetic construct
  source 1..20: mol_type = other DNA
tgcagtggctcacacctgta

SEQ ID NO: 17011 - DNA, 20 bp, synthetic construct
  source 1..20: mol_type = other DNA
gtgcagtggctcacacctgt

SEQ ID NO: 17012 - DNA, 20 bp, synthetic construct
  source 1..20: mol_type = other DNA
ggtgcagtggctcacacctg

SEQ ID NO: 17013 - DNA, 20 bp, synthetic construct
  source 1..20: mol_type = other DNA
gggtgcagtggctcacacct

SEQ ID NO: 17014 - DNA, 20 bp, synthetic construct
  source 1..20: mol_type = other DNA
tgggtgcagtggctcacacc

SEQ ID NO: 17015 - DNA, 20 bp, synthetic construct
  source 1..20: mol_type = other DNA
ctgggtgcagtggctcacac

SEQ ID NO: 17016 - DNA, 20 bp, synthetic construct
  source 1..20: mol_type = other DNA
gctgggtgcagtggctcaca

SEQ ID NO: 17017 - DNA, 20 bp, synthetic construct
  source 1..20: mol_type = other DNA
agctgggtgcagtggctcac

SEQ ID NO: 17018 - DNA, 20 bp, synthetic construct
  source 1..20: mol_type = other DNA
cagctgggtgcagtggctca

SEQ ID NO: 17019 - DNA, 20 bp, synthetic construct
  source 1..20: mol_type = other DNA
gcagctgggtgcagtggctc

SEQ ID NO: 17020 - DNA, 20 bp, synthetic construct
  source 1..20: mol_type = other DNA
ggcagctgggtgcagtggct

SEQ ID NO: 17021 - DNA, 20 bp, synthetic construct
  source 1..20: mol_type = other DNA
tggcagctgggtgcagtggc

SEQ ID NO: 17022 - DNA, 20 bp, synthetic construct
  source 1..20: mol_type = other DNA
ttggcagctgggtgcagtgg

SEQ ID NO: 17023 - DNA, 20 bp, synthetic construct
  source 1..20: mol_type = other DNA
cttggcagctgggtgcagtg

SEQ ID NO: 17024 - DNA, 20 bp, synthetic construct
  source 1..20: mol_type = other DNA
tcttggcagctgggtgcagt

SEQ ID NO: 17025 - DNA, 20 bp, synthetic construct
  source 1..20: mol_type = other DNA
ttcttggcagctgggtgcag

SEQ ID NO: 17026 - DNA, 20 bp, synthetic construct
  source 1..20: mol_type = other DNA
attcttggcagctgggtgca

SEQ ID NO: 17027 - DNA, 20 bp, synthetic construct
  source 1..20: mol_type = other DNA
aattcttggcagctgggtgc

SEQ ID NO: 17028 - DNA, 20 bp, synthetic construct
  source 1..20: mol_type = other DNA
caattcttggcagctgggtg

SEQ ID NO: 17029 - DNA, 20 bp, synthetic construct
  source 1..20: mol_type = other DNA
acaattcttggcagctgggt

SEQ ID NO: 17030 - DNA, 20 bp, synthetic construct
  source 1..20: mol_type = other DNA
aacaattcttggcagctggg

SEQ ID NO: 17031 - DNA, 20 bp, synthetic construct
  source 1..20: mol_type = other DNA
aaacaattcttggcagctgg

SEQ ID NO: 17032 - DNA, 20 bp, synthetic construct
  source 1..20: mol_type = other DNA
aaaacaattcttggcagctg

SEQ ID NO: 17033 - DNA, 20 bp, synthetic construct
  source 1..20: mol_type = other DNA
taaaacaattcttggcagct

SEQ ID NO: 17034 - DNA, 20 bp, synthetic construct
  source 1..20: mol_type = other DNA
ttaaaacaattcttggcagc

SEQ ID NO: 17035 - DNA, 20 bp, synthetic construct
  source 1..20: mol_type = other DNA
cttaaaacaattcttggcag

SEQ ID NO: 17036 - DNA, 20 bp, synthetic construct
  source 1..20: mol_type = other DNA
gcttaaaacaattcttggca

SEQ ID NO: 17037 - DNA, 20 bp, synthetic construct
  source 1..20: mol_type = other DNA
agcttaaaacaattcttggc

SEQ ID NO: 17038 - DNA, 20 bp, synthetic construct
  source 1..20: mol_type = other DNA
aagcttaaaacaattcttgg

SEQ ID NO: 17039 - DNA, 20 bp, synthetic construct
  source 1..20: mol_type = other DNA
aaagcttaaaacaattcttg

SEQ ID NO: 17040 - DNA, 20 bp, synthetic construct
  source 1..20: mol_type = other DNA
caaagcttaaaacaattctt

SEQ ID NO: 17041 - DNA, 20 bp, synthetic construct
  source 1..20: mol_type = other DNA
ccaaagcttaaaacaattct

SEQ ID NO: 17042 - DNA, 20 bp, synthetic construct
  source 1..20: mol_type = other DNA
accaaagcttaaaacaattc

SEQ ID NO: 17043 - DNA, 20 bp, synthetic construct
  source 1..20: mol_type = other DNA
aaccaaagcttaaaacaatt

SEQ ID NO: 17044 - DNA, 20 bp, synthetic construct
  source 1..20: mol_type = other DNA
aaaccaaagcttaaaacaat

SEQ ID NO: 17045 - DNA, 20 bp, synthetic construct
  source 1..20: mol_type = other DNA
caaaccaaagcttaaaacaa

SEQ ID NO: 17046 - DNA, 20 bp, synthetic construct
  source 1..20: mol_type = other DNA
tcaaaccaaagcttaaaaca

SEQ ID NO: 17047 - DNA, 20 bp, synthetic construct
  source 1..20: mol_type = other DNA
ctcaaaccaaagcttaaaac

SEQ ID NO: 17048 - DNA, 20 bp, synthetic construct
  source 1..20: mol_type = other DNA
actcaaaccaaagcttaaaa

SEQ ID NO: 17049 - DNA, 20 bp, synthetic construct
  source 1..20: mol_type = other DNA
aactcaaaccaaagcttaaa

SEQ ID NO: 17050 - DNA, 20 bp, synthetic construct
  source 1..20: mol_type = other DNA
taactcaaaccaaagcttaa

SEQ ID NO: 17051 - DNA, 20 bp, synthetic construct
  source 1..20: mol_type = other DNA
ttaactcaaaccaaagctta

SEQ ID NO: 17052 - DNA, 20 bp, synthetic construct
  source 1..20: mol_type = other DNA
attaactcaaaccaaagctt

SEQ ID NO: 17053 - DNA, 20 bp, synthetic construct
  source 1..20: mol_type = other DNA
cattaactcaaaccaaagct

SEQ ID NO: 17054 - DNA, 20 bp, synthetic construct
  source 1..20: mol_type = other DNA
acattaactcaaaccaaagc

SEQ ID NO: 17055 - DNA, 20 bp, synthetic construct
  source 1..20: mol_type = other DNA
tacattaactcaaaccaaag

SEQ ID NO: 17056 - DNA, 20 bp, synthetic construct
  source 1..20: mol_type = other DNA
atacattaactcaaaccaaa

SEQ ID NO: 17057 - DNA, 20 bp, synthetic construct
  source 1..20: mol_type = other DNA
tatacattaactcaaaccaa

SEQ ID NO: 17058 - DNA, 20 bp, synthetic construct
  source 1..20: mol_type = other DNA
atatacattaactcaaacca

SEQ ID NO: 17059 - DNA, 20 bp, synthetic construct
  source 1..20: mol_type = other DNA
tatatacattaactcaaacc

SEQ ID NO: 17060 - DNA, 20 bp, synthetic construct
  source 1..20: mol_type = other DNA
atatatacattaactcaaac

SEQ ID NO: 17061 - DNA, 20 bp, synthetic construct
  source 1..20: mol_type = other DNA
tatatatacattaactcaaa

SEQ ID NO: 17062 - DNA, 20 bp, synthetic construct
  source 1..20: mol_type = other DNA
gtatatatacattaactcaa

SEQ ID NO: 17063 - DNA, 20 bp, synthetic construct
  source 1..20: mol_type = other DNA
ggtatatatacattaactca

SEQ ID NO: 17064 - DNA, 20 bp, synthetic construct
  source 1..20: mol_type = other DNA
cggtatatatacattaactc

SEQ ID NO: 17065 - DNA, 20 bp, synthetic construct
  source 1..20: mol_type = other DNA
gcggtatatatacattaact

SEQ ID NO: 17066 - DNA, 20 bp, synthetic construct
  source 1..20: mol_type = other DNA
tgcggtatatatacattaac

SEQ ID NO: 17067 - DNA, 20 bp, synthetic construct
  source 1..20: mol_type = other DNA
atgcggtatatatacattaa

SEQ ID NO: 17068 - DNA, 20 bp, synthetic construct
  source 1..20: mol_type = other DNA
aatgcggtatatatacatta

SEQ ID NO: 17069 - DNA, 20 bp, synthetic construct
  source 1..20: mol_type = other DNA
caatgcggtatatatacatt

SEQ ID NO: 17070 - DNA, 20 bp, synthetic construct
  source 1..20: mol_type = other DNA
acaatgcggtatatatacat

SEQ ID NO: 17071 - DNA, 20 bp, synthetic construct
  source 1..20: mol_type = other DNA
tacaatgcggtatatataca

SEQ ID NO: 17072 - DNA, 20 bp, synthetic construct
  source 1..20: mol_type = other DNA
ttacaatgcggtatatatac

SEQ ID NO: 17073 - DNA, 20 bp, synthetic construct
  source 1..20: mol_type = other DNA
attacaatgcggtatatata

SEQ ID NO: 17074 - DNA, 20 bp, synthetic construct
  source 1..20: mol_type = other DNA
aattacaatgcggtatatat

SEQ ID NO: 17075 - DNA, 20 bp, synthetic construct
  source 1..20: mol_type = other DNA
gaattacaatgcggtatata

SEQ ID NO: 17076 - DNA, 20 bp, synthetic construct
  source 1..20: mol_type = other DNA
tgaattacaatgcggtatat

SEQ ID NO: 17077 - DNA, 20 bp, synthetic construct
  source 1..20: mol_type = other DNA
ttgaattacaatgcggtata

SEQ ID NO: 17078 - DNA, 20 bp, synthetic construct
  source 1..20: mol_type = other DNA
tttgaattacaatgcggtat

SEQ ID NO: 17079 - DNA, 20 bp, synthetic construct
  source 1..20: mol_type = other DNA
ttttgaattacaatgcggta

SEQ ID NO: 17080 - DNA, 20 bp, synthetic construct
  source 1..20: mol_type = other DNA
attttgaattacaatgcggt

SEQ ID NO: 17081 - DNA, 20 bp, synthetic construct
  source 1..20: mol_type = other DNA
cattttgaattacaatgcgg

SEQ ID NO: 17082 - DNA, 20 bp, synthetic construct
  source 1..20: mol_type = other DNA
acattttgaattacaatgcg

SEQ ID NO: 17083 - DNA, 20 bp, synthetic construct
  source 1..20: mol_type = other DNA
tacattttgaattacaatgc

SEQ ID NO: 17084 - DNA, 20 bp, synthetic construct
  source 1..20: mol_type = other DNA
ttacattttgaattacaatg

SEQ ID NO: 17085 - DNA, 20 bp, synthetic construct
  source 1..20: mol_type = other DNA
attacattttgaattacaat

SEQ ID NO: 17086 - DNA, 20 bp, synthetic construct
  source 1..20: mol_type = other DNA
aattacattttgaattacaa

SEQ ID NO: 17087 - DNA, 20 bp, synthetic construct
  source 1..20: mol_type = other DNA
aaattacattttgaattaca

SEQ ID NO: 17088 - DNA, 20 bp, synthetic construct
  source 1..20: mol_type = other DNA
aaaattacattttgaattac

SEQ ID NO: 17089 - DNA, 20 bp, synthetic construct
  source 1..20: mol_type = other DNA
aaaaattacattttgaatta

SEQ ID NO: 17090 - DNA, 20 bp, synthetic construct
  source 1..20: mol_type = other DNA
caaaaattacattttgaatt

SEQ ID NO: 17091 - DNA, 20 bp, synthetic construct
  source 1..20: mol_type = other DNA
ccaaaaattacattttgaat

SEQ ID NO: 17092 - DNA, 20 bp, synthetic construct
  source 1..20: mol_type = other DNA
gccaaaaattacattttgaa

SEQ ID NO: 17093 - DNA, 20 bp, synthetic construct
  source 1..20: mol_type = other DNA
ggccaaaaattacattttga

SEQ ID NO: 17094 - DNA, 20 bp, synthetic construct
  source 1..20: mol_type = other DNA
tggccaaaaattacattttg

SEQ ID NO: 17095 - DNA, 20 bp, synthetic construct
  source 1..20: mol_type = other DNA
ttggccaaaaattacatttt

SEQ ID NO: 17096 - DNA, 20 bp, synthetic construct
  source 1..20: mol_type = other DNA
gttggccaaaaattacattt

SEQ ID NO: 17097 - DNA, 20 bp, synthetic construct
  source 1..20: mol_type = other DNA
agttggccaaaaattacatt

SEQ ID NO: 17098 - DNA, 20 bp, synthetic construct
  source 1..20: mol_type = other DNA
gagttggccaaaaattacat

SEQ ID NO: 17099 - DNA, 20 bp, synthetic construct
  source 1..20: mol_type = other DNA
agagttggccaaaaattaca

SEQ ID NO: 17100 - DNA, 20 bp, synthetic construct
  source 1..20: mol_type = other DNA
cagagttggccaaaaattac

SEQ ID NO: 17101 - DNA, 20 bp, synthetic construct
  source 1..20: mol_type = other DNA
ccagagttggccaaaaatta

SEQ ID NO: 17102 - DNA, 20 bp, synthetic construct
  source 1..20: mol_type = other DNA
cccagagttggccaaaaatt

SEQ ID NO: 17103 - DNA, 20 bp, synthetic construct
  source 1..20: mol_type = other DNA
gcccagagttggccaaaaat

SEQ ID NO: 17104 - DNA, 20 bp, synthetic construct
  source 1..20: mol_type = other DNA
tgcccagagttggccaaaaa

SEQ ID NO: 17105 - DNA, 20 bp, synthetic construct
  source 1..20: mol_type = other DNA
gtgcccagagttggccaaaa

SEQ ID NO: 17106 - DNA, 20 bp, synthetic construct
  source 1..20: mol_type = other DNA
tgtgcccagagttggccaaa

SEQ ID NO: 17107 - DNA, 20 bp, synthetic construct
  source 1..20: mol_type = other DNA
atgtgcccagagttggccaa

SEQ ID NO: 17108 - DNA, 20 bp, synthetic construct
  source 1..20: mol_type = other DNA
aatgtgcccagagttggcca

SEQ ID NO: 17109 - DNA, 20 bp, synthetic construct
  source 1..20: mol_type = other DNA
caatgtgcccagagttggcc

SEQ ID NO: 17110 - DNA, 20 bp, synthetic construct
  source 1..20: mol_type = other DNA
gcaatgtgcccagagttggc

SEQ ID NO: 17111 - DNA, 20 bp, synthetic construct
  source 1..20: mol_type = other DNA
ggcaatgtgcccagagttgg

SEQ ID NO: 17112 - DNA, 20 bp, synthetic construct
  source 1..20: mol_type = other DNA
aggcaatgtgcccagagttg

SEQ ID NO: 17113 - DNA, 20 bp, synthetic construct
  source 1..20: mol_type = other DNA
taggcaatgtgcccagagtt

SEQ ID NO: 17114 - DNA, 20 bp, synthetic construct
  source 1..20: mol_type = other DNA
ataggcaatgtgcccagagt

SEQ ID NO: 17115 - DNA, 20 bp, synthetic construct
  source 1..20: mol_type = other DNA
cataggcaatgtgcccagag

SEQ ID NO: 17116 - DNA, 20 bp, synthetic construct
  source 1..20: mol_type = other DNA
ccataggcaatgtgcccaga

SEQ ID NO: 17117 - DNA, 20 bp, synthetic construct
  source 1..20: mol_type = other DNA
tccataggcaatgtgcccag

SEQ ID NO: 17118 - DNA, 20 bp, synthetic construct
  source 1..20: mol_type = other DNA
gtccataggcaatgtgccca

SEQ ID NO: 17119 - DNA, 20 bp, synthetic construct
  source 1..20: mol_type = other DNA
agtccataggcaatgtgccc

SEQ ID NO: 17120 - DNA, 20 bp, synthetic construct
  source 1..20: mol_type = other DNA
tagtccataggcaatgtgcc

SEQ ID NO: 17121 - DNA, 20 bp, synthetic construct
  source 1..20: mol_type = other DNA
ctagtccataggcaatgtgc

SEQ ID NO: 17122 - DNA, 20 bp, synthetic construct
  source 1..20: mol_type = other DNA
actagtccataggcaatgtg

SEQ ID NO: 17123 - DNA, 20 bp, synthetic construct
  source 1..20: mol_type = other DNA
gactagtccataggcaatgt

SEQ ID NO: 17124 - DNA, 20 bp, synthetic construct
  source 1..20: mol_type = other DNA
ggactagtccataggcaatg

SEQ ID NO: 17125 - DNA, 20 bp, synthetic construct
  source 1..20: mol_type = other DNA
aggactagtccataggcaat

SEQ ID NO: 17126 - DNA, 20 bp, synthetic construct
  source 1..20: mol_type = other DNA
caggactagtccataggcaa

SEQ ID NO: 17127 - DNA, 20 bp, synthetic construct
  source 1..20: mol_type = other DNA
gcaggactagtccataggca

SEQ ID NO: 17128 - DNA, 20 bp, synthetic construct
  source 1..20: mol_type = other DNA
agcaggactagtccataggc

SEQ ID NO: 17129 - DNA, 20 bp, synthetic construct
  source 1..20: mol_type = other DNA
gagcaggactagtccatagg

SEQ ID NO: 17130 - DNA, 20 bp, synthetic construct
  source 1..20: mol_type = other DNA
agagcaggactagtccatag

SEQ ID NO: 17131 - DNA, 20 bp, synthetic construct
  source 1..20: mol_type = other DNA
cagagcaggactagtccata

SEQ ID NO: 17132 - DNA, 20 bp, synthetic construct
  source 1..20: mol_type = other DNA
gcagagcaggactagtccat

SEQ ID NO: 17133 - DNA, 20 bp, synthetic construct
  source 1..20: mol_type = other DNA
ggcagagcaggactagtcca

SEQ ID NO: 17134 - DNA, 20 bp, synthetic construct
  source 1..20: mol_type = other DNA
tggcagagcaggactagtcc

SEQ ID NO: 17135 - DNA, 20 bp, synthetic construct
  source 1..20: mol_type = other DNA
gtggcagagcaggactagtc

SEQ ID NO: 17136 - DNA, 20 bp, synthetic construct
  source 1..20: mol_type = other DNA
cgtggcagagcaggactagt

SEQ ID NO: 17137 - DNA, 20 bp, synthetic construct
  source 1..20: mol_type = other DNA
tcgtggcagagcaggactag

SEQ ID NO: 17138 - DNA, 20 bp, synthetic construct
  source 1..20: mol_type = other DNA
ctcgtggcagagcaggacta

SEQ ID NO: 17139 - DNA, 20 bp, synthetic construct
  source 1..20: mol_type = other DNA
gctcgtggcagagcaggact

SEQ ID NO: 17140 - DNA, 20 bp, synthetic construct
  source 1..20: mol_type = other DNA
tgctcgtggcagagcaggac

SEQ ID NO: 17141 - DNA, 20 bp, synthetic construct
  source 1..20: mol_type = other DNA
ctgctcgtggcagagcagga

SEQ ID NO: 17142 - DNA, 20 bp, synthetic construct
  source 1..20: mol_type = other DNA
gctgctcgtggcagagcagg

SEQ ID NO: 17143 - DNA, 20 bp, synthetic construct
  source 1..20: mol_type = other DNA
tgctgctcgtggcagagcag

SEQ ID NO: 17144 - DNA, 20 bp, synthetic construct
  source 1..20: mol_type = other DNA
ttgctgctcgtggcagagca

SEQ ID NO: 17145 - DNA, 20 bp, synthetic construct
  source 1..20: mol_type = other DNA
gttgctgctcgtggcagagc

SEQ ID NO: 17146 - DNA, 20 bp, synthetic construct
  source 1..20: mol_type = other DNA
tgttgctgctcgtggcagag

SEQ ID NO: 17147 - DNA, 20 bp, synthetic construct
  source 1..20: mol_type = other DNA
ctgttgctgctcgtggcaga

SEQ ID NO: 17148 - DNA, 20 bp, synthetic construct
  source 1..20: mol_type = other DNA
actgttgctgctcgtggcag

SEQ ID NO: 17149 - DNA, 20 bp, synthetic construct
  source 1..20: mol_type = other DNA
aactgttgctgctcgtggca

SEQ ID NO: 17150 - DNA, 20 bp, synthetic construct
  source 1..20: mol_type = other DNA
gaactgttgctgctcgtggc

SEQ ID NO: 17151 - DNA, 20 bp, synthetic construct
  source 1..20: mol_type = other DNA
tgaactgttgctgctcgtgg

SEQ ID NO: 17152 - DNA, 20 bp, synthetic construct
  source 1..20: mol_type = other DNA
ttgaactgttgctgctcgtg

SEQ ID NO: 17153 - DNA, 20 bp, synthetic construct
  source 1..20: mol_type = other DNA
attgaactgttgctgctcgt

SEQ ID NO: 17154 - DNA, 20 bp, synthetic construct
  source 1..20: mol_type = other DNA
cattgaactgttgctgctcg

SEQ ID NO: 17155 - DNA, 20 bp, synthetic construct
  source 1..20: mol_type = other DNA
tcattgaactgttgctgctc

SEQ ID NO: 17156 - DNA, 20 bp, synthetic construct
  source 1..20: mol_type = other DNA
ttcattgaactgttgctgct

SEQ ID NO: 17157 - DNA, 20 bp, synthetic construct
  source 1..20: mol_type = other DNA
attcattgaactgttgctgc

SEQ ID NO: 17158 - DNA, 20 bp, synthetic construct
  source 1..20: mol_type = other DNA
aattcattgaactgttgctg

SEQ ID NO: 17159 - DNA, 20 bp, synthetic construct
  source 1..20: mol_type = other DNA
aaattcattgaactgttgct

SEQ ID NO: 17160 - DNA, 20 bp, synthetic construct
  source 1..20: mol_type = other DNA
aaaattcattgaactgttgc

SEQ ID NO: 17161 - DNA, 20 bp, synthetic construct
  source 1..20: mol_type = other DNA
aaaaattcattgaactgttg

SEQ ID NO: 17162 - DNA, 20 bp, synthetic construct
  source 1..20: mol_type = other DNA
aaaaaattcattgaactgtt

SEQ ID NO: 17163 - DNA, 20 bp, synthetic construct
  source 1..20: mol_type = other DNA
aaaaaaattcattgaactgt

SEQ ID NO: 17164 - DNA, 20 bp, synthetic construct
  source 1..20: mol_type = other DNA
aaaaaaaattcattgaactg

SEQ ID NO: 17165 - DNA, 20 bp, synthetic construct
  source 1..20: mol_type = other DNA
aaaaaaaaattcattgaact

SEQ ID NO: 17166 - DNA, 20 bp, synthetic construct
  source 1..20: mol_type = other DNA
aaaaaaaaaattcattgaac

SEQ ID NO: 17167 - DNA, 20 bp, synthetic construct
  source 1..20: mol_type = other DNA
aaaaaaaaaaattcattgaa

SEQ ID NO: 17168 - DNA, 20 bp, synthetic construct
  source 1..20: mol_type = other DNA
aaaaaaaaaaaattcattga

SEQ ID NO: 17169 - DNA, 20 bp, synthetic construct
  source 1..20: mol_type = other DNA
aaaaaaaaaaaaattcattg

SEQ ID NO: 17170 - DNA, 20 bp, synthetic construct
  source 1..20: mol_type = other DNA
aaaaaaaaaaaaaattcatt

SEQ ID NO: 17171 - DNA, 20 bp, synthetic construct
  source 1..20: mol_type = other DNA
aaaaaaaaaaaaaaattcat

SEQ ID NO: 17172 - DNA, 20 bp, synthetic construct
  source 1..20: mol_type = other DNA
aaaaaaaaaaaaaaaattca

SEQ ID NO: 17173 - DNA, 20 bp, synthetic construct
  source 1..20: mol_type = other DNA
aaaaaaaaaaaaaaaaattc

SEQ ID NO: 17174 - DNA, 20 bp, synthetic construct
  source 1..20: mol_type = other DNA
aaaaaaaaaaaaaaaaaatt

SEQ ID NO: 17175 - DNA, 20 bp, synthetic construct
  source 1..20: mol_type = other DNA
aaaaaaaaaaaaaaaaaaat

SEQ ID NO: 17176 - DNA, 20 bp, synthetic construct
  source 1..20: mol_type = other DNA
aaaaaaaaaaaaaaaaaaaa

SEQ ID NO: 17177 - DNA, 20 bp, synthetic construct
  source 1..20: mol_type = other DNA
aaaaaaaaaaaaaaaaaaaa

SEQ ID NO: 17178 - DNA, 20 bp, synthetic construct
  source 1..20: mol_type = other DNA
aaaaaaaaaaaaaaaaaaaa

SEQ ID NO: 17179 - DNA, 20 bp, synthetic construct
  source 1..20: mol_type = other DNA
aaaaaaaaaaaaaaaaaaaa

SEQ ID NO: 17180 - DNA, 20 bp, synthetic construct
  source 1..20: mol_type = other DNA
aaaaaaaaaaaaaaaaaaaa

SEQ ID NO: 17181 - DNA, 20 bp, synthetic construct
  source 1..20: mol_type = other DNA
aaaaaaaaaaaaaaaaaaaa

SEQ ID NO: 17182 - DNA, 20 bp, synthetic construct
  source 1..20: mol_type = other DNA
aaaaaaaaaaaaaaaaaaaa

SEQ ID NO: 17183 - DNA, 20 bp, synthetic construct
  source 1..20: mol_type = other DNA
aaaaaaaaaaaaaaaaaaaa

SEQ ID NO: 17184 - DNA, 20 bp, synthetic construct
  source 1..20: mol_type = other DNA
aaaaaaaaaaaaaaaaaaaa

SEQ ID NO: 17185 - DNA, 20 bp, synthetic construct
  source 1..20: mol_type = other DNA
aaaaaaaaaaaaaaaaaaaa

SEQ ID NO: 17186 - DNA, 20 bp, synthetic construct
  source 1..20: mol_type = other DNA
aaaaaaaaaaaaaaaaaaaa

SEQ ID NO: 17187 - DNA, 20 bp, synthetic construct
  source 1..20: mol_type = other DNA
aaaaaaaaaaaaaaaaaaaa

SEQ ID NO: 17188 - DNA, 20 bp, synthetic construct
  source 1..20: mol_type = other DNA
aaaaaaaaaaaaaaaaaaaa

SEQ ID NO: 17189 - DNA, 20 bp, synthetic construct
  source 1..20: mol_type = other DNA
aaaaaaaaaaaaaaaaaaaa

SEQ ID NO: 17190 - DNA, 20 bp, synthetic construct
  source 1..20: mol_type = other DNA
aaaaaaaaaaaaaaaaaaaa

SEQ ID NO: 17191 - DNA, 20 bp, synthetic construct
  source 1..20: mol_type = other DNA
caaaaaaaaaaaaaaaaaaa

SEQ ID NO: 17192 - DNA, 20 bp, synthetic construct
  source 1..20: mol_type = other DNA
tcaaaaaaaaaaaaaaaaaa

SEQ ID NO: 17193 - DNA, 20 bp, synthetic construct
  source 1..20: mol_type = other DNA
ctcaaaaaaaaaaaaaaaaa

SEQ ID NO: 17194 - DNA, 20 bp, synthetic construct
  source 1..20: mol_type = other DNA
tctcaaaaaaaaaaaaaaaa

SEQ ID NO: 17195 - DNA, 20 bp, synthetic construct
  source 1..20: mol_type = other DNA
gtctcaaaaaaaaaaaaaaa

SEQ ID NO: 17196 - DNA, 20 bp, synthetic construct
  source 1..20: mol_type = other DNA
tgtctcaaaaaaaaaaaaaa

SEQ ID NO: 17197 - DNA, 20 bp, synthetic construct
  source 1..20: mol_type = other DNA
ctgtctcaaaaaaaaaaaaa

SEQ ID NO: 17198 - DNA, 20 bp, synthetic construct
  source 1..20: mol_type = other DNA
cctgtctcaaaaaaaaaaaa

SEQ ID NO: 17199 - DNA, 20 bp, synthetic construct
  source 1..20: mol_type = other DNA
ccctgtctcaaaaaaaaaaa

SEQ ID NO: 17200 - DNA, 20 bp, synthetic construct
  source 1..20: mol_type = other DNA
accctgtctcaaaaaaaaaa

SEQ ID NO: 17201 - DNA, 20 bp, synthetic construct
  source 1..20: mol_type = other DNA
gaccctgtctcaaaaaaaaa

SEQ ID NO: 17202 - DNA, 20 bp, synthetic construct
  source 1..20: mol_type = other DNA
agaccctgtctcaaaaaaaa

SEQ ID NO: 17203 - DNA, 20 bp, synthetic construct
  source 1..20: mol_type = other DNA
gagaccctgtctcaaaaaaa

SEQ ID NO: 17204 - DNA, 20 bp, synthetic construct
  source 1..20: mol_type = other DNA
agagaccctgtctcaaaaaa

SEQ ID NO: 17205 - DNA, 20 bp, synthetic construct
  source 1..20: mol_type = other DNA
cagagaccctgtctcaaaaa

SEQ ID NO: 17206 - DNA, 20 bp, synthetic construct
  source 1..20: mol_type = other DNA
acagagaccctgtctcaaaa

SEQ ID NO: 17207 - DNA, 20 bp, synthetic construct
  source 1..20: mol_type = other DNA
gacagagaccctgtctcaaa

SEQ ID NO: 17208 - DNA, 20 bp, synthetic construct
  source 1..20: mol_type = other DNA
tgacagagaccctgtctcaa

SEQ ID NO: 17209 - DNA, 20 bp, synthetic construct
  source 1..20: mol_type = other DNA
gtgacagagaccctgtctca

SEQ ID NO: 17210 - DNA, 20 bp, synthetic construct
  source 1..20: mol_type = other DNA
ggtgacagagaccctgtctc

SEQ ID NO: 17211 - DNA, 20 bp, synthetic construct
  source 1..20: mol_type = other DNA
tggtgacagagaccctgtct

SEQ ID NO: 17212 - DNA, 20 bp, synthetic construct
  source 1..20: mol_type = other DNA
ttggtgacagagaccctgtc

SEQ ID NO: 17213 - DNA, 20 bp, synthetic construct
  source 1..20: mol_type = other DNA
cttggtgacagagaccctgt

SEQ ID NO: 17214 - DNA, 20 bp, synthetic construct
  source 1..20: mol_type = other DNA
ccttggtgacagagaccctg

SEQ ID NO: 17215 - DNA, 20 bp, synthetic construct
  source 1..20: mol_type = other DNA
gccttggtgacagagaccct

SEQ ID NO: 17216 - DNA, 20 bp, synthetic construct
  source 1..20: mol_type = other DNA
agccttggtgacagagaccc

SEQ ID NO: 17217 - DNA, 20 bp, synthetic construct
  source 1..20: mol_type = other DNA
tagccttggtgacagagacc

SEQ ID NO: 17218 - DNA, 20 bp, synthetic construct
  source 1..20: mol_type = other DNA
ctagccttggtgacagagac

SEQ ID NO: 17219 - DNA, 20 bp, synthetic construct
  source 1..20: mol_type = other DNA
tctagccttggtgacagaga

SEQ ID NO: 17220 - DNA, 20 bp, synthetic construct
  source 1..20: mol_type = other DNA
ttctagccttggtgacagag

SEQ ID NO: 17221 - DNA, 20 bp, synthetic construct
  source 1..20: mol_type = other DNA
attctagccttggtgacaga

SEQ ID NO: 17222 - DNA, 20 bp, synthetic construct
  source 1..20: mol_type = other DNA
cattctagccttggtgacag

SEQ ID NO: 17223 - DNA, 20 bp, synthetic construct
  source 1..20: mol_type = other DNA
acattctagccttggtgaca

SEQ ID NO: 17224 - DNA, 20 bp, synthetic construct
  source 1..20: mol_type = other DNA
tacattctagccttggtgac

SEQ ID NO: 17225 - DNA, 20 bp, synthetic construct
  source 1..20: mol_type = other DNA
ctacattctagccttggtga

SEQ ID NO: 17226 - DNA, 20 bp, synthetic construct
  source 1..20: mol_type = other DNA
actacattctagccttggtg

SEQ ID NO: 17227 - DNA, 20 bp, synthetic construct
  source 1..20: mol_type = other DNA
cactacattctagccttggt

SEQ ID NO: 17228 - DNA, 20 bp, synthetic construct
  source 1..20: mol_type = other DNA
ccactacattctagccttgg

SEQ ID NO: 17229 - DNA, 20 bp, synthetic construct
  source 1..20: mol_type = other DNA
accactacattctagccttg

SEQ ID NO: 17230 - DNA, 20 bp, synthetic construct
  source 1..20: mol_type = other DNA
caccactacattctagcctt

SEQ ID NO: 17231 - DNA, 20 bp, synthetic construct
  source 1..20: mol_type = other DNA
gcaccactacattctagcct

SEQ ID NO: 17232 - DNA, 20 bp, synthetic construct
  source 1..20: mol_type = other DNA
tgcaccactacattctagcc

SEQ ID NO: 17233 - DNA, 20 bp, synthetic construct
  source 1..20: mol_type = other DNA
ctgcaccactacattctagc

SEQ ID NO: 17234 - DNA, 20 bp, synthetic construct
  source 1..20: mol_type = other DNA
actgcaccactacattctag

SEQ ID NO: 17235 - DNA, 20 bp, synthetic construct
  source 1..20: mol_type = other DNA
gactgcaccactacattcta

SEQ ID NO: 17236 - DNA, 20 bp, synthetic construct
  source 1..20: mol_type = other DNA
agactgcaccactacattct

SEQ ID NO: 17237 - DNA, 20 bp, synthetic construct
  source 1..20: mol_type = other DNA
gagactgcaccactacattc

SEQ ID NO: 17238 - DNA, 20 bp, synthetic construct
  source 1..20: mol_type = other DNA
cgagactgcaccactacatt

SEQ ID NO: 17239 - DNA, 20 bp, synthetic construct
  source 1..20: mol_type = other DNA
ccgagactgcaccactacat

SEQ ID NO: 17240 - DNA, 20 bp, synthetic construct
  source 1..20: mol_type = other DNA
gccgagactgcaccactaca

SEQ ID NO: 17241 - DNA, 20 bp, synthetic construct
  source 1..20: mol_type = other DNA
agccgagactgcaccactac

SEQ ID NO: 17242 - DNA, 20 bp, synthetic construct
  source 1..20: mol_type = other DNA
gagccgagactgcaccacta

SEQ ID NO: 17243 - DNA, 20 bp, synthetic construct
  source 1..20: mol_type = other DNA
tgagccgagactgcaccact

SEQ ID NO: 17244 - DNA, 20 bp, synthetic construct
  source 1..20: mol_type = other DNA
gtgagccgagactgcaccac

SEQ ID NO: 17245 - DNA, 20 bp, synthetic construct
  source 1..20: mol_type = other DNA
agtgagccgagactgcacca

SEQ ID NO: 17246 - DNA, 20 bp, synthetic construct
  source 1..20: mol_type = other DNA
cagtgagccgagactgcacc

SEQ ID NO: 17247 - DNA, 20 bp, synthetic construct
  source 1..20: mol_type = other DNA
gcagtgagccgagactgcac

SEQ ID NO: 17248 - DNA, 20 bp, synthetic construct
  source 1..20: mol_type = other DNA
tgcagtgagccgagactgca

SEQ ID NO: 17249 - DNA, 20 bp, synthetic construct
  source 1..20: mol_type = other DNA
ttgcagtgagccgagactgc

SEQ ID NO: 17250 - DNA, 20 bp, synthetic construct
  source 1..20: mol_type = other DNA
gttgcagtgagccgagactg

SEQ ID NO: 17251 - DNA, 20 bp, synthetic construct
  source 1..20: mol_type = other DNA
ggttgcagtgagccgagact

SEQ ID NO: 17252 - DNA, 20 bp, synthetic construct
  source 1..20: mol_type = other DNA
aggttgcagtgagccgagac

SEQ ID NO: 17253 - DNA, 20 bp, synthetic construct
  source 1..20: mol_type = other DNA
gaggttgcagtgagccgaga

SEQ ID NO: 17254 - DNA, 20 bp, synthetic construct
  source 1..20: mol_type = other DNA
agaggttgcagtgagccgag

SEQ ID NO: 17255 - DNA, 20 bp, synthetic construct
  source 1..20: mol_type = other DNA
cagaggttgcagtgagccga

SEQ ID NO: 17256 - DNA, 20 bp, synthetic construct
  source 1..20: mol_type = other DNA
acagaggttgcagtgagccg

SEQ ID NO: 17257 - DNA, 20 bp, synthetic construct
  source 1..20: mol_type = other DNA
aacagaggttgcagtgagcc

SEQ ID NO: 17258 - DNA, 20 bp, synthetic construct
  source 1..20: mol_type = other DNA
aaacagaggttgcagtgagc

SEQ ID NO: 17259 - DNA, 20 bp, synthetic construct
  source 1..20: mol_type = other DNA
gaaacagaggttgcagtgag

SEQ ID NO: 17260 - DNA, 20 bp, synthetic construct
  source 1..20: mol_type = other DNA
ggaaacagaggttgcagtga

SEQ ID NO: 17261 - DNA, 20 bp, synthetic construct
  source 1..20: mol_type = other DNA
aggaaacagaggttgcagtg

SEQ ID NO: 17262 - DNA, 20 bp, synthetic construct
  source 1..20: mol_type = other DNA
caggaaacagaggttgcagt

SEQ ID NO: 17263 - DNA, 20 bp, synthetic construct
  source 1..20: mol_type = other DNA
ccaggaaacagaggttgcag

SEQ ID NO: 17264 - DNA, 20 bp, synthetic construct
  source 1..20: mol_type = other DNA
cccaggaaacagaggttgca

SEQ ID NO: 17265 - DNA, 20 bp, synthetic construct
  source 1..20: mol_type = other DNA
gcccaggaaacagaggttgc

SEQ ID NO: 17266 - DNA, 20 bp, synthetic construct
  source 1..20: mol_type = other DNA
agcccaggaaacagaggttg

SEQ ID NO: 17267 - DNA, 20 bp, synthetic construct
  source 1..20: mol_type = other DNA
gagcccaggaaacagaggtt

SEQ ID NO: 17268 - DNA, 20 bp, synthetic construct
  source 1..20: mol_type = other DNA
tgagcccaggaaacagaggt

SEQ ID NO: 17269 - DNA, 20 bp, synthetic construct
  source 1..20: mol_type = other DNA
ttgagcccaggaaacagagg

SEQ ID NO: 17270 - DNA, 20 bp, synthetic construct
  source 1..20: mol_type = other DNA
cttgagcccaggaaacagag

SEQ ID NO: 17271 - DNA, 20 bp, synthetic construct
  source 1..20: mol_type = other DNA
gcttgagcccaggaaacaga

SEQ ID NO: 17272 - DNA, 20 bp, synthetic construct
  source 1..20: mol_type = other DNA
cgcttgagcccaggaaacag

SEQ ID NO: 17273 - DNA, 20 bp, synthetic construct
  source 1..20: mol_type = other DNA
tcgcttgagcccaggaaaca

SEQ ID NO: 17274 - DNA, 20 bp, synthetic construct
  source 1..20: mol_type = other DNA
atcgcttgagcccaggaaac

SEQ ID NO: 17275 - DNA, 20 bp, synthetic construct
  source 1..20: mol_type = other DNA
gatcgcttgagcccaggaaa

SEQ ID NO: 17276 - DNA, 20 bp, synthetic construct
  source 1..20: mol_type = other DNA
ggatcgcttgagcccaggaa

SEQ ID NO: 17277 - DNA, 20 bp, synthetic construct
  source 1..20: mol_type = other DNA
aggatcgcttgagcccagga

SEQ ID NO: 17278 - DNA, 20 bp, synthetic construct
  source 1..20: mol_type = other DNA
gaggatcgcttgagcccagg

SEQ ID NO: 17279 - DNA, 20 bp, synthetic construct
  source 1..20: mol_type = other DNA
ggaggatcgcttgagcccag

SEQ ID NO: 17280 - DNA, 20 bp, synthetic construct
  source 1..20: mol_type = other DNA
gggaggatcgcttgagccca

SEQ ID NO: 17281 - DNA, 20 bp, synthetic construct
  source 1..20: mol_type = other DNA
tgggaggatcgcttgagccc

SEQ ID NO: 17282 - DNA, 20 bp, synthetic construct
  source 1..20: mol_type = other DNA
gtgggaggatcgcttgagcc

SEQ ID NO: 17283 - DNA, 20 bp, synthetic construct
  source 1..20: mol_type = other DNA
ggtgggaggatcgcttgagc

SEQ ID NO: 17284 - DNA, 20 bp, synthetic construct
  source 1..20: mol_type = other DNA
aggtgggaggatcgcttgag

SEQ ID NO: 17285 - DNA, 20 bp, synthetic construct
  source 1..20: mol_type = other DNA
gaggtgggaggatcgcttga

SEQ ID NO: 17286 - DNA, 20 bp, synthetic construct
  source 1..20: mol_type = other DNA
tgaggtgggaggatcgcttg

SEQ ID NO: 17287 - DNA, 20 bp, synthetic construct
  source 1..20: mol_type = other DNA
ctgaggtgggaggatcgctt

SEQ ID NO: 17288 - DNA, 20 bp, synthetic construct
  source 1..20: mol_type = other DNA
gctgaggtgggaggatcgct

SEQ ID NO: 17289 - DNA, 20 bp, synthetic construct
  source 1..20: mol_type = other DNA
ggctgaggtgggaggatcgc

SEQ ID NO: 17290 - DNA, 20 bp, synthetic construct
  source 1..20: mol_type = other DNA
aggctgaggtgggaggatcg

SEQ ID NO: 17291 - DNA, 20 bp, synthetic construct
  source 1..20: mol_type = other DNA
gaggctgaggtgggaggatc

SEQ ID NO: 17292 - DNA, 20 bp, synthetic construct
  source 1..20: mol_type = other DNA
ggaggctgaggtgggaggat

SEQ ID NO: 17293 - DNA, 20 bp, synthetic construct
  source 1..20: mol_type = other DNA
aggaggctgaggtgggagga

SEQ ID NO: 17294 - DNA, 20 bp, synthetic construct
  source 1..20: mol_type = other DNA
caggaggctgaggtgggagg

SEQ ID NO: 17295 - DNA, 20 bp, synthetic construct
  source 1..20: mol_type = other DNA
tcaggaggctgaggtgggag

SEQ ID NO: 17296 - DNA, 20 bp, synthetic construct
  source 1..20: mol_type = other DNA
ctcaggaggctgaggtggga

SEQ ID NO: 17297 - DNA, 20 bp, synthetic construct
  source 1..20: mol_type = other DNA
actcaggaggctgaggtggg

SEQ ID NO: 17298 - DNA, 20 bp, synthetic construct
  source 1..20: mol_type = other DNA
tactcaggaggctgaggtgg

SEQ ID NO: 17299 - DNA, 20 bp, synthetic construct
  source 1..20: mol_type = other DNA
ctactcaggaggctgaggtg

SEQ ID NO: 17300 - DNA, 20 bp, synthetic construct
  source 1..20: mol_type = other DNA
gctactcaggaggctgaggt

SEQ ID NO: 17301 - DNA, 20 bp, synthetic construct
  source 1..20: mol_type = other DNA
agctactcaggaggctgagg

SEQ ID NO: 17302 - DNA, 20 bp, synthetic construct
  source 1..20: mol_type = other DNA
cagctactcaggaggctgag

SEQ ID NO: 17303 - DNA, 20 bp, synthetic construct
  source 1..20: mol_type = other DNA
ccagctactcaggaggctga

SEQ ID NO: 17304 - DNA, 20 bp, synthetic construct
  source 1..20: mol_type = other DNA
cccagctactcaggaggctg

SEQ ID NO: 17305 - DNA, 20 bp, synthetic construct
  source 1..20: mol_type = other DNA
tcccagctactcaggaggct

SEQ ID NO: 17306 - DNA, 20 bp, synthetic construct
  source 1..20: mol_type = other DNA
ctcccagctactcaggaggc

SEQ ID NO: 17307 - DNA, 20 bp, synthetic construct
  source 1..20: mol_type = other DNA
actcccagctactcaggagg

SEQ ID NO: 17308 - DNA, 20 bp, synthetic construct
  source 1..20: mol_type = other DNA
tactcccagctactcaggag

SEQ ID NO: 17309 - DNA, 20 bp, synthetic construct
  source 1..20: mol_type = other DNA
gtactcccagctactcagga

SEQ ID NO: 17310 - DNA, 20 bp, synthetic construct
  source 1..20: mol_type = other DNA
tgtactcccagctactcagg

SEQ ID NO: 17311 - DNA, 20 bp, synthetic construct
  source 1..20: mol_type = other DNA
ctgtactcccagctactcag

SEQ ID NO: 17312 - DNA, 20 bp, synthetic construct
  source 1..20: mol_type = other DNA
cctgtactcccagctactca

SEQ ID NO: 17313 - DNA, 20 bp, synthetic construct
  source 1..20: mol_type = other DNA
tcctgtactcccagctactc

SEQ ID NO: 17314 - DNA, 20 bp, synthetic construct
  source 1..20: mol_type = other DNA
ctcctgtactcccagctact

SEQ ID NO: 17315 - DNA, 20 bp, synthetic construct
  source 1..20: mol_type = other DNA
gctcctgtactcccagctac

SEQ ID NO: 17316 - DNA, 20 bp, synthetic construct
  source 1..20: mol_type = other DNA
tgctcctgtactcccagcta

SEQ ID NO: 17317 - DNA, 20 bp, synthetic construct
  source 1..20: mol_type = other DNA
gtgctcctgtactcccagct

SEQ ID NO: 17318 - DNA, 20 bp, synthetic construct
  source 1..20: mol_type = other DNA
cgtgctcctgtactcccagc

SEQ ID NO: 17319 - DNA, 20 bp, synthetic construct
  source 1..20: mol_type = other DNA
gcgtgctcctgtactcccag

SEQ ID NO: 17320 - DNA, 20 bp, synthetic construct
  source 1..20: mol_type = other DNA
agcgtgctcctgtactccca

SEQ ID NO: 17321 - DNA, 20 bp, synthetic construct
  source 1..20: mol_type = other DNA
tagcgtgctcctgtactccc

SEQ ID NO: 17322 - DNA, 20 bp, synthetic construct
  source 1..20: mol_type = other DNA
gtagcgtgctcctgtactcc

SEQ ID NO: 17323 - DNA, 20 bp, synthetic construct
  source 1..20: mol_type = other DNA
ggtagcgtgctcctgtactc

SEQ ID NO: 17324 - DNA, 20 bp, synthetic construct
  source 1..20: mol_type = other DNA
tggtagcgtgctcctgtact

SEQ ID NO: 17325 - DNA, 20 bp, synthetic construct
  source 1..20: mol_type = other DNA
atggtagcgtgctcctgtac

SEQ ID NO: 17326 - DNA, 20 bp, synthetic construct
  source 1..20: mol_type = other DNA
catggtagcgtgctcctgta

SEQ ID NO: 17327 - DNA, 20 bp, synthetic construct
  source 1..20: mol_type = other DNA
gcatggtagcgtgctcctgt

SEQ ID NO: 17328 - DNA, 20 bp, synthetic construct
  source 1..20: mol_type = other DNA
ggcatggtagcgtgctcctg

SEQ ID NO: 17329 - DNA, 20 bp, synthetic construct
  source 1..20: mol_type = other DNA
aggcatggtagcgtgctcct

SEQ ID NO: 17330 - DNA, 20 bp, synthetic construct
  source 1..20: mol_type = other DNA
caggcatggtagcgtgctcc

SEQ ID NO: 17331 - DNA, 20 bp, synthetic construct
  source 1..20: mol_type = other DNA
ccaggcatggtagcgtgctc

SEQ ID NO: 17332 - DNA, 20 bp, synthetic construct
  source 1..20: mol_type = other DNA
gccaggcatggtagcgtgct

SEQ ID NO: 17333 - DNA, 20 bp, synthetic construct
  source 1..20: mol_type = other DNA
agccaggcatggtagcgtgc

SEQ ID NO: 17334 - DNA, 20 bp, synthetic construct
  source 1..20: mol_type = other DNA
tagccaggcatggtagcgtg

SEQ ID NO: 17335 - DNA, 20 bp, synthetic construct
  source 1..20: mol_type = other DNA
ttagccaggcatggtagcgt

SEQ ID NO: 17336 - DNA, 20 bp, synthetic construct
  source 1..20: mol_type = other DNA
attagccaggcatggtagcg

SEQ ID NO: 17337 - DNA, 20 bp, synthetic construct
  source 1..20: mol_type = other DNA
aattagccaggcatggtagc

SEQ ID NO: 17338 - DNA, 20 bp, synthetic construct
  source 1..20: mol_type = other DNA
aaattagccaggcatggtag

SEQ ID NO: 17339 - DNA, 20 bp, synthetic construct
  source 1..20: mol_type = other DNA
aaaattagccaggcatggta

SEQ ID NO: 17340 - DNA, 20 bp, synthetic construct
  source 1..20: mol_type = other DNA
aaaaattagccaggcatggt

SEQ ID NO: 17341 - DNA, 20 bp, synthetic construct
  source 1..20: mol_type = other DNA
caaaaattagccaggcatgg

SEQ ID NO: 17342 - DNA, 20 bp, synthetic construct
  source 1..20: mol_type = other DNA
acaaaaattagccaggcatg

SEQ ID NO: 17343 - DNA, 20 bp, synthetic construct
  source 1..20: mol_type = other DNA
tacaaaaattagccaggcat

SEQ ID NO: 17344 - DNA, 20 bp, synthetic construct
  source 1..20: mol_type = other DNA
atacaaaaattagccaggca

SEQ ID NO: 17345 - DNA, 20 bp, synthetic construct
  source 1..20: mol_type = other DNA
aatacaaaaattagccaggc

SEQ ID NO: 17346 - DNA, 20 bp, synthetic construct
  source 1..20: mol_type = other DNA
aaatacaaaaattagccagg

SEQ ID NO: 17347 - DNA, 20 bp, synthetic construct
  source 1..20: mol_type = other DNA
aaaatacaaaaattagccag

SEQ ID NO: 17348 - DNA, 20 bp, synthetic construct
  source 1..20: mol_type = other DNA
aaaaatacaaaaattagcca

SEQ ID NO: 17349 - DNA, 20 bp, synthetic construct
  source 1..20: mol_type = other DNA
aaaaaatacaaaaattagcc

SEQ ID NO: 17350 - DNA, 20 bp, synthetic construct
  source 1..20: mol_type = other DNA
caaaaaatacaaaaattagc

SEQ ID NO: 17351 - DNA, 20 bp, synthetic construct
  source 1..20: mol_type = other DNA
tcaaaaaatacaaaaattag

SEQ ID NO: 17352 - DNA, 20 bp, synthetic construct
  source 1..20: mol_type = other DNA
ttcaaaaaatacaaaaatta

SEQ ID NO: 17353 - DNA, 20 bp, synthetic construct
  source 1..20: mol_type = other DNA
cttcaaaaaatacaaaaatt

SEQ ID NO: 17354 - DNA, 20 bp, synthetic construct
  source 1..20: mol_type = other DNA
tcttcaaaaaatacaaaaat

SEQ ID NO: 17355 - DNA, 20 bp, synthetic construct
  source 1..20: mol_type = other DNA
ctcttcaaaaaatacaaaaa

SEQ ID NO: 17356 - DNA, 20 bp, synthetic construct
  source 1..20: mol_type = other DNA
tctcttcaaaaaatacaaaa

SEQ ID NO: 17357 - DNA, 20 bp, synthetic construct
  source 1..20: mol_type = other DNA
atctcttcaaaaaatacaaa

SEQ ID NO: 17358 - DNA, 20 bp, synthetic construct
  source 1..20: mol_type = other DNA
catctcttcaaaaaatacaa

SEQ ID NO: 17359 - DNA, 20 bp, synthetic construct
  source 1..20: mol_type = other DNA
tcatctcttcaaaaaataca

SEQ ID NO: 17360 - DNA, 20 bp, synthetic construct
  source 1..20: mol_type = other DNA
ctcatctcttcaaaaaatac

SEQ ID NO: 17361 - DNA, 20 bp, synthetic construct
  source 1..20: mol_type = other DNA
cctcatctcttcaaaaaata

SEQ ID NO: 17362 - DNA, 20 bp, synthetic construct
  source 1..20: mol_type = other DNA
acctcatctcttcaaaaaat

SEQ ID NO: 17363 - DNA, 20 bp, synthetic construct
  source 1..20: mol_type = other DNA
aacctcatctcttcaaaaaa

SEQ ID NO: 17364 - DNA, 20 bp, synthetic construct
  source 1..20: mol_type = other DNA
aaacctcatctcttcaaaaa

SEQ ID NO: 17365 - DNA, 20 bp, synthetic construct
  source 1..20: mol_type = other DNA
aaaacctcatctcttcaaaa

SEQ ID NO: 17366 - DNA, 20 bp, synthetic construct
  source 1..20: mol_type = other DNA
caaaacctcatctcttcaaa

SEQ ID NO: 17367 - DNA, 20 bp, synthetic construct
  source 1..20: mol_type = other DNA
gcaaaacctcatctcttcaa

SEQ ID NO: 17368 - DNA, 20 bp, synthetic construct
  source 1..20: mol_type = other DNA
ggcaaaacctcatctcttca

SEQ ID NO: 17369 - DNA, 20 bp, synthetic construct
  source 1..20: mol_type = other DNA
tggcaaaacctcatctcttc

SEQ ID NO: 17370 - DNA, 20 bp, synthetic construct
  source 1..20: mol_type = other DNA
atggcaaaacctcatctctt

SEQ ID NO: 17371 - DNA, 20 bp, synthetic construct
  source 1..20: mol_type = other DNA
catggcaaaacctcatctct

SEQ ID NO: 17372 - DNA, 20 bp, synthetic construct
  source 1..20: mol_type = other DNA
acatggcaaaacctcatctc

SEQ ID NO: 17373 - DNA, 20 bp, synthetic construct
  source 1..20: mol_type = other DNA
aacatggcaaaacctcatct

SEQ ID NO: 17374 - DNA, 20 bp, synthetic construct
  source 1..20: mol_type = other DNA
caacatggcaaaacctcatc

SEQ ID NO: 17375 - DNA, 20 bp, synthetic construct
  source 1..20: mol_type = other DNA
acaacatggcaaaacctcat

SEQ ID NO: 17376 - DNA, 20 bp, synthetic construct
  source 1..20: mol_type = other DNA
aacaacatggcaaaacctca

SEQ ID NO: 17377 - DNA, 20 bp, synthetic construct
  source 1..20: mol_type = other DNA
gaacaacatggcaaaacctc

SEQ ID NO: 17378 - DNA, 20 bp, synthetic construct
  source 1..20: mol_type = other DNA
tgaacaacatggcaaaacct

SEQ ID NO: 17379 - DNA, 20 bp, synthetic construct
  source 1..20: mol_type = other DNA
ctgaacaacatggcaaaacc

SEQ ID NO: 17380 - DNA, 20 bp, synthetic construct
  source 1..20: mol_type = other DNA
cctgaacaacatggcaaaac

SEQ ID NO: 17381 - DNA, 20 bp, synthetic construct
  source 1..20: mol_type = other DNA
gcctgaacaacatggcaaaa

SEQ ID NO: 17382 - DNA, 20 bp, synthetic construct
  source 1..20: mol_type = other DNA
agcctgaacaacatggcaaa

SEQ ID NO: 17383 - DNA, 20 bp, synthetic construct
  source 1..20: mol_type = other DNA
tagcctgaacaacatggcaa

SEQ ID NO: 17384 - DNA, 20 bp, synthetic construct
  source 1..20: mol_type = other DNA
ctagcctgaacaacatggca

SEQ ID NO: 17385 - DNA, 20 bp, synthetic construct
  source 1..20: mol_type = other DNA
actagcctgaacaacatggc

SEQ ID NO: 17386 - DNA, 20 bp, synthetic construct
  source 1..20: mol_type = other DNA
gactagcctgaacaacatgg

SEQ ID NO: 17387 - DNA, 20 bp, synthetic construct
  source 1..20: mol_type = other DNA
agactagcctgaacaacatg

SEQ ID NO: 17388 - DNA, 20 bp, synthetic construct
  source 1..20: mol_type = other DNA
aagactagcctgaacaacat

SEQ ID NO: 17389 - DNA, 20 bp, synthetic construct
  source 1..20: mol_type = other DNA
caagactagcctgaacaaca

SEQ ID NO: 17390 - DNA, 20 bp, synthetic construct
  source 1..20: mol_type = other DNA
tcaagactagcctgaacaac

SEQ ID NO: 17391 - DNA, 20 bp, synthetic construct
  source 1..20: mol_type = other DNA
ttcaagactagcctgaacaa

SEQ ID NO: 17392 - DNA, 20 bp, synthetic construct
  source 1..20: mol_type = other DNA
gttcaagactagcctgaaca

SEQ ID NO: 17393 - DNA, 20 bp, synthetic construct
  source 1..20: mol_type = other DNA
agttcaagactagcctgaac

SEQ ID NO: 17394 - DNA, 20 bp, synthetic construct
  source 1..20: mol_type = other DNA
gagttcaagactagcctgaa

SEQ ID NO: 17395 - DNA, 20 bp, synthetic construct
  source 1..20: mol_type = other DNA
agagttcaagactagcctga

SEQ ID NO: 17396 - DNA, 20 bp, synthetic construct
  source 1..20: mol_type = other DNA
cagagttcaagactagcctg

SEQ ID NO: 17397 - DNA, 20 bp, synthetic construct
  source 1..20: mol_type = other DNA
ccagagttcaagactagcct

SEQ ID NO: 17398 - DNA, 20 bp, synthetic construct
  source 1..20: mol_type = other DNA
tccagagttcaagactagcc

SEQ ID NO: 17399 - DNA, 20 bp, synthetic construct
  source 1..20: mol_type = other DNA
ctccagagttcaagactagc

SEQ ID NO: 17400 - DNA, 20 bp, synthetic construct
  source 1..20: mol_type = other DNA
gctccagagttcaagactag

SEQ ID NO: 17401 - DNA, 20 bp, synthetic construct
  source 1..20: mol_type = other DNA
agctccagagttcaagacta

SEQ ID NO: 17402 - DNA, 20 bp, synthetic construct
  source 1..20: mol_type = other DNA
gagctccagagttcaagact

SEQ ID NO: 17403 - DNA, 20 bp, synthetic construct
  source 1..20: mol_type = other DNA
tgagctccagagttcaagac

SEQ ID NO: 17404 - DNA, 20 bp, synthetic construct
  source 1..20: mol_type = other DNA
ctgagctccagagttcaaga

SEQ ID NO: 17405 - DNA, 20 bp, synthetic construct
  source 1..20: mol_type = other DNA
tctgagctccagagttcaag

SEQ ID NO: 17406 - DNA, 20 bp, synthetic construct
  source 1..20: mol_type = other DNA
atctgagctccagagttcaa

SEQ ID NO: 17407 - DNA, 20 bp, synthetic construct
  source 1..20: mol_type = other DNA
catctgagctccagagttca

SEQ ID NO: 17408 - DNA, 20 bp, synthetic construct
  source 1..20: mol_type = other DNA
tcatctgagctccagagttc

SEQ ID NO: 17409 - DNA, 20 bp, synthetic construct
  source 1..20: mol_type = other DNA
atcatctgagctccagagtt

SEQ ID NO: 17410 - DNA, 20 bp, synthetic construct
  source 1..20: mol_type = other DNA
gatcatctgagctccagagt

SEQ ID NO: 17411 - DNA, 20 bp, synthetic construct
  source 1..20: mol_type = other DNA
ggatcatctgagctccagag

SEQ ID NO: 17412 - DNA, 20 bp, synthetic construct
  source 1..20: mol_type = other DNA
tggatcatctgagctccaga

SEQ ID NO: 17413 - DNA, 20 bp, synthetic construct
  source 1..20: mol_type = other DNA
gtggatcatctgagctccag

SEQ ID NO: 17414 - DNA, 20 bp, synthetic construct
  source 1..20: mol_type = other DNA
ggtggatcatctgagctcca

SEQ ID NO: 17415 - DNA, 20 bp, synthetic construct
  source 1..20: mol_type = other DNA
gggtggatcatctgagctcc

SEQ ID NO: 17416 - DNA, 20 bp, synthetic construct
  source 1..20: mol_type = other DNA
tgggtggatcatctgagctc

SEQ ID NO: 17417 - DNA, 20 bp, synthetic construct
  source 1..20: mol_type = other DNA
gtgggtggatcatctgagct

SEQ ID NO: 17418 - DNA, 20 bp, synthetic construct
  source 1..20: mol_type = other DNA
ggtgggtggatcatctgagc

SEQ ID NO: 17419 - DNA, 20 bp, synthetic construct
  source 1..20: mol_type = other DNA
aggtgggtggatcatctgag

SEQ ID NO: 17420 - DNA, 20 bp, synthetic construct
  source 1..20: mol_type = other DNA
aaggtgggtggatcatctga

SEQ ID NO: 17421 - DNA, 20 bp, synthetic construct
  source 1..20: mol_type = other DNA
caaggtgggtggatcatctg

SEQ ID NO: 17422 - DNA, 20 bp, synthetic construct
  source 1..20: mol_type = other DNA
ccaaggtgggtggatcatct

SEQ ID NO: 17423 - DNA, 20 bp, synthetic construct
  source 1..20: mol_type = other DNA
accaaggtgggtggatcatc

SEQ ID NO: 17424 - DNA, 20 bp, synthetic construct
  source 1..20: mol_type = other DNA
caccaaggtgggtggatcat

SEQ ID NO: 17425 - DNA, 20 bp, synthetic construct
  source 1..20: mol_type = other DNA
acaccaaggtgggtggatca

SEQ ID NO: 17426 - DNA, 20 bp, synthetic construct
  source 1..20: mol_type = other DNA
gacaccaaggtgggtggatc

SEQ ID NO: 17427 - DNA, 20 bp, synthetic construct
  source 1..20: mol_type = other DNA
ggacaccaaggtgggtggat

SEQ ID NO: 17428 - DNA, 20 bp, synthetic construct
  source 1..20: mol_type = other DNA
tggacaccaaggtgggtgga

SEQ ID NO: 17429 - DNA, 20 bp, synthetic construct
  source 1..20: mol_type = other DNA
ctggacaccaaggtgggtgg

SEQ ID NO: 17430 - DNA, 20 bp, synthetic construct
  source 1..20: mol_type = other DNA
tctggacaccaaggtgggtg

SEQ ID NO: 17431 - DNA, 20 bp, synthetic construct
  source 1..20: mol_type = other DNA
ttctggacaccaaggtgggt

SEQ ID NO: 17432 - DNA, 20 bp, synthetic construct
  source 1..20: mol_type = other DNA
tttctggacaccaaggtggg

SEQ ID NO: 17433 - DNA, 20 bp, synthetic construct
  source 1..20: mol_type = other DNA
atttctggacaccaaggtgg

SEQ ID NO: 17434 - DNA, 20 bp, synthetic construct
  source 1..20: mol_type = other DNA
catttctggacaccaaggtg

SEQ ID NO: 17435 - DNA, 20 bp, synthetic construct
  source 1..20: mol_type = other DNA
gcatttctggacaccaaggt

SEQ ID NO: 17436 - DNA, 20 bp, synthetic construct
  source 1..20: mol_type = other DNA
agcatttctggacaccaagg

SEQ ID NO: 17437 - DNA, 20 bp, synthetic construct
  source 1..20: mol_type = other DNA
cagcatttctggacaccaag

SEQ ID NO: 17438 - DNA, 20 bp, synthetic construct
  source 1..20: mol_type = other DNA
ccagcatttctggacaccaa

SEQ ID NO: 17439 - DNA, 20 bp, synthetic construct
  source 1..20: mol_type = other DNA
cccagcatttctggacacca

SEQ ID NO: 17440 - DNA, 20 bp, synthetic construct
  source 1..20: mol_type = other DNA
tcccagcatttctggacacc

SEQ ID NO: 17441 - DNA, 20 bp, synthetic construct
  source 1..20: mol_type = other DNA
atcccagcatttctggacac

SEQ ID NO: 17442 - DNA, 20 bp, synthetic construct
  source 1..20: mol_type = other DNA
aatcccagcatttctggaca

SEQ ID NO: 17443 - DNA, 20 bp, synthetic construct
  source 1..20: mol_type = other DNA
taatcccagcatttctggac

SEQ ID NO: 17444 - DNA, 20 bp, synthetic construct
  source 1..20: mol_type = other DNA
gtaatcccagcatttctgga

SEQ ID NO: 17445 - DNA, 20 bp, synthetic construct
  source 1..20: mol_type = other DNA
tgtaatcccagcatttctgg

SEQ ID NO: 17446 - DNA, 20 bp, synthetic construct
  source 1..20: mol_type = other DNA
ctgtaatcccagcatttctg

SEQ ID NO: 17447 - DNA, 20 bp, synthetic construct
  source 1..20: mol_type = other DNA
cctgtaatcccagcatttct

SEQ ID NO: 17448 - DNA, 20 bp, synthetic construct
  source 1..20: mol_type = other DNA
ccctgtaatcccagcatttc

SEQ ID NO: 17449 - DNA, 20 bp, synthetic construct
  source 1..20: mol_type = other DNA
tccctgtaatcccagcattt

SEQ ID NO: 17450 - DNA, 20 bp, synthetic construct
  source 1..20: mol_type = other DNA
atccctgtaatcccagcatt

SEQ ID NO: 17451 - DNA, 20 bp, synthetic construct
  source 1..20: mol_type = other DNA
catccctgtaatcccagcat

SEQ ID NO: 17452 - DNA, 20 bp, synthetic construct
  source 1..20: mol_type = other DNA
tcatccctgtaatcccagca

SEQ ID NO: 17453 - DNA, 20 bp, synthetic construct
  source 1..20: mol_type = other DNA
ctcatccctgtaatcccagc

SEQ ID NO: 17454 - DNA, 20 bp, synthetic construct
  source 1..20: mol_type = other DNA
gctcatccctgtaatcccag

SEQ ID NO: 17455 - DNA, 20 bp, synthetic construct
  source 1..20: mol_type = other DNA
ggctcatccctgtaatccca

SEQ ID NO: 17456 - DNA, 20 bp, synthetic construct
  source 1..20: mol_type = other DNA
tggctcatccctgtaatccc

SEQ ID NO: 17457 - DNA, 20 bp, synthetic construct
  source 1..20: mol_type = other DNA
gtggctcatccctgtaatcc

SEQ ID NO: 17458 - DNA, 20 bp, synthetic construct
  source 1..20: mol_type = other DNA
ggtggctcatccctgtaatc

SEQ ID NO: 17459 - DNA, 20 bp, synthetic construct
  source 1..20: mol_type = other DNA
cggtggctcatccctgtaat

SEQ ID NO: 17460 - DNA, 20 bp, synthetic construct
  source 1..20: mol_type = other DNA
acggtggctcatccctgtaa

SEQ ID NO: 17461 - DNA, 20 bp, synthetic construct
  source 1..20: mol_type = other DNA
cacggtggctcatccctgta

SEQ ID NO: 17462 - DNA, 20 bp, synthetic construct
  source 1..20: mol_type = other DNA
gcacggtggctcatccctgt

SEQ ID NO: 17463 - DNA, 20 bp, synthetic construct
  source 1..20: mol_type = other DNA
ggcacggtggctcatccctg

SEQ ID NO: 17464 - DNA, 20 bp, synthetic construct
  source 1..20: mol_type = other DNA
aggcacggtggctcatccct

SEQ ID NO: 17465 - DNA, 20 bp, synthetic construct
  source 1..20: mol_type = other DNA
taggcacggtggctcatccc

SEQ ID NO: 17466 - DNA, 20 bp, synthetic construct
  source 1..20: mol_type = other DNA
ctaggcacggtggctcatcc

SEQ ID NO: 17467 - DNA, 20 bp, synthetic construct
  source 1..20: mol_type = other DNA
gctaggcacggtggctcatc

SEQ ID NO: 17468 - DNA, 20 bp, synthetic construct
  source 1..20: mol_type = other DNA
ggctaggcacggtggctcat

SEQ ID NO: 17469 - DNA, 20 bp, synthetic construct
  source 1..20: mol_type = other DNA
tggctaggcacggtggctca

SEQ ID NO: 17470 - DNA, 20 bp, synthetic construct
  source 1..20: mol_type = other DNA
ttggctaggcacggtggctc

SEQ ID NO: 17471 - DNA, 20 bp, synthetic construct
  source 1..20: mol_type = other DNA
tttggctaggcacggtggct

SEQ ID NO: 17472 - DNA, 20 bp, synthetic construct
  source 1..20: mol_type = other DNA
ttttggctaggcacggtggc

SEQ ID NO: 17473 - DNA, 20 bp, synthetic construct
  source 1..20: mol_type = other DNA
tttttggctaggcacggtgg

SEQ ID NO: 17474 - DNA, 20 bp, synthetic construct
  source 1..20: mol_type = other DNA
atttttggctaggcacggtg

SEQ ID NO: 17475 - DNA, 20 bp, synthetic construct
  source 1..20: mol_type = other DNA
aatttttggctaggcacggt

SEQ ID NO: 17476 - DNA, 20 bp, synthetic construct
  source 1..20: mol_type = other DNA
aaatttttggctaggcacgg

SEQ ID NO: 17477 - DNA, 20 bp, synthetic construct
  source 1..20: mol_type = other DNA
aaaatttttggctaggcacg

SEQ ID NO: 17478 - DNA, 20 bp, synthetic construct
  source 1..20: mol_type = other DNA
aaaaatttttggctaggcac

SEQ ID NO: 17479 - DNA, 20 bp, synthetic construct
  source 1..20: mol_type = other DNA
aaaaaatttttggctaggca

SEQ ID NO: 17480 - DNA, 20 bp, synthetic construct
  source 1..20: mol_type = other DNA
aaaaaaatttttggctaggc

SEQ ID NO: 17481 - DNA, 20 bp, synthetic construct
  source 1..20: mol_type = other DNA
aaaaaaaatttttggctagg

SEQ ID NO: 17482 - DNA, 20 bp, synthetic construct
  source 1..20: mol_type = other DNA
aaaaaaaaatttttggctag

SEQ ID NO: 17483 - DNA, 20 bp, synthetic construct
  source 1..20: mol_type = other DNA
taaaaaaaaatttttggcta

SEQ ID NO: 17484 - DNA, 20 bp, synthetic construct
  source 1..20: mol_type = other DNA
ttaaaaaaaaatttttggct

SEQ ID NO: 17485 - DNA, 20 bp, synthetic construct
  source 1..20: mol_type = other DNA
cttaaaaaaaaatttttggc

SEQ ID NO: 17486 - DNA, 20 bp, synthetic construct
  source 1..20: mol_type = other DNA
acttaaaaaaaaatttttgg

SEQ ID NO: 17487 - DNA, 20 bp, synthetic construct
  source 1..20: mol_type = other DNA
tacttaaaaaaaaatttttg

SEQ ID NO: 17488 - DNA, 20 bp, synthetic construct
  source 1..20: mol_type = other DNA
ttacttaaaaaaaaattttt

SEQ ID NO: 17489 - DNA, 20 bp, synthetic construct
  source 1..20: mol_type = other DNA
attacttaaaaaaaaatttt

SEQ ID NO: 17490 - DNA, 20 bp, synthetic construct
  source 1..20: mol_type = other DNA
aattacttaaaaaaaaattt

SEQ ID NO: 17491 - DNA, 20 bp, synthetic construct
  source 1..20: mol_type = other DNA
aaattacttaaaaaaaaatt

SEQ ID NO: 17492 - DNA, 20 bp, synthetic construct
  source 1..20: mol_type = other DNA
aaaattacttaaaaaaaaat

SEQ ID NO: 17493 - DNA, 20 bp, synthetic construct
  source 1..20: mol_type = other DNA
aaaaattacttaaaaaaaaa

SEQ ID NO: 17494 - DNA, 20 bp, synthetic construct
  source 1..20: mol_type = other DNA
aaaaaattacttaaaaaaaa

SEQ ID NO: 17495 - DNA, 20 bp, synthetic construct
  source 1..20: mol_type = other DNA
taaaaaattacttaaaaaaa

SEQ ID NO: 17496 - DNA, 20 bp, synthetic construct
  source 1..20: mol_type = other DNA
ataaaaaattacttaaaaaa

SEQ ID NO: 17497 - DNA, 20 bp, synthetic construct
  source 1..20: mol_type = other DNA
aataaaaaattacttaaaaa

SEQ ID NO: 17498 - DNA, 20 bp, synthetic construct
  source 1..20: mol_type = other DNA
caataaaaaattacttaaaa

SEQ ID NO: 17499 - DNA, 20 bp, synthetic construct
  source 1..20: mol_type = other DNA
tcaataaaaaattacttaaa

SEQ ID NO: 17500 - DNA, 20 bp, synthetic construct
  source 1..20: mol_type = other DNA
atcaataaaaaattacttaa

SEQ ID NO: 17501 - DNA, 20 bp, synthetic construct
  source 1..20: mol_type = other DNA
tatcaataaaaaattactta

SEQ ID NO: 17502 - DNA, 20 bp, synthetic construct
  source 1..20: mol_type = other DNA
atatcaataaaaaattactt

SEQ ID NO: 17503 - DNA, 20 bp, synthetic construct
  source 1..20: mol_type = other DNA
tatatcaataaaaaattact

SEQ ID NO: 17504 - DNA, 20 bp, synthetic construct
  source 1..20: mol_type = other DNA
ctatatcaataaaaaattac

SEQ ID NO: 17505 - DNA, 20 bp, synthetic construct
  source 1..20: mol_type = other DNA
actatatcaataaaaaatta

SEQ ID NO: 17506 - DNA, 20 bp, synthetic construct
  source 1..20: mol_type = other DNA
gactatatcaataaaaaatt

SEQ ID NO: 17507 - DNA, 20 bp, synthetic construct
  source 1..20: mol_type = other DNA
tgactatatcaataaaaaat

SEQ ID NO: 17508 - DNA, 20 bp, synthetic construct
  source 1..20: mol_type = other DNA
ttgactatatcaataaaaaa

SEQ ID NO: 17509 - DNA, 20 bp, synthetic construct
  source 1..20: mol_type = other DNA
tttgactatatcaataaaaa

SEQ ID NO: 17510 - DNA, 20 bp, synthetic construct
  source 1..20: mol_type = other DNA
ttttgactatatcaataaaa

SEQ ID NO: 17511 - DNA, 20 bp, synthetic construct
  source 1..20: mol_type = other DNA
tttttgactatatcaataaa

SEQ ID NO: 17512 - DNA, 20 bp, synthetic construct
  source 1..20: mol_type = other DNA
ttttttgactatatcaataa

SEQ ID NO: 17513 - DNA, 20 bp, synthetic construct
  source 1..20: mol_type = other DNA
cttttttgactatatcaata

SEQ ID NO: 17514 - DNA, 20 bp, synthetic construct
  source 1..20: mol_type = other DNA
acttttttgactatatcaat

SEQ ID NO: 17515 - DNA, 20 bp, synthetic construct
  source 1..20: mol_type = other DNA
aacttttttgactatatcaa

SEQ ID NO: 17516 - DNA, 20 bp, synthetic construct
  source 1..20: mol_type = other DNA
taacttttttgactatatca

SEQ ID NO: 17517 - DNA, 20 bp, synthetic construct
  source 1..20: mol_type = other DNA
gtaacttttttgactatatc

SEQ ID NO: 17518 - DNA, 20 bp, synthetic construct
  source 1..20: mol_type = other DNA
agtaacttttttgactatat

SEQ ID NO: 17519 - DNA, 20 bp, synthetic construct
  source 1..20: mol_type = other DNA
cagtaacttttttgactata

SEQ ID NO: 17520 - DNA, 20 bp, synthetic construct
  source 1..20: mol_type = other DNA
gcagtaacttttttgactat

SEQ ID NO: 17521 - DNA, 20 bp, synthetic construct
  source 1..20: mol_type = other DNA
agcagtaacttttttgacta

SEQ ID NO: 17522 - DNA, 20 bp, synthetic construct
  source 1..20: mol_type = other DNA
aagcagtaacttttttgact

SEQ ID NO: 17523 - DNA, 20 bp, synthetic construct
  source 1..20: mol_type = other DNA
aaagcagtaacttttttgac

SEQ ID NO: 17524 - DNA, 20 bp, synthetic construct
  source 1..20: mol_type = other DNA
taaagcagtaacttttttga

SEQ ID NO: 17525 - DNA, 20 bp, synthetic construct
  source 1..20: mol_type = other DNA
ctaaagcagtaacttttttg

SEQ ID NO: 17526 - DNA, 20 bp, synthetic construct
  source 1..20: mol_type = other DNA
tctaaagcagtaactttttt

SEQ ID NO: 17527 - DNA, 20 bp, synthetic construct
  source 1..20: mol_type = other DNA
ctctaaagcagtaacttttt

SEQ ID NO: 17528 - DNA, 20 bp, synthetic construct
  source 1..20: mol_type = other DNA
gctctaaagcagtaactttt

SEQ ID NO: 17529 - DNA, 20 bp, synthetic construct
  source 1..20: mol_type = other DNA
ggctctaaagcagtaacttt

SEQ ID NO: 17530 - DNA, 20 bp, synthetic construct
  source 1..20: mol_type = other DNA
tggctctaaagcagtaactt

SEQ ID NO: 17531 - DNA, 20 bp, synthetic construct
  source 1..20: mol_type = other DNA
ctggctctaaagcagtaact

SEQ ID NO: 17532 - DNA, 20 bp, synthetic construct
  source 1..20: mol_type = other DNA
tctggctctaaagcagtaac

SEQ ID NO: 17533 - DNA, 20 bp, synthetic construct
  source 1..20: mol_type = other DNA
ctctggctctaaagcagtaa

SEQ ID NO: 17534 - DNA, 20 bp, synthetic construct
  source 1..20: mol_type = other DNA
tctctggctctaaagcagta

SEQ ID NO: 17535 - DNA, 20 bp, synthetic construct
  source 1..20: mol_type = other DNA
ttctctggctctaaagcagt

SEQ ID NO: 17536 - DNA, 20 bp, synthetic construct
  source 1..20: mol_type = other DNA
tttctctggctctaaagcag

SEQ ID NO: 17537 - DNA, 20 bp, synthetic construct
  source 1..20: mol_type = other DNA
gtttctctggctctaaagca

SEQ ID NO: 17538 - DNA, 20 bp, synthetic construct
  source 1..20: mol_type = other DNA
cgtttctctggctctaaagc

SEQ ID NO: 17539 - DNA, 20 bp, synthetic construct
  source 1..20: mol_type = other DNA
gcgtttctctggctctaaag

SEQ ID NO: 17540 - DNA, 20 bp, synthetic construct
  source 1..20: mol_type = other DNA
tgcgtttctctggctctaaa

SEQ ID NO: 17541 - DNA, 20 bp, synthetic construct
  source 1..20: mol_type = other DNA
ctgcgtttctctggctctaa

SEQ ID NO: 17542 - DNA, 20 bp, synthetic construct
  source 1..20: mol_type = other DNA
actgcgtttctctggctcta

SEQ ID NO: 17543 - DNA, 20 bp, synthetic construct
  source 1..20: mol_type = other DNA
tactgcgtttctctggctct

SEQ ID NO: 17544 - DNA, 20 bp, synthetic construct
  source 1..20: mol_type = other DNA
ttactgcgtttctctggctc

SEQ ID NO: 17545 - DNA, 20 bp, synthetic construct
  source 1..20: mol_type = other DNA
tttactgcgtttctctggct

SEQ ID NO: 17546 - DNA, 20 bp, synthetic construct
  source 1..20: mol_type = other DNA
ttttactgcgtttctctggc

SEQ ID NO: 17547 - DNA, 20 bp, synthetic construct
  source 1..20: mol_type = other DNA
cttttactgcgtttctctgg

SEQ ID NO: 17548 - DNA, 20 bp, synthetic construct
  source 1..20: mol_type = other DNA
ccttttactgcgtttctctg

SEQ ID NO: 17549 - DNA, 20 bp, synthetic construct
  source 1..20: mol_type = other DNA
tccttttactgcgtttctct

SEQ ID NO: 17550 - DNA, 20 bp, synthetic construct
  source 1..20: mol_type = other DNA
atccttttactgcgtttctc

SEQ ID NO: 17551 - DNA, 20 bp, synthetic construct
  source 1..20: mol_type = other DNA
aatccttttactgcgtttct

SEQ ID NO: 17552 - DNA, 20 bp, synthetic construct
  source 1..20: mol_type = other DNA
caatccttttactgcgtttc

SEQ ID NO: 17553 - DNA, 20 bp, synthetic construct
  source 1..20: mol_type = other DNA
tcaatccttttactgcgttt

SEQ ID NO: 17554 - DNA, 20 bp, synthetic construct
  source 1..20: mol_type = other DNA
ctcaatccttttactgcgtt

SEQ ID NO: 17555 - DNA, 20 bp, synthetic construct
  source 1..20: mol_type = other DNA
tctcaatccttttactgcgt

SEQ ID NO: 17556 - DNA, 20 bp, synthetic construct
  source 1..20: mol_type = other DNA
ttctcaatccttttactgcg

SEQ ID NO: 17557 - DNA, 20 bp, synthetic construct
  source 1..20: mol_type = other DNA
tttctcaatccttttactgc

SEQ ID NO: 17558 - DNA, 20 bp, synthetic construct
  source 1..20: mol_type = other DNA
ctttctcaatccttttactg

SEQ ID NO: 17559 - DNA, 20 bp, synthetic construct
  source 1..20: mol_type = other DNA
tctttctcaatccttttact

SEQ ID NO: 17560 - DNA, 20 bp, synthetic construct
  source 1..20: mol_type = other DNA
ctctttctcaatccttttac

SEQ ID NO: 17561 - DNA, 20 bp, synthetic construct
  source 1..20: mol_type = other DNA
actctttctcaatcctttta

SEQ ID NO: 17562 - DNA, 20 bp, synthetic construct
  source 1..20: mol_type = other DNA
aactctttctcaatcctttt

SEQ ID NO: 17563 - DNA, 20 bp, synthetic construct
  source 1..20: mol_type = other DNA
aaactctttctcaatccttt

SEQ ID NO: 17564 - DNA, 20 bp, synthetic construct
  source 1..20: mol_type = other DNA
aaaactctttctcaatcctt

SEQ ID NO: 17565 - DNA, 20 bp, synthetic construct
  source 1..20: mol_type = other DNA
caaaactctttctcaatcct

SEQ ID NO: 17566 - DNA, 20 bp, synthetic construct
  source 1..20: mol_type = other DNA
tcaaaactctttctcaatcc

SEQ ID NO: 17567 - DNA, 20 bp, synthetic construct
  source 1..20: mol_type = other DNA
ctcaaaactctttctcaatc

SEQ ID NO: 17568 - DNA, 20 bp, synthetic construct
  source 1..20: mol_type = other DNA
cctcaaaactctttctcaat

SEQ ID NO: 17569 - DNA, 20 bp, synthetic construct
  source 1..20: mol_type = other DNA
acctcaaaactctttctcaa

SEQ ID NO: 17570 - DNA, 20 bp, synthetic construct
  source 1..20: mol_type = other DNA
aacctcaaaactctttctca

SEQ ID NO: 17571 - DNA, 20 bp, synthetic construct
  source 1..20: mol_type = other DNA
taacctcaaaactctttctc

SEQ ID NO: 17572 - DNA, 20 bp, synthetic construct
  source 1..20: mol_type = other DNA
ataacctcaaaactctttct

SEQ ID NO: 17573 - DNA, 20 bp, synthetic construct
  source 1..20: mol_type = other DNA
tataacctcaaaactctttc

SEQ ID NO: 17574 - DNA, 20 bp, synthetic construct
  source 1..20: mol_type = other DNA
atataacctcaaaactcttt

SEQ ID NO: 17575 - DNA, 20 bp, synthetic construct
  source 1..20: mol_type = other DNA
gatataacctcaaaactctt

SEQ ID NO: 17576 - DNA, 20 bp, synthetic construct
  source 1..20: mol_type = other DNA
agatataacctcaaaactct

SEQ ID NO: 17577 - DNA, 20 bp, synthetic construct
  source 1..20: mol_type = other DNA
tagatataacctcaaaactc

SEQ ID NO: 17578 - DNA, 20 bp, synthetic construct
  source 1..20: mol_type = other DNA
ttagatataacctcaaaact

SEQ ID NO: 17579 - DNA, 20 bp, synthetic construct
  source 1..20: mol_type = other DNA
cttagatataacctcaaaac

SEQ ID NO: 17580 - DNA, 20 bp, synthetic construct
  source 1..20: mol_type = other DNA
gcttagatataacctcaaaa

SEQ ID NO: 17581 - DNA, 20 bp, synthetic construct
  source 1..20: mol_type = other DNA
agcttagatataacctcaaa

SEQ ID NO: 17582 - DNA, 20 bp, synthetic construct
  source 1..20: mol_type = other DNA
tagcttagatataacctcaa

SEQ ID NO: 17583 - DNA, 20 bp, synthetic construct
  source 1..20: mol_type = other DNA
ctagcttagatataacctca

SEQ ID NO: 17584 - DNA, 20 bp, synthetic construct
  source 1..20: mol_type = other DNA
cctagcttagatataacctc

SEQ ID NO: 17585 - DNA, 20 bp, synthetic construct
  source 1..20: mol_type = other DNA
ccctagcttagatataacct

SEQ ID NO: 17586 - DNA, 20 bp, synthetic construct
  source 1..20: mol_type = other DNA
accctagcttagatataacc

SEQ ID NO: 17587 - DNA, 20 bp, synthetic construct
  source 1..20: mol_type = other DNA
aaccctagcttagatataac

SEQ ID NO: 17588 - DNA, 20 bp, synthetic construct
  source 1..20: mol_type = other DNA
caaccctagcttagatataa

SEQ ID NO: 17589 - DNA, 20 bp, synthetic construct
  source 1..20: mol_type = other DNA
acaaccctagcttagatata

SEQ ID NO: 17590 - DNA, 20 bp, synthetic construct
  source 1..20: mol_type = other DNA
gacaaccctagcttagatat

SEQ ID NO: 17591 - DNA, 20 bp, synthetic construct
  source 1..20: mol_type = other DNA
tgacaaccctagcttagata

SEQ ID NO: 17592 - DNA, 20 bp, synthetic construct
  source 1..20: mol_type = other DNA
ctgacaaccctagcttagat

SEQ ID NO: 17593 - DNA, 20 bp, synthetic construct
  source 1..20: mol_type = other DNA
tctgacaaccctagcttaga

SEQ ID NO: 17594 - DNA, 20 bp, synthetic construct
  source 1..20: mol_type = other DNA
atctgacaaccctagcttag

SEQ ID NO: 17595 - DNA, 20 bp, synthetic construct
  source 1..20: mol_type = other DNA
aatctgacaaccctagctta

SEQ ID NO: 17596 - DNA, 20 bp, synthetic construct
  source 1..20: mol_type = other DNA
aaatctgacaaccctagctt

SEQ ID NO: 17597 - DNA, 20 bp, synthetic construct
  source 1..20: mol_type = other DNA
caaatctgacaaccctagct

SEQ ID NO: 17598 - DNA, 20 bp, synthetic construct
  source 1..20: mol_type = other DNA
ccaaatctgacaaccctagc

SEQ ID NO: 17599 - DNA, 20 bp, synthetic construct
  source 1..20: mol_type = other DNA
gccaaatctgacaaccctag

SEQ ID NO: 17600 - DNA, 20 bp, synthetic construct
  source 1..20: mol_type = other DNA
tgccaaatctgacaacccta

SEQ ID NO: 17601 - DNA, 20 bp, synthetic construct
  source 1..20: mol_type = other DNA
ttgccaaatctgacaaccct

SEQ ID NO: 17602 - DNA, 20 bp, synthetic construct
  source 1..20: mol_type = other DNA
tttgccaaatctgacaaccc

SEQ ID NO: 17603 - DNA, 20 bp, synthetic construct
  source 1..20: mol_type = other DNA
atttgccaaatctgacaacc

SEQ ID NO: 17604 - DNA, 20 bp, synthetic construct
  source 1..20: mol_type = other DNA
tatttgccaaatctgacaac

SEQ ID NO: 17605 - DNA, 20 bp, synthetic construct
  source 1..20: mol_type = other DNA
ctatttgccaaatctgacaa

SEQ ID NO: 17606 - DNA, 20 bp, synthetic construct
  source 1..20: mol_type = other DNA
tctatttgccaaatctgaca

SEQ ID NO: 17607 - DNA, 20 bp, synthetic construct
  source 1..20: mol_type = other DNA
ttctatttgccaaatctgac

SEQ ID NO: 17608 - DNA, 20 bp, synthetic construct
  source 1..20: mol_type = other DNA
tttctatttgccaaatctga

SEQ ID NO: 17609 - DNA, 20 bp, synthetic construct
  source 1..20: mol_type = other DNA
atttctatttgccaaatctg

SEQ ID NO: 17610 - DNA, 20 bp, synthetic construct
  source 1..20: mol_type = other DNA
tatttctatttgccaaatct

SEQ ID NO: 17611 - DNA, 20 bp, synthetic construct
  source 1..20: mol_type = other DNA
gtatttctatttgccaaatc

SEQ ID NO: 17612 - DNA, 20 bp, synthetic construct
  source 1..20: mol_type = other DNA
tgtatttctatttgccaaat

SEQ ID NO: 17613 - DNA, 20 bp, synthetic construct
  source 1..20: mol_type = other DNA
ctgtatttctatttgccaaa

SEQ ID NO: 17614 - DNA, 20 bp, synthetic construct
  source 1..20: mol_type = other DNA
cctgtatttctatttgccaa

SEQ ID NO: 17615 - DNA, 20 bp, synthetic construct
  source 1..20: mol_type = other DNA
tcctgtatttctatttgcca

SEQ ID NO: 17616 - DNA, 20 bp, synthetic construct
  source 1..20: mol_type = other DNA
gtcctgtatttctatttgcc

SEQ ID NO: 17617 - DNA, 20 bp, synthetic construct
  source 1..20: mol_type = other DNA
tgtcctgtatttctatttgc

SEQ ID NO: 17618 - DNA, 20 bp, synthetic construct
  source 1..20: mol_type = other DNA
gtgtcctgtatttctatttg

SEQ ID NO: 17619 - DNA, 20 bp, synthetic construct
  source 1..20: mol_type = other DNA
agtgtcctgtatttctattt

SEQ ID NO: 17620 - DNA, 20 bp, synthetic construct
  source 1..20: mol_type = other DNA
gagtgtcctgtatttctatt

SEQ ID NO: 17621 - DNA, 20 bp, synthetic construct
  source 1..20: mol_type = other DNA
tgagtgtcctgtatttctat

SEQ ID NO: 17622 - DNA, 20 bp, synthetic construct
  source 1..20: mol_type = other DNA
ctgagtgtcctgtatttcta

SEQ ID NO: 17623 - DNA, 20 bp, synthetic construct
  source 1..20: mol_type = other DNA
actgagtgtcctgtatttct

SEQ ID NO: 17624 - DNA, 20 bp, synthetic construct
  source 1..20: mol_type = other DNA
aactgagtgtcctgtatttc

SEQ ID NO: 17625 - DNA, 20 bp, synthetic construct
  source 1..20: mol_type = other DNA
taactgagtgtcctgtattt

SEQ ID NO: 17626 - DNA, 20 bp, synthetic construct
  source 1..20: mol_type = other DNA
ttaactgagtgtcctgtatt

SEQ ID NO: 17627 - DNA, 20 bp, synthetic construct
  source 1..20: mol_type = other DNA
tttaactgagtgtcctgtat

SEQ ID NO: 17628 - DNA, 20 bp, synthetic construct
  source 1..20: mol_type = other DNA
atttaactgagtgtcctgta

SEQ ID NO: 17629 - DNA, 20 bp, synthetic construct
  source 1..20: mol_type = other DNA
aatttaactgagtgtcctgt

SEQ ID NO: 17630 - DNA, 20 bp, synthetic construct
  source 1..20: mol_type = other DNA
aaatttaactgagtgtcctg

SEQ ID NO: 17631 - DNA, 20 bp, synthetic construct
  source 1..20: mol_type = other DNA
caaatttaactgagtgtcct

SEQ ID NO: 17632 - DNA, 20 bp, synthetic construct
  source 1..20: mol_type = other DNA
tcaaatttaactgagtgtcc

SEQ ID NO: 17633 - DNA, 20 bp, synthetic construct
  source 1..20: mol_type = other DNA
ttcaaatttaactgagtgtc

SEQ ID NO: 17634 - DNA, 20 bp, synthetic construct
  source 1..20: mol_type = other DNA
attcaaatttaactgagtgt

SEQ ID NO: 17635 - DNA, 20 bp, synthetic construct
  source 1..20: mol_type = other DNA
aattcaaatttaactgagtg

SEQ ID NO: 17636 - DNA, 20 bp, synthetic construct
  source 1..20: mol_type = other DNA
aaattcaaatttaactgagt

SEQ ID NO: 17637 - DNA, 20 bp, synthetic construct
  source 1..20: mol_type = other DNA
aaaattcaaatttaactgag

SEQ ID NO: 17638 - DNA, 20 bp, synthetic construct
  source 1..20: mol_type = other DNA
aaaaattcaaatttaactga

SEQ ID NO: 17639 - DNA, 20 bp, synthetic construct
  source 1..20: mol_type = other DNA
caaaaattcaaatttaactg

SEQ ID NO: 17640 - DNA, 20 bp, synthetic construct
  source 1..20: mol_type = other DNA
tcaaaaattcaaatttaact

SEQ ID NO: 17641 - DNA, 20 bp, synthetic construct
  source 1..20: mol_type = other DNA
atcaaaaattcaaatttaac

SEQ ID NO: 17642 - DNA, 20 bp, synthetic construct
  source 1..20: mol_type = other DNA
catcaaaaattcaaatttaa

SEQ ID NO: 17643 - DNA, 20 bp, synthetic construct
  source 1..20: mol_type = other DNA
tcatcaaaaattcaaattta

SEQ ID NO: 17644 - DNA, 20 bp, synthetic construct
  source 1..20: mol_type = other DNA
ttcatcaaaaattcaaattt

SEQ ID NO: 17645 - DNA, 20 bp, synthetic construct
  source 1..20: mol_type = other DNA
gttcatcaaaaattcaaatt

SEQ ID NO: 17646 - DNA, 20 bp, synthetic construct
  source 1..20: mol_type = other DNA
tgttcatcaaaaattcaaat

SEQ ID NO: 17647 - DNA, 20 bp, synthetic construct
  source 1..20: mol_type = other DNA
atgttcatcaaaaattcaaa

SEQ ID NO: 17648 - DNA, 20 bp, synthetic construct
  source 1..20: mol_type = other DNA
aatgttcatcaaaaattcaa

SEQ ID NO: 17649 - DNA, 20 bp, synthetic construct
  source 1..20: mol_type = other DNA
caatgttcatcaaaaattca

SEQ ID NO: 17650 - DNA, 20 bp, synthetic construct
  source 1..20: mol_type = other DNA
tcaatgttcatcaaaaattc

SEQ ID NO: 17651 - DNA, 20 bp, synthetic construct
  source 1..20: mol_type = other DNA
gtcaatgttcatcaaaaatt

SEQ ID NO: 17652 - DNA, 20 bp, synthetic construct
  source 1..20: mol_type = other DNA
ggtcaatgttcatcaaaaat

SEQ ID NO: 17653 - DNA, 20 bp, synthetic construct
  source 1..20: mol_type = other DNA
tggtcaatgttcatcaaaaa

SEQ ID NO: 17654 - DNA, 20 bp, synthetic construct
  source 1..20: mol_type = other DNA
ctggtcaatgttcatcaaaa

SEQ ID NO: 17655 - DNA, 20 bp, synthetic construct
  source 1..20: mol_type = other DNA
actggtcaatgttcatcaaa

SEQ ID NO: 17656 - DNA, 20 bp, synthetic construct
  source 1..20: mol_type = other DNA
aactggtcaatgttcatcaa

SEQ ID NO: 17657 - DNA, 20 bp, synthetic construct
  source 1..20: mol_type = other DNA
aaactggtcaatgttcatca

SEQ ID NO: 17658 - DNA, 20 bp, synthetic construct
  source 1..20: mol_type = other DNA
aaaactggtcaatgttcatc

SEQ ID NO: 17659 - DNA, 20 bp, synthetic construct
  source 1..20: mol_type = other DNA
aaaaactggtcaatgttcat

SEQ ID NO: 17660 - DNA, 20 bp, synthetic construct
  source 1..20: mol_type = other DNA
aaaaaactggtcaatgttca

SEQ ID NO: 17661 - DNA, 20 bp, synthetic construct
  source 1..20: mol_type = other DNA
taaaaaactggtcaatgttc

SEQ ID NO: 17662 - DNA, 20 bp, synthetic construct
  source 1..20: mol_type = other DNA
ctaaaaaactggtcaatgtt

SEQ ID NO: 17663 - DNA, 20 bp, synthetic construct
  source 1..20: mol_type = other DNA
actaaaaaactggtcaatgt

SEQ ID NO: 17664 - DNA, 20 bp, synthetic construct
  source 1..20: mol_type = other DNA
tactaaaaaactggtcaatg

SEQ ID NO: 17665 - DNA, 20 bp, synthetic construct
  source 1..20: mol_type = other DNA
atactaaaaaactggtcaat

SEQ ID NO: 17666 - DNA, 20 bp, synthetic construct
  source 1..20: mol_type = other DNA
tatactaaaaaactggtcaa

SEQ ID NO: 17667 - DNA, 20 bp, synthetic construct
  source 1..20: mol_type = other DNA
ttatactaaaaaactggtca

SEQ ID NO: 17668 - DNA, 20 bp, synthetic construct
  source 1..20: mol_type = other DNA
attatactaaaaaactggtc

SEQ ID NO: 17669 - DNA, 20 bp, synthetic construct
  source 1..20: mol_type = other DNA
aattatactaaaaaactggt

SEQ ID NO: 17670 - DNA, 20 bp, synthetic construct
  source 1..20: mol_type = other DNA
caattatactaaaaaactgg

SEQ ID NO: 17671 - DNA, 20 bp, synthetic construct
  source 1..20: mol_type = other DNA
acaattatactaaaaaactg

SEQ ID NO: 17672 - DNA, 20 bp, synthetic construct
  source 1..20: mol_type = other DNA
cacaattatactaaaaaact

SEQ ID NO: 17673 - DNA, 20 bp, synthetic construct
  source 1..20: mol_type = other DNA
acacaattatactaaaaaac

SEQ ID NO: 17674 - DNA, 20 bp, synthetic construct
  source 1..20: mol_type = other DNA
tacacaattatactaaaaaa

SEQ ID NO: 17675 - DNA, 20 bp, synthetic construct
  source 1..20: mol_type = other DNA
atacacaattatactaaaaa

SEQ ID NO: 17676 - DNA, 20 bp, synthetic construct
  source 1..20: mol_type = other DNA
aatacacaattatactaaaa

SEQ ID NO: 17677 - DNA, 20 bp, synthetic construct
  source 1..20: mol_type = other DNA
taatacacaattatactaaa

SEQ ID NO: 17678 - DNA, 20 bp, synthetic construct
  source 1..20: mol_type = other DNA
ttaatacacaattatactaa

SEQ ID NO: 17679 - DNA, 20 bp, synthetic construct
  source 1..20: mol_type = other DNA
tttaatacacaattatacta

SEQ ID NO: 17680 - DNA, 20 bp, synthetic construct
  source 1..20: mol_type = other DNA
atttaatacacaattatact

SEQ ID NO: 17681 - DNA, 20 bp, synthetic construct
  source 1..20: mol_type = other DNA
aatttaatacacaattatac

SEQ ID NO: 17682 - DNA, 20 bp, synthetic construct
  source 1..20: mol_type = other DNA
caatttaatacacaattata

SEQ ID NO: 17683 - DNA, 20 bp, synthetic construct
  source 1..20: mol_type = other DNA
gcaatttaatacacaattat

SEQ ID NO: 17684 - DNA, 20 bp, synthetic construct
  source 1..20: mol_type = other DNA
tgcaatttaatacacaatta

SEQ ID NO: 17685 - DNA, 20 bp, synthetic construct
  source 1..20: mol_type = other DNA
atgcaatttaatacacaatt

SEQ ID NO: 17686 - DNA, 20 bp, synthetic construct
  source 1..20: mol_type = other DNA
tatgcaatttaatacacaat

SEQ ID NO: 17687 - DNA, 20 bp, synthetic construct
  source 1..20: mol_type = other DNA
ctatgcaatttaatacacaa

SEQ ID NO: 17688 - DNA, 20 bp, synthetic construct
  source 1..20: mol_type = other DNA
tctatgcaatttaatacaca

SEQ ID NO: 17689 - DNA, 20 bp, synthetic construct
  source 1..20: mol_type = other DNA
ttctatgcaatttaatacac

SEQ ID NO: 17690 - DNA, 20 bp, synthetic construct
  source 1..20: mol_type = other DNA
tttctatgcaatttaataca

SEQ ID NO: 17691 - DNA, 20 bp, synthetic construct
  source 1..20: mol_type = other DNA
ttttctatgcaatttaatac

SEQ ID NO: 17692 - DNA, 20 bp, synthetic construct
  source 1..20: mol_type = other DNA
tttttctatgcaatttaata

SEQ ID NO: 17693 - DNA, 20 bp, synthetic construct
  source 1..20: mol_type = other DNA
ttttttctatgcaatttaat

SEQ ID NO: 17694 - DNA, 20 bp, synthetic construct
  source 1..20: mol_type = other DNA
cttttttctatgcaatttaa

SEQ ID NO: 17695 - DNA, 20 bp, synthetic construct
  source 1..20: mol_type = other DNA
acttttttctatgcaattta

SEQ ID NO: 17696 - DNA, 20 bp, synthetic construct
  source 1..20: mol_type = other DNA
aacttttttctatgcaattt

SEQ ID NO: 17697 - DNA, 20 bp, synthetic construct
  source 1..20: mol_type = other DNA
taacttttttctatgcaatt

SEQ ID NO: 17698 - DNA, 20 bp, synthetic construct
  source 1..20: mol_type = other DNA
ataacttttttctatgcaat

SEQ ID NO: 17699 - DNA, 20 bp, synthetic construct
  source 1..20: mol_type = other DNA
aataacttttttctatgcaa

SEQ ID NO: 17700 - DNA, 20 bp, synthetic construct
  source 1..20: mol_type = other DNA
aaataacttttttctatgca

SEQ ID NO: 17701 - DNA, 20 bp, synthetic construct
  source 1..20: mol_type = other DNA
taaataacttttttctatgc

SEQ ID NO: 17702 - DNA, 20 bp, synthetic construct
  source 1..20: mol_type = other DNA
ataaataacttttttctatg

SEQ ID NO: 17703 - DNA, 20 bp, synthetic construct
  source 1..20: mol_type = other DNA
gataaataacttttttctat

SEQ ID NO: 17704 - DNA, 20 bp, synthetic construct
  source 1..20: mol_type = other DNA
agataaataacttttttcta

SEQ ID NO: 17705 - DNA, 20 bp, synthetic construct
  source 1..20: mol_type = other DNA
tagataaataacttttttct

SEQ ID NO: 17706 - DNA, 20 bp, synthetic construct
  source 1..20: mol_type = other DNA
ttagataaataacttttttc

SEQ ID NO: 17707 - DNA, 20 bp, synthetic construct
  source 1..20: mol_type = other DNA
tttagataaataactttttt

SEQ ID NO: 17708 - DNA, 20 bp, synthetic construct
  source 1..20: mol_type = other DNA
ctttagataaataacttttt

SEQ ID NO: 17709 - DNA, 20 bp, synthetic construct
  source 1..20: mol_type = other DNA
actttagataaataactttt

SEQ ID NO: 17710 - DNA, 20 bp, synthetic construct
  source 1..20: mol_type = other DNA
aactttagataaataacttt

SEQ ID NO: 17711 - DNA, 20 bp, synthetic construct
  source 1..20: mol_type = other DNA
caactttagataaataactt

SEQ ID NO: 17712 - DNA, 20 bp, synthetic construct
  source 1..20: mol_type = other DNA
tcaactttagataaataact

SEQ ID NO: 17713 - DNA, 20 bp, synthetic construct
  source 1..20: mol_type = other DNA
ttcaactttagataaataac

SEQ ID NO: 17714 - DNA, 20 bp, synthetic construct
  source 1..20: mol_type = other DNA
tttcaactttagataaataa

SEQ ID NO: 17715 - DNA, 20 bp, synthetic construct
  source 1..20: mol_type = other DNA
atttcaactttagataaata

SEQ ID NO: 17716 - DNA, 20 bp, synthetic construct
  source 1..20: mol_type = other DNA
aatttcaactttagataaat

SEQ ID NO: 17717 - DNA, 20 bp, synthetic construct
  source 1..20: mol_type = other DNA
aaatttcaactttagataaa

SEQ ID NO: 17718 - DNA, 20 bp, synthetic construct
  source 1..20: mol_type = other DNA
taaatttcaactttagataa

SEQ ID NO: 17719 - DNA, 20 bp, synthetic construct
  source 1..20: mol_type = other DNA
ttaaatttcaactttagata

SEQ ID NO: 17720 - DNA, 20 bp, synthetic construct
  source 1..20: mol_type = other DNA
gttaaatttcaactttagat

SEQ ID NO: 17721 - DNA, 20 bp, synthetic construct
  source 1..20: mol_type = other DNA
agttaaatttcaactttaga

SEQ ID NO: 17722 - DNA, 20 bp, synthetic construct
  source 1..20: mol_type = other DNA
cagttaaatttcaactttag

SEQ ID NO: 17723 - DNA, 20 bp, synthetic construct
  source 1..20: mol_type = other DNA
tcagttaaatttcaacttta

SEQ ID NO: 17724 - DNA, 20 bp, synthetic construct
  source 1..20: mol_type = other DNA
ctcagttaaatttcaacttt

SEQ ID NO: 17725 - DNA, 20 bp, synthetic construct
  source 1..20: mol_type = other DNA
gctcagttaaatttcaactt

SEQ ID NO: 17726 - DNA, 20 bp, synthetic construct
  source 1..20: mol_type = other DNA
tgctcagttaaatttcaact

SEQ ID NO: 17727 - DNA, 20 bp, synthetic construct
  source 1..20: mol_type = other DNA
atgctcagttaaatttcaac

SEQ ID NO: 17728 - DNA, 20 bp, synthetic construct
  source 1..20: mol_type = other DNA
gatgctcagttaaatttcaa

SEQ ID NO: 17729 - DNA, 20 bp, synthetic construct
  source 1..20: mol_type = other DNA
agatgctcagttaaatttca

SEQ ID NO: 17730 - DNA, 20 bp, synthetic construct
  source 1..20: mol_type = other DNA
aagatgctcagttaaatttc

SEQ ID NO: 17731 - DNA, 20 bp, synthetic construct
  source 1..20: mol_type = other DNA
caagatgctcagttaaattt

SEQ ID NO: 17732 - DNA, 20 bp, synthetic construct
  source 1..20: mol_type = other DNA
acaagatgctcagttaaatt

SEQ ID NO: 17733 - DNA, 20 bp, synthetic construct
  source 1..20: mol_type = other DNA
tacaagatgctcagttaaat

SEQ ID NO: 17734 - DNA, 20 bp, synthetic construct
  source 1..20: mol_type = other DNA
atacaagatgctcagttaaa

SEQ ID NO: 17735 - DNA, 20 bp, synthetic construct
  source 1..20: mol_type = other DNA
aatacaagatgctcagttaa

SEQ ID NO: 17736 - DNA, 20 bp, synthetic construct
  source 1..20: mol_type = other DNA
aaatacaagatgctcagtta

SEQ ID NO: 17737 - DNA, 20 bp, synthetic construct
  source 1..20: mol_type = other DNA
aaaatacaagatgctcagtt

SEQ ID NO: 17738 - DNA, 20 bp, synthetic construct
  source 1..20: mol_type = other DNA
taaaatacaagatgctcagt

SEQ ID NO: 17739 - DNA, 20 bp, synthetic construct
  source 1..20: mol_type = other DNA
ataaaatacaagatgctcag

SEQ ID NO: 17740 - DNA, 20 bp, synthetic construct
  source 1..20: mol_type = other DNA
gataaaatacaagatgctca

SEQ ID NO: 17741 - DNA, 20 bp, synthetic construct
  source 1..20: mol_type = other DNA
agataaaatacaagatgctc

SEQ ID NO: 17742 - DNA, 20 bp, synthetic construct
  source 1..20: mol_type = other DNA
cagataaaatacaagatgct

SEQ ID NO: 17743 - DNA, 20 bp, synthetic construct
  source 1..20: mol_type = other DNA
ccagataaaatacaagatgc

SEQ ID NO: 17744 - DNA, 20 bp, synthetic construct
  source 1..20: mol_type = other DNA
gccagataaaatacaagatg

SEQ ID NO: 17745 - DNA, 20 bp, synthetic construct
  source 1..20: mol_type = other DNA
tgccagataaaatacaagat

SEQ ID NO: 17746 - DNA, 20 bp, synthetic construct
  source 1..20: mol_type = other DNA
ttgccagataaaatacaaga

SEQ ID NO: 17747 - DNA, 20 bp, synthetic construct
  source 1..20: mol_type = other DNA
gttgccagataaaatacaag

SEQ ID NO: 17748 - DNA, 20 bp, synthetic construct
  source 1..20: mol_type = other DNA
agttgccagataaaatacaa

SEQ ID NO: 17749 - DNA, 20 bp, synthetic construct
  source 1..20: mol_type = other DNA
gagttgccagataaaataca

SEQ ID NO: 17750 - DNA, 20 bp, synthetic construct
  source 1..20: mol_type = other DNA
ggagttgccagataaaatac

SEQ ID NO: 17751 - DNA, 20 bp, synthetic construct
  source 1..20: mol_type = other DNA
tggagttgccagataaaata

SEQ ID NO: 17752 - DNA, 20 bp, synthetic construct
  source 1..20: mol_type = other DNA
ctggagttgccagataaaat

SEQ ID NO: 17753 - DNA, 20 bp, synthetic construct
  source 1..20: mol_type = other DNA
actggagttgccagataaaa

SEQ ID NO: 17754 - DNA, 20 bp, synthetic construct
  source 1..20: mol_type = other DNA
gactggagttgccagataaa

SEQ ID NO: 17755 - DNA, 20 bp, synthetic construct
  source 1..20: mol_type = other DNA
agactggagttgccagataa

SEQ ID NO: 17756 - DNA, 20 bp, synthetic construct
  source 1..20: mol_type = other DNA
tagactggagttgccagata

SEQ ID NO: 17757 - DNA, 20 bp, synthetic construct
  source 1..20: mol_type = other DNA
ttagactggagttgccagat

SEQ ID NO: 17758 - DNA, 20 bp, synthetic construct
  source 1..20: mol_type = other DNA
cttagactggagttgccaga

SEQ ID NO: 17759 - DNA, 20 bp, synthetic construct
  source 1..20: mol_type = other DNA
gcttagactggagttgccag

SEQ ID NO: 17760 - DNA, 20 bp, synthetic construct
  source 1..20: mol_type = other DNA
agcttagactggagttgcca

SEQ ID NO: 17761 - DNA, 20 bp, synthetic construct
  source 1..20: mol_type = other DNA
cagcttagactggagttgcc

SEQ ID NO: 17762 - DNA, 20 bp, synthetic construct
  source 1..20: mol_type = other DNA
ccagcttagactggagttgc

SEQ ID NO: 17763 - DNA, 20 bp, synthetic construct
  source 1..20: mol_type = other DNA
tccagcttagactggagttg

SEQ ID NO: 17764 - DNA, 20 bp, synthetic construct
  source 1..20: mol_type = other DNA
ttccagcttagactggagtt

SEQ ID NO: 17765 - DNA, 20 bp, synthetic construct
  source 1..20: mol_type = other DNA
attccagcttagactggagt

SEQ ID NO: 17766 - DNA, 20 bp, synthetic construct
  source 1..20: mol_type = other DNA
gattccagcttagactggag

SEQ ID NO: 17767 - DNA, 20 bp, synthetic construct
  source 1..20: mol_type = other DNA
tgattccagcttagactgga

SEQ ID NO: 17768 - DNA, 20 bp, synthetic construct
  source 1..20: mol_type = other DNA
atgattccagcttagactgg

SEQ ID NO: 17769 - DNA, 20 bp, synthetic construct
  source 1..20: mol_type = other DNA
catgattccagcttagactg

SEQ ID NO: 17770 - DNA, 20 bp, synthetic construct
  source 1..20: mol_type = other DNA
ccatgattccagcttagact

SEQ ID NO: 17771 - DNA, 20 bp, synthetic construct
  source 1..20: mol_type = other DNA
accatgattccagcttagac

SEQ ID NO: 17772 - DNA, 20 bp, synthetic construct
  source 1..20: mol_type = other DNA
aaccatgattccagcttaga

SEQ ID NO: 17773 - DNA, 20 bp, synthetic construct
  source 1..20: mol_type = other DNA
gaaccatgattccagcttag

SEQ ID NO: 17774 - DNA, 20 bp, synthetic construct
  source 1..20: mol_type = other DNA
tgaaccatgattccagctta

SEQ ID NO: 17775 - DNA, 20 bp, synthetic construct
  source 1..20: mol_type = other DNA
gtgaaccatgattccagctt

SEQ ID NO: 17776 - DNA, 20 bp, synthetic construct
  source 1..20: mol_type = other DNA
agtgaaccatgattccagct

SEQ ID NO: 17777 - DNA, 20 bp, synthetic construct
  source 1..20: mol_type = other DNA
cagtgaaccatgattccagc

SEQ ID NO: 17778 - DNA, 20 bp, synthetic construct
  source 1..20: mol_type = other DNA
acagtgaaccatgattccag

SEQ ID NO: 17779 - DNA, 20 bp, synthetic construct
  source 1..20: mol_type = other DNA
aacagtgaaccatgattcca

SEQ ID NO: 17780 - DNA, 20 bp, synthetic construct
  source 1..20: mol_type = other DNA
aaacagtgaaccatgattcc

SEQ ID NO: 17781 - DNA, 20 bp, synthetic construct
  source 1..20: mol_type = other DNA
aaaacagtgaaccatgattc

SEQ ID NO: 17782 - DNA, 20 bp, synthetic construct
  source 1..20: mol_type = other DNA
aaaaacagtgaaccatgatt

SEQ ID NO: 17783 - DNA, 20 bp, synthetic construct
  source 1..20: mol_type = other DNA
aaaaaacagtgaaccatgat

SEQ ID NO: 17784 - DNA, 20 bp, synthetic construct
  source 1..20: mol_type = other DNA
aaaaaaacagtgaaccatga

SEQ ID NO: 17785 - DNA, 20 bp, synthetic construct
  source 1..20: mol_type = other DNA
aaaaaaaacagtgaaccatg

SEQ ID NO: 17786 - DNA, 20 bp, synthetic construct
  source 1..20: mol_type = other DNA
aaaaaaaaacagtgaaccat

SEQ ID NO: 17787 - DNA, 20 bp, synthetic construct
  source 1..20: mol_type = other DNA
aaaaaaaaaacagtgaacca

SEQ ID NO: 17788 - DNA, 20 bp, synthetic construct
  source 1..20: mol_type = other DNA
aaaaaaaaaaacagtgaacc

SEQ ID NO: 17789 - DNA, 20 bp, synthetic construct
  source 1..20: mol_type = other DNA
aaaaaaaaaaaacagtgaac

SEQ ID NO: 17790 - DNA, 20 bp, synthetic construct
  source 1..20: mol_type = other DNA
aaaaaaaaaaaaacagtgaa

SEQ ID NO: 17791 - DNA, 20 bp, synthetic construct
  source 1..20: mol_type = other DNA
aaaaaaaaaaaaaacagtga

SEQ ID NO: 17792 - DNA, 20 bp, synthetic construct
  source 1..20: mol_type = other DNA
aaaaaaaaaaaaaaacagtg

SEQ ID NO: 17793 - DNA, 20 bp, synthetic construct
  source 1..20: mol_type = other DNA
aaaaaaaaaaaaaaaacagt

SEQ ID NO: 17794 - DNA, 20 bp, synthetic construct
  source 1..20: mol_type = other DNA
aaaaaaaaaaaaaaaaacag

SEQ ID NO: 17795 - DNA, 20 bp, synthetic construct
  source 1..20: mol_type = other DNA
aaaaaaaaaaaaaaaaaaca

SEQ ID NO: 17796 - DNA, 20 bp, synthetic construct
  source 1..20: mol_type = other DNA
aaaaaaaaaaaaaaaaaaac

SEQ ID NO: 17797 - DNA, 20 bp, synthetic construct
  source 1..20: mol_type = other DNA
aaaaaaaaaaaaaaaaaaaa

SEQ ID NO: 17798 - DNA, 20 bp, synthetic construct
  source 1..20: mol_type = other DNA
aaaaaaaaaaaaaaaaaaaa

SEQ ID NO: 17799 - DNA, 20 bp, synthetic construct
  source 1..20: mol_type = other DNA
aaaaaaaaaaaaaaaaaaaa

SEQ ID NO: 17800 - DNA, 20 bp, synthetic construct
  source 1..20: mol_type = other DNA
aaaaaaaaaaaaaaaaaaaa

SEQ ID NO: 17801 - DNA, 20 bp, synthetic construct
  source 1..20: mol_type = other DNA
aaaaaaaaaaaaaaaaaaaa

SEQ ID NO: 17802 - DNA, 20 bp, synthetic construct
  source 1..20: mol_type = other DNA
caaaaaaaaaaaaaaaaaaa

SEQ ID NO: 17803 - DNA, 20 bp, synthetic construct
  source 1..20: mol_type = other DNA
tcaaaaaaaaaaaaaaaaaa

SEQ ID NO: 17804 - DNA, 20 bp, synthetic construct
  source 1..20: mol_type = other DNA
ctcaaaaaaaaaaaaaaaaa

SEQ ID NO: 17805 - DNA, 20 bp, synthetic construct
  source 1..20: mol_type = other DNA
actcaaaaaaaaaaaaaaaa

SEQ ID NO: 17806 - DNA, 20 bp, synthetic construct
  source 1..20: mol_type = other DNA
gactcaaaaaaaaaaaaaaa

SEQ ID NO: 17807 - DNA, 20 bp, synthetic construct
  source 1..20: mol_type = other DNA
cgactcaaaaaaaaaaaaaa

SEQ ID NO: 17808 - DNA, 20 bp, synthetic construct
  source 1..20: mol_type = other DNA
ccgactcaaaaaaaaaaaaa

SEQ ID NO: 17809 - DNA, 20 bp, synthetic construct
  source 1..20: mol_type = other DNA
tccgactcaaaaaaaaaaaa

SEQ ID NO: 17810 - DNA, 20 bp, synthetic construct
  source 1..20: mol_type = other DNA
ctccgactcaaaaaaaaaaa

SEQ ID NO: 17811 - DNA, 20 bp, synthetic construct
  source 1..20: mol_type = other DNA
actccgactcaaaaaaaaaa

SEQ ID NO: 17812 - DNA, 20 bp, synthetic construct
  source 1..20: mol_type = other DNA
gactccgactcaaaaaaaaa

SEQ ID NO: 17813 - DNA, 20 bp, synthetic construct
  source 1..20: mol_type = other DNA
agactccgactcaaaaaaaa

SEQ ID NO: 17814 - DNA, 20 bp, synthetic construct
  source 1..20: mol_type = other DNA
aagactccgactcaaaaaaa

SEQ ID NO: 17815 - DNA, 20 bp, synthetic construct
  source 1..20: mol_type = other DNA
caagactccgactcaaaaaa

SEQ ID NO: 17816 - DNA, 20 bp, synthetic construct
  source 1..20: mol_type = other DNA
gcaagactccgactcaaaaa

SEQ ID NO: 17817 - DNA, 20 bp, synthetic construct
  source 1..20: mol_type = other DNA
agcaagactccgactcaaaa

SEQ ID NO: 17818 - DNA, 20 bp, synthetic construct
  source 1..20: mol_type = other DNA
cagcaagactccgactcaaa

SEQ ID NO: 17819 - DNA, 20 bp, synthetic construct
  source 1..20: mol_type = other DNA
acagcaagactccgactcaa

SEQ ID NO: 17820 - DNA, 20 bp, synthetic construct
  source 1..20: mol_type = other DNA
cacagcaagactccgactca

SEQ ID NO: 17821 - DNA, 20 bp, synthetic construct
  source 1..20: mol_type = other DNA
acacagcaagactccgactc

SEQ ID NO: 17822 - DNA, 20 bp, synthetic construct
  source 1..20: mol_type = other DNA
aacacagcaagactccgact

SEQ ID NO: 17823 - DNA, 20 bp, synthetic construct
  source 1..20: mol_type = other DNA
caacacagcaagactccgac

SEQ ID NO: 17824 - DNA, 20 bp, synthetic construct
  source 1..20: mol_type = other DNA
gcaacacagcaagactccga

SEQ ID NO: 17825 - DNA, 20 bp, synthetic construct
  source 1..20: mol_type = other DNA
ggcaacacagcaagactccg

SEQ ID NO: 17826 - DNA, 20 bp, synthetic construct
  source 1..20: mol_type = other DNA
gggcaacacagcaagactcc

SEQ ID NO: 17827 - DNA, 20 bp, synthetic construct
  source 1..20: mol_type = other DNA
tgggcaacacagcaagactc

SEQ ID NO: 17828 - DNA, 20 bp, synthetic construct
  source 1..20: mol_type = other DNA
ctgggcaacacagcaagact

SEQ ID NO: 17829 - DNA, 20 bp, synthetic construct
  source 1..20: mol_type = other DNA
cctgggcaacacagcaagac

SEQ ID NO: 17830 - DNA, 20 bp, synthetic construct
  source 1..20: mol_type = other DNA
gcctgggcaacacagcaaga

SEQ ID NO: 17831 - DNA, 20 bp, synthetic construct
  source 1..20: mol_type = other DNA
agcctgggcaacacagcaag

SEQ ID NO: 17832 - DNA, 20 bp, synthetic construct
  source 1..20: mol_type = other DNA
cagcctgggcaacacagcaa

SEQ ID NO: 17833 - DNA, 20 bp, synthetic construct
  source 1..20: mol_type = other DNA
ccagcctgggcaacacagca

SEQ ID NO: 17834 - DNA, 20 bp, synthetic construct
  source 1..20: mol_type = other DNA
tccagcctgggcaacacagc

SEQ ID NO: 17835 - DNA, 20 bp, synthetic construct
  source 1..20: mol_type = other DNA
ctccagcctgggcaacacag

SEQ ID NO: 17836 - DNA, 20 bp, synthetic construct
  source 1..20: mol_type = other DNA
actccagcctgggcaacaca

SEQ ID NO: 17837 - DNA, 20 bp, synthetic construct
  source 1..20: mol_type = other DNA
cactccagcctgggcaacac

SEQ ID NO: 17838 - DNA, 20 bp, synthetic construct
  source 1..20: mol_type = other DNA
gcactccagcctgggcaaca

SEQ ID NO: 17839 - DNA, 20 bp, synthetic construct
  source 1..20: mol_type = other DNA
tgcactccagcctgggcaac

SEQ ID NO: 17840 - DNA, 20 bp, synthetic construct
  source 1..20: mol_type = other DNA
ttgcactccagcctgggcaa

SEQ ID NO: 17841 - DNA, 20 bp, synthetic construct
  source 1..20: mol_type = other DNA
attgcactccagcctgggca

SEQ ID NO: 17842 - DNA, 20 bp, synthetic construct
  source 1..20: mol_type = other DNA
cattgcactccagcctgggc

SEQ ID NO: 17843 - DNA, 20 bp, synthetic construct
  source 1..20: mol_type = other DNA
ccattgcactccagcctggg

SEQ ID NO: 17844 - DNA, 20 bp, synthetic construct
  source 1..20: mol_type = other DNA
accattgcactccagcctgg

SEQ ID NO: 17845 - DNA, 20 bp, synthetic construct
  source 1..20: mol_type = other DNA
caccattgcactccagcctg

SEQ ID NO: 17846 - DNA, 20 bp, synthetic construct
  source 1..20: mol_type = other DNA
gcaccattgcactccagcct

SEQ ID NO: 17847 - DNA, 20 bp, synthetic construct
  source 1..20: mol_type = other DNA
cgcaccattgcactccagcc

SEQ ID NO: 17848 - DNA, 20 bp, synthetic construct
  source 1..20: mol_type = other DNA
tcgcaccattgcactccagc

SEQ ID NO: 17849 - DNA, 20 bp, synthetic construct
  source 1..20: mol_type = other DNA
atcgcaccattgcactccag

SEQ ID NO: 17850 - DNA, 20 bp, synthetic construct
  source 1..20: mol_type = other DNA
gatcgcaccattgcactcca

SEQ ID NO: 17851 - DNA, 20 bp, synthetic construct
  source 1..20: mol_type = other DNA
agatcgcaccattgcactcc

SEQ ID NO: 17852 - DNA, 20 bp, synthetic construct
  source 1..20: mol_type = other DNA
aagatcgcaccattgcactc

SEQ ID NO: 17853 - DNA, 20 bp, synthetic construct
  source 1..20: mol_type = other DNA
caagatcgcaccattgcact

SEQ ID NO: 17854 - DNA, 20 bp, synthetic construct
  source 1..20: mol_type = other DNA
ccaagatcgcaccattgcac

SEQ ID NO: 17855 - DNA, 20 bp, synthetic construct
  source 1..20: mol_type = other DNA
gccaagatcgcaccattgca

SEQ ID NO: 17856 - DNA, 20 bp, synthetic construct
  source 1..20: mol_type = other DNA
agccaagatcgcaccattgc

SEQ ID NO: 17857 - DNA, 20 bp, synthetic construct
  source 1..20: mol_type = other DNA
gagccaagatcgcaccattg

SEQ ID NO: 17858 - DNA, 20 bp, synthetic construct
  source 1..20: mol_type = other DNA
tgagccaagatcgcaccatt

SEQ ID NO: 17859 - DNA, 20 bp, synthetic construct
  source 1..20: mol_type = other DNA
gtgagccaagatcgcaccat

SEQ ID NO: 17860 - DNA, 20 bp, synthetic construct
  source 1..20: mol_type = other DNA
agtgagccaagatcgcacca

SEQ ID NO: 17861 - DNA, 20 bp, synthetic construct
  source 1..20: mol_type = other DNA
cagtgagccaagatcgcacc

SEQ ID NO: 17862 - DNA, 20 bp, synthetic construct
  source 1..20: mol_type = other DNA
gcagtgagccaagatcgcac

SEQ ID NO: 17863 - DNA, 20 bp, synthetic construct
  source 1..20: mol_type = other DNA
tgcagtgagccaagatcgca

SEQ ID NO: 17864 - DNA, 20 bp, synthetic construct
  source 1..20: mol_type = other DNA
ttgcagtgagccaagatcgc

SEQ ID NO: 17865 - DNA, 20 bp, synthetic construct
  source 1..20: mol_type = other DNA
gttgcagtgagccaagatcg

SEQ ID NO: 17866 - DNA, 20 bp, synthetic construct
  source 1..20: mol_type = other DNA
ggttgcagtgagccaagatc

SEQ ID NO: 17867 - DNA, 20 bp, synthetic construct
  source 1..20: mol_type = other DNA
aggttgcagtgagccaagat

SEQ ID NO: 17868 - DNA, 20 bp, synthetic construct
  source 1..20: mol_type = other DNA
gaggttgcagtgagccaaga

SEQ ID NO: 17869 - DNA, 20 bp, synthetic construct
  source 1..20: mol_type = other DNA
ggaggttgcagtgagccaag

SEQ ID NO: 17870 - DNA, 20 bp, synthetic construct
  source 1..20: mol_type = other DNA
tggaggttgcagtgagccaa

SEQ ID NO: 17871 - DNA, 20 bp, synthetic construct
  source 1..20: mol_type = other DNA
gtggaggttgcagtgagcca

SEQ ID NO: 17872 - DNA, 20 bp, synthetic construct
  source 1..20: mol_type = other DNA
ggtggaggttgcagtgagcc

SEQ ID NO: 17873 - DNA, 20 bp, synthetic construct
  source 1..20: mol_type = other DNA
aggtggaggttgcagtgagc

SEQ ID NO: 17874 - DNA, 20 bp, synthetic construct
  source 1..20: mol_type = other DNA
gaggtggaggttgcagtgag

SEQ ID NO: 17875 - DNA, 20 bp, synthetic construct
  source 1..20: mol_type = other DNA
ggaggtggaggttgcagtga

SEQ ID NO: 17876 - DNA, 20 bp, synthetic construct
  source 1..20: mol_type = other DNA
aggaggtggaggttgcagtg

SEQ ID NO: 17877 - DNA, 20 bp, synthetic construct
  source 1..20: mol_type = other DNA
caggaggtggaggttgcagt

SEQ ID NO: 17878 - DNA, 20 bp, synthetic construct
  source 1..20: mol_type = other DNA
acaggaggtggaggttgcag

SEQ ID NO: 17879 - DNA, 20 bp, synthetic construct
  source 1..20: mol_type = other DNA
cacaggaggtggaggttgca

SEQ ID NO: 17880 - DNA, 20 bp, synthetic construct
  source 1..20: mol_type = other DNA
acacaggaggtggaggttgc

SEQ ID NO: 17881 - DNA, 20 bp, synthetic construct
  source 1..20: mol_type = other DNA
aacacaggaggtggaggttg

SEQ ID NO: 17882 - DNA, 20 bp, synthetic construct
  source 1..20: mol_type = other DNA
gaacacaggaggtggaggtt

SEQ ID NO: 17883 - DNA, 20 bp, synthetic construct
  source 1..20: mol_type = other DNA
tgaacacaggaggtggaggt

SEQ ID NO: 17884 - DNA, 20 bp, synthetic construct
  source 1..20: mol_type = other DNA
ttgaacacaggaggtggagg

SEQ ID NO: 17885 - DNA, 20 bp, synthetic construct
  source 1..20: mol_type = other DNA
cttgaacacaggaggtggag

SEQ ID NO: 17886 - DNA, 20 bp, synthetic construct
  source 1..20: mol_type = other DNA
acttgaacacaggaggtgga

SEQ ID NO: 17887 - DNA, 20 bp, synthetic construct
  source 1..20: mol_type = other DNA
cacttgaacacaggaggtgg

SEQ ID NO: 17888 - DNA, 20 bp, synthetic construct
  source 1..20: mol_type = other DNA
tcacttgaacacaggaggtg

SEQ ID NO: 17889 - DNA, 20 bp, synthetic construct
  source 1..20: mol_type = other DNA
atcacttgaacacaggaggt

SEQ ID NO: 17890 - DNA, 20 bp, synthetic construct
  source 1..20: mol_type = other DNA
aatcacttgaacacaggagg

SEQ ID NO: 17891 - DNA, 20 bp, synthetic construct
  source 1..20: mol_type = other DNA
gaatcacttgaacacaggag

SEQ ID NO: 17892 - DNA, 20 bp, synthetic construct
  source 1..20: mol_type = other DNA
agaatcacttgaacacagga

SEQ ID NO: 17893 - DNA, 20 bp, synthetic construct
  source 1..20: mol_type = other DNA
gagaatcacttgaacacagg

SEQ ID NO: 17894 - DNA, 20 bp, synthetic construct
  source 1..20: mol_type = other DNA
ggagaatcacttgaacacag

SEQ ID NO: 17895 - DNA, 20 bp, synthetic construct
  source 1..20: mol_type = other DNA
aggagaatcacttgaacaca

SEQ ID NO: 17896 - DNA, 20 bp, synthetic construct
  source 1..20: mol_type = other DNA
caggagaatcacttgaacac

SEQ ID NO: 17897 - DNA, 20 bp, synthetic construct
  source 1..20: mol_type = other DNA
gcaggagaatcacttgaaca

SEQ ID NO: 17898 - DNA, 20 bp, synthetic construct
  source 1..20: mol_type = other DNA
ggcaggagaatcacttgaac

SEQ ID NO: 17899 - DNA, 20 bp, synthetic construct
  source 1..20: mol_type = other DNA
aggcaggagaatcacttgaa

SEQ ID NO: 17900 - DNA, 20 bp, synthetic construct
  source 1..20: mol_type = other DNA
gaggcaggagaatcacttga

SEQ ID NO: 17901 - DNA, 20 bp, synthetic construct
  source 1..20: mol_type = other DNA
tgaggcaggagaatcacttg

SEQ ID NO: 17902 - DNA, 20 bp, synthetic construct
  source 1..20: mol_type = other DNA
ctgaggcaggagaatcactt

SEQ ID NO: 17903 - DNA, 20 bp, synthetic construct
  source 1..20: mol_type = other DNA
gctgaggcaggagaatcact

SEQ ID NO: 17904 - DNA, 20 bp, synthetic construct
  source 1..20: mol_type = other DNA
ggctgaggcaggagaatcac

SEQ ID NO: 17905 - DNA, 20 bp, synthetic construct
  source 1..20: mol_type = other DNA
aggctgaggcaggagaatca

SEQ ID NO: 17906 - DNA, 20 bp, synthetic construct
  source 1..20: mol_type = other DNA
gaggctgaggcaggagaatc

SEQ ID NO: 17907 - DNA, 20 bp, synthetic construct
  source 1..20: mol_type = other DNA
ggaggctgaggcaggagaat

SEQ ID NO: 17908 - DNA, 20 bp, synthetic construct
  source 1..20: mol_type = other DNA
aggaggctgaggcaggagaa

SEQ ID NO: 17909 - DNA, 20 bp, synthetic construct
  source 1..20: mol_type = other DNA
caggaggctgaggcaggaga

SEQ ID NO: 17910 - DNA, 20 bp, synthetic construct
  source 1..20: mol_type = other DNA
tcaggaggctgaggcaggag

SEQ ID NO: 17911 - DNA, 20 bp, synthetic construct
  source 1..20: mol_type = other DNA
ttcaggaggctgaggcagga

SEQ ID NO: 17912 - DNA, 20 bp, synthetic construct
  source 1..20: mol_type = other DNA
attcaggaggctgaggcagg

SEQ ID NO: 17913 - DNA, 20 bp, synthetic construct
  source 1..20: mol_type = other DNA
tattcaggaggctgaggcag

SEQ ID NO: 17914 - DNA, 20 bp, synthetic construct
  source 1..20: mol_type = other DNA
ctattcaggaggctgaggca

SEQ ID NO: 17915 - DNA, 20 bp, synthetic construct
  source 1..20: mol_type = other DNA
actattcaggaggctgaggc

SEQ ID NO: 17916 - DNA, 20 bp, synthetic construct
  source 1..20: mol_type = other DNA
aactattcaggaggctgagg

SEQ ID NO: 17917 - DNA, 20 bp, synthetic construct
  source 1..20: mol_type = other DNA
caactattcaggaggctgag

SEQ ID NO: 17918 - DNA, 20 bp, synthetic construct
  source 1..20: mol_type = other DNA
ccaactattcaggaggctga

SEQ ID NO: 17919 - DNA, 20 bp, synthetic construct
  source 1..20: mol_type = other DNA
cccaactattcaggaggctg

SEQ ID NO: 17920 - DNA, 20 bp, synthetic construct
  source 1..20: mol_type = other DNA
tcccaactattcaggaggct

SEQ ID NO: 17921 - DNA, 20 bp, synthetic construct
  source 1..20: mol_type = other DNA
atcccaactattcaggaggc

SEQ ID NO: 17922 - DNA, 20 bp, synthetic construct
  source 1..20: mol_type = other DNA
aatcccaactattcaggagg

SEQ ID NO: 17923 - DNA, 20 bp, synthetic construct
  source 1..20: mol_type = other DNA
taatcccaactattcaggag

SEQ ID NO: 17924 - DNA, 20 bp, synthetic construct
  source 1..20: mol_type = other DNA
gtaatcccaactattcagga

SEQ ID NO: 17925 - DNA, 20 bp, synthetic construct
  source 1..20: mol_type = other DNA
tgtaatcccaactattcagg

SEQ ID NO: 17926 - DNA, 20 bp, synthetic construct
  source 1..20: mol_type = other DNA
ctgtaatcccaactattcag

SEQ ID NO: 17927 - DNA, 20 bp, synthetic construct
  source 1..20: mol_type = other DNA
cctgtaatcccaactattca

SEQ ID NO: 17928 - DNA, 20 bp, synthetic construct
  source 1..20: mol_type = other DNA
gcctgtaatcccaactattc

SEQ ID NO: 17929 - DNA, 20 bp, synthetic construct
  source 1..20: mol_type = other DNA
tgcctgtaatcccaactatt

SEQ ID NO: 17930 - DNA, 20 bp, synthetic construct
  source 1..20: mol_type = other DNA
gtgcctgtaatcccaactat

SEQ ID NO: 17931 - DNA, 20 bp, synthetic construct
  source 1..20: mol_type = other DNA
ggtgcctgtaatcccaacta

SEQ ID NO: 17932 - DNA, 20 bp, synthetic construct
  source 1..20: mol_type = other DNA
gggtgcctgtaatcccaact

SEQ ID NO: 17933 - DNA, 20 bp, synthetic construct
  source 1..20: mol_type = other DNA
tgggtgcctgtaatcccaac

SEQ ID NO: 17934 - DNA, 20 bp, synthetic construct
  source 1..20: mol_type = other DNA
gtgggtgcctgtaatcccaa

SEQ ID NO: 17935 - DNA, 20 bp, synthetic construct
  source 1..20: mol_type = other DNA
ggtgggtgcctgtaatccca

SEQ ID NO: 17936 - DNA, 20 bp, synthetic construct
  source 1..20: mol_type = other DNA
tggtgggtgcctgtaatccc

SEQ ID NO: 17937 - DNA, 20 bp, synthetic construct
  source 1..20: mol_type = other DNA
gtggtgggtgcctgtaatcc

SEQ ID NO: 17938 - DNA, 20 bp, synthetic construct
  source 1..20: mol_type = other DNA
ggtggtgggtgcctgtaatc

SEQ ID NO: 17939 - DNA, 20 bp, synthetic construct
  source 1..20: mol_type = other DNA
tggtggtgggtgcctgtaat

SEQ ID NO: 17940 - DNA, 20 bp, synthetic construct
  source 1..20: mol_type = other DNA
atggtggtgggtgcctgtaa

SEQ ID NO: 17941 - DNA, 20 bp, synthetic construct
  source 1..20: mol_type = other DNA
catggtggtgggtgcctgta

SEQ ID NO: 17942 - DNA, 20 bp, synthetic construct
  source 1..20: mol_type = other DNA
gcatggtggtgggtgcctgt

SEQ ID NO: 17943 - DNA, 20 bp, synthetic construct
  source 1..20: mol_type = other DNA
ggcatggtggtgggtgcctg

SEQ ID NO: 17944 - DNA, 20 bp, synthetic construct
  source 1..20: mol_type = other DNA
gggcatggtggtgggtgcct

SEQ ID NO: 17945 - DNA, 20 bp, synthetic construct
  source 1..20: mol_type = other DNA
tgggcatggtggtgggtgcc

SEQ ID NO: 17946 - DNA, 20 bp, synthetic construct
  source 1..20: mol_type = other DNA
ctgggcatggtggtgggtgc

SEQ ID NO: 17947 - DNA, 20 bp, synthetic construct
  source 1..20: mol_type = other DNA
gctgggcatggtggtgggtg

SEQ ID NO: 17948 - DNA, 20 bp, synthetic construct
  source 1..20: mol_type = other DNA
agctgggcatggtggtgggt

SEQ ID NO: 17949 - DNA, 20 bp, synthetic construct
  source 1..20: mol_type = other DNA
tagctgggcatggtggtggg

SEQ ID NO: 17950 - DNA, 20 bp, synthetic construct
  source 1..20: mol_type = other DNA
ttagctgggcatggtggtgg

SEQ ID NO: 17951 - DNA, 20 bp, synthetic construct
  source 1..20: mol_type = other DNA
attagctgggcatggtggtg

SEQ ID NO: 17952 - DNA, 20 bp, synthetic construct
  source 1..20: mol_type = other DNA
aattagctgggcatggtggt

SEQ ID NO: 17953 - DNA, 20 bp, synthetic construct
  source 1..20: mol_type = other DNA
aaattagctgggcatggtgg

SEQ ID NO: 17954 - DNA, 20 bp, synthetic construct
  source 1..20: mol_type = other DNA
aaaattagctgggcatggtg

SEQ ID NO: 17955 - DNA, 20 bp, synthetic construct
  source 1..20: mol_type = other DNA
aaaaattagctgggcatggt

SEQ ID NO: 17956 - DNA, 20 bp, synthetic construct
  source 1..20: mol_type = other DNA
taaaaattagctgggcatgg

SEQ ID NO: 17957 - DNA, 20 bp, synthetic construct
  source 1..20: mol_type = other DNA
ataaaaattagctgggcatg

SEQ ID NO: 17958 - DNA, 20 bp, synthetic construct
  source 1..20: mol_type = other DNA
tataaaaattagctgggcat

SEQ ID NO: 17959 - DNA, 20 bp, synthetic construct
  source 1..20: mol_type = other DNA
atataaaaattagctgggca

SEQ ID NO: 17960 - DNA, 20 bp, synthetic construct
  source 1..20: mol_type = other DNA
aatataaaaattagctgggc

SEQ ID NO: 17961 - DNA, 20 bp, synthetic construct
  source 1..20: mol_type = other DNA
aaatataaaaattagctggg

SEQ ID NO: 17962 - DNA, 20 bp, synthetic construct
  source 1..20: mol_type = other DNA
aaaatataaaaattagctgg

SEQ ID NO: 17963 - DNA, 20 bp, synthetic construct
  source 1..20: mol_type = other DNA
aaaaatataaaaattagctg

SEQ ID NO: 17964 - DNA, 20 bp, synthetic construct
  source 1..20: mol_type = other DNA
taaaaatataaaaattagct

SEQ ID NO: 17965 - DNA, 20 bp, synthetic construct
  source 1..20: mol_type = other DNA
ctaaaaatataaaaattagc

SEQ ID NO: 17966 - DNA, 20 bp, synthetic construct
  source 1..20: mol_type = other DNA
actaaaaatataaaaattag

SEQ ID NO: 17967 - DNA, 20 bp, synthetic construct
  source 1..20: mol_type = other DNA
tactaaaaatataaaaatta

SEQ ID NO: 17968 - DNA, 20 bp, synthetic construct
  source 1..20: mol_type = other DNA
ctactaaaaatataaaaatt

SEQ ID NO: 17969 - DNA, 20 bp, synthetic construct
  source 1..20: mol_type = other DNA
tctactaaaaatataaaaat

SEQ ID NO: 17970 - DNA, 20 bp, synthetic construct
  source 1..20: mol_type = other DNA
ctctactaaaaatataaaaa

SEQ ID NO: 17971 - DNA, 20 bp, synthetic construct
  source 1..20: mol_type = other DNA
tctctactaaaaatataaaa

SEQ ID NO: 17972 - DNA, 20 bp, synthetic construct
  source 1..20: mol_type = other DNA
gtctctactaaaaatataaa

SEQ ID NO: 17973 - DNA, 20 bp, synthetic construct
  source 1..20: mol_type = other DNA
cgtctctactaaaaatataa

SEQ ID NO: 17974 - DNA, 20 bp, synthetic construct
  source 1..20: mol_type = other DNA
ccgtctctactaaaaatata

SEQ ID NO: 17975 - DNA, 20 bp, synthetic construct
  source 1..20: mol_type = other DNA
cccgtctctactaaaaatat

SEQ ID NO: 17976 - DNA, 20 bp, synthetic construct
  source 1..20: mol_type = other DNA
ccccgtctctactaaaaata

SEQ ID NO: 17977 - DNA, 20 bp, synthetic construct
  source 1..20: mol_type = other DNA
accccgtctctactaaaaat

SEQ ID NO: 17978 - DNA, 20 bp, synthetic construct
  source 1..20: mol_type = other DNA
aaccccgtctctactaaaaa

SEQ ID NO: 17979 - DNA, 20 bp, synthetic construct
  source 1..20: mol_type = other DNA
aaaccccgtctctactaaaa

SEQ ID NO: 17980 - DNA, 20 bp, synthetic construct
  source 1..20: mol_type = other DNA
aaaaccccgtctctactaaa

SEQ ID NO: 17981 - DNA, 20 bp, synthetic construct
  source 1..20: mol_type = other DNA
gaaaaccccgtctctactaa

SEQ ID NO: 17982 - DNA, 20 bp, synthetic construct
  source 1..20: mol_type = other DNA
cgaaaaccccgtctctacta

SEQ ID NO: 17983 - DNA, 20 bp, synthetic construct
  source 1..20: mol_type = other DNA
gcgaaaaccccgtctctact

SEQ ID NO: 17984 - DNA, 20 bp, synthetic construct
  source 1..20: mol_type = other DNA
ggcgaaaaccccgtctctac

SEQ ID NO: 17985 - DNA, 20 bp, synthetic construct
  source 1..20: mol_type = other DNA
tggcgaaaaccccgtctcta

SEQ ID NO: 17986 - DNA, 20 bp, synthetic construct
  source 1..20: mol_type = other DNA
atggcgaaaaccccgtctct

SEQ ID NO: 17987 - DNA, 20 bp, synthetic construct
  source 1..20: mol_type = other DNA
catggcgaaaaccccgtctc

SEQ ID NO: 17988 - DNA, 20 bp, synthetic construct
  source 1..20: mol_type = other DNA
acatggcgaaaaccccgtct

SEQ ID NO: 17989 - DNA, 20 bp, synthetic construct
  source 1..20: mol_type = other DNA
aacatggcgaaaaccccgtc

SEQ ID NO: 17990 - DNA, 20 bp, synthetic construct
  source 1..20: mol_type = other DNA
caacatggcgaaaaccccgt

SEQ ID NO: 17991 - DNA, 20 bp, synthetic construct
  source 1..20: mol_type = other DNA
acaacatggcgaaaaccccg

SEQ ID NO: 17992 - DNA, 20 bp, synthetic construct
  source 1..20: mol_type = other DNA
aacaacatggcgaaaacccc

SEQ ID NO: 17993 - DNA, 20 bp, synthetic construct
  source 1..20: mol_type = other DNA
gaacaacatggcgaaaaccc

SEQ ID NO: 17994 - DNA, 20 bp, synthetic construct
  source 1..20: mol_type = other DNA
tgaacaacatggcgaaaacc

SEQ ID NO: 17995 - DNA, 20 bp, synthetic construct
  source 1..20: mol_type = other DNA
ctgaacaacatggcgaaaac

SEQ ID NO: 17996 - DNA, 20 bp, synthetic construct
  source 1..20: mol_type = other DNA
cctgaacaacatggcgaaaa

SEQ ID NO: 17997 - DNA, 20 bp, synthetic construct
  source 1..20: mol_type = other DNA
gcctgaacaacatggcgaaa

SEQ ID NO: 17998 - DNA, 20 bp, synthetic construct
  source 1..20: mol_type = other DNA
agcctgaacaacatggcgaa

SEQ ID NO: 17999 - DNA, 20 bp, synthetic construct
  source 1..20: mol_type = other DNA
cagcctgaacaacatggcga

SEQ ID NO: 18000 - DNA, 20 bp, synthetic construct
  source 1..20: mol_type = other DNA
ccagcctgaacaacatggcg

SEQ ID NO: 18001 - DNA, 20 bp, synthetic construct
  source 1..20: mol_type = other DNA
accagcctgaacaacatggc

SEQ ID NO: 18002 - DNA, 20 bp, synthetic construct
  source 1..20: mol_type = other DNA
gaccagcctgaacaacatgg

SEQ ID NO: 18003 - DNA, 20 bp, synthetic construct
  source 1..20: mol_type = other DNA
agaccagcctgaacaacatg

SEQ ID NO: 18004 - DNA, 20 bp, synthetic construct
  source 1..20: mol_type = other DNA
aagaccagcctgaacaacat

SEQ ID NO: 18005 - DNA, 20 bp, synthetic construct
  source 1..20: mol_type = other DNA
caagaccagcctgaacaaca

SEQ ID NO: 18006 - DNA, 20 bp, synthetic construct
  source 1..20: mol_type = other DNA
tcaagaccagcctgaacaac

SEQ ID NO: 18007 - DNA, 20 bp, synthetic construct
  source 1..20: mol_type = other DNA
ttcaagaccagcctgaacaa

SEQ ID NO: 18008 - DNA, 20 bp, synthetic construct
  source 1..20: mol_type = other DNA
gttcaagaccagcctgaaca

SEQ ID NO: 18009 - DNA, 20 bp, synthetic construct
  source 1..20: mol_type = other DNA
agttcaagaccagcctgaac

SEQ ID NO: 18010 - DNA, 20 bp, synthetic construct
  source 1..20: mol_type = other DNA
gagttcaagaccagcctgaa

SEQ ID NO: 18011 - DNA, 20 bp, synthetic construct
  source 1..20: mol_type = other DNA
ggagttcaagaccagcctga

SEQ ID NO: 18012 - DNA, 20 bp, synthetic construct
  source 1..20: mol_type = other DNA
aggagttcaagaccagcctg

SEQ ID NO: 18013 - DNA, 20 bp, synthetic construct
  source 1..20: mol_type = other DNA
caggagttcaagaccagcct

SEQ ID NO: 18014 - DNA, 20 bp, synthetic construct
  source 1..20: mol_type = other DNA
tcaggagttcaagaccagcc

SEQ ID NO: 18015 - DNA, 20 bp, synthetic construct
  source 1..20: mol_type = other DNA
gtcaggagttcaagaccagc

SEQ ID NO: 18016 - DNA, 20 bp, synthetic construct
  source 1..20: mol_type = other DNA
ggtcaggagttcaagaccag

SEQ ID NO: 18017 - DNA, 20 bp, synthetic construct
  source 1..20: mol_type = other DNA
aggtcaggagttcaagacca

SEQ ID NO: 18018 - DNA, 20 bp, synthetic construct
  source 1..20: mol_type = other DNA
gaggtcaggagttcaagacc

SEQ ID NO: 18019 - DNA, 20 bp, synthetic construct
  source 1..20: mol_type = other DNA
tgaggtcaggagttcaagac

SEQ ID NO: 18020 - DNA, 20 bp, synthetic construct
  source 1..20: mol_type = other DNA
ctgaggtcaggagttcaaga

SEQ ID NO: 18021 - DNA, 20 bp, synthetic construct
  source 1..20: mol_type = other DNA
cctgaggtcaggagttcaag

SEQ ID NO: 18022 - DNA, 20 bp, synthetic construct
  source 1..20: mol_type = other DNA
acctgaggtcaggagttcaa

SEQ ID NO: 18023 - DNA, 20 bp, synthetic construct
  source 1..20: mol_type = other DNA
cacctgaggtcaggagttca

SEQ ID NO: 18024 - DNA, 20 bp, synthetic construct
  source 1..20: mol_type = other DNA
ccacctgaggtcaggagttc

SEQ ID NO: 18025 - DNA, 20 bp, synthetic construct
  source 1..20: mol_type = other DNA
accacctgaggtcaggagtt

SEQ ID NO: 18026 - DNA, 20 bp, synthetic construct
  source 1..20: mol_type = other DNA
gaccacctgaggtcaggagt

SEQ ID NO: 18027 - DNA, 20 bp, synthetic construct
  source 1..20: mol_type = other DNA
ggaccacctgaggtcaggag

SEQ ID NO: 18028 - DNA, 20 bp, synthetic construct
  source 1..20: mol_type = other DNA
cggaccacctgaggtcagga

SEQ ID NO: 18029 - DNA, 20 bp, synthetic construct
  source 1..20: mol_type = other DNA
gcggaccacctgaggtcagg

SEQ ID NO: 18030 - DNA, 20 bp, synthetic construct
  source 1..20: mol_type = other DNA
ggcggaccacctgaggtcag

SEQ ID NO: 18031 - DNA, 20 bp, synthetic construct
  source 1..20: mol_type = other DNA
gggcggaccacctgaggtca

SEQ ID NO: 18032 - DNA, 20 bp, synthetic construct
  source 1..20: mol_type = other DNA
tgggcggaccacctgaggtc

SEQ ID NO: 18033 - DNA, 20 bp, synthetic construct
  source 1..20: mol_type = other DNA
gtgggcggaccacctgaggt

SEQ ID NO: 18034 - DNA, 20 bp, synthetic construct
  source 1..20: mol_type = other DNA
ggtgggcggaccacctgagg

SEQ ID NO: 18035 - DNA, 20 bp, synthetic construct
  source 1..20: mol_type = other DNA
aggtgggcggaccacctgag

SEQ ID NO: 18036 - DNA, 20 bp, synthetic construct
  source 1..20: mol_type = other DNA
caggtgggcggaccacctga

SEQ ID NO: 18037 - DNA, 20 bp, synthetic construct
  source 1..20: mol_type = other DNA
ccaggtgggcggaccacctg

SEQ ID NO: 18038 - DNA, 20 bp, synthetic construct
  source 1..20: mol_type = other DNA
cccaggtgggcggaccacct

SEQ ID NO: 18039 - DNA, 20 bp, synthetic construct
  source 1..20: mol_type = other DNA
gcccaggtgggcggaccacc

SEQ ID NO: 18040 - DNA, 20 bp, synthetic construct
  source 1..20: mol_type = other DNA
ggcccaggtgggcggaccac

SEQ ID NO: 18041 - DNA, 20 bp, synthetic construct
  source 1..20: mol_type = other DNA
aggcccaggtgggcggacca

SEQ ID NO: 18042 - DNA, 20 bp, synthetic construct
  source 1..20: mol_type = other DNA
gaggcccaggtgggcggacc

SEQ ID NO: 18043 - DNA, 20 bp, synthetic construct
  source 1..20: mol_type = other DNA
ggaggcccaggtgggcggac

SEQ ID NO: 18044 - DNA, 20 bp, synthetic construct
  source 1..20: mol_type = other DNA
gggaggcccaggtgggcgga

SEQ ID NO: 18045 - DNA, 20 bp, synthetic construct
  source 1..20: mol_type = other DNA
tgggaggcccaggtgggcgg

SEQ ID NO: 18046 - DNA, 20 bp, synthetic construct
  source 1..20: mol_type = other DNA
ttgggaggcccaggtgggcg

SEQ ID NO: 18047 - DNA, 20 bp, synthetic construct
  source 1..20: mol_type = other DNA
gttgggaggcccaggtgggc

SEQ ID NO: 18048 - DNA, 20 bp, synthetic construct
  source 1..20: mol_type = other DNA
cgttgggaggcccaggtggg

SEQ ID NO: 18049 - DNA, 20 bp, synthetic construct
  source 1..20: mol_type = other DNA
acgttgggaggcccaggtgg

SEQ ID NO: 18050 - DNA, 20 bp, synthetic construct
  source 1..20: mol_type = other DNA
cacgttgggaggcccaggtg

SEQ ID NO: 18051 - DNA, 20 bp, synthetic construct
  source 1..20: mol_type = other DNA
gcacgttgggaggcccaggt

SEQ ID NO: 18052 - DNA, 20 bp, synthetic construct
  source 1..20: mol_type = other DNA
agcacgttgggaggcccagg

SEQ ID NO: 18053 - DNA, 20 bp, synthetic construct
  source 1..20: mol_type = other DNA
cagcacgttgggaggcccag

SEQ ID NO: 18054 - DNA, 20 bp, synthetic construct
  source 1..20: mol_type = other DNA
ccagcacgttgggaggccca

SEQ ID NO: 18055 - DNA, 20 bp, synthetic construct
  source 1..20: mol_type = other DNA
cccagcacgttgggaggccc

SEQ ID NO: 18056 - DNA, 20 bp, synthetic construct
  source 1..20: mol_type = other DNA
tcccagcacgttgggaggcc

SEQ ID NO: 18057 - DNA, 20 bp, synthetic construct
  source 1..20: mol_type = other DNA
atcccagcacgttgggaggc

SEQ ID NO: 18058 - DNA, 20 bp, synthetic construct
  source 1..20: mol_type = other DNA
aatcccagcacgttgggagg

SEQ ID NO: 18059 - DNA, 20 bp, synthetic construct
  source 1..20: mol_type = other DNA
taatcccagcacgttgggag

SEQ ID NO: 18060 - DNA, 20 bp, synthetic construct
  source 1..20: mol_type = other DNA
gtaatcccagcacgttggga

SEQ ID NO: 18061 - DNA, 20 bp, synthetic construct
  source 1..20: mol_type = other DNA
tgtaatcccagcacgttggg

SEQ ID NO: 18062 - DNA, 20 bp, synthetic construct
  source 1..20: mol_type = other DNA
ctgtaatcccagcacgttgg

SEQ ID NO: 18063 - DNA, 20 bp, synthetic construct
  source 1..20: mol_type = other DNA
cctgtaatcccagcacgttg

SEQ ID NO: 18064 - DNA, 20 bp, synthetic construct
  source 1..20: mol_type = other DNA
gcctgtaatcccagcacgtt

SEQ ID NO: 18065 - DNA, 20 bp, synthetic construct
  source 1..20: mol_type = other DNA
tgcctgtaatcccagcacgt

SEQ ID NO: 18066 - DNA, 20 bp, synthetic construct
  source 1..20: mol_type = other DNA
atgcctgtaatcccagcacg

SEQ ID NO: 18067 - DNA, 20 bp, synthetic construct
  source 1..20: mol_type = other DNA
catgcctgtaatcccagcac

SEQ ID NO: 18068 - DNA, 20 bp, synthetic construct
  source 1..20: mol_type = other DNA
tcatgcctgtaatcccagca

SEQ ID NO: 18069 - DNA, 20 bp, synthetic construct
  source 1..20: mol_type = other DNA
atcatgcctgtaatcccagc

SEQ ID NO: 18070 - DNA, 20 bp, synthetic construct
  source 1..20: mol_type = other DNA
gatcatgcctgtaatcccag

SEQ ID NO: 18071 - DNA, 20 bp, synthetic construct
  source 1..20: mol_type = other DNA
agatcatgcctgtaatccca

SEQ ID NO: 18072 - DNA, 20 bp, synthetic construct
  source 1..20: mol_type = other DNA
tagatcatgcctgtaatccc

SEQ ID NO: 18073 - DNA, 20 bp, synthetic construct
  source 1..20: mol_type = other DNA
gtagatcatgcctgtaatcc

SEQ ID NO: 18074 - DNA, 20 bp, synthetic construct
  source 1..20: mol_type = other DNA
ggtagatcatgcctgtaatc

SEQ ID NO: 18075 - DNA, 20 bp, synthetic construct
  source 1..20: mol_type = other DNA
cggtagatcatgcctgtaat

SEQ ID NO: 18076 - DNA, 20 bp, synthetic construct
  source 1..20: mol_type = other DNA
acggtagatcatgcctgtaa

SEQ ID NO: 18077 - DNA, 20 bp, synthetic construct
  source 1..20: mol_type = other DNA
cacggtagatcatgcctgta

SEQ ID NO: 18078 - DNA, 20 bp, synthetic construct
  source 1..20: mol_type = other DNA
gcacggtagatcatgcctgt

SEQ ID NO: 18079 - DNA, 20 bp, synthetic construct
  source 1..20: mol_type = other DNA
ggcacggtagatcatgcctg

SEQ ID NO: 18080 - DNA, 20 bp, synthetic construct
  source 1..20: mol_type = other DNA
aggcacggtagatcatgcct

SEQ ID NO: 18081 - DNA, 20 bp, synthetic construct
  source 1..20: mol_type = other DNA
caggcacggtagatcatgcc

SEQ ID NO: 18082 - DNA, 20 bp, synthetic construct
  source 1..20: mol_type = other DNA
ccaggcacggtagatcatgc

SEQ ID NO: 18083 - DNA, 20 bp, synthetic construct
  source 1..20: mol_type = other DNA
gccaggcacggtagatcatg

SEQ ID NO: 18084 - DNA, 20 bp, synthetic construct
  source 1..20: mol_type = other DNA
ggccaggcacggtagatcat

SEQ ID NO: 18085 - DNA, 20 bp, synthetic construct
  source 1..20: mol_type = other DNA
tggccaggcacggtagatca

SEQ ID NO: 18086 - DNA, 20 bp, synthetic construct
  source 1..20: mol_type = other DNA
atggccaggcacggtagatc

SEQ ID NO: 18087 - DNA, 20 bp, synthetic construct
  source 1..20: mol_type = other DNA
catggccaggcacggtagat

SEQ ID NO: 18088 - DNA, 20 bp, synthetic construct
  source 1..20: mol_type = other DNA
ccatggccaggcacggtaga

SEQ ID NO: 18089 - DNA, 20 bp, synthetic construct
  source 1..20: mol_type = other DNA
accatggccaggcacggtag

SEQ ID NO: 18090 - DNA, 20 bp, synthetic construct
  source 1..20: mol_type = other DNA
aaccatggccaggcacggta

SEQ ID NO: 18091 - DNA, 20 bp, synthetic construct
  source 1..20: mol_type = other DNA
gaaccatggccaggcacggt

SEQ ID NO: 18092 - DNA, 20 bp, synthetic construct
  source 1..20: mol_type = other DNA
tgaaccatggccaggcacgg

SEQ ID NO: 18093 - DNA, 20 bp, synthetic construct
  source 1..20: mol_type = other DNA
gtgaaccatggccaggcacg

SEQ ID NO: 18094 - DNA, 20 bp, synthetic construct
  source 1..20: mol_type = other DNA
agtgaaccatggccaggcac

SEQ ID NO: 18095 - DNA, 20 bp, synthetic construct
  source 1..20: mol_type = other DNA
gagtgaaccatggccaggca

SEQ ID NO: 18096 - DNA, 20 bp, synthetic construct
  source 1..20: mol_type = other DNA
agagtgaaccatggccaggc

SEQ ID NO: 18097 - DNA, 20 bp, synthetic construct
  source 1..20: mol_type = other DNA
aagagtgaaccatggccagg

SEQ ID NO: 18098 - DNA, 20 bp, synthetic construct
  source 1..20: mol_type = other DNA
gaagagtgaaccatggccag

SEQ ID NO: 18099 - DNA, 20 bp, synthetic construct
  source 1..20: mol_type = other DNA
tgaagagtgaaccatggcca

SEQ ID NO: 18100 - DNA, 20 bp, synthetic construct
  source 1..20: mol_type = other DNA
ctgaagagtgaaccatggcc

SEQ ID NO: 18101 - DNA, 20 bp, synthetic construct
  source 1..20: mol_type = other DNA
actgaagagtgaaccatggc

SEQ ID NO: 18102 - DNA, 20 bp, synthetic construct
  source 1..20: mol_type = other DNA
tactgaagagtgaaccatgg

SEQ ID NO: 18103 - DNA, 20 bp, synthetic construct
  source 1..20: mol_type = other DNA
ttactgaagagtgaaccatg

SEQ ID NO: 18104 - DNA, 20 bp, synthetic construct
  source 1..20: mol_type = other DNA
gttactgaagagtgaaccat

SEQ ID NO: 18105 - DNA, 20 bp, synthetic construct
  source 1..20: mol_type = other DNA
agttactgaagagtgaacca

SEQ ID NO: 18106 - DNA, 20 bp, synthetic construct
  source 1..20: mol_type = other DNA
tagttactgaagagtgaacc

SEQ ID NO: 18107 - DNA, 20 bp, synthetic construct
  source 1..20: mol_type = other DNA
ttagttactgaagagtgaac

SEQ ID NO: 18108 - DNA, 20 bp, synthetic construct
  source 1..20: mol_type = other DNA
tttagttactgaagagtgaa

SEQ ID NO: 18109 - DNA, 20 bp, synthetic construct
  source 1..20: mol_type = other DNA
ttttagttactgaagagtga

SEQ ID NO: 18110 - DNA, 20 bp, synthetic construct
  source 1..20: mol_type = other DNA
attttagttactgaagagtg

SEQ ID NO: 18111 - DNA, 20 bp, synthetic construct
  source 1..20: mol_type = other DNA
aattttagttactgaagagt

SEQ ID NO: 18112 - DNA, 20 bp, synthetic construct
  source 1..20: mol_type = other DNA
aaattttagttactgaagag

SEQ ID NO: 18113 - DNA, 20 bp, synthetic construct
  source 1..20: mol_type = other DNA
taaattttagttactgaaga

SEQ ID NO: 18114 - DNA, 20 bp, synthetic construct
  source 1..20: mol_type = other DNA
ttaaattttagttactgaag

SEQ ID NO: 18115 - DNA, 20 bp, synthetic construct
  source 1..20: mol_type = other DNA
cttaaattttagttactgaa

SEQ ID NO: 18116 - DNA, 20 bp, synthetic construct
  source 1..20: mol_type = other DNA
gcttaaattttagttactga

SEQ ID NO: 18117 - DNA, 20 bp, synthetic construct
  source 1..20: mol_type = other DNA
agcttaaattttagttactg

SEQ ID NO: 18118 - DNA, 20 bp, synthetic construct
  source 1..20: mol_type = other DNA
gagcttaaattttagttact

SEQ ID NO: 18119 - DNA, 20 bp, synthetic construct
  source 1..20: mol_type = other DNA
agagcttaaattttagttac

SEQ ID NO: 18120 - DNA, 20 bp, synthetic construct
  source 1..20: mol_type = other DNA
tagagcttaaattttagtta

SEQ ID NO: 18121 - DNA, 20 bp, synthetic construct
  source 1..20: mol_type = other DNA
atagagcttaaattttagtt

SEQ ID NO: 18122 - DNA, 20 bp, synthetic construct
  source 1..20: mol_type = other DNA
catagagcttaaattttagt

SEQ ID NO: 18123 - DNA, 20 bp, synthetic construct
  source 1..20: mol_type = other DNA
tcatagagcttaaattttag

SEQ ID NO: 18124 - DNA, 20 bp, synthetic construct
  source 1..20: mol_type = other DNA
ttcatagagcttaaatttta

SEQ ID NO: 18125 - DNA, 20 bp, synthetic construct
  source 1..20: mol_type = other DNA
tttcatagagcttaaatttt

SEQ ID NO: 18126 - DNA, 20 bp, synthetic construct
  source 1..20: mol_type = other DNA
ctttcatagagcttaaattt

SEQ ID NO: 18127 - DNA, 20 bp, synthetic construct
  source 1..20: mol_type = other DNA
gctttcatagagcttaaatt

SEQ ID NO: 18128 - DNA, 20 bp, synthetic construct
  source 1..20: mol_type = other DNA
tgctttcatagagcttaaat

SEQ ID NO: 18129 - DNA, 20 bp, synthetic construct
  source 1..20: mol_type = other DNA
ctgctttcatagagcttaaa

SEQ ID NO: 18130 - DNA, 20 bp, synthetic construct
  source 1..20: mol_type = other DNA
cctgctttcatagagcttaa

SEQ ID NO: 18131 - DNA, 20 bp, synthetic construct
  source 1..20: mol_type = other DNA
tcctgctttcatagagctta

SEQ ID NO: 18132 - DNA, 20 bp, synthetic construct
  source 1..20: mol_type = other DNA
ttcctgctttcatagagctt

SEQ ID NO: 18133 - DNA, 20 bp, synthetic construct
  source 1..20: mol_type = other DNA
gttcctgctttcatagagct

SEQ ID NO: 18134 - DNA, 20 bp, synthetic construct
  source 1..20: mol_type = other DNA
agttcctgctttcatagagc

SEQ ID NO: 18135 - DNA, 20 bp, synthetic construct
  source 1..20: mol_type = other DNA
aagttcctgctttcatagag

SEQ ID NO: 18136 - DNA, 20 bp, synthetic construct
  source 1..20: mol_type = other DNA
aaagttcctgctttcataga

SEQ ID NO: 18137 - DNA, 20 bp, synthetic construct
  source 1..20: mol_type = other DNA
caaagttcctgctttcatag

SEQ ID NO: 18138 - DNA, 20 bp, synthetic construct
  source 1..20: mol_type = other DNA
acaaagttcctgctttcata

SEQ ID NO: 18139 - DNA, 20 bp, synthetic construct
  source 1..20: mol_type = other DNA
aacaaagttcctgctttcat

SEQ ID NO: 18140 - DNA, 20 bp, synthetic construct
  source 1..20: mol_type = other DNA
aaacaaagttcctgctttca

SEQ ID NO: 18141 - DNA, 20 bp, synthetic construct
  source 1..20: mol_type = other DNA
aaaacaaagttcctgctttc

SEQ ID NO: 18142 - DNA, 20 bp, synthetic construct
  source 1..20: mol_type = other DNA
caaaacaaagttcctgcttt

SEQ ID NO: 18143 - DNA, 20 bp, synthetic construct
  source 1..20: mol_type = other DNA
acaaaacaaagttcctgctt

SEQ ID NO: 18144 - DNA, 20 bp, synthetic construct
  source 1..20: mol_type = other DNA
aacaaaacaaagttcctgct

SEQ ID NO: 18145 - DNA, 20 bp, synthetic construct
  source 1..20: mol_type = other DNA
gaacaaaacaaagttcctgc

SEQ ID NO: 18146 - DNA, 20 bp, synthetic construct
  source 1..20: mol_type = other DNA
tgaacaaaacaaagttcctg

SEQ ID NO: 18147 - DNA, 20 bp, synthetic construct
  source 1..20: mol_type = other DNA
gtgaacaaaacaaagttcct

SEQ ID NO: 18148 - DNA, 20 bp, synthetic construct
  source 1..20: mol_type = other DNA
agtgaacaaaacaaagttcc

SEQ ID NO: 18149 - DNA, 20 bp, synthetic construct
  source 1..20: mol_type = other DNA
tagtgaacaaaacaaagttc

SEQ ID NO: 18150 - DNA, 20 bp, synthetic construct
  source 1..20: mol_type = other DNA
atagtgaacaaaacaaagtt

SEQ ID NO: 18151 - DNA, 20 bp, synthetic construct
  source 1..20: mol_type = other DNA
aatagtgaacaaaacaaagt

SEQ ID NO: 18152 - DNA, 20 bp, synthetic construct
  source 1..20: mol_type = other DNA
caatagtgaacaaaacaaag

SEQ ID NO: 18153 - DNA, 20 bp, synthetic construct
  source 1..20: mol_type = other DNA
tcaatagtgaacaaaacaaa

SEQ ID NO: 18154 - DNA, 20 bp, synthetic construct
  source 1..20: mol_type = other DNA
atcaatagtgaacaaaacaa

SEQ ID NO: 18155 - DNA, 20 bp, synthetic construct
  source 1..20: mol_type = other DNA
aatcaatagtgaacaaaaca

SEQ ID NO: 18156 - DNA, 20 bp, synthetic construct
  source 1..20: mol_type = other DNA
caatcaatagtgaacaaaac

SEQ ID NO: 18157 - DNA, 20 bp, synthetic construct
  source 1..20: mol_type = other DNA
acaatcaatagtgaacaaaa

SEQ ID NO: 18158 - DNA, 20 bp, synthetic construct
  source 1..20: mol_type = other DNA
tacaatcaatagtgaacaaa

SEQ ID NO: 18159 - DNA, 20 bp, synthetic construct
  source 1..20: mol_type = other DNA
atacaatcaatagtgaacaa

SEQ ID NO: 18160 - DNA, 20 bp, synthetic construct
  source 1..20: mol_type = other DNA
gatacaatcaatagtgaaca

SEQ ID NO: 18161 - DNA, 20 bp, synthetic construct
  source 1..20: mol_type = other DNA
ggatacaatcaatagtgaac

SEQ ID NO: 18162 - DNA, 20 bp, synthetic construct
  source 1..20: mol_type = other DNA
gggatacaatcaatagtgaa

SEQ ID NO: 18163 - DNA, 20 bp, synthetic construct
  source 1..20: mol_type = other DNA
agggatacaatcaatagtga

SEQ ID NO: 18164 - DNA, 20 bp, synthetic construct
  source 1..20: mol_type = other DNA
tagggatacaatcaatagtg

SEQ ID NO: 18165 - DNA, 20 bp, synthetic construct
  source 1..20: mol_type = other DNA
atagggatacaatcaatagt

SEQ ID NO: 18166 - DNA, 20 bp, synthetic construct
  source 1..20: mol_type = other DNA
aatagggatacaatcaatag

SEQ ID NO: 18167 - DNA, 20 bp, synthetic construct
  source 1..20: mol_type = other DNA
aaatagggatacaatcaata

SEQ ID NO: 18168 - DNA, 20 bp, synthetic construct
  source 1..20: mol_type = other DNA
gaaatagggatacaatcaat

SEQ ID NO: 18169 - DNA, 20 bp, synthetic construct
  source 1..20: mol_type = other DNA
agaaatagggatacaatcaa

SEQ ID NO: 18170 - DNA, 20 bp, synthetic construct
  source 1..20: mol_type = other DNA
aagaaatagggatacaatca

SEQ ID NO: 18171 - DNA, 20 bp, synthetic construct
  source 1..20: mol_type = other DNA
caagaaatagggatacaatc

SEQ ID NO: 18172 - DNA, 20 bp, synthetic construct
  source 1..20: mol_type = other DNA
tcaagaaatagggatacaat

SEQ ID NO: 18173 - DNA, 20 bp, synthetic construct
  source 1..20: mol_type = other DNA
ttcaagaaatagggatacaa

SEQ ID NO: 18174 - DNA, 20 bp, synthetic construct
  source 1..20: mol_type = other DNA
attcaagaaatagggataca

SEQ ID NO: 18175 - DNA, 20 bp, synthetic construct
  source 1..20: mol_type = other DNA
cattcaagaaatagggatac

SEQ ID NO: 18176 - DNA, 20 bp, synthetic construct
  source 1..20: mol_type = other DNA
ccattcaagaaatagggata

SEQ ID NO: 18177 - DNA, 20 bp, synthetic construct
  source 1..20: mol_type = other DNA
accattcaagaaatagggat

SEQ ID NO: 18178 - DNA, 20 bp, synthetic construct
  source 1..20: mol_type = other DNA
aaccattcaagaaataggga

SEQ ID NO: 18179 - DNA, 20 bp, synthetic construct
  source 1..20: mol_type = other DNA
caaccattcaagaaataggg

SEQ ID NO: 18180 - DNA, 20 bp, synthetic construct
  source 1..20: mol_type = other DNA
ccaaccattcaagaaatagg

SEQ ID NO: 18181 - DNA, 20 bp, synthetic construct
  source 1..20: mol_type = other DNA
gccaaccattcaagaaatag

SEQ ID NO: 18182 - DNA, 20 bp, synthetic construct
  source 1..20: mol_type = other DNA
tgccaaccattcaagaaata

SEQ ID NO: 18183 - DNA, 20 bp, synthetic construct
  source 1..20: mol_type = other DNA
gtgccaaccattcaagaaat

SEQ ID NO: 18184 - DNA, 20 bp, synthetic construct
  source 1..20: mol_type = other DNA
agtgccaaccattcaagaaa

SEQ ID NO: 18185 - DNA, 20 bp, synthetic construct
  source 1..20: mol_type = other DNA
aagtgccaaccattcaagaa

SEQ ID NO: 18186 - DNA, 20 bp, synthetic construct
  source 1..20: mol_type = other DNA
taagtgccaaccattcaaga

SEQ ID NO: 18187 - DNA, 20 bp, synthetic construct
  source 1..20: mol_type = other DNA
ttaagtgccaaccattcaag

SEQ ID NO: 18188 - DNA, 20 bp, synthetic construct
  source 1..20: mol_type = other DNA
gttaagtgccaaccattcaa

SEQ ID NO: 18189 - DNA, 20 bp, synthetic construct
  source 1..20: mol_type = other DNA
agttaagtgccaaccattca

SEQ ID NO: 18190 - DNA, 20 bp, synthetic construct
  source 1..20: mol_type = other DNA
cagttaagtgccaaccattc

SEQ ID NO: 18191 - DNA, 20 bp, synthetic construct
  source 1..20: mol_type = other DNA
gcagttaagtgccaaccatt

SEQ ID NO: 18192 - DNA, 20 bp, synthetic construct
  source 1..20: mol_type = other DNA
agcagttaagtgccaaccat

SEQ ID NO: 18193 - DNA, 20 bp, synthetic construct
  source 1..20: mol_type = other DNA
aagcagttaagtgccaacca

SEQ ID NO: 18194 - DNA, 20 bp, synthetic construct
  source 1..20: mol_type = other DNA
caagcagttaagtgccaacc

SEQ ID NO: 18195 - DNA, 20 bp, synthetic construct
  source 1..20: mol_type = other DNA
ccaagcagttaagtgccaac

SEQ ID NO: 18196 - DNA, 20 bp, synthetic construct
  source 1..20: mol_type = other DNA
accaagcagttaagtgccaa

SEQ ID NO: 18197 - DNA, 20 bp, synthetic construct
  source 1..20: mol_type = other DNA
gaccaagcagttaagtgcca

SEQ ID NO: 18198 - DNA, 20 bp, synthetic construct
  source 1..20: mol_type = other DNA
tgaccaagcagttaagtgcc

SEQ ID NO: 18199 - DNA, 20 bp, synthetic construct
  source 1..20: mol_type = other DNA
gtgaccaagcagttaagtgc

SEQ ID NO: 18200 - DNA, 20 bp, synthetic construct
  source 1..20: mol_type = other DNA
tgtgaccaagcagttaagtg

SEQ ID NO: 18201 - DNA, 20 bp, synthetic construct
  source 1..20: mol_type = other DNA
atgtgaccaagcagttaagt

SEQ ID NO: 18202 - DNA, 20 bp, synthetic construct
  source 1..20: mol_type = other DNA
catgtgaccaagcagttaag

SEQ ID NO: 18203 - DNA, 20 bp, synthetic construct
  source 1..20: mol_type = other DNA
acatgtgaccaagcagttaa

SEQ ID NO: 18204 - DNA, 20 bp, synthetic construct
  source 1..20: mol_type = other DNA
aacatgtgaccaagcagtta

SEQ ID NO: 18205 - DNA, 20 bp, synthetic construct
  source 1..20: mol_type = other DNA
aaacatgtgaccaagcagtt

SEQ ID NO: 18206 - DNA, 20 bp, synthetic construct
  source 1..20: mol_type = other DNA
caaacatgtgaccaagcagt

SEQ ID NO: 18207 - DNA, 20 bp, synthetic construct
  source 1..20: mol_type = other DNA
tcaaacatgtgaccaagcag

SEQ ID NO: 18208 - DNA, 20 bp, synthetic construct
  source 1..20: mol_type = other DNA
ttcaaacatgtgaccaagca

SEQ ID NO: 18209 - DNA, 20 bp, synthetic construct
  source 1..20: mol_type = other DNA
attcaaacatgtgaccaagc

SEQ ID NO: 18210 - DNA, 20 bp, synthetic construct
  source 1..20: mol_type = other DNA
cattcaaacatgtgaccaag

SEQ ID NO: 18211 - DNA, 20 bp, synthetic construct
  source 1..20: mol_type = other DNA
ccattcaaacatgtgaccaa

SEQ ID NO: 18212 - DNA, 20 bp, synthetic construct
  source 1..20: mol_type = other DNA
cccattcaaacatgtgacca

SEQ ID NO: 18213 - DNA, 20 bp, synthetic construct
  source 1..20: mol_type = other DNA
gcccattcaaacatgtgacc

SEQ ID NO: 18214 - DNA, 20 bp, synthetic construct
  source 1..20: mol_type = other DNA
tgcccattcaaacatgtgac

SEQ ID NO: 18215 - DNA, 20 bp, synthetic construct
  source 1..20: mol_type = other DNA
ttgcccattcaaacatgtga

SEQ ID NO: 18216 - DNA, 20 bp, synthetic construct
  source 1..20: mol_type = other DNA
cttgcccattcaaacatgtg

SEQ ID NO: 18217 - DNA, 20 bp, synthetic construct
  source 1..20: mol_type = other DNA
acttgcccattcaaacatgt

SEQ ID NO: 18218 - DNA, 20 bp, synthetic construct
  source 1..20: mol_type = other DNA
aacttgcccattcaaacatg

SEQ ID NO: 18219 - DNA, 20 bp, synthetic construct
  source 1..20: mol_type = other DNA
taacttgcccattcaaacat

SEQ ID NO: 18220 - DNA, 20 bp, synthetic construct
  source 1..20: mol_type = other DNA
gtaacttgcccattcaaaca

SEQ ID NO: 18221 - DNA, 20 bp, synthetic construct
  source 1..20: mol_type = other DNA
agtaacttgcccattcaaac

SEQ ID NO: 18222 - DNA, 20 bp, synthetic construct
  source 1..20: mol_type = other DNA
gagtaacttgcccattcaaa

SEQ ID NO: 18223 - DNA, 20 bp, synthetic construct
  source 1..20: mol_type = other DNA
tgagtaacttgcccattcaa

SEQ ID NO: 18224 - DNA, 20 bp, synthetic construct
  source 1..20: mol_type = other DNA
ctgagtaacttgcccattca

SEQ ID NO: 18225 - DNA, 20 bp, synthetic construct
  source 1..20: mol_type = other DNA
gctgagtaacttgcccattc

SEQ ID NO: 18226 - DNA, 20 bp, synthetic construct
  source 1..20: mol_type = other DNA
ggctgagtaacttgcccatt

SEQ ID NO: 18227 - DNA, 20 bp, synthetic construct
  source 1..20: mol_type = other DNA
tggctgagtaacttgcccat

SEQ ID NO: 18228 - DNA, 20 bp, synthetic construct
  source 1..20: mol_type = other DNA
gtggctgagtaacttgccca

SEQ ID NO: 18229 - DNA, 20 bp, synthetic construct
  source 1..20: mol_type = other DNA
agtggctgagtaacttgccc

SEQ ID NO: 18230 - DNA, 20 bp, synthetic construct
  source 1..20: mol_type = other DNA
gagtggctgagtaacttgcc

SEQ ID NO: 18231 - DNA, 20 bp, synthetic construct
  source 1..20: mol_type = other DNA
agagtggctgagtaacttgc

SEQ ID NO: 18232 - DNA, 20 bp, synthetic construct
  source 1..20: mol_type = other DNA
gagagtggctgagtaacttg

SEQ ID NO: 18233 - DNA, 20 bp, synthetic construct
  source 1..20: mol_type = other DNA
tgagagtggctgagtaactt

SEQ ID NO: 18234 - DNA, 20 bp, synthetic construct
  source 1..20: mol_type = other DNA
ctgagagtggctgagtaact

SEQ ID NO: 18235 - DNA, 20 bp, synthetic construct
  source 1..20: mol_type = other DNA
cctgagagtggctgagtaac

SEQ ID NO: 18236 - DNA, 20 bp, synthetic construct
  source 1..20: mol_type = other DNA
gcctgagagtggctgagtaa

SEQ ID NO: 18237 - DNA, 20 bp, synthetic construct
  source 1..20: mol_type = other DNA
agcctgagagtggctgagta

SEQ ID NO: 18238 - DNA, 20 bp, synthetic construct
  source 1..20: mol_type = other DNA
aagcctgagagtggctgagt

SEQ ID NO: 18239 - DNA, 20 bp, synthetic construct
  source 1..20: mol_type = other DNA
taagcctgagagtggctgag

SEQ ID NO: 18240 - DNA, 20 bp, synthetic construct
  source 1..20: mol_type = other DNA
ctaagcctgagagtggctga

SEQ ID NO: 18241 - DNA, 20 bp, synthetic construct
  source 1..20: mol_type = other DNA
actaagcctgagagtggctg

SEQ ID NO: 18242 - DNA, 20 bp, synthetic construct
  source 1..20: mol_type = other DNA
aactaagcctgagagtggct

SEQ ID NO: 18243 - DNA, 20 bp, synthetic construct
  source 1..20: mol_type = other DNA
aaactaagcctgagagtggc

SEQ ID NO: 18244 - DNA, 20 bp, synthetic construct
  source 1..20: mol_type = other DNA
taaactaagcctgagagtgg

SEQ ID NO: 18245 - DNA, 20 bp, synthetic construct
  source 1..20: mol_type = other DNA
ataaactaagcctgagagtg

SEQ ID NO: 18246 - DNA, 20 bp, synthetic construct
  source 1..20: mol_type = other DNA
aataaactaagcctgagagt

SEQ ID NO: 18247 - DNA, 20 bp, synthetic construct
  source 1..20: mol_type = other DNA
aaataaactaagcctgagag

SEQ ID NO: 18248 - DNA, 20 bp, synthetic construct
  source 1..20: mol_type = other DNA
taaataaactaagcctgaga

SEQ ID NO: 18249 - DNA, 20 bp, synthetic construct
  source 1..20: mol_type = other DNA
gtaaataaactaagcctgag

SEQ ID NO: 18250 - DNA, 20 bp, synthetic construct
  source 1..20: mol_type = other DNA
ggtaaataaactaagcctga

SEQ ID NO: 18251 - DNA, 20 bp, synthetic construct
  source 1..20: mol_type = other DNA
aggtaaataaactaagcctg

SEQ ID NO: 18252 - DNA, 20 bp, synthetic construct
  source 1..20: mol_type = other DNA
taggtaaataaactaagcct

SEQ ID NO: 18253 - DNA, 20 bp, synthetic construct
  source 1..20: mol_type = other DNA
ataggtaaataaactaagcc

SEQ ID NO: 18254 - DNA, 20 bp, synthetic construct
  source 1..20: mol_type = other DNA
aataggtaaataaactaagc

SEQ ID NO: 18255 - DNA, 20 bp, synthetic construct
  source 1..20: mol_type = other DNA
taataggtaaataaactaag

SEQ ID NO: 18256 - DNA, 20 bp, synthetic construct
  source 1..20: mol_type = other DNA
ttaataggtaaataaactaa

SEQ ID NO: 18257 - DNA, 20 bp, synthetic construct
  source 1..20: mol_type = other DNA
tttaataggtaaataaacta

SEQ ID NO: 18258 - DNA, 20 bp, synthetic construct
  source 1..20: mol_type = other DNA
ttttaataggtaaataaact

SEQ ID NO: 18259 - DNA, 20 bp, synthetic construct
  source 1..20: mol_type = other DNA
cttttaataggtaaataaac

SEQ ID NO: 18260 - DNA, 20 bp, synthetic construct
  source 1..20: mol_type = other DNA
tcttttaataggtaaataaa

SEQ ID NO: 18261 - DNA, 20 bp, synthetic construct
  source 1..20: mol_type = other DNA
ctcttttaataggtaaataa

SEQ ID NO: 18262 - DNA, 20 bp, synthetic construct
  source 1..20: mol_type = other DNA
tctcttttaataggtaaata

SEQ ID NO: 18263 - DNA, 20 bp, synthetic construct
  source 1..20: mol_type = other DNA
ttctcttttaataggtaaat

SEQ ID NO: 18264 - DNA, 20 bp, synthetic construct
  source 1..20: mol_type = other DNA
tttctcttttaataggtaaa

SEQ ID NO: 18265 - DNA, 20 bp, synthetic construct
  source 1..20: mol_type = other DNA
ctttctcttttaataggtaa

SEQ ID NO: 18266 - DNA, 20 bp, synthetic construct
  source 1..20: mol_type = other DNA
tctttctcttttaataggta

SEQ ID NO: 18267 - DNA, 20 bp, synthetic construct
  source 1..20: mol_type = other DNA
ttctttctcttttaataggt

SEQ ID NO: 18268 - DNA, 20 bp, synthetic construct
  source 1..20: mol_type = other DNA
attctttctcttttaatagg

SEQ ID NO: 18269 - DNA, 20 bp, synthetic construct
  source 1..20: mol_type = other DNA
tattctttctcttttaatag

SEQ ID NO: 18270 - DNA, 20 bp, synthetic construct
  source 1..20: mol_type = other DNA
atattctttctcttttaata

SEQ ID NO: 18271 - DNA, 20 bp, synthetic construct
  source 1..20: mol_type = other DNA
gatattctttctcttttaat

SEQ ID NO: 18272 - DNA, 20 bp, synthetic construct
  source 1..20: mol_type = other DNA
agatattctttctcttttaa

SEQ ID NO: 18273 - DNA, 20 bp, synthetic construct
  source 1..20: mol_type = other DNA
aagatattctttctctttta

SEQ ID NO: 18274 - DNA, 20 bp, synthetic construct
  source 1..20: mol_type = other DNA
gaagatattctttctctttt

SEQ ID NO: 18275 - DNA, 20 bp, synthetic construct
  source 1..20: mol_type = other DNA
ggaagatattctttctcttt

SEQ ID NO: 18276 - DNA, 20 bp, synthetic construct
  source 1..20: mol_type = other DNA
aggaagatattctttctctt

SEQ ID NO: 18277 - DNA, 20 bp, synthetic construct
  source 1..20: mol_type = other DNA
aaggaagatattctttctct

SEQ ID NO: 18278 - DNA, 20 bp, synthetic construct
  source 1..20: mol_type = other DNA
caaggaagatattctttctc

SEQ ID NO: 18279 - DNA, 20 bp, synthetic construct
  source 1..20: mol_type = other DNA
ccaaggaagatattctttct

SEQ ID NO: 18280 - DNA, 20 bp, synthetic construct
  source 1..20: mol_type = other DNA
gccaaggaagatattctttc

SEQ ID NO: 18281 - DNA, 20 bp, synthetic construct
  source 1..20: mol_type = other DNA
agccaaggaagatattcttt

SEQ ID NO: 18282 - DNA, 20 bp, synthetic construct
  source 1..20: mol_type = other DNA
cagccaaggaagatattctt

SEQ ID NO: 18283 - DNA, 20 bp, synthetic construct
  source 1..20: mol_type = other DNA
ccagccaaggaagatattct

SEQ ID NO: 18284 - DNA, 20 bp, synthetic construct
  source 1..20: mol_type = other DNA
cccagccaaggaagatattc

SEQ ID NO: 18285 - DNA, 20 bp, synthetic construct
  source 1..20: mol_type = other DNA
gcccagccaaggaagatatt

SEQ ID NO: 18286 - DNA, 20 bp, synthetic construct
  source 1..20: mol_type = other DNA
cgcccagccaaggaagatat

SEQ ID NO: 18287 - DNA, 20 bp, synthetic construct
  source 1..20: mol_type = other DNA
gcgcccagccaaggaagata

SEQ ID NO: 18288 - DNA, 20 bp, synthetic construct
  source 1..20: mol_type = other DNA
cgcgcccagccaaggaagat

SEQ ID NO: 18289 - DNA, 20 bp, synthetic construct
  source 1..20: mol_type = other DNA
ccgcgcccagccaaggaaga

SEQ ID NO: 18290 - DNA, 20 bp, synthetic construct
  source 1..20: mol_type = other DNA
accgcgcccagccaaggaag

SEQ ID NO: 18291 - DNA, 20 bp, synthetic construct
  source 1..20: mol_type = other DNA
caccgcgcccagccaaggaa

SEQ ID NO: 18292 - DNA, 20 bp, synthetic construct
  source 1..20: mol_type = other DNA
ccaccgcgcccagccaagga

SEQ ID NO: 18293 - DNA, 20 bp, synthetic construct
  source 1..20: mol_type = other DNA
gccaccgcgcccagccaagg

SEQ ID NO: 18294 - DNA, 20 bp, synthetic construct
  source 1..20: mol_type = other DNA
agccaccgcgcccagccaag

SEQ ID NO: 18295 - DNA, 20 bp, synthetic construct
  source 1..20: mol_type = other DNA
gagccaccgcgcccagccaa

SEQ ID NO: 18296 - DNA, 20 bp, synthetic construct
  source 1..20: mol_type = other DNA
tgagccaccgcgcccagcca

SEQ ID NO: 18297 - DNA, 20 bp, synthetic construct
  source 1..20: mol_type = other DNA
gtgagccaccgcgcccagcc

SEQ ID NO: 18298 - DNA, 20 bp, synthetic construct
  source 1..20: mol_type = other DNA
cgtgagccaccgcgcccagc

SEQ ID NO: 18299 - DNA, 20 bp, synthetic construct
  source 1..20: mol_type = other DNA
gcgtgagccaccgcgcccag

SEQ ID NO: 18300 - DNA, 20 bp, synthetic construct
  source 1..20: mol_type = other DNA
ggcgtgagccaccgcgccca

SEQ ID NO: 18301 - DNA, 20 bp, synthetic construct
  source 1..20: mol_type = other DNA
aggcgtgagccaccgcgccc

SEQ ID NO: 18302 - DNA, 20 bp, synthetic construct
  source 1..20: mol_type = other DNA
taggcgtgagccaccgcgcc

SEQ ID NO: 18303 - DNA, 20 bp, synthetic construct
  source 1..20: mol_type = other DNA
ataggcgtgagccaccgcgc

SEQ ID NO: 18304 - DNA, 20 bp, synthetic construct
  source 1..20: mol_type = other DNA
tataggcgtgagccaccgcg

SEQ ID NO: 18305 - DNA, 20 bp, synthetic construct
  source 1..20: mol_type = other DNA
ttataggcgtgagccaccgc

SEQ ID NO: 18306 - DNA, 20 bp, synthetic construct
  source 1..20: mol_type = other DNA
attataggcgtgagccaccg

SEQ ID NO: 18307 - DNA, 20 bp, synthetic construct
  source 1..20: mol_type = other DNA
gattataggcgtgagccacc

SEQ ID NO: 18308 - DNA, 20 bp, synthetic construct
  source 1..20: mol_type = other DNA
ggattataggcgtgagccac

SEQ ID NO: 18309 - DNA, 20 bp, synthetic construct
  source 1..20: mol_type = other DNA
gggattataggcgtgagcca

SEQ ID NO: 18310 - DNA, 20 bp, synthetic construct
  source 1..20: mol_type = other DNA
tgggattataggcgtgagcc

SEQ ID NO: 18311 - DNA, 20 bp, synthetic construct
  source 1..20: mol_type = other DNA
ctgggattataggcgtgagc

SEQ ID NO: 18312 - DNA, 20 bp, synthetic construct
  source 1..20: mol_type = other DNA
gctgggattataggcgtgag

SEQ ID NO: 18313 - DNA, 20 bp, synthetic construct
  source 1..20: mol_type = other DNA
tgctgggattataggcgtga

SEQ ID NO: 18314 - DNA, 20 bp, synthetic construct
  source 1..20: mol_type = other DNA
gtgctgggattataggcgtg

SEQ ID NO: 18315 - DNA, 20 bp, synthetic construct
  source 1..20: mol_type = other DNA
agtgctgggattataggcgt

SEQ ID NO: 18316 - DNA, 20 bp, synthetic construct
  source 1..20: mol_type = other DNA
aagtgctgggattataggcg

SEQ ID NO: 18317 - DNA, 20 bp, synthetic construct
  source 1..20: mol_type = other DNA
aaagtgctgggattataggc

SEQ ID NO: 18318 - DNA, 20 bp, synthetic construct
  source 1..20: mol_type = other DNA
caaagtgctgggattatagg

SEQ ID NO: 18319 - DNA, 20 bp, synthetic construct
  source 1..20: mol_type = other DNA
ccaaagtgctgggattatag

SEQ ID NO: 18320 - DNA, 20 bp, synthetic construct
  source 1..20: mol_type = other DNA
cccaaagtgctgggattata

SEQ ID NO: 18321 - DNA, 20 bp, synthetic construct
  source 1..20: mol_type = other DNA
tcccaaagtgctgggattat

SEQ ID NO: 18322 - DNA, 20 bp, synthetic construct
  source 1..20: mol_type = other DNA
ctcccaaagtgctgggatta

SEQ ID NO: 18323 - DNA, 20 bp, synthetic construct
  source 1..20: mol_type = other DNA
cctcccaaagtgctgggatt

SEQ ID NO: 18324 - DNA, 20 bp, synthetic construct
  source 1..20: mol_type = other DNA
gcctcccaaagtgctgggat

SEQ ID NO: 18325 - DNA, 20 bp, synthetic construct
  source 1..20: mol_type = other DNA
agcctcccaaagtgctggga

SEQ ID NO: 18326 - DNA, 20 bp, synthetic construct
  source 1..20: mol_type = other DNA
cagcctcccaaagtgctggg

SEQ ID NO: 18327 - DNA, 20 bp, synthetic construct
  source 1..20: mol_type = other DNA
tcagcctcccaaagtgctgg

SEQ ID NO: 18328 - DNA, 20 bp, synthetic construct
  source 1..20: mol_type = other DNA
ctcagcctcccaaagtgctg

SEQ ID NO: 18329 - DNA, 20 bp, synthetic construct
  source 1..20: mol_type = other DNA
cctcagcctcccaaagtgct

SEQ ID NO: 18330 - DNA, 20 bp, synthetic construct
  source 1..20: mol_type = other DNA
gcctcagcctcccaaagtgc

SEQ ID NO: 18331 - DNA, 20 bp, synthetic construct
  source 1..20: mol_type = other DNA
cgcctcagcctcccaaagtg

SEQ ID NO: 18332 - DNA, 20 bp, synthetic construct
  source 1..20: mol_type = other DNA
ccgcctcagcctcccaaagt

SEQ ID NO: 18333 - DNA, 20 bp, synthetic construct
  source 1..20: mol_type = other DNA
cccgcctcagcctcccaaag

SEQ ID NO: 18334 - DNA, 20 bp, synthetic construct
  source 1..20: mol_type = other DNA
acccgcctcagcctcccaaa

SEQ ID NO: 18335 - DNA, 20 bp, synthetic construct
  source 1..20: mol_type = other DNA
cacccgcctcagcctcccaa

SEQ ID NO: 18336 - DNA, 20 bp, synthetic construct
  source 1..20: mol_type = other DNA
ccacccgcctcagcctccca

SEQ ID NO: 18337 - DNA, 20 bp, synthetic construct
  source 1..20: mol_type = other DNA
tccacccgcctcagcctccc

SEQ ID NO: 18338 - DNA, 20 bp, synthetic construct
  source 1..20: mol_type = other DNA
atccacccgcctcagcctcc

SEQ ID NO: 18339 - DNA, 20 bp, synthetic construct
  source 1..20: mol_type = other DNA
gatccacccgcctcagcctc

SEQ ID NO: 18340 - DNA, 20 bp, synthetic construct
  source 1..20: mol_type = other DNA
tgatccacccgcctcagcct

SEQ ID NO: 18341 - DNA, 20 bp, synthetic construct
  source 1..20: mol_type = other DNA
gtgatccacccgcctcagcc

SEQ ID NO: 18342 - DNA, 20 bp, synthetic construct
  source 1..20: mol_type = other DNA
cgtgatccacccgcctcagc

SEQ ID NO: 18343 - DNA, 20 bp, synthetic construct
  source 1..20: mol_type = other DNA
tcgtgatccacccgcctcag

SEQ ID NO: 18344 - DNA, 20 bp, synthetic construct
  source 1..20: mol_type = other DNA
ctcgtgatccacccgcctca

SEQ ID NO: 18345 - DNA, 20 bp, synthetic construct
  source 1..20: mol_type = other DNA
cctcgtgatccacccgcctc

SEQ ID NO: 18346 - DNA, 20 bp, synthetic construct
  source 1..20: mol_type = other DNA
acctcgtgatccacccgcct

SEQ ID NO: 18347 - DNA, 20 bp, synthetic construct
  source 1..20: mol_type = other DNA
gacctcgtgatccacccgcc

SEQ ID NO: 18348 - DNA, 20 bp, synthetic construct
  source 1..20: mol_type = other DNA
tgacctcgtgatccacccgc

SEQ ID NO: 18349 - DNA, 20 bp, synthetic construct
  source 1..20: mol_type = other DNA
ctgacctcgtgatccacccg

SEQ ID NO: 18350 - DNA, 20 bp, synthetic construct
  source 1..20: mol_type = other DNA
cctgacctcgtgatccaccc

SEQ ID NO: 18351 - DNA, 20 bp, synthetic construct
  source 1..20: mol_type = other DNA
tcctgacctcgtgatccacc

SEQ ID NO: 18352 - DNA, 20 bp, synthetic construct
  source 1..20: mol_type = other DNA
ctcctgacctcgtgatccac

SEQ ID NO: 18353 - DNA, 20 bp, synthetic construct
  source 1..20: mol_type = other DNA
tctcctgacctcgtgatcca

SEQ ID NO: 18354 - DNA, 20 bp, synthetic construct
  source 1..20: mol_type = other DNA
atctcctgacctcgtgatcc

SEQ ID NO: 18355 - DNA, 20 bp, synthetic construct
  source 1..20: mol_type = other DNA
gatctcctgacctcgtgatc

SEQ ID NO: 18356 - DNA, 20 bp, synthetic construct
  source 1..20: mol_type = other DNA
cgatctcctgacctcgtgat

SEQ ID NO: 18357 - DNA, 20 bp, synthetic construct
  source 1..20: mol_type = other DNA
tcgatctcctgacctcgtga

SEQ ID NO: 18358 - DNA, 20 bp, synthetic construct
  source 1..20: mol_type = other DNA
ctcgatctcctgacctcgtg

SEQ ID NO: 18359 - DNA, 20 bp, synthetic construct
  source 1..20: mol_type = other DNA
tctcgatctcctgacctcgt

SEQ ID NO: 18360 - DNA, 20 bp, synthetic construct
  source 1..20: mol_type = other DNA
gtctcgatctcctgacctcg

SEQ ID NO: 18361 - DNA, 20 bp, synthetic construct
  source 1..20: mol_type = other DNA
ggtctcgatctcctgacctc

SEQ ID NO: 18362 - DNA, 20 bp, synthetic construct
  source 1..20: mol_type = other DNA
tggtctcgatctcctgacct

SEQ ID NO: 18363 - DNA, 20 bp, synthetic construct
  source 1..20: mol_type = other DNA
ttggtctcgatctcctgacc

SEQ ID NO: 18364 - DNA, 20 bp, synthetic construct
  source 1..20: mol_type = other DNA
gttggtctcgatctcctgac

SEQ ID NO: 18365 - DNA, 20 bp, synthetic construct
  source 1..20: mol_type = other DNA
ggttggtctcgatctcctga

SEQ ID NO: 18366 - DNA, 20 bp, synthetic construct
  source 1..20: mol_type = other DNA
aggttggtctcgatctcctg

SEQ ID NO: 18367 - DNA, 20 bp, synthetic construct
  source 1..20: mol_type = other DNA
caggttggtctcgatctcct

SEQ ID NO: 18368 - DNA, 20 bp, synthetic construct
  source 1..20: mol_type = other DNA
ccaggttggtctcgatctcc

SEQ ID NO: 18369 - DNA, 20 bp, synthetic construct
  source 1..20: mol_type = other DNA
cccaggttggtctcgatctc

SEQ ID NO: 18370 - DNA, 20 bp, synthetic construct
  source 1..20: mol_type = other DNA
gcccaggttggtctcgatct

SEQ ID NO: 18371 - DNA, 20 bp, synthetic construct
  source 1..20: mol_type = other DNA
tgcccaggttggtctcgatc

SEQ ID NO: 18372 - DNA, 20 bp, synthetic construct
  source 1..20: mol_type = other DNA
ttgcccaggttggtctcgat

SEQ ID NO: 18373 - DNA, 20 bp, synthetic construct
  source 1..20: mol_type = other DNA
gttgcccaggttggtctcga

SEQ ID NO: 18374 - DNA, 20 bp, synthetic construct
  source 1..20: mol_type = other DNA
tgttgcccaggttggtctcg

SEQ ID NO: 18375 - DNA, 20 bp, synthetic construct
  source 1..20: mol_type = other DNA
atgttgcccaggttggtctc

SEQ ID NO: 18376 - DNA, 20 bp, synthetic construct
  source 1..20: mol_type = other DNA
aatgttgcccaggttggtct

SEQ ID NO: 18377 - DNA, 20 bp, synthetic construct
  source 1..20: mol_type = other DNA
caatgttgcccaggttggtc

SEQ ID NO: 18378 - DNA, 20 bp, synthetic construct
  source 1..20: mol_type = other DNA
acaatgttgcccaggttggt

SEQ ID NO: 18379 - DNA, 20 bp, synthetic construct
  source 1..20: mol_type = other DNA
cacaatgttgcccaggttgg

SEQ ID NO: 18380 - DNA, 20 bp, synthetic construct
  source 1..20: mol_type = other DNA
tcacaatgttgcccaggttg

SEQ ID NO: 18381 - DNA, 20 bp, synthetic construct
  source 1..20: mol_type = other DNA
ttcacaatgttgcccaggtt

SEQ ID NO: 18382 - DNA, 20 bp, synthetic construct
  source 1..20: mol_type = other DNA
tttcacaatgttgcccaggt

SEQ ID NO: 18383 - DNA, 20 bp, synthetic construct
  source 1..20: mol_type = other DNA
gtttcacaatgttgcccagg

SEQ ID NO: 18384 - DNA, 20 bp, synthetic construct
  source 1..20: mol_type = other DNA
ggtttcacaatgttgcccag

SEQ ID NO: 18385 - DNA, 20 bp, synthetic construct
  source 1..20: mol_type = other DNA
aggtttcacaatgttgccca

SEQ ID NO: 18386 - DNA, 20 bp, synthetic construct
  source 1..20: mol_type = other DNA
gaggtttcacaatgttgccc

SEQ ID NO: 18387 - DNA, 20 bp, synthetic construct
  source 1..20: mol_type = other DNA
tgaggtttcacaatgttgcc

SEQ ID NO: 18388 - DNA, 20 bp, synthetic construct
  source 1..20: mol_type = other DNA
atgaggtttcacaatgttgc

SEQ ID NO: 18389 - DNA, 20 bp, synthetic construct
  source 1..20: mol_type = other DNA
gatgaggtttcacaatgttg

SEQ ID NO: 18390 - DNA, 20 bp, synthetic construct
  source 1..20: mol_type = other DNA
agatgaggtttcacaatgtt

SEQ ID NO: 18391 - DNA, 20 bp, synthetic construct
  source 1..20: mol_type = other DNA
gagatgaggtttcacaatgt

SEQ ID NO: 18392 - DNA, 20 bp, synthetic construct
  source 1..20: mol_type = other DNA
agagatgaggtttcacaatg

SEQ ID NO: 18393 - DNA, 20 bp, synthetic construct
  source 1..20: mol_type = other DNA
tagagatgaggtttcacaat

SEQ ID NO: 18394 - DNA, 20 bp, synthetic construct
  source 1..20: mol_type = other DNA
gtagagatgaggtttcacaa

SEQ ID NO: 18395 - DNA, 20 bp, synthetic construct
  source 1..20: mol_type = other DNA
agtagagatgaggtttcaca

SEQ ID NO: 18396 - DNA, 20 bp, synthetic construct
  source 1..20: mol_type = other DNA
tagtagagatgaggtttcac

SEQ ID NO: 18397 - DNA, 20 bp, synthetic construct
  source 1..20: mol_type = other DNA
ttagtagagatgaggtttca

SEQ ID NO: 18398 - DNA, 20 bp, synthetic construct
  source 1..20: mol_type = other DNA
tttagtagagatgaggtttc

SEQ ID NO: 18399 - DNA, 20 bp, synthetic construct
  source 1..20: mol_type = other DNA
ttttagtagagatgaggttt

SEQ ID NO: 18400 - DNA, 20 bp, synthetic construct
  source 1..20: mol_type = other DNA
attttagtagagatgaggtt

SEQ ID NO: 18401 - DNA, 20 bp, synthetic construct
  source 1..20: mol_type = other DNA
tattttagtagagatgaggt

SEQ ID NO: 18402 - DNA, 20 bp, synthetic construct
  source 1..20: mol_type = other DNA
ctattttagtagagatgagg

SEQ ID NO: 18403 - DNA, 20 bp, synthetic construct
  source 1..20: mol_type = other DNA
tctattttagtagagatgag

SEQ ID NO: 18404 - DNA, 20 bp, synthetic construct
  source 1..20: mol_type = other DNA
ttctattttagtagagatga

SEQ ID NO: 18405 - DNA, 20 bp, synthetic construct
  source 1..20: mol_type = other DNA
tttctattttagtagagatg

SEQ ID NO: 18406 - DNA, 20 bp, synthetic construct
  source 1..20: mol_type = other DNA
ttttctattttagtagagat

SEQ ID NO: 18407 - DNA, 20 bp, synthetic construct
  source 1..20: mol_type = other DNA
tttttctattttagtagaga

SEQ ID NO: 18408 - DNA, 20 bp, synthetic construct
  source 1..20: mol_type = other DNA
ttttttctattttagtagag

SEQ ID NO: 18409 - DNA, 20 bp, synthetic construct
  source 1..20: mol_type = other DNA
attttttctattttagtaga

SEQ ID NO: 18410 - DNA, 20 bp, synthetic construct
  source 1..20: mol_type = other DNA
aattttttctattttagtag

SEQ ID NO: 18411 - DNA, 20 bp, synthetic construct
  source 1..20: mol_type = other DNA
taattttttctattttagta

SEQ ID NO: 18412 - DNA, 20 bp, synthetic construct
  source 1..20: mol_type = other DNA
ctaattttttctattttagt

SEQ ID NO: 18413 - DNA, 20 bp, synthetic construct
  source 1..20: mol_type = other DNA
gctaattttttctattttag

SEQ ID NO: 18414 - DNA, 20 bp, synthetic construct
  source 1..20: mol_type = other DNA
agctaattttttctatttta

SEQ ID NO: 18415 - DNA, 20 bp, synthetic construct
  source 1..20: mol_type = other DNA
cagctaattttttctatttt

SEQ ID NO: 18416 - DNA, 20 bp, synthetic construct
  source 1..20: mol_type = other DNA
ccagctaattttttctattt

SEQ ID NO: 18417 - DNA, 20 bp, synthetic construct
  source 1..20: mol_type = other DNA
cccagctaattttttctatt

SEQ ID NO: 18418 - DNA, 20 bp, synthetic construct
  source 1..20: mol_type = other DNA
gcccagctaattttttctat

SEQ ID NO: 18419 - DNA, 20 bp, synthetic construct
  source 1..20: mol_type = other DNA
tgcccagctaattttttcta

SEQ ID NO: 18420 - DNA, 20 bp, synthetic construct
  source 1..20: mol_type = other DNA
atgcccagctaattttttct

SEQ ID NO: 18421 - DNA, 20 bp, synthetic construct
  source 1..20: mol_type = other DNA
catgcccagctaattttttc

SEQ ID NO: 18422 - DNA, 20 bp, synthetic construct
  source 1..20: mol_type = other DNA
ccatgcccagctaatttttt

SEQ ID NO: 18423 - DNA, 20 bp, synthetic construct
  source 1..20: mol_type = other DNA
accatgcccagctaattttt

SEQ ID NO: 18424 - DNA, 20 bp, synthetic construct
  source 1..20: mol_type = other DNA
caccatgcccagctaatttt

SEQ ID NO: 18425 - DNA, 20 bp, synthetic construct
  source 1..20: mol_type = other DNA
ccaccatgcccagctaattt

SEQ ID NO: 18426 - DNA, 20 bp, synthetic construct
  source 1..20: mol_type = other DNA
accaccatgcccagctaatt

SEQ ID NO: 18427 - DNA, 20 bp, synthetic construct
  source 1..20: mol_type = other DNA
caccaccatgcccagctaat

SEQ ID NO: 18428 - DNA, 20 bp, synthetic construct
  source 1..20: mol_type = other DNA
gcaccaccatgcccagctaa

SEQ ID NO: 18429 - DNA, 20 bp, synthetic construct
  source 1..20: mol_type = other DNA
cgcaccaccatgcccagcta

SEQ ID NO: 18430 - DNA, 20 bp, synthetic construct
  source 1..20: mol_type = other DNA
gcgcaccaccatgcccagct

SEQ ID NO: 18431 - DNA, 20 bp, synthetic construct
  source 1..20: mol_type = other DNA
tgcgcaccaccatgcccagc

SEQ ID NO: 18432 - DNA, 20 bp, synthetic construct
  source 1..20: mol_type = other DNA
atgcgcaccaccatgcccag

SEQ ID NO: 18433 - DNA, 20 bp, synthetic construct
  source 1..20: mol_type = other DNA
gatgcgcaccaccatgccca

SEQ ID NO: 18434 - DNA, 20 bp, synthetic construct
  source 1..20: mol_type = other DNA
agatgcgcaccaccatgccc

SEQ ID NO: 18435 - DNA, 20 bp, synthetic construct
  source 1..20: mol_type = other DNA
cagatgcgcaccaccatgcc

SEQ ID NO: 18436 - DNA, 20 bp, synthetic construct
  source 1..20: mol_type = other DNA
acagatgcgcaccaccatgc

SEQ ID NO: 18437 - DNA, 20 bp, synthetic construct
  source 1..20: mol_type = other DNA
tacagatgcgcaccaccatg

SEQ ID NO: 18438 - DNA, 20 bp, synthetic construct
  source 1..20: mol_type = other DNA
ctacagatgcgcaccaccat

SEQ ID NO: 18439 - DNA, 20 bp, synthetic construct
  source 1..20: mol_type = other DNA
actacagatgcgcaccacca

SEQ ID NO: 18440 - DNA, 20 bp, synthetic construct
  source 1..20: mol_type = other DNA
gactacagatgcgcaccacc

SEQ ID NO: 18441 - DNA, 20 bp, synthetic construct
  source 1..20: mol_type = other DNA
ggactacagatgcgcaccac

SEQ ID NO: 18442 - DNA, 20 bp, synthetic construct
  source 1..20: mol_type = other DNA
gggactacagatgcgcacca

SEQ ID NO: 18443 - DNA, 20 bp, synthetic construct
  source 1..20: mol_type = other DNA
tgggactacagatgcgcacc

SEQ ID NO: 18444 - DNA, 20 bp, synthetic construct
  source 1..20: mol_type = other DNA
ctgggactacagatgcgcac

SEQ ID NO: 18445 - DNA, 20 bp, synthetic construct
  source 1..20: mol_type = other DNA
gctgggactacagatgcgca

SEQ ID NO: 18446 - DNA, 20 bp, synthetic construct
  source 1..20: mol_type = other DNA
agctgggactacagatgcgc

SEQ ID NO: 18447 - DNA, 20 bp, synthetic construct
  source 1..20: mol_type = other DNA
tagctgggactacagatgcg

SEQ ID NO: 18448 - DNA, 20 bp, synthetic construct
  source 1..20: mol_type = other DNA
gtagctgggactacagatgc

SEQ ID NO: 18449 - DNA, 20 bp, synthetic construct
  source 1..20: mol_type = other DNA
agtagctgggactacagatg

SEQ ID NO: 18450 - DNA, 20 bp, synthetic construct
  source 1..20: mol_type = other DNA
gagtagctgggactacagat

SEQ ID NO: 18451 - DNA, 20 bp, synthetic construct
  source 1..20: mol_type = other DNA
cgagtagctgggactacaga

SEQ ID NO: 18452 - DNA, 20 bp, synthetic construct
  source 1..20: mol_type = other DNA
tcgagtagctgggactacag

SEQ ID NO: 18453 - DNA, 20 bp, synthetic construct
  source 1..20: mol_type = other DNA
ctcgagtagctgggactaca

SEQ ID NO: 18454 - DNA, 20 bp, synthetic construct
  source 1..20: mol_type = other DNA
tctcgagtagctgggactac

SEQ ID NO: 18455 - DNA, 20 bp, synthetic construct
  source 1..20: mol_type = other DNA
ctctcgagtagctgggacta

SEQ ID NO: 18456 - DNA, 20 bp, synthetic construct
  source 1..20: mol_type = other DNA
cctctcgagtagctgggact

SEQ ID NO: 18457 - DNA, 20 bp, synthetic construct
  source 1..20: mol_type = other DNA
gcctctcgagtagctgggac

SEQ ID NO: 18458 - DNA, 20 bp, synthetic construct
  source 1..20: mol_type = other DNA
agcctctcgagtagctggga

SEQ ID NO: 18459 - DNA, 20 bp, synthetic construct
  source 1..20: mol_type = other DNA
cagcctctcgagtagctggg

SEQ ID NO: 18460 - DNA, 20 bp, synthetic construct
  source 1..20: mol_type = other DNA
tcagcctctcgagtagctgg

SEQ ID NO: 18461 - DNA, 20 bp, synthetic construct
  source 1..20: mol_type = other DNA
ctcagcctctcgagtagctg

SEQ ID NO: 18462 - DNA, 20 bp, synthetic construct
  source 1..20: mol_type = other DNA
cctcagcctctcgagtagct

SEQ ID NO: 18463 - DNA, 20 bp, synthetic construct
  source 1..20: mol_type = other DNA
gcctcagcctctcgagtagc

SEQ ID NO: 18464 - DNA, 20 bp, synthetic construct
  source 1..20: mol_type = other DNA
tgcctcagcctctcgagtag

SEQ ID NO: 18465 - DNA, 20 bp, synthetic construct
  source 1..20: mol_type = other DNA
ctgcctcagcctctcgagta

SEQ ID NO: 18466 - DNA, 20 bp, synthetic construct
  source 1..20: mol_type = other DNA
cctgcctcagcctctcgagt

SEQ ID NO: 18467 - DNA, 20 bp, synthetic construct
  source 1..20: mol_type = other DNA
ccctgcctcagcctctcgag

SEQ ID NO: 18468 - DNA, 20 bp, synthetic construct
  source 1..20: mol_type = other DNA
cccctgcctcagcctctcga

SEQ ID NO: 18469 - DNA, 20 bp, synthetic construct
  source 1..20: mol_type = other DNA
tcccctgcctcagcctctcg

SEQ ID NO: 18470 - DNA, 20 bp, synthetic construct
  source 1..20: mol_type = other DNA
ttcccctgcctcagcctctc

SEQ ID NO: 18471 - DNA, 20 bp, synthetic construct
  source 1..20: mol_type = other DNA
attcccctgcctcagcctct

SEQ ID NO: 18472 - DNA, 20 bp, synthetic construct
  source 1..20: mol_type = other DNA
gattcccctgcctcagcctc

SEQ ID NO: 18473 - DNA, 20 bp, synthetic construct
  source 1..20: mol_type = other DNA
cgattcccctgcctcagcct

SEQ ID NO: 18474 - DNA, 20 bp, synthetic construct
  source 1..20: mol_type = other DNA
gcgattcccctgcctcagcc

SEQ ID NO: 18475 - DNA, 20 bp, synthetic construct
  source 1..20: mol_type = other DNA
agcgattcccctgcctcagc

SEQ ID NO: 18476 - DNA, 20 bp, synthetic construct
  source 1..20: mol_type = other DNA
aagcgattcccctgcctcag

SEQ ID NO: 18477 - DNA, 20 bp, synthetic construct
  source 1..20: mol_type = other DNA
caagcgattcccctgcctca

SEQ ID NO: 18478 - DNA, 20 bp, synthetic construct
  source 1..20: mol_type = other DNA
tcaagcgattcccctgcctc

SEQ ID NO: 18479 - DNA, 20 bp, synthetic construct
  source 1..20: mol_type = other DNA
ttcaagcgattcccctgcct

SEQ ID NO: 18480 - DNA, 20 bp, synthetic construct
  source 1..20: mol_type = other DNA
gttcaagcgattcccctgcc

SEQ ID NO: 18481 - DNA, 20 bp, synthetic construct
  source 1..20: mol_type = other DNA
ggttcaagcgattcccctgc

SEQ ID NO: 18482 - DNA, 20 bp, synthetic construct
  source 1..20: mol_type = other DNA
gggttcaagcgattcccctg

SEQ ID NO: 18483 - DNA, 20 bp, synthetic construct
  source 1..20: mol_type = other DNA
tgggttcaagcgattcccct

SEQ ID NO: 18484 - DNA, 20 bp, synthetic construct
  source 1..20: mol_type = other DNA
ctgggttcaagcgattcccc

SEQ ID NO: 18485 - DNA, 20 bp, synthetic construct
  source 1..20: mol_type = other DNA
cctgggttcaagcgattccc

SEQ ID NO: 18486 - DNA, 20 bp, synthetic construct
  source 1..20: mol_type = other DNA
tcctgggttcaagcgattcc

SEQ ID NO: 18487 - DNA, 20 bp, synthetic construct
  source 1..20: mol_type = other DNA
ctcctgggttcaagcgattc

SEQ ID NO: 18488 - DNA, 20 bp, synthetic construct
  source 1..20: mol_type = other DNA
cctcctgggttcaagcgatt

SEQ ID NO: 18489 - DNA, 20 bp, synthetic construct
  source 1..20: mol_type = other DNA
acctcctgggttcaagcgat

SEQ ID NO: 18490 - DNA, 20 bp, synthetic construct
  source 1..20: mol_type = other DNA
cacctcctgggttcaagcga

SEQ ID NO: 18491 - DNA, 20 bp, synthetic construct
  source 1..20: mol_type = other DNA
ccacctcctgggttcaagcg

SEQ ID NO: 18492 - DNA, 20 bp, synthetic construct
  source 1..20: mol_type = other DNA
tccacctcctgggttcaagc

SEQ ID NO: 18493 - DNA, 20 bp, synthetic construct
  source 1..20: mol_type = other DNA
ctccacctcctgggttcaag

SEQ ID NO: 18494 - DNA, 20 bp, synthetic construct
  source 1..20: mol_type = other DNA
cctccacctcctgggttcaa

SEQ ID NO: 18495 - DNA, 20 bp, synthetic construct
  source 1..20: mol_type = other DNA
acctccacctcctgggttca

SEQ ID NO: 18496 - DNA, 20 bp, synthetic construct
  source 1..20: mol_type = other DNA
aacctccacctcctgggttc

SEQ ID NO: 18497 - DNA, 20 bp, synthetic construct
  source 1..20: mol_type = other DNA
caacctccacctcctgggtt

SEQ ID NO: 18498 - DNA, 20 bp, synthetic construct
  source 1..20: mol_type = other DNA
gcaacctccacctcctgggt

SEQ ID NO: 18499 - DNA, 20 bp, synthetic construct
  source 1..20: mol_type = other DNA
tgcaacctccacctcctggg

SEQ ID NO: 18500 - DNA, 20 bp, synthetic construct
  source 1..20: mol_type = other DNA
ctgcaacctccacctcctgg

SEQ ID NO: 18501 - DNA, 20 bp, synthetic construct
  source 1..20: mol_type = other DNA
actgcaacctccacctcctg

SEQ ID NO: 18502 - DNA, 20 bp, synthetic construct
  source 1..20: mol_type = other DNA
cactgcaacctccacctcct

SEQ ID NO: 18503 - DNA, 20 bp, synthetic construct
  source 1..20: mol_type = other DNA
tcactgcaacctccacctcc

SEQ ID NO: 18504 - DNA, 20 bp, synthetic construct
  source 1..20: mol_type = other DNA
ctcactgcaacctccacctc

SEQ ID NO: 18505 - DNA, 20 bp, synthetic construct
  source 1..20: mol_type = other DNA
gctcactgcaacctccacct

SEQ ID NO: 18506 - DNA, 20 bp, synthetic construct
  source 1..20: mol_type = other DNA
ggctcactgcaacctccacc

SEQ ID NO: 18507 - DNA, 20 bp, synthetic construct
  source 1..20: mol_type = other DNA
tggctcactgcaacctccac

SEQ ID NO: 18508 - DNA, 20 bp, synthetic construct
  source 1..20: mol_type = other DNA
ttggctcactgcaacctcca

SEQ ID NO: 18509 - DNA, 20 bp, synthetic construct
  source 1..20: mol_type = other DNA
cttggctcactgcaacctcc

SEQ ID NO: 18510 - DNA, 20 bp, synthetic construct
  source 1..20: mol_type = other DNA
tcttggctcactgcaacctc

SEQ ID NO: 18511 - DNA, 20 bp, synthetic construct
  source 1..20: mol_type = other DNA
atcttggctcactgcaacct

SEQ ID NO: 18512 - DNA, 20 bp, synthetic construct
  source 1..20: mol_type = other DNA
aatcttggctcactgcaacc

SEQ ID NO: 18513 - DNA, 20 bp, synthetic construct
  source 1..20: mol_type = other DNA
caatcttggctcactgcaac

SEQ ID NO: 18514 - DNA, 20 bp, synthetic construct
  source 1..20: mol_type = other DNA
acaatcttggctcactgcaa

SEQ ID NO: 18515 - DNA, 20 bp, synthetic construct
  source 1..20: mol_type = other DNA
cacaatcttggctcactgca

SEQ ID NO: 18516 - DNA, 20 bp, synthetic construct
  source 1..20: mol_type = other DNA
gcacaatcttggctcactgc

SEQ ID NO: 18517 - DNA, 20 bp, synthetic construct
  source 1..20: mol_type = other DNA
ggcacaatcttggctcactg

SEQ ID NO: 18518 - DNA, 20 bp, synthetic construct
  source 1..20: mol_type = other DNA
tggcacaatcttggctcact

SEQ ID NO: 18519 - DNA, 20 bp, synthetic construct
  source 1..20: mol_type = other DNA
gtggcacaatcttggctcac

SEQ ID NO: 18520 - DNA, 20 bp, synthetic construct
  source 1..20: mol_type = other DNA
agtggcacaatcttggctca

SEQ ID NO: 18521 - DNA, 20 bp, synthetic construct
  source 1..20: mol_type = other DNA
cagtggcacaatcttggctc

SEQ ID NO: 18522 - DNA, 20 bp, synthetic construct
  source 1..20: mol_type = other DNA
gcagtggcacaatcttggct

SEQ ID NO: 18523 - DNA, 20 bp, synthetic construct
  source 1..20: mol_type = other DNA
tgcagtggcacaatcttggc

SEQ ID NO: 18524 - DNA, 20 bp, synthetic construct
  source 1..20: mol_type = other DNA
gtgcagtggcacaatcttgg

SEQ ID NO: 18525 - DNA, 20 bp, synthetic construct
  source 1..20: mol_type = other DNA
agtgcagtggcacaatcttg

SEQ ID NO: 18526 - DNA, 20 bp, synthetic construct
  source 1..20: mol_type = other DNA
gagtgcagtggcacaatctt

SEQ ID NO: 18527 - DNA, 20 bp, synthetic construct
  source 1..20: mol_type = other DNA
ggagtgcagtggcacaatct

SEQ ID NO: 18528 - DNA, 20 bp, synthetic construct
  source 1..20: mol_type = other DNA
tggagtgcagtggcacaatc

SEQ ID NO: 18529 - DNA, 20 bp, synthetic construct
  source 1..20: mol_type = other DNA
ctggagtgcagtggcacaat

SEQ ID NO: 18530 - DNA, 20 bp, synthetic construct
  source 1..20: mol_type = other DNA
gctggagtgcagtggcacaa

SEQ ID NO: 18531 - DNA, 20 bp, synthetic construct
  source 1..20: mol_type = other DNA
ggctggagtgcagtggcaca

SEQ ID NO: 18532 - DNA, 20 bp, synthetic construct
  source 1..20: mol_type = other DNA
aggctggagtgcagtggcac

SEQ ID NO: 18533 - DNA, 20 bp, synthetic construct
  source 1..20: mol_type = other DNA
caggctggagtgcagtggca

SEQ ID NO: 18534 - DNA, 20 bp, synthetic construct
  source 1..20: mol_type = other DNA
ccaggctggagtgcagtggc

SEQ ID NO: 18535 - DNA, 20 bp, synthetic construct
  source 1..20: mol_type = other DNA
cccaggctggagtgcagtgg

SEQ ID NO: 18536 - DNA, 20 bp, synthetic construct
  source 1..20: mol_type = other DNA
gcccaggctggagtgcagtg

SEQ ID NO: 18537 - DNA, 20 bp, synthetic construct
  source 1..20: mol_type = other DNA
cgcccaggctggagtgcagt

SEQ ID NO: 18538 - DNA, 20 bp, synthetic construct
  source 1..20: mol_type = other DNA
tcgcccaggctggagtgcag

SEQ ID NO: 18539 - DNA, 20 bp, synthetic construct
  source 1..20: mol_type = other DNA
gtcgcccaggctggagtgca

SEQ ID NO: 18540 - DNA, 20 bp, synthetic construct
  source 1..20: mol_type = other DNA
tgtcgcccaggctggagtgc

SEQ ID NO: 18541 - DNA, 20 bp, synthetic construct
  source 1..20: mol_type = other DNA
ctgtcgcccaggctggagtg

SEQ ID NO: 18542 - DNA, 20 bp, synthetic construct
  source 1..20: mol_type = other DNA
tctgtcgcccaggctggagt

SEQ ID NO: 18543 - DNA, 20 bp, synthetic construct
  source 1..20: mol_type = other DNA
ttctgtcgcccaggctggag

SEQ ID NO: 18544 - DNA, 20 bp, synthetic construct
  source 1..20: mol_type = other DNA
gttctgtcgcccaggctgga

SEQ ID NO: 18545 - DNA, 20 bp, synthetic construct
  source 1..20: mol_type = other DNA
cgttctgtcgcccaggctgg

SEQ ID NO: 18546 - DNA, 20 bp, synthetic construct
  source 1..20: mol_type = other DNA
tcgttctgtcgcccaggctg

SEQ ID NO: 18547 - DNA, 20 bp, synthetic construct
  source 1..20: mol_type = other DNA
ctcgttctgtcgcccaggct

SEQ ID NO: 18548 - DNA, 20 bp, synthetic construct
  source 1..20: mol_type = other DNA
tctcgttctgtcgcccaggc

SEQ ID NO: 18549 - DNA, 20 bp, synthetic construct
  source 1..20: mol_type = other DNA
gtctcgttctgtcgcccagg

SEQ ID NO: 18550 - DNA, 20 bp, synthetic construct
  source 1..20: mol_type = other DNA
agtctcgttctgtcgcccag

SEQ ID NO: 18551 - DNA, 20 bp, synthetic construct
  source 1..20: mol_type = other DNA
gagtctcgttctgtcgccca

SEQ ID NO: 18552 - DNA, 20 bp, synthetic construct
  source 1..20: mol_type = other DNA
agagtctcgttctgtcgccc

SEQ ID NO: 18553 - DNA, 20 bp, synthetic construct
  source 1..20: mol_type = other DNA
cagagtctcgttctgtcgcc

SEQ ID NO: 18554 - DNA, 20 bp, synthetic construct
  source 1..20: mol_type = other DNA
acagagtctcgttctgtcgc

SEQ ID NO: 18555 - DNA, 20 bp, synthetic construct
  source 1..20: mol_type = other DNA
gacagagtctcgttctgtcg

SEQ ID NO: 18556 - DNA, 20 bp, synthetic construct
  source 1..20: mol_type = other DNA
agacagagtctcgttctgtc

SEQ ID NO: 18557 - DNA, 20 bp, synthetic construct
  source 1..20: mol_type = other DNA
gagacagagtctcgttctgt

SEQ ID NO: 18558 - DNA, 20 bp, synthetic construct
  source 1..20: mol_type = other DNA
ggagacagagtctcgttctg

SEQ ID NO: 18559 - DNA, 20 bp, synthetic construct
  source 1..20: mol_type = other DNA
tggagacagagtctcgttct

SEQ ID NO: 18560 - DNA, 20 bp, synthetic construct
  source 1..20: mol_type = other DNA
ttggagacagagtctcgttc

SEQ ID NO: 18561 - DNA, 20 bp, synthetic construct
  source 1..20: mol_type = other DNA
tttggagacagagtctcgtt

SEQ ID NO: 18562 - DNA, 20 bp, synthetic construct
  source 1..20: mol_type = other DNA
ttttggagacagagtctcgt

SEQ ID NO: 18563 - DNA, 20 bp, synthetic construct
  source 1..20: mol_type = other DNA
tttttggagacagagtctcg

SEQ ID NO: 18564 - DNA, 20 bp, synthetic construct
  source 1..20: mol_type = other DNA
ttttttggagacagagtctc

SEQ ID NO: 18565 - DNA, 20 bp, synthetic construct
  source 1..20: mol_type = other DNA
tttttttggagacagagtct

SEQ ID NO: 18566 - DNA, 20 bp, synthetic construct
  source 1..20: mol_type = other DNA
ttttttttggagacagagtc

SEQ ID NO: 18567 - DNA, 20 bp, synthetic construct
  source 1..20: mol_type = other DNA
tttttttttggagacagagt

SEQ ID NO: 18568 - DNA, 20 bp, synthetic construct
  source 1..20: mol_type = other DNA
ttttttttttggagacagag

SEQ ID NO: 18569 - DNA, 20 bp, synthetic construct
  source 1..20: mol_type = other DNA
tttttttttttggagacaga

SEQ ID NO: 18570 - DNA, 20 bp, synthetic construct
  source 1..20: mol_type = other DNA
ttttttttttttggagacag

SEQ ID NO: 18571 - DNA, 20 bp, synthetic construct
  source 1..20: mol_type = other DNA
tttttttttttttggagaca

SEQ ID NO: 18572 - DNA, 20 bp, synthetic construct
  source 1..20: mol_type = other DNA
ttttttttttttttggagac

SEQ ID NO: 18573 - DNA, 20 bp, synthetic construct
  source 1..20: mol_type = other DNA
tttttttttttttttggaga

SEQ ID NO: 18574 - DNA, 20 bp, synthetic construct
  source 1..20: mol_type = other DNA
ttttttttttttttttggag

SEQ ID NO: 18575 - DNA, 20 bp, synthetic construct
  source 1..20: mol_type = other DNA
gttttttttttttttttgga

SEQ ID NO: 18576 - DNA, 20 bp, synthetic construct
  source 1..20: mol_type = other DNA
tgttttttttttttttttgg

SEQ ID NO: 18577 - DNA, 20 bp, synthetic construct
  source 1..20: mol_type = other DNA
ttgttttttttttttttttg

SEQ ID NO: 18578 - DNA, 20 bp, synthetic construct
  source 1..20: mol_type = other DNA
tttgtttttttttttttttt

SEQ ID NO: 18579 - DNA, 20 bp, synthetic construct
  source 1..20: mol_type = other DNA
gtttgttttttttttttttt

SEQ ID NO: 18580 - DNA, 20 bp, synthetic construct
  source 1..20: mol_type = other DNA
tgtttgtttttttttttttt

SEQ ID NO: 18581 - DNA, 20 bp, synthetic construct
  source 1..20: mol_type = other DNA
ttgtttgttttttttttttt

SEQ ID NO: 18582 - DNA, 20 bp, synthetic construct
  source 1..20: mol_type = other DNA
tttgtttgtttttttttttt

SEQ ID NO: 18583 - DNA, 20 bp, synthetic construct
  source 1..20: mol_type = other DNA
ttttgtttgttttttttttt

SEQ ID NO: 18584 - DNA, 20 bp, synthetic construct
  source 1..20: mol_type = other DNA
tttttgtttgtttttttttt

SEQ ID NO: 18585 - DNA, 20 bp, synthetic construct
  source 1..20: mol_type = other DNA
ttttttgtttgttttttttt

SEQ ID NO: 18586 - DNA, 20 bp, synthetic construct
  source 1..20: mol_type = other DNA
tttttttgtttgtttttttt

SEQ ID NO: 18587 - DNA, 20 bp, synthetic construct
  source 1..20: mol_type = other DNA
ttttttttgtttgttttttt

SEQ ID NO: 18588 - DNA, 20 bp, synthetic construct
  source 1..20: mol_type = other DNA
tttttttttgtttgtttttt

SEQ ID NO: 18589 - DNA, 20 bp, synthetic construct
  source 1..20: mol_type = other DNA
ttttttttttgtttgttttt

SEQ ID NO: 18590 - DNA, 20 bp, synthetic construct
  source 1..20: mol_type = other DNA
tttttttttttgtttgtttt

SEQ ID NO: 18591 - DNA, 20 bp, synthetic construct
  source 1..20: mol_type = other DNA
gtttttttttttgtttgttt

SEQ ID NO: 18592 - DNA, 20 bp, synthetic construct
  source 1..20: mol_type = other DNA
agtttttttttttgtttgtt

SEQ ID NO: 18593 - DNA, 20 bp, synthetic construct
  source 1..20: mol_type = other DNA
cagtttttttttttgtttgt

SEQ ID NO: 18594 - DNA, 20 bp, synthetic construct
  source 1..20: mol_type = other DNA
tcagtttttttttttgtttg

SEQ ID NO: 18595 - DNA, 20 bp, synthetic construct
  source 1..20: mol_type = other DNA
ctcagtttttttttttgttt

SEQ ID NO: 18596 - DNA, 20 bp, synthetic construct
  source 1..20: mol_type = other DNA
tctcagtttttttttttgtt

SEQ ID NO: 18597 - DNA, 20 bp, synthetic construct
  source 1..20: mol_type = other DNA
atctcagtttttttttttgt

SEQ ID NO: 18598 - DNA, 20 bp, synthetic construct
  source 1..20: mol_type = other DNA
tatctcagtttttttttttg

SEQ ID NO: 18599 - DNA, 20 bp, synthetic construct
  source 1..20: mol_type = other DNA
gtatctcagttttttttttt

SEQ ID NO: 18600 - DNA, 20 bp, synthetic construct
  source 1..20: mol_type = other DNA
agtatctcagtttttttttt

SEQ ID NO: 18601 - DNA, 20 bp, synthetic construct
  source 1..20: mol_type = other DNA
cagtatctcagttttttttt

SEQ ID NO: 18602 - DNA, 20 bp, synthetic construct
  source 1..20: mol_type = other DNA
ccagtatctcagtttttttt

SEQ ID NO: 18603 - DNA, 20 bp, synthetic construct
  source 1..20: mol_type = other DNA
gccagtatctcagttttttt

SEQ ID NO: 18604 - DNA, 20 bp, synthetic construct
  source 1..20: mol_type = other DNA
ggccagtatctcagtttttt

SEQ ID NO: 18605 - DNA, 20 bp, synthetic construct
  source 1..20: mol_type = other DNA
cggccagtatctcagttttt

SEQ ID NO: 18606 - DNA, 20 bp, synthetic construct
  source 1..20: mol_type = other DNA
ccggccagtatctcagtttt

SEQ ID NO: 18607 - DNA, 20 bp, synthetic construct
  source 1..20: mol_type = other DNA
cccggccagtatctcagttt

SEQ ID NO: 18608 - DNA, 20 bp, synthetic construct
  source 1..20: mol_type = other DNA
gcccggccagtatctcagtt

SEQ ID NO: 18609 - DNA, 20 bp, synthetic construct
  source 1..20: mol_type = other DNA
cgcccggccagtatctcagt

SEQ ID NO: 18610 - DNA, 20 bp, synthetic construct
  source 1..20: mol_type = other DNA
gcgcccggccagtatctcag

SEQ ID NO: 18611 - DNA, 20 bp, synthetic construct
  source 1..20: mol_type = other DNA
cgcgcccggccagtatctca

SEQ ID NO: 18612 - DNA, 20 bp, synthetic construct
  source 1..20: mol_type = other DNA
ccgcgcccggccagtatctc

SEQ ID NO: 18613 - DNA, 20 bp, synthetic construct
  source 1..20: mol_type = other DNA
accgcgcccggccagtatct

SEQ ID NO: 18614 - DNA, 20 bp, synthetic construct
  source 1..20: mol_type = other DNA
caccgcgcccggccagtatc

SEQ ID NO: 18615 - DNA, 20 bp, synthetic construct
  source 1..20: mol_type = other DNA
ccaccgcgcccggccagtat

SEQ ID NO: 18616 - DNA, 20 bp, synthetic construct
  source 1..20: mol_type = other DNA
gccaccgcgcccggccagta

SEQ ID NO: 18617 - DNA, 20 bp, synthetic construct
  source 1..20: mol_type = other DNA
agccaccgcgcccggccagt

SEQ ID NO: 18618 - DNA, 20 bp, synthetic construct
  source 1..20: mol_type = other DNA
gagccaccgcgcccggccag

SEQ ID NO: 18619 - DNA, 20 bp, synthetic construct
  source 1..20: mol_type = other DNA
cgagccaccgcgcccggcca

SEQ ID NO: 18620 - DNA, 20 bp, synthetic construct
  source 1..20: mol_type = other DNA
acgagccaccgcgcccggcc

SEQ ID NO: 18621 - DNA, 20 bp, synthetic construct
  source 1..20: mol_type = other DNA
cacgagccaccgcgcccggc

SEQ ID NO: 18622 - DNA, 20 bp, synthetic construct
  source 1..20: mol_type = other DNA
gcacgagccaccgcgcccgg

SEQ ID NO: 18623 - DNA, 20 bp, synthetic construct
  source 1..20: mol_type = other DNA
ggcacgagccaccgcgcccg

SEQ ID NO: 18624 - DNA, 20 bp, synthetic construct
  source 1..20: mol_type = other DNA
aggcacgagccaccgcgccc

SEQ ID NO: 18625 - DNA, 20 bp, synthetic construct
  source 1..20: mol_type = other DNA
caggcacgagccaccgcgcc

SEQ ID NO: 18626 - DNA, 20 bp, synthetic construct
  source 1..20: mol_type = other DNA
acaggcacgagccaccgcgc

SEQ ID NO: 18627 - DNA, 20 bp, synthetic construct
  source 1..20: mol_type = other DNA
tacaggcacgagccaccgcg

SEQ ID NO: 18628 - DNA, 20 bp, synthetic construct
  source 1..20: mol_type = other DNA
ttacaggcacgagccaccgc

SEQ ID NO: 18629 - DNA, 20 bp, synthetic construct
  source 1..20: mol_type = other DNA
attacaggcacgagccaccg

SEQ ID NO: 18630 - DNA, 20 bp, synthetic construct
  source 1..20: mol_type = other DNA
gattacaggcacgagccacc

SEQ ID NO: 18631 - DNA, 20 bp, synthetic construct
  source 1..20: mol_type = other DNA
ggattacaggcacgagccac

SEQ ID NO: 18632 - DNA, 20 bp, synthetic construct
  source 1..20: mol_type = other DNA
gggattacaggcacgagcca

SEQ ID NO: 18633 - DNA, 20 bp, synthetic construct
  source 1..20: mol_type = other DNA
tgggattacaggcacgagcc

SEQ ID NO: 18634 - DNA, 20 bp, synthetic construct
  source 1..20: mol_type = other DNA
ctgggattacaggcacgagc

SEQ ID NO: 18635 - DNA, 20 bp, synthetic construct
  source 1..20: mol_type = other DNA
gctgggattacaggcacgag

SEQ ID NO: 18636 - DNA, 20 bp, synthetic construct
  source 1..20: mol_type = other DNA
tgctgggattacaggcacga

SEQ ID NO: 18637 - DNA, 20 bp, synthetic construct
  source 1..20: mol_type = other DNA
gtgctgggattacaggcacg

SEQ ID NO: 18638 - DNA, 20 bp, synthetic construct
  source 1..20: mol_type = other DNA
agtgctgggattacaggcac

SEQ ID NO: 18639 - DNA, 20 bp, synthetic construct
  source 1..20: mol_type = other DNA
aagtgctgggattacaggca

SEQ ID NO: 18640 - DNA, 20 bp, synthetic construct
  source 1..20: mol_type = other DNA
aaagtgctgggattacaggc

SEQ ID NO: 18641 - DNA, 20 bp, synthetic construct
  source 1..20: mol_type = other DNA
caaagtgctgggattacagg

SEQ ID NO: 18642 - DNA, 20 bp, synthetic construct
  source 1..20: mol_type = other DNA
ccaaagtgctgggattacag

SEQ ID NO: 18643 - DNA, 20 bp, synthetic construct
  source 1..20: mol_type = other DNA
tccaaagtgctgggattaca

SEQ ID NO: 18644 - DNA, 20 bp, synthetic construct
  source 1..20: mol_type = other DNA
ttccaaagtgctgggattac

SEQ ID NO: 18645 - DNA, 20 bp, synthetic construct
  source 1..20: mol_type = other DNA
cttccaaagtgctgggatta

SEQ ID NO: 18646 - DNA, 20 bp, synthetic construct
  source 1..20: mol_type = other DNA
ccttccaaagtgctgggatt

SEQ ID NO: 18647 - DNA, 20 bp, synthetic construct
  source 1..20: mol_type = other DNA
gccttccaaagtgctgggat

SEQ ID NO: 18648 - DNA, 20 bp, synthetic construct
  source 1..20: mol_type = other DNA
ggccttccaaagtgctggga

SEQ ID NO: 18649 - DNA, 20 bp, synthetic construct
  source 1..20: mol_type = other DNA
cggccttccaaagtgctggg

SEQ ID NO: 18650 - DNA, 20 bp, synthetic construct
  source 1..20: mol_type = other DNA
tcggccttccaaagtgctgg

SEQ ID NO: 18651 - DNA, 20 bp, synthetic construct
  source 1..20: mol_type = other DNA
ctcggccttccaaagtgctg

SEQ ID NO: 18652 - DNA, 20 bp, synthetic construct
  source 1..20: mol_type = other DNA
cctcggccttccaaagtgct

SEQ ID NO: 18653 - DNA, 20 bp, synthetic construct
  source 1..20: mol_type = other DNA
gcctcggccttccaaagtgc

SEQ ID NO: 18654 - DNA, 20 bp, synthetic construct
  source 1..20: mol_type = other DNA
cgcctcggccttccaaagtg

SEQ ID NO: 18655 - DNA, 20 bp, synthetic construct
  source 1..20: mol_type = other DNA
ccgcctcggccttccaaagt

SEQ ID NO: 18656 - DNA, 20 bp, synthetic construct
  source 1..20: mol_type = other DNA
cccgcctcggccttccaaag

SEQ ID NO: 18657 - DNA, 20 bp, synthetic construct
  source 1..20: mol_type = other DNA
acccgcctcggccttccaaa

SEQ ID NO: 18658 - DNA, 20 bp, synthetic construct
  source 1..20: mol_type = other DNA
cacccgcctcggccttccaa

SEQ ID NO: 18659 - DNA, 20 bp, synthetic construct
  source 1..20: mol_type = other DNA
ccacccgcctcggccttcca

SEQ ID NO: 18660 - DNA, 20 bp, synthetic construct
  source 1..20: mol_type = other DNA
tccacccgcctcggccttcc

SEQ ID NO: 18661 - DNA, 20 bp, synthetic construct
  source 1..20: mol_type = other DNA
atccacccgcctcggccttc

SEQ ID NO: 18662 - DNA, 20 bp, synthetic construct
  source 1..20: mol_type = other DNA
gatccacccgcctcggcctt

SEQ ID NO: 18663 - DNA, 20 bp, synthetic construct
  source 1..20: mol_type = other DNA
tgatccacccgcctcggcct

SEQ ID NO: 18664 - DNA, 20 bp, synthetic construct
  source 1..20: mol_type = other DNA
gtgatccacccgcctcggcc

SEQ ID NO: 18665 - DNA, 20 bp, synthetic construct
  source 1..20: mol_type = other DNA
cgtgatccacccgcctcggc

SEQ ID NO: 18666 - DNA, 20 bp, synthetic construct
  source 1..20: mol_type = other DNA
tcgtgatccacccgcctcgg

SEQ ID NO: 18667 - DNA, 20 bp, synthetic construct
  source 1..20: mol_type = other DNA
ctcgtgatccacccgcctcg

SEQ ID NO: 18668 - DNA, 20 bp, synthetic construct
  source 1..20: mol_type = other DNA
cctcgtgatccacccgcctc

SEQ ID NO: 18669 - DNA, 20 bp, synthetic construct
  source 1..20: mol_type = other DNA
acctcgtgatccacccgcct

SEQ ID NO: 18670 - DNA, 20 bp, synthetic construct
  source 1..20: mol_type = other DNA
gacctcgtgatccacccgcc

SEQ ID NO: 18671 - DNA, 20 bp, synthetic construct
  source 1..20: mol_type = other DNA
tgacctcgtgatccacccgc

SEQ ID NO: 18672 - DNA, 20 bp, synthetic construct
  source 1..20: mol_type = other DNA
ctgacctcgtgatccacccg

SEQ ID NO: 18673 - DNA, 20 bp, synthetic construct
  source 1..20: mol_type = other DNA
cctgacctcgtgatccaccc

SEQ ID NO: 18674 - DNA, 20 bp, synthetic construct
  source 1..20: mol_type = other DNA
tcctgacctcgtgatccacc

SEQ ID NO: 18675 - DNA, 20 bp, synthetic construct
  source 1..20: mol_type = other DNA
ctcctgacctcgtgatccac

SEQ ID NO: 18676 - DNA, 20 bp, synthetic construct
  source 1..20: mol_type = other DNA
tctcctgacctcgtgatcca

SEQ ID NO: 18677 - DNA, 20 bp, synthetic construct
  source 1..20: mol_type = other DNA
atctcctgacctcgtgatcc

SEQ ID NO: 18678 - DNA, 20 bp, synthetic construct
  source 1..20: mol_type = other DNA
gatctcctgacctcgtgatc

SEQ ID NO: 18679 - DNA, 20 bp, synthetic construct
  source 1..20: mol_type = other DNA
cgatctcctgacctcgtgat

SEQ ID NO: 18680 - DNA, 20 bp, synthetic construct
  source 1..20: mol_type = other DNA
tcgatctcctgacctcgtga

SEQ ID NO: 18681 - DNA, 20 bp, synthetic construct
  source 1..20: mol_type = other DNA
ctcgatctcctgacctcgtg

SEQ ID NO: 18682 - DNA, 20 bp, synthetic construct
  source 1..20: mol_type = other DNA
tctcgatctcctgacctcgt

SEQ ID NO: 18683 - DNA, 20 bp, synthetic construct
  source 1..20: mol_type = other DNA
gtctcgatctcctgacctcg

SEQ ID NO: 18684 - DNA, 20 bp, synthetic construct
  source 1..20: mol_type = other DNA
ggtctcgatctcctgacctc

SEQ ID NO: 18685 - DNA, 20 bp, synthetic construct
  source 1..20: mol_type = other DNA
cggtctcgatctcctgacct

SEQ ID NO: 18686 - DNA, 20 bp, synthetic construct
  source 1..20: mol_type = other DNA
acggtctcgatctcctgacc

SEQ ID NO: 18687 - DNA, 20 bp, synthetic construct
  source 1..20: mol_type = other DNA
gacggtctcgatctcctgac

SEQ ID NO: 18688 - DNA, 20 bp, synthetic construct
  source 1..20: mol_type = other DNA
ggacggtctcgatctcctga

SEQ ID NO: 18689 - DNA, 20 bp, synthetic construct
  source 1..20: mol_type = other DNA
aggacggtctcgatctcctg

SEQ ID NO: 18690 - DNA, 20 bp, synthetic construct
  source 1..20: mol_type = other DNA
caggacggtctcgatctcct

SEQ ID NO: 18691 - DNA, 20 bp, synthetic construct
  source 1..20: mol_type = other DNA
gcaggacggtctcgatctcc

SEQ ID NO: 18692 - DNA, 20 bp, synthetic construct
  source 1..20: mol_type = other DNA
ggcaggacggtctcgatctc

SEQ ID NO: 18693 - DNA, 20 bp, synthetic construct
  source 1..20: mol_type = other DNA
aggcaggacggtctcgatct

SEQ ID NO: 18694 - DNA, 20 bp, synthetic construct
  source 1..20: mol_type = other DNA
taggcaggacggtctcgatc

SEQ ID NO: 18695 - DNA, 20 bp, synthetic construct
  source 1..20: mol_type = other DNA
ttaggcaggacggtctcgat

SEQ ID NO: 18696 - DNA, 20 bp, synthetic construct
  source 1..20: mol_type = other DNA
gttaggcaggacggtctcga

SEQ ID NO: 18697 - DNA, 20 bp, synthetic construct
  source 1..20: mol_type = other DNA
tgttaggcaggacggtctcg

SEQ ID NO: 18698 - DNA, 20 bp, synthetic construct
  source 1..20: mol_type = other DNA
atgttaggcaggacggtctc

SEQ ID NO: 18699 - DNA, 20 bp, synthetic construct
  source 1..20: mol_type = other DNA
catgttaggcaggacggtct

SEQ ID NO: 18700 - DNA, 20 bp, synthetic construct
  source 1..20: mol_type = other DNA
ccatgttaggcaggacggtc

SEQ ID NO: 18701 - DNA, 20 bp, synthetic construct
  source 1..20: mol_type = other DNA
cccatgttaggcaggacggt

SEQ ID NO: 18702 - DNA, 20 bp, synthetic construct
  source 1..20: mol_type = other DNA
ccccatgttaggcaggacgg

SEQ ID NO: 18703 - DNA, 20 bp, synthetic construct
  source 1..20: mol_type = other DNA
tccccatgttaggcaggacg

SEQ ID NO: 18704 - DNA, 20 bp, synthetic construct
  source 1..20: mol_type = other DNA
ttccccatgttaggcaggac

SEQ ID NO: 18705 - DNA, 20 bp, synthetic construct
  source 1..20: mol_type = other DNA
tttccccatgttaggcagga

SEQ ID NO: 18706 - DNA, 20 bp, synthetic construct
  source 1..20: mol_type = other DNA
gtttccccatgttaggcagg

SEQ ID NO: 18707 - DNA, 20 bp, synthetic construct
  source 1..20: mol_type = other DNA
ggtttccccatgttaggcag

SEQ ID NO: 18708 - DNA, 20 bp, synthetic construct
  source 1..20: mol_type = other DNA
gggtttccccatgttaggca

SEQ ID NO: 18709 - DNA, 20 bp, synthetic construct
  source 1..20: mol_type = other DNA
agggtttccccatgttaggc

SEQ ID NO: 18710 - DNA, 20 bp, synthetic construct
  source 1..20: mol_type = other DNA
cagggtttccccatgttagg

SEQ ID NO: 18711 - DNA, 20 bp, synthetic construct
  source 1..20: mol_type = other DNA
acagggtttccccatgttag

SEQ ID NO: 18712 - DNA, 20 bp, synthetic construct
  source 1..20: mol_type = other DNA
gacagggtttccccatgtta

SEQ ID NO: 18713 - DNA, 20 bp, synthetic construct
  source 1..20: mol_type = other DNA
agacagggtttccccatgtt

SEQ ID NO: 18714 - DNA, 20 bp, synthetic construct
  source 1..20: mol_type = other DNA
gagacagggtttccccatgt

SEQ ID NO: 18715 - DNA, 20 bp, synthetic construct
  source 1..20: mol_type = other DNA
agagacagggtttccccatg

SEQ ID NO: 18716 - DNA, 20 bp, synthetic construct
  source 1..20: mol_type = other DNA
tagagacagggtttccccat

SEQ ID NO: 18717 - DNA, 20 bp, synthetic construct
  source 1..20: mol_type = other DNA
gtagagacagggtttcccca

SEQ ID NO: 18718 - DNA, 20 bp, synthetic construct
  source 1..20: mol_type = other DNA
agtagagacagggtttcccc

SEQ ID NO: 18719 - DNA, 20 bp, synthetic construct
  source 1..20: mol_type = other DNA
tagtagagacagggtttccc

SEQ ID NO: 18720 - DNA, 20 bp, synthetic construct
  source 1..20: mol_type = other DNA
ttagtagagacagggtttcc

SEQ ID NO: 18721 - DNA, 20 bp, synthetic construct
  source 1..20: mol_type = other DNA
tttagtagagacagggtttc

SEQ ID NO: 18722 - DNA, 20 bp, synthetic construct
  source 1..20: mol_type = other DNA
ttttagtagagacagggttt

SEQ ID NO: 18723 - DNA, 20 bp, synthetic construct
  source 1..20: mol_type = other DNA
tttttagtagagacagggtt

SEQ ID NO: 18724 - DNA, 20 bp, synthetic construct
  source 1..20: mol_type = other DNA
atttttagtagagacagggt

SEQ ID NO: 18725 - DNA, 20 bp, synthetic construct
  source 1..20: mol_type = other DNA
tatttttagtagagacaggg

SEQ ID NO: 18726 - DNA, 20 bp, synthetic construct
  source 1..20: mol_type = other DNA
gtatttttagtagagacagg

SEQ ID NO: 18727 - DNA, 20 bp, synthetic construct
  source 1..20: mol_type = other DNA
tgtatttttagtagagacag

SEQ ID NO: 18728 - DNA, 20 bp, synthetic construct
  source 1..20: mol_type = other DNA
ttgtatttttagtagagaca

SEQ ID NO: 18729 - DNA, 20 bp, synthetic construct
  source 1..20: mol_type = other DNA
tttgtatttttagtagagac

SEQ ID NO: 18730 - DNA, 20 bp, synthetic construct
  source 1..20: mol_type = other DNA
ttttgtatttttagtagaga

SEQ ID NO: 18731 - DNA, 20 bp, synthetic construct
  source 1..20: mol_type = other DNA
tttttgtatttttagtagag

SEQ ID NO: 18732 - DNA, 20 bp, synthetic construct
  source 1..20: mol_type = other DNA
ttttttgtatttttagtaga

SEQ ID NO: 18733 - DNA, 20 bp, synthetic construct
  source 1..20: mol_type = other DNA
attttttgtatttttagtag

SEQ ID NO: 18734 - DNA, 20 bp, synthetic construct
  source 1..20: mol_type = other DNA
aattttttgtatttttagta

SEQ ID NO: 18735 - DNA, 20 bp, synthetic construct
  source 1..20: mol_type = other DNA
taattttttgtatttttagt

SEQ ID NO: 18736 - DNA, 20 bp, synthetic construct
  source 1..20: mol_type = other DNA
ctaattttttgtatttttag

SEQ ID NO: 18737 - DNA, 20 bp, synthetic construct
  source 1..20: mol_type = other DNA
gctaattttttgtattttta

SEQ ID NO: 18738 - DNA, 20 bp, synthetic construct
  source 1..20: mol_type = other DNA
ggctaattttttgtattttt

SEQ ID NO: 18739 - DNA, 20 bp, synthetic construct
  source 1..20: mol_type = other DNA
tggctaattttttgtatttt

SEQ ID NO: 18740 - DNA, 20 bp, synthetic construct
  source 1..20: mol_type = other DNA
ctggctaattttttgtattt

SEQ ID NO: 18741 - DNA, 20 bp, synthetic construct
  source 1..20: mol_type = other DNA
cctggctaattttttgtatt

SEQ ID NO: 18742 - DNA, 20 bp, synthetic construct
  source 1..20: mol_type = other DNA
gcctggctaattttttgtat

SEQ ID NO: 18743 - DNA, 20 bp, synthetic construct
  source 1..20: mol_type = other DNA
cgcctggctaattttttgta

SEQ ID NO: 18744 - DNA, 20 bp, synthetic construct
  source 1..20: mol_type = other DNA
acgcctggctaattttttgt

SEQ ID NO: 18745 - DNA, 20 bp, synthetic construct
  source 1..20: mol_type = other DNA
cacgcctggctaattttttg

SEQ ID NO: 18746 - DNA, 20 bp, synthetic construct
  source 1..20: mol_type = other DNA
ccacgcctggctaatttttt

SEQ ID NO: 18747 - DNA, 20 bp, synthetic construct
  source 1..20: mol_type = other DNA
accacgcctggctaattttt

SEQ ID NO: 18748 - DNA, 20 bp, synthetic construct
  source 1..20: mol_type = other DNA
caccacgcctggctaatttt

SEQ ID NO: 18749 - DNA, 20 bp, synthetic construct
  source 1..20: mol_type = other DNA
ccaccacgcctggctaattt

SEQ ID NO: 18750 - DNA, 20 bp, synthetic construct
  source 1..20: mol_type = other DNA
gccaccacgcctggctaatt

SEQ ID NO: 18751 - DNA, 20 bp, synthetic construct
  source 1..20: mol_type = other DNA
cgccaccacgcctggctaat

SEQ ID NO: 18752 - DNA, 20 bp, synthetic construct
  source 1..20: mol_type = other DNA
ccgccaccacgcctggctaa

SEQ ID NO: 18753 - DNA, 20 bp, synthetic construct
  source 1..20: mol_type = other DNA
cccgccaccacgcctggcta

SEQ ID NO: 18754 - DNA, 20 bp, synthetic construct
  source 1..20: mol_type = other DNA
gcccgccaccacgcctggct

SEQ ID NO: 18755 - DNA, 20 bp, synthetic construct
  source 1..20: mol_type = other DNA
cgcccgccaccacgcctggc

SEQ ID NO: 18756 - DNA, 20 bp, synthetic construct
  source 1..20: mol_type = other DNA
gcgcccgccaccacgcctgg

SEQ ID NO: 18757 - DNA, 20 bp, synthetic construct
  source 1..20: mol_type = other DNA
ggcgcccgccaccacgcctg

SEQ ID NO: 18758 - DNA, 20 bp, synthetic construct
  source 1..20: mol_type = other DNA
aggcgcccgccaccacgcct

SEQ ID NO: 18759 - DNA, 20 bp, synthetic construct
  source 1..20: mol_type = other DNA
caggcgcccgccaccacgcc

SEQ ID NO: 18760 - DNA, 20 bp, synthetic construct
  source 1..20: mol_type = other DNA
acaggcgcccgccaccacgc

SEQ ID NO: 18761 - DNA, 20 bp, synthetic construct
  source 1..20: mol_type = other DNA
tacaggcgcccgccaccacg

SEQ ID NO: 18762 - DNA, 20 bp, synthetic construct
  source 1..20: mol_type = other DNA
ttacaggcgcccgccaccac

SEQ ID NO: 18763 - DNA, 20 bp, synthetic construct
  source 1..20: mol_type = other DNA
attacaggcgcccgccacca

SEQ ID NO: 18764 - DNA, 20 bp, synthetic construct
  source 1..20: mol_type = other DNA
gattacaggcgcccgccacc

SEQ ID NO: 18765 - DNA, 20 bp, synthetic construct
  source 1..20: mol_type = other DNA
ggattacaggcgcccgccac

SEQ ID NO: 18766 - DNA, 20 bp, synthetic construct
  source 1..20: mol_type = other DNA
gggattacaggcgcccgcca

SEQ ID NO: 18767 - DNA, 20 bp, synthetic construct
  source 1..20: mol_type = other DNA
tgggattacaggcgcccgcc

SEQ ID NO: 18768 - DNA, 20 bp, synthetic construct
  source 1..20: mol_type = other DNA
ctgggattacaggcgcccgc

SEQ ID NO: 18769 - DNA, 20 bp, synthetic construct
  source 1..20: mol_type = other DNA
gctgggattacaggcgcccg

SEQ ID NO: 18770 - DNA, 20 bp, synthetic construct
  source 1..20: mol_type = other DNA
agctgggattacaggcgccc

SEQ ID NO: 18771 - DNA, 20 bp, synthetic construct
  source 1..20: mol_type = other DNA
tagctgggattacaggcgcc

SEQ ID NO: 18772 - DNA, 20 bp, synthetic construct
  source 1..20: mol_type = other DNA
gtagctgggattacaggcgc

SEQ ID NO: 18773 - DNA, 20 bp, synthetic construct
  source 1..20: mol_type = other DNA
agtagctgggattacaggcg

SEQ ID NO: 18774 - DNA, 20 bp, synthetic construct
  source 1..20: mol_type = other DNA
aagtagctgggattacaggc

SEQ ID NO: 18775 - DNA, 20 bp, synthetic construct
  source 1..20: mol_type = other DNA
caagtagctgggattacagg

SEQ ID NO: 18776 - DNA, 20 bp, synthetic construct
  source 1..20: mol_type = other DNA
ccaagtagctgggattacag

SEQ ID NO: 18777 - DNA, 20 bp, synthetic construct
  source 1..20: mol_type = other DNA
cccaagtagctgggattaca

SEQ ID NO: 18778 - DNA, 20 bp, synthetic construct
  source 1..20: mol_type = other DNA
tcccaagtagctgggattac

SEQ ID NO: 18779 - DNA, 20 bp, synthetic construct
  source 1..20: mol_type = other DNA
ctcccaagtagctgggatta

SEQ ID NO: 18780 - DNA, 20 bp, synthetic construct
  source 1..20: mol_type = other DNA
cctcccaagtagctgggatt

SEQ ID NO: 18781 - DNA, 20 bp, synthetic construct
  source 1..20: mol_type = other DNA
gcctcccaagtagctgggat

SEQ ID NO: 18782 - DNA, 20 bp, synthetic construct
  source 1..20: mol_type = other DNA
agcctcccaagtagctggga

SEQ ID NO: 18783 - DNA, 20 bp, synthetic construct
  source 1..20: mol_type = other DNA
cagcctcccaagtagctggg

SEQ ID NO: 18784 - DNA, 20 bp, synthetic construct
  source 1..20: mol_type = other DNA
tcagcctcccaagtagctgg

SEQ ID NO: 18785 - DNA, 20 bp, synthetic construct
  source 1..20: mol_type = other DNA
ctcagcctcccaagtagctg

SEQ ID NO: 18786 - DNA, 20 bp, synthetic construct
  source 1..20: mol_type = other DNA
cctcagcctcccaagtagct

SEQ ID NO: 18787 - DNA, 20 bp, synthetic construct
  source 1..20: mol_type = other DNA
gcctcagcctcccaagtagc

SEQ ID NO: 18788 - DNA, 20 bp, synthetic construct
  source 1..20: mol_type = other DNA
tgcctcagcctcccaagtag

SEQ ID NO: 18789 - DNA, 20 bp, synthetic construct
  source 1..20: mol_type = other DNA
ctgcctcagcctcccaagta

SEQ ID NO: 18790 - DNA, 20 bp, synthetic construct
  source 1..20: mol_type = other DNA
cctgcctcagcctcccaagt

SEQ ID NO: 18791 - DNA, 20 bp, synthetic construct
  source 1..20: mol_type = other DNA
tcctgcctcagcctcccaag

SEQ ID NO: 18792 - DNA, 20 bp, synthetic construct
  source 1..20: mol_type = other DNA
ctcctgcctcagcctcccaa

SEQ ID NO: 18793 - DNA, 20 bp, synthetic construct
  source 1..20: mol_type = other DNA
tctcctgcctcagcctccca

SEQ ID NO: 18794 - DNA, 20 bp, synthetic construct
  source 1..20: mol_type = other DNA
ttctcctgcctcagcctccc

SEQ ID NO: 18795 - DNA, 20 bp, synthetic construct
  source 1..20: mol_type = other DNA
attctcctgcctcagcctcc

SEQ ID NO: 18796 - DNA, 20 bp, synthetic construct
  source 1..20: mol_type = other DNA
cattctcctgcctcagcctc

SEQ ID NO: 18797 - DNA, 20 bp, synthetic construct
  source 1..20: mol_type = other DNA
ccattctcctgcctcagcct

SEQ ID NO: 18798 - DNA, 20 bp, synthetic construct
  source 1..20: mol_type = other DNA
gccattctcctgcctcagcc

SEQ ID NO: 18799 - DNA, 20 bp, synthetic construct
  source 1..20: mol_type = other DNA
cgccattctcctgcctcagc

SEQ ID NO: 18800 - DNA, 20 bp, synthetic construct
  source 1..20: mol_type = other DNA
acgccattctcctgcctcag

SEQ ID NO: 18801 - DNA, 20 bp, synthetic construct
  source 1..20: mol_type = other DNA
cacgccattctcctgcctca

SEQ ID NO: 18802 - DNA, 20 bp, synthetic construct
  source 1..20: mol_type = other DNA
tcacgccattctcctgcctc

SEQ ID NO: 18803 - DNA, 20 bp, synthetic construct
  source 1..20: mol_type = other DNA
ttcacgccattctcctgcct

SEQ ID NO: 18804 - DNA, 20 bp, synthetic construct
  source 1..20: mol_type = other DNA
gttcacgccattctcctgcc

SEQ ID NO: 18805 - DNA, 20 bp, synthetic construct
  source 1..20: mol_type = other DNA
ggttcacgccattctcctgc

SEQ ID NO: 18806 - DNA, 20 bp, synthetic construct
  source 1..20: mol_type = other DNA
gggttcacgccattctcctg

SEQ ID NO: 18807 - DNA, 20 bp, synthetic construct
  source 1..20: mol_type = other DNA
cgggttcacgccattctcct

SEQ ID NO: 18808 - DNA, 20 bp, synthetic construct
  source 1..20: mol_type = other DNA
ccgggttcacgccattctcc

SEQ ID NO: 18809 - DNA, 20 bp, synthetic construct
  source 1..20: mol_type = other DNA
cccgggttcacgccattctc

SEQ ID NO: 18810 - DNA, 20 bp, synthetic construct
  source 1..20: mol_type = other DNA
tcccgggttcacgccattct

SEQ ID NO: 18811 - DNA, 20 bp, synthetic construct
  source 1..20: mol_type = other DNA
ctcccgggttcacgccattc

SEQ ID NO: 18812 - DNA, 20 bp, synthetic construct
  source 1..20: mol_type = other DNA
cctcccgggttcacgccatt

SEQ ID NO: 18813 - DNA, 20 bp, synthetic construct
  source 1..20: mol_type = other DNA
gcctcccgggttcacgccat

SEQ ID NO: 18814 - DNA, 20 bp, synthetic construct
  source 1..20: mol_type = other DNA
tgcctcccgggttcacgcca

SEQ ID NO: 18815 - DNA, 20 bp, synthetic construct
  source 1..20: mol_type = other DNA
ctgcctcccgggttcacgcc

SEQ ID NO: 18816 - DNA, 20 bp, synthetic construct
  source 1..20: mol_type = other DNA
tctgcctcccgggttcacgc

SEQ ID NO: 18817 - DNA, 20 bp, synthetic construct
  source 1..20: mol_type = other DNA
ctctgcctcccgggttcacg

SEQ ID NO: 18818 - DNA, 20 bp, synthetic construct
  source 1..20: mol_type = other DNA
gctctgcctcccgggttcac

SEQ ID NO: 18819 - DNA, 20 bp, synthetic construct
  source 1..20: mol_type = other DNA
agctctgcctcccgggttca

SEQ ID NO: 18820 - DNA, 20 bp, synthetic construct
  source 1..20: mol_type = other DNA
aagctctgcctcccgggttc

SEQ ID NO: 18821 - DNA, 20 bp, synthetic construct
  source 1..20: mol_type = other DNA
caagctctgcctcccgggtt

SEQ ID NO: 18822 - DNA, 20 bp, synthetic construct
  source 1..20: mol_type = other DNA
gcaagctctgcctcccgggt

SEQ ID NO: 18823 - DNA, 20 bp, synthetic construct
  source 1..20: mol_type = other DNA
tgcaagctctgcctcccggg

SEQ ID NO: 18824 - DNA, 20 bp, synthetic construct
  source 1..20: mol_type = other DNA
ctgcaagctctgcctcccgg

SEQ ID NO: 18825 - DNA, 20 bp, synthetic construct
  source 1..20: mol_type = other DNA
actgcaagctctgcctcccg

SEQ ID NO: 18826 - DNA, 20 bp, synthetic construct
  source 1..20: mol_type = other DNA
cactgcaagctctgcctccc

SEQ ID NO: 18827 - DNA, 20 bp, synthetic construct
  source 1..20: mol_type = other DNA
tcactgcaagctctgcctcc

SEQ ID NO: 18828 - DNA, 20 bp, synthetic construct
  source 1..20: mol_type = other DNA
ctcactgcaagctctgcctc

SEQ ID NO: 18829 - DNA, 20 bp, synthetic construct
  source 1..20: mol_type = other DNA
gctcactgcaagctctgcct

SEQ ID NO: 18830 - DNA, 20 bp, synthetic construct
  source 1..20: mol_type = other DNA
cgctcactgcaagctctgcc

SEQ ID NO: 18831 - DNA, 20 bp, synthetic construct
  source 1..20: mol_type = other DNA
ccgctcactgcaagctctgc

SEQ ID NO: 18832 - DNA, 20 bp, synthetic construct
  source 1..20: mol_type = other DNA
tccgctcactgcaagctctg

SEQ ID NO: 18833 - DNA, 20 bp, synthetic construct
  source 1..20: mol_type = other DNA
ctccgctcactgcaagctct

SEQ ID NO: 18834 - DNA, 20 bp, synthetic construct
  source 1..20: mol_type = other DNA
tctccgctcactgcaagctc

SEQ ID NO: 18835 - DNA, 20 bp, synthetic construct
  source 1..20: mol_type = other DNA
atctccgctcactgcaagct

SEQ ID NO: 18836 - DNA, 20 bp, synthetic construct
  source 1..20: mol_type = other DNA
catctccgctcactgcaagc

SEQ ID NO: 18837 - DNA, 20 bp, synthetic construct
  source 1..20: mol_type = other DNA
ccatctccgctcactgcaag

SEQ ID NO: 18838 - DNA, 20 bp, synthetic construct
  source 1..20: mol_type = other DNA
accatctccgctcactgcaa

SEQ ID NO: 18839 - DNA, 20 bp, synthetic construct
  source 1..20: mol_type = other DNA
caccatctccgctcactgca

SEQ ID NO: 18840 - DNA, 20 bp, synthetic construct
  source 1..20: mol_type = other DNA
gcaccatctccgctcactgc

SEQ ID NO: 18841 - DNA, 20 bp, synthetic construct
  source 1..20: mol_type = other DNA
ggcaccatctccgctcactg

SEQ ID NO: 18842 - DNA, 20 bp, synthetic construct
  source 1..20: mol_type = other DNA
tggcaccatctccgctcact

SEQ ID NO: 18843 - DNA, 20 bp, synthetic construct
  source 1..20: mol_type = other DNA
gtggcaccatctccgctcac

SEQ ID NO: 18844 - DNA, 20 bp, synthetic construct
  source 1..20: mol_type = other DNA
agtggcaccatctccgctca

SEQ ID NO: 18845 - DNA, 20 bp, synthetic construct
  source 1..20: mol_type = other DNA
cagtggcaccatctccgctc

SEQ ID NO: 18846 - DNA, 20 bp, synthetic construct
  source 1..20: mol_type = other DNA
gcagtggcaccatctccgct

SEQ ID NO: 18847 - DNA, 20 bp, synthetic construct
  source 1..20: mol_type = other DNA
tgcagtggcaccatctccgc

SEQ ID NO: 18848 - DNA, 20 bp, synthetic construct
  source 1..20: mol_type = other DNA
gtgcagtggcaccatctccg

SEQ ID NO: 18849 - DNA, 20 bp, synthetic construct
  source 1..20: mol_type = other DNA
agtgcagtggcaccatctcc

SEQ ID NO: 18850 - DNA, 20 bp, synthetic construct
  source 1..20: mol_type = other DNA
gagtgcagtggcaccatctc

SEQ ID NO: 18851 - DNA, 20 bp, synthetic construct
  source 1..20: mol_type = other DNA
ggagtgcagtggcaccatct

SEQ ID NO: 18852 - DNA, 20 bp, synthetic construct
  source 1..20: mol_type = other DNA
tggagtgcagtggcaccatc

SEQ ID NO: 18853 - DNA, 20 bp, synthetic construct
  source 1..20: mol_type = other DNA
ctggagtgcagtggcaccat

SEQ ID NO: 18854 - DNA, 20 bp, synthetic construct
  source 1..20: mol_type = other DNA
gctggagtgcagtggcacca

SEQ ID NO: 18855 - DNA, 20 bp, synthetic construct
  source 1..20: mol_type = other DNA
ggctggagtgcagtggcacc

SEQ ID NO: 18856 - DNA, 20 bp, synthetic construct
  source 1..20: mol_type = other DNA
aggctggagtgcagtggcac

SEQ ID NO: 18857 - DNA, 20 bp, synthetic construct
  source 1..20: mol_type = other DNA
caggctggagtgcagtggca

SEQ ID NO: 18858 - DNA, 20 bp, synthetic construct
  source 1..20: mol_type = other DNA
gcaggctggagtgcagtggc

SEQ ID NO: 18859 - DNA, 20 bp, synthetic construct
  source 1..20: mol_type = other DNA
agcaggctggagtgcagtgg

SEQ ID NO: 18860 - DNA, 20 bp, synthetic construct
  source 1..20: mol_type = other DNA
cagcaggctggagtgcagtg

SEQ ID NO: 18861 - DNA, 20 bp, synthetic construct
  source 1..20: mol_type = other DNA
ccagcaggctggagtgcagt

SEQ ID NO: 18862 - DNA, 20 bp, synthetic construct
  source 1..20: mol_type = other DNA
cccagcaggctggagtgcag

SEQ ID NO: 18863 - DNA, 20 bp, synthetic construct
  source 1..20: mol_type = other DNA
gcccagcaggctggagtgca

SEQ ID NO: 18864 - DNA, 20 bp, synthetic construct
  source 1..20: mol_type = other DNA
cgcccagcaggctggagtgc

SEQ ID NO: 18865 - DNA, 20 bp, synthetic construct
  source 1..20: mol_type = other DNA
tcgcccagcaggctggagtg

SEQ ID NO: 18866 - DNA, 20 bp, synthetic construct
  source 1..20: mol_type = other DNA
gtcgcccagcaggctggagt

SEQ ID NO: 18867 - DNA, 20 bp, synthetic construct
  source 1..20: mol_type = other DNA
tgtcgcccagcaggctggag

SEQ ID NO: 18868 - DNA, 20 bp, synthetic construct
  source 1..20: mol_type = other DNA
ctgtcgcccagcaggctgga

SEQ ID NO: 18869 - DNA, 20 bp, synthetic construct
  source 1..20: mol_type = other DNA
tctgtcgcccagcaggctgg

SEQ ID NO: 18870 - DNA, 20 bp, synthetic construct
  source 1..20: mol_type = other DNA
ctctgtcgcccagcaggctg

SEQ ID NO: 18871 - DNA, 20 bp, synthetic construct
  source 1..20: mol_type = other DNA
gctctgtcgcccagcaggct

SEQ ID NO: 18872 - DNA, 20 bp, synthetic construct
  source 1..20: mol_type = other DNA
cgctctgtcgcccagcaggc

SEQ ID NO: 18873 - DNA, 20 bp, synthetic construct
  source 1..20: mol_type = other DNA
tcgctctgtcgcccagcagg

SEQ ID NO: 18874 - DNA, 20 bp, synthetic construct
  source 1..20: mol_type = other DNA
ctcgctctgtcgcccagcag

SEQ ID NO: 18875 - DNA, 20 bp, synthetic construct
  source 1..20: mol_type = other DNA
tctcgctctgtcgcccagca

SEQ ID NO: 18876 - DNA, 20 bp, synthetic construct
  source 1..20: mol_type = other DNA
gtctcgctctgtcgcccagc

SEQ ID NO: 18877 - DNA, 20 bp, synthetic construct
  source 1..20: mol_type = other DNA
agtctcgctctgtcgcccag

SEQ ID NO: 18878 - DNA, 20 bp, synthetic construct
  source 1..20: mol_type = other DNA
gagtctcgctctgtcgccca

SEQ ID NO: 18879 - DNA, 20 bp, synthetic construct
  source 1..20: mol_type = other DNA
ggagtctcgctctgtcgccc

SEQ ID NO: 18880 - DNA, 20 bp, synthetic construct
  source 1..20: mol_type = other DNA
cggagtctcgctctgtcgcc

SEQ ID NO: 18881 - DNA, 20 bp, synthetic construct
  source 1..20: mol_type = other DNA
acggagtctcgctctgtcgc

SEQ ID NO: 18882 - DNA, 20 bp, synthetic construct
  source 1..20: mol_type = other DNA
gacggagtctcgctctgtcg

SEQ ID NO: 18883 - DNA, 20 bp, synthetic construct
  source 1..20: mol_type = other DNA
agacggagtctcgctctgtc

SEQ ID NO: 18884 - DNA, 20 bp, synthetic construct
  source 1..20: mol_type = other DNA
gagacggagtctcgctctgt

SEQ ID NO: 18885 - DNA, 20 bp, synthetic construct
  source 1..20: mol_type = other DNA
tgagacggagtctcgctctg

SEQ ID NO: 18886 - DNA, 20 bp, synthetic construct
  source 1..20: mol_type = other DNA
ttgagacggagtctcgctct

SEQ ID NO: 18887 - DNA, 20 bp, synthetic construct
  source 1..20: mol_type = other DNA
tttgagacggagtctcgctc

SEQ ID NO: 18888 - DNA, 20 bp, synthetic construct
  source 1..20: mol_type = other DNA
gtttgagacggagtctcgct

SEQ ID NO: 18889 - DNA, 20 bp, synthetic construct
  source 1..20: mol_type = other DNA
tgtttgagacggagtctcgc

SEQ ID NO: 18890 - DNA, 20 bp, synthetic construct
  source 1..20: mol_type = other DNA
ttgtttgagacggagtctcg

SEQ ID NO: 18891 - DNA, 20 bp, synthetic construct
  source 1..20: mol_type = other DNA
tttgtttgagacggagtctc

SEQ ID NO: 18892 - DNA, 20 bp, synthetic construct
  source 1..20: mol_type = other DNA
gtttgtttgagacggagtct

SEQ ID NO: 18893 - DNA, 20 bp, synthetic construct
  source 1..20: mol_type = other DNA
tgtttgtttgagacggagtc

SEQ ID NO: 18894 - DNA, 20 bp, synthetic construct
  source 1..20: mol_type = other DNA
ttgtttgtttgagacggagt

SEQ ID NO: 18895 - DNA, 20 bp, synthetic construct
  source 1..20: mol_type = other DNA
tttgtttgtttgagacggag

SEQ ID NO: 18896 - DNA, 20 bp, synthetic construct
  source 1..20: mol_type = other DNA
gtttgtttgtttgagacgga

SEQ ID NO: 18897 - DNA, 20 bp, synthetic construct
  source 1..20: mol_type = other DNA
tgtttgtttgtttgagacgg

SEQ ID NO: 18898 - DNA, 20 bp, synthetic construct
  source 1..20: mol_type = other DNA
ttgtttgtttgtttgagacg

SEQ ID NO: 18899 - DNA, 20 bp, synthetic construct
  source 1..20: mol_type = other DNA
tttgtttgtttgtttgagac

SEQ ID NO: 18900 - DNA, 20 bp, synthetic construct
  source 1..20: mol_type = other DNA
gtttgtttgtttgtttgaga

SEQ ID NO: 18901 - DNA, 20 bp, synthetic construct
  source 1..20: mol_type = other DNA
tgtttgtttgtttgtttgag

SEQ ID NO: 18902 - DNA, 20 bp, synthetic construct
  source 1..20: mol_type = other DNA
ttgtttgtttgtttgtttga

SEQ ID NO: 18903 - DNA, 20 bp, synthetic construct
  source 1..20: mol_type = other DNA
tttgtttgtttgtttgtttg

SEQ ID NO: 18904 - DNA, 20 bp, synthetic construct
  source 1..20: mol_type = other DNA
gtttgtttgtttgtttgttt

SEQ ID NO: 18905 - DNA, 20 bp, synthetic construct
  source 1..20: mol_type = other DNA
tgtttgtttgtttgtttgtt

SEQ ID NO: 18906 - DNA, 20 bp, synthetic construct
  source 1..20: mol_type = other DNA
ttgtttgtttgtttgtttgt

SEQ ID NO: 18907 - DNA, 20 bp, synthetic construct
  source 1..20: mol_type = other DNA
tttgtttgtttgtttgtttg

SEQ ID NO: 18908 - DNA, 20 bp, synthetic construct
  source 1..20: mol_type = other DNA
ttttgtttgtttgtttgttt

SEQ ID NO: 18909 - DNA, 20 bp, synthetic construct
  source 1..20: mol_type = other DNA
tttttgtttgtttgtttgtt

SEQ ID NO: 18910 - DNA, 20 bp, synthetic construct
  source 1..20: mol_type = other DNA
ttttttgtttgtttgtttgt

SEQ ID NO: 18911 - DNA, 20 bp, synthetic construct
  source 1..20: mol_type = other DNA
tttttttgtttgtttgtttg

SEQ ID NO: 18912 - DNA, 20 bp, synthetic construct
  source 1..20: mol_type = other DNA
gtttttttgtttgtttgttt

SEQ ID NO: 18913 - DNA, 20 bp, synthetic construct
  source 1..20: mol_type = other DNA
agtttttttgtttgtttgtt

SEQ ID NO: 18914 - DNA, 20 bp, synthetic construct
  source 1..20: mol_type = other DNA
cagtttttttgtttgtttgt

SEQ ID NO: 18915 - DNA, 20 bp, synthetic construct
  source 1..20: mol_type = other DNA
tcagtttttttgtttgtttg

SEQ ID NO: 18916 - DNA, 20 bp, synthetic construct
  source 1..20: mol_type = other DNA
ctcagtttttttgtttgttt

SEQ ID NO: 18917 - DNA, 20 bp, synthetic construct
  source 1..20: mol_type = other DNA
tctcagtttttttgtttgtt

SEQ ID NO: 18918 - DNA, 20 bp, synthetic construct
  source 1..20: mol_type = other DNA
atctcagtttttttgtttgt

SEQ ID NO: 18919 - DNA, 20 bp, synthetic construct
  source 1..20: mol_type = other DNA
tatctcagtttttttgtttg

SEQ ID NO: 18920 - DNA, 20 bp, synthetic construct
  source 1..20: mol_type = other DNA
gtatctcagtttttttgttt

SEQ ID NO: 18921 - DNA, 20 bp, synthetic construct
  source 1..20: mol_type = other DNA
agtatctcagtttttttgtt

SEQ ID NO: 18922 - DNA, 20 bp, synthetic construct
  source 1..20: mol_type = other DNA
tagtatctcagtttttttgt

SEQ ID NO: 18923 - DNA, 20 bp, synthetic construct
  source 1..20: mol_type = other DNA
ttagtatctcagtttttttg

SEQ ID NO: 18924 - DNA, 20 bp, synthetic construct
  source 1..20: mol_type = other DNA
tttagtatctcagttttttt

SEQ ID NO: 18925 - DNA, 20 bp, synthetic construct
  source 1..20: mol_type = other DNA
ctttagtatctcagtttttt

SEQ ID NO: 18926 - DNA, 20 bp, synthetic construct
  source 1..20: mol_type = other DNA
actttagtatctcagttttt

SEQ ID NO: 18927 - DNA, 20 bp, synthetic construct
  source 1..20: mol_type = other DNA
gactttagtatctcagtttt

SEQ ID NO: 18928 - DNA, 20 bp, synthetic construct
  source 1..20: mol_type = other DNA
agactttagtatctcagttt

SEQ ID NO: 18929 - DNA, 20 bp, synthetic construct
  source 1..20: mol_type = other DNA
aagactttagtatctcagtt

SEQ ID NO: 18930 - DNA, 20 bp, synthetic construct
  source 1..20: mol_type = other DNA
taagactttagtatctcagt

SEQ ID NO: 18931 - DNA, 20 bp, synthetic construct
  source 1..20: mol_type = other DNA
ttaagactttagtatctcag

SEQ ID NO: 18932 - DNA, 20 bp, synthetic construct
  source 1..20: mol_type = other DNA
attaagactttagtatctca

SEQ ID NO: 18933 - DNA, 20 bp, synthetic construct
  source 1..20: mol_type = other DNA
tattaagactttagtatctc

SEQ ID NO: 18934 - DNA, 20 bp, synthetic construct
  source 1..20: mol_type = other DNA
atattaagactttagtatct

SEQ ID NO: 18935 - DNA, 20 bp, synthetic construct
  source 1..20: mol_type = other DNA
aatattaagactttagtatc

SEQ ID NO: 18936 - DNA, 20 bp, synthetic construct
  source 1..20: mol_type = other DNA
aaatattaagactttagtat

SEQ ID NO: 18937 - DNA, 20 bp, synthetic construct
  source 1..20: mol_type = other DNA
aaaatattaagactttagta

SEQ ID NO: 18938 - DNA, 20 bp, synthetic construct
  source 1..20: mol_type = other DNA
gaaaatattaagactttagt

SEQ ID NO: 18939 - DNA, 20 bp, synthetic construct
  source 1..20: mol_type = other DNA
agaaaatattaagactttag

SEQ ID NO: 18940 - DNA, 20 bp, synthetic construct
  source 1..20: mol_type = other DNA
cagaaaatattaagacttta

SEQ ID NO: 18941 - DNA, 20 bp, synthetic construct
  source 1..20: mol_type = other DNA
acagaaaatattaagacttt

SEQ ID NO: 18942 - DNA, 20 bp, synthetic construct
  source 1..20: mol_type = other DNA
aacagaaaatattaagactt

SEQ ID NO: 18943 - DNA, 20 bp, synthetic construct
  source 1..20: mol_type = other DNA
aaacagaaaatattaagact

SEQ ID NO: 18944 - DNA, 20 bp, synthetic construct
  source 1..20: mol_type = other DNA
aaaacagaaaatattaagac

SEQ ID NO: 18945 - DNA, 20 bp, synthetic construct
  source 1..20: mol_type = other DNA
aaaaacagaaaatattaaga

SEQ ID NO: 18946 - DNA, 20 bp, synthetic construct
  source 1..20: mol_type = other DNA
taaaaacagaaaatattaag

SEQ ID NO: 18947 - DNA, 20 bp, synthetic construct
  source 1..20: mol_type = other DNA
ataaaaacagaaaatattaa

SEQ ID NO: 18948 - DNA, 20 bp, synthetic construct
  source 1..20: mol_type = other DNA
cataaaaacagaaaatatta

SEQ ID NO: 18949 - DNA, 20 bp, synthetic construct
  source 1..20: mol_type = other DNA
acataaaaacagaaaatatt

SEQ ID NO: 18950 - DNA, 20 bp, synthetic construct
  source 1..20: mol_type = other DNA
tacataaaaacagaaaatat

SEQ ID NO: 18951 - DNA, 20 bp, synthetic construct
  source 1..20: mol_type = other DNA
atacataaaaacagaaaata

SEQ ID NO: 18952 - DNA, 20 bp, synthetic construct
  source 1..20: mol_type = other DNA
aatacataaaaacagaaaat

SEQ ID NO: 18953 - DNA, 20 bp, synthetic construct
  source 1..20: mol_type = other DNA
aaatacataaaaacagaaaa

SEQ ID NO: 18954 - DNA, 20 bp, synthetic construct
  source 1..20: mol_type = other DNA
taaatacataaaaacagaaa

SEQ ID NO: 18955 - DNA, 20 bp, synthetic construct
  source 1..20: mol_type = other DNA
ataaatacataaaaacagaa

SEQ ID NO: 18956 - DNA, 20 bp, synthetic construct
  source 1..20: mol_type = other DNA
aataaatacataaaaacaga

SEQ ID NO: 18957 - DNA, 20 bp, synthetic construct
  source 1..20: mol_type = other DNA
aaataaatacataaaaacag

SEQ ID NO: 18958 - DNA, 20 bp, synthetic construct
  source 1..20: mol_type = other DNA
aaaataaatacataaaaaca

SEQ ID NO: 18959 - DNA, 20 bp, synthetic construct
  source 1..20: mol_type = other DNA
aaaaataaatacataaaaac

SEQ ID NO: 18960 - DNA, 20 bp, synthetic construct
  source 1..20: mol_type = other DNA
aaaaaataaatacataaaaa

SEQ ID NO: 18961 - DNA, 20 bp, synthetic construct
  source 1..20: mol_type = other DNA
caaaaaataaatacataaaa

SEQ ID NO: 18962 - DNA, 20 bp, synthetic construct
  source 1..20: mol_type = other DNA
tcaaaaaataaatacataaa

SEQ ID NO: 18963 - DNA, 20 bp, synthetic construct
  source 1..20: mol_type = other DNA
ctcaaaaaataaatacataa

SEQ ID NO: 18964 - DNA, 20 bp, synthetic construct
  source 1..20: mol_type = other DNA
tctcaaaaaataaatacata

SEQ ID NO: 18965 - DNA, 20 bp, synthetic construct
  source 1..20: mol_type = other DNA
atctcaaaaaataaatacat

SEQ ID NO: 18966 - DNA, 20 bp, synthetic construct
  source 1..20: mol_type = other DNA
catctcaaaaaataaataca

SEQ ID NO: 18967 - DNA, 20 bp, synthetic construct
  source 1..20: mol_type = other DNA
ccatctcaaaaaataaatac

SEQ ID NO: 18968 - DNA, 20 bp, synthetic construct
  source 1..20: mol_type = other DNA
cccatctcaaaaaataaata

SEQ ID NO: 18969 - DNA, 20 bp, synthetic construct
  source 1..20: mol_type = other DNA
tcccatctcaaaaaataaat

SEQ ID NO: 18970 - DNA, 20 bp, synthetic construct
  source 1..20: mol_type = other DNA
atcccatctcaaaaaataaa

SEQ ID NO: 18971 - DNA, 20 bp, synthetic construct
  source 1..20: mol_type = other DNA
gatcccatctcaaaaaataa

SEQ ID NO: 18972 - DNA, 20 bp, synthetic construct
  source 1..20: mol_type = other DNA
agatcccatctcaaaaaata

SEQ ID NO: 18973 - DNA, 20 bp, synthetic construct
  source 1..20: mol_type = other DNA
aagatcccatctcaaaaaat

SEQ ID NO: 18974 - DNA, 20 bp, synthetic construct
  source 1..20: mol_type = other DNA
caagatcccatctcaaaaaa

SEQ ID NO: 18975 - DNA, 20 bp, synthetic construct
  source 1..20: mol_type = other DNA
gcaagatcccatctcaaaaa

SEQ ID NO: 18976 - DNA, 20 bp, synthetic construct
  source 1..20: mol_type = other DNA
agcaagatcccatctcaaaa

SEQ ID NO: 18977 - DNA, 20 bp, synthetic construct
  source 1..20: mol_type = other DNA
cagcaagatcccatctcaaa

SEQ ID NO: 18978 - DNA, 20 bp, synthetic construct
  source 1..20: mol_type = other DNA
acagcaagatcccatctcaa

SEQ ID NO: 18979 - DNA, 20 bp, synthetic construct
  source 1..20: mol_type = other DNA
tacagcaagatcccatctca

SEQ ID NO: 18980 - DNA, 20 bp, synthetic construct
  source 1..20: mol_type = other DNA
atacagcaagatcccatctc

SEQ ID NO: 18981 - DNA, 20 bp, synthetic construct
  source 1..20: mol_type = other DNA
aatacagcaagatcccatct

SEQ ID NO: 18982 - DNA, 20 bp, synthetic construct
  source 1..20: mol_type = other DNA
caatacagcaagatcccatc

SEQ ID NO: 18983 - DNA, 20 bp, synthetic construct
  source 1..20: mol_type = other DNA
gcaatacagcaagatcccat

SEQ ID NO: 18984 - DNA, 20 bp, synthetic construct
  source 1..20: mol_type = other DNA
ggcaatacagcaagatccca

SEQ ID NO: 18985 - DNA, 20 bp, synthetic construct
  source 1..20: mol_type = other DNA
gggcaatacagcaagatccc

SEQ ID NO: 18986 - DNA, 20 bp, synthetic construct
  source 1..20: mol_type = other DNA
tgggcaatacagcaagatcc

SEQ ID NO: 18987 - DNA, 20 bp, synthetic construct
  source 1..20: mol_type = other DNA
ctgggcaatacagcaagatc

SEQ ID NO: 18988 - DNA, 20 bp, synthetic construct
  source 1..20: mol_type = other DNA
cctgggcaatacagcaagat

SEQ ID NO: 18989 - DNA, 20 bp, synthetic construct
  source 1..20: mol_type = other DNA
acctgggcaatacagcaaga

SEQ ID NO: 18990 - DNA, 20 bp, synthetic construct
  source 1..20: mol_type = other DNA
aacctgggcaatacagcaag

SEQ ID NO: 18991 - DNA, 20 bp, synthetic construct
  source 1..20: mol_type = other DNA
caacctgggcaatacagcaa

SEQ ID NO: 18992 - DNA, 20 bp, synthetic construct
  source 1..20: mol_type = other DNA
ccaacctgggcaatacagca

SEQ ID NO: 18993 - DNA, 20 bp, synthetic construct
  source 1..20: mol_type = other DNA
tccaacctgggcaatacagc

SEQ ID NO: 18994 - DNA, 20 bp, synthetic construct
  source 1..20: mol_type = other DNA
ctccaacctgggcaatacag

SEQ ID NO: 18995 - DNA, 20 bp, synthetic construct
  source 1..20: mol_type = other DNA
actccaacctgggcaataca

SEQ ID NO: 18996 - DNA, 20 bp, synthetic construct
  source 1..20: mol_type = other DNA
tactccaacctgggcaatac

SEQ ID NO: 18997 - DNA, 20 bp, synthetic construct
  source 1..20: mol_type = other DNA
gtactccaacctgggcaata

SEQ ID NO: 18998 - DNA, 20 bp, synthetic construct
  source 1..20: mol_type = other DNA
tgtactccaacctgggcaat

SEQ ID NO: 18999 - DNA, 20 bp, synthetic construct
  source 1..20: mol_type = other DNA
ctgtactccaacctgggcaa

SEQ ID NO: 19000 - DNA, 20 bp, synthetic construct
  source 1..20: mol_type = other DNA
actgtactccaacctgggca

SEQ ID NO: 19001 - DNA, 20 bp, synthetic construct
  source 1..20: mol_type = other DNA
tactgtactccaacctgggc

SEQ ID NO: 19002 - DNA, 20 bp, synthetic construct
  source 1..20: mol_type = other DNA
atactgtactccaacctggg

SEQ ID NO: 19003 - DNA, 20 bp, synthetic construct
  source 1..20: mol_type = other DNA
aatactgtactccaacctgg

SEQ ID NO: 19004 - DNA, 20 bp, synthetic construct
  source 1..20: mol_type = other DNA
caatactgtactccaacctg

SEQ ID NO: 19005 - DNA, 20 bp, synthetic construct
  source 1..20: mol_type = other DNA
acaatactgtactccaacct

SEQ ID NO: 19006 - DNA, 20 bp, synthetic construct
  source 1..20: mol_type = other DNA
cacaatactgtactccaacc

SEQ ID NO: 19007 - DNA, 20 bp, synthetic construct
  source 1..20: mol_type = other DNA
tcacaatactgtactccaac

SEQ ID NO: 19008 - DNA, 20 bp, synthetic construct
  source 1..20: mol_type = other DNA
atcacaatactgtactccaa

SEQ ID NO: 19009 - DNA, 20 bp, synthetic construct
  source 1..20: mol_type = other DNA
gatcacaatactgtactcca

SEQ ID NO: 19010 - DNA, 20 bp, synthetic construct
  source 1..20: mol_type = other DNA
tgatcacaatactgtactcc

SEQ ID NO: 19011 - DNA, 20 bp, synthetic construct
  source 1..20: mol_type = other DNA
atgatcacaatactgtactc

SEQ ID NO: 19012 - DNA, 20 bp, synthetic construct
  source 1..20: mol_type = other DNA
catgatcacaatactgtact

SEQ ID NO: 19013 - DNA, 20 bp, synthetic construct
  source 1..20: mol_type = other DNA
ccatgatcacaatactgtac

SEQ ID NO: 19014 - DNA, 20 bp, synthetic construct
  source 1..20: mol_type = other DNA
gccatgatcacaatactgta

SEQ ID NO: 19015 - DNA, 20 bp, synthetic construct
  source 1..20: mol_type = other DNA
agccatgatcacaatactgt

SEQ ID NO: 19016 - DNA, 20 bp, synthetic construct
  source 1..20: mol_type = other DNA
aagccatgatcacaatactg

SEQ ID NO: 19017 - DNA, 20 bp, synthetic construct
  source 1..20: mol_type = other DNA
taagccatgatcacaatact

SEQ ID NO: 19018 - DNA, 20 bp, synthetic construct
  source 1..20: mol_type = other DNA
ataagccatgatcacaatac

SEQ ID NO: 19019 - DNA, 20 bp, synthetic construct
  source 1..20: mol_type = other DNA
aataagccatgatcacaata

SEQ ID NO: 19020 - DNA, 20 bp, synthetic construct
  source 1..20: mol_type = other DNA
caataagccatgatcacaat

SEQ ID NO: 19021 - DNA, 20 bp, synthetic construct
  source 1..20: mol_type = other DNA
gcaataagccatgatcacaa

SEQ ID NO: 19022 - DNA, 20 bp, synthetic construct
  source 1..20: mol_type = other DNA
tgcaataagccatgatcaca

SEQ ID NO: 19023 - DNA, 20 bp, synthetic construct
  source 1..20: mol_type = other DNA
ctgcaataagccatgatcac

SEQ ID NO: 19024 - DNA, 20 bp, synthetic construct
  source 1..20: mol_type = other DNA
gctgcaataagccatgatca

SEQ ID NO: 19025 - DNA, 20 bp, synthetic construct
  source 1..20: mol_type = other DNA
ggctgcaataagccatgatc

SEQ ID NO: 19026 - DNA, 20 bp, synthetic construct
  source 1..20: mol_type = other DNA
aggctgcaataagccatgat

SEQ ID NO: 19027 - DNA, 20 bp, synthetic construct
  source 1..20: mol_type = other DNA
aaggctgcaataagccatga

SEQ ID NO: 19028 - DNA, 20 bp, synthetic construct
  source 1..20: mol_type = other DNA
aaaggctgcaataagccatg

SEQ ID NO: 19029 - DNA, 20 bp, synthetic construct
  source 1..20: mol_type = other DNA
taaaggctgcaataagccat

SEQ ID NO: 19030 - DNA, 20 bp, synthetic construct
  source 1..20: mol_type = other DNA
ttaaaggctgcaataagcca

SEQ ID NO: 19031 - DNA, 20 bp, synthetic construct
  source 1..20: mol_type = other DNA
gttaaaggctgcaataagcc

SEQ ID NO: 19032 - DNA, 20 bp, synthetic construct
  source 1..20: mol_type = other DNA
agttaaaggctgcaataagc

SEQ ID NO: 19033 - DNA, 20 bp, synthetic construct
  source 1..20: mol_type = other DNA
gagttaaaggctgcaataag

SEQ ID NO: 19034 - DNA, 20 bp, synthetic construct
  source 1..20: mol_type = other DNA
ggagttaaaggctgcaataa

SEQ ID NO: 19035 - DNA, 20 bp, synthetic construct
  source 1..20: mol_type = other DNA
aggagttaaaggctgcaata

SEQ ID NO: 19036 - DNA, 20 bp, synthetic construct
  source 1..20: mol_type = other DNA
caggagttaaaggctgcaat

SEQ ID NO: 19037 - DNA, 20 bp, synthetic construct
  source 1..20: mol_type = other DNA
ccaggagttaaaggctgcaa

SEQ ID NO: 19038 - DNA, 20 bp, synthetic construct
  source 1..20: mol_type = other DNA
cccaggagttaaaggctgca

SEQ ID NO: 19039 - DNA, 20 bp, synthetic construct
  source 1..20: mol_type = other DNA
acccaggagttaaaggctgc

SEQ ID NO: 19040 - DNA, 20 bp, synthetic construct
  source 1..20: mol_type = other DNA
aacccaggagttaaaggctg

SEQ ID NO: 19041 - DNA, 20 bp, synthetic construct
  source 1..20: mol_type = other DNA
gaacccaggagttaaaggct

SEQ ID NO: 19042 - DNA, 20 bp, synthetic construct
  source 1..20: mol_type = other DNA
tgaacccaggagttaaaggc

SEQ ID NO: 19043 - DNA, 20 bp, synthetic construct
  source 1..20: mol_type = other DNA
ttgaacccaggagttaaagg

SEQ ID NO: 19044 - DNA, 20 bp, synthetic construct
  source 1..20: mol_type = other DNA
cttgaacccaggagttaaag

SEQ ID NO: 19045 - DNA, 20 bp, synthetic construct
  source 1..20: mol_type = other DNA
acttgaacccaggagttaaa

SEQ ID NO: 19046 - DNA, 20 bp, synthetic construct
  source 1..20: mol_type = other DNA
cacttgaacccaggagttaa

SEQ ID NO: 19047 - DNA, 20 bp, synthetic construct
  source 1..20: mol_type = other DNA
tcacttgaacccaggagtta

SEQ ID NO: 19048 - DNA, 20 bp, synthetic construct
  source 1..20: mol_type = other DNA
atcacttgaacccaggagtt

SEQ ID NO: 19049 - DNA, 20 bp, synthetic construct
  source 1..20: mol_type = other DNA
gatcacttgaacccaggagt

SEQ ID NO: 19050 - DNA, 20 bp, synthetic construct
  source 1..20: mol_type = other DNA
ggatcacttgaacccaggag

SEQ ID NO: 19051 - DNA, 20 bp, synthetic construct
  source 1..20: mol_type = other DNA
aggatcacttgaacccagga

SEQ ID NO: 19052 - DNA, 20 bp, synthetic construct
  source 1..20: mol_type = other DNA
gaggatcacttgaacccagg

SEQ ID NO: 19053 - DNA, 20 bp, synthetic construct
  source 1..20: mol_type = other DNA
ggaggatcacttgaacccag

SEQ ID NO: 19054 - DNA, 20 bp, synthetic construct
  source 1..20: mol_type = other DNA
gggaggatcacttgaaccca

SEQ ID NO: 19055 - DNA, 20 bp, synthetic construct
  source 1..20: mol_type = other DNA
tgggaggatcacttgaaccc

SEQ ID NO: 19056 - DNA, 20 bp, synthetic construct
  source 1..20: mol_type = other DNA
gtgggaggatcacttgaacc

SEQ ID NO: 19057 - DNA, 20 bp, synthetic construct
  source 1..20: mol_type = other DNA
ggtgggaggatcacttgaac

SEQ ID NO: 19058 - DNA, 20 bp, synthetic construct
  source 1..20: mol_type = other DNA
aggtgggaggatcacttgaa

SEQ ID NO: 19059 - DNA, 20 bp, synthetic construct
  source 1..20: mol_type = other DNA
gaggtgggaggatcacttga

SEQ ID NO: 19060 - DNA, 20 bp, synthetic construct
  source 1..20: mol_type = other DNA
tgaggtgggaggatcacttg

SEQ ID NO: 19061 - DNA, 20 bp, synthetic construct
  source 1..20: mol_type = other DNA
ctgaggtgggaggatcactt

SEQ ID NO: 19062 - DNA, 20 bp, synthetic construct
  source 1..20: mol_type = other DNA
gctgaggtgggaggatcact

SEQ ID NO: 19063 - DNA, 20 bp, synthetic construct
  source 1..20: mol_type = other DNA
ggctgaggtgggaggatcac

SEQ ID NO: 19064 - DNA, 20 bp, synthetic construct
  source 1..20: mol_type = other DNA
aggctgaggtgggaggatca

SEQ ID NO: 19065 - DNA, 20 bp, synthetic construct
  source 1..20: mol_type = other DNA
gaggctgaggtgggaggatc

SEQ ID NO: 19066 - DNA, 20 bp, synthetic construct
  source 1..20: mol_type = other DNA
ggaggctgaggtgggaggat

SEQ ID NO: 19067 - DNA, 20 bp, synthetic construct
  source 1..20: mol_type = other DNA
aggaggctgaggtgggagga

SEQ ID NO: 19068 - DNA, 20 bp, synthetic construct
  source 1..20: mol_type = other DNA
caggaggctgaggtgggagg

SEQ ID NO: 19069 - DNA, 20 bp, synthetic construct
  source 1..20: mol_type = other DNA
tcaggaggctgaggtgggag

SEQ ID NO: 19070 - DNA, 20 bp, synthetic construct
  source 1..20: mol_type = other DNA
ctcaggaggctgaggtggga

SEQ ID NO: 19071 - DNA, 20 bp, synthetic construct
  source 1..20: mol_type = other DNA
actcaggaggctgaggtggg

SEQ ID NO: 19072 - DNA, 20 bp, synthetic construct
  source 1..20: mol_type = other DNA
tactcaggaggctgaggtgg

SEQ ID NO: 19073 - DNA, 20 bp, synthetic construct
  source 1..20: mol_type = other DNA
ctactcaggaggctgaggtg

SEQ ID NO: 19074 - DNA, 20 bp, synthetic construct
  source 1..20: mol_type = other DNA
gctactcaggaggctgaggt

SEQ ID NO: 19075 - DNA, 20 bp, synthetic construct
  source 1..20: mol_type = other DNA
agctactcaggaggctgagg

SEQ ID NO: 19076 - DNA, 20 bp, synthetic construct
  source 1..20: mol_type = other DNA
cagctactcaggaggctgag

SEQ ID NO: 19077 - DNA, 20 bp, synthetic construct
  source 1..20: mol_type = other DNA
ccagctactcaggaggctga

SEQ ID NO: 19078 - DNA, 20 bp, synthetic construct
  source 1..20: mol_type = other DNA
cccagctactcaggaggctg

SEQ ID NO: 19079 - DNA, 20 bp, synthetic construct
  source 1..20: mol_type = other DNA
tcccagctactcaggaggct

SEQ ID NO: 19080 - DNA, 20 bp, synthetic construct
  source 1..20: mol_type = other DNA
gtcccagctactcaggaggc

SEQ ID NO: 19081 - DNA, 20 bp, synthetic construct
  source 1..20: mol_type = other DNA
ggtcccagctactcaggagg

SEQ ID NO: 19082 - DNA, 20 bp, synthetic construct
  source 1..20: mol_type = other DNA
tggtcccagctactcaggag

SEQ ID NO: 19083 - DNA, 20 bp, synthetic construct
  source 1..20: mol_type = other DNA
gtggtcccagctactcagga

SEQ ID NO: 19084 - DNA, 20 bp, synthetic construct
  source 1..20: mol_type = other DNA
tgtggtcccagctactcagg

SEQ ID NO: 19085 - DNA, 20 bp, synthetic construct
  source 1..20: mol_type = other DNA
ctgtggtcccagctactcag

SEQ ID NO: 19086 - DNA, 20 bp, synthetic construct
  source 1..20: mol_type = other DNA
cctgtggtcccagctactca

SEQ ID NO: 19087 - DNA, 20 bp, synthetic construct
  source 1..20: mol_type = other DNA
gcctgtggtcccagctactc

SEQ ID NO: 19088 - DNA, 20 bp, synthetic construct
  source 1..20: mol_type = other DNA
tgcctgtggtcccagctact

SEQ ID NO: 19089 - DNA, 20 bp, synthetic construct
  source 1..20: mol_type = other DNA
gtgcctgtggtcccagctac

SEQ ID NO: 19090 - DNA, 20 bp, synthetic construct
  source 1..20: mol_type = other DNA
tgtgcctgtggtcccagcta

SEQ ID NO: 19091 - DNA, 20 bp, synthetic construct
  source 1..20: mol_type = other DNA
atgtgcctgtggtcccagct

SEQ ID NO: 19092 - DNA, 20 bp, synthetic construct
  source 1..20: mol_type = other DNA
catgtgcctgtggtcccagc

SEQ ID NO: 19093 - DNA, 20 bp, synthetic construct
  source 1..20: mol_type = other DNA
gcatgtgcctgtggtcccag

SEQ ID NO: 19094 - DNA, 20 bp, synthetic construct
  source 1..20: mol_type = other DNA
tgcatgtgcctgtggtccca

SEQ ID NO: 19095 - DNA, 20 bp, synthetic construct
  source 1..20: mol_type = other DNA
ttgcatgtgcctgtggtccc

SEQ ID NO: 19096 - DNA, 20 bp, synthetic construct
  source 1..20: mol_type = other DNA
gttgcatgtgcctgtggtcc

SEQ ID NO: 19097 - DNA, 20 bp, synthetic construct
  source 1..20: mol_type = other DNA
tgttgcatgtgcctgtggtc

SEQ ID NO: 19098 - DNA, 20 bp, synthetic construct
  source 1..20: mol_type = other DNA
atgttgcatgtgcctgtggt

SEQ ID NO: 19099 - DNA, 20 bp, synthetic construct
  source 1..20: mol_type = other DNA
gatgttgcatgtgcctgtgg

SEQ ID NO: 19100 - DNA, 20 bp, synthetic construct
  source 1..20: mol_type = other DNA
tgatgttgcatgtgcctgtg

SEQ ID NO: 19101 - DNA, 20 bp, synthetic construct
  source 1..20: mol_type = other DNA
gtgatgttgcatgtgcctgt

SEQ ID NO: 19102 - DNA, 20 bp, synthetic construct
  source 1..20: mol_type = other DNA
tgtgatgttgcatgtgcctg

SEQ ID NO: 19103 - DNA, 20 bp, synthetic construct
  source 1..20: mol_type = other DNA
gtgtgatgttgcatgtgcct

SEQ ID NO: 19104 - DNA, 20 bp, synthetic construct
  source 1..20: mol_type = other DNA
ggtgtgatgttgcatgtgcc

SEQ ID NO: 19105 - DNA, 20 bp, synthetic construct
  source 1..20: mol_type = other DNA
gggtgtgatgttgcatgtgc

SEQ ID NO: 19106 - DNA, 20 bp, synthetic construct
  source 1..20: mol_type = other DNA
agggtgtgatgttgcatgtg

SEQ ID NO: 19107 - DNA, 20 bp, synthetic construct
  source 1..20: mol_type = other DNA
cagggtgtgatgttgcatgt

SEQ ID NO: 19108 - DNA, 20 bp, synthetic construct
  source 1..20: mol_type = other DNA
gcagggtgtgatgttgcatg

SEQ ID NO: 19109 - DNA, 20 bp, synthetic construct
  source 1..20: mol_type = other DNA
tgcagggtgtgatgttgcat

SEQ ID NO: 19110 - DNA, 20 bp, synthetic construct
  source 1..20: mol_type = other DNA
ctgcagggtgtgatgttgca

SEQ ID NO: 19111 - DNA, 20 bp, synthetic construct
  source 1..20: mol_type = other DNA
actgcagggtgtgatgttgc

SEQ ID NO: 19112 - DNA, 20 bp, synthetic construct
  source 1..20: mol_type = other DNA
aactgcagggtgtgatgttg

SEQ ID NO: 19113 - DNA, 20 bp, synthetic construct
  source 1..20: mol_type = other DNA
gaactgcagggtgtgatgtt

SEQ ID NO: 19114 - DNA, 20 bp, synthetic construct
  source 1..20: mol_type = other DNA
agaactgcagggtgtgatgt

SEQ ID NO: 19115 - DNA, 20 bp, synthetic construct
  source 1..20: mol_type = other DNA
aagaactgcagggtgtgatg

SEQ ID NO: 19116 - DNA, 20 bp, synthetic construct
  source 1..20: mol_type = other DNA
aaagaactgcagggtgtgat

SEQ ID NO: 19117 - DNA, 20 bp, synthetic construct
  source 1..20: mol_type = other DNA
aaaagaactgcagggtgtga

SEQ ID NO: 19118 - DNA, 20 bp, synthetic construct
  source 1..20: mol_type = other DNA
aaaaagaactgcagggtgtg

SEQ ID NO: 19119 - DNA, 20 bp, synthetic construct
  source 1..20: mol_type = other DNA
aaaaaagaactgcagggtgt

SEQ ID NO: 19120 - DNA, 20 bp, synthetic construct
  source 1..20: mol_type = other DNA
aaaaaaagaactgcagggtg

SEQ ID NO: 19121 - DNA, 20 bp, synthetic construct
  source 1..20: mol_type = other DNA
aaaaaaaagaactgcagggt

SEQ ID NO: 19122 - DNA, 20 bp, synthetic construct
  source 1..20: mol_type = other DNA
aaaaaaaaagaactgcaggg

SEQ ID NO: 19123 - DNA, 20 bp, synthetic construct
  source 1..20: mol_type = other DNA
aaaaaaaaaagaactgcagg

SEQ ID NO: 19124 - DNA, 20 bp, synthetic construct
  source 1..20: mol_type = other DNA
aaaaaaaaaaagaactgcag

SEQ ID NO: 19125 - DNA, 20 bp, synthetic construct
  source 1..20: mol_type = other DNA
aaaaaaaaaaaagaactgca

SEQ ID NO: 19126 - DNA, 20 bp, synthetic construct
  source 1..20: mol_type = other DNA
aaaaaaaaaaaaagaactgc

SEQ ID NO: 19127 - DNA, 20 bp, synthetic construct
  source 1..20: mol_type = other DNA
caaaaaaaaaaaaagaactg

SEQ ID NO: 19128 - DNA, 20 bp, synthetic construct
  source 1..20: mol_type = other DNA
tcaaaaaaaaaaaaagaact

SEQ ID NO: 19129 - DNA, 20 bp, synthetic construct
  source 1..20: mol_type = other DNA
ctcaaaaaaaaaaaaagaac

SEQ ID NO: 19130 - DNA, 20 bp, synthetic construct
  source 1..20: mol_type = other DNA
tctcaaaaaaaaaaaaagaa

SEQ ID NO: 19131 - DNA, 20 bp, synthetic construct
  source 1..20: mol_type = other DNA
gtctcaaaaaaaaaaaaaga

SEQ ID NO: 19132 - DNA, 20 bp, synthetic construct
  source 1..20: mol_type = other DNA
tgtctcaaaaaaaaaaaaag

SEQ ID NO: 19133 - DNA, 20 bp, synthetic construct
  source 1..20: mol_type = other DNA
gtgtctcaaaaaaaaaaaaa

SEQ ID NO: 19134 - DNA, 20 bp, synthetic construct
  source 1..20: mol_type = other DNA
ggtgtctcaaaaaaaaaaaa

SEQ ID NO: 19135 - DNA, 20 bp, synthetic construct
  source 1..20: mol_type = other DNA
cggtgtctcaaaaaaaaaaa

SEQ ID NO: 19136 - DNA, 20 bp, synthetic construct
  source 1..20: mol_type = other DNA
acggtgtctcaaaaaaaaaa

SEQ ID NO: 19137 - DNA, 20 bp, synthetic construct
  source 1..20: mol_type = other DNA
gacggtgtctcaaaaaaaaa

SEQ ID NO: 19138 - DNA, 20 bp, synthetic construct
  source 1..20: mol_type = other DNA
agacggtgtctcaaaaaaaa

SEQ ID NO: 19139 - DNA, 20 bp, synthetic construct
  source 1..20: mol_type = other DNA
gagacggtgtctcaaaaaaa

SEQ ID NO: 19140 - DNA, 20 bp, synthetic construct
  source 1..20: mol_type = other DNA
cgagacggtgtctcaaaaaa

SEQ ID NO: 19141 - DNA, 20 bp, synthetic construct
  source 1..20: mol_type = other DNA
gcgagacggtgtctcaaaaa

SEQ ID NO: 19142 - DNA, 20 bp, synthetic construct
  source 1..20: mol_type = other DNA
agcgagacggtgtctcaaaa

SEQ ID NO: 19143 - DNA, 20 bp, synthetic construct
  source 1..20: mol_type = other DNA
aagcgagacggtgtctcaaa

SEQ ID NO: 19144 - DNA, 20 bp, synthetic construct
  source 1..20: mol_type = other DNA
aaagcgagacggtgtctcaa

SEQ ID NO: 19145 - DNA, 20 bp, synthetic construct
  source 1..20: mol_type = other DNA
caaagcgagacggtgtctca

SEQ ID NO: 19146 - DNA, 20 bp, synthetic construct
  source 1..20: mol_type = other DNA
acaaagcgagacggtgtctc

SEQ ID NO: 19147 - DNA, 20 bp, synthetic construct
  source 1..20: mol_type = other DNA
gacaaagcgagacggtgtct

SEQ ID NO: 19148 - DNA, 20 bp, synthetic construct
  source 1..20: mol_type = other DNA
tgacaaagcgagacggtgtc

SEQ ID NO: 19149 - DNA, 20 bp, synthetic construct
  source 1..20: mol_type = other DNA
gtgacaaagcgagacggtgt

SEQ ID NO: 19150 - DNA, 20 bp, synthetic construct
  source 1..20: mol_type = other DNA
ggtgacaaagcgagacggtg

SEQ ID NO: 19151 - DNA, 20 bp, synthetic construct
  source 1..20: mol_type = other DNA
gggtgacaaagcgagacggt

SEQ ID NO: 19152 - DNA, 20 bp, synthetic construct
  source 1..20: mol_type = other DNA
tgggtgacaaagcgagacgg

SEQ ID NO: 19153 - DNA, 20 bp, synthetic construct
  source 1..20: mol_type = other DNA
ctgggtgacaaagcgagacg

SEQ ID NO: 19154 - DNA, 20 bp, synthetic construct
  source 1..20: mol_type = other DNA
cctgggtgacaaagcgagac

SEQ ID NO: 19155 - DNA, 20 bp, synthetic construct
  source 1..20: mol_type = other DNA
gcctgggtgacaaagcgaga

SEQ ID NO: 19156 - DNA, 20 bp, synthetic construct
  source 1..20: mol_type = other DNA
agcctgggtgacaaagcgag

SEQ ID NO: 19157 - DNA, 20 bp, synthetic construct
  source 1..20: mol_type = other DNA
cagcctgggtgacaaagcga

SEQ ID NO: 19158 - DNA, 20 bp, synthetic construct
  source 1..20: mol_type = other DNA
gcagcctgggtgacaaagcg

SEQ ID NO: 19159 - DNA, 20 bp, synthetic construct
  source 1..20: mol_type = other DNA
tgcagcctgggtgacaaagc

SEQ ID NO: 19160 - DNA, 20 bp, synthetic construct
  source 1..20: mol_type = other DNA
ctgcagcctgggtgacaaag

SEQ ID NO: 19161 - DNA, 20 bp, synthetic construct
  source 1..20: mol_type = other DNA
actgcagcctgggtgacaaa

SEQ ID NO: 19162 - DNA, 20 bp, synthetic construct
  source 1..20: mol_type = other DNA
cactgcagcctgggtgacaa

SEQ ID NO: 19163 - DNA, 20 bp, synthetic construct
  source 1..20: mol_type = other DNA
gcactgcagcctgggtgaca

SEQ ID NO: 19164 - DNA, 20 bp, synthetic construct
  source 1..20: mol_type = other DNA
cgcactgcagcctgggtgac

SEQ ID NO: 19165 - DNA, 20 bp, synthetic construct
  source 1..20: mol_type = other DNA
acgcactgcagcctgggtga

SEQ ID NO: 19166 - DNA, 20 bp, synthetic construct
  source 1..20: mol_type = other DNA
cacgcactgcagcctgggtg

SEQ ID NO: 19167 - DNA, 20 bp, synthetic construct
  source 1..20: mol_type = other DNA
ccacgcactgcagcctgggt

SEQ ID NO: 19168 - DNA, 20 bp, synthetic construct
  source 1..20: mol_type = other DNA
accacgcactgcagcctggg

SEQ ID NO: 19169 - DNA, 20 bp, synthetic construct
  source 1..20: mol_type = other DNA
caccacgcactgcagcctgg

SEQ ID NO: 19170 - DNA, 20 bp, synthetic construct
  source 1..20: mol_type = other DNA
gcaccacgcactgcagcctg

SEQ ID NO: 19171 - DNA, 20 bp, synthetic construct
  source 1..20: mol_type = other DNA
tgcaccacgcactgcagcct

SEQ ID NO: 19172 - DNA, 20 bp, synthetic construct
  source 1..20: mol_type = other DNA
ttgcaccacgcactgcagcc

SEQ ID NO: 19173 - DNA, 20 bp, synthetic construct
  source 1..20: mol_type = other DNA
attgcaccacgcactgcagc

SEQ ID NO: 19174 - DNA, 20 bp, synthetic construct
  source 1..20: mol_type = other DNA
aattgcaccacgcactgcag

SEQ ID NO: 19175 - DNA, 20 bp, synthetic construct
  source 1..20: mol_type = other DNA
aaattgcaccacgcactgca

SEQ ID NO: 19176 - DNA, 20 bp, synthetic construct
  source 1..20: mol_type = other DNA
gaaattgcaccacgcactgc

SEQ ID NO: 19177 - DNA, 20 bp, synthetic construct
  source 1..20: mol_type = other DNA
agaaattgcaccacgcactg

SEQ ID NO: 19178 - DNA, 20 bp, synthetic construct
  source 1..20: mol_type = other DNA
cagaaattgcaccacgcact

SEQ ID NO: 19179 - DNA, 20 bp, synthetic construct
  source 1..20: mol_type = other DNA
gcagaaattgcaccacgcac

SEQ ID NO: 19180 - DNA, 20 bp, synthetic construct
  source 1..20: mol_type = other DNA
agcagaaattgcaccacgca

SEQ ID NO: 19181 - DNA, 20 bp, synthetic construct
  source 1..20: mol_type = other DNA
gagcagaaattgcaccacgc

SEQ ID NO: 19182 - DNA, 20 bp, synthetic construct
  source 1..20: mol_type = other DNA
tgagcagaaattgcaccacg

SEQ ID NO: 19183 - DNA, 20 bp, synthetic construct
  source 1..20: mol_type = other DNA
gtgagcagaaattgcaccac

SEQ ID NO: 19184 - DNA, 20 bp, synthetic construct
  source 1..20: mol_type = other DNA
agtgagcagaaattgcacca

SEQ ID NO: 19185 - DNA, 20 bp, synthetic construct
  source 1..20: mol_type = other DNA
gagtgagcagaaattgcacc

SEQ ID NO: 19186 - DNA, 20 bp, synthetic construct
  source 1..20: mol_type = other DNA
agagtgagcagaaattgcac

SEQ ID NO: 19187 - DNA, 20 bp, synthetic construct
  source 1..20: mol_type = other DNA
tagagtgagcagaaattgca

SEQ ID NO: 19188 - DNA, 20 bp, synthetic construct
  source 1..20: mol_type = other DNA
ttagagtgagcagaaattgc

SEQ ID NO: 19189 - DNA, 20 bp, synthetic construct
  source 1..20: mol_type = other DNA
gttagagtgagcagaaattg

SEQ ID NO: 19190 - DNA, 20 bp, synthetic construct
  source 1..20: mol_type = other DNA
ggttagagtgagcagaaatt

SEQ ID NO: 19191 - DNA, 20 bp, synthetic construct
  source 1..20: mol_type = other DNA
aggttagagtgagcagaaat

SEQ ID NO: 19192 - DNA, 20 bp, synthetic construct
  source 1..20: mol_type = other DNA
gaggttagagtgagcagaaa

SEQ ID NO: 19193 - DNA, 20 bp, synthetic construct
  source 1..20: mol_type = other DNA
ggaggttagagtgagcagaa

SEQ ID NO: 19194 - DNA, 20 bp, synthetic construct
  source 1..20: mol_type = other DNA
tggaggttagagtgagcaga

SEQ ID NO: 19195 - DNA, 20 bp, synthetic construct
  source 1..20: mol_type = other DNA
gtggaggttagagtgagcag

SEQ ID NO: 19196 - DNA, 20 bp, synthetic construct
  source 1..20: mol_type = other DNA
ggtggaggttagagtgagca

SEQ ID NO: 19197 - DNA, 20 bp, synthetic construct
  source 1..20: mol_type = other DNA
aggtggaggttagagtgagc

SEQ ID NO: 19198 - DNA, 20 bp, synthetic construct
  source 1..20: mol_type = other DNA
gaggtggaggttagagtgag

SEQ ID NO: 19199 - DNA, 20 bp, synthetic construct
  source 1..20: mol_type = other DNA
ggaggtggaggttagagtga

SEQ ID NO: 19200 - DNA, 20 bp, synthetic construct
  source 1..20: mol_type = other DNA
gggaggtggaggttagagtg

SEQ ID NO: 19201 - DNA, 20 bp, synthetic construct
  source 1..20: mol_type = other DNA
cgggaggtggaggttagagt

SEQ ID NO: 19202 - DNA, 20 bp, synthetic construct
  source 1..20: mol_type = other DNA
tcgggaggtggaggttagag

SEQ ID NO: 19203 - DNA, 20 bp, synthetic construct
  source 1..20: mol_type = other DNA
ctcgggaggtggaggttaga

SEQ ID NO: 19204 - DNA, 20 bp, synthetic construct
  source 1..20: mol_type = other DNA
actcgggaggtggaggttag

SEQ ID NO: 19205 - DNA, 20 bp, synthetic construct
  source 1..20: mol_type = other DNA
aactcgggaggtggaggtta

SEQ ID NO: 19206 - DNA, 20 bp, synthetic construct
  source 1..20: mol_type = other DNA
gaactcgggaggtggaggtt

SEQ ID NO: 19207 - DNA, 20 bp, synthetic construct
  source 1..20: mol_type = other DNA
tgaactcgggaggtggaggt

SEQ ID NO: 19208 - DNA, 20 bp, synthetic construct
  source 1..20: mol_type = other DNA
ttgaactcgggaggtggagg

SEQ ID NO: 19209 - DNA, 20 bp, synthetic construct
  source 1..20: mol_type = other DNA
cttgaactcgggaggtggag

SEQ ID NO: 19210 - DNA, 20 bp, synthetic construct
  source 1..20: mol_type = other DNA
gcttgaactcgggaggtgga

SEQ ID NO: 19211 - DNA, 20 bp, synthetic construct
  source 1..20: mol_type = other DNA
tgcttgaactcgggaggtgg

SEQ ID NO: 19212 - DNA, 20 bp, synthetic construct
  source 1..20: mol_type = other DNA
ctgcttgaactcgggaggtg

SEQ ID NO: 19213 - DNA, 20 bp, synthetic construct
  source 1..20: mol_type = other DNA
actgcttgaactcgggaggt

SEQ ID NO: 19214 - DNA, 20 bp, synthetic construct
  source 1..20: mol_type = other DNA
aactgcttgaactcgggagg

SEQ ID NO: 19215 - DNA, 20 bp, synthetic construct
  source 1..20: mol_type = other DNA
gaactgcttgaactcgggag

SEQ ID NO: 19216 - DNA, 20 bp, synthetic construct
  source 1..20: mol_type = other DNA
agaactgcttgaactcggga

SEQ ID NO: 19217 - DNA, 20 bp, synthetic construct
  source 1..20: mol_type = other DNA
cagaactgcttgaactcggg

SEQ ID NO: 19218 - DNA, 20 bp, synthetic construct
  source 1..20: mol_type = other DNA
gcagaactgcttgaactcgg

SEQ ID NO: 19219 - DNA, 20 bp, synthetic construct
  source 1..20: mol_type = other DNA
ggcagaactgcttgaactcg

SEQ ID NO: 19220 - DNA, 20 bp, synthetic construct
  source 1..20: mol_type = other DNA
aggcagaactgcttgaactc

SEQ ID NO: 19221 - DNA, 20 bp, synthetic construct
  source 1..20: mol_type = other DNA
gaggcagaactgcttgaact

SEQ ID NO: 19222 - DNA, 20 bp, synthetic construct
  source 1..20: mol_type = other DNA
tgaggcagaactgcttgaac

SEQ ID NO: 19223 - DNA, 20 bp, synthetic construct
  source 1..20: mol_type = other DNA
ctgaggcagaactgcttgaa

SEQ ID NO: 19224 - DNA, 20 bp, synthetic construct
  source 1..20: mol_type = other DNA
gctgaggcagaactgcttga

SEQ ID NO: 19225 - DNA, 20 bp, synthetic construct
  source 1..20: mol_type = other DNA
ggctgaggcagaactgcttg

SEQ ID NO: 19226 - DNA, 20 bp, synthetic construct
  source 1..20: mol_type = other DNA
aggctgaggcagaactgctt

SEQ ID NO: 19227 - DNA, 20 bp, synthetic construct
  source 1..20: mol_type = other DNA
gaggctgaggcagaactgct

SEQ ID NO: 19228 - DNA, 20 bp, synthetic construct
  source 1..20: mol_type = other DNA
ggaggctgaggcagaactgc

SEQ ID NO: 19229 - DNA, 20 bp, synthetic construct
  source 1..20: mol_type = other DNA
aggaggctgaggcagaactg

SEQ ID NO: 19230 - DNA, 20 bp, synthetic construct
  source 1..20: mol_type = other DNA
caggaggctgaggcagaact

SEQ ID NO: 19231 - DNA, 20 bp, synthetic construct
  source 1..20: mol_type = other DNA
tcaggaggctgaggcagaac

SEQ ID NO: 19232 - DNA, 20 bp, synthetic construct
  source 1..20: mol_type = other DNA
ctcaggaggctgaggcagaa

SEQ ID NO: 19233 - DNA, 20 bp, synthetic construct
  source 1..20: mol_type = other DNA
actcaggaggctgaggcaga

SEQ ID NO: 19234 - DNA, 20 bp, synthetic construct
  source 1..20: mol_type = other DNA
tactcaggaggctgaggcag

SEQ ID NO: 19235 - DNA, 20 bp, synthetic construct
  source 1..20: mol_type = other DNA
ctactcaggaggctgaggca

SEQ ID NO: 19236 - DNA, 20 bp, synthetic construct
  source 1..20: mol_type = other DNA
gctactcaggaggctgaggc

SEQ ID NO: 19237 - DNA, 20 bp, synthetic construct
  source 1..20: mol_type = other DNA
agctactcaggaggctgagg

SEQ ID NO: 19238 - DNA, 20 bp, synthetic construct
  source 1..20: mol_type = other DNA
aagctactcaggaggctgag

SEQ ID NO: 19239 - DNA, 20 bp, synthetic construct
  source 1..20: mol_type = other DNA
caagctactcaggaggctga

SEQ ID NO: 19240 - DNA, 20 bp, synthetic construct
  source 1..20: mol_type = other DNA
ccaagctactcaggaggctg

SEQ ID NO: 19241 - DNA, 20 bp, synthetic construct
  source 1..20: mol_type = other DNA
cccaagctactcaggaggct

SEQ ID NO: 19242 - DNA, 20 bp, synthetic construct
  source 1..20: mol_type = other DNA
tcccaagctactcaggaggc

SEQ ID NO: 19243 - DNA, 20 bp, synthetic construct
  source 1..20: mol_type = other DNA
gtcccaagctactcaggagg

SEQ ID NO: 19244 - DNA, 20 bp, synthetic construct
  source 1..20: mol_type = other DNA
ggtcccaagctactcaggag

SEQ ID NO: 19245 - DNA, 20 bp, synthetic construct
  source 1..20: mol_type = other DNA
tggtcccaagctactcagga

SEQ ID NO: 19246 - DNA, 20 bp, synthetic construct
  source 1..20: mol_type = other DNA
gtggtcccaagctactcagg

SEQ ID NO: 19247 - DNA, 20 bp, synthetic construct
  source 1..20: mol_type = other DNA
tgtggtcccaagctactcag

SEQ ID NO: 19248 - DNA, 20 bp, synthetic construct
  source 1..20: mol_type = other DNA
atgtggtcccaagctactca

SEQ ID NO: 19249 - DNA, 20 bp, synthetic construct
  source 1..20: mol_type = other DNA
catgtggtcccaagctactc

SEQ ID NO: 19250 - DNA, 20 bp, synthetic construct
  source 1..20: mol_type = other DNA
acatgtggtcccaagctact

SEQ ID NO: 19251 - DNA, 20 bp, synthetic construct
  source 1..20: mol_type = other DNA
cacatgtggtcccaagctac

SEQ ID NO: 19252 - DNA, 20 bp, synthetic construct
  source 1..20: mol_type = other DNA
acacatgtggtcccaagcta

SEQ ID NO: 19253 - DNA, 20 bp, synthetic construct
  source 1..20: mol_type = other DNA
cacacatgtggtcccaagct

SEQ ID NO: 19254 - DNA, 20 bp, synthetic construct
  source 1..20: mol_type = other DNA
acacacatgtggtcccaagc

SEQ ID NO: 19255 - DNA, 20 bp, synthetic construct
  source 1..20: mol_type = other DNA
cacacacatgtggtcccaag

SEQ ID NO: 19256 - DNA, 20 bp, synthetic construct
  source 1..20: mol_type = other DNA
gcacacacatgtggtcccaa

SEQ ID NO: 19257 - DNA, 20 bp, synthetic construct
  source 1..20: mol_type = other DNA
ggcacacacatgtggtccca

SEQ ID NO: 19258 - DNA, 20 bp, synthetic construct
  source 1..20: mol_type = other DNA
tggcacacacatgtggtccc

SEQ ID NO: 19259 - DNA, 20 bp, synthetic construct
  source 1..20: mol_type = other DNA
atggcacacacatgtggtcc

SEQ ID NO: 19260 - DNA, 20 bp, synthetic construct
  source 1..20: mol_type = other DNA
gatggcacacacatgtggtc

SEQ ID NO: 19261 - DNA, 20 bp, synthetic construct
  source 1..20: mol_type = other DNA
tgatggcacacacatgtggt

SEQ ID NO: 19262 - DNA, 20 bp, synthetic construct
  source 1..20: mol_type = other DNA
atgatggcacacacatgtgg

SEQ ID NO: 19263 - DNA, 20 bp, synthetic construct
  source 1..20: mol_type = other DNA
catgatggcacacacatgtg

SEQ ID NO: 19264 - DNA, 20 bp, synthetic construct
  source 1..20: mol_type = other DNA
gcatgatggcacacacatgt

SEQ ID NO: 19265 - DNA, 20 bp, synthetic construct
  source 1..20: mol_type = other DNA
ggcatgatggcacacacatg

SEQ ID NO: 19266 - DNA, 20 bp, synthetic construct
  source 1..20: mol_type = other DNA
aggcatgatggcacacacat

SEQ ID NO: 19267 - DNA, 20 bp, synthetic construct
  source 1..20: mol_type = other DNA
caggcatgatggcacacaca

SEQ ID NO: 19268 - DNA, 20 bp, synthetic construct
  source 1..20: mol_type = other DNA
ccaggcatgatggcacacac

SEQ ID NO: 19269 - DNA, 20 bp, synthetic construct
  source 1..20: mol_type = other DNA
accaggcatgatggcacaca

SEQ ID NO: 19270 - DNA, 20 bp, synthetic construct
  source 1..20: mol_type = other DNA
aaccaggcatgatggcacac

SEQ ID NO: 19271 - DNA, 20 bp, synthetic construct
  source 1..20: mol_type = other DNA
taaccaggcatgatggcaca

SEQ ID NO: 19272 - DNA, 20 bp, synthetic construct
  source 1..20: mol_type = other DNA
ttaaccaggcatgatggcac

SEQ ID NO: 19273 - DNA, 20 bp, synthetic construct
  source 1..20: mol_type = other DNA
attaaccaggcatgatggca

SEQ ID NO: 19274 - DNA, 20 bp, synthetic construct
  source 1..20: mol_type = other DNA
aattaaccaggcatgatggc

SEQ ID NO: 19275 - DNA, 20 bp, synthetic construct
  source 1..20: mol_type = other DNA
aaattaaccaggcatgatgg

SEQ ID NO: 19276 - DNA, 20 bp, synthetic construct
  source 1..20: mol_type = other DNA
aaaattaaccaggcatgatg

SEQ ID NO: 19277 - DNA, 20 bp, synthetic construct
  source 1..20: mol_type = other DNA
aaaaattaaccaggcatgat

SEQ ID NO: 19278 - DNA, 20 bp, synthetic construct
  source 1..20: mol_type = other DNA
aaaaaattaaccaggcatga

SEQ ID NO: 19279 - DNA, 20 bp, synthetic construct
  source 1..20: mol_type = other DNA
caaaaaattaaccaggcatg

SEQ ID NO: 19280 - DNA, 20 bp, synthetic construct
  source 1..20: mol_type = other DNA
acaaaaaattaaccaggcat

SEQ ID NO: 19281 - DNA, 20 bp, synthetic construct
  source 1..20: mol_type = other DNA
tacaaaaaattaaccaggca

SEQ ID NO: 19282 - DNA, 20 bp, synthetic construct
  source 1..20: mol_type = other DNA
atacaaaaaattaaccaggc

SEQ ID NO: 19283 - DNA, 20 bp, synthetic construct
  source 1..20: mol_type = other DNA
aatacaaaaaattaaccagg

SEQ ID NO: 19284 - DNA, 20 bp, synthetic construct
  source 1..20: mol_type = other DNA
aaatacaaaaaattaaccag

SEQ ID NO: 19285 - DNA, 20 bp, synthetic construct
  source 1..20: mol_type = other DNA
aaaatacaaaaaattaacca

SEQ ID NO: 19286 - DNA, 20 bp, synthetic construct
  source 1..20: mol_type = other DNA
aaaaatacaaaaaattaacc

SEQ ID NO: 19287 - DNA, 20 bp, synthetic construct
  source 1..20: mol_type = other DNA
taaaaatacaaaaaattaac

SEQ ID NO: 19288 - DNA, 20 bp, synthetic construct
  source 1..20: mol_type = other DNA
ctaaaaatacaaaaaattaa

SEQ ID NO: 19289 - DNA, 20 bp, synthetic construct
  source 1..20: mol_type = other DNA
actaaaaatacaaaaaatta

SEQ ID NO: 19290 - DNA, 20 bp, synthetic construct
  source 1..20: mol_type = other DNA
tactaaaaatacaaaaaatt

SEQ ID NO: 19291 - DNA, 20 bp, synthetic construct
  source 1..20: mol_type = other DNA
ctactaaaaatacaaaaaat

SEQ ID NO: 19292 - DNA, 20 bp, synthetic construct
  source 1..20: mol_type = other DNA
actactaaaaatacaaaaaa

SEQ ID NO: 19293 - DNA, 20 bp, synthetic construct
  source 1..20: mol_type = other DNA
cactactaaaaatacaaaaa

SEQ ID NO: 19294 - DNA, 20 bp, synthetic construct
  source 1..20: mol_type = other DNA
tcactactaaaaatacaaaa

SEQ ID NO: 19295 - DNA, 20 bp, synthetic construct
  source 1..20: mol_type = other DNA
gtcactactaaaaatacaaa

SEQ ID NO: 19296 - DNA, 20 bp, synthetic construct
  source 1..20: mol_type = other DNA
tgtcactactaaaaatacaa

SEQ ID NO: 19297 - DNA, 20 bp, synthetic construct
  source 1..20: mol_type = other DNA
ctgtcactactaaaaataca

SEQ ID NO: 19298 - DNA, 20 bp, synthetic construct
  source 1..20: mol_type = other DNA
cctgtcactactaaaaatac

SEQ ID NO: 19299 - DNA, 20 bp, synthetic construct
  source 1..20: mol_type = other DNA
ccctgtcactactaaaaata

SEQ ID NO: 19300 - DNA, 20 bp, synthetic construct
  source 1..20: mol_type = other DNA
accctgtcactactaaaaat

SEQ ID NO: 19301 - DNA, 20 bp, synthetic construct
  source 1..20: mol_type = other DNA
gaccctgtcactactaaaaa

SEQ ID NO: 19302 - DNA, 20 bp, synthetic construct
  source 1..20: mol_type = other DNA
agaccctgtcactactaaaa

SEQ ID NO: 19303 - DNA, 20 bp, synthetic construct
  source 1..20: mol_type = other DNA
aagaccctgtcactactaaa

SEQ ID NO: 19304 - DNA, 20 bp, synthetic construct
  source 1..20: mol_type = other DNA
taagaccctgtcactactaa

SEQ ID NO: 19305 - DNA, 20 bp, synthetic construct
  source 1..20: mol_type = other DNA
gtaagaccctgtcactacta

SEQ ID NO: 19306 - DNA, 20 bp, synthetic construct
  source 1..20: mol_type = other DNA
ggtaagaccctgtcactact

SEQ ID NO: 19307 - DNA, 20 bp, synthetic construct
  source 1..20: mol_type = other DNA
tggtaagaccctgtcactac

SEQ ID NO: 19308 - DNA, 20 bp, synthetic construct
  source 1..20: mol_type = other DNA
atggtaagaccctgtcacta

SEQ ID NO: 19309 - DNA, 20 bp, synthetic construct
  source 1..20: mol_type = other DNA
catggtaagaccctgtcact

SEQ ID NO: 19310 - DNA, 20 bp, synthetic construct
  source 1..20: mol_type = other DNA
acatggtaagaccctgtcac

SEQ ID NO: 19311 - DNA, 20 bp, synthetic construct
  source 1..20: mol_type = other DNA
aacatggtaagaccctgtca

SEQ ID NO: 19312 - DNA, 20 bp, synthetic construct
  source 1..20: mol_type = other DNA
caacatggtaagaccctgtc

SEQ ID NO: 19313 - DNA, 20 bp, synthetic construct
  source 1..20: mol_type = other DNA
gcaacatggtaagaccctgt

SEQ ID NO: 19314 - DNA, 20 bp, synthetic construct
  source 1..20: mol_type = other DNA
ggcaacatggtaagaccctg

SEQ ID NO: 19315 - DNA, 20 bp, synthetic construct
  source 1..20: mol_type = other DNA
gggcaacatggtaagaccct

SEQ ID NO: 19316 - DNA, 20 bp, synthetic construct
  source 1..20: mol_type = other DNA
tgggcaacatggtaagaccc

SEQ ID NO: 19317 - DNA, 20 bp, synthetic construct
  source 1..20: mol_type = other DNA
ctgggcaacatggtaagacc

SEQ ID NO: 19318 - DNA, 20 bp, synthetic construct
  source 1..20: mol_type = other DNA
cctgggcaacatggtaagac

SEQ ID NO: 19319 - DNA, 20 bp, synthetic construct
  source 1..20: mol_type = other DNA
acctgggcaacatggtaaga

SEQ ID NO: 19320 - DNA, 20 bp, synthetic construct
  source 1..20: mol_type = other DNA
aacctgggcaacatggtaag

SEQ ID NO: 19321 - DNA, 20 bp, synthetic construct
  source 1..20: mol_type = other DNA
caacctgggcaacatggtaa

SEQ ID NO: 19322 - DNA, 20 bp, synthetic construct
  source 1..20: mol_type = other DNA
ccaacctgggcaacatggta

SEQ ID NO: 19323 - DNA, 20 bp, synthetic construct
  source 1..20: mol_type = other DNA
accaacctgggcaacatggt

SEQ ID NO: 19324 - DNA, 20 bp, synthetic construct
  source 1..20: mol_type = other DNA
gaccaacctgggcaacatgg

SEQ ID NO: 19325 - DNA, 20 bp, synthetic construct
  source 1..20: mol_type = other DNA
agaccaacctgggcaacatg

SEQ ID NO: 19326 - DNA, 20 bp, synthetic construct
  source 1..20: mol_type = other DNA
gagaccaacctgggcaacat

SEQ ID NO: 19327 - DNA, 20 bp, synthetic construct
  source 1..20: mol_type = other DNA
tgagaccaacctgggcaaca

SEQ ID NO: 19328 - DNA, 20 bp, synthetic construct
  source 1..20: mol_type = other DNA
ttgagaccaacctgggcaac

SEQ ID NO: 19329 - DNA, 20 bp, synthetic construct
  source 1..20: mol_type = other DNA
tttgagaccaacctgggcaa

SEQ ID NO: 19330 - DNA, 20 bp, synthetic construct
  source 1..20: mol_type = other DNA
gtttgagaccaacctgggca

SEQ ID NO: 19331 - DNA, 20 bp, synthetic construct
  source 1..20: mol_type = other DNA
agtttgagaccaacctgggc

SEQ ID NO: 19332 - DNA, 20 bp, synthetic construct
  source 1..20: mol_type = other DNA
gagtttgagaccaacctggg

SEQ ID NO: 19333 - DNA, 20 bp, synthetic construct
  source 1..20: mol_type = other DNA
ggagtttgagaccaacctgg

SEQ ID NO: 19334 - DNA, 20 bp, synthetic construct
  source 1..20: mol_type = other DNA
aggagtttgagaccaacctg

SEQ ID NO: 19335 - DNA, 20 bp, synthetic construct
  source 1..20: mol_type = other DNA
caggagtttgagaccaacct

SEQ ID NO: 19336 - DNA, 20 bp, synthetic construct
  source 1..20: mol_type = other DNA
tcaggagtttgagaccaacc

SEQ ID NO: 19337 - DNA, 20 bp, synthetic construct
  source 1..20: mol_type = other DNA
ctcaggagtttgagaccaac

SEQ ID NO: 19338 - DNA, 20 bp, synthetic construct
  source 1..20: mol_type = other DNA
gctcaggagtttgagaccaa

SEQ ID NO: 19339 - DNA, 20 bp, synthetic construct
  source 1..20: mol_type = other DNA
agctcaggagtttgagacca

SEQ ID NO: 19340 - DNA, 20 bp, synthetic construct
  source 1..20: mol_type = other DNA
gagctcaggagtttgagacc

SEQ ID NO: 19341 - DNA, 20 bp, synthetic construct
  source 1..20: mol_type = other DNA
tgagctcaggagtttgagac

SEQ ID NO: 19342 - DNA, 20 bp, synthetic construct
  source 1..20: mol_type = other DNA
ttgagctcaggagtttgaga

SEQ ID NO: 19343 - DNA, 20 bp, synthetic construct
  source 1..20: mol_type = other DNA
cttgagctcaggagtttgag

SEQ ID NO: 19344 - DNA, 20 bp, synthetic construct
  source 1..20: mol_type = other DNA
acttgagctcaggagtttga

SEQ ID NO: 19345 - DNA, 20 bp, synthetic construct
  source 1..20: mol_type = other DNA
cacttgagctcaggagtttg

SEQ ID NO: 19346 - DNA, 20 bp, synthetic construct
  source 1..20: mol_type = other DNA
tcacttgagctcaggagttt

SEQ ID NO: 19347 - DNA, 20 bp, synthetic construct
  source 1..20: mol_type = other DNA
atcacttgagctcaggagtt

SEQ ID NO: 19348 - DNA, 20 bp, synthetic construct
  source 1..20: mol_type = other DNA
gatcacttgagctcaggagt

SEQ ID NO: 19349 - DNA, 20 bp, synthetic construct
  source 1..20: mol_type = other DNA
agatcacttgagctcaggag

SEQ ID NO: 19350 - DNA, 20 bp, synthetic construct
  source 1..20: mol_type = other DNA
cagatcacttgagctcagga

SEQ ID NO: 19351 - DNA, 20 bp, synthetic construct
  source 1..20: mol_type = other DNA
gcagatcacttgagctcagg

SEQ ID NO: 19352 - DNA, 20 bp, synthetic construct
  source 1..20: mol_type = other DNA
ggcagatcacttgagctcag

SEQ ID NO: 19353 - DNA, 20 bp, synthetic construct
  source 1..20: mol_type = other DNA
gggcagatcacttgagctca

SEQ ID NO: 19354 - DNA, 20 bp, synthetic construct
  source 1..20: mol_type = other DNA
cgggcagatcacttgagctc

SEQ ID NO: 19355 - DNA, 20 bp, synthetic construct
  source 1..20: mol_type = other DNA
gcgggcagatcacttgagct

SEQ ID NO: 19356 - DNA, 20 bp, synthetic construct
  source 1..20: mol_type = other DNA
ggcgggcagatcacttgagc

SEQ ID NO: 19357 - DNA, 20 bp, synthetic construct
  source 1..20: mol_type = other DNA
aggcgggcagatcacttgag

SEQ ID NO: 19358 - DNA, 20 bp, synthetic construct
  source 1..20: mol_type = other DNA
aaggcgggcagatcacttga

SEQ ID NO: 19359 - DNA, 20 bp, synthetic construct
  source 1..20: mol_type = other DNA
gaaggcgggcagatcacttg

SEQ ID NO: 19360 - DNA, 20 bp, synthetic construct
  source 1..20: mol_type = other DNA
cgaaggcgggcagatcactt

SEQ ID NO: 19361 - DNA, 20 bp, synthetic construct
  source 1..20: mol_type = other DNA
gcgaaggcgggcagatcact

SEQ ID NO: 19362 - DNA, 20 bp, synthetic construct
  source 1..20: mol_type = other DNA
ggcgaaggcgggcagatcac

SEQ ID NO: 19363 - DNA, 20 bp, synthetic construct
  source 1..20: mol_type = other DNA
aggcgaaggcgggcagatca

SEQ ID NO: 19364 - DNA, 20 bp, synthetic construct
  source 1..20: mol_type = other DNA
gaggcgaaggcgggcagatc

SEQ ID NO: 19365 - DNA, 20 bp, synthetic construct
  source 1..20: mol_type = other DNA
ggaggcgaaggcgggcagat

SEQ ID NO: 19366 - DNA, 20 bp, synthetic construct
  source 1..20: mol_type = other DNA
gggaggcgaaggcgggcaga

SEQ ID NO: 19367 - DNA, 20 bp, synthetic construct
  source 1..20: mol_type = other DNA
tgggaggcgaaggcgggcag

SEQ ID NO: 19368 - DNA, 20 bp, synthetic construct
  source 1..20: mol_type = other DNA
ttgggaggcgaaggcgggca

SEQ ID NO: 19369 - DNA, 20 bp, synthetic construct
  source 1..20: mol_type = other DNA
tttgggaggcgaaggcgggc

SEQ ID NO: 19370 - DNA, 20 bp, synthetic construct
  source 1..20: mol_type = other DNA
ctttgggaggcgaaggcggg

SEQ ID NO: 19371 - DNA, 20 bp, synthetic construct
  source 1..20: mol_type = other DNA
actttgggaggcgaaggcgg

SEQ ID NO: 19372 - DNA, 20 bp, synthetic construct
  source 1..20: mol_type = other DNA
cactttgggaggcgaaggcg

SEQ ID NO: 19373 - DNA, 20 bp, synthetic construct
  source 1..20: mol_type = other DNA
acactttgggaggcgaaggc

SEQ ID NO: 19374 - DNA, 20 bp, synthetic construct
  source 1..20: mol_type = other DNA
gacactttgggaggcgaagg

SEQ ID NO: 19375 - DNA, 20 bp, synthetic construct
  source 1..20: mol_type = other DNA
agacactttgggaggcgaag

SEQ ID NO: 19376 - DNA, 20 bp, synthetic construct
  source 1..20: mol_type = other DNA
cagacactttgggaggcgaa

SEQ ID NO: 19377 - DNA, 20 bp, synthetic construct
  source 1..20: mol_type = other DNA
gcagacactttgggaggcga

SEQ ID NO: 19378 - DNA, 20 bp, synthetic construct
  source 1..20: mol_type = other DNA
cgcagacactttgggaggcg

SEQ ID NO: 19379 - DNA, 20 bp, synthetic construct
  source 1..20: mol_type = other DNA
gcgcagacactttgggaggc

SEQ ID NO: 19380 - DNA, 20 bp, synthetic construct
  source 1..20: mol_type = other DNA
ggcgcagacactttgggagg

SEQ ID NO: 19381 - DNA, 20 bp, synthetic construct
  source 1..20: mol_type = other DNA
gggcgcagacactttgggag

SEQ ID NO: 19382 - DNA, 20 bp, synthetic construct
  source 1..20: mol_type = other DNA
agggcgcagacactttggga

SEQ ID NO: 19383 - DNA, 20 bp, synthetic construct
  source 1..20: mol_type = other DNA
tagggcgcagacactttggg

SEQ ID NO: 19384 - DNA, 20 bp, synthetic construct
  source 1..20: mol_type = other DNA
gtagggcgcagacactttgg

SEQ ID NO: 19385 - DNA, 20 bp, synthetic construct
  source 1..20: mol_type = other DNA
tgtagggcgcagacactttg

SEQ ID NO: 19386 - DNA, 20 bp, synthetic construct
  source 1..20: mol_type = other DNA
ttgtagggcgcagacacttt

SEQ ID NO: 19387 - DNA, 20 bp, synthetic construct
  source 1..20: mol_type = other DNA
attgtagggcgcagacactt

SEQ ID NO: 19388 - DNA, 20 bp, synthetic construct
  source 1..20: mol_type = other DNA
aattgtagggcgcagacact

SEQ ID NO: 19389 - DNA, 20 bp, synthetic construct
  source 1..20: mol_type = other DNA
aaattgtagggcgcagacac

SEQ ID NO: 19390 - DNA, 20 bp, synthetic construct
  source 1..20: mol_type = other DNA
taaattgtagggcgcagaca

SEQ ID NO: 19391 - DNA, 20 bp, synthetic construct
  source 1..20: mol_type = other DNA
ttaaattgtagggcgcagac

SEQ ID NO: 19392 - DNA, 20 bp, synthetic construct
  source 1..20: mol_type = other DNA
tttaaattgtagggcgcaga

SEQ ID NO: 19393 - DNA, 20 bp, synthetic construct
  source 1..20: mol_type = other DNA
ttttaaattgtagggcgcag

SEQ ID NO: 19394 - DNA, 20 bp, synthetic construct
  source 1..20: mol_type = other DNA
tttttaaattgtagggcgca

SEQ ID NO: 19395 - DNA, 20 bp, synthetic construct
  source 1..20: mol_type = other DNA
ttttttaaattgtagggcgc

SEQ ID NO: 19396 - DNA, 20 bp, synthetic construct
  source 1..20: mol_type = other DNA
tttttttaaattgtagggcg

SEQ ID NO: 19397 - DNA, 20 bp, synthetic construct
  source 1..20: mol_type = other DNA
atttttttaaattgtagggc

SEQ ID NO: 19398 - DNA, 20 bp, synthetic construct
  source 1..20: mol_type = other DNA
aatttttttaaattgtaggg

SEQ ID NO: 19399 - DNA, 20 bp, synthetic construct
  source 1..20: mol_type = other DNA
aaatttttttaaattgtagg

SEQ ID NO: 19400 - DNA, 20 bp, synthetic construct
  source 1..20: mol_type = other DNA
aaaatttttttaaattgtag

SEQ ID NO: 19401 - DNA, 20 bp, synthetic construct
  source 1..20: mol_type = other DNA
aaaaatttttttaaattgta

SEQ ID NO: 19402 - DNA, 20 bp, synthetic construct
  source 1..20: mol_type = other DNA
caaaaatttttttaaattgt

SEQ ID NO: 19403 - DNA, 20 bp, synthetic construct
  source 1..20: mol_type = other DNA
acaaaaatttttttaaattg

SEQ ID NO: 19404 - DNA, 20 bp, synthetic construct
  source 1..20: mol_type = other DNA
tacaaaaatttttttaaatt

SEQ ID NO: 19405 - DNA, 20 bp, synthetic construct
  source 1..20: mol_type = other DNA
ctacaaaaatttttttaaat

SEQ ID NO: 19406 - DNA, 20 bp, synthetic construct
  source 1..20: mol_type = other DNA
tctacaaaaatttttttaaa

SEQ ID NO: 19407 - DNA, 20 bp, synthetic construct
  source 1..20: mol_type = other DNA
ctctacaaaaatttttttaa

SEQ ID NO: 19408 - DNA, 20 bp, synthetic construct
  source 1..20: mol_type = other DNA
tctctacaaaaattttttta

SEQ ID NO: 19409 - DNA, 20 bp, synthetic construct
  source 1..20: mol_type = other DNA
gtctctacaaaaattttttt

SEQ ID NO: 19410 - DNA, 20 bp, synthetic construct
  source 1..20: mol_type = other DNA
tgtctctacaaaaatttttt

SEQ ID NO: 19411 - DNA, 20 bp, synthetic construct
  source 1..20: mol_type = other DNA
ctgtctctacaaaaattttt

SEQ ID NO: 19412 - DNA, 20 bp, synthetic construct
  source 1..20: mol_type = other DNA
actgtctctacaaaaatttt

SEQ ID NO: 19413 - DNA, 20 bp, synthetic construct
  source 1..20: mol_type = other DNA
gactgtctctacaaaaattt

SEQ ID NO: 19414 - DNA, 20 bp, synthetic construct
  source 1..20: mol_type = other DNA
agactgtctctacaaaaatt

SEQ ID NO: 19415 - DNA, 20 bp, synthetic construct
  source 1..20: mol_type = other DNA
gagactgtctctacaaaaat

SEQ ID NO: 19416 - DNA, 20 bp, synthetic construct
  source 1..20: mol_type = other DNA
tgagactgtctctacaaaaa

SEQ ID NO: 19417 - DNA, 20 bp, synthetic construct
  source 1..20: mol_type = other DNA
gtgagactgtctctacaaaa

SEQ ID NO: 19418 - DNA, 20 bp, synthetic construct
  source 1..20: mol_type = other DNA
agtgagactgtctctacaaa

SEQ ID NO: 19419 - DNA, 20 bp, synthetic construct
  source 1..20: mol_type = other DNA
cagtgagactgtctctacaa

SEQ ID NO: 19420 - DNA, 20 bp, synthetic construct
  source 1..20: mol_type = other DNA
acagtgagactgtctctaca

SEQ ID NO: 19421 - DNA, 20 bp, synthetic construct
  source 1..20: mol_type = other DNA
aacagtgagactgtctctac

SEQ ID NO: 19422 - DNA, 20 bp, synthetic construct
  source 1..20: mol_type = other DNA
taacagtgagactgtctcta

SEQ ID NO: 19423 - DNA, 20 bp, synthetic construct
  source 1..20: mol_type = other DNA
gtaacagtgagactgtctct

SEQ ID NO: 19424 - DNA, 20 bp, synthetic construct
  source 1..20: mol_type = other DNA
ggtaacagtgagactgtctc

SEQ ID NO: 19425 - DNA, 20 bp, synthetic construct
  source 1..20: mol_type = other DNA
gggtaacagtgagactgtct

SEQ ID NO: 19426 - DNA, 20 bp, synthetic construct
  source 1..20: mol_type = other DNA
cgggtaacagtgagactgtc

SEQ ID NO: 19427 - DNA, 20 bp, synthetic construct
  source 1..20: mol_type = other DNA
ccgggtaacagtgagactgt

SEQ ID NO: 19428 - DNA, 20 bp, synthetic construct
  source 1..20: mol_type = other DNA
cccgggtaacagtgagactg

SEQ ID NO: 19429 - DNA, 20 bp, synthetic construct
  source 1..20: mol_type = other DNA
gcccgggtaacagtgagact

SEQ ID NO: 19430 - DNA, 20 bp, synthetic construct
  source 1..20: mol_type = other DNA
agcccgggtaacagtgagac

SEQ ID NO: 19431 - DNA, 20 bp, synthetic construct
  source 1..20: mol_type = other DNA
cagcccgggtaacagtgaga

SEQ ID NO: 19432 - DNA, 20 bp, synthetic construct
  source 1..20: mol_type = other DNA
ccagcccgggtaacagtgag

SEQ ID NO: 19433 - DNA, 20 bp, synthetic construct
  source 1..20: mol_type = other DNA
accagcccgggtaacagtga

SEQ ID NO: 19434 - DNA, 20 bp, synthetic construct
  source 1..20: mol_type = other DNA
aaccagcccgggtaacagtg

SEQ ID NO: 19435 - DNA, 20 bp, synthetic construct
  source 1..20: mol_type = other DNA
aaaccagcccgggtaacagt

SEQ ID NO: 19436 - DNA, 20 bp, synthetic construct
  source 1..20: mol_type = other DNA
aaaaccagcccgggtaacag

SEQ ID NO: 19437 - DNA, 20 bp, synthetic construct
  source 1..20: mol_type = other DNA
caaaaccagcccgggtaaca

SEQ ID NO: 19438 - DNA, 20 bp, synthetic construct
  source 1..20: mol_type = other DNA
tcaaaaccagcccgggtaac

SEQ ID NO: 19439 - DNA, 20 bp, synthetic construct
  source 1..20: mol_type = other DNA
ttcaaaaccagcccgggtaa

SEQ ID NO: 19440 - DNA, 20 bp, synthetic construct
  source 1..20: mol_type = other DNA
gttcaaaaccagcccgggta

SEQ ID NO: 19441 - DNA, 20 bp, synthetic construct
  source 1..20: mol_type = other DNA
agttcaaaaccagcccgggt

SEQ ID NO: 19442 - DNA, 20 bp, synthetic construct
  source 1..20: mol_type = other DNA
aagttcaaaaccagcccggg

SEQ ID NO: 19443 - DNA, 20 bp, synthetic construct
  source 1..20: mol_type = other DNA
gaagttcaaaaccagcccgg

SEQ ID NO: 19444 - DNA, 20 bp, synthetic construct
  source 1..20: mol_type = other DNA
agaagttcaaaaccagcccg

SEQ ID NO: 19445 - DNA, 20 bp, synthetic construct
  source 1..20: mol_type = other DNA
cagaagttcaaaaccagccc

SEQ ID NO: 19446 - DNA, 20 bp, synthetic construct
  source 1..20: mol_type = other DNA
gcagaagttcaaaaccagcc

SEQ ID NO: 19447 - DNA, 20 bp, synthetic construct
  source 1..20: mol_type = other DNA
ggcagaagttcaaaaccagc

SEQ ID NO: 19448 - DNA, 20 bp, synthetic construct
  source 1..20: mol_type = other DNA
gggcagaagttcaaaaccag

SEQ ID NO: 19449 - DNA, 20 bp, synthetic construct
  source 1..20: mol_type = other DNA
agggcagaagttcaaaacca

SEQ ID NO: 19450 - DNA, 20 bp, synthetic construct
  source 1..20: mol_type = other DNA
gagggcagaagttcaaaacc

SEQ ID NO: 19451 - DNA, 20 bp, synthetic construct
  source 1..20: mol_type = other DNA
tgagggcagaagttcaaaac

SEQ ID NO: 19452 - DNA, 20 bp, synthetic construct
  source 1..20: mol_type = other DNA
ttgagggcagaagttcaaaa

SEQ ID NO: 19453 - DNA, 20 bp, synthetic construct
  source 1..20: mol_type = other DNA
cttgagggcagaagttcaaa

SEQ ID NO: 19454 - DNA, 20 bp, synthetic construct
  source 1..20: mol_type = other DNA
acttgagggcagaagttcaa

SEQ ID NO: 19455 - DNA, 20 bp, synthetic construct
  source 1..20: mol_type = other DNA
tacttgagggcagaagttca

SEQ ID NO: 19456 - DNA, 20 bp, synthetic construct
  source 1..20: mol_type = other DNA
gtacttgagggcagaagttc

SEQ ID NO: 19457 - DNA, 20 bp, synthetic construct
  source 1..20: mol_type = other DNA
agtacttgagggcagaagtt

SEQ ID NO: 19458 - DNA, 20 bp, synthetic construct
  source 1..20: mol_type = other DNA
gagtacttgagggcagaagt

SEQ ID NO: 19459 - DNA, 20 bp, synthetic construct
  source 1..20: mol_type = other DNA
ggagtacttgagggcagaag

SEQ ID NO: 19460 - DNA, 20 bp, synthetic construct
  source 1..20: mol_type = other DNA
aggagtacttgagggcagaa

SEQ ID NO: 19461 - DNA, 20 bp, synthetic construct
  source 1..20: mol_type = other DNA
gaggagtacttgagggcaga

SEQ ID NO: 19462 - DNA, 20 bp, synthetic construct
  source 1..20: mol_type = other DNA
agaggagtacttgagggcag

SEQ ID NO: 19463 - DNA, 20 bp, synthetic construct
  source 1..20: mol_type = other DNA
aagaggagtacttgagggca

SEQ ID NO: 19464 - DNA, 20 bp, synthetic construct
  source 1..20: mol_type = other DNA
caagaggagtacttgagggc

SEQ ID NO: 19465 - DNA, 20 bp, synthetic construct
  source 1..20: mol_type = other DNA
gcaagaggagtacttgaggg

SEQ ID NO: 19466 - DNA, 20 bp, synthetic construct
  source 1..20: mol_type = other DNA
ggcaagaggagtacttgagg

SEQ ID NO: 19467 - DNA, 20 bp, synthetic construct
  source 1..20: mol_type = other DNA
aggcaagaggagtacttgag

SEQ ID NO: 19468 - DNA, 20 bp, synthetic construct
  source 1..20: mol_type = other DNA
aaggcaagaggagtacttga

SEQ ID NO: 19469 - DNA, 20 bp, synthetic construct
  source 1..20: mol_type = other DNA
caaggcaagaggagtacttg

SEQ ID NO: 19470 - DNA, 20 bp, synthetic construct
  source 1..20: mol_type = other DNA
ccaaggcaagaggagtactt

SEQ ID NO: 19471 - DNA, 20 bp, synthetic construct
  source 1..20: mol_type = other DNA
gccaaggcaagaggagtact

SEQ ID NO: 19472 - DNA, 20 bp, synthetic construct
  source 1..20: mol_type = other DNA
ggccaaggcaagaggagtac

SEQ ID NO: 19473 - DNA, 20 bp, synthetic construct
  source 1..20: mol_type = other DNA
aggccaaggcaagaggagta

SEQ ID NO: 19474 - DNA, 20 bp, synthetic construct
  source 1..20: mol_type = other DNA
gaggccaaggcaagaggagt

SEQ ID NO: 19475 - DNA, 20 bp, synthetic construct
  source 1..20: mol_type = other DNA
ggaggccaaggcaagaggag

SEQ ID NO: 19476 - DNA, 20 bp, synthetic construct
  source 1..20: mol_type = other DNA
gggaggccaaggcaagagga

SEQ ID NO: 19477 - DNA, 20 bp, synthetic construct
  source 1..20: mol_type = other DNA
tgggaggccaaggcaagagg

SEQ ID NO: 19478 - DNA, 20 bp, synthetic construct
  source 1..20: mol_type = other DNA
ttgggaggccaaggcaagag

SEQ ID NO: 19479 - DNA, 20 bp, synthetic construct
  source 1..20: mol_type = other DNA
tttgggaggccaaggcaaga

SEQ ID NO: 19480 - DNA, 20 bp, synthetic construct
  source 1..20: mol_type = other DNA
ctttgggaggccaaggcaag

SEQ ID NO: 19481 - DNA, 20 bp, synthetic construct
  source 1..20: mol_type = other DNA
actttgggaggccaaggcaa

SEQ ID NO: 19482 - DNA, 20 bp, synthetic construct
  source 1..20: mol_type = other DNA
tactttgggaggccaaggca

SEQ ID NO: 19483 - DNA, 20 bp, synthetic construct
  source 1..20: mol_type = other DNA
atactttgggaggccaaggc

SEQ ID NO: 19484 - DNA, 20 bp, synthetic construct
  source 1..20: mol_type = other DNA
aatactttgggaggccaagg

SEQ ID NO: 19485 - DNA, 20 bp, synthetic construct
  source 1..20: mol_type = other DNA
caatactttgggaggccaag

SEQ ID NO: 19486 - DNA, 20 bp, synthetic construct
  source 1..20: mol_type = other DNA
tcaatactttgggaggccaa

SEQ ID NO: 19487 - DNA, 20 bp, synthetic construct
  source 1..20: mol_type = other DNA
ttcaatactttgggaggcca

SEQ ID NO: 19488 - DNA, 20 bp, synthetic construct
  source 1..20: mol_type = other DNA
tttcaatactttgggaggcc

SEQ ID NO: 19489 - DNA, 20 bp, synthetic construct
  source 1..20: mol_type = other DNA
atttcaatactttgggaggc

SEQ ID NO: 19490 - DNA, 20 bp, synthetic construct
  source 1..20: mol_type = other DNA
aatttcaatactttgggagg

SEQ ID NO: 19491 - DNA, 20 bp, synthetic construct
  source 1..20: mol_type = other DNA
taatttcaatactttgggag

SEQ ID NO: 19492 - DNA, 20 bp, synthetic construct
  source 1..20: mol_type = other DNA
ttaatttcaatactttggga

SEQ ID NO: 19493 - DNA, 20 bp, synthetic construct
  source 1..20: mol_type = other DNA
cttaatttcaatactttggg

SEQ ID NO: 19494 - DNA, 20 bp, synthetic construct
  source 1..20: mol_type = other DNA
ccttaatttcaatactttgg

SEQ ID NO: 19495 - DNA, 20 bp, synthetic construct
  source 1..20: mol_type = other DNA
gccttaatttcaatactttg

SEQ ID NO: 19496 - DNA, 20 bp, synthetic construct
  source 1..20: mol_type = other DNA
ggccttaatttcaatacttt

SEQ ID NO: 19497 - DNA, 20 bp, synthetic construct
  source 1..20: mol_type = other DNA
tggccttaatttcaatactt

SEQ ID NO: 19498 - DNA, 20 bp, synthetic construct
  source 1..20: mol_type = other DNA
atggccttaatttcaatact

SEQ ID NO: 19499 - DNA, 20 bp, synthetic construct
  source 1..20: mol_type = other DNA
catggccttaatttcaatac

SEQ ID NO: 19500 - DNA, 20 bp, synthetic construct
  source 1..20: mol_type = other DNA
tcatggccttaatttcaata

SEQ ID NO: 19501 - DNA, 20 bp, synthetic construct
  source 1..20: mol_type = other DNA
ctcatggccttaatttcaat

SEQ ID NO: 19502 - DNA, 20 bp, synthetic construct
  source 1..20: mol_type = other DNA
cctcatggccttaatttcaa

SEQ ID NO: 19503 - DNA, 20 bp, synthetic construct
  source 1..20: mol_type = other DNA
gcctcatggccttaatttca

SEQ ID NO: 19504 - DNA, 20 bp, synthetic construct
  source 1..20: mol_type = other DNA
tgcctcatggccttaatttc

SEQ ID NO: 19505 - DNA, 20 bp, synthetic construct
  source 1..20: mol_type = other DNA
ctgcctcatggccttaattt

SEQ ID NO: 19506 - DNA, 20 bp, synthetic construct
  source 1..20: mol_type = other DNA
gctgcctcatggccttaatt

SEQ ID NO: 19507 - DNA, 20 bp, synthetic construct
  source 1..20: mol_type = other DNA
tgctgcctcatggccttaat

SEQ ID NO: 19508 - DNA, 20 bp, synthetic construct
  source 1..20: mol_type = other DNA
gtgctgcctcatggccttaa

SEQ ID NO: 19509 - DNA, 20 bp, synthetic construct
  source 1..20: mol_type = other DNA
tgtgctgcctcatggcctta

SEQ ID NO: 19510 - DNA, 20 bp, synthetic construct
  source 1..20: mol_type = other DNA
gtgtgctgcctcatggcctt

SEQ ID NO: 19511 - DNA, 20 bp, synthetic construct
  source 1..20: mol_type = other DNA
ggtgtgctgcctcatggcct

SEQ ID NO: 19512 - DNA, 20 bp, synthetic construct
  source 1..20: mol_type = other DNA
gggtgtgctgcctcatggcc

SEQ ID NO: 19513 - DNA, 20 bp, synthetic construct
  source 1..20: mol_type = other DNA
tgggtgtgctgcctcatggc

SEQ ID NO: 19514 - DNA, 20 bp, synthetic construct
  source 1..20: mol_type = other DNA
ctgggtgtgctgcctcatgg

SEQ ID NO: 19515 - DNA, 20 bp, synthetic construct
  source 1..20: mol_type = other DNA
gctgggtgtgctgcctcatg

SEQ ID NO: 19516 - DNA, 20 bp, synthetic construct
  source 1..20: mol_type = other DNA
ggctgggtgtgctgcctcat

SEQ ID NO: 19517 - DNA, 20 bp, synthetic construct
  source 1..20: mol_type = other DNA
aggctgggtgtgctgcctca

SEQ ID NO: 19518 - DNA, 20 bp, synthetic construct
  source 1..20: mol_type = other DNA
taggctgggtgtgctgcctc

SEQ ID NO: 19519 - DNA, 20 bp, synthetic construct
  source 1..20: mol_type = other DNA
ttaggctgggtgtgctgcct

SEQ ID NO: 19520 - DNA, 20 bp, synthetic construct
  source 1..20: mol_type = other DNA
tttaggctgggtgtgctgcc

SEQ ID NO: 19521 - DNA, 20 bp, synthetic construct
  source 1..20: mol_type = other DNA
atttaggctgggtgtgctgc

SEQ ID NO: 19522 - DNA, 20 bp, synthetic construct
  source 1..20: mol_type = other DNA
aatttaggctgggtgtgctg

SEQ ID NO: 19523 - DNA, 20 bp, synthetic construct
  source 1..20: mol_type = other DNA
gaatttaggctgggtgtgct

SEQ ID NO: 19524 - DNA, 20 bp, synthetic construct
  source 1..20: mol_type = other DNA
agaatttaggctgggtgtgc

SEQ ID NO: 19525 - DNA, 20 bp, synthetic construct
  source 1..20: mol_type = other DNA
aagaatttaggctgggtgtg

SEQ ID NO: 19526 - DNA, 20 bp, synthetic construct
  source 1..20: mol_type = other DNA
gaagaatttaggctgggtgt

SEQ ID NO: 19527 - DNA, 20 bp, synthetic construct
  source 1..20: mol_type = other DNA
agaagaatttaggctgggtg

SEQ ID NO: 19528 - DNA, 20 bp, synthetic construct
  source 1..20: mol_type = other DNA
aagaagaatttaggctgggt

SEQ ID NO: 19529 - DNA, 20 bp, synthetic construct
  source 1..20: mol_type = other DNA
taagaagaatttaggctggg

SEQ ID NO: 19530 - DNA, 20 bp, synthetic construct
  source 1..20: mol_type = other DNA
ataagaagaatttaggctgg

SEQ ID NO: 19531 - DNA, 20 bp, synthetic construct
  source 1..20: mol_type = other DNA
cataagaagaatttaggctg

SEQ ID NO: 19532 - DNA, 20 bp, synthetic construct
  source 1..20: mol_type = other DNA
acataagaagaatttaggct

SEQ ID NO: 19533 - DNA, 20 bp, synthetic construct
  source 1..20: mol_type = other DNA
aacataagaagaatttaggc

SEQ ID NO: 19534 - DNA, 20 bp, synthetic construct
  source 1..20: mol_type = other DNA
gaacataagaagaatttagg

SEQ ID NO: 19535 - DNA, 20 bp, synthetic construct
  source 1..20: mol_type = other DNA
agaacataagaagaatttag

SEQ ID NO: 19536 - DNA, 20 bp, synthetic construct
  source 1..20: mol_type = other DNA
cagaacataagaagaattta

SEQ ID NO: 19537 - DNA, 20 bp, synthetic construct
  source 1..20: mol_type = other DNA
acagaacataagaagaattt

SEQ ID NO: 19538 - DNA, 20 bp, synthetic construct
  source 1..20: mol_type = other DNA
aacagaacataagaagaatt

SEQ ID NO: 19539 - DNA, 20 bp, synthetic construct
  source 1..20: mol_type = other DNA
gaacagaacataagaagaat

SEQ ID NO: 19540 - DNA, 20 bp, synthetic construct
  source 1..20: mol_type = other DNA
agaacagaacataagaagaa

SEQ ID NO: 19541 - DNA, 20 bp, synthetic construct
  source 1..20: mol_type = other DNA
aagaacagaacataagaaga

SEQ ID NO: 19542 - DNA, 20 bp, synthetic construct
  source 1..20: mol_type = other DNA
caagaacagaacataagaag

SEQ ID NO: 19543 - DNA, 20 bp, synthetic construct
  source 1..20: mol_type = other DNA
ccaagaacagaacataagaa

SEQ ID NO: 19544 - DNA, 20 bp, synthetic construct
  source 1..20: mol_type = other DNA
gccaagaacagaacataaga

SEQ ID NO: 19545 - DNA, 20 bp, synthetic construct
  source 1..20: mol_type = other DNA
tgccaagaacagaacataag

SEQ ID NO: 19546 - DNA, 20 bp, synthetic construct
  source 1..20: mol_type = other DNA
gtgccaagaacagaacataa

SEQ ID NO: 19547 - DNA, 20 bp, synthetic construct
  source 1..20: mol_type = other DNA
tgtgccaagaacagaacata

SEQ ID NO: 19548 - DNA, 20 bp, synthetic construct
  source 1..20: mol_type = other DNA
atgtgccaagaacagaacat

SEQ ID NO: 19549 - DNA, 20 bp, synthetic construct
  source 1..20: mol_type = other DNA
tatgtgccaagaacagaaca

SEQ ID NO: 19550 - DNA, 20 bp, synthetic construct
  source 1..20: mol_type = other DNA
ctatgtgccaagaacagaac

SEQ ID NO: 19551 - DNA, 20 bp, synthetic construct
  source 1..20: mol_type = other DNA
actatgtgccaagaacagaa

SEQ ID NO: 19552 - DNA, 20 bp, synthetic construct
  source 1..20: mol_type = other DNA
tactatgtgccaagaacaga

SEQ ID NO: 19553 - DNA, 20 bp, synthetic construct
  source 1..20: mol_type = other DNA
ctactatgtgccaagaacag

SEQ ID NO: 19554 - DNA, 20 bp, synthetic construct
  source 1..20: mol_type = other DNA
tctactatgtgccaagaaca

SEQ ID NO: 19555 - DNA, 20 bp, synthetic construct
  source 1..20: mol_type = other DNA
atctactatgtgccaagaac

SEQ ID NO: 19556 - DNA, 20 bp, synthetic construct
  source 1..20: mol_type = other DNA
catctactatgtgccaagaa

SEQ ID NO: 19557 - DNA, 20 bp, synthetic construct
  source 1..20: mol_type = other DNA
acatctactatgtgccaaga

SEQ ID NO: 19558 - DNA, 20 bp, synthetic construct
  source 1..20: mol_type = other DNA
aacatctactatgtgccaag

SEQ ID NO: 19559 - DNA, 20 bp, synthetic construct
  source 1..20: mol_type = other DNA
gaacatctactatgtgccaa

SEQ ID NO: 19560 - DNA, 20 bp, synthetic construct
  source 1..20: mol_type = other DNA
tgaacatctactatgtgcca

SEQ ID NO: 19561 - DNA, 20 bp, synthetic construct
  source 1..20: mol_type = other DNA
ttgaacatctactatgtgcc

SEQ ID NO: 19562 - DNA, 20 bp, synthetic construct
  source 1..20: mol_type = other DNA
gttgaacatctactatgtgc

SEQ ID NO: 19563 - DNA, 20 bp, synthetic construct
  source 1..20: mol_type = other DNA
tgttgaacatctactatgtg

SEQ ID NO: 19564 - DNA, 20 bp, synthetic construct
  source 1..20: mol_type = other DNA
ttgttgaacatctactatgt

SEQ ID NO: 19565 - DNA, 20 bp, synthetic construct
  source 1..20: mol_type = other DNA
attgttgaacatctactatg

SEQ ID NO: 19566 - DNA, 20 bp, synthetic construct
  source 1..20: mol_type = other DNA
cattgttgaacatctactat

SEQ ID NO: 19567 - DNA, 20 bp, synthetic construct
  source 1..20: mol_type = other DNA
acattgttgaacatctacta

SEQ ID NO: 19568 - DNA, 20 bp, synthetic construct
  source 1..20: mol_type = other DNA
tacattgttgaacatctact

SEQ ID NO: 19569 - DNA, 20 bp, synthetic construct
  source 1..20: mol_type = other DNA
ctacattgttgaacatctac

SEQ ID NO: 19570 - DNA, 20 bp, synthetic construct
  source 1..20: mol_type = other DNA
tctacattgttgaacatcta

SEQ ID NO: 19571 - DNA, 20 bp, synthetic construct
  source 1..20: mol_type = other DNA
ctctacattgttgaacatct

SEQ ID NO: 19572 - DNA, 20 bp, synthetic construct
  source 1..20: mol_type = other DNA
actctacattgttgaacatc

SEQ ID NO: 19573 - DNA, 20 bp, synthetic construct
  source 1..20: mol_type = other DNA
gactctacattgttgaacat

SEQ ID NO: 19574 - DNA, 20 bp, synthetic construct
  source 1..20: mol_type = other DNA
tgactctacattgttgaaca

SEQ ID NO: 19575 - DNA, 20 bp, synthetic construct
  source 1..20: mol_type = other DNA
ttgactctacattgttgaac

SEQ ID NO: 19576 - DNA, 20 bp, synthetic construct
  source 1..20: mol_type = other DNA
tttgactctacattgttgaa

SEQ ID NO: 19577 - DNA, 20 bp, synthetic construct
  source 1..20: mol_type = other DNA
gtttgactctacattgttga

SEQ ID NO: 19578 - DNA, 20 bp, synthetic construct
  source 1..20: mol_type = other DNA
cgtttgactctacattgttg

SEQ ID NO: 19579 - DNA, 20 bp, synthetic construct
  source 1..20: mol_type = other DNA
gcgtttgactctacattgtt

SEQ ID NO: 19580 - DNA, 20 bp, synthetic construct
  source 1..20: mol_type = other DNA
tgcgtttgactctacattgt

SEQ ID NO: 19581 - DNA, 20 bp, synthetic construct
  source 1..20: mol_type = other DNA
atgcgtttgactctacattg

SEQ ID NO: 19582 - DNA, 20 bp, synthetic construct
  source 1..20: mol_type = other DNA
aatgcgtttgactctacatt

SEQ ID NO: 19583 - DNA, 20 bp, synthetic construct
  source 1..20: mol_type = other DNA
aaatgcgtttgactctacat

SEQ ID NO: 19584 - DNA, 20 bp, synthetic construct
  source 1..20: mol_type = other DNA
caaatgcgtttgactctaca

SEQ ID NO: 19585 - DNA, 20 bp, synthetic construct
  source 1..20: mol_type = other DNA
ccaaatgcgtttgactctac

SEQ ID NO: 19586 - DNA, 20 bp, synthetic construct
  source 1..20: mol_type = other DNA
tccaaatgcgtttgactcta

SEQ ID NO: 19587 - DNA, 20 bp, synthetic construct
  source 1..20: mol_type = other DNA
ctccaaatgcgtttgactct

SEQ ID NO: 19588 - DNA, 20 bp, synthetic construct
  source 1..20: mol_type = other DNA
actccaaatgcgtttgactc

SEQ ID NO: 19589 - DNA, 20 bp, synthetic construct
  source 1..20: mol_type = other DNA
aactccaaatgcgtttgact

SEQ ID NO: 19590 - DNA, 20 bp, synthetic construct
  source 1..20: mol_type = other DNA
caactccaaatgcgtttgac

SEQ ID NO: 19591 - DNA, 20 bp, synthetic construct
  source 1..20: mol_type = other DNA
ccaactccaaatgcgtttga

SEQ ID NO: 19592 - DNA, 20 bp, synthetic construct
  source 1..20: mol_type = other DNA
tccaactccaaatgcgtttg

SEQ ID NO: 19593 - DNA, 20 bp, synthetic construct
  source 1..20: mol_type = other DNA
ttccaactccaaatgcgttt

SEQ ID NO: 19594 - DNA, 20 bp, synthetic construct
  source 1..20: mol_type = other DNA
attccaactccaaatgcgtt

SEQ ID NO: 19595 - DNA, 20 bp, synthetic construct
  source 1..20: mol_type = other DNA
cattccaactccaaatgcgt

SEQ ID NO: 19596 - DNA, 20 bp, synthetic construct
  source 1..20: mol_type = other DNA
ccattccaactccaaatgcg

SEQ ID NO: 19597 - DNA, 20 bp, synthetic construct
  source 1..20: mol_type = other DNA
gccattccaactccaaatgc

SEQ ID NO: 19598 - DNA, 20 bp, synthetic construct
  source 1..20: mol_type = other DNA
agccattccaactccaaatg

SEQ ID NO: 19599 - DNA, 20 bp, synthetic construct
  source 1..20: mol_type = other DNA
gagccattccaactccaaat

SEQ ID NO: 19600 - DNA, 20 bp, synthetic construct
  source 1..20: mol_type = other DNA
agagccattccaactccaaa

SEQ ID NO: 19601 - DNA, 20 bp, synthetic construct
  source 1..20: mol_type = other DNA
cagagccattccaactccaa

SEQ ID NO: 19602 - DNA, 20 bp, synthetic construct
  source 1..20: mol_type = other DNA
ccagagccattccaactcca

SEQ ID NO: 19603 - DNA, 20 bp, synthetic construct
  source 1..20: mol_type = other DNA
accagagccattccaactcc

SEQ ID NO: 19604 - DNA, 20 bp, synthetic construct
  source 1..20: mol_type = other DNA
caccagagccattccaactc

SEQ ID NO: 19605 - DNA, 20 bp, synthetic construct
  source 1..20: mol_type = other DNA
acaccagagccattccaact

SEQ ID NO: 19606 - DNA, 20 bp, synthetic construct
  source 1..20: mol_type = other DNA
aacaccagagccattccaac

SEQ ID NO: 19607 - DNA, 20 bp, synthetic construct
  source 1..20: mol_type = other DNA
aaacaccagagccattccaa

SEQ ID NO: 19608 - DNA, 20 bp, synthetic construct
  source 1..20: mol_type = other DNA
aaaacaccagagccattcca

SEQ ID NO: 19609 - DNA, 20 bp, synthetic construct
  source 1..20: mol_type = other DNA
aaaaacaccagagccattcc

SEQ ID NO: 19610 - DNA, 20 bp, synthetic construct
  source 1..20: mol_type = other DNA
aaaaaacaccagagccattc

SEQ ID NO: 19611 - DNA, 20 bp, synthetic construct
  source 1..20: mol_type = other DNA
aaaaaaacaccagagccatt

SEQ ID NO: 19612 - DNA, 20 bp, synthetic construct
  source 1..20: mol_type = other DNA
aaaaaaaacaccagagccat

SEQ ID NO: 19613 - DNA, 20 bp, synthetic construct
  source 1..20: mol_type = other DNA
aaaaaaaaacaccagagcca

SEQ ID NO: 19614 - DNA, 20 bp, synthetic construct
  source 1..20: mol_type = other DNA
aaaaaaaaaacaccagagcc

SEQ ID NO: 19615 - DNA, 20 bp, synthetic construct
  source 1..20: mol_type = other DNA
aaaaaaaaaaacaccagagc

SEQ ID NO: 19616 - DNA, 20 bp, synthetic construct
  source 1..20: mol_type = other DNA
aaaaaaaaaaaacaccagag

SEQ ID NO: 19617 - DNA, 20 bp, synthetic construct
  source 1..20: mol_type = other DNA
aaaaaaaaaaaaacaccaga

SEQ ID NO: 19618 - DNA, 20 bp, synthetic construct
  source 1..20: mol_type = other DNA
aaaaaaaaaaaaaacaccag

SEQ ID NO: 19619 - DNA, 20 bp, synthetic construct
  source 1..20: mol_type = other DNA
aaaaaaaaaaaaaaacacca

SEQ ID NO: 19620 - DNA, 20 bp, synthetic construct
  source 1..20: mol_type = other DNA
aaaaaaaaaaaaaaaacacc

SEQ ID NO: 19621 - DNA, 20 bp, synthetic construct
  source 1..20: mol_type = other DNA
taaaaaaaaaaaaaaaacac

SEQ ID NO: 19622 - DNA, 20 bp, synthetic construct
  source 1..20: mol_type = other DNA
ttaaaaaaaaaaaaaaaaca

SEQ ID NO: 19623 - DNA, 20 bp, synthetic construct
  source 1..20: mol_type = other DNA
tttaaaaaaaaaaaaaaaac

SEQ ID NO: 19624 - DNA, 20 bp, synthetic construct
  source 1..20: mol_type = other DNA
gtttaaaaaaaaaaaaaaaa

SEQ ID NO: 19625 - DNA, 20 bp, synthetic construct
  source 1..20: mol_type = other DNA
ggtttaaaaaaaaaaaaaaa

SEQ ID NO: 19626 - DNA, 20 bp, synthetic construct
  source 1..20: mol_type = other DNA
tggtttaaaaaaaaaaaaaa

SEQ ID NO: 19627 - DNA, 20 bp, synthetic construct
  source 1..20: mol_type = other DNA
ctggtttaaaaaaaaaaaaa

SEQ ID NO: 19628 - DNA, 20 bp, synthetic construct
  source 1..20: mol_type = other DNA
tctggtttaaaaaaaaaaaa

SEQ ID NO: 19629 - DNA, 20 bp, synthetic construct
  source 1..20: mol_type = other DNA
ttctggtttaaaaaaaaaaa

SEQ ID NO: 19630 - DNA, 20 bp, synthetic construct
  source 1..20: mol_type = other DNA
tttctggtttaaaaaaaaaa

SEQ ID NO: 19631 - DNA, 20 bp, synthetic construct
  source 1..20: mol_type = other DNA
gtttctggtttaaaaaaaaa

SEQ ID NO: 19632 - DNA, 20 bp, synthetic construct
  source 1..20: mol_type = other DNA
tgtttctggtttaaaaaaaa

SEQ ID NO: 19633 - DNA, 20 bp, synthetic construct
  source 1..20: mol_type = other DNA
gtgtttctggtttaaaaaaa

SEQ ID NO: 19634 - DNA, 20 bp, synthetic construct
  source 1..20: mol_type = other DNA
cgtgtttctggtttaaaaaa

SEQ ID NO: 19635 - DNA, 20 bp, synthetic construct
  source 1..20: mol_type = other DNA
acgtgtttctggtttaaaaa

SEQ ID NO: 19636 - DNA, 20 bp, synthetic construct
  source 1..20: mol_type = other DNA
cacgtgtttctggtttaaaa

SEQ ID NO: 19637 - DNA, 20 bp, synthetic construct
  source 1..20: mol_type = other DNA
gcacgtgtttctggtttaaa

SEQ ID NO: 19638 - DNA, 20 bp, synthetic construct
  source 1..20: mol_type = other DNA
tgcacgtgtttctggtttaa

SEQ ID NO: 19639 - DNA, 20 bp, synthetic construct
  source 1..20: mol_type = other DNA
ctgcacgtgtttctggttta

SEQ ID NO: 19640 - DNA, 20 bp, synthetic construct
  source 1..20: mol_type = other DNA
actgcacgtgtttctggttt

SEQ ID NO: 19641 - DNA, 20 bp, synthetic construct
  source 1..20: mol_type = other DNA
aactgcacgtgtttctggtt

SEQ ID NO: 19642 - DNA, 20 bp, synthetic construct
  source 1..20: mol_type = other DNA
aaactgcacgtgtttctggt

SEQ ID NO: 19643 - DNA, 20 bp, synthetic construct
  source 1..20: mol_type = other DNA
taaactgcacgtgtttctgg

SEQ ID NO: 19644 - DNA, 20 bp, synthetic construct
  source 1..20: mol_type = other DNA
ataaactgcacgtgtttctg

SEQ ID NO: 19645 - DNA, 20 bp, synthetic construct
  source 1..20: mol_type = other DNA
aataaactgcacgtgtttct

SEQ ID NO: 19646 - DNA, 20 bp, synthetic construct
  source 1..20: mol_type = other DNA
caataaactgcacgtgtttc

SEQ ID NO: 19647 - DNA, 20 bp, synthetic construct
  source 1..20: mol_type = other DNA
tcaataaactgcacgtgttt

SEQ ID NO: 19648 - DNA, 20 bp, synthetic construct
  source 1..20: mol_type = other DNA
ttcaataaactgcacgtgtt

SEQ ID NO: 19649 - DNA, 20 bp, synthetic construct
  source 1..20: mol_type = other DNA
attcaataaactgcacgtgt

SEQ ID NO: 19650 - DNA, 20 bp, synthetic construct
  source 1..20: mol_type = other DNA
cattcaataaactgcacgtg

SEQ ID NO: 19651 - DNA, 20 bp, synthetic construct
  source 1..20: mol_type = other DNA
gcattcaataaactgcacgt

SEQ ID NO: 19652 - DNA, 20 bp, synthetic construct
  source 1..20: mol_type = other DNA
ggcattcaataaactgcacg

SEQ ID NO: 19653 - DNA, 20 bp, synthetic construct
  source 1..20: mol_type = other DNA
tggcattcaataaactgcac

SEQ ID NO: 19654 - DNA, 20 bp, synthetic construct
  source 1..20: mol_type = other DNA
atggcattcaataaactgca

SEQ ID NO: 19655 - DNA, 20 bp, synthetic construct
  source 1..20: mol_type = other DNA
aatggcattcaataaactgc

SEQ ID NO: 19656 - DNA, 20 bp, synthetic construct
  source 1..20: mol_type = other DNA
caatggcattcaataaactg

SEQ ID NO: 19657 - DNA, 20 bp, synthetic construct
  source 1..20: mol_type = other DNA
acaatggcattcaataaact

SEQ ID NO: 19658 - DNA, 20 bp, synthetic construct
  source 1..20: mol_type = other DNA
tacaatggcattcaataaac

SEQ ID NO: 19659 - DNA, 20 bp, synthetic construct
  source 1..20: mol_type = other DNA
ctacaatggcattcaataaa

SEQ ID NO: 19660 - DNA, 20 bp, synthetic construct
  source 1..20: mol_type = other DNA
tctacaatggcattcaataa

SEQ ID NO: 19661 - DNA, 20 bp, synthetic construct
  source 1..20: mol_type = other DNA
ttctacaatggcattcaata

SEQ ID NO: 19662 - DNA, 20 bp, synthetic construct
  source 1..20: mol_type = other DNA
tttctacaatggcattcaat

SEQ ID NO: 19663 - DNA, 20 bp, synthetic construct
  source 1..20: mol_type = other DNA
ttttctacaatggcattcaa

SEQ ID NO: 19664 - DNA, 20 bp, synthetic construct
  source 1..20: mol_type = other DNA
cttttctacaatggcattca

SEQ ID NO: 19665 - DNA, 20 bp, synthetic construct
  source 1..20: mol_type = other DNA
acttttctacaatggcattc

SEQ ID NO: 19666 - DNA, 20 bp, synthetic construct
  source 1..20: mol_type = other DNA
cacttttctacaatggcatt

SEQ ID NO: 19667 - DNA, 20 bp, synthetic construct
  source 1..20: mol_type = other DNA
acacttttctacaatggcat

SEQ ID NO: 19668 - DNA, 20 bp, synthetic construct
  source 1..20: mol_type = other DNA
cacacttttctacaatggca

SEQ ID NO: 19669 - DNA, 20 bp, synthetic construct
  source 1..20: mol_type = other DNA
acacacttttctacaatggc

SEQ ID NO: 19670 - DNA, 20 bp, synthetic construct
  source 1..20: mol_type = other DNA
cacacacttttctacaatgg

SEQ ID NO: 19671 - DNA, 20 bp, synthetic construct
  source 1..20: mol_type = other DNA
tcacacacttttctacaatg

SEQ ID NO: 19672 - DNA, 20 bp, synthetic construct
  source 1..20: mol_type = other DNA
ctcacacacttttctacaat

SEQ ID NO: 19673 - DNA, 20 bp, synthetic construct
  source 1..20: mol_type = other DNA
cctcacacacttttctacaa

SEQ ID NO: 19674 - DNA, 20 bp, synthetic construct
  source 1..20: mol_type = other DNA
tcctcacacacttttctaca

SEQ ID NO: 19675 - DNA, 20 bp, synthetic construct
  source 1..20: mol_type = other DNA
atcctcacacacttttctac

SEQ ID NO: 19676 - DNA, 20 bp, synthetic construct
  source 1..20: mol_type = other DNA
tatcctcacacacttttcta

SEQ ID NO: 19677 - DNA, 20 bp, synthetic construct
  source 1..20: mol_type = other DNA
ttatcctcacacacttttct

SEQ ID NO: 19678 - DNA, 20 bp, synthetic construct
  source 1..20: mol_type = other DNA
tttatcctcacacacttttc

SEQ ID NO: 19679 - DNA, 20 bp, synthetic construct
  source 1..20: mol_type = other DNA
gtttatcctcacacactttt

SEQ ID NO: 19680 - DNA, 20 bp, synthetic construct
  source 1..20: mol_type = other DNA
cgtttatcctcacacacttt

SEQ ID NO: 19681 - DNA, 20 bp, synthetic construct
  source 1..20: mol_type = other DNA
ccgtttatcctcacacactt

SEQ ID NO: 19682 - DNA, 20 bp, synthetic construct
  source 1..20: mol_type = other DNA
gccgtttatcctcacacact

SEQ ID NO: 19683 - DNA, 20 bp, synthetic construct
  source 1..20: mol_type = other DNA
agccgtttatcctcacacac

SEQ ID NO: 19684 - DNA, 20 bp, synthetic construct
  source 1..20: mol_type = other DNA
cagccgtttatcctcacaca

SEQ ID NO: 19685 - DNA, 20 bp, synthetic construct
  source 1..20: mol_type = other DNA
tcagccgtttatcctcacac

SEQ ID NO: 19686 - DNA, 20 bp, synthetic construct
  source 1..20: mol_type = other DNA
atcagccgtttatcctcaca

SEQ ID NO: 19687 - DNA, 20 bp, synthetic construct
  source 1..20: mol_type = other DNA
tatcagccgtttatcctcac

SEQ ID NO: 19688 - DNA, 20 bp, synthetic construct
  source 1..20: mol_type = other DNA
ctatcagccgtttatcctca

SEQ ID NO: 19689 - DNA, 20 bp, synthetic construct
  source 1..20: mol_type = other DNA
tctatcagccgtttatcctc

SEQ ID NO: 19690 - DNA, 20 bp, synthetic construct
  source 1..20: mol_type = other DNA
ctctatcagccgtttatcct

SEQ ID NO: 19691 - DNA, 20 bp, synthetic construct
  source 1..20: mol_type = other DNA
tctctatcagccgtttatcc

SEQ ID NO: 19692 - DNA, 20 bp, synthetic construct
  source 1..20: mol_type = other DNA
ttctctatcagccgtttatc

SEQ ID NO: 19693 - DNA, 20 bp, synthetic construct
  source 1..20: mol_type = other DNA
gttctctatcagccgtttat

SEQ ID NO: 19694 - DNA, 20 bp, synthetic construct
  source 1..20: mol_type = other DNA
agttctctatcagccgttta

SEQ ID NO: 19695 - DNA, 20 bp, synthetic construct
  source 1..20: mol_type = other DNA
aagttctctatcagccgttt

SEQ ID NO: 19696 - DNA, 20 bp, synthetic construct
  source 1..20: mol_type = other DNA
caagttctctatcagccgtt

SEQ ID NO: 19697 - DNA, 20 bp, synthetic construct
  source 1..20: mol_type = other DNA
ccaagttctctatcagccgt

SEQ ID NO: 19698 - DNA, 20 bp, synthetic construct
  source 1..20: mol_type = other DNA
gccaagttctctatcagccg

SEQ ID NO: 19699 - DNA, 20 bp, synthetic construct
  source 1..20: mol_type = other DNA
agccaagttctctatcagcc

SEQ ID NO: 19700 - DNA, 20 bp, synthetic construct
  source 1..20: mol_type = other DNA
gagccaagttctctatcagc

SEQ ID NO: 19701 - DNA, 20 bp, synthetic construct
  source 1..20: mol_type = other DNA
agagccaagttctctatcag

SEQ ID NO: 19702 - DNA, 20 bp, synthetic construct
  source 1..20: mol_type = other DNA
cagagccaagttctctatca

SEQ ID NO: 19703 - DNA, 20 bp, synthetic construct
  source 1..20: mol_type = other DNA
ccagagccaagttctctatc

SEQ ID NO: 19704 - DNA, 20 bp, synthetic construct
  source 1..20: mol_type = other DNA
cccagagccaagttctctat

SEQ ID NO: 19705 - DNA, 20 bp, synthetic construct
  source 1..20: mol_type = other DNA
ccccagagccaagttctcta

SEQ ID NO: 19706 - DNA, 20 bp, synthetic construct
  source 1..20: mol_type = other DNA
cccccagagccaagttctct

SEQ ID NO: 19707 - DNA, 20 bp, synthetic construct
  source 1..20: mol_type = other DNA
gcccccagagccaagttctc

SEQ ID NO: 19708 - DNA, 20 bp, synthetic construct
  source 1..20: mol_type = other DNA
tgcccccagagccaagttct

SEQ ID NO: 19709 - DNA, 20 bp, synthetic construct
  source 1..20: mol_type = other DNA
ctgcccccagagccaagttc

SEQ ID NO: 19710 - DNA, 20 bp, synthetic construct
  source 1..20: mol_type = other DNA
cctgcccccagagccaagtt

SEQ ID NO: 19711 - DNA, 20 bp, synthetic construct
  source 1..20: mol_type = other DNA
ccctgcccccagagccaagt

SEQ ID NO: 19712 - DNA, 20 bp, synthetic construct
  source 1..20: mol_type = other DNA
gccctgcccccagagccaag

SEQ ID NO: 19713 - DNA, 20 bp, synthetic construct
  source 1..20: mol_type = other DNA
cgccctgcccccagagccaa

SEQ ID NO: 19714 - DNA, 20 bp, synthetic construct
  source 1..20: mol_type = other DNA
tcgccctgcccccagagcca

SEQ ID NO: 19715 - DNA, 20 bp, synthetic construct
  source 1..20: mol_type = other DNA
ctcgccctgcccccagagcc

SEQ ID NO: 19716 - DNA, 20 bp, synthetic construct
  source 1..20: mol_type = other DNA
cctcgccctgcccccagagc

SEQ ID NO: 19717 - DNA, 20 bp, synthetic construct
  source 1..20: mol_type = other DNA
tcctcgccctgcccccagag

SEQ ID NO: 19718 - DNA, 20 bp, synthetic construct
  source 1..20: mol_type = other DNA
ttcctcgccctgcccccaga

SEQ ID NO: 19719 - DNA, 20 bp, synthetic construct
  source 1..20: mol_type = other DNA
attcctcgccctgcccccag

SEQ ID NO: 19720 - DNA, 20 bp, synthetic construct
  source 1..20: mol_type = other DNA
cattcctcgccctgccccca

SEQ ID NO: 19721 - DNA, 20 bp, synthetic construct
  source 1..20: mol_type = other DNA
ccattcctcgccctgccccc

SEQ ID NO: 19722 - DNA, 20 bp, synthetic construct
  source 1..20: mol_type = other DNA
tccattcctcgccctgcccc

SEQ ID NO: 19723 - DNA, 20 bp, synthetic construct
  source 1..20: mol_type = other DNA
ctccattcctcgccctgccc

SEQ ID NO: 19724 - DNA, 20 bp, synthetic construct
  source 1..20: mol_type = other DNA
cctccattcctcgccctgcc

SEQ ID NO: 19725 - DNA, 20 bp, synthetic construct
  source 1..20: mol_type = other DNA
ccctccattcctcgccctgc

SEQ ID NO: 19726 - DNA, 20 bp, synthetic construct
  source 1..20: mol_type = other DNA
accctccattcctcgccctg

SEQ ID NO: 19727 - DNA, 20 bp, synthetic construct
  source 1..20: mol_type = other DNA
caccctccattcctcgccct

SEQ ID NO: 19728 - DNA, 20 bp, synthetic construct
  source 1..20: mol_type = other DNA
ccaccctccattcctcgccc

SEQ ID NO: 19729 - DNA, 20 bp, synthetic construct
  source 1..20: mol_type = other DNA
tccaccctccattcctcgcc

SEQ ID NO: 19730 - DNA, 20 bp, synthetic construct
  source 1..20: mol_type = other DNA
atccaccctccattcctcgc

SEQ ID NO: 19731 - DNA, 20 bp, synthetic construct
  source 1..20: mol_type = other DNA
catccaccctccattcctcg

SEQ ID NO: 19732 - DNA, 20 bp, synthetic construct
  source 1..20: mol_type = other DNA
ccatccaccctccattcctc

SEQ ID NO: 19733 - DNA, 20 bp, synthetic construct
  source 1..20: mol_type = other DNA
tccatccaccctccattcct

SEQ ID NO: 19734 - DNA, 20 bp, synthetic construct
  source 1..20: mol_type = other DNA
ctccatccaccctccattcc

SEQ ID NO: 19735 - DNA, 20 bp, synthetic construct
  source 1..20: mol_type = other DNA
actccatccaccctccattc

SEQ ID NO: 19736 - DNA, 20 bp, synthetic construct
  source 1..20: mol_type = other DNA
tactccatccaccctccatt

SEQ ID NO: 19737 - DNA, 20 bp, synthetic construct
  source 1..20: mol_type = other DNA
gtactccatccaccctccat

SEQ ID NO: 19738 - DNA, 20 bp, synthetic construct
  source 1..20: mol_type = other DNA
tgtactccatccaccctcca

SEQ ID NO: 19739 - DNA, 20 bp, synthetic construct
  source 1..20: mol_type = other DNA
atgtactccatccaccctcc

SEQ ID NO: 19740 - DNA, 20 bp, synthetic construct
  source 1..20: mol_type = other DNA
catgtactccatccaccctc

SEQ ID NO: 19741 - DNA, 20 bp, synthetic construct
  source 1..20: mol_type = other DNA
ccatgtactccatccaccct

SEQ ID NO: 19742 - DNA, 20 bp, synthetic construct
  source 1..20: mol_type = other DNA
cccatgtactccatccaccc

SEQ ID NO: 19743 - DNA, 20 bp, synthetic construct
  source 1..20: mol_type = other DNA
tcccatgtactccatccacc

SEQ ID NO: 19744 - DNA, 20 bp, synthetic construct
  source 1..20: mol_type = other DNA
ttcccatgtactccatccac

SEQ ID NO: 19745 - DNA, 20 bp, synthetic construct
  source 1..20: mol_type = other DNA
attcccatgtactccatcca

SEQ ID NO: 19746 - DNA, 20 bp, synthetic construct
  source 1..20: mol_type = other DNA
gattcccatgtactccatcc

SEQ ID NO: 19747 - DNA, 20 bp, synthetic construct
  source 1..20: mol_type = other DNA
tgattcccatgtactccatc

SEQ ID NO: 19748 - DNA, 20 bp, synthetic construct
  source 1..20: mol_type = other DNA
ctgattcccatgtactccat

SEQ ID NO: 19749 - DNA, 20 bp, synthetic construct
  source 1..20: mol_type = other DNA
tctgattcccatgtactcca

SEQ ID NO: 19750 - DNA, 20 bp, synthetic construct
  source 1..20: mol_type = other DNA
atctgattcccatgtactcc

SEQ ID NO: 19751 - DNA, 20 bp, synthetic construct
  source 1..20: mol_type = other DNA
gatctgattcccatgtactc

SEQ ID NO: 19752 - DNA, 20 bp, synthetic construct
  source 1..20: mol_type = other DNA
tgatctgattcccatgtact

SEQ ID NO: 19753 - DNA, 20 bp, synthetic construct
  source 1..20: mol_type = other DNA
gtgatctgattcccatgtac

SEQ ID NO: 19754 - DNA, 20 bp, synthetic construct
  source 1..20: mol_type = other DNA
cgtgatctgattcccatgta

SEQ ID NO: 19755 - DNA, 20 bp, synthetic construct
  source 1..20: mol_type = other DNA
ccgtgatctgattcccatgt

SEQ ID NO: 19756 - DNA, 20 bp, synthetic construct
  source 1..20: mol_type = other DNA
cccgtgatctgattcccatg

SEQ ID NO: 19757 - DNA, 20 bp, synthetic construct
  source 1..20: mol_type = other DNA
gcccgtgatctgattcccat

SEQ ID NO: 19758 - DNA, 20 bp, synthetic construct
  source 1..20: mol_type = other DNA
tgcccgtgatctgattccca

SEQ ID NO: 19759 - DNA, 20 bp, synthetic construct
  source 1..20: mol_type = other DNA
ctgcccgtgatctgattccc

SEQ ID NO: 19760 - DNA, 20 bp, synthetic construct
  source 1..20: mol_type = other DNA
tctgcccgtgatctgattcc

SEQ ID NO: 19761 - DNA, 20 bp, synthetic construct
  source 1..20: mol_type = other DNA
ctctgcccgtgatctgattc

SEQ ID NO: 19762 - DNA, 20 bp, synthetic construct
  source 1..20: mol_type = other DNA
gctctgcccgtgatctgatt

SEQ ID NO: 19763 - DNA, 20 bp, synthetic construct
  source 1..20: mol_type = other DNA
agctctgcccgtgatctgat

SEQ ID NO: 19764 - DNA, 20 bp, synthetic construct
  source 1..20: mol_type = other DNA
gagctctgcccgtgatctga

SEQ ID NO: 19765 - DNA, 20 bp, synthetic construct
  source 1..20: mol_type = other DNA
ggagctctgcccgtgatctg

SEQ ID NO: 19766 - DNA, 20 bp, synthetic construct
  source 1..20: mol_type = other DNA
aggagctctgcccgtgatct

SEQ ID NO: 19767 - DNA, 20 bp, synthetic construct
  source 1..20: mol_type = other DNA
caggagctctgcccgtgatc

SEQ ID NO: 19768 - DNA, 20 bp, synthetic construct
  source 1..20: mol_type = other DNA
ccaggagctctgcccgtgat

SEQ ID NO: 19769 - DNA, 20 bp, synthetic construct
  source 1..20: mol_type = other DNA
gccaggagctctgcccgtga

SEQ ID NO: 19770 - DNA, 20 bp, synthetic construct
  source 1..20: mol_type = other DNA
ggccaggagctctgcccgtg

SEQ ID NO: 19771 - DNA, 20 bp, synthetic construct
  source 1..20: mol_type = other DNA
aggccaggagctctgcccgt

SEQ ID NO: 19772 - DNA, 20 bp, synthetic construct
  source 1..20: mol_type = other DNA
taggccaggagctctgcccg

SEQ ID NO: 19773 - DNA, 20 bp, synthetic construct
  source 1..20: mol_type = other DNA
ctaggccaggagctctgccc

SEQ ID NO: 19774 - DNA, 20 bp, synthetic construct
  source 1..20: mol_type = other DNA
tctaggccaggagctctgcc

SEQ ID NO: 19775 - DNA, 20 bp, synthetic construct
  source 1..20: mol_type = other DNA
atctaggccaggagctctgc

SEQ ID NO: 19776 - DNA, 20 bp, synthetic construct
  source 1..20: mol_type = other DNA
tatctaggccaggagctctg

SEQ ID NO: 19777 - DNA, 20 bp, synthetic construct
  source 1..20: mol_type = other DNA
ttatctaggccaggagctct

SEQ ID NO: 19778 - DNA, 20 bp, synthetic construct
  source 1..20: mol_type = other DNA
attatctaggccaggagctc

SEQ ID NO: 19779 - DNA, 20 bp, synthetic construct
  source 1..20: mol_type = other DNA
cattatctaggccaggagct

SEQ ID NO: 19780 - DNA, 20 bp, synthetic construct
  source 1..20: mol_type = other DNA
gcattatctaggccaggagc

SEQ ID NO: 19781 - DNA, 20 bp, synthetic construct
  source 1..20: mol_type = other DNA
ggcattatctaggccaggag

SEQ ID NO: 19782 - DNA, 20 bp, synthetic construct
  source 1..20: mol_type = other DNA
aggcattatctaggccagga

SEQ ID NO: 19783 - DNA, 20 bp, synthetic construct
  source 1..20: mol_type = other DNA
gaggcattatctaggccagg

SEQ ID NO: 19784 - DNA, 20 bp, synthetic construct
  source 1..20: mol_type = other DNA
ggaggcattatctaggccag

SEQ ID NO: 19785 - DNA, 20 bp, synthetic construct
  source 1..20: mol_type = other DNA
aggaggcattatctaggcca

SEQ ID NO: 19786 - DNA, 20 bp, synthetic construct
  source 1..20: mol_type = other DNA
caggaggcattatctaggcc

SEQ ID NO: 19787 - DNA, 20 bp, synthetic construct
  source 1..20: mol_type = other DNA
tcaggaggcattatctaggc

SEQ ID NO: 19788 - DNA, 20 bp, synthetic construct
  source 1..20: mol_type = other DNA
atcaggaggcattatctagg

SEQ ID NO: 19789 - DNA, 20 bp, synthetic construct
  source 1..20: mol_type = other DNA
gatcaggaggcattatctag

SEQ ID NO: 19790 - DNA, 20 bp, synthetic construct
  source 1..20: mol_type = other DNA
agatcaggaggcattatcta

SEQ ID NO: 19791 - DNA, 20 bp, synthetic construct
  source 1..20: mol_type = other DNA
cagatcaggaggcattatct

SEQ ID NO: 19792 - DNA, 20 bp, synthetic construct
  source 1..20: mol_type = other DNA
acagatcaggaggcattatc

SEQ ID NO: 19793 - DNA, 20 bp, synthetic construct
  source 1..20: mol_type = other DNA
aacagatcaggaggcattat

SEQ ID NO: 19794 - DNA, 20 bp, synthetic construct
  source 1..20: mol_type = other DNA
caacagatcaggaggcatta

SEQ ID NO: 19795 - DNA, 20 bp, synthetic construct
  source 1..20: mol_type = other DNA
tcaacagatcaggaggcatt

SEQ ID NO: 19796 - DNA, 20 bp, synthetic construct
  source 1..20: mol_type = other DNA
atcaacagatcaggaggcat

SEQ ID NO: 19797 - DNA, 20 bp, synthetic construct
  source 1..20: mol_type = other DNA
tatcaacagatcaggaggca

SEQ ID NO: 19798 - DNA, 20 bp, synthetic construct
  source 1..20: mol_type = other DNA
ctatcaacagatcaggaggc

SEQ ID NO: 19799 - DNA, 20 bp, synthetic construct
  source 1..20: mol_type = other DNA
tctatcaacagatcaggagg

SEQ ID NO: 19800 - DNA, 20 bp, synthetic construct
  source 1..20: mol_type = other DNA
gtctatcaacagatcaggag

SEQ ID NO: 19801 - DNA, 20 bp, synthetic construct
  source 1..20: mol_type = other DNA
agtctatcaacagatcagga

SEQ ID NO: 19802 - DNA, 20 bp, synthetic construct
  source 1..20: mol_type = other DNA
aagtctatcaacagatcagg

SEQ ID NO: 19803 - DNA, 20 bp, synthetic construct
  source 1..20: mol_type = other DNA
caagtctatcaacagatcag

SEQ ID NO: 19804 - DNA, 20 bp, synthetic construct
  source 1..20: mol_type = other DNA
tcaagtctatcaacagatca

SEQ ID NO: 19805 - DNA, 20 bp, synthetic construct
  source 1..20: mol_type = other DNA
ttcaagtctatcaacagatc

SEQ ID NO: 19806 - DNA, 20 bp, synthetic construct
  source 1..20: mol_type = other DNA
tttcaagtctatcaacagat

SEQ ID NO: 19807 - DNA, 20 bp, synthetic construct
  source 1..20: mol_type = other DNA
ctttcaagtctatcaacaga

SEQ ID NO: 19808 - DNA, 20 bp, synthetic construct
  source 1..20: mol_type = other DNA
tctttcaagtctatcaacag

SEQ ID NO: 19809 - DNA, 20 bp, synthetic construct
  source 1..20: mol_type = other DNA
atctttcaagtctatcaaca

SEQ ID NO: 19810 - DNA, 20 bp, synthetic construct
  source 1..20: mol_type = other DNA
gatctttcaagtctatcaac

SEQ ID NO: 19811 - DNA, 20 bp, synthetic construct
  source 1..20: mol_type = other DNA
tgatctttcaagtctatcaa

SEQ ID NO: 19812 - DNA, 20 bp, synthetic construct
  source 1..20: mol_type = other DNA
ttgatctttcaagtctatca

SEQ ID NO: 19813 - DNA, 20 bp, synthetic construct
  source 1..20: mol_type = other DNA
gttgatctttcaagtctatc

SEQ ID NO: 19814 - DNA, 20 bp, synthetic construct
  source 1..20: mol_type = other DNA
tgttgatctttcaagtctat

SEQ ID NO: 19815 - DNA, 20 bp, synthetic construct
  source 1..20: mol_type = other DNA
gtgttgatctttcaagtcta

SEQ ID NO: 19816 - DNA, 20 bp, synthetic construct
  source 1..20: mol_type = other DNA
agtgttgatctttcaagtct

SEQ ID NO: 19817 - DNA, 20 bp, synthetic construct
  source 1..20: mol_type = other DNA
cagtgttgatctttcaagtc

SEQ ID NO: 19818 - DNA, 20 bp, synthetic construct
  source 1..20: mol_type = other DNA
ccagtgttgatctttcaagt

SEQ ID NO: 19819 - DNA, 20 bp, synthetic construct
  source 1..20: mol_type = other DNA
cccagtgttgatctttcaag

SEQ ID NO: 19820 - DNA, 20 bp, synthetic construct
  source 1..20: mol_type = other DNA
tcccagtgttgatctttcaa

SEQ ID NO: 19821 - DNA, 20 bp, synthetic construct
  source 1..20: mol_type = other DNA
atcccagtgttgatctttca

SEQ ID NO: 19822 - DNA, 20 bp, synthetic construct
  source 1..20: mol_type = other DNA
catcccagtgttgatctttc

SEQ ID NO: 19823 - DNA, 20 bp, synthetic construct
  source 1..20: mol_type = other DNA
tcatcccagtgttgatcttt

SEQ ID NO: 19824 - DNA, 20 bp, synthetic construct
  source 1..20: mol_type = other DNA
atcatcccagtgttgatctt

SEQ ID NO: 19825 - DNA, 20 bp, synthetic construct
  source 1..20: mol_type = other DNA
catcatcccagtgttgatct

SEQ ID NO: 19826 - DNA, 20 bp, synthetic construct
  source 1..20: mol_type = other DNA
gcatcatcccagtgttgatc

SEQ ID NO: 19827 - DNA, 20 bp, synthetic construct
  source 1..20: mol_type = other DNA
agcatcatcccagtgttgat

SEQ ID NO: 19828 - DNA, 20 bp, synthetic construct
  source 1..20: mol_type = other DNA
cagcatcatcccagtgttga

SEQ ID NO: 19829 - DNA, 20 bp, synthetic construct
  source 1..20: mol_type = other DNA
tcagcatcatcccagtgttg

SEQ ID NO: 19830 - DNA, 20 bp, synthetic construct
  source 1..20: mol_type = other DNA
ctcagcatcatcccagtgtt

SEQ ID NO: 19831 - DNA, 20 bp, synthetic construct
  source 1..20: mol_type = other DNA
gctcagcatcatcccagtgt

SEQ ID NO: 19832 - DNA, 20 bp, synthetic construct
  source 1..20: mol_type = other DNA
tgctcagcatcatcccagtg

SEQ ID NO: 19833 - DNA, 20 bp, synthetic construct
  source 1..20: mol_type = other DNA
ctgctcagcatcatcccagt

SEQ ID NO: 19834 - DNA, 20 bp, synthetic construct
  source 1..20: mol_type = other DNA
tctgctcagcatcatcccag

SEQ ID NO: 19835 - DNA, 20 bp, synthetic construct
  source 1..20: mol_type = other DNA
ttctgctcagcatcatccca

SEQ ID NO: 19836 - DNA, 20 bp, synthetic construct
  source 1..20: mol_type = other DNA
attctgctcagcatcatccc

SEQ ID NO: 19837 - DNA, 20 bp, synthetic construct
  source 1..20: mol_type = other DNA
cattctgctcagcatcatcc

SEQ ID NO: 19838 - DNA, 20 bp, synthetic construct
  source 1..20: mol_type = other DNA
ccattctgctcagcatcatc

SEQ ID NO: 19839 - DNA, 20 bp, synthetic construct
  source 1..20: mol_type = other DNA
accattctgctcagcatcat

SEQ ID NO: 19840 - DNA, 20 bp, synthetic construct
  source 1..20: mol_type = other DNA
gaccattctgctcagcatca

SEQ ID NO: 19841 - DNA, 20 bp, synthetic construct
  source 1..20: mol_type = other DNA
cgaccattctgctcagcatc

SEQ ID NO: 19842 - DNA, 20 bp, synthetic construct
  source 1..20: mol_type = other DNA
acgaccattctgctcagcat

SEQ ID NO: 19843 - DNA, 20 bp, synthetic construct
  source 1..20: mol_type = other DNA
tacgaccattctgctcagca

SEQ ID NO: 19844 - DNA, 20 bp, synthetic construct
  source 1..20: mol_type = other DNA
ttacgaccattctgctcagc

SEQ ID NO: 19845 - DNA, 20 bp, synthetic construct
  source 1..20: mol_type = other DNA
attacgaccattctgctcag

SEQ ID NO: 19846 - DNA, 20 bp, synthetic construct
  source 1..20: mol_type = other DNA
cattacgaccattctgctca

SEQ ID NO: 19847 - DNA, 20 bp, synthetic construct
  source 1..20: mol_type = other DNA
tcattacgaccattctgctc

SEQ ID NO: 19848 - DNA, 20 bp, synthetic construct
  source 1..20: mol_type = other DNA
atcattacgaccattctgct

SEQ ID NO: 19849 - DNA, 20 bp, synthetic construct
  source 1..20: mol_type = other DNA
catcattacgaccattctgc

SEQ ID NO: 19850 - DNA, 20 bp, synthetic construct
  source 1..20: mol_type = other DNA
gcatcattacgaccattctg

SEQ ID NO: 19851 - DNA, 20 bp, synthetic construct
  source 1..20: mol_type = other DNA
cgcatcattacgaccattct

SEQ ID NO: 19852 - DNA, 20 bp, synthetic construct
  source 1..20: mol_type = other DNA
gcgcatcattacgaccattc

SEQ ID NO: 19853 - DNA, 20 bp, synthetic construct
  source 1..20: mol_type = other DNA
tgcgcatcattacgaccatt

SEQ ID NO: 19854 - DNA, 20 bp, synthetic construct
  source 1..20: mol_type = other DNA
gtgcgcatcattacgaccat

SEQ ID NO: 19855 - DNA, 20 bp, synthetic construct
  source 1..20: mol_type = other DNA
tgtgcgcatcattacgacca

SEQ ID NO: 19856 - DNA, 20 bp, synthetic construct
  source 1..20: mol_type = other DNA
ttgtgcgcatcattacgacc

SEQ ID NO: 19857 - DNA, 20 bp, synthetic construct
  source 1..20: mol_type = other DNA
attgtgcgcatcattacgac

SEQ ID NO: 19858 - DNA, 20 bp, synthetic construct
  source 1..20: mol_type = other DNA
gattgtgcgcatcattacga

SEQ ID NO: 19859 - DNA, 20 bp, synthetic construct
  source 1..20: mol_type = other DNA
tgattgtgcgcatcattacg

SEQ ID NO: 19860 - DNA, 20 bp, synthetic construct
  source 1..20: mol_type = other DNA
ctgattgtgcgcatcattac

SEQ ID NO: 19861 - DNA, 20 bp, synthetic construct
  source 1..20: mol_type = other DNA
cctgattgtgcgcatcatta

SEQ ID NO: 19862 - DNA, 20 bp, synthetic construct
  source 1..20: mol_type = other DNA
ccctgattgtgcgcatcatt

SEQ ID NO: 19863 - DNA, 20 bp, synthetic construct
  source 1..20: mol_type = other DNA
gccctgattgtgcgcatcat

SEQ ID NO: 19864 - DNA, 20 bp, synthetic construct
  source 1..20: mol_type = other DNA
ggccctgattgtgcgcatca

SEQ ID NO: 19865 - DNA, 20 bp, synthetic construct
  source 1..20: mol_type = other DNA
gggccctgattgtgcgcatc

SEQ ID NO: 19866 - DNA, 20 bp, synthetic construct
  source 1..20: mol_type = other DNA
tgggccctgattgtgcgcat

SEQ ID NO: 19867 - DNA, 20 bp, synthetic construct
  source 1..20: mol_type = other DNA
ctgggccctgattgtgcgca

SEQ ID NO: 19868 - DNA, 20 bp, synthetic construct
  source 1..20: mol_type = other DNA
tctgggccctgattgtgcgc

SEQ ID NO: 19869 - DNA, 20 bp, synthetic construct
  source 1..20: mol_type = other DNA
atctgggccctgattgtgcg

SEQ ID NO: 19870 - DNA, 20 bp, synthetic construct
  source 1..20: mol_type = other DNA
catctgggccctgattgtgc

SEQ ID NO: 19871 - DNA, 20 bp, synthetic construct
  source 1..20: mol_type = other DNA
acatctgggccctgattgtg

SEQ ID NO: 19872 - DNA, 20 bp, synthetic construct
  source 1..20: mol_type = other DNA
aacatctgggccctgattgt

SEQ ID NO: 19873 - DNA, 20 bp, synthetic construct
  source 1..20: mol_type = other DNA
gaacatctgggccctgattg

SEQ ID NO: 19874 - DNA, 20 bp, synthetic construct
  source 1..20: mol_type = other DNA
tgaacatctgggccctgatt

SEQ ID NO: 19875 - DNA, 20 bp, synthetic construct
  source 1..20: mol_type = other DNA
ctgaacatctgggccctgat

SEQ ID NO: 19876 - DNA, 20 bp, synthetic construct
  source 1..20: mol_type = other DNA
cctgaacatctgggccctga

SEQ ID NO: 19877 - DNA, 20 bp, synthetic construct
  source 1..20: mol_type = other DNA
gcctgaacatctgggccctg

SEQ ID NO: 19878 - DNA, 20 bp, synthetic construct
  source 1..20: mol_type = other DNA
tgcctgaacatctgggccct

SEQ ID NO: 19879 - DNA, 20 bp, synthetic construct
  source 1..20: mol_type = other DNA
gtgcctgaacatctgggccc

SEQ ID NO: 19880 - DNA, 20 bp, synthetic construct
  source 1..20: mol_type = other DNA
agtgcctgaacatctgggcc

SEQ ID NO: 19881 - DNA, 20 bp, synthetic construct
  source 1..20: mol_type = other DNA
aagtgcctgaacatctgggc

SEQ ID NO: 19882 - DNA, 20 bp, synthetic construct
  source 1..20: mol_type = other DNA
caagtgcctgaacatctggg

SEQ ID NO: 19883 - DNA, 20 bp, synthetic construct
  source 1..20: mol_type = other DNA
ccaagtgcctgaacatctgg

SEQ ID NO: 19884 - DNA, 20 bp, synthetic construct
  source 1..20: mol_type = other DNA
gccaagtgcctgaacatctg

SEQ ID NO: 19885 - DNA, 20 bp, synthetic construct
  source 1..20: mol_type = other DNA
cgccaagtgcctgaacatct

SEQ ID NO: 19886 - DNA, 20 bp, synthetic construct
  source 1..20: mol_type = other DNA
ccgccaagtgcctgaacatc

SEQ ID NO: 19887 - DNA, 20 bp, synthetic construct
  source 1..20: mol_type = other DNA
accgccaagtgcctgaacat

SEQ ID NO: 19888 - DNA, 20 bp, synthetic construct
  source 1..20: mol_type = other DNA
taccgccaagtgcctgaaca

SEQ ID NO: 19889 - DNA, 20 bp, synthetic construct
  source 1..20: mol_type = other DNA
ttaccgccaagtgcctgaac

SEQ ID NO: 19890 - DNA, 20 bp, synthetic construct
  source 1..20: mol_type = other DNA
tttaccgccaagtgcctgaa

SEQ ID NO: 19891 - DNA, 20 bp, synthetic construct
  source 1..20: mol_type = other DNA
ctttaccgccaagtgcctga

SEQ ID NO: 19892 - DNA, 20 bp, synthetic construct
  source 1..20: mol_type = other DNA
cctttaccgccaagtgcctg

SEQ ID NO: 19893 - DNA, 20 bp, synthetic construct
  source 1..20: mol_type = other DNA
gcctttaccgccaagtgcct

SEQ ID NO: 19894 - DNA, 20 bp, synthetic construct
  source 1..20: mol_type = other DNA
tgcctttaccgccaagtgcc

SEQ ID NO: 19895 - DNA, 20 bp, synthetic construct
  source 1..20: mol_type = other DNA
atgcctttaccgccaagtgc

SEQ ID NO: 19896 - DNA, 20 bp, synthetic construct
  source 1..20: mol_type = other DNA
tatgcctttaccgccaagtg

SEQ ID NO: 19897 - DNA, 20 bp, synthetic construct
  source 1..20: mol_type = other DNA
ctatgcctttaccgccaagt

SEQ ID NO: 19898 - DNA, 20 bp, synthetic construct
  source 1..20: mol_type = other DNA
cctatgcctttaccgccaag

SEQ ID NO: 19899 - DNA, 20 bp, synthetic construct
  source 1..20: mol_type = other DNA
gcctatgcctttaccgccaa

SEQ ID NO: 19900 - DNA, 20 bp, synthetic construct
  source 1..20: mol_type = other DNA
ggcctatgcctttaccgcca

SEQ ID NO: 19901 - DNA, 20 bp, synthetic construct
  source 1..20: mol_type = other DNA
aggcctatgcctttaccgcc

SEQ ID NO: 19902 - DNA, 20 bp, synthetic construct
  source 1..20: mol_type = other DNA
caggcctatgcctttaccgc

SEQ ID NO: 19903 - DNA, 20 bp, synthetic construct
  source 1..20: mol_type = other DNA
ccaggcctatgcctttaccg

SEQ ID NO: 19904 - DNA, 20 bp, synthetic construct
  source 1..20: mol_type = other DNA
cccaggcctatgcctttacc

SEQ ID NO: 19905 - DNA, 20 bp, synthetic construct
  source 1..20: mol_type = other DNA
gcccaggcctatgcctttac

SEQ ID NO: 19906 - DNA, 20 bp, synthetic construct
  source 1..20: mol_type = other DNA
ggcccaggcctatgccttta

SEQ ID NO: 19907 - DNA, 20 bp, synthetic construct
  source 1..20: mol_type = other DNA
gggcccaggcctatgccttt

SEQ ID NO: 19908 - DNA, 20 bp, synthetic construct
  source 1..20: mol_type = other DNA
agggcccaggcctatgcctt

SEQ ID NO: 19909 - DNA, 20 bp, synthetic construct
  source 1..20: mol_type = other DNA
cagggcccaggcctatgcct

SEQ ID NO: 19910 - DNA, 20 bp, synthetic construct
  source 1..20: mol_type = other DNA
tcagggcccaggcctatgcc

SEQ ID NO: 19911 - DNA, 20 bp, synthetic construct
  source 1..20: mol_type = other DNA
atcagggcccaggcctatgc

SEQ ID NO: 19912 - DNA, 20 bp, synthetic construct
  source 1..20: mol_type = other DNA
gatcagggcccaggcctatg

SEQ ID NO: 19913 - DNA, 20 bp, synthetic construct
  source 1..20: mol_type = other DNA
tgatcagggcccaggcctat

SEQ ID NO: 19914 - DNA, 20 bp, synthetic construct
  source 1..20: mol_type = other DNA
ctgatcagggcccaggccta

SEQ ID NO: 19915 - DNA, 20 bp, synthetic construct
  source 1..20: mol_type = other DNA
cctgatcagggcccaggcct

SEQ ID NO: 19916 - DNA, 20 bp, synthetic construct
  source 1..20: mol_type = other DNA
acctgatcagggcccaggcc

SEQ ID NO: 19917 - DNA, 20 bp, synthetic construct
  source 1..20: mol_type = other DNA
gacctgatcagggcccaggc

SEQ ID NO: 19918 - DNA, 20 bp, synthetic construct
  source 1..20: mol_type = other DNA
cgacctgatcagggcccagg

SEQ ID NO: 19919 - DNA, 20 bp, synthetic construct
  source 1..20: mol_type = other DNA
gcgacctgatcagggcccag

SEQ ID NO: 19920 - DNA, 20 bp, synthetic construct
  source 1..20: mol_type = other DNA
ggcgacctgatcagggccca

SEQ ID NO: 19921 - DNA, 20 bp, synthetic construct
  source 1..20: mol_type = other DNA
tggcgacctgatcagggccc

SEQ ID NO: 19922 - DNA, 20 bp, synthetic construct
  source 1..20: mol_type = other DNA
ttggcgacctgatcagggcc

SEQ ID NO: 19923 - DNA, 20 bp, synthetic construct
  source 1..20: mol_type = other DNA
gttggcgacctgatcagggc

SEQ ID NO: 19924 - DNA, 20 bp, synthetic construct
  source 1..20: mol_type = other DNA
ggttggcgacctgatcaggg

SEQ ID NO: 19925 - DNA, 20 bp, synthetic construct
  source 1..20: mol_type = other DNA
tggttggcgacctgatcagg

SEQ ID NO: 19926 - DNA, 20 bp, synthetic construct
  source 1..20: mol_type = other DNA
atggttggcgacctgatcag

SEQ ID NO: 19927 - DNA, 20 bp, synthetic construct
  source 1..20: mol_type = other DNA
gatggttggcgacctgatca

SEQ ID NO: 19928 - DNA, 20 bp, synthetic construct
  source 1..20: mol_type = other DNA
agatggttggcgacctgatc

SEQ ID NO: 19929 - DNA, 20 bp, synthetic construct
  source 1..20: mol_type = other DNA
aagatggttggcgacctgat

SEQ ID NO: 19930 - DNA, 20 bp, synthetic construct
  source 1..20: mol_type = other DNA
gaagatggttggcgacctga

SEQ ID NO: 19931 - DNA, 20 bp, synthetic construct
  source 1..20: mol_type = other DNA
agaagatggttggcgacctg

SEQ ID NO: 19932 - DNA, 20 bp, synthetic construct
  source 1..20: mol_type = other DNA
aagaagatggttggcgacct

SEQ ID NO: 19933 - DNA, 20 bp, synthetic construct
  source 1..20: mol_type = other DNA
caagaagatggttggcgacc

SEQ ID NO: 19934 - DNA, 20 bp, synthetic construct
  source 1..20: mol_type = other DNA
acaagaagatggttggcgac

SEQ ID NO: 19935 - DNA, 20 bp, synthetic construct
  source 1..20: mol_type = other DNA
gacaagaagatggttggcga

SEQ ID NO: 19936 - DNA, 20 bp, synthetic construct
  source 1..20: mol_type = other DNA
ggacaagaagatggttggcg

SEQ ID NO: 19937 - DNA, 20 bp, synthetic construct
  source 1..20: mol_type = other DNA
gggacaagaagatggttggc

SEQ ID NO: 19938 - DNA, 20 bp, synthetic construct
  source 1..20: mol_type = other DNA
agggacaagaagatggttgg

SEQ ID NO: 19939 - DNA, 20 bp, synthetic construct
  source 1..20: mol_type = other DNA
tagggacaagaagatggttg

SEQ ID NO: 19940 - DNA, 20 bp, synthetic construct
  source 1..20: mol_type = other DNA
ctagggacaagaagatggtt

SEQ ID NO: 19941 - DNA, 20 bp, synthetic construct
  source 1..20: mol_type = other DNA
tctagggacaagaagatggt

SEQ ID NO: 19942 - DNA, 20 bp, synthetic construct
  source 1..20: mol_type = other DNA
gtctagggacaagaagatgg

SEQ ID NO: 19943 - DNA, 20 bp, synthetic construct
  source 1..20: mol_type = other DNA
agtctagggacaagaagatg

SEQ ID NO: 19944 - DNA, 20 bp, synthetic construct
  source 1..20: mol_type = other DNA
aagtctagggacaagaagat

SEQ ID NO: 19945 - DNA, 20 bp, synthetic construct
  source 1..20: mol_type = other DNA
gaagtctagggacaagaaga

SEQ ID NO: 19946 - DNA, 20 bp, synthetic construct
  source 1..20: mol_type = other DNA
tgaagtctagggacaagaag

SEQ ID NO: 19947 - DNA, 20 bp, synthetic construct
  source 1..20: mol_type = other DNA
gtgaagtctagggacaagaa

SEQ ID NO: 19948 - DNA, 20 bp, synthetic construct
  source 1..20: mol_type = other DNA
cgtgaagtctagggacaaga

SEQ ID NO: 19949 - DNA, 20 bp, synthetic construct
  source 1..20: mol_type = other DNA
ccgtgaagtctagggacaag

SEQ ID NO: 19950 - DNA, 20 bp, synthetic construct
  source 1..20: mol_type = other DNA
tccgtgaagtctagggacaa

SEQ ID NO: 19951 - DNA, 20 bp, synthetic construct
  source 1..20: mol_type = other DNA
ctccgtgaagtctagggaca

SEQ ID NO: 19952 - DNA, 20 bp, synthetic construct
  source 1..20: mol_type = other DNA
actccgtgaagtctagggac

SEQ ID NO: 19953 - DNA, 20 bp, synthetic construct
  source 1..20: mol_type = other DNA
tactccgtgaagtctaggga

SEQ ID NO: 19954 - DNA, 20 bp, synthetic construct
  source 1..20: mol_type = other DNA
ctactccgtgaagtctaggg

SEQ ID NO: 19955 - DNA, 20 bp, synthetic construct
  source 1..20: mol_type = other DNA
cctactccgtgaagtctagg

SEQ ID NO: 19956 - DNA, 20 bp, synthetic construct
  source 1..20: mol_type = other DNA
gcctactccgtgaagtctag

SEQ ID NO: 19957 - DNA, 20 bp, synthetic construct
  source 1..20: mol_type = other DNA
ggcctactccgtgaagtcta

SEQ ID NO: 19958 - DNA, 20 bp, synthetic construct
  source 1..20: mol_type = other DNA
tggcctactccgtgaagtct

SEQ ID NO: 19959 - DNA, 20 bp, synthetic construct
  source 1..20: mol_type = other DNA
ttggcctactccgtgaagtc

SEQ ID NO: 19960 - DNA, 20 bp, synthetic construct
  source 1..20: mol_type = other DNA
attggcctactccgtgaagt

SEQ ID NO: 19961 - DNA, 20 bp, synthetic construct
  source 1..20: mol_type = other DNA
cattggcctactccgtgaag

SEQ ID NO: 19962 - DNA, 20 bp, synthetic construct
  source 1..20: mol_type = other DNA
gcattggcctactccgtgaa

SEQ ID NO: 19963 - DNA, 20 bp, synthetic construct
  source 1..20: mol_type = other DNA
agcattggcctactccgtga

SEQ ID NO: 19964 - DNA, 20 bp, synthetic construct
  source 1..20: mol_type = other DNA
tagcattggcctactccgtg

SEQ ID NO: 19965 - DNA, 20 bp, synthetic construct
  source 1..20: mol_type = other DNA
atagcattggcctactccgt

SEQ ID NO: 19966 - DNA, 20 bp, synthetic construct
  source 1..20: mol_type = other DNA
catagcattggcctactccg

SEQ ID NO: 19967 - DNA, 20 bp, synthetic construct
  source 1..20: mol_type = other DNA
tcatagcattggcctactcc

SEQ ID NO: 19968 - DNA, 20 bp, synthetic construct
  source 1..20: mol_type = other DNA
ttcatagcattggcctactc

SEQ ID NO: 19969 - DNA, 20 bp, synthetic construct
  source 1..20: mol_type = other DNA
cttcatagcattggcctact

SEQ ID NO: 19970 - DNA, 20 bp, synthetic construct
  source 1..20: mol_type = other DNA
gcttcatagcattggcctac

SEQ ID NO: 19971 - DNA, 20 bp, synthetic construct
  source 1..20: mol_type = other DNA
ggcttcatagcattggccta

SEQ ID NO: 19972 - DNA, 20 bp, synthetic construct
  source 1..20: mol_type = other DNA
gggcttcatagcattggcct

SEQ ID NO: 19973 - DNA, 20 bp, synthetic construct
  source 1..20: mol_type = other DNA
tgggcttcatagcattggcc

SEQ ID NO: 19974 - DNA, 20 bp, synthetic construct
  source 1..20: mol_type = other DNA
ctgggcttcatagcattggc

SEQ ID NO: 19975 - DNA, 20 bp, synthetic construct
  source 1..20: mol_type = other DNA
cctgggcttcatagcattgg

SEQ ID NO: 19976 - DNA, 20 bp, synthetic construct
  source 1..20: mol_type = other DNA
gcctgggcttcatagcattg

SEQ ID NO: 19977 - DNA, 20 bp, synthetic construct
  source 1..20: mol_type = other DNA
tgcctgggcttcatagcatt

SEQ ID NO: 19978 - DNA, 20 bp, synthetic construct
  source 1..20: mol_type = other DNA
ctgcctgggcttcatagcat

SEQ ID NO: 19979 - DNA, 20 bp, synthetic construct
  source 1..20: mol_type = other DNA
gctgcctgggcttcatagca

SEQ ID NO: 19980 - DNA, 20 bp, synthetic construct
  source 1..20: mol_type = other DNA
tgctgcctgggcttcatagc

SEQ ID NO: 19981 - DNA, 20 bp, synthetic construct
  source 1..20: mol_type = other DNA
ctgctgcctgggcttcatag

SEQ ID NO: 19982 - DNA, 20 bp, synthetic construct
  source 1..20: mol_type = other DNA
cctgctgcctgggcttcata

SEQ ID NO: 19983 - DNA, 20 bp, synthetic construct
  source 1..20: mol_type = other DNA
tcctgctgcctgggcttcat

SEQ ID NO: 19984 - DNA, 20 bp, synthetic construct
  source 1..20: mol_type = other DNA
ctcctgctgcctgggcttca

SEQ ID NO: 19985 - DNA, 20 bp, synthetic construct
  source 1..20: mol_type = other DNA
actcctgctgcctgggcttc

SEQ ID NO: 19986 - DNA, 20 bp, synthetic construct
  source 1..20: mol_type = other DNA
aactcctgctgcctgggctt

SEQ ID NO: 19987 - DNA, 20 bp, synthetic construct
  source 1..20: mol_type = other DNA
gaactcctgctgcctgggct

SEQ ID NO: 19988 - DNA, 20 bp, synthetic construct
  source 1..20: mol_type = other DNA
tgaactcctgctgcctgggc

SEQ ID NO: 19989 - DNA, 20 bp, synthetic construct
  source 1..20: mol_type = other DNA
atgaactcctgctgcctggg

SEQ ID NO: 19990 - DNA, 20 bp, synthetic construct
  source 1..20: mol_type = other DNA
catgaactcctgctgcctgg

SEQ ID NO: 19991 - DNA, 20 bp, synthetic construct
  source 1..20: mol_type = other DNA
tcatgaactcctgctgcctg

SEQ ID NO: 19992 - DNA, 20 bp, synthetic construct
  source 1..20: mol_type = other DNA
ttcatgaactcctgctgcct

SEQ ID NO: 19993 - DNA, 20 bp, synthetic construct
  source 1..20: mol_type = other DNA
cttcatgaactcctgctgcc

SEQ ID NO: 19994 - DNA, 20 bp, synthetic construct
  source 1..20: mol_type = other DNA
acttcatgaactcctgctgc

SEQ ID NO: 19995 - DNA, 20 bp, synthetic construct
  source 1..20: mol_type = other DNA
cacttcatgaactcctgctg

SEQ ID NO: 19996 - DNA, 20 bp, synthetic construct
  source 1..20: mol_type = other DNA
ccacttcatgaactcctgct

SEQ ID NO: 19997 - DNA, 20 bp, synthetic construct
  source 1..20: mol_type = other DNA
cccacttcatgaactcctgc

SEQ ID NO: 19998 - DNA, 20 bp, synthetic construct
  source 1..20: mol_type = other DNA
acccacttcatgaactcctg

SEQ ID NO: 19999 - DNA, 20 bp, synthetic construct
  source 1..20: mol_type = other DNA
cacccacttcatgaactcct

SEQ ID NO: 20000 - DNA, 20 bp, synthetic construct
  source 1..20: mol_type = other DNA
acacccacttcatgaactcc

SEQ ID NO: 20001 - DNA, 20 bp, synthetic construct
  source 1..20: mol_type = other DNA
aacacccacttcatgaactc

SEQ ID NO: 20002 - DNA, 20 bp, synthetic construct
  source 1..20: mol_type = other DNA
caacacccacttcatgaact

SEQ ID NO: 20003 - DNA, 20 bp, synthetic construct
  source 1..20: mol_type = other DNA
tcaacacccacttcatgaac

SEQ ID NO: 20004 - DNA, 20 bp, synthetic construct
  source 1..20: mol_type = other DNA
ttcaacacccacttcatgaa

SEQ ID NO: 20005 - DNA, 20 bp, synthetic construct
  source 1..20: mol_type = other DNA
gttcaacacccacttcatga

SEQ ID NO: 20006 - DNA, 20 bp, synthetic construct
  source 1..20: mol_type = other DNA
tgttcaacacccacttcatg

SEQ ID NO: 20007 - DNA, 20 bp, synthetic construct
  source 1..20: mol_type = other DNA
ctgttcaacacccacttcat

SEQ ID NO: 20008 - DNA, 20 bp, synthetic construct
  source 1..20: mol_type = other DNA
cctgttcaacacccacttca

SEQ ID NO: 20009 - DNA, 20 bp, synthetic construct
  source 1..20: mol_type = other DNA
ccctgttcaacacccacttc

SEQ ID NO: 20010 - DNA, 20 bp, synthetic construct
  source 1..20: mol_type = other DNA
tccctgttcaacacccactt

SEQ ID NO: 20011 - DNA, 20 bp, synthetic construct
  source 1..20: mol_type = other DNA
gtccctgttcaacacccact

SEQ ID NO: 20012 - DNA, 20 bp, synthetic construct
  source 1..20: mol_type = other DNA
ggtccctgttcaacacccac

SEQ ID NO: 20013 - DNA, 20 bp, synthetic construct
  source 1..20: mol_type = other DNA
tggtccctgttcaacaccca

SEQ ID NO: 20014 - DNA, 20 bp, synthetic construct
  source 1..20: mol_type = other DNA
ctggtccctgttcaacaccc

SEQ ID NO: 20015 - DNA, 20 bp, synthetic construct
  source 1..20: mol_type = other DNA
tctggtccctgttcaacacc

SEQ ID NO: 20016 - DNA, 20 bp, synthetic construct
  source 1..20: mol_type = other DNA
gtctggtccctgttcaacac

SEQ ID NO: 20017 - DNA, 20 bp, synthetic construct
  source 1..20: mol_type = other DNA
cgtctggtccctgttcaaca

SEQ ID NO: 20018 - DNA, 20 bp, synthetic construct
  source 1..20: mol_type = other DNA
tcgtctggtccctgttcaac

SEQ ID NO: 20019 - DNA, 20 bp, synthetic construct
  source 1..20: mol_type = other DNA
gtcgtctggtccctgttcaa

SEQ ID NO: 20020 - DNA, 20 bp, synthetic construct
  source 1..20: mol_type = other DNA
tgtcgtctggtccctgttca

SEQ ID NO: 20021 - DNA, 20 bp, synthetic construct
  source 1..20: mol_type = other DNA
atgtcgtctggtccctgttc

SEQ ID NO: 20022 - DNA, 20 bp, synthetic construct
  source 1..20: mol_type = other DNA
catgtcgtctggtccctgtt

SEQ ID NO: 20023 - DNA, 20 bp, synthetic construct
  source 1..20: mol_type = other DNA
ccatgtcgtctggtccctgt

SEQ ID NO: 20024 - DNA, 20 bp, synthetic construct
  source 1..20: mol_type = other DNA
accatgtcgtctggtccctg

SEQ ID NO: 20025 - DNA, 20 bp, synthetic construct
  source 1..20: mol_type = other DNA
gaccatgtcgtctggtccct

SEQ ID NO: 20026 - DNA, 20 bp, synthetic construct
  source 1..20: mol_type = other DNA
cgaccatgtcgtctggtccc

SEQ ID NO: 20027 - DNA, 20 bp, synthetic construct
  source 1..20: mol_type = other DNA
ccgaccatgtcgtctggtcc

SEQ ID NO: 20028 - DNA, 20 bp, synthetic construct
  source 1..20: mol_type = other DNA
cccgaccatgtcgtctggtc

SEQ ID NO: 20029 - DNA, 20 bp, synthetic construct
  source 1..20: mol_type = other DNA
gcccgaccatgtcgtctggt

SEQ ID NO: 20030 - DNA, 20 bp, synthetic construct
  source 1..20: mol_type = other DNA
tgcccgaccatgtcgtctgg

SEQ ID NO: 20031 - DNA, 20 bp, synthetic construct
  source 1..20: mol_type = other DNA
gtgcccgaccatgtcgtctg

SEQ ID NO: 20032 - DNA, 20 bp, synthetic construct
  source 1..20: mol_type = other DNA
cgtgcccgaccatgtcgtct

SEQ ID NO: 20033 - DNA, 20 bp, synthetic construct
  source 1..20: mol_type = other DNA
ccgtgcccgaccatgtcgtc

SEQ ID NO: 20034 - DNA, 20 bp, synthetic construct
  source 1..20: mol_type = other DNA
tccgtgcccgaccatgtcgt

SEQ ID NO: 20035 - DNA, 20 bp, synthetic construct
  source 1..20: mol_type = other DNA
ctccgtgcccgaccatgtcg

SEQ ID NO: 20036 - DNA, 20 bp, synthetic construct
  source 1..20: mol_type = other DNA
actccgtgcccgaccatgtc

SEQ ID NO: 20037 - DNA, 20 bp, synthetic construct
  source 1..20: mol_type = other DNA
aactccgtgcccgaccatgt

SEQ ID NO: 20038 - DNA, 20 bp, synthetic construct
  source 1..20: mol_type = other DNA
gaactccgtgcccgaccatg

SEQ ID NO: 20039 - DNA, 20 bp, synthetic construct
  source 1..20: mol_type = other DNA
agaactccgtgcccgaccat

SEQ ID NO: 20040 - DNA, 20 bp, synthetic construct
  source 1..20: mol_type = other DNA
gagaactccgtgcccgacca

SEQ ID NO: 20041 - DNA, 20 bp, synthetic construct
  source 1..20: mol_type = other DNA
cgagaactccgtgcccgacc

SEQ ID NO: 20042 - DNA, 20 bp, synthetic construct
  source 1..20: mol_type = other DNA
gcgagaactccgtgcccgac

SEQ ID NO: 20043 - DNA, 20 bp, synthetic construct
  source 1..20: mol_type = other DNA
agcgagaactccgtgcccga

SEQ ID NO: 20044 - DNA, 20 bp, synthetic construct
  source 1..20: mol_type = other DNA
cagcgagaactccgtgcccg

SEQ ID NO: 20045 - DNA, 20 bp, synthetic construct
  source 1..20: mol_type = other DNA
acagcgagaactccgtgccc

SEQ ID NO: 20046 - DNA, 20 bp, synthetic construct
  source 1..20: mol_type = other DNA
cacagcgagaactccgtgcc

SEQ ID NO: 20047 - DNA, 20 bp, synthetic construct
  source 1..20: mol_type = other DNA
ccacagcgagaactccgtgc

SEQ ID NO: 20048 - DNA, 20 bp, synthetic construct
  source 1..20: mol_type = other DNA
tccacagcgagaactccgtg

SEQ ID NO: 20049 - DNA, 20 bp, synthetic construct
  source 1..20: mol_type = other DNA
atccacagcgagaactccgt

SEQ ID NO: 20050 - DNA, 20 bp, synthetic construct
  source 1..20: mol_type = other DNA
catccacagcgagaactccg

SEQ ID NO: 20051 - DNA, 20 bp, synthetic construct
  source 1..20: mol_type = other DNA
ccatccacagcgagaactcc

SEQ ID NO: 20052 - DNA, 20 bp, synthetic construct
  source 1..20: mol_type = other DNA
cccatccacagcgagaactc

SEQ ID NO: 20053 - DNA, 20 bp, synthetic construct
  source 1..20: mol_type = other DNA
ccccatccacagcgagaact

SEQ ID NO: 20054 - DNA, 20 bp, synthetic construct
  source 1..20: mol_type = other DNA
tccccatccacagcgagaac

SEQ ID NO: 20055 - DNA, 20 bp, synthetic construct
  source 1..20: mol_type = other DNA
atccccatccacagcgagaa

SEQ ID NO: 20056 - DNA, 20 bp, synthetic construct
  source 1..20: mol_type = other DNA
gatccccatccacagcgaga

SEQ ID NO: 20057 - DNA, 20 bp, synthetic construct
  source 1..20: mol_type = other DNA
tgatccccatccacagcgag

SEQ ID NO: 20058 - DNA, 20 bp, synthetic construct
  source 1..20: mol_type = other DNA
gtgatccccatccacagcga

SEQ ID NO: 20059 - DNA, 20 bp, synthetic construct
  source 1..20: mol_type = other DNA
cgtgatccccatccacagcg

SEQ ID NO: 20060 - DNA, 20 bp, synthetic construct
  source 1..20: mol_type = other DNA
ccgtgatccccatccacagc

SEQ ID NO: 20061 - DNA, 20 bp, synthetic construct
  source 1..20: mol_type = other DNA
accgtgatccccatccacag

SEQ ID NO: 20062 - DNA, 20 bp, synthetic construct
  source 1..20: mol_type = other DNA
caccgtgatccccatccaca

SEQ ID NO: 20063 - DNA, 20 bp, synthetic construct
  source 1..20: mol_type = other DNA
ccaccgtgatccccatccac

SEQ ID NO: 20064 - DNA, 20 bp, synthetic construct
  source 1..20: mol_type = other DNA
tccaccgtgatccccatcca

SEQ ID NO: 20065 - DNA, 20 bp, synthetic construct
  source 1..20: mol_type = other DNA
gtccaccgtgatccccatcc

SEQ ID NO: 20066 - DNA, 20 bp, synthetic construct
  source 1..20: mol_type = other DNA
tgtccaccgtgatccccatc

SEQ ID NO: 20067 - DNA, 20 bp, synthetic construct
  source 1..20: mol_type = other DNA
atgtccaccgtgatccccat

SEQ ID NO: 20068 - DNA, 20 bp, synthetic construct
  source 1..20: mol_type = other DNA
aatgtccaccgtgatcccca

SEQ ID NO: 20069 - DNA, 20 bp, synthetic construct
  source 1..20: mol_type = other DNA
caatgtccaccgtgatcccc

SEQ ID NO: 20070 - DNA, 20 bp, synthetic construct
  source 1..20: mol_type = other DNA
ccaatgtccaccgtgatccc

SEQ ID NO: 20071 - DNA, 20 bp, synthetic construct
  source 1..20: mol_type = other DNA
cccaatgtccaccgtgatcc

SEQ ID NO: 20072 - DNA, 20 bp, synthetic construct
  source 1..20: mol_type = other DNA
ccccaatgtccaccgtgatc

SEQ ID NO: 20073 - DNA, 20 bp, synthetic construct
  source 1..20: mol_type = other DNA
cccccaatgtccaccgtgat

SEQ ID NO: 20074 - DNA, 20 bp, synthetic construct
  source 1..20: mol_type = other DNA
tcccccaatgtccaccgtga

SEQ ID NO: 20075 - DNA, 20 bp, synthetic construct
  source 1..20: mol_type = other DNA
ctcccccaatgtccaccgtg

SEQ ID NO: 20076 - DNA, 20 bp, synthetic construct
  source 1..20: mol_type = other DNA
gctcccccaatgtccaccgt

SEQ ID NO: 20077 - DNA, 20 bp, synthetic construct
  source 1..20: mol_type = other DNA
tgctcccccaatgtccaccg

SEQ ID NO: 20078 - DNA, 20 bp, synthetic construct
  source 1..20: mol_type = other DNA
ctgctcccccaatgtccacc

SEQ ID NO: 20079 - DNA, 20 bp, synthetic construct
  source 1..20: mol_type = other DNA
cctgctcccccaatgtccac

SEQ ID NO: 20080 - DNA, 20 bp, synthetic construct
  source 1..20: mol_type = other DNA
ccctgctcccccaatgtcca

SEQ ID NO: 20081 - DNA, 20 bp, synthetic construct
  source 1..20: mol_type = other DNA
accctgctcccccaatgtcc

SEQ ID NO: 20082 - DNA, 20 bp, synthetic construct
  source 1..20: mol_type = other DNA
aaccctgctcccccaatgtc

SEQ ID NO: 20083 - DNA, 20 bp, synthetic construct
  source 1..20: mol_type = other DNA
caaccctgctcccccaatgt

SEQ ID NO: 20084 - DNA, 20 bp, synthetic construct
  source 1..20: mol_type = other DNA
acaaccctgctcccccaatg

SEQ ID NO: 20085 - DNA, 20 bp, synthetic construct
  source 1..20: mol_type = other DNA
cacaaccctgctcccccaat

SEQ ID NO: 20086 - DNA, 20 bp, synthetic construct
  source 1..20: mol_type = other DNA
ccacaaccctgctcccccaa

SEQ ID NO: 20087 - DNA, 20 bp, synthetic construct
  source 1..20: mol_type = other DNA
cccacaaccctgctccccca

SEQ ID NO: 20088 - DNA, 20 bp, synthetic construct
  source 1..20: mol_type = other DNA
ccccacaaccctgctccccc

SEQ ID NO: 20089 - DNA, 20 bp, synthetic construct
  source 1..20: mol_type = other DNA
accccacaaccctgctcccc

SEQ ID NO: 20090 - DNA, 20 bp, synthetic construct
  source 1..20: mol_type = other DNA
caccccacaaccctgctccc

SEQ ID NO: 20091 - DNA, 20 bp, synthetic construct
  source 1..20: mol_type = other DNA
gcaccccacaaccctgctcc

SEQ ID NO: 20092 - DNA, 20 bp, synthetic construct
  source 1..20: mol_type = other DNA
ggcaccccacaaccctgctc

SEQ ID NO: 20093 - DNA, 20 bp, synthetic construct
  source 1..20: mol_type = other DNA
gggcaccccacaaccctgct

SEQ ID NO: 20094 - DNA, 20 bp, synthetic construct
  source 1..20: mol_type = other DNA
ggggcaccccacaaccctgc

SEQ ID NO: 20095 - DNA, 20 bp, synthetic construct
  source 1..20: mol_type = other DNA
gggggcaccccacaaccctg

SEQ ID NO: 20096 - DNA, 20 bp, synthetic construct
  source 1..20: mol_type = other DNA
tgggggcaccccacaaccct

SEQ ID NO: 20097 - DNA, 20 bp, synthetic construct
  source 1..20: mol_type = other DNA
ctgggggcaccccacaaccc

SEQ ID NO: 20098 - DNA, 20 bp, synthetic construct
  source 1..20: mol_type = other DNA
gctgggggcaccccacaacc

SEQ ID NO: 20099 - DNA, 20 bp, synthetic construct
  source 1..20: mol_type = other DNA
tgctgggggcaccccacaac

SEQ ID NO: 20100 - DNA, 20 bp, synthetic construct
  source 1..20: mol_type = other DNA
gtgctgggggcaccccacaa

SEQ ID NO: 20101 - DNA, 20 bp, synthetic construct
  source 1..20: mol_type = other DNA
tgtgctgggggcaccccaca

SEQ ID NO: 20102 - DNA, 20 bp, synthetic construct
  source 1..20: mol_type = other DNA
ctgtgctgggggcaccccac

SEQ ID NO: 20103 - DNA, 20 bp, synthetic construct
  source 1..20: mol_type = other DNA
gctgtgctgggggcacccca

SEQ ID NO: 20104 - DNA, 20 bp, synthetic construct
  source 1..20: mol_type = other DNA
ggctgtgctgggggcacccc

SEQ ID NO: 20105 - DNA, 20 bp, synthetic construct
  source 1..20: mol_type = other DNA
tggctgtgctgggggcaccc

SEQ ID NO: 20106 - DNA, 20 bp, synthetic construct
  source 1..20: mol_type = other DNA
gtggctgtgctgggggcacc

SEQ ID NO: 20107 - DNA, 20 bp, synthetic construct
  source 1..20: mol_type = other DNA
ggtggctgtgctgggggcac

SEQ ID NO: 20108 - DNA, 20 bp, synthetic construct
  source 1..20: mol_type = other DNA
aggtggctgtgctgggggca

SEQ ID NO: 20109 - DNA, 20 bp, synthetic construct
  source 1..20: mol_type = other DNA
gaggtggctgtgctgggggc

SEQ ID NO: 20110 - DNA, 20 bp, synthetic construct
  source 1..20: mol_type = other DNA
agaggtggctgtgctggggg

SEQ ID NO: 20111 - DNA, 20 bp, synthetic construct
  source 1..20: mol_type = other DNA
aagaggtggctgtgctgggg

SEQ ID NO: 20112 - DNA, 20 bp, synthetic construct
  source 1..20: mol_type = other DNA
caagaggtggctgtgctggg

SEQ ID NO: 20113 - DNA, 20 bp, synthetic construct
  source 1..20: mol_type = other DNA
gcaagaggtggctgtgctgg

SEQ ID NO: 20114 - DNA, 20 bp, synthetic construct
  source 1..20: mol_type = other DNA
agcaagaggtggctgtgctg

SEQ ID NO: 20115 - DNA, 20 bp, synthetic construct
  source 1..20: mol_type = other DNA
gagcaagaggtggctgtgct

SEQ ID NO: 20116 - DNA, 20 bp, synthetic construct
  source 1..20: mol_type = other DNA
ggagcaagaggtggctgtgc

SEQ ID NO: 20117 - DNA, 20 bp, synthetic construct
  source 1..20: mol_type = other DNA
aggagcaagaggtggctgtg

SEQ ID NO: 20118 - DNA, 20 bp, synthetic construct
  source 1..20: mol_type = other DNA
gaggagcaagaggtggctgt

SEQ ID NO: 20119 - DNA, 20 bp, synthetic construct
  source 1..20: mol_type = other DNA
ggaggagcaagaggtggctg

SEQ ID NO: 20120 - DNA, 20 bp, synthetic construct
  source 1..20: mol_type = other DNA
aggaggagcaagaggtggct

SEQ ID NO: 20121 - DNA, 20 bp, synthetic construct
  source 1..20: mol_type = other DNA
aaggaggagcaagaggtggc

SEQ ID NO: 20122 - DNA, 20 bp, synthetic construct
  source 1..20: mol_type = other DNA
caaggaggagcaagaggtgg

SEQ ID NO: 20123 - DNA, 20 bp, synthetic construct
  source 1..20: mol_type = other DNA
tcaaggaggagcaagaggtg

SEQ ID NO: 20124 - DNA, 20 bp, synthetic construct
  source 1..20: mol_type = other DNA
ctcaaggaggagcaagaggt

SEQ ID NO: 20125 - DNA, 20 bp, synthetic construct
  source 1..20: mol_type = other DNA
gctcaaggaggagcaagagg

SEQ ID NO: 20126 - DNA, 20 bp, synthetic construct
  source 1..20: mol_type = other DNA
tgctcaaggaggagcaagag

SEQ ID NO: 20127 - DNA, 20 bp, synthetic construct
  source 1..20: mol_type = other DNA
atgctcaaggaggagcaaga

SEQ ID NO: 20128 - DNA, 20 bp, synthetic construct
  source 1..20: mol_type = other DNA
gatgctcaaggaggagcaag

SEQ ID NO: 20129 - DNA, 20 bp, synthetic construct
  source 1..20: mol_type = other DNA
agatgctcaaggaggagcaa

SEQ ID NO: 20130 - DNA, 20 bp, synthetic construct
  source 1..20: mol_type = other DNA
gagatgctcaaggaggagca

SEQ ID NO: 20131 - DNA, 20 bp, synthetic construct
  source 1..20: mol_type = other DNA
tgagatgctcaaggaggagc

SEQ ID NO: 20132 - DNA, 20 bp, synthetic construct
  source 1..20: mol_type = other DNA
atgagatgctcaaggaggag

SEQ ID NO: 20133 - DNA, 20 bp, synthetic construct
  source 1..20: mol_type = other DNA
tatgagatgctcaaggagga

SEQ ID NO: 20134 - DNA, 20 bp, synthetic construct
  source 1..20: mol_type = other DNA
ctatgagatgctcaaggagg

SEQ ID NO: 20135 - DNA, 20 bp, synthetic construct
  source 1..20: mol_type = other DNA
actatgagatgctcaaggag

SEQ ID NO: 20136 - DNA, 20 bp, synthetic construct
  source 1..20: mol_type = other DNA
aactatgagatgctcaagga

SEQ ID NO: 20137 - DNA, 20 bp, synthetic construct
  source 1..20: mol_type = other DNA
taactatgagatgctcaagg

SEQ ID NO: 20138 - DNA, 20 bp, synthetic construct
  source 1..20: mol_type = other DNA
ctaactatgagatgctcaag

SEQ ID NO: 20139 - DNA, 20 bp, synthetic construct
  source 1..20: mol_type = other DNA
cctaactatgagatgctcaa

SEQ ID NO: 20140 - DNA, 20 bp, synthetic construct
  source 1..20: mol_type = other DNA
ccctaactatgagatgctca

SEQ ID NO: 20141 - DNA, 20 bp, synthetic construct
  source 1..20: mol_type = other DNA
cccctaactatgagatgctc

SEQ ID NO: 20142 - DNA, 20 bp, synthetic construct
  source 1..20: mol_type = other DNA
ccccctaactatgagatgct

SEQ ID NO: 20143 - DNA, 20 bp, synthetic construct
  source 1..20: mol_type = other DNA
tccccctaactatgagatgc

SEQ ID NO: 20144 - DNA, 20 bp, synthetic construct
  source 1..20: mol_type = other DNA
atccccctaactatgagatg

SEQ ID NO: 20145 - DNA, 20 bp, synthetic construct
  source 1..20: mol_type = other DNA
catccccctaactatgagat

SEQ ID NO: 20146 - DNA, 20 bp, synthetic construct
  source 1..20: mol_type = other DNA
ccatccccctaactatgaga

SEQ ID NO: 20147 - DNA, 20 bp, synthetic construct
  source 1..20: mol_type = other DNA
gccatccccctaactatgag

SEQ ID NO: 20148 - DNA, 20 bp, synthetic construct
  source 1..20: mol_type = other DNA
ggccatccccctaactatga

SEQ ID NO: 20149 - DNA, 20 bp, synthetic construct
  source 1..20: mol_type = other DNA
cggccatccccctaactatg

SEQ ID NO: 20150 - DNA, 20 bp, synthetic construct
  source 1..20: mol_type = other DNA
tcggccatccccctaactat

SEQ ID NO: 20151 - DNA, 20 bp, synthetic construct
  source 1..20: mol_type = other DNA
atcggccatccccctaacta

SEQ ID NO: 20152 - DNA, 20 bp, synthetic construct
  source 1..20: mol_type = other DNA
catcggccatccccctaact

SEQ ID NO: 20153 - DNA, 20 bp, synthetic construct
  source 1..20: mol_type = other DNA
acatcggccatccccctaac

SEQ ID NO: 20154 - DNA, 20 bp, synthetic construct
  source 1..20: mol_type = other DNA
aacatcggccatccccctaa

SEQ ID NO: 20155 - DNA, 20 bp, synthetic construct
  source 1..20: mol_type = other DNA
caacatcggccatcccccta

SEQ ID NO: 20156 - DNA, 20 bp, synthetic construct
  source 1..20: mol_type = other DNA
ccaacatcggccatccccct

SEQ ID NO: 20157 - DNA, 20 bp, synthetic construct
  source 1..20: mol_type = other DNA
gccaacatcggccatccccc

SEQ ID NO: 20158 - DNA, 20 bp, synthetic construct
  source 1..20: mol_type = other DNA
tgccaacatcggccatcccc

SEQ ID NO: 20159 - DNA, 20 bp, synthetic construct
  source 1..20: mol_type = other DNA
ctgccaacatcggccatccc

SEQ ID NO: 20160 - DNA, 20 bp, synthetic construct
  source 1..20: mol_type = other DNA
cctgccaacatcggccatcc

SEQ ID NO: 20161 - DNA, 20 bp, synthetic construct
  source 1..20: mol_type = other DNA
tcctgccaacatcggccatc

SEQ ID NO: 20162 - DNA, 20 bp, synthetic construct
  source 1..20: mol_type = other DNA
ctcctgccaacatcggccat

SEQ ID NO: 20163 - DNA, 20 bp, synthetic construct
  source 1..20: mol_type = other DNA
actcctgccaacatcggcca

SEQ ID NO: 20164 - DNA, 20 bp, synthetic construct
  source 1..20: mol_type = other DNA
cactcctgccaacatcggcc

SEQ ID NO: 20165 - DNA, 20 bp, synthetic construct
  source 1..20: mol_type = other DNA
tcactcctgccaacatcggc

SEQ ID NO: 20166 - DNA, 20 bp, synthetic construct
  source 1..20: mol_type = other DNA
ttcactcctgccaacatcgg

SEQ ID NO: 20167 - DNA, 20 bp, synthetic construct
  source 1..20: mol_type = other DNA
cttcactcctgccaacatcg

SEQ ID NO: 20168 - DNA, 20 bp, synthetic construct
  source 1..20: mol_type = other DNA
tcttcactcctgccaacatc

SEQ ID NO: 20169 - DNA, 20 bp, synthetic construct
  source 1..20: mol_type = other DNA
ctcttcactcctgccaacat

SEQ ID NO: 20170 - DNA, 20 bp, synthetic construct
  source 1..20: mol_type = other DNA
cctcttcactcctgccaaca

SEQ ID NO: 20171 - DNA, 20 bp, synthetic construct
  source 1..20: mol_type = other DNA
acctcttcactcctgccaac

SEQ ID NO: 20172 - DNA, 20 bp, synthetic construct
  source 1..20: mol_type = other DNA
aacctcttcactcctgccaa

SEQ ID NO: 20173 - DNA, 20 bp, synthetic construct
  source 1..20: mol_type = other DNA
aaacctcttcactcctgcca

SEQ ID NO: 20174 - DNA, 20 bp, synthetic construct
  source 1..20: mol_type = other DNA
caaacctcttcactcctgcc

SEQ ID NO: 20175 - DNA, 20 bp, synthetic construct
  source 1..20: mol_type = other DNA
ccaaacctcttcactcctgc

SEQ ID NO: 20176 - DNA, 20 bp, synthetic construct
  source 1..20: mol_type = other DNA
tccaaacctcttcactcctg

SEQ ID NO: 20177 - DNA, 20 bp, synthetic construct
  source 1..20: mol_type = other DNA
gtccaaacctcttcactcct

SEQ ID NO: 20178 - DNA, 20 bp, synthetic construct
  source 1..20: mol_type = other DNA
tgtccaaacctcttcactcc

SEQ ID NO: 20179 - DNA, 20 bp, synthetic construct
  source 1..20: mol_type = other DNA
atgtccaaacctcttcactc

SEQ ID NO: 20180 - DNA, 20 bp, synthetic construct
  source 1..20: mol_type = other DNA
aatgtccaaacctcttcact

SEQ ID NO: 20181 - DNA, 20 bp, synthetic construct
  source 1..20: mol_type = other DNA
caatgtccaaacctcttcac

SEQ ID NO: 20182 - DNA, 20 bp, synthetic construct
  source 1..20: mol_type = other DNA
acaatgtccaaacctcttca

SEQ ID NO: 20183 - DNA, 20 bp, synthetic construct
  source 1..20: mol_type = other DNA
cacaatgtccaaacctcttc

SEQ ID NO: 20184 - DNA, 20 bp, synthetic construct
  source 1..20: mol_type = other DNA
ccacaatgtccaaacctctt

SEQ ID NO: 20185 - DNA, 20 bp, synthetic construct
  source 1..20: mol_type = other DNA
accacaatgtccaaacctct

SEQ ID NO: 20186 - DNA, 20 bp, synthetic construct
  source 1..20: mol_type = other DNA
aaccacaatgtccaaacctc

SEQ ID NO: 20187 - DNA, 20 bp, synthetic construct
  source 1..20: mol_type = other DNA
gaaccacaatgtccaaacct

SEQ ID NO: 20188 - DNA, 20 bp, synthetic construct
  source 1..20: mol_type = other DNA
tgaaccacaatgtccaaacc

SEQ ID NO: 20189 - DNA, 20 bp, synthetic construct
  source 1..20: mol_type = other DNA
atgaaccacaatgtccaaac

SEQ ID NO: 20190 - DNA, 20 bp, synthetic construct
  source 1..20: mol_type = other DNA
catgaaccacaatgtccaaa

SEQ ID NO: 20191 - DNA, 20 bp, synthetic construct
  source 1..20: mol_type = other DNA
ccatgaaccacaatgtccaa

SEQ ID NO: 20192 - DNA, 20 bp, synthetic construct
  source 1..20: mol_type = other DNA
accatgaaccacaatgtcca

SEQ ID NO: 20193 - DNA, 20 bp, synthetic construct
  source 1..20: mol_type = other DNA
caccatgaaccacaatgtcc

SEQ ID NO: 20194 - DNA, 20 bp, synthetic construct
  source 1..20: mol_type = other DNA
acaccatgaaccacaatgtc

SEQ ID NO: 20195 - DNA, 20 bp, synthetic construct
  source 1..20: mol_type = other DNA
gacaccatgaaccacaatgt

SEQ ID NO: 20196 - DNA, 20 bp, synthetic construct
  source 1..20: mol_type = other DNA
ggacaccatgaaccacaatg

SEQ ID NO: 20197 - DNA, 20 bp, synthetic construct
  source 1..20: mol_type = other DNA
tggacaccatgaaccacaat

SEQ ID NO: 20198 - DNA, 20 bp, synthetic construct
  source 1..20: mol_type = other DNA
ctggacaccatgaaccacaa

SEQ ID NO: 20199 - DNA, 20 bp, synthetic construct
  source 1..20: mol_type = other DNA
cctggacaccatgaaccaca

SEQ ID NO: 20200 - DNA, 20 bp, synthetic construct
  source 1..20: mol_type = other DNA
ccctggacaccatgaaccac

SEQ ID NO: 20201 - DNA, 20 bp, synthetic construct
  source 1..20: mol_type = other DNA
tccctggacaccatgaacca

SEQ ID NO: 20202 - DNA, 20 bp, synthetic construct
  source 1..20: mol_type = other DNA
ttccctggacaccatgaacc

SEQ ID NO: 20203 - DNA, 20 bp, synthetic construct
  source 1..20: mol_type = other DNA
cttccctggacaccatgaac

SEQ ID NO: 20204 - DNA, 20 bp, synthetic construct
  source 1..20: mol_type = other DNA
tcttccctggacaccatgaa

SEQ ID NO: 20205 - DNA, 20 bp, synthetic construct
  source 1..20: mol_type = other DNA
gtcttccctggacaccatga

SEQ ID NO: 20206 - DNA, 20 bp, synthetic construct
  source 1..20: mol_type = other DNA
ggtcttccctggacaccatg

SEQ ID NO: 20207 - DNA, 20 bp, synthetic construct
  source 1..20: mol_type = other DNA
tggtcttccctggacaccat

SEQ ID NO: 20208 - DNA, 20 bp, synthetic construct
  source 1..20: mol_type = other DNA
ctggtcttccctggacacca

SEQ ID NO: 20209 - DNA, 20 bp, synthetic construct
  source 1..20: mol_type = other DNA
gctggtcttccctggacacc

SEQ ID NO: 20210 - DNA, 20 bp, synthetic construct
  source 1..20: mol_type = other DNA
agctggtcttccctggacac

SEQ ID NO: 20211 - DNA, 20 bp, synthetic construct
  source 1..20: mol_type = other DNA
cagctggtcttccctggaca

SEQ ID NO: 20212 - DNA, 20 bp, synthetic construct
  source 1..20: mol_type = other DNA
acagctggtcttccctggac

SEQ ID NO: 20213 - DNA, 20 bp, synthetic construct
  source 1..20: mol_type = other DNA
cacagctggtcttccctgga

SEQ ID NO: 20214 - DNA, 20 bp, synthetic construct
  source 1..20: mol_type = other DNA
ccacagctggtcttccctgg

SEQ ID NO: 20215 - DNA, 20 bp, synthetic construct
  source 1..20: mol_type = other DNA
accacagctggtcttccctg

SEQ ID NO: 20216 - DNA, 20 bp, synthetic construct
  source 1..20: mol_type = other DNA
gaccacagctggtcttccct

SEQ ID NO: 20217 - DNA, 20 bp, synthetic construct
  source 1..20: mol_type = other DNA
cgaccacagctggtcttccc

SEQ ID NO: 20218 - DNA, 20 bp, synthetic construct
  source 1..20: mol_type = other DNA
ccgaccacagctggtcttcc

SEQ ID NO: 20219 - DNA, 20 bp, synthetic construct
  source 1..20: mol_type = other DNA
cccgaccacagctggtcttc

SEQ ID NO: 20220 - DNA, 20 bp, synthetic construct
  source 1..20: mol_type = other DNA
acccgaccacagctggtctt

SEQ ID NO: 20221 - DNA, 20 bp, synthetic construct
  source 1..20: mol_type = other DNA
aacccgaccacagctggtct

SEQ ID NO: 20222 - DNA, 20 bp, synthetic construct
  source 1..20: mol_type = other DNA
caacccgaccacagctggtc

SEQ ID NO: 20223 - DNA, 20 bp, synthetic construct
  source 1..20: mol_type = other DNA
gcaacccgaccacagctggt

SEQ ID NO: 20224 - DNA, 20 bp, synthetic construct
  source 1..20: mol_type = other DNA
agcaacccgaccacagctgg

SEQ ID NO: 20225 - DNA, 20 bp, synthetic construct
  source 1..20: mol_type = other DNA
cagcaacccgaccacagctg

SEQ ID NO: 20226 - DNA, 20 bp, synthetic construct
  source 1..20: mol_type = other DNA
ccagcaacccgaccacagct

SEQ ID NO: 20227 - DNA, 20 bp, synthetic construct
  source 1..20: mol_type = other DNA
cccagcaacccgaccacagc

SEQ ID NO: 20228 - DNA, 20 bp, synthetic construct
  source 1..20: mol_type = other DNA
ccccagcaacccgaccacag

SEQ ID NO: 20229 - DNA, 20 bp, synthetic construct
  source 1..20: mol_type = other DNA
accccagcaacccgaccaca

SEQ ID NO: 20230 - DNA, 20 bp, synthetic construct
  source 1..20: mol_type = other DNA
caccccagcaacccgaccac

SEQ ID NO: 20231 - DNA, 20 bp, synthetic construct
  source 1..20: mol_type = other DNA
ccaccccagcaacccgacca

SEQ ID NO: 20232 - DNA, 20 bp, synthetic construct
  source 1..20: mol_type = other DNA
accaccccagcaacccgacc

SEQ ID NO: 20233 - DNA, 20 bp, synthetic construct
  source 1..20: mol_type = other DNA
aaccaccccagcaacccgac

SEQ ID NO: 20234 - DNA, 20 bp, synthetic construct
  source 1..20: mol_type = other DNA
gaaccaccccagcaacccga

SEQ ID NO: 20235 - DNA, 20 bp, synthetic construct
  source 1..20: mol_type = other DNA
agaaccaccccagcaacccg

SEQ ID NO: 20236 - DNA, 20 bp, synthetic construct
  source 1..20: mol_type = other DNA
gagaaccaccccagcaaccc

SEQ ID NO: 20237 - DNA, 20 bp, synthetic construct
  source 1..20: mol_type = other DNA
tgagaaccaccccagcaacc

SEQ ID NO: 20238 - DNA, 20 bp, synthetic construct
  source 1..20: mol_type = other DNA
ctgagaaccaccccagcaac

SEQ ID NO: 20239 - DNA, 20 bp, synthetic construct
  source 1..20: mol_type = other DNA
actgagaaccaccccagcaa

SEQ ID NO: 20240 - DNA, 20 bp, synthetic construct
  source 1..20: mol_type = other DNA
cactgagaaccaccccagca

SEQ ID NO: 20241 - DNA, 20 bp, synthetic construct
  source 1..20: mol_type = other DNA
ccactgagaaccaccccagc

SEQ ID NO: 20242 - DNA, 20 bp, synthetic construct
  source 1..20: mol_type = other DNA
cccactgagaaccaccccag

SEQ ID NO: 20243 - DNA, 20 bp, synthetic construct
  source 1..20: mol_type = other DNA
gcccactgagaaccacccca

SEQ ID NO: 20244 - DNA, 20 bp, synthetic construct
  source 1..20: mol_type = other DNA
ggcccactgagaaccacccc

SEQ ID NO: 20245 - DNA, 20 bp, synthetic construct
  source 1..20: mol_type = other DNA
gggcccactgagaaccaccc

SEQ ID NO: 20246 - DNA, 20 bp, synthetic construct
  source 1..20: mol_type = other DNA
ggggcccactgagaaccacc

SEQ ID NO: 20247 - DNA, 20 bp, synthetic construct
  source 1..20: mol_type = other DNA
aggggcccactgagaaccac

SEQ ID NO: 20248 - DNA, 20 bp, synthetic construct
  source 1..20: mol_type = other DNA
gaggggcccactgagaacca

SEQ ID NO: 20249 - DNA, 20 bp, synthetic construct
  source 1..20: mol_type = other DNA
ggaggggcccactgagaacc

SEQ ID NO: 20250 - DNA, 20 bp, synthetic construct
  source 1..20: mol_type = other DNA
gggaggggcccactgagaac

SEQ ID NO: 20251 - DNA, 20 bp, synthetic construct
  source 1..20: mol_type = other DNA
agggaggggcccactgagaa

SEQ ID NO: 20252 - DNA, 20 bp, synthetic construct
  source 1..20: mol_type = other DNA
aagggaggggcccactgaga

SEQ ID NO: 20253 - DNA, 20 bp, synthetic construct
  source 1..20: mol_type = other DNA
aaagggaggggcccactgag

SEQ ID NO: 20254 - DNA, 20 bp, synthetic construct
  source 1..20: mol_type = other DNA
gaaagggaggggcccactga

SEQ ID NO: 20255 - DNA, 20 bp, synthetic construct
  source 1..20: mol_type = other DNA
ggaaagggaggggcccactg

SEQ ID NO: 20256 - DNA, 20 bp, synthetic construct
  source 1..20: mol_type = other DNA
gggaaagggaggggcccact

SEQ ID NO: 20257 - DNA, 20 bp, synthetic construct
  source 1..20: mol_type = other DNA
agggaaagggaggggcccac

SEQ ID NO: 20258 - DNA, 20 bp, synthetic construct
  source 1..20: mol_type = other DNA
cagggaaagggaggggccca

SEQ ID NO: 20259 - DNA, 20 bp, synthetic construct
  source 1..20: mol_type = other DNA
ccagggaaagggaggggccc

SEQ ID NO: 20260 - DNA, 20 bp, synthetic construct
  source 1..20: mol_type = other DNA
accagggaaagggaggggcc

SEQ ID NO: 20261 - DNA, 20 bp, synthetic construct
  source 1..20: mol_type = other DNA
taccagggaaagggaggggc

SEQ ID NO: 20262 - DNA, 20 bp, synthetic construct
  source 1..20: mol_type = other DNA
ctaccagggaaagggagggg

SEQ ID NO: 20263 - DNA, 20 bp, synthetic construct
  source 1..20: mol_type = other DNA
actaccagggaaagggaggg

SEQ ID NO: 20264 - DNA, 20 bp, synthetic construct
  source 1..20: mol_type = other DNA
aactaccagggaaagggagg

SEQ ID NO: 20265 - DNA, 20 bp, synthetic construct
  source 1..20: mol_type = other DNA
aaactaccagggaaagggag

SEQ ID NO: 20266 - DNA, 20 bp, synthetic construct
  source 1..20: mol_type = other DNA
caaactaccagggaaaggga

SEQ ID NO: 20267 - DNA, 20 bp, synthetic construct
  source 1..20: mol_type = other DNA
ccaaactaccagggaaaggg

SEQ ID NO: 20268 - DNA, 20 bp, synthetic construct
  source 1..20: mol_type = other DNA
tccaaactaccagggaaagg

SEQ ID NO: 20269 - DNA, 20 bp, synthetic construct
  source 1..20: mol_type = other DNA
atccaaactaccagggaaag

SEQ ID NO: 20270 - DNA, 20 bp, synthetic construct
  source 1..20: mol_type = other DNA
aatccaaactaccagggaaa

SEQ ID NO: 20271 - DNA, 20 bp, synthetic construct
  source 1..20: mol_type = other DNA
aaatccaaactaccagggaa

SEQ ID NO: 20272 - DNA, 20 bp, synthetic construct
  source 1..20: mol_type = other DNA
gaaatccaaactaccaggga

SEQ ID NO: 20273 - DNA, 20 bp, synthetic construct
  source 1..20: mol_type = other DNA
agaaatccaaactaccaggg

SEQ ID NO: 20274 - DNA, 20 bp, synthetic construct
  source 1..20: mol_type = other DNA
gagaaatccaaactaccagg

SEQ ID NO: 20275 - DNA, 20 bp, synthetic construct
  source 1..20: mol_type = other DNA
agagaaatccaaactaccag

SEQ ID NO: 20276 - DNA, 20 bp, synthetic construct
  source 1..20: mol_type = other DNA
cagagaaatccaaactacca

SEQ ID NO: 20277 - DNA, 20 bp, synthetic construct
  source 1..20: mol_type = other DNA
ccagagaaatccaaactacc

SEQ ID NO: 20278 - DNA, 20 bp, synthetic construct
  source 1..20: mol_type = other DNA
gccagagaaatccaaactac

SEQ ID NO: 20279 - DNA, 20 bp, synthetic construct
  source 1..20: mol_type = other DNA
agccagagaaatccaaacta

SEQ ID NO: 20280 - DNA, 20 bp, synthetic construct
  source 1..20: mol_type = other DNA
gagccagagaaatccaaact

SEQ ID NO: 20281 - DNA, 20 bp, synthetic construct
  source 1..20: mol_type = other DNA
agagccagagaaatccaaac

SEQ ID NO: 20282 - DNA, 20 bp, synthetic construct
  source 1..20: mol_type = other DNA
cagagccagagaaatccaaa

SEQ ID NO: 20283 - DNA, 20 bp, synthetic construct
  source 1..20: mol_type = other DNA
ccagagccagagaaatccaa

SEQ ID NO: 20284 - DNA, 20 bp, synthetic construct
  source 1..20: mol_type = other DNA
accagagccagagaaatcca

SEQ ID NO: 20285 - DNA, 20 bp, synthetic construct
  source 1..20: mol_type = other DNA
caccagagccagagaaatcc

SEQ ID NO: 20286 - DNA, 20 bp, synthetic construct
  source 1..20: mol_type = other DNA
ccaccagagccagagaaatc

SEQ ID NO: 20287 - DNA, 20 bp, synthetic construct
  source 1..20: mol_type = other DNA
accaccagagccagagaaat

SEQ ID NO: 20288 - DNA, 20 bp, synthetic construct
  source 1..20: mol_type = other DNA
aaccaccagagccagagaaa

SEQ ID NO: 20289 - DNA, 20 bp, synthetic construct
  source 1..20: mol_type = other DNA
aaaccaccagagccagagaa

SEQ ID NO: 20290 - DNA, 20 bp, synthetic construct
  source 1..20: mol_type = other DNA
aaaaccaccagagccagaga

SEQ ID NO: 20291 - DNA, 20 bp, synthetic construct
  source 1..20: mol_type = other DNA
aaaaaccaccagagccagag

SEQ ID NO: 20292 - DNA, 20 bp, synthetic construct
  source 1..20: mol_type = other DNA
aaaaaaccaccagagccaga

SEQ ID NO: 20293 - DNA, 20 bp, synthetic construct
  source 1..20: mol_type = other DNA
taaaaaaccaccagagccag

SEQ ID NO: 20294 - DNA, 20 bp, synthetic construct
  source 1..20: mol_type = other DNA
ctaaaaaaccaccagagcca

SEQ ID NO: 20295 - DNA, 20 bp, synthetic construct
  source 1..20: mol_type = other DNA
actaaaaaaccaccagagcc

SEQ ID NO: 20296 - DNA, 20 bp, synthetic construct
  source 1..20: mol_type = other DNA
tactaaaaaaccaccagagc

SEQ ID NO: 20297 - DNA, 20 bp, synthetic construct
  source 1..20: mol_type = other DNA
gtactaaaaaaccaccagag

SEQ ID NO: 20298 - DNA, 20 bp, synthetic construct
  source 1..20: mol_type = other DNA
agtactaaaaaaccaccaga

SEQ ID NO: 20299 - DNA, 20 bp, synthetic construct
  source 1..20: mol_type = other DNA
gagtactaaaaaaccaccag

SEQ ID NO: 20300 - DNA, 20 bp, synthetic construct
  source 1..20: mol_type = other DNA
tgagtactaaaaaaccacca

SEQ ID NO: 20301 - DNA, 20 bp, synthetic construct
  source 1..20: mol_type = other DNA
atgagtactaaaaaaccacc

SEQ ID NO: 20302 - DNA, 20 bp, synthetic construct
  source 1..20: mol_type = other DNA
aatgagtactaaaaaaccac

SEQ ID NO: 20303 - DNA, 20 bp, synthetic construct
  source 1..20: mol_type = other DNA
gaatgagtactaaaaaacca

SEQ ID NO: 20304 - DNA, 20 bp, synthetic construct
  source 1..20: mol_type = other DNA
agaatgagtactaaaaaacc

SEQ ID NO: 20305 - DNA, 20 bp, synthetic construct
  source 1..20: mol_type = other DNA
tagaatgagtactaaaaaac

SEQ ID NO: 20306 - DNA, 20 bp, synthetic construct
  source 1..20: mol_type = other DNA
atagaatgagtactaaaaaa

SEQ ID NO: 20307 - DNA, 20 bp, synthetic construct
  source 1..20: mol_type = other DNA
aatagaatgagtactaaaaa

SEQ ID NO: 20308 - DNA, 20 bp, synthetic construct
  source 1..20: mol_type = other DNA
aaatagaatgagtactaaaa

SEQ ID NO: 20309 - DNA, 20 bp, synthetic construct
  source 1..20: mol_type = other DNA
taaatagaatgagtactaaa

SEQ ID NO: 20310 - DNA, 20 bp, synthetic construct
  source 1..20: mol_type = other DNA
gtaaatagaatgagtactaa

SEQ ID NO: 20311 - DNA, 20 bp, synthetic construct
  source 1..20: mol_type = other DNA
cgtaaatagaatgagtacta

SEQ ID NO: 20312 - DNA, 20 bp, synthetic construct
  source 1..20: mol_type = other DNA
ccgtaaatagaatgagtact

SEQ ID NO: 20313 - DNA, 20 bp, synthetic construct
  source 1..20: mol_type = other DNA
cccgtaaatagaatgagtac

SEQ ID NO: 20314 - DNA, 20 bp, synthetic construct
  source 1..20: mol_type = other DNA
acccgtaaatagaatgagta

SEQ ID NO: 20315 - DNA, 20 bp, synthetic construct
  source 1..20: mol_type = other DNA
cacccgtaaatagaatgagt

SEQ ID NO: 20316 - DNA, 20 bp, synthetic construct
  source 1..20: mol_type = other DNA
tcacccgtaaatagaatgag

SEQ ID NO: 20317 - DNA, 20 bp, synthetic construct
  source 1..20: mol_type = other DNA
ttcacccgtaaatagaatga

SEQ ID NO: 20318 - DNA, 20 bp, synthetic construct
  source 1..20: mol_type = other DNA
cttcacccgtaaatagaatg

SEQ ID NO: 20319 - DNA, 20 bp, synthetic construct
  source 1..20: mol_type = other DNA
tcttcacccgtaaatagaat

SEQ ID NO: 20320 - DNA, 20 bp, synthetic construct
  source 1..20: mol_type = other DNA
ttcttcacccgtaaatagaa

SEQ ID NO: 20321 - DNA, 20 bp, synthetic construct
  source 1..20: mol_type = other DNA
tttcttcacccgtaaataga

SEQ ID NO: 20322 - DNA, 20 bp, synthetic construct
  source 1..20: mol_type = other DNA
atttcttcacccgtaaatag

SEQ ID NO: 20323 - DNA, 20 bp, synthetic construct
  source 1..20: mol_type = other DNA
aatttcttcacccgtaaata

SEQ ID NO: 20324 - DNA, 20 bp, synthetic construct
  source 1..20: mol_type = other DNA
caatttcttcacccgtaaat

SEQ ID NO: 20325 - DNA, 20 bp, synthetic construct
  source 1..20: mol_type = other DNA
tcaatttcttcacccgtaaa

SEQ ID NO: 20326 - DNA, 20 bp, synthetic construct
  source 1..20: mol_type = other DNA
ctcaatttcttcacccgtaa

SEQ ID NO: 20327 - DNA, 20 bp, synthetic construct
  source 1..20: mol_type = other DNA
tctcaatttcttcacccgta

SEQ ID NO: 20328 - DNA, 20 bp, synthetic construct
  source 1..20: mol_type = other DNA
gtctcaatttcttcacccgt

SEQ ID NO: 20329 - DNA, 20 bp, synthetic construct
  source 1..20: mol_type = other DNA
ggtctcaatttcttcacccg

SEQ ID NO: 20330 - DNA, 20 bp, synthetic construct
  source 1..20: mol_type = other DNA
tggtctcaatttcttcaccc

SEQ ID NO: 20331 - DNA, 20 bp, synthetic construct
  source 1..20: mol_type = other DNA
ttggtctcaatttcttcacc

SEQ ID NO: 20332 - DNA, 20 bp, synthetic construct
  source 1..20: mol_type = other DNA
cttggtctcaatttcttcac

SEQ ID NO: 20333 - DNA, 20 bp, synthetic construct
  source 1..20: mol_type = other DNA
tcttggtctcaatttcttca

SEQ ID NO: 20334 - DNA, 20 bp, synthetic construct
  source 1..20: mol_type = other DNA
ctcttggtctcaatttcttc

SEQ ID NO: 20335 - DNA, 20 bp, synthetic construct
  source 1..20: mol_type = other DNA
cctcttggtctcaatttctt

SEQ ID NO: 20336 - DNA, 20 bp, synthetic construct
  source 1..20: mol_type = other DNA
ccctcttggtctcaatttct

SEQ ID NO: 20337 - DNA, 20 bp, synthetic construct
  source 1..20: mol_type = other DNA
accctcttggtctcaatttc

SEQ ID NO: 20338 - DNA, 20 bp, synthetic construct
  source 1..20: mol_type = other DNA
aaccctcttggtctcaattt

SEQ ID NO: 20339 - DNA, 20 bp, synthetic construct
  source 1..20: mol_type = other DNA
taaccctcttggtctcaatt

SEQ ID NO: 20340 - DNA, 20 bp, synthetic construct
  source 1..20: mol_type = other DNA
ataaccctcttggtctcaat

SEQ ID NO: 20341 - DNA, 20 bp, synthetic construct
  source 1..20: mol_type = other DNA
aataaccctcttggtctcaa

SEQ ID NO: 20342 - DNA, 20 bp, synthetic construct
  source 1..20: mol_type = other DNA
aaataaccctcttggtctca

SEQ ID NO: 20343 - DNA, 20 bp, synthetic construct
  source 1..20: mol_type = other DNA
taaataaccctcttggtctc

SEQ ID NO: 20344 - DNA, 20 bp, synthetic construct
  source 1..20: mol_type = other DNA
gtaaataaccctcttggtct

SEQ ID NO: 20345 - DNA, 20 bp, synthetic construct
  source 1..20: mol_type = other DNA
ggtaaataaccctcttggtc

SEQ ID NO: 20346 - DNA, 20 bp, synthetic construct
  source 1..20: mol_type = other DNA
tggtaaataaccctcttggt

SEQ ID NO: 20347 - DNA, 20 bp, synthetic construct
  source 1..20: mol_type = other DNA
ctggtaaataaccctcttgg

SEQ ID NO: 20348 - DNA, 20 bp, synthetic construct
  source 1..20: mol_type = other DNA
tctggtaaataaccctcttg

SEQ ID NO: 20349 - DNA, 20 bp, synthetic construct
  source 1..20: mol_type = other DNA
ctctggtaaataaccctctt

SEQ ID NO: 20350 - DNA, 20 bp, synthetic construct
  source 1..20: mol_type = other DNA
actctggtaaataaccctct

SEQ ID NO: 20351 - DNA, 20 bp, synthetic construct
  source 1..20: mol_type = other DNA
tactctggtaaataaccctc

SEQ ID NO: 20352 - DNA, 20 bp, synthetic construct
  source 1..20: mol_type = other DNA
atactctggtaaataaccct

SEQ ID NO: 20353 - DNA, 20 bp, synthetic construct
  source 1..20: mol_type = other DNA
gatactctggtaaataaccc

SEQ ID NO: 20354 - DNA, 20 bp, synthetic construct
  source 1..20: mol_type = other DNA
agatactctggtaaataacc

SEQ ID NO: 20355 - DNA, 20 bp, synthetic construct
  source 1..20: mol_type = other DNA
gagatactctggtaaataac

SEQ ID NO: 20356 - DNA, 20 bp, synthetic construct
  source 1..20: mol_type = other DNA
tgagatactctggtaaataa

SEQ ID NO: 20357 - DNA, 20 bp, synthetic construct
  source 1..20: mol_type = other DNA
atgagatactctggtaaata

SEQ ID NO: 20358 - DNA, 20 bp, synthetic construct
  source 1..20: mol_type = other DNA
gatgagatactctggtaaat

SEQ ID NO: 20359 - DNA, 20 bp, synthetic construct
  source 1..20: mol_type = other DNA
tgatgagatactctggtaaa

SEQ ID NO: 20360 - DNA, 20 bp, synthetic construct
  source 1..20: mol_type = other DNA
atgatgagatactctggtaa

SEQ ID NO: 20361 - DNA, 20 bp, synthetic construct
  source 1..20: mol_type = other DNA
aatgatgagatactctggta

SEQ ID NO: 20362 - DNA, 20 bp, synthetic construct
  source 1..20: mol_type = other DNA
caatgatgagatactctggt

SEQ ID NO: 20363 - DNA, 20 bp, synthetic construct
  source 1..20: mol_type = other DNA
ccaatgatgagatactctgg

SEQ ID NO: 20364 - DNA, 20 bp, synthetic construct
  source 1..20: mol_type = other DNA
gccaatgatgagatactctg

SEQ ID NO: 20365 - DNA, 20 bp, synthetic construct
  source 1..20: mol_type = other DNA
agccaatgatgagatactct

SEQ ID NO: 20366 - DNA, 20 bp, synthetic construct
  source 1..20: mol_type = other DNA
cagccaatgatgagatactc

SEQ ID NO: 20367 - DNA, 20 bp, synthetic construct
  source 1..20: mol_type = other DNA
gcagccaatgatgagatact

SEQ ID NO: 20368 - DNA, 20 bp, synthetic construct
  source 1..20: mol_type = other DNA
tgcagccaatgatgagatac

SEQ ID NO: 20369 - DNA, 20 bp, synthetic construct
  source 1..20: mol_type = other DNA
atgcagccaatgatgagata

SEQ ID NO: 20370 - DNA, 20 bp, synthetic construct
  source 1..20: mol_type = other DNA
tatgcagccaatgatgagat

SEQ ID NO: 20371 - DNA, 20 bp, synthetic construct
  source 1..20: mol_type = other DNA
ttatgcagccaatgatgaga

SEQ ID NO: 20372 - DNA, 20 bp, synthetic construct
  source 1..20: mol_type = other DNA
gttatgcagccaatgatgag

SEQ ID NO: 20373 - DNA, 20 bp, synthetic construct
  source 1..20: mol_type = other DNA
agttatgcagccaatgatga

SEQ ID NO: 20374 - DNA, 20 bp, synthetic construct
  source 1..20: mol_type = other DNA
cagttatgcagccaatgatg

SEQ ID NO: 20375 - DNA, 20 bp, synthetic construct
  source 1..20: mol_type = other DNA
ccagttatgcagccaatgat

SEQ ID NO: 20376 - DNA, 20 bp, synthetic construct
  source 1..20: mol_type = other DNA
gccagttatgcagccaatga

SEQ ID NO: 20377 - DNA, 20 bp, synthetic construct
  source 1..20: mol_type = other DNA
tgccagttatgcagccaatg

SEQ ID NO: 20378 - DNA, 20 bp, synthetic construct
  source 1..20: mol_type = other DNA
atgccagttatgcagccaat

SEQ ID NO: 20379 - DNA, 20 bp, synthetic construct
  source 1..20: mol_type = other DNA
aatgccagttatgcagccaa

SEQ ID NO: 20380 - DNA, 20 bp, synthetic construct
  source 1..20: mol_type = other DNA
taatgccagttatgcagcca

SEQ ID NO: 20381 - DNA, 20 bp, synthetic construct
  source 1..20: mol_type = other DNA
ctaatgccagttatgcagcc

SEQ ID NO: 20382 - DNA, 20 bp, synthetic construct
  source 1..20: mol_type = other DNA
tctaatgccagttatgcagc

SEQ ID NO: 20383 - DNA, 20 bp, synthetic construct
  source 1..20: mol_type = other DNA
ttctaatgccagttatgcag

SEQ ID NO: 20384 - DNA, 20 bp, synthetic construct
  source 1..20: mol_type = other DNA
attctaatgccagttatgca

SEQ ID NO: 20385 - DNA, 20 bp, synthetic construct
  source 1..20: mol_type = other DNA
gattctaatgccagttatgc

SEQ ID NO: 20386 - DNA, 20 bp, synthetic construct
  source 1..20: mol_type = other DNA
agattctaatgccagttatg

SEQ ID NO: 20387 - DNA, 20 bp, synthetic construct
  source 1..20: mol_type = other DNA
cagattctaatgccagttat

SEQ ID NO: 20388 - DNA, 20 bp, synthetic construct
  source 1..20: mol_type = other DNA
tcagattctaatgccagtta

SEQ ID NO: 20389 - DNA, 20 bp, synthetic construct
  source 1..20: mol_type = other DNA
atcagattctaatgccagtt

SEQ ID NO: 20390 - DNA, 20 bp, synthetic construct
  source 1..20: mol_type = other DNA
catcagattctaatgccagt

SEQ ID NO: 20391 - DNA, 20 bp, synthetic construct
  source 1..20: mol_type = other DNA
acatcagattctaatgccag

SEQ ID NO: 20392 - DNA, 20 bp, synthetic construct
  source 1..20: mol_type = other DNA
tacatcagattctaatgcca

SEQ ID NO: 20393 - DNA, 20 bp, synthetic construct
  source 1..20: mol_type = other DNA
gtacatcagattctaatgcc

SEQ ID NO: 20394 - DNA, 20 bp, synthetic construct
  source 1..20: mol_type = other DNA
agtacatcagattctaatgc

SEQ ID NO: 20395 - DNA, 20 bp, synthetic construct
  source 1..20: mol_type = other DNA
aagtacatcagattctaatg

SEQ ID NO: 20396 - DNA, 20 bp, synthetic construct
  source 1..20: mol_type = other DNA
aaagtacatcagattctaat

SEQ ID NO: 20397 - DNA, 20 bp, synthetic construct
  source 1..20: mol_type = other DNA
aaaagtacatcagattctaa

SEQ ID NO: 20398 - DNA, 20 bp, synthetic construct
  source 1..20: mol_type = other DNA
taaaagtacatcagattcta

SEQ ID NO: 20399 - DNA, 20 bp, synthetic construct
  source 1..20: mol_type = other DNA
ataaaagtacatcagattct

SEQ ID NO: 20400 - DNA, 20 bp, synthetic construct
  source 1..20: mol_type = other DNA
aataaaagtacatcagattc

SEQ ID NO: 20401 - DNA, 20 bp, synthetic construct
  source 1..20: mol_type = other DNA
aaataaaagtacatcagatt

SEQ ID NO: 20402 - DNA, 20 bp, synthetic construct
  source 1..20: mol_type = other DNA
gaaataaaagtacatcagat

SEQ ID NO: 20403 - DNA, 20 bp, synthetic construct
  source 1..20: mol_type = other DNA
agaaataaaagtacatcaga

SEQ ID NO: 20404 - DNA, 20 bp, synthetic construct
  source 1..20: mol_type = other DNA
tagaaataaaagtacatcag

SEQ ID NO: 20405 - DNA, 20 bp, synthetic construct
  source 1..20: mol_type = other DNA
ttagaaataaaagtacatca

SEQ ID NO: 20406 - DNA, 20 bp, synthetic construct
  source 1..20: mol_type = other DNA
attagaaataaaagtacatc

SEQ ID NO: 20407 - DNA, 20 bp, synthetic construct
  source 1..20: mol_type = other DNA
tattagaaataaaagtacat

SEQ ID NO: 20408 - DNA, 20 bp, synthetic construct
  source 1..20: mol_type = other DNA
gtattagaaataaaagtaca

SEQ ID NO: 20409 - DNA, 20 bp, synthetic construct
  source 1..20: mol_type = other DNA
tgtattagaaataaaagtac

SEQ ID NO: 20410 - DNA, 20 bp, synthetic construct
  source 1..20: mol_type = other DNA
atgtattagaaataaaagta

SEQ ID NO: 20411 - DNA, 20 bp, synthetic construct
  source 1..20: mol_type = other DNA
aatgtattagaaataaaagt

SEQ ID NO: 20412 - DNA, 20 bp, synthetic construct
  source 1..20: mol_type = other DNA
aaatgtattagaaataaaag

SEQ ID NO: 20413 - DNA, 20 bp, synthetic construct
  source 1..20: mol_type = other DNA
gaaatgtattagaaataaaa

SEQ ID NO: 20414 - DNA, 20 bp, synthetic construct
  source 1..20: mol_type = other DNA
agaaatgtattagaaataaa

SEQ ID NO: 20415 - DNA, 20 bp, synthetic construct
  source 1..20: mol_type = other DNA
aagaaatgtattagaaataa

SEQ ID NO: 20416 - DNA, 20 bp, synthetic construct
  source 1..20: mol_type = other DNA
aaagaaatgtattagaaata

SEQ ID NO: 20417 - DNA, 20 bp, synthetic construct
  source 1..20: mol_type = other DNA
aaaagaaatgtattagaaat

SEQ ID NO: 20418 - DNA, 20 bp, synthetic construct
  source 1..20: mol_type = other DNA
aaaaagaaatgtattagaaa

SEQ ID NO: 20419 - DNA, 20 bp, synthetic construct
  source 1..20: mol_type = other DNA
aaaaaagaaatgtattagaa

SEQ ID NO: 20420 - DNA, 20 bp, synthetic construct
  source 1..20: mol_type = other DNA
aaaaaaagaaatgtattaga

SEQ ID NO: 20421 - DNA, 20 bp, synthetic construct
  source 1..20: mol_type = other DNA
aaaaaaaagaaatgtattag

SEQ ID NO: 20422 - DNA, 20 bp, synthetic construct
  source 1..20: mol_type = other DNA
aaaaaaaaagaaatgtatta

SEQ ID NO: 20423 - DNA, 20 bp, synthetic construct
  source 1..20: mol_type = other DNA
aaaaaaaaaagaaatgtatt

SEQ ID NO: 20424 - DNA, 20 bp, synthetic construct
  source 1..20: mol_type = other DNA
aaaaaaaaaaagaaatgtat

SEQ ID NO: 20425 - DNA, 20 bp, synthetic construct
  source 1..20: mol_type = other DNA
aaaaaaaaaaaagaaatgta

SEQ ID NO: 20426 - DNA, 20 bp, synthetic construct
  source 1..20: mol_type = other DNA
aaaaaaaaaaaaagaaatgt

SEQ ID NO: 20427 - DNA, 20 bp, synthetic construct
  source 1..20: mol_type = other DNA
aaaaaaaaaaaaaagaaatg

SEQ ID NO: 20428 - DNA, 20 bp, synthetic construct
  source 1..20: mol_type = other DNA
aaaaaaaaaaaaaaagaaat

SEQ ID NO: 20429 - DNA, 20 bp, synthetic construct
  source 1..20: mol_type = other DNA
aaaaaaaaaaaaaaaagaaa

SEQ ID NO: 20430 - DNA, 20 bp, synthetic construct
  source 1..20: mol_type = other DNA
aaaaaaaaaaaaaaaaagaa

SEQ ID NO: 20431 - DNA, 20 bp, synthetic construct
  source 1..20: mol_type = other DNA
aaaaaaaaaaaaaaaaaaga

SEQ ID NO: 20432 - DNA, 20 bp, synthetic construct
  source 1..20: mol_type = other DNA
aaaaaaaaaaaaaaaaaaag

SEQ ID NO: 20433 - DNA, 20 bp, synthetic construct
  source 1..20: mol_type = other DNA
caaaaaaaaaaaaaaaaaaa

SEQ ID NO: 20434 - DNA, 20 bp, synthetic construct
  source 1..20: mol_type = other DNA
tcaaaaaaaaaaaaaaaaaa

SEQ ID NO: 20435 - DNA, 20 bp, synthetic construct
  source 1..20: mol_type = other DNA
ctcaaaaaaaaaaaaaaaaa

SEQ ID NO: 20436 - DNA, 20 bp, synthetic construct
  source 1..20: mol_type = other DNA
tctcaaaaaaaaaaaaaaaa

SEQ ID NO: 20437 - DNA, 20 bp, synthetic construct
  source 1..20: mol_type = other DNA
atctcaaaaaaaaaaaaaaa

SEQ ID NO: 20438 - DNA, 20 bp, synthetic construct
  source 1..20: mol_type = other DNA
catctcaaaaaaaaaaaaaa

SEQ ID NO: 20439 - DNA, 20 bp, synthetic construct
  source 1..20: mol_type = other DNA
ccatctcaaaaaaaaaaaaa

SEQ ID NO: 20440 - DNA, 20 bp, synthetic construct
  source 1..20: mol_type = other DNA
tccatctcaaaaaaaaaaaa

SEQ ID NO: 20441 - DNA, 20 bp, synthetic construct
  source 1..20: mol_type = other DNA
ctccatctcaaaaaaaaaaa

SEQ ID NO: 20442 - DNA, 20 bp, synthetic construct
  source 1..20: mol_type = other DNA
actccatctcaaaaaaaaaa

SEQ ID NO: 20443 - DNA, 20 bp, synthetic construct
  source 1..20: mol_type = other DNA
gactccatctcaaaaaaaaa

SEQ ID NO: 20444 - DNA, 20 bp, synthetic construct
  source 1..20: mol_type = other DNA
agactccatctcaaaaaaaa

SEQ ID NO: 20445 - DNA, 20 bp, synthetic construct
  source 1..20: mol_type = other DNA
gagactccatctcaaaaaaa

SEQ ID NO: 20446 - DNA, 20 bp, synthetic construct
  source 1..20: mol_type = other DNA
cgagactccatctcaaaaaa

SEQ ID NO: 20447 - DNA, 20 bp, synthetic construct
  source 1..20: mol_type = other DNA
gcgagactccatctcaaaaa

SEQ ID NO: 20448 - DNA, 20 bp, synthetic construct
  source 1..20: mol_type = other DNA
agcgagactccatctcaaaa

SEQ ID NO: 20449 - DNA, 20 bp, synthetic construct
  source 1..20: mol_type = other DNA
gagcgagactccatctcaaa

SEQ ID NO: 20450 - DNA, 20 bp, synthetic construct
  source 1..20: mol_type = other DNA
agagcgagactccatctcaa

SEQ ID NO: 20451 - DNA, 20 bp, synthetic construct
  source 1..20: mol_type = other DNA
cagagcgagactccatctca

SEQ ID NO: 20452 - DNA, 20 bp, synthetic construct
  source 1..20: mol_type = other DNA
acagagcgagactccatctc

SEQ ID NO: 20453 - DNA, 20 bp, synthetic construct
  source 1..20: mol_type = other DNA
aacagagcgagactccatct

SEQ ID NO: 20454 - DNA, 20 bp, synthetic construct
  source 1..20: mol_type = other DNA
caacagagcgagactccatc

SEQ ID NO: 20455 - DNA, 20 bp, synthetic construct
  source 1..20: mol_type = other DNA
gcaacagagcgagactccat

SEQ ID NO: 20456 - DNA, 20 bp, synthetic construct
  source 1..20: mol_type = other DNA
ggcaacagagcgagactcca

SEQ ID NO: 20457 - DNA, 20 bp, synthetic construct
  source 1..20: mol_type = other DNA
cggcaacagagcgagactcc

SEQ ID NO: 20458 - DNA, 20 bp, synthetic construct
  source 1..20: mol_type = other DNA
tcggcaacagagcgagactc

SEQ ID NO: 20459 - DNA, 20 bp, synthetic construct
  source 1..20: mol_type = other DNA
ctcggcaacagagcgagact

SEQ ID NO: 20460 - DNA, 20 bp, synthetic construct
  source 1..20: mol_type = other DNA
gctcggcaacagagcgagac

SEQ ID NO: 20461 - DNA, 20 bp, synthetic construct
  source 1..20: mol_type = other DNA
ggctcggcaacagagcgaga

SEQ ID NO: 20462 - DNA, 20 bp, synthetic construct
  source 1..20: mol_type = other DNA
aggctcggcaacagagcgag

SEQ ID NO: 20463 - DNA, 20 bp, synthetic construct
  source 1..20: mol_type = other DNA
taggctcggcaacagagcga

SEQ ID NO: 20464 - DNA, 20 bp, synthetic construct
  source 1..20: mol_type = other DNA
ctaggctcggcaacagagcg

SEQ ID NO: 20465 - DNA, 20 bp, synthetic construct
  source 1..20: mol_type = other DNA
tctaggctcggcaacagagc

SEQ ID NO: 20466 - DNA, 20 bp, synthetic construct
  source 1..20: mol_type = other DNA
ctctaggctcggcaacagag

SEQ ID NO: 20467 - DNA, 20 bp, synthetic construct
  source 1..20: mol_type = other DNA
actctaggctcggcaacaga

SEQ ID NO: 20468 - DNA, 20 bp, synthetic construct
  source 1..20: mol_type = other DNA
cactctaggctcggcaacag

SEQ ID NO: 20469 - DNA, 20 bp, synthetic construct
  source 1..20: mol_type = other DNA
gcactctaggctcggcaaca

SEQ ID NO: 20470 - DNA, 20 bp, synthetic construct
  source 1..20: mol_type = other DNA
tgcactctaggctcggcaac

SEQ ID NO: 20471 - DNA, 20 bp, synthetic construct
  source 1..20: mol_type = other DNA
ctgcactctaggctcggcaa

SEQ ID NO: 20472 - DNA, 20 bp, synthetic construct
  source 1..20: mol_type = other DNA
actgcactctaggctcggca

SEQ ID NO: 20473 - DNA, 20 bp, synthetic construct
  source 1..20: mol_type = other DNA
cactgcactctaggctcggc

SEQ ID NO: 20474 - DNA, 20 bp, synthetic construct
  source 1..20: mol_type = other DNA
ccactgcactctaggctcgg

SEQ ID NO: 20475 - DNA, 20 bp, synthetic construct
  source 1..20: mol_type = other DNA
cccactgcactctaggctcg

SEQ ID NO: 20476 - DNA, 20 bp, synthetic construct
  source 1..20: mol_type = other DNA
ccccactgcactctaggctc

SEQ ID NO: 20477 - DNA, 20 bp, synthetic construct
  source 1..20: mol_type = other DNA
gccccactgcactctaggct

SEQ ID NO: 20478 - DNA, 20 bp, synthetic construct
  source 1..20: mol_type = other DNA
tgccccactgcactctaggc

SEQ ID NO: 20479 - DNA, 20 bp, synthetic construct
  source 1..20: mol_type = other DNA
ttgccccactgcactctagg

SEQ ID NO: 20480 - DNA, 20 bp, synthetic construct
  source 1..20: mol_type = other DNA
attgccccactgcactctag

SEQ ID NO: 20481 - DNA, 20 bp, synthetic construct
  source 1..20: mol_type = other DNA
gattgccccactgcactcta

SEQ ID NO: 20482 - DNA, 20 bp, synthetic construct
  source 1..20: mol_type = other DNA
agattgccccactgcactct

SEQ ID NO: 20483 - DNA, 20 bp, synthetic construct
  source 1..20: mol_type = other DNA
aagattgccccactgcactc

SEQ ID NO: 20484 - DNA, 20 bp, synthetic construct
  source 1..20: mol_type = other DNA
caagattgccccactgcact

SEQ ID NO: 20485 - DNA, 20 bp, synthetic construct
  source 1..20: mol_type = other DNA
ccaagattgccccactgcac

SEQ ID NO: 20486 - DNA, 20 bp, synthetic construct
  source 1..20: mol_type = other DNA
gccaagattgccccactgca

SEQ ID NO: 20487 - DNA, 20 bp, synthetic construct
  source 1..20: mol_type = other DNA
agccaagattgccccactgc

SEQ ID NO: 20488 - DNA, 20 bp, synthetic construct
  source 1..20: mol_type = other DNA
gagccaagattgccccactg

SEQ ID NO: 20489 - DNA, 20 bp, synthetic construct
  source 1..20: mol_type = other DNA
ggagccaagattgccccact

SEQ ID NO: 20490 - DNA, 20 bp, synthetic construct
  source 1..20: mol_type = other DNA
aggagccaagattgccccac

SEQ ID NO: 20491 - DNA, 20 bp, synthetic construct
  source 1..20: mol_type = other DNA
aaggagccaagattgcccca

SEQ ID NO: 20492 - DNA, 20 bp, synthetic construct
  source 1..20: mol_type = other DNA
caaggagccaagattgcccc

SEQ ID NO: 20493 - DNA, 20 bp, synthetic construct
  source 1..20: mol_type = other DNA
gcaaggagccaagattgccc

SEQ ID NO: 20494 - DNA, 20 bp, synthetic construct
  source 1..20: mol_type = other DNA
tgcaaggagccaagattgcc

SEQ ID NO: 20495 - DNA, 20 bp, synthetic construct
  source 1..20: mol_type = other DNA
ttgcaaggagccaagattgc

SEQ ID NO: 20496 - DNA, 20 bp, synthetic construct
  source 1..20: mol_type = other DNA
gttgcaaggagccaagattg

SEQ ID NO: 20497 - DNA, 20 bp, synthetic construct
  source 1..20: mol_type = other DNA
ggttgcaaggagccaagatt

SEQ ID NO: 20498 - DNA, 20 bp, synthetic construct
  source 1..20: mol_type = other DNA
aggttgcaaggagccaagat

SEQ ID NO: 20499 - DNA, 20 bp, synthetic construct
  source 1..20: mol_type = other DNA
gaggttgcaaggagccaaga

SEQ ID NO: 20500 - DNA, 20 bp, synthetic construct
  source 1..20: mol_type = other DNA
ggaggttgcaaggagccaag

SEQ ID NO: 20501 - DNA, 20 bp, synthetic construct
  source 1..20: mol_type = other DNA
tggaggttgcaaggagccaa

SEQ ID NO: 20502 - DNA, 20 bp, synthetic construct
  source 1..20: mol_type = other DNA
gtggaggttgcaaggagcca

SEQ ID NO: 20503 - DNA, 20 bp, synthetic construct
  source 1..20: mol_type = other DNA
ggtggaggttgcaaggagcc

SEQ ID NO: 20504 - DNA, 20 bp, synthetic construct
  source 1..20: mol_type = other DNA
aggtggaggttgcaaggagc

SEQ ID NO: 20505 - DNA, 20 bp, synthetic construct
  source 1..20: mol_type = other DNA
gaggtggaggttgcaaggag

SEQ ID NO: 20506 - DNA, 20 bp, synthetic construct
  source 1..20: mol_type = other DNA
ggaggtggaggttgcaagga

SEQ ID NO: 20507 - DNA, 20 bp, synthetic construct
  source 1..20: mol_type = other DNA
aggaggtggaggttgcaagg

SEQ ID NO: 20508 - DNA, 20 bp, synthetic construct
  source 1..20: mol_type = other DNA
caggaggtggaggttgcaag

SEQ ID NO: 20509 - DNA, 20 bp, synthetic construct
  source 1..20: mol_type = other DNA
ccaggaggtggaggttgcaa

SEQ ID NO: 20510 - DNA, 20 bp, synthetic construct
  source 1..20: mol_type = other DNA
cccaggaggtggaggttgca

SEQ ID NO: 20511 - DNA, 20 bp, synthetic construct
  source 1..20: mol_type = other DNA
acccaggaggtggaggttgc

SEQ ID NO: 20512 - DNA, 20 bp, synthetic construct
  source 1..20: mol_type = other DNA
aacccaggaggtggaggttg

SEQ ID NO: 20513 - DNA, 20 bp, synthetic construct
  source 1..20: mol_type = other DNA
gaacccaggaggtggaggtt

SEQ ID NO: 20514 - DNA, 20 bp, synthetic construct
  source 1..20: mol_type = other DNA
tgaacccaggaggtggaggt

SEQ ID NO: 20515 - DNA, 20 bp, synthetic construct
  source 1..20: mol_type = other DNA
ttgaacccaggaggtggagg

SEQ ID NO: 20516 - DNA, 20 bp, synthetic construct
  source 1..20: mol_type = other DNA
cttgaacccaggaggtggag

SEQ ID NO: 20517 - DNA, 20 bp, synthetic construct
  source 1..20: mol_type = other DNA
gcttgaacccaggaggtgga

SEQ ID NO: 20518 - DNA, 20 bp, synthetic construct
  source 1..20: mol_type = other DNA
agcttgaacccaggaggtgg

SEQ ID NO: 20519 - DNA, 20 bp, synthetic construct
  source 1..20: mol_type = other DNA
tagcttgaacccaggaggtg

SEQ ID NO: 20520 - DNA, 20 bp, synthetic construct
  source 1..20: mol_type = other DNA
atagcttgaacccaggaggt

SEQ ID NO: 20521 - DNA, 20 bp, synthetic construct
  source 1..20: mol_type = other DNA
aatagcttgaacccaggagg

SEQ ID NO: 20522 - DNA, 20 bp, synthetic construct
  source 1..20: mol_type = other DNA
gaatagcttgaacccaggag

SEQ ID NO: 20523 - DNA, 20 bp, synthetic construct
  source 1..20: mol_type = other DNA
ggaatagcttgaacccagga

SEQ ID NO: 20524 - DNA, 20 bp, synthetic construct
  source 1..20: mol_type = other DNA
aggaatagcttgaacccagg

SEQ ID NO: 20525 - DNA, 20 bp, synthetic construct
  source 1..20: mol_type = other DNA
caggaatagcttgaacccag

SEQ ID NO: 20526 - DNA, 20 bp, synthetic construct
  source 1..20: mol_type = other DNA
acaggaatagcttgaaccca

SEQ ID NO: 20527 - DNA, 20 bp, synthetic construct
  source 1..20: mol_type = other DNA
gacaggaatagcttgaaccc

SEQ ID NO: 20528 - DNA, 20 bp, synthetic construct
  source 1..20: mol_type = other DNA
agacaggaatagcttgaacc

SEQ ID NO: 20529 - DNA, 20 bp, synthetic construct
  source 1..20: mol_type = other DNA
gagacaggaatagcttgaac

SEQ ID NO: 20530 - DNA, 20 bp, synthetic construct
  source 1..20: mol_type = other DNA
tgagacaggaatagcttgaa

SEQ ID NO: 20531 - DNA, 20 bp, synthetic construct
  source 1..20: mol_type = other DNA
ctgagacaggaatagcttga

SEQ ID NO: 20532 - DNA, 20 bp, synthetic construct
  source 1..20: mol_type = other DNA
gctgagacaggaatagcttg

SEQ ID NO: 20533 - DNA, 20 bp, synthetic construct
  source 1..20: mol_type = other DNA
ggctgagacaggaatagctt

SEQ ID NO: 20534 - DNA, 20 bp, synthetic construct
  source 1..20: mol_type = other DNA
aggctgagacaggaatagct

SEQ ID NO: 20535 - DNA, 20 bp, synthetic construct
  source 1..20: mol_type = other DNA
gaggctgagacaggaatagc

SEQ ID NO: 20536 - DNA, 20 bp, synthetic construct
  source 1..20: mol_type = other DNA
ggaggctgagacaggaatag

SEQ ID NO: 20537 - DNA, 20 bp, synthetic construct
  source 1..20: mol_type = other DNA
gggaggctgagacaggaata

SEQ ID NO: 20538 - DNA, 20 bp, synthetic construct
  source 1..20: mol_type = other DNA
tgggaggctgagacaggaat

SEQ ID NO: 20539 - DNA, 20 bp, synthetic construct
  source 1..20: mol_type = other DNA
ttgggaggctgagacaggaa

SEQ ID NO: 20540 - DNA, 20 bp, synthetic construct
  source 1..20: mol_type = other DNA
cttgggaggctgagacagga

SEQ ID NO: 20541 - DNA, 20 bp, synthetic construct
  source 1..20: mol_type = other DNA
acttgggaggctgagacagg

SEQ ID NO: 20542 - DNA, 20 bp, synthetic construct
  source 1..20: mol_type = other DNA
tacttgggaggctgagacag

SEQ ID NO: 20543 - DNA, 20 bp, synthetic construct
  source 1..20: mol_type = other DNA
ctacttgggaggctgagaca

SEQ ID NO: 20544 - DNA, 20 bp, synthetic construct
  source 1..20: mol_type = other DNA
gctacttgggaggctgagac

SEQ ID NO: 20545 - DNA, 20 bp, synthetic construct
  source 1..20: mol_type = other DNA
agctacttgggaggctgaga

SEQ ID NO: 20546 - DNA, 20 bp, synthetic construct
  source 1..20: mol_type = other DNA
cagctacttgggaggctgag

SEQ ID NO: 20547 - DNA, 20 bp, synthetic construct
  source 1..20: mol_type = other DNA
ccagctacttgggaggctga

SEQ ID NO: 20548 - DNA, 20 bp, synthetic construct
  source 1..20: mol_type = other DNA
cccagctacttgggaggctg

SEQ ID NO: 20549 - DNA, 20 bp, synthetic construct
  source 1..20: mol_type = other DNA
tcccagctacttgggaggct

SEQ ID NO: 20550 - DNA, 20 bp, synthetic construct
  source 1..20: mol_type = other DNA
gtcccagctacttgggaggc

SEQ ID NO: 20551 - DNA, 20 bp, synthetic construct
  source 1..20: mol_type = other DNA
agtcccagctacttgggagg

SEQ ID NO: 20552 - DNA, 20 bp, synthetic construct
  source 1..20: mol_type = other DNA
tagtcccagctacttgggag

SEQ ID NO: 20553 - DNA, 20 bp, synthetic construct
  source 1..20: mol_type = other DNA
gtagtcccagctacttggga

SEQ ID NO: 20554 - DNA, 20 bp, synthetic construct
  source 1..20: mol_type = other DNA
tgtagtcccagctacttggg

SEQ ID NO: 20555 - DNA, 20 bp, synthetic construct
  source 1..20: mol_type = other DNA
ctgtagtcccagctacttgg

SEQ ID NO: 20556 - DNA, 20 bp, synthetic construct
  source 1..20: mol_type = other DNA
cctgtagtcccagctacttg

SEQ ID NO: 20557 - DNA, 20 bp, synthetic construct
  source 1..20: mol_type = other DNA
gcctgtagtcccagctactt

SEQ ID NO: 20558 - DNA, 20 bp, synthetic construct
  source 1..20: mol_type = other DNA
tgcctgtagtcccagctact

SEQ ID NO: 20559 - DNA, 20 bp, synthetic construct
  source 1..20: mol_type = other DNA
gtgcctgtagtcccagctac

SEQ ID NO: 20560 - DNA, 20 bp, synthetic construct
  source 1..20: mol_type = other DNA
ggtgcctgtagtcccagcta

SEQ ID NO: 20561 - DNA, 20 bp, synthetic construct
  source 1..20: mol_type = other DNA
aggtgcctgtagtcccagct

SEQ ID NO: 20562 - DNA, 20 bp, synthetic construct
  source 1..20: mol_type = other DNA
caggtgcctgtagtcccagc

SEQ ID NO: 20563 - DNA, 20 bp, synthetic construct
  source 1..20: mol_type = other DNA
gcaggtgcctgtagtcccag

SEQ ID NO: 20564 - DNA, 20 bp, synthetic construct
  source 1..20: mol_type = other DNA
ggcaggtgcctgtagtccca

SEQ ID NO: 20565 - DNA, 20 bp, synthetic construct
  source 1..20: mol_type = other DNA
tggcaggtgcctgtagtccc

SEQ ID NO: 20566 - DNA, 20 bp, synthetic construct
  source 1..20: mol_type = other DNA
gtggcaggtgcctgtagtcc

SEQ ID NO: 20567 - DNA, 20 bp, synthetic construct
  source 1..20: mol_type = other DNA
ggtggcaggtgcctgtagtc

SEQ ID NO: 20568 - DNA, 20 bp, synthetic construct
  source 1..20: mol_type = other DNA
tggtggcaggtgcctgtagt

SEQ ID NO: 20569 - DNA, 20 bp, synthetic construct
  source 1..20: mol_type = other DNA
gtggtggcaggtgcctgtag

SEQ ID NO: 20570 - DNA, 20 bp, synthetic construct
  source 1..20: mol_type = other DNA
tgtggtggcaggtgcctgta

SEQ ID NO: 20571 - DNA, 20 bp, synthetic construct
  source 1..20: mol_type = other DNA
ctgtggtggcaggtgcctgt

SEQ ID NO: 20572 - DNA, 20 bp, synthetic construct
  source 1..20: mol_type = other DNA
gctgtggtggcaggtgcctg

SEQ ID NO: 20573 - DNA, 20 bp, synthetic construct
  source 1..20: mol_type = other DNA
ggctgtggtggcaggtgcct

SEQ ID NO: 20574 - DNA, 20 bp, synthetic construct
  source 1..20: mol_type = other DNA
cggctgtggtggcaggtgcc

SEQ ID NO: 20575 - DNA, 20 bp, synthetic construct
  source 1..20: mol_type = other DNA
ccggctgtggtggcaggtgc

SEQ ID NO: 20576 - DNA, 20 bp, synthetic construct
  source 1..20: mol_type = other DNA
gccggctgtggtggcaggtg

SEQ ID NO: 20577 - DNA, 20 bp, synthetic construct
  source 1..20: mol_type = other DNA
agccggctgtggtggcaggt

SEQ ID NO: 20578 - DNA, 20 bp, synthetic construct
  source 1..20: mol_type = other DNA
tagccggctgtggtggcagg

SEQ ID NO: 20579 - DNA, 20 bp, synthetic construct
  source 1..20: mol_type = other DNA
ctagccggctgtggtggcag

SEQ ID NO: 20580 - DNA, 20 bp, synthetic construct
  source 1..20: mol_type = other DNA
cctagccggctgtggtggca

SEQ ID NO: 20581 - DNA, 20 bp, synthetic construct
  source 1..20: mol_type = other DNA
acctagccggctgtggtggc

SEQ ID NO: 20582 - DNA, 20 bp, synthetic construct
  source 1..20: mol_type = other DNA
aacctagccggctgtggtgg

SEQ ID NO: 20583 - DNA, 20 bp, synthetic construct
  source 1..20: mol_type = other DNA
aaacctagccggctgtggtg

SEQ ID NO: 20584 - DNA, 20 bp, synthetic construct
  source 1..20: mol_type = other DNA
aaaacctagccggctgtggt

SEQ ID NO: 20585 - DNA, 20 bp, synthetic construct
  source 1..20: mol_type = other DNA
caaaacctagccggctgtgg

SEQ ID NO: 20586 - DNA, 20 bp, synthetic construct
  source 1..20: mol_type = other DNA
acaaaacctagccggctgtg

SEQ ID NO: 20587 - DNA, 20 bp, synthetic construct
  source 1..20: mol_type = other DNA
tacaaaacctagccggctgt

SEQ ID NO: 20588 - DNA, 20 bp, synthetic construct
  source 1..20: mol_type = other DNA
atacaaaacctagccggctg

SEQ ID NO: 20589 - DNA, 20 bp, synthetic construct
  source 1..20: mol_type = other DNA
aatacaaaacctagccggct

SEQ ID NO: 20590 - DNA, 20 bp, synthetic construct
  source 1..20: mol_type = other DNA
aaatacaaaacctagccggc

SEQ ID NO: 20591 - DNA, 20 bp, synthetic construct
  source 1..20: mol_type = other DNA
aaaatacaaaacctagccgg

SEQ ID NO: 20592 - DNA, 20 bp, synthetic construct
  source 1..20: mol_type = other DNA
taaaatacaaaacctagccg

SEQ ID NO: 20593 - DNA, 20 bp, synthetic construct
  source 1..20: mol_type = other DNA
ctaaaatacaaaacctagcc

SEQ ID NO: 20594 - DNA, 20 bp, synthetic construct
  source 1..20: mol_type = other DNA
actaaaatacaaaacctagc

SEQ ID NO: 20595 - DNA, 20 bp, synthetic construct
  source 1..20: mol_type = other DNA
tactaaaatacaaaacctag

SEQ ID NO: 20596 - DNA, 20 bp, synthetic construct
  source 1..20: mol_type = other DNA
ctactaaaatacaaaaccta

SEQ ID NO: 20597 - DNA, 20 bp, synthetic construct
  source 1..20: mol_type = other DNA
tctactaaaatacaaaacct

SEQ ID NO: 20598 - DNA, 20 bp, synthetic construct
  source 1..20: mol_type = other DNA
ctctactaaaatacaaaacc

SEQ ID NO: 20599 - DNA, 20 bp, synthetic construct
  source 1..20: mol_type = other DNA
tctctactaaaatacaaaac

SEQ ID NO: 20600 - DNA, 20 bp, synthetic construct
  source 1..20: mol_type = other DNA
atctctactaaaatacaaaa

SEQ ID NO: 20601 - DNA, 20 bp, synthetic construct
  source 1..20: mol_type = other DNA
catctctactaaaatacaaa

SEQ ID NO: 20602 - DNA, 20 bp, synthetic construct
  source 1..20: mol_type = other DNA
ccatctctactaaaatacaa

SEQ ID NO: 20603 - DNA, 20 bp, synthetic construct
  source 1..20: mol_type = other DNA
cccatctctactaaaataca

SEQ ID NO: 20604 - DNA, 20 bp, synthetic construct
  source 1..20: mol_type = other DNA
ccccatctctactaaaatac

SEQ ID NO: 20605 - DNA, 20 bp, synthetic construct
  source 1..20: mol_type = other DNA
accccatctctactaaaata

SEQ ID NO: 20606 - DNA, 20 bp, synthetic construct
  source 1..20: mol_type = other DNA
taccccatctctactaaaat

SEQ ID NO: 20607 - DNA, 20 bp, synthetic construct
  source 1..20: mol_type = other DNA
ctaccccatctctactaaaa

SEQ ID NO: 20608 - DNA, 20 bp, synthetic construct
  source 1..20: mol_type = other DNA
gctaccccatctctactaaa

SEQ ID NO: 20609 - DNA, 20 bp, synthetic construct
  source 1..20: mol_type = other DNA
tgctaccccatctctactaa

SEQ ID NO: 20610 - DNA, 20 bp, synthetic construct
  source 1..20: mol_type = other DNA
gtgctaccccatctctacta

SEQ ID NO: 20611 - DNA, 20 bp, synthetic construct
  source 1..20: mol_type = other DNA
ggtgctaccccatctctact

SEQ ID NO: 20612 - DNA, 20 bp, synthetic construct
  source 1..20: mol_type = other DNA
tggtgctaccccatctctac

SEQ ID NO: 20613 - DNA, 20 bp, synthetic construct
  source 1..20: mol_type = other DNA
atggtgctaccccatctcta

SEQ ID NO: 20614 - DNA, 20 bp, synthetic construct
  source 1..20: mol_type = other DNA
catggtgctaccccatctct

SEQ ID NO: 20615 - DNA, 20 bp, synthetic construct
  source 1..20: mol_type = other DNA
acatggtgctaccccatctc

SEQ ID NO: 20616 - DNA, 20 bp, synthetic construct
  source 1..20: mol_type = other DNA
aacatggtgctaccccatct

SEQ ID NO: 20617 - DNA, 20 bp, synthetic construct
  source 1..20: mol_type = other DNA
caacatggtgctaccccatc

SEQ ID NO: 20618 - DNA, 20 bp, synthetic construct
  source 1..20: mol_type = other DNA
ccaacatggtgctaccccat

SEQ ID NO: 20619 - DNA, 20 bp, synthetic construct
  source 1..20: mol_type = other DNA
gccaacatggtgctacccca

SEQ ID NO: 20620 - DNA, 20 bp, synthetic construct
  source 1..20: mol_type = other DNA
ggccaacatggtgctacccc

SEQ ID NO: 20621 - DNA, 20 bp, synthetic construct
  source 1..20: mol_type = other DNA
tggccaacatggtgctaccc

SEQ ID NO: 20622 - DNA, 20 bp, synthetic construct
  source 1..20: mol_type = other DNA
ctggccaacatggtgctacc

SEQ ID NO: 20623 - DNA, 20 bp, synthetic construct
  source 1..20: mol_type = other DNA
cctggccaacatggtgctac

SEQ ID NO: 20624 - DNA, 20 bp, synthetic construct
  source 1..20: mol_type = other DNA
gcctggccaacatggtgcta

SEQ ID NO: 20625 - DNA, 20 bp, synthetic construct
  source 1..20: mol_type = other DNA
agcctggccaacatggtgct

SEQ ID NO: 20626 - DNA, 20 bp, synthetic construct
  source 1..20: mol_type = other DNA
cagcctggccaacatggtgc

SEQ ID NO: 20627 - DNA, 20 bp, synthetic construct
  source 1..20: mol_type = other DNA
ccagcctggccaacatggtg

SEQ ID NO: 20628 - DNA, 20 bp, synthetic construct
  source 1..20: mol_type = other DNA
accagcctggccaacatggt

SEQ ID NO: 20629 - DNA, 20 bp, synthetic construct
  source 1..20: mol_type = other DNA
gaccagcctggccaacatgg

SEQ ID NO: 20630 - DNA, 20 bp, synthetic construct
  source 1..20: mol_type = other DNA
agaccagcctggccaacatg

SEQ ID NO: 20631 - DNA, 20 bp, synthetic construct
  source 1..20: mol_type = other DNA
gagaccagcctggccaacat

SEQ ID NO: 20632 - DNA, 20 bp, synthetic construct
  source 1..20: mol_type = other DNA
cgagaccagcctggccaaca

SEQ ID NO: 20633 - DNA, 20 bp, synthetic construct
  source 1..20: mol_type = other DNA
tcgagaccagcctggccaac

SEQ ID NO: 20634 - DNA, 20 bp, synthetic construct
  source 1..20: mol_type = other DNA
ttcgagaccagcctggccaa

SEQ ID NO: 20635 - DNA, 20 bp, synthetic construct
  source 1..20: mol_type = other DNA
gttcgagaccagcctggcca

SEQ ID NO: 20636 - DNA, 20 bp, synthetic construct
  source 1..20: mol_type = other DNA
agttcgagaccagcctggcc

SEQ ID NO: 20637 - DNA, 20 bp, synthetic construct
  source 1..20: mol_type = other DNA
gagttcgagaccagcctggc

SEQ ID NO: 20638 - DNA, 20 bp, synthetic construct
  source 1..20: mol_type = other DNA
tgagttcgagaccagcctgg

SEQ ID NO: 20639 - DNA, 20 bp, synthetic construct
  source 1..20: mol_type = other DNA
atgagttcgagaccagcctg

SEQ ID NO: 20640 - DNA, 20 bp, synthetic construct
  source 1..20: mol_type = other DNA
catgagttcgagaccagcct

SEQ ID NO: 20641 - DNA, 20 bp, synthetic construct
  source 1..20: mol_type = other DNA
tcatgagttcgagaccagcc

SEQ ID NO: 20642 - DNA, 20 bp, synthetic construct
  source 1..20: mol_type = other DNA
gtcatgagttcgagaccagc

SEQ ID NO: 20643 - DNA, 20 bp, synthetic construct
  source 1..20: mol_type = other DNA
ggtcatgagttcgagaccag

SEQ ID NO: 20644 - DNA, 20 bp, synthetic construct
  source 1..20: mol_type = other DNA
aggtcatgagttcgagacca

SEQ ID NO: 20645 - DNA, 20 bp, synthetic construct
  source 1..20: mol_type = other DNA
gaggtcatgagttcgagacc

SEQ ID NO: 20646 - DNA, 20 bp, synthetic construct
  source 1..20: mol_type = other DNA
tgaggtcatgagttcgagac

SEQ ID NO: 20647 - DNA, 20 bp, synthetic construct
  source 1..20: mol_type = other DNA
ctgaggtcatgagttcgaga

SEQ ID NO: 20648 - DNA, 20 bp, synthetic construct
  source 1..20: mol_type = other DNA
cctgaggtcatgagttcgag

SEQ ID NO: 20649 - DNA, 20 bp, synthetic construct
  source 1..20: mol_type = other DNA
acctgaggtcatgagttcga

SEQ ID NO: 20650 - DNA, 20 bp, synthetic construct
  source 1..20: mol_type = other DNA
cacctgaggtcatgagttcg

SEQ ID NO: 20651 - DNA, 20 bp, synthetic construct
  source 1..20: mol_type = other DNA
tcacctgaggtcatgagttc

SEQ ID NO: 20652 - DNA, 20 bp, synthetic construct
  source 1..20: mol_type = other DNA
atcacctgaggtcatgagtt

SEQ ID NO: 20653 - DNA, 20 bp, synthetic construct
  source 1..20: mol_type = other DNA
gatcacctgaggtcatgagt

SEQ ID NO: 20654 - DNA, 20 bp, synthetic construct
  source 1..20: mol_type = other DNA
ggatcacctgaggtcatgag

SEQ ID NO: 20655 - DNA, 20 bp, synthetic construct
  source 1..20: mol_type = other DNA
tggatcacctgaggtcatga

SEQ ID NO: 20656 - DNA, 20 bp, synthetic construct
  source 1..20: mol_type = other DNA
gtggatcacctgaggtcatg

SEQ ID NO: 20657 - DNA, 20 bp, synthetic construct
  source 1..20: mol_type = other DNA
ggtggatcacctgaggtcat

SEQ ID NO: 20658 - DNA, 20 bp, synthetic construct
  source 1..20: mol_type = other DNA
aggtggatcacctgaggtca

SEQ ID NO: 20659 - DNA, 20 bp, synthetic construct
  source 1..20: mol_type = other DNA
caggtggatcacctgaggtc

SEQ ID NO: 20660 - DNA, 20 bp, synthetic construct
  source 1..20: mol_type = other DNA
gcaggtggatcacctgaggt

SEQ ID NO: 20661 - DNA, 20 bp, synthetic construct
  source 1..20: mol_type = other DNA
ggcaggtggatcacctgagg

SEQ ID NO: 20662 - DNA, 20 bp, synthetic construct
  source 1..20: mol_type = other DNA
aggcaggtggatcacctgag

SEQ ID NO: 20663 - DNA, 20 bp, synthetic construct
  source 1..20: mol_type = other DNA
gaggcaggtggatcacctga

SEQ ID NO: 20664 - DNA, 20 bp, synthetic construct
  source 1..20: mol_type = other DNA
cgaggcaggtggatcacctg

SEQ ID NO: 20665 - DNA, 20 bp, synthetic construct
  source 1..20: mol_type = other DNA
ccgaggcaggtggatcacct

SEQ ID NO: 20666 - DNA, 20 bp, synthetic construct
  source 1..20: mol_type = other DNA
gccgaggcaggtggatcacc

SEQ ID NO: 20667 - DNA, 20 bp, synthetic construct
  source 1..20: mol_type = other DNA
ggccgaggcaggtggatcac

SEQ ID NO: 20668 - DNA, 20 bp, synthetic construct
  source 1..20: mol_type = other DNA
aggccgaggcaggtggatca

SEQ ID NO: 20669 - DNA, 20 bp, synthetic construct
  source 1..20: mol_type = other DNA
gaggccgaggcaggtggatc

SEQ ID NO: 20670 - DNA, 20 bp, synthetic construct
  source 1..20: mol_type = other DNA
ggaggccgaggcaggtggat

SEQ ID NO: 20671 - DNA, 20 bp, synthetic construct
  source 1..20: mol_type = other DNA
gggaggccgaggcaggtgga

SEQ ID NO: 20672 - DNA, 20 bp, synthetic construct
  source 1..20: mol_type = other DNA
tgggaggccgaggcaggtgg

SEQ ID NO: 20673 - DNA, 20 bp, synthetic construct
  source 1..20: mol_type = other DNA
ctgggaggccgaggcaggtg

SEQ ID NO: 20674 - DNA, 20 bp, synthetic construct
  source 1..20: mol_type = other DNA
actgggaggccgaggcaggt

SEQ ID NO: 20675 - DNA, 20 bp, synthetic construct
  source 1..20: mol_type = other DNA
cactgggaggccgaggcagg

SEQ ID NO: 20676 - DNA, 20 bp, synthetic construct
  source 1..20: mol_type = other DNA
gcactgggaggccgaggcag

SEQ ID NO: 20677 - DNA, 20 bp, synthetic construct
  source 1..20: mol_type = other DNA
agcactgggaggccgaggca

SEQ ID NO: 20678 - DNA, 20 bp, synthetic construct
  source 1..20: mol_type = other DNA
cagcactgggaggccgaggc

SEQ ID NO: 20679 - DNA, 20 bp, synthetic construct
  source 1..20: mol_type = other DNA
ccagcactgggaggccgagg

SEQ ID NO: 20680 - DNA, 20 bp, synthetic construct
  source 1..20: mol_type = other DNA
cccagcactgggaggccgag

SEQ ID NO: 20681 - DNA, 20 bp, synthetic construct
  source 1..20: mol_type = other DNA
tcccagcactgggaggccga

SEQ ID NO: 20682 - DNA, 20 bp, synthetic construct
  source 1..20: mol_type = other DNA
atcccagcactgggaggccg

SEQ ID NO: 20683 - DNA, 20 bp, synthetic construct
  source 1..20: mol_type = other DNA
aatcccagcactgggaggcc

SEQ ID NO: 20684 - DNA, 20 bp, synthetic construct
  source 1..20: mol_type = other DNA
taatcccagcactgggaggc

SEQ ID NO: 20685 - DNA, 20 bp, synthetic construct
  source 1..20: mol_type = other DNA
ataatcccagcactgggagg

SEQ ID NO: 20686 - DNA, 20 bp, synthetic construct
  source 1..20: mol_type = other DNA
tataatcccagcactgggag

SEQ ID NO: 20687 - DNA, 20 bp, synthetic construct
  source 1..20: mol_type = other DNA
ctataatcccagcactggga

SEQ ID NO: 20688 - DNA, 20 bp, synthetic construct
  source 1..20: mol_type = other DNA
cctataatcccagcactggg

SEQ ID NO: 20689 - DNA, 20 bp, synthetic construct
  source 1..20: mol_type = other DNA
gcctataatcccagcactgg

SEQ ID NO: 20690 - DNA, 20 bp, synthetic construct
  source 1..20: mol_type = other DNA
tgcctataatcccagcactg

SEQ ID NO: 20691 - DNA, 20 bp, synthetic construct
  source 1..20: mol_type = other DNA
atgcctataatcccagcact

SEQ ID NO: 20692 - DNA, 20 bp, synthetic construct
  source 1..20: mol_type = other DNA
catgcctataatcccagcac

SEQ ID NO: 20693 - DNA, 20 bp, synthetic construct
  source 1..20: mol_type = other DNA
tcatgcctataatcccagca

SEQ ID NO: 20694 - DNA, 20 bp, synthetic construct
  source 1..20: mol_type = other DNA
ctcatgcctataatcccagc

SEQ ID NO: 20695 - DNA, 20 bp, synthetic construct
  source 1..20: mol_type = other DNA
gctcatgcctataatcccag

SEQ ID NO: 20696 - DNA, 20 bp, synthetic construct
  source 1..20: mol_type = other DNA
ggctcatgcctataatccca

SEQ ID NO: 20697 - DNA, 20 bp, synthetic construct
  source 1..20: mol_type = other DNA
tggctcatgcctataatccc

SEQ ID NO: 20698 - DNA, 20 bp, synthetic construct
  source 1..20: mol_type = other DNA
gtggctcatgcctataatcc

SEQ ID NO: 20699 - DNA, 20 bp, synthetic construct
  source 1..20: mol_type = other DNA
ggtggctcatgcctataatc

SEQ ID NO: 20700 - DNA, 20 bp, synthetic construct
  source 1..20: mol_type = other DNA
tggtggctcatgcctataat

SEQ ID NO: 20701 - DNA, 20 bp, synthetic construct
  source 1..20: mol_type = other DNA
atggtggctcatgcctataa

SEQ ID NO: 20702 - DNA, 20 bp, synthetic construct
  source 1..20: mol_type = other DNA
catggtggctcatgcctata

SEQ ID NO: 20703 - DNA, 20 bp, synthetic construct
  source 1..20: mol_type = other DNA
gcatggtggctcatgcctat

SEQ ID NO: 20704 - DNA, 20 bp, synthetic construct
  source 1..20: mol_type = other DNA
ggcatggtggctcatgccta

SEQ ID NO: 20705 - DNA, 20 bp, synthetic construct
  source 1..20: mol_type = other DNA
aggcatggtggctcatgcct

SEQ ID NO: 20706 - DNA, 20 bp, synthetic construct
  source 1..20: mol_type = other DNA
caggcatggtggctcatgcc

SEQ ID NO: 20707 - DNA, 20 bp, synthetic construct
  source 1..20: mol_type = other DNA
ccaggcatggtggctcatgc

SEQ ID NO: 20708 - DNA, 20 bp, synthetic construct
  source 1..20: mol_type = other DNA
gccaggcatggtggctcatg

SEQ ID NO: 20709 - DNA, 20 bp, synthetic construct
  source 1..20: mol_type = other DNA
ggccaggcatggtggctcat

SEQ ID NO: 20710 - DNA, 20 bp, synthetic construct
  source 1..20: mol_type = other DNA
aggccaggcatggtggctca

SEQ ID NO: 20711 - DNA, 20 bp, synthetic construct
  source 1..20: mol_type = other DNA
aaggccaggcatggtggctc

SEQ ID NO: 20712 - DNA, 20 bp, synthetic construct
  source 1..20: mol_type = other DNA
aaaggccaggcatggtggct

SEQ ID NO: 20713 - DNA, 20 bp, synthetic construct
  source 1..20: mol_type = other DNA
gaaaggccaggcatggtggc

SEQ ID NO: 20714 - DNA, 20 bp, synthetic construct
  source 1..20: mol_type = other DNA
agaaaggccaggcatggtgg

SEQ ID NO: 20715 - DNA, 20 bp, synthetic construct
  source 1..20: mol_type = other DNA
aagaaaggccaggcatggtg

SEQ ID NO: 20716 - DNA, 20 bp, synthetic construct
  source 1..20: mol_type = other DNA
aaagaaaggccaggcatggt

SEQ ID NO: 20717 - DNA, 20 bp, synthetic construct
  source 1..20: mol_type = other DNA
caaagaaaggccaggcatgg

SEQ ID NO: 20718 - DNA, 20 bp, synthetic construct
  source 1..20: mol_type = other DNA
acaaagaaaggccaggcatg

SEQ ID NO: 20719 - DNA, 20 bp, synthetic construct
  source 1..20: mol_type = other DNA
gacaaagaaaggccaggcat

SEQ ID NO: 20720 - DNA, 20 bp, synthetic construct
  source 1..20: mol_type = other DNA
cgacaaagaaaggccaggca

SEQ ID NO: 20721 - DNA, 20 bp, synthetic construct
  source 1..20: mol_type = other DNA
acgacaaagaaaggccaggc

SEQ ID NO: 20722 - DNA, 20 bp, synthetic construct
  source 1..20: mol_type = other DNA
aacgacaaagaaaggccagg

SEQ ID NO: 20723 - DNA, 20 bp, synthetic construct
  source 1..20: mol_type = other DNA
aaacgacaaagaaaggccag

SEQ ID NO: 20724 - DNA, 20 bp, synthetic construct
  source 1..20: mol_type = other DNA
gaaacgacaaagaaaggcca

SEQ ID NO: 20725 - DNA, 20 bp, synthetic construct
  source 1..20: mol_type = other DNA
ggaaacgacaaagaaaggcc

SEQ ID NO: 20726 - DNA, 20 bp, synthetic construct
  source 1..20: mol_type = other DNA
aggaaacgacaaagaaaggc

SEQ ID NO: 20727 - DNA, 20 bp, synthetic construct
  source 1..20: mol_type = other DNA
aaggaaacgacaaagaaagg

SEQ ID NO: 20728 - DNA, 20 bp, synthetic construct
  source 1..20: mol_type = other DNA
aaaggaaacgacaaagaaag

SEQ ID NO: 20729 - DNA, 20 bp, synthetic construct
  source 1..20: mol_type = other DNA
gaaaggaaacgacaaagaaa

SEQ ID NO: 20730 - DNA, 20 bp, synthetic construct
  source 1..20: mol_type = other DNA
agaaaggaaacgacaaagaa

SEQ ID NO: 20731 - DNA, 20 bp, synthetic construct
  source 1..20: mol_type = other DNA
aagaaaggaaacgacaaaga

SEQ ID NO: 20732 - DNA, 20 bp, synthetic construct
  source 1..20: mol_type = other DNA
aaagaaaggaaacgacaaag

SEQ ID NO: 20733 - DNA, 20 bp, synthetic construct
  source 1..20: mol_type = other DNA
gaaagaaaggaaacgacaaa

SEQ ID NO: 20734 - DNA, 20 bp, synthetic construct
  source 1..20: mol_type = other DNA
agaaagaaaggaaacgacaa

SEQ ID NO: 20735 - DNA, 20 bp, synthetic construct
  source 1..20: mol_type = other DNA
gagaaagaaaggaaacgaca

SEQ ID NO: 20736 - DNA, 20 bp, synthetic construct
  source 1..20: mol_type = other DNA
agagaaagaaaggaaacgac

SEQ ID NO: 20737 - DNA, 20 bp, synthetic construct
  source 1..20: mol_type = other DNA
aagagaaagaaaggaaacga

SEQ ID NO: 20738 - DNA, 20 bp, synthetic construct
  source 1..20: mol_type = other DNA
gaagagaaagaaaggaaacg

SEQ ID NO: 20739 - DNA, 20 bp, synthetic construct
  source 1..20: mol_type = other DNA
tgaagagaaagaaaggaaac

SEQ ID NO: 20740 - DNA, 20 bp, synthetic construct
  source 1..20: mol_type = other DNA
atgaagagaaagaaaggaaa

SEQ ID NO: 20741 - DNA, 20 bp, synthetic construct
  source 1..20: mol_type = other DNA
gatgaagagaaagaaaggaa

SEQ ID NO: 20742 - DNA, 20 bp, synthetic construct
  source 1..20: mol_type = other DNA
ggatgaagagaaagaaagga

SEQ ID NO: 20743 - DNA, 20 bp, synthetic construct
  source 1..20: mol_type = other DNA
gggatgaagagaaagaaagg

SEQ ID NO: 20744 - DNA, 20 bp, synthetic construct
  source 1..20: mol_type = other DNA
agggatgaagagaaagaaag

SEQ ID NO: 20745 - DNA, 20 bp, synthetic construct
  source 1..20: mol_type = other DNA
gagggatgaagagaaagaaa

SEQ ID NO: 20746 - DNA, 20 bp, synthetic construct
  source 1..20: mol_type = other DNA
ggagggatgaagagaaagaa

SEQ ID NO: 20747 - DNA, 20 bp, synthetic construct
  source 1..20: mol_type = other DNA
aggagggatgaagagaaaga

SEQ ID NO: 20748 - DNA, 20 bp, synthetic construct
  source 1..20: mol_type = other DNA
gaggagggatgaagagaaag

SEQ ID NO: 20749 - DNA, 20 bp, synthetic construct
  source 1..20: mol_type = other DNA
agaggagggatgaagagaaa

SEQ ID NO: 20750 - DNA, 20 bp, synthetic construct
  source 1..20: mol_type = other DNA
gagaggagggatgaagagaa

SEQ ID NO: 20751 - DNA, 20 bp, synthetic construct
  source 1..20: mol_type = other DNA
ggagaggagggatgaagaga

SEQ ID NO: 20752 - DNA, 20 bp, synthetic construct
  source 1..20: mol_type = other DNA
aggagaggagggatgaagag

SEQ ID NO: 20753 - DNA, 20 bp, synthetic construct
  source 1..20: mol_type = other DNA
aaggagaggagggatgaaga

SEQ ID NO: 20754 - DNA, 20 bp, synthetic construct
  source 1..20: mol_type = other DNA
aaaggagaggagggatgaag

SEQ ID NO: 20755 - DNA, 20 bp, synthetic construct
  source 1..20: mol_type = other DNA
aaaaggagaggagggatgaa

SEQ ID NO: 20756 - DNA, 20 bp, synthetic construct
  source 1..20: mol_type = other DNA
aaaaaggagaggagggatga

SEQ ID NO: 20757 - DNA, 20 bp, synthetic construct
  source 1..20: mol_type = other DNA
aaaaaaggagaggagggatg

SEQ ID NO: 20758 - DNA, 20 bp, synthetic construct
  source 1..20: mol_type = other DNA
gaaaaaaggagaggagggat

SEQ ID NO: 20759 - DNA, 20 bp, synthetic construct
  source 1..20: mol_type = other DNA
ggaaaaaaggagaggaggga

SEQ ID NO: 20760 - DNA, 20 bp, synthetic construct
  source 1..20: mol_type = other DNA
gggaaaaaaggagaggaggg

SEQ ID NO: 20761 - DNA, 20 bp, synthetic construct
  source 1..20: mol_type = other DNA
ggggaaaaaaggagaggagg

SEQ ID NO: 20762 - DNA, 20 bp, synthetic construct
  source 1..20: mol_type = other DNA
aggggaaaaaaggagaggag

SEQ ID NO: 20763 - DNA, 20 bp, synthetic construct
  source 1..20: mol_type = other DNA
gaggggaaaaaaggagagga

SEQ ID NO: 20764 - DNA, 20 bp, synthetic construct
  source 1..20: mol_type = other DNA
ggaggggaaaaaaggagagg

SEQ ID NO: 20765 - DNA, 20 bp, synthetic construct
  source 1..20: mol_type = other DNA
gggaggggaaaaaaggagag

SEQ ID NO: 20766 - DNA, 20 bp, synthetic construct
  source 1..20: mol_type = other DNA
ggggaggggaaaaaaggaga

SEQ ID NO: 20767 - DNA, 20 bp, synthetic construct
  source 1..20: mol_type = other DNA
cggggaggggaaaaaaggag

SEQ ID NO: 20768 - DNA, 20 bp, synthetic construct
  source 1..20: mol_type = other DNA
gcggggaggggaaaaaagga

SEQ ID NO: 20769 - DNA, 20 bp, synthetic construct
  source 1..20: mol_type = other DNA
agcggggaggggaaaaaagg

SEQ ID NO: 20770 - DNA, 20 bp, synthetic construct
  source 1..20: mol_type = other DNA
cagcggggaggggaaaaaag

SEQ ID NO: 20771 - DNA, 20 bp, synthetic construct
  source 1..20: mol_type = other DNA
gcagcggggaggggaaaaaa

SEQ ID NO: 20772 - DNA, 20 bp, synthetic construct
  source 1..20: mol_type = other DNA
ggcagcggggaggggaaaaa

SEQ ID NO: 20773 - DNA, 20 bp, synthetic construct
  source 1..20: mol_type = other DNA
aggcagcggggaggggaaaa

SEQ ID NO: 20774 - DNA, 20 bp, synthetic construct
  source 1..20: mol_type = other DNA
gaggcagcggggaggggaaa

SEQ ID NO: 20775 - DNA, 20 bp, synthetic construct
  source 1..20: mol_type = other DNA
ggaggcagcggggaggggaa

SEQ ID NO: 20776 - DNA, 20 bp, synthetic construct
  source 1..20: mol_type = other DNA
aggaggcagcggggagggga

SEQ ID NO: 20777 - DNA, 20 bp, synthetic construct
  source 1..20: mol_type = other DNA
gaggaggcagcggggagggg

SEQ ID NO: 20778 - DNA, 20 bp, synthetic construct
  source 1..20: mol_type = other DNA
ggaggaggcagcggggaggg

SEQ ID NO: 20779 - DNA, 20 bp, synthetic construct
  source 1..20: mol_type = other DNA
aggaggaggcagcggggagg

SEQ ID NO: 20780 - DNA, 20 bp, synthetic construct
  source 1..20: mol_type = other DNA
caggaggaggcagcggggag

SEQ ID NO: 20781 - DNA, 20 bp, synthetic construct
  source 1..20: mol_type = other DNA
acaggaggaggcagcgggga

SEQ ID NO: 20782 - DNA, 20 bp, synthetic construct
  source 1..20: mol_type = other DNA
gacaggaggaggcagcgggg

SEQ ID NO: 20783 - DNA, 20 bp, synthetic construct
  source 1..20: mol_type = other DNA
agacaggaggaggcagcggg

SEQ ID NO: 20784 - DNA, 20 bp, synthetic construct
  source 1..20: mol_type = other DNA
aagacaggaggaggcagcgg

SEQ ID NO: 20785 - DNA, 20 bp, synthetic construct
  source 1..20: mol_type = other DNA
gaagacaggaggaggcagcg

SEQ ID NO: 20786 - DNA, 20 bp, synthetic construct
  source 1..20: mol_type = other DNA
ggaagacaggaggaggcagc

SEQ ID NO: 20787 - DNA, 20 bp, synthetic construct
  source 1..20: mol_type = other DNA
gggaagacaggaggaggcag

SEQ ID NO: 20788 - DNA, 20 bp, synthetic construct
  source 1..20: mol_type = other DNA
agggaagacaggaggaggca

SEQ ID NO: 20789 - DNA, 20 bp, synthetic construct
  source 1..20: mol_type = other DNA
aagggaagacaggaggaggc

SEQ ID NO: 20790 - DNA, 20 bp, synthetic construct
  source 1..20: mol_type = other DNA
gaagggaagacaggaggagg

SEQ ID NO: 20791 - DNA, 20 bp, synthetic construct
  source 1..20: mol_type = other DNA
agaagggaagacaggaggag

SEQ ID NO: 20792 - DNA, 20 bp, synthetic construct
  source 1..20: mol_type = other DNA
aagaagggaagacaggagga

SEQ ID NO: 20793 - DNA, 20 bp, synthetic construct
  source 1..20: mol_type = other DNA
aaagaagggaagacaggagg

SEQ ID NO: 20794 - DNA, 20 bp, synthetic construct
  source 1..20: mol_type = other DNA
gaaagaagggaagacaggag

SEQ ID NO: 20795 - DNA, 20 bp, synthetic construct
  source 1..20: mol_type = other DNA
ggaaagaagggaagacagga

SEQ ID NO: 20796 - DNA, 20 bp, synthetic construct
  source 1..20: mol_type = other DNA
aggaaagaagggaagacagg

SEQ ID NO: 20797 - DNA, 20 bp, synthetic construct
  source 1..20: mol_type = other DNA
aaggaaagaagggaagacag

SEQ ID NO: 20798 - DNA, 20 bp, synthetic construct
  source 1..20: mol_type = other DNA
gaaggaaagaagggaagaca

SEQ ID NO: 20799 - DNA, 20 bp, synthetic construct
  source 1..20: mol_type = other DNA
ggaaggaaagaagggaagac

SEQ ID NO: 20800 - DNA, 20 bp, synthetic construct
  source 1..20: mol_type = other DNA
aggaaggaaagaagggaaga

SEQ ID NO: 20801 - DNA, 20 bp, synthetic construct
  source 1..20: mol_type = other DNA
aaggaaggaaagaagggaag

SEQ ID NO: 20802 - DNA, 20 bp, synthetic construct
  source 1..20: mol_type = other DNA
aaaggaaggaaagaagggaa

SEQ ID NO: 20803 - DNA, 20 bp, synthetic construct
  source 1..20: mol_type = other DNA
gaaaggaaggaaagaaggga

SEQ ID NO: 20804 - DNA, 20 bp, synthetic construct
  source 1..20: mol_type = other DNA
agaaaggaaggaaagaaggg

SEQ ID NO: 20805 - DNA, 20 bp, synthetic construct
  source 1..20: mol_type = other DNA
gagaaaggaaggaaagaagg

SEQ ID NO: 20806 - DNA, 20 bp, synthetic construct
  source 1..20: mol_type = other DNA
agagaaaggaaggaaagaag

SEQ ID NO: 20807 - DNA, 20 bp, synthetic construct
  source 1..20: mol_type = other DNA
gagagaaaggaaggaaagaa

SEQ ID NO: 20808 - DNA, 20 bp, synthetic construct
  source 1..20: mol_type = other DNA
ggagagaaaggaaggaaaga

SEQ ID NO: 20809 - DNA, 20 bp, synthetic construct
  source 1..20: mol_type = other DNA
aggagagaaaggaaggaaag

SEQ ID NO: 20810 - DNA, 20 bp, synthetic construct
  source 1..20: mol_type = other DNA
aaggagagaaaggaaggaaa

SEQ ID NO: 20811 - DNA, 20 bp, synthetic construct
  source 1..20: mol_type = other DNA
aaaggagagaaaggaaggaa

SEQ ID NO: 20812 - DNA, 20 bp, synthetic construct
  source 1..20: mol_type = other DNA
aaaaggagagaaaggaagga

SEQ ID NO: 20813 - DNA, 20 bp, synthetic construct
  source 1..20: mol_type = other DNA
aaaaaggagagaaaggaagg

SEQ ID NO: 20814 - DNA, 20 bp, synthetic construct
  source 1..20: mol_type = other DNA
taaaaaggagagaaaggaag

SEQ ID NO: 20815 - DNA, 20 bp, synthetic construct
  source 1..20: mol_type = other DNA
ataaaaaggagagaaaggaa

SEQ ID NO: 20816 - DNA, 20 bp, synthetic construct
  source 1..20: mol_type = other DNA
aataaaaaggagagaaagga

SEQ ID NO: 20817 - DNA, 20 bp, synthetic construct
  source 1..20: mol_type = other DNA
aaataaaaaggagagaaagg

SEQ ID NO: 20818 - DNA, 20 bp, synthetic construct
  source 1..20: mol_type = other DNA
aaaataaaaaggagagaaag

SEQ ID NO: 20819 - DNA, 20 bp, synthetic construct
  source 1..20: mol_type = other DNA
aaaaataaaaaggagagaaa

SEQ ID NO: 20820 - DNA, 20 bp, synthetic construct
  source 1..20: mol_type = other DNA
aaaaaataaaaaggagagaa

SEQ ID NO: 20821 - DNA, 20 bp, synthetic construct
  source 1..20: mol_type = other DNA
gaaaaaataaaaaggagaga

SEQ ID NO: 20822 - DNA, 20 bp, synthetic construct
  source 1..20: mol_type = other DNA
ggaaaaaataaaaaggagag

SEQ ID NO: 20823 - DNA, 20 bp, synthetic construct
  source 1..20: mol_type = other DNA
aggaaaaaataaaaaggaga

SEQ ID NO: 20824 - DNA, 20 bp, synthetic construct
  source 1..20: mol_type = other DNA
aaggaaaaaataaaaaggag

SEQ ID NO: 20825 - DNA, 20 bp, synthetic construct
  source 1..20: mol_type = other DNA
aaaggaaaaaataaaaagga

SEQ ID NO: 20826 - DNA, 20 bp, synthetic construct
  source 1..20: mol_type = other DNA
gaaaggaaaaaataaaaagg

SEQ ID NO: 20827 - DNA, 20 bp, synthetic construct
  source 1..20: mol_type = other DNA
agaaaggaaaaaataaaaag

SEQ ID NO: 20828 - DNA, 20 bp, synthetic construct
  source 1..20: mol_type = other DNA
aagaaaggaaaaaataaaaa

SEQ ID NO: 20829 - DNA, 20 bp, synthetic construct
  source 1..20: mol_type = other DNA
aaagaaaggaaaaaataaaa

SEQ ID NO: 20830 - DNA, 20 bp, synthetic construct
  source 1..20: mol_type = other DNA
aaaagaaaggaaaaaataaa

SEQ ID NO: 20831 - DNA, 20 bp, synthetic construct
  source 1..20: mol_type = other DNA
aaaaagaaaggaaaaaataa

SEQ ID NO: 20832 - DNA, 20 bp, synthetic construct
  source 1..20: mol_type = other DNA
gaaaaagaaaggaaaaaata

SEQ ID NO: 20833 - DNA, 20 bp, synthetic construct
  source 1..20: mol_type = other DNA
agaaaaagaaaggaaaaaat

SEQ ID NO: 20834 - DNA, 20 bp, synthetic construct
  source 1..20: mol_type = other DNA
aagaaaaagaaaggaaaaaa

SEQ ID NO: 20835 - DNA, 20 bp, synthetic construct
  source 1..20: mol_type = other DNA
aaagaaaaagaaaggaaaaa

SEQ ID NO: 20836 - DNA, 20 bp, synthetic construct
  source 1..20: mol_type = other DNA
gaaagaaaaagaaaggaaaa

SEQ ID NO: 20837 - DNA, 20 bp, synthetic construct
  source 1..20: mol_type = other DNA
agaaagaaaaagaaaggaaa

SEQ ID NO: 20838 - DNA, 20 bp, synthetic construct
  source 1..20: mol_type = other DNA
gagaaagaaaaagaaaggaa

SEQ ID NO: 20839 - DNA, 20 bp, synthetic construct
  source 1..20: mol_type = other DNA
agagaaagaaaaagaaagga

SEQ ID NO: 20840 - DNA, 20 bp, synthetic construct
  source 1..20: mol_type = other DNA
cagagaaagaaaaagaaagg

SEQ ID NO: 20841 - DNA, 20 bp, synthetic construct
  source 1..20: mol_type = other DNA
acagagaaagaaaaagaaag

SEQ ID NO: 20842 - DNA, 20 bp, synthetic construct
  source 1..20: mol_type = other DNA
gacagagaaagaaaaagaaa

SEQ ID NO: 20843 - DNA, 20 bp, synthetic construct
  source 1..20: mol_type = other DNA
agacagagaaagaaaaagaa

SEQ ID NO: 20844 - DNA, 20 bp, synthetic construct
  source 1..20: mol_type = other DNA
gagacagagaaagaaaaaga

SEQ ID NO: 20845 - DNA, 20 bp, synthetic construct
  source 1..20: mol_type = other DNA
agagacagagaaagaaaaag

SEQ ID NO: 20846 - DNA, 20 bp, synthetic construct
  source 1..20: mol_type = other DNA
gagagacagagaaagaaaaa

SEQ ID NO: 20847 - DNA, 20 bp, synthetic construct
  source 1..20: mol_type = other DNA
ggagagacagagaaagaaaa

SEQ ID NO: 20848 - DNA, 20 bp, synthetic construct
  source 1..20: mol_type = other DNA
gggagagacagagaaagaaa

SEQ ID NO: 20849 - DNA, 20 bp, synthetic construct
  source 1..20: mol_type = other DNA
tgggagagacagagaaagaa

SEQ ID NO: 20850 - DNA, 20 bp, synthetic construct
  source 1..20: mol_type = other DNA
ttgggagagacagagaaaga

SEQ ID NO: 20851 - DNA, 20 bp, synthetic construct
  source 1..20: mol_type = other DNA
gttgggagagacagagaaag

SEQ ID NO: 20852 - DNA, 20 bp, synthetic construct
  source 1..20: mol_type = other DNA
ggttgggagagacagagaaa

SEQ ID NO: 20853 - DNA, 20 bp, synthetic construct
  source 1..20: mol_type = other DNA
gggttgggagagacagagaa

SEQ ID NO: 20854 - DNA, 20 bp, synthetic construct
  source 1..20: mol_type = other DNA
agggttgggagagacagaga

SEQ ID NO: 20855 - DNA, 20 bp, synthetic construct
  source 1..20: mol_type = other DNA
aagggttgggagagacagag

SEQ ID NO: 20856 - DNA, 20 bp, synthetic construct
  source 1..20: mol_type = other DNA
gaagggttgggagagacaga

SEQ ID NO: 20857 - DNA, 20 bp, synthetic construct
  source 1..20: mol_type = other DNA
ggaagggttgggagagacag

SEQ ID NO: 20858 - DNA, 20 bp, synthetic construct
  source 1..20: mol_type = other DNA
aggaagggttgggagagaca

SEQ ID NO: 20859 - DNA, 20 bp, synthetic construct
  source 1..20: mol_type = other DNA
gaggaagggttgggagagac

SEQ ID NO: 20860 - DNA, 20 bp, synthetic construct
  source 1..20: mol_type = other DNA
agaggaagggttgggagaga

SEQ ID NO: 20861 - DNA, 20 bp, synthetic construct
  source 1..20: mol_type = other DNA
gagaggaagggttgggagag

SEQ ID NO: 20862 - DNA, 20 bp, synthetic construct
  source 1..20: mol_type = other DNA
agagaggaagggttgggaga

SEQ ID NO: 20863 - DNA, 20 bp, synthetic construct
  source 1..20: mol_type = other DNA
gagagaggaagggttgggag

SEQ ID NO: 20864 - DNA, 20 bp, synthetic construct
  source 1..20: mol_type = other DNA
ggagagaggaagggttggga

SEQ ID NO: 20865 - DNA, 20 bp, synthetic construct
  source 1..20: mol_type = other DNA
gggagagaggaagggttggg

SEQ ID NO: 20866 - DNA, 20 bp, synthetic construct
  source 1..20: mol_type = other DNA
agggagagaggaagggttgg

SEQ ID NO: 20867 - DNA, 20 bp, synthetic construct
  source 1..20: mol_type = other DNA
gagggagagaggaagggttg

SEQ ID NO: 20868 - DNA, 20 bp, synthetic construct
  source 1..20: mol_type = other DNA
ggagggagagaggaagggtt

SEQ ID NO: 20869 - DNA, 20 bp, synthetic construct
  source 1..20: mol_type = other DNA
gggagggagagaggaagggt

SEQ ID NO: 20870 - DNA, 20 bp, synthetic construct
  source 1..20: mol_type = other DNA
agggagggagagaggaaggg

SEQ ID NO: 20871 - DNA, 20 bp, synthetic construct
  source 1..20: mol_type = other DNA
gagggagggagagaggaagg

SEQ ID NO: 20872 - DNA, 20 bp, synthetic construct
  source 1..20: mol_type = other DNA
ggagggagggagagaggaag

SEQ ID NO: 20873 - DNA, 20 bp, synthetic construct
  source 1..20: mol_type = other DNA
gggagggagggagagaggaa

SEQ ID NO: 20874 - DNA, 20 bp, synthetic construct
  source 1..20: mol_type = other DNA
agggagggagggagagagga

SEQ ID NO: 20875 - DNA, 20 bp, synthetic construct
  source 1..20: mol_type = other DNA
gagggagggagggagagagg

SEQ ID NO: 20876 - DNA, 20 bp, synthetic construct
  source 1..20: mol_type = other DNA
ggagggagggagggagagag

SEQ ID NO: 20877 - DNA, 20 bp, synthetic construct
  source 1..20: mol_type = other DNA
gggagggagggagggagaga

SEQ ID NO: 20878 - DNA, 20 bp, synthetic construct
  source 1..20: mol_type = other DNA
ggggagggagggagggagag

SEQ ID NO: 20879 - DNA, 20 bp, synthetic construct
  source 1..20: mol_type = other DNA
aggggagggagggagggaga

SEQ ID NO: 20880 - DNA, 20 bp, synthetic construct
  source 1..20: mol_type = other DNA
aaggggagggagggagggag

SEQ ID NO: 20881 - DNA, 20 bp, synthetic construct
  source 1..20: mol_type = other DNA
gaaggggagggagggaggga

SEQ ID NO: 20882 - DNA, 20 bp, synthetic construct
  source 1..20: mol_type = other DNA
agaaggggagggagggaggg

SEQ ID NO: 20883 - DNA, 20 bp, synthetic construct
  source 1..20: mol_type = other DNA
gagaaggggagggagggagg

SEQ ID NO: 20884 - DNA, 20 bp, synthetic construct
  source 1..20: mol_type = other DNA
agagaaggggagggagggag

SEQ ID NO: 20885 - DNA, 20 bp, synthetic construct
  source 1..20: mol_type = other DNA
gagagaaggggagggaggga

SEQ ID NO: 20886 - DNA, 20 bp, synthetic construct
  source 1..20: mol_type = other DNA
agagagaaggggagggaggg

SEQ ID NO: 20887 - DNA, 20 bp, synthetic construct
  source 1..20: mol_type = other DNA
gagagagaaggggagggagg

SEQ ID NO: 20888 - DNA, 20 bp, synthetic construct
  source 1..20: mol_type = other DNA
ggagagagaaggggagggag

SEQ ID NO: 20889 - DNA, 20 bp, synthetic construct
  source 1..20: mol_type = other DNA
gggagagagaaggggaggga

SEQ ID NO: 20890 - DNA, 20 bp, synthetic construct
  source 1..20: mol_type = other DNA
ggggagagagaaggggaggg

SEQ ID NO: 20891 - DNA, 20 bp, synthetic construct
  source 1..20: mol_type = other DNA
gggggagagagaaggggagg

SEQ ID NO: 20892 - DNA, 20 bp, synthetic construct
  source 1..20: mol_type = other DNA
ggggggagagagaaggggag

SEQ ID NO: 20893 - DNA, 20 bp, synthetic construct
  source 1..20: mol_type = other DNA
gggggggagagagaagggga

SEQ ID NO: 20894 - DNA, 20 bp, synthetic construct
  source 1..20: mol_type = other DNA
agggggggagagagaagggg

SEQ ID NO: 20895 - DNA, 20 bp, synthetic construct
  source 1..20: mol_type = other DNA
gagggggggagagagaaggg

SEQ ID NO: 20896 - DNA, 20 bp, synthetic construct
  source 1..20: mol_type = other DNA
ggagggggggagagagaagg

SEQ ID NO: 20897 - DNA, 20 bp, synthetic construct
  source 1..20: mol_type = other DNA
gggagggggggagagagaag

SEQ ID NO: 20898 - DNA, 20 bp, synthetic construct
  source 1..20: mol_type = other DNA
agggagggggggagagagaa

SEQ ID NO: 20899 - DNA, 20 bp, synthetic construct
  source 1..20: mol_type = other DNA
gagggagggggggagagaga

SEQ ID NO: 20900 - DNA, 20 bp, synthetic construct
  source 1..20: mol_type = other DNA
ggagggagggggggagagag

SEQ ID NO: 20901 - DNA, 20 bp, synthetic construct
  source 1..20: mol_type = other DNA
gggagggagggggggagaga

SEQ ID NO: 20902 - DNA, 20 bp, synthetic construct
  source 1..20: mol_type = other DNA
ggggagggagggggggagag

SEQ ID NO: 20903 - DNA, 20 bp, synthetic construct
  source 1..20: mol_type = other DNA
aggggagggagggggggaga

SEQ ID NO: 20904 - DNA, 20 bp, synthetic construct
  source 1..20: mol_type = other DNA
aaggggagggagggggggag

SEQ ID NO: 20905 - DNA, 20 bp, synthetic construct
  source 1..20: mol_type = other DNA
gaaggggagggaggggggga

SEQ ID NO: 20906 - DNA, 20 bp, synthetic construct
  source 1..20: mol_type = other DNA
agaaggggagggaggggggg

SEQ ID NO: 20907 - DNA, 20 bp, synthetic construct
  source 1..20: mol_type = other DNA
gagaaggggagggagggggg

SEQ ID NO: 20908 - DNA, 20 bp, synthetic construct
  source 1..20: mol_type = other DNA
agagaaggggagggaggggg

SEQ ID NO: 20909 - DNA, 20 bp, synthetic construct
  source 1..20: mol_type = other DNA
gagagaaggggagggagggg

SEQ ID NO: 20910 - DNA, 20 bp, synthetic construct
  source 1..20: mol_type = other DNA
agagagaaggggagggaggg

SEQ ID NO: 20911 - DNA, 20 bp, synthetic construct
  source 1..20: mol_type = other DNA
gagagagaaggggagggagg

SEQ ID NO: 20912 - DNA, 20 bp, synthetic construct
  source 1..20: mol_type = other DNA
ggagagagaaggggagggag

SEQ ID NO: 20913 - DNA, 20 bp, synthetic construct
  source 1..20: mol_type = other DNA
gggagagagaaggggaggga

SEQ ID NO: 20914 - DNA, 20 bp, synthetic construct
  source 1..20: mol_type = other DNA
ggggagagagaaggggaggg

SEQ ID NO: 20915 - DNA, 20 bp, synthetic construct
  source 1..20: mol_type = other DNA
gggggagagagaaggggagg

SEQ ID NO: 20916 - DNA, 20 bp, synthetic construct
  source 1..20: mol_type = other DNA
agggggagagagaaggggag

SEQ ID NO: 20917 - DNA, 20 bp, synthetic construct
  source 1..20: mol_type = other DNA
gagggggagagagaagggga

SEQ ID NO: 20918 - DNA, 20 bp, synthetic construct
  source 1..20: mol_type = other DNA
ggagggggagagagaagggg

SEQ ID NO: 20919 - DNA, 20 bp, synthetic construct
  source 1..20: mol_type = other DNA
gggagggggagagagaaggg

SEQ ID NO: 20920 - DNA, 20 bp, synthetic construct
  source 1..20: mol_type = other DNA
ggggagggggagagagaagg

SEQ ID NO: 20921 - DNA, 20 bp, synthetic construct
  source 1..20: mol_type = other DNA
aggggagggggagagagaag

SEQ ID NO: 20922 - DNA, 20 bp, synthetic construct
  source 1..20: mol_type = other DNA
aaggggagggggagagagaa

SEQ ID NO: 20923 - DNA, 20 bp, synthetic construct
  source 1..20: mol_type = other DNA
aaaggggagggggagagaga

SEQ ID NO: 20924 - DNA, 20 bp, synthetic construct
  source 1..20: mol_type = other DNA
aaaaggggagggggagagag

SEQ ID NO: 20925 - DNA, 20 bp, synthetic construct
  source 1..20: mol_type = other DNA
caaaaggggagggggagaga

SEQ ID NO: 20926 - DNA, 20 bp, synthetic construct
  source 1..20: mol_type = other DNA
acaaaaggggagggggagag

SEQ ID NO: 20927 - DNA, 20 bp, synthetic construct
  source 1..20: mol_type = other DNA
aacaaaaggggagggggaga

SEQ ID NO: 20928 - DNA, 20 bp, synthetic construct
  source 1..20: mol_type = other DNA
gaacaaaaggggagggggag

SEQ ID NO: 20929 - DNA, 20 bp, synthetic construct
  source 1..20: mol_type = other DNA
ggaacaaaaggggaggggga

SEQ ID NO: 20930 - DNA, 20 bp, synthetic construct
  source 1..20: mol_type = other DNA
aggaacaaaaggggaggggg

SEQ ID NO: 20931 - DNA, 20 bp, synthetic construct
  source 1..20: mol_type = other DNA
taggaacaaaaggggagggg

SEQ ID NO: 20932 - DNA, 20 bp, synthetic construct
  source 1..20: mol_type = other DNA
ttaggaacaaaaggggaggg

SEQ ID NO: 20933 - DNA, 20 bp, synthetic construct
  source 1..20: mol_type = other DNA
cttaggaacaaaaggggagg

SEQ ID NO: 20934 - DNA, 20 bp, synthetic construct
  source 1..20: mol_type = other DNA
tcttaggaacaaaaggggag

SEQ ID NO: 20935 - DNA, 20 bp, synthetic construct
  source 1..20: mol_type = other DNA
ctcttaggaacaaaagggga

SEQ ID NO: 20936 - DNA, 20 bp, synthetic construct
  source 1..20: mol_type = other DNA
tctcttaggaacaaaagggg

SEQ ID NO: 20937 - DNA, 20 bp, synthetic construct
  source 1..20: mol_type = other DNA
gtctcttaggaacaaaaggg

SEQ ID NO: 20938 - DNA, 20 bp, synthetic construct
  source 1..20: mol_type = other DNA
tgtctcttaggaacaaaagg

SEQ ID NO: 20939 - DNA, 20 bp, synthetic construct
  source 1..20: mol_type = other DNA
ctgtctcttaggaacaaaag

SEQ ID NO: 20940 - DNA, 20 bp, synthetic construct
  source 1..20: mol_type = other DNA
cctgtctcttaggaacaaaa

SEQ ID NO: 20941 - DNA, 20 bp, synthetic construct
  source 1..20: mol_type = other DNA
ccctgtctcttaggaacaaa

SEQ ID NO: 20942 - DNA, 20 bp, synthetic construct
  source 1..20: mol_type = other DNA
accctgtctcttaggaacaa

SEQ ID NO: 20943 - DNA, 20 bp, synthetic construct
  source 1..20: mol_type = other DNA
gaccctgtctcttaggaaca

SEQ ID NO: 20944 - DNA, 20 bp, synthetic construct
  source 1..20: mol_type = other DNA
agaccctgtctcttaggaac

SEQ ID NO: 20945 - DNA, 20 bp, synthetic construct
  source 1..20: mol_type = other DNA
gagaccctgtctcttaggaa

SEQ ID NO: 20946 - DNA, 20 bp, synthetic construct
  source 1..20: mol_type = other DNA
ggagaccctgtctcttagga

SEQ ID NO: 20947 - DNA, 20 bp, synthetic construct
  source 1..20: mol_type = other DNA
aggagaccctgtctcttagg

SEQ ID NO: 20948 - DNA, 20 bp, synthetic construct
  source 1..20: mol_type = other DNA
aaggagaccctgtctcttag

SEQ ID NO: 20949 - DNA, 20 bp, synthetic construct
  source 1..20: mol_type = other DNA
taaggagaccctgtctctta

SEQ ID NO: 20950 - DNA, 20 bp, synthetic construct
  source 1..20: mol_type = other DNA
ataaggagaccctgtctctt

SEQ ID NO: 20951 - DNA, 20 bp, synthetic construct
  source 1..20: mol_type = other DNA
cataaggagaccctgtctct

SEQ ID NO: 20952 - DNA, 20 bp, synthetic construct
  source 1..20: mol_type = other DNA
acataaggagaccctgtctc

SEQ ID NO: 20953 - DNA, 20 bp, synthetic construct
  source 1..20: mol_type = other DNA
aacataaggagaccctgtct

SEQ ID NO: 20954 - DNA, 20 bp, synthetic construct
  source 1..20: mol_type = other DNA
caacataaggagaccctgtc

SEQ ID NO: 20955 - DNA, 20 bp, synthetic construct
  source 1..20: mol_type = other DNA
gcaacataaggagaccctgt

SEQ ID NO: 20956 - DNA, 20 bp, synthetic construct
  source 1..20: mol_type = other DNA
agcaacataaggagaccctg

SEQ ID NO: 20957 - DNA, 20 bp, synthetic construct
  source 1..20: mol_type = other DNA
cagcaacataaggagaccct

SEQ ID NO: 20958 - DNA, 20 bp, synthetic construct
  source 1..20: mol_type = other DNA
tcagcaacataaggagaccc

SEQ ID NO: 20959 - DNA, 20 bp, synthetic construct
  source 1..20: mol_type = other DNA
ctcagcaacataaggagacc

SEQ ID NO: 20960 - DNA, 20 bp, synthetic construct
  source 1..20: mol_type = other DNA
cctcagcaacataaggagac

SEQ ID NO: 20961 - DNA, 20 bp, synthetic construct
  source 1..20: mol_type = other DNA
gcctcagcaacataaggaga

SEQ ID NO: 20962 - DNA, 20 bp, synthetic construct
  source 1..20: mol_type = other DNA
agcctcagcaacataaggag

SEQ ID NO: 20963 - DNA, 20 bp, synthetic construct
  source 1..20: mol_type = other DNA
cagcctcagcaacataagga

SEQ ID NO: 20964 - DNA, 20 bp, synthetic construct
  source 1..20: mol_type = other DNA
tcagcctcagcaacataagg

SEQ ID NO: 20965 - DNA, 20 bp, synthetic construct
  source 1..20: mol_type = other DNA
gtcagcctcagcaacataag

SEQ ID NO: 20966 - DNA, 20 bp, synthetic construct
  source 1..20: mol_type = other DNA
ggtcagcctcagcaacataa

SEQ ID NO: 20967 - DNA, 20 bp, synthetic construct
  source 1..20: mol_type = other DNA
aggtcagcctcagcaacata

SEQ ID NO: 20968 - DNA, 20 bp, synthetic construct
  source 1..20: mol_type = other DNA
aaggtcagcctcagcaacat

SEQ ID NO: 20969 - DNA, 20 bp, synthetic construct
  source 1..20: mol_type = other DNA
caaggtcagcctcagcaaca

SEQ ID NO: 20970 - DNA, 20 bp, synthetic construct
  source 1..20: mol_type = other DNA
tcaaggtcagcctcagcaac

SEQ ID NO: 20971 - DNA, 20 bp, synthetic construct
  source 1..20: mol_type = other DNA
ttcaaggtcagcctcagcaa

SEQ ID NO: 20972 - DNA, 20 bp, synthetic construct
  source 1..20: mol_type = other DNA
gttcaaggtcagcctcagca

SEQ ID NO: 20973 - DNA, 20 bp, synthetic construct
  source 1..20: mol_type = other DNA
agttcaaggtcagcctcagc

SEQ ID NO: 20974 - DNA, 20 bp, synthetic construct
  source 1..20: mol_type = other DNA
gagttcaaggtcagcctcag

SEQ ID NO: 20975 - DNA, 20 bp, synthetic construct
  source 1..20: mol_type = other DNA
ggagttcaaggtcagcctca

SEQ ID NO: 20976 - DNA, 20 bp, synthetic construct
  source 1..20: mol_type = other DNA
aggagttcaaggtcagcctc

SEQ ID NO: 20977 - DNA, 20 bp, synthetic construct
  source 1..20: mol_type = other DNA
caggagttcaaggtcagcct

SEQ ID NO: 20978 - DNA, 20 bp, synthetic construct
  source 1..20: mol_type = other DNA
tcaggagttcaaggtcagcc

SEQ ID NO: 20979 - DNA, 20 bp, synthetic construct
  source 1..20: mol_type = other DNA
ctcaggagttcaaggtcagc

SEQ ID NO: 20980 - DNA, 20 bp, synthetic construct
  source 1..20: mol_type = other DNA
gctcaggagttcaaggtcag

SEQ ID NO: 20981 - DNA, 20 bp, synthetic construct
  source 1..20: mol_type = other DNA
ggctcaggagttcaaggtca

SEQ ID NO: 20982 - DNA, 20 bp, synthetic construct
  source 1..20: mol_type = other DNA
gggctcaggagttcaaggtc

SEQ ID NO: 20983 - DNA, 20 bp, synthetic construct
  source 1..20: mol_type = other DNA
tgggctcaggagttcaaggt

SEQ ID NO: 20984 - DNA, 20 bp, synthetic construct
  source 1..20: mol_type = other DNA
ctgggctcaggagttcaagg

SEQ ID NO: 20985 - DNA, 20 bp, synthetic construct
  source 1..20: mol_type = other DNA
tctgggctcaggagttcaag

SEQ ID NO: 20986 - DNA, 20 bp, synthetic construct
  source 1..20: mol_type = other DNA
atctgggctcaggagttcaa

SEQ ID NO: 20987 - DNA, 20 bp, synthetic construct
  source 1..20: mol_type = other DNA
catctgggctcaggagttca

SEQ ID NO: 20988 - DNA, 20 bp, synthetic construct
  source 1..20: mol_type = other DNA
tcatctgggctcaggagttc

SEQ ID NO: 20989 - DNA, 20 bp, synthetic construct
  source 1..20: mol_type = other DNA
atcatctgggctcaggagtt

SEQ ID NO: 20990 - DNA, 20 bp, synthetic construct
  source 1..20: mol_type = other DNA
aatcatctgggctcaggagt

SEQ ID NO: 20991 - DNA, 20 bp, synthetic construct
  source 1..20: mol_type = other DNA
gaatcatctgggctcaggag

SEQ ID NO: 20992 - DNA, 20 bp, synthetic construct
  source 1..20: mol_type = other DNA
agaatcatctgggctcagga

SEQ ID NO: 20993 - DNA, 20 bp, synthetic construct
  source 1..20: mol_type = other DNA
cagaatcatctgggctcagg

SEQ ID NO: 20994 - DNA, 20 bp, synthetic construct
  source 1..20: mol_type = other DNA
gcagaatcatctgggctcag

SEQ ID NO: 20995 - DNA, 20 bp, synthetic construct
  source 1..20: mol_type = other DNA
ggcagaatcatctgggctca

SEQ ID NO: 20996 - DNA, 20 bp, synthetic construct
  source 1..20: mol_type = other DNA
aggcagaatcatctgggctc

SEQ ID NO: 20997 - DNA, 20 bp, synthetic construct
  source 1..20: mol_type = other DNA
gaggcagaatcatctgggct

SEQ ID NO: 20998 - DNA, 20 bp, synthetic construct
  source 1..20: mol_type = other DNA
ggaggcagaatcatctgggc

SEQ ID NO: 20999 - DNA, 20 bp, synthetic construct
  source 1..20: mol_type = other DNA
aggaggcagaatcatctggg

SEQ ID NO: 21000 - DNA, 20 bp, synthetic construct
  source 1..20: mol_type = other DNA
aaggaggcagaatcatctgg

SEQ ID NO: 21001 - DNA, 20 bp, synthetic construct
  source 1..20: mol_type = other DNA
taaggaggcagaatcatctg

SEQ ID NO: 21002 - DNA, 20 bp, synthetic construct
  source 1..20: mol_type = other DNA
ctaaggaggcagaatcatct

SEQ ID NO: 21003 - DNA, 20 bp, synthetic construct
  source 1..20: mol_type = other DNA
actaaggaggcagaatcatc

SEQ ID NO: 21004 - DNA, 20 bp, synthetic construct
  source 1..20: mol_type = other DNA
tactaaggaggcagaatcat

SEQ ID NO: 21005 - DNA, 20 bp, synthetic construct
  source 1..20: mol_type = other DNA
ctactaaggaggcagaatca

SEQ ID NO: 21006 - DNA, 20 bp, synthetic construct
  source 1..20: mol_type = other DNA
gctactaaggaggcagaatc

SEQ ID NO: 21007 - DNA, 20 bp, synthetic construct
  source 1..20: mol_type = other DNA
agctactaaggaggcagaat

SEQ ID NO: 21008 - DNA, 20 bp, synthetic construct
  source 1..20: mol_type = other DNA
cagctactaaggaggcagaa

SEQ ID NO: 21009 - DNA, 20 bp, synthetic construct
  source 1..20: mol_type = other DNA
ccagctactaaggaggcaga

SEQ ID NO: 21010 - DNA, 20 bp, synthetic construct
  source 1..20: mol_type = other DNA
cccagctactaaggaggcag

SEQ ID NO: 21011 - DNA, 20 bp, synthetic construct
  source 1..20: mol_type = other DNA
tcccagctactaaggaggca

SEQ ID NO: 21012 - DNA, 20 bp, synthetic construct
  source 1..20: mol_type = other DNA
gtcccagctactaaggaggc

SEQ ID NO: 21013 - DNA, 20 bp, synthetic construct
  source 1..20: mol_type = other DNA
agtcccagctactaaggagg

SEQ ID NO: 21014 - DNA, 20 bp, synthetic construct
  source 1..20: mol_type = other DNA
tagtcccagctactaaggag

SEQ ID NO: 21015 - DNA, 20 bp, synthetic construct
  source 1..20: mol_type = other DNA
gtagtcccagctactaagga

SEQ ID NO: 21016 - DNA, 20 bp, synthetic construct
  source 1..20: mol_type = other DNA
tgtagtcccagctactaagg

SEQ ID NO: 21017 - DNA, 20 bp, synthetic construct
  source 1..20: mol_type = other DNA
gtgtagtcccagctactaag

SEQ ID NO: 21018 - DNA, 20 bp, synthetic construct
  source 1..20: mol_type = other DNA
ggtgtagtcccagctactaa

SEQ ID NO: 21019 - DNA, 20 bp, synthetic construct
  source 1..20: mol_type = other DNA
gggtgtagtcccagctacta

SEQ ID NO: 21020 - DNA, 20 bp, synthetic construct
  source 1..20: mol_type = other DNA
tgggtgtagtcccagctact

SEQ ID NO: 21021 - DNA, 20 bp, synthetic construct
  source 1..20: mol_type = other DNA
gtgggtgtagtcccagctac

SEQ ID NO: 21022 - DNA, 20 bp, synthetic construct
  source 1..20: mol_type = other DNA
ggtgggtgtagtcccagcta

SEQ ID NO: 21023 - DNA, 20 bp, synthetic construct
  source 1..20: mol_type = other DNA
aggtgggtgtagtcccagct

SEQ ID NO: 21024 - DNA, 20 bp, synthetic construct
  source 1..20: mol_type = other DNA
gaggtgggtgtagtcccagc

SEQ ID NO: 21025 - DNA, 20 bp, synthetic construct
  source 1..20: mol_type = other DNA
ggaggtgggtgtagtcccag

SEQ ID NO: 21026 - DNA, 20 bp, synthetic construct
  source 1..20: mol_type = other DNA
gggaggtgggtgtagtccca

SEQ ID NO: 21027 - DNA, 20 bp, synthetic construct
  source 1..20: mol_type = other DNA
cgggaggtgggtgtagtccc

SEQ ID NO: 21028 - DNA, 20 bp, synthetic construct
  source 1..20: mol_type = other DNA
acgggaggtgggtgtagtcc

SEQ ID NO: 21029 - DNA, 20 bp, synthetic construct
  source 1..20: mol_type = other DNA
aacgggaggtgggtgtagtc

SEQ ID NO: 21030 - DNA, 20 bp, synthetic construct
  source 1..20: mol_type = other DNA
gaacgggaggtgggtgtagt

SEQ ID NO: 21031 - DNA, 20 bp, synthetic construct
  source 1..20: mol_type = other DNA
ggaacgggaggtgggtgtag

SEQ ID NO: 21032 - DNA, 20 bp, synthetic construct
  source 1..20: mol_type = other DNA
cggaacgggaggtgggtgta

SEQ ID NO: 21033 - DNA, 20 bp, synthetic construct
  source 1..20: mol_type = other DNA
acggaacgggaggtgggtgt

SEQ ID NO: 21034 - DNA, 20 bp, synthetic construct
  source 1..20: mol_type = other DNA
aacggaacgggaggtgggtg

SEQ ID NO: 21035 - DNA, 20 bp, synthetic construct
  source 1..20: mol_type = other DNA
caacggaacgggaggtgggt

SEQ ID NO: 21036 - DNA, 20 bp, synthetic construct
  source 1..20: mol_type = other DNA
acaacggaacgggaggtggg

SEQ ID NO: 21037 - DNA, 20 bp, synthetic construct
  source 1..20: mol_type = other DNA
gacaacggaacgggaggtgg

SEQ ID NO: 21038 - DNA, 20 bp, synthetic construct
  source 1..20: mol_type = other DNA
tgacaacggaacgggaggtg

SEQ ID NO: 21039 - DNA, 20 bp, synthetic construct
  source 1..20: mol_type = other DNA
atgacaacggaacgggaggt

SEQ ID NO: 21040 - DNA, 20 bp, synthetic construct
  source 1..20: mol_type = other DNA
gatgacaacggaacgggagg

SEQ ID NO: 21041 - DNA, 20 bp, synthetic construct
  source 1..20: mol_type = other DNA
agatgacaacggaacgggag

SEQ ID NO: 21042 - DNA, 20 bp, synthetic construct
  source 1..20: mol_type = other DNA
aagatgacaacggaacggga

SEQ ID NO: 21043 - DNA, 20 bp, synthetic construct
  source 1..20: mol_type = other DNA
aaagatgacaacggaacggg

SEQ ID NO: 21044 - DNA, 20 bp, synthetic construct
  source 1..20: mol_type = other DNA
aaaagatgacaacggaacgg

SEQ ID NO: 21045 - DNA, 20 bp, synthetic construct
  source 1..20: mol_type = other DNA
aaaaagatgacaacggaacg

SEQ ID NO: 21046 - DNA, 20 bp, synthetic construct
  source 1..20: mol_type = other DNA
aaaaaagatgacaacggaac

SEQ ID NO: 21047 - DNA, 20 bp, synthetic construct
  source 1..20: mol_type = other DNA
aaaaaaagatgacaacggaa

SEQ ID NO: 21048 - DNA, 20 bp, synthetic construct
  source 1..20: mol_type = other DNA
aaaaaaaagatgacaacgga

SEQ ID NO: 21049 - DNA, 20 bp, synthetic construct
  source 1..20: mol_type = other DNA
aaaaaaaaagatgacaacgg

SEQ ID NO: 21050 - DNA, 20 bp, synthetic construct
  source 1..20: mol_type = other DNA
aaaaaaaaaagatgacaacg

SEQ ID NO: 21051 - DNA, 20 bp, synthetic construct
  source 1..20: mol_type = other DNA
aaaaaaaaaaagatgacaac

SEQ ID NO: 21052 - DNA, 20 bp, synthetic construct
  source 1..20: mol_type = other DNA
aaaaaaaaaaaagatgacaa

SEQ ID NO: 21053 - DNA, 20 bp, synthetic construct
  source 1..20: mol_type = other DNA
aaaaaaaaaaaaagatgaca

SEQ ID NO: 21054 - DNA, 20 bp, synthetic construct
  source 1..20: mol_type = other DNA
aaaaaaaaaaaaaagatgac

SEQ ID NO: 21055 - DNA, 20 bp, synthetic construct
  source 1..20: mol_type = other DNA
gaaaaaaaaaaaaaagatga

SEQ ID NO: 21056 - DNA, 20 bp, synthetic construct
  source 1..20: mol_type = other DNA
agaaaaaaaaaaaaaagatg

SEQ ID NO: 21057 - DNA, 20 bp, synthetic construct
  source 1..20: mol_type = other DNA
aagaaaaaaaaaaaaaagat

SEQ ID NO: 21058 - DNA, 20 bp, synthetic construct
  source 1..20: mol_type = other DNA
aaagaaaaaaaaaaaaaaga

SEQ ID NO: 21059 - DNA, 20 bp, synthetic construct
  source 1..20: mol_type = other DNA
aaaagaaaaaaaaaaaaaag

SEQ ID NO: 21060 - DNA, 20 bp, synthetic construct
  source 1..20: mol_type = other DNA
aaaaagaaaaaaaaaaaaaa

SEQ ID NO: 21061 - DNA, 20 bp, synthetic construct
  source 1..20: mol_type = other DNA
aaaaaagaaaaaaaaaaaaa

SEQ ID NO: 21062 - DNA, 20 bp, synthetic construct
  source 1..20: mol_type = other DNA
caaaaaagaaaaaaaaaaaa

SEQ ID NO: 21063 - DNA, 20 bp, synthetic construct
  source 1..20: mol_type = other DNA
ccaaaaaagaaaaaaaaaaa

SEQ ID NO: 21064 - DNA, 20 bp, synthetic construct
  source 1..20: mol_type = other DNA
tccaaaaaagaaaaaaaaaa

SEQ ID NO: 21065 - DNA, 20 bp, synthetic construct
  source 1..20: mol_type = other DNA
ctccaaaaaagaaaaaaaaa

SEQ ID NO: 21066 - DNA, 20 bp, synthetic construct
  source 1..20: mol_type = other DNA
tctccaaaaaagaaaaaaaa

SEQ ID NO: 21067 - DNA, 20 bp, synthetic construct
  source 1..20: mol_type = other DNA
gtctccaaaaaagaaaaaaa

SEQ ID NO: 21068 - DNA, 20 bp, synthetic construct
  source 1..20: mol_type = other DNA
tgtctccaaaaaagaaaaaa

SEQ ID NO: 21069 - DNA, 20 bp, synthetic construct
  source 1..20: mol_type = other DNA
ctgtctccaaaaaagaaaaa

SEQ ID NO: 21070 - DNA, 20 bp, synthetic construct
  source 1..20: mol_type = other DNA
tctgtctccaaaaaagaaaa

SEQ ID NO: 21071 - DNA, 20 bp, synthetic construct
  source 1..20: mol_type = other DNA
ttctgtctccaaaaaagaaa

SEQ ID NO: 21072 - DNA, 20 bp, synthetic construct
  source 1..20: mol_type = other DNA
attctgtctccaaaaaagaa

SEQ ID NO: 21073 - DNA, 20 bp, synthetic construct
  source 1..20: mol_type = other DNA
gattctgtctccaaaaaaga

SEQ ID NO: 21074 - DNA, 20 bp, synthetic construct
  source 1..20: mol_type = other DNA
agattctgtctccaaaaaag

SEQ ID NO: 21075 - DNA, 20 bp, synthetic construct
  source 1..20: mol_type = other DNA
aagattctgtctccaaaaaa

SEQ ID NO: 21076 - DNA, 20 bp, synthetic construct
  source 1..20: mol_type = other DNA
gaagattctgtctccaaaaa

SEQ ID NO: 21077 - DNA, 20 bp, synthetic construct
  source 1..20: mol_type = other DNA
ggaagattctgtctccaaaa

SEQ ID NO: 21078 - DNA, 20 bp, synthetic construct
  source 1..20: mol_type = other DNA
aggaagattctgtctccaaa

SEQ ID NO: 21079 - DNA, 20 bp, synthetic construct
  source 1..20: mol_type = other DNA
gaggaagattctgtctccaa

SEQ ID NO: 21080 - DNA, 20 bp, synthetic construct
  source 1..20: mol_type = other DNA
agaggaagattctgtctcca

SEQ ID NO: 21081 - DNA, 20 bp, synthetic construct
  source 1..20: mol_type = other DNA
cagaggaagattctgtctcc

SEQ ID NO: 21082 - DNA, 20 bp, synthetic construct
  source 1..20: mol_type = other DNA
acagaggaagattctgtctc

SEQ ID NO: 21083 - DNA, 20 bp, synthetic construct
  source 1..20: mol_type = other DNA
aacagaggaagattctgtct

SEQ ID NO: 21084 - DNA, 20 bp, synthetic construct
  source 1..20: mol_type = other DNA
caacagaggaagattctgtc

SEQ ID NO: 21085 - DNA, 20 bp, synthetic construct
  source 1..20: mol_type = other DNA
gcaacagaggaagattctgt

SEQ ID NO: 21086 - DNA, 20 bp, synthetic construct
  source 1..20: mol_type = other DNA
agcaacagaggaagattctg

SEQ ID NO: 21087 - DNA, 20 bp, synthetic construct
  source 1..20: mol_type = other DNA
gagcaacagaggaagattct

SEQ ID NO: 21088 - DNA, 20 bp, synthetic construct
  source 1..20: mol_type = other DNA
tgagcaacagaggaagattc

SEQ ID NO: 21089 - DNA, 20 bp, synthetic construct
  source 1..20: mol_type = other DNA
ctgagcaacagaggaagatt

SEQ ID NO: 21090 - DNA, 20 bp, synthetic construct
  source 1..20: mol_type = other DNA
cctgagcaacagaggaagat

SEQ ID NO: 21091 - DNA, 20 bp, synthetic construct
  source 1..20: mol_type = other DNA
ccctgagcaacagaggaaga

SEQ ID NO: 21092 - DNA, 20 bp, synthetic construct
  source 1..20: mol_type = other DNA
accctgagcaacagaggaag

SEQ ID NO: 21093 - DNA, 20 bp, synthetic construct
  source 1..20: mol_type = other DNA
caccctgagcaacagaggaa

SEQ ID NO: 21094 - DNA, 20 bp, synthetic construct
  source 1..20: mol_type = other DNA
ccaccctgagcaacagagga

SEQ ID NO: 21095 - DNA, 20 bp, synthetic construct
  source 1..20: mol_type = other DNA
tccaccctgagcaacagagg

SEQ ID NO: 21096 - DNA, 20 bp, synthetic construct
  source 1..20: mol_type = other DNA
ctccaccctgagcaacagag

SEQ ID NO: 21097 - DNA, 20 bp, synthetic construct
  source 1..20: mol_type = other DNA
actccaccctgagcaacaga

SEQ ID NO: 21098 - DNA, 20 bp, synthetic construct
  source 1..20: mol_type = other DNA
cactccaccctgagcaacag

SEQ ID NO: 21099 - DNA, 20 bp, synthetic construct
  source 1..20: mol_type = other DNA
acactccaccctgagcaaca

SEQ ID NO: 21100 - DNA, 20 bp, synthetic construct
  source 1..20: mol_type = other DNA
tacactccaccctgagcaac

SEQ ID NO: 21101 - DNA, 20 bp, synthetic construct
  source 1..20: mol_type = other DNA
ctacactccaccctgagcaa

SEQ ID NO: 21102 - DNA, 20 bp, synthetic construct
  source 1..20: mol_type = other DNA
actacactccaccctgagca

SEQ ID NO: 21103 - DNA, 20 bp, synthetic construct
  source 1..20: mol_type = other DNA
cactacactccaccctgagc

SEQ ID NO: 21104 - DNA, 20 bp, synthetic construct
  source 1..20: mol_type = other DNA
ccactacactccaccctgag

SEQ ID NO: 21105 - DNA, 20 bp, synthetic construct
  source 1..20: mol_type = other DNA
gccactacactccaccctga

SEQ ID NO: 21106 - DNA, 20 bp, synthetic construct
  source 1..20: mol_type = other DNA
tgccactacactccaccctg

SEQ ID NO: 21107 - DNA, 20 bp, synthetic construct
  source 1..20: mol_type = other DNA
gtgccactacactccaccct

SEQ ID NO: 21108 - DNA, 20 bp, synthetic construct
  source 1..20: mol_type = other DNA
cgtgccactacactccaccc

SEQ ID NO: 21109 - DNA, 20 bp, synthetic construct
  source 1..20: mol_type = other DNA
tcgtgccactacactccacc

SEQ ID NO: 21110 - DNA, 20 bp, synthetic construct
  source 1..20: mol_type = other DNA
atcgtgccactacactccac

SEQ ID NO: 21111 - DNA, 20 bp, synthetic construct
  source 1..20: mol_type = other DNA
gatcgtgccactacactcca

SEQ ID NO: 21112 - DNA, 20 bp, synthetic construct
  source 1..20: mol_type = other DNA
tgatcgtgccactacactcc

SEQ ID NO: 21113 - DNA, 20 bp, synthetic construct
  source 1..20: mol_type = other DNA
atgatcgtgccactacactc

SEQ ID NO: 21114 - DNA, 20 bp, synthetic construct
  source 1..20: mol_type = other DNA
tatgatcgtgccactacact

SEQ ID NO: 21115 - DNA, 20 bp, synthetic construct
  source 1..20: mol_type = other DNA
ctatgatcgtgccactacac

SEQ ID NO: 21116 - DNA, 20 bp, synthetic construct
  source 1..20: mol_type = other DNA
gctatgatcgtgccactaca

SEQ ID NO: 21117 - DNA, 20 bp, synthetic construct
  source 1..20: mol_type = other DNA
agctatgatcgtgccactac

SEQ ID NO: 21118 - DNA, 20 bp, synthetic construct
  source 1..20: mol_type = other DNA
aagctatgatcgtgccacta

SEQ ID NO: 21119 - DNA, 20 bp, synthetic construct
  source 1..20: mol_type = other DNA
taagctatgatcgtgccact

SEQ ID NO: 21120 - DNA, 20 bp, synthetic construct
  source 1..20: mol_type = other DNA
gtaagctatgatcgtgccac

SEQ ID NO: 21121 - DNA, 20 bp, synthetic construct
  source 1..20: mol_type = other DNA
agtaagctatgatcgtgcca

SEQ ID NO: 21122 - DNA, 20 bp, synthetic construct
  source 1..20: mol_type = other DNA
cagtaagctatgatcgtgcc

SEQ ID NO: 21123 - DNA, 20 bp, synthetic construct
  source 1..20: mol_type = other DNA
acagtaagctatgatcgtgc

SEQ ID NO: 21124 - DNA, 20 bp, synthetic construct
  source 1..20: mol_type = other DNA
tacagtaagctatgatcgtg

SEQ ID NO: 21125 - DNA, 20 bp, synthetic construct
  source 1..20: mol_type = other DNA
ttacagtaagctatgatcgt

SEQ ID NO: 21126 - DNA, 20 bp, synthetic construct
  source 1..20: mol_type = other DNA
gttacagtaagctatgatcg

SEQ ID NO: 21127 - DNA, 20 bp, synthetic construct
  source 1..20: mol_type = other DNA
agttacagtaagctatgatc

SEQ ID NO: 21128 - DNA, 20 bp, synthetic construct
  source 1..20: mol_type = other DNA
cagttacagtaagctatgat

SEQ ID NO: 21129 - DNA, 20 bp, synthetic construct
  source 1..20: mol_type = other DNA
acagttacagtaagctatga

SEQ ID NO: 21130 - DNA, 20 bp, synthetic construct
  source 1..20: mol_type = other DNA
cacagttacagtaagctatg

SEQ ID NO: 21131 - DNA, 20 bp, synthetic construct
  source 1..20: mol_type = other DNA
acacagttacagtaagctat

SEQ ID NO: 21132 - DNA, 20 bp, synthetic construct
  source 1..20: mol_type = other DNA
tacacagttacagtaagcta

SEQ ID NO: 21133 - DNA, 20 bp, synthetic construct
  source 1..20: mol_type = other DNA
ttacacagttacagtaagct

SEQ ID NO: 21134 - DNA, 20 bp, synthetic construct
  source 1..20: mol_type = other DNA
gttacacagttacagtaagc

SEQ ID NO: 21135 - DNA, 20 bp, synthetic construct
  source 1..20: mol_type = other DNA
ggttacacagttacagtaag

SEQ ID NO: 21136 - DNA, 20 bp, synthetic construct
  source 1..20: mol_type = other DNA
aggttacacagttacagtaa

SEQ ID NO: 21137 - DNA, 20 bp, synthetic construct
  source 1..20: mol_type = other DNA
gaggttacacagttacagta

SEQ ID NO: 21138 - DNA, 20 bp, synthetic construct
  source 1..20: mol_type = other DNA
cgaggttacacagttacagt

SEQ ID NO: 21139 - DNA, 20 bp, synthetic construct
  source 1..20: mol_type = other DNA
tcgaggttacacagttacag

SEQ ID NO: 21140 - DNA, 20 bp, synthetic construct
  source 1..20: mol_type = other DNA
ttcgaggttacacagttaca

SEQ ID NO: 21141 - DNA, 20 bp, synthetic construct
  source 1..20: mol_type = other DNA
attcgaggttacacagttac

SEQ ID NO: 21142 - DNA, 20 bp, synthetic construct
  source 1..20: mol_type = other DNA
aattcgaggttacacagtta

SEQ ID NO: 21143 - DNA, 20 bp, synthetic construct
  source 1..20: mol_type = other DNA
gaattcgaggttacacagtt

SEQ ID NO: 21144 - DNA, 20 bp, synthetic construct
  source 1..20: mol_type = other DNA
agaattcgaggttacacagt

SEQ ID NO: 21145 - DNA, 20 bp, synthetic construct
  source 1..20: mol_type = other DNA
aagaattcgaggttacacag

SEQ ID NO: 21146 - DNA, 20 bp, synthetic construct
  source 1..20: mol_type = other DNA
caagaattcgaggttacaca

SEQ ID NO: 21147 - DNA, 20 bp, synthetic construct
  source 1..20: mol_type = other DNA
ccaagaattcgaggttacac

SEQ ID NO: 21148 - DNA, 20 bp, synthetic construct
  source 1..20: mol_type = other DNA
cccaagaattcgaggttaca

SEQ ID NO: 21149 - DNA, 20 bp, synthetic construct
  source 1..20: mol_type = other DNA
gcccaagaattcgaggttac

SEQ ID NO: 21150 - DNA, 20 bp, synthetic construct
  source 1..20: mol_type = other DNA
agcccaagaattcgaggtta

SEQ ID NO: 21151 - DNA, 20 bp, synthetic construct
  source 1..20: mol_type = other DNA
gagcccaagaattcgaggtt

SEQ ID NO: 21152 - DNA, 20 bp, synthetic construct
  source 1..20: mol_type = other DNA
tgagcccaagaattcgaggt

SEQ ID NO: 21153 - DNA, 20 bp, synthetic construct
  source 1..20: mol_type = other DNA
ttgagcccaagaattcgagg

SEQ ID NO: 21154 - DNA, 20 bp, synthetic construct
  source 1..20: mol_type = other DNA
cttgagcccaagaattcgag

SEQ ID NO: 21155 - DNA, 20 bp, synthetic construct
  source 1..20: mol_type = other DNA
gcttgagcccaagaattcga

SEQ ID NO: 21156 - DNA, 20 bp, synthetic construct
  source 1..20: mol_type = other DNA
tgcttgagcccaagaattcg

SEQ ID NO: 21157 - DNA, 20 bp, synthetic construct
  source 1..20: mol_type = other DNA
ttgcttgagcccaagaattc

SEQ ID NO: 21158 - DNA, 20 bp, synthetic construct
  source 1..20: mol_type = other DNA
attgcttgagcccaagaatt

SEQ ID NO: 21159 - DNA, 20 bp, synthetic construct
  source 1..20: mol_type = other DNA
gattgcttgagcccaagaat

SEQ ID NO: 21160 - DNA, 20 bp, synthetic construct
  source 1..20: mol_type = other DNA
tgattgcttgagcccaagaa

SEQ ID NO: 21161 - DNA, 20 bp, synthetic construct
  source 1..20: mol_type = other DNA
atgattgcttgagcccaaga

SEQ ID NO: 21162 - DNA, 20 bp, synthetic construct
  source 1..20: mol_type = other DNA
gatgattgcttgagcccaag

SEQ ID NO: 21163 - DNA, 20 bp, synthetic construct
  source 1..20: mol_type = other DNA
ggatgattgcttgagcccaa

SEQ ID NO: 21164 - DNA, 20 bp, synthetic construct
  source 1..20: mol_type = other DNA
gggatgattgcttgagccca

SEQ ID NO: 21165 - DNA, 20 bp, synthetic construct
  source 1..20: mol_type = other DNA
tgggatgattgcttgagccc

SEQ ID NO: 21166 - DNA, 20 bp, synthetic construct
  source 1..20: mol_type = other DNA
atgggatgattgcttgagcc

SEQ ID NO: 21167 - DNA, 20 bp, synthetic construct
  source 1..20: mol_type = other DNA
gatgggatgattgcttgagc

SEQ ID NO: 21168 - DNA, 20 bp, synthetic construct
  source 1..20: mol_type = other DNA
tgatgggatgattgcttgag

SEQ ID NO: 21169 - DNA, 20 bp, synthetic construct
  source 1..20: mol_type = other DNA
atgatgggatgattgcttga

SEQ ID NO: 21170 - DNA, 20 bp, synthetic construct
  source 1..20: mol_type = other DNA
gatgatgggatgattgcttg

SEQ ID NO: 21171 - DNA, 20 bp, synthetic construct
  source 1..20: mol_type = other DNA
ggatgatgggatgattgctt

SEQ ID NO: 21172 - DNA, 20 bp, synthetic construct
  source 1..20: mol_type = other DNA
gggatgatgggatgattgct

SEQ ID NO: 21173 - DNA, 20 bp, synthetic construct
  source 1..20: mol_type = other DNA
tgggatgatgggatgattgc

SEQ ID NO: 21174 - DNA, 20 bp, synthetic construct
  source 1..20: mol_type = other DNA
gtgggatgatgggatgattg

SEQ ID NO: 21175 - DNA, 20 bp, synthetic construct
  source 1..20: mol_type = other DNA
ggtgggatgatgggatgatt

SEQ ID NO: 21176 - DNA, 20 bp, synthetic construct
  source 1..20: mol_type = other DNA
aggtgggatgatgggatgat

SEQ ID NO: 21177 - DNA, 20 bp, synthetic construct
  source 1..20: mol_type = other DNA
gaggtgggatgatgggatga

SEQ ID NO: 21178 - DNA, 20 bp, synthetic construct
  source 1..20: mol_type = other DNA
tgaggtgggatgatgggatg

SEQ ID NO: 21179 - DNA, 20 bp, synthetic construct
  source 1..20: mol_type = other DNA
ctgaggtgggatgatgggat

SEQ ID NO: 21180 - DNA, 20 bp, synthetic construct
  source 1..20: mol_type = other DNA
gctgaggtgggatgatggga

SEQ ID NO: 21181 - DNA, 20 bp, synthetic construct
  source 1..20: mol_type = other DNA
agctgaggtgggatgatggg

SEQ ID NO: 21182 - DNA, 20 bp, synthetic construct
  source 1..20: mol_type = other DNA
aagctgaggtgggatgatgg

SEQ ID NO: 21183 - DNA, 20 bp, synthetic construct
  source 1..20: mol_type = other DNA
caagctgaggtgggatgatg

SEQ ID NO: 21184 - DNA, 20 bp, synthetic construct
  source 1..20: mol_type = other DNA
gcaagctgaggtgggatgat

SEQ ID NO: 21185 - DNA, 20 bp, synthetic construct
  source 1..20: mol_type = other DNA
agcaagctgaggtgggatga

SEQ ID NO: 21186 - DNA, 20 bp, synthetic construct
  source 1..20: mol_type = other DNA
cagcaagctgaggtgggatg

SEQ ID NO: 21187 - DNA, 20 bp, synthetic construct
  source 1..20: mol_type = other DNA
tcagcaagctgaggtgggat

SEQ ID NO: 21188 - DNA, 20 bp, synthetic construct
  source 1..20: mol_type = other DNA
ctcagcaagctgaggtggga

SEQ ID NO: 21189 - DNA, 20 bp, synthetic construct
  source 1..20: mol_type = other DNA
actcagcaagctgaggtggg

SEQ ID NO: 21190 - DNA, 20 bp, synthetic construct
  source 1..20: mol_type = other DNA
tactcagcaagctgaggtgg

SEQ ID NO: 21191 - DNA, 20 bp, synthetic construct
  source 1..20: mol_type = other DNA
gtactcagcaagctgaggtg

SEQ ID NO: 21192 - DNA, 20 bp, synthetic construct
  source 1..20: mol_type = other DNA
ggtactcagcaagctgaggt

SEQ ID NO: 21193 - DNA, 20 bp, synthetic construct
  source 1..20: mol_type = other DNA
aggtactcagcaagctgagg

SEQ ID NO: 21194 - DNA, 20 bp, synthetic construct
  source 1..20: mol_type = other DNA
caggtactcagcaagctgag

SEQ ID NO: 21195 - DNA, 20 bp, synthetic construct
  source 1..20: mol_type = other DNA
ccaggtactcagcaagctga

SEQ ID NO: 21196 - DNA, 20 bp, synthetic construct
  source 1..20: mol_type = other DNA
cccaggtactcagcaagctg

SEQ ID NO: 21197 - DNA, 20 bp, synthetic construct
  source 1..20: mol_type = other DNA
ccccaggtactcagcaagct

SEQ ID NO: 21198 - DNA, 20 bp, synthetic construct
  source 1..20: mol_type = other DNA
gccccaggtactcagcaagc

SEQ ID NO: 21199 - DNA, 20 bp, synthetic construct
  source 1..20: mol_type = other DNA
agccccaggtactcagcaag

SEQ ID NO: 21200 - DNA, 20 bp, synthetic construct
  source 1..20: mol_type = other DNA
tagccccaggtactcagcaa

SEQ ID NO: 21201 - DNA, 20 bp, synthetic construct
  source 1..20: mol_type = other DNA
gtagccccaggtactcagca

SEQ ID NO: 21202 - DNA, 20 bp, synthetic construct
  source 1..20: mol_type = other DNA
tgtagccccaggtactcagc

SEQ ID NO: 21203 - DNA, 20 bp, synthetic construct
  source 1..20: mol_type = other DNA
ctgtagccccaggtactcag

SEQ ID NO: 21204 - DNA, 20 bp, synthetic construct
  source 1..20: mol_type = other DNA
cctgtagccccaggtactca

SEQ ID NO: 21205 - DNA, 20 bp, synthetic construct
  source 1..20: mol_type = other DNA
acctgtagccccaggtactc

SEQ ID NO: 21206 - DNA, 20 bp, synthetic construct
  source 1..20: mol_type = other DNA
cacctgtagccccaggtact

SEQ ID NO: 21207 - DNA, 20 bp, synthetic construct
  source 1..20: mol_type = other DNA
acacctgtagccccaggtac

SEQ ID NO: 21208 - DNA, 20 bp, synthetic construct
  source 1..20: mol_type = other DNA
cacacctgtagccccaggta

SEQ ID NO: 21209 - DNA, 20 bp, synthetic construct
  source 1..20: mol_type = other DNA
acacacctgtagccccaggt

SEQ ID NO: 21210 - DNA, 20 bp, synthetic construct
  source 1..20: mol_type = other DNA
tacacacctgtagccccagg

SEQ ID NO: 21211 - DNA, 20 bp, synthetic construct
  source 1..20: mol_type = other DNA
gtacacacctgtagccccag

SEQ ID NO: 21212 - DNA, 20 bp, synthetic construct
  source 1..20: mol_type = other DNA
ggtacacacctgtagcccca

SEQ ID NO: 21213 - DNA, 20 bp, synthetic construct
  source 1..20: mol_type = other DNA
tggtacacacctgtagcccc

SEQ ID NO: 21214 - DNA, 20 bp, synthetic construct
  source 1..20: mol_type = other DNA
gtggtacacacctgtagccc

SEQ ID NO: 21215 - DNA, 20 bp, synthetic construct
  source 1..20: mol_type = other DNA
ggtggtacacacctgtagcc

SEQ ID NO: 21216 - DNA, 20 bp, synthetic construct
  source 1..20: mol_type = other DNA
tggtggtacacacctgtagc

SEQ ID NO: 21217 - DNA, 20 bp, synthetic construct
  source 1..20: mol_type = other DNA
atggtggtacacacctgtag

SEQ ID NO: 21218 - DNA, 20 bp, synthetic construct
  source 1..20: mol_type = other DNA
catggtggtacacacctgta

SEQ ID NO: 21219 - DNA, 20 bp, synthetic construct
  source 1..20: mol_type = other DNA
acatggtggtacacacctgt

SEQ ID NO: 21220 - DNA, 20 bp, synthetic construct
  source 1..20: mol_type = other DNA
gacatggtggtacacacctg

SEQ ID NO: 21221 - DNA, 20 bp, synthetic construct
  source 1..20: mol_type = other DNA
ggacatggtggtacacacct

SEQ ID NO: 21222 - DNA, 20 bp, synthetic construct
  source 1..20: mol_type = other DNA
cggacatggtggtacacacc

SEQ ID NO: 21223 - DNA, 20 bp, synthetic construct
  source 1..20: mol_type = other DNA
ccggacatggtggtacacac

SEQ ID NO: 21224 - DNA, 20 bp, synthetic construct
  source 1..20: mol_type = other DNA
gccggacatggtggtacaca

SEQ ID NO: 21225 - DNA, 20 bp, synthetic construct
  source 1..20: mol_type = other DNA
agccggacatggtggtacac

SEQ ID NO: 21226 - DNA, 20 bp, synthetic construct
  source 1..20: mol_type = other DNA
tagccggacatggtggtaca

SEQ ID NO: 21227 - DNA, 20 bp, synthetic construct
  source 1..20: mol_type = other DNA
ttagccggacatggtggtac

SEQ ID NO: 21228 - DNA, 20 bp, synthetic construct
  source 1..20: mol_type = other DNA
attagccggacatggtggta

SEQ ID NO: 21229 - DNA, 20 bp, synthetic construct
  source 1..20: mol_type = other DNA
aattagccggacatggtggt

SEQ ID NO: 21230 - DNA, 20 bp, synthetic construct
  source 1..20: mol_type = other DNA
taattagccggacatggtgg

SEQ ID NO: 21231 - DNA, 20 bp, synthetic construct
  source 1..20: mol_type = other DNA
gtaattagccggacatggtg

SEQ ID NO: 21232 - DNA, 20 bp, synthetic construct
  source 1..20: mol_type = other DNA
agtaattagccggacatggt

SEQ ID NO: 21233 - DNA, 20 bp, synthetic construct
  source 1..20: mol_type = other DNA
aagtaattagccggacatgg

SEQ ID NO: 21234 - DNA, 20 bp, synthetic construct
  source 1..20: mol_type = other DNA
aaagtaattagccggacatg

SEQ ID NO: 21235 - DNA, 20 bp, synthetic construct
  source 1..20: mol_type = other DNA
aaaagtaattagccggacat

SEQ ID NO: 21236 - DNA, 20 bp, synthetic construct
  source 1..20: mol_type = other DNA
gaaaagtaattagccggaca

SEQ ID NO: 21237 - DNA, 20 bp, synthetic construct
  source 1..20: mol_type = other DNA
agaaaagtaattagccggac

SEQ ID NO: 21238 - DNA, 20 bp, synthetic construct
  source 1..20: mol_type = other DNA
aagaaaagtaattagccgga

SEQ ID NO: 21239 - DNA, 20 bp, synthetic construct
  source 1..20: mol_type = other DNA
taagaaaagtaattagccgg

SEQ ID NO: 21240 - DNA, 20 bp, synthetic construct
  source 1..20: mol_type = other DNA
ataagaaaagtaattagccg

SEQ ID NO: 21241 - DNA, 20 bp, synthetic construct
  source 1..20: mol_type = other DNA
aataagaaaagtaattagcc

SEQ ID NO: 21242 - DNA, 20 bp, synthetic construct
  source 1..20: mol_type = other DNA
aaataagaaaagtaattagc

SEQ ID NO: 21243 - DNA, 20 bp, synthetic construct
  source 1..20: mol_type = other DNA
aaaataagaaaagtaattag

SEQ ID NO: 21244 - DNA, 20 bp, synthetic construct
  source 1..20: mol_type = other DNA
aaaaataagaaaagtaatta

SEQ ID NO: 21245 - DNA, 20 bp, synthetic construct
  source 1..20: mol_type = other DNA
taaaaataagaaaagtaatt

SEQ ID NO: 21246 - DNA, 20 bp, synthetic construct
  source 1..20: mol_type = other DNA
ttaaaaataagaaaagtaat

SEQ ID NO: 21247 - DNA, 20 bp, synthetic construct
  source 1..20: mol_type = other DNA
attaaaaataagaaaagtaa

SEQ ID NO: 21248 - DNA, 20 bp, synthetic construct
  source 1..20: mol_type = other DNA
aattaaaaataagaaaagta

SEQ ID NO: 21249 - DNA, 20 bp, synthetic construct
  source 1..20: mol_type = other DNA
aaattaaaaataagaaaagt

SEQ ID NO: 21250 - DNA, 20 bp, synthetic construct
  source 1..20: mol_type = other DNA
aaaattaaaaataagaaaag

SEQ ID NO: 21251 - DNA, 20 bp, synthetic construct
  source 1..20: mol_type = other DNA
aaaaattaaaaataagaaaa

SEQ ID NO: 21252 - DNA, 20 bp, synthetic construct
  source 1..20: mol_type = other DNA
gaaaaattaaaaataagaaa

SEQ ID NO: 21253 - DNA, 20 bp, synthetic construct
  source 1..20: mol_type = other DNA
cgaaaaattaaaaataagaa

SEQ ID NO: 21254 - DNA, 20 bp, synthetic construct
  source 1..20: mol_type = other DNA
ccgaaaaattaaaaataaga

SEQ ID NO: 21255 - DNA, 20 bp, synthetic construct
  source 1..20: mol_type = other DNA
tccgaaaaattaaaaataag

SEQ ID NO: 21256 - DNA, 20 bp, synthetic construct
  source 1..20: mol_type = other DNA
ctccgaaaaattaaaaataa

SEQ ID NO: 21257 - DNA, 20 bp, synthetic construct
  source 1..20: mol_type = other DNA
tctccgaaaaattaaaaata

SEQ ID NO: 21258 - DNA, 20 bp, synthetic construct
  source 1..20: mol_type = other DNA
atctccgaaaaattaaaaat

SEQ ID NO: 21259 - DNA, 20 bp, synthetic construct
  source 1..20: mol_type = other DNA
tatctccgaaaaattaaaaa

SEQ ID NO: 21260 - DNA, 20 bp, synthetic construct
  source 1..20: mol_type = other DNA
ctatctccgaaaaattaaaa

SEQ ID NO: 21261 - DNA, 20 bp, synthetic construct
  source 1..20: mol_type = other DNA
cctatctccgaaaaattaaa

SEQ ID NO: 21262 - DNA, 20 bp, synthetic construct
  source 1..20: mol_type = other DNA
tcctatctccgaaaaattaa

SEQ ID NO: 21263 - DNA, 20 bp, synthetic construct
  source 1..20: mol_type = other DNA
atcctatctccgaaaaatta

SEQ ID NO: 21264 - DNA, 20 bp, synthetic construct
  source 1..20: mol_type = other DNA
gatcctatctccgaaaaatt

SEQ ID NO: 21265 - DNA, 20 bp, synthetic construct
  source 1..20: mol_type = other DNA
agatcctatctccgaaaaat

SEQ ID NO: 21266 - DNA, 20 bp, synthetic construct
  source 1..20: mol_type = other DNA
aagatcctatctccgaaaaa

SEQ ID NO: 21267 - DNA, 20 bp, synthetic construct
  source 1..20: mol_type = other DNA
caagatcctatctccgaaaa

SEQ ID NO: 21268 - DNA, 20 bp, synthetic construct
  source 1..20: mol_type = other DNA
gcaagatcctatctccgaaa

SEQ ID NO: 21269 - DNA, 20 bp, synthetic construct
  source 1..20: mol_type = other DNA
agcaagatcctatctccgaa

SEQ ID NO: 21270 - DNA, 20 bp, synthetic construct
  source 1..20: mol_type = other DNA
gagcaagatcctatctccga

SEQ ID NO: 21271 - DNA, 20 bp, synthetic construct
  source 1..20: mol_type = other DNA
agagcaagatcctatctccg

SEQ ID NO: 21272 - DNA, 20 bp, synthetic construct
  source 1..20: mol_type = other DNA
cagagcaagatcctatctcc

SEQ ID NO: 21273 - DNA, 20 bp, synthetic construct
  source 1..20: mol_type = other DNA
acagagcaagatcctatctc

SEQ ID NO: 21274 - DNA, 20 bp, synthetic construct
  source 1..20: mol_type = other DNA
aacagagcaagatcctatct

SEQ ID NO: 21275 - DNA, 20 bp, synthetic construct
  source 1..20: mol_type = other DNA
caacagagcaagatcctatc

SEQ ID NO: 21276 - DNA, 20 bp, synthetic construct
  source 1..20: mol_type = other DNA
gcaacagagcaagatcctat

SEQ ID NO: 21277 - DNA, 20 bp, synthetic construct
  source 1..20: mol_type = other DNA
ggcaacagagcaagatccta

SEQ ID NO: 21278 - DNA, 20 bp, synthetic construct
  source 1..20: mol_type = other DNA
gggcaacagagcaagatcct

SEQ ID NO: 21279 - DNA, 20 bp, synthetic construct
  source 1..20: mol_type = other DNA
tgggcaacagagcaagatcc

SEQ ID NO: 21280 - DNA, 20 bp, synthetic construct
  source 1..20: mol_type = other DNA
ctgggcaacagagcaagatc

SEQ ID NO: 21281 - DNA, 20 bp, synthetic construct
  source 1..20: mol_type = other DNA
cctgggcaacagagcaagat

SEQ ID NO: 21282 - DNA, 20 bp, synthetic construct
  source 1..20: mol_type = other DNA
gcctgggcaacagagcaaga

SEQ ID NO: 21283 - DNA, 20 bp, synthetic construct
  source 1..20: mol_type = other DNA
agcctgggcaacagagcaag

SEQ ID NO: 21284 - DNA, 20 bp, synthetic construct
  source 1..20: mol_type = other DNA
cagcctgggcaacagagcaa

SEQ ID NO: 21285 - DNA, 20 bp, synthetic construct
  source 1..20: mol_type = other DNA
ccagcctgggcaacagagca

SEQ ID NO: 21286 - DNA, 20 bp, synthetic construct
  source 1..20: mol_type = other DNA
accagcctgggcaacagagc

SEQ ID NO: 21287 - DNA, 20 bp, synthetic construct
  source 1..20: mol_type = other DNA
caccagcctgggcaacagag

SEQ ID NO: 21288 - DNA, 20 bp, synthetic construct
  source 1..20: mol_type = other DNA
acaccagcctgggcaacaga

SEQ ID NO: 21289 - DNA, 20 bp, synthetic construct
  source 1..20: mol_type = other DNA
gacaccagcctgggcaacag

SEQ ID NO: 21290 - DNA, 20 bp, synthetic construct
  source 1..20: mol_type = other DNA
tgacaccagcctgggcaaca

SEQ ID NO: 21291 - DNA, 20 bp, synthetic construct
  source 1..20: mol_type = other DNA
ttgacaccagcctgggcaac

SEQ ID NO: 21292 - DNA, 20 bp, synthetic construct
  source 1..20: mol_type = other DNA
tttgacaccagcctgggcaa

SEQ ID NO: 21293 - DNA, 20 bp, synthetic construct
  source 1..20: mol_type = other DNA
gtttgacaccagcctgggca

SEQ ID NO: 21294 - DNA, 20 bp, synthetic construct
  source 1..20: mol_type = other DNA
agtttgacaccagcctgggc

SEQ ID NO: 21295 - DNA, 20 bp, synthetic construct
  source 1..20: mol_type = other DNA
gagtttgacaccagcctggg

SEQ ID NO: 21296 - DNA, 20 bp, synthetic construct
  source 1..20: mol_type = other DNA
ggagtttgacaccagcctgg

SEQ ID NO: 21297 - DNA, 20 bp, synthetic construct
  source 1..20: mol_type = other DNA
aggagtttgacaccagcctg

SEQ ID NO: 21298 - DNA, 20 bp, synthetic construct
  source 1..20: mol_type = other DNA
caggagtttgacaccagcct

SEQ ID NO: 21299 - DNA, 20 bp, synthetic construct
  source 1..20: mol_type = other DNA
ccaggagtttgacaccagcc

SEQ ID NO: 21300 - DNA, 20 bp, synthetic construct
  source 1..20: mol_type = other DNA
cccaggagtttgacaccagc

SEQ ID NO: 21301 - DNA, 20 bp, synthetic construct
  source 1..20: mol_type = other DNA
gcccaggagtttgacaccag

SEQ ID NO: 21302 - DNA, 20 bp, synthetic construct
  source 1..20: mol_type = other DNA
agcccaggagtttgacacca

SEQ ID NO: 21303 - DNA, 20 bp, synthetic construct
  source 1..20: mol_type = other DNA
gagcccaggagtttgacacc

SEQ ID NO: 21304 - DNA, 20 bp, synthetic construct
  source 1..20: mol_type = other DNA
tgagcccaggagtttgacac

SEQ ID NO: 21305 - DNA, 20 bp, synthetic construct
  source 1..20: mol_type = other DNA
ttgagcccaggagtttgaca

SEQ ID NO: 21306 - DNA, 20 bp, synthetic construct
  source 1..20: mol_type = other DNA
cttgagcccaggagtttgac

SEQ ID NO: 21307 - DNA, 20 bp, synthetic construct
  source 1..20: mol_type = other DNA
acttgagcccaggagtttga

SEQ ID NO: 21308 - DNA, 20 bp, synthetic construct
  source 1..20: mol_type = other DNA
cacttgagcccaggagtttg

SEQ ID NO: 21309 - DNA, 20 bp, synthetic construct
  source 1..20: mol_type = other DNA
tcacttgagcccaggagttt

SEQ ID NO: 21310 - DNA, 20 bp, synthetic construct
  source 1..20: mol_type = other DNA
ttcacttgagcccaggagtt

SEQ ID NO: 21311 - DNA, 20 bp, synthetic construct
  source 1..20: mol_type = other DNA
tttcacttgagcccaggagt

SEQ ID NO: 21312 - DNA, 20 bp, synthetic construct
  source 1..20: mol_type = other DNA
gtttcacttgagcccaggag

SEQ ID NO: 21313 - DNA, 20 bp, synthetic construct
  source 1..20: mol_type = other DNA
agtttcacttgagcccagga

SEQ ID NO: 21314 - DNA, 20 bp, synthetic construct
  source 1..20: mol_type = other DNA
gagtttcacttgagcccagg

SEQ ID NO: 21315 - DNA, 20 bp, synthetic construct
  source 1..20: mol_type = other DNA
agagtttcacttgagcccag

SEQ ID NO: 21316 - DNA, 20 bp, synthetic construct
  source 1..20: mol_type = other DNA
aagagtttcacttgagccca

SEQ ID NO: 21317 - DNA, 20 bp, synthetic construct
  source 1..20: mol_type = other DNA
caagagtttcacttgagccc

SEQ ID NO: 21318 - DNA, 20 bp, synthetic construct
  source 1..20: mol_type = other DNA
gcaagagtttcacttgagcc

SEQ ID NO: 21319 - DNA, 20 bp, synthetic construct
  source 1..20: mol_type = other DNA
ggcaagagtttcacttgagc

SEQ ID NO: 21320 - DNA, 20 bp, synthetic construct
  source 1..20: mol_type = other DNA
aggcaagagtttcacttgag

SEQ ID NO: 21321 - DNA, 20 bp, synthetic construct
  source 1..20: mol_type = other DNA
aaggcaagagtttcacttga

SEQ ID NO: 21322 - DNA, 20 bp, synthetic construct
  source 1..20: mol_type = other DNA
caaggcaagagtttcacttg

SEQ ID NO: 21323 - DNA, 20 bp, synthetic construct
  source 1..20: mol_type = other DNA
ccaaggcaagagtttcactt

SEQ ID NO: 21324 - DNA, 20 bp, synthetic construct
  source 1..20: mol_type = other DNA
gccaaggcaagagtttcact

SEQ ID NO: 21325 - DNA, 20 bp, synthetic construct
  source 1..20: mol_type = other DNA
ggccaaggcaagagtttcac

SEQ ID NO: 21326 - DNA, 20 bp, synthetic construct
  source 1..20: mol_type = other DNA
aggccaaggcaagagtttca

SEQ ID NO: 21327 - DNA, 20 bp, synthetic construct
  source 1..20: mol_type = other DNA
gaggccaaggcaagagtttc

SEQ ID NO: 21328 - DNA, 20 bp, synthetic construct
  source 1..20: mol_type = other DNA
ggaggccaaggcaagagttt

SEQ ID NO: 21329 - DNA, 20 bp, synthetic construct
  source 1..20: mol_type = other DNA
gggaggccaaggcaagagtt

SEQ ID NO: 21330 - DNA, 20 bp, synthetic construct
  source 1..20: mol_type = other DNA
tgggaggccaaggcaagagt

SEQ ID NO: 21331 - DNA, 20 bp, synthetic construct
  source 1..20: mol_type = other DNA
ttgggaggccaaggcaagag

SEQ ID NO: 21332 - DNA, 20 bp, synthetic construct
  source 1..20: mol_type = other DNA
tttgggaggccaaggcaaga

SEQ ID NO: 21333 - DNA, 20 bp, synthetic construct
  source 1..20: mol_type = other DNA
ctttgggaggccaaggcaag

SEQ ID NO: 21334 - DNA, 20 bp, synthetic construct
  source 1..20: mol_type = other DNA
actttgggaggccaaggcaa

SEQ ID NO: 21335 - DNA, 20 bp, synthetic construct
  source 1..20: mol_type = other DNA
cactttgggaggccaaggca

SEQ ID NO: 21336 - DNA, 20 bp, synthetic construct
  source 1..20: mol_type = other DNA
acactttgggaggccaaggc

SEQ ID NO: 21337 - DNA, 20 bp, synthetic construct
  source 1..20: mol_type = other DNA
aacactttgggaggccaagg

SEQ ID NO: 21338 - DNA, 20 bp, synthetic construct
  source 1..20: mol_type = other DNA
caacactttgggaggccaag

SEQ ID NO: 21339 - DNA, 20 bp, synthetic construct
  source 1..20: mol_type = other DNA
ccaacactttgggaggccaa

SEQ ID NO: 21340 - DNA, 20 bp, synthetic construct
  source 1..20: mol_type = other DNA
cccaacactttgggaggcca

SEQ ID NO: 21341 - DNA, 20 bp, synthetic construct
  source 1..20: mol_type = other DNA
tcccaacactttgggaggcc

SEQ ID NO: 21342 - DNA, 20 bp, synthetic construct
  source 1..20: mol_type = other DNA
ctcccaacactttgggaggc

SEQ ID NO: 21343 - DNA, 20 bp, synthetic construct
  source 1..20: mol_type = other DNA
cctcccaacactttgggagg

SEQ ID NO: 21344 - DNA, 20 bp, synthetic construct
  source 1..20: mol_type = other DNA
ccctcccaacactttgggag

SEQ ID NO: 21345 - DNA, 20 bp, synthetic construct
  source 1..20: mol_type = other DNA
tccctcccaacactttggga

SEQ ID NO: 21346 - DNA, 20 bp, synthetic construct
  source 1..20: mol_type = other DNA
atccctcccaacactttggg

SEQ ID NO: 21347 - DNA, 20 bp, synthetic construct
  source 1..20: mol_type = other DNA
aatccctcccaacactttgg

SEQ ID NO: 21348 - DNA, 20 bp, synthetic construct
  source 1..20: mol_type = other DNA
taatccctcccaacactttg

SEQ ID NO: 21349 - DNA, 20 bp, synthetic construct
  source 1..20: mol_type = other DNA
gtaatccctcccaacacttt

SEQ ID NO: 21350 - DNA, 20 bp, synthetic construct
  source 1..20: mol_type = other DNA
tgtaatccctcccaacactt

SEQ ID NO: 21351 - DNA, 20 bp, synthetic construct
  source 1..20: mol_type = other DNA
ctgtaatccctcccaacact

SEQ ID NO: 21352 - DNA, 20 bp, synthetic construct
  source 1..20: mol_type = other DNA
cctgtaatccctcccaacac

SEQ ID NO: 21353 - DNA, 20 bp, synthetic construct
  source 1..20: mol_type = other DNA
gcctgtaatccctcccaaca

SEQ ID NO: 21354 - DNA, 20 bp, synthetic construct
  source 1..20: mol_type = other DNA
tgcctgtaatccctcccaac

SEQ ID NO: 21355 - DNA, 20 bp, synthetic construct
  source 1..20: mol_type = other DNA
atgcctgtaatccctcccaa

SEQ ID NO: 21356 - DNA, 20 bp, synthetic construct
  source 1..20: mol_type = other DNA
catgcctgtaatccctccca

SEQ ID NO: 21357 - DNA, 20 bp, synthetic construct
  source 1..20: mol_type = other DNA
tcatgcctgtaatccctccc

SEQ ID NO: 21358 - DNA, 20 bp, synthetic construct
  source 1..20: mol_type = other DNA
ctcatgcctgtaatccctcc

SEQ ID NO: 21359 - DNA, 20 bp, synthetic construct
  source 1..20: mol_type = other DNA
gctcatgcctgtaatccctc

SEQ ID NO: 21360 - DNA, 20 bp, synthetic construct
  source 1..20: mol_type = other DNA
ggctcatgcctgtaatccct

SEQ ID NO: 21361 - DNA, 20 bp, synthetic construct
  source 1..20: mol_type = other DNA
tggctcatgcctgtaatccc

SEQ ID NO: 21362 - DNA, 20 bp, synthetic construct
  source 1..20: mol_type = other DNA
gtggctcatgcctgtaatcc

SEQ ID NO: 21363 - DNA, 20 bp, synthetic construct
  source 1..20: mol_type = other DNA
agtggctcatgcctgtaatc

SEQ ID NO: 21364 - DNA, 20 bp, synthetic construct
  source 1..20: mol_type = other DNA
cagtggctcatgcctgtaat

SEQ ID NO: 21365 - DNA, 20 bp, synthetic construct
  source 1..20: mol_type = other DNA
gcagtggctcatgcctgtaa

SEQ ID NO: 21366 - DNA, 20 bp, synthetic construct
  source 1..20: mol_type = other DNA
tgcagtggctcatgcctgta

SEQ ID NO: 21367 - DNA, 20 bp, synthetic construct
  source 1..20: mol_type = other DNA
gtgcagtggctcatgcctgt

SEQ ID NO: 21368 - DNA, 20 bp, synthetic construct
  source 1..20: mol_type = other DNA
ggtgcagtggctcatgcctg

SEQ ID NO: 21369 - DNA, 20 bp, synthetic construct
  source 1..20: mol_type = other DNA
gggtgcagtggctcatgcct

SEQ ID NO: 21370 - DNA, 20 bp, synthetic construct
  source 1..20: mol_type = other DNA
tgggtgcagtggctcatgcc

SEQ ID NO: 21371 - DNA, 20 bp, synthetic construct
  source 1..20: mol_type = other DNA
ctgggtgcagtggctcatgc

SEQ ID NO: 21372 - DNA, 20 bp, synthetic construct
  source 1..20: mol_type = other DNA
gctgggtgcagtggctcatg

SEQ ID NO: 21373 - DNA, 20 bp, synthetic construct
  source 1..20: mol_type = other DNA
ggctgggtgcagtggctcat

SEQ ID NO: 21374 - DNA, 20 bp, synthetic construct
  source 1..20: mol_type = other DNA
aggctgggtgcagtggctca

SEQ ID NO: 21375 - DNA, 20 bp, synthetic construct
  source 1..20: mol_type = other DNA
gaggctgggtgcagtggctc

SEQ ID NO: 21376 - DNA, 20 bp, synthetic construct
  source 1..20: mol_type = other DNA
ggaggctgggtgcagtggct

SEQ ID NO: 21377 - DNA, 20 bp, synthetic construct
  source 1..20: mol_type = other DNA
aggaggctgggtgcagtggc

SEQ ID NO: 21378 - DNA, 20 bp, synthetic construct
  source 1..20: mol_type = other DNA
gaggaggctgggtgcagtgg

SEQ ID NO: 21379 - DNA, 20 bp, synthetic construct
  source 1..20: mol_type = other DNA
agaggaggctgggtgcagtg

SEQ ID NO: 21380 - DNA, 20 bp, synthetic construct
  source 1..20: mol_type = other DNA
aagaggaggctgggtgcagt

SEQ ID NO: 21381 - DNA, 20 bp, synthetic construct
  source 1..20: mol_type = other DNA
aaagaggaggctgggtgcag

SEQ ID NO: 21382 - DNA, 20 bp, synthetic construct
  source 1..20: mol_type = other DNA
gaaagaggaggctgggtgca

SEQ ID NO: 21383 - DNA, 20 bp, synthetic construct
  source 1..20: mol_type = other DNA
agaaagaggaggctgggtgc

SEQ ID NO: 21384 - DNA, 20 bp, synthetic construct
  source 1..20: mol_type = other DNA
aagaaagaggaggctgggtg

SEQ ID NO: 21385 - DNA, 20 bp, synthetic construct
  source 1..20: mol_type = other DNA
gaagaaagaggaggctgggt

SEQ ID NO: 21386 - DNA, 20 bp, synthetic construct
  source 1..20: mol_type = other DNA
ggaagaaagaggaggctggg

SEQ ID NO: 21387 - DNA, 20 bp, synthetic construct
  source 1..20: mol_type = other DNA
gggaagaaagaggaggctgg

SEQ ID NO: 21388 - DNA, 20 bp, synthetic construct
  source 1..20: mol_type = other DNA
tgggaagaaagaggaggctg

SEQ ID NO: 21389 - DNA, 20 bp, synthetic construct
  source 1..20: mol_type = other DNA
atgggaagaaagaggaggct

SEQ ID NO: 21390 - DNA, 20 bp, synthetic construct
  source 1..20: mol_type = other DNA
aatgggaagaaagaggaggc

SEQ ID NO: 21391 - DNA, 20 bp, synthetic construct
  source 1..20: mol_type = other DNA
aaatgggaagaaagaggagg

SEQ ID NO: 21392 - DNA, 20 bp, synthetic construct
  source 1..20: mol_type = other DNA
taaatgggaagaaagaggag

SEQ ID NO: 21393 - DNA, 20 bp, synthetic construct
  source 1..20: mol_type = other DNA
ttaaatgggaagaaagagga

SEQ ID NO: 21394 - DNA, 20 bp, synthetic construct
  source 1..20: mol_type = other DNA
gttaaatgggaagaaagagg

SEQ ID NO: 21395 - DNA, 20 bp, synthetic construct
  source 1..20: mol_type = other DNA
agttaaatgggaagaaagag

SEQ ID NO: 21396 - DNA, 20 bp, synthetic construct
  source 1..20: mol_type = other DNA
gagttaaatgggaagaaaga

SEQ ID NO: 21397 - DNA, 20 bp, synthetic construct
  source 1..20: mol_type = other DNA
ggagttaaatgggaagaaag

SEQ ID NO: 21398 - DNA, 20 bp, synthetic construct
  source 1..20: mol_type = other DNA
aggagttaaatgggaagaaa

SEQ ID NO: 21399 - DNA, 20 bp, synthetic construct
  source 1..20: mol_type = other DNA
taggagttaaatgggaagaa

SEQ ID NO: 21400 - DNA, 20 bp, synthetic construct
  source 1..20: mol_type = other DNA
ttaggagttaaatgggaaga

SEQ ID NO: 21401 - DNA, 20 bp, synthetic construct
  source 1..20: mol_type = other DNA
gttaggagttaaatgggaag

SEQ ID NO: 21402 - DNA, 20 bp, synthetic construct
  source 1..20: mol_type = other DNA
ggttaggagttaaatgggaa

SEQ ID NO: 21403 - DNA, 20 bp, synthetic construct
  source 1..20: mol_type = other DNA
tggttaggagttaaatggga

SEQ ID NO: 21404 - DNA, 20 bp, synthetic construct
  source 1..20: mol_type = other DNA
gtggttaggagttaaatggg

SEQ ID NO: 21405 - DNA, 20 bp, synthetic construct
  source 1..20: mol_type = other DNA
tgtggttaggagttaaatgg

SEQ ID NO: 21406 - DNA, 20 bp, synthetic construct
  source 1..20: mol_type = other DNA
gtgtggttaggagttaaatg

SEQ ID NO: 21407 - DNA, 20 bp, synthetic construct
  source 1..20: mol_type = other DNA
ggtgtggttaggagttaaat

SEQ ID NO: 21408 - DNA, 20 bp, synthetic construct
  source 1..20: mol_type = other DNA
cggtgtggttaggagttaaa

SEQ ID NO: 21409 - DNA, 20 bp, synthetic construct
  source 1..20: mol_type = other DNA
tcggtgtggttaggagttaa

SEQ ID NO: 21410 - DNA, 20 bp, synthetic construct
  source 1..20: mol_type = other DNA
ttcggtgtggttaggagtta

SEQ ID NO: 21411 - DNA, 20 bp, synthetic construct
  source 1..20: mol_type = other DNA
gttcggtgtggttaggagtt

SEQ ID NO: 21412 - DNA, 20 bp, synthetic construct
  source 1..20: mol_type = other DNA
agttcggtgtggttaggagt

SEQ ID NO: 21413 - DNA, 20 bp, synthetic construct
  source 1..20: mol_type = other DNA
aagttcggtgtggttaggag

SEQ ID NO: 21414 - DNA, 20 bp, synthetic construct
  source 1..20: mol_type = other DNA
aaagttcggtgtggttagga

SEQ ID NO: 21415 - DNA, 20 bp, synthetic construct
  source 1..20: mol_type = other DNA
gaaagttcggtgtggttagg

SEQ ID NO: 21416 - DNA, 20 bp, synthetic construct
  source 1..20: mol_type = other DNA
agaaagttcggtgtggttag

SEQ ID NO: 21417 - DNA, 20 bp, synthetic construct
  source 1..20: mol_type = other DNA
cagaaagttcggtgtggtta

SEQ ID NO: 21418 - DNA, 20 bp, synthetic construct
  source 1..20: mol_type = other DNA
acagaaagttcggtgtggtt

SEQ ID NO: 21419 - DNA, 20 bp, synthetic construct
  source 1..20: mol_type = other DNA
gacagaaagttcggtgtggt

SEQ ID NO: 21420 - DNA, 20 bp, synthetic construct
  source 1..20: mol_type = other DNA
agacagaaagttcggtgtgg

SEQ ID NO: 21421 - DNA, 20 bp, synthetic construct
  source 1..20: mol_type = other DNA
cagacagaaagttcggtgtg

SEQ ID NO: 21422 - DNA, 20 bp, synthetic construct
  source 1..20: mol_type = other DNA
gcagacagaaagttcggtgt

SEQ ID NO: 21423 - DNA, 20 bp, synthetic construct
  source 1..20: mol_type = other DNA
tgcagacagaaagttcggtg

SEQ ID NO: 21424 - DNA, 20 bp, synthetic construct
  source 1..20: mol_type = other DNA
ctgcagacagaaagttcggt

SEQ ID NO: 21425 - DNA, 20 bp, synthetic construct
  source 1..20: mol_type = other DNA
tctgcagacagaaagttcgg

SEQ ID NO: 21426 - DNA, 20 bp, synthetic construct
  source 1..20: mol_type = other DNA
ctctgcagacagaaagttcg

SEQ ID NO: 21427 - DNA, 20 bp, synthetic construct
  source 1..20: mol_type = other DNA
tctctgcagacagaaagttc

SEQ ID NO: 21428 - DNA, 20 bp, synthetic construct
  source 1..20: mol_type = other DNA
ctctctgcagacagaaagtt

SEQ ID NO: 21429 - DNA, 20 bp, synthetic construct
  source 1..20: mol_type = other DNA
cctctctgcagacagaaagt

SEQ ID NO: 21430 - DNA, 20 bp, synthetic construct
  source 1..20: mol_type = other DNA
tcctctctgcagacagaaag

SEQ ID NO: 21431 - DNA, 20 bp, synthetic construct
  source 1..20: mol_type = other DNA
ctcctctctgcagacagaaa

SEQ ID NO: 21432 - DNA, 20 bp, synthetic construct
  source 1..20: mol_type = other DNA
gctcctctctgcagacagaa

SEQ ID NO: 21433 - DNA, 20 bp, synthetic construct
  source 1..20: mol_type = other DNA
tgctcctctctgcagacaga

SEQ ID NO: 21434 - DNA, 20 bp, synthetic construct
  source 1..20: mol_type = other DNA
atgctcctctctgcagacag

SEQ ID NO: 21435 - DNA, 20 bp, synthetic construct
  source 1..20: mol_type = other DNA
aatgctcctctctgcagaca

SEQ ID NO: 21436 - DNA, 20 bp, synthetic construct
  source 1..20: mol_type = other DNA
caatgctcctctctgcagac

SEQ ID NO: 21437 - DNA, 20 bp, synthetic construct
  source 1..20: mol_type = other DNA
ccaatgctcctctctgcaga

SEQ ID NO: 21438 - DNA, 20 bp, synthetic construct
  source 1..20: mol_type = other DNA
accaatgctcctctctgcag

SEQ ID NO: 21439 - DNA, 20 bp, synthetic construct
  source 1..20: mol_type = other DNA
gaccaatgctcctctctgca

SEQ ID NO: 21440 - DNA, 20 bp, synthetic construct
  source 1..20: mol_type = other DNA
tgaccaatgctcctctctgc

SEQ ID NO: 21441 - DNA, 20 bp, synthetic construct
  source 1..20: mol_type = other DNA
ctgaccaatgctcctctctg

SEQ ID NO: 21442 - DNA, 20 bp, synthetic construct
  source 1..20: mol_type = other DNA
gctgaccaatgctcctctct

SEQ ID NO: 21443 - DNA, 20 bp, synthetic construct
  source 1..20: mol_type = other DNA
tgctgaccaatgctcctctc

SEQ ID NO: 21444 - DNA, 20 bp, synthetic construct
  source 1..20: mol_type = other DNA
ctgctgaccaatgctcctct

SEQ ID NO: 21445 - DNA, 20 bp, synthetic construct
  source 1..20: mol_type = other DNA
actgctgaccaatgctcctc

SEQ ID NO: 21446 - DNA, 20 bp, synthetic construct
  source 1..20: mol_type = other DNA
aactgctgaccaatgctcct

SEQ ID NO: 21447 - DNA, 20 bp, synthetic construct
  source 1..20: mol_type = other DNA
gaactgctgaccaatgctcc

SEQ ID NO: 21448 - DNA, 20 bp, synthetic construct
  source 1..20: mol_type = other DNA
tgaactgctgaccaatgctc

SEQ ID NO: 21449 - DNA, 20 bp, synthetic construct
  source 1..20: mol_type = other DNA
gtgaactgctgaccaatgct

SEQ ID NO: 21450 - DNA, 20 bp, synthetic construct
  source 1..20: mol_type = other DNA
tgtgaactgctgaccaatgc

SEQ ID NO: 21451 - DNA, 20 bp, synthetic construct
  source 1..20: mol_type = other DNA
ttgtgaactgctgaccaatg

SEQ ID NO: 21452 - DNA, 20 bp, synthetic construct
  source 1..20: mol_type = other DNA
tttgtgaactgctgaccaat

SEQ ID NO: 21453 - DNA, 20 bp, synthetic construct
  source 1..20: mol_type = other DNA
ttttgtgaactgctgaccaa

SEQ ID NO: 21454 - DNA, 20 bp, synthetic construct
  source 1..20: mol_type = other DNA
attttgtgaactgctgacca

SEQ ID NO: 21455 - DNA, 20 bp, synthetic construct
  source 1..20: mol_type = other DNA
cattttgtgaactgctgacc

SEQ ID NO: 21456 - DNA, 20 bp, synthetic construct
  source 1..20: mol_type = other DNA
ccattttgtgaactgctgac

SEQ ID NO: 21457 - DNA, 20 bp, synthetic construct
  source 1..20: mol_type = other DNA
gccattttgtgaactgctga

SEQ ID NO: 21458 - DNA, 20 bp, synthetic construct
  source 1..20: mol_type = other DNA
agccattttgtgaactgctg

SEQ ID NO: 21459 - DNA, 20 bp, synthetic construct
  source 1..20: mol_type = other DNA
tagccattttgtgaactgct

SEQ ID NO: 21460 - DNA, 20 bp, synthetic construct
  source 1..20: mol_type = other DNA
ctagccattttgtgaactgc

SEQ ID NO: 21461 - DNA, 20 bp, synthetic construct
  source 1..20: mol_type = other DNA
cctagccattttgtgaactg

SEQ ID NO: 21462 - DNA, 20 bp, synthetic construct
  source 1..20: mol_type = other DNA
acctagccattttgtgaact

SEQ ID NO: 21463 - DNA, 20 bp, synthetic construct
  source 1..20: mol_type = other DNA
cacctagccattttgtgaac

SEQ ID NO: 21464 - DNA, 20 bp, synthetic construct
  source 1..20: mol_type = other DNA
acacctagccattttgtgaa

SEQ ID NO: 21465 - DNA, 20 bp, synthetic construct
  source 1..20: mol_type = other DNA
cacacctagccattttgtga

SEQ ID NO: 21466 - DNA, 20 bp, synthetic construct
  source 1..20: mol_type = other DNA
tcacacctagccattttgtg

SEQ ID NO: 21467 - DNA, 20 bp, synthetic construct
  source 1..20: mol_type = other DNA
atcacacctagccattttgt

SEQ ID NO: 21468 - DNA, 20 bp, synthetic construct
  source 1..20: mol_type = other DNA
catcacacctagccattttg

SEQ ID NO: 21469 - DNA, 20 bp, synthetic construct
  source 1..20: mol_type = other DNA
ccatcacacctagccatttt

SEQ ID NO: 21470 - DNA, 20 bp, synthetic construct
  source 1..20: mol_type = other DNA
gccatcacacctagccattt

SEQ ID NO: 21471 - DNA, 20 bp, synthetic construct
  source 1..20: mol_type = other DNA
cgccatcacacctagccatt

SEQ ID NO: 21472 - DNA, 20 bp, synthetic construct
  source 1..20: mol_type = other DNA
acgccatcacacctagccat

SEQ ID NO: 21473 - DNA, 20 bp, synthetic construct
  source 1..20: mol_type = other DNA
cacgccatcacacctagcca

SEQ ID NO: 21474 - DNA, 20 bp, synthetic construct
  source 1..20: mol_type = other DNA
gcacgccatcacacctagcc

SEQ ID NO: 21475 - DNA, 20 bp, synthetic construct
  source 1..20: mol_type = other DNA
tgcacgccatcacacctagc

SEQ ID NO: 21476 - DNA, 20 bp, synthetic construct
  source 1..20: mol_type = other DNA
gtgcacgccatcacacctag

SEQ ID NO: 21477 - DNA, 20 bp, synthetic construct
  source 1..20: mol_type = other DNA
ggtgcacgccatcacaccta

SEQ ID NO: 21478 - DNA, 20 bp, synthetic construct
  source 1..20: mol_type = other DNA
gggtgcacgccatcacacct

SEQ ID NO: 21479 - DNA, 20 bp, synthetic construct
  source 1..20: mol_type = other DNA
tgggtgcacgccatcacacc

SEQ ID NO: 21480 - DNA, 20 bp, synthetic construct
  source 1..20: mol_type = other DNA
atgggtgcacgccatcacac

SEQ ID NO: 21481 - DNA, 20 bp, synthetic construct
  source 1..20: mol_type = other DNA
tatgggtgcacgccatcaca

SEQ ID NO: 21482 - DNA, 20 bp, synthetic construct
  source 1..20: mol_type = other DNA
ctatgggtgcacgccatcac

SEQ ID NO: 21483 - DNA, 20 bp, synthetic construct
  source 1..20: mol_type = other DNA
actatgggtgcacgccatca

SEQ ID NO: 21484 - DNA, 20 bp, synthetic construct
  source 1..20: mol_type = other DNA
gactatgggtgcacgccatc

SEQ ID NO: 21485 - DNA, 20 bp, synthetic construct
  source 1..20: mol_type = other DNA
ggactatgggtgcacgccat

SEQ ID NO: 21486 - DNA, 20 bp, synthetic construct
  source 1..20: mol_type = other DNA
gggactatgggtgcacgcca

SEQ ID NO: 21487 - DNA, 20 bp, synthetic construct
  source 1..20: mol_type = other DNA
tgggactatgggtgcacgcc

SEQ ID NO: 21488 - DNA, 20 bp, synthetic construct
  source 1..20: mol_type = other DNA
ctgggactatgggtgcacgc

SEQ ID NO: 21489 - DNA, 20 bp, synthetic construct
  source 1..20: mol_type = other DNA
gctgggactatgggtgcacg

SEQ ID NO: 21490 - DNA, 20 bp, synthetic construct
  source 1..20: mol_type = other DNA
agctgggactatgggtgcac

SEQ ID NO: 21491 - DNA, 20 bp, synthetic construct
  source 1..20: mol_type = other DNA
tagctgggactatgggtgca

SEQ ID NO: 21492 - DNA, 20 bp, synthetic construct
  source 1..20: mol_type = other DNA
gtagctgggactatgggtgc

SEQ ID NO: 21493 - DNA, 20 bp, synthetic construct
  source 1..20: mol_type = other DNA
agtagctgggactatgggtg

SEQ ID NO: 21494 - DNA, 20 bp, synthetic construct
  source 1..20: mol_type = other DNA
aagtagctgggactatgggt

SEQ ID NO: 21495 - DNA, 20 bp, synthetic construct
  source 1..20: mol_type = other DNA
caagtagctgggactatggg

SEQ ID NO: 21496 - DNA, 20 bp, synthetic construct
  source 1..20: mol_type = other DNA
ccaagtagctgggactatgg

SEQ ID NO: 21497 - DNA, 20 bp, synthetic construct
  source 1..20: mol_type = other DNA
cccaagtagctgggactatg

SEQ ID NO: 21498 - DNA, 20 bp, synthetic construct
  source 1..20: mol_type = other DNA
ccccaagtagctgggactat

SEQ ID NO: 21499 - DNA, 20 bp, synthetic construct
  source 1..20: mol_type = other DNA
tccccaagtagctgggacta

SEQ ID NO: 21500 - DNA, 20 bp, synthetic construct
  source 1..20: mol_type = other DNA
ctccccaagtagctgggact

SEQ ID NO: 21501 - DNA, 20 bp, synthetic construct
  source 1..20: mol_type = other DNA
gctccccaagtagctgggac

SEQ ID NO: 21502 - DNA, 20 bp, synthetic construct
  source 1..20: mol_type = other DNA
agctccccaagtagctggga

SEQ ID NO: 21503 - DNA, 20 bp, synthetic construct
  source 1..20: mol_type = other DNA
cagctccccaagtagctggg

SEQ ID NO: 21504 - DNA, 20 bp, synthetic construct
  source 1..20: mol_type = other DNA
tcagctccccaagtagctgg

SEQ ID NO: 21505 - DNA, 20 bp, synthetic construct
  source 1..20: mol_type = other DNA
ctcagctccccaagtagctg

SEQ ID NO: 21506 - DNA, 20 bp, synthetic construct
  source 1..20: mol_type = other DNA
cctcagctccccaagtagct

SEQ ID NO: 21507 - DNA, 20 bp, synthetic construct
  source 1..20: mol_type = other DNA
acctcagctccccaagtagc

SEQ ID NO: 21508 - DNA, 20 bp, synthetic construct
  source 1..20: mol_type = other DNA
cacctcagctccccaagtag

SEQ ID NO: 21509 - DNA, 20 bp, synthetic construct
  source 1..20: mol_type = other DNA
ccacctcagctccccaagta

SEQ ID NO: 21510 - DNA, 20 bp, synthetic construct
  source 1..20: mol_type = other DNA
cccacctcagctccccaagt

SEQ ID NO: 21511 - DNA, 20 bp, synthetic construct
  source 1..20: mol_type = other DNA
tcccacctcagctccccaag

SEQ ID NO: 21512 - DNA, 20 bp, synthetic construct
  source 1..20: mol_type = other DNA
ctcccacctcagctccccaa

SEQ ID NO: 21513 - DNA, 20 bp, synthetic construct
  source 1..20: mol_type = other DNA
cctcccacctcagctcccca

SEQ ID NO: 21514 - DNA, 20 bp, synthetic construct
  source 1..20: mol_type = other DNA
tcctcccacctcagctcccc

SEQ ID NO: 21515 - DNA, 20 bp, synthetic construct
  source 1..20: mol_type = other DNA
atcctcccacctcagctccc

SEQ ID NO: 21516 - DNA, 20 bp, synthetic construct
  source 1..20: mol_type = other DNA
gatcctcccacctcagctcc

SEQ ID NO: 21517 - DNA, 20 bp, synthetic construct
  source 1..20: mol_type = other DNA
cgatcctcccacctcagctc

SEQ ID NO: 21518 - DNA, 20 bp, synthetic construct
  source 1..20: mol_type = other DNA
gcgatcctcccacctcagct

SEQ ID NO: 21519 - DNA, 20 bp, synthetic construct
  source 1..20: mol_type = other DNA
agcgatcctcccacctcagc

SEQ ID NO: 21520 - DNA, 20 bp, synthetic construct
  source 1..20: mol_type = other DNA
cagcgatcctcccacctcag

SEQ ID NO: 21521 - DNA, 20 bp, synthetic construct
  source 1..20: mol_type = other DNA
ccagcgatcctcccacctca

SEQ ID NO: 21522 - DNA, 20 bp, synthetic construct
  source 1..20: mol_type = other DNA
tccagcgatcctcccacctc

SEQ ID NO: 21523 - DNA, 20 bp, synthetic construct
  source 1..20: mol_type = other DNA
ctccagcgatcctcccacct

SEQ ID NO: 21524 - DNA, 20 bp, synthetic construct
  source 1..20: mol_type = other DNA
gctccagcgatcctcccacc

SEQ ID NO: 21525 - DNA, 20 bp, synthetic construct
  source 1..20: mol_type = other DNA
ggctccagcgatcctcccac

SEQ ID NO: 21526 - DNA, 20 bp, synthetic construct
  source 1..20: mol_type = other DNA
gggctccagcgatcctccca

SEQ ID NO: 21527 - DNA, 20 bp, synthetic construct
  source 1..20: mol_type = other DNA
tgggctccagcgatcctccc

SEQ ID NO: 21528 - DNA, 20 bp, synthetic construct
  source 1..20: mol_type = other DNA
ctgggctccagcgatcctcc

SEQ ID NO: 21529 - DNA, 20 bp, synthetic construct
  source 1..20: mol_type = other DNA
cctgggctccagcgatcctc

SEQ ID NO: 21530 - DNA, 20 bp, synthetic construct
  source 1..20: mol_type = other DNA
tcctgggctccagcgatcct

SEQ ID NO: 21531 - DNA, 20 bp, synthetic construct
  source 1..20: mol_type = other DNA
ctcctgggctccagcgatcc

SEQ ID NO: 21532 - DNA, 20 bp, synthetic construct
  source 1..20: mol_type = other DNA
actcctgggctccagcgatc

SEQ ID NO: 21533 - DNA, 20 bp, synthetic construct
  source 1..20: mol_type = other DNA
aactcctgggctccagcgat

SEQ ID NO: 21534 - DNA, 20 bp, synthetic construct
  source 1..20: mol_type = other DNA
gaactcctgggctccagcga

SEQ ID NO: 21535 - DNA, 20 bp, synthetic construct
  source 1..20: mol_type = other DNA
tgaactcctgggctccagcg

SEQ ID NO: 21536 - DNA, 20 bp, synthetic construct
  source 1..20: mol_type = other DNA
ttgaactcctgggctccagc

SEQ ID NO: 21537 - DNA, 20 bp, synthetic construct
  source 1..20: mol_type = other DNA
cttgaactcctgggctccag

SEQ ID NO: 21538 - DNA, 20 bp, synthetic construct
  source 1..20: mol_type = other DNA
ccttgaactcctgggctcca

SEQ ID NO: 21539 - DNA, 20 bp, synthetic construct
  source 1..20: mol_type = other DNA
gccttgaactcctgggctcc

SEQ ID NO: 21540 - DNA, 20 bp, synthetic construct
  source 1..20: mol_type = other DNA
ggccttgaactcctgggctc

SEQ ID NO: 21541 - DNA, 20 bp, synthetic construct
  source 1..20: mol_type = other DNA
gggccttgaactcctgggct

SEQ ID NO: 21542 - DNA, 20 bp, synthetic construct
  source 1..20: mol_type = other DNA
agggccttgaactcctgggc

SEQ ID NO: 21543 - DNA, 20 bp, synthetic construct
  source 1..20: mol_type = other DNA
cagggccttgaactcctggg

SEQ ID NO: 21544 - DNA, 20 bp, synthetic construct
  source 1..20: mol_type = other DNA
ccagggccttgaactcctgg

SEQ ID NO: 21545 - DNA, 20 bp, synthetic construct
  source 1..20: mol_type = other DNA
cccagggccttgaactcctg

SEQ ID NO: 21546 - DNA, 20 bp, synthetic construct
  source 1..20: mol_type = other DNA
gcccagggccttgaactcct

SEQ ID NO: 21547 - DNA, 20 bp, synthetic construct
  source 1..20: mol_type = other DNA
tgcccagggccttgaactcc

SEQ ID NO: 21548 - DNA, 20 bp, synthetic construct
  source 1..20: mol_type = other DNA
ttgcccagggccttgaactc

SEQ ID NO: 21549 - DNA, 20 bp, synthetic construct
  source 1..20: mol_type = other DNA
gttgcccagggccttgaact

SEQ ID NO: 21550 - DNA, 20 bp, synthetic construct
  source 1..20: mol_type = other DNA
tgttgcccagggccttgaac

SEQ ID NO: 21551 - DNA, 20 bp, synthetic construct
  source 1..20: mol_type = other DNA
gtgttgcccagggccttgaa

SEQ ID NO: 21552 - DNA, 20 bp, synthetic construct
  source 1..20: mol_type = other DNA
tgtgttgcccagggccttga

SEQ ID NO: 21553 - DNA, 20 bp, synthetic construct
  source 1..20: mol_type = other DNA
ctgtgttgcccagggccttg

SEQ ID NO: 21554 - DNA, 20 bp, synthetic construct
  source 1..20: mol_type = other DNA
gctgtgttgcccagggcctt

SEQ ID NO: 21555 - DNA, 20 bp, synthetic construct
  source 1..20: mol_type = other DNA
tgctgtgttgcccagggcct

SEQ ID NO: 21556 - DNA, 20 bp, synthetic construct
  source 1..20: mol_type = other DNA
ttgctgtgttgcccagggcc

SEQ ID NO: 21557 - DNA, 20 bp, synthetic construct
  source 1..20: mol_type = other DNA
cttgctgtgttgcccagggc

SEQ ID NO: 21558 - DNA, 20 bp, synthetic construct
  source 1..20: mol_type = other DNA
tcttgctgtgttgcccaggg

SEQ ID NO: 21559 - DNA, 20 bp, synthetic construct
  source 1..20: mol_type = other DNA
gtcttgctgtgttgcccagg

SEQ ID NO: 21560 - DNA, 20 bp, synthetic construct
  source 1..20: mol_type = other DNA
ggtcttgctgtgttgcccag

SEQ ID NO: 21561 - DNA, 20 bp, synthetic construct
  source 1..20: mol_type = other DNA
aggtcttgctgtgttgccca

SEQ ID NO: 21562 - DNA, 20 bp, synthetic construct
  source 1..20: mol_type = other DNA
aaggtcttgctgtgttgccc

SEQ ID NO: 21563 - DNA, 20 bp, synthetic construct
  source 1..20: mol_type = other DNA
taaggtcttgctgtgttgcc

SEQ ID NO: 21564 - DNA, 20 bp, synthetic construct
  source 1..20: mol_type = other DNA
ataaggtcttgctgtgttgc

SEQ ID NO: 21565 - DNA, 20 bp, synthetic construct
  source 1..20: mol_type = other DNA
gataaggtcttgctgtgttg

SEQ ID NO: 21566 - DNA, 20 bp, synthetic construct
  source 1..20: mol_type = other DNA
agataaggtcttgctgtgtt

SEQ ID NO: 21567 - DNA, 20 bp, synthetic construct
  source 1..20: mol_type = other DNA
gagataaggtcttgctgtgt

SEQ ID NO: 21568 - DNA, 20 bp, synthetic construct
  source 1..20: mol_type = other DNA
agagataaggtcttgctgtg

SEQ ID NO: 21569 - DNA, 20 bp, synthetic construct
  source 1..20: mol_type = other DNA
cagagataaggtcttgctgt

SEQ ID NO: 21570 - DNA, 20 bp, synthetic construct
  source 1..20: mol_type = other DNA
ccagagataaggtcttgctg

SEQ ID NO: 21571 - DNA, 20 bp, synthetic construct
  source 1..20: mol_type = other DNA
gccagagataaggtcttgct

SEQ ID NO: 21572 - DNA, 20 bp, synthetic construct
  source 1..20: mol_type = other DNA
agccagagataaggtcttgc

SEQ ID NO: 21573 - DNA, 20 bp, synthetic construct
  source 1..20: mol_type = other DNA
cagccagagataaggtcttg

SEQ ID NO: 21574 - DNA, 20 bp, synthetic construct
  source 1..20: mol_type = other DNA
ccagccagagataaggtctt

SEQ ID NO: 21575 - DNA, 20 bp, synthetic construct
  source 1..20: mol_type = other DNA
cccagccagagataaggtct

SEQ ID NO: 21576 - DNA, 20 bp, synthetic construct
  source 1..20: mol_type = other DNA
gcccagccagagataaggtc

SEQ ID NO: 21577 - DNA, 20 bp, synthetic construct
  source 1..20: mol_type = other DNA
ggcccagccagagataaggt

SEQ ID NO: 21578 - DNA, 20 bp, synthetic construct
  source 1..20: mol_type = other DNA
gggcccagccagagataagg

SEQ ID NO: 21579 - DNA, 20 bp, synthetic construct
  source 1..20: mol_type = other DNA
tgggcccagccagagataag

SEQ ID NO: 21580 - DNA, 20 bp, synthetic construct
  source 1..20: mol_type = other DNA
ctgggcccagccagagataa

SEQ ID NO: 21581 - DNA, 20 bp, synthetic construct
  source 1..20: mol_type = other DNA
actgggcccagccagagata

SEQ ID NO: 21582 - DNA, 20 bp, synthetic construct
  source 1..20: mol_type = other DNA
cactgggcccagccagagat

SEQ ID NO: 21583 - DNA, 20 bp, synthetic construct
  source 1..20: mol_type = other DNA
ccactgggcccagccagaga

SEQ ID NO: 21584 - DNA, 20 bp, synthetic construct
  source 1..20: mol_type = other DNA
gccactgggcccagccagag

SEQ ID NO: 21585 - DNA, 20 bp, synthetic construct
  source 1..20: mol_type = other DNA
agccactgggcccagccaga

SEQ ID NO: 21586 - DNA, 20 bp, synthetic construct
  source 1..20: mol_type = other DNA
gagccactgggcccagccag

SEQ ID NO: 21587 - DNA, 20 bp, synthetic construct
  source 1..20: mol_type = other DNA
tgagccactgggcccagcca

SEQ ID NO: 21588 - DNA, 20 bp, synthetic construct
  source 1..20: mol_type = other DNA
gtgagccactgggcccagcc

SEQ ID NO: 21589 - DNA, 20 bp, synthetic construct
  source 1..20: mol_type = other DNA
cgtgagccactgggcccagc

SEQ ID NO: 21590 - DNA, 20 bp, synthetic construct
  source 1..20: mol_type = other DNA
gcgtgagccactgggcccag

SEQ ID NO: 21591 - DNA, 20 bp, synthetic construct
  source 1..20: mol_type = other DNA
ggcgtgagccactgggccca

SEQ ID NO: 21592 - DNA, 20 bp, synthetic construct
  source 1..20: mol_type = other DNA
aggcgtgagccactgggccc

SEQ ID NO: 21593 - DNA, 20 bp, synthetic construct
  source 1..20: mol_type = other DNA
caggcgtgagccactgggcc

SEQ ID NO: 21594 - DNA, 20 bp, synthetic construct
  source 1..20: mol_type = other DNA
acaggcgtgagccactgggc

SEQ ID NO: 21595 - DNA, 20 bp, synthetic construct
  source 1..20: mol_type = other DNA
tacaggcgtgagccactggg

SEQ ID NO: 21596 - DNA, 20 bp, synthetic construct
  source 1..20: mol_type = other DNA
ttacaggcgtgagccactgg

SEQ ID NO: 21597 - DNA, 20 bp, synthetic construct
  source 1..20: mol_type = other DNA
attacaggcgtgagccactg

SEQ ID NO: 21598 - DNA, 20 bp, synthetic construct
  source 1..20: mol_type = other DNA
gattacaggcgtgagccact

SEQ ID NO: 21599 - DNA, 20 bp, synthetic construct
  source 1..20: mol_type = other DNA
ggattacaggcgtgagccac

SEQ ID NO: 21600 - DNA, 20 bp, synthetic construct
  source 1..20: mol_type = other DNA
gggattacaggcgtgagcca

SEQ ID NO: 21601 - DNA, 20 bp, synthetic construct
  source 1..20: mol_type = other DNA
tgggattacaggcgtgagcc

SEQ ID NO: 21602 - DNA, 20 bp, synthetic construct
  source 1..20: mol_type = other DNA
ctgggattacaggcgtgagc

SEQ ID NO: 21603 - DNA, 20 bp, synthetic construct
  source 1..20: mol_type = other DNA
gctgggattacaggcgtgag

SEQ ID NO: 21604 - DNA, 20 bp, synthetic construct
  source 1..20: mol_type = other DNA
tgctgggattacaggcgtga

SEQ ID NO: 21605 - DNA, 20 bp, synthetic construct
  source 1..20: mol_type = other DNA
gtgctgggattacaggcgtg

SEQ ID NO: 21606 - DNA, 20 bp, synthetic construct
  source 1..20: mol_type = other DNA
agtgctgggattacaggcgt

SEQ ID NO: 21607 - DNA, 20 bp, synthetic construct
  source 1..20: mol_type = other DNA
aagtgctgggattacaggcg

SEQ ID NO: 21608 - DNA, 20 bp, synthetic construct
  source 1..20: mol_type = other DNA
aaagtgctgggattacaggc

SEQ ID NO: 21609 - DNA, 20 bp, synthetic construct
  source 1..20: mol_type = other DNA
caaagtgctgggattacagg

SEQ ID NO: 21610 - DNA, 20 bp, synthetic construct
  source 1..20: mol_type = other DNA
ccaaagtgctgggattacag

SEQ ID NO: 21611 - DNA, 20 bp, synthetic construct
  source 1..20: mol_type = other DNA
cccaaagtgctgggattaca

SEQ ID NO: 21612 - DNA, 20 bp, synthetic construct
  source 1..20: mol_type = other DNA
tcccaaagtgctgggattac

SEQ ID NO: 21613 - DNA, 20 bp, synthetic construct
  source 1..20: mol_type = other DNA
ctcccaaagtgctgggatta

SEQ ID NO: 21614 - DNA, 20 bp, synthetic construct
  source 1..20: mol_type = other DNA
cctcccaaagtgctgggatt

SEQ ID NO: 21615 - DNA, 20 bp, synthetic construct
  source 1..20: mol_type = other DNA
gcctcccaaagtgctgggat

SEQ ID NO: 21616 - DNA, 20 bp, synthetic construct
  source 1..20: mol_type = other DNA
agcctcccaaagtgctggga

SEQ ID NO: 21617 - DNA, 20 bp, synthetic construct
  source 1..20: mol_type = other DNA
cagcctcccaaagtgctggg

SEQ ID NO: 21618 - DNA, 20 bp, synthetic construct
  source 1..20: mol_type = other DNA
tcagcctcccaaagtgctgg

SEQ ID NO: 21619 - DNA, 20 bp, synthetic construct
  source 1..20: mol_type = other DNA
ctcagcctcccaaagtgctg

SEQ ID NO: 21620 - DNA, 20 bp, synthetic construct
  source 1..20: mol_type = other DNA
cctcagcctcccaaagtgct

SEQ ID NO: 21621 - DNA, 20 bp, synthetic construct
  source 1..20: mol_type = other DNA
acctcagcctcccaaagtgc

SEQ ID NO: 21622 - DNA, 20 bp, synthetic construct
  source 1..20: mol_type = other DNA
cacctcagcctcccaaagtg

SEQ ID NO: 21623 - DNA, 20 bp, synthetic construct
  source 1..20: mol_type = other DNA
ccacctcagcctcccaaagt

SEQ ID NO: 21624 - DNA, 20 bp, synthetic construct
  source 1..20: mol_type = other DNA
cccacctcagcctcccaaag

SEQ ID NO: 21625 - DNA, 20 bp, synthetic construct
  source 1..20: mol_type = other DNA
acccacctcagcctcccaaa

SEQ ID NO: 21626 - DNA, 20 bp, synthetic construct
  source 1..20: mol_type = other DNA
cacccacctcagcctcccaa

SEQ ID NO: 21627 - DNA, 20 bp, synthetic construct
  source 1..20: mol_type = other DNA
ccacccacctcagcctccca

SEQ ID NO: 21628 - DNA, 20 bp, synthetic construct
  source 1..20: mol_type = other DNA
tccacccacctcagcctccc

SEQ ID NO: 21629 - DNA, 20 bp, synthetic construct
  source 1..20: mol_type = other DNA
atccacccacctcagcctcc

SEQ ID NO: 21630 - DNA, 20 bp, synthetic construct
  source 1..20: mol_type = other DNA
gatccacccacctcagcctc

SEQ ID NO: 21631 - DNA, 20 bp, synthetic construct
  source 1..20: mol_type = other DNA
tgatccacccacctcagcct

SEQ ID NO: 21632 - DNA, 20 bp, synthetic construct
  source 1..20: mol_type = other DNA
gtgatccacccacctcagcc

SEQ ID NO: 21633 - DNA, 20 bp, synthetic construct
  source 1..20: mol_type = other DNA
ggtgatccacccacctcagc

SEQ ID NO: 21634 - DNA, 20 bp, synthetic construct
  source 1..20: mol_type = other DNA
aggtgatccacccacctcag

SEQ ID NO: 21635 - DNA, 20 bp, synthetic construct
  source 1..20: mol_type = other DNA
caggtgatccacccacctca

SEQ ID NO: 21636 - DNA, 20 bp, synthetic construct
  source 1..20: mol_type = other DNA
tcaggtgatccacccacctc

SEQ ID NO: 21637 - DNA, 20 bp, synthetic construct
  source 1..20: mol_type = other DNA
ctcaggtgatccacccacct

SEQ ID NO: 21638 - DNA, 20 bp, synthetic construct
  source 1..20: mol_type = other DNA
cctcaggtgatccacccacc

SEQ ID NO: 21639 - DNA, 20 bp, synthetic construct
  source 1..20: mol_type = other DNA
acctcaggtgatccacccac

SEQ ID NO: 21640 - DNA, 20 bp, synthetic construct
  source 1..20: mol_type = other DNA
gacctcaggtgatccaccca

SEQ ID NO: 21641 - DNA, 20 bp, synthetic construct
  source 1..20: mol_type = other DNA
tgacctcaggtgatccaccc

SEQ ID NO: 21642 - DNA, 20 bp, synthetic construct
  source 1..20: mol_type = other DNA
ctgacctcaggtgatccacc

SEQ ID NO: 21643 - DNA, 20 bp, synthetic construct
  source 1..20: mol_type = other DNA
cctgacctcaggtgatccac

SEQ ID NO: 21644 - DNA, 20 bp, synthetic construct
  source 1..20: mol_type = other DNA
tcctgacctcaggtgatcca

SEQ ID NO: 21645 - DNA, 20 bp, synthetic construct
  source 1..20: mol_type = other DNA
ctcctgacctcaggtgatcc

SEQ ID NO: 21646 - DNA, 20 bp, synthetic construct
  source 1..20: mol_type = other DNA
actcctgacctcaggtgatc

SEQ ID NO: 21647 - DNA, 20 bp, synthetic construct
  source 1..20: mol_type = other DNA
aactcctgacctcaggtgat

SEQ ID NO: 21648 - DNA, 20 bp, synthetic construct
  source 1..20: mol_type = other DNA
gaactcctgacctcaggtga

SEQ ID NO: 21649 - DNA, 20 bp, synthetic construct
  source 1..20: mol_type = other DNA
cgaactcctgacctcaggtg

SEQ ID NO: 21650 - DNA, 20 bp, synthetic construct
  source 1..20: mol_type = other DNA
tcgaactcctgacctcaggt

SEQ ID NO: 21651 - DNA, 20 bp, synthetic construct
  source 1..20: mol_type = other DNA
ctcgaactcctgacctcagg

SEQ ID NO: 21652 - DNA, 20 bp, synthetic construct
  source 1..20: mol_type = other DNA
tctcgaactcctgacctcag

SEQ ID NO: 21653 - DNA, 20 bp, synthetic construct
  source 1..20: mol_type = other DNA
gtctcgaactcctgacctca

SEQ ID NO: 21654 - DNA, 20 bp, synthetic construct
  source 1..20: mol_type = other DNA
ggtctcgaactcctgacctc

SEQ ID NO: 21655 - DNA, 20 bp, synthetic construct
  source 1..20: mol_type = other DNA
tggtctcgaactcctgacct

SEQ ID NO: 21656 - DNA, 20 bp, synthetic construct
  source 1..20: mol_type = other DNA
ctggtctcgaactcctgacc

SEQ ID NO: 21657 - DNA, 20 bp, synthetic construct
  source 1..20: mol_type = other DNA
gctggtctcgaactcctgac

SEQ ID NO: 21658 - DNA, 20 bp, synthetic construct
  source 1..20: mol_type = other DNA
ggctggtctcgaactcctga

SEQ ID NO: 21659 - DNA, 20 bp, synthetic construct
  source 1..20: mol_type = other DNA
aggctggtctcgaactcctg

SEQ ID NO: 21660 - DNA, 20 bp, synthetic construct
  source 1..20: mol_type = other DNA
caggctggtctcgaactcct

SEQ ID NO: 21661 - DNA, 20 bp, synthetic construct
  source 1..20: mol_type = other DNA
ccaggctggtctcgaactcc

SEQ ID NO: 21662 - DNA, 20 bp, synthetic construct
  source 1..20: mol_type = other DNA
gccaggctggtctcgaactc

SEQ ID NO: 21663 - DNA, 20 bp, synthetic construct
  source 1..20: mol_type = other DNA
ggccaggctggtctcgaact

SEQ ID NO: 21664 - DNA, 20 bp, synthetic construct
  source 1..20: mol_type = other DNA
tggccaggctggtctcgaac

SEQ ID NO: 21665 - DNA, 20 bp, synthetic construct
  source 1..20: mol_type = other DNA
ttggccaggctggtctcgaa

SEQ ID NO: 21666 - DNA, 20 bp, synthetic construct
  source 1..20: mol_type = other DNA
gttggccaggctggtctcga

SEQ ID NO: 21667 - DNA, 20 bp, synthetic construct
  source 1..20: mol_type = other DNA
tgttggccaggctggtctcg

SEQ ID NO: 21668 - DNA, 20 bp, synthetic construct
  source 1..20: mol_type = other DNA
atgttggccaggctggtctc

SEQ ID NO: 21669 - DNA, 20 bp, synthetic construct
  source 1..20: mol_type = other DNA
catgttggccaggctggtct

SEQ ID NO: 21670 - DNA, 20 bp, synthetic construct
  source 1..20: mol_type = other DNA
ccatgttggccaggctggtc

SEQ ID NO: 21671 - DNA, 20 bp, synthetic construct
  source 1..20: mol_type = other DNA
accatgttggccaggctggt

SEQ ID NO: 21672 - DNA, 20 bp, synthetic construct
  source 1..20: mol_type = other DNA
caccatgttggccaggctgg

SEQ ID NO: 21673 - DNA, 20 bp, synthetic construct
  source 1..20: mol_type = other DNA
tcaccatgttggccaggctg

SEQ ID NO: 21674 - DNA, 20 bp, synthetic construct
  source 1..20: mol_type = other DNA
ctcaccatgttggccaggct

SEQ ID NO: 21675 - DNA, 20 bp, synthetic construct
  source 1..20: mol_type = other DNA
tctcaccatgttggccaggc

SEQ ID NO: 21676 - DNA, 20 bp, synthetic construct
  source 1..20: mol_type = other DNA
gtctcaccatgttggccagg

SEQ ID NO: 21677 - DNA, 20 bp, synthetic construct
  source 1..20: mol_type = other DNA
ggtctcaccatgttggccag

SEQ ID NO: 21678 - DNA, 20 bp, synthetic construct
  source 1..20: mol_type = other DNA
gggtctcaccatgttggcca

SEQ ID NO: 21679 - DNA, 20 bp, synthetic construct
  source 1..20: mol_type = other DNA
agggtctcaccatgttggcc

SEQ ID NO: 21680 - DNA, 20 bp, synthetic construct
  source 1..20: mol_type = other DNA
cagggtctcaccatgttggc

SEQ ID NO: 21681 - DNA, 20 bp, synthetic construct
  source 1..20: mol_type = other DNA
acagggtctcaccatgttgg

SEQ ID NO: 21682 - DNA, 20 bp, synthetic construct
  source 1..20: mol_type = other DNA
cacagggtctcaccatgttg

SEQ ID NO: 21683 - DNA, 20 bp, synthetic construct
  source 1..20: mol_type = other DNA
acacagggtctcaccatgtt

SEQ ID NO: 21684 - DNA, 20 bp, synthetic construct
  source 1..20: mol_type = other DNA
gacacagggtctcaccatgt

SEQ ID NO: 21685 - DNA, 20 bp, synthetic construct
  source 1..20: mol_type = other DNA
agacacagggtctcaccatg

SEQ ID NO: 21686 - DNA, 20 bp, synthetic construct
  source 1..20: mol_type = other DNA
tagacacagggtctcaccat

SEQ ID NO: 21687 - DNA, 20 bp, synthetic construct
  source 1..20: mol_type = other DNA
gtagacacagggtctcacca

SEQ ID NO: 21688 - DNA, 20 bp, synthetic construct
  source 1..20: mol_type = other DNA
agtagacacagggtctcacc

SEQ ID NO: 21689 - DNA, 20 bp, synthetic construct
  source 1..20: mol_type = other DNA
tagtagacacagggtctcac

SEQ ID NO: 21690 - DNA, 20 bp, synthetic construct
  source 1..20: mol_type = other DNA
ttagtagacacagggtctca

SEQ ID NO: 21691 - DNA, 20 bp, synthetic construct
  source 1..20: mol_type = other DNA
tttagtagacacagggtctc

SEQ ID NO: 21692 - DNA, 20 bp, synthetic construct
  source 1..20: mol_type = other DNA
ttttagtagacacagggtct

SEQ ID NO: 21693 - DNA, 20 bp, synthetic construct
  source 1..20: mol_type = other DNA
cttttagtagacacagggtc

SEQ ID NO: 21694 - DNA, 20 bp, synthetic construct
  source 1..20: mol_type = other DNA
acttttagtagacacagggt

SEQ ID NO: 21695 - DNA, 20 bp, synthetic construct
  source 1..20: mol_type = other DNA
tacttttagtagacacaggg

SEQ ID NO: 21696 - DNA, 20 bp, synthetic construct
  source 1..20: mol_type = other DNA
gtacttttagtagacacagg

SEQ ID NO: 21697 - DNA, 20 bp, synthetic construct
  source 1..20: mol_type = other DNA
tgtacttttagtagacacag

SEQ ID NO: 21698 - DNA, 20 bp, synthetic construct
  source 1..20: mol_type = other DNA
ttgtacttttagtagacaca

SEQ ID NO: 21699 - DNA, 20 bp, synthetic construct
  source 1..20: mol_type = other DNA
tttgtacttttagtagacac

SEQ ID NO: 21700 - DNA, 20 bp, synthetic construct
  source 1..20: mol_type = other DNA
ttttgtacttttagtagaca

SEQ ID NO: 21701 - DNA, 20 bp, synthetic construct
  source 1..20: mol_type = other DNA
tttttgtacttttagtagac

SEQ ID NO: 21702 - DNA, 20 bp, synthetic construct
  source 1..20: mol_type = other DNA
atttttgtacttttagtaga

SEQ ID NO: 21703 - DNA, 20 bp, synthetic construct
  source 1..20: mol_type = other DNA
aatttttgtacttttagtag

SEQ ID NO: 21704 - DNA, 20 bp, synthetic construct
  source 1..20: mol_type = other DNA
taatttttgtacttttagta

SEQ ID NO: 21705 - DNA, 20 bp, synthetic construct
  source 1..20: mol_type = other DNA
ctaatttttgtacttttagt

SEQ ID NO: 21706 - DNA, 20 bp, synthetic construct
  source 1..20: mol_type = other DNA
gctaatttttgtacttttag

SEQ ID NO: 21707 - DNA, 20 bp, synthetic construct
  source 1..20: mol_type = other DNA
ggctaatttttgtactttta

SEQ ID NO: 21708 - DNA, 20 bp, synthetic construct
  source 1..20: mol_type = other DNA
tggctaatttttgtactttt

SEQ ID NO: 21709 - DNA, 20 bp, synthetic construct
  source 1..20: mol_type = other DNA
ctggctaatttttgtacttt

SEQ ID NO: 21710 - DNA, 20 bp, synthetic construct
  source 1..20: mol_type = other DNA
cctggctaatttttgtactt

SEQ ID NO: 21711 - DNA, 20 bp, synthetic construct
  source 1..20: mol_type = other DNA
gcctggctaatttttgtact

SEQ ID NO: 21712 - DNA, 20 bp, synthetic construct
  source 1..20: mol_type = other DNA
tgcctggctaatttttgtac

SEQ ID NO: 21713 - DNA, 20 bp, synthetic construct
  source 1..20: mol_type = other DNA
gtgcctggctaatttttgta

SEQ ID NO: 21714 - DNA, 20 bp, synthetic construct
  source 1..20: mol_type = other DNA
cgtgcctggctaatttttgt

SEQ ID NO: 21715 - DNA, 20 bp, synthetic construct
  source 1..20: mol_type = other DNA
ccgtgcctggctaatttttg

SEQ ID NO: 21716 - DNA, 20 bp, synthetic construct
  source 1..20: mol_type = other DNA
accgtgcctggctaattttt

SEQ ID NO: 21717 - DNA, 20 bp, synthetic construct
  source 1..20: mol_type = other DNA
caccgtgcctggctaatttt

SEQ ID NO: 21718 - DNA, 20 bp, synthetic construct
  source 1..20: mol_type = other DNA
ccaccgtgcctggctaattt

SEQ ID NO: 21719 - DNA, 20 bp, synthetic construct
  source 1..20: mol_type = other DNA
gccaccgtgcctggctaatt

SEQ ID NO: 21720 - DNA, 20 bp, synthetic construct
  source 1..20: mol_type = other DNA
cgccaccgtgcctggctaat

SEQ ID NO: 21721 - DNA, 20 bp, synthetic construct
  source 1..20: mol_type = other DNA
gcgccaccgtgcctggctaa

SEQ ID NO: 21722 - DNA, 20 bp, synthetic construct
  source 1..20: mol_type = other DNA
cgcgccaccgtgcctggcta

SEQ ID NO: 21723 - DNA, 20 bp, synthetic construct
  source 1..20: mol_type = other DNA
gcgcgccaccgtgcctggct

SEQ ID NO: 21724 - DNA, 20 bp, synthetic construct
  source 1..20: mol_type = other DNA
agcgcgccaccgtgcctggc

SEQ ID NO: 21725 - DNA, 20 bp, synthetic construct
  source 1..20: mol_type = other DNA
gagcgcgccaccgtgcctgg

SEQ ID NO: 21726 - DNA, 20 bp, synthetic construct
  source 1..20: mol_type = other DNA
ggagcgcgccaccgtgcctg

SEQ ID NO: 21727 - DNA, 20 bp, synthetic construct
  source 1..20: mol_type = other DNA
aggagcgcgccaccgtgcct

SEQ ID NO: 21728 - DNA, 20 bp, synthetic construct
  source 1..20: mol_type = other DNA
caggagcgcgccaccgtgcc

SEQ ID NO: 21729 - DNA, 20 bp, synthetic construct
  source 1..20: mol_type = other DNA
acaggagcgcgccaccgtgc

SEQ ID NO: 21730 - DNA, 20 bp, synthetic construct
  source 1..20: mol_type = other DNA
tacaggagcgcgccaccgtg

SEQ ID NO: 21731 - DNA, 20 bp, synthetic construct
  source 1..20: mol_type = other DNA
ttacaggagcgcgccaccgt

SEQ ID NO: 21732 - DNA, 20 bp, synthetic construct
  source 1..20: mol_type = other DNA
attacaggagcgcgccaccg

SEQ ID NO: 21733 - DNA, 20 bp, synthetic construct
  source 1..20: mol_type = other DNA
gattacaggagcgcgccacc

SEQ ID NO: 21734 - DNA, 20 bp, synthetic construct
  source 1..20: mol_type = other DNA
ggattacaggagcgcgccac

SEQ ID NO: 21735 - DNA, 20 bp, synthetic construct
  source 1..20: mol_type = other DNA
gggattacaggagcgcgcca

SEQ ID NO: 21736 - DNA, 20 bp, synthetic construct
  source 1..20: mol_type = other DNA
tgggattacaggagcgcgcc

SEQ ID NO: 21737 - DNA, 20 bp, synthetic construct
  source 1..20: mol_type = other DNA
ctgggattacaggagcgcgc

SEQ ID NO: 21738 - DNA, 20 bp, synthetic construct
  source 1..20: mol_type = other DNA
gctgggattacaggagcgcg

SEQ ID NO: 21739 - DNA, 20 bp, synthetic construct
  source 1..20: mol_type = other DNA
agctgggattacaggagcgc

SEQ ID NO: 21740 - DNA, 20 bp, synthetic construct
  source 1..20: mol_type = other DNA
tagctgggattacaggagcg

SEQ ID NO: 21741 - DNA, 20 bp, synthetic construct
  source 1..20: mol_type = other DNA
gtagctgggattacaggagc

SEQ ID NO: 21742 - DNA, 20 bp, synthetic construct
  source 1..20: mol_type = other DNA
agtagctgggattacaggag

SEQ ID NO: 21743 - DNA, 20 bp, synthetic construct
  source 1..20: mol_type = other DNA
gagtagctgggattacagga

SEQ ID NO: 21744 - DNA, 20 bp, synthetic construct
  source 1..20: mol_type = other DNA
cgagtagctgggattacagg

SEQ ID NO: 21745 - DNA, 20 bp, synthetic construct
  source 1..20: mol_type = other DNA
ccgagtagctgggattacag

SEQ ID NO: 21746 - DNA, 20 bp, synthetic construct
  source 1..20: mol_type = other DNA
cccgagtagctgggattaca

SEQ ID NO: 21747 - DNA, 20 bp, synthetic construct
  source 1..20: mol_type = other DNA
ccccgagtagctgggattac

SEQ ID NO: 21748 - DNA, 20 bp, synthetic construct
  source 1..20: mol_type = other DNA
cccccgagtagctgggatta

SEQ ID NO: 21749 - DNA, 20 bp, synthetic construct
  source 1..20: mol_type = other DNA
ccccccgagtagctgggatt

SEQ ID NO: 21750 - DNA, 20 bp, synthetic construct
  source 1..20: mol_type = other DNA
cccccccgagtagctgggat

SEQ ID NO: 21751 - DNA, 20 bp, synthetic construct
  source 1..20: mol_type = other DNA
gcccccccgagtagctggga

SEQ ID NO: 21752 - DNA, 20 bp, synthetic construct
  source 1..20: mol_type = other DNA
agcccccccgagtagctggg

SEQ ID NO: 21753 - DNA, 20 bp, synthetic construct
  source 1..20: mol_type = other DNA
cagcccccccgagtagctgg

SEQ ID NO: 21754 - DNA, 20 bp, synthetic construct
  source 1..20: mol_type = other DNA
tcagcccccccgagtagctg

SEQ ID NO: 21755 - DNA, 20 bp, synthetic construct
  source 1..20: mol_type = other DNA
ctcagcccccccgagtagct

SEQ ID NO: 21756 - DNA, 20 bp, synthetic construct
  source 1..20: mol_type = other DNA
tctcagcccccccgagtagc

SEQ ID NO: 21757 - DNA, 20 bp, synthetic construct
  source 1..20: mol_type = other DNA
gtctcagcccccccgagtag

SEQ ID NO: 21758 - DNA, 20 bp, synthetic construct
  source 1..20: mol_type = other DNA
tgtctcagcccccccgagta

SEQ ID NO: 21759 - DNA, 20 bp, synthetic construct
  source 1..20: mol_type = other DNA
ctgtctcagcccccccgagt

SEQ ID NO: 21760 - DNA, 20 bp, synthetic construct
  source 1..20: mol_type = other DNA
cctgtctcagcccccccgag

SEQ ID NO: 21761 - DNA, 20 bp, synthetic construct
  source 1..20: mol_type = other DNA
tcctgtctcagcccccccga

SEQ ID NO: 21762 - DNA, 20 bp, synthetic construct
  source 1..20: mol_type = other DNA
ctcctgtctcagcccccccg

SEQ ID NO: 21763 - DNA, 20 bp, synthetic construct
  source 1..20: mol_type = other DNA
tctcctgtctcagccccccc

SEQ ID NO: 21764 - DNA, 20 bp, synthetic construct
  source 1..20: mol_type = other DNA
ttctcctgtctcagcccccc

SEQ ID NO: 21765 - DNA, 20 bp, synthetic construct
  source 1..20: mol_type = other DNA
attctcctgtctcagccccc

SEQ ID NO: 21766 - DNA, 20 bp, synthetic construct
  source 1..20: mol_type = other DNA
gattctcctgtctcagcccc

SEQ ID NO: 21767 - DNA, 20 bp, synthetic construct
  source 1..20: mol_type = other DNA
tgattctcctgtctcagccc

SEQ ID NO: 21768 - DNA, 20 bp, synthetic construct
  source 1..20: mol_type = other DNA
gtgattctcctgtctcagcc

SEQ ID NO: 21769 - DNA, 20 bp, synthetic construct
  source 1..20: mol_type = other DNA
agtgattctcctgtctcagc

SEQ ID NO: 21770 - DNA, 20 bp, synthetic construct
  source 1..20: mol_type = other DNA
aagtgattctcctgtctcag

SEQ ID NO: 21771 - DNA, 20 bp, synthetic construct
  source 1..20: mol_type = other DNA
caagtgattctcctgtctca

SEQ ID NO: 21772 - DNA, 20 bp, synthetic construct
  source 1..20: mol_type = other DNA
tcaagtgattctcctgtctc

SEQ ID NO: 21773 - DNA, 20 bp, synthetic construct
  source 1..20: mol_type = other DNA
ttcaagtgattctcctgtct

SEQ ID NO: 21774 - DNA, 20 bp, synthetic construct
  source 1..20: mol_type = other DNA
gttcaagtgattctcctgtc

SEQ ID NO: 21775 - DNA, 20 bp, synthetic construct
  source 1..20: mol_type = other DNA
ggttcaagtgattctcctgt

SEQ ID NO: 21776 - DNA, 20 bp, synthetic construct
  source 1..20: mol_type = other DNA
gggttcaagtgattctcctg

SEQ ID NO: 21777 - DNA, 20 bp, synthetic construct
  source 1..20: mol_type = other DNA
tgggttcaagtgattctcct

SEQ ID NO: 21778 - DNA, 20 bp, synthetic construct
  source 1..20: mol_type = other DNA
ctgggttcaagtgattctcc

SEQ ID NO: 21779 - DNA, 20 bp, synthetic construct
  source 1..20: mol_type = other DNA
cctgggttcaagtgattctc

SEQ ID NO: 21780 - DNA, 20 bp, synthetic construct
  source 1..20: mol_type = other DNA
tcctgggttcaagtgattct

SEQ ID NO: 21781 - DNA, 20 bp, synthetic construct
  source 1..20: mol_type = other DNA
ctcctgggttcaagtgattc

SEQ ID NO: 21782 - DNA, 20 bp, synthetic construct
  source 1..20: mol_type = other DNA
cctcctgggttcaagtgatt

SEQ ID NO: 21783 - DNA, 20 bp, synthetic construct
  source 1..20: mol_type = other DNA
tcctcctgggttcaagtgat

SEQ ID NO: 21784 - DNA, 20 bp, synthetic construct
  source 1..20: mol_type = other DNA
ctcctcctgggttcaagtga

SEQ ID NO: 21785 - DNA, 20 bp, synthetic construct
  source 1..20: mol_type = other DNA
cctcctcctgggttcaagtg

SEQ ID NO: 21786 - DNA, 20 bp, synthetic construct
  source 1..20: mol_type = other DNA
tcctcctcctgggttcaagt

SEQ ID NO: 21787 - DNA, 20 bp, synthetic construct
  source 1..20: mol_type = other DNA
ctcctcctcctgggttcaag

SEQ ID NO: 21788 - DNA, 20 bp, synthetic construct
  source 1..20: mol_type = other DNA
cctcctcctcctgggttcaa

SEQ ID NO: 21789 - DNA, 20 bp, synthetic construct
  source 1..20: mol_type = other DNA
acctcctcctcctgggttca

SEQ ID NO: 21790 - DNA, 20 bp, synthetic construct
  source 1..20: mol_type = other DNA
aacctcctcctcctgggttc

SEQ ID NO: 21791 - DNA, 20 bp, synthetic construct
  source 1..20: mol_type = other DNA
caacctcctcctcctgggtt

SEQ ID NO: 21792 - DNA, 20 bp, synthetic construct
  source 1..20: mol_type = other DNA
gcaacctcctcctcctgggt

SEQ ID NO: 21793 - DNA, 20 bp, synthetic construct
  source 1..20: mol_type = other DNA
tgcaacctcctcctcctggg

SEQ ID NO: 21794 - DNA, 20 bp, synthetic construct
  source 1..20: mol_type = other DNA
ctgcaacctcctcctcctgg

SEQ ID NO: 21795 - DNA, 20 bp, synthetic construct
  source 1..20: mol_type = other DNA
actgcaacctcctcctcctg

SEQ ID NO: 21796 - DNA, 20 bp, synthetic construct
  source 1..20: mol_type = other DNA
cactgcaacctcctcctcct

SEQ ID NO: 21797 - DNA, 20 bp, synthetic construct
  source 1..20: mol_type = other DNA
tcactgcaacctcctcctcc

SEQ ID NO: 21798 - DNA, 20 bp, synthetic construct
  source 1..20: mol_type = other DNA
ttcactgcaacctcctcctc

SEQ ID NO: 21799 - DNA, 20 bp, synthetic construct
  source 1..20: mol_type = other DNA
gttcactgcaacctcctcct

SEQ ID NO: 21800 - DNA, 20 bp, synthetic construct
  source 1..20: mol_type = other DNA
ggttcactgcaacctcctcc

SEQ ID NO: 21801 - DNA, 20 bp, synthetic construct
  source 1..20: mol_type = other DNA
tggttcactgcaacctcctc

SEQ ID NO: 21802 - DNA, 20 bp, synthetic construct
  source 1..20: mol_type = other DNA
ttggttcactgcaacctcct

SEQ ID NO: 21803 - DNA, 20 bp, synthetic construct
  source 1..20: mol_type = other DNA
cttggttcactgcaacctcc

SEQ ID NO: 21804 - DNA, 20 bp, synthetic construct
  source 1..20: mol_type = other DNA
tcttggttcactgcaacctc

SEQ ID NO: 21805 - DNA, 20 bp, synthetic construct
  source 1..20: mol_type = other DNA
ttcttggttcactgcaacct

SEQ ID NO: 21806 - DNA, 20 bp, synthetic construct
  source 1..20: mol_type = other DNA
gttcttggttcactgcaacc

SEQ ID NO: 21807 - DNA, 20 bp, synthetic construct
  source 1..20: mol_type = other DNA
tgttcttggttcactgcaac

SEQ ID NO: 21808 - DNA, 20 bp, synthetic construct
  source 1..20: mol_type = other DNA
gtgttcttggttcactgcaa

SEQ ID NO: 21809 - DNA, 20 bp, synthetic construct
  source 1..20: mol_type = other DNA
cgtgttcttggttcactgca

SEQ ID NO: 21810 - DNA, 20 bp, synthetic construct
  source 1..20: mol_type = other DNA
gcgtgttcttggttcactgc

SEQ ID NO: 21811 - DNA, 20 bp, synthetic construct
  source 1..20: mol_type = other DNA
ggcgtgttcttggttcactg

SEQ ID NO: 21812 - DNA, 20 bp, synthetic construct
  source 1..20: mol_type = other DNA
tggcgtgttcttggttcact

SEQ ID NO: 21813 - DNA, 20 bp, synthetic construct
  source 1..20: mol_type = other DNA
gtggcgtgttcttggttcac

SEQ ID NO: 21814 - DNA, 20 bp, synthetic construct
  source 1..20: mol_type = other DNA
agtggcgtgttcttggttca

SEQ ID NO: 21815 - DNA, 20 bp, synthetic construct
  source 1..20: mol_type = other DNA
cagtggcgtgttcttggttc

SEQ ID NO: 21816 - DNA, 20 bp, synthetic construct
  source 1..20: mol_type = other DNA
gcagtggcgtgttcttggtt

SEQ ID NO: 21817 - DNA, 20 bp, synthetic construct
  source 1..20: mol_type = other DNA
tgcagtggcgtgttcttggt

SEQ ID NO: 21818 - DNA, 20 bp, synthetic construct
  source 1..20: mol_type = other DNA
gtgcagtggcgtgttcttgg

SEQ ID NO: 21819 - DNA, 20 bp, synthetic construct
  source 1..20: mol_type = other DNA
agtgcagtggcgtgttcttg

SEQ ID NO: 21820 - DNA, 20 bp, synthetic construct
  source 1..20: mol_type = other DNA
gagtgcagtggcgtgttctt

SEQ ID NO: 21821 - DNA, 20 bp, synthetic construct
  source 1..20: mol_type = other DNA
ggagtgcagtggcgtgttct

SEQ ID NO: 21822 - DNA, 20 bp, synthetic construct
  source 1..20: mol_type = other DNA
tggagtgcagtggcgtgttc

SEQ ID NO: 21823 - DNA, 20 bp, synthetic construct
  source 1..20: mol_type = other DNA
ctggagtgcagtggcgtgtt

SEQ ID NO: 21824 - DNA, 20 bp, synthetic construct
  source 1..20: mol_type = other DNA
gctggagtgcagtggcgtgt

SEQ ID NO: 21825 - DNA, 20 bp, synthetic construct
  source 1..20: mol_type = other DNA
ggctggagtgcagtggcgtg

SEQ ID NO: 21826 - DNA, 20 bp, synthetic construct
  source 1..20: mol_type = other DNA
aggctggagtgcagtggcgt

SEQ ID NO: 21827 - DNA, 20 bp, synthetic construct
  source 1..20: mol_type = other DNA
caggctggagtgcagtggcg

SEQ ID NO: 21828 - DNA, 20 bp, synthetic construct
  source 1..20: mol_type = other DNA
ccaggctggagtgcagtggc

SEQ ID NO: 21829 - DNA, 20 bp, synthetic construct
  source 1..20: mol_type = other DNA
cccaggctggagtgcagtgg

SEQ ID NO: 21830 - DNA, 20 bp, synthetic construct
  source 1..20: mol_type = other DNA
acccaggctggagtgcagtg

SEQ ID NO: 21831 - DNA, 20 bp, synthetic construct
  source 1..20: mol_type = other DNA
cacccaggctggagtgcagt

SEQ ID NO: 21832 - DNA, 20 bp, synthetic construct
  source 1..20: mol_type = other DNA
tcacccaggctggagtgcag

SEQ ID NO: 21833 - DNA, 20 bp, synthetic construct
  source 1..20: mol_type = other DNA
gtcacccaggctggagtgca

SEQ ID NO: 21834 - DNA, 20 bp, synthetic construct
  source 1..20: mol_type = other DNA
tgtcacccaggctggagtgc

SEQ ID NO: 21835 - DNA, 20 bp, synthetic construct
  source 1..20: mol_type = other DNA
atgtcacccaggctggagtg

SEQ ID NO: 21836 - DNA, 20 bp, synthetic construct
  source 1..20: mol_type = other DNA
tatgtcacccaggctggagt

SEQ ID NO: 21837 - DNA, 20 bp, synthetic construct
  source 1..20: mol_type = other DNA
ctatgtcacccaggctggag

SEQ ID NO: 21838 - DNA, 20 bp, synthetic construct
  source 1..20: mol_type = other DNA
actatgtcacccaggctgga

SEQ ID NO: 21839 - DNA, 20 bp, synthetic construct
  source 1..20: mol_type = other DNA
cactatgtcacccaggctgg

SEQ ID NO: 21840 - DNA, 20 bp, synthetic construct
  source 1..20: mol_type = other DNA
tcactatgtcacccaggctg

SEQ ID NO: 21841 - DNA, 20 bp, synthetic construct
  source 1..20: mol_type = other DNA
ctcactatgtcacccaggct

SEQ ID NO: 21842 - DNA, 20 bp, synthetic construct
  source 1..20: mol_type = other DNA
tctcactatgtcacccaggc

SEQ ID NO: 21843 - DNA, 20 bp, synthetic construct
  source 1..20: mol_type = other DNA
gtctcactatgtcacccagg

SEQ ID NO: 21844 - DNA, 20 bp, synthetic construct
  source 1..20: mol_type = other DNA
agtctcactatgtcacccag

SEQ ID NO: 21845 - DNA, 20 bp, synthetic construct
  source 1..20: mol_type = other DNA
gagtctcactatgtcaccca

SEQ ID NO: 21846 - DNA, 20 bp, synthetic construct
  source 1..20: mol_type = other DNA
agagtctcactatgtcaccc

SEQ ID NO: 21847 - DNA, 20 bp, synthetic construct
  source 1..20: mol_type = other DNA
aagagtctcactatgtcacc

SEQ ID NO: 21848 - DNA, 20 bp, synthetic construct
  source 1..20: mol_type = other DNA
taagagtctcactatgtcac

SEQ ID NO: 21849 - DNA, 20 bp, synthetic construct
  source 1..20: mol_type = other DNA
ataagagtctcactatgtca

SEQ ID NO: 21850 - DNA, 20 bp, synthetic construct
  source 1..20: mol_type = other DNA
gataagagtctcactatgtc

SEQ ID NO: 21851 - DNA, 20 bp, synthetic construct
  source 1..20: mol_type = other DNA
agataagagtctcactatgt

SEQ ID NO: 21852 - DNA, 20 bp, synthetic construct
  source 1..20: mol_type = other DNA
gagataagagtctcactatg

SEQ ID NO: 21853 - DNA, 20 bp, synthetic construct
  source 1..20: mol_type = other DNA
tgagataagagtctcactat

SEQ ID NO: 21854 - DNA, 20 bp, synthetic construct
  source 1..20: mol_type = other DNA
ttgagataagagtctcacta

SEQ ID NO: 21855 - DNA, 20 bp, synthetic construct
  source 1..20: mol_type = other DNA
tttgagataagagtctcact

SEQ ID NO: 21856 - DNA, 20 bp, synthetic construct
  source 1..20: mol_type = other DNA
ttttgagataagagtctcac

SEQ ID NO: 21857 - DNA, 20 bp, synthetic construct
  source 1..20: mol_type = other DNA
tttttgagataagagtctca

SEQ ID NO: 21858 - DNA, 20 bp, synthetic construct
  source 1..20: mol_type = other DNA
ttttttgagataagagtctc

SEQ ID NO: 21859 - DNA, 20 bp, synthetic construct
  source 1..20: mol_type = other DNA
tttttttgagataagagtct

SEQ ID NO: 21860 - DNA, 20 bp, synthetic construct
  source 1..20: mol_type = other DNA
ttttttttgagataagagtc

SEQ ID NO: 21861 - DNA, 20 bp, synthetic construct
  source 1..20: mol_type = other DNA
tttttttttgagataagagt

SEQ ID NO: 21862 - DNA, 20 bp, synthetic construct
  source 1..20: mol_type = other DNA
ttttttttttgagataagag

SEQ ID NO: 21863 - DNA, 20 bp, synthetic construct
  source 1..20: mol_type = other DNA
tttttttttttgagataaga

SEQ ID NO: 21864 - DNA, 20 bp, synthetic construct
  source 1..20: mol_type = other DNA
ttttttttttttgagataag

SEQ ID NO: 21865 - DNA, 20 bp, synthetic construct
  source 1..20: mol_type = other DNA
tttttttttttttgagataa

SEQ ID NO: 21866 - DNA, 20 bp, synthetic construct
  source 1..20: mol_type = other DNA
ttttttttttttttgagata

SEQ ID NO: 21867 - DNA, 20 bp, synthetic construct
  source 1..20: mol_type = other DNA
tttttttttttttttgagat

SEQ ID NO: 21868 - DNA, 20 bp, synthetic construct
  source 1..20: mol_type = other DNA
ttttttttttttttttgaga

SEQ ID NO: 21869 - DNA, 20 bp, synthetic construct
  source 1..20: mol_type = other DNA
cttttttttttttttttgag

SEQ ID NO: 21870 - DNA, 20 bp, synthetic construct
  source 1..20: mol_type = other DNA
ccttttttttttttttttga

SEQ ID NO: 21871 - DNA, 20 bp, synthetic construct
  source 1..20: mol_type = other DNA
accttttttttttttttttg

SEQ ID NO: 21872 - DNA, 20 bp, synthetic construct
  source 1..20: mol_type = other DNA
gacctttttttttttttttt

SEQ ID NO: 21873 - DNA, 20 bp, synthetic construct
  source 1..20: mol_type = other DNA
cgaccttttttttttttttt

SEQ ID NO: 21874 - DNA, 20 bp, synthetic construct
  source 1..20: mol_type = other DNA
acgacctttttttttttttt

SEQ ID NO: 21875 - DNA, 20 bp, synthetic construct
  source 1..20: mol_type = other DNA
gacgaccttttttttttttt

SEQ ID NO: 21876 - DNA, 20 bp, synthetic construct
  source 1..20: mol_type = other DNA
agacgacctttttttttttt

SEQ ID NO: 21877 - DNA, 20 bp, synthetic construct
  source 1..20: mol_type = other DNA
cagacgaccttttttttttt

SEQ ID NO: 21878 - DNA, 20 bp, synthetic construct
  source 1..20: mol_type = other DNA
acagacgacctttttttttt

SEQ ID NO: 21879 - DNA, 20 bp, synthetic construct
  source 1..20: mol_type = other DNA
tacagacgaccttttttttt

SEQ ID NO: 21880 - DNA, 20 bp, synthetic construct
  source 1..20: mol_type = other DNA
gtacagacgacctttttttt

SEQ ID NO: 21881 - DNA, 20 bp, synthetic construct
  source 1..20: mol_type = other DNA
agtacagacgaccttttttt

SEQ ID NO: 21882 - DNA, 20 bp, synthetic construct
  source 1..20: mol_type = other DNA
tagtacagacgacctttttt

SEQ ID NO: 21883 - DNA, 20 bp, synthetic construct
  source 1..20: mol_type = other DNA
atagtacagacgaccttttt

SEQ ID NO: 21884 - DNA, 20 bp, synthetic construct
  source 1..20: mol_type = other DNA
aatagtacagacgacctttt

SEQ ID NO: 21885 - DNA, 20 bp, synthetic construct
  source 1..20: mol_type = other DNA
caatagtacagacgaccttt

SEQ ID NO: 21886 - DNA, 20 bp, synthetic construct
  source 1..20: mol_type = other DNA
gcaatagtacagacgacctt

SEQ ID NO: 21887 - DNA, 20 bp, synthetic construct
  source 1..20: mol_type = other DNA
tgcaatagtacagacgacct

SEQ ID NO: 21888 - DNA, 20 bp, synthetic construct
  source 1..20: mol_type = other DNA
atgcaatagtacagacgacc

SEQ ID NO: 21889 - DNA, 20 bp, synthetic construct
  source 1..20: mol_type = other DNA
catgcaatagtacagacgac

SEQ ID NO: 21890 - DNA, 20 bp, synthetic construct
  source 1..20: mol_type = other DNA
acatgcaatagtacagacga

SEQ ID NO: 21891 - DNA, 20 bp, synthetic construct
  source 1..20: mol_type = other DNA
aacatgcaatagtacagacg

SEQ ID NO: 21892 - DNA, 20 bp, synthetic construct
  source 1..20: mol_type = other DNA
taacatgcaatagtacagac

SEQ ID NO: 21893 - DNA, 20 bp, synthetic construct
  source 1..20: mol_type = other DNA
ctaacatgcaatagtacaga

SEQ ID NO: 21894 - DNA, 20 bp, synthetic construct
  source 1..20: mol_type = other DNA
actaacatgcaatagtacag

SEQ ID NO: 21895 - DNA, 20 bp, synthetic construct
  source 1..20: mol_type = other DNA
tactaacatgcaatagtaca

SEQ ID NO: 21896 - DNA, 20 bp, synthetic construct
  source 1..20: mol_type = other DNA
ctactaacatgcaatagtac

SEQ ID NO: 21897 - DNA, 20 bp, synthetic construct
  source 1..20: mol_type = other DNA
actactaacatgcaatagta

SEQ ID NO: 21898 - DNA, 20 bp, synthetic construct
  source 1..20: mol_type = other DNA
aactactaacatgcaatagt

SEQ ID NO: 21899 - DNA, 20 bp, synthetic construct
  source 1..20: mol_type = other DNA
aaactactaacatgcaatag

SEQ ID NO: 21900 - DNA, 20 bp, synthetic construct
  source 1..20: mol_type = other DNA
gaaactactaacatgcaata

SEQ ID NO: 21901 - DNA, 20 bp, synthetic construct
  source 1..20: mol_type = other DNA
agaaactactaacatgcaat

SEQ ID NO: 21902 - DNA, 20 bp, synthetic construct
  source 1..20: mol_type = other DNA
aagaaactactaacatgcaa

SEQ ID NO: 21903 - DNA, 20 bp, synthetic construct
  source 1..20: mol_type = other DNA
aaagaaactactaacatgca

SEQ ID NO: 21904 - DNA, 20 bp, synthetic construct
  source 1..20: mol_type = other DNA
gaaagaaactactaacatgc

SEQ ID NO: 21905 - DNA, 20 bp, synthetic construct
  source 1..20: mol_type = other DNA
agaaagaaactactaacatg

SEQ ID NO: 21906 - DNA, 20 bp, synthetic construct
  source 1..20: mol_type = other DNA
cagaaagaaactactaacat

SEQ ID NO: 21907 - DNA, 20 bp, synthetic construct
  source 1..20: mol_type = other DNA
gcagaaagaaactactaaca

SEQ ID NO: 21908 - DNA, 20 bp, synthetic construct
  source 1..20: mol_type = other DNA
agcagaaagaaactactaac

SEQ ID NO: 21909 - DNA, 20 bp, synthetic construct
  source 1..20: mol_type = other DNA
aagcagaaagaaactactaa

SEQ ID NO: 21910 - DNA, 20 bp, synthetic construct
  source 1..20: mol_type = other DNA
taagcagaaagaaactacta

SEQ ID NO: 21911 - DNA, 20 bp, synthetic construct
  source 1..20: mol_type = other DNA
ataagcagaaagaaactact

SEQ ID NO: 21912 - DNA, 20 bp, synthetic construct
  source 1..20: mol_type = other DNA
aataagcagaaagaaactac

SEQ ID NO: 21913 - DNA, 20 bp, synthetic construct
  source 1..20: mol_type = other DNA
caataagcagaaagaaacta

SEQ ID NO: 21914 - DNA, 20 bp, synthetic construct
  source 1..20: mol_type = other DNA
acaataagcagaaagaaact

SEQ ID NO: 21915 - DNA, 20 bp, synthetic construct
  source 1..20: mol_type = other DNA
aacaataagcagaaagaaac

SEQ ID NO: 21916 - DNA, 20 bp, synthetic construct
  source 1..20: mol_type = other DNA
caacaataagcagaaagaaa

SEQ ID NO: 21917 - DNA, 20 bp, synthetic construct
  source 1..20: mol_type = other DNA
tcaacaataagcagaaagaa

SEQ ID NO: 21918 - DNA, 20 bp, synthetic construct
  source 1..20: mol_type = other DNA
ctcaacaataagcagaaaga

SEQ ID NO: 21919 - DNA, 20 bp, synthetic construct
  source 1..20: mol_type = other DNA
actcaacaataagcagaaag

SEQ ID NO: 21920 - DNA, 20 bp, synthetic construct
  source 1..20: mol_type = other DNA
tactcaacaataagcagaaa

SEQ ID NO: 21921 - DNA, 20 bp, synthetic construct
  source 1..20: mol_type = other DNA
ctactcaacaataagcagaa

SEQ ID NO: 21922 - DNA, 20 bp, synthetic construct
  source 1..20: mol_type = other DNA
actactcaacaataagcaga

SEQ ID NO: 21923 - DNA, 20 bp, synthetic construct
  source 1..20: mol_type = other DNA
tactactcaacaataagcag

SEQ ID NO: 21924 - DNA, 20 bp, synthetic construct
  source 1..20: mol_type = other DNA
ctactactcaacaataagca

SEQ ID NO: 21925 - DNA, 20 bp, synthetic construct
  source 1..20: mol_type = other DNA
actactactcaacaataagc

SEQ ID NO: 21926 - DNA, 20 bp, synthetic construct
  source 1..20: mol_type = other DNA
gactactactcaacaataag

SEQ ID NO: 21927 - DNA, 20 bp, synthetic construct
  source 1..20: mol_type = other DNA
agactactactcaacaataa

SEQ ID NO: 21928 - DNA, 20 bp, synthetic construct
  source 1..20: mol_type = other DNA
tagactactactcaacaata

SEQ ID NO: 21929 - DNA, 20 bp, synthetic construct
  source 1..20: mol_type = other DNA
atagactactactcaacaat

SEQ ID NO: 21930 - DNA, 20 bp, synthetic construct
  source 1..20: mol_type = other DNA
aatagactactactcaacaa

SEQ ID NO: 21931 - DNA, 20 bp, synthetic construct
  source 1..20: mol_type = other DNA
caatagactactactcaaca

SEQ ID NO: 21932 - DNA, 20 bp, synthetic construct
  source 1..20: mol_type = other DNA
acaatagactactactcaac

SEQ ID NO: 21933 - DNA, 20 bp, synthetic construct
  source 1..20: mol_type = other DNA
tacaatagactactactcaa

SEQ ID NO: 21934 - DNA, 20 bp, synthetic construct
  source 1..20: mol_type = other DNA
atacaatagactactactca

SEQ ID NO: 21935 - DNA, 20 bp, synthetic construct
  source 1..20: mol_type = other DNA
catacaatagactactactc

SEQ ID NO: 21936 - DNA, 20 bp, synthetic construct
  source 1..20: mol_type = other DNA
gcatacaatagactactact

SEQ ID NO: 21937 - DNA, 20 bp, synthetic construct
  source 1..20: mol_type = other DNA
tgcatacaatagactactac

SEQ ID NO: 21938 - DNA, 20 bp, synthetic construct
  source 1..20: mol_type = other DNA
atgcatacaatagactacta

SEQ ID NO: 21939 - DNA, 20 bp, synthetic construct
  source 1..20: mol_type = other DNA
catgcatacaatagactact

SEQ ID NO: 21940 - DNA, 20 bp, synthetic construct
  source 1..20: mol_type = other DNA
acatgcatacaatagactac

SEQ ID NO: 21941 - DNA, 20 bp, synthetic construct
  source 1..20: mol_type = other DNA
tacatgcatacaatagacta

SEQ ID NO: 21942 - DNA, 20 bp, synthetic construct
  source 1..20: mol_type = other DNA
gtacatgcatacaatagact

SEQ ID NO: 21943 - DNA, 20 bp, synthetic construct
  source 1..20: mol_type = other DNA
ggtacatgcatacaatagac

SEQ ID NO: 21944 - DNA, 20 bp, synthetic construct
  source 1..20: mol_type = other DNA
tggtacatgcatacaataga

SEQ ID NO: 21945 - DNA, 20 bp, synthetic construct
  source 1..20: mol_type = other DNA
ctggtacatgcatacaatag

SEQ ID NO: 21946 - DNA, 20 bp, synthetic construct
  source 1..20: mol_type = other DNA
actggtacatgcatacaata

SEQ ID NO: 21947 - DNA, 20 bp, synthetic construct
  source 1..20: mol_type = other DNA
aactggtacatgcatacaat

SEQ ID NO: 21948 - DNA, 20 bp, synthetic construct
  source 1..20: mol_type = other DNA
aaactggtacatgcatacaa

SEQ ID NO: 21949 - DNA, 20 bp, synthetic construct
  source 1..20: mol_type = other DNA
caaactggtacatgcataca

SEQ ID NO: 21950 - DNA, 20 bp, synthetic construct
  source 1..20: mol_type = other DNA
acaaactggtacatgcatac

SEQ ID NO: 21951 - DNA, 20 bp, synthetic construct
  source 1..20: mol_type = other DNA
aacaaactggtacatgcata

SEQ ID NO: 21952 - DNA, 20 bp, synthetic construct
  source 1..20: mol_type = other DNA
gaacaaactggtacatgcat

SEQ ID NO: 21953 - DNA, 20 bp, synthetic construct
  source 1..20: mol_type = other DNA
tgaacaaactggtacatgca

SEQ ID NO: 21954 - DNA, 20 bp, synthetic construct
  source 1..20: mol_type = other DNA
atgaacaaactggtacatgc

SEQ ID NO: 21955 - DNA, 20 bp, synthetic construct
  source 1..20: mol_type = other DNA
gatgaacaaactggtacatg

SEQ ID NO: 21956 - DNA, 20 bp, synthetic construct
  source 1..20: mol_type = other DNA
agatgaacaaactggtacat

SEQ ID NO: 21957 - DNA, 20 bp, synthetic construct
  source 1..20: mol_type = other DNA
tagatgaacaaactggtaca

SEQ ID NO: 21958 - DNA, 20 bp, synthetic construct
  source 1..20: mol_type = other DNA
ctagatgaacaaactggtac

SEQ ID NO: 21959 - DNA, 20 bp, synthetic construct
  source 1..20: mol_type = other DNA
actagatgaacaaactggta

SEQ ID NO: 21960 - DNA, 20 bp, synthetic construct
  source 1..20: mol_type = other DNA
cactagatgaacaaactggt

SEQ ID NO: 21961 - DNA, 20 bp, synthetic construct
  source 1..20: mol_type = other DNA
ccactagatgaacaaactgg

SEQ ID NO: 21962 - DNA, 20 bp, synthetic construct
  source 1..20: mol_type = other DNA
accactagatgaacaaactg

SEQ ID NO: 21963 - DNA, 20 bp, synthetic construct
  source 1..20: mol_type = other DNA
caccactagatgaacaaact

SEQ ID NO: 21964 - DNA, 20 bp, synthetic construct
  source 1..20: mol_type = other DNA
ccaccactagatgaacaaac

SEQ ID NO: 21965 - DNA, 20 bp, synthetic construct
  source 1..20: mol_type = other DNA
tccaccactagatgaacaaa

SEQ ID NO: 21966 - DNA, 20 bp, synthetic construct
  source 1..20: mol_type = other DNA
gtccaccactagatgaacaa

SEQ ID NO: 21967 - DNA, 20 bp, synthetic construct
  source 1..20: mol_type = other DNA
tgtccaccactagatgaaca

SEQ ID NO: 21968 - DNA, 20 bp, synthetic construct
  source 1..20: mol_type = other DNA
atgtccaccactagatgaac

SEQ ID NO: 21969 - DNA, 20 bp, synthetic construct
  source 1..20: mol_type = other DNA
aatgtccaccactagatgaa

SEQ ID NO: 21970 - DNA, 20 bp, synthetic construct
  source 1..20: mol_type = other DNA
caatgtccaccactagatga

SEQ ID NO: 21971 - DNA, 20 bp, synthetic construct
  source 1..20: mol_type = other DNA
tcaatgtccaccactagatg

SEQ ID NO: 21972 - DNA, 20 bp, synthetic construct
  source 1..20: mol_type = other DNA
ctcaatgtccaccactagat

SEQ ID NO: 21973 - DNA, 20 bp, synthetic construct
  source 1..20: mol_type = other DNA
actcaatgtccaccactaga

SEQ ID NO: 21974 - DNA, 20 bp, synthetic construct
  source 1..20: mol_type = other DNA
aactcaatgtccaccactag

SEQ ID NO: 21975 - DNA, 20 bp, synthetic construct
  source 1..20: mol_type = other DNA
taactcaatgtccaccacta

SEQ ID NO: 21976 - DNA, 20 bp, synthetic construct
  source 1..20: mol_type = other DNA
ctaactcaatgtccaccact

SEQ ID NO: 21977 - DNA, 20 bp, synthetic construct
  source 1..20: mol_type = other DNA
gctaactcaatgtccaccac

SEQ ID NO: 21978 - DNA, 20 bp, synthetic construct
  source 1..20: mol_type = other DNA
tgctaactcaatgtccacca

SEQ ID NO: 21979 - DNA, 20 bp, synthetic construct
  source 1..20: mol_type = other DNA
ctgctaactcaatgtccacc

SEQ ID NO: 21980 - DNA, 20 bp, synthetic construct
  source 1..20: mol_type = other DNA
cctgctaactcaatgtccac

SEQ ID NO: 21981 - DNA, 20 bp, synthetic construct
  source 1..20: mol_type = other DNA
acctgctaactcaatgtcca

SEQ ID NO: 21982 - DNA, 20 bp, synthetic construct
  source 1..20: mol_type = other DNA
aacctgctaactcaatgtcc

SEQ ID NO: 21983 - DNA, 20 bp, synthetic construct
  source 1..20: mol_type = other DNA
aaacctgctaactcaatgtc

SEQ ID NO: 21984 - DNA, 20 bp, synthetic construct
  source 1..20: mol_type = other DNA
aaaacctgctaactcaatgt

SEQ ID NO: 21985 - DNA, 20 bp, synthetic construct
  source 1..20: mol_type = other DNA
caaaacctgctaactcaatg

SEQ ID NO: 21986 - DNA, 20 bp, synthetic construct
  source 1..20: mol_type = other DNA
ccaaaacctgctaactcaat

SEQ ID NO: 21987 - DNA, 20 bp, synthetic construct
  source 1..20: mol_type = other DNA
gccaaaacctgctaactcaa

SEQ ID NO: 21988 - DNA, 20 bp, synthetic construct
  source 1..20: mol_type = other DNA
agccaaaacctgctaactca

SEQ ID NO: 21989 - DNA, 20 bp, synthetic construct
  source 1..20: mol_type = other DNA
tagccaaaacctgctaactc

SEQ ID NO: 21990 - DNA, 20 bp, synthetic construct
  source 1..20: mol_type = other DNA
atagccaaaacctgctaact

SEQ ID NO: 21991 - DNA, 20 bp, synthetic construct
  source 1..20: mol_type = other DNA
aatagccaaaacctgctaac

SEQ ID NO: 21992 - DNA, 20 bp, synthetic construct
  source 1..20: mol_type = other DNA
taatagccaaaacctgctaa

SEQ ID NO: 21993 - DNA, 20 bp, synthetic construct
  source 1..20: mol_type = other DNA
ttaatagccaaaacctgcta

SEQ ID NO: 21994 - DNA, 20 bp, synthetic construct
  source 1..20: mol_type = other DNA
tttaatagccaaaacctgct

SEQ ID NO: 21995 - DNA, 20 bp, synthetic construct
  source 1..20: mol_type = other DNA
ttttaatagccaaaacctgc

SEQ ID NO: 21996 - DNA, 20 bp, synthetic construct
  source 1..20: mol_type = other DNA
tttttaatagccaaaacctg

SEQ ID NO: 21997 - DNA, 20 bp, synthetic construct
  source 1..20: mol_type = other DNA
atttttaatagccaaaacct

SEQ ID NO: 21998 - DNA, 20 bp, synthetic construct
  source 1..20: mol_type = other DNA
tatttttaatagccaaaacc

SEQ ID NO: 21999 - DNA, 20 bp, synthetic construct
  source 1..20: mol_type = other DNA
ttatttttaatagccaaaac

SEQ ID NO: 22000 - DNA, 20 bp, synthetic construct
  source 1..20: mol_type = other DNA
tttatttttaatagccaaaa

SEQ ID NO: 22001 - DNA, 20 bp, synthetic construct
  source 1..20: mol_type = other DNA
ctttatttttaatagccaaa

SEQ ID NO: 22002 - DNA, 20 bp, synthetic construct
  source 1..20: mol_type = other DNA
gctttatttttaatagccaa

SEQ ID NO: 22003 - DNA, 20 bp, synthetic construct
  source 1..20: mol_type = other DNA
agctttatttttaatagcca

SEQ ID NO: 22004 - DNA, 20 bp, synthetic construct
  source 1..20: mol_type = other DNA
cagctttatttttaatagcc

SEQ ID NO: 22005 - DNA, 20 bp, synthetic construct
  source 1..20: mol_type = other DNA
ccagctttatttttaatagc

SEQ ID NO: 22006 - DNA, 20 bp, synthetic construct
  source 1..20: mol_type = other DNA
tccagctttatttttaatag

SEQ ID NO: 22007 - DNA, 20 bp, synthetic construct
  source 1..20: mol_type = other DNA
ctccagctttatttttaata

SEQ ID NO: 22008 - DNA, 20 bp, synthetic construct
  source 1..20: mol_type = other DNA
cctccagctttatttttaat

SEQ ID NO: 22009 - DNA, 20 bp, synthetic construct
  source 1..20: mol_type = other DNA
gcctccagctttatttttaa

SEQ ID NO: 22010 - DNA, 20 bp, synthetic construct
  source 1..20: mol_type = other DNA
ggcctccagctttattttta

SEQ ID NO: 22011 - DNA, 20 bp, synthetic construct
  source 1..20: mol_type = other DNA
cggcctccagctttattttt

SEQ ID NO: 22012 - DNA, 20 bp, synthetic construct
  source 1..20: mol_type = other DNA
ccggcctccagctttatttt

SEQ ID NO: 22013 - DNA, 20 bp, synthetic construct
  source 1..20: mol_type = other DNA
cccggcctccagctttattt

SEQ ID NO: 22014 - DNA, 20 bp, synthetic construct
  source 1..20: mol_type = other DNA
acccggcctccagctttatt

SEQ ID NO: 22015 - DNA, 20 bp, synthetic construct
  source 1..20: mol_type = other DNA
cacccggcctccagctttat

SEQ ID NO: 22016 - DNA, 20 bp, synthetic construct
  source 1..20: mol_type = other DNA
gcacccggcctccagcttta

SEQ ID NO: 22017 - DNA, 20 bp, synthetic construct
  source 1..20: mol_type = other DNA
cgcacccggcctccagcttt

SEQ ID NO: 22018 - DNA, 20 bp, synthetic construct
  source 1..20: mol_type = other DNA
tcgcacccggcctccagctt

SEQ ID NO: 22019 - DNA, 20 bp, synthetic construct
  source 1..20: mol_type = other DNA
atcgcacccggcctccagct

SEQ ID NO: 22020 - DNA, 20 bp, synthetic construct
  source 1..20: mol_type = other DNA
catcgcacccggcctccagc

SEQ ID NO: 22021 - DNA, 20 bp, synthetic construct
  source 1..20: mol_type = other DNA
acatcgcacccggcctccag

SEQ ID NO: 22022 - DNA, 20 bp, synthetic construct
  source 1..20: mol_type = other DNA
gacatcgcacccggcctcca

SEQ ID NO: 22023 - DNA, 20 bp, synthetic construct
  source 1..20: mol_type = other DNA
agacatcgcacccggcctcc

SEQ ID NO: 22024 - DNA, 20 bp, synthetic construct
  source 1..20: mol_type = other DNA
gagacatcgcacccggcctc

SEQ ID NO: 22025 - DNA, 20 bp, synthetic construct
  source 1..20: mol_type = other DNA
tgagacatcgcacccggcct

SEQ ID NO: 22026 - DNA, 20 bp, synthetic construct
  source 1..20: mol_type = other DNA
gtgagacatcgcacccggcc

SEQ ID NO: 22027 - DNA, 20 bp, synthetic construct
  source 1..20: mol_type = other DNA
cgtgagacatcgcacccggc

SEQ ID NO: 22028 - DNA, 20 bp, synthetic construct
  source 1..20: mol_type = other DNA
gcgtgagacatcgcacccgg

SEQ ID NO: 22029 - DNA, 20 bp, synthetic construct
  source 1..20: mol_type = other DNA
ggcgtgagacatcgcacccg

SEQ ID NO: 22030 - DNA, 20 bp, synthetic construct
  source 1..20: mol_type = other DNA
aggcgtgagacatcgcaccc

SEQ ID NO: 22031 - DNA, 20 bp, synthetic construct
  source 1..20: mol_type = other DNA
caggcgtgagacatcgcacc

SEQ ID NO: 22032 - DNA, 20 bp, synthetic construct
  source 1..20: mol_type = other DNA
acaggcgtgagacatcgcac

SEQ ID NO: 22033 - DNA, 20 bp, synthetic construct
  source 1..20: mol_type = other DNA
tacaggcgtgagacatcgca

SEQ ID NO: 22034 - DNA, 20 bp, synthetic construct
  source 1..20: mol_type = other DNA
ttacaggcgtgagacatcgc

SEQ ID NO: 22035 - DNA, 20 bp, synthetic construct
  source 1..20: mol_type = other DNA
attacaggcgtgagacatcg

SEQ ID NO: 22036 - DNA, 20 bp, synthetic construct
  source 1..20: mol_type = other DNA
gattacaggcgtgagacatc

SEQ ID NO: 22037 - DNA, 20 bp, synthetic construct
  source 1..20: mol_type = other DNA
ggattacaggcgtgagacat

SEQ ID NO: 22038 - DNA, 20 bp, synthetic construct
  source 1..20: mol_type = other DNA
gggattacaggcgtgagaca

SEQ ID NO: 22039 - DNA, 20 bp, synthetic construct
  source 1..20: mol_type = other DNA
tgggattacaggcgtgagac

SEQ ID NO: 22040 - DNA, 20 bp, synthetic construct
  source 1..20: mol_type = other DNA
ctgggattacaggcgtgaga

SEQ ID NO: 22041 - DNA, 20 bp, synthetic construct
  source 1..20: mol_type = other DNA
gctgggattacaggcgtgag

SEQ ID NO: 22042 - DNA, 20 bp, synthetic construct
  source 1..20: mol_type = other DNA
tgctgggattacaggcgtga

SEQ ID NO: 22043 - DNA, 20 bp, synthetic construct
  source 1..20: mol_type = other DNA
atgctgggattacaggcgtg

SEQ ID NO: 22044 - DNA, 20 bp, synthetic construct
  source 1..20: mol_type = other DNA
aatgctgggattacaggcgt

SEQ ID NO: 22045 - DNA, 20 bp, synthetic construct
  source 1..20: mol_type = other DNA
aaatgctgggattacaggcg

SEQ ID NO: 22046 - DNA, 20 bp, synthetic construct
  source 1..20: mol_type = other DNA
aaaatgctgggattacaggc

SEQ ID NO: 22047 - DNA, 20 bp, synthetic construct
  source 1..20: mol_type = other DNA
caaaatgctgggattacagg

SEQ ID NO: 22048 - DNA, 20 bp, synthetic construct
  source 1..20: mol_type = other DNA
ccaaaatgctgggattacag

SEQ ID NO: 22049 - DNA, 20 bp, synthetic construct
  source 1..20: mol_type = other DNA
tccaaaatgctgggattaca

SEQ ID NO: 22050 - DNA, 20 bp, synthetic construct
  source 1..20: mol_type = other DNA
ttccaaaatgctgggattac

SEQ ID NO: 22051 - DNA, 20 bp, synthetic construct
  source 1..20: mol_type = other DNA
cttccaaaatgctgggatta

SEQ ID NO: 22052 - DNA, 20 bp, synthetic construct
  source 1..20: mol_type = other DNA
ccttccaaaatgctgggatt

SEQ ID NO: 22053 - DNA, 20 bp, synthetic construct
  source 1..20: mol_type = other DNA
gccttccaaaatgctgggat

SEQ ID NO: 22054 - DNA, 20 bp, synthetic construct
  source 1..20: mol_type = other DNA
ggccttccaaaatgctggga

SEQ ID NO: 22055 - DNA, 20 bp, synthetic construct
  source 1..20: mol_type = other DNA
cggccttccaaaatgctggg

SEQ ID NO: 22056 - DNA, 20 bp, synthetic construct
  source 1..20: mol_type = other DNA
tcggccttccaaaatgctgg

SEQ ID NO: 22057 - DNA, 20 bp, synthetic construct
  source 1..20: mol_type = other DNA
ctcggccttccaaaatgctg

SEQ ID NO: 22058 - DNA, 20 bp, synthetic construct
  source 1..20: mol_type = other DNA
cctcggccttccaaaatgct

SEQ ID NO: 22059 - DNA, 20 bp, synthetic construct
  source 1..20: mol_type = other DNA
gcctcggccttccaaaatgc

SEQ ID NO: 22060 - DNA, 20 bp, synthetic construct
  source 1..20: mol_type = other DNA
tgcctcggccttccaaaatg

SEQ ID NO: 22061 - DNA, 20 bp, synthetic construct
  source 1..20: mol_type = other DNA
ctgcctcggccttccaaaat

SEQ ID NO: 22062 - DNA, 20 bp, synthetic construct
  source 1..20: mol_type = other DNA
cctgcctcggccttccaaaa

SEQ ID NO: 22063 - DNA, 20 bp, synthetic construct
  source 1..20: mol_type = other DNA
gcctgcctcggccttccaaa

SEQ ID NO: 22064 - DNA, 20 bp, synthetic construct
  source 1..20: mol_type = other DNA
cgcctgcctcggccttccaa

SEQ ID NO: 22065 - DNA, 20 bp, synthetic construct
  source 1..20: mol_type = other DNA
ccgcctgcctcggccttcca

SEQ ID NO: 22066 - DNA, 20 bp, synthetic construct
  source 1..20: mol_type = other DNA
tccgcctgcctcggccttcc

SEQ ID NO: 22067 - DNA, 20 bp, synthetic construct
  source 1..20: mol_type = other DNA
atccgcctgcctcggccttc

SEQ ID NO: 22068 - DNA, 20 bp, synthetic construct
  source 1..20: mol_type = other DNA
gatccgcctgcctcggcctt

SEQ ID NO: 22069 - DNA, 20 bp, synthetic construct
  source 1..20: mol_type = other DNA
tgatccgcctgcctcggcct

SEQ ID NO: 22070 - DNA, 20 bp, synthetic construct
  source 1..20: mol_type = other DNA
gtgatccgcctgcctcggcc

SEQ ID NO: 22071 - DNA, 20 bp, synthetic construct
  source 1..20: mol_type = other DNA
ggtgatccgcctgcctcggc

SEQ ID NO: 22072 - DNA, 20 bp, synthetic construct
  source 1..20: mol_type = other DNA
aggtgatccgcctgcctcgg

SEQ ID NO: 22073 - DNA, 20 bp, synthetic construct
  source 1..20: mol_type = other DNA
taggtgatccgcctgcctcg

SEQ ID NO: 22074 - DNA, 20 bp, synthetic construct
  source 1..20: mol_type = other DNA
ttaggtgatccgcctgcctc

SEQ ID NO: 22075 - DNA, 20 bp, synthetic construct
  source 1..20: mol_type = other DNA
cttaggtgatccgcctgcct

SEQ ID NO: 22076 - DNA, 20 bp, synthetic construct
  source 1..20: mol_type = other DNA
ccttaggtgatccgcctgcc

SEQ ID NO: 22077 - DNA, 20 bp, synthetic construct
  source 1..20: mol_type = other DNA
accttaggtgatccgcctgc

SEQ ID NO: 22078 - DNA, 20 bp, synthetic construct
  source 1..20: mol_type = other DNA
aaccttaggtgatccgcctg

SEQ ID NO: 22079 - DNA, 20 bp, synthetic construct
  source 1..20: mol_type = other DNA
caaccttaggtgatccgcct

SEQ ID NO: 22080 - DNA, 20 bp, synthetic construct
  source 1..20: mol_type = other DNA
ccaaccttaggtgatccgcc

SEQ ID NO: 22081 - DNA, 20 bp, synthetic construct
  source 1..20: mol_type = other DNA
cccaaccttaggtgatccgc

SEQ ID NO: 22082 - DNA, 20 bp, synthetic construct
  source 1..20: mol_type = other DNA
tcccaaccttaggtgatccg

SEQ ID NO: 22083 - DNA, 20 bp, synthetic construct
  source 1..20: mol_type = other DNA
ctcccaaccttaggtgatcc

SEQ ID NO: 22084 - DNA, 20 bp, synthetic construct
  source 1..20: mol_type = other DNA
actcccaaccttaggtgatc

SEQ ID NO: 22085 - DNA, 20 bp, synthetic construct
  source 1..20: mol_type = other DNA
aactcccaaccttaggtgat

SEQ ID NO: 22086 - DNA, 20 bp, synthetic construct
  source 1..20: mol_type = other DNA
aaactcccaaccttaggtga

SEQ ID NO: 22087 - DNA, 20 bp, synthetic construct
  source 1..20: mol_type = other DNA
caaactcccaaccttaggtg

SEQ ID NO: 22088 - DNA, 20 bp, synthetic construct
  source 1..20: mol_type = other DNA
tcaaactcccaaccttaggt

SEQ ID NO: 22089 - DNA, 20 bp, synthetic construct
  source 1..20: mol_type = other DNA
ctcaaactcccaaccttagg

SEQ ID NO: 22090 - DNA, 20 bp, synthetic construct
  source 1..20: mol_type = other DNA
tctcaaactcccaaccttag

SEQ ID NO: 22091 - DNA, 20 bp, synthetic construct
  source 1..20: mol_type = other DNA
gtctcaaactcccaacctta

SEQ ID NO: 22092 - DNA, 20 bp, synthetic construct
  source 1..20: mol_type = other DNA
ggtctcaaactcccaacctt

SEQ ID NO: 22093 - DNA, 20 bp, synthetic construct
  source 1..20: mol_type = other DNA
tggtctcaaactcccaacct

SEQ ID NO: 22094 - DNA, 20 bp, synthetic construct
  source 1..20: mol_type = other DNA
ctggtctcaaactcccaacc

SEQ ID NO: 22095 - DNA, 20 bp, synthetic construct
  source 1..20: mol_type = other DNA
gctggtctcaaactcccaac

SEQ ID NO: 22096 - DNA, 20 bp, synthetic construct
  source 1..20: mol_type = other DNA
ggctggtctcaaactcccaa

SEQ ID NO: 22097 - DNA, 20 bp, synthetic construct
  source 1..20: mol_type = other DNA
aggctggtctcaaactccca

SEQ ID NO: 22098 - DNA, 20 bp, synthetic construct
  source 1..20: mol_type = other DNA
caggctggtctcaaactccc

SEQ ID NO: 22099 - DNA, 20 bp, synthetic construct
  source 1..20: mol_type = other DNA
tcaggctggtctcaaactcc

SEQ ID NO: 22100 - DNA, 20 bp, synthetic construct
  source 1..20: mol_type = other DNA
gtcaggctggtctcaaactc

SEQ ID NO: 22101 - DNA, 20 bp, synthetic construct
  source 1..20: mol_type = other DNA
ggtcaggctggtctcaaact

SEQ ID NO: 22102 - DNA, 20 bp, synthetic construct
  source 1..20: mol_type = other DNA
tggtcaggctggtctcaaac

SEQ ID NO: 22103 - DNA, 20 bp, synthetic construct
  source 1..20: mol_type = other DNA
ttggtcaggctggtctcaaa

SEQ ID NO: 22104 - DNA, 20 bp, synthetic construct
  source 1..20: mol_type = other DNA
gttggtcaggctggtctcaa

SEQ ID NO: 22105 - DNA, 20 bp, synthetic construct
  source 1..20: mol_type = other DNA
tgttggtcaggctggtctca

SEQ ID NO: 22106 - DNA, 20 bp, synthetic construct
  source 1..20: mol_type = other DNA
atgttggtcaggctggtctc

SEQ ID NO: 22107 - DNA, 20 bp, synthetic construct
  source 1..20: mol_type = other DNA
catgttggtcaggctggtct

SEQ ID NO: 22108 - DNA, 20 bp, synthetic construct
  source 1..20: mol_type = other DNA
ccatgttggtcaggctggtc

SEQ ID NO: 22109 - DNA, 20 bp, synthetic construct
  source 1..20: mol_type = other DNA
tccatgttggtcaggctggt

SEQ ID NO: 22110 - DNA, 20 bp, synthetic construct
  source 1..20: mol_type = other DNA
ctccatgttggtcaggctgg

SEQ ID NO: 22111 - DNA, 20 bp, synthetic construct
  source 1..20: mol_type = other DNA
tctccatgttggtcaggctg

SEQ ID NO: 22112 - DNA, 20 bp, synthetic construct
  source 1..20: mol_type = other DNA
ttctccatgttggtcaggct

SEQ ID NO: 22113 - DNA, 20 bp, synthetic construct
  source 1..20: mol_type = other DNA
tttctccatgttggtcaggc

SEQ ID NO: 22114 - DNA, 20 bp, synthetic construct
  source 1..20: mol_type = other DNA
gtttctccatgttggtcagg

SEQ ID NO: 22115 - DNA, 20 bp, synthetic construct
  source 1..20: mol_type = other DNA
ggtttctccatgttggtcag

SEQ ID NO: 22116 - DNA, 20 bp, synthetic construct
  source 1..20: mol_type = other DNA
gggtttctccatgttggtca

SEQ ID NO: 22117 - DNA, 20 bp, synthetic construct
  source 1..20: mol_type = other DNA
ggggtttctccatgttggtc

SEQ ID NO: 22118 - DNA, 20 bp, synthetic construct
  source 1..20: mol_type = other DNA
tggggtttctccatgttggt

SEQ ID NO: 22119 - DNA, 20 bp, synthetic construct
  source 1..20: mol_type = other DNA
atggggtttctccatgttgg

SEQ ID NO: 22120 - DNA, 20 bp, synthetic construct
  source 1..20: mol_type = other DNA
gatggggtttctccatgttg

SEQ ID NO: 22121 - DNA, 20 bp, synthetic construct
  source 1..20: mol_type = other DNA
agatggggtttctccatgtt

SEQ ID NO: 22122 - DNA, 20 bp, synthetic construct
  source 1..20: mol_type = other DNA
gagatggggtttctccatgt

SEQ ID NO: 22123 - DNA, 20 bp, synthetic construct
  source 1..20: mol_type = other DNA
agagatggggtttctccatg

SEQ ID NO: 22124 - DNA, 20 bp, synthetic construct
  source 1..20: mol_type = other DNA
tagagatggggtttctccat

SEQ ID NO: 22125 - DNA, 20 bp, synthetic construct
  source 1..20: mol_type = other DNA
gtagagatggggtttctcca

SEQ ID NO: 22126 - DNA, 20 bp, synthetic construct
  source 1..20: mol_type = other DNA
agtagagatggggtttctcc

SEQ ID NO: 22127 - DNA, 20 bp, synthetic construct
  source 1..20: mol_type = other DNA
tagtagagatggggtttctc

SEQ ID NO: 22128 - DNA, 20 bp, synthetic construct
  source 1..20: mol_type = other DNA
ttagtagagatggggtttct

SEQ ID NO: 22129 - DNA, 20 bp, synthetic construct
  source 1..20: mol_type = other DNA
tttagtagagatggggtttc

SEQ ID NO: 22130 - DNA, 20 bp, synthetic construct
  source 1..20: mol_type = other DNA
ttttagtagagatggggttt

SEQ ID NO: 22131 - DNA, 20 bp, synthetic construct
  source 1..20: mol_type = other DNA
tttttagtagagatggggtt

SEQ ID NO: 22132 - DNA, 20 bp, synthetic construct
  source 1..20: mol_type = other DNA
atttttagtagagatggggt

SEQ ID NO: 22133 - DNA, 20 bp, synthetic construct
  source 1..20: mol_type = other DNA
tatttttagtagagatgggg

SEQ ID NO: 22134 - DNA, 20 bp, synthetic construct
  source 1..20: mol_type = other DNA
gtatttttagtagagatggg

SEQ ID NO: 22135 - DNA, 20 bp, synthetic construct
  source 1..20: mol_type = other DNA
tgtatttttagtagagatgg

SEQ ID NO: 22136 - DNA, 20 bp, synthetic construct
  source 1..20: mol_type = other DNA
ttgtatttttagtagagatg

SEQ ID NO: 22137 - DNA, 20 bp, synthetic construct
  source 1..20: mol_type = other DNA
tttgtatttttagtagagat

SEQ ID NO: 22138 - DNA, 20 bp, synthetic construct
  source 1..20: mol_type = other DNA
ttttgtatttttagtagaga

SEQ ID NO: 22139 - DNA, 20 bp, synthetic construct
  source 1..20: mol_type = other DNA
attttgtatttttagtagag

SEQ ID NO: 22140 - DNA, 20 bp, synthetic construct
  source 1..20: mol_type = other DNA
aattttgtatttttagtaga

SEQ ID NO: 22141 - DNA, 20 bp, synthetic construct
  source 1..20: mol_type = other DNA
taattttgtatttttagtag

SEQ ID NO: 22142 - DNA, 20 bp, synthetic construct
  source 1..20: mol_type = other DNA
ctaattttgtatttttagta

SEQ ID NO: 22143 - DNA, 20 bp, synthetic construct
  source 1..20: mol_type = other DNA
gctaattttgtatttttagt

SEQ ID NO: 22144 - DNA, 20 bp, synthetic construct
  source 1..20: mol_type = other DNA
ggctaattttgtatttttag

SEQ ID NO: 22145 - DNA, 20 bp, synthetic construct
  source 1..20: mol_type = other DNA
tggctaattttgtattttta

SEQ ID NO: 22146 - DNA, 20 bp, synthetic construct
  source 1..20: mol_type = other DNA
ctggctaattttgtattttt

SEQ ID NO: 22147 - DNA, 20 bp, synthetic construct
  source 1..20: mol_type = other DNA
cctggctaattttgtatttt

SEQ ID NO: 22148 - DNA, 20 bp, synthetic construct
  source 1..20: mol_type = other DNA
gcctggctaattttgtattt

SEQ ID NO: 22149 - DNA, 20 bp, synthetic construct
  source 1..20: mol_type = other DNA
cgcctggctaattttgtatt

SEQ ID NO: 22150 - DNA, 20 bp, synthetic construct
  source 1..20: mol_type = other DNA
acgcctggctaattttgtat

SEQ ID NO: 22151 - DNA, 20 bp, synthetic construct
  source 1..20: mol_type = other DNA
cacgcctggctaattttgta

SEQ ID NO: 22152 - DNA, 20 bp, synthetic construct
  source 1..20: mol_type = other DNA
ccacgcctggctaattttgt

SEQ ID NO: 22153 - DNA, 20 bp, synthetic construct
  source 1..20: mol_type = other DNA
accacgcctggctaattttg

SEQ ID NO: 22154 - DNA, 20 bp, synthetic construct
  source 1..20: mol_type = other DNA
caccacgcctggctaatttt

SEQ ID NO: 22155 - DNA, 20 bp, synthetic construct
  source 1..20: mol_type = other DNA
ccaccacgcctggctaattt

SEQ ID NO: 22156 - DNA, 20 bp, synthetic construct
  source 1..20: mol_type = other DNA
gccaccacgcctggctaatt

SEQ ID NO: 22157 - DNA, 20 bp, synthetic construct
  source 1..20: mol_type = other DNA
cgccaccacgcctggctaat

SEQ ID NO: 22158 - DNA, 20 bp, synthetic construct
  source 1..20: mol_type = other DNA
gcgccaccacgcctggctaa

SEQ ID NO: 22159 - DNA, 20 bp, synthetic construct
  source 1..20: mol_type = other DNA
tgcgccaccacgcctggcta

SEQ ID NO: 22160 - DNA, 20 bp, synthetic construct
  source 1..20: mol_type = other DNA
atgcgccaccacgcctggct

SEQ ID NO: 22161 - DNA, 20 bp, synthetic construct
  source 1..20: mol_type = other DNA
catgcgccaccacgcctggc

SEQ ID NO: 22162 - DNA, 20 bp, synthetic construct
  source 1..20: mol_type = other DNA
gcatgcgccaccacgcctgg

SEQ ID NO: 22163 - DNA, 20 bp, synthetic construct
  source 1..20: mol_type = other DNA
ggcatgcgccaccacgcctg

SEQ ID NO: 22164 - DNA, 20 bp, synthetic construct
  source 1..20: mol_type = other DNA
aggcatgcgccaccacgcct

SEQ ID NO: 22165 - DNA, 20 bp, synthetic construct
  source 1..20: mol_type = other DNA
caggcatgcgccaccacgcc

SEQ ID NO: 22166 - DNA, 20 bp, synthetic construct
  source 1..20: mol_type = other DNA
acaggcatgcgccaccacgc

SEQ ID NO: 22167 - DNA, 20 bp, synthetic construct
  source 1..20: mol_type = other DNA
tacaggcatgcgccaccacg

SEQ ID NO: 22168 - DNA, 20 bp, synthetic construct
  source 1..20: mol_type = other DNA
ttacaggcatgcgccaccac

SEQ ID NO: 22169 - DNA, 20 bp, synthetic construct
  source 1..20: mol_type = other DNA
attacaggcatgcgccacca

SEQ ID NO: 22170 - DNA, 20 bp, synthetic construct
  source 1..20: mol_type = other DNA
gattacaggcatgcgccacc

SEQ ID NO: 22171 - DNA, 20 bp, synthetic construct
  source 1..20: mol_type = other DNA
ggattacaggcatgcgccac

SEQ ID NO: 22172 - DNA, 20 bp, synthetic construct
  source 1..20: mol_type = other DNA
aggattacaggcatgcgcca

SEQ ID NO: 22173 - DNA, 20 bp, synthetic construct
  source 1..20: mol_type = other DNA
taggattacaggcatgcgcc

SEQ ID NO: 22174 - DNA, 20 bp, synthetic construct
  source 1..20: mol_type = other DNA
ctaggattacaggcatgcgc

SEQ ID NO: 22175 - DNA, 20 bp, synthetic construct
  source 1..20: mol_type = other DNA
gctaggattacaggcatgcg

SEQ ID NO: 22176 - DNA, 20 bp, synthetic construct
  source 1..20: mol_type = other DNA
agctaggattacaggcatgc

SEQ ID NO: 22177 - DNA, 20 bp, synthetic construct
  source 1..20: mol_type = other DNA
tagctaggattacaggcatg

SEQ ID NO: 22178 - DNA, 20 bp, synthetic construct
  source 1..20: mol_type = other DNA
gtagctaggattacaggcat

SEQ ID NO: 22179 - DNA, 20 bp, synthetic construct
  source 1..20: mol_type = other DNA
agtagctaggattacaggca

SEQ ID NO: 22180 - DNA, 20 bp, synthetic construct
  source 1..20: mol_type = other DNA
gagtagctaggattacaggc

SEQ ID NO: 22181 - DNA, 20 bp, synthetic construct
  source 1..20: mol_type = other DNA
tgagtagctaggattacagg

SEQ ID NO: 22182 - DNA, 20 bp, synthetic construct
  source 1..20: mol_type = other DNA
ctgagtagctaggattacag

SEQ ID NO: 22183 - DNA, 20 bp, synthetic construct
  source 1..20: mol_type = other DNA
cctgagtagctaggattaca

SEQ ID NO: 22184 - DNA, 20 bp, synthetic construct
  source 1..20: mol_type = other DNA
tcctgagtagctaggattac

SEQ ID NO: 22185 - DNA, 20 bp, synthetic construct
  source 1..20: mol_type = other DNA
ctcctgagtagctaggatta

SEQ ID NO: 22186 - DNA, 20 bp, synthetic construct
  source 1..20: mol_type = other DNA
cctcctgagtagctaggatt

SEQ ID NO: 22187 - DNA, 20 bp, synthetic construct
  source 1..20: mol_type = other DNA
gcctcctgagtagctaggat

SEQ ID NO: 22188 - DNA, 20 bp, synthetic construct
  source 1..20: mol_type = other DNA
agcctcctgagtagctagga

SEQ ID NO: 22189 - DNA, 20 bp, synthetic construct
  source 1..20: mol_type = other DNA
cagcctcctgagtagctagg

SEQ ID NO: 22190 - DNA, 20 bp, synthetic construct
  source 1..20: mol_type = other DNA
tcagcctcctgagtagctag

SEQ ID NO: 22191 - DNA, 20 bp, synthetic construct
  source 1..20: mol_type = other DNA
ctcagcctcctgagtagcta

SEQ ID NO: 22192 - DNA, 20 bp, synthetic construct
  source 1..20: mol_type = other DNA
cctcagcctcctgagtagct

SEQ ID NO: 22193 - DNA, 20 bp, synthetic construct
  source 1..20: mol_type = other DNA
gcctcagcctcctgagtagc

SEQ ID NO: 22194 - DNA, 20 bp, synthetic construct
  source 1..20: mol_type = other DNA
tgcctcagcctcctgagtag

SEQ ID NO: 22195 - DNA, 20 bp, synthetic construct
  source 1..20: mol_type = other DNA
ctgcctcagcctcctgagta

SEQ ID NO: 22196 - DNA, 20 bp, synthetic construct
  source 1..20: mol_type = other DNA
cctgcctcagcctcctgagt

SEQ ID NO: 22197 - DNA, 20 bp, synthetic construct
  source 1..20: mol_type = other DNA
tcctgcctcagcctcctgag

SEQ ID NO: 22198 - DNA, 20 bp, synthetic construct
  source 1..20: mol_type = other DNA
ctcctgcctcagcctcctga

SEQ ID NO: 22199 - DNA, 20 bp, synthetic construct
  source 1..20: mol_type = other DNA
tctcctgcctcagcctcctg

SEQ ID NO: 22200 - DNA, 20 bp, synthetic construct
  source 1..20: mol_type = other DNA
ttctcctgcctcagcctcct

SEQ ID NO: 22201 - DNA, 20 bp, synthetic construct
  source 1..20: mol_type = other DNA
attctcctgcctcagcctcc

SEQ ID NO: 22202 - DNA, 20 bp, synthetic construct
  source 1..20: mol_type = other DNA
gattctcctgcctcagcctc

SEQ ID NO: 22203 - DNA, 20 bp, synthetic construct
  source 1..20: mol_type = other DNA
cgattctcctgcctcagcct

SEQ ID NO: 22204 - DNA, 20 bp, synthetic construct
  source 1..20: mol_type = other DNA
gcgattctcctgcctcagcc

SEQ ID NO: 22205 - DNA, 20 bp, synthetic construct
  source 1..20: mol_type = other DNA
agcgattctcctgcctcagc

SEQ ID NO: 22206 - DNA, 20 bp, synthetic construct
  source 1..20: mol_type = other DNA
aagcgattctcctgcctcag

SEQ ID NO: 22207 - DNA, 20 bp, synthetic construct
  source 1..20: mol_type = other DNA
caagcgattctcctgcctca

SEQ ID NO: 22208 - DNA, 20 bp, synthetic construct
  source 1..20: mol_type = other DNA
tcaagcgattctcctgcctc

SEQ ID NO: 22209 - DNA, 20 bp, synthetic construct
  source 1..20: mol_type = other DNA
ttcaagcgattctcctgcct

SEQ ID NO: 22210 - DNA, 20 bp, synthetic construct
  source 1..20: mol_type = other DNA
gttcaagcgattctcctgcc

SEQ ID NO: 22211 - DNA, 20 bp, synthetic construct
  source 1..20: mol_type = other DNA
ggttcaagcgattctcctgc

SEQ ID NO: 22212 - DNA, 20 bp, synthetic construct
  source 1..20: mol_type = other DNA
gggttcaagcgattctcctg

SEQ ID NO: 22213 - DNA, 20 bp, synthetic construct
  source 1..20: mol_type = other DNA
cgggttcaagcgattctcct

SEQ ID NO: 22214 - DNA, 20 bp, synthetic construct
  source 1..20: mol_type = other DNA
ccgggttcaagcgattctcc

SEQ ID NO: 22215 - DNA, 20 bp, synthetic construct
  source 1..20: mol_type = other DNA
cccgggttcaagcgattctc

SEQ ID NO: 22216 - DNA, 20 bp, synthetic construct
  source 1..20: mol_type = other DNA
tcccgggttcaagcgattct

SEQ ID NO: 22217 - DNA, 20 bp, synthetic construct
  source 1..20: mol_type = other DNA
ctcccgggttcaagcgattc

SEQ ID NO: 22218 - DNA, 20 bp, synthetic construct
  source 1..20: mol_type = other DNA
cctcccgggttcaagcgatt

SEQ ID NO: 22219 - DNA, 20 bp, synthetic construct
  source 1..20: mol_type = other DNA
gcctcccgggttcaagcgat

SEQ ID NO: 22220 - DNA, 20 bp, synthetic construct
  source 1..20: mol_type = other DNA
tgcctcccgggttcaagcga

SEQ ID NO: 22221 - DNA, 20 bp, synthetic construct
  source 1..20: mol_type = other DNA
ctgcctcccgggttcaagcg

SEQ ID NO: 22222 - DNA, 20 bp, synthetic construct
  source 1..20: mol_type = other DNA
tctgcctcccgggttcaagc

SEQ ID NO: 22223 - DNA, 20 bp, synthetic construct
  source 1..20: mol_type = other DNA
ctctgcctcccgggttcaag

SEQ ID NO: 22224 - DNA, 20 bp, synthetic construct
  source 1..20: mol_type = other DNA
cctctgcctcccgggttcaa

SEQ ID NO: 22225 - DNA, 20 bp, synthetic construct
  source 1..20: mol_type = other DNA
acctctgcctcccgggttca

SEQ ID NO: 22226 - DNA, 20 bp, synthetic construct
  source 1..20: mol_type = other DNA
aacctctgcctcccgggttc

SEQ ID NO: 22227 - DNA, 20 bp, synthetic construct
  source 1..20: mol_type = other DNA
caacctctgcctcccgggtt

SEQ ID NO: 22228 - DNA, 20 bp, synthetic construct
  source 1..20: mol_type = other DNA
acaacctctgcctcccgggt

SEQ ID NO: 22229 - DNA, 20 bp, synthetic construct
  source 1..20: mol_type = other DNA
cacaacctctgcctcccggg

SEQ ID NO: 22230 - DNA, 20 bp, synthetic construct
  source 1..20: mol_type = other DNA
ccacaacctctgcctcccgg

SEQ ID NO: 22231 - DNA, 20 bp, synthetic construct
  source 1..20: mol_type = other DNA
accacaacctctgcctcccg

SEQ ID NO: 22232 - DNA, 20 bp, synthetic construct
  source 1..20: mol_type = other DNA
caccacaacctctgcctccc

SEQ ID NO: 22233 - DNA, 20 bp, synthetic construct
  source 1..20: mol_type = other DNA
tcaccacaacctctgcctcc

SEQ ID NO: 22234 - DNA, 20 bp, synthetic construct
  source 1..20: mol_type = other DNA
ctcaccacaacctctgcctc

SEQ ID NO: 22235 - DNA, 20 bp, synthetic construct
  source 1..20: mol_type = other DNA
gctcaccacaacctctgcct

SEQ ID NO: 22236 - DNA, 20 bp, synthetic construct
  source 1..20: mol_type = other DNA
ggctcaccacaacctctgcc

SEQ ID NO: 22237 - DNA, 20 bp, synthetic construct
  source 1..20: mol_type = other DNA
tggctcaccacaacctctgc

SEQ ID NO: 22238 - DNA, 20 bp, synthetic construct
  source 1..20: mol_type = other DNA
ttggctcaccacaacctctg

SEQ ID NO: 22239 - DNA, 20 bp, synthetic construct
  source 1..20: mol_type = other DNA
cttggctcaccacaacctct

SEQ ID NO: 22240 - DNA, 20 bp, synthetic construct
  source 1..20: mol_type = other DNA
tcttggctcaccacaacctc

SEQ ID NO: 22241 - DNA, 20 bp, synthetic construct
  source 1..20: mol_type = other DNA
atcttggctcaccacaacct

SEQ ID NO: 22242 - DNA, 20 bp, synthetic construct
  source 1..20: mol_type = other DNA
aatcttggctcaccacaacc

SEQ ID NO: 22243 - DNA, 20 bp, synthetic construct
  source 1..20: mol_type = other DNA
caatcttggctcaccacaac

SEQ ID NO: 22244 - DNA, 20 bp, synthetic construct
  source 1..20: mol_type = other DNA
gcaatcttggctcaccacaa

SEQ ID NO: 22245 - DNA, 20 bp, synthetic construct
  source 1..20: mol_type = other DNA
tgcaatcttggctcaccaca

SEQ ID NO: 22246 - DNA, 20 bp, synthetic construct
  source 1..20: mol_type = other DNA
gtgcaatcttggctcaccac

SEQ ID NO: 22247 - DNA, 20 bp, synthetic construct
  source 1..20: mol_type = other DNA
ggtgcaatcttggctcacca

SEQ ID NO: 22248 - DNA, 20 bp, synthetic construct
  source 1..20: mol_type = other DNA
tggtgcaatcttggctcacc

SEQ ID NO: 22249 - DNA, 20 bp, synthetic construct
  source 1..20: mol_type = other DNA
atggtgcaatcttggctcac

SEQ ID NO: 22250 - DNA, 20 bp, synthetic construct
  source 1..20: mol_type = other DNA
aatggtgcaatcttggctca

SEQ ID NO: 22251 - DNA, 20 bp, synthetic construct
  source 1..20: mol_type = other DNA
caatggtgcaatcttggctc

SEQ ID NO: 22252 - DNA, 20 bp, synthetic construct
  source 1..20: mol_type = other DNA
gcaatggtgcaatcttggct

SEQ ID NO: 22253 - DNA, 20 bp, synthetic construct
  source 1..20: mol_type = other DNA
tgcaatggtgcaatcttggc

SEQ ID NO: 22254 - DNA, 20 bp, synthetic construct
  source 1..20: mol_type = other DNA
gtgcaatggtgcaatcttgg

SEQ ID NO: 22255 - DNA, 20 bp, synthetic construct
  source 1..20: mol_type = other DNA
agtgcaatggtgcaatcttg

SEQ ID NO: 22256 - DNA, 20 bp, synthetic construct
  source 1..20: mol_type = other DNA
gagtgcaatggtgcaatctt

SEQ ID NO: 22257 - DNA, 20 bp, synthetic construct
  source 1..20: mol_type = other DNA
ggagtgcaatggtgcaatct

SEQ ID NO: 22258 - DNA, 20 bp, synthetic construct
  source 1..20: mol_type = other DNA
tggagtgcaatggtgcaatc

SEQ ID NO: 22259 - DNA, 20 bp, synthetic construct
  source 1..20: mol_type = other DNA
ctggagtgcaatggtgcaat

SEQ ID NO: 22260 - DNA, 20 bp, synthetic construct
  source 1..20: mol_type = other DNA
gctggagtgcaatggtgcaa

SEQ ID NO: 22261 - DNA, 20 bp, synthetic construct
  source 1..20: mol_type = other DNA
ggctggagtgcaatggtgca

SEQ ID NO: 22262 - DNA, 20 bp, synthetic construct
  source 1..20: mol_type = other DNA
aggctggagtgcaatggtgc

SEQ ID NO: 22263 - DNA, 20 bp, synthetic construct
  source 1..20: mol_type = other DNA
caggctggagtgcaatggtg

SEQ ID NO: 22264 - DNA, 20 bp, synthetic construct
  source 1..20: mol_type = other DNA
ccaggctggagtgcaatggt

SEQ ID NO: 22265 - DNA, 20 bp, synthetic construct
  source 1..20: mol_type = other DNA
cccaggctggagtgcaatgg

SEQ ID NO: 22266 - DNA, 20 bp, synthetic construct
  source 1..20: mol_type = other DNA
gcccaggctggagtgcaatg

SEQ ID NO: 22267 - DNA, 20 bp, synthetic construct
  source 1..20: mol_type = other DNA
tgcccaggctggagtgcaat

SEQ ID NO: 22268 - DNA, 20 bp, synthetic construct
  source 1..20: mol_type = other DNA
atgcccaggctggagtgcaa

SEQ ID NO: 22269 - DNA, 20 bp, synthetic construct
  source 1..20: mol_type = other DNA
gatgcccaggctggagtgca

SEQ ID NO: 22270 - DNA, 20 bp, synthetic construct
  source 1..20: mol_type = other DNA
tgatgcccaggctggagtgc

SEQ ID NO: 22271 - DNA, 20 bp, synthetic construct
  source 1..20: mol_type = other DNA
ttgatgcccaggctggagtg

SEQ ID NO: 22272 - DNA, 20 bp, synthetic construct
  source 1..20: mol_type = other DNA
cttgatgcccaggctggagt

SEQ ID NO: 22273 - DNA, 20 bp, synthetic construct
  source 1..20: mol_type = other DNA
tcttgatgcccaggctggag

SEQ ID NO: 22274 - DNA, 20 bp, synthetic construct
  source 1..20: mol_type = other DNA
ctcttgatgcccaggctgga

SEQ ID NO: 22275 - DNA, 20 bp, synthetic construct
  source 1..20: mol_type = other DNA
actcttgatgcccaggctgg

SEQ ID NO: 22276 - DNA, 20 bp, synthetic construct
  source 1..20: mol_type = other DNA
cactcttgatgcccaggctg

SEQ ID NO: 22277 - DNA, 20 bp, synthetic construct
  source 1..20: mol_type = other DNA
tcactcttgatgcccaggct

SEQ ID NO: 22278 - DNA, 20 bp, synthetic construct
  source 1..20: mol_type = other DNA
ttcactcttgatgcccaggc

SEQ ID NO: 22279 - DNA, 20 bp, synthetic construct
  source 1..20: mol_type = other DNA
tttcactcttgatgcccagg

SEQ ID NO: 22280 - DNA, 20 bp, synthetic construct
  source 1..20: mol_type = other DNA
gtttcactcttgatgcccag

SEQ ID NO: 22281 - DNA, 20 bp, synthetic construct
  source 1..20: mol_type = other DNA
agtttcactcttgatgccca

SEQ ID NO: 22282 - DNA, 20 bp, synthetic construct
  source 1..20: mol_type = other DNA
gagtttcactcttgatgccc

SEQ ID NO: 22283 - DNA, 20 bp, synthetic construct
  source 1..20: mol_type = other DNA
ggagtttcactcttgatgcc

SEQ ID NO: 22284 - DNA, 20 bp, synthetic construct
  source 1..20: mol_type = other DNA
cggagtttcactcttgatgc

SEQ ID NO: 22285 - DNA, 20 bp, synthetic construct
  source 1..20: mol_type = other DNA
acggagtttcactcttgatg

SEQ ID NO: 22286 - DNA, 20 bp, synthetic construct
  source 1..20: mol_type = other DNA
gacggagtttcactcttgat

SEQ ID NO: 22287 - DNA, 20 bp, synthetic construct
  source 1..20: mol_type = other DNA
agacggagtttcactcttga

SEQ ID NO: 22288 - DNA, 20 bp, synthetic construct
  source 1..20: mol_type = other DNA
gagacggagtttcactcttg

SEQ ID NO: 22289 - DNA, 20 bp, synthetic construct
  source 1..20: mol_type = other DNA
tgagacggagtttcactctt

SEQ ID NO: 22290 - DNA, 20 bp, synthetic construct
  source 1..20: mol_type = other DNA
ttgagacggagtttcactct

SEQ ID NO: 22291 - DNA, 20 bp, synthetic construct
  source 1..20: mol_type = other DNA
tttgagacggagtttcactc

SEQ ID NO: 22292 - DNA, 20 bp, synthetic construct
  source 1..20: mol_type = other DNA
ttttgagacggagtttcact

SEQ ID NO: 22293 - DNA, 20 bp, synthetic construct
  source 1..20: mol_type = other DNA
tttttgagacggagtttcac

SEQ ID NO: 22294 - DNA, 20 bp, synthetic construct
  source 1..20: mol_type = other DNA
ttttttgagacggagtttca

SEQ ID NO: 22295 - DNA, 20 bp, synthetic construct
  source 1..20: mol_type = other DNA
tttttttgagacggagtttc

SEQ ID NO: 22296 - DNA, 20 bp, synthetic construct
  source 1..20: mol_type = other DNA
atttttttgagacggagttt

SEQ ID NO: 22297 - DNA, 20 bp, synthetic construct
  source 1..20: mol_type = other DNA
tatttttttgagacggagtt

SEQ ID NO: 22298 - DNA, 20 bp, synthetic construct
  source 1..20: mol_type = other DNA
ttatttttttgagacggagt

SEQ ID NO: 22299 - DNA, 20 bp, synthetic construct
  source 1..20: mol_type = other DNA
tttatttttttgagacggag

SEQ ID NO: 22300 - DNA, 20 bp, synthetic construct
  source 1..20: mol_type = other DNA
atttatttttttgagacgga

SEQ ID NO: 22301 - DNA, 20 bp, synthetic construct
  source 1..20: mol_type = other DNA
tatttatttttttgagacgg

SEQ ID NO: 22302 - DNA, 20 bp, synthetic construct
  source 1..20: mol_type = other DNA
ttatttatttttttgagacg

SEQ ID NO: 22303 - DNA, 20 bp, synthetic construct
  source 1..20: mol_type = other DNA
tttatttatttttttgagac

SEQ ID NO: 22304 - DNA, 20 bp, synthetic construct
  source 1..20: mol_type = other DNA
atttatttatttttttgaga

SEQ ID NO: 22305 - DNA, 20 bp, synthetic construct
  source 1..20: mol_type = other DNA
tatttatttatttttttgag

SEQ ID NO: 22306 - DNA, 20 bp, synthetic construct
  source 1..20: mol_type = other DNA
ttatttatttatttttttga

SEQ ID NO: 22307 - DNA, 20 bp, synthetic construct
  source 1..20: mol_type = other DNA
tttatttatttatttttttg

SEQ ID NO: 22308 - DNA, 20 bp, synthetic construct
  source 1..20: mol_type = other DNA
ctttatttatttattttttt

SEQ ID NO: 22309 - DNA, 20 bp, synthetic construct
  source 1..20: mol_type = other DNA
gctttatttatttatttttt

SEQ ID NO: 22310 - DNA, 20 bp, synthetic construct
  source 1..20: mol_type = other DNA
agctttatttatttattttt

SEQ ID NO: 22311 - DNA, 20 bp, synthetic construct
  source 1..20: mol_type = other DNA
cagctttatttatttatttt

SEQ ID NO: 22312 - DNA, 20 bp, synthetic construct
  source 1..20: mol_type = other DNA
ccagctttatttatttattt

SEQ ID NO: 22313 - DNA, 20 bp, synthetic construct
  source 1..20: mol_type = other DNA
accagctttatttatttatt

SEQ ID NO: 22314 - DNA, 20 bp, synthetic construct
  source 1..20: mol_type = other DNA
taccagctttatttatttat

SEQ ID NO: 22315 - DNA, 20 bp, synthetic construct
  source 1..20: mol_type = other DNA
ataccagctttatttattta

SEQ ID NO: 22316 - DNA, 20 bp, synthetic construct
  source 1..20: mol_type = other DNA
cataccagctttatttattt

SEQ ID NO: 22317 - DNA, 20 bp, synthetic construct
  source 1..20: mol_type = other DNA
tcataccagctttatttatt

SEQ ID NO: 22318 - DNA, 20 bp, synthetic construct
  source 1..20: mol_type = other DNA
ttcataccagctttatttat

SEQ ID NO: 22319 - DNA, 20 bp, synthetic construct
  source 1..20: mol_type = other DNA
attcataccagctttattta

SEQ ID NO: 22320 - DNA, 20 bp, synthetic construct
  source 1..20: mol_type = other DNA
tattcataccagctttattt

SEQ ID NO: 22321 - DNA, 20 bp, synthetic construct
  source 1..20: mol_type = other DNA
atattcataccagctttatt

SEQ ID NO: 22322 - DNA, 20 bp, synthetic construct
  source 1..20: mol_type = other DNA
aatattcataccagctttat

SEQ ID NO: 22323 - DNA, 20 bp, synthetic construct
  source 1..20: mol_type = other DNA
aaatattcataccagcttta

SEQ ID NO: 22324 - DNA, 20 bp, synthetic construct
  source 1..20: mol_type = other DNA
taaatattcataccagcttt

SEQ ID NO: 22325 - DNA, 20 bp, synthetic construct
  source 1..20: mol_type = other DNA
ataaatattcataccagctt

SEQ ID NO: 22326 - DNA, 20 bp, synthetic construct
  source 1..20: mol_type = other DNA
cataaatattcataccagct

SEQ ID NO: 22327 - DNA, 20 bp, synthetic construct
  source 1..20: mol_type = other DNA
acataaatattcataccagc

SEQ ID NO: 22328 - DNA, 20 bp, synthetic construct
  source 1..20: mol_type = other DNA
tacataaatattcataccag

SEQ ID NO: 22329 - DNA, 20 bp, synthetic construct
  source 1..20: mol_type = other DNA
gtacataaatattcatacca

SEQ ID NO: 22330 - DNA, 20 bp, synthetic construct
  source 1..20: mol_type = other DNA
tgtacataaatattcatacc

SEQ ID NO: 22331 - DNA, 20 bp, synthetic construct
  source 1..20: mol_type = other DNA
ctgtacataaatattcatac

SEQ ID NO: 22332 - DNA, 20 bp, synthetic construct
  source 1..20: mol_type = other DNA
cctgtacataaatattcata

SEQ ID NO: 22333 - DNA, 20 bp, synthetic construct
  source 1..20: mol_type = other DNA
acctgtacataaatattcat

SEQ ID NO: 22334 - DNA, 20 bp, synthetic construct
  source 1..20: mol_type = other DNA
aacctgtacataaatattca

SEQ ID NO: 22335 - DNA, 20 bp, synthetic construct
  source 1..20: mol_type = other DNA
aaacctgtacataaatattc

SEQ ID NO: 22336 - DNA, 20 bp, synthetic construct
  source 1..20: mol_type = other DNA
aaaacctgtacataaatatt

SEQ ID NO: 22337 - DNA, 20 bp, synthetic construct
  source 1..20: mol_type = other DNA
caaaacctgtacataaatat

SEQ ID NO: 22338 - DNA, 20 bp, synthetic construct
  source 1..20: mol_type = other DNA
acaaaacctgtacataaata

SEQ ID NO: 22339 - DNA, 20 bp, synthetic construct
  source 1..20: mol_type = other DNA
cacaaaacctgtacataaat

SEQ ID NO: 22340 - DNA, 20 bp, synthetic construct
  source 1..20: mol_type = other DNA
acacaaaacctgtacataaa

SEQ ID NO: 22341 - DNA, 20 bp, synthetic construct
  source 1..20: mol_type = other DNA
cacacaaaacctgtacataa

SEQ ID NO: 22342 - DNA, 20 bp, synthetic construct
  source 1..20: mol_type = other DNA
tcacacaaaacctgtacata

SEQ ID NO: 22343 - DNA, 20 bp, synthetic construct
  source 1..20: mol_type = other DNA
ttcacacaaaacctgtacat

SEQ ID NO: 22344 - DNA, 20 bp, synthetic construct
  source 1..20: mol_type = other DNA
gttcacacaaaacctgtaca

SEQ ID NO: 22345 - DNA, 20 bp, synthetic construct
  source 1..20: mol_type = other DNA
tgttcacacaaaacctgtac

SEQ ID NO: 22346 - DNA, 20 bp, synthetic construct
  source 1..20: mol_type = other DNA
atgttcacacaaaacctgta

SEQ ID NO: 22347 - DNA, 20 bp, synthetic construct
  source 1..20: mol_type = other DNA
tatgttcacacaaaacctgt

SEQ ID NO: 22348 - DNA, 20 bp, synthetic construct
  source 1..20: mol_type = other DNA
atatgttcacacaaaacctg

SEQ ID NO: 22349 - DNA, 20 bp, synthetic construct
  source 1..20: mol_type = other DNA
catatgttcacacaaaacct

SEQ ID NO: 22350 - DNA, 20 bp, synthetic construct
  source 1..20: mol_type = other DNA
tcatatgttcacacaaaacc

SEQ ID NO: 22351 - DNA, 20 bp, synthetic construct
  source 1..20: mol_type = other DNA
atcatatgttcacacaaaac

SEQ ID NO: 22352 - DNA, 20 bp, synthetic construct
  source 1..20: mol_type = other DNA
aatcatatgttcacacaaaa

SEQ ID NO: 22353 - DNA, 20 bp, synthetic construct
  source 1..20: mol_type = other DNA
aaatcatatgttcacacaaa

SEQ ID NO: 22354 - DNA, 20 bp, synthetic construct
  source 1..20: mol_type = other DNA
aaaatcatatgttcacacaa

SEQ ID NO: 22355 - DNA, 20 bp, synthetic construct
  source 1..20: mol_type = other DNA
taaaatcatatgttcacaca

SEQ ID NO: 22356 - DNA, 20 bp, synthetic construct
  source 1..20: mol_type = other DNA
ataaaatcatatgttcacac

SEQ ID NO: 22357 - DNA, 20 bp, synthetic construct
  source 1..20: mol_type = other DNA
aataaaatcatatgttcaca

SEQ ID NO: 22358 - DNA, 20 bp, synthetic construct
  source 1..20: mol_type = other DNA
aaataaaatcatatgttcac

SEQ ID NO: 22359 - DNA, 20 bp, synthetic construct
  source 1..20: mol_type = other DNA
gaaataaaatcatatgttca

SEQ ID NO: 22360 - DNA, 20 bp, synthetic construct
  source 1..20: mol_type = other DNA
agaaataaaatcatatgttc

SEQ ID NO: 22361 - DNA, 20 bp, synthetic construct
  source 1..20: mol_type = other DNA
gagaaataaaatcatatgtt

SEQ ID NO: 22362 - DNA, 20 bp, synthetic construct
  source 1..20: mol_type = other DNA
agagaaataaaatcatatgt

SEQ ID NO: 22363 - DNA, 20 bp, synthetic construct
  source 1..20: mol_type = other DNA
aagagaaataaaatcatatg

SEQ ID NO: 22364 - DNA, 20 bp, synthetic construct
  source 1..20: mol_type = other DNA
caagagaaataaaatcatat

SEQ ID NO: 22365 - DNA, 20 bp, synthetic construct
  source 1..20: mol_type = other DNA
ccaagagaaataaaatcata

SEQ ID NO: 22366 - DNA, 20 bp, synthetic construct
  source 1..20: mol_type = other DNA
accaagagaaataaaatcat

SEQ ID NO: 22367 - DNA, 20 bp, synthetic construct
  source 1..20: mol_type = other DNA
aaccaagagaaataaaatca

SEQ ID NO: 22368 - DNA, 20 bp, synthetic construct
  source 1..20: mol_type = other DNA
caaccaagagaaataaaatc

SEQ ID NO: 22369 - DNA, 20 bp, synthetic construct
  source 1..20: mol_type = other DNA
ccaaccaagagaaataaaat

SEQ ID NO: 22370 - DNA, 20 bp, synthetic construct
  source 1..20: mol_type = other DNA
tccaaccaagagaaataaaa

SEQ ID NO: 22371 - DNA, 20 bp, synthetic construct
  source 1..20: mol_type = other DNA
ttccaaccaagagaaataaa

SEQ ID NO: 22372 - DNA, 20 bp, synthetic construct
  source 1..20: mol_type = other DNA
attccaaccaagagaaataa

SEQ ID NO: 22373 - DNA, 20 bp, synthetic construct
  source 1..20: mol_type = other DNA
cattccaaccaagagaaata

SEQ ID NO: 22374 - DNA, 20 bp, synthetic construct
  source 1..20: mol_type = other DNA
gcattccaaccaagagaaat

SEQ ID NO: 22375 - DNA, 20 bp, synthetic construct
  source 1..20: mol_type = other DNA
tgcattccaaccaagagaaa

SEQ ID NO: 22376 - DNA, 20 bp, synthetic construct
  source 1..20: mol_type = other DNA
atgcattccaaccaagagaa

SEQ ID NO: 22377 - DNA, 20 bp, synthetic construct
  source 1..20: mol_type = other DNA
tatgcattccaaccaagaga

SEQ ID NO: 22378 - DNA, 20 bp, synthetic construct
  source 1..20: mol_type = other DNA
ctatgcattccaaccaagag

SEQ ID NO: 22379 - DNA, 20 bp, synthetic construct
  source 1..20: mol_type = other DNA
tctatgcattccaaccaaga

SEQ ID NO: 22380 - DNA, 20 bp, synthetic construct
  source 1..20: mol_type = other DNA
ttctatgcattccaaccaag

SEQ ID NO: 22381 - DNA, 20 bp, synthetic construct
  source 1..20: mol_type = other DNA
tttctatgcattccaaccaa

SEQ ID NO: 22382 - DNA, 20 bp, synthetic construct
  source 1..20: mol_type = other DNA
atttctatgcattccaacca

SEQ ID NO: 22383 - DNA, 20 bp, synthetic construct
  source 1..20: mol_type = other DNA
catttctatgcattccaacc

SEQ ID NO: 22384 - DNA, 20 bp, synthetic construct
  source 1..20: mol_type = other DNA
tcatttctatgcattccaac

SEQ ID NO: 22385 - DNA, 20 bp, synthetic construct
  source 1..20: mol_type = other DNA
ctcatttctatgcattccaa

SEQ ID NO: 22386 - DNA, 20 bp, synthetic construct
  source 1..20: mol_type = other DNA
tctcatttctatgcattcca

SEQ ID NO: 22387 - DNA, 20 bp, synthetic construct
  source 1..20: mol_type = other DNA
atctcatttctatgcattcc

SEQ ID NO: 22388 - DNA, 20 bp, synthetic construct
  source 1..20: mol_type = other DNA
aatctcatttctatgcattc

SEQ ID NO: 22389 - DNA, 20 bp, synthetic construct
  source 1..20: mol_type = other DNA
caatctcatttctatgcatt

SEQ ID NO: 22390 - DNA, 20 bp, synthetic construct
  source 1..20: mol_type = other DNA
gcaatctcatttctatgcat

SEQ ID NO: 22391 - DNA, 20 bp, synthetic construct
  source 1..20: mol_type = other DNA
agcaatctcatttctatgca

SEQ ID NO: 22392 - DNA, 20 bp, synthetic construct
  source 1..20: mol_type = other DNA
cagcaatctcatttctatgc

SEQ ID NO: 22393 - DNA, 20 bp, synthetic construct
  source 1..20: mol_type = other DNA
ccagcaatctcatttctatg

SEQ ID NO: 22394 - DNA, 20 bp, synthetic construct
  source 1..20: mol_type = other DNA
cccagcaatctcatttctat

SEQ ID NO: 22395 - DNA, 20 bp, synthetic construct
  source 1..20: mol_type = other DNA
acccagcaatctcatttcta

SEQ ID NO: 22396 - DNA, 20 bp, synthetic construct
  source 1..20: mol_type = other DNA
aacccagcaatctcatttct

SEQ ID NO: 22397 - DNA, 20 bp, synthetic construct
  source 1..20: mol_type = other DNA
aaacccagcaatctcatttc

SEQ ID NO: 22398 - DNA, 20 bp, synthetic construct
  source 1..20: mol_type = other DNA
aaaacccagcaatctcattt

SEQ ID NO: 22399 - DNA, 20 bp, synthetic construct
  source 1..20: mol_type = other DNA
caaaacccagcaatctcatt

SEQ ID NO: 22400 - DNA, 20 bp, synthetic construct
  source 1..20: mol_type = other DNA
acaaaacccagcaatctcat

SEQ ID NO: 22401 - DNA, 20 bp, synthetic construct
  source 1..20: mol_type = other DNA
cacaaaacccagcaatctca

SEQ ID NO: 22402 - DNA, 20 bp, synthetic construct
  source 1..20: mol_type = other DNA
ccacaaaacccagcaatctc

SEQ ID NO: 22403 - DNA, 20 bp, synthetic construct
  source 1..20: mol_type = other DNA
gccacaaaacccagcaatct

SEQ ID NO: 22404 - DNA, 20 bp, synthetic construct
  source 1..20: mol_type = other DNA
tgccacaaaacccagcaatc

SEQ ID NO: 22405 - DNA, 20 bp, synthetic construct
  source 1..20: mol_type = other DNA
ttgccacaaaacccagcaat

SEQ ID NO: 22406 - DNA, 20 bp, synthetic construct
  source 1..20: mol_type = other DNA
cttgccacaaaacccagcaa

SEQ ID NO: 22407 - DNA, 20 bp, synthetic construct
  source 1..20: mol_type = other DNA
acttgccacaaaacccagca

SEQ ID NO: 22408 - DNA, 20 bp, synthetic construct
  source 1..20: mol_type = other DNA
cacttgccacaaaacccagc

SEQ ID NO: 22409 - DNA, 20 bp, synthetic construct
  source 1..20: mol_type = other DNA
acacttgccacaaaacccag

SEQ ID NO: 22410 - DNA, 20 bp, synthetic construct
  source 1..20: mol_type = other DNA
aacacttgccacaaaaccca

SEQ ID NO: 22411 - DNA, 20 bp, synthetic construct
  source 1..20: mol_type = other DNA
aaacacttgccacaaaaccc

SEQ ID NO: 22412 - DNA, 20 bp, synthetic construct
  source 1..20: mol_type = other DNA
taaacacttgccacaaaacc

SEQ ID NO: 22413 - DNA, 20 bp, synthetic construct
  source 1..20: mol_type = other DNA
ataaacacttgccacaaaac

SEQ ID NO: 22414 - DNA, 20 bp, synthetic construct
  source 1..20: mol_type = other DNA
aataaacacttgccacaaaa

SEQ ID NO: 22415 - DNA, 20 bp, synthetic construct
  source 1..20: mol_type = other DNA
aaataaacacttgccacaaa

SEQ ID NO: 22416 - DNA, 20 bp, synthetic construct
  source 1..20: mol_type = other DNA
aaaataaacacttgccacaa

SEQ ID NO: 22417 - DNA, 20 bp, synthetic construct
  source 1..20: mol_type = other DNA
aaaaataaacacttgccaca

SEQ ID NO: 22418 - DNA, 20 bp, synthetic construct
  source 1..20: mol_type = other DNA
gaaaaataaacacttgccac

SEQ ID NO: 22419 - DNA, 20 bp, synthetic construct
  source 1..20: mol_type = other DNA
ggaaaaataaacacttgcca

SEQ ID NO: 22420 - DNA, 20 bp, synthetic construct
  source 1..20: mol_type = other DNA
tggaaaaataaacacttgcc

SEQ ID NO: 22421 - DNA, 20 bp, synthetic construct
  source 1..20: mol_type = other DNA
ctggaaaaataaacacttgc

SEQ ID NO: 22422 - DNA, 20 bp, synthetic construct
  source 1..20: mol_type = other DNA
cctggaaaaataaacacttg

SEQ ID NO: 22423 - DNA, 20 bp, synthetic construct
  source 1..20: mol_type = other DNA
ccctggaaaaataaacactt

SEQ ID NO: 22424 - DNA, 20 bp, synthetic construct
  source 1..20: mol_type = other DNA
accctggaaaaataaacact

SEQ ID NO: 22425 - DNA, 20 bp, synthetic construct
  source 1..20: mol_type = other DNA
taccctggaaaaataaacac

SEQ ID NO: 22426 - DNA, 20 bp, synthetic construct
  source 1..20: mol_type = other DNA
gtaccctggaaaaataaaca

SEQ ID NO: 22427 - DNA, 20 bp, synthetic construct
  source 1..20: mol_type = other DNA
tgtaccctggaaaaataaac

SEQ ID NO: 22428 - DNA, 20 bp, synthetic construct
  source 1..20: mol_type = other DNA
atgtaccctggaaaaataaa

SEQ ID NO: 22429 - DNA, 20 bp, synthetic construct
  source 1..20: mol_type = other DNA
tatgtaccctggaaaaataa

SEQ ID NO: 22430 - DNA, 20 bp, synthetic construct
  source 1..20: mol_type = other DNA
atatgtaccctggaaaaata

SEQ ID NO: 22431 - DNA, 20 bp, synthetic construct
  source 1..20: mol_type = other DNA
tatatgtaccctggaaaaat

SEQ ID NO: 22432 - DNA, 20 bp, synthetic construct
  source 1..20: mol_type = other DNA
ttatatgtaccctggaaaaa

SEQ ID NO: 22433 - DNA, 20 bp, synthetic construct
  source 1..20: mol_type = other DNA
attatatgtaccctggaaaa

SEQ ID NO: 22434 - DNA, 20 bp, synthetic construct
  source 1..20: mol_type = other DNA
gattatatgtaccctggaaa

SEQ ID NO: 22435 - DNA, 20 bp, synthetic construct
  source 1..20: mol_type = other DNA
ggattatatgtaccctggaa

SEQ ID NO: 22436 - DNA, 20 bp, synthetic construct
  source 1..20: mol_type = other DNA
aggattatatgtaccctgga

SEQ ID NO: 22437 - DNA, 20 bp, synthetic construct
  source 1..20: mol_type = other DNA
caggattatatgtaccctgg

SEQ ID NO: 22438 - DNA, 20 bp, synthetic construct
  source 1..20: mol_type = other DNA
acaggattatatgtaccctg

SEQ ID NO: 22439 - DNA, 20 bp, synthetic construct
  source 1..20: mol_type = other DNA
cacaggattatatgtaccct

SEQ ID NO: 22440 - DNA, 20 bp, synthetic construct
  source 1..20: mol_type = other DNA
tcacaggattatatgtaccc

SEQ ID NO: 22441 - DNA, 20 bp, synthetic construct
  source 1..20: mol_type = other DNA
ctcacaggattatatgtacc

SEQ ID NO: 22442 - DNA, 20 bp, synthetic construct
  source 1..20: mol_type = other DNA
actcacaggattatatgtac

SEQ ID NO: 22443 - DNA, 20 bp, synthetic construct
  source 1..20: mol_type = other DNA
cactcacaggattatatgta

SEQ ID NO: 22444 - DNA, 20 bp, synthetic construct
  source 1..20: mol_type = other DNA
acactcacaggattatatgt

SEQ ID NO: 22445 - DNA, 20 bp, synthetic construct
  source 1..20: mol_type = other DNA
aacactcacaggattatatg

SEQ ID NO: 22446 - DNA, 20 bp, synthetic construct
  source 1..20: mol_type = other DNA
aaacactcacaggattatat

SEQ ID NO: 22447 - DNA, 20 bp, synthetic construct
  source 1..20: mol_type = other DNA
taaacactcacaggattata

SEQ ID NO: 22448 - DNA, 20 bp, synthetic construct
  source 1..20: mol_type = other DNA
ataaacactcacaggattat

SEQ ID NO: 22449 - DNA, 20 bp, synthetic construct
  source 1..20: mol_type = other DNA
aataaacactcacaggatta

SEQ ID NO: 22450 - DNA, 20 bp, synthetic construct
  source 1..20: mol_type = other DNA
aaataaacactcacaggatt

SEQ ID NO: 22451 - DNA, 20 bp, synthetic construct
  source 1..20: mol_type = other DNA
taaataaacactcacaggat

SEQ ID NO: 22452 - DNA, 20 bp, synthetic construct
  source 1..20: mol_type = other DNA
ttaaataaacactcacagga

SEQ ID NO: 22453 - DNA, 20 bp, synthetic construct
  source 1..20: mol_type = other DNA
attaaataaacactcacagg

SEQ ID NO: 22454 - DNA, 20 bp, synthetic construct
  source 1..20: mol_type = other DNA
aattaaataaacactcacag

SEQ ID NO: 22455 - DNA, 20 bp, synthetic construct
  source 1..20: mol_type = other DNA
aaattaaataaacactcaca

SEQ ID NO: 22456 - DNA, 20 bp, synthetic construct
  source 1..20: mol_type = other DNA
aaaattaaataaacactcac

SEQ ID NO: 22457 - DNA, 20 bp, synthetic construct
  source 1..20: mol_type = other DNA
taaaattaaataaacactca

SEQ ID NO: 22458 - DNA, 20 bp, synthetic construct
  source 1..20: mol_type = other DNA
ttaaaattaaataaacactc

SEQ ID NO: 22459 - DNA, 20 bp, synthetic construct
  source 1..20: mol_type = other DNA
tttaaaattaaataaacact

SEQ ID NO: 22460 - DNA, 20 bp, synthetic construct
  source 1..20: mol_type = other DNA
ttttaaaattaaataaacac

SEQ ID NO: 22461 - DNA, 20 bp, synthetic construct
  source 1..20: mol_type = other DNA
cttttaaaattaaataaaca

SEQ ID NO: 22462 - DNA, 20 bp, synthetic construct
  source 1..20: mol_type = other DNA
acttttaaaattaaataaac

SEQ ID NO: 22463 - DNA, 20 bp, synthetic construct
  source 1..20: mol_type = other DNA
tacttttaaaattaaataaa

SEQ ID NO: 22464 - DNA, 20 bp, synthetic construct
  source 1..20: mol_type = other DNA
ttacttttaaaattaaataa

SEQ ID NO: 22465 - DNA, 20 bp, synthetic construct
  source 1..20: mol_type = other DNA
attacttttaaaattaaata

SEQ ID NO: 22466 - DNA, 20 bp, synthetic construct
  source 1..20: mol_type = other DNA
aattacttttaaaattaaat

SEQ ID NO: 22467 - DNA, 20 bp, synthetic construct
  source 1..20: mol_type = other DNA
caattacttttaaaattaaa

SEQ ID NO: 22468 - DNA, 20 bp, synthetic construct
  source 1..20: mol_type = other DNA
gcaattacttttaaaattaa

SEQ ID NO: 22469 - DNA, 20 bp, synthetic construct
  source 1..20: mol_type = other DNA
agcaattacttttaaaatta

SEQ ID NO: 22470 - DNA, 20 bp, synthetic construct
  source 1..20: mol_type = other DNA
tagcaattacttttaaaatt

SEQ ID NO: 22471 - DNA, 20 bp, synthetic construct
  source 1..20: mol_type = other DNA
ttagcaattacttttaaaat

SEQ ID NO: 22472 - DNA, 20 bp, synthetic construct
  source 1..20: mol_type = other DNA
tttagcaattacttttaaaa

SEQ ID NO: 22473 - DNA, 20 bp, synthetic construct
  source 1..20: mol_type = other DNA
gtttagcaattacttttaaa

SEQ ID NO: 22474 - DNA, 20 bp, synthetic construct
  source 1..20: mol_type = other DNA
agtttagcaattacttttaa

SEQ ID NO: 22475 - DNA, 20 bp, synthetic construct
  source 1..20: mol_type = other DNA
cagtttagcaattactttta

SEQ ID NO: 22476 - DNA, 20 bp, synthetic construct
  source 1..20: mol_type = other DNA
acagtttagcaattactttt

SEQ ID NO: 22477 - DNA, 20 bp, synthetic construct
  source 1..20: mol_type = other DNA
aacagtttagcaattacttt

SEQ ID NO: 22478 - DNA, 20 bp, synthetic construct
  source 1..20: mol_type = other DNA
aaacagtttagcaattactt

SEQ ID NO: 22479 - DNA, 20 bp, synthetic construct
  source 1..20: mol_type = other DNA
caaacagtttagcaattact

SEQ ID NO: 22480 - DNA, 20 bp, synthetic construct
  source 1..20: mol_type = other DNA
gcaaacagtttagcaattac

SEQ ID NO: 22481 - DNA, 20 bp, synthetic construct
  source 1..20: mol_type = other DNA
agcaaacagtttagcaatta

SEQ ID NO: 22482 - DNA, 20 bp, synthetic construct
  source 1..20: mol_type = other DNA
tagcaaacagtttagcaatt

SEQ ID NO: 22483 - DNA, 20 bp, synthetic construct
  source 1..20: mol_type = other DNA
ttagcaaacagtttagcaat

SEQ ID NO: 22484 - DNA, 20 bp, synthetic construct
  source 1..20: mol_type = other DNA
tttagcaaacagtttagcaa

SEQ ID NO: 22485 - DNA, 20 bp, synthetic construct
  source 1..20: mol_type = other DNA
ctttagcaaacagtttagca

SEQ ID NO: 22486 - DNA, 20 bp, synthetic construct
  source 1..20: mol_type = other DNA
actttagcaaacagtttagc

SEQ ID NO: 22487 - DNA, 20 bp, synthetic construct
  source 1..20: mol_type = other DNA
cactttagcaaacagtttag

SEQ ID NO: 22488 - DNA, 20 bp, synthetic construct
  source 1..20: mol_type = other DNA
tcactttagcaaacagttta

SEQ ID NO: 22489 - DNA, 20 bp, synthetic construct
  source 1..20: mol_type = other DNA
gtcactttagcaaacagttt

SEQ ID NO: 22490 - DNA, 20 bp, synthetic construct
  source 1..20: mol_type = other DNA
agtcactttagcaaacagtt

SEQ ID NO: 22491 - DNA, 20 bp, synthetic construct
  source 1..20: mol_type = other DNA
cagtcactttagcaaacagt

SEQ ID NO: 22492 - DNA, 20 bp, synthetic construct
  source 1..20: mol_type = other DNA
gcagtcactttagcaaacag

SEQ ID NO: 22493 - DNA, 20 bp, synthetic construct
  source 1..20: mol_type = other DNA
agcagtcactttagcaaaca

SEQ ID NO: 22494 - DNA, 20 bp, synthetic construct
  source 1..20: mol_type = other DNA
tagcagtcactttagcaaac

SEQ ID NO: 22495 - DNA, 20 bp, synthetic construct
  source 1..20: mol_type = other DNA
atagcagtcactttagcaaa

SEQ ID NO: 22496 - DNA, 20 bp, synthetic construct
  source 1..20: mol_type = other DNA
tatagcagtcactttagcaa

SEQ ID NO: 22497 - DNA, 20 bp, synthetic construct
  source 1..20: mol_type = other DNA
atatagcagtcactttagca

SEQ ID NO: 22498 - DNA, 20 bp, synthetic construct
  source 1..20: mol_type = other DNA
aatatagcagtcactttagc

SEQ ID NO: 22499 - DNA, 20 bp, synthetic construct
  source 1..20: mol_type = other DNA
aaatatagcagtcactttag

SEQ ID NO: 22500 - DNA, 20 bp, synthetic construct
  source 1..20: mol_type = other DNA
aaaatatagcagtcacttta

SEQ ID NO: 22501 - DNA, 20 bp, synthetic construct
  source 1..20: mol_type = other DNA
gaaaatatagcagtcacttt

SEQ ID NO: 22502 - DNA, 20 bp, synthetic construct
  source 1..20: mol_type = other DNA
agaaaatatagcagtcactt

SEQ ID NO: 22503 - DNA, 20 bp, synthetic construct
  source 1..20: mol_type = other DNA
aagaaaatatagcagtcact

SEQ ID NO: 22504 - DNA, 20 bp, synthetic construct
  source 1..20: mol_type = other DNA
aaagaaaatatagcagtcac

SEQ ID NO: 22505 - DNA, 20 bp, synthetic construct
  source 1..20: mol_type = other DNA
gaaagaaaatatagcagtca

SEQ ID NO: 22506 - DNA, 20 bp, synthetic construct
  source 1..20: mol_type = other DNA
ggaaagaaaatatagcagtc

SEQ ID NO: 22507 - DNA, 20 bp, synthetic construct
  source 1..20: mol_type = other DNA
gggaaagaaaatatagcagt

SEQ ID NO: 22508 - DNA, 20 bp, synthetic construct
  source 1..20: mol_type = other DNA
agggaaagaaaatatagcag

SEQ ID NO: 22509 - DNA, 20 bp, synthetic construct
  source 1..20: mol_type = other DNA
tagggaaagaaaatatagca

SEQ ID NO: 22510 - DNA, 20 bp, synthetic construct
  source 1..20: mol_type = other DNA
ctagggaaagaaaatatagc

SEQ ID NO: 22511 - DNA, 20 bp, synthetic construct
  source 1..20: mol_type = other DNA
gctagggaaagaaaatatag

SEQ ID NO: 22512 - DNA, 20 bp, synthetic construct
  source 1..20: mol_type = other DNA
tgctagggaaagaaaatata

SEQ ID NO: 22513 - DNA, 20 bp, synthetic construct
  source 1..20: mol_type = other DNA
ctgctagggaaagaaaatat

SEQ ID NO: 22514 - DNA, 20 bp, synthetic construct
  source 1..20: mol_type = other DNA
actgctagggaaagaaaata

SEQ ID NO: 22515 - DNA, 20 bp, synthetic construct
  source 1..20: mol_type = other DNA
cactgctagggaaagaaaat

SEQ ID NO: 22516 - DNA, 20 bp, synthetic construct
  source 1..20: mol_type = other DNA
acactgctagggaaagaaaa

SEQ ID NO: 22517 - DNA, 20 bp, synthetic construct
  source 1..20: mol_type = other DNA
tacactgctagggaaagaaa

SEQ ID NO: 22518 - DNA, 20 bp, synthetic construct
  source 1..20: mol_type = other DNA
atacactgctagggaaagaa

SEQ ID NO: 22519 - DNA, 20 bp, synthetic construct
  source 1..20: mol_type = other DNA
catacactgctagggaaaga

SEQ ID NO: 22520 - DNA, 20 bp, synthetic construct
  source 1..20: mol_type = other DNA
tcatacactgctagggaaag

SEQ ID NO: 22521 - DNA, 20 bp, synthetic construct
  source 1..20: mol_type = other DNA
ttcatacactgctagggaaa

SEQ ID NO: 22522 - DNA, 20 bp, synthetic construct
  source 1..20: mol_type = other DNA
attcatacactgctagggaa

SEQ ID NO: 22523 - DNA, 20 bp, synthetic construct
  source 1..20: mol_type = other DNA
aattcatacactgctaggga

SEQ ID NO: 22524 - DNA, 20 bp, synthetic construct
  source 1..20: mol_type = other DNA
aaattcatacactgctaggg

SEQ ID NO: 22525 - DNA, 20 bp, synthetic construct
  source 1..20: mol_type = other DNA
aaaattcatacactgctagg

SEQ ID NO: 22526 - DNA, 20 bp, synthetic construct
  source 1..20: mol_type = other DNA
aaaaattcatacactgctag

SEQ ID NO: 22527 - DNA, 20 bp, synthetic construct
  source 1..20: mol_type = other DNA
aaaaaattcatacactgcta

SEQ ID NO: 22528 - DNA, 20 bp, synthetic construct
  source 1..20: mol_type = other DNA
aaaaaaattcatacactgct

SEQ ID NO: 22529 - DNA, 20 bp, synthetic construct
  source 1..20: mol_type = other DNA
aaaaaaaattcatacactgc

SEQ ID NO: 22530 - DNA, 20 bp, synthetic construct
  source 1..20: mol_type = other DNA
aaaaaaaaattcatacactg

SEQ ID NO: 22531 - DNA, 20 bp, synthetic construct
  source 1..20: mol_type = other DNA
caaaaaaaaattcatacact

SEQ ID NO: 22532 - DNA, 20 bp, synthetic construct
  source 1..20: mol_type = other DNA
tcaaaaaaaaattcatacac

SEQ ID NO: 22533 - DNA, 20 bp, synthetic construct
  source 1..20: mol_type = other DNA
ctcaaaaaaaaattcataca

SEQ ID NO: 22534 - DNA, 20 bp, synthetic construct
  source 1..20: mol_type = other DNA
cctcaaaaaaaaattcatac

SEQ ID NO: 22535 - DNA, 20 bp, synthetic construct
  source 1..20: mol_type = other DNA
gcctcaaaaaaaaattcata

SEQ ID NO: 22536 - DNA, 20 bp, synthetic construct
  source 1..20: mol_type = other DNA
tgcctcaaaaaaaaattcat

SEQ ID NO: 22537 - DNA, 20 bp, synthetic construct
  source 1..20: mol_type = other DNA
ctgcctcaaaaaaaaattca

SEQ ID NO: 22538 - DNA, 20 bp, synthetic construct
  source 1..20: mol_type = other DNA
cctgcctcaaaaaaaaattc

SEQ ID NO: 22539 - DNA, 20 bp, synthetic construct
  source 1..20: mol_type = other DNA
ccctgcctcaaaaaaaaatt

SEQ ID NO: 22540 - DNA, 20 bp, synthetic construct
  source 1..20: mol_type = other DNA
accctgcctcaaaaaaaaat

SEQ ID NO: 22541 - DNA, 20 bp, synthetic construct
  source 1..20: mol_type = other DNA
gaccctgcctcaaaaaaaaa

SEQ ID NO: 22542 - DNA, 20 bp, synthetic construct
  source 1..20: mol_type = other DNA
agaccctgcctcaaaaaaaa

SEQ ID NO: 22543 - DNA, 20 bp, synthetic construct
  source 1..20: mol_type = other DNA
aagaccctgcctcaaaaaaa

SEQ ID NO: 22544 - DNA, 20 bp, synthetic construct
  source 1..20: mol_type = other DNA
caagaccctgcctcaaaaaa

SEQ ID NO: 22545 - DNA, 20 bp, synthetic construct
  source 1..20: mol_type = other DNA
gcaagaccctgcctcaaaaa

SEQ ID NO: 22546 - DNA, 20 bp, synthetic construct
  source 1..20: mol_type = other DNA
agcaagaccctgcctcaaaa

SEQ ID NO: 22547 - DNA, 20 bp, synthetic construct
  source 1..20: mol_type = other DNA
gagcaagaccctgcctcaaa

SEQ ID NO: 22548 - DNA, 20 bp, synthetic construct
  source 1..20: mol_type = other DNA
agagcaagaccctgcctcaa

SEQ ID NO: 22549 - DNA, 20 bp, synthetic construct
  source 1..20: mol_type = other DNA
cagagcaagaccctgcctca

SEQ ID NO: 22550 - DNA, 20 bp, synthetic construct
  source 1..20: mol_type = other DNA
acagagcaagaccctgcctc

SEQ ID NO: 22551 - DNA, 20 bp, synthetic construct
  source 1..20: mol_type = other DNA
gacagagcaagaccctgcct

SEQ ID NO: 22552 - DNA, 20 bp, synthetic construct
  source 1..20: mol_type = other DNA
tgacagagcaagaccctgcc

SEQ ID NO: 22553 - DNA, 20 bp, synthetic construct
  source 1..20: mol_type = other DNA
gtgacagagcaagaccctgc

SEQ ID NO: 22554 - DNA, 20 bp, synthetic construct
  source 1..20: mol_type = other DNA
ggtgacagagcaagaccctg

SEQ ID NO: 22555 - DNA, 20 bp, synthetic construct
  source 1..20: mol_type = other DNA
gggtgacagagcaagaccct

SEQ ID NO: 22556 - DNA, 20 bp, synthetic construct
  source 1..20: mol_type = other DNA
tgggtgacagagcaagaccc

SEQ ID NO: 22557 - DNA, 20 bp, synthetic construct
  source 1..20: mol_type = other DNA
ctgggtgacagagcaagacc

SEQ ID NO: 22558 - DNA, 20 bp, synthetic construct
  source 1..20: mol_type = other DNA
cctgggtgacagagcaagac

SEQ ID NO: 22559 - DNA, 20 bp, synthetic construct
  source 1..20: mol_type = other DNA
ccctgggtgacagagcaaga

SEQ ID NO: 22560 - DNA, 20 bp, synthetic construct
  source 1..20: mol_type = other DNA
accctgggtgacagagcaag

SEQ ID NO: 22561 - DNA, 20 bp, synthetic construct
  source 1..20: mol_type = other DNA
caccctgggtgacagagcaa

SEQ ID NO: 22562 - DNA, 20 bp, synthetic construct
  source 1..20: mol_type = other DNA
ccaccctgggtgacagagca

SEQ ID NO: 22563 - DNA, 20 bp, synthetic construct
  source 1..20: mol_type = other DNA
tccaccctgggtgacagagc

SEQ ID NO: 22564 - DNA, 20 bp, synthetic construct
  source 1..20: mol_type = other DNA
ctccaccctgggtgacagag

SEQ ID NO: 22565 - DNA, 20 bp, synthetic construct
  source 1..20: mol_type = other DNA
actccaccctgggtgacaga

SEQ ID NO: 22566 - DNA, 20 bp, synthetic construct
  source 1..20: mol_type = other DNA
cactccaccctgggtgacag

SEQ ID NO: 22567 - DNA, 20 bp, synthetic construct
  source 1..20: mol_type = other DNA
gcactccaccctgggtgaca

SEQ ID NO: 22568 - DNA, 20 bp, synthetic construct
  source 1..20: mol_type = other DNA
tgcactccaccctgggtgac

SEQ ID NO: 22569 - DNA, 20 bp, synthetic construct
  source 1..20: mol_type = other DNA
ctgcactccaccctgggtga

SEQ ID NO: 22570 - DNA, 20 bp, synthetic construct
  source 1..20: mol_type = other DNA
actgcactccaccctgggtg

SEQ ID NO: 22571 - DNA, 20 bp, synthetic construct
  source 1..20: mol_type = other DNA
cactgcactccaccctgggt

SEQ ID NO: 22572 - DNA, 20 bp, synthetic construct
  source 1..20: mol_type = other DNA
ccactgcactccaccctggg

SEQ ID NO: 22573 - DNA, 20 bp, synthetic construct
  source 1..20: mol_type = other DNA
accactgcactccaccctgg

SEQ ID NO: 22574 - DNA, 20 bp, synthetic construct
  source 1..20: mol_type = other DNA
caccactgcactccaccctg

SEQ ID NO: 22575 - DNA, 20 bp, synthetic construct
  source 1..20: mol_type = other DNA
gcaccactgcactccaccct

SEQ ID NO: 22576 - DNA, 20 bp, synthetic construct
  source 1..20: mol_type = other DNA
cgcaccactgcactccaccc

SEQ ID NO: 22577 - DNA, 20 bp, synthetic construct
  source 1..20: mol_type = other DNA
tcgcaccactgcactccacc

SEQ ID NO: 22578 - DNA, 20 bp, synthetic construct
  source 1..20: mol_type = other DNA
atcgcaccactgcactccac

SEQ ID NO: 22579 - DNA, 20 bp, synthetic construct
  source 1..20: mol_type = other DNA
tatcgcaccactgcactcca

SEQ ID NO: 22580 - DNA, 20 bp, synthetic construct
  source 1..20: mol_type = other DNA
atatcgcaccactgcactcc

SEQ ID NO: 22581 - DNA, 20 bp, synthetic construct
  source 1..20: mol_type = other DNA
aatatcgcaccactgcactc

SEQ ID NO: 22582 - DNA, 20 bp, synthetic construct
  source 1..20: mol_type = other DNA
caatatcgcaccactgcact

SEQ ID NO: 22583 - DNA, 20 bp, synthetic construct
  source 1..20: mol_type = other DNA
acaatatcgcaccactgcac

SEQ ID NO: 22584 - DNA, 20 bp, synthetic construct
  source 1..20: mol_type = other DNA
gacaatatcgcaccactgca

SEQ ID NO: 22585 - DNA, 20 bp, synthetic construct
  source 1..20: mol_type = other DNA
agacaatatcgcaccactgc

SEQ ID NO: 22586 - DNA, 20 bp, synthetic construct
  source 1..20: mol_type = other DNA
cagacaatatcgcaccactg

SEQ ID NO: 22587 - DNA, 20 bp, synthetic construct
  source 1..20: mol_type = other DNA
tcagacaatatcgcaccact

SEQ ID NO: 22588 - DNA, 20 bp, synthetic construct
  source 1..20: mol_type = other DNA
gtcagacaatatcgcaccac

SEQ ID NO: 22589 - DNA, 20 bp, synthetic construct
  source 1..20: mol_type = other DNA
agtcagacaatatcgcacca

SEQ ID NO: 22590 - DNA, 20 bp, synthetic construct
  source 1..20: mol_type = other DNA
cagtcagacaatatcgcacc

SEQ ID NO: 22591 - DNA, 20 bp, synthetic construct
  source 1..20: mol_type = other DNA
gcagtcagacaatatcgcac

SEQ ID NO: 22592 - DNA, 20 bp, synthetic construct
  source 1..20: mol_type = other DNA
tgcagtcagacaatatcgca

SEQ ID NO: 22593 - DNA, 20 bp, synthetic construct
  source 1..20: mol_type = other DNA
ttgcagtcagacaatatcgc

SEQ ID NO: 22594 - DNA, 20 bp, synthetic construct
  source 1..20: mol_type = other DNA
gttgcagtcagacaatatcg

SEQ ID NO: 22595 - DNA, 20 bp, synthetic construct
  source 1..20: mol_type = other DNA
tgttgcagtcagacaatatc

SEQ ID NO: 22596 - DNA, 20 bp, synthetic construct
  source 1..20: mol_type = other DNA
atgttgcagtcagacaatat

SEQ ID NO: 22597 - DNA, 20 bp, synthetic construct
  source 1..20: mol_type = other DNA
aatgttgcagtcagacaata

SEQ ID NO: 22598 - DNA, 20 bp, synthetic construct
  source 1..20: mol_type = other DNA
caatgttgcagtcagacaat

SEQ ID NO: 22599 - DNA, 20 bp, synthetic construct
  source 1..20: mol_type = other DNA
tcaatgttgcagtcagacaa

SEQ ID NO: 22600 - DNA, 20 bp, synthetic construct
  source 1..20: mol_type = other DNA
gtcaatgttgcagtcagaca

SEQ ID NO: 22601 - DNA, 20 bp, synthetic construct
  source 1..20: mol_type = other DNA
ggtcaatgttgcagtcagac

SEQ ID NO: 22602 - DNA, 20 bp, synthetic construct
  source 1..20: mol_type = other DNA
aggtcaatgttgcagtcaga

SEQ ID NO: 22603 - DNA, 20 bp, synthetic construct
  source 1..20: mol_type = other DNA
gaggtcaatgttgcagtcag

SEQ ID NO: 22604 - DNA, 20 bp, synthetic construct
  source 1..20: mol_type = other DNA
ggaggtcaatgttgcagtca

SEQ ID NO: 22605 - DNA, 20 bp, synthetic construct
  source 1..20: mol_type = other DNA
aggaggtcaatgttgcagtc

SEQ ID NO: 22606 - DNA, 20 bp, synthetic construct
  source 1..20: mol_type = other DNA
caggaggtcaatgttgcagt

SEQ ID NO: 22607 - DNA, 20 bp, synthetic construct
  source 1..20: mol_type = other DNA
ccaggaggtcaatgttgcag

SEQ ID NO: 22608 - DNA, 20 bp, synthetic construct
  source 1..20: mol_type = other DNA
cccaggaggtcaatgttgca

SEQ ID NO: 22609 - DNA, 20 bp, synthetic construct
  source 1..20: mol_type = other DNA
gcccaggaggtcaatgttgc

SEQ ID NO: 22610 - DNA, 20 bp, synthetic construct
  source 1..20: mol_type = other DNA
agcccaggaggtcaatgttg

SEQ ID NO: 22611 - DNA, 20 bp, synthetic construct
  source 1..20: mol_type = other DNA
gagcccaggaggtcaatgtt

SEQ ID NO: 22612 - DNA, 20 bp, synthetic construct
  source 1..20: mol_type = other DNA
tgagcccaggaggtcaatgt

SEQ ID NO: 22613 - DNA, 20 bp, synthetic construct
  source 1..20: mol_type = other DNA
ttgagcccaggaggtcaatg

SEQ ID NO: 22614 - DNA, 20 bp, synthetic construct
  source 1..20: mol_type = other DNA
cttgagcccaggaggtcaat

SEQ ID NO: 22615 - DNA, 20 bp, synthetic construct
  source 1..20: mol_type = other DNA
acttgagcccaggaggtcaa

SEQ ID NO: 22616 - DNA, 20 bp, synthetic construct
  source 1..20: mol_type = other DNA
cacttgagcccaggaggtca

SEQ ID NO: 22617 - DNA, 20 bp, synthetic construct
  source 1..20: mol_type = other DNA
tcacttgagcccaggaggtc

SEQ ID NO: 22618 - DNA, 20 bp, synthetic construct
  source 1..20: mol_type = other DNA
atcacttgagcccaggaggt

SEQ ID NO: 22619 - DNA, 20 bp, synthetic construct
  source 1..20: mol_type = other DNA
gatcacttgagcccaggagg

SEQ ID NO: 22620 - DNA, 20 bp, synthetic construct
  source 1..20: mol_type = other DNA
ggatcacttgagcccaggag

SEQ ID NO: 22621 - DNA, 20 bp, synthetic construct
  source 1..20: mol_type = other DNA
aggatcacttgagcccagga

SEQ ID NO: 22622 - DNA, 20 bp, synthetic construct
  source 1..20: mol_type = other DNA
gaggatcacttgagcccagg

SEQ ID NO: 22623 - DNA, 20 bp, synthetic construct
  source 1..20: mol_type = other DNA
ggaggatcacttgagcccag

SEQ ID NO: 22624 - DNA, 20 bp, synthetic construct
  source 1..20: mol_type = other DNA
aggaggatcacttgagccca

SEQ ID NO: 22625 - DNA, 20 bp, synthetic construct
  source 1..20: mol_type = other DNA
caggaggatcacttgagccc

SEQ ID NO: 22626 - DNA, 20 bp, synthetic construct
  source 1..20: mol_type = other DNA
gcaggaggatcacttgagcc

SEQ ID NO: 22627 - DNA, 20 bp, synthetic construct
  source 1..20: mol_type = other DNA
ggcaggaggatcacttgagc

SEQ ID NO: 22628 - DNA, 20 bp, synthetic construct
  source 1..20: mol_type = other DNA
aggcaggaggatcacttgag

SEQ ID NO: 22629 - DNA, 20 bp, synthetic construct
  source 1..20: mol_type = other DNA
gaggcaggaggatcacttga

SEQ ID NO: 22630 - DNA, 20 bp, synthetic construct
  source 1..20: mol_type = other DNA
tgaggcaggaggatcacttg

SEQ ID NO: 22631 - DNA, 20 bp, synthetic construct
  source 1..20: mol_type = other DNA
ctgaggcaggaggatcactt

SEQ ID NO: 22632 - DNA, 20 bp, synthetic construct
  source 1..20: mol_type = other DNA
gctgaggcaggaggatcact

SEQ ID NO: 22633 - DNA, 20 bp, synthetic construct
  source 1..20: mol_type = other DNA
ggctgaggcaggaggatcac

SEQ ID NO: 22634 - DNA, 20 bp, synthetic construct
  source 1..20: mol_type = other DNA
aggctgaggcaggaggatca

SEQ ID NO: 22635 - DNA, 20 bp, synthetic construct
  source 1..20: mol_type = other DNA
gaggctgaggcaggaggatc

SEQ ID NO: 22636 - DNA, 20 bp, synthetic construct
  source 1..20: mol_type = other DNA
ggaggctgaggcaggaggat

SEQ ID NO: 22637 - DNA, 20 bp, synthetic construct
  source 1..20: mol_type = other DNA
aggaggctgaggcaggagga

SEQ ID NO: 22638 - DNA, 20 bp, synthetic construct
  source 1..20: mol_type = other DNA
caggaggctgaggcaggagg

SEQ ID NO: 22639 - DNA, 20 bp, synthetic construct
  source 1..20: mol_type = other DNA
ccaggaggctgaggcaggag

SEQ ID NO: 22640 - DNA, 20 bp, synthetic construct
  source 1..20: mol_type = other DNA
gccaggaggctgaggcagga

SEQ ID NO: 22641 - DNA, 20 bp, synthetic construct
  source 1..20: mol_type = other DNA
agccaggaggctgaggcagg

SEQ ID NO: 22642 - DNA, 20 bp, synthetic construct
  source 1..20: mol_type = other DNA
cagccaggaggctgaggcag

SEQ ID NO: 22643 - DNA, 20 bp, synthetic construct
  source 1..20: mol_type = other DNA
ccagccaggaggctgaggca

SEQ ID NO: 22644 - DNA, 20 bp, synthetic construct
  source 1..20: mol_type = other DNA
cccagccaggaggctgaggc

SEQ ID NO: 22645 - DNA, 20 bp, synthetic construct
  source 1..20: mol_type = other DNA
tcccagccaggaggctgagg

SEQ ID NO: 22646 - DNA, 20 bp, synthetic construct
  source 1..20: mol_type = other DNA
gtcccagccaggaggctgag

SEQ ID NO: 22647 - DNA, 20 bp, synthetic construct
  source 1..20: mol_type = other DNA
ggtcccagccaggaggctga

SEQ ID NO: 22648 - DNA, 20 bp, synthetic construct
  source 1..20: mol_type = other DNA
tggtcccagccaggaggctg

SEQ ID NO: 22649 - DNA, 20 bp, synthetic construct
  source 1..20: mol_type = other DNA
gtggtcccagccaggaggct

SEQ ID NO: 22650 - DNA, 20 bp, synthetic construct
  source 1..20: mol_type = other DNA
tgtggtcccagccaggaggc

SEQ ID NO: 22651 - DNA, 20 bp, synthetic construct
  source 1..20: mol_type = other DNA
ctgtggtcccagccaggagg

SEQ ID NO: 22652 - DNA, 20 bp, synthetic construct
  source 1..20: mol_type = other DNA
cctgtggtcccagccaggag

SEQ ID NO: 22653 - DNA, 20 bp, synthetic construct
  source 1..20: mol_type = other DNA
gcctgtggtcccagccagga

SEQ ID NO: 22654 - DNA, 20 bp, synthetic construct
  source 1..20: mol_type = other DNA
tgcctgtggtcccagccagg

SEQ ID NO: 22655 - DNA, 20 bp, synthetic construct
  source 1..20: mol_type = other DNA
atgcctgtggtcccagccag

SEQ ID NO: 22656 - DNA, 20 bp, synthetic construct
  source 1..20: mol_type = other DNA
catgcctgtggtcccagcca

SEQ ID NO: 22657 - DNA, 20 bp, synthetic construct
  source 1..20: mol_type = other DNA
acatgcctgtggtcccagcc

SEQ ID NO: 22658 - DNA, 20 bp, synthetic construct
  source 1..20: mol_type = other DNA
tacatgcctgtggtcccagc

SEQ ID NO: 22659 - DNA, 20 bp, synthetic construct
  source 1..20: mol_type = other DNA
gtacatgcctgtggtcccag

SEQ ID NO: 22660 - DNA, 20 bp, synthetic construct
  source 1..20: mol_type = other DNA
ggtacatgcctgtggtccca

SEQ ID NO: 22661 - DNA, 20 bp, synthetic construct
  source 1..20: mol_type = other DNA
tggtacatgcctgtggtccc

SEQ ID NO: 22662 - DNA, 20 bp, synthetic construct
  source 1..20: mol_type = other DNA
gtggtacatgcctgtggtcc

SEQ ID NO: 22663 - DNA, 20 bp, synthetic construct
  source 1..20: mol_type = other DNA
ggtggtacatgcctgtggtc

SEQ ID NO: 22664 - DNA, 20 bp, synthetic construct
  source 1..20: mol_type = other DNA
tggtggtacatgcctgtggt

SEQ ID NO: 22665 - DNA, 20 bp, synthetic construct
  source 1..20: mol_type = other DNA
gtggtggtacatgcctgtgg

SEQ ID NO: 22666 - DNA, 20 bp, synthetic construct
  source 1..20: mol_type = other DNA
tgtggtggtacatgcctgtg

SEQ ID NO: 22667 - DNA, 20 bp, synthetic construct
  source 1..20: mol_type = other DNA
gtgtggtggtacatgcctgt

SEQ ID NO: 22668 - DNA, 20 bp, synthetic construct
  source 1..20: mol_type = other DNA
ggtgtggtggtacatgcctg

SEQ ID NO: 22669 - DNA, 20 bp, synthetic construct
  source 1..20: mol_type = other DNA
aggtgtggtggtacatgcct

SEQ ID NO: 22670 - DNA, 20 bp, synthetic construct
  source 1..20: mol_type = other DNA
caggtgtggtggtacatgcc

SEQ ID NO: 22671 - DNA, 20 bp, synthetic construct
  source 1..20: mol_type = other DNA
ccaggtgtggtggtacatgc

SEQ ID NO: 22672 - DNA, 20 bp, synthetic construct
  source 1..20: mol_type = other DNA
accaggtgtggtggtacatg

SEQ ID NO: 22673 - DNA, 20 bp, synthetic construct
  source 1..20: mol_type = other DNA
taccaggtgtggtggtacat

SEQ ID NO: 22674 - DNA, 20 bp, synthetic construct
  source 1..20: mol_type = other DNA
ctaccaggtgtggtggtaca

SEQ ID NO: 22675 - DNA, 20 bp, synthetic construct
  source 1..20: mol_type = other DNA
actaccaggtgtggtggtac

SEQ ID NO: 22676 - DNA, 20 bp, synthetic construct
  source 1..20: mol_type = other DNA
aactaccaggtgtggtggta

SEQ ID NO: 22677 - DNA, 20 bp, synthetic construct
  source 1..20: mol_type = other DNA
aaactaccaggtgtggtggt

SEQ ID NO: 22678 - DNA, 20 bp, synthetic construct
  source 1..20: mol_type = other DNA
caaactaccaggtgtggtgg

SEQ ID NO: 22679 - DNA, 20 bp, synthetic construct
  source 1..20: mol_type = other DNA
gcaaactaccaggtgtggtg

SEQ ID NO: 22680 - DNA, 20 bp, synthetic construct
  source 1..20: mol_type = other DNA
agcaaactaccaggtgtggt

SEQ ID NO: 22681 - DNA, 20 bp, synthetic construct
  source 1..20: mol_type = other DNA
aagcaaactaccaggtgtgg

SEQ ID NO: 22682 - DNA, 20 bp, synthetic construct
  source 1..20: mol_type = other DNA
aaagcaaactaccaggtgtg

SEQ ID NO: 22683 - DNA, 20 bp, synthetic construct
  source 1..20: mol_type = other DNA
caaagcaaactaccaggtgt

SEQ ID NO: 22684 - DNA, 20 bp, synthetic construct
  source 1..20: mol_type = other DNA
tcaaagcaaactaccaggtg

SEQ ID NO: 22685 - DNA, 20 bp, synthetic construct
  source 1..20: mol_type = other DNA
atcaaagcaaactaccaggt

SEQ ID NO: 22686 - DNA, 20 bp, synthetic construct
  source 1..20: mol_type = other DNA
aatcaaagcaaactaccagg

SEQ ID NO: 22687 - DNA, 20 bp, synthetic construct
  source 1..20: mol_type = other DNA
aaatcaaagcaaactaccag

SEQ ID NO: 22688 - DNA, 20 bp, synthetic construct
  source 1..20: mol_type = other DNA
aaaatcaaagcaaactacca

SEQ ID NO: 22689 - DNA, 20 bp, synthetic construct
  source 1..20: mol_type = other DNA
aaaaatcaaagcaaactacc

SEQ ID NO: 22690 - DNA, 20 bp, synthetic construct
  source 1..20: mol_type = other DNA
taaaaatcaaagcaaactac

SEQ ID NO: 22691 - DNA, 20 bp, synthetic construct
  source 1..20: mol_type = other DNA
ctaaaaatcaaagcaaacta

SEQ ID NO: 22692 - DNA, 20 bp, synthetic construct
  source 1..20: mol_type = other DNA
actaaaaatcaaagcaaact

SEQ ID NO: 22693 - DNA, 20 bp, synthetic construct
  source 1..20: mol_type = other DNA
tactaaaaatcaaagcaaac

SEQ ID NO: 22694 - DNA, 20 bp, synthetic construct
  source 1..20: mol_type = other DNA
ctactaaaaatcaaagcaaa

SEQ ID NO: 22695 - DNA, 20 bp, synthetic construct
  source 1..20: mol_type = other DNA
tctactaaaaatcaaagcaa

SEQ ID NO: 22696 - DNA, 20 bp, synthetic construct
  source 1..20: mol_type = other DNA
ctctactaaaaatcaaagca

SEQ ID NO: 22697 - DNA, 20 bp, synthetic construct
  source 1..20: mol_type = other DNA
tctctactaaaaatcaaagc

SEQ ID NO: 22698 - DNA, 20 bp, synthetic construct
  source 1..20: mol_type = other DNA
ttctctactaaaaatcaaag

SEQ ID NO: 22699 - DNA, 20 bp, synthetic construct
  source 1..20: mol_type = other DNA
cttctctactaaaaatcaaa

SEQ ID NO: 22700 - DNA, 20 bp, synthetic construct
  source 1..20: mol_type = other DNA
tcttctctactaaaaatcaa

SEQ ID NO: 22701 - DNA, 20 bp, synthetic construct
  source 1..20: mol_type = other DNA
ctcttctctactaaaaatca

SEQ ID NO: 22702 - DNA, 20 bp, synthetic construct
  source 1..20: mol_type = other DNA
cctcttctctactaaaaatc

SEQ ID NO: 22703 - DNA, 20 bp, synthetic construct
  source 1..20: mol_type = other DNA
acctcttctctactaaaaat

SEQ ID NO: 22704 - DNA, 20 bp, synthetic construct
  source 1..20: mol_type = other DNA
gacctcttctctactaaaaa

SEQ ID NO: 22705 - DNA, 20 bp, synthetic construct
  source 1..20: mol_type = other DNA
agacctcttctctactaaaa

SEQ ID NO: 22706 - DNA, 20 bp, synthetic construct
  source 1..20: mol_type = other DNA
gagacctcttctctactaaa

SEQ ID NO: 22707 - DNA, 20 bp, synthetic construct
  source 1..20: mol_type = other DNA
tgagacctcttctctactaa

SEQ ID NO: 22708 - DNA, 20 bp, synthetic construct
  source 1..20: mol_type = other DNA
gtgagacctcttctctacta

SEQ ID NO: 22709 - DNA, 20 bp, synthetic construct
  source 1..20: mol_type = other DNA
agtgagacctcttctctact

SEQ ID NO: 22710 - DNA, 20 bp, synthetic construct
  source 1..20: mol_type = other DNA
tagtgagacctcttctctac

SEQ ID NO: 22711 - DNA, 20 bp, synthetic construct
  source 1..20: mol_type = other DNA
atagtgagacctcttctcta

SEQ ID NO: 22712 - DNA, 20 bp, synthetic construct
  source 1..20: mol_type = other DNA
catagtgagacctcttctct

SEQ ID NO: 22713 - DNA, 20 bp, synthetic construct
  source 1..20: mol_type = other DNA
acatagtgagacctcttctc

SEQ ID NO: 22714 - DNA, 20 bp, synthetic construct
  source 1..20: mol_type = other DNA
aacatagtgagacctcttct

SEQ ID NO: 22715 - DNA, 20 bp, synthetic construct
  source 1..20: mol_type = other DNA
caacatagtgagacctcttc

SEQ ID NO: 22716 - DNA, 20 bp, synthetic construct
  source 1..20: mol_type = other DNA
gcaacatagtgagacctctt

SEQ ID NO: 22717 - DNA, 20 bp, synthetic construct
  source 1..20: mol_type = other DNA
ggcaacatagtgagacctct

SEQ ID NO: 22718 - DNA, 20 bp, synthetic construct
  source 1..20: mol_type = other DNA
gggcaacatagtgagacctc

SEQ ID NO: 22719 - DNA, 20 bp, synthetic construct
  source 1..20: mol_type = other DNA
agggcaacatagtgagacct

SEQ ID NO: 22720 - DNA, 20 bp, synthetic construct
  source 1..20: mol_type = other DNA
cagggcaacatagtgagacc

SEQ ID NO: 22721 - DNA, 20 bp, synthetic construct
  source 1..20: mol_type = other DNA
ccagggcaacatagtgagac

SEQ ID NO: 22722 - DNA, 20 bp, synthetic construct
  source 1..20: mol_type = other DNA
cccagggcaacatagtgaga

SEQ ID NO: 22723 - DNA, 20 bp, synthetic construct
  source 1..20: mol_type = other DNA
acccagggcaacatagtgag

SEQ ID NO: 22724 - DNA, 20 bp, synthetic construct
  source 1..20: mol_type = other DNA
cacccagggcaacatagtga

SEQ ID NO: 22725 - DNA, 20 bp, synthetic construct
  source 1..20: mol_type = other DNA
ccacccagggcaacatagtg

SEQ ID NO: 22726 - DNA, 20 bp, synthetic construct
  source 1..20: mol_type = other DNA
accacccagggcaacatagt

SEQ ID NO: 22727 - DNA, 20 bp, synthetic construct
  source 1..20: mol_type = other DNA
caccacccagggcaacatag

SEQ ID NO: 22728 - DNA, 20 bp, synthetic construct
  source 1..20: mol_type = other DNA
acaccacccagggcaacata

SEQ ID NO: 22729 - DNA, 20 bp, synthetic construct
  source 1..20: mol_type = other DNA
aacaccacccagggcaacat

SEQ ID NO: 22730 - DNA, 20 bp, synthetic construct
  source 1..20: mol_type = other DNA
caacaccacccagggcaaca

SEQ ID NO: 22731 - DNA, 20 bp, synthetic construct
  source 1..20: mol_type = other DNA
tcaacaccacccagggcaac

SEQ ID NO: 22732 - DNA, 20 bp, synthetic construct
  source 1..20: mol_type = other DNA
ttcaacaccacccagggcaa

SEQ ID NO: 22733 - DNA, 20 bp, synthetic construct
  source 1..20: mol_type = other DNA
gttcaacaccacccagggca

SEQ ID NO: 22734 - DNA, 20 bp, synthetic construct
  source 1..20: mol_type = other DNA
agttcaacaccacccagggc

SEQ ID NO: 22735 - DNA, 20 bp, synthetic construct
  source 1..20: mol_type = other DNA
gagttcaacaccacccaggg

SEQ ID NO: 22736 - DNA, 20 bp, synthetic construct
  source 1..20: mol_type = other DNA
ggagttcaacaccacccagg

SEQ ID NO: 22737 - DNA, 20 bp, synthetic construct
  source 1..20: mol_type = other DNA
aggagttcaacaccacccag

SEQ ID NO: 22738 - DNA, 20 bp, synthetic construct
  source 1..20: mol_type = other DNA
caggagttcaacaccaccca

SEQ ID NO: 22739 - DNA, 20 bp, synthetic construct
  source 1..20: mol_type = other DNA
ccaggagttcaacaccaccc

SEQ ID NO: 22740 - DNA, 20 bp, synthetic construct
  source 1..20: mol_type = other DNA
cccaggagttcaacaccacc

SEQ ID NO: 22741 - DNA, 20 bp, synthetic construct
  source 1..20: mol_type = other DNA
gcccaggagttcaacaccac

SEQ ID NO: 22742 - DNA, 20 bp, synthetic construct
  source 1..20: mol_type = other DNA
agcccaggagttcaacacca

SEQ ID NO: 22743 - DNA, 20 bp, synthetic construct
  source 1..20: mol_type = other DNA
gagcccaggagttcaacacc

SEQ ID NO: 22744 - DNA, 20 bp, synthetic construct
  source 1..20: mol_type = other DNA
tgagcccaggagttcaacac

SEQ ID NO: 22745 - DNA, 20 bp, synthetic construct
  source 1..20: mol_type = other DNA
ttgagcccaggagttcaaca

SEQ ID NO: 22746 - DNA, 20 bp, synthetic construct
  source 1..20: mol_type = other DNA
cttgagcccaggagttcaac

SEQ ID NO: 22747 - DNA, 20 bp, synthetic construct
  source 1..20: mol_type = other DNA
acttgagcccaggagttcaa

SEQ ID NO: 22748 - DNA, 20 bp, synthetic construct
  source 1..20: mol_type = other DNA
cacttgagcccaggagttca

SEQ ID NO: 22749 - DNA, 20 bp, synthetic construct
  source 1..20: mol_type = other DNA
tcacttgagcccaggagttc

SEQ ID NO: 22750 - DNA, 20 bp, synthetic construct
  source 1..20: mol_type = other DNA
atcacttgagcccaggagtt

SEQ ID NO: 22751 - DNA, 20 bp, synthetic construct
  source 1..20: mol_type = other DNA
aatcacttgagcccaggagt

SEQ ID NO: 22752 - DNA, 20 bp, synthetic construct
  source 1..20: mol_type = other DNA
gaatcacttgagcccaggag

SEQ ID NO: 22753 - DNA, 20 bp, synthetic construct
  source 1..20: mol_type = other DNA
tgaatcacttgagcccagga

SEQ ID NO: 22754 - DNA, 20 bp, synthetic construct
  source 1..20: mol_type = other DNA
atgaatcacttgagcccagg

SEQ ID NO: 22755 - DNA, 20 bp, synthetic construct
  source 1..20: mol_type = other DNA
gatgaatcacttgagcccag

SEQ ID NO: 22756 - DNA, 20 bp, synthetic construct
  source 1..20: mol_type = other DNA
agatgaatcacttgagccca

SEQ ID NO: 22757 - DNA, 20 bp, synthetic construct
  source 1..20: mol_type = other DNA
tagatgaatcacttgagccc

SEQ ID NO: 22758 - DNA, 20 bp, synthetic construct
  source 1..20: mol_type = other DNA
gtagatgaatcacttgagcc

SEQ ID NO: 22759 - DNA, 20 bp, synthetic construct
  source 1..20: mol_type = other DNA
ggtagatgaatcacttgagc

SEQ ID NO: 22760 - DNA, 20 bp, synthetic construct
  source 1..20: mol_type = other DNA
aggtagatgaatcacttgag

SEQ ID NO: 22761 - DNA, 20 bp, synthetic construct
  source 1..20: mol_type = other DNA
gaggtagatgaatcacttga

SEQ ID NO: 22762 - DNA, 20 bp, synthetic construct
  source 1..20: mol_type = other DNA
tgaggtagatgaatcacttg

SEQ ID NO: 22763 - DNA, 20 bp, synthetic construct
  source 1..20: mol_type = other DNA
ctgaggtagatgaatcactt

SEQ ID NO: 22764 - DNA, 20 bp, synthetic construct
  source 1..20: mol_type = other DNA
gctgaggtagatgaatcact

SEQ ID NO: 22765 - DNA, 20 bp, synthetic construct
  source 1..20: mol_type = other DNA
ggctgaggtagatgaatcac

SEQ ID NO: 22766 - DNA, 20 bp, synthetic construct
  source 1..20: mol_type = other DNA
aggctgaggtagatgaatca

SEQ ID NO: 22767 - DNA, 20 bp, synthetic construct
  source 1..20: mol_type = other DNA
gaggctgaggtagatgaatc

SEQ ID NO: 22768 - DNA, 20 bp, synthetic construct
  source 1..20: mol_type = other DNA
ggaggctgaggtagatgaat

SEQ ID NO: 22769 - DNA, 20 bp, synthetic construct
  source 1..20: mol_type = other DNA
gggaggctgaggtagatgaa

SEQ ID NO: 22770 - DNA, 20 bp, synthetic construct
  source 1..20: mol_type = other DNA
tgggaggctgaggtagatga

SEQ ID NO: 22771 - DNA, 20 bp, synthetic construct
  source 1..20: mol_type = other DNA
ttgggaggctgaggtagatg

SEQ ID NO: 22772 - DNA, 20 bp, synthetic construct
  source 1..20: mol_type = other DNA
tttgggaggctgaggtagat

SEQ ID NO: 22773 - DNA, 20 bp, synthetic construct
  source 1..20: mol_type = other DNA
ctttgggaggctgaggtaga

SEQ ID NO: 22774 - DNA, 20 bp, synthetic construct
  source 1..20: mol_type = other DNA
actttgggaggctgaggtag

SEQ ID NO: 22775 - DNA, 20 bp, synthetic construct
  source 1..20: mol_type = other DNA
cactttgggaggctgaggta

SEQ ID NO: 22776 - DNA, 20 bp, synthetic construct
  source 1..20: mol_type = other DNA
gcactttgggaggctgaggt

SEQ ID NO: 22777 - DNA, 20 bp, synthetic construct
  source 1..20: mol_type = other DNA
agcactttgggaggctgagg

SEQ ID NO: 22778 - DNA, 20 bp, synthetic construct
  source 1..20: mol_type = other DNA
cagcactttgggaggctgag

SEQ ID NO: 22779 - DNA, 20 bp, synthetic construct
  source 1..20: mol_type = other DNA
ccagcactttgggaggctga

SEQ ID NO: 22780 - DNA, 20 bp, synthetic construct
  source 1..20: mol_type = other DNA
cccagcactttgggaggctg

SEQ ID NO: 22781 - DNA, 20 bp, synthetic construct
  source 1..20: mol_type = other DNA
tcccagcactttgggaggct

SEQ ID NO: 22782 - DNA, 20 bp, synthetic construct
  source 1..20: mol_type = other DNA
atcccagcactttgggaggc

SEQ ID NO: 22783 - DNA, 20 bp, synthetic construct
  source 1..20: mol_type = other DNA
aatcccagcactttgggagg

SEQ ID NO: 22784 - DNA, 20 bp, synthetic construct
  source 1..20: mol_type = other DNA
taatcccagcactttgggag

SEQ ID NO: 22785 - DNA, 20 bp, synthetic construct
  source 1..20: mol_type = other DNA
ataatcccagcactttggga

SEQ ID NO: 22786 - DNA, 20 bp, synthetic construct
  source 1..20: mol_type = other DNA
tataatcccagcactttggg

SEQ ID NO: 22787 - DNA, 20 bp, synthetic construct
  source 1..20: mol_type = other DNA
ctataatcccagcactttgg

SEQ ID NO: 22788 - DNA, 20 bp, synthetic construct
  source 1..20: mol_type = other DNA
tctataatcccagcactttg

SEQ ID NO: 22789 - DNA, 20 bp, synthetic construct
  source 1..20: mol_type = other DNA
atctataatcccagcacttt

SEQ ID NO: 22790 - DNA, 20 bp, synthetic construct
  source 1..20: mol_type = other DNA
tatctataatcccagcactt

SEQ ID NO: 22791 - DNA, 20 bp, synthetic construct
  source 1..20: mol_type = other DNA
atatctataatcccagcact

SEQ ID NO: 22792 - DNA, 20 bp, synthetic construct
  source 1..20: mol_type = other DNA
catatctataatcccagcac

SEQ ID NO: 22793 - DNA, 20 bp, synthetic construct
  source 1..20: mol_type = other DNA
tcatatctataatcccagca

SEQ ID NO: 22794 - DNA, 20 bp, synthetic construct
  source 1..20: mol_type = other DNA
ctcatatctataatcccagc

SEQ ID NO: 22795 - DNA, 20 bp, synthetic construct
  source 1..20: mol_type = other DNA
gctcatatctataatcccag

SEQ ID NO: 22796 - DNA, 20 bp, synthetic construct
  source 1..20: mol_type = other DNA
ggctcatatctataatccca

SEQ ID NO: 22797 - DNA, 20 bp, synthetic construct
  source 1..20: mol_type = other DNA
gggctcatatctataatccc

SEQ ID NO: 22798 - DNA, 20 bp, synthetic construct
  source 1..20: mol_type = other DNA
ggggctcatatctataatcc

SEQ ID NO: 22799 - DNA, 20 bp, synthetic construct
  source 1..20: mol_type = other DNA
aggggctcatatctataatc

SEQ ID NO: 22800 - DNA, 20 bp, synthetic construct
  source 1..20: mol_type = other DNA
caggggctcatatctataat

SEQ ID NO: 22801 - DNA, 20 bp, synthetic construct
  source 1..20: mol_type = other DNA
acaggggctcatatctataa

SEQ ID NO: 22802 - DNA, 20 bp, synthetic construct
  source 1..20: mol_type = other DNA
cacaggggctcatatctata

SEQ ID NO: 22803 - DNA, 20 bp, synthetic construct
  source 1..20: mol_type = other DNA
gcacaggggctcatatctat

SEQ ID NO: 22804 - DNA, 20 bp, synthetic construct
  source 1..20: mol_type = other DNA
ggcacaggggctcatatcta

SEQ ID NO: 22805 - DNA, 20 bp, synthetic construct
  source 1..20: mol_type = other DNA
aggcacaggggctcatatct

SEQ ID NO: 22806 - DNA, 20 bp, synthetic construct
  source 1..20: mol_type = other DNA
caggcacaggggctcatatc

SEQ ID NO: 22807 - DNA, 20 bp, synthetic construct
  source 1..20: mol_type = other DNA
ccaggcacaggggctcatat

SEQ ID NO: 22808 - DNA, 20 bp, synthetic construct
  source 1..20: mol_type = other DNA
gccaggcacaggggctcata

SEQ ID NO: 22809 - DNA, 20 bp, synthetic construct
  source 1..20: mol_type = other DNA
ggccaggcacaggggctcat

SEQ ID NO: 22810 - DNA, 20 bp, synthetic construct
  source 1..20: mol_type = other DNA
aggccaggcacaggggctca

SEQ ID NO: 22811 - DNA, 20 bp, synthetic construct
  source 1..20: mol_type = other DNA
gaggccaggcacaggggctc

SEQ ID NO: 22812 - DNA, 20 bp, synthetic construct
  source 1..20: mol_type = other DNA
tgaggccaggcacaggggct

SEQ ID NO: 22813 - DNA, 20 bp, synthetic construct
  source 1..20: mol_type = other DNA
atgaggccaggcacaggggc

SEQ ID NO: 22814 - DNA, 20 bp, synthetic construct
  source 1..20: mol_type = other DNA
aatgaggccaggcacagggg

SEQ ID NO: 22815 - DNA, 20 bp, synthetic construct
  source 1..20: mol_type = other DNA
caatgaggccaggcacaggg

SEQ ID NO: 22816 - DNA, 20 bp, synthetic construct
  source 1..20: mol_type = other DNA
acaatgaggccaggcacagg

SEQ ID NO: 22817 - DNA, 20 bp, synthetic construct
  source 1..20: mol_type = other DNA
cacaatgaggccaggcacag

SEQ ID NO: 22818 - DNA, 20 bp, synthetic construct
  source 1..20: mol_type = other DNA
ccacaatgaggccaggcaca

SEQ ID NO: 22819 - DNA, 20 bp, synthetic construct
  source 1..20: mol_type = other DNA
accacaatgaggccaggcac

SEQ ID NO: 22820 - DNA, 20 bp, synthetic construct
  source 1..20: mol_type = other DNA
aaccacaatgaggccaggca

SEQ ID NO: 22821 - DNA, 20 bp, synthetic construct
  source 1..20: mol_type = other DNA
aaaccacaatgaggccaggc

SEQ ID NO: 22822 - DNA, 20 bp, synthetic construct
  source 1..20: mol_type = other DNA
aaaaccacaatgaggccagg

SEQ ID NO: 22823 - DNA, 20 bp, synthetic construct
  source 1..20: mol_type = other DNA
taaaaccacaatgaggccag

SEQ ID NO: 22824 - DNA, 20 bp, synthetic construct
  source 1..20: mol_type = other DNA
ttaaaaccacaatgaggcca

SEQ ID NO: 22825 - DNA, 20 bp, synthetic construct
  source 1..20: mol_type = other DNA
attaaaaccacaatgaggcc

SEQ ID NO: 22826 - DNA, 20 bp, synthetic construct
  source 1..20: mol_type = other DNA
aattaaaaccacaatgaggc

SEQ ID NO: 22827 - DNA, 20 bp, synthetic construct
  source 1..20: mol_type = other DNA
aaattaaaaccacaatgagg

SEQ ID NO: 22828 - DNA, 20 bp, synthetic construct
  source 1..20: mol_type = other DNA
caaattaaaaccacaatgag

SEQ ID NO: 22829 - DNA, 20 bp, synthetic construct
  source 1..20: mol_type = other DNA
gcaaattaaaaccacaatga

SEQ ID NO: 22830 - DNA, 20 bp, synthetic construct
  source 1..20: mol_type = other DNA
tgcaaattaaaaccacaatg

SEQ ID NO: 22831 - DNA, 20 bp, synthetic construct
  source 1..20: mol_type = other DNA
atgcaaattaaaaccacaat

SEQ ID NO: 22832 - DNA, 20 bp, synthetic construct
  source 1..20: mol_type = other DNA
aatgcaaattaaaaccacaa

SEQ ID NO: 22833 - DNA, 20 bp, synthetic construct
  source 1..20: mol_type = other DNA
aaatgcaaattaaaaccaca

SEQ ID NO: 22834 - DNA, 20 bp, synthetic construct
  source 1..20: mol_type = other DNA
gaaatgcaaattaaaaccac

SEQ ID NO: 22835 - DNA, 20 bp, synthetic construct
  source 1..20: mol_type = other DNA
ggaaatgcaaattaaaacca

SEQ ID NO: 22836 - DNA, 20 bp, synthetic construct
  source 1..20: mol_type = other DNA
gggaaatgcaaattaaaacc

SEQ ID NO: 22837 - DNA, 20 bp, synthetic construct
  source 1..20: mol_type = other DNA
agggaaatgcaaattaaaac

SEQ ID NO: 22838 - DNA, 20 bp, synthetic construct
  source 1..20: mol_type = other DNA
tagggaaatgcaaattaaaa

SEQ ID NO: 22839 - DNA, 20 bp, synthetic construct
  source 1..20: mol_type = other DNA
ttagggaaatgcaaattaaa

SEQ ID NO: 22840 - DNA, 20 bp, synthetic construct
  source 1..20: mol_type = other DNA
attagggaaatgcaaattaa

SEQ ID NO: 22841 - DNA, 20 bp, synthetic construct
  source 1..20: mol_type = other DNA
cattagggaaatgcaaatta

SEQ ID NO: 22842 - DNA, 20 bp, synthetic construct
  source 1..20: mol_type = other DNA
gcattagggaaatgcaaatt

SEQ ID NO: 22843 - DNA, 20 bp, synthetic construct
  source 1..20: mol_type = other DNA
ggcattagggaaatgcaaat

SEQ ID NO: 22844 - DNA, 20 bp, synthetic construct
  source 1..20: mol_type = other DNA
gggcattagggaaatgcaaa

SEQ ID NO: 22845 - DNA, 20 bp, synthetic construct
  source 1..20: mol_type = other DNA
tgggcattagggaaatgcaa

SEQ ID NO: 22846 - DNA, 20 bp, synthetic construct
  source 1..20: mol_type = other DNA
ctgggcattagggaaatgca

SEQ ID NO: 22847 - DNA, 20 bp, synthetic construct
  source 1..20: mol_type = other DNA
actgggcattagggaaatgc

SEQ ID NO: 22848 - DNA, 20 bp, synthetic construct
  source 1..20: mol_type = other DNA
cactgggcattagggaaatg

SEQ ID NO: 22849 - DNA, 20 bp, synthetic construct
  source 1..20: mol_type = other DNA
tcactgggcattagggaaat

SEQ ID NO: 22850 - DNA, 20 bp, synthetic construct
  source 1..20: mol_type = other DNA
atcactgggcattagggaaa

SEQ ID NO: 22851 - DNA, 20 bp, synthetic construct
  source 1..20: mol_type = other DNA
tatcactgggcattagggaa

SEQ ID NO: 22852 - DNA, 20 bp, synthetic construct
  source 1..20: mol_type = other DNA
atatcactgggcattaggga

SEQ ID NO: 22853 - DNA, 20 bp, synthetic construct
  source 1..20: mol_type = other DNA
aatatcactgggcattaggg

SEQ ID NO: 22854 - DNA, 20 bp, synthetic construct
  source 1..20: mol_type = other DNA
caatatcactgggcattagg

SEQ ID NO: 22855 - DNA, 20 bp, synthetic construct
  source 1..20: mol_type = other DNA
tcaatatcactgggcattag

SEQ ID NO: 22856 - DNA, 20 bp, synthetic construct
  source 1..20: mol_type = other DNA
ctcaatatcactgggcatta

SEQ ID NO: 22857 - DNA, 20 bp, synthetic construct
  source 1..20: mol_type = other DNA
gctcaatatcactgggcatt

SEQ ID NO: 22858 - DNA, 20 bp, synthetic construct
  source 1..20: mol_type = other DNA
tgctcaatatcactgggcat

SEQ ID NO: 22859 - DNA, 20 bp, synthetic construct
  source 1..20: mol_type = other DNA
atgctcaatatcactgggca

SEQ ID NO: 22860 - DNA, 20 bp, synthetic construct
  source 1..20: mol_type = other DNA
aatgctcaatatcactgggc

SEQ ID NO: 22861 - DNA, 20 bp, synthetic construct
  source 1..20: mol_type = other DNA
aaatgctcaatatcactggg

SEQ ID NO: 22862 - DNA, 20 bp, synthetic construct
  source 1..20: mol_type = other DNA
aaaatgctcaatatcactgg

SEQ ID NO: 22863 - DNA, 20 bp, synthetic construct
  source 1..20: mol_type = other DNA
aaaaatgctcaatatcactg

SEQ ID NO: 22864 - DNA, 20 bp, synthetic construct
  source 1..20: mol_type = other DNA
aaaaaatgctcaatatcact

SEQ ID NO: 22865 - DNA, 20 bp, synthetic construct
  source 1..20: mol_type = other DNA
gaaaaaatgctcaatatcac

SEQ ID NO: 22866 - DNA, 20 bp, synthetic construct
  source 1..20: mol_type = other DNA
tgaaaaaatgctcaatatca

SEQ ID NO: 22867 - DNA, 20 bp, synthetic construct
  source 1..20: mol_type = other DNA
atgaaaaaatgctcaatatc

SEQ ID NO: 22868 - DNA, 20 bp, synthetic construct
  source 1..20: mol_type = other DNA
catgaaaaaatgctcaatat

SEQ ID NO: 22869 - DNA, 20 bp, synthetic construct
  source 1..20: mol_type = other DNA
acatgaaaaaatgctcaata

SEQ ID NO: 22870 - DNA, 20 bp, synthetic construct
  source 1..20: mol_type = other DNA
cacatgaaaaaatgctcaat

SEQ ID NO: 22871 - DNA, 20 bp, synthetic construct
  source 1..20: mol_type = other DNA
acacatgaaaaaatgctcaa

SEQ ID NO: 22872 - DNA, 20 bp, synthetic construct
  source 1..20: mol_type = other DNA
aacacatgaaaaaatgctca

SEQ ID NO: 22873 - DNA, 20 bp, synthetic construct
  source 1..20: mol_type = other DNA
aaacacatgaaaaaatgctc

SEQ ID NO: 22874 - DNA, 20 bp, synthetic construct
  source 1..20: mol_type = other DNA
taaacacatgaaaaaatgct

SEQ ID NO: 22875 - DNA, 20 bp, synthetic construct
  source 1..20: mol_type = other DNA
ataaacacatgaaaaaatgc

SEQ ID NO: 22876 - DNA, 20 bp, synthetic construct
  source 1..20: mol_type = other DNA
aataaacacatgaaaaaatg

SEQ ID NO: 22877 - DNA, 20 bp, synthetic construct
  source 1..20: mol_type = other DNA
aaataaacacatgaaaaaat

SEQ ID NO: 22878 - DNA, 20 bp, synthetic construct
  source 1..20: mol_type = other DNA
caaataaacacatgaaaaaa

SEQ ID NO: 22879 - DNA, 20 bp, synthetic construct
  source 1..20: mol_type = other DNA
tcaaataaacacatgaaaaa

SEQ ID NO: 22880 - DNA, 20 bp, synthetic construct
  source 1..20: mol_type = other DNA
gtcaaataaacacatgaaaa

SEQ ID NO: 22881 - DNA, 20 bp, synthetic construct
  source 1..20: mol_type = other DNA
tgtcaaataaacacatgaaa

SEQ ID NO: 22882 - DNA, 20 bp, synthetic construct
  source 1..20: mol_type = other DNA
atgtcaaataaacacatgaa

SEQ ID NO: 22883 - DNA, 20 bp, synthetic construct
  source 1..20: mol_type = other DNA
aatgtcaaataaacacatga

SEQ ID NO: 22884 - DNA, 20 bp, synthetic construct
  source 1..20: mol_type = other DNA
gaatgtcaaataaacacatg

SEQ ID NO: 22885 - DNA, 20 bp, synthetic construct
  source 1..20: mol_type = other DNA
tgaatgtcaaataaacacat

SEQ ID NO: 22886 - DNA, 20 bp, synthetic construct
  source 1..20: mol_type = other DNA
atgaatgtcaaataaacaca

SEQ ID NO: 22887 - DNA, 20 bp, synthetic construct
  source 1..20: mol_type = other DNA
tatgaatgtcaaataaacac

SEQ ID NO: 22888 - DNA, 20 bp, synthetic construct
  source 1..20: mol_type = other DNA
gtatgaatgtcaaataaaca

SEQ ID NO: 22889 - DNA, 20 bp, synthetic construct
  source 1..20: mol_type = other DNA
ggtatgaatgtcaaataaac

SEQ ID NO: 22890 - DNA, 20 bp, synthetic construct
  source 1..20: mol_type = other DNA
tggtatgaatgtcaaataaa

SEQ ID NO: 22891 - DNA, 20 bp, synthetic construct
  source 1..20: mol_type = other DNA
atggtatgaatgtcaaataa

SEQ ID NO: 22892 - DNA, 20 bp, synthetic construct
  source 1..20: mol_type = other DNA
gatggtatgaatgtcaaata

SEQ ID NO: 22893 - DNA, 20 bp, synthetic construct
  source 1..20: mol_type = other DNA
agatggtatgaatgtcaaat

SEQ ID NO: 22894 - DNA, 20 bp, synthetic construct
  source 1..20: mol_type = other DNA
aagatggtatgaatgtcaaa

SEQ ID NO: 22895 - DNA, 20 bp, synthetic construct
  source 1..20: mol_type = other DNA
aaagatggtatgaatgtcaa

SEQ ID NO: 22896 - DNA, 20 bp, synthetic construct
  source 1..20: mol_type = other DNA
caaagatggtatgaatgtca

SEQ ID NO: 22897 - DNA, 20 bp, synthetic construct
  source 1..20: mol_type = other DNA
ccaaagatggtatgaatgtc

SEQ ID NO: 22898 - DNA, 20 bp, synthetic construct
  source 1..20: mol_type = other DNA
accaaagatggtatgaatgt

SEQ ID NO: 22899 - DNA, 20 bp, synthetic construct
  source 1..20: mol_type = other DNA
caccaaagatggtatgaatg

SEQ ID NO: 22900 - DNA, 20 bp, synthetic construct
  source 1..20: mol_type = other DNA
tcaccaaagatggtatgaat

SEQ ID NO: 22901 - DNA, 20 bp, synthetic construct
  source 1..20: mol_type = other DNA
atcaccaaagatggtatgaa

SEQ ID NO: 22902 - DNA, 20 bp, synthetic construct
  source 1..20: mol_type = other DNA
catcaccaaagatggtatga

SEQ ID NO: 22903 - DNA, 20 bp, synthetic construct
  source 1..20: mol_type = other DNA
tcatcaccaaagatggtatg

SEQ ID NO: 22904 - DNA, 20 bp, synthetic construct
  source 1..20: mol_type = other DNA
ctcatcaccaaagatggtat

SEQ ID NO: 22905 - DNA, 20 bp, synthetic construct
  source 1..20: mol_type = other DNA
tctcatcaccaaagatggta

SEQ ID NO: 22906 - DNA, 20 bp, synthetic construct
  source 1..20: mol_type = other DNA
ttctcatcaccaaagatggt

SEQ ID NO: 22907 - DNA, 20 bp, synthetic construct
  source 1..20: mol_type = other DNA
tttctcatcaccaaagatgg

SEQ ID NO: 22908 - DNA, 20 bp, synthetic construct
  source 1..20: mol_type = other DNA
gtttctcatcaccaaagatg

SEQ ID NO: 22909 - DNA, 20 bp, synthetic construct
  source 1..20: mol_type = other DNA
agtttctcatcaccaaagat

SEQ ID NO: 22910 - DNA, 20 bp, synthetic construct
  source 1..20: mol_type = other DNA
tagtttctcatcaccaaaga

SEQ ID NO: 22911 - DNA, 20 bp, synthetic construct
  source 1..20: mol_type = other DNA
atagtttctcatcaccaaag

SEQ ID NO: 22912 - DNA, 20 bp, synthetic construct
  source 1..20: mol_type = other DNA
catagtttctcatcaccaaa

SEQ ID NO: 22913 - DNA, 20 bp, synthetic construct
  source 1..20: mol_type = other DNA
acatagtttctcatcaccaa

SEQ ID NO: 22914 - DNA, 20 bp, synthetic construct
  source 1..20: mol_type = other DNA
aacatagtttctcatcacca

SEQ ID NO: 22915 - DNA, 20 bp, synthetic construct
  source 1..20: mol_type = other DNA
aaacatagtttctcatcacc

SEQ ID NO: 22916 - DNA, 20 bp, synthetic construct
  source 1..20: mol_type = other DNA
taaacatagtttctcatcac

SEQ ID NO: 22917 - DNA, 20 bp, synthetic construct
  source 1..20: mol_type = other DNA
ataaacatagtttctcatca

SEQ ID NO: 22918 - DNA, 20 bp, synthetic construct
  source 1..20: mol_type = other DNA
cataaacatagtttctcatc

SEQ ID NO: 22919 - DNA, 20 bp, synthetic construct
  source 1..20: mol_type = other DNA
gcataaacatagtttctcat

SEQ ID NO: 22920 - DNA, 20 bp, synthetic construct
  source 1..20: mol_type = other DNA
tgcataaacatagtttctca

SEQ ID NO: 22921 - DNA, 20 bp, synthetic construct
  source 1..20: mol_type = other DNA
atgcataaacatagtttctc

SEQ ID NO: 22922 - DNA, 20 bp, synthetic construct
  source 1..20: mol_type = other DNA
aatgcataaacatagtttct

SEQ ID NO: 22923 - DNA, 20 bp, synthetic construct
  source 1..20: mol_type = other DNA
caatgcataaacatagtttc

SEQ ID NO: 22924 - DNA, 20 bp, synthetic construct
  source 1..20: mol_type = other DNA
gcaatgcataaacatagttt

SEQ ID NO: 22925 - DNA, 20 bp, synthetic construct
  source 1..20: mol_type = other DNA
agcaatgcataaacatagtt

SEQ ID NO: 22926 - DNA, 20 bp, synthetic construct
  source 1..20: mol_type = other DNA
aagcaatgcataaacatagt

SEQ ID NO: 22927 - DNA, 20 bp, synthetic construct
  source 1..20: mol_type = other DNA
taagcaatgcataaacatag

SEQ ID NO: 22928 - DNA, 20 bp, synthetic construct
  source 1..20: mol_type = other DNA
ttaagcaatgcataaacata

SEQ ID NO: 22929 - DNA, 20 bp, synthetic construct
  source 1..20: mol_type = other DNA
attaagcaatgcataaacat

SEQ ID NO: 22930 - DNA, 20 bp, synthetic construct
  source 1..20: mol_type = other DNA
cattaagcaatgcataaaca

SEQ ID NO: 22931 - DNA, 20 bp, synthetic construct
  source 1..20: mol_type = other DNA
tcattaagcaatgcataaac

SEQ ID NO: 22932 - DNA, 20 bp, synthetic construct
  source 1..20: mol_type = other DNA
atcattaagcaatgcataaa

SEQ ID NO: 22933 - DNA, 20 bp, synthetic construct
  source 1..20: mol_type = other DNA
catcattaagcaatgcataa

SEQ ID NO: 22934 - DNA, 20 bp, synthetic construct
  source 1..20: mol_type = other DNA
ccatcattaagcaatgcata

SEQ ID NO: 22935 - DNA, 20 bp, synthetic construct
  source 1..20: mol_type = other DNA
cccatcattaagcaatgcat

SEQ ID NO: 22936 - DNA, 20 bp, synthetic construct
  source 1..20: mol_type = other DNA
ccccatcattaagcaatgca

SEQ ID NO: 22937 - DNA, 20 bp, synthetic construct
  source 1..20: mol_type = other DNA
tccccatcattaagcaatgc

SEQ ID NO: 22938 - DNA, 20 bp, synthetic construct
  source 1..20: mol_type = other DNA
atccccatcattaagcaatg

SEQ ID NO: 22939 - DNA, 20 bp, synthetic construct
  source 1..20: mol_type = other DNA
catccccatcattaagcaat

SEQ ID NO: 22940 - DNA, 20 bp, synthetic construct
  source 1..20: mol_type = other DNA
acatccccatcattaagcaa

SEQ ID NO: 22941 - DNA, 20 bp, synthetic construct
  source 1..20: mol_type = other DNA
cacatccccatcattaagca

SEQ ID NO: 22942 - DNA, 20 bp, synthetic construct
  source 1..20: mol_type = other DNA
acacatccccatcattaagc

SEQ ID NO: 22943 - DNA, 20 bp, synthetic construct
  source 1..20: mol_type = other DNA
aacacatccccatcattaag

SEQ ID NO: 22944 - DNA, 20 bp, synthetic construct
  source 1..20: mol_type = other DNA
aaacacatccccatcattaa

SEQ ID NO: 22945 - DNA, 20 bp, synthetic construct
  source 1..20: mol_type = other DNA
aaaacacatccccatcatta

SEQ ID NO: 22946 - DNA, 20 bp, synthetic construct
  source 1..20: mol_type = other DNA
caaaacacatccccatcatt

SEQ ID NO: 22947 - DNA, 20 bp, synthetic construct
  source 1..20: mol_type = other DNA
tcaaaacacatccccatcat

SEQ ID NO: 22948 - DNA, 20 bp, synthetic construct
  source 1..20: mol_type = other DNA
ctcaaaacacatccccatca

SEQ ID NO: 22949 - DNA, 20 bp, synthetic construct
  source 1..20: mol_type = other DNA
tctcaaaacacatccccatc

SEQ ID NO: 22950 - DNA, 20 bp, synthetic construct
  source 1..20: mol_type = other DNA
ttctcaaaacacatccccat

SEQ ID NO: 22951 - DNA, 20 bp, synthetic construct
  source 1..20: mol_type = other DNA
tttctcaaaacacatcccca

SEQ ID NO: 22952 - DNA, 20 bp, synthetic construct
  source 1..20: mol_type = other DNA
atttctcaaaacacatcccc

SEQ ID NO: 22953 - DNA, 20 bp, synthetic construct
  source 1..20: mol_type = other DNA
aatttctcaaaacacatccc

SEQ ID NO: 22954 - DNA, 20 bp, synthetic construct
  source 1..20: mol_type = other DNA
aaatttctcaaaacacatcc

SEQ ID NO: 22955 - DNA, 20 bp, synthetic construct
  source 1..20: mol_type = other DNA
aaaatttctcaaaacacatc

SEQ ID NO: 22956 - DNA, 20 bp, synthetic construct
  source 1..20: mol_type = other DNA
aaaaatttctcaaaacacat

SEQ ID NO: 22957 - DNA, 20 bp, synthetic construct
  source 1..20: mol_type = other DNA
aaaaaatttctcaaaacaca

SEQ ID NO: 22958 - DNA, 20 bp, synthetic construct
  source 1..20: mol_type = other DNA
gaaaaaatttctcaaaacac

SEQ ID NO: 22959 - DNA, 20 bp, synthetic construct
  source 1..20: mol_type = other DNA
cgaaaaaatttctcaaaaca

SEQ ID NO: 22960 - DNA, 20 bp, synthetic construct
  source 1..20: mol_type = other DNA
ccgaaaaaatttctcaaaac

SEQ ID NO: 22961 - DNA, 20 bp, synthetic construct
  source 1..20: mol_type = other DNA
accgaaaaaatttctcaaaa

SEQ ID NO: 22962 - DNA, 20 bp, synthetic construct
  source 1..20: mol_type = other DNA
caccgaaaaaatttctcaaa

SEQ ID NO: 22963 - DNA, 20 bp, synthetic construct
  source 1..20: mol_type = other DNA
tcaccgaaaaaatttctcaa

SEQ ID NO: 22964 - DNA, 20 bp, synthetic construct
  source 1..20: mol_type = other DNA
atcaccgaaaaaatttctca

SEQ ID NO: 22965 - DNA, 20 bp, synthetic construct
  source 1..20: mol_type = other DNA
gatcaccgaaaaaatttctc

SEQ ID NO: 22966 - DNA, 20 bp, synthetic construct
  source 1..20: mol_type = other DNA
agatcaccgaaaaaatttct

SEQ ID NO: 22967 - DNA, 20 bp, synthetic construct
  source 1..20: mol_type = other DNA
aagatcaccgaaaaaatttc

SEQ ID NO: 22968 - DNA, 20 bp, synthetic construct
  source 1..20: mol_type = other DNA
taagatcaccgaaaaaattt

SEQ ID NO: 22969 - DNA, 20 bp, synthetic construct
  source 1..20: mol_type = other DNA
ataagatcaccgaaaaaatt

SEQ ID NO: 22970 - DNA, 20 bp, synthetic construct
  source 1..20: mol_type = other DNA
gataagatcaccgaaaaaat

SEQ ID NO: 22971 - DNA, 20 bp, synthetic construct
  source 1..20: mol_type = other DNA
tgataagatcaccgaaaaaa

SEQ ID NO: 22972 - DNA, 20 bp, synthetic construct
  source 1..20: mol_type = other DNA
atgataagatcaccgaaaaa

SEQ ID NO: 22973 - DNA, 20 bp, synthetic construct
  source 1..20: mol_type = other DNA
aatgataagatcaccgaaaa

SEQ ID NO: 22974 - DNA, 20 bp, synthetic construct
  source 1..20: mol_type = other DNA
caatgataagatcaccgaaa

SEQ ID NO: 22975 - DNA, 20 bp, synthetic construct
  source 1..20: mol_type = other DNA
acaatgataagatcaccgaa

SEQ ID NO: 22976 - DNA, 20 bp, synthetic construct
  source 1..20: mol_type = other DNA
tacaatgataagatcaccga

SEQ ID NO: 22977 - DNA, 20 bp, synthetic construct
  source 1..20: mol_type = other DNA
gtacaatgataagatcaccg

SEQ ID NO: 22978 - DNA, 20 bp, synthetic construct
  source 1..20: mol_type = other DNA
tgtacaatgataagatcacc

SEQ ID NO: 22979 - DNA, 20 bp, synthetic construct
  source 1..20: mol_type = other DNA
ttgtacaatgataagatcac

SEQ ID NO: 22980 - DNA, 20 bp, synthetic construct
  source 1..20: mol_type = other DNA
tttgtacaatgataagatca

SEQ ID NO: 22981 - DNA, 20 bp, synthetic construct
  source 1..20: mol_type = other DNA
atttgtacaatgataagatc

SEQ ID NO: 22982 - DNA, 20 bp, synthetic construct
  source 1..20: mol_type = other DNA
tatttgtacaatgataagat

SEQ ID NO: 22983 - DNA, 20 bp, synthetic construct
  source 1..20: mol_type = other DNA
atatttgtacaatgataaga

SEQ ID NO: 22984 - DNA, 20 bp, synthetic construct
  source 1..20: mol_type = other DNA
tatatttgtacaatgataag

SEQ ID NO: 22985 - DNA, 20 bp, synthetic construct
  source 1..20: mol_type = other DNA
ctatatttgtacaatgataa

SEQ ID NO: 22986 - DNA, 20 bp, synthetic construct
  source 1..20: mol_type = other DNA
tctatatttgtacaatgata

SEQ ID NO: 22987 - DNA, 20 bp, synthetic construct
  source 1..20: mol_type = other DNA
ctctatatttgtacaatgat

SEQ ID NO: 22988 - DNA, 20 bp, synthetic construct
  source 1..20: mol_type = other DNA
actctatatttgtacaatga

SEQ ID NO: 22989 - DNA, 20 bp, synthetic construct
  source 1..20: mol_type = other DNA
aactctatatttgtacaatg

SEQ ID NO: 22990 - DNA, 20 bp, synthetic construct
  source 1..20: mol_type = other DNA
aaactctatatttgtacaat

SEQ ID NO: 22991 - DNA, 20 bp, synthetic construct
  source 1..20: mol_type = other DNA
taaactctatatttgtacaa

SEQ ID NO: 22992 - DNA, 20 bp, synthetic construct
  source 1..20: mol_type = other DNA
gtaaactctatatttgtaca

SEQ ID NO: 22993 - DNA, 20 bp, synthetic construct
  source 1..20: mol_type = other DNA
agtaaactctatatttgtac

SEQ ID NO: 22994 - DNA, 20 bp, synthetic construct
  source 1..20: mol_type = other DNA
aagtaaactctatatttgta

SEQ ID NO: 22995 - DNA, 20 bp, synthetic construct
  source 1..20: mol_type = other DNA
taagtaaactctatatttgt

SEQ ID NO: 22996 - DNA, 20 bp, synthetic construct
  source 1..20: mol_type = other DNA
gtaagtaaactctatatttg

SEQ ID NO: 22997 - DNA, 20 bp, synthetic construct
  source 1..20: mol_type = other DNA
tgtaagtaaactctatattt

SEQ ID NO: 22998 - DNA, 20 bp, synthetic construct
  source 1..20: mol_type = other DNA
gtgtaagtaaactctatatt

SEQ ID NO: 22999 - DNA, 20 bp, synthetic construct
  source 1..20: mol_type = other DNA
tgtgtaagtaaactctatat

SEQ ID NO: 23000 - DNA, 20 bp, synthetic construct
  source 1..20: mol_type = other DNA
ttgtgtaagtaaactctata

SEQ ID NO: 23001 - DNA, 20 bp, synthetic construct
  source 1..20: mol_type = other DNA
cttgtgtaagtaaactctat

SEQ ID NO: 23002 - DNA, 20 bp, synthetic construct
  source 1..20: mol_type = other DNA
gcttgtgtaagtaaactcta

SEQ ID NO: 23003 - DNA, 20 bp, synthetic construct
  source 1..20: mol_type = other DNA
ggcttgtgtaagtaaactct

SEQ ID NO: 23004 - DNA, 20 bp, synthetic construct
  source 1..20: mol_type = other DNA
aggcttgtgtaagtaaactc

SEQ ID NO: 23005 - DNA, 20 bp, synthetic construct
  source 1..20: mol_type = other DNA
taggcttgtgtaagtaaact

SEQ ID NO: 23006 - DNA, 20 bp, synthetic construct
  source 1..20: mol_type = other DNA
ctaggcttgtgtaagtaaac

SEQ ID NO: 23007 - DNA, 20 bp, synthetic construct
  source 1..20: mol_type = other DNA
tctaggcttgtgtaagtaaa

SEQ ID NO: 23008 - DNA, 20 bp, synthetic construct
  source 1..20: mol_type = other DNA
atctaggcttgtgtaagtaa

SEQ ID NO: 23009 - DNA, 20 bp, synthetic construct
  source 1..20: mol_type = other DNA
catctaggcttgtgtaagta

SEQ ID NO: 23010 - DNA, 20 bp, synthetic construct
  source 1..20: mol_type = other DNA
ccatctaggcttgtgtaagt

SEQ ID NO: 23011 - DNA, 20 bp, synthetic construct
  source 1..20: mol_type = other DNA
accatctaggcttgtgtaag

SEQ ID NO: 23012 - DNA, 20 bp, synthetic construct
  source 1..20: mol_type = other DNA
taccatctaggcttgtgtaa

SEQ ID NO: 23013 - DNA, 20 bp, synthetic construct
  source 1..20: mol_type = other DNA
ataccatctaggcttgtgta

SEQ ID NO: 23014 - DNA, 20 bp, synthetic construct
  source 1..20: mol_type = other DNA
tataccatctaggcttgtgt

SEQ ID NO: 23015 - DNA, 20 bp, synthetic construct
  source 1..20: mol_type = other DNA
gtataccatctaggcttgtg

SEQ ID NO: 23016 - DNA, 20 bp, synthetic construct
  source 1..20: mol_type = other DNA
ggtataccatctaggcttgt

SEQ ID NO: 23017 - DNA, 20 bp, synthetic construct
  source 1..20: mol_type = other DNA
aggtataccatctaggcttg

SEQ ID NO: 23018 - DNA, 20 bp, synthetic construct
  source 1..20: mol_type = other DNA
taggtataccatctaggctt

SEQ ID NO: 23019 - DNA, 20 bp, synthetic construct
  source 1..20: mol_type = other DNA
gtaggtataccatctaggct

SEQ ID NO: 23020 - DNA, 20 bp, synthetic construct
  source 1..20: mol_type = other DNA
agtaggtataccatctaggc

SEQ ID NO: 23021 - DNA, 20 bp, synthetic construct
  source 1..20: mol_type = other DNA
tagtaggtataccatctagg

SEQ ID NO: 23022 - DNA, 20 bp, synthetic construct
  source 1..20: mol_type = other DNA
ctagtaggtataccatctag

SEQ ID NO: 23023 - DNA, 20 bp, synthetic construct
  source 1..20: mol_type = other DNA
tctagtaggtataccatcta

SEQ ID NO: 23024 - DNA, 20 bp, synthetic construct
  source 1..20: mol_type = other DNA
gtctagtaggtataccatct

SEQ ID NO: 23025 - DNA, 20 bp, synthetic construct
  source 1..20: mol_type = other DNA
tgtctagtaggtataccatc

SEQ ID NO: 23026 - DNA, 20 bp, synthetic construct
  source 1..20: mol_type = other DNA
gtgtctagtaggtataccat

SEQ ID NO: 23027 - DNA, 20 bp, synthetic construct
  source 1..20: mol_type = other DNA
tgtgtctagtaggtatacca

SEQ ID NO: 23028 - DNA, 20 bp, synthetic construct
  source 1..20: mol_type = other DNA
atgtgtctagtaggtatacc

SEQ ID NO: 23029 - DNA, 20 bp, synthetic construct
  source 1..20: mol_type = other DNA
tatgtgtctagtaggtatac

SEQ ID NO: 23030 - DNA, 20 bp, synthetic construct
  source 1..20: mol_type = other DNA
ctatgtgtctagtaggtata

SEQ ID NO: 23031 - DNA, 20 bp, synthetic construct
  source 1..20: mol_type = other DNA
cctatgtgtctagtaggtat

SEQ ID NO: 23032 - DNA, 20 bp, synthetic construct
  source 1..20: mol_type = other DNA
gcctatgtgtctagtaggta

SEQ ID NO: 23033 - DNA, 20 bp, synthetic construct
  source 1..20: mol_type = other DNA
agcctatgtgtctagtaggt

SEQ ID NO: 23034 - DNA, 20 bp, synthetic construct
  source 1..20: mol_type = other DNA
cagcctatgtgtctagtagg

SEQ ID NO: 23035 - DNA, 20 bp, synthetic construct
  source 1..20: mol_type = other DNA
acagcctatgtgtctagtag

SEQ ID NO: 23036 - DNA, 20 bp, synthetic construct
  source 1..20: mol_type = other DNA
gacagcctatgtgtctagta

SEQ ID NO: 23037 - DNA, 20 bp, synthetic construct
  source 1..20: mol_type = other DNA
cgacagcctatgtgtctagt

SEQ ID NO: 23038 - DNA, 20 bp, synthetic construct
  source 1..20: mol_type = other DNA
acgacagcctatgtgtctag

SEQ ID NO: 23039 - DNA, 20 bp, synthetic construct
  source 1..20: mol_type = other DNA
tacgacagcctatgtgtcta

SEQ ID NO: 23040 - DNA, 20 bp, synthetic construct
  source 1..20: mol_type = other DNA
gtacgacagcctatgtgtct

SEQ ID NO: 23041 - DNA, 20 bp, synthetic construct
  source 1..20: mol_type = other DNA
tgtacgacagcctatgtgtc

SEQ ID NO: 23042 - DNA, 20 bp, synthetic construct
  source 1..20: mol_type = other DNA
ctgtacgacagcctatgtgt

SEQ ID NO: 23043 - DNA, 20 bp, synthetic construct
  source 1..20: mol_type = other DNA
tctgtacgacagcctatgtg

SEQ ID NO: 23044 - DNA, 20 bp, synthetic construct
  source 1..20: mol_type = other DNA
ctctgtacgacagcctatgt

SEQ ID NO: 23045 - DNA, 20 bp, synthetic construct
  source 1..20: mol_type = other DNA
actctgtacgacagcctatg

SEQ ID NO: 23046 - DNA, 20 bp, synthetic construct
  source 1..20: mol_type = other DNA
tactctgtacgacagcctat

SEQ ID NO: 23047 - DNA, 20 bp, synthetic construct
  source 1..20: mol_type = other DNA
atactctgtacgacagccta

SEQ ID NO: 23048 - DNA, 20 bp, synthetic construct
  source 1..20: mol_type = other DNA
aatactctgtacgacagcct

SEQ ID NO: 23049 - DNA, 20 bp, synthetic construct
  source 1..20: mol_type = other DNA
taatactctgtacgacagcc

SEQ ID NO: 23050 - DNA, 20 bp, synthetic construct
  source 1..20: mol_type = other DNA
gtaatactctgtacgacagc

SEQ ID NO: 23051 - DNA, 20 bp, synthetic construct
  source 1..20: mol_type = other DNA
agtaatactctgtacgacag

SEQ ID NO: 23052 - DNA, 20 bp, synthetic construct
  source 1..20: mol_type = other DNA
gagtaatactctgtacgaca

SEQ ID NO: 23053 - DNA, 20 bp, synthetic construct
  source 1..20: mol_type = other DNA
agagtaatactctgtacgac

SEQ ID NO: 23054 - DNA, 20 bp, synthetic construct
  source 1..20: mol_type = other DNA
aagagtaatactctgtacga

SEQ ID NO: 23055 - DNA, 20 bp, synthetic construct
  source 1..20: mol_type = other DNA
taagagtaatactctgtacg

SEQ ID NO: 23056 - DNA, 20 bp, synthetic construct
  source 1..20: mol_type = other DNA
ctaagagtaatactctgtac

SEQ ID NO: 23057 - DNA, 20 bp, synthetic construct
  source 1..20: mol_type = other DNA
cctaagagtaatactctgta

SEQ ID NO: 23058 - DNA, 20 bp, synthetic construct
  source 1..20: mol_type = other DNA
gcctaagagtaatactctgt

SEQ ID NO: 23059 - DNA, 20 bp, synthetic construct
  source 1..20: mol_type = other DNA
agcctaagagtaatactctg

SEQ ID NO: 23060 - DNA, 20 bp, synthetic construct
  source 1..20: mol_type = other DNA
tagcctaagagtaatactct

SEQ ID NO: 23061 - DNA, 20 bp, synthetic construct
  source 1..20: mol_type = other DNA
gtagcctaagagtaatactc

SEQ ID NO: 23062 - DNA, 20 bp, synthetic construct
  source 1..20: mol_type = other DNA
tgtagcctaagagtaatact

SEQ ID NO: 23063 - DNA, 20 bp, synthetic construct
  source 1..20: mol_type = other DNA
ttgtagcctaagagtaatac

SEQ ID NO: 23064 - DNA, 20 bp, synthetic construct
  source 1..20: mol_type = other DNA
tttgtagcctaagagtaata

SEQ ID NO: 23065 - DNA, 20 bp, synthetic construct
  source 1..20: mol_type = other DNA
atttgtagcctaagagtaat

SEQ ID NO: 23066 - DNA, 20 bp, synthetic construct
  source 1..20: mol_type = other DNA
gatttgtagcctaagagtaa

SEQ ID NO: 23067 - DNA, 20 bp, synthetic construct
  source 1..20: mol_type = other DNA
agatttgtagcctaagagta

SEQ ID NO: 23068 - DNA, 20 bp, synthetic construct
  source 1..20: mol_type = other DNA
cagatttgtagcctaagagt

SEQ ID NO: 23069 - DNA, 20 bp, synthetic construct
  source 1..20: mol_type = other DNA
acagatttgtagcctaagag

SEQ ID NO: 23070 - DNA, 20 bp, synthetic construct
  source 1..20: mol_type = other DNA
tacagatttgtagcctaaga

SEQ ID NO: 23071 - DNA, 20 bp, synthetic construct
  source 1..20: mol_type = other DNA
atacagatttgtagcctaag

SEQ ID NO: 23072 - DNA, 20 bp, synthetic construct
  source 1..20: mol_type = other DNA
tatacagatttgtagcctaa

SEQ ID NO: 23073 - DNA, 20 bp, synthetic construct
  source 1..20: mol_type = other DNA
ctatacagatttgtagccta

SEQ ID NO: 23074 - DNA, 20 bp, synthetic construct
  source 1..20: mol_type = other DNA
gctatacagatttgtagcct

SEQ ID NO: 23075 - DNA, 20 bp, synthetic construct
  source 1..20: mol_type = other DNA
tgctatacagatttgtagcc

SEQ ID NO: 23076 - DNA, 20 bp, synthetic construct
  source 1..20: mol_type = other DNA
atgctatacagatttgtagc

SEQ ID NO: 23077 - DNA, 20 bp, synthetic construct
  source 1..20: mol_type = other DNA
catgctatacagatttgtag

SEQ ID NO: 23078 - DNA, 20 bp, synthetic construct
  source 1..20: mol_type = other DNA
acatgctatacagatttgta

SEQ ID NO: 23079 - DNA, 20 bp, synthetic construct
  source 1..20: mol_type = other DNA
aacatgctatacagatttgt

SEQ ID NO: 23080 - DNA, 20 bp, synthetic construct
  source 1..20: mol_type = other DNA
caacatgctatacagatttg

SEQ ID NO: 23081 - DNA, 20 bp, synthetic construct
  source 1..20: mol_type = other DNA
gcaacatgctatacagattt

SEQ ID NO: 23082 - DNA, 20 bp, synthetic construct
  source 1..20: mol_type = other DNA
cgcaacatgctatacagatt

SEQ ID NO: 23083 - DNA, 20 bp, synthetic construct
  source 1..20: mol_type = other DNA
ccgcaacatgctatacagat

SEQ ID NO: 23084 - DNA, 20 bp, synthetic construct
  source 1..20: mol_type = other DNA
accgcaacatgctatacaga

SEQ ID NO: 23085 - DNA, 20 bp, synthetic construct
  source 1..20: mol_type = other DNA
taccgcaacatgctatacag

SEQ ID NO: 23086 - DNA, 20 bp, synthetic construct
  source 1..20: mol_type = other DNA
gtaccgcaacatgctataca

SEQ ID NO: 23087 - DNA, 20 bp, synthetic construct
  source 1..20: mol_type = other DNA
agtaccgcaacatgctatac

SEQ ID NO: 23088 - DNA, 20 bp, synthetic construct
  source 1..20: mol_type = other DNA
cagtaccgcaacatgctata

SEQ ID NO: 23089 - DNA, 20 bp, synthetic construct
  source 1..20: mol_type = other DNA
tcagtaccgcaacatgctat

SEQ ID NO: 23090 - DNA, 20 bp, synthetic construct
  source 1..20: mol_type = other DNA
ttcagtaccgcaacatgcta

SEQ ID NO: 23091 - DNA, 20 bp, synthetic construct
  source 1..20: mol_type = other DNA
gttcagtaccgcaacatgct

SEQ ID NO: 23092 - DNA, 20 bp, synthetic construct
  source 1..20: mol_type = other DNA
tgttcagtaccgcaacatgc

SEQ ID NO: 23093 - DNA, 20 bp, synthetic construct
  source 1..20: mol_type = other DNA
gtgttcagtaccgcaacatg

SEQ ID NO: 23094 - DNA, 20 bp, synthetic construct
  source 1..20: mol_type = other DNA
agtgttcagtaccgcaacat

SEQ ID NO: 23095 - DNA, 20 bp, synthetic construct
  source 1..20: mol_type = other DNA
cagtgttcagtaccgcaaca

SEQ ID NO: 23096 - DNA, 20 bp, synthetic construct
  source 1..20: mol_type = other DNA
acagtgttcagtaccgcaac

SEQ ID NO: 23097 - DNA, 20 bp, synthetic construct
  source 1..20: mol_type = other DNA
aacagtgttcagtaccgcaa

SEQ ID NO: 23098 - DNA, 20 bp, synthetic construct
  source 1..20: mol_type = other DNA
caacagtgttcagtaccgca

SEQ ID NO: 23099 - DNA, 20 bp, synthetic construct
  source 1..20: mol_type = other DNA
ccaacagtgttcagtaccgc

SEQ ID NO: 23100 - DNA, 20 bp, synthetic construct
  source 1..20: mol_type = other DNA
gccaacagtgttcagtaccg

SEQ ID NO: 23101 - DNA, 20 bp, synthetic construct
  source 1..20: mol_type = other DNA
tgccaacagtgttcagtacc

SEQ ID NO: 23102 - DNA, 20 bp, synthetic construct
  source 1..20: mol_type = other DNA
ctgccaacagtgttcagtac

SEQ ID NO: 23103 - DNA, 20 bp, synthetic construct
  source 1..20: mol_type = other DNA
tctgccaacagtgttcagta

SEQ ID NO: 23104 - DNA, 20 bp, synthetic construct
  source 1..20: mol_type = other DNA
atctgccaacagtgttcagt

SEQ ID NO: 23105 - DNA, 20 bp, synthetic construct
  source 1..20: mol_type = other DNA
catctgccaacagtgttcag

SEQ ID NO: 23106 - DNA, 20 bp, synthetic construct
  source 1..20: mol_type = other DNA
acatctgccaacagtgttca

SEQ ID NO: 23107 - DNA, 20 bp, synthetic construct
  source 1..20: mol_type = other DNA
tacatctgccaacagtgttc

SEQ ID NO: 23108 - DNA, 20 bp, synthetic construct
  source 1..20: mol_type = other DNA
ttacatctgccaacagtgtt

SEQ ID NO: 23109 - DNA, 20 bp, synthetic construct
  source 1..20: mol_type = other DNA
gttacatctgccaacagtgt

SEQ ID NO: 23110 - DNA, 20 bp, synthetic construct
  source 1..20: mol_type = other DNA
tgttacatctgccaacagtg

SEQ ID NO: 23111 - DNA, 20 bp, synthetic construct
  source 1..20: mol_type = other DNA
atgttacatctgccaacagt

SEQ ID NO: 23112 - DNA, 20 bp, synthetic construct
  source 1..20: mol_type = other DNA
tatgttacatctgccaacag

SEQ ID NO: 23113 - DNA, 20 bp, synthetic construct
  source 1..20: mol_type = other DNA
ttatgttacatctgccaaca

SEQ ID NO: 23114 - DNA, 20 bp, synthetic construct
  source 1..20: mol_type = other DNA
attatgttacatctgccaac

SEQ ID NO: 23115 - DNA, 20 bp, synthetic construct
  source 1..20: mol_type = other DNA
cattatgttacatctgccaa

SEQ ID NO: 23116 - DNA, 20 bp, synthetic construct
  source 1..20: mol_type = other DNA
acattatgttacatctgcca

SEQ ID NO: 23117 - DNA, 20 bp, synthetic construct
  source 1..20: mol_type = other DNA
aacattatgttacatctgcc

SEQ ID NO: 23118 - DNA, 20 bp, synthetic construct
  source 1..20: mol_type = other DNA
taacattatgttacatctgc

SEQ ID NO: 23119 - DNA, 20 bp, synthetic construct
  source 1..20: mol_type = other DNA
ttaacattatgttacatctg

SEQ ID NO: 23120 - DNA, 20 bp, synthetic construct
  source 1..20: mol_type = other DNA
cttaacattatgttacatct

SEQ ID NO: 23121 - DNA, 20 bp, synthetic construct
  source 1..20: mol_type = other DNA
acttaacattatgttacatc

SEQ ID NO: 23122 - DNA, 20 bp, synthetic construct
  source 1..20: mol_type = other DNA
tacttaacattatgttacat

SEQ ID NO: 23123 - DNA, 20 bp, synthetic construct
  source 1..20: mol_type = other DNA
atacttaacattatgttaca

SEQ ID NO: 23124 - DNA, 20 bp, synthetic construct
  source 1..20: mol_type = other DNA
aatacttaacattatgttac

SEQ ID NO: 23125 - DNA, 20 bp, synthetic construct
  source 1..20: mol_type = other DNA
aaatacttaacattatgtta

SEQ ID NO: 23126 - DNA, 20 bp, synthetic construct
  source 1..20: mol_type = other DNA
caaatacttaacattatgtt

SEQ ID NO: 23127 - DNA, 20 bp, synthetic construct
  source 1..20: mol_type = other DNA
acaaatacttaacattatgt

SEQ ID NO: 23128 - DNA, 20 bp, synthetic construct
  source 1..20: mol_type = other DNA
cacaaatacttaacattatg

SEQ ID NO: 23129 - DNA, 20 bp, synthetic construct
  source 1..20: mol_type = other DNA
tcacaaatacttaacattat

SEQ ID NO: 23130 - DNA, 20 bp, synthetic construct
  source 1..20: mol_type = other DNA
ttcacaaatacttaacatta

SEQ ID NO: 23131 - DNA, 20 bp, synthetic construct
  source 1..20: mol_type = other DNA
attcacaaatacttaacatt

SEQ ID NO: 23132 - DNA, 20 bp, synthetic construct
  source 1..20: mol_type = other DNA
gattcacaaatacttaacat

SEQ ID NO: 23133 - DNA, 20 bp, synthetic construct
  source 1..20: mol_type = other DNA
agattcacaaatacttaaca

SEQ ID NO: 23134 - DNA, 20 bp, synthetic construct
  source 1..20: mol_type = other DNA
tagattcacaaatacttaac

SEQ ID NO: 23135 - DNA, 20 bp, synthetic construct
  source 1..20: mol_type = other DNA
ttagattcacaaatacttaa

SEQ ID NO: 23136 - DNA, 20 bp, synthetic construct
  source 1..20: mol_type = other DNA
tttagattcacaaatactta

SEQ ID NO: 23137 - DNA, 20 bp, synthetic construct
  source 1..20: mol_type = other DNA
gtttagattcacaaatactt

SEQ ID NO: 23138 - DNA, 20 bp, synthetic construct
  source 1..20: mol_type = other DNA
tgtttagattcacaaatact

SEQ ID NO: 23139 - DNA, 20 bp, synthetic construct
  source 1..20: mol_type = other DNA
atgtttagattcacaaatac

SEQ ID NO: 23140 - DNA, 20 bp, synthetic construct
  source 1..20: mol_type = other DNA
tatgtttagattcacaaata

SEQ ID NO: 23141 - DNA, 20 bp, synthetic construct
  source 1..20: mol_type = other DNA
atatgtttagattcacaaat

SEQ ID NO: 23142 - DNA, 20 bp, synthetic construct
  source 1..20: mol_type = other DNA
gatatgtttagattcacaaa

SEQ ID NO: 23143 - DNA, 20 bp, synthetic construct
  source 1..20: mol_type = other DNA
agatatgtttagattcacaa

SEQ ID NO: 23144 - DNA, 20 bp, synthetic construct
  source 1..20: mol_type = other DNA
tagatatgtttagattcaca

SEQ ID NO: 23145 - DNA, 20 bp, synthetic construct
  source 1..20: mol_type = other DNA
ttagatatgtttagattcac

SEQ ID NO: 23146 - DNA, 20 bp, synthetic construct
  source 1..20: mol_type = other DNA
tttagatatgtttagattca

SEQ ID NO: 23147 - DNA, 20 bp, synthetic construct
  source 1..20: mol_type = other DNA
gtttagatatgtttagattc

SEQ ID NO: 23148 - DNA, 20 bp, synthetic construct
  source 1..20: mol_type = other DNA
tgtttagatatgtttagatt

SEQ ID NO: 23149 - DNA, 20 bp, synthetic construct
  source 1..20: mol_type = other DNA
atgtttagatatgtttagat

SEQ ID NO: 23150 - DNA, 20 bp, synthetic construct
  source 1..20: mol_type = other DNA
tatgtttagatatgtttaga

SEQ ID NO: 23151 - DNA, 20 bp, synthetic construct
  source 1..20: mol_type = other DNA
ctatgtttagatatgtttag

SEQ ID NO: 23152 - DNA, 20 bp, synthetic construct
  source 1..20: mol_type = other DNA
tctatgtttagatatgttta

SEQ ID NO: 23153 - DNA, 20 bp, synthetic construct
  source 1..20: mol_type = other DNA
ttctatgtttagatatgttt

SEQ ID NO: 23154 - DNA, 20 bp, synthetic construct
  source 1..20: mol_type = other DNA
tttctatgtttagatatgtt

SEQ ID NO: 23155 - DNA, 20 bp, synthetic construct
  source 1..20: mol_type = other DNA
ttttctatgtttagatatgt

SEQ ID NO: 23156 - DNA, 20 bp, synthetic construct
  source 1..20: mol_type = other DNA
cttttctatgtttagatatg

SEQ ID NO: 23157 - DNA, 20 bp, synthetic construct
  source 1..20: mol_type = other DNA
ccttttctatgtttagatat

SEQ ID NO: 23158 - DNA, 20 bp, synthetic construct
  source 1..20: mol_type = other DNA
accttttctatgtttagata

SEQ ID NO: 23159 - DNA, 20 bp, synthetic construct
  source 1..20: mol_type = other DNA
caccttttctatgtttagat

SEQ ID NO: 23160 - DNA, 20 bp, synthetic construct
  source 1..20: mol_type = other DNA
tcaccttttctatgtttaga

SEQ ID NO: 23161 - DNA, 20 bp, synthetic construct
  source 1..20: mol_type = other DNA
ctcaccttttctatgtttag

SEQ ID NO: 23162 - DNA, 20 bp, synthetic construct
  source 1..20: mol_type = other DNA
actcaccttttctatgttta

SEQ ID NO: 23163 - DNA, 20 bp, synthetic construct
  source 1..20: mol_type = other DNA
tactcaccttttctatgttt

SEQ ID NO: 23164 - DNA, 20 bp, synthetic construct
  source 1..20: mol_type = other DNA
ttactcaccttttctatgtt

SEQ ID NO: 23165 - DNA, 20 bp, synthetic construct
  source 1..20: mol_type = other DNA
tttactcaccttttctatgt

SEQ ID NO: 23166 - DNA, 20 bp, synthetic construct
  source 1..20: mol_type = other DNA
ttttactcaccttttctatg

SEQ ID NO: 23167 - DNA, 20 bp, synthetic construct
  source 1..20: mol_type = other DNA
tttttactcaccttttctat

SEQ ID NO: 23168 - DNA, 20 bp, synthetic construct
  source 1..20: mol_type = other DNA
atttttactcaccttttcta

SEQ ID NO: 23169 - DNA, 20 bp, synthetic construct
  source 1..20: mol_type = other DNA
tatttttactcaccttttct

SEQ ID NO: 23170 - DNA, 20 bp, synthetic construct
  source 1..20: mol_type = other DNA
gtatttttactcaccttttc

SEQ ID NO: 23171 - DNA, 20 bp, synthetic construct
  source 1..20: mol_type = other DNA
tgtatttttactcacctttt

SEQ ID NO: 23172 - DNA, 20 bp, synthetic construct
  source 1..20: mol_type = other DNA
ctgtatttttactcaccttt

SEQ ID NO: 23173 - DNA, 20 bp, synthetic construct
  source 1..20: mol_type = other DNA
gctgtatttttactcacctt

SEQ ID NO: 23174 - DNA, 20 bp, synthetic construct
  source 1..20: mol_type = other DNA
cgctgtatttttactcacct

SEQ ID NO: 23175 - DNA, 20 bp, synthetic construct
  source 1..20: mol_type = other DNA
acgctgtatttttactcacc

SEQ ID NO: 23176 - DNA, 20 bp, synthetic construct
  source 1..20: mol_type = other DNA
tacgctgtatttttactcac

SEQ ID NO: 23177 - DNA, 20 bp, synthetic construct
  source 1..20: mol_type = other DNA
ttacgctgtatttttactca

SEQ ID NO: 23178 - DNA, 20 bp, synthetic construct
  source 1..20: mol_type = other DNA
tttacgctgtatttttactc

SEQ ID NO: 23179 - DNA, 20 bp, synthetic construct
  source 1..20: mol_type = other DNA
ttttacgctgtatttttact

SEQ ID NO: 23180 - DNA, 20 bp, synthetic construct
  source 1..20: mol_type = other DNA
cttttacgctgtatttttac

SEQ ID NO: 23181 - DNA, 20 bp, synthetic construct
  source 1..20: mol_type = other DNA
tcttttacgctgtattttta

SEQ ID NO: 23182 - DNA, 20 bp, synthetic construct
  source 1..20: mol_type = other DNA
atcttttacgctgtattttt

SEQ ID NO: 23183 - DNA, 20 bp, synthetic construct
  source 1..20: mol_type = other DNA
tatcttttacgctgtatttt

SEQ ID NO: 23184 - DNA, 20 bp, synthetic construct
  source 1..20: mol_type = other DNA
ttatcttttacgctgtattt

SEQ ID NO: 23185 - DNA, 20 bp, synthetic construct
  source 1..20: mol_type = other DNA
tttatcttttacgctgtatt

SEQ ID NO: 23186 - DNA, 20 bp, synthetic construct
  source 1..20: mol_type = other DNA
ttttatcttttacgctgtat

SEQ ID NO: 23187 - DNA, 20 bp, synthetic construct
  source 1..20: mol_type = other DNA
cttttatcttttacgctgta

SEQ ID NO: 23188 - DNA, 20 bp, synthetic construct
  source 1..20: mol_type = other DNA
acttttatcttttacgctgt

SEQ ID NO: 23189 - DNA, 20 bp, synthetic construct
  source 1..20: mol_type = other DNA
cacttttatcttttacgctg

SEQ ID NO: 23190 - DNA, 20 bp, synthetic construct
  source 1..20: mol_type = other DNA
ccacttttatcttttacgct

SEQ ID NO: 23191 - DNA, 20 bp, synthetic construct
  source 1..20: mol_type = other DNA
accacttttatcttttacgc

SEQ ID NO: 23192 - DNA, 20 bp, synthetic construct
  source 1..20: mol_type = other DNA
taccacttttatcttttacg

SEQ ID NO: 23193 - DNA, 20 bp, synthetic construct
  source 1..20: mol_type = other DNA
ataccacttttatcttttac

SEQ ID NO: 23194 - DNA, 20 bp, synthetic construct
  source 1..20: mol_type = other DNA
tataccacttttatctttta

SEQ ID NO: 23195 - DNA, 20 bp, synthetic construct
  source 1..20: mol_type = other DNA
atataccacttttatctttt

SEQ ID NO: 23196 - DNA, 20 bp, synthetic construct
  source 1..20: mol_type = other DNA
gatataccacttttatcttt

SEQ ID NO: 23197 - DNA, 20 bp, synthetic construct
  source 1..20: mol_type = other DNA
agatataccacttttatctt

SEQ ID NO: 23198 - DNA, 20 bp, synthetic construct
  source 1..20: mol_type = other DNA
cagatataccacttttatct

SEQ ID NO: 23199 - DNA, 20 bp, synthetic construct
  source 1..20: mol_type = other DNA
tcagatataccacttttatc

SEQ ID NO: 23200 - DNA, 20 bp, synthetic construct
  source 1..20: mol_type = other DNA
ttcagatataccacttttat

SEQ ID NO: 23201 - DNA, 20 bp, synthetic construct
  source 1..20: mol_type = other DNA
attcagatataccactttta

SEQ ID NO: 23202 - DNA, 20 bp, synthetic construct
  source 1..20: mol_type = other DNA
tattcagatataccactttt

SEQ ID NO: 23203 - DNA, 20 bp, synthetic construct
  source 1..20: mol_type = other DNA
ctattcagatataccacttt

SEQ ID NO: 23204 - DNA, 20 bp, synthetic construct
  source 1..20: mol_type = other DNA
cctattcagatataccactt

SEQ ID NO: 23205 - DNA, 20 bp, synthetic construct
  source 1..20: mol_type = other DNA
acctattcagatataccact

SEQ ID NO: 23206 - DNA, 20 bp, synthetic construct
  source 1..20: mol_type = other DNA
gacctattcagatataccac

SEQ ID NO: 23207 - DNA, 20 bp, synthetic construct
  source 1..20: mol_type = other DNA
tgacctattcagatatacca

SEQ ID NO: 23208 - DNA, 20 bp, synthetic construct
  source 1..20: mol_type = other DNA
gtgacctattcagatatacc

SEQ ID NO: 23209 - DNA, 20 bp, synthetic construct
  source 1..20: mol_type = other DNA
agtgacctattcagatatac

SEQ ID NO: 23210 - DNA, 20 bp, synthetic construct
  source 1..20: mol_type = other DNA
aagtgacctattcagatata

SEQ ID NO: 23211 - DNA, 20 bp, synthetic construct
  source 1..20: mol_type = other DNA
taagtgacctattcagatat

SEQ ID NO: 23212 - DNA, 20 bp, synthetic construct
  source 1..20: mol_type = other DNA
gtaagtgacctattcagata

SEQ ID NO: 23213 - DNA, 20 bp, synthetic construct
  source 1..20: mol_type = other DNA
ggtaagtgacctattcagat

SEQ ID NO: 23214 - DNA, 20 bp, synthetic construct
  source 1..20: mol_type = other DNA
tggtaagtgacctattcaga

SEQ ID NO: 23215 - DNA, 20 bp, synthetic construct
  source 1..20: mol_type = other DNA
atggtaagtgacctattcag

SEQ ID NO: 23216 - DNA, 20 bp, synthetic construct
  source 1..20: mol_type = other DNA
catggtaagtgacctattca

SEQ ID NO: 23217 - DNA, 20 bp, synthetic construct
  source 1..20: mol_type = other DNA
tcatggtaagtgacctattc

SEQ ID NO: 23218 - DNA, 20 bp, synthetic construct
  source 1..20: mol_type = other DNA
ttcatggtaagtgacctatt

SEQ ID NO: 23219 - DNA, 20 bp, synthetic construct
  source 1..20: mol_type = other DNA
attcatggtaagtgacctat

SEQ ID NO: 23220 - DNA, 20 bp, synthetic construct
  source 1..20: mol_type = other DNA
cattcatggtaagtgaccta

SEQ ID NO: 23221 - DNA, 20 bp, synthetic construct
  source 1..20: mol_type = other DNA
ccattcatggtaagtgacct

SEQ ID NO: 23222 - DNA, 20 bp, synthetic construct
  source 1..20: mol_type = other DNA
tccattcatggtaagtgacc

SEQ ID NO: 23223 - DNA, 20 bp, synthetic construct
  source 1..20: mol_type = other DNA
ctccattcatggtaagtgac

SEQ ID NO: 23224 - DNA, 20 bp, synthetic construct
  source 1..20: mol_type = other DNA
gctccattcatggtaagtga

SEQ ID NO: 23225 - DNA, 20 bp, synthetic construct
  source 1..20: mol_type = other DNA
agctccattcatggtaagtg

SEQ ID NO: 23226 - DNA, 20 bp, synthetic construct
  source 1..20: mol_type = other DNA
aagctccattcatggtaagt

SEQ ID NO: 23227 - DNA, 20 bp, synthetic construct
  source 1..20: mol_type = other DNA
caagctccattcatggtaag

SEQ ID NO: 23228 - DNA, 20 bp, synthetic construct
  source 1..20: mol_type = other DNA
gcaagctccattcatggtaa

SEQ ID NO: 23229 - DNA, 20 bp, synthetic construct
  source 1..20: mol_type = other DNA
tgcaagctccattcatggta

SEQ ID NO: 23230 - DNA, 20 bp, synthetic construct
  source 1..20: mol_type = other DNA
ctgcaagctccattcatggt

SEQ ID NO: 23231 - DNA, 20 bp, synthetic construct
  source 1..20: mol_type = other DNA
cctgcaagctccattcatgg

SEQ ID NO: 23232 - DNA, 20 bp, synthetic construct
  source 1..20: mol_type = other DNA
tcctgcaagctccattcatg

SEQ ID NO: 23233 - DNA, 20 bp, synthetic construct
  source 1..20: mol_type = other DNA
gtcctgcaagctccattcat

SEQ ID NO: 23234 - DNA, 20 bp, synthetic construct
  source 1..20: mol_type = other DNA
tgtcctgcaagctccattca

SEQ ID NO: 23235 - DNA, 20 bp, synthetic construct
  source 1..20: mol_type = other DNA
ctgtcctgcaagctccattc

SEQ ID NO: 23236 - DNA, 20 bp, synthetic construct
  source 1..20: mol_type = other DNA
cctgtcctgcaagctccatt

SEQ ID NO: 23237 - DNA, 20 bp, synthetic construct
  source 1..20: mol_type = other DNA
tcctgtcctgcaagctccat

SEQ ID NO: 23238 - DNA, 20 bp, synthetic construct
  source 1..20: mol_type = other DNA
ttcctgtcctgcaagctcca

SEQ ID NO: 23239 - DNA, 20 bp, synthetic construct
  source 1..20: mol_type = other DNA
cttcctgtcctgcaagctcc

SEQ ID NO: 23240 - DNA, 20 bp, synthetic construct
  source 1..20: mol_type = other DNA
acttcctgtcctgcaagctc

SEQ ID NO: 23241 - DNA, 20 bp, synthetic construct
  source 1..20: mol_type = other DNA
aacttcctgtcctgcaagct

SEQ ID NO: 23242 - DNA, 20 bp, synthetic construct
  source 1..20: mol_type = other DNA
caacttcctgtcctgcaagc

SEQ ID NO: 23243 - DNA, 20 bp, synthetic construct
  source 1..20: mol_type = other DNA
gcaacttcctgtcctgcaag

SEQ ID NO: 23244 - DNA, 20 bp, synthetic construct
  source 1..20: mol_type = other DNA
agcaacttcctgtcctgcaa

SEQ ID NO: 23245 - DNA, 20 bp, synthetic construct
  source 1..20: mol_type = other DNA
aagcaacttcctgtcctgca

SEQ ID NO: 23246 - DNA, 20 bp, synthetic construct
  source 1..20: mol_type = other DNA
caagcaacttcctgtcctgc

SEQ ID NO: 23247 - DNA, 20 bp, synthetic construct
  source 1..20: mol_type = other DNA
ccaagcaacttcctgtcctg

SEQ ID NO: 23248 - DNA, 20 bp, synthetic construct
  source 1..20: mol_type = other DNA
cccaagcaacttcctgtcct

SEQ ID NO: 23249 - DNA, 20 bp, synthetic construct
  source 1..20: mol_type = other DNA
tcccaagcaacttcctgtcc

SEQ ID NO: 23250 - DNA, 20 bp, synthetic construct
  source 1..20: mol_type = other DNA
atcccaagcaacttcctgtc

SEQ ID NO: 23251 - DNA, 20 bp, synthetic construct
  source 1..20: mol_type = other DNA
catcccaagcaacttcctgt

SEQ ID NO: 23252 - DNA, 20 bp, synthetic construct
  source 1..20: mol_type = other DNA
tcatcccaagcaacttcctg

SEQ ID NO: 23253 - DNA, 20 bp, synthetic construct
  source 1..20: mol_type = other DNA
ctcatcccaagcaacttcct

SEQ ID NO: 23254 - DNA, 20 bp, synthetic construct
  source 1..20: mol_type = other DNA
actcatcccaagcaacttcc

SEQ ID NO: 23255 - DNA, 20 bp, synthetic construct
  source 1..20: mol_type = other DNA
gactcatcccaagcaacttc

SEQ ID NO: 23256 - DNA, 20 bp, synthetic construct
  source 1..20: mol_type = other DNA
tgactcatcccaagcaactt

SEQ ID NO: 23257 - DNA, 20 bp, synthetic construct
  source 1..20: mol_type = other DNA
atgactcatcccaagcaact

SEQ ID NO: 23258 - DNA, 20 bp, synthetic construct
  source 1..20: mol_type = other DNA
aatgactcatcccaagcaac

SEQ ID NO: 23259 - DNA, 20 bp, synthetic construct
  source 1..20: mol_type = other DNA
aaatgactcatcccaagcaa

SEQ ID NO: 23260 - DNA, 20 bp, synthetic construct
  source 1..20: mol_type = other DNA
taaatgactcatcccaagca

SEQ ID NO: 23261 - DNA, 20 bp, synthetic construct
  source 1..20: mol_type = other DNA
ataaatgactcatcccaagc

SEQ ID NO: 23262 - DNA, 20 bp, synthetic construct
  source 1..20: mol_type = other DNA
gataaatgactcatcccaag

SEQ ID NO: 23263 - DNA, 20 bp, synthetic construct
  source 1..20: mol_type = other DNA
tgataaatgactcatcccaa

SEQ ID NO: 23264 - DNA, 20 bp, synthetic construct
  source 1..20: mol_type = other DNA
ctgataaatgactcatccca

SEQ ID NO: 23265 - DNA, 20 bp, synthetic construct
  source 1..20: mol_type = other DNA
actgataaatgactcatccc

SEQ ID NO: 23266 - DNA, 20 bp, synthetic construct
  source 1..20: mol_type = other DNA
cactgataaatgactcatcc

SEQ ID NO: 23267 - DNA, 20 bp, synthetic construct
  source 1..20: mol_type = other DNA
ccactgataaatgactcatc

SEQ ID NO: 23268 - DNA, 20 bp, synthetic construct
  source 1..20: mol_type = other DNA
accactgataaatgactcat

SEQ ID NO: 23269 - DNA, 20 bp, synthetic construct
  source 1..20: mol_type = other DNA
caccactgataaatgactca

SEQ ID NO: 23270 - DNA, 20 bp, synthetic construct
  source 1..20: mol_type = other DNA
acaccactgataaatgactc

SEQ ID NO: 23271 - DNA, 20 bp, synthetic construct
  source 1..20: mol_type = other DNA
cacaccactgataaatgact

SEQ ID NO: 23272 - DNA, 20 bp, synthetic construct
  source 1..20: mol_type = other DNA
acacaccactgataaatgac

SEQ ID NO: 23273 - DNA, 20 bp, synthetic construct
  source 1..20: mol_type = other DNA
cacacaccactgataaatga

SEQ ID NO: 23274 - DNA, 20 bp, synthetic construct
  source 1..20: mol_type = other DNA
tcacacaccactgataaatg

SEQ ID NO: 23275 - DNA, 20 bp, synthetic construct
  source 1..20: mol_type = other DNA
ttcacacaccactgataaat

SEQ ID NO: 23276 - DNA, 20 bp, synthetic construct
  source 1..20: mol_type = other DNA
attcacacaccactgataaa

SEQ ID NO: 23277 - DNA, 20 bp, synthetic construct
  source 1..20: mol_type = other DNA
cattcacacaccactgataa

SEQ ID NO: 23278 - DNA, 20 bp, synthetic construct
  source 1..20: mol_type = other DNA
acattcacacaccactgata

SEQ ID NO: 23279 - DNA, 20 bp, synthetic construct
  source 1..20: mol_type = other DNA
cacattcacacaccactgat

SEQ ID NO: 23280 - DNA, 20 bp, synthetic construct
  source 1..20: mol_type = other DNA
gcacattcacacaccactga

SEQ ID NO: 23281 - DNA, 20 bp, synthetic construct
  source 1..20: mol_type = other DNA
tgcacattcacacaccactg

SEQ ID NO: 23282 - DNA, 20 bp, synthetic construct
  source 1..20: mol_type = other DNA
ctgcacattcacacaccact

SEQ ID NO: 23283 - DNA, 20 bp, synthetic construct
  source 1..20: mol_type = other DNA
cctgcacattcacacaccac

SEQ ID NO: 23284 - DNA, 20 bp, synthetic construct
  source 1..20: mol_type = other DNA
gcctgcacattcacacacca

SEQ ID NO: 23285 - DNA, 20 bp, synthetic construct
  source 1..20: mol_type = other DNA
ggcctgcacattcacacacc

SEQ ID NO: 23286 - DNA, 20 bp, synthetic construct
  source 1..20: mol_type = other DNA
aggcctgcacattcacacac

SEQ ID NO: 23287 - DNA, 20 bp, synthetic construct
  source 1..20: mol_type = other DNA
taggcctgcacattcacaca

SEQ ID NO: 23288 - DNA, 20 bp, synthetic construct
  source 1..20: mol_type = other DNA
ctaggcctgcacattcacac

SEQ ID NO: 23289 - DNA, 20 bp, synthetic construct
  source 1..20: mol_type = other DNA
cctaggcctgcacattcaca

SEQ ID NO: 23290 - DNA, 20 bp, synthetic construct
  source 1..20: mol_type = other DNA
tcctaggcctgcacattcac

SEQ ID NO: 23291 - DNA, 20 bp, synthetic construct
  source 1..20: mol_type = other DNA
gtcctaggcctgcacattca

SEQ ID NO: 23292 - DNA, 20 bp, synthetic construct
  source 1..20: mol_type = other DNA
tgtcctaggcctgcacattc

SEQ ID NO: 23293 - DNA, 20 bp, synthetic construct
  source 1..20: mol_type = other DNA
atgtcctaggcctgcacatt

SEQ ID NO: 23294 - DNA, 20 bp, synthetic construct
  source 1..20: mol_type = other DNA
aatgtcctaggcctgcacat

SEQ ID NO: 23295 - DNA, 20 bp, synthetic construct
  source 1..20: mol_type = other DNA
taatgtcctaggcctgcaca

SEQ ID NO: 23296 - DNA, 20 bp, synthetic construct
  source 1..20: mol_type = other DNA
gtaatgtcctaggcctgcac

SEQ ID NO: 23297 - DNA, 20 bp, synthetic construct
  source 1..20: mol_type = other DNA
agtaatgtcctaggcctgca

SEQ ID NO: 23298 - DNA, 20 bp, synthetic construct
  source 1..20: mol_type = other DNA
cagtaatgtcctaggcctgc

SEQ ID NO: 23299 - DNA, 20 bp, synthetic construct
  source 1..20: mol_type = other DNA
acagtaatgtcctaggcctg

SEQ ID NO: 23300 - DNA, 20 bp, synthetic construct
  source 1..20: mol_type = other DNA
tacagtaatgtcctaggcct

SEQ ID NO: 23301 - DNA, 20 bp, synthetic construct
  source 1..20: mol_type = other DNA
atacagtaatgtcctaggcc

SEQ ID NO: 23302 - DNA, 20 bp, synthetic construct
  source 1..20: mol_type = other DNA
catacagtaatgtcctaggc

SEQ ID NO: 23303 - DNA, 20 bp, synthetic construct
  source 1..20: mol_type = other DNA
gcatacagtaatgtcctagg

SEQ ID NO: 23304 - DNA, 20 bp, synthetic construct
  source 1..20: mol_type = other DNA
agcatacagtaatgtcctag

SEQ ID NO: 23305 - DNA, 20 bp, synthetic construct
  source 1..20: mol_type = other DNA
tagcatacagtaatgtccta

SEQ ID NO: 23306 - DNA, 20 bp, synthetic construct
  source 1..20: mol_type = other DNA
gtagcatacagtaatgtcct

SEQ ID NO: 23307 - DNA, 20 bp, synthetic construct
  source 1..20: mol_type = other DNA
agtagcatacagtaatgtcc

SEQ ID NO: 23308 - DNA, 20 bp, synthetic construct
  source 1..20: mol_type = other DNA
cagtagcatacagtaatgtc

SEQ ID NO: 23309 - DNA, 20 bp, synthetic construct
  source 1..20: mol_type = other DNA
acagtagcatacagtaatgt

SEQ ID NO: 23310 - DNA, 20 bp, synthetic construct
  source 1..20: mol_type = other DNA
tacagtagcatacagtaatg

SEQ ID NO: 23311 - DNA, 20 bp, synthetic construct
  source 1..20: mol_type = other DNA
ctacagtagcatacagtaat

SEQ ID NO: 23312 - DNA, 20 bp, synthetic construct
  source 1..20: mol_type = other DNA
tctacagtagcatacagtaa

SEQ ID NO: 23313 - DNA, 20 bp, synthetic construct
  source 1..20: mol_type = other DNA
gtctacagtagcatacagta

SEQ ID NO: 23314 - DNA, 20 bp, synthetic construct
  source 1..20: mol_type = other DNA
tgtctacagtagcatacagt

SEQ ID NO: 23315 - DNA, 20 bp, synthetic construct
  source 1..20: mol_type = other DNA
ttgtctacagtagcatacag

SEQ ID NO: 23316 - DNA, 20 bp, synthetic construct
  source 1..20: mol_type = other DNA
tttgtctacagtagcataca

SEQ ID NO: 23317 - DNA, 20 bp, synthetic construct
  source 1..20: mol_type = other DNA
gtttgtctacagtagcatac

SEQ ID NO: 23318 - DNA, 20 bp, synthetic construct
  source 1..20: mol_type = other DNA
tgtttgtctacagtagcata

SEQ ID NO: 23319 - DNA, 20 bp, synthetic construct
  source 1..20: mol_type = other DNA
gtgtttgtctacagtagcat

SEQ ID NO: 23320 - DNA, 20 bp, synthetic construct
  source 1..20: mol_type = other DNA
agtgtttgtctacagtagca

SEQ ID NO: 23321 - DNA, 20 bp, synthetic construct
  source 1..20: mol_type = other DNA
cagtgtttgtctacagtagc

SEQ ID NO: 23322 - DNA, 20 bp, synthetic construct
  source 1..20: mol_type = other DNA
tcagtgtttgtctacagtag

SEQ ID NO: 23323 - DNA, 20 bp, synthetic construct
  source 1..20: mol_type = other DNA
ttcagtgtttgtctacagta

SEQ ID NO: 23324 - DNA, 20 bp, synthetic construct
  source 1..20: mol_type = other DNA
gttcagtgtttgtctacagt

SEQ ID NO: 23325 - DNA, 20 bp, synthetic construct
  source 1..20: mol_type = other DNA
tgttcagtgtttgtctacag

SEQ ID NO: 23326 - DNA, 20 bp, synthetic construct
  source 1..20: mol_type = other DNA
ctgttcagtgtttgtctaca

SEQ ID NO: 23327 - DNA, 20 bp, synthetic construct
  source 1..20: mol_type = other DNA
actgttcagtgtttgtctac

SEQ ID NO: 23328 - DNA, 20 bp, synthetic construct
  source 1..20: mol_type = other DNA
aactgttcagtgtttgtcta

SEQ ID NO: 23329 - DNA, 20 bp, synthetic construct
  source 1..20: mol_type = other DNA
taactgttcagtgtttgtct

SEQ ID NO: 23330 - DNA, 20 bp, synthetic construct
  source 1..20: mol_type = other DNA
ctaactgttcagtgtttgtc

SEQ ID NO: 23331 - DNA, 20 bp, synthetic construct
  source 1..20: mol_type = other DNA
cctaactgttcagtgtttgt

SEQ ID NO: 23332 - DNA, 20 bp, synthetic construct
  source 1..20: mol_type = other DNA
tcctaactgttcagtgtttg

SEQ ID NO: 23333 - DNA, 20 bp, synthetic construct
  source 1..20: mol_type = other DNA
atcctaactgttcagtgttt

SEQ ID NO: 23334 - DNA, 20 bp, synthetic construct
  source 1..20: mol_type = other DNA
tatcctaactgttcagtgtt

SEQ ID NO: 23335 - DNA, 20 bp, synthetic construct
  source 1..20: mol_type = other DNA
gtatcctaactgttcagtgt

SEQ ID NO: 23336 - DNA, 20 bp, synthetic construct
  source 1..20: mol_type = other DNA
tgtatcctaactgttcagtg

SEQ ID NO: 23337 - DNA, 20 bp, synthetic construct
  source 1..20: mol_type = other DNA
gtgtatcctaactgttcagt

SEQ ID NO: 23338 - DNA, 20 bp, synthetic construct
  source 1..20: mol_type = other DNA
agtgtatcctaactgttcag

SEQ ID NO: 23339 - DNA, 20 bp, synthetic construct
  source 1..20: mol_type = other DNA
tagtgtatcctaactgttca

SEQ ID NO: 23340 - DNA, 20 bp, synthetic construct
  source 1..20: mol_type = other DNA
ttagtgtatcctaactgttc

SEQ ID NO: 23341 - DNA, 20 bp, synthetic construct
  source 1..20: mol_type = other DNA
tttagtgtatcctaactgtt

SEQ ID NO: 23342 - DNA, 20 bp, synthetic construct
  source 1..20: mol_type = other DNA
atttagtgtatcctaactgt

SEQ ID NO: 23343 - DNA, 20 bp, synthetic construct
  source 1..20: mol_type = other DNA
aatttagtgtatcctaactg

SEQ ID NO: 23344 - DNA, 20 bp, synthetic construct
  source 1..20: mol_type = other DNA
caatttagtgtatcctaact

SEQ ID NO: 23345 - DNA, 20 bp, synthetic construct
  source 1..20: mol_type = other DNA
tcaatttagtgtatcctaac

SEQ ID NO: 23346 - DNA, 20 bp, synthetic construct
  source 1..20: mol_type = other DNA
atcaatttagtgtatcctaa

SEQ ID NO: 23347 - DNA, 20 bp, synthetic construct
  source 1..20: mol_type = other DNA
tatcaatttagtgtatccta

SEQ ID NO: 23348 - DNA, 20 bp, synthetic construct
  source 1..20: mol_type = other DNA
ttatcaatttagtgtatcct

SEQ ID NO: 23349 - DNA, 20 bp, synthetic construct
  source 1..20: mol_type = other DNA
tttatcaatttagtgtatcc

SEQ ID NO: 23350 - DNA, 20 bp, synthetic construct
  source 1..20: mol_type = other DNA
atttatcaatttagtgtatc

SEQ ID NO: 23351 - DNA, 20 bp, synthetic construct
  source 1..20: mol_type = other DNA
tatttatcaatttagtgtat

SEQ ID NO: 23352 - DNA, 20 bp, synthetic construct
  source 1..20: mol_type = other DNA
atatttatcaatttagtgta

SEQ ID NO: 23353 - DNA, 20 bp, synthetic construct
  source 1..20: mol_type = other DNA
gatatttatcaatttagtgt

SEQ ID NO: 23354 - DNA, 20 bp, synthetic construct
  source 1..20: mol_type = other DNA
agatatttatcaatttagtg

SEQ ID NO: 23355 - DNA, 20 bp, synthetic construct
  source 1..20: mol_type = other DNA
aagatatttatcaatttagt

SEQ ID NO: 23356 - DNA, 20 bp, synthetic construct
  source 1..20: mol_type = other DNA
aaagatatttatcaatttag

SEQ ID NO: 23357 - DNA, 20 bp, synthetic construct
  source 1..20: mol_type = other DNA
gaaagatatttatcaattta

SEQ ID NO: 23358 - DNA, 20 bp, synthetic construct
  source 1..20: mol_type = other DNA
agaaagatatttatcaattt

SEQ ID NO: 23359 - DNA, 20 bp, synthetic construct
  source 1..20: mol_type = other DNA
aagaaagatatttatcaatt

SEQ ID NO: 23360 - DNA, 20 bp, synthetic construct
  source 1..20: mol_type = other DNA
taagaaagatatttatcaat

SEQ ID NO: 23361 - DNA, 20 bp, synthetic construct
  source 1..20: mol_type = other DNA
ataagaaagatatttatcaa

SEQ ID NO: 23362 - DNA, 20 bp, synthetic construct
  source 1..20: mol_type = other DNA
aataagaaagatatttatca

SEQ ID NO: 23363 - DNA, 20 bp, synthetic construct
  source 1..20: mol_type = other DNA
aaataagaaagatatttatc

SEQ ID NO: 23364 - DNA, 20 bp, synthetic construct
  source 1..20: mol_type = other DNA
aaaataagaaagatatttat

SEQ ID NO: 23365 - DNA, 20 bp, synthetic construct
  source 1..20: mol_type = other DNA
caaaataagaaagatattta

SEQ ID NO: 23366 - DNA, 20 bp, synthetic construct
  source 1..20: mol_type = other DNA
acaaaataagaaagatattt

SEQ ID NO: 23367 - DNA, 20 bp, synthetic construct
  source 1..20: mol_type = other DNA
aacaaaataagaaagatatt

SEQ ID NO: 23368 - DNA, 20 bp, synthetic construct
  source 1..20: mol_type = other DNA
aaacaaaataagaaagatat

SEQ ID NO: 23369 - DNA, 20 bp, synthetic construct
  source 1..20: mol_type = other DNA
aaaacaaaataagaaagata

SEQ ID NO: 23370 - DNA, 20 bp, synthetic construct
  source 1..20: mol_type = other DNA
aaaaacaaaataagaaagat

SEQ ID NO: 23371 - DNA, 20 bp, synthetic construct
  source 1..20: mol_type = other DNA
aaaaaacaaaataagaaaga

SEQ ID NO: 23372 - DNA, 20 bp, synthetic construct
  source 1..20: mol_type = other DNA
caaaaaacaaaataagaaag

SEQ ID NO: 23373 - DNA, 20 bp, synthetic construct
  source 1..20: mol_type = other DNA
tcaaaaaacaaaataagaaa

SEQ ID NO: 23374 - DNA, 20 bp, synthetic construct
  source 1..20: mol_type = other DNA
ctcaaaaaacaaaataagaa

SEQ ID NO: 23375 - DNA, 20 bp, synthetic construct
  source 1..20: mol_type = other DNA
tctcaaaaaacaaaataaga

SEQ ID NO: 23376 - DNA, 20 bp, synthetic construct
  source 1..20: mol_type = other DNA
atctcaaaaaacaaaataag

SEQ ID NO: 23377 - DNA, 20 bp, synthetic construct
  source 1..20: mol_type = other DNA
catctcaaaaaacaaaataa

SEQ ID NO: 23378 - DNA, 20 bp, synthetic construct
  source 1..20: mol_type = other DNA
ccatctcaaaaaacaaaata

SEQ ID NO: 23379 - DNA, 20 bp, synthetic construct
  source 1..20: mol_type = other DNA
tccatctcaaaaaacaaaat

SEQ ID NO: 23380 - DNA, 20 bp, synthetic construct
  source 1..20: mol_type = other DNA
ctccatctcaaaaaacaaaa

SEQ ID NO: 23381 - DNA, 20 bp, synthetic construct
  source 1..20: mol_type = other DNA
actccatctcaaaaaacaaa

SEQ ID NO: 23382 - DNA, 20 bp, synthetic construct
  source 1..20: mol_type = other DNA
gactccatctcaaaaaacaa

SEQ ID NO: 23383 - DNA, 20 bp, synthetic construct
  source 1..20: mol_type = other DNA
agactccatctcaaaaaaca

SEQ ID NO: 23384 - DNA, 20 bp, synthetic construct
  source 1..20: mol_type = other DNA
gagactccatctcaaaaaac

SEQ ID NO: 23385 - DNA, 20 bp, synthetic construct
  source 1..20: mol_type = other DNA
cgagactccatctcaaaaaa

SEQ ID NO: 23386 - DNA, 20 bp, synthetic construct
  source 1..20: mol_type = other DNA
gcgagactccatctcaaaaa

SEQ ID NO: 23387 - DNA, 20 bp, synthetic construct
  source 1..20: mol_type = other DNA
agcgagactccatctcaaaa

SEQ ID NO: 23388 - DNA, 20 bp, synthetic construct
  source 1..20: mol_type = other DNA
gagcgagactccatctcaaa

SEQ ID NO: 23389 - DNA, 20 bp, synthetic construct
  source 1..20: mol_type = other DNA
agagcgagactccatctcaa

SEQ ID NO: 23390 - DNA, 20 bp, synthetic construct
  source 1..20: mol_type = other DNA
tagagcgagactccatctca

SEQ ID NO: 23391 - DNA, 20 bp, synthetic construct
  source 1..20: mol_type = other DNA
atagagcgagactccatctc

SEQ ID NO: 23392 - DNA, 20 bp, synthetic construct
  source 1..20: mol_type = other DNA
gatagagcgagactccatct

SEQ ID NO: 23393 - DNA, 20 bp, synthetic construct
  source 1..20: mol_type = other DNA
cgatagagcgagactccatc

SEQ ID NO: 23394 - DNA, 20 bp, synthetic construct
  source 1..20: mol_type = other DNA
gcgatagagcgagactccat

SEQ ID NO: 23395 - DNA, 20 bp, synthetic construct
  source 1..20: mol_type = other DNA
ggcgatagagcgagactcca

SEQ ID NO: 23396 - DNA, 20 bp, synthetic construct
  source 1..20: mol_type = other DNA
gggcgatagagcgagactcc

SEQ ID NO: 23397 - DNA, 20 bp, synthetic construct
  source 1..20: mol_type = other DNA
tgggcgatagagcgagactc

SEQ ID NO: 23398 - DNA, 20 bp, synthetic construct
  source 1..20: mol_type = other DNA
ctgggcgatagagcgagact

SEQ ID NO: 23399 - DNA, 20 bp, synthetic construct
  source 1..20: mol_type = other DNA
cctgggcgatagagcgagac

SEQ ID NO: 23400 - DNA, 20 bp, synthetic construct
  source 1..20: mol_type = other DNA
gcctgggcgatagagcgaga

SEQ ID NO: 23401 - DNA, 20 bp, synthetic construct
  source 1..20: mol_type = other DNA
agcctgggcgatagagcgag

SEQ ID NO: 23402 - DNA, 20 bp, synthetic construct
  source 1..20: mol_type = other DNA
cagcctgggcgatagagcga

SEQ ID NO: 23403 - DNA, 20 bp, synthetic construct
  source 1..20: mol_type = other DNA
ccagcctgggcgatagagcg

SEQ ID NO: 23404 - DNA, 20 bp, synthetic construct
  source 1..20: mol_type = other DNA
tccagcctgggcgatagagc

SEQ ID NO: 23405 - DNA, 20 bp, synthetic construct
  source 1..20: mol_type = other DNA
ctccagcctgggcgatagag

SEQ ID NO: 23406 - DNA, 20 bp, synthetic construct
  source 1..20: mol_type = other DNA
actccagcctgggcgataga

SEQ ID NO: 23407 - DNA, 20 bp, synthetic construct
  source 1..20: mol_type = other DNA
cactccagcctgggcgatag

SEQ ID NO: 23408 - DNA, 20 bp, synthetic construct
  source 1..20: mol_type = other DNA
acactccagcctgggcgata

SEQ ID NO: 23409 - DNA, 20 bp, synthetic construct
  source 1..20: mol_type = other DNA
tacactccagcctgggcgat

SEQ ID NO: 23410 - DNA, 20 bp, synthetic construct
  source 1..20: mol_type = other DNA
ctacactccagcctgggcga

SEQ ID NO: 23411 - DNA, 20 bp, synthetic construct
  source 1..20: mol_type = other DNA
actacactccagcctgggcg

SEQ ID NO: 23412 - DNA, 20 bp, synthetic construct
  source 1..20: mol_type = other DNA
cactacactccagcctgggc

SEQ ID NO: 23413 - DNA, 20 bp, synthetic construct
  source 1..20: mol_type = other DNA
ccactacactccagcctggg

SEQ ID NO: 23414 - DNA, 20 bp, synthetic construct
  source 1..20: mol_type = other DNA
gccactacactccagcctgg

SEQ ID NO: 23415 - DNA, 20 bp, synthetic construct
  source 1..20: mol_type = other DNA
cgccactacactccagcctg

SEQ ID NO: 23416 - DNA, 20 bp, synthetic construct
  source 1..20: mol_type = other DNA
acgccactacactccagcct

SEQ ID NO: 23417 - DNA, 20 bp, synthetic construct
  source 1..20: mol_type = other DNA
cacgccactacactccagcc

SEQ ID NO: 23418 - DNA, 20 bp, synthetic construct
  source 1..20: mol_type = other DNA
tcacgccactacactccagc

SEQ ID NO: 23419 - DNA, 20 bp, synthetic construct
  source 1..20: mol_type = other DNA
atcacgccactacactccag

SEQ ID NO: 23420 - DNA, 20 bp, synthetic construct
  source 1..20: mol_type = other DNA
catcacgccactacactcca

SEQ ID NO: 23421 - DNA, 20 bp, synthetic construct
  source 1..20: mol_type = other DNA
acatcacgccactacactcc

SEQ ID NO: 23422 - DNA, 20 bp, synthetic construct
  source 1..20: mol_type = other DNA
aacatcacgccactacactc

SEQ ID NO: 23423 - DNA, 20 bp, synthetic construct
  source 1..20: mol_type = other DNA
caacatcacgccactacact

SEQ ID NO: 23424 - DNA, 20 bp, synthetic construct
  source 1..20: mol_type = other DNA
ccaacatcacgccactacac

SEQ ID NO: 23425 - DNA, 20 bp, synthetic construct
  source 1..20: mol_type = other DNA
gccaacatcacgccactaca

SEQ ID NO: 23426 - DNA, 20 bp, synthetic construct
  source 1..20: mol_type = other DNA
agccaacatcacgccactac

SEQ ID NO: 23427 - DNA, 20 bp, synthetic construct
  source 1..20: mol_type = other DNA
gagccaacatcacgccacta

SEQ ID NO: 23428 - DNA, 20 bp, synthetic construct
  source 1..20: mol_type = other DNA
tgagccaacatcacgccact

SEQ ID NO: 23429 - DNA, 20 bp, synthetic construct
  source 1..20: mol_type = other DNA
gtgagccaacatcacgccac

SEQ ID NO: 23430 - DNA, 20 bp, synthetic construct
  source 1..20: mol_type = other DNA
agtgagccaacatcacgcca

SEQ ID NO: 23431 - DNA, 20 bp, synthetic construct
  source 1..20: mol_type = other DNA
cagtgagccaacatcacgcc

SEQ ID NO: 23432 - DNA, 20 bp, synthetic construct
  source 1..20: mol_type = other DNA
gcagtgagccaacatcacgc

SEQ ID NO: 23433 - DNA, 20 bp, synthetic construct
  source 1..20: mol_type = other DNA
tgcagtgagccaacatcacg

SEQ ID NO: 23434 - DNA, 20 bp, synthetic construct
  source 1..20: mol_type = other DNA
ctgcagtgagccaacatcac

SEQ ID NO: 23435 - DNA, 20 bp, synthetic construct
  source 1..20: mol_type = other DNA
actgcagtgagccaacatca

SEQ ID NO: 23436 - DNA, 20 bp, synthetic construct
  source 1..20: mol_type = other DNA
gactgcagtgagccaacatc

SEQ ID NO: 23437 - DNA, 20 bp, synthetic construct
  source 1..20: mol_type = other DNA
agactgcagtgagccaacat

SEQ ID NO: 23438 - DNA, 20 bp, synthetic construct
  source 1..20: mol_type = other DNA
gagactgcagtgagccaaca

SEQ ID NO: 23439 - DNA, 20 bp, synthetic construct
  source 1..20: mol_type = other DNA
agagactgcagtgagccaac

SEQ ID NO: 23440 - DNA, 20 bp, synthetic construct
  source 1..20: mol_type = other DNA
cagagactgcagtgagccaa

SEQ ID NO: 23441 - DNA, 20 bp, synthetic construct
  source 1..20: mol_type = other DNA
gcagagactgcagtgagcca

SEQ ID NO: 23442 - DNA, 20 bp, synthetic construct
  source 1..20: mol_type = other DNA
ggcagagactgcagtgagcc

SEQ ID NO: 23443 - DNA, 20 bp, synthetic construct
  source 1..20: mol_type = other DNA
aggcagagactgcagtgagc

SEQ ID NO: 23444 - DNA, 20 bp, synthetic construct
  source 1..20: mol_type = other DNA
aaggcagagactgcagtgag

SEQ ID NO: 23445 - DNA, 20 bp, synthetic construct
  source 1..20: mol_type = other DNA
gaaggcagagactgcagtga

SEQ ID NO: 23446 - DNA, 20 bp, synthetic construct
  source 1..20: mol_type = other DNA
agaaggcagagactgcagtg

SEQ ID NO: 23447 - DNA, 20 bp, synthetic construct
  source 1..20: mol_type = other DNA
cagaaggcagagactgcagt

SEQ ID NO: 23448 - DNA, 20 bp, synthetic construct
  source 1..20: mol_type = other DNA
ccagaaggcagagactgcag

SEQ ID NO: 23449 - DNA, 20 bp, synthetic construct
  source 1..20: mol_type = other DNA
cccagaaggcagagactgca

SEQ ID NO: 23450 - DNA, 20 bp, synthetic construct
  source 1..20: mol_type = other DNA
acccagaaggcagagactgc

SEQ ID NO: 23451 - DNA, 20 bp, synthetic construct
  source 1..20: mol_type = other DNA
aacccagaaggcagagactg

SEQ ID NO: 23452 - DNA, 20 bp, synthetic construct
  source 1..20: mol_type = other DNA
gaacccagaaggcagagact

SEQ ID NO: 23453 - DNA, 20 bp, synthetic construct
  source 1..20: mol_type = other DNA
tgaacccagaaggcagagac

SEQ ID NO: 23454 - DNA, 20 bp, synthetic construct
  source 1..20: mol_type = other DNA
ttgaacccagaaggcagaga

SEQ ID NO: 23455 - DNA, 20 bp, synthetic construct
  source 1..20: mol_type = other DNA
cttgaacccagaaggcagag

SEQ ID NO: 23456 - DNA, 20 bp, synthetic construct
  source 1..20: mol_type = other DNA
gcttgaacccagaaggcaga

SEQ ID NO: 23457 - DNA, 20 bp, synthetic construct
  source 1..20: mol_type = other DNA
cgcttgaacccagaaggcag

SEQ ID NO: 23458 - DNA, 20 bp, synthetic construct
  source 1..20: mol_type = other DNA
tcgcttgaacccagaaggca

SEQ ID NO: 23459 - DNA, 20 bp, synthetic construct
  source 1..20: mol_type = other DNA
atcgcttgaacccagaaggc

SEQ ID NO: 23460 - DNA, 20 bp, synthetic construct
  source 1..20: mol_type = other DNA
aatcgcttgaacccagaagg

SEQ ID NO: 23461 - DNA, 20 bp, synthetic construct
  source 1..20: mol_type = other DNA
gaatcgcttgaacccagaag

SEQ ID NO: 23462 - DNA, 20 bp, synthetic construct
  source 1..20: mol_type = other DNA
agaatcgcttgaacccagaa

SEQ ID NO: 23463 - DNA, 20 bp, synthetic construct
  source 1..20: mol_type = other DNA
gagaatcgcttgaacccaga

SEQ ID NO: 23464 - DNA, 20 bp, synthetic construct
  source 1..20: mol_type = other DNA
ggagaatcgcttgaacccag

SEQ ID NO: 23465 - DNA, 20 bp, synthetic construct
  source 1..20: mol_type = other DNA
aggagaatcgcttgaaccca

SEQ ID NO: 23466 - DNA, 20 bp, synthetic construct
  source 1..20: mol_type = other DNA
caggagaatcgcttgaaccc

SEQ ID NO: 23467 - DNA, 20 bp, synthetic construct
  source 1..20: mol_type = other DNA
gcaggagaatcgcttgaacc

SEQ ID NO: 23468 - DNA, 20 bp, synthetic construct
  source 1..20: mol_type = other DNA
ggcaggagaatcgcttgaac

SEQ ID NO: 23469 - DNA, 20 bp, synthetic construct
  source 1..20: mol_type = other DNA
aggcaggagaatcgcttgaa

SEQ ID NO: 23470 - DNA, 20 bp, synthetic construct
  source 1..20: mol_type = other DNA
gaggcaggagaatcgcttga

SEQ ID NO: 23471 - DNA, 20 bp, synthetic construct
  source 1..20: mol_type = other DNA
tgaggcaggagaatcgcttg

SEQ ID NO: 23472 - DNA, 20 bp, synthetic construct
  source 1..20: mol_type = other DNA
ttgaggcaggagaatcgctt

SEQ ID NO: 23473 - DNA, 20 bp, synthetic construct
  source 1..20: mol_type = other DNA
gttgaggcaggagaatcgct

SEQ ID NO: 23474 - DNA, 20 bp, synthetic construct
  source 1..20: mol_type = other DNA
ggttgaggcaggagaatcgc

SEQ ID NO: 23475 - DNA, 20 bp, synthetic construct
  source 1..20: mol_type = other DNA
aggttgaggcaggagaatcg

SEQ ID NO: 23476 - DNA, 20 bp, synthetic construct
  source 1..20: mol_type = other DNA
gaggttgaggcaggagaatc

SEQ ID NO: 23477 - DNA, 20 bp, synthetic construct
  source 1..20: mol_type = other DNA
ggaggttgaggcaggagaat

SEQ ID NO: 23478 - DNA, 20 bp, synthetic construct
  source 1..20: mol_type = other DNA
aggaggttgaggcaggagaa

SEQ ID NO: 23479 - DNA, 20 bp, synthetic construct
  source 1..20: mol_type = other DNA
caggaggttgaggcaggaga

SEQ ID NO: 23480 - DNA, 20 bp, synthetic construct
  source 1..20: mol_type = other DNA
tcaggaggttgaggcaggag

SEQ ID NO: 23481 - DNA, 20 bp, synthetic construct
  source 1..20: mol_type = other DNA
ttcaggaggttgaggcagga

SEQ ID NO: 23482 - DNA, 20 bp, synthetic construct
  source 1..20: mol_type = other DNA
attcaggaggttgaggcagg

SEQ ID NO: 23483 - DNA, 20 bp, synthetic construct
  source 1..20: mol_type = other DNA
tattcaggaggttgaggcag

SEQ ID NO: 23484 - DNA, 20 bp, synthetic construct
  source 1..20: mol_type = other DNA
ctattcaggaggttgaggca

SEQ ID NO: 23485 - DNA, 20 bp, synthetic construct
  source 1..20: mol_type = other DNA
gctattcaggaggttgaggc

SEQ ID NO: 23486 - DNA, 20 bp, synthetic construct
  source 1..20: mol_type = other DNA
agctattcaggaggttgagg

SEQ ID NO: 23487 - DNA, 20 bp, synthetic construct
  source 1..20: mol_type = other DNA
cagctattcaggaggttgag

SEQ ID NO: 23488 - DNA, 20 bp, synthetic construct
  source 1..20: mol_type = other DNA
ccagctattcaggaggttga

SEQ ID NO: 23489 - DNA, 20 bp, synthetic construct
  source 1..20: mol_type = other DNA
cccagctattcaggaggttg

SEQ ID NO: 23490 - DNA, 20 bp, synthetic construct
  source 1..20: mol_type = other DNA
tcccagctattcaggaggtt

SEQ ID NO: 23491 - DNA, 20 bp, synthetic construct
  source 1..20: mol_type = other DNA
atcccagctattcaggaggt

SEQ ID NO: 23492 - DNA, 20 bp, synthetic construct
  source 1..20: mol_type = other DNA
aatcccagctattcaggagg

SEQ ID NO: 23493 - DNA, 20 bp, synthetic construct
  source 1..20: mol_type = other DNA
taatcccagctattcaggag

SEQ ID NO: 23494 - DNA, 20 bp, synthetic construct
  source 1..20: mol_type = other DNA
gtaatcccagctattcagga

SEQ ID NO: 23495 - DNA, 20 bp, synthetic construct
  source 1..20: mol_type = other DNA
tgtaatcccagctattcagg

SEQ ID NO: 23496 - DNA, 20 bp, synthetic construct
  source 1..20: mol_type = other DNA
ctgtaatcccagctattcag

SEQ ID NO: 23497 - DNA, 20 bp, synthetic construct
  source 1..20: mol_type = other DNA
cctgtaatcccagctattca

SEQ ID NO: 23498 - DNA, 20 bp, synthetic construct
  source 1..20: mol_type = other DNA
acctgtaatcccagctattc

SEQ ID NO: 23499 - DNA, 20 bp, synthetic construct
  source 1..20: mol_type = other DNA
cacctgtaatcccagctatt

SEQ ID NO: 23500 - DNA, 20 bp, synthetic construct
  source 1..20: mol_type = other DNA
gcacctgtaatcccagctat

SEQ ID NO: 23501 - DNA, 20 bp, synthetic construct
  source 1..20: mol_type = other DNA
cgcacctgtaatcccagcta

SEQ ID NO: 23502 - DNA, 20 bp, synthetic construct
  source 1..20: mol_type = other DNA
acgcacctgtaatcccagct

SEQ ID NO: 23503 - DNA, 20 bp, synthetic construct
  source 1..20: mol_type = other DNA
cacgcacctgtaatcccagc

SEQ ID NO: 23504 - DNA, 20 bp, synthetic construct
  source 1..20: mol_type = other DNA
gcacgcacctgtaatcccag

SEQ ID NO: 23505 - DNA, 20 bp, synthetic construct
  source 1..20: mol_type = other DNA
ggcacgcacctgtaatccca

SEQ ID NO: 23506 - DNA, 20 bp, synthetic construct
  source 1..20: mol_type = other DNA
tggcacgcacctgtaatccc

SEQ ID NO: 23507 - DNA, 20 bp, synthetic construct
  source 1..20: mol_type = other DNA
gtggcacgcacctgtaatcc

SEQ ID NO: 23508 - DNA, 20 bp, synthetic construct
  source 1..20: mol_type = other DNA
ggtggcacgcacctgtaatc

SEQ ID NO: 23509 - DNA, 20 bp, synthetic construct
  source 1..20: mol_type = other DNA
tggtggcacgcacctgtaat

SEQ ID NO: 23510 - DNA, 20 bp, synthetic construct
  source 1..20: mol_type = other DNA
gtggtggcacgcacctgtaa

SEQ ID NO: 23511 - DNA, 20 bp, synthetic construct
  source 1..20: mol_type = other DNA
tgtggtggcacgcacctgta

SEQ ID NO: 23512 - DNA, 20 bp, synthetic construct
  source 1..20: mol_type = other DNA
gtgtggtggcacgcacctgt

SEQ ID NO: 23513 - DNA, 20 bp, synthetic construct
  source 1..20: mol_type = other DNA
ggtgtggtggcacgcacctg

SEQ ID NO: 23514 - DNA, 20 bp, synthetic construct
  source 1..20: mol_type = other DNA
aggtgtggtggcacgcacct

SEQ ID NO: 23515 - DNA, 20 bp, synthetic construct
  source 1..20: mol_type = other DNA
caggtgtggtggcacgcacc

SEQ ID NO: 23516 - DNA, 20 bp, synthetic construct
  source 1..20: mol_type = other DNA
ccaggtgtggtggcacgcac

SEQ ID NO: 23517 - DNA, 20 bp, synthetic construct
  source 1..20: mol_type = other DNA
gccaggtgtggtggcacgca

SEQ ID NO: 23518 - DNA, 20 bp, synthetic construct
  source 1..20: mol_type = other DNA
agccaggtgtggtggcacgc

SEQ ID NO: 23519 - DNA, 20 bp, synthetic construct
  source 1..20: mol_type = other DNA
tagccaggtgtggtggcacg

SEQ ID NO: 23520 - DNA, 20 bp, synthetic construct
  source 1..20: mol_type = other DNA
ttagccaggtgtggtggcac

SEQ ID NO: 23521 - DNA, 20 bp, synthetic construct
  source 1..20: mol_type = other DNA
attagccaggtgtggtggca

SEQ ID NO: 23522 - DNA, 20 bp, synthetic construct
  source 1..20: mol_type = other DNA
aattagccaggtgtggtggc

SEQ ID NO: 23523 - DNA, 20 bp, synthetic construct
  source 1..20: mol_type = other DNA
aaattagccaggtgtggtgg

SEQ ID NO: 23524 - DNA, 20 bp, synthetic construct
  source 1..20: mol_type = other DNA
aaaattagccaggtgtggtg

SEQ ID NO: 23525 - DNA, 20 bp, synthetic construct
  source 1..20: mol_type = other DNA
aaaaattagccaggtgtggt

SEQ ID NO: 23526 - DNA, 20 bp, synthetic construct
  source 1..20: mol_type = other DNA
caaaaattagccaggtgtgg

SEQ ID NO: 23527 - DNA, 20 bp, synthetic construct
  source 1..20: mol_type = other DNA
acaaaaattagccaggtgtg

SEQ ID NO: 23528 - DNA, 20 bp, synthetic construct
  source 1..20: mol_type = other DNA
tacaaaaattagccaggtgt

SEQ ID NO: 23529 - DNA, 20 bp, synthetic construct
  source 1..20: mol_type = other DNA
atacaaaaattagccaggtg

SEQ ID NO: 23530 - DNA, 20 bp, synthetic construct
  source 1..20: mol_type = other DNA
aatacaaaaattagccaggt

SEQ ID NO: 23531 - DNA, 20 bp, synthetic construct
  source 1..20: mol_type = other DNA
aaatacaaaaattagccagg

SEQ ID NO: 23532 - DNA, 20 bp, synthetic construct
  source 1..20: mol_type = other DNA
aaaatacaaaaattagccag

SEQ ID NO: 23533 - DNA, 20 bp, synthetic construct
  source 1..20: mol_type = other DNA
aaaaatacaaaaattagcca

SEQ ID NO: 23534 - DNA, 20 bp, synthetic construct
  source 1..20: mol_type = other DNA
taaaaatacaaaaattagcc

SEQ ID NO: 23535 - DNA, 20 bp, synthetic construct
  source 1..20: mol_type = other DNA
ctaaaaatacaaaaattagc

SEQ ID NO: 23536 - DNA, 20 bp, synthetic construct
  source 1..20: mol_type = other DNA
actaaaaatacaaaaattag

SEQ ID NO: 23537 - DNA, 20 bp, synthetic construct
  source 1..20: mol_type = other DNA
tactaaaaatacaaaaatta

SEQ ID NO: 23538 - DNA, 20 bp, synthetic construct
  source 1..20: mol_type = other DNA
ctactaaaaatacaaaaatt

SEQ ID NO: 23539 - DNA, 20 bp, synthetic construct
  source 1..20: mol_type = other DNA
tctactaaaaatacaaaaat

SEQ ID NO: 23540 - DNA, 20 bp, synthetic construct
  source 1..20: mol_type = other DNA
ctctactaaaaatacaaaaa

SEQ ID NO: 23541 - DNA, 20 bp, synthetic construct
  source 1..20: mol_type = other DNA
tctctactaaaaatacaaaa

SEQ ID NO: 23542 - DNA, 20 bp, synthetic construct
  source 1..20: mol_type = other DNA
gtctctactaaaaatacaaa

SEQ ID NO: 23543 - DNA, 20 bp, synthetic construct
  source 1..20: mol_type = other DNA
cgtctctactaaaaatacaa

SEQ ID NO: 23544 - DNA, 20 bp, synthetic construct
  source 1..20: mol_type = other DNA
ccgtctctactaaaaataca

SEQ ID NO: 23545 - DNA, 20 bp, synthetic construct
  source 1..20: mol_type = other DNA
cccgtctctactaaaaatac

SEQ ID NO: 23546 - DNA, 20 bp, synthetic construct
  source 1..20: mol_type = other DNA
ccccgtctctactaaaaata

SEQ ID NO: 23547 - DNA, 20 bp, synthetic construct
  source 1..20: mol_type = other DNA
cccccgtctctactaaaaat

SEQ ID NO: 23548 - DNA, 20 bp, synthetic construct
  source 1..20: mol_type = other DNA
acccccgtctctactaaaaa

SEQ ID NO: 23549 - DNA, 20 bp, synthetic construct
  source 1..20: mol_type = other DNA
aacccccgtctctactaaaa

SEQ ID NO: 23550 - DNA, 20 bp, synthetic construct
  source 1..20: mol_type = other DNA
aaacccccgtctctactaaa

SEQ ID NO: 23551 - DNA, 20 bp, synthetic construct
  source 1..20: mol_type = other DNA
gaaacccccgtctctactaa

SEQ ID NO: 23552 - DNA, 20 bp, synthetic construct
  source 1..20: mol_type = other DNA
tgaaacccccgtctctacta

SEQ ID NO: 23553 - DNA, 20 bp, synthetic construct
  source 1..20: mol_type = other DNA
gtgaaacccccgtctctact

SEQ ID NO: 23554 - DNA, 20 bp, synthetic construct
  source 1..20: mol_type = other DNA
ggtgaaacccccgtctctac

SEQ ID NO: 23555 - DNA, 20 bp, synthetic construct
  source 1..20: mol_type = other DNA
tggtgaaacccccgtctcta

SEQ ID NO: 23556 - DNA, 20 bp, synthetic construct
  source 1..20: mol_type = other DNA
atggtgaaacccccgtctct

SEQ ID NO: 23557 - DNA, 20 bp, synthetic construct
  source 1..20: mol_type = other DNA
catggtgaaacccccgtctc

SEQ ID NO: 23558 - DNA, 20 bp, synthetic construct
  source 1..20: mol_type = other DNA
acatggtgaaacccccgtct

SEQ ID NO: 23559 - DNA, 20 bp, synthetic construct
  source 1..20: mol_type = other DNA
aacatggtgaaacccccgtc

SEQ ID NO: 23560 - DNA, 20 bp, synthetic construct
  source 1..20: mol_type = other DNA
caacatggtgaaacccccgt

SEQ ID NO: 23561 - DNA, 20 bp, synthetic construct
  source 1..20: mol_type = other DNA
ccaacatggtgaaacccccg

SEQ ID NO: 23562 - DNA, 20 bp, synthetic construct
  source 1..20: mol_type = other DNA
gccaacatggtgaaaccccc

SEQ ID NO: 23563 - DNA, 20 bp, synthetic construct
  source 1..20: mol_type = other DNA
ggccaacatggtgaaacccc

SEQ ID NO: 23564 - DNA, 20 bp, synthetic construct
  source 1..20: mol_type = other DNA
tggccaacatggtgaaaccc

SEQ ID NO: 23565 - DNA, 20 bp, synthetic construct
  source 1..20: mol_type = other DNA
ctggccaacatggtgaaacc

SEQ ID NO: 23566 - DNA, 20 bp, synthetic construct
  source 1..20: mol_type = other DNA
cctggccaacatggtgaaac

SEQ ID NO: 23567 - DNA, 20 bp, synthetic construct
  source 1..20: mol_type = other DNA
gcctggccaacatggtgaaa

SEQ ID NO: 23568 - DNA, 20 bp, synthetic construct
  source 1..20: mol_type = other DNA
agcctggccaacatggtgaa

SEQ ID NO: 23569 - DNA, 20 bp, synthetic construct
  source 1..20: mol_type = other DNA
cagcctggccaacatggtga

SEQ ID NO: 23570 - DNA, 20 bp, synthetic construct
  source 1..20: mol_type = other DNA
ccagcctggccaacatggtg

SEQ ID NO: 23571 - DNA, 20 bp, synthetic construct
  source 1..20: mol_type = other DNA
accagcctggccaacatggt

SEQ ID NO: 23572 - DNA, 20 bp, synthetic construct
  source 1..20: mol_type = other DNA
gaccagcctggccaacatgg

SEQ ID NO: 23573 - DNA, 20 bp, synthetic construct
  source 1..20: mol_type = other DNA
agaccagcctggccaacatg

SEQ ID NO: 23574 - DNA, 20 bp, synthetic construct
  source 1..20: mol_type = other DNA
gagaccagcctggccaacat

SEQ ID NO: 23575 - DNA, 20 bp, synthetic construct
  source 1..20: mol_type = other DNA
cgagaccagcctggccaaca

SEQ ID NO: 23576 - DNA, 20 bp, synthetic construct
  source 1..20: mol_type = other DNA
tcgagaccagcctggccaac

SEQ ID NO: 23577 - DNA, 20 bp, synthetic construct
  source 1..20: mol_type = other DNA
ttcgagaccagcctggccaa

SEQ ID NO: 23578 - DNA, 20 bp, synthetic construct
  source 1..20: mol_type = other DNA
gttcgagaccagcctggcca

SEQ ID NO: 23579 - DNA, 20 bp, synthetic construct
  source 1..20: mol_type = other DNA
agttcgagaccagcctggcc

SEQ ID NO: 23580 - DNA, 20 bp, synthetic construct
  source 1..20: mol_type = other DNA
gagttcgagaccagcctggc

SEQ ID NO: 23581 - DNA, 20 bp, synthetic construct
  source 1..20: mol_type = other DNA
ggagttcgagaccagcctgg

SEQ ID NO: 23582 - DNA, 20 bp, synthetic construct
  source 1..20: mol_type = other DNA
aggagttcgagaccagcctg

SEQ ID NO: 23583 - DNA, 20 bp, synthetic construct
  source 1..20: mol_type = other DNA
caggagttcgagaccagcct

SEQ ID NO: 23584 - DNA, 20 bp, synthetic construct
  source 1..20: mol_type = other DNA
tcaggagttcgagaccagcc

SEQ ID NO: 23585 - DNA, 20 bp, synthetic construct
  source 1..20: mol_type = other DNA
gtcaggagttcgagaccagc

SEQ ID NO: 23586 - DNA, 20 bp, synthetic construct
  source 1..20: mol_type = other DNA
ggtcaggagttcgagaccag

SEQ ID NO: 23587 - DNA, 20 bp, synthetic construct
  source 1..20: mol_type = other DNA
aggtcaggagttcgagacca

SEQ ID NO: 23588 - DNA, 20 bp, synthetic construct
  source 1..20: mol_type = other DNA
gaggtcaggagttcgagacc

SEQ ID NO: 23589 - DNA, 20 bp, synthetic construct
  source 1..20: mol_type = other DNA
tgaggtcaggagttcgagac

SEQ ID NO: 23590 - DNA, 20 bp, synthetic construct
  source 1..20: mol_type = other DNA
ctgaggtcaggagttcgaga

SEQ ID NO: 23591 - DNA, 20 bp, synthetic construct
  source 1..20: mol_type = other DNA
cctgaggtcaggagttcgag

SEQ ID NO: 23592 - DNA, 20 bp, synthetic construct
  source 1..20: mol_type = other DNA
acctgaggtcaggagttcga

SEQ ID NO: 23593 - DNA, 20 bp, synthetic construct
  source 1..20: mol_type = other DNA
cacctgaggtcaggagttcg

SEQ ID NO: 23594 - DNA, 20 bp, synthetic construct
  source 1..20: mol_type = other DNA
tcacctgaggtcaggagttc

SEQ ID NO: 23595 - DNA, 20 bp, synthetic construct
  source 1..20: mol_type = other DNA
atcacctgaggtcaggagtt

SEQ ID NO: 23596 - DNA, 20 bp, synthetic construct
  source 1..20: mol_type = other DNA
gatcacctgaggtcaggagt

SEQ ID NO: 23597 - DNA, 20 bp, synthetic construct
  source 1..20: mol_type = other DNA
ggatcacctgaggtcaggag

SEQ ID NO: 23598 - DNA, 20 bp, synthetic construct
  source 1..20: mol_type = other DNA
tggatcacctgaggtcagga

SEQ ID NO: 23599 - DNA, 20 bp, synthetic construct
  source 1..20: mol_type = other DNA
gtggatcacctgaggtcagg

SEQ ID NO: 23600 - DNA, 20 bp, synthetic construct
  source 1..20: mol_type = other DNA
ggtggatcacctgaggtcag

SEQ ID NO: 23601 - DNA, 20 bp, synthetic construct
  source 1..20: mol_type = other DNA
gggtggatcacctgaggtca

SEQ ID NO: 23602 - DNA, 20 bp, synthetic construct
  source 1..20: mol_type = other DNA
cgggtggatcacctgaggtc

SEQ ID NO: 23603 - DNA, 20 bp, synthetic construct
  source 1..20: mol_type = other DNA
gcgggtggatcacctgaggt

SEQ ID NO: 23604 - DNA, 20 bp, synthetic construct
  source 1..20: mol_type = other DNA
ggcgggtggatcacctgagg

SEQ ID NO: 23605 - DNA, 20 bp, synthetic construct
  source 1..20: mol_type = other DNA
cggcgggtggatcacctgag

SEQ ID NO: 23606 - DNA, 20 bp, synthetic construct
  source 1..20: mol_type = other DNA
acggcgggtggatcacctga

SEQ ID NO: 23607 - DNA, 20 bp, synthetic construct
  source 1..20: mol_type = other DNA
cacggcgggtggatcacctg

SEQ ID NO: 23608 - DNA, 20 bp, synthetic construct
  source 1..20: mol_type = other DNA
ccacggcgggtggatcacct

SEQ ID NO: 23609 - DNA, 20 bp, synthetic construct
  source 1..20: mol_type = other DNA
gccacggcgggtggatcacc

SEQ ID NO: 23610 - DNA, 20 bp, synthetic construct
  source 1..20: mol_type = other DNA
ggccacggcgggtggatcac

SEQ ID NO: 23611 - DNA, 20 bp, synthetic construct
  source 1..20: mol_type = other DNA
aggccacggcgggtggatca

SEQ ID NO: 23612 - DNA, 20 bp, synthetic construct
  source 1..20: mol_type = other DNA
gaggccacggcgggtggatc

SEQ ID NO: 23613 - DNA, 20 bp, synthetic construct
  source 1..20: mol_type = other DNA
ggaggccacggcgggtggat

SEQ ID NO: 23614 - DNA, 20 bp, synthetic construct
  source 1..20: mol_type = other DNA
gggaggccacggcgggtgga

SEQ ID NO: 23615 - DNA, 20 bp, synthetic construct
  source 1..20: mol_type = other DNA
tgggaggccacggcgggtgg

SEQ ID NO: 23616 - DNA, 20 bp, synthetic construct
  source 1..20: mol_type = other DNA
ttgggaggccacggcgggtg

SEQ ID NO: 23617 - DNA, 20 bp, synthetic construct
  source 1..20: mol_type = other DNA
tttgggaggccacggcgggt

SEQ ID NO: 23618 - DNA, 20 bp, synthetic construct
  source 1..20: mol_type = other DNA
ctttgggaggccacggcggg

SEQ ID NO: 23619 - DNA, 20 bp, synthetic construct
  source 1..20: mol_type = other DNA
actttgggaggccacggcgg

SEQ ID NO: 23620 - DNA, 20 bp, synthetic construct
  source 1..20: mol_type = other DNA
cactttgggaggccacggcg

SEQ ID NO: 23621 - DNA, 20 bp, synthetic construct
  source 1..20: mol_type = other DNA
gcactttgggaggccacggc

SEQ ID NO: 23622 - DNA, 20 bp, synthetic construct
  source 1..20: mol_type = other DNA
agcactttgggaggccacgg

SEQ ID NO: 23623 - DNA, 20 bp, synthetic construct
  source 1..20: mol_type = other DNA
cagcactttgggaggccacg

SEQ ID NO: 23624 - DNA, 20 bp, synthetic construct
  source 1..20: mol_type = other DNA
ccagcactttgggaggccac

SEQ ID NO: 23625 - DNA, 20 bp, synthetic construct
  source 1..20: mol_type = other DNA
cccagcactttgggaggcca

SEQ ID NO: 23626 - DNA, 20 bp, synthetic construct
  source 1..20: mol_type = other DNA
tcccagcactttgggaggcc

SEQ ID NO: 23627 - DNA, 20 bp, synthetic construct
  source 1..20: mol_type = other DNA
atcccagcactttgggaggc

SEQ ID NO: 23628 - DNA, 20 bp, synthetic construct
  source 1..20: mol_type = other DNA
aatcccagcactttgggagg

SEQ ID NO: 23629 - DNA, 20 bp, synthetic construct
  source 1..20: mol_type = other DNA
taatcccagcactttgggag

SEQ ID NO: 23630 - DNA, 20 bp, synthetic construct
  source 1..20: mol_type = other DNA
gtaatcccagcactttggga

SEQ ID NO: 23631 - DNA, 20 bp, synthetic construct
  source 1..20: mol_type = other DNA
tgtaatcccagcactttggg

SEQ ID NO: 23632 - DNA, 20 bp, synthetic construct
  source 1..20: mol_type = other DNA
ctgtaatcccagcactttgg

SEQ ID NO: 23633 - DNA, 20 bp, synthetic construct
  source 1..20: mol_type = other DNA
tctgtaatcccagcactttg

SEQ ID NO: 23634 - DNA, 20 bp, synthetic construct
  source 1..20: mol_type = other DNA
atctgtaatcccagcacttt

SEQ ID NO: 23635 - DNA, 20 bp, synthetic construct
  source 1..20: mol_type = other DNA
catctgtaatcccagcactt

SEQ ID NO: 23636 - DNA, 20 bp, synthetic construct
  source 1..20: mol_type = other DNA
acatctgtaatcccagcact

SEQ ID NO: 23637 - DNA, 20 bp, synthetic construct
  source 1..20: mol_type = other DNA
cacatctgtaatcccagcac

SEQ ID NO: 23638 - DNA, 20 bp, synthetic construct
  source 1..20: mol_type = other DNA
tcacatctgtaatcccagca

SEQ ID NO: 23639 - DNA, 20 bp, synthetic construct
  source 1..20: mol_type = other DNA
ctcacatctgtaatcccagc

SEQ ID NO: 23640 - DNA, 20 bp, synthetic construct
  source 1..20: mol_type = other DNA
gctcacatctgtaatcccag

SEQ ID NO: 23641 - DNA, 20 bp, synthetic construct
  source 1..20: mol_type = other DNA
ggctcacatctgtaatccca

SEQ ID NO: 23642 - DNA, 20 bp, synthetic construct
  source 1..20: mol_type = other DNA
tggctcacatctgtaatccc

SEQ ID NO: 23643 - DNA, 20 bp, synthetic construct
  source 1..20: mol_type = other DNA
gtggctcacatctgtaatcc

SEQ ID NO: 23644 - DNA, 20 bp, synthetic construct
  source 1..20: mol_type = other DNA
ggtggctcacatctgtaatc

SEQ ID NO: 23645 - DNA, 20 bp, synthetic construct
  source 1..20: mol_type = other DNA
cggtggctcacatctgtaat

SEQ ID NO: 23646 - DNA, 20 bp, synthetic construct
  source 1..20: mol_type = other DNA
gcggtggctcacatctgtaa

SEQ ID NO: 23647 - DNA, 20 bp, synthetic construct
  source 1..20: mol_type = other DNA
tgcggtggctcacatctgta

SEQ ID NO: 23648 - DNA, 20 bp, synthetic construct
  source 1..20: mol_type = other DNA
gtgcggtggctcacatctgt

SEQ ID NO: 23649 - DNA, 20 bp, synthetic construct
  source 1..20: mol_type = other DNA
ggtgcggtggctcacatctg

SEQ ID NO: 23650 - DNA, 20 bp, synthetic construct
  source 1..20: mol_type = other DNA
aggtgcggtggctcacatct

SEQ ID NO: 23651 - DNA, 20 bp, synthetic construct
  source 1..20: mol_type = other DNA
caggtgcggtggctcacatc

SEQ ID NO: 23652 - DNA, 20 bp, synthetic construct
  source 1..20: mol_type = other DNA
ccaggtgcggtggctcacat

SEQ ID NO: 23653 - DNA, 20 bp, synthetic construct
  source 1..20: mol_type = other DNA
gccaggtgcggtggctcaca

SEQ ID NO: 23654 - DNA, 20 bp, synthetic construct
  source 1..20: mol_type = other DNA
ggccaggtgcggtggctcac

SEQ ID NO: 23655 - DNA, 20 bp, synthetic construct
  source 1..20: mol_type = other DNA
tggccaggtgcggtggctca

SEQ ID NO: 23656 - DNA, 20 bp, synthetic construct
  source 1..20: mol_type = other DNA
ctggccaggtgcggtggctc

SEQ ID NO: 23657 - DNA, 20 bp, synthetic construct
  source 1..20: mol_type = other DNA
tctggccaggtgcggtggct

SEQ ID NO: 23658 - DNA, 20 bp, synthetic construct
  source 1..20: mol_type = other DNA
ctctggccaggtgcggtggc

SEQ ID NO: 23659 - DNA, 20 bp, synthetic construct
  source 1..20: mol_type = other DNA
tctctggccaggtgcggtgg

SEQ ID NO: 23660 - DNA, 20 bp, synthetic construct
  source 1..20: mol_type = other DNA
atctctggccaggtgcggtg

SEQ ID NO: 23661 - DNA, 20 bp, synthetic construct
  source 1..20: mol_type = other DNA
catctctggccaggtgcggt

SEQ ID NO: 23662 - DNA, 20 bp, synthetic construct
  source 1..20: mol_type = other DNA
tcatctctggccaggtgcgg

SEQ ID NO: 23663 - DNA, 20 bp, synthetic construct
  source 1..20: mol_type = other DNA
ctcatctctggccaggtgcg

SEQ ID NO: 23664 - DNA, 20 bp, synthetic construct
  source 1..20: mol_type = other DNA
cctcatctctggccaggtgc

SEQ ID NO: 23665 - DNA, 20 bp, synthetic construct
  source 1..20: mol_type = other DNA
acctcatctctggccaggtg

SEQ ID NO: 23666 - DNA, 20 bp, synthetic construct
  source 1..20: mol_type = other DNA
gacctcatctctggccaggt

SEQ ID NO: 23667 - DNA, 20 bp, synthetic construct
  source 1..20: mol_type = other DNA
agacctcatctctggccagg

SEQ ID NO: 23668 - DNA, 20 bp, synthetic construct
  source 1..20: mol_type = other DNA
aagacctcatctctggccag

SEQ ID NO: 23669 - DNA, 20 bp, synthetic construct
  source 1..20: mol_type = other DNA
caagacctcatctctggcca

SEQ ID NO: 23670 - DNA, 20 bp, synthetic construct
  source 1..20: mol_type = other DNA
gcaagacctcatctctggcc

SEQ ID NO: 23671 - DNA, 20 bp, synthetic construct
  source 1..20: mol_type = other DNA
agcaagacctcatctctggc

SEQ ID NO: 23672 - DNA, 20 bp, synthetic construct
  source 1..20: mol_type = other DNA
cagcaagacctcatctctgg

SEQ ID NO: 23673 - DNA, 20 bp, synthetic construct
  source 1..20: mol_type = other DNA
acagcaagacctcatctctg

SEQ ID NO: 23674 - DNA, 20 bp, synthetic construct
  source 1..20: mol_type = other DNA
tacagcaagacctcatctct

SEQ ID NO: 23675 - DNA, 20 bp, synthetic construct
  source 1..20: mol_type = other DNA
atacagcaagacctcatctc

SEQ ID NO: 23676 - DNA, 20 bp, synthetic construct
  source 1..20: mol_type = other DNA
aatacagcaagacctcatct

SEQ ID NO: 23677 - DNA, 20 bp, synthetic construct
  source 1..20: mol_type = other DNA
caatacagcaagacctcatc

SEQ ID NO: 23678 - DNA, 20 bp, synthetic construct
  source 1..20: mol_type = other DNA
gcaatacagcaagacctcat

SEQ ID NO: 23679 - DNA, 20 bp, synthetic construct
  source 1..20: mol_type = other DNA
ggcaatacagcaagacctca

SEQ ID NO: 23680 - DNA, 20 bp, synthetic construct
  source 1..20: mol_type = other DNA
gggcaatacagcaagacctc

SEQ ID NO: 23681 - DNA, 20 bp, synthetic construct
  source 1..20: mol_type = other DNA
tgggcaatacagcaagacct

SEQ ID NO: 23682 - DNA, 20 bp, synthetic construct
  source 1..20: mol_type = other DNA
ctgggcaatacagcaagacc

SEQ ID NO: 23683 - DNA, 20 bp, synthetic construct
  source 1..20: mol_type = other DNA
cctgggcaatacagcaagac

SEQ ID NO: 23684 - DNA, 20 bp, synthetic construct
  source 1..20: mol_type = other DNA
ccctgggcaatacagcaaga

SEQ ID NO: 23685 - DNA, 20 bp, synthetic construct
  source 1..20: mol_type = other DNA
gccctgggcaatacagcaag

SEQ ID NO: 23686 - DNA, 20 bp, synthetic construct
  source 1..20: mol_type = other DNA
cgccctgggcaatacagcaa

SEQ ID NO: 23687 - DNA, 20 bp, synthetic construct
  source 1..20: mol_type = other DNA
acgccctgggcaatacagca

SEQ ID NO: 23688 - DNA, 20 bp, synthetic construct
  source 1..20: mol_type = other DNA
aacgccctgggcaatacagc

SEQ ID NO: 23689 - DNA, 20 bp, synthetic construct
  source 1..20: mol_type = other DNA
caacgccctgggcaatacag

SEQ ID NO: 23690 - DNA, 20 bp, synthetic construct
  source 1..20: mol_type = other DNA
tcaacgccctgggcaataca

SEQ ID NO: 23691 - DNA, 20 bp, synthetic construct
  source 1..20: mol_type = other DNA
ttcaacgccctgggcaatac

SEQ ID NO: 23692 - DNA, 20 bp, synthetic construct
  source 1..20: mol_type = other DNA
gttcaacgccctgggcaata

SEQ ID NO: 23693 - DNA, 20 bp, synthetic construct
  source 1..20: mol_type = other DNA
agttcaacgccctgggcaat

SEQ ID NO: 23694 - DNA, 20 bp, synthetic construct
  source 1..20: mol_type = other DNA
gagttcaacgccctgggcaa

SEQ ID NO: 23695 - DNA, 20 bp, synthetic construct
  source 1..20: mol_type = other DNA
ggagttcaacgccctgggca

SEQ ID NO: 23696 - DNA, 20 bp, synthetic construct
  source 1..20: mol_type = other DNA
aggagttcaacgccctgggc

SEQ ID NO: 23697 - DNA, 20 bp, synthetic construct
  source 1..20: mol_type = other DNA
caggagttcaacgccctggg

SEQ ID NO: 23698 - DNA, 20 bp, synthetic construct
  source 1..20: mol_type = other DNA
ccaggagttcaacgccctgg

SEQ ID NO: 23699 - DNA, 20 bp, synthetic construct
  source 1..20: mol_type = other DNA
cccaggagttcaacgccctg

SEQ ID NO: 23700 - DNA, 20 bp, synthetic construct
  source 1..20: mol_type = other DNA
gcccaggagttcaacgccct

SEQ ID NO: 23701 - DNA, 20 bp, synthetic construct
  source 1..20: mol_type = other DNA
agcccaggagttcaacgccc

SEQ ID NO: 23702 - DNA, 20 bp, synthetic construct
  source 1..20: mol_type = other DNA
gagcccaggagttcaacgcc

SEQ ID NO: 23703 - DNA, 20 bp, synthetic construct
  source 1..20: mol_type = other DNA
ggagcccaggagttcaacgc

SEQ ID NO: 23704 - DNA, 20 bp, synthetic construct
  source 1..20: mol_type = other DNA
tggagcccaggagttcaacg

SEQ ID NO: 23705 - DNA, 20 bp, synthetic construct
  source 1..20: mol_type = other DNA
ctggagcccaggagttcaac

SEQ ID NO: 23706 - DNA, 20 bp, synthetic construct
  source 1..20: mol_type = other DNA
gctggagcccaggagttcaa

SEQ ID NO: 23707 - DNA, 20 bp, synthetic construct
  source 1..20: mol_type = other DNA
tgctggagcccaggagttca

SEQ ID NO: 23708 - DNA, 20 bp, synthetic construct
  source 1..20: mol_type = other DNA
ttgctggagcccaggagttc

SEQ ID NO: 23709 - DNA, 20 bp, synthetic construct
  source 1..20: mol_type = other DNA
attgctggagcccaggagtt

SEQ ID NO: 23710 - DNA, 20 bp, synthetic construct
  source 1..20: mol_type = other DNA
gattgctggagcccaggagt

SEQ ID NO: 23711 - DNA, 20 bp, synthetic construct
  source 1..20: mol_type = other DNA
ggattgctggagcccaggag

SEQ ID NO: 23712 - DNA, 20 bp, synthetic construct
  source 1..20: mol_type = other DNA
aggattgctggagcccagga

SEQ ID NO: 23713 - DNA, 20 bp, synthetic construct
  source 1..20: mol_type = other DNA
gaggattgctggagcccagg

SEQ ID NO: 23714 - DNA, 20 bp, synthetic construct
  source 1..20: mol_type = other DNA
ggaggattgctggagcccag

SEQ ID NO: 23715 - DNA, 20 bp, synthetic construct
  source 1..20: mol_type = other DNA
gggaggattgctggagccca

SEQ ID NO: 23716 - DNA, 20 bp, synthetic construct
  source 1..20: mol_type = other DNA
tgggaggattgctggagccc

SEQ ID NO: 23717 - DNA, 20 bp, synthetic construct
  source 1..20: mol_type = other DNA
gtgggaggattgctggagcc

SEQ ID NO: 23718 - DNA, 20 bp, synthetic construct
  source 1..20: mol_type = other DNA
ggtgggaggattgctggagc

SEQ ID NO: 23719 - DNA, 20 bp, synthetic construct
  source 1..20: mol_type = other DNA
aggtgggaggattgctggag

SEQ ID NO: 23720 - DNA, 20 bp, synthetic construct
  source 1..20: mol_type = other DNA
gaggtgggaggattgctgga

SEQ ID NO: 23721 - DNA, 20 bp, synthetic construct
  source 1..20: mol_type = other DNA
tgaggtgggaggattgctgg

SEQ ID NO: 23722 - DNA, 20 bp, synthetic construct
  source 1..20: mol_type = other DNA
ctgaggtgggaggattgctg

SEQ ID NO: 23723 - DNA, 20 bp, synthetic construct
  source 1..20: mol_type = other DNA
gctgaggtgggaggattgct

SEQ ID NO: 23724 - DNA, 20 bp, synthetic construct
  source 1..20: mol_type = other DNA
agctgaggtgggaggattgc

SEQ ID NO: 23725 - DNA, 20 bp, synthetic construct
  source 1..20: mol_type = other DNA
aagctgaggtgggaggattg

SEQ ID NO: 23726 - DNA, 20 bp, synthetic construct
  source 1..20: mol_type = other DNA
gaagctgaggtgggaggatt

SEQ ID NO: 23727 - DNA, 20 bp, synthetic construct
  source 1..20: mol_type = other DNA
ggaagctgaggtgggaggat

SEQ ID NO: 23728 - DNA, 20 bp, synthetic construct
  source 1..20: mol_type = other DNA
gggaagctgaggtgggagga

SEQ ID NO: 23729 - DNA, 20 bp, synthetic construct
  source 1..20: mol_type = other DNA
tgggaagctgaggtgggagg

SEQ ID NO: 23730 - DNA, 20 bp, synthetic construct
  source 1..20: mol_type = other DNA
gtgggaagctgaggtgggag

SEQ ID NO: 23731 - DNA, 20 bp, synthetic construct
  source 1..20: mol_type = other DNA
cgtgggaagctgaggtggga

SEQ ID NO: 23732 - DNA, 20 bp, synthetic construct
  source 1..20: mol_type = other DNA
acgtgggaagctgaggtggg

SEQ ID NO: 23733 - DNA, 20 bp, synthetic construct
  source 1..20: mol_type = other DNA
tacgtgggaagctgaggtgg

SEQ ID NO: 23734 - DNA, 20 bp, synthetic construct
  source 1..20: mol_type = other DNA
ctacgtgggaagctgaggtg

SEQ ID NO: 23735 - DNA, 20 bp, synthetic construct
  source 1..20: mol_type = other DNA
gctacgtgggaagctgaggt

SEQ ID NO: 23736 - DNA, 20 bp, synthetic construct
  source 1..20: mol_type = other DNA
agctacgtgggaagctgagg

SEQ ID NO: 23737 - DNA, 20 bp, synthetic construct
  source 1..20: mol_type = other DNA
cagctacgtgggaagctgag

SEQ ID NO: 23738 - DNA, 20 bp, synthetic construct
  source 1..20: mol_type = other DNA
ccagctacgtgggaagctga

SEQ ID NO: 23739 - DNA, 20 bp, synthetic construct
  source 1..20: mol_type = other DNA
cccagctacgtgggaagctg

SEQ ID NO: 23740 - DNA, 20 bp, synthetic construct
  source 1..20: mol_type = other DNA
tcccagctacgtgggaagct

SEQ ID NO: 23741 - DNA, 20 bp, synthetic construct
  source 1..20: mol_type = other DNA
gtcccagctacgtgggaagc

SEQ ID NO: 23742 - DNA, 20 bp, synthetic construct
  source 1..20: mol_type = other DNA
agtcccagctacgtgggaag

SEQ ID NO: 23743 - DNA, 20 bp, synthetic construct
  source 1..20: mol_type = other DNA
cagtcccagctacgtgggaa

SEQ ID NO: 23744 - DNA, 20 bp, synthetic construct
  source 1..20: mol_type = other DNA
acagtcccagctacgtggga

SEQ ID NO: 23745 - DNA, 20 bp, synthetic construct
  source 1..20: mol_type = other DNA
cacagtcccagctacgtggg

SEQ ID NO: 23746 - DNA, 20 bp, synthetic construct
  source 1..20: mol_type = other DNA
ccacagtcccagctacgtgg

SEQ ID NO: 23747 - DNA, 20 bp, synthetic construct
  source 1..20: mol_type = other DNA
cccacagtcccagctacgtg

SEQ ID NO: 23748 - DNA, 20 bp, synthetic construct
  source 1..20: mol_type = other DNA
acccacagtcccagctacgt

SEQ ID NO: 23749 - DNA, 20 bp, synthetic construct
  source 1..20: mol_type = other DNA
cacccacagtcccagctacg

SEQ ID NO: 23750 - DNA, 20 bp, synthetic construct
  source 1..20: mol_type = other DNA
gcacccacagtcccagctac

SEQ ID NO: 23751 - DNA, 20 bp, synthetic construct
  source 1..20: mol_type = other DNA
tgcacccacagtcccagcta

SEQ ID NO: 23752 - DNA, 20 bp, synthetic construct
  source 1..20: mol_type = other DNA
gtgcacccacagtcccagct

SEQ ID NO: 23753 - DNA, 20 bp, synthetic construct
  source 1..20: mol_type = other DNA
cgtgcacccacagtcccagc

SEQ ID NO: 23754 - DNA, 20 bp, synthetic construct
  source 1..20: mol_type = other DNA
gcgtgcacccacagtcccag

SEQ ID NO: 23755 - DNA, 20 bp, synthetic construct
  source 1..20: mol_type = other DNA
ggcgtgcacccacagtccca

SEQ ID NO: 23756 - DNA, 20 bp, synthetic construct
  source 1..20: mol_type = other DNA
tggcgtgcacccacagtccc

SEQ ID NO: 23757 - DNA, 20 bp, synthetic construct
  source 1..20: mol_type = other DNA
atggcgtgcacccacagtcc

SEQ ID NO: 23758 - DNA, 20 bp, synthetic construct
  source 1..20: mol_type = other DNA
gatggcgtgcacccacagtc

SEQ ID NO: 23759 - DNA, 20 bp, synthetic construct
  source 1..20: mol_type = other DNA
tgatggcgtgcacccacagt

SEQ ID NO: 23760 - DNA, 20 bp, synthetic construct
  source 1..20: mol_type = other DNA
atgatggcgtgcacccacag

SEQ ID NO: 23761 - DNA, 20 bp, synthetic construct
  source 1..20: mol_type = other DNA
catgatggcgtgcacccaca

SEQ ID NO: 23762 - DNA, 20 bp, synthetic construct
  source 1..20: mol_type = other DNA
gcatgatggcgtgcacccac

SEQ ID NO: 23763 - DNA, 20 bp, synthetic construct
  source 1..20: mol_type = other DNA
ggcatgatggcgtgcaccca

SEQ ID NO: 23764 - DNA, 20 bp, synthetic construct
  source 1..20: mol_type = other DNA
aggcatgatggcgtgcaccc

SEQ ID NO: 23765 - DNA, 20 bp, synthetic construct
  source 1..20: mol_type = other DNA
taggcatgatggcgtgcacc

SEQ ID NO: 23766 - DNA, 20 bp, synthetic construct
  source 1..20: mol_type = other DNA
ctaggcatgatggcgtgcac

SEQ ID NO: 23767 - DNA, 20 bp, synthetic construct
  source 1..20: mol_type = other DNA
gctaggcatgatggcgtgca

SEQ ID NO: 23768 - DNA, 20 bp, synthetic construct
  source 1..20: mol_type = other DNA
ggctaggcatgatggcgtgc

SEQ ID NO: 23769 - DNA, 20 bp, synthetic construct
  source 1..20: mol_type = other DNA
cggctaggcatgatggcgtg

SEQ ID NO: 23770 - DNA, 20 bp, synthetic construct
  source 1..20: mol_type = other DNA
acggctaggcatgatggcgt

SEQ ID NO: 23771 - DNA, 20 bp, synthetic construct
  source 1..20: mol_type = other DNA
aacggctaggcatgatggcg

SEQ ID NO: 23772 - DNA, 20 bp, synthetic construct
  source 1..20: mol_type = other DNA
aaacggctaggcatgatggc

SEQ ID NO: 23773 - DNA, 20 bp, synthetic construct
  source 1..20: mol_type = other DNA
aaaacggctaggcatgatgg

SEQ ID NO: 23774 - DNA, 20 bp, synthetic construct
  source 1..20: mol_type = other DNA
caaaacggctaggcatgatg

SEQ ID NO: 23775 - DNA, 20 bp, synthetic construct
  source 1..20: mol_type = other DNA
acaaaacggctaggcatgat

SEQ ID NO: 23776 - DNA, 20 bp, synthetic construct
  source 1..20: mol_type = other DNA
cacaaaacggctaggcatga

SEQ ID NO: 23777 - DNA, 20 bp, synthetic construct
  source 1..20: mol_type = other DNA
tcacaaaacggctaggcatg

SEQ ID NO: 23778 - DNA, 20 bp, synthetic construct
  source 1..20: mol_type = other DNA
ttcacaaaacggctaggcat

SEQ ID NO: 23779 - DNA, 20 bp, synthetic construct
  source 1..20: mol_type = other DNA
gttcacaaaacggctaggca

SEQ ID NO: 23780 - DNA, 20 bp, synthetic construct
  source 1..20: mol_type = other DNA
agttcacaaaacggctaggc

SEQ ID NO: 23781 - DNA, 20 bp, synthetic construct
  source 1..20: mol_type = other DNA
cagttcacaaaacggctagg

SEQ ID NO: 23782 - DNA, 20 bp, synthetic construct
  source 1..20: mol_type = other DNA
acagttcacaaaacggctag

SEQ ID NO: 23783 - DNA, 20 bp, synthetic construct
  source 1..20: mol_type = other DNA
aacagttcacaaaacggcta

SEQ ID NO: 23784 - DNA, 20 bp, synthetic construct
  source 1..20: mol_type = other DNA
caacagttcacaaaacggct

SEQ ID NO: 23785 - DNA, 20 bp, synthetic construct
  source 1..20: mol_type = other DNA
tcaacagttcacaaaacggc

SEQ ID NO: 23786 - DNA, 20 bp, synthetic construct
  source 1..20: mol_type = other DNA
gtcaacagttcacaaaacgg

SEQ ID NO: 23787 - DNA, 20 bp, synthetic construct
  source 1..20: mol_type = other DNA
ggtcaacagttcacaaaacg

SEQ ID NO: 23788 - DNA, 20 bp, synthetic construct
  source 1..20: mol_type = other DNA
tggtcaacagttcacaaaac

SEQ ID NO: 23789 - DNA, 20 bp, synthetic construct
  source 1..20: mol_type = other DNA
ttggtcaacagttcacaaaa

SEQ ID NO: 23790 - DNA, 20 bp, synthetic construct
  source 1..20: mol_type = other DNA
attggtcaacagttcacaaa

SEQ ID NO: 23791 - DNA, 20 bp, synthetic construct
  source 1..20: mol_type = other DNA
cattggtcaacagttcacaa

SEQ ID NO: 23792 - DNA, 20 bp, synthetic construct
  source 1..20: mol_type = other DNA
gcattggtcaacagttcaca

SEQ ID NO: 23793 - DNA, 20 bp, synthetic construct
  source 1..20: mol_type = other DNA
agcattggtcaacagttcac

SEQ ID NO: 23794 - DNA, 20 bp, synthetic construct
  source 1..20: mol_type = other DNA
gagcattggtcaacagttca

SEQ ID NO: 23795 - DNA, 20 bp, synthetic construct
  source 1..20: mol_type = other DNA
agagcattggtcaacagttc

SEQ ID NO: 23796 - DNA, 20 bp, synthetic construct
  source 1..20: mol_type = other DNA
aagagcattggtcaacagtt

SEQ ID NO: 23797 - DNA, 20 bp, synthetic construct
  source 1..20: mol_type = other DNA
aaagagcattggtcaacagt

SEQ ID NO: 23798 - DNA, 20 bp, synthetic construct
  source 1..20: mol_type = other DNA
aaaagagcattggtcaacag

SEQ ID NO: 23799 - DNA, 20 bp, synthetic construct
  source 1..20: mol_type = other DNA
gaaaagagcattggtcaaca

SEQ ID NO: 23800 - DNA, 20 bp, synthetic construct
  source 1..20: mol_type = other DNA
agaaaagagcattggtcaac

SEQ ID NO: 23801 - DNA, 20 bp, synthetic construct
  source 1..20: mol_type = other DNA
cagaaaagagcattggtcaa

SEQ ID NO: 23802 - DNA, 20 bp, synthetic construct
  source 1..20: mol_type = other DNA
gcagaaaagagcattggtca

SEQ ID NO: 23803 - DNA, 20 bp, synthetic construct
  source 1..20: mol_type = other DNA
tgcagaaaagagcattggtc

SEQ ID NO: 23804 - DNA, 20 bp, synthetic construct
  source 1..20: mol_type = other DNA
ctgcagaaaagagcattggt

SEQ ID NO: 23805 - DNA, 20 bp, synthetic construct
  source 1..20: mol_type = other DNA
tctgcagaaaagagcattgg

SEQ ID NO: 23806 - DNA, 20 bp, synthetic construct
  source 1..20: mol_type = other DNA
gtctgcagaaaagagcattg

SEQ ID NO: 23807 - DNA, 20 bp, synthetic construct
  source 1..20: mol_type = other DNA
tgtctgcagaaaagagcatt

SEQ ID NO: 23808 - DNA, 20 bp, synthetic construct
  source 1..20: mol_type = other DNA
ctgtctgcagaaaagagcat

SEQ ID NO: 23809 - DNA, 20 bp, synthetic construct
  source 1..20: mol_type = other DNA
tctgtctgcagaaaagagca

SEQ ID NO: 23810 - DNA, 20 bp, synthetic construct
  source 1..20: mol_type = other DNA
ttctgtctgcagaaaagagc

SEQ ID NO: 23811 - DNA, 20 bp, synthetic construct
  source 1..20: mol_type = other DNA
tttctgtctgcagaaaagag

SEQ ID NO: 23812 - DNA, 20 bp, synthetic construct
  source 1..20: mol_type = other DNA
ctttctgtctgcagaaaaga

SEQ ID NO: 23813 - DNA, 20 bp, synthetic construct
  source 1..20: mol_type = other DNA
actttctgtctgcagaaaag

SEQ ID NO: 23814 - DNA, 20 bp, synthetic construct
  source 1..20: mol_type = other DNA
aactttctgtctgcagaaaa

SEQ ID NO: 23815 - DNA, 20 bp, synthetic construct
  source 1..20: mol_type = other DNA
gaactttctgtctgcagaaa

SEQ ID NO: 23816 - DNA, 20 bp, synthetic construct
  source 1..20: mol_type = other DNA
tgaactttctgtctgcagaa

SEQ ID NO: 23817 - DNA, 20 bp, synthetic construct
  source 1..20: mol_type = other DNA
gtgaactttctgtctgcaga

SEQ ID NO: 23818 - DNA, 20 bp, synthetic construct
  source 1..20: mol_type = other DNA
agtgaactttctgtctgcag

SEQ ID NO: 23819 - DNA, 20 bp, synthetic construct
  source 1..20: mol_type = other DNA
cagtgaactttctgtctgca

SEQ ID NO: 23820 - DNA, 20 bp, synthetic construct
  source 1..20: mol_type = other DNA
acagtgaactttctgtctgc

SEQ ID NO: 23821 - DNA, 20 bp, synthetic construct
  source 1..20: mol_type = other DNA
cacagtgaactttctgtctg

SEQ ID NO: 23822 - DNA, 20 bp, synthetic construct
  source 1..20: mol_type = other DNA
ccacagtgaactttctgtct

SEQ ID NO: 23823 - DNA, 20 bp, synthetic construct
  source 1..20: mol_type = other DNA
accacagtgaactttctgtc

SEQ ID NO: 23824 - DNA, 20 bp, synthetic construct
  source 1..20: mol_type = other DNA
aaccacagtgaactttctgt

SEQ ID NO: 23825 - DNA, 20 bp, synthetic construct
  source 1..20: mol_type = other DNA
taaccacagtgaactttctg

SEQ ID NO: 23826 - DNA, 20 bp, synthetic construct
  source 1..20: mol_type = other DNA
ctaaccacagtgaactttct

SEQ ID NO: 23827 - DNA, 20 bp, synthetic construct
  source 1..20: mol_type = other DNA
cctaaccacagtgaactttc

SEQ ID NO: 23828 - DNA, 20 bp, synthetic construct
  source 1..20: mol_type = other DNA
tcctaaccacagtgaacttt

SEQ ID NO: 23829 - DNA, 20 bp, synthetic construct
  source 1..20: mol_type = other DNA
ctcctaaccacagtgaactt

SEQ ID NO: 23830 - DNA, 20 bp, synthetic construct
  source 1..20: mol_type = other DNA
actcctaaccacagtgaact

SEQ ID NO: 23831 - DNA, 20 bp, synthetic construct
  source 1..20: mol_type = other DNA
aactcctaaccacagtgaac

SEQ ID NO: 23832 - DNA, 20 bp, synthetic construct
  source 1..20: mol_type = other DNA
taactcctaaccacagtgaa

SEQ ID NO: 23833 - DNA, 20 bp, synthetic construct
  source 1..20: mol_type = other DNA
ttaactcctaaccacagtga

SEQ ID NO: 23834 - DNA, 20 bp, synthetic construct
  source 1..20: mol_type = other DNA
cttaactcctaaccacagtg

SEQ ID NO: 23835 - DNA, 20 bp, synthetic construct
  source 1..20: mol_type = other DNA
tcttaactcctaaccacagt

SEQ ID NO: 23836 - DNA, 20 bp, synthetic construct
  source 1..20: mol_type = other DNA
gtcttaactcctaaccacag

SEQ ID NO: 23837 - DNA, 20 bp, synthetic construct
  source 1..20: mol_type = other DNA
agtcttaactcctaaccaca

SEQ ID NO: 23838 - DNA, 20 bp, synthetic construct
  source 1..20: mol_type = other DNA
aagtcttaactcctaaccac

SEQ ID NO: 23839 - DNA, 20 bp, synthetic construct
  source 1..20: mol_type = other DNA
aaagtcttaactcctaacca

SEQ ID NO: 23840 - DNA, 20 bp, synthetic construct
  source 1..20: mol_type = other DNA
aaaagtcttaactcctaacc

SEQ ID NO: 23841 - DNA, 20 bp, synthetic construct
  source 1..20: mol_type = other DNA
taaaagtcttaactcctaac

SEQ ID NO: 23842 - DNA, 20 bp, synthetic construct
  source 1..20: mol_type = other DNA
ttaaaagtcttaactcctaa

SEQ ID NO: 23843 - DNA, 20 bp, synthetic construct
  source 1..20: mol_type = other DNA
gttaaaagtcttaactccta

SEQ ID NO: 23844 - DNA, 20 bp, synthetic construct
  source 1..20: mol_type = other DNA
ggttaaaagtcttaactcct

SEQ ID NO: 23845 - DNA, 20 bp, synthetic construct
  source 1..20: mol_type = other DNA
aggttaaaagtcttaactcc

SEQ ID NO: 23846 - DNA, 20 bp, synthetic construct
  source 1..20: mol_type = other DNA
gaggttaaaagtcttaactc

SEQ ID NO: 23847 - DNA, 20 bp, synthetic construct
  source 1..20: mol_type = other DNA
agaggttaaaagtcttaact

SEQ ID NO: 23848 - DNA, 20 bp, synthetic construct
  source 1..20: mol_type = other DNA
cagaggttaaaagtcttaac

SEQ ID NO: 23849 - DNA, 20 bp, synthetic construct
  source 1..20: mol_type = other DNA
tcagaggttaaaagtcttaa

SEQ ID NO: 23850 - DNA, 20 bp, synthetic construct
  source 1..20: mol_type = other DNA
gtcagaggttaaaagtctta

SEQ ID NO: 23851 - DNA, 20 bp, synthetic construct
  source 1..20: mol_type = other DNA
ggtcagaggttaaaagtctt

SEQ ID NO: 23852 - DNA, 20 bp, synthetic construct
  source 1..20: mol_type = other DNA
aggtcagaggttaaaagtct

SEQ ID NO: 23853 - DNA, 20 bp, synthetic construct
  source 1..20: mol_type = other DNA
gaggtcagaggttaaaagtc

SEQ ID NO: 23854 - DNA, 20 bp, synthetic construct
  source 1..20: mol_type = other DNA
tgaggtcagaggttaaaagt

SEQ ID NO: 23855 - DNA, 20 bp, synthetic construct
  source 1..20: mol_type = other DNA
ttgaggtcagaggttaaaag

SEQ ID NO: 23856 - DNA, 20 bp, synthetic construct
  source 1..20: mol_type = other DNA
cttgaggtcagaggttaaaa

SEQ ID NO: 23857 - DNA, 20 bp, synthetic construct
  source 1..20: mol_type = other DNA
acttgaggtcagaggttaaa

SEQ ID NO: 23858 - DNA, 20 bp, synthetic construct
  source 1..20: mol_type = other DNA
cacttgaggtcagaggttaa

SEQ ID NO: 23859 - DNA, 20 bp, synthetic construct
  source 1..20: mol_type = other DNA
tcacttgaggtcagaggtta

SEQ ID NO: 23860 - DNA, 20 bp, synthetic construct
  source 1..20: mol_type = other DNA
atcacttgaggtcagaggtt

SEQ ID NO: 23861 - DNA, 20 bp, synthetic construct
  source 1..20: mol_type = other DNA
gatcacttgaggtcagaggt

SEQ ID NO: 23862 - DNA, 20 bp, synthetic construct
  source 1..20: mol_type = other DNA
agatcacttgaggtcagagg

SEQ ID NO: 23863 - DNA, 20 bp, synthetic construct
  source 1..20: mol_type = other DNA
cagatcacttgaggtcagag

SEQ ID NO: 23864 - DNA, 20 bp, synthetic construct
  source 1..20: mol_type = other DNA
gcagatcacttgaggtcaga

SEQ ID NO: 23865 - DNA, 20 bp, synthetic construct
  source 1..20: mol_type = other DNA
ggcagatcacttgaggtcag

SEQ ID NO: 23866 - DNA, 20 bp, synthetic construct
  source 1..20: mol_type = other DNA
gggcagatcacttgaggtca

SEQ ID NO: 23867 - DNA, 20 bp, synthetic construct
  source 1..20: mol_type = other DNA
tgggcagatcacttgaggtc

SEQ ID NO: 23868 - DNA, 20 bp, synthetic construct
  source 1..20: mol_type = other DNA
gtgggcagatcacttgaggt

SEQ ID NO: 23869 - DNA, 20 bp, synthetic construct
  source 1..20: mol_type = other DNA
ggtgggcagatcacttgagg

SEQ ID NO: 23870 - DNA, 20 bp, synthetic construct
  source 1..20: mol_type = other DNA
aggtgggcagatcacttgag

SEQ ID NO: 23871 - DNA, 20 bp, synthetic construct
  source 1..20: mol_type = other DNA
aaggtgggcagatcacttga

SEQ ID NO: 23872 - DNA, 20 bp, synthetic construct
  source 1..20: mol_type = other DNA
caaggtgggcagatcacttg

SEQ ID NO: 23873 - DNA, 20 bp, synthetic construct
  source 1..20: mol_type = other DNA
tcaaggtgggcagatcactt

SEQ ID NO: 23874 - DNA, 20 bp, synthetic construct
  source 1..20: mol_type = other DNA
gtcaaggtgggcagatcact

SEQ ID NO: 23875 - DNA, 20 bp, synthetic construct
  source 1..20: mol_type = other DNA
ggtcaaggtgggcagatcac

SEQ ID NO: 23876 - DNA, 20 bp, synthetic construct
  source 1..20: mol_type = other DNA
aggtcaaggtgggcagatca

SEQ ID NO: 23877 - DNA, 20 bp, synthetic construct
  source 1..20: mol_type = other DNA
gaggtcaaggtgggcagatc

SEQ ID NO: 23878 - DNA, 20 bp, synthetic construct
  source 1..20: mol_type = other DNA
ggaggtcaaggtgggcagat

SEQ ID NO: 23879 - DNA, 20 bp, synthetic construct
  source 1..20: mol_type = other DNA
gggaggtcaaggtgggcaga

SEQ ID NO: 23880 - DNA, 20 bp, synthetic construct
  source 1..20: mol_type = other DNA
tgggaggtcaaggtgggcag

SEQ ID NO: 23881 - DNA, 20 bp, synthetic construct
  source 1..20: mol_type = other DNA
ttgggaggtcaaggtgggca

SEQ ID NO: 23882 - DNA, 20 bp, synthetic construct
  source 1..20: mol_type = other DNA
tttgggaggtcaaggtgggc

SEQ ID NO: 23883 - DNA, 20 bp, synthetic construct
  source 1..20: mol_type = other DNA
ctttgggaggtcaaggtggg

SEQ ID NO: 23884 - DNA, 20 bp, synthetic construct
  source 1..20: mol_type = other DNA
actttgggaggtcaaggtgg

SEQ ID NO: 23885 - DNA, 20 bp, synthetic construct
  source 1..20: mol_type = other DNA
cactttgggaggtcaaggtg

SEQ ID NO: 23886 - DNA, 20 bp, synthetic construct
  source 1..20: mol_type = other DNA
gcactttgggaggtcaaggt

SEQ ID NO: 23887 - DNA, 20 bp, synthetic construct
  source 1..20: mol_type = other DNA
agcactttgggaggtcaagg

SEQ ID NO: 23888 - DNA, 20 bp, synthetic construct
  source 1..20: mol_type = other DNA
cagcactttgggaggtcaag

SEQ ID NO: 23889 - DNA, 20 bp, synthetic construct
  source 1..20: mol_type = other DNA
ccagcactttgggaggtcaa

SEQ ID NO: 23890 - DNA, 20 bp, synthetic construct
  source 1..20: mol_type = other DNA
cccagcactttgggaggtca

SEQ ID NO: 23891 - DNA, 20 bp, synthetic construct
  source 1..20: mol_type = other DNA
tcccagcactttgggaggtc

SEQ ID NO: 23892 - DNA, 20 bp, synthetic construct
  source 1..20: mol_type = other DNA
atcccagcactttgggaggt

SEQ ID NO: 23893 - DNA, 20 bp, synthetic construct
  source 1..20: mol_type = other DNA
aatcccagcactttgggagg

SEQ ID NO: 23894 - DNA, 20 bp, synthetic construct
  source 1..20: mol_type = other DNA
taatcccagcactttgggag

SEQ ID NO: 23895 - DNA, 20 bp, synthetic construct
  source 1..20: mol_type = other DNA
gtaatcccagcactttggga

SEQ ID NO: 23896 - DNA, 20 bp, synthetic construct
  source 1..20: mol_type = other DNA
tgtaatcccagcactttggg

SEQ ID NO: 23897 - DNA, 20 bp, synthetic construct
  source 1..20: mol_type = other DNA
ctgtaatcccagcactttgg

SEQ ID NO: 23898 - DNA, 20 bp, synthetic construct
  source 1..20: mol_type = other DNA
cctgtaatcccagcactttg

SEQ ID NO: 23899 - DNA, 20 bp, synthetic construct
  source 1..20: mol_type = other DNA
acctgtaatcccagcacttt

SEQ ID NO: 23900 - DNA, 20 bp, synthetic construct
  source 1..20: mol_type = other DNA
cacctgtaatcccagcactt

SEQ ID NO: 23901 - DNA, 20 bp, synthetic construct
  source 1..20: mol_type = other DNA
acacctgtaatcccagcact

SEQ ID NO: 23902 - DNA, 20 bp, synthetic construct
  source 1..20: mol_type = other DNA
cacacctgtaatcccagcac

SEQ ID NO: 23903 - DNA, 20 bp, synthetic construct
  source 1..20: mol_type = other DNA
tcacacctgtaatcccagca

SEQ ID NO: 23904 - DNA, 20 bp, synthetic construct
  source 1..20: mol_type = other DNA
ctcacacctgtaatcccagc

SEQ ID NO: 23905 - DNA, 20 bp, synthetic construct
  source 1..20: mol_type = other DNA
gctcacacctgtaatcccag

SEQ ID NO: 23906 - DNA, 20 bp, synthetic construct
  source 1..20: mol_type = other DNA
ggctcacacctgtaatccca

SEQ ID NO: 23907 - DNA, 20 bp, synthetic construct
  source 1..20: mol_type = other DNA
tggctcacacctgtaatccc

SEQ ID NO: 23908 - DNA, 20 bp, synthetic construct
  source 1..20: mol_type = other DNA
atggctcacacctgtaatcc

SEQ ID NO: 23909 - DNA, 20 bp, synthetic construct
  source 1..20: mol_type = other DNA
gatggctcacacctgtaatc

SEQ ID NO: 23910 - DNA, 20 bp, synthetic construct
  source 1..20: mol_type = other DNA
tgatggctcacacctgtaat

SEQ ID NO: 23911 - DNA, 20 bp, synthetic construct
  source 1..20: mol_type = other DNA
gtgatggctcacacctgtaa

SEQ ID NO: 23912 - DNA, 20 bp, synthetic construct
  source 1..20: mol_type = other DNA
cgtgatggctcacacctgta

SEQ ID NO: 23913 - DNA, 20 bp, synthetic construct
  source 1..20: mol_type = other DNA
gcgtgatggctcacacctgt

SEQ ID NO: 23914 - DNA, 20 bp, synthetic construct
  source 1..20: mol_type = other DNA
ggcgtgatggctcacacctg

SEQ ID NO: 23915 - DNA, 20 bp, synthetic construct
  source 1..20: mol_type = other DNA
aggcgtgatggctcacacct

SEQ ID NO: 23916 - DNA, 20 bp, synthetic construct
  source 1..20: mol_type = other DNA
caggcgtgatggctcacacc

SEQ ID NO: 23917 - DNA, 20 bp, synthetic construct
  source 1..20: mol_type = other DNA
ccaggcgtgatggctcacac

SEQ ID NO: 23918 - DNA, 20 bp, synthetic construct
  source 1..20: mol_type = other DNA
accaggcgtgatggctcaca

SEQ ID NO: 23919 - DNA, 20 bp, synthetic construct
  source 1..20: mol_type = other DNA
gaccaggcgtgatggctcac

SEQ ID NO: 23920 - DNA, 20 bp, synthetic construct
  source 1..20: mol_type = other DNA
tgaccaggcgtgatggctca

SEQ ID NO: 23921 - DNA, 20 bp, synthetic construct
  source 1..20: mol_type = other DNA
ttgaccaggcgtgatggctc

SEQ ID NO: 23922 - DNA, 20 bp, synthetic construct
  source 1..20: mol_type = other DNA
tttgaccaggcgtgatggct

SEQ ID NO: 23923 - DNA, 20 bp, synthetic construct
  source 1..20: mol_type = other DNA
ttttgaccaggcgtgatggc

SEQ ID NO: 23924 - DNA, 20 bp, synthetic construct
  source 1..20: mol_type = other DNA
tttttgaccaggcgtgatgg

SEQ ID NO: 23925 - DNA, 20 bp, synthetic construct
  source 1..20: mol_type = other DNA
atttttgaccaggcgtgatg

SEQ ID NO: 23926 - DNA, 20 bp, synthetic construct
  source 1..20: mol_type = other DNA
tatttttgaccaggcgtgat

SEQ ID NO: 23927 - DNA, 20 bp, synthetic construct
  source 1..20: mol_type = other DNA
atatttttgaccaggcgtga

SEQ ID NO: 23928 - DNA, 20 bp, synthetic construct
  source 1..20: mol_type = other DNA
gatatttttgaccaggcgtg

SEQ ID NO: 23929 - DNA, 20 bp, synthetic construct
  source 1..20: mol_type = other DNA
agatatttttgaccaggcgt

SEQ ID NO: 23930 - DNA, 20 bp, synthetic construct
  source 1..20: mol_type = other DNA
aagatatttttgaccaggcg

SEQ ID NO: 23931 - DNA, 20 bp, synthetic construct
  source 1..20: mol_type = other DNA
aaagatatttttgaccaggc

SEQ ID NO: 23932 - DNA, 20 bp, synthetic construct
  source 1..20: mol_type = other DNA
gaaagatatttttgaccagg

SEQ ID NO: 23933 - DNA, 20 bp, synthetic construct
  source 1..20: mol_type = other DNA
agaaagatatttttgaccag

SEQ ID NO: 23934 - DNA, 20 bp, synthetic construct
  source 1..20: mol_type = other DNA
aagaaagatatttttgacca

SEQ ID NO: 23935 - DNA, 20 bp, synthetic construct
  source 1..20: mol_type = other DNA
aaagaaagatatttttgacc

SEQ ID NO: 23936 - DNA, 20 bp, synthetic construct
  source 1..20: mol_type = other DNA
taaagaaagatatttttgac

SEQ ID NO: 23937 - DNA, 20 bp, synthetic construct
  source 1..20: mol_type = other DNA
ttaaagaaagatatttttga

SEQ ID NO: 23938 - DNA, 20 bp, synthetic construct
  source 1..20: mol_type = other DNA
cttaaagaaagatatttttg

SEQ ID NO: 23939 - DNA, 20 bp, synthetic construct
  source 1..20: mol_type = other DNA
tcttaaagaaagatattttt

SEQ ID NO: 23940 - DNA, 20 bp, synthetic construct
  source 1..20: mol_type = other DNA
ctcttaaagaaagatatttt

SEQ ID NO: 23941 - DNA, 20 bp, synthetic construct
  source 1..20: mol_type = other DNA
actcttaaagaaagatattt

SEQ ID NO: 23942 - DNA, 20 bp, synthetic construct
  source 1..20: mol_type = other DNA
tactcttaaagaaagatatt

SEQ ID NO: 23943 - DNA, 20 bp, synthetic construct
  source 1..20: mol_type = other DNA
ttactcttaaagaaagatat

SEQ ID NO: 23944 - DNA, 20 bp, synthetic construct
  source 1..20: mol_type = other DNA
tttactcttaaagaaagata

SEQ ID NO: 23945 - DNA, 20 bp, synthetic construct
  source 1..20: mol_type = other DNA
atttactcttaaagaaagat

SEQ ID NO: 23946 - DNA, 20 bp, synthetic construct
  source 1..20: mol_type = other DNA
aatttactcttaaagaaaga

SEQ ID NO: 23947 - DNA, 20 bp, synthetic construct
  source 1..20: mol_type = other DNA
aaatttactcttaaagaaag

SEQ ID NO: 23948 - DNA, 20 bp, synthetic construct
  source 1..20: mol_type = other DNA
taaatttactcttaaagaaa

SEQ ID NO: 23949 - DNA, 20 bp, synthetic construct
  source 1..20: mol_type = other DNA
gtaaatttactcttaaagaa

SEQ ID NO: 23950 - DNA, 20 bp, synthetic construct
  source 1..20: mol_type = other DNA
ggtaaatttactcttaaaga

SEQ ID NO: 23951 - DNA, 20 bp, synthetic construct
  source 1..20: mol_type = other DNA
aggtaaatttactcttaaag

SEQ ID NO: 23952 - DNA, 20 bp, synthetic construct
  source 1..20: mol_type = other DNA
aaggtaaatttactcttaaa

SEQ ID NO: 23953 - DNA, 20 bp, synthetic construct
  source 1..20: mol_type = other DNA
taaggtaaatttactcttaa

SEQ ID NO: 23954 - DNA, 20 bp, synthetic construct
  source 1..20: mol_type = other DNA
ttaaggtaaatttactctta

SEQ ID NO: 23955 - DNA, 20 bp, synthetic construct
  source 1..20: mol_type = other DNA
gttaaggtaaatttactctt

SEQ ID NO: 23956 - DNA, 20 bp, synthetic construct
  source 1..20: mol_type = other DNA
agttaaggtaaatttactct

SEQ ID NO: 23957 - DNA, 20 bp, synthetic construct
  source 1..20: mol_type = other DNA
aagttaaggtaaatttactc

SEQ ID NO: 23958 - DNA, 20 bp, synthetic construct
  source 1..20: mol_type = other DNA
taagttaaggtaaatttact

SEQ ID NO: 23959 - DNA, 20 bp, synthetic construct
  source 1..20: mol_type = other DNA
gtaagttaaggtaaatttac

SEQ ID NO: 23960 - DNA, 20 bp, synthetic construct
  source 1..20: mol_type = other DNA
agtaagttaaggtaaattta

SEQ ID NO: 23961 - DNA, 20 bp, synthetic construct
  source 1..20: mol_type = other DNA
cagtaagttaaggtaaattt

SEQ ID NO: 23962 - DNA, 20 bp, synthetic construct
  source 1..20: mol_type = other DNA
ccagtaagttaaggtaaatt

SEQ ID NO: 23963 - DNA, 20 bp, synthetic construct
  source 1..20: mol_type = other DNA
accagtaagttaaggtaaat

SEQ ID NO: 23964 - DNA, 20 bp, synthetic construct
  source 1..20: mol_type = other DNA
aaccagtaagttaaggtaaa

SEQ ID NO: 23965 - DNA, 20 bp, synthetic construct
  source 1..20: mol_type = other DNA
caaccagtaagttaaggtaa

SEQ ID NO: 23966 - DNA, 20 bp, synthetic construct
  source 1..20: mol_type = other DNA
tcaaccagtaagttaaggta

SEQ ID NO: 23967 - DNA, 20 bp, synthetic construct
  source 1..20: mol_type = other DNA
atcaaccagtaagttaaggt

SEQ ID NO: 23968 - DNA, 20 bp, synthetic construct
  source 1..20: mol_type = other DNA
gatcaaccagtaagttaagg

SEQ ID NO: 23969 - DNA, 20 bp, synthetic construct
  source 1..20: mol_type = other DNA
tgatcaaccagtaagttaag

SEQ ID NO: 23970 - DNA, 20 bp, synthetic construct
  source 1..20: mol_type = other DNA
atgatcaaccagtaagttaa

SEQ ID NO: 23971 - DNA, 20 bp, synthetic construct
  source 1..20: mol_type = other DNA
aatgatcaaccagtaagtta

SEQ ID NO: 23972 - DNA, 20 bp, synthetic construct
  source 1..20: mol_type = other DNA
caatgatcaaccagtaagtt

SEQ ID NO: 23973 - DNA, 20 bp, synthetic construct
  source 1..20: mol_type = other DNA
acaatgatcaaccagtaagt

SEQ ID NO: 23974 - DNA, 20 bp, synthetic construct
  source 1..20: mol_type = other DNA
tacaatgatcaaccagtaag

SEQ ID NO: 23975 - DNA, 20 bp, synthetic construct
  source 1..20: mol_type = other DNA
atacaatgatcaaccagtaa

SEQ ID NO: 23976 - DNA, 20 bp, synthetic construct
  source 1..20: mol_type = other DNA
tatacaatgatcaaccagta

SEQ ID NO: 23977 - DNA, 20 bp, synthetic construct
  source 1..20: mol_type = other DNA
atatacaatgatcaaccagt

SEQ ID NO: 23978 - DNA, 20 bp, synthetic construct
  source 1..20: mol_type = other DNA
tatatacaatgatcaaccag

SEQ ID NO: 23979 - DNA, 20 bp, synthetic construct
  source 1..20: mol_type = other DNA
ctatatacaatgatcaacca

SEQ ID NO: 23980 - DNA, 20 bp, synthetic construct
  source 1..20: mol_type = other DNA
cctatatacaatgatcaacc

SEQ ID NO: 23981 - DNA, 20 bp, synthetic construct
  source 1..20: mol_type = other DNA
acctatatacaatgatcaac

SEQ ID NO: 23982 - DNA, 20 bp, synthetic construct
  source 1..20: mol_type = other DNA
gacctatatacaatgatcaa

SEQ ID NO: 23983 - DNA, 20 bp, synthetic construct
  source 1..20: mol_type = other DNA
agacctatatacaatgatca

SEQ ID NO: 23984 - DNA, 20 bp, synthetic construct
  source 1..20: mol_type = other DNA
cagacctatatacaatgatc

SEQ ID NO: 23985 - DNA, 20 bp, synthetic construct
  source 1..20: mol_type = other DNA
acagacctatatacaatgat

SEQ ID NO: 23986 - DNA, 20 bp, synthetic construct
  source 1..20: mol_type = other DNA
aacagacctatatacaatga

SEQ ID NO: 23987 - DNA, 20 bp, synthetic construct
  source 1..20: mol_type = other DNA
caacagacctatatacaatg

SEQ ID NO: 23988 - DNA, 20 bp, synthetic construct
  source 1..20: mol_type = other DNA
acaacagacctatatacaat

SEQ ID NO: 23989 - DNA, 20 bp, synthetic construct
  source 1..20: mol_type = other DNA
aacaacagacctatatacaa

SEQ ID NO: 23990 - DNA, 20 bp, synthetic construct
  source 1..20: mol_type = other DNA
taacaacagacctatataca

SEQ ID NO: 23991 - DNA, 20 bp, synthetic construct
  source 1..20: mol_type = other DNA
ttaacaacagacctatatac

SEQ ID NO: 23992 - DNA, 20 bp, synthetic construct
  source 1..20: mol_type = other DNA
attaacaacagacctatata

SEQ ID NO: 23993 - DNA, 20 bp, synthetic construct
  source 1..20: mol_type = other DNA
aattaacaacagacctatat

SEQ ID NO: 23994 - DNA, 20 bp, synthetic construct
  source 1..20: mol_type = other DNA
caattaacaacagacctata

SEQ ID NO: 23995 - DNA, 20 bp, synthetic construct
  source 1..20: mol_type = other DNA
tcaattaacaacagacctat

SEQ ID NO: 23996 - DNA, 20 bp, synthetic construct
  source 1..20: mol_type = other DNA
ttcaattaacaacagaccta

SEQ ID NO: 23997 - DNA, 20 bp, synthetic construct
  source 1..20: mol_type = other DNA
tttcaattaacaacagacct

SEQ ID NO: 23998 - DNA, 20 bp, synthetic construct
  source 1..20: mol_type = other DNA
gtttcaattaacaacagacc

SEQ ID NO: 23999 - DNA, 20 bp, synthetic construct
  source 1..20: mol_type = other DNA
tgtttcaattaacaacagac

SEQ ID NO: 24000 - DNA, 20 bp, synthetic construct
  source 1..20: mol_type = other DNA
atgtttcaattaacaacaga

SEQ ID NO: 24001 - DNA, 20 bp, synthetic construct
  source 1..20: mol_type = other DNA
catgtttcaattaacaacag

SEQ ID NO: 24002 - DNA, 20 bp, synthetic construct
  source 1..20: mol_type = other DNA
gcatgtttcaattaacaaca

SEQ ID NO: 24003 - DNA, 20 bp, synthetic construct
  source 1..20: mol_type = other DNA
cgcatgtttcaattaacaac

SEQ ID NO: 24004 - DNA, 20 bp, synthetic construct
  source 1..20: mol_type = other DNA
ccgcatgtttcaattaacaa

SEQ ID NO: 24005 - DNA, 20 bp, synthetic construct
  source 1..20: mol_type = other DNA
cccgcatgtttcaattaaca

SEQ ID NO: 24006 - DNA, 20 bp, synthetic construct
  source 1..20: mol_type = other DNA
gcccgcatgtttcaattaac

SEQ ID NO: 24007 - DNA, 20 bp, synthetic construct
  source 1..20: mol_type = other DNA
ggcccgcatgtttcaattaa

SEQ ID NO: 24008 - DNA, 20 bp, synthetic construct
  source 1..20: mol_type = other DNA
cggcccgcatgtttcaatta

SEQ ID NO: 24009 - DNA, 20 bp, synthetic construct
  source 1..20: mol_type = other DNA
ccggcccgcatgtttcaatt

SEQ ID NO: 24010 - DNA, 20 bp, synthetic construct
  source 1..20: mol_type = other DNA
cccggcccgcatgtttcaat

SEQ ID NO: 24011 - DNA, 20 bp, synthetic construct
  source 1..20: mol_type = other DNA
gcccggcccgcatgtttcaa

SEQ ID NO: 24012 - DNA, 20 bp, synthetic construct
  source 1..20: mol_type = other DNA
ggcccggcccgcatgtttca

SEQ ID NO: 24013 - DNA, 20 bp, synthetic construct
  source 1..20: mol_type = other DNA
gggcccggcccgcatgtttc

SEQ ID NO: 24014 - DNA, 20 bp, synthetic construct
  source 1..20: mol_type = other DNA
cgggcccggcccgcatgttt

SEQ ID NO: 24015 - DNA, 20 bp, synthetic construct
  source 1..20: mol_type = other DNA
ccgggcccggcccgcatgtt

SEQ ID NO: 24016 - DNA, 20 bp, synthetic construct
  source 1..20: mol_type = other DNA
accgggcccggcccgcatgt

SEQ ID NO: 24017 - DNA, 20 bp, synthetic construct
  source 1..20: mol_type = other DNA
caccgggcccggcccgcatg

SEQ ID NO: 24018 - DNA, 20 bp, synthetic construct
  source 1..20: mol_type = other DNA
ccaccgggcccggcccgcat

SEQ ID NO: 24019 - DNA, 20 bp, synthetic construct
  source 1..20: mol_type = other DNA
gccaccgggcccggcccgca

SEQ ID NO: 24020 - DNA, 20 bp, synthetic construct
  source 1..20: mol_type = other DNA
agccaccgggcccggcccgc

SEQ ID NO: 24021 - DNA, 20 bp, synthetic construct
  source 1..20: mol_type = other DNA
gagccaccgggcccggcccg

SEQ ID NO: 24022 - DNA, 20 bp, synthetic construct
  source 1..20: mol_type = other DNA
tgagccaccgggcccggccc

SEQ ID NO: 24023 - DNA, 20 bp, synthetic construct
  source 1..20: mol_type = other DNA
atgagccaccgggcccggcc

SEQ ID NO: 24024 - DNA, 20 bp, synthetic construct
  source 1..20: mol_type = other DNA
catgagccaccgggcccggc

SEQ ID NO: 24025 - DNA, 20 bp, synthetic construct
  source 1..20: mol_type = other DNA
gcatgagccaccgggcccgg

SEQ ID NO: 24026 - DNA, 20 bp, synthetic construct
  source 1..20: mol_type = other DNA
ggcatgagccaccgggcccg

SEQ ID NO: 24027 - DNA, 20 bp, synthetic construct
  source 1..20: mol_type = other DNA
aggcatgagccaccgggccc

SEQ ID NO: 24028 - DNA, 20 bp, synthetic construct
  source 1..20: mol_type = other DNA
caggcatgagccaccgggcc

SEQ ID NO: 24029 - DNA, 20 bp, synthetic construct
  source 1..20: mol_type = other DNA
acaggcatgagccaccgggc

SEQ ID NO: 24030 - DNA, 20 bp, synthetic construct
  source 1..20: mol_type = other DNA
tacaggcatgagccaccggg

SEQ ID NO: 24031 - DNA, 20 bp, synthetic construct
  source 1..20: mol_type = other DNA
ttacaggcatgagccaccgg

SEQ ID NO: 24032 - DNA, 20 bp, synthetic construct
  source 1..20: mol_type = other DNA
attacaggcatgagccaccg

SEQ ID NO: 24033 - DNA, 20 bp, synthetic construct
  source 1..20: mol_type = other DNA
gattacaggcatgagccacc

SEQ ID NO: 24034 - DNA, 20 bp, synthetic construct
  source 1..20: mol_type = other DNA
ggattacaggcatgagccac

SEQ ID NO: 24035 - DNA, 20 bp, synthetic construct
  source 1..20: mol_type = other DNA
gggattacaggcatgagcca

SEQ ID NO: 24036 - DNA, 20 bp, synthetic construct
  source 1..20: mol_type = other DNA
tgggattacaggcatgagcc

SEQ ID NO: 24037 - DNA, 20 bp, synthetic construct
  source 1..20: mol_type = other DNA
ctgggattacaggcatgagc

SEQ ID NO: 24038 - DNA, 20 bp, synthetic construct
  source 1..20: mol_type = other DNA
gctgggattacaggcatgag

SEQ ID NO: 24039 - DNA, 20 bp, synthetic construct
  source 1..20: mol_type = other DNA
tgctgggattacaggcatga

SEQ ID NO: 24040 - DNA, 20 bp, synthetic construct
  source 1..20: mol_type = other DNA
gtgctgggattacaggcatg

SEQ ID NO: 24041 - DNA, 20 bp, synthetic construct
  source 1..20: mol_type = other DNA
agtgctgggattacaggcat

SEQ ID NO: 24042 - DNA, 20 bp, synthetic construct
  source 1..20: mol_type = other DNA
aagtgctgggattacaggca

SEQ ID NO: 24043 - DNA, 20 bp, synthetic construct
  source 1..20: mol_type = other DNA
aaagtgctgggattacaggc

SEQ ID NO: 24044 - DNA, 20 bp, synthetic construct
  source 1..20: mol_type = other DNA
caaagtgctgggattacagg

SEQ ID NO: 24045 - DNA, 20 bp, synthetic construct
  source 1..20: mol_type = other DNA
ccaaagtgctgggattacag

SEQ ID NO: 24046 - DNA, 20 bp, synthetic construct
  source 1..20: mol_type = other DNA
cccaaagtgctgggattaca

SEQ ID NO: 24047 - DNA, 20 bp, synthetic construct
  source 1..20: mol_type = other DNA
tcccaaagtgctgggattac

SEQ ID NO: 24048 - DNA, 20 bp, synthetic construct
  source 1..20: mol_type = other DNA
ctcccaaagtgctgggatta

SEQ ID NO: 24049 - DNA, 20 bp, synthetic construct
  source 1..20: mol_type = other DNA
cctcccaaagtgctgggatt

SEQ ID NO: 24050 - DNA, 20 bp, synthetic construct
  source 1..20: mol_type = other DNA
gcctcccaaagtgctgggat

SEQ ID NO: 24051 - DNA, 20 bp, synthetic construct
  source 1..20: mol_type = other DNA
ggcctcccaaagtgctggga

SEQ ID NO: 24052 - DNA, 20 bp, synthetic construct
  source 1..20: mol_type = other DNA
cggcctcccaaagtgctggg

SEQ ID NO: 24053 - DNA, 20 bp, synthetic construct
  source 1..20: mol_type = other DNA
tcggcctcccaaagtgctgg

SEQ ID NO: 24054 - DNA, 20 bp, synthetic construct
  source 1..20: mol_type = other DNA
ctcggcctcccaaagtgctg

SEQ ID NO: 24055 - DNA, 20 bp, synthetic construct
  source 1..20: mol_type = other DNA
cctcggcctcccaaagtgct

SEQ ID NO: 24056 - DNA, 20 bp, synthetic construct
  source 1..20: mol_type = other DNA
gcctcggcctcccaaagtgc

SEQ ID NO: 24057 - DNA, 20 bp, synthetic construct
  source 1..20: mol_type = other DNA
cgcctcggcctcccaaagtg

SEQ ID NO: 24058 - DNA, 20 bp, synthetic construct
  source 1..20: mol_type = other DNA
ccgcctcggcctcccaaagt

SEQ ID NO: 24059 - DNA, 20 bp, synthetic construct
  source 1..20: mol_type = other DNA
cccgcctcggcctcccaaag

SEQ ID NO: 24060 - DNA, 20 bp, synthetic construct
  source 1..20: mol_type = other DNA
acccgcctcggcctcccaaa

SEQ ID NO: 24061 - DNA, 20 bp, synthetic construct
  source 1..20: mol_type = other DNA
cacccgcctcggcctcccaa

SEQ ID NO: 24062 - DNA, 20 bp, synthetic construct
  source 1..20: mol_type = other DNA
ccacccgcctcggcctccca

SEQ ID NO: 24063 - DNA, 20 bp, synthetic construct
  source 1..20: mol_type = other DNA
tccacccgcctcggcctccc

SEQ ID NO: 24064 - DNA, 20 bp, synthetic construct
  source 1..20: mol_type = other DNA
atccacccgcctcggcctcc

SEQ ID NO: 24065 - DNA, 20 bp, synthetic construct
  source 1..20: mol_type = other DNA
gatccacccgcctcggcctc

SEQ ID NO: 24066 - DNA, 20 bp, synthetic construct
  source 1..20: mol_type = other DNA
tgatccacccgcctcggcct

SEQ ID NO: 24067 - DNA, 20 bp, synthetic construct
  source 1..20: mol_type = other DNA
gtgatccacccgcctcggcc

SEQ ID NO: 24068 - DNA, 20 bp, synthetic construct
  source 1..20: mol_type = other DNA
tgtgatccacccgcctcggc

SEQ ID NO: 24069 - DNA, 20 bp, synthetic construct
  source 1..20: mol_type = other DNA
ttgtgatccacccgcctcgg

SEQ ID NO: 24070 - DNA, 20 bp, synthetic construct
  source 1..20: mol_type = other DNA
cttgtgatccacccgcctcg

SEQ ID NO: 24071 - DNA, 20 bp, synthetic construct
  source 1..20: mol_type = other DNA
ccttgtgatccacccgcctc

SEQ ID NO: 24072 - DNA, 20 bp, synthetic construct
  source 1..20: mol_type = other DNA
accttgtgatccacccgcct

SEQ ID NO: 24073 - DNA, 20 bp, synthetic construct
  source 1..20: mol_type = other DNA
gaccttgtgatccacccgcc

SEQ ID NO: 24074 - DNA, 20 bp, synthetic construct
  source 1..20: mol_type = other DNA
tgaccttgtgatccacccgc

SEQ ID NO: 24075 - DNA, 20 bp, synthetic construct
  source 1..20: mol_type = other DNA
ctgaccttgtgatccacccg

SEQ ID NO: 24076 - DNA, 20 bp, synthetic construct
  source 1..20: mol_type = other DNA
cctgaccttgtgatccaccc

SEQ ID NO: 24077 - DNA, 20 bp, synthetic construct
  source 1..20: mol_type = other DNA
tcctgaccttgtgatccacc

SEQ ID NO: 24078 - DNA, 20 bp, synthetic construct
  source 1..20: mol_type = other DNA
ctcctgaccttgtgatccac

SEQ ID NO: 24079 - DNA, 20 bp, synthetic construct
  source 1..20: mol_type = other DNA
tctcctgaccttgtgatcca

SEQ ID NO: 24080 - DNA, 20 bp, synthetic construct
  source 1..20: mol_type = other DNA
atctcctgaccttgtgatcc

SEQ ID NO: 24081 - DNA, 20 bp, synthetic construct
  source 1..20: mol_type = other DNA
gatctcctgaccttgtgatc

SEQ ID NO: 24082 - DNA, 20 bp, synthetic construct
  source 1..20: mol_type = other DNA
cgatctcctgaccttgtgat

SEQ ID NO: 24083 - DNA, 20 bp, synthetic construct
  source 1..20: mol_type = other DNA
tcgatctcctgaccttgtga

SEQ ID NO: 24084 - DNA, 20 bp, synthetic construct
  source 1..20: mol_type = other DNA
ctcgatctcctgaccttgtg

SEQ ID NO: 24085 - DNA, 20 bp, synthetic construct
  source 1..20: mol_type = other DNA
tctcgatctcctgaccttgt

SEQ ID NO: 24086 - DNA, 20 bp, synthetic construct
  source 1..20: mol_type = other DNA
gtctcgatctcctgaccttg

SEQ ID NO: 24087 - DNA, 20 bp, synthetic construct
  source 1..20: mol_type = other DNA
ggtctcgatctcctgacctt

SEQ ID NO: 24088 - DNA, 20 bp, synthetic construct
  source 1..20: mol_type = other DNA
tggtctcgatctcctgacct

SEQ ID NO: 24089 - DNA, 20 bp, synthetic construct
  source 1..20: mol_type = other DNA
atggtctcgatctcctgacc

SEQ ID NO: 24090 - DNA, 20 bp, synthetic construct
  source 1..20: mol_type = other DNA
gatggtctcgatctcctgac

SEQ ID NO: 24091 - DNA, 20 bp, synthetic construct
  source 1..20: mol_type = other DNA
ggatggtctcgatctcctga

SEQ ID NO: 24092 - DNA, 20 bp, synthetic construct
  source 1..20: mol_type = other DNA
aggatggtctcgatctcctg

SEQ ID NO: 24093 - DNA, 20 bp, synthetic construct
  source 1..20: mol_type = other DNA
caggatggtctcgatctcct

SEQ ID NO: 24094 - DNA, 20 bp, synthetic construct
  source 1..20: mol_type = other DNA
ccaggatggtctcgatctcc

SEQ ID NO: 24095 - DNA, 20 bp, synthetic construct
  source 1..20: mol_type = other DNA
gccaggatggtctcgatctc

SEQ ID NO: 24096 - DNA, 20 bp, synthetic construct
  source 1..20: mol_type = other DNA
agccaggatggtctcgatct

SEQ ID NO: 24097 - DNA, 20 bp, synthetic construct
  source 1..20: mol_type = other DNA
tagccaggatggtctcgatc

SEQ ID NO: 24098 - DNA, 20 bp, synthetic construct
  source 1..20: mol_type = other DNA
ttagccaggatggtctcgat

SEQ ID NO: 24099 - DNA, 20 bp, synthetic construct
  source 1..20: mol_type = other DNA
gttagccaggatggtctcga

SEQ ID NO: 24100 - DNA, 20 bp, synthetic construct
  source 1..20: mol_type = other DNA
tgttagccaggatggtctcg

SEQ ID NO: 24101 - DNA, 20 bp, synthetic construct
  source 1..20: mol_type = other DNA
gtgttagccaggatggtctc

SEQ ID NO: 24102 - DNA, 20 bp, synthetic construct
  source 1..20: mol_type = other DNA
cgtgttagccaggatggtct

SEQ ID NO: 24103 - DNA, 20 bp, synthetic construct
  source 1..20: mol_type = other DNA
ccgtgttagccaggatggtc

SEQ ID NO: 24104 - DNA, 20 bp, synthetic construct
  source 1..20: mol_type = other DNA
accgtgttagccaggatggt

SEQ ID NO: 24105 - DNA, 20 bp, synthetic construct
  source 1..20: mol_type = other DNA
caccgtgttagccaggatgg

SEQ ID NO: 24106 - DNA, 20 bp, synthetic construct
  source 1..20: mol_type = other DNA
tcaccgtgttagccaggatg

SEQ ID NO: 24107 - DNA, 20 bp, synthetic construct
  source 1..20: mol_type = other DNA
ttcaccgtgttagccaggat

SEQ ID NO: 24108 - DNA, 20 bp, synthetic construct
  source 1..20: mol_type = other DNA
tttcaccgtgttagccagga

SEQ ID NO: 24109 - DNA, 20 bp, synthetic construct
  source 1..20: mol_type = other DNA
gtttcaccgtgttagccagg

SEQ ID NO: 24110 - DNA, 20 bp, synthetic construct
  source 1..20: mol_type = other DNA
ggtttcaccgtgttagccag

SEQ ID NO: 24111 - DNA, 20 bp, synthetic construct
  source 1..20: mol_type = other DNA
gggtttcaccgtgttagcca

SEQ ID NO: 24112 - DNA, 20 bp, synthetic construct
  source 1..20: mol_type = other DNA
ggggtttcaccgtgttagcc

SEQ ID NO: 24113 - DNA, 20 bp, synthetic construct
  source 1..20: mol_type = other DNA
cggggtttcaccgtgttagc

SEQ ID NO: 24114 - DNA, 20 bp, synthetic construct
  source 1..20: mol_type = other DNA
acggggtttcaccgtgttag

SEQ ID NO: 24115 - DNA, 20 bp, synthetic construct
  source 1..20: mol_type = other DNA
gacggggtttcaccgtgtta

SEQ ID NO: 24116 - DNA, 20 bp, synthetic construct
  source 1..20: mol_type = other DNA
agacggggtttcaccgtgtt

SEQ ID NO: 24117 - DNA, 20 bp, synthetic construct
  source 1..20: mol_type = other DNA
gagacggggtttcaccgtgt

SEQ ID NO: 24118 - DNA, 20 bp, synthetic construct
  source 1..20: mol_type = other DNA
agagacggggtttcaccgtg

SEQ ID NO: 24119 - DNA, 20 bp, synthetic construct
  source 1..20: mol_type = other DNA
tagagacggggtttcaccgt

SEQ ID NO: 24120 - DNA, 20 bp, synthetic construct
  source 1..20: mol_type = other DNA
gtagagacggggtttcaccg

SEQ ID NO: 24121 - DNA, 20 bp, synthetic construct
  source 1..20: mol_type = other DNA
agtagagacggggtttcacc

SEQ ID NO: 24122 - DNA, 20 bp, synthetic construct
  source 1..20: mol_type = other DNA
tagtagagacggggtttcac

SEQ ID NO: 24123 - DNA, 20 bp, synthetic construct
  source 1..20: mol_type = other DNA
ttagtagagacggggtttca

SEQ ID NO: 24124 - DNA, 20 bp, synthetic construct
  source 1..20: mol_type = other DNA
tttagtagagacggggtttc

SEQ ID NO: 24125 - DNA, 20 bp, synthetic construct
  source 1..20: mol_type = other DNA
ttttagtagagacggggttt

SEQ ID NO: 24126 - DNA, 20 bp, synthetic construct
  source 1..20: mol_type = other DNA
tttttagtagagacggggtt

SEQ ID NO: 24127 - DNA, 20 bp, synthetic construct
  source 1..20: mol_type = other DNA
atttttagtagagacggggt

SEQ ID NO: 24128 - DNA, 20 bp, synthetic construct
  source 1..20: mol_type = other DNA
tatttttagtagagacgggg

SEQ ID NO: 24129 - DNA, 20 bp, synthetic construct
  source 1..20: mol_type = other DNA
gtatttttagtagagacggg

SEQ ID NO: 24130 - DNA, 20 bp, synthetic construct
  source 1..20: mol_type = other DNA
agtatttttagtagagacgg

SEQ ID NO: 24131 - DNA, 20 bp, synthetic construct
  source 1..20: mol_type = other DNA
tagtatttttagtagagacg

SEQ ID NO: 24132 - DNA, 20 bp, synthetic construct
  source 1..20: mol_type = other DNA
ttagtatttttagtagagac

SEQ ID NO: 24133 - DNA, 20 bp, synthetic construct
  source 1..20: mol_type = other DNA
tttagtatttttagtagaga

SEQ ID NO: 24134 - DNA, 20 bp, synthetic construct
  source 1..20: mol_type = other DNA
ttttagtatttttagtagag

SEQ ID NO: 24135 - DNA, 20 bp, synthetic construct
  source 1..20: mol_type = other DNA
tttttagtatttttagtaga

SEQ ID NO: 24136 - DNA, 20 bp, synthetic construct
  source 1..20: mol_type = other DNA
atttttagtatttttagtag

SEQ ID NO: 24137 - DNA, 20 bp, synthetic construct
  source 1..20: mol_type = other DNA
aatttttagtatttttagta

SEQ ID NO: 24138 - DNA, 20 bp, synthetic construct
  source 1..20: mol_type = other DNA
taatttttagtatttttagt

SEQ ID NO: 24139 - DNA, 20 bp, synthetic construct
  source 1..20: mol_type = other DNA
ttaatttttagtatttttag

SEQ ID NO: 24140 - DNA, 20 bp, synthetic construct
  source 1..20: mol_type = other DNA
gttaatttttagtattttta

SEQ ID NO: 24141 - DNA, 20 bp, synthetic construct
  source 1..20: mol_type = other DNA
ggttaatttttagtattttt

SEQ ID NO: 24142 - DNA, 20 bp, synthetic construct
  source 1..20: mol_type = other DNA
cggttaatttttagtatttt

SEQ ID NO: 24143 - DNA, 20 bp, synthetic construct
  source 1..20: mol_type = other DNA
ccggttaatttttagtattt

SEQ ID NO: 24144 - DNA, 20 bp, synthetic construct
  source 1..20: mol_type = other DNA
cccggttaatttttagtatt

SEQ ID NO: 24145 - DNA, 20 bp, synthetic construct
  source 1..20: mol_type = other DNA
acccggttaatttttagtat

SEQ ID NO: 24146 - DNA, 20 bp, synthetic construct
  source 1..20: mol_type = other DNA
cacccggttaatttttagta

SEQ ID NO: 24147 - DNA, 20 bp, synthetic construct
  source 1..20: mol_type = other DNA
acacccggttaatttttagt

SEQ ID NO: 24148 - DNA, 20 bp, synthetic construct
  source 1..20: mol_type = other DNA
cacacccggttaatttttag

SEQ ID NO: 24149 - DNA, 20 bp, synthetic construct
  source 1..20: mol_type = other DNA
ccacacccggttaattttta

SEQ ID NO: 24150 - DNA, 20 bp, synthetic construct
  source 1..20: mol_type = other DNA
accacacccggttaattttt

SEQ ID NO: 24151 - DNA, 20 bp, synthetic construct
  source 1..20: mol_type = other DNA
caccacacccggttaatttt

SEQ ID NO: 24152 - DNA, 20 bp, synthetic construct
  source 1..20: mol_type = other DNA
ccaccacacccggttaattt

SEQ ID NO: 24153 - DNA, 20 bp, synthetic construct
  source 1..20: mol_type = other DNA
gccaccacacccggttaatt

SEQ ID NO: 24154 - DNA, 20 bp, synthetic construct
  source 1..20: mol_type = other DNA
cgccaccacacccggttaat

SEQ ID NO: 24155 - DNA, 20 bp, synthetic construct
  source 1..20: mol_type = other DNA
ccgccaccacacccggttaa

SEQ ID NO: 24156 - DNA, 20 bp, synthetic construct
  source 1..20: mol_type = other DNA
cccgccaccacacccggtta

SEQ ID NO: 24157 - DNA, 20 bp, synthetic construct
  source 1..20: mol_type = other DNA
gcccgccaccacacccggtt

SEQ ID NO: 24158 - DNA, 20 bp, synthetic construct
  source 1..20: mol_type = other DNA
cgcccgccaccacacccggt

SEQ ID NO: 24159 - DNA, 20 bp, synthetic construct
  source 1..20: mol_type = other DNA
gcgcccgccaccacacccgg

SEQ ID NO: 24160 - DNA, 20 bp, synthetic construct
  source 1..20: mol_type = other DNA
ggcgcccgccaccacacccg

SEQ ID NO: 24161 - DNA, 20 bp, synthetic construct
  source 1..20: mol_type = other DNA
aggcgcccgccaccacaccc

SEQ ID NO: 24162 - DNA, 20 bp, synthetic construct
  source 1..20: mol_type = other DNA
caggcgcccgccaccacacc

SEQ ID NO: 24163 - DNA, 20 bp, synthetic construct
  source 1..20: mol_type = other DNA
acaggcgcccgccaccacac

SEQ ID NO: 24164 - DNA, 20 bp, synthetic construct
  source 1..20: mol_type = other DNA
tacaggcgcccgccaccaca

SEQ ID NO: 24165 - DNA, 20 bp, synthetic construct
  source 1..20: mol_type = other DNA
ttacaggcgcccgccaccac

SEQ ID NO: 24166 - DNA, 20 bp, synthetic construct
  source 1..20: mol_type = other DNA
attacaggcgcccgccacca

SEQ ID NO: 24167 - DNA, 20 bp, synthetic construct
  source 1..20: mol_type = other DNA
gattacaggcgcccgccacc

SEQ ID NO: 24168 - DNA, 20 bp, synthetic construct
  source 1..20: mol_type = other DNA
ggattacaggcgcccgccac

SEQ ID NO: 24169 - DNA, 20 bp, synthetic construct
  source 1..20: mol_type = other DNA
gggattacaggcgcccgcca

SEQ ID NO: 24170 - DNA, 20 bp, synthetic construct
  source 1..20: mol_type = other DNA
tgggattacaggcgcccgcc

SEQ ID NO: 24171 - DNA, 20 bp, synthetic construct
  source 1..20: mol_type = other DNA
ctgggattacaggcgcccgc

SEQ ID NO: 24172 - DNA, 20 bp, synthetic construct
  source 1..20: mol_type = other DNA
gctgggattacaggcgcccg

SEQ ID NO: 24173 - DNA, 20 bp, synthetic construct
  source 1..20: mol_type = other DNA
agctgggattacaggcgccc

SEQ ID NO: 24174 - DNA, 20 bp, synthetic construct
  source 1..20: mol_type = other DNA
tagctgggattacaggcgcc

SEQ ID NO: 24175 - DNA, 20 bp, synthetic construct
  source 1..20: mol_type = other DNA
gtagctgggattacaggcgc

SEQ ID NO: 24176 - DNA, 20 bp, synthetic construct
  source 1..20: mol_type = other DNA
agtagctgggattacaggcg

SEQ ID NO: 24177 - DNA, 20 bp, synthetic construct
  source 1..20: mol_type = other DNA
gagtagctgggattacaggc

SEQ ID NO: 24178 - DNA, 20 bp, synthetic construct
  source 1..20: mol_type = other DNA
cgagtagctgggattacagg

SEQ ID NO: 24179 - DNA, 20 bp, synthetic construct
  source 1..20: mol_type = other DNA
ccgagtagctgggattacag

SEQ ID NO: 24180 - DNA, 20 bp, synthetic construct
  source 1..20: mol_type = other DNA
cccgagtagctgggattaca

SEQ ID NO: 24181 - DNA, 20 bp, synthetic construct
  source 1..20: mol_type = other DNA
tcccgagtagctgggattac

SEQ ID NO: 24182 - DNA, 20 bp, synthetic construct
  source 1..20: mol_type = other DNA
ctcccgagtagctgggatta

SEQ ID NO: 24183 - DNA, 20 bp, synthetic construct
  source 1..20: mol_type = other DNA
cctcccgagtagctgggatt

SEQ ID NO: 24184 - DNA, 20 bp, synthetic construct
  source 1..20: mol_type = other DNA
gcctcccgagtagctgggat

SEQ ID NO: 24185 - DNA, 20 bp, synthetic construct
  source 1..20: mol_type = other DNA
agcctcccgagtagctggga

SEQ ID NO: 24186 - DNA, 20 bp, synthetic construct
  source 1..20: mol_type = other DNA
cagcctcccgagtagctggg

SEQ ID NO: 24187 - DNA, 20 bp, synthetic construct
  source 1..20: mol_type = other DNA
tcagcctcccgagtagctgg

SEQ ID NO: 24188 - DNA, 20 bp, synthetic construct
  source 1..20: mol_type = other DNA
ctcagcctcccgagtagctg

SEQ ID NO: 24189 - DNA, 20 bp, synthetic construct
  source 1..20: mol_type = other DNA
cctcagcctcccgagtagct

SEQ ID NO: 24190 - DNA, 20 bp, synthetic construct
  source 1..20: mol_type = other DNA
gcctcagcctcccgagtagc

SEQ ID NO: 24191 - DNA, 20 bp, synthetic construct
  source 1..20: mol_type = other DNA
tgcctcagcctcccgagtag

SEQ ID NO: 24192 - DNA, 20 bp, synthetic construct
  source 1..20: mol_type = other DNA
ctgcctcagcctcccgagta

SEQ ID NO: 24193 - DNA, 20 bp, synthetic construct
  source 1..20: mol_type = other DNA
cctgcctcagcctcccgagt

SEQ ID NO: 24194 - DNA, 20 bp, synthetic construct
  source 1..20: mol_type = other DNA
tcctgcctcagcctcccgag

SEQ ID NO: 24195 - DNA, 20 bp, synthetic construct
  source 1..20: mol_type = other DNA
ctcctgcctcagcctcccga

SEQ ID NO: 24196 - DNA, 20 bp, synthetic construct
  source 1..20: mol_type = other DNA
tctcctgcctcagcctcccg

SEQ ID NO: 24197 - DNA, 20 bp, synthetic construct
  source 1..20: mol_type = other DNA
ttctcctgcctcagcctccc

SEQ ID NO: 24198 - DNA, 20 bp, synthetic construct
  source 1..20: mol_type = other DNA
attctcctgcctcagcctcc

SEQ ID NO: 24199 - DNA, 20 bp, synthetic construct
  source 1..20: mol_type = other DNA
cattctcctgcctcagcctc

SEQ ID NO: 24200 - DNA, 20 bp, synthetic construct
  source 1..20: mol_type = other DNA
ccattctcctgcctcagcct

SEQ ID NO: 24201 - DNA, 20 bp, synthetic construct
  source 1..20: mol_type = other DNA
gccattctcctgcctcagcc

SEQ ID NO: 24202 - DNA, 20 bp, synthetic construct
  source 1..20: mol_type = other DNA
cgccattctcctgcctcagc

SEQ ID NO: 24203 - DNA, 20 bp, synthetic construct
  source 1..20: mol_type = other DNA
acgccattctcctgcctcag

SEQ ID NO: 24204 - DNA, 20 bp, synthetic construct
  source 1..20: mol_type = other DNA
cacgccattctcctgcctca

SEQ ID NO: 24205 - DNA, 20 bp, synthetic construct
  source 1..20: mol_type = other DNA
tcacgccattctcctgcctc

SEQ ID NO: 24206 - DNA, 20 bp, synthetic construct
  source 1..20: mol_type = other DNA
ttcacgccattctcctgcct

SEQ ID NO: 24207 - DNA, 20 bp, synthetic construct
  source 1..20: mol_type = other DNA
gttcacgccattctcctgcc

SEQ ID NO: 24208 - DNA, 20 bp, synthetic construct
  source 1..20: mol_type = other DNA
ggttcacgccattctcctgc

SEQ ID NO: 24209 - DNA, 20 bp, synthetic construct
  source 1..20: mol_type = other DNA
gggttcacgccattctcctg

SEQ ID NO: 24210 - DNA, 20 bp, synthetic construct
  source 1..20: mol_type = other DNA
cgggttcacgccattctcct

SEQ ID NO: 24211 - DNA, 20 bp, synthetic construct
  source 1..20: mol_type = other DNA
ccgggttcacgccattctcc

SEQ ID NO: 24212 - DNA, 20 bp, synthetic construct
  source 1..20: mol_type = other DNA
cccgggttcacgccattctc

SEQ ID NO: 24213 - DNA, 20 bp, synthetic construct
  source 1..20: mol_type = other DNA
tcccgggttcacgccattct

SEQ ID NO: 24214 - DNA, 20 bp, synthetic construct
  source 1..20: mol_type = other DNA
ctcccgggttcacgccattc

SEQ ID NO: 24215 - DNA, 20 bp, synthetic construct
  source 1..20: mol_type = other DNA
cctcccgggttcacgccatt

SEQ ID NO: 24216 - DNA, 20 bp, synthetic construct
  source 1..20: mol_type = other DNA
gcctcccgggttcacgccat

SEQ ID NO: 24217 - DNA, 20 bp, synthetic construct
  source 1..20: mol_type = other DNA
cgcctcccgggttcacgcca

SEQ ID NO: 24218 - DNA, 20 bp, synthetic construct
  source 1..20: mol_type = other DNA
ccgcctcccgggttcacgcc

SEQ ID NO: 24219 - DNA, 20 bp, synthetic construct
  source 1..20: mol_type = other DNA
tccgcctcccgggttcacgc

SEQ ID NO: 24220 - DNA, 20 bp, synthetic construct
  source 1..20: mol_type = other DNA
ctccgcctcccgggttcacg

SEQ ID NO: 24221 - DNA, 20 bp, synthetic construct
  source 1..20: mol_type = other DNA
gctccgcctcccgggttcac

SEQ ID NO: 24222 - DNA, 20 bp, synthetic construct
  source 1..20: mol_type = other DNA
agctccgcctcccgggttca

SEQ ID NO: 24223 - DNA, 20 bp, synthetic construct
  source 1..20: mol_type = other DNA
aagctccgcctcccgggttc

SEQ ID NO: 24224 - DNA, 20 bp, synthetic construct
  source 1..20: mol_type = other DNA
caagctccgcctcccgggtt

SEQ ID NO: 24225 - DNA, 20 bp, synthetic construct
  source 1..20: mol_type = other DNA
gcaagctccgcctcccgggt

SEQ ID NO: 24226 - DNA, 20 bp, synthetic construct
  source 1..20: mol_type = other DNA
tgcaagctccgcctcccggg

SEQ ID NO: 24227 - DNA, 20 bp, synthetic construct
  source 1..20: mol_type = other DNA
ctgcaagctccgcctcccgg

SEQ ID NO: 24228 - DNA, 20 bp, synthetic construct
  source 1..20: mol_type = other DNA
actgcaagctccgcctcccg

SEQ ID NO: 24229 - DNA, 20 bp, synthetic construct
  source 1..20: mol_type = other DNA
cactgcaagctccgcctccc

SEQ ID NO: 24230 - DNA, 20 bp, synthetic construct
  source 1..20: mol_type = other DNA
tcactgcaagctccgcctcc

SEQ ID NO: 24231 - DNA, 20 bp, synthetic construct
  source 1..20: mol_type = other DNA
ctcactgcaagctccgcctc

SEQ ID NO: 24232 - DNA, 20 bp, synthetic construct
  source 1..20: mol_type = other DNA
gctcactgcaagctccgcct

SEQ ID NO: 24233 - DNA, 20 bp, synthetic construct
  source 1..20: mol_type = other DNA
ggctcactgcaagctccgcc

SEQ ID NO: 24234 - DNA, 20 bp, synthetic construct
  source 1..20: mol_type = other DNA
cggctcactgcaagctccgc

SEQ ID NO: 24235 - DNA, 20 bp, synthetic construct
  source 1..20: mol_type = other DNA
tcggctcactgcaagctccg

SEQ ID NO: 24236 - DNA, 20 bp, synthetic construct
  source 1..20: mol_type = other DNA
ctcggctcactgcaagctcc

SEQ ID NO: 24237 - DNA, 20 bp, synthetic construct
  source 1..20: mol_type = other DNA
tctcggctcactgcaagctc

SEQ ID NO: 24238 - DNA, 20 bp, synthetic construct
  source 1..20: mol_type = other DNA
atctcggctcactgcaagct

SEQ ID NO: 24239 - DNA, 20 bp, synthetic construct
  source 1..20: mol_type = other DNA
gatctcggctcactgcaagc

SEQ ID NO: 24240 - DNA, 20 bp, synthetic construct
  source 1..20: mol_type = other DNA
cgatctcggctcactgcaag

SEQ ID NO: 24241 - DNA, 20 bp, synthetic construct
  source 1..20: mol_type = other DNA
acgatctcggctcactgcaa

SEQ ID NO: 24242 - DNA, 20 bp, synthetic construct
  source 1..20: mol_type = other DNA
cacgatctcggctcactgca

SEQ ID NO: 24243 - DNA, 20 bp, synthetic construct
  source 1..20: mol_type = other DNA
gcacgatctcggctcactgc

SEQ ID NO: 24244 - DNA, 20 bp, synthetic construct
  source 1..20: mol_type = other DNA
ggcacgatctcggctcactg

SEQ ID NO: 24245 - DNA, 20 bp, synthetic construct
  source 1..20: mol_type = other DNA
tggcacgatctcggctcact

SEQ ID NO: 24246 - DNA, 20 bp, synthetic construct
  source 1..20: mol_type = other DNA
gtggcacgatctcggctcac

SEQ ID NO: 24247 - DNA, 20 bp, synthetic construct
  source 1..20: mol_type = other DNA
agtggcacgatctcggctca

SEQ ID NO: 24248 - DNA, 20 bp, synthetic construct
  source 1..20: mol_type = other DNA
cagtggcacgatctcggctc

SEQ ID NO: 24249 - DNA, 20 bp, synthetic construct
  source 1..20: mol_type = other DNA
gcagtggcacgatctcggct

SEQ ID NO: 24250 - DNA, 20 bp, synthetic construct
  source 1..20: mol_type = other DNA
tgcagtggcacgatctcggc

SEQ ID NO: 24251 - DNA, 20 bp, synthetic construct
  source 1..20: mol_type = other DNA
gtgcagtggcacgatctcgg

SEQ ID NO: 24252 - DNA, 20 bp, synthetic construct
  source 1..20: mol_type = other DNA
agtgcagtggcacgatctcg

SEQ ID NO: 24253 - DNA, 20 bp, synthetic construct
  source 1..20: mol_type = other DNA
gagtgcagtggcacgatctc

SEQ ID NO: 24254 - DNA, 20 bp, synthetic construct
  source 1..20: mol_type = other DNA
ggagtgcagtggcacgatct

SEQ ID NO: 24255 - DNA, 20 bp, synthetic construct
  source 1..20: mol_type = other DNA
tggagtgcagtggcacgatc

SEQ ID NO: 24256 - DNA, 20 bp, synthetic construct
  source 1..20: mol_type = other DNA
ctggagtgcagtggcacgat

SEQ ID NO: 24257 - DNA, 20 bp, synthetic construct
  source 1..20: mol_type = other DNA
gctggagtgcagtggcacga

SEQ ID NO: 24258 - DNA, 20 bp, synthetic construct
  source 1..20: mol_type = other DNA
ggctggagtgcagtggcacg

SEQ ID NO: 24259 - DNA, 20 bp, synthetic construct
  source 1..20: mol_type = other DNA
aggctggagtgcagtggcac

SEQ ID NO: 24260 - DNA, 20 bp, synthetic construct
  source 1..20: mol_type = other DNA
caggctggagtgcagtggca

SEQ ID NO: 24261 - DNA, 20 bp, synthetic construct
  source 1..20: mol_type = other DNA
ccaggctggagtgcagtggc

SEQ ID NO: 24262 - DNA, 20 bp, synthetic construct
  source 1..20: mol_type = other DNA
cccaggctggagtgcagtgg

SEQ ID NO: 24263 - DNA, 20 bp, synthetic construct
  source 1..20: mol_type = other DNA
gcccaggctggagtgcagtg

SEQ ID NO: 24264 - DNA, 20 bp, synthetic construct
  source 1..20: mol_type = other DNA
tgcccaggctggagtgcagt

SEQ ID NO: 24265 - DNA, 20 bp, synthetic construct
  source 1..20: mol_type = other DNA
ttgcccaggctggagtgcag

SEQ ID NO: 24266 - DNA, 20 bp, synthetic construct
  source 1..20: mol_type = other DNA
gttgcccaggctggagtgca

SEQ ID NO: 24267 - DNA, 20 bp, synthetic construct
  source 1..20: mol_type = other DNA
tgttgcccaggctggagtgc

SEQ ID NO: 24268 - DNA, 20 bp, synthetic construct
  source 1..20: mol_type = other DNA
ctgttgcccaggctggagtg

SEQ ID NO: 24269 - DNA, 20 bp, synthetic construct
  source 1..20: mol_type = other DNA
tctgttgcccaggctggagt

SEQ ID NO: 24270 - DNA, 20 bp, synthetic construct
  source 1..20: mol_type = other DNA
ctctgttgcccaggctggag

SEQ ID NO: 24271 - DNA, 20 bp, synthetic construct
  source 1..20: mol_type = other DNA
gctctgttgcccaggctgga

SEQ ID NO: 24272 - DNA, 20 bp, synthetic construct
  source 1..20: mol_type = other DNA
cgctctgttgcccaggctgg

SEQ ID NO: 24273 - DNA, 20 bp, synthetic construct
  source 1..20: mol_type = other DNA
tcgctctgttgcccaggctg

SEQ ID NO: 24274 - DNA, 20 bp, synthetic construct
  source 1..20: mol_type = other DNA
ctcgctctgttgcccaggct

SEQ ID NO: 24275 - DNA, 20 bp, synthetic construct
  source 1..20: mol_type = other DNA
tctcgctctgttgcccaggc

SEQ ID NO: 24276 - DNA, 20 bp, synthetic construct
  source 1..20: mol_type = other DNA
gtctcgctctgttgcccagg

SEQ ID NO: 24277 - DNA, 20 bp, synthetic construct
  source 1..20: mol_type = other DNA
agtctcgctctgttgcccag

SEQ ID NO: 24278 - DNA, 20 bp, synthetic construct
  source 1..20: mol_type = other DNA
gagtctcgctctgttgccca

SEQ ID NO: 24279 - DNA, 20 bp, synthetic construct
  source 1..20: mol_type = other DNA
agagtctcgctctgttgccc

SEQ ID NO: 24280 - DNA, 20 bp, synthetic construct
  source 1..20: mol_type = other DNA
cagagtctcgctctgttgcc

SEQ ID NO: 24281 - DNA, 20 bp, synthetic construct
  source 1..20: mol_type = other DNA
acagagtctcgctctgttgc

SEQ ID NO: 24282 - DNA, 20 bp, synthetic construct
  source 1..20: mol_type = other DNA
gacagagtctcgctctgttg

SEQ ID NO: 24283 - DNA, 20 bp, synthetic construct
  source 1..20: mol_type = other DNA
agacagagtctcgctctgtt

SEQ ID NO: 24284 - DNA, 20 bp, synthetic construct
  source 1..20: mol_type = other DNA
gagacagagtctcgctctgt

SEQ ID NO: 24285 - DNA, 20 bp, synthetic construct
  source 1..20: mol_type = other DNA
tgagacagagtctcgctctg

SEQ ID NO: 24286 - DNA, 20 bp, synthetic construct
  source 1..20: mol_type = other DNA
ttgagacagagtctcgctct

SEQ ID NO: 24287 - DNA, 20 bp, synthetic construct
  source 1..20: mol_type = other DNA
tttgagacagagtctcgctc

SEQ ID NO: 24288 - DNA, 20 bp, synthetic construct
  source 1..20: mol_type = other DNA
ttttgagacagagtctcgct

SEQ ID NO: 24289 - DNA, 20 bp, synthetic construct
  source 1..20: mol_type = other DNA
attttgagacagagtctcgc

SEQ ID NO: 24290 - DNA, 20 bp, synthetic construct
  source 1..20: mol_type = other DNA
tattttgagacagagtctcg

SEQ ID NO: 24291 - DNA, 20 bp, synthetic construct
  source 1..20: mol_type = other DNA
ttattttgagacagagtctc

SEQ ID NO: 24292 - DNA, 20 bp, synthetic construct
  source 1..20: mol_type = other DNA
tttattttgagacagagtct

SEQ ID NO: 24293 - DNA, 20 bp, synthetic construct
  source 1..20: mol_type = other DNA
atttattttgagacagagtc

SEQ ID NO: 24294 - DNA, 20 bp, synthetic construct
  source 1..20: mol_type = other DNA
tatttattttgagacagagt

SEQ ID NO: 24295 - DNA, 20 bp, synthetic construct
  source 1..20: mol_type = other DNA
ttatttattttgagacagag

SEQ ID NO: 24296 - DNA, 20 bp, synthetic construct
  source 1..20: mol_type = other DNA
tttatttattttgagacaga

SEQ ID NO: 24297 - DNA, 20 bp, synthetic construct
  source 1..20: mol_type = other DNA
atttatttattttgagacag

SEQ ID NO: 24298 - DNA, 20 bp, synthetic construct
  source 1..20: mol_type = other DNA
tatttatttattttgagaca

SEQ ID NO: 24299 - DNA, 20 bp, synthetic construct
  source 1..20: mol_type = other DNA
ttatttatttattttgagac

SEQ ID NO: 24300 - DNA, 20 bp, synthetic construct
  source 1..20: mol_type = other DNA
tttatttatttattttgaga

SEQ ID NO: 24301 - DNA, 20 bp, synthetic construct
  source 1..20: mol_type = other DNA
atttatttatttattttgag

SEQ ID NO: 24302 - DNA, 20 bp, synthetic construct
  source 1..20: mol_type = other DNA
tatttatttatttattttga

SEQ ID NO: 24303 - DNA, 20 bp, synthetic construct
  source 1..20: mol_type = other DNA
ttatttatttatttattttg

SEQ ID NO: 24304 - DNA, 20 bp, synthetic construct
  source 1..20: mol_type = other DNA
tttatttatttatttatttt

SEQ ID NO: 24305 - DNA, 20 bp, synthetic construct
  source 1..20: mol_type = other DNA
atttatttatttatttattt

SEQ ID NO: 24306 - DNA, 20 bp, synthetic construct
  source 1..20: mol_type = other DNA
tatttatttatttatttatt

SEQ ID NO: 24307 - DNA, 20 bp, synthetic construct
  source 1..20: mol_type = other DNA
ttatttatttatttatttat

SEQ ID NO: 24308 - DNA, 20 bp, synthetic construct
  source 1..20: mol_type = other DNA
tttatttatttatttattta

SEQ ID NO: 24309 - DNA, 20 bp, synthetic construct
  source 1..20: mol_type = other DNA
atttatttatttatttattt

SEQ ID NO: 24310 - DNA, 20 bp, synthetic construct
  source 1..20: mol_type = other DNA
tatttatttatttatttatt

SEQ ID NO: 24311 - DNA, 20 bp, synthetic construct
  source 1..20: mol_type = other DNA
ttatttatttatttatttat

SEQ ID NO: 24312 - DNA, 20 bp, synthetic construct
  source 1..20: mol_type = other DNA
attatttatttatttattta

SEQ ID NO: 24313 - DNA, 20 bp, synthetic construct
  source 1..20: mol_type = other DNA
aattatttatttatttattt

SEQ ID NO: 24314 - DNA, 20 bp, synthetic construct
  source 1..20: mol_type = other DNA
caattatttatttatttatt

SEQ ID NO: 24315 - DNA, 20 bp, synthetic construct
  source 1..20: mol_type = other DNA
tcaattatttatttatttat

SEQ ID NO: 24316 - DNA, 20 bp, synthetic construct
  source 1..20: mol_type = other DNA
ttcaattatttatttattta

SEQ ID NO: 24317 - DNA, 20 bp, synthetic construct
  source 1..20: mol_type = other DNA
tttcaattatttatttattt

SEQ ID NO: 24318 - DNA, 20 bp, synthetic construct
  source 1..20: mol_type = other DNA
gtttcaattatttatttatt

SEQ ID NO: 24319 - DNA, 20 bp, synthetic construct
  source 1..20: mol_type = other DNA
tgtttcaattatttatttat

SEQ ID NO: 24320 - DNA, 20 bp, synthetic construct
  source 1..20: mol_type = other DNA
atgtttcaattatttattta

SEQ ID NO: 24321 - DNA, 20 bp, synthetic construct
  source 1..20: mol_type = other DNA
catgtttcaattatttattt

SEQ ID NO: 24322 - DNA, 20 bp, synthetic construct
  source 1..20: mol_type = other DNA
gcatgtttcaattatttatt

SEQ ID NO: 24323 - DNA, 20 bp, synthetic construct
  source 1..20: mol_type = other DNA
cgcatgtttcaattatttat

SEQ ID NO: 24324 - DNA, 20 bp, synthetic construct
  source 1..20: mol_type = other DNA
ccgcatgtttcaattattta

SEQ ID NO: 24325 - DNA, 20 bp, synthetic construct
  source 1..20: mol_type = other DNA
accgcatgtttcaattattt

SEQ ID NO: 24326 - DNA, 20 bp, synthetic construct
  source 1..20: mol_type = other DNA
caccgcatgtttcaattatt

SEQ ID NO: 24327 - DNA, 20 bp, synthetic construct
  source 1..20: mol_type = other DNA
gcaccgcatgtttcaattat

SEQ ID NO: 24328 - DNA, 20 bp, synthetic construct
  source 1..20: mol_type = other DNA
tgcaccgcatgtttcaatta

SEQ ID NO: 24329 - DNA, 20 bp, synthetic construct
  source 1..20: mol_type = other DNA
atgcaccgcatgtttcaatt

SEQ ID NO: 24330 - DNA, 20 bp, synthetic construct
  source 1..20: mol_type = other DNA
catgcaccgcatgtttcaat

SEQ ID NO: 24331 - DNA, 20 bp, synthetic construct
  source 1..20: mol_type = other DNA
acatgcaccgcatgtttcaa

SEQ ID NO: 24332 - DNA, 20 bp, synthetic construct
  source 1..20: mol_type = other DNA
cacatgcaccgcatgtttca

SEQ ID NO: 24333 - DNA, 20 bp, synthetic construct
  source 1..20: mol_type = other DNA
acacatgcaccgcatgtttc

SEQ ID NO: 24334 - DNA, 20 bp, synthetic construct
  source 1..20: mol_type = other DNA
aacacatgcaccgcatgttt

SEQ ID NO: 24335 - DNA, 20 bp, synthetic construct
  source 1..20: mol_type = other DNA
aaacacatgcaccgcatgtt

SEQ ID NO: 24336 - DNA, 20 bp, synthetic construct
  source 1..20: mol_type = other DNA
taaacacatgcaccgcatgt

SEQ ID NO: 24337 - DNA, 20 bp, synthetic construct
  source 1..20: mol_type = other DNA
ataaacacatgcaccgcatg

SEQ ID NO: 24338 - DNA, 20 bp, synthetic construct
  source 1..20: mol_type = other DNA
aataaacacatgcaccgcat

SEQ ID NO: 24339 - DNA, 20 bp, synthetic construct
  source 1..20: mol_type = other DNA
aaataaacacatgcaccgca

SEQ ID NO: 24340 - DNA, 20 bp, synthetic construct
  source 1..20: mol_type = other DNA
caaataaacacatgcaccgc

SEQ ID NO: 24341 - DNA, 20 bp, synthetic construct
  source 1..20: mol_type = other DNA
gcaaataaacacatgcaccg

SEQ ID NO: 24342 - DNA, 20 bp, synthetic construct
  source 1..20: mol_type = other DNA
cgcaaataaacacatgcacc

SEQ ID NO: 24343 - DNA, 20 bp, synthetic construct
  source 1..20: mol_type = other DNA
tcgcaaataaacacatgcac

SEQ ID NO: 24344 - DNA, 20 bp, synthetic construct
  source 1..20: mol_type = other DNA
atcgcaaataaacacatgca

SEQ ID NO: 24345 - DNA, 20 bp, synthetic construct
  source 1..20: mol_type = other DNA
gatcgcaaataaacacatgc

SEQ ID NO: 24346 - DNA, 20 bp, synthetic construct
  source 1..20: mol_type = other DNA
agatcgcaaataaacacatg

SEQ ID NO: 24347 - DNA, 20 bp, synthetic construct
  source 1..20: mol_type = other DNA
cagatcgcaaataaacacat

SEQ ID NO: 24348 - DNA, 20 bp, synthetic construct
  source 1..20: mol_type = other DNA
tcagatcgcaaataaacaca

SEQ ID NO: 24349 - DNA, 20 bp, synthetic construct
  source 1..20: mol_type = other DNA
gtcagatcgcaaataaacac

SEQ ID NO: 24350 - DNA, 20 bp, synthetic construct
  source 1..20: mol_type = other DNA
agtcagatcgcaaataaaca

SEQ ID NO: 24351 - DNA, 20 bp, synthetic construct
  source 1..20: mol_type = other DNA
aagtcagatcgcaaataaac

SEQ ID NO: 24352 - DNA, 20 bp, synthetic construct
  source 1..20: mol_type = other DNA
caagtcagatcgcaaataaa

SEQ ID NO: 24353 - DNA, 20 bp, synthetic construct
  source 1..20: mol_type = other DNA
acaagtcagatcgcaaataa

SEQ ID NO: 24354 - DNA, 20 bp, synthetic construct
  source 1..20: mol_type = other DNA
aacaagtcagatcgcaaata

SEQ ID NO: 24355 - DNA, 20 bp, synthetic construct
  source 1..20: mol_type = other DNA
aaacaagtcagatcgcaaat

SEQ ID NO: 24356 - DNA, 20 bp, synthetic construct
  source 1..20: mol_type = other DNA
caaacaagtcagatcgcaaa

SEQ ID NO: 24357 - DNA, 20 bp, synthetic construct
  source 1..20: mol_type = other DNA
ccaaacaagtcagatcgcaa

SEQ ID NO: 24358 - DNA, 20 bp, synthetic construct
  source 1..20: mol_type = other DNA
tccaaacaagtcagatcgca

SEQ ID NO: 24359 - DNA, 20 bp, synthetic construct
  source 1..20: mol_type = other DNA
ttccaaacaagtcagatcgc

SEQ ID NO: 24360 - DNA, 20 bp, synthetic construct
  source 1..20: mol_type = other DNA
tttccaaacaagtcagatcg

SEQ ID NO: 24361 - DNA, 20 bp, synthetic construct
  source 1..20: mol_type = other DNA
atttccaaacaagtcagatc

SEQ ID NO: 24362 - DNA, 20 bp, synthetic construct
  source 1..20: mol_type = other DNA
tatttccaaacaagtcagat

SEQ ID NO: 24363 - DNA, 20 bp, synthetic construct
  source 1..20: mol_type = other DNA
atatttccaaacaagtcaga

SEQ ID NO: 24364 - DNA, 20 bp, synthetic construct
  source 1..20: mol_type = other DNA
aatatttccaaacaagtcag

SEQ ID NO: 24365 - DNA, 20 bp, synthetic construct
  source 1..20: mol_type = other DNA
aaatatttccaaacaagtca

SEQ ID NO: 24366 - DNA, 20 bp, synthetic construct
  source 1..20: mol_type = other DNA
caaatatttccaaacaagtc

SEQ ID NO: 24367 - DNA, 20 bp, synthetic construct
  source 1..20: mol_type = other DNA
gcaaatatttccaaacaagt

SEQ ID NO: 24368 - DNA, 20 bp, synthetic construct
  source 1..20: mol_type = other DNA
tgcaaatatttccaaacaag

SEQ ID NO: 24369 - DNA, 20 bp, synthetic construct
  source 1..20: mol_type = other DNA
atgcaaatatttccaaacaa

SEQ ID NO: 24370 - DNA, 20 bp, synthetic construct
  source 1..20: mol_type = other DNA
aatgcaaatatttccaaaca

SEQ ID NO: 24371 - DNA, 20 bp, synthetic construct
  source 1..20: mol_type = other DNA
taatgcaaatatttccaaac

SEQ ID NO: 24372 - DNA, 20 bp, synthetic construct
  source 1..20: mol_type = other DNA
ataatgcaaatatttccaaa

SEQ ID NO: 24373 - DNA, 20 bp, synthetic construct
  source 1..20: mol_type = other DNA
gataatgcaaatatttccaa

SEQ ID NO: 24374 - DNA, 20 bp, synthetic construct
  source 1..20: mol_type = other DNA
agataatgcaaatatttcca

SEQ ID NO: 24375 - DNA, 20 bp, synthetic construct
  source 1..20: mol_type = other DNA
aagataatgcaaatatttcc

SEQ ID NO: 24376 - DNA, 20 bp, synthetic construct
  source 1..20: mol_type = other DNA
gaagataatgcaaatatttc

SEQ ID NO: 24377 - DNA, 20 bp, synthetic construct
  source 1..20: mol_type = other DNA
ggaagataatgcaaatattt

SEQ ID NO: 24378 - DNA, 20 bp, synthetic construct
  source 1..20: mol_type = other DNA
aggaagataatgcaaatatt

SEQ ID NO: 24379 - DNA, 20 bp, synthetic construct
  source 1..20: mol_type = other DNA
aaggaagataatgcaaatat

SEQ ID NO: 24380 - DNA, 20 bp, synthetic construct
  source 1..20: mol_type = other DNA
gaaggaagataatgcaaata

SEQ ID NO: 24381 - DNA, 20 bp, synthetic construct
  source 1..20: mol_type = other DNA
agaaggaagataatgcaaat

SEQ ID NO: 24382 - DNA, 20 bp, synthetic construct
  source 1..20: mol_type = other DNA
tagaaggaagataatgcaaa

SEQ ID NO: 24383 - DNA, 20 bp, synthetic construct
  source 1..20: mol_type = other DNA
ctagaaggaagataatgcaa

SEQ ID NO: 24384 - DNA, 20 bp, synthetic construct
  source 1..20: mol_type = other DNA
tctagaaggaagataatgca

SEQ ID NO: 24385 - DNA, 20 bp, synthetic construct
  source 1..20: mol_type = other DNA
atctagaaggaagataatgc

SEQ ID NO: 24386 - DNA, 20 bp, synthetic construct
  source 1..20: mol_type = other DNA
aatctagaaggaagataatg

SEQ ID NO: 24387 - DNA, 20 bp, synthetic construct
  source 1..20: mol_type = other DNA
aaatctagaaggaagataat

SEQ ID NO: 24388 - DNA, 20 bp, synthetic construct
  source 1..20: mol_type = other DNA
taaatctagaaggaagataa

SEQ ID NO: 24389 - DNA, 20 bp, synthetic construct
  source 1..20: mol_type = other DNA
ctaaatctagaaggaagata

SEQ ID NO: 24390 - DNA, 20 bp, synthetic construct
  source 1..20: mol_type = other DNA
tctaaatctagaaggaagat

SEQ ID NO: 24391 - DNA, 20 bp, synthetic construct
  source 1..20: mol_type = other DNA
ctctaaatctagaaggaaga

SEQ ID NO: 24392 - DNA, 20 bp, synthetic construct
  source 1..20: mol_type = other DNA
gctctaaatctagaaggaag

SEQ ID NO: 24393 - DNA, 20 bp, synthetic construct
  source 1..20: mol_type = other DNA
tgctctaaatctagaaggaa

SEQ ID NO: 24394 - DNA, 20 bp, synthetic construct
  source 1..20: mol_type = other DNA
atgctctaaatctagaagga

SEQ ID NO: 24395 - DNA, 20 bp, synthetic construct
  source 1..20: mol_type = other DNA
gatgctctaaatctagaagg

SEQ ID NO: 24396 - DNA, 20 bp, synthetic construct
  source 1..20: mol_type = other DNA
agatgctctaaatctagaag

SEQ ID NO: 24397 - DNA, 20 bp, synthetic construct
  source 1..20: mol_type = other DNA
aagatgctctaaatctagaa

SEQ ID NO: 24398 - DNA, 20 bp, synthetic construct
  source 1..20: mol_type = other DNA
caagatgctctaaatctaga

SEQ ID NO: 24399 - DNA, 20 bp, synthetic construct
  source 1..20: mol_type = other DNA
tcaagatgctctaaatctag

SEQ ID NO: 24400 - DNA, 20 bp, synthetic construct
  source 1..20: mol_type = other DNA
gtcaagatgctctaaatcta

SEQ ID NO: 24401 - DNA, 20 bp, synthetic construct
  source 1..20: mol_type = other DNA
tgtcaagatgctctaaatct

SEQ ID NO: 24402 - DNA, 20 bp, synthetic construct
  source 1..20: mol_type = other DNA
ctgtcaagatgctctaaatc

SEQ ID NO: 24403 - DNA, 20 bp, synthetic construct
  source 1..20: mol_type = other DNA
actgtcaagatgctctaaat

SEQ ID NO: 24404 - DNA, 20 bp, synthetic construct
  source 1..20: mol_type = other DNA
tactgtcaagatgctctaaa

SEQ ID NO: 24405 - DNA, 20 bp, synthetic construct
  source 1..20: mol_type = other DNA
ctactgtcaagatgctctaa

SEQ ID NO: 24406 - DNA, 20 bp, synthetic construct
  source 1..20: mol_type = other DNA
cctactgtcaagatgctcta

SEQ ID NO: 24407 - DNA, 20 bp, synthetic construct
  source 1..20: mol_type = other DNA
tcctactgtcaagatgctct

SEQ ID NO: 24408 - DNA, 20 bp, synthetic construct
  source 1..20: mol_type = other DNA
ttcctactgtcaagatgctc

SEQ ID NO: 24409 - DNA, 20 bp, synthetic construct
  source 1..20: mol_type = other DNA
gttcctactgtcaagatgct

SEQ ID NO: 24410 - DNA, 20 bp, synthetic construct
  source 1..20: mol_type = other DNA
tgttcctactgtcaagatgc

SEQ ID NO: 24411 - DNA, 20 bp, synthetic construct
  source 1..20: mol_type = other DNA
ttgttcctactgtcaagatg

SEQ ID NO: 24412 - DNA, 20 bp, synthetic construct
  source 1..20: mol_type = other DNA
cttgttcctactgtcaagat

SEQ ID NO: 24413 - DNA, 20 bp, synthetic construct
  source 1..20: mol_type = other DNA
acttgttcctactgtcaaga

SEQ ID NO: 24414 - DNA, 20 bp, synthetic construct
  source 1..20: mol_type = other DNA
cacttgttcctactgtcaag

SEQ ID NO: 24415 - DNA, 20 bp, synthetic construct
  source 1..20: mol_type = other DNA
acacttgttcctactgtcaa

SEQ ID NO: 24416 - DNA, 20 bp, synthetic construct
  source 1..20: mol_type = other DNA
aacacttgttcctactgtca

SEQ ID NO: 24417 - DNA, 20 bp, synthetic construct
  source 1..20: mol_type = other DNA
aaacacttgttcctactgtc

SEQ ID NO: 24418 - DNA, 20 bp, synthetic construct
  source 1..20: mol_type = other DNA
aaaacacttgttcctactgt

SEQ ID NO: 24419 - DNA, 20 bp, synthetic construct
  source 1..20: mol_type = other DNA
caaaacacttgttcctactg

SEQ ID NO: 24420 - DNA, 20 bp, synthetic construct
  source 1..20: mol_type = other DNA
acaaaacacttgttcctact

SEQ ID NO: 24421 - DNA, 20 bp, synthetic construct
  source 1..20: mol_type = other DNA
tacaaaacacttgttcctac

SEQ ID NO: 24422 - DNA, 20 bp, synthetic construct
  source 1..20: mol_type = other DNA
gtacaaaacacttgttccta

SEQ ID NO: 24423 - DNA, 20 bp, synthetic construct
  source 1..20: mol_type = other DNA
tgtacaaaacacttgttcct

SEQ ID NO: 24424 - DNA, 20 bp, synthetic construct
  source 1..20: mol_type = other DNA
ttgtacaaaacacttgttcc

SEQ ID NO: 24425 - DNA, 20 bp, synthetic construct
  source 1..20: mol_type = other DNA
gttgtacaaaacacttgttc

SEQ ID NO: 24426 - DNA, 20 bp, synthetic construct
  source 1..20: mol_type = other DNA
agttgtacaaaacacttgtt

SEQ ID NO: 24427 - DNA, 20 bp, synthetic construct
  source 1..20: mol_type = other DNA
aagttgtacaaaacacttgt

SEQ ID NO: 24428 - DNA, 20 bp, synthetic construct
  source 1..20: mol_type = other DNA
aaagttgtacaaaacacttg

SEQ ID NO: 24429 - DNA, 20 bp, synthetic construct
  source 1..20: mol_type = other DNA
caaagttgtacaaaacactt

SEQ ID NO: 24430 - DNA, 20 bp, synthetic construct
  source 1..20: mol_type = other DNA
acaaagttgtacaaaacact

SEQ ID NO: 24431 - DNA, 20 bp, synthetic construct
  source 1..20: mol_type = other DNA
tacaaagttgtacaaaacac

SEQ ID NO: 24432 - DNA, 20 bp, synthetic construct
  source 1..20: mol_type = other DNA
atacaaagttgtacaaaaca

SEQ ID NO: 24433 - DNA, 20 bp, synthetic construct
  source 1..20: mol_type = other DNA
catacaaagttgtacaaaac

SEQ ID NO: 24434 - DNA, 20 bp, synthetic construct
  source 1..20: mol_type = other DNA
gcatacaaagttgtacaaaa

SEQ ID NO: 24435 - DNA, 20 bp, synthetic construct
  source 1..20: mol_type = other DNA
agcatacaaagttgtacaaa

SEQ ID NO: 24436 - DNA, 20 bp, synthetic construct
  source 1..20: mol_type = other DNA
aagcatacaaagttgtacaa

SEQ ID NO: 24437 - DNA, 20 bp, synthetic construct
  source 1..20: mol_type = other DNA
taagcatacaaagttgtaca

SEQ ID NO: 24438 - DNA, 20 bp, synthetic construct
  source 1..20: mol_type = other DNA
ctaagcatacaaagttgtac

SEQ ID NO: 24439 - DNA, 20 bp, synthetic construct
  source 1..20: mol_type = other DNA
actaagcatacaaagttgta

SEQ ID NO: 24440 - DNA, 20 bp, synthetic construct
  source 1..20: mol_type = other DNA
tactaagcatacaaagttgt

SEQ ID NO: 24441 - DNA, 20 bp, synthetic construct
  source 1..20: mol_type = other DNA
ttactaagcatacaaagttg

SEQ ID NO: 24442 - DNA, 20 bp, synthetic construct
  source 1..20: mol_type = other DNA
cttactaagcatacaaagtt

SEQ ID NO: 24443 - DNA, 20 bp, synthetic construct
  source 1..20: mol_type = other DNA
acttactaagcatacaaagt

SEQ ID NO: 24444 - DNA, 20 bp, synthetic construct
  source 1..20: mol_type = other DNA
aacttactaagcatacaaag

SEQ ID NO: 24445 - DNA, 20 bp, synthetic construct
  source 1..20: mol_type = other DNA
taacttactaagcatacaaa

SEQ ID NO: 24446 - DNA, 20 bp, synthetic construct
  source 1..20: mol_type = other DNA
ataacttactaagcatacaa

SEQ ID NO: 24447 - DNA, 20 bp, synthetic construct
  source 1..20: mol_type = other DNA
gataacttactaagcataca

SEQ ID NO: 24448 - DNA, 20 bp, synthetic construct
  source 1..20: mol_type = other DNA
tgataacttactaagcatac

SEQ ID NO: 24449 - DNA, 20 bp, synthetic construct
  source 1..20: mol_type = other DNA
ttgataacttactaagcata

SEQ ID NO: 24450 - DNA, 20 bp, synthetic construct
  source 1..20: mol_type = other DNA
attgataacttactaagcat

SEQ ID NO: 24451 - DNA, 20 bp, synthetic construct
  source 1..20: mol_type = other DNA
aattgataacttactaagca

SEQ ID NO: 24452 - DNA, 20 bp, synthetic construct
  source 1..20: mol_type = other DNA
taattgataacttactaagc

SEQ ID NO: 24453 - DNA, 20 bp, synthetic construct
  source 1..20: mol_type = other DNA
ttaattgataacttactaag

SEQ ID NO: 24454 - DNA, 20 bp, synthetic construct
  source 1..20: mol_type = other DNA
gttaattgataacttactaa

SEQ ID NO: 24455 - DNA, 20 bp, synthetic construct
  source 1..20: mol_type = other DNA
agttaattgataacttacta

SEQ ID NO: 24456 - DNA, 20 bp, synthetic construct
  source 1..20: mol_type = other DNA
aagttaattgataacttact

SEQ ID NO: 24457 - DNA, 20 bp, synthetic construct
  source 1..20: mol_type = other DNA
caagttaattgataacttac

SEQ ID NO: 24458 - DNA, 20 bp, synthetic construct
  source 1..20: mol_type = other DNA
acaagttaattgataactta

SEQ ID NO: 24459 - DNA, 20 bp, synthetic construct
  source 1..20: mol_type = other DNA
gacaagttaattgataactt

SEQ ID NO: 24460 - DNA, 20 bp, synthetic construct
  source 1..20: mol_type = other DNA
cgacaagttaattgataact

SEQ ID NO: 24461 - DNA, 20 bp, synthetic construct
  source 1..20: mol_type = other DNA
acgacaagttaattgataac

SEQ ID NO: 24462 - DNA, 20 bp, synthetic construct
  source 1..20: mol_type = other DNA
cacgacaagttaattgataa

SEQ ID NO: 24463 - DNA, 20 bp, synthetic construct
  source 1..20: mol_type = other DNA
ccacgacaagttaattgata

SEQ ID NO: 24464 - DNA, 20 bp, synthetic construct
  source 1..20: mol_type = other DNA
gccacgacaagttaattgat

SEQ ID NO: 24465 - DNA, 20 bp, synthetic construct
  source 1..20: mol_type = other DNA
ggccacgacaagttaattga

SEQ ID NO: 24466 - DNA, 20 bp, synthetic construct
  source 1..20: mol_type = other DNA
tggccacgacaagttaattg

SEQ ID NO: 24467 - DNA, 20 bp, synthetic construct
  source 1..20: mol_type = other DNA
ctggccacgacaagttaatt

SEQ ID NO: 24468 - DNA, 20 bp, synthetic construct
  source 1..20: mol_type = other DNA
cctggccacgacaagttaat

SEQ ID NO: 24469 - DNA, 20 bp, synthetic construct
  source 1..20: mol_type = other DNA
gcctggccacgacaagttaa

SEQ ID NO: 24470 - DNA, 20 bp, synthetic construct
  source 1..20: mol_type = other DNA
cgcctggccacgacaagtta

SEQ ID NO: 24471 - DNA, 20 bp, synthetic construct
  source 1..20: mol_type = other DNA
gcgcctggccacgacaagtt

SEQ ID NO: 24472 - DNA, 20 bp, synthetic construct
  source 1..20: mol_type = other DNA
tgcgcctggccacgacaagt

SEQ ID NO: 24473 - DNA, 20 bp, synthetic construct
  source 1..20: mol_type = other DNA
ctgcgcctggccacgacaag

SEQ ID NO: 24474 - DNA, 20 bp, synthetic construct
  source 1..20: mol_type = other DNA
actgcgcctggccacgacaa

SEQ ID NO: 24475 - DNA, 20 bp, synthetic construct
  source 1..20: mol_type = other DNA
cactgcgcctggccacgaca

SEQ ID NO: 24476 - DNA, 20 bp, synthetic construct
  source 1..20: mol_type = other DNA
ccactgcgcctggccacgac

SEQ ID NO: 24477 - DNA, 20 bp, synthetic construct
  source 1..20: mol_type = other DNA
gccactgcgcctggccacga

SEQ ID NO: 24478 - DNA, 20 bp, synthetic construct
  source 1..20: mol_type = other DNA
agccactgcgcctggccacg

SEQ ID NO: 24479 - DNA, 20 bp, synthetic construct
  source 1..20: mol_type = other DNA
gagccactgcgcctggccac

SEQ ID NO: 24480 - DNA, 20 bp, synthetic construct
  source 1..20: mol_type = other DNA
tgagccactgcgcctggcca

SEQ ID NO: 24481 - DNA, 20 bp, synthetic construct
  source 1..20: mol_type = other DNA
gtgagccactgcgcctggcc

SEQ ID NO: 24482 - DNA, 20 bp, synthetic construct
  source 1..20: mol_type = other DNA
cgtgagccactgcgcctggc

SEQ ID NO: 24483 - DNA, 20 bp, synthetic construct
  source 1..20: mol_type = other DNA
tcgtgagccactgcgcctgg

SEQ ID NO: 24484 - DNA, 20 bp, synthetic construct
  source 1..20: mol_type = other DNA
gtcgtgagccactgcgcctg

SEQ ID NO: 24485 - DNA, 20 bp, synthetic construct
  source 1..20: mol_type = other DNA
agtcgtgagccactgcgcct

SEQ ID NO: 24486 - DNA, 20 bp, synthetic construct
  source 1..20: mol_type = other DNA
cagtcgtgagccactgcgcc

SEQ ID NO: 24487 - DNA, 20 bp, synthetic construct
  source 1..20: mol_type = other DNA
acagtcgtgagccactgcgc

SEQ ID NO: 24488 - DNA, 20 bp, synthetic construct
  source 1..20: mol_type = other DNA
tacagtcgtgagccactgcg

SEQ ID NO: 24489 - DNA, 20 bp, synthetic construct
  source 1..20: mol_type = other DNA
ttacagtcgtgagccactgc

SEQ ID NO: 24490 - DNA, 20 bp, synthetic construct
  source 1..20: mol_type = other DNA
attacagtcgtgagccactg

SEQ ID NO: 24491 - DNA, 20 bp, synthetic construct
  source 1..20: mol_type = other DNA
gattacagtcgtgagccact

SEQ ID NO: 24492 - DNA, 20 bp, synthetic construct
  source 1..20: mol_type = other DNA
ggattacagtcgtgagccac

SEQ ID NO: 24493 - DNA, 20 bp, synthetic construct
  source 1..20: mol_type = other DNA
gggattacagtcgtgagcca

SEQ ID NO: 24494 - DNA, 20 bp, synthetic construct
  source 1..20: mol_type = other DNA
tgggattacagtcgtgagcc

SEQ ID NO: 24495 - DNA, 20 bp, synthetic construct
  source 1..20: mol_type = other DNA
ctgggattacagtcgtgagc

SEQ ID NO: 24496 - DNA, 20 bp, synthetic construct
  source 1..20: mol_type = other DNA
gctgggattacagtcgtgag

SEQ ID NO: 24497 - DNA, 20 bp, synthetic construct
  source 1..20: mol_type = other DNA
tgctgggattacagtcgtga

SEQ ID NO: 24498 - DNA, 20 bp, synthetic construct
  source 1..20: mol_type = other DNA
gtgctgggattacagtcgtg

SEQ ID NO: 24499 - DNA, 20 bp, synthetic construct
  source 1..20: mol_type = other DNA
agtgctgggattacagtcgt

SEQ ID NO: 24500 - DNA, 20 bp, synthetic construct
  source 1..20: mol_type = other DNA
aagtgctgggattacagtcg

SEQ ID NO: 24501 - DNA, 20 bp, synthetic construct
  source 1..20: mol_type = other DNA
aaagtgctgggattacagtc

SEQ ID NO: 24502 - DNA, 20 bp, synthetic construct
  source 1..20: mol_type = other DNA
caaagtgctgggattacagt

SEQ ID NO: 24503 - DNA, 20 bp, synthetic construct
  source 1..20: mol_type = other DNA
ccaaagtgctgggattacag

SEQ ID NO: 24504 - DNA, 20 bp, synthetic construct
  source 1..20: mol_type = other DNA
cccaaagtgctgggattaca

SEQ ID NO: 24505 - DNA, 20 bp, synthetic construct
  source 1..20: mol_type = other DNA
tcccaaagtgctgggattac

SEQ ID NO: 24506 - DNA, 20 bp, synthetic construct
  source 1..20: mol_type = other DNA
ctcccaaagtgctgggatta

SEQ ID NO: 24507 - DNA, 20 bp, synthetic construct
  source 1..20: mol_type = other DNA
cctcccaaagtgctgggatt

SEQ ID NO: 24508 - DNA, 20 bp, synthetic construct
  source 1..20: mol_type = other DNA
gcctcccaaagtgctgggat

SEQ ID NO: 24509 - DNA, 20 bp, synthetic construct
  source 1..20: mol_type = other DNA
ggcctcccaaagtgctggga

SEQ ID NO: 24510 - DNA, 20 bp, synthetic construct
  source 1..20: mol_type = other DNA
cggcctcccaaagtgctggg

SEQ ID NO: 24511 - DNA, 20 bp, synthetic construct
  source 1..20: mol_type = other DNA
tcggcctcccaaagtgctgg

SEQ ID NO: 24512 - DNA, 20 bp, synthetic construct
  source 1..20: mol_type = other DNA
ctcggcctcccaaagtgctg

SEQ ID NO: 24513 - DNA, 20 bp, synthetic construct
  source 1..20: mol_type = other DNA
cctcggcctcccaaagtgct

SEQ ID NO: 24514 - DNA, 20 bp, synthetic construct
  source 1..20: mol_type = other DNA
gcctcggcctcccaaagtgc

SEQ ID NO: 24515 - DNA, 20 bp, synthetic construct
  source 1..20: mol_type = other DNA
cgcctcggcctcccaaagtg

SEQ ID NO: 24516 - DNA, 20 bp, synthetic construct
  source 1..20: mol_type = other DNA
ccgcctcggcctcccaaagt

SEQ ID NO: 24517 - DNA, 20 bp, synthetic construct
  source 1..20: mol_type = other DNA
cccgcctcggcctcccaaag

SEQ ID NO: 24518 - DNA, 20 bp, synthetic construct
  source 1..20: mol_type = other DNA
gcccgcctcggcctcccaaa

SEQ ID NO: 24519 - DNA, 20 bp, synthetic construct
  source 1..20: mol_type = other DNA
tgcccgcctcggcctcccaa

SEQ ID NO: 24520 - DNA, 20 bp, synthetic construct
  source 1..20: mol_type = other DNA
ctgcccgcctcggcctccca

SEQ ID NO: 24521 - DNA, 20 bp, synthetic construct
  source 1..20: mol_type = other DNA
tctgcccgcctcggcctccc

SEQ ID NO: 24522 - DNA, 20 bp, synthetic construct
  source 1..20: mol_type = other DNA
atctgcccgcctcggcctcc

SEQ ID NO: 24523 - DNA, 20 bp, synthetic construct
  source 1..20: mol_type = other DNA
gatctgcccgcctcggcctc

SEQ ID NO: 24524 - DNA, 20 bp, synthetic construct
  source 1..20: mol_type = other DNA
tgatctgcccgcctcggcct

SEQ ID NO: 24525 - DNA, 20 bp, synthetic construct
  source 1..20: mol_type = other DNA
gtgatctgcccgcctcggcc

SEQ ID NO: 24526 - DNA, 20 bp, synthetic construct
  source 1..20: mol_type = other DNA
ggtgatctgcccgcctcggc

SEQ ID NO: 24527 - DNA, 20 bp, synthetic construct
  source 1..20: mol_type = other DNA
aggtgatctgcccgcctcgg

SEQ ID NO: 24528 - DNA, 20 bp, synthetic construct
  source 1..20: mol_type = other DNA
caggtgatctgcccgcctcg

SEQ ID NO: 24529 - DNA, 20 bp, synthetic construct
  source 1..20: mol_type = other DNA
tcaggtgatctgcccgcctc

SEQ ID NO: 24530 - DNA, 20 bp, synthetic construct
  source 1..20: mol_type = other DNA
ctcaggtgatctgcccgcct

SEQ ID NO: 24531 - DNA, 20 bp, synthetic construct
  source 1..20: mol_type = other DNA
cctcaggtgatctgcccgcc

SEQ ID NO: 24532 - DNA, 20 bp, synthetic construct
  source 1..20: mol_type = other DNA
acctcaggtgatctgcccgc

SEQ ID NO: 24533 - DNA, 20 bp, synthetic construct
  source 1..20: mol_type = other DNA
gacctcaggtgatctgcccg

SEQ ID NO: 24534 - DNA, 20 bp, synthetic construct
  source 1..20: mol_type = other DNA
tgacctcaggtgatctgccc

SEQ ID NO: 24535 - DNA, 20 bp, synthetic construct
  source 1..20: mol_type = other DNA
ctgacctcaggtgatctgcc

SEQ ID NO: 24536 - DNA, 20 bp, synthetic construct
  source 1..20: mol_type = other DNA
cctgacctcaggtgatctgc

SEQ ID NO: 24537 - DNA, 20 bp, synthetic construct
  source 1..20: mol_type = other DNA
tcctgacctcaggtgatctg

SEQ ID NO: 24538 - DNA, 20 bp, synthetic construct
  source 1..20: mol_type = other DNA
ctcctgacctcaggtgatct

SEQ ID NO: 24539 - DNA, 20 bp, synthetic construct
  source 1..20: mol_type = other DNA
actcctgacctcaggtgatc

SEQ ID NO: 24540 - DNA, 20 bp, synthetic construct
  source 1..20: mol_type = other DNA
aactcctgacctcaggtgat

SEQ ID NO: 24541 - DNA, 20 bp, synthetic construct
  source 1..20: mol_type = other DNA
gaactcctgacctcaggtga

SEQ ID NO: 24542 - DNA, 20 bp, synthetic construct
  source 1..20: mol_type = other DNA
cgaactcctgacctcaggtg

SEQ ID NO: 24543 - DNA, 20 bp, synthetic construct
  source 1..20: mol_type = other DNA
tcgaactcctgacctcaggt

SEQ ID NO: 24544 - DNA, 20 bp, synthetic construct
  source 1..20: mol_type = other DNA
ctcgaactcctgacctcagg

SEQ ID NO: 24545 - DNA, 20 bp, synthetic construct
  source 1..20: mol_type = other DNA
tctcgaactcctgacctcag

SEQ ID NO: 24546 - DNA, 20 bp, synthetic construct
  source 1..20: mol_type = other DNA
gtctcgaactcctgacctca

SEQ ID NO: 24547 - DNA, 20 bp, synthetic construct
  source 1..20: mol_type = other DNA
ggtctcgaactcctgacctc

SEQ ID NO: 24548 - DNA, 20 bp, synthetic construct
  source 1..20: mol_type = other DNA
tggtctcgaactcctgacct

SEQ ID NO: 24549 - DNA, 20 bp, synthetic construct
  source 1..20: mol_type = other DNA
ctggtctcgaactcctgacc

SEQ ID NO: 24550 - DNA, 20 bp, synthetic construct
  source 1..20: mol_type = other DNA
gctggtctcgaactcctgac

SEQ ID NO: 24551 - DNA, 20 bp, synthetic construct
  source 1..20: mol_type = other DNA
cgctggtctcgaactcctga

SEQ ID NO: 24552 - DNA, 20 bp, synthetic construct
  source 1..20: mol_type = other DNA
acgctggtctcgaactcctg

SEQ ID NO: 24553 - DNA, 20 bp, synthetic construct
  source 1..20: mol_type = other DNA
cacgctggtctcgaactcct

SEQ ID NO: 24554 - DNA, 20 bp, synthetic construct
  source 1..20: mol_type = other DNA
ccacgctggtctcgaactcc

SEQ ID NO: 24555 - DNA, 20 bp, synthetic construct
  source 1..20: mol_type = other DNA
gccacgctggtctcgaactc

SEQ ID NO: 24556 - DNA, 20 bp, synthetic construct
  source 1..20: mol_type = other DNA
ggccacgctggtctcgaact

SEQ ID NO: 24557 - DNA, 20 bp, synthetic construct
  source 1..20: mol_type = other DNA
tggccacgctggtctcgaac

SEQ ID NO: 24558 - DNA, 20 bp, synthetic construct
  source 1..20: mol_type = other DNA
ttggccacgctggtctcgaa

SEQ ID NO: 24559 - DNA, 20 bp, synthetic construct
  source 1..20: mol_type = other DNA
gttggccacgctggtctcga

SEQ ID NO: 24560 - DNA, 20 bp, synthetic construct
  source 1..20: mol_type = other DNA
cgttggccacgctggtctcg

SEQ ID NO: 24561 - DNA, 20 bp, synthetic construct
  source 1..20: mol_type = other DNA
acgttggccacgctggtctc

SEQ ID NO: 24562 - DNA, 20 bp, synthetic construct
  source 1..20: mol_type = other DNA
cacgttggccacgctggtct

SEQ ID NO: 24563 - DNA, 20 bp, synthetic construct
  source 1..20: mol_type = other DNA
ccacgttggccacgctggtc

SEQ ID NO: 24564 - DNA, 20 bp, synthetic construct
  source 1..20: mol_type = other DNA
accacgttggccacgctggt

SEQ ID NO: 24565 - DNA, 20 bp, synthetic construct
  source 1..20: mol_type = other DNA
caccacgttggccacgctgg

SEQ ID NO: 24566 - DNA, 20 bp, synthetic construct
  source 1..20: mol_type = other DNA
tcaccacgttggccacgctg

SEQ ID NO: 24567 - DNA, 20 bp, synthetic construct
  source 1..20: mol_type = other DNA
ttcaccacgttggccacgct

SEQ ID NO: 24568 - DNA, 20 bp, synthetic construct
  source 1..20: mol_type = other DNA
tttcaccacgttggccacgc

SEQ ID NO: 24569 - DNA, 20 bp, synthetic construct
  source 1..20: mol_type = other DNA
gtttcaccacgttggccacg

SEQ ID NO: 24570 - DNA, 20 bp, synthetic construct
  source 1..20: mol_type = other DNA
ggtttcaccacgttggccac

SEQ ID NO: 24571 - DNA, 20 bp, synthetic construct
  source 1..20: mol_type = other DNA
gggtttcaccacgttggcca

SEQ ID NO: 24572 - DNA, 20 bp, synthetic construct
  source 1..20: mol_type = other DNA
agggtttcaccacgttggcc

SEQ ID NO: 24573 - DNA, 20 bp, synthetic construct
  source 1..20: mol_type = other DNA
cagggtttcaccacgttggc

SEQ ID NO: 24574 - DNA, 20 bp, synthetic construct
  source 1..20: mol_type = other DNA
ccagggtttcaccacgttgg

SEQ ID NO: 24575 - DNA, 20 bp, synthetic construct
  source 1..20: mol_type = other DNA
cccagggtttcaccacgttg

SEQ ID NO: 24576 - DNA, 20 bp, synthetic construct
  source 1..20: mol_type = other DNA
acccagggtttcaccacgtt

SEQ ID NO: 24577 - DNA, 20 bp, synthetic construct
  source 1..20: mol_type = other DNA
aacccagggtttcaccacgt

SEQ ID NO: 24578 - DNA, 20 bp, synthetic construct
  source 1..20: mol_type = other DNA
aaacccagggtttcaccacg

SEQ ID NO: 24579 - DNA, 20 bp, synthetic construct
  source 1..20: mol_type = other DNA
caaacccagggtttcaccac

SEQ ID NO: 24580 - DNA, 20 bp, synthetic construct
  source 1..20: mol_type = other DNA
acaaacccagggtttcacca

SEQ ID NO: 24581 - DNA, 20 bp, synthetic construct
  source 1..20: mol_type = other DNA
aacaaacccagggtttcacc

SEQ ID NO: 24582 - DNA, 20 bp, synthetic construct
  source 1..20: mol_type = other DNA
aaacaaacccagggtttcac

SEQ ID NO: 24583 - DNA, 20 bp, synthetic construct
  source 1..20: mol_type = other DNA
caaacaaacccagggtttca

SEQ ID NO: 24584 - DNA, 20 bp, synthetic construct
  source 1..20: mol_type = other DNA
acaaacaaacccagggtttc

SEQ ID NO: 24585 - DNA, 20 bp, synthetic construct
  source 1..20: mol_type = other DNA
aacaaacaaacccagggttt

SEQ ID NO: 24586 - DNA, 20 bp, synthetic construct
  source 1..20: mol_type = other DNA
aaacaaacaaacccagggtt

SEQ ID NO: 24587 - DNA, 20 bp, synthetic construct
  source 1..20: mol_type = other DNA
caaacaaacaaacccagggt

SEQ ID NO: 24588 - DNA, 20 bp, synthetic construct
  source 1..20: mol_type = other DNA
acaaacaaacaaacccaggg

SEQ ID NO: 24589 - DNA, 20 bp, synthetic construct
  source 1..20: mol_type = other DNA
aacaaacaaacaaacccagg

SEQ ID NO: 24590 - DNA, 20 bp, synthetic construct
  source 1..20: mol_type = other DNA
aaacaaacaaacaaacccag

SEQ ID NO: 24591 - DNA, 20 bp, synthetic construct
  source 1..20: mol_type = other DNA
taaacaaacaaacaaaccca

SEQ ID NO: 24592 - DNA, 20 bp, synthetic construct
  source 1..20: mol_type = other DNA
ataaacaaacaaacaaaccc

SEQ ID NO: 24593 - DNA, 20 bp, synthetic construct
  source 1..20: mol_type = other DNA
aataaacaaacaaacaaacc

SEQ ID NO: 24594 - DNA, 20 bp, synthetic construct
  source 1..20: mol_type = other DNA
aaataaacaaacaaacaaac

SEQ ID NO: 24595 - DNA, 20 bp, synthetic construct
  source 1..20: mol_type = other DNA
taaataaacaaacaaacaaa

SEQ ID NO: 24596 - DNA, 20 bp, synthetic construct
  source 1..20: mol_type = other DNA
ataaataaacaaacaaacaa

SEQ ID NO: 24597 - DNA, 20 bp, synthetic construct
  source 1..20: mol_type = other DNA
aataaataaacaaacaaaca

SEQ ID NO: 24598 - DNA, 20 bp, synthetic construct
  source 1..20: mol_type = other DNA
aaataaataaacaaacaaac

SEQ ID NO: 24599 - DNA, 20 bp, synthetic construct
  source 1..20: mol_type = other DNA
taaataaataaacaaacaaa

SEQ ID NO: 24600 - DNA, 20 bp, synthetic construct
  source 1..20: mol_type = other DNA
ataaataaataaacaaacaa

SEQ ID NO: 24601 - DNA, 20 bp, synthetic construct
  source 1..20: mol_type = other DNA
aataaataaataaacaaaca

SEQ ID NO: 24602 - DNA, 20 bp, synthetic construct
  source 1..20: mol_type = other DNA
aaataaataaataaacaaac

SEQ ID NO: 24603 - DNA, 20 bp, synthetic construct
  source 1..20: mol_type = other DNA
taaataaataaataaacaaa

SEQ ID NO: 24604 - DNA, 20 bp, synthetic construct
  source 1..20: mol_type = other DNA
ataaataaataaataaacaa

SEQ ID NO: 24605 - DNA, 20 bp, synthetic construct
  source 1..20: mol_type = other DNA
aataaataaataaataaaca

SEQ ID NO: 24606 - DNA, 20 bp, synthetic construct
  source 1..20: mol_type = other DNA
aaataaataaataaataaac

SEQ ID NO: 24607 - DNA, 20 bp, synthetic construct
  source 1..20: mol_type = other DNA
aaaataaataaataaataaa

SEQ ID NO: 24608 - DNA, 20 bp, synthetic construct
  source 1..20: mol_type = other DNA
aaaaataaataaataaataa

SEQ ID NO: 24609 - DNA, 20 bp, synthetic construct
  source 1..20: mol_type = other DNA
aaaaaataaataaataaata

SEQ ID NO: 24610 - DNA, 20 bp, synthetic construct
  source 1..20: mol_type = other DNA
caaaaaataaataaataaat

SEQ ID NO: 24611 - DNA, 20 bp, synthetic construct
  source 1..20: mol_type = other DNA
ccaaaaaataaataaataaa

SEQ ID NO: 24612 - DNA, 20 bp, synthetic construct
  source 1..20: mol_type = other DNA
tccaaaaaataaataaataa

SEQ ID NO: 24613 - DNA, 20 bp, synthetic construct
  source 1..20: mol_type = other DNA
ctccaaaaaataaataaata

SEQ ID NO: 24614 - DNA, 20 bp, synthetic construct
  source 1..20: mol_type = other DNA
tctccaaaaaataaataaat

SEQ ID NO: 24615 - DNA, 20 bp, synthetic construct
  source 1..20: mol_type = other DNA
gtctccaaaaaataaataaa

SEQ ID NO: 24616 - DNA, 20 bp, synthetic construct
  source 1..20: mol_type = other DNA
cgtctccaaaaaataaataa

SEQ ID NO: 24617 - DNA, 20 bp, synthetic construct
  source 1..20: mol_type = other DNA
ccgtctccaaaaaataaata

SEQ ID NO: 24618 - DNA, 20 bp, synthetic construct
  source 1..20: mol_type = other DNA
tccgtctccaaaaaataaat

SEQ ID NO: 24619 - DNA, 20 bp, synthetic construct
  source 1..20: mol_type = other DNA
ctccgtctccaaaaaataaa

SEQ ID NO: 24620 - DNA, 20 bp, synthetic construct
  source 1..20: mol_type = other DNA
actccgtctccaaaaaataa

SEQ ID NO: 24621 - DNA, 20 bp, synthetic construct
  source 1..20: mol_type = other DNA
gactccgtctccaaaaaata

SEQ ID NO: 24622 - DNA, 20 bp, synthetic construct
  source 1..20: mol_type = other DNA
agactccgtctccaaaaaat

SEQ ID NO: 24623 - DNA, 20 bp, synthetic construct
  source 1..20: mol_type = other DNA
gagactccgtctccaaaaaa

SEQ ID NO: 24624 - DNA, 20 bp, synthetic construct
  source 1..20: mol_type = other DNA
cgagactccgtctccaaaaa

SEQ ID NO: 24625 - DNA, 20 bp, synthetic construct
  source 1..20: mol_type = other DNA
gcgagactccgtctccaaaa

SEQ ID NO: 24626 - DNA, 20 bp, synthetic construct
  source 1..20: mol_type = other DNA
agcgagactccgtctccaaa

SEQ ID NO: 24627 - DNA, 20 bp, synthetic construct
  source 1..20: mol_type = other DNA
gagcgagactccgtctccaa

SEQ ID NO: 24628 - DNA, 20 bp, synthetic construct
  source 1..20: mol_type = other DNA
agagcgagactccgtctcca

SEQ ID NO: 24629 - DNA, 20 bp, synthetic construct
  source 1..20: mol_type = other DNA
cagagcgagactccgtctcc

SEQ ID NO: 24630 - DNA, 20 bp, synthetic construct
  source 1..20: mol_type = other DNA
acagagcgagactccgtctc

SEQ ID NO: 24631 - DNA, 20 bp, synthetic construct
  source 1..20: mol_type = other DNA
gacagagcgagactccgtct

SEQ ID NO: 24632 - DNA, 20 bp, synthetic construct
  source 1..20: mol_type = other DNA
cgacagagcgagactccgtc

SEQ ID NO: 24633 - DNA, 20 bp, synthetic construct
  source 1..20: mol_type = other DNA
gcgacagagcgagactccgt

SEQ ID NO: 24634 - DNA, 20 bp, synthetic construct
  source 1..20: mol_type = other DNA
ggcgacagagcgagactccg

SEQ ID NO: 24635 - DNA, 20 bp, synthetic construct
  source 1..20: mol_type = other DNA
gggcgacagagcgagactcc

SEQ ID NO: 24636 - DNA, 20 bp, synthetic construct
  source 1..20: mol_type = other DNA
tgggcgacagagcgagactc

SEQ ID NO: 24637 - DNA, 20 bp, synthetic construct
  source 1..20: mol_type = other DNA
ctgggcgacagagcgagact

SEQ ID NO: 24638 - DNA, 20 bp, synthetic construct
  source 1..20: mol_type = other DNA
cctgggcgacagagcgagac

SEQ ID NO: 24639 - DNA, 20 bp, synthetic construct
  source 1..20: mol_type = other DNA
gcctgggcgacagagcgaga

SEQ ID NO: 24640 - DNA, 20 bp, synthetic construct
  source 1..20: mol_type = other DNA
agcctgggcgacagagcgag

SEQ ID NO: 24641 - DNA, 20 bp, synthetic construct
  source 1..20: mol_type = other DNA
cagcctgggcgacagagcga

SEQ ID NO: 24642 - DNA, 20 bp, synthetic construct
  source 1..20: mol_type = other DNA
ccagcctgggcgacagagcg

SEQ ID NO: 24643 - DNA, 20 bp, synthetic construct
  source 1..20: mol_type = other DNA
tccagcctgggcgacagagc

SEQ ID NO: 24644 - DNA, 20 bp, synthetic construct
  source 1..20: mol_type = other DNA
ctccagcctgggcgacagag

SEQ ID NO: 24645 - DNA, 20 bp, synthetic construct
  source 1..20: mol_type = other DNA
actccagcctgggcgacaga

SEQ ID NO: 24646 - DNA, 20 bp, synthetic construct
  source 1..20: mol_type = other DNA
cactccagcctgggcgacag

SEQ ID NO: 24647 - DNA, 20 bp, synthetic construct
  source 1..20: mol_type = other DNA
gcactccagcctgggcgaca

SEQ ID NO: 24648 - DNA, 20 bp, synthetic construct
  source 1..20: mol_type = other DNA
tgcactccagcctgggcgac

SEQ ID NO: 24649 - DNA, 20 bp, synthetic construct
  source 1..20: mol_type = other DNA
ctgcactccagcctgggcga

SEQ ID NO: 24650 - DNA, 20 bp, synthetic construct
  source 1..20: mol_type = other DNA
actgcactccagcctgggcg

SEQ ID NO: 24651 - DNA, 20 bp, synthetic construct
  source 1..20: mol_type = other DNA
cactgcactccagcctgggc

SEQ ID NO: 24652 - DNA, 20 bp, synthetic construct
  source 1..20: mol_type = other DNA
ccactgcactccagcctggg

SEQ ID NO: 24653 - DNA, 20 bp, synthetic construct
  source 1..20: mol_type = other DNA
gccactgcactccagcctgg

SEQ ID NO: 24654 - DNA, 20 bp, synthetic construct
  source 1..20: mol_type = other DNA
cgccactgcactccagcctg

SEQ ID NO: 24655 - DNA, 20 bp, synthetic construct
  source 1..20: mol_type = other DNA
acgccactgcactccagcct

SEQ ID NO: 24656 - DNA, 20 bp, synthetic construct
  source 1..20: mol_type = other DNA
cacgccactgcactccagcc

SEQ ID NO: 24657 - DNA, 20 bp, synthetic construct
  source 1..20: mol_type = other DNA
tcacgccactgcactccagc

SEQ ID NO: 24658 - DNA, 20 bp, synthetic construct
  source 1..20: mol_type = other DNA
atcacgccactgcactccag

SEQ ID NO: 24659 - DNA, 20 bp, synthetic construct
  source 1..20: mol_type = other DNA
gatcacgccactgcactcca

SEQ ID NO: 24660 - DNA, 20 bp, synthetic construct
  source 1..20: mol_type = other DNA
agatcacgccactgcactcc

SEQ ID NO: 24661 - DNA, 20 bp, synthetic construct
  source 1..20: mol_type = other DNA
gagatcacgccactgcactc

SEQ ID NO: 24662 - DNA, 20 bp, synthetic construct
  source 1..20: mol_type = other DNA
cgagatcacgccactgcact

SEQ ID NO: 24663 - DNA, 20 bp, synthetic construct
  source 1..20: mol_type = other DNA
ccgagatcacgccactgcac

SEQ ID NO: 24664 - DNA, 20 bp, synthetic construct
  source 1..20: mol_type = other DNA
gccgagatcacgccactgca

SEQ ID NO: 24665 - DNA, 20 bp, synthetic construct
  source 1..20: mol_type = other DNA
agccgagatcacgccactgc

SEQ ID NO: 24666 - DNA, 20 bp, synthetic construct
  source 1..20: mol_type = other DNA
gagccgagatcacgccactg

SEQ ID NO: 24667 - DNA, 20 bp, synthetic construct
  source 1..20: mol_type = other DNA
tgagccgagatcacgccact

SEQ ID NO: 24668 - DNA, 20 bp, synthetic construct
  source 1..20: mol_type = other DNA
gtgagccgagatcacgccac

SEQ ID NO: 24669 - DNA, 20 bp, synthetic construct
  source 1..20: mol_type = other DNA
agtgagccgagatcacgcca

SEQ ID NO: 24670 - DNA, 20 bp, synthetic construct
  source 1..20: mol_type = other DNA
cagtgagccgagatcacgcc

SEQ ID NO: 24671 - DNA, 20 bp, synthetic construct
  source 1..20: mol_type = other DNA
gcagtgagccgagatcacgc

SEQ ID NO: 24672 - DNA, 20 bp, synthetic construct
  source 1..20: mol_type = other DNA
tgcagtgagccgagatcacg

SEQ ID NO: 24673 - DNA, 20 bp, synthetic construct
  source 1..20: mol_type = other DNA
ttgcagtgagccgagatcac

SEQ ID NO: 24674 - DNA, 20 bp, synthetic construct
  source 1..20: mol_type = other DNA
gttgcagtgagccgagatca

SEQ ID NO: 24675 - DNA, 20 bp, synthetic construct
  source 1..20: mol_type = other DNA
ggttgcagtgagccgagatc

SEQ ID NO: 24676 - DNA, 20 bp, synthetic construct
  source 1..20: mol_type = other DNA
aggttgcagtgagccgagat

SEQ ID NO: 24677 - DNA, 20 bp, synthetic construct
  source 1..20: mol_type = other DNA
gaggttgcagtgagccgaga

SEQ ID NO: 24678 - DNA, 20 bp, synthetic construct
  source 1..20: mol_type = other DNA
ggaggttgcagtgagccgag

SEQ ID NO: 24679 - DNA, 20 bp, synthetic construct
  source 1..20: mol_type = other DNA
cggaggttgcagtgagccga

SEQ ID NO: 24680 - DNA, 20 bp, synthetic construct
  source 1..20: mol_type = other DNA
tcggaggttgcagtgagccg

SEQ ID NO: 24681 - DNA, 20 bp, synthetic construct
  source 1..20: mol_type = other DNA
gtcggaggttgcagtgagcc

SEQ ID NO: 24682 - DNA, 20 bp, synthetic construct
  source 1..20: mol_type = other DNA
agtcggaggttgcagtgagc

SEQ ID NO: 24683 - DNA, 20 bp, synthetic construct
  source 1..20: mol_type = other DNA
gagtcggaggttgcagtgag

SEQ ID NO: 24684 - DNA, 20 bp, synthetic construct
  source 1..20: mol_type = other DNA
ggagtcggaggttgcagtga

SEQ ID NO: 24685 - DNA, 20 bp, synthetic construct
  source 1..20: mol_type = other DNA
gggagtcggaggttgcagtg

SEQ ID NO: 24686 - DNA, 20 bp, synthetic construct
  source 1..20: mol_type = other DNA
tgggagtcggaggttgcagt

SEQ ID NO: 24687 - DNA, 20 bp, synthetic construct
  source 1..20: mol_type = other DNA
ctgggagtcggaggttgcag

SEQ ID NO: 24688 - DNA, 20 bp, synthetic construct
  source 1..20: mol_type = other DNA
cctgggagtcggaggttgca

SEQ ID NO: 24689 - DNA, 20 bp, synthetic construct
  source 1..20: mol_type = other DNA
acctgggagtcggaggttgc

SEQ ID NO: 24690 - DNA, 20 bp, synthetic construct
  source 1..20: mol_type = other DNA
aacctgggagtcggaggttg

SEQ ID NO: 24691 - DNA, 20 bp, synthetic construct
  source 1..20: mol_type = other DNA
gaacctgggagtcggaggtt

SEQ ID NO: 24692 - DNA, 20 bp, synthetic construct
  source 1..20: mol_type = other DNA
tgaacctgggagtcggaggt

SEQ ID NO: 24693 - DNA, 20 bp, synthetic construct
  source 1..20: mol_type = other DNA
atgaacctgggagtcggagg

SEQ ID NO: 24694 - DNA, 20 bp, synthetic construct
  source 1..20: mol_type = other DNA
catgaacctgggagtcggag

SEQ ID NO: 24695 - DNA, 20 bp, synthetic construct
  source 1..20: mol_type = other DNA
gcatgaacctgggagtcgga

SEQ ID NO: 24696 - DNA, 20 bp, synthetic construct
  source 1..20: mol_type = other DNA
ggcatgaacctgggagtcgg

SEQ ID NO: 24697 - DNA, 20 bp, synthetic construct
  source 1..20: mol_type = other DNA
tggcatgaacctgggagtcg

SEQ ID NO: 24698 - DNA, 20 bp, synthetic construct
  source 1..20: mol_type = other DNA
atggcatgaacctgggagtc

SEQ ID NO: 24699 - DNA, 20 bp, synthetic construct
  source 1..20: mol_type = other DNA
aatggcatgaacctgggagt

SEQ ID NO: 24700 - DNA, 20 bp, synthetic construct
  source 1..20: mol_type = other DNA
gaatggcatgaacctgggag

SEQ ID NO: 24701 - DNA, 20 bp, synthetic construct
  source 1..20: mol_type = other DNA
agaatggcatgaacctggga

SEQ ID NO: 24702 - DNA, 20 bp, synthetic construct
  source 1..20: mol_type = other DNA
gagaatggcatgaacctggg

SEQ ID NO: 24703 - DNA, 20 bp, synthetic construct
  source 1..20: mol_type = other DNA
ggagaatggcatgaacctgg

SEQ ID NO: 24704 - DNA, 20 bp, synthetic construct
  source 1..20: mol_type = other DNA
aggagaatggcatgaacctg

SEQ ID NO: 24705 - DNA, 20 bp, synthetic construct
  source 1..20: mol_type = other DNA
caggagaatggcatgaacct

SEQ ID NO: 24706 - DNA, 20 bp, synthetic construct
  source 1..20: mol_type = other DNA
gcaggagaatggcatgaacc

SEQ ID NO: 24707 - DNA, 20 bp, synthetic construct
  source 1..20: mol_type = other DNA
ggcaggagaatggcatgaac

SEQ ID NO: 24708 - DNA, 20 bp, synthetic construct
  source 1..20: mol_type = other DNA
aggcaggagaatggcatgaa

SEQ ID NO: 24709 - DNA, 20 bp, synthetic construct
  source 1..20: mol_type = other DNA
gaggcaggagaatggcatga

SEQ ID NO: 24710 - DNA, 20 bp, synthetic construct
  source 1..20: mol_type = other DNA
tgaggcaggagaatggcatg

SEQ ID NO: 24711 - DNA, 20 bp, synthetic construct
  source 1..20: mol_type = other DNA
ctgaggcaggagaatggcat

SEQ ID NO: 24712 - DNA, 20 bp, synthetic construct
  source 1..20: mol_type = other DNA
gctgaggcaggagaatggca

SEQ ID NO: 24713 - DNA, 20 bp, synthetic construct
  source 1..20: mol_type = other DNA
ggctgaggcaggagaatggc

SEQ ID NO: 24714 - DNA, 20 bp, synthetic construct
  source 1..20: mol_type = other DNA
aggctgaggcaggagaatgg

SEQ ID NO: 24715 - DNA, 20 bp, synthetic construct
  source 1..20: mol_type = other DNA
gaggctgaggcaggagaatg

SEQ ID NO: 24716 - DNA, 20 bp, synthetic construct
  source 1..20: mol_type = other DNA
ggaggctgaggcaggagaat

SEQ ID NO: 24717 - DNA, 20 bp, synthetic construct
  source 1..20: mol_type = other DNA
gggaggctgaggcaggagaa

SEQ ID NO: 24718 - DNA, 20 bp, synthetic construct
  source 1..20: mol_type = other DNA
tgggaggctgaggcaggaga

SEQ ID NO: 24719 - DNA, 20 bp, synthetic construct
  source 1..20: mol_type = other DNA
ttgggaggctgaggcaggag

SEQ ID NO: 24720 - DNA, 20 bp, synthetic construct
  source 1..20: mol_type = other DNA
cttgggaggctgaggcagga

SEQ ID NO: 24721 - DNA, 20 bp, synthetic construct
  source 1..20: mol_type = other DNA
acttgggaggctgaggcagg

SEQ ID NO: 24722 - DNA, 20 bp, synthetic construct
  source 1..20: mol_type = other DNA
tacttgggaggctgaggcag

SEQ ID NO: 24723 - DNA, 20 bp, synthetic construct
  source 1..20: mol_type = other DNA
ctacttgggaggctgaggca

SEQ ID NO: 24724 - DNA, 20 bp, synthetic construct
  source 1..20: mol_type = other DNA
gctacttgggaggctgaggc

SEQ ID NO: 24725 - DNA, 20 bp, synthetic construct
  source 1..20: mol_type = other DNA
agctacttgggaggctgagg

SEQ ID NO: 24726 - DNA, 20 bp, synthetic construct
  source 1..20: mol_type = other DNA
cagctacttgggaggctgag

SEQ ID NO: 24727 - DNA, 20 bp, synthetic construct
  source 1..20: mol_type = other DNA
ccagctacttgggaggctga

SEQ ID NO: 24728 - DNA, 20 bp, synthetic construct
  source 1..20: mol_type = other DNA
cccagctacttgggaggctg

SEQ ID NO: 24729 - DNA, 20 bp, synthetic construct
  source 1..20: mol_type = other DNA
tcccagctacttgggaggct

SEQ ID NO: 24730 - DNA, 20 bp, synthetic construct
  source 1..20: mol_type = other DNA
gtcccagctacttgggaggc

SEQ ID NO: 24731 - DNA, 20 bp, synthetic construct
  source 1..20: mol_type = other DNA
agtcccagctacttgggagg

SEQ ID NO: 24732 - DNA, 20 bp, synthetic construct
  source 1..20: mol_type = other DNA
tagtcccagctacttgggag

SEQ ID NO: 24733 - DNA, 20 bp, synthetic construct
  source 1..20: mol_type = other DNA
gtagtcccagctacttggga

SEQ ID NO: 24734 - DNA, 20 bp, synthetic construct
  source 1..20: mol_type = other DNA
tgtagtcccagctacttggg

SEQ ID NO: 24735 - DNA, 20 bp, synthetic construct
  source 1..20: mol_type = other DNA
ctgtagtcccagctacttgg

SEQ ID NO: 24736 - DNA, 20 bp, synthetic construct
  source 1..20: mol_type = other DNA
cctgtagtcccagctacttg

SEQ ID NO: 24737 - DNA, 20 bp, synthetic construct
  source 1..20: mol_type = other DNA
tcctgtagtcccagctactt

SEQ ID NO: 24738 - DNA, 20 bp, synthetic construct
  source 1..20: mol_type = other DNA
ctcctgtagtcccagctact

SEQ ID NO: 24739 - DNA, 20 bp, synthetic construct
  source 1..20: mol_type = other DNA
gctcctgtagtcccagctac

SEQ ID NO: 24740 - DNA, 20 bp, synthetic construct
  source 1..20: mol_type = other DNA
ggctcctgtagtcccagcta

SEQ ID NO: 24741 - DNA, 20 bp, synthetic construct
  source 1..20: mol_type = other DNA
gggctcctgtagtcccagct

SEQ ID NO: 24742 - DNA, 20 bp, synthetic construct
  source 1..20: mol_type = other DNA
cgggctcctgtagtcccagc

SEQ ID NO: 24743 - DNA, 20 bp, synthetic construct
  source 1..20: mol_type = other DNA
gcgggctcctgtagtcccag

SEQ ID NO: 24744 - DNA, 20 bp, synthetic construct
  source 1..20: mol_type = other DNA
ggcgggctcctgtagtccca

SEQ ID NO: 24745 - DNA, 20 bp, synthetic construct
  source 1..20: mol_type = other DNA
tggcgggctcctgtagtccc

SEQ ID NO: 24746 - DNA, 20 bp, synthetic construct
  source 1..20: mol_type = other DNA
gtggcgggctcctgtagtcc

SEQ ID NO: 24747 - DNA, 20 bp, synthetic construct
  source 1..20: mol_type = other DNA
ggtggcgggctcctgtagtc

SEQ ID NO: 24748 - DNA, 20 bp, synthetic construct
  source 1..20: mol_type = other DNA
tggtggcgggctcctgtagt

SEQ ID NO: 24749 - DNA, 20 bp, synthetic construct
  source 1..20: mol_type = other DNA
atggtggcgggctcctgtag

SEQ ID NO: 24750 - DNA, 20 bp, synthetic construct
  source 1..20: mol_type = other DNA
catggtggcgggctcctgta

SEQ ID NO: 24751 - DNA, 20 bp, synthetic construct
  source 1..20: mol_type = other DNA
gcatggtggcgggctcctgt

SEQ ID NO: 24752 - DNA, 20 bp, synthetic construct
  source 1..20: mol_type = other DNA
ggcatggtggcgggctcctg

SEQ ID NO: 24753 - DNA, 20 bp, synthetic construct
  source 1..20: mol_type = other DNA
aggcatggtggcgggctcct

SEQ ID NO: 24754 - DNA, 20 bp, synthetic construct
  source 1..20: mol_type = other DNA
caggcatggtggcgggctcc

SEQ ID NO: 24755 - DNA, 20 bp, synthetic construct
  source 1..20: mol_type = other DNA
ccaggcatggtggcgggctc

SEQ ID NO: 24756 - DNA, 20 bp, synthetic construct
  source 1..20: mol_type = other DNA
gccaggcatggtggcgggct

SEQ ID NO: 24757 - DNA, 20 bp, synthetic construct
  source 1..20: mol_type = other DNA
agccaggcatggtggcgggc

SEQ ID NO: 24758 - DNA, 20 bp, synthetic construct
  source 1..20: mol_type = other DNA
tagccaggcatggtggcggg

SEQ ID NO: 24759 - DNA, 20 bp, synthetic construct
  source 1..20: mol_type = other DNA
ttagccaggcatggtggcgg

SEQ ID NO: 24760 - DNA, 20 bp, synthetic construct
  source 1..20: mol_type = other DNA
attagccaggcatggtggcg

SEQ ID NO: 24761 - DNA, 20 bp, synthetic construct
  source 1..20: mol_type = other DNA
aattagccaggcatggtggc

SEQ ID NO: 24762 - DNA, 20 bp, synthetic construct
  source 1..20: mol_type = other DNA
aaattagccaggcatggtgg

SEQ ID NO: 24763 - DNA, 20 bp, synthetic construct
  source 1..20: mol_type = other DNA
aaaattagccaggcatggtg

SEQ ID NO: 24764 - DNA, 20 bp, synthetic construct
  source 1..20: mol_type = other DNA
aaaaattagccaggcatggt

SEQ ID NO: 24765 - DNA, 20 bp, synthetic construct
  source 1..20: mol_type = other DNA
aaaaaattagccaggcatgg

SEQ ID NO: 24766 - DNA, 20 bp, synthetic construct
  source 1..20: mol_type = other DNA
aaaaaaattagccaggcatg

SEQ ID NO: 24767 - DNA, 20 bp, synthetic construct
  source 1..20: mol_type = other DNA
taaaaaaattagccaggcat

SEQ ID NO: 24768 - DNA, 20 bp, synthetic construct
  source 1..20: mol_type = other DNA
ataaaaaaattagccaggca

SEQ ID NO: 24769 - DNA, 20 bp, synthetic construct
  source 1..20: mol_type = other DNA
aataaaaaaattagccaggc

SEQ ID NO: 24770 - DNA, 20 bp, synthetic construct
  source 1..20: mol_type = other DNA
aaataaaaaaattagccagg

SEQ ID NO: 24771 - DNA, 20 bp, synthetic construct
  source 1..20: mol_type = other DNA
aaaataaaaaaattagccag

SEQ ID NO: 24772 - DNA, 20 bp, synthetic construct
  source 1..20: mol_type = other DNA
aaaaataaaaaaattagcca

SEQ ID NO: 24773 - DNA, 20 bp, synthetic construct
  source 1..20: mol_type = other DNA
taaaaataaaaaaattagcc

SEQ ID NO: 24774 - DNA, 20 bp, synthetic construct
  source 1..20: mol_type = other DNA
ctaaaaataaaaaaattagc

SEQ ID NO: 24775 - DNA, 20 bp, synthetic construct
  source 1..20: mol_type = other DNA
actaaaaataaaaaaattag

SEQ ID NO: 24776 - DNA, 20 bp, synthetic construct
  source 1..20: mol_type = other DNA
tactaaaaataaaaaaatta

SEQ ID NO: 24777 - DNA, 20 bp, synthetic construct
  source 1..20: mol_type = other DNA
ctactaaaaataaaaaaatt

SEQ ID NO: 24778 - DNA, 20 bp, synthetic construct
  source 1..20: mol_type = other DNA
tctactaaaaataaaaaaat

SEQ ID NO: 24779 - DNA, 20 bp, synthetic construct
  source 1..20: mol_type = other DNA
ctctactaaaaataaaaaaa

SEQ ID NO: 24780 - DNA, 20 bp, synthetic construct
  source 1..20: mol_type = other DNA
tctctactaaaaataaaaaa

SEQ ID NO: 24781 - DNA, 20 bp, synthetic construct
  source 1..20: mol_type = other DNA
atctctactaaaaataaaaa

SEQ ID NO: 24782 - DNA, 20 bp, synthetic construct
  source 1..20: mol_type = other DNA
catctctactaaaaataaaa

SEQ ID NO: 24783 - DNA, 20 bp, synthetic construct
  source 1..20: mol_type = other DNA
ccatctctactaaaaataaa

SEQ ID NO: 24784 - DNA, 20 bp, synthetic construct
  source 1..20: mol_type = other DNA
cccatctctactaaaaataa

SEQ ID NO: 24785 - DNA, 20 bp, synthetic construct
  source 1..20: mol_type = other DNA
ccccatctctactaaaaata

SEQ ID NO: 24786 - DNA, 20 bp, synthetic construct
  source 1..20: mol_type = other DNA
accccatctctactaaaaat

SEQ ID NO: 24787 - DNA, 20 bp, synthetic construct
  source 1..20: mol_type = other DNA
aaccccatctctactaaaaa

SEQ ID NO: 24788 - DNA, 20 bp, synthetic construct
  source 1..20: mol_type = other DNA
aaaccccatctctactaaaa

SEQ ID NO: 24789 - DNA, 20 bp, synthetic construct
  source 1..20: mol_type = other DNA
gaaaccccatctctactaaa

SEQ ID NO: 24790 - DNA, 20 bp, synthetic construct
  source 1..20: mol_type = other DNA
cgaaaccccatctctactaa

SEQ ID NO: 24791 - DNA, 20 bp, synthetic construct
  source 1..20: mol_type = other DNA
gcgaaaccccatctctacta

SEQ ID NO: 24792 - DNA, 20 bp, synthetic construct
  source 1..20: mol_type = other DNA
ggcgaaaccccatctctact

SEQ ID NO: 24793 - DNA, 20 bp, synthetic construct
  source 1..20: mol_type = other DNA
cggcgaaaccccatctctac

SEQ ID NO: 24794 - DNA, 20 bp, synthetic construct
  source 1..20: mol_type = other DNA
acggcgaaaccccatctcta

SEQ ID NO: 24795 - DNA, 20 bp, synthetic construct
  source 1..20: mol_type = other DNA
cacggcgaaaccccatctct

SEQ ID NO: 24796 - DNA, 20 bp, synthetic construct
  source 1..20: mol_type = other DNA
acacggcgaaaccccatctc

SEQ ID NO: 24797 - DNA, 20 bp, synthetic construct
  source 1..20: mol_type = other DNA
aacacggcgaaaccccatct

SEQ ID NO: 24798 - DNA, 20 bp, synthetic construct
  source 1..20: mol_type = other DNA
taacacggcgaaaccccatc

SEQ ID NO: 24799 - DNA, 20 bp, synthetic construct
  source 1..20: mol_type = other DNA
ataacacggcgaaaccccat

SEQ ID NO: 24800 - DNA, 20 bp, synthetic construct
  source 1..20: mol_type = other DNA
gataacacggcgaaacccca

SEQ ID NO: 24801 - DNA, 20 bp, synthetic construct
  source 1..20: mol_type = other DNA
agataacacggcgaaacccc

SEQ ID NO: 24802 - DNA, 20 bp, synthetic construct
  source 1..20: mol_type = other DNA
cagataacacggcgaaaccc

SEQ ID NO: 24803 - DNA, 20 bp, synthetic construct
  source 1..20: mol_type = other DNA
ccagataacacggcgaaacc

SEQ ID NO: 24804 - DNA, 20 bp, synthetic construct
  source 1..20: mol_type = other DNA
cccagataacacggcgaaac

SEQ ID NO: 24805 - DNA, 20 bp, synthetic construct
  source 1..20: mol_type = other DNA
tcccagataacacggcgaaa

SEQ ID NO: 24806 - DNA, 20 bp, synthetic construct
  source 1..20: mol_type = other DNA
atcccagataacacggcgaa

SEQ ID NO: 24807 - DNA, 20 bp, synthetic construct
  source 1..20: mol_type = other DNA
catcccagataacacggcga

SEQ ID NO: 24808 - DNA, 20 bp, synthetic construct
  source 1..20: mol_type = other DNA
ccatcccagataacacggcg

SEQ ID NO: 24809 - DNA, 20 bp, synthetic construct
  source 1..20: mol_type = other DNA
accatcccagataacacggc

SEQ ID NO: 24810 - DNA, 20 bp, synthetic construct
  source 1..20: mol_type = other DNA
gaccatcccagataacacgg

SEQ ID NO: 24811 - DNA, 20 bp, synthetic construct
  source 1..20: mol_type = other DNA
agaccatcccagataacacg

SEQ ID NO: 24812 - DNA, 20 bp, synthetic construct
  source 1..20: mol_type = other DNA
gagaccatcccagataacac

SEQ ID NO: 24813 - DNA, 20 bp, synthetic construct
  source 1..20: mol_type = other DNA
cgagaccatcccagataaca

SEQ ID NO: 24814 - DNA, 20 bp, synthetic construct
  source 1..20: mol_type = other DNA
tcgagaccatcccagataac

SEQ ID NO: 24815 - DNA, 20 bp, synthetic construct
  source 1..20: mol_type = other DNA
ttcgagaccatcccagataa

SEQ ID NO: 24816 - DNA, 20 bp, synthetic construct
  source 1..20: mol_type = other DNA
gttcgagaccatcccagata

SEQ ID NO: 24817 - DNA, 20 bp, synthetic construct
  source 1..20: mol_type = other DNA
agttcgagaccatcccagat

SEQ ID NO: 24818 - DNA, 20 bp, synthetic construct
  source 1..20: mol_type = other DNA
gagttcgagaccatcccaga

SEQ ID NO: 24819 - DNA, 20 bp, synthetic construct
  source 1..20: mol_type = other DNA
ggagttcgagaccatcccag

SEQ ID NO: 24820 - DNA, 20 bp, synthetic construct
  source 1..20: mol_type = other DNA
aggagttcgagaccatccca

SEQ ID NO: 24821 - DNA, 20 bp, synthetic construct
  source 1..20: mol_type = other DNA
caggagttcgagaccatccc

SEQ ID NO: 24822 - DNA, 20 bp, synthetic construct
  source 1..20: mol_type = other DNA
tcaggagttcgagaccatcc

SEQ ID NO: 24823 - DNA, 20 bp, synthetic construct
  source 1..20: mol_type = other DNA
gtcaggagttcgagaccatc

SEQ ID NO: 24824 - DNA, 20 bp, synthetic construct
  source 1..20: mol_type = other DNA
agtcaggagttcgagaccat

SEQ ID NO: 24825 - DNA, 20 bp, synthetic construct
  source 1..20: mol_type = other DNA
aagtcaggagttcgagacca

SEQ ID NO: 24826 - DNA, 20 bp, synthetic construct
  source 1..20: mol_type = other DNA
aaagtcaggagttcgagacc

SEQ ID NO: 24827 - DNA, 20 bp, synthetic construct
  source 1..20: mol_type = other DNA
caaagtcaggagttcgagac

SEQ ID NO: 24828 - DNA, 20 bp, synthetic construct
  source 1..20: mol_type = other DNA
acaaagtcaggagttcgaga

SEQ ID NO: 24829 - DNA, 20 bp, synthetic construct
  source 1..20: mol_type = other DNA
cacaaagtcaggagttcgag

SEQ ID NO: 24830 - DNA, 20 bp, synthetic construct
  source 1..20: mol_type = other DNA
tcacaaagtcaggagttcga

SEQ ID NO: 24831 - DNA, 20 bp, synthetic construct
  source 1..20: mol_type = other DNA
atcacaaagtcaggagttcg

SEQ ID NO: 24832 - DNA, 20 bp, synthetic construct
  source 1..20: mol_type = other DNA
gatcacaaagtcaggagttc

SEQ ID NO: 24833 - DNA, 20 bp, synthetic construct
  source 1..20: mol_type = other DNA
ggatcacaaagtcaggagtt

SEQ ID NO: 24834 - DNA, 20 bp, synthetic construct
  source 1..20: mol_type = other DNA
cggatcacaaagtcaggagt

SEQ ID NO: 24835 - DNA, 20 bp, synthetic construct
  source 1..20: mol_type = other DNA
gcggatcacaaagtcaggag

SEQ ID NO: 24836 - DNA, 20 bp, synthetic construct
  source 1..20: mol_type = other DNA
ggcggatcacaaagtcagga

SEQ ID NO: 24837 - DNA, 20 bp, synthetic construct
  source 1..20: mol_type = other DNA
gggcggatcacaaagtcagg

SEQ ID NO: 24838 - DNA, 20 bp, synthetic construct
  source 1..20: mol_type = other DNA
cgggcggatcacaaagtcag

SEQ ID NO: 24839 - DNA, 20 bp, synthetic construct
  source 1..20: mol_type = other DNA
gcgggcggatcacaaagtca

SEQ ID NO: 24840 - DNA, 20 bp, synthetic construct
  source 1..20: mol_type = other DNA
ggcgggcggatcacaaagtc

SEQ ID NO: 24841 - DNA, 20 bp, synthetic construct
  source 1..20: mol_type = other DNA
aggcgggcggatcacaaagt

SEQ ID NO: 24842 - DNA, 20 bp, synthetic construct
  source 1..20: mol_type = other DNA
gaggcgggcggatcacaaag

SEQ ID NO: 24843 - DNA, 20 bp, synthetic construct
  source 1..20: mol_type = other DNA
cgaggcgggcggatcacaaa

SEQ ID NO: 24844 - DNA, 20 bp, synthetic construct
  source 1..20: mol_type = other DNA
ccgaggcgggcggatcacaa

SEQ ID NO: 24845 - DNA, 20 bp, synthetic construct
  source 1..20: mol_type = other DNA
gccgaggcgggcggatcaca

SEQ ID NO: 24846 - DNA, 20 bp, synthetic construct
  source 1..20: mol_type = other DNA
ggccgaggcgggcggatcac

SEQ ID NO: 24847 - DNA, 20 bp, synthetic construct
  source 1..20: mol_type = other DNA
aggccgaggcgggcggatca

SEQ ID NO: 24848 - DNA, 20 bp, synthetic construct
  source 1..20: mol_type = other DNA
gaggccgaggcgggcggatc

SEQ ID NO: 24849 - DNA, 20 bp, synthetic construct
  source 1..20: mol_type = other DNA
ggaggccgaggcgggcggat

SEQ ID NO: 24850 - DNA, 20 bp, synthetic construct
  source 1..20: mol_type = other DNA
gggaggccgaggcgggcgga

SEQ ID NO: 24851 - DNA, 20 bp, synthetic construct
  source 1..20: mol_type = other DNA
tgggaggccgaggcgggcgg

SEQ ID NO: 24852 - DNA, 20 bp, synthetic construct
  source 1..20: mol_type = other DNA
ttgggaggccgaggcgggcg

SEQ ID NO: 24853 - DNA, 20 bp, synthetic construct
  source 1..20: mol_type = other DNA
tttgggaggccgaggcgggc

SEQ ID NO: 24854 - DNA, 20 bp, synthetic construct
  source 1..20: mol_type = other DNA
ctttgggaggccgaggcggg

SEQ ID NO: 24855 - DNA, 20 bp, synthetic construct
  source 1..20: mol_type = other DNA
actttgggaggccgaggcgg

SEQ ID NO: 24856 - DNA, 20 bp, synthetic construct
  source 1..20: mol_type = other DNA
aactttgggaggccgaggcg

SEQ ID NO: 24857 - DNA, 20 bp, synthetic construct
  source 1..20: mol_type = other DNA
gaactttgggaggccgaggc

SEQ ID NO: 24858 - DNA, 20 bp, synthetic construct
  source 1..20: mol_type = other DNA
agaactttgggaggccgagg

SEQ ID NO: 24859 - DNA, 20 bp, synthetic construct
  source 1..20: mol_type = other DNA
cagaactttgggaggccgag

SEQ ID NO: 24860 - DNA, 20 bp, synthetic construct
  source 1..20: mol_type = other DNA
ccagaactttgggaggccga

SEQ ID NO: 24861 - DNA, 20 bp, synthetic construct
  source 1..20: mol_type = other DNA
cccagaactttgggaggccg

SEQ ID NO: 24862 - DNA, 20 bp, synthetic construct
  source 1..20: mol_type = other DNA
tcccagaactttgggaggcc

SEQ ID NO: 24863 - DNA, 20 bp, synthetic construct
  source 1..20: mol_type = other DNA
atcccagaactttgggaggc

SEQ ID NO: 24864 - DNA, 20 bp, synthetic construct
  source 1..20: mol_type = other DNA
aatcccagaactttgggagg

SEQ ID NO: 24865 - DNA, 20 bp, synthetic construct
  source 1..20: mol_type = other DNA
taatcccagaactttgggag

SEQ ID NO: 24866 - DNA, 20 bp, synthetic construct
  source 1..20: mol_type = other DNA
gtaatcccagaactttggga

SEQ ID NO: 24867 - DNA, 20 bp, synthetic construct
  source 1..20: mol_type = other DNA
tgtaatcccagaactttggg

SEQ ID NO: 24868 - DNA, 20 bp, synthetic construct
  source 1..20: mol_type = other DNA
ctgtaatcccagaactttgg

SEQ ID NO: 24869 - DNA, 20 bp, synthetic construct
  source 1..20: mol_type = other DNA
cctgtaatcccagaactttg

SEQ ID NO: 24870 - DNA, 20 bp, synthetic construct
  source 1..20: mol_type = other DNA
gcctgtaatcccagaacttt

SEQ ID NO: 24871 - DNA, 20 bp, synthetic construct
  source 1..20: mol_type = other DNA
cgcctgtaatcccagaactt

SEQ ID NO: 24872 - DNA, 20 bp, synthetic construct
  source 1..20: mol_type = other DNA
acgcctgtaatcccagaact

SEQ ID NO: 24873 - DNA, 20 bp, synthetic construct
  source 1..20: mol_type = other DNA
cacgcctgtaatcccagaac

SEQ ID NO: 24874 - DNA, 20 bp, synthetic construct
  source 1..20: mol_type = other DNA
tcacgcctgtaatcccagaa

SEQ ID NO: 24875 - DNA, 20 bp, synthetic construct
  source 1..20: mol_type = other DNA
ctcacgcctgtaatcccaga

SEQ ID NO: 24876 - DNA, 20 bp, synthetic construct
  source 1..20: mol_type = other DNA
gctcacgcctgtaatcccag

SEQ ID NO: 24877 - DNA, 20 bp, synthetic construct
  source 1..20: mol_type = other DNA
ggctcacgcctgtaatccca

SEQ ID NO: 24878 - DNA, 20 bp, synthetic construct
  source 1..20: mol_type = other DNA
tggctcacgcctgtaatccc

SEQ ID NO: 24879 - DNA, 20 bp, synthetic construct
  source 1..20: mol_type = other DNA
gtggctcacgcctgtaatcc

SEQ ID NO: 24880 - DNA, 20 bp, synthetic construct
  source 1..20: mol_type = other DNA
ggtggctcacgcctgtaatc

SEQ ID NO: 24881 - DNA, 20 bp, synthetic construct
  source 1..20: mol_type = other DNA
tggtggctcacgcctgtaat

SEQ ID NO: 24882 - DNA, 20 bp, synthetic construct
  source 1..20: mol_type = other DNA
gtggtggctcacgcctgtaa

SEQ ID NO: 24883 - DNA, 20 bp, synthetic construct
  source 1..20: mol_type = other DNA
tgtggtggctcacgcctgta

SEQ ID NO: 24884 - DNA, 20 bp, synthetic construct
  source 1..20: mol_type = other DNA
gtgtggtggctcacgcctgt

SEQ ID NO: 24885 - DNA, 20 bp, synthetic construct
  source 1..20: mol_type = other DNA
ggtgtggtggctcacgcctg

SEQ ID NO: 24886 - DNA, 20 bp, synthetic construct
  source 1..20: mol_type = other DNA
aggtgtggtggctcacgcct

SEQ ID NO: 24887 - DNA, 20 bp, synthetic construct
  source 1..20: mol_type = other DNA
caggtgtggtggctcacgcc

SEQ ID NO: 24888 - DNA, 20 bp, synthetic construct
  source 1..20: mol_type = other DNA
ccaggtgtggtggctcacgc

SEQ ID NO: 24889 - DNA, 20 bp, synthetic construct
  source 1..20: mol_type = other DNA
gccaggtgtggtggctcacg

SEQ ID NO: 24890 - DNA, 20 bp, synthetic construct
  source 1..20: mol_type = other DNA
ggccaggtgtggtggctcac

SEQ ID NO: 24891 - DNA, 20 bp, synthetic construct
  source 1..20: mol_type = other DNA
aggccaggtgtggtggctca

SEQ ID NO: 24892 - DNA, 20 bp, synthetic construct
  source 1..20: mol_type = other DNA
taggccaggtgtggtggctc

SEQ ID NO: 24893 - DNA, 20 bp, synthetic construct
  source 1..20: mol_type = other DNA
gtaggccaggtgtggtggct

SEQ ID NO: 24894 - DNA, 20 bp, synthetic construct
  source 1..20: mol_type = other DNA
ggtaggccaggtgtggtggc

SEQ ID NO: 24895 - DNA, 20 bp, synthetic construct
  source 1..20: mol_type = other DNA
gggtaggccaggtgtggtgg

SEQ ID NO: 24896 - DNA, 20 bp, synthetic construct
  source 1..20: mol_type = other DNA
agggtaggccaggtgtggtg

SEQ ID NO: 24897 - DNA, 20 bp, synthetic construct
  source 1..20: mol_type = other DNA
cagggtaggccaggtgtggt

SEQ ID NO: 24898 - DNA, 20 bp, synthetic construct
  source 1..20: mol_type = other DNA
acagggtaggccaggtgtgg

SEQ ID NO: 24899 - DNA, 20 bp, synthetic construct
  source 1..20: mol_type = other DNA
cacagggtaggccaggtgtg

SEQ ID NO: 24900 - DNA, 20 bp, synthetic construct
  source 1..20: mol_type = other DNA
acacagggtaggccaggtgt

SEQ ID NO: 24901 - DNA, 20 bp, synthetic construct
  source 1..20: mol_type = other DNA
aacacagggtaggccaggtg

SEQ ID NO: 24902 - DNA, 20 bp, synthetic construct
  source 1..20: mol_type = other DNA
aaacacagggtaggccaggt

SEQ ID NO: 24903 - DNA, 20 bp, synthetic construct
  source 1..20: mol_type = other DNA
taaacacagggtaggccagg

SEQ ID NO: 24904 - DNA, 20 bp, synthetic construct
  source 1..20: mol_type = other DNA
ataaacacagggtaggccag

SEQ ID NO: 24905 - DNA, 20 bp, synthetic construct
  source 1..20: mol_type = other DNA
aataaacacagggtaggcca

SEQ ID NO: 24906 - DNA, 20 bp, synthetic construct
  source 1..20: mol_type = other DNA
taataaacacagggtaggcc

SEQ ID NO: 24907 - DNA, 20 bp, synthetic construct
  source 1..20: mol_type = other DNA
gtaataaacacagggtaggc

SEQ ID NO: 24908 - DNA, 20 bp, synthetic construct
  source 1..20: mol_type = other DNA
tgtaataaacacagggtagg

SEQ ID NO: 24909 - DNA, 20 bp, synthetic construct
  source 1..20: mol_type = other DNA
ttgtaataaacacagggtag

SEQ ID NO: 24910 - DNA, 20 bp, synthetic construct
  source 1..20: mol_type = other DNA
tttgtaataaacacagggta

SEQ ID NO: 24911 - DNA, 20 bp, synthetic construct
  source 1..20: mol_type = other DNA
atttgtaataaacacagggt

SEQ ID NO: 24912 - DNA, 20 bp, synthetic construct
  source 1..20: mol_type = other DNA
tatttgtaataaacacaggg

SEQ ID NO: 24913 - DNA, 20 bp, synthetic construct
  source 1..20: mol_type = other DNA
gtatttgtaataaacacagg

SEQ ID NO: 24914 - DNA, 20 bp, synthetic construct
  source 1..20: mol_type = other DNA
tgtatttgtaataaacacag

SEQ ID NO: 24915 - DNA, 20 bp, synthetic construct
  source 1..20: mol_type = other DNA
gtgtatttgtaataaacaca

SEQ ID NO: 24916 - DNA, 20 bp, synthetic construct
  source 1..20: mol_type = other DNA
tgtgtatttgtaataaacac

SEQ ID NO: 24917 - DNA, 20 bp, synthetic construct
  source 1..20: mol_type = other DNA
ttgtgtatttgtaataaaca

SEQ ID NO: 24918 - DNA, 20 bp, synthetic construct
  source 1..20: mol_type = other DNA
tttgtgtatttgtaataaac

SEQ ID NO: 24919 - DNA, 20 bp, synthetic construct
  source 1..20: mol_type = other DNA
atttgtgtatttgtaataaa

SEQ ID NO: 24920 - DNA, 20 bp, synthetic construct
  source 1..20: mol_type = other DNA
aatttgtgtatttgtaataa

SEQ ID NO: 24921 - DNA, 20 bp, synthetic construct
  source 1..20: mol_type = other DNA
caatttgtgtatttgtaata

SEQ ID NO: 24922 - DNA, 20 bp, synthetic construct
  source 1..20: mol_type = other DNA
ccaatttgtgtatttgtaat

SEQ ID NO: 24923 - DNA, 20 bp, synthetic construct
  source 1..20: mol_type = other DNA
gccaatttgtgtatttgtaa

SEQ ID NO: 24924 - DNA, 20 bp, synthetic construct
  source 1..20: mol_type = other DNA
ggccaatttgtgtatttgta

SEQ ID NO: 24925 - DNA, 20 bp, synthetic construct
  source 1..20: mol_type = other DNA
tggccaatttgtgtatttgt

SEQ ID NO: 24926 - DNA, 20 bp, synthetic construct
  source 1..20: mol_type = other DNA
atggccaatttgtgtatttg

SEQ ID NO: 24927 - DNA, 20 bp, synthetic construct
  source 1..20: mol_type = other DNA
aatggccaatttgtgtattt

SEQ ID NO: 24928 - DNA, 20 bp, synthetic construct
  source 1..20: mol_type = other DNA
aaatggccaatttgtgtatt

SEQ ID NO: 24929 - DNA, 20 bp, synthetic construct
  source 1..20: mol_type = other DNA
caaatggccaatttgtgtat

SEQ ID NO: 24930 - DNA, 20 bp, synthetic construct
  source 1..20: mol_type = other DNA
acaaatggccaatttgtgta

SEQ ID NO: 24931 - DNA, 20 bp, synthetic construct
  source 1..20: mol_type = other DNA
cacaaatggccaatttgtgt

SEQ ID NO: 24932 - DNA, 20 bp, synthetic construct
  source 1..20: mol_type = other DNA
gcacaaatggccaatttgtg

SEQ ID NO: 24933 - DNA, 20 bp, synthetic construct
  source 1..20: mol_type = other DNA
cgcacaaatggccaatttgt

SEQ ID NO: 24934 - DNA, 20 bp, synthetic construct
  source 1..20: mol_type = other DNA
acgcacaaatggccaatttg

SEQ ID NO: 24935 - DNA, 20 bp, synthetic construct
  source 1..20: mol_type = other DNA
cacgcacaaatggccaattt

SEQ ID NO: 24936 - DNA, 20 bp, synthetic construct
  source 1..20: mol_type = other DNA
ccacgcacaaatggccaatt

SEQ ID NO: 24937 - DNA, 20 bp, synthetic construct
  source 1..20: mol_type = other DNA
gccacgcacaaatggccaat

SEQ ID NO: 24938 - DNA, 20 bp, synthetic construct
  source 1..20: mol_type = other DNA
agccacgcacaaatggccaa

SEQ ID NO: 24939 - DNA, 20 bp, synthetic construct
  source 1..20: mol_type = other DNA
gagccacgcacaaatggcca

SEQ ID NO: 24940 - DNA, 20 bp, synthetic construct
  source 1..20: mol_type = other DNA
tgagccacgcacaaatggcc

SEQ ID NO: 24941 - DNA, 20 bp, synthetic construct
  source 1..20: mol_type = other DNA
atgagccacgcacaaatggc

SEQ ID NO: 24942 - DNA, 20 bp, synthetic construct
  source 1..20: mol_type = other DNA
gatgagccacgcacaaatgg

SEQ ID NO: 24943 - DNA, 20 bp, synthetic construct
  source 1..20: mol_type = other DNA
agatgagccacgcacaaatg

SEQ ID NO: 24944 - DNA, 20 bp, synthetic construct
  source 1..20: mol_type = other DNA
tagatgagccacgcacaaat

SEQ ID NO: 24945 - DNA, 20 bp, synthetic construct
  source 1..20: mol_type = other DNA
gtagatgagccacgcacaaa

SEQ ID NO: 24946 - DNA, 20 bp, synthetic construct
  source 1..20: mol_type = other DNA
tgtagatgagccacgcacaa

SEQ ID NO: 24947 - DNA, 20 bp, synthetic construct
  source 1..20: mol_type = other DNA
ctgtagatgagccacgcaca

SEQ ID NO: 24948 - DNA, 20 bp, synthetic construct
  source 1..20: mol_type = other DNA
actgtagatgagccacgcac

SEQ ID NO: 24949 - DNA, 20 bp, synthetic construct
  source 1..20: mol_type = other DNA
gactgtagatgagccacgca

SEQ ID NO: 24950 - DNA, 20 bp, synthetic construct
  source 1..20: mol_type = other DNA
agactgtagatgagccacgc

SEQ ID NO: 24951 - DNA, 20 bp, synthetic construct
  source 1..20: mol_type = other DNA
gagactgtagatgagccacg

SEQ ID NO: 24952 - DNA, 20 bp, synthetic construct
  source 1..20: mol_type = other DNA
tgagactgtagatgagccac

SEQ ID NO: 24953 - DNA, 20 bp, synthetic construct
  source 1..20: mol_type = other DNA
ctgagactgtagatgagcca

SEQ ID NO: 24954 - DNA, 20 bp, synthetic construct
  source 1..20: mol_type = other DNA
actgagactgtagatgagcc

SEQ ID NO: 24955 - DNA, 20 bp, synthetic construct
  source 1..20: mol_type = other DNA
cactgagactgtagatgagc

SEQ ID NO: 24956 - DNA, 20 bp, synthetic construct
  source 1..20: mol_type = other DNA
tcactgagactgtagatgag

SEQ ID NO: 24957 - DNA, 20 bp, synthetic construct
  source 1..20: mol_type = other DNA
gtcactgagactgtagatga

SEQ ID NO: 24958 - DNA, 20 bp, synthetic construct
  source 1..20: mol_type = other DNA
agtcactgagactgtagatg

SEQ ID NO: 24959 - DNA, 20 bp, synthetic construct
  source 1..20: mol_type = other DNA
gagtcactgagactgtagat

SEQ ID NO: 24960 - DNA, 20 bp, synthetic construct
  source 1..20: mol_type = other DNA
tgagtcactgagactgtaga

SEQ ID NO: 24961 - DNA, 20 bp, synthetic construct
  source 1..20: mol_type = other DNA
ctgagtcactgagactgtag

SEQ ID NO: 24962 - DNA, 20 bp, synthetic construct
  source 1..20: mol_type = other DNA
tctgagtcactgagactgta

SEQ ID NO: 24963 - DNA, 20 bp, synthetic construct
  source 1..20: mol_type = other DNA
ttctgagtcactgagactgt

SEQ ID NO: 24964 - DNA, 20 bp, synthetic construct
  source 1..20: mol_type = other DNA
cttctgagtcactgagactg

SEQ ID NO: 24965 - DNA, 20 bp, synthetic construct
  source 1..20: mol_type = other DNA
ccttctgagtcactgagact

SEQ ID NO: 24966 - DNA, 20 bp, synthetic construct
  source 1..20: mol_type = other DNA
gccttctgagtcactgagac

SEQ ID NO: 24967 - DNA, 20 bp, synthetic construct
  source 1..20: mol_type = other DNA
agccttctgagtcactgaga

SEQ ID NO: 24968 - DNA, 20 bp, synthetic construct
  source 1..20: mol_type = other DNA
cagccttctgagtcactgag

SEQ ID NO: 24969 - DNA, 20 bp, synthetic construct
  source 1..20: mol_type = other DNA
tcagccttctgagtcactga

SEQ ID NO: 24970 - DNA, 20 bp, synthetic construct
  source 1..20: mol_type = other DNA
ctcagccttctgagtcactg

SEQ ID NO: 24971 - DNA, 20 bp, synthetic construct
  source 1..20: mol_type = other DNA
cctcagccttctgagtcact

SEQ ID NO: 24972 - DNA, 20 bp, synthetic construct
  source 1..20: mol_type = other DNA
gcctcagccttctgagtcac

SEQ ID NO: 24973 - DNA, 20 bp, synthetic construct
  source 1..20: mol_type = other DNA
tgcctcagccttctgagtca

SEQ ID NO: 24974 - DNA, 20 bp, synthetic construct
  source 1..20: mol_type = other DNA
ctgcctcagccttctgagtc

SEQ ID NO: 24975 - DNA, 20 bp, synthetic construct
  source 1..20: mol_type = other DNA
cctgcctcagccttctgagt

SEQ ID NO: 24976 - DNA, 20 bp, synthetic construct
  source 1..20: mol_type = other DNA
tcctgcctcagccttctgag

SEQ ID NO: 24977 - DNA, 20 bp, synthetic construct
  source 1..20: mol_type = other DNA
ctcctgcctcagccttctga

SEQ ID NO: 24978 - DNA, 20 bp, synthetic construct
  source 1..20: mol_type = other DNA
tctcctgcctcagccttctg

SEQ ID NO: 24979 - DNA, 20 bp, synthetic construct
  source 1..20: mol_type = other DNA
ttctcctgcctcagccttct

SEQ ID NO: 24980 - DNA, 20 bp, synthetic construct
  source 1..20: mol_type = other DNA
attctcctgcctcagccttc

SEQ ID NO: 24981 - DNA, 20 bp, synthetic construct
  source 1..20: mol_type = other DNA
gattctcctgcctcagcctt

SEQ ID NO: 24982 - DNA, 20 bp, synthetic construct
  source 1..20: mol_type = other DNA
agattctcctgcctcagcct

SEQ ID NO: 24983 - DNA, 20 bp, synthetic construct
  source 1..20: mol_type = other DNA
gagattctcctgcctcagcc

SEQ ID NO: 24984 - DNA, 20 bp, synthetic construct
  source 1..20: mol_type = other DNA
agagattctcctgcctcagc

SEQ ID NO: 24985 - DNA, 20 bp, synthetic construct
  source 1..20: mol_type = other DNA
aagagattctcctgcctcag

SEQ ID NO: 24986 - DNA, 20 bp, synthetic construct
  source 1..20: mol_type = other DNA
caagagattctcctgcctca

SEQ ID NO: 24987 - DNA, 20 bp, synthetic construct
  source 1..20: mol_type = other DNA
tcaagagattctcctgcctc

SEQ ID NO: 24988 - DNA, 20 bp, synthetic construct
  source 1..20: mol_type = other DNA
ttcaagagattctcctgcct

SEQ ID NO: 24989 - DNA, 20 bp, synthetic construct
  source 1..20: mol_type = other DNA
gttcaagagattctcctgcc

SEQ ID NO: 24990 - DNA, 20 bp, synthetic construct
  source 1..20: mol_type = other DNA
ggttcaagagattctcctgc

SEQ ID NO: 24991 - DNA, 20 bp, synthetic construct
  source 1..20: mol_type = other DNA
gggttcaagagattctcctg

SEQ ID NO: 24992 - DNA, 20 bp, synthetic construct
  source 1..20: mol_type = other DNA
cgggttcaagagattctcct

SEQ ID NO: 24993 - DNA, 20 bp, synthetic construct
  source 1..20: mol_type = other DNA
ccgggttcaagagattctcc

SEQ ID NO: 24994 - DNA, 20 bp, synthetic construct
  source 1..20: mol_type = other DNA
cccgggttcaagagattctc

SEQ ID NO: 24995 - DNA, 20 bp, synthetic construct
  source 1..20: mol_type = other DNA
tcccgggttcaagagattct

SEQ ID NO: 24996 - DNA, 20 bp, synthetic construct
  source 1..20: mol_type = other DNA
ctcccgggttcaagagattc

SEQ ID NO: 24997 - DNA, 20 bp, synthetic construct
  source 1..20: mol_type = other DNA
cctcccgggttcaagagatt

SEQ ID NO: 24998 - DNA, 20 bp, synthetic construct
  source 1..20: mol_type = other DNA
gcctcccgggttcaagagat

SEQ ID NO: 24999 - DNA, 20 bp, synthetic construct
  source 1..20: mol_type = other DNA
tgcctcccgggttcaagaga

SEQ ID NO: 25000 - DNA, 20 bp, synthetic construct
  source 1..20: mol_type = other DNA
ctgcctcccgggttcaagag

SEQ ID NO: 25001 - DNA, 20 bp, synthetic construct
  source 1..20: mol_type = other DNA
tctgcctcccgggttcaaga

SEQ ID NO: 25002 - DNA, 20 bp, synthetic construct
  source 1..20: mol_type = other DNA
ctctgcctcccgggttcaag

SEQ ID NO: 25003 - DNA, 20 bp, synthetic construct
  source 1..20: mol_type = other DNA
cctctgcctcccgggttcaa

SEQ ID NO: 25004 - DNA, 20 bp, synthetic construct
  source 1..20: mol_type = other DNA
acctctgcctcccgggttca

SEQ ID NO: 25005 - DNA, 20 bp, synthetic construct
  source 1..20: mol_type = other DNA
aacctctgcctcccgggttc

SEQ ID NO: 25006 - DNA, 20 bp, synthetic construct
  source 1..20: mol_type = other DNA
caacctctgcctcccgggtt

SEQ ID NO: 25007 - DNA, 20 bp, synthetic construct
  source 1..20: mol_type = other DNA
gcaacctctgcctcccgggt

SEQ ID NO: 25008 - DNA, 20 bp, synthetic construct
  source 1..20: mol_type = other DNA
tgcaacctctgcctcccggg

SEQ ID NO: 25009 - DNA, 20 bp, synthetic construct
  source 1..20: mol_type = other DNA
ctgcaacctctgcctcccgg

SEQ ID NO: 25010 - DNA, 20 bp, synthetic construct
  source 1..20: mol_type = other DNA
actgcaacctctgcctcccg

SEQ ID NO: 25011 - DNA, 20 bp, synthetic construct
  source 1..20: mol_type = other DNA
cactgcaacctctgcctccc

SEQ ID NO: 25012 - DNA, 20 bp, synthetic construct
  source 1..20: mol_type = other DNA
tcactgcaacctctgcctcc

SEQ ID NO: 25013 - DNA, 20 bp, synthetic construct
  source 1..20: mol_type = other DNA
ctcactgcaacctctgcctc

SEQ ID NO: 25014 - DNA, 20 bp, synthetic construct
  source 1..20: mol_type = other DNA
gctcactgcaacctctgcct

SEQ ID NO: 25015 - DNA, 20 bp, synthetic construct
  source 1..20: mol_type = other DNA
tgctcactgcaacctctgcc

SEQ ID NO: 25016 - DNA, 20 bp, synthetic construct
  source 1..20: mol_type = other DNA
ctgctcactgcaacctctgc

SEQ ID NO: 25017 - DNA, 20 bp, synthetic construct
  source 1..20: mol_type = other DNA
tctgctcactgcaacctctg

SEQ ID NO: 25018 - DNA, 20 bp, synthetic construct
  source 1..20: mol_type = other DNA
ctctgctcactgcaacctct

SEQ ID NO: 25019 - DNA, 20 bp, synthetic construct
  source 1..20: mol_type = other DNA
tctctgctcactgcaacctc

SEQ ID NO: 25020 - DNA, 20 bp, synthetic construct
  source 1..20: mol_type = other DNA
atctctgctcactgcaacct

SEQ ID NO: 25021 - DNA, 20 bp, synthetic construct
  source 1..20: mol_type = other DNA
gatctctgctcactgcaacc

SEQ ID NO: 25022 - DNA, 20 bp, synthetic construct
  source 1..20: mol_type = other DNA
cgatctctgctcactgcaac

SEQ ID NO: 25023 - DNA, 20 bp, synthetic construct
  source 1..20: mol_type = other DNA
acgatctctgctcactgcaa

SEQ ID NO: 25024 - DNA, 20 bp, synthetic construct
  source 1..20: mol_type = other DNA
cacgatctctgctcactgca

SEQ ID NO: 25025 - DNA, 20 bp, synthetic construct
  source 1..20: mol_type = other DNA
gcacgatctctgctcactgc

SEQ ID NO: 25026 - DNA, 20 bp, synthetic construct
  source 1..20: mol_type = other DNA
ggcacgatctctgctcactg

SEQ ID NO: 25027 - DNA, 20 bp, synthetic construct
  source 1..20: mol_type = other DNA
tggcacgatctctgctcact

SEQ ID NO: 25028 - DNA, 20 bp, synthetic construct
  source 1..20: mol_type = other DNA
gtggcacgatctctgctcac

SEQ ID NO: 25029 - DNA, 20 bp, synthetic construct
  source 1..20: mol_type = other DNA
agtggcacgatctctgctca

SEQ ID NO: 25030 - DNA, 20 bp, synthetic construct
  source 1..20: mol_type = other DNA
cagtggcacgatctctgctc

SEQ ID NO: 25031 - DNA, 20 bp, synthetic construct
  source 1..20: mol_type = other DNA
acagtggcacgatctctgct

SEQ ID NO: 25032 - DNA, 20 bp, synthetic construct
  source 1..20: mol_type = other DNA
tacagtggcacgatctctgc

SEQ ID NO: 25033 - DNA, 20 bp, synthetic construct
  source 1..20: mol_type = other DNA
gtacagtggcacgatctctg

SEQ ID NO: 25034 - DNA, 20 bp, synthetic construct
  source 1..20: mol_type = other DNA
agtacagtggcacgatctct

SEQ ID NO: 25035 - DNA, 20 bp, synthetic construct
  source 1..20: mol_type = other DNA
aagtacagtggcacgatctc

SEQ ID NO: 25036 - DNA, 20 bp, synthetic construct
  source 1..20: mol_type = other DNA
gaagtacagtggcacgatct

SEQ ID NO: 25037 - DNA, 20 bp, synthetic construct
  source 1..20: mol_type = other DNA
tgaagtacagtggcacgatc

SEQ ID NO: 25038 - DNA, 20 bp, synthetic construct
  source 1..20: mol_type = other DNA
ctgaagtacagtggcacgat

SEQ ID NO: 25039 - DNA, 20 bp, synthetic construct
  source 1..20: mol_type = other DNA
gctgaagtacagtggcacga

SEQ ID NO: 25040 - DNA, 20 bp, synthetic construct
  source 1..20: mol_type = other DNA
ggctgaagtacagtggcacg

SEQ ID NO: 25041 - DNA, 20 bp, synthetic construct
  source 1..20: mol_type = other DNA
aggctgaagtacagtggcac

SEQ ID NO: 25042 - DNA, 20 bp, synthetic construct
  source 1..20: mol_type = other DNA
caggctgaagtacagtggca

SEQ ID NO: 25043 - DNA, 20 bp, synthetic construct
  source 1..20: mol_type = other DNA
ccaggctgaagtacagtggc

SEQ ID NO: 25044 - DNA, 20 bp, synthetic construct
  source 1..20: mol_type = other DNA
cccaggctgaagtacagtgg

SEQ ID NO: 25045 - DNA, 20 bp, synthetic construct
  source 1..20: mol_type = other DNA
acccaggctgaagtacagtg

SEQ ID NO: 25046 - DNA, 20 bp, synthetic construct
  source 1..20: mol_type = other DNA
cacccaggctgaagtacagt

SEQ ID NO: 25047 - DNA, 20 bp, synthetic construct
  source 1..20: mol_type = other DNA
tcacccaggctgaagtacag

SEQ ID NO: 25048 - DNA, 20 bp, synthetic construct
  source 1..20: mol_type = other DNA
gtcacccaggctgaagtaca

SEQ ID NO: 25049 - DNA, 20 bp, synthetic construct
  source 1..20: mol_type = other DNA
tgtcacccaggctgaagtac

SEQ ID NO: 25050 - DNA, 20 bp, synthetic construct
  source 1..20: mol_type = other DNA
ctgtcacccaggctgaagta

SEQ ID NO: 25051 - DNA, 20 bp, synthetic construct
  source 1..20: mol_type = other DNA
tctgtcacccaggctgaagt

SEQ ID NO: 25052 - DNA, 20 bp, synthetic construct
  source 1..20: mol_type = other DNA
ctctgtcacccaggctgaag

SEQ ID NO: 25053 - DNA, 20 bp, synthetic construct
  source 1..20: mol_type = other DNA
actctgtcacccaggctgaa

SEQ ID NO: 25054 - DNA, 20 bp, synthetic construct
  source 1..20: mol_type = other DNA
cactctgtcacccaggctga

SEQ ID NO: 25055 - DNA, 20 bp, synthetic construct
  source 1..20: mol_type = other DNA
tcactctgtcacccaggctg

SEQ ID NO: 25056 - DNA, 20 bp, synthetic construct
  source 1..20: mol_type = other DNA
ctcactctgtcacccaggct

SEQ ID NO: 25057 - DNA, 20 bp, synthetic construct
  source 1..20: mol_type = other DNA
tctcactctgtcacccaggc

SEQ ID NO: 25058 - DNA, 20 bp, synthetic construct
  source 1..20: mol_type = other DNA
gtctcactctgtcacccagg

SEQ ID NO: 25059 - DNA, 20 bp, synthetic construct
  source 1..20: mol_type = other DNA
agtctcactctgtcacccag

SEQ ID NO: 25060 - DNA, 20 bp, synthetic construct
  source 1..20: mol_type = other DNA
cagtctcactctgtcaccca

SEQ ID NO: 25061 - DNA, 20 bp, synthetic construct
  source 1..20: mol_type = other DNA
acagtctcactctgtcaccc

SEQ ID NO: 25062 - DNA, 20 bp, synthetic construct
  source 1..20: mol_type = other DNA
cacagtctcactctgtcacc

SEQ ID NO: 25063 - DNA, 20 bp, synthetic construct
  source 1..20: mol_type = other DNA
acacagtctcactctgtcac

SEQ ID NO: 25064 - DNA, 20 bp, synthetic construct
  source 1..20: mol_type = other DNA
gacacagtctcactctgtca

SEQ ID NO: 25065 - DNA, 20 bp, synthetic construct
  source 1..20: mol_type = other DNA
agacacagtctcactctgtc

SEQ ID NO: 25066 - DNA, 20 bp, synthetic construct
  source 1..20: mol_type = other DNA
gagacacagtctcactctgt

SEQ ID NO: 25067 - DNA, 20 bp, synthetic construct
  source 1..20: mol_type = other DNA
tgagacacagtctcactctg

SEQ ID NO: 25068 - DNA, 20 bp, synthetic construct
  source 1..20: mol_type = other DNA
ttgagacacagtctcactct

SEQ ID NO: 25069 - DNA, 20 bp, synthetic construct
  source 1..20: mol_type = other DNA
tttgagacacagtctcactc

SEQ ID NO: 25070 - DNA, 20 bp, synthetic construct
  source 1..20: mol_type = other DNA
ttttgagacacagtctcact

SEQ ID NO: 25071 - DNA, 20 bp, synthetic construct
  source 1..20: mol_type = other DNA
attttgagacacagtctcac

SEQ ID NO: 25072 - DNA, 20 bp, synthetic construct
  source 1..20: mol_type = other DNA
tattttgagacacagtctca

SEQ ID NO: 25073 - DNA, 20 bp, synthetic construct
  source 1..20: mol_type = other DNA
ttattttgagacacagtctc

SEQ ID NO: 25074 - DNA, 20 bp, synthetic construct
  source 1..20: mol_type = other DNA
attattttgagacacagtct

SEQ ID NO: 25075 - DNA, 20 bp, synthetic construct
  source 1..20: mol_type = other DNA
tattattttgagacacagtc

SEQ ID NO: 25076 - DNA, 20 bp, synthetic construct
  source 1..20: mol_type = other DNA
ttattattttgagacacagt

SEQ ID NO: 25077 - DNA, 20 bp, synthetic construct
  source 1..20: mol_type = other DNA
attattattttgagacacag

SEQ ID NO: 25078 - DNA, 20 bp, synthetic construct
  source 1..20: mol_type = other DNA
tattattattttgagacaca

SEQ ID NO: 25079 - DNA, 20 bp, synthetic construct
  source 1..20: mol_type = other DNA
ttattattattttgagacac

SEQ ID NO: 25080 - DNA, 20 bp, synthetic construct
  source 1..20: mol_type = other DNA
attattattattttgagaca

SEQ ID NO: 25081 - DNA, 20 bp, synthetic construct
  source 1..20: mol_type = other DNA
tattattattattttgagac

SEQ ID NO: 25082 - DNA, 20 bp, synthetic construct
  source 1..20: mol_type = other DNA
ttattattattattttgaga

SEQ ID NO: 25083 - DNA, 20 bp, synthetic construct
  source 1..20: mol_type = other DNA
attattattattattttgag

SEQ ID NO: 25084 - DNA, 20 bp, synthetic construct
  source 1..20: mol_type = other DNA
aattattattattattttga

SEQ ID NO: 25085 - DNA, 20 bp, synthetic construct
  source 1..20: mol_type = other DNA
aaattattattattattttg

SEQ ID NO: 25086 - DNA, 20 bp, synthetic construct
  source 1..20: mol_type = other DNA
caaattattattattatttt

SEQ ID NO: 25087 - DNA, 20 bp, synthetic construct
  source 1..20: mol_type = other DNA
acaaattattattattattt

SEQ ID NO: 25088 - DNA, 20 bp, synthetic construct
  source 1..20: mol_type = other DNA
aacaaattattattattatt

SEQ ID NO: 25089 - DNA, 20 bp, synthetic construct
  source 1..20: mol_type = other DNA
caacaaattattattattat

SEQ ID NO: 25090 - DNA, 20 bp, synthetic construct
  source 1..20: mol_type = other DNA
tcaacaaattattattatta

SEQ ID NO: 25091 - DNA, 20 bp, synthetic construct
  source 1..20: mol_type = other DNA
ttcaacaaattattattatt

SEQ ID NO: 25092 - DNA, 20 bp, synthetic construct
  source 1..20: mol_type = other DNA
attcaacaaattattattat

SEQ ID NO: 25093 - DNA, 20 bp, synthetic construct
  source 1..20: mol_type = other DNA
tattcaacaaattattatta

SEQ ID NO: 25094 - DNA, 20 bp, synthetic construct
  source 1..20: mol_type = other DNA
atattcaacaaattattatt

SEQ ID NO: 25095 - DNA, 20 bp, synthetic construct
  source 1..20: mol_type = other DNA
catattcaacaaattattat

SEQ ID NO: 25096 - DNA, 20 bp, synthetic construct
  source 1..20: mol_type = other DNA
acatattcaacaaattatta

SEQ ID NO: 25097 - DNA, 20 bp, synthetic construct
  source 1..20: mol_type = other DNA
cacatattcaacaaattatt

SEQ ID NO: 25098 - DNA, 20 bp, synthetic construct
  source 1..20: mol_type = other DNA
tcacatattcaacaaattat

SEQ ID NO: 25099 - DNA, 20 bp, synthetic construct
  source 1..20: mol_type = other DNA
gtcacatattcaacaaatta

SEQ ID NO: 25100 - DNA, 20 bp, synthetic construct
  source 1..20: mol_type = other DNA
agtcacatattcaacaaatt

SEQ ID NO: 25101 - DNA, 20 bp, synthetic construct
  source 1..20: mol_type = other DNA
cagtcacatattcaacaaat

SEQ ID NO: 25102 - DNA, 20 bp, synthetic construct
  source 1..20: mol_type = other DNA
acagtcacatattcaacaaa

SEQ ID NO: 25103 - DNA, 20 bp, synthetic construct
  source 1..20: mol_type = other DNA
aacagtcacatattcaacaa

SEQ ID NO: 25104 - DNA, 20 bp, synthetic construct
  source 1..20: mol_type = other DNA
caacagtcacatattcaaca

SEQ ID NO: 25105 - DNA, 20 bp, synthetic construct
  source 1..20: mol_type = other DNA
ccaacagtcacatattcaac

SEQ ID NO: 25106 - DNA, 20 bp, synthetic construct
  source 1..20: mol_type = other DNA
accaacagtcacatattcaa

SEQ ID NO: 25107 - DNA, 20 bp, synthetic construct
  source 1..20: mol_type = other DNA
aaccaacagtcacatattca

SEQ ID NO: 25108 - DNA, 20 bp, synthetic construct
  source 1..20: mol_type = other DNA
aaaccaacagtcacatattc

SEQ ID NO: 25109 - DNA, 20 bp, synthetic construct
  source 1..20: mol_type = other DNA
taaaccaacagtcacatatt

SEQ ID NO: 25110 - DNA, 20 bp, synthetic construct
  source 1..20: mol_type = other DNA
ttaaaccaacagtcacatat

SEQ ID NO: 25111 - DNA, 20 bp, synthetic construct
  source 1..20: mol_type = other DNA
attaaaccaacagtcacata

SEQ ID NO: 25112 - DNA, 20 bp, synthetic construct
  source 1..20: mol_type = other DNA
aattaaaccaacagtcacat

SEQ ID NO: 25113 - DNA, 20 bp, synthetic construct
  source 1..20: mol_type = other DNA
aaattaaaccaacagtcaca

SEQ ID NO: 25114 - DNA, 20 bp, synthetic construct
  source 1..20: mol_type = other DNA
aaaattaaaccaacagtcac

SEQ ID NO: 25115 - DNA, 20 bp, synthetic construct
  source 1..20: mol_type = other DNA
aaaaattaaaccaacagtca

SEQ ID NO: 25116 - DNA, 20 bp, synthetic construct
  source 1..20: mol_type = other DNA
taaaaattaaaccaacagtc

SEQ ID NO: 25117 - DNA, 20 bp, synthetic construct
  source 1..20: mol_type = other DNA
ataaaaattaaaccaacagt

SEQ ID NO: 25118 - DNA, 20 bp, synthetic construct
  source 1..20: mol_type = other DNA
aataaaaattaaaccaacag

SEQ ID NO: 25119 - DNA, 20 bp, synthetic construct
  source 1..20: mol_type = other DNA
aaataaaaattaaaccaaca

SEQ ID NO: 25120 - DNA, 20 bp, synthetic construct
  source 1..20: mol_type = other DNA
aaaataaaaattaaaccaac

SEQ ID NO: 25121 - DNA, 20 bp, synthetic construct
  source 1..20: mol_type = other DNA
aaaaataaaaattaaaccaa

SEQ ID NO: 25122 - DNA, 20 bp, synthetic construct
  source 1..20: mol_type = other DNA
taaaaataaaaattaaacca

SEQ ID NO: 25123 - DNA, 20 bp, synthetic construct
  source 1..20: mol_type = other DNA
ataaaaataaaaattaaacc

SEQ ID NO: 25124 - DNA, 20 bp, synthetic construct
  source 1..20: mol_type = other DNA
cataaaaataaaaattaaac

SEQ ID NO: 25125 - DNA, 20 bp, synthetic construct
  source 1..20: mol_type = other DNA
tcataaaaataaaaattaaa

SEQ ID NO: 25126 - DNA, 20 bp, synthetic construct
  source 1..20: mol_type = other DNA
ctcataaaaataaaaattaa

SEQ ID NO: 25127 - DNA, 20 bp, synthetic construct
  source 1..20: mol_type = other DNA
tctcataaaaataaaaatta

SEQ ID NO: 25128 - DNA, 20 bp, synthetic construct
  source 1..20: mol_type = other DNA
atctcataaaaataaaaatt

SEQ ID NO: 25129 - DNA, 20 bp, synthetic construct
  source 1..20: mol_type = other DNA
catctcataaaaataaaaat

SEQ ID NO: 25130 - DNA, 20 bp, synthetic construct
  source 1..20: mol_type = other DNA
ccatctcataaaaataaaaa

SEQ ID NO: 25131 - DNA, 20 bp, synthetic construct
  source 1..20: mol_type = other DNA
tccatctcataaaaataaaa

SEQ ID NO: 25132 - DNA, 20 bp, synthetic construct
  source 1..20: mol_type = other DNA
ctccatctcataaaaataaa

SEQ ID NO: 25133 - DNA, 20 bp, synthetic construct
  source 1..20: mol_type = other DNA
actccatctcataaaaataa

SEQ ID NO: 25134 - DNA, 20 bp, synthetic construct
  source 1..20: mol_type = other DNA
gactccatctcataaaaata

SEQ ID NO: 25135 - DNA, 20 bp, synthetic construct
  source 1..20: mol_type = other DNA
agactccatctcataaaaat

SEQ ID NO: 25136 - DNA, 20 bp, synthetic construct
  source 1..20: mol_type = other DNA
gagactccatctcataaaaa

SEQ ID NO: 25137 - DNA, 20 bp, synthetic construct
  source 1..20: mol_type = other DNA
tgagactccatctcataaaa

SEQ ID NO: 25138 - DNA, 20 bp, synthetic construct
  source 1..20: mol_type = other DNA
gtgagactccatctcataaa

SEQ ID NO: 25139 - DNA, 20 bp, synthetic construct
  source 1..20: mol_type = other DNA
agtgagactccatctcataa

SEQ ID NO: 25140 - DNA, 20 bp, synthetic construct
  source 1..20: mol_type = other DNA
gagtgagactccatctcata

SEQ ID NO: 25141 - DNA, 20 bp, synthetic construct
  source 1..20: mol_type = other DNA
agagtgagactccatctcat

SEQ ID NO: 25142 - DNA, 20 bp, synthetic construct
  source 1..20: mol_type = other DNA
cagagtgagactccatctca

SEQ ID NO: 25143 - DNA, 20 bp, synthetic construct
  source 1..20: mol_type = other DNA
acagagtgagactccatctc

SEQ ID NO: 25144 - DNA, 20 bp, synthetic construct
  source 1..20: mol_type = other DNA
aacagagtgagactccatct

SEQ ID NO: 25145 - DNA, 20 bp, synthetic construct
  source 1..20: mol_type = other DNA
caacagagtgagactccatc

SEQ ID NO: 25146 - DNA, 20 bp, synthetic construct
  source 1..20: mol_type = other DNA
gcaacagagtgagactccat

SEQ ID NO: 25147 - DNA, 20 bp, synthetic construct
  source 1..20: mol_type = other DNA
ggcaacagagtgagactcca

SEQ ID NO: 25148 - DNA, 20 bp, synthetic construct
  source 1..20: mol_type = other DNA
gggcaacagagtgagactcc

SEQ ID NO: 25149 - DNA, 20 bp, synthetic construct
  source 1..20: mol_type = other DNA
tgggcaacagagtgagactc

SEQ ID NO: 25150 - DNA, 20 bp, synthetic construct
  source 1..20: mol_type = other DNA
ctgggcaacagagtgagact

SEQ ID NO: 25151 - DNA, 20 bp, synthetic construct
  source 1..20: mol_type = other DNA
cctgggcaacagagtgagac

SEQ ID NO: 25152 - DNA, 20 bp, synthetic construct
  source 1..20: mol_type = other DNA
acctgggcaacagagtgaga

SEQ ID NO: 25153 - DNA, 20 bp, synthetic construct
  source 1..20: mol_type = other DNA
aacctgggcaacagagtgag

SEQ ID NO: 25154 - DNA, 20 bp, synthetic construct
  source 1..20: mol_type = other DNA
caacctgggcaacagagtga

SEQ ID NO: 25155 - DNA, 20 bp, synthetic construct
  source 1..20: mol_type = other DNA
ccaacctgggcaacagagtg

SEQ ID NO: 25156 - DNA, 20 bp, synthetic construct
  source 1..20: mol_type = other DNA
tccaacctgggcaacagagt

SEQ ID NO: 25157 - DNA, 20 bp, synthetic construct
  source 1..20: mol_type = other DNA
ctccaacctgggcaacagag

SEQ ID NO: 25158 - DNA, 20 bp, synthetic construct
  source 1..20: mol_type = other DNA
actccaacctgggcaacaga

SEQ ID NO: 25159 - DNA, 20 bp, synthetic construct
  source 1..20: mol_type = other DNA
tactccaacctgggcaacag

SEQ ID NO: 25160 - DNA, 20 bp, synthetic construct
  source 1..20: mol_type = other DNA
gtactccaacctgggcaaca

SEQ ID NO: 25161 - DNA, 20 bp, synthetic construct
  source 1..20: mol_type = other DNA
tgtactccaacctgggcaac

SEQ ID NO: 25162 - DNA, 20 bp, synthetic construct
  source 1..20: mol_type = other DNA
ctgtactccaacctgggcaa

SEQ ID NO: 25163 - DNA, 20 bp, synthetic construct
  source 1..20: mol_type = other DNA
actgtactccaacctgggca

SEQ ID NO: 25164 - DNA, 20 bp, synthetic construct
  source 1..20: mol_type = other DNA
cactgtactccaacctgggc

SEQ ID NO: 25165 - DNA, 20 bp, synthetic construct
  source 1..20: mol_type = other DNA
ccactgtactccaacctggg

SEQ ID NO: 25166 - DNA, 20 bp, synthetic construct
  source 1..20: mol_type = other DNA
gccactgtactccaacctgg

SEQ ID NO: 25167 - DNA, 20 bp, synthetic construct
  source 1..20: mol_type = other DNA
cgccactgtactccaacctg

SEQ ID NO: 25168 - DNA, 20 bp, synthetic construct
  source 1..20: mol_type = other DNA
acgccactgtactccaacct

SEQ ID NO: 25169 - DNA, 20 bp, synthetic construct
  source 1..20: mol_type = other DNA
cacgccactgtactccaacc

SEQ ID NO: 25170 - DNA, 20 bp, synthetic construct
  source 1..20: mol_type = other DNA
gcacgccactgtactccaac

SEQ ID NO: 25171 - DNA, 20 bp, synthetic construct
  source 1..20: mol_type = other DNA
tgcacgccactgtactccaa

SEQ ID NO: 25172 - DNA, 20 bp, synthetic construct
  source 1..20: mol_type = other DNA
ctgcacgccactgtactcca

SEQ ID NO: 25173 - DNA, 20 bp, synthetic construct
  source 1..20: mol_type = other DNA
actgcacgccactgtactcc

SEQ ID NO: 25174 - DNA, 20 bp, synthetic construct
  source 1..20: mol_type = other DNA
cactgcacgccactgtactc

SEQ ID NO: 25175 - DNA, 20 bp, synthetic construct
  source 1..20: mol_type = other DNA
ccactgcacgccactgtact

SEQ ID NO: 25176 - DNA, 20 bp, synthetic construct
  source 1..20: mol_type = other DNA
gccactgcacgccactgtac

SEQ ID NO: 25177 - DNA, 20 bp, synthetic construct
  source 1..20: mol_type = other DNA
cgccactgcacgccactgta

SEQ ID NO: 25178 - DNA, 20 bp, synthetic construct
  source 1..20: mol_type = other DNA
gcgccactgcacgccactgt

SEQ ID NO: 25179 - DNA, 20 bp, synthetic construct
  source 1..20: mol_type = other DNA
tgcgccactgcacgccactg

SEQ ID NO: 25180 - DNA, 20 bp, synthetic construct
  source 1..20: mol_type = other DNA
ttgcgccactgcacgccact

SEQ ID NO: 25181 - DNA, 20 bp, synthetic construct
  source 1..20: mol_type = other DNA
attgcgccactgcacgccac

SEQ ID NO: 25182 - DNA, 20 bp, synthetic construct
  source 1..20: mol_type = other DNA
gattgcgccactgcacgcca

SEQ ID NO: 25183 - DNA, 20 bp, synthetic construct
  source 1..20: mol_type = other DNA
agattgcgccactgcacgcc

SEQ ID NO: 25184 - DNA, 20 bp, synthetic construct
  source 1..20: mol_type = other DNA
aagattgcgccactgcacgc

SEQ ID NO: 25185 - DNA, 20 bp, synthetic construct
  source 1..20: mol_type = other DNA
taagattgcgccactgcacg

SEQ ID NO: 25186 - DNA, 20 bp, synthetic construct
  source 1..20: mol_type = other DNA
ctaagattgcgccactgcac

SEQ ID NO: 25187 - DNA, 20 bp, synthetic construct
  source 1..20: mol_type = other DNA
gctaagattgcgccactgca

SEQ ID NO: 25188 - DNA, 20 bp, synthetic construct
  source 1..20: mol_type = other DNA
agctaagattgcgccactgc

SEQ ID NO: 25189 - DNA, 20 bp, synthetic construct
  source 1..20: mol_type = other DNA
gagctaagattgcgccactg

SEQ ID NO: 25190 - DNA, 20 bp, synthetic construct
  source 1..20: mol_type = other DNA
tgagctaagattgcgccact

SEQ ID NO: 25191 - DNA, 20 bp, synthetic construct
  source 1..20: mol_type = other DNA
gtgagctaagattgcgccac

SEQ ID NO: 25192 - DNA, 20 bp, synthetic construct
  source 1..20: mol_type = other DNA
agtgagctaagattgcgcca

SEQ ID NO: 25193 - DNA, 20 bp, synthetic construct
  source 1..20: mol_type = other DNA
cagtgagctaagattgcgcc

SEQ ID NO: 25194 - DNA, 20 bp, synthetic construct
  source 1..20: mol_type = other DNA
gcagtgagctaagattgcgc

SEQ ID NO: 25195 - DNA, 20 bp, synthetic construct
  source 1..20: mol_type = other DNA
tgcagtgagctaagattgcg

SEQ ID NO: 25196 - DNA, 20 bp, synthetic construct
  source 1..20: mol_type = other DNA
ttgcagtgagctaagattgc

SEQ ID NO: 25197 - DNA, 20 bp, synthetic construct
  source 1..20: mol_type = other DNA
gttgcagtgagctaagattg

SEQ ID NO: 25198 - DNA, 20 bp, synthetic construct
  source 1..20: mol_type = other DNA
ggttgcagtgagctaagatt

SEQ ID NO: 25199 - DNA, 20 bp, synthetic construct
  source 1..20: mol_type = other DNA
aggttgcagtgagctaagat

SEQ ID NO: 25200 - DNA, 20 bp, synthetic construct
  source 1..20: mol_type = other DNA
gaggttgcagtgagctaaga

SEQ ID NO: 25201 - DNA, 20 bp, synthetic construct
  source 1..20: mol_type = other DNA
ggaggttgcagtgagctaag

SEQ ID NO: 25202 - DNA, 20 bp, synthetic construct
  source 1..20: mol_type = other DNA
cggaggttgcagtgagctaa

SEQ ID NO: 25203 - DNA, 20 bp, synthetic construct
  source 1..20: mol_type = other DNA
gcggaggttgcagtgagcta

SEQ ID NO: 25204 - DNA, 20 bp, synthetic construct
  source 1..20: mol_type = other DNA
ggcggaggttgcagtgagct

SEQ ID NO: 25205 - DNA, 20 bp, synthetic construct
  source 1..20: mol_type = other DNA
aggcggaggttgcagtgagc

SEQ ID NO: 25206 - DNA, 20 bp, synthetic construct
  source 1..20: mol_type = other DNA
gaggcggaggttgcagtgag

SEQ ID NO: 25207 - DNA, 20 bp, synthetic construct
  source 1..20: mol_type = other DNA
ggaggcggaggttgcagtga

SEQ ID NO: 25208 - DNA, 20 bp, synthetic construct
  source 1..20: mol_type = other DNA
aggaggcggaggttgcagtg

SEQ ID NO: 25209 - DNA, 20 bp, synthetic construct
  source 1..20: mol_type = other DNA
caggaggcggaggttgcagt

SEQ ID NO: 25210 - DNA, 20 bp, synthetic construct
  source 1..20: mol_type = other DNA
acaggaggcggaggttgcag

SEQ ID NO: 25211 - DNA, 20 bp, synthetic construct
  source 1..20: mol_type = other DNA
cacaggaggcggaggttgca

SEQ ID NO: 25212 - DNA, 20 bp, synthetic construct
  source 1..20: mol_type = other DNA
acacaggaggcggaggttgc

SEQ ID NO: 25213 - DNA, 20 bp, synthetic construct
  source 1..20: mol_type = other DNA
aacacaggaggcggaggttg

SEQ ID NO: 25214 - DNA, 20 bp, synthetic construct
  source 1..20: mol_type = other DNA
gaacacaggaggcggaggtt

SEQ ID NO: 25215 - DNA, 20 bp, synthetic construct
  source 1..20: mol_type = other DNA
tgaacacaggaggcggaggt

SEQ ID NO: 25216 - DNA, 20 bp, synthetic construct
  source 1..20: mol_type = other DNA
ctgaacacaggaggcggagg

SEQ ID NO: 25217 - DNA, 20 bp, synthetic construct
  source 1..20: mol_type = other DNA
cctgaacacaggaggcggag

SEQ ID NO: 25218 - DNA, 20 bp, synthetic construct
  source 1..20: mol_type = other DNA
acctgaacacaggaggcgga

SEQ ID NO: 25219 - DNA, 20 bp, synthetic construct
  source 1..20: mol_type = other DNA
cacctgaacacaggaggcgg

SEQ ID NO: 25220 - DNA, 20 bp, synthetic construct
  source 1..20: mol_type = other DNA
tcacctgaacacaggaggcg

SEQ ID NO: 25221 - DNA, 20 bp, synthetic construct
  source 1..20: mol_type = other DNA
atcacctgaacacaggaggc

SEQ ID NO: 25222 - DNA, 20 bp, synthetic construct
  source 1..20: mol_type = other DNA
aatcacctgaacacaggagg

SEQ ID NO: 25223 - DNA, 20 bp, synthetic construct
  source 1..20: mol_type = other DNA
gaatcacctgaacacaggag

SEQ ID NO: 25224 - DNA, 20 bp, synthetic construct
  source 1..20: mol_type = other DNA
tgaatcacctgaacacagga

SEQ ID NO: 25225 - DNA, 20 bp, synthetic construct
  source 1..20: mol_type = other DNA
ctgaatcacctgaacacagg

SEQ ID NO: 25226 - DNA, 20 bp, synthetic construct
  source 1..20: mol_type = other DNA
gctgaatcacctgaacacag

SEQ ID NO: 25227 - DNA, 20 bp, synthetic construct
  source 1..20: mol_type = other DNA
ggctgaatcacctgaacaca

SEQ ID NO: 25228 - DNA, 20 bp, synthetic construct
  source 1..20: mol_type = other DNA
aggctgaatcacctgaacac

SEQ ID NO: 25229 - DNA, 20 bp, synthetic construct
  source 1..20: mol_type = other DNA
gaggctgaatcacctgaaca

SEQ ID NO: 25230 - DNA, 20 bp, synthetic construct
  source 1..20: mol_type = other DNA
ggaggctgaatcacctgaac

SEQ ID NO: 25231 - DNA, 20 bp, synthetic construct
  source 1..20: mol_type = other DNA
gggaggctgaatcacctgaa

SEQ ID NO: 25232 - DNA, 20 bp, synthetic construct
  source 1..20: mol_type = other DNA
tgggaggctgaatcacctga

SEQ ID NO: 25233 - DNA, 20 bp, synthetic construct
  source 1..20: mol_type = other DNA
ttgggaggctgaatcacctg

SEQ ID NO: 25234 - DNA, 20 bp, synthetic construct
  source 1..20: mol_type = other DNA
cttgggaggctgaatcacct

SEQ ID NO: 25235 - DNA, 20 bp, synthetic construct
  source 1..20: mol_type = other DNA
acttgggaggctgaatcacc

SEQ ID NO: 25236 - DNA, 20 bp, synthetic construct
  source 1..20: mol_type = other DNA
tacttgggaggctgaatcac

SEQ ID NO: 25237 - DNA, 20 bp, synthetic construct
  source 1..20: mol_type = other DNA
gtacttgggaggctgaatca

SEQ ID NO: 25238 - DNA, 20 bp, synthetic construct
  source 1..20: mol_type = other DNA
ggtacttgggaggctgaatc

SEQ ID NO: 25239 - DNA, 20 bp, synthetic construct
  source 1..20: mol_type = other DNA
aggtacttgggaggctgaat

SEQ ID NO: 25240 - DNA, 20 bp, synthetic construct
  source 1..20: mol_type = other DNA
caggtacttgggaggctgaa

SEQ ID NO: 25241 - DNA, 20 bp, synthetic construct
  source 1..20: mol_type = other DNA
tcaggtacttgggaggctga

SEQ ID NO: 25242 - DNA, 20 bp, synthetic construct
  source 1..20: mol_type = other DNA
ctcaggtacttgggaggctg

SEQ ID NO: 25243 - DNA, 20 bp, synthetic construct
  source 1..20: mol_type = other DNA
tctcaggtacttgggaggct

SEQ ID NO: 25244 - DNA, 20 bp, synthetic construct
  source 1..20: mol_type = other DNA
gtctcaggtacttgggaggc

SEQ ID NO: 25245 - DNA, 20 bp, synthetic construct
  source 1..20: mol_type = other DNA
agtctcaggtacttgggagg

SEQ ID NO: 25246 - DNA, 20 bp, synthetic construct
  source 1..20: mol_type = other DNA
tagtctcaggtacttgggag

SEQ ID NO: 25247 - DNA, 20 bp, synthetic construct
  source 1..20: mol_type = other DNA
gtagtctcaggtacttggga

SEQ ID NO: 25248 - DNA, 20 bp, synthetic construct
  source 1..20: mol_type = other DNA
tgtagtctcaggtacttggg

SEQ ID NO: 25249 - DNA, 20 bp, synthetic construct
  source 1..20: mol_type = other DNA
ctgtagtctcaggtacttgg

SEQ ID NO: 25250 - DNA, 20 bp, synthetic construct
  source 1..20: mol_type = other DNA
tctgtagtctcaggtacttg

SEQ ID NO: 25251 - DNA, 20 bp, synthetic construct
  source 1..20: mol_type = other DNA
gtctgtagtctcaggtactt

SEQ ID NO: 25252 - DNA, 20 bp, synthetic construct
  source 1..20: mol_type = other DNA
cgtctgtagtctcaggtact

SEQ ID NO: 25253 - DNA, 20 bp, synthetic construct
  source 1..20: mol_type = other DNA
acgtctgtagtctcaggtac

SEQ ID NO: 25254 - DNA, 20 bp, synthetic construct
  source 1..20: mol_type = other DNA
cacgtctgtagtctcaggta

SEQ ID NO: 25255 - DNA, 20 bp, synthetic construct
  source 1..20: mol_type = other DNA
gcacgtctgtagtctcaggt

SEQ ID NO: 25256 - DNA, 20 bp, synthetic construct
  source 1..20: mol_type = other DNA
tgcacgtctgtagtctcagg

SEQ ID NO: 25257 - DNA, 20 bp, synthetic construct
  source 1..20: mol_type = other DNA
gtgcacgtctgtagtctcag

SEQ ID NO: 25258 - DNA, 20 bp, synthetic construct
  source 1..20: mol_type = other DNA
agtgcacgtctgtagtctca

SEQ ID NO: 25259 - DNA, 20 bp, synthetic construct
  source 1..20: mol_type = other DNA
tagtgcacgtctgtagtctc

SEQ ID NO: 25260 - DNA, 20 bp, synthetic construct
  source 1..20: mol_type = other DNA
gtagtgcacgtctgtagtct

SEQ ID NO: 25261 - DNA, 20 bp, synthetic construct
  source 1..20: mol_type = other DNA
ggtagtgcacgtctgtagtc

SEQ ID NO: 25262 - DNA, 20 bp, synthetic construct
  source 1..20: mol_type = other DNA
cggtagtgcacgtctgtagt

SEQ ID NO: 25263 - DNA, 20 bp, synthetic construct
  source 1..20: mol_type = other DNA
acggtagtgcacgtctgtag

SEQ ID NO: 25264 - DNA, 20 bp, synthetic construct
  source 1..20: mol_type = other DNA
cacggtagtgcacgtctgta

SEQ ID NO: 25265 - DNA, 20 bp, synthetic construct
  source 1..20: mol_type = other DNA
gcacggtagtgcacgtctgt

SEQ ID NO: 25266 - DNA, 20 bp, synthetic construct
  source 1..20: mol_type = other DNA
ggcacggtagtgcacgtctg

SEQ ID NO: 25267 - DNA, 20 bp, synthetic construct
  source 1..20: mol_type = other DNA
aggcacggtagtgcacgtct

SEQ ID NO: 25268 - DNA, 20 bp, synthetic construct
  source 1..20: mol_type = other DNA
caggcacggtagtgcacgtc

SEQ ID NO: 25269 - DNA, 20 bp, synthetic construct
  source 1..20: mol_type = other DNA
tcaggcacggtagtgcacgt

SEQ ID NO: 25270 - DNA, 20 bp, synthetic construct
  source 1..20: mol_type = other DNA
gtcaggcacggtagtgcacg

SEQ ID NO: 25271 - DNA, 20 bp, synthetic construct
  source 1..20: mol_type = other DNA
agtcaggcacggtagtgcac

SEQ ID NO: 25272 - DNA, 20 bp, synthetic construct
  source 1..20: mol_type = other DNA
tagtcaggcacggtagtgca

SEQ ID NO: 25273 - DNA, 20 bp, synthetic construct
  source 1..20: mol_type = other DNA
ttagtcaggcacggtagtgc

SEQ ID NO: 25274 - DNA, 20 bp, synthetic construct
  source 1..20: mol_type = other DNA
attagtcaggcacggtagtg

SEQ ID NO: 25275 - DNA, 20 bp, synthetic construct
  source 1..20: mol_type = other DNA
aattagtcaggcacggtagt

SEQ ID NO: 25276 - DNA, 20 bp, synthetic construct
  source 1..20: mol_type = other DNA
aaattagtcaggcacggtag

SEQ ID NO: 25277 - DNA, 20 bp, synthetic construct
  source 1..20: mol_type = other DNA
aaaattagtcaggcacggta

SEQ ID NO: 25278 - DNA, 20 bp, synthetic construct
  source 1..20: mol_type = other DNA
aaaaattagtcaggcacggt

SEQ ID NO: 25279 - DNA, 20 bp, synthetic construct
  source 1..20: mol_type = other DNA
caaaaattagtcaggcacgg

SEQ ID NO: 25280 - DNA, 20 bp, synthetic construct
  source 1..20: mol_type = other DNA
acaaaaattagtcaggcacg

SEQ ID NO: 25281 - DNA, 20 bp, synthetic construct
  source 1..20: mol_type = other DNA
tacaaaaattagtcaggcac

SEQ ID NO: 25282 - DNA, 20 bp, synthetic construct
  source 1..20: mol_type = other DNA
atacaaaaattagtcaggca

SEQ ID NO: 25283 - DNA, 20 bp, synthetic construct
  source 1..20: mol_type = other DNA
aatacaaaaattagtcaggc

SEQ ID NO: 25284 - DNA, 20 bp, synthetic construct
  source 1..20: mol_type = other DNA
aaatacaaaaattagtcagg

SEQ ID NO: 25285 - DNA, 20 bp, synthetic construct
  source 1..20: mol_type = other DNA
aaaatacaaaaattagtcag

SEQ ID NO: 25286 - DNA, 20 bp, synthetic construct
  source 1..20: mol_type = other DNA
aaaaatacaaaaattagtca

SEQ ID NO: 25287 - DNA, 20 bp, synthetic construct
  source 1..20: mol_type = other DNA
taaaaatacaaaaattagtc

SEQ ID NO: 25288 - DNA, 20 bp, synthetic construct
  source 1..20: mol_type = other DNA
ctaaaaatacaaaaattagt

SEQ ID NO: 25289 - DNA, 20 bp, synthetic construct
  source 1..20: mol_type = other DNA
actaaaaatacaaaaattag

SEQ ID NO: 25290 - DNA, 20 bp, synthetic construct
  source 1..20: mol_type = other DNA
tactaaaaatacaaaaatta

SEQ ID NO: 25291 - DNA, 20 bp, synthetic construct
  source 1..20: mol_type = other DNA
ctactaaaaatacaaaaatt

SEQ ID NO: 25292 - DNA, 20 bp, synthetic construct
  source 1..20: mol_type = other DNA
tctactaaaaatacaaaaat

SEQ ID NO: 25293 - DNA, 20 bp, synthetic construct
  source 1..20: mol_type = other DNA
ttctactaaaaatacaaaaa

SEQ ID NO: 25294 - DNA, 20 bp, synthetic construct
  source 1..20: mol_type = other DNA
tttctactaaaaatacaaaa

SEQ ID NO: 25295 - DNA, 20 bp, synthetic construct
  source 1..20: mol_type = other DNA
atttctactaaaaatacaaa

SEQ ID NO: 25296 - DNA, 20 bp, synthetic construct
  source 1..20: mol_type = other DNA
catttctactaaaaatacaa

SEQ ID NO: 25297 - DNA, 20 bp, synthetic construct
  source 1..20: mol_type = other DNA
ccatttctactaaaaataca

SEQ ID NO: 25298 - DNA, 20 bp, synthetic construct
  source 1..20: mol_type = other DNA
cccatttctactaaaaatac

SEQ ID NO: 25299 - DNA, 20 bp, synthetic construct
  source 1..20: mol_type = other DNA
ccccatttctactaaaaata

SEQ ID NO: 25300 - DNA, 20 bp, synthetic construct
  source 1..20: mol_type = other DNA
accccatttctactaaaaat

SEQ ID NO: 25301 - DNA, 20 bp, synthetic construct
  source 1..20: mol_type = other DNA
aaccccatttctactaaaaa

SEQ ID NO: 25302 - DNA, 20 bp, synthetic construct
  source 1..20: mol_type = other DNA
aaaccccatttctactaaaa

SEQ ID NO: 25303 - DNA, 20 bp, synthetic construct
  source 1..20: mol_type = other DNA
gaaaccccatttctactaaa

SEQ ID NO: 25304 - DNA, 20 bp, synthetic construct
  source 1..20: mol_type = other DNA
tgaaaccccatttctactaa

SEQ ID NO: 25305 - DNA, 20 bp, synthetic construct
  source 1..20: mol_type = other DNA
gtgaaaccccatttctacta

SEQ ID NO: 25306 - DNA, 20 bp, synthetic construct
  source 1..20: mol_type = other DNA
ggtgaaaccccatttctact

SEQ ID NO: 25307 - DNA, 20 bp, synthetic construct
  source 1..20: mol_type = other DNA
tggtgaaaccccatttctac

SEQ ID NO: 25308 - DNA, 20 bp, synthetic construct
  source 1..20: mol_type = other DNA
atggtgaaaccccatttcta

SEQ ID NO: 25309 - DNA, 20 bp, synthetic construct
  source 1..20: mol_type = other DNA
catggtgaaaccccatttct

SEQ ID NO: 25310 - DNA, 20 bp, synthetic construct
  source 1..20: mol_type = other DNA
acatggtgaaaccccatttc

SEQ ID NO: 25311 - DNA, 20 bp, synthetic construct
  source 1..20: mol_type = other DNA
aacatggtgaaaccccattt

SEQ ID NO: 25312 - DNA, 20 bp, synthetic construct
  source 1..20: mol_type = other DNA
caacatggtgaaaccccatt

SEQ ID NO: 25313 - DNA, 20 bp, synthetic construct
  source 1..20: mol_type = other DNA
ccaacatggtgaaaccccat

SEQ ID NO: 25314 - DNA, 20 bp, synthetic construct
  source 1..20: mol_type = other DNA
accaacatggtgaaacccca

SEQ ID NO: 25315 - DNA, 20 bp, synthetic construct
  source 1..20: mol_type = other DNA
gaccaacatggtgaaacccc

SEQ ID NO: 25316 - DNA, 20 bp, synthetic construct
  source 1..20: mol_type = other DNA
tgaccaacatggtgaaaccc

SEQ ID NO: 25317 - DNA, 20 bp, synthetic construct
  source 1..20: mol_type = other DNA
ctgaccaacatggtgaaacc

SEQ ID NO: 25318 - DNA, 20 bp, synthetic construct
  source 1..20: mol_type = other DNA
gctgaccaacatggtgaaac

SEQ ID NO: 25319 - DNA, 20 bp, synthetic construct
  source 1..20: mol_type = other DNA
ggctgaccaacatggtgaaa

SEQ ID NO: 25320 - DNA, 20 bp, synthetic construct
  source 1..20: mol_type = other DNA
aggctgaccaacatggtgaa

SEQ ID NO: 25321 - DNA, 20 bp, synthetic construct
  source 1..20: mol_type = other DNA
caggctgaccaacatggtga

SEQ ID NO: 25322 - DNA, 20 bp, synthetic construct
  source 1..20: mol_type = other DNA
ccaggctgaccaacatggtg

SEQ ID NO: 25323 - DNA, 20 bp, synthetic construct
  source 1..20: mol_type = other DNA
accaggctgaccaacatggt

SEQ ID NO: 25324 - DNA, 20 bp, synthetic construct
  source 1..20: mol_type = other DNA
gaccaggctgaccaacatgg

SEQ ID NO: 25325 - DNA, 20 bp, synthetic construct
  source 1..20: mol_type = other DNA
agaccaggctgaccaacatg

SEQ ID NO: 25326 - DNA, 20 bp, synthetic construct
  source 1..20: mol_type = other DNA
gagaccaggctgaccaacat

SEQ ID NO: 25327 - DNA, 20 bp, synthetic construct
  source 1..20: mol_type = other DNA
tgagaccaggctgaccaaca

SEQ ID NO: 25328 - DNA, 20 bp, synthetic construct
  source 1..20: mol_type = other DNA
ttgagaccaggctgaccaac

SEQ ID NO: 25329 - DNA, 20 bp, synthetic construct
  source 1..20: mol_type = other DNA
tttgagaccaggctgaccaa

SEQ ID NO: 25330 - DNA, 20 bp, synthetic construct
  source 1..20: mol_type = other DNA
gtttgagaccaggctgacca

SEQ ID NO: 25331 - DNA, 20 bp, synthetic construct
  source 1..20: mol_type = other DNA
agtttgagaccaggctgacc

SEQ ID NO: 25332 - DNA, 20 bp, synthetic construct
  source 1..20: mol_type = other DNA
gagtttgagaccaggctgac

SEQ ID NO: 25333 - DNA, 20 bp, synthetic construct
  source 1..20: mol_type = other DNA
ggagtttgagaccaggctga

SEQ ID NO: 25334 - DNA, 20 bp, synthetic construct
  source 1..20: mol_type = other DNA
aggagtttgagaccaggctg

SEQ ID NO: 25335 - DNA, 20 bp, synthetic construct
  source 1..20: mol_type = other DNA
taggagtttgagaccaggct

SEQ ID NO: 25336 - DNA, 20 bp, synthetic construct
  source 1..20: mol_type = other DNA
ataggagtttgagaccaggc

SEQ ID NO: 25337 - DNA, 20 bp, synthetic construct
  source 1..20: mol_type = other DNA
aataggagtttgagaccagg

SEQ ID NO: 25338 - DNA, 20 bp, synthetic construct
  source 1..20: mol_type = other DNA
gaataggagtttgagaccag

SEQ ID NO: 25339 - DNA, 20 bp, synthetic construct
  source 1..20: mol_type = other DNA
agaataggagtttgagacca

SEQ ID NO: 25340 - DNA, 20 bp, synthetic construct
  source 1..20: mol_type = other DNA
gagaataggagtttgagacc

SEQ ID NO: 25341 - DNA, 20 bp, synthetic construct
  source 1..20: mol_type = other DNA
tgagaataggagtttgagac

SEQ ID NO: 25342 - DNA, 20 bp, synthetic construct
  source 1..20: mol_type = other DNA
ttgagaataggagtttgaga

SEQ ID NO: 25343 - DNA, 20 bp, synthetic construct
  source 1..20: mol_type = other DNA
cttgagaataggagtttgag

SEQ ID NO: 25344 - DNA, 20 bp, synthetic construct
  source 1..20: mol_type = other DNA
acttgagaataggagtttga

SEQ ID NO: 25345 - DNA, 20 bp, synthetic construct
  source 1..20: mol_type = other DNA
cacttgagaataggagtttg

SEQ ID NO: 25346 - DNA, 20 bp, synthetic construct
  source 1..20: mol_type = other DNA
tcacttgagaataggagttt

SEQ ID NO: 25347 - DNA, 20 bp, synthetic construct
  source 1..20: mol_type = other DNA
atcacttgagaataggagtt

SEQ ID NO: 25348 - DNA, 20 bp, synthetic construct
  source 1..20: mol_type = other DNA
gatcacttgagaataggagt

SEQ ID NO: 25349 - DNA, 20 bp, synthetic construct
  source 1..20: mol_type = other DNA
ggatcacttgagaataggag

SEQ ID NO: 25350 - DNA, 20 bp, synthetic construct
  source 1..20: mol_type = other DNA
cggatcacttgagaatagga

SEQ ID NO: 25351 - DNA, 20 bp, synthetic construct
  source 1..20: mol_type = other DNA
gcggatcacttgagaatagg

SEQ ID NO: 25352 - DNA, 20 bp, synthetic construct
  source 1..20: mol_type = other DNA
ggcggatcacttgagaatag

SEQ ID NO: 25353 - DNA, 20 bp, synthetic construct
  source 1..20: mol_type = other DNA
aggcggatcacttgagaata

SEQ ID NO: 25354 - DNA, 20 bp, synthetic construct
  source 1..20: mol_type = other DNA
taggcggatcacttgagaat

SEQ ID NO: 25355 - DNA, 20 bp, synthetic construct
  source 1..20: mol_type = other DNA
gtaggcggatcacttgagaa

SEQ ID NO: 25356 - DNA, 20 bp, synthetic construct
  source 1..20: mol_type = other DNA
ggtaggcggatcacttgaga

SEQ ID NO: 25357 - DNA, 20 bp, synthetic construct
  source 1..20: mol_type = other DNA
aggtaggcggatcacttgag

SEQ ID NO: 25358 - DNA, 20 bp, synthetic construct
  source 1..20: mol_type = other DNA
gaggtaggcggatcacttga

SEQ ID NO: 25359 - DNA, 20 bp, synthetic construct
  source 1..20: mol_type = other DNA
cgaggtaggcggatcacttg

SEQ ID NO: 25360 - DNA, 20 bp, synthetic construct
  source 1..20: mol_type = other DNA
tcgaggtaggcggatcactt

SEQ ID NO: 25361 - DNA, 20 bp, synthetic construct
  source 1..20: mol_type = other DNA
gtcgaggtaggcggatcact

SEQ ID NO: 25362 - DNA, 20 bp, synthetic construct
  source 1..20: mol_type = other DNA
ggtcgaggtaggcggatcac

SEQ ID NO: 25363 - DNA, 20 bp, synthetic construct
  source 1..20: mol_type = other DNA
aggtcgaggtaggcggatca

SEQ ID NO: 25364 - DNA, 20 bp, synthetic construct
  source 1..20: mol_type = other DNA
aaggtcgaggtaggcggatc

SEQ ID NO: 25365 - DNA, 20 bp, synthetic construct
  source 1..20: mol_type = other DNA
gaaggtcgaggtaggcggat

SEQ ID NO: 25366 - DNA, 20 bp, synthetic construct
  source 1..20: mol_type = other DNA
ggaaggtcgaggtaggcgga

SEQ ID NO: 25367 - DNA, 20 bp, synthetic construct
  source 1..20: mol_type = other DNA
tggaaggtcgaggtaggcgg

SEQ ID NO: 25368 - DNA, 20 bp, synthetic construct
  source 1..20: mol_type = other DNA
ttggaaggtcgaggtaggcg

SEQ ID NO: 25369 - DNA, 20 bp, synthetic construct
  source 1..20: mol_type = other DNA
tttggaaggtcgaggtaggc

SEQ ID NO: 25370 - DNA, 20 bp, synthetic construct
  source 1..20: mol_type = other DNA
ctttggaaggtcgaggtagg

SEQ ID NO: 25371 - DNA, 20 bp, synthetic construct
  source 1..20: mol_type = other DNA
actttggaaggtcgaggtag

SEQ ID NO: 25372 - DNA, 20 bp, synthetic construct
  source 1..20: mol_type = other DNA
cactttggaaggtcgaggta

SEQ ID NO: 25373 - DNA, 20 bp, synthetic construct
  source 1..20: mol_type = other DNA
ccactttggaaggtcgaggt

SEQ ID NO: 25374 - DNA, 20 bp, synthetic construct
  source 1..20: mol_type = other DNA
gccactttggaaggtcgagg

SEQ ID NO: 25375 - DNA, 20 bp, synthetic construct
  source 1..20: mol_type = other DNA
cgccactttggaaggtcgag

SEQ ID NO: 25376 - DNA, 20 bp, synthetic construct
  source 1..20: mol_type = other DNA
ccgccactttggaaggtcga

SEQ ID NO: 25377 - DNA, 20 bp, synthetic construct
  source 1..20: mol_type = other DNA
tccgccactttggaaggtcg

SEQ ID NO: 25378 - DNA, 20 bp, synthetic construct
  source 1..20: mol_type = other DNA
ttccgccactttggaaggtc

SEQ ID NO: 25379 - DNA, 20 bp, synthetic construct
  source 1..20: mol_type = other DNA
attccgccactttggaaggt

SEQ ID NO: 25380 - DNA, 20 bp, synthetic construct
  source 1..20: mol_type = other DNA
aattccgccactttggaagg

SEQ ID NO: 25381 - DNA, 20 bp, synthetic construct
  source 1..20: mol_type = other DNA
taattccgccactttggaag

SEQ ID NO: 25382 - DNA, 20 bp, synthetic construct
  source 1..20: mol_type = other DNA
ataattccgccactttggaa

SEQ ID NO: 25383 - DNA, 20 bp, synthetic construct
  source 1..20: mol_type = other DNA
tataattccgccactttgga

SEQ ID NO: 25384 - DNA, 20 bp, synthetic construct
  source 1..20: mol_type = other DNA
ctataattccgccactttgg

SEQ ID NO: 25385 - DNA, 20 bp, synthetic construct
  source 1..20: mol_type = other DNA
cctataattccgccactttg

SEQ ID NO: 25386 - DNA, 20 bp, synthetic construct
  source 1..20: mol_type = other DNA
acctataattccgccacttt

SEQ ID NO: 25387 - DNA, 20 bp, synthetic construct
  source 1..20: mol_type = other DNA
cacctataattccgccactt

SEQ ID NO: 25388 - DNA, 20 bp, synthetic construct
  source 1..20: mol_type = other DNA
acacctataattccgccact

SEQ ID NO: 25389 - DNA, 20 bp, synthetic construct
  source 1..20: mol_type = other DNA
cacacctataattccgccac

SEQ ID NO: 25390 - DNA, 20 bp, synthetic construct
  source 1..20: mol_type = other DNA
tcacacctataattccgcca

SEQ ID NO: 25391 - DNA, 20 bp, synthetic construct
  source 1..20: mol_type = other DNA
ctcacacctataattccgcc

SEQ ID NO: 25392 - DNA, 20 bp, synthetic construct
  source 1..20: mol_type = other DNA
gctcacacctataattccgc

SEQ ID NO: 25393 - DNA, 20 bp, synthetic construct
  source 1..20: mol_type = other DNA
ggctcacacctataattccg

SEQ ID NO: 25394 - DNA, 20 bp, synthetic construct
  source 1..20: mol_type = other DNA
cggctcacacctataattcc

SEQ ID NO: 25395 - DNA, 20 bp, synthetic construct
  source 1..20: mol_type = other DNA
acggctcacacctataattc

SEQ ID NO: 25396 - DNA, 20 bp, synthetic construct
  source 1..20: mol_type = other DNA
cacggctcacacctataatt

SEQ ID NO: 25397 - DNA, 20 bp, synthetic construct
  source 1..20: mol_type = other DNA
ccacggctcacacctataat

SEQ ID NO: 25398 - DNA, 20 bp, synthetic construct
  source 1..20: mol_type = other DNA
accacggctcacacctataa

SEQ ID NO: 25399 - DNA, 20 bp, synthetic construct
  source 1..20: mol_type = other DNA
caccacggctcacacctata

SEQ ID NO: 25400 - DNA, 20 bp, synthetic construct
  source 1..20: mol_type = other DNA
gcaccacggctcacacctat

SEQ ID NO: 25401 - DNA, 20 bp, synthetic construct
  source 1..20: mol_type = other DNA
ggcaccacggctcacaccta

SEQ ID NO: 25402 - DNA, 20 bp, synthetic construct
  source 1..20: mol_type = other DNA
gggcaccacggctcacacct

SEQ ID NO: 25403 - DNA, 20 bp, synthetic construct
  source 1..20: mol_type = other DNA
cgggcaccacggctcacacc

SEQ ID NO: 25404 - DNA, 20 bp, synthetic construct
  source 1..20: mol_type = other DNA
ccgggcaccacggctcacac

SEQ ID NO: 25405 - DNA, 20 bp, synthetic construct
  source 1..20: mol_type = other DNA
gccgggcaccacggctcaca

SEQ ID NO: 25406 - DNA, 20 bp, synthetic construct
  source 1..20: mol_type = other DNA
ggccgggcaccacggctcac

SEQ ID NO: 25407 - DNA, 20 bp, synthetic construct
  source 1..20: mol_type = other DNA
tggccgggcaccacggctca

SEQ ID NO: 25408 - DNA, 20 bp, synthetic construct
  source 1..20: mol_type = other DNA
ctggccgggcaccacggctc

SEQ ID NO: 25409 - DNA, 20 bp, synthetic construct
  source 1..20: mol_type = other DNA
tctggccgggcaccacggct

SEQ ID NO: 25410 - DNA, 20 bp, synthetic construct
  source 1..20: mol_type = other DNA
gtctggccgggcaccacggc

SEQ ID NO: 25411 - DNA, 20 bp, synthetic construct
  source 1..20: mol_type = other DNA
agtctggccgggcaccacgg

SEQ ID NO: 25412 - DNA, 20 bp, synthetic construct
  source 1..20: mol_type = other DNA
tagtctggccgggcaccacg

SEQ ID NO: 25413 - DNA, 20 bp, synthetic construct
  source 1..20: mol_type = other DNA
atagtctggccgggcaccac

SEQ ID NO: 25414 - DNA, 20 bp, synthetic construct
  source 1..20: mol_type = other DNA
aatagtctggccgggcacca

SEQ ID NO: 25415 - DNA, 20 bp, synthetic construct
  source 1..20: mol_type = other DNA
caatagtctggccgggcacc

SEQ ID NO: 25416 - DNA, 20 bp, synthetic construct
  source 1..20: mol_type = other DNA
ccaatagtctggccgggcac

SEQ ID NO: 25417 - DNA, 20 bp, synthetic construct
  source 1..20: mol_type = other DNA
accaatagtctggccgggca

SEQ ID NO: 25418 - DNA, 20 bp, synthetic construct
  source 1..20: mol_type = other DNA
aaccaatagtctggccgggc

SEQ ID NO: 25419 - DNA, 20 bp, synthetic construct
  source 1..20: mol_type = other DNA
aaaccaatagtctggccggg

SEQ ID NO: 25420 - DNA, 20 bp, synthetic construct
  source 1..20: mol_type = other DNA
caaaccaatagtctggccgg

SEQ ID NO: 25421 - DNA, 20 bp, synthetic construct
  source 1..20: mol_type = other DNA
ccaaaccaatagtctggccg

SEQ ID NO: 25422 - DNA, 20 bp, synthetic construct
  source 1..20: mol_type = other DNA
accaaaccaatagtctggcc

SEQ ID NO: 25423 - DNA, 20 bp, synthetic construct
  source 1..20: mol_type = other DNA
aaccaaaccaatagtctggc

SEQ ID NO: 25424 - DNA, 20 bp, synthetic construct
  source 1..20: mol_type = other DNA
aaaccaaaccaatagtctgg

SEQ ID NO: 25425 - DNA, 20 bp, synthetic construct
  source 1..20: mol_type = other DNA
caaaccaaaccaatagtctg

SEQ ID NO: 25426 - DNA, 20 bp, synthetic construct
  source 1..20: mol_type = other DNA
ccaaaccaaaccaatagtct

SEQ ID NO: 25427 - DNA, 20 bp, synthetic construct
  source 1..20: mol_type = other DNA
accaaaccaaaccaatagtc

SEQ ID NO: 25428 - DNA, 20 bp, synthetic construct
  source 1..20: mol_type = other DNA
caccaaaccaaaccaatagt

SEQ ID NO: 25429 - DNA, 20 bp, synthetic construct
  source 1..20: mol_type = other DNA
acaccaaaccaaaccaatag

SEQ ID NO: 25430 - DNA, 20 bp, synthetic construct
  source 1..20: mol_type = other DNA
cacaccaaaccaaaccaata

SEQ ID NO: 25431 - DNA, 20 bp, synthetic construct
  source 1..20: mol_type = other DNA
tcacaccaaaccaaaccaat

SEQ ID NO: 25432 - DNA, 20 bp, synthetic construct
  source 1..20: mol_type = other DNA
atcacaccaaaccaaaccaa

SEQ ID NO: 25433 - DNA, 20 bp, synthetic construct
  source 1..20: mol_type = other DNA
catcacaccaaaccaaacca

SEQ ID NO: 25434 - DNA, 20 bp, synthetic construct
  source 1..20: mol_type = other DNA
acatcacaccaaaccaaacc

SEQ ID NO: 25435 - DNA, 20 bp, synthetic construct
  source 1..20: mol_type = other DNA
aacatcacaccaaaccaaac

SEQ ID NO: 25436 - DNA, 20 bp, synthetic construct
  source 1..20: mol_type = other DNA
taacatcacaccaaaccaaa

SEQ ID NO: 25437 - DNA, 20 bp, synthetic construct
  source 1..20: mol_type = other DNA
ataacatcacaccaaaccaa

SEQ ID NO: 25438 - DNA, 20 bp, synthetic construct
  source 1..20: mol_type = other DNA
cataacatcacaccaaacca

SEQ ID NO: 25439 - DNA, 20 bp, synthetic construct
  source 1..20: mol_type = other DNA
acataacatcacaccaaacc

SEQ ID NO: 25440 - DNA, 20 bp, synthetic construct
  source 1..20: mol_type = other DNA
aacataacatcacaccaaac

SEQ ID NO: 25441 - DNA, 20 bp, synthetic construct
  source 1..20: mol_type = other DNA
taacataacatcacaccaaa

SEQ ID NO: 25442 - DNA, 20 bp, synthetic construct
  source 1..20: mol_type = other DNA
ataacataacatcacaccaa

SEQ ID NO: 25443 - DNA, 20 bp, synthetic construct
  source 1..20: mol_type = other DNA
cataacataacatcacacca

SEQ ID NO: 25444 - DNA, 20 bp, synthetic construct
  source 1..20: mol_type = other DNA
acataacataacatcacacc

SEQ ID NO: 25445 - DNA, 20 bp, synthetic construct
  source 1..20: mol_type = other DNA
aacataacataacatcacac

SEQ ID NO: 25446 - DNA, 20 bp, synthetic construct
  source 1..20: mol_type = other DNA
taacataacataacatcaca

SEQ ID NO: 25447 - DNA, 20 bp, synthetic construct
  source 1..20: mol_type = other DNA
ataacataacataacatcac

SEQ ID NO: 25448 - DNA, 20 bp, synthetic construct
  source 1..20: mol_type = other DNA
cataacataacataacatca

SEQ ID NO: 25449 - DNA, 20 bp, synthetic construct
  source 1..20: mol_type = other DNA
acataacataacataacatc

SEQ ID NO: 25450 - DNA, 20 bp, synthetic construct
  source 1..20: mol_type = other DNA
aacataacataacataacat

SEQ ID NO: 25451 - DNA, 20 bp, synthetic construct
  source 1..20: mol_type = other DNA
taacataacataacataaca

SEQ ID NO: 25452 - DNA, 20 bp, synthetic construct
  source 1..20: mol_type = other DNA
ataacataacataacataac

SEQ ID NO: 25453 - DNA, 20 bp, synthetic construct
  source 1..20: mol_type = other DNA
cataacataacataacataa

SEQ ID NO: 25454 - DNA, 20 bp, synthetic construct
  source 1..20: mol_type = other DNA
acataacataacataacata

SEQ ID NO: 25455 - DNA, 20 bp, synthetic construct
  source 1..20: mol_type = other DNA
aacataacataacataacat

SEQ ID NO: 25456 - DNA, 20 bp, synthetic construct
  source 1..20: mol_type = other DNA
taacataacataacataaca

SEQ ID NO: 25457 - DNA, 20 bp, synthetic construct
  source 1..20: mol_type = other DNA
ataacataacataacataac

SEQ ID NO: 25458 - DNA, 20 bp, synthetic construct
  source 1..20: mol_type = other DNA
cataacataacataacataa

SEQ ID NO: 25459 - DNA, 20 bp, synthetic construct
  source 1..20: mol_type = other DNA
acataacataacataacata

SEQ ID NO: 25460 - DNA, 20 bp, synthetic construct
  source 1..20: mol_type = other DNA
aacataacataacataacat

SEQ ID NO: 25461 - DNA, 20 bp, synthetic construct
  source 1..20: mol_type = other DNA
taacataacataacataaca

SEQ ID NO: 25462 - DNA, 20 bp, synthetic construct
  source 1..20: mol_type = other DNA
ataacataacataacataac

SEQ ID NO: 25463 - DNA, 20 bp, synthetic construct
  source 1..20: mol_type = other DNA
cataacataacataacataa

SEQ ID NO: 25464 - DNA, 20 bp, synthetic construct
  source 1..20: mol_type = other DNA
acataacataacataacata

SEQ ID NO: 25465 - DNA, 20 bp, synthetic construct
  source 1..20: mol_type = other DNA
aacataacataacataacat

SEQ ID NO: 25466 - DNA, 20 bp, synthetic construct
  source 1..20: mol_type = other DNA
taacataacataacataaca

SEQ ID NO: 25467 - DNA, 20 bp, synthetic construct
  source 1..20: mol_type = other DNA
ataacataacataacataac

SEQ ID NO: 25468 - DNA, 20 bp, synthetic construct
  source 1..20: mol_type = other DNA
cataacataacataacataa

SEQ ID NO: 25469 - DNA, 20 bp, synthetic construct
  source 1..20: mol_type = other DNA
acataacataacataacata

SEQ ID NO: 25470 - DNA, 20 bp, synthetic construct
  source 1..20: mol_type = other DNA
aacataacataacataacat

SEQ ID NO: 25471 - DNA, 20 bp, synthetic construct
  source 1..20: mol_type = other DNA
taacataacataacataaca

SEQ ID NO: 25472 - DNA, 20 bp, synthetic construct
  source 1..20: mol_type = other DNA
ataacataacataacataac

SEQ ID NO: 25473 - DNA, 20 bp, synthetic construct
  source 1..20: mol_type = other DNA
cataacataacataacataa

SEQ ID NO: 25474 - DNA, 20 bp, synthetic construct
  source 1..20: mol_type = other DNA
acataacataacataacata

SEQ ID NO: 25475 - DNA, 20 bp, synthetic construct
  source 1..20: mol_type = other DNA
aacataacataacataacat

SEQ ID NO: 25476 - DNA, 20 bp, synthetic construct
  source 1..20: mol_type = other DNA
taacataacataacataaca

SEQ ID NO: 25477 - DNA, 20 bp, synthetic construct
  source 1..20: mol_type = other DNA
ataacataacataacataac

SEQ ID NO: 25478 - DNA, 20 bp, synthetic construct
  source 1..20: mol_type = other DNA
cataacataacataacataa

SEQ ID NO: 25479 - DNA, 20 bp, synthetic construct
  source 1..20: mol_type = other DNA
acataacataacataacata

SEQ ID NO: 25480 - DNA, 20 bp, synthetic construct
  source 1..20: mol_type = other DNA
aacataacataacataacat

SEQ ID NO: 25481 - DNA, 20 bp, synthetic construct
  source 1..20: mol_type = other DNA
taacataacataacataaca

SEQ ID NO: 25482 - DNA, 20 bp, synthetic construct
  source 1..20: mol_type = other DNA
ataacataacataacataac

SEQ ID NO: 25483 - DNA, 20 bp, synthetic construct
  source 1..20: mol_type = other DNA
aataacataacataacataa

SEQ ID NO: 25484 - DNA, 20 bp, synthetic construct
  source 1..20: mol_type = other DNA
aaataacataacataacata

SEQ ID NO: 25485 - DNA, 20 bp, synthetic construct
  source 1..20: mol_type = other DNA
aaaataacataacataacat

SEQ ID NO: 25486 - DNA, 20 bp, synthetic construct
  source 1..20: mol_type = other DNA
taaaataacataacataaca

SEQ ID NO: 25487 - DNA, 20 bp, synthetic construct
  source 1..20: mol_type = other DNA
ttaaaataacataacataac

SEQ ID NO: 25488 - DNA, 20 bp, synthetic construct
  source 1..20: mol_type = other DNA
cttaaaataacataacataa

SEQ ID NO: 25489 - DNA, 20 bp, synthetic construct
  source 1..20: mol_type = other DNA
tcttaaaataacataacata

SEQ ID NO: 25490 - DNA, 20 bp, synthetic construct
  source 1..20: mol_type = other DNA
gtcttaaaataacataacat

SEQ ID NO: 25491 - DNA, 20 bp, synthetic construct
  source 1..20: mol_type = other DNA
tgtcttaaaataacataaca

SEQ ID NO: 25492 - DNA, 20 bp, synthetic construct
  source 1..20: mol_type = other DNA
ctgtcttaaaataacataac

SEQ ID NO: 25493 - DNA, 20 bp, synthetic construct
  source 1..20: mol_type = other DNA
tctgtcttaaaataacataa

SEQ ID NO: 25494 - DNA, 20 bp, synthetic construct
  source 1..20: mol_type = other DNA
ctctgtcttaaaataacata

SEQ ID NO: 25495 - DNA, 20 bp, synthetic construct
  source 1..20: mol_type = other DNA
actctgtcttaaaataacat

SEQ ID NO: 25496 - DNA, 20 bp, synthetic construct
  source 1..20: mol_type = other DNA
aactctgtcttaaaataaca

SEQ ID NO: 25497 - DNA, 20 bp, synthetic construct
  source 1..20: mol_type = other DNA
aaactctgtcttaaaataac

SEQ ID NO: 25498 - DNA, 20 bp, synthetic construct
  source 1..20: mol_type = other DNA
caaactctgtcttaaaataa

SEQ ID NO: 25499 - DNA, 20 bp, synthetic construct
  source 1..20: mol_type = other DNA
acaaactctgtcttaaaata

SEQ ID NO: 25500 - DNA, 20 bp, synthetic construct
  source 1..20: mol_type = other DNA
gacaaactctgtcttaaaat

SEQ ID NO: 25501 - DNA, 20 bp, synthetic construct
  source 1..20: mol_type = other DNA
agacaaactctgtcttaaaa

SEQ ID NO: 25502 - DNA, 20 bp, synthetic construct
  source 1..20: mol_type = other DNA
gagacaaactctgtcttaaa

SEQ ID NO: 25503 - DNA, 20 bp, synthetic construct
  source 1..20: mol_type = other DNA
agagacaaactctgtcttaa

SEQ ID NO: 25504 - DNA, 20 bp, synthetic construct
  source 1..20: mol_type = other DNA
aagagacaaactctgtctta

SEQ ID NO: 25505 - DNA, 20 bp, synthetic construct
  source 1..20: mol_type = other DNA
caagagacaaactctgtctt

SEQ ID NO: 25506 - DNA, 20 bp, synthetic construct
  source 1..20: mol_type = other DNA
acaagagacaaactctgtct

SEQ ID NO: 25507 - DNA, 20 bp, synthetic construct
  source 1..20: mol_type = other DNA
gacaagagacaaactctgtc

SEQ ID NO: 25508 - DNA, 20 bp, synthetic construct
  source 1..20: mol_type = other DNA
cgacaagagacaaactctgt

SEQ ID NO: 25509 - DNA, 20 bp, synthetic construct
  source 1..20: mol_type = other DNA
gcgacaagagacaaactctg

SEQ ID NO: 25510 - DNA, 20 bp, synthetic construct
  source 1..20: mol_type = other DNA
ggcgacaagagacaaactct

SEQ ID NO: 25511 - DNA, 20 bp, synthetic construct
  source 1..20: mol_type = other DNA
gggcgacaagagacaaactc

SEQ ID NO: 25512 - DNA, 20 bp, synthetic construct
  source 1..20: mol_type = other DNA
tgggcgacaagagacaaact

SEQ ID NO: 25513 - DNA, 20 bp, synthetic construct
  source 1..20: mol_type = other DNA
ctgggcgacaagagacaaac

SEQ ID NO: 25514 - DNA, 20 bp, synthetic construct
  source 1..20: mol_type = other DNA
cctgggcgacaagagacaaa

SEQ ID NO: 25515 - DNA, 20 bp, synthetic construct
  source 1..20: mol_type = other DNA
gcctgggcgacaagagacaa

SEQ ID NO: 25516 - DNA, 20 bp, synthetic construct
  source 1..20: mol_type = other DNA
agcctgggcgacaagagaca

SEQ ID NO: 25517 - DNA, 20 bp, synthetic construct
  source 1..20: mol_type = other DNA
cagcctgggcgacaagagac

SEQ ID NO: 25518 - DNA, 20 bp, synthetic construct
  source 1..20: mol_type = other DNA
ccagcctgggcgacaagaga

SEQ ID NO: 25519 - DNA, 20 bp, synthetic construct
  source 1..20: mol_type = other DNA
tccagcctgggcgacaagag

SEQ ID NO: 25520 - DNA, 20 bp, synthetic construct
  source 1..20: mol_type = other DNA
ctccagcctgggcgacaaga

SEQ ID NO: 25521 - DNA, 20 bp, synthetic construct
  source 1..20: mol_type = other DNA
actccagcctgggcgacaag

SEQ ID NO: 25522 - DNA, 20 bp, synthetic construct
  source 1..20: mol_type = other DNA
cactccagcctgggcgacaa

SEQ ID NO: 25523 - DNA, 20 bp, synthetic construct
  source 1..20: mol_type = other DNA
gcactccagcctgggcgaca

SEQ ID NO: 25524 - DNA, 20 bp, synthetic construct
  source 1..20: mol_type = other DNA
tgcactccagcctgggcgac

SEQ ID NO: 25525 - DNA, 20 bp, synthetic construct
  source 1..20: mol_type = other DNA
ctgcactccagcctgggcga

SEQ ID NO: 25526 - DNA, 20 bp, synthetic construct
  source 1..20: mol_type = other DNA
gctgcactccagcctgggcg

SEQ ID NO: 25527 - DNA, 20 bp, synthetic construct
  source 1..20: mol_type = other DNA
cgctgcactccagcctgggc

SEQ ID NO: 25528 - DNA, 20 bp, synthetic construct
  source 1..20: mol_type = other DNA
ccgctgcactccagcctggg

SEQ ID NO: 25529 - DNA, 20 bp, synthetic construct
  source 1..20: mol_type = other DNA
gccgctgcactccagcctgg

SEQ ID NO: 25530 - DNA, 20 bp, synthetic construct
  source 1..20: mol_type = other DNA
tgccgctgcactccagcctg

SEQ ID NO: 25531 - DNA, 20 bp, synthetic construct
  source 1..20: mol_type = other DNA
atgccgctgcactccagcct

SEQ ID NO: 25532 - DNA, 20 bp, synthetic construct
  source 1..20: mol_type = other DNA
catgccgctgcactccagcc

SEQ ID NO: 25533 - DNA, 20 bp, synthetic construct
  source 1..20: mol_type = other DNA
tcatgccgctgcactccagc

SEQ ID NO: 25534 - DNA, 20 bp, synthetic construct
  source 1..20: mol_type = other DNA
atcatgccgctgcactccag

SEQ ID NO: 25535 - DNA, 20 bp, synthetic construct
  source 1..20: mol_type = other DNA
gatcatgccgctgcactcca

SEQ ID NO: 25536 - DNA, 20 bp, synthetic construct
  source 1..20: mol_type = other DNA
agatcatgccgctgcactcc

SEQ ID NO: 25537 - DNA, 20 bp, synthetic construct
  source 1..20: mol_type = other DNA
gagatcatgccgctgcactc

SEQ ID NO: 25538 - DNA, 20 bp, synthetic construct
  source 1..20: mol_type = other DNA
cgagatcatgccgctgcact

SEQ ID NO: 25539 - DNA, 20 bp, synthetic construct
  source 1..20: mol_type = other DNA
ccgagatcatgccgctgcac

SEQ ID NO: 25540 - DNA, 20 bp, synthetic construct
  source 1..20: mol_type = other DNA
gccgagatcatgccgctgca

SEQ ID NO: 25541 - DNA, 20 bp, synthetic construct
  source 1..20: mol_type = other DNA
agccgagatcatgccgctgc

SEQ ID NO: 25542 - DNA, 20 bp, synthetic construct
  source 1..20: mol_type = other DNA
aagccgagatcatgccgctg

SEQ ID NO: 25543 - DNA, 20 bp, synthetic construct
  source 1..20: mol_type = other DNA
taagccgagatcatgccgct

SEQ ID NO: 25544 - DNA, 20 bp, synthetic construct
  source 1..20: mol_type = other DNA
gtaagccgagatcatgccgc

SEQ ID NO: 25545 - DNA, 20 bp, synthetic construct
  source 1..20: mol_type = other DNA
agtaagccgagatcatgccg

SEQ ID NO: 25546 - DNA, 20 bp, synthetic construct
  source 1..20: mol_type = other DNA
cagtaagccgagatcatgcc

SEQ ID NO: 25547 - DNA, 20 bp, synthetic construct
  source 1..20: mol_type = other DNA
gcagtaagccgagatcatgc

SEQ ID NO: 25548 - DNA, 20 bp, synthetic construct
  source 1..20: mol_type = other DNA
tgcagtaagccgagatcatg

SEQ ID NO: 25549 - DNA, 20 bp, synthetic construct
  source 1..20: mol_type = other DNA
ttgcagtaagccgagatcat

SEQ ID NO: 25550 - DNA, 20 bp, synthetic construct
  source 1..20: mol_type = other DNA
gttgcagtaagccgagatca

SEQ ID NO: 25551 - DNA, 20 bp, synthetic construct
  source 1..20: mol_type = other DNA
ggttgcagtaagccgagatc

SEQ ID NO: 25552 - DNA, 20 bp, synthetic construct
  source 1..20: mol_type = other DNA
aggttgcagtaagccgagat

SEQ ID NO: 25553 - DNA, 20 bp, synthetic construct
  source 1..20: mol_type = other DNA
gaggttgcagtaagccgaga

SEQ ID NO: 25554 - DNA, 20 bp, synthetic construct
  source 1..20: mol_type = other DNA
ggaggttgcagtaagccgag

SEQ ID NO: 25555 - DNA, 20 bp, synthetic construct
  source 1..20: mol_type = other DNA
cggaggttgcagtaagccga

SEQ ID NO: 25556 - DNA, 20 bp, synthetic construct
  source 1..20: mol_type = other DNA
gcggaggttgcagtaagccg

SEQ ID NO: 25557 - DNA, 20 bp, synthetic construct
  source 1..20: mol_type = other DNA
ggcggaggttgcagtaagcc

SEQ ID NO: 25558 - DNA, 20 bp, synthetic construct
  source 1..20: mol_type = other DNA
aggcggaggttgcagtaagc

SEQ ID NO: 25559 - DNA, 20 bp, synthetic construct
  source 1..20: mol_type = other DNA
gaggcggaggttgcagtaag

SEQ ID NO: 25560 - DNA, 20 bp, synthetic construct
  source 1..20: mol_type = other DNA
ggaggcggaggttgcagtaa

SEQ ID NO: 25561 - DNA, 20 bp, synthetic construct
  source 1..20: mol_type = other DNA
gggaggcggaggttgcagta

SEQ ID NO: 25562 - DNA, 20 bp, synthetic construct
  source 1..20: mol_type = other DNA
tgggaggcggaggttgcagt

SEQ ID NO: 25563 - DNA, 20 bp, synthetic construct
  source 1..20: mol_type = other DNA
ctgggaggcggaggttgcag

SEQ ID NO: 25564 - DNA, 20 bp, synthetic construct
  source 1..20: mol_type = other DNA
cctgggaggcggaggttgca

SEQ ID NO: 25565 - DNA, 20 bp, synthetic construct
  source 1..20: mol_type = other DNA
acctgggaggcggaggttgc

SEQ ID NO: 25566 - DNA, 20 bp, synthetic construct
  source 1..20: mol_type = other DNA
aacctgggaggcggaggttg

SEQ ID NO: 25567 - DNA, 20 bp, synthetic construct
  source 1..20: mol_type = other DNA
gaacctgggaggcggaggtt

SEQ ID NO: 25568 - DNA, 20 bp, synthetic construct
  source 1..20: mol_type = other DNA
tgaacctgggaggcggaggt

SEQ ID NO: 25569 - DNA, 20 bp, synthetic construct
  source 1..20: mol_type = other DNA
ttgaacctgggaggcggagg

SEQ ID NO: 25570 - DNA, 20 bp, synthetic construct
  source 1..20: mol_type = other DNA
cttgaacctgggaggcggag

SEQ ID NO: 25571 - DNA, 20 bp, synthetic construct
  source 1..20: mol_type = other DNA
acttgaacctgggaggcgga

SEQ ID NO: 25572 - DNA, 20 bp, synthetic construct
  source 1..20: mol_type = other DNA
cacttgaacctgggaggcgg

SEQ ID NO: 25573 - DNA, 20 bp, synthetic construct
  source 1..20: mol_type = other DNA
tcacttgaacctgggaggcg

SEQ ID NO: 25574 - DNA, 20 bp, synthetic construct
  source 1..20: mol_type = other DNA
atcacttgaacctgggaggc

SEQ ID NO: 25575 - DNA, 20 bp, synthetic construct
  source 1..20: mol_type = other DNA
aatcacttgaacctgggagg

SEQ ID NO: 25576 - DNA, 20 bp, synthetic construct
  source 1..20: mol_type = other DNA
gaatcacttgaacctgggag

SEQ ID NO: 25577 - DNA, 20 bp, synthetic construct
  source 1..20: mol_type = other DNA
agaatcacttgaacctggga

SEQ ID NO: 25578 - DNA, 20 bp, synthetic construct
  source 1..20: mol_type = other DNA
gagaatcacttgaacctggg

SEQ ID NO: 25579 - DNA, 20 bp, synthetic construct
  source 1..20: mol_type = other DNA
ggagaatcacttgaacctgg

SEQ ID NO: 25580 - DNA, 20 bp, synthetic construct
  source 1..20: mol_type = other DNA
aggagaatcacttgaacctg

SEQ ID NO: 25581 - DNA, 20 bp, synthetic construct
  source 1..20: mol_type = other DNA
caggagaatcacttgaacct

SEQ ID NO: 25582 - DNA, 20 bp, synthetic construct
  source 1..20: mol_type = other DNA
acaggagaatcacttgaacc

SEQ ID NO: 25583 - DNA, 20 bp, synthetic construct
  source 1..20: mol_type = other DNA
gacaggagaatcacttgaac

SEQ ID NO: 25584 - DNA, 20 bp, synthetic construct
  source 1..20: mol_type = other DNA
agacaggagaatcacttgaa

SEQ ID NO: 25585 - DNA, 20 bp, synthetic construct
  source 1..20: mol_type = other DNA
aagacaggagaatcacttga

SEQ ID NO: 25586 - DNA, 20 bp, synthetic construct
  source 1..20: mol_type = other DNA
taagacaggagaatcacttg

SEQ ID NO: 25587 - DNA, 20 bp, synthetic construct
  source 1..20: mol_type = other DNA
ctaagacaggagaatcactt

SEQ ID NO: 25588 - DNA, 20 bp, synthetic construct
  source 1..20: mol_type = other DNA
gctaagacaggagaatcact

SEQ ID NO: 25589 - DNA, 20 bp, synthetic construct
  source 1..20: mol_type = other DNA
ggctaagacaggagaatcac

SEQ ID NO: 25590 - DNA, 20 bp, synthetic construct
  source 1..20: mol_type = other DNA
aggctaagacaggagaatca

SEQ ID NO: 25591 - DNA, 20 bp, synthetic construct
  source 1..20: mol_type = other DNA
gaggctaagacaggagaatc

SEQ ID NO: 25592 - DNA, 20 bp, synthetic construct
  source 1..20: mol_type = other DNA
ggaggctaagacaggagaat

SEQ ID NO: 25593 - DNA, 20 bp, synthetic construct
  source 1..20: mol_type = other DNA
gggaggctaagacaggagaa

SEQ ID NO: 25594 - DNA, 20 bp, synthetic construct
  source 1..20: mol_type = other DNA
tgggaggctaagacaggaga

SEQ ID NO: 25595 - DNA, 20 bp, synthetic construct
  source 1..20: mol_type = other DNA
ttgggaggctaagacaggag

SEQ ID NO: 25596 - DNA, 20 bp, synthetic construct
  source 1..20: mol_type = other DNA
cttgggaggctaagacagga

SEQ ID NO: 25597 - DNA, 20 bp, synthetic construct
  source 1..20: mol_type = other DNA
acttgggaggctaagacagg

SEQ ID NO: 25598 - DNA, 20 bp, synthetic construct
  source 1..20: mol_type = other DNA
tacttgggaggctaagacag

SEQ ID NO: 25599 - DNA, 20 bp, synthetic construct
  source 1..20: mol_type = other DNA
ctacttgggaggctaagaca

SEQ ID NO: 25600 - DNA, 20 bp, synthetic construct
  source 1..20: mol_type = other DNA
gctacttgggaggctaagac

SEQ ID NO: 25601 - DNA, 20 bp, synthetic construct
  source 1..20: mol_type = other DNA
agctacttgggaggctaaga

SEQ ID NO: 25602 - DNA, 20 bp, synthetic construct
  source 1..20: mol_type = other DNA
cagctacttgggaggctaag

SEQ ID NO: 25603 - DNA, 20 bp, synthetic construct
  source 1..20: mol_type = other DNA
ccagctacttgggaggctaa

SEQ ID NO: 25604 - DNA, 20 bp, synthetic construct
  source 1..20: mol_type = other DNA
cccagctacttgggaggcta

SEQ ID NO: 25605 - DNA, 20 bp, synthetic construct
  source 1..20: mol_type = other DNA
tcccagctacttgggaggct

SEQ ID NO: 25606 - DNA, 20 bp, synthetic construct
  source 1..20: mol_type = other DNA
atcccagctacttgggaggc

SEQ ID NO: 25607 - DNA, 20 bp, synthetic construct
  source 1..20: mol_type = other DNA
aatcccagctacttgggagg

SEQ ID NO: 25608 - DNA, 20 bp, synthetic construct
  source 1..20: mol_type = other DNA
taatcccagctacttgggag

SEQ ID NO: 25609 - DNA, 20 bp, synthetic construct
  source 1..20: mol_type = other DNA
gtaatcccagctacttggga

SEQ ID NO: 25610 - DNA, 20 bp, synthetic construct
  source 1..20: mol_type = other DNA
tgtaatcccagctacttggg

SEQ ID NO: 25611 - DNA, 20 bp, synthetic construct
  source 1..20: mol_type = other DNA
ctgtaatcccagctacttgg

SEQ ID NO: 25612 - DNA, 20 bp, synthetic construct
  source 1..20: mol_type = other DNA
cctgtaatcccagctacttg

SEQ ID NO: 25613 - DNA, 20 bp, synthetic construct
  source 1..20: mol_type = other DNA
gcctgtaatcccagctactt

SEQ ID NO: 25614 - DNA, 20 bp, synthetic construct
  source 1..20: mol_type = other DNA
cgcctgtaatcccagctact

SEQ ID NO: 25615 - DNA, 20 bp, synthetic construct
  source 1..20: mol_type = other DNA
gcgcctgtaatcccagctac

SEQ ID NO: 25616 - DNA, 20 bp, synthetic construct
  source 1..20: mol_type = other DNA
ggcgcctgtaatcccagcta

SEQ ID NO: 25617 - DNA, 20 bp, synthetic construct
  source 1..20: mol_type = other DNA
gggcgcctgtaatcccagct

SEQ ID NO: 25618 - DNA, 20 bp, synthetic construct
  source 1..20: mol_type = other DNA
tgggcgcctgtaatcccagc

SEQ ID NO: 25619 - DNA, 20 bp, synthetic construct
  source 1..20: mol_type = other DNA
gtgggcgcctgtaatcccag

SEQ ID NO: 25620 - DNA, 20 bp, synthetic construct
  source 1..20: mol_type = other DNA
ggtgggcgcctgtaatccca

SEQ ID NO: 25621 - DNA, 20 bp, synthetic construct
  source 1..20: mol_type = other DNA
tggtgggcgcctgtaatccc

SEQ ID NO: 25622 - DNA, 20 bp, synthetic construct
  source 1..20: mol_type = other DNA
gtggtgggcgcctgtaatcc

SEQ ID NO: 25623 - DNA, 20 bp, synthetic construct
  source 1..20: mol_type = other DNA
ggtggtgggcgcctgtaatc

SEQ ID NO: 25624 - DNA, 20 bp, synthetic construct
  source 1..20: mol_type = other DNA
cggtggtgggcgcctgtaat

SEQ ID NO: 25625 - DNA, 20 bp, synthetic construct
  source 1..20: mol_type = other DNA
acggtggtgggcgcctgtaa

SEQ ID NO: 25626 - DNA, 20 bp, synthetic construct
  source 1..20: mol_type = other DNA
cacggtggtgggcgcctgta

SEQ ID NO: 25627 - DNA, 20 bp, synthetic construct
  source 1..20: mol_type = other DNA
gcacggtggtgggcgcctgt

SEQ ID NO: 25628 - DNA, 20 bp, synthetic construct
  source 1..20: mol_type = other DNA
ggcacggtggtgggcgcctg

SEQ ID NO: 25629 - DNA, 20 bp, synthetic construct
  source 1..20: mol_type = other DNA
aggcacggtggtgggcgcct

SEQ ID NO: 25630 - DNA, 20 bp, synthetic construct
  source 1..20: mol_type = other DNA
caggcacggtggtgggcgcc

SEQ ID NO: 25631 - DNA, 20 bp, synthetic construct
  source 1..20: mol_type = other DNA
ccaggcacggtggtgggcgc

SEQ ID NO: 25632 - DNA, 20 bp, synthetic construct
  source 1..20: mol_type = other DNA
gccaggcacggtggtgggcg

SEQ ID NO: 25633 - DNA, 20 bp, synthetic construct
  source 1..20: mol_type = other DNA
agccaggcacggtggtgggc

SEQ ID NO: 25634 - DNA, 20 bp, synthetic construct
  source 1..20: mol_type = other DNA
tagccaggcacggtggtggg

SEQ ID NO: 25635 - DNA, 20 bp, synthetic construct
  source 1..20: mol_type = other DNA
ttagccaggcacggtggtgg

SEQ ID NO: 25636 - DNA, 20 bp, synthetic construct
  source 1..20: mol_type = other DNA
attagccaggcacggtggtg

SEQ ID NO: 25637 - DNA, 20 bp, synthetic construct
  source 1..20: mol_type = other DNA
aattagccaggcacggtggt

SEQ ID NO: 25638 - DNA, 20 bp, synthetic construct
  source 1..20: mol_type = other DNA
aaattagccaggcacggtgg

SEQ ID NO: 25639 - DNA, 20 bp, synthetic construct
  source 1..20: mol_type = other DNA
aaaattagccaggcacggtg

SEQ ID NO: 25640 - DNA, 20 bp, synthetic construct
  source 1..20: mol_type = other DNA
aaaaattagccaggcacggt

SEQ ID NO: 25641 - DNA, 20 bp, synthetic construct
  source 1..20: mol_type = other DNA
caaaaattagccaggcacgg

SEQ ID NO: 25642 - DNA, 20 bp, synthetic construct
  source 1..20: mol_type = other DNA
acaaaaattagccaggcacg

SEQ ID NO: 25643 - DNA, 20 bp, synthetic construct
  source 1..20: mol_type = other DNA
tacaaaaattagccaggcac

SEQ ID NO: 25644 - DNA, 20 bp, synthetic construct
  source 1..20: mol_type = other DNA
atacaaaaattagccaggca

SEQ ID NO: 25645 - DNA, 20 bp, synthetic construct
  source 1..20: mol_type = other DNA
aatacaaaaattagccaggc

SEQ ID NO: 25646 - DNA, 20 bp, synthetic construct
  source 1..20: mol_type = other DNA
aaatacaaaaattagccagg

SEQ ID NO: 25647 - DNA, 20 bp, synthetic construct
  source 1..20: mol_type = other DNA
aaaatacaaaaattagccag

SEQ ID NO: 25648 - DNA, 20 bp, synthetic construct
  source 1..20: mol_type = other DNA
aaaaatacaaaaattagcca

SEQ ID NO: 25649 - DNA, 20 bp, synthetic construct
  source 1..20: mol_type = other DNA
taaaaatacaaaaattagcc

SEQ ID NO: 25650 - DNA, 20 bp, synthetic construct
  source 1..20: mol_type = other DNA
ctaaaaatacaaaaattagc

SEQ ID NO: 25651 - DNA, 20 bp, synthetic construct
  source 1..20: mol_type = other DNA
actaaaaatacaaaaattag

SEQ ID NO: 25652 - DNA, 20 bp, synthetic construct
  source 1..20: mol_type = other DNA
tactaaaaatacaaaaatta

SEQ ID NO: 25653 - DNA, 20 bp, synthetic construct
  source 1..20: mol_type = other DNA
ctactaaaaatacaaaaatt

SEQ ID NO: 25654 - DNA, 20 bp, synthetic construct
  source 1..20: mol_type = other DNA
tctactaaaaatacaaaaat

SEQ ID NO: 25655 - DNA, 20 bp, synthetic construct
  source 1..20: mol_type = other DNA
ctctactaaaaatacaaaaa

SEQ ID NO: 25656 - DNA, 20 bp, synthetic construct
  source 1..20: mol_type = other DNA
tctctactaaaaatacaaaa

SEQ ID NO: 25657 - DNA, 20 bp, synthetic construct
  source 1..20: mol_type = other DNA
gtctctactaaaaatacaaa

SEQ ID NO: 25658 - DNA, 20 bp, synthetic construct
  source 1..20: mol_type = other DNA
tgtctctactaaaaatacaa

SEQ ID NO: 25659 - DNA, 20 bp, synthetic construct
  source 1..20: mol_type = other DNA
ctgtctctactaaaaataca

SEQ ID NO: 25660 - DNA, 20 bp, synthetic construct
  source 1..20: mol_type = other DNA
cctgtctctactaaaaatac

SEQ ID NO: 25661 - DNA, 20 bp, synthetic construct
  source 1..20: mol_type = other DNA
ccctgtctctactaaaaata

SEQ ID NO: 25662 - DNA, 20 bp, synthetic construct
  source 1..20: mol_type = other DNA
accctgtctctactaaaaat

SEQ ID NO: 25663 - DNA, 20 bp, synthetic construct
  source 1..20: mol_type = other DNA
aaccctgtctctactaaaaa

SEQ ID NO: 25664 - DNA, 20 bp, synthetic construct
  source 1..20: mol_type = other DNA
aaaccctgtctctactaaaa

SEQ ID NO: 25665 - DNA, 20 bp, synthetic construct
  source 1..20: mol_type = other DNA
gaaaccctgtctctactaaa

SEQ ID NO: 25666 - DNA, 20 bp, synthetic construct
  source 1..20: mol_type = other DNA
tgaaaccctgtctctactaa

SEQ ID NO: 25667 - DNA, 20 bp, synthetic construct
  source 1..20: mol_type = other DNA
gtgaaaccctgtctctacta

SEQ ID NO: 25668 - DNA, 20 bp, synthetic construct
  source 1..20: mol_type = other DNA
ggtgaaaccctgtctctact

SEQ ID NO: 25669 - DNA, 20 bp, synthetic construct
  source 1..20: mol_type = other DNA
tggtgaaaccctgtctctac

SEQ ID NO: 25670 - DNA, 20 bp, synthetic construct
  source 1..20: mol_type = other DNA
atggtgaaaccctgtctcta

SEQ ID NO: 25671 - DNA, 20 bp, synthetic construct
  source 1..20: mol_type = other DNA
gatggtgaaaccctgtctct

SEQ ID NO: 25672 - DNA, 20 bp, synthetic construct
  source 1..20: mol_type = other DNA
agatggtgaaaccctgtctc

SEQ ID NO: 25673 - DNA, 20 bp, synthetic construct
  source 1..20: mol_type = other DNA
aagatggtgaaaccctgtct

SEQ ID NO: 25674 - DNA, 20 bp, synthetic construct
  source 1..20: mol_type = other DNA
caagatggtgaaaccctgtc

SEQ ID NO: 25675 - DNA, 20 bp, synthetic construct
  source 1..20: mol_type = other DNA
ccaagatggtgaaaccctgt

SEQ ID NO: 25676 - DNA, 20 bp, synthetic construct
  source 1..20: mol_type = other DNA
gccaagatggtgaaaccctg

SEQ ID NO: 25677 - DNA, 20 bp, synthetic construct
  source 1..20: mol_type = other DNA
ggccaagatggtgaaaccct

SEQ ID NO: 25678 - DNA, 20 bp, synthetic construct
  source 1..20: mol_type = other DNA
tggccaagatggtgaaaccc

SEQ ID NO: 25679 - DNA, 20 bp, synthetic construct
  source 1..20: mol_type = other DNA
ctggccaagatggtgaaacc

SEQ ID NO: 25680 - DNA, 20 bp, synthetic construct
  source 1..20: mol_type = other DNA
cctggccaagatggtgaaac

SEQ ID NO: 25681 - DNA, 20 bp, synthetic construct
  source 1..20: mol_type = other DNA
gcctggccaagatggtgaaa

SEQ ID NO: 25682 - DNA, 20 bp, synthetic construct
  source 1..20: mol_type = other DNA
agcctggccaagatggtgaa

SEQ ID NO: 25683 - DNA, 20 bp, synthetic construct
  source 1..20: mol_type = other DNA
cagcctggccaagatggtga

SEQ ID NO: 25684 - DNA, 20 bp, synthetic construct
  source 1..20: mol_type = other DNA
acagcctggccaagatggtg

SEQ ID NO: 25685 - DNA, 20 bp, synthetic construct
  source 1..20: mol_type = other DNA
aacagcctggccaagatggt

SEQ ID NO: 25686 - DNA, 20 bp, synthetic construct
  source 1..20: mol_type = other DNA
gaacagcctggccaagatgg

SEQ ID NO: 25687 - DNA, 20 bp, synthetic construct
  source 1..20: mol_type = other DNA
agaacagcctggccaagatg

SEQ ID NO: 25688 - DNA, 20 bp, synthetic construct
  source 1..20: mol_type = other DNA
cagaacagcctggccaagat

SEQ ID NO: 25689 - DNA, 20 bp, synthetic construct
  source 1..20: mol_type = other DNA
ccagaacagcctggccaaga

SEQ ID NO: 25690 - DNA, 20 bp, synthetic construct
  source 1..20: mol_type = other DNA
tccagaacagcctggccaag

SEQ ID NO: 25691 - DNA, 20 bp, synthetic construct
  source 1..20: mol_type = other DNA
ttccagaacagcctggccaa

SEQ ID NO: 25692 - DNA, 20 bp, synthetic construct
  source 1..20: mol_type = other DNA
gttccagaacagcctggcca

SEQ ID NO: 25693 - DNA, 20 bp, synthetic construct
  source 1..20: mol_type = other DNA
agttccagaacagcctggcc

SEQ ID NO: 25694 - DNA, 20 bp, synthetic construct
  source 1..20: mol_type = other DNA
gagttccagaacagcctggc

SEQ ID NO: 25695 - DNA, 20 bp, synthetic construct
  source 1..20: mol_type = other DNA
ggagttccagaacagcctgg

SEQ ID NO: 25696 - DNA, 20 bp, synthetic construct
  source 1..20: mol_type = other DNA
aggagttccagaacagcctg

SEQ ID NO: 25697 - DNA, 20 bp, synthetic construct
  source 1..20: mol_type = other DNA
caggagttccagaacagcct

SEQ ID NO: 25698 - DNA, 20 bp, synthetic construct
  source 1..20: mol_type = other DNA
tcaggagttccagaacagcc

SEQ ID NO: 25699 - DNA, 20 bp, synthetic construct
  source 1..20: mol_type = other DNA
gtcaggagttccagaacagc

SEQ ID NO: 25700 - DNA, 20 bp, synthetic construct
  source 1..20: mol_type = other DNA
ggtcaggagttccagaacag

SEQ ID NO: 25701 - DNA, 20 bp, synthetic construct
  source 1..20: mol_type = other DNA
aggtcaggagttccagaaca

SEQ ID NO: 25702 - DNA, 20 bp, synthetic construct
  source 1..20: mol_type = other DNA
gaggtcaggagttccagaac

SEQ ID NO: 25703 - DNA, 20 bp, synthetic construct
  source 1..20: mol_type = other DNA
tgaggtcaggagttccagaa

SEQ ID NO: 25704 - DNA, 20 bp, synthetic construct
  source 1..20: mol_type = other DNA
atgaggtcaggagttccaga

SEQ ID NO: 25705 - DNA, 20 bp, synthetic construct
  source 1..20: mol_type = other DNA
catgaggtcaggagttccag

SEQ ID NO: 25706 - DNA, 20 bp, synthetic construct
  source 1..20: mol_type = other DNA
tcatgaggtcaggagttcca

SEQ ID NO: 25707 - DNA, 20 bp, synthetic construct
  source 1..20: mol_type = other DNA
atcatgaggtcaggagttcc

SEQ ID NO: 25708 - DNA, 20 bp, synthetic construct
  source 1..20: mol_type = other DNA
gatcatgaggtcaggagttc

SEQ ID NO: 25709 - DNA, 20 bp, synthetic construct
  source 1..20: mol_type = other DNA
ggatcatgaggtcaggagtt

SEQ ID NO: 25710 - DNA, 20 bp, synthetic construct
  source 1..20: mol_type = other DNA
tggatcatgaggtcaggagt

SEQ ID NO: 25711 - DNA, 20 bp, synthetic construct
  source 1..20: mol_type = other DNA
gtggatcatgaggtcaggag

SEQ ID NO: 25712 - DNA, 20 bp, synthetic construct
  source 1..20: mol_type = other DNA
ggtggatcatgaggtcagga

SEQ ID NO: 25713 - DNA, 20 bp, synthetic construct
  source 1..20: mol_type = other DNA
gggtggatcatgaggtcagg

SEQ ID NO: 25714 - DNA, 20 bp, synthetic construct
  source 1..20: mol_type = other DNA
cgggtggatcatgaggtcag

SEQ ID NO: 25715 - DNA, 20 bp, synthetic construct
  source 1..20: mol_type = other DNA
gcgggtggatcatgaggtca

SEQ ID NO: 25716 - DNA, 20 bp, synthetic construct
  source 1..20: mol_type = other DNA
ggcgggtggatcatgaggtc

SEQ ID NO: 25717 - DNA, 20 bp, synthetic construct
  source 1..20: mol_type = other DNA
aggcgggtggatcatgaggt

SEQ ID NO: 25718 - DNA, 20 bp, synthetic construct
  source 1..20: mol_type = other DNA
aaggcgggtggatcatgagg

SEQ ID NO: 25719 - DNA, 20 bp, synthetic construct
  source 1..20: mol_type = other DNA
caaggcgggtggatcatgag

SEQ ID NO: 25720 - DNA, 20 bp, synthetic construct
  source 1..20: mol_type = other DNA
ccaaggcgggtggatcatga

SEQ ID NO: 25721 - DNA, 20 bp, synthetic construct
  source 1..20: mol_type = other DNA
gccaaggcgggtggatcatg

SEQ ID NO: 25722 - DNA, 20 bp, synthetic construct
  source 1..20: mol_type = other DNA
ggccaaggcgggtggatcat

SEQ ID NO: 25723 - DNA, 20 bp, synthetic construct
  source 1..20: mol_type = other DNA
aggccaaggcgggtggatca

SEQ ID NO: 25724 - DNA, 20 bp, synthetic construct
  source 1..20: mol_type = other DNA
gaggccaaggcgggtggatc

SEQ ID NO: 25725 - DNA, 20 bp, synthetic construct
  source 1..20: mol_type = other DNA
ggaggccaaggcgggtggat

SEQ ID NO: 25726 - DNA, 20 bp, synthetic construct
  source 1..20: mol_type = other DNA
gggaggccaaggcgggtgga

SEQ ID NO: 25727 - DNA, 20 bp, synthetic construct
  source 1..20: mol_type = other DNA
tgggaggccaaggcgggtgg

SEQ ID NO: 25728 - DNA, 20 bp, synthetic construct
  source 1..20: mol_type = other DNA
ttgggaggccaaggcgggtg

SEQ ID NO: 25729 - DNA, 20 bp, synthetic construct
  source 1..20: mol_type = other DNA
tttgggaggccaaggcgggt

SEQ ID NO: 25730 - DNA, 20 bp, synthetic construct
  source 1..20: mol_type = other DNA
ctttgggaggccaaggcggg

SEQ ID NO: 25731 - DNA, 20 bp, synthetic construct
  source 1..20: mol_type = other DNA
actttgggaggccaaggcgg

SEQ ID NO: 25732 - DNA, 20 bp, synthetic construct
  source 1..20: mol_type = other DNA
cactttgggaggccaaggcg

SEQ ID NO: 25733 - DNA, 20 bp, synthetic construct
  source 1..20: mol_type = other DNA
gcactttgggaggccaaggc

SEQ ID NO: 25734 - DNA, 20 bp, synthetic construct
  source 1..20: mol_type = other DNA
agcactttgggaggccaagg

SEQ ID NO: 25735 - DNA, 20 bp, synthetic construct
  source 1..20: mol_type = other DNA
cagcactttgggaggccaag

SEQ ID NO: 25736 - DNA, 20 bp, synthetic construct
  source 1..20: mol_type = other DNA
ccagcactttgggaggccaa

SEQ ID NO: 25737 - DNA, 20 bp, synthetic construct
  source 1..20: mol_type = other DNA
cccagcactttgggaggcca

SEQ ID NO: 25738 - DNA, 20 bp, synthetic construct
  source 1..20: mol_type = other DNA
tcccagcactttgggaggcc

SEQ ID NO: 25739 - DNA, 20 bp, synthetic construct
  source 1..20: mol_type = other DNA
atcccagcactttgggaggc

SEQ ID NO: 25740 - DNA, 20 bp, synthetic construct
  source 1..20: mol_type = other DNA
aatcccagcactttgggagg

SEQ ID NO: 25741 - DNA, 20 bp, synthetic construct
  source 1..20: mol_type = other DNA
taatcccagcactttgggag

SEQ ID NO: 25742 - DNA, 20 bp, synthetic construct
  source 1..20: mol_type = other DNA
gtaatcccagcactttggga

SEQ ID NO: 25743 - DNA, 20 bp, synthetic construct
  source 1..20: mol_type = other DNA
tgtaatcccagcactttggg

SEQ ID NO: 25744 - DNA, 20 bp, synthetic construct
  source 1..20: mol_type = other DNA
ctgtaatcccagcactttgg

SEQ ID NO: 25745 - DNA, 20 bp, synthetic construct
  source 1..20: mol_type = other DNA
cctgtaatcccagcactttg

SEQ ID NO: 25746 - DNA, 20 bp, synthetic construct
  source 1..20: mol_type = other DNA
gcctgtaatcccagcacttt

SEQ ID NO: 25747 - DNA, 20 bp, synthetic construct
  source 1..20: mol_type = other DNA
cgcctgtaatcccagcactt

SEQ ID NO: 25748 - DNA, 20 bp, synthetic construct
  source 1..20: mol_type = other DNA
acgcctgtaatcccagcact

SEQ ID NO: 25749 - DNA, 20 bp, synthetic construct
  source 1..20: mol_type = other DNA
cacgcctgtaatcccagcac

SEQ ID NO: 25750 - DNA, 20 bp, synthetic construct
  source 1..20: mol_type = other DNA
tcacgcctgtaatcccagca

SEQ ID NO: 25751 - DNA, 20 bp, synthetic construct
  source 1..20: mol_type = other DNA
ctcacgcctgtaatcccagc

SEQ ID NO: 25752 - DNA, 20 bp, synthetic construct
  source 1..20: mol_type = other DNA
gctcacgcctgtaatcccag

SEQ ID NO: 25753 - DNA, 20 bp, synthetic construct
  source 1..20: mol_type = other DNA
ggctcacgcctgtaatccca

SEQ ID NO: 25754 - DNA, 20 bp, synthetic construct
  source 1..20: mol_type = other DNA
tggctcacgcctgtaatccc

SEQ ID NO: 25755 - DNA, 20 bp, synthetic construct
  source 1..20: mol_type = other DNA
gtggctcacgcctgtaatcc

SEQ ID NO: 25756 - DNA, 20 bp, synthetic construct
  source 1..20: mol_type = other DNA
agtggctcacgcctgtaatc

SEQ ID NO: 25757 - DNA, 20 bp, synthetic construct
  source 1..20: mol_type = other DNA
cagtggctcacgcctgtaat

SEQ ID NO: 25758 - DNA, 20 bp, synthetic construct
  source 1..20: mol_type = other DNA
gcagtggctcacgcctgtaa

SEQ ID NO: 25759 - DNA, 20 bp, synthetic construct
  source 1..20: mol_type = other DNA
cgcagtggctcacgcctgta

SEQ ID NO: 25760 - DNA, 20 bp, synthetic construct
  source 1..20: mol_type = other DNA
gcgcagtggctcacgcctgt

SEQ ID NO: 25761 - DNA, 20 bp, synthetic construct
  source 1..20: mol_type = other DNA
ggcgcagtggctcacgcctg

SEQ ID NO: 25762 - DNA, 20 bp, synthetic construct
  source 1..20: mol_type = other DNA
aggcgcagtggctcacgcct

SEQ ID NO: 25763 - DNA, 20 bp, synthetic construct
  source 1..20: mol_type = other DNA
caggcgcagtggctcacgcc

SEQ ID NO: 25764 - DNA, 20 bp, synthetic construct
  source 1..20: mol_type = other DNA
ccaggcgcagtggctcacgc

SEQ ID NO: 25765 - DNA, 20 bp, synthetic construct
  source 1..20: mol_type = other DNA
gccaggcgcagtggctcacg

SEQ ID NO: 25766 - DNA, 20 bp, synthetic construct
  source 1..20: mol_type = other DNA
agccaggcgcagtggctcac

SEQ ID NO: 25767 - DNA, 20 bp, synthetic construct
  source 1..20: mol_type = other DNA
cagccaggcgcagtggctca

SEQ ID NO: 25768 - DNA, 20 bp, synthetic construct
  source 1..20: mol_type = other DNA
tcagccaggcgcagtggctc

SEQ ID NO: 25769 - DNA, 20 bp, synthetic construct
  source 1..20: mol_type = other DNA
gtcagccaggcgcagtggct

SEQ ID NO: 25770 - DNA, 20 bp, synthetic construct
  source 1..20: mol_type = other DNA
agtcagccaggcgcagtggc

SEQ ID NO: 25771 - DNA, 20 bp, synthetic construct
  source 1..20: mol_type = other DNA
tagtcagccaggcgcagtgg

SEQ ID NO: 25772 - DNA, 20 bp, synthetic construct
  source 1..20: mol_type = other DNA
atagtcagccaggcgcagtg

SEQ ID NO: 25773 - DNA, 20 bp, synthetic construct
  source 1..20: mol_type = other DNA
aatagtcagccaggcgcagt

SEQ ID NO: 25774 - DNA, 20 bp, synthetic construct
  source 1..20: mol_type = other DNA
caatagtcagccaggcgcag

SEQ ID NO: 25775 - DNA, 20 bp, synthetic construct
  source 1..20: mol_type = other DNA
ccaatagtcagccaggcgca

SEQ ID NO: 25776 - DNA, 20 bp, synthetic construct
  source 1..20: mol_type = other DNA
accaatagtcagccaggcgc

SEQ ID NO: 25777 - DNA, 20 bp, synthetic construct
  source 1..20: mol_type = other DNA
aaccaatagtcagccaggcg

SEQ ID NO: 25778 - DNA, 20 bp, synthetic construct
  source 1..20: mol_type = other DNA
aaaccaatagtcagccaggc

SEQ ID NO: 25779 - DNA, 20 bp, synthetic construct
  source 1..20: mol_type = other DNA
aaaaccaatagtcagccagg

SEQ ID NO: 25780 - DNA, 20 bp, synthetic construct
  source 1..20: mol_type = other DNA
taaaaccaatagtcagccag

SEQ ID NO: 25781 - DNA, 20 bp, synthetic construct
  source 1..20: mol_type = other DNA
ataaaaccaatagtcagcca

SEQ ID NO: 25782 - DNA, 20 bp, synthetic construct
  source 1..20: mol_type = other DNA
aataaaaccaatagtcagcc

SEQ ID NO: 25783 - DNA, 20 bp, synthetic construct
  source 1..20: mol_type = other DNA
taataaaaccaatagtcagc

SEQ ID NO: 25784 - DNA, 20 bp, synthetic construct
  source 1..20: mol_type = other DNA
ataataaaaccaatagtcag

SEQ ID NO: 25785 - DNA, 20 bp, synthetic construct
  source 1..20: mol_type = other DNA
aataataaaaccaatagtca

SEQ ID NO: 25786 - DNA, 20 bp, synthetic construct
  source 1..20: mol_type = other DNA
taataataaaaccaatagtc

SEQ ID NO: 25787 - DNA, 20 bp, synthetic construct
  source 1..20: mol_type = other DNA
ttaataataaaaccaatagt

SEQ ID NO: 25788 - DNA, 20 bp, synthetic construct
  source 1..20: mol_type = other DNA
cttaataataaaaccaatag

SEQ ID NO: 25789 - DNA, 20 bp, synthetic construct
  source 1..20: mol_type = other DNA
gcttaataataaaaccaata

SEQ ID NO: 25790 - DNA, 20 bp, synthetic construct
  source 1..20: mol_type = other DNA
tgcttaataataaaaccaat

SEQ ID NO: 25791 - DNA, 20 bp, synthetic construct
  source 1..20: mol_type = other DNA
ctgcttaataataaaaccaa

SEQ ID NO: 25792 - DNA, 20 bp, synthetic construct
  source 1..20: mol_type = other DNA
actgcttaataataaaacca

SEQ ID NO: 25793 - DNA, 20 bp, synthetic construct
  source 1..20: mol_type = other DNA
tactgcttaataataaaacc

SEQ ID NO: 25794 - DNA, 20 bp, synthetic construct
  source 1..20: mol_type = other DNA
ctactgcttaataataaaac

SEQ ID NO: 25795 - DNA, 20 bp, synthetic construct
  source 1..20: mol_type = other DNA
actactgcttaataataaaa

SEQ ID NO: 25796 - DNA, 20 bp, synthetic construct
  source 1..20: mol_type = other DNA
tactactgcttaataataaa

SEQ ID NO: 25797 - DNA, 20 bp, synthetic construct
  source 1..20: mol_type = other DNA
ctactactgcttaataataa

SEQ ID NO: 25798 - DNA, 20 bp, synthetic construct
  source 1..20: mol_type = other DNA
actactactgcttaataata

SEQ ID NO: 25799 - DNA, 20 bp, synthetic construct
  source 1..20: mol_type = other DNA
aactactactgcttaataat

SEQ ID NO: 25800 - DNA, 20 bp, synthetic construct
  source 1..20: mol_type = other DNA
caactactactgcttaataa

SEQ ID NO: 25801 - DNA, 20 bp, synthetic construct
  source 1..20: mol_type = other DNA
tcaactactactgcttaata

SEQ ID NO: 25802 - DNA, 20 bp, synthetic construct
  source 1..20: mol_type = other DNA
gtcaactactactgcttaat

SEQ ID NO: 25803 - DNA, 20 bp, synthetic construct
  source 1..20: mol_type = other DNA
ggtcaactactactgcttaa

SEQ ID NO: 25804 - DNA, 20 bp, synthetic construct
  source 1..20: mol_type = other DNA
gggtcaactactactgctta

SEQ ID NO: 25805 - DNA, 20 bp, synthetic construct
  source 1..20: mol_type = other DNA
agggtcaactactactgctt

SEQ ID NO: 25806 - DNA, 20 bp, synthetic construct
  source 1..20: mol_type = other DNA
cagggtcaactactactgct

SEQ ID NO: 25807 - DNA, 20 bp, synthetic construct
  source 1..20: mol_type = other DNA
acagggtcaactactactgc

SEQ ID NO: 25808 - DNA, 20 bp, synthetic construct
  source 1..20: mol_type = other DNA
gacagggtcaactactactg

SEQ ID NO: 25809 - DNA, 20 bp, synthetic construct
  source 1..20: mol_type = other DNA
tgacagggtcaactactact

SEQ ID NO: 25810 - DNA, 20 bp, synthetic construct
  source 1..20: mol_type = other DNA
atgacagggtcaactactac

SEQ ID NO: 25811 - DNA, 20 bp, synthetic construct
  source 1..20: mol_type = other DNA
catgacagggtcaactacta

SEQ ID NO: 25812 - DNA, 20 bp, synthetic construct
  source 1..20: mol_type = other DNA
acatgacagggtcaactact

SEQ ID NO: 25813 - DNA, 20 bp, synthetic construct
  source 1..20: mol_type = other DNA
tacatgacagggtcaactac

SEQ ID NO: 25814 - DNA, 20 bp, synthetic construct
  source 1..20: mol_type = other DNA
ctacatgacagggtcaacta

SEQ ID NO: 25815 - DNA, 20 bp, synthetic construct
  source 1..20: mol_type = other DNA
tctacatgacagggtcaact

SEQ ID NO: 25816 - DNA, 20 bp, synthetic construct
  source 1..20: mol_type = other DNA
ttctacatgacagggtcaac

SEQ ID NO: 25817 - DNA, 20 bp, synthetic construct
  source 1..20: mol_type = other DNA
tttctacatgacagggtcaa

SEQ ID NO: 25818 - DNA, 20 bp, synthetic construct
  source 1..20: mol_type = other DNA
ctttctacatgacagggtca

SEQ ID NO: 25819 - DNA, 20 bp, synthetic construct
  source 1..20: mol_type = other DNA
gctttctacatgacagggtc

SEQ ID NO: 25820 - DNA, 20 bp, synthetic construct
  source 1..20: mol_type = other DNA
tgctttctacatgacagggt

SEQ ID NO: 25821 - DNA, 20 bp, synthetic construct
  source 1..20: mol_type = other DNA
atgctttctacatgacaggg

SEQ ID NO: 25822 - DNA, 20 bp, synthetic construct
  source 1..20: mol_type = other DNA
catgctttctacatgacagg

SEQ ID NO: 25823 - DNA, 20 bp, synthetic construct
  source 1..20: mol_type = other DNA
ccatgctttctacatgacag

SEQ ID NO: 25824 - DNA, 20 bp, synthetic construct
  source 1..20: mol_type = other DNA
gccatgctttctacatgaca

SEQ ID NO: 25825 - DNA, 20 bp, synthetic construct
  source 1..20: mol_type = other DNA
tgccatgctttctacatgac

SEQ ID NO: 25826 - DNA, 20 bp, synthetic construct
  source 1..20: mol_type = other DNA
atgccatgctttctacatga

SEQ ID NO: 25827 - DNA, 20 bp, synthetic construct
  source 1..20: mol_type = other DNA
aatgccatgctttctacatg

SEQ ID NO: 25828 - DNA, 20 bp, synthetic construct
  source 1..20: mol_type = other DNA
aaatgccatgctttctacat

SEQ ID NO: 25829 - DNA, 20 bp, synthetic construct
  source 1..20: mol_type = other DNA
taaatgccatgctttctaca

SEQ ID NO: 25830 - DNA, 20 bp, synthetic construct
  source 1..20: mol_type = other DNA
ataaatgccatgctttctac

SEQ ID NO: 25831 - DNA, 20 bp, synthetic construct
  source 1..20: mol_type = other DNA
tataaatgccatgctttcta

SEQ ID NO: 25832 - DNA, 20 bp, synthetic construct
  source 1..20: mol_type = other DNA
ctataaatgccatgctttct

SEQ ID NO: 25833 - DNA, 20 bp, synthetic construct
  source 1..20: mol_type = other DNA
cctataaatgccatgctttc

SEQ ID NO: 25834 - DNA, 20 bp, synthetic construct
  source 1..20: mol_type = other DNA
gcctataaatgccatgcttt

SEQ ID NO: 25835 - DNA, 20 bp, synthetic construct
  source 1..20: mol_type = other DNA
tgcctataaatgccatgctt

SEQ ID NO: 25836 - DNA, 20 bp, synthetic construct
  source 1..20: mol_type = other DNA
atgcctataaatgccatgct

SEQ ID NO: 25837 - DNA, 20 bp, synthetic construct
  source 1..20: mol_type = other DNA
tatgcctataaatgccatgc

SEQ ID NO: 25838 - DNA, 20 bp, synthetic construct
  source 1..20: mol_type = other DNA
gtatgcctataaatgccatg

SEQ ID NO: 25839 - DNA, 20 bp, synthetic construct
  source 1..20: mol_type = other DNA
ggtatgcctataaatgccat

SEQ ID NO: 25840 - DNA, 20 bp, synthetic construct
  source 1..20: mol_type = other DNA
tggtatgcctataaatgcca

SEQ ID NO: 25841 - DNA, 20 bp, synthetic construct
  source 1..20: mol_type = other DNA
gtggtatgcctataaatgcc

SEQ ID NO: 25842 - DNA, 20 bp, synthetic construct
  source 1..20: mol_type = other DNA
cgtggtatgcctataaatgc

SEQ ID NO: 25843 - DNA, 20 bp, synthetic construct
  source 1..20: mol_type = other DNA
acgtggtatgcctataaatg

SEQ ID NO: 25844 - DNA, 20 bp, synthetic construct
  source 1..20: mol_type = other DNA
aacgtggtatgcctataaat

SEQ ID NO: 25845 - DNA, 20 bp, synthetic construct
  source 1..20: mol_type = other DNA
aaacgtggtatgcctataaa

SEQ ID NO: 25846 - DNA, 20 bp, synthetic construct
  source 1..20: mol_type = other DNA
taaacgtggtatgcctataa

SEQ ID NO: 25847 - DNA, 20 bp, synthetic construct
  source 1..20: mol_type = other DNA
ttaaacgtggtatgcctata

SEQ ID NO: 25848 - DNA, 20 bp, synthetic construct
  source 1..20: mol_type = other DNA
attaaacgtggtatgcctat

SEQ ID NO: 25849 - DNA, 20 bp, synthetic construct
  source 1..20: mol_type = other DNA
aattaaacgtggtatgccta

SEQ ID NO: 25850 - DNA, 20 bp, synthetic construct
  source 1..20: mol_type = other DNA
aaattaaacgtggtatgcct

SEQ ID NO: 25851 - DNA, 20 bp, synthetic construct
  source 1..20: mol_type = other DNA
gaaattaaacgtggtatgcc

SEQ ID NO: 25852 - DNA, 20 bp, synthetic construct
  source 1..20: mol_type = other DNA
ggaaattaaacgtggtatgc

SEQ ID NO: 25853 - DNA, 20 bp, synthetic construct
  source 1..20: mol_type = other DNA
aggaaattaaacgtggtatg

SEQ ID NO: 25854 - DNA, 20 bp, synthetic construct
  source 1..20: mol_type = other DNA
gaggaaattaaacgtggtat

SEQ ID NO: 25855 - DNA, 20 bp, synthetic construct
  source 1..20: mol_type = other DNA
ggaggaaattaaacgtggta

SEQ ID NO: 25856 - DNA, 20 bp, synthetic construct
  source 1..20: mol_type = other DNA
gggaggaaattaaacgtggt

SEQ ID NO: 25857 - DNA, 20 bp, synthetic construct
  source 1..20: mol_type = other DNA
ggggaggaaattaaacgtgg

SEQ ID NO: 25858 - DNA, 20 bp, synthetic construct
  source 1..20: mol_type = other DNA
aggggaggaaattaaacgtg

SEQ ID NO: 25859 - DNA, 20 bp, synthetic construct
  source 1..20: mol_type = other DNA
aaggggaggaaattaaacgt

SEQ ID NO: 25860 - DNA, 20 bp, synthetic construct
  source 1..20: mol_type = other DNA
aaaggggaggaaattaaacg

SEQ ID NO: 25861 - DNA, 20 bp, synthetic construct
  source 1..20: mol_type = other DNA
aaaaggggaggaaattaaac

SEQ ID NO: 25862 - DNA, 20 bp, synthetic construct
  source 1..20: mol_type = other DNA
aaaaaggggaggaaattaaa

SEQ ID NO: 25863 - DNA, 20 bp, synthetic construct
  source 1..20: mol_type = other DNA
aaaaaaggggaggaaattaa

SEQ ID NO: 25864 - DNA, 20 bp, synthetic construct
  source 1..20: mol_type = other DNA
aaaaaaaggggaggaaatta

SEQ ID NO: 25865 - DNA, 20 bp, synthetic construct
  source 1..20: mol_type = other DNA
taaaaaaaggggaggaaatt

SEQ ID NO: 25866 - DNA, 20 bp, synthetic construct
  source 1..20: mol_type = other DNA
ataaaaaaaggggaggaaat

SEQ ID NO: 25867 - DNA, 20 bp, synthetic construct
  source 1..20: mol_type = other DNA
aataaaaaaaggggaggaaa

SEQ ID NO: 25868 - DNA, 20 bp, synthetic construct
  source 1..20: mol_type = other DNA
aaataaaaaaaggggaggaa

SEQ ID NO: 25869 - DNA, 20 bp, synthetic construct
  source 1..20: mol_type = other DNA
aaaataaaaaaaggggagga

SEQ ID NO: 25870 - DNA, 20 bp, synthetic construct
  source 1..20: mol_type = other DNA
aaaaataaaaaaaggggagg

SEQ ID NO: 25871 - DNA, 20 bp, synthetic construct
  source 1..20: mol_type = other DNA
caaaaataaaaaaaggggag

SEQ ID NO: 25872 - DNA, 20 bp, synthetic construct
  source 1..20: mol_type = other DNA
ccaaaaataaaaaaagggga

SEQ ID NO: 25873 - DNA, 20 bp, synthetic construct
  source 1..20: mol_type = other DNA
tccaaaaataaaaaaagggg

SEQ ID NO: 25874 - DNA, 20 bp, synthetic construct
  source 1..20: mol_type = other DNA
ctccaaaaataaaaaaaggg

SEQ ID NO: 25875 - DNA, 20 bp, synthetic construct
  source 1..20: mol_type = other DNA
actccaaaaataaaaaaagg

SEQ ID NO: 25876 - DNA, 20 bp, synthetic construct
  source 1..20: mol_type = other DNA
tactccaaaaataaaaaaag

SEQ ID NO: 25877 - DNA, 20 bp, synthetic construct
  source 1..20: mol_type = other DNA
gtactccaaaaataaaaaaa

SEQ ID NO: 25878 - DNA, 20 bp, synthetic construct
  source 1..20: mol_type = other DNA
ggtactccaaaaataaaaaa

SEQ ID NO: 25879 - DNA, 20 bp, synthetic construct
  source 1..20: mol_type = other DNA
aggtactccaaaaataaaaa

SEQ ID NO: 25880 - DNA, 20 bp, synthetic construct
  source 1..20: mol_type = other DNA
gaggtactccaaaaataaaa

SEQ ID NO: 25881 - DNA, 20 bp, synthetic construct
  source 1..20: mol_type = other DNA
ggaggtactccaaaaataaa

SEQ ID NO: 25882 - DNA, 20 bp, synthetic construct
  source 1..20: mol_type = other DNA
aggaggtactccaaaaataa

SEQ ID NO: 25883 - DNA, 20 bp, synthetic construct
  source 1..20: mol_type = other DNA
caggaggtactccaaaaata

SEQ ID NO: 25884 - DNA, 20 bp, synthetic construct
  source 1..20: mol_type = other DNA
gcaggaggtactccaaaaat

SEQ ID NO: 25885 - DNA, 20 bp, synthetic construct
  source 1..20: mol_type = other DNA
agcaggaggtactccaaaaa

SEQ ID NO: 25886 - DNA, 20 bp, synthetic construct
  source 1..20: mol_type = other DNA
aagcaggaggtactccaaaa

SEQ ID NO: 25887 - DNA, 20 bp, synthetic construct
  source 1..20: mol_type = other DNA
caagcaggaggtactccaaa

SEQ ID NO: 25888 - DNA, 20 bp, synthetic construct
  source 1..20: mol_type = other DNA
acaagcaggaggtactccaa

SEQ ID NO: 25889 - DNA, 20 bp, synthetic construct
  source 1..20: mol_type = other DNA
cacaagcaggaggtactcca

SEQ ID NO: 25890 - DNA, 20 bp, synthetic construct
  source 1..20: mol_type = other DNA
tcacaagcaggaggtactcc

SEQ ID NO: 25891 - DNA, 20 bp, synthetic construct
  source 1..20: mol_type = other DNA
ctcacaagcaggaggtactc

SEQ ID NO: 25892 - DNA, 20 bp, synthetic construct
  source 1..20: mol_type = other DNA
cctcacaagcaggaggtact

SEQ ID NO: 25893 - DNA, 20 bp, synthetic construct
  source 1..20: mol_type = other DNA
gcctcacaagcaggaggtac

SEQ ID NO: 25894 - DNA, 20 bp, synthetic construct
  source 1..20: mol_type = other DNA
agcctcacaagcaggaggta

SEQ ID NO: 25895 - DNA, 20 bp, synthetic construct
  source 1..20: mol_type = other DNA
aagcctcacaagcaggaggt

SEQ ID NO: 25896 - DNA, 20 bp, synthetic construct
  source 1..20: mol_type = other DNA
caagcctcacaagcaggagg

SEQ ID NO: 25897 - DNA, 20 bp, synthetic construct
  source 1..20: mol_type = other DNA
ccaagcctcacaagcaggag

SEQ ID NO: 25898 - DNA, 20 bp, synthetic construct
  source 1..20: mol_type = other DNA
cccaagcctcacaagcagga

SEQ ID NO: 25899 - DNA, 20 bp, synthetic construct
  source 1..20: mol_type = other DNA
tcccaagcctcacaagcagg

SEQ ID NO: 25900 - DNA, 20 bp, synthetic construct
  source 1..20: mol_type = other DNA
ttcccaagcctcacaagcag

SEQ ID NO: 25901 - DNA, 20 bp, synthetic construct
  source 1..20: mol_type = other DNA
attcccaagcctcacaagca

SEQ ID NO: 25902 - DNA, 20 bp, synthetic construct
  source 1..20: mol_type = other DNA
tattcccaagcctcacaagc

SEQ ID NO: 25903 - DNA, 20 bp, synthetic construct
  source 1..20: mol_type = other DNA
gtattcccaagcctcacaag

SEQ ID NO: 25904 - DNA, 20 bp, synthetic construct
  source 1..20: mol_type = other DNA
tgtattcccaagcctcacaa

SEQ ID NO: 25905 - DNA, 20 bp, synthetic construct
  source 1..20: mol_type = other DNA
ctgtattcccaagcctcaca

SEQ ID NO: 25906 - DNA, 20 bp, synthetic construct
  source 1..20: mol_type = other DNA
actgtattcccaagcctcac

SEQ ID NO: 25907 - DNA, 20 bp, synthetic construct
  source 1..20: mol_type = other DNA
tactgtattcccaagcctca

SEQ ID NO: 25908 - DNA, 20 bp, synthetic construct
  source 1..20: mol_type = other DNA
ctactgtattcccaagcctc

SEQ ID NO: 25909 - DNA, 20 bp, synthetic construct
  source 1..20: mol_type = other DNA
actactgtattcccaagcct

SEQ ID NO: 25910 - DNA, 20 bp, synthetic construct
  source 1..20: mol_type = other DNA
cactactgtattcccaagcc

SEQ ID NO: 25911 - DNA, 20 bp, synthetic construct
  source 1..20: mol_type = other DNA
tcactactgtattcccaagc

SEQ ID NO: 25912 - DNA, 20 bp, synthetic construct
  source 1..20: mol_type = other DNA
ttcactactgtattcccaag

SEQ ID NO: 25913 - DNA, 20 bp, synthetic construct
  source 1..20: mol_type = other DNA
attcactactgtattcccaa

SEQ ID NO: 25914 - DNA, 20 bp, synthetic construct
  source 1..20: mol_type = other DNA
tattcactactgtattccca

SEQ ID NO: 25915 - DNA, 20 bp, synthetic construct
  source 1..20: mol_type = other DNA
ttattcactactgtattccc

SEQ ID NO: 25916 - DNA, 20 bp, synthetic construct
  source 1..20: mol_type = other DNA
cttattcactactgtattcc

SEQ ID NO: 25917 - DNA, 20 bp, synthetic construct
  source 1..20: mol_type = other DNA
gcttattcactactgtattc

SEQ ID NO: 25918 - DNA, 20 bp, synthetic construct
  source 1..20: mol_type = other DNA
ggcttattcactactgtatt

SEQ ID NO: 25919 - DNA, 20 bp, synthetic construct
  source 1..20: mol_type = other DNA
tggcttattcactactgtat

SEQ ID NO: 25920 - DNA, 20 bp, synthetic construct
  source 1..20: mol_type = other DNA
ctggcttattcactactgta

SEQ ID NO: 25921 - DNA, 20 bp, synthetic construct
  source 1..20: mol_type = other DNA
tctggcttattcactactgt

SEQ ID NO: 25922 - DNA, 20 bp, synthetic construct
  source 1..20: mol_type = other DNA
atctggcttattcactactg

SEQ ID NO: 25923 - DNA, 20 bp, synthetic construct
  source 1..20: mol_type = other DNA
catctggcttattcactact

SEQ ID NO: 25924 - DNA, 20 bp, synthetic construct
  source 1..20: mol_type = other DNA
tcatctggcttattcactac

SEQ ID NO: 25925 - DNA, 20 bp, synthetic construct
  source 1..20: mol_type = other DNA
ctcatctggcttattcacta

SEQ ID NO: 25926 - DNA, 20 bp, synthetic construct
  source 1..20: mol_type = other DNA
cctcatctggcttattcact

SEQ ID NO: 25927 - DNA, 20 bp, synthetic construct
  source 1..20: mol_type = other DNA
acctcatctggcttattcac

SEQ ID NO: 25928 - DNA, 20 bp, synthetic construct
  source 1..20: mol_type = other DNA
gacctcatctggcttattca

SEQ ID NO: 25929 - DNA, 20 bp, synthetic construct
  source 1..20: mol_type = other DNA
agacctcatctggcttattc

SEQ ID NO: 25930 - DNA, 20 bp, synthetic construct
  source 1..20: mol_type = other DNA
gagacctcatctggcttatt

SEQ ID NO: 25931 - DNA, 20 bp, synthetic construct
  source 1..20: mol_type = other DNA
agagacctcatctggcttat

SEQ ID NO: 25932 - DNA, 20 bp, synthetic construct
  source 1..20: mol_type = other DNA
gagagacctcatctggctta

SEQ ID NO: 25933 - DNA, 20 bp, synthetic construct
  source 1..20: mol_type = other DNA
agagagacctcatctggctt

SEQ ID NO: 25934 - DNA, 20 bp, synthetic construct
  source 1..20: mol_type = other DNA
gagagagacctcatctggct

SEQ ID NO: 25935 - DNA, 20 bp, synthetic construct
  source 1..20: mol_type = other DNA
agagagagacctcatctggc

SEQ ID NO: 25936 - DNA, 20 bp, synthetic construct
  source 1..20: mol_type = other DNA
aagagagagacctcatctgg

SEQ ID NO: 25937 - DNA, 20 bp, synthetic construct
  source 1..20: mol_type = other DNA
aaagagagagacctcatctg

SEQ ID NO: 25938 - DNA, 20 bp, synthetic construct
  source 1..20: mol_type = other DNA
aaaagagagagacctcatct

SEQ ID NO: 25939 - DNA, 20 bp, synthetic construct
  source 1..20: mol_type = other DNA
aaaaagagagagacctcatc

SEQ ID NO: 25940 - DNA, 20 bp, synthetic construct
  source 1..20: mol_type = other DNA
caaaaagagagagacctcat

SEQ ID NO: 25941 - DNA, 20 bp, synthetic construct
  source 1..20: mol_type = other DNA
ccaaaaagagagagacctca

SEQ ID NO: 25942 - DNA, 20 bp, synthetic construct
  source 1..20: mol_type = other DNA
tccaaaaagagagagacctc

SEQ ID NO: 25943 - DNA, 20 bp, synthetic construct
  source 1..20: mol_type = other DNA
ctccaaaaagagagagacct

SEQ ID NO: 25944 - DNA, 20 bp, synthetic construct
  source 1..20: mol_type = other DNA
gctccaaaaagagagagacc

SEQ ID NO: 25945 - DNA, 20 bp, synthetic construct
  source 1..20: mol_type = other DNA
agctccaaaaagagagagac

SEQ ID NO: 25946 - DNA, 20 bp, synthetic construct
  source 1..20: mol_type = other DNA
aagctccaaaaagagagaga

SEQ ID NO: 25947 - DNA, 20 bp, synthetic construct
  source 1..20: mol_type = other DNA
taagctccaaaaagagagag

SEQ ID NO: 25948 - DNA, 20 bp, synthetic construct
  source 1..20: mol_type = other DNA
ataagctccaaaaagagaga

SEQ ID NO: 25949 - DNA, 20 bp, synthetic construct
  source 1..20: mol_type = other DNA
cataagctccaaaaagagag

SEQ ID NO: 25950 - DNA, 20 bp, synthetic construct
  source 1..20: mol_type = other DNA
acataagctccaaaaagaga

SEQ ID NO: 25951 - DNA, 20 bp, synthetic construct
  source 1..20: mol_type = other DNA
cacataagctccaaaaagag

SEQ ID NO: 25952 - DNA, 20 bp, synthetic construct
  source 1..20: mol_type = other DNA
ccacataagctccaaaaaga

SEQ ID NO: 25953 - DNA, 20 bp, synthetic construct
  source 1..20: mol_type = other DNA
accacataagctccaaaaag

SEQ ID NO: 25954 - DNA, 20 bp, synthetic construct
  source 1..20: mol_type = other DNA
taccacataagctccaaaaa

SEQ ID NO: 25955 - DNA, 20 bp, synthetic construct
  source 1..20: mol_type = other DNA
ctaccacataagctccaaaa

SEQ ID NO: 25956 - DNA, 20 bp, synthetic construct
  source 1..20: mol_type = other DNA
actaccacataagctccaaa

SEQ ID NO: 25957 - DNA, 20 bp, synthetic construct
  source 1..20: mol_type = other DNA
tactaccacataagctccaa

SEQ ID NO: 25958 - DNA, 20 bp, synthetic construct
  source 1..20: mol_type = other DNA
atactaccacataagctcca

SEQ ID NO: 25959 - DNA, 20 bp, synthetic construct
  source 1..20: mol_type = other DNA
tatactaccacataagctcc

SEQ ID NO: 25960 - DNA, 20 bp, synthetic construct
  source 1..20: mol_type = other DNA
ctatactaccacataagctc

SEQ ID NO: 25961 - DNA, 20 bp, synthetic construct
  source 1..20: mol_type = other DNA
tctatactaccacataagct

SEQ ID NO: 25962 - DNA, 20 bp, synthetic construct
  source 1..20: mol_type = other DNA
gtctatactaccacataagc

SEQ ID NO: 25963 - DNA, 20 bp, synthetic construct
  source 1..20: mol_type = other DNA
agtctatactaccacataag

SEQ ID NO: 25964 - DNA, 20 bp, synthetic construct
  source 1..20: mol_type = other DNA
tagtctatactaccacataa

SEQ ID NO: 25965 - DNA, 20 bp, synthetic construct
  source 1..20: mol_type = other DNA
ctagtctatactaccacata

SEQ ID NO: 25966 - DNA, 20 bp, synthetic construct
  source 1..20: mol_type = other DNA
cctagtctatactaccacat

SEQ ID NO: 25967 - DNA, 20 bp, synthetic construct
  source 1..20: mol_type = other DNA
gcctagtctatactaccaca

SEQ ID NO: 25968 - DNA, 20 bp, synthetic construct
  source 1..20: mol_type = other DNA
tgcctagtctatactaccac

SEQ ID NO: 25969 - DNA, 20 bp, synthetic construct
  source 1..20: mol_type = other DNA
ctgcctagtctatactacca

SEQ ID NO: 25970 - DNA, 20 bp, synthetic construct
  source 1..20: mol_type = other DNA
tctgcctagtctatactacc

SEQ ID NO: 25971 - DNA, 20 bp, synthetic construct
  source 1..20: mol_type = other DNA
ttctgcctagtctatactac

SEQ ID NO: 25972 - DNA, 20 bp, synthetic construct
  source 1..20: mol_type = other DNA
tttctgcctagtctatacta

SEQ ID NO: 25973 - DNA, 20 bp, synthetic construct
  source 1..20: mol_type = other DNA
ctttctgcctagtctatact

SEQ ID NO: 25974 - DNA, 20 bp, synthetic construct
  source 1..20: mol_type = other DNA
actttctgcctagtctatac

SEQ ID NO: 25975 - DNA, 20 bp, synthetic construct
  source 1..20: mol_type = other DNA
aactttctgcctagtctata

SEQ ID NO: 25976 - DNA, 20 bp, synthetic construct
  source 1..20: mol_type = other DNA
gaactttctgcctagtctat

SEQ ID NO: 25977 - DNA, 20 bp, synthetic construct
  source 1..20: mol_type = other DNA
agaactttctgcctagtcta

SEQ ID NO: 25978 - DNA, 20 bp, synthetic construct
  source 1..20: mol_type = other DNA
gagaactttctgcctagtct

SEQ ID NO: 25979 - DNA, 20 bp, synthetic construct
  source 1..20: mol_type = other DNA
tgagaactttctgcctagtc

SEQ ID NO: 25980 - DNA, 20 bp, synthetic construct
  source 1..20: mol_type = other DNA
atgagaactttctgcctagt

SEQ ID NO: 25981 - DNA, 20 bp, synthetic construct
  source 1..20: mol_type = other DNA
aatgagaactttctgcctag

SEQ ID NO: 25982 - DNA, 20 bp, synthetic construct
  source 1..20: mol_type = other DNA
caatgagaactttctgccta

SEQ ID NO: 25983 - DNA, 20 bp, synthetic construct
  source 1..20: mol_type = other DNA
gcaatgagaactttctgcct

SEQ ID NO: 25984 - DNA, 20 bp, synthetic construct
  source 1..20: mol_type = other DNA
ggcaatgagaactttctgcc

SEQ ID NO: 25985 - DNA, 20 bp, synthetic construct
  source 1..20: mol_type = other DNA
gggcaatgagaactttctgc

SEQ ID NO: 25986 - DNA, 20 bp, synthetic construct
  source 1..20: mol_type = other DNA
ggggcaatgagaactttctg

SEQ ID NO: 25987 - DNA, 20 bp, synthetic construct
  source 1..20: mol_type = other DNA
aggggcaatgagaactttct

SEQ ID NO: 25988 - DNA, 20 bp, synthetic construct
  source 1..20: mol_type = other DNA
caggggcaatgagaactttc

SEQ ID NO: 25989 - DNA, 20 bp, synthetic construct
  source 1..20: mol_type = other DNA
gcaggggcaatgagaacttt

SEQ ID NO: 25990 - DNA, 20 bp, synthetic construct
  source 1..20: mol_type = other DNA
ggcaggggcaatgagaactt

SEQ ID NO: 25991 - DNA, 20 bp, synthetic construct
  source 1..20: mol_type = other DNA
tggcaggggcaatgagaact

SEQ ID NO: 25992 - DNA, 20 bp, synthetic construct
  source 1..20: mol_type = other DNA
gtggcaggggcaatgagaac

SEQ ID NO: 25993 - DNA, 20 bp, synthetic construct
  source 1..20: mol_type = other DNA
ggtggcaggggcaatgagaa

SEQ ID NO: 25994 - DNA, 20 bp, synthetic construct
  source 1..20: mol_type = other DNA
aggtggcaggggcaatgaga

SEQ ID NO: 25995 - DNA, 20 bp, synthetic construct
  source 1..20: mol_type = other DNA
aaggtggcaggggcaatgag

SEQ ID NO: 25996 - DNA, 20 bp, synthetic construct
  source 1..20: mol_type = other DNA
taaggtggcaggggcaatga

SEQ ID NO: 25997 - DNA, 20 bp, synthetic construct
  source 1..20: mol_type = other DNA
ataaggtggcaggggcaatg

SEQ ID NO: 25998 - DNA, 20 bp, synthetic construct
  source 1..20: mol_type = other DNA
cataaggtggcaggggcaat

SEQ ID NO: 25999 - DNA, 20 bp, synthetic construct
  source 1..20: mol_type = other DNA
ccataaggtggcaggggcaa

SEQ ID NO: 26000 - DNA, 20 bp, synthetic construct
  source 1..20: mol_type = other DNA
gccataaggtggcaggggca

SEQ ID NO: 26001 - DNA, 20 bp, synthetic construct
  source 1..20: mol_type = other DNA
tgccataaggtggcaggggc

SEQ ID NO: 26002 - DNA, 20 bp, synthetic construct
  source 1..20: mol_type = other DNA
atgccataaggtggcagggg

SEQ ID NO: 26003 - DNA, 20 bp, synthetic construct
  source 1..20: mol_type = other DNA
aatgccataaggtggcaggg

SEQ ID NO: 26004 - DNA, 20 bp, synthetic construct
  source 1..20: mol_type = other DNA
caatgccataaggtggcagg

SEQ ID NO: 26005 - DNA, 20 bp, synthetic construct
  source 1..20: mol_type = other DNA
tcaatgccataaggtggcag

SEQ ID NO: 26006 - DNA, 20 bp, synthetic construct
  source 1..20: mol_type = other DNA
ctcaatgccataaggtggca

SEQ ID NO: 26007 - DNA, 20 bp, synthetic construct
  source 1..20: mol_type = other DNA
cctcaatgccataaggtggc

SEQ ID NO: 26008 - DNA, 20 bp, synthetic construct
  source 1..20: mol_type = other DNA
acctcaatgccataaggtgg

SEQ ID NO: 26009 - DNA, 20 bp, synthetic construct
  source 1..20: mol_type = other DNA
cacctcaatgccataaggtg

SEQ ID NO: 26010 - DNA, 20 bp, synthetic construct
  source 1..20: mol_type = other DNA
acacctcaatgccataaggt

SEQ ID NO: 26011 - DNA, 20 bp, synthetic construct
  source 1..20: mol_type = other DNA
aacacctcaatgccataagg

SEQ ID NO: 26012 - DNA, 20 bp, synthetic construct
  source 1..20: mol_type = other DNA
aaacacctcaatgccataag

SEQ ID NO: 26013 - DNA, 20 bp, synthetic construct
  source 1..20: mol_type = other DNA
caaacacctcaatgccataa

SEQ ID NO: 26014 - DNA, 20 bp, synthetic construct
  source 1..20: mol_type = other DNA
tcaaacacctcaatgccata

SEQ ID NO: 26015 - DNA, 20 bp, synthetic construct
  source 1..20: mol_type = other DNA
ctcaaacacctcaatgccat

SEQ ID NO: 26016 - DNA, 20 bp, synthetic construct
  source 1..20: mol_type = other DNA
tctcaaacacctcaatgcca

SEQ ID NO: 26017 - DNA, 20 bp, synthetic construct
  source 1..20: mol_type = other DNA
atctcaaacacctcaatgcc

SEQ ID NO: 26018 - DNA, 20 bp, synthetic construct
  source 1..20: mol_type = other DNA
catctcaaacacctcaatgc

SEQ ID NO: 26019 - DNA, 20 bp, synthetic construct
  source 1..20: mol_type = other DNA
gcatctcaaacacctcaatg

SEQ ID NO: 26020 - DNA, 20 bp, synthetic construct
  source 1..20: mol_type = other DNA
agcatctcaaacacctcaat

SEQ ID NO: 26021 - DNA, 20 bp, synthetic construct
  source 1..20: mol_type = other DNA
cagcatctcaaacacctcaa

SEQ ID NO: 26022 - DNA, 20 bp, synthetic construct
  source 1..20: mol_type = other DNA
tcagcatctcaaacacctca

SEQ ID NO: 26023 - DNA, 20 bp, synthetic construct
  source 1..20: mol_type = other DNA
atcagcatctcaaacacctc

SEQ ID NO: 26024 - DNA, 20 bp, synthetic construct
  source 1..20: mol_type = other DNA
catcagcatctcaaacacct

SEQ ID NO: 26025 - DNA, 20 bp, synthetic construct
  source 1..20: mol_type = other DNA
acatcagcatctcaaacacc

SEQ ID NO: 26026 - DNA, 20 bp, synthetic construct
  source 1..20: mol_type = other DNA
aacatcagcatctcaaacac

SEQ ID NO: 26027 - DNA, 20 bp, synthetic construct
  source 1..20: mol_type = other DNA
aaacatcagcatctcaaaca

SEQ ID NO: 26028 - DNA, 20 bp, synthetic construct
  source 1..20: mol_type = other DNA
taaacatcagcatctcaaac

SEQ ID NO: 26029 - DNA, 20 bp, synthetic construct
  source 1..20: mol_type = other DNA
gtaaacatcagcatctcaaa

SEQ ID NO: 26030 - DNA, 20 bp, synthetic construct
  source 1..20: mol_type = other DNA
agtaaacatcagcatctcaa

SEQ ID NO: 26031 - DNA, 20 bp, synthetic construct
  source 1..20: mol_type = other DNA
aagtaaacatcagcatctca

SEQ ID NO: 26032 - DNA, 20 bp, synthetic construct
  source 1..20: mol_type = other DNA
gaagtaaacatcagcatctc

SEQ ID NO: 26033 - DNA, 20 bp, synthetic construct
  source 1..20: mol_type = other DNA
agaagtaaacatcagcatct

SEQ ID NO: 26034 - DNA, 20 bp, synthetic construct
  source 1..20: mol_type = other DNA
cagaagtaaacatcagcatc

SEQ ID NO: 26035 - DNA, 20 bp, synthetic construct
  source 1..20: mol_type = other DNA
acagaagtaaacatcagcat

SEQ ID NO: 26036 - DNA, 20 bp, synthetic construct
  source 1..20: mol_type = other DNA
gacagaagtaaacatcagca

SEQ ID NO: 26037 - DNA, 20 bp, synthetic construct
  source 1..20: mol_type = other DNA
agacagaagtaaacatcagc

SEQ ID NO: 26038 - DNA, 20 bp, synthetic construct
  source 1..20: mol_type = other DNA
gagacagaagtaaacatcag

SEQ ID NO: 26039 - DNA, 20 bp, synthetic construct
  source 1..20: mol_type = other DNA
tgagacagaagtaaacatca

SEQ ID NO: 26040 - DNA, 20 bp, synthetic construct
  source 1..20: mol_type = other DNA
atgagacagaagtaaacatc

SEQ ID NO: 26041 - DNA, 20 bp, synthetic construct
  source 1..20: mol_type = other DNA
tatgagacagaagtaaacat

SEQ ID NO: 26042 - DNA, 20 bp, synthetic construct
  source 1..20: mol_type = other DNA
ttatgagacagaagtaaaca

SEQ ID NO: 26043 - DNA, 20 bp, synthetic construct
  source 1..20: mol_type = other DNA
tttatgagacagaagtaaac

SEQ ID NO: 26044 - DNA, 20 bp, synthetic construct
  source 1..20: mol_type = other DNA
ttttatgagacagaagtaaa

SEQ ID NO: 26045 - DNA, 20 bp, synthetic construct
  source 1..20: mol_type = other DNA
attttatgagacagaagtaa

SEQ ID NO: 26046 - DNA, 20 bp, synthetic construct
  source 1..20: mol_type = other DNA
gattttatgagacagaagta

SEQ ID NO: 26047 - DNA, 20 bp, synthetic construct
  source 1..20: mol_type = other DNA
agattttatgagacagaagt

SEQ ID NO: 26048 - DNA, 20 bp, synthetic construct
  source 1..20: mol_type = other DNA
aagattttatgagacagaag

SEQ ID NO: 26049 - DNA, 20 bp, synthetic construct
  source 1..20: mol_type = other DNA
caagattttatgagacagaa

SEQ ID NO: 26050 - DNA, 20 bp, synthetic construct
  source 1..20: mol_type = other DNA
tcaagattttatgagacaga

SEQ ID NO: 26051 - DNA, 20 bp, synthetic construct
  source 1..20: mol_type = other DNA
ttcaagattttatgagacag

SEQ ID NO: 26052 - DNA, 20 bp, synthetic construct
  source 1..20: mol_type = other DNA
tttcaagattttatgagaca

SEQ ID NO: 26053 - DNA, 20 bp, synthetic construct
  source 1..20: mol_type = other DNA
ctttcaagattttatgagac

SEQ ID NO: 26054 - DNA, 20 bp, synthetic construct
  source 1..20: mol_type = other DNA
cctttcaagattttatgaga

SEQ ID NO: 26055 - DNA, 20 bp, synthetic construct
  source 1..20: mol_type = other DNA
tcctttcaagattttatgag

SEQ ID NO: 26056 - DNA, 20 bp, synthetic construct
  source 1..20: mol_type = other DNA
ctcctttcaagattttatga

SEQ ID NO: 26057 - DNA, 20 bp, synthetic construct
  source 1..20: mol_type = other DNA
actcctttcaagattttatg

SEQ ID NO: 26058 - DNA, 20 bp, synthetic construct
  source 1..20: mol_type = other DNA
aactcctttcaagattttat

SEQ ID NO: 26059 - DNA, 20 bp, synthetic construct
  source 1..20: mol_type = other DNA
gaactcctttcaagatttta

SEQ ID NO: 26060 - DNA, 20 bp, synthetic construct
  source 1..20: mol_type = other DNA
agaactcctttcaagatttt

SEQ ID NO: 26061 - DNA, 20 bp, synthetic construct
  source 1..20: mol_type = other DNA
aagaactcctttcaagattt

SEQ ID NO: 26062 - DNA, 20 bp, synthetic construct
  source 1..20: mol_type = other DNA
aaagaactcctttcaagatt

SEQ ID NO: 26063 - DNA, 20 bp, synthetic construct
  source 1..20: mol_type = other DNA
aaaagaactcctttcaagat

SEQ ID NO: 26064 - DNA, 20 bp, synthetic construct
  source 1..20: mol_type = other DNA
taaaagaactcctttcaaga

SEQ ID NO: 26065 - DNA, 20 bp, synthetic construct
  source 1..20: mol_type = other DNA
ctaaaagaactcctttcaag

SEQ ID NO: 26066 - DNA, 20 bp, synthetic construct
  source 1..20: mol_type = other DNA
tctaaaagaactcctttcaa

SEQ ID NO: 26067 - DNA, 20 bp, synthetic construct
  source 1..20: mol_type = other DNA
atctaaaagaactcctttca

SEQ ID NO: 26068 - DNA, 20 bp, synthetic construct
  source 1..20: mol_type = other DNA
catctaaaagaactcctttc

SEQ ID NO: 26069 - DNA, 20 bp, synthetic construct
  source 1..20: mol_type = other DNA
tcatctaaaagaactccttt

SEQ ID NO: 26070 - DNA, 20 bp, synthetic construct
  source 1..20: mol_type = other DNA
ttcatctaaaagaactcctt

SEQ ID NO: 26071 - DNA, 20 bp, synthetic construct
  source 1..20: mol_type = other DNA
cttcatctaaaagaactcct

SEQ ID NO: 26072 - DNA, 20 bp, synthetic construct
  source 1..20: mol_type = other DNA
tcttcatctaaaagaactcc

SEQ ID NO: 26073 - DNA, 20 bp, synthetic construct
  source 1..20: mol_type = other DNA
ctcttcatctaaaagaactc

SEQ ID NO: 26074 - DNA, 20 bp, synthetic construct
  source 1..20: mol_type = other DNA
cctcttcatctaaaagaact

SEQ ID NO: 26075 - DNA, 20 bp, synthetic construct
  source 1..20: mol_type = other DNA
tcctcttcatctaaaagaac

SEQ ID NO: 26076 - DNA, 20 bp, synthetic construct
  source 1..20: mol_type = other DNA
ttcctcttcatctaaaagaa

SEQ ID NO: 26077 - DNA, 20 bp, synthetic construct
  source 1..20: mol_type = other DNA
tttcctcttcatctaaaaga

SEQ ID NO: 26078 - DNA, 20 bp, synthetic construct
  source 1..20: mol_type = other DNA
ttttcctcttcatctaaaag

SEQ ID NO: 26079 - DNA, 20 bp, synthetic construct
  source 1..20: mol_type = other DNA
gttttcctcttcatctaaaa

SEQ ID NO: 26080 - DNA, 20 bp, synthetic construct
  source 1..20: mol_type = other DNA
tgttttcctcttcatctaaa

SEQ ID NO: 26081 - DNA, 20 bp, synthetic construct
  source 1..20: mol_type = other DNA
ttgttttcctcttcatctaa

SEQ ID NO: 26082 - DNA, 20 bp, synthetic construct
  source 1..20: mol_type = other DNA
tttgttttcctcttcatcta

SEQ ID NO: 26083 - DNA, 20 bp, synthetic construct
  source 1..20: mol_type = other DNA
ttttgttttcctcttcatct

SEQ ID NO: 26084 - DNA, 20 bp, synthetic construct
  source 1..20: mol_type = other DNA
attttgttttcctcttcatc

SEQ ID NO: 26085 - DNA, 20 bp, synthetic construct
  source 1..20: mol_type = other DNA
gattttgttttcctcttcat

SEQ ID NO: 26086 - DNA, 20 bp, synthetic construct
  source 1..20: mol_type = other DNA
tgattttgttttcctcttca

SEQ ID NO: 26087 - DNA, 20 bp, synthetic construct
  source 1..20: mol_type = other DNA
ctgattttgttttcctcttc

SEQ ID NO: 26088 - DNA, 20 bp, synthetic construct
  source 1..20: mol_type = other DNA
tctgattttgttttcctctt

SEQ ID NO: 26089 - DNA, 20 bp, synthetic construct
  source 1..20: mol_type = other DNA
ttctgattttgttttcctct

SEQ ID NO: 26090 - DNA, 20 bp, synthetic construct
  source 1..20: mol_type = other DNA
cttctgattttgttttcctc

SEQ ID NO: 26091 - DNA, 20 bp, synthetic construct
  source 1..20: mol_type = other DNA
tcttctgattttgttttcct

SEQ ID NO: 26092 - DNA, 20 bp, synthetic construct
  source 1..20: mol_type = other DNA
ttcttctgattttgttttcc

SEQ ID NO: 26093 - DNA, 20 bp, synthetic construct
  source 1..20: mol_type = other DNA
attcttctgattttgttttc

SEQ ID NO: 26094 - DNA, 20 bp, synthetic construct
  source 1..20: mol_type = other DNA
cattcttctgattttgtttt

SEQ ID NO: 26095 - DNA, 20 bp, synthetic construct
  source 1..20: mol_type = other DNA
ccattcttctgattttgttt

SEQ ID NO: 26096 - DNA, 20 bp, synthetic construct
  source 1..20: mol_type = other DNA
cccattcttctgattttgtt

SEQ ID NO: 26097 - DNA, 20 bp, synthetic construct
  source 1..20: mol_type = other DNA
gcccattcttctgattttgt

SEQ ID NO: 26098 - DNA, 20 bp, synthetic construct
  source 1..20: mol_type = other DNA
ggcccattcttctgattttg

SEQ ID NO: 26099 - DNA, 20 bp, synthetic construct
  source 1..20: mol_type = other DNA
aggcccattcttctgatttt

SEQ ID NO: 26100 - DNA, 20 bp, synthetic construct
  source 1..20: mol_type = other DNA
caggcccattcttctgattt

SEQ ID NO: 26101 - DNA, 20 bp, synthetic construct
  source 1..20: mol_type = other DNA
ccaggcccattcttctgatt

SEQ ID NO: 26102 - DNA, 20 bp, synthetic construct
  source 1..20: mol_type = other DNA
cccaggcccattcttctgat

SEQ ID NO: 26103 - DNA, 20 bp, synthetic construct
  source 1..20: mol_type = other DNA
acccaggcccattcttctga

SEQ ID NO: 26104 - DNA, 20 bp, synthetic construct
  source 1..20: mol_type = other DNA
gacccaggcccattcttctg

SEQ ID NO: 26105 - DNA, 20 bp, synthetic construct
  source 1..20: mol_type = other DNA
tgacccaggcccattcttct

SEQ ID NO: 26106 - DNA, 20 bp, synthetic construct
  source 1..20: mol_type = other DNA
atgacccaggcccattcttc

SEQ ID NO: 26107 - DNA, 20 bp, synthetic construct
  source 1..20: mol_type = other DNA
catgacccaggcccattctt

SEQ ID NO: 26108 - DNA, 20 bp, synthetic construct
  source 1..20: mol_type = other DNA
acatgacccaggcccattct

SEQ ID NO: 26109 - DNA, 20 bp, synthetic construct
  source 1..20: mol_type = other DNA
gacatgacccaggcccattc

SEQ ID NO: 26110 - DNA, 20 bp, synthetic construct
  source 1..20: mol_type = other DNA
agacatgacccaggcccatt

SEQ ID NO: 26111 - DNA, 20 bp, synthetic construct
  source 1..20: mol_type = other DNA
cagacatgacccaggcccat

SEQ ID NO: 26112 - DNA, 20 bp, synthetic construct
  source 1..20: mol_type = other DNA
acagacatgacccaggccca

SEQ ID NO: 26113 - DNA, 20 bp, synthetic construct
  source 1..20: mol_type = other DNA
tacagacatgacccaggccc

SEQ ID NO: 26114 - DNA, 20 bp, synthetic construct
  source 1..20: mol_type = other DNA
ttacagacatgacccaggcc

SEQ ID NO: 26115 - DNA, 20 bp, synthetic construct
  source 1..20: mol_type = other DNA
tttacagacatgacccaggc

SEQ ID NO: 26116 - DNA, 20 bp, synthetic construct
  source 1..20: mol_type = other DNA
gtttacagacatgacccagg

SEQ ID NO: 26117 - DNA, 20 bp, synthetic construct
  source 1..20: mol_type = other DNA
ggtttacagacatgacccag

SEQ ID NO: 26118 - DNA, 20 bp, synthetic construct
  source 1..20: mol_type = other DNA
aggtttacagacatgaccca

SEQ ID NO: 26119 - DNA, 20 bp, synthetic construct
  source 1..20: mol_type = other DNA
gaggtttacagacatgaccc

SEQ ID NO: 26120 - DNA, 20 bp, synthetic construct
  source 1..20: mol_type = other DNA
ggaggtttacagacatgacc

SEQ ID NO: 26121 - DNA, 20 bp, synthetic construct
  source 1..20: mol_type = other DNA
gggaggtttacagacatgac

SEQ ID NO: 26122 - DNA, 20 bp, synthetic construct
  source 1..20: mol_type = other DNA
ggggaggtttacagacatga

SEQ ID NO: 26123 - DNA, 20 bp, synthetic construct
  source 1..20: mol_type = other DNA
tggggaggtttacagacatg

SEQ ID NO: 26124 - DNA, 20 bp, synthetic construct
  source 1..20: mol_type = other DNA
gtggggaggtttacagacat

SEQ ID NO: 26125 - DNA, 20 bp, synthetic construct
  source 1..20: mol_type = other DNA
cgtggggaggtttacagaca

SEQ ID NO: 26126 - DNA, 20 bp, synthetic construct
  source 1..20: mol_type = other DNA
acgtggggaggtttacagac

SEQ ID NO: 26127 - DNA, 20 bp, synthetic construct
  source 1..20: mol_type = other DNA
gacgtggggaggtttacaga

SEQ ID NO: 26128 - DNA, 20 bp, synthetic construct
  source 1..20: mol_type = other DNA
tgacgtggggaggtttacag

SEQ ID NO: 26129 - DNA, 20 bp, synthetic construct
  source 1..20: mol_type = other DNA
atgacgtggggaggtttaca

SEQ ID NO: 26130 - DNA, 20 bp, synthetic construct
  source 1..20: mol_type = other DNA
catgacgtggggaggtttac

SEQ ID NO: 26131 - DNA, 20 bp, synthetic construct
  source 1..20: mol_type = other DNA
ccatgacgtggggaggttta

SEQ ID NO: 26132 - DNA, 20 bp, synthetic construct
  source 1..20: mol_type = other DNA
cccatgacgtggggaggttt

SEQ ID NO: 26133 - DNA, 20 bp, synthetic construct
  source 1..20: mol_type = other DNA
ccccatgacgtggggaggtt

SEQ ID NO: 26134 - DNA, 20 bp, synthetic construct
  source 1..20: mol_type = other DNA
tccccatgacgtggggaggt

SEQ ID NO: 26135 - DNA, 20 bp, synthetic construct
  source 1..20: mol_type = other DNA
ctccccatgacgtggggagg

SEQ ID NO: 26136 - DNA, 20 bp, synthetic construct
  source 1..20: mol_type = other DNA
cctccccatgacgtggggag

SEQ ID NO: 26137 - DNA, 20 bp, synthetic construct
  source 1..20: mol_type = other DNA
gcctccccatgacgtgggga

SEQ ID NO: 26138 - DNA, 20 bp, synthetic construct
  source 1..20: mol_type = other DNA
agcctccccatgacgtgggg

SEQ ID NO: 26139 - DNA, 20 bp, synthetic construct
  source 1..20: mol_type = other DNA
cagcctccccatgacgtggg

SEQ ID NO: 26140 - DNA, 20 bp, synthetic construct
  source 1..20: mol_type = other DNA
tcagcctccccatgacgtgg

SEQ ID NO: 26141 - DNA, 20 bp, synthetic construct
  source 1..20: mol_type = other DNA
ttcagcctccccatgacgtg

SEQ ID NO: 26142 - DNA, 20 bp, synthetic construct
  source 1..20: mol_type = other DNA
tttcagcctccccatgacgt

SEQ ID NO: 26143 - DNA, 20 bp, synthetic construct
  source 1..20: mol_type = other DNA
atttcagcctccccatgacg

SEQ ID NO: 26144 - DNA, 20 bp, synthetic construct
  source 1..20: mol_type = other DNA
catttcagcctccccatgac

SEQ ID NO: 26145 - DNA, 20 bp, synthetic construct
  source 1..20: mol_type = other DNA
ccatttcagcctccccatga

SEQ ID NO: 26146 - DNA, 20 bp, synthetic construct
  source 1..20: mol_type = other DNA
cccatttcagcctccccatg

SEQ ID NO: 26147 - DNA, 20 bp, synthetic construct
  source 1..20: mol_type = other DNA
tcccatttcagcctccccat

SEQ ID NO: 26148 - DNA, 20 bp, synthetic construct
  source 1..20: mol_type = other DNA
ttcccatttcagcctcccca

SEQ ID NO: 26149 - DNA, 20 bp, synthetic construct
  source 1..20: mol_type = other DNA
cttcccatttcagcctcccc

SEQ ID NO: 26150 - DNA, 20 bp, synthetic construct
  source 1..20: mol_type = other DNA
ccttcccatttcagcctccc

SEQ ID NO: 26151 - DNA, 20 bp, synthetic construct
  source 1..20: mol_type = other DNA
cccttcccatttcagcctcc

SEQ ID NO: 26152 - DNA, 20 bp, synthetic construct
  source 1..20: mol_type = other DNA
gcccttcccatttcagcctc

SEQ ID NO: 26153 - DNA, 20 bp, synthetic construct
  source 1..20: mol_type = other DNA
ggcccttcccatttcagcct

SEQ ID NO: 26154 - DNA, 20 bp, synthetic construct
  source 1..20: mol_type = other DNA
tggcccttcccatttcagcc

SEQ ID NO: 26155 - DNA, 20 bp, synthetic construct
  source 1..20: mol_type = other DNA
ctggcccttcccatttcagc

SEQ ID NO: 26156 - DNA, 20 bp, synthetic construct
  source 1..20: mol_type = other DNA
cctggcccttcccatttcag

SEQ ID NO: 26157 - DNA, 20 bp, synthetic construct
  source 1..20: mol_type = other DNA
tcctggcccttcccatttca

SEQ ID NO: 26158 - DNA, 20 bp, synthetic construct
  source 1..20: mol_type = other DNA
ctcctggcccttcccatttc

SEQ ID NO: 26159 - DNA, 20 bp, synthetic construct
  source 1..20: mol_type = other DNA
actcctggcccttcccattt

SEQ ID NO: 26160 - DNA, 20 bp, synthetic construct
  source 1..20: mol_type = other DNA
aactcctggcccttcccatt

SEQ ID NO: 26161 - DNA, 20 bp, synthetic construct
  source 1..20: mol_type = other DNA
gaactcctggcccttcccat

SEQ ID NO: 26162 - DNA, 20 bp, synthetic construct
  source 1..20: mol_type = other DNA
tgaactcctggcccttccca

SEQ ID NO: 26163 - DNA, 20 bp, synthetic construct
  source 1..20: mol_type = other DNA
ttgaactcctggcccttccc

SEQ ID NO: 26164 - DNA, 20 bp, synthetic construct
  source 1..20: mol_type = other DNA
cttgaactcctggcccttcc

SEQ ID NO: 26165 - DNA, 20 bp, synthetic construct
  source 1..20: mol_type = other DNA
tcttgaactcctggcccttc

SEQ ID NO: 26166 - DNA, 20 bp, synthetic construct
  source 1..20: mol_type = other DNA
gtcttgaactcctggccctt

SEQ ID NO: 26167 - DNA, 20 bp, synthetic construct
  source 1..20: mol_type = other DNA
ggtcttgaactcctggccct

SEQ ID NO: 26168 - DNA, 20 bp, synthetic construct
  source 1..20: mol_type = other DNA
tggtcttgaactcctggccc

SEQ ID NO: 26169 - DNA, 20 bp, synthetic construct
  source 1..20: mol_type = other DNA
ctggtcttgaactcctggcc

SEQ ID NO: 26170 - DNA, 20 bp, synthetic construct
  source 1..20: mol_type = other DNA
cctggtcttgaactcctggc

SEQ ID NO: 26171 - DNA, 20 bp, synthetic construct
  source 1..20: mol_type = other DNA
gcctggtcttgaactcctgg

SEQ ID NO: 26172 - DNA, 20 bp, synthetic construct
  source 1..20: mol_type = other DNA
agcctggtcttgaactcctg

SEQ ID NO: 26173 - DNA, 20 bp, synthetic construct
  source 1..20: mol_type = other DNA
cagcctggtcttgaactcct

SEQ ID NO: 26174 - DNA, 20 bp, synthetic construct
  source 1..20: mol_type = other DNA
tcagcctggtcttgaactcc

SEQ ID NO: 26175 - DNA, 20 bp, synthetic construct
  source 1..20: mol_type = other DNA
ctcagcctggtcttgaactc

SEQ ID NO: 26176 - DNA, 20 bp, synthetic construct
  source 1..20: mol_type = other DNA
tctcagcctggtcttgaact

SEQ ID NO: 26177 - DNA, 20 bp, synthetic construct
  source 1..20: mol_type = other DNA
ttctcagcctggtcttgaac

SEQ ID NO: 26178 - DNA, 20 bp, synthetic construct
  source 1..20: mol_type = other DNA
tttctcagcctggtcttgaa

SEQ ID NO: 26179 - DNA, 20 bp, synthetic construct
  source 1..20: mol_type = other DNA
gtttctcagcctggtcttga

SEQ ID NO: 26180 - DNA, 20 bp, synthetic construct
  source 1..20: mol_type = other DNA
tgtttctcagcctggtcttg

SEQ ID NO: 26181 - DNA, 20 bp, synthetic construct
  source 1..20: mol_type = other DNA
atgtttctcagcctggtctt

SEQ ID NO: 26182 - DNA, 20 bp, synthetic construct
  source 1..20: mol_type = other DNA
tatgtttctcagcctggtct

SEQ ID NO: 26183 - DNA, 20 bp, synthetic construct
  source 1..20: mol_type = other DNA
ttatgtttctcagcctggtc

SEQ ID NO: 26184 - DNA, 20 bp, synthetic construct
  source 1..20: mol_type = other DNA
gttatgtttctcagcctggt

SEQ ID NO: 26185 - DNA, 20 bp, synthetic construct
  source 1..20: mol_type = other DNA
tgttatgtttctcagcctgg

SEQ ID NO: 26186 - DNA, 20 bp, synthetic construct
  source 1..20: mol_type = other DNA
ttgttatgtttctcagcctg

SEQ ID NO: 26187 - DNA, 20 bp, synthetic construct
  source 1..20: mol_type = other DNA
cttgttatgtttctcagcct

SEQ ID NO: 26188 - DNA, 20 bp, synthetic construct
  source 1..20: mol_type = other DNA
tcttgttatgtttctcagcc

SEQ ID NO: 26189 - DNA, 20 bp, synthetic construct
  source 1..20: mol_type = other DNA
gtcttgttatgtttctcagc

SEQ ID NO: 26190 - DNA, 20 bp, synthetic construct
  source 1..20: mol_type = other DNA
ggtcttgttatgtttctcag

SEQ ID NO: 26191 - DNA, 20 bp, synthetic construct
  source 1..20: mol_type = other DNA
gggtcttgttatgtttctca

SEQ ID NO: 26192 - DNA, 20 bp, synthetic construct
  source 1..20: mol_type = other DNA
ggggtcttgttatgtttctc

SEQ ID NO: 26193 - DNA, 20 bp, synthetic construct
  source 1..20: mol_type = other DNA
tggggtcttgttatgtttct

SEQ ID NO: 26194 - DNA, 20 bp, synthetic construct
  source 1..20: mol_type = other DNA
atggggtcttgttatgtttc

SEQ ID NO: 26195 - DNA, 20 bp, synthetic construct
  source 1..20: mol_type = other DNA
gatggggtcttgttatgttt

SEQ ID NO: 26196 - DNA, 20 bp, synthetic construct
  source 1..20: mol_type = other DNA
agatggggtcttgttatgtt

SEQ ID NO: 26197 - DNA, 20 bp, synthetic construct
  source 1..20: mol_type = other DNA
gagatggggtcttgttatgt

SEQ ID NO: 26198 - DNA, 20 bp, synthetic construct
  source 1..20: mol_type = other DNA
agagatggggtcttgttatg

SEQ ID NO: 26199 - DNA, 20 bp, synthetic construct
  source 1..20: mol_type = other DNA
tagagatggggtcttgttat

SEQ ID NO: 26200 - DNA, 20 bp, synthetic construct
  source 1..20: mol_type = other DNA
gtagagatggggtcttgtta

SEQ ID NO: 26201 - DNA, 20 bp, synthetic construct
  source 1..20: mol_type = other DNA
tgtagagatggggtcttgtt

SEQ ID NO: 26202 - DNA, 20 bp, synthetic construct
  source 1..20: mol_type = other DNA
ttgtagagatggggtcttgt

SEQ ID NO: 26203 - DNA, 20 bp, synthetic construct
  source 1..20: mol_type = other DNA
tttgtagagatggggtcttg

SEQ ID NO: 26204 - DNA, 20 bp, synthetic construct
  source 1..20: mol_type = other DNA
ttttgtagagatggggtctt

SEQ ID NO: 26205 - DNA, 20 bp, synthetic construct
  source 1..20: mol_type = other DNA
tttttgtagagatggggtct

SEQ ID NO: 26206 - DNA, 20 bp, synthetic construct
  source 1..20: mol_type = other DNA
ttttttgtagagatggggtc

SEQ ID NO: 26207 - DNA, 20 bp, synthetic construct
  source 1..20: mol_type = other DNA
attttttgtagagatggggt

SEQ ID NO: 26208 - DNA, 20 bp, synthetic construct
  source 1..20: mol_type = other DNA
tattttttgtagagatgggg

SEQ ID NO: 26209 - DNA, 20 bp, synthetic construct
  source 1..20: mol_type = other DNA
atattttttgtagagatggg

SEQ ID NO: 26210 - DNA, 20 bp, synthetic construct
  source 1..20: mol_type = other DNA
aatattttttgtagagatgg

SEQ ID NO: 26211 - DNA, 20 bp, synthetic construct
  source 1..20: mol_type = other DNA
aaatattttttgtagagatg

SEQ ID NO: 26212 - DNA, 20 bp, synthetic construct
  source 1..20: mol_type = other DNA
aaaatattttttgtagagat

SEQ ID NO: 26213 - DNA, 20 bp, synthetic construct
  source 1..20: mol_type = other DNA
aaaaatattttttgtagaga

SEQ ID NO: 26214 - DNA, 20 bp, synthetic construct
  source 1..20: mol_type = other DNA
aaaaaatattttttgtagag

SEQ ID NO: 26215 - DNA, 20 bp, synthetic construct
  source 1..20: mol_type = other DNA
taaaaaatattttttgtaga

SEQ ID NO: 26216 - DNA, 20 bp, synthetic construct
  source 1..20: mol_type = other DNA
ttaaaaaatattttttgtag

SEQ ID NO: 26217 - DNA, 20 bp, synthetic construct
  source 1..20: mol_type = other DNA
attaaaaaatattttttgta

SEQ ID NO: 26218 - DNA, 20 bp, synthetic construct
  source 1..20: mol_type = other DNA
aattaaaaaatattttttgt

SEQ ID NO: 26219 - DNA, 20 bp, synthetic construct
  source 1..20: mol_type = other DNA
taattaaaaaatattttttg

SEQ ID NO: 26220 - DNA, 20 bp, synthetic construct
  source 1..20: mol_type = other DNA
ttaattaaaaaatatttttt

SEQ ID NO: 26221 - DNA, 20 bp, synthetic construct
  source 1..20: mol_type = other DNA
attaattaaaaaatattttt

SEQ ID NO: 26222 - DNA, 20 bp, synthetic construct
  source 1..20: mol_type = other DNA
cattaattaaaaaatatttt

SEQ ID NO: 26223 - DNA, 20 bp, synthetic construct
  source 1..20: mol_type = other DNA
ccattaattaaaaaatattt

SEQ ID NO: 26224 - DNA, 20 bp, synthetic construct
  source 1..20: mol_type = other DNA
cccattaattaaaaaatatt

SEQ ID NO: 26225 - DNA, 20 bp, synthetic construct
  source 1..20: mol_type = other DNA
ccccattaattaaaaaatat

SEQ ID NO: 26226 - DNA, 20 bp, synthetic construct
  source 1..20: mol_type = other DNA
cccccattaattaaaaaata

SEQ ID NO: 26227 - DNA, 20 bp, synthetic construct
  source 1..20: mol_type = other DNA
tcccccattaattaaaaaat

SEQ ID NO: 26228 - DNA, 20 bp, synthetic construct
  source 1..20: mol_type = other DNA
atcccccattaattaaaaaa

SEQ ID NO: 26229 - DNA, 20 bp, synthetic construct
  source 1..20: mol_type = other DNA
catcccccattaattaaaaa

SEQ ID NO: 26230 - DNA, 20 bp, synthetic construct
  source 1..20: mol_type = other DNA
ccatcccccattaattaaaa

SEQ ID NO: 26231 - DNA, 20 bp, synthetic construct
  source 1..20: mol_type = other DNA
gccatcccccattaattaaa

SEQ ID NO: 26232 - DNA, 20 bp, synthetic construct
  source 1..20: mol_type = other DNA
tgccatcccccattaattaa

SEQ ID NO: 26233 - DNA, 20 bp, synthetic construct
  source 1..20: mol_type = other DNA
ctgccatcccccattaatta

SEQ ID NO: 26234 - DNA, 20 bp, synthetic construct
  source 1..20: mol_type = other DNA
gctgccatcccccattaatt

SEQ ID NO: 26235 - DNA, 20 bp, synthetic construct
  source 1..20: mol_type = other DNA
tgctgccatcccccattaat

SEQ ID NO: 26236 - DNA, 20 bp, synthetic construct
  source 1..20: mol_type = other DNA
gtgctgccatcccccattaa

SEQ ID NO: 26237 - DNA, 20 bp, synthetic construct
  source 1..20: mol_type = other DNA
tgtgctgccatcccccatta

SEQ ID NO: 26238 - DNA, 20 bp, synthetic construct
  source 1..20: mol_type = other DNA
gtgtgctgccatcccccatt

SEQ ID NO: 26239 - DNA, 20 bp, synthetic construct
  source 1..20: mol_type = other DNA
tgtgtgctgccatcccccat

SEQ ID NO: 26240 - DNA, 20 bp, synthetic construct
  source 1..20: mol_type = other DNA
gtgtgtgctgccatccccca

SEQ ID NO: 26241 - DNA, 20 bp, synthetic construct
  source 1..20: mol_type = other DNA
ggtgtgtgctgccatccccc

SEQ ID NO: 26242 - DNA, 20 bp, synthetic construct
  source 1..20: mol_type = other DNA
aggtgtgtgctgccatcccc

SEQ ID NO: 26243 - DNA, 20 bp, synthetic construct
  source 1..20: mol_type = other DNA
caggtgtgtgctgccatccc

SEQ ID NO: 26244 - DNA, 20 bp, synthetic construct
  source 1..20: mol_type = other DNA
acaggtgtgtgctgccatcc

SEQ ID NO: 26245 - DNA, 20 bp, synthetic construct
  source 1..20: mol_type = other DNA
tacaggtgtgtgctgccatc

SEQ ID NO: 26246 - DNA, 20 bp, synthetic construct
  source 1..20: mol_type = other DNA
ctacaggtgtgtgctgccat

SEQ ID NO: 26247 - DNA, 20 bp, synthetic construct
  source 1..20: mol_type = other DNA
actacaggtgtgtgctgcca

SEQ ID NO: 26248 - DNA, 20 bp, synthetic construct
  source 1..20: mol_type = other DNA
gactacaggtgtgtgctgcc

SEQ ID NO: 26249 - DNA, 20 bp, synthetic construct
  source 1..20: mol_type = other DNA
cgactacaggtgtgtgctgc

SEQ ID NO: 26250 - DNA, 20 bp, synthetic construct
  source 1..20: mol_type = other DNA
gcgactacaggtgtgtgctg

SEQ ID NO: 26251 - DNA, 20 bp, synthetic construct
  source 1..20: mol_type = other DNA
tgcgactacaggtgtgtgct

SEQ ID NO: 26252 - DNA, 20 bp, synthetic construct
  source 1..20: mol_type = other DNA
ctgcgactacaggtgtgtgc

SEQ ID NO: 26253 - DNA, 20 bp, synthetic construct
  source 1..20: mol_type = other DNA
gctgcgactacaggtgtgtg

SEQ ID NO: 26254 - DNA, 20 bp, synthetic construct
  source 1..20: mol_type = other DNA
agctgcgactacaggtgtgt

SEQ ID NO: 26255 - DNA, 20 bp, synthetic construct
  source 1..20: mol_type = other DNA
tagctgcgactacaggtgtg

SEQ ID NO: 26256 - DNA, 20 bp, synthetic construct
  source 1..20: mol_type = other DNA
gtagctgcgactacaggtgt

SEQ ID NO: 26257 - DNA, 20 bp, synthetic construct
  source 1..20: mol_type = other DNA
agtagctgcgactacaggtg

SEQ ID NO: 26258 - DNA, 20 bp, synthetic construct
  source 1..20: mol_type = other DNA
tagtagctgcgactacaggt

SEQ ID NO: 26259 - DNA, 20 bp, synthetic construct
  source 1..20: mol_type = other DNA
gtagtagctgcgactacagg

SEQ ID NO: 26260 - DNA, 20 bp, synthetic construct
  source 1..20: mol_type = other DNA
cgtagtagctgcgactacag

SEQ ID NO: 26261 - DNA, 20 bp, synthetic construct
  source 1..20: mol_type = other DNA
tcgtagtagctgcgactaca

SEQ ID NO: 26262 - DNA, 20 bp, synthetic construct
  source 1..20: mol_type = other DNA
ctcgtagtagctgcgactac

SEQ ID NO: 26263 - DNA, 20 bp, synthetic construct
  source 1..20: mol_type = other DNA
cctcgtagtagctgcgacta

SEQ ID NO: 26264 - DNA, 20 bp, synthetic construct
  source 1..20: mol_type = other DNA
gcctcgtagtagctgcgact

SEQ ID NO: 26265 - DNA, 20 bp, synthetic construct
  source 1..20: mol_type = other DNA
agcctcgtagtagctgcgac

SEQ ID NO: 26266 - DNA, 20 bp, synthetic construct
  source 1..20: mol_type = other DNA
cagcctcgtagtagctgcga

SEQ ID NO: 26267 - DNA, 20 bp, synthetic construct
  source 1..20: mol_type = other DNA
tcagcctcgtagtagctgcg

SEQ ID NO: 26268 - DNA, 20 bp, synthetic construct
  source 1..20: mol_type = other DNA
ttcagcctcgtagtagctgc

SEQ ID NO: 26269 - DNA, 20 bp, synthetic construct
  source 1..20: mol_type = other DNA
cttcagcctcgtagtagctg

SEQ ID NO: 26270 - DNA, 20 bp, synthetic construct
  source 1..20: mol_type = other DNA
gcttcagcctcgtagtagct

SEQ ID NO: 26271 - DNA, 20 bp, synthetic construct
  source 1..20: mol_type = other DNA
cgcttcagcctcgtagtagc

SEQ ID NO: 26272 - DNA, 20 bp, synthetic construct
  source 1..20: mol_type = other DNA
tcgcttcagcctcgtagtag

SEQ ID NO: 26273 - DNA, 20 bp, synthetic construct
  source 1..20: mol_type = other DNA
ctcgcttcagcctcgtagta

SEQ ID NO: 26274 - DNA, 20 bp, synthetic construct
  source 1..20: mol_type = other DNA
tctcgcttcagcctcgtagt

SEQ ID NO: 26275 - DNA, 20 bp, synthetic construct
  source 1..20: mol_type = other DNA
ctctcgcttcagcctcgtag

SEQ ID NO: 26276 - DNA, 20 bp, synthetic construct
  source 1..20: mol_type = other DNA
cctctcgcttcagcctcgta

SEQ ID NO: 26277 - DNA, 20 bp, synthetic construct
  source 1..20: mol_type = other DNA
tcctctcgcttcagcctcgt

SEQ ID NO: 26278 - DNA, 20 bp, synthetic construct
  source 1..20: mol_type = other DNA
atcctctcgcttcagcctcg

SEQ ID NO: 26279 - DNA, 20 bp, synthetic construct
  source 1..20: mol_type = other DNA
aatcctctcgcttcagcctc

SEQ ID NO: 26280 - DNA, 20 bp, synthetic construct
  source 1..20: mol_type = other DNA
caatcctctcgcttcagcct

SEQ ID NO: 26281 - DNA, 20 bp, synthetic construct
  source 1..20: mol_type = other DNA
gcaatcctctcgcttcagcc

SEQ ID NO: 26282 - DNA, 20 bp, synthetic construct
  source 1..20: mol_type = other DNA
agcaatcctctcgcttcagc

SEQ ID NO: 26283 - DNA, 20 bp, synthetic construct
  source 1..20: mol_type = other DNA
aagcaatcctctcgcttcag

SEQ ID NO: 26284 - DNA, 20 bp, synthetic construct
  source 1..20: mol_type = other DNA
caagcaatcctctcgcttca

SEQ ID NO: 26285 - DNA, 20 bp, synthetic construct
  source 1..20: mol_type = other DNA
tcaagcaatcctctcgcttc

SEQ ID NO: 26286 - DNA, 20 bp, synthetic construct
  source 1..20: mol_type = other DNA
ctcaagcaatcctctcgctt

SEQ ID NO: 26287 - DNA, 20 bp, synthetic construct
  source 1..20: mol_type = other DNA
gctcaagcaatcctctcgct

SEQ ID NO: 26288 - DNA, 20 bp, synthetic construct
  source 1..20: mol_type = other DNA
agctcaagcaatcctctcgc

SEQ ID NO: 26289 - DNA, 20 bp, synthetic construct
  source 1..20: mol_type = other DNA
gagctcaagcaatcctctcg

SEQ ID NO: 26290 - DNA, 20 bp, synthetic construct
  source 1..20: mol_type = other DNA
tgagctcaagcaatcctctc

SEQ ID NO: 26291 - DNA, 20 bp, synthetic construct
  source 1..20: mol_type = other DNA
ctgagctcaagcaatcctct

SEQ ID NO: 26292 - DNA, 20 bp, synthetic construct
  source 1..20: mol_type = other DNA
cctgagctcaagcaatcctc

SEQ ID NO: 26293 - DNA, 20 bp, synthetic construct
  source 1..20: mol_type = other DNA
tcctgagctcaagcaatcct

SEQ ID NO: 26294 - DNA, 20 bp, synthetic construct
  source 1..20: mol_type = other DNA
ctcctgagctcaagcaatcc

SEQ ID NO: 26295 - DNA, 20 bp, synthetic construct
  source 1..20: mol_type = other DNA
actcctgagctcaagcaatc

SEQ ID NO: 26296 - DNA, 20 bp, synthetic construct
  source 1..20: mol_type = other DNA
aactcctgagctcaagcaat

SEQ ID NO: 26297 - DNA, 20 bp, synthetic construct
  source 1..20: mol_type = other DNA
taactcctgagctcaagcaa

SEQ ID NO: 26298 - DNA, 20 bp, synthetic construct
  source 1..20: mol_type = other DNA
ttaactcctgagctcaagca

SEQ ID NO: 26299 - DNA, 20 bp, synthetic construct
  source 1..20: mol_type = other DNA
tttaactcctgagctcaagc

SEQ ID NO: 26300 - DNA, 20 bp, synthetic construct
  source 1..20: mol_type = other DNA
ctttaactcctgagctcaag

SEQ ID NO: 26301 - DNA, 20 bp, synthetic construct
  source 1..20: mol_type = other DNA
tctttaactcctgagctcaa

SEQ ID NO: 26302 - DNA, 20 bp, synthetic construct
  source 1..20: mol_type = other DNA
atctttaactcctgagctca

SEQ ID NO: 26303 - DNA, 20 bp, synthetic construct
  source 1..20: mol_type = other DNA
aatctttaactcctgagctc

SEQ ID NO: 26304 - DNA, 20 bp, synthetic construct
  source 1..20: mol_type = other DNA
caatctttaactcctgagct

SEQ ID NO: 26305 - DNA, 20 bp, synthetic construct
  source 1..20: mol_type = other DNA
gcaatctttaactcctgagc

SEQ ID NO: 26306 - DNA, 20 bp, synthetic construct
  source 1..20: mol_type = other DNA
tgcaatctttaactcctgag

SEQ ID NO: 26307 - DNA, 20 bp, synthetic construct
  source 1..20: mol_type = other DNA
ctgcaatctttaactcctga

SEQ ID NO: 26308 - DNA, 20 bp, synthetic construct
  source 1..20: mol_type = other DNA
cctgcaatctttaactcctg

SEQ ID NO: 26309 - DNA, 20 bp, synthetic construct
  source 1..20: mol_type = other DNA
tcctgcaatctttaactcct

SEQ ID NO: 26310 - DNA, 20 bp, synthetic construct
  source 1..20: mol_type = other DNA
ctcctgcaatctttaactcc

SEQ ID NO: 26311 - DNA, 20 bp, synthetic construct
  source 1..20: mol_type = other DNA
gctcctgcaatctttaactc

SEQ ID NO: 26312 - DNA, 20 bp, synthetic construct
  source 1..20: mol_type = other DNA
agctcctgcaatctttaact

SEQ ID NO: 26313 - DNA, 20 bp, synthetic construct
  source 1..20: mol_type = other DNA
tagctcctgcaatctttaac

SEQ ID NO: 26314 - DNA, 20 bp, synthetic construct
  source 1..20: mol_type = other DNA
atagctcctgcaatctttaa

SEQ ID NO: 26315 - DNA, 20 bp, synthetic construct
  source 1..20: mol_type = other DNA
catagctcctgcaatcttta

SEQ ID NO: 26316 - DNA, 20 bp, synthetic construct
  source 1..20: mol_type = other DNA
tcatagctcctgcaatcttt

SEQ ID NO: 26317 - DNA, 20 bp, synthetic construct
  source 1..20: mol_type = other DNA
atcatagctcctgcaatctt

SEQ ID NO: 26318 - DNA, 20 bp, synthetic construct
  source 1..20: mol_type = other DNA
gatcatagctcctgcaatct

SEQ ID NO: 26319 - DNA, 20 bp, synthetic construct
  source 1..20: mol_type = other DNA
tgatcatagctcctgcaatc

SEQ ID NO: 26320 - DNA, 20 bp, synthetic construct
  source 1..20: mol_type = other DNA
gtgatcatagctcctgcaat

SEQ ID NO: 26321 - DNA, 20 bp, synthetic construct
  source 1..20: mol_type = other DNA
tgtgatcatagctcctgcaa

SEQ ID NO: 26322 - DNA, 20 bp, synthetic construct
  source 1..20: mol_type = other DNA
ctgtgatcatagctcctgca

SEQ ID NO: 26323 - DNA, 20 bp, synthetic construct
  source 1..20: mol_type = other DNA
gctgtgatcatagctcctgc

SEQ ID NO: 26324 - DNA, 20 bp, synthetic construct
  source 1..20: mol_type = other DNA
tgctgtgatcatagctcctg

SEQ ID NO: 26325 - DNA, 20 bp, synthetic construct
  source 1..20: mol_type = other DNA
gtgctgtgatcatagctcct

SEQ ID NO: 26326 - DNA, 20 bp, synthetic construct
  source 1..20: mol_type = other DNA
agtgctgtgatcatagctcc

SEQ ID NO: 26327 - DNA, 20 bp, synthetic construct
  source 1..20: mol_type = other DNA
cagtgctgtgatcatagctc

SEQ ID NO: 26328 - DNA, 20 bp, synthetic construct
  source 1..20: mol_type = other DNA
gcagtgctgtgatcatagct

SEQ ID NO: 26329 - DNA, 20 bp, synthetic construct
  source 1..20: mol_type = other DNA
cgcagtgctgtgatcatagc

SEQ ID NO: 26330 - DNA, 20 bp, synthetic construct
  source 1..20: mol_type = other DNA
gcgcagtgctgtgatcatag

SEQ ID NO: 26331 - DNA, 20 bp, synthetic construct
  source 1..20: mol_type = other DNA
agcgcagtgctgtgatcata

SEQ ID NO: 26332 - DNA, 20 bp, synthetic construct
  source 1..20: mol_type = other DNA
gagcgcagtgctgtgatcat

SEQ ID NO: 26333 - DNA, 20 bp, synthetic construct
  source 1..20: mol_type = other DNA
ggagcgcagtgctgtgatca

SEQ ID NO: 26334 - DNA, 20 bp, synthetic construct
  source 1..20: mol_type = other DNA
tggagcgcagtgctgtgatc

SEQ ID NO: 26335 - DNA, 20 bp, synthetic construct
  source 1..20: mol_type = other DNA
ctggagcgcagtgctgtgat

SEQ ID NO: 26336 - DNA, 20 bp, synthetic construct
  source 1..20: mol_type = other DNA
gctggagcgcagtgctgtga

SEQ ID NO: 26337 - DNA, 20 bp, synthetic construct
  source 1..20: mol_type = other DNA
ggctggagcgcagtgctgtg

SEQ ID NO: 26338 - DNA, 20 bp, synthetic construct
  source 1..20: mol_type = other DNA
gggctggagcgcagtgctgt

SEQ ID NO: 26339 - DNA, 20 bp, synthetic construct
  source 1..20: mol_type = other DNA
ggggctggagcgcagtgctg

SEQ ID NO: 26340 - DNA, 20 bp, synthetic construct
  source 1..20: mol_type = other DNA
aggggctggagcgcagtgct

SEQ ID NO: 26341 - DNA, 20 bp, synthetic construct
  source 1..20: mol_type = other DNA
gaggggctggagcgcagtgc

SEQ ID NO: 26342 - DNA, 20 bp, synthetic construct
  source 1..20: mol_type = other DNA
agaggggctggagcgcagtg

SEQ ID NO: 26343 - DNA, 20 bp, synthetic construct
  source 1..20: mol_type = other DNA
aagaggggctggagcgcagt

SEQ ID NO: 26344 - DNA, 20 bp, synthetic construct
  source 1..20: mol_type = other DNA
taagaggggctggagcgcag

SEQ ID NO: 26345 - DNA, 20 bp, synthetic construct
  source 1..20: mol_type = other DNA
ataagaggggctggagcgca

SEQ ID NO: 26346 - DNA, 20 bp, synthetic construct
  source 1..20: mol_type = other DNA
gataagaggggctggagcgc

SEQ ID NO: 26347 - DNA, 20 bp, synthetic construct
  source 1..20: mol_type = other DNA
tgataagaggggctggagcg

SEQ ID NO: 26348 - DNA, 20 bp, synthetic construct
  source 1..20: mol_type = other DNA
ctgataagaggggctggagc

SEQ ID NO: 26349 - DNA, 20 bp, synthetic construct
  source 1..20: mol_type = other DNA
gctgataagaggggctggag

SEQ ID NO: 26350 - DNA, 20 bp, synthetic construct
  source 1..20: mol_type = other DNA
tgctgataagaggggctgga

SEQ ID NO: 26351 - DNA, 20 bp, synthetic construct
  source 1..20: mol_type = other DNA
ctgctgataagaggggctgg

SEQ ID NO: 26352 - DNA, 20 bp, synthetic construct
  source 1..20: mol_type = other DNA
actgctgataagaggggctg

SEQ ID NO: 26353 - DNA, 20 bp, synthetic construct
  source 1..20: mol_type = other DNA
gactgctgataagaggggct

SEQ ID NO: 26354 - DNA, 20 bp, synthetic construct
  source 1..20: mol_type = other DNA
agactgctgataagaggggc

SEQ ID NO: 26355 - DNA, 20 bp, synthetic construct
  source 1..20: mol_type = other DNA
cagactgctgataagagggg

SEQ ID NO: 26356 - DNA, 20 bp, synthetic construct
  source 1..20: mol_type = other DNA
ccagactgctgataagaggg

SEQ ID NO: 26357 - DNA, 20 bp, synthetic construct
  source 1..20: mol_type = other DNA
accagactgctgataagagg

SEQ ID NO: 26358 - DNA, 20 bp, synthetic construct
  source 1..20: mol_type = other DNA
taccagactgctgataagag

SEQ ID NO: 26359 - DNA, 20 bp, synthetic construct
  source 1..20: mol_type = other DNA
ataccagactgctgataaga

SEQ ID NO: 26360 - DNA, 20 bp, synthetic construct
  source 1..20: mol_type = other DNA
cataccagactgctgataag

SEQ ID NO: 26361 - DNA, 20 bp, synthetic construct
  source 1..20: mol_type = other DNA
acataccagactgctgataa

SEQ ID NO: 26362 - DNA, 20 bp, synthetic construct
  source 1..20: mol_type = other DNA
aacataccagactgctgata

SEQ ID NO: 26363 - DNA, 20 bp, synthetic construct
  source 1..20: mol_type = other DNA
caacataccagactgctgat

SEQ ID NO: 26364 - DNA, 20 bp, synthetic construct
  source 1..20: mol_type = other DNA
gcaacataccagactgctga

SEQ ID NO: 26365 - DNA, 20 bp, synthetic construct
  source 1..20: mol_type = other DNA
agcaacataccagactgctg

SEQ ID NO: 26366 - DNA, 20 bp, synthetic construct
  source 1..20: mol_type = other DNA
tagcaacataccagactgct

SEQ ID NO: 26367 - DNA, 20 bp, synthetic construct
  source 1..20: mol_type = other DNA
ttagcaacataccagactgc

SEQ ID NO: 26368 - DNA, 20 bp, synthetic construct
  source 1..20: mol_type = other DNA
cttagcaacataccagactg

SEQ ID NO: 26369 - DNA, 20 bp, synthetic construct
  source 1..20: mol_type = other DNA
ccttagcaacataccagact

SEQ ID NO: 26370 - DNA, 20 bp, synthetic construct
  source 1..20: mol_type = other DNA
cccttagcaacataccagac

SEQ ID NO: 26371 - DNA, 20 bp, synthetic construct
  source 1..20: mol_type = other DNA
acccttagcaacataccaga

SEQ ID NO: 26372 - DNA, 20 bp, synthetic construct
  source 1..20: mol_type = other DNA
gacccttagcaacataccag

SEQ ID NO: 26373 - DNA, 20 bp, synthetic construct
  source 1..20: mol_type = other DNA
agacccttagcaacatacca

SEQ ID NO: 26374 - DNA, 20 bp, synthetic construct
  source 1..20: mol_type = other DNA
aagacccttagcaacatacc

SEQ ID NO: 26375 - DNA, 20 bp, synthetic construct
  source 1..20: mol_type = other DNA
caagacccttagcaacatac

SEQ ID NO: 26376 - DNA, 20 bp, synthetic construct
  source 1..20: mol_type = other DNA
acaagacccttagcaacata

SEQ ID NO: 26377 - DNA, 20 bp, synthetic construct
  source 1..20: mol_type = other DNA
aacaagacccttagcaacat

SEQ ID NO: 26378 - DNA, 20 bp, synthetic construct
  source 1..20: mol_type = other DNA
gaacaagacccttagcaaca

SEQ ID NO: 26379 - DNA, 20 bp, synthetic construct
  source 1..20: mol_type = other DNA
agaacaagacccttagcaac

SEQ ID NO: 26380 - DNA, 20 bp, synthetic construct
  source 1..20: mol_type = other DNA
aagaacaagacccttagcaa

SEQ ID NO: 26381 - DNA, 20 bp, synthetic construct
  source 1..20: mol_type = other DNA
aaagaacaagacccttagca

SEQ ID NO: 26382 - DNA, 20 bp, synthetic construct
  source 1..20: mol_type = other DNA
aaaagaacaagacccttagc

SEQ ID NO: 26383 - DNA, 20 bp, synthetic construct
  source 1..20: mol_type = other DNA
aaaaagaacaagacccttag

SEQ ID NO: 26384 - DNA, 20 bp, synthetic construct
  source 1..20: mol_type = other DNA
taaaaagaacaagaccctta

SEQ ID NO: 26385 - DNA, 20 bp, synthetic construct
  source 1..20: mol_type = other DNA
ctaaaaagaacaagaccctt

SEQ ID NO: 26386 - DNA, 20 bp, synthetic construct
  source 1..20: mol_type = other DNA
actaaaaagaacaagaccct

SEQ ID NO: 26387 - DNA, 20 bp, synthetic construct
  source 1..20: mol_type = other DNA
cactaaaaagaacaagaccc

SEQ ID NO: 26388 - DNA, 20 bp, synthetic construct
  source 1..20: mol_type = other DNA
gcactaaaaagaacaagacc

SEQ ID NO: 26389 - DNA, 20 bp, synthetic construct
  source 1..20: mol_type = other DNA
agcactaaaaagaacaagac

SEQ ID NO: 26390 - DNA, 20 bp, synthetic construct
  source 1..20: mol_type = other DNA
aagcactaaaaagaacaaga

SEQ ID NO: 26391 - DNA, 20 bp, synthetic construct
  source 1..20: mol_type = other DNA
gaagcactaaaaagaacaag

SEQ ID NO: 26392 - DNA, 20 bp, synthetic construct
  source 1..20: mol_type = other DNA
tgaagcactaaaaagaacaa

SEQ ID NO: 26393 - DNA, 20 bp, synthetic construct
  source 1..20: mol_type = other DNA
ctgaagcactaaaaagaaca

SEQ ID NO: 26394 - DNA, 20 bp, synthetic construct
  source 1..20: mol_type = other DNA
cctgaagcactaaaaagaac

SEQ ID NO: 26395 - DNA, 20 bp, synthetic construct
  source 1..20: mol_type = other DNA
ccctgaagcactaaaaagaa

SEQ ID NO: 26396 - DNA, 20 bp, synthetic construct
  source 1..20: mol_type = other DNA
tccctgaagcactaaaaaga

SEQ ID NO: 26397 - DNA, 20 bp, synthetic construct
  source 1..20: mol_type = other DNA
gtccctgaagcactaaaaag

SEQ ID NO: 26398 - DNA, 20 bp, synthetic construct
  source 1..20: mol_type = other DNA
tgtccctgaagcactaaaaa

SEQ ID NO: 26399 - DNA, 20 bp, synthetic construct
  source 1..20: mol_type = other DNA
ctgtccctgaagcactaaaa

SEQ ID NO: 26400 - DNA, 20 bp, synthetic construct
  source 1..20: mol_type = other DNA
gctgtccctgaagcactaaa

SEQ ID NO: 26401 - DNA, 20 bp, synthetic construct
  source 1..20: mol_type = other DNA
ggctgtccctgaagcactaa

SEQ ID NO: 26402 - DNA, 20 bp, synthetic construct
  source 1..20: mol_type = other DNA
tggctgtccctgaagcacta

SEQ ID NO: 26403 - DNA, 20 bp, synthetic construct
  source 1..20: mol_type = other DNA
gtggctgtccctgaagcact

SEQ ID NO: 26404 - DNA, 20 bp, synthetic construct
  source 1..20: mol_type = other DNA
agtggctgtccctgaagcac

SEQ ID NO: 26405 - DNA, 20 bp, synthetic construct
  source 1..20: mol_type = other DNA
cagtggctgtccctgaagca

SEQ ID NO: 26406 - DNA, 20 bp, synthetic construct
  source 1..20: mol_type = other DNA
ccagtggctgtccctgaagc

SEQ ID NO: 26407 - DNA, 20 bp, synthetic construct
  source 1..20: mol_type = other DNA
gccagtggctgtccctgaag

SEQ ID NO: 26408 - DNA, 20 bp, synthetic construct
  source 1..20: mol_type = other DNA
agccagtggctgtccctgaa

SEQ ID NO: 26409 - DNA, 20 bp, synthetic construct
  source 1..20: mol_type = other DNA
tagccagtggctgtccctga

SEQ ID NO: 26410 - DNA, 20 bp, synthetic construct
  source 1..20: mol_type = other DNA
atagccagtggctgtccctg

SEQ ID NO: 26411 - DNA, 20 bp, synthetic construct
  source 1..20: mol_type = other DNA
catagccagtggctgtccct

SEQ ID NO: 26412 - DNA, 20 bp, synthetic construct
  source 1..20: mol_type = other DNA
gcatagccagtggctgtccc

SEQ ID NO: 26413 - DNA, 20 bp, synthetic construct
  source 1..20: mol_type = other DNA
ggcatagccagtggctgtcc

SEQ ID NO: 26414 - DNA, 20 bp, synthetic construct
  source 1..20: mol_type = other DNA
gggcatagccagtggctgtc

SEQ ID NO: 26415 - DNA, 20 bp, synthetic construct
  source 1..20: mol_type = other DNA
tgggcatagccagtggctgt

SEQ ID NO: 26416 - DNA, 20 bp, synthetic construct
  source 1..20: mol_type = other DNA
ctgggcatagccagtggctg

SEQ ID NO: 26417 - DNA, 20 bp, synthetic construct
  source 1..20: mol_type = other DNA
tctgggcatagccagtggct

SEQ ID NO: 26418 - DNA, 20 bp, synthetic construct
  source 1..20: mol_type = other DNA
ttctgggcatagccagtggc

SEQ ID NO: 26419 - DNA, 20 bp, synthetic construct
  source 1..20: mol_type = other DNA
tttctgggcatagccagtgg

SEQ ID NO: 26420 - DNA, 20 bp, synthetic construct
  source 1..20: mol_type = other DNA
atttctgggcatagccagtg

SEQ ID NO: 26421 - DNA, 20 bp, synthetic construct
  source 1..20: mol_type = other DNA
tatttctgggcatagccagt

SEQ ID NO: 26422 - DNA, 20 bp, synthetic construct
  source 1..20: mol_type = other DNA
ttatttctgggcatagccag

SEQ ID NO: 26423 - DNA, 20 bp, synthetic construct
  source 1..20: mol_type = other DNA
cttatttctgggcatagcca

SEQ ID NO: 26424 - DNA, 20 bp, synthetic construct
  source 1..20: mol_type = other DNA
acttatttctgggcatagcc

SEQ ID NO: 26425 - DNA, 20 bp, synthetic construct
  source 1..20: mol_type = other DNA
tacttatttctgggcatagc

SEQ ID NO: 26426 - DNA, 20 bp, synthetic construct
  source 1..20: mol_type = other DNA
atacttatttctgggcatag

SEQ ID NO: 26427 - DNA, 20 bp, synthetic construct
  source 1..20: mol_type = other DNA
catacttatttctgggcata

SEQ ID NO: 26428 - DNA, 20 bp, synthetic construct
  source 1..20: mol_type = other DNA
acatacttatttctgggcat

SEQ ID NO: 26429 - DNA, 20 bp, synthetic construct
  source 1..20: mol_type = other DNA
aacatacttatttctgggca

SEQ ID NO: 26430 - DNA, 20 bp, synthetic construct
  source 1..20: mol_type = other DNA
aaacatacttatttctgggc

SEQ ID NO: 26431 - DNA, 20 bp, synthetic construct
  source 1..20: mol_type = other DNA
caaacatacttatttctggg

SEQ ID NO: 26432 - DNA, 20 bp, synthetic construct
  source 1..20: mol_type = other DNA
tcaaacatacttatttctgg

SEQ ID NO: 26433 - DNA, 20 bp, synthetic construct
  source 1..20: mol_type = other DNA
ctcaaacatacttatttctg

SEQ ID NO: 26434 - DNA, 20 bp, synthetic construct
  source 1..20: mol_type = other DNA
tctcaaacatacttatttct

SEQ ID NO: 26435 - DNA, 20 bp, synthetic construct
  source 1..20: mol_type = other DNA
ttctcaaacatacttatttc

SEQ ID NO: 26436 - DNA, 20 bp, synthetic construct
  source 1..20: mol_type = other DNA
cttctcaaacatacttattt

SEQ ID NO: 26437 - DNA, 20 bp, synthetic construct
  source 1..20: mol_type = other DNA
gcttctcaaacatacttatt

SEQ ID NO: 26438 - DNA, 20 bp, synthetic construct
  source 1..20: mol_type = other DNA
agcttctcaaacatacttat

SEQ ID NO: 26439 - DNA, 20 bp, synthetic construct
  source 1..20: mol_type = other DNA
aagcttctcaaacatactta

SEQ ID NO: 26440 - DNA, 20 bp, synthetic construct
  source 1..20: mol_type = other DNA
aaagcttctcaaacatactt

SEQ ID NO: 26441 - DNA, 20 bp, synthetic construct
  source 1..20: mol_type = other DNA
gaaagcttctcaaacatact

SEQ ID NO: 26442 - DNA, 20 bp, synthetic construct
  source 1..20: mol_type = other DNA
agaaagcttctcaaacatac

SEQ ID NO: 26443 - DNA, 20 bp, synthetic construct
  source 1..20: mol_type = other DNA
cagaaagcttctcaaacata

SEQ ID NO: 26444 - DNA, 20 bp, synthetic construct
  source 1..20: mol_type = other DNA
tcagaaagcttctcaaacat

SEQ ID NO: 26445 - DNA, 20 bp, synthetic construct
  source 1..20: mol_type = other DNA
gtcagaaagcttctcaaaca

SEQ ID NO: 26446 - DNA, 20 bp, synthetic construct
  source 1..20: mol_type = other DNA
ggtcagaaagcttctcaaac

SEQ ID NO: 26447 - DNA, 20 bp, synthetic construct
  source 1..20: mol_type = other DNA
aggtcagaaagcttctcaaa

SEQ ID NO: 26448 - DNA, 20 bp, synthetic construct
  source 1..20: mol_type = other DNA
gaggtcagaaagcttctcaa

SEQ ID NO: 26449 - DNA, 20 bp, synthetic construct
  source 1..20: mol_type = other DNA
tgaggtcagaaagcttctca

SEQ ID NO: 26450 - DNA, 20 bp, synthetic construct
  source 1..20: mol_type = other DNA
ctgaggtcagaaagcttctc

SEQ ID NO: 26451 - DNA, 20 bp, synthetic construct
  source 1..20: mol_type = other DNA
gctgaggtcagaaagcttct

SEQ ID NO: 26452 - DNA, 20 bp, synthetic construct
  source 1..20: mol_type = other DNA
agctgaggtcagaaagcttc

SEQ ID NO: 26453 - DNA, 20 bp, synthetic construct
  source 1..20: mol_type = other DNA
aagctgaggtcagaaagctt

SEQ ID NO: 26454 - DNA, 20 bp, synthetic construct
  source 1..20: mol_type = other DNA
caagctgaggtcagaaagct

SEQ ID NO: 26455 - DNA, 20 bp, synthetic construct
  source 1..20: mol_type = other DNA
tcaagctgaggtcagaaagc

SEQ ID NO: 26456 - DNA, 20 bp, synthetic construct
  source 1..20: mol_type = other DNA
ttcaagctgaggtcagaaag

SEQ ID NO: 26457 - DNA, 20 bp, synthetic construct
  source 1..20: mol_type = other DNA
tttcaagctgaggtcagaaa

SEQ ID NO: 26458 - DNA, 20 bp, synthetic construct
  source 1..20: mol_type = other DNA
ttttcaagctgaggtcagaa

SEQ ID NO: 26459 - DNA, 20 bp, synthetic construct
  source 1..20: mol_type = other DNA
tttttcaagctgaggtcaga

SEQ ID NO: 26460 - DNA, 20 bp, synthetic construct
  source 1..20: mol_type = other DNA
atttttcaagctgaggtcag

SEQ ID NO: 26461 - DNA, 20 bp, synthetic construct
  source 1..20: mol_type = other DNA
aatttttcaagctgaggtca

SEQ ID NO: 26462 - DNA, 20 bp, synthetic construct
  source 1..20: mol_type = other DNA
caatttttcaagctgaggtc

SEQ ID NO: 26463 - DNA, 20 bp, synthetic construct
  source 1..20: mol_type = other DNA
tcaatttttcaagctgaggt

SEQ ID NO: 26464 - DNA, 20 bp, synthetic construct
  source 1..20: mol_type = other DNA
atcaatttttcaagctgagg

SEQ ID NO: 26465 - DNA, 20 bp, synthetic construct
  source 1..20: mol_type = other DNA
aatcaatttttcaagctgag

SEQ ID NO: 26466 - DNA, 20 bp, synthetic construct
  source 1..20: mol_type = other DNA
taatcaatttttcaagctga

SEQ ID NO: 26467 - DNA, 20 bp, synthetic construct
  source 1..20: mol_type = other DNA
ctaatcaatttttcaagctg

SEQ ID NO: 26468 - DNA, 20 bp, synthetic construct
  source 1..20: mol_type = other DNA
cctaatcaatttttcaagct

SEQ ID NO: 26469 - DNA, 20 bp, synthetic construct
  source 1..20: mol_type = other DNA
ccctaatcaatttttcaagc

SEQ ID NO: 26470 - DNA, 20 bp, synthetic construct
  source 1..20: mol_type = other DNA
accctaatcaatttttcaag

SEQ ID NO: 26471 - DNA, 20 bp, synthetic construct
  source 1..20: mol_type = other DNA
gaccctaatcaatttttcaa

SEQ ID NO: 26472 - DNA, 20 bp, synthetic construct
  source 1..20: mol_type = other DNA
tgaccctaatcaatttttca

SEQ ID NO: 26473 - DNA, 20 bp, synthetic construct
  source 1..20: mol_type = other DNA
atgaccctaatcaatttttc

SEQ ID NO: 26474 - DNA, 20 bp, synthetic construct
  source 1..20: mol_type = other DNA
tatgaccctaatcaattttt

SEQ ID NO: 26475 - DNA, 20 bp, synthetic construct
  source 1..20: mol_type = other DNA
ttatgaccctaatcaatttt

SEQ ID NO: 26476 - DNA, 20 bp, synthetic construct
  source 1..20: mol_type = other DNA
attatgaccctaatcaattt

SEQ ID NO: 26477 - DNA, 20 bp, synthetic construct
  source 1..20: mol_type = other DNA
aattatgaccctaatcaatt

SEQ ID NO: 26478 - DNA, 20 bp, synthetic construct
  source 1..20: mol_type = other DNA
taattatgaccctaatcaat

SEQ ID NO: 26479 - DNA, 20 bp, synthetic construct
  source 1..20: mol_type = other DNA
ttaattatgaccctaatcaa

SEQ ID NO: 26480 - DNA, 20 bp, synthetic construct
  source 1..20: mol_type = other DNA
tttaattatgaccctaatca

SEQ ID NO: 26481 - DNA, 20 bp, synthetic construct
  source 1..20: mol_type = other DNA
ttttaattatgaccctaatc

SEQ ID NO: 26482 - DNA, 20 bp, synthetic construct
  source 1..20: mol_type = other DNA
tttttaattatgaccctaat

SEQ ID NO: 26483 - DNA, 20 bp, synthetic construct
  source 1..20: mol_type = other DNA
ctttttaattatgaccctaa

SEQ ID NO: 26484 - DNA, 20 bp, synthetic construct
  source 1..20: mol_type = other DNA
cctttttaattatgacccta

SEQ ID NO: 26485 - DNA, 20 bp, synthetic construct
  source 1..20: mol_type = other DNA
ccctttttaattatgaccct

SEQ ID NO: 26486 - DNA, 20 bp, synthetic construct
  source 1..20: mol_type = other DNA
tccctttttaattatgaccc

SEQ ID NO: 26487 - DNA, 20 bp, synthetic construct
  source 1..20: mol_type = other DNA
ctccctttttaattatgacc

SEQ ID NO: 26488 - DNA, 20 bp, synthetic construct
  source 1..20: mol_type = other DNA
cctccctttttaattatgac

SEQ ID NO: 26489 - DNA, 20 bp, synthetic construct
  source 1..20: mol_type = other DNA
ccctccctttttaattatga

SEQ ID NO: 26490 - DNA, 20 bp, synthetic construct
  source 1..20: mol_type = other DNA
tccctccctttttaattatg

SEQ ID NO: 26491 - DNA, 20 bp, synthetic construct
  source 1..20: mol_type = other DNA
ttccctccctttttaattat

SEQ ID NO: 26492 - DNA, 20 bp, synthetic construct
  source 1..20: mol_type = other DNA
tttccctccctttttaatta

SEQ ID NO: 26493 - DNA, 20 bp, synthetic construct
  source 1..20: mol_type = other DNA
gtttccctccctttttaatt

SEQ ID NO: 26494 - DNA, 20 bp, synthetic construct
  source 1..20: mol_type = other DNA
tgtttccctccctttttaat

SEQ ID NO: 26495 - DNA, 20 bp, synthetic construct
  source 1..20: mol_type = other DNA
ctgtttccctccctttttaa

SEQ ID NO: 26496 - DNA, 20 bp, synthetic construct
  source 1..20: mol_type = other DNA
cctgtttccctcccttttta

SEQ ID NO: 26497 - DNA, 20 bp, synthetic construct
  source 1..20: mol_type = other DNA
tcctgtttccctcccttttt

SEQ ID NO: 26498 - DNA, 20 bp, synthetic construct
  source 1..20: mol_type = other DNA
atcctgtttccctccctttt

SEQ ID NO: 26499 - DNA, 20 bp, synthetic construct
  source 1..20: mol_type = other DNA
aatcctgtttccctcccttt

SEQ ID NO: 26500 - DNA, 20 bp, synthetic construct
  source 1..20: mol_type = other DNA
caatcctgtttccctccctt

SEQ ID NO: 26501 - DNA, 20 bp, synthetic construct
  source 1..20: mol_type = other DNA
tcaatcctgtttccctccct

SEQ ID NO: 26502 - DNA, 20 bp, synthetic construct
  source 1..20: mol_type = other DNA
ctcaatcctgtttccctccc

SEQ ID NO: 26503 - DNA, 20 bp, synthetic construct
  source 1..20: mol_type = other DNA
actcaatcctgtttccctcc

SEQ ID NO: 26504 - DNA, 20 bp, synthetic construct
  source 1..20: mol_type = other DNA
cactcaatcctgtttccctc

SEQ ID NO: 26505 - DNA, 20 bp, synthetic construct
  source 1..20: mol_type = other DNA
tcactcaatcctgtttccct

SEQ ID NO: 26506 - DNA, 20 bp, synthetic construct
  source 1..20: mol_type = other DNA
ttcactcaatcctgtttccc

SEQ ID NO: 26507 - DNA, 20 bp, synthetic construct
  source 1..20: mol_type = other DNA
gttcactcaatcctgtttcc

SEQ ID NO: 26508 - DNA, 20 bp, synthetic construct
  source 1..20: mol_type = other DNA
ggttcactcaatcctgtttc

SEQ ID NO: 26509 - DNA, 20 bp, synthetic construct
  source 1..20: mol_type = other DNA
cggttcactcaatcctgttt

SEQ ID NO: 26510 - DNA, 20 bp, synthetic construct
  source 1..20: mol_type = other DNA
ccggttcactcaatcctgtt

SEQ ID NO: 26511 - DNA, 20 bp, synthetic construct
  source 1..20: mol_type = other DNA
tccggttcactcaatcctgt

SEQ ID NO: 26512 - DNA, 20 bp, synthetic construct
  source 1..20: mol_type = other DNA
gtccggttcactcaatcctg

SEQ ID NO: 26513 - DNA, 20 bp, synthetic construct
  source 1..20: mol_type = other DNA
cgtccggttcactcaatcct

SEQ ID NO: 26514 - DNA, 20 bp, synthetic construct
  source 1..20: mol_type = other DNA
gcgtccggttcactcaatcc

SEQ ID NO: 26515 - DNA, 20 bp, synthetic construct
  source 1..20: mol_type = other DNA
agcgtccggttcactcaatc

SEQ ID NO: 26516 - DNA, 20 bp, synthetic construct
  source 1..20: mol_type = other DNA
tagcgtccggttcactcaat

SEQ ID NO: 26517 - DNA, 20 bp, synthetic construct
  source 1..20: mol_type = other DNA
gtagcgtccggttcactcaa

SEQ ID NO: 26518 - DNA, 20 bp, synthetic construct
  source 1..20: mol_type = other DNA
ggtagcgtccggttcactca

SEQ ID NO: 26519 - DNA, 20 bp, synthetic construct
  source 1..20: mol_type = other DNA
cggtagcgtccggttcactc

SEQ ID NO: 26520 - DNA, 20 bp, synthetic construct
  source 1..20: mol_type = other DNA
acggtagcgtccggttcact

SEQ ID NO: 26521 - DNA, 20 bp, synthetic construct
  source 1..20: mol_type = other DNA
cacggtagcgtccggttcac

SEQ ID NO: 26522 - DNA, 20 bp, synthetic construct
  source 1..20: mol_type = other DNA
tcacggtagcgtccggttca

SEQ ID NO: 26523 - DNA, 20 bp, synthetic construct
  source 1..20: mol_type = other DNA
ctcacggtagcgtccggttc

SEQ ID NO: 26524 - DNA, 20 bp, synthetic construct
  source 1..20: mol_type = other DNA
actcacggtagcgtccggtt

SEQ ID NO: 26525 - DNA, 20 bp, synthetic construct
  source 1..20: mol_type = other DNA
aactcacggtagcgtccggt

SEQ ID NO: 26526 - DNA, 20 bp, synthetic construct
  source 1..20: mol_type = other DNA
aaactcacggtagcgtccgg

SEQ ID NO: 26527 - DNA, 20 bp, synthetic construct
  source 1..20: mol_type = other DNA
taaactcacggtagcgtccg

SEQ ID NO: 26528 - DNA, 20 bp, synthetic construct
  source 1..20: mol_type = other DNA
ataaactcacggtagcgtcc

SEQ ID NO: 26529 - DNA, 20 bp, synthetic construct
  source 1..20: mol_type = other DNA
aataaactcacggtagcgtc

SEQ ID NO: 26530 - DNA, 20 bp, synthetic construct
  source 1..20: mol_type = other DNA
gaataaactcacggtagcgt

SEQ ID NO: 26531 - DNA, 20 bp, synthetic construct
  source 1..20: mol_type = other DNA
agaataaactcacggtagcg

SEQ ID NO: 26532 - DNA, 20 bp, synthetic construct
  source 1..20: mol_type = other DNA
gagaataaactcacggtagc

SEQ ID NO: 26533 - DNA, 20 bp, synthetic construct
  source 1..20: mol_type = other DNA
ggagaataaactcacggtag

SEQ ID NO: 26534 - DNA, 20 bp, synthetic construct
  source 1..20: mol_type = other DNA
gggagaataaactcacggta

SEQ ID NO: 26535 - DNA, 20 bp, synthetic construct
  source 1..20: mol_type = other DNA
tgggagaataaactcacggt

SEQ ID NO: 26536 - DNA, 20 bp, synthetic construct
  source 1..20: mol_type = other DNA
ctgggagaataaactcacgg

SEQ ID NO: 26537 - DNA, 20 bp, synthetic construct
  source 1..20: mol_type = other DNA
cctgggagaataaactcacg

SEQ ID NO: 26538 - DNA, 20 bp, synthetic construct
  source 1..20: mol_type = other DNA
ccctgggagaataaactcac

SEQ ID NO: 26539 - DNA, 20 bp, synthetic construct
  source 1..20: mol_type = other DNA
gccctgggagaataaactca

SEQ ID NO: 26540 - DNA, 20 bp, synthetic construct
  source 1..20: mol_type = other DNA
tgccctgggagaataaactc

SEQ ID NO: 26541 - DNA, 20 bp, synthetic construct
  source 1..20: mol_type = other DNA
atgccctgggagaataaact

SEQ ID NO: 26542 - DNA, 20 bp, synthetic construct
  source 1..20: mol_type = other DNA
tatgccctgggagaataaac

SEQ ID NO: 26543 - DNA, 20 bp, synthetic construct
  source 1..20: mol_type = other DNA
gtatgccctgggagaataaa

SEQ ID NO: 26544 - DNA, 20 bp, synthetic construct
  source 1..20: mol_type = other DNA
tgtatgccctgggagaataa

SEQ ID NO: 26545 - DNA, 20 bp, synthetic construct
  source 1..20: mol_type = other DNA
atgtatgccctgggagaata

SEQ ID NO: 26546 - DNA, 20 bp, synthetic construct
  source 1..20: mol_type = other DNA
tatgtatgccctgggagaat

SEQ ID NO: 26547 - DNA, 20 bp, synthetic construct
  source 1..20: mol_type = other DNA
ttatgtatgccctgggagaa

SEQ ID NO: 26548 - DNA, 20 bp, synthetic construct
  source 1..20: mol_type = other DNA
attatgtatgccctgggaga

SEQ ID NO: 26549 - DNA, 20 bp, synthetic construct
  source 1..20: mol_type = other DNA
gattatgtatgccctgggag

SEQ ID NO: 26550 - DNA, 20 bp, synthetic construct
  source 1..20: mol_type = other DNA
agattatgtatgccctggga

SEQ ID NO: 26551 - DNA, 20 bp, synthetic construct
  source 1..20: mol_type = other DNA
gagattatgtatgccctggg

SEQ ID NO: 26552 - DNA, 20 bp, synthetic construct
  source 1..20: mol_type = other DNA
tgagattatgtatgccctgg

SEQ ID NO: 26553 - DNA, 20 bp, synthetic construct
  source 1..20: mol_type = other DNA
atgagattatgtatgccctg

SEQ ID NO: 26554 - DNA, 20 bp, synthetic construct
  source 1..20: mol_type = other DNA
catgagattatgtatgccct

SEQ ID NO: 26555 - DNA, 20 bp, synthetic construct
  source 1..20: mol_type = other DNA
acatgagattatgtatgccc

SEQ ID NO: 26556 - DNA, 20 bp, synthetic construct
  source 1..20: mol_type = other DNA
cacatgagattatgtatgcc

SEQ ID NO: 26557 - DNA, 20 bp, synthetic construct
  source 1..20: mol_type = other DNA
tcacatgagattatgtatgc

SEQ ID NO: 26558 - DNA, 20 bp, synthetic construct
  source 1..20: mol_type = other DNA
atcacatgagattatgtatg

SEQ ID NO: 26559 - DNA, 20 bp, synthetic construct
  source 1..20: mol_type = other DNA
aatcacatgagattatgtat

SEQ ID NO: 26560 - DNA, 20 bp, synthetic construct
  source 1..20: mol_type = other DNA
taatcacatgagattatgta

SEQ ID NO: 26561 - DNA, 20 bp, synthetic construct
  source 1..20: mol_type = other DNA
gtaatcacatgagattatgt

SEQ ID NO: 26562 - DNA, 20 bp, synthetic construct
  source 1..20: mol_type = other DNA
ggtaatcacatgagattatg

SEQ ID NO: 26563 - DNA, 20 bp, synthetic construct
  source 1..20: mol_type = other DNA
tggtaatcacatgagattat

SEQ ID NO: 26564 - DNA, 20 bp, synthetic construct
  source 1..20: mol_type = other DNA
gtggtaatcacatgagatta

SEQ ID NO: 26565 - DNA, 20 bp, synthetic construct
  source 1..20: mol_type = other DNA
tgtggtaatcacatgagatt

SEQ ID NO: 26566 - DNA, 20 bp, synthetic construct
  source 1..20: mol_type = other DNA
atgtggtaatcacatgagat

SEQ ID NO: 26567 - DNA, 20 bp, synthetic construct
  source 1..20: mol_type = other DNA
tatgtggtaatcacatgaga

SEQ ID NO: 26568 - DNA, 20 bp, synthetic construct
  source 1..20: mol_type = other DNA
ctatgtggtaatcacatgag

SEQ ID NO: 26569 - DNA, 20 bp, synthetic construct
  source 1..20: mol_type = other DNA
gctatgtggtaatcacatga

SEQ ID NO: 26570 - DNA, 20 bp, synthetic construct
  source 1..20: mol_type = other DNA
ggctatgtggtaatcacatg

SEQ ID NO: 26571 - DNA, 20 bp, synthetic construct
  source 1..20: mol_type = other DNA
gggctatgtggtaatcacat

SEQ ID NO: 26572 - DNA, 20 bp, synthetic construct
  source 1..20: mol_type = other DNA
agggctatgtggtaatcaca

SEQ ID NO: 26573 - DNA, 20 bp, synthetic construct
  source 1..20: mol_type = other DNA
cagggctatgtggtaatcac

SEQ ID NO: 26574 - DNA, 20 bp, synthetic construct
  source 1..20: mol_type = other DNA
acagggctatgtggtaatca

SEQ ID NO: 26575 - DNA, 20 bp, synthetic construct
  source 1..20: mol_type = other DNA
aacagggctatgtggtaatc

SEQ ID NO: 26576 - DNA, 20 bp, synthetic construct
  source 1..20: mol_type = other DNA
taacagggctatgtggtaat

SEQ ID NO: 26577 - DNA, 20 bp, synthetic construct
  source 1..20: mol_type = other DNA
ctaacagggctatgtggtaa

SEQ ID NO: 26578 - DNA, 20 bp, synthetic construct
  source 1..20: mol_type = other DNA
tctaacagggctatgtggta

SEQ ID NO: 26579 - DNA, 20 bp, synthetic construct
  source 1..20: mol_type = other DNA
atctaacagggctatgtggt

SEQ ID NO: 26580 - DNA, 20 bp, synthetic construct
  source 1..20: mol_type = other DNA
tatctaacagggctatgtgg

SEQ ID NO: 26581 - DNA, 20 bp, synthetic construct
  source 1..20: mol_type = other DNA
ttatctaacagggctatgtg

SEQ ID NO: 26582 - DNA, 20 bp, synthetic construct
  source 1..20: mol_type = other DNA
attatctaacagggctatgt

SEQ ID NO: 26583 - DNA, 20 bp, synthetic construct
  source 1..20: mol_type = other DNA
gattatctaacagggctatg

SEQ ID NO: 26584 - DNA, 20 bp, synthetic construct
  source 1..20: mol_type = other DNA
agattatctaacagggctat

SEQ ID NO: 26585 - DNA, 20 bp, synthetic construct
  source 1..20: mol_type = other DNA
cagattatctaacagggcta

SEQ ID NO: 26586 - DNA, 20 bp, synthetic construct
  source 1..20: mol_type = other DNA
acagattatctaacagggct

SEQ ID NO: 26587 - DNA, 20 bp, synthetic construct
  source 1..20: mol_type = other DNA
aacagattatctaacagggc

SEQ ID NO: 26588 - DNA, 20 bp, synthetic construct
  source 1..20: mol_type = other DNA
taacagattatctaacaggg

SEQ ID NO: 26589 - DNA, 20 bp, synthetic construct
  source 1..20: mol_type = other DNA
ataacagattatctaacagg

SEQ ID NO: 26590 - DNA, 20 bp, synthetic construct
  source 1..20: mol_type = other DNA
gataacagattatctaacag

SEQ ID NO: 26591 - DNA, 20 bp, synthetic construct
  source 1..20: mol_type = other DNA
ggataacagattatctaaca

SEQ ID NO: 26592 - DNA, 20 bp, synthetic construct
  source 1..20: mol_type = other DNA
aggataacagattatctaac

SEQ ID NO: 26593 - DNA, 20 bp, synthetic construct
  source 1..20: mol_type = other DNA
caggataacagattatctaa

SEQ ID NO: 26594 - DNA, 20 bp, synthetic construct
  source 1..20: mol_type = other DNA
acaggataacagattatcta

SEQ ID NO: 26595 - DNA, 20 bp, synthetic construct
  source 1..20: mol_type = other DNA
gacaggataacagattatct

SEQ ID NO: 26596 - DNA, 20 bp, synthetic construct
  source 1..20: mol_type = other DNA
ggacaggataacagattatc

SEQ ID NO: 26597 - DNA, 20 bp, synthetic construct
  source 1..20: mol_type = other DNA
aggacaggataacagattat

SEQ ID NO: 26598 - DNA, 20 bp, synthetic construct
  source 1..20: mol_type = other DNA
gaggacaggataacagatta

SEQ ID NO: 26599 - DNA, 20 bp, synthetic construct
  source 1..20: mol_type = other DNA
tgaggacaggataacagatt

SEQ ID NO: 26600 - DNA, 20 bp, synthetic construct
  source 1..20: mol_type = other DNA
atgaggacaggataacagat

SEQ ID NO: 26601 - DNA, 20 bp, synthetic construct
  source 1..20: mol_type = other DNA
aatgaggacaggataacaga

SEQ ID NO: 26602 - DNA, 20 bp, synthetic construct
  source 1..20: mol_type = other DNA
aaatgaggacaggataacag

SEQ ID NO: 26603 - DNA, 20 bp, synthetic construct
  source 1..20: mol_type = other DNA
aaaatgaggacaggataaca

SEQ ID NO: 26604 - DNA, 20 bp, synthetic construct
  source 1..20: mol_type = other DNA
taaaatgaggacaggataac

SEQ ID NO: 26605 - DNA, 20 bp, synthetic construct
  source 1..20: mol_type = other DNA
gtaaaatgaggacaggataa

SEQ ID NO: 26606 - DNA, 20 bp, synthetic construct
  source 1..20: mol_type = other DNA
ggtaaaatgaggacaggata

SEQ ID NO: 26607 - DNA, 20 bp, synthetic construct
  source 1..20: mol_type = other DNA
gggtaaaatgaggacaggat

SEQ ID NO: 26608 - DNA, 20 bp, synthetic construct
  source 1..20: mol_type = other DNA
tgggtaaaatgaggacagga

SEQ ID NO: 26609 - DNA, 20 bp, synthetic construct
  source 1..20: mol_type = other DNA
atgggtaaaatgaggacagg

SEQ ID NO: 26610 - DNA, 20 bp, synthetic construct
  source 1..20: mol_type = other DNA
catgggtaaaatgaggacag

SEQ ID NO: 26611 - DNA, 20 bp, synthetic construct
  source 1..20: mol_type = other DNA
tcatgggtaaaatgaggaca

SEQ ID NO: 26612 - DNA, 20 bp, synthetic construct
  source 1..20: mol_type = other DNA
ctcatgggtaaaatgaggac

SEQ ID NO: 26613 - DNA, 20 bp, synthetic construct
  source 1..20: mol_type = other DNA
cctcatgggtaaaatgagga

SEQ ID NO: 26614 - DNA, 20 bp, synthetic construct
  source 1..20: mol_type = other DNA
tcctcatgggtaaaatgagg

SEQ ID NO: 26615 - DNA, 20 bp, synthetic construct
  source 1..20: mol_type = other DNA
ttcctcatgggtaaaatgag

SEQ ID NO: 26616 - DNA, 20 bp, synthetic construct
  source 1..20: mol_type = other DNA
tttcctcatgggtaaaatga

SEQ ID NO: 26617 - DNA, 20 bp, synthetic construct
  source 1..20: mol_type = other DNA
atttcctcatgggtaaaatg

SEQ ID NO: 26618 - DNA, 20 bp, synthetic construct
  source 1..20: mol_type = other DNA
catttcctcatgggtaaaat

SEQ ID NO: 26619 - DNA, 20 bp, synthetic construct
  source 1..20: mol_type = other DNA
tcatttcctcatgggtaaaa

SEQ ID NO: 26620 - DNA, 20 bp, synthetic construct
  source 1..20: mol_type = other DNA
ttcatttcctcatgggtaaa

SEQ ID NO: 26621 - DNA, 20 bp, synthetic construct
  source 1..20: mol_type = other DNA
cttcatttcctcatgggtaa

SEQ ID NO: 26622 - DNA, 20 bp, synthetic construct
  source 1..20: mol_type = other DNA
ccttcatttcctcatgggta

SEQ ID NO: 26623 - DNA, 20 bp, synthetic construct
  source 1..20: mol_type = other DNA
gccttcatttcctcatgggt

SEQ ID NO: 26624 - DNA, 20 bp, synthetic construct
  source 1..20: mol_type = other DNA
ggccttcatttcctcatggg

SEQ ID NO: 26625 - DNA, 20 bp, synthetic construct
  source 1..20: mol_type = other DNA
gggccttcatttcctcatgg

SEQ ID NO: 26626 - DNA, 20 bp, synthetic construct
  source 1..20: mol_type = other DNA
tgggccttcatttcctcatg

SEQ ID NO: 26627 - DNA, 20 bp, synthetic construct
  source 1..20: mol_type = other DNA
ctgggccttcatttcctcat

SEQ ID NO: 26628 - DNA, 20 bp, synthetic construct
  source 1..20: mol_type = other DNA
tctgggccttcatttcctca

SEQ ID NO: 26629 - DNA, 20 bp, synthetic construct
  source 1..20: mol_type = other DNA
ctctgggccttcatttcctc

SEQ ID NO: 26630 - DNA, 20 bp, synthetic construct
  source 1..20: mol_type = other DNA
tctctgggccttcatttcct

SEQ ID NO: 26631 - DNA, 20 bp, synthetic construct
  source 1..20: mol_type = other DNA
ctctctgggccttcatttcc

SEQ ID NO: 26632 - DNA, 20 bp, synthetic construct
  source 1..20: mol_type = other DNA
cctctctgggccttcatttc

SEQ ID NO: 26633 - DNA, 20 bp, synthetic construct
  source 1..20: mol_type = other DNA
acctctctgggccttcattt

SEQ ID NO: 26634 - DNA, 20 bp, synthetic construct
  source 1..20: mol_type = other DNA
aacctctctgggccttcatt

SEQ ID NO: 26635 - DNA, 20 bp, synthetic construct
  source 1..20: mol_type = other DNA
taacctctctgggccttcat

SEQ ID NO: 26636 - DNA, 20 bp, synthetic construct
  source 1..20: mol_type = other DNA
ttaacctctctgggccttca

SEQ ID NO: 26637 - DNA, 20 bp, synthetic construct
  source 1..20: mol_type = other DNA
tttaacctctctgggccttc

SEQ ID NO: 26638 - DNA, 20 bp, synthetic construct
  source 1..20: mol_type = other DNA
atttaacctctctgggcctt

SEQ ID NO: 26639 - DNA, 20 bp, synthetic construct
  source 1..20: mol_type = other DNA
catttaacctctctgggcct

SEQ ID NO: 26640 - DNA, 20 bp, synthetic construct
  source 1..20: mol_type = other DNA
tcatttaacctctctgggcc

SEQ ID NO: 26641 - DNA, 20 bp, synthetic construct
  source 1..20: mol_type = other DNA
gtcatttaacctctctgggc

SEQ ID NO: 26642 - DNA, 20 bp, synthetic construct
  source 1..20: mol_type = other DNA
ggtcatttaacctctctggg

SEQ ID NO: 26643 - DNA, 20 bp, synthetic construct
  source 1..20: mol_type = other DNA
aggtcatttaacctctctgg

SEQ ID NO: 26644 - DNA, 20 bp, synthetic construct
  source 1..20: mol_type = other DNA
taggtcatttaacctctctg

SEQ ID NO: 26645 - DNA, 20 bp, synthetic construct
  source 1..20: mol_type = other DNA
ataggtcatttaacctctct

SEQ ID NO: 26646 - DNA, 20 bp, synthetic construct
  source 1..20: mol_type = other DNA
aataggtcatttaacctctc

SEQ ID NO: 26647 - DNA, 20 bp, synthetic construct
  source 1..20: mol_type = other DNA
gaataggtcatttaacctct

SEQ ID NO: 26648 - DNA, 20 bp, synthetic construct
  source 1..20: mol_type = other DNA
tgaataggtcatttaacctc

SEQ ID NO: 26649 - DNA, 20 bp, synthetic construct
  source 1..20: mol_type = other DNA
ttgaataggtcatttaacct

SEQ ID NO: 26650 - DNA, 20 bp, synthetic construct
  source 1..20: mol_type = other DNA
tttgaataggtcatttaacc

SEQ ID NO: 26651 - DNA, 20 bp, synthetic construct
  source 1..20: mol_type = other DNA
atttgaataggtcatttaac

SEQ ID NO: 26652 - DNA, 20 bp, synthetic construct
  source 1..20: mol_type = other DNA
aatttgaataggtcatttaa

SEQ ID NO: 26653 - DNA, 20 bp, synthetic construct
  source 1..20: mol_type = other DNA
gaatttgaataggtcattta

SEQ ID NO: 26654 - DNA, 20 bp, synthetic construct
  source 1..20: mol_type = other DNA
tgaatttgaataggtcattt

SEQ ID NO: 26655 - DNA, 20 bp, synthetic construct
  source 1..20: mol_type = other DNA
gtgaatttgaataggtcatt

SEQ ID NO: 26656 - DNA, 20 bp, synthetic construct
  source 1..20: mol_type = other DNA
agtgaatttgaataggtcat

SEQ ID NO: 26657 - DNA, 20 bp, synthetic construct
  source 1..20: mol_type = other DNA
gagtgaatttgaataggtca

SEQ ID NO: 26658 - DNA, 20 bp, synthetic construct
  source 1..20: mol_type = other DNA
tgagtgaatttgaataggtc

SEQ ID NO: 26659 - DNA, 20 bp, synthetic construct
  source 1..20: mol_type = other DNA
ctgagtgaatttgaataggt

SEQ ID NO: 26660 - DNA, 20 bp, synthetic construct
  source 1..20: mol_type = other DNA
tctgagtgaatttgaatagg

SEQ ID NO: 26661 - DNA, 20 bp, synthetic construct
  source 1..20: mol_type = other DNA
ttctgagtgaatttgaatag

SEQ ID NO: 26662 - DNA, 20 bp, synthetic construct
  source 1..20: mol_type = other DNA
cttctgagtgaatttgaata

SEQ ID NO: 26663 - DNA, 20 bp, synthetic construct
  source 1..20: mol_type = other DNA
ccttctgagtgaatttgaat

SEQ ID NO: 26664 - DNA, 20 bp, synthetic construct
  source 1..20: mol_type = other DNA
accttctgagtgaatttgaa

SEQ ID NO: 26665 - DNA, 20 bp, synthetic construct
  source 1..20: mol_type = other DNA
caccttctgagtgaatttga

SEQ ID NO: 26666 - DNA, 20 bp, synthetic construct
  source 1..20: mol_type = other DNA
ccaccttctgagtgaatttg

SEQ ID NO: 26667 - DNA, 20 bp, synthetic construct
  source 1..20: mol_type = other DNA
gccaccttctgagtgaattt

SEQ ID NO: 26668 - DNA, 20 bp, synthetic construct
  source 1..20: mol_type = other DNA
tgccaccttctgagtgaatt

SEQ ID NO: 26669 - DNA, 20 bp, synthetic construct
  source 1..20: mol_type = other DNA
ctgccaccttctgagtgaat

SEQ ID NO: 26670 - DNA, 20 bp, synthetic construct
  source 1..20: mol_type = other DNA
tctgccaccttctgagtgaa

SEQ ID NO: 26671 - DNA, 20 bp, synthetic construct
  source 1..20: mol_type = other DNA
ctctgccaccttctgagtga

SEQ ID NO: 26672 - DNA, 20 bp, synthetic construct
  source 1..20: mol_type = other DNA
tctctgccaccttctgagtg

SEQ ID NO: 26673 - DNA, 20 bp, synthetic construct
  source 1..20: mol_type = other DNA
atctctgccaccttctgagt

SEQ ID NO: 26674 - DNA, 20 bp, synthetic construct
  source 1..20: mol_type = other DNA
catctctgccaccttctgag

SEQ ID NO: 26675 - DNA, 20 bp, synthetic construct
  source 1..20: mol_type = other DNA
tcatctctgccaccttctga

SEQ ID NO: 26676 - DNA, 20 bp, synthetic construct
  source 1..20: mol_type = other DNA
ctcatctctgccaccttctg

SEQ ID NO: 26677 - DNA, 20 bp, synthetic construct
  source 1..20: mol_type = other DNA
actcatctctgccaccttct

SEQ ID NO: 26678 - DNA, 20 bp, synthetic construct
  source 1..20: mol_type = other DNA
aactcatctctgccaccttc

SEQ ID NO: 26679 - DNA, 20 bp, synthetic construct
  source 1..20: mol_type = other DNA
taactcatctctgccacctt

SEQ ID NO: 26680 - DNA, 20 bp, synthetic construct
  source 1..20: mol_type = other DNA
gtaactcatctctgccacct

SEQ ID NO: 26681 - DNA, 20 bp, synthetic construct
  source 1..20: mol_type = other DNA
agtaactcatctctgccacc

SEQ ID NO: 26682 - DNA, 20 bp, synthetic construct
  source 1..20: mol_type = other DNA
tagtaactcatctctgccac

SEQ ID NO: 26683 - DNA, 20 bp, synthetic construct
  source 1..20: mol_type = other DNA
atagtaactcatctctgcca

SEQ ID NO: 26684 - DNA, 20 bp, synthetic construct
  source 1..20: mol_type = other DNA
gatagtaactcatctctgcc

SEQ ID NO: 26685 - DNA, 20 bp, synthetic construct
  source 1..20: mol_type = other DNA
tgatagtaactcatctctgc

SEQ ID NO: 26686 - DNA, 20 bp, synthetic construct
  source 1..20: mol_type = other DNA
atgatagtaactcatctctg

SEQ ID NO: 26687 - DNA, 20 bp, synthetic construct
  source 1..20: mol_type = other DNA
aatgatagtaactcatctct

SEQ ID NO: 26688 - DNA, 20 bp, synthetic construct
  source 1..20: mol_type = other DNA
caatgatagtaactcatctc

SEQ ID NO: 26689 - DNA, 20 bp, synthetic construct
  source 1..20: mol_type = other DNA
acaatgatagtaactcatct

SEQ ID NO: 26690 - DNA, 20 bp, synthetic construct
  source 1..20: mol_type = other DNA
tacaatgatagtaactcatc

SEQ ID NO: 26691 - DNA, 20 bp, synthetic construct
  source 1..20: mol_type = other DNA
atacaatgatagtaactcat

SEQ ID NO: 26692 - DNA, 20 bp, synthetic construct
  source 1..20: mol_type = other DNA
aatacaatgatagtaactca

SEQ ID NO: 26693 - DNA, 20 bp, synthetic construct
  source 1..20: mol_type = other DNA
aaatacaatgatagtaactc

SEQ ID NO: 26694 - DNA, 20 bp, synthetic construct
  source 1..20: mol_type = other DNA
aaaatacaatgatagtaact

SEQ ID NO: 26695 - DNA, 20 bp, synthetic construct
  source 1..20: mol_type = other DNA
caaaatacaatgatagtaac

SEQ ID NO: 26696 - DNA, 20 bp, synthetic construct
  source 1..20: mol_type = other DNA
ccaaaatacaatgatagtaa

SEQ ID NO: 26697 - DNA, 20 bp, synthetic construct
  source 1..20: mol_type = other DNA
tccaaaatacaatgatagta

SEQ ID NO: 26698 - DNA, 20 bp, synthetic construct
  source 1..20: mol_type = other DNA
atccaaaatacaatgatagt

SEQ ID NO: 26699 - DNA, 20 bp, synthetic construct
  source 1..20: mol_type = other DNA
gatccaaaatacaatgatag

SEQ ID NO: 26700 - DNA, 20 bp, synthetic construct
  source 1..20: mol_type = other DNA
agatccaaaatacaatgata

SEQ ID NO: 26701 - DNA, 20 bp, synthetic construct
  source 1..20: mol_type = other DNA
gagatccaaaatacaatgat

SEQ ID NO: 26702 - DNA, 20 bp, synthetic construct
  source 1..20: mol_type = other DNA
agagatccaaaatacaatga

SEQ ID NO: 26703 - DNA, 20 bp, synthetic construct
  source 1..20: mol_type = other DNA
cagagatccaaaatacaatg

SEQ ID NO: 26704 - DNA, 20 bp, synthetic construct
  source 1..20: mol_type = other DNA
ccagagatccaaaatacaat

SEQ ID NO: 26705 - DNA, 20 bp, synthetic construct
  source 1..20: mol_type = other DNA
tccagagatccaaaatacaa

SEQ ID NO: 26706 - DNA, 20 bp, synthetic construct
  source 1..20: mol_type = other DNA
ttccagagatccaaaataca

SEQ ID NO: 26707 - DNA, 20 bp, synthetic construct
  source 1..20: mol_type = other DNA
tttccagagatccaaaatac

SEQ ID NO: 26708 - DNA, 20 bp, synthetic construct
  source 1..20: mol_type = other DNA
ctttccagagatccaaaata

SEQ ID NO: 26709 - DNA, 20 bp, synthetic construct
  source 1..20: mol_type = other DNA
tctttccagagatccaaaat

SEQ ID NO: 26710 - DNA, 20 bp, synthetic construct
  source 1..20: mol_type = other DNA
ttctttccagagatccaaaa

SEQ ID NO: 26711 - DNA, 20 bp, synthetic construct
  source 1..20: mol_type = other DNA
tttctttccagagatccaaa

SEQ ID NO: 26712 - DNA, 20 bp, synthetic construct
  source 1..20: mol_type = other DNA
ctttctttccagagatccaa

SEQ ID NO: 26713 - DNA, 20 bp, synthetic construct
  source 1..20: mol_type = other DNA
tctttctttccagagatcca

SEQ ID NO: 26714 - DNA, 20 bp, synthetic construct
  source 1..20: mol_type = other DNA
ttctttctttccagagatcc

SEQ ID NO: 26715 - DNA, 20 bp, synthetic construct
  source 1..20: mol_type = other DNA
tttctttctttccagagatc

SEQ ID NO: 26716 - DNA, 20 bp, synthetic construct
  source 1..20: mol_type = other DNA
ttttctttctttccagagat

SEQ ID NO: 26717 - DNA, 20 bp, synthetic construct
  source 1..20: mol_type = other DNA
gttttctttctttccagaga

SEQ ID NO: 26718 - DNA, 20 bp, synthetic construct
  source 1..20: mol_type = other DNA
agttttctttctttccagag

SEQ ID NO: 26719 - DNA, 20 bp, synthetic construct
  source 1..20: mol_type = other DNA
tagttttctttctttccaga

SEQ ID NO: 26720 - DNA, 20 bp, synthetic construct
  source 1..20: mol_type = other DNA
ctagttttctttctttccag

SEQ ID NO: 26721 - DNA, 20 bp, synthetic construct
  source 1..20: mol_type = other DNA
actagttttctttctttcca

SEQ ID NO: 26722 - DNA, 20 bp, synthetic construct
  source 1..20: mol_type = other DNA
cactagttttctttctttcc

SEQ ID NO: 26723 - DNA, 20 bp, synthetic construct
  source 1..20: mol_type = other DNA
tcactagttttctttctttc

SEQ ID NO: 26724 - DNA, 20 bp, synthetic construct
  source 1..20: mol_type = other DNA
atcactagttttctttcttt

SEQ ID NO: 26725 - DNA, 20 bp, synthetic construct
  source 1..20: mol_type = other DNA
catcactagttttctttctt

SEQ ID NO: 26726 - DNA, 20 bp, synthetic construct
  source 1..20: mol_type = other DNA
ccatcactagttttctttct

SEQ ID NO: 26727 - DNA, 20 bp, synthetic construct
  source 1..20: mol_type = other DNA
accatcactagttttctttc

SEQ ID NO: 26728 - DNA, 20 bp, synthetic construct
  source 1..20: mol_type = other DNA
taccatcactagttttcttt

SEQ ID NO: 26729 - DNA, 20 bp, synthetic construct
  source 1..20: mol_type = other DNA
ataccatcactagttttctt

SEQ ID NO: 26730 - DNA, 20 bp, synthetic construct
  source 1..20: mol_type = other DNA
aataccatcactagttttct

SEQ ID NO: 26731 - DNA, 20 bp, synthetic construct
  source 1..20: mol_type = other DNA
taataccatcactagttttc

SEQ ID NO: 26732 - DNA, 20 bp, synthetic construct
  source 1..20: mol_type = other DNA
ttaataccatcactagtttt

SEQ ID NO: 26733 - DNA, 20 bp, synthetic construct
  source 1..20: mol_type = other DNA
tttaataccatcactagttt

SEQ ID NO: 26734 - DNA, 20 bp, synthetic construct
  source 1..20: mol_type = other DNA
ttttaataccatcactagtt

SEQ ID NO: 26735 - DNA, 20 bp, synthetic construct
  source 1..20: mol_type = other DNA
tttttaataccatcactagt

SEQ ID NO: 26736 - DNA, 20 bp, synthetic construct
  source 1..20: mol_type = other DNA
ttttttaataccatcactag

SEQ ID NO: 26737 - DNA, 20 bp, synthetic construct
  source 1..20: mol_type = other DNA
attttttaataccatcacta

SEQ ID NO: 26738 - DNA, 20 bp, synthetic construct
  source 1..20: mol_type = other DNA
cattttttaataccatcact

SEQ ID NO: 26739 - DNA, 20 bp, synthetic construct
  source 1..20: mol_type = other DNA
acattttttaataccatcac

SEQ ID NO: 26740 - DNA, 20 bp, synthetic construct
  source 1..20: mol_type = other DNA
aacattttttaataccatca

SEQ ID NO: 26741 - DNA, 20 bp, synthetic construct
  source 1..20: mol_type = other DNA
taacattttttaataccatc

SEQ ID NO: 26742 - DNA, 20 bp, synthetic construct
  source 1..20: mol_type = other DNA
ataacattttttaataccat

SEQ ID NO: 26743 - DNA, 20 bp, synthetic construct
  source 1..20: mol_type = other DNA
aataacattttttaatacca

SEQ ID NO: 26744 - DNA, 20 bp, synthetic construct
  source 1..20: mol_type = other DNA
taataacattttttaatacc

SEQ ID NO: 26745 - DNA, 20 bp, synthetic construct
  source 1..20: mol_type = other DNA
ttaataacattttttaatac

SEQ ID NO: 26746 - DNA, 20 bp, synthetic construct
  source 1..20: mol_type = other DNA
attaataacattttttaata

SEQ ID NO: 26747 - DNA, 20 bp, synthetic construct
  source 1..20: mol_type = other DNA
tattaataacattttttaat

SEQ ID NO: 26748 - DNA, 20 bp, synthetic construct
  source 1..20: mol_type = other DNA
ctattaataacattttttaa

SEQ ID NO: 26749 - DNA, 20 bp, synthetic construct
  source 1..20: mol_type = other DNA
actattaataacatttttta

SEQ ID NO: 26750 - DNA, 20 bp, synthetic construct
  source 1..20: mol_type = other DNA
aactattaataacatttttt

SEQ ID NO: 26751 - DNA, 20 bp, synthetic construct
  source 1..20: mol_type = other DNA
aaactattaataacattttt

SEQ ID NO: 26752 - DNA, 20 bp, synthetic construct
  source 1..20: mol_type = other DNA
gaaactattaataacatttt

SEQ ID NO: 26753 - DNA, 20 bp, synthetic construct
  source 1..20: mol_type = other DNA
agaaactattaataacattt

SEQ ID NO: 26754 - DNA, 20 bp, synthetic construct
  source 1..20: mol_type = other DNA
aagaaactattaataacatt

SEQ ID NO: 26755 - DNA, 20 bp, synthetic construct
  source 1..20: mol_type = other DNA
aaagaaactattaataacat

SEQ ID NO: 26756 - DNA, 20 bp, synthetic construct
  source 1..20: mol_type = other DNA
aaaagaaactattaataaca

SEQ ID NO: 26757 - DNA, 20 bp, synthetic construct
  source 1..20: mol_type = other DNA
taaaagaaactattaataac

SEQ ID NO: 26758 - DNA, 20 bp, synthetic construct
  source 1..20: mol_type = other DNA
ttaaaagaaactattaataa

SEQ ID NO: 26759 - DNA, 20 bp, synthetic construct
  source 1..20: mol_type = other DNA
attaaaagaaactattaata

SEQ ID NO: 26760 - DNA, 20 bp, synthetic construct
  source 1..20: mol_type = other DNA
gattaaaagaaactattaat

SEQ ID NO: 26761 - DNA, 20 bp, synthetic construct
  source 1..20: mol_type = other DNA
tgattaaaagaaactattaa

SEQ ID NO: 26762 - DNA, 20 bp, synthetic construct
  source 1..20: mol_type = other DNA
ttgattaaaagaaactatta

SEQ ID NO: 26763 - DNA, 20 bp, synthetic construct
  source 1..20: mol_type = other DNA
gttgattaaaagaaactatt

SEQ ID NO: 26764 - DNA, 20 bp, synthetic construct
  source 1..20: mol_type = other DNA
ggttgattaaaagaaactat

SEQ ID NO: 26765 - DNA, 20 bp, synthetic construct
  source 1..20: mol_type = other DNA
tggttgattaaaagaaacta

SEQ ID NO: 26766 - DNA, 20 bp, synthetic construct
  source 1..20: mol_type = other DNA
ctggttgattaaaagaaact

SEQ ID NO: 26767 - DNA, 20 bp, synthetic construct
  source 1..20: mol_type = other DNA
cctggttgattaaaagaaac

SEQ ID NO: 26768 - DNA, 20 bp, synthetic construct
  source 1..20: mol_type = other DNA
tcctggttgattaaaagaaa

SEQ ID NO: 26769 - DNA, 20 bp, synthetic construct
  source 1..20: mol_type = other DNA
ttcctggttgattaaaagaa

SEQ ID NO: 26770 - DNA, 20 bp, synthetic construct
  source 1..20: mol_type = other DNA
gttcctggttgattaaaaga

SEQ ID NO: 26771 - DNA, 20 bp, synthetic construct
  source 1..20: mol_type = other DNA
agttcctggttgattaaaag

SEQ ID NO: 26772 - DNA, 20 bp, synthetic construct
  source 1..20: mol_type = other DNA
aagttcctggttgattaaaa

SEQ ID NO: 26773 - DNA, 20 bp, synthetic construct
  source 1..20: mol_type = other DNA
caagttcctggttgattaaa

SEQ ID NO: 26774 - DNA, 20 bp, synthetic construct
  source 1..20: mol_type = other DNA
tcaagttcctggttgattaa

SEQ ID NO: 26775 - DNA, 20 bp, synthetic construct
  source 1..20: mol_type = other DNA
ctcaagttcctggttgatta

SEQ ID NO: 26776 - DNA, 20 bp, synthetic construct
  source 1..20: mol_type = other DNA
actcaagttcctggttgatt

SEQ ID NO: 26777 - DNA, 20 bp, synthetic construct
  source 1..20: mol_type = other DNA
gactcaagttcctggttgat

SEQ ID NO: 26778 - DNA, 20 bp, synthetic construct
  source 1..20: mol_type = other DNA
tgactcaagttcctggttga

SEQ ID NO: 26779 - DNA, 20 bp, synthetic construct
  source 1..20: mol_type = other DNA
gtgactcaagttcctggttg

SEQ ID NO: 26780 - DNA, 20 bp, synthetic construct
  source 1..20: mol_type = other DNA
agtgactcaagttcctggtt

SEQ ID NO: 26781 - DNA, 20 bp, synthetic construct
  source 1..20: mol_type = other DNA
tagtgactcaagttcctggt

SEQ ID NO: 26782 - DNA, 20 bp, synthetic construct
  source 1..20: mol_type = other DNA
ctagtgactcaagttcctgg

SEQ ID NO: 26783 - DNA, 20 bp, synthetic construct
  source 1..20: mol_type = other DNA
gctagtgactcaagttcctg

SEQ ID NO: 26784 - DNA, 20 bp, synthetic construct
  source 1..20: mol_type = other DNA
agctagtgactcaagttcct

SEQ ID NO: 26785 - DNA, 20 bp, synthetic construct
  source 1..20: mol_type = other DNA
aagctagtgactcaagttcc

SEQ ID NO: 26786 - DNA, 20 bp, synthetic construct
  source 1..20: mol_type = other DNA
gaagctagtgactcaagttc

SEQ ID NO: 26787 - DNA, 20 bp, synthetic construct
  source 1..20: mol_type = other DNA
agaagctagtgactcaagtt

SEQ ID NO: 26788 - DNA, 20 bp, synthetic construct
  source 1..20: mol_type = other DNA
gagaagctagtgactcaagt

SEQ ID NO: 26789 - DNA, 20 bp, synthetic construct
  source 1..20: mol_type = other DNA
agagaagctagtgactcaag

SEQ ID NO: 26790 - DNA, 20 bp, synthetic construct
  source 1..20: mol_type = other DNA
cagagaagctagtgactcaa

SEQ ID NO: 26791 - DNA, 20 bp, synthetic construct
  source 1..20: mol_type = other DNA
ccagagaagctagtgactca

SEQ ID NO: 26792 - DNA, 20 bp, synthetic construct
  source 1..20: mol_type = other DNA
cccagagaagctagtgactc

SEQ ID NO: 26793 - DNA, 20 bp, synthetic construct
  source 1..20: mol_type = other DNA
acccagagaagctagtgact

SEQ ID NO: 26794 - DNA, 20 bp, synthetic construct
  source 1..20: mol_type = other DNA
cacccagagaagctagtgac

SEQ ID NO: 26795 - DNA, 20 bp, synthetic construct
  source 1..20: mol_type = other DNA
tcacccagagaagctagtga

SEQ ID NO: 26796 - DNA, 20 bp, synthetic construct
  source 1..20: mol_type = other DNA
ttcacccagagaagctagtg

SEQ ID NO: 26797 - DNA, 20 bp, synthetic construct
  source 1..20: mol_type = other DNA
cttcacccagagaagctagt

SEQ ID NO: 26798 - DNA, 20 bp, synthetic construct
  source 1..20: mol_type = other DNA
ccttcacccagagaagctag

SEQ ID NO: 26799 - DNA, 20 bp, synthetic construct
  source 1..20: mol_type = other DNA
tccttcacccagagaagcta

SEQ ID NO: 26800 - DNA, 20 bp, synthetic construct
  source 1..20: mol_type = other DNA
gtccttcacccagagaagct

SEQ ID NO: 26801 - DNA, 20 bp, synthetic construct
  source 1..20: mol_type = other DNA
agtccttcacccagagaagc

SEQ ID NO: 26802 - DNA, 20 bp, synthetic construct
  source 1..20: mol_type = other DNA
tagtccttcacccagagaag

SEQ ID NO: 26803 - DNA, 20 bp, synthetic construct
  source 1..20: mol_type = other DNA
atagtccttcacccagagaa

SEQ ID NO: 26804 - DNA, 20 bp, synthetic construct
  source 1..20: mol_type = other DNA
tatagtccttcacccagaga

SEQ ID NO: 26805 - DNA, 20 bp, synthetic construct
  source 1..20: mol_type = other DNA
gtatagtccttcacccagag

SEQ ID NO: 26806 - DNA, 20 bp, synthetic construct
  source 1..20: mol_type = other DNA
agtatagtccttcacccaga

SEQ ID NO: 26807 - DNA, 20 bp, synthetic construct
  source 1..20: mol_type = other DNA
aagtatagtccttcacccag

SEQ ID NO: 26808 - DNA, 20 bp, synthetic construct
  source 1..20: mol_type = other DNA
gaagtatagtccttcaccca

SEQ ID NO: 26809 - DNA, 20 bp, synthetic construct
  source 1..20: mol_type = other DNA
tgaagtatagtccttcaccc

SEQ ID NO: 26810 - DNA, 20 bp, synthetic construct
  source 1..20: mol_type = other DNA
ttgaagtatagtccttcacc

SEQ ID NO: 26811 - DNA, 20 bp, synthetic construct
  source 1..20: mol_type = other DNA
gttgaagtatagtccttcac

SEQ ID NO: 26812 - DNA, 20 bp, synthetic construct
  source 1..20: mol_type = other DNA
tgttgaagtatagtccttca

SEQ ID NO: 26813 - DNA, 20 bp, synthetic construct
  source 1..20: mol_type = other DNA
ctgttgaagtatagtccttc

SEQ ID NO: 26814 - DNA, 20 bp, synthetic construct
  source 1..20: mol_type = other DNA
actgttgaagtatagtcctt

SEQ ID NO: 26815 - DNA, 20 bp, synthetic construct
  source 1..20: mol_type = other DNA
tactgttgaagtatagtcct

SEQ ID NO: 26816 - DNA, 20 bp, synthetic construct
  source 1..20: mol_type = other DNA
atactgttgaagtatagtcc

SEQ ID NO: 26817 - DNA, 20 bp, synthetic construct
  source 1..20: mol_type = other DNA
catactgttgaagtatagtc

SEQ ID NO: 26818 - DNA, 20 bp, synthetic construct
  source 1..20: mol_type = other DNA
tcatactgttgaagtatagt

SEQ ID NO: 26819 - DNA, 20 bp, synthetic construct
  source 1..20: mol_type = other DNA
ttcatactgttgaagtatag

SEQ ID NO: 26820 - DNA, 20 bp, synthetic construct
  source 1..20: mol_type = other DNA
tttcatactgttgaagtata

SEQ ID NO: 26821 - DNA, 20 bp, synthetic construct
  source 1..20: mol_type = other DNA
ttttcatactgttgaagtat

SEQ ID NO: 26822 - DNA, 20 bp, synthetic construct
  source 1..20: mol_type = other DNA
tttttcatactgttgaagta

SEQ ID NO: 26823 - DNA, 20 bp, synthetic construct
  source 1..20: mol_type = other DNA
gtttttcatactgttgaagt

SEQ ID NO: 26824 - DNA, 20 bp, synthetic construct
  source 1..20: mol_type = other DNA
cgtttttcatactgttgaag

SEQ ID NO: 26825 - DNA, 20 bp, synthetic construct
  source 1..20: mol_type = other DNA
ccgtttttcatactgttgaa

SEQ ID NO: 26826 - DNA, 20 bp, synthetic construct
  source 1..20: mol_type = other DNA
tccgtttttcatactgttga

SEQ ID NO: 26827 - DNA, 20 bp, synthetic construct
  source 1..20: mol_type = other DNA
ttccgtttttcatactgttg

SEQ ID NO: 26828 - DNA, 20 bp, synthetic construct
  source 1..20: mol_type = other DNA
tttccgtttttcatactgtt

SEQ ID NO: 26829 - DNA, 20 bp, synthetic construct
  source 1..20: mol_type = other DNA
ttttccgtttttcatactgt

SEQ ID NO: 26830 - DNA, 20 bp, synthetic construct
  source 1..20: mol_type = other DNA
cttttccgtttttcatactg

SEQ ID NO: 26831 - DNA, 20 bp, synthetic construct
  source 1..20: mol_type = other DNA
tcttttccgtttttcatact

SEQ ID NO: 26832 - DNA, 20 bp, synthetic construct
  source 1..20: mol_type = other DNA
ttcttttccgtttttcatac

SEQ ID NO: 26833 - DNA, 20 bp, synthetic construct
  source 1..20: mol_type = other DNA
tttcttttccgtttttcata

SEQ ID NO: 26834 - DNA, 20 bp, synthetic construct
  source 1..20: mol_type = other DNA
ttttcttttccgtttttcat

SEQ ID NO: 26835 - DNA, 20 bp, synthetic construct
  source 1..20: mol_type = other DNA
attttcttttccgtttttca

SEQ ID NO: 26836 - DNA, 20 bp, synthetic construct
  source 1..20: mol_type = other DNA
cattttcttttccgtttttc

SEQ ID NO: 26837 - DNA, 20 bp, synthetic construct
  source 1..20: mol_type = other DNA
tcattttcttttccgttttt

SEQ ID NO: 26838 - DNA, 20 bp, synthetic construct
  source 1..20: mol_type = other DNA
ctcattttcttttccgtttt

SEQ ID NO: 26839 - DNA, 20 bp, synthetic construct
  source 1..20: mol_type = other DNA
cctcattttcttttccgttt

SEQ ID NO: 26840 - DNA, 20 bp, synthetic construct
  source 1..20: mol_type = other DNA
tcctcattttcttttccgtt

SEQ ID NO: 26841 - DNA, 20 bp, synthetic construct
  source 1..20: mol_type = other DNA
ttcctcattttcttttccgt

SEQ ID NO: 26842 - DNA, 20 bp, synthetic construct
  source 1..20: mol_type = other DNA
attcctcattttcttttccg

SEQ ID NO: 26843 - DNA, 20 bp, synthetic construct
  source 1..20: mol_type = other DNA
aattcctcattttcttttcc

SEQ ID NO: 26844 - DNA, 20 bp, synthetic construct
  source 1..20: mol_type = other DNA
aaattcctcattttcttttc

SEQ ID NO: 26845 - DNA, 20 bp, synthetic construct
  source 1..20: mol_type = other DNA
aaaattcctcattttctttt

SEQ ID NO: 26846 - DNA, 20 bp, synthetic construct
  source 1..20: mol_type = other DNA
caaaattcctcattttcttt

SEQ ID NO: 26847 - DNA, 20 bp, synthetic construct
  source 1..20: mol_type = other DNA
ccaaaattcctcattttctt

SEQ ID NO: 26848 - DNA, 20 bp, synthetic construct
  source 1..20: mol_type = other DNA
gccaaaattcctcattttct

SEQ ID NO: 26849 - DNA, 20 bp, synthetic construct
  source 1..20: mol_type = other DNA
agccaaaattcctcattttc

SEQ ID NO: 26850 - DNA, 20 bp, synthetic construct
  source 1..20: mol_type = other DNA
cagccaaaattcctcatttt

SEQ ID NO: 26851 - DNA, 20 bp, synthetic construct
  source 1..20: mol_type = other DNA
ccagccaaaattcctcattt

SEQ ID NO: 26852 - DNA, 20 bp, synthetic construct
  source 1..20: mol_type = other DNA
cccagccaaaattcctcatt

SEQ ID NO: 26853 - DNA, 20 bp, synthetic construct
  source 1..20: mol_type = other DNA
gcccagccaaaattcctcat

SEQ ID NO: 26854 - DNA, 20 bp, synthetic construct
  source 1..20: mol_type = other DNA
tgcccagccaaaattcctca

SEQ ID NO: 26855 - DNA, 20 bp, synthetic construct
  source 1..20: mol_type = other DNA
gtgcccagccaaaattcctc

SEQ ID NO: 26856 - DNA, 20 bp, synthetic construct
  source 1..20: mol_type = other DNA
tgtgcccagccaaaattcct

SEQ ID NO: 26857 - DNA, 20 bp, synthetic construct
  source 1..20: mol_type = other DNA
ctgtgcccagccaaaattcc

SEQ ID NO: 26858 - DNA, 20 bp, synthetic construct
  source 1..20: mol_type = other DNA
actgtgcccagccaaaattc

SEQ ID NO: 26859 - DNA, 20 bp, synthetic construct
  source 1..20: mol_type = other DNA
cactgtgcccagccaaaatt

SEQ ID NO: 26860 - DNA, 20 bp, synthetic construct
  source 1..20: mol_type = other DNA
ccactgtgcccagccaaaat

SEQ ID NO: 26861 - DNA, 20 bp, synthetic construct
  source 1..20: mol_type = other DNA
gccactgtgcccagccaaaa

SEQ ID NO: 26862 - DNA, 20 bp, synthetic construct
  source 1..20: mol_type = other DNA
agccactgtgcccagccaaa

SEQ ID NO: 26863 - DNA, 20 bp, synthetic construct
  source 1..20: mol_type = other DNA
gagccactgtgcccagccaa

SEQ ID NO: 26864 - DNA, 20 bp, synthetic construct
  source 1..20: mol_type = other DNA
tgagccactgtgcccagcca

SEQ ID NO: 26865 - DNA, 20 bp, synthetic construct
  source 1..20: mol_type = other DNA
gtgagccactgtgcccagcc

SEQ ID NO: 26866 - DNA, 20 bp, synthetic construct
  source 1..20: mol_type = other DNA
tgtgagccactgtgcccagc

SEQ ID NO: 26867 - DNA, 20 bp, synthetic construct
  source 1..20: mol_type = other DNA
gtgtgagccactgtgcccag

SEQ ID NO: 26868 - DNA, 20 bp, synthetic construct
  source 1..20: mol_type = other DNA
ggtgtgagccactgtgccca

SEQ ID NO: 26869 - DNA, 20 bp, synthetic construct
  source 1..20: mol_type = other DNA
aggtgtgagccactgtgccc

SEQ ID NO: 26870 - DNA, 20 bp, synthetic construct
  source 1..20: mol_type = other DNA
caggtgtgagccactgtgcc

SEQ ID NO: 26871 - DNA, 20 bp, synthetic construct
  source 1..20: mol_type = other DNA
acaggtgtgagccactgtgc

SEQ ID NO: 26872 - DNA, 20 bp, synthetic construct
  source 1..20: mol_type = other DNA
tacaggtgtgagccactgtg

SEQ ID NO: 26873 - DNA, 20 bp, synthetic construct
  source 1..20: mol_type = other DNA
ttacaggtgtgagccactgt

SEQ ID NO: 26874 - DNA, 20 bp, synthetic construct
  source 1..20: mol_type = other DNA
attacaggtgtgagccactg

SEQ ID NO: 26875 - DNA, 20 bp, synthetic construct
  source 1..20: mol_type = other DNA
aattacaggtgtgagccact

SEQ ID NO: 26876 - DNA, 20 bp, synthetic construct
  source 1..20: mol_type = other DNA
gaattacaggtgtgagccac

SEQ ID NO: 26877 - DNA, 20 bp, synthetic construct
  source 1..20: mol_type = other DNA
agaattacaggtgtgagcca

SEQ ID NO: 26878 - DNA, 20 bp, synthetic construct
  source 1..20: mol_type = other DNA
tagaattacaggtgtgagcc

SEQ ID NO: 26879 - DNA, 20 bp, synthetic construct
  source 1..20: mol_type = other DNA
ctagaattacaggtgtgagc

SEQ ID NO: 26880 - DNA, 20 bp, synthetic construct
  source 1..20: mol_type = other DNA
gctagaattacaggtgtgag

SEQ ID NO: 26881 - DNA, 20 bp, synthetic construct
  source 1..20: mol_type = other DNA
tgctagaattacaggtgtga

SEQ ID NO: 26882 - DNA, 20 bp, synthetic construct
  source 1..20: mol_type = other DNA
gtgctagaattacaggtgtg

SEQ ID NO: 26883 - DNA, 20 bp, synthetic construct
  source 1..20: mol_type = other DNA
agtgctagaattacaggtgt

SEQ ID NO: 26884 - DNA, 20 bp, synthetic construct
  source 1..20: mol_type = other DNA
aagtgctagaattacaggtg

SEQ ID NO: 26885 - DNA, 20 bp, synthetic construct
  source 1..20: mol_type = other DNA
aaagtgctagaattacaggt

SEQ ID NO: 26886 - DNA, 20 bp, synthetic construct
  source 1..20: mol_type = other DNA
caaagtgctagaattacagg

SEQ ID NO: 26887 - DNA, 20 bp, synthetic construct
  source 1..20: mol_type = other DNA
ccaaagtgctagaattacag

SEQ ID NO: 26888 - DNA, 20 bp, synthetic construct
  source 1..20: mol_type = other DNA
cccaaagtgctagaattaca

SEQ ID NO: 26889 - DNA, 20 bp, synthetic construct
  source 1..20: mol_type = other DNA
tcccaaagtgctagaattac

SEQ ID NO: 26890 - DNA, 20 bp, synthetic construct
  source 1..20: mol_type = other DNA
ttcccaaagtgctagaatta

SEQ ID NO: 26891 - DNA, 20 bp, synthetic construct
  source 1..20: mol_type = other DNA
cttcccaaagtgctagaatt

SEQ ID NO: 26892 - DNA, 20 bp, synthetic construct
  source 1..20: mol_type = other DNA
gcttcccaaagtgctagaat

SEQ ID NO: 26893 - DNA, 20 bp, synthetic construct
  source 1..20: mol_type = other DNA
ggcttcccaaagtgctagaa

SEQ ID NO: 26894 - DNA, 20 bp, synthetic construct
  source 1..20: mol_type = other DNA
tggcttcccaaagtgctaga

SEQ ID NO: 26895 - DNA, 20 bp, synthetic construct
  source 1..20: mol_type = other DNA
ttggcttcccaaagtgctag

SEQ ID NO: 26896 - DNA, 20 bp, synthetic construct
  source 1..20: mol_type = other DNA
cttggcttcccaaagtgcta

SEQ ID NO: 26897 - DNA, 20 bp, synthetic construct
  source 1..20: mol_type = other DNA
ccttggcttcccaaagtgct

SEQ ID NO: 26898 - DNA, 20 bp, synthetic construct
  source 1..20: mol_type = other DNA
cccttggcttcccaaagtgc

SEQ ID NO: 26899 - DNA, 20 bp, synthetic construct
  source 1..20: mol_type = other DNA
tcccttggcttcccaaagtg

SEQ ID NO: 26900 - DNA, 20 bp, synthetic construct
  source 1..20: mol_type = other DNA
ctcccttggcttcccaaagt

SEQ ID NO: 26901 - DNA, 20 bp, synthetic construct
  source 1..20: mol_type = other DNA
cctcccttggcttcccaaag

SEQ ID NO: 26902 - DNA, 20 bp, synthetic construct
  source 1..20: mol_type = other DNA
tcctcccttggcttcccaaa

SEQ ID NO: 26903 - DNA, 20 bp, synthetic construct
  source 1..20: mol_type = other DNA
ctcctcccttggcttcccaa

SEQ ID NO: 26904 - DNA, 20 bp, synthetic construct
  source 1..20: mol_type = other DNA
cctcctcccttggcttccca

SEQ ID NO: 26905 - DNA, 20 bp, synthetic construct
  source 1..20: mol_type = other DNA
ccctcctcccttggcttccc

SEQ ID NO: 26906 - DNA, 20 bp, synthetic construct
  source 1..20: mol_type = other DNA
accctcctcccttggcttcc

SEQ ID NO: 26907 - DNA, 20 bp, synthetic construct
  source 1..20: mol_type = other DNA
gaccctcctcccttggcttc

SEQ ID NO: 26908 - DNA, 20 bp, synthetic construct
  source 1..20: mol_type = other DNA
cgaccctcctcccttggctt

SEQ ID NO: 26909 - DNA, 20 bp, synthetic construct
  source 1..20: mol_type = other DNA
gcgaccctcctcccttggct

SEQ ID NO: 26910 - DNA, 20 bp, synthetic construct
  source 1..20: mol_type = other DNA
agcgaccctcctcccttggc

SEQ ID NO: 26911 - DNA, 20 bp, synthetic construct
  source 1..20: mol_type = other DNA
aagcgaccctcctcccttgg

SEQ ID NO: 26912 - DNA, 20 bp, synthetic construct
  source 1..20: mol_type = other DNA
caagcgaccctcctcccttg

SEQ ID NO: 26913 - DNA, 20 bp, synthetic construct
  source 1..20: mol_type = other DNA
tcaagcgaccctcctccctt

SEQ ID NO: 26914 - DNA, 20 bp, synthetic construct
  source 1..20: mol_type = other DNA
ctcaagcgaccctcctccct

SEQ ID NO: 26915 - DNA, 20 bp, synthetic construct
  source 1..20: mol_type = other DNA
gctcaagcgaccctcctccc

SEQ ID NO: 26916 - DNA, 20 bp, synthetic construct
  source 1..20: mol_type = other DNA
agctcaagcgaccctcctcc

SEQ ID NO: 26917 - DNA, 20 bp, synthetic construct
  source 1..20: mol_type = other DNA
gagctcaagcgaccctcctc

SEQ ID NO: 26918 - DNA, 20 bp, synthetic construct
  source 1..20: mol_type = other DNA
tgagctcaagcgaccctcct

SEQ ID NO: 26919 - DNA, 20 bp, synthetic construct
  source 1..20: mol_type = other DNA
ctgagctcaagcgaccctcc

SEQ ID NO: 26920 - DNA, 20 bp, synthetic construct
  source 1..20: mol_type = other DNA
cctgagctcaagcgaccctc

SEQ ID NO: 26921 - DNA, 20 bp, synthetic construct
  source 1..20: mol_type = other DNA
tcctgagctcaagcgaccct

SEQ ID NO: 26922 - DNA, 20 bp, synthetic construct
  source 1..20: mol_type = other DNA
ttcctgagctcaagcgaccc

SEQ ID NO: 26923 - DNA, 20 bp, synthetic construct
  source 1..20: mol_type = other DNA
attcctgagctcaagcgacc

SEQ ID NO: 26924 - DNA, 20 bp, synthetic construct
  source 1..20: mol_type = other DNA
aattcctgagctcaagcgac

SEQ ID NO: 26925 - DNA, 20 bp, synthetic construct
  source 1..20: mol_type = other DNA
gaattcctgagctcaagcga

SEQ ID NO: 26926 - DNA, 20 bp, synthetic construct
  source 1..20: mol_type = other DNA
tgaattcctgagctcaagcg

SEQ ID NO: 26927 - DNA, 20 bp, synthetic construct
  source 1..20: mol_type = other DNA
ttgaattcctgagctcaagc

SEQ ID NO: 26928 - DNA, 20 bp, synthetic construct
  source 1..20: mol_type = other DNA
cttgaattcctgagctcaag

SEQ ID NO: 26929 - DNA, 20 bp, synthetic construct
  source 1..20: mol_type = other DNA
tcttgaattcctgagctcaa

SEQ ID NO: 26930 - DNA, 20 bp, synthetic construct
  source 1..20: mol_type = other DNA
atcttgaattcctgagctca

SEQ ID NO: 26931 - DNA, 20 bp, synthetic construct
  source 1..20: mol_type = other DNA
gatcttgaattcctgagctc

SEQ ID NO: 26932 - DNA, 20 bp, synthetic construct
  source 1..20: mol_type = other DNA
tgatcttgaattcctgagct

SEQ ID NO: 26933 - DNA, 20 bp, synthetic construct
  source 1..20: mol_type = other DNA
ctgatcttgaattcctgagc

SEQ ID NO: 26934 - DNA, 20 bp, synthetic construct
  source 1..20: mol_type = other DNA
gctgatcttgaattcctgag

SEQ ID NO: 26935 - DNA, 20 bp, synthetic construct
  source 1..20: mol_type = other DNA
ggctgatcttgaattcctga

SEQ ID NO: 26936 - DNA, 20 bp, synthetic construct
  source 1..20: mol_type = other DNA
aggctgatcttgaattcctg

SEQ ID NO: 26937 - DNA, 20 bp, synthetic construct
  source 1..20: mol_type = other DNA
taggctgatcttgaattcct

SEQ ID NO: 26938 - DNA, 20 bp, synthetic construct
  source 1..20: mol_type = other DNA
ctaggctgatcttgaattcc

SEQ ID NO: 26939 - DNA, 20 bp, synthetic construct
  source 1..20: mol_type = other DNA
cctaggctgatcttgaattc

SEQ ID NO: 26940 - DNA, 20 bp, synthetic construct
  source 1..20: mol_type = other DNA
gcctaggctgatcttgaatt

SEQ ID NO: 26941 - DNA, 20 bp, synthetic construct
  source 1..20: mol_type = other DNA
tgcctaggctgatcttgaat

SEQ ID NO: 26942 - DNA, 20 bp, synthetic construct
  source 1..20: mol_type = other DNA
ttgcctaggctgatcttgaa

SEQ ID NO: 26943 - DNA, 20 bp, synthetic construct
  source 1..20: mol_type = other DNA
gttgcctaggctgatcttga

SEQ ID NO: 26944 - DNA, 20 bp, synthetic construct
  source 1..20: mol_type = other DNA
tgttgcctaggctgatcttg

SEQ ID NO: 26945 - DNA, 20 bp, synthetic construct
  source 1..20: mol_type = other DNA
atgttgcctaggctgatctt

SEQ ID NO: 26946 - DNA, 20 bp, synthetic construct
  source 1..20: mol_type = other DNA
tatgttgcctaggctgatct

SEQ ID NO: 26947 - DNA, 20 bp, synthetic construct
  source 1..20: mol_type = other DNA
ctatgttgcctaggctgatc

SEQ ID NO: 26948 - DNA, 20 bp, synthetic construct
  source 1..20: mol_type = other DNA
actatgttgcctaggctgat

SEQ ID NO: 26949 - DNA, 20 bp, synthetic construct
  source 1..20: mol_type = other DNA
cactatgttgcctaggctga

SEQ ID NO: 26950 - DNA, 20 bp, synthetic construct
  source 1..20: mol_type = other DNA
tcactatgttgcctaggctg

SEQ ID NO: 26951 - DNA, 20 bp, synthetic construct
  source 1..20: mol_type = other DNA
ctcactatgttgcctaggct

SEQ ID NO: 26952 - DNA, 20 bp, synthetic construct
  source 1..20: mol_type = other DNA
cctcactatgttgcctaggc

SEQ ID NO: 26953 - DNA, 20 bp, synthetic construct
  source 1..20: mol_type = other DNA
gcctcactatgttgcctagg

SEQ ID NO: 26954 - DNA, 20 bp, synthetic construct
  source 1..20: mol_type = other DNA
ggcctcactatgttgcctag

SEQ ID NO: 26955 - DNA, 20 bp, synthetic construct
  source 1..20: mol_type = other DNA
gggcctcactatgttgccta

SEQ ID NO: 26956 - DNA, 20 bp, synthetic construct
  source 1..20: mol_type = other DNA
ggggcctcactatgttgcct

SEQ ID NO: 26957 - DNA, 20 bp, synthetic construct
  source 1..20: mol_type = other DNA
tggggcctcactatgttgcc

SEQ ID NO: 26958 - DNA, 20 bp, synthetic construct
  source 1..20: mol_type = other DNA
atggggcctcactatgttgc

SEQ ID NO: 26959 - DNA, 20 bp, synthetic construct
  source 1..20: mol_type = other DNA
gatggggcctcactatgttg

SEQ ID NO: 26960 - DNA, 20 bp, synthetic construct
  source 1..20: mol_type = other DNA
agatggggcctcactatgtt

SEQ ID NO: 26961 - DNA, 20 bp, synthetic construct
  source 1..20: mol_type = other DNA
gagatggggcctcactatgt

SEQ ID NO: 26962 - DNA, 20 bp, synthetic construct
  source 1..20: mol_type = other DNA
agagatggggcctcactatg

SEQ ID NO: 26963 - DNA, 20 bp, synthetic construct
  source 1..20: mol_type = other DNA
tagagatggggcctcactat

SEQ ID NO: 26964 - DNA, 20 bp, synthetic construct
  source 1..20: mol_type = other DNA
gtagagatggggcctcacta

SEQ ID NO: 26965 - DNA, 20 bp, synthetic construct
  source 1..20: mol_type = other DNA
tgtagagatggggcctcact

SEQ ID NO: 26966 - DNA, 20 bp, synthetic construct
  source 1..20: mol_type = other DNA
ttgtagagatggggcctcac

SEQ ID NO: 26967 - DNA, 20 bp, synthetic construct
  source 1..20: mol_type = other DNA
tttgtagagatggggcctca

SEQ ID NO: 26968 - DNA, 20 bp, synthetic construct
  source 1..20: mol_type = other DNA
ttttgtagagatggggcctc

SEQ ID NO: 26969 - DNA, 20 bp, synthetic construct
  source 1..20: mol_type = other DNA
tttttgtagagatggggcct

SEQ ID NO: 26970 - DNA, 20 bp, synthetic construct
  source 1..20: mol_type = other DNA
atttttgtagagatggggcc

SEQ ID NO: 26971 - DNA, 20 bp, synthetic construct
  source 1..20: mol_type = other DNA
tatttttgtagagatggggc

SEQ ID NO: 26972 - DNA, 20 bp, synthetic construct
  source 1..20: mol_type = other DNA
ttatttttgtagagatgggg

SEQ ID NO: 26973 - DNA, 20 bp, synthetic construct
  source 1..20: mol_type = other DNA
tttatttttgtagagatggg

SEQ ID NO: 26974 - DNA, 20 bp, synthetic construct
  source 1..20: mol_type = other DNA
atttatttttgtagagatgg

SEQ ID NO: 26975 - DNA, 20 bp, synthetic construct
  source 1..20: mol_type = other DNA
aatttatttttgtagagatg

SEQ ID NO: 26976 - DNA, 20 bp, synthetic construct
  source 1..20: mol_type = other DNA
taatttatttttgtagagat

SEQ ID NO: 26977 - DNA, 20 bp, synthetic construct
  source 1..20: mol_type = other DNA
ctaatttatttttgtagaga

SEQ ID NO: 26978 - DNA, 20 bp, synthetic construct
  source 1..20: mol_type = other DNA
gctaatttatttttgtagag

SEQ ID NO: 26979 - DNA, 20 bp, synthetic construct
  source 1..20: mol_type = other DNA
agctaatttatttttgtaga

SEQ ID NO: 26980 - DNA, 20 bp, synthetic construct
  source 1..20: mol_type = other DNA
cagctaatttatttttgtag

SEQ ID NO: 26981 - DNA, 20 bp, synthetic construct
  source 1..20: mol_type = other DNA
ccagctaatttatttttgta

SEQ ID NO: 26982 - DNA, 20 bp, synthetic construct
  source 1..20: mol_type = other DNA
cccagctaatttatttttgt

SEQ ID NO: 26983 - DNA, 20 bp, synthetic construct
  source 1..20: mol_type = other DNA
gcccagctaatttatttttg

SEQ ID NO: 26984 - DNA, 20 bp, synthetic construct
  source 1..20: mol_type = other DNA
tgcccagctaatttattttt

SEQ ID NO: 26985 - DNA, 20 bp, synthetic construct
  source 1..20: mol_type = other DNA
atgcccagctaatttatttt

SEQ ID NO: 26986 - DNA, 20 bp, synthetic construct
  source 1..20: mol_type = other DNA
catgcccagctaatttattt

SEQ ID NO: 26987 - DNA, 20 bp, synthetic construct
  source 1..20: mol_type = other DNA
ccatgcccagctaatttatt

SEQ ID NO: 26988 - DNA, 20 bp, synthetic construct
  source 1..20: mol_type = other DNA
accatgcccagctaatttat

SEQ ID NO: 26989 - DNA, 20 bp, synthetic construct
  source 1..20: mol_type = other DNA
caccatgcccagctaattta

SEQ ID NO: 26990 - DNA, 20 bp, synthetic construct
  source 1..20: mol_type = other DNA
ccaccatgcccagctaattt

SEQ ID NO: 26991 - DNA, 20 bp, synthetic construct
  source 1..20: mol_type = other DNA
accaccatgcccagctaatt

SEQ ID NO: 26992 - DNA, 20 bp, synthetic construct
  source 1..20: mol_type = other DNA
caccaccatgcccagctaat

SEQ ID NO: 26993 - DNA, 20 bp, synthetic construct
  source 1..20: mol_type = other DNA
gcaccaccatgcccagctaa

SEQ ID NO: 26994 - DNA, 20 bp, synthetic construct
  source 1..20: mol_type = other DNA
tgcaccaccatgcccagcta

SEQ ID NO: 26995 - DNA, 20 bp, synthetic construct
  source 1..20: mol_type = other DNA
atgcaccaccatgcccagct

SEQ ID NO: 26996 - DNA, 20 bp, synthetic construct
  source 1..20: mol_type = other DNA
catgcaccaccatgcccagc

SEQ ID NO: 26997 - DNA, 20 bp, synthetic construct
  source 1..20: mol_type = other DNA
gcatgcaccaccatgcccag

SEQ ID NO: 26998 - DNA, 20 bp, synthetic construct
  source 1..20: mol_type = other DNA
cgcatgcaccaccatgccca

SEQ ID NO: 26999 - DNA, 20 bp, synthetic construct
  source 1..20: mol_type = other DNA
acgcatgcaccaccatgccc

SEQ ID NO: 27000 - DNA, 20 bp, synthetic construct
  source 1..20: mol_type = other DNA
tacgcatgcaccaccatgcc

SEQ ID NO: 27001 - DNA, 20 bp, synthetic construct
  source 1..20: mol_type = other DNA
atacgcatgcaccaccatgc

SEQ ID NO: 27002 - DNA, 20 bp, synthetic construct
  source 1..20: mol_type = other DNA
tatacgcatgcaccaccatg

SEQ ID NO: 27003 - DNA, 20 bp, synthetic construct
  source 1..20: mol_type = other DNA
ctatacgcatgcaccaccat

SEQ ID NO: 27004 - DNA, 20 bp, synthetic construct
  source 1..20: mol_type = other DNA
actatacgcatgcaccacca

SEQ ID NO: 27005 - DNA, 20 bp, synthetic construct
  source 1..20: mol_type = other DNA
gactatacgcatgcaccacc

SEQ ID NO: 27006 - DNA, 20 bp, synthetic construct
  source 1..20: mol_type = other DNA
agactatacgcatgcaccac

SEQ ID NO: 27007 - DNA, 20 bp, synthetic construct
  source 1..20: mol_type = other DNA
gagactatacgcatgcacca

SEQ ID NO: 27008 - DNA, 20 bp, synthetic construct
  source 1..20: mol_type = other DNA
tgagactatacgcatgcacc

SEQ ID NO: 27009 - DNA, 20 bp, synthetic construct
  source 1..20: mol_type = other DNA
ctgagactatacgcatgcac

SEQ ID NO: 27010 - DNA, 20 bp, synthetic construct
  source 1..20: mol_type = other DNA
gctgagactatacgcatgca

SEQ ID NO: 27011 - DNA, 20 bp, synthetic construct
  source 1..20: mol_type = other DNA
agctgagactatacgcatgc

SEQ ID NO: 27012 - DNA, 20 bp, synthetic construct
  source 1..20: mol_type = other DNA
tagctgagactatacgcatg

SEQ ID NO: 27013 - DNA, 20 bp, synthetic construct
  source 1..20: mol_type = other DNA
gtagctgagactatacgcat

SEQ ID NO: 27014 - DNA, 20 bp, synthetic construct
  source 1..20: mol_type = other DNA
agtagctgagactatacgca

SEQ ID NO: 27015 - DNA, 20 bp, synthetic construct
  source 1..20: mol_type = other DNA
aagtagctgagactatacgc

SEQ ID NO: 27016 - DNA, 20 bp, synthetic construct
  source 1..20: mol_type = other DNA
caagtagctgagactatacg

SEQ ID NO: 27017 - DNA, 20 bp, synthetic construct
  source 1..20: mol_type = other DNA
ccaagtagctgagactatac

SEQ ID NO: 27018 - DNA, 20 bp, synthetic construct
  source 1..20: mol_type = other DNA
cccaagtagctgagactata

SEQ ID NO: 27019 - DNA, 20 bp, synthetic construct
  source 1..20: mol_type = other DNA
tcccaagtagctgagactat

SEQ ID NO: 27020 - DNA, 20 bp, synthetic construct
  source 1..20: mol_type = other DNA
ctcccaagtagctgagacta

SEQ ID NO: 27021 - DNA, 20 bp, synthetic construct
  source 1..20: mol_type = other DNA
cctcccaagtagctgagact

SEQ ID NO: 27022 - DNA, 20 bp, synthetic construct
  source 1..20: mol_type = other DNA
gcctcccaagtagctgagac

SEQ ID NO: 27023 - DNA, 20 bp, synthetic construct
  source 1..20: mol_type = other DNA
agcctcccaagtagctgaga

SEQ ID NO: 27024 - DNA, 20 bp, synthetic construct
  source 1..20: mol_type = other DNA
cagcctcccaagtagctgag

SEQ ID NO: 27025 - DNA, 20 bp, synthetic construct
  source 1..20: mol_type = other DNA
tcagcctcccaagtagctga

SEQ ID NO: 27026 - DNA, 20 bp, synthetic construct
  source 1..20: mol_type = other DNA
gtcagcctcccaagtagctg

SEQ ID NO: 27027 - DNA, 20 bp, synthetic construct
  source 1..20: mol_type = other DNA
agtcagcctcccaagtagct

SEQ ID NO: 27028 - DNA, 20 bp, synthetic construct
  source 1..20: mol_type = other DNA
gagtcagcctcccaagtagc

SEQ ID NO: 27029 - DNA, 20 bp, synthetic construct
  source 1..20: mol_type = other DNA
tgagtcagcctcccaagtag

SEQ ID NO: 27030 - DNA, 20 bp, synthetic construct
  source 1..20: mol_type = other DNA
ctgagtcagcctcccaagta

SEQ ID NO: 27031 - DNA, 20 bp, synthetic construct
  source 1..20: mol_type = other DNA
cctgagtcagcctcccaagt

SEQ ID NO: 27032 - DNA, 20 bp, synthetic construct
  source 1..20: mol_type = other DNA
tcctgagtcagcctcccaag

SEQ ID NO: 27033 - DNA, 20 bp, synthetic construct
  source 1..20: mol_type = other DNA
ctcctgagtcagcctcccaa

SEQ ID NO: 27034 - DNA, 20 bp, synthetic construct
  source 1..20: mol_type = other DNA
cctcctgagtcagcctccca

SEQ ID NO: 27035 - DNA, 20 bp, synthetic construct
  source 1..20: mol_type = other DNA
ccctcctgagtcagcctccc

SEQ ID NO: 27036 - DNA, 20 bp, synthetic construct
  source 1..20: mol_type = other DNA
accctcctgagtcagcctcc

SEQ ID NO: 27037 - DNA, 20 bp, synthetic construct
  source 1..20: mol_type = other DNA
gaccctcctgagtcagcctc

SEQ ID NO: 27038 - DNA, 20 bp, synthetic construct
  source 1..20: mol_type = other DNA
tgaccctcctgagtcagcct

SEQ ID NO: 27039 - DNA, 20 bp, synthetic construct
  source 1..20: mol_type = other DNA
gtgaccctcctgagtcagcc

SEQ ID NO: 27040 - DNA, 20 bp, synthetic construct
  source 1..20: mol_type = other DNA
agtgaccctcctgagtcagc

SEQ ID NO: 27041 - DNA, 20 bp, synthetic construct
  source 1..20: mol_type = other DNA
aagtgaccctcctgagtcag

SEQ ID NO: 27042 - DNA, 20 bp, synthetic construct
  source 1..20: mol_type = other DNA
taagtgaccctcctgagtca

SEQ ID NO: 27043 - DNA, 20 bp, synthetic construct
  source 1..20: mol_type = other DNA
ttaagtgaccctcctgagtc

SEQ ID NO: 27044 - DNA, 20 bp, synthetic construct
  source 1..20: mol_type = other DNA
tttaagtgaccctcctgagt

SEQ ID NO: 27045 - DNA, 20 bp, synthetic construct
  source 1..20: mol_type = other DNA
gtttaagtgaccctcctgag

SEQ ID NO: 27046 - DNA, 20 bp, synthetic construct
  source 1..20: mol_type = other DNA
ggtttaagtgaccctcctga

SEQ ID NO: 27047 - DNA, 20 bp, synthetic construct
  source 1..20: mol_type = other DNA
gggtttaagtgaccctcctg

SEQ ID NO: 27048 - DNA, 20 bp, synthetic construct
  source 1..20: mol_type = other DNA
tgggtttaagtgaccctcct

SEQ ID NO: 27049 - DNA, 20 bp, synthetic construct
  source 1..20: mol_type = other DNA
ctgggtttaagtgaccctcc

SEQ ID NO: 27050 - DNA, 20 bp, synthetic construct
  source 1..20: mol_type = other DNA
cctgggtttaagtgaccctc

SEQ ID NO: 27051 - DNA, 20 bp, synthetic construct
  source 1..20: mol_type = other DNA
tcctgggtttaagtgaccct

SEQ ID NO: 27052 - DNA, 20 bp, synthetic construct
  source 1..20: mol_type = other DNA
ttcctgggtttaagtgaccc

SEQ ID NO: 27053 - DNA, 20 bp, synthetic construct
  source 1..20: mol_type = other DNA
attcctgggtttaagtgacc

SEQ ID NO: 27054 - DNA, 20 bp, synthetic construct
  source 1..20: mol_type = other DNA
aattcctgggtttaagtgac

SEQ ID NO: 27055 - DNA, 20 bp, synthetic construct
  source 1..20: mol_type = other DNA
caattcctgggtttaagtga

SEQ ID NO: 27056 - DNA, 20 bp, synthetic construct
  source 1..20: mol_type = other DNA
ccaattcctgggtttaagtg

SEQ ID NO: 27057 - DNA, 20 bp, synthetic construct
  source 1..20: mol_type = other DNA
tccaattcctgggtttaagt

SEQ ID NO: 27058 - DNA, 20 bp, synthetic construct
  source 1..20: mol_type = other DNA
ctccaattcctgggtttaag

SEQ ID NO: 27059 - DNA, 20 bp, synthetic construct
  source 1..20: mol_type = other DNA
cctccaattcctgggtttaa

SEQ ID NO: 27060 - DNA, 20 bp, synthetic construct
  source 1..20: mol_type = other DNA
acctccaattcctgggttta

SEQ ID NO: 27061 - DNA, 20 bp, synthetic construct
  source 1..20: mol_type = other DNA
aacctccaattcctgggttt

SEQ ID NO: 27062 - DNA, 20 bp, synthetic construct
  source 1..20: mol_type = other DNA
caacctccaattcctgggtt

SEQ ID NO: 27063 - DNA, 20 bp, synthetic construct
  source 1..20: mol_type = other DNA
gcaacctccaattcctgggt

SEQ ID NO: 27064 - DNA, 20 bp, synthetic construct
  source 1..20: mol_type = other DNA
tgcaacctccaattcctggg

SEQ ID NO: 27065 - DNA, 20 bp, synthetic construct
  source 1..20: mol_type = other DNA
ctgcaacctccaattcctgg

SEQ ID NO: 27066 - DNA, 20 bp, synthetic construct
  source 1..20: mol_type = other DNA
actgcaacctccaattcctg

SEQ ID NO: 27067 - DNA, 20 bp, synthetic construct
  source 1..20: mol_type = other DNA
cactgcaacctccaattcct

SEQ ID NO: 27068 - DNA, 20 bp, synthetic construct
  source 1..20: mol_type = other DNA
tcactgcaacctccaattcc

SEQ ID NO: 27069 - DNA, 20 bp, synthetic construct
  source 1..20: mol_type = other DNA
ctcactgcaacctccaattc

SEQ ID NO: 27070 - DNA, 20 bp, synthetic construct
  source 1..20: mol_type = other DNA
gctcactgcaacctccaatt

SEQ ID NO: 27071 - DNA, 20 bp, synthetic construct
  source 1..20: mol_type = other DNA
agctcactgcaacctccaat

SEQ ID NO: 27072 - DNA, 20 bp, synthetic construct
  source 1..20: mol_type = other DNA
tagctcactgcaacctccaa

SEQ ID NO: 27073 - DNA, 20 bp, synthetic construct
  source 1..20: mol_type = other DNA
atagctcactgcaacctcca

SEQ ID NO: 27074 - DNA, 20 bp, synthetic construct
  source 1..20: mol_type = other DNA
catagctcactgcaacctcc

SEQ ID NO: 27075 - DNA, 20 bp, synthetic construct
  source 1..20: mol_type = other DNA
tcatagctcactgcaacctc

SEQ ID NO: 27076 - DNA, 20 bp, synthetic construct
  source 1..20: mol_type = other DNA
atcatagctcactgcaacct

SEQ ID NO: 27077 - DNA, 20 bp, synthetic construct
  source 1..20: mol_type = other DNA
aatcatagctcactgcaacc

SEQ ID NO: 27078 - DNA, 20 bp, synthetic construct
  source 1..20: mol_type = other DNA
caatcatagctcactgcaac

SEQ ID NO: 27079 - DNA, 20 bp, synthetic construct
  source 1..20: mol_type = other DNA
gcaatcatagctcactgcaa

SEQ ID NO: 27080 - DNA, 20 bp, synthetic construct
  source 1..20: mol_type = other DNA
cgcaatcatagctcactgca

SEQ ID NO: 27081 - DNA, 20 bp, synthetic construct
  source 1..20: mol_type = other DNA
gcgcaatcatagctcactgc

SEQ ID NO: 27082 - DNA, 20 bp, synthetic construct
  source 1..20: mol_type = other DNA
ggcgcaatcatagctcactg

SEQ ID NO: 27083 - DNA, 20 bp, synthetic construct
  source 1..20: mol_type = other DNA
tggcgcaatcatagctcact

SEQ ID NO: 27084 - DNA, 20 bp, synthetic construct
  source 1..20: mol_type = other DNA
gtggcgcaatcatagctcac

SEQ ID NO: 27085 - DNA, 20 bp, synthetic construct
  source 1..20: mol_type = other DNA
agtggcgcaatcatagctca

SEQ ID NO: 27086 - DNA, 20 bp, synthetic construct
  source 1..20: mol_type = other DNA
cagtggcgcaatcatagctc

SEQ ID NO: 27087 - DNA, 20 bp, synthetic construct
  source 1..20: mol_type = other DNA
acagtggcgcaatcatagct

SEQ ID NO: 27088 - DNA, 20 bp, synthetic construct
  source 1..20: mol_type = other DNA
tacagtggcgcaatcatagc

SEQ ID NO: 27089 - DNA, 20 bp, synthetic construct
  source 1..20: mol_type = other DNA
atacagtggcgcaatcatag

SEQ ID NO: 27090 - DNA, 20 bp, synthetic construct
  source 1..20: mol_type = other DNA
tatacagtggcgcaatcata

SEQ ID NO: 27091 - DNA, 20 bp, synthetic construct
  source 1..20: mol_type = other DNA
gtatacagtggcgcaatcat

SEQ ID NO: 27092 - DNA, 20 bp, synthetic construct
  source 1..20: mol_type = other DNA
ggtatacagtggcgcaatca

SEQ ID NO: 27093 - DNA, 20 bp, synthetic construct
  source 1..20: mol_type = other DNA
tggtatacagtggcgcaatc

SEQ ID NO: 27094 - DNA, 20 bp, synthetic construct
  source 1..20: mol_type = other DNA
atggtatacagtggcgcaat

SEQ ID NO: 27095 - DNA, 20 bp, synthetic construct
  source 1..20: mol_type = other DNA
gatggtatacagtggcgcaa

SEQ ID NO: 27096 - DNA, 20 bp, synthetic construct
  source 1..20: mol_type = other DNA
ggatggtatacagtggcgca

SEQ ID NO: 27097 - DNA, 20 bp, synthetic construct
  source 1..20: mol_type = other DNA
gggatggtatacagtggcgc

SEQ ID NO: 27098 - DNA, 20 bp, synthetic construct
  source 1..20: mol_type = other DNA
tgggatggtatacagtggcg

SEQ ID NO: 27099 - DNA, 20 bp, synthetic construct
  source 1..20: mol_type = other DNA
ctgggatggtatacagtggc

SEQ ID NO: 27100 - DNA, 20 bp, synthetic construct
  source 1..20: mol_type = other DNA
cctgggatggtatacagtgg

SEQ ID NO: 27101 - DNA, 20 bp, synthetic construct
  source 1..20: mol_type = other DNA
gcctgggatggtatacagtg

SEQ ID NO: 27102 - DNA, 20 bp, synthetic construct
  source 1..20: mol_type = other DNA
cgcctgggatggtatacagt

SEQ ID NO: 27103 - DNA, 20 bp, synthetic construct
  source 1..20: mol_type = other DNA
tcgcctgggatggtatacag

SEQ ID NO: 27104 - DNA, 20 bp, synthetic construct
  source 1..20: mol_type = other DNA
gtcgcctgggatggtataca

SEQ ID NO: 27105 - DNA, 20 bp, synthetic construct
  source 1..20: mol_type = other DNA
tgtcgcctgggatggtatac

SEQ ID NO: 27106 - DNA, 20 bp, synthetic construct
  source 1..20: mol_type = other DNA
ctgtcgcctgggatggtata

SEQ ID NO: 27107 - DNA, 20 bp, synthetic construct
  source 1..20: mol_type = other DNA
tctgtcgcctgggatggtat

SEQ ID NO: 27108 - DNA, 20 bp, synthetic construct
  source 1..20: mol_type = other DNA
ctctgtcgcctgggatggta

SEQ ID NO: 27109 - DNA, 20 bp, synthetic construct
  source 1..20: mol_type = other DNA
actctgtcgcctgggatggt

SEQ ID NO: 27110 - DNA, 20 bp, synthetic construct
  source 1..20: mol_type = other DNA
cactctgtcgcctgggatgg

SEQ ID NO: 27111 - DNA, 20 bp, synthetic construct
  source 1..20: mol_type = other DNA
tcactctgtcgcctgggatg

SEQ ID NO: 27112 - DNA, 20 bp, synthetic construct
  source 1..20: mol_type = other DNA
ctcactctgtcgcctgggat

SEQ ID NO: 27113 - DNA, 20 bp, synthetic construct
  source 1..20: mol_type = other DNA
tctcactctgtcgcctggga

SEQ ID NO: 27114 - DNA, 20 bp, synthetic construct
  source 1..20: mol_type = other DNA
gtctcactctgtcgcctggg

SEQ ID NO: 27115 - DNA, 20 bp, synthetic construct
  source 1..20: mol_type = other DNA
ggtctcactctgtcgcctgg

SEQ ID NO: 27116 - DNA, 20 bp, synthetic construct
  source 1..20: mol_type = other DNA
gggtctcactctgtcgcctg

SEQ ID NO: 27117 - DNA, 20 bp, synthetic construct
  source 1..20: mol_type = other DNA
agggtctcactctgtcgcct

SEQ ID NO: 27118 - DNA, 20 bp, synthetic construct
  source 1..20: mol_type = other DNA
tagggtctcactctgtcgcc

SEQ ID NO: 27119 - DNA, 20 bp, synthetic construct
  source 1..20: mol_type = other DNA
atagggtctcactctgtcgc

SEQ ID NO: 27120 - DNA, 20 bp, synthetic construct
  source 1..20: mol_type = other DNA
gatagggtctcactctgtcg

SEQ ID NO: 27121 - DNA, 20 bp, synthetic construct
  source 1..20: mol_type = other DNA
ggatagggtctcactctgtc

SEQ ID NO: 27122 - DNA, 20 bp, synthetic construct
  source 1..20: mol_type = other DNA
gggatagggtctcactctgt

SEQ ID NO: 27123 - DNA, 20 bp, synthetic construct
  source 1..20: mol_type = other DNA
ggggatagggtctcactctg

SEQ ID NO: 27124 - DNA, 20 bp, synthetic construct
  source 1..20: mol_type = other DNA
gggggatagggtctcactct

SEQ ID NO: 27125 - DNA, 20 bp, synthetic construct
  source 1..20: mol_type = other DNA
ggggggatagggtctcactc

SEQ ID NO: 27126 - DNA, 20 bp, synthetic construct
  source 1..20: mol_type = other DNA
tggggggatagggtctcact

SEQ ID NO: 27127 - DNA, 20 bp, synthetic construct
  source 1..20: mol_type = other DNA
gtggggggatagggtctcac

SEQ ID NO: 27128 - DNA, 20 bp, synthetic construct
  source 1..20: mol_type = other DNA
ggtggggggatagggtctca

SEQ ID NO: 27129 - DNA, 20 bp, synthetic construct
  source 1..20: mol_type = other DNA
cggtggggggatagggtctc

SEQ ID NO: 27130 - DNA, 20 bp, synthetic construct
  source 1..20: mol_type = other DNA
gcggtggggggatagggtct

SEQ ID NO: 27131 - DNA, 20 bp, synthetic construct
  source 1..20: mol_type = other DNA
ggcggtggggggatagggtc

SEQ ID NO: 27132 - DNA, 20 bp, synthetic construct
  source 1..20: mol_type = other DNA
tggcggtggggggatagggt

SEQ ID NO: 27133 - DNA, 20 bp, synthetic construct
  source 1..20: mol_type = other DNA
ttggcggtggggggataggg

SEQ ID NO: 27134 - DNA, 20 bp, synthetic construct
  source 1..20: mol_type = other DNA
tttggcggtggggggatagg

SEQ ID NO: 27135 - DNA, 20 bp, synthetic construct
  source 1..20: mol_type = other DNA
ttttggcggtggggggatag

SEQ ID NO: 27136 - DNA, 20 bp, synthetic construct
  source 1..20: mol_type = other DNA
tttttggcggtggggggata

SEQ ID NO: 27137 - DNA, 20 bp, synthetic construct
  source 1..20: mol_type = other DNA
ttttttggcggtggggggat

SEQ ID NO: 27138 - DNA, 20 bp, synthetic construct
  source 1..20: mol_type = other DNA
tttttttggcggtgggggga

SEQ ID NO: 27139 - DNA, 20 bp, synthetic construct
  source 1..20: mol_type = other DNA
ttttttttggcggtgggggg

SEQ ID NO: 27140 - DNA, 20 bp, synthetic construct
  source 1..20: mol_type = other DNA
cttttttttggcggtggggg

SEQ ID NO: 27141 - DNA, 20 bp, synthetic construct
  source 1..20: mol_type = other DNA
tcttttttttggcggtgggg

SEQ ID NO: 27142 - DNA, 20 bp, synthetic construct
  source 1..20: mol_type = other DNA
ttcttttttttggcggtggg

SEQ ID NO: 27143 - DNA, 20 bp, synthetic construct
  source 1..20: mol_type = other DNA
tttcttttttttggcggtgg

SEQ ID NO: 27144 - DNA, 20 bp, synthetic construct
  source 1..20: mol_type = other DNA
ttttcttttttttggcggtg

SEQ ID NO: 27145 - DNA, 20 bp, synthetic construct
  source 1..20: mol_type = other DNA
cttttcttttttttggcggt

SEQ ID NO: 27146 - DNA, 20 bp, synthetic construct
  source 1..20: mol_type = other DNA
tcttttcttttttttggcgg

SEQ ID NO: 27147 - DNA, 20 bp, synthetic construct
  source 1..20: mol_type = other DNA
ttcttttcttttttttggcg

SEQ ID NO: 27148 - DNA, 20 bp, synthetic construct
  source 1..20: mol_type = other DNA
tttcttttcttttttttggc

SEQ ID NO: 27149 - DNA, 20 bp, synthetic construct
  source 1..20: mol_type = other DNA
ttttcttttcttttttttgg

SEQ ID NO: 27150 - DNA, 20 bp, synthetic construct
  source 1..20: mol_type = other DNA
attttcttttcttttttttg

SEQ ID NO: 27151 - DNA, 20 bp, synthetic construct
  source 1..20: mol_type = other DNA
cattttcttttctttttttt

SEQ ID NO: 27152 - DNA, 20 bp, synthetic construct
  source 1..20: mol_type = other DNA
tcattttcttttcttttttt

SEQ ID NO: 27153 - DNA, 20 bp, synthetic construct
  source 1..20: mol_type = other DNA
ctcattttcttttctttttt

SEQ ID NO: 27154 - DNA, 20 bp, synthetic construct
  source 1..20: mol_type = other DNA
cctcattttcttttcttttt

SEQ ID NO: 27155 - DNA, 20 bp, synthetic construct
  source 1..20: mol_type = other DNA
tcctcattttcttttctttt

SEQ ID NO: 27156 - DNA, 20 bp, synthetic construct
  source 1..20: mol_type = other DNA
ttcctcattttcttttcttt

SEQ ID NO: 27157 - DNA, 20 bp, synthetic construct
  source 1..20: mol_type = other DNA
attcctcattttcttttctt

SEQ ID NO: 27158 - DNA, 20 bp, synthetic construct
  source 1..20: mol_type = other DNA
aattcctcattttcttttct

SEQ ID NO: 27159 - DNA, 20 bp, synthetic construct
  source 1..20: mol_type = other DNA
aaattcctcattttcttttc

SEQ ID NO: 27160 - DNA, 20 bp, synthetic construct
  source 1..20: mol_type = other DNA
taaattcctcattttctttt

SEQ ID NO: 27161 - DNA, 20 bp, synthetic construct
  source 1..20: mol_type = other DNA
gtaaattcctcattttcttt

SEQ ID NO: 27162 - DNA, 20 bp, synthetic construct
  source 1..20: mol_type = other DNA
tgtaaattcctcattttctt

SEQ ID NO: 27163 - DNA, 20 bp, synthetic construct
  source 1..20: mol_type = other DNA
atgtaaattcctcattttct

SEQ ID NO: 27164 - DNA, 20 bp, synthetic construct
  source 1..20: mol_type = other DNA
aatgtaaattcctcattttc

SEQ ID NO: 27165 - DNA, 20 bp, synthetic construct
  source 1..20: mol_type = other DNA
aaatgtaaattcctcatttt

SEQ ID NO: 27166 - DNA, 20 bp, synthetic construct
  source 1..20: mol_type = other DNA
caaatgtaaattcctcattt

SEQ ID NO: 27167 - DNA, 20 bp, synthetic construct
  source 1..20: mol_type = other DNA
acaaatgtaaattcctcatt

SEQ ID NO: 27168 - DNA, 20 bp, synthetic construct
  source 1..20: mol_type = other DNA
cacaaatgtaaattcctcat

SEQ ID NO: 27169 - DNA, 20 bp, synthetic construct
  source 1..20: mol_type = other DNA
tcacaaatgtaaattcctca

SEQ ID NO: 27170 - DNA, 20 bp, synthetic construct
  source 1..20: mol_type = other DNA
gtcacaaatgtaaattcctc

SEQ ID NO: 27171 - DNA, 20 bp, synthetic construct
  source 1..20: mol_type = other DNA
tgtcacaaatgtaaattcct

SEQ ID NO: 27172 - DNA, 20 bp, synthetic construct
  source 1..20: mol_type = other DNA
ctgtcacaaatgtaaattcc

SEQ ID NO: 27173 - DNA, 20 bp, synthetic construct
  source 1..20: mol_type = other DNA
tctgtcacaaatgtaaattc

SEQ ID NO: 27174 - DNA, 20 bp, synthetic construct
  source 1..20: mol_type = other DNA
atctgtcacaaatgtaaatt

SEQ ID NO: 27175 - DNA, 20 bp, synthetic construct
  source 1..20: mol_type = other DNA
tatctgtcacaaatgtaaat

SEQ ID NO: 27176 - DNA, 20 bp, synthetic construct
  source 1..20: mol_type = other DNA
gtatctgtcacaaatgtaaa

SEQ ID NO: 27177 - DNA, 20 bp, synthetic construct
  source 1..20: mol_type = other DNA
cgtatctgtcacaaatgtaa

SEQ ID NO: 27178 - DNA, 20 bp, synthetic construct
  source 1..20: mol_type = other DNA
ccgtatctgtcacaaatgta

SEQ ID NO: 27179 - DNA, 20 bp, synthetic construct
  source 1..20: mol_type = other DNA
tccgtatctgtcacaaatgt

SEQ ID NO: 27180 - DNA, 20 bp, synthetic construct
  source 1..20: mol_type = other DNA
ttccgtatctgtcacaaatg

SEQ ID NO: 27181 - DNA, 20 bp, synthetic construct
  source 1..20: mol_type = other DNA
attccgtatctgtcacaaat

SEQ ID NO: 27182 - DNA, 20 bp, synthetic construct
  source 1..20: mol_type = other DNA
aattccgtatctgtcacaaa

SEQ ID NO: 27183 - DNA, 20 bp, synthetic construct
  source 1..20: mol_type = other DNA
gaattccgtatctgtcacaa

SEQ ID NO: 27184 - DNA, 20 bp, synthetic construct
  source 1..20: mol_type = other DNA
tgaattccgtatctgtcaca

SEQ ID NO: 27185 - DNA, 20 bp, synthetic construct
  source 1..20: mol_type = other DNA
ctgaattccgtatctgtcac

SEQ ID NO: 27186 - DNA, 20 bp, synthetic construct
  source 1..20: mol_type = other DNA
cctgaattccgtatctgtca

SEQ ID NO: 27187 - DNA, 20 bp, synthetic construct
  source 1..20: mol_type = other DNA
ccctgaattccgtatctgtc

SEQ ID NO: 27188 - DNA, 20 bp, synthetic construct
  source 1..20: mol_type = other DNA
tccctgaattccgtatctgt

SEQ ID NO: 27189 - DNA, 20 bp, synthetic construct
  source 1..20: mol_type = other DNA
ttccctgaattccgtatctg

SEQ ID NO: 27190 - DNA, 20 bp, synthetic construct
  source 1..20: mol_type = other DNA
attccctgaattccgtatct

SEQ ID NO: 27191 - DNA, 20 bp, synthetic construct
  source 1..20: mol_type = other DNA
aattccctgaattccgtatc

SEQ ID NO: 27192 - DNA, 20 bp, synthetic construct
  source 1..20: mol_type = other DNA
aaattccctgaattccgtat

SEQ ID NO: 27193 - DNA, 20 bp, synthetic construct
  source 1..20: mol_type = other DNA
taaattccctgaattccgta

SEQ ID NO: 27194 - DNA, 20 bp, synthetic construct
  source 1..20: mol_type = other DNA
ctaaattccctgaattccgt

SEQ ID NO: 27195 - DNA, 20 bp, synthetic construct
  source 1..20: mol_type = other DNA
actaaattccctgaattccg

SEQ ID NO: 27196 - DNA, 20 bp, synthetic construct
  source 1..20: mol_type = other DNA
aactaaattccctgaattcc

SEQ ID NO: 27197 - DNA, 20 bp, synthetic construct
  source 1..20: mol_type = other DNA
caactaaattccctgaattc

SEQ ID NO: 27198 - DNA, 20 bp, synthetic construct
  source 1..20: mol_type = other DNA
acaactaaattccctgaatt

SEQ ID NO: 27199 - DNA, 20 bp, synthetic construct
  source 1..20: mol_type = other DNA
aacaactaaattccctgaat

SEQ ID NO: 27200 - DNA, 20 bp, synthetic construct
  source 1..20: mol_type = other DNA
gaacaactaaattccctgaa

SEQ ID NO: 27201 - DNA, 20 bp, synthetic construct
  source 1..20: mol_type = other DNA
tgaacaactaaattccctga

SEQ ID NO: 27202 - DNA, 20 bp, synthetic construct
  source 1..20: mol_type = other DNA
atgaacaactaaattccctg

SEQ ID NO: 27203 - DNA, 20 bp, synthetic construct
  source 1..20: mol_type = other DNA
tatgaacaactaaattccct

SEQ ID NO: 27204 - DNA, 20 bp, synthetic construct
  source 1..20: mol_type = other DNA
ctatgaacaactaaattccc

SEQ ID NO: 27205 - DNA, 20 bp, synthetic construct
  source 1..20: mol_type = other DNA
actatgaacaactaaattcc

SEQ ID NO: 27206 - DNA, 20 bp, synthetic construct
  source 1..20: mol_type = other DNA
gactatgaacaactaaattc

SEQ ID NO: 27207 - DNA, 20 bp, synthetic construct
  source 1..20: mol_type = other DNA
agactatgaacaactaaatt

SEQ ID NO: 27208 - DNA, 20 bp, synthetic construct
  source 1..20: mol_type = other DNA
tagactatgaacaactaaat

SEQ ID NO: 27209 - DNA, 20 bp, synthetic construct
  source 1..20: mol_type = other DNA
atagactatgaacaactaaa

SEQ ID NO: 27210 - DNA, 20 bp, synthetic construct
  source 1..20: mol_type = other DNA
tatagactatgaacaactaa

SEQ ID NO: 27211 - DNA, 20 bp, synthetic construct
  source 1..20: mol_type = other DNA
ttatagactatgaacaacta

SEQ ID NO: 27212 - DNA, 20 bp, synthetic construct
  source 1..20: mol_type = other DNA
tttatagactatgaacaact

SEQ ID NO: 27213 - DNA, 20 bp, synthetic construct
  source 1..20: mol_type = other DNA
atttatagactatgaacaac

SEQ ID NO: 27214 - DNA, 20 bp, synthetic construct
  source 1..20: mol_type = other DNA
catttatagactatgaacaa

SEQ ID NO: 27215 - DNA, 20 bp, synthetic construct
  source 1..20: mol_type = other DNA
gcatttatagactatgaaca

SEQ ID NO: 27216 - DNA, 20 bp, synthetic construct
  source 1..20: mol_type = other DNA
agcatttatagactatgaac

SEQ ID NO: 27217 - DNA, 20 bp, synthetic construct
  source 1..20: mol_type = other DNA
tagcatttatagactatgaa

SEQ ID NO: 27218 - DNA, 20 bp, synthetic construct
  source 1..20: mol_type = other DNA
atagcatttatagactatga

SEQ ID NO: 27219 - DNA, 20 bp, synthetic construct
  source 1..20: mol_type = other DNA
tatagcatttatagactatg

SEQ ID NO: 27220 - DNA, 20 bp, synthetic construct
  source 1..20: mol_type = other DNA
ttatagcatttatagactat

SEQ ID NO: 27221 - DNA, 20 bp, synthetic construct
  source 1..20: mol_type = other DNA
cttatagcatttatagacta

SEQ ID NO: 27222 - DNA, 20 bp, synthetic construct
  source 1..20: mol_type = other DNA
tcttatagcatttatagact

SEQ ID NO: 27223 - DNA, 20 bp, synthetic construct
  source 1..20: mol_type = other DNA
ttcttatagcatttatagac

SEQ ID NO: 27224 - DNA, 20 bp, synthetic construct
  source 1..20: mol_type = other DNA
cttcttatagcatttataga

SEQ ID NO: 27225 - DNA, 20 bp, synthetic construct
  source 1..20: mol_type = other DNA
acttcttatagcatttatag

SEQ ID NO: 27226 - DNA, 20 bp, synthetic construct
  source 1..20: mol_type = other DNA
gacttcttatagcatttata

SEQ ID NO: 27227 - DNA, 20 bp, synthetic construct
  source 1..20: mol_type = other DNA
agacttcttatagcatttat

SEQ ID NO: 27228 - DNA, 20 bp, synthetic construct
  source 1..20: mol_type = other DNA
gagacttcttatagcattta

SEQ ID NO: 27229 - DNA, 20 bp, synthetic construct
  source 1..20: mol_type = other DNA
ggagacttcttatagcattt

SEQ ID NO: 27230 - DNA, 20 bp, synthetic construct
  source 1..20: mol_type = other DNA
tggagacttcttatagcatt

SEQ ID NO: 27231 - DNA, 20 bp, synthetic construct
  source 1..20: mol_type = other DNA
atggagacttcttatagcat

SEQ ID NO: 27232 - DNA, 20 bp, synthetic construct
  source 1..20: mol_type = other DNA
tatggagacttcttatagca

SEQ ID NO: 27233 - DNA, 20 bp, synthetic construct
  source 1..20: mol_type = other DNA
gtatggagacttcttatagc

SEQ ID NO: 27234 - DNA, 20 bp, synthetic construct
  source 1..20: mol_type = other DNA
ggtatggagacttcttatag

SEQ ID NO: 27235 - DNA, 20 bp, synthetic construct
  source 1..20: mol_type = other DNA
aggtatggagacttcttata

SEQ ID NO: 27236 - DNA, 20 bp, synthetic construct
  source 1..20: mol_type = other DNA
aaggtatggagacttcttat

SEQ ID NO: 27237 - DNA, 20 bp, synthetic construct
  source 1..20: mol_type = other DNA
aaaggtatggagacttctta

SEQ ID NO: 27238 - DNA, 20 bp, synthetic construct
  source 1..20: mol_type = other DNA
aaaaggtatggagacttctt

SEQ ID NO: 27239 - DNA, 20 bp, synthetic construct
  source 1..20: mol_type = other DNA
aaaaaggtatggagacttct

SEQ ID NO: 27240 - DNA, 20 bp, synthetic construct
  source 1..20: mol_type = other DNA
aaaaaaggtatggagacttc

SEQ ID NO: 27241 - DNA, 20 bp, synthetic construct
  source 1..20: mol_type = other DNA
aaaaaaaggtatggagactt

SEQ ID NO: 27242 - DNA, 20 bp, synthetic construct
  source 1..20: mol_type = other DNA
aaaaaaaaggtatggagact

SEQ ID NO: 27243 - DNA, 20 bp, synthetic construct
  source 1..20: mol_type = other DNA
aaaaaaaaaggtatggagac

SEQ ID NO: 27244 - DNA, 20 bp, synthetic construct
  source 1..20: mol_type = other DNA
aaaaaaaaaaggtatggaga

SEQ ID NO: 27245 - DNA, 20 bp, synthetic construct
  source 1..20: mol_type = other DNA
aaaaaaaaaaaggtatggag

SEQ ID NO: 27246 - DNA, 20 bp, synthetic construct
  source 1..20: mol_type = other DNA
aaaaaaaaaaaaggtatgga

SEQ ID NO: 27247 - DNA, 20 bp, synthetic construct
  source 1..20: mol_type = other DNA
aaaaaaaaaaaaaggtatgg

SEQ ID NO: 27248 - DNA, 20 bp, synthetic construct
  source 1..20: mol_type = other DNA
aaaaaaaaaaaaaaggtatg

SEQ ID NO: 27249 - DNA, 20 bp, synthetic construct
  source 1..20: mol_type = other DNA
aaaaaaaaaaaaaaaggtat

SEQ ID NO: 27250 - DNA, 20 bp, synthetic construct
  source 1..20: mol_type = other DNA
aaaaaaaaaaaaaaaaggta

SEQ ID NO: 27251 - DNA, 20 bp, synthetic construct
  source 1..20: mol_type = other DNA
aaaaaaaaaaaaaaaaaggt

SEQ ID NO: 27252 - DNA, 20 bp, synthetic construct
  source 1..20: mol_type = other DNA
aaaaaaaaaaaaaaaaaagg

SEQ ID NO: 27253 - DNA, 20 bp, synthetic construct
  source 1..20: mol_type = other DNA
aaaaaaaaaaaaaaaaaaag

SEQ ID NO: 27254 - DNA, 20 bp, synthetic construct
  source 1..20: mol_type = other DNA
aaaaaaaaaaaaaaaaaaaa

SEQ ID NO: 27255 - DNA, 20 bp, synthetic construct
  source 1..20: mol_type = other DNA
aaaaaaaaaaaaaaaaaaaa

SEQ ID NO: 27256 - DNA, 20 bp, synthetic construct
  source 1..20: mol_type = other DNA
aaaaaaaaaaaaaaaaaaaa

SEQ ID NO: 27257 - DNA, 20 bp, synthetic construct
  source 1..20: mol_type = other DNA
aaaaaaaaaaaaaaaaaaaa

SEQ ID NO: 27258 - DNA, 20 bp, synthetic construct
  source 1..20: mol_type = other DNA
aaaaaaaaaaaaaaaaaaaa

SEQ ID NO: 27259 - DNA, 20 bp, synthetic construct
  source 1..20: mol_type = other DNA
aaaaaaaaaaaaaaaaaaaa

SEQ ID NO: 27260 - DNA, 20 bp, synthetic construct
  source 1..20: mol_type = other DNA
caaaaaaaaaaaaaaaaaaa

SEQ ID NO: 27261 - DNA, 20 bp, synthetic construct
  source 1..20: mol_type = other DNA
ccaaaaaaaaaaaaaaaaaa

SEQ ID NO: 27262 - DNA, 20 bp, synthetic construct
  source 1..20: mol_type = other DNA
tccaaaaaaaaaaaaaaaaa

SEQ ID NO: 27263 - DNA, 20 bp, synthetic construct
  source 1..20: mol_type = other DNA
ctccaaaaaaaaaaaaaaaa

SEQ ID NO: 27264 - DNA, 20 bp, synthetic construct
  source 1..20: mol_type = other DNA
tctccaaaaaaaaaaaaaaa

SEQ ID NO: 27265 - DNA, 20 bp, synthetic construct
  source 1..20: mol_type = other DNA
gtctccaaaaaaaaaaaaaa

SEQ ID NO: 27266 - DNA, 20 bp, synthetic construct
  source 1..20: mol_type = other DNA
tgtctccaaaaaaaaaaaaa

SEQ ID NO: 27267 - DNA, 20 bp, synthetic construct
  source 1..20: mol_type = other DNA
ctgtctccaaaaaaaaaaaa

SEQ ID NO: 27268 - DNA, 20 bp, synthetic construct
  source 1..20: mol_type = other DNA
tctgtctccaaaaaaaaaaa

SEQ ID NO: 27269 - DNA, 20 bp, synthetic construct
  source 1..20: mol_type = other DNA
ctctgtctccaaaaaaaaaa

SEQ ID NO: 27270 - DNA, 20 bp, synthetic construct
  source 1..20: mol_type = other DNA
actctgtctccaaaaaaaaa

SEQ ID NO: 27271 - DNA, 20 bp, synthetic construct
  source 1..20: mol_type = other DNA
gactctgtctccaaaaaaaa

SEQ ID NO: 27272 - DNA, 20 bp, synthetic construct
  source 1..20: mol_type = other DNA
agactctgtctccaaaaaaa

SEQ ID NO: 27273 - DNA, 20 bp, synthetic construct
  source 1..20: mol_type = other DNA
aagactctgtctccaaaaaa

SEQ ID NO: 27274 - DNA, 20 bp, synthetic construct
  source 1..20: mol_type = other DNA
caagactctgtctccaaaaa

SEQ ID NO: 27275 - DNA, 20 bp, synthetic construct
  source 1..20: mol_type = other DNA
gcaagactctgtctccaaaa

SEQ ID NO: 27276 - DNA, 20 bp, synthetic construct
  source 1..20: mol_type = other DNA
agcaagactctgtctccaaa

SEQ ID NO: 27277 - DNA, 20 bp, synthetic construct
  source 1..20: mol_type = other DNA
gagcaagactctgtctccaa

SEQ ID NO: 27278 - DNA, 20 bp, synthetic construct
  source 1..20: mol_type = other DNA
agagcaagactctgtctcca

SEQ ID NO: 27279 - DNA, 20 bp, synthetic construct
  source 1..20: mol_type = other DNA
cagagcaagactctgtctcc

SEQ ID NO: 27280 - DNA, 20 bp, synthetic construct
  source 1..20: mol_type = other DNA
acagagcaagactctgtctc

SEQ ID NO: 27281 - DNA, 20 bp, synthetic construct
  source 1..20: mol_type = other DNA
gacagagcaagactctgtct

SEQ ID NO: 27282 - DNA, 20 bp, synthetic construct
  source 1..20: mol_type = other DNA
cgacagagcaagactctgtc

SEQ ID NO: 27283 - DNA, 20 bp, synthetic construct
  source 1..20: mol_type = other DNA
gcgacagagcaagactctgt

SEQ ID NO: 27284 - DNA, 20 bp, synthetic construct
  source 1..20: mol_type = other DNA
ggcgacagagcaagactctg

SEQ ID NO: 27285 - DNA, 20 bp, synthetic construct
  source 1..20: mol_type = other DNA
gggcgacagagcaagactct

SEQ ID NO: 27286 - DNA, 20 bp, synthetic construct
  source 1..20: mol_type = other DNA
tgggcgacagagcaagactc

SEQ ID NO: 27287 - DNA, 20 bp, synthetic construct
  source 1..20: mol_type = other DNA
ctgggcgacagagcaagact

SEQ ID NO: 27288 - DNA, 20 bp, synthetic construct
  source 1..20: mol_type = other DNA
cctgggcgacagagcaagac

SEQ ID NO: 27289 - DNA, 20 bp, synthetic construct
  source 1..20: mol_type = other DNA
gcctgggcgacagagcaaga

SEQ ID NO: 27290 - DNA, 20 bp, synthetic construct
  source 1..20: mol_type = other DNA
agcctgggcgacagagcaag

SEQ ID NO: 27291 - DNA, 20 bp, synthetic construct
  source 1..20: mol_type = other DNA
cagcctgggcgacagagcaa

SEQ ID NO: 27292 - DNA, 20 bp, synthetic construct
  source 1..20: mol_type = other DNA
ccagcctgggcgacagagca

SEQ ID NO: 27293 - DNA, 20 bp, synthetic construct
  source 1..20: mol_type = other DNA
tccagcctgggcgacagagc

SEQ ID NO: 27294 - DNA, 20 bp, synthetic construct
  source 1..20: mol_type = other DNA
ctccagcctgggcgacagag

SEQ ID NO: 27295 - DNA, 20 bp, synthetic construct
  source 1..20: mol_type = other DNA
actccagcctgggcgacaga

SEQ ID NO: 27296 - DNA, 20 bp, synthetic construct
  source 1..20: mol_type = other DNA
cactccagcctgggcgacag

SEQ ID NO: 27297 - DNA, 20 bp, synthetic construct
  source 1..20: mol_type = other DNA
gcactccagcctgggcgaca

SEQ ID NO: 27298 - DNA, 20 bp, synthetic construct
  source 1..20: mol_type = other DNA
tgcactccagcctgggcgac

SEQ ID NO: 27299 - DNA, 20 bp, synthetic construct
  source 1..20: mol_type = other DNA
ctgcactccagcctgggcga

SEQ ID NO: 27300 - DNA, 20 bp, synthetic construct
  source 1..20: mol_type = other DNA
actgcactccagcctgggcg

SEQ ID NO: 27301 - DNA, 20 bp, synthetic construct
  source 1..20: mol_type = other DNA
cactgcactccagcctgggc

SEQ ID NO: 27302 - DNA, 20 bp, synthetic construct
  source 1..20: mol_type = other DNA
ccactgcactccagcctggg

SEQ ID NO: 27303 - DNA, 20 bp, synthetic construct
  source 1..20: mol_type = other DNA
accactgcactccagcctgg

SEQ ID NO: 27304 - DNA, 20 bp, synthetic construct
  source 1..20: mol_type = other DNA
caccactgcactccagcctg

SEQ ID NO: 27305 - DNA, 20 bp, synthetic construct
  source 1..20: mol_type = other DNA
gcaccactgcactccagcct

SEQ ID NO: 27306 - DNA, 20 bp, synthetic construct
  source 1..20: mol_type = other DNA
cgcaccactgcactccagcc

SEQ ID NO: 27307 - DNA, 20 bp, synthetic construct
  source 1..20: mol_type = other DNA
tcgcaccactgcactccagc

SEQ ID NO: 27308 - DNA, 20 bp, synthetic construct
  source 1..20: mol_type = other DNA
atcgcaccactgcactccag

SEQ ID NO: 27309 - DNA, 20 bp, synthetic construct
  source 1..20: mol_type = other DNA
gatcgcaccactgcactcca

SEQ ID NO: 27310 - DNA, 20 bp, synthetic construct
  source 1..20: mol_type = other DNA
agatcgcaccactgcactcc

SEQ ID NO: 27311 - DNA, 20 bp, synthetic construct
  source 1..20: mol_type = other DNA
aagatcgcaccactgcactc

SEQ ID NO: 27312 - DNA, 20 bp, synthetic construct
  source 1..20: mol_type = other DNA
caagatcgcaccactgcact

SEQ ID NO: 27313 - DNA, 20 bp, synthetic construct
  source 1..20: mol_type = other DNA
ccaagatcgcaccactgcac

SEQ ID NO: 27314 - DNA, 20 bp, synthetic construct
  source 1..20: mol_type = other DNA
gccaagatcgcaccactgca

SEQ ID NO: 27315 - DNA, 20 bp, synthetic construct
  source 1..20: mol_type = other DNA
agccaagatcgcaccactgc

SEQ ID NO: 27316 - DNA, 20 bp, synthetic construct
  source 1..20: mol_type = other DNA
gagccaagatcgcaccactg

SEQ ID NO: 27317 - DNA, 20 bp, synthetic construct
  source 1..20: mol_type = other DNA
tgagccaagatcgcaccact

SEQ ID NO: 27318 - DNA, 20 bp, synthetic construct
  source 1..20: mol_type = other DNA
gtgagccaagatcgcaccac

SEQ ID NO: 27319 - DNA, 20 bp, synthetic construct
  source 1..20: mol_type = other DNA
agtgagccaagatcgcacca

SEQ ID NO: 27320 - DNA, 20 bp, synthetic construct
  source 1..20: mol_type = other DNA
tagtgagccaagatcgcacc

SEQ ID NO: 27321 - DNA, 20 bp, synthetic construct
  source 1..20: mol_type = other DNA
gtagtgagccaagatcgcac

SEQ ID NO: 27322 - DNA, 20 bp, synthetic construct
  source 1..20: mol_type = other DNA
tgtagtgagccaagatcgca

SEQ ID NO: 27323 - DNA, 20 bp, synthetic construct
  source 1..20: mol_type = other DNA
ttgtagtgagccaagatcgc

SEQ ID NO: 27324 - DNA, 20 bp, synthetic construct
  source 1..20: mol_type = other DNA
cttgtagtgagccaagatcg

SEQ ID NO: 27325 - DNA, 20 bp, synthetic construct
  source 1..20: mol_type = other DNA
gcttgtagtgagccaagatc

SEQ ID NO: 27326 - DNA, 20 bp, synthetic construct
  source 1..20: mol_type = other DNA
agcttgtagtgagccaagat

SEQ ID NO: 27327 - DNA, 20 bp, synthetic construct
  source 1..20: mol_type = other DNA
gagcttgtagtgagccaaga

SEQ ID NO: 27328 - DNA, 20 bp, synthetic construct
  source 1..20: mol_type = other DNA
agagcttgtagtgagccaag

SEQ ID NO: 27329 - DNA, 20 bp, synthetic construct
  source 1..20: mol_type = other DNA
cagagcttgtagtgagccaa

SEQ ID NO: 27330 - DNA, 20 bp, synthetic construct
  source 1..20: mol_type = other DNA
gcagagcttgtagtgagcca

SEQ ID NO: 27331 - DNA, 20 bp, synthetic construct
  source 1..20: mol_type = other DNA
ggcagagcttgtagtgagcc

SEQ ID NO: 27332 - DNA, 20 bp, synthetic construct
  source 1..20: mol_type = other DNA
aggcagagcttgtagtgagc

SEQ ID NO: 27333 - DNA, 20 bp, synthetic construct
  source 1..20: mol_type = other DNA
gaggcagagcttgtagtgag

SEQ ID NO: 27334 - DNA, 20 bp, synthetic construct
  source 1..20: mol_type = other DNA
agaggcagagcttgtagtga

SEQ ID NO: 27335 - DNA, 20 bp, synthetic construct
  source 1..20: mol_type = other DNA
gagaggcagagcttgtagtg

SEQ ID NO: 27336 - DNA, 20 bp, synthetic construct
  source 1..20: mol_type = other DNA
cgagaggcagagcttgtagt

SEQ ID NO: 27337 - DNA, 20 bp, synthetic construct
  source 1..20: mol_type = other DNA
ccgagaggcagagcttgtag

SEQ ID NO: 27338 - DNA, 20 bp, synthetic construct
  source 1..20: mol_type = other DNA
cccgagaggcagagcttgta

SEQ ID NO: 27339 - DNA, 20 bp, synthetic construct
  source 1..20: mol_type = other DNA
acccgagaggcagagcttgt

SEQ ID NO: 27340 - DNA, 20 bp, synthetic construct
  source 1..20: mol_type = other DNA
aacccgagaggcagagcttg

SEQ ID NO: 27341 - DNA, 20 bp, synthetic construct
  source 1..20: mol_type = other DNA
gaacccgagaggcagagctt

SEQ ID NO: 27342 - DNA, 20 bp, synthetic construct
  source 1..20: mol_type = other DNA
tgaacccgagaggcagagct

SEQ ID NO: 27343 - DNA, 20 bp, synthetic construct
  source 1..20: mol_type = other DNA
gtgaacccgagaggcagagc

SEQ ID NO: 27344 - DNA, 20 bp, synthetic construct
  source 1..20: mol_type = other DNA
cgtgaacccgagaggcagag

SEQ ID NO: 27345 - DNA, 20 bp, synthetic construct
  source 1..20: mol_type = other DNA
gcgtgaacccgagaggcaga

SEQ ID NO: 27346 - DNA, 20 bp, synthetic construct
  source 1..20: mol_type = other DNA
ggcgtgaacccgagaggcag

SEQ ID NO: 27347 - DNA, 20 bp, synthetic construct
  source 1..20: mol_type = other DNA
tggcgtgaacccgagaggca

SEQ ID NO: 27348 - DNA, 20 bp, synthetic construct
  source 1..20: mol_type = other DNA
atggcgtgaacccgagaggc

SEQ ID NO: 27349 - DNA, 20 bp, synthetic construct
  source 1..20: mol_type = other DNA
aatggcgtgaacccgagagg

SEQ ID NO: 27350 - DNA, 20 bp, synthetic construct
  source 1..20: mol_type = other DNA
gaatggcgtgaacccgagag

SEQ ID NO: 27351 - DNA, 20 bp, synthetic construct
  source 1..20: mol_type = other DNA
agaatggcgtgaacccgaga

SEQ ID NO: 27352 - DNA, 20 bp, synthetic construct
  source 1..20: mol_type = other DNA
gagaatggcgtgaacccgag

SEQ ID NO: 27353 - DNA, 20 bp, synthetic construct
  source 1..20: mol_type = other DNA
ggagaatggcgtgaacccga

SEQ ID NO: 27354 - DNA, 20 bp, synthetic construct
  source 1..20: mol_type = other DNA
aggagaatggcgtgaacccg

SEQ ID NO: 27355 - DNA, 20 bp, synthetic construct
  source 1..20: mol_type = other DNA
caggagaatggcgtgaaccc

SEQ ID NO: 27356 - DNA, 20 bp, synthetic construct
  source 1..20: mol_type = other DNA
gcaggagaatggcgtgaacc

SEQ ID NO: 27357 - DNA, 20 bp, synthetic construct
  source 1..20: mol_type = other DNA
ggcaggagaatggcgtgaac

SEQ ID NO: 27358 - DNA, 20 bp, synthetic construct
  source 1..20: mol_type = other DNA
aggcaggagaatggcgtgaa

SEQ ID NO: 27359 - DNA, 20 bp, synthetic construct
  source 1..20: mol_type = other DNA
gaggcaggagaatggcgtga

SEQ ID NO: 27360 - DNA, 20 bp, synthetic construct
  source 1..20: mol_type = other DNA
ggaggcaggagaatggcgtg

SEQ ID NO: 27361 - DNA, 20 bp, synthetic construct
  source 1..20: mol_type = other DNA
tggaggcaggagaatggcgt

SEQ ID NO: 27362 - DNA, 20 bp, synthetic construct
  source 1..20: mol_type = other DNA
gtggaggcaggagaatggcg

SEQ ID NO: 27363 - DNA, 20 bp, synthetic construct
  source 1..20: mol_type = other DNA
ggtggaggcaggagaatggc

SEQ ID NO: 27364 - DNA, 20 bp, synthetic construct
  source 1..20: mol_type = other DNA
aggtggaggcaggagaatgg

SEQ ID NO: 27365 - DNA, 20 bp, synthetic construct
  source 1..20: mol_type = other DNA
gaggtggaggcaggagaatg

SEQ ID NO: 27366 - DNA, 20 bp, synthetic construct
  source 1..20: mol_type = other DNA
ggaggtggaggcaggagaat

SEQ ID NO: 27367 - DNA, 20 bp, synthetic construct
  source 1..20: mol_type = other DNA
gggaggtggaggcaggagaa

SEQ ID NO: 27368 - DNA, 20 bp, synthetic construct
  source 1..20: mol_type = other DNA
cgggaggtggaggcaggaga

SEQ ID NO: 27369 - DNA, 20 bp, synthetic construct
  source 1..20: mol_type = other DNA
tcgggaggtggaggcaggag

SEQ ID NO: 27370 - DNA, 20 bp, synthetic construct
  source 1..20: mol_type = other DNA
ctcgggaggtggaggcagga

SEQ ID NO: 27371 - DNA, 20 bp, synthetic construct
  source 1..20: mol_type = other DNA
actcgggaggtggaggcagg

SEQ ID NO: 27372 - DNA, 20 bp, synthetic construct
  source 1..20: mol_type = other DNA
tactcgggaggtggaggcag

SEQ ID NO: 27373 - DNA, 20 bp, synthetic construct
  source 1..20: mol_type = other DNA
ctactcgggaggtggaggca

SEQ ID NO: 27374 - DNA, 20 bp, synthetic construct
  source 1..20: mol_type = other DNA
gctactcgggaggtggaggc

SEQ ID NO: 27375 - DNA, 20 bp, synthetic construct
  source 1..20: mol_type = other DNA
agctactcgggaggtggagg

SEQ ID NO: 27376 - DNA, 20 bp, synthetic construct
  source 1..20: mol_type = other DNA
cagctactcgggaggtggag

SEQ ID NO: 27377 - DNA, 20 bp, synthetic construct
  source 1..20: mol_type = other DNA
ccagctactcgggaggtgga

SEQ ID NO: 27378 - DNA, 20 bp, synthetic construct
  source 1..20: mol_type = other DNA
cccagctactcgggaggtgg

SEQ ID NO: 27379 - DNA, 20 bp, synthetic construct
  source 1..20: mol_type = other DNA
tcccagctactcgggaggtg

SEQ ID NO: 27380 - DNA, 20 bp, synthetic construct
  source 1..20: mol_type = other DNA
gtcccagctactcgggaggt

SEQ ID NO: 27381 - DNA, 20 bp, synthetic construct
  source 1..20: mol_type = other DNA
agtcccagctactcgggagg

SEQ ID NO: 27382 - DNA, 20 bp, synthetic construct
  source 1..20: mol_type = other DNA
tagtcccagctactcgggag

SEQ ID NO: 27383 - DNA, 20 bp, synthetic construct
  source 1..20: mol_type = other DNA
gtagtcccagctactcggga

SEQ ID NO: 27384 - DNA, 20 bp, synthetic construct
  source 1..20: mol_type = other DNA
tgtagtcccagctactcggg

SEQ ID NO: 27385 - DNA, 20 bp, synthetic construct
  source 1..20: mol_type = other DNA
ctgtagtcccagctactcgg

SEQ ID NO: 27386 - DNA, 20 bp, synthetic construct
  source 1..20: mol_type = other DNA
cctgtagtcccagctactcg

SEQ ID NO: 27387 - DNA, 20 bp, synthetic construct
  source 1..20: mol_type = other DNA
acctgtagtcccagctactc

SEQ ID NO: 27388 - DNA, 20 bp, synthetic construct
  source 1..20: mol_type = other DNA
cacctgtagtcccagctact

SEQ ID NO: 27389 - DNA, 20 bp, synthetic construct
  source 1..20: mol_type = other DNA
gcacctgtagtcccagctac

SEQ ID NO: 27390 - DNA, 20 bp, synthetic construct
  source 1..20: mol_type = other DNA
ggcacctgtagtcccagcta

SEQ ID NO: 27391 - DNA, 20 bp, synthetic construct
  source 1..20: mol_type = other DNA
gggcacctgtagtcccagct

SEQ ID NO: 27392 - DNA, 20 bp, synthetic construct
  source 1..20: mol_type = other DNA
cgggcacctgtagtcccagc

SEQ ID NO: 27393 - DNA, 20 bp, synthetic construct
  source 1..20: mol_type = other DNA
gcgggcacctgtagtcccag

SEQ ID NO: 27394 - DNA, 20 bp, synthetic construct
  source 1..20: mol_type = other DNA
ggcgggcacctgtagtccca

SEQ ID NO: 27395 - DNA, 20 bp, synthetic construct
  source 1..20: mol_type = other DNA
tggcgggcacctgtagtccc

SEQ ID NO: 27396 - DNA, 20 bp, synthetic construct
  source 1..20: mol_type = other DNA
gtggcgggcacctgtagtcc

SEQ ID NO: 27397 - DNA, 20 bp, synthetic construct
  source 1..20: mol_type = other DNA
ggtggcgggcacctgtagtc

SEQ ID NO: 27398 - DNA, 20 bp, synthetic construct
  source 1..20: mol_type = other DNA
tggtggcgggcacctgtagt

SEQ ID NO: 27399 - DNA, 20 bp, synthetic construct
  source 1..20: mol_type = other DNA
gtggtggcgggcacctgtag

SEQ ID NO: 27400 - DNA, 20 bp, synthetic construct
  source 1..20: mol_type = other DNA
cgtggtggcgggcacctgta

SEQ ID NO: 27401 - DNA, 20 bp, synthetic construct
  source 1..20: mol_type = other DNA
gcgtggtggcgggcacctgt

SEQ ID NO: 27402 - DNA, 20 bp, synthetic construct
  source 1..20: mol_type = other DNA
ggcgtggtggcgggcacctg

SEQ ID NO: 27403 - DNA, 20 bp, synthetic construct
  source 1..20: mol_type = other DNA
gggcgtggtggcgggcacct

SEQ ID NO: 27404 - DNA, 20 bp, synthetic construct
  source 1..20: mol_type = other DNA
cgggcgtggtggcgggcacc

SEQ ID NO: 27405 - DNA, 20 bp, synthetic construct
  source 1..20: mol_type = other DNA
ccgggcgtggtggcgggcac

SEQ ID NO: 27406 - DNA, 20 bp, synthetic construct
  source 1..20: mol_type = other DNA
gccgggcgtggtggcgggca

SEQ ID NO: 27407 - DNA, 20 bp, synthetic construct
  source 1..20: mol_type = other DNA
agccgggcgtggtggcgggc

SEQ ID NO: 27408 - DNA, 20 bp, synthetic construct
  source 1..20: mol_type = other DNA
tagccgggcgtggtggcggg

SEQ ID NO: 27409 - DNA, 20 bp, synthetic construct
  source 1..20: mol_type = other DNA
ttagccgggcgtggtggcgg

SEQ ID NO: 27410 - DNA, 20 bp, synthetic construct
  source 1..20: mol_type = other DNA
attagccgggcgtggtggcg

SEQ ID NO: 27411 - DNA, 20 bp, synthetic construct
  source 1..20: mol_type = other DNA
aattagccgggcgtggtggc

SEQ ID NO: 27412 - DNA, 20 bp, synthetic construct
  source 1..20: mol_type = other DNA
aaattagccgggcgtggtgg

SEQ ID NO: 27413 - DNA, 20 bp, synthetic construct
  source 1..20: mol_type = other DNA
aaaattagccgggcgtggtg

SEQ ID NO: 27414 - DNA, 20 bp, synthetic construct
  source 1..20: mol_type = other DNA
aaaaattagccgggcgtggt

SEQ ID NO: 27415 - DNA, 20 bp, synthetic construct
  source 1..20: mol_type = other DNA
aaaaaattagccgggcgtgg

SEQ ID NO: 27416 - DNA, 20 bp, synthetic construct
  source 1..20: mol_type = other DNA
aaaaaaattagccgggcgtg

SEQ ID NO: 27417 - DNA, 20 bp, synthetic construct
  source 1..20: mol_type = other DNA
caaaaaaattagccgggcgt

SEQ ID NO: 27418 - DNA, 20 bp, synthetic construct
  source 1..20: mol_type = other DNA
acaaaaaaattagccgggcg

SEQ ID NO: 27419 - DNA, 20 bp, synthetic construct
  source 1..20: mol_type = other DNA
tacaaaaaaattagccgggc

SEQ ID NO: 27420 - DNA, 20 bp, synthetic construct
  source 1..20: mol_type = other DNA
atacaaaaaaattagccggg

SEQ ID NO: 27421 - DNA, 20 bp, synthetic construct
  source 1..20: mol_type = other DNA
aatacaaaaaaattagccgg

SEQ ID NO: 27422 - DNA, 20 bp, synthetic construct
  source 1..20: mol_type = other DNA
aaatacaaaaaaattagccg

SEQ ID NO: 27423 - DNA, 20 bp, synthetic construct
  source 1..20: mol_type = other DNA
aaaatacaaaaaaattagcc

SEQ ID NO: 27424 - DNA, 20 bp, synthetic construct
  source 1..20: mol_type = other DNA
aaaaatacaaaaaaattagc

SEQ ID NO: 27425 - DNA, 20 bp, synthetic construct
  source 1..20: mol_type = other DNA
caaaaatacaaaaaaattag

SEQ ID NO: 27426 - DNA, 20 bp, synthetic construct
  source 1..20: mol_type = other DNA
ccaaaaatacaaaaaaatta

SEQ ID NO: 27427 - DNA, 20 bp, synthetic construct
  source 1..20: mol_type = other DNA
accaaaaatacaaaaaaatt

SEQ ID NO: 27428 - DNA, 20 bp, synthetic construct
  source 1..20: mol_type = other DNA
taccaaaaatacaaaaaaat

SEQ ID NO: 27429 - DNA, 20 bp, synthetic construct
  source 1..20: mol_type = other DNA
ctaccaaaaatacaaaaaaa

SEQ ID NO: 27430 - DNA, 20 bp, synthetic construct
  source 1..20: mol_type = other DNA
tctaccaaaaatacaaaaaa

SEQ ID NO: 27431 - DNA, 20 bp, synthetic construct
  source 1..20: mol_type = other DNA
ctctaccaaaaatacaaaaa

SEQ ID NO: 27432 - DNA, 20 bp, synthetic construct
  source 1..20: mol_type = other DNA
tctctaccaaaaatacaaaa

SEQ ID NO: 27433 - DNA, 20 bp, synthetic construct
  source 1..20: mol_type = other DNA
atctctaccaaaaatacaaa

SEQ ID NO: 27434 - DNA, 20 bp, synthetic construct
  source 1..20: mol_type = other DNA
catctctaccaaaaatacaa

SEQ ID NO: 27435 - DNA, 20 bp, synthetic construct
  source 1..20: mol_type = other DNA
tcatctctaccaaaaataca

SEQ ID NO: 27436 - DNA, 20 bp, synthetic construct
  source 1..20: mol_type = other DNA
ctcatctctaccaaaaatac

SEQ ID NO: 27437 - DNA, 20 bp, synthetic construct
  source 1..20: mol_type = other DNA
cctcatctctaccaaaaata

SEQ ID NO: 27438 - DNA, 20 bp, synthetic construct
  source 1..20: mol_type = other DNA
acctcatctctaccaaaaat

SEQ ID NO: 27439 - DNA, 20 bp, synthetic construct
  source 1..20: mol_type = other DNA
aacctcatctctaccaaaaa

SEQ ID NO: 27440 - DNA, 20 bp, synthetic construct
  source 1..20: mol_type = other DNA
aaacctcatctctaccaaaa

SEQ ID NO: 27441 - DNA, 20 bp, synthetic construct
  source 1..20: mol_type = other DNA
gaaacctcatctctaccaaa

SEQ ID NO: 27442 - DNA, 20 bp, synthetic construct
  source 1..20: mol_type = other DNA
tgaaacctcatctctaccaa

SEQ ID NO: 27443 - DNA, 20 bp, synthetic construct
  source 1..20: mol_type = other DNA
gtgaaacctcatctctacca

SEQ ID NO: 27444 - DNA, 20 bp, synthetic construct
  source 1..20: mol_type = other DNA
agtgaaacctcatctctacc

SEQ ID NO: 27445 - DNA, 20 bp, synthetic construct
  source 1..20: mol_type = other DNA
cagtgaaacctcatctctac

SEQ ID NO: 27446 - DNA, 20 bp, synthetic construct
  source 1..20: mol_type = other DNA
acagtgaaacctcatctcta

SEQ ID NO: 27447 - DNA, 20 bp, synthetic construct
  source 1..20: mol_type = other DNA
cacagtgaaacctcatctct

SEQ ID NO: 27448 - DNA, 20 bp, synthetic construct
  source 1..20: mol_type = other DNA
acacagtgaaacctcatctc

SEQ ID NO: 27449 - DNA, 20 bp, synthetic construct
  source 1..20: mol_type = other DNA
aacacagtgaaacctcatct

SEQ ID NO: 27450 - DNA, 20 bp, synthetic construct
  source 1..20: mol_type = other DNA
taacacagtgaaacctcatc

SEQ ID NO: 27451 - DNA, 20 bp, synthetic construct
  source 1..20: mol_type = other DNA
ctaacacagtgaaacctcat

SEQ ID NO: 27452 - DNA, 20 bp, synthetic construct
  source 1..20: mol_type = other DNA
gctaacacagtgaaacctca

SEQ ID NO: 27453 - DNA, 20 bp, synthetic construct
  source 1..20: mol_type = other DNA
ggctaacacagtgaaacctc

SEQ ID NO: 27454 - DNA, 20 bp, synthetic construct
  source 1..20: mol_type = other DNA
tggctaacacagtgaaacct

SEQ ID NO: 27455 - DNA, 20 bp, synthetic construct
  source 1..20: mol_type = other DNA
gtggctaacacagtgaaacc

SEQ ID NO: 27456 - DNA, 20 bp, synthetic construct
  source 1..20: mol_type = other DNA
tgtggctaacacagtgaaac

SEQ ID NO: 27457 - DNA, 20 bp, synthetic construct
  source 1..20: mol_type = other DNA
ctgtggctaacacagtgaaa

SEQ ID NO: 27458 - DNA, 20 bp, synthetic construct
  source 1..20: mol_type = other DNA
tctgtggctaacacagtgaa

SEQ ID NO: 27459 - DNA, 20 bp, synthetic construct
  source 1..20: mol_type = other DNA
atctgtggctaacacagtga

SEQ ID NO: 27460 - DNA, 20 bp, synthetic construct
  source 1..20: mol_type = other DNA
gatctgtggctaacacagtg

SEQ ID NO: 27461 - DNA, 20 bp, synthetic construct
  source 1..20: mol_type = other DNA
ggatctgtggctaacacagt

SEQ ID NO: 27462 - DNA, 20 bp, synthetic construct
  source 1..20: mol_type = other DNA
gggatctgtggctaacacag

SEQ ID NO: 27463 - DNA, 20 bp, synthetic construct
  source 1..20: mol_type = other DNA
cgggatctgtggctaacaca

SEQ ID NO: 27464 - DNA, 20 bp, synthetic construct
  source 1..20: mol_type = other DNA
tcgggatctgtggctaacac

SEQ ID NO: 27465 - DNA, 20 bp, synthetic construct
  source 1..20: mol_type = other DNA
gtcgggatctgtggctaaca

SEQ ID NO: 27466 - DNA, 20 bp, synthetic construct
  source 1..20: mol_type = other DNA
ggtcgggatctgtggctaac

SEQ ID NO: 27467 - DNA, 20 bp, synthetic construct
  source 1..20: mol_type = other DNA
aggtcgggatctgtggctaa

SEQ ID NO: 27468 - DNA, 20 bp, synthetic construct
  source 1..20: mol_type = other DNA
gaggtcgggatctgtggcta

SEQ ID NO: 27469 - DNA, 20 bp, synthetic construct
  source 1..20: mol_type = other DNA
tgaggtcgggatctgtggct

SEQ ID NO: 27470 - DNA, 20 bp, synthetic construct
  source 1..20: mol_type = other DNA
atgaggtcgggatctgtggc

SEQ ID NO: 27471 - DNA, 20 bp, synthetic construct
  source 1..20: mol_type = other DNA
catgaggtcgggatctgtgg

SEQ ID NO: 27472 - DNA, 20 bp, synthetic construct
  source 1..20: mol_type = other DNA
tcatgaggtcgggatctgtg

SEQ ID NO: 27473 - DNA, 20 bp, synthetic construct
  source 1..20: mol_type = other DNA
atcatgaggtcgggatctgt

SEQ ID NO: 27474 - DNA, 20 bp, synthetic construct
  source 1..20: mol_type = other DNA
gatcatgaggtcgggatctg

SEQ ID NO: 27475 - DNA, 20 bp, synthetic construct
  source 1..20: mol_type = other DNA
agatcatgaggtcgggatct

SEQ ID NO: 27476 - DNA, 20 bp, synthetic construct
  source 1..20: mol_type = other DNA
cagatcatgaggtcgggatc

SEQ ID NO: 27477 - DNA, 20 bp, synthetic construct
  source 1..20: mol_type = other DNA
acagatcatgaggtcgggat

SEQ ID NO: 27478 - DNA, 20 bp, synthetic construct
  source 1..20: mol_type = other DNA
gacagatcatgaggtcggga

SEQ ID NO: 27479 - DNA, 20 bp, synthetic construct
  source 1..20: mol_type = other DNA
agacagatcatgaggtcggg

SEQ ID NO: 27480 - DNA, 20 bp, synthetic construct
  source 1..20: mol_type = other DNA
cagacagatcatgaggtcgg

SEQ ID NO: 27481 - DNA, 20 bp, synthetic construct
  source 1..20: mol_type = other DNA
gcagacagatcatgaggtcg

SEQ ID NO: 27482 - DNA, 20 bp, synthetic construct
  source 1..20: mol_type = other DNA
ggcagacagatcatgaggtc

SEQ ID NO: 27483 - DNA, 20 bp, synthetic construct
  source 1..20: mol_type = other DNA
aggcagacagatcatgaggt

SEQ ID NO: 27484 - DNA, 20 bp, synthetic construct
  source 1..20: mol_type = other DNA
gaggcagacagatcatgagg

SEQ ID NO: 27485 - DNA, 20 bp, synthetic construct
  source 1..20: mol_type = other DNA
tgaggcagacagatcatgag

SEQ ID NO: 27486 - DNA, 20 bp, synthetic construct
  source 1..20: mol_type = other DNA
ctgaggcagacagatcatga

SEQ ID NO: 27487 - DNA, 20 bp, synthetic construct
  source 1..20: mol_type = other DNA
gctgaggcagacagatcatg

SEQ ID NO: 27488 - DNA, 20 bp, synthetic construct
  source 1..20: mol_type = other DNA
ggctgaggcagacagatcat

SEQ ID NO: 27489 - DNA, 20 bp, synthetic construct
  source 1..20: mol_type = other DNA
aggctgaggcagacagatca

SEQ ID NO: 27490 - DNA, 20 bp, synthetic construct
  source 1..20: mol_type = other DNA
gaggctgaggcagacagatc

SEQ ID NO: 27491 - DNA, 20 bp, synthetic construct
  source 1..20: mol_type = other DNA
ggaggctgaggcagacagat

SEQ ID NO: 27492 - DNA, 20 bp, synthetic construct
  source 1..20: mol_type = other DNA
gggaggctgaggcagacaga

SEQ ID NO: 27493 - DNA, 20 bp, synthetic construct
  source 1..20: mol_type = other DNA
tgggaggctgaggcagacag

SEQ ID NO: 27494 - DNA, 20 bp, synthetic construct
  source 1..20: mol_type = other DNA
ttgggaggctgaggcagaca

SEQ ID NO: 27495 - DNA, 20 bp, synthetic construct
  source 1..20: mol_type = other DNA
tttgggaggctgaggcagac

SEQ ID NO: 27496 - DNA, 20 bp, synthetic construct
  source 1..20: mol_type = other DNA
ctttgggaggctgaggcaga

SEQ ID NO: 27497 - DNA, 20 bp, synthetic construct
  source 1..20: mol_type = other DNA
actttgggaggctgaggcag

SEQ ID NO: 27498 - DNA, 20 bp, synthetic construct
  source 1..20: mol_type = other DNA
cactttgggaggctgaggca

SEQ ID NO: 27499 - DNA, 20 bp, synthetic construct
  source 1..20: mol_type = other DNA
gcactttgggaggctgaggc

SEQ ID NO: 27500 - DNA, 20 bp, synthetic construct
  source 1..20: mol_type = other DNA
agcactttgggaggctgagg

SEQ ID NO: 27501 - DNA, 20 bp, synthetic construct
  source 1..20: mol_type = other DNA
cagcactttgggaggctgag

SEQ ID NO: 27502 - DNA, 20 bp, synthetic construct
  source 1..20: mol_type = other DNA
ccagcactttgggaggctga

SEQ ID NO: 27503 - DNA, 20 bp, synthetic construct
  source 1..20: mol_type = other DNA
cccagcactttgggaggctg

SEQ ID NO: 27504 - DNA, 20 bp, synthetic construct
  source 1..20: mol_type = other DNA
tcccagcactttgggaggct

SEQ ID NO: 27505 - DNA, 20 bp, synthetic construct
  source 1..20: mol_type = other DNA
atcccagcactttgggaggc

SEQ ID NO: 27506 - DNA, 20 bp, synthetic construct
  source 1..20: mol_type = other DNA
aatcccagcactttgggagg

SEQ ID NO: 27507 - DNA, 20 bp, synthetic construct
  source 1..20: mol_type = other DNA
caatcccagcactttgggag

SEQ ID NO: 27508 - DNA, 20 bp, synthetic construct
  source 1..20: mol_type = other DNA
gcaatcccagcactttggga

SEQ ID NO: 27509 - DNA, 20 bp, synthetic construct
  source 1..20: mol_type = other DNA
tgcaatcccagcactttggg

SEQ ID NO: 27510 - DNA, 20 bp, synthetic construct
  source 1..20: mol_type = other DNA
ctgcaatcccagcactttgg

SEQ ID NO: 27511 - DNA, 20 bp, synthetic construct
  source 1..20: mol_type = other DNA
cctgcaatcccagcactttg

SEQ ID NO: 27512 - DNA, 20 bp, synthetic construct
  source 1..20: mol_type = other DNA
gcctgcaatcccagcacttt

SEQ ID NO: 27513 - DNA, 20 bp, synthetic construct
  source 1..20: mol_type = other DNA
agcctgcaatcccagcactt

SEQ ID NO: 27514 - DNA, 20 bp, synthetic construct
  source 1..20: mol_type = other DNA
aagcctgcaatcccagcact

SEQ ID NO: 27515 - DNA, 20 bp, synthetic construct
  source 1..20: mol_type = other DNA
caagcctgcaatcccagcac

SEQ ID NO: 27516 - DNA, 20 bp, synthetic construct
  source 1..20: mol_type = other DNA
tcaagcctgcaatcccagca

SEQ ID NO: 27517 - DNA, 20 bp, synthetic construct
  source 1..20: mol_type = other DNA
ttcaagcctgcaatcccagc

SEQ ID NO: 27518 - DNA, 20 bp, synthetic construct
  source 1..20: mol_type = other DNA
attcaagcctgcaatcccag

SEQ ID NO: 27519 - DNA, 20 bp, synthetic construct
  source 1..20: mol_type = other DNA
gattcaagcctgcaatccca

SEQ ID NO: 27520 - DNA, 20 bp, synthetic construct
  source 1..20: mol_type = other DNA
tgattcaagcctgcaatccc

SEQ ID NO: 27521 - DNA, 20 bp, synthetic construct
  source 1..20: mol_type = other DNA
gtgattcaagcctgcaatcc

SEQ ID NO: 27522 - DNA, 20 bp, synthetic construct
  source 1..20: mol_type = other DNA
ggtgattcaagcctgcaatc

SEQ ID NO: 27523 - DNA, 20 bp, synthetic construct
  source 1..20: mol_type = other DNA
cggtgattcaagcctgcaat

SEQ ID NO: 27524 - DNA, 20 bp, synthetic construct
  source 1..20: mol_type = other DNA
gcggtgattcaagcctgcaa

SEQ ID NO: 27525 - DNA, 20 bp, synthetic construct
  source 1..20: mol_type = other DNA
tgcggtgattcaagcctgca

SEQ ID NO: 27526 - DNA, 20 bp, synthetic construct
  source 1..20: mol_type = other DNA
gtgcggtgattcaagcctgc

SEQ ID NO: 27527 - DNA, 20 bp, synthetic construct
  source 1..20: mol_type = other DNA
ggtgcggtgattcaagcctg

SEQ ID NO: 27528 - DNA, 20 bp, synthetic construct
  source 1..20: mol_type = other DNA
gggtgcggtgattcaagcct

SEQ ID NO: 27529 - DNA, 20 bp, synthetic construct
  source 1..20: mol_type = other DNA
cgggtgcggtgattcaagcc

SEQ ID NO: 27530 - DNA, 20 bp, synthetic construct
  source 1..20: mol_type = other DNA
ccgggtgcggtgattcaagc

SEQ ID NO: 27531 - DNA, 20 bp, synthetic construct
  source 1..20: mol_type = other DNA
gccgggtgcggtgattcaag

SEQ ID NO: 27532 - DNA, 20 bp, synthetic construct
  source 1..20: mol_type = other DNA
ggccgggtgcggtgattcaa

SEQ ID NO: 27533 - DNA, 20 bp, synthetic construct
  source 1..20: mol_type = other DNA
cggccgggtgcggtgattca

SEQ ID NO: 27534 - DNA, 20 bp, synthetic construct
  source 1..20: mol_type = other DNA
ccggccgggtgcggtgattc

SEQ ID NO: 27535 - DNA, 20 bp, synthetic construct
  source 1..20: mol_type = other DNA
tccggccgggtgcggtgatt

SEQ ID NO: 27536 - DNA, 20 bp, synthetic construct
  source 1..20: mol_type = other DNA
ttccggccgggtgcggtgat

SEQ ID NO: 27537 - DNA, 20 bp, synthetic construct
  source 1..20: mol_type = other DNA
cttccggccgggtgcggtga

SEQ ID NO: 27538 - DNA, 20 bp, synthetic construct
  source 1..20: mol_type = other DNA
acttccggccgggtgcggtg

SEQ ID NO: 27539 - DNA, 20 bp, synthetic construct
  source 1..20: mol_type = other DNA
gacttccggccgggtgcggt

SEQ ID NO: 27540 - DNA, 20 bp, synthetic construct
  source 1..20: mol_type = other DNA
agacttccggccgggtgcgg

SEQ ID NO: 27541 - DNA, 20 bp, synthetic construct
  source 1..20: mol_type = other DNA
gagacttccggccgggtgcg

SEQ ID NO: 27542 - DNA, 20 bp, synthetic construct
  source 1..20: mol_type = other DNA
ggagacttccggccgggtgc

SEQ ID NO: 27543 - DNA, 20 bp, synthetic construct
  source 1..20: mol_type = other DNA
tggagacttccggccgggtg

SEQ ID NO: 27544 - DNA, 20 bp, synthetic construct
  source 1..20: mol_type = other DNA
atggagacttccggccgggt

SEQ ID NO: 27545 - DNA, 20 bp, synthetic construct
  source 1..20: mol_type = other DNA
tatggagacttccggccggg

SEQ ID NO: 27546 - DNA, 20 bp, synthetic construct
  source 1..20: mol_type = other DNA
gtatggagacttccggccgg

SEQ ID NO: 27547 - DNA, 20 bp, synthetic construct
  source 1..20: mol_type = other DNA
agtatggagacttccggccg

SEQ ID NO: 27548 - DNA, 20 bp, synthetic construct
  source 1..20: mol_type = other DNA
aagtatggagacttccggcc

SEQ ID NO: 27549 - DNA, 20 bp, synthetic construct
  source 1..20: mol_type = other DNA
aaagtatggagacttccggc

SEQ ID NO: 27550 - DNA, 20 bp, synthetic construct
  source 1..20: mol_type = other DNA
aaaagtatggagacttccgg

SEQ ID NO: 27551 - DNA, 20 bp, synthetic construct
  source 1..20: mol_type = other DNA
aaaaagtatggagacttccg

SEQ ID NO: 27552 - DNA, 20 bp, synthetic construct
  source 1..20: mol_type = other DNA
taaaaagtatggagacttcc

SEQ ID NO: 27553 - DNA, 20 bp, synthetic construct
  source 1..20: mol_type = other DNA
ttaaaaagtatggagacttc

SEQ ID NO: 27554 - DNA, 20 bp, synthetic construct
  source 1..20: mol_type = other DNA
gttaaaaagtatggagactt

SEQ ID NO: 27555 - DNA, 20 bp, synthetic construct
  source 1..20: mol_type = other DNA
ggttaaaaagtatggagact

SEQ ID NO: 27556 - DNA, 20 bp, synthetic construct
  source 1..20: mol_type = other DNA
gggttaaaaagtatggagac

SEQ ID NO: 27557 - DNA, 20 bp, synthetic construct
  source 1..20: mol_type = other DNA
tgggttaaaaagtatggaga

SEQ ID NO: 27558 - DNA, 20 bp, synthetic construct
  source 1..20: mol_type = other DNA
ttgggttaaaaagtatggag

SEQ ID NO: 27559 - DNA, 20 bp, synthetic construct
  source 1..20: mol_type = other DNA
attgggttaaaaagtatgga

SEQ ID NO: 27560 - DNA, 20 bp, synthetic construct
  source 1..20: mol_type = other DNA
gattgggttaaaaagtatgg

SEQ ID NO: 27561 - DNA, 20 bp, synthetic construct
  source 1..20: mol_type = other DNA
agattgggttaaaaagtatg

SEQ ID NO: 27562 - DNA, 20 bp, synthetic construct
  source 1..20: mol_type = other DNA
tagattgggttaaaaagtat

SEQ ID NO: 27563 - DNA, 20 bp, synthetic construct
  source 1..20: mol_type = other DNA
ttagattgggttaaaaagta

SEQ ID NO: 27564 - DNA, 20 bp, synthetic construct
  source 1..20: mol_type = other DNA
tttagattgggttaaaaagt

SEQ ID NO: 27565 - DNA, 20 bp, synthetic construct
  source 1..20: mol_type = other DNA
ttttagattgggttaaaaag

SEQ ID NO: 27566 - DNA, 20 bp, synthetic construct
  source 1..20: mol_type = other DNA
attttagattgggttaaaaa

SEQ ID NO: 27567 - DNA, 20 bp, synthetic construct
  source 1..20: mol_type = other DNA
cattttagattgggttaaaa

SEQ ID NO: 27568 - DNA, 20 bp, synthetic construct
  source 1..20: mol_type = other DNA
ccattttagattgggttaaa

SEQ ID NO: 27569 - DNA, 20 bp, synthetic construct
  source 1..20: mol_type = other DNA
accattttagattgggttaa

SEQ ID NO: 27570 - DNA, 20 bp, synthetic construct
  source 1..20: mol_type = other DNA
taccattttagattgggtta

SEQ ID NO: 27571 - DNA, 20 bp, synthetic construct
  source 1..20: mol_type = other DNA
ttaccattttagattgggtt

SEQ ID NO: 27572 - DNA, 20 bp, synthetic construct
  source 1..20: mol_type = other DNA
cttaccattttagattgggt

SEQ ID NO: 27573 - DNA, 20 bp, synthetic construct
  source 1..20: mol_type = other DNA
ccttaccattttagattggg

SEQ ID NO: 27574 - DNA, 20 bp, synthetic construct
  source 1..20: mol_type = other DNA
tccttaccattttagattgg

SEQ ID NO: 27575 - DNA, 20 bp, synthetic construct
  source 1..20: mol_type = other DNA
ttccttaccattttagattg

SEQ ID NO: 27576 - DNA, 20 bp, synthetic construct
  source 1..20: mol_type = other DNA
tttccttaccattttagatt

SEQ ID NO: 27577 - DNA, 20 bp, synthetic construct
  source 1..20: mol_type = other DNA
atttccttaccattttagat

SEQ ID NO: 27578 - DNA, 20 bp, synthetic construct
  source 1..20: mol_type = other DNA
tatttccttaccattttaga

SEQ ID NO: 27579 - DNA, 20 bp, synthetic construct
  source 1..20: mol_type = other DNA
atatttccttaccattttag

SEQ ID NO: 27580 - DNA, 20 bp, synthetic construct
  source 1..20: mol_type = other DNA
tatatttccttaccatttta

SEQ ID NO: 27581 - DNA, 20 bp, synthetic construct
  source 1..20: mol_type = other DNA
atatatttccttaccatttt

SEQ ID NO: 27582 - DNA, 20 bp, synthetic construct
  source 1..20: mol_type = other DNA
tatatatttccttaccattt

SEQ ID NO: 27583 - DNA, 20 bp, synthetic construct
  source 1..20: mol_type = other DNA
ttatatatttccttaccatt

SEQ ID NO: 27584 - DNA, 20 bp, synthetic construct
  source 1..20: mol_type = other DNA
cttatatatttccttaccat

SEQ ID NO: 27585 - DNA, 20 bp, synthetic construct
  source 1..20: mol_type = other DNA
tcttatatatttccttacca

SEQ ID NO: 27586 - DNA, 20 bp, synthetic construct
  source 1..20: mol_type = other DNA
ttcttatatatttccttacc

SEQ ID NO: 27587 - DNA, 20 bp, synthetic construct
  source 1..20: mol_type = other DNA
attcttatatatttccttac

SEQ ID NO: 27588 - DNA, 20 bp, synthetic construct
  source 1..20: mol_type = other DNA
cattcttatatatttcctta

SEQ ID NO: 27589 - DNA, 20 bp, synthetic construct
  source 1..20: mol_type = other DNA
acattcttatatatttcctt

SEQ ID NO: 27590 - DNA, 20 bp, synthetic construct
  source 1..20: mol_type = other DNA
gacattcttatatatttcct

SEQ ID NO: 27591 - DNA, 20 bp, synthetic construct
  source 1..20: mol_type = other DNA
agacattcttatatatttcc

SEQ ID NO: 27592 - DNA, 20 bp, synthetic construct
  source 1..20: mol_type = other DNA
tagacattcttatatatttc

SEQ ID NO: 27593 - DNA, 20 bp, synthetic construct
  source 1..20: mol_type = other DNA
atagacattcttatatattt

SEQ ID NO: 27594 - DNA, 20 bp, synthetic construct
  source 1..20: mol_type = other DNA
aatagacattcttatatatt

SEQ ID NO: 27595 - DNA, 20 bp, synthetic construct
  source 1..20: mol_type = other DNA
aaatagacattcttatatat

SEQ ID NO: 27596 - DNA, 20 bp, synthetic construct
  source 1..20: mol_type = other DNA
taaatagacattcttatata

SEQ ID NO: 27597 - DNA, 20 bp, synthetic construct
  source 1..20: mol_type = other DNA
ataaatagacattcttatat

SEQ ID NO: 27598 - DNA, 20 bp, synthetic construct
  source 1..20: mol_type = other DNA
aataaatagacattcttata

SEQ ID NO: 27599 - DNA, 20 bp, synthetic construct
  source 1..20: mol_type = other DNA
taataaatagacattcttat

SEQ ID NO: 27600 - DNA, 20 bp, synthetic construct
  source 1..20: mol_type = other DNA
ataataaatagacattctta

SEQ ID NO: 27601 - DNA, 20 bp, synthetic construct
  source 1..20: mol_type = other DNA
aataataaatagacattctt

SEQ ID NO: 27602 - DNA, 20 bp, synthetic construct
  source 1..20: mol_type = other DNA
taataataaatagacattct

SEQ ID NO: 27603 - DNA, 20 bp, synthetic construct
  source 1..20: mol_type = other DNA
ttaataataaatagacattc

SEQ ID NO: 27604 - DNA, 20 bp, synthetic construct
  source 1..20: mol_type = other DNA
tttaataataaatagacatt

SEQ ID NO: 27605 - DNA, 20 bp, synthetic construct
  source 1..20: mol_type = other DNA
atttaataataaatagacat

SEQ ID NO: 27606 - DNA, 20 bp, synthetic construct
  source 1..20: mol_type = other DNA
aatttaataataaatagaca

SEQ ID NO: 27607 - DNA, 20 bp, synthetic construct
  source 1..20: mol_type = other DNA
aaatttaataataaatagac

SEQ ID NO: 27608 - DNA, 20 bp, synthetic construct
  source 1..20: mol_type = other DNA
aaaatttaataataaataga

SEQ ID NO: 27609 - DNA, 20 bp, synthetic construct
  source 1..20: mol_type = other DNA
aaaaatttaataataaatag

SEQ ID NO: 27610 - DNA, 20 bp, synthetic construct
  source 1..20: mol_type = other DNA
aaaaaatttaataataaata

SEQ ID NO: 27611 - DNA, 20 bp, synthetic construct
  source 1..20: mol_type = other DNA
gaaaaaatttaataataaat

SEQ ID NO: 27612 - DNA, 20 bp, synthetic construct
  source 1..20: mol_type = other DNA
agaaaaaatttaataataaa

SEQ ID NO: 27613 - DNA, 20 bp, synthetic construct
  source 1..20: mol_type = other DNA
tagaaaaaatttaataataa

SEQ ID NO: 27614 - DNA, 20 bp, synthetic construct
  source 1..20: mol_type = other DNA
atagaaaaaatttaataata

SEQ ID NO: 27615 - DNA, 20 bp, synthetic construct
  source 1..20: mol_type = other DNA
tatagaaaaaatttaataat

SEQ ID NO: 27616 - DNA, 20 bp, synthetic construct
  source 1..20: mol_type = other DNA
atatagaaaaaatttaataa

SEQ ID NO: 27617 - DNA, 20 bp, synthetic construct
  source 1..20: mol_type = other DNA
tatatagaaaaaatttaata

SEQ ID NO: 27618 - DNA, 20 bp, synthetic construct
  source 1..20: mol_type = other DNA
ttatatagaaaaaatttaat

SEQ ID NO: 27619 - DNA, 20 bp, synthetic construct
  source 1..20: mol_type = other DNA
tttatatagaaaaaatttaa

SEQ ID NO: 27620 - DNA, 20 bp, synthetic construct
  source 1..20: mol_type = other DNA
ttttatatagaaaaaattta

SEQ ID NO: 27621 - DNA, 20 bp, synthetic construct
  source 1..20: mol_type = other DNA
gttttatatagaaaaaattt

SEQ ID NO: 27622 - DNA, 20 bp, synthetic construct
  source 1..20: mol_type = other DNA
tgttttatatagaaaaaatt

SEQ ID NO: 27623 - DNA, 20 bp, synthetic construct
  source 1..20: mol_type = other DNA
atgttttatatagaaaaaat

SEQ ID NO: 27624 - DNA, 20 bp, synthetic construct
  source 1..20: mol_type = other DNA
aatgttttatatagaaaaaa

SEQ ID NO: 27625 - DNA, 20 bp, synthetic construct
  source 1..20: mol_type = other DNA
aaatgttttatatagaaaaa

SEQ ID NO: 27626 - DNA, 20 bp, synthetic construct
  source 1..20: mol_type = other DNA
gaaatgttttatatagaaaa

SEQ ID NO: 27627 - DNA, 20 bp, synthetic construct
  source 1..20: mol_type = other DNA
tgaaatgttttatatagaaa

SEQ ID NO: 27628 - DNA, 20 bp, synthetic construct
  source 1..20: mol_type = other DNA
ctgaaatgttttatatagaa

SEQ ID NO: 27629 - DNA, 20 bp, synthetic construct
  source 1..20: mol_type = other DNA
tctgaaatgttttatataga

SEQ ID NO: 27630 - DNA, 20 bp, synthetic construct
  source 1..20: mol_type = other DNA
ttctgaaatgttttatatag

SEQ ID NO: 27631 - DNA, 20 bp, synthetic construct
  source 1..20: mol_type = other DNA
tttctgaaatgttttatata

SEQ ID NO: 27632 - DNA, 20 bp, synthetic construct
  source 1..20: mol_type = other DNA
ttttctgaaatgttttatat

SEQ ID NO: 27633 - DNA, 20 bp, synthetic construct
  source 1..20: mol_type = other DNA
attttctgaaatgttttata

SEQ ID NO: 27634 - DNA, 20 bp, synthetic construct
  source 1..20: mol_type = other DNA
tattttctgaaatgttttat

SEQ ID NO: 27635 - DNA, 20 bp, synthetic construct
  source 1..20: mol_type = other DNA
ttattttctgaaatgtttta

SEQ ID NO: 27636 - DNA, 20 bp, synthetic construct
  source 1..20: mol_type = other DNA
tttattttctgaaatgtttt

SEQ ID NO: 27637 - DNA, 20 bp, synthetic construct
  source 1..20: mol_type = other DNA
ctttattttctgaaatgttt

SEQ ID NO: 27638 - DNA, 20 bp, synthetic construct
  source 1..20: mol_type = other DNA
tctttattttctgaaatgtt

SEQ ID NO: 27639 - DNA, 20 bp, synthetic construct
  source 1..20: mol_type = other DNA
gtctttattttctgaaatgt

SEQ ID NO: 27640 - DNA, 20 bp, synthetic construct
  source 1..20: mol_type = other DNA
agtctttattttctgaaatg

SEQ ID NO: 27641 - DNA, 20 bp, synthetic construct
  source 1..20: mol_type = other DNA
tagtctttattttctgaaat

SEQ ID NO: 27642 - DNA, 20 bp, synthetic construct
  source 1..20: mol_type = other DNA
ctagtctttattttctgaaa

SEQ ID NO: 27643 - DNA, 20 bp, synthetic construct
  source 1..20: mol_type = other DNA
gctagtctttattttctgaa

SEQ ID NO: 27644 - DNA, 20 bp, synthetic construct
  source 1..20: mol_type = other DNA
tgctagtctttattttctga

SEQ ID NO: 27645 - DNA, 20 bp, synthetic construct
  source 1..20: mol_type = other DNA
atgctagtctttattttctg

SEQ ID NO: 27646 - DNA, 20 bp, synthetic construct
  source 1..20: mol_type = other DNA
aatgctagtctttattttct

SEQ ID NO: 27647 - DNA, 20 bp, synthetic construct
  source 1..20: mol_type = other DNA
aaatgctagtctttattttc

SEQ ID NO: 27648 - DNA, 20 bp, synthetic construct
  source 1..20: mol_type = other DNA
gaaatgctagtctttatttt

SEQ ID NO: 27649 - DNA, 20 bp, synthetic construct
  source 1..20: mol_type = other DNA
agaaatgctagtctttattt

SEQ ID NO: 27650 - DNA, 20 bp, synthetic construct
  source 1..20: mol_type = other DNA
cagaaatgctagtctttatt

SEQ ID NO: 27651 - DNA, 20 bp, synthetic construct
  source 1..20: mol_type = other DNA
tcagaaatgctagtctttat

SEQ ID NO: 27652 - DNA, 20 bp, synthetic construct
  source 1..20: mol_type = other DNA
ctcagaaatgctagtcttta

SEQ ID NO: 27653 - DNA, 20 bp, synthetic construct
  source 1..20: mol_type = other DNA
gctcagaaatgctagtcttt

SEQ ID NO: 27654 - DNA, 20 bp, synthetic construct
  source 1..20: mol_type = other DNA
ggctcagaaatgctagtctt

SEQ ID NO: 27655 - DNA, 20 bp, synthetic construct
  source 1..20: mol_type = other DNA
tggctcagaaatgctagtct

SEQ ID NO: 27656 - DNA, 20 bp, synthetic construct
  source 1..20: mol_type = other DNA
ttggctcagaaatgctagtc

SEQ ID NO: 27657 - DNA, 20 bp, synthetic construct
  source 1..20: mol_type = other DNA
cttggctcagaaatgctagt

SEQ ID NO: 27658 - DNA, 20 bp, synthetic construct
  source 1..20: mol_type = other DNA
acttggctcagaaatgctag

SEQ ID NO: 27659 - DNA, 20 bp, synthetic construct
  source 1..20: mol_type = other DNA
cacttggctcagaaatgcta

SEQ ID NO: 27660 - DNA, 20 bp, synthetic construct
  source 1..20: mol_type = other DNA
ccacttggctcagaaatgct

SEQ ID NO: 27661 - DNA, 20 bp, synthetic construct
  source 1..20: mol_type = other DNA
accacttggctcagaaatgc

SEQ ID NO: 27662 - DNA, 20 bp, synthetic construct
  source 1..20: mol_type = other DNA
taccacttggctcagaaatg

SEQ ID NO: 27663 - DNA, 20 bp, synthetic construct
  source 1..20: mol_type = other DNA
ctaccacttggctcagaaat

SEQ ID NO: 27664 - DNA, 20 bp, synthetic construct
  source 1..20: mol_type = other DNA
actaccacttggctcagaaa

SEQ ID NO: 27665 - DNA, 20 bp, synthetic construct
  source 1..20: mol_type = other DNA
tactaccacttggctcagaa

SEQ ID NO: 27666 - DNA, 20 bp, synthetic construct
  source 1..20: mol_type = other DNA
ctactaccacttggctcaga

SEQ ID NO: 27667 - DNA, 20 bp, synthetic construct
  source 1..20: mol_type = other DNA
actactaccacttggctcag

SEQ ID NO: 27668 - DNA, 20 bp, synthetic construct
  source 1..20: mol_type = other DNA
cactactaccacttggctca

SEQ ID NO: 27669 - DNA, 20 bp, synthetic construct
  source 1..20: mol_type = other DNA
ccactactaccacttggctc

SEQ ID NO: 27670 - DNA, 20 bp, synthetic construct
  source 1..20: mol_type = other DNA
gccactactaccacttggct

SEQ ID NO: 27671 - DNA, 20 bp, synthetic construct
  source 1..20: mol_type = other DNA
ggccactactaccacttggc

SEQ ID NO: 27672 - DNA, 20 bp, synthetic construct
  source 1..20: mol_type = other DNA
tggccactactaccacttgg

SEQ ID NO: 27673 - DNA, 20 bp, synthetic construct
  source 1..20: mol_type = other DNA
atggccactactaccacttg

SEQ ID NO: 27674 - DNA, 20 bp, synthetic construct
  source 1..20: mol_type = other DNA
aatggccactactaccactt

SEQ ID NO: 27675 - DNA, 20 bp, synthetic construct
  source 1..20: mol_type = other DNA
aaatggccactactaccact

SEQ ID NO: 27676 - DNA, 20 bp, synthetic construct
  source 1..20: mol_type = other DNA
aaaatggccactactaccac

SEQ ID NO: 27677 - DNA, 20 bp, synthetic construct
  source 1..20: mol_type = other DNA
aaaaatggccactactacca

SEQ ID NO: 27678 - DNA, 20 bp, synthetic construct
  source 1..20: mol_type = other DNA
aaaaaatggccactactacc

SEQ ID NO: 27679 - DNA, 20 bp, synthetic construct
  source 1..20: mol_type = other DNA
gaaaaaatggccactactac

SEQ ID NO: 27680 - DNA, 20 bp, synthetic construct
  source 1..20: mol_type = other DNA
agaaaaaatggccactacta

SEQ ID NO: 27681 - DNA, 20 bp, synthetic construct
  source 1..20: mol_type = other DNA
cagaaaaaatggccactact

SEQ ID NO: 27682 - DNA, 20 bp, synthetic construct
  source 1..20: mol_type = other DNA
ccagaaaaaatggccactac

SEQ ID NO: 27683 - DNA, 20 bp, synthetic construct
  source 1..20: mol_type = other DNA
tccagaaaaaatggccacta

SEQ ID NO: 27684 - DNA, 20 bp, synthetic construct
  source 1..20: mol_type = other DNA
ttccagaaaaaatggccact

SEQ ID NO: 27685 - DNA, 20 bp, synthetic construct
  source 1..20: mol_type = other DNA
tttccagaaaaaatggccac

SEQ ID NO: 27686 - DNA, 20 bp, synthetic construct
  source 1..20: mol_type = other DNA
ttttccagaaaaaatggcca

SEQ ID NO: 27687 - DNA, 20 bp, synthetic construct
  source 1..20: mol_type = other DNA
tttttccagaaaaaatggcc

SEQ ID NO: 27688 - DNA, 20 bp, synthetic construct
  source 1..20: mol_type = other DNA
ttttttccagaaaaaatggc

SEQ ID NO: 27689 - DNA, 20 bp, synthetic construct
  source 1..20: mol_type = other DNA
tttttttccagaaaaaatgg

SEQ ID NO: 27690 - DNA, 20 bp, synthetic construct
  source 1..20: mol_type = other DNA
ttttttttccagaaaaaatg

SEQ ID NO: 27691 - DNA, 20 bp, synthetic construct
  source 1..20: mol_type = other DNA
tttttttttccagaaaaaat

SEQ ID NO: 27692 - DNA, 20 bp, synthetic construct
  source 1..20: mol_type = other DNA
ttttttttttccagaaaaaa

SEQ ID NO: 27693 - DNA, 20 bp, synthetic construct
  source 1..20: mol_type = other DNA
tttttttttttccagaaaaa

SEQ ID NO: 27694 - DNA, 20 bp, synthetic construct
  source 1..20: mol_type = other DNA
ttttttttttttccagaaaa

SEQ ID NO: 27695 - DNA, 20 bp, synthetic construct
  source 1..20: mol_type = other DNA
tttttttttttttccagaaa

SEQ ID NO: 27696 - DNA, 20 bp, synthetic construct
  source 1..20: mol_type = other DNA
ttttttttttttttccagaa

SEQ ID NO: 27697 - DNA, 20 bp, synthetic construct
  source 1..20: mol_type = other DNA
tttttttttttttttccaga

SEQ ID NO: 27698 - DNA, 20 bp, synthetic construct
  source 1..20: mol_type = other DNA
ctttttttttttttttccag

SEQ ID NO: 27699 - DNA, 20 bp, synthetic construct
  source 1..20: mol_type = other DNA
tctttttttttttttttcca

SEQ ID NO: 27700 - DNA, 20 bp, synthetic construct
  source 1..20: mol_type = other DNA
ttctttttttttttttttcc

SEQ ID NO: 27701 - DNA, 20 bp, synthetic construct
  source 1..20: mol_type = other DNA
tttctttttttttttttttc

SEQ ID NO: 27702 - DNA, 20 bp, synthetic construct
  source 1..20: mol_type = other DNA
ctttcttttttttttttttt

SEQ ID NO: 27703 - DNA, 20 bp, synthetic construct
  source 1..20: mol_type = other DNA
tctttctttttttttttttt

SEQ ID NO: 27704 - DNA, 20 bp, synthetic construct
  source 1..20: mol_type = other DNA
ttctttcttttttttttttt

SEQ ID NO: 27705 - DNA, 20 bp, synthetic construct
  source 1..20: mol_type = other DNA
tttctttctttttttttttt

SEQ ID NO: 27706 - DNA, 20 bp, synthetic construct
  source 1..20: mol_type = other DNA
ttttctttcttttttttttt

SEQ ID NO: 27707 - DNA, 20 bp, synthetic construct
  source 1..20: mol_type = other DNA
tttttctttctttttttttt

SEQ ID NO: 27708 - DNA, 20 bp, synthetic construct
  source 1..20: mol_type = other DNA
ttttttctttcttttttttt

SEQ ID NO: 27709 - DNA, 20 bp, synthetic construct
  source 1..20: mol_type = other DNA
gttttttctttctttttttt

SEQ ID NO: 27710 - DNA, 20 bp, synthetic construct
  source 1..20: mol_type = other DNA
tgttttttctttcttttttt

SEQ ID NO: 27711 - DNA, 20 bp, synthetic construct
  source 1..20: mol_type = other DNA
gtgttttttctttctttttt

SEQ ID NO: 27712 - DNA, 20 bp, synthetic construct
  source 1..20: mol_type = other DNA
tgtgttttttctttcttttt

SEQ ID NO: 27713 - DNA, 20 bp, synthetic construct
  source 1..20: mol_type = other DNA
atgtgttttttctttctttt

SEQ ID NO: 27714 - DNA, 20 bp, synthetic construct
  source 1..20: mol_type = other DNA
aatgtgttttttctttcttt

SEQ ID NO: 27715 - DNA, 20 bp, synthetic construct
  source 1..20: mol_type = other DNA
aaatgtgttttttctttctt

SEQ ID NO: 27716 - DNA, 20 bp, synthetic construct
  source 1..20: mol_type = other DNA
taaatgtgttttttctttct

SEQ ID NO: 27717 - DNA, 20 bp, synthetic construct
  source 1..20: mol_type = other DNA
ctaaatgtgttttttctttc

SEQ ID NO: 27718 - DNA, 20 bp, synthetic construct
  source 1..20: mol_type = other DNA
gctaaatgtgttttttcttt

SEQ ID NO: 27719 - DNA, 20 bp, synthetic construct
  source 1..20: mol_type = other DNA
agctaaatgtgttttttctt

SEQ ID NO: 27720 - DNA, 20 bp, synthetic construct
  source 1..20: mol_type = other DNA
tagctaaatgtgttttttct

SEQ ID NO: 27721 - DNA, 20 bp, synthetic construct
  source 1..20: mol_type = other DNA
atagctaaatgtgttttttc

SEQ ID NO: 27722 - DNA, 20 bp, synthetic construct
  source 1..20: mol_type = other DNA
gatagctaaatgtgtttttt

SEQ ID NO: 27723 - DNA, 20 bp, synthetic construct
  source 1..20: mol_type = other DNA
agatagctaaatgtgttttt

SEQ ID NO: 27724 - DNA, 20 bp, synthetic construct
  source 1..20: mol_type = other DNA
tagatagctaaatgtgtttt

SEQ ID NO: 27725 - DNA, 20 bp, synthetic construct
  source 1..20: mol_type = other DNA
atagatagctaaatgtgttt

SEQ ID NO: 27726 - DNA, 20 bp, synthetic construct
  source 1..20: mol_type = other DNA
catagatagctaaatgtgtt

SEQ ID NO: 27727 - DNA, 20 bp, synthetic construct
  source 1..20: mol_type = other DNA
tcatagatagctaaatgtgt

SEQ ID NO: 27728 - DNA, 20 bp, synthetic construct
  source 1..20: mol_type = other DNA
atcatagatagctaaatgtg

SEQ ID NO: 27729 - DNA, 20 bp, synthetic construct
  source 1..20: mol_type = other DNA
catcatagatagctaaatgt

SEQ ID NO: 27730 - DNA, 20 bp, synthetic construct
  source 1..20: mol_type = other DNA
acatcatagatagctaaatg

SEQ ID NO: 27731 - DNA, 20 bp, synthetic construct
  source 1..20: mol_type = other DNA
cacatcatagatagctaaat

SEQ ID NO: 27732 - DNA, 20 bp, synthetic construct
  source 1..20: mol_type = other DNA
tcacatcatagatagctaaa

SEQ ID NO: 27733 - DNA, 20 bp, synthetic construct
  source 1..20: mol_type = other DNA
ttcacatcatagatagctaa

SEQ ID NO: 27734 - DNA, 20 bp, synthetic construct
  source 1..20: mol_type = other DNA
tttcacatcatagatagcta

SEQ ID NO: 27735 - DNA, 20 bp, synthetic construct
  source 1..20: mol_type = other DNA
ttttcacatcatagatagct

SEQ ID NO: 27736 - DNA, 20 bp, synthetic construct
  source 1..20: mol_type = other DNA
cttttcacatcatagatagc

SEQ ID NO: 27737 - DNA, 20 bp, synthetic construct
  source 1..20: mol_type = other DNA
tcttttcacatcatagatag

SEQ ID NO: 27738 - DNA, 20 bp, synthetic construct
  source 1..20: mol_type = other DNA
atcttttcacatcatagata

SEQ ID NO: 27739 - DNA, 20 bp, synthetic construct
  source 1..20: mol_type = other DNA
catcttttcacatcatagat

SEQ ID NO: 27740 - DNA, 20 bp, synthetic construct
  source 1..20: mol_type = other DNA
tcatcttttcacatcataga

SEQ ID NO: 27741 - DNA, 20 bp, synthetic construct
  source 1..20: mol_type = other DNA
ttcatcttttcacatcatag

SEQ ID NO: 27742 - DNA, 20 bp, synthetic construct
  source 1..20: mol_type = other DNA
gttcatcttttcacatcata

SEQ ID NO: 27743 - DNA, 20 bp, synthetic construct
  source 1..20: mol_type = other DNA
tgttcatcttttcacatcat

SEQ ID NO: 27744 - DNA, 20 bp, synthetic construct
  source 1..20: mol_type = other DNA
atgttcatcttttcacatca

SEQ ID NO: 27745 - DNA, 20 bp, synthetic construct
  source 1..20: mol_type = other DNA
aatgttcatcttttcacatc

SEQ ID NO: 27746 - DNA, 20 bp, synthetic construct
  source 1..20: mol_type = other DNA
aaatgttcatcttttcacat

SEQ ID NO: 27747 - DNA, 20 bp, synthetic construct
  source 1..20: mol_type = other DNA
aaaatgttcatcttttcaca

SEQ ID NO: 27748 - DNA, 20 bp, synthetic construct
  source 1..20: mol_type = other DNA
taaaatgttcatcttttcac

SEQ ID NO: 27749 - DNA, 20 bp, synthetic construct
  source 1..20: mol_type = other DNA
ataaaatgttcatcttttca

SEQ ID NO: 27750 - DNA, 20 bp, synthetic construct
  source 1..20: mol_type = other DNA
aataaaatgttcatcttttc

SEQ ID NO: 27751 - DNA, 20 bp, synthetic construct
  source 1..20: mol_type = other DNA
aaataaaatgttcatctttt

SEQ ID NO: 27752 - DNA, 20 bp, synthetic construct
  source 1..20: mol_type = other DNA
taaataaaatgttcatcttt

SEQ ID NO: 27753 - DNA, 20 bp, synthetic construct
  source 1..20: mol_type = other DNA
ctaaataaaatgttcatctt

SEQ ID NO: 27754 - DNA, 20 bp, synthetic construct
  source 1..20: mol_type = other DNA
cctaaataaaatgttcatct

SEQ ID NO: 27755 - DNA, 20 bp, synthetic construct
  source 1..20: mol_type = other DNA
acctaaataaaatgttcatc

SEQ ID NO: 27756 - DNA, 20 bp, synthetic construct
  source 1..20: mol_type = other DNA
tacctaaataaaatgttcat

SEQ ID NO: 27757 - DNA, 20 bp, synthetic construct
  source 1..20: mol_type = other DNA
ttacctaaataaaatgttca

SEQ ID NO: 27758 - DNA, 20 bp, synthetic construct
  source 1..20: mol_type = other DNA
attacctaaataaaatgttc

SEQ ID NO: 27759 - DNA, 20 bp, synthetic construct
  source 1..20: mol_type = other DNA
tattacctaaataaaatgtt

SEQ ID NO: 27760 - DNA, 20 bp, synthetic construct
  source 1..20: mol_type = other DNA
ttattacctaaataaaatgt

SEQ ID NO: 27761 - DNA, 20 bp, synthetic construct
  source 1..20: mol_type = other DNA
tttattacctaaataaaatg

SEQ ID NO: 27762 - DNA, 20 bp, synthetic construct
  source 1..20: mol_type = other DNA
atttattacctaaataaaat

SEQ ID NO: 27763 - DNA, 20 bp, synthetic construct
  source 1..20: mol_type = other DNA
catttattacctaaataaaa

SEQ ID NO: 27764 - DNA, 20 bp, synthetic construct
  source 1..20: mol_type = other DNA
acatttattacctaaataaa

SEQ ID NO: 27765 - DNA, 20 bp, synthetic construct
  source 1..20: mol_type = other DNA
aacatttattacctaaataa

SEQ ID NO: 27766 - DNA, 20 bp, synthetic construct
  source 1..20: mol_type = other DNA
taacatttattacctaaata

SEQ ID NO: 27767 - DNA, 20 bp, synthetic construct
  source 1..20: mol_type = other DNA
ataacatttattacctaaat

SEQ ID NO: 27768 - DNA, 20 bp, synthetic construct
  source 1..20: mol_type = other DNA
cataacatttattacctaaa

SEQ ID NO: 27769 - DNA, 20 bp, synthetic construct
  source 1..20: mol_type = other DNA
acataacatttattacctaa

SEQ ID NO: 27770 - DNA, 20 bp, synthetic construct
  source 1..20: mol_type = other DNA
gacataacatttattaccta

SEQ ID NO: 27771 - DNA, 20 bp, synthetic construct
  source 1..20: mol_type = other DNA
tgacataacatttattacct

SEQ ID NO: 27772 - DNA, 20 bp, synthetic construct
  source 1..20: mol_type = other DNA
atgacataacatttattacc

SEQ ID NO: 27773 - DNA, 20 bp, synthetic construct
  source 1..20: mol_type = other DNA
tatgacataacatttattac

SEQ ID NO: 27774 - DNA, 20 bp, synthetic construct
  source 1..20: mol_type = other DNA
ttatgacataacatttatta

SEQ ID NO: 27775 - DNA, 20 bp, synthetic construct
  source 1..20: mol_type = other DNA
tttatgacataacatttatt

SEQ ID NO: 27776 - DNA, 20 bp, synthetic construct
  source 1..20: mol_type = other DNA
ttttatgacataacatttat

SEQ ID NO: 27777 - DNA, 20 bp, synthetic construct
  source 1..20: mol_type = other DNA
attttatgacataacattta

SEQ ID NO: 27778 - DNA, 20 bp, synthetic construct
  source 1..20: mol_type = other DNA
tattttatgacataacattt

SEQ ID NO: 27779 - DNA, 20 bp, synthetic construct
  source 1..20: mol_type = other DNA
gtattttatgacataacatt

SEQ ID NO: 27780 - DNA, 20 bp, synthetic construct
  source 1..20: mol_type = other DNA
ggtattttatgacataacat

SEQ ID NO: 27781 - DNA, 20 bp, synthetic construct
  source 1..20: mol_type = other DNA
tggtattttatgacataaca

SEQ ID NO: 27782 - DNA, 20 bp, synthetic construct
  source 1..20: mol_type = other DNA
atggtattttatgacataac

SEQ ID NO: 27783 - DNA, 20 bp, synthetic construct
  source 1..20: mol_type = other DNA
aatggtattttatgacataa

SEQ ID NO: 27784 - DNA, 20 bp, synthetic construct
  source 1..20: mol_type = other DNA
aaatggtattttatgacata

SEQ ID NO: 27785 - DNA, 20 bp, synthetic construct
  source 1..20: mol_type = other DNA
taaatggtattttatgacat

SEQ ID NO: 27786 - DNA, 20 bp, synthetic construct
  source 1..20: mol_type = other DNA
ataaatggtattttatgaca

SEQ ID NO: 27787 - DNA, 20 bp, synthetic construct
  source 1..20: mol_type = other DNA
aataaatggtattttatgac

SEQ ID NO: 27788 - DNA, 20 bp, synthetic construct
  source 1..20: mol_type = other DNA
caataaatggtattttatga

SEQ ID NO: 27789 - DNA, 20 bp, synthetic construct
  source 1..20: mol_type = other DNA
acaataaatggtattttatg

SEQ ID NO: 27790 - DNA, 20 bp, synthetic construct
  source 1..20: mol_type = other DNA
cacaataaatggtattttat

SEQ ID NO: 27791 - DNA, 20 bp, synthetic construct
  source 1..20: mol_type = other DNA
acacaataaatggtatttta

SEQ ID NO: 27792 - DNA, 20 bp, synthetic construct
  source 1..20: mol_type = other DNA
cacacaataaatggtatttt

SEQ ID NO: 27793 - DNA, 20 bp, synthetic construct
  source 1..20: mol_type = other DNA
gcacacaataaatggtattt

SEQ ID NO: 27794 - DNA, 20 bp, synthetic construct
  source 1..20: mol_type = other DNA
ggcacacaataaatggtatt

SEQ ID NO: 27795 - DNA, 20 bp, synthetic construct
  source 1..20: mol_type = other DNA
aggcacacaataaatggtat

SEQ ID NO: 27796 - DNA, 20 bp, synthetic construct
  source 1..20: mol_type = other DNA
taggcacacaataaatggta

SEQ ID NO: 27797 - DNA, 20 bp, synthetic construct
  source 1..20: mol_type = other DNA
ataggcacacaataaatggt

SEQ ID NO: 27798 - DNA, 20 bp, synthetic construct
  source 1..20: mol_type = other DNA
aataggcacacaataaatgg

SEQ ID NO: 27799 - DNA, 20 bp, synthetic construct
  source 1..20: mol_type = other DNA
taataggcacacaataaatg

SEQ ID NO: 27800 - DNA, 20 bp, synthetic construct
  source 1..20: mol_type = other DNA
ctaataggcacacaataaat

SEQ ID NO: 27801 - DNA, 20 bp, synthetic construct
  source 1..20: mol_type = other DNA
cctaataggcacacaataaa

SEQ ID NO: 27802 - DNA, 20 bp, synthetic construct
  source 1..20: mol_type = other DNA
acctaataggcacacaataa

SEQ ID NO: 27803 - DNA, 20 bp, synthetic construct
  source 1..20: mol_type = other DNA
aacctaataggcacacaata

SEQ ID NO: 27804 - DNA, 20 bp, synthetic construct
  source 1..20: mol_type = other DNA
aaacctaataggcacacaat

SEQ ID NO: 27805 - DNA, 20 bp, synthetic construct
  source 1..20: mol_type = other DNA
gaaacctaataggcacacaa

SEQ ID NO: 27806 - DNA, 20 bp, synthetic construct
  source 1..20: mol_type = other DNA
tgaaacctaataggcacaca

SEQ ID NO: 27807 - DNA, 20 bp, synthetic construct
  source 1..20: mol_type = other DNA
ctgaaacctaataggcacac

SEQ ID NO: 27808 - DNA, 20 bp, synthetic construct
  source 1..20: mol_type = other DNA
cctgaaacctaataggcaca

SEQ ID NO: 27809 - DNA, 20 bp, synthetic construct
  source 1..20: mol_type = other DNA
tcctgaaacctaataggcac

SEQ ID NO: 27810 - DNA, 20 bp, synthetic construct
  source 1..20: mol_type = other DNA
ctcctgaaacctaataggca

SEQ ID NO: 27811 - DNA, 20 bp, synthetic construct
  source 1..20: mol_type = other DNA
tctcctgaaacctaataggc

SEQ ID NO: 27812 - DNA, 20 bp, synthetic construct
  source 1..20: mol_type = other DNA
ctctcctgaaacctaatagg

SEQ ID NO: 27813 - DNA, 20 bp, synthetic construct
  source 1..20: mol_type = other DNA
gctctcctgaaacctaatag

SEQ ID NO: 27814 - DNA, 20 bp, synthetic construct
  source 1..20: mol_type = other DNA
agctctcctgaaacctaata

SEQ ID NO: 27815 - DNA, 20 bp, synthetic construct
  source 1..20: mol_type = other DNA
cagctctcctgaaacctaat

SEQ ID NO: 27816 - DNA, 20 bp, synthetic construct
  source 1..20: mol_type = other DNA
acagctctcctgaaacctaa

SEQ ID NO: 27817 - DNA, 20 bp, synthetic construct
  source 1..20: mol_type = other DNA
cacagctctcctgaaaccta

SEQ ID NO: 27818 - DNA, 20 bp, synthetic construct
  source 1..20: mol_type = other DNA
gcacagctctcctgaaacct

SEQ ID NO: 27819 - DNA, 20 bp, synthetic construct
  source 1..20: mol_type = other DNA
ggcacagctctcctgaaacc

SEQ ID NO: 27820 - DNA, 20 bp, synthetic construct
  source 1..20: mol_type = other DNA
tggcacagctctcctgaaac

SEQ ID NO: 27821 - DNA, 20 bp, synthetic construct
  source 1..20: mol_type = other DNA
ttggcacagctctcctgaaa

SEQ ID NO: 27822 - DNA, 20 bp, synthetic construct
  source 1..20: mol_type = other DNA
cttggcacagctctcctgaa

SEQ ID NO: 27823 - DNA, 20 bp, synthetic construct
  source 1..20: mol_type = other DNA
tcttggcacagctctcctga

SEQ ID NO: 27824 - DNA, 20 bp, synthetic construct
  source 1..20: mol_type = other DNA
ctcttggcacagctctcctg

SEQ ID NO: 27825 - DNA, 20 bp, synthetic construct
  source 1..20: mol_type = other DNA
gctcttggcacagctctcct

SEQ ID NO: 27826 - DNA, 20 bp, synthetic construct
  source 1..20: mol_type = other DNA
tgctcttggcacagctctcc

SEQ ID NO: 27827 - DNA, 20 bp, synthetic construct
  source 1..20: mol_type = other DNA
atgctcttggcacagctctc

SEQ ID NO: 27828 - DNA, 20 bp, synthetic construct
  source 1..20: mol_type = other DNA
aatgctcttggcacagctct

SEQ ID NO: 27829 - DNA, 20 bp, synthetic construct
  source 1..20: mol_type = other DNA
taatgctcttggcacagctc

SEQ ID NO: 27830 - DNA, 20 bp, synthetic construct
  source 1..20: mol_type = other DNA
gtaatgctcttggcacagct

SEQ ID NO: 27831 - DNA, 20 bp, synthetic construct
  source 1..20: mol_type = other DNA
agtaatgctcttggcacagc

SEQ ID NO: 27832 - DNA, 20 bp, synthetic construct
  source 1..20: mol_type = other DNA
aagtaatgctcttggcacag

SEQ ID NO: 27833 - DNA, 20 bp, synthetic construct
  source 1..20: mol_type = other DNA
caagtaatgctcttggcaca

SEQ ID NO: 27834 - DNA, 20 bp, synthetic construct
  source 1..20: mol_type = other DNA
acaagtaatgctcttggcac

SEQ ID NO: 27835 - DNA, 20 bp, synthetic construct
  source 1..20: mol_type = other DNA
tacaagtaatgctcttggca

SEQ ID NO: 27836 - DNA, 20 bp, synthetic construct
  source 1..20: mol_type = other DNA
atacaagtaatgctcttggc

SEQ ID NO: 27837 - DNA, 20 bp, synthetic construct
  source 1..20: mol_type = other DNA
tatacaagtaatgctcttgg

SEQ ID NO: 27838 - DNA, 20 bp, synthetic construct
  source 1..20: mol_type = other DNA
atatacaagtaatgctcttg

SEQ ID NO: 27839 - DNA, 20 bp, synthetic construct
  source 1..20: mol_type = other DNA
gatatacaagtaatgctctt

SEQ ID NO: 27840 - DNA, 20 bp, synthetic construct
  source 1..20: mol_type = other DNA
agatatacaagtaatgctct

SEQ ID NO: 27841 - DNA, 20 bp, synthetic construct
  source 1..20: mol_type = other DNA
aagatatacaagtaatgctc

SEQ ID NO: 27842 - DNA, 20 bp, synthetic construct
  source 1..20: mol_type = other DNA
aaagatatacaagtaatgct

SEQ ID NO: 27843 - DNA, 20 bp, synthetic construct
  source 1..20: mol_type = other DNA
aaaagatatacaagtaatgc

SEQ ID NO: 27844 - DNA, 20 bp, synthetic construct
  source 1..20: mol_type = other DNA
taaaagatatacaagtaatg

SEQ ID NO: 27845 - DNA, 20 bp, synthetic construct
  source 1..20: mol_type = other DNA
ttaaaagatatacaagtaat

SEQ ID NO: 27846 - DNA, 20 bp, synthetic construct
  source 1..20: mol_type = other DNA
cttaaaagatatacaagtaa

SEQ ID NO: 27847 - DNA, 20 bp, synthetic construct
  source 1..20: mol_type = other DNA
gcttaaaagatatacaagta

SEQ ID NO: 27848 - DNA, 20 bp, synthetic construct
  source 1..20: mol_type = other DNA
ggcttaaaagatatacaagt

SEQ ID NO: 27849 - DNA, 20 bp, synthetic construct
  source 1..20: mol_type = other DNA
aggcttaaaagatatacaag

SEQ ID NO: 27850 - DNA, 20 bp, synthetic construct
  source 1..20: mol_type = other DNA
aaggcttaaaagatatacaa

SEQ ID NO: 27851 - DNA, 20 bp, synthetic construct
  source 1..20: mol_type = other DNA
taaggcttaaaagatataca

SEQ ID NO: 27852 - DNA, 20 bp, synthetic construct
  source 1..20: mol_type = other DNA
gtaaggcttaaaagatatac

SEQ ID NO: 27853 - DNA, 20 bp, synthetic construct
  source 1..20: mol_type = other DNA
tgtaaggcttaaaagatata

SEQ ID NO: 27854 - DNA, 20 bp, synthetic construct
  source 1..20: mol_type = other DNA
ttgtaaggcttaaaagatat

SEQ ID NO: 27855 - DNA, 20 bp, synthetic construct
  source 1..20: mol_type = other DNA
gttgtaaggcttaaaagata

SEQ ID NO: 27856 - DNA, 20 bp, synthetic construct
  source 1..20: mol_type = other DNA
tgttgtaaggcttaaaagat

SEQ ID NO: 27857 - DNA, 20 bp, synthetic construct
  source 1..20: mol_type = other DNA
ctgttgtaaggcttaaaaga

SEQ ID NO: 27858 - DNA, 20 bp, synthetic construct
  source 1..20: mol_type = other DNA
gctgttgtaaggcttaaaag

SEQ ID NO: 27859 - DNA, 20 bp, synthetic construct
  source 1..20: mol_type = other DNA
ggctgttgtaaggcttaaaa

SEQ ID NO: 27860 - DNA, 20 bp, synthetic construct
  source 1..20: mol_type = other DNA
gggctgttgtaaggcttaaa

SEQ ID NO: 27861 - DNA, 20 bp, synthetic construct
  source 1..20: mol_type = other DNA
tgggctgttgtaaggcttaa

SEQ ID NO: 27862 - DNA, 20 bp, synthetic construct
  source 1..20: mol_type = other DNA
ctgggctgttgtaaggctta

SEQ ID NO: 27863 - DNA, 20 bp, synthetic construct
  source 1..20: mol_type = other DNA
gctgggctgttgtaaggctt

SEQ ID NO: 27864 - DNA, 20 bp, synthetic construct
  source 1..20: mol_type = other DNA
ggctgggctgttgtaaggct

SEQ ID NO: 27865 - DNA, 20 bp, synthetic construct
  source 1..20: mol_type = other DNA
aggctgggctgttgtaaggc

SEQ ID NO: 27866 - DNA, 20 bp, synthetic construct
  source 1..20: mol_type = other DNA
caggctgggctgttgtaagg

SEQ ID NO: 27867 - DNA, 20 bp, synthetic construct
  source 1..20: mol_type = other DNA
acaggctgggctgttgtaag

SEQ ID NO: 27868 - DNA, 20 bp, synthetic construct
  source 1..20: mol_type = other DNA
gacaggctgggctgttgtaa

SEQ ID NO: 27869 - DNA, 20 bp, synthetic construct
  source 1..20: mol_type = other DNA
tgacaggctgggctgttgta

SEQ ID NO: 27870 - DNA, 20 bp, synthetic construct
  source 1..20: mol_type = other DNA
ctgacaggctgggctgttgt

SEQ ID NO: 27871 - DNA, 20 bp, synthetic construct
  source 1..20: mol_type = other DNA
cctgacaggctgggctgttg

SEQ ID NO: 27872 - DNA, 20 bp, synthetic construct
  source 1..20: mol_type = other DNA
gcctgacaggctgggctgtt

SEQ ID NO: 27873 - DNA, 20 bp, synthetic construct
  source 1..20: mol_type = other DNA
agcctgacaggctgggctgt

SEQ ID NO: 27874 - DNA, 20 bp, synthetic construct
  source 1..20: mol_type = other DNA
cagcctgacaggctgggctg

SEQ ID NO: 27875 - DNA, 20 bp, synthetic construct
  source 1..20: mol_type = other DNA
ccagcctgacaggctgggct

SEQ ID NO: 27876 - DNA, 20 bp, synthetic construct
  source 1..20: mol_type = other DNA
accagcctgacaggctgggc

SEQ ID NO: 27877 - DNA, 20 bp, synthetic construct
  source 1..20: mol_type = other DNA
taccagcctgacaggctggg

SEQ ID NO: 27878 - DNA, 20 bp, synthetic construct
  source 1..20: mol_type = other DNA
ctaccagcctgacaggctgg

SEQ ID NO: 27879 - DNA, 20 bp, synthetic construct
  source 1..20: mol_type = other DNA
actaccagcctgacaggctg

SEQ ID NO: 27880 - DNA, 20 bp, synthetic construct
  source 1..20: mol_type = other DNA
cactaccagcctgacaggct

SEQ ID NO: 27881 - DNA, 20 bp, synthetic construct
  source 1..20: mol_type = other DNA
gcactaccagcctgacaggc

SEQ ID NO: 27882 - DNA, 20 bp, synthetic construct
  source 1..20: mol_type = other DNA
ggcactaccagcctgacagg

SEQ ID NO: 27883 - DNA, 20 bp, synthetic construct
  source 1..20: mol_type = other DNA
tggcactaccagcctgacag

SEQ ID NO: 27884 - DNA, 20 bp, synthetic construct
  source 1..20: mol_type = other DNA
atggcactaccagcctgaca

SEQ ID NO: 27885 - DNA, 20 bp, synthetic construct
  source 1..20: mol_type = other DNA
tatggcactaccagcctgac

SEQ ID NO: 27886 - DNA, 20 bp, synthetic construct
  source 1..20: mol_type = other DNA
atatggcactaccagcctga

SEQ ID NO: 27887 - DNA, 20 bp, synthetic construct
  source 1..20: mol_type = other DNA
gatatggcactaccagcctg

SEQ ID NO: 27888 - DNA, 20 bp, synthetic construct
  source 1..20: mol_type = other DNA
agatatggcactaccagcct

SEQ ID NO: 27889 - DNA, 20 bp, synthetic construct
  source 1..20: mol_type = other DNA
cagatatggcactaccagcc

SEQ ID NO: 27890 - DNA, 20 bp, synthetic construct
  source 1..20: mol_type = other DNA
acagatatggcactaccagc

SEQ ID NO: 27891 - DNA, 20 bp, synthetic construct
  source 1..20: mol_type = other DNA
aacagatatggcactaccag

SEQ ID NO: 27892 - DNA, 20 bp, synthetic construct
  source 1..20: mol_type = other DNA
aaacagatatggcactacca

SEQ ID NO: 27893 - DNA, 20 bp, synthetic construct
  source 1..20: mol_type = other DNA
aaaacagatatggcactacc

SEQ ID NO: 27894 - DNA, 20 bp, synthetic construct
  source 1..20: mol_type = other DNA
taaaacagatatggcactac

SEQ ID NO: 27895 - DNA, 20 bp, synthetic construct
  source 1..20: mol_type = other DNA
gtaaaacagatatggcacta

SEQ ID NO: 27896 - DNA, 20 bp, synthetic construct
  source 1..20: mol_type = other DNA
tgtaaaacagatatggcact

SEQ ID NO: 27897 - DNA, 20 bp, synthetic construct
  source 1..20: mol_type = other DNA
ctgtaaaacagatatggcac

SEQ ID NO: 27898 - DNA, 20 bp, synthetic construct
  source 1..20: mol_type = other DNA
tctgtaaaacagatatggca

SEQ ID NO: 27899 - DNA, 20 bp, synthetic construct
  source 1..20: mol_type = other DNA
atctgtaaaacagatatggc

SEQ ID NO: 27900 - DNA, 20 bp, synthetic construct
  source 1..20: mol_type = other DNA
catctgtaaaacagatatgg

SEQ ID NO: 27901 - DNA, 20 bp, synthetic construct
  source 1..20: mol_type = other DNA
tcatctgtaaaacagatatg

SEQ ID NO: 27902 - DNA, 20 bp, synthetic construct
  source 1..20: mol_type = other DNA
ctcatctgtaaaacagatat

SEQ ID NO: 27903 - DNA, 20 bp, synthetic construct
  source 1..20: mol_type = other DNA
cctcatctgtaaaacagata

SEQ ID NO: 27904 - DNA, 20 bp, synthetic construct
  source 1..20: mol_type = other DNA
tcctcatctgtaaaacagat

SEQ ID NO: 27905 - DNA, 20 bp, synthetic construct
  source 1..20: mol_type = other DNA
ttcctcatctgtaaaacaga

SEQ ID NO: 27906 - DNA, 20 bp, synthetic construct
  source 1..20: mol_type = other DNA
cttcctcatctgtaaaacag

SEQ ID NO: 27907 - DNA, 20 bp, synthetic construct
  source 1..20: mol_type = other DNA
acttcctcatctgtaaaaca

SEQ ID NO: 27908 - DNA, 20 bp, synthetic construct
  source 1..20: mol_type = other DNA
cacttcctcatctgtaaaac

SEQ ID NO: 27909 - DNA, 20 bp, synthetic construct
  source 1..20: mol_type = other DNA
tcacttcctcatctgtaaaa

SEQ ID NO: 27910 - DNA, 20 bp, synthetic construct
  source 1..20: mol_type = other DNA
atcacttcctcatctgtaaa

SEQ ID NO: 27911 - DNA, 20 bp, synthetic construct
  source 1..20: mol_type = other DNA
catcacttcctcatctgtaa

SEQ ID NO: 27912 - DNA, 20 bp, synthetic construct
  source 1..20: mol_type = other DNA
ccatcacttcctcatctgta

SEQ ID NO: 27913 - DNA, 20 bp, synthetic construct
  source 1..20: mol_type = other DNA
tccatcacttcctcatctgt

SEQ ID NO: 27914 - DNA, 20 bp, synthetic construct
  source 1..20: mol_type = other DNA
atccatcacttcctcatctg

SEQ ID NO: 27915 - DNA, 20 bp, synthetic construct
  source 1..20: mol_type = other DNA
aatccatcacttcctcatct

SEQ ID NO: 27916 - DNA, 20 bp, synthetic construct
  source 1..20: mol_type = other DNA
caatccatcacttcctcatc

SEQ ID NO: 27917 - DNA, 20 bp, synthetic construct
  source 1..20: mol_type = other DNA
ccaatccatcacttcctcat

SEQ ID NO: 27918 - DNA, 20 bp, synthetic construct
  source 1..20: mol_type = other DNA
tccaatccatcacttcctca

SEQ ID NO: 27919 - DNA, 20 bp, synthetic construct
  source 1..20: mol_type = other DNA
ctccaatccatcacttcctc

SEQ ID NO: 27920 - DNA, 20 bp, synthetic construct
  source 1..20: mol_type = other DNA
tctccaatccatcacttcct

SEQ ID NO: 27921 - DNA, 20 bp, synthetic construct
  source 1..20: mol_type = other DNA
ttctccaatccatcacttcc

SEQ ID NO: 27922 - DNA, 20 bp, synthetic construct
  source 1..20: mol_type = other DNA
tttctccaatccatcacttc

SEQ ID NO: 27923 - DNA, 20 bp, synthetic construct
  source 1..20: mol_type = other DNA
atttctccaatccatcactt

SEQ ID NO: 27924 - DNA, 20 bp, synthetic construct
  source 1..20: mol_type = other DNA
aatttctccaatccatcact

SEQ ID NO: 27925 - DNA, 20 bp, synthetic construct
  source 1..20: mol_type = other DNA
taatttctccaatccatcac

SEQ ID NO: 27926 - DNA, 20 bp, synthetic construct
  source 1..20: mol_type = other DNA
ttaatttctccaatccatca

SEQ ID NO: 27927 - DNA, 20 bp, synthetic construct
  source 1..20: mol_type = other DNA
cttaatttctccaatccatc

SEQ ID NO: 27928 - DNA, 20 bp, synthetic construct
  source 1..20: mol_type = other DNA
ccttaatttctccaatccat

SEQ ID NO: 27929 - DNA, 20 bp, synthetic construct
  source 1..20: mol_type = other DNA
tccttaatttctccaatcca

SEQ ID NO: 27930 - DNA, 20 bp, synthetic construct
  source 1..20: mol_type = other DNA
ttccttaatttctccaatcc

SEQ ID NO: 27931 - DNA, 20 bp, synthetic construct
  source 1..20: mol_type = other DNA
tttccttaatttctccaatc

SEQ ID NO: 27932 - DNA, 20 bp, synthetic construct
  source 1..20: mol_type = other DNA
atttccttaatttctccaat

SEQ ID NO: 27933 - DNA, 20 bp, synthetic construct
  source 1..20: mol_type = other DNA
aatttccttaatttctccaa

SEQ ID NO: 27934 - DNA, 20 bp, synthetic construct
  source 1..20: mol_type = other DNA
caatttccttaatttctcca

SEQ ID NO: 27935 - DNA, 20 bp, synthetic construct
  source 1..20: mol_type = other DNA
gcaatttccttaatttctcc

SEQ ID NO: 27936 - DNA, 20 bp, synthetic construct
  source 1..20: mol_type = other DNA
ggcaatttccttaatttctc

SEQ ID NO: 27937 - DNA, 20 bp, synthetic construct
  source 1..20: mol_type = other DNA
aggcaatttccttaatttct

SEQ ID NO: 27938 - DNA, 20 bp, synthetic construct
  source 1..20: mol_type = other DNA
aaggcaatttccttaatttc

SEQ ID NO: 27939 - DNA, 20 bp, synthetic construct
  source 1..20: mol_type = other DNA
aaaggcaatttccttaattt

SEQ ID NO: 27940 - DNA, 20 bp, synthetic construct
  source 1..20: mol_type = other DNA
taaaggcaatttccttaatt

SEQ ID NO: 27941 - DNA, 20 bp, synthetic construct
  source 1..20: mol_type = other DNA
ctaaaggcaatttccttaat

SEQ ID NO: 27942 - DNA, 20 bp, synthetic construct
  source 1..20: mol_type = other DNA
cctaaaggcaatttccttaa

SEQ ID NO: 27943 - DNA, 20 bp, synthetic construct
  source 1..20: mol_type = other DNA
acctaaaggcaatttcctta

SEQ ID NO: 27944 - DNA, 20 bp, synthetic construct
  source 1..20: mol_type = other DNA
gacctaaaggcaatttcctt

SEQ ID NO: 27945 - DNA, 20 bp, synthetic construct
  source 1..20: mol_type = other DNA
tgacctaaaggcaatttcct

SEQ ID NO: 27946 - DNA, 20 bp, synthetic construct
  source 1..20: mol_type = other DNA
ttgacctaaaggcaatttcc

SEQ ID NO: 27947 - DNA, 20 bp, synthetic construct
  source 1..20: mol_type = other DNA
tttgacctaaaggcaatttc

SEQ ID NO: 27948 - DNA, 20 bp, synthetic construct
  source 1..20: mol_type = other DNA
ctttgacctaaaggcaattt

SEQ ID NO: 27949 - DNA, 20 bp, synthetic construct
  source 1..20: mol_type = other DNA
tctttgacctaaaggcaatt

SEQ ID NO: 27950 - DNA, 20 bp, synthetic construct
  source 1..20: mol_type = other DNA
ctctttgacctaaaggcaat

SEQ ID NO: 27951 - DNA, 20 bp, synthetic construct
  source 1..20: mol_type = other DNA
tctctttgacctaaaggcaa

SEQ ID NO: 27952 - DNA, 20 bp, synthetic construct
  source 1..20: mol_type = other DNA
atctctttgacctaaaggca

SEQ ID NO: 27953 - DNA, 20 bp, synthetic construct
  source 1..20: mol_type = other DNA
tatctctttgacctaaaggc

SEQ ID NO: 27954 - DNA, 20 bp, synthetic construct
  source 1..20: mol_type = other DNA
ctatctctttgacctaaagg

SEQ ID NO: 27955 - DNA, 20 bp, synthetic construct
  source 1..20: mol_type = other DNA
cctatctctttgacctaaag

SEQ ID NO: 27956 - DNA, 20 bp, synthetic construct
  source 1..20: mol_type = other DNA
tcctatctctttgacctaaa

SEQ ID NO: 27957 - DNA, 20 bp, synthetic construct
  source 1..20: mol_type = other DNA
ttcctatctctttgacctaa

SEQ ID NO: 27958 - DNA, 20 bp, synthetic construct
  source 1..20: mol_type = other DNA
cttcctatctctttgaccta

SEQ ID NO: 27959 - DNA, 20 bp, synthetic construct
  source 1..20: mol_type = other DNA
acttcctatctctttgacct

SEQ ID NO: 27960 - DNA, 20 bp, synthetic construct
  source 1..20: mol_type = other DNA
cacttcctatctctttgacc

SEQ ID NO: 27961 - DNA, 20 bp, synthetic construct
  source 1..20: mol_type = other DNA
tcacttcctatctctttgac

SEQ ID NO: 27962 - DNA, 20 bp, synthetic construct
  source 1..20: mol_type = other DNA
gtcacttcctatctctttga

SEQ ID NO: 27963 - DNA, 20 bp, synthetic construct
  source 1..20: mol_type = other DNA
tgtcacttcctatctctttg

SEQ ID NO: 27964 - DNA, 20 bp, synthetic construct
  source 1..20: mol_type = other DNA
ttgtcacttcctatctcttt

SEQ ID NO: 27965 - DNA, 20 bp, synthetic construct
  source 1..20: mol_type = other DNA
tttgtcacttcctatctctt

SEQ ID NO: 27966 - DNA, 20 bp, synthetic construct
  source 1..20: mol_type = other DNA
ctttgtcacttcctatctct

SEQ ID NO: 27967 - DNA, 20 bp, synthetic construct
  source 1..20: mol_type = other DNA
gctttgtcacttcctatctc

SEQ ID NO: 27968 - DNA, 20 bp, synthetic construct
  source 1..20: mol_type = other DNA
agctttgtcacttcctatct

SEQ ID NO: 27969 - DNA, 20 bp, synthetic construct
  source 1..20: mol_type = other DNA
cagctttgtcacttcctatc

SEQ ID NO: 27970 - DNA, 20 bp, synthetic construct
  source 1..20: mol_type = other DNA
tcagctttgtcacttcctat

SEQ ID NO: 27971 - DNA, 20 bp, synthetic construct
  source 1..20: mol_type = other DNA
ctcagctttgtcacttccta

SEQ ID NO: 27972 - DNA, 20 bp, synthetic construct
  source 1..20: mol_type = other DNA
tctcagctttgtcacttcct

SEQ ID NO: 27973 - DNA, 20 bp, synthetic construct
  source 1..20: mol_type = other DNA
atctcagctttgtcacttcc

SEQ ID NO: 27974 - DNA, 20 bp, synthetic construct
  source 1..20: mol_type = other DNA
aatctcagctttgtcacttc

SEQ ID NO: 27975 - DNA, 20 bp, synthetic construct
  source 1..20: mol_type = other DNA
aaatctcagctttgtcactt

SEQ ID NO: 27976 - DNA, 20 bp, synthetic construct
  source 1..20: mol_type = other DNA
aaaatctcagctttgtcact

SEQ ID NO: 27977 - DNA, 20 bp, synthetic construct
  source 1..20: mol_type = other DNA
aaaaatctcagctttgtcac

SEQ ID NO: 27978 - DNA, 20 bp, synthetic construct
  source 1..20: mol_type = other DNA
taaaaatctcagctttgtca

SEQ ID NO: 27979 - DNA, 20 bp, synthetic construct
  source 1..20: mol_type = other DNA
ttaaaaatctcagctttgtc

SEQ ID NO: 27980 - DNA, 20 bp, synthetic construct
  source 1..20: mol_type = other DNA
gttaaaaatctcagctttgt

SEQ ID NO: 27981 - DNA, 20 bp, synthetic construct
  source 1..20: mol_type = other DNA
ggttaaaaatctcagctttg

SEQ ID NO: 27982 - DNA, 20 bp, synthetic construct
  source 1..20: mol_type = other DNA
aggttaaaaatctcagcttt

SEQ ID NO: 27983 - DNA, 20 bp, synthetic construct
  source 1..20: mol_type = other DNA
aaggttaaaaatctcagctt

SEQ ID NO: 27984 - DNA, 20 bp, synthetic construct
  source 1..20: mol_type = other DNA
caaggttaaaaatctcagct

SEQ ID NO: 27985 - DNA, 20 bp, synthetic construct
  source 1..20: mol_type = other DNA
acaaggttaaaaatctcagc

SEQ ID NO: 27986 - DNA, 20 bp, synthetic construct
  source 1..20: mol_type = other DNA
cacaaggttaaaaatctcag

SEQ ID NO: 27987 - DNA, 20 bp, synthetic construct
  source 1..20: mol_type = other DNA
tcacaaggttaaaaatctca

SEQ ID NO: 27988 - DNA, 20 bp, synthetic construct
  source 1..20: mol_type = other DNA
ctcacaaggttaaaaatctc

SEQ ID NO: 27989 - DNA, 20 bp, synthetic construct
  source 1..20: mol_type = other DNA
tctcacaaggttaaaaatct

SEQ ID NO: 27990 - DNA, 20 bp, synthetic construct
  source 1..20: mol_type = other DNA
atctcacaaggttaaaaatc

SEQ ID NO: 27991 - DNA, 20 bp, synthetic construct
  source 1..20: mol_type = other DNA
aatctcacaaggttaaaaat

SEQ ID NO: 27992 - DNA, 20 bp, synthetic construct
  source 1..20: mol_type = other DNA
aaatctcacaaggttaaaaa

SEQ ID NO: 27993 - DNA, 20 bp, synthetic construct
  source 1..20: mol_type = other DNA
gaaatctcacaaggttaaaa

SEQ ID NO: 27994 - DNA, 20 bp, synthetic construct
  source 1..20: mol_type = other DNA
tgaaatctcacaaggttaaa

SEQ ID NO: 27995 - DNA, 20 bp, synthetic construct
  source 1..20: mol_type = other DNA
ttgaaatctcacaaggttaa

SEQ ID NO: 27996 - DNA, 20 bp, synthetic construct
  source 1..20: mol_type = other DNA
tttgaaatctcacaaggtta

SEQ ID NO: 27997 - DNA, 20 bp, synthetic construct
  source 1..20: mol_type = other DNA
ctttgaaatctcacaaggtt

SEQ ID NO: 27998 - DNA, 20 bp, synthetic construct
  source 1..20: mol_type = other DNA
actttgaaatctcacaaggt

SEQ ID NO: 27999 - DNA, 20 bp, synthetic construct
  source 1..20: mol_type = other DNA
gactttgaaatctcacaagg

SEQ ID NO: 28000 - DNA, 20 bp, synthetic construct
  source 1..20: mol_type = other DNA
agactttgaaatctcacaag

SEQ ID NO: 28001 - DNA, 20 bp, synthetic construct
  source 1..20: mol_type = other DNA
aagactttgaaatctcacaa

SEQ ID NO: 28002 - DNA, 20 bp, synthetic construct
  source 1..20: mol_type = other DNA
aaagactttgaaatctcaca

SEQ ID NO: 28003 - DNA, 20 bp, synthetic construct
  source 1..20: mol_type = other DNA
caaagactttgaaatctcac

SEQ ID NO: 28004 - DNA, 20 bp, synthetic construct
  source 1..20: mol_type = other DNA
gcaaagactttgaaatctca

SEQ ID NO: 28005 - DNA, 20 bp, synthetic construct
  source 1..20: mol_type = other DNA
agcaaagactttgaaatctc

SEQ ID NO: 28006 - DNA, 20 bp, synthetic construct
  source 1..20: mol_type = other DNA
aagcaaagactttgaaatct

SEQ ID NO: 28007 - DNA, 20 bp, synthetic construct
  source 1..20: mol_type = other DNA
aaagcaaagactttgaaatc

SEQ ID NO: 28008 - DNA, 20 bp, synthetic construct
  source 1..20: mol_type = other DNA
aaaagcaaagactttgaaat

SEQ ID NO: 28009 - DNA, 20 bp, synthetic construct
  source 1..20: mol_type = other DNA
aaaaagcaaagactttgaaa

SEQ ID NO: 28010 - DNA, 20 bp, synthetic construct
  source 1..20: mol_type = other DNA
taaaaagcaaagactttgaa

SEQ ID NO: 28011 - DNA, 20 bp, synthetic construct
  source 1..20: mol_type = other DNA
ttaaaaagcaaagactttga

SEQ ID NO: 28012 - DNA, 20 bp, synthetic construct
  source 1..20: mol_type = other DNA
attaaaaagcaaagactttg

SEQ ID NO: 28013 - DNA, 20 bp, synthetic construct
  source 1..20: mol_type = other DNA
tattaaaaagcaaagacttt

SEQ ID NO: 28014 - DNA, 20 bp, synthetic construct
  source 1..20: mol_type = other DNA
ttattaaaaagcaaagactt

SEQ ID NO: 28015 - DNA, 20 bp, synthetic construct
  source 1..20: mol_type = other DNA
gttattaaaaagcaaagact

SEQ ID NO: 28016 - DNA, 20 bp, synthetic construct
  source 1..20: mol_type = other DNA
agttattaaaaagcaaagac

SEQ ID NO: 28017 - DNA, 20 bp, synthetic construct
  source 1..20: mol_type = other DNA
cagttattaaaaagcaaaga

SEQ ID NO: 28018 - DNA, 20 bp, synthetic construct
  source 1..20: mol_type = other DNA
acagttattaaaaagcaaag

SEQ ID NO: 28019 - DNA, 20 bp, synthetic construct
  source 1..20: mol_type = other DNA
aacagttattaaaaagcaaa

SEQ ID NO: 28020 - DNA, 20 bp, synthetic construct
  source 1..20: mol_type = other DNA
gaacagttattaaaaagcaa

SEQ ID NO: 28021 - DNA, 20 bp, synthetic construct
  source 1..20: mol_type = other DNA
ggaacagttattaaaaagca

SEQ ID NO: 28022 - DNA, 20 bp, synthetic construct
  source 1..20: mol_type = other DNA
tggaacagttattaaaaagc

SEQ ID NO: 28023 - DNA, 20 bp, synthetic construct
  source 1..20: mol_type = other DNA
atggaacagttattaaaaag

SEQ ID NO: 28024 - DNA, 20 bp, synthetic construct
  source 1..20: mol_type = other DNA
aatggaacagttattaaaaa

SEQ ID NO: 28025 - DNA, 20 bp, synthetic construct
  source 1..20: mol_type = other DNA
caatggaacagttattaaaa

SEQ ID NO: 28026 - DNA, 20 bp, synthetic construct
  source 1..20: mol_type = other DNA
gcaatggaacagttattaaa

SEQ ID NO: 28027 - DNA, 20 bp, synthetic construct
  source 1..20: mol_type = other DNA
agcaatggaacagttattaa

SEQ ID NO: 28028 - DNA, 20 bp, synthetic construct
  source 1..20: mol_type = other DNA
aagcaatggaacagttatta

SEQ ID NO: 28029 - DNA, 20 bp, synthetic construct
  source 1..20: mol_type = other DNA
gaagcaatggaacagttatt

SEQ ID NO: 28030 - DNA, 20 bp, synthetic construct
  source 1..20: mol_type = other DNA
agaagcaatggaacagttat

SEQ ID NO: 28031 - DNA, 20 bp, synthetic construct
  source 1..20: mol_type = other DNA
tagaagcaatggaacagtta

SEQ ID NO: 28032 - DNA, 20 bp, synthetic construct
  source 1..20: mol_type = other DNA
ttagaagcaatggaacagtt

SEQ ID NO: 28033 - DNA, 20 bp, synthetic construct
  source 1..20: mol_type = other DNA
attagaagcaatggaacagt

SEQ ID NO: 28034 - DNA, 20 bp, synthetic construct
  source 1..20: mol_type = other DNA
tattagaagcaatggaacag

SEQ ID NO: 28035 - DNA, 20 bp, synthetic construct
  source 1..20: mol_type = other DNA
atattagaagcaatggaaca

SEQ ID NO: 28036 - DNA, 20 bp, synthetic construct
  source 1..20: mol_type = other DNA
tatattagaagcaatggaac

SEQ ID NO: 28037 - DNA, 20 bp, synthetic construct
  source 1..20: mol_type = other DNA
ctatattagaagcaatggaa

SEQ ID NO: 28038 - DNA, 20 bp, synthetic construct
  source 1..20: mol_type = other DNA
tctatattagaagcaatgga

SEQ ID NO: 28039 - DNA, 20 bp, synthetic construct
  source 1..20: mol_type = other DNA
ctctatattagaagcaatgg

SEQ ID NO: 28040 - DNA, 20 bp, synthetic construct
  source 1..20: mol_type = other DNA
tctctatattagaagcaatg

SEQ ID NO: 28041 - DNA, 20 bp, synthetic construct
  source 1..20: mol_type = other DNA
atctctatattagaagcaat

SEQ ID NO: 28042 - DNA, 20 bp, synthetic construct
  source 1..20: mol_type = other DNA
tatctctatattagaagcaa

SEQ ID NO: 28043 - DNA, 20 bp, synthetic construct
  source 1..20: mol_type = other DNA
atatctctatattagaagca

SEQ ID NO: 28044 - DNA, 20 bp, synthetic construct
  source 1..20: mol_type = other DNA
catatctctatattagaagc

SEQ ID NO: 28045 - DNA, 20 bp, synthetic construct
  source 1..20: mol_type = other DNA
tcatatctctatattagaag

SEQ ID NO: 28046 - DNA, 20 bp, synthetic construct
  source 1..20: mol_type = other DNA
gtcatatctctatattagaa

SEQ ID NO: 28047 - DNA, 20 bp, synthetic construct
  source 1..20: mol_type = other DNA
tgtcatatctctatattaga

SEQ ID NO: 28048 - DNA, 20 bp, synthetic construct
  source 1..20: mol_type = other DNA
ttgtcatatctctatattag

SEQ ID NO: 28049 - DNA, 20 bp, synthetic construct
  source 1..20: mol_type = other DNA
tttgtcatatctctatatta

SEQ ID NO: 28050 - DNA, 20 bp, synthetic construct
  source 1..20: mol_type = other DNA
ttttgtcatatctctatatt

SEQ ID NO: 28051 - DNA, 20 bp, synthetic construct
  source 1..20: mol_type = other DNA
tttttgtcatatctctatat

SEQ ID NO: 28052 - DNA, 20 bp, synthetic construct
  source 1..20: mol_type = other DNA
gtttttgtcatatctctata

SEQ ID NO: 28053 - DNA, 20 bp, synthetic construct
  source 1..20: mol_type = other DNA
tgtttttgtcatatctctat

SEQ ID NO: 28054 - DNA, 20 bp, synthetic construct
  source 1..20: mol_type = other DNA
ttgtttttgtcatatctcta

SEQ ID NO: 28055 - DNA, 20 bp, synthetic construct
  source 1..20: mol_type = other DNA
cttgtttttgtcatatctct

SEQ ID NO: 28056 - DNA, 20 bp, synthetic construct
  source 1..20: mol_type = other DNA
acttgtttttgtcatatctc

SEQ ID NO: 28057 - DNA, 20 bp, synthetic construct
  source 1..20: mol_type = other DNA
tacttgtttttgtcatatct

SEQ ID NO: 28058 - DNA, 20 bp, synthetic construct
  source 1..20: mol_type = other DNA
ttacttgtttttgtcatatc

SEQ ID NO: 28059 - DNA, 20 bp, synthetic construct
  source 1..20: mol_type = other DNA
tttacttgtttttgtcatat

SEQ ID NO: 28060 - DNA, 20 bp, synthetic construct
  source 1..20: mol_type = other DNA
ttttacttgtttttgtcata

SEQ ID NO: 28061 - DNA, 20 bp, synthetic construct
  source 1..20: mol_type = other DNA
tttttacttgtttttgtcat

SEQ ID NO: 28062 - DNA, 20 bp, synthetic construct
  source 1..20: mol_type = other DNA
atttttacttgtttttgtca

SEQ ID NO: 28063 - DNA, 20 bp, synthetic construct
  source 1..20: mol_type = other DNA
gatttttacttgtttttgtc

SEQ ID NO: 28064 - DNA, 20 bp, synthetic construct
  source 1..20: mol_type = other DNA
tgatttttacttgtttttgt

SEQ ID NO: 28065 - DNA, 20 bp, synthetic construct
  source 1..20: mol_type = other DNA
ctgatttttacttgtttttg

SEQ ID NO: 28066 - DNA, 20 bp, synthetic construct
  source 1..20: mol_type = other DNA
actgatttttacttgttttt

SEQ ID NO: 28067 - DNA, 20 bp, synthetic construct
  source 1..20: mol_type = other DNA
cactgatttttacttgtttt

SEQ ID NO: 28068 - DNA, 20 bp, synthetic construct
  source 1..20: mol_type = other DNA
tcactgatttttacttgttt

SEQ ID NO: 28069 - DNA, 20 bp, synthetic construct
  source 1..20: mol_type = other DNA
ttcactgatttttacttgtt

SEQ ID NO: 28070 - DNA, 20 bp, synthetic construct
  source 1..20: mol_type = other DNA
cttcactgatttttacttgt

SEQ ID NO: 28071 - DNA, 20 bp, synthetic construct
  source 1..20: mol_type = other DNA
tcttcactgatttttacttg

SEQ ID NO: 28072 - DNA, 20 bp, synthetic construct
  source 1..20: mol_type = other DNA
ttcttcactgatttttactt

SEQ ID NO: 28073 - DNA, 20 bp, synthetic construct
  source 1..20: mol_type = other DNA
cttcttcactgatttttact

SEQ ID NO: 28074 - DNA, 20 bp, synthetic construct
  source 1..20: mol_type = other DNA
ccttcttcactgatttttac

SEQ ID NO: 28075 - DNA, 20 bp, synthetic construct
  source 1..20: mol_type = other DNA
gccttcttcactgattttta

SEQ ID NO: 28076 - DNA, 20 bp, synthetic construct
  source 1..20: mol_type = other DNA
agccttcttcactgattttt

SEQ ID NO: 28077 - DNA, 20 bp, synthetic construct
  source 1..20: mol_type = other DNA
cagccttcttcactgatttt

SEQ ID NO: 28078 - DNA, 20 bp, synthetic construct
  source 1..20: mol_type = other DNA
ccagccttcttcactgattt

SEQ ID NO: 28079 - DNA, 20 bp, synthetic construct
  source 1..20: mol_type = other DNA
cccagccttcttcactgatt

SEQ ID NO: 28080 - DNA, 20 bp, synthetic construct
  source 1..20: mol_type = other DNA
tcccagccttcttcactgat

SEQ ID NO: 28081 - DNA, 20 bp, synthetic construct
  source 1..20: mol_type = other DNA
ctcccagccttcttcactga

SEQ ID NO: 28082 - DNA, 20 bp, synthetic construct
  source 1..20: mol_type = other DNA
gctcccagccttcttcactg

SEQ ID NO: 28083 - DNA, 20 bp, synthetic construct
  source 1..20: mol_type = other DNA
tgctcccagccttcttcact

SEQ ID NO: 28084 - DNA, 20 bp, synthetic construct
  source 1..20: mol_type = other DNA
ctgctcccagccttcttcac

SEQ ID NO: 28085 - DNA, 20 bp, synthetic construct
  source 1..20: mol_type = other DNA
actgctcccagccttcttca

SEQ ID NO: 28086 - DNA, 20 bp, synthetic construct
  source 1..20: mol_type = other DNA
gactgctcccagccttcttc

SEQ ID NO: 28087 - DNA, 20 bp, synthetic construct
  source 1..20: mol_type = other DNA
cgactgctcccagccttctt

SEQ ID NO: 28088 - DNA, 20 bp, synthetic construct
  source 1..20: mol_type = other DNA
gcgactgctcccagccttct

SEQ ID NO: 28089 - DNA, 20 bp, synthetic construct
  source 1..20: mol_type = other DNA
agcgactgctcccagccttc

SEQ ID NO: 28090 - DNA, 20 bp, synthetic construct
  source 1..20: mol_type = other DNA
aagcgactgctcccagcctt

SEQ ID NO: 28091 - DNA, 20 bp, synthetic construct
  source 1..20: mol_type = other DNA
taagcgactgctcccagcct

SEQ ID NO: 28092 - DNA, 20 bp, synthetic construct
  source 1..20: mol_type = other DNA
ataagcgactgctcccagcc

SEQ ID NO: 28093 - DNA, 20 bp, synthetic construct
  source 1..20: mol_type = other DNA
cataagcgactgctcccagc

SEQ ID NO: 28094 - DNA, 20 bp, synthetic construct
  source 1..20: mol_type = other DNA
gcataagcgactgctcccag

SEQ ID NO: 28095 - DNA, 20 bp, synthetic construct
  source 1..20: mol_type = other DNA
ggcataagcgactgctccca

SEQ ID NO: 28096 - DNA, 20 bp, synthetic construct
  source 1..20: mol_type = other DNA
aggcataagcgactgctccc

SEQ ID NO: 28097 - DNA, 20 bp, synthetic construct
  source 1..20: mol_type = other DNA
caggcataagcgactgctcc

SEQ ID NO: 28098 - DNA, 20 bp, synthetic construct
  source 1..20: mol_type = other DNA
acaggcataagcgactgctc

SEQ ID NO: 28099 - DNA, 20 bp, synthetic construct
  source 1..20: mol_type = other DNA
tacaggcataagcgactgct

SEQ ID NO: 28100 - DNA, 20 bp, synthetic construct
  source 1..20: mol_type = other DNA
ttacaggcataagcgactgc

SEQ ID NO: 28101 - DNA, 20 bp, synthetic construct
  source 1..20: mol_type = other DNA
attacaggcataagcgactg

SEQ ID NO: 28102 - DNA, 20 bp, synthetic construct
  source 1..20: mol_type = other DNA
gattacaggcataagcgact

SEQ ID NO: 28103 - DNA, 20 bp, synthetic construct
  source 1..20: mol_type = other DNA
ggattacaggcataagcgac

SEQ ID NO: 28104 - DNA, 20 bp, synthetic construct
  source 1..20: mol_type = other DNA
gggattacaggcataagcga

SEQ ID NO: 28105 - DNA, 20 bp, synthetic construct
  source 1..20: mol_type = other DNA
tgggattacaggcataagcg

SEQ ID NO: 28106 - DNA, 20 bp, synthetic construct
  source 1..20: mol_type = other DNA
ctgggattacaggcataagc

SEQ ID NO: 28107 - DNA, 20 bp, synthetic construct
  source 1..20: mol_type = other DNA
gctgggattacaggcataag

SEQ ID NO: 28108 - DNA, 20 bp, synthetic construct
  source 1..20: mol_type = other DNA
tgctgggattacaggcataa

SEQ ID NO: 28109 - DNA, 20 bp, synthetic construct
  source 1..20: mol_type = other DNA
ctgctgggattacaggcata

SEQ ID NO: 28110 - DNA, 20 bp, synthetic construct
  source 1..20: mol_type = other DNA
actgctgggattacaggcat

SEQ ID NO: 28111 - DNA, 20 bp, synthetic construct
  source 1..20: mol_type = other DNA
aactgctgggattacaggca

SEQ ID NO: 28112 - DNA, 20 bp, synthetic construct
  source 1..20: mol_type = other DNA
aaactgctgggattacaggc

SEQ ID NO: 28113 - DNA, 20 bp, synthetic construct
  source 1..20: mol_type = other DNA
caaactgctgggattacagg

SEQ ID NO: 28114 - DNA, 20 bp, synthetic construct
  source 1..20: mol_type = other DNA
ccaaactgctgggattacag

SEQ ID NO: 28115 - DNA, 20 bp, synthetic construct
  source 1..20: mol_type = other DNA
cccaaactgctgggattaca

SEQ ID NO: 28116 - DNA, 20 bp, synthetic construct
  source 1..20: mol_type = other DNA
tcccaaactgctgggattac

SEQ ID NO: 28117 - DNA, 20 bp, synthetic construct
  source 1..20: mol_type = other DNA
ctcccaaactgctgggatta

SEQ ID NO: 28118 - DNA, 20 bp, synthetic construct
  source 1..20: mol_type = other DNA
cctcccaaactgctgggatt

SEQ ID NO: 28119 - DNA, 20 bp, synthetic construct
  source 1..20: mol_type = other DNA
gcctcccaaactgctgggat

SEQ ID NO: 28120 - DNA, 20 bp, synthetic construct
  source 1..20: mol_type = other DNA
ggcctcccaaactgctggga

SEQ ID NO: 28121 - DNA, 20 bp, synthetic construct
  source 1..20: mol_type = other DNA
cggcctcccaaactgctggg

SEQ ID NO: 28122 - DNA, 20 bp, synthetic construct
  source 1..20: mol_type = other DNA
tcggcctcccaaactgctgg

SEQ ID NO: 28123 - DNA, 20 bp, synthetic construct
  source 1..20: mol_type = other DNA
ctcggcctcccaaactgctg

SEQ ID NO: 28124 - DNA, 20 bp, synthetic construct
  source 1..20: mol_type = other DNA
cctcggcctcccaaactgct

SEQ ID NO: 28125 - DNA, 20 bp, synthetic construct
  source 1..20: mol_type = other DNA
gcctcggcctcccaaactgc

SEQ ID NO: 28126 - DNA, 20 bp, synthetic construct
  source 1..20: mol_type = other DNA
cgcctcggcctcccaaactg

SEQ ID NO: 28127 - DNA, 20 bp, synthetic construct
  source 1..20: mol_type = other DNA
acgcctcggcctcccaaact

SEQ ID NO: 28128 - DNA, 20 bp, synthetic construct
  source 1..20: mol_type = other DNA
cacgcctcggcctcccaaac

SEQ ID NO: 28129 - DNA, 20 bp, synthetic construct
  source 1..20: mol_type = other DNA
acacgcctcggcctcccaaa

SEQ ID NO: 28130 - DNA, 20 bp, synthetic construct
  source 1..20: mol_type = other DNA
cacacgcctcggcctcccaa

SEQ ID NO: 28131 - DNA, 20 bp, synthetic construct
  source 1..20: mol_type = other DNA
ccacacgcctcggcctccca

SEQ ID NO: 28132 - DNA, 20 bp, synthetic construct
  source 1..20: mol_type = other DNA
tccacacgcctcggcctccc

SEQ ID NO: 28133 - DNA, 20 bp, synthetic construct
  source 1..20: mol_type = other DNA
atccacacgcctcggcctcc

SEQ ID NO: 28134 - DNA, 20 bp, synthetic construct
  source 1..20: mol_type = other DNA
gatccacacgcctcggcctc

SEQ ID NO: 28135 - DNA, 20 bp, synthetic construct
  source 1..20: mol_type = other DNA
cgatccacacgcctcggcct

SEQ ID NO: 28136 - DNA, 20 bp, synthetic construct
  source 1..20: mol_type = other DNA
gcgatccacacgcctcggcc

SEQ ID NO: 28137 - DNA, 20 bp, synthetic construct
  source 1..20: mol_type = other DNA
ggcgatccacacgcctcggc

SEQ ID NO: 28138 - DNA, 20 bp, synthetic construct
  source 1..20: mol_type = other DNA
aggcgatccacacgcctcgg

SEQ ID NO: 28139 - DNA, 20 bp, synthetic construct
  source 1..20: mol_type = other DNA
caggcgatccacacgcctcg

SEQ ID NO: 28140 - DNA, 20 bp, synthetic construct
  source 1..20: mol_type = other DNA
tcaggcgatccacacgcctc

SEQ ID NO: 28141 - DNA, 20 bp, synthetic construct
  source 1..20: mol_type = other DNA
ctcaggcgatccacacgcct

SEQ ID NO: 28142 - DNA, 20 bp, synthetic construct
  source 1..20: mol_type = other DNA
cctcaggcgatccacacgcc

SEQ ID NO: 28143 - DNA, 20 bp, synthetic construct
  source 1..20: mol_type = other DNA
acctcaggcgatccacacgc

SEQ ID NO: 28144 - DNA, 20 bp, synthetic construct
  source 1..20: mol_type = other DNA
gacctcaggcgatccacacg

SEQ ID NO: 28145 - DNA, 20 bp, synthetic construct
  source 1..20: mol_type = other DNA
tgacctcaggcgatccacac

SEQ ID NO: 28146 - DNA, 20 bp, synthetic construct
  source 1..20: mol_type = other DNA
ctgacctcaggcgatccaca

SEQ ID NO: 28147 - DNA, 20 bp, synthetic construct
  source 1..20: mol_type = other DNA
cctgacctcaggcgatccac

SEQ ID NO: 28148 - DNA, 20 bp, synthetic construct
  source 1..20: mol_type = other DNA
tcctgacctcaggcgatcca

SEQ ID NO: 28149 - DNA, 20 bp, synthetic construct
  source 1..20: mol_type = other DNA
ttcctgacctcaggcgatcc

SEQ ID NO: 28150 - DNA, 20 bp, synthetic construct
  source 1..20: mol_type = other DNA
attcctgacctcaggcgatc

SEQ ID NO: 28151 - DNA, 20 bp, synthetic construct
  source 1..20: mol_type = other DNA
aattcctgacctcaggcgat

SEQ ID NO: 28152 - DNA, 20 bp, synthetic construct
  source 1..20: mol_type = other DNA
aaattcctgacctcaggcga

SEQ ID NO: 28153 - DNA, 20 bp, synthetic construct
  source 1..20: mol_type = other DNA
caaattcctgacctcaggcg

SEQ ID NO: 28154 - DNA, 20 bp, synthetic construct
  source 1..20: mol_type = other DNA
tcaaattcctgacctcaggc

SEQ ID NO: 28155 - DNA, 20 bp, synthetic construct
  source 1..20: mol_type = other DNA
ctcaaattcctgacctcagg

SEQ ID NO: 28156 - DNA, 20 bp, synthetic construct
  source 1..20: mol_type = other DNA
tctcaaattcctgacctcag

SEQ ID NO: 28157 - DNA, 20 bp, synthetic construct
  source 1..20: mol_type = other DNA
gtctcaaattcctgacctca

SEQ ID NO: 28158 - DNA, 20 bp, synthetic construct
  source 1..20: mol_type = other DNA
ggtctcaaattcctgacctc

SEQ ID NO: 28159 - DNA, 20 bp, synthetic construct
  source 1..20: mol_type = other DNA
tggtctcaaattcctgacct

SEQ ID NO: 28160 - DNA, 20 bp, synthetic construct
  source 1..20: mol_type = other DNA
ctggtctcaaattcctgacc

SEQ ID NO: 28161 - DNA, 20 bp, synthetic construct
  source 1..20: mol_type = other DNA
gctggtctcaaattcctgac

SEQ ID NO: 28162 - DNA, 20 bp, synthetic construct
  source 1..20: mol_type = other DNA
ggctggtctcaaattcctga

SEQ ID NO: 28163 - DNA, 20 bp, synthetic construct
  source 1..20: mol_type = other DNA
aggctggtctcaaattcctg

SEQ ID NO: 28164 - DNA, 20 bp, synthetic construct
  source 1..20: mol_type = other DNA
caggctggtctcaaattcct

SEQ ID NO: 28165 - DNA, 20 bp, synthetic construct
  source 1..20: mol_type = other DNA
ccaggctggtctcaaattcc

SEQ ID NO: 28166 - DNA, 20 bp, synthetic construct
  source 1..20: mol_type = other DNA
gccaggctggtctcaaattc

SEQ ID NO: 28167 - DNA, 20 bp, synthetic construct
  source 1..20: mol_type = other DNA
ggccaggctggtctcaaatt

SEQ ID NO: 28168 - DNA, 20 bp, synthetic construct
  source 1..20: mol_type = other DNA
tggccaggctggtctcaaat

SEQ ID NO: 28169 - DNA, 20 bp, synthetic construct
  source 1..20: mol_type = other DNA
ttggccaggctggtctcaaa

SEQ ID NO: 28170 - DNA, 20 bp, synthetic construct
  source 1..20: mol_type = other DNA
gttggccaggctggtctcaa

SEQ ID NO: 28171 - DNA, 20 bp, synthetic construct
  source 1..20: mol_type = other DNA
tgttggccaggctggtctca

SEQ ID NO: 28172 - DNA, 20 bp, synthetic construct
  source 1..20: mol_type = other DNA
atgttggccaggctggtctc

SEQ ID NO: 28173 - DNA, 20 bp, synthetic construct
  source 1..20: mol_type = other DNA
catgttggccaggctggtct

SEQ ID NO: 28174 - DNA, 20 bp, synthetic construct
  source 1..20: mol_type = other DNA
tcatgttggccaggctggtc

SEQ ID NO: 28175 - DNA, 20 bp, synthetic construct
  source 1..20: mol_type = other DNA
gtcatgttggccaggctggt

SEQ ID NO: 28176 - DNA, 20 bp, synthetic construct
  source 1..20: mol_type = other DNA
tgtcatgttggccaggctgg

SEQ ID NO: 28177 - DNA, 20 bp, synthetic construct
  source 1..20: mol_type = other DNA
ttgtcatgttggccaggctg

SEQ ID NO: 28178 - DNA, 20 bp, synthetic construct
  source 1..20: mol_type = other DNA
tttgtcatgttggccaggct

SEQ ID NO: 28179 - DNA, 20 bp, synthetic construct
  source 1..20: mol_type = other DNA
ttttgtcatgttggccaggc

SEQ ID NO: 28180 - DNA, 20 bp, synthetic construct
  source 1..20: mol_type = other DNA
gttttgtcatgttggccagg

SEQ ID NO: 28181 - DNA, 20 bp, synthetic construct
  source 1..20: mol_type = other DNA
agttttgtcatgttggccag

SEQ ID NO: 28182 - DNA, 20 bp, synthetic construct
  source 1..20: mol_type = other DNA
gagttttgtcatgttggcca

SEQ ID NO: 28183 - DNA, 20 bp, synthetic construct
  source 1..20: mol_type = other DNA
ggagttttgtcatgttggcc

SEQ ID NO: 28184 - DNA, 20 bp, synthetic construct
  source 1..20: mol_type = other DNA
cggagttttgtcatgttggc

SEQ ID NO: 28185 - DNA, 20 bp, synthetic construct
  source 1..20: mol_type = other DNA
acggagttttgtcatgttgg

SEQ ID NO: 28186 - DNA, 20 bp, synthetic construct
  source 1..20: mol_type = other DNA
gacggagttttgtcatgttg

SEQ ID NO: 28187 - DNA, 20 bp, synthetic construct
  source 1..20: mol_type = other DNA
agacggagttttgtcatgtt

SEQ ID NO: 28188 - DNA, 20 bp, synthetic construct
  source 1..20: mol_type = other DNA
gagacggagttttgtcatgt

SEQ ID NO: 28189 - DNA, 20 bp, synthetic construct
  source 1..20: mol_type = other DNA
agagacggagttttgtcatg

SEQ ID NO: 28190 - DNA, 20 bp, synthetic construct
  source 1..20: mol_type = other DNA
tagagacggagttttgtcat

SEQ ID NO: 28191 - DNA, 20 bp, synthetic construct
  source 1..20: mol_type = other DNA
gtagagacggagttttgtca

SEQ ID NO: 28192 - DNA, 20 bp, synthetic construct
  source 1..20: mol_type = other DNA
agtagagacggagttttgtc

SEQ ID NO: 28193 - DNA, 20 bp, synthetic construct
  source 1..20: mol_type = other DNA
tagtagagacggagttttgt

SEQ ID NO: 28194 - DNA, 20 bp, synthetic construct
  source 1..20: mol_type = other DNA
ttagtagagacggagttttg

SEQ ID NO: 28195 - DNA, 20 bp, synthetic construct
  source 1..20: mol_type = other DNA
tttagtagagacggagtttt

SEQ ID NO: 28196 - DNA, 20 bp, synthetic construct
  source 1..20: mol_type = other DNA
ttttagtagagacggagttt

SEQ ID NO: 28197 - DNA, 20 bp, synthetic construct
  source 1..20: mol_type = other DNA
tttttagtagagacggagtt

SEQ ID NO: 28198 - DNA, 20 bp, synthetic construct
  source 1..20: mol_type = other DNA
atttttagtagagacggagt

SEQ ID NO: 28199 - DNA, 20 bp, synthetic construct
  source 1..20: mol_type = other DNA
tatttttagtagagacggag

SEQ ID NO: 28200 - DNA, 20 bp, synthetic construct
  source 1..20: mol_type = other DNA
gtatttttagtagagacgga

SEQ ID NO: 28201 - DNA, 20 bp, synthetic construct
  source 1..20: mol_type = other DNA
tgtatttttagtagagacgg

SEQ ID NO: 28202 - DNA, 20 bp, synthetic construct
  source 1..20: mol_type = other DNA
ttgtatttttagtagagacg

SEQ ID NO: 28203 - DNA, 20 bp, synthetic construct
  source 1..20: mol_type = other DNA
tttgtatttttagtagagac

SEQ ID NO: 28204 - DNA, 20 bp, synthetic construct
  source 1..20: mol_type = other DNA
ttttgtatttttagtagaga

SEQ ID NO: 28205 - DNA, 20 bp, synthetic construct
  source 1..20: mol_type = other DNA
tttttgtatttttagtagag

SEQ ID NO: 28206 - DNA, 20 bp, synthetic construct
  source 1..20: mol_type = other DNA
ttttttgtatttttagtaga

SEQ ID NO: 28207 - DNA, 20 bp, synthetic construct
  source 1..20: mol_type = other DNA
cttttttgtatttttagtag

SEQ ID NO: 28208 - DNA, 20 bp, synthetic construct
  source 1..20: mol_type = other DNA
acttttttgtatttttagta

SEQ ID NO: 28209 - DNA, 20 bp, synthetic construct
  source 1..20: mol_type = other DNA
aacttttttgtatttttagt

SEQ ID NO: 28210 - DNA, 20 bp, synthetic construct
  source 1..20: mol_type = other DNA
taacttttttgtatttttag

SEQ ID NO: 28211 - DNA, 20 bp, synthetic construct
  source 1..20: mol_type = other DNA
ctaacttttttgtattttta

SEQ ID NO: 28212 - DNA, 20 bp, synthetic construct
  source 1..20: mol_type = other DNA
gctaacttttttgtattttt

SEQ ID NO: 28213 - DNA, 20 bp, synthetic construct
  source 1..20: mol_type = other DNA
ggctaacttttttgtatttt

SEQ ID NO: 28214 - DNA, 20 bp, synthetic construct
  source 1..20: mol_type = other DNA
tggctaacttttttgtattt

SEQ ID NO: 28215 - DNA, 20 bp, synthetic construct
  source 1..20: mol_type = other DNA
ctggctaacttttttgtatt

SEQ ID NO: 28216 - DNA, 20 bp, synthetic construct
  source 1..20: mol_type = other DNA
cctggctaacttttttgtat

SEQ ID NO: 28217 - DNA, 20 bp, synthetic construct
  source 1..20: mol_type = other DNA
gcctggctaacttttttgta

SEQ ID NO: 28218 - DNA, 20 bp, synthetic construct
  source 1..20: mol_type = other DNA
cgcctggctaacttttttgt

SEQ ID NO: 28219 - DNA, 20 bp, synthetic construct
  source 1..20: mol_type = other DNA
acgcctggctaacttttttg

SEQ ID NO: 28220 - DNA, 20 bp, synthetic construct
  source 1..20: mol_type = other DNA
cacgcctggctaactttttt

SEQ ID NO: 28221 - DNA, 20 bp, synthetic construct
  source 1..20: mol_type = other DNA
ccacgcctggctaacttttt

SEQ ID NO: 28222 - DNA, 20 bp, synthetic construct
  source 1..20: mol_type = other DNA
accacgcctggctaactttt

SEQ ID NO: 28223 - DNA, 20 bp, synthetic construct
  source 1..20: mol_type = other DNA
caccacgcctggctaacttt

SEQ ID NO: 28224 - DNA, 20 bp, synthetic construct
  source 1..20: mol_type = other DNA
tcaccacgcctggctaactt

SEQ ID NO: 28225 - DNA, 20 bp, synthetic construct
  source 1..20: mol_type = other DNA
gtcaccacgcctggctaact

SEQ ID NO: 28226 - DNA, 20 bp, synthetic construct
  source 1..20: mol_type = other DNA
tgtcaccacgcctggctaac

SEQ ID NO: 28227 - DNA, 20 bp, synthetic construct
  source 1..20: mol_type = other DNA
ttgtcaccacgcctggctaa

SEQ ID NO: 28228 - DNA, 20 bp, synthetic construct
  source 1..20: mol_type = other DNA
cttgtcaccacgcctggcta

SEQ ID NO: 28229 - DNA, 20 bp, synthetic construct
  source 1..20: mol_type = other DNA
gcttgtcaccacgcctggct

SEQ ID NO: 28230 - DNA, 20 bp, synthetic construct
  source 1..20: mol_type = other DNA
tgcttgtcaccacgcctggc

SEQ ID NO: 28231 - DNA, 20 bp, synthetic construct
  source 1..20: mol_type = other DNA
gtgcttgtcaccacgcctgg

SEQ ID NO: 28232 - DNA, 20 bp, synthetic construct
  source 1..20: mol_type = other DNA
ggtgcttgtcaccacgcctg

SEQ ID NO: 28233 - DNA, 20 bp, synthetic construct
  source 1..20: mol_type = other DNA
aggtgcttgtcaccacgcct

SEQ ID NO: 28234 - DNA, 20 bp, synthetic construct
  source 1..20: mol_type = other DNA
caggtgcttgtcaccacgcc

SEQ ID NO: 28235 - DNA, 20 bp, synthetic construct
  source 1..20: mol_type = other DNA
acaggtgcttgtcaccacgc

SEQ ID NO: 28236 - DNA, 20 bp, synthetic construct
  source 1..20: mol_type = other DNA
tacaggtgcttgtcaccacg

SEQ ID NO: 28237 - DNA, 20 bp, synthetic construct
  source 1..20: mol_type = other DNA
ttacaggtgcttgtcaccac

SEQ ID NO: 28238 - DNA, 20 bp, synthetic construct
  source 1..20: mol_type = other DNA
attacaggtgcttgtcacca

SEQ ID NO: 28239 - DNA, 20 bp, synthetic construct
  source 1..20: mol_type = other DNA
gattacaggtgcttgtcacc

SEQ ID NO: 28240 - DNA, 20 bp, synthetic construct
  source 1..20: mol_type = other DNA
ggattacaggtgcttgtcac

SEQ ID NO: 28241 - DNA, 20 bp, synthetic construct
  source 1..20: mol_type = other DNA
gggattacaggtgcttgtca

SEQ ID NO: 28242 - DNA, 20 bp, synthetic construct
  source 1..20: mol_type = other DNA
tgggattacaggtgcttgtc

SEQ ID NO: 28243 - DNA, 20 bp, synthetic construct
  source 1..20: mol_type = other DNA
ctgggattacaggtgcttgt

SEQ ID NO: 28244 - DNA, 20 bp, synthetic construct
  source 1..20: mol_type = other DNA
gctgggattacaggtgcttg

SEQ ID NO: 28245 - DNA, 20 bp, synthetic construct
  source 1..20: mol_type = other DNA
agctgggattacaggtgctt

SEQ ID NO: 28246 - DNA, 20 bp, synthetic construct
  source 1..20: mol_type = other DNA
tagctgggattacaggtgct

SEQ ID NO: 28247 - DNA, 20 bp, synthetic construct
  source 1..20: mol_type = other DNA
gtagctgggattacaggtgc

SEQ ID NO: 28248 - DNA, 20 bp, synthetic construct
  source 1..20: mol_type = other DNA
agtagctgggattacaggtg

SEQ ID NO: 28249 - DNA, 20 bp, synthetic construct
  source 1..20: mol_type = other DNA
gagtagctgggattacaggt

SEQ ID NO: 28250 - DNA, 20 bp, synthetic construct
  source 1..20: mol_type = other DNA
tgagtagctgggattacagg

SEQ ID NO: 28251 - DNA, 20 bp, synthetic construct
  source 1..20: mol_type = other DNA
ctgagtagctgggattacag

SEQ ID NO: 28252 - DNA, 20 bp, synthetic construct
  source 1..20: mol_type = other DNA
actgagtagctgggattaca

SEQ ID NO: 28253 - DNA, 20 bp, synthetic construct
  source 1..20: mol_type = other DNA
tactgagtagctgggattac

SEQ ID NO: 28254 - DNA, 20 bp, synthetic construct
  source 1..20: mol_type = other DNA
ctactgagtagctgggatta

SEQ ID NO: 28255 - DNA, 20 bp, synthetic construct
  source 1..20: mol_type = other DNA
cctactgagtagctgggatt

SEQ ID NO: 28256 - DNA, 20 bp, synthetic construct
  source 1..20: mol_type = other DNA
gcctactgagtagctgggat

SEQ ID NO: 28257 - DNA, 20 bp, synthetic construct
  source 1..20: mol_type = other DNA
agcctactgagtagctggga

SEQ ID NO: 28258 - DNA, 20 bp, synthetic construct
  source 1..20: mol_type = other DNA
cagcctactgagtagctggg

SEQ ID NO: 28259 - DNA, 20 bp, synthetic construct
  source 1..20: mol_type = other DNA
tcagcctactgagtagctgg

SEQ ID NO: 28260 - DNA, 20 bp, synthetic construct
  source 1..20: mol_type = other DNA
ctcagcctactgagtagctg

SEQ ID NO: 28261 - DNA, 20 bp, synthetic construct
  source 1..20: mol_type = other DNA
cctcagcctactgagtagct

SEQ ID NO: 28262 - DNA, 20 bp, synthetic construct
  source 1..20: mol_type = other DNA
gcctcagcctactgagtagc

SEQ ID NO: 28263 - DNA, 20 bp, synthetic construct
  source 1..20: mol_type = other DNA
tgcctcagcctactgagtag

SEQ ID NO: 28264 - DNA, 20 bp, synthetic construct
  source 1..20: mol_type = other DNA
ttgcctcagcctactgagta

SEQ ID NO: 28265 - DNA, 20 bp, synthetic construct
  source 1..20: mol_type = other DNA
cttgcctcagcctactgagt

SEQ ID NO: 28266 - DNA, 20 bp, synthetic construct
  source 1..20: mol_type = other DNA
ccttgcctcagcctactgag

SEQ ID NO: 28267 - DNA, 20 bp, synthetic construct
  source 1..20: mol_type = other DNA
tccttgcctcagcctactga

SEQ ID NO: 28268 - DNA, 20 bp, synthetic construct
  source 1..20: mol_type = other DNA
ctccttgcctcagcctactg

SEQ ID NO: 28269 - DNA, 20 bp, synthetic construct
  source 1..20: mol_type = other DNA
tctccttgcctcagcctact

SEQ ID NO: 28270 - DNA, 20 bp, synthetic construct
  source 1..20: mol_type = other DNA
ttctccttgcctcagcctac

SEQ ID NO: 28271 - DNA, 20 bp, synthetic construct
  source 1..20: mol_type = other DNA
attctccttgcctcagccta

SEQ ID NO: 28272 - DNA, 20 bp, synthetic construct
  source 1..20: mol_type = other DNA
gattctccttgcctcagcct

SEQ ID NO: 28273 - DNA, 20 bp, synthetic construct
  source 1..20: mol_type = other DNA
cgattctccttgcctcagcc

SEQ ID NO: 28274 - DNA, 20 bp, synthetic construct
  source 1..20: mol_type = other DNA
gcgattctccttgcctcagc

SEQ ID NO: 28275 - DNA, 20 bp, synthetic construct
  source 1..20: mol_type = other DNA
agcgattctccttgcctcag

SEQ ID NO: 28276 - DNA, 20 bp, synthetic construct
  source 1..20: mol_type = other DNA
aagcgattctccttgcctca

SEQ ID NO: 28277 - DNA, 20 bp, synthetic construct
  source 1..20: mol_type = other DNA
caagcgattctccttgcctc

SEQ ID NO: 28278 - DNA, 20 bp, synthetic construct
  source 1..20: mol_type = other DNA
tcaagcgattctccttgcct

SEQ ID NO: 28279 - DNA, 20 bp, synthetic construct
  source 1..20: mol_type = other DNA
ttcaagcgattctccttgcc

SEQ ID NO: 28280 - DNA, 20 bp, synthetic construct
  source 1..20: mol_type = other DNA
gttcaagcgattctccttgc

SEQ ID NO: 28281 - DNA, 20 bp, synthetic construct
  source 1..20: mol_type = other DNA
ggttcaagcgattctccttg

SEQ ID NO: 28282 - DNA, 20 bp, synthetic construct
  source 1..20: mol_type = other DNA
aggttcaagcgattctcctt

SEQ ID NO: 28283 - DNA, 20 bp, synthetic construct
  source 1..20: mol_type = other DNA
caggttcaagcgattctcct

SEQ ID NO: 28284 - DNA, 20 bp, synthetic construct
  source 1..20: mol_type = other DNA
ccaggttcaagcgattctcc

SEQ ID NO: 28285 - DNA, 20 bp, synthetic construct
  source 1..20: mol_type = other DNA
cccaggttcaagcgattctc

SEQ ID NO: 28286 - DNA, 20 bp, synthetic construct
  source 1..20: mol_type = other DNA
tcccaggttcaagcgattct

SEQ ID NO: 28287 - DNA, 20 bp, synthetic construct
  source 1..20: mol_type = other DNA
ctcccaggttcaagcgattc

SEQ ID NO: 28288 - DNA, 20 bp, synthetic construct
  source 1..20: mol_type = other DNA
cctcccaggttcaagcgatt

SEQ ID NO: 28289 - DNA, 20 bp, synthetic construct
  source 1..20: mol_type = other DNA
acctcccaggttcaagcgat

SEQ ID NO: 28290 - DNA, 20 bp, synthetic construct
  source 1..20: mol_type = other DNA
cacctcccaggttcaagcga

SEQ ID NO: 28291 - DNA, 20 bp, synthetic construct
  source 1..20: mol_type = other DNA
ccacctcccaggttcaagcg

SEQ ID NO: 28292 - DNA, 20 bp, synthetic construct
  source 1..20: mol_type = other DNA
tccacctcccaggttcaagc

SEQ ID NO: 28293 - DNA, 20 bp, synthetic construct
  source 1..20: mol_type = other DNA
ctccacctcccaggttcaag

SEQ ID NO: 28294 - DNA, 20 bp, synthetic construct
  source 1..20: mol_type = other DNA
cctccacctcccaggttcaa

SEQ ID NO: 28295 - DNA, 20 bp, synthetic construct
  source 1..20: mol_type = other DNA
acctccacctcccaggttca

SEQ ID NO: 28296 - DNA, 20 bp, synthetic construct
  source 1..20: mol_type = other DNA
aacctccacctcccaggttc

SEQ ID NO: 28297 - DNA, 20 bp, synthetic construct
  source 1..20: mol_type = other DNA
caacctccacctcccaggtt

SEQ ID NO: 28298 - DNA, 20 bp, synthetic construct
  source 1..20: mol_type = other DNA
gcaacctccacctcccaggt

SEQ ID NO: 28299 - DNA, 20 bp, synthetic construct
  source 1..20: mol_type = other DNA
tgcaacctccacctcccagg

SEQ ID NO: 28300 - DNA, 20 bp, synthetic construct
  source 1..20: mol_type = other DNA
ctgcaacctccacctcccag

SEQ ID NO: 28301 - DNA, 20 bp, synthetic construct
  source 1..20: mol_type = other DNA
actgcaacctccacctccca

SEQ ID NO: 28302 - DNA, 20 bp, synthetic construct
  source 1..20: mol_type = other DNA
cactgcaacctccacctccc

SEQ ID NO: 28303 - DNA, 20 bp, synthetic construct
  source 1..20: mol_type = other DNA
tcactgcaacctccacctcc

SEQ ID NO: 28304 - DNA, 20 bp, synthetic construct
  source 1..20: mol_type = other DNA
ctcactgcaacctccacctc

SEQ ID NO: 28305 - DNA, 20 bp, synthetic construct
  source 1..20: mol_type = other DNA
gctcactgcaacctccacct

SEQ ID NO: 28306 - DNA, 20 bp, synthetic construct
  source 1..20: mol_type = other DNA
agctcactgcaacctccacc

SEQ ID NO: 28307 - DNA, 20 bp, synthetic construct
  source 1..20: mol_type = other DNA
cagctcactgcaacctccac

SEQ ID NO: 28308 - DNA, 20 bp, synthetic construct
  source 1..20: mol_type = other DNA
tcagctcactgcaacctcca

SEQ ID NO: 28309 - DNA, 20 bp, synthetic construct
  source 1..20: mol_type = other DNA
ctcagctcactgcaacctcc

SEQ ID NO: 28310 - DNA, 20 bp, synthetic construct
  source 1..20: mol_type = other DNA
tctcagctcactgcaacctc

SEQ ID NO: 28311 - DNA, 20 bp, synthetic construct
  source 1..20: mol_type = other DNA
atctcagctcactgcaacct

SEQ ID NO: 28312 - DNA, 20 bp, synthetic construct
  source 1..20: mol_type = other DNA
gatctcagctcactgcaacc

SEQ ID NO: 28313 - DNA, 20 bp, synthetic construct
  source 1..20: mol_type = other DNA
cgatctcagctcactgcaac

SEQ ID NO: 28314 - DNA, 20 bp, synthetic construct
  source 1..20: mol_type = other DNA
gcgatctcagctcactgcaa

SEQ ID NO: 28315 - DNA, 20 bp, synthetic construct
  source 1..20: mol_type = other DNA
agcgatctcagctcactgca

SEQ ID NO: 28316 - DNA, 20 bp, synthetic construct
  source 1..20: mol_type = other DNA
gagcgatctcagctcactgc

SEQ ID NO: 28317 - DNA, 20 bp, synthetic construct
  source 1..20: mol_type = other DNA
ggagcgatctcagctcactg

SEQ ID NO: 28318 - DNA, 20 bp, synthetic construct
  source 1..20: mol_type = other DNA
tggagcgatctcagctcact

SEQ ID NO: 28319 - DNA, 20 bp, synthetic construct
  source 1..20: mol_type = other DNA
atggagcgatctcagctcac

SEQ ID NO: 28320 - DNA, 20 bp, synthetic construct
  source 1..20: mol_type = other DNA
aatggagcgatctcagctca

SEQ ID NO: 28321 - DNA, 20 bp, synthetic construct
  source 1..20: mol_type = other DNA
caatggagcgatctcagctc

SEQ ID NO: 28322 - DNA, 20 bp, synthetic construct
  source 1..20: mol_type = other DNA
gcaatggagcgatctcagct

SEQ ID NO: 28323 - DNA, 20 bp, synthetic construct
  source 1..20: mol_type = other DNA
tgcaatggagcgatctcagc

SEQ ID NO: 28324 - DNA, 20 bp, synthetic construct
  source 1..20: mol_type = other DNA
gtgcaatggagcgatctcag

SEQ ID NO: 28325 - DNA, 20 bp, synthetic construct
  source 1..20: mol_type = other DNA
agtgcaatggagcgatctca

SEQ ID NO: 28326 - DNA, 20 bp, synthetic construct
  source 1..20: mol_type = other DNA
gagtgcaatggagcgatctc

SEQ ID NO: 28327 - DNA, 20 bp, synthetic construct
  source 1..20: mol_type = other DNA
ggagtgcaatggagcgatct

SEQ ID NO: 28328 - DNA, 20 bp, synthetic construct
  source 1..20: mol_type = other DNA
tggagtgcaatggagcgatc

SEQ ID NO: 28329 - DNA, 20 bp, synthetic construct
  source 1..20: mol_type = other DNA
ctggagtgcaatggagcgat

SEQ ID NO: 28330 - DNA, 20 bp, synthetic construct
  source 1..20: mol_type = other DNA
gctggagtgcaatggagcga

SEQ ID NO: 28331 - DNA, 20 bp, synthetic construct
  source 1..20: mol_type = other DNA
cgctggagtgcaatggagcg

SEQ ID NO: 28332 - DNA, 20 bp, synthetic construct
  source 1..20: mol_type = other DNA
acgctggagtgcaatggagc

SEQ ID NO: 28333 - DNA, 20 bp, synthetic construct
  source 1..20: mol_type = other DNA
tacgctggagtgcaatggag

SEQ ID NO: 28334 - DNA, 20 bp, synthetic construct
  source 1..20: mol_type = other DNA
ctacgctggagtgcaatgga

SEQ ID NO: 28335 - DNA, 20 bp, synthetic construct
  source 1..20: mol_type = other DNA
cctacgctggagtgcaatgg

SEQ ID NO: 28336 - DNA, 20 bp, synthetic construct
  source 1..20: mol_type = other DNA
gcctacgctggagtgcaatg

SEQ ID NO: 28337 - DNA, 20 bp, synthetic construct
  source 1..20: mol_type = other DNA
tgcctacgctggagtgcaat

SEQ ID NO: 28338 - DNA, 20 bp, synthetic construct
  source 1..20: mol_type = other DNA
ttgcctacgctggagtgcaa

SEQ ID NO: 28339 - DNA, 20 bp, synthetic construct
  source 1..20: mol_type = other DNA
gttgcctacgctggagtgca

SEQ ID NO: 28340 - DNA, 20 bp, synthetic construct
  source 1..20: mol_type = other DNA
tgttgcctacgctggagtgc

SEQ ID NO: 28341 - DNA, 20 bp, synthetic construct
  source 1..20: mol_type = other DNA
ttgttgcctacgctggagtg

SEQ ID NO: 28342 - DNA, 20 bp, synthetic construct
  source 1..20: mol_type = other DNA
tttgttgcctacgctggagt

SEQ ID NO: 28343 - DNA, 20 bp, synthetic construct
  source 1..20: mol_type = other DNA
ctttgttgcctacgctggag

SEQ ID NO: 28344 - DNA, 20 bp, synthetic construct
  source 1..20: mol_type = other DNA
gctttgttgcctacgctgga

SEQ ID NO: 28345 - DNA, 20 bp, synthetic construct
  source 1..20: mol_type = other DNA
tgctttgttgcctacgctgg

SEQ ID NO: 28346 - DNA, 20 bp, synthetic construct
  source 1..20: mol_type = other DNA
ttgctttgttgcctacgctg

SEQ ID NO: 28347 - DNA, 20 bp, synthetic construct
  source 1..20: mol_type = other DNA
cttgctttgttgcctacgct

SEQ ID NO: 28348 - DNA, 20 bp, synthetic construct
  source 1..20: mol_type = other DNA
tcttgctttgttgcctacgc

SEQ ID NO: 28349 - DNA, 20 bp, synthetic construct
  source 1..20: mol_type = other DNA
gtcttgctttgttgcctacg

SEQ ID NO: 28350 - DNA, 20 bp, synthetic construct
  source 1..20: mol_type = other DNA
agtcttgctttgttgcctac

SEQ ID NO: 28351 - DNA, 20 bp, synthetic construct
  source 1..20: mol_type = other DNA
gagtcttgctttgttgccta

SEQ ID NO: 28352 - DNA, 20 bp, synthetic construct
  source 1..20: mol_type = other DNA
ggagtcttgctttgttgcct

SEQ ID NO: 28353 - DNA, 20 bp, synthetic construct
  source 1..20: mol_type = other DNA
cggagtcttgctttgttgcc

SEQ ID NO: 28354 - DNA, 20 bp, synthetic construct
  source 1..20: mol_type = other DNA
acggagtcttgctttgttgc

SEQ ID NO: 28355 - DNA, 20 bp, synthetic construct
  source 1..20: mol_type = other DNA
gacggagtcttgctttgttg

SEQ ID NO: 28356 - DNA, 20 bp, synthetic construct
  source 1..20: mol_type = other DNA
agacggagtcttgctttgtt

SEQ ID NO: 28357 - DNA, 20 bp, synthetic construct
  source 1..20: mol_type = other DNA
gagacggagtcttgctttgt

SEQ ID NO: 28358 - DNA, 20 bp, synthetic construct
  source 1..20: mol_type = other DNA
tgagacggagtcttgctttg

SEQ ID NO: 28359 - DNA, 20 bp, synthetic construct
  source 1..20: mol_type = other DNA
ttgagacggagtcttgcttt

SEQ ID NO: 28360 - DNA, 20 bp, synthetic construct
  source 1..20: mol_type = other DNA
tttgagacggagtcttgctt

SEQ ID NO: 28361 - DNA, 20 bp, synthetic construct
  source 1..20: mol_type = other DNA
ttttgagacggagtcttgct

SEQ ID NO: 28362 - DNA, 20 bp, synthetic construct
  source 1..20: mol_type = other DNA
tttttgagacggagtcttgc

SEQ ID NO: 28363 - DNA, 20 bp, synthetic construct
  source 1..20: mol_type = other DNA
ttttttgagacggagtcttg

SEQ ID NO: 28364 - DNA, 20 bp, synthetic construct
  source 1..20: mol_type = other DNA
attttttgagacggagtctt

SEQ ID NO: 28365 - DNA, 20 bp, synthetic construct
  source 1..20: mol_type = other DNA
tattttttgagacggagtct

SEQ ID NO: 28366 - DNA, 20 bp, synthetic construct
  source 1..20: mol_type = other DNA
ttattttttgagacggagtc

SEQ ID NO: 28367 - DNA, 20 bp, synthetic construct
  source 1..20: mol_type = other DNA
tttattttttgagacggagt

SEQ ID NO: 28368 - DNA, 20 bp, synthetic construct
  source 1..20: mol_type = other DNA
atttattttttgagacggag

SEQ ID NO: 28369 - DNA, 20 bp, synthetic construct
  source 1..20: mol_type = other DNA
tatttattttttgagacgga

SEQ ID NO: 28370 - DNA, 20 bp, synthetic construct
  source 1..20: mol_type = other DNA
ttatttattttttgagacgg

SEQ ID NO: 28371 - DNA, 20 bp, synthetic construct
  source 1..20: mol_type = other DNA
tttatttattttttgagacg

SEQ ID NO: 28372 - DNA, 20 bp, synthetic construct
  source 1..20: mol_type = other DNA
atttatttattttttgagac

SEQ ID NO: 28373 - DNA, 20 bp, synthetic construct
  source 1..20: mol_type = other DNA
tatttatttattttttgaga

SEQ ID NO: 28374 - DNA, 20 bp, synthetic construct
  source 1..20: mol_type = other DNA
ttatttatttattttttgag

SEQ ID NO: 28375 - DNA, 20 bp, synthetic construct
  source 1..20: mol_type = other DNA
tttatttatttattttttga

SEQ ID NO: 28376 - DNA, 20 bp, synthetic construct
  source 1..20: mol_type = other DNA
atttatttatttattttttg

SEQ ID NO: 28377 - DNA, 20 bp, synthetic construct
  source 1..20: mol_type = other DNA
tatttatttatttatttttt

SEQ ID NO: 28378 - DNA, 20 bp, synthetic construct
  source 1..20: mol_type = other DNA
ttatttatttatttattttt

SEQ ID NO: 28379 - DNA, 20 bp, synthetic construct
  source 1..20: mol_type = other DNA
tttatttatttatttatttt

SEQ ID NO: 28380 - DNA, 20 bp, synthetic construct
  source 1..20: mol_type = other DNA
atttatttatttatttattt

SEQ ID NO: 28381 - DNA, 20 bp, synthetic construct
  source 1..20: mol_type = other DNA
tatttatttatttatttatt

SEQ ID NO: 28382 - DNA, 20 bp, synthetic construct
  source 1..20: mol_type = other DNA
ttatttatttatttatttat

SEQ ID NO: 28383 - DNA, 20 bp, synthetic construct
  source 1..20: mol_type = other DNA
tttatttatttatttattta

SEQ ID NO: 28384 - DNA, 20 bp, synthetic construct
  source 1..20: mol_type = other DNA
ttttatttatttatttattt

SEQ ID NO: 28385 - DNA, 20 bp, synthetic construct
  source 1..20: mol_type = other DNA
tttttatttatttatttatt

SEQ ID NO: 28386 - DNA, 20 bp, synthetic construct
  source 1..20: mol_type = other DNA
atttttatttatttatttat

SEQ ID NO: 28387 - DNA, 20 bp, synthetic construct
  source 1..20: mol_type = other DNA
tatttttatttatttattta

SEQ ID NO: 28388 - DNA, 20 bp, synthetic construct
  source 1..20: mol_type = other DNA
ttatttttatttatttattt

SEQ ID NO: 28389 - DNA, 20 bp, synthetic construct
  source 1..20: mol_type = other DNA
attatttttatttatttatt

SEQ ID NO: 28390 - DNA, 20 bp, synthetic construct
  source 1..20: mol_type = other DNA
tattatttttatttatttat

SEQ ID NO: 28391 - DNA, 20 bp, synthetic construct
  source 1..20: mol_type = other DNA
ttattatttttatttattta

SEQ ID NO: 28392 - DNA, 20 bp, synthetic construct
  source 1..20: mol_type = other DNA
gttattatttttatttattt

SEQ ID NO: 28393 - DNA, 20 bp, synthetic construct
  source 1..20: mol_type = other DNA
tgttattatttttatttatt

SEQ ID NO: 28394 - DNA, 20 bp, synthetic construct
  source 1..20: mol_type = other DNA
ttgttattatttttatttat

SEQ ID NO: 28395 - DNA, 20 bp, synthetic construct
  source 1..20: mol_type = other DNA
attgttattatttttattta

SEQ ID NO: 28396 - DNA, 20 bp, synthetic construct
  source 1..20: mol_type = other DNA
tattgttattatttttattt

SEQ ID NO: 28397 - DNA, 20 bp, synthetic construct
  source 1..20: mol_type = other DNA
ttattgttattatttttatt

SEQ ID NO: 28398 - DNA, 20 bp, synthetic construct
  source 1..20: mol_type = other DNA
attattgttattatttttat

SEQ ID NO: 28399 - DNA, 20 bp, synthetic construct
  source 1..20: mol_type = other DNA
cattattgttattattttta

SEQ ID NO: 28400 - DNA, 20 bp, synthetic construct
  source 1..20: mol_type = other DNA
tcattattgttattattttt

SEQ ID NO: 28401 - DNA, 20 bp, synthetic construct
  source 1..20: mol_type = other DNA
ttcattattgttattatttt

SEQ ID NO: 28402 - DNA, 20 bp, synthetic construct
  source 1..20: mol_type = other DNA
cttcattattgttattattt

SEQ ID NO: 28403 - DNA, 20 bp, synthetic construct
  source 1..20: mol_type = other DNA
tcttcattattgttattatt

SEQ ID NO: 28404 - DNA, 20 bp, synthetic construct
  source 1..20: mol_type = other DNA
ttcttcattattgttattat

SEQ ID NO: 28405 - DNA, 20 bp, synthetic construct
  source 1..20: mol_type = other DNA
tttcttcattattgttatta

SEQ ID NO: 28406 - DNA, 20 bp, synthetic construct
  source 1..20: mol_type = other DNA
ttttcttcattattgttatt

SEQ ID NO: 28407 - DNA, 20 bp, synthetic construct
  source 1..20: mol_type = other DNA
gttttcttcattattgttat

SEQ ID NO: 28408 - DNA, 20 bp, synthetic construct
  source 1..20: mol_type = other DNA
tgttttcttcattattgtta

SEQ ID NO: 28409 - DNA, 20 bp, synthetic construct
  source 1..20: mol_type = other DNA
ttgttttcttcattattgtt

SEQ ID NO: 28410 - DNA, 20 bp, synthetic construct
  source 1..20: mol_type = other DNA
attgttttcttcattattgt

SEQ ID NO: 28411 - DNA, 20 bp, synthetic construct
  source 1..20: mol_type = other DNA
gattgttttcttcattattg

SEQ ID NO: 28412 - DNA, 20 bp, synthetic construct
  source 1..20: mol_type = other DNA
ggattgttttcttcattatt

SEQ ID NO: 28413 - DNA, 20 bp, synthetic construct
  source 1..20: mol_type = other DNA
cggattgttttcttcattat

SEQ ID NO: 28414 - DNA, 20 bp, synthetic construct
  source 1..20: mol_type = other DNA
ccggattgttttcttcatta

SEQ ID NO: 28415 - DNA, 20 bp, synthetic construct
  source 1..20: mol_type = other DNA
accggattgttttcttcatt

SEQ ID NO: 28416 - DNA, 20 bp, synthetic construct
  source 1..20: mol_type = other DNA
caccggattgttttcttcat

SEQ ID NO: 28417 - DNA, 20 bp, synthetic construct
  source 1..20: mol_type = other DNA
tcaccggattgttttcttca

SEQ ID NO: 28418 - DNA, 20 bp, synthetic construct
  source 1..20: mol_type = other DNA
atcaccggattgttttcttc

SEQ ID NO: 28419 - DNA, 20 bp, synthetic construct
  source 1..20: mol_type = other DNA
aatcaccggattgttttctt

SEQ ID NO: 28420 - DNA, 20 bp, synthetic construct
  source 1..20: mol_type = other DNA
taatcaccggattgttttct

SEQ ID NO: 28421 - DNA, 20 bp, synthetic construct
  source 1..20: mol_type = other DNA
ataatcaccggattgttttc

SEQ ID NO: 28422 - DNA, 20 bp, synthetic construct
  source 1..20: mol_type = other DNA
aataatcaccggattgtttt

SEQ ID NO: 28423 - DNA, 20 bp, synthetic construct
  source 1..20: mol_type = other DNA
caataatcaccggattgttt

SEQ ID NO: 28424 - DNA, 20 bp, synthetic construct
  source 1..20: mol_type = other DNA
acaataatcaccggattgtt

SEQ ID NO: 28425 - DNA, 20 bp, synthetic construct
  source 1..20: mol_type = other DNA
gacaataatcaccggattgt

SEQ ID NO: 28426 - DNA, 20 bp, synthetic construct
  source 1..20: mol_type = other DNA
tgacaataatcaccggattg

SEQ ID NO: 28427 - DNA, 20 bp, synthetic construct
  source 1..20: mol_type = other DNA
ctgacaataatcaccggatt

SEQ ID NO: 28428 - DNA, 20 bp, synthetic construct
  source 1..20: mol_type = other DNA
gctgacaataatcaccggat

SEQ ID NO: 28429 - DNA, 20 bp, synthetic construct
  source 1..20: mol_type = other DNA
tgctgacaataatcaccgga

SEQ ID NO: 28430 - DNA, 20 bp, synthetic construct
  source 1..20: mol_type = other DNA
ttgctgacaataatcaccgg

SEQ ID NO: 28431 - DNA, 20 bp, synthetic construct
  source 1..20: mol_type = other DNA
attgctgacaataatcaccg

SEQ ID NO: 28432 - DNA, 20 bp, synthetic construct
  source 1..20: mol_type = other DNA
tattgctgacaataatcacc

SEQ ID NO: 28433 - DNA, 20 bp, synthetic construct
  source 1..20: mol_type = other DNA
ttattgctgacaataatcac

SEQ ID NO: 28434 - DNA, 20 bp, synthetic construct
  source 1..20: mol_type = other DNA
tttattgctgacaataatca

SEQ ID NO: 28435 - DNA, 20 bp, synthetic construct
  source 1..20: mol_type = other DNA
ttttattgctgacaataatc

SEQ ID NO: 28436 - DNA, 20 bp, synthetic construct
  source 1..20: mol_type = other DNA
attttattgctgacaataat

SEQ ID NO: 28437 - DNA, 20 bp, synthetic construct
  source 1..20: mol_type = other DNA
aattttattgctgacaataa

SEQ ID NO: 28438 - DNA, 20 bp, synthetic construct
  source 1..20: mol_type = other DNA
aaattttattgctgacaata

SEQ ID NO: 28439 - DNA, 20 bp, synthetic construct
  source 1..20: mol_type = other DNA
gaaattttattgctgacaat

SEQ ID NO: 28440 - DNA, 20 bp, synthetic construct
  source 1..20: mol_type = other DNA
agaaattttattgctgacaa

SEQ ID NO: 28441 - DNA, 20 bp, synthetic construct
  source 1..20: mol_type = other DNA
aagaaattttattgctgaca

SEQ ID NO: 28442 - DNA, 20 bp, synthetic construct
  source 1..20: mol_type = other DNA
gaagaaattttattgctgac

SEQ ID NO: 28443 - DNA, 20 bp, synthetic construct
  source 1..20: mol_type = other DNA
tgaagaaattttattgctga

SEQ ID NO: 28444 - DNA, 20 bp, synthetic construct
  source 1..20: mol_type = other DNA
ttgaagaaattttattgctg

SEQ ID NO: 28445 - DNA, 20 bp, synthetic construct
  source 1..20: mol_type = other DNA
attgaagaaattttattgct

SEQ ID NO: 28446 - DNA, 20 bp, synthetic construct
  source 1..20: mol_type = other DNA
gattgaagaaattttattgc

SEQ ID NO: 28447 - DNA, 20 bp, synthetic construct
  source 1..20: mol_type = other DNA
tgattgaagaaattttattg

SEQ ID NO: 28448 - DNA, 20 bp, synthetic construct
  source 1..20: mol_type = other DNA
ttgattgaagaaattttatt

SEQ ID NO: 28449 - DNA, 20 bp, synthetic construct
  source 1..20: mol_type = other DNA
gttgattgaagaaattttat

SEQ ID NO: 28450 - DNA, 20 bp, synthetic construct
  source 1..20: mol_type = other DNA
ggttgattgaagaaatttta

SEQ ID NO: 28451 - DNA, 20 bp, synthetic construct
  source 1..20: mol_type = other DNA
tggttgattgaagaaatttt

SEQ ID NO: 28452 - DNA, 20 bp, synthetic construct
  source 1..20: mol_type = other DNA
atggttgattgaagaaattt

SEQ ID NO: 28453 - DNA, 20 bp, synthetic construct
  source 1..20: mol_type = other DNA
catggttgattgaagaaatt

SEQ ID NO: 28454 - DNA, 20 bp, synthetic construct
  source 1..20: mol_type = other DNA
gcatggttgattgaagaaat

SEQ ID NO: 28455 - DNA, 20 bp, synthetic construct
  source 1..20: mol_type = other DNA
agcatggttgattgaagaaa

SEQ ID NO: 28456 - DNA, 20 bp, synthetic construct
  source 1..20: mol_type = other DNA
aagcatggttgattgaagaa

SEQ ID NO: 28457 - DNA, 20 bp, synthetic construct
  source 1..20: mol_type = other DNA
aaagcatggttgattgaaga

SEQ ID NO: 28458 - DNA, 20 bp, synthetic construct
  source 1..20: mol_type = other DNA
taaagcatggttgattgaag

SEQ ID NO: 28459 - DNA, 20 bp, synthetic construct
  source 1..20: mol_type = other DNA
ctaaagcatggttgattgaa

SEQ ID NO: 28460 - DNA, 20 bp, synthetic construct
  source 1..20: mol_type = other DNA
actaaagcatggttgattga

SEQ ID NO: 28461 - DNA, 20 bp, synthetic construct
  source 1..20: mol_type = other DNA
gactaaagcatggttgattg

SEQ ID NO: 28462 - DNA, 20 bp, synthetic construct
  source 1..20: mol_type = other DNA
ggactaaagcatggttgatt

SEQ ID NO: 28463 - DNA, 20 bp, synthetic construct
  source 1..20: mol_type = other DNA
aggactaaagcatggttgat

SEQ ID NO: 28464 - DNA, 20 bp, synthetic construct
  source 1..20: mol_type = other DNA
caggactaaagcatggttga

SEQ ID NO: 28465 - DNA, 20 bp, synthetic construct
  source 1..20: mol_type = other DNA
ccaggactaaagcatggttg

SEQ ID NO: 28466 - DNA, 20 bp, synthetic construct
  source 1..20: mol_type = other DNA
gccaggactaaagcatggtt

SEQ ID NO: 28467 - DNA, 20 bp, synthetic construct
  source 1..20: mol_type = other DNA
tgccaggactaaagcatggt

SEQ ID NO: 28468 - DNA, 20 bp, synthetic construct
  source 1..20: mol_type = other DNA
ctgccaggactaaagcatgg

SEQ ID NO: 28469 - DNA, 20 bp, synthetic construct
  source 1..20: mol_type = other DNA
actgccaggactaaagcatg

SEQ ID NO: 28470 - DNA, 20 bp, synthetic construct
  source 1..20: mol_type = other DNA
aactgccaggactaaagcat

SEQ ID NO: 28471 - DNA, 20 bp, synthetic construct
  source 1..20: mol_type = other DNA
gaactgccaggactaaagca

SEQ ID NO: 28472 - DNA, 20 bp, synthetic construct
  source 1..20: mol_type = other DNA
agaactgccaggactaaagc

SEQ ID NO: 28473 - DNA, 20 bp, synthetic construct
  source 1..20: mol_type = other DNA
gagaactgccaggactaaag

SEQ ID NO: 28474 - DNA, 20 bp, synthetic construct
  source 1..20: mol_type = other DNA
agagaactgccaggactaaa

SEQ ID NO: 28475 - DNA, 20 bp, synthetic construct
  source 1..20: mol_type = other DNA
tagagaactgccaggactaa

SEQ ID NO: 28476 - DNA, 20 bp, synthetic construct
  source 1..20: mol_type = other DNA
atagagaactgccaggacta

SEQ ID NO: 28477 - DNA, 20 bp, synthetic construct
  source 1..20: mol_type = other DNA
gatagagaactgccaggact

SEQ ID NO: 28478 - DNA, 20 bp, synthetic construct
  source 1..20: mol_type = other DNA
tgatagagaactgccaggac

SEQ ID NO: 28479 - DNA, 20 bp, synthetic construct
  source 1..20: mol_type = other DNA
ctgatagagaactgccagga

SEQ ID NO: 28480 - DNA, 20 bp, synthetic construct
  source 1..20: mol_type = other DNA
actgatagagaactgccagg

SEQ ID NO: 28481 - DNA, 20 bp, synthetic construct
  source 1..20: mol_type = other DNA
cactgatagagaactgccag

SEQ ID NO: 28482 - DNA, 20 bp, synthetic construct
  source 1..20: mol_type = other DNA
tcactgatagagaactgcca

SEQ ID NO: 28483 - DNA, 20 bp, synthetic construct
  source 1..20: mol_type = other DNA
ctcactgatagagaactgcc

SEQ ID NO: 28484 - DNA, 20 bp, synthetic construct
  source 1..20: mol_type = other DNA
actcactgatagagaactgc

SEQ ID NO: 28485 - DNA, 20 bp, synthetic construct
  source 1..20: mol_type = other DNA
aactcactgatagagaactg

SEQ ID NO: 28486 - DNA, 20 bp, synthetic construct
  source 1..20: mol_type = other DNA
aaactcactgatagagaact

SEQ ID NO: 28487 - DNA, 20 bp, synthetic construct
  source 1..20: mol_type = other DNA
gaaactcactgatagagaac

SEQ ID NO: 28488 - DNA, 20 bp, synthetic construct
  source 1..20: mol_type = other DNA
tgaaactcactgatagagaa

SEQ ID NO: 28489 - DNA, 20 bp, synthetic construct
  source 1..20: mol_type = other DNA
ttgaaactcactgatagaga

SEQ ID NO: 28490 - DNA, 20 bp, synthetic construct
  source 1..20: mol_type = other DNA
attgaaactcactgatagag

SEQ ID NO: 28491 - DNA, 20 bp, synthetic construct
  source 1..20: mol_type = other DNA
gattgaaactcactgataga

SEQ ID NO: 28492 - DNA, 20 bp, synthetic construct
  source 1..20: mol_type = other DNA
tgattgaaactcactgatag

SEQ ID NO: 28493 - DNA, 20 bp, synthetic construct
  source 1..20: mol_type = other DNA
ttgattgaaactcactgata

SEQ ID NO: 28494 - DNA, 20 bp, synthetic construct
  source 1..20: mol_type = other DNA
tttgattgaaactcactgat

SEQ ID NO: 28495 - DNA, 20 bp, synthetic construct
  source 1..20: mol_type = other DNA
ttttgattgaaactcactga

SEQ ID NO: 28496 - DNA, 20 bp, synthetic construct
  source 1..20: mol_type = other DNA
tttttgattgaaactcactg

SEQ ID NO: 28497 - DNA, 20 bp, synthetic construct
  source 1..20: mol_type = other DNA
ctttttgattgaaactcact

SEQ ID NO: 28498 - DNA, 20 bp, synthetic construct
  source 1..20: mol_type = other DNA
actttttgattgaaactcac

SEQ ID NO: 28499 - DNA, 20 bp, synthetic construct
  source 1..20: mol_type = other DNA
aactttttgattgaaactca

SEQ ID NO: 28500 - DNA, 20 bp, synthetic construct
  source 1..20: mol_type = other DNA
aaactttttgattgaaactc

SEQ ID NO: 28501 - DNA, 20 bp, synthetic construct
  source 1..20: mol_type = other DNA
caaactttttgattgaaact

SEQ ID NO: 28502 - DNA, 20 bp, synthetic construct
  source 1..20: mol_type = other DNA
acaaactttttgattgaaac

SEQ ID NO: 28503 - DNA, 20 bp, synthetic construct
  source 1..20: mol_type = other DNA
aacaaactttttgattgaaa

SEQ ID NO: 28504 - DNA, 20 bp, synthetic construct
  source 1..20: mol_type = other DNA
aaacaaactttttgattgaa

SEQ ID NO: 28505 - DNA, 20 bp, synthetic construct
  source 1..20: mol_type = other DNA
taaacaaactttttgattga

SEQ ID NO: 28506 - DNA, 20 bp, synthetic construct
  source 1..20: mol_type = other DNA
ataaacaaactttttgattg

SEQ ID NO: 28507 - DNA, 20 bp, synthetic construct
  source 1..20: mol_type = other DNA
tataaacaaactttttgatt

SEQ ID NO: 28508 - DNA, 20 bp, synthetic construct
  source 1..20: mol_type = other DNA
ttataaacaaactttttgat

SEQ ID NO: 28509 - DNA, 20 bp, synthetic construct
  source 1..20: mol_type = other DNA
attataaacaaactttttga

SEQ ID NO: 28510 - DNA, 20 bp, synthetic construct
  source 1..20: mol_type = other DNA
aattataaacaaactttttg

SEQ ID NO: 28511 - DNA, 20 bp, synthetic construct
  source 1..20: mol_type = other DNA
aaattataaacaaacttttt

SEQ ID NO: 28512 - DNA, 20 bp, synthetic construct
  source 1..20: mol_type = other DNA
aaaattataaacaaactttt

SEQ ID NO: 28513 - DNA, 20 bp, synthetic construct
  source 1..20: mol_type = other DNA
aaaaattataaacaaacttt

SEQ ID NO: 28514 - DNA, 20 bp, synthetic construct
  source 1..20: mol_type = other DNA
aaaaaattataaacaaactt

SEQ ID NO: 28515 - DNA, 20 bp, synthetic construct
  source 1..20: mol_type = other DNA
aaaaaaattataaacaaact

SEQ ID NO: 28516 - DNA, 20 bp, synthetic construct
  source 1..20: mol_type = other DNA
aaaaaaaattataaacaaac

SEQ ID NO: 28517 - DNA, 20 bp, synthetic construct
  source 1..20: mol_type = other DNA
aaaaaaaaattataaacaaa

SEQ ID NO: 28518 - DNA, 20 bp, synthetic construct
  source 1..20: mol_type = other DNA
aaaaaaaaaattataaacaa

SEQ ID NO: 28519 - DNA, 20 bp, synthetic construct
  source 1..20: mol_type = other DNA
aaaaaaaaaaattataaaca

SEQ ID NO: 28520 - DNA, 20 bp, synthetic construct
  source 1..20: mol_type = other DNA
aaaaaaaaaaaattataaac

SEQ ID NO: 28521 - DNA, 20 bp, synthetic construct
  source 1..20: mol_type = other DNA
aaaaaaaaaaaaattataaa

SEQ ID NO: 28522 - DNA, 20 bp, synthetic construct
  source 1..20: mol_type = other DNA
taaaaaaaaaaaaattataa

SEQ ID NO: 28523 - DNA, 20 bp, synthetic construct
  source 1..20: mol_type = other DNA
ttaaaaaaaaaaaaattata

SEQ ID NO: 28524 - DNA, 20 bp, synthetic construct
  source 1..20: mol_type = other DNA
tttaaaaaaaaaaaaattat

SEQ ID NO: 28525 - DNA, 20 bp, synthetic construct
  source 1..20: mol_type = other DNA
ttttaaaaaaaaaaaaatta

SEQ ID NO: 28526 - DNA, 20 bp, synthetic construct
  source 1..20: mol_type = other DNA
attttaaaaaaaaaaaaatt

SEQ ID NO: 28527 - DNA, 20 bp, synthetic construct
  source 1..20: mol_type = other DNA
aattttaaaaaaaaaaaaat

SEQ ID NO: 28528 - DNA, 20 bp, synthetic construct
  source 1..20: mol_type = other DNA
aaattttaaaaaaaaaaaaa

SEQ ID NO: 28529 - DNA, 20 bp, synthetic construct
  source 1..20: mol_type = other DNA
aaaattttaaaaaaaaaaaa

SEQ ID NO: 28530 - DNA, 20 bp, synthetic construct
  source 1..20: mol_type = other DNA
caaaattttaaaaaaaaaaa

SEQ ID NO: 28531 - DNA, 20 bp, synthetic construct
  source 1..20: mol_type = other DNA
tcaaaattttaaaaaaaaaa

SEQ ID NO: 28532 - DNA, 20 bp, synthetic construct
  source 1..20: mol_type = other DNA
ttcaaaattttaaaaaaaaa

SEQ ID NO: 28533 - DNA, 20 bp, synthetic construct
  source 1..20: mol_type = other DNA
tttcaaaattttaaaaaaaa

SEQ ID NO: 28534 - DNA, 20 bp, synthetic construct
  source 1..20: mol_type = other DNA
atttcaaaattttaaaaaaa

SEQ ID NO: 28535 - DNA, 20 bp, synthetic construct
  source 1..20: mol_type = other DNA
aatttcaaaattttaaaaaa

SEQ ID NO: 28536 - DNA, 20 bp, synthetic construct
  source 1..20: mol_type = other DNA
aaatttcaaaattttaaaaa

SEQ ID NO: 28537 - DNA, 20 bp, synthetic construct
  source 1..20: mol_type = other DNA
caaatttcaaaattttaaaa

SEQ ID NO: 28538 - DNA, 20 bp, synthetic construct
  source 1..20: mol_type = other DNA
ccaaatttcaaaattttaaa

SEQ ID NO: 28539 - DNA, 20 bp, synthetic construct
  source 1..20: mol_type = other DNA
tccaaatttcaaaattttaa

SEQ ID NO: 28540 - DNA, 20 bp, synthetic construct
  source 1..20: mol_type = other DNA
ttccaaatttcaaaatttta

SEQ ID NO: 28541 - DNA, 20 bp, synthetic construct
  source 1..20: mol_type = other DNA
tttccaaatttcaaaatttt

SEQ ID NO: 28542 - DNA, 20 bp, synthetic construct
  source 1..20: mol_type = other DNA
gtttccaaatttcaaaattt

SEQ ID NO: 28543 - DNA, 20 bp, synthetic construct
  source 1..20: mol_type = other DNA
tgtttccaaatttcaaaatt

SEQ ID NO: 28544 - DNA, 20 bp, synthetic construct
  source 1..20: mol_type = other DNA
ttgtttccaaatttcaaaat

SEQ ID NO: 28545 - DNA, 20 bp, synthetic construct
  source 1..20: mol_type = other DNA
gttgtttccaaatttcaaaa

SEQ ID NO: 28546 - DNA, 20 bp, synthetic construct
  source 1..20: mol_type = other DNA
tgttgtttccaaatttcaaa

SEQ ID NO: 28547 - DNA, 20 bp, synthetic construct
  source 1..20: mol_type = other DNA
atgttgtttccaaatttcaa

SEQ ID NO: 28548 - DNA, 20 bp, synthetic construct
  source 1..20: mol_type = other DNA
gatgttgtttccaaatttca

SEQ ID NO: 28549 - DNA, 20 bp, synthetic construct
  source 1..20: mol_type = other DNA
tgatgttgtttccaaatttc

SEQ ID NO: 28550 - DNA, 20 bp, synthetic construct
  source 1..20: mol_type = other DNA
atgatgttgtttccaaattt

SEQ ID NO: 28551 - DNA, 20 bp, synthetic construct
  source 1..20: mol_type = other DNA
tatgatgttgtttccaaatt

SEQ ID NO: 28552 - DNA, 20 bp, synthetic construct
  source 1..20: mol_type = other DNA
ttatgatgttgtttccaaat

SEQ ID NO: 28553 - DNA, 20 bp, synthetic construct
  source 1..20: mol_type = other DNA
tttatgatgttgtttccaaa

SEQ ID NO: 28554 - DNA, 20 bp, synthetic construct
  source 1..20: mol_type = other DNA
atttatgatgttgtttccaa

SEQ ID NO: 28555 - DNA, 20 bp, synthetic construct
  source 1..20: mol_type = other DNA
catttatgatgttgtttcca

SEQ ID NO: 28556 - DNA, 20 bp, synthetic construct
  source 1..20: mol_type = other DNA
tcatttatgatgttgtttcc

SEQ ID NO: 28557 - DNA, 20 bp, synthetic construct
  source 1..20: mol_type = other DNA
atcatttatgatgttgtttc

SEQ ID NO: 28558 - DNA, 20 bp, synthetic construct
  source 1..20: mol_type = other DNA
catcatttatgatgttgttt

SEQ ID NO: 28559 - DNA, 20 bp, synthetic construct
  source 1..20: mol_type = other DNA
ccatcatttatgatgttgtt

SEQ ID NO: 28560 - DNA, 20 bp, synthetic construct
  source 1..20: mol_type = other DNA
accatcatttatgatgttgt

SEQ ID NO: 28561 - DNA, 20 bp, synthetic construct
  source 1..20: mol_type = other DNA
aaccatcatttatgatgttg

SEQ ID NO: 28562 - DNA, 20 bp, synthetic construct
  source 1..20: mol_type = other DNA
taaccatcatttatgatgtt

SEQ ID NO: 28563 - DNA, 20 bp, synthetic construct
  source 1..20: mol_type = other DNA
ctaaccatcatttatgatgt

SEQ ID NO: 28564 - DNA, 20 bp, synthetic construct
  source 1..20: mol_type = other DNA
actaaccatcatttatgatg

SEQ ID NO: 28565 - DNA, 20 bp, synthetic construct
  source 1..20: mol_type = other DNA
aactaaccatcatttatgat

SEQ ID NO: 28566 - DNA, 20 bp, synthetic construct
  source 1..20: mol_type = other DNA
aaactaaccatcatttatga

SEQ ID NO: 28567 - DNA, 20 bp, synthetic construct
  source 1..20: mol_type = other DNA
aaaactaaccatcatttatg

SEQ ID NO: 28568 - DNA, 20 bp, synthetic construct
  source 1..20: mol_type = other DNA
gaaaactaaccatcatttat

SEQ ID NO: 28569 - DNA, 20 bp, synthetic construct
  source 1..20: mol_type = other DNA
agaaaactaaccatcattta

SEQ ID NO: 28570 - DNA, 20 bp, synthetic construct
  source 1..20: mol_type = other DNA
cagaaaactaaccatcattt

SEQ ID NO: 28571 - DNA, 20 bp, synthetic construct
  source 1..20: mol_type = other DNA
gcagaaaactaaccatcatt

SEQ ID NO: 28572 - DNA, 20 bp, synthetic construct
  source 1..20: mol_type = other DNA
tgcagaaaactaaccatcat

SEQ ID NO: 28573 - DNA, 20 bp, synthetic construct
  source 1..20: mol_type = other DNA
ctgcagaaaactaaccatca

SEQ ID NO: 28574 - DNA, 20 bp, synthetic construct
  source 1..20: mol_type = other DNA
gctgcagaaaactaaccatc

SEQ ID NO: 28575 - DNA, 20 bp, synthetic construct
  source 1..20: mol_type = other DNA
agctgcagaaaactaaccat

SEQ ID NO: 28576 - DNA, 20 bp, synthetic construct
  source 1..20: mol_type = other DNA
gagctgcagaaaactaacca

SEQ ID NO: 28577 - DNA, 20 bp, synthetic construct
  source 1..20: mol_type = other DNA
ggagctgcagaaaactaacc

SEQ ID NO: 28578 - DNA, 20 bp, synthetic construct
  source 1..20: mol_type = other DNA
gggagctgcagaaaactaac

SEQ ID NO: 28579 - DNA, 20 bp, synthetic construct
  source 1..20: mol_type = other DNA
agggagctgcagaaaactaa

SEQ ID NO: 28580 - DNA, 20 bp, synthetic construct
  source 1..20: mol_type = other DNA
tagggagctgcagaaaacta

SEQ ID NO: 28581 - DNA, 20 bp, synthetic construct
  source 1..20: mol_type = other DNA
atagggagctgcagaaaact

SEQ ID NO: 28582 - DNA, 20 bp, synthetic construct
  source 1..20: mol_type = other DNA
aatagggagctgcagaaaac

SEQ ID NO: 28583 - DNA, 20 bp, synthetic construct
  source 1..20: mol_type = other DNA
aaatagggagctgcagaaaa

SEQ ID NO: 28584 - DNA, 20 bp, synthetic construct
  source 1..20: mol_type = other DNA
aaaatagggagctgcagaaa

SEQ ID NO: 28585 - DNA, 20 bp, synthetic construct
  source 1..20: mol_type = other DNA
caaaatagggagctgcagaa

SEQ ID NO: 28586 - DNA, 20 bp, synthetic construct
  source 1..20: mol_type = other DNA
ccaaaatagggagctgcaga

SEQ ID NO: 28587 - DNA, 20 bp, synthetic construct
  source 1..20: mol_type = other DNA
gccaaaatagggagctgcag

SEQ ID NO: 28588 - DNA, 20 bp, synthetic construct
  source 1..20: mol_type = other DNA
tgccaaaatagggagctgca

SEQ ID NO: 28589 - DNA, 20 bp, synthetic construct
  source 1..20: mol_type = other DNA
ctgccaaaatagggagctgc

SEQ ID NO: 28590 - DNA, 20 bp, synthetic construct
  source 1..20: mol_type = other DNA
tctgccaaaatagggagctg

SEQ ID NO: 28591 - DNA, 20 bp, synthetic construct
  source 1..20: mol_type = other DNA
atctgccaaaatagggagct

SEQ ID NO: 28592 - DNA, 20 bp, synthetic construct
  source 1..20: mol_type = other DNA
tatctgccaaaatagggagc

SEQ ID NO: 28593 - DNA, 20 bp, synthetic construct
  source 1..20: mol_type = other DNA
ctatctgccaaaatagggag

SEQ ID NO: 28594 - DNA, 20 bp, synthetic construct
  source 1..20: mol_type = other DNA
actatctgccaaaataggga

SEQ ID NO: 28595 - DNA, 20 bp, synthetic construct
  source 1..20: mol_type = other DNA
gactatctgccaaaataggg

SEQ ID NO: 28596 - DNA, 20 bp, synthetic construct
  source 1..20: mol_type = other DNA
agactatctgccaaaatagg

SEQ ID NO: 28597 - DNA, 20 bp, synthetic construct
  source 1..20: mol_type = other DNA
cagactatctgccaaaatag

SEQ ID NO: 28598 - DNA, 20 bp, synthetic construct
  source 1..20: mol_type = other DNA
acagactatctgccaaaata

SEQ ID NO: 28599 - DNA, 20 bp, synthetic construct
  source 1..20: mol_type = other DNA
aacagactatctgccaaaat

SEQ ID NO: 28600 - DNA, 20 bp, synthetic construct
  source 1..20: mol_type = other DNA
caacagactatctgccaaaa

SEQ ID NO: 28601 - DNA, 20 bp, synthetic construct
  source 1..20: mol_type = other DNA
acaacagactatctgccaaa

SEQ ID NO: 28602 - DNA, 20 bp, synthetic construct
  source 1..20: mol_type = other DNA
aacaacagactatctgccaa

SEQ ID NO: 28603 - DNA, 20 bp, synthetic construct
  source 1..20: mol_type = other DNA
taacaacagactatctgcca

SEQ ID NO: 28604 - DNA, 20 bp, synthetic construct
  source 1..20: mol_type = other DNA
gtaacaacagactatctgcc

SEQ ID NO: 28605 - DNA, 20 bp, synthetic construct
  source 1..20: mol_type = other DNA
agtaacaacagactatctgc

SEQ ID NO: 28606 - DNA, 20 bp, synthetic construct
  source 1..20: mol_type = other DNA
gagtaacaacagactatctg

SEQ ID NO: 28607 - DNA, 20 bp, synthetic construct
  source 1..20: mol_type = other DNA
tgagtaacaacagactatct

SEQ ID NO: 28608 - DNA, 20 bp, synthetic construct
  source 1..20: mol_type = other DNA
atgagtaacaacagactatc

SEQ ID NO: 28609 - DNA, 20 bp, synthetic construct
  source 1..20: mol_type = other DNA
tatgagtaacaacagactat

SEQ ID NO: 28610 - DNA, 20 bp, synthetic construct
  source 1..20: mol_type = other DNA
ttatgagtaacaacagacta

SEQ ID NO: 28611 - DNA, 20 bp, synthetic construct
  source 1..20: mol_type = other DNA
attatgagtaacaacagact

SEQ ID NO: 28612 - DNA, 20 bp, synthetic construct
  source 1..20: mol_type = other DNA
aattatgagtaacaacagac

SEQ ID NO: 28613 - DNA, 20 bp, synthetic construct
  source 1..20: mol_type = other DNA
taattatgagtaacaacaga

SEQ ID NO: 28614 - DNA, 20 bp, synthetic construct
  source 1..20: mol_type = other DNA
ttaattatgagtaacaacag

SEQ ID NO: 28615 - DNA, 20 bp, synthetic construct
  source 1..20: mol_type = other DNA
attaattatgagtaacaaca

SEQ ID NO: 28616 - DNA, 20 bp, synthetic construct
  source 1..20: mol_type = other DNA
aattaattatgagtaacaac

SEQ ID NO: 28617 - DNA, 20 bp, synthetic construct
  source 1..20: mol_type = other DNA
aaattaattatgagtaacaa

SEQ ID NO: 28618 - DNA, 20 bp, synthetic construct
  source 1..20: mol_type = other DNA
caaattaattatgagtaaca

SEQ ID NO: 28619 - DNA, 20 bp, synthetic construct
  source 1..20: mol_type = other DNA
tcaaattaattatgagtaac

SEQ ID NO: 28620 - DNA, 20 bp, synthetic construct
  source 1..20: mol_type = other DNA
ttcaaattaattatgagtaa

SEQ ID NO: 28621 - DNA, 20 bp, synthetic construct
  source 1..20: mol_type = other DNA
gttcaaattaattatgagta

SEQ ID NO: 28622 - DNA, 20 bp, synthetic construct
  source 1..20: mol_type = other DNA
agttcaaattaattatgagt

SEQ ID NO: 28623 - DNA, 20 bp, synthetic construct
  source 1..20: mol_type = other DNA
tagttcaaattaattatgag

SEQ ID NO: 28624 - DNA, 20 bp, synthetic construct
  source 1..20: mol_type = other DNA
ttagttcaaattaattatga

SEQ ID NO: 28625 - DNA, 20 bp, synthetic construct
  source 1..20: mol_type = other DNA
tttagttcaaattaattatg

SEQ ID NO: 28626 - DNA, 20 bp, synthetic construct
  source 1..20: mol_type = other DNA
ttttagttcaaattaattat

SEQ ID NO: 28627 - DNA, 20 bp, synthetic construct
  source 1..20: mol_type = other DNA
tttttagttcaaattaatta

SEQ ID NO: 28628 - DNA, 20 bp, synthetic construct
  source 1..20: mol_type = other DNA
ctttttagttcaaattaatt

SEQ ID NO: 28629 - DNA, 20 bp, synthetic construct
  source 1..20: mol_type = other DNA
actttttagttcaaattaat

SEQ ID NO: 28630 - DNA, 20 bp, synthetic construct
  source 1..20: mol_type = other DNA
tactttttagttcaaattaa

SEQ ID NO: 28631 - DNA, 20 bp, synthetic construct
  source 1..20: mol_type = other DNA
ctactttttagttcaaatta

SEQ ID NO: 28632 - DNA, 20 bp, synthetic construct
  source 1..20: mol_type = other DNA
actactttttagttcaaatt

SEQ ID NO: 28633 - DNA, 20 bp, synthetic construct
  source 1..20: mol_type = other DNA
cactactttttagttcaaat

SEQ ID NO: 28634 - DNA, 20 bp, synthetic construct
  source 1..20: mol_type = other DNA
acactactttttagttcaaa

SEQ ID NO: 28635 - DNA, 20 bp, synthetic construct
  source 1..20: mol_type = other DNA
aacactactttttagttcaa

SEQ ID NO: 28636 - DNA, 20 bp, synthetic construct
  source 1..20: mol_type = other DNA
caacactactttttagttca

SEQ ID NO: 28637 - DNA, 20 bp, synthetic construct
  source 1..20: mol_type = other DNA
acaacactactttttagttc

SEQ ID NO: 28638 - DNA, 20 bp, synthetic construct
  source 1..20: mol_type = other DNA
tacaacactactttttagtt

SEQ ID NO: 28639 - DNA, 20 bp, synthetic construct
  source 1..20: mol_type = other DNA
gtacaacactactttttagt

SEQ ID NO: 28640 - DNA, 20 bp, synthetic construct
  source 1..20: mol_type = other DNA
cgtacaacactactttttag

SEQ ID NO: 28641 - DNA, 20 bp, synthetic construct
  source 1..20: mol_type = other DNA
tcgtacaacactacttttta

SEQ ID NO: 28642 - DNA, 20 bp, synthetic construct
  source 1..20: mol_type = other DNA
atcgtacaacactacttttt

SEQ ID NO: 28643 - DNA, 20 bp, synthetic construct
  source 1..20: mol_type = other DNA
tatcgtacaacactactttt

SEQ ID NO: 28644 - DNA, 20 bp, synthetic construct
  source 1..20: mol_type = other DNA
atatcgtacaacactacttt

SEQ ID NO: 28645 - DNA, 20 bp, synthetic construct
  source 1..20: mol_type = other DNA
gatatcgtacaacactactt

SEQ ID NO: 28646 - DNA, 20 bp, synthetic construct
  source 1..20: mol_type = other DNA
tgatatcgtacaacactact

SEQ ID NO: 28647 - DNA, 20 bp, synthetic construct
  source 1..20: mol_type = other DNA
atgatatcgtacaacactac

SEQ ID NO: 28648 - DNA, 20 bp, synthetic construct
  source 1..20: mol_type = other DNA
catgatatcgtacaacacta

SEQ ID NO: 28649 - DNA, 20 bp, synthetic construct
  source 1..20: mol_type = other DNA
ccatgatatcgtacaacact

SEQ ID NO: 28650 - DNA, 20 bp, synthetic construct
  source 1..20: mol_type = other DNA
cccatgatatcgtacaacac

SEQ ID NO: 28651 - DNA, 20 bp, synthetic construct
  source 1..20: mol_type = other DNA
gcccatgatatcgtacaaca

SEQ ID NO: 28652 - DNA, 20 bp, synthetic construct
  source 1..20: mol_type = other DNA
agcccatgatatcgtacaac

SEQ ID NO: 28653 - DNA, 20 bp, synthetic construct
  source 1..20: mol_type = other DNA
cagcccatgatatcgtacaa

SEQ ID NO: 28654 - DNA, 20 bp, synthetic construct
  source 1..20: mol_type = other DNA
acagcccatgatatcgtaca

SEQ ID NO: 28655 - DNA, 20 bp, synthetic construct
  source 1..20: mol_type = other DNA
cacagcccatgatatcgtac

SEQ ID NO: 28656 - DNA, 20 bp, synthetic construct
  source 1..20: mol_type = other DNA
tcacagcccatgatatcgta

SEQ ID NO: 28657 - DNA, 20 bp, synthetic construct
  source 1..20: mol_type = other DNA
ttcacagcccatgatatcgt

SEQ ID NO: 28658 - DNA, 20 bp, synthetic construct
  source 1..20: mol_type = other DNA
attcacagcccatgatatcg

SEQ ID NO: 28659 - DNA, 20 bp, synthetic construct
  source 1..20: mol_type = other DNA
cattcacagcccatgatatc

SEQ ID NO: 28660 - DNA, 20 bp, synthetic construct
  source 1..20: mol_type = other DNA
acattcacagcccatgatat

SEQ ID NO: 28661 - DNA, 20 bp, synthetic construct
  source 1..20: mol_type = other DNA
cacattcacagcccatgata

SEQ ID NO: 28662 - DNA, 20 bp, synthetic construct
  source 1..20: mol_type = other DNA
acacattcacagcccatgat

SEQ ID NO: 28663 - DNA, 20 bp, synthetic construct
  source 1..20: mol_type = other DNA
aacacattcacagcccatga

SEQ ID NO: 28664 - DNA, 20 bp, synthetic construct
  source 1..20: mol_type = other DNA
aaacacattcacagcccatg

SEQ ID NO: 28665 - DNA, 20 bp, synthetic construct
  source 1..20: mol_type = other DNA
caaacacattcacagcccat

SEQ ID NO: 28666 - DNA, 20 bp, synthetic construct
  source 1..20: mol_type = other DNA
acaaacacattcacagccca

SEQ ID NO: 28667 - DNA, 20 bp, synthetic construct
  source 1..20: mol_type = other DNA
cacaaacacattcacagccc

SEQ ID NO: 28668 - DNA, 20 bp, synthetic construct
  source 1..20: mol_type = other DNA
tcacaaacacattcacagcc

SEQ ID NO: 28669 - DNA, 20 bp, synthetic construct
  source 1..20: mol_type = other DNA
gtcacaaacacattcacagc

SEQ ID NO: 28670 - DNA, 20 bp, synthetic construct
  source 1..20: mol_type = other DNA
agtcacaaacacattcacag

SEQ ID NO: 28671 - DNA, 20 bp, synthetic construct
  source 1..20: mol_type = other DNA
aagtcacaaacacattcaca

SEQ ID NO: 28672 - DNA, 20 bp, synthetic construct
  source 1..20: mol_type = other DNA
caagtcacaaacacattcac

SEQ ID NO: 28673 - DNA, 20 bp, synthetic construct
  source 1..20: mol_type = other DNA
tcaagtcacaaacacattca

SEQ ID NO: 28674 - DNA, 20 bp, synthetic construct
  source 1..20: mol_type = other DNA
atcaagtcacaaacacattc

SEQ ID NO: 28675 - DNA, 20 bp, synthetic construct
  source 1..20: mol_type = other DNA
gatcaagtcacaaacacatt

SEQ ID NO: 28676 - DNA, 20 bp, synthetic construct
  source 1..20: mol_type = other DNA
agatcaagtcacaaacacat

SEQ ID NO: 28677 - DNA, 20 bp, synthetic construct
  source 1..20: mol_type = other DNA
cagatcaagtcacaaacaca

SEQ ID NO: 28678 - DNA, 20 bp, synthetic construct
  source 1..20: mol_type = other DNA
tcagatcaagtcacaaacac

SEQ ID NO: 28679 - DNA, 20 bp, synthetic construct
  source 1..20: mol_type = other DNA
ctcagatcaagtcacaaaca

SEQ ID NO: 28680 - DNA, 20 bp, synthetic construct
  source 1..20: mol_type = other DNA
tctcagatcaagtcacaaac

SEQ ID NO: 28681 - DNA, 20 bp, synthetic construct
  source 1..20: mol_type = other DNA
ttctcagatcaagtcacaaa

SEQ ID NO: 28682 - DNA, 20 bp, synthetic construct
  source 1..20: mol_type = other DNA
gttctcagatcaagtcacaa

SEQ ID NO: 28683 - DNA, 20 bp, synthetic construct
  source 1..20: mol_type = other DNA
ggttctcagatcaagtcaca

SEQ ID NO: 28684 - DNA, 20 bp, synthetic construct
  source 1..20: mol_type = other DNA
gggttctcagatcaagtcac

SEQ ID NO: 28685 - DNA, 20 bp, synthetic construct
  source 1..20: mol_type = other DNA
tgggttctcagatcaagtca

SEQ ID NO: 28686 - DNA, 20 bp, synthetic construct
  source 1..20: mol_type = other DNA
gtgggttctcagatcaagtc

SEQ ID NO: 28687 - DNA, 20 bp, synthetic construct
  source 1..20: mol_type = other DNA
tgtgggttctcagatcaagt

SEQ ID NO: 28688 - DNA, 20 bp, synthetic construct
  source 1..20: mol_type = other DNA
gtgtgggttctcagatcaag

SEQ ID NO: 28689 - DNA, 20 bp, synthetic construct
  source 1..20: mol_type = other DNA
tgtgtgggttctcagatcaa

SEQ ID NO: 28690 - DNA, 20 bp, synthetic construct
  source 1..20: mol_type = other DNA
gtgtgtgggttctcagatca

SEQ ID NO: 28691 - DNA, 20 bp, synthetic construct
  source 1..20: mol_type = other DNA
ggtgtgtgggttctcagatc

SEQ ID NO: 28692 - DNA, 20 bp, synthetic construct
  source 1..20: mol_type = other DNA
tggtgtgtgggttctcagat

SEQ ID NO: 28693 - DNA, 20 bp, synthetic construct
  source 1..20: mol_type = other DNA
gtggtgtgtgggttctcaga

SEQ ID NO: 28694 - DNA, 20 bp, synthetic construct
  source 1..20: mol_type = other DNA
agtggtgtgtgggttctcag

SEQ ID NO: 28695 - DNA, 20 bp, synthetic construct
  source 1..20: mol_type = other DNA
aagtggtgtgtgggttctca

SEQ ID NO: 28696 - DNA, 20 bp, synthetic construct
  source 1..20: mol_type = other DNA
taagtggtgtgtgggttctc

SEQ ID NO: 28697 - DNA, 20 bp, synthetic construct
  source 1..20: mol_type = other DNA
ctaagtggtgtgtgggttct

SEQ ID NO: 28698 - DNA, 20 bp, synthetic construct
  source 1..20: mol_type = other DNA
cctaagtggtgtgtgggttc

SEQ ID NO: 28699 - DNA, 20 bp, synthetic construct
  source 1..20: mol_type = other DNA
tcctaagtggtgtgtgggtt

SEQ ID NO: 28700 - DNA, 20 bp, synthetic construct
  source 1..20: mol_type = other DNA
atcctaagtggtgtgtgggt

SEQ ID NO: 28701 - DNA, 20 bp, synthetic construct
  source 1..20: mol_type = other DNA
catcctaagtggtgtgtggg

SEQ ID NO: 28702 - DNA, 20 bp, synthetic construct
  source 1..20: mol_type = other DNA
gcatcctaagtggtgtgtgg

SEQ ID NO: 28703 - DNA, 20 bp, synthetic construct
  source 1..20: mol_type = other DNA
agcatcctaagtggtgtgtg

SEQ ID NO: 28704 - DNA, 20 bp, synthetic construct
  source 1..20: mol_type = other DNA
aagcatcctaagtggtgtgt

SEQ ID NO: 28705 - DNA, 20 bp, synthetic construct
  source 1..20: mol_type = other DNA
gaagcatcctaagtggtgtg

SEQ ID NO: 28706 - DNA, 20 bp, synthetic construct
  source 1..20: mol_type = other DNA
agaagcatcctaagtggtgt

SEQ ID NO: 28707 - DNA, 20 bp, synthetic construct
  source 1..20: mol_type = other DNA
cagaagcatcctaagtggtg

SEQ ID NO: 28708 - DNA, 20 bp, synthetic construct
  source 1..20: mol_type = other DNA
acagaagcatcctaagtggt

SEQ ID NO: 28709 - DNA, 20 bp, synthetic construct
  source 1..20: mol_type = other DNA
tacagaagcatcctaagtgg

SEQ ID NO: 28710 - DNA, 20 bp, synthetic construct
  source 1..20: mol_type = other DNA
ctacagaagcatcctaagtg

SEQ ID NO: 28711 - DNA, 20 bp, synthetic construct
  source 1..20: mol_type = other DNA
cctacagaagcatcctaagt

SEQ ID NO: 28712 - DNA, 20 bp, synthetic construct
  source 1..20: mol_type = other DNA
tcctacagaagcatcctaag

SEQ ID NO: 28713 - DNA, 20 bp, synthetic construct
  source 1..20: mol_type = other DNA
ttcctacagaagcatcctaa

SEQ ID NO: 28714 - DNA, 20 bp, synthetic construct
  source 1..20: mol_type = other DNA
tttcctacagaagcatccta

SEQ ID NO: 28715 - DNA, 20 bp, synthetic construct
  source 1..20: mol_type = other DNA
ttttcctacagaagcatcct

SEQ ID NO: 28716 - DNA, 20 bp, synthetic construct
  source 1..20: mol_type = other DNA
attttcctacagaagcatcc

SEQ ID NO: 28717 - DNA, 20 bp, synthetic construct
  source 1..20: mol_type = other DNA
aattttcctacagaagcatc

SEQ ID NO: 28718 - DNA, 20 bp, synthetic construct
  source 1..20: mol_type = other DNA
taattttcctacagaagcat

SEQ ID NO: 28719 - DNA, 20 bp, synthetic construct
  source 1..20: mol_type = other DNA
ctaattttcctacagaagca

SEQ ID NO: 28720 - DNA, 20 bp, synthetic construct
  source 1..20: mol_type = other DNA
tctaattttcctacagaagc

SEQ ID NO: 28721 - DNA, 20 bp, synthetic construct
  source 1..20: mol_type = other DNA
ctctaattttcctacagaag

SEQ ID NO: 28722 - DNA, 20 bp, synthetic construct
  source 1..20: mol_type = other DNA
actctaattttcctacagaa

SEQ ID NO: 28723 - DNA, 20 bp, synthetic construct
  source 1..20: mol_type = other DNA
tactctaattttcctacaga

SEQ ID NO: 28724 - DNA, 20 bp, synthetic construct
  source 1..20: mol_type = other DNA
atactctaattttcctacag

SEQ ID NO: 28725 - DNA, 20 bp, synthetic construct
  source 1..20: mol_type = other DNA
catactctaattttcctaca

SEQ ID NO: 28726 - DNA, 20 bp, synthetic construct
  source 1..20: mol_type = other DNA
ccatactctaattttcctac

SEQ ID NO: 28727 - DNA, 20 bp, synthetic construct
  source 1..20: mol_type = other DNA
tccatactctaattttccta

SEQ ID NO: 28728 - DNA, 20 bp, synthetic construct
  source 1..20: mol_type = other DNA
ttccatactctaattttcct

SEQ ID NO: 28729 - DNA, 20 bp, synthetic construct
  source 1..20: mol_type = other DNA
gttccatactctaattttcc

SEQ ID NO: 28730 - DNA, 20 bp, synthetic construct
  source 1..20: mol_type = other DNA
agttccatactctaattttc

SEQ ID NO: 28731 - DNA, 20 bp, synthetic construct
  source 1..20: mol_type = other DNA
gagttccatactctaatttt

SEQ ID NO: 28732 - DNA, 20 bp, synthetic construct
  source 1..20: mol_type = other DNA
tgagttccatactctaattt

SEQ ID NO: 28733 - DNA, 20 bp, synthetic construct
  source 1..20: mol_type = other DNA
gtgagttccatactctaatt

SEQ ID NO: 28734 - DNA, 20 bp, synthetic construct
  source 1..20: mol_type = other DNA
agtgagttccatactctaat

SEQ ID NO: 28735 - DNA, 20 bp, synthetic construct
  source 1..20: mol_type = other DNA
aagtgagttccatactctaa

SEQ ID NO: 28736 - DNA, 20 bp, synthetic construct
  source 1..20: mol_type = other DNA
caagtgagttccatactcta

SEQ ID NO: 28737 - DNA, 20 bp, synthetic construct
  source 1..20: mol_type = other DNA
gcaagtgagttccatactct

SEQ ID NO: 28738 - DNA, 20 bp, synthetic construct
  source 1..20: mol_type = other DNA
ggcaagtgagttccatactc

SEQ ID NO: 28739 - DNA, 20 bp, synthetic construct
  source 1..20: mol_type = other DNA
gggcaagtgagttccatact

SEQ ID NO: 28740 - DNA, 20 bp, synthetic construct
  source 1..20: mol_type = other DNA
tgggcaagtgagttccatac

SEQ ID NO: 28741 - DNA, 20 bp, synthetic construct
  source 1..20: mol_type = other DNA
gtgggcaagtgagttccata

SEQ ID NO: 28742 - DNA, 20 bp, synthetic construct
  source 1..20: mol_type = other DNA
cgtgggcaagtgagttccat

SEQ ID NO: 28743 - DNA, 20 bp, synthetic construct
  source 1..20: mol_type = other DNA
gcgtgggcaagtgagttcca

SEQ ID NO: 28744 - DNA, 20 bp, synthetic construct
  source 1..20: mol_type = other DNA
agcgtgggcaagtgagttcc

SEQ ID NO: 28745 - DNA, 20 bp, synthetic construct
  source 1..20: mol_type = other DNA
aagcgtgggcaagtgagttc

SEQ ID NO: 28746 - DNA, 20 bp, synthetic construct
  source 1..20: mol_type = other DNA
aaagcgtgggcaagtgagtt

SEQ ID NO: 28747 - DNA, 20 bp, synthetic construct
  source 1..20: mol_type = other DNA
gaaagcgtgggcaagtgagt

SEQ ID NO: 28748 - DNA, 20 bp, synthetic construct
  source 1..20: mol_type = other DNA
ggaaagcgtgggcaagtgag

SEQ ID NO: 28749 - DNA, 20 bp, synthetic construct
  source 1..20: mol_type = other DNA
gggaaagcgtgggcaagtga

SEQ ID NO: 28750 - DNA, 20 bp, synthetic construct
  source 1..20: mol_type = other DNA
agggaaagcgtgggcaagtg

SEQ ID NO: 28751 - DNA, 20 bp, synthetic construct
  source 1..20: mol_type = other DNA
cagggaaagcgtgggcaagt

SEQ ID NO: 28752 - DNA, 20 bp, synthetic construct
  source 1..20: mol_type = other DNA
acagggaaagcgtgggcaag

SEQ ID NO: 28753 - DNA, 20 bp, synthetic construct
  source 1..20: mol_type = other DNA
gacagggaaagcgtgggcaa

SEQ ID NO: 28754 - DNA, 20 bp, synthetic construct
  source 1..20: mol_type = other DNA
agacagggaaagcgtgggca

SEQ ID NO: 28755 - DNA, 20 bp, synthetic construct
  source 1..20: mol_type = other DNA
gagacagggaaagcgtgggc

SEQ ID NO: 28756 - DNA, 20 bp, synthetic construct
  source 1..20: mol_type = other DNA
tgagacagggaaagcgtggg

SEQ ID NO: 28757 - DNA, 20 bp, synthetic construct
  source 1..20: mol_type = other DNA
ctgagacagggaaagcgtgg

SEQ ID NO: 28758 - DNA, 20 bp, synthetic construct
  source 1..20: mol_type = other DNA
actgagacagggaaagcgtg

SEQ ID NO: 28759 - DNA, 20 bp, synthetic construct
  source 1..20: mol_type = other DNA
gactgagacagggaaagcgt

SEQ ID NO: 28760 - DNA, 20 bp, synthetic construct
  source 1..20: mol_type = other DNA
ggactgagacagggaaagcg

SEQ ID NO: 28761 - DNA, 20 bp, synthetic construct
  source 1..20: mol_type = other DNA
tggactgagacagggaaagc

SEQ ID NO: 28762 - DNA, 20 bp, synthetic construct
  source 1..20: mol_type = other DNA
atggactgagacagggaaag

SEQ ID NO: 28763 - DNA, 20 bp, synthetic construct
  source 1..20: mol_type = other DNA
catggactgagacagggaaa

SEQ ID NO: 28764 - DNA, 20 bp, synthetic construct
  source 1..20: mol_type = other DNA
acatggactgagacagggaa

SEQ ID NO: 28765 - DNA, 20 bp, synthetic construct
  source 1..20: mol_type = other DNA
aacatggactgagacaggga

SEQ ID NO: 28766 - DNA, 20 bp, synthetic construct
  source 1..20: mol_type = other DNA
caacatggactgagacaggg

SEQ ID NO: 28767 - DNA, 20 bp, synthetic construct
  source 1..20: mol_type = other DNA
ccaacatggactgagacagg

SEQ ID NO: 28768 - DNA, 20 bp, synthetic construct
  source 1..20: mol_type = other DNA
accaacatggactgagacag

SEQ ID NO: 28769 - DNA, 20 bp, synthetic construct
  source 1..20: mol_type = other DNA
taccaacatggactgagaca

SEQ ID NO: 28770 - DNA, 20 bp, synthetic construct
  source 1..20: mol_type = other DNA
ctaccaacatggactgagac

SEQ ID NO: 28771 - DNA, 20 bp, synthetic construct
  source 1..20: mol_type = other DNA
cctaccaacatggactgaga

SEQ ID NO: 28772 - DNA, 20 bp, synthetic construct
  source 1..20: mol_type = other DNA
gcctaccaacatggactgag

SEQ ID NO: 28773 - DNA, 20 bp, synthetic construct
  source 1..20: mol_type = other DNA
agcctaccaacatggactga

SEQ ID NO: 28774 - DNA, 20 bp, synthetic construct
  source 1..20: mol_type = other DNA
cagcctaccaacatggactg

SEQ ID NO: 28775 - DNA, 20 bp, synthetic construct
  source 1..20: mol_type = other DNA
gcagcctaccaacatggact

SEQ ID NO: 28776 - DNA, 20 bp, synthetic construct
  source 1..20: mol_type = other DNA
tgcagcctaccaacatggac

SEQ ID NO: 28777 - DNA, 20 bp, synthetic construct
  source 1..20: mol_type = other DNA
ttgcagcctaccaacatgga

SEQ ID NO: 28778 - DNA, 20 bp, synthetic construct
  source 1..20: mol_type = other DNA
tttgcagcctaccaacatgg

SEQ ID NO: 28779 - DNA, 20 bp, synthetic construct
  source 1..20: mol_type = other DNA
ctttgcagcctaccaacatg

SEQ ID NO: 28780 - DNA, 20 bp, synthetic construct
  source 1..20: mol_type = other DNA
actttgcagcctaccaacat

SEQ ID NO: 28781 - DNA, 20 bp, synthetic construct
  source 1..20: mol_type = other DNA
gactttgcagcctaccaaca

SEQ ID NO: 28782 - DNA, 20 bp, synthetic construct
  source 1..20: mol_type = other DNA
agactttgcagcctaccaac

SEQ ID NO: 28783 - DNA, 20 bp, synthetic construct
  source 1..20: mol_type = other DNA
cagactttgcagcctaccaa

SEQ ID NO: 28784 - DNA, 20 bp, synthetic construct
  source 1..20: mol_type = other DNA
ccagactttgcagcctacca

SEQ ID NO: 28785 - DNA, 20 bp, synthetic construct
  source 1..20: mol_type = other DNA
cccagactttgcagcctacc

SEQ ID NO: 28786 - DNA, 20 bp, synthetic construct
  source 1..20: mol_type = other DNA
ccccagactttgcagcctac

SEQ ID NO: 28787 - DNA, 20 bp, synthetic construct
  source 1..20: mol_type = other DNA
gccccagactttgcagccta

SEQ ID NO: 28788 - DNA, 20 bp, synthetic construct
  source 1..20: mol_type = other DNA
agccccagactttgcagcct

SEQ ID NO: 28789 - DNA, 20 bp, synthetic construct
  source 1..20: mol_type = other DNA
tagccccagactttgcagcc

SEQ ID NO: 28790 - DNA, 20 bp, synthetic construct
  source 1..20: mol_type = other DNA
ctagccccagactttgcagc

SEQ ID NO: 28791 - DNA, 20 bp, synthetic construct
  source 1..20: mol_type = other DNA
tctagccccagactttgcag

SEQ ID NO: 28792 - DNA, 20 bp, synthetic construct
  source 1..20: mol_type = other DNA
ttctagccccagactttgca

SEQ ID NO: 28793 - DNA, 20 bp, synthetic construct
  source 1..20: mol_type = other DNA
cttctagccccagactttgc

SEQ ID NO: 28794 - DNA, 20 bp, synthetic construct
  source 1..20: mol_type = other DNA
ccttctagccccagactttg

SEQ ID NO: 28795 - DNA, 20 bp, synthetic construct
  source 1..20: mol_type = other DNA
tccttctagccccagacttt

SEQ ID NO: 28796 - DNA, 20 bp, synthetic construct
  source 1..20: mol_type = other DNA
gtccttctagccccagactt

SEQ ID NO: 28797 - DNA, 20 bp, synthetic construct
  source 1..20: mol_type = other DNA
tgtccttctagccccagact

SEQ ID NO: 28798 - DNA, 20 bp, synthetic construct
  source 1..20: mol_type = other DNA
gtgtccttctagccccagac

SEQ ID NO: 28799 - DNA, 20 bp, synthetic construct
  source 1..20: mol_type = other DNA
agtgtccttctagccccaga

SEQ ID NO: 28800 - DNA, 20 bp, synthetic construct
  source 1..20: mol_type = other DNA
cagtgtccttctagccccag

SEQ ID NO: 28801 - DNA, 20 bp, synthetic construct
  source 1..20: mol_type = other DNA
tcagtgtccttctagcccca

SEQ ID NO: 28802 - DNA, 20 bp, synthetic construct
  source 1..20: mol_type = other DNA
ttcagtgtccttctagcccc

SEQ ID NO: 28803 - DNA, 20 bp, synthetic construct
  source 1..20: mol_type = other DNA
gttcagtgtccttctagccc

SEQ ID NO: 28804 - DNA, 20 bp, synthetic construct
  source 1..20: mol_type = other DNA
tgttcagtgtccttctagcc

SEQ ID NO: 28805 - DNA, 20 bp, synthetic construct
  source 1..20: mol_type = other DNA
ttgttcagtgtccttctagc

SEQ ID NO: 28806 - DNA, 20 bp, synthetic construct
  source 1..20: mol_type = other DNA
cttgttcagtgtccttctag

SEQ ID NO: 28807 - DNA, 20 bp, synthetic construct
  source 1..20: mol_type = other DNA
tcttgttcagtgtccttcta

SEQ ID NO: 28808 - DNA, 20 bp, synthetic construct
  source 1..20: mol_type = other DNA
gtcttgttcagtgtccttct

SEQ ID NO: 28809 - DNA, 20 bp, synthetic construct
  source 1..20: mol_type = other DNA
agtcttgttcagtgtccttc

SEQ ID NO: 28810 - DNA, 20 bp, synthetic construct
  source 1..20: mol_type = other DNA
aagtcttgttcagtgtcctt

SEQ ID NO: 28811 - DNA, 20 bp, synthetic construct
  source 1..20: mol_type = other DNA
gaagtcttgttcagtgtcct

SEQ ID NO: 28812 - DNA, 20 bp, synthetic construct
  source 1..20: mol_type = other DNA
tgaagtcttgttcagtgtcc

SEQ ID NO: 28813 - DNA, 20 bp, synthetic construct
  source 1..20: mol_type = other DNA
ctgaagtcttgttcagtgtc

SEQ ID NO: 28814 - DNA, 20 bp, synthetic construct
  source 1..20: mol_type = other DNA
gctgaagtcttgttcagtgt

SEQ ID NO: 28815 - DNA, 20 bp, synthetic construct
  source 1..20: mol_type = other DNA
tgctgaagtcttgttcagtg

SEQ ID NO: 28816 - DNA, 20 bp, synthetic construct
  source 1..20: mol_type = other DNA
ctgctgaagtcttgttcagt

SEQ ID NO: 28817 - DNA, 20 bp, synthetic construct
  source 1..20: mol_type = other DNA
actgctgaagtcttgttcag

SEQ ID NO: 28818 - DNA, 20 bp, synthetic construct
  source 1..20: mol_type = other DNA
tactgctgaagtcttgttca

SEQ ID NO: 28819 - DNA, 20 bp, synthetic construct
  source 1..20: mol_type = other DNA
gtactgctgaagtcttgttc

SEQ ID NO: 28820 - DNA, 20 bp, synthetic construct
  source 1..20: mol_type = other DNA
tgtactgctgaagtcttgtt

SEQ ID NO: 28821 - DNA, 20 bp, synthetic construct
  source 1..20: mol_type = other DNA
atgtactgctgaagtcttgt

SEQ ID NO: 28822 - DNA, 20 bp, synthetic construct
  source 1..20: mol_type = other DNA
catgtactgctgaagtcttg

SEQ ID NO: 28823 - DNA, 20 bp, synthetic construct
  source 1..20: mol_type = other DNA
acatgtactgctgaagtctt

SEQ ID NO: 28824 - DNA, 20 bp, synthetic construct
  source 1..20: mol_type = other DNA
aacatgtactgctgaagtct

SEQ ID NO: 28825 - DNA, 20 bp, synthetic construct
  source 1..20: mol_type = other DNA
taacatgtactgctgaagtc

SEQ ID NO: 28826 - DNA, 20 bp, synthetic construct
  source 1..20: mol_type = other DNA
ctaacatgtactgctgaagt

SEQ ID NO: 28827 - DNA, 20 bp, synthetic construct
  source 1..20: mol_type = other DNA
actaacatgtactgctgaag

SEQ ID NO: 28828 - DNA, 20 bp, synthetic construct
  source 1..20: mol_type = other DNA
gactaacatgtactgctgaa

SEQ ID NO: 28829 - DNA, 20 bp, synthetic construct
  source 1..20: mol_type = other DNA
agactaacatgtactgctga

SEQ ID NO: 28830 - DNA, 20 bp, synthetic construct
  source 1..20: mol_type = other DNA
aagactaacatgtactgctg

SEQ ID NO: 28831 - DNA, 20 bp, synthetic construct
  source 1..20: mol_type = other DNA
gaagactaacatgtactgct

SEQ ID NO: 28832 - DNA, 20 bp, synthetic construct
  source 1..20: mol_type = other DNA
ggaagactaacatgtactgc

SEQ ID NO: 28833 - DNA, 20 bp, synthetic construct
  source 1..20: mol_type = other DNA
tggaagactaacatgtactg

SEQ ID NO: 28834 - DNA, 20 bp, synthetic construct
  source 1..20: mol_type = other DNA
ctggaagactaacatgtact

SEQ ID NO: 28835 - DNA, 20 bp, synthetic construct
  source 1..20: mol_type = other DNA
tctggaagactaacatgtac

SEQ ID NO: 28836 - DNA, 20 bp, synthetic construct
  source 1..20: mol_type = other DNA
ctctggaagactaacatgta

SEQ ID NO: 28837 - DNA, 20 bp, synthetic construct
  source 1..20: mol_type = other DNA
cctctggaagactaacatgt

SEQ ID NO: 28838 - DNA, 20 bp, synthetic construct
  source 1..20: mol_type = other DNA
ccctctggaagactaacatg

SEQ ID NO: 28839 - DNA, 20 bp, synthetic construct
  source 1..20: mol_type = other DNA
tccctctggaagactaacat

SEQ ID NO: 28840 - DNA, 20 bp, synthetic construct
  source 1..20: mol_type = other DNA
ttccctctggaagactaaca

SEQ ID NO: 28841 - DNA, 20 bp, synthetic construct
  source 1..20: mol_type = other DNA
cttccctctggaagactaac

SEQ ID NO: 28842 - DNA, 20 bp, synthetic construct
  source 1..20: mol_type = other DNA
ccttccctctggaagactaa

SEQ ID NO: 28843 - DNA, 20 bp, synthetic construct
  source 1..20: mol_type = other DNA
tccttccctctggaagacta

SEQ ID NO: 28844 - DNA, 20 bp, synthetic construct
  source 1..20: mol_type = other DNA
ttccttccctctggaagact

SEQ ID NO: 28845 - DNA, 20 bp, synthetic construct
  source 1..20: mol_type = other DNA
attccttccctctggaagac

SEQ ID NO: 28846 - DNA, 20 bp, synthetic construct
  source 1..20: mol_type = other DNA
tattccttccctctggaaga

SEQ ID NO: 28847 - DNA, 20 bp, synthetic construct
  source 1..20: mol_type = other DNA
atattccttccctctggaag

SEQ ID NO: 28848 - DNA, 20 bp, synthetic construct
  source 1..20: mol_type = other DNA
tatattccttccctctggaa

SEQ ID NO: 28849 - DNA, 20 bp, synthetic construct
  source 1..20: mol_type = other DNA
ttatattccttccctctgga

SEQ ID NO: 28850 - DNA, 20 bp, synthetic construct
  source 1..20: mol_type = other DNA
attatattccttccctctgg

SEQ ID NO: 28851 - DNA, 20 bp, synthetic construct
  source 1..20: mol_type = other DNA
tattatattccttccctctg

SEQ ID NO: 28852 - DNA, 20 bp, synthetic construct
  source 1..20: mol_type = other DNA
ctattatattccttccctct

SEQ ID NO: 28853 - DNA, 20 bp, synthetic construct
  source 1..20: mol_type = other DNA
actattatattccttccctc

SEQ ID NO: 28854 - DNA, 20 bp, synthetic construct
  source 1..20: mol_type = other DNA
aactattatattccttccct

SEQ ID NO: 28855 - DNA, 20 bp, synthetic construct
  source 1..20: mol_type = other DNA
caactattatattccttccc

SEQ ID NO: 28856 - DNA, 20 bp, synthetic construct
  source 1..20: mol_type = other DNA
tcaactattatattccttcc

SEQ ID NO: 28857 - DNA, 20 bp, synthetic construct
  source 1..20: mol_type = other DNA
ctcaactattatattccttc

SEQ ID NO: 28858 - DNA, 20 bp, synthetic construct
  source 1..20: mol_type = other DNA
tctcaactattatattcctt

SEQ ID NO: 28859 - DNA, 20 bp, synthetic construct
  source 1..20: mol_type = other DNA
ctctcaactattatattcct

SEQ ID NO: 28860 - DNA, 20 bp, synthetic construct
  source 1..20: mol_type = other DNA
tctctcaactattatattcc

SEQ ID NO: 28861 - DNA, 20 bp, synthetic construct
  source 1..20: mol_type = other DNA
ttctctcaactattatattc

SEQ ID NO: 28862 - DNA, 20 bp, synthetic construct
  source 1..20: mol_type = other DNA
attctctcaactattatatt

SEQ ID NO: 28863 - DNA, 20 bp, synthetic construct
  source 1..20: mol_type = other DNA
tattctctcaactattatat

SEQ ID NO: 28864 - DNA, 20 bp, synthetic construct
  source 1..20: mol_type = other DNA
ttattctctcaactattata

SEQ ID NO: 28865 - DNA, 20 bp, synthetic construct
  source 1..20: mol_type = other DNA
attattctctcaactattat

SEQ ID NO: 28866 - DNA, 20 bp, synthetic construct
  source 1..20: mol_type = other DNA
aattattctctcaactatta

SEQ ID NO: 28867 - DNA, 20 bp, synthetic construct
  source 1..20: mol_type = other DNA
gaattattctctcaactatt

SEQ ID NO: 28868 - DNA, 20 bp, synthetic construct
  source 1..20: mol_type = other DNA
ggaattattctctcaactat

SEQ ID NO: 28869 - DNA, 20 bp, synthetic construct
  source 1..20: mol_type = other DNA
aggaattattctctcaacta

SEQ ID NO: 28870 - DNA, 20 bp, synthetic construct
  source 1..20: mol_type = other DNA
aaggaattattctctcaact

SEQ ID NO: 28871 - DNA, 20 bp, synthetic construct
  source 1..20: mol_type = other DNA
aaaggaattattctctcaac

SEQ ID NO: 28872 - DNA, 20 bp, synthetic construct
  source 1..20: mol_type = other DNA
gaaaggaattattctctcaa

SEQ ID NO: 28873 - DNA, 20 bp, synthetic construct
  source 1..20: mol_type = other DNA
ggaaaggaattattctctca

SEQ ID NO: 28874 - DNA, 20 bp, synthetic construct
  source 1..20: mol_type = other DNA
aggaaaggaattattctctc

SEQ ID NO: 28875 - DNA, 20 bp, synthetic construct
  source 1..20: mol_type = other DNA
gaggaaaggaattattctct

SEQ ID NO: 28876 - DNA, 20 bp, synthetic construct
  source 1..20: mol_type = other DNA
agaggaaaggaattattctc

SEQ ID NO: 28877 - DNA, 20 bp, synthetic construct
  source 1..20: mol_type = other DNA
cagaggaaaggaattattct

SEQ ID NO: 28878 - DNA, 20 bp, synthetic construct
  source 1..20: mol_type = other DNA
acagaggaaaggaattattc

SEQ ID NO: 28879 - DNA, 20 bp, synthetic construct
  source 1..20: mol_type = other DNA
cacagaggaaaggaattatt

SEQ ID NO: 28880 - DNA, 20 bp, synthetic construct
  source 1..20: mol_type = other DNA
tcacagaggaaaggaattat

SEQ ID NO: 28881 - DNA, 20 bp, synthetic construct
  source 1..20: mol_type = other DNA
gtcacagaggaaaggaatta

SEQ ID NO: 28882 - DNA, 20 bp, synthetic construct
  source 1..20: mol_type = other DNA
agtcacagaggaaaggaatt

SEQ ID NO: 28883 - DNA, 20 bp, synthetic construct
  source 1..20: mol_type = other DNA
aagtcacagaggaaaggaat

SEQ ID NO: 28884 - DNA, 20 bp, synthetic construct
  source 1..20: mol_type = other DNA
aaagtcacagaggaaaggaa

SEQ ID NO: 28885 - DNA, 20 bp, synthetic construct
  source 1..20: mol_type = other DNA
taaagtcacagaggaaagga

SEQ ID NO: 28886 - DNA, 20 bp, synthetic construct
  source 1..20: mol_type = other DNA
ctaaagtcacagaggaaagg

SEQ ID NO: 28887 - DNA, 20 bp, synthetic construct
  source 1..20: mol_type = other DNA
cctaaagtcacagaggaaag

SEQ ID NO: 28888 - DNA, 20 bp, synthetic construct
  source 1..20: mol_type = other DNA
gcctaaagtcacagaggaaa

SEQ ID NO: 28889 - DNA, 20 bp, synthetic construct
  source 1..20: mol_type = other DNA
tgcctaaagtcacagaggaa

SEQ ID NO: 28890 - DNA, 20 bp, synthetic construct
  source 1..20: mol_type = other DNA
ttgcctaaagtcacagagga

SEQ ID NO: 28891 - DNA, 20 bp, synthetic construct
  source 1..20: mol_type = other DNA
tttgcctaaagtcacagagg

SEQ ID NO: 28892 - DNA, 20 bp, synthetic construct
  source 1..20: mol_type = other DNA
atttgcctaaagtcacagag

SEQ ID NO: 28893 - DNA, 20 bp, synthetic construct
  source 1..20: mol_type = other DNA
aatttgcctaaagtcacaga

SEQ ID NO: 28894 - DNA, 20 bp, synthetic construct
  source 1..20: mol_type = other DNA
gaatttgcctaaagtcacag

SEQ ID NO: 28895 - DNA, 20 bp, synthetic construct
  source 1..20: mol_type = other DNA
agaatttgcctaaagtcaca

SEQ ID NO: 28896 - DNA, 20 bp, synthetic construct
  source 1..20: mol_type = other DNA
aagaatttgcctaaagtcac

SEQ ID NO: 28897 - DNA, 20 bp, synthetic construct
  source 1..20: mol_type = other DNA
caagaatttgcctaaagtca

SEQ ID NO: 28898 - DNA, 20 bp, synthetic construct
  source 1..20: mol_type = other DNA
ccaagaatttgcctaaagtc

SEQ ID NO: 28899 - DNA, 20 bp, synthetic construct
  source 1..20: mol_type = other DNA
gccaagaatttgcctaaagt

SEQ ID NO: 28900 - DNA, 20 bp, synthetic construct
  source 1..20: mol_type = other DNA
agccaagaatttgcctaaag

SEQ ID NO: 28901 - DNA, 20 bp, synthetic construct
  source 1..20: mol_type = other DNA
tagccaagaatttgcctaaa

SEQ ID NO: 28902 - DNA, 20 bp, synthetic construct
  source 1..20: mol_type = other DNA
atagccaagaatttgcctaa

SEQ ID NO: 28903 - DNA, 20 bp, synthetic construct
  source 1..20: mol_type = other DNA
catagccaagaatttgccta

SEQ ID NO: 28904 - DNA, 20 bp, synthetic construct
  source 1..20: mol_type = other DNA
gcatagccaagaatttgcct

SEQ ID NO: 28905 - DNA, 20 bp, synthetic construct
  source 1..20: mol_type = other DNA
agcatagccaagaatttgcc

SEQ ID NO: 28906 - DNA, 20 bp, synthetic construct
  source 1..20: mol_type = other DNA
cagcatagccaagaatttgc

SEQ ID NO: 28907 - DNA, 20 bp, synthetic construct
  source 1..20: mol_type = other DNA
acagcatagccaagaatttg

SEQ ID NO: 28908 - DNA, 20 bp, synthetic construct
  source 1..20: mol_type = other DNA
aacagcatagccaagaattt

SEQ ID NO: 28909 - DNA, 20 bp, synthetic construct
  source 1..20: mol_type = other DNA
taacagcatagccaagaatt

SEQ ID NO: 28910 - DNA, 20 bp, synthetic construct
  source 1..20: mol_type = other DNA
ataacagcatagccaagaat

SEQ ID NO: 28911 - DNA, 20 bp, synthetic construct
  source 1..20: mol_type = other DNA
aataacagcatagccaagaa

SEQ ID NO: 28912 - DNA, 20 bp, synthetic construct
  source 1..20: mol_type = other DNA
aaataacagcatagccaaga

SEQ ID NO: 28913 - DNA, 20 bp, synthetic construct
  source 1..20: mol_type = other DNA
taaataacagcatagccaag

SEQ ID NO: 28914 - DNA, 20 bp, synthetic construct
  source 1..20: mol_type = other DNA
ataaataacagcatagccaa

SEQ ID NO: 28915 - DNA, 20 bp, synthetic construct
  source 1..20: mol_type = other DNA
aataaataacagcatagcca

SEQ ID NO: 28916 - DNA, 20 bp, synthetic construct
  source 1..20: mol_type = other DNA
aaataaataacagcatagcc

SEQ ID NO: 28917 - DNA, 20 bp, synthetic construct
  source 1..20: mol_type = other DNA
caaataaataacagcatagc

SEQ ID NO: 28918 - DNA, 20 bp, synthetic construct
  source 1..20: mol_type = other DNA
ccaaataaataacagcatag

SEQ ID NO: 28919 - DNA, 20 bp, synthetic construct
  source 1..20: mol_type = other DNA
cccaaataaataacagcata

SEQ ID NO: 28920 - DNA, 20 bp, synthetic construct
  source 1..20: mol_type = other DNA
gcccaaataaataacagcat

SEQ ID NO: 28921 - DNA, 20 bp, synthetic construct
  source 1..20: mol_type = other DNA
ggcccaaataaataacagca

SEQ ID NO: 28922 - DNA, 20 bp, synthetic construct
  source 1..20: mol_type = other DNA
tggcccaaataaataacagc

SEQ ID NO: 28923 - DNA, 20 bp, synthetic construct
  source 1..20: mol_type = other DNA
ttggcccaaataaataacag

SEQ ID NO: 28924 - DNA, 20 bp, synthetic construct
  source 1..20: mol_type = other DNA
tttggcccaaataaataaca

SEQ ID NO: 28925 - DNA, 20 bp, synthetic construct
  source 1..20: mol_type = other DNA
gtttggcccaaataaataac

SEQ ID NO: 28926 - DNA, 20 bp, synthetic construct
  source 1..20: mol_type = other DNA
tgtttggcccaaataaataa

SEQ ID NO: 28927 - DNA, 20 bp, synthetic construct
  source 1..20: mol_type = other DNA
ttgtttggcccaaataaata

SEQ ID NO: 28928 - DNA, 20 bp, synthetic construct
  source 1..20: mol_type = other DNA
attgtttggcccaaataaat

SEQ ID NO: 28929 - DNA, 20 bp, synthetic construct
  source 1..20: mol_type = other DNA
tattgtttggcccaaataaa

SEQ ID NO: 28930 - DNA, 20 bp, synthetic construct
  source 1..20: mol_type = other DNA
atattgtttggcccaaataa

SEQ ID NO: 28931 - DNA, 20 bp, synthetic construct
  source 1..20: mol_type = other DNA
gatattgtttggcccaaata

SEQ ID NO: 28932 - DNA, 20 bp, synthetic construct
  source 1..20: mol_type = other DNA
tgatattgtttggcccaaat

SEQ ID NO: 28933 - DNA, 20 bp, synthetic construct
  source 1..20: mol_type = other DNA
ctgatattgtttggcccaaa

SEQ ID NO: 28934 - DNA, 20 bp, synthetic construct
  source 1..20: mol_type = other DNA
cctgatattgtttggcccaa

SEQ ID NO: 28935 - DNA, 20 bp, synthetic construct
  source 1..20: mol_type = other DNA
tcctgatattgtttggccca

SEQ ID NO: 28936 - DNA, 20 bp, synthetic construct
  source 1..20: mol_type = other DNA
ctcctgatattgtttggccc

SEQ ID NO: 28937 - DNA, 20 bp, synthetic construct
  source 1..20: mol_type = other DNA
cctcctgatattgtttggcc

SEQ ID NO: 28938 - DNA, 20 bp, synthetic construct
  source 1..20: mol_type = other DNA
acctcctgatattgtttggc

SEQ ID NO: 28939 - DNA, 20 bp, synthetic construct
  source 1..20: mol_type = other DNA
aacctcctgatattgtttgg

SEQ ID NO: 28940 - DNA, 20 bp, synthetic construct
  source 1..20: mol_type = other DNA
caacctcctgatattgtttg

SEQ ID NO: 28941 - DNA, 20 bp, synthetic construct
  source 1..20: mol_type = other DNA
acaacctcctgatattgttt

SEQ ID NO: 28942 - DNA, 20 bp, synthetic construct
  source 1..20: mol_type = other DNA
tacaacctcctgatattgtt

SEQ ID NO: 28943 - DNA, 20 bp, synthetic construct
  source 1..20: mol_type = other DNA
gtacaacctcctgatattgt

SEQ ID NO: 28944 - DNA, 20 bp, synthetic construct
  source 1..20: mol_type = other DNA
tgtacaacctcctgatattg

SEQ ID NO: 28945 - DNA, 20 bp, synthetic construct
  source 1..20: mol_type = other DNA
atgtacaacctcctgatatt

SEQ ID NO: 28946 - DNA, 20 bp, synthetic construct
  source 1..20: mol_type = other DNA
aatgtacaacctcctgatat

SEQ ID NO: 28947 - DNA, 20 bp, synthetic construct
  source 1..20: mol_type = other DNA
aaatgtacaacctcctgata

SEQ ID NO: 28948 - DNA, 20 bp, synthetic construct
  source 1..20: mol_type = other DNA
aaaatgtacaacctcctgat

SEQ ID NO: 28949 - DNA, 20 bp, synthetic construct
  source 1..20: mol_type = other DNA
taaaatgtacaacctcctga

SEQ ID NO: 28950 - DNA, 20 bp, synthetic construct
  source 1..20: mol_type = other DNA
ataaaatgtacaacctcctg

SEQ ID NO: 28951 - DNA, 20 bp, synthetic construct
  source 1..20: mol_type = other DNA
aataaaatgtacaacctcct

SEQ ID NO: 28952 - DNA, 20 bp, synthetic construct
  source 1..20: mol_type = other DNA
gaataaaatgtacaacctcc

SEQ ID NO: 28953 - DNA, 20 bp, synthetic construct
  source 1..20: mol_type = other DNA
agaataaaatgtacaacctc

SEQ ID NO: 28954 - DNA, 20 bp, synthetic construct
  source 1..20: mol_type = other DNA
aagaataaaatgtacaacct

SEQ ID NO: 28955 - DNA, 20 bp, synthetic construct
  source 1..20: mol_type = other DNA
taagaataaaatgtacaacc

SEQ ID NO: 28956 - DNA, 20 bp, synthetic construct
  source 1..20: mol_type = other DNA
ttaagaataaaatgtacaac

SEQ ID NO: 28957 - DNA, 20 bp, synthetic construct
  source 1..20: mol_type = other DNA
attaagaataaaatgtacaa

SEQ ID NO: 28958 - DNA, 20 bp, synthetic construct
  source 1..20: mol_type = other DNA
aattaagaataaaatgtaca

SEQ ID NO: 28959 - DNA, 20 bp, synthetic construct
  source 1..20: mol_type = other DNA
taattaagaataaaatgtac

SEQ ID NO: 28960 - DNA, 20 bp, synthetic construct
  source 1..20: mol_type = other DNA
gtaattaagaataaaatgta

SEQ ID NO: 28961 - DNA, 20 bp, synthetic construct
  source 1..20: mol_type = other DNA
agtaattaagaataaaatgt

SEQ ID NO: 28962 - DNA, 20 bp, synthetic construct
  source 1..20: mol_type = other DNA
cagtaattaagaataaaatg

SEQ ID NO: 28963 - DNA, 20 bp, synthetic construct
  source 1..20: mol_type = other DNA
gcagtaattaagaataaaat

SEQ ID NO: 28964 - DNA, 20 bp, synthetic construct
  source 1..20: mol_type = other DNA
cgcagtaattaagaataaaa

SEQ ID NO: 28965 - DNA, 20 bp, synthetic construct
  source 1..20: mol_type = other DNA
tcgcagtaattaagaataaa

SEQ ID NO: 28966 - DNA, 20 bp, synthetic construct
  source 1..20: mol_type = other DNA
atcgcagtaattaagaataa

SEQ ID NO: 28967 - DNA, 20 bp, synthetic construct
  source 1..20: mol_type = other DNA
tatcgcagtaattaagaata

SEQ ID NO: 28968 - DNA, 20 bp, synthetic construct
  source 1..20: mol_type = other DNA
gtatcgcagtaattaagaat

SEQ ID NO: 28969 - DNA, 20 bp, synthetic construct
  source 1..20: mol_type = other DNA
tgtatcgcagtaattaagaa

SEQ ID NO: 28970 - DNA, 20 bp, synthetic construct
  source 1..20: mol_type = other DNA
atgtatcgcagtaattaaga

SEQ ID NO: 28971 - DNA, 20 bp, synthetic construct
  source 1..20: mol_type = other DNA
aatgtatcgcagtaattaag

SEQ ID NO: 28972 - DNA, 20 bp, synthetic construct
  source 1..20: mol_type = other DNA
taatgtatcgcagtaattaa

SEQ ID NO: 28973 - DNA, 20 bp, synthetic construct
  source 1..20: mol_type = other DNA
ttaatgtatcgcagtaatta

SEQ ID NO: 28974 - DNA, 20 bp, synthetic construct
  source 1..20: mol_type = other DNA
attaatgtatcgcagtaatt

SEQ ID NO: 28975 - DNA, 20 bp, synthetic construct
  source 1..20: mol_type = other DNA
aattaatgtatcgcagtaat

SEQ ID NO: 28976 - DNA, 20 bp, synthetic construct
  source 1..20: mol_type = other DNA
aaattaatgtatcgcagtaa

SEQ ID NO: 28977 - DNA, 20 bp, synthetic construct
  source 1..20: mol_type = other DNA
aaaattaatgtatcgcagta

SEQ ID NO: 28978 - DNA, 20 bp, synthetic construct
  source 1..20: mol_type = other DNA
taaaattaatgtatcgcagt

SEQ ID NO: 28979 - DNA, 20 bp, synthetic construct
  source 1..20: mol_type = other DNA
ataaaattaatgtatcgcag

SEQ ID NO: 28980 - DNA, 20 bp, synthetic construct
  source 1..20: mol_type = other DNA
gataaaattaatgtatcgca

SEQ ID NO: 28981 - DNA, 20 bp, synthetic construct
  source 1..20: mol_type = other DNA
ggataaaattaatgtatcgc

SEQ ID NO: 28982 - DNA, 20 bp, synthetic construct
  source 1..20: mol_type = other DNA
tggataaaattaatgtatcg

SEQ ID NO: 28983 - DNA, 20 bp, synthetic construct
  source 1..20: mol_type = other DNA
atggataaaattaatgtatc

SEQ ID NO: 28984 - DNA, 20 bp, synthetic construct
  source 1..20: mol_type = other DNA
catggataaaattaatgtat

SEQ ID NO: 28985 - DNA, 20 bp, synthetic construct
  source 1..20: mol_type = other DNA
ccatggataaaattaatgta

SEQ ID NO: 28986 - DNA, 20 bp, synthetic construct
  source 1..20: mol_type = other DNA
cccatggataaaattaatgt

SEQ ID NO: 28987 - DNA, 20 bp, synthetic construct
  source 1..20: mol_type = other DNA
acccatggataaaattaatg

SEQ ID NO: 28988 - DNA, 20 bp, synthetic construct
  source 1..20: mol_type = other DNA
aacccatggataaaattaat

SEQ ID NO: 28989 - DNA, 20 bp, synthetic construct
  source 1..20: mol_type = other DNA
aaacccatggataaaattaa

SEQ ID NO: 28990 - DNA, 20 bp, synthetic construct
  source 1..20: mol_type = other DNA
taaacccatggataaaatta

SEQ ID NO: 28991 - DNA, 20 bp, synthetic construct
  source 1..20: mol_type = other DNA
ttaaacccatggataaaatt

SEQ ID NO: 28992 - DNA, 20 bp, synthetic construct
  source 1..20: mol_type = other DNA
gttaaacccatggataaaat

SEQ ID NO: 28993 - DNA, 20 bp, synthetic construct
  source 1..20: mol_type = other DNA
ggttaaacccatggataaaa

SEQ ID NO: 28994 - DNA, 20 bp, synthetic construct
  source 1..20: mol_type = other DNA
aggttaaacccatggataaa

SEQ ID NO: 28995 - DNA, 20 bp, synthetic construct
  source 1..20: mol_type = other DNA
taggttaaacccatggataa

SEQ ID NO: 28996 - DNA, 20 bp, synthetic construct
  source 1..20: mol_type = other DNA
ctaggttaaacccatggata

SEQ ID NO: 28997 - DNA, 20 bp, synthetic construct
  source 1..20: mol_type = other DNA
gctaggttaaacccatggat

SEQ ID NO: 28998 - DNA, 20 bp, synthetic construct
  source 1..20: mol_type = other DNA
ggctaggttaaacccatgga

SEQ ID NO: 28999 - DNA, 20 bp, synthetic construct
  source 1..20: mol_type = other DNA
aggctaggttaaacccatgg

SEQ ID NO: 29000 - DNA, 20 bp, synthetic construct
  source 1..20: mol_type = other DNA
taggctaggttaaacccatg

SEQ ID NO: 29001 - DNA, 20 bp, synthetic construct
  source 1..20: mol_type = other DNA
gtaggctaggttaaacccat

SEQ ID NO: 29002 - DNA, 20 bp, synthetic construct
  source 1..20: mol_type = other DNA
ggtaggctaggttaaaccca

SEQ ID NO: 29003 - DNA, 20 bp, synthetic construct
  source 1..20: mol_type = other DNA
aggtaggctaggttaaaccc

SEQ ID NO: 29004 - DNA, 20 bp, synthetic construct
  source 1..20: mol_type = other DNA
aaggtaggctaggttaaacc

SEQ ID NO: 29005 - DNA, 20 bp, synthetic construct
  source 1..20: mol_type = other DNA
aaaggtaggctaggttaaac

SEQ ID NO: 29006 - DNA, 20 bp, synthetic construct
  source 1..20: mol_type = other DNA
aaaaggtaggctaggttaaa

SEQ ID NO: 29007 - DNA, 20 bp, synthetic construct
  source 1..20: mol_type = other DNA
caaaaggtaggctaggttaa

SEQ ID NO: 29008 - DNA, 20 bp, synthetic construct
  source 1..20: mol_type = other DNA
gcaaaaggtaggctaggtta

SEQ ID NO: 29009 - DNA, 20 bp, synthetic construct
  source 1..20: mol_type = other DNA
agcaaaaggtaggctaggtt

SEQ ID NO: 29010 - DNA, 20 bp, synthetic construct
  source 1..20: mol_type = other DNA
cagcaaaaggtaggctaggt

SEQ ID NO: 29011 - DNA, 20 bp, synthetic construct
  source 1..20: mol_type = other DNA
acagcaaaaggtaggctagg

SEQ ID NO: 29012 - DNA, 20 bp, synthetic construct
  source 1..20: mol_type = other DNA
aacagcaaaaggtaggctag

SEQ ID NO: 29013 - DNA, 20 bp, synthetic construct
  source 1..20: mol_type = other DNA
taacagcaaaaggtaggcta

SEQ ID NO: 29014 - DNA, 20 bp, synthetic construct
  source 1..20: mol_type = other DNA
ctaacagcaaaaggtaggct

SEQ ID NO: 29015 - DNA, 20 bp, synthetic construct
  source 1..20: mol_type = other DNA
tctaacagcaaaaggtaggc

SEQ ID NO: 29016 - DNA, 20 bp, synthetic construct
  source 1..20: mol_type = other DNA
gtctaacagcaaaaggtagg

SEQ ID NO: 29017 - DNA, 20 bp, synthetic construct
  source 1..20: mol_type = other DNA
agtctaacagcaaaaggtag

SEQ ID NO: 29018 - DNA, 20 bp, synthetic construct
  source 1..20: mol_type = other DNA
aagtctaacagcaaaaggta

SEQ ID NO: 29019 - DNA, 20 bp, synthetic construct
  source 1..20: mol_type = other DNA
gaagtctaacagcaaaaggt

SEQ ID NO: 29020 - DNA, 20 bp, synthetic construct
  source 1..20: mol_type = other DNA
tgaagtctaacagcaaaagg

SEQ ID NO: 29021 - DNA, 20 bp, synthetic construct
  source 1..20: mol_type = other DNA
ttgaagtctaacagcaaaag

SEQ ID NO: 29022 - DNA, 20 bp, synthetic construct
  source 1..20: mol_type = other DNA
gttgaagtctaacagcaaaa

SEQ ID NO: 29023 - DNA, 20 bp, synthetic construct
  source 1..20: mol_type = other DNA
agttgaagtctaacagcaaa

SEQ ID NO: 29024 - DNA, 20 bp, synthetic construct
  source 1..20: mol_type = other DNA
gagttgaagtctaacagcaa

SEQ ID NO: 29025 - DNA, 20 bp, synthetic construct
  source 1..20: mol_type = other DNA
agagttgaagtctaacagca

SEQ ID NO: 29026 - DNA, 20 bp, synthetic construct
  source 1..20: mol_type = other DNA
tagagttgaagtctaacagc

SEQ ID NO: 29027 - DNA, 20 bp, synthetic construct
  source 1..20: mol_type = other DNA
gtagagttgaagtctaacag

SEQ ID NO: 29028 - DNA, 20 bp, synthetic construct
  source 1..20: mol_type = other DNA
agtagagttgaagtctaaca

SEQ ID NO: 29029 - DNA, 20 bp, synthetic construct
  source 1..20: mol_type = other DNA
aagtagagttgaagtctaac

SEQ ID NO: 29030 - DNA, 20 bp, synthetic construct
  source 1..20: mol_type = other DNA
caagtagagttgaagtctaa

SEQ ID NO: 29031 - DNA, 20 bp, synthetic construct
  source 1..20: mol_type = other DNA
acaagtagagttgaagtcta

SEQ ID NO: 29032 - DNA, 20 bp, synthetic construct
  source 1..20: mol_type = other DNA
cacaagtagagttgaagtct

SEQ ID NO: 29033 - DNA, 20 bp, synthetic construct
  source 1..20: mol_type = other DNA
acacaagtagagttgaagtc

SEQ ID NO: 29034 - DNA, 20 bp, synthetic construct
  source 1..20: mol_type = other DNA
aacacaagtagagttgaagt

SEQ ID NO: 29035 - DNA, 20 bp, synthetic construct
  source 1..20: mol_type = other DNA
caacacaagtagagttgaag

SEQ ID NO: 29036 - DNA, 20 bp, synthetic construct
  source 1..20: mol_type = other DNA
ccaacacaagtagagttgaa

SEQ ID NO: 29037 - DNA, 20 bp, synthetic construct
  source 1..20: mol_type = other DNA
cccaacacaagtagagttga

SEQ ID NO: 29038 - DNA, 20 bp, synthetic construct
  source 1..20: mol_type = other DNA
acccaacacaagtagagttg

SEQ ID NO: 29039 - DNA, 20 bp, synthetic construct
  source 1..20: mol_type = other DNA
aacccaacacaagtagagtt

SEQ ID NO: 29040 - DNA, 20 bp, synthetic construct
  source 1..20: mol_type = other DNA
taacccaacacaagtagagt

SEQ ID NO: 29041 - DNA, 20 bp, synthetic construct
  source 1..20: mol_type = other DNA
gtaacccaacacaagtagag

SEQ ID NO: 29042 - DNA, 20 bp, synthetic construct
  source 1..20: mol_type = other DNA
ggtaacccaacacaagtaga

SEQ ID NO: 29043 - DNA, 20 bp, synthetic construct
  source 1..20: mol_type = other DNA
gggtaacccaacacaagtag

SEQ ID NO: 29044 - DNA, 20 bp, synthetic construct
  source 1..20: mol_type = other DNA
ggggtaacccaacacaagta

SEQ ID NO: 29045 - DNA, 20 bp, synthetic construct
  source 1..20: mol_type = other DNA
aggggtaacccaacacaagt

SEQ ID NO: 29046 - DNA, 20 bp, synthetic construct
  source 1..20: mol_type = other DNA
gaggggtaacccaacacaag

SEQ ID NO: 29047 - DNA, 20 bp, synthetic construct
  source 1..20: mol_type = other DNA
agaggggtaacccaacacaa

SEQ ID NO: 29048 - DNA, 20 bp, synthetic construct
  source 1..20: mol_type = other DNA
cagaggggtaacccaacaca

SEQ ID NO: 29049 - DNA, 20 bp, synthetic construct
  source 1..20: mol_type = other DNA
gcagaggggtaacccaacac

SEQ ID NO: 29050 - DNA, 20 bp, synthetic construct
  source 1..20: mol_type = other DNA
agcagaggggtaacccaaca

SEQ ID NO: 29051 - DNA, 20 bp, synthetic construct
  source 1..20: mol_type = other DNA
aagcagaggggtaacccaac

SEQ ID NO: 29052 - DNA, 20 bp, synthetic construct
  source 1..20: mol_type = other DNA
taagcagaggggtaacccaa

SEQ ID NO: 29053 - DNA, 20 bp, synthetic construct
  source 1..20: mol_type = other DNA
ttaagcagaggggtaaccca

SEQ ID NO: 29054 - DNA, 20 bp, synthetic construct
  source 1..20: mol_type = other DNA
tttaagcagaggggtaaccc

SEQ ID NO: 29055 - DNA, 20 bp, synthetic construct
  source 1..20: mol_type = other DNA
ttttaagcagaggggtaacc

SEQ ID NO: 29056 - DNA, 20 bp, synthetic construct
  source 1..20: mol_type = other DNA
tttttaagcagaggggtaac

SEQ ID NO: 29057 - DNA, 20 bp, synthetic construct
  source 1..20: mol_type = other DNA
atttttaagcagaggggtaa

SEQ ID NO: 29058 - DNA, 20 bp, synthetic construct
  source 1..20: mol_type = other DNA
gatttttaagcagaggggta

SEQ ID NO: 29059 - DNA, 20 bp, synthetic construct
  source 1..20: mol_type = other DNA
tgatttttaagcagaggggt

SEQ ID NO: 29060 - DNA, 20 bp, synthetic construct
  source 1..20: mol_type = other DNA
gtgatttttaagcagagggg

SEQ ID NO: 29061 - DNA, 20 bp, synthetic construct
  source 1..20: mol_type = other DNA
ggtgatttttaagcagaggg

SEQ ID NO: 29062 - DNA, 20 bp, synthetic construct
  source 1..20: mol_type = other DNA
gggtgatttttaagcagagg

SEQ ID NO: 29063 - DNA, 20 bp, synthetic construct
  source 1..20: mol_type = other DNA
agggtgatttttaagcagag

SEQ ID NO: 29064 - DNA, 20 bp, synthetic construct
  source 1..20: mol_type = other DNA
tagggtgatttttaagcaga

SEQ ID NO: 29065 - DNA, 20 bp, synthetic construct
  source 1..20: mol_type = other DNA
atagggtgatttttaagcag

SEQ ID NO: 29066 - DNA, 20 bp, synthetic construct
  source 1..20: mol_type = other DNA
aatagggtgatttttaagca

SEQ ID NO: 29067 - DNA, 20 bp, synthetic construct
  source 1..20: mol_type = other DNA
gaatagggtgatttttaagc

SEQ ID NO: 29068 - DNA, 20 bp, synthetic construct
  source 1..20: mol_type = other DNA
ggaatagggtgatttttaag

SEQ ID NO: 29069 - DNA, 20 bp, synthetic construct
  source 1..20: mol_type = other DNA
gggaatagggtgatttttaa

SEQ ID NO: 29070 - DNA, 20 bp, synthetic construct
  source 1..20: mol_type = other DNA
tgggaatagggtgattttta

SEQ ID NO: 29071 - DNA, 20 bp, synthetic construct
  source 1..20: mol_type = other DNA
ttgggaatagggtgattttt

SEQ ID NO: 29072 - DNA, 20 bp, synthetic construct
  source 1..20: mol_type = other DNA
cttgggaatagggtgatttt

SEQ ID NO: 29073 - DNA, 20 bp, synthetic construct
  source 1..20: mol_type = other DNA
gcttgggaatagggtgattt

SEQ ID NO: 29074 - DNA, 20 bp, synthetic construct
  source 1..20: mol_type = other DNA
ggcttgggaatagggtgatt

SEQ ID NO: 29075 - DNA, 20 bp, synthetic construct
  source 1..20: mol_type = other DNA
aggcttgggaatagggtgat

SEQ ID NO: 29076 - DNA, 20 bp, synthetic construct
  source 1..20: mol_type = other DNA
caggcttgggaatagggtga

SEQ ID NO: 29077 - DNA, 20 bp, synthetic construct
  source 1..20: mol_type = other DNA
tcaggcttgggaatagggtg

SEQ ID NO: 29078 - DNA, 20 bp, synthetic construct
  source 1..20: mol_type = other DNA
ctcaggcttgggaatagggt

SEQ ID NO: 29079 - DNA, 20 bp, synthetic construct
  source 1..20: mol_type = other DNA
cctcaggcttgggaataggg

SEQ ID NO: 29080 - DNA, 20 bp, synthetic construct
  source 1..20: mol_type = other DNA
ccctcaggcttgggaatagg

SEQ ID NO: 29081 - DNA, 20 bp, synthetic construct
  source 1..20: mol_type = other DNA
tccctcaggcttgggaatag

SEQ ID NO: 29082 - DNA, 20 bp, synthetic construct
  source 1..20: mol_type = other DNA
ctccctcaggcttgggaata

SEQ ID NO: 29083 - DNA, 20 bp, synthetic construct
  source 1..20: mol_type = other DNA
actccctcaggcttgggaat

SEQ ID NO: 29084 - DNA, 20 bp, synthetic construct
  source 1..20: mol_type = other DNA
gactccctcaggcttgggaa

SEQ ID NO: 29085 - DNA, 20 bp, synthetic construct
  source 1..20: mol_type = other DNA
agactccctcaggcttggga

SEQ ID NO: 29086 - DNA, 20 bp, synthetic construct
  source 1..20: mol_type = other DNA
tagactccctcaggcttggg

SEQ ID NO: 29087 - DNA, 20 bp, synthetic construct
  source 1..20: mol_type = other DNA
gtagactccctcaggcttgg

SEQ ID NO: 29088 - DNA, 20 bp, synthetic construct
  source 1..20: mol_type = other DNA
ggtagactccctcaggcttg

SEQ ID NO: 29089 - DNA, 20 bp, synthetic construct
  source 1..20: mol_type = other DNA
aggtagactccctcaggctt

SEQ ID NO: 29090 - DNA, 20 bp, synthetic construct
  source 1..20: mol_type = other DNA
aaggtagactccctcaggct

SEQ ID NO: 29091 - DNA, 20 bp, synthetic construct
  source 1..20: mol_type = other DNA
gaaggtagactccctcaggc

SEQ ID NO: 29092 - DNA, 20 bp, synthetic construct
  source 1..20: mol_type = other DNA
tgaaggtagactccctcagg

SEQ ID NO: 29093 - DNA, 20 bp, synthetic construct
  source 1..20: mol_type = other DNA
ttgaaggtagactccctcag

SEQ ID NO: 29094 - DNA, 20 bp, synthetic construct
  source 1..20: mol_type = other DNA
tttgaaggtagactccctca

SEQ ID NO: 29095 - DNA, 20 bp, synthetic construct
  source 1..20: mol_type = other DNA
ctttgaaggtagactccctc

SEQ ID NO: 29096 - DNA, 20 bp, synthetic construct
  source 1..20: mol_type = other DNA
gctttgaaggtagactccct

SEQ ID NO: 29097 - DNA, 20 bp, synthetic construct
  source 1..20: mol_type = other DNA
agctttgaaggtagactccc

SEQ ID NO: 29098 - DNA, 20 bp, synthetic construct
  source 1..20: mol_type = other DNA
aagctttgaaggtagactcc

SEQ ID NO: 29099 - DNA, 20 bp, synthetic construct
  source 1..20: mol_type = other DNA
aaagctttgaaggtagactc

SEQ ID NO: 29100 - DNA, 20 bp, synthetic construct
  source 1..20: mol_type = other DNA
gaaagctttgaaggtagact

SEQ ID NO: 29101 - DNA, 20 bp, synthetic construct
  source 1..20: mol_type = other DNA
agaaagctttgaaggtagac

SEQ ID NO: 29102 - DNA, 20 bp, synthetic construct
  source 1..20: mol_type = other DNA
tagaaagctttgaaggtaga

SEQ ID NO: 29103 - DNA, 20 bp, synthetic construct
  source 1..20: mol_type = other DNA
atagaaagctttgaaggtag

SEQ ID NO: 29104 - DNA, 20 bp, synthetic construct
  source 1..20: mol_type = other DNA
catagaaagctttgaaggta

SEQ ID NO: 29105 - DNA, 20 bp, synthetic construct
  source 1..20: mol_type = other DNA
tcatagaaagctttgaaggt

SEQ ID NO: 29106 - DNA, 20 bp, synthetic construct
  source 1..20: mol_type = other DNA
gtcatagaaagctttgaagg

SEQ ID NO: 29107 - DNA, 20 bp, synthetic construct
  source 1..20: mol_type = other DNA
ggtcatagaaagctttgaag

SEQ ID NO: 29108 - DNA, 20 bp, synthetic construct
  source 1..20: mol_type = other DNA
aggtcatagaaagctttgaa

SEQ ID NO: 29109 - DNA, 20 bp, synthetic construct
  source 1..20: mol_type = other DNA
taggtcatagaaagctttga

SEQ ID NO: 29110 - DNA, 20 bp, synthetic construct
  source 1..20: mol_type = other DNA
ttaggtcatagaaagctttg

SEQ ID NO: 29111 - DNA, 20 bp, synthetic construct
  source 1..20: mol_type = other DNA
attaggtcatagaaagcttt

SEQ ID NO: 29112 - DNA, 20 bp, synthetic construct
  source 1..20: mol_type = other DNA
gattaggtcatagaaagctt

SEQ ID NO: 29113 - DNA, 20 bp, synthetic construct
  source 1..20: mol_type = other DNA
ggattaggtcatagaaagct

SEQ ID NO: 29114 - DNA, 20 bp, synthetic construct
  source 1..20: mol_type = other DNA
tggattaggtcatagaaagc

SEQ ID NO: 29115 - DNA, 20 bp, synthetic construct
  source 1..20: mol_type = other DNA
ttggattaggtcatagaaag

SEQ ID NO: 29116 - DNA, 20 bp, synthetic construct
  source 1..20: mol_type = other DNA
cttggattaggtcatagaaa

SEQ ID NO: 29117 - DNA, 20 bp, synthetic construct
  source 1..20: mol_type = other DNA
ccttggattaggtcatagaa

SEQ ID NO: 29118 - DNA, 20 bp, synthetic construct
  source 1..20: mol_type = other DNA
gccttggattaggtcataga

SEQ ID NO: 29119 - DNA, 20 bp, synthetic construct
  source 1..20: mol_type = other DNA
ggccttggattaggtcatag

SEQ ID NO: 29120 - DNA, 20 bp, synthetic construct
  source 1..20: mol_type = other DNA
aggccttggattaggtcata

SEQ ID NO: 29121 - DNA, 20 bp, synthetic construct
  source 1..20: mol_type = other DNA
caggccttggattaggtcat

SEQ ID NO: 29122 - DNA, 20 bp, synthetic construct
  source 1..20: mol_type = other DNA
acaggccttggattaggtca

SEQ ID NO: 29123 - DNA, 20 bp, synthetic construct
  source 1..20: mol_type = other DNA
gacaggccttggattaggtc

SEQ ID NO: 29124 - DNA, 20 bp, synthetic construct
  source 1..20: mol_type = other DNA
tgacaggccttggattaggt

SEQ ID NO: 29125 - DNA, 20 bp, synthetic construct
  source 1..20: mol_type = other DNA
ttgacaggccttggattagg

SEQ ID NO: 29126 - DNA, 20 bp, synthetic construct
  source 1..20: mol_type = other DNA
tttgacaggccttggattag

SEQ ID NO: 29127 - DNA, 20 bp, synthetic construct
  source 1..20: mol_type = other DNA
gtttgacaggccttggatta

SEQ ID NO: 29128 - DNA, 20 bp, synthetic construct
  source 1..20: mol_type = other DNA
agtttgacaggccttggatt

SEQ ID NO: 29129 - DNA, 20 bp, synthetic construct
  source 1..20: mol_type = other DNA
aagtttgacaggccttggat

SEQ ID NO: 29130 - DNA, 20 bp, synthetic construct
  source 1..20: mol_type = other DNA
gaagtttgacaggccttgga

SEQ ID NO: 29131 - DNA, 20 bp, synthetic construct
  source 1..20: mol_type = other DNA
cgaagtttgacaggccttgg

SEQ ID NO: 29132 - DNA, 20 bp, synthetic construct
  source 1..20: mol_type = other DNA
acgaagtttgacaggccttg

SEQ ID NO: 29133 - DNA, 20 bp, synthetic construct
  source 1..20: mol_type = other DNA
tacgaagtttgacaggcctt

SEQ ID NO: 29134 - DNA, 20 bp, synthetic construct
  source 1..20: mol_type = other DNA
ttacgaagtttgacaggcct

SEQ ID NO: 29135 - DNA, 20 bp, synthetic construct
  source 1..20: mol_type = other DNA
tttacgaagtttgacaggcc

SEQ ID NO: 29136 - DNA, 20 bp, synthetic construct
  source 1..20: mol_type = other DNA
ctttacgaagtttgacaggc

SEQ ID NO: 29137 - DNA, 20 bp, synthetic construct
  source 1..20: mol_type = other DNA
cctttacgaagtttgacagg

SEQ ID NO: 29138 - DNA, 20 bp, synthetic construct
  source 1..20: mol_type = other DNA
ccctttacgaagtttgacag

SEQ ID NO: 29139 - DNA, 20 bp, synthetic construct
  source 1..20: mol_type = other DNA
gccctttacgaagtttgaca

SEQ ID NO: 29140 - DNA, 20 bp, synthetic construct
  source 1..20: mol_type = other DNA
ggccctttacgaagtttgac

SEQ ID NO: 29141 - DNA, 20 bp, synthetic construct
  source 1..20: mol_type = other DNA
tggccctttacgaagtttga

SEQ ID NO: 29142 - DNA, 20 bp, synthetic construct
  source 1..20: mol_type = other DNA
ctggccctttacgaagtttg

SEQ ID NO: 29143 - DNA, 20 bp, synthetic construct
  source 1..20: mol_type = other DNA
tctggccctttacgaagttt

SEQ ID NO: 29144 - DNA, 20 bp, synthetic construct
  source 1..20: mol_type = other DNA
atctggccctttacgaagtt

SEQ ID NO: 29145 - DNA, 20 bp, synthetic construct
  source 1..20: mol_type = other DNA
tatctggccctttacgaagt

SEQ ID NO: 29146 - DNA, 20 bp, synthetic construct
  source 1..20: mol_type = other DNA
ctatctggccctttacgaag

SEQ ID NO: 29147 - DNA, 20 bp, synthetic construct
  source 1..20: mol_type = other DNA
actatctggccctttacgaa

SEQ ID NO: 29148 - DNA, 20 bp, synthetic construct
  source 1..20: mol_type = other DNA
tactatctggccctttacga

SEQ ID NO: 29149 - DNA, 20 bp, synthetic construct
  source 1..20: mol_type = other DNA
ttactatctggccctttacg

SEQ ID NO: 29150 - DNA, 20 bp, synthetic construct
  source 1..20: mol_type = other DNA
tttactatctggccctttac

SEQ ID NO: 29151 - DNA, 20 bp, synthetic construct
  source 1..20: mol_type = other DNA
atttactatctggcccttta

SEQ ID NO: 29152 - DNA, 20 bp, synthetic construct
  source 1..20: mol_type = other DNA
aatttactatctggcccttt

SEQ ID NO: 29153 - DNA, 20 bp, synthetic construct
  source 1..20: mol_type = other DNA
aaatttactatctggccctt

SEQ ID NO: 29154 - DNA, 20 bp, synthetic construct
  source 1..20: mol_type = other DNA
caaatttactatctggccct

SEQ ID NO: 29155 - DNA, 20 bp, synthetic construct
  source 1..20: mol_type = other DNA
acaaatttactatctggccc

SEQ ID NO: 29156 - DNA, 20 bp, synthetic construct
  source 1..20: mol_type = other DNA
aacaaatttactatctggcc

SEQ ID NO: 29157 - DNA, 20 bp, synthetic construct
  source 1..20: mol_type = other DNA
aaacaaatttactatctggc

SEQ ID NO: 29158 - DNA, 20 bp, synthetic construct
  source 1..20: mol_type = other DNA
aaaacaaatttactatctgg

SEQ ID NO: 29159 - DNA, 20 bp, synthetic construct
  source 1..20: mol_type = other DNA
aaaaacaaatttactatctg

SEQ ID NO: 29160 - DNA, 20 bp, synthetic construct
  source 1..20: mol_type = other DNA
aaaaaacaaatttactatct

SEQ ID NO: 29161 - DNA, 20 bp, synthetic construct
  source 1..20: mol_type = other DNA
aaaaaaacaaatttactatc

SEQ ID NO: 29162 - DNA, 20 bp, synthetic construct
  source 1..20: mol_type = other DNA
aaaaaaaacaaatttactat

SEQ ID NO: 29163 - DNA, 20 bp, synthetic construct
  source 1..20: mol_type = other DNA
aaaaaaaaacaaatttacta

SEQ ID NO: 29164 - DNA, 20 bp, synthetic construct
  source 1..20: mol_type = other DNA
aaaaaaaaaacaaatttact

SEQ ID NO: 29165 - DNA, 20 bp, synthetic construct
  source 1..20: mol_type = other DNA
aaaaaaaaaaacaaatttac

SEQ ID NO: 29166 - DNA, 20 bp, synthetic construct
  source 1..20: mol_type = other DNA
aaaaaaaaaaaacaaattta

SEQ ID NO: 29167 - DNA, 20 bp, synthetic construct
  source 1..20: mol_type = other DNA
caaaaaaaaaaaacaaattt

SEQ ID NO: 29168 - DNA, 20 bp, synthetic construct
  source 1..20: mol_type = other DNA
tcaaaaaaaaaaaacaaatt

SEQ ID NO: 29169 - DNA, 20 bp, synthetic construct
  source 1..20: mol_type = other DNA
ctcaaaaaaaaaaaacaaat

SEQ ID NO: 29170 - DNA, 20 bp, synthetic construct
  source 1..20: mol_type = other DNA
tctcaaaaaaaaaaaacaaa

SEQ ID NO: 29171 - DNA, 20 bp, synthetic construct
  source 1..20: mol_type = other DNA
atctcaaaaaaaaaaaacaa

SEQ ID NO: 29172 - DNA, 20 bp, synthetic construct
  source 1..20: mol_type = other DNA
catctcaaaaaaaaaaaaca

SEQ ID NO: 29173 - DNA, 20 bp, synthetic construct
  source 1..20: mol_type = other DNA
ccatctcaaaaaaaaaaaac

SEQ ID NO: 29174 - DNA, 20 bp, synthetic construct
  source 1..20: mol_type = other DNA
tccatctcaaaaaaaaaaaa

SEQ ID NO: 29175 - DNA, 20 bp, synthetic construct
  source 1..20: mol_type = other DNA
ctccatctcaaaaaaaaaaa

SEQ ID NO: 29176 - DNA, 20 bp, synthetic construct
  source 1..20: mol_type = other DNA
actccatctcaaaaaaaaaa

SEQ ID NO: 29177 - DNA, 20 bp, synthetic construct
  source 1..20: mol_type = other DNA
aactccatctcaaaaaaaaa

SEQ ID NO: 29178 - DNA, 20 bp, synthetic construct
  source 1..20: mol_type = other DNA
aaactccatctcaaaaaaaa

SEQ ID NO: 29179 - DNA, 20 bp, synthetic construct
  source 1..20: mol_type = other DNA
aaaactccatctcaaaaaaa

SEQ ID NO: 29180 - DNA, 20 bp, synthetic construct
  source 1..20: mol_type = other DNA
caaaactccatctcaaaaaa

SEQ ID NO: 29181 - DNA, 20 bp, synthetic construct
  source 1..20: mol_type = other DNA
gcaaaactccatctcaaaaa

SEQ ID NO: 29182 - DNA, 20 bp, synthetic construct
  source 1..20: mol_type = other DNA
agcaaaactccatctcaaaa

SEQ ID NO: 29183 - DNA, 20 bp, synthetic construct
  source 1..20: mol_type = other DNA
gagcaaaactccatctcaaa

SEQ ID NO: 29184 - DNA, 20 bp, synthetic construct
  source 1..20: mol_type = other DNA
agagcaaaactccatctcaa

SEQ ID NO: 29185 - DNA, 20 bp, synthetic construct
  source 1..20: mol_type = other DNA
aagagcaaaactccatctca

SEQ ID NO: 29186 - DNA, 20 bp, synthetic construct
  source 1..20: mol_type = other DNA
caagagcaaaactccatctc

SEQ ID NO: 29187 - DNA, 20 bp, synthetic construct
  source 1..20: mol_type = other DNA
acaagagcaaaactccatct

SEQ ID NO: 29188 - DNA, 20 bp, synthetic construct
  source 1..20: mol_type = other DNA
gacaagagcaaaactccatc

SEQ ID NO: 29189 - DNA, 20 bp, synthetic construct
  source 1..20: mol_type = other DNA
tgacaagagcaaaactccat

SEQ ID NO: 29190 - DNA, 20 bp, synthetic construct
  source 1..20: mol_type = other DNA
gtgacaagagcaaaactcca

SEQ ID NO: 29191 - DNA, 20 bp, synthetic construct
  source 1..20: mol_type = other DNA
ggtgacaagagcaaaactcc

SEQ ID NO: 29192 - DNA, 20 bp, synthetic construct
  source 1..20: mol_type = other DNA
gggtgacaagagcaaaactc

SEQ ID NO: 29193 - DNA, 20 bp, synthetic construct
  source 1..20: mol_type = other DNA
tgggtgacaagagcaaaact

SEQ ID NO: 29194 - DNA, 20 bp, synthetic construct
  source 1..20: mol_type = other DNA
ctgggtgacaagagcaaaac

SEQ ID NO: 29195 - DNA, 20 bp, synthetic construct
  source 1..20: mol_type = other DNA
cctgggtgacaagagcaaaa

SEQ ID NO: 29196 - DNA, 20 bp, synthetic construct
  source 1..20: mol_type = other DNA
gcctgggtgacaagagcaaa

SEQ ID NO: 29197 - DNA, 20 bp, synthetic construct
  source 1..20: mol_type = other DNA
agcctgggtgacaagagcaa

SEQ ID NO: 29198 - DNA, 20 bp, synthetic construct
  source 1..20: mol_type = other DNA
cagcctgggtgacaagagca

SEQ ID NO: 29199 - DNA, 20 bp, synthetic construct
  source 1..20: mol_type = other DNA
ccagcctgggtgacaagagc

SEQ ID NO: 29200 - DNA, 20 bp, synthetic construct
  source 1..20: mol_type = other DNA
tccagcctgggtgacaagag

SEQ ID NO: 29201 - DNA, 20 bp, synthetic construct
  source 1..20: mol_type = other DNA
ctccagcctgggtgacaaga

SEQ ID NO: 29202 - DNA, 20 bp, synthetic construct
  source 1..20: mol_type = other DNA
actccagcctgggtgacaag

SEQ ID NO: 29203 - DNA, 20 bp, synthetic construct
  source 1..20: mol_type = other DNA
cactccagcctgggtgacaa

SEQ ID NO: 29204 - DNA, 20 bp, synthetic construct
  source 1..20: mol_type = other DNA
gcactccagcctgggtgaca

SEQ ID NO: 29205 - DNA, 20 bp, synthetic construct
  source 1..20: mol_type = other DNA
tgcactccagcctgggtgac

SEQ ID NO: 29206 - DNA, 20 bp, synthetic construct
  source 1..20: mol_type = other DNA
ttgcactccagcctgggtga

SEQ ID NO: 29207 - DNA, 20 bp, synthetic construct
  source 1..20: mol_type = other DNA
attgcactccagcctgggtg

SEQ ID NO: 29208 - DNA, 20 bp, synthetic construct
  source 1..20: mol_type = other DNA
cattgcactccagcctgggt

SEQ ID NO: 29209 - DNA, 20 bp, synthetic construct
  source 1..20: mol_type = other DNA
ccattgcactccagcctggg

SEQ ID NO: 29210 - DNA, 20 bp, synthetic construct
  source 1..20: mol_type = other DNA
accattgcactccagcctgg

SEQ ID NO: 29211 - DNA, 20 bp, synthetic construct
  source 1..20: mol_type = other DNA
caccattgcactccagcctg

SEQ ID NO: 29212 - DNA, 20 bp, synthetic construct
  source 1..20: mol_type = other DNA
gcaccattgcactccagcct

SEQ ID NO: 29213 - DNA, 20 bp, synthetic construct
  source 1..20: mol_type = other DNA
ggcaccattgcactccagcc

SEQ ID NO: 29214 - DNA, 20 bp, synthetic construct
  source 1..20: mol_type = other DNA
tggcaccattgcactccagc

SEQ ID NO: 29215 - DNA, 20 bp, synthetic construct
  source 1..20: mol_type = other DNA
atggcaccattgcactccag

SEQ ID NO: 29216 - DNA, 20 bp, synthetic construct
  source 1..20: mol_type = other DNA
gatggcaccattgcactcca

SEQ ID NO: 29217 - DNA, 20 bp, synthetic construct
  source 1..20: mol_type = other DNA
agatggcaccattgcactcc

SEQ ID NO: 29218 - DNA, 20 bp, synthetic construct
  source 1..20: mol_type = other DNA
aagatggcaccattgcactc

SEQ ID NO: 29219 - DNA, 20 bp, synthetic construct
  source 1..20: mol_type = other DNA
caagatggcaccattgcact

SEQ ID NO: 29220 - DNA, 20 bp, synthetic construct
  source 1..20: mol_type = other DNA
ccaagatggcaccattgcac

SEQ ID NO: 29221 - DNA, 20 bp, synthetic construct
  source 1..20: mol_type = other DNA
gccaagatggcaccattgca

SEQ ID NO: 29222 - DNA, 20 bp, synthetic construct
  source 1..20: mol_type = other DNA
agccaagatggcaccattgc

SEQ ID NO: 29223 - DNA, 20 bp, synthetic construct
  source 1..20: mol_type = other DNA
gagccaagatggcaccattg

SEQ ID NO: 29224 - DNA, 20 bp, synthetic construct
  source 1..20: mol_type = other DNA
tgagccaagatggcaccatt

SEQ ID NO: 29225 - DNA, 20 bp, synthetic construct
  source 1..20: mol_type = other DNA
gtgagccaagatggcaccat

SEQ ID NO: 29226 - DNA, 20 bp, synthetic construct
  source 1..20: mol_type = other DNA
agtgagccaagatggcacca

SEQ ID NO: 29227 - DNA, 20 bp, synthetic construct
  source 1..20: mol_type = other DNA
cagtgagccaagatggcacc

SEQ ID NO: 29228 - DNA, 20 bp, synthetic construct
  source 1..20: mol_type = other DNA
gcagtgagccaagatggcac

SEQ ID NO: 29229 - DNA, 20 bp, synthetic construct
  source 1..20: mol_type = other DNA
tgcagtgagccaagatggca

SEQ ID NO: 29230 - DNA, 20 bp, synthetic construct
  source 1..20: mol_type = other DNA
ttgcagtgagccaagatggc

SEQ ID NO: 29231 - DNA, 20 bp, synthetic construct
  source 1..20: mol_type = other DNA
gttgcagtgagccaagatgg

SEQ ID NO: 29232 - DNA, 20 bp, synthetic construct
  source 1..20: mol_type = other DNA
ggttgcagtgagccaagatg

SEQ ID NO: 29233 - DNA, 20 bp, synthetic construct
  source 1..20: mol_type = other DNA
aggttgcagtgagccaagat

SEQ ID NO: 29234 - DNA, 20 bp, synthetic construct
  source 1..20: mol_type = other DNA
gaggttgcagtgagccaaga

SEQ ID NO: 29235 - DNA, 20 bp, synthetic construct
  source 1..20: mol_type = other DNA
agaggttgcagtgagccaag

SEQ ID NO: 29236 - DNA, 20 bp, synthetic construct
  source 1..20: mol_type = other DNA
cagaggttgcagtgagccaa

SEQ ID NO: 29237 - DNA, 20 bp, synthetic construct
  source 1..20: mol_type = other DNA
gcagaggttgcagtgagcca

SEQ ID NO: 29238 - DNA, 20 bp, synthetic construct
  source 1..20: mol_type = other DNA
ggcagaggttgcagtgagcc

SEQ ID NO: 29239 - DNA, 20 bp, synthetic construct
  source 1..20: mol_type = other DNA
aggcagaggttgcagtgagc

SEQ ID NO: 29240 - DNA, 20 bp, synthetic construct
  source 1..20: mol_type = other DNA
gaggcagaggttgcagtgag

SEQ ID NO: 29241 - DNA, 20 bp, synthetic construct
  source 1..20: mol_type = other DNA
ggaggcagaggttgcagtga

SEQ ID NO: 29242 - DNA, 20 bp, synthetic construct
  source 1..20: mol_type = other DNA
gggaggcagaggttgcagtg

SEQ ID NO: 29243 - DNA, 20 bp, synthetic construct
  source 1..20: mol_type = other DNA
tgggaggcagaggttgcagt

SEQ ID NO: 29244 - DNA, 20 bp, synthetic construct
  source 1..20: mol_type = other DNA
ctgggaggcagaggttgcag

SEQ ID NO: 29245 - DNA, 20 bp, synthetic construct
  source 1..20: mol_type = other DNA
cctgggaggcagaggttgca

SEQ ID NO: 29246 - DNA, 20 bp, synthetic construct
  source 1..20: mol_type = other DNA
acctgggaggcagaggttgc

SEQ ID NO: 29247 - DNA, 20 bp, synthetic construct
  source 1..20: mol_type = other DNA
aacctgggaggcagaggttg

SEQ ID NO: 29248 - DNA, 20 bp, synthetic construct
  source 1..20: mol_type = other DNA
gaacctgggaggcagaggtt

SEQ ID NO: 29249 - DNA, 20 bp, synthetic construct
  source 1..20: mol_type = other DNA
tgaacctgggaggcagaggt

SEQ ID NO: 29250 - DNA, 20 bp, synthetic construct
  source 1..20: mol_type = other DNA
ttgaacctgggaggcagagg

SEQ ID NO: 29251 - DNA, 20 bp, synthetic construct
  source 1..20: mol_type = other DNA
cttgaacctgggaggcagag

SEQ ID NO: 29252 - DNA, 20 bp, synthetic construct
  source 1..20: mol_type = other DNA
acttgaacctgggaggcaga

SEQ ID NO: 29253 - DNA, 20 bp, synthetic construct
  source 1..20: mol_type = other DNA
cacttgaacctgggaggcag

SEQ ID NO: 29254 - DNA, 20 bp, synthetic construct
  source 1..20: mol_type = other DNA
tcacttgaacctgggaggca

SEQ ID NO: 29255 - DNA, 20 bp, synthetic construct
  source 1..20: mol_type = other DNA
atcacttgaacctgggaggc

SEQ ID NO: 29256 - DNA, 20 bp, synthetic construct
  source 1..20: mol_type = other DNA
aatcacttgaacctgggagg

SEQ ID NO: 29257 - DNA, 20 bp, synthetic construct
  source 1..20: mol_type = other DNA
gaatcacttgaacctgggag

SEQ ID NO: 29258 - DNA, 20 bp, synthetic construct
  source 1..20: mol_type = other DNA
agaatcacttgaacctggga

SEQ ID NO: 29259 - DNA, 20 bp, synthetic construct
  source 1..20: mol_type = other DNA
gagaatcacttgaacctggg

SEQ ID NO: 29260 - DNA, 20 bp, synthetic construct
  source 1..20: mol_type = other DNA
ggagaatcacttgaacctgg

SEQ ID NO: 29261 - DNA, 20 bp, synthetic construct
  source 1..20: mol_type = other DNA
aggagaatcacttgaacctg

SEQ ID NO: 29262 - DNA, 20 bp, synthetic construct
  source 1..20: mol_type = other DNA
caggagaatcacttgaacct

SEQ ID NO: 29263 - DNA, 20 bp, synthetic construct
  source 1..20: mol_type = other DNA
gcaggagaatcacttgaacc

SEQ ID NO: 29264 - DNA, 20 bp, synthetic construct
  source 1..20: mol_type = other DNA
ggcaggagaatcacttgaac

SEQ ID NO: 29265 - DNA, 20 bp, synthetic construct
  source 1..20: mol_type = other DNA
aggcaggagaatcacttgaa

SEQ ID NO: 29266 - DNA, 20 bp, synthetic construct
  source 1..20: mol_type = other DNA
gaggcaggagaatcacttga

SEQ ID NO: 29267 - DNA, 20 bp, synthetic construct
  source 1..20: mol_type = other DNA
tgaggcaggagaatcacttg

SEQ ID NO: 29268 - DNA, 20 bp, synthetic construct
  source 1..20: mol_type = other DNA
ctgaggcaggagaatcactt

SEQ ID NO: 29269 - DNA, 20 bp, synthetic construct
  source 1..20: mol_type = other DNA
gctgaggcaggagaatcact

SEQ ID NO: 29270 - DNA, 20 bp, synthetic construct
  source 1..20: mol_type = other DNA
ggctgaggcaggagaatcac

SEQ ID NO: 29271 - DNA, 20 bp, synthetic construct
  source 1..20: mol_type = other DNA
aggctgaggcaggagaatca

SEQ ID NO: 29272 - DNA, 20 bp, synthetic construct
  source 1..20: mol_type = other DNA
gaggctgaggcaggagaatc

SEQ ID NO: 29273 - DNA, 20 bp, synthetic construct
  source 1..20: mol_type = other DNA
agaggctgaggcaggagaat

SEQ ID NO: 29274 - DNA, 20 bp, synthetic construct
  source 1..20: mol_type = other DNA
gagaggctgaggcaggagaa

SEQ ID NO: 29275 - DNA, 20 bp, synthetic construct
  source 1..20: mol_type = other DNA
tgagaggctgaggcaggaga

SEQ ID NO: 29276 - DNA, 20 bp, synthetic construct
  source 1..20: mol_type = other DNA
ttgagaggctgaggcaggag

SEQ ID NO: 29277 - DNA, 20 bp, synthetic construct
  source 1..20: mol_type = other DNA
cttgagaggctgaggcagga

SEQ ID NO: 29278 - DNA, 20 bp, synthetic construct
  source 1..20: mol_type = other DNA
acttgagaggctgaggcagg

SEQ ID NO: 29279 - DNA, 20 bp, synthetic construct
  source 1..20: mol_type = other DNA
tacttgagaggctgaggcag

SEQ ID NO: 29280 - DNA, 20 bp, synthetic construct
  source 1..20: mol_type = other DNA
ctacttgagaggctgaggca

SEQ ID NO: 29281 - DNA, 20 bp, synthetic construct
  source 1..20: mol_type = other DNA
gctacttgagaggctgaggc

SEQ ID NO: 29282 - DNA, 20 bp, synthetic construct
  source 1..20: mol_type = other DNA
agctacttgagaggctgagg

SEQ ID NO: 29283 - DNA, 20 bp, synthetic construct
  source 1..20: mol_type = other DNA
cagctacttgagaggctgag

SEQ ID NO: 29284 - DNA, 20 bp, synthetic construct
  source 1..20: mol_type = other DNA
ccagctacttgagaggctga

SEQ ID NO: 29285 - DNA, 20 bp, synthetic construct
  source 1..20: mol_type = other DNA
cccagctacttgagaggctg

SEQ ID NO: 29286 - DNA, 20 bp, synthetic construct
  source 1..20: mol_type = other DNA
ccccagctacttgagaggct

SEQ ID NO: 29287 - DNA, 20 bp, synthetic construct
  source 1..20: mol_type = other DNA
accccagctacttgagaggc

SEQ ID NO: 29288 - DNA, 20 bp, synthetic construct
  source 1..20: mol_type = other DNA
aaccccagctacttgagagg

SEQ ID NO: 29289 - DNA, 20 bp, synthetic construct
  source 1..20: mol_type = other DNA
taaccccagctacttgagag

SEQ ID NO: 29290 - DNA, 20 bp, synthetic construct
  source 1..20: mol_type = other DNA
ataaccccagctacttgaga

SEQ ID NO: 29291 - DNA, 20 bp, synthetic construct
  source 1..20: mol_type = other DNA
tataaccccagctacttgag

SEQ ID NO: 29292 - DNA, 20 bp, synthetic construct
  source 1..20: mol_type = other DNA
ctataaccccagctacttga

SEQ ID NO: 29293 - DNA, 20 bp, synthetic construct
  source 1..20: mol_type = other DNA
cctataaccccagctacttg

SEQ ID NO: 29294 - DNA, 20 bp, synthetic construct
  source 1..20: mol_type = other DNA
gcctataaccccagctactt

SEQ ID NO: 29295 - DNA, 20 bp, synthetic construct
  source 1..20: mol_type = other DNA
tgcctataaccccagctact

SEQ ID NO: 29296 - DNA, 20 bp, synthetic construct
  source 1..20: mol_type = other DNA
atgcctataaccccagctac

SEQ ID NO: 29297 - DNA, 20 bp, synthetic construct
  source 1..20: mol_type = other DNA
catgcctataaccccagcta

SEQ ID NO: 29298 - DNA, 20 bp, synthetic construct
  source 1..20: mol_type = other DNA
acatgcctataaccccagct

SEQ ID NO: 29299 - DNA, 20 bp, synthetic construct
  source 1..20: mol_type = other DNA
cacatgcctataaccccagc

SEQ ID NO: 29300 - DNA, 20 bp, synthetic construct
  source 1..20: mol_type = other DNA
gcacatgcctataaccccag

SEQ ID NO: 29301 - DNA, 20 bp, synthetic construct
  source 1..20: mol_type = other DNA
ggcacatgcctataacccca

SEQ ID NO: 29302 - DNA, 20 bp, synthetic construct
  source 1..20: mol_type = other DNA
tggcacatgcctataacccc

SEQ ID NO: 29303 - DNA, 20 bp, synthetic construct
  source 1..20: mol_type = other DNA
gtggcacatgcctataaccc

SEQ ID NO: 29304 - DNA, 20 bp, synthetic construct
  source 1..20: mol_type = other DNA
ggtggcacatgcctataacc

SEQ ID NO: 29305 - DNA, 20 bp, synthetic construct
  source 1..20: mol_type = other DNA
tggtggcacatgcctataac

SEQ ID NO: 29306 - DNA, 20 bp, synthetic construct
  source 1..20: mol_type = other DNA
gtggtggcacatgcctataa

SEQ ID NO: 29307 - DNA, 20 bp, synthetic construct
  source 1..20: mol_type = other DNA
cgtggtggcacatgcctata

SEQ ID NO: 29308 - DNA, 20 bp, synthetic construct
  source 1..20: mol_type = other DNA
gcgtggtggcacatgcctat

SEQ ID NO: 29309 - DNA, 20 bp, synthetic construct
  source 1..20: mol_type = other DNA
agcgtggtggcacatgccta

SEQ ID NO: 29310 - DNA, 20 bp, synthetic construct
  source 1..20: mol_type = other DNA
gagcgtggtggcacatgcct

SEQ ID NO: 29311 - DNA, 20 bp, synthetic construct
  source 1..20: mol_type = other DNA
cgagcgtggtggcacatgcc

SEQ ID NO: 29312 - DNA, 20 bp, synthetic construct
  source 1..20: mol_type = other DNA
ccgagcgtggtggcacatgc

SEQ ID NO: 29313 - DNA, 20 bp, synthetic construct
  source 1..20: mol_type = other DNA
gccgagcgtggtggcacatg

SEQ ID NO: 29314 - DNA, 20 bp, synthetic construct
  source 1..20: mol_type = other DNA
agccgagcgtggtggcacat

SEQ ID NO: 29315 - DNA, 20 bp, synthetic construct
  source 1..20: mol_type = other DNA
tagccgagcgtggtggcaca

SEQ ID NO: 29316 - DNA, 20 bp, synthetic construct
  source 1..20: mol_type = other DNA
ttagccgagcgtggtggcac

SEQ ID NO: 29317 - DNA, 20 bp, synthetic construct
  source 1..20: mol_type = other DNA
attagccgagcgtggtggca

SEQ ID NO: 29318 - DNA, 20 bp, synthetic construct
  source 1..20: mol_type = other DNA
aattagccgagcgtggtggc

SEQ ID NO: 29319 - DNA, 20 bp, synthetic construct
  source 1..20: mol_type = other DNA
aaattagccgagcgtggtgg

SEQ ID NO: 29320 - DNA, 20 bp, synthetic construct
  source 1..20: mol_type = other DNA
gaaattagccgagcgtggtg

SEQ ID NO: 29321 - DNA, 20 bp, synthetic construct
  source 1..20: mol_type = other DNA
agaaattagccgagcgtggt

SEQ ID NO: 29322 - DNA, 20 bp, synthetic construct
  source 1..20: mol_type = other DNA
aagaaattagccgagcgtgg

SEQ ID NO: 29323 - DNA, 20 bp, synthetic construct
  source 1..20: mol_type = other DNA
aaagaaattagccgagcgtg

SEQ ID NO: 29324 - DNA, 20 bp, synthetic construct
  source 1..20: mol_type = other DNA
caaagaaattagccgagcgt

SEQ ID NO: 29325 - DNA, 20 bp, synthetic construct
  source 1..20: mol_type = other DNA
acaaagaaattagccgagcg

SEQ ID NO: 29326 - DNA, 20 bp, synthetic construct
  source 1..20: mol_type = other DNA
tacaaagaaattagccgagc

SEQ ID NO: 29327 - DNA, 20 bp, synthetic construct
  source 1..20: mol_type = other DNA
atacaaagaaattagccgag

SEQ ID NO: 29328 - DNA, 20 bp, synthetic construct
  source 1..20: mol_type = other DNA
aatacaaagaaattagccga

SEQ ID NO: 29329 - DNA, 20 bp, synthetic construct
  source 1..20: mol_type = other DNA
aaatacaaagaaattagccg

SEQ ID NO: 29330 - DNA, 20 bp, synthetic construct
  source 1..20: mol_type = other DNA
taaatacaaagaaattagcc

SEQ ID NO: 29331 - DNA, 20 bp, synthetic construct
  source 1..20: mol_type = other DNA
ctaaatacaaagaaattagc

SEQ ID NO: 29332 - DNA, 20 bp, synthetic construct
  source 1..20: mol_type = other DNA
actaaatacaaagaaattag

SEQ ID NO: 29333 - DNA, 20 bp, synthetic construct
  source 1..20: mol_type = other DNA
tactaaatacaaagaaatta

SEQ ID NO: 29334 - DNA, 20 bp, synthetic construct
  source 1..20: mol_type = other DNA
ctactaaatacaaagaaatt

SEQ ID NO: 29335 - DNA, 20 bp, synthetic construct
  source 1..20: mol_type = other DNA
tctactaaatacaaagaaat

SEQ ID NO: 29336 - DNA, 20 bp, synthetic construct
  source 1..20: mol_type = other DNA
ctctactaaatacaaagaaa

SEQ ID NO: 29337 - DNA, 20 bp, synthetic construct
  source 1..20: mol_type = other DNA
tctctactaaatacaaagaa

SEQ ID NO: 29338 - DNA, 20 bp, synthetic construct
  source 1..20: mol_type = other DNA
atctctactaaatacaaaga

SEQ ID NO: 29339 - DNA, 20 bp, synthetic construct
  source 1..20: mol_type = other DNA
catctctactaaatacaaag

SEQ ID NO: 29340 - DNA, 20 bp, synthetic construct
  source 1..20: mol_type = other DNA
ccatctctactaaatacaaa

SEQ ID NO: 29341 - DNA, 20 bp, synthetic construct
  source 1..20: mol_type = other DNA
cccatctctactaaatacaa

SEQ ID NO: 29342 - DNA, 20 bp, synthetic construct
  source 1..20: mol_type = other DNA
ccccatctctactaaataca

SEQ ID NO: 29343 - DNA, 20 bp, synthetic construct
  source 1..20: mol_type = other DNA
cccccatctctactaaatac

SEQ ID NO: 29344 - DNA, 20 bp, synthetic construct
  source 1..20: mol_type = other DNA
acccccatctctactaaata

SEQ ID NO: 29345 - DNA, 20 bp, synthetic construct
  source 1..20: mol_type = other DNA
aacccccatctctactaaat

SEQ ID NO: 29346 - DNA, 20 bp, synthetic construct
  source 1..20: mol_type = other DNA
aaacccccatctctactaaa

SEQ ID NO: 29347 - DNA, 20 bp, synthetic construct
  source 1..20: mol_type = other DNA
gaaacccccatctctactaa

SEQ ID NO: 29348 - DNA, 20 bp, synthetic construct
  source 1..20: mol_type = other DNA
tgaaacccccatctctacta

SEQ ID NO: 29349 - DNA, 20 bp, synthetic construct
  source 1..20: mol_type = other DNA
gtgaaacccccatctctact

SEQ ID NO: 29350 - DNA, 20 bp, synthetic construct
  source 1..20: mol_type = other DNA
ggtgaaacccccatctctac

SEQ ID NO: 29351 - DNA, 20 bp, synthetic construct
  source 1..20: mol_type = other DNA
tggtgaaacccccatctcta

SEQ ID NO: 29352 - DNA, 20 bp, synthetic construct
  source 1..20: mol_type = other DNA
atggtgaaacccccatctct

SEQ ID NO: 29353 - DNA, 20 bp, synthetic construct
  source 1..20: mol_type = other DNA
aatggtgaaacccccatctc

SEQ ID NO: 29354 - DNA, 20 bp, synthetic construct
  source 1..20: mol_type = other DNA
aaatggtgaaacccccatct

SEQ ID NO: 29355 - DNA, 20 bp, synthetic construct
  source 1..20: mol_type = other DNA
aaaatggtgaaacccccatc

SEQ ID NO: 29356 - DNA, 20 bp, synthetic construct
  source 1..20: mol_type = other DNA
caaaatggtgaaacccccat

SEQ ID NO: 29357 - DNA, 20 bp, synthetic construct
  source 1..20: mol_type = other DNA
ccaaaatggtgaaaccccca

SEQ ID NO: 29358 - DNA, 20 bp, synthetic construct
  source 1..20: mol_type = other DNA
accaaaatggtgaaaccccc

SEQ ID NO: 29359 - DNA, 20 bp, synthetic construct
  source 1..20: mol_type = other DNA
gaccaaaatggtgaaacccc

SEQ ID NO: 29360 - DNA, 20 bp, synthetic construct
  source 1..20: mol_type = other DNA
tgaccaaaatggtgaaaccc

SEQ ID NO: 29361 - DNA, 20 bp, synthetic construct
  source 1..20: mol_type = other DNA
ctgaccaaaatggtgaaacc

SEQ ID NO: 29362 - DNA, 20 bp, synthetic construct
  source 1..20: mol_type = other DNA
cctgaccaaaatggtgaaac

SEQ ID NO: 29363 - DNA, 20 bp, synthetic construct
  source 1..20: mol_type = other DNA
gcctgaccaaaatggtgaaa

SEQ ID NO: 29364 - DNA, 20 bp, synthetic construct
  source 1..20: mol_type = other DNA
agcctgaccaaaatggtgaa

SEQ ID NO: 29365 - DNA, 20 bp, synthetic construct
  source 1..20: mol_type = other DNA
cagcctgaccaaaatggtga

SEQ ID NO: 29366 - DNA, 20 bp, synthetic construct
  source 1..20: mol_type = other DNA
ccagcctgaccaaaatggtg

SEQ ID NO: 29367 - DNA, 20 bp, synthetic construct
  source 1..20: mol_type = other DNA
accagcctgaccaaaatggt

SEQ ID NO: 29368 - DNA, 20 bp, synthetic construct
  source 1..20: mol_type = other DNA
gaccagcctgaccaaaatgg

SEQ ID NO: 29369 - DNA, 20 bp, synthetic construct
  source 1..20: mol_type = other DNA
agaccagcctgaccaaaatg

SEQ ID NO: 29370 - DNA, 20 bp, synthetic construct
  source 1..20: mol_type = other DNA
gagaccagcctgaccaaaat

SEQ ID NO: 29371 - DNA, 20 bp, synthetic construct
  source 1..20: mol_type = other DNA
cgagaccagcctgaccaaaa

SEQ ID NO: 29372 - DNA, 20 bp, synthetic construct
  source 1..20: mol_type = other DNA
tcgagaccagcctgaccaaa

SEQ ID NO: 29373 - DNA, 20 bp, synthetic construct
  source 1..20: mol_type = other DNA
ttcgagaccagcctgaccaa

SEQ ID NO: 29374 - DNA, 20 bp, synthetic construct
  source 1..20: mol_type = other DNA
gttcgagaccagcctgacca

SEQ ID NO: 29375 - DNA, 20 bp, synthetic construct
  source 1..20: mol_type = other DNA
agttcgagaccagcctgacc

SEQ ID NO: 29376 - DNA, 20 bp, synthetic construct
  source 1..20: mol_type = other DNA
gagttcgagaccagcctgac

SEQ ID NO: 29377 - DNA, 20 bp, synthetic construct
  source 1..20: mol_type = other DNA
ggagttcgagaccagcctga

SEQ ID NO: 29378 - DNA, 20 bp, synthetic construct
  source 1..20: mol_type = other DNA
aggagttcgagaccagcctg

SEQ ID NO: 29379 - DNA, 20 bp, synthetic construct
  source 1..20: mol_type = other DNA
caggagttcgagaccagcct

SEQ ID NO: 29380 - DNA, 20 bp, synthetic construct
  source 1..20: mol_type = other DNA
tcaggagttcgagaccagcc

SEQ ID NO: 29381 - DNA, 20 bp, synthetic construct
  source 1..20: mol_type = other DNA
gtcaggagttcgagaccagc

SEQ ID NO: 29382 - DNA, 20 bp, synthetic construct
  source 1..20: mol_type = other DNA
ggtcaggagttcgagaccag

SEQ ID NO: 29383 - DNA, 20 bp, synthetic construct
  source 1..20: mol_type = other DNA
aggtcaggagttcgagacca

SEQ ID NO: 29384 - DNA, 20 bp, synthetic construct
  source 1..20: mol_type = other DNA
gaggtcaggagttcgagacc

SEQ ID NO: 29385 - DNA, 20 bp, synthetic construct
  source 1..20: mol_type = other DNA
tgaggtcaggagttcgagac

SEQ ID NO: 29386 - DNA, 20 bp, synthetic construct
  source 1..20: mol_type = other DNA
ctgaggtcaggagttcgaga

SEQ ID NO: 29387 - DNA, 20 bp, synthetic construct
  source 1..20: mol_type = other DNA
cctgaggtcaggagttcgag

SEQ ID NO: 29388 - DNA, 20 bp, synthetic construct
  source 1..20: mol_type = other DNA
acctgaggtcaggagttcga

SEQ ID NO: 29389 - DNA, 20 bp, synthetic construct
  source 1..20: mol_type = other DNA
cacctgaggtcaggagttcg

SEQ ID NO: 29390 - DNA, 20 bp, synthetic construct
  source 1..20: mol_type = other DNA
tcacctgaggtcaggagttc

SEQ ID NO: 29391 - DNA, 20 bp, synthetic construct
  source 1..20: mol_type = other DNA
atcacctgaggtcaggagtt

SEQ ID NO: 29392 - DNA, 20 bp, synthetic construct
  source 1..20: mol_type = other DNA
gatcacctgaggtcaggagt

SEQ ID NO: 29393 - DNA, 20 bp, synthetic construct
  source 1..20: mol_type = other DNA
ggatcacctgaggtcaggag

SEQ ID NO: 29394 - DNA, 20 bp, synthetic construct
  source 1..20: mol_type = other DNA
tggatcacctgaggtcagga

SEQ ID NO: 29395 - DNA, 20 bp, synthetic construct
  source 1..20: mol_type = other DNA
gtggatcacctgaggtcagg

SEQ ID NO: 29396 - DNA, 20 bp, synthetic construct
  source 1..20: mol_type = other DNA
ggtggatcacctgaggtcag

SEQ ID NO: 29397 - DNA, 20 bp, synthetic construct
  source 1..20: mol_type = other DNA
aggtggatcacctgaggtca

SEQ ID NO: 29398 - DNA, 20 bp, synthetic construct
  source 1..20: mol_type = other DNA
caggtggatcacctgaggtc

SEQ ID NO: 29399 - DNA, 20 bp, synthetic construct
  source 1..20: mol_type = other DNA
gcaggtggatcacctgaggt

SEQ ID NO: 29400 - DNA, 20 bp, synthetic construct
  source 1..20: mol_type = other DNA
agcaggtggatcacctgagg

SEQ ID NO: 29401 - DNA, 20 bp, synthetic construct
  source 1..20: mol_type = other DNA
cagcaggtggatcacctgag

SEQ ID NO: 29402 - DNA, 20 bp, synthetic construct
  source 1..20: mol_type = other DNA
gcagcaggtggatcacctga

SEQ ID NO: 29403 - DNA, 20 bp, synthetic construct
  source 1..20: mol_type = other DNA
cgcagcaggtggatcacctg

SEQ ID NO: 29404 - DNA, 20 bp, synthetic construct
  source 1..20: mol_type = other DNA
ccgcagcaggtggatcacct

SEQ ID NO: 29405 - DNA, 20 bp, synthetic construct
  source 1..20: mol_type = other DNA
gccgcagcaggtggatcacc

SEQ ID NO: 29406 - DNA, 20 bp, synthetic construct
  source 1..20: mol_type = other DNA
ggccgcagcaggtggatcac

SEQ ID NO: 29407 - DNA, 20 bp, synthetic construct
  source 1..20: mol_type = other DNA
aggccgcagcaggtggatca

SEQ ID NO: 29408 - DNA, 20 bp, synthetic construct
  source 1..20: mol_type = other DNA
gaggccgcagcaggtggatc

SEQ ID NO: 29409 - DNA, 20 bp, synthetic construct
  source 1..20: mol_type = other DNA
ggaggccgcagcaggtggat

SEQ ID NO: 29410 - DNA, 20 bp, synthetic construct
  source 1..20: mol_type = other DNA
gggaggccgcagcaggtgga

SEQ ID NO: 29411 - DNA, 20 bp, synthetic construct
  source 1..20: mol_type = other DNA
tgggaggccgcagcaggtgg

SEQ ID NO: 29412 - DNA, 20 bp, synthetic construct
  source 1..20: mol_type = other DNA
ttgggaggccgcagcaggtg

SEQ ID NO: 29413 - DNA, 20 bp, synthetic construct
  source 1..20: mol_type = other DNA
tttgggaggccgcagcaggt

SEQ ID NO: 29414 - DNA, 20 bp, synthetic construct
  source 1..20: mol_type = other DNA
ctttgggaggccgcagcagg

SEQ ID NO: 29415 - DNA, 20 bp, synthetic construct
  source 1..20: mol_type = other DNA
actttgggaggccgcagcag

SEQ ID NO: 29416 - DNA, 20 bp, synthetic construct
  source 1..20: mol_type = other DNA
cactttgggaggccgcagca

SEQ ID NO: 29417 - DNA, 20 bp, synthetic construct
  source 1..20: mol_type = other DNA
gcactttgggaggccgcagc

SEQ ID NO: 29418 - DNA, 20 bp, synthetic construct
  source 1..20: mol_type = other DNA
agcactttgggaggccgcag

SEQ ID NO: 29419 - DNA, 20 bp, synthetic construct
  source 1..20: mol_type = other DNA
cagcactttgggaggccgca

SEQ ID NO: 29420 - DNA, 20 bp, synthetic construct
  source 1..20: mol_type = other DNA
ccagcactttgggaggccgc

SEQ ID NO: 29421 - DNA, 20 bp, synthetic construct
  source 1..20: mol_type = other DNA
cccagcactttgggaggccg

SEQ ID NO: 29422 - DNA, 20 bp, synthetic construct
  source 1..20: mol_type = other DNA
tcccagcactttgggaggcc

SEQ ID NO: 29423 - DNA, 20 bp, synthetic construct
  source 1..20: mol_type = other DNA
atcccagcactttgggaggc

SEQ ID NO: 29424 - DNA, 20 bp, synthetic construct
  source 1..20: mol_type = other DNA
aatcccagcactttgggagg

SEQ ID NO: 29425 - DNA, 20 bp, synthetic construct
  source 1..20: mol_type = other DNA
taatcccagcactttgggag

SEQ ID NO: 29426 - DNA, 20 bp, synthetic construct
  source 1..20: mol_type = other DNA
gtaatcccagcactttggga

SEQ ID NO: 29427 - DNA, 20 bp, synthetic construct
  source 1..20: mol_type = other DNA
ggtaatcccagcactttggg

SEQ ID NO: 29428 - DNA, 20 bp, synthetic construct
  source 1..20: mol_type = other DNA
tggtaatcccagcactttgg

SEQ ID NO: 29429 - DNA, 20 bp, synthetic construct
  source 1..20: mol_type = other DNA
ctggtaatcccagcactttg

SEQ ID NO: 29430 - DNA, 20 bp, synthetic construct
  source 1..20: mol_type = other DNA
actggtaatcccagcacttt

SEQ ID NO: 29431 - DNA, 20 bp, synthetic construct
  source 1..20: mol_type = other DNA
cactggtaatcccagcactt

SEQ ID NO: 29432 - DNA, 20 bp, synthetic construct
  source 1..20: mol_type = other DNA
acactggtaatcccagcact

SEQ ID NO: 29433 - DNA, 20 bp, synthetic construct
  source 1..20: mol_type = other DNA
cacactggtaatcccagcac

SEQ ID NO: 29434 - DNA, 20 bp, synthetic construct
  source 1..20: mol_type = other DNA
tcacactggtaatcccagca

SEQ ID NO: 29435 - DNA, 20 bp, synthetic construct
  source 1..20: mol_type = other DNA
ttcacactggtaatcccagc

SEQ ID NO: 29436 - DNA, 20 bp, synthetic construct
  source 1..20: mol_type = other DNA
gttcacactggtaatcccag

SEQ ID NO: 29437 - DNA, 20 bp, synthetic construct
  source 1..20: mol_type = other DNA
ggttcacactggtaatccca

SEQ ID NO: 29438 - DNA, 20 bp, synthetic construct
  source 1..20: mol_type = other DNA
tggttcacactggtaatccc

SEQ ID NO: 29439 - DNA, 20 bp, synthetic construct
  source 1..20: mol_type = other DNA
gtggttcacactggtaatcc

SEQ ID NO: 29440 - DNA, 20 bp, synthetic construct
  source 1..20: mol_type = other DNA
ggtggttcacactggtaatc

SEQ ID NO: 29441 - DNA, 20 bp, synthetic construct
  source 1..20: mol_type = other DNA
cggtggttcacactggtaat

SEQ ID NO: 29442 - DNA, 20 bp, synthetic construct
  source 1..20: mol_type = other DNA
acggtggttcacactggtaa

SEQ ID NO: 29443 - DNA, 20 bp, synthetic construct
  source 1..20: mol_type = other DNA
cacggtggttcacactggta

SEQ ID NO: 29444 - DNA, 20 bp, synthetic construct
  source 1..20: mol_type = other DNA
gcacggtggttcacactggt

SEQ ID NO: 29445 - DNA, 20 bp, synthetic construct
  source 1..20: mol_type = other DNA
ggcacggtggttcacactgg

SEQ ID NO: 29446 - DNA, 20 bp, synthetic construct
  source 1..20: mol_type = other DNA
gggcacggtggttcacactg

SEQ ID NO: 29447 - DNA, 20 bp, synthetic construct
  source 1..20: mol_type = other DNA
tgggcacggtggttcacact

SEQ ID NO: 29448 - DNA, 20 bp, synthetic construct
  source 1..20: mol_type = other DNA
ctgggcacggtggttcacac

SEQ ID NO: 29449 - DNA, 20 bp, synthetic construct
  source 1..20: mol_type = other DNA
gctgggcacggtggttcaca

SEQ ID NO: 29450 - DNA, 20 bp, synthetic construct
  source 1..20: mol_type = other DNA
ggctgggcacggtggttcac

SEQ ID NO: 29451 - DNA, 20 bp, synthetic construct
  source 1..20: mol_type = other DNA
gggctgggcacggtggttca

SEQ ID NO: 29452 - DNA, 20 bp, synthetic construct
  source 1..20: mol_type = other DNA
cgggctgggcacggtggttc

SEQ ID NO: 29453 - DNA, 20 bp, synthetic construct
  source 1..20: mol_type = other DNA
tcgggctgggcacggtggtt

SEQ ID NO: 29454 - DNA, 20 bp, synthetic construct
  source 1..20: mol_type = other DNA
atcgggctgggcacggtggt

SEQ ID NO: 29455 - DNA, 20 bp, synthetic construct
  source 1..20: mol_type = other DNA
tatcgggctgggcacggtgg

SEQ ID NO: 29456 - DNA, 20 bp, synthetic construct
  source 1..20: mol_type = other DNA
ctatcgggctgggcacggtg

SEQ ID NO: 29457 - DNA, 20 bp, synthetic construct
  source 1..20: mol_type = other DNA
actatcgggctgggcacggt

SEQ ID NO: 29458 - DNA, 20 bp, synthetic construct
  source 1..20: mol_type = other DNA
tactatcgggctgggcacgg

SEQ ID NO: 29459 - DNA, 20 bp, synthetic construct
  source 1..20: mol_type = other DNA
ttactatcgggctgggcacg

SEQ ID NO: 29460 - DNA, 20 bp, synthetic construct
  source 1..20: mol_type = other DNA
tttactatcgggctgggcac

SEQ ID NO: 29461 - DNA, 20 bp, synthetic construct
  source 1..20: mol_type = other DNA
atttactatcgggctgggca

SEQ ID NO: 29462 - DNA, 20 bp, synthetic construct
  source 1..20: mol_type = other DNA
tatttactatcgggctgggc

SEQ ID NO: 29463 - DNA, 20 bp, synthetic construct
  source 1..20: mol_type = other DNA
atatttactatcgggctggg

SEQ ID NO: 29464 - DNA, 20 bp, synthetic construct
  source 1..20: mol_type = other DNA
aatatttactatcgggctgg

SEQ ID NO: 29465 - DNA, 20 bp, synthetic construct
  source 1..20: mol_type = other DNA
aaatatttactatcgggctg

SEQ ID NO: 29466 - DNA, 20 bp, synthetic construct
  source 1..20: mol_type = other DNA
aaaatatttactatcgggct

SEQ ID NO: 29467 - DNA, 20 bp, synthetic construct
  source 1..20: mol_type = other DNA
taaaatatttactatcgggc

SEQ ID NO: 29468 - DNA, 20 bp, synthetic construct
  source 1..20: mol_type = other DNA
ctaaaatatttactatcggg

SEQ ID NO: 29469 - DNA, 20 bp, synthetic construct
  source 1..20: mol_type = other DNA
cctaaaatatttactatcgg

SEQ ID NO: 29470 - DNA, 20 bp, synthetic construct
  source 1..20: mol_type = other DNA
gcctaaaatatttactatcg

SEQ ID NO: 29471 - DNA, 20 bp, synthetic construct
  source 1..20: mol_type = other DNA
agcctaaaatatttactatc

SEQ ID NO: 29472 - DNA, 20 bp, synthetic construct
  source 1..20: mol_type = other DNA
aagcctaaaatatttactat

SEQ ID NO: 29473 - DNA, 20 bp, synthetic construct
  source 1..20: mol_type = other DNA
aaagcctaaaatatttacta

SEQ ID NO: 29474 - DNA, 20 bp, synthetic construct
  source 1..20: mol_type = other DNA
caaagcctaaaatatttact

SEQ ID NO: 29475 - DNA, 20 bp, synthetic construct
  source 1..20: mol_type = other DNA
gcaaagcctaaaatatttac

SEQ ID NO: 29476 - DNA, 20 bp, synthetic construct
  source 1..20: mol_type = other DNA
tgcaaagcctaaaatattta

SEQ ID NO: 29477 - DNA, 20 bp, synthetic construct
  source 1..20: mol_type = other DNA
ctgcaaagcctaaaatattt

SEQ ID NO: 29478 - DNA, 20 bp, synthetic construct
  source 1..20: mol_type = other DNA
actgcaaagcctaaaatatt

SEQ ID NO: 29479 - DNA, 20 bp, synthetic construct
  source 1..20: mol_type = other DNA
gactgcaaagcctaaaatat

SEQ ID NO: 29480 - DNA, 20 bp, synthetic construct
  source 1..20: mol_type = other DNA
ggactgcaaagcctaaaata

SEQ ID NO: 29481 - DNA, 20 bp, synthetic construct
  source 1..20: mol_type = other DNA
tggactgcaaagcctaaaat

SEQ ID NO: 29482 - DNA, 20 bp, synthetic construct
  source 1..20: mol_type = other DNA
atggactgcaaagcctaaaa

SEQ ID NO: 29483 - DNA, 20 bp, synthetic construct
  source 1..20: mol_type = other DNA
tatggactgcaaagcctaaa

SEQ ID NO: 29484 - DNA, 20 bp, synthetic construct
  source 1..20: mol_type = other DNA
atatggactgcaaagcctaa

SEQ ID NO: 29485 - DNA, 20 bp, synthetic construct
  source 1..20: mol_type = other DNA
tatatggactgcaaagccta

SEQ ID NO: 29486 - DNA, 20 bp, synthetic construct
  source 1..20: mol_type = other DNA
gtatatggactgcaaagcct

SEQ ID NO: 29487 - DNA, 20 bp, synthetic construct
  source 1..20: mol_type = other DNA
tgtatatggactgcaaagcc

SEQ ID NO: 29488 - DNA, 20 bp, synthetic construct
  source 1..20: mol_type = other DNA
ctgtatatggactgcaaagc

SEQ ID NO: 29489 - DNA, 20 bp, synthetic construct
  source 1..20: mol_type = other DNA
actgtatatggactgcaaag

SEQ ID NO: 29490 - DNA, 20 bp, synthetic construct
  source 1..20: mol_type = other DNA
gactgtatatggactgcaaa

SEQ ID NO: 29491 - DNA, 20 bp, synthetic construct
  source 1..20: mol_type = other DNA
ggactgtatatggactgcaa

SEQ ID NO: 29492 - DNA, 20 bp, synthetic construct
  source 1..20: mol_type = other DNA
gggactgtatatggactgca

SEQ ID NO: 29493 - DNA, 20 bp, synthetic construct
  source 1..20: mol_type = other DNA
tgggactgtatatggactgc

SEQ ID NO: 29494 - DNA, 20 bp, synthetic construct
  source 1..20: mol_type = other DNA
atgggactgtatatggactg

SEQ ID NO: 29495 - DNA, 20 bp, synthetic construct
  source 1..20: mol_type = other DNA
aatgggactgtatatggact

SEQ ID NO: 29496 - DNA, 20 bp, synthetic construct
  source 1..20: mol_type = other DNA
aaatgggactgtatatggac

SEQ ID NO: 29497 - DNA, 20 bp, synthetic construct
  source 1..20: mol_type = other DNA
aaaatgggactgtatatgga

SEQ ID NO: 29498 - DNA, 20 bp, synthetic construct
  source 1..20: mol_type = other DNA
aaaaatgggactgtatatgg

SEQ ID NO: 29499 - DNA, 20 bp, synthetic construct
  source 1..20: mol_type = other DNA
aaaaaatgggactgtatatg

SEQ ID NO: 29500 - DNA, 20 bp, synthetic construct
  source 1..20: mol_type = other DNA
aaaaaaatgggactgtatat

SEQ ID NO: 29501 - DNA, 20 bp, synthetic construct
  source 1..20: mol_type = other DNA
caaaaaaatgggactgtata

SEQ ID NO: 29502 - DNA, 20 bp, synthetic construct
  source 1..20: mol_type = other DNA
acaaaaaaatgggactgtat

SEQ ID NO: 29503 - DNA, 20 bp, synthetic construct
  source 1..20: mol_type = other DNA
cacaaaaaaatgggactgta

SEQ ID NO: 29504 - DNA, 20 bp, synthetic construct
  source 1..20: mol_type = other DNA
acacaaaaaaatgggactgt

SEQ ID NO: 29505 - DNA, 20 bp, synthetic construct
  source 1..20: mol_type = other DNA
tacacaaaaaaatgggactg

SEQ ID NO: 29506 - DNA, 20 bp, synthetic construct
  source 1..20: mol_type = other DNA
atacacaaaaaaatgggact

SEQ ID NO: 29507 - DNA, 20 bp, synthetic construct
  source 1..20: mol_type = other DNA
catacacaaaaaaatgggac

SEQ ID NO: 29508 - DNA, 20 bp, synthetic construct
  source 1..20: mol_type = other DNA
acatacacaaaaaaatggga

SEQ ID NO: 29509 - DNA, 20 bp, synthetic construct
  source 1..20: mol_type = other DNA
aacatacacaaaaaaatggg

SEQ ID NO: 29510 - DNA, 20 bp, synthetic construct
  source 1..20: mol_type = other DNA
aaacatacacaaaaaaatgg

SEQ ID NO: 29511 - DNA, 20 bp, synthetic construct
  source 1..20: mol_type = other DNA
caaacatacacaaaaaaatg

SEQ ID NO: 29512 - DNA, 20 bp, synthetic construct
  source 1..20: mol_type = other DNA
gcaaacatacacaaaaaaat

SEQ ID NO: 29513 - DNA, 20 bp, synthetic construct
  source 1..20: mol_type = other DNA
tgcaaacatacacaaaaaaa

SEQ ID NO: 29514 - DNA, 20 bp, synthetic construct
  source 1..20: mol_type = other DNA
gtgcaaacatacacaaaaaa

SEQ ID NO: 29515 - DNA, 20 bp, synthetic construct
  source 1..20: mol_type = other DNA
cgtgcaaacatacacaaaaa

SEQ ID NO: 29516 - DNA, 20 bp, synthetic construct
  source 1..20: mol_type = other DNA
acgtgcaaacatacacaaaa

SEQ ID NO: 29517 - DNA, 20 bp, synthetic construct
  source 1..20: mol_type = other DNA
aacgtgcaaacatacacaaa

SEQ ID NO: 29518 - DNA, 20 bp, synthetic construct
  source 1..20: mol_type = other DNA
aaacgtgcaaacatacacaa

SEQ ID NO: 29519 - DNA, 20 bp, synthetic construct
  source 1..20: mol_type = other DNA
aaaacgtgcaaacatacaca

SEQ ID NO: 29520 - DNA, 20 bp, synthetic construct
  source 1..20: mol_type = other DNA
gaaaacgtgcaaacatacac

SEQ ID NO: 29521 - DNA, 20 bp, synthetic construct
  source 1..20: mol_type = other DNA
agaaaacgtgcaaacataca

SEQ ID NO: 29522 - DNA, 20 bp, synthetic construct
  source 1..20: mol_type = other DNA
aagaaaacgtgcaaacatac

SEQ ID NO: 29523 - DNA, 20 bp, synthetic construct
  source 1..20: mol_type = other DNA
aaagaaaacgtgcaaacata

SEQ ID NO: 29524 - DNA, 20 bp, synthetic construct
  source 1..20: mol_type = other DNA
taaagaaaacgtgcaaacat

SEQ ID NO: 29525 - DNA, 20 bp, synthetic construct
  source 1..20: mol_type = other DNA
gtaaagaaaacgtgcaaaca

SEQ ID NO: 29526 - DNA, 20 bp, synthetic construct
  source 1..20: mol_type = other DNA
tgtaaagaaaacgtgcaaac

SEQ ID NO: 29527 - DNA, 20 bp, synthetic construct
  source 1..20: mol_type = other DNA
atgtaaagaaaacgtgcaaa

SEQ ID NO: 29528 - DNA, 20 bp, synthetic construct
  source 1..20: mol_type = other DNA
tatgtaaagaaaacgtgcaa

SEQ ID NO: 29529 - DNA, 20 bp, synthetic construct
  source 1..20: mol_type = other DNA
atatgtaaagaaaacgtgca

SEQ ID NO: 29530 - DNA, 20 bp, synthetic construct
  source 1..20: mol_type = other DNA
aatatgtaaagaaaacgtgc

SEQ ID NO: 29531 - DNA, 20 bp, synthetic construct
  source 1..20: mol_type = other DNA
aaatatgtaaagaaaacgtg

SEQ ID NO: 29532 - DNA, 20 bp, synthetic construct
  source 1..20: mol_type = other DNA
aaaatatgtaaagaaaacgt

SEQ ID NO: 29533 - DNA, 20 bp, synthetic construct
  source 1..20: mol_type = other DNA
taaaatatgtaaagaaaacg

SEQ ID NO: 29534 - DNA, 20 bp, synthetic construct
  source 1..20: mol_type = other DNA
ttaaaatatgtaaagaaaac

SEQ ID NO: 29535 - DNA, 20 bp, synthetic construct
  source 1..20: mol_type = other DNA
tttaaaatatgtaaagaaaa

SEQ ID NO: 29536 - DNA, 20 bp, synthetic construct
  source 1..20: mol_type = other DNA
ttttaaaatatgtaaagaaa

SEQ ID NO: 29537 - DNA, 20 bp, synthetic construct
  source 1..20: mol_type = other DNA
cttttaaaatatgtaaagaa

SEQ ID NO: 29538 - DNA, 20 bp, synthetic construct
  source 1..20: mol_type = other DNA
gcttttaaaatatgtaaaga

SEQ ID NO: 29539 - DNA, 20 bp, synthetic construct
  source 1..20: mol_type = other DNA
ggcttttaaaatatgtaaag

SEQ ID NO: 29540 - DNA, 20 bp, synthetic construct
  source 1..20: mol_type = other DNA
gggcttttaaaatatgtaaa

SEQ ID NO: 29541 - DNA, 20 bp, synthetic construct
  source 1..20: mol_type = other DNA
ggggcttttaaaatatgtaa

SEQ ID NO: 29542 - DNA, 20 bp, synthetic construct
  source 1..20: mol_type = other DNA
aggggcttttaaaatatgta

SEQ ID NO: 29543 - DNA, 20 bp, synthetic construct
  source 1..20: mol_type = other DNA
aaggggcttttaaaatatgt

SEQ ID NO: 29544 - DNA, 20 bp, synthetic construct
  source 1..20: mol_type = other DNA
aaaggggcttttaaaatatg

SEQ ID NO: 29545 - DNA, 20 bp, synthetic construct
  source 1..20: mol_type = other DNA
aaaaggggcttttaaaatat

SEQ ID NO: 29546 - DNA, 20 bp, synthetic construct
  source 1..20: mol_type = other DNA
aaaaaggggcttttaaaata

SEQ ID NO: 29547 - DNA, 20 bp, synthetic construct
  source 1..20: mol_type = other DNA
aaaaaaggggcttttaaaat

SEQ ID NO: 29548 - DNA, 20 bp, synthetic construct
  source 1..20: mol_type = other DNA
aaaaaaaggggcttttaaaa

SEQ ID NO: 29549 - DNA, 20 bp, synthetic construct
  source 1..20: mol_type = other DNA
aaaaaaaaggggcttttaaa

SEQ ID NO: 29550 - DNA, 20 bp, synthetic construct
  source 1..20: mol_type = other DNA
aaaaaaaaaggggcttttaa

SEQ ID NO: 29551 - DNA, 20 bp, synthetic construct
  source 1..20: mol_type = other DNA
aaaaaaaaaaggggctttta

SEQ ID NO: 29552 - DNA, 20 bp, synthetic construct
  source 1..20: mol_type = other DNA
aaaaaaaaaaaggggctttt

SEQ ID NO: 29553 - DNA, 20 bp, synthetic construct
  source 1..20: mol_type = other DNA
aaaaaaaaaaaaggggcttt

SEQ ID NO: 29554 - DNA, 20 bp, synthetic construct
  source 1..20: mol_type = other DNA
aaaaaaaaaaaaaggggctt

SEQ ID NO: 29555 - DNA, 20 bp, synthetic construct
  source 1..20: mol_type = other DNA
aaaaaaaaaaaaaaggggct

SEQ ID NO: 29556 - DNA, 20 bp, synthetic construct
  source 1..20: mol_type = other DNA
aaaaaaaaaaaaaaaggggc

SEQ ID NO: 29557 - DNA, 20 bp, synthetic construct
  source 1..20: mol_type = other DNA
caaaaaaaaaaaaaaagggg

SEQ ID NO: 29558 - DNA, 20 bp, synthetic construct
  source 1..20: mol_type = other DNA
tcaaaaaaaaaaaaaaaggg

SEQ ID NO: 29559 - DNA, 20 bp, synthetic construct
  source 1..20: mol_type = other DNA
ctcaaaaaaaaaaaaaaagg

SEQ ID NO: 29560 - DNA, 20 bp, synthetic construct
  source 1..20: mol_type = other DNA
tctcaaaaaaaaaaaaaaag

SEQ ID NO: 29561 - DNA, 20 bp, synthetic construct
  source 1..20: mol_type = other DNA
gtctcaaaaaaaaaaaaaaa

SEQ ID NO: 29562 - DNA, 20 bp, synthetic construct
  source 1..20: mol_type = other DNA
tgtctcaaaaaaaaaaaaaa

SEQ ID NO: 29563 - DNA, 20 bp, synthetic construct
  source 1..20: mol_type = other DNA
ctgtctcaaaaaaaaaaaaa

SEQ ID NO: 29564 - DNA, 20 bp, synthetic construct
  source 1..20: mol_type = other DNA
tctgtctcaaaaaaaaaaaa

SEQ ID NO: 29565 - DNA, 20 bp, synthetic construct
  source 1..20: mol_type = other DNA
ctctgtctcaaaaaaaaaaa

SEQ ID NO: 29566 - DNA, 20 bp, synthetic construct
  source 1..20: mol_type = other DNA
actctgtctcaaaaaaaaaa

SEQ ID NO: 29567 - DNA, 20 bp, synthetic construct
  source 1..20: mol_type = other DNA
gactctgtctcaaaaaaaaa

SEQ ID NO: 29568 - DNA, 20 bp, synthetic construct
  source 1..20: mol_type = other DNA
agactctgtctcaaaaaaaa

SEQ ID NO: 29569 - DNA, 20 bp, synthetic construct
  source 1..20: mol_type = other DNA
aagactctgtctcaaaaaaa

SEQ ID NO: 29570 - DNA, 20 bp, synthetic construct
  source 1..20: mol_type = other DNA
caagactctgtctcaaaaaa

SEQ ID NO: 29571 - DNA, 20 bp, synthetic construct
  source 1..20: mol_type = other DNA
gcaagactctgtctcaaaaa

SEQ ID NO: 29572 - DNA, 20 bp, synthetic construct
  source 1..20: mol_type = other DNA
agcaagactctgtctcaaaa

SEQ ID NO: 29573 - DNA, 20 bp, synthetic construct
  source 1..20: mol_type = other DNA
cagcaagactctgtctcaaa

SEQ ID NO: 29574 - DNA, 20 bp, synthetic construct
  source 1..20: mol_type = other DNA
acagcaagactctgtctcaa

SEQ ID NO: 29575 - DNA, 20 bp, synthetic construct
  source 1..20: mol_type = other DNA
cacagcaagactctgtctca

SEQ ID NO: 29576 - DNA, 20 bp, synthetic construct
  source 1..20: mol_type = other DNA
acacagcaagactctgtctc

SEQ ID NO: 29577 - DNA, 20 bp, synthetic construct
  source 1..20: mol_type = other DNA
aacacagcaagactctgtct

SEQ ID NO: 29578 - DNA, 20 bp, synthetic construct
  source 1..20: mol_type = other DNA
caacacagcaagactctgtc

SEQ ID NO: 29579 - DNA, 20 bp, synthetic construct
  source 1..20: mol_type = other DNA
gcaacacagcaagactctgt

SEQ ID NO: 29580 - DNA, 20 bp, synthetic construct
  source 1..20: mol_type = other DNA
agcaacacagcaagactctg

SEQ ID NO: 29581 - DNA, 20 bp, synthetic construct
  source 1..20: mol_type = other DNA
gagcaacacagcaagactct

SEQ ID NO: 29582 - DNA, 20 bp, synthetic construct
  source 1..20: mol_type = other DNA
tgagcaacacagcaagactc

SEQ ID NO: 29583 - DNA, 20 bp, synthetic construct
  source 1..20: mol_type = other DNA
ctgagcaacacagcaagact

SEQ ID NO: 29584 - DNA, 20 bp, synthetic construct
  source 1..20: mol_type = other DNA
cctgagcaacacagcaagac

SEQ ID NO: 29585 - DNA, 20 bp, synthetic construct
  source 1..20: mol_type = other DNA
gcctgagcaacacagcaaga

SEQ ID NO: 29586 - DNA, 20 bp, synthetic construct
  source 1..20: mol_type = other DNA
agcctgagcaacacagcaag

SEQ ID NO: 29587 - DNA, 20 bp, synthetic construct
  source 1..20: mol_type = other DNA
cagcctgagcaacacagcaa

SEQ ID NO: 29588 - DNA, 20 bp, synthetic construct
  source 1..20: mol_type = other DNA
ccagcctgagcaacacagca

SEQ ID NO: 29589 - DNA, 20 bp, synthetic construct
  source 1..20: mol_type = other DNA
tccagcctgagcaacacagc

SEQ ID NO: 29590 - DNA, 20 bp, synthetic construct
  source 1..20: mol_type = other DNA
ctccagcctgagcaacacag

SEQ ID NO: 29591 - DNA, 20 bp, synthetic construct
  source 1..20: mol_type = other DNA
actccagcctgagcaacaca

SEQ ID NO: 29592 - DNA, 20 bp, synthetic construct
  source 1..20: mol_type = other DNA
cactccagcctgagcaacac

SEQ ID NO: 29593 - DNA, 20 bp, synthetic construct
  source 1..20: mol_type = other DNA
gcactccagcctgagcaaca

SEQ ID NO: 29594 - DNA, 20 bp, synthetic construct
  source 1..20: mol_type = other DNA
tgcactccagcctgagcaac

SEQ ID NO: 29595 - DNA, 20 bp, synthetic construct
  source 1..20: mol_type = other DNA
ctgcactccagcctgagcaa

SEQ ID NO: 29596 - DNA, 20 bp, synthetic construct
  source 1..20: mol_type = other DNA
actgcactccagcctgagca

SEQ ID NO: 29597 - DNA, 20 bp, synthetic construct
  source 1..20: mol_type = other DNA
cactgcactccagcctgagc

SEQ ID NO: 29598 - DNA, 20 bp, synthetic construct
  source 1..20: mol_type = other DNA
ccactgcactccagcctgag

SEQ ID NO: 29599 - DNA, 20 bp, synthetic construct
  source 1..20: mol_type = other DNA
accactgcactccagcctga

SEQ ID NO: 29600 - DNA, 20 bp, synthetic construct
  source 1..20: mol_type = other DNA
caccactgcactccagcctg

SEQ ID NO: 29601 - DNA, 20 bp, synthetic construct
  source 1..20: mol_type = other DNA
gcaccactgcactccagcct

SEQ ID NO: 29602 - DNA, 20 bp, synthetic construct
  source 1..20: mol_type = other DNA
tgcaccactgcactccagcc

SEQ ID NO: 29603 - DNA, 20 bp, synthetic construct
  source 1..20: mol_type = other DNA
ttgcaccactgcactccagc

SEQ ID NO: 29604 - DNA, 20 bp, synthetic construct
  source 1..20: mol_type = other DNA
attgcaccactgcactccag

SEQ ID NO: 29605 - DNA, 20 bp, synthetic construct
  source 1..20: mol_type = other DNA
gattgcaccactgcactcca

SEQ ID NO: 29606 - DNA, 20 bp, synthetic construct
  source 1..20: mol_type = other DNA
agattgcaccactgcactcc

SEQ ID NO: 29607 - DNA, 20 bp, synthetic construct
  source 1..20: mol_type = other DNA
aagattgcaccactgcactc

SEQ ID NO: 29608 - DNA, 20 bp, synthetic construct
  source 1..20: mol_type = other DNA
caagattgcaccactgcact

SEQ ID NO: 29609 - DNA, 20 bp, synthetic construct
  source 1..20: mol_type = other DNA
ccaagattgcaccactgcac

SEQ ID NO: 29610 - DNA, 20 bp, synthetic construct
  source 1..20: mol_type = other DNA
gccaagattgcaccactgca

SEQ ID NO: 29611 - DNA, 20 bp, synthetic construct
  source 1..20: mol_type = other DNA
agccaagattgcaccactgc

SEQ ID NO: 29612 - DNA, 20 bp, synthetic construct
  source 1..20: mol_type = other DNA
gagccaagattgcaccactg

SEQ ID NO: 29613 - DNA, 20 bp, synthetic construct
  source 1..20: mol_type = other DNA
tgagccaagattgcaccact

SEQ ID NO: 29614 - DNA, 20 bp, synthetic construct
  source 1..20: mol_type = other DNA
gtgagccaagattgcaccac

SEQ ID NO: 29615 - DNA, 20 bp, synthetic construct
  source 1..20: mol_type = other DNA
agtgagccaagattgcacca

SEQ ID NO: 29616 - DNA, 20 bp, synthetic construct
  source 1..20: mol_type = other DNA
cagtgagccaagattgcacc

SEQ ID NO: 29617 - DNA, 20 bp, synthetic construct
  source 1..20: mol_type = other DNA
gcagtgagccaagattgcac

SEQ ID NO: 29618 - DNA, 20 bp, synthetic construct
  source 1..20: mol_type = other DNA
tgcagtgagccaagattgca

SEQ ID NO: 29619 - DNA, 20 bp, synthetic construct
  source 1..20: mol_type = other DNA
ttgcagtgagccaagattgc

SEQ ID NO: 29620 - DNA, 20 bp, synthetic construct
  source 1..20: mol_type = other DNA
gttgcagtgagccaagattg

SEQ ID NO: 29621 - DNA, 20 bp, synthetic construct
  source 1..20: mol_type = other DNA
ggttgcagtgagccaagatt

SEQ ID NO: 29622 - DNA, 20 bp, synthetic construct
  source 1..20: mol_type = other DNA
aggttgcagtgagccaagat

SEQ ID NO: 29623 - DNA, 20 bp, synthetic construct
  source 1..20: mol_type = other DNA
gaggttgcagtgagccaaga

SEQ ID NO: 29624 - DNA, 20 bp, synthetic construct
  source 1..20: mol_type = other DNA
agaggttgcagtgagccaag

SEQ ID NO: 29625 - DNA, 20 bp, synthetic construct
  source 1..20: mol_type = other DNA
cagaggttgcagtgagccaa

SEQ ID NO: 29626 - DNA, 20 bp, synthetic construct
  source 1..20: mol_type = other DNA
gcagaggttgcagtgagcca

SEQ ID NO: 29627 - DNA, 20 bp, synthetic construct
  source 1..20: mol_type = other DNA
ggcagaggttgcagtgagcc

SEQ ID NO: 29628 - DNA, 20 bp, synthetic construct
  source 1..20: mol_type = other DNA
aggcagaggttgcagtgagc

SEQ ID NO: 29629 - DNA, 20 bp, synthetic construct
  source 1..20: mol_type = other DNA
gaggcagaggttgcagtgag

SEQ ID NO: 29630 - DNA, 20 bp, synthetic construct
  source 1..20: mol_type = other DNA
ggaggcagaggttgcagtga

SEQ ID NO: 29631 - DNA, 20 bp, synthetic construct
  source 1..20: mol_type = other DNA
aggaggcagaggttgcagtg

SEQ ID NO: 29632 - DNA, 20 bp, synthetic construct
  source 1..20: mol_type = other DNA
caggaggcagaggttgcagt

SEQ ID NO: 29633 - DNA, 20 bp, synthetic construct
  source 1..20: mol_type = other DNA
ccaggaggcagaggttgcag

SEQ ID NO: 29634 - DNA, 20 bp, synthetic construct
  source 1..20: mol_type = other DNA
cccaggaggcagaggttgca

SEQ ID NO: 29635 - DNA, 20 bp, synthetic construct
  source 1..20: mol_type = other DNA
acccaggaggcagaggttgc

SEQ ID NO: 29636 - DNA, 20 bp, synthetic construct
  source 1..20: mol_type = other DNA
aacccaggaggcagaggttg

SEQ ID NO: 29637 - DNA, 20 bp, synthetic construct
  source 1..20: mol_type = other DNA
gaacccaggaggcagaggtt

SEQ ID NO: 29638 - DNA, 20 bp, synthetic construct
  source 1..20: mol_type = other DNA
tgaacccaggaggcagaggt

SEQ ID NO: 29639 - DNA, 20 bp, synthetic construct
  source 1..20: mol_type = other DNA
ctgaacccaggaggcagagg

SEQ ID NO: 29640 - DNA, 20 bp, synthetic construct
  source 1..20: mol_type = other DNA
cctgaacccaggaggcagag

SEQ ID NO: 29641 - DNA, 20 bp, synthetic construct
  source 1..20: mol_type = other DNA
gcctgaacccaggaggcaga

SEQ ID NO: 29642 - DNA, 20 bp, synthetic construct
  source 1..20: mol_type = other DNA
cgcctgaacccaggaggcag

SEQ ID NO: 29643 - DNA, 20 bp, synthetic construct
  source 1..20: mol_type = other DNA
tcgcctgaacccaggaggca

SEQ ID NO: 29644 - DNA, 20 bp, synthetic construct
  source 1..20: mol_type = other DNA
atcgcctgaacccaggaggc

SEQ ID NO: 29645 - DNA, 20 bp, synthetic construct
  source 1..20: mol_type = other DNA
aatcgcctgaacccaggagg

SEQ ID NO: 29646 - DNA, 20 bp, synthetic construct
  source 1..20: mol_type = other DNA
gaatcgcctgaacccaggag

SEQ ID NO: 29647 - DNA, 20 bp, synthetic construct
  source 1..20: mol_type = other DNA
agaatcgcctgaacccagga

SEQ ID NO: 29648 - DNA, 20 bp, synthetic construct
  source 1..20: mol_type = other DNA
gagaatcgcctgaacccagg

SEQ ID NO: 29649 - DNA, 20 bp, synthetic construct
  source 1..20: mol_type = other DNA
ggagaatcgcctgaacccag

SEQ ID NO: 29650 - DNA, 20 bp, synthetic construct
  source 1..20: mol_type = other DNA
aggagaatcgcctgaaccca

SEQ ID NO: 29651 - DNA, 20 bp, synthetic construct
  source 1..20: mol_type = other DNA
caggagaatcgcctgaaccc

SEQ ID NO: 29652 - DNA, 20 bp, synthetic construct
  source 1..20: mol_type = other DNA
acaggagaatcgcctgaacc

SEQ ID NO: 29653 - DNA, 20 bp, synthetic construct
  source 1..20: mol_type = other DNA
gacaggagaatcgcctgaac

SEQ ID NO: 29654 - DNA, 20 bp, synthetic construct
  source 1..20: mol_type = other DNA
agacaggagaatcgcctgaa

SEQ ID NO: 29655 - DNA, 20 bp, synthetic construct
  source 1..20: mol_type = other DNA
gagacaggagaatcgcctga

SEQ ID NO: 29656 - DNA, 20 bp, synthetic construct
  source 1..20: mol_type = other DNA
tgagacaggagaatcgcctg

SEQ ID NO: 29657 - DNA, 20 bp, synthetic construct
  source 1..20: mol_type = other DNA
ctgagacaggagaatcgcct

SEQ ID NO: 29658 - DNA, 20 bp, synthetic construct
  source 1..20: mol_type = other DNA
gctgagacaggagaatcgcc

SEQ ID NO: 29659 - DNA, 20 bp, synthetic construct
  source 1..20: mol_type = other DNA
agctgagacaggagaatcgc

SEQ ID NO: 29660 - DNA, 20 bp, synthetic construct
  source 1..20: mol_type = other DNA
aagctgagacaggagaatcg

SEQ ID NO: 29661 - DNA, 20 bp, synthetic construct
  source 1..20: mol_type = other DNA
gaagctgagacaggagaatc

SEQ ID NO: 29662 - DNA, 20 bp, synthetic construct
  source 1..20: mol_type = other DNA
ggaagctgagacaggagaat

SEQ ID NO: 29663 - DNA, 20 bp, synthetic construct
  source 1..20: mol_type = other DNA
gggaagctgagacaggagaa

SEQ ID NO: 29664 - DNA, 20 bp, synthetic construct
  source 1..20: mol_type = other DNA
cgggaagctgagacaggaga

SEQ ID NO: 29665 - DNA, 20 bp, synthetic construct
  source 1..20: mol_type = other DNA
tcgggaagctgagacaggag

SEQ ID NO: 29666 - DNA, 20 bp, synthetic construct
  source 1..20: mol_type = other DNA
ctcgggaagctgagacagga

SEQ ID NO: 29667 - DNA, 20 bp, synthetic construct
  source 1..20: mol_type = other DNA
actcgggaagctgagacagg

SEQ ID NO: 29668 - DNA, 20 bp, synthetic construct
  source 1..20: mol_type = other DNA
tactcgggaagctgagacag

SEQ ID NO: 29669 - DNA, 20 bp, synthetic construct
  source 1..20: mol_type = other DNA
ttactcgggaagctgagaca

SEQ ID NO: 29670 - DNA, 20 bp, synthetic construct
  source 1..20: mol_type = other DNA
gttactcgggaagctgagac

SEQ ID NO: 29671 - DNA, 20 bp, synthetic construct
  source 1..20: mol_type = other DNA
agttactcgggaagctgaga

SEQ ID NO: 29672 - DNA, 20 bp, synthetic construct
  source 1..20: mol_type = other DNA
cagttactcgggaagctgag

SEQ ID NO: 29673 - DNA, 20 bp, synthetic construct
  source 1..20: mol_type = other DNA
ccagttactcgggaagctga

SEQ ID NO: 29674 - DNA, 20 bp, synthetic construct
  source 1..20: mol_type = other DNA
cccagttactcgggaagctg

SEQ ID NO: 29675 - DNA, 20 bp, synthetic construct
  source 1..20: mol_type = other DNA
tcccagttactcgggaagct

SEQ ID NO: 29676 - DNA, 20 bp, synthetic construct
  source 1..20: mol_type = other DNA
atcccagttactcgggaagc

SEQ ID NO: 29677 - DNA, 20 bp, synthetic construct
  source 1..20: mol_type = other DNA
aatcccagttactcgggaag

SEQ ID NO: 29678 - DNA, 20 bp, synthetic construct
  source 1..20: mol_type = other DNA
taatcccagttactcgggaa

SEQ ID NO: 29679 - DNA, 20 bp, synthetic construct
  source 1..20: mol_type = other DNA
gtaatcccagttactcggga

SEQ ID NO: 29680 - DNA, 20 bp, synthetic construct
  source 1..20: mol_type = other DNA
tgtaatcccagttactcggg

SEQ ID NO: 29681 - DNA, 20 bp, synthetic construct
  source 1..20: mol_type = other DNA
ctgtaatcccagttactcgg

SEQ ID NO: 29682 - DNA, 20 bp, synthetic construct
  source 1..20: mol_type = other DNA
cctgtaatcccagttactcg

SEQ ID NO: 29683 - DNA, 20 bp, synthetic construct
  source 1..20: mol_type = other DNA
gcctgtaatcccagttactc

SEQ ID NO: 29684 - DNA, 20 bp, synthetic construct
  source 1..20: mol_type = other DNA
tgcctgtaatcccagttact

SEQ ID NO: 29685 - DNA, 20 bp, synthetic construct
  source 1..20: mol_type = other DNA
gtgcctgtaatcccagttac

SEQ ID NO: 29686 - DNA, 20 bp, synthetic construct
  source 1..20: mol_type = other DNA
tgtgcctgtaatcccagtta

SEQ ID NO: 29687 - DNA, 20 bp, synthetic construct
  source 1..20: mol_type = other DNA
atgtgcctgtaatcccagtt

SEQ ID NO: 29688 - DNA, 20 bp, synthetic construct
  source 1..20: mol_type = other DNA
catgtgcctgtaatcccagt

SEQ ID NO: 29689 - DNA, 20 bp, synthetic construct
  source 1..20: mol_type = other DNA
gcatgtgcctgtaatcccag

SEQ ID NO: 29690 - DNA, 20 bp, synthetic construct
  source 1..20: mol_type = other DNA
agcatgtgcctgtaatccca

SEQ ID NO: 29691 - DNA, 20 bp, synthetic construct
  source 1..20: mol_type = other DNA
cagcatgtgcctgtaatccc

SEQ ID NO: 29692 - DNA, 20 bp, synthetic construct
  source 1..20: mol_type = other DNA
gcagcatgtgcctgtaatcc

SEQ ID NO: 29693 - DNA, 20 bp, synthetic construct
  source 1..20: mol_type = other DNA
ggcagcatgtgcctgtaatc

SEQ ID NO: 29694 - DNA, 20 bp, synthetic construct
  source 1..20: mol_type = other DNA
tggcagcatgtgcctgtaat

SEQ ID NO: 29695 - DNA, 20 bp, synthetic construct
  source 1..20: mol_type = other DNA
gtggcagcatgtgcctgtaa

SEQ ID NO: 29696 - DNA, 20 bp, synthetic construct
  source 1..20: mol_type = other DNA
cgtggcagcatgtgcctgta

SEQ ID NO: 29697 - DNA, 20 bp, synthetic construct
  source 1..20: mol_type = other DNA
gcgtggcagcatgtgcctgt

SEQ ID NO: 29698 - DNA, 20 bp, synthetic construct
  source 1..20: mol_type = other DNA
ggcgtggcagcatgtgcctg

SEQ ID NO: 29699 - DNA, 20 bp, synthetic construct
  source 1..20: mol_type = other DNA
gggcgtggcagcatgtgcct

SEQ ID NO: 29700 - DNA, 20 bp, synthetic construct
  source 1..20: mol_type = other DNA
tgggcgtggcagcatgtgcc

SEQ ID NO: 29701 - DNA, 20 bp, synthetic construct
  source 1..20: mol_type = other DNA
ctgggcgtggcagcatgtgc

SEQ ID NO: 29702 - DNA, 20 bp, synthetic construct
  source 1..20: mol_type = other DNA
gctgggcgtggcagcatgtg

SEQ ID NO: 29703 - DNA, 20 bp, synthetic construct
  source 1..20: mol_type = other DNA
agctgggcgtggcagcatgt

SEQ ID NO: 29704 - DNA, 20 bp, synthetic construct
  source 1..20: mol_type = other DNA
tagctgggcgtggcagcatg

SEQ ID NO: 29705 - DNA, 20 bp, synthetic construct
  source 1..20: mol_type = other DNA
ttagctgggcgtggcagcat

SEQ ID NO: 29706 - DNA, 20 bp, synthetic construct
  source 1..20: mol_type = other DNA
attagctgggcgtggcagca

SEQ ID NO: 29707 - DNA, 20 bp, synthetic construct
  source 1..20: mol_type = other DNA
aattagctgggcgtggcagc

SEQ ID NO: 29708 - DNA, 20 bp, synthetic construct
  source 1..20: mol_type = other DNA
aaattagctgggcgtggcag

SEQ ID NO: 29709 - DNA, 20 bp, synthetic construct
  source 1..20: mol_type = other DNA
aaaattagctgggcgtggca

SEQ ID NO: 29710 - DNA, 20 bp, synthetic construct
  source 1..20: mol_type = other DNA
aaaaattagctgggcgtggc

SEQ ID NO: 29711 - DNA, 20 bp, synthetic construct
  source 1..20: mol_type = other DNA
caaaaattagctgggcgtgg

SEQ ID NO: 29712 - DNA, 20 bp, synthetic construct
  source 1..20: mol_type = other DNA
acaaaaattagctgggcgtg

SEQ ID NO: 29713 - DNA, 20 bp, synthetic construct
  source 1..20: mol_type = other DNA
tacaaaaattagctgggcgt

SEQ ID NO: 29714 - DNA, 20 bp, synthetic construct
  source 1..20: mol_type = other DNA
atacaaaaattagctgggcg

SEQ ID NO: 29715 - DNA, 20 bp, synthetic construct
  source 1..20: mol_type = other DNA
aatacaaaaattagctgggc

SEQ ID NO: 29716 - DNA, 20 bp, synthetic construct
  source 1..20: mol_type = other DNA
aaatacaaaaattagctggg

SEQ ID NO: 29717 - DNA, 20 bp, synthetic construct
  source 1..20: mol_type = other DNA
aaaatacaaaaattagctgg

SEQ ID NO: 29718 - DNA, 20 bp, synthetic construct
  source 1..20: mol_type = other DNA
aaaaatacaaaaattagctg

SEQ ID NO: 29719 - DNA, 20 bp, synthetic construct
  source 1..20: mol_type = other DNA
taaaaatacaaaaattagct

SEQ ID NO: 29720 - DNA, 20 bp, synthetic construct
  source 1..20: mol_type = other DNA
ctaaaaatacaaaaattagc

SEQ ID NO: 29721 - DNA, 20 bp, synthetic construct
  source 1..20: mol_type = other DNA
actaaaaatacaaaaattag

SEQ ID NO: 29722 - DNA, 20 bp, synthetic construct
  source 1..20: mol_type = other DNA
tactaaaaatacaaaaatta

SEQ ID NO: 29723 - DNA, 20 bp, synthetic construct
  source 1..20: mol_type = other DNA
ttactaaaaatacaaaaatt

SEQ ID NO: 29724 - DNA, 20 bp, synthetic construct
  source 1..20: mol_type = other DNA
tttactaaaaatacaaaaat

SEQ ID NO: 29725 - DNA, 20 bp, synthetic construct
  source 1..20: mol_type = other DNA
ctttactaaaaatacaaaaa

SEQ ID NO: 29726 - DNA, 20 bp, synthetic construct
  source 1..20: mol_type = other DNA
tctttactaaaaatacaaaa

SEQ ID NO: 29727 - DNA, 20 bp, synthetic construct
  source 1..20: mol_type = other DNA
atctttactaaaaatacaaa

SEQ ID NO: 29728 - DNA, 20 bp, synthetic construct
  source 1..20: mol_type = other DNA
catctttactaaaaatacaa

SEQ ID NO: 29729 - DNA, 20 bp, synthetic construct
  source 1..20: mol_type = other DNA
ccatctttactaaaaataca

SEQ ID NO: 29730 - DNA, 20 bp, synthetic construct
  source 1..20: mol_type = other DNA
cccatctttactaaaaatac

SEQ ID NO: 29731 - DNA, 20 bp, synthetic construct
  source 1..20: mol_type = other DNA
ccccatctttactaaaaata

SEQ ID NO: 29732 - DNA, 20 bp, synthetic construct
  source 1..20: mol_type = other DNA
accccatctttactaaaaat

SEQ ID NO: 29733 - DNA, 20 bp, synthetic construct
  source 1..20: mol_type = other DNA
aaccccatctttactaaaaa

SEQ ID NO: 29734 - DNA, 20 bp, synthetic construct
  source 1..20: mol_type = other DNA
aaaccccatctttactaaaa

SEQ ID NO: 29735 - DNA, 20 bp, synthetic construct
  source 1..20: mol_type = other DNA
gaaaccccatctttactaaa

SEQ ID NO: 29736 - DNA, 20 bp, synthetic construct
  source 1..20: mol_type = other DNA
cgaaaccccatctttactaa

SEQ ID NO: 29737 - DNA, 20 bp, synthetic construct
  source 1..20: mol_type = other DNA
gcgaaaccccatctttacta

SEQ ID NO: 29738 - DNA, 20 bp, synthetic construct
  source 1..20: mol_type = other DNA
ggcgaaaccccatctttact

SEQ ID NO: 29739 - DNA, 20 bp, synthetic construct
  source 1..20: mol_type = other DNA
tggcgaaaccccatctttac

SEQ ID NO: 29740 - DNA, 20 bp, synthetic construct
  source 1..20: mol_type = other DNA
gtggcgaaaccccatcttta

SEQ ID NO: 29741 - DNA, 20 bp, synthetic construct
  source 1..20: mol_type = other DNA
tgtggcgaaaccccatcttt

SEQ ID NO: 29742 - DNA, 20 bp, synthetic construct
  source 1..20: mol_type = other DNA
atgtggcgaaaccccatctt

SEQ ID NO: 29743 - DNA, 20 bp, synthetic construct
  source 1..20: mol_type = other DNA
aatgtggcgaaaccccatct

SEQ ID NO: 29744 - DNA, 20 bp, synthetic construct
  source 1..20: mol_type = other DNA
caatgtggcgaaaccccatc

SEQ ID NO: 29745 - DNA, 20 bp, synthetic construct
  source 1..20: mol_type = other DNA
ccaatgtggcgaaaccccat

SEQ ID NO: 29746 - DNA, 20 bp, synthetic construct
  source 1..20: mol_type = other DNA
gccaatgtggcgaaacccca

SEQ ID NO: 29747 - DNA, 20 bp, synthetic construct
  source 1..20: mol_type = other DNA
ggccaatgtggcgaaacccc

SEQ ID NO: 29748 - DNA, 20 bp, synthetic construct
  source 1..20: mol_type = other DNA
tggccaatgtggcgaaaccc

SEQ ID NO: 29749 - DNA, 20 bp, synthetic construct
  source 1..20: mol_type = other DNA
ctggccaatgtggcgaaacc

SEQ ID NO: 29750 - DNA, 20 bp, synthetic construct
  source 1..20: mol_type = other DNA
cctggccaatgtggcgaaac

SEQ ID NO: 29751 - DNA, 20 bp, synthetic construct
  source 1..20: mol_type = other DNA
gcctggccaatgtggcgaaa

SEQ ID NO: 29752 - DNA, 20 bp, synthetic construct
  source 1..20: mol_type = other DNA
agcctggccaatgtggcgaa

SEQ ID NO: 29753 - DNA, 20 bp, synthetic construct
  source 1..20: mol_type = other DNA
cagcctggccaatgtggcga

SEQ ID NO: 29754 - DNA, 20 bp, synthetic construct
  source 1..20: mol_type = other DNA
ccagcctggccaatgtggcg

SEQ ID NO: 29755 - DNA, 20 bp, synthetic construct
  source 1..20: mol_type = other DNA
accagcctggccaatgtggc

SEQ ID NO: 29756 - DNA, 20 bp, synthetic construct
  source 1..20: mol_type = other DNA
gaccagcctggccaatgtgg

SEQ ID NO: 29757 - DNA, 20 bp, synthetic construct
  source 1..20: mol_type = other DNA
agaccagcctggccaatgtg

SEQ ID NO: 29758 - DNA, 20 bp, synthetic construct
  source 1..20: mol_type = other DNA
gagaccagcctggccaatgt

SEQ ID NO: 29759 - DNA, 20 bp, synthetic construct
  source 1..20: mol_type = other DNA
ggagaccagcctggccaatg

SEQ ID NO: 29760 - DNA, 20 bp, synthetic construct
  source 1..20: mol_type = other DNA
aggagaccagcctggccaat

SEQ ID NO: 29761 - DNA, 20 bp, synthetic construct
  source 1..20: mol_type = other DNA
caggagaccagcctggccaa

SEQ ID NO: 29762 - DNA, 20 bp, synthetic construct
  source 1..20: mol_type = other DNA
tcaggagaccagcctggcca

SEQ ID NO: 29763 - DNA, 20 bp, synthetic construct
  source 1..20: mol_type = other DNA
atcaggagaccagcctggcc

SEQ ID NO: 29764 - DNA, 20 bp, synthetic construct
  source 1..20: mol_type = other DNA
gatcaggagaccagcctggc

SEQ ID NO: 29765 - DNA, 20 bp, synthetic construct
  source 1..20: mol_type = other DNA
agatcaggagaccagcctgg

SEQ ID NO: 29766 - DNA, 20 bp, synthetic construct
  source 1..20: mol_type = other DNA
gagatcaggagaccagcctg

SEQ ID NO: 29767 - DNA, 20 bp, synthetic construct
  source 1..20: mol_type = other DNA
tgagatcaggagaccagcct

SEQ ID NO: 29768 - DNA, 20 bp, synthetic construct
  source 1..20: mol_type = other DNA
ctgagatcaggagaccagcc

SEQ ID NO: 29769 - DNA, 20 bp, synthetic construct
  source 1..20: mol_type = other DNA
cctgagatcaggagaccagc

SEQ ID NO: 29770 - DNA, 20 bp, synthetic construct
  source 1..20: mol_type = other DNA
acctgagatcaggagaccag

SEQ ID NO: 29771 - DNA, 20 bp, synthetic construct
  source 1..20: mol_type = other DNA
cacctgagatcaggagacca

SEQ ID NO: 29772 - DNA, 20 bp, synthetic construct
  source 1..20: mol_type = other DNA
tcacctgagatcaggagacc

SEQ ID NO: 29773 - DNA, 20 bp, synthetic construct
  source 1..20: mol_type = other DNA
atcacctgagatcaggagac

SEQ ID NO: 29774 - DNA, 20 bp, synthetic construct
  source 1..20: mol_type = other DNA
gatcacctgagatcaggaga

SEQ ID NO: 29775 - DNA, 20 bp, synthetic construct
  source 1..20: mol_type = other DNA
agatcacctgagatcaggag

SEQ ID NO: 29776 - DNA, 20 bp, synthetic construct
  source 1..20: mol_type = other DNA
cagatcacctgagatcagga

SEQ ID NO: 29777 - DNA, 20 bp, synthetic construct
  source 1..20: mol_type = other DNA
gcagatcacctgagatcagg

SEQ ID NO: 29778 - DNA, 20 bp, synthetic construct
  source 1..20: mol_type = other DNA
ggcagatcacctgagatcag

SEQ ID NO: 29779 - DNA, 20 bp, synthetic construct
  source 1..20: mol_type = other DNA
gggcagatcacctgagatca

SEQ ID NO: 29780 - DNA, 20 bp, synthetic construct
  source 1..20: mol_type = other DNA
tgggcagatcacctgagatc

SEQ ID NO: 29781 - DNA, 20 bp, synthetic construct
  source 1..20: mol_type = other DNA
gtgggcagatcacctgagat

SEQ ID NO: 29782 - DNA, 20 bp, synthetic construct
  source 1..20: mol_type = other DNA
ggtgggcagatcacctgaga

SEQ ID NO: 29783 - DNA, 20 bp, synthetic construct
  source 1..20: mol_type = other DNA
aggtgggcagatcacctgag

SEQ ID NO: 29784 - DNA, 20 bp, synthetic construct
  source 1..20: mol_type = other DNA
gaggtgggcagatcacctga

SEQ ID NO: 29785 - DNA, 20 bp, synthetic construct
  source 1..20: mol_type = other DNA
agaggtgggcagatcacctg

SEQ ID NO: 29786 - DNA, 20 bp, synthetic construct
  source 1..20: mol_type = other DNA
cagaggtgggcagatcacct

SEQ ID NO: 29787 - DNA, 20 bp, synthetic construct
  source 1..20: mol_type = other DNA
gcagaggtgggcagatcacc

SEQ ID NO: 29788 - DNA, 20 bp, synthetic construct
  source 1..20: mol_type = other DNA
ggcagaggtgggcagatcac

SEQ ID NO: 29789 - DNA, 20 bp, synthetic construct
  source 1..20: mol_type = other DNA
aggcagaggtgggcagatca

SEQ ID NO: 29790 - DNA, 20 bp, synthetic construct
  source 1..20: mol_type = other DNA
gaggcagaggtgggcagatc

SEQ ID NO: 29791 - DNA, 20 bp, synthetic construct
  source 1..20: mol_type = other DNA
ggaggcagaggtgggcagat

SEQ ID NO: 29792 - DNA, 20 bp, synthetic construct
  source 1..20: mol_type = other DNA
gggaggcagaggtgggcaga

SEQ ID NO: 29793 - DNA, 20 bp, synthetic construct
  source 1..20: mol_type = other DNA
tgggaggcagaggtgggcag

SEQ ID NO: 29794 - DNA, 20 bp, synthetic construct
  source 1..20: mol_type = other DNA
ttgggaggcagaggtgggca

SEQ ID NO: 29795 - DNA, 20 bp, synthetic construct
  source 1..20: mol_type = other DNA
tttgggaggcagaggtgggc

SEQ ID NO: 29796 - DNA, 20 bp, synthetic construct
  source 1..20: mol_type = other DNA
ctttgggaggcagaggtggg

SEQ ID NO: 29797 - DNA, 20 bp, synthetic construct
  source 1..20: mol_type = other DNA
actttgggaggcagaggtgg

SEQ ID NO: 29798 - DNA, 20 bp, synthetic construct
  source 1..20: mol_type = other DNA
cactttgggaggcagaggtg

SEQ ID NO: 29799 - DNA, 20 bp, synthetic construct
  source 1..20: mol_type = other DNA
gcactttgggaggcagaggt

SEQ ID NO: 29800 - DNA, 20 bp, synthetic construct
  source 1..20: mol_type = other DNA
agcactttgggaggcagagg

SEQ ID NO: 29801 - DNA, 20 bp, synthetic construct
  source 1..20: mol_type = other DNA
cagcactttgggaggcagag

SEQ ID NO: 29802 - DNA, 20 bp, synthetic construct
  source 1..20: mol_type = other DNA
ccagcactttgggaggcaga

SEQ ID NO: 29803 - DNA, 20 bp, synthetic construct
  source 1..20: mol_type = other DNA
cccagcactttgggaggcag

SEQ ID NO: 29804 - DNA, 20 bp, synthetic construct
  source 1..20: mol_type = other DNA
tcccagcactttgggaggca

SEQ ID NO: 29805 - DNA, 20 bp, synthetic construct
  source 1..20: mol_type = other DNA
atcccagcactttgggaggc

SEQ ID NO: 29806 - DNA, 20 bp, synthetic construct
  source 1..20: mol_type = other DNA
aatcccagcactttgggagg

SEQ ID NO: 29807 - DNA, 20 bp, synthetic construct
  source 1..20: mol_type = other DNA
taatcccagcactttgggag

SEQ ID NO: 29808 - DNA, 20 bp, synthetic construct
  source 1..20: mol_type = other DNA
gtaatcccagcactttggga

SEQ ID NO: 29809 - DNA, 20 bp, synthetic construct
  source 1..20: mol_type = other DNA
tgtaatcccagcactttggg

SEQ ID NO: 29810 - DNA, 20 bp, synthetic construct
  source 1..20: mol_type = other DNA
ctgtaatcccagcactttgg

SEQ ID NO: 29811 - DNA, 20 bp, synthetic construct
  source 1..20: mol_type = other DNA
cctgtaatcccagcactttg

SEQ ID NO: 29812 - DNA, 20 bp, synthetic construct
  source 1..20: mol_type = other DNA
acctgtaatcccagcacttt

SEQ ID NO: 29813 - DNA, 20 bp, synthetic construct
  source 1..20: mol_type = other DNA
cacctgtaatcccagcactt

SEQ ID NO: 29814 - DNA, 20 bp, synthetic construct
  source 1..20: mol_type = other DNA
acacctgtaatcccagcact

SEQ ID NO: 29815 - DNA, 20 bp, synthetic construct
  source 1..20: mol_type = other DNA
cacacctgtaatcccagcac

SEQ ID NO: 29816 - DNA, 20 bp, synthetic construct
  source 1..20: mol_type = other DNA
tcacacctgtaatcccagca

SEQ ID NO: 29817 - DNA, 20 bp, synthetic construct
  source 1..20: mol_type = other DNA
ctcacacctgtaatcccagc

SEQ ID NO: 29818 - DNA, 20 bp, synthetic construct
  source 1..20: mol_type = other DNA
gctcacacctgtaatcccag

SEQ ID NO: 29819 - DNA, 20 bp, synthetic construct
  source 1..20: mol_type = other DNA
ggctcacacctgtaatccca

SEQ ID NO: 29820 - DNA, 20 bp, synthetic construct
  source 1..20: mol_type = other DNA
tggctcacacctgtaatccc

SEQ ID NO: 29821 - DNA, 20 bp, synthetic construct
  source 1..20: mol_type = other DNA
gtggctcacacctgtaatcc

SEQ ID NO: 29822 - DNA, 20 bp, synthetic construct
  source 1..20: mol_type = other DNA
ggtggctcacacctgtaatc

SEQ ID NO: 29823 - DNA, 20 bp, synthetic construct
  source 1..20: mol_type = other DNA
cggtggctcacacctgtaat

SEQ ID NO: 29824 - DNA, 20 bp, synthetic construct
  source 1..20: mol_type = other DNA
acggtggctcacacctgtaa

SEQ ID NO: 29825 - DNA, 20 bp, synthetic construct
  source 1..20: mol_type = other DNA
cacggtggctcacacctgta

SEQ ID NO: 29826 - DNA, 20 bp, synthetic construct
  source 1..20: mol_type = other DNA
gcacggtggctcacacctgt

SEQ ID NO: 29827 - DNA, 20 bp, synthetic construct
  source 1..20: mol_type = other DNA
ggcacggtggctcacacctg

SEQ ID NO: 29828 - DNA, 20 bp, synthetic construct
  source 1..20: mol_type = other DNA
aggcacggtggctcacacct

SEQ ID NO: 29829 - DNA, 20 bp, synthetic construct
  source 1..20: mol_type = other DNA
caggcacggtggctcacacc

SEQ ID NO: 29830 - DNA, 20 bp, synthetic construct
  source 1..20: mol_type = other DNA
tcaggcacggtggctcacac

SEQ ID NO: 29831 - DNA, 20 bp, synthetic construct
  source 1..20: mol_type = other DNA
gtcaggcacggtggctcaca

SEQ ID NO: 29832 - DNA, 20 bp, synthetic construct
  source 1..20: mol_type = other DNA
ggtcaggcacggtggctcac

SEQ ID NO: 29833 - DNA, 20 bp, synthetic construct
  source 1..20: mol_type = other DNA
aggtcaggcacggtggctca

SEQ ID NO: 29834 - DNA, 20 bp, synthetic construct
  source 1..20: mol_type = other DNA
taggtcaggcacggtggctc

SEQ ID NO: 29835 - DNA, 20 bp, synthetic construct
  source 1..20: mol_type = other DNA
ttaggtcaggcacggtggct

SEQ ID NO: 29836 - DNA, 20 bp, synthetic construct
  source 1..20: mol_type = other DNA
tttaggtcaggcacggtggc

SEQ ID NO: 29837 - DNA, 20 bp, synthetic construct
  source 1..20: mol_type = other DNA
ttttaggtcaggcacggtgg

SEQ ID NO: 29838 - DNA, 20 bp, synthetic construct
  source 1..20: mol_type = other DNA
cttttaggtcaggcacggtg

SEQ ID NO: 29839 - DNA, 20 bp, synthetic construct
  source 1..20: mol_type = other DNA
gcttttaggtcaggcacggt

SEQ ID NO: 29840 - DNA, 20 bp, synthetic construct
  source 1..20: mol_type = other DNA
agcttttaggtcaggcacgg

SEQ ID NO: 29841 - DNA, 20 bp, synthetic construct
  source 1..20: mol_type = other DNA
gagcttttaggtcaggcacg

SEQ ID NO: 29842 - DNA, 20 bp, synthetic construct
  source 1..20: mol_type = other DNA
agagcttttaggtcaggcac

SEQ ID NO: 29843 - DNA, 20 bp, synthetic construct
  source 1..20: mol_type = other DNA
aagagcttttaggtcaggca

SEQ ID NO: 29844 - DNA, 20 bp, synthetic construct
  source 1..20: mol_type = other DNA
aaagagcttttaggtcaggc

SEQ ID NO: 29845 - DNA, 20 bp, synthetic construct
  source 1..20: mol_type = other DNA
taaagagcttttaggtcagg

SEQ ID NO: 29846 - DNA, 20 bp, synthetic construct
  source 1..20: mol_type = other DNA
gtaaagagcttttaggtcag

SEQ ID NO: 29847 - DNA, 20 bp, synthetic construct
  source 1..20: mol_type = other DNA
tgtaaagagcttttaggtca

SEQ ID NO: 29848 - DNA, 20 bp, synthetic construct
  source 1..20: mol_type = other DNA
ctgtaaagagcttttaggtc

SEQ ID NO: 29849 - DNA, 20 bp, synthetic construct
  source 1..20: mol_type = other DNA
actgtaaagagcttttaggt

SEQ ID NO: 29850 - DNA, 20 bp, synthetic construct
  source 1..20: mol_type = other DNA
cactgtaaagagcttttagg

SEQ ID NO: 29851 - DNA, 20 bp, synthetic construct
  source 1..20: mol_type = other DNA
acactgtaaagagcttttag

SEQ ID NO: 29852 - DNA, 20 bp, synthetic construct
  source 1..20: mol_type = other DNA
tacactgtaaagagctttta

SEQ ID NO: 29853 - DNA, 20 bp, synthetic construct
  source 1..20: mol_type = other DNA
ttacactgtaaagagctttt

SEQ ID NO: 29854 - DNA, 20 bp, synthetic construct
  source 1..20: mol_type = other DNA
tttacactgtaaagagcttt

SEQ ID NO: 29855 - DNA, 20 bp, synthetic construct
  source 1..20: mol_type = other DNA
ttttacactgtaaagagctt

SEQ ID NO: 29856 - DNA, 20 bp, synthetic construct
  source 1..20: mol_type = other DNA
tttttacactgtaaagagct

SEQ ID NO: 29857 - DNA, 20 bp, synthetic construct
  source 1..20: mol_type = other DNA
ttttttacactgtaaagagc

SEQ ID NO: 29858 - DNA, 20 bp, synthetic construct
  source 1..20: mol_type = other DNA
attttttacactgtaaagag

SEQ ID NO: 29859 - DNA, 20 bp, synthetic construct
  source 1..20: mol_type = other DNA
tattttttacactgtaaaga

SEQ ID NO: 29860 - DNA, 20 bp, synthetic construct
  source 1..20: mol_type = other DNA
atattttttacactgtaaag

SEQ ID NO: 29861 - DNA, 20 bp, synthetic construct
  source 1..20: mol_type = other DNA
aatattttttacactgtaaa

SEQ ID NO: 29862 - DNA, 20 bp, synthetic construct
  source 1..20: mol_type = other DNA
gaatattttttacactgtaa

SEQ ID NO: 29863 - DNA, 20 bp, synthetic construct
  source 1..20: mol_type = other DNA
agaatattttttacactgta

SEQ ID NO: 29864 - DNA, 20 bp, synthetic construct
  source 1..20: mol_type = other DNA
cagaatattttttacactgt

SEQ ID NO: 29865 - DNA, 20 bp, synthetic construct
  source 1..20: mol_type = other DNA
tcagaatattttttacactg

SEQ ID NO: 29866 - DNA, 20 bp, synthetic construct
  source 1..20: mol_type = other DNA
ctcagaatattttttacact

SEQ ID NO: 29867 - DNA, 20 bp, synthetic construct
  source 1..20: mol_type = other DNA
gctcagaatattttttacac

SEQ ID NO: 29868 - DNA, 20 bp, synthetic construct
  source 1..20: mol_type = other DNA
agctcagaatattttttaca

SEQ ID NO: 29869 - DNA, 20 bp, synthetic construct
  source 1..20: mol_type = other DNA
aagctcagaatattttttac

SEQ ID NO: 29870 - DNA, 20 bp, synthetic construct
  source 1..20: mol_type = other DNA
aaagctcagaatatttttta

SEQ ID NO: 29871 - DNA, 20 bp, synthetic construct
  source 1..20: mol_type = other DNA
taaagctcagaatatttttt

SEQ ID NO: 29872 - DNA, 20 bp, synthetic construct
  source 1..20: mol_type = other DNA
ttaaagctcagaatattttt

SEQ ID NO: 29873 - DNA, 20 bp, synthetic construct
  source 1..20: mol_type = other DNA
cttaaagctcagaatatttt

SEQ ID NO: 29874 - DNA, 20 bp, synthetic construct
  source 1..20: mol_type = other DNA
gcttaaagctcagaatattt

SEQ ID NO: 29875 - DNA, 20 bp, synthetic construct
  source 1..20: mol_type = other DNA
ggcttaaagctcagaatatt

SEQ ID NO: 29876 - DNA, 20 bp, synthetic construct
  source 1..20: mol_type = other DNA
tggcttaaagctcagaatat

SEQ ID NO: 29877 - DNA, 20 bp, synthetic construct
  source 1..20: mol_type = other DNA
atggcttaaagctcagaata

SEQ ID NO: 29878 - DNA, 20 bp, synthetic construct
  source 1..20: mol_type = other DNA
catggcttaaagctcagaat

SEQ ID NO: 29879 - DNA, 20 bp, synthetic construct
  source 1..20: mol_type = other DNA
acatggcttaaagctcagaa

SEQ ID NO: 29880 - DNA, 20 bp, synthetic construct
  source 1..20: mol_type = other DNA
cacatggcttaaagctcaga

SEQ ID NO: 29881 - DNA, 20 bp, synthetic construct
  source 1..20: mol_type = other DNA
tcacatggcttaaagctcag

SEQ ID NO: 29882 - DNA, 20 bp, synthetic construct
  source 1..20: mol_type = other DNA
ttcacatggcttaaagctca

SEQ ID NO: 29883 - DNA, 20 bp, synthetic construct
  source 1..20: mol_type = other DNA
tttcacatggcttaaagctc

SEQ ID NO: 29884 - DNA, 20 bp, synthetic construct
  source 1..20: mol_type = other DNA
ttttcacatggcttaaagct

SEQ ID NO: 29885 - DNA, 20 bp, synthetic construct
  source 1..20: mol_type = other DNA
attttcacatggcttaaagc

SEQ ID NO: 29886 - DNA, 20 bp, synthetic construct
  source 1..20: mol_type = other DNA
tattttcacatggcttaaag

SEQ ID NO: 29887 - DNA, 20 bp, synthetic construct
  source 1..20: mol_type = other DNA
ctattttcacatggcttaaa

SEQ ID NO: 29888 - DNA, 20 bp, synthetic construct
  source 1..20: mol_type = other DNA
cctattttcacatggcttaa

SEQ ID NO: 29889 - DNA, 20 bp, synthetic construct
  source 1..20: mol_type = other DNA
gcctattttcacatggctta

SEQ ID NO: 29890 - DNA, 20 bp, synthetic construct
  source 1..20: mol_type = other DNA
ggcctattttcacatggctt

SEQ ID NO: 29891 - DNA, 20 bp, synthetic construct
  source 1..20: mol_type = other DNA
tggcctattttcacatggct

SEQ ID NO: 29892 - DNA, 20 bp, synthetic construct
  source 1..20: mol_type = other DNA
atggcctattttcacatggc

SEQ ID NO: 29893 - DNA, 20 bp, synthetic construct
  source 1..20: mol_type = other DNA
catggcctattttcacatgg

SEQ ID NO: 29894 - DNA, 20 bp, synthetic construct
  source 1..20: mol_type = other DNA
ccatggcctattttcacatg

SEQ ID NO: 29895 - DNA, 20 bp, synthetic construct
  source 1..20: mol_type = other DNA
cccatggcctattttcacat

SEQ ID NO: 29896 - DNA, 20 bp, synthetic construct
  source 1..20: mol_type = other DNA
gcccatggcctattttcaca

SEQ ID NO: 29897 - DNA, 20 bp, synthetic construct
  source 1..20: mol_type = other DNA
tgcccatggcctattttcac

SEQ ID NO: 29898 - DNA, 20 bp, synthetic construct
  source 1..20: mol_type = other DNA
atgcccatggcctattttca

SEQ ID NO: 29899 - DNA, 20 bp, synthetic construct
  source 1..20: mol_type = other DNA
aatgcccatggcctattttc

SEQ ID NO: 29900 - DNA, 20 bp, synthetic construct
  source 1..20: mol_type = other DNA
aaatgcccatggcctatttt

SEQ ID NO: 29901 - DNA, 20 bp, synthetic construct
  source 1..20: mol_type = other DNA
caaatgcccatggcctattt

SEQ ID NO: 29902 - DNA, 20 bp, synthetic construct
  source 1..20: mol_type = other DNA
gcaaatgcccatggcctatt

SEQ ID NO: 29903 - DNA, 20 bp, synthetic construct
  source 1..20: mol_type = other DNA
agcaaatgcccatggcctat

SEQ ID NO: 29904 - DNA, 20 bp, synthetic construct
  source 1..20: mol_type = other DNA
cagcaaatgcccatggccta

SEQ ID NO: 29905 - DNA, 20 bp, synthetic construct
  source 1..20: mol_type = other DNA
tcagcaaatgcccatggcct

SEQ ID NO: 29906 - DNA, 20 bp, synthetic construct
  source 1..20: mol_type = other DNA
gtcagcaaatgcccatggcc

SEQ ID NO: 29907 - DNA, 20 bp, synthetic construct
  source 1..20: mol_type = other DNA
ggtcagcaaatgcccatggc

SEQ ID NO: 29908 - DNA, 20 bp, synthetic construct
  source 1..20: mol_type = other DNA
gggtcagcaaatgcccatgg

SEQ ID NO: 29909 - DNA, 20 bp, synthetic construct
  source 1..20: mol_type = other DNA
ggggtcagcaaatgcccatg

SEQ ID NO: 29910 - DNA, 20 bp, synthetic construct
  source 1..20: mol_type = other DNA
aggggtcagcaaatgcccat

SEQ ID NO: 29911 - DNA, 20 bp, synthetic construct
  source 1..20: mol_type = other DNA
taggggtcagcaaatgccca

SEQ ID NO: 29912 - DNA, 20 bp, synthetic construct
  source 1..20: mol_type = other DNA
ttaggggtcagcaaatgccc

SEQ ID NO: 29913 - DNA, 20 bp, synthetic construct
  source 1..20: mol_type = other DNA
attaggggtcagcaaatgcc

SEQ ID NO: 29914 - DNA, 20 bp, synthetic construct
  source 1..20: mol_type = other DNA
tattaggggtcagcaaatgc

SEQ ID NO: 29915 - DNA, 20 bp, synthetic construct
  source 1..20: mol_type = other DNA
ctattaggggtcagcaaatg

SEQ ID NO: 29916 - DNA, 20 bp, synthetic construct
  source 1..20: mol_type = other DNA
tctattaggggtcagcaaat

SEQ ID NO: 29917 - DNA, 20 bp, synthetic construct
  source 1..20: mol_type = other DNA
ttctattaggggtcagcaaa

SEQ ID NO: 29918 - DNA, 20 bp, synthetic construct
  source 1..20: mol_type = other DNA
gttctattaggggtcagcaa

SEQ ID NO: 29919 - DNA, 20 bp, synthetic construct
  source 1..20: mol_type = other DNA
agttctattaggggtcagca

SEQ ID NO: 29920 - DNA, 20 bp, synthetic construct
  source 1..20: mol_type = other DNA
gagttctattaggggtcagc

SEQ ID NO: 29921 - DNA, 20 bp, synthetic construct
  source 1..20: mol_type = other DNA
ggagttctattaggggtcag

SEQ ID NO: 29922 - DNA, 20 bp, synthetic construct
  source 1..20: mol_type = other DNA
tggagttctattaggggtca

SEQ ID NO: 29923 - DNA, 20 bp, synthetic construct
  source 1..20: mol_type = other DNA
atggagttctattaggggtc

SEQ ID NO: 29924 - DNA, 20 bp, synthetic construct
  source 1..20: mol_type = other DNA
aatggagttctattaggggt

SEQ ID NO: 29925 - DNA, 20 bp, synthetic construct
  source 1..20: mol_type = other DNA
aaatggagttctattagggg

SEQ ID NO: 29926 - DNA, 20 bp, synthetic construct
  source 1..20: mol_type = other DNA
aaaatggagttctattaggg

SEQ ID NO: 29927 - DNA, 20 bp, synthetic construct
  source 1..20: mol_type = other DNA
taaaatggagttctattagg

SEQ ID NO: 29928 - DNA, 20 bp, synthetic construct
  source 1..20: mol_type = other DNA
gtaaaatggagttctattag

SEQ ID NO: 29929 - DNA, 20 bp, synthetic construct
  source 1..20: mol_type = other DNA
ggtaaaatggagttctatta

SEQ ID NO: 29930 - DNA, 20 bp, synthetic construct
  source 1..20: mol_type = other DNA
aggtaaaatggagttctatt

SEQ ID NO: 29931 - DNA, 20 bp, synthetic construct
  source 1..20: mol_type = other DNA
aaggtaaaatggagttctat

SEQ ID NO: 29932 - DNA, 20 bp, synthetic construct
  source 1..20: mol_type = other DNA
aaaggtaaaatggagttcta

SEQ ID NO: 29933 - DNA, 20 bp, synthetic construct
  source 1..20: mol_type = other DNA
gaaaggtaaaatggagttct

SEQ ID NO: 29934 - DNA, 20 bp, synthetic construct
  source 1..20: mol_type = other DNA
agaaaggtaaaatggagttc

SEQ ID NO: 29935 - DNA, 20 bp, synthetic construct
  source 1..20: mol_type = other DNA
cagaaaggtaaaatggagtt

SEQ ID NO: 29936 - DNA, 20 bp, synthetic construct
  source 1..20: mol_type = other DNA
tcagaaaggtaaaatggagt

SEQ ID NO: 29937 - DNA, 20 bp, synthetic construct
  source 1..20: mol_type = other DNA
atcagaaaggtaaaatggag

SEQ ID NO: 29938 - DNA, 20 bp, synthetic construct
  source 1..20: mol_type = other DNA
gatcagaaaggtaaaatgga

SEQ ID NO: 29939 - DNA, 20 bp, synthetic construct
  source 1..20: mol_type = other DNA
tgatcagaaaggtaaaatgg

SEQ ID NO: 29940 - DNA, 20 bp, synthetic construct
  source 1..20: mol_type = other DNA
atgatcagaaaggtaaaatg

SEQ ID NO: 29941 - DNA, 20 bp, synthetic construct
  source 1..20: mol_type = other DNA
catgatcagaaaggtaaaat

SEQ ID NO: 29942 - DNA, 20 bp, synthetic construct
  source 1..20: mol_type = other DNA
acatgatcagaaaggtaaaa

SEQ ID NO: 29943 - DNA, 20 bp, synthetic construct
  source 1..20: mol_type = other DNA
aacatgatcagaaaggtaaa

SEQ ID NO: 29944 - DNA, 20 bp, synthetic construct
  source 1..20: mol_type = other DNA
aaacatgatcagaaaggtaa

SEQ ID NO: 29945 - DNA, 20 bp, synthetic construct
  source 1..20: mol_type = other DNA
gaaacatgatcagaaaggta

SEQ ID NO: 29946 - DNA, 20 bp, synthetic construct
  source 1..20: mol_type = other DNA
ggaaacatgatcagaaaggt

SEQ ID NO: 29947 - DNA, 20 bp, synthetic construct
  source 1..20: mol_type = other DNA
gggaaacatgatcagaaagg

SEQ ID NO: 29948 - DNA, 20 bp, synthetic construct
  source 1..20: mol_type = other DNA
tgggaaacatgatcagaaag

SEQ ID NO: 29949 - DNA, 20 bp, synthetic construct
  source 1..20: mol_type = other DNA
atgggaaacatgatcagaaa

SEQ ID NO: 29950 - DNA, 20 bp, synthetic construct
  source 1..20: mol_type = other DNA
aatgggaaacatgatcagaa

SEQ ID NO: 29951 - DNA, 20 bp, synthetic construct
  source 1..20: mol_type = other DNA
taatgggaaacatgatcaga

SEQ ID NO: 29952 - DNA, 20 bp, synthetic construct
  source 1..20: mol_type = other DNA
ttaatgggaaacatgatcag

SEQ ID NO: 29953 - DNA, 20 bp, synthetic construct
  source 1..20: mol_type = other DNA
gttaatgggaaacatgatca

SEQ ID NO: 29954 - DNA, 20 bp, synthetic construct
  source 1..20: mol_type = other DNA
agttaatgggaaacatgatc

SEQ ID NO: 29955 - DNA, 20 bp, synthetic construct
  source 1..20: mol_type = other DNA
gagttaatgggaaacatgat

SEQ ID NO: 29956 - DNA, 20 bp, synthetic construct
  source 1..20: mol_type = other DNA
agagttaatgggaaacatga

SEQ ID NO: 29957 - DNA, 20 bp, synthetic construct
  source 1..20: mol_type = other DNA
aagagttaatgggaaacatg

SEQ ID NO: 29958 - DNA, 20 bp, synthetic construct
  source 1..20: mol_type = other DNA
gaagagttaatgggaaacat

SEQ ID NO: 29959 - DNA, 20 bp, synthetic construct
  source 1..20: mol_type = other DNA
tgaagagttaatgggaaaca

SEQ ID NO: 29960 - DNA, 20 bp, synthetic construct
  source 1..20: mol_type = other DNA
ttgaagagttaatgggaaac

SEQ ID NO: 29961 - DNA, 20 bp, synthetic construct
  source 1..20: mol_type = other DNA
tttgaagagttaatgggaaa

SEQ ID NO: 29962 - DNA, 20 bp, synthetic construct
  source 1..20: mol_type = other DNA
ttttgaagagttaatgggaa

SEQ ID NO: 29963 - DNA, 20 bp, synthetic construct
  source 1..20: mol_type = other DNA
tttttgaagagttaatggga

SEQ ID NO: 29964 - DNA, 20 bp, synthetic construct
  source 1..20: mol_type = other DNA
atttttgaagagttaatggg

SEQ ID NO: 29965 - DNA, 20 bp, synthetic construct
  source 1..20: mol_type = other DNA
tatttttgaagagttaatgg

SEQ ID NO: 29966 - DNA, 20 bp, synthetic construct
  source 1..20: mol_type = other DNA
atatttttgaagagttaatg

SEQ ID NO: 29967 - DNA, 20 bp, synthetic construct
  source 1..20: mol_type = other DNA
catatttttgaagagttaat

SEQ ID NO: 29968 - DNA, 20 bp, synthetic construct
  source 1..20: mol_type = other DNA
tcatatttttgaagagttaa

SEQ ID NO: 29969 - DNA, 20 bp, synthetic construct
  source 1..20: mol_type = other DNA
gtcatatttttgaagagtta

SEQ ID NO: 29970 - DNA, 20 bp, synthetic construct
  source 1..20: mol_type = other DNA
ggtcatatttttgaagagtt

SEQ ID NO: 29971 - DNA, 20 bp, synthetic construct
  source 1..20: mol_type = other DNA
aggtcatatttttgaagagt

SEQ ID NO: 29972 - DNA, 20 bp, synthetic construct
  source 1..20: mol_type = other DNA
gaggtcatatttttgaagag

SEQ ID NO: 29973 - DNA, 20 bp, synthetic construct
  source 1..20: mol_type = other DNA
ggaggtcatatttttgaaga

SEQ ID NO: 29974 - DNA, 20 bp, synthetic construct
  source 1..20: mol_type = other DNA
tggaggtcatatttttgaag

SEQ ID NO: 29975 - DNA, 20 bp, synthetic construct
  source 1..20: mol_type = other DNA
atggaggtcatatttttgaa

SEQ ID NO: 29976 - DNA, 20 bp, synthetic construct
  source 1..20: mol_type = other DNA
aatggaggtcatatttttga

SEQ ID NO: 29977 - DNA, 20 bp, synthetic construct
  source 1..20: mol_type = other DNA
aaatggaggtcatatttttg

SEQ ID NO: 29978 - DNA, 20 bp, synthetic construct
  source 1..20: mol_type = other DNA
taaatggaggtcatattttt

SEQ ID NO: 29979 - DNA, 20 bp, synthetic construct
  source 1..20: mol_type = other DNA
ttaaatggaggtcatatttt

SEQ ID NO: 29980 - DNA, 20 bp, synthetic construct
  source 1..20: mol_type = other DNA
tttaaatggaggtcatattt

SEQ ID NO: 29981 - DNA, 20 bp, synthetic construct
  source 1..20: mol_type = other DNA
atttaaatggaggtcatatt

SEQ ID NO: 29982 - DNA, 20 bp, synthetic construct
  source 1..20: mol_type = other DNA
gatttaaatggaggtcatat

SEQ ID NO: 29983 - DNA, 20 bp, synthetic construct
  source 1..20: mol_type = other DNA
tgatttaaatggaggtcata

SEQ ID NO: 29984 - DNA, 20 bp, synthetic construct
  source 1..20: mol_type = other DNA
ttgatttaaatggaggtcat

SEQ ID NO: 29985 - DNA, 20 bp, synthetic construct
  source 1..20: mol_type = other DNA
cttgatttaaatggaggtca

SEQ ID NO: 29986 - DNA, 20 bp, synthetic construct
  source 1..20: mol_type = other DNA
tcttgatttaaatggaggtc

SEQ ID NO: 29987 - DNA, 20 bp, synthetic construct
  source 1..20: mol_type = other DNA
atcttgatttaaatggaggt

SEQ ID NO: 29988 - DNA, 20 bp, synthetic construct
  source 1..20: mol_type = other DNA
catcttgatttaaatggagg

SEQ ID NO: 29989 - DNA, 20 bp, synthetic construct
  source 1..20: mol_type = other DNA
ccatcttgatttaaatggag

SEQ ID NO: 29990 - DNA, 20 bp, synthetic construct
  source 1..20: mol_type = other DNA
accatcttgatttaaatgga

SEQ ID NO: 29991 - DNA, 20 bp, synthetic construct
  source 1..20: mol_type = other DNA
gaccatcttgatttaaatgg

SEQ ID NO: 29992 - DNA, 20 bp, synthetic construct
  source 1..20: mol_type = other DNA
agaccatcttgatttaaatg

SEQ ID NO: 29993 - DNA, 20 bp, synthetic construct
  source 1..20: mol_type = other DNA
gagaccatcttgatttaaat

SEQ ID NO: 29994 - DNA, 20 bp, synthetic construct
  source 1..20: mol_type = other DNA
ggagaccatcttgatttaaa

SEQ ID NO: 29995 - DNA, 20 bp, synthetic construct
  source 1..20: mol_type = other DNA
aggagaccatcttgatttaa

SEQ ID NO: 29996 - DNA, 20 bp, synthetic construct
  source 1..20: mol_type = other DNA
aaggagaccatcttgattta

SEQ ID NO: 29997 - DNA, 20 bp, synthetic construct
  source 1..20: mol_type = other DNA
gaaggagaccatcttgattt

SEQ ID NO: 29998 - DNA, 20 bp, synthetic construct
  source 1..20: mol_type = other DNA
ggaaggagaccatcttgatt

SEQ ID NO: 29999 - DNA, 20 bp, synthetic construct
  source 1..20: mol_type = other DNA
aggaaggagaccatcttgat

SEQ ID NO: 30000 - DNA, 20 bp, synthetic construct
  source 1..20: mol_type = other DNA
gaggaaggagaccatcttga

SEQ ID NO: 30001 - DNA, 20 bp, synthetic construct
  source 1..20: mol_type = other DNA
tgaggaaggagaccatcttg

SEQ ID NO: 30002 - DNA, 20 bp, synthetic construct
  source 1..20: mol_type = other DNA
gtgaggaaggagaccatctt

SEQ ID NO: 30003 - DNA, 20 bp, synthetic construct
  source 1..20: mol_type = other DNA
agtgaggaaggagaccatct

SEQ ID NO: 30004 - DNA, 20 bp, synthetic construct
  source 1..20: mol_type = other DNA
cagtgaggaaggagaccatc

SEQ ID NO: 30005 - DNA, 20 bp, synthetic construct
  source 1..20: mol_type = other DNA
gcagtgaggaaggagaccat

SEQ ID NO: 30006 - DNA, 20 bp, synthetic construct
  source 1..20: mol_type = other DNA
agcagtgaggaaggagacca

SEQ ID NO: 30007 - DNA, 20 bp, synthetic construct
  source 1..20: mol_type = other DNA
aagcagtgaggaaggagacc

SEQ ID NO: 30008 - DNA, 20 bp, synthetic construct
  source 1..20: mol_type = other DNA
caagcagtgaggaaggagac

SEQ ID NO: 30009 - DNA, 20 bp, synthetic construct
  source 1..20: mol_type = other DNA
acaagcagtgaggaaggaga

SEQ ID NO: 30010 - DNA, 20 bp, synthetic construct
  source 1..20: mol_type = other DNA
cacaagcagtgaggaaggag

SEQ ID NO: 30011 - DNA, 20 bp, synthetic construct
  source 1..20: mol_type = other DNA
ccacaagcagtgaggaagga

SEQ ID NO: 30012 - DNA, 20 bp, synthetic construct
  source 1..20: mol_type = other DNA
tccacaagcagtgaggaagg

SEQ ID NO: 30013 - DNA, 20 bp, synthetic construct
  source 1..20: mol_type = other DNA
ctccacaagcagtgaggaag

SEQ ID NO: 30014 - DNA, 20 bp, synthetic construct
  source 1..20: mol_type = other DNA
cctccacaagcagtgaggaa

SEQ ID NO: 30015 - DNA, 20 bp, synthetic construct
  source 1..20: mol_type = other DNA
acctccacaagcagtgagga

SEQ ID NO: 30016 - DNA, 20 bp, synthetic construct
  source 1..20: mol_type = other DNA
gacctccacaagcagtgagg

SEQ ID NO: 30017 - DNA, 20 bp, synthetic construct
  source 1..20: mol_type = other DNA
ggacctccacaagcagtgag

SEQ ID NO: 30018 - DNA, 20 bp, synthetic construct
  source 1..20: mol_type = other DNA
tggacctccacaagcagtga

SEQ ID NO: 30019 - DNA, 20 bp, synthetic construct
  source 1..20: mol_type = other DNA
ctggacctccacaagcagtg

SEQ ID NO: 30020 - DNA, 20 bp, synthetic construct
  source 1..20: mol_type = other DNA
actggacctccacaagcagt

SEQ ID NO: 30021 - DNA, 20 bp, synthetic construct
  source 1..20: mol_type = other DNA
cactggacctccacaagcag

SEQ ID NO: 30022 - DNA, 20 bp, synthetic construct
  source 1..20: mol_type = other DNA
gcactggacctccacaagca

SEQ ID NO: 30023 - DNA, 20 bp, synthetic construct
  source 1..20: mol_type = other DNA
ggcactggacctccacaagc

SEQ ID NO: 30024 - DNA, 20 bp, synthetic construct
  source 1..20: mol_type = other DNA
gggcactggacctccacaag

SEQ ID NO: 30025 - DNA, 20 bp, synthetic construct
  source 1..20: mol_type = other DNA
tgggcactggacctccacaa

SEQ ID NO: 30026 - DNA, 20 bp, synthetic construct
  source 1..20: mol_type = other DNA
ctgggcactggacctccaca

SEQ ID NO: 30027 - DNA, 20 bp, synthetic construct
  source 1..20: mol_type = other DNA
actgggcactggacctccac

SEQ ID NO: 30028 - DNA, 20 bp, synthetic construct
  source 1..20: mol_type = other DNA
cactgggcactggacctcca

SEQ ID NO: 30029 - DNA, 20 bp, synthetic construct
  source 1..20: mol_type = other DNA
acactgggcactggacctcc

SEQ ID NO: 30030 - DNA, 20 bp, synthetic construct
  source 1..20: mol_type = other DNA
gacactgggcactggacctc

SEQ ID NO: 30031 - DNA, 20 bp, synthetic construct
  source 1..20: mol_type = other DNA
agacactgggcactggacct

SEQ ID NO: 30032 - DNA, 20 bp, synthetic construct
  source 1..20: mol_type = other DNA
cagacactgggcactggacc

SEQ ID NO: 30033 - DNA, 20 bp, synthetic construct
  source 1..20: mol_type = other DNA
gcagacactgggcactggac

SEQ ID NO: 30034 - DNA, 20 bp, synthetic construct
  source 1..20: mol_type = other DNA
ggcagacactgggcactgga

SEQ ID NO: 30035 - DNA, 20 bp, synthetic construct
  source 1..20: mol_type = other DNA
aggcagacactgggcactgg

SEQ ID NO: 30036 - DNA, 20 bp, synthetic construct
  source 1..20: mol_type = other DNA
gaggcagacactgggcactg

SEQ ID NO: 30037 - DNA, 20 bp, synthetic construct
  source 1..20: mol_type = other DNA
agaggcagacactgggcact

SEQ ID NO: 30038 - DNA, 20 bp, synthetic construct
  source 1..20: mol_type = other DNA
aagaggcagacactgggcac

SEQ ID NO: 30039 - DNA, 20 bp, synthetic construct
  source 1..20: mol_type = other DNA
caagaggcagacactgggca

SEQ ID NO: 30040 - DNA, 20 bp, synthetic construct
  source 1..20: mol_type = other DNA
gcaagaggcagacactgggc

SEQ ID NO: 30041 - DNA, 20 bp, synthetic construct
  source 1..20: mol_type = other DNA
agcaagaggcagacactggg

SEQ ID NO: 30042 - DNA, 20 bp, synthetic construct
  source 1..20: mol_type = other DNA
aagcaagaggcagacactgg

SEQ ID NO: 30043 - DNA, 20 bp, synthetic construct
  source 1..20: mol_type = other DNA
caagcaagaggcagacactg

SEQ ID NO: 30044 - DNA, 20 bp, synthetic construct
  source 1..20: mol_type = other DNA
gcaagcaagaggcagacact

SEQ ID NO: 30045 - DNA, 20 bp, synthetic construct
  source 1..20: mol_type = other DNA
agcaagcaagaggcagacac

SEQ ID NO: 30046 - DNA, 20 bp, synthetic construct
  source 1..20: mol_type = other DNA
gagcaagcaagaggcagaca

SEQ ID NO: 30047 - DNA, 20 bp, synthetic construct
  source 1..20: mol_type = other DNA
ggagcaagcaagaggcagac

SEQ ID NO: 30048 - DNA, 20 bp, synthetic construct
  source 1..20: mol_type = other DNA
aggagcaagcaagaggcaga

SEQ ID NO: 30049 - DNA, 20 bp, synthetic construct
  source 1..20: mol_type = other DNA
gaggagcaagcaagaggcag

SEQ ID NO: 30050 - DNA, 20 bp, synthetic construct
  source 1..20: mol_type = other DNA
ggaggagcaagcaagaggca

SEQ ID NO: 30051 - DNA, 20 bp, synthetic construct
  source 1..20: mol_type = other DNA
tggaggagcaagcaagaggc

SEQ ID NO: 30052 - DNA, 20 bp, synthetic construct
  source 1..20: mol_type = other DNA
atggaggagcaagcaagagg

SEQ ID NO: 30053 - DNA, 20 bp, synthetic construct
  source 1..20: mol_type = other DNA
gatggaggagcaagcaagag

SEQ ID NO: 30054 - DNA, 20 bp, synthetic construct
  source 1..20: mol_type = other DNA
tgatggaggagcaagcaaga

SEQ ID NO: 30055 - DNA, 20 bp, synthetic construct
  source 1..20: mol_type = other DNA
atgatggaggagcaagcaag

SEQ ID NO: 30056 - DNA, 20 bp, synthetic construct
  source 1..20: mol_type = other DNA
aatgatggaggagcaagcaa

SEQ ID NO: 30057 - DNA, 20 bp, synthetic construct
  source 1..20: mol_type = other DNA
caatgatggaggagcaagca

SEQ ID NO: 30058 - DNA, 20 bp, synthetic construct
  source 1..20: mol_type = other DNA
acaatgatggaggagcaagc

SEQ ID NO: 30059 - DNA, 20 bp, synthetic construct
  source 1..20: mol_type = other DNA
aacaatgatggaggagcaag

SEQ ID NO: 30060 - DNA, 20 bp, synthetic construct
  source 1..20: mol_type = other DNA
gaacaatgatggaggagcaa

SEQ ID NO: 30061 - DNA, 20 bp, synthetic construct
  source 1..20: mol_type = other DNA
agaacaatgatggaggagca

SEQ ID NO: 30062 - DNA, 20 bp, synthetic construct
  source 1..20: mol_type = other DNA
cagaacaatgatggaggagc

SEQ ID NO: 30063 - DNA, 20 bp, synthetic construct
  source 1..20: mol_type = other DNA
gcagaacaatgatggaggag

SEQ ID NO: 30064 - DNA, 20 bp, synthetic construct
  source 1..20: mol_type = other DNA
ggcagaacaatgatggagga

SEQ ID NO: 30065 - DNA, 20 bp, synthetic construct
  source 1..20: mol_type = other DNA
tggcagaacaatgatggagg

SEQ ID NO: 30066 - DNA, 20 bp, synthetic construct
  source 1..20: mol_type = other DNA
atggcagaacaatgatggag

SEQ ID NO: 30067 - DNA, 20 bp, synthetic construct
  source 1..20: mol_type = other DNA
aatggcagaacaatgatgga

SEQ ID NO: 30068 - DNA, 20 bp, synthetic construct
  source 1..20: mol_type = other DNA
gaatggcagaacaatgatgg

SEQ ID NO: 30069 - DNA, 20 bp, synthetic construct
  source 1..20: mol_type = other DNA
cgaatggcagaacaatgatg

SEQ ID NO: 30070 - DNA, 20 bp, synthetic construct
  source 1..20: mol_type = other DNA
tcgaatggcagaacaatgat

SEQ ID NO: 30071 - DNA, 20 bp, synthetic construct
  source 1..20: mol_type = other DNA
ctcgaatggcagaacaatga

SEQ ID NO: 30072 - DNA, 20 bp, synthetic construct
  source 1..20: mol_type = other DNA
tctcgaatggcagaacaatg

SEQ ID NO: 30073 - DNA, 20 bp, synthetic construct
  source 1..20: mol_type = other DNA
atctcgaatggcagaacaat

SEQ ID NO: 30074 - DNA, 20 bp, synthetic construct
  source 1..20: mol_type = other DNA
gatctcgaatggcagaacaa

SEQ ID NO: 30075 - DNA, 20 bp, synthetic construct
  source 1..20: mol_type = other DNA
ggatctcgaatggcagaaca

SEQ ID NO: 30076 - DNA, 20 bp, synthetic construct
  source 1..20: mol_type = other DNA
aggatctcgaatggcagaac

SEQ ID NO: 30077 - DNA, 20 bp, synthetic construct
  source 1..20: mol_type = other DNA
gaggatctcgaatggcagaa

SEQ ID NO: 30078 - DNA, 20 bp, synthetic construct
  source 1..20: mol_type = other DNA
tgaggatctcgaatggcaga

SEQ ID NO: 30079 - DNA, 20 bp, synthetic construct
  source 1..20: mol_type = other DNA
atgaggatctcgaatggcag

SEQ ID NO: 30080 - DNA, 20 bp, synthetic construct
  source 1..20: mol_type = other DNA
tatgaggatctcgaatggca

SEQ ID NO: 30081 - DNA, 20 bp, synthetic construct
  source 1..20: mol_type = other DNA
gtatgaggatctcgaatggc

SEQ ID NO: 30082 - DNA, 20 bp, synthetic construct
  source 1..20: mol_type = other DNA
agtatgaggatctcgaatgg

SEQ ID NO: 30083 - DNA, 20 bp, synthetic construct
  source 1..20: mol_type = other DNA
aagtatgaggatctcgaatg

SEQ ID NO: 30084 - DNA, 20 bp, synthetic construct
  source 1..20: mol_type = other DNA
taagtatgaggatctcgaat

SEQ ID NO: 30085 - DNA, 20 bp, synthetic construct
  source 1..20: mol_type = other DNA
gtaagtatgaggatctcgaa

SEQ ID NO: 30086 - DNA, 20 bp, synthetic construct
  source 1..20: mol_type = other DNA
ggtaagtatgaggatctcga

SEQ ID NO: 30087 - DNA, 20 bp, synthetic construct
  source 1..20: mol_type = other DNA
gggtaagtatgaggatctcg

SEQ ID NO: 30088 - DNA, 20 bp, synthetic construct
  source 1..20: mol_type = other DNA
agggtaagtatgaggatctc

SEQ ID NO: 30089 - DNA, 20 bp, synthetic construct
  source 1..20: mol_type = other DNA
aagggtaagtatgaggatct

SEQ ID NO: 30090 - DNA, 20 bp, synthetic construct
  source 1..20: mol_type = other DNA
aaagggtaagtatgaggatc

SEQ ID NO: 30091 - DNA, 20 bp, synthetic construct
  source 1..20: mol_type = other DNA
taaagggtaagtatgaggat

SEQ ID NO: 30092 - DNA, 20 bp, synthetic construct
  source 1..20: mol_type = other DNA
ttaaagggtaagtatgagga

SEQ ID NO: 30093 - DNA, 20 bp, synthetic construct
  source 1..20: mol_type = other DNA
cttaaagggtaagtatgagg

SEQ ID NO: 30094 - DNA, 20 bp, synthetic construct
  source 1..20: mol_type = other DNA
tcttaaagggtaagtatgag

SEQ ID NO: 30095 - DNA, 20 bp, synthetic construct
  source 1..20: mol_type = other DNA
atcttaaagggtaagtatga

SEQ ID NO: 30096 - DNA, 20 bp, synthetic construct
  source 1..20: mol_type = other DNA
gatcttaaagggtaagtatg

SEQ ID NO: 30097 - DNA, 20 bp, synthetic construct
  source 1..20: mol_type = other DNA
agatcttaaagggtaagtat

SEQ ID NO: 30098 - DNA, 20 bp, synthetic construct
  source 1..20: mol_type = other DNA
tagatcttaaagggtaagta

SEQ ID NO: 30099 - DNA, 20 bp, synthetic construct
  source 1..20: mol_type = other DNA
ctagatcttaaagggtaagt

SEQ ID NO: 30100 - DNA, 20 bp, synthetic construct
  source 1..20: mol_type = other DNA
gctagatcttaaagggtaag

SEQ ID NO: 30101 - DNA, 20 bp, synthetic construct
  source 1..20: mol_type = other DNA
ggctagatcttaaagggtaa

SEQ ID NO: 30102 - DNA, 20 bp, synthetic construct
  source 1..20: mol_type = other DNA
gggctagatcttaaagggta

SEQ ID NO: 30103 - DNA, 20 bp, synthetic construct
  source 1..20: mol_type = other DNA
tgggctagatcttaaagggt

SEQ ID NO: 30104 - DNA, 20 bp, synthetic construct
  source 1..20: mol_type = other DNA
ttgggctagatcttaaaggg

SEQ ID NO: 30105 - DNA, 20 bp, synthetic construct
  source 1..20: mol_type = other DNA
tttgggctagatcttaaagg

SEQ ID NO: 30106 - DNA, 20 bp, synthetic construct
  source 1..20: mol_type = other DNA
atttgggctagatcttaaag

SEQ ID NO: 30107 - DNA, 20 bp, synthetic construct
  source 1..20: mol_type = other DNA
aatttgggctagatcttaaa

SEQ ID NO: 30108 - DNA, 20 bp, synthetic construct
  source 1..20: mol_type = other DNA
aaatttgggctagatcttaa

SEQ ID NO: 30109 - DNA, 20 bp, synthetic construct
  source 1..20: mol_type = other DNA
aaaatttgggctagatctta

SEQ ID NO: 30110 - DNA, 20 bp, synthetic construct
  source 1..20: mol_type = other DNA
gaaaatttgggctagatctt

SEQ ID NO: 30111 - DNA, 20 bp, synthetic construct
  source 1..20: mol_type = other DNA
ggaaaatttgggctagatct

SEQ ID NO: 30112 - DNA, 20 bp, synthetic construct
  source 1..20: mol_type = other DNA
tggaaaatttgggctagatc

SEQ ID NO: 30113 - DNA, 20 bp, synthetic construct
  source 1..20: mol_type = other DNA
atggaaaatttgggctagat

SEQ ID NO: 30114 - DNA, 20 bp, synthetic construct
  source 1..20: mol_type = other DNA
catggaaaatttgggctaga

SEQ ID NO: 30115 - DNA, 20 bp, synthetic construct
  source 1..20: mol_type = other DNA
tcatggaaaatttgggctag

SEQ ID NO: 30116 - DNA, 20 bp, synthetic construct
  source 1..20: mol_type = other DNA
ttcatggaaaatttgggcta

SEQ ID NO: 30117 - DNA, 20 bp, synthetic construct
  source 1..20: mol_type = other DNA
tttcatggaaaatttgggct

SEQ ID NO: 30118 - DNA, 20 bp, synthetic construct
  source 1..20: mol_type = other DNA
gtttcatggaaaatttgggc

SEQ ID NO: 30119 - DNA, 20 bp, synthetic construct
  source 1..20: mol_type = other DNA
agtttcatggaaaatttggg

SEQ ID NO: 30120 - DNA, 20 bp, synthetic construct
  source 1..20: mol_type = other DNA
tagtttcatggaaaatttgg

SEQ ID NO: 30121 - DNA, 20 bp, synthetic construct
  source 1..20: mol_type = other DNA
ttagtttcatggaaaatttg

SEQ ID NO: 30122 - DNA, 20 bp, synthetic construct
  source 1..20: mol_type = other DNA
attagtttcatggaaaattt

SEQ ID NO: 30123 - DNA, 20 bp, synthetic construct
  source 1..20: mol_type = other DNA
aattagtttcatggaaaatt

SEQ ID NO: 30124 - DNA, 20 bp, synthetic construct
  source 1..20: mol_type = other DNA
gaattagtttcatggaaaat

SEQ ID NO: 30125 - DNA, 20 bp, synthetic construct
  source 1..20: mol_type = other DNA
agaattagtttcatggaaaa

SEQ ID NO: 30126 - DNA, 20 bp, synthetic construct
  source 1..20: mol_type = other DNA
tagaattagtttcatggaaa

SEQ ID NO: 30127 - DNA, 20 bp, synthetic construct
  source 1..20: mol_type = other DNA
ttagaattagtttcatggaa

SEQ ID NO: 30128 - DNA, 20 bp, synthetic construct
  source 1..20: mol_type = other DNA
attagaattagtttcatgga

SEQ ID NO: 30129 - DNA, 20 bp, synthetic construct
  source 1..20: mol_type = other DNA
tattagaattagtttcatgg

SEQ ID NO: 30130 - DNA, 20 bp, synthetic construct
  source 1..20: mol_type = other DNA
ttattagaattagtttcatg

SEQ ID NO: 30131 - DNA, 20 bp, synthetic construct
  source 1..20: mol_type = other DNA
attattagaattagtttcat

SEQ ID NO: 30132 - DNA, 20 bp, synthetic construct
  source 1..20: mol_type = other DNA
aattattagaattagtttca

SEQ ID NO: 30133 - DNA, 20 bp, synthetic construct
  source 1..20: mol_type = other DNA
taattattagaattagtttc

SEQ ID NO: 30134 - DNA, 20 bp, synthetic construct
  source 1..20: mol_type = other DNA
ttaattattagaattagttt

SEQ ID NO: 30135 - DNA, 20 bp, synthetic construct
  source 1..20: mol_type = other DNA
tttaattattagaattagtt

SEQ ID NO: 30136 - DNA, 20 bp, synthetic construct
  source 1..20: mol_type = other DNA
ttttaattattagaattagt

SEQ ID NO: 30137 - DNA, 20 bp, synthetic construct
  source 1..20: mol_type = other DNA
tttttaattattagaattag

SEQ ID NO: 30138 - DNA, 20 bp, synthetic construct
  source 1..20: mol_type = other DNA
gtttttaattattagaatta

SEQ ID NO: 30139 - DNA, 20 bp, synthetic construct
  source 1..20: mol_type = other DNA
agtttttaattattagaatt

SEQ ID NO: 30140 - DNA, 20 bp, synthetic construct
  source 1..20: mol_type = other DNA
aagtttttaattattagaat

SEQ ID NO: 30141 - DNA, 20 bp, synthetic construct
  source 1..20: mol_type = other DNA
gaagtttttaattattagaa

SEQ ID NO: 30142 - DNA, 20 bp, synthetic construct
  source 1..20: mol_type = other DNA
ggaagtttttaattattaga

SEQ ID NO: 30143 - DNA, 20 bp, synthetic construct
  source 1..20: mol_type = other DNA
aggaagtttttaattattag

SEQ ID NO: 30144 - DNA, 20 bp, synthetic construct
  source 1..20: mol_type = other DNA
caggaagtttttaattatta

SEQ ID NO: 30145 - DNA, 20 bp, synthetic construct
  source 1..20: mol_type = other DNA
acaggaagtttttaattatt

SEQ ID NO: 30146 - DNA, 20 bp, synthetic construct
  source 1..20: mol_type = other DNA
tacaggaagtttttaattat

SEQ ID NO: 30147 - DNA, 20 bp, synthetic construct
  source 1..20: mol_type = other DNA
ctacaggaagtttttaatta

SEQ ID NO: 30148 - DNA, 20 bp, synthetic construct
  source 1..20: mol_type = other DNA
tctacaggaagtttttaatt

SEQ ID NO: 30149 - DNA, 20 bp, synthetic construct
  source 1..20: mol_type = other DNA
ttctacaggaagtttttaat

SEQ ID NO: 30150 - DNA, 20 bp, synthetic construct
  source 1..20: mol_type = other DNA
gttctacaggaagtttttaa

SEQ ID NO: 30151 - DNA, 20 bp, synthetic construct
  source 1..20: mol_type = other DNA
agttctacaggaagttttta

SEQ ID NO: 30152 - DNA, 20 bp, synthetic construct
  source 1..20: mol_type = other DNA
aagttctacaggaagttttt

SEQ ID NO: 30153 - DNA, 20 bp, synthetic construct
  source 1..20: mol_type = other DNA
taagttctacaggaagtttt

SEQ ID NO: 30154 - DNA, 20 bp, synthetic construct
  source 1..20: mol_type = other DNA
ttaagttctacaggaagttt

SEQ ID NO: 30155 - DNA, 20 bp, synthetic construct
  source 1..20: mol_type = other DNA
gttaagttctacaggaagtt

SEQ ID NO: 30156 - DNA, 20 bp, synthetic construct
  source 1..20: mol_type = other DNA
agttaagttctacaggaagt

SEQ ID NO: 30157 - DNA, 20 bp, synthetic construct
  source 1..20: mol_type = other DNA
aagttaagttctacaggaag

SEQ ID NO: 30158 - DNA, 20 bp, synthetic construct
  source 1..20: mol_type = other DNA
aaagttaagttctacaggaa

SEQ ID NO: 30159 - DNA, 20 bp, synthetic construct
  source 1..20: mol_type = other DNA
caaagttaagttctacagga

SEQ ID NO: 30160 - DNA, 20 bp, synthetic construct
  source 1..20: mol_type = other DNA
acaaagttaagttctacagg

SEQ ID NO: 30161 - DNA, 20 bp, synthetic construct
  source 1..20: mol_type = other DNA
gacaaagttaagttctacag

SEQ ID NO: 30162 - DNA, 20 bp, synthetic construct
  source 1..20: mol_type = other DNA
agacaaagttaagttctaca

SEQ ID NO: 30163 - DNA, 20 bp, synthetic construct
  source 1..20: mol_type = other DNA
tagacaaagttaagttctac

SEQ ID NO: 30164 - DNA, 20 bp, synthetic construct
  source 1..20: mol_type = other DNA
ctagacaaagttaagttcta

SEQ ID NO: 30165 - DNA, 20 bp, synthetic construct
  source 1..20: mol_type = other DNA
actagacaaagttaagttct

SEQ ID NO: 30166 - DNA, 20 bp, synthetic construct
  source 1..20: mol_type = other DNA
tactagacaaagttaagttc

SEQ ID NO: 30167 - DNA, 20 bp, synthetic construct
  source 1..20: mol_type = other DNA
gtactagacaaagttaagtt

SEQ ID NO: 30168 - DNA, 20 bp, synthetic construct
  source 1..20: mol_type = other DNA
tgtactagacaaagttaagt

SEQ ID NO: 30169 - DNA, 20 bp, synthetic construct
  source 1..20: mol_type = other DNA
ttgtactagacaaagttaag

SEQ ID NO: 30170 - DNA, 20 bp, synthetic construct
  source 1..20: mol_type = other DNA
cttgtactagacaaagttaa

SEQ ID NO: 30171 - DNA, 20 bp, synthetic construct
  source 1..20: mol_type = other DNA
acttgtactagacaaagtta

SEQ ID NO: 30172 - DNA, 20 bp, synthetic construct
  source 1..20: mol_type = other DNA
aacttgtactagacaaagtt

SEQ ID NO: 30173 - DNA, 20 bp, synthetic construct
  source 1..20: mol_type = other DNA
taacttgtactagacaaagt

SEQ ID NO: 30174 - DNA, 20 bp, synthetic construct
  source 1..20: mol_type = other DNA
ctaacttgtactagacaaag

SEQ ID NO: 30175 - DNA, 20 bp, synthetic construct
  source 1..20: mol_type = other DNA
gctaacttgtactagacaaa

SEQ ID NO: 30176 - DNA, 20 bp, synthetic construct
  source 1..20: mol_type = other DNA
agctaacttgtactagacaa

SEQ ID NO: 30177 - DNA, 20 bp, synthetic construct
  source 1..20: mol_type = other DNA
aagctaacttgtactagaca

SEQ ID NO: 30178 - DNA, 20 bp, synthetic construct
  source 1..20: mol_type = other DNA
aaagctaacttgtactagac

SEQ ID NO: 30179 - DNA, 20 bp, synthetic construct
  source 1..20: mol_type = other DNA
gaaagctaacttgtactaga

SEQ ID NO: 30180 - DNA, 20 bp, synthetic construct
  source 1..20: mol_type = other DNA
agaaagctaacttgtactag

SEQ ID NO: 30181 - DNA, 20 bp, synthetic construct
  source 1..20: mol_type = other DNA
aagaaagctaacttgtacta

SEQ ID NO: 30182 - DNA, 20 bp, synthetic construct
  source 1..20: mol_type = other DNA
taagaaagctaacttgtact

SEQ ID NO: 30183 - DNA, 20 bp, synthetic construct
  source 1..20: mol_type = other DNA
ataagaaagctaacttgtac

SEQ ID NO: 30184 - DNA, 20 bp, synthetic construct
  source 1..20: mol_type = other DNA
aataagaaagctaacttgta

SEQ ID NO: 30185 - DNA, 20 bp, synthetic construct
  source 1..20: mol_type = other DNA
gaataagaaagctaacttgt

SEQ ID NO: 30186 - DNA, 20 bp, synthetic construct
  source 1..20: mol_type = other DNA
tgaataagaaagctaacttg

SEQ ID NO: 30187 - DNA, 20 bp, synthetic construct
  source 1..20: mol_type = other DNA
ctgaataagaaagctaactt

SEQ ID NO: 30188 - DNA, 20 bp, synthetic construct
  source 1..20: mol_type = other DNA
actgaataagaaagctaact

SEQ ID NO: 30189 - DNA, 20 bp, synthetic construct
  source 1..20: mol_type = other DNA
tactgaataagaaagctaac

SEQ ID NO: 30190 - DNA, 20 bp, synthetic construct
  source 1..20: mol_type = other DNA
ctactgaataagaaagctaa

SEQ ID NO: 30191 - DNA, 20 bp, synthetic construct
  source 1..20: mol_type = other DNA
actactgaataagaaagcta

SEQ ID NO: 30192 - DNA, 20 bp, synthetic construct
  source 1..20: mol_type = other DNA
tactactgaataagaaagct

SEQ ID NO: 30193 - DNA, 20 bp, synthetic construct
  source 1..20: mol_type = other DNA
ctactactgaataagaaagc

SEQ ID NO: 30194 - DNA, 20 bp, synthetic construct
  source 1..20: mol_type = other DNA
gctactactgaataagaaag

SEQ ID NO: 30195 - DNA, 20 bp, synthetic construct
  source 1..20: mol_type = other DNA
agctactactgaataagaaa

SEQ ID NO: 30196 - DNA, 20 bp, synthetic construct
  source 1..20: mol_type = other DNA
aagctactactgaataagaa

SEQ ID NO: 30197 - DNA, 20 bp, synthetic construct
  source 1..20: mol_type = other DNA
taagctactactgaataaga

SEQ ID NO: 30198 - DNA, 20 bp, synthetic construct
  source 1..20: mol_type = other DNA
gtaagctactactgaataag

SEQ ID NO: 30199 - DNA, 20 bp, synthetic construct
  source 1..20: mol_type = other DNA
agtaagctactactgaataa

SEQ ID NO: 30200 - DNA, 20 bp, synthetic construct
  source 1..20: mol_type = other DNA
tagtaagctactactgaata

SEQ ID NO: 30201 - DNA, 20 bp, synthetic construct
  source 1..20: mol_type = other DNA
atagtaagctactactgaat

SEQ ID NO: 30202 - DNA, 20 bp, synthetic construct
  source 1..20: mol_type = other DNA
tatagtaagctactactgaa

SEQ ID NO: 30203 - DNA, 20 bp, synthetic construct
  source 1..20: mol_type = other DNA
ttatagtaagctactactga

(The sequence listing continues in the following parts.)